United States Patent Application Publication US 2005/0244851 A1 - sequence listing, part 146

SEQ ID NO: 5701170 - DNA, 25 bp, Homo sapien
tgcaacactttattgggaaagattt

SEQ ID NO: 5701171 - DNA, 25 bp, Homo sapien
gcggcaatgcagccgcactcggcgg

SEQ ID NO: 5701172 - DNA, 25 bp, Homo sapien
gccgaagagcggggccggccaggcg

SEQ ID NO: 5701173 - DNA, 25 bp, Homo sapien
tgcaggtcctggacttcactggcca

SEQ ID NO: 5701174 - DNA, 25 bp, Homo sapien
atagtcatactccaaggaagccgcc

SEQ ID NO: 5701175 - DNA, 25 bp, Homo sapien
cccagggtgggccccttgctgaagc

SEQ ID NO: 5701176 - DNA, 25 bp, Homo sapien
aaagtggagcgaaagacacaaggaa

SEQ ID NO: 5701177 - DNA, 25 bp, Homo sapien
tgttgcggatggtctcatagtcata

SEQ ID NO: 5701178 - DNA, 25 bp, Homo sapien
gcgggcgggcagcgggcgggcgtag

SEQ ID NO: 5701179 - DNA, 25 bp, Homo sapien
ctccagccggccctcggcagccagg

SEQ ID NO: 5701180 - DNA, 25 bp, Homo sapien
tgctgccttccgccggctggggctg

SEQ ID NO: 5701181 - DNA, 25 bp, Homo sapien
tgagctgctcgccgggcaggagggg

SEQ ID NO: 5701182 - DNA, 25 bp, Homo sapien
ggctcagatggaagccatgggacgg

SEQ ID NO: 5701183 - DNA, 25 bp, Homo sapien
actgcaccgtcatgttccagtaccg

SEQ ID NO: 5701184 - DNA, 25 bp, Homo sapien
gaggccgtgccagtaggcgctcagc

SEQ ID NO: 5701185 - DNA, 25 bp, Homo sapien
atactccaaggaagccgccttctcc

SEQ ID NO: 5701186 - DNA, 25 bp, Homo sapien
tgtctccatcagggagggcacgtcg

SEQ ID NO: 5701187 - DNA, 25 bp, Homo sapien
atggtccaggcgctccgcaggacat

SEQ ID NO: 5701188 - DNA, 25 bp, Homo sapien
tccttcctctgggccagatgcaggt

SEQ ID NO: 5701189 - DNA, 25 bp, Homo sapien
ggctgactccagccggccctcggca

SEQ ID NO: 5701190 - DNA, 25 bp, Homo sapien
cccgggtggaggccgtgccagtagg

SEQ ID NO: 5701191 - DNA, 25 bp, Homo sapien
tactcctcccggagcttctccgggg

SEQ ID NO: 5701192 - DNA, 25 bp, Homo sapien
ccagggccaggaagtggatacagaa

SEQ ID NO: 5701193 - DNA, 25 bp, Homo sapien
cgaagaagacggggatcatgtagaa

SEQ ID NO: 5701194 - DNA, 25 bp, Homo sapien
aacgggcaggtgcgctcttgtagat

SEQ ID NO: 5701195 - DNA, 25 bp, Homo sapien
gctggggggtgggcattggagggtg

SEQ ID NO: 5701196 - DNA, 25 bp, Homo sapien
ggtgggctgggatgctgccttccgc

SEQ ID NO: 5701197 - DNA, 25 bp, Homo sapien
gcaaagtgtgggggccacaggtgaa

SEQ ID NO: 5701198 - DNA, 25 bp, Homo sapien
agcttactcctcccggagcttctcc

SEQ ID NO: 5701199 - DNA, 25 bp, Homo sapien
ccagctggcagagggagcgtcgtga

SEQ ID NO: 5701200 - DNA, 25 bp, Homo sapien
gaagtggatacagaagtagatggag

SEQ ID NO: 5701201 - DNA, 25 bp, Homo sapien
cgggcgtagaaggcgtcctcgcgca

SEQ ID NO: 5701202 - DNA, 25 bp, Homo sapien
gggcgggcagcgggcgggcgtagaa

SEQ ID NO: 5701203 - DNA, 25 bp, Homo sapien
gcttcagcgtcagcagcagctggac

SEQ ID NO: 5701204 - DNA, 25 bp, Homo sapien
tagctgtagctgagtgtctccatca

SEQ ID NO: 5701205 - DNA, 25 bp, Homo sapien
tgcttcagttgcaggcagggtattt

SEQ ID NO: 5701206 - DNA, 25 bp, Homo sapien
tggacggcattggtgaagggcgtgg

SEQ ID NO: 5701207 - DNA, 25 bp, Homo sapien
ctctccaggaccctctccaaggtaa

SEQ ID NO: 5701208 - DNA, 25 bp, Homo sapien
ccgcaggacataggaacgggcaggt

SEQ ID NO: 5701209 - DNA, 25 bp, Homo sapien
ctggacaatactttgattttgtagg

SEQ ID NO: 5701210 - DNA, 25 bp, Homo sapien
aagacacaaggaagaggcttcccac

SEQ ID NO: 5701211 - DNA, 25 bp, Homo sapien
tgccagggccaggaagtggatacag

SEQ ID NO: 5701212 - DNA, 25 bp, Homo sapien
gccaagcgatgagaagagggcgcca

SEQ ID NO: 5701213 - DNA, 25 bp, Homo sapien
gggctgccagggccaggaagtggat

SEQ ID NO: 5701214 - DNA, 25 bp, Homo sapien
gcagcagctggacggcattggtgaa

SEQ ID NO: 5701215 - DNA, 25 bp, Homo sapien
ataggagaaagtccaggccagagcc

SEQ ID NO: 5701216 - DNA, 25 bp, Homo sapien
tacagaagtagatggaggcccagta

SEQ ID NO: 5701217 - DNA, 25 bp, Homo sapien
gctttggcggccacggggtaggccc

SEQ ID NO: 5701218 - DNA, 25 bp, Homo sapien
tctgcttcagttgcaggcagggtat

SEQ ID NO: 5701219 - DNA, 25 bp, Homo sapien
cagggtgggccccttgctgaagcct

SEQ ID NO: 5701220 - DNA, 25 bp, Homo sapien
aggcttcccactcccaggacctgcc

SEQ ID NO: 5701221 - DNA, 25 bp, Homo sapien
caatgcagccgcactcggcggcaat

SEQ ID NO: 5701222 - DNA, 25 bp, Homo sapien
cagcccgcttgccgccgcagctccg

SEQ ID NO: 5701223 - DNA, 25 bp, Homo sapien
aagaaccactagatacgtccattct

SEQ ID NO: 5701224 - DNA, 25 bp, Homo sapien
ccctttgtgaaatgggaagcttatg

SEQ ID NO: 5701225 - DNA, 25 bp, Homo sapien
cgagcagtcccagcccgcttgccgc

SEQ ID NO: 5701226 - DNA, 25 bp, Homo sapien
cacgtcgggcagcagccccagggtg

SEQ ID NO: 5701227 - DNA, 25 bp, Homo sapien
gaagccatgggacggccgtccccag

SEQ ID NO: 5701228 - DNA, 25 bp, Homo sapien
ccacaggtgaacagggtgagcccca

SEQ ID NO: 5701229 - DNA, 25 bp, Homo sapien
cggcagccaggcacagcgggatggt

SEQ ID NO: 5701230 - DNA, 25 bp, Homo sapien
tccccaggcccgcgcacccgcacct

SEQ ID NO: 5701231 - DNA, 25 bp, Homo sapien
ggaacgggcaggtgcgctcttgtag

SEQ ID NO: 5701232 - DNA, 25 bp, Homo sapien
ctgaagcctgaggccatttccttcc

SEQ ID NO: 5701233 - DNA, 25 bp, Homo sapien
cgctcttgtagatatactgcgccag

SEQ ID NO: 5701234 - DNA, 25 bp, Homo sapien
agcagggctgggcctgaatgagggc

SEQ ID NO: 5701235 - DNA, 25 bp, Homo sapien
tggggtcccgaggtggctcagatgg

SEQ ID NO: 5701236 - DNA, 25 bp, Homo sapien
gaagaacgggcctgtcatgattccc

SEQ ID NO: 5701237 - DNA, 25 bp, Homo sapien
ggacttcactggccaggctcaccag

SEQ ID NO: 5701238 - DNA, 25 bp, Homo sapien
tgtcatgattcccacgtagcagtag

SEQ ID NO: 5701239 - DNA, 25 bp, Homo sapien
ggaggctgagggctcggaagaacag

SEQ ID NO: 5701240 - DNA, 25 bp, Homo sapien
ttgccgccgcagctccggccacggg

SEQ ID NO: 5701241 - DNA, 25 bp, Homo sapien
gaaattctctccaggaccctctcca

SEQ ID NO: 5701242 - DNA, 25 bp, Homo sapien
tgcggtagcggaagaacgggcctgt

SEQ ID NO: 5701243 - DNA, 25 bp, Homo sapien
tagatatactgcgccagccaccact

SEQ ID NO: 5701244 - DNA, 25 bp, Homo sapien
cgatgagaagagggcgccaggagcg

SEQ ID NO: 5701245 - DNA, 25 bp, Homo sapien
aggtgagaggagagcaggaacagca

SEQ ID NO: 5701246 - DNA, 25 bp, Homo sapien
aggagtggaggtggcctctgggcag

SEQ ID NO: 5701247 - DNA, 25 bp, Homo sapien
gaggagacagcagcctggttcacag

SEQ ID NO: 5701248 - DNA, 25 bp, Homo sapien
gcagggctgactccagccggccctc

SEQ ID NO: 5701249 - DNA, 25 bp, Homo sapien
ggccaggaagtggatacagaagtag

SEQ ID NO: 5701250 - DNA, 25 bp, Homo sapien
gaagggcgtgggagtgggcaggccc

SEQ ID NO: 5701251 - DNA, 25 bp, Homo sapien
tttacacacggtgacctgtcatagg

SEQ ID NO: 5701252 - DNA, 25 bp, Homo sapien
tgggcaggcccaggaggctgagggc

SEQ ID NO: 5701253 - DNA, 25 bp, Homo sapien
ccttccgttttggggaagtgcagtg

SEQ ID NO: 5701254 - DNA, 25 bp, Homo sapien
ggctgggcactgccccggggaaggg

SEQ ID NO: 5701255 - DNA, 25 bp, Homo sapien
aggagcgctggggtcccgaggtggc

SEQ ID NO: 5701256 - DNA, 25 bp, Homo sapien
aggccagagccagggcgtggcagga

SEQ ID NO: 5701257 - DNA, 25 bp, Homo sapien
taggaacgggcaggtgcgctcttgt

SEQ ID NO: 5701258 - DNA, 25 bp, Homo sapien
ccatgggacggccgtccccaggccc

SEQ ID NO: 5701259 - DNA, 25 bp, Homo sapien
cagagggcagggaggacacccccgg

SEQ ID NO: 5701260 - DNA, 25 bp, Homo sapien
cttgtagatatactgcgccagccac

SEQ ID NO: 5701261 - DNA, 25 bp, Homo sapien
gaggagagcaggaacagcaggccga

SEQ ID NO: 5701262 - DNA, 25 bp, Homo sapien
ggagcaggggccagtgactcttgtc

SEQ ID NO: 5701263 - DNA, 25 bp, Homo sapien
agggcacgtcgggcagcagccccag

SEQ ID NO: 5701264 - DNA, 25 bp, Homo sapien
tccgaccccacattgtggatgcaaa

SEQ ID NO: 5701265 - DNA, 25 bp, Homo sapien
ccgtgccagtaggcgctcagcagca

SEQ ID NO: 5701266 - DNA, 25 bp, Homo sapien
cccccgggtctgcttcagttgcagg

SEQ ID NO: 5701267 - DNA, 25 bp, Homo sapien
cgcacccgcacctcagtttcccctt

SEQ ID NO: 5701268 - DNA, 25 bp, Homo sapien
cagagccagggcgtggcaggagcag

SEQ ID NO: 5701269 - DNA, 25 bp, Homo sapien
acagcgggatggtcaggaagctcag

SEQ ID NO: 5701270 - DNA, 25 bp, Homo sapien
catcgcgcacccgcacgcagaaatc

SEQ ID NO: 5701271 - DNA, 25 bp, Homo sapien
gaagccgatggggatggagataaga

SEQ ID NO: 5701272 - DNA, 25 bp, Homo sapien
gccccttccgttttggggaagtgca

SEQ ID NO: 5701273 - DNA, 25 bp, Homo sapien
caccactgcaccgtcatgttccagt

SEQ ID NO: 5701274 - DNA, 25 bp, Homo sapien
gcacccagtcccaggccttctggcc

SEQ ID NO: 5701275 - DNA, 25 bp, Homo sapien
tgttccagtaccgcatgccatcgcg

SEQ ID NO: 5701276 - DNA, 25 bp, Homo sapien
tcataggcgcgcatcttcaggaacc

SEQ ID NO: 5701277 - DNA, 25 bp, Homo sapien
ctccaggaccctctccaaggtaagg

SEQ ID NO: 5701278 - DNA, 25 bp, Homo sapien
aagccggcggcaatgcagccgcact

SEQ ID NO: 5701279 - DNA, 25 bp, Homo sapien
atgccatcgcgcacccgcacgcaga

SEQ ID NO: 5701280 - DNA, 25 bp, Homo sapien
tcggcggcaatccaggccacgtaga

SEQ ID NO: 5701281 - DNA, 25 bp, Homo sapien
ttgcggatggtctcatagtcatact

SEQ ID NO: 5701282 - DNA, 25 bp, Homo sapien
gtaggagtggaggtggcctctgggc

SEQ ID NO: 5701283 - DNA, 25 bp, Homo sapien
cgccaggagcgctggggtcccgagg

SEQ ID NO: 5701284 - DNA, 25 bp, Homo sapien
gtgacctgtcataggccaagcgatg

SEQ ID NO: 5701285 - DNA, 25 bp, Homo sapien
ggccagtgactcttgtctggacaat

SEQ ID NO: 5701286 - DNA, 25 bp, Homo sapien
gaattcccgggaccagctggcagag

SEQ ID NO: 5701287 - DNA, 25 bp, Homo sapien
caggaacagcaggccgaagagcggg

SEQ ID NO: 5701288 - DNA, 25 bp, Homo sapien
ttctctccaggaccctctccaaggt

SEQ ID NO: 5701289 - DNA, 25 bp, Homo sapien
ggttcacagaattcccgggaccagc

SEQ ID NO: 5701290 - DNA, 25 bp, Homo sapien
ggtctgagctgctcgccgggcagga

SEQ ID NO: 5701291 - DNA, 25 bp, Homo sapien
accagagaatgcaaagtgtgggggc

SEQ ID NO: 5701292 - DNA, 25 bp, Homo sapien
tagaaggcgtcctcgcgcacggcct

SEQ ID NO: 5701293 - DNA, 25 bp, Homo sapien
gggcagcagccccagggtgggcccc

SEQ ID NO: 5701294 - DNA, 25 bp, Homo sapien
gccccaaagccggcggcaatgcagc

SEQ ID NO: 5701295 - DNA, 25 bp, Homo sapien
acagcagcctggttcacagaattcc

SEQ ID NO: 5701296 - DNA, 25 bp, Homo sapien
ccggggaagggctgctccagccagt

SEQ ID NO: 5701297 - DNA, 25 bp, Homo sapien
ctccagccagtccaggtaggtgcgg

SEQ ID NO: 5701298 - DNA, 25 bp, Homo sapien
gagaatgcaaagtgtgggggccaca

SEQ ID NO: 5701299 - DNA, 25 bp, Homo sapien
atctgtgctgtagcagtcgatgttg

SEQ ID NO: 5701300 - DNA, 25 bp, Homo sapien
tggagggtggggccgcctccggccc

SEQ ID NO: 5701301 - DNA, 25 bp, Homo sapien
agaggcttcccactcccaggacctg

SEQ ID NO: 5701302 - DNA, 25 bp, Homo sapien
agccatgggacggccgtccccaggc

SEQ ID NO: 5701303 - DNA, 25 bp, Homo sapien
ggcccaggtcccgaggatggtgacc

SEQ ID NO: 5701304 - DNA, 25 bp, Homo sapien
ggaaggcgaagaagacggggatcat

SEQ ID NO: 5701305 - DNA, 25 bp, Homo sapien
ttccgttttggggaagtgcagtgct

SEQ ID NO: 5701306 - DNA, 25 bp, Homo sapien
cataggaacgggcaggtgcgctctt

SEQ ID NO: 5701307 - DNA, 25 bp, Homo sapien
cctgtcataggccaagcgatgagaa

SEQ ID NO: 5701308 - DNA, 25 bp, Homo sapien
ctggagcaggggccagtgactcttg

SEQ ID NO: 5701309 - DNA, 25 bp, Homo sapien
agatacgtccattcttcaggcgaca

SEQ ID NO: 5701310 - DNA, 25 bp, Homo sapien
gaagaggcttcccactcccaggacc

SEQ ID NO: 5701311 - DNA, 25 bp, Homo sapien
ggcgaagaagacggggatcatgtag

SEQ ID NO: 5701312 - DNA, 25 bp, Homo sapien
caaggaagccgccttctccggactg

SEQ ID NO: 5701313 - DNA, 25 bp, Homo sapien
gcaaagaaagggaatttgcccaaaa

SEQ ID NO: 5701314 - DNA, 25 bp, Homo sapien
gctggggaagaggaaattctctcca

SEQ ID NO: 5701315 - DNA, 25 bp, Homo sapien
ccctcggcagccaggcacagcggga

SEQ ID NO: 5701316 - DNA, 25 bp, Homo sapien
cgcaggctgggcactgccccgggga

SEQ ID NO: 5701317 - DNA, 25 bp, Homo sapien
agctggagcaggggccagtgactct

SEQ ID NO: 5701318 - DNA, 25 bp, Homo sapien
cagcctggttcacagaattcccggg

SEQ ID NO: 5701319 - DNA, 25 bp, Homo sapien
gaggcccagtaccgaagggtgtcgg

SEQ ID NO: 5701320 - DNA, 25 bp, Homo sapien
tggggaagtgcagtgctctctggat

SEQ ID NO: 5701321 - DNA, 25 bp, Homo sapien
agttgcaggcagggtatttagctgg

SEQ ID NO: 5701322 - DNA, 25 bp, Homo sapien
ggtctcatagtcatactccaaggaa

SEQ ID NO: 5701323 - DNA, 25 bp, Homo sapien
tgtagatatactgcgccagccacca

SEQ ID NO: 5701324 - DNA, 25 bp, Homo sapien
tcagggagggcacgtcgggcagcag

SEQ ID NO: 5701325 - DNA, 25 bp, Homo sapien
gccgccgcagctccggccacgggat

SEQ ID NO: 5701326 - DNA, 25 bp, Homo sapien
ggccggccaggcgcggcgcagcagg

SEQ ID NO: 5701327 - DNA, 25 bp, Homo sapien
catcagggagggcacgtcgggcagc

SEQ ID NO: 5701328 - DNA, 25 bp, Homo sapien
cggaagaacgggcctgtcatgattc

SEQ ID NO: 5701329 - DNA, 25 bp, Homo sapien
ccccgcagggctgactccagccggc

SEQ ID NO: 5701330 - DNA, 25 bp, Homo sapien
ggcgacatggtctgagctgctcgcc

SEQ ID NO: 5701331 - DNA, 25 bp, Homo sapien
cgcagcaggggccgcaggctgggca

SEQ ID NO: 5701332 - DNA, 25 bp, Homo sapien
ctgggatgctgccttccgccggctg

SEQ ID NO: 5701333 - DNA, 25 bp, Homo sapien
gaagtgcagtgctctctggataccc

SEQ ID NO: 5701334 - DNA, 25 bp, Homo sapien
gcgtcagcagcagctggacggcatt

SEQ ID NO: 5701335 - DNA, 25 bp, Homo sapien
gtaaggactctttctggggaggaga

SEQ ID NO: 5701336 - DNA, 25 bp, Homo sapien
ctgactccagccggccctcggcagc

SEQ ID NO: 5701337 - DNA, 25 bp, Homo sapien
agggctcggaagaacaggagatagg

SEQ ID NO: 5701338 - DNA, 25 bp, Homo sapien
cgcctccggcccgggctttggcggc

SEQ ID NO: 5701339 - DNA, 25 bp, Homo sapien
tatactgcgccagccaccactgcac

SEQ ID NO: 5701340 - DNA, 25 bp, Homo sapien
agaaatctgtgctgtagcagtcgat

SEQ ID NO: 5701341 - DNA, 25 bp, Homo sapien
agccgcccccgcagggctgactcca

SEQ ID NO: 5701342 - DNA, 25 bp, Homo sapien
atgcggaaggcgaagaagacgggga

SEQ ID NO: 5701343 - DNA, 25 bp, Homo sapien
gcatggtccaggcgctccgcaggac

SEQ ID NO: 5701344 - DNA, 25 bp, Homo sapien
ggagtgggcaggcccaggaggctga

SEQ ID NO: 5701345 - DNA, 25 bp, Homo sapien
ccagccggccctcggcagccaggca

SEQ ID NO: 5701346 - DNA, 25 bp, Homo sapien
gggcgtggcaggagcagggctgggc

SEQ ID NO: 5701347 - DNA, 25 bp, Homo sapien
cggactgctggggggtgggcattgg

SEQ ID NO: 5701348 - DNA, 25 bp, Homo sapien
tctggatacccagaagctggagcag

SEQ ID NO: 5701349 - DNA, 25 bp, Homo sapien
ttgcccaaaacccactgcccagggg

SEQ ID NO: 5701350 - DNA, 25 bp, Homo sapien
gagataagaagaaccactagatacg

SEQ ID NO: 5701351 - DNA, 25 bp, Homo sapien
tagaagaggcgggcgggcagcgggc

SEQ ID NO: 5701352 - DNA, 25 bp, Homo sapien
ccagtgactcttgtctggacaatac

SEQ ID NO: 5701353 - DNA, 25 bp, Homo sapien
ccccggggaagggctgctccagcca

SEQ ID NO: 5701354 - DNA, 25 bp, Homo sapien
ggtccaggcgctccgcaggacatag

SEQ ID NO: 5701355 - DNA, 25 bp, Homo sapien
cagcgggaagaggtgagaggagagc

SEQ ID NO: 5701356 - DNA, 25 bp, Homo sapien
aggctcaccagcttcagcgtcagca

SEQ ID NO: 5701357 - DNA, 25 bp, Homo sapien
gcgggcagcgggcgggcgtagaagg

SEQ ID NO: 5701358 - DNA, 25 bp, Homo sapien
caggtgcgctcttgtagatatactg

SEQ ID NO: 5701359 - DNA, 25 bp, Homo sapien
caccgtcatgttccagtaccgcatg

SEQ ID NO: 5701360 - DNA, 25 bp, Homo sapien
tgacagcttactcctcccggagctt

SEQ ID NO: 5701361 - DNA, 25 bp, Homo sapien
aacagcaggccgaagagcggggccg

SEQ ID NO: 5701362 - DNA, 25 bp, Homo sapien
tcccaggacctgcccccaagctccg

SEQ ID NO: 5701363 - DNA, 25 bp, Homo sapien
catgttccagtaccgcatgccatcg

SEQ ID NO: 5701364 - DNA, 25 bp, Homo sapien
tagtagcccgggtggaggccgtgcc

SEQ ID NO: 5701365 - DNA, 25 bp, Homo sapien
gtcctcgcgcacggcctccagcggg

SEQ ID NO: 5701366 - DNA, 25 bp, Homo sapien
cacccgcacctcagtttcccctttg

SEQ ID NO: 5701367 - DNA, 25 bp, Homo sapien
ccgcacgcagaaatctgtgctgtag

SEQ ID NO: 5701368 - DNA, 25 bp, Homo sapien
tttgtgcaacactttattgggaaag

SEQ ID NO: 5701369 - DNA, 25 bp, Homo sapien
tccggactgctggggggtgggcatt

SEQ ID NO: 5701370 - DNA, 25 bp, Homo sapien
gcgcatcttcaggaaccagtgcacc

SEQ ID NO: 5701371 - DNA, 25 bp, Homo sapien
aacgggcctgtcatgattcccacgt

SEQ ID NO: 5701372 - DNA, 25 bp, Homo sapien
agtagatggaggcccagtaccgaag

SEQ ID NO: 5701373 - DNA, 25 bp, Homo sapien
agacggggatcatgtagaagaggcg

SEQ ID NO: 5701374 - DNA, 25 bp, Homo sapien
aatccaggccacgtagaagcgcatg

SEQ ID NO: 5701375 - DNA, 25 bp, Homo sapien
tgtgcaacactttattgggaaagat

SEQ ID NO: 5701376 - DNA, 25 bp, Homo sapien
tcttgtctggacaatactttgattt

SEQ ID NO: 5701377 - DNA, 25 bp, Homo sapien
gggggtgggcattggagggtggggc

SEQ ID NO: 5701378 - DNA, 25 bp, Homo sapien
gggacggccgtccccaggcccgcgc

SEQ ID NO: 5701379 - DNA, 25 bp, Homo sapien
ttccttccaagtctgcaatattggt

SEQ ID NO: 5701380 - DNA, 25 bp, Homo sapien
cagggctgggcctgaatgagggccc

SEQ ID NO: 5701381 - DNA, 25 bp, Homo sapien
gcttgccgccgcagctccggccacg

SEQ ID NO: 5701382 - DNA, 25 bp, Homo sapien
atggtcaggaagctcaggtagtagc

SEQ ID NO: 5701383 - DNA, 25 bp, Homo sapien
cggggcaaggctggtgggctgggat

SEQ ID NO: 5701384 - DNA, 25 bp, Homo sapien
gaaatgggaagcttatgcttccttc

SEQ ID NO: 5701385 - DNA, 25 bp, Homo sapien
tagcagtcgatgttgcggatggtct

SEQ ID NO: 5701386 - DNA, 25 bp, Homo sapien
aaggcgaagaagacggggatcatgt

SEQ ID NO: 5701387 - DNA, 25 bp, Homo sapien
ggggccggccaggcgcggcgcagca

SEQ ID NO: 5701388 - DNA, 25 bp, Homo sapien
gggtgtcggccaaggagagcagcac

SEQ ID NO: 5701389 - DNA, 25 bp, Homo sapien
gatttacacacggtgacctgtcata

SEQ ID NO: 5701390 - DNA, 25 bp, Homo sapien
cgtcgggcagcagccccagggtggg

SEQ ID NO: 5701391 - DNA, 25 bp, Homo sapien
gggaagaggtgagaggagagcagga

SEQ ID NO: 5701392 - DNA, 25 bp, Homo sapien
gtccattcttcaggcgacatggtct

SEQ ID NO: 5701393 - DNA, 25 bp, Homo sapien
aagggtgtcggccaaggagagcagc

SEQ ID NO: 5701394 - DNA, 25 bp, Homo sapien
cctgaggccatttccttcctctggg

SEQ ID NO: 5701395 - DNA, 25 bp, Homo sapien
tggaggccgtgccagtaggcgctca

SEQ ID NO: 5701396 - DNA, 25 bp, Homo sapien
tttctggggaggagacagcagcctg

SEQ ID NO: 5701397 - DNA, 25 bp, Homo sapien
ctcctcccggagcttctccggggca

SEQ ID NO: 5701398 - DNA, 25 bp, Homo sapien
cagtgctctctggatacccagaagc

SEQ ID NO: 5701399 - DNA, 25 bp, Homo sapien
actttattgggaaagatttacacac

SEQ ID NO: 5701400 - DNA, 25 bp, Homo sapien
ggtagtagcccgggtggaggccgtg

SEQ ID NO: 5701401 - DNA, 25 bp, Homo sapien
gcggcgcagcaggggccgcaggctg

SEQ ID NO: 5701402 - DNA, 25 bp, Homo sapien
tgcccccaagctccgaccccacatt

SEQ ID NO: 5701403 - DNA, 25 bp, Homo sapien
ggcgggcgtagaaggcgtcctcgcg

SEQ ID NO: 5701404 - DNA, 25 bp, Homo sapien
ggtgagccccaggcccacagcggct

SEQ ID NO: 5701405 - DNA, 25 bp, Homo sapien
gtggatgcaaagaaagggaatttgc

SEQ ID NO: 5701406 - DNA, 25 bp, Homo sapien
tggagataagaagaaccactagata

SEQ ID NO: 5701407 - DNA, 25 bp, Homo sapien
acccgcacgcagaaatctgtgctgt

SEQ ID NO: 5701408 - DNA, 25 bp, Homo sapien
ggcggcaatccaggccacgtagaag

SEQ ID NO: 5701409 - DNA, 25 bp, Homo sapien
gcctggttcacagaattcccgggac

SEQ ID NO: 5701410 - DNA, 25 bp, Homo sapien
gactgctggggggtgggcattggag

SEQ ID NO: 5701411 - DNA, 25 bp, Homo sapien
gcattggtgaagggcgtgggagtgg

SEQ ID NO: 5701412 - DNA, 25 bp, Homo sapien
gggaggagacagcagcctggttcac

SEQ ID NO: 5701413 - DNA, 25 bp, Homo sapien
cccaggtcccgaggatggtgaccag

SEQ ID NO: 5701414 - DNA, 25 bp, Homo sapien
gaagaggcgggcgggcagcgggcgg

SEQ ID NO: 5701415 - DNA, 25 bp, Homo sapien
tgcgctcttgtagatatactgcgcc

SEQ ID NO: 5701416 - DNA, 25 bp, Homo sapien
tcccgggaccagctggcagagggag

SEQ ID NO: 5701417 - DNA, 25 bp, Homo sapien
agaggaagccgatggggatggagat

SEQ ID NO: 5701418 - DNA, 25 bp, Homo sapien
ccgaggatggtgaccagagaatgca

SEQ ID NO: 5701419 - DNA, 25 bp, Homo sapien
ccgcatgccatcgcgcacccgcacg

SEQ ID NO: 5701420 - DNA, 25 bp, Homo sapien
gccgagcagtcccagcccgcttgcc

SEQ ID NO: 5701421 - DNA, 25 bp, Homo sapien
agggtatttagctggggaagaggaa

SEQ ID NO: 5701422 - DNA, 25 bp, Homo sapien
gtccaggccagagccagggcgtggc

SEQ ID NO: 5701423 - DNA, 25 bp, Homo sapien
ctgccttccgccggctggggctgcc

SEQ ID NO: 5701424 - DNA, 25 bp, Homo sapien
tctcatagtcatactccaaggaagc

SEQ ID NO: 5701425 - DNA, 25 bp, Homo sapien
cggcggcaatgcagccgcactcggc

SEQ ID NO: 5701426 - DNA, 25 bp, Homo sapien
agggccaggaagtggatacagaagt

SEQ ID NO: 5701427 - DNA, 25 bp, Homo sapien
tggggatggagataagaagaaccac

SEQ ID NO: 5701428 - DNA, 25 bp, Homo sapien
gcatcttcaggaaccagtgcaccca

SEQ ID NO: 5701429 - DNA, 25 bp, Homo sapien
tcctggacttcactggccaggctca

SEQ ID NO: 5701430 - DNA, 25 bp, Homo sapien
gccatttccttcctctgggccagat

SEQ ID NO: 5701431 - DNA, 25 bp, Homo sapien
gggtcccgaggtggctcagatggaa

SEQ ID NO: 5701432 - DNA, 25 bp, Homo sapien
gccttctccggactgctggggggtg

SEQ ID NO: 5701433 - DNA, 25 bp, Homo sapien
cctgaatgagggcccaggtcccgag

SEQ ID NO: 5701434 - DNA, 25 bp, Homo sapien
ctgctcgccgggcaggaggggccga

SEQ ID NO: 5701435 - DNA, 25 bp, Homo sapien
gagtggaggtggcctctgggcagag

SEQ ID NO: 5701436 - DNA, 25 bp, Homo sapien
cagccaccactgcaccgtcatgttc

SEQ ID NO: 5701437 - DNA, 25 bp, Homo sapien
ccgcactcggcggcaatccaggcca

SEQ ID NO: 5701438 - DNA, 25 bp, Homo sapien
caggtagtagcccgggtggaggccg

SEQ ID NO: 5701439 - DNA, 25 bp, Homo sapien
ggtggaggccgtgccagtaggcgct

SEQ ID NO: 5701440 - DNA, 25 bp, Homo sapien
caggagcagggctgggcctgaatga

SEQ ID NO: 5701441 - DNA, 25 bp, Homo sapien
gccttccgccggctggggctgcccc

SEQ ID NO: 5701442 - DNA, 25 bp, Homo sapien
gctcgccgggcaggaggggccgagc

SEQ ID NO: 5701443 - DNA, 25 bp, Homo sapien
tctggccccctgggctcagccgccc

SEQ ID NO: 5701444 - DNA, 25 bp, Homo sapien
cgggtggaggccgtgccagtaggcg

SEQ ID NO: 5701445 - DNA, 25 bp, Homo sapien
aatactttgattttgtaggagtgga

SEQ ID NO: 5701446 - DNA, 25 bp, Homo sapien
tccggcccgggctttggcggccacg

SEQ ID NO: 5701447 - DNA, 25 bp, Homo sapien
agtgggcaggcccaggaggctgagg

SEQ ID NO: 5701448 - DNA, 25 bp, Homo sapien
acagggtgagccccaggcccacagc

SEQ ID NO: 5701449 - DNA, 25 bp, Homo sapien
ctcagatggaagccatgggacggcc

SEQ ID NO: 5701450 - DNA, 25 bp, Homo sapien
agccagtccaggtaggtgcggtagc

SEQ ID NO: 5701451 - DNA, 25 bp, Homo sapien
ccagtccaggtaggtgcggtagcgg

SEQ ID NO: 5701452 - DNA, 25 bp, Homo sapien
cagccccagggctgccagggccagg

SEQ ID NO: 5701453 - DNA, 25 bp, Homo sapien
tctgagctgctcgccgggcaggagg

SEQ ID NO: 5701454 - DNA, 25 bp, Homo sapien
cccgggtctgcttcagttgcaggca

SEQ ID NO: 5701455 - DNA, 25 bp, Homo sapien
gccagccaccactgcaccgtcatgt

SEQ ID NO: 5701456 - DNA, 25 bp, Homo sapien
caaggagagcagcacgaagcccatg

SEQ ID NO: 5701457 - DNA, 25 bp, Homo sapien
aggctgagggctcggaagaacagga

SEQ ID NO: 5701458 - DNA, 25 bp, Homo sapien
tcttaaagaggaagccgatggggat

SEQ ID NO: 5701459 - DNA, 25 bp, Homo sapien
ggctgggatgctgccttccgccggc

SEQ ID NO: 5701460 - DNA, 25 bp, Homo sapien
aatgagggcccaggtcccgaggatg

SEQ ID NO: 5701461 - DNA, 25 bp, Homo sapien
caggagataggagaaagtccaggcc

SEQ ID NO: 5701462 - DNA, 25 bp, Homo sapien
ttgtgaaatgggaagcttatgcttc

SEQ ID NO: 5701463 - DNA, 25 bp, Homo sapien
aggccgaagagcggggccggccagg

SEQ ID NO: 5701464 - DNA, 25 bp, Homo sapien
gaaagacacaaggaagaggcttccc

SEQ ID NO: 5701465 - DNA, 25 bp, Homo sapien
ttccagtaccgcatgccatcgcgca

SEQ ID NO: 5701466 - DNA, 25 bp, Homo sapien
gattcccacgtagcagtagctgtag

SEQ ID NO: 5701467 - DNA, 25 bp, Homo sapien
tttcttaaagaggaagccgatgggg

SEQ ID NO: 5701468 - DNA, 25 bp, Homo sapien
cttactcctcccggagcttctccgg

SEQ ID NO: 5701469 - DNA, 25 bp, Homo sapien
cagcaggccgaagagcggggccggc

SEQ ID NO: 5701470 - DNA, 25 bp, Homo sapien
attggagggtggggccgcctccggc

SEQ ID NO: 5701471 - DNA, 25 bp, Homo sapien
cgccggctggggctgcccccaccta

SEQ ID NO: 5701472 - DNA, 25 bp, Homo sapien
ccaggccagagccagggcgtggcag

SEQ ID NO: 5701473 - DNA, 25 bp, Homo sapien
ctcttgtagatatactgcgccagcc

SEQ ID NO: 5701474 - DNA, 25 bp, Homo sapien
gcaatccaggccacgtagaagcgca

SEQ ID NO: 5701475 - DNA, 25 bp, Homo sapien
ccggctggggctgcccccacctaaa

SEQ ID NO: 5701476 - DNA, 25 bp, Homo sapien
acaatactttgattttgtaggagtg

SEQ ID NO: 5701477 - DNA, 25 bp, Homo sapien
gtagcccgggtggaggccgtgccag

SEQ ID NO: 5701478 - DNA, 25 bp, Homo sapien
aaagtgtgggggccacaggtgaaca

SEQ ID NO: 5701479 - DNA, 25 bp, Homo sapien
gcatgcggaaggcgaagaagacggg

SEQ ID NO: 5701480 - DNA, 25 bp, Homo sapien
aggtgaacagggtgagccccaggcc

SEQ ID NO: 5701481 - DNA, 25 bp, Homo sapien
gcgtcctcgcgcacggcctccagcg

SEQ ID NO: 5701482 - DNA, 25 bp, Homo sapien
ggatcatgtagaagaggcgggcggg

SEQ ID NO: 5701483 - DNA, 25 bp, Homo sapien
gtcatgttccagtaccgcatgccat

SEQ ID NO: 5701484 - DNA, 25 bp, Homo sapien
atgcagccgcactcggcggcaatcc

SEQ ID NO: 5701485 - DNA, 25 bp, Homo sapien
ttgattttgtaggagtggaggtggc

SEQ ID NO: 5701486 - DNA, 25 bp, Homo sapien
ccaagctccgaccccacattgtgga

SEQ ID NO: 5701487 - DNA, 25 bp, Homo sapien
ggagcttctccggggcaaggctggt

SEQ ID NO: 5701488 - DNA, 25 bp, Homo sapien
tggaggcccagtaccgaagggtgtc

SEQ ID NO: 5701489 - DNA, 25 bp, Homo sapien
agaagcgcatgcggaaggcgaagaa

SEQ ID NO: 5701490 - DNA, 25 bp, Homo sapien
aacaggagataggagaaagtccagg

SEQ ID NO: 5701491 - DNA, 25 bp, Homo sapien
caggtcctggacttcactggccagg

SEQ ID NO: 5701492 - DNA, 25 bp, Homo sapien
ttcagcgtcagcagcagctggacgg

SEQ ID NO: 5701493 - DNA, 25 bp, Homo sapien
cagggcgtggcaggagcagggctgg

SEQ ID NO: 5701494 - DNA, 25 bp, Homo sapien
gccccttgctgaagcctgaggccat

SEQ ID NO: 5701495 - DNA, 25 bp, Homo sapien
tactttgattttgtaggagtggagg

SEQ ID NO: 5701496 - DNA, 25 bp, Homo sapien
gaaccagtgcacccagtcccaggcc

SEQ ID NO: 5701497 - DNA, 25 bp, Homo sapien
ggggatcatgtagaagaggcgggcg

SEQ ID NO: 5701498 - DNA, 25 bp, Homo sapien
gaaagatttacacacggtgacctgt

SEQ ID NO: 5701499 - DNA, 25 bp, Homo sapien
actccaaggaagccgccttctccgg

SEQ ID NO: 5701500 - DNA, 25 bp, Homo sapien
tgctccccatctcttcagcccagga

SEQ ID NO: 5701501 - DNA, 25 bp, Homo sapien
gggcagcgggcgggcgtagaaggcg

SEQ ID NO: 5701502 - DNA, 25 bp, Homo sapien
agggcgtgggagtgggcaggcccag

SEQ ID NO: 5701503 - DNA, 25 bp, Homo sapien
cccacctaaagccagccccagcccc

SEQ ID NO: 5701504 - DNA, 25 bp, Homo sapien
gtcccagcccgcttgccgccgcagc

SEQ ID NO: 5701505 - DNA, 25 bp, Homo sapien
aaggctggtgggctgggatgctgcc

SEQ ID NO: 5701506 - DNA, 25 bp, Homo sapien
cgggcctgtcatgattcccacgtag

SEQ ID NO: 5701507 - DNA, 25 bp, Homo sapien
atgagctaaaagtggagcgaaagac

SEQ ID NO: 5701508 - DNA, 25 bp, Homo sapien
ggcccaggaggctgagggctcggaa

SEQ ID NO: 5701509 - DNA, 25 bp, Homo sapien
gggtgggcattggagggtggggccg

SEQ ID NO: 5701510 - DNA, 25 bp, Homo sapien
aggtaaggactctttctggggagga

SEQ ID NO: 5701511 - DNA, 25 bp, Homo sapien
caggaggggccgagcagtcccagcc

SEQ ID NO: 5701512 - DNA, 25 bp, Homo sapien
tcccctttgtgaaatgggaagctta

SEQ ID NO: 5701513 - DNA, 25 bp, Homo sapien
gcgcgcatcttcaggaaccagtgca

SEQ ID NO: 5701514 - DNA, 25 bp, Homo sapien
ggtgaccagagaatgcaaagtgtgg

SEQ ID NO: 5701515 - DNA, 25 bp, Homo sapien
cggtgacctgtcataggccaagcga

SEQ ID NO: 5701516 - DNA, 25 bp, Homo sapien
agtccaggtaggtgcggtagcggaa

SEQ ID NO: 5701517 - DNA, 25 bp, Homo sapien
ggaggtggcctctgggcagagggca

SEQ ID NO: 5701518 - DNA, 25 bp, Homo sapien
gagcgtcgtgacagcttactcctcc

SEQ ID NO: 5701519 - DNA, 25 bp, Homo sapien
gcagcagccccagggtgggcccctt

SEQ ID NO: 5701520 - DNA, 25 bp, Homo sapien
gtgctgtagcagtcgatgttgcgga

SEQ ID NO: 5701521 - DNA, 25 bp, Homo sapien
agcccgggtggaggccgtgccagta

SEQ ID NO: 5701522 - DNA, 25 bp, Homo sapien
cccagggctgccagggccaggaagt

SEQ ID NO: 5701523 - DNA, 25 bp, Homo sapien
gccagatgcaggtcctggacttcac

SEQ ID NO: 5701524 - DNA, 25 bp, Homo sapien
aggtggctcagatggaagccatggg

SEQ ID NO: 5701525 - DNA, 25 bp, Homo sapien
ccgatggggatggagataagaagaa

SEQ ID NO: 5701526 - DNA, 25 bp, Homo sapien
gaagaacaggagataggagaaagtc

SEQ ID NO: 5701527 - DNA, 25 bp, Homo sapien
ggtgcggtagcggaagaacgggcct

SEQ ID NO: 5701528 - DNA, 25 bp, Homo sapien
ggtcctggacttcactggccaggct

SEQ ID NO: 5701529 - DNA, 25 bp, Homo sapien
cttccgccggctggggctgccccca

SEQ ID NO: 5701530 - DNA, 25 bp, Homo sapien
gcagtagctgtagctgagtgtctcc

SEQ ID NO: 5701531 - DNA, 25 bp, Homo sapien
tacccagaagctggagcaggggcca

SEQ ID NO: 5701532 - DNA, 25 bp, Homo sapien
caggcccaggaggctgagggctcgg

SEQ ID NO: 5701533 - DNA, 25 bp, Homo sapien
gcagaaatctgtgctgtagcagtcg

SEQ ID NO: 5701534 - DNA, 25 bp, Homo sapien
gctggggctgcccccacctaaagcc

SEQ ID NO: 5701535 - DNA, 25 bp, Homo sapien
cactggccaggctcaccagcttcag

SEQ ID NO: 5701536 - DNA, 25 bp, Homo sapien
agggagggcacgtcgggcagcagcc

SEQ ID NO: 5701537 - DNA, 25 bp, Homo sapien
ttttgtaggagtggaggtggcctct

SEQ ID NO: 5701538 - DNA, 25 bp, Homo sapien
aggcgctcagcagcatggtccaggc

SEQ ID NO: 5701539 - DNA, 25 bp, Homo sapien
ttggtgcgatgagctaaaagtggag

SEQ ID NO: 5701540 - DNA, 25 bp, Homo sapien
cctaaagccagccccagccccaggg

SEQ ID NO: 5701541 - DNA, 25 bp, Homo sapien
cctctgggcagagggcagggaggac

SEQ ID NO: 5701542 - DNA, 25 bp, Homo sapien
cctcgcgcacggcctccagcgggaa

SEQ ID NO: 5701543 - DNA, 25 bp, Homo sapien
attcttcaggcgacatggtctgagc

SEQ ID NO: 5701544 - DNA, 25 bp, Homo sapien
tagctgagtgtctccatcagggagg

SEQ ID NO: 5701545 - DNA, 25 bp, Homo sapien
cagagaatgcaaagtgtgggggcca

SEQ ID NO: 5701546 - DNA, 25 bp, Homo sapien
cggccaaggagagcagcacgaagcc

SEQ ID NO: 5701547 - DNA, 25 bp, Homo sapien
gaaggcgtcctcgcgcacggcctcc

SEQ ID NO: 5701548 - DNA, 25 bp, Homo sapien
gagcagcacgaagcccatgcacatg

SEQ ID NO: 5701549 - DNA, 25 bp, Homo sapien
cctcccggagcttctccggggcaag

SEQ ID NO: 5701550 - DNA, 25 bp, Homo sapien
aggcgggcgggcagcgggcgggcgt

SEQ ID NO: 5701551 - DNA, 25 bp, Homo sapien
gcgaaagacacaaggaagaggcttc

SEQ ID NO: 5701552 - DNA, 25 bp, Homo sapien
ttgggaaagatttacacacggtgac

SEQ ID NO: 5701553 - DNA, 25 bp, Homo sapien
ggcgccaggagcgctggggtcccga

SEQ ID NO: 5701554 - DNA, 25 bp, Homo sapien
gcggccacggggtaggccccaaagc

SEQ ID NO: 5701555 - DNA, 25 bp, Homo sapien
tttagctggggaagaggaaattctc

SEQ ID NO: 5701556 - DNA, 25 bp, Homo sapien
gtgctctctggatacccagaagctg

SEQ ID NO: 5701557 - DNA, 25 bp, Homo sapien
aagcccatgcacatgtagtcatagg

SEQ ID NO: 5701558 - DNA, 25 bp, Homo sapien
tccggggcaaggctggtgggctggg

SEQ ID NO: 5701559 - DNA, 25 bp, Homo sapien
ccggccctcggcagccaggcacagc

SEQ ID NO: 5701560 - DNA, 25 bp, Homo sapien
ccccaggcccacagcggctgctccc

SEQ ID NO: 5701561 - DNA, 25 bp, Homo sapien
gagaagagggcgccaggagcgctgg

SEQ ID NO: 5701562 - DNA, 25 bp, Homo sapien
tcccgaggatggtgaccagagaatg

SEQ ID NO: 5701563 - DNA, 25 bp, Homo sapien
aggaagccgccttctccggactgct

SEQ ID NO: 5701564 - DNA, 25 bp, Homo sapien
agacagcagcctggttcacagaatt

SEQ ID NO: 5701565 - DNA, 25 bp, Homo sapien
tcagtttcccctttgtgaaatggga

SEQ ID NO: 5701566 - DNA, 25 bp, Homo sapien
ctgcgccagccaccactgcaccgtc

SEQ ID NO: 5701567 - DNA, 25 bp, Homo sapien
tcaccagcttcagcgtcagcagcag

SEQ ID NO: 5701568 - DNA, 25 bp, Homo sapien
ggtctgcttcagttgcaggcagggt

SEQ ID NO: 5701569 - DNA, 25 bp, Homo sapien
tcatgattcccacgtagcagtagct

SEQ ID NO: 5701570 - DNA, 25 bp, Homo sapien
ggtcccgaggatggtgaccagagaa

SEQ ID NO: 5701571 - DNA, 25 bp, Homo sapien
ctgcaatattggtgcgatgagctaa

SEQ ID NO: 5701572 - DNA, 25 bp, Homo sapien
ggtcaggaagctcaggtagtagccc

SEQ ID NO: 5701573 - DNA, 25 bp, Homo sapien
gaatttgcccaaaacccactgccca

SEQ ID NO: 5701574 - DNA, 25 bp, Homo sapien
gtggctcagatggaagccatgggac

SEQ ID NO: 5701575 - DNA, 25 bp, Homo sapien
gccggcggcaatgcagccgcactcg

SEQ ID NO: 5701576 - DNA, 25 bp, Homo sapien
tcttcagcccaggaccggctttctt

SEQ ID NO: 5701577 - DNA, 25 bp, Homo sapien
gcgctcagcagcatggtccaggcgc

SEQ ID NO: 5701578 - DNA, 25 bp, Homo sapien
atcttcaggaaccagtgcacccagt

SEQ ID NO: 5701579 - DNA, 25 bp, Homo sapien
ggcagagggagcgtcgtgacagctt

SEQ ID NO: 5701580 - DNA, 25 bp, Homo sapien
ccaggcgcggcgcagcaggggccgc

SEQ ID NO: 5701581 - DNA, 25 bp, Homo sapien
tagctggggaagaggaaattctctc

SEQ ID NO: 5701582 - DNA, 25 bp, Homo sapien
tactgcgccagccaccactgcaccg

SEQ ID NO: 5701583 - DNA, 25 bp, Homo sapien
ggcaatgcagccgcactcggcggca

SEQ ID NO: 5701584 - DNA, 25 bp, Homo sapien
tctggggaggagacagcagcctggt

SEQ ID NO: 5701585 - DNA, 25 bp, Homo sapien
aggaccctctccaaggtaaggactc

SEQ ID NO: 5701586 - DNA, 25 bp, Homo sapien
agcagtcccagcccgcttgccgccg

SEQ ID NO: 5701587 - DNA, 25 bp, Homo sapien
ccgcagctccggccacgggattcga

SEQ ID NO: 5701588 - DNA, 25 bp, Homo sapien
gcaggggccgcaggctgggcactgc

SEQ ID NO: 5701589 - DNA, 25 bp, Homo sapien
gcgcatgcggaaggcgaagaagacg

SEQ ID NO: 5701590 - DNA, 25 bp, Homo sapien
cacggtgacctgtcataggccaagc

SEQ ID NO: 5701591 - DNA, 25 bp, Homo sapien
gctgagggctcggaagaacaggaga

SEQ ID NO: 5701592 - DNA, 25 bp, Homo sapien
tgaggccatttccttcctctgggcc

SEQ ID NO: 5701593 - DNA, 25 bp, Homo sapien
cagatgcaggtcctggacttcactg

SEQ ID NO: 5701594 - DNA, 25 bp, Homo sapien
ggcctgaatgagggcccaggtcccg

SEQ ID NO: 5701595 - DNA, 25 bp, Homo sapien
ggcacgtcgggcagcagccccaggg

SEQ ID NO: 5701596 - DNA, 25 bp, Homo sapien
tagcagtagctgtagctgagtgtct

SEQ ID NO: 5701597 - DNA, 25 bp, Homo sapien
ccaggcacagcgggatggtcaggaa

SEQ ID NO: 5701598 - DNA, 25 bp, Homo sapien
gcagggtatttagctggggaagagg

SEQ ID NO: 5701599 - DNA, 25 bp, Homo sapien
gtgaagggcgtgggagtgggcaggc

SEQ ID NO: 5701600 - DNA, 25 bp, Homo sapien
gatgcaggtcctggacttcactggc

SEQ ID NO: 5701601 - DNA, 25 bp, Homo sapien
actcttgtctggacaatactttgat

SEQ ID NO: 5701602 - DNA, 25 bp, Homo sapien
gagaaagtccaggccagagccaggg

SEQ ID NO: 5701603 - DNA, 25 bp, Homo sapien
caggaggctgagggctcggaagaac

SEQ ID NO: 5701604 - DNA, 25 bp, Homo sapien
agtcatactccaaggaagccgcctt

SEQ ID NO: 5701605 - DNA, 25 bp, Homo sapien
tggatacccagaagctggagcaggg

SEQ ID NO: 5701606 - DNA, 25 bp, Homo sapien
tgggctgggatgctgccttccgccg

SEQ ID NO: 5701607 - DNA, 25 bp, Homo sapien
gtgggcattggagggtggggccgcc

SEQ ID NO: 5701608 - DNA, 25 bp, Homo sapien
cggctttcttaaagaggaagccgat

SEQ ID NO: 5701609 - DNA, 25 bp, Homo sapien
gcgcggcgcagcaggggccgcaggc

SEQ ID NO: 5701610 - DNA, 25 bp, Homo sapien
gatacagaagtagatggaggcccag

SEQ ID NO: 5701611 - DNA, 25 bp, Homo sapien
caggcgctccgcaggacataggaac

SEQ ID NO: 5701612 - DNA, 25 bp, Homo sapien
ccactgcaccgtcatgttccagtac

SEQ ID NO: 5701613 - DNA, 25 bp, Homo sapien
tgggggccacaggtgaacagggtga

SEQ ID NO: 5701614 - DNA, 25 bp, Homo sapien
gttttggggaagtgcagtgctctct

SEQ ID NO: 5701615 - DNA, 25 bp, Homo sapien
agcttctccggggcaaggctggtgg

SEQ ID NO: 5701616 - DNA, 25 bp, Homo sapien
tggaagccatgggacggccgtcccc

SEQ ID NO: 5701617 - DNA, 25 bp, Homo sapien
gagccagggcgtggcaggagcaggg

SEQ ID NO: 5701618 - DNA, 25 bp, Homo sapien
agtcataggcgcgcatcttcaggaa

SEQ ID NO: 5701619 - DNA, 25 bp, Homo sapien
cattgtggatgcaaagaaagggaat

SEQ ID NO: 5701620 - DNA, 25 bp, Homo sapien
actctttctggggaggagacagcag

SEQ ID NO: 5701621 - DNA, 25 bp, Homo sapien
gggccgcaggctgggcactgccccg

SEQ ID NO: 5701622 - DNA, 25 bp, Homo sapien
ccacgtagaagcgcatgcggaaggc

SEQ ID NO: 5701623 - DNA, 25 bp, Homo sapien
ctccgcaggacataggaacgggcag

SEQ ID NO: 5701624 - DNA, 25 bp, Homo sapien
cccacattgtggatgcaaagaaagg

SEQ ID NO: 5701625 - DNA, 25 bp, Homo sapien
gccccagggtgggccccttgctgaa

SEQ ID NO: 5701626 - DNA, 25 bp, Homo sapien
gctcagcagcatggtccaggcgctc

SEQ ID NO: 5701627 - DNA, 25 bp, Homo sapien
ggcaggtgcgctcttgtagatatac

SEQ ID NO: 5701628 - DNA, 25 bp, Homo sapien
tctccggggcaaggctggtgggctg

SEQ ID NO: 5701629 - DNA, 25 bp, Homo sapien
gtagcggaagaacgggcctgtcatg

SEQ ID NO: 5701630 - DNA, 25 bp, Homo sapien
tccaggcgctccgcaggacatagga

SEQ ID NO: 5701631 - DNA, 25 bp, Homo sapien
tgagccccaggcccacagcggctgc

SEQ ID NO: 5701632 - DNA, 25 bp, Homo sapien
ggagacagcagcctggttcacagaa

SEQ ID NO: 5701633 - DNA, 25 bp, Homo sapien
catttccttcctctgggccagatgc

SEQ ID NO: 5701634 - DNA, 25 bp, Homo sapien
ttgtctggacaatactttgattttg

SEQ ID NO: 5701635 - DNA, 25 bp, Homo sapien
ccatgcacatgtagtcataggcgcg

SEQ ID NO: 5701636 - DNA, 25 bp, Homo sapien
agcagcatggtccaggcgctccgca

SEQ ID NO: 5701637 - DNA, 25 bp, Homo sapien
ccaggcccacagcggctgctcccca

SEQ ID NO: 5701638 - DNA, 25 bp, Homo sapien
ggcaggagcagggctgggcctgaat

SEQ ID NO: 5701639 - DNA, 25 bp, Homo sapien
gcgccagccaccactgcaccgtcat

SEQ ID NO: 5701640 - DNA, 25 bp, Homo sapien
aagcgcatgcggaaggcgaagaaga

SEQ ID NO: 5701641 - DNA, 25 bp, Homo sapien
gggctgggcctgaatgagggcccag

SEQ ID NO: 5701642 - DNA, 25 bp, Homo sapien
gataagaagaaccactagatacgtc

SEQ ID NO: 5701643 - DNA, 25 bp, Homo sapien
ggagggcacgtcgggcagcagcccc

SEQ ID NO: 5701644 - DNA, 25 bp, Homo sapien
cctccagcgggaagaggtgagagga

SEQ ID NO: 5701645 - DNA, 25 bp, Homo sapien
cgaccccacattgtggatgcaaaga

SEQ ID NO: 5701646 - DNA, 25 bp, Homo sapien
tattgggaaagatttacacacggtg

SEQ ID NO: 5701647 - DNA, 25 bp, Homo sapien
tgcagtgctctctggatacccagaa

SEQ ID NO: 5701648 - DNA, 25 bp, Homo sapien
cttcagttgcaggcagggtatttag

SEQ ID NO: 5701649 - DNA, 25 bp, Homo sapien
tttcccctttgtgaaatgggaagct

SEQ ID NO: 5701650 - DNA, 25 bp, Homo sapien
tttggggaagtgcagtgctctctgg

SEQ ID NO: 5701651 - DNA, 25 bp, Homo sapien
cacagaattcccgggaccagctggc

SEQ ID NO: 5701652 - DNA, 25 bp, Homo sapien
aggcacagcgggatggtcaggaagc

SEQ ID NO: 5701653 - DNA, 25 bp, Homo sapien
gctgtagctgagtgtctccatcagg

SEQ ID NO: 5701654 - DNA, 25 bp, Homo sapien
ggaagggctgctccagccagtccag

SEQ ID NO: 5701655 - DNA, 25 bp, Homo sapien
gggaggacacccccgggtctgcttc

SEQ ID NO: 5701656 - DNA, 25 bp, Homo sapien
tagatggaggcccagtaccgaaggg

SEQ ID NO: 5701657 - DNA, 25 bp, Homo sapien
cccgaggtggctcagatggaagcca

SEQ ID NO: 5701658 - DNA, 25 bp, Homo sapien
cagtcccagcccgcttgccgccgca

SEQ ID NO: 5701659 - DNA, 25 bp, Homo sapien
tggggaagaggaaattctctccagg

SEQ ID NO: 5701660 - DNA, 25 bp, Homo sapien
aggagagcagcacgaagcccatgca

SEQ ID NO: 5701661 - DNA, 25 bp, Homo sapien
tggggaggagacagcagcctggttc

SEQ ID NO: 5701662 - DNA, 25 bp, Homo sapien
gggaagaggaaattctctccaggac

SEQ ID NO: 5701663 - DNA, 25 bp, Homo sapien
cgcgcacccgcacctcagtttcccc

SEQ ID NO: 5701664 - DNA, 25 bp, Homo sapien
tacacacggtgacctgtcataggcc

SEQ ID NO: 5701665 - DNA, 25 bp, Homo sapien
gcaatattggtgcgatgagctaaaa

SEQ ID NO: 5701666 - DNA, 25 bp, Homo sapien
gggaatttgcccaaaacccactgcc

SEQ ID NO: 5701667 - DNA, 25 bp, Homo sapien
gcccaggaccggctttcttaaagag

SEQ ID NO: 5701668 - DNA, 25 bp, Homo sapien
aggtggcctctgggcagagggcagg

SEQ ID NO: 5701669 - DNA, 25 bp, Homo sapien
gcagcgggcgggcgtagaaggcgtc

SEQ ID NO: 5701670 - DNA, 25 bp, Homo sapien
tgggcagagggcagggaggacaccc

SEQ ID NO: 5701671 - DNA, 25 bp, Homo sapien
agtaccgcatgccatcgcgcacccg

SEQ ID NO: 5701672 - DNA, 25 bp, Homo sapien
ttcccacgtagcagtagctgtagct

SEQ ID NO: 5701673 - DNA, 25 bp, Homo sapien
gctgctccagccagtccaggtaggt

SEQ ID NO: 5701674 - DNA, 25 bp, Homo sapien
tccaaggtaaggactctttctgggg

SEQ ID NO: 5701675 - DNA, 25 bp, Homo sapien
cccatctcttcagcccaggaccggc

SEQ ID NO: 5701676 - DNA, 25 bp, Homo sapien
gtcccgaggtggctcagatggaagc

SEQ ID NO: 5701677 - DNA, 25 bp, Homo sapien
agaggcgggcgggcagcgggcgggc

SEQ ID NO: 5701678 - DNA, 25 bp, Homo sapien
aggaagaggcttcccactcccagga

SEQ ID NO: 5701679 - DNA, 25 bp, Homo sapien
ctggccaggctcaccagcttcagcg

SEQ ID NO: 5701680 - DNA, 25 bp, Homo sapien
gggaaagatttacacacggtgacct

SEQ ID NO: 5701681 - DNA, 25 bp, Homo sapien
gcattggagggtggggccgcctccg

SEQ ID NO: 5701682 - DNA, 25 bp, Homo sapien
ggctggtgggctgggatgctgcctt

SEQ ID NO: 5701683 - DNA, 25 bp, Homo sapien
tgtagctgagtgtctccatcaggga

SEQ ID NO: 5701684 - DNA, 25 bp, Homo sapien
agcgatgagaagagggcgccaggag

SEQ ID NO: 5701685 - DNA, 25 bp, Homo sapien
cagaattcccgggaccagctggcag

SEQ ID NO: 5701686 - DNA, 25 bp, Homo sapien
gagcgctggggtcccgaggtggctc

SEQ ID NO: 5701687 - DNA, 25 bp, Homo sapien
ggccacaggtgaacagggtgagccc

SEQ ID NO: 5701688 - DNA, 25 bp, Homo sapien
cagtaggcgctcagcagcatggtcc

SEQ ID NO: 5701689 - DNA, 25 bp, Homo sapien
gcagtcgatgttgcggatggtctca

SEQ ID NO: 5701690 - DNA, 25 bp, Homo sapien
acttcactggccaggctcaccagct

SEQ ID NO: 5701691 - DNA, 25 bp, Homo sapien
aggaagccgatggggatggagataa

SEQ ID NO: 5701692 - DNA, 25 bp, Homo sapien
cgggatggtcaggaagctcaggtag

SEQ ID NO: 5701693 - DNA, 25 bp, Homo sapien
cagggaggacacccccgggtctgct

SEQ ID NO: 5701694 - DNA, 25 bp, Homo sapien
ctgggcactgccccggggaagggct

SEQ ID NO: 5701695 - DNA, 25 bp, Homo sapien
gggccgagcagtcccagcccgcttg

SEQ ID NO: 5701696 - DNA, 25 bp, Homo sapien
gtggaggtggcctctgggcagaggg

SEQ ID NO: 5701697 - DNA, 25 bp, Homo sapien
aggccatttccttcctctgggccag

SEQ ID NO: 5701698 - DNA, 25 bp, Homo sapien
tgtagcagtcgatgttgcggatggt

SEQ ID NO: 5701699 - DNA, 25 bp, Homo sapien
caggggccagtgactcttgtctgga

SEQ ID NO: 5701700 - DNA, 25 bp, Homo sapien
atcatgtagaagaggcgggcgggca

SEQ ID NO: 5701701 - DNA, 25 bp, Homo sapien
gtggcctctgggcagagggcaggga

SEQ ID NO: 5701702 - DNA, 25 bp, Homo sapien
tttccttcctctgggccagatgcag

SEQ ID NO: 5701703 - DNA, 25 bp, Homo sapien
ggatggtcaggaagctcaggtagta

SEQ ID NO: 5701704 - DNA, 25 bp, Homo sapien
ggatggtgaccagagaatgcaaagt

SEQ ID NO: 5701705 - DNA, 25 bp, Homo sapien
cactagatacgtccattcttcaggc

SEQ ID NO: 5701706 - DNA, 25 bp, Homo sapien
gggccagatgcaggtcctggacttc

SEQ ID NO: 5701707 - DNA, 25 bp, Homo sapien
aggaagctcaggtagtagcccgggt

SEQ ID NO: 5701708 - DNA, 25 bp, Homo sapien
aggaaccagtgcacccagtcccagg

SEQ ID NO: 5701709 - DNA, 25 bp, Homo sapien
cgtgggagtgggcaggcccaggagg

SEQ ID NO: 5701710 - DNA, 25 bp, Homo sapien
tcaggaagctcaggtagtagcccgg

SEQ ID NO: 5701711 - DNA, 25 bp, Homo sapien
gagctaaaagtggagcgaaagacac

SEQ ID NO: 5701712 - DNA, 25 bp, Homo sapien
gaacagggtgagccccaggcccaca

SEQ ID NO: 5701713 - DNA, 25 bp, Homo sapien
agcgggatggtcaggaagctcaggt

SEQ ID NO: 5701714 - DNA, 25 bp, Homo sapien
aggcgcgcatcttcaggaaccagtg

SEQ ID NO: 5701715 - DNA, 25 bp, Homo sapien
agcagctggacggcattggtgaagg

SEQ ID NO: 5701716 - DNA, 25 bp, Homo sapien
ccggccaggcgcggcgcagcagggg

SEQ ID NO: 5701717 - DNA, 25 bp, Homo sapien
gccaaggagagcagcacgaagccca

SEQ ID NO: 5701718 - DNA, 25 bp, Homo sapien
ggcgtgggagtgggcaggcccagga

SEQ ID NO: 5701719 - DNA, 25 bp, Homo sapien
tctccggactgctggggggtgggca

SEQ ID NO: 5701720 - DNA, 25 bp, Homo sapien
ccaagtctgcaatattggtgcgatg

SEQ ID NO: 5701721 - DNA, 25 bp, Homo sapien
ggcgcagcaggggccgcaggctggg

SEQ ID NO: 5701722 - DNA, 25 bp, Homo sapien
ctggacttcactggccaggctcacc

SEQ ID NO: 5701723 - DNA, 25 bp, Homo sapien
cccgcgcacccgcacctcagtttcc

SEQ ID NO: 5701724 - DNA, 25 bp, Homo sapien
tgtcataggccaagcgatgagaaga

SEQ ID NO: 5701725 - DNA, 25 bp, Homo sapien
agaacaggagataggagaaagtcca

SEQ ID NO: 5701726 - DNA, 25 bp, Homo sapien
cccacgtagcagtagctgtagctga

SEQ ID NO: 5701727 - DNA, 25 bp, Homo sapien
gccatcgcgcacccgcacgcagaaa

SEQ ID NO: 5701728 - DNA, 25 bp, Homo sapien
atggtctgagctgctcgccgggcag

SEQ ID NO: 5701729 - DNA, 25 bp, Homo sapien
tcagttgcaggcagggtatttagct

SEQ ID NO: 5701730 - DNA, 25 bp, Homo sapien
agggctgactccagccggccctcgg

SEQ ID NO: 5701731 - DNA, 25 bp, Homo sapien
agagggcgccaggagcgctggggtc

SEQ ID NO: 5701732 - DNA, 25 bp, Homo sapien
gcgtcgtgacagcttactcctcccg

SEQ ID NO: 5701733 - DNA, 25 bp, Homo sapien
ggaagcttatgcttccttccaagtc

SEQ ID NO: 5701734 - DNA, 25 bp, Homo sapien
cacgtagcagtagctgtagctgagt

SEQ ID NO: 5701735 - DNA, 25 bp, Homo sapien
tgggagtgggcaggcccaggaggct

SEQ ID NO: 5701736 - DNA, 25 bp, Homo sapien
caggtaggtgcggtagcggaagaac

SEQ ID NO: 5701737 - DNA, 25 bp, Homo sapien
atgcaaagtgtgggggccacaggtg

SEQ ID NO: 5701738 - DNA, 25 bp, Homo sapien
tccaaggaagccgccttctccggac

SEQ ID NO: 5701739 - DNA, 25 bp, Homo sapien
tattggtgcgatgagctaaaagtgg

SEQ ID NO: 5701740 - DNA, 25 bp, Homo sapien
gggatggagataagaagaaccacta

SEQ ID NO: 5701741 - DNA, 25 bp, Homo sapien
ctgtgctgtagcagtcgatgttgcg

SEQ ID NO: 5701742 - DNA, 25 bp, Homo sapien
ggggaagggctgctccagccagtcc

SEQ ID NO: 5701743 - DNA, 25 bp, Homo sapien
ggccacgtagaagcgcatgcggaag

SEQ ID NO: 5701744 - DNA, 25 bp, Homo sapien
acccagtcccaggccttctggcccc

SEQ ID NO: 5701745 - DNA, 25 bp, Homo sapien
ccgcttgccgccgcagctccggcca

SEQ ID NO: 5701746 - DNA, 25 bp, Homo sapien
acagcggctgctccccatctcttca

SEQ ID NO: 5701747 - DNA, 25 bp, Homo sapien
cagcccaggaccggctttcttaaag

SEQ ID NO: 5701748 - DNA, 25 bp, Homo sapien
atttgcccaaaacccactgcccagg

SEQ ID NO: 5701749 - DNA, 25 bp, Homo sapien
gccgcaggctgggcactgccccggg

SEQ ID NO: 5701750 - DNA, 25 bp, Homo sapien
gggcattggagggtggggccgcctc

SEQ ID NO: 5701751 - DNA, 25 bp, Homo sapien
actcggcggcaatccaggccacgta

SEQ ID NO: 5701752 - DNA, 25 bp, Homo sapien
tgctgaagcctgaggccatttcctt

SEQ ID NO: 5701753 - DNA, 25 bp, Homo sapien
gggtaggccccaaagccggcggcaa

SEQ ID NO: 5701754 - DNA, 25 bp, Homo sapien
gtgaacagggtgagccccaggccca

SEQ ID NO: 5701755 - DNA, 25 bp, Homo sapien
aagaagacggggatcatgtagaaga

SEQ ID NO: 5701756 - DNA, 25 bp, Homo sapien
ggcctgtcatgattcccacgtagca

SEQ ID NO: 5701757 - DNA, 25 bp, Homo sapien
gtgccagtaggcgctcagcagcatg

SEQ ID NO: 5701758 - DNA, 25 bp, Homo sapien
cccaaagccggcggcaatgcagccg

SEQ ID NO: 5701759 - DNA, 25 bp, Homo sapien
gaagcctgaggccatttccttcctc

SEQ ID NO: 5701760 - DNA, 25 bp, Homo sapien
gaggacacccccgggtctgcttcag

SEQ ID NO: 5701761 - DNA, 25 bp, Homo sapien
attggtgaagggcgtgggagtgggc

SEQ ID NO: 5701762 - DNA, 25 bp, Homo sapien
acgtagaagcgcatgcggaaggcga

SEQ ID NO: 5701763 - DNA, 25 bp, Homo sapien
aagtccaggccagagccagggcgtg

SEQ ID NO: 5701764 - DNA, 25 bp, Homo sapien
gcggatggtctcatagtcatactcc

SEQ ID NO: 5701765 - DNA, 25 bp, Homo sapien
agcgggcgggcgtagaaggcgtcct

SEQ ID NO: 5701766 - DNA, 25 bp, Homo sapien
aggggccgagcagtcccagcccgct

SEQ ID NO: 5701767 - DNA, 25 bp, Homo sapien
cgggtctgcttcagttgcaggcagg

SEQ ID NO: 5701768 - DNA, 25 bp, Homo sapien
gtgaaatgggaagcttatgcttcct

SEQ ID NO: 5701769 - DNA, 25 bp, Homo sapien
tggtgaagggcgtgggagtgggcag

SEQ ID NO: 5701770 - DNA, 25 bp, Homo sapien
gccgcctccggcccgggctttggcg

SEQ ID NO: 5701771 - DNA, 25 bp, Homo sapien
gcgctggggtcccgaggtggctcag

SEQ ID NO: 5701772 - DNA, 25 bp, Homo sapien
aagagcggggccggccaggcgcggc

SEQ ID NO: 5701773 - DNA, 25 bp, Homo sapien
gcttatgcttccttccaagtctgca

SEQ ID NO: 5701774 - DNA, 25 bp, Homo sapien
gctctctggatacccagaagctgga

SEQ ID NO: 5701775 - DNA, 25 bp, Homo sapien
gcccacagcggctgctccccatctc

SEQ ID NO: 5701776 - DNA, 25 bp, Homo sapien
agcaggggccagtgactcttgtctg

SEQ ID NO: 5701777 - DNA, 25 bp, Homo sapien
tcaggaaccagtgcacccagtccca

SEQ ID NO: 5701778 - DNA, 25 bp, Homo sapien
gcccatgcacatgtagtcataggcg

SEQ ID NO: 5701779 - DNA, 25 bp, Homo sapien
catgtagaagaggcgggcgggcagc

SEQ ID NO: 5701780 - DNA, 25 bp, Homo sapien
agtggatacagaagtagatggaggc

SEQ ID NO: 5701781 - DNA, 25 bp, Homo sapien
tgaatgagggcccaggtcccgagga

SEQ ID NO: 5701782 - DNA, 25 bp, Homo sapien
tgggaagcttatgcttccttccaag

SEQ ID NO: 5701783 - DNA, 25 bp, Homo sapien
acggggatcatgtagaagaggcggg

SEQ ID NO: 5701784 - DNA, 25 bp, Homo sapien
atgcttccttccaagtctgcaatat

SEQ ID NO: 5701785 - DNA, 25 bp, Homo sapien
tcgcgcacccgcacgcagaaatctg

SEQ ID NO: 5701786 - DNA, 25 bp, Homo sapien
agccggccctcggcagccaggcaca

SEQ ID NO: 5701787 - DNA, 25 bp, Homo sapien
gatgttgcggatggtctcatagtca

SEQ ID NO: 5701788 - DNA, 25 bp, Homo sapien
gctaaaagtggagcgaaagacacaa

SEQ ID NO: 5701789 - DNA, 25 bp, Homo sapien
gccccagggctgccagggccaggaa

SEQ ID NO: 5701790 - DNA, 25 bp, Homo sapien
gggccccttgctgaagcctgaggcc

SEQ ID NO: 5701791 - DNA, 25 bp, Homo sapien
cgccgcagctccggccacgggattc

SEQ ID NO: 5701792 - DNA, 25 bp, Homo sapien
ctcggaagaacaggagataggagaa

SEQ ID NO: 5701793 - DNA, 25 bp, Homo sapien
tccgccggctggggctgcccccacc

SEQ ID NO: 5701794 - DNA, 25 bp, Homo sapien
tcccggagcttctccggggcaaggc

SEQ ID NO: 5701795 - DNA, 25 bp, Homo sapien
ccattcttcaggcgacatggtctga

SEQ ID NO: 5701796 - DNA, 25 bp, Homo sapien
cagggctgccagggccaggaagtgg

SEQ ID NO: 5701797 - DNA, 25 bp, Homo sapien
agaggtgagaggagagcaggaacag

SEQ ID NO: 5701798 - DNA, 25 bp, Homo sapien
cagaagtagatggaggcccagtacc

SEQ ID NO: 5701799 - DNA, 25 bp, Homo sapien
gcggggccggccaggcgcggcgcag

SEQ ID NO: 5701800 - DNA, 25 bp, Homo sapien
aggaaattctctccaggaccctctc

SEQ ID NO: 5701801 - DNA, 25 bp, Homo sapien
cggtagcggaagaacgggcctgtca

SEQ ID NO: 5701802 - DNA, 25 bp, Homo sapien
ggcctccagcgggaagaggtgagag

SEQ ID NO: 5701803 - DNA, 25 bp, Homo sapien
ataggcgcgcatcttcaggaaccag

SEQ ID NO: 5701804 - DNA, 25 bp, Homo sapien
cggcaatccaggccacgtagaagcg

SEQ ID NO: 5701805 - DNA, 25 bp, Homo sapien
ttgtggatgcaaagaaagggaattt

SEQ ID NO: 5701806 - DNA, 25 bp, Homo sapien
aaagaggaagccgatggggatggag

SEQ ID NO: 5701807 - DNA, 25 bp, Homo sapien
tgcgatgagctaaaagtggagcgaa

SEQ ID NO: 5701808 - DNA, 25 bp, Homo sapien
gatgctgccttccgccggctggggc

SEQ ID NO: 5701809 - DNA, 25 bp, Homo sapien
gctcaccagcttcagcgtcagcagc

SEQ ID NO: 5701810 - DNA, 25 bp, Homo sapien
accagtgcacccagtcccaggcctt

SEQ ID NO: 5701811 - DNA, 25 bp, Homo sapien
gcccaaaacccactgcccaggggcc

SEQ ID NO: 5701812 - DNA, 25 bp, Homo sapien
agccgatggggatggagataagaag

SEQ ID NO: 5701813 - DNA, 25 bp, Homo sapien
caaggaagaggcttcccactcccag

SEQ ID NO: 5701814 - DNA, 25 bp, Homo sapien
cttcctctgggccagatgcaggtcc

SEQ ID NO: 5701815 - DNA, 25 bp, Homo sapien
tttctttgtgcaacactttattggg

SEQ ID NO: 5701816 - DNA, 25 bp, Homo sapien
tctcttcagcccaggaccggctttc

SEQ ID NO: 5701817 - DNA, 25 bp, Homo sapien
ccaggacctgcccccaagctccgac

SEQ ID NO: 5701818 - DNA, 25 bp, Homo sapien
gggtgggccccttgctgaagcctga

SEQ ID NO: 5701819 - DNA, 25 bp, Homo sapien
gcagccgcactcggcggcaatccag

SEQ ID NO: 5701820 - DNA, 25 bp, Homo sapien
ttcaggcgacatggtctgagctgct

SEQ ID NO: 5701821 - DNA, 25 bp, Homo sapien
cagtaccgaagggtgtcggccaagg

SEQ ID NO: 5701822 - DNA, 25 bp, Homo sapien
gcggaaggcgaagaagacggggatc

SEQ ID NO: 5701823 - DNA, 25 bp, Homo sapien
cctccggcccgggctttggcggcca

SEQ ID NO: 5701824 - DNA, 25 bp, Homo sapien
ttccaagtctgcaatattggtgcga

SEQ ID NO: 5701825 - DNA, 25 bp, Homo sapien
gcacccgcacgcagaaatctgtgct

SEQ ID NO: 5701826 - DNA, 25 bp, Homo sapien
aggaagtggatacagaagtagatgg

SEQ ID NO: 5701827 - DNA, 25 bp, Homo sapien
gaaagtccaggccagagccagggcg

SEQ ID NO: 5701828 - DNA, 25 bp, Homo sapien
gggatgctgccttccgccggctggg

SEQ ID NO: 5701829 - DNA, 25 bp, Homo sapien
cacaaggaagaggcttcccactccc

SEQ ID NO: 5701830 - DNA, 25 bp, Homo sapien
gagcgaaagacacaaggaagaggct

SEQ ID NO: 5701831 - DNA, 25 bp, Homo sapien
cagcgtcagcagcagctggacggca

SEQ ID NO: 5701832 - DNA, 25 bp, Homo sapien
agcctgaggccatttccttcctctg

SEQ ID NO: 5701833 - DNA, 25 bp, Homo sapien
tggatacagaagtagatggaggccc

SEQ ID NO: 5701834 - DNA, 25 bp, Homo sapien
gcgtggcaggagcagggctgggcct

SEQ ID NO: 5701835 - DNA, 25 bp, Homo sapien
gtagaagcgcatgcggaaggcgaag

SEQ ID NO: 5701836 - DNA, 25 bp, Homo sapien
ctagatacgtccattcttcaggcga

SEQ ID NO: 5701837 - DNA, 25 bp, Homo sapien
gcaggccgaagagcggggccggcca

SEQ ID NO: 5701838 - DNA, 25 bp, Homo sapien
gagaggagagcaggaacagcaggcc

SEQ ID NO: 5701839 - DNA, 25 bp, Homo sapien
agctggcagagggagcgtcgtgaca

SEQ ID NO: 5701840 - DNA, 25 bp, Homo sapien
gagggagcgtcgtgacagcttactc

SEQ ID NO: 5701841 - DNA, 25 bp, Homo sapien
cagcttcagcgtcagcagcagctgg

SEQ ID NO: 5701842 - DNA, 25 bp, Homo sapien
gaagtagatggaggcccagtaccga

SEQ ID NO: 5701843 - DNA, 25 bp, Homo sapien
cggcattggtgaagggcgtgggagt

SEQ ID NO: 5701844 - DNA, 25 bp, Homo sapien
gacggccgtccccaggcccgcgcac

SEQ ID NO: 5701845 - DNA, 25 bp, Homo sapien
tctttgtgcaacactttattgggaa

SEQ ID NO: 5701846 - DNA, 25 bp, Homo sapien
gaccagctggcagagggagcgtcgt

SEQ ID NO: 5701847 - DNA, 25 bp, Homo sapien
gccgggcaggaggggccgagcagtc

SEQ ID NO: 5701848 - DNA, 25 bp, Homo sapien
gtctggacaatactttgattttgta

SEQ ID NO: 5701849 - DNA, 25 bp, Homo sapien
gacacccccgggtctgcttcagttg

SEQ ID NO: 5701850 - DNA, 25 bp, Homo sapien
cgtagaaggcgtcctcgcgcacggc

SEQ ID NO: 5701851 - DNA, 25 bp, Homo sapien
ggggccacaggtgaacagggtgagc

SEQ ID NO: 5701852 - DNA, 25 bp, Homo sapien
aggggccgcaggctgggcactgccc

SEQ ID NO: 5701853 - DNA, 25 bp, Homo sapien
gacggcattggtgaagggcgtggga

SEQ ID NO: 5701854 - DNA, 25 bp, Homo sapien
gtggcaggagcagggctgggcctga

SEQ ID NO: 5701855 - DNA, 25 bp, Homo sapien
gagcggggccggccaggcgcggcgc

SEQ ID NO: 5701856 - DNA, 25 bp, Homo sapien
acaggtgaacagggtgagccccagg

SEQ ID NO: 5701857 - DNA, 25 bp, Homo sapien
gaagacggggatcatgtagaagagg

SEQ ID NO: 5701858 - DNA, 25 bp, Homo sapien
gtagtcataggcgcgcatcttcagg

SEQ ID NO: 5701859 - DNA, 25 bp, Homo sapien
ggagcagggctgggcctgaatgagg

SEQ ID NO: 5701860 - DNA, 25 bp, Homo sapien
cacctaaagccagccccagccccag

SEQ ID NO: 5701861 - DNA, 25 bp, Homo sapien
ccgccttctccggactgctgggggg

SEQ ID NO: 5701862 - DNA, 25 bp, Homo sapien
ggggccagtgactcttgtctggaca

SEQ ID NO: 5701863 - DNA, 25 bp, Homo sapien
gctggggtcccgaggtggctcagat

SEQ ID NO: 5701864 - DNA, 25 bp, Homo sapien
ctggcagagggagcgtcgtgacagc

SEQ ID NO: 5701865 - DNA, 25 bp, Homo sapien
aggacataggaacgggcaggtgcgc

SEQ ID NO: 5701866 - DNA, 25 bp, Homo sapien
gctgggcctgaatgagggcccaggt

SEQ ID NO: 5701867 - DNA, 25 bp, Homo sapien
tctccaaggtaaggactctttctgg

SEQ ID NO: 5701868 - DNA, 25 bp, Homo sapien
gaccggctttcttaaagaggaagcc

SEQ ID NO: 5701869 - DNA, 25 bp, Homo sapien
gctgtagcagtcgatgttgcggatg

SEQ ID NO: 5701870 - DNA, 25 bp, Homo sapien
ggccctcggcagccaggcacagcgg

SEQ ID NO: 5701871 - DNA, 25 bp, Homo sapien
agtgactcttgtctggacaatactt

SEQ ID NO: 5701872 - DNA, 25 bp, Homo sapien
ggccaggctcaccagcttcagcgtc

SEQ ID NO: 5701873 - DNA, 25 bp, Homo sapien
gatatactgcgccagccaccactgc

SEQ ID NO: 5701874 - DNA, 25 bp, Homo sapien
catctcttcagcccaggaccggctt

SEQ ID NO: 5701875 - DNA, 25 bp, Homo sapien
caggctgggcactgccccggggaag

SEQ ID NO: 5701876 - DNA, 25 bp, Homo sapien
atgggacggccgtccccaggcccgc

SEQ ID NO: 5701877 - DNA, 25 bp, Homo sapien
ataggccaagcgatgagaagagggc

SEQ ID NO: 5701878 - DNA, 25 bp, Homo sapien
acgtccattcttcaggcgacatggt

SEQ ID NO: 5701879 - DNA, 25 bp, Homo sapien
gcttcccactcccaggacctgcccc

SEQ ID NO: 5701880 - DNA, 25 bp, Homo sapien
gcacagcgggatggtcaggaagctc

SEQ ID NO: 5701881 - DNA, 25 bp, Homo sapien
agggcgccaggagcgctggggtccc

SEQ ID NO: 5701882 - DNA, 25 bp, Homo sapien
tgtagaagaggcgggcgggcagcgg

SEQ ID NO: 5701883 - DNA, 25 bp, Homo sapien
caggaccggctttcttaaagaggaa

SEQ ID NO: 5701884 - DNA, 25 bp, Homo sapien
cccagtaccgaagggtgtcggccaa

SEQ ID NO: 5701885 - DNA, 25 bp, Homo sapien
aattctctccaggaccctctccaag

SEQ ID NO: 5701886 - DNA, 25 bp, Homo sapien
agcagcctggttcacagaattcccg

SEQ ID NO: 5701887 - DNA, 25 bp, Homo sapien
acagcttactcctcccggagcttct

SEQ ID NO: 5701888 - DNA, 25 bp, Homo sapien
taagaagaaccactagatacgtcca

SEQ ID NO: 5701889 - DNA, 25 bp, Homo sapien
agataggagaaagtccaggccagag

SEQ ID NO: 5701890 - DNA, 25 bp, Homo sapien
cactcccaggacctgcccccaagct

SEQ ID NO: 5701891 - DNA, 25 bp, Homo sapien
ggtgcgctcttgtagatatactgcg

SEQ ID NO: 5701892 - DNA, 25 bp, Homo sapien
tctctggatacccagaagctggagc

SEQ ID NO: 5701893 - DNA, 25 bp, Homo sapien
tttggcggccacggggtaggcccca

SEQ ID NO: 5701894 - DNA, 25 bp, Homo sapien
ggagataggagaaagtccaggccag

SEQ ID NO: 5701895 - DNA, 25 bp, Homo sapien
gcactgccccggggaagggctgctc

SEQ ID NO: 5701896 - DNA, 25 bp, Homo sapien
ccgcagggctgactccagccggccc

SEQ ID NO: 5701897 - DNA, 25 bp, Homo sapien
gatggggatggagataagaagaacc

SEQ ID NO: 5701898 - DNA, 25 bp, Homo sapien
agtcgatgttgcggatggtctcata

SEQ ID NO: 5701899 - DNA, 25 bp, Homo sapien
tcataggccaagcgatgagaagagg

SEQ ID NO: 5701900 - DNA, 25 bp, Homo sapien
attcccgggaccagctggcagaggg

SEQ ID NO: 5701901 - DNA, 25 bp, Homo sapien
tctccatcagggagggcacgtcggg

SEQ ID NO: 5701902 - DNA, 25 bp, Homo sapien
aagcttatgcttccttccaagtctg

SEQ ID NO: 5701903 - DNA, 25 bp, Homo sapien
acagttgaagtggttcgaattgaag

SEQ ID NO: 5701904 - DNA, 25 bp, Homo sapien
cttcaattcgaaccacttcaactgt

SEQ ID NO: 5701905 - DNA, 25 bp, Homo sapien
cttccaaggagttcggtcctggatg

SEQ ID NO: 5701906 - DNA, 25 bp, Homo sapien
catccaggaccgaactccttggaag

SEQ ID NO: 5701907 - DNA, 25 bp, Homo sapien
tttttatttaacctccataccagta

SEQ ID NO: 5701908 - DNA, 25 bp, Homo sapien
tactggtatggaggttaaataaaaa

SEQ ID NO: 5701909 - DNA, 25 bp, Homo sapien
cgaaggggccatatgagagtagtac

SEQ ID NO: 5701910 - DNA, 25 bp, Homo sapien
gtactactctcatatggccccttcg

SEQ ID NO: 5701911 - DNA, 25 bp, Homo sapien
tgtcgtcaccccgtctgcacgtcct

SEQ ID NO: 5701912 - DNA, 25 bp, Homo sapien
aggacgtgcagacggggtgacgaca

SEQ ID NO: 5701913 - DNA, 25 bp, Homo sapien
aagacctctaggagactttctaaat

SEQ ID NO: 5701914 - DNA, 25 bp, Homo sapien
atttagaaagtctcctagaggtctt

SEQ ID NO: 5701915 - DNA, 25 bp, Homo sapien
attaaacatctttgtggaggtattg

SEQ ID NO: 5701916 - DNA, 25 bp, Homo sapien
caatacctccacaaagatgtttaat

SEQ ID NO: 5701917 - DNA, 25 bp, Homo sapien
ctctcaacggtctgtgaaaggtcct

SEQ ID NO: 5701918 - DNA, 25 bp, Homo sapien
aggacctttcacagaccgttgagag

SEQ ID NO: 5701919 - DNA, 25 bp, Homo sapien
gttagtggtatacaagtttgacctc

SEQ ID NO: 5701920 - DNA, 25 bp, Homo sapien
gaggtcaaacttgtataccactaac

SEQ ID NO: 5701921 - DNA, 25 bp, Homo sapien
gccgaatttgccgtgtcctgtccag

SEQ ID NO: 5701922 - DNA, 25 bp, Homo sapien
ctggacaggacacggcaaattcggc

SEQ ID NO: 5701923 - DNA, 25 bp, Homo sapien
tataattaaatttgacagggtgtct

SEQ ID NO: 5701924 - DNA, 25 bp, Homo sapien
agacaccctgtcaaatttaattata

SEQ ID NO: 5701925 - DNA, 25 bp, Homo sapien
ggccctacttgatcgggccgcgcga

SEQ ID NO: 5701926 - DNA, 25 bp, Homo sapien
tcgcgcggcccgatcaagtagggcc

SEQ ID NO: 5701927 - DNA, 25 bp, Homo sapien
gtacgaggggtcctggaacgaggag

SEQ ID NO: 5701928 - DNA, 25 bp, Homo sapien
ctcctcgttccaggacccctcgtac

SEQ ID NO: 5701929 - DNA, 25 bp, Homo sapien
ggaagaacttgtttcgagtaataaa

SEQ ID NO: 5701930 - DNA, 25 bp, Homo sapien
tttattactcgaaacaagttcttcc

SEQ ID NO: 5701931 - DNA, 25 bp, Homo sapien
gaggaagaacttgtttcgagtaata

SEQ ID NO: 5701932 - DNA, 25 bp, Homo sapien
tattactcgaaacaagttcttcctc

SEQ ID NO: 5701933 - DNA, 25 bp, Homo sapien
agtgggtacggtcctcggaatggta

SEQ ID NO: 5701934 - DNA, 25 bp, Homo sapien
taccattccgaggaccgtacccact

SEQ ID NO: 5701935 - DNA, 25 bp, Homo sapien
gcgggaggagaagctcaccgactgg

SEQ ID NO: 5701936 - DNA, 25 bp, Homo sapien
tcctacggggtcacctcaaccgagt

SEQ ID NO: 5701937 - DNA, 25 bp, Homo sapien
tccgaggagccgccggtcgactaca

SEQ ID NO: 5701938 - DNA, 25 bp, Homo sapien
tttgttggaaaattgggctgggatc

SEQ ID NO: 5701939 - DNA, 25 bp, Homo sapien
tcaacgaggcccagtgagcagcttc

SEQ ID NO: 5701940 - DNA, 25 bp, Homo sapien
tgtcgatgcactacagtgaccccaa

SEQ ID NO: 5701941 - DNA, 25 bp, Homo sapien
actatcgggaccaggactatcggac

SEQ ID NO: 5701942 - DNA, 25 bp, Homo sapien
cagcagctctcagggctccacaagc

SEQ ID NO: 5701943 - DNA, 25 bp, Homo sapien
agtcggccgacggacataaggagac

SEQ ID NO: 5701944 - DNA, 25 bp, Homo sapien
cgcagtctcaacaaacaaaaagaaa

SEQ ID NO: 5701945 - DNA, 25 bp, Homo sapien
ggattcctacgaggcctccccgggc

SEQ ID NO: 5701946 - DNA, 25 bp, Homo sapien
gaggactggctgtgcaataagtgtg

SEQ ID NO: 5701947 - DNA, 25 bp, Homo sapien
tcctacaaggagacactgcacaaga

SEQ ID NO: 5701948 - DNA, 25 bp, Homo sapien
gagaagtgcttcaaatgtggcgtgc

SEQ ID NO: 5701949 - DNA, 25 bp, Homo sapien
tccccgggctccgagactcagcgta

SEQ ID NO: 5701950 - DNA, 25 bp, Homo sapien
ccgcaagaagcagggcattgtaacg

SEQ ID NO: 5701951 - DNA, 25 bp, Homo sapien
aggcctccctagagcctggggccga

SEQ ID NO: 5701952 - DNA, 25 bp, Homo sapien
caaaaccttgagattcaccggcgag

SEQ ID NO: 5701953 - DNA, 25 bp, Homo sapien
tggcatcactggaaccaaaggggat

SEQ ID NO: 5701954 - DNA, 25 bp, Homo sapien
atgacgactcatctgaggagcagag

SEQ ID NO: 5701955 - DNA, 25 bp, Homo sapien
gaggtgatgtctgggagcccttcct

SEQ ID NO: 5701956 - DNA, 25 bp, Homo sapien
cgccggtcgactacagctactacca

SEQ ID NO: 5701957 - DNA, 25 bp, Homo sapien
ggcagctcctacggggtcacctcaa

SEQ ID NO: 5701958 - DNA, 25 bp, Homo sapien
gagcaggtcccgaggcctccctaga

SEQ ID NO: 5701959 - DNA, 25 bp, Homo sapien
agttccccagcaaagaggcgctcat

SEQ ID NO: 5701960 - DNA, 25 bp, Homo sapien
gcctgtctgctctgccgacgccagt

SEQ ID NO: 5701961 - DNA, 25 bp, Homo sapien
gctgatgcggaacaaatcttcaggt

SEQ ID NO: 5701962 - DNA, 25 bp, Homo sapien
gcccagtgagcagcttcaagagcaa

SEQ ID NO: 5701963 - DNA, 25 bp, Homo sapien
ggagtcagccactgcagatgctggc

SEQ ID NO: 5701964 - DNA, 25 bp, Homo sapien
attgtaacgcctatcgaggcccaaa

SEQ ID NO: 5701965 - DNA, 25 bp, Homo sapien
gctggtgactgtggccggctgggag

SEQ ID NO: 5701966 - DNA, 25 bp, Homo sapien
cactccctcaacatcctgggccaga

SEQ ID NO: 5701967 - DNA, 25 bp, Homo sapien
ccgggacatggactaccgttcatat

SEQ ID NO: 5701968 - DNA, 25 bp, Homo sapien
tgctgctcctggcatctaccaacaa

SEQ ID NO: 5701969 - DNA, 25 bp, Homo sapien
gtaggcggcggcggcggcacaggca

SEQ ID NO: 5701970 - DNA, 25 bp, Homo sapien
tttgccaagggttctaagagggaca

SEQ ID NO: 5701971 - DNA, 25 bp, Homo sapien
agccactgcagatgctggctatgcc

SEQ ID NO: 5701972 - DNA, 25 bp, Homo sapien
gcggcagtgagtttccctgggaggg

SEQ ID NO: 5701973 - DNA, 25 bp, Homo sapien
acttcgagcagcctactcgggacgg

SEQ ID NO: 5701974 - DNA, 25 bp, Homo sapien
cgtggaggcagcccagctgctgcag

SEQ ID NO: 5701975 - DNA, 25 bp, Homo sapien
ctgggggccctggcaccctacgcgg

SEQ ID NO: 5701976 - DNA, 25 bp, Homo sapien
tcagctccctgcgagatgacgagag

SEQ ID NO: 5701977 - DNA, 25 bp, Homo sapien
gggcttgaccaaatcaaattgaggt

SEQ ID NO: 5701978 - DNA, 25 bp, Homo sapien
caaggtggggagggtacctgggcca

SEQ ID NO: 5701979 - DNA, 25 bp, Homo sapien
agccctaccaggcccagggagtcct

SEQ ID NO: 5701980 - DNA, 25 bp, Homo sapien
gctccagagccctacccatcctagt

SEQ ID NO: 5701981 - DNA, 25 bp, Homo sapien
agcagtacctgtactgggatgggga

SEQ ID NO: 5701982 - DNA, 25 bp, Homo sapien
aggcttcccccgagacggcgactat

SEQ ID NO: 5701983 - DNA, 25 bp, Homo sapien
cagcctacagcggggagagtgacag

SEQ ID NO: 5701984 - DNA, 25 bp, Homo sapien
ttctccacatgttgggtgtccatcc

SEQ ID NO: 5701985 - DNA, 25 bp, Homo sapien
gcctatcgaggcccaaacacgggtg

SEQ ID NO: 5701986 - DNA, 25 bp, Homo sapien
gagatgacgagaggcgggagtcagc

SEQ ID NO: 5701987 - DNA, 25 bp, Homo sapien
ctcccaagccctgtcacagggctcg

SEQ ID NO: 5701988 - DNA, 25 bp, Homo sapien
cactacagtgaccccaagcccaaga

SEQ ID NO: 5701989 - DNA, 25 bp, Homo sapien
cagggagtcctggcctcccaagccc

SEQ ID NO: 5701990 - DNA, 25 bp, Homo sapien
agtcctacaaggagacactgcacaa

SEQ ID NO: 5701991 - DNA, 25 bp, Homo sapien
ttccagcctatcagctccctgcgag

SEQ ID NO: 5701992 - DNA, 25 bp, Homo sapien
tattactacaatgctcagagccagc

SEQ ID NO: 5701993 - DNA, 25 bp, Homo sapien
aaggacagagtgttggatggctggg

SEQ ID NO: 5701994 - DNA, 25 bp, Homo sapien
gacgggctgggcagtgacaacattg

SEQ ID NO: 5701995 - DNA, 25 bp, Homo sapien
gccctgcacccaccactcactatcg

SEQ ID NO: 5701996 - DNA, 25 bp, Homo sapien
gaagccaatcagcactccctcaaca

SEQ ID NO: 5701997 - DNA, 25 bp, Homo sapien
gtccctgcaggaagcatcacccagg

SEQ ID NO: 5701998 - DNA, 25 bp, Homo sapien
aaggacaagcagacccaactgaacc

SEQ ID NO: 5701999 - DNA, 25 bp, Homo sapien
gactgtggccggctgggagtaggcg

SEQ ID NO: 5702000 - DNA, 25 bp, Homo sapien
agaagcacaagaccaagacagctca

SEQ ID NO: 5702001 - DNA, 25 bp, Homo sapien
ggcgactatcgggaccaggactatc

SEQ ID NO: 5702002 - DNA, 25 bp, Homo sapien
ctatcaggacatggagtatgaaaga

SEQ ID NO: 5702003 - DNA, 25 bp, Homo sapien
tgccaagggttctaagagggacatg

SEQ ID NO: 5702004 - DNA, 25 bp, Homo sapien
gatgctgcaggccatgggctggaaa

SEQ ID NO: 5702005 - DNA, 25 bp, Homo sapien
ttgagctggtgactgtggccggctg

SEQ ID NO: 5702006 - DNA, 25 bp, Homo sapien
ggatcagcagacactgccactgggt

SEQ ID NO: 5702007 - DNA, 25 bp, Homo sapien
ctgctgcagatcctgcaggccctgc

SEQ ID NO: 5702008 - DNA, 25 bp, Homo sapien
aggaagcatcacccaggctggcaga

SEQ ID NO: 5702009 - DNA, 25 bp, Homo sapien
aagctcagagaacgccaatgacacc

SEQ ID NO: 5702010 - DNA, 25 bp, Homo sapien
gggtacctgggccacctccgaggag

SEQ ID NO: 5702011 - DNA, 25 bp, Homo sapien
cgatgagacctccggctactactat

SEQ ID NO: 5702012 - DNA, 25 bp, Homo sapien
acctcaagggcaccaagggccctgg

SEQ ID NO: 5702013 - DNA, 25 bp, Homo sapien
ataagtgtggcgtccagaacttcaa

SEQ ID NO: 5702014 - DNA, 25 bp, Homo sapien
tctcacaggcctcccaaggtgggga

SEQ ID NO: 5702015 - DNA, 25 bp, Homo sapien
ctgggagggcagcgcgcttggcgct

SEQ ID NO: 5702016 - DNA, 25 bp, Homo sapien
caaacgccgagagaagtgcttcaaa

SEQ ID NO: 5702017 - DNA, 25 bp, Homo sapien
caccaagggccctggcatcactgga

SEQ ID NO: 5702018 - DNA, 25 bp, Homo sapien
tgaaacggagccagcggctgaggag

SEQ ID NO: 5702019 - DNA, 25 bp, Homo sapien
actgaccgctcgcaggatgatggtg

SEQ ID NO: 5702020 - DNA, 25 bp, Homo sapien
atgccatcctcgagaagaagggagc

SEQ ID NO: 5702021 - DNA, 25 bp, Homo sapien
tggcagatcatggtagcagcagcgg

SEQ ID NO: 5702022 - DNA, 25 bp, Homo sapien
caagcaaaaccttgagattcaccgg

SEQ ID NO: 5702023 - DNA, 25 bp, Homo sapien
agtcacttgcaggacgctacacgat

SEQ ID NO: 5702024 - DNA, 25 bp, Homo sapien
taccagtacgatgagacctccggct

SEQ ID NO: 5702025 - DNA, 25 bp, Homo sapien
gggagtaggcggcagtgagtttccc

SEQ ID NO: 5702026 - DNA, 25 bp, Homo sapien
gcctccctagagcctggggccgact

SEQ ID NO: 5702027 - DNA, 25 bp, Homo sapien
ctgaaccgcggctttgccttcatcc

SEQ ID NO: 5702028 - DNA, 25 bp, Homo sapien
cgctcgcaggatgatggtggggaga

SEQ ID NO: 5702029 - DNA, 25 bp, Homo sapien
gagagtgacagtgaggaggagcagg

SEQ ID NO: 5702030 - DNA, 25 bp, Homo sapien
atcagcagacactgccactgggtgg

SEQ ID NO: 5702031 - DNA, 25 bp, Homo sapien
gcagtcggccgacggacataaggag

SEQ ID NO: 5702032 - DNA, 25 bp, Homo sapien
actggcagaagctggcctgtctgct

SEQ ID NO: 5702033 - DNA, 25 bp, Homo sapien
tatcgacggcaagaccatcaatgtt

SEQ ID NO: 5702034 - DNA, 25 bp, Homo sapien
cctgggccgcaagaagcagggcatt

SEQ ID NO: 5702035 - DNA, 25 bp, Homo sapien
gcacgggaggttcggctgatgcgga

SEQ ID NO: 5702036 - DNA, 25 bp, Homo sapien
cttcaacgaggcccagtgagcagct

SEQ ID NO: 5702037 - DNA, 25 bp, Homo sapien
ggaggaggagaaggccagtaacatc

SEQ ID NO: 5702038 - DNA, 25 bp, Homo sapien
gctgcagtcgcacggcgtgcaagca

SEQ ID NO: 5702039 - DNA, 25 bp, Homo sapien
gatgcaggctttctctcgcgcccag

SEQ ID NO: 5702040 - DNA, 25 bp, Homo sapien
gaaaacgagctagaagcactagaga

SEQ ID NO: 5702041 - DNA, 25 bp, Homo sapien
gggggccctggcaccctacgcggtg

SEQ ID NO: 5702042 - DNA, 25 bp, Homo sapien
gcagacccaactgaaccgcggcttt

SEQ ID NO: 5702043 - DNA, 25 bp, Homo sapien
tgccttcatccagctctccaccatc

SEQ ID NO: 5702044 - DNA, 25 bp, Homo sapien
ctgggagtaggcggcagtgagtttc

SEQ ID NO: 5702045 - DNA, 25 bp, Homo sapien
gctgtgcaataagtgtggcgtccag

SEQ ID NO: 5702046 - DNA, 25 bp, Homo sapien
ctacacgatggatggaagccaatca

SEQ ID NO: 5702047 - DNA, 25 bp, Homo sapien
cgcgagtatggcagccaggagggca

SEQ ID NO: 5702048 - DNA, 25 bp, Homo sapien
atgctcagagccagcagtacctgta

SEQ ID NO: 5702049 - DNA, 25 bp, Homo sapien
gaggactggtggcagcctacagcgg

SEQ ID NO: 5702050 - DNA, 25 bp, Homo sapien
cagccgagaccacgactaccgggac

SEQ ID NO: 5702051 - DNA, 25 bp, Homo sapien
ggagaagcacaagaccaagacagct

SEQ ID NO: 5702052 - DNA, 25 bp, Homo sapien
ctgaggaggggccccagcagccccc

SEQ ID NO: 5702053 - DNA, 25 bp, Homo sapien
tatggcaacagccagggcacagagt

SEQ ID NO: 5702054 - DNA, 25 bp, Homo sapien
gctccacaagcaaaaccttgagatt

SEQ ID NO: 5702055 - DNA, 25 bp, Homo sapien
tctaccaacaatcagccgaggcgag

SEQ ID NO: 5702056 - DNA, 25 bp, Homo sapien
ctccctgcgagatgacgagaggcgg

SEQ ID NO: 5702057 - DNA, 25 bp, Homo sapien
gcccaagaggaggaagtacggcggc

SEQ ID NO: 5702058 - DNA, 25 bp, Homo sapien
tcctcgagaagaagggagcactagc

SEQ ID NO: 5702059 - DNA, 25 bp, Homo sapien
acttcaaacgccgagagaagtgctt

SEQ ID NO: 5702060 - DNA, 25 bp, Homo sapien
agagggcagcggcctgggccgcaag

SEQ ID NO: 5702061 - DNA, 25 bp, Homo sapien
ggacagagtgttggatggctgggac

SEQ ID NO: 5702062 - DNA, 25 bp, Homo sapien
taccgggaccgtgcagctgaacgca

SEQ ID NO: 5702063 - DNA, 25 bp, Homo sapien
cagattgccaaggacatggaacgct

SEQ ID NO: 5702064 - DNA, 25 bp, Homo sapien
gagtccctgcaggaagcatcaccca

SEQ ID NO: 5702065 - DNA, 25 bp, Homo sapien
agaagagtccctgcaggaagcatca

SEQ ID NO: 5702066 - DNA, 25 bp, Homo sapien
cagtgagtttccctgggagggcagc

SEQ ID NO: 5702067 - DNA, 25 bp, Homo sapien
tgtcctcctccaacgtgcgcgtcat

SEQ ID NO: 5702068 - DNA, 25 bp, Homo sapien
gccgactctgtgtcgatgcaggctt

SEQ ID NO: 5702069 - DNA, 25 bp, Homo sapien
caacctgaacccacacagcaccatg

SEQ ID NO: 5702070 - DNA, 25 bp, Homo sapien
cggcctctactatgaccccaactcc

SEQ ID NO: 5702071 - DNA, 25 bp, Homo sapien
gctcaacagattgccaaggacatgg

SEQ ID NO: 5702072 - DNA, 25 bp, Homo sapien
cacccaccactcactatcgacggca

SEQ ID NO: 5702073 - DNA, 25 bp, Homo sapien
ccagtcgtataccatcatgtcaccc

SEQ ID NO: 5702074 - DNA, 25 bp, Homo sapien
agaagctcaccgactggcagaagct

SEQ ID NO: 5702075 - DNA, 25 bp, Homo sapien
aagaggaggaagtacggcggcatat

SEQ ID NO: 5702076 - DNA, 25 bp, Homo sapien
gactcagcgtaggcggcggcggcgg

SEQ ID NO: 5702077 - DNA, 25 bp, Homo sapien
aagaagggagcactagccgagagac

SEQ ID NO: 5702078 - DNA, 25 bp, Homo sapien
aggccatgggctggaaagagggcag

SEQ ID NO: 5702079 - DNA, 25 bp, Homo sapien
ggcagaggtgatgtctgggagccct

SEQ ID NO: 5702080 - DNA, 25 bp, Homo sapien
gccatctcacaggcctcccaaggtg

SEQ ID NO: 5702081 - DNA, 25 bp, Homo sapien
agcactagagaagaatgacatggag

SEQ ID NO: 5702082 - DNA, 25 bp, Homo sapien
gcagggaaggacagagtgttggatg

SEQ ID NO: 5702083 - DNA, 25 bp, Homo sapien
gctggcagatcatggtagcagcagc

SEQ ID NO: 5702084 - DNA, 25 bp, Homo sapien
gacatggagcaaatgaagtaccggg

SEQ ID NO: 5702085 - DNA, 25 bp, Homo sapien
ggggccttgctcttgtcggccagcc

SEQ ID NO: 5702086 - DNA, 25 bp, Homo sapien
ggctttctctcgcgcccagcctggt

SEQ ID NO: 5702087 - DNA, 25 bp, Homo sapien
ctactatgaccccaactcccagtat

SEQ ID NO: 5702088 - DNA, 25 bp, Homo sapien
gtggcagcctacagcggggagagtg

SEQ ID NO: 5702089 - DNA, 25 bp, Homo sapien
ggcggcacaggcacagccccaccgg

SEQ ID NO: 5702090 - DNA, 25 bp, Homo sapien
tgggctggaaagagggcagcggcct

SEQ ID NO: 5702091 - DNA, 25 bp, Homo sapien
tggatggaagccaatcagcactccc

SEQ ID NO: 5702092 - DNA, 25 bp, Homo sapien
agccaagctcagagaacgccaatga

SEQ ID NO: 5702093 - DNA, 25 bp, Homo sapien
actatcgacggcaagaccatcaatg

SEQ ID NO: 5702094 - DNA, 25 bp, Homo sapien
actctgtgtcgatgcaggctttctc

SEQ ID NO: 5702095 - DNA, 25 bp, Homo sapien
cccgcttcaacgaggcccagtgagc

SEQ ID NO: 5702096 - DNA, 25 bp, Homo sapien
cagatgctggctatgccatcctcga

SEQ ID NO: 5702097 - DNA, 25 bp, Homo sapien
ggttcggctgatgcggaacaaatct

SEQ ID NO: 5702098 - DNA, 25 bp, Homo sapien
gctatggcaacagccagggcacaga

SEQ ID NO: 5702099 - DNA, 25 bp, Homo sapien
ctttctctcgcgcccagcctggtgc

SEQ ID NO: 5702100 - DNA, 25 bp, Homo sapien
cgaaattggccagtgacgaccgccc

SEQ ID NO: 5702101 - DNA, 25 bp, Homo sapien
aatcagcactccctcaacatcctgg

SEQ ID NO: 5702102 - DNA, 25 bp, Homo sapien
ttgaccaaatcaaattgaggtggtg

SEQ ID NO: 5702103 - DNA, 25 bp, Homo sapien
gagccctacccatcctagttctgct

SEQ ID NO: 5702104 - DNA, 25 bp, Homo sapien
gggctccacaagcaaaaccttgaga

SEQ ID NO: 5702105 - DNA, 25 bp, Homo sapien
tggagcaaatgaagtaccgggaccg

SEQ ID NO: 5702106 - DNA, 25 bp, Homo sapien
actaccgggacatggactaccgttc

SEQ ID NO: 5702107 - DNA, 25 bp, Homo sapien
gaaccgcagccgagaccacgactac

SEQ ID NO: 5702108 - DNA, 25 bp, Homo sapien
tgagattcaccggcgagcccacttg

SEQ ID NO: 5702109 - DNA, 25 bp, Homo sapien
cggctaccagccccactgcccagga

SEQ ID NO: 5702110 - DNA, 25 bp, Homo sapien
gcagcgcgcttggcgcttctcccct

SEQ ID NO: 5702111 - DNA, 25 bp, Homo sapien
aagagtccctgcaggaagcatcacc

SEQ ID NO: 5702112 - DNA, 25 bp, Homo sapien
cccaggaatcctacagccagtaccc

SEQ ID NO: 5702113 - DNA, 25 bp, Homo sapien
tgctgccacaggcagccactgagga

SEQ ID NO: 5702114 - DNA, 25 bp, Homo sapien
tcgacggcaagaccatcaatgttga

SEQ ID NO: 5702115 - DNA, 25 bp, Homo sapien
aagcacaagaccaagacagctcaac

SEQ ID NO: 5702116 - DNA, 25 bp, Homo sapien
gcgtgcaagcacgggaggttcggct

SEQ ID NO: 5702117 - DNA, 25 bp, Homo sapien
tatccacagcctctgtagacttcga

SEQ ID NO: 5702118 - DNA, 25 bp, Homo sapien
ggaggattcctacgaggcctccccg

SEQ ID NO: 5702119 - DNA, 25 bp, Homo sapien
tggactaccgttcatatcctcgcga

SEQ ID NO: 5702120 - DNA, 25 bp, Homo sapien
caatcagccgaggcgagcagtagcc

SEQ ID NO: 5702121 - DNA, 25 bp, Homo sapien
cagcctctgtagacttcgagcagcc

SEQ ID NO: 5702122 - DNA, 25 bp, Homo sapien
gcggaacaaatcttcaggtcagagc

SEQ ID NO: 5702123 - DNA, 25 bp, Homo sapien
acctatgttcccgccctggagcagt

SEQ ID NO: 5702124 - DNA, 25 bp, Homo sapien
tcttcaggtcagagccggggcttcg

SEQ ID NO: 5702125 - DNA, 25 bp, Homo sapien
acagcggggagagtgacagtgagga

SEQ ID NO: 5702126 - DNA, 25 bp, Homo sapien
ccaatcagcactccctcaacatcct

SEQ ID NO: 5702127 - DNA, 25 bp, Homo sapien
ccagtgagcagcttcaagagcaact

SEQ ID NO: 5702128 - DNA, 25 bp, Homo sapien
gtggggagggtacctgggccacctc

SEQ ID NO: 5702129 - DNA, 25 bp, Homo sapien
cggtgctgtcctcctccaacgtgcg

SEQ ID NO: 5702130 - DNA, 25 bp, Homo sapien
gggcagtgacaacattggcagtcgg

SEQ ID NO: 5702131 - DNA, 25 bp, Homo sapien
agccccactgcccaggaatcctaca

SEQ ID NO: 5702132 - DNA, 25 bp, Homo sapien
acggggtcacctcaaccgagtccta

SEQ ID NO: 5702133 - DNA, 25 bp, Homo sapien
caatgaaggcagtcgcatcagtgct

SEQ ID NO: 5702134 - DNA, 25 bp, Homo sapien
gagtaggcggcagtgagtttccctg

SEQ ID NO: 5702135 - DNA, 25 bp, Homo sapien
cctccccccgatctgcctccagtct

SEQ ID NO: 5702136 - DNA, 25 bp, Homo sapien
ctactaccaacaggatgagggctat

SEQ ID NO: 5702137 - DNA, 25 bp, Homo sapien
atcatggtagcagcagcgggggtgg

SEQ ID NO: 5702138 - DNA, 25 bp, Homo sapien
gctgcagatcctgcaggccctgcac

SEQ ID NO: 5702139 - DNA, 25 bp, Homo sapien
agcctggggccgactctgtgtcgat

SEQ ID NO: 5702140 - DNA, 25 bp, Homo sapien
cgtcgagtttagtcacttgcaggac

SEQ ID NO: 5702141 - DNA, 25 bp, Homo sapien
cgaggcccagtgagcagcttcaaga

SEQ ID NO: 5702142 - DNA, 25 bp, Homo sapien
agtaacatcgtcatgctgaggatgc

SEQ ID NO: 5702143 - DNA, 25 bp, Homo sapien
agtaccctgttcccgacgtctctac

SEQ ID NO: 5702144 - DNA, 25 bp, Homo sapien
ggcgctcatccggcaccagcagctc

SEQ ID NO: 5702145 - DNA, 25 bp, Homo sapien
ctgctctcccaccggctaccagccc

SEQ ID NO: 5702146 - DNA, 25 bp, Homo sapien
tcaccggcgagcccacttgtcagaa

SEQ ID NO: 5702147 - DNA, 25 bp, Homo sapien
ccaagaggaggaagtacggcggcat

SEQ ID NO: 5702148 - DNA, 25 bp, Homo sapien
gagctggtgactgtggccggctggg

SEQ ID NO: 5702149 - DNA, 25 bp, Homo sapien
aattgggctgggatcacgtcctgtt

SEQ ID NO: 5702150 - DNA, 25 bp, Homo sapien
ctgccacaggcagccactgaggatg

SEQ ID NO: 5702151 - DNA, 25 bp, Homo sapien
agacgtggtggtcgtggtgacagga

SEQ ID NO: 5702152 - DNA, 25 bp, Homo sapien
gccgggagctgagccagggcctgct

SEQ ID NO: 5702153 - DNA, 25 bp, Homo sapien
cacggcgtgcaagcacgggaggttc

SEQ ID NO: 5702154 - DNA, 25 bp, Homo sapien
ggcaaagagaagaaggagaagcaca

SEQ ID NO: 5702155 - DNA, 25 bp, Homo sapien
ggcccgcagtctcaacaaacaaaaa

SEQ ID NO: 5702156 - DNA, 25 bp, Homo sapien
gggccctggcatcactggaaccaaa

SEQ ID NO: 5702157 - DNA, 25 bp, Homo sapien
ggaaagagggcagcggcctgggccg

SEQ ID NO: 5702158 - DNA, 25 bp, Homo sapien
cgaggcctccctagagcctggggcc

SEQ ID NO: 5702159 - DNA, 25 bp, Homo sapien
ctggatcagcagacactgccactgg

SEQ ID NO: 5702160 - DNA, 25 bp, Homo sapien
gaggatgacatccgtggccagctgc

SEQ ID NO: 5702161 - DNA, 25 bp, Homo sapien
ggaacaaatcttcaggtcagagccg

SEQ ID NO: 5702162 - DNA, 25 bp, Homo sapien
ctcgcgcccagcctggtgctgctcc

SEQ ID NO: 5702163 - DNA, 25 bp, Homo sapien
tctccaccatcgtggaggcagccca

SEQ ID NO: 5702164 - DNA, 25 bp, Homo sapien
cctaccagtacgatgagacctccgg

SEQ ID NO: 5702165 - DNA, 25 bp, Homo sapien
gccctggcaccctacgcggtgctgt

SEQ ID NO: 5702166 - DNA, 25 bp, Homo sapien
ggaaccaaaggggatcccactggag

SEQ ID NO: 5702167 - DNA, 25 bp, Homo sapien
catggaacgctgggcccgcagtctc

SEQ ID NO: 5702168 - DNA, 25 bp, Homo sapien
gcggcggcggcggcacaggcacagc

SEQ ID NO: 5702169 - DNA, 25 bp, Homo sapien
cccctgccgcagccctaccaggccc

SEQ ID NO: 5702170 - DNA, 25 bp, Homo sapien
caggcccagggagtcctggcctccc

SEQ ID NO: 5702171 - DNA, 25 bp, Homo sapien
atcacgtcctgttttgtaataaaag

SEQ ID NO: 5702172 - DNA, 25 bp, Homo sapien
ccactccccagccagagagggcttg

SEQ ID NO: 5702173 - DNA, 25 bp, Homo sapien
aagcatgactatgacgactcatctg

SEQ ID NO: 5702174 - DNA, 25 bp, Homo sapien
taataaaagctgaaaagtctgcaaa

SEQ ID NO: 5702175 - DNA, 25 bp, Homo sapien
aagacagctcaacagattgccaagg

SEQ ID NO: 5702176 - DNA, 25 bp, Homo sapien
cggcggcatatccacagcctctgta

SEQ ID NO: 5702177 - DNA, 25 bp, Homo sapien
cggccagcccactccccagccagag

SEQ ID NO: 5702178 - DNA, 25 bp, Homo sapien
cccgctgtgctcaaatctgagctcc

SEQ ID NO: 5702179 - DNA, 25 bp, Homo sapien
tggcaacagccagggcacagagtct

SEQ ID NO: 5702180 - DNA, 25 bp, Homo sapien
agaaggagaagcacaagaccaagac

SEQ ID NO: 5702181 - DNA, 25 bp, Homo sapien
gcacgaggctggatcagcagacact

SEQ ID NO: 5702182 - DNA, 25 bp, Homo sapien
caggctttctctcgcgcccagcctg

SEQ ID NO: 5702183 - DNA, 25 bp, Homo sapien
ctacggggtcacctcaaccgagtcc

SEQ ID NO: 5702184 - DNA, 25 bp, Homo sapien
cagtgctgcctctgtggccagcact

SEQ ID NO: 5702185 - DNA, 25 bp, Homo sapien
gtgttggatggctgggacggggcct

SEQ ID NO: 5702186 - DNA, 25 bp, Homo sapien
cctccaatgaaggcagtcgcatcag

SEQ ID NO: 5702187 - DNA, 25 bp, Homo sapien
gttcccgccctggagcagtcggccg

SEQ ID NO: 5702188 - DNA, 25 bp, Homo sapien
acttggttgttgcgcgctccggctc

SEQ ID NO: 5702189 - DNA, 25 bp, Homo sapien
gaggagaaggccagtaacatcgtca

SEQ ID NO: 5702190 - DNA, 25 bp, Homo sapien
gatcctgcaggccctgcacccacca

SEQ ID NO: 5702191 - DNA, 25 bp, Homo sapien
gcttctcccctccccccgatctgcc

SEQ ID NO: 5702192 - DNA, 25 bp, Homo sapien
tcccagtattactacaatgctcaga

SEQ ID NO: 5702193 - DNA, 25 bp, Homo sapien
agtatggcagccaggagggcaagca

SEQ ID NO: 5702194 - DNA, 25 bp, Homo sapien
gcaacagccagggcacagagtcttc

SEQ ID NO: 5702195 - DNA, 25 bp, Homo sapien
tgcacccaccactcactatcgacgg

SEQ ID NO: 5702196 - DNA, 25 bp, Homo sapien
caggactggccgctatggagccact

SEQ ID NO: 5702197 - DNA, 25 bp, Homo sapien
ccagtctcggacttggttgttgcgc

SEQ ID NO: 5702198 - DNA, 25 bp, Homo sapien
ctatgttcccgccctggagcagtcg

SEQ ID NO: 5702199 - DNA, 25 bp, Homo sapien
tcgagtttagtcacttgcaggacgc

SEQ ID NO: 5702200 - DNA, 25 bp, Homo sapien
ctgaggagcagagtgcggaggattc

SEQ ID NO: 5702201 - DNA, 25 bp, Homo sapien
cagtcgcacggcgtgcaagcacggg

SEQ ID NO: 5702202 - DNA, 25 bp, Homo sapien
ggcgtgcccaagtcagaggcagagc

SEQ ID NO: 5702203 - DNA, 25 bp, Homo sapien
acaccagcatggatctcccgaaatt

SEQ ID NO: 5702204 - DNA, 25 bp, Homo sapien
accacgactaccgggacatggacta

SEQ ID NO: 5702205 - DNA, 25 bp, Homo sapien
gaggcgctcatccggcaccagcagc

SEQ ID NO: 5702206 - DNA, 25 bp, Homo sapien
agacactgcacaagacaatggtgac

SEQ ID NO: 5702207 - DNA, 25 bp, Homo sapien
taccctgttcccgacgtctctacct

SEQ ID NO: 5702208 - DNA, 25 bp, Homo sapien
acttgtcagaaaacgagctagaagc

SEQ ID NO: 5702209 - DNA, 25 bp, Homo sapien
tccccgagccgccagagcccaagag

SEQ ID NO: 5702210 - DNA, 25 bp, Homo sapien
gtgctgtcctcctccaacgtgcgcg

SEQ ID NO: 5702211 - DNA, 25 bp, Homo sapien
ggcccagggagtcctggcctcccaa

SEQ ID NO: 5702212 - DNA, 25 bp, Homo sapien
ccaggactatcggaccgagcaaggg

SEQ ID NO: 5702213 - DNA, 25 bp, Homo sapien
ctgagctgggagagttggaggaggt

SEQ ID NO: 5702214 - DNA, 25 bp, Homo sapien
ggatctcccgaaattggccagtgac

SEQ ID NO: 5702215 - DNA, 25 bp, Homo sapien
actggagcaggtcccgaggcctccc

SEQ ID NO: 5702216 - DNA, 25 bp, Homo sapien
ccctgagcgggaggagaagctcacc

SEQ ID NO: 5702217 - DNA, 25 bp, Homo sapien
gaccaggactatcggaccgagcaag

SEQ ID NO: 5702218 - DNA, 25 bp, Homo sapien
agagtgttggatggctgggacgggg

SEQ ID NO: 5702219 - DNA, 25 bp, Homo sapien
cgctacacgatggatggaagccaat

SEQ ID NO: 5702220 - DNA, 25 bp, Homo sapien
gctcagagccagcagtacctgtact

SEQ ID NO: 5702221 - DNA, 25 bp, Homo sapien
ccactcactatcgacggcaagacca

SEQ ID NO: 5702222 - DNA, 25 bp, Homo sapien
gtggcgtgcccaagtcagaggcaga

SEQ ID NO: 5702223 - DNA, 25 bp, Homo sapien
cagaacttcaaacgccgagagaagt

SEQ ID NO: 5702224 - DNA, 25 bp, Homo sapien
gagctccagagccctacccatccta

SEQ ID NO: 5702225 - DNA, 25 bp, Homo sapien
agccagtaccctgttcccgacgtct

SEQ ID NO: 5702226 - DNA, 25 bp, Homo sapien
cagcgtaggcggcggcggcggcaca

SEQ ID NO: 5702227 - DNA, 25 bp, Homo sapien
ttggcagtcggatgctgcaggccat

SEQ ID NO: 5702228 - DNA, 25 bp, Homo sapien
actgccactgggtggccgggagctg

SEQ ID NO: 5702229 - DNA, 25 bp, Homo sapien
agacaatggtgacccgcttcaacga

SEQ ID NO: 5702230 - DNA, 25 bp, Homo sapien
cagagtgcggaggattcctacgagg

SEQ ID NO: 5702231 - DNA, 25 bp, Homo sapien
gcacagccccaccggcccgccaggc

SEQ ID NO: 5702232 - DNA, 25 bp, Homo sapien
tgggtggccgggagctgagccaggg

SEQ ID NO: 5702233 - DNA, 25 bp, Homo sapien
cccctccccccgatctgcctccagt

SEQ ID NO: 5702234 - DNA, 25 bp, Homo sapien
ggctggaaagagggcagcggcctgg

SEQ ID NO: 5702235 - DNA, 25 bp, Homo sapien
gcgtcataaaggacaagcagaccca

SEQ ID NO: 5702236 - DNA, 25 bp, Homo sapien
actgccattgctgcggcccagtggg

SEQ ID NO: 5702237 - DNA, 25 bp, Homo sapien
tatgaaagacgtggtggtcgtggtg

SEQ ID NO: 5702238 - DNA, 25 bp, Homo sapien
cgactcatctgaggagcagagtgcg

SEQ ID NO: 5702239 - DNA, 25 bp, Homo sapien
cacgactaccgggacatggactacc

SEQ ID NO: 5702240 - DNA, 25 bp, Homo sapien
actcatctgaggagcagagtgcgga

SEQ ID NO: 5702241 - DNA, 25 bp, Homo sapien
aggacgctacacgatggatggaagc

SEQ ID NO: 5702242 - DNA, 25 bp, Homo sapien
gctgaaaagtctgcaaaaaaaaaaa

SEQ ID NO: 5702243 - DNA, 25 bp, Homo sapien
agtgcttcaaatgtggcgtgcccaa

SEQ ID NO: 5702244 - DNA, 25 bp, Homo sapien
catccggcaccagcagctctcaggg

SEQ ID NO: 5702245 - DNA, 25 bp, Homo sapien
tgggagagttggaggaggtggcggc

SEQ ID NO: 5702246 - DNA, 25 bp, Homo sapien
caagatcaatgaggactggctgtgc

SEQ ID NO: 5702247 - DNA, 25 bp, Homo sapien
ccctgcgagatgacgagaggcggga

SEQ ID NO: 5702248 - DNA, 25 bp, Homo sapien
ttcaagagcaacttctccacatgtt

SEQ ID NO: 5702249 - DNA, 25 bp, Homo sapien
aggcggacctatgttcccgccctgg

SEQ ID NO: 5702250 - DNA, 25 bp, Homo sapien
agacggcgactatcgggaccaggac

SEQ ID NO: 5702251 - DNA, 25 bp, Homo sapien
catcctagttctgctctcccaccgg

SEQ ID NO: 5702252 - DNA, 25 bp, Homo sapien
cttttgttggaaaattgggctggga

SEQ ID NO: 5702253 - DNA, 25 bp, Homo sapien
ccagcaaagaggcgctcatccggca

SEQ ID NO: 5702254 - DNA, 25 bp, Homo sapien
atggattccatcctgggggccctgg

SEQ ID NO: 5702255 - DNA, 25 bp, Homo sapien
ccctgttcccgacgtctctacctac

SEQ ID NO: 5702256 - DNA, 25 bp, Homo sapien
gtcccgaggcctccctagagcctgg

SEQ ID NO: 5702257 - DNA, 25 bp, Homo sapien
caagtcagaggcagagcagaagctg

SEQ ID NO: 5702258 - DNA, 25 bp, Homo sapien
cagcacaccagcatggatctcccga

SEQ ID NO: 5702259 - DNA, 25 bp, Homo sapien
ccatcctggggcagggaaggacaga

SEQ ID NO: 5702260 - DNA, 25 bp, Homo sapien
gactatgacgactcatctgaggagc

SEQ ID NO: 5702261 - DNA, 25 bp, Homo sapien
accggcgagcccacttgtcagaaaa

SEQ ID NO: 5702262 - DNA, 25 bp, Homo sapien
acgtggtggtcgtggtgacaggact

SEQ ID NO: 5702263 - DNA, 25 bp, Homo sapien
aggaggaggaggagaaggccagtaa

SEQ ID NO: 5702264 - DNA, 25 bp, Homo sapien
atcaatgttgagtttgccaagggtt

SEQ ID NO: 5702265 - DNA, 25 bp, Homo sapien
cgctatggagccactgaccgctcgc

SEQ ID NO: 5702266 - DNA, 25 bp, Homo sapien
cagccactgaggatgacatccgtgg

SEQ ID NO: 5702267 - DNA, 25 bp, Homo sapien
ggggtcacctcaaccgagtcctaca

SEQ ID NO: 5702268 - DNA, 25 bp, Homo sapien
tcccgacgtctctacctaccagtac

SEQ ID NO: 5702269 - DNA, 25 bp, Homo sapien
aggtcccgaggcctccctagagcct

SEQ ID NO: 5702270 - DNA, 25 bp, Homo sapien
gtgcacggggcagctcctacggggt

SEQ ID NO: 5702271 - DNA, 25 bp, Homo sapien
ggtgcggggctccggcctgggtgca

SEQ ID NO: 5702272 - DNA, 25 bp, Homo sapien
gattgccaaggacatggaacgctgg

SEQ ID NO: 5702273 - DNA, 25 bp, Homo sapien
tgcacaagacaatggtgacccgctt

SEQ ID NO: 5702274 - DNA, 25 bp, Homo sapien
gagcaaatgaagtaccgggaccgtg

SEQ ID NO: 5702275 - DNA, 25 bp, Homo sapien
actatgacccccagaccggcctcta

SEQ ID NO: 5702276 - DNA, 25 bp, Homo sapien
tccccagccagagagggcttgacca

SEQ ID NO: 5702277 - DNA, 25 bp, Homo sapien
gggagggtacctgggccacctccga

SEQ ID NO: 5702278 - DNA, 25 bp, Homo sapien
cgagaagaagggagcactagccgag

SEQ ID NO: 5702279 - DNA, 25 bp, Homo sapien
tgcccaggaatcctacagccagtac

SEQ ID NO: 5702280 - DNA, 25 bp, Homo sapien
ccagtaacatcgtcatgctgaggat

SEQ ID NO: 5702281 - DNA, 25 bp, Homo sapien
tatcctcgcgagtatggcagccagg

SEQ ID NO: 5702282 - DNA, 25 bp, Homo sapien
aagtatggcatccccgagccgccag

SEQ ID NO: 5702283 - DNA, 25 bp, Homo sapien
ggagaggcggacctatgttcccgcc

SEQ ID NO: 5702284 - DNA, 25 bp, Homo sapien
aaaccttgagattcaccggcgagcc

SEQ ID NO: 5702285 - DNA, 25 bp, Homo sapien
ggacaagcagacccaactgaaccgc

SEQ ID NO: 5702286 - DNA, 25 bp, Homo sapien
aggggccccagcagcccccgaaggc

SEQ ID NO: 5702287 - DNA, 25 bp, Homo sapien
agacactgccactgggtggccggga

SEQ ID NO: 5702288 - DNA, 25 bp, Homo sapien
ccacttgtcagaaaacgagctagaa

SEQ ID NO: 5702289 - DNA, 25 bp, Homo sapien
agagccagcagtacctgtactggga

SEQ ID NO: 5702290 - DNA, 25 bp, Homo sapien
caatgttgagtttgccaagggttct

SEQ ID NO: 5702291 - DNA, 25 bp, Homo sapien
tccatcctgggggccctggcaccct

SEQ ID NO: 5702292 - DNA, 25 bp, Homo sapien
gagacaggggcaccctcgaaggagg

SEQ ID NO: 5702293 - DNA, 25 bp, Homo sapien
gagaagaaggagaagcacaagacca

SEQ ID NO: 5702294 - DNA, 25 bp, Homo sapien
catcattttgcgcaacctgaaccca

SEQ ID NO: 5702295 - DNA, 25 bp, Homo sapien
gcagacactgccactgggtggccgg

SEQ ID NO: 5702296 - DNA, 25 bp, Homo sapien
gcaagaccatcaatgttgagtttgc

SEQ ID NO: 5702297 - DNA, 25 bp, Homo sapien
accgagtcctacaaggagacactgc

SEQ ID NO: 5702298 - DNA, 25 bp, Homo sapien
cagggctcggagccaagctcagaga

SEQ ID NO: 5702299 - DNA, 25 bp, Homo sapien
ctcctccaacgtgcgcgtcataaag

SEQ ID NO: 5702300 - DNA, 25 bp, Homo sapien
ctggaaccaaaggggatcccactgg

SEQ ID NO: 5702301 - DNA, 25 bp, Homo sapien
cggcaagaccatcaatgttgagttt

SEQ ID NO: 5702302 - DNA, 25 bp, Homo sapien
caggacatggagtatgaaagacgtg

SEQ ID NO: 5702303 - DNA, 25 bp, Homo sapien
ggggagaggcggacctatgttcccg

SEQ ID NO: 5702304 - DNA, 25 bp, Homo sapien
gcacaccagcatggatctcccgaaa

SEQ ID NO: 5702305 - DNA, 25 bp, Homo sapien
accagcagctctcagggctccacaa

SEQ ID NO: 5702306 - DNA, 25 bp, Homo sapien
tccacaagcaaaaccttgagattca

SEQ ID NO: 5702307 - DNA, 25 bp, Homo sapien
ttttgagctggtgactgtggccggc

SEQ ID NO: 5702308 - DNA, 25 bp, Homo sapien
cgccttcgtcgagtttagtcacttg

SEQ ID NO: 5702309 - DNA, 25 bp, Homo sapien
ggacctatgttcccgccctggagca

SEQ ID NO: 5702310 - DNA, 25 bp, Homo sapien
gcggcggcacaggcacagccccacc

SEQ ID NO: 5702311 - DNA, 25 bp, Homo sapien
ctgcggcccagtgggccatctcaca

SEQ ID NO: 5702312 - DNA, 25 bp, Homo sapien
actcccagtattactacaatgctca

SEQ ID NO: 5702313 - DNA, 25 bp, Homo sapien
aggagggcaagcatgactatgacga

SEQ ID NO: 5702314 - DNA, 25 bp, Homo sapien
tttgcgcaacctgaacccacacagc

SEQ ID NO: 5702315 - DNA, 25 bp, Homo sapien
gttgcgcgctccggctccggctgag

SEQ ID NO: 5702316 - DNA, 25 bp, Homo sapien
gcgcttctcccctccccccgatctg

SEQ ID NO: 5702317 - DNA, 25 bp, Homo sapien
gagaggcgggagtcagccactgcag

SEQ ID NO: 5702318 - DNA, 25 bp, Homo sapien
acggggcagctcctacggggtcacc

SEQ ID NO: 5702319 - DNA, 25 bp, Homo sapien
agcagcctactcgggacgggctggg

SEQ ID NO: 5702320 - DNA, 25 bp, Homo sapien
ctcagggctccacaagcaaaacctt

SEQ ID NO: 5702321 - DNA, 25 bp, Homo sapien
tcctgttttgtaataaaagctgaaa

SEQ ID NO: 5702322 - DNA, 25 bp, Homo sapien
gcaccagcagctctcagggctccac

SEQ ID NO: 5702323 - DNA, 25 bp, Homo sapien
ctacagctactaccaacaggatgag

SEQ ID NO: 5702324 - DNA, 25 bp, Homo sapien
ccgagactcagcgtaggcggcggcg

SEQ ID NO: 5702325 - DNA, 25 bp, Homo sapien
ccgagagaagtgcttcaaatgtggc

SEQ ID NO: 5702326 - DNA, 25 bp, Homo sapien
tagaagcactagagaagaatgacat

SEQ ID NO: 5702327 - DNA, 25 bp, Homo sapien
atcgaggcccaaacacgggtgcggg

SEQ ID NO: 5702328 - DNA, 25 bp, Homo sapien
ggccctatcaggacatggagtatga

SEQ ID NO: 5702329 - DNA, 25 bp, Homo sapien
atcgtcatgctgaggatgctgccac

SEQ ID NO: 5702330 - DNA, 25 bp, Homo sapien
cactagccgagagacagcacaccag

SEQ ID NO: 5702331 - DNA, 25 bp, Homo sapien
gctcaccgactggcagaagctggcc

SEQ ID NO: 5702332 - DNA, 25 bp, Homo sapien
cagtcggatgctgcaggccatgggc

SEQ ID NO: 5702333 - DNA, 25 bp, Homo sapien
ctacaaggagacactgcacaagaca

SEQ ID NO: 5702334 - DNA, 25 bp, Homo sapien
atggagccactgaccgctcgcagga

SEQ ID NO: 5702335 - DNA, 25 bp, Homo sapien
agtacgatgagacctccggctacta

SEQ ID NO: 5702336 - DNA, 25 bp, Homo sapien
aggatgctgccacaggcagccactg

SEQ ID NO: 5702337 - DNA, 25 bp, Homo sapien
gcacggggcagctcctacggggtca

SEQ ID NO: 5702338 - DNA, 25 bp, Homo sapien
ccccagcaaagaggcgctcatccgg

SEQ ID NO: 5702339 - DNA, 25 bp, Homo sapien
gacagctcaacagattgccaaggac

SEQ ID NO: 5702340 - DNA, 25 bp, Homo sapien
agttggaggaggtggcggcgggcag

SEQ ID NO: 5702341 - DNA, 25 bp, Homo sapien
cgagaccacgactaccgggacatgg

SEQ ID NO: 5702342 - DNA, 25 bp, Homo sapien
aaatcaaattgaggtggtgactttt

SEQ ID NO: 5702343 - DNA, 25 bp, Homo sapien
cgaggagccgccggtcgactacagc

SEQ ID NO: 5702344 - DNA, 25 bp, Homo sapien
aacagccagggcacagagtcttccc

SEQ ID NO: 5702345 - DNA, 25 bp, Homo sapien
gcgaggactggtggcagcctacagc

SEQ ID NO: 5702346 - DNA, 25 bp, Homo sapien
ggcctgggccgcaagaagcagggca

SEQ ID NO: 5702347 - DNA, 25 bp, Homo sapien
aaatgtggcgtgcccaagtcagagg

SEQ ID NO: 5702348 - DNA, 25 bp, Homo sapien
cgccgagagaagtgcttcaaatgtg

SEQ ID NO: 5702349 - DNA, 25 bp, Homo sapien
agaggcggacctatgttcccgccct

SEQ ID NO: 5702350 - DNA, 25 bp, Homo sapien
ctaccgttcatatcctcgcgagtat

SEQ ID NO: 5702351 - DNA, 25 bp, Homo sapien
gccattttgagctggtgactgtggc

SEQ ID NO: 5702352 - DNA, 25 bp, Homo sapien
gcgtaggcggcggcggcggcacagg

SEQ ID NO: 5702353 - DNA, 25 bp, Homo sapien
ccaagggttctaagagggacatggc

SEQ ID NO: 5702354 - DNA, 25 bp, Homo sapien
ctatgcccatggctacctcaagggc

SEQ ID NO: 5702355 - DNA, 25 bp, Homo sapien
ggtgatgtctgggagcccttccttg

SEQ ID NO: 5702356 - DNA, 25 bp, Homo sapien
tcagagaacgccaatgacaccatca

SEQ ID NO: 5702357 - DNA, 25 bp, Homo sapien
ggccagtaacatcgtcatgctgagg

SEQ ID NO: 5702358 - DNA, 25 bp, Homo sapien
caaagaggcgctcatccggcaccag

SEQ ID NO: 5702359 - DNA, 25 bp, Homo sapien
ttgacagcccgggccgagaagagtc

SEQ ID NO: 5702360 - DNA, 25 bp, Homo sapien
aggggatcccactggagcaggtccc

SEQ ID NO: 5702361 - DNA, 25 bp, Homo sapien
tacctaccagtacgatgagacctcc

SEQ ID NO: 5702362 - DNA, 25 bp, Homo sapien
ggctccgagactcagcgtaggcggc

SEQ ID NO: 5702363 - DNA, 25 bp, Homo sapien
ggcccgccaggcttcccccgagacg

SEQ ID NO: 5702364 - DNA, 25 bp, Homo sapien
ctagagcctggggccgactctgtgt

SEQ ID NO: 5702365 - DNA, 25 bp, Homo sapien
tgaggaggaggaggagaaggccagt

SEQ ID NO: 5702366 - DNA, 25 bp, Homo sapien
gatggctgggacggggccttgctct

SEQ ID NO: 5702367 - DNA, 25 bp, Homo sapien
gcaagaagcagggcattgtaacgcc

SEQ ID NO: 5702368 - DNA, 25 bp, Homo sapien
actaccaacaggatgagggctatgg

SEQ ID NO: 5702369 - DNA, 25 bp, Homo sapien
tccagagccctacccatcctagttc

SEQ ID NO: 5702370 - DNA, 25 bp, Homo sapien
atgcggaacaaatcttcaggtcaga

SEQ ID NO: 5702371 - DNA, 25 bp, Homo sapien
taaaggacaagcagacccaactgaa

SEQ ID NO: 5702372 - DNA, 25 bp, Homo sapien
caacttctccacatgttgggtgtcc

SEQ ID NO: 5702373 - DNA, 25 bp, Homo sapien
cggacataaggagacaggggcaccc

SEQ ID NO: 5702374 - DNA, 25 bp, Homo sapien
acacagcaccatggattccatcctg

SEQ ID NO: 5702375 - DNA, 25 bp, Homo sapien
cgccaggcttcccccgagacggcga

SEQ ID NO: 5702376 - DNA, 25 bp, Homo sapien
ctccggctgagctgggagagttgga

SEQ ID NO: 5702377 - DNA, 25 bp, Homo sapien
cagagccctacccatcctagttctg

SEQ ID NO: 5702378 - DNA, 25 bp, Homo sapien
gagagggcttgaccaaatcaaattg

SEQ ID NO: 5702379 - DNA, 25 bp, Homo sapien
agccccaccggcccgccaggcttcc

SEQ ID NO: 5702380 - DNA, 25 bp, Homo sapien
cggctactactatgacccccagacc

SEQ ID NO: 5702381 - DNA, 25 bp, Homo sapien
agcccaagatcaatgaggactggct

SEQ ID NO: 5702382 - DNA, 25 bp, Homo sapien
ccatcgtggaggcagcccagctgct

SEQ ID NO: 5702383 - DNA, 25 bp, Homo sapien
ctacagccagtaccctgttcccgac

SEQ ID NO: 5702384 - DNA, 25 bp, Homo sapien
gacggcaagaccatcaatgttgagt

SEQ ID NO: 5702385 - DNA, 25 bp, Homo sapien
gggcagcgcgcttggcgcttctccc

SEQ ID NO: 5702386 - DNA, 25 bp, Homo sapien
aacgccaatgacaccatcattttgc

SEQ ID NO: 5702387 - DNA, 25 bp, Homo sapien
agctgagccagggcctgcttcccct

SEQ ID NO: 5702388 - DNA, 25 bp, Homo sapien
gacgaccgcccaagccctccgcgag

SEQ ID NO: 5702389 - DNA, 25 bp, Homo sapien
taccagccccactgcccaggaatcc

SEQ ID NO: 5702390 - DNA, 25 bp, Homo sapien
cagtgaggaggagcaggagcgtggg

SEQ ID NO: 5702391 - DNA, 25 bp, Homo sapien
gctcggagccaagctcagagaacgc

SEQ ID NO: 5702392 - DNA, 25 bp, Homo sapien
tacctgtactgggatggggagaggc

SEQ ID NO: 5702393 - DNA, 25 bp, Homo sapien
ggctgagctgggagagttggaggag

SEQ ID NO: 5702394 - DNA, 25 bp, Homo sapien
tgctggctatgccatcctcgagaag

SEQ ID NO: 5702395 - DNA, 25 bp, Homo sapien
agctgggagagttggaggaggtggc

SEQ ID NO: 5702396 - DNA, 25 bp, Homo sapien
tgggcccgcagtctcaacaaacaaa

SEQ ID NO: 5702397 - DNA, 25 bp, Homo sapien
ttctctcgcgcccagcctggtgctg

SEQ ID NO: 5702398 - DNA, 25 bp, Homo sapien
ggctgggcagtgacaacattggcag

SEQ ID NO: 5702399 - DNA, 25 bp, Homo sapien
cgcgctccggctccggctgagctgg

SEQ ID NO: 5702400 - DNA, 25 bp, Homo sapien
atggtggggagaaccgcagccgaga

SEQ ID NO: 5702401 - DNA, 25 bp, Homo sapien
gacataaggagacaggggcaccctc

SEQ ID NO: 5702402 - DNA, 25 bp, Homo sapien
gctgtcctcctccaacgtgcgcgtc

SEQ ID NO: 5702403 - DNA, 25 bp, Homo sapien
gacgccagttccccagcaaagaggc

SEQ ID NO: 5702404 - DNA, 25 bp, Homo sapien
cccagtgggccatctcacaggcctc

SEQ ID NO: 5702405 - DNA, 25 bp, Homo sapien
gctgggacggggccttgctcttgtc

SEQ ID NO: 5702406 - DNA, 25 bp, Homo sapien
aagcagacccaactgaaccgcggct

SEQ ID NO: 5702407 - DNA, 25 bp, Homo sapien
taaggagacaggggcaccctcgaag

SEQ ID NO: 5702408 - DNA, 25 bp, Homo sapien
agcgcgcttggcgcttctcccctcc

SEQ ID NO: 5702409 - DNA, 25 bp, Homo sapien
gagggcttgaccaaatcaaattgag

SEQ ID NO: 5702410 - DNA, 25 bp, Homo sapien
agagggacatggcctccaatgaagg

SEQ ID NO: 5702411 - DNA, 25 bp, Homo sapien
gaggttcggctgatgcggaacaaat

SEQ ID NO: 5702412 - DNA, 25 bp, Homo sapien
ctctactatgaccccaactcccagt

SEQ ID NO: 5702413 - DNA, 25 bp, Homo sapien
gacttttgttggaaaattgggctgg

SEQ ID NO: 5702414 - DNA, 25 bp, Homo sapien
ccctctatgcccatggctacctcaa

SEQ ID NO: 5702415 - DNA, 25 bp, Homo sapien
tgggatggggagaggcggacctatg

SEQ ID NO: 5702416 - DNA, 25 bp, Homo sapien
ggagcagagtgcggaggattcctac

SEQ ID NO: 5702417 - DNA, 25 bp, Homo sapien
ccaggctggcagatcatggtagcag

SEQ ID NO: 5702418 - DNA, 25 bp, Homo sapien
ggcaccaagggccctggcatcactg

SEQ ID NO: 5702419 - DNA, 25 bp, Homo sapien
gatcccactggagcaggtcccgagg

SEQ ID NO: 5702420 - DNA, 25 bp, Homo sapien
gccagcggctgaggaggggccccag

SEQ ID NO: 5702421 - DNA, 25 bp, Homo sapien
ggtcagagccggggcttcgccttcg

SEQ ID NO: 5702422 - DNA, 25 bp, Homo sapien
gcaggaagcatcacccaggctggca

SEQ ID NO: 5702423 - DNA, 25 bp, Homo sapien
tctcccaccggctaccagccccact

SEQ ID NO: 5702424 - DNA, 25 bp, Homo sapien
tatcagctccctgcgagatgacgag

SEQ ID NO: 5702425 - DNA, 25 bp, Homo sapien
gagtttagtcacttgcaggacgcta

SEQ ID NO: 5702426 - DNA, 25 bp, Homo sapien
ggcagccactgaggatgacatccgt

SEQ ID NO: 5702427 - DNA, 25 bp, Homo sapien
ctgttcccgacgtctctacctacca

SEQ ID NO: 5702428 - DNA, 25 bp, Homo sapien
gccagggcacagagtcttccctcta

SEQ ID NO: 5702429 - DNA, 25 bp, Homo sapien
caacgtgcgcgtcataaaggacaag

SEQ ID NO: 5702430 - DNA, 25 bp, Homo sapien
gggcaccctcgaaggagggcaaaga

SEQ ID NO: 5702431 - DNA, 25 bp, Homo sapien
tgaccccaactcccagtattactac

SEQ ID NO: 5702432 - DNA, 25 bp, Homo sapien
aagctcaccgactggcagaagctgg

SEQ ID NO: 5702433 - DNA, 25 bp, Homo sapien
ccctagagcctggggccgactctgt

SEQ ID NO: 5702434 - DNA, 25 bp, Homo sapien
gaggagcagagtgcggaggattcct

SEQ ID NO: 5702435 - DNA, 25 bp, Homo sapien
gaggcgggagtcagccactgcagat

SEQ ID NO: 5702436 - DNA, 25 bp, Homo sapien
ccaacaatcagccgaggcgagcagt

SEQ ID NO: 5702437 - DNA, 25 bp, Homo sapien
accgttcatatcctcgcgagtatgg

SEQ ID NO: 5702438 - DNA, 25 bp, Homo sapien
taagagggacatggcctccaatgaa

SEQ ID NO: 5702439 - DNA, 25 bp, Homo sapien
ggatgacatccgtggccagctgcag

SEQ ID NO: 5702440 - DNA, 25 bp, Homo sapien
cataaaggacaagcagacccaactg

SEQ ID NO: 5702441 - DNA, 25 bp, Homo sapien
gaacttcaaacgccgagagaagtgc

SEQ ID NO: 5702442 - DNA, 25 bp, Homo sapien
tacgatgagacctccggctactact

SEQ ID NO: 5702443 - DNA, 25 bp, Homo sapien
agcactccctcaacatcctgggcca

SEQ ID NO: 5702444 - DNA, 25 bp, Homo sapien
cggggctccggcctgggtgcacggg

SEQ ID NO: 5702445 - DNA, 25 bp, Homo sapien
cggcacaggcacagccccaccggcc

SEQ ID NO: 5702446 - DNA, 25 bp, Homo sapien
acgagaggcgggagtcagccactgc

SEQ ID NO: 5702447 - DNA, 25 bp, Homo sapien
accaggcccagggagtcctggcctc

SEQ ID NO: 5702448 - DNA, 25 bp, Homo sapien
gaccgtgcagctgaacgcagagaaa

SEQ ID NO: 5702449 - DNA, 25 bp, Homo sapien
cagccagggcacagagtcttccctc

SEQ ID NO: 5702450 - DNA, 25 bp, Homo sapien
gggaccgtgcagctgaacgcagaga

SEQ ID NO: 5702451 - DNA, 25 bp, Homo sapien
aaaggggatcccactggagcaggtc

SEQ ID NO: 5702452 - DNA, 25 bp, Homo sapien
gccaaggacatggaacgctgggccc

SEQ ID NO: 5702453 - DNA, 25 bp, Homo sapien
tgatgcggaacaaatcttcaggtca

SEQ ID NO: 5702454 - DNA, 25 bp, Homo sapien
caatgctcagagccagcagtacctg

SEQ ID NO: 5702455 - DNA, 25 bp, Homo sapien
acagagtcttccctctatgcccatg

SEQ ID NO: 5702456 - DNA, 25 bp, Homo sapien
cttgagattcaccggcgagcccact

SEQ ID NO: 5702457 - DNA, 25 bp, Homo sapien
gagccagcggctgaggaggggcccc

SEQ ID NO: 5702458 - DNA, 25 bp, Homo sapien
attcctacgaggcctccccgggctc

SEQ ID NO: 5702459 - DNA, 25 bp, Homo sapien
atctgagctccagagccctacccat

SEQ ID NO: 5702460 - DNA, 25 bp, Homo sapien
gcatcactggaaccaaaggggatcc

SEQ ID NO: 5702461 - DNA, 25 bp, Homo sapien
cagaggtgatgtctgggagcccttc

SEQ ID NO: 5702462 - DNA, 25 bp, Homo sapien
gagcagtagccagggcactgctgcc

SEQ ID NO: 5702463 - DNA, 25 bp, Homo sapien
gccatgggctggaaagagggcagcg

SEQ ID NO: 5702464 - DNA, 25 bp, Homo sapien
cccaagtcagaggcagagcagaagc

SEQ ID NO: 5702465 - DNA, 25 bp, Homo sapien
tgagtttgccaagggttctaagagg

SEQ ID NO: 5702466 - DNA, 25 bp, Homo sapien
ccgacggacataaggagacaggggc

SEQ ID NO: 5702467 - DNA, 25 bp, Homo sapien
ctggcatctaccaacaatcagccga

SEQ ID NO: 5702468 - DNA, 25 bp, Homo sapien
ggagaaggccagtaacatcgtcatg

SEQ ID NO: 5702469 - DNA, 25 bp, Homo sapien
tggcagaagctggcctgtctgctct

SEQ ID NO: 5702470 - DNA, 25 bp, Homo sapien
aagagaagaaggagaagcacaagac

SEQ ID NO: 5702471 - DNA, 25 bp, Homo sapien
ttcaggtcagagccggggcttcgcc

SEQ ID NO: 5702472 - DNA, 25 bp, Homo sapien
gggccctggcaccctacgcggtgct

SEQ ID NO: 5702473 - DNA, 25 bp, Homo sapien
cggcgtgcaagcacgggaggttcgg

SEQ ID NO: 5702474 - DNA, 25 bp, Homo sapien
ggaaggacagagtgttggatggctg

SEQ ID NO: 5702475 - DNA, 25 bp, Homo sapien
cccccgagacggcgactatcgggac

SEQ ID NO: 5702476 - DNA, 25 bp, Homo sapien
acagagtgttggatggctgggacgg

SEQ ID NO: 5702477 - DNA, 25 bp, Homo sapien
ggcagcctacagcggggagagtgac

SEQ ID NO: 5702478 - DNA, 25 bp, Homo sapien
gagggcagcgcgcttggcgcttctc

SEQ ID NO: 5702479 - DNA, 25 bp, Homo sapien
ccttgctcttgtcggccagcccact

SEQ ID NO: 5702480 - DNA, 25 bp, Homo sapien
ctggctatgccatcctcgagaagaa

SEQ ID NO: 5702481 - DNA, 25 bp, Homo sapien
gcccatggctacctcaagggcacca

SEQ ID NO: 5702482 - DNA, 25 bp, Homo sapien
ctctgtagacttcgagcagcctact

SEQ ID NO: 5702483 - DNA, 25 bp, Homo sapien
gagcccacttgtcagaaaacgagct

SEQ ID NO: 5702484 - DNA, 25 bp, Homo sapien
atggctacctcaagggcaccaaggg

SEQ ID NO: 5702485 - DNA, 25 bp, Homo sapien
ctgttttgtaataaaagctgaaaag

SEQ ID NO: 5702486 - DNA, 25 bp, Homo sapien
tggggccgactctgtgtcgatgcag

SEQ ID NO: 5702487 - DNA, 25 bp, Homo sapien
ggaggaagtacggcggcatatccac

SEQ ID NO: 5702488 - DNA, 25 bp, Homo sapien
ggggccctgagcgggaggagaagct

SEQ ID NO: 5702489 - DNA, 25 bp, Homo sapien
cgactctgtgtcgatgcaggctttc

SEQ ID NO: 5702490 - DNA, 25 bp, Homo sapien
tgccattgctgcggcccagtgggcc

SEQ ID NO: 5702491 - DNA, 25 bp, Homo sapien
aactgaaccgcggctttgccttcat

SEQ ID NO: 5702492 - DNA, 25 bp, Homo sapien
tgggacggggccttgctcttgtcgg

SEQ ID NO: 5702493 - DNA, 25 bp, Homo sapien
tcagagccagcagtacctgtactgg

SEQ ID NO: 5702494 - DNA, 25 bp, Homo sapien
tcgggacgggctgggcagtgacaac

SEQ ID NO: 5702495 - DNA, 25 bp, Homo sapien
ccgtgcagctgaacgcagagaaaag

SEQ ID NO: 5702496 - DNA, 25 bp, Homo sapien
gaagtgaaacggagccagcggctga

SEQ ID NO: 5702497 - DNA, 25 bp, Homo sapien
tctgccgacgccagttccccagcaa

SEQ ID NO: 5702498 - DNA, 25 bp, Homo sapien
gtagacttcgagcagcctactcggg

SEQ ID NO: 5702499 - DNA, 25 bp, Homo sapien
agcagcttcaagagcaacttctcca

SEQ ID NO: 5702500 - DNA, 25 bp, Homo sapien
ctccgcgaggactggtggcagccta

SEQ ID NO: 5702501 - DNA, 25 bp, Homo sapien
agggacatggcctccaatgaaggca

SEQ ID NO: 5702502 - DNA, 25 bp, Homo sapien
tcagcactccctcaacatcctgggc

SEQ ID NO: 5702503 - DNA, 25 bp, Homo sapien
gcagctctcagggctccacaagcaa

SEQ ID NO: 5702504 - DNA, 25 bp, Homo sapien
gcagcccccgaaggccctatcagga

SEQ ID NO: 5702505 - DNA, 25 bp, Homo sapien
ccagaccggcctctactatgacccc

SEQ ID NO: 5702506 - DNA, 25 bp, Homo sapien
gcctgggtgcacggggcagctccta

SEQ ID NO: 5702507 - DNA, 25 bp, Homo sapien
accctcgaaggagggcaaagagaag

SEQ ID NO: 5702508 - DNA, 25 bp, Homo sapien
gctgcctctgtggccagcactgcca

SEQ ID NO: 5702509 - DNA, 25 bp, Homo sapien
tggtgacccgcttcaacgaggccca

SEQ ID NO: 5702510 - DNA, 25 bp, Homo sapien
acgcctatcgaggcccaaacacggg

SEQ ID NO: 5702511 - DNA, 25 bp, Homo sapien
atctgaggagcagagtgcggaggat

SEQ ID NO: 5702512 - DNA, 25 bp, Homo sapien
aggcgagcagtagccagggcactgc

SEQ ID NO: 5702513 - DNA, 25 bp, Homo sapien
agcgtgggggccctgagcgggagga

SEQ ID NO: 5702514 - DNA, 25 bp, Homo sapien
gagccagggcctgcttcccctgccg

SEQ ID NO: 5702515 - DNA, 25 bp, Homo sapien
ctgtgctcaaatctgagctccagag

SEQ ID NO: 5702516 - DNA, 25 bp, Homo sapien
ccctcggcacgaggctggatcagca

SEQ ID NO: 5702517 - DNA, 25 bp, Homo sapien
acaagaccaagacagctcaacagat

SEQ ID NO: 5702518 - DNA, 25 bp, Homo sapien
cccgcagtctcaacaaacaaaaaga

SEQ ID NO: 5702519 - DNA, 25 bp, Homo sapien
ggacggggccttgctcttgtcggcc

SEQ ID NO: 5702520 - DNA, 25 bp, Homo sapien
gagcgggaggagaagctcaccgact

SEQ ID NO: 5702521 - DNA, 25 bp, Homo sapien
cagcctactcgggacgggctgggca

SEQ ID NO: 5702522 - DNA, 25 bp, Homo sapien
atctcccgaaattggccagtgacga

SEQ ID NO: 5702523 - DNA, 25 bp, Homo sapien
agtgaaacggagccagcggctgagg

SEQ ID NO: 5702524 - DNA, 25 bp, Homo sapien
ccagtaccctgttcccgacgtctct

SEQ ID NO: 5702525 - DNA, 25 bp, Homo sapien
agaagctggcctgtctgctctgccg

SEQ ID NO: 5702526 - DNA, 25 bp, Homo sapien
ccctgtcacagggctcggagccaag

SEQ ID NO: 5702527 - DNA, 25 bp, Homo sapien
ggcgggcagaggtgatgtctgggag

SEQ ID NO: 5702528 - DNA, 25 bp, Homo sapien
ctcccctccccccgatctgcctcca

SEQ ID NO: 5702529 - DNA, 25 bp, Homo sapien
gcttcgccttcgtcgagtttagtca

SEQ ID NO: 5702530 - DNA, 25 bp, Homo sapien
gtctgggagcccttccttgacagcc

SEQ ID NO: 5702531 - DNA, 25 bp, Homo sapien
atcagccgaggcgagcagtagccag

SEQ ID NO: 5702532 - DNA, 25 bp, Homo sapien
ttgttgcgcgctccggctccggctg

SEQ ID NO: 5702533 - DNA, 25 bp, Homo sapien
tggtgactgtggccggctgggagta

SEQ ID NO: 5702534 - DNA, 25 bp, Homo sapien
ccaggagggcaagcatgactatgac

SEQ ID NO: 5702535 - DNA, 25 bp, Homo sapien
gagtcctggcctcccaagccctgtc

SEQ ID NO: 5702536 - DNA, 25 bp, Homo sapien
gtgacttttgttggaaaattgggct

SEQ ID NO: 5702537 - DNA, 25 bp, Homo sapien
ttgtcggccagcccactccccagcc

SEQ ID NO: 5702538 - DNA, 25 bp, Homo sapien
gagggctatggcaacagccagggca

SEQ ID NO: 5702539 - DNA, 25 bp, Homo sapien
gggagtcctggcctcccaagccctg

SEQ ID NO: 5702540 - DNA, 25 bp, Homo sapien
gtgggccatctcacaggcctcccaa

SEQ ID NO: 5702541 - DNA, 25 bp, Homo sapien
cggatgctgcaggccatgggctgga

SEQ ID NO: 5702542 - DNA, 25 bp, Homo sapien
ggtcacctcaaccgagtcctacaag

SEQ ID NO: 5702543 - DNA, 25 bp, Homo sapien
ggaaaattgggctgggatcacgtcc

SEQ ID NO: 5702544 - DNA, 25 bp, Homo sapien
ccccactgcccaggaatcctacagc

SEQ ID NO: 5702545 - DNA, 25 bp, Homo sapien
ccgcgaggactggtggcagcctaca

SEQ ID NO: 5702546 - DNA, 25 bp, Homo sapien
acttctccacatgttgggtgtccat

SEQ ID NO: 5702547 - DNA, 25 bp, Homo sapien
atgttgagtttgccaagggttctaa

SEQ ID NO: 5702548 - DNA, 25 bp, Homo sapien
ggcgtccagaacttcaaacgccgag

SEQ ID NO: 5702549 - DNA, 25 bp, Homo sapien
agagaagaatgacatggagcaaatg

SEQ ID NO: 5702550 - DNA, 25 bp, Homo sapien
cagcactgccattgctgcggcccag

SEQ ID NO: 5702551 - DNA, 25 bp, Homo sapien
gatgacgagaggcgggagtcagcca

SEQ ID NO: 5702552 - DNA, 25 bp, Homo sapien
ctgcgagatgacgagaggcgggagt

SEQ ID NO: 5702553 - DNA, 25 bp, Homo sapien
gggaccaggactatcggaccgagca

SEQ ID NO: 5702554 - DNA, 25 bp, Homo sapien
ttcatatcctcgcgagtatggcagc

SEQ ID NO: 5702555 - DNA, 25 bp, Homo sapien
ttgcaggacgctacacgatggatgg

SEQ ID NO: 5702556 - DNA, 25 bp, Homo sapien
agctccctgcgagatgacgagaggc

SEQ ID NO: 5702557 - DNA, 25 bp, Homo sapien
gccgagaccacgactaccgggacat

SEQ ID NO: 5702558 - DNA, 25 bp, Homo sapien
aagaccatcaatgttgagtttgcca

SEQ ID NO: 5702559 - DNA, 25 bp, Homo sapien
ccatggattccatcctgggggccct

SEQ ID NO: 5702560 - DNA, 25 bp, Homo sapien
gacaggactggccgctatggagcca

SEQ ID NO: 5702561 - DNA, 25 bp, Homo sapien
gcggcccagtgggccatctcacagg

SEQ ID NO: 5702562 - DNA, 25 bp, Homo sapien
gcagagcagaagctgcccctcggca

SEQ ID NO: 5702563 - DNA, 25 bp, Homo sapien
gccagcactgccattgctgcggccc

SEQ ID NO: 5702564 - DNA, 25 bp, Homo sapien
gagacagcacaccagcatggatctc

SEQ ID NO: 5702565 - DNA, 25 bp, Homo sapien
gccacaggcagccactgaggatgac

SEQ ID NO: 5702566 - DNA, 25 bp, Homo sapien
cccagccagagagggcttgaccaaa

SEQ ID NO: 5702567 - DNA, 25 bp, Homo sapien
tcagagccggggcttcgccttcgtc

SEQ ID NO: 5702568 - DNA, 25 bp, Homo sapien
gaccaagacagctcaacagattgcc

SEQ ID NO: 5702569 - DNA, 25 bp, Homo sapien
gctctcccaccggctaccagcccca

SEQ ID NO: 5702570 - DNA, 25 bp, Homo sapien
aggcccagtgagcagcttcaagagc

SEQ ID NO: 5702571 - DNA, 25 bp, Homo sapien
gcggcgggcagaggtgatgtctggg

SEQ ID NO: 5702572 - DNA, 25 bp, Homo sapien
acatggagtatgaaagacgtggtgg

SEQ ID NO: 5702573 - DNA, 25 bp, Homo sapien
agaccggcctctactatgaccccaa

SEQ ID NO: 5702574 - DNA, 25 bp, Homo sapien
tcccaccggctaccagccccactgc

SEQ ID NO: 5702575 - DNA, 25 bp, Homo sapien
ctccacatgttgggtgtccatcctg

SEQ ID NO: 5702576 - DNA, 25 bp, Homo sapien
gtcataaaggacaagcagacccaac

SEQ ID NO: 5702577 - DNA, 25 bp, Homo sapien
cgaaggccctatcaggacatggagt

SEQ ID NO: 5702578 - DNA, 25 bp, Homo sapien
tgcaataagtgtggcgtccagaact

SEQ ID NO: 5702579 - DNA, 25 bp, Homo sapien
agcagaagctgcccctcggcacgag

SEQ ID NO: 5702580 - DNA, 25 bp, Homo sapien
ccggctgggagtaggcggcagtgag

SEQ ID NO: 5702581 - DNA, 25 bp, Homo sapien
ctatcgaggcccaaacacgggtgcg

SEQ ID NO: 5702582 - DNA, 25 bp, Homo sapien
gtcggatgctgcaggccatgggctg

SEQ ID NO: 5702583 - DNA, 25 bp, Homo sapien
ccttgacagcccgggccgagaagag

SEQ ID NO: 5702584 - DNA, 25 bp, Homo sapien
agtattactacaatgctcagagcca

SEQ ID NO: 5702585 - DNA, 25 bp, Homo sapien
ataccatcatgtcacccgctgtgct

SEQ ID NO: 5702586 - DNA, 25 bp, Homo sapien
agccgagagacagcacaccagcatg

SEQ ID NO: 5702587 - DNA, 25 bp, Homo sapien
gcagtgacaacattggcagtcggat

SEQ ID NO: 5702588 - DNA, 25 bp, Homo sapien
actatcggaccgagcaaggggagga

SEQ ID NO: 5702589 - DNA, 25 bp, Homo sapien
aaagagggcagcggcctgggccgca

SEQ ID NO: 5702590 - DNA, 25 bp, Homo sapien
taccaacaatcagccgaggcgagca

SEQ ID NO: 5702591 - DNA, 25 bp, Homo sapien
cagctcaacagattgccaaggacat

SEQ ID NO: 5702592 - DNA, 25 bp, Homo sapien
cccccgaaggccctatcaggacatg

SEQ ID NO: 5702593 - DNA, 25 bp, Homo sapien
actgctgccaacagccagtcgtata

SEQ ID NO: 5702594 - DNA, 25 bp, Homo sapien
gtggcgtccagaacttcaaacgccg

SEQ ID NO: 5702595 - DNA, 25 bp, Homo sapien
caggtcagagccggggcttcgcctt

SEQ ID NO: 5702596 - DNA, 25 bp, Homo sapien
ccagctgctgcagatcctgcaggcc

SEQ ID NO: 5702597 - DNA, 25 bp, Homo sapien
gggccatctcacaggcctcccaagg

SEQ ID NO: 5702598 - DNA, 25 bp, Homo sapien
tacggcggcatatccacagcctctg

SEQ ID NO: 5702599 - DNA, 25 bp, Homo sapien
gtcagaaaacgagctagaagcacta

SEQ ID NO: 5702600 - DNA, 25 bp, Homo sapien
ccacatgttgggtgtccatcctggg

SEQ ID NO: 5702601 - DNA, 25 bp, Homo sapien
caaaaatagcttccagcctatcagc

SEQ ID NO: 5702602 - DNA, 25 bp, Homo sapien
acgcagagaaaagtatggcatcccc

SEQ ID NO: 5702603 - DNA, 25 bp, Homo sapien
tcggacttggttgttgcgcgctccg

SEQ ID NO: 5702604 - DNA, 25 bp, Homo sapien
tgtcgatgcaggctttctctcgcgc

SEQ ID NO: 5702605 - DNA, 25 bp, Homo sapien
gggagaaccgcagccgagaccacga

SEQ ID NO: 5702606 - DNA, 25 bp, Homo sapien
gagagaagtgcttcaaatgtggcgt

SEQ ID NO: 5702607 - DNA, 25 bp, Homo sapien
ccatcaatgttgagtttgccaaggg

SEQ ID NO: 5702608 - DNA, 25 bp, Homo sapien
ccgggccgagaagagtccctgcagg

SEQ ID NO: 5702609 - DNA, 25 bp, Homo sapien
cgagaagagtccctgcaggaagcat

SEQ ID NO: 5702610 - DNA, 25 bp, Homo sapien
tgcaggctttctctcgcgcccagcc

SEQ ID NO: 5702611 - DNA, 25 bp, Homo sapien
agtgacaacattggcagtcggatgc

SEQ ID NO: 5702612 - DNA, 25 bp, Homo sapien
catatcctcgcgagtatggcagcca

SEQ ID NO: 5702613 - DNA, 25 bp, Homo sapien
agggagcactagccgagagacagca

SEQ ID NO: 5702614 - DNA, 25 bp, Homo sapien
tcctggcatctaccaacaatcagcc

SEQ ID NO: 5702615 - DNA, 25 bp, Homo sapien
gagccgccggtcgactacagctact

SEQ ID NO: 5702616 - DNA, 25 bp, Homo sapien
gaagaaggagaagcacaagaccaag

SEQ ID NO: 5702617 - DNA, 25 bp, Homo sapien
acggcgactatcgggaccaggacta

SEQ ID NO: 5702618 - DNA, 25 bp, Homo sapien
gaggagaagctcaccgactggcaga

SEQ ID NO: 5702619 - DNA, 25 bp, Homo sapien
ggagaagctcaccgactggcagaag

SEQ ID NO: 5702620 - DNA, 25 bp, Homo sapien
cttcaaatgtggcgtgcccaagtca

SEQ ID NO: 5702621 - DNA, 25 bp, Homo sapien
aaaattgggctgggatcacgtcctg

SEQ ID NO: 5702622 - DNA, 25 bp, Homo sapien
agagttggaggaggtggcggcgggc

SEQ ID NO: 5702623 - DNA, 25 bp, Homo sapien
gccatcctcgagaagaagggagcac

SEQ ID NO: 5702624 - DNA, 25 bp, Homo sapien
ctgtagacttcgagcagcctactcg

SEQ ID NO: 5702625 - DNA, 25 bp, Homo sapien
aggcggcggcggcggcacaggcaca

SEQ ID NO: 5702626 - DNA, 25 bp, Homo sapien
atggggagaggcggacctatgttcc

SEQ ID NO: 5702627 - DNA, 25 bp, Homo sapien
caacagccagtcgtataccatcatg

SEQ ID NO: 5702628 - DNA, 25 bp, Homo sapien
ctgagctccagagccctacccatcc

SEQ ID NO: 5702629 - DNA, 25 bp, Homo sapien
gccctggagcagtcggccgacggac

SEQ ID NO: 5702630 - DNA, 25 bp, Homo sapien
cgggtgcggggctccggcctgggtg

SEQ ID NO: 5702631 - DNA, 25 bp, Homo sapien
gtgggggccctgagcgggaggagaa

SEQ ID NO: 5702632 - DNA, 25 bp, Homo sapien
agcctatcagctccctgcgagatga

SEQ ID NO: 5702633 - DNA, 25 bp, Homo sapien
tagcttccagcctatcagctccctg

SEQ ID NO: 5702634 - DNA, 25 bp, Homo sapien
ctacagcggggagagtgacagtgag

SEQ ID NO: 5702635 - DNA, 25 bp, Homo sapien
tcctcgcgagtatggcagccaggag

SEQ ID NO: 5702636 - DNA, 25 bp, Homo sapien
agagcagaagctgcccctcggcacg

SEQ ID NO: 5702637 - DNA, 25 bp, Homo sapien
ggccagaaggtgtcgatgcactaca

SEQ ID NO: 5702638 - DNA, 25 bp, Homo sapien
ttggaaaattgggctgggatcacgt

SEQ ID NO: 5702639 - DNA, 25 bp, Homo sapien
gaaggcagtcgcatcagtgctgcct

SEQ ID NO: 5702640 - DNA, 25 bp, Homo sapien
ccgcagccctaccaggcccagggag

SEQ ID NO: 5702641 - DNA, 25 bp, Homo sapien
ggtggtgacttttgttggaaaattg

SEQ ID NO: 5702642 - DNA, 25 bp, Homo sapien
cggctttgccttcatccagctctcc

SEQ ID NO: 5702643 - DNA, 25 bp, Homo sapien
acagccccaccggcccgccaggctt

SEQ ID NO: 5702644 - DNA, 25 bp, Homo sapien
ctgaacgcagagaaaagtatggcat

SEQ ID NO: 5702645 - DNA, 25 bp, Homo sapien
gctcctggcatctaccaacaatcag

SEQ ID NO: 5702646 - DNA, 25 bp, Homo sapien
cagaaaacgagctagaagcactaga

SEQ ID NO: 5702647 - DNA, 25 bp, Homo sapien
gtttagtcacttgcaggacgctaca

SEQ ID NO: 5702648 - DNA, 25 bp, Homo sapien
acgctgggcccgcagtctcaacaaa

SEQ ID NO: 5702649 - DNA, 25 bp, Homo sapien
caagccctccgcgaggactggtggc

SEQ ID NO: 5702650 - DNA, 25 bp, Homo sapien
gggaggagaagctcaccgactggca

SEQ ID NO: 5702651 - DNA, 25 bp, Homo sapien
agaagaatgacatggagcaaatgaa

SEQ ID NO: 5702652 - DNA, 25 bp, Homo sapien
ctgcccctcggcacgaggctggatc

SEQ ID NO: 5702653 - DNA, 25 bp, Homo sapien
agccctgtcacagggctcggagcca

SEQ ID NO: 5702654 - DNA, 25 bp, Homo sapien
agtaccgggaccgtgcagctgaacg

SEQ ID NO: 5702655 - DNA, 25 bp, Homo sapien
acgatggatggaagccaatcagcac

SEQ ID NO: 5702656 - DNA, 25 bp, Homo sapien
tggcaccctacgcggtgctgtcctc

SEQ ID NO: 5702657 - DNA, 25 bp, Homo sapien
tgacaccatcattttgcgcaacctg

SEQ ID NO: 5702658 - DNA, 25 bp, Homo sapien
ggctccggctgagctgggagagttg

SEQ ID NO: 5702659 - DNA, 25 bp, Homo sapien
tctaagagggacatggcctccaatg

SEQ ID NO: 5702660 - DNA, 25 bp, Homo sapien
ataaaagctgaaaagtctgcaaaaa

SEQ ID NO: 5702661 - DNA, 25 bp, Homo sapien
ggattccatcctgggggccctggca

SEQ ID NO: 5702662 - DNA, 25 bp, Homo sapien
tccaccatcgtggaggcagcccagc

SEQ ID NO: 5702663 - DNA, 25 bp, Homo sapien
gagcccttccttgacagcccgggcc

SEQ ID NO: 5702664 - DNA, 25 bp, Homo sapien
cacaagcaaaaccttgagattcacc

SEQ ID NO: 5702665 - DNA, 25 bp, Homo sapien
gacgactcatctgaggagcagagtg

SEQ ID NO: 5702666 - DNA, 25 bp, Homo sapien
gcctctgtagacttcgagcagccta

SEQ ID NO: 5702667 - DNA, 25 bp, Homo sapien
ccaacaggatgagggctatggcaac

SEQ ID NO: 5702668 - DNA, 25 bp, Homo sapien
accccaactcccagtattactacaa

SEQ ID NO: 5702669 - DNA, 25 bp, Homo sapien
gggttctaagagggacatggcctcc

SEQ ID NO: 5702670 - DNA, 25 bp, Homo sapien
gctggcctgtctgctctgccgacgc

SEQ ID NO: 5702671 - DNA, 25 bp, Homo sapien
atcaggacatggagtatgaaagacg

SEQ ID NO: 5702672 - DNA, 25 bp, Homo sapien
ttagtcacttgcaggacgctacacg

SEQ ID NO: 5702673 - DNA, 25 bp, Homo sapien
acagccagtaccctgttcccgacgt

SEQ ID NO: 5702674 - DNA, 25 bp, Homo sapien
aggcggcagtgagtttccctgggag

SEQ ID NO: 5702675 - DNA, 25 bp, Homo sapien
tcgggaccaggactatcggaccgag

SEQ ID NO: 5702676 - DNA, 25 bp, Homo sapien
aaatctgagctccagagccctaccc

SEQ ID NO: 5702677 - DNA, 25 bp, Homo sapien
aggcacagccccaccggcccgccag

SEQ ID NO: 5702678 - DNA, 25 bp, Homo sapien
ccgagagacagcacaccagcatgga

SEQ ID NO: 5702679 - DNA, 25 bp, Homo sapien
acacgatggatggaagccaatcagc

SEQ ID NO: 5702680 - DNA, 25 bp, Homo sapien
agacccaactgaaccgcggctttgc

SEQ ID NO: 5702681 - DNA, 25 bp, Homo sapien
accgcccaagccctccgcgaggact

SEQ ID NO: 5702682 - DNA, 25 bp, Homo sapien
gccctacccatcctagttctgctct

SEQ ID NO: 5702683 - DNA, 25 bp, Homo sapien
tccgtggccagctgcagtcgcacgg

SEQ ID NO: 5702684 - DNA, 25 bp, Homo sapien
catggtagcagcagcgggggtggct

SEQ ID NO: 5702685 - DNA, 25 bp, Homo sapien
tgcggggctccggcctgggtgcacg

SEQ ID NO: 5702686 - DNA, 25 bp, Homo sapien
cctggcaccctacgcggtgctgtcc

SEQ ID NO: 5702687 - DNA, 25 bp, Homo sapien
ccacacagcaccatggattccatcc

SEQ ID NO: 5702688 - DNA, 25 bp, Homo sapien
caataagtgtggcgtccagaacttc

SEQ ID NO: 5702689 - DNA, 25 bp, Homo sapien
aagaggcgctcatccggcaccagca

SEQ ID NO: 5702690 - DNA, 25 bp, Homo sapien
ggcccagtgggccatctcacaggcc

SEQ ID NO: 5702691 - DNA, 25 bp, Homo sapien
tcgtataccatcatgtcacccgctg

SEQ ID NO: 5702692 - DNA, 25 bp, Homo sapien
gcttcaagagcaacttctccacatg

SEQ ID NO: 5702693 - DNA, 25 bp, Homo sapien
taacatcgtcatgctgaggatgctg

SEQ ID NO: 5702694 - DNA, 25 bp, Homo sapien
tgccgcagccctaccaggcccaggg

SEQ ID NO: 5702695 - DNA, 25 bp, Homo sapien
ttactacaatgctcagagccagcag

SEQ ID NO: 5702696 - DNA, 25 bp, Homo sapien
caccggcccgccaggcttcccccga

SEQ ID NO: 5702697 - DNA, 25 bp, Homo sapien
tgtaataaaagctgaaaagtctgca

SEQ ID NO: 5702698 - DNA, 25 bp, Homo sapien
ttccccagcaaagaggcgctcatcc

SEQ ID NO: 5702699 - DNA, 25 bp, Homo sapien
gggtggctgggaagtgaaacggagc

SEQ ID NO: 5702700 - DNA, 25 bp, Homo sapien
gaggcctccccgggctccgagactc

SEQ ID NO: 5702701 - DNA, 25 bp, Homo sapien
ccaggcttcccccgagacggcgact

SEQ ID NO: 5702702 - DNA, 25 bp, Homo sapien
actacaatgctcagagccagcagta

SEQ ID NO: 5702703 - DNA, 25 bp, Homo sapien
aggggcaccctcgaaggagggcaaa

SEQ ID NO: 5702704 - DNA, 25 bp, Homo sapien
attcaccggcgagcccacttgtcag

SEQ ID NO: 5702705 - DNA, 25 bp, Homo sapien
gctaccagccccactgcccaggaat

SEQ ID NO: 5702706 - DNA, 25 bp, Homo sapien
atgacatggagcaaatgaagtaccg

SEQ ID NO: 5702707 - DNA, 25 bp, Homo sapien
agtgagcagcttcaagagcaacttc

SEQ ID NO: 5702708 - DNA, 25 bp, Homo sapien
ttctcccctccccccgatctgcctc

SEQ ID NO: 5702709 - DNA, 25 bp, Homo sapien
agctgcccctcggcacgaggctgga

SEQ ID NO: 5702710 - DNA, 25 bp, Homo sapien
gccctggcatcactggaaccaaagg

SEQ ID NO: 5702711 - DNA, 25 bp, Homo sapien
agtttgccaagggttctaagaggga

SEQ ID NO: 5702712 - DNA, 25 bp, Homo sapien
ccttcgtcgagtttagtcacttgca

SEQ ID NO: 5702713 - DNA, 25 bp, Homo sapien
cccgagacggcgactatcgggacca

SEQ ID NO: 5702714 - DNA, 25 bp, Homo sapien
tacaatgctcagagccagcagtacc

SEQ ID NO: 5702715 - DNA, 25 bp, Homo sapien
acactgcacaagacaatggtgaccc

SEQ ID NO: 5702716 - DNA, 25 bp, Homo sapien
aaggagaagcacaagaccaagacag

SEQ ID NO: 5702717 - DNA, 25 bp, Homo sapien
aggactatcggaccgagcaagggga

SEQ ID NO: 5702718 - DNA, 25 bp, Homo sapien
caacatcctgggccagaaggtgtcg

SEQ ID NO: 5702719 - DNA, 25 bp, Homo sapien
gcggcatatccacagcctctgtaga

SEQ ID NO: 5702720 - DNA, 25 bp, Homo sapien
accggctaccagccccactgcccag

SEQ ID NO: 5702721 - DNA, 25 bp, Homo sapien
gcagccctaccaggcccagggagtc

SEQ ID NO: 5702722 - DNA, 25 bp, Homo sapien
tcggccgacggacataaggagacag

SEQ ID NO: 5702723 - DNA, 25 bp, Homo sapien
gggccgagaagagtccctgcaggaa

SEQ ID NO: 5702724 - DNA, 25 bp, Homo sapien
gcctctactatgaccccaactccca

SEQ ID NO: 5702725 - DNA, 25 bp, Homo sapien
aggcagtcgcatcagtgctgcctct

SEQ ID NO: 5702726 - DNA, 25 bp, Homo sapien
cctcgaaggagggcaaagagaagaa

SEQ ID NO: 5702727 - DNA, 25 bp, Homo sapien
tggcgcttctcccctccccccgatc

SEQ ID NO: 5702728 - DNA, 25 bp, Homo sapien
tcaaatctgagctccagagccctac

SEQ ID NO: 5702729 - DNA, 25 bp, Homo sapien
gatgctggctatgccatcctcgaga

SEQ ID NO: 5702730 - DNA, 25 bp, Homo sapien
cgctcatccggcaccagcagctctc

SEQ ID NO: 5702731 - DNA, 25 bp, Homo sapien
ctacagtgaccccaagcccaagatc

SEQ ID NO: 5702732 - DNA, 25 bp, Homo sapien
agtgaccccaagcccaagatcaatg

SEQ ID NO: 5702733 - DNA, 25 bp, Homo sapien
ctcaagggcaccaagggccctggca

SEQ ID NO: 5702734 - DNA, 25 bp, Homo sapien
ctacgaggcctccccgggctccgag

SEQ ID NO: 5702735 - DNA, 25 bp, Homo sapien
aagaagcagggcattgtaacgccta

SEQ ID NO: 5702736 - DNA, 25 bp, Homo sapien
ctcaaccgagtcctacaaggagaca

SEQ ID NO: 5702737 - DNA, 25 bp, Homo sapien
cgtggccagctgcagtcgcacggcg

SEQ ID NO: 5702738 - DNA, 25 bp, Homo sapien
atgtctgggagcccttccttgacag

SEQ ID NO: 5702739 - DNA, 25 bp, Homo sapien
tcggagccaagctcagagaacgcca

SEQ ID NO: 5702740 - DNA, 25 bp, Homo sapien
acatcgtcatgctgaggatgctgcc

SEQ ID NO: 5702741 - DNA, 25 bp, Homo sapien
cgcccagcctggtgctgctcctggc

SEQ ID NO: 5702742 - DNA, 25 bp, Homo sapien
cagagagggcttgaccaaatcaaat

SEQ ID NO: 5702743 - DNA, 25 bp, Homo sapien
ctgcaggccctgcacccaccactca

SEQ ID NO: 5702744 - DNA, 25 bp, Homo sapien
atgttgggtgtccatcctggggcag

SEQ ID NO: 5702745 - DNA, 25 bp, Homo sapien
catcatgtcacccgctgtgctcaaa

SEQ ID NO: 5702746 - DNA, 25 bp, Homo sapien
gggcattgtaacgcctatcgaggcc

SEQ ID NO: 5702747 - DNA, 25 bp, Homo sapien
gggccacctccgaggagccgccggt

SEQ ID NO: 5702748 - DNA, 25 bp, Homo sapien
caccatggattccatcctgggggcc

SEQ ID NO: 5702749 - DNA, 25 bp, Homo sapien
gaggtggcggcgggcagaggtgatg

SEQ ID NO: 5702750 - DNA, 25 bp, Homo sapien
gtctgctctgccgacgccagttccc

SEQ ID NO: 5702751 - DNA, 25 bp, Homo sapien
gtgcaagcacgggaggttcggctga

SEQ ID NO: 5702752 - DNA, 25 bp, Homo sapien
gcagaagctggcctgtctgctctgc

SEQ ID NO: 5702753 - DNA, 25 bp, Homo sapien
tccggctactactatgacccccaga

SEQ ID NO: 5702754 - DNA, 25 bp, Homo sapien
ccctaccaggcccagggagtcctgg

SEQ ID NO: 5702755 - DNA, 25 bp, Homo sapien
cgtggtgacaggactggccgctatg

SEQ ID NO: 5702756 - DNA, 25 bp, Homo sapien
cataaggagacaggggcaccctcga

SEQ ID NO: 5702757 - DNA, 25 bp, Homo sapien
gcatcagtgctgcctctgtggccag

SEQ ID NO: 5702758 - DNA, 25 bp, Homo sapien
ccctcaacatcctgggccagaaggt

SEQ ID NO: 5702759 - DNA, 25 bp, Homo sapien
actgggatggggagaggcggaccta

SEQ ID NO: 5702760 - DNA, 25 bp, Homo sapien
gcctactcgggacgggctgggcagt

SEQ ID NO: 5702761 - DNA, 25 bp, Homo sapien
tcagccactgcagatgctggctatg

SEQ ID NO: 5702762 - DNA, 25 bp, Homo sapien
tgcagatgctggctatgccatcctc

SEQ ID NO: 5702763 - DNA, 25 bp, Homo sapien
tgttggaaaattgggctgggatcac

SEQ ID NO: 5702764 - DNA, 25 bp, Homo sapien
gctgggcccgcagtctcaacaaaca

SEQ ID NO: 5702765 - DNA, 25 bp, Homo sapien
atgcccatggctacctcaagggcac

SEQ ID NO: 5702766 - DNA, 25 bp, Homo sapien
ctcgcgagtatggcagccaggaggg

SEQ ID NO: 5702767 - DNA, 25 bp, Homo sapien
actatgaccccaactcccagtatta

SEQ ID NO: 5702768 - DNA, 25 bp, Homo sapien
ctggtgctgctcctggcatctacca

SEQ ID NO: 5702769 - DNA, 25 bp, Homo sapien
aggcccaaacacgggtgcggggctc

SEQ ID NO: 5702770 - DNA, 25 bp, Homo sapien
tgatggtggggagaaccgcagccga

SEQ ID NO: 5702771 - DNA, 25 bp, Homo sapien
gaatgacatggagcaaatgaagtac

SEQ ID NO: 5702772 - DNA, 25 bp, Homo sapien
caagggcaccaagggccctggcatc

SEQ ID NO: 5702773 - DNA, 25 bp, Homo sapien
gaagtacggcggcatatccacagcc

SEQ ID NO: 5702774 - DNA, 25 bp, Homo sapien
ggaatcctacagccagtaccctgtt

SEQ ID NO: 5702775 - DNA, 25 bp, Homo sapien
agcaaaaccttgagattcaccggcg

SEQ ID NO: 5702776 - DNA, 25 bp, Homo sapien
aagggccctggcatcactggaacca

SEQ ID NO: 5702777 - DNA, 25 bp, Homo sapien
gtgacagtgaggaggagcaggagcg

SEQ ID NO: 5702778 - DNA, 25 bp, Homo sapien
gctttgccttcatccagctctccac

SEQ ID NO: 5702779 - DNA, 25 bp, Homo sapien
ttggaggaggtggcggcgggcagag

SEQ ID NO: 5702780 - DNA, 25 bp, Homo sapien
agaaggtgtcgatgcactacagtga

SEQ ID NO: 5702781 - DNA, 25 bp, Homo sapien
tactactatgacccccagaccggcc

SEQ ID NO: 5702782 - DNA, 25 bp, Homo sapien
ctgaacccacacagcaccatggatt

SEQ ID NO: 5702783 - DNA, 25 bp, Homo sapien
atgttcccgccctggagcagtcggc

SEQ ID NO: 5702784 - DNA, 25 bp, Homo sapien
gcagtagccagggcactgctgccaa

SEQ ID NO: 5702785 - DNA, 25 bp, Homo sapien
gatgatggtggggagaaccgcagcc

SEQ ID NO: 5702786 - DNA, 25 bp, Homo sapien
cctgggccagaaggtgtcgatgcac

SEQ ID NO: 5702787 - DNA, 25 bp, Homo sapien
ccaagacagctcaacagattgccaa

SEQ ID NO: 5702788 - DNA, 25 bp, Homo sapien
gtgacccgcttcaacgaggcccagt

SEQ ID NO: 5702789 - DNA, 25 bp, Homo sapien
gactaccgttcatatcctcgcgagt

SEQ ID NO: 5702790 - DNA, 25 bp, Homo sapien
tgcactacagtgaccccaagcccaa

SEQ ID NO: 5702791 - DNA, 25 bp, Homo sapien
ggcagcggcctgggccgcaagaagc

SEQ ID NO: 5702792 - DNA, 25 bp, Homo sapien
tcgatgcactacagtgaccccaagc

SEQ ID NO: 5702793 - DNA, 25 bp, Homo sapien
gtgcggaggattcctacgaggcctc

SEQ ID NO: 5702794 - DNA, 25 bp, Homo sapien
tgggtgtccatcctggggcagggaa

SEQ ID NO: 5702795 - DNA, 25 bp, Homo sapien
cagggcactgctgccaacagccagt

SEQ ID NO: 5702796 - DNA, 25 bp, Homo sapien
ccactgaccgctcgcaggatgatgg

SEQ ID NO: 5702797 - DNA, 25 bp, Homo sapien
gccaacagccagtcgtataccatca

SEQ ID NO: 5702798 - DNA, 25 bp, Homo sapien
gaagtgcttcaaatgtggcgtgccc

SEQ ID NO: 5702799 - DNA, 25 bp, Homo sapien
gaagggagcactagccgagagacag

SEQ ID NO: 5702800 - DNA, 25 bp, Homo sapien
gcctacagcggggagagtgacagtg

SEQ ID NO: 5702801 - DNA, 25 bp, Homo sapien
cagcttcaagagcaacttctccaca

SEQ ID NO: 5702802 - DNA, 25 bp, Homo sapien
ctgggccacctccgaggagccgccg

SEQ ID NO: 5702803 - DNA, 25 bp, Homo sapien
acagccagtcgtataccatcatgtc

SEQ ID NO: 5702804 - DNA, 25 bp, Homo sapien
ggctgggaagtgaaacggagccagc

SEQ ID NO: 5702805 - DNA, 25 bp, Homo sapien
tccagctctccaccatcgtggaggc

SEQ ID NO: 5702806 - DNA, 25 bp, Homo sapien
caatgaggactggctgtgcaataag

SEQ ID NO: 5702807 - DNA, 25 bp, Homo sapien
ctactcgggacgggctgggcagtga

SEQ ID NO: 5702808 - DNA, 25 bp, Homo sapien
cgaggcgagcagtagccagggcact

SEQ ID NO: 5702809 - DNA, 25 bp, Homo sapien
gggcagggaaggacagagtgttgga

SEQ ID NO: 5702810 - DNA, 25 bp, Homo sapien
ggacatggagtatgaaagacgtggt

SEQ ID NO: 5702811 - DNA, 25 bp, Homo sapien
tgctgccaacagccagtcgtatacc

SEQ ID NO: 5702812 - DNA, 25 bp, Homo sapien
agccctccgcgaggactggtggcag

SEQ ID NO: 5702813 - DNA, 25 bp, Homo sapien
ccttcatccagctctccaccatcgt

SEQ ID NO: 5702814 - DNA, 25 bp, Homo sapien
ctgcaggaagcatcacccaggctgg

SEQ ID NO: 5702815 - DNA, 25 bp, Homo sapien
tgggatcacgtcctgttttgtaata

SEQ ID NO: 5702816 - DNA, 25 bp, Homo sapien
gtataccatcatgtcacccgctgtg

SEQ ID NO: 5702817 - DNA, 25 bp, Homo sapien
acaatggtgacccgcttcaacgagg

SEQ ID NO: 5702818 - DNA, 25 bp, Homo sapien
ccagttccccagcaaagaggcgctc

SEQ ID NO: 5702819 - DNA, 25 bp, Homo sapien
gccagcccactccccagccagagag

SEQ ID NO: 5702820 - DNA, 25 bp, Homo sapien
tctacctaccagtacgatgagacct

SEQ ID NO: 5702821 - DNA, 25 bp, Homo sapien
aaggccctatcaggacatggagtat

SEQ ID NO: 5702822 - DNA, 25 bp, Homo sapien
agtcagccactgcagatgctggcta

SEQ ID NO: 5702823 - DNA, 25 bp, Homo sapien
gtgctgcctctgtggccagcactgc

SEQ ID NO: 5702824 - DNA, 25 bp, Homo sapien
tcacccaggctggcagatcatggta

SEQ ID NO: 5702825 - DNA, 25 bp, Homo sapien
cgatctgcctccagtctcggacttg

SEQ ID NO: 5702826 - DNA, 25 bp, Homo sapien
ttgggctgggatcacgtcctgtttt

SEQ ID NO: 5702827 - DNA, 25 bp, Homo sapien
gggctccggcctgggtgcacggggc

SEQ ID NO: 5702828 - DNA, 25 bp, Homo sapien
accgctcgcaggatgatggtgggga

SEQ ID NO: 5702829 - DNA, 25 bp, Homo sapien
cactggaaccaaaggggatcccact

SEQ ID NO: 5702830 - DNA, 25 bp, Homo sapien
catctcacaggcctcccaaggtggg

SEQ ID NO: 5702831 - DNA, 25 bp, Homo sapien
ctgcctccagtctcggacttggttg

SEQ ID NO: 5702832 - DNA, 25 bp, Homo sapien
gggatcccactggagcaggtcccga

SEQ ID NO: 5702833 - DNA, 25 bp, Homo sapien
gcagtcgcatcagtgctgcctctgt

SEQ ID NO: 5702834 - DNA, 25 bp, Homo sapien
cgaccgcccaagccctccgcgagga

SEQ ID NO: 5702835 - DNA, 25 bp, Homo sapien
gccgaggcgagcagtagccagggca

SEQ ID NO: 5702836 - DNA, 25 bp, Homo sapien
cgactggcagaagctggcctgtctg

SEQ ID NO: 5702837 - DNA, 25 bp, Homo sapien
ggttgttgcgcgctccggctccggc

SEQ ID NO: 5702838 - DNA, 25 bp, Homo sapien
cgactaccgggacatggactaccgt

SEQ ID NO: 5702839 - DNA, 25 bp, Homo sapien
cgtcatgctgaggatgctgccacag

SEQ ID NO: 5702840 - DNA, 25 bp, Homo sapien
tgtgcaataagtgtggcgtccagaa

SEQ ID NO: 5702841 - DNA, 25 bp, Homo sapien
gcggaggattcctacgaggcctccc

SEQ ID NO: 5702842 - DNA, 25 bp, Homo sapien
ttgaggtggtgacttttgttggaaa

SEQ ID NO: 5702843 - DNA, 25 bp, Homo sapien
ggtcgactacagctactaccaacag

SEQ ID NO: 5702844 - DNA, 25 bp, Homo sapien
agttctgctctcccaccggctacca

SEQ ID NO: 5702845 - DNA, 25 bp, Homo sapien
tgacaacattggcagtcggatgctg

SEQ ID NO: 5702846 - DNA, 25 bp, Homo sapien
cgcttggcgcttctcccctcccccc

SEQ ID NO: 5702847 - DNA, 25 bp, Homo sapien
agaaaagtatggcatccccgagccg

SEQ ID NO: 5702848 - DNA, 25 bp, Homo sapien
aggccctgcacccaccactcactat

SEQ ID NO: 5702849 - DNA, 25 bp, Homo sapien
gaacgcagagaaaagtatggcatcc

SEQ ID NO: 5702850 - DNA, 25 bp, Homo sapien
aaaatagcttccagcctatcagctc

SEQ ID NO: 5702851 - DNA, 25 bp, Homo sapien
agaggcagagcagaagctgcccctc

SEQ ID NO: 5702852 - DNA, 25 bp, Homo sapien
tggctgtgcaataagtgtggcgtcc

SEQ ID NO: 5702853 - DNA, 25 bp, Homo sapien
gcatggatctcccgaaattggccag

SEQ ID NO: 5702854 - DNA, 25 bp, Homo sapien
ctgtcacagggctcggagccaagct

SEQ ID NO: 5702855 - DNA, 25 bp, Homo sapien
taccaacaggatgagggctatggca

SEQ ID NO: 5702856 - DNA, 25 bp, Homo sapien
ttgccaaggacatggaacgctgggc

SEQ ID NO: 5702857 - DNA, 25 bp, Homo sapien
cagcagacactgccactgggtggcc

SEQ ID NO: 5702858 - DNA, 25 bp, Homo sapien
ggactggctgtgcaataagtgtggc

SEQ ID NO: 5702859 - DNA, 25 bp, Homo sapien
tacccatcctagttctgctctccca

SEQ ID NO: 5702860 - DNA, 25 bp, Homo sapien
cctctgtggccagcactgccattgc

SEQ ID NO: 5702861 - DNA, 25 bp, Homo sapien
tttgtaataaaagctgaaaagtctg

SEQ ID NO: 5702862 - DNA, 25 bp, Homo sapien
gcggctgaggaggggccccagcagc

SEQ ID NO: 5702863 - DNA, 25 bp, Homo sapien
agagaacgccaatgacaccatcatt

SEQ ID NO: 5702864 - DNA, 25 bp, Homo sapien
cgggcagaggtgatgtctgggagcc

SEQ ID NO: 5702865 - DNA, 25 bp, Homo sapien
gctgggatcacgtcctgttttgtaa

SEQ ID NO: 5702866 - DNA, 25 bp, Homo sapien
tagccagggcactgctgccaacagc

SEQ ID NO: 5702867 - DNA, 25 bp, Homo sapien
aagtgtggcgtccagaacttcaaac

SEQ ID NO: 5702868 - DNA, 25 bp, Homo sapien
cttggcgcttctcccctccccccga

SEQ ID NO: 5702869 - DNA, 25 bp, Homo sapien
cctccggctactactatgaccccca

SEQ ID NO: 5702870 - DNA, 25 bp, Homo sapien
aatcctacagccagtaccctgttcc

SEQ ID NO: 5702871 - DNA, 25 bp, Homo sapien
tgacgagaggcgggagtcagccact

SEQ ID NO: 5702872 - DNA, 25 bp, Homo sapien
gcgagcccacttgtcagaaaacgag

SEQ ID NO: 5702873 - DNA, 25 bp, Homo sapien
agccactgaccgctcgcaggatgat

SEQ ID NO: 5702874 - DNA, 25 bp, Homo sapien
ctccagtctcggacttggttgttgc

SEQ ID NO: 5702875 - DNA, 25 bp, Homo sapien
ccctgggagggcagcgcgcttggcg

SEQ ID NO: 5702876 - DNA, 25 bp, Homo sapien
accatcattttgcgcaacctgaacc

SEQ ID NO: 5702877 - DNA, 25 bp, Homo sapien
cgggagctgagccagggcctgcttc

SEQ ID NO: 5702878 - DNA, 25 bp, Homo sapien
cctggagcagtcggccgacggacat

SEQ ID NO: 5702879 - DNA, 25 bp, Homo sapien
agagaaaagtatggcatccccgagc

SEQ ID NO: 5702880 - DNA, 25 bp, Homo sapien
gcttcccccgagacggcgactatcg

SEQ ID NO: 5702881 - DNA, 25 bp, Homo sapien
gcccctcggcacgaggctggatcag

SEQ ID NO: 5702882 - DNA, 25 bp, Homo sapien
attccatcctgggggccctggcacc

SEQ ID NO: 5702883 - DNA, 25 bp, Homo sapien
ggactggccgctatggagccactga

SEQ ID NO: 5702884 - DNA, 25 bp, Homo sapien
gcttccagcctatcagctccctgcg

SEQ ID NO: 5702885 - DNA, 25 bp, Homo sapien
aacagattgccaaggacatggaacg

SEQ ID NO: 5702886 - DNA, 25 bp, Homo sapien
gacagcacaccagcatggatctccc

SEQ ID NO: 5702887 - DNA, 25 bp, Homo sapien
caccatcgtggaggcagcccagctg

SEQ ID NO: 5702888 - DNA, 25 bp, Homo sapien
ttcgtcgagtttagtcacttgcagg

SEQ ID NO: 5702889 - DNA, 25 bp, Homo sapien
acgaggcctccccgggctccgagac

SEQ ID NO: 5702890 - DNA, 25 bp, Homo sapien
acactgccactgggtggccgggagc

SEQ ID NO: 5702891 - DNA, 25 bp, Homo sapien
aggacatggaacgctgggcccgcag

SEQ ID NO: 5702892 - DNA, 25 bp, Homo sapien
ccagcagtacctgtactgggatggg

SEQ ID NO: 5702893 - DNA, 25 bp, Homo sapien
agctgaacgcagagaaaagtatggc

SEQ ID NO: 5702894 - DNA, 25 bp, Homo sapien
aagaccaagacagctcaacagattg

SEQ ID NO: 5702895 - DNA, 25 bp, Homo sapien
tggtcgtggtgacaggactggccgc

SEQ ID NO: 5702896 - DNA, 25 bp, Homo sapien
gcttgaccaaatcaaattgaggtgg

SEQ ID NO: 5702897 - DNA, 25 bp, Homo sapien
cagcccagctgctgcagatcctgca

SEQ ID NO: 5702898 - DNA, 25 bp, Homo sapien
ccctccgcgaggactggtggcagcc

SEQ ID NO: 5702899 - DNA, 25 bp, Homo sapien
cagagcccaagaggaggaagtacgg

SEQ ID NO: 5702900 - DNA, 25 bp, Homo sapien
actcgggacgggctgggcagtgaca

SEQ ID NO: 5702901 - DNA, 25 bp, Homo sapien
ggagagttggaggaggtggcggcgg

SEQ ID NO: 5702902 - DNA, 25 bp, Homo sapien
agcgggggtggctgggaagtgaaac

SEQ ID NO: 5702903 - DNA, 25 bp, Homo sapien
agccaatcagcactccctcaacatc

SEQ ID NO: 5702904 - DNA, 25 bp, Homo sapien
tggcagccaggagggcaagcatgac

SEQ ID NO: 5702905 - DNA, 25 bp, Homo sapien
gctccggcctgggtgcacggggcag

SEQ ID NO: 5702906 - DNA, 25 bp, Homo sapien
ccgccctggagcagtcggccgacgg

SEQ ID NO: 5702907 - DNA, 25 bp, Homo sapien
atggagtatgaaagacgtggtggtc

SEQ ID NO: 5702908 - DNA, 25 bp, Homo sapien
gacgtctctacctaccagtacgatg

SEQ ID NO: 5702909 - DNA, 25 bp, Homo sapien
gtgactgtggccggctgggagtagg

SEQ ID NO: 5702910 - DNA, 25 bp, Homo sapien
acagcaccatggattccatcctggg

SEQ ID NO: 5702911 - DNA, 25 bp, Homo sapien
ccatggctacctcaagggcaccaag

SEQ ID NO: 5702912 - DNA, 25 bp, Homo sapien
accgcagccgagaccacgactaccg

SEQ ID NO: 5702913 - DNA, 25 bp, Homo sapien
tgcctctgtggccagcactgccatt

SEQ ID NO: 5702914 - DNA, 25 bp, Homo sapien
acccccagaccggcctctactatga

SEQ ID NO: 5702915 - DNA, 25 bp, Homo sapien
cgcggctttgccttcatccagctct

SEQ ID NO: 5702916 - DNA, 25 bp, Homo sapien
caaggacatggaacgctgggcccgc

SEQ ID NO: 5702917 - DNA, 25 bp, Homo sapien
gtgacaggactggccgctatggagc

SEQ ID NO: 5702918 - DNA, 25 bp, Homo sapien
ggccggctgggagtaggcggcagtg

SEQ ID NO: 5702919 - DNA, 25 bp, Homo sapien
cacccgctgtgctcaaatctgagct

SEQ ID NO: 5702920 - DNA, 25 bp, Homo sapien
ccctatcaggacatggagtatgaaa

SEQ ID NO: 5702921 - DNA, 25 bp, Homo sapien
ggagccactgaccgctcgcaggatg

SEQ ID NO: 5702922 - DNA, 25 bp, Homo sapien
ccagaaggtgtcgatgcactacagt

SEQ ID NO: 5702923 - DNA, 25 bp, Homo sapien
agcactagccgagagacagcacacc

SEQ ID NO: 5702924 - DNA, 25 bp, Homo sapien
ccccagaccggcctctactatgacc

SEQ ID NO: 5702925 - DNA, 25 bp, Homo sapien
tggtgacttttgttggaaaattggg

SEQ ID NO: 5702926 - DNA, 25 bp, Homo sapien
atgactatgacgactcatctgagga

SEQ ID NO: 5702927 - DNA, 25 bp, Homo sapien
agtagccagggcactgctgccaaca

SEQ ID NO: 5702928 - DNA, 25 bp, Homo sapien
gctcctacggggtcacctcaaccga

SEQ ID NO: 5702929 - DNA, 25 bp, Homo sapien
gatggatggaagccaatcagcactc

SEQ ID NO: 5702930 - DNA, 25 bp, Homo sapien
ctgggtgcacggggcagctcctacg

SEQ ID NO: 5702931 - DNA, 25 bp, Homo sapien
ggctggatcagcagacactgccact

SEQ ID NO: 5702932 - DNA, 25 bp, Homo sapien
ctccggctccggctgagctgggaga

SEQ ID NO: 5702933 - DNA, 25 bp, Homo sapien
tgccactgggtggccgggagctgag

SEQ ID NO: 5702934 - DNA, 25 bp, Homo sapien
aacgaggcccagtgagcagcttcaa

SEQ ID NO: 5702935 - DNA, 25 bp, Homo sapien
catggagcaaatgaagtaccgggac

SEQ ID NO: 5702936 - DNA, 25 bp, Homo sapien
cagggcctgcttcccctgccgcagc

SEQ ID NO: 5702937 - DNA, 25 bp, Homo sapien
cctggcctcccaagccctgtcacag

SEQ ID NO: 5702938 - DNA, 25 bp, Homo sapien
tcttccctctatgcccatggctacc

SEQ ID NO: 5702939 - DNA, 25 bp, Homo sapien
gagacctccggctactactatgacc

SEQ ID NO: 5702940 - DNA, 25 bp, Homo sapien
aggagcgtgggggccctgagcggga

SEQ ID NO: 5702941 - DNA, 25 bp, Homo sapien
tccccccgatctgcctccagtctcg

SEQ ID NO: 5702942 - DNA, 25 bp, Homo sapien
cagccgaggcgagcagtagccaggg

SEQ ID NO: 5702943 - DNA, 25 bp, Homo sapien
cccaagccctgtcacagggctcgga

SEQ ID NO: 5702944 - DNA, 25 bp, Homo sapien
cacgggtgcggggctccggcctggg

SEQ ID NO: 5702945 - DNA, 25 bp, Homo sapien
gcgcgtcataaaggacaagcagacc

SEQ ID NO: 5702946 - DNA, 25 bp, Homo sapien
gacatggaacgctgggcccgcagtc

SEQ ID NO: 5702947 - DNA, 25 bp, Homo sapien
gaggaggaagtacggcggcatatcc

SEQ ID NO: 5702948 - DNA, 25 bp, Homo sapien
gggaggttcggctgatgcggaacaa

SEQ ID NO: 5702949 - DNA, 25 bp, Homo sapien
gtcgcacggcgtgcaagcacgggag

SEQ ID NO: 5702950 - DNA, 25 bp, Homo sapien
cggcctgggtgcacggggcagctcc

SEQ ID NO: 5702951 - DNA, 25 bp, Homo sapien
tgtaacgcctatcgaggcccaaaca

SEQ ID NO: 5702952 - DNA, 25 bp, Homo sapien
cgctccggctccggctgagctggga

SEQ ID NO: 5702953 - DNA, 25 bp, Homo sapien
gggccgactctgtgtcgatgcaggc

SEQ ID NO: 5702954 - DNA, 25 bp, Homo sapien
attggccagtgacgaccgcccaagc

SEQ ID NO: 5702955 - DNA, 25 bp, Homo sapien
tcaacagattgccaaggacatggaa

SEQ ID NO: 5702956 - DNA, 25 bp, Homo sapien
ctccgagactcagcgtaggcggcgg

SEQ ID NO: 5702957 - DNA, 25 bp, Homo sapien
ggcgggagtcagccactgcagatgc

SEQ ID NO: 5702958 - DNA, 25 bp, Homo sapien
gccccagcagcccccgaaggcccta

SEQ ID NO: 5702959 - DNA, 25 bp, Homo sapien
gaggtggtgacttttgttggaaaat

SEQ ID NO: 5702960 - DNA, 25 bp, Homo sapien
ctgaggatgacatccgtggccagct

SEQ ID NO: 5702961 - DNA, 25 bp, Homo sapien
cctacccatcctagttctgctctcc

SEQ ID NO: 5702962 - DNA, 25 bp, Homo sapien
gcagccaggagggcaagcatgacta

SEQ ID NO: 5702963 - DNA, 25 bp, Homo sapien
ctatggagccactgaccgctcgcag

SEQ ID NO: 5702964 - DNA, 25 bp, Homo sapien
cacagggctcggagccaagctcaga

SEQ ID NO: 5702965 - DNA, 25 bp, Homo sapien
cgccaatgacaccatcattttgcgc

SEQ ID NO: 5702966 - DNA, 25 bp, Homo sapien
gaggaggggccccagcagcccccga

SEQ ID NO: 5702967 - DNA, 25 bp, Homo sapien
gccgagaagagtccctgcaggaagc

SEQ ID NO: 5702968 - DNA, 25 bp, Homo sapien
tggccagctgcagtcgcacggcgtg

SEQ ID NO: 5702969 - DNA, 25 bp, Homo sapien
acaccatcattttgcgcaacctgaa

SEQ ID NO: 5702970 - DNA, 25 bp, Homo sapien
cgcggtgctgtcctcctccaacgtg

SEQ ID NO: 5702971 - DNA, 25 bp, Homo sapien
gtgcgcgtcataaaggacaagcaga

SEQ ID NO: 5702972 - DNA, 25 bp, Homo sapien
tggcctgtctgctctgccgacgcca

SEQ ID NO: 5702973 - DNA, 25 bp, Homo sapien
acatcctgggccagaaggtgtcgat

SEQ ID NO: 5702974 - DNA, 25 bp, Homo sapien
cgcttcaacgaggcccagtgagcag

SEQ ID NO: 5702975 - DNA, 25 bp, Homo sapien
cagcggctgaggaggggccccagca

SEQ ID NO: 5702976 - DNA, 25 bp, Homo sapien
cccagggagtcctggcctcccaagc

SEQ ID NO: 5702977 - DNA, 25 bp, Homo sapien
ccggtcgactacagctactaccaac

SEQ ID NO: 5702978 - DNA, 25 bp, Homo sapien
caagcccaagatcaatgaggactgg

SEQ ID NO: 5702979 - DNA, 25 bp, Homo sapien
atgagacctccggctactactatga

SEQ ID NO: 5702980 - DNA, 25 bp, Homo sapien
gtcacagggctcggagccaagctca

SEQ ID NO: 5702981 - DNA, 25 bp, Homo sapien
tgcagatcctgcaggccctgcaccc

SEQ ID NO: 5702982 - DNA, 25 bp, Homo sapien
gctcaaatctgagctccagagccct

SEQ ID NO: 5702983 - DNA, 25 bp, Homo sapien
atggcctccaatgaaggcagtcgca

SEQ ID NO: 5702984 - DNA, 25 bp, Homo sapien
gtttccctgggagggcagcgcgctt

SEQ ID NO: 5702985 - DNA, 25 bp, Homo sapien
tcacctcaaccgagtcctacaagga

SEQ ID NO: 5702986 - DNA, 25 bp, Homo sapien
tggaggcagcccagctgctgcagat

SEQ ID NO: 5702987 - DNA, 25 bp, Homo sapien
cagctctccaccatcgtggaggcag

SEQ ID NO: 5702988 - DNA, 25 bp, Homo sapien
ggctgggagtaggcggcagtgagtt

SEQ ID NO: 5702989 - DNA, 25 bp, Homo sapien
ggatgagggctatggcaacagccag

SEQ ID NO: 5702990 - DNA, 25 bp, Homo sapien
atcgtggaggcagcccagctgctgc

SEQ ID NO: 5702991 - DNA, 25 bp, Homo sapien
tcctagttctgctctcccaccggct

SEQ ID NO: 5702992 - DNA, 25 bp, Homo sapien
cctgccgcagccctaccaggcccag

SEQ ID NO: 5702993 - DNA, 25 bp, Homo sapien
agtatgaaagacgtggtggtcgtgg

SEQ ID NO: 5702994 - DNA, 25 bp, Homo sapien
tgaggatgctgccacaggcagccac

SEQ ID NO: 5702995 - DNA, 25 bp, Homo sapien
gaccaaatcaaattgaggtggtgac

SEQ ID NO: 5702996 - DNA, 25 bp, Homo sapien
acaggggcaccctcgaaggagggca

SEQ ID NO: 5702997 - DNA, 25 bp, Homo sapien
catgggctggaaagagggcagcggc

SEQ ID NO: 5702998 - DNA, 25 bp, Homo sapien
accatcatgtcacccgctgtgctca

SEQ ID NO: 5702999 - DNA, 25 bp, Homo sapien
cccgggctccgagactcagcgtagg

SEQ ID NO: 5703000 - DNA, 25 bp, Homo sapien
ggtgtcgatgcactacagtgacccc

SEQ ID NO: 5703001 - DNA, 25 bp, Homo sapien
cgggctccgagactcagcgtaggcg

SEQ ID NO: 5703002 - DNA, 25 bp, Homo sapien
gctctgccgacgccagttccccagc

SEQ ID NO: 5703003 - DNA, 25 bp, Homo sapien
gcattgtaacgcctatcgaggccca

SEQ ID NO: 5703004 - DNA, 25 bp, Homo sapien
actccccagccagagagggcttgac

SEQ ID NO: 5703005 - DNA, 25 bp, Homo sapien
tggaacgctgggcccgcagtctcaa

SEQ ID NO: 5703006 - DNA, 25 bp, Homo sapien
acccaggctggcagatcatggtagc

SEQ ID NO: 5703007 - DNA, 25 bp, Homo sapien
ttgtcagaaaacgagctagaagcac

SEQ ID NO: 5703008 - DNA, 25 bp, Homo sapien
gagcccaagaggaggaagtacggcg

SEQ ID NO: 5703009 - DNA, 25 bp, Homo sapien
ggccgacggacataaggagacaggg

SEQ ID NO: 5703010 - DNA, 25 bp, Homo sapien
cggcggcggcacaggcacagcccca

SEQ ID NO: 5703011 - DNA, 25 bp, Homo sapien
gacagcccgggccgagaagagtccc

SEQ ID NO: 5703012 - DNA, 25 bp, Homo sapien
aattgaggtggtgacttttgttgga

SEQ ID NO: 5703013 - DNA, 25 bp, Homo sapien
tggagcaggtcccgaggcctcccta

SEQ ID NO: 5703014 - DNA, 25 bp, Homo sapien
ctgggcagtgacaacattggcagtc

SEQ ID NO: 5703015 - DNA, 25 bp, Homo sapien
gacccgcttcaacgaggcccagtga

SEQ ID NO: 5703016 - DNA, 25 bp, Homo sapien
gaagcagggcattgtaacgcctatc

SEQ ID NO: 5703017 - DNA, 25 bp, Homo sapien
ctggaaagagggcagcggcctgggc

SEQ ID NO: 5703018 - DNA, 25 bp, Homo sapien
gcctggtgctgctcctggcatctac

SEQ ID NO: 5703019 - DNA, 25 bp, Homo sapien
tcgcatcagtgctgcctctgtggcc

SEQ ID NO: 5703020 - DNA, 25 bp, Homo sapien
agagcctggggccgactctgtgtcg

SEQ ID NO: 5703021 - DNA, 25 bp, Homo sapien
gggtgcacggggcagctcctacggg

SEQ ID NO: 5703022 - DNA, 25 bp, Homo sapien
tggcggcgggcagaggtgatgtctg

SEQ ID NO: 5703023 - DNA, 25 bp, Homo sapien
tgaccgctcgcaggatgatggtggg

SEQ ID NO: 5703024 - DNA, 25 bp, Homo sapien
acaacattggcagtcggatgctgca

SEQ ID NO: 5703025 - DNA, 25 bp, Homo sapien
gtgacgaccgcccaagccctccgcg

SEQ ID NO: 5703026 - DNA, 25 bp, Homo sapien
gggcttcgccttcgtcgagtttagt

SEQ ID NO: 5703027 - DNA, 25 bp, Homo sapien
cagggcacagagtcttccctctatg

SEQ ID NO: 5703028 - DNA, 25 bp, Homo sapien
ctagttctgctctcccaccggctac

SEQ ID NO: 5703029 - DNA, 25 bp, Homo sapien
ggagacactgcacaagacaatggtg

SEQ ID NO: 5703030 - DNA, 25 bp, Homo sapien
tccggcaccagcagctctcagggct

SEQ ID NO: 5703031 - DNA, 25 bp, Homo sapien
accctacgcggtgctgtcctcctcc

SEQ ID NO: 5703032 - DNA, 25 bp, Homo sapien
aaggagacactgcacaagacaatgg

SEQ ID NO: 5703033 - DNA, 25 bp, Homo sapien
catccagctctccaccatcgtggag

SEQ ID NO: 5703034 - DNA, 25 bp, Homo sapien
gtgctcaaatctgagctccagagcc

SEQ ID NO: 5703035 - DNA, 25 bp, Homo sapien
tcactatcgacggcaagaccatcaa

SEQ ID NO: 5703036 - DNA, 25 bp, Homo sapien
ggagctgagccagggcctgcttccc

SEQ ID NO: 5703037 - DNA, 25 bp, Homo sapien
agcagagtgcggaggattcctacga

SEQ ID NO: 5703038 - DNA, 25 bp, Homo sapien
tggatggctgggacggggccttgct

SEQ ID NO: 5703039 - DNA, 25 bp, Homo sapien
cccgatctgcctccagtctcggact

SEQ ID NO: 5703040 - DNA, 25 bp, Homo sapien
accgcggctttgccttcatccagct

SEQ ID NO: 5703041 - DNA, 25 bp, Homo sapien
cccaagccctccgcgaggactggtg

SEQ ID NO: 5703042 - DNA, 25 bp, Homo sapien
gcgagcagtagccagggcactgctg

SEQ ID NO: 5703043 - DNA, 25 bp, Homo sapien
gggccccagcagcccccgaaggccc

SEQ ID NO: 5703044 - DNA, 25 bp, Homo sapien
tatcggaccgagcaaggggaggagg

SEQ ID NO: 5703045 - DNA, 25 bp, Homo sapien
ctcggcacgaggctggatcagcaga

SEQ ID NO: 5703046 - DNA, 25 bp, Homo sapien
atcctgggccagaaggtgtcgatgc

SEQ ID NO: 5703047 - DNA, 25 bp, Homo sapien
tatgacccccagaccggcctctact

SEQ ID NO: 5703048 - DNA, 25 bp, Homo sapien
tcatgctgaggatgctgccacaggc

SEQ ID NO: 5703049 - DNA, 25 bp, Homo sapien
caagagcaacttctccacatgttgg

SEQ ID NO: 5703050 - DNA, 25 bp, Homo sapien
gcaggccctgcacccaccactcact

SEQ ID NO: 5703051 - DNA, 25 bp, Homo sapien
cattttgagctggtgactgtggccg

SEQ ID NO: 5703052 - DNA, 25 bp, Homo sapien
cattggcagtcggatgctgcaggcc

SEQ ID NO: 5703053 - DNA, 25 bp, Homo sapien
catcacccaggctggcagatcatgg

SEQ ID NO: 5703054 - DNA, 25 bp, Homo sapien
atgtggcgtgcccaagtcagaggca

SEQ ID NO: 5703055 - DNA, 25 bp, Homo sapien
accagcatggatctcccgaaattgg

SEQ ID NO: 5703056 - DNA, 25 bp, Homo sapien
ggactggtggcagcctacagcgggg

SEQ ID NO: 5703057 - DNA, 25 bp, Homo sapien
actgcacaagacaatggtgacccgc

SEQ ID NO: 5703058 - DNA, 25 bp, Homo sapien
aagctggcctgtctgctctgccgac

SEQ ID NO: 5703059 - DNA, 25 bp, Homo sapien
atgctgaggatgctgccacaggcag

SEQ ID NO: 5703060 - DNA, 25 bp, Homo sapien
cagggcattgtaacgcctatcgagg

SEQ ID NO: 5703061 - DNA, 25 bp, Homo sapien
caggaatcctacagccagtaccctg

SEQ ID NO: 5703062 - DNA, 25 bp, Homo sapien
gcaggtcccgaggcctccctagagc

SEQ ID NO: 5703063 - DNA, 25 bp, Homo sapien
cgccagttccccagcaaagaggcgc

SEQ ID NO: 5703064 - DNA, 25 bp, Homo sapien
cctccccgggctccgagactcagcg

SEQ ID NO: 5703065 - DNA, 25 bp, Homo sapien
catcctgggggccctggcaccctac

SEQ ID NO: 5703066 - DNA, 25 bp, Homo sapien
ggaggggccccagcagcccccgaag

SEQ ID NO: 5703067 - DNA, 25 bp, Homo sapien
tcgactacagctactaccaacagga

SEQ ID NO: 5703068 - DNA, 25 bp, Homo sapien
cccgaaggccctatcaggacatgga

SEQ ID NO: 5703069 - DNA, 25 bp, Homo sapien
cagcagcccccgaaggccctatcag

SEQ ID NO: 5703070 - DNA, 25 bp, Homo sapien
cgcgcttggcgcttctcccctcccc

SEQ ID NO: 5703071 - DNA, 25 bp, Homo sapien
gccagagagggcttgaccaaatcaa

SEQ ID NO: 5703072 - DNA, 25 bp, Homo sapien
gcccacttgtcagaaaacgagctag

SEQ ID NO: 5703073 - DNA, 25 bp, Homo sapien
gccagggcctgcttcccctgccgca

SEQ ID NO: 5703074 - DNA, 25 bp, Homo sapien
tcccactggagcaggtcccgaggcc

SEQ ID NO: 5703075 - DNA, 25 bp, Homo sapien
gcactgctgccaacagccagtcgta

SEQ ID NO: 5703076 - DNA, 25 bp, Homo sapien
tgcagtcgcacggcgtgcaagcacg

SEQ ID NO: 5703077 - DNA, 25 bp, Homo sapien
cagctcctacggggtcacctcaacc

SEQ ID NO: 5703078 - DNA, 25 bp, Homo sapien
tgggccgcaagaagcagggcattgt

SEQ ID NO: 5703079 - DNA, 25 bp, Homo sapien
actcactatcgacggcaagaccatc

SEQ ID NO: 5703080 - DNA, 25 bp, Homo sapien
actggccgctatggagccactgacc

SEQ ID NO: 5703081 - DNA, 25 bp, Homo sapien
agaccacgactaccgggacatggac

SEQ ID NO: 5703082 - DNA, 25 bp, Homo sapien
gcacaggcacagccccaccggcccg

SEQ ID NO: 5703083 - DNA, 25 bp, Homo sapien
cgactatcgggaccaggactatcgg

SEQ ID NO: 5703084 - DNA, 25 bp, Homo sapien
gacagtgaggaggagcaggagcgtg

SEQ ID NO: 5703085 - DNA, 25 bp, Homo sapien
gggagagtgacagtgaggaggagca

SEQ ID NO: 5703086 - DNA, 25 bp, Homo sapien
tatggcagccaggagggcaagcatg

SEQ ID NO: 5703087 - DNA, 25 bp, Homo sapien
cgggagtcagccactgcagatgctg

SEQ ID NO: 5703088 - DNA, 25 bp, Homo sapien
tgccgacgccagttccccagcaaag

SEQ ID NO: 5703089 - DNA, 25 bp, Homo sapien
catctaccaacaatcagccgaggcg

SEQ ID NO: 5703090 - DNA, 25 bp, Homo sapien
accccaagcccaagatcaatgagga

SEQ ID NO: 5703091 - DNA, 25 bp, Homo sapien
tcctacagccagtaccctgttcccg

SEQ ID NO: 5703092 - DNA, 25 bp, Homo sapien
gcctcccaagccctgtcacagggct

SEQ ID NO: 5703093 - DNA, 25 bp, Homo sapien
acgagctagaagcactagagaagaa

SEQ ID NO: 5703094 - DNA, 25 bp, Homo sapien
ctgctctgccgacgccagttcccca

SEQ ID NO: 5703095 - DNA, 25 bp, Homo sapien
cgcaacctgaacccacacagcacca

SEQ ID NO: 5703096 - DNA, 25 bp, Homo sapien
ggcggcggcggcacaggcacagccc

SEQ ID NO: 5703097 - DNA, 25 bp, Homo sapien
aatcttcaggtcagagccggggctt

SEQ ID NO: 5703098 - DNA, 25 bp, Homo sapien
acgggaggttcggctgatgcggaac

SEQ ID NO: 5703099 - DNA, 25 bp, Homo sapien
ttccctgggagggcagcgcgcttgg

SEQ ID NO: 5703100 - DNA, 25 bp, Homo sapien
tccacagcctctgtagacttcgagc

SEQ ID NO: 5703101 - DNA, 25 bp, Homo sapien
gcccagctgctgcagatcctgcagg

SEQ ID NO: 5703102 - DNA, 25 bp, Homo sapien
caggcagccactgaggatgacatcc

SEQ ID NO: 5703103 - DNA, 25 bp, Homo sapien
cggcacgaggctggatcagcagaca

SEQ ID NO: 5703104 - DNA, 25 bp, Homo sapien
caaccgagtcctacaaggagacact

SEQ ID NO: 5703105 - DNA, 25 bp, Homo sapien
ccggctccggctgagctgggagagt

SEQ ID NO: 5703106 - DNA, 25 bp, Homo sapien
cgcgcccagcctggtgctgctcctg

SEQ ID NO: 5703107 - DNA, 25 bp, Homo sapien
catcctcgagaagaagggagcacta

SEQ ID NO: 5703108 - DNA, 25 bp, Homo sapien
gggctatggcaacagccagggcaca

SEQ ID NO: 5703109 - DNA, 25 bp, Homo sapien
gcaaatgaagtaccgggaccgtgca

SEQ ID NO: 5703110 - DNA, 25 bp, Homo sapien
caagacaatggtgacccgcttcaac

SEQ ID NO: 5703111 - DNA, 25 bp, Homo sapien
gctcagagaacgccaatgacaccat

SEQ ID NO: 5703112 - DNA, 25 bp, Homo sapien
ctagagaagaatgacatggagcaaa

SEQ ID NO: 5703113 - DNA, 25 bp, Homo sapien
aaagacgtggtggtcgtggtgacag

SEQ ID NO: 5703114 - DNA, 25 bp, Homo sapien
agaagaagggagcactagccgagag

SEQ ID NO: 5703115 - DNA, 25 bp, Homo sapien
ccactgcagatgctggctatgccat

SEQ ID NO: 5703116 - DNA, 25 bp, Homo sapien
cccaccactcactatcgacggcaag

SEQ ID NO: 5703117 - DNA, 25 bp, Homo sapien
ctacctcaagggcaccaagggccct

SEQ ID NO: 5703118 - DNA, 25 bp, Homo sapien
cagaagctgcccctcggcacgaggc

SEQ ID NO: 5703119 - DNA, 25 bp, Homo sapien
gcagatcatggtagcagcagcgggg

SEQ ID NO: 5703120 - DNA, 25 bp, Homo sapien
gttgggtgtccatcctggggcaggg

SEQ ID NO: 5703121 - DNA, 25 bp, Homo sapien
agaacgccaatgacaccatcatttt

SEQ ID NO: 5703122 - DNA, 25 bp, Homo sapien
gtcacccgctgtgctcaaatctgag

SEQ ID NO: 5703123 - DNA, 25 bp, Homo sapien
gcttcccctgccgcagccctaccag

SEQ ID NO: 5703124 - DNA, 25 bp, Homo sapien
agcatcacccaggctggcagatcat

SEQ ID NO: 5703125 - DNA, 25 bp, Homo sapien
tcaccgactggcagaagctggcctg

SEQ ID NO: 5703126 - DNA, 25 bp, Homo sapien
cgcccaagccctccgcgaggactgg

SEQ ID NO: 5703127 - DNA, 25 bp, Homo sapien
acctgaacccacacagcaccatgga

SEQ ID NO: 5703128 - DNA, 25 bp, Homo sapien
taacgcctatcgaggcccaaacacg

SEQ ID NO: 5703129 - DNA, 25 bp, Homo sapien
tctctacctaccagtacgatgagac

SEQ ID NO: 5703130 - DNA, 25 bp, Homo sapien
ccaccggctaccagccccactgccc

SEQ ID NO: 5703131 - DNA, 25 bp, Homo sapien
ggagccaagctcagagaacgccaat

SEQ ID NO: 5703132 - DNA, 25 bp, Homo sapien
actgcccaggaatcctacagccagt

SEQ ID NO: 5703133 - DNA, 25 bp, Homo sapien
gagctagaagcactagagaagaatg

SEQ ID NO: 5703134 - DNA, 25 bp, Homo sapien
aagaaaacttcaaaaatagcttcca

SEQ ID NO: 5703135 - DNA, 25 bp, Homo sapien
cgcagccgagaccacgactaccggg

SEQ ID NO: 5703136 - DNA, 25 bp, Homo sapien
gatggaagccaatcagcactccctc

SEQ ID NO: 5703137 - DNA, 25 bp, Homo sapien
gaaaacttcaaaaatagcttccagc

SEQ ID NO: 5703138 - DNA, 25 bp, Homo sapien
atcactggaaccaaaggggatccca

SEQ ID NO: 5703139 - DNA, 25 bp, Homo sapien
cgtgcccaagtcagaggcagagcag

SEQ ID NO: 5703140 - DNA, 25 bp, Homo sapien
gtaggcggcagtgagtttccctggg

SEQ ID NO: 5703141 - DNA, 25 bp, Homo sapien
cccccgatctgcctccagtctcgga

SEQ ID NO: 5703142 - DNA, 25 bp, Homo sapien
ccaaaggggatcccactggagcagg

SEQ ID NO: 5703143 - DNA, 25 bp, Homo sapien
cgaaggagggcaaagagaagaagga

SEQ ID NO: 5703144 - DNA, 25 bp, Homo sapien
ctgcaggccatgggctggaaagagg

SEQ ID NO: 5703145 - DNA, 25 bp, Homo sapien
aacaggatgagggctatggcaacag

SEQ ID NO: 5703146 - DNA, 25 bp, Homo sapien
gagaaccgcagccgagaccacgact

SEQ ID NO: 5703147 - DNA, 25 bp, Homo sapien
aatgacaccatcattttgcgcaacc

SEQ ID NO: 5703148 - DNA, 25 bp, Homo sapien
cacaagacaatggtgacccgcttca

SEQ ID NO: 5703149 - DNA, 25 bp, Homo sapien
acatgttgggtgtccatcctggggc

SEQ ID NO: 5703150 - DNA, 25 bp, Homo sapien
aatggtgacccgcttcaacgaggcc

SEQ ID NO: 5703151 - DNA, 25 bp, Homo sapien
gtacctgggccacctccgaggagcc

SEQ ID NO: 5703152 - DNA, 25 bp, Homo sapien
gaaccgcggctttgccttcatccag

SEQ ID NO: 5703153 - DNA, 25 bp, Homo sapien
gttgagtttgccaagggttctaaga

SEQ ID NO: 5703154 - DNA, 25 bp, Homo sapien
tggtggcagcctacagcggggagag

SEQ ID NO: 5703155 - DNA, 25 bp, Homo sapien
tggggagaaccgcagccgagaccac

SEQ ID NO: 5703156 - DNA, 25 bp, Homo sapien
gccagtgacgaccgcccaagccctc

SEQ ID NO: 5703157 - DNA, 25 bp, Homo sapien
gcacaagaccaagacagctcaacag

SEQ ID NO: 5703158 - DNA, 25 bp, Homo sapien
cgtcctgttttgtaataaaagctga

SEQ ID NO: 5703159 - DNA, 25 bp, Homo sapien
tgctgcaggccatgggctggaaaga

SEQ ID NO: 5703160 - DNA, 25 bp, Homo sapien
gggacgggctgggcagtgacaacat

SEQ ID NO: 5703161 - DNA, 25 bp, Homo sapien
aggaagtacggcggcatatccacag

SEQ ID NO: 5703162 - DNA, 25 bp, Homo sapien
ccaaatcaaattgaggtggtgactt

SEQ ID NO: 5703163 - DNA, 25 bp, Homo sapien
ggcatatccacagcctctgtagact

SEQ ID NO: 5703164 - DNA, 25 bp, Homo sapien
tttgccttcatccagctctccacca

SEQ ID NO: 5703165 - DNA, 25 bp, Homo sapien
ctagccgagagacagcacaccagca

SEQ ID NO: 5703166 - DNA, 25 bp, Homo sapien
gagggtacctgggccacctccgagg

SEQ ID NO: 5703167 - DNA, 25 bp, Homo sapien
ggaggaggtggcggcgggcagaggt

SEQ ID NO: 5703168 - DNA, 25 bp, Homo sapien
aaggccagtaacatcgtcatgctga

SEQ ID NO: 5703169 - DNA, 25 bp, Homo sapien
catccgtggccagctgcagtcgcac

SEQ ID NO: 5703170 - DNA, 25 bp, Homo sapien
acccacacagcaccatggattccat

SEQ ID NO: 5703171 - DNA, 25 bp, Homo sapien
aggaggagaaggccagtaacatcgt

SEQ ID NO: 5703172 - DNA, 25 bp, Homo sapien
tcttgtcggccagcccactccccag

SEQ ID NO: 5703173 - DNA, 25 bp, Homo sapien
tgcccaagtcagaggcagagcagaa

SEQ ID NO: 5703174 - DNA, 25 bp, Homo sapien
cccagcagcccccgaaggccctatc

SEQ ID NO: 5703175 - DNA, 25 bp, Homo sapien
agcaccatggattccatcctggggg

SEQ ID NO: 5703176 - DNA, 25 bp, Homo sapien
gcccttccttgacagcccgggccga

SEQ ID NO: 5703177 - DNA, 25 bp, Homo sapien
gcaggacgctacacgatggatggaa

SEQ ID NO: 5703178 - DNA, 25 bp, Homo sapien
gatgcactacagtgaccccaagccc

SEQ ID NO: 5703179 - DNA, 25 bp, Homo sapien
acatggcctccaatgaaggcagtcg

SEQ ID NO: 5703180 - DNA, 25 bp, Homo sapien
tgtggccagcactgccattgctgcg

SEQ ID NO: 5703181 - DNA, 25 bp, Homo sapien
ctctcagggctccacaagcaaaacc

SEQ ID NO: 5703182 - DNA, 25 bp, Homo sapien
gcaagcacgggaggttcggctgatg

SEQ ID NO: 5703183 - DNA, 25 bp, Homo sapien
gggctgggatcacgtcctgttttgt

SEQ ID NO: 5703184 - DNA, 25 bp, Homo sapien
ttccctctatgcccatggctacctc

SEQ ID NO: 5703185 - DNA, 25 bp, Homo sapien
ccagtattactacaatgctcagagc

SEQ ID NO: 5703186 - DNA, 25 bp, Homo sapien
atgaagtaccgggaccgtgcagctg

SEQ ID NO: 5703187 - DNA, 25 bp, Homo sapien
ccagcctatcagctccctgcgagat

SEQ ID NO: 5703188 - DNA, 25 bp, Homo sapien
cagcatggatctcccgaaattggcc

SEQ ID NO: 5703189 - DNA, 25 bp, Homo sapien
tctgtggccagcactgccattgctg

SEQ ID NO: 5703190 - DNA, 25 bp, Homo sapien
ttctgctctcccaccggctaccagc

SEQ ID NO: 5703191 - DNA, 25 bp, Homo sapien
gagtgcggaggattcctacgaggcc

SEQ ID NO: 5703192 - DNA, 25 bp, Homo sapien
tggcctcccaagccctgtcacaggg

SEQ ID NO: 5703193 - DNA, 25 bp, Homo sapien
caaattgaggtggtgacttttgttg

SEQ ID NO: 5703194 - DNA, 25 bp, Homo sapien
tctgtgtcgatgcaggctttctctc

SEQ ID NO: 5703195 - DNA, 25 bp, Homo sapien
cgggctgggcagtgacaacattggc

SEQ ID NO: 5703196 - DNA, 25 bp, Homo sapien
cggcaccagcagctctcagggctcc

SEQ ID NO: 5703197 - DNA, 25 bp, Homo sapien
ccagccccactgcccaggaatccta

SEQ ID NO: 5703198 - DNA, 25 bp, Homo sapien
ctaccaggcccagggagtcctggcc

SEQ ID NO: 5703199 - DNA, 25 bp, Homo sapien
gggctcggagccaagctcagagaac

SEQ ID NO: 5703200 - DNA, 25 bp, Homo sapien
ggcctccccgggctccgagactcag

SEQ ID NO: 5703201 - DNA, 25 bp, Homo sapien
cccgccaggcttcccccgagacggc

SEQ ID NO: 5703202 - DNA, 25 bp, Homo sapien
agggcaccaagggccctggcatcac

SEQ ID NO: 5703203 - DNA, 25 bp, Homo sapien
agtcgcatcagtgctgcctctgtgg

SEQ ID NO: 5703204 - DNA, 25 bp, Homo sapien
agcagggcattgtaacgcctatcga

SEQ ID NO: 5703205 - DNA, 25 bp, Homo sapien
ggtggcggcgggcagaggtgatgtc

SEQ ID NO: 5703206 - DNA, 25 bp, Homo sapien
ccgccagagcccaagaggaggaagt

SEQ ID NO: 5703207 - DNA, 25 bp, Homo sapien
aaggtgtcgatgcactacagtgacc

SEQ ID NO: 5703208 - DNA, 25 bp, Homo sapien
cccgagccgccagagcccaagagga

SEQ ID NO: 5703209 - DNA, 25 bp, Homo sapien
gagactcagcgtaggcggcggcggc

SEQ ID NO: 5703210 - DNA, 25 bp, Homo sapien
gtgtggcgtccagaacttcaaacgc

SEQ ID NO: 5703211 - DNA, 25 bp, Homo sapien
gcagctgaacgcagagaaaagtatg

SEQ ID NO: 5703212 - DNA, 25 bp, Homo sapien
tatgaccccaactcccagtattact

SEQ ID NO: 5703213 - DNA, 25 bp, Homo sapien
gaggctggatcagcagacactgcca

SEQ ID NO: 5703214 - DNA, 25 bp, Homo sapien
ttcaaaaatagcttccagcctatca

SEQ ID NO: 5703215 - DNA, 25 bp, Homo sapien
cctggcatcactggaaccaaagggg

SEQ ID NO: 5703216 - DNA, 25 bp, Homo sapien
agctctcagggctccacaagcaaaa

SEQ ID NO: 5703217 - DNA, 25 bp, Homo sapien
gttcccgacgtctctacctaccagt

SEQ ID NO: 5703218 - DNA, 25 bp, Homo sapien
cgctgtgctcaaatctgagctccag

SEQ ID NO: 5703219 - DNA, 25 bp, Homo sapien
cactagagaagaatgacatggagca

SEQ ID NO: 5703220 - DNA, 25 bp, Homo sapien
ctcagcgtaggcggcggcggcggca

SEQ ID NO: 5703221 - DNA, 25 bp, Homo sapien
cagcccgggccgagaagagtccctg

SEQ ID NO: 5703222 - DNA, 25 bp, Homo sapien
cagcggcctgggccgcaagaagcag

SEQ ID NO: 5703223 - DNA, 25 bp, Homo sapien
gccgccggtcgactacagctactac

SEQ ID NO: 5703224 - DNA, 25 bp, Homo sapien
agatcatggtagcagcagcgggggt

SEQ ID NO: 5703225 - DNA, 25 bp, Homo sapien
gggcactgctgccaacagccagtcg

SEQ ID NO: 5703226 - DNA, 25 bp, Homo sapien
accttgagattcaccggcgagccca

SEQ ID NO: 5703227 - DNA, 25 bp, Homo sapien
ttcccctgccgcagccctaccaggc

SEQ ID NO: 5703228 - DNA, 25 bp, Homo sapien
ccaagctcagagaacgccaatgaca

SEQ ID NO: 5703229 - DNA, 25 bp, Homo sapien
tccggcctgggtgcacggggcagct

SEQ ID NO: 5703230 - DNA, 25 bp, Homo sapien
atcagtgctgcctctgtggccagca

SEQ ID NO: 5703231 - DNA, 25 bp, Homo sapien
agtcgtataccatcatgtcacccgc

SEQ ID NO: 5703232 - DNA, 25 bp, Homo sapien
aggaggtggcggcgggcagaggtga

SEQ ID NO: 5703233 - DNA, 25 bp, Homo sapien
agccagtcgtataccatcatgtcac

SEQ ID NO: 5703234 - DNA, 25 bp, Homo sapien
tgacccccagaccggcctctactat

SEQ ID NO: 5703235 - DNA, 25 bp, Homo sapien
ggggcagctcctacggggtcacctc

SEQ ID NO: 5703236 - DNA, 25 bp, Homo sapien
ttcggctgatgcggaacaaatcttc

SEQ ID NO: 5703237 - DNA, 25 bp, Homo sapien
agctgctgcagatcctgcaggccct

SEQ ID NO: 5703238 - DNA, 25 bp, Homo sapien
gccagctgcagtcgcacggcgtgca

SEQ ID NO: 5703239 - DNA, 25 bp, Homo sapien
atgaggactggctgtgcaataagtg

SEQ ID NO: 5703240 - DNA, 25 bp, Homo sapien
ggctatgccatcctcgagaagaagg

SEQ ID NO: 5703241 - DNA, 25 bp, Homo sapien
cgttcatatcctcgcgagtatggca

SEQ ID NO: 5703242 - DNA, 25 bp, Homo sapien
gggcaagcatgactatgacgactca

SEQ ID NO: 5703243 - DNA, 25 bp, Homo sapien
cactgaggatgacatccgtggccag

SEQ ID NO: 5703244 - DNA, 25 bp, Homo sapien
gaagcactagagaagaatgacatgg

SEQ ID NO: 5703245 - DNA, 25 bp, Homo sapien
gccactgaggatgacatccgtggcc

SEQ ID NO: 5703246 - DNA, 25 bp, Homo sapien
cacctccgaggagccgccggtcgac

SEQ ID NO: 5703247 - DNA, 25 bp, Homo sapien
acaagcagacccaactgaaccgcgg

SEQ ID NO: 5703248 - DNA, 25 bp, Homo sapien
tggagcagtcggccgacggacataa

SEQ ID NO: 5703249 - DNA, 25 bp, Homo sapien
gtcctggcctcccaagccctgtcac

SEQ ID NO: 5703250 - DNA, 25 bp, Homo sapien
ggcagtgagtttccctgggagggca

SEQ ID NO: 5703251 - DNA, 25 bp, Homo sapien
cgagtatggcagccaggagggcaag

SEQ ID NO: 5703252 - DNA, 25 bp, Homo sapien
aaatgaagtaccgggaccgtgcagc

SEQ ID NO: 5703253 - DNA, 25 bp, Homo sapien
acaggcacagccccaccggcccgcc

SEQ ID NO: 5703254 - DNA, 25 bp, Homo sapien
actggctgtgcaataagtgtggcgt

SEQ ID NO: 5703255 - DNA, 25 bp, Homo sapien
ctgagcgggaggagaagctcaccga

SEQ ID NO: 5703256 - DNA, 25 bp, Homo sapien
cggggcttcgccttcgtcgagttta

SEQ ID NO: 5703257 - DNA, 25 bp, Homo sapien
gtcgtggtgacaggactggccgcta

SEQ ID NO: 5703258 - DNA, 25 bp, Homo sapien
ccactgggtggccgggagctgagcc

SEQ ID NO: 5703259 - DNA, 25 bp, Homo sapien
atcaatgaggactggctgtgcaata

SEQ ID NO: 5703260 - DNA, 25 bp, Homo sapien
gaagtaccgggaccgtgcagctgaa

SEQ ID NO: 5703261 - DNA, 25 bp, Homo sapien
ggccgcaagaagcagggcattgtaa

SEQ ID NO: 5703262 - DNA, 25 bp, Homo sapien
tgaaagacgtggtggtcgtggtgac

SEQ ID NO: 5703263 - DNA, 25 bp, Homo sapien
aaacgagctagaagcactagagaag

SEQ ID NO: 5703264 - DNA, 25 bp, Homo sapien
tcctgggggccctggcaccctacgc

SEQ ID NO: 5703265 - DNA, 25 bp, Homo sapien
cgtctctacctaccagtacgatgag

SEQ ID NO: 5703266 - DNA, 25 bp, Homo sapien
gcccgggccgagaagagtccctgca

SEQ ID NO: 5703267 - DNA, 25 bp, Homo sapien
agccgccagagcccaagaggaggaa

SEQ ID NO: 5703268 - DNA, 25 bp, Homo sapien
agtacggcggcatatccacagcctc

SEQ ID NO: 5703269 - DNA, 25 bp, Homo sapien
acggggccttgctcttgtcggccag

SEQ ID NO: 5703270 - DNA, 25 bp, Homo sapien
gaggcagcccagctgctgcagatcc

SEQ ID NO: 5703271 - DNA, 25 bp, Homo sapien
gggcctgcttcccctgccgcagccc

SEQ ID NO: 5703272 - DNA, 25 bp, Homo sapien
caaagagaagaaggagaagcacaag

SEQ ID NO: 5703273 - DNA, 25 bp, Homo sapien
catccccgagccgccagagcccaag

SEQ ID NO: 5703274 - DNA, 25 bp, Homo sapien
gtggctgggaagtgaaacggagcca

SEQ ID NO: 5703275 - DNA, 25 bp, Homo sapien
tcacttgcaggacgctacacgatgg

SEQ ID NO: 5703276 - DNA, 25 bp, Homo sapien
acagtgaccccaagcccaagatcaa

SEQ ID NO: 5703277 - DNA, 25 bp, Homo sapien
gaacgctgggcccgcagtctcaaca

SEQ ID NO: 5703278 - DNA, 25 bp, Homo sapien
gcctgcttcccctgccgcagcccta

SEQ ID NO: 5703279 - DNA, 25 bp, Homo sapien
tgtgtcgatgcaggctttctctcgc

SEQ ID NO: 5703280 - DNA, 25 bp, Homo sapien
agcaacttctccacatgttgggtgt

SEQ ID NO: 5703281 - DNA, 25 bp, Homo sapien
agagtcttccctctatgcccatggc

SEQ ID NO: 5703282 - DNA, 25 bp, Homo sapien
tggccagtgacgaccgcccaagccc

SEQ ID NO: 5703283 - DNA, 25 bp, Homo sapien
tgggccagaaggtgtcgatgcacta

SEQ ID NO: 5703284 - DNA, 25 bp, Homo sapien
ttggttgttgcgcgctccggctccg

SEQ ID NO: 5703285 - DNA, 25 bp, Homo sapien
aacacgggtgcggggctccggcctg

SEQ ID NO: 5703286 - DNA, 25 bp, Homo sapien
acagctactaccaacaggatgaggg

SEQ ID NO: 5703287 - DNA, 25 bp, Homo sapien
ctgggaagtgaaacggagccagcgg

SEQ ID NO: 5703288 - DNA, 25 bp, Homo sapien
atggatctcccgaaattggccagtg

SEQ ID NO: 5703289 - DNA, 25 bp, Homo sapien
cgcacggcgtgcaagcacgggaggt

SEQ ID NO: 5703290 - DNA, 25 bp, Homo sapien
atgaaggcagtcgcatcagtgctgc

SEQ ID NO: 5703291 - DNA, 25 bp, Homo sapien
gcatgactatgacgactcatctgag

SEQ ID NO: 5703292 - DNA, 25 bp, Homo sapien
ttcgagcagcctactcgggacgggc

SEQ ID NO: 5703293 - DNA, 25 bp, Homo sapien
agccaggagggcaagcatgactatg

SEQ ID NO: 5703294 - DNA, 25 bp, Homo sapien
ggagcactagccgagagacagcaca

SEQ ID NO: 5703295 - DNA, 25 bp, Homo sapien
ccactggagcaggtcccgaggcctc

SEQ ID NO: 5703296 - DNA, 25 bp, Homo sapien
ctccctagagcctggggccgactct

SEQ ID NO: 5703297 - DNA, 25 bp, Homo sapien
aggcagagcagaagctgcccctcgg

SEQ ID NO: 5703298 - DNA, 25 bp, Homo sapien
gagcagtcggccgacggacataagg

SEQ ID NO: 5703299 - DNA, 25 bp, Homo sapien
ctgcttcccctgccgcagccctacc

SEQ ID NO: 5703300 - DNA, 25 bp, Homo sapien
gaggaggaggagaaggccagtaaca

SEQ ID NO: 5703301 - DNA, 25 bp, Homo sapien
cccagcctggtgctgctcctggcat

SEQ ID NO: 5703302 - DNA, 25 bp, Homo sapien
cccaagatcaatgaggactggctgt

SEQ ID NO: 5703303 - DNA, 25 bp, Homo sapien
ttcatccagctctccaccatcgtgg

SEQ ID NO: 5703304 - DNA, 25 bp, Homo sapien
ctatgccatcctcgagaagaaggga

SEQ ID NO: 5703305 - DNA, 25 bp, Homo sapien
agtctcggacttggttgttgcgcgc

SEQ ID NO: 5703306 - DNA, 25 bp, Homo sapien
caactcccagtattactacaatgct

SEQ ID NO: 5703307 - DNA, 25 bp, Homo sapien
gggcacagagtcttccctctatgcc

SEQ ID NO: 5703308 - DNA, 25 bp, Homo sapien
gacctccggctactactatgacccc

SEQ ID NO: 5703309 - DNA, 25 bp, Homo sapien
agcccccgaaggccctatcaggaca

SEQ ID NO: 5703310 - DNA, 25 bp, Homo sapien
accggcctctactatgaccccaact

SEQ ID NO: 5703311 - DNA, 25 bp, Homo sapien
atgtcacccgctgtgctcaaatctg

SEQ ID NO: 5703312 - DNA, 25 bp, Homo sapien
ctccctcaacatcctgggccagaag

SEQ ID NO: 5703313 - DNA, 25 bp, Homo sapien
accgactggcagaagctggcctgtc

SEQ ID NO: 5703314 - DNA, 25 bp, Homo sapien
gctactactatgacccccagaccgg

SEQ ID NO: 5703315 - DNA, 25 bp, Homo sapien
cccgaggcctccctagagcctgggg

SEQ ID NO: 5703316 - DNA, 25 bp, Homo sapien
tgcgcgctccggctccggctgagct

SEQ ID NO: 5703317 - DNA, 25 bp, Homo sapien
cacagcctctgtagacttcgagcag

SEQ ID NO: 5703318 - DNA, 25 bp, Homo sapien
cgtccagaacttcaaacgccgagag

SEQ ID NO: 5703319 - DNA, 25 bp, Homo sapien
ggatcacgtcctgttttgtaataaa

SEQ ID NO: 5703320 - DNA, 25 bp, Homo sapien
cagcccactccccagccagagaggg

SEQ ID NO: 5703321 - DNA, 25 bp, Homo sapien
caagccctgtcacagggctcggagc

SEQ ID NO: 5703322 - DNA, 25 bp, Homo sapien
ccggcccgccaggcttcccccgaga

SEQ ID NO: 5703323 - DNA, 25 bp, Homo sapien
agctactaccaacaggatgagggct

SEQ ID NO: 5703324 - DNA, 25 bp, Homo sapien
cctggggccgactctgtgtcgatgc

SEQ ID NO: 5703325 - DNA, 25 bp, Homo sapien
taccgggacatggactaccgttcat

SEQ ID NO: 5703326 - DNA, 25 bp, Homo sapien
gaacccacacagcaccatggattcc

SEQ ID NO: 5703327 - DNA, 25 bp, Homo sapien
gagtgacagtgaggaggagcaggag

SEQ ID NO: 5703328 - DNA, 25 bp, Homo sapien
ttcaaacgccgagagaagtgcttca

SEQ ID NO: 5703329 - DNA, 25 bp, Homo sapien
ggagtatgaaagacgtggtggtcgt

SEQ ID NO: 5703330 - DNA, 25 bp, Homo sapien
gagggcaagcatgactatgacgact

SEQ ID NO: 5703331 - DNA, 25 bp, Homo sapien
ctgtggccggctgggagtaggcggc

SEQ ID NO: 5703332 - DNA, 25 bp, Homo sapien
ggcagtcggatgctgcaggccatgg

SEQ ID NO: 5703333 - DNA, 25 bp, Homo sapien
ttcccccgagacggcgactatcggg

SEQ ID NO: 5703334 - DNA, 25 bp, Homo sapien
atcctggggcagggaaggacagagt

SEQ ID NO: 5703335 - DNA, 25 bp, Homo sapien
ctcgagaagaagggagcactagccg

SEQ ID NO: 5703336 - DNA, 25 bp, Homo sapien
ccattgctgcggcccagtgggccat

SEQ ID NO: 5703337 - DNA, 25 bp, Homo sapien
attttgcgcaacctgaacccacaca

SEQ ID NO: 5703338 - DNA, 25 bp, Homo sapien
ccaatgacaccatcattttgcgcaa

SEQ ID NO: 5703339 - DNA, 25 bp, Homo sapien
gaagcatcacccaggctggcagatc

SEQ ID NO: 5703340 - DNA, 25 bp, Homo sapien
gacatccgtggccagctgcagtcgc

SEQ ID NO: 5703341 - DNA, 25 bp, Homo sapien
attgctgcggcccagtgggccatct

SEQ ID NO: 5703342 - DNA, 25 bp, Homo sapien
ctcccgaaattggccagtgacgacc

SEQ ID NO: 5703343 - DNA, 25 bp, Homo sapien
tcctgcaggccctgcacccaccact

SEQ ID NO: 5703344 - DNA, 25 bp, Homo sapien
agagcaacttctccacatgttgggt

SEQ ID NO: 5703345 - DNA, 25 bp, Homo sapien
gttctaagagggacatggcctccaa

SEQ ID NO: 5703346 - DNA, 25 bp, Homo sapien
gatgctgccacaggcagccactgag

SEQ ID NO: 5703347 - DNA, 25 bp, Homo sapien
tcattttgcgcaacctgaacccaca

SEQ ID NO: 5703348 - DNA, 25 bp, Homo sapien
gggggtggctgggaagtgaaacgga

SEQ ID NO: 5703349 - DNA, 25 bp, Homo sapien
gccagagcccaagaggaggaagtac

SEQ ID NO: 5703350 - DNA, 25 bp, Homo sapien
ttcgccttcgtcgagtttagtcact

SEQ ID NO: 5703351 - DNA, 25 bp, Homo sapien
ggtggggagaaccgcagccgagacc

SEQ ID NO: 5703352 - DNA, 25 bp, Homo sapien
ggcatccccgagccgccagagccca

SEQ ID NO: 5703353 - DNA, 25 bp, Homo sapien
agtcagaggcagagcagaagctgcc

SEQ ID NO: 5703354 - DNA, 25 bp, Homo sapien
cagccagagagggcttgaccaaatc

SEQ ID NO: 5703355 - DNA, 25 bp, Homo sapien
agggaaggacagagtgttggatggc

SEQ ID NO: 5703356 - DNA, 25 bp, Homo sapien
gtggtggtcgtggtgacaggactgg

SEQ ID NO: 5703357 - DNA, 25 bp, Homo sapien
gttggatggctgggacggggccttg

SEQ ID NO: 5703358 - DNA, 25 bp, Homo sapien
tgaccccaagcccaagatcaatgag

SEQ ID NO: 5703359 - DNA, 25 bp, Homo sapien
caggatgagggctatggcaacagcc

SEQ ID NO: 5703360 - DNA, 25 bp, Homo sapien
ctctcgcgcccagcctggtgctgct

SEQ ID NO: 5703361 - DNA, 25 bp, Homo sapien
ccaaacacgggtgcggggctccggc

SEQ ID NO: 5703362 - DNA, 25 bp, Homo sapien
cggcgagcccacttgtcagaaaacg

SEQ ID NO: 5703363 - DNA, 25 bp, Homo sapien
acttgcaggacgctacacgatggat

SEQ ID NO: 5703364 - DNA, 25 bp, Homo sapien
ctcatccggcaccagcagctctcag

SEQ ID NO: 5703365 - DNA, 25 bp, Homo sapien
tacgcggtgctgtcctcctccaacg

SEQ ID NO: 5703366 - DNA, 25 bp, Homo sapien
gtgagtttccctgggagggcagcgc

SEQ ID NO: 5703367 - DNA, 25 bp, Homo sapien
tcaaatgtggcgtgcccaagtcaga

SEQ ID NO: 5703368 - DNA, 25 bp, Homo sapien
ctactatgacccccagaccggcctc

SEQ ID NO: 5703369 - DNA, 25 bp, Homo sapien
caccactcactatcgacggcaagac

SEQ ID NO: 5703370 - DNA, 25 bp, Homo sapien
agccggggcttcgccttcgtcgagt

SEQ ID NO: 5703371 - DNA, 25 bp, Homo sapien
tcgatgcaggctttctctcgcgccc

SEQ ID NO: 5703372 - DNA, 25 bp, Homo sapien
cggctgatgcggaacaaatcttcag

SEQ ID NO: 5703373 - DNA, 25 bp, Homo sapien
atcaaattgaggtggtgacttttgt

SEQ ID NO: 5703374 - DNA, 25 bp, Homo sapien
gcccaaacacgggtgcggggctccg

SEQ ID NO: 5703375 - DNA, 25 bp, Homo sapien
aaggagggcaaagagaagaaggaga

SEQ ID NO: 5703376 - DNA, 25 bp, Homo sapien
ggtggccgggagctgagccagggcc

SEQ ID NO: 5703377 - DNA, 25 bp, Homo sapien
aggagacaggggcaccctcgaagga

SEQ ID NO: 5703378 - DNA, 25 bp, Homo sapien
aaaagctgaaaagtctgcaaaaaaa

SEQ ID NO: 5703379 - DNA, 25 bp, Homo sapien
gcccactccccagccagagagggct

SEQ ID NO: 5703380 - DNA, 25 bp, Homo sapien
gcactgccattgctgcggcccagtg

SEQ ID NO: 5703381 - DNA, 25 bp, Homo sapien
tccagaacttcaaacgccgagagaa

SEQ ID NO: 5703382 - DNA, 25 bp, Homo sapien
tgatgtctgggagcccttccttgac

SEQ ID NO: 5703383 - DNA, 25 bp, Homo sapien
ggcagcccagctgctgcagatcctg

SEQ ID NO: 5703384 - DNA, 25 bp, Homo sapien
tccaacgtgcgcgtcataaaggaca

SEQ ID NO: 5703385 - DNA, 25 bp, Homo sapien
gggagcccttccttgacagcccggg

SEQ ID NO: 5703386 - DNA, 25 bp, Homo sapien
ccgacgtctctacctaccagtacga

SEQ ID NO: 5703387 - DNA, 25 bp, Homo sapien
gcaccctcgaaggagggcaaagaga

SEQ ID NO: 5703388 - DNA, 25 bp, Homo sapien
gttttgtaataaaagctgaaaagtc

SEQ ID NO: 5703389 - DNA, 25 bp, Homo sapien
tgcgcaacctgaacccacacagcac

SEQ ID NO: 5703390 - DNA, 25 bp, Homo sapien
gccacctccgaggagccgccggtcg

SEQ ID NO: 5703391 - DNA, 25 bp, Homo sapien
cctacgcggtgctgtcctcctccaa

SEQ ID NO: 5703392 - DNA, 25 bp, Homo sapien
agccagcagtacctgtactgggatg

SEQ ID NO: 5703393 - DNA, 25 bp, Homo sapien
gcaccctacgcggtgctgtcctcct

SEQ ID NO: 5703394 - DNA, 25 bp, Homo sapien
atggcatccccgagccgccagagcc

SEQ ID NO: 5703395 - DNA, 25 bp, Homo sapien
tgagcagcttcaagagcaacttctc

SEQ ID NO: 5703396 - DNA, 25 bp, Homo sapien
aacaaatcttcaggtcagagccggg

SEQ ID NO: 5703397 - DNA, 25 bp, Homo sapien
acgtgcgcgtcataaaggacaagca

SEQ ID NO: 5703398 - DNA, 25 bp, Homo sapien
cgagcagcctactcgggacgggctg

SEQ ID NO: 5703399 - DNA, 25 bp, Homo sapien
agtcttccctctatgcccatggcta

SEQ ID NO: 5703400 - DNA, 25 bp, Homo sapien
gcagagaaaagtatggcatccccga

SEQ ID NO: 5703401 - DNA, 25 bp, Homo sapien
cagctgcagtcgcacggcgtgcaag

SEQ ID NO: 5703402 - DNA, 25 bp, Homo sapien
caaatcttcaggtcagagccggggc

SEQ ID NO: 5703403 - DNA, 25 bp, Homo sapien
ggacatggcctccaatgaaggcagt

SEQ ID NO: 5703404 - DNA, 25 bp, Homo sapien
aagctgaaaagtctgcaaaaaaaaa

SEQ ID NO: 5703405 - DNA, 25 bp, Homo sapien
aggagccgccggtcgactacagcta

SEQ ID NO: 5703406 - DNA, 25 bp, Homo sapien
gctgaggatgctgccacaggcagcc

SEQ ID NO: 5703407 - DNA, 25 bp, Homo sapien
acaaggagacactgcacaagacaat

SEQ ID NO: 5703408 - DNA, 25 bp, Homo sapien
tcctacgaggcctccccgggctccg

SEQ ID NO: 5703409 - DNA, 25 bp, Homo sapien
tccaatgaaggcagtcgcatcagtg

SEQ ID NO: 5703410 - DNA, 25 bp, Homo sapien
tggccgctatggagccactgaccgc

SEQ ID NO: 5703411 - DNA, 25 bp, Homo sapien
gggaagtgaaacggagccagcggct

SEQ ID NO: 5703412 - DNA, 25 bp, Homo sapien
ctgccaacagccagtcgtataccat

SEQ ID NO: 5703413 - DNA, 25 bp, Homo sapien
cccgaaattggccagtgacgaccgc

SEQ ID NO: 5703414 - DNA, 25 bp, Homo sapien
actggtggcagcctacagcggggag

SEQ ID NO: 5703415 - DNA, 25 bp, Homo sapien
cgagtcctacaaggagacactgcac

SEQ ID NO: 5703416 - DNA, 25 bp, Homo sapien
gggagggcagcgcgcttggcgcttc

SEQ ID NO: 5703417 - DNA, 25 bp, Homo sapien
atctgcctccagtctcggacttggt

SEQ ID NO: 5703418 - DNA, 25 bp, Homo sapien
tgcttcaaatgtggcgtgcccaagt

SEQ ID NO: 5703419 - DNA, 25 bp, Homo sapien
tggctgggacggggccttgctcttg

SEQ ID NO: 5703420 - DNA, 25 bp, Homo sapien
gatgaggaggaggaggagaaggcca

SEQ ID NO: 5703421 - DNA, 25 bp, Homo sapien
tggccgggagctgagccagggcctg

SEQ ID NO: 5703422 - DNA, 25 bp, Homo sapien
aacaatcagccgaggcgagcagtag

SEQ ID NO: 5703423 - DNA, 25 bp, Homo sapien
aaacttcaaaaatagcttccagcct

SEQ ID NO: 5703424 - DNA, 25 bp, Homo sapien
ctctatgcccatggctacctcaagg

SEQ ID NO: 5703425 - DNA, 25 bp, Homo sapien
gggacatggactaccgttcatatcc

SEQ ID NO: 5703426 - DNA, 25 bp, Homo sapien
tatcgggaccaggactatcggaccg

SEQ ID NO: 5703427 - DNA, 25 bp, Homo sapien
agaaggccagtaacatcgtcatgct

SEQ ID NO: 5703428 - DNA, 25 bp, Homo sapien
ccgggaccgtgcagctgaacgcaga

SEQ ID NO: 5703429 - DNA, 25 bp, Homo sapien
ccactgcccaggaatcctacagcca

SEQ ID NO: 5703430 - DNA, 25 bp, Homo sapien
ccgacgccagttccccagcaaagag

SEQ ID NO: 5703431 - DNA, 25 bp, Homo sapien
tcctcctccaacgtgcgcgtcataa

SEQ ID NO: 5703432 - DNA, 25 bp, Homo sapien
gagtttccctgggagggcagcgcgc

SEQ ID NO: 5703433 - DNA, 25 bp, Homo sapien
ccttccttgacagcccgggccgaga

SEQ ID NO: 5703434 - DNA, 25 bp, Homo sapien
catggactaccgttcatatcctcgc

SEQ ID NO: 5703435 - DNA, 25 bp, Homo sapien
agacttcgagcagcctactcgggac

SEQ ID NO: 5703436 - DNA, 25 bp, Homo sapien
ggcatctaccaacaatcagccgagg

SEQ ID NO: 5703437 - DNA, 25 bp, Homo sapien
ctgagccagggcctgcttcccctgc

SEQ ID NO: 5703438 - DNA, 25 bp, Homo sapien
cctccgaggagccgccggtcgacta

SEQ ID NO: 5703439 - DNA, 25 bp, Homo sapien
ttccttgacagcccgggccgagaag

SEQ ID NO: 5703440 - DNA, 25 bp, Homo sapien
ggcctccaatgaaggcagtcgcatc

SEQ ID NO: 5703441 - DNA, 25 bp, Homo sapien
agggcagcggcctgggccgcaagaa

SEQ ID NO: 5703442 - DNA, 25 bp, Homo sapien
gctagaagcactagagaagaatgac

SEQ ID NO: 5703443 - DNA, 25 bp, Homo sapien
agagccggggcttcgccttcgtcga

SEQ ID NO: 5703444 - DNA, 25 bp, Homo sapien
atgagggctatggcaacagccaggg

SEQ ID NO: 5703445 - DNA, 25 bp, Homo sapien
aacgccgagagaagtgcttcaaatg

SEQ ID NO: 5703446 - DNA, 25 bp, Homo sapien
ggatggggagaggcggacctatgtt

SEQ ID NO: 5703447 - DNA, 25 bp, Homo sapien
ggccctgagcgggaggagaagctca

SEQ ID NO: 5703448 - DNA, 25 bp, Homo sapien
cacaggcagccactgaggatgacat

SEQ ID NO: 5703449 - DNA, 25 bp, Homo sapien
cctccaacgtgcgcgtcataaagga

SEQ ID NO: 5703450 - DNA, 25 bp, Homo sapien
gcctccagtctcggacttggttgtt

SEQ ID NO: 5703451 - DNA, 25 bp, Homo sapien
ccctgcaggaagcatcacccaggct

SEQ ID NO: 5703452 - DNA, 25 bp, Homo sapien
ctcaacatcctgggccagaaggtgt

SEQ ID NO: 5703453 - DNA, 25 bp, Homo sapien
cctatcagctccctgcgagatgacg

SEQ ID NO: 5703454 - DNA, 25 bp, Homo sapien
gacatggactaccgttcatatcctc

SEQ ID NO: 5703455 - DNA, 25 bp, Homo sapien
ccggctgagctgggagagttggagg

SEQ ID NO: 5703456 - DNA, 25 bp, Homo sapien
gtatggcatccccgagccgccagag

SEQ ID NO: 5703457 - DNA, 25 bp, Homo sapien
ggacttggttgttgcgcgctccggc

SEQ ID NO: 5703458 - DNA, 25 bp, Homo sapien
tggaagccaatcagcactccctcaa

SEQ ID NO: 5703459 - DNA, 25 bp, Homo sapien
atgacatccgtggccagctgcagtc

SEQ ID NO: 5703460 - DNA, 25 bp, Homo sapien
ccaactgaaccgcggctttgccttc

SEQ ID NO: 5703461 - DNA, 25 bp, Homo sapien
gtggccggctgggagtaggcggcag

SEQ ID NO: 5703462 - DNA, 25 bp, Homo sapien
actgggtggccgggagctgagccag

SEQ ID NO: 5703463 - DNA, 25 bp, Homo sapien
tcatgtcacccgctgtgctcaaatc

SEQ ID NO: 5703464 - DNA, 25 bp, Homo sapien
gaccatcaatgttgagtttgccaag

SEQ ID NO: 5703465 - DNA, 25 bp, Homo sapien
gacgctacacgatggatggaagcca

SEQ ID NO: 5703466 - DNA, 25 bp, Homo sapien
gccagggcactgctgccaacagcca

SEQ ID NO: 5703467 - DNA, 25 bp, Homo sapien
agcaaagaggcgctcatccggcacc

SEQ ID NO: 5703468 - DNA, 25 bp, Homo sapien
tgctgcggcccagtgggccatctca

SEQ ID NO: 5703469 - DNA, 25 bp, Homo sapien
tcagaggcagagcagaagctgcccc

SEQ ID NO: 5703470 - DNA, 25 bp, Homo sapien
gcacagagtcttccctctatgccca

SEQ ID NO: 5703471 - DNA, 25 bp, Homo sapien
gcaggccatgggctggaaagagggc

SEQ ID NO: 5703472 - DNA, 25 bp, Homo sapien
aaacggagccagcggctgaggaggg

SEQ ID NO: 5703473 - DNA, 25 bp, Homo sapien
gtcggccagcccactccccagccag

SEQ ID NO: 5703474 - DNA, 25 bp, Homo sapien
ctgtctgctctgccgacgccagttc

SEQ ID NO: 5703475 - DNA, 25 bp, Homo sapien
gcaagcatgactatgacgactcatc

SEQ ID NO: 5703476 - DNA, 25 bp, Homo sapien
cacgtcctgttttgtaataaaagct

SEQ ID NO: 5703477 - DNA, 25 bp, Homo sapien
cccatcctagttctgctctcccacc

SEQ ID NO: 5703478 - DNA, 25 bp, Homo sapien
aagaatgacatggagcaaatgaagt

SEQ ID NO: 5703479 - DNA, 25 bp, Homo sapien
cagatcctgcaggccctgcacccac

SEQ ID NO: 5703480 - DNA, 25 bp, Homo sapien
gcggacctatgttcccgccctggag

SEQ ID NO: 5703481 - DNA, 25 bp, Homo sapien
aatagcttccagcctatcagctccc

SEQ ID NO: 5703482 - DNA, 25 bp, Homo sapien
acctcaaccgagtcctacaaggaga

SEQ ID NO: 5703483 - DNA, 25 bp, Homo sapien
agatcaatgaggactggctgtgcaa

SEQ ID NO: 5703484 - DNA, 25 bp, Homo sapien
tctcggacttggttgttgcgcgctc

SEQ ID NO: 5703485 - DNA, 25 bp, Homo sapien
cgagacggcgactatcgggaccagg

SEQ ID NO: 5703486 - DNA, 25 bp, Homo sapien
ggctacctcaagggcaccaagggcc

SEQ ID NO: 5703487 - DNA, 25 bp, Homo sapien
acctgggccacctccgaggagccgc

SEQ ID NO: 5703488 - DNA, 25 bp, Homo sapien
tggccagcactgccattgctgcggc

SEQ ID NO: 5703489 - DNA, 25 bp, Homo sapien
acttcaaaaatagcttccagcctat

SEQ ID NO: 5703490 - DNA, 25 bp, Homo sapien
ggtggtcgtggtgacaggactggcc

SEQ ID NO: 5703491 - DNA, 25 bp, Homo sapien
cgagccgccagagcccaagaggagg

SEQ ID NO: 5703492 - DNA, 25 bp, Homo sapien
catatccacagcctctgtagacttc

SEQ ID NO: 5703493 - DNA, 25 bp, Homo sapien
gaagctgcccctcggcacgaggctg

SEQ ID NO: 5703494 - DNA, 25 bp, Homo sapien
cccaagcccaagatcaatgaggact

SEQ ID NO: 5703495 - DNA, 25 bp, Homo sapien
ctgggagcccttccttgacagcccg

SEQ ID NO: 5703496 - DNA, 25 bp, Homo sapien
tcccgccctggagcagtcggccgac

SEQ ID NO: 5703497 - DNA, 25 bp, Homo sapien
tcatctgaggagcagagtgcggagg

SEQ ID NO: 5703498 - DNA, 25 bp, Homo sapien
actgcagatgctggctatgccatcc

SEQ ID NO: 5703499 - DNA, 25 bp, Homo sapien
gacggacataaggagacaggggcac

SEQ ID NO: 5703500 - DNA, 25 bp, Homo sapien
acccaactgaaccgcggctttgcct

SEQ ID NO: 5703501 - DNA, 25 bp, Homo sapien
gagagacagcacaccagcatggatc

SEQ ID NO: 5703502 - DNA, 25 bp, Homo sapien
aacattggcagtcggatgctgcagg

SEQ ID NO: 5703503 - DNA, 25 bp, Homo sapien
gcgagatgacgagaggcgggagtca

SEQ ID NO: 5703504 - DNA, 25 bp, Homo sapien
ttgctcttgtcggccagcccactcc

SEQ ID NO: 5703505 - DNA, 25 bp, Homo sapien
gtgcagctgaacgcagagaaaagta

SEQ ID NO: 5703506 - DNA, 25 bp, Homo sapien
gctctccaccatcgtggaggcagcc

SEQ ID NO: 5703507 - DNA, 25 bp, Homo sapien
acgaggctggatcagcagacactgc

SEQ ID NO: 5703508 - DNA, 25 bp, Homo sapien
agattcaccggcgagcccacttgtc

SEQ ID NO: 5703509 - DNA, 25 bp, Homo sapien
cagtgacgaccgcccaagccctccg

SEQ ID NO: 5703510 - DNA, 25 bp, Homo sapien
ggtgctgctcctggcatctaccaac

SEQ ID NO: 5703511 - DNA, 25 bp, Homo sapien
ggtgtccatcctggggcagggaagg

SEQ ID NO: 5703512 - DNA, 25 bp, Homo sapien
aggctggcagatcatggtagcagca

SEQ ID NO: 5703513 - DNA, 25 bp, Homo sapien
ccagtacgatgagacctccggctac

SEQ ID NO: 5703514 - DNA, 25 bp, Homo sapien
gctcttgtcggccagcccactcccc

SEQ ID NO: 5703515 - DNA, 25 bp, Homo sapien
tggtgacaggactggccgctatgga

SEQ ID NO: 5703516 - DNA, 25 bp, Homo sapien
cagcctggtgctgctcctggcatct

SEQ ID NO: 5703517 - DNA, 25 bp, Homo sapien
gactacagctactaccaacaggatg

SEQ ID NO: 5703518 - DNA, 25 bp, Homo sapien
aaccaaaggggatcccactggagca

SEQ ID NO: 5703519 - DNA, 25 bp, Homo sapien
ggccttgctcttgtcggccagccca

SEQ ID NO: 5703520 - DNA, 25 bp, Homo sapien
gccgctatggagccactgaccgctc

SEQ ID NO: 5703521 - DNA, 25 bp, Homo sapien
aaattggccagtgacgaccgcccaa

SEQ ID NO: 5703522 - DNA, 25 bp, Homo sapien
aaaagtatggcatccccgagccgcc

SEQ ID NO: 5703523 - DNA, 25 bp, Homo sapien
ctatgacgactcatctgaggagcag

SEQ ID NO: 5703524 - DNA, 25 bp, Homo sapien
aagcacgggaggttcggctgatgcg

SEQ ID NO: 5703525 - DNA, 25 bp, Homo sapien
ctgctcctggcatctaccaacaatc

SEQ ID NO: 5703526 - DNA, 25 bp, Homo sapien
gcggcctgggccgcaagaagcaggg

SEQ ID NO: 5703527 - DNA, 25 bp, Homo sapien
ccaagggccctggcatcactggaac

SEQ ID NO: 5703528 - DNA, 25 bp, Homo sapien
aagggttctaagagggacatggcct

SEQ ID NO: 5703529 - DNA, 25 bp, Homo sapien
cagggctccacaagcaaaaccttga

SEQ ID NO: 5703530 - DNA, 25 bp, Homo sapien
cccaactcccagtattactacaatg

SEQ ID NO: 5703531 - DNA, 25 bp, Homo sapien
cctgcacccaccactcactatcgac

SEQ ID NO: 5703532 - DNA, 25 bp, Homo sapien
cagtgggccatctcacaggcctccc

SEQ ID NO: 5703533 - DNA, 25 bp, Homo sapien
cagtacctgtactgggatggggaga

SEQ ID NO: 5703534 - DNA, 25 bp, Homo sapien
ggggcccctcctcagccgctggctc

SEQ ID NO: 5703535 - DNA, 25 bp, Homo sapien
gtcccgagtaggctgctcgaagtct

SEQ ID NO: 5703536 - DNA, 25 bp, Homo sapien
ccgtcccagccatccaacactctgt

SEQ ID NO: 5703537 - DNA, 25 bp, Homo sapien
cggcaggggaagcaggccctggctc

SEQ ID NO: 5703538 - DNA, 25 bp, Homo sapien
cggtacttcatttgctccatgtcat

SEQ ID NO: 5703539 - DNA, 25 bp, Homo sapien
tgtctgctgatccagcctcgtgccg

SEQ ID NO: 5703540 - DNA, 25 bp, Homo sapien
tctgctgatccagcctcgtgccgag

SEQ ID NO: 5703541 - DNA, 25 bp, Homo sapien
tgctgatccagcctcgtgccgaggg

SEQ ID NO: 5703542 - DNA, 25 bp, Homo sapien
tagtcgaccggcggctcctcggagg

SEQ ID NO: 5703543 - DNA, 25 bp, Homo sapien
tggctccgtttcacttcccagccac

SEQ ID NO: 5703544 - DNA, 25 bp, Homo sapien
gccgcagcaatggcagtgctggcca

SEQ ID NO: 5703545 - DNA, 25 bp, Homo sapien
aatggcagtgctggccacagaggca

SEQ ID NO: 5703546 - DNA, 25 bp, Homo sapien
tccagtgatgccagggcccttggtg

SEQ ID NO: 5703547 - DNA, 25 bp, Homo sapien
agcgccaagcgcgctgccctcccag

SEQ ID NO: 5703548 - DNA, 25 bp, Homo sapien
agcctgggtgatgcttcctgcaggg

SEQ ID NO: 5703549 - DNA, 25 bp, Homo sapien
atatgaacggtagtccatgtcccgg

SEQ ID NO: 5703550 - DNA, 25 bp, Homo sapien
atggcatagccagcatctgcagtgg

SEQ ID NO: 5703551 - DNA, 25 bp, Homo sapien
cctcgataggcgttacaatgccctg

SEQ ID NO: 5703552 - DNA, 25 bp, Homo sapien
cccgtgcacccaggccggagccccg

SEQ ID NO: 5703553 - DNA, 25 bp, Homo sapien
tttttttttgcagacttttcagctt

SEQ ID NO: 5703554 - DNA, 25 bp, Homo sapien
tcctgggcagtggggctggtagccg

SEQ ID NO: 5703555 - DNA, 25 bp, Homo sapien
gctggtagccggtgggagagcagaa

SEQ ID NO: 5703556 - DNA, 25 bp, Homo sapien
gcggtcgtcactggccaatttcggg

SEQ ID NO: 5703557 - DNA, 25 bp, Homo sapien
ggctgcggttctccccaccatcatc

SEQ ID NO: 5703558 - DNA, 25 bp, Homo sapien
ggtagccatgggcatagagggaaga

SEQ ID NO: 5703559 - DNA, 25 bp, Homo sapien
tgcaggatctgcagcagctgggctg

SEQ ID NO: 5703560 - DNA, 25 bp, Homo sapien
tgtgagatggcccactgggccgcag

SEQ ID NO: 5703561 - DNA, 25 bp, Homo sapien
atttgatttggtcaagccctctctg

SEQ ID NO: 5703562 - DNA, 25 bp, Homo sapien
tctccccatcccagtacaggtactg

SEQ ID NO: 5703563 - DNA, 25 bp, Homo sapien
gggagatccatgctggtgtgctgtc

SEQ ID NO: 5703564 - DNA, 25 bp, Homo sapien
gcccagcgttccatgtccttggcaa

SEQ ID NO: 5703565 - DNA, 25 bp, Homo sapien
ctctggctggggagtgggctggccg

SEQ ID NO: 5703566 - DNA, 25 bp, Homo sapien
ctcagtggctgcctgtggcagcatc

SEQ ID NO: 5703567 - DNA, 25 bp, Homo sapien
cagcaatggcagtgctggccacaga

SEQ ID NO: 5703568 - DNA, 25 bp, Homo sapien
ctactgctcgcctcggctgattgtt

SEQ ID NO: 5703569 - DNA, 25 bp, Homo sapien
gccggagccccgcacccgtgtttgg

SEQ ID NO: 5703570 - DNA, 25 bp, Homo sapien
ggagagcagaactaggatgggtagg

SEQ ID NO: 5703571 - DNA, 25 bp, Homo sapien
atgttgtcactgcccagcccgtccc

SEQ ID NO: 5703572 - DNA, 25 bp, Homo sapien
atgtccttggcaatctgttgagctg

SEQ ID NO: 5703573 - DNA, 25 bp, Homo sapien
actctcccagctcagccggagccgg

SEQ ID NO: 5703574 - DNA, 25 bp, Homo sapien
ccatgtcattcttctctagtgcttc

SEQ ID NO: 5703575 - DNA, 25 bp, Homo sapien
gagggagtgctgattggcttccatc

SEQ ID NO: 5703576 - DNA, 25 bp, Homo sapien
cccaggatggaatccatggtgctgt

SEQ ID NO: 5703577 - DNA, 25 bp, Homo sapien
taaactcgacgaaggcgaagccccg

SEQ ID NO: 5703578 - DNA, 25 bp, Homo sapien
caattttccaacaaaagtcaccacc

SEQ ID NO: 5703579 - DNA, 25 bp, Homo sapien
ccgccgcctacgctgagtctcggag

SEQ ID NO: 5703580 - DNA, 25 bp, Homo sapien
gagcgcgcaacaaccaagtccgaga

SEQ ID NO: 5703581 - DNA, 25 bp, Homo sapien
ttcttctctagtgcttctagctcgt

SEQ ID NO: 5703582 - DNA, 25 bp, Homo sapien
ggcctcgttgaagcgggtcaccatt

SEQ ID NO: 5703583 - DNA, 25 bp, Homo sapien
gtcccgatagtcgccgtctcggggg

SEQ ID NO: 5703584 - DNA, 25 bp, Homo sapien
gaaactcactgccgcctactcccag

SEQ ID NO: 5703585 - DNA, 25 bp, Homo sapien
agtccgagactggaggcagatcggg

SEQ ID NO: 5703586 - DNA, 25 bp, Homo sapien
ccggtgaatctcaaggttttgcttg

SEQ ID NO: 5703587 - DNA, 25 bp, Homo sapien
ggtactgctggctctgagcattgta

SEQ ID NO: 5703588 - DNA, 25 bp, Homo sapien
gcttggggtcactgtagtgcatcga

SEQ ID NO: 5703589 - DNA, 25 bp, Homo sapien
gaagttgctcttgaagctgctcact

SEQ ID NO: 5703590 - DNA, 25 bp, Homo sapien
gactccctgggcctggtagggctgc

SEQ ID NO: 5703591 - DNA, 25 bp, Homo sapien
cctcgggacctgctccagtgggatc

SEQ ID NO: 5703592 - DNA, 25 bp, Homo sapien
tttgccctccttcgagggtgcccct

SEQ ID NO: 5703593 - DNA, 25 bp, Homo sapien
agcttttattacaaaacaggacgtg

SEQ ID NO: 5703594 - DNA, 25 bp, Homo sapien
tcctgatagggccttcgggggctgc

SEQ ID NO: 5703595 - DNA, 25 bp, Homo sapien
tgggctggccgacaagagcaaggcc

SEQ ID NO: 5703596 - DNA, 25 bp, Homo sapien
aacaaccaagtccgagactggaggc

SEQ ID NO: 5703597 - DNA, 25 bp, Homo sapien
gcaaactcaacattgatggtcttgc

SEQ ID NO: 5703598 - DNA, 25 bp, Homo sapien
ctctcggcgtttgaagttctggacg

SEQ ID NO: 5703599 - DNA, 25 bp, Homo sapien
tttccagcccatggcctgcagcatc

SEQ ID NO: 5703600 - DNA, 25 bp, Homo sapien
ctcagctcccggccacccagtggca

SEQ ID NO: 5703601 - DNA, 25 bp, Homo sapien
catgtccctcttagaacccttggca

SEQ ID NO: 5703602 - DNA, 25 bp, Homo sapien
tggtcaagccctctctggctgggga

SEQ ID NO: 5703603 - DNA, 25 bp, Homo sapien
atgccgccgtacttcctcctcttgg

SEQ ID NO: 5703604 - DNA, 25 bp, Homo sapien
cggcgtttgaagttctggacgccac

SEQ ID NO: 5703605 - DNA, 25 bp, Homo sapien
cacgccgtgcgactgcagctggcca

SEQ ID NO: 5703606 - DNA, 25 bp, Homo sapien
cgacacagagtcggccccaggctct

SEQ ID NO: 5703607 - DNA, 25 bp, Homo sapien
agtggctccatagcggccagtcctg

SEQ ID NO: 5703608 - DNA, 25 bp, Homo sapien
tgccagggcccttggtgcccttgag

SEQ ID NO: 5703609 - DNA, 25 bp, Homo sapien
cggccgactgctccagggcgggaac

SEQ ID NO: 5703610 - DNA, 25 bp, Homo sapien
atcgtgtagcgtcctgcaagtgact

SEQ ID NO: 5703611 - DNA, 25 bp, Homo sapien
agttctggacgccacacttattgca

SEQ ID NO: 5703612 - DNA, 25 bp, Homo sapien
tccgagactggaggcagatcggggg

SEQ ID NO: 5703613 - DNA, 25 bp, Homo sapien
ccgctgtaggctgccaccagtcctc

SEQ ID NO: 5703614 - DNA, 25 bp, Homo sapien
gggcctggtagggctgcggcagggg

SEQ ID NO: 5703615 - DNA, 25 bp, Homo sapien
gggagtgctgattggcttccatcca

SEQ ID NO: 5703616 - DNA, 25 bp, Homo sapien
actctgtgccctggctgttgccata

SEQ ID NO: 5703617 - DNA, 25 bp, Homo sapien
cggcagagcagacaggccagcttct

SEQ ID NO: 5703618 - DNA, 25 bp, Homo sapien
ctggccacggatgtcatcctcagtg

SEQ ID NO: 5703619 - DNA, 25 bp, Homo sapien
gtgctcccttcttctcgaggatggc

SEQ ID NO: 5703620 - DNA, 25 bp, Homo sapien
gaccaccacgtctttcatactccat

SEQ ID NO: 5703621 - DNA, 25 bp, Homo sapien
gcttctagctcgttttctgacaagt

SEQ ID NO: 5703622 - DNA, 25 bp, Homo sapien
gacatcacctctgcccgccgccacc

SEQ ID NO: 5703623 - DNA, 25 bp, Homo sapien
gtcattcttctctagtgcttctagc

SEQ ID NO: 5703624 - DNA, 25 bp, Homo sapien
agtagtagccggaggtctcatcgta

SEQ ID NO: 5703625 - DNA, 25 bp, Homo sapien
cagcagtgccctggctactgctcgc

SEQ ID NO: 5703626 - DNA, 25 bp, Homo sapien
caccagtcctcgcggagggcttggg

SEQ ID NO: 5703627 - DNA, 25 bp, Homo sapien
ccggatgagcgcctctttgctgggg

SEQ ID NO: 5703628 - DNA, 25 bp, Homo sapien
tgtcctgatagggccttcgggggct

SEQ ID NO: 5703629 - DNA, 25 bp, Homo sapien
tctccttgtaggactcggttgaggt

SEQ ID NO: 5703630 - DNA, 25 bp, Homo sapien
cctgctccagtgggatcccctttgg

SEQ ID NO: 5703631 - DNA, 25 bp, Homo sapien
gagtctcggagcccggggaggcctc

SEQ ID NO: 5703632 - DNA, 25 bp, Homo sapien
ttgttccgcatcagccgaacctccc

SEQ ID NO: 5703633 - DNA, 25 bp, Homo sapien
tcatagtagtagccggaggtctcat

SEQ ID NO: 5703634 - DNA, 25 bp, Homo sapien
gtacttcatttgctccatgtcattc

SEQ ID NO: 5703635 - DNA, 25 bp, Homo sapien
tcagtggctccatagcggccagtcc

SEQ ID NO: 5703636 - DNA, 25 bp, Homo sapien
ccgaacctcccgtgcttgcacgccg

SEQ ID NO: 5703637 - DNA, 25 bp, Homo sapien
ccagcgttccatgtccttggcaatc

SEQ ID NO: 5703638 - DNA, 25 bp, Homo sapien
tctgggggtcatagtagtagccgga

SEQ ID NO: 5703639 - DNA, 25 bp, Homo sapien
gtttgaagttctggacgccacactt

SEQ ID NO: 5703640 - DNA, 25 bp, Homo sapien
ctctctggctggggagtgggctggc

SEQ ID NO: 5703641 - DNA, 25 bp, Homo sapien
gccacacttattgcacagccagtcc

SEQ ID NO: 5703642 - DNA, 25 bp, Homo sapien
ggtcatagtagaggccggtctgggg

SEQ ID NO: 5703643 - DNA, 25 bp, Homo sapien
ggcagcatcctcagcatgacgatgt

SEQ ID NO: 5703644 - DNA, 25 bp, Homo sapien
tttctctgcgttcagctgcacggtc

SEQ ID NO: 5703645 - DNA, 25 bp, Homo sapien
cagtgatgccagggcccttggtgcc

SEQ ID NO: 5703646 - DNA, 25 bp, Homo sapien
ggctctggcggctcggggatgccat

SEQ ID NO: 5703647 - DNA, 25 bp, Homo sapien
cccaccttgggaggcctgtgagatg

SEQ ID NO: 5703648 - DNA, 25 bp, Homo sapien
ggggtcatagtagaggccggtctgg

SEQ ID NO: 5703649 - DNA, 25 bp, Homo sapien
gcagcagctgggctgcctccacgat

SEQ ID NO: 5703650 - DNA, 25 bp, Homo sapien
gggctggtagccggtgggagagcag

SEQ ID NO: 5703651 - DNA, 25 bp, Homo sapien
tctgcttgtcctttatgacgcgcac

SEQ ID NO: 5703652 - DNA, 25 bp, Homo sapien
ccgctgctgctaccatgatctgcca

SEQ ID NO: 5703653 - DNA, 25 bp, Homo sapien
actcccgcctctcgtcatctcgcag

SEQ ID NO: 5703654 - DNA, 25 bp, Homo sapien
agtgagtggtgggtgcagggcctgc

SEQ ID NO: 5703655 - DNA, 25 bp, Homo sapien
tgttgagactgcgggcccagcgttc

SEQ ID NO: 5703656 - DNA, 25 bp, Homo sapien
acaatgccctgcttcttgcggccca

SEQ ID NO: 5703657 - DNA, 25 bp, Homo sapien
ggcagcttctgctctgcctctgact

SEQ ID NO: 5703658 - DNA, 25 bp, Homo sapien
gagggcttgggcggtcgtcactggc

SEQ ID NO: 5703659 - DNA, 25 bp, Homo sapien
ttccctgccccaggatggacaccca

SEQ ID NO: 5703660 - DNA, 25 bp, Homo sapien
cataggtccgcctctccccatccca

SEQ ID NO: 5703661 - DNA, 25 bp, Homo sapien
gctgactcccgcctctcgtcatctc

SEQ ID NO: 5703662 - DNA, 25 bp, Homo sapien
taggagctgccccgtgcacccaggc

SEQ ID NO: 5703663 - DNA, 25 bp, Homo sapien
agagcagaactaggatgggtagggc

SEQ ID NO: 5703664 - DNA, 25 bp, Homo sapien
aggaagggctcccagacatcacctc

SEQ ID NO: 5703665 - DNA, 25 bp, Homo sapien
ttctctcggcgtttgaagttctgga

SEQ ID NO: 5703666 - DNA, 25 bp, Homo sapien
tgtcattggcgttctctgagcttgg

SEQ ID NO: 5703667 - DNA, 25 bp, Homo sapien
tgccgaggggcagcttctgctctgc

SEQ ID NO: 5703668 - DNA, 25 bp, Homo sapien
gatctgccagcctgggtgatgcttc

SEQ ID NO: 5703669 - DNA, 25 bp, Homo sapien
agactctgtgccctggctgttgcca

SEQ ID NO: 5703670 - DNA, 25 bp, Homo sapien
ctcagccggagccggagcgcgcaac

SEQ ID NO: 5703671 - DNA, 25 bp, Homo sapien
ttggcagcagtgccctggctactgc

SEQ ID NO: 5703672 - DNA, 25 bp, Homo sapien
gtctcggagcccggggaggcctcgt

SEQ ID NO: 5703673 - DNA, 25 bp, Homo sapien
tagagggaagactctgtgccctggc

SEQ ID NO: 5703674 - DNA, 25 bp, Homo sapien
gcgggtcaccattgtcttgtgcagt

SEQ ID NO: 5703675 - DNA, 25 bp, Homo sapien
ggagagctggatgaaggcaaagccg

SEQ ID NO: 5703676 - DNA, 25 bp, Homo sapien
atgtcattcttctctagtgcttcta

SEQ ID NO: 5703677 - DNA, 25 bp, Homo sapien
ggtgaatctcaaggttttgcttgtg

SEQ ID NO: 5703678 - DNA, 25 bp, Homo sapien
cttctctttgccctccttcgagggt

SEQ ID NO: 5703679 - DNA, 25 bp, Homo sapien
ctggccacagaggcagcactgatgc

SEQ ID NO: 5703680 - DNA, 25 bp, Homo sapien
tagtcctggtcccgatagtcgccgt

SEQ ID NO: 5703681 - DNA, 25 bp, Homo sapien
agccctctctggctggggagtgggc

SEQ ID NO: 5703682 - DNA, 25 bp, Homo sapien
atttgttccgcatcagccgaacctc

SEQ ID NO: 5703683 - DNA, 25 bp, Homo sapien
cctcagcatgacgatgttactggcc

SEQ ID NO: 5703684 - DNA, 25 bp, Homo sapien
ggatgccatacttttctctgcgttc

SEQ ID NO: 5703685 - DNA, 25 bp, Homo sapien
ttgagggagtgctgattggcttcca

SEQ ID NO: 5703686 - DNA, 25 bp, Homo sapien
cctctgacttgggcacgccacattt

SEQ ID NO: 5703687 - DNA, 25 bp, Homo sapien
ctggcggctcggggatgccatactt

SEQ ID NO: 5703688 - DNA, 25 bp, Homo sapien
gggccgcagcaatggcagtgctggc

SEQ ID NO: 5703689 - DNA, 25 bp, Homo sapien
ctcgttttctgacaagtgggctcgc

SEQ ID NO: 5703690 - DNA, 25 bp, Homo sapien
tttcgggagatccatgctggtgtgc

SEQ ID NO: 5703691 - DNA, 25 bp, Homo sapien
gtcggcagagcagacaggccagctt

SEQ ID NO: 5703692 - DNA, 25 bp, Homo sapien
ctgaagatttgttccgcatcagccg

SEQ ID NO: 5703693 - DNA, 25 bp, Homo sapien
cagcctcgtgccgaggggcagcttc

SEQ ID NO: 5703694 - DNA, 25 bp, Homo sapien
ggctgttgccatagccctcatcctg

SEQ ID NO: 5703695 - DNA, 25 bp, Homo sapien
ggctggggagtgggctggccgacaa

SEQ ID NO: 5703696 - DNA, 25 bp, Homo sapien
acacccaacatgtggagaagttgct

SEQ ID NO: 5703697 - DNA, 25 bp, Homo sapien
agtcctcattgatcttgggcttggg

SEQ ID NO: 5703698 - DNA, 25 bp, Homo sapien
ctgagagctgctggtgccggatgag

SEQ ID NO: 5703699 - DNA, 25 bp, Homo sapien
ctgggcgcgagagaaagcctgcatc

SEQ ID NO: 5703700 - DNA, 25 bp, Homo sapien
ggaagcctggcgggccggtggggct

SEQ ID NO: 5703701 - DNA, 25 bp, Homo sapien
ggctgggcgcgagagaaagcctgca

SEQ ID NO: 5703702 - DNA, 25 bp, Homo sapien
cccggctctgacctgaagatttgtt

SEQ ID NO: 5703703 - DNA, 25 bp, Homo sapien
cacgctcctgctcctcctcactgtc

SEQ ID NO: 5703704 - DNA, 25 bp, Homo sapien
gaggggcagcttctgctctgcctct

SEQ ID NO: 5703705 - DNA, 25 bp, Homo sapien
ctgttgagctgtcttggtcttgtgc

SEQ ID NO: 5703706 - DNA, 25 bp, Homo sapien
ggaacataggtccgcctctccccat

SEQ ID NO: 5703707 - DNA, 25 bp, Homo sapien
tccgagccctgtgacagggcttggg

SEQ ID NO: 5703708 - DNA, 25 bp, Homo sapien
tctttgccctccttcgagggtgccc

SEQ ID NO: 5703709 - DNA, 25 bp, Homo sapien
ccttccctgccccaggatggacacc

SEQ ID NO: 5703710 - DNA, 25 bp, Homo sapien
tgtagtgcatcgacaccttctggcc

SEQ ID NO: 5703711 - DNA, 25 bp, Homo sapien
tgataggctggaagctatttttgaa

SEQ ID NO: 5703712 - DNA, 25 bp, Homo sapien
aagccccggctctgacctgaagatt

SEQ ID NO: 5703713 - DNA, 25 bp, Homo sapien
cgctgagtctcggagcccggggagg

SEQ ID NO: 5703714 - DNA, 25 bp, Homo sapien
ccctgcttcttgcggcccaggccgc

SEQ ID NO: 5703715 - DNA, 25 bp, Homo sapien
tggctccatagcggccagtcctgtc

SEQ ID NO: 5703716 - DNA, 25 bp, Homo sapien
tcattggcgttctctgagcttggct

SEQ ID NO: 5703717 - DNA, 25 bp, Homo sapien
ctgcttcttgcggcccaggccgctg

SEQ ID NO: 5703718 - DNA, 25 bp, Homo sapien
ccccgctgctgctaccatgatctgc

SEQ ID NO: 5703719 - DNA, 25 bp, Homo sapien
ccaacatgtggagaagttgctcttg

SEQ ID NO: 5703720 - DNA, 25 bp, Homo sapien
gaacggtagtccatgtcccggtagt

SEQ ID NO: 5703721 - DNA, 25 bp, Homo sapien
gcatcgacacagagtcggccccagg

SEQ ID NO: 5703722 - DNA, 25 bp, Homo sapien
gtcgggaacagggtactggctgtag

SEQ ID NO: 5703723 - DNA, 25 bp, Homo sapien
tggctccgagccctgtgacagggct

SEQ ID NO: 5703724 - DNA, 25 bp, Homo sapien
gcccaggatgttgagggagtgctga

SEQ ID NO: 5703725 - DNA, 25 bp, Homo sapien
ccacgatggtggagagctggatgaa

SEQ ID NO: 5703726 - DNA, 25 bp, Homo sapien
tccccaccatcatcctgcgagcggt

SEQ ID NO: 5703727 - DNA, 25 bp, Homo sapien
cttctggcccaggatgttgagggag

SEQ ID NO: 5703728 - DNA, 25 bp, Homo sapien
ctggcgggccggtggggctgtgcct

SEQ ID NO: 5703729 - DNA, 25 bp, Homo sapien
cccgggctgtcaaggaagggctccc

SEQ ID NO: 5703730 - DNA, 25 bp, Homo sapien
catgcttgccctcctggctgccata

SEQ ID NO: 5703731 - DNA, 25 bp, Homo sapien
gagggtgcccctgtctccttatgtc

SEQ ID NO: 5703732 - DNA, 25 bp, Homo sapien
ttgagactgcgggcccagcgttcca

SEQ ID NO: 5703733 - DNA, 25 bp, Homo sapien
ttgctcttgaagctgctcactgggc

SEQ ID NO: 5703734 - DNA, 25 bp, Homo sapien
ctggctactgctcgcctcggctgat

SEQ ID NO: 5703735 - DNA, 25 bp, Homo sapien
ggaatccatggtgctgtgtgggttc

SEQ ID NO: 5703736 - DNA, 25 bp, Homo sapien
agtagctgtagtcgaccggcggctc

SEQ ID NO: 5703737 - DNA, 25 bp, Homo sapien
tccaacactctgtccttccctgccc

SEQ ID NO: 5703738 - DNA, 25 bp, Homo sapien
tgggatcccctttggttccagtgat

SEQ ID NO: 5703739 - DNA, 25 bp, Homo sapien
gtctccttatgtccgtcggccgact

SEQ ID NO: 5703740 - DNA, 25 bp, Homo sapien
ctagctcgttttctgacaagtgggc

SEQ ID NO: 5703741 - DNA, 25 bp, Homo sapien
agggtgccagggcccccaggatgga

SEQ ID NO: 5703742 - DNA, 25 bp, Homo sapien
agagctggatgaaggcaaagccgcg

SEQ ID NO: 5703743 - DNA, 25 bp, Homo sapien
ctgccaccagtcctcgcggagggct

SEQ ID NO: 5703744 - DNA, 25 bp, Homo sapien
ttttgcttgtggagccctgagagct

SEQ ID NO: 5703745 - DNA, 25 bp, Homo sapien
aggctggaagctatttttgaagttt

SEQ ID NO: 5703746 - DNA, 25 bp, Homo sapien
tctgtgccctggctgttgccatagc

SEQ ID NO: 5703747 - DNA, 25 bp, Homo sapien
tccttcgagggtgcccctgtctcct

SEQ ID NO: 5703748 - DNA, 25 bp, Homo sapien
gaggacagcaccgcgtagggtgcca

SEQ ID NO: 5703749 - DNA, 25 bp, Homo sapien
tgtcactgcccagcccgtcccgagt

SEQ ID NO: 5703750 - DNA, 25 bp, Homo sapien
catgtcctgatagggccttcggggg

SEQ ID NO: 5703751 - DNA, 25 bp, Homo sapien
accaagtccgagactggaggcagat

SEQ ID NO: 5703752 - DNA, 25 bp, Homo sapien
tctcggctgcggttctccccaccat

SEQ ID NO: 5703753 - DNA, 25 bp, Homo sapien
ctgctaccatgatctgccagcctgg

SEQ ID NO: 5703754 - DNA, 25 bp, Homo sapien
agtgtctgctgatccagcctcgtgc

SEQ ID NO: 5703755 - DNA, 25 bp, Homo sapien
ttggcaatctgttgagctgtcttgg

SEQ ID NO: 5703756 - DNA, 25 bp, Homo sapien
cctggtcccgatagtcgccgtctcg

SEQ ID NO: 5703757 - DNA, 25 bp, Homo sapien
agatttgttccgcatcagccgaacc

SEQ ID NO: 5703758 - DNA, 25 bp, Homo sapien
gttgagctgtcttggtcttgtgctt

SEQ ID NO: 5703759 - DNA, 25 bp, Homo sapien
ctgattgttggtagatgccaggagc

SEQ ID NO: 5703760 - DNA, 25 bp, Homo sapien
tgctggggcccctcctcagccgctg

SEQ ID NO: 5703761 - DNA, 25 bp, Homo sapien
gagggaagactctgtgccctggctg

SEQ ID NO: 5703762 - DNA, 25 bp, Homo sapien
agctgtcttggtcttgtgcttctcc

SEQ ID NO: 5703763 - DNA, 25 bp, Homo sapien
ggtagtccatgtcccggtagtcgtg

SEQ ID NO: 5703764 - DNA, 25 bp, Homo sapien
gtcccggtacttcatttgctccatg

SEQ ID NO: 5703765 - DNA, 25 bp, Homo sapien
gcctctcgtcatctcgcagggagct

SEQ ID NO: 5703766 - DNA, 25 bp, Homo sapien
ctgccccgtgcacccaggccggagc

SEQ ID NO: 5703767 - DNA, 25 bp, Homo sapien
ccgactgccaatgttgtcactgccc

SEQ ID NO: 5703768 - DNA, 25 bp, Homo sapien
ctgatgcgactgccttcattggagg

SEQ ID NO: 5703769 - DNA, 25 bp, Homo sapien
gaacctcccgtgcttgcacgccgtg

SEQ ID NO: 5703770 - DNA, 25 bp, Homo sapien
ccctggctgttgccatagccctcat

SEQ ID NO: 5703771 - DNA, 25 bp, Homo sapien
gggtcaccattgtcttgtgcagtgt

SEQ ID NO: 5703772 - DNA, 25 bp, Homo sapien
actgtagtgcatcgacaccttctgg

SEQ ID NO: 5703773 - DNA, 25 bp, Homo sapien
catggtgctgtgtgggttcaggttg

SEQ ID NO: 5703774 - DNA, 25 bp, Homo sapien
tctgtccttccctgccccaggatgg

SEQ ID NO: 5703775 - DNA, 25 bp, Homo sapien
ctggtgtgctgtctctcggctagtg

SEQ ID NO: 5703776 - DNA, 25 bp, Homo sapien
tctgccagtcggtgagcttctcctc

SEQ ID NO: 5703777 - DNA, 25 bp, Homo sapien
tagtgcatcgacaccttctggccca

SEQ ID NO: 5703778 - DNA, 25 bp, Homo sapien
tctcgaggatggcatagccagcatc

SEQ ID NO: 5703779 - DNA, 25 bp, Homo sapien
gctgtaggattcctgggcagtgggg

SEQ ID NO: 5703780 - DNA, 25 bp, Homo sapien
tcggttgaggtgaccccgtaggagc

SEQ ID NO: 5703781 - DNA, 25 bp, Homo sapien
ggtgatgcttcctgcagggactctt

SEQ ID NO: 5703782 - DNA, 25 bp, Homo sapien
gaactaggatgggtagggctctgga

SEQ ID NO: 5703783 - DNA, 25 bp, Homo sapien
gtctcatcgtactggtaggtagaga

SEQ ID NO: 5703784 - DNA, 25 bp, Homo sapien
gcagggcctgcaggatctgcagcag

SEQ ID NO: 5703785 - DNA, 25 bp, Homo sapien
tttgagcacagcgggtgacatgatg

SEQ ID NO: 5703786 - DNA, 25 bp, Homo sapien
catagcggccagtcctgtcaccacg

SEQ ID NO: 5703787 - DNA, 25 bp, Homo sapien
tcagccgaacctcccgtgcttgcac

SEQ ID NO: 5703788 - DNA, 25 bp, Homo sapien
ctgccccaggatggacacccaacat

SEQ ID NO: 5703789 - DNA, 25 bp, Homo sapien
ccgcctctcgtcatctcgcagggag

SEQ ID NO: 5703790 - DNA, 25 bp, Homo sapien
atgatctgccagcctgggtgatgct

SEQ ID NO: 5703791 - DNA, 25 bp, Homo sapien
cagcgggtgacatgatggtatacga

SEQ ID NO: 5703792 - DNA, 25 bp, Homo sapien
ccctcatcctgttggtagtagctgt

SEQ ID NO: 5703793 - DNA, 25 bp, Homo sapien
attttccaacaaaagtcaccacctc

SEQ ID NO: 5703794 - DNA, 25 bp, Homo sapien
gcatcctcagcatgacgatgttact

SEQ ID NO: 5703795 - DNA, 25 bp, Homo sapien
ccacgaccaccacgtctttcatact

SEQ ID NO: 5703796 - DNA, 25 bp, Homo sapien
tttgttgagactgcgggcccagcgt

SEQ ID NO: 5703797 - DNA, 25 bp, Homo sapien
ggccaggactccctgggcctggtag

SEQ ID NO: 5703798 - DNA, 25 bp, Homo sapien
ccatgtcccggtagtcgtggtctcg

SEQ ID NO: 5703799 - DNA, 25 bp, Homo sapien
gtggcagcatcctcagcatgacgat

SEQ ID NO: 5703800 - DNA, 25 bp, Homo sapien
ttcttctcgaggatggcatagccag

SEQ ID NO: 5703801 - DNA, 25 bp, Homo sapien
gtcatcctcagtggctgcctgtggc

SEQ ID NO: 5703802 - DNA, 25 bp, Homo sapien
gcagtggctgactcccgcctctcgt

SEQ ID NO: 5703803 - DNA, 25 bp, Homo sapien
tgcaagtgactaaactcgacgaagg

SEQ ID NO: 5703804 - DNA, 25 bp, Homo sapien
ggctgtggatatgccgccgtacttc

SEQ ID NO: 5703805 - DNA, 25 bp, Homo sapien
tgggcctcgttgaagcgggtcacca

SEQ ID NO: 5703806 - DNA, 25 bp, Homo sapien
ggttcaggttgcgcaaaatgatggt

SEQ ID NO: 5703807 - DNA, 25 bp, Homo sapien
tggagaagttgctcttgaagctgct

SEQ ID NO: 5703808 - DNA, 25 bp, Homo sapien
ctgtcaaggaagggctcccagacat

SEQ ID NO: 5703809 - DNA, 25 bp, Homo sapien
tgtctccttgtaggactcggttgag

SEQ ID NO: 5703810 - DNA, 25 bp, Homo sapien
ggaggaggacagcaccgcgtagggt

SEQ ID NO: 5703811 - DNA, 25 bp, Homo sapien
ctgcagctggccacggatgtcatcc

SEQ ID NO: 5703812 - DNA, 25 bp, Homo sapien
cacttattgcacagccagtcctcat

SEQ ID NO: 5703813 - DNA, 25 bp, Homo sapien
aggctctagggaggcctcgggacct

SEQ ID NO: 5703814 - DNA, 25 bp, Homo sapien
actggtaggtagagacgtcgggaac

SEQ ID NO: 5703815 - DNA, 25 bp, Homo sapien
ttcagctgcacggtcccggtacttc

SEQ ID NO: 5703816 - DNA, 25 bp, Homo sapien
gccggccacagtcaccagctcaaaa

SEQ ID NO: 5703817 - DNA, 25 bp, Homo sapien
ggagctgccccgtgcacccaggccg

SEQ ID NO: 5703818 - DNA, 25 bp, Homo sapien
ctcagatgagtcgtcatagtcatgc

SEQ ID NO: 5703819 - DNA, 25 bp, Homo sapien
gatcccagcccaattttccaacaaa

SEQ ID NO: 5703820 - DNA, 25 bp, Homo sapien
cttgtgcttctccttcttctctttg

SEQ ID NO: 5703821 - DNA, 25 bp, Homo sapien
aaagccgcggttcagttgggtctgc

SEQ ID NO: 5703822 - DNA, 25 bp, Homo sapien
caggacgtgatcccagcccaatttt

SEQ ID NO: 5703823 - DNA, 25 bp, Homo sapien
cgactgccttcattggaggccatgt

SEQ ID NO: 5703824 - DNA, 25 bp, Homo sapien
tcctcactgtcactctccccgctgt

SEQ ID NO: 5703825 - DNA, 25 bp, Homo sapien
cctgcaggatctgcagcagctgggc

SEQ ID NO: 5703826 - DNA, 25 bp, Homo sapien
gcagctggccacggatgtcatcctc

SEQ ID NO: 5703827 - DNA, 25 bp, Homo sapien
gccgccacctcctccaactctccca

SEQ ID NO: 5703828 - DNA, 25 bp, Homo sapien
gttctctgagcttggctccgagccc

SEQ ID NO: 5703829 - DNA, 25 bp, Homo sapien
catttgaagcacttctctcggcgtt

SEQ ID NO: 5703830 - DNA, 25 bp, Homo sapien
tcttgggcttggggtcactgtagtg

SEQ ID NO: 5703831 - DNA, 25 bp, Homo sapien
tcactgcccagcccgtcccgagtag

SEQ ID NO: 5703832 - DNA, 25 bp, Homo sapien
agtcctcgcggagggcttgggcggt

SEQ ID NO: 5703833 - DNA, 25 bp, Homo sapien
ggacacccaacatgtggagaagttg

SEQ ID NO: 5703834 - DNA, 25 bp, Homo sapien
gagagctgctggtgccggatgagcg

SEQ ID NO: 5703835 - DNA, 25 bp, Homo sapien
ctggctgttgccatagccctcatcc

SEQ ID NO: 5703836 - DNA, 25 bp, Homo sapien
agctggatgaaggcaaagccgcggt

SEQ ID NO: 5703837 - DNA, 25 bp, Homo sapien
agttggggtcatagtagaggccggt

SEQ ID NO: 5703838 - DNA, 25 bp, Homo sapien
aagcctggcgggccggtggggctgt

SEQ ID NO: 5703839 - DNA, 25 bp, Homo sapien
ccctgtctccttatgtccgtcggcc

SEQ ID NO: 5703840 - DNA, 25 bp, Homo sapien
ggagcagcaccaggctgggcgcgag

SEQ ID NO: 5703841 - DNA, 25 bp, Homo sapien
tgccatagccctcatcctgttggta

SEQ ID NO: 5703842 - DNA, 25 bp, Homo sapien
gaagctgctcactgggcctcgttga

SEQ ID NO: 5703843 - DNA, 25 bp, Homo sapien
atactccatgtcctgatagggcctt

SEQ ID NO: 5703844 - DNA, 25 bp, Homo sapien
ttttctgacaagtgggctcgccggt

SEQ ID NO: 5703845 - DNA, 25 bp, Homo sapien
gtgatcccagcccaattttccaaca

SEQ ID NO: 5703846 - DNA, 25 bp, Homo sapien
ccagtcctcgcggagggcttgggcg

SEQ ID NO: 5703847 - DNA, 25 bp, Homo sapien
gcccctgtctccttatgtccgtcgg

SEQ ID NO: 5703848 - DNA, 25 bp, Homo sapien
gcttcttgcggcccaggccgctgcc

SEQ ID NO: 5703849 - DNA, 25 bp, Homo sapien
ggcagcagtgccctggctactgctc

SEQ ID NO: 5703850 - DNA, 25 bp, Homo sapien
ctcctggctgccatactcgcgagga

SEQ ID NO: 5703851 - DNA, 25 bp, Homo sapien
actgctccagggcgggaacataggt

SEQ ID NO: 5703852 - DNA, 25 bp, Homo sapien
tttttgtttgttgagactgcgggcc

SEQ ID NO: 5703853 - DNA, 25 bp, Homo sapien
gtgggtgcagggcctgcaggatctg

SEQ ID NO: 5703854 - DNA, 25 bp, Homo sapien
ggagctcagatttgagcacagcggg

SEQ ID NO: 5703855 - DNA, 25 bp, Homo sapien
cccatcccagtacaggtactgctgg

SEQ ID NO: 5703856 - DNA, 25 bp, Homo sapien
gctggctctgagcattgtagtaata

SEQ ID NO: 5703857 - DNA, 25 bp, Homo sapien
cgtaggagctgccccgtgcacccag

SEQ ID NO: 5703858 - DNA, 25 bp, Homo sapien
gcgcaacaaccaagtccgagactgg

SEQ ID NO: 5703859 - DNA, 25 bp, Homo sapien
tccgcactctgctcctcagatgagt

SEQ ID NO: 5703860 - DNA, 25 bp, Homo sapien
cattgtagtaatactgggagttggg

SEQ ID NO: 5703861 - DNA, 25 bp, Homo sapien
tggctgtaggattcctgggcagtgg

SEQ ID NO: 5703862 - DNA, 25 bp, Homo sapien
cttctgccagtcggtgagcttctcc

SEQ ID NO: 5703863 - DNA, 25 bp, Homo sapien
tgtgcctgtgccgccgccgccgcct

SEQ ID NO: 5703864 - DNA, 25 bp, Homo sapien
cttttcagcttttattacaaaacag

SEQ ID NO: 5703865 - DNA, 25 bp, Homo sapien
gggctgtgcctgtgccgccgccgcc

SEQ ID NO: 5703866 - DNA, 25 bp, Homo sapien
cagggtactggctgtaggattcctg

SEQ ID NO: 5703867 - DNA, 25 bp, Homo sapien
cggctctgacctgaagatttgttcc

SEQ ID NO: 5703868 - DNA, 25 bp, Homo sapien
atggcccactgggccgcagcaatgg

SEQ ID NO: 5703869 - DNA, 25 bp, Homo sapien
gccgccgccgcctacgctgagtctc

SEQ ID NO: 5703870 - DNA, 25 bp, Homo sapien
gctagtgctcccttcttctcgagga

SEQ ID NO: 5703871 - DNA, 25 bp, Homo sapien
ttgatcttgggcttggggtcactgt

SEQ ID NO: 5703872 - DNA, 25 bp, Homo sapien
cagccggagccggagcgcgcaacaa

SEQ ID NO: 5703873 - DNA, 25 bp, Homo sapien
tggtgggtgcagggcctgcaggatc

SEQ ID NO: 5703874 - DNA, 25 bp, Homo sapien
cattgatggtcttgccgtcgatagt

SEQ ID NO: 5703875 - DNA, 25 bp, Homo sapien
gagactgcgggcccagcgttccatg

SEQ ID NO: 5703876 - DNA, 25 bp, Homo sapien
gcaaaatgatggtgtcattggcgtt

SEQ ID NO: 5703877 - DNA, 25 bp, Homo sapien
tcggggggaggggagaagcgccaag

SEQ ID NO: 5703878 - DNA, 25 bp, Homo sapien
ccccgtcccagccatccaacactct

SEQ ID NO: 5703879 - DNA, 25 bp, Homo sapien
tgccatactcgcgaggatatgaacg

SEQ ID NO: 5703880 - DNA, 25 bp, Homo sapien
gcttgggcggtcgtcactggccaat

SEQ ID NO: 5703881 - DNA, 25 bp, Homo sapien
cccagggaaactcactgccgcctac

SEQ ID NO: 5703882 - DNA, 25 bp, Homo sapien
ggctcccagacatcacctctgcccg

SEQ ID NO: 5703883 - DNA, 25 bp, Homo sapien
cctactcccagccggccacagtcac

SEQ ID NO: 5703884 - DNA, 25 bp, Homo sapien
gatagggccttcgggggctgctggg

SEQ ID NO: 5703885 - DNA, 25 bp, Homo sapien
ggtgggagagcagaactaggatggg

SEQ ID NO: 5703886 - DNA, 25 bp, Homo sapien
tccatgtcctgatagggccttcggg

SEQ ID NO: 5703887 - DNA, 25 bp, Homo sapien
gatggtggagagctggatgaaggca

SEQ ID NO: 5703888 - DNA, 25 bp, Homo sapien
ctggtgccggatgagcgcctctttg

SEQ ID NO: 5703889 - DNA, 25 bp, Homo sapien
tgccgtcgatagtgagtggtgggtg

SEQ ID NO: 5703890 - DNA, 25 bp, Homo sapien
ctccagtgggatcccctttggttcc

SEQ ID NO: 5703891 - DNA, 25 bp, Homo sapien
aggtagagacgtcgggaacagggta

SEQ ID NO: 5703892 - DNA, 25 bp, Homo sapien
cgtgcttgcacgccgtgcgactgca

SEQ ID NO: 5703893 - DNA, 25 bp, Homo sapien
tgcttgtcctttatgacgcgcacgt

SEQ ID NO: 5703894 - DNA, 25 bp, Homo sapien
cagtggctgcctgtggcagcatcct

SEQ ID NO: 5703895 - DNA, 25 bp, Homo sapien
tgctggtgtgctgtctctcggctag

SEQ ID NO: 5703896 - DNA, 25 bp, Homo sapien
tcgtactggtaggtagagacgtcgg

SEQ ID NO: 5703897 - DNA, 25 bp, Homo sapien
aatgccctgcttcttgcggcccagg

SEQ ID NO: 5703898 - DNA, 25 bp, Homo sapien
tatacgactggctgttggcagcagt

SEQ ID NO: 5703899 - DNA, 25 bp, Homo sapien
acaccttctggcccaggatgttgag

SEQ ID NO: 5703900 - DNA, 25 bp, Homo sapien
atgacgcgcacgttggaggaggaca

SEQ ID NO: 5703901 - DNA, 25 bp, Homo sapien
tgccagggcccccaggatggaatcc

SEQ ID NO: 5703902 - DNA, 25 bp, Homo sapien
tggttccagtgatgccagggccctt

SEQ ID NO: 5703903 - DNA, 25 bp, Homo sapien
tccttcttctctttgccctccttcg

SEQ ID NO: 5703904 - DNA, 25 bp, Homo sapien
gccatgtccctcttagaacccttgg

SEQ ID NO: 5703905 - DNA, 25 bp, Homo sapien
cttctcggcccgggctgtcaaggaa

SEQ ID NO: 5703906 - DNA, 25 bp, Homo sapien
tgctcgcctcggctgattgttggta

SEQ ID NO: 5703907 - DNA, 25 bp, Homo sapien
tggtagccggtgggagagcagaact

SEQ ID NO: 5703908 - DNA, 25 bp, Homo sapien
gatccagcctcgtgccgaggggcag

SEQ ID NO: 5703909 - DNA, 25 bp, Homo sapien
ctgggcagtggggctggtagccggt

SEQ ID NO: 5703910 - DNA, 25 bp, Homo sapien
acagaggcagcactgatgcgactgc

SEQ ID NO: 5703911 - DNA, 25 bp, Homo sapien
gtagtaatactgggagttggggtca

SEQ ID NO: 5703912 - DNA, 25 bp, Homo sapien
catgggcatagagggaagactctgt

SEQ ID NO: 5703913 - DNA, 25 bp, Homo sapien
acttcatttgctccatgtcattctt

SEQ ID NO: 5703914 - DNA, 25 bp, Homo sapien
tgccggatgagcgcctctttgctgg

SEQ ID NO: 5703915 - DNA, 25 bp, Homo sapien
caccattgtcttgtgcagtgtctcc

SEQ ID NO: 5703916 - DNA, 25 bp, Homo sapien
ggaacagggtactggctgtaggatt

SEQ ID NO: 5703917 - DNA, 25 bp, Homo sapien
agcccaattttccaacaaaagtcac

SEQ ID NO: 5703918 - DNA, 25 bp, Homo sapien
ggtgagcttctcctcccgctcaggg

SEQ ID NO: 5703919 - DNA, 25 bp, Homo sapien
gtcaaggaagggctcccagacatca

SEQ ID NO: 5703920 - DNA, 25 bp, Homo sapien
cgagccctgtgacagggcttgggag

SEQ ID NO: 5703921 - DNA, 25 bp, Homo sapien
cggtcccggtacttcatttgctcca

SEQ ID NO: 5703922 - DNA, 25 bp, Homo sapien
cagccggccacagtcaccagctcaa

SEQ ID NO: 5703923 - DNA, 25 bp, Homo sapien
tcgtcatagtcatgcttgccctcct

SEQ ID NO: 5703924 - DNA, 25 bp, Homo sapien
gcgaggatatgaacggtagtccatg

SEQ ID NO: 5703925 - DNA, 25 bp, Homo sapien
gccgccgtacttcctcctcttgggc

SEQ ID NO: 5703926 - DNA, 25 bp, Homo sapien
aacagggtactggctgtaggattcc

SEQ ID NO: 5703927 - DNA, 25 bp, Homo sapien
ttccatccatcgtgtagcgtcctgc

SEQ ID NO: 5703928 - DNA, 25 bp, Homo sapien
tagggaggcctcgggacctgctcca

SEQ ID NO: 5703929 - DNA, 25 bp, Homo sapien
cagctgggctgcctccacgatggtg

SEQ ID NO: 5703930 - DNA, 25 bp, Homo sapien
tgcgttcagctgcacggtcccggta

SEQ ID NO: 5703931 - DNA, 25 bp, Homo sapien
agatggcccactgggccgcagcaat

SEQ ID NO: 5703932 - DNA, 25 bp, Homo sapien
cgatagtgagtggtgggtgcagggc

SEQ ID NO: 5703933 - DNA, 25 bp, Homo sapien
ctcccagccggccacagtcaccagc

SEQ ID NO: 5703934 - DNA, 25 bp, Homo sapien
gtccttggcaatctgttgagctgtc

SEQ ID NO: 5703935 - DNA, 25 bp, Homo sapien
ggatgaaggcaaagccgcggttcag

SEQ ID NO: 5703936 - DNA, 25 bp, Homo sapien
caagtccgagactggaggcagatcg

SEQ ID NO: 5703937 - DNA, 25 bp, Homo sapien
gtcccggtagtcgtggtctcggctg

SEQ ID NO: 5703938 - DNA, 25 bp, Homo sapien
gcaatggcagtgctggccacagagg

SEQ ID NO: 5703939 - DNA, 25 bp, Homo sapien
agttgctcttgaagctgctcactgg

SEQ ID NO: 5703940 - DNA, 25 bp, Homo sapien
tcccttcttctcgaggatggcatag

SEQ ID NO: 5703941 - DNA, 25 bp, Homo sapien
gcaggggaagcaggccctggctcag

SEQ ID NO: 5703942 - DNA, 25 bp, Homo sapien
ggtctgcttgtcctttatgacgcgc

SEQ ID NO: 5703943 - DNA, 25 bp, Homo sapien
ctcagatttgagcacagcgggtgac

SEQ ID NO: 5703944 - DNA, 25 bp, Homo sapien
cgggaacataggtccgcctctcccc

SEQ ID NO: 5703945 - DNA, 25 bp, Homo sapien
cgggccggtggggctgtgcctgtgc

SEQ ID NO: 5703946 - DNA, 25 bp, Homo sapien
aacattgatggtcttgccgtcgata

SEQ ID NO: 5703947 - DNA, 25 bp, Homo sapien
tcggctgattgttggtagatgccag

SEQ ID NO: 5703948 - DNA, 25 bp, Homo sapien
ctcggctagtgctcccttcttctcg

SEQ ID NO: 5703949 - DNA, 25 bp, Homo sapien
acagagtcggccccaggctctaggg

SEQ ID NO: 5703950 - DNA, 25 bp, Homo sapien
tgcacgccgtgcgactgcagctggc

SEQ ID NO: 5703951 - DNA, 25 bp, Homo sapien
atagccctcatcctgttggtagtag

SEQ ID NO: 5703952 - DNA, 25 bp, Homo sapien
acagccagtcctcattgatcttggg

SEQ ID NO: 5703953 - DNA, 25 bp, Homo sapien
cactctccccgctgtaggctgccac

SEQ ID NO: 5703954 - DNA, 25 bp, Homo sapien
ggatgtcatcctcagtggctgcctg

SEQ ID NO: 5703955 - DNA, 25 bp, Homo sapien
actccatgtcctgatagggccttcg

SEQ ID NO: 5703956 - DNA, 25 bp, Homo sapien
ggtctgggggtcatagtagtagccg

SEQ ID NO: 5703957 - DNA, 25 bp, Homo sapien
aatccatggtgctgtgtgggttcag

SEQ ID NO: 5703958 - DNA, 25 bp, Homo sapien
gcctctccccatcccagtacaggta

SEQ ID NO: 5703959 - DNA, 25 bp, Homo sapien
cgcctcggctgattgttggtagatg

SEQ ID NO: 5703960 - DNA, 25 bp, Homo sapien
cacacttattgcacagccagtcctc

SEQ ID NO: 5703961 - DNA, 25 bp, Homo sapien
ctctggcggctcggggatgccatac

SEQ ID NO: 5703962 - DNA, 25 bp, Homo sapien
gtctctcggctagtgctcccttctt

SEQ ID NO: 5703963 - DNA, 25 bp, Homo sapien
taggattcctgggcagtggggctgg

SEQ ID NO: 5703964 - DNA, 25 bp, Homo sapien
gggcttgggcggtcgtcactggcca

SEQ ID NO: 5703965 - DNA, 25 bp, Homo sapien
tgtcttgtgcagtgtctccttgtag

SEQ ID NO: 5703966 - DNA, 25 bp, Homo sapien
gctgctggggcccctcctcagccgc

SEQ ID NO: 5703967 - DNA, 25 bp, Homo sapien
ttatgtccgtcggccgactgctcca

SEQ ID NO: 5703968 - DNA, 25 bp, Homo sapien
atcgacacagagtcggccccaggct

SEQ ID NO: 5703969 - DNA, 25 bp, Homo sapien
ttacaatgccctgcttcttgcggcc

SEQ ID NO: 5703970 - DNA, 25 bp, Homo sapien
caccacctcaatttgatttggtcaa

SEQ ID NO: 5703971 - DNA, 25 bp, Homo sapien
tggtaggtagagacgtcgggaacag

SEQ ID NO: 5703972 - DNA, 25 bp, Homo sapien
agcacagcgggtgacatgatggtat

SEQ ID NO: 5703973 - DNA, 25 bp, Homo sapien
ccggtctgggggtcatagtagtagc

SEQ ID NO: 5703974 - DNA, 25 bp, Homo sapien
cggagcgcgcaacaaccaagtccga

SEQ ID NO: 5703975 - DNA, 25 bp, Homo sapien
ttgcgcaaaatgatggtgtcattgg

SEQ ID NO: 5703976 - DNA, 25 bp, Homo sapien
ctcgccggtgaatctcaaggttttg

SEQ ID NO: 5703977 - DNA, 25 bp, Homo sapien
cagggactcttctcggcccgggctg

SEQ ID NO: 5703978 - DNA, 25 bp, Homo sapien
ttgatttggtcaagccctctctggc

SEQ ID NO: 5703979 - DNA, 25 bp, Homo sapien
ggcctgtgagatggcccactgggcc

SEQ ID NO: 5703980 - DNA, 25 bp, Homo sapien
ggccgacaagagcaaggccccgtcc

SEQ ID NO: 5703981 - DNA, 25 bp, Homo sapien
tactgctggctctgagcattgtagt

SEQ ID NO: 5703982 - DNA, 25 bp, Homo sapien
gaactggcgtcggcagagcagacag

SEQ ID NO: 5703983 - DNA, 25 bp, Homo sapien
ggtatacgactggctgttggcagca

SEQ ID NO: 5703984 - DNA, 25 bp, Homo sapien
tgttggcagcagtgccctggctact

SEQ ID NO: 5703985 - DNA, 25 bp, Homo sapien
catgacgatgttactggccttctcc

SEQ ID NO: 5703986 - DNA, 25 bp, Homo sapien
acgtcgggaacagggtactggctgt

SEQ ID NO: 5703987 - DNA, 25 bp, Homo sapien
gggaaactcactgccgcctactccc

SEQ ID NO: 5703988 - DNA, 25 bp, Homo sapien
tgcctctgacttgggcacgccacat

SEQ ID NO: 5703989 - DNA, 25 bp, Homo sapien
ctcttgggctctggcggctcgggga

SEQ ID NO: 5703990 - DNA, 25 bp, Homo sapien
atcctcagcatgacgatgttactgg

SEQ ID NO: 5703991 - DNA, 25 bp, Homo sapien
ccgacaagagcaaggccccgtccca

SEQ ID NO: 5703992 - DNA, 25 bp, Homo sapien
ggcccactgggccgcagcaatggca

SEQ ID NO: 5703993 - DNA, 25 bp, Homo sapien
ggtcagtggctccatagcggccagt

SEQ ID NO: 5703994 - DNA, 25 bp, Homo sapien
cacgtctttcatactccatgtcctg

SEQ ID NO: 5703995 - DNA, 25 bp, Homo sapien
tgtgccctggctgttgccatagccc

SEQ ID NO: 5703996 - DNA, 25 bp, Homo sapien
cagacttttcagcttttattacaaa

SEQ ID NO: 5703997 - DNA, 25 bp, Homo sapien
cgcctacgctgagtctcggagcccg

SEQ ID NO: 5703998 - DNA, 25 bp, Homo sapien
atactcgcgaggatatgaacggtag

SEQ ID NO: 5703999 - DNA, 25 bp, Homo sapien
cactgggccgcagcaatggcagtgc

SEQ ID NO: 5704000 - DNA, 25 bp, Homo sapien
ggctctggagctcagatttgagcac

SEQ ID NO: 5704001 - DNA, 25 bp, Homo sapien
tgcctgtgccgccgccgccgcctac

SEQ ID NO: 5704002 - DNA, 25 bp, Homo sapien
gacagggcttgggaggccaggactc

SEQ ID NO: 5704003 - DNA, 25 bp, Homo sapien
ggccacccagtggcagtgtctgctg

SEQ ID NO: 5704004 - DNA, 25 bp, Homo sapien
tagggccttcgggggctgctggggc

SEQ ID NO: 5704005 - DNA, 25 bp, Homo sapien
tggtcttgccgtcgatagtgagtgg

SEQ ID NO: 5704006 - DNA, 25 bp, Homo sapien
atgggtagggctctggagctcagat

SEQ ID NO: 5704007 - DNA, 25 bp, Homo sapien
tcggctgcggttctccccaccatca

SEQ ID NO: 5704008 - DNA, 25 bp, Homo sapien
aggtctcatcgtactggtaggtaga

SEQ ID NO: 5704009 - DNA, 25 bp, Homo sapien
gcgtcctgcaagtgactaaactcga

SEQ ID NO: 5704010 - DNA, 25 bp, Homo sapien
ggatggcatagccagcatctgcagt

SEQ ID NO: 5704011 - DNA, 25 bp, Homo sapien
acgccacacttattgcacagccagt

SEQ ID NO: 5704012 - DNA, 25 bp, Homo sapien
aggatgttgagggagtgctgattgg

SEQ ID NO: 5704013 - DNA, 25 bp, Homo sapien
cgcactctgctcctcagatgagtcg

SEQ ID NO: 5704014 - DNA, 25 bp, Homo sapien
caagtgggctcgccggtgaatctca

SEQ ID NO: 5704015 - DNA, 25 bp, Homo sapien
ttatgacgcgcacgttggaggagga

SEQ ID NO: 5704016 - DNA, 25 bp, Homo sapien
gaagttctggacgccacacttattg

SEQ ID NO: 5704017 - DNA, 25 bp, Homo sapien
cagcccgtcccgagtaggctgctcg

SEQ ID NO: 5704018 - DNA, 25 bp, Homo sapien
acttcctcctcttgggctctggcgg

SEQ ID NO: 5704019 - DNA, 25 bp, Homo sapien
tctgagcattgtagtaatactggga

SEQ ID NO: 5704020 - DNA, 25 bp, Homo sapien
tctgagcttggctccgagccctgtg

SEQ ID NO: 5704021 - DNA, 25 bp, Homo sapien
tcctcattgatcttgggcttggggt

SEQ ID NO: 5704022 - DNA, 25 bp, Homo sapien
ctcggagcccggggaggcctcgtag

SEQ ID NO: 5704023 - DNA, 25 bp, Homo sapien
cacccaggccggagccccgcacccg

SEQ ID NO: 5704024 - DNA, 25 bp, Homo sapien
tccttgtaggactcggttgaggtga

SEQ ID NO: 5704025 - DNA, 25 bp, Homo sapien
cctgggtgatgcttcctgcagggac

SEQ ID NO: 5704026 - DNA, 25 bp, Homo sapien
taggctgctcgaagtctacagaggc

SEQ ID NO: 5704027 - DNA, 25 bp, Homo sapien
ctctttgctggggaactggcgtcgg

SEQ ID NO: 5704028 - DNA, 25 bp, Homo sapien
cctcttagaacccttggcaaactca

SEQ ID NO: 5704029 - DNA, 25 bp, Homo sapien
ctcgtgccgaggggcagcttctgct

SEQ ID NO: 5704030 - DNA, 25 bp, Homo sapien
tgactcccgcctctcgtcatctcgc

SEQ ID NO: 5704031 - DNA, 25 bp, Homo sapien
gcgttctctgagcttggctccgagc

SEQ ID NO: 5704032 - DNA, 25 bp, Homo sapien
ctcgcagggagctgataggctggaa

SEQ ID NO: 5704033 - DNA, 25 bp, Homo sapien
tcctcagtggctgcctgtggcagca

SEQ ID NO: 5704034 - DNA, 25 bp, Homo sapien
gccccaggatggacacccaacatgt

SEQ ID NO: 5704035 - DNA, 25 bp, Homo sapien
acggtagtccatgtcccggtagtcg

SEQ ID NO: 5704036 - DNA, 25 bp, Homo sapien
gggactcttctcggcccgggctgtc

SEQ ID NO: 5704037 - DNA, 25 bp, Homo sapien
agcttctgccagtcggtgagcttct

SEQ ID NO: 5704038 - DNA, 25 bp, Homo sapien
ctgggccgcagcaatggcagtgctg

SEQ ID NO: 5704039 - DNA, 25 bp, Homo sapien
ttgtgcagtgtctccttgtaggact

SEQ ID NO: 5704040 - DNA, 25 bp, Homo sapien
atgagcgcctctttgctggggaact

SEQ ID NO: 5704041 - DNA, 25 bp, Homo sapien
ggttgcgcaaaatgatggtgtcatt

SEQ ID NO: 5704042 - DNA, 25 bp, Homo sapien
accggcggctcctcggaggtggccc

SEQ ID NO: 5704043 - DNA, 25 bp, Homo sapien
cttcgggggctgctggggcccctcc

SEQ ID NO: 5704044 - DNA, 25 bp, Homo sapien
cctcggctgattgttggtagatgcc

SEQ ID NO: 5704045 - DNA, 25 bp, Homo sapien
tacgctgagtctcggagcccgggga

SEQ ID NO: 5704046 - DNA, 25 bp, Homo sapien
ccatagccctcatcctgttggtagt

SEQ ID NO: 5704047 - DNA, 25 bp, Homo sapien
gagccggagcgcgcaacaaccaagt

SEQ ID NO: 5704048 - DNA, 25 bp, Homo sapien
atcgacaccttctggcccaggatgt

SEQ ID NO: 5704049 - DNA, 25 bp, Homo sapien
aatttcgggagatccatgctggtgt

SEQ ID NO: 5704050 - DNA, 25 bp, Homo sapien
tcgggggctgctggggcccctcctc

SEQ ID NO: 5704051 - DNA, 25 bp, Homo sapien
tctcgggggaagcctggcgggccgg

SEQ ID NO: 5704052 - DNA, 25 bp, Homo sapien
aggccatgtccctcttagaaccctt

SEQ ID NO: 5704053 - DNA, 25 bp, Homo sapien
gccaatgttgtcactgcccagcccg

SEQ ID NO: 5704054 - DNA, 25 bp, Homo sapien
ctcgcctcggctgattgttggtaga

SEQ ID NO: 5704055 - DNA, 25 bp, Homo sapien
ccgatagtcctggtcccgatagtcg

SEQ ID NO: 5704056 - DNA, 25 bp, Homo sapien
tgggttcaggttgcgcaaaatgatg

SEQ ID NO: 5704057 - DNA, 25 bp, Homo sapien
acacagagtcggccccaggctctag

SEQ ID NO: 5704058 - DNA, 25 bp, Homo sapien
ccagtgggatcccctttggttccag

SEQ ID NO: 5704059 - DNA, 25 bp, Homo sapien
attggcgttctctgagcttggctcc

SEQ ID NO: 5704060 - DNA, 25 bp, Homo sapien
gcagagcagacaggccagcttctgc

SEQ ID NO: 5704061 - DNA, 25 bp, Homo sapien
ccacggatgtcatcctcagtggctg

SEQ ID NO: 5704062 - DNA, 25 bp, Homo sapien
tcggggatgccatacttttctctgc

SEQ ID NO: 5704063 - DNA, 25 bp, Homo sapien
gcctctttgctggggaactggcgtc

SEQ ID NO: 5704064 - DNA, 25 bp, Homo sapien
ggccccaggctctagggaggcctcg

SEQ ID NO: 5704065 - DNA, 25 bp, Homo sapien
cagacaggccagcttctgccagtcg

SEQ ID NO: 5704066 - DNA, 25 bp, Homo sapien
acctcccgtgcttgcacgccgtgcg

SEQ ID NO: 5704067 - DNA, 25 bp, Homo sapien
tttcatactccatgtcctgataggg

SEQ ID NO: 5704068 - DNA, 25 bp, Homo sapien
ggtcatagtagtagccggaggtctc

SEQ ID NO: 5704069 - DNA, 25 bp, Homo sapien
gatcggggggaggggagaagcgcca

SEQ ID NO: 5704070 - DNA, 25 bp, Homo sapien
atagtagaggccggtctgggggtca

SEQ ID NO: 5704071 - DNA, 25 bp, Homo sapien
tgcccagcccgtcccgagtaggctg

SEQ ID NO: 5704072 - DNA, 25 bp, Homo sapien
ccaggctctagggaggcctcgggac

SEQ ID NO: 5704073 - DNA, 25 bp, Homo sapien
gcctggcgggccggtggggctgtgc

SEQ ID NO: 5704074 - DNA, 25 bp, Homo sapien
cagccatccaacactctgtccttcc

SEQ ID NO: 5704075 - DNA, 25 bp, Homo sapien
ccatgatctgccagcctgggtgatg

SEQ ID NO: 5704076 - DNA, 25 bp, Homo sapien
cctccttcgagggtgcccctgtctc

SEQ ID NO: 5704077 - DNA, 25 bp, Homo sapien
cgcggagggcttgggcggtcgtcac

SEQ ID NO: 5704078 - DNA, 25 bp, Homo sapien
ccctcctcagccgctggctccgttt

SEQ ID NO: 5704079 - DNA, 25 bp, Homo sapien
gggaggcctcgtaggaatcctccgc

SEQ ID NO: 5704080 - DNA, 25 bp, Homo sapien
tggcgtcggcagagcagacaggcca

SEQ ID NO: 5704081 - DNA, 25 bp, Homo sapien
cactgtcactctccccgctgtaggc

SEQ ID NO: 5704082 - DNA, 25 bp, Homo sapien
actaaactcgacgaaggcgaagccc

SEQ ID NO: 5704083 - DNA, 25 bp, Homo sapien
cccgtaggagctgccccgtgcaccc

SEQ ID NO: 5704084 - DNA, 25 bp, Homo sapien
gtagtcgtggtctcggctgcggttc

SEQ ID NO: 5704085 - DNA, 25 bp, Homo sapien
tgagcttggctccgagccctgtgac

SEQ ID NO: 5704086 - DNA, 25 bp, Homo sapien
tcggaggtggcccaggtaccctccc

SEQ ID NO: 5704087 - DNA, 25 bp, Homo sapien
ctcaatttgatttggtcaagccctc

SEQ ID NO: 5704088 - DNA, 25 bp, Homo sapien
cgtgtagcgtcctgcaagtgactaa

SEQ ID NO: 5704089 - DNA, 25 bp, Homo sapien
ctccctgggcctggtagggctgcgg

SEQ ID NO: 5704090 - DNA, 25 bp, Homo sapien
cttggctccgagccctgtgacaggg

SEQ ID NO: 5704091 - DNA, 25 bp, Homo sapien
ggctgcctccacgatggtggagagc

SEQ ID NO: 5704092 - DNA, 25 bp, Homo sapien
ttactggccttctcctcctcctcct

SEQ ID NO: 5704093 - DNA, 25 bp, Homo sapien
tccctcttagaacccttggcaaact

SEQ ID NO: 5704094 - DNA, 25 bp, Homo sapien
cctggctgccatactcgcgaggata

SEQ ID NO: 5704095 - DNA, 25 bp, Homo sapien
tgagcttctcctcccgctcagggcc

SEQ ID NO: 5704096 - DNA, 25 bp, Homo sapien
tgtcctttatgacgcgcacgttgga

SEQ ID NO: 5704097 - DNA, 25 bp, Homo sapien
atctgttgagctgtcttggtcttgt

SEQ ID NO: 5704098 - DNA, 25 bp, Homo sapien
gcccttgaggtagccatgggcatag

SEQ ID NO: 5704099 - DNA, 25 bp, Homo sapien
tggctctgagcattgtagtaatact

SEQ ID NO: 5704100 - DNA, 25 bp, Homo sapien
tcacctctgcccgccgccacctcct

SEQ ID NO: 5704101 - DNA, 25 bp, Homo sapien
tctttttgtttgttgagactgcggg

SEQ ID NO: 5704102 - DNA, 25 bp, Homo sapien
gccagcatctgcagtggctgactcc

SEQ ID NO: 5704103 - DNA, 25 bp, Homo sapien
ataggctggaagctatttttgaagt

SEQ ID NO: 5704104 - DNA, 25 bp, Homo sapien
tcccagcccaattttccaacaaaag

SEQ ID NO: 5704105 - DNA, 25 bp, Homo sapien
accacgtctttcatactccatgtcc

SEQ ID NO: 5704106 - DNA, 25 bp, Homo sapien
caggatggacacccaacatgtggag

SEQ ID NO: 5704107 - DNA, 25 bp, Homo sapien
ctgctcactgggcctcgttgaagcg

SEQ ID NO: 5704108 - DNA, 25 bp, Homo sapien
tgagatggcccactgggccgcagca

SEQ ID NO: 5704109 - DNA, 25 bp, Homo sapien
actggaggcagatcggggggagggg

SEQ ID NO: 5704110 - DNA, 25 bp, Homo sapien
cctccaactctcccagctcagccgg

SEQ ID NO: 5704111 - DNA, 25 bp, Homo sapien
cctgcagcatccgactgccaatgtt

SEQ ID NO: 5704112 - DNA, 25 bp, Homo sapien
gctgtgtgggttcaggttgcgcaaa

SEQ ID NO: 5704113 - DNA, 25 bp, Homo sapien
cgaaggcgaagccccggctctgacc

SEQ ID NO: 5704114 - DNA, 25 bp, Homo sapien
caggttgcgcaaaatgatggtgtca

SEQ ID NO: 5704115 - DNA, 25 bp, Homo sapien
ccctcctggctgccatactcgcgag

SEQ ID NO: 5704116 - DNA, 25 bp, Homo sapien
agagcagacaggccagcttctgcca

SEQ ID NO: 5704117 - DNA, 25 bp, Homo sapien
ggactcggttgaggtgaccccgtag

SEQ ID NO: 5704118 - DNA, 25 bp, Homo sapien
ctcattgatcttgggcttggggtca

SEQ ID NO: 5704119 - DNA, 25 bp, Homo sapien
gcaacaaccaagtccgagactggag

SEQ ID NO: 5704120 - DNA, 25 bp, Homo sapien
tagtccatgtcccggtagtcgtggt

SEQ ID NO: 5704121 - DNA, 25 bp, Homo sapien
ttgttggtagatgccaggagcagca

SEQ ID NO: 5704122 - DNA, 25 bp, Homo sapien
ggtagggctgcggcaggggaagcag

SEQ ID NO: 5704123 - DNA, 25 bp, Homo sapien
gggaggcctcgggacctgctccagt

SEQ ID NO: 5704124 - DNA, 25 bp, Homo sapien
catgtggagaagttgctcttgaagc

SEQ ID NO: 5704125 - DNA, 25 bp, Homo sapien
atggcctgcagcatccgactgccaa

SEQ ID NO: 5704126 - DNA, 25 bp, Homo sapien
tcttagaacccttggcaaactcaac

SEQ ID NO: 5704127 - DNA, 25 bp, Homo sapien
taggctgccaccagtcctcgcggag

SEQ ID NO: 5704128 - DNA, 25 bp, Homo sapien
tgggagttggggtcatagtagaggc

SEQ ID NO: 5704129 - DNA, 25 bp, Homo sapien
gctcactgggcctcgttgaagcggg

SEQ ID NO: 5704130 - DNA, 25 bp, Homo sapien
gatttggtcaagccctctctggctg

SEQ ID NO: 5704131 - DNA, 25 bp, Homo sapien
agcagacaggccagcttctgccagt

SEQ ID NO: 5704132 - DNA, 25 bp, Homo sapien
caggccggagccccgcacccgtgtt

SEQ ID NO: 5704133 - DNA, 25 bp, Homo sapien
ccggaggtctcatcgtactggtagg

SEQ ID NO: 5704134 - DNA, 25 bp, Homo sapien
cttgctcggtccgatagtcctggtc

SEQ ID NO: 5704135 - DNA, 25 bp, Homo sapien
attcctgggcagtggggctggtagc

SEQ ID NO: 5704136 - DNA, 25 bp, Homo sapien
ccttgggaggcctgtgagatggccc

SEQ ID NO: 5704137 - DNA, 25 bp, Homo sapien
tgtccctcttagaacccttggcaaa

SEQ ID NO: 5704138 - DNA, 25 bp, Homo sapien
tctgcctctgacttgggcacgccac

SEQ ID NO: 5704139 - DNA, 25 bp, Homo sapien
ccagtcctgtcaccacgaccaccac

SEQ ID NO: 5704140 - DNA, 25 bp, Homo sapien
ctgcgggcccagcgttccatgtcct

SEQ ID NO: 5704141 - DNA, 25 bp, Homo sapien
ggttcagttgggtctgcttgtcctt

SEQ ID NO: 5704142 - DNA, 25 bp, Homo sapien
gcccaggccgctgccctctttccag

SEQ ID NO: 5704143 - DNA, 25 bp, Homo sapien
ctgcctgtggcagcatcctcagcat

SEQ ID NO: 5704144 - DNA, 25 bp, Homo sapien
tagccagcatctgcagtggctgact

SEQ ID NO: 5704145 - DNA, 25 bp, Homo sapien
caggtactgctggctctgagcattg

SEQ ID NO: 5704146 - DNA, 25 bp, Homo sapien
catcctgttggtagtagctgtagtc

SEQ ID NO: 5704147 - DNA, 25 bp, Homo sapien
tgcttgccctcctggctgccatact

SEQ ID NO: 5704148 - DNA, 25 bp, Homo sapien
ggcctcgtaggaatcctccgcactc

SEQ ID NO: 5704149 - DNA, 25 bp, Homo sapien
ggctcctcggaggtggcccaggtac

SEQ ID NO: 5704150 - DNA, 25 bp, Homo sapien
actgggcctcgttgaagcgggtcac

SEQ ID NO: 5704151 - DNA, 25 bp, Homo sapien
gcgtagggtgccagggcccccagga

SEQ ID NO: 5704152 - DNA, 25 bp, Homo sapien
gacctgctccagtgggatccccttt

SEQ ID NO: 5704153 - DNA, 25 bp, Homo sapien
actgccttcattggaggccatgtcc

SEQ ID NO: 5704154 - DNA, 25 bp, Homo sapien
ttgcttgtggagccctgagagctgc

SEQ ID NO: 5704155 - DNA, 25 bp, Homo sapien
cctgcaagtgactaaactcgacgaa

SEQ ID NO: 5704156 - DNA, 25 bp, Homo sapien
ggtcgtcactggccaatttcgggag

SEQ ID NO: 5704157 - DNA, 25 bp, Homo sapien
gcgcctctttgctggggaactggcg

SEQ ID NO: 5704158 - DNA, 25 bp, Homo sapien
cgccaagcgcgctgccctcccaggg

SEQ ID NO: 5704159 - DNA, 25 bp, Homo sapien
gtggtctcggctgcggttctcccca

SEQ ID NO: 5704160 - DNA, 25 bp, Homo sapien
gtcatgcttgccctcctggctgcca

SEQ ID NO: 5704161 - DNA, 25 bp, Homo sapien
gcgggcccagcgttccatgtccttg

SEQ ID NO: 5704162 - DNA, 25 bp, Homo sapien
ccagcccaattttccaacaaaagtc

SEQ ID NO: 5704163 - DNA, 25 bp, Homo sapien
ctcactgccgcctactcccagccgg

SEQ ID NO: 5704164 - DNA, 25 bp, Homo sapien
tcgacgaaggcgaagccccggctct

SEQ ID NO: 5704165 - DNA, 25 bp, Homo sapien
atgtcccggtagtcgtggtctcggc

SEQ ID NO: 5704166 - DNA, 25 bp, Homo sapien
agcactgatgcgactgccttcattg

SEQ ID NO: 5704167 - DNA, 25 bp, Homo sapien
tgccttcattggaggccatgtccct

SEQ ID NO: 5704168 - DNA, 25 bp, Homo sapien
gtcttggtcttgtgcttctccttct

SEQ ID NO: 5704169 - DNA, 25 bp, Homo sapien
tctacagaggctgtggatatgccgc

SEQ ID NO: 5704170 - DNA, 25 bp, Homo sapien
ggcagatcggggggaggggagaagc

SEQ ID NO: 5704171 - DNA, 25 bp, Homo sapien
cttgtaggactcggttgaggtgacc

SEQ ID NO: 5704172 - DNA, 25 bp, Homo sapien
tgcggcaggggaagcaggccctggc

SEQ ID NO: 5704173 - DNA, 25 bp, Homo sapien
ctctgctcctcagatgagtcgtcat

SEQ ID NO: 5704174 - DNA, 25 bp, Homo sapien
ctctgcccgccgccacctcctccaa

SEQ ID NO: 5704175 - DNA, 25 bp, Homo sapien
tcatagtagaggccggtctgggggt

SEQ ID NO: 5704176 - DNA, 25 bp, Homo sapien
tgtaggactcggttgaggtgacccc

SEQ ID NO: 5704177 - DNA, 25 bp, Homo sapien
ttgggaggccaggactccctgggcc

SEQ ID NO: 5704178 - DNA, 25 bp, Homo sapien
agcagcaccaggctgggcgcgagag

SEQ ID NO: 5704179 - DNA, 25 bp, Homo sapien
gcgagcggtcagtggctccatagcg

SEQ ID NO: 5704180 - DNA, 25 bp, Homo sapien
gtaggaatcctccgcactctgctcc

SEQ ID NO: 5704181 - DNA, 25 bp, Homo sapien
ggctactgctcgcctcggctgattg

SEQ ID NO: 5704182 - DNA, 25 bp, Homo sapien
cgaccggcggctcctcggaggtggc

SEQ ID NO: 5704183 - DNA, 25 bp, Homo sapien
tgccctcctggctgccatactcgcg

SEQ ID NO: 5704184 - DNA, 25 bp, Homo sapien
gatccatgctggtgtgctgtctctc

SEQ ID NO: 5704185 - DNA, 25 bp, Homo sapien
agccgaacctcccgtgcttgcacgc

SEQ ID NO: 5704186 - DNA, 25 bp, Homo sapien
ttacaaaacaggacgtgatcccagc

SEQ ID NO: 5704187 - DNA, 25 bp, Homo sapien
atagtagtagccggaggtctcatcg

SEQ ID NO: 5704188 - DNA, 25 bp, Homo sapien
agtgggctggccgacaagagcaagg

SEQ ID NO: 5704189 - DNA, 25 bp, Homo sapien
cacatttgaagcacttctctcggcg

SEQ ID NO: 5704190 - DNA, 25 bp, Homo sapien
agcttctcctcccgctcagggcccc

SEQ ID NO: 5704191 - DNA, 25 bp, Homo sapien
agctcagatttgagcacagcgggtg

SEQ ID NO: 5704192 - DNA, 25 bp, Homo sapien
gagaagcgccaagcgcgctgccctc

SEQ ID NO: 5704193 - DNA, 25 bp, Homo sapien
gctctagggaggcctcgggacctgc

SEQ ID NO: 5704194 - DNA, 25 bp, Homo sapien
gccgcctacgctgagtctcggagcc

SEQ ID NO: 5704195 - DNA, 25 bp, Homo sapien
ctgcctccacgatggtggagagctg

SEQ ID NO: 5704196 - DNA, 25 bp, Homo sapien
ggatggacacccaacatgtggagaa

SEQ ID NO: 5704197 - DNA, 25 bp, Homo sapien
cccccaggatggaatccatggtgct

SEQ ID NO: 5704198 - DNA, 25 bp, Homo sapien
cgagtaggctgctcgaagtctacag

SEQ ID NO: 5704199 - DNA, 25 bp, Homo sapien
gctgattggcttccatccatcgtgt

SEQ ID NO: 5704200 - DNA, 25 bp, Homo sapien
tgcagcatccgactgccaatgttgt

SEQ ID NO: 5704201 - DNA, 25 bp, Homo sapien
acccccgctgctgctaccatgatct

SEQ ID NO: 5704202 - DNA, 25 bp, Homo sapien
tccatggtgctgtgtgggttcaggt

SEQ ID NO: 5704203 - DNA, 25 bp, Homo sapien
ccaggactccctgggcctggtaggg

SEQ ID NO: 5704204 - DNA, 25 bp, Homo sapien
tgcacccaggccggagccccgcacc

SEQ ID NO: 5704205 - DNA, 25 bp, Homo sapien
gttccgcatcagccgaacctcccgt

SEQ ID NO: 5704206 - DNA, 25 bp, Homo sapien
agggcccttggtgcccttgaggtag

SEQ ID NO: 5704207 - DNA, 25 bp, Homo sapien
tcccagtacaggtactgctggctct

SEQ ID NO: 5704208 - DNA, 25 bp, Homo sapien
tgtttgttgagactgcgggcccagc

SEQ ID NO: 5704209 - DNA, 25 bp, Homo sapien
aaaagtcaccacctcaatttgattt

SEQ ID NO: 5704210 - DNA, 25 bp, Homo sapien
aaggttttgcttgtggagccctgag

SEQ ID NO: 5704211 - DNA, 25 bp, Homo sapien
gtcgatagtgagtggtgggtgcagg

SEQ ID NO: 5704212 - DNA, 25 bp, Homo sapien
gacaagagcaaggccccgtcccagc

SEQ ID NO: 5704213 - DNA, 25 bp, Homo sapien
tgggctcgccggtgaatctcaaggt

SEQ ID NO: 5704214 - DNA, 25 bp, Homo sapien
cgcctactcccagccggccacagtc

SEQ ID NO: 5704215 - DNA, 25 bp, Homo sapien
tctttccagcccatggcctgcagca

SEQ ID NO: 5704216 - DNA, 25 bp, Homo sapien
ctgttgccatagccctcatcctgtt

SEQ ID NO: 5704217 - DNA, 25 bp, Homo sapien
tggtagatgccaggagcagcaccag

SEQ ID NO: 5704218 - DNA, 25 bp, Homo sapien
cagaggctgtggatatgccgccgta

SEQ ID NO: 5704219 - DNA, 25 bp, Homo sapien
tgtgctgtctctcggctagtgctcc

SEQ ID NO: 5704220 - DNA, 25 bp, Homo sapien
tgcagggactcttctcggcccgggc

SEQ ID NO: 5704221 - DNA, 25 bp, Homo sapien
gtgcgactgcagctggccacggatg

SEQ ID NO: 5704222 - DNA, 25 bp, Homo sapien
tgggctgcctccacgatggtggaga

SEQ ID NO: 5704223 - DNA, 25 bp, Homo sapien
agtgctggccacagaggcagcactg

SEQ ID NO: 5704224 - DNA, 25 bp, Homo sapien
ctccatgtcattcttctctagtgct

SEQ ID NO: 5704225 - DNA, 25 bp, Homo sapien
gaggcctgtgagatggcccactggg

SEQ ID NO: 5704226 - DNA, 25 bp, Homo sapien
aagcgggtcaccattgtcttgtgca

SEQ ID NO: 5704227 - DNA, 25 bp, Homo sapien
gccatccaacactctgtccttccct

SEQ ID NO: 5704228 - DNA, 25 bp, Homo sapien
taggcgttacaatgccctgcttctt

SEQ ID NO: 5704229 - DNA, 25 bp, Homo sapien
ctgccaatgttgtcactgcccagcc

SEQ ID NO: 5704230 - DNA, 25 bp, Homo sapien
ttgcacagccagtcctcattgatct

SEQ ID NO: 5704231 - DNA, 25 bp, Homo sapien
caagagcaaggccccgtcccagcca

SEQ ID NO: 5704232 - DNA, 25 bp, Homo sapien
tccccttgctcggtccgatagtcct

SEQ ID NO: 5704233 - DNA, 25 bp, Homo sapien
ttcagttgggtctgcttgtccttta

SEQ ID NO: 5704234 - DNA, 25 bp, Homo sapien
cagcaccaggctgggcgcgagagaa

SEQ ID NO: 5704235 - DNA, 25 bp, Homo sapien
cttggcaaactcaacattgatggtc

SEQ ID NO: 5704236 - DNA, 25 bp, Homo sapien
tagtcatgcttgccctcctggctgc

SEQ ID NO: 5704237 - DNA, 25 bp, Homo sapien
gcagtgctggccacagaggcagcac

SEQ ID NO: 5704238 - DNA, 25 bp, Homo sapien
ttcctcctcttgggctctggcggct

SEQ ID NO: 5704239 - DNA, 25 bp, Homo sapien
tgaatctcaaggttttgcttgtgga

SEQ ID NO: 5704240 - DNA, 25 bp, Homo sapien
tggtagtagctgtagtcgaccggcg

SEQ ID NO: 5704241 - DNA, 25 bp, Homo sapien
cgttacaatgccctgcttcttgcgg

SEQ ID NO: 5704242 - DNA, 25 bp, Homo sapien
gttgggtctgcttgtcctttatgac

SEQ ID NO: 5704243 - DNA, 25 bp, Homo sapien
caactctcccagctcagccggagcc

SEQ ID NO: 5704244 - DNA, 25 bp, Homo sapien
cctcgttgaagcgggtcaccattgt

SEQ ID NO: 5704245 - DNA, 25 bp, Homo sapien
gcacagccagtcctcattgatcttg

SEQ ID NO: 5704246 - DNA, 25 bp, Homo sapien
gtcatagtcatgcttgccctcctgg

SEQ ID NO: 5704247 - DNA, 25 bp, Homo sapien
gctggggaactggcgtcggcagagc

SEQ ID NO: 5704248 - DNA, 25 bp, Homo sapien
cgcagggagctgataggctggaagc

SEQ ID NO: 5704249 - DNA, 25 bp, Homo sapien
agtcgtcatagtcatgcttgccctc

SEQ ID NO: 5704250 - DNA, 25 bp, Homo sapien
ccagggcccttggtgcccttgaggt

SEQ ID NO: 5704251 - DNA, 25 bp, Homo sapien
cctacgctgagtctcggagcccggg

SEQ ID NO: 5704252 - DNA, 25 bp, Homo sapien
cagcatccgactgccaatgttgtca

SEQ ID NO: 5704253 - DNA, 25 bp, Homo sapien
gtgcccttgaggtagccatgggcat

SEQ ID NO: 5704254 - DNA, 25 bp, Homo sapien
gctgcggcaggggaagcaggccctg

SEQ ID NO: 5704255 - DNA, 25 bp, Homo sapien
gtgcatcgacaccttctggcccagg

SEQ ID NO: 5704256 - DNA, 25 bp, Homo sapien
aaaacaggacgtgatcccagcccaa

SEQ ID NO: 5704257 - DNA, 25 bp, Homo sapien
ctctggagctcagatttgagcacag

SEQ ID NO: 5704258 - DNA, 25 bp, Homo sapien
tcgggagatccatgctggtgtgctg

SEQ ID NO: 5704259 - DNA, 25 bp, Homo sapien
agtggcagtgtctgctgatccagcc

SEQ ID NO: 5704260 - DNA, 25 bp, Homo sapien
gtcccagccatccaacactctgtcc

SEQ ID NO: 5704261 - DNA, 25 bp, Homo sapien
aaaatgatggtgtcattggcgttct

SEQ ID NO: 5704262 - DNA, 25 bp, Homo sapien
gatcttgggcttggggtcactgtag

SEQ ID NO: 5704263 - DNA, 25 bp, Homo sapien
ttgtagtaatactgggagttggggt

SEQ ID NO: 5704264 - DNA, 25 bp, Homo sapien
tgcagacttttcagcttttattaca

SEQ ID NO: 5704265 - DNA, 25 bp, Homo sapien
catgatggtatacgactggctgttg

SEQ ID NO: 5704266 - DNA, 25 bp, Homo sapien
ggcctgcagcatccgactgccaatg

SEQ ID NO: 5704267 - DNA, 25 bp, Homo sapien
attggcttccatccatcgtgtagcg

SEQ ID NO: 5704268 - DNA, 25 bp, Homo sapien
actgggagttggggtcatagtagag

SEQ ID NO: 5704269 - DNA, 25 bp, Homo sapien
cagaactaggatgggtagggctctg

SEQ ID NO: 5704270 - DNA, 25 bp, Homo sapien
agtcggtgagcttctcctcccgctc

SEQ ID NO: 5704271 - DNA, 25 bp, Homo sapien
ggaggggagaagcgccaagcgcgct

SEQ ID NO: 5704272 - DNA, 25 bp, Homo sapien
agccgctggctccgtttcacttccc

SEQ ID NO: 5704273 - DNA, 25 bp, Homo sapien
gctcctcagatgagtcgtcatagtc

SEQ ID NO: 5704274 - DNA, 25 bp, Homo sapien
tgagcattgtagtaatactgggagt

SEQ ID NO: 5704275 - DNA, 25 bp, Homo sapien
tgatggtatacgactggctgttggc

SEQ ID NO: 5704276 - DNA, 25 bp, Homo sapien
tagtgctcccttcttctcgaggatg

SEQ ID NO: 5704277 - DNA, 25 bp, Homo sapien
tccatgctggtgtgctgtctctcgg

SEQ ID NO: 5704278 - DNA, 25 bp, Homo sapien
agggcgggaacataggtccgcctct

SEQ ID NO: 5704279 - DNA, 25 bp, Homo sapien
tccaacaaaagtcaccacctcaatt

SEQ ID NO: 5704280 - DNA, 25 bp, Homo sapien
ggatatgccgccgtacttcctcctc

SEQ ID NO: 5704281 - DNA, 25 bp, Homo sapien
ctcgcggagggcttgggcggtcgtc

SEQ ID NO: 5704282 - DNA, 25 bp, Homo sapien
tgctcggtccgatagtcctggtccc

SEQ ID NO: 5704283 - DNA, 25 bp, Homo sapien
gtcaccacgaccaccacgtctttca

SEQ ID NO: 5704284 - DNA, 25 bp, Homo sapien
ttgggcggtcgtcactggccaattt

SEQ ID NO: 5704285 - DNA, 25 bp, Homo sapien
gtgctgtgtgggttcaggttgcgca

SEQ ID NO: 5704286 - DNA, 25 bp, Homo sapien
ttgggcttggggtcactgtagtgca

SEQ ID NO: 5704287 - DNA, 25 bp, Homo sapien
ggtcactgtagtgcatcgacacctt

SEQ ID NO: 5704288 - DNA, 25 bp, Homo sapien
ctttatgacgcgcacgttggaggag

SEQ ID NO: 5704289 - DNA, 25 bp, Homo sapien
tacagaggctgtggatatgccgccg

SEQ ID NO: 5704290 - DNA, 25 bp, Homo sapien
tttgggcctcgataggcgttacaat

SEQ ID NO: 5704291 - DNA, 25 bp, Homo sapien
agggcccccaggatggaatccatgg

SEQ ID NO: 5704292 - DNA, 25 bp, Homo sapien
ttcttctctttgccctccttcgagg

SEQ ID NO: 5704293 - DNA, 25 bp, Homo sapien
cgatagtcgccgtctcgggggaagc

SEQ ID NO: 5704294 - DNA, 25 bp, Homo sapien
ccgaggggcagcttctgctctgcct

SEQ ID NO: 5704295 - DNA, 25 bp, Homo sapien
gctcgaagtctacagaggctgtgga

SEQ ID NO: 5704296 - DNA, 25 bp, Homo sapien
gtgacagggcttgggaggccaggac

SEQ ID NO: 5704297 - DNA, 25 bp, Homo sapien
gccggagcgcgcaacaaccaagtcc

SEQ ID NO: 5704298 - DNA, 25 bp, Homo sapien
ctcccagacatcacctctgcccgcc

SEQ ID NO: 5704299 - DNA, 25 bp, Homo sapien
acgatgttactggccttctcctcct

SEQ ID NO: 5704300 - DNA, 25 bp, Homo sapien
cagttgggtctgcttgtcctttatg

SEQ ID NO: 5704301 - DNA, 25 bp, Homo sapien
tttgaagcacttctctcggcgtttg

SEQ ID NO: 5704302 - DNA, 25 bp, Homo sapien
cctcctcttgggctctggcggctcg

SEQ ID NO: 5704303 - DNA, 25 bp, Homo sapien
cccaggatggacacccaacatgtgg

SEQ ID NO: 5704304 - DNA, 25 bp, Homo sapien
gccggagccggagcgcgcaacaacc

SEQ ID NO: 5704305 - DNA, 25 bp, Homo sapien
cagcccatggcctgcagcatccgac

SEQ ID NO: 5704306 - DNA, 25 bp, Homo sapien
tgtaggattcctgggcagtggggct

SEQ ID NO: 5704307 - DNA, 25 bp, Homo sapien
gtcctggtcccgatagtcgccgtct

SEQ ID NO: 5704308 - DNA, 25 bp, Homo sapien
ctgacaagtgggctcgccggtgaat

SEQ ID NO: 5704309 - DNA, 25 bp, Homo sapien
ttggggtcatagtagaggccggtct

SEQ ID NO: 5704310 - DNA, 25 bp, Homo sapien
ggggaggggagaagcgccaagcgcg

SEQ ID NO: 5704311 - DNA, 25 bp, Homo sapien
cttggtcttgtgcttctccttcttc

SEQ ID NO: 5704312 - DNA, 25 bp, Homo sapien
cttcgagggtgcccctgtctcctta

SEQ ID NO: 5704313 - DNA, 25 bp, Homo sapien
tccagcccatggcctgcagcatccg

SEQ ID NO: 5704314 - DNA, 25 bp, Homo sapien
tggcttccatccatcgtgtagcgtc

SEQ ID NO: 5704315 - DNA, 25 bp, Homo sapien
ggatctgcagcagctgggctgcctc

SEQ ID NO: 5704316 - DNA, 25 bp, Homo sapien
tattacaaaacaggacgtgatccca

SEQ ID NO: 5704317 - DNA, 25 bp, Homo sapien
tgctgtctctcggctagtgctccct

SEQ ID NO: 5704318 - DNA, 25 bp, Homo sapien
gctgtgcctgtgccgccgccgccgc

SEQ ID NO: 5704319 - DNA, 25 bp, Homo sapien
ctggtagggctgcggcaggggaagc

SEQ ID NO: 5704320 - DNA, 25 bp, Homo sapien
acaaaacaggacgtgatcccagccc

SEQ ID NO: 5704321 - DNA, 25 bp, Homo sapien
cagcatcctcagcatgacgatgtta

SEQ ID NO: 5704322 - DNA, 25 bp, Homo sapien
tcggccccaggctctagggaggcct

SEQ ID NO: 5704323 - DNA, 25 bp, Homo sapien
actcaacattgatggtcttgccgtc

SEQ ID NO: 5704324 - DNA, 25 bp, Homo sapien
gtcttgtgcttctccttcttctctt

SEQ ID NO: 5704325 - DNA, 25 bp, Homo sapien
cttggtgcccttgaggtagccatgg

SEQ ID NO: 5704326 - DNA, 25 bp, Homo sapien
gcacgccacatttgaagcacttctc

SEQ ID NO: 5704327 - DNA, 25 bp, Homo sapien
ctggggagtgggctggccgacaaga

SEQ ID NO: 5704328 - DNA, 25 bp, Homo sapien
gattgttggtagatgccaggagcag

SEQ ID NO: 5704329 - DNA, 25 bp, Homo sapien
gctctgacctgaagatttgttccgc

SEQ ID NO: 5704330 - DNA, 25 bp, Homo sapien
tgttactggccttctcctcctcctc

SEQ ID NO: 5704331 - DNA, 25 bp, Homo sapien
gtagccggaggtctcatcgtactgg

SEQ ID NO: 5704332 - DNA, 25 bp, Homo sapien
ctccagggcgggaacataggtccgc

SEQ ID NO: 5704333 - DNA, 25 bp, Homo sapien
gcctggtagggctgcggcaggggaa

SEQ ID NO: 5704334 - DNA, 25 bp, Homo sapien
acggatgtcatcctcagtggctgcc

SEQ ID NO: 5704335 - DNA, 25 bp, Homo sapien
gttggtagtagctgtagtcgaccgg

SEQ ID NO: 5704336 - DNA, 25 bp, Homo sapien
acttctctcggcgtttgaagttctg

SEQ ID NO: 5704337 - DNA, 25 bp, Homo sapien
gggaggccaggactccctgggcctg

SEQ ID NO: 5704338 - DNA, 25 bp, Homo sapien
ctcggcgtttgaagttctggacgcc

SEQ ID NO: 5704339 - DNA, 25 bp, Homo sapien
ttggggtcactgtagtgcatcgaca

SEQ ID NO: 5704340 - DNA, 25 bp, Homo sapien
ggggcagcttctgctctgcctctga

SEQ ID NO: 5704341 - DNA, 25 bp, Homo sapien
tcatctcgcagggagctgataggct

SEQ ID NO: 5704342 - DNA, 25 bp, Homo sapien
ctgtcactctccccgctgtaggctg

SEQ ID NO: 5704343 - DNA, 25 bp, Homo sapien
agtcctgtcaccacgaccaccacgt

SEQ ID NO: 5704344 - DNA, 25 bp, Homo sapien
agtggctgactcccgcctctcgtca

SEQ ID NO: 5704345 - DNA, 25 bp, Homo sapien
gtgcccctgtctccttatgtccgtc

SEQ ID NO: 5704346 - DNA, 25 bp, Homo sapien
cactgccgcctactcccagccggcc

SEQ ID NO: 5704347 - DNA, 25 bp, Homo sapien
gcgcgagagaaagcctgcatcgaca

SEQ ID NO: 5704348 - DNA, 25 bp, Homo sapien
tgaagcgggtcaccattgtcttgtg

SEQ ID NO: 5704349 - DNA, 25 bp, Homo sapien
tgccctggctactgctcgcctcggc

SEQ ID NO: 5704350 - DNA, 25 bp, Homo sapien
ggctgctcgaagtctacagaggctg

SEQ ID NO: 5704351 - DNA, 25 bp, Homo sapien
agtgggatcccctttggttccagtg

SEQ ID NO: 5704352 - DNA, 25 bp, Homo sapien
catccaacactctgtccttccctgc

SEQ ID NO: 5704353 - DNA, 25 bp, Homo sapien
ccggccacccagtggcagtgtctgc

SEQ ID NO: 5704354 - DNA, 25 bp, Homo sapien
atgaaggcaaagccgcggttcagtt

SEQ ID NO: 5704355 - DNA, 25 bp, Homo sapien
ggcatagccagcatctgcagtggct

SEQ ID NO: 5704356 - DNA, 25 bp, Homo sapien
ctgcccgccgccacctcctccaact

SEQ ID NO: 5704357 - DNA, 25 bp, Homo sapien
gtaggtagagacgtcgggaacaggg

SEQ ID NO: 5704358 - DNA, 25 bp, Homo sapien
gggaagactctgtgccctggctgtt

SEQ ID NO: 5704359 - DNA, 25 bp, Homo sapien
tctagggaggcctcgggacctgctc

SEQ ID NO: 5704360 - DNA, 25 bp, Homo sapien
ggagttggggtcatagtagaggccg

SEQ ID NO: 5704361 - DNA, 25 bp, Homo sapien
ctgtggatatgccgccgtacttcct

SEQ ID NO: 5704362 - DNA, 25 bp, Homo sapien
tgctccagggcgggaacataggtcc

SEQ ID NO: 5704363 - DNA, 25 bp, Homo sapien
gtcactctccccgctgtaggctgcc

SEQ ID NO: 5704364 - DNA, 25 bp, Homo sapien
actggctgtaggattcctgggcagt

SEQ ID NO: 5704365 - DNA, 25 bp, Homo sapien
caacaaaagtcaccacctcaatttg

SEQ ID NO: 5704366 - DNA, 25 bp, Homo sapien
cacccgtgtttgggcctcgataggc

SEQ ID NO: 5704367 - DNA, 25 bp, Homo sapien
tttccaacaaaagtcaccacctcaa

SEQ ID NO: 5704368 - DNA, 25 bp, Homo sapien
tcctgcgagcggtcagtggctccat

SEQ ID NO: 5704369 - DNA, 25 bp, Homo sapien
agccctgtgacagggcttgggaggc

SEQ ID NO: 5704370 - DNA, 25 bp, Homo sapien
tctctttgccctccttcgagggtgc

SEQ ID NO: 5704371 - DNA, 25 bp, Homo sapien
ggaggtctcatcgtactggtaggta

SEQ ID NO: 5704372 - DNA, 25 bp, Homo sapien
ccaagcgcgctgccctcccagggaa

SEQ ID NO: 5704373 - DNA, 25 bp, Homo sapien
accccgtaggagctgccccgtgcac

SEQ ID NO: 5704374 - DNA, 25 bp, Homo sapien
tcgataggcgttacaatgccctgct

SEQ ID NO: 5704375 - DNA, 25 bp, Homo sapien
cttctctagtgcttctagctcgttt

SEQ ID NO: 5704376 - DNA, 25 bp, Homo sapien
cagatgagtcgtcatagtcatgctt

SEQ ID NO: 5704377 - DNA, 25 bp, Homo sapien
aaactcaacattgatggtcttgccg

SEQ ID NO: 5704378 - DNA, 25 bp, Homo sapien
atccgactgccaatgttgtcactgc

SEQ ID NO: 5704379 - DNA, 25 bp, Homo sapien
gaggcagatcggggggaggggagaa

SEQ ID NO: 5704380 - DNA, 25 bp, Homo sapien
gctgataggctggaagctatttttg

SEQ ID NO: 5704381 - DNA, 25 bp, Homo sapien
agtaggctgctcgaagtctacagag

SEQ ID NO: 5704382 - DNA, 25 bp, Homo sapien
ggcaatctgttgagctgtcttggtc

SEQ ID NO: 5704383 - DNA, 25 bp, Homo sapien
cctgctcctcctcactgtcactctc

SEQ ID NO: 5704384 - DNA, 25 bp, Homo sapien
aggaggacagcaccgcgtagggtgc

SEQ ID NO: 5704385 - DNA, 25 bp, Homo sapien
ctgtcaccacgaccaccacgtcttt

SEQ ID NO: 5704386 - DNA, 25 bp, Homo sapien
aaggcgaagccccggctctgacctg

SEQ ID NO: 5704387 - DNA, 25 bp, Homo sapien
gacaggccagcttctgccagtcggt

SEQ ID NO: 5704388 - DNA, 25 bp, Homo sapien
cgagactggaggcagatcgggggga

SEQ ID NO: 5704389 - DNA, 25 bp, Homo sapien
gctgttggcagcagtgccctggcta

SEQ ID NO: 5704390 - DNA, 25 bp, Homo sapien
ccagtggcagtgtctgctgatccag

SEQ ID NO: 5704391 - DNA, 25 bp, Homo sapien
tccgcatcagccgaacctcccgtgc

SEQ ID NO: 5704392 - DNA, 25 bp, Homo sapien
tagcgtcctgcaagtgactaaactc

SEQ ID NO: 5704393 - DNA, 25 bp, Homo sapien
gccatacttttctctgcgttcagct

SEQ ID NO: 5704394 - DNA, 25 bp, Homo sapien
tcctccccttgctcggtccgatagt

SEQ ID NO: 5704395 - DNA, 25 bp, Homo sapien
tgctccagtgggatcccctttggtt

SEQ ID NO: 5704396 - DNA, 25 bp, Homo sapien
gttccagtgatgccagggcccttgg

SEQ ID NO: 5704397 - DNA, 25 bp, Homo sapien
ctgcgagcggtcagtggctccatag

SEQ ID NO: 5704398 - DNA, 25 bp, Homo sapien
gggaactggcgtcggcagagcagac

SEQ ID NO: 5704399 - DNA, 25 bp, Homo sapien
gggagaagcgccaagcgcgctgccc

SEQ ID NO: 5704400 - DNA, 25 bp, Homo sapien
ccttcttctcgaggatggcatagcc

SEQ ID NO: 5704401 - DNA, 25 bp, Homo sapien
ccaccacgtctttcatactccatgt

SEQ ID NO: 5704402 - DNA, 25 bp, Homo sapien
ggggggaggggagaagcgccaagcg

SEQ ID NO: 5704403 - DNA, 25 bp, Homo sapien
agtggtgggtgcagggcctgcagga

SEQ ID NO: 5704404 - DNA, 25 bp, Homo sapien
ccggtgggagagcagaactaggatg

SEQ ID NO: 5704405 - DNA, 25 bp, Homo sapien
gcgtcggcagagcagacaggccagc

SEQ ID NO: 5704406 - DNA, 25 bp, Homo sapien
actggctgttggcagcagtgccctg

SEQ ID NO: 5704407 - DNA, 25 bp, Homo sapien
tggggaactggcgtcggcagagcag

SEQ ID NO: 5704408 - DNA, 25 bp, Homo sapien
gtgatgccagggcccttggtgccct

SEQ ID NO: 5704409 - DNA, 25 bp, Homo sapien
agcattgtagtaatactgggagttg

SEQ ID NO: 5704410 - DNA, 25 bp, Homo sapien
agtcgccgtctcgggggaagcctgg

SEQ ID NO: 5704411 - DNA, 25 bp, Homo sapien
agatgccaggagcagcaccaggctg

SEQ ID NO: 5704412 - DNA, 25 bp, Homo sapien
ttgatggtcttgccgtcgatagtga

SEQ ID NO: 5704413 - DNA, 25 bp, Homo sapien
tgagcacagcgggtgacatgatggt

SEQ ID NO: 5704414 - DNA, 25 bp, Homo sapien
ctgctctgcctctgacttgggcacg

SEQ ID NO: 5704415 - DNA, 25 bp, Homo sapien
gggtgcccctgtctccttatgtccg

SEQ ID NO: 5704416 - DNA, 25 bp, Homo sapien
ccagggcccccaggatggaatccat

SEQ ID NO: 5704417 - DNA, 25 bp, Homo sapien
gtccatgtcccggtagtcgtggtct

SEQ ID NO: 5704418 - DNA, 25 bp, Homo sapien
gtcgaccggcggctcctcggaggtg

SEQ ID NO: 5704419 - DNA, 25 bp, Homo sapien
gaagcgccaagcgcgctgccctccc

SEQ ID NO: 5704420 - DNA, 25 bp, Homo sapien
gataggcgttacaatgccctgcttc

SEQ ID NO: 5704421 - DNA, 25 bp, Homo sapien
tccatagcggccagtcctgtcacca

SEQ ID NO: 5704422 - DNA, 25 bp, Homo sapien
gttggtagatgccaggagcagcacc

SEQ ID NO: 5704423 - DNA, 25 bp, Homo sapien
catagagggaagactctgtgccctg

SEQ ID NO: 5704424 - DNA, 25 bp, Homo sapien
tcttgaagctgctcactgggcctcg

SEQ ID NO: 5704425 - DNA, 25 bp, Homo sapien
gcgggtgacatgatggtatacgact

SEQ ID NO: 5704426 - DNA, 25 bp, Homo sapien
atccatcgtgtagcgtcctgcaagt

SEQ ID NO: 5704427 - DNA, 25 bp, Homo sapien
ccagcttctgccagtcggtgagctt

SEQ ID NO: 5704428 - DNA, 25 bp, Homo sapien
tctggcccaggatgttgagggagtg

SEQ ID NO: 5704429 - DNA, 25 bp, Homo sapien
ttcttgcggcccaggccgctgccct

SEQ ID NO: 5704430 - DNA, 25 bp, Homo sapien
gaggtagccatgggcatagagggaa

SEQ ID NO: 5704431 - DNA, 25 bp, Homo sapien
gtggatatgccgccgtacttcctcc

SEQ ID NO: 5704432 - DNA, 25 bp, Homo sapien
tgtagtcgaccggcggctcctcgga

SEQ ID NO: 5704433 - DNA, 25 bp, Homo sapien
caggagcagcaccaggctgggcgcg

SEQ ID NO: 5704434 - DNA, 25 bp, Homo sapien
cggcggctcctcggaggtggcccag

SEQ ID NO: 5704435 - DNA, 25 bp, Homo sapien
tgccagcctgggtgatgcttcctgc

SEQ ID NO: 5704436 - DNA, 25 bp, Homo sapien
aacataggtccgcctctccccatcc

SEQ ID NO: 5704437 - DNA, 25 bp, Homo sapien
gtggctgcctgtggcagcatcctca

SEQ ID NO: 5704438 - DNA, 25 bp, Homo sapien
tcttgtgcagtgtctccttgtagga

SEQ ID NO: 5704439 - DNA, 25 bp, Homo sapien
gcaccaggctgggcgcgagagaaag

SEQ ID NO: 5704440 - DNA, 25 bp, Homo sapien
tagaggccggtctgggggtcatagt

SEQ ID NO: 5704441 - DNA, 25 bp, Homo sapien
agccctcatcctgttggtagtagct

SEQ ID NO: 5704442 - DNA, 25 bp, Homo sapien
cggagggcttgggcggtcgtcactg

SEQ ID NO: 5704443 - DNA, 25 bp, Homo sapien
ccctggctactgctcgcctcggctg

SEQ ID NO: 5704444 - DNA, 25 bp, Homo sapien
gggcagtggggctggtagccggtgg

SEQ ID NO: 5704445 - DNA, 25 bp, Homo sapien
gggccttcgggggctgctggggccc

SEQ ID NO: 5704446 - DNA, 25 bp, Homo sapien
ctgtggcagcatcctcagcatgacg

SEQ ID NO: 5704447 - DNA, 25 bp, Homo sapien
aagcgcgctgccctcccagggaaac

SEQ ID NO: 5704448 - DNA, 25 bp, Homo sapien
agtgccctggctactgctcgcctcg

SEQ ID NO: 5704449 - DNA, 25 bp, Homo sapien
gctcccttcttctcgaggatggcat

SEQ ID NO: 5704450 - DNA, 25 bp, Homo sapien
attgtcttgtgcagtgtctccttgt

SEQ ID NO: 5704451 - DNA, 25 bp, Homo sapien
tttttttgcagacttttcagctttt

SEQ ID NO: 5704452 - DNA, 25 bp, Homo sapien
atggtatacgactggctgttggcag

SEQ ID NO: 5704453 - DNA, 25 bp, Homo sapien
tttggttccagtgatgccagggccc

SEQ ID NO: 5704454 - DNA, 25 bp, Homo sapien
tgccctggctgttgccatagccctc

SEQ ID NO: 5704455 - DNA, 25 bp, Homo sapien
tcaacattgatggtcttgccgtcga

SEQ ID NO: 5704456 - DNA, 25 bp, Homo sapien
cagggagctgataggctggaagcta

SEQ ID NO: 5704457 - DNA, 25 bp, Homo sapien
gtgcagtgtctccttgtaggactcg

SEQ ID NO: 5704458 - DNA, 25 bp, Homo sapien
tggtcttgtgcttctccttcttctc

SEQ ID NO: 5704459 - DNA, 25 bp, Homo sapien
cagctgcacggtcccggtacttcat

SEQ ID NO: 5704460 - DNA, 25 bp, Homo sapien
tgggtgatgcttcctgcagggactc

SEQ ID NO: 5704461 - DNA, 25 bp, Homo sapien
ctgtctccttatgtccgtcggccga

SEQ ID NO: 5704462 - DNA, 25 bp, Homo sapien
gagagaaagcctgcatcgacacaga

SEQ ID NO: 5704463 - DNA, 25 bp, Homo sapien
ccatcgtgtagcgtcctgcaagtga

SEQ ID NO: 5704464 - DNA, 25 bp, Homo sapien
gcttcctgcagggactcttctcggc

SEQ ID NO: 5704465 - DNA, 25 bp, Homo sapien
cgactgctccagggcgggaacatag

SEQ ID NO: 5704466 - DNA, 25 bp, Homo sapien
cgcacgttggaggaggacagcaccg

SEQ ID NO: 5704467 - DNA, 25 bp, Homo sapien
gtcctgcaagtgactaaactcgacg

SEQ ID NO: 5704468 - DNA, 25 bp, Homo sapien
ggccctggctcagctcccggccacc

SEQ ID NO: 5704469 - DNA, 25 bp, Homo sapien
agccggaggtctcatcgtactggta

SEQ ID NO: 5704470 - DNA, 25 bp, Homo sapien
tggtgcccttgaggtagccatgggc

SEQ ID NO: 5704471 - DNA, 25 bp, Homo sapien
cgctcctgctcctcctcactgtcac

SEQ ID NO: 5704472 - DNA, 25 bp, Homo sapien
tcgttgaagcgggtcaccattgtct

SEQ ID NO: 5704473 - DNA, 25 bp, Homo sapien
gtccgatagtcctggtcccgatagt

SEQ ID NO: 5704474 - DNA, 25 bp, Homo sapien
gactgcgggcccagcgttccatgtc

SEQ ID NO: 5704475 - DNA, 25 bp, Homo sapien
ctccacgatggtggagagctggatg

SEQ ID NO: 5704476 - DNA, 25 bp, Homo sapien
cgtcatctcgcagggagctgatagg

SEQ ID NO: 5704477 - DNA, 25 bp, Homo sapien
cctccgcactctgctcctcagatga

SEQ ID NO: 5704478 - DNA, 25 bp, Homo sapien
gccgctgccctctttccagcccatg

SEQ ID NO: 5704479 - DNA, 25 bp, Homo sapien
agctgctcactgggcctcgttgaag

SEQ ID NO: 5704480 - DNA, 25 bp, Homo sapien
tactcccagccggccacagtcacca

SEQ ID NO: 5704481 - DNA, 25 bp, Homo sapien
tggcgttctctgagcttggctccga

SEQ ID NO: 5704482 - DNA, 25 bp, Homo sapien
agaacccttggcaaactcaacattg

SEQ ID NO: 5704483 - DNA, 25 bp, Homo sapien
cacggtcccggtacttcatttgctc

SEQ ID NO: 5704484 - DNA, 25 bp, Homo sapien
gagaaagcctgcatcgacacagagt

SEQ ID NO: 5704485 - DNA, 25 bp, Homo sapien
aggggaagcaggccctggctcagct

SEQ ID NO: 5704486 - DNA, 25 bp, Homo sapien
ctcactgtcactctccccgctgtag

SEQ ID NO: 5704487 - DNA, 25 bp, Homo sapien
cccggtacttcatttgctccatgtc

SEQ ID NO: 5704488 - DNA, 25 bp, Homo sapien
gtacttcctcctcttgggctctggc

SEQ ID NO: 5704489 - DNA, 25 bp, Homo sapien
tctcaaggttttgcttgtggagccc

SEQ ID NO: 5704490 - DNA, 25 bp, Homo sapien
ctggagctcagatttgagcacagcg

SEQ ID NO: 5704491 - DNA, 25 bp, Homo sapien
catcacctctgcccgccgccacctc

SEQ ID NO: 5704492 - DNA, 25 bp, Homo sapien
gggaagcaggccctggctcagctcc

SEQ ID NO: 5704493 - DNA, 25 bp, Homo sapien
ggcccccaggatggaatccatggtg

SEQ ID NO: 5704494 - DNA, 25 bp, Homo sapien
tctccttcttctctttgccctcctt

SEQ ID NO: 5704495 - DNA, 25 bp, Homo sapien
ccgccgccgccgcctacgctgagtc

SEQ ID NO: 5704496 - DNA, 25 bp, Homo sapien
catgctggtgtgctgtctctcggct

SEQ ID NO: 5704497 - DNA, 25 bp, Homo sapien
gcagtgtctgctgatccagcctcgt

SEQ ID NO: 5704498 - DNA, 25 bp, Homo sapien
taatactgggagttggggtcatagt

SEQ ID NO: 5704499 - DNA, 25 bp, Homo sapien
acgccacatttgaagcacttctctc

SEQ ID NO: 5704500 - DNA, 25 bp, Homo sapien
ccgtcggccgactgctccagggcgg

SEQ ID NO: 5704501 - DNA, 25 bp, Homo sapien
gaggcctcgggacctgctccagtgg

SEQ ID NO: 5704502 - DNA, 25 bp, Homo sapien
tcactgggcctcgttgaagcgggtc

SEQ ID NO: 5704503 - DNA, 25 bp, Homo sapien
cccagccggccacagtcaccagctc

SEQ ID NO: 5704504 - DNA, 25 bp, Homo sapien
gtgctgattggcttccatccatcgt

SEQ ID NO: 5704505 - DNA, 25 bp, Homo sapien
tgtttgggcctcgataggcgttaca

SEQ ID NO: 5704506 - DNA, 25 bp, Homo sapien
cccagcccgtcccgagtaggctgct

SEQ ID NO: 5704507 - DNA, 25 bp, Homo sapien
gcgtttgaagttctggacgccacac

SEQ ID NO: 5704508 - DNA, 25 bp, Homo sapien
ggatcccctttggttccagtgatgc

SEQ ID NO: 5704509 - DNA, 25 bp, Homo sapien
ttggaggccatgtccctcttagaac

SEQ ID NO: 5704510 - DNA, 25 bp, Homo sapien
caggatggaatccatggtgctgtgt

SEQ ID NO: 5704511 - DNA, 25 bp, Homo sapien
cagctcccggccacccagtggcagt

SEQ ID NO: 5704512 - DNA, 25 bp, Homo sapien
gtagggtgccagggcccccaggatg

SEQ ID NO: 5704513 - DNA, 25 bp, Homo sapien
actgcccagcccgtcccgagtaggc

SEQ ID NO: 5704514 - DNA, 25 bp, Homo sapien
gcagcactgatgcgactgccttcat

SEQ ID NO: 5704515 - DNA, 25 bp, Homo sapien
cggagccggagcgcgcaacaaccaa

SEQ ID NO: 5704516 - DNA, 25 bp, Homo sapien
ctcctcagccgctggctccgtttca

SEQ ID NO: 5704517 - DNA, 25 bp, Homo sapien
caaccaagtccgagactggaggcag

SEQ ID NO: 5704518 - DNA, 25 bp, Homo sapien
tcagcttttattacaaaacaggacg

SEQ ID NO: 5704519 - DNA, 25 bp, Homo sapien
gacgcgcacgttggaggaggacagc

SEQ ID NO: 5704520 - DNA, 25 bp, Homo sapien
cactggccaatttcgggagatccat

SEQ ID NO: 5704521 - DNA, 25 bp, Homo sapien
cagatcggggggaggggagaagcgc

SEQ ID NO: 5704522 - DNA, 25 bp, Homo sapien
gctgcacggtcccggtacttcattt

SEQ ID NO: 5704523 - DNA, 25 bp, Homo sapien
tcctcgcggagggcttgggcggtcg

SEQ ID NO: 5704524 - DNA, 25 bp, Homo sapien
tgacctgaagatttgttccgcatca

SEQ ID NO: 5704525 - DNA, 25 bp, Homo sapien
tggtggagagctggatgaaggcaaa

SEQ ID NO: 5704526 - DNA, 25 bp, Homo sapien
ccctgagagctgctggtgccggatg

SEQ ID NO: 5704527 - DNA, 25 bp, Homo sapien
ggtggggctgtgcctgtgccgccgc

SEQ ID NO: 5704528 - DNA, 25 bp, Homo sapien
catcagccgaacctcccgtgcttgc

SEQ ID NO: 5704529 - DNA, 25 bp, Homo sapien
tgacgatgttactggccttctcctc

SEQ ID NO: 5704530 - DNA, 25 bp, Homo sapien
ccctggctcagctcccggccaccca

SEQ ID NO: 5704531 - DNA, 25 bp, Homo sapien
gtcggccgactgctccagggcggga

SEQ ID NO: 5704532 - DNA, 25 bp, Homo sapien
tgcgactgccttcattggaggccat

SEQ ID NO: 5704533 - DNA, 25 bp, Homo sapien
caggctgggcgcgagagaaagcctg

SEQ ID NO: 5704534 - DNA, 25 bp, Homo sapien
tgcacggtcccggtacttcatttgc

SEQ ID NO: 5704535 - DNA, 25 bp, Homo sapien
gccccgtgcacccaggccggagccc

SEQ ID NO: 5704536 - DNA, 25 bp, Homo sapien
acgaccaccacgtctttcatactcc

SEQ ID NO: 5704537 - DNA, 25 bp, Homo sapien
gctctgcctctgacttgggcacgcc

SEQ ID NO: 5704538 - DNA, 25 bp, Homo sapien
ccagtacaggtactgctggctctga

SEQ ID NO: 5704539 - DNA, 25 bp, Homo sapien
cgtctttcatactccatgtcctgat

SEQ ID NO: 5704540 - DNA, 25 bp, Homo sapien
gagaagttgctcttgaagctgctca

SEQ ID NO: 5704541 - DNA, 25 bp, Homo sapien
gatgccagggcccttggtgcccttg

SEQ ID NO: 5704542 - DNA, 25 bp, Homo sapien
gccgtctcgggggaagcctggcggg

SEQ ID NO: 5704543 - DNA, 25 bp, Homo sapien
tgccagtcggtgagcttctcctccc

SEQ ID NO: 5704544 - DNA, 25 bp, Homo sapien
ccagctcagccggagccggagcgcg

SEQ ID NO: 5704545 - DNA, 25 bp, Homo sapien
ctgccctctttccagcccatggcct

SEQ ID NO: 5704546 - DNA, 25 bp, Homo sapien
ggtgaccccgtaggagctgccccgt

SEQ ID NO: 5704547 - DNA, 25 bp, Homo sapien
tcggcccgggctgtcaaggaagggc

SEQ ID NO: 5704548 - DNA, 25 bp, Homo sapien
aggaatcctccgcactctgctcctc

SEQ ID NO: 5704549 - DNA, 25 bp, Homo sapien
tttttgcagacttttcagcttttat

SEQ ID NO: 5704550 - DNA, 25 bp, Homo sapien
gcccgccgccacctcctccaactct

SEQ ID NO: 5704551 - DNA, 25 bp, Homo sapien
acctcctccaactctcccagctcag

SEQ ID NO: 5704552 - DNA, 25 bp, Homo sapien
ctcggtccgatagtcctggtcccga

SEQ ID NO: 5704553 - DNA, 25 bp, Homo sapien
ggattcctgggcagtggggctggta

SEQ ID NO: 5704554 - DNA, 25 bp, Homo sapien
gctgccctcccagggaaactcactg

SEQ ID NO: 5704555 - DNA, 25 bp, Homo sapien
actggccttctcctcctcctcctca

SEQ ID NO: 5704556 - DNA, 25 bp, Homo sapien
tccccaccttgggaggcctgtgaga

SEQ ID NO: 5704557 - DNA, 25 bp, Homo sapien
cccgatagtcgccgtctcgggggaa

SEQ ID NO: 5704558 - DNA, 25 bp, Homo sapien
ggctcagctcccggccacccagtgg

SEQ ID NO: 5704559 - DNA, 25 bp, Homo sapien
gttgtcactgcccagcccgtcccga

SEQ ID NO: 5704560 - DNA, 25 bp, Homo sapien
ggacgccacacttattgcacagcca

SEQ ID NO: 5704561 - DNA, 25 bp, Homo sapien
ccgtcgatagtgagtggtgggtgca

SEQ ID NO: 5704562 - DNA, 25 bp, Homo sapien
caagtgactaaactcgacgaaggcg

SEQ ID NO: 5704563 - DNA, 25 bp, Homo sapien
gcagtggggctggtagccggtggga

SEQ ID NO: 5704564 - DNA, 25 bp, Homo sapien
ctgccgcctactcccagccggccac

SEQ ID NO: 5704565 - DNA, 25 bp, Homo sapien
gtagatgccaggagcagcaccaggc

SEQ ID NO: 5704566 - DNA, 25 bp, Homo sapien
cgctgccctctttccagcccatggc

SEQ ID NO: 5704567 - DNA, 25 bp, Homo sapien
aagtcaccacctcaatttgatttgg

SEQ ID NO: 5704568 - DNA, 25 bp, Homo sapien
gcccggggaggcctcgtaggaatcc

SEQ ID NO: 5704569 - DNA, 25 bp, Homo sapien
acttgggcacgccacatttgaagca

SEQ ID NO: 5704570 - DNA, 25 bp, Homo sapien
ctgtgacagggcttgggaggccagg

SEQ ID NO: 5704571 - DNA, 25 bp, Homo sapien
ctcgtcatctcgcagggagctgata

SEQ ID NO: 5704572 - DNA, 25 bp, Homo sapien
tacgactggctgttggcagcagtgc

SEQ ID NO: 5704573 - DNA, 25 bp, Homo sapien
gcggtcagtggctccatagcggcca

SEQ ID NO: 5704574 - DNA, 25 bp, Homo sapien
gggtagggctctggagctcagattt

SEQ ID NO: 5704575 - DNA, 25 bp, Homo sapien
agtgtctccttgtaggactcggttg

SEQ ID NO: 5704576 - DNA, 25 bp, Homo sapien
cggctagtgctcccttcttctcgag

SEQ ID NO: 5704577 - DNA, 25 bp, Homo sapien
gacttttcagcttttattacaaaac

SEQ ID NO: 5704578 - DNA, 25 bp, Homo sapien
agctcagccggagccggagcgcgca

SEQ ID NO: 5704579 - DNA, 25 bp, Homo sapien
ttgaggtagccatgggcatagaggg

SEQ ID NO: 5704580 - DNA, 25 bp, Homo sapien
agtcgtggtctcggctgcggttctc

SEQ ID NO: 5704581 - DNA, 25 bp, Homo sapien
tgtagcgtcctgcaagtgactaaac

SEQ ID NO: 5704582 - DNA, 25 bp, Homo sapien
atggtgtcattggcgttctctgagc

SEQ ID NO: 5704583 - DNA, 25 bp, Homo sapien
ttgtggagccctgagagctgctggt

SEQ ID NO: 5704584 - DNA, 25 bp, Homo sapien
ccaggatgttgagggagtgctgatt

SEQ ID NO: 5704585 - DNA, 25 bp, Homo sapien
ctcatcctgttggtagtagctgtag

SEQ ID NO: 5704586 - DNA, 25 bp, Homo sapien
ccttggcaatctgttgagctgtctt

SEQ ID NO: 5704587 - DNA, 25 bp, Homo sapien
tggaagctatttttgaagttttctt

SEQ ID NO: 5704588 - DNA, 25 bp, Homo sapien
cccaggccggagccccgcacccgtg

SEQ ID NO: 5704589 - DNA, 25 bp, Homo sapien
gccgcctactcccagccggccacag

SEQ ID NO: 5704590 - DNA, 25 bp, Homo sapien
atgtcatcctcagtggctgcctgtg

SEQ ID NO: 5704591 - DNA, 25 bp, Homo sapien
atctcgcagggagctgataggctgg

SEQ ID NO: 5704592 - DNA, 25 bp, Homo sapien
catacttttctctgcgttcagctgc

SEQ ID NO: 5704593 - DNA, 25 bp, Homo sapien
ctccccgctgtaggctgccaccagt

SEQ ID NO: 5704594 - DNA, 25 bp, Homo sapien
gctgtagtcgaccggcggctcctcg

SEQ ID NO: 5704595 - DNA, 25 bp, Homo sapien
gcccatggcctgcagcatccgactg

SEQ ID NO: 5704596 - DNA, 25 bp, Homo sapien
aagcacttctctcggcgtttgaagt

SEQ ID NO: 5704597 - DNA, 25 bp, Homo sapien
gagcgcctctttgctggggaactgg

SEQ ID NO: 5704598 - DNA, 25 bp, Homo sapien
ccacctcaatttgatttggtcaagc

SEQ ID NO: 5704599 - DNA, 25 bp, Homo sapien
ctgttggtagtagctgtagtcgacc

SEQ ID NO: 5704600 - DNA, 25 bp, Homo sapien
ggcatagagggaagactctgtgccc

SEQ ID NO: 5704601 - DNA, 25 bp, Homo sapien
ttctggacgccacacttattgcaca

SEQ ID NO: 5704602 - DNA, 25 bp, Homo sapien
caggatctgcagcagctgggctgcc

SEQ ID NO: 5704603 - DNA, 25 bp, Homo sapien
agagtcggccccaggctctagggag

SEQ ID NO: 5704604 - DNA, 25 bp, Homo sapien
ttctcctcccgctcagggcccccac

SEQ ID NO: 5704605 - DNA, 25 bp, Homo sapien
agcttggctccgagccctgtgacag

SEQ ID NO: 5704606 - DNA, 25 bp, Homo sapien
catcctcagtggctgcctgtggcag

SEQ ID NO: 5704607 - DNA, 25 bp, Homo sapien
cttgggctctggcggctcggggatg

SEQ ID NO: 5704608 - DNA, 25 bp, Homo sapien
ttctgctctgcctctgacttgggca

SEQ ID NO: 5704609 - DNA, 25 bp, Homo sapien
gactgcagctggccacggatgtcat

SEQ ID NO: 5704610 - DNA, 25 bp, Homo sapien
tgattggcttccatccatcgtgtag

SEQ ID NO: 5704611 - DNA, 25 bp, Homo sapien
tctccccaccatcatcctgcgagcg

SEQ ID NO: 5704612 - DNA, 25 bp, Homo sapien
gcgactgcagctggccacggatgtc

SEQ ID NO: 5704613 - DNA, 25 bp, Homo sapien
gctcggggatgccatacttttctct

SEQ ID NO: 5704614 - DNA, 25 bp, Homo sapien
gccccggctctgacctgaagatttg

SEQ ID NO: 5704615 - DNA, 25 bp, Homo sapien
ctgagtctcggagcccggggaggcc

SEQ ID NO: 5704616 - DNA, 25 bp, Homo sapien
cgtgtttgggcctcgataggcgtta

SEQ ID NO: 5704617 - DNA, 25 bp, Homo sapien
ttagaacccttggcaaactcaacat

SEQ ID NO: 5704618 - DNA, 25 bp, Homo sapien
agtagaggccggtctgggggtcata

SEQ ID NO: 5704619 - DNA, 25 bp, Homo sapien
cactgatgcgactgccttcattgga

SEQ ID NO: 5704620 - DNA, 25 bp, Homo sapien
tcctcagatgagtcgtcatagtcat

SEQ ID NO: 5704621 - DNA, 25 bp, Homo sapien
ggggtcactgtagtgcatcgacacc

SEQ ID NO: 5704622 - DNA, 25 bp, Homo sapien
tgccctgcttcttgcggcccaggcc

SEQ ID NO: 5704623 - DNA, 25 bp, Homo sapien
atctgcagcagctgggctgcctcca

SEQ ID NO: 5704624 - DNA, 25 bp, Homo sapien
cattgatcttgggcttggggtcact

SEQ ID NO: 5704625 - DNA, 25 bp, Homo sapien
cttctcgaggatggcatagccagca

SEQ ID NO: 5704626 - DNA, 25 bp, Homo sapien
cccacgctcctgctcctcctcactg

SEQ ID NO: 5704627 - DNA, 25 bp, Homo sapien
tgccctccttcgagggtgcccctgt

SEQ ID NO: 5704628 - DNA, 25 bp, Homo sapien
tctctagtgcttctagctcgttttc

SEQ ID NO: 5704629 - DNA, 25 bp, Homo sapien
ttgaggtgaccccgtaggagctgcc

SEQ ID NO: 5704630 - DNA, 25 bp, Homo sapien
ccacccagtggcagtgtctgctgat

SEQ ID NO: 5704631 - DNA, 25 bp, Homo sapien
gcctcgtgccgaggggcagcttctg

SEQ ID NO: 5704632 - DNA, 25 bp, Homo sapien
tgtgcttctccttcttctctttgcc

SEQ ID NO: 5704633 - DNA, 25 bp, Homo sapien
tgtgggttcaggttgcgcaaaatga

SEQ ID NO: 5704634 - DNA, 25 bp, Homo sapien
taggtccgcctctccccatcccagt

SEQ ID NO: 5704635 - DNA, 25 bp, Homo sapien
cttattgcacagccagtcctcattg

SEQ ID NO: 5704636 - DNA, 25 bp, Homo sapien
gggcggtcgtcactggccaatttcg

SEQ ID NO: 5704637 - DNA, 25 bp, Homo sapien
tgggcatagagggaagactctgtgc

SEQ ID NO: 5704638 - DNA, 25 bp, Homo sapien
tcccagctcagccggagccggagcg

SEQ ID NO: 5704639 - DNA, 25 bp, Homo sapien
tgtggagaagttgctcttgaagctg

SEQ ID NO: 5704640 - DNA, 25 bp, Homo sapien
ggggatgccatacttttctctgcgt

SEQ ID NO: 5704641 - DNA, 25 bp, Homo sapien
tctcccagctcagccggagccggag

SEQ ID NO: 5704642 - DNA, 25 bp, Homo sapien
cggctcggggatgccatacttttct

SEQ ID NO: 5704643 - DNA, 25 bp, Homo sapien
caatgttgtcactgcccagcccgtc

SEQ ID NO: 5704644 - DNA, 25 bp, Homo sapien
gcgctgccctcccagggaaactcac

SEQ ID NO: 5704645 - DNA, 25 bp, Homo sapien
ggctgcctgtggcagcatcctcagc

SEQ ID NO: 5704646 - DNA, 25 bp, Homo sapien
tcctgtcaccacgaccaccacgtct

SEQ ID NO: 5704647 - DNA, 25 bp, Homo sapien
tccaactctcccagctcagccggag

SEQ ID NO: 5704648 - DNA, 25 bp, Homo sapien
agagcaaggccccgtcccagccatc

SEQ ID NO: 5704649 - DNA, 25 bp, Homo sapien
agctggccacggatgtcatcctcag

SEQ ID NO: 5704650 - DNA, 25 bp, Homo sapien
gggtgacatgatggtatacgactgg

SEQ ID NO: 5704651 - DNA, 25 bp, Homo sapien
cccagacatcacctctgcccgccgc

SEQ ID NO: 5704652 - DNA, 25 bp, Homo sapien
cgtctcgggggaagcctggcgggcc

SEQ ID NO: 5704653 - DNA, 25 bp, Homo sapien
cgccggtgaatctcaaggttttgct

SEQ ID NO: 5704654 - DNA, 25 bp, Homo sapien
caagccctctctggctggggagtgg

SEQ ID NO: 5704655 - DNA, 25 bp, Homo sapien
gaagtctacagaggctgtggatatg

SEQ ID NO: 5704656 - DNA, 25 bp, Homo sapien
gaaagcctgcatcgacacagagtcg

SEQ ID NO: 5704657 - DNA, 25 bp, Homo sapien
ggttgaggtgaccccgtaggagctg

SEQ ID NO: 5704658 - DNA, 25 bp, Homo sapien
aggccgctgccctctttccagccca

SEQ ID NO: 5704659 - DNA, 25 bp, Homo sapien
cccgtgtttgggcctcgataggcgt

SEQ ID NO: 5704660 - DNA, 25 bp, Homo sapien
tcccgcctctcgtcatctcgcaggg

SEQ ID NO: 5704661 - DNA, 25 bp, Homo sapien
acccaacatgtggagaagttgctct

SEQ ID NO: 5704662 - DNA, 25 bp, Homo sapien
cctttggttccagtgatgccagggc

SEQ ID NO: 5704663 - DNA, 25 bp, Homo sapien
gcgcgctgccctcccagggaaactc

SEQ ID NO: 5704664 - DNA, 25 bp, Homo sapien
ctcccgtgcttgcacgccgtgcgac

SEQ ID NO: 5704665 - DNA, 25 bp, Homo sapien
ggtgccagggcccccaggatggaat

SEQ ID NO: 5704666 - DNA, 25 bp, Homo sapien
tgcttgcacgccgtgcgactgcagc

SEQ ID NO: 5704667 - DNA, 25 bp, Homo sapien
gcctgtggcagcatcctcagcatga

SEQ ID NO: 5704668 - DNA, 25 bp, Homo sapien
ccatccatcgtgtagcgtcctgcaa

SEQ ID NO: 5704669 - DNA, 25 bp, Homo sapien
tggccttctcctcctcctcctcatc

SEQ ID NO: 5704670 - DNA, 25 bp, Homo sapien
ctccttatgtccgtcggccgactgc

SEQ ID NO: 5704671 - DNA, 25 bp, Homo sapien
acagcaccgcgtagggtgccagggc

SEQ ID NO: 5704672 - DNA, 25 bp, Homo sapien
cccttggcaaactcaacattgatgg

SEQ ID NO: 5704673 - DNA, 25 bp, Homo sapien
ctggctcagctcccggccacccagt

SEQ ID NO: 5704674 - DNA, 25 bp, Homo sapien
tgctggtgccggatgagcgcctctt

SEQ ID NO: 5704675 - DNA, 25 bp, Homo sapien
gacatgatggtatacgactggctgt

SEQ ID NO: 5704676 - DNA, 25 bp, Homo sapien
gcatccgactgccaatgttgtcact

SEQ ID NO: 5704677 - DNA, 25 bp, Homo sapien
ccaatttcgggagatccatgctggt

SEQ ID NO: 5704678 - DNA, 25 bp, Homo sapien
ggccggtggggctgtgcctgtgccg

SEQ ID NO: 5704679 - DNA, 25 bp, Homo sapien
ctcctgctcctcctcactgtcactc

SEQ ID NO: 5704680 - DNA, 25 bp, Homo sapien
tctagtgcttctagctcgttttctg

SEQ ID NO: 5704681 - DNA, 25 bp, Homo sapien
ggatggaatccatggtgctgtgtgg

SEQ ID NO: 5704682 - DNA, 25 bp, Homo sapien
ccacccccgctgctgctaccatgat

SEQ ID NO: 5704683 - DNA, 25 bp, Homo sapien
aatgatggtgtcattggcgttctct

SEQ ID NO: 5704684 - DNA, 25 bp, Homo sapien
tttgcagacttttcagcttttatta

SEQ ID NO: 5704685 - DNA, 25 bp, Homo sapien
tggctgccatactcgcgaggatatg

SEQ ID NO: 5704686 - DNA, 25 bp, Homo sapien
gactgccaatgttgtcactgcccag

SEQ ID NO: 5704687 - DNA, 25 bp, Homo sapien
gtactggtaggtagagacgtcggga

SEQ ID NO: 5704688 - DNA, 25 bp, Homo sapien
cttttctctgcgttcagctgcacgg

SEQ ID NO: 5704689 - DNA, 25 bp, Homo sapien
ggcgttacaatgccctgcttcttgc

SEQ ID NO: 5704690 - DNA, 25 bp, Homo sapien
ctggctggggagtgggctggccgac

SEQ ID NO: 5704691 - DNA, 25 bp, Homo sapien
ggtgtgctgtctctcggctagtgct

SEQ ID NO: 5704692 - DNA, 25 bp, Homo sapien
tgactaaactcgacgaaggcgaagc

SEQ ID NO: 5704693 - DNA, 25 bp, Homo sapien
agcaaggccccgtcccagccatcca

SEQ ID NO: 5704694 - DNA, 25 bp, Homo sapien
cgttcagctgcacggtcccggtact

SEQ ID NO: 5704695 - DNA, 25 bp, Homo sapien
gcgcaaaatgatggtgtcattggcg

SEQ ID NO: 5704696 - DNA, 25 bp, Homo sapien
cccttgctcggtccgatagtcctgg

SEQ ID NO: 5704697 - DNA, 25 bp, Homo sapien
actcgcgaggatatgaacggtagtc

SEQ ID NO: 5704698 - DNA, 25 bp, Homo sapien
ttctgacaagtgggctcgccggtga

SEQ ID NO: 5704699 - DNA, 25 bp, Homo sapien
gtagggctctggagctcagatttga

SEQ ID NO: 5704700 - DNA, 25 bp, Homo sapien
gaggctgtggatatgccgccgtact

SEQ ID NO: 5704701 - DNA, 25 bp, Homo sapien
tccccatcccagtacaggtactgct

SEQ ID NO: 5704702 - DNA, 25 bp, Homo sapien
ccattgtcttgtgcagtgtctcctt

SEQ ID NO: 5704703 - DNA, 25 bp, Homo sapien
ctggccgacaagagcaaggccccgt

SEQ ID NO: 5704704 - DNA, 25 bp, Homo sapien
ggacagcaccgcgtagggtgccagg

SEQ ID NO: 5704705 - DNA, 25 bp, Homo sapien
agcaccgcgtagggtgccagggccc

SEQ ID NO: 5704706 - DNA, 25 bp, Homo sapien
aggcagcactgatgcgactgccttc

SEQ ID NO: 5704707 - DNA, 25 bp, Homo sapien
cccaccatcatcctgcgagcggtca

SEQ ID NO: 5704708 - DNA, 25 bp, Homo sapien
ggccacagaggcagcactgatgcga

SEQ ID NO: 5704709 - DNA, 25 bp, Homo sapien
catcgtactggtaggtagagacgtc

SEQ ID NO: 5704710 - DNA, 25 bp, Homo sapien
tgaagcacttctctcggcgtttgaa

SEQ ID NO: 5704711 - DNA, 25 bp, Homo sapien
accaggctgggcgcgagagaaagcc

SEQ ID NO: 5704712 - DNA, 25 bp, Homo sapien
ctgtcttggtcttgtgcttctcctt

SEQ ID NO: 5704713 - DNA, 25 bp, Homo sapien
agcaggccctggctcagctcccggc

SEQ ID NO: 5704714 - DNA, 25 bp, Homo sapien
tgagctgtcttggtcttgtgcttct

SEQ ID NO: 5704715 - DNA, 25 bp, Homo sapien
aacccttggcaaactcaacattgat

SEQ ID NO: 5704716 - DNA, 25 bp, Homo sapien
gcttctgctctgcctctgacttggg

SEQ ID NO: 5704717 - DNA, 25 bp, Homo sapien
gggaggcctgtgagatggcccactg

SEQ ID NO: 5704718 - DNA, 25 bp, Homo sapien
gggacctgctccagtgggatcccct

SEQ ID NO: 5704719 - DNA, 25 bp, Homo sapien
tccgtttcacttcccagccaccccc

SEQ ID NO: 5704720 - DNA, 25 bp, Homo sapien
tttattacaaaacaggacgtgatcc

SEQ ID NO: 5704721 - DNA, 25 bp, Homo sapien
gaggcctcgtaggaatcctccgcac

SEQ ID NO: 5704722 - DNA, 25 bp, Homo sapien
ggcgggccggtggggctgtgcctgt

SEQ ID NO: 5704723 - DNA, 25 bp, Homo sapien
aagcctgcatcgacacagagtcggc

SEQ ID NO: 5704724 - DNA, 25 bp, Homo sapien
atgccatacttttctctgcgttcag

SEQ ID NO: 5704725 - DNA, 25 bp, Homo sapien
cttgccctcctggctgccatactcg

SEQ ID NO: 5704726 - DNA, 25 bp, Homo sapien
tggcagtgtctgctgatccagcctc

SEQ ID NO: 5704727 - DNA, 25 bp, Homo sapien
cctcagccgctggctccgtttcact

SEQ ID NO: 5704728 - DNA, 25 bp, Homo sapien
gtccgtcggccgactgctccagggc

SEQ ID NO: 5704729 - DNA, 25 bp, Homo sapien
agggctcccagacatcacctctgcc

SEQ ID NO: 5704730 - DNA, 25 bp, Homo sapien
atggacacccaacatgtggagaagt

SEQ ID NO: 5704731 - DNA, 25 bp, Homo sapien
tggctgttggcagcagtgccctggc

SEQ ID NO: 5704732 - DNA, 25 bp, Homo sapien
tttgctccatgtcattcttctctag

SEQ ID NO: 5704733 - DNA, 25 bp, Homo sapien
cgtgccgaggggcagcttctgctct

SEQ ID NO: 5704734 - DNA, 25 bp, Homo sapien
ggctgccaccagtcctcgcggaggg

SEQ ID NO: 5704735 - DNA, 25 bp, Homo sapien
tcgggacctgctccagtgggatccc

SEQ ID NO: 5704736 - DNA, 25 bp, Homo sapien
tctttcatactccatgtcctgatag

SEQ ID NO: 5704737 - DNA, 25 bp, Homo sapien
ccgctggctccgtttcacttcccag

SEQ ID NO: 5704738 - DNA, 25 bp, Homo sapien
cgaagccccggctctgacctgaaga

SEQ ID NO: 5704739 - DNA, 25 bp, Homo sapien
cgactggctgttggcagcagtgccc

SEQ ID NO: 5704740 - DNA, 25 bp, Homo sapien
tgccgccgccgccgcctacgctgag

SEQ ID NO: 5704741 - DNA, 25 bp, Homo sapien
gctgctggtgccggatgagcgcctc

SEQ ID NO: 5704742 - DNA, 25 bp, Homo sapien
tgggagagcagaactaggatgggta

SEQ ID NO: 5704743 - DNA, 25 bp, Homo sapien
tcgagggtgcccctgtctccttatg

SEQ ID NO: 5704744 - DNA, 25 bp, Homo sapien
tggggctgtgcctgtgccgccgccg

SEQ ID NO: 5704745 - DNA, 25 bp, Homo sapien
ctctcggctagtgctcccttcttct

SEQ ID NO: 5704746 - DNA, 25 bp, Homo sapien
gctccatagcggccagtcctgtcac

SEQ ID NO: 5704747 - DNA, 25 bp, Homo sapien
ttcatttgctccatgtcattcttct

SEQ ID NO: 5704748 - DNA, 25 bp, Homo sapien
caggccagcttctgccagtcggtga

SEQ ID NO: 5704749 - DNA, 25 bp, Homo sapien
ccttcattggaggccatgtccctct

SEQ ID NO: 5704750 - DNA, 25 bp, Homo sapien
cgttccatgtccttggcaatctgtt

SEQ ID NO: 5704751 - DNA, 25 bp, Homo sapien
gtagagacgtcgggaacagggtact

SEQ ID NO: 5704752 - DNA, 25 bp, Homo sapien
tggggctggtagccggtgggagagc

SEQ ID NO: 5704753 - DNA, 25 bp, Homo sapien
gtcaccacctcaatttgatttggtc

SEQ ID NO: 5704754 - DNA, 25 bp, Homo sapien
caccacgaccaccacgtctttcata

SEQ ID NO: 5704755 - DNA, 25 bp, Homo sapien
ggctcgccggtgaatctcaaggttt

SEQ ID NO: 5704756 - DNA, 25 bp, Homo sapien
ccctcccagggaaactcactgccgc

SEQ ID NO: 5704757 - DNA, 25 bp, Homo sapien
tttcagcttttattacaaaacagga

SEQ ID NO: 5704758 - DNA, 25 bp, Homo sapien
ctcatcgtactggtaggtagagacg

SEQ ID NO: 5704759 - DNA, 25 bp, Homo sapien
ctggggcccctcctcagccgctggc

SEQ ID NO: 5704760 - DNA, 25 bp, Homo sapien
ggaggccatgtccctcttagaaccc

SEQ ID NO: 5704761 - DNA, 25 bp, Homo sapien
tcagcatgacgatgttactggcctt

SEQ ID NO: 5704762 - DNA, 25 bp, Homo sapien
tctgacttgggcacgccacatttga

SEQ ID NO: 5704763 - DNA, 25 bp, Homo sapien
tagggctgcggcaggggaagcaggc

SEQ ID NO: 5704764 - DNA, 25 bp, Homo sapien
gcatcgacaccttctggcccaggat

SEQ ID NO: 5704765 - DNA, 25 bp, Homo sapien
tggtgctgtgtgggttcaggttgcg

SEQ ID NO: 5704766 - DNA, 25 bp, Homo sapien
atctgcagtggctgactcccgcctc

SEQ ID NO: 5704767 - DNA, 25 bp, Homo sapien
gtgcttctagctcgttttctgacaa

SEQ ID NO: 5704768 - DNA, 25 bp, Homo sapien
cggcccaggccgctgccctctttcc

SEQ ID NO: 5704769 - DNA, 25 bp, Homo sapien
gtcactggccaatttcgggagatcc

SEQ ID NO: 5704770 - DNA, 25 bp, Homo sapien
gctctgagcattgtagtaatactgg

SEQ ID NO: 5704771 - DNA, 25 bp, Homo sapien
tgggtctgcttgtcctttatgacgc

SEQ ID NO: 5704772 - DNA, 25 bp, Homo sapien
cttgcggcccaggccgctgccctct

SEQ ID NO: 5704773 - DNA, 25 bp, Homo sapien
ccctgtgacagggcttgggaggcca

SEQ ID NO: 5704774 - DNA, 25 bp, Homo sapien
ggcccgggctgtcaaggaagggctc

SEQ ID NO: 5704775 - DNA, 25 bp, Homo sapien
ggggtcatagtagtagccggaggtc

SEQ ID NO: 5704776 - DNA, 25 bp, Homo sapien
tggcccaggatgttgagggagtgct

SEQ ID NO: 5704777 - DNA, 25 bp, Homo sapien
cctgcagggactcttctcggcccgg

SEQ ID NO: 5704778 - DNA, 25 bp, Homo sapien
agtaatactgggagttggggtcata

SEQ ID NO: 5704779 - DNA, 25 bp, Homo sapien
tctcggcccgggctgtcaaggaagg

SEQ ID NO: 5704780 - DNA, 25 bp, Homo sapien
cttgtcctttatgacgcgcacgttg

SEQ ID NO: 5704781 - DNA, 25 bp, Homo sapien
tgaccccgtaggagctgccccgtgc

SEQ ID NO: 5704782 - DNA, 25 bp, Homo sapien
agtacaggtactgctggctctgagc

SEQ ID NO: 5704783 - DNA, 25 bp, Homo sapien
tgcggcccaggccgctgccctcttt

SEQ ID NO: 5704784 - DNA, 25 bp, Homo sapien
aatctcaaggttttgcttgtggagc

SEQ ID NO: 5704785 - DNA, 25 bp, Homo sapien
cagcttctgctctgcctctgacttg

SEQ ID NO: 5704786 - DNA, 25 bp, Homo sapien
ggcgaagccccggctctgacctgaa

SEQ ID NO: 5704787 - DNA, 25 bp, Homo sapien
catcctgcgagcggtcagtggctcc

SEQ ID NO: 5704788 - DNA, 25 bp, Homo sapien
gagatccatgctggtgtgctgtctc

SEQ ID NO: 5704789 - DNA, 25 bp, Homo sapien
gctcttgaagctgctcactgggcct

SEQ ID NO: 5704790 - DNA, 25 bp, Homo sapien
tccagcctcgtgccgaggggcagct

SEQ ID NO: 5704791 - DNA, 25 bp, Homo sapien
gggcacgccacatttgaagcacttc

SEQ ID NO: 5704792 - DNA, 25 bp, Homo sapien
gtgcagggcctgcaggatctgcagc

SEQ ID NO: 5704793 - DNA, 25 bp, Homo sapien
gcgcgcaacaaccaagtccgagact

SEQ ID NO: 5704794 - DNA, 25 bp, Homo sapien
tgatgcttcctgcagggactcttct

SEQ ID NO: 5704795 - DNA, 25 bp, Homo sapien
cagcatctgcagtggctgactcccg

SEQ ID NO: 5704796 - DNA, 25 bp, Homo sapien
cgacaccttctggcccaggatgttg

SEQ ID NO: 5704797 - DNA, 25 bp, Homo sapien
gatttgagcacagcgggtgacatga

SEQ ID NO: 5704798 - DNA, 25 bp, Homo sapien
tagtagccggaggtctcatcgtact

SEQ ID NO: 5704799 - DNA, 25 bp, Homo sapien
tggaggcagatcggggggaggggag

SEQ ID NO: 5704800 - DNA, 25 bp, Homo sapien
cccagccatccaacactctgtcctt

SEQ ID NO: 5704801 - DNA, 25 bp, Homo sapien
agagacgtcgggaacagggtactgg

SEQ ID NO: 5704802 - DNA, 25 bp, Homo sapien
catagtcatgcttgccctcctggct

SEQ ID NO: 5704803 - DNA, 25 bp, Homo sapien
gagtgctgattggcttccatccatc

SEQ ID NO: 5704804 - DNA, 25 bp, Homo sapien
tgggctctggcggctcggggatgcc

SEQ ID NO: 5704805 - DNA, 25 bp, Homo sapien
gatgagtcgtcatagtcatgcttgc

SEQ ID NO: 5704806 - DNA, 25 bp, Homo sapien
gtcttgccgtcgatagtgagtggtg

SEQ ID NO: 5704807 - DNA, 25 bp, Homo sapien
cctcgtaggaatcctccgcactctg

SEQ ID NO: 5704808 - DNA, 25 bp, Homo sapien
tcctttatgacgcgcacgttggagg

SEQ ID NO: 5704809 - DNA, 25 bp, Homo sapien
ggccagcttctgccagtcggtgagc

SEQ ID NO: 5704810 - DNA, 25 bp, Homo sapien
cccgtgcttgcacgccgtgcgactg

SEQ ID NO: 5704811 - DNA, 25 bp, Homo sapien
gcttgtggagccctgagagctgctg

SEQ ID NO: 5704812 - DNA, 25 bp, Homo sapien
ctgtctctcggctagtgctcccttc

SEQ ID NO: 5704813 - DNA, 25 bp, Homo sapien
gtgacatgatggtatacgactggct

SEQ ID NO: 5704814 - DNA, 25 bp, Homo sapien
tcccgctcagggcccccacgctcct

SEQ ID NO: 5704815 - DNA, 25 bp, Homo sapien
cccggtagtcgtggtctcggctgcg

SEQ ID NO: 5704816 - DNA, 25 bp, Homo sapien
ggccagtcctgtcaccacgaccacc

SEQ ID NO: 5704817 - DNA, 25 bp, Homo sapien
gctgggctgcctccacgatggtgga

SEQ ID NO: 5704818 - DNA, 25 bp, Homo sapien
gctaccatgatctgccagcctgggt

SEQ ID NO: 5704819 - DNA, 25 bp, Homo sapien
tgggcctcgataggcgttacaatgc

SEQ ID NO: 5704820 - DNA, 25 bp, Homo sapien
ccctctctggctggggagtgggctg

SEQ ID NO: 5704821 - DNA, 25 bp, Homo sapien
gtttcacttcccagccacccccgct

SEQ ID NO: 5704822 - DNA, 25 bp, Homo sapien
gagcccggggaggcctcgtaggaat

SEQ ID NO: 5704823 - DNA, 25 bp, Homo sapien
gagcggtcagtggctccatagcggc

SEQ ID NO: 5704824 - DNA, 25 bp, Homo sapien
agccgcggttcagttgggtctgctt

SEQ ID NO: 5704825 - DNA, 25 bp, Homo sapien
tggcagtgctggccacagaggcagc

SEQ ID NO: 5704826 - DNA, 25 bp, Homo sapien
gccacagtcaccagctcaaaatggc

SEQ ID NO: 5704827 - DNA, 25 bp, Homo sapien
ctgcagcagctgggctgcctccacg

SEQ ID NO: 5704828 - DNA, 25 bp, Homo sapien
gccacctcctccaactctcccagct

SEQ ID NO: 5704829 - DNA, 25 bp, Homo sapien
ggcggctcggggatgccatactttt

SEQ ID NO: 5704830 - DNA, 25 bp, Homo sapien
aacaggacgtgatcccagcccaatt

SEQ ID NO: 5704831 - DNA, 25 bp, Homo sapien
ccccaggctctagggaggcctcggg

SEQ ID NO: 5704832 - DNA, 25 bp, Homo sapien
taggactcggttgaggtgaccccgt

SEQ ID NO: 5704833 - DNA, 25 bp, Homo sapien
ggggagtgggctggccgacaagagc

SEQ ID NO: 5704834 - DNA, 25 bp, Homo sapien
gggcttggggtcactgtagtgcatc

SEQ ID NO: 5704835 - DNA, 25 bp, Homo sapien
ccatcatcctgcgagcggtcagtgg

SEQ ID NO: 5704836 - DNA, 25 bp, Homo sapien
cctgtgagatggcccactgggccgc

SEQ ID NO: 5704837 - DNA, 25 bp, Homo sapien
gacaagtgggctcgccggtgaatct

SEQ ID NO: 5704838 - DNA, 25 bp, Homo sapien
gtactggctgtaggattcctgggca

SEQ ID NO: 5704839 - DNA, 25 bp, Homo sapien
tcctgttggtagtagctgtagtcga

SEQ ID NO: 5704840 - DNA, 25 bp, Homo sapien
ctctcgtcatctcgcagggagctga

SEQ ID NO: 5704841 - DNA, 25 bp, Homo sapien
atactgggagttggggtcatagtag

SEQ ID NO: 5704842 - DNA, 25 bp, Homo sapien
gaggccggtctgggggtcatagtag

SEQ ID NO: 5704843 - DNA, 25 bp, Homo sapien
ggtgtcattggcgttctctgagctt

SEQ ID NO: 5704844 - DNA, 25 bp, Homo sapien
actgctcgcctcggctgattgttgg

SEQ ID NO: 5704845 - DNA, 25 bp, Homo sapien
tggcccaggtaccctccccaccttg

SEQ ID NO: 5704846 - DNA, 25 bp, Homo sapien
ccagggcgggaacataggtccgcct

SEQ ID NO: 5704847 - DNA, 25 bp, Homo sapien
cgccgccgcctacgctgagtctcgg

SEQ ID NO: 5704848 - DNA, 25 bp, Homo sapien
cagggaaactcactgccgcctactc

SEQ ID NO: 5704849 - DNA, 25 bp, Homo sapien
caccgcgtagggtgccagggccccc

SEQ ID NO: 5704850 - DNA, 25 bp, Homo sapien
tcgaagtctacagaggctgtggata

SEQ ID NO: 5704851 - DNA, 25 bp, Homo sapien
gtagtagctgtagtcgaccggcggc

SEQ ID NO: 5704852 - DNA, 25 bp, Homo sapien
cgcgcacgttggaggaggacagcac

SEQ ID NO: 5704853 - DNA, 25 bp, Homo sapien
ggcgggaacataggtccgcctctcc

SEQ ID NO: 5704854 - DNA, 25 bp, Homo sapien
ccagtcctcattgatcttgggcttg

SEQ ID NO: 5704855 - DNA, 25 bp, Homo sapien
gcacttctctcggcgtttgaagttc

SEQ ID NO: 5704856 - DNA, 25 bp, Homo sapien
cgttggaggaggacagcaccgcgta

SEQ ID NO: 5704857 - DNA, 25 bp, Homo sapien
tggctgactcccgcctctcgtcatc

SEQ ID NO: 5704858 - DNA, 25 bp, Homo sapien
aggactccctgggcctggtagggct

SEQ ID NO: 5704859 - DNA, 25 bp, Homo sapien
caatttgatttggtcaagccctctc

SEQ ID NO: 5704860 - DNA, 25 bp, Homo sapien
cccgagtaggctgctcgaagtctac

SEQ ID NO: 5704861 - DNA, 25 bp, Homo sapien
gaagactctgtgccctggctgttgc

SEQ ID NO: 5704862 - DNA, 25 bp, Homo sapien
tttgtttgttgagactgcgggccca

SEQ ID NO: 5704863 - DNA, 25 bp, Homo sapien
tggcaaactcaacattgatggtctt

SEQ ID NO: 5704864 - DNA, 25 bp, Homo sapien
atgtccgtcggccgactgctccagg

SEQ ID NO: 5704865 - DNA, 25 bp, Homo sapien
gttgaagcgggtcaccattgtcttg

SEQ ID NO: 5704866 - DNA, 25 bp, Homo sapien
ccagtcggtgagcttctcctcccgc

SEQ ID NO: 5704867 - DNA, 25 bp, Homo sapien
gctgccatactcgcgaggatatgaa

SEQ ID NO: 5704868 - DNA, 25 bp, Homo sapien
cggccacagtcaccagctcaaaatg

SEQ ID NO: 5704869 - DNA, 25 bp, Homo sapien
atgccaggagcagcaccaggctggg

SEQ ID NO: 5704870 - DNA, 25 bp, Homo sapien
accttctggcccaggatgttgaggg

SEQ ID NO: 5704871 - DNA, 25 bp, Homo sapien
tacaggtactgctggctctgagcat

SEQ ID NO: 5704872 - DNA, 25 bp, Homo sapien
gccacatttgaagcacttctctcgg

SEQ ID NO: 5704873 - DNA, 25 bp, Homo sapien
cattggaggccatgtccctcttaga

SEQ ID NO: 5704874 - DNA, 25 bp, Homo sapien
ccgtcccgagtaggctgctcgaagt

SEQ ID NO: 5704875 - DNA, 25 bp, Homo sapien
gacgaaggcgaagccccggctctga

SEQ ID NO: 5704876 - DNA, 25 bp, Homo sapien
atgaacggtagtccatgtcccggta

SEQ ID NO: 5704877 - DNA, 25 bp, Homo sapien
tcatactccatgtcctgatagggcc

SEQ ID NO: 5704878 - DNA, 25 bp, Homo sapien
ctcctccaactctcccagctcagcc

SEQ ID NO: 5704879 - DNA, 25 bp, Homo sapien
gatgttactggccttctcctcctcc

SEQ ID NO: 5704880 - DNA, 25 bp, Homo sapien
gtagccggtgggagagcagaactag

SEQ ID NO: 5704881 - DNA, 25 bp, Homo sapien
tcgtggtctcggctgcggttctccc

SEQ ID NO: 5704882 - DNA, 25 bp, Homo sapien
gctgctgctaccatgatctgccagc

SEQ ID NO: 5704883 - DNA, 25 bp, Homo sapien
caccttgggaggcctgtgagatggc

SEQ ID NO: 5704884 - DNA, 25 bp, Homo sapien
ctgggcctggtagggctgcggcagg

SEQ ID NO: 5704885 - DNA, 25 bp, Homo sapien
gtggagagctggatgaaggcaaagc

SEQ ID NO: 5704886 - DNA, 25 bp, Homo sapien
tctctgcgttcagctgcacggtccc

SEQ ID NO: 5704887 - DNA, 25 bp, Homo sapien
cttgccgtcgatagtgagtggtggg

SEQ ID NO: 5704888 - DNA, 25 bp, Homo sapien
gctggctccgtttcacttcccagcc

SEQ ID NO: 5704889 - DNA, 25 bp, Homo sapien
tcgcgaggatatgaacggtagtcca

SEQ ID NO: 5704890 - DNA, 25 bp, Homo sapien
gaggatggcatagccagcatctgca

SEQ ID NO: 5704891 - DNA, 25 bp, Homo sapien
tgctccatgtcattcttctctagtg

SEQ ID NO: 5704892 - DNA, 25 bp, Homo sapien
tctgcgttcagctgcacggtcccgg

SEQ ID NO: 5704893 - DNA, 25 bp, Homo sapien
ctcccagggaaactcactgccgcct

SEQ ID NO: 5704894 - DNA, 25 bp, Homo sapien
atatgccgccgtacttcctcctctt

SEQ ID NO: 5704895 - DNA, 25 bp, Homo sapien
tggtcccgatagtcgccgtctcggg

SEQ ID NO: 5704896 - DNA, 25 bp, Homo sapien
acctcaatttgatttggtcaagccc

SEQ ID NO: 5704897 - DNA, 25 bp, Homo sapien
ggccacggatgtcatcctcagtggc

SEQ ID NO: 5704898 - DNA, 25 bp, Homo sapien
aggggagaagcgccaagcgcgctgc

SEQ ID NO: 5704899 - DNA, 25 bp, Homo sapien
gcttgggaggccaggactccctggg

SEQ ID NO: 5704900 - DNA, 25 bp, Homo sapien
ctcctcggaggtggcccaggtaccc

SEQ ID NO: 5704901 - DNA, 25 bp, Homo sapien
atcccctttggttccagtgatgcca

SEQ ID NO: 5704902 - DNA, 25 bp, Homo sapien
actctgtccttccctgccccaggat

SEQ ID NO: 5704903 - DNA, 25 bp, Homo sapien
acgtgatcccagcccaattttccaa

SEQ ID NO: 5704904 - DNA, 25 bp, Homo sapien
tgctcctcctcactgtcactctccc

SEQ ID NO: 5704905 - DNA, 25 bp, Homo sapien
catttgctccatgtcattcttctct

SEQ ID NO: 5704906 - DNA, 25 bp, Homo sapien
gttgccatagccctcatcctgttgg

SEQ ID NO: 5704907 - DNA, 25 bp, Homo sapien
ctgcatcgacacagagtcggcccca

SEQ ID NO: 5704908 - DNA, 25 bp, Homo sapien
gccaccagtcctcgcggagggcttg

SEQ ID NO: 5704909 - DNA, 25 bp, Homo sapien
aactcactgccgcctactcccagcc

SEQ ID NO: 5704910 - DNA, 25 bp, Homo sapien
ccgcggttcagttgggtctgcttgt

SEQ ID NO: 5704911 - DNA, 25 bp, Homo sapien
ctggacgccacacttattgcacagc

SEQ ID NO: 5704912 - DNA, 25 bp, Homo sapien
gaagcaggccctggctcagctcccg

SEQ ID NO: 5704913 - DNA, 25 bp, Homo sapien
gctccgagccctgtgacagggcttg

SEQ ID NO: 5704914 - DNA, 25 bp, Homo sapien
cgccgtacttcctcctcttgggctc

SEQ ID NO: 5704915 - DNA, 25 bp, Homo sapien
tgccctcccagggaaactcactgcc

SEQ ID NO: 5704916 - DNA, 25 bp, Homo sapien
gtcaagccctctctggctggggagt

SEQ ID NO: 5704917 - DNA, 25 bp, Homo sapien
gggggctgctggggcccctcctcag

SEQ ID NO: 5704918 - DNA, 25 bp, Homo sapien
gcagtgccctggctactgctcgcct

SEQ ID NO: 5704919 - DNA, 25 bp, Homo sapien
gccaggagcagcaccaggctgggcg

SEQ ID NO: 5704920 - DNA, 25 bp, Homo sapien
agaggcagcactgatgcgactgcct

SEQ ID NO: 5704921 - DNA, 25 bp, Homo sapien
cgggctgtcaaggaagggctcccag

SEQ ID NO: 5704922 - DNA, 25 bp, Homo sapien
gctgtaggctgccaccagtcctcgc

SEQ ID NO: 5704923 - DNA, 25 bp, Homo sapien
ggcctcgataggcgttacaatgccc

SEQ ID NO: 5704924 - DNA, 25 bp, Homo sapien
agccggtgggagagcagaactagga

SEQ ID NO: 5704925 - DNA, 25 bp, Homo sapien
cacagcgggtgacatgatggtatac

SEQ ID NO: 5704926 - DNA, 25 bp, Homo sapien
agccctgagagctgctggtgccgga

SEQ ID NO: 5704927 - DNA, 25 bp, Homo sapien
cccactgggccgcagcaatggcagt

SEQ ID NO: 5704928 - DNA, 25 bp, Homo sapien
caatctgttgagctgtcttggtctt

SEQ ID NO: 5704929 - DNA, 25 bp, Homo sapien
gaagggctcccagacatcacctctg

SEQ ID NO: 5704930 - DNA, 25 bp, Homo sapien
gcctccacgatggtggagagctgga

SEQ ID NO: 5704931 - DNA, 25 bp, Homo sapien
catcccagtacaggtactgctggct

SEQ ID NO: 5704932 - DNA, 25 bp, Homo sapien
gatggtcttgccgtcgatagtgagt

SEQ ID NO: 5704933 - DNA, 25 bp, Homo sapien
tctgacctgaagatttgttccgcat

SEQ ID NO: 5704934 - DNA, 25 bp, Homo sapien
cggagcccggggaggcctcgtagga

SEQ ID NO: 5704935 - DNA, 25 bp, Homo sapien
agtcggccccaggctctagggaggc

SEQ ID NO: 5704936 - DNA, 25 bp, Homo sapien
ttcaggttgcgcaaaatgatggtgt

SEQ ID NO: 5704937 - DNA, 25 bp, Homo sapien
gcaaagccgcggttcagttgggtct

SEQ ID NO: 5704938 - DNA, 25 bp, Homo sapien
actcggttgaggtgaccccgtagga

SEQ ID NO: 5704939 - DNA, 25 bp, Homo sapien
caggccctggctcagctcccggcca

SEQ ID NO: 5704940 - DNA, 25 bp, Homo sapien
ggtctcggctgcggttctccccacc

SEQ ID NO: 5704941 - DNA, 25 bp, Homo sapien
cggtagtcgtggtctcggctgcggt

SEQ ID NO: 5704942 - DNA, 25 bp, Homo sapien
ccgcgtagggtgccagggcccccag

SEQ ID NO: 5704943 - DNA, 25 bp, Homo sapien
tcgccgtctcgggggaagcctggcg

SEQ ID NO: 5704944 - DNA, 25 bp, Homo sapien
agcagctgggctgcctccacgatgg

SEQ ID NO: 5704945 - DNA, 25 bp, Homo sapien
cacgttggaggaggacagcaccgcg

SEQ ID NO: 5704946 - DNA, 25 bp, Homo sapien
cgttttctgacaagtgggctcgccg

SEQ ID NO: 5704947 - DNA, 25 bp, Homo sapien
cactctgctcctcagatgagtcgtc

SEQ ID NO: 5704948 - DNA, 25 bp, Homo sapien
atagtgagtggtgggtgcagggcct

SEQ ID NO: 5704949 - DNA, 25 bp, Homo sapien
gagctgataggctggaagctatttt

SEQ ID NO: 5704950 - DNA, 25 bp, Homo sapien
gaagatttgttccgcatcagccgaa

SEQ ID NO: 5704951 - DNA, 25 bp, Homo sapien
cccttggtgcccttgaggtagccat

SEQ ID NO: 5704952 - DNA, 25 bp, Homo sapien
tttggtcaagccctctctggctggg

SEQ ID NO: 5704953 - DNA, 25 bp, Homo sapien
ccacagaggcagcactgatgcgact

SEQ ID NO: 5704954 - DNA, 25 bp, Homo sapien
actaggatgggtagggctctggagc

SEQ ID NO: 5704955 - DNA, 25 bp, Homo sapien
ttgggaggcctgtgagatggcccac

SEQ ID NO: 5704956 - DNA, 25 bp, Homo sapien
ggatatgaacggtagtccatgtccc

SEQ ID NO: 5704957 - DNA, 25 bp, Homo sapien
gcggccagtcctgtcaccacgacca

SEQ ID NO: 5704958 - DNA, 25 bp, Homo sapien
ggtgccggatgagcgcctctttgct

SEQ ID NO: 5704959 - DNA, 25 bp, Homo sapien
tcgggggaagcctggcgggccggtg

SEQ ID NO: 5704960 - DNA, 25 bp, Homo sapien
tttttttttttgcagacttttcagc

SEQ ID NO: 5704961 - DNA, 25 bp, Homo sapien
aggcaaagccgcggttcagttgggt

SEQ ID NO: 5704962 - DNA, 25 bp, Homo sapien
gaggtggcccaggtaccctccccac

SEQ ID NO: 5704963 - DNA, 25 bp, Homo sapien
aggccccgtcccagccatccaacac

SEQ ID NO: 5704964 - DNA, 25 bp, Homo sapien
gccttcgggggctgctggggcccct

SEQ ID NO: 5704965 - DNA, 25 bp, Homo sapien
ggccaatttcgggagatccatgctg

SEQ ID NO: 5704966 - DNA, 25 bp, Homo sapien
ctctccccgctgtaggctgccacca

SEQ ID NO: 5704967 - DNA, 25 bp, Homo sapien
cggagccccgcacccgtgtttgggc

SEQ ID NO: 5704968 - DNA, 25 bp, Homo sapien
gatagtcctggtcccgatagtcgcc

SEQ ID NO: 5704969 - DNA, 25 bp, Homo sapien
ctgctcctcagatgagtcgtcatag

SEQ ID NO: 5704970 - DNA, 25 bp, Homo sapien
ccgtacttcctcctcttgggctctg

SEQ ID NO: 5704971 - DNA, 25 bp, Homo sapien
cagggcttgggaggccaggactccc

SEQ ID NO: 5704972 - DNA, 25 bp, Homo sapien
ccccgctgtaggctgccaccagtcc

SEQ ID NO: 5704973 - DNA, 25 bp, Homo sapien
ggcccttggtgcccttgaggtagcc

SEQ ID NO: 5704974 - DNA, 25 bp, Homo sapien
cctctttccagcccatggcctgcag

SEQ ID NO: 5704975 - DNA, 25 bp, Homo sapien
tagcggccagtcctgtcaccacgac

SEQ ID NO: 5704976 - DNA, 25 bp, Homo sapien
gggctgcggcaggggaagcaggccc

SEQ ID NO: 5704977 - DNA, 25 bp, Homo sapien
gcggttcagttgggtctgcttgtcc

SEQ ID NO: 5704978 - DNA, 25 bp, Homo sapien
ttgctggggaactggcgtcggcaga

SEQ ID NO: 5704979 - DNA, 25 bp, Homo sapien
ctgctggctctgagcattgtagtaa

SEQ ID NO: 5704980 - DNA, 25 bp, Homo sapien
tcactgtagtgcatcgacaccttct

SEQ ID NO: 5704981 - DNA, 25 bp, Homo sapien
ctgatagggccttcgggggctgctg

SEQ ID NO: 5704982 - DNA, 25 bp, Homo sapien
tctctgagcttggctccgagccctg

SEQ ID NO: 5704983 - DNA, 25 bp, Homo sapien
atggaatccatggtgctgtgtgggt

SEQ ID NO: 5704984 - DNA, 25 bp, Homo sapien
tgagtggtgggtgcagggcctgcag

SEQ ID NO: 5704985 - DNA, 25 bp, Homo sapien
tgtaggctgccaccagtcctcgcgg

SEQ ID NO: 5704986 - DNA, 25 bp, Homo sapien
cagacatcacctctgcccgccgcca

SEQ ID NO: 5704987 - DNA, 25 bp, Homo sapien
gcatctgcagtggctgactcccgcc

SEQ ID NO: 5704988 - DNA, 25 bp, Homo sapien
cgcagcaatggcagtgctggccaca

SEQ ID NO: 5704989 - DNA, 25 bp, Homo sapien
ttgaagctgctcactgggcctcgtt

SEQ ID NO: 5704990 - DNA, 25 bp, Homo sapien
acaaaagtcaccacctcaatttgat

SEQ ID NO: 5704991 - DNA, 25 bp, Homo sapien
ttctagctcgttttctgacaagtgg

SEQ ID NO: 5704992 - DNA, 25 bp, Homo sapien
cttgcacgccgtgcgactgcagctg

SEQ ID NO: 5704993 - DNA, 25 bp, Homo sapien
caccatcatcctgcgagcggtcagt

SEQ ID NO: 5704994 - DNA, 25 bp, Homo sapien
actcgacgaaggcgaagccccggct

SEQ ID NO: 5704995 - DNA, 25 bp, Homo sapien
ttggaggaggacagcaccgcgtagg

SEQ ID NO: 5704996 - DNA, 25 bp, Homo sapien
agtggggctggtagccggtgggaga

SEQ ID NO: 5704997 - DNA, 25 bp, Homo sapien
ccagcctgggtgatgcttcctgcag

SEQ ID NO: 5704998 - DNA, 25 bp, Homo sapien
tagctgtagtcgaccggcggctcct

SEQ ID NO: 5704999 - DNA, 25 bp, Homo sapien
cccaattttccaacaaaagtcacca

SEQ ID NO: 5705000 - DNA, 25 bp, Homo sapien
tttctttttgtttgttgagactgcg

SEQ ID NO: 5705001 - DNA, 25 bp, Homo sapien
tcctcttgggctctggcggctcggg

SEQ ID NO: 5705002 - DNA, 25 bp, Homo sapien
ccgccgccacctcctccaactctcc

SEQ ID NO: 5705003 - DNA, 25 bp, Homo sapien
gcttccatccatcgtgtagcgtcct

SEQ ID NO: 5705004 - DNA, 25 bp, Homo sapien
tgttgagggagtgctgattggcttc

SEQ ID NO: 5705005 - DNA, 25 bp, Homo sapien
cgcatcagccgaacctcccgtgctt

SEQ ID NO: 5705006 - DNA, 25 bp, Homo sapien
taccatgatctgccagcctgggtga

SEQ ID NO: 5705007 - DNA, 25 bp, Homo sapien
gatgttgagggagtgctgattggct

SEQ ID NO: 5705008 - DNA, 25 bp, Homo sapien
gcccgtcccgagtaggctgctcgaa

SEQ ID NO: 5705009 - DNA, 25 bp, Homo sapien
tcccggccacccagtggcagtgtct

SEQ ID NO: 5705010 - DNA, 25 bp, Homo sapien
agccagtcctcattgatcttgggct

SEQ ID NO: 5705011 - DNA, 25 bp, Homo sapien
gaatcctccgcactctgctcctcag

SEQ ID NO: 5705012 - DNA, 25 bp, Homo sapien
caaggccccgtcccagccatccaac

SEQ ID NO: 5705013 - DNA, 25 bp, Homo sapien
tcgtaggaatcctccgcactctgct

SEQ ID NO: 5705014 - DNA, 25 bp, Homo sapien
gggcccagcgttccatgtccttggc

SEQ ID NO: 5705015 - DNA, 25 bp, Homo sapien
ttcctgcagggactcttctcggccc

SEQ ID NO: 5705016 - DNA, 25 bp, Homo sapien
cgtgcacccaggccggagccccgca

SEQ ID NO: 5705017 - DNA, 25 bp, Homo sapien
gggcgcgagagaaagcctgcatcga

SEQ ID NO: 5705018 - DNA, 25 bp, Homo sapien
ggagccctgagagctgctggtgccg

SEQ ID NO: 5705019 - DNA, 25 bp, Homo sapien
acccagtggcagtgtctgctgatcc

SEQ ID NO: 5705020 - DNA, 25 bp, Homo sapien
tgtgtgggttcaggttgcgcaaaat

SEQ ID NO: 5705021 - DNA, 25 bp, Homo sapien
gctcccggccacccagtggcagtgt

SEQ ID NO: 5705022 - DNA, 25 bp, Homo sapien
ggctgtcaaggaagggctcccagac

SEQ ID NO: 5705023 - DNA, 25 bp, Homo sapien
cccgcacccgtgtttgggcctcgat

SEQ ID NO: 5705024 - DNA, 25 bp, Homo sapien
agcatgacgatgttactggccttct

SEQ ID NO: 5705025 - DNA, 25 bp, Homo sapien
ttcattggaggccatgtccctctta

SEQ ID NO: 5705026 - DNA, 25 bp, Homo sapien
tcctcccgctcagggcccccacgct

SEQ ID NO: 5705027 - DNA, 25 bp, Homo sapien
atgcttcctgcagggactcttctcg

SEQ ID NO: 5705028 - DNA, 25 bp, Homo sapien
tattgcacagccagtcctcattgat

SEQ ID NO: 5705029 - DNA, 25 bp, Homo sapien
tcggtgagcttctcctcccgctcag

SEQ ID NO: 5705030 - DNA, 25 bp, Homo sapien
tcagccgctggctccgtttcacttc

SEQ ID NO: 5705031 - DNA, 25 bp, Homo sapien
agcagaactaggatgggtagggctc

SEQ ID NO: 5705032 - DNA, 25 bp, Homo sapien
catagccagcatctgcagtggctga

SEQ ID NO: 5705033 - DNA, 25 bp, Homo sapien
aacatgtggagaagttgctcttgaa

SEQ ID NO: 5705034 - DNA, 25 bp, Homo sapien
gccatgggcatagagggaagactct

SEQ ID NO: 5705035 - DNA, 25 bp, Homo sapien
cctcctccccttgctcggtccgata

SEQ ID NO: 5705036 - DNA, 25 bp, Homo sapien
ccttgaggtagccatgggcatagag

SEQ ID NO: 5705037 - DNA, 25 bp, Homo sapien
ggcctgcaggatctgcagcagctgg

SEQ ID NO: 5705038 - DNA, 25 bp, Homo sapien
ccatactcgcgaggatatgaacggt

SEQ ID NO: 5705039 - DNA, 25 bp, Homo sapien
ggttttgcttgtggagccctgagag

SEQ ID NO: 5705040 - DNA, 25 bp, Homo sapien
agacgtcgggaacagggtactggct

SEQ ID NO: 5705041 - DNA, 25 bp, Homo sapien
gtggagccctgagagctgctggtgc

SEQ ID NO: 5705042 - DNA, 25 bp, Homo sapien
cattcttctctagtgcttctagctc

SEQ ID NO: 5705043 - DNA, 25 bp, Homo sapien
ggctgattgttggtagatgccagga

SEQ ID NO: 5705044 - DNA, 25 bp, Homo sapien
tgctggccacagaggcagcactgat

SEQ ID NO: 5705045 - DNA, 25 bp, Homo sapien
cagatttgagcacagcgggtgacat

SEQ ID NO: 5705046 - DNA, 25 bp, Homo sapien
gggagctgataggctggaagctatt

SEQ ID NO: 5705047 - DNA, 25 bp, Homo sapien
ctgatccagcctcgtgccgaggggc

SEQ ID NO: 5705048 - DNA, 25 bp, Homo sapien
ccttatgtccgtcggccgactgctc

SEQ ID NO: 5705049 - DNA, 25 bp, Homo sapien
gaggccaggactccctgggcctggt

SEQ ID NO: 5705050 - DNA, 25 bp, Homo sapien
agggctctggagctcagatttgagc

SEQ ID NO: 5705051 - DNA, 25 bp, Homo sapien
gagctgctggtgccggatgagcgcc

SEQ ID NO: 5705052 - DNA, 25 bp, Homo sapien
ttgggcacgccacatttgaagcact

SEQ ID NO: 5705053 - DNA, 25 bp, Homo sapien
gaggatatgaacggtagtccatgtc

SEQ ID NO: 5705054 - DNA, 25 bp, Homo sapien
acgatggtggagagctggatgaagg

SEQ ID NO: 5705055 - DNA, 25 bp, Homo sapien
caaggaagggctcccagacatcacc

SEQ ID NO: 5705056 - DNA, 25 bp, Homo sapien
ctgctcgaagtctacagaggctgtg

SEQ ID NO: 5705057 - DNA, 25 bp, Homo sapien
cgcacccgtgtttgggcctcgatag

SEQ ID NO: 5705058 - DNA, 25 bp, Homo sapien
gctggaagctatttttgaagttttc

SEQ ID NO: 5705059 - DNA, 25 bp, Homo sapien
gaggtgaccccgtaggagctgcccc

SEQ ID NO: 5705060 - DNA, 25 bp, Homo sapien
ggccggtctgggggtcatagtagta

SEQ ID NO: 5705061 - DNA, 25 bp, Homo sapien
agctgccccgtgcacccaggccgga

SEQ ID NO: 5705062 - DNA, 25 bp, Homo sapien
ggatgggtagggctctggagctcag

SEQ ID NO: 5705063 - DNA, 25 bp, Homo sapien
ctcttctcggcccgggctgtcaagg

SEQ ID NO: 5705064 - DNA, 25 bp, Homo sapien
acctctgcccgccgccacctcctcc

SEQ ID NO: 5705065 - DNA, 25 bp, Homo sapien
gatgcgactgccttcattggaggcc

SEQ ID NO: 5705066 - DNA, 25 bp, Homo sapien
cggtccgatagtcctggtcccgata

SEQ ID NO: 5705067 - DNA, 25 bp, Homo sapien
gaaggcaaagccgcggttcagttgg

SEQ ID NO: 5705068 - DNA, 25 bp, Homo sapien
ggctggccgacaagagcaaggcccc

SEQ ID NO: 5705069 - DNA, 25 bp, Homo sapien
gggtgcagggcctgcaggatctgca

SEQ ID NO: 5705070 - DNA, 25 bp, Homo sapien
ttccatgtccttggcaatctgttga

SEQ ID NO: 5705071 - DNA, 25 bp, Homo sapien
gcctgcatcgacacagagtcggccc

SEQ ID NO: 5705072 - DNA, 25 bp, Homo sapien
cttttattacaaaacaggacgtgat

SEQ ID NO: 5705073 - DNA, 25 bp, Homo sapien
ccctgggcctggtagggctgcggca

SEQ ID NO: 5705074 - DNA, 25 bp, Homo sapien
tacttttctctgcgttcagctgcac

SEQ ID NO: 5705075 - DNA, 25 bp, Homo sapien
gtcaccattgtcttgtgcagtgtct

SEQ ID NO: 5705076 - DNA, 25 bp, Homo sapien
ggatgagcgcctctttgctggggaa

SEQ ID NO: 5705077 - DNA, 25 bp, Homo sapien
gccgactgctccagggcgggaacat

SEQ ID NO: 5705078 - DNA, 25 bp, Homo sapien
cccctttggttccagtgatgccagg

SEQ ID NO: 5705079 - DNA, 25 bp, Homo sapien
gagccccgcacccgtgtttgggcct

SEQ ID NO: 5705080 - DNA, 25 bp, Homo sapien
ccatggcctgcagcatccgactgcc

SEQ ID NO: 5705081 - DNA, 25 bp, Homo sapien
tgatggtgtcattggcgttctctga

SEQ ID NO: 5705082 - DNA, 25 bp, Homo sapien
tctgccagcctgggtgatgcttcct

SEQ ID NO: 5705083 - DNA, 25 bp, Homo sapien
atcctccgcactctgctcctcagat

SEQ ID NO: 5705084 - DNA, 25 bp, Homo sapien
actggcgtcggcagagcagacaggc

SEQ ID NO: 5705085 - DNA, 25 bp, Homo sapien
ctttgctggggaactggcgtcggca

SEQ ID NO: 5705086 - DNA, 25 bp, Homo sapien
gactcttctcggcccgggctgtcaa

SEQ ID NO: 5705087 - DNA, 25 bp, Homo sapien
ccggtggggctgtgcctgtgccgcc

SEQ ID NO: 5705088 - DNA, 25 bp, Homo sapien
ggcctcgggacctgctccagtggga

SEQ ID NO: 5705089 - DNA, 25 bp, Homo sapien
atcatcctgcgagcggtcagtggct

SEQ ID NO: 5705090 - DNA, 25 bp, Homo sapien
agcgttccatgtccttggcaatctg

SEQ ID NO: 5705091 - DNA, 25 bp, Homo sapien
tcgaggatggcatagccagcatctg

SEQ ID NO: 5705092 - DNA, 25 bp, Homo sapien
tcaaggttttgcttgtggagccctg

SEQ ID NO: 5705093 - DNA, 25 bp, Homo sapien
gccctctttccagcccatggcctgc

SEQ ID NO: 5705094 - DNA, 25 bp, Homo sapien
agggcctgcaggatctgcagcagct

SEQ ID NO: 5705095 - DNA, 25 bp, Homo sapien
gctccgtttcacttcccagccaccc

SEQ ID NO: 5705096 - DNA, 25 bp, Homo sapien
ctgcagtggctgactcccgcctctc

SEQ ID NO: 5705097 - DNA, 25 bp, Homo sapien
tagccatgggcatagagggaagact

SEQ ID NO: 5705098 - DNA, 25 bp, Homo sapien
tgacttgggcacgccacatttgaag

SEQ ID NO: 5705099 - DNA, 25 bp, Homo sapien
atagtcgccgtctcgggggaagcct

SEQ ID NO: 5705100 - DNA, 25 bp, Homo sapien
ccgtgcgactgcagctggccacgga

SEQ ID NO: 5705101 - DNA, 25 bp, Homo sapien
acctgaagatttgttccgcatcagc

SEQ ID NO: 5705102 - DNA, 25 bp, Homo sapien
agctcgttttctgacaagtgggctc

SEQ ID NO: 5705103 - DNA, 25 bp, Homo sapien
cgggaacagggtactggctgtagga

SEQ ID NO: 5705104 - DNA, 25 bp, Homo sapien
agtgactaaactcgacgaaggcgaa

SEQ ID NO: 5705105 - DNA, 25 bp, Homo sapien
tgctgctaccatgatctgccagcct

SEQ ID NO: 5705106 - DNA, 25 bp, Homo sapien
ctggccaatttcgggagatccatgc

SEQ ID NO: 5705107 - DNA, 25 bp, Homo sapien
ccatgtccttggcaatctgttgagc

SEQ ID NO: 5705108 - DNA, 25 bp, Homo sapien
gcgagagaaagcctgcatcgacaca

SEQ ID NO: 5705109 - DNA, 25 bp, Homo sapien
tgtgccgccgccgccgcctacgctg

SEQ ID NO: 5705110 - DNA, 25 bp, Homo sapien
agccacccccgctgctgctaccatg

SEQ ID NO: 5705111 - DNA, 25 bp, Homo sapien
cctgtgccgccgccgccgcctacgc

SEQ ID NO: 5705112 - DNA, 25 bp, Homo sapien
ccaggccgctgccctctttccagcc

SEQ ID NO: 5705113 - DNA, 25 bp, Homo sapien
tgggggtcatagtagtagccggagg

SEQ ID NO: 5705114 - DNA, 25 bp, Homo sapien
agtctacagaggctgtggatatgcc

SEQ ID NO: 5705115 - DNA, 25 bp, Homo sapien
agactggaggcagatcggggggagg

SEQ ID NO: 5705116 - DNA, 25 bp, Homo sapien
cctcggaggtggcccaggtaccctc

SEQ ID NO: 5705117 - DNA, 25 bp, Homo sapien
cggggaggcctcgtaggaatcctcc

SEQ ID NO: 5705118 - DNA, 25 bp, Homo sapien
ggagtgggctggccgacaagagcaa

SEQ ID NO: 5705119 - DNA, 25 bp, Homo sapien
ttgaagttctggacgccacacttat

SEQ ID NO: 5705120 - DNA, 25 bp, Homo sapien
tcgtcactggccaatttcgggagat

SEQ ID NO: 5705121 - DNA, 25 bp, Homo sapien
gcagtgtctccttgtaggactcggt

SEQ ID NO: 5705122 - DNA, 25 bp, Homo sapien
ccctgccccaggatggacacccaac

SEQ ID NO: 5705123 - DNA, 25 bp, Homo sapien
taggatgggtagggctctggagctc

SEQ ID NO: 5705124 - DNA, 25 bp, Homo sapien
tagtgcttctagctcgttttctgac

SEQ ID NO: 5705125 - DNA, 25 bp, Homo sapien
ggacgtgatcccagcccaattttcc

SEQ ID NO: 5705126 - DNA, 25 bp, Homo sapien
ctggatgaaggcaaagccgcggttc

SEQ ID NO: 5705127 - DNA, 25 bp, Homo sapien
gggcttgggaggccaggactccctg

SEQ ID NO: 5705128 - DNA, 25 bp, Homo sapien
gggtactggctgtaggattcctggg

SEQ ID NO: 5705129 - DNA, 25 bp, Homo sapien
cgccgtgcgactgcagctggccacg

SEQ ID NO: 5705130 - DNA, 25 bp, Homo sapien
tgagtcgtcatagtcatgcttgccc

SEQ ID NO: 5705131 - DNA, 25 bp, Homo sapien
agtgggctcgccggtgaatctcaag

SEQ ID NO: 5705132 - DNA, 25 bp, Homo sapien
gcggctcctcggaggtggcccaggt

SEQ ID NO: 5705133 - DNA, 25 bp, Homo sapien
gacgtcacacacatagaacgcccgg

SEQ ID NO: 5705134 - DNA, 25 bp, Homo sapien
ccgggcgttctatgtgtgtgacgtc

SEQ ID NO: 5705135 - DNA, 25 bp, Homo sapien
gattgttggtgtgtgttttcgtcgt

SEQ ID NO: 5705136 - DNA, 25 bp, Homo sapien
acgacgaaaacacacaccaacaatc

SEQ ID NO: 5705137 - DNA, 25 bp, Homo sapien
gttgtccagctttttattccagtca

SEQ ID NO: 5705138 - DNA, 25 bp, Homo sapien
accccctattctccccccacatctc

SEQ ID NO: 5705139 - DNA, 25 bp, Homo sapien
tcctttggaccaaagcagacttctg

SEQ ID NO: 5705140 - DNA, 25 bp, Homo sapien
acctgctgccggatttctccattca

SEQ ID NO: 5705141 - DNA, 25 bp, Homo sapien
cagttctaaacctacattctcgatt

SEQ ID NO: 5705142 - DNA, 25 bp, Homo sapien
tcattcaagtgaagaaaactgactt

SEQ ID NO: 5705143 - DNA, 25 bp, Homo sapien
tttcctgtgatccagctttgcttcc

SEQ ID NO: 5705144 - DNA, 25 bp, Homo sapien
gtcatgtgcactaagtactcttttt

SEQ ID NO: 5705145 - DNA, 25 bp, Homo sapien
tctgccggaaggagagcatcagtac

SEQ ID NO: 5705146 - DNA, 25 bp, Homo sapien
tgaggttttacaattgtttcttaca

SEQ ID NO: 5705147 - DNA, 25 bp, Homo sapien
cagctttgcttcctgagcccaatca

SEQ ID NO: 5705148 - DNA, 25 bp, Homo sapien
agaagtcacatgaactctgctcagc

SEQ ID NO: 5705149 - DNA, 25 bp, Homo sapien
aaggacggggacaggcccaagatcc

SEQ ID NO: 5705150 - DNA, 25 bp, Homo sapien
gttagcaagactgcagcagttgctg

SEQ ID NO: 5705151 - DNA, 25 bp, Homo sapien
ttacttatctgggtccttcaacaac

SEQ ID NO: 5705152 - DNA, 25 bp, Homo sapien
tcccgtggcaccttgctcaggacct

SEQ ID NO: 5705153 - DNA, 25 bp, Homo sapien
tctgtgtgtttttaaggccagccac

SEQ ID NO: 5705154 - DNA, 25 bp, Homo sapien
ctgcaaacccgaagagcgctttcgg

SEQ ID NO: 5705155 - DNA, 25 bp, Homo sapien
gacagccccgaagacgccgacctct

SEQ ID NO: 5705156 - DNA, 25 bp, Homo sapien
tctgttctcagaacagacttttcaa

SEQ ID NO: 5705157 - DNA, 25 bp, Homo sapien
caggagccctacgtctgcaaacccg

SEQ ID NO: 5705158 - DNA, 25 bp, Homo sapien
ttctatagaaattagaagctttctg

SEQ ID NO: 5705159 - DNA, 25 bp, Homo sapien
ctggtcctgcttgaaggtttgtcca

SEQ ID NO: 5705160 - DNA, 25 bp, Homo sapien
catcagtacaagttctttgtggatg

SEQ ID NO: 5705161 - DNA, 25 bp, Homo sapien
gtctgggtcaggaagatgtcctttg

SEQ ID NO: 5705162 - DNA, 25 bp, Homo sapien
ccttgcgttcttgccgcggcttgcc

SEQ ID NO: 5705163 - DNA, 25 bp, Homo sapien
cctggctatggaactaaatacagtg

SEQ ID NO: 5705164 - DNA, 25 bp, Homo sapien
ttctttgtggatggtcagtggacgc

SEQ ID NO: 5705165 - DNA, 25 bp, Homo sapien
taaagctcccgcccaggctcggcca

SEQ ID NO: 5705166 - DNA, 25 bp, Homo sapien
cttaagccaaaaatgaatgctaact

SEQ ID NO: 5705167 - DNA, 25 bp, Homo sapien
ctcagaacagacttttcaacctgct

SEQ ID NO: 5705168 - DNA, 25 bp, Homo sapien
cagaggtggctggctctgcagcctt

SEQ ID NO: 5705169 - DNA, 25 bp, Homo sapien
gaggcctggctatggaactaaatac

SEQ ID NO: 5705170 - DNA, 25 bp, Homo sapien
ggttttacaattgtttcttacagtc

SEQ ID NO: 5705171 - DNA, 25 bp, Homo sapien
tcagtggacgcacgacccttccgag

SEQ ID NO: 5705172 - DNA, 25 bp, Homo sapien
atttcatacctgccctggtcctgct

SEQ ID NO: 5705173 - DNA, 25 bp, Homo sapien
gatctgccggaaggagagcatcagt

SEQ ID NO: 5705174 - DNA, 25 bp, Homo sapien
gtgaggcgccgtccgccttccctgt

SEQ ID NO: 5705175 - DNA, 25 bp, Homo sapien
agattgtctctcggctccagggagg

SEQ ID NO: 5705176 - DNA, 25 bp, Homo sapien
cctggtgctccgactccttccgcag

SEQ ID NO: 5705177 - DNA, 25 bp, Homo sapien
ccatggctttgagcctcggggactc

SEQ ID NO: 5705178 - DNA, 25 bp, Homo sapien
tggtgctccgactccttccgcaggc

SEQ ID NO: 5705179 - DNA, 25 bp, Homo sapien
gtggccataagacgccccggaggga

SEQ ID NO: 5705180 - DNA, 25 bp, Homo sapien
tttccagtcatctgtgtgtttttaa

SEQ ID NO: 5705181 - DNA, 25 bp, Homo sapien
ttttcaacctgctgccggatttctc

SEQ ID NO: 5705182 - DNA, 25 bp, Homo sapien
tgcatgaggctgggtgcagttctaa

SEQ ID NO: 5705183 - DNA, 25 bp, Homo sapien
ttacaaggtcccgtggcaccttgct

SEQ ID NO: 5705184 - DNA, 25 bp, Homo sapien
ggatctgcagccctggccccgcggt

SEQ ID NO: 5705185 - DNA, 25 bp, Homo sapien
cccctattctccccccacatctcct

SEQ ID NO: 5705186 - DNA, 25 bp, Homo sapien
ttcagaagacatttcatacctgccc

SEQ ID NO: 5705187 - DNA, 25 bp, Homo sapien
cgcaggctccttgggacccgcggtt

SEQ ID NO: 5705188 - DNA, 25 bp, Homo sapien
ggctccagggaggtgtcatttctat

SEQ ID NO: 5705189 - DNA, 25 bp, Homo sapien
catgctgaaccacctatacgcgctg

SEQ ID NO: 5705190 - DNA, 25 bp, Homo sapien
ctcaggactgaccagttagctggca

SEQ ID NO: 5705191 - DNA, 25 bp, Homo sapien
gggaaacagggactgaggccacaca

SEQ ID NO: 5705192 - DNA, 25 bp, Homo sapien
ttctgggaaacagggactgaggcca

SEQ ID NO: 5705193 - DNA, 25 bp, Homo sapien
tagttagcaagactgcagcagttgc

SEQ ID NO: 5705194 - DNA, 25 bp, Homo sapien
ctccgatgtgtctgagctgtccagt

SEQ ID NO: 5705195 - DNA, 25 bp, Homo sapien
cagggactgaggccacacatcattt

SEQ ID NO: 5705196 - DNA, 25 bp, Homo sapien
agctggatgatcctcaggactgacc

SEQ ID NO: 5705197 - DNA, 25 bp, Homo sapien
gctatggaactaaatacagtgttgg

SEQ ID NO: 5705198 - DNA, 25 bp, Homo sapien
aggatggagtgatggtgctcagcgc

SEQ ID NO: 5705199 - DNA, 25 bp, Homo sapien
ttcctgcagtgaggcgccgtccgcc

SEQ ID NO: 5705200 - DNA, 25 bp, Homo sapien
aaggaatgtagaacttgacagcagc

SEQ ID NO: 5705201 - DNA, 25 bp, Homo sapien
gaaaggaatgtagaacttgacagca

SEQ ID NO: 5705202 - DNA, 25 bp, Homo sapien
aaatgaatgctaactcctttgccag

SEQ ID NO: 5705203 - DNA, 25 bp, Homo sapien
ttgccagtaaaattctgggaaacag

SEQ ID NO: 5705204 - DNA, 25 bp, Homo sapien
tcctgatggacagccccgaagacgc

SEQ ID NO: 5705205 - DNA, 25 bp, Homo sapien
ttgtttcttacagtcatgtgcacta

SEQ ID NO: 5705206 - DNA, 25 bp, Homo sapien
agtatttacttggtatacctgagtt

SEQ ID NO: 5705207 - DNA, 25 bp, Homo sapien
cttaaggccattttttaagtcacca

SEQ ID NO: 5705208 - DNA, 25 bp, Homo sapien
atacaagcccatatgaagagctggg

SEQ ID NO: 5705209 - DNA, 25 bp, Homo sapien
ttgtagccatcctggatctgccgga

SEQ ID NO: 5705210 - DNA, 25 bp, Homo sapien
acgcagctcagtttcccgggagtcg

SEQ ID NO: 5705211 - DNA, 25 bp, Homo sapien
ccccgcggtgcatgaggctgggtgc

SEQ ID NO: 5705212 - DNA, 25 bp, Homo sapien
taatggtggattcccaaaagtgctc

SEQ ID NO: 5705213 - DNA, 25 bp, Homo sapien
gatggagtgatggtgctcagcgcaa

SEQ ID NO: 5705214 - DNA, 25 bp, Homo sapien
ataatctgttctcagaacagacttt

SEQ ID NO: 5705215 - DNA, 25 bp, Homo sapien
gtcccttgctcagggtccctttcct

SEQ ID NO: 5705216 - DNA, 25 bp, Homo sapien
ggcctggctatggaactaaatacag

SEQ ID NO: 5705217 - DNA, 25 bp, Homo sapien
ccagaagccacaataactttgtagc

SEQ ID NO: 5705218 - DNA, 25 bp, Homo sapien
cccgggagtcgccacagatgtaccc

SEQ ID NO: 5705219 - DNA, 25 bp, Homo sapien
acatcatttccagtcatctgtgtgt

SEQ ID NO: 5705220 - DNA, 25 bp, Homo sapien
ggaccctaccatcaggagccctacg

SEQ ID NO: 5705221 - DNA, 25 bp, Homo sapien
tgcctgtccttcaaaatcaacaaca

SEQ ID NO: 5705222 - DNA, 25 bp, Homo sapien
atagaaattagaagctttctgattt

SEQ ID NO: 5705223 - DNA, 25 bp, Homo sapien
agaaggaggaattcctggcctggca

SEQ ID NO: 5705224 - DNA, 25 bp, Homo sapien
ttctcccccaggaccctaccatcag

SEQ ID NO: 5705225 - DNA, 25 bp, Homo sapien
tctagatgaggttttacaattgttt

SEQ ID NO: 5705226 - DNA, 25 bp, Homo sapien
gactgtacattgctcatttcacact

SEQ ID NO: 5705227 - DNA, 25 bp, Homo sapien
ctgtacattgctcatttcacactct

SEQ ID NO: 5705228 - DNA, 25 bp, Homo sapien
ccaggcagagcagctcctgcagcgc

SEQ ID NO: 5705229 - DNA, 25 bp, Homo sapien
ccctgccgactcagccggaaccggc

SEQ ID NO: 5705230 - DNA, 25 bp, Homo sapien
gtcaccttgatggacaagtttcaat

SEQ ID NO: 5705231 - DNA, 25 bp, Homo sapien
ggaaagtgtcggtttatcttcgcgc

SEQ ID NO: 5705232 - DNA, 25 bp, Homo sapien
ttacaattgtttcttacagtcatgt

SEQ ID NO: 5705233 - DNA, 25 bp, Homo sapien
ccactccgaggaaatcaaggcacca

SEQ ID NO: 5705234 - DNA, 25 bp, Homo sapien
gataaagctcccgcccaggctcggc

SEQ ID NO: 5705235 - DNA, 25 bp, Homo sapien
ctttgtagccatcctggatctgccg

SEQ ID NO: 5705236 - DNA, 25 bp, Homo sapien
tgtcggtttatcttcgcgccccttg

SEQ ID NO: 5705237 - DNA, 25 bp, Homo sapien
ggcaccttgctcaggacctctgccc

SEQ ID NO: 5705238 - DNA, 25 bp, Homo sapien
ccttgctcaggacctctgcccctag

SEQ ID NO: 5705239 - DNA, 25 bp, Homo sapien
accaaagcagacttctgtatacgca

SEQ ID NO: 5705240 - DNA, 25 bp, Homo sapien
ggaaggagagcatcagtacaagttc

SEQ ID NO: 5705241 - DNA, 25 bp, Homo sapien
tgtgcactaagtactctttttgtaa

SEQ ID NO: 5705242 - DNA, 25 bp, Homo sapien
gtctagaagtcacatgaactctgct

SEQ ID NO: 5705243 - DNA, 25 bp, Homo sapien
cgactcagccggaaccggctcccgg

SEQ ID NO: 5705244 - DNA, 25 bp, Homo sapien
ctgcagcagttgctgttgcttattc

SEQ ID NO: 5705245 - DNA, 25 bp, Homo sapien
ggacagctcggggggcaccaaggac

SEQ ID NO: 5705246 - DNA, 25 bp, Homo sapien
tattctccccccacatctcctccag

SEQ ID NO: 5705247 - DNA, 25 bp, Homo sapien
ggaggtgtcatttctatagaaatta

SEQ ID NO: 5705248 - DNA, 25 bp, Homo sapien
gctttgcttcctgagcccaatcacg

SEQ ID NO: 5705249 - DNA, 25 bp, Homo sapien
cgcaacccaccggtacaagaagaag

SEQ ID NO: 5705250 - DNA, 25 bp, Homo sapien
agaaaactgactttgaagtatttga

SEQ ID NO: 5705251 - DNA, 25 bp, Homo sapien
ccccccacatctcctccaggtcatc

SEQ ID NO: 5705252 - DNA, 25 bp, Homo sapien
gctctgcagccttaaggccattttt

SEQ ID NO: 5705253 - DNA, 25 bp, Homo sapien
ttttaagtcaccacgtctagaagtc

SEQ ID NO: 5705254 - DNA, 25 bp, Homo sapien
cagctcctgcagcgcctcggtctgt

SEQ ID NO: 5705255 - DNA, 25 bp, Homo sapien
atgccctttgctcctggtgggagag

SEQ ID NO: 5705256 - DNA, 25 bp, Homo sapien
ggccacacatcatttccagtcatct

SEQ ID NO: 5705257 - DNA, 25 bp, Homo sapien
gagtcccttgctcagggtccctttc

SEQ ID NO: 5705258 - DNA, 25 bp, Homo sapien
gagtctgggtcaggaagatgtcctt

SEQ ID NO: 5705259 - DNA, 25 bp, Homo sapien
acccgaagagcgctttcgggcaccc

SEQ ID NO: 5705260 - DNA, 25 bp, Homo sapien
aggacacggggatttcctgtgatcc

SEQ ID NO: 5705261 - DNA, 25 bp, Homo sapien
gtccgccttccctgtgtccccgcag

SEQ ID NO: 5705262 - DNA, 25 bp, Homo sapien
ggatgatcctcaggactgaccagtt

SEQ ID NO: 5705263 - DNA, 25 bp, Homo sapien
aaaatcacacagcgtgattttacaa

SEQ ID NO: 5705264 - DNA, 25 bp, Homo sapien
agagaaggaggaattcctggcctgg

SEQ ID NO: 5705265 - DNA, 25 bp, Homo sapien
tgtgacagtcctcctagcaccccca

SEQ ID NO: 5705266 - DNA, 25 bp, Homo sapien
actccgaggaaatcaaggcaccaga

SEQ ID NO: 5705267 - DNA, 25 bp, Homo sapien
ccgggagtcccttgctcagggtccc

SEQ ID NO: 5705268 - DNA, 25 bp, Homo sapien
tcccgcccaggctcggccaacggtg

SEQ ID NO: 5705269 - DNA, 25 bp, Homo sapien
cagtgagcgcgccgcgctggagcgg

SEQ ID NO: 5705270 - DNA, 25 bp, Homo sapien
attgtctctcggctccagggaggtg

SEQ ID NO: 5705271 - DNA, 25 bp, Homo sapien
gcagagcagctcctgcagcgcctcg

SEQ ID NO: 5705272 - DNA, 25 bp, Homo sapien
ctacgtctgcaaacccgaagagcgc

SEQ ID NO: 5705273 - DNA, 25 bp, Homo sapien
gtcaggaagatgtcctttggaccaa

SEQ ID NO: 5705274 - DNA, 25 bp, Homo sapien
catttccagtcatctgtgtgttttt

SEQ ID NO: 5705275 - DNA, 25 bp, Homo sapien
gtccttcaacaactggagtaaactt

SEQ ID NO: 5705276 - DNA, 25 bp, Homo sapien
ctcaccagaagccacaataactttg

SEQ ID NO: 5705277 - DNA, 25 bp, Homo sapien
acagtcctcctagcacccccatggc

SEQ ID NO: 5705278 - DNA, 25 bp, Homo sapien
gacagcagccttctgagtctgggtc

SEQ ID NO: 5705279 - DNA, 25 bp, Homo sapien
agctccctgggttccagtatttact

SEQ ID NO: 5705280 - DNA, 25 bp, Homo sapien
tcagtacaagttctttgtggatggt

SEQ ID NO: 5705281 - DNA, 25 bp, Homo sapien
aggaaatcaaggcaccagagaagga

SEQ ID NO: 5705282 - DNA, 25 bp, Homo sapien
ggctttgagcctcggggactcatca

SEQ ID NO: 5705283 - DNA, 25 bp, Homo sapien
gttgcttattctgaaaggaatgtag

SEQ ID NO: 5705284 - DNA, 25 bp, Homo sapien
gtacattgctcatttcacactcttc

SEQ ID NO: 5705285 - DNA, 25 bp, Homo sapien
gcaagactgcagcagttgctgttgc

SEQ ID NO: 5705286 - DNA, 25 bp, Homo sapien
tgtgtccccgcagacccccatcatg

SEQ ID NO: 5705287 - DNA, 25 bp, Homo sapien
aggttgtccagctttttattccagt

SEQ ID NO: 5705288 - DNA, 25 bp, Homo sapien
gtcttgcctgtccttcaaaatcaac

SEQ ID NO: 5705289 - DNA, 25 bp, Homo sapien
cacaataactttgtagccatcctgg

SEQ ID NO: 5705290 - DNA, 25 bp, Homo sapien
cctacattctcgatttttcttaagc

SEQ ID NO: 5705291 - DNA, 25 bp, Homo sapien
ggtctgtgacagtcctcctagcacc

SEQ ID NO: 5705292 - DNA, 25 bp, Homo sapien
tacagtgttggtcttgcctgtcctt

SEQ ID NO: 5705293 - DNA, 25 bp, Homo sapien
ggcacagttaacaacatcattcaag

SEQ ID NO: 5705294 - DNA, 25 bp, Homo sapien
tcctgcttgaaggtttgtccaggca

SEQ ID NO: 5705295 - DNA, 25 bp, Homo sapien
gctcctgcagcgcctcggtctgtga

SEQ ID NO: 5705296 - DNA, 25 bp, Homo sapien
acgtgcatgctttccccaagaggga

SEQ ID NO: 5705297 - DNA, 25 bp, Homo sapien
aagtttacttatctgggtccttcaa

SEQ ID NO: 5705298 - DNA, 25 bp, Homo sapien
gaagacatttcatacctgccctggt

SEQ ID NO: 5705299 - DNA, 25 bp, Homo sapien
ctgttgcttattctgaaaggaatgt

SEQ ID NO: 5705300 - DNA, 25 bp, Homo sapien
ccaaggacggggacaggcccaagat

SEQ ID NO: 5705301 - DNA, 25 bp, Homo sapien
aaccgtgaaaacttgagaggcactc

SEQ ID NO: 5705302 - DNA, 25 bp, Homo sapien
cttgctcagggtccctttcctgcag

SEQ ID NO: 5705303 - DNA, 25 bp, Homo sapien
gaggatctgcagccctggccccgcg

SEQ ID NO: 5705304 - DNA, 25 bp, Homo sapien
cccccatcatgggcaataccagcag

SEQ ID NO: 5705305 - DNA, 25 bp, Homo sapien
caccttgatggacaagtttcaataa

SEQ ID NO: 5705306 - DNA, 25 bp, Homo sapien
tggtgctcagcgcaacccaccggta

SEQ ID NO: 5705307 - DNA, 25 bp, Homo sapien
aaggaggaattcctggcctggcagc

SEQ ID NO: 5705308 - DNA, 25 bp, Homo sapien
agagctcggcaaccctgccgactca

SEQ ID NO: 5705309 - DNA, 25 bp, Homo sapien
tcagctggatgatcctcaggactga

SEQ ID NO: 5705310 - DNA, 25 bp, Homo sapien
ataactttgtagccatcctggatct

SEQ ID NO: 5705311 - DNA, 25 bp, Homo sapien
cccatatgaagagctgggggcggat

SEQ ID NO: 5705312 - DNA, 25 bp, Homo sapien
tgcactaagtactctttttgtaagc

SEQ ID NO: 5705313 - DNA, 25 bp, Homo sapien
cccgttatgccctttgctcctggtg

SEQ ID NO: 5705314 - DNA, 25 bp, Homo sapien
gcctcggggactcatcaagtccaag

SEQ ID NO: 5705315 - DNA, 25 bp, Homo sapien
gaacttgacagcagccttctgagtc

SEQ ID NO: 5705316 - DNA, 25 bp, Homo sapien
gttggtcttgcctgtccttcaaaat

SEQ ID NO: 5705317 - DNA, 25 bp, Homo sapien
aagcagacttctgtatacgcagctc

SEQ ID NO: 5705318 - DNA, 25 bp, Homo sapien
ttgtgacttttcaaaacagtgaatt

SEQ ID NO: 5705319 - DNA, 25 bp, Homo sapien
ctggcctggcagcatgatctggaag

SEQ ID NO: 5705320 - DNA, 25 bp, Homo sapien
gggtcaggaagatgtcctttggacc

SEQ ID NO: 5705321 - DNA, 25 bp, Homo sapien
catcatgggcaataccagcagtgag

SEQ ID NO: 5705322 - DNA, 25 bp, Homo sapien
atctcctccaggtcatcctgaacaa

SEQ ID NO: 5705323 - DNA, 25 bp, Homo sapien
gaagaaaactgactttgaagtattt

SEQ ID NO: 5705324 - DNA, 25 bp, Homo sapien
cgcgattgcgagagctcggcaaccc

SEQ ID NO: 5705325 - DNA, 25 bp, Homo sapien
tgtgtgtttttaaggccagccactt

SEQ ID NO: 5705326 - DNA, 25 bp, Homo sapien
ctcagtttcccgggagtcgccacag

SEQ ID NO: 5705327 - DNA, 25 bp, Homo sapien
tagatgaggttttacaattgtttct

SEQ ID NO: 5705328 - DNA, 25 bp, Homo sapien
ctcggcaaccctgccgactcagccg

SEQ ID NO: 5705329 - DNA, 25 bp, Homo sapien
tgaactctgctcagcaataatctgt

SEQ ID NO: 5705330 - DNA, 25 bp, Homo sapien
agggaggtgtcatttctatagaaat

SEQ ID NO: 5705331 - DNA, 25 bp, Homo sapien
ctatcaaggatggagtgatggtgct

SEQ ID NO: 5705332 - DNA, 25 bp, Homo sapien
acgtcatgctgaaccacctatacgc

SEQ ID NO: 5705333 - DNA, 25 bp, Homo sapien
taccatcaggagccctacgtctgca

SEQ ID NO: 5705334 - DNA, 25 bp, Homo sapien
cccgaagacgccgacctcttccact

SEQ ID NO: 5705335 - DNA, 25 bp, Homo sapien
ctgcagccctggccccgcggtgcat

SEQ ID NO: 5705336 - DNA, 25 bp, Homo sapien
cctgaacaaggacacggggatttcc

SEQ ID NO: 5705337 - DNA, 25 bp, Homo sapien
cttccctgtgtccccgcagaccccc

SEQ ID NO: 5705338 - DNA, 25 bp, Homo sapien
gcagcgcctcggtctgtgacagtcc

SEQ ID NO: 5705339 - DNA, 25 bp, Homo sapien
ggagggacagctcggggggcaccaa

SEQ ID NO: 5705340 - DNA, 25 bp, Homo sapien
ctcccccaggaccctaccatcagga

SEQ ID NO: 5705341 - DNA, 25 bp, Homo sapien
gctggagcggcatggtggccataag

SEQ ID NO: 5705342 - DNA, 25 bp, Homo sapien
tcccggcccgaggggcgtggtgtcc

SEQ ID NO: 5705343 - DNA, 25 bp, Homo sapien
tctgcccctagttagcaagactgca

SEQ ID NO: 5705344 - DNA, 25 bp, Homo sapien
caacagattgtctctcggctccagg

SEQ ID NO: 5705345 - DNA, 25 bp, Homo sapien
tccagctttgcttcctgagcccaat

SEQ ID NO: 5705346 - DNA, 25 bp, Homo sapien
ctcatcaagtccaagaaaagaggga

SEQ ID NO: 5705347 - DNA, 25 bp, Homo sapien
cattttttaagtcaccacgtctaga

SEQ ID NO: 5705348 - DNA, 25 bp, Homo sapien
tacattctcgatttttcttaagcca

SEQ ID NO: 5705349 - DNA, 25 bp, Homo sapien
ttcaacctgctgccggatttctcca

SEQ ID NO: 5705350 - DNA, 25 bp, Homo sapien
cctgcagtgaggcgccgtccgcctt

SEQ ID NO: 5705351 - DNA, 25 bp, Homo sapien
atagtaaccagccagcttggcacag

SEQ ID NO: 5705352 - DNA, 25 bp, Homo sapien
tcggtttatcttcgcgccccttgcg

SEQ ID NO: 5705353 - DNA, 25 bp, Homo sapien
caacctgctgccggatttctccatt

SEQ ID NO: 5705354 - DNA, 25 bp, Homo sapien
gcgttcttgccgcggcttgcctggg

SEQ ID NO: 5705355 - DNA, 25 bp, Homo sapien
ccacacgtgcatgctttccccaaga

SEQ ID NO: 5705356 - DNA, 25 bp, Homo sapien
aatggactgtacattgctcatttca

SEQ ID NO: 5705357 - DNA, 25 bp, Homo sapien
acacatcatttccagtcatctgtgt

SEQ ID NO: 5705358 - DNA, 25 bp, Homo sapien
tgtacccactagcccaggttgctgt

SEQ ID NO: 5705359 - DNA, 25 bp, Homo sapien
cagctttttattccagtcataatag

SEQ ID NO: 5705360 - DNA, 25 bp, Homo sapien
tagaagctttctgatttctagatga

SEQ ID NO: 5705361 - DNA, 25 bp, Homo sapien
caggtcatcctgaacaaggacacgg

SEQ ID NO: 5705362 - DNA, 25 bp, Homo sapien
aagatgtcctttggaccaaagcaga

SEQ ID NO: 5705363 - DNA, 25 bp, Homo sapien
tgctgttgcttattctgaaaggaat

SEQ ID NO: 5705364 - DNA, 25 bp, Homo sapien
cagtgttggtcttgcctgtccttca

SEQ ID NO: 5705365 - DNA, 25 bp, Homo sapien
gccagtaaaattctgggaaacaggg

SEQ ID NO: 5705366 - DNA, 25 bp, Homo sapien
ggtggattcccaaaagtgctccgat

SEQ ID NO: 5705367 - DNA, 25 bp, Homo sapien
gctgggtgcagttctaaacctacat

SEQ ID NO: 5705368 - DNA, 25 bp, Homo sapien
ccttccgagcccatagtaaccagcc

SEQ ID NO: 5705369 - DNA, 25 bp, Homo sapien
caggactgaccagttagctggcagg

SEQ ID NO: 5705370 - DNA, 25 bp, Homo sapien
accagccagcttggcacagttaaca

SEQ ID NO: 5705371 - DNA, 25 bp, Homo sapien
catcaagtccaagaaaagagggagg

SEQ ID NO: 5705372 - DNA, 25 bp, Homo sapien
caggctccacacgtgcatgctttcc

SEQ ID NO: 5705373 - DNA, 25 bp, Homo sapien
cccaggttgctgtgagtcagcggaa

SEQ ID NO: 5705374 - DNA, 25 bp, Homo sapien
tggagcggcatggtggccataagac

SEQ ID NO: 5705375 - DNA, 25 bp, Homo sapien
ttgagaggcactctgccctcttccc

SEQ ID NO: 5705376 - DNA, 25 bp, Homo sapien
aaattagaagctttctgatttctag

SEQ ID NO: 5705377 - DNA, 25 bp, Homo sapien
cggcccgaggggcgtggtgtcctgg

SEQ ID NO: 5705378 - DNA, 25 bp, Homo sapien
ccgcggtgcatgaggctgggtgcag

SEQ ID NO: 5705379 - DNA, 25 bp, Homo sapien
ggacaggcccaagatcctgatggac

SEQ ID NO: 5705380 - DNA, 25 bp, Homo sapien
gtgacttttcaaaacagtgaattac

SEQ ID NO: 5705381 - DNA, 25 bp, Homo sapien
tgcccctagttagcaagactgcagc

SEQ ID NO: 5705382 - DNA, 25 bp, Homo sapien
tttgctcctggtgggagagggagga

SEQ ID NO: 5705383 - DNA, 25 bp, Homo sapien
ataataggtgacagtgttaaccgtg

SEQ ID NO: 5705384 - DNA, 25 bp, Homo sapien
ttgaggcctggctatggaactaaat

SEQ ID NO: 5705385 - DNA, 25 bp, Homo sapien
ctggaagtgaatgataaagctcccg

SEQ ID NO: 5705386 - DNA, 25 bp, Homo sapien
ttcccaaaagtgctccgatgtgtct

SEQ ID NO: 5705387 - DNA, 25 bp, Homo sapien
ccgccttccctgtgtccccgcagac

SEQ ID NO: 5705388 - DNA, 25 bp, Homo sapien
tttcaaaacagtgaattactgtcac

SEQ ID NO: 5705389 - DNA, 25 bp, Homo sapien
gacgcacgacccttccgagcccata

SEQ ID NO: 5705390 - DNA, 25 bp, Homo sapien
ctcgatttttcttaagccaaaaatg

SEQ ID NO: 5705391 - DNA, 25 bp, Homo sapien
acaattgtttcttacagtcatgtgc

SEQ ID NO: 5705392 - DNA, 25 bp, Homo sapien
agccttctgagtctgggtcaggaag

SEQ ID NO: 5705393 - DNA, 25 bp, Homo sapien
accacctatacgcgctgtctatcaa

SEQ ID NO: 5705394 - DNA, 25 bp, Homo sapien
tctctcggctccagggaggtgtcat

SEQ ID NO: 5705395 - DNA, 25 bp, Homo sapien
gccacaataactttgtagccatcct

SEQ ID NO: 5705396 - DNA, 25 bp, Homo sapien
gcccaggctcggccaacggtgtttc

SEQ ID NO: 5705397 - DNA, 25 bp, Homo sapien
ctgggtccttcaacaactggagtaa

SEQ ID NO: 5705398 - DNA, 25 bp, Homo sapien
ggcactctgccctcttccctataaa

SEQ ID NO: 5705399 - DNA, 25 bp, Homo sapien
gatgtgtctgagctgtccagttctc

SEQ ID NO: 5705400 - DNA, 25 bp, Homo sapien
gtgtcctggtgctccgactccttcc

SEQ ID NO: 5705401 - DNA, 25 bp, Homo sapien
tgcgagagctcggcaaccctgccga

SEQ ID NO: 5705402 - DNA, 25 bp, Homo sapien
cagccagcttggcacagttaacaac

SEQ ID NO: 5705403 - DNA, 25 bp, Homo sapien
gcagcagttgctgttgcttattctg

SEQ ID NO: 5705404 - DNA, 25 bp, Homo sapien
atcaggagccctacgtctgcaaacc

SEQ ID NO: 5705405 - DNA, 25 bp, Homo sapien
gggactcatcaagtccaagaaaaga

SEQ ID NO: 5705406 - DNA, 25 bp, Homo sapien
atggtggattcccaaaagtgctccg

SEQ ID NO: 5705407 - DNA, 25 bp, Homo sapien
ctgctgccggatttctccattcagc

SEQ ID NO: 5705408 - DNA, 25 bp, Homo sapien
gagcggcatggtggccataagacgc

SEQ ID NO: 5705409 - DNA, 25 bp, Homo sapien
aggcccaagatcctgatggacagcc

SEQ ID NO: 5705410 - DNA, 25 bp, Homo sapien
tgccctggtcctgcttgaaggtttg

SEQ ID NO: 5705411 - DNA, 25 bp, Homo sapien
cgacccttccgagcccatagtaacc

SEQ ID NO: 5705412 - DNA, 25 bp, Homo sapien
taaggccagccacttgtccctgttg

SEQ ID NO: 5705413 - DNA, 25 bp, Homo sapien
tcttcagaagacatttcatacctgc

SEQ ID NO: 5705414 - DNA, 25 bp, Homo sapien
tagcaagactgcagcagttgctgtt

SEQ ID NO: 5705415 - DNA, 25 bp, Homo sapien
caccttgctcaggacctctgcccct

SEQ ID NO: 5705416 - DNA, 25 bp, Homo sapien
tttatcttcgcgccccttgcgttct

SEQ ID NO: 5705417 - DNA, 25 bp, Homo sapien
gccttccctgtgtccccgcagaccc

SEQ ID NO: 5705418 - DNA, 25 bp, Homo sapien
gtgttggtcttgcctgtccttcaaa

SEQ ID NO: 5705419 - DNA, 25 bp, Homo sapien
acgtctagaagtcacatgaactctg

SEQ ID NO: 5705420 - DNA, 25 bp, Homo sapien
acaagaagaagtacgtcaccacctt

SEQ ID NO: 5705421 - DNA, 25 bp, Homo sapien
cggatggtggcccaggagacagcac

SEQ ID NO: 5705422 - DNA, 25 bp, Homo sapien
ggttgctgtgagtcagcggaagctc

SEQ ID NO: 5705423 - DNA, 25 bp, Homo sapien
aataggtgacagtgttaaccgtgaa

SEQ ID NO: 5705424 - DNA, 25 bp, Homo sapien
gctttccccaagagggaatggactg

SEQ ID NO: 5705425 - DNA, 25 bp, Homo sapien
attcaagtgaagaaaactgactttg

SEQ ID NO: 5705426 - DNA, 25 bp, Homo sapien
caataactttgtagccatcctggat

SEQ ID NO: 5705427 - DNA, 25 bp, Homo sapien
ggtcagtggacgcacgacccttccg

SEQ ID NO: 5705428 - DNA, 25 bp, Homo sapien
tgaccagttagctggcaggttgtcc

SEQ ID NO: 5705429 - DNA, 25 bp, Homo sapien
ttttacaattgtttcttacagtcat

SEQ ID NO: 5705430 - DNA, 25 bp, Homo sapien
gtgtcatttctatagaaattagaag

SEQ ID NO: 5705431 - DNA, 25 bp, Homo sapien
aagtactctttttgtaagcagaggt

SEQ ID NO: 5705432 - DNA, 25 bp, Homo sapien
tggctggctctgcagccttaaggcc

SEQ ID NO: 5705433 - DNA, 25 bp, Homo sapien
agttctcccccaggaccctaccatc

SEQ ID NO: 5705434 - DNA, 25 bp, Homo sapien
ttccctataaaatcacacagcgtga

SEQ ID NO: 5705435 - DNA, 25 bp, Homo sapien
gatgtcctttggaccaaagcagact

SEQ ID NO: 5705436 - DNA, 25 bp, Homo sapien
ctggagtaaacttcccctcaccaga

SEQ ID NO: 5705437 - DNA, 25 bp, Homo sapien
tgcagccttaaggccattttttaag

SEQ ID NO: 5705438 - DNA, 25 bp, Homo sapien
tgattttacaaggtcccgtggcacc

SEQ ID NO: 5705439 - DNA, 25 bp, Homo sapien
tcatgggcaataccagcagtgagcg

SEQ ID NO: 5705440 - DNA, 25 bp, Homo sapien
ctaagtactctttttgtaagcagag

SEQ ID NO: 5705441 - DNA, 25 bp, Homo sapien
agggaatggactgtacattgctcat

SEQ ID NO: 5705442 - DNA, 25 bp, Homo sapien
ggcccaggagacagcacaccaccag

SEQ ID NO: 5705443 - DNA, 25 bp, Homo sapien
ttccagtatttacttggtatacctg

SEQ ID NO: 5705444 - DNA, 25 bp, Homo sapien
cttattctgaaaggaatgtagaact

SEQ ID NO: 5705445 - DNA, 25 bp, Homo sapien
tgatgctttaatggtggattcccaa

SEQ ID NO: 5705446 - DNA, 25 bp, Homo sapien
cttcccctcaccagaagccacaata

SEQ ID NO: 5705447 - DNA, 25 bp, Homo sapien
caaaagtgctccgatgtgtctgagc

SEQ ID NO: 5705448 - DNA, 25 bp, Homo sapien
gtagccatcctggatctgccggaag

SEQ ID NO: 5705449 - DNA, 25 bp, Homo sapien
agtaaccagccagcttggcacagtt

SEQ ID NO: 5705450 - DNA, 25 bp, Homo sapien
tattccagtcataataggtgacagt

SEQ ID NO: 5705451 - DNA, 25 bp, Homo sapien
agttctttgtggatggtcagtggac

SEQ ID NO: 5705452 - DNA, 25 bp, Homo sapien
cacagatgtacccactagcccaggt

SEQ ID NO: 5705453 - DNA, 25 bp, Homo sapien
gtaaagcgcgattgcgagagctcgg

SEQ ID NO: 5705454 - DNA, 25 bp, Homo sapien
ttaaccgtgaaaacttgagaggcac

SEQ ID NO: 5705455 - DNA, 25 bp, Homo sapien
tgatctggaagtgaatgataaagct

SEQ ID NO: 5705456 - DNA, 25 bp, Homo sapien
cctagttagcaagactgcagcagtt

SEQ ID NO: 5705457 - DNA, 25 bp, Homo sapien
ttctgagtctgggtcaggaagatgt

SEQ ID NO: 5705458 - DNA, 25 bp, Homo sapien
gggtccctttcctgcagtgaggcgc

SEQ ID NO: 5705459 - DNA, 25 bp, Homo sapien
acaactggagtaaacttcccctcac

SEQ ID NO: 5705460 - DNA, 25 bp, Homo sapien
agtatttgatgctttaatggtggat

SEQ ID NO: 5705461 - DNA, 25 bp, Homo sapien
aacaaggacacggggatttcctgtg

SEQ ID NO: 5705462 - DNA, 25 bp, Homo sapien
gaggagtgagctccctgggttccag

SEQ ID NO: 5705463 - DNA, 25 bp, Homo sapien
aacagggactgaggccacacatcat

SEQ ID NO: 5705464 - DNA, 25 bp, Homo sapien
ctgactttgaagtatttgatgcttt

SEQ ID NO: 5705465 - DNA, 25 bp, Homo sapien
aatcacacagcgtgattttacaagg

SEQ ID NO: 5705466 - DNA, 25 bp, Homo sapien
gacctcttccactccgaggaaatca

SEQ ID NO: 5705467 - DNA, 25 bp, Homo sapien
agcagaggtggctggctctgcagcc

SEQ ID NO: 5705468 - DNA, 25 bp, Homo sapien
aagcccatatgaagagctgggggcg

SEQ ID NO: 5705469 - DNA, 25 bp, Homo sapien
cagggtccctttcctgcagtgaggc

SEQ ID NO: 5705470 - DNA, 25 bp, Homo sapien
cccatcatgggcaataccagcagtg

SEQ ID NO: 5705471 - DNA, 25 bp, Homo sapien
gaagctcccgttatgccctttgctc

SEQ ID NO: 5705472 - DNA, 25 bp, Homo sapien
tacaagttctttgtggatggtcagt

SEQ ID NO: 5705473 - DNA, 25 bp, Homo sapien
ttcaacaactggagtaaacttcccc

SEQ ID NO: 5705474 - DNA, 25 bp, Homo sapien
ggaatgtagaacttgacagcagcct

SEQ ID NO: 5705475 - DNA, 25 bp, Homo sapien
agtgttaaccgtgaaaacttgagag

SEQ ID NO: 5705476 - DNA, 25 bp, Homo sapien
aacctacattctcgatttttcttaa

SEQ ID NO: 5705477 - DNA, 25 bp, Homo sapien
tcacgtcatgctgaaccacctatac

SEQ ID NO: 5705478 - DNA, 25 bp, Homo sapien
aataccagcagtgagcgcgccgcgc

SEQ ID NO: 5705479 - DNA, 25 bp, Homo sapien
cgtggtgtcctggtgctccgactcc

SEQ ID NO: 5705480 - DNA, 25 bp, Homo sapien
acttgacagcagccttctgagtctg

SEQ ID NO: 5705481 - DNA, 25 bp, Homo sapien
gtgatggtgctcagcgcaacccacc

SEQ ID NO: 5705482 - DNA, 25 bp, Homo sapien
gtccaggcagagcagctcctgcagc

SEQ ID NO: 5705483 - DNA, 25 bp, Homo sapien
cactctgccctcttccctataaaat

SEQ ID NO: 5705484 - DNA, 25 bp, Homo sapien
ccggatttctccattcagctggatg

SEQ ID NO: 5705485 - DNA, 25 bp, Homo sapien
gcagcatgatctggaagtgaatgat

SEQ ID NO: 5705486 - DNA, 25 bp, Homo sapien
tgtctctcggctccagggaggtgtc

SEQ ID NO: 5705487 - DNA, 25 bp, Homo sapien
gcctgggcaggtaaagcgcgattgc

SEQ ID NO: 5705488 - DNA, 25 bp, Homo sapien
acacagcgtgattttacaaggtccc

SEQ ID NO: 5705489 - DNA, 25 bp, Homo sapien
gtgagcgcgccgcgctggagcggca

SEQ ID NO: 5705490 - DNA, 25 bp, Homo sapien
tgctcctggtgggagagggaggagt

SEQ ID NO: 5705491 - DNA, 25 bp, Homo sapien
caagttctttgtggatggtcagtgg

SEQ ID NO: 5705492 - DNA, 25 bp, Homo sapien
ggtcatcctgaacaaggacacgggg

SEQ ID NO: 5705493 - DNA, 25 bp, Homo sapien
ttctgatttctagatgaggttttac

SEQ ID NO: 5705494 - DNA, 25 bp, Homo sapien
ggctcccggcccgaggggcgtggtg

SEQ ID NO: 5705495 - DNA, 25 bp, Homo sapien
tcctttgccagtaaaattctgggaa

SEQ ID NO: 5705496 - DNA, 25 bp, Homo sapien
accaggctccacacgtgcatgcttt

SEQ ID NO: 5705497 - DNA, 25 bp, Homo sapien
ttctgtatacgcagctcagtttccc

SEQ ID NO: 5705498 - DNA, 25 bp, Homo sapien
ccatcctggatctgccggaaggaga

SEQ ID NO: 5705499 - DNA, 25 bp, Homo sapien
tcttccctataaaatcacacagcgt

SEQ ID NO: 5705500 - DNA, 25 bp, Homo sapien
gctttttattccagtcataataggt

SEQ ID NO: 5705501 - DNA, 25 bp, Homo sapien
tgttgaggcctggctatggaactaa

SEQ ID NO: 5705502 - DNA, 25 bp, Homo sapien
gaaaggaagtttacttatctgggtc

SEQ ID NO: 5705503 - DNA, 25 bp, Homo sapien
ggatggtcagtggacgcacgaccct

SEQ ID NO: 5705504 - DNA, 25 bp, Homo sapien
cttggtatacctgagtttgggggta

SEQ ID NO: 5705505 - DNA, 25 bp, Homo sapien
gtgaaaacttgagaggcactctgcc

SEQ ID NO: 5705506 - DNA, 25 bp, Homo sapien
gcatgctttccccaagagggaatgg

SEQ ID NO: 5705507 - DNA, 25 bp, Homo sapien
cagcagccttctgagtctgggtcag

SEQ ID NO: 5705508 - DNA, 25 bp, Homo sapien
tgtagaacttgacagcagccttctg

SEQ ID NO: 5705509 - DNA, 25 bp, Homo sapien
tcgggcaccccctattctcccccca

SEQ ID NO: 5705510 - DNA, 25 bp, Homo sapien
tccctgtgtccccgcagacccccat

SEQ ID NO: 5705511 - DNA, 25 bp, Homo sapien
agacttttcaacctgctgccggatt

SEQ ID NO: 5705512 - DNA, 25 bp, Homo sapien
ttctgaaaggaatgtagaacttgac

SEQ ID NO: 5705513 - DNA, 25 bp, Homo sapien
tcggtctgtgacagtcctcctagca

SEQ ID NO: 5705514 - DNA, 25 bp, Homo sapien
aagtcacatgaactctgctcagcaa

SEQ ID NO: 5705515 - DNA, 25 bp, Homo sapien
tggtcttgcctgtccttcaaaatca

SEQ ID NO: 5705516 - DNA, 25 bp, Homo sapien
gtactctttttgtaagcagaggtgg

SEQ ID NO: 5705517 - DNA, 25 bp, Homo sapien
gtcctggtgctccgactccttccgc

SEQ ID NO: 5705518 - DNA, 25 bp, Homo sapien
cgcctcggtctgtgacagtcctcct

SEQ ID NO: 5705519 - DNA, 25 bp, Homo sapien
gcaaccctgccgactcagccggaac

SEQ ID NO: 5705520 - DNA, 25 bp, Homo sapien
gtccagttctcccccaggaccctac

SEQ ID NO: 5705521 - DNA, 25 bp, Homo sapien
ggctccacacgtgcatgctttcccc

SEQ ID NO: 5705522 - DNA, 25 bp, Homo sapien
cctggcagcatgatctggaagtgaa

SEQ ID NO: 5705523 - DNA, 25 bp, Homo sapien
aggaattcctggcctggcagcatga

SEQ ID NO: 5705524 - DNA, 25 bp, Homo sapien
gagcccaatcacgtcatgctgaacc

SEQ ID NO: 5705525 - DNA, 25 bp, Homo sapien
agcagtgagcgcgccgcgctggagc

SEQ ID NO: 5705526 - DNA, 25 bp, Homo sapien
gagtgatggtgctcagcgcaaccca

SEQ ID NO: 5705527 - DNA, 25 bp, Homo sapien
cggggatttcctgtgatccagcttt

SEQ ID NO: 5705528 - DNA, 25 bp, Homo sapien
cagatgtacccactagcccaggttg

SEQ ID NO: 5705529 - DNA, 25 bp, Homo sapien
aggcagagcagctcctgcagcgcct

SEQ ID NO: 5705530 - DNA, 25 bp, Homo sapien
atgctttccccaagagggaatggac

SEQ ID NO: 5705531 - DNA, 25 bp, Homo sapien
gcccaatcacgtcatgctgaaccac

SEQ ID NO: 5705532 - DNA, 25 bp, Homo sapien
gaggggcgtggtgtcctggtgctcc

SEQ ID NO: 5705533 - DNA, 25 bp, Homo sapien
tgtgtctgagctgtccagttctccc

SEQ ID NO: 5705534 - DNA, 25 bp, Homo sapien
ccgcggttccgggagtcccttgctc

SEQ ID NO: 5705535 - DNA, 25 bp, Homo sapien
tttgcttcctgagcccaatcacgtc

SEQ ID NO: 5705536 - DNA, 25 bp, Homo sapien
gaggcactctgccctcttccctata

SEQ ID NO: 5705537 - DNA, 25 bp, Homo sapien
ggagacagcacaccaccaggctcca

SEQ ID NO: 5705538 - DNA, 25 bp, Homo sapien
ggagtcgccacagatgtacccacta

SEQ ID NO: 5705539 - DNA, 25 bp, Homo sapien
gcgctggagcggcatggtggccata

SEQ ID NO: 5705540 - DNA, 25 bp, Homo sapien
tgctcagggtccctttcctgcagtg

SEQ ID NO: 5705541 - DNA, 25 bp, Homo sapien
tggctatggaactaaatacagtgtt

SEQ ID NO: 5705542 - DNA, 25 bp, Homo sapien
agacagcacaccaccaggctccaca

SEQ ID NO: 5705543 - DNA, 25 bp, Homo sapien
caccacgtctagaagtcacatgaac

SEQ ID NO: 5705544 - DNA, 25 bp, Homo sapien
aagacgccgacctcttccactccga

SEQ ID NO: 5705545 - DNA, 25 bp, Homo sapien
agctgtccagttctcccccaggacc

SEQ ID NO: 5705546 - DNA, 25 bp, Homo sapien
catcattcaagtgaagaaaactgac

SEQ ID NO: 5705547 - DNA, 25 bp, Homo sapien
ttgcgttcttgccgcggcttgcctg

SEQ ID NO: 5705548 - DNA, 25 bp, Homo sapien
ctgtgatccagctttgcttcctgag

SEQ ID NO: 5705549 - DNA, 25 bp, Homo sapien
cgcgctgtctatcaaggatggagtg

SEQ ID NO: 5705550 - DNA, 25 bp, Homo sapien
gactgcagcagttgctgttgcttat

SEQ ID NO: 5705551 - DNA, 25 bp, Homo sapien
ctgggcaggtaaagcgcgattgcga

SEQ ID NO: 5705552 - DNA, 25 bp, Homo sapien
gcttgcctgggcaggtaaagcgcga

SEQ ID NO: 5705553 - DNA, 25 bp, Homo sapien
ctgcagcgcctcggtctgtgacagt

SEQ ID NO: 5705554 - DNA, 25 bp, Homo sapien
gggatttcctgtgatccagctttgc

SEQ ID NO: 5705555 - DNA, 25 bp, Homo sapien
cttgtccctgttgaggcctggctat

SEQ ID NO: 5705556 - DNA, 25 bp, Homo sapien
agccatcctggatctgccggaagga

SEQ ID NO: 5705557 - DNA, 25 bp, Homo sapien
tcataataggtgacagtgttaaccg

SEQ ID NO: 5705558 - DNA, 25 bp, Homo sapien
cgggagtcgccacagatgtacccac

SEQ ID NO: 5705559 - DNA, 25 bp, Homo sapien
ccgaagagcgctttcgggcaccccc

SEQ ID NO: 5705560 - DNA, 25 bp, Homo sapien
cttgcctgtccttcaaaatcaacaa

SEQ ID NO: 5705561 - DNA, 25 bp, Homo sapien
tccgcaggctccttgggacccgcgg

SEQ ID NO: 5705562 - DNA, 25 bp, Homo sapien
aagtgaatgataaagctcccgccca

SEQ ID NO: 5705563 - DNA, 25 bp, Homo sapien
ccatcaggagccctacgtctgcaaa

SEQ ID NO: 5705564 - DNA, 25 bp, Homo sapien
acagctcggggggcaccaaggacgg

SEQ ID NO: 5705565 - DNA, 25 bp, Homo sapien
ggcagaggatctgcagccctggccc

SEQ ID NO: 5705566 - DNA, 25 bp, Homo sapien
ctggccccgcggtgcatgaggctgg

SEQ ID NO: 5705567 - DNA, 25 bp, Homo sapien
cagtcatgtgcactaagtactcttt

SEQ ID NO: 5705568 - DNA, 25 bp, Homo sapien
gctaactcctttgccagtaaaattc

SEQ ID NO: 5705569 - DNA, 25 bp, Homo sapien
tggatctgccggaaggagagcatca

SEQ ID NO: 5705570 - DNA, 25 bp, Homo sapien
tctgagctgtccagttctcccccag

SEQ ID NO: 5705571 - DNA, 25 bp, Homo sapien
aggtgtcatttctatagaaattaga

SEQ ID NO: 5705572 - DNA, 25 bp, Homo sapien
tggcagcatgatctggaagtgaatg

SEQ ID NO: 5705573 - DNA, 25 bp, Homo sapien
ttgagcctcggggactcatcaagtc

SEQ ID NO: 5705574 - DNA, 25 bp, Homo sapien
agtggacgcacgacccttccgagcc

SEQ ID NO: 5705575 - DNA, 25 bp, Homo sapien
aacagtgaattactgtcaccttgat

SEQ ID NO: 5705576 - DNA, 25 bp, Homo sapien
tgagtcagcggaagctcccgttatg

SEQ ID NO: 5705577 - DNA, 25 bp, Homo sapien
cagtttcccgggagtcgccacagat

SEQ ID NO: 5705578 - DNA, 25 bp, Homo sapien
agcggaagctcccgttatgcccttt

SEQ ID NO: 5705579 - DNA, 25 bp, Homo sapien
gaggtggctggctctgcagccttaa

SEQ ID NO: 5705580 - DNA, 25 bp, Homo sapien
ccgaggggcgtggtgtcctggtgct

SEQ ID NO: 5705581 - DNA, 25 bp, Homo sapien
tgtccttcaaaatcaacaacagatt

SEQ ID NO: 5705582 - DNA, 25 bp, Homo sapien
ataaaatcacacagcgtgattttac

SEQ ID NO: 5705583 - DNA, 25 bp, Homo sapien
ccacatctcctccaggtcatcctga

SEQ ID NO: 5705584 - DNA, 25 bp, Homo sapien
cacctatacgcgctgtctatcaagg

SEQ ID NO: 5705585 - DNA, 25 bp, Homo sapien
cccccaggaccctaccatcaggagc

SEQ ID NO: 5705586 - DNA, 25 bp, Homo sapien
gcagctcagtttcccgggagtcgcc

SEQ ID NO: 5705587 - DNA, 25 bp, Homo sapien
ttggaccaaagcagacttctgtata

SEQ ID NO: 5705588 - DNA, 25 bp, Homo sapien
acattgctcatttcacactcttcag

SEQ ID NO: 5705589 - DNA, 25 bp, Homo sapien
agcgcaacccaccggtacaagaaga

SEQ ID NO: 5705590 - DNA, 25 bp, Homo sapien
ggtcccgtggcaccttgctcaggac

SEQ ID NO: 5705591 - DNA, 25 bp, Homo sapien
aacatcattcaagtgaagaaaactg

SEQ ID NO: 5705592 - DNA, 25 bp, Homo sapien
agctttctgatttctagatgaggtt

SEQ ID NO: 5705593 - DNA, 25 bp, Homo sapien
agacttctgtatacgcagctcagtt

SEQ ID NO: 5705594 - DNA, 25 bp, Homo sapien
cctcttccactccgaggaaatcaag

SEQ ID NO: 5705595 - DNA, 25 bp, Homo sapien
tgagctccctgggttccagtattta

SEQ ID NO: 5705596 - DNA, 25 bp, Homo sapien
caaagcagacttctgtatacgcagc

SEQ ID NO: 5705597 - DNA, 25 bp, Homo sapien
cggcaaccctgccgactcagccgga

SEQ ID NO: 5705598 - DNA, 25 bp, Homo sapien
aagatcctgatggacagccccgaag

SEQ ID NO: 5705599 - DNA, 25 bp, Homo sapien
tggcaggttgtccagctttttattc

SEQ ID NO: 5705600 - DNA, 25 bp, Homo sapien
ggaagatgtcctttggaccaaagca

SEQ ID NO: 5705601 - DNA, 25 bp, Homo sapien
ctccctgggttccagtatttacttg

SEQ ID NO: 5705602 - DNA, 25 bp, Homo sapien
acccttccgagcccatagtaaccag

SEQ ID NO: 5705603 - DNA, 25 bp, Homo sapien
cctgggttccagtatttacttggta

SEQ ID NO: 5705604 - DNA, 25 bp, Homo sapien
gccccgaagacgccgacctcttcca

SEQ ID NO: 5705605 - DNA, 25 bp, Homo sapien
ttttcttaagccaaaaatgaatgct

SEQ ID NO: 5705606 - DNA, 25 bp, Homo sapien
acttttcaacctgctgccggatttc

SEQ ID NO: 5705607 - DNA, 25 bp, Homo sapien
tggtgtcctggtgctccgactcctt

SEQ ID NO: 5705608 - DNA, 25 bp, Homo sapien
tagcacccccatggctttgagcctc

SEQ ID NO: 5705609 - DNA, 25 bp, Homo sapien
gctcccgcccaggctcggccaacgg

SEQ ID NO: 5705610 - DNA, 25 bp, Homo sapien
aattgtttcttacagtcatgtgcac

SEQ ID NO: 5705611 - DNA, 25 bp, Homo sapien
ttttttgtgacttttcaaaacagtg

SEQ ID NO: 5705612 - DNA, 25 bp, Homo sapien
aacttcccctcaccagaagccacaa

SEQ ID NO: 5705613 - DNA, 25 bp, Homo sapien
ttttgtgacttttcaaaacagtgaa

SEQ ID NO: 5705614 - DNA, 25 bp, Homo sapien
cctgttgaggcctggctatggaact

SEQ ID NO: 5705615 - DNA, 25 bp, Homo sapien
gggagagggaggagtgagctccctg

SEQ ID NO: 5705616 - DNA, 25 bp, Homo sapien
agccctacgtctgcaaacccgaaga

SEQ ID NO: 5705617 - DNA, 25 bp, Homo sapien
acaggcccaagatcctgatggacag

SEQ ID NO: 5705618 - DNA, 25 bp, Homo sapien
cagccttaaggccattttttaagtc

SEQ ID NO: 5705619 - DNA, 25 bp, Homo sapien
gtggcaccttgctcaggacctctgc

SEQ ID NO: 5705620 - DNA, 25 bp, Homo sapien
actcttcagaagacatttcatacct

SEQ ID NO: 5705621 - DNA, 25 bp, Homo sapien
tggtggcccaggagacagcacacca

SEQ ID NO: 5705622 - DNA, 25 bp, Homo sapien
gaattcctggcctggcagcatgatc

SEQ ID NO: 5705623 - DNA, 25 bp, Homo sapien
aactctgctcagcaataatctgttc

SEQ ID NO: 5705624 - DNA, 25 bp, Homo sapien
gaacagacttttcaacctgctgccg

SEQ ID NO: 5705625 - DNA, 25 bp, Homo sapien
ttgaagtatttgatgctttaatggt

SEQ ID NO: 5705626 - DNA, 25 bp, Homo sapien
catctgtgtgtttttaaggccagcc

SEQ ID NO: 5705627 - DNA, 25 bp, Homo sapien
aggctgggtgcagttctaaacctac

SEQ ID NO: 5705628 - DNA, 25 bp, Homo sapien
agcgcgattgcgagagctcggcaac

SEQ ID NO: 5705629 - DNA, 25 bp, Homo sapien
ctgccgactcagccggaaccggctc

SEQ ID NO: 5705630 - DNA, 25 bp, Homo sapien
ctcggggactcatcaagtccaagaa

SEQ ID NO: 5705631 - DNA, 25 bp, Homo sapien
gtgcatgctttccccaagagggaat

SEQ ID NO: 5705632 - DNA, 25 bp, Homo sapien
ctccccccacatctcctccaggtca

SEQ ID NO: 5705633 - DNA, 25 bp, Homo sapien
ctttgtggatggtcagtggacgcac

SEQ ID NO: 5705634 - DNA, 25 bp, Homo sapien
agtacaagttctttgtggatggtca

SEQ ID NO: 5705635 - DNA, 25 bp, Homo sapien
gtgggagagggaggagtgagctccc

SEQ ID NO: 5705636 - DNA, 25 bp, Homo sapien
caacccaccggtacaagaagaagta

SEQ ID NO: 5705637 - DNA, 25 bp, Homo sapien
ggtgcatgaggctgggtgcagttct

SEQ ID NO: 5705638 - DNA, 25 bp, Homo sapien
acaacatcattcaagtgaagaaaac

SEQ ID NO: 5705639 - DNA, 25 bp, Homo sapien
ctgggaaacagggactgaggccaca

SEQ ID NO: 5705640 - DNA, 25 bp, Homo sapien
caggaccctaccatcaggagcccta

SEQ ID NO: 5705641 - DNA, 25 bp, Homo sapien
tatggaactaaatacagtgttggtc

SEQ ID NO: 5705642 - DNA, 25 bp, Homo sapien
ttcccgggagtcgccacagatgtac

SEQ ID NO: 5705643 - DNA, 25 bp, Homo sapien
gggcaccccctattctccccccaca

SEQ ID NO: 5705644 - DNA, 25 bp, Homo sapien
ctcctagcacccccatggctttgag

SEQ ID NO: 5705645 - DNA, 25 bp, Homo sapien
ttgctcaggacctctgcccctagtt

SEQ ID NO: 5705646 - DNA, 25 bp, Homo sapien
ccaccaggctccacacgtgcatgct

SEQ ID NO: 5705647 - DNA, 25 bp, Homo sapien
gagagggaggagtgagctccctggg

SEQ ID NO: 5705648 - DNA, 25 bp, Homo sapien
tggagtgatggtgctcagcgcaacc

SEQ ID NO: 5705649 - DNA, 25 bp, Homo sapien
atggtcagtggacgcacgacccttc

SEQ ID NO: 5705650 - DNA, 25 bp, Homo sapien
cacttgtccctgttgaggcctggct

SEQ ID NO: 5705651 - DNA, 25 bp, Homo sapien
taaatacagtgttggtcttgcctgt

SEQ ID NO: 5705652 - DNA, 25 bp, Homo sapien
ccttcaacaactggagtaaacttcc

SEQ ID NO: 5705653 - DNA, 25 bp, Homo sapien
gaactaaatacagtgttggtcttgc

SEQ ID NO: 5705654 - DNA, 25 bp, Homo sapien
acttgagaggcactctgccctcttc

SEQ ID NO: 5705655 - DNA, 25 bp, Homo sapien
ccctataaaatcacacagcgtgatt

SEQ ID NO: 5705656 - DNA, 25 bp, Homo sapien
gatgaggttttacaattgtttctta

SEQ ID NO: 5705657 - DNA, 25 bp, Homo sapien
ctgtatacgcagctcagtttcccgg

SEQ ID NO: 5705658 - DNA, 25 bp, Homo sapien
gcccaagatcctgatggacagcccc

SEQ ID NO: 5705659 - DNA, 25 bp, Homo sapien
cccaagagggaatggactgtacatt

SEQ ID NO: 5705660 - DNA, 25 bp, Homo sapien
cgactccttccgcaggctccttggg

SEQ ID NO: 5705661 - DNA, 25 bp, Homo sapien
gatcctcaggactgaccagttagct

SEQ ID NO: 5705662 - DNA, 25 bp, Homo sapien
tgacagtcctcctagcacccccatg

SEQ ID NO: 5705663 - DNA, 25 bp, Homo sapien
ggagccctacgtctgcaaacccgaa

SEQ ID NO: 5705664 - DNA, 25 bp, Homo sapien
ggtggctggctctgcagccttaagg

SEQ ID NO: 5705665 - DNA, 25 bp, Homo sapien
gaaggtttgtccaggcagagcagct

SEQ ID NO: 5705666 - DNA, 25 bp, Homo sapien
acagacttttcaacctgctgccgga

SEQ ID NO: 5705667 - DNA, 25 bp, Homo sapien
tatcttcgcgccccttgcgttcttg

SEQ ID NO: 5705668 - DNA, 25 bp, Homo sapien
tttcacactcttcagaagacatttc

SEQ ID NO: 5705669 - DNA, 25 bp, Homo sapien
aagtcaccacgtctagaagtcacat

SEQ ID NO: 5705670 - DNA, 25 bp, Homo sapien
ccttgatggacaagtttcaataaaa

SEQ ID NO: 5705671 - DNA, 25 bp, Homo sapien
tcttgccgcggcttgcctgggcagg

SEQ ID NO: 5705672 - DNA, 25 bp, Homo sapien
tgccggaaggagagcatcagtacaa

SEQ ID NO: 5705673 - DNA, 25 bp, Homo sapien
gggaggagtgagctccctgggttcc

SEQ ID NO: 5705674 - DNA, 25 bp, Homo sapien
ctgaaaggaatgtagaacttgacag

SEQ ID NO: 5705675 - DNA, 25 bp, Homo sapien
cagccacttgtccctgttgaggcct

SEQ ID NO: 5705676 - DNA, 25 bp, Homo sapien
cctgccctggtcctgcttgaaggtt

SEQ ID NO: 5705677 - DNA, 25 bp, Homo sapien
ccacacatcatttccagtcatctgt

SEQ ID NO: 5705678 - DNA, 25 bp, Homo sapien
ctttctgatttctagatgaggtttt

SEQ ID NO: 5705679 - DNA, 25 bp, Homo sapien
actctttttgtaagcagaggtggct

SEQ ID NO: 5705680 - DNA, 25 bp, Homo sapien
tggacagccccgaagacgccgacct

SEQ ID NO: 5705681 - DNA, 25 bp, Homo sapien
gccttaaggccattttttaagtcac

SEQ ID NO: 5705682 - DNA, 25 bp, Homo sapien
cggaagctcccgttatgccctttgc

SEQ ID NO: 5705683 - DNA, 25 bp, Homo sapien
ctttcctgcagtgaggcgccgtccg

SEQ ID NO: 5705684 - DNA, 25 bp, Homo sapien
aagactgcagcagttgctgttgctt

SEQ ID NO: 5705685 - DNA, 25 bp, Homo sapien
tgtttttaaggccagccacttgtcc

SEQ ID NO: 5705686 - DNA, 25 bp, Homo sapien
tcacacagcgtgattttacaaggtc

SEQ ID NO: 5705687 - DNA, 25 bp, Homo sapien
agaaattagaagctttctgatttct

SEQ ID NO: 5705688 - DNA, 25 bp, Homo sapien
tccgactccttccgcaggctccttg

SEQ ID NO: 5705689 - DNA, 25 bp, Homo sapien
catgtgcactaagtactctttttgt

SEQ ID NO: 5705690 - DNA, 25 bp, Homo sapien
ccggaaggagagcatcagtacaagt

SEQ ID NO: 5705691 - DNA, 25 bp, Homo sapien
ctagcccaggttgctgtgagtcagc

SEQ ID NO: 5705692 - DNA, 25 bp, Homo sapien
acacgtgcatgctttccccaagagg

SEQ ID NO: 5705693 - DNA, 25 bp, Homo sapien
tgtccctgttgaggcctggctatgg

SEQ ID NO: 5705694 - DNA, 25 bp, Homo sapien
gtcaccaccttgttatacaagccca

SEQ ID NO: 5705695 - DNA, 25 bp, Homo sapien
gcggttccgggagtcccttgctcag

SEQ ID NO: 5705696 - DNA, 25 bp, Homo sapien
actcagccggaaccggctcccggcc

SEQ ID NO: 5705697 - DNA, 25 bp, Homo sapien
gatttctagatgaggttttacaatt

SEQ ID NO: 5705698 - DNA, 25 bp, Homo sapien
tacttggtatacctgagtttggggg

SEQ ID NO: 5705699 - DNA, 25 bp, Homo sapien
gtccctttcctgcagtgaggcgccg

SEQ ID NO: 5705700 - DNA, 25 bp, Homo sapien
ctcctccaggtcatcctgaacaagg

SEQ ID NO: 5705701 - DNA, 25 bp, Homo sapien
ccagagaaggaggaattcctggcct

SEQ ID NO: 5705702 - DNA, 25 bp, Homo sapien
taaacttcccctcaccagaagccac

SEQ ID NO: 5705703 - DNA, 25 bp, Homo sapien
catgaactctgctcagcaataatct

SEQ ID NO: 5705704 - DNA, 25 bp, Homo sapien
agcatgatctggaagtgaatgataa

SEQ ID NO: 5705705 - DNA, 25 bp, Homo sapien
tttgtaagcagaggtggctggctct

SEQ ID NO: 5705706 - DNA, 25 bp, Homo sapien
ttctccccccacatctcctccaggt

SEQ ID NO: 5705707 - DNA, 25 bp, Homo sapien
gccctttgctcctggtgggagaggg

SEQ ID NO: 5705708 - DNA, 25 bp, Homo sapien
gagaggcactctgccctcttcccta

SEQ ID NO: 5705709 - DNA, 25 bp, Homo sapien
gcagccttctgagtctgggtcagga

SEQ ID NO: 5705710 - DNA, 25 bp, Homo sapien
tgtcctttggaccaaagcagacttc

SEQ ID NO: 5705711 - DNA, 25 bp, Homo sapien
ctgaaccacctatacgcgctgtcta

SEQ ID NO: 5705712 - DNA, 25 bp, Homo sapien
gttgctgttgcttattctgaaagga

SEQ ID NO: 5705713 - DNA, 25 bp, Homo sapien
gtgctcagcgcaacccaccggtaca

SEQ ID NO: 5705714 - DNA, 25 bp, Homo sapien
actgaccagttagctggcaggttgt

SEQ ID NO: 5705715 - DNA, 25 bp, Homo sapien
ctggtgggagagggaggagtgagct

SEQ ID NO: 5705716 - DNA, 25 bp, Homo sapien
cgctgtctatcaaggatggagtgat

SEQ ID NO: 5705717 - DNA, 25 bp, Homo sapien
tcatcctgaacaaggacacggggat

SEQ ID NO: 5705718 - DNA, 25 bp, Homo sapien
gtgaatgataaagctcccgcccagg

SEQ ID NO: 5705719 - DNA, 25 bp, Homo sapien
agacatttcatacctgccctggtcc

SEQ ID NO: 5705720 - DNA, 25 bp, Homo sapien
tcaaggcaccagagaaggaggaatt

SEQ ID NO: 5705721 - DNA, 25 bp, Homo sapien
ccccttgcgttcttgccgcggcttg

SEQ ID NO: 5705722 - DNA, 25 bp, Homo sapien
ggcggatggtggcccaggagacagc

SEQ ID NO: 5705723 - DNA, 25 bp, Homo sapien
cttcctgagcccaatcacgtcatgc

SEQ ID NO: 5705724 - DNA, 25 bp, Homo sapien
gtttcccgggagtcgccacagatgt

SEQ ID NO: 5705725 - DNA, 25 bp, Homo sapien
ctgagtctgggtcaggaagatgtcc

SEQ ID NO: 5705726 - DNA, 25 bp, Homo sapien
gcagacttctgtatacgcagctcag

SEQ ID NO: 5705727 - DNA, 25 bp, Homo sapien
caggttgctgtgagtcagcggaagc

SEQ ID NO: 5705728 - DNA, 25 bp, Homo sapien
gtacgtcaccaccttgttatacaag

SEQ ID NO: 5705729 - DNA, 25 bp, Homo sapien
gctcagcaataatctgttctcagaa

SEQ ID NO: 5705730 - DNA, 25 bp, Homo sapien
agcgctttcgggcaccccctattct

SEQ ID NO: 5705731 - DNA, 25 bp, Homo sapien
ttcgcgccccttgcgttcttgccgc

SEQ ID NO: 5705732 - DNA, 25 bp, Homo sapien
cgaggaaatcaaggcaccagagaag

SEQ ID NO: 5705733 - DNA, 25 bp, Homo sapien
atctggaagtgaatgataaagctcc

SEQ ID NO: 5705734 - DNA, 25 bp, Homo sapien
cagtgaattactgtcaccttgatgg

SEQ ID NO: 5705735 - DNA, 25 bp, Homo sapien
ctctgctcagcaataatctgttctc

SEQ ID NO: 5705736 - DNA, 25 bp, Homo sapien
aaaaatgaatgctaactcctttgcc

SEQ ID NO: 5705737 - DNA, 25 bp, Homo sapien
gcaaacccgaagagcgctttcgggc

SEQ ID NO: 5705738 - DNA, 25 bp, Homo sapien
ctccagggaggtgtcatttctatag

SEQ ID NO: 5705739 - DNA, 25 bp, Homo sapien
ctggatgatcctcaggactgaccag

SEQ ID NO: 5705740 - DNA, 25 bp, Homo sapien
tcaagtgaagaaaactgactttgaa

SEQ ID NO: 5705741 - DNA, 25 bp, Homo sapien
gactttgaagtatttgatgctttaa

SEQ ID NO: 5705742 - DNA, 25 bp, Homo sapien
ccgtgaaaacttgagaggcactctg

SEQ ID NO: 5705743 - DNA, 25 bp, Homo sapien
gttctaaacctacattctcgatttt

SEQ ID NO: 5705744 - DNA, 25 bp, Homo sapien
cgccgacctcttccactccgaggaa

SEQ ID NO: 5705745 - DNA, 25 bp, Homo sapien
cgtgattttacaaggtcccgtggca

SEQ ID NO: 5705746 - DNA, 25 bp, Homo sapien
tttctagatgaggttttacaattgt

SEQ ID NO: 5705747 - DNA, 25 bp, Homo sapien
tgctccgatgtgtctgagctgtcca

SEQ ID NO: 5705748 - DNA, 25 bp, Homo sapien
gactgaggccacacatcatttccag

SEQ ID NO: 5705749 - DNA, 25 bp, Homo sapien
tggactgtacattgctcatttcaca

SEQ ID NO: 5705750 - DNA, 25 bp, Homo sapien
agtgtcggtttatcttcgcgcccct

SEQ ID NO: 5705751 - DNA, 25 bp, Homo sapien
aatacagtgttggtcttgcctgtcc

SEQ ID NO: 5705752 - DNA, 25 bp, Homo sapien
tttccccaagagggaatggactgta

SEQ ID NO: 5705753 - DNA, 25 bp, Homo sapien
cctccaggtcatcctgaacaaggac

SEQ ID NO: 5705754 - DNA, 25 bp, Homo sapien
ttgatggacaagtttcaataaaact

SEQ ID NO: 5705755 - DNA, 25 bp, Homo sapien
agtgctccgatgtgtctgagctgtc

SEQ ID NO: 5705756 - DNA, 25 bp, Homo sapien
tctcggctccagggaggtgtcattt

SEQ ID NO: 5705757 - DNA, 25 bp, Homo sapien
ggtcctgcttgaaggtttgtccagg

SEQ ID NO: 5705758 - DNA, 25 bp, Homo sapien
ccgatgtgtctgagctgtccagttc

SEQ ID NO: 5705759 - DNA, 25 bp, Homo sapien
gcggcatggtggccataagacgccc

SEQ ID NO: 5705760 - DNA, 25 bp, Homo sapien
actccttccgcaggctccttgggac

SEQ ID NO: 5705761 - DNA, 25 bp, Homo sapien
atgctttaatggtggattcccaaaa

SEQ ID NO: 5705762 - DNA, 25 bp, Homo sapien
atcatttccagtcatctgtgtgttt

SEQ ID NO: 5705763 - DNA, 25 bp, Homo sapien
gatcctgatggacagccccgaagac

SEQ ID NO: 5705764 - DNA, 25 bp, Homo sapien
taagcagaggtggctggctctgcag

SEQ ID NO: 5705765 - DNA, 25 bp, Homo sapien
agcagttgctgttgcttattctgaa

SEQ ID NO: 5705766 - DNA, 25 bp, Homo sapien
gttcttgccgcggcttgcctgggca

SEQ ID NO: 5705767 - DNA, 25 bp, Homo sapien
ttatctgggtccttcaacaactgga

SEQ ID NO: 5705768 - DNA, 25 bp, Homo sapien
cctgtccttcaaaatcaacaacaga

SEQ ID NO: 5705769 - DNA, 25 bp, Homo sapien
atctgggtccttcaacaactggagt

SEQ ID NO: 5705770 - DNA, 25 bp, Homo sapien
aaaatcaacaacagattgtctctcg

SEQ ID NO: 5705771 - DNA, 25 bp, Homo sapien
gagggaggagtgagctccctgggtt

SEQ ID NO: 5705772 - DNA, 25 bp, Homo sapien
gacctctgcccctagttagcaagac

SEQ ID NO: 5705773 - DNA, 25 bp, Homo sapien
gcacccccatggctttgagcctcgg

SEQ ID NO: 5705774 - DNA, 25 bp, Homo sapien
tctaaacctacattctcgatttttc

SEQ ID NO: 5705775 - DNA, 25 bp, Homo sapien
agcatcagtacaagttctttgtgga

SEQ ID NO: 5705776 - DNA, 25 bp, Homo sapien
tcagccggaaccggctcccggcccg

SEQ ID NO: 5705777 - DNA, 25 bp, Homo sapien
atggctttgagcctcggggactcat

SEQ ID NO: 5705778 - DNA, 25 bp, Homo sapien
gtgaattactgtcaccttgatggac

SEQ ID NO: 5705779 - DNA, 25 bp, Homo sapien
ttgctgtgagtcagcggaagctccc

SEQ ID NO: 5705780 - DNA, 25 bp, Homo sapien
tccccaagagggaatggactgtaca

SEQ ID NO: 5705781 - DNA, 25 bp, Homo sapien
ggacggggacaggcccaagatcctg

SEQ ID NO: 5705782 - DNA, 25 bp, Homo sapien
gccctcttccctataaaatcacaca

SEQ ID NO: 5705783 - DNA, 25 bp, Homo sapien
catttcacactcttcagaagacatt

SEQ ID NO: 5705784 - DNA, 25 bp, Homo sapien
gaaccacctatacgcgctgtctatc

SEQ ID NO: 5705785 - DNA, 25 bp, Homo sapien
ggaatggactgtacattgctcattt

SEQ ID NO: 5705786 - DNA, 25 bp, Homo sapien
tgctcatttcacactcttcagaaga

SEQ ID NO: 5705787 - DNA, 25 bp, Homo sapien
ccaccggtacaagaagaagtacgtc

SEQ ID NO: 5705788 - DNA, 25 bp, Homo sapien
gctggcaggttgtccagctttttat

SEQ ID NO: 5705789 - DNA, 25 bp, Homo sapien
caccagaagccacaataactttgta

SEQ ID NO: 5705790 - DNA, 25 bp, Homo sapien
gccacagatgtacccactagcccag

SEQ ID NO: 5705791 - DNA, 25 bp, Homo sapien
gcaggttgtccagctttttattcca

SEQ ID NO: 5705792 - DNA, 25 bp, Homo sapien
tcaaaatcaacaacagattgtctct

SEQ ID NO: 5705793 - DNA, 25 bp, Homo sapien
cagaagacatttcatacctgccctg

SEQ ID NO: 5705794 - DNA, 25 bp, Homo sapien
acagcgtgattttacaaggtcccgt

SEQ ID NO: 5705795 - DNA, 25 bp, Homo sapien
ccctacgtctgcaaacccgaagagc

SEQ ID NO: 5705796 - DNA, 25 bp, Homo sapien
agtcataataggtgacagtgttaac

SEQ ID NO: 5705797 - DNA, 25 bp, Homo sapien
aagaagaagtacgtcaccaccttgt

SEQ ID NO: 5705798 - DNA, 25 bp, Homo sapien
ggagagcatcagtacaagttctttg

SEQ ID NO: 5705799 - DNA, 25 bp, Homo sapien
tcctgagcccaatcacgtcatgctg

SEQ ID NO: 5705800 - DNA, 25 bp, Homo sapien
cccgcagacccccatcatgggcaat

SEQ ID NO: 5705801 - DNA, 25 bp, Homo sapien
ccttctgagtctgggtcaggaagat

SEQ ID NO: 5705802 - DNA, 25 bp, Homo sapien
aaccctgccgactcagccggaaccg

SEQ ID NO: 5705803 - DNA, 25 bp, Homo sapien
caagagggaatggactgtacattgc

SEQ ID NO: 5705804 - DNA, 25 bp, Homo sapien
ggttccagtatttacttggtatacc

SEQ ID NO: 5705805 - DNA, 25 bp, Homo sapien
agtcgccacagatgtacccactagc

SEQ ID NO: 5705806 - DNA, 25 bp, Homo sapien
tgcagtgaggcgccgtccgccttcc

SEQ ID NO: 5705807 - DNA, 25 bp, Homo sapien
tctgcagccttaaggccatttttta

SEQ ID NO: 5705808 - DNA, 25 bp, Homo sapien
aaagcgcgattgcgagagctcggca

SEQ ID NO: 5705809 - DNA, 25 bp, Homo sapien
tcggccaacggtgtttcgatggacg

SEQ ID NO: 5705810 - DNA, 25 bp, Homo sapien
aagtgaagaaaactgactttgaagt

SEQ ID NO: 5705811 - DNA, 25 bp, Homo sapien
ttgtggatggtcagtggacgcacga

SEQ ID NO: 5705812 - DNA, 25 bp, Homo sapien
ttgccgcggcttgcctgggcaggta

SEQ ID NO: 5705813 - DNA, 25 bp, Homo sapien
ctcagggtccctttcctgcagtgag

SEQ ID NO: 5705814 - DNA, 25 bp, Homo sapien
tccttccgcaggctccttgggaccc

SEQ ID NO: 5705815 - DNA, 25 bp, Homo sapien
gtgaagaaaactgactttgaagtat

SEQ ID NO: 5705816 - DNA, 25 bp, Homo sapien
tcaacaacagattgtctctcggctc

SEQ ID NO: 5705817 - DNA, 25 bp, Homo sapien
gattcccaaaagtgctccgatgtgt

SEQ ID NO: 5705818 - DNA, 25 bp, Homo sapien
catggtggccataagacgccccgga

SEQ ID NO: 5705819 - DNA, 25 bp, Homo sapien
gtttgtccaggcagagcagctcctg

SEQ ID NO: 5705820 - DNA, 25 bp, Homo sapien
gggtggcagaggatctgcagccctg

SEQ ID NO: 5705821 - DNA, 25 bp, Homo sapien
ccctggccccgcggtgcatgaggct

SEQ ID NO: 5705822 - DNA, 25 bp, Homo sapien
cccaaaagtgctccgatgtgtctga

SEQ ID NO: 5705823 - DNA, 25 bp, Homo sapien
ttccactccgaggaaatcaaggcac

SEQ ID NO: 5705824 - DNA, 25 bp, Homo sapien
ctttgaagtatttgatgctttaatg

SEQ ID NO: 5705825 - DNA, 25 bp, Homo sapien
aagctcccgcccaggctcggccaac

SEQ ID NO: 5705826 - DNA, 25 bp, Homo sapien
taaggccattttttaagtcaccacg

SEQ ID NO: 5705827 - DNA, 25 bp, Homo sapien
cctcggtctgtgacagtcctcctag

SEQ ID NO: 5705828 - DNA, 25 bp, Homo sapien
tagctggcaggttgtccagcttttt

SEQ ID NO: 5705829 - DNA, 25 bp, Homo sapien
ctgtctatcaaggatggagtgatgg

SEQ ID NO: 5705830 - DNA, 25 bp, Homo sapien
ggccataagacgccccggagggaca

SEQ ID NO: 5705831 - DNA, 25 bp, Homo sapien
gagcctcggggactcatcaagtcca

SEQ ID NO: 5705832 - DNA, 25 bp, Homo sapien
tcacactcttcagaagacatttcat

SEQ ID NO: 5705833 - DNA, 25 bp, Homo sapien
tcttcgcgccccttgcgttcttgcc

SEQ ID NO: 5705834 - DNA, 25 bp, Homo sapien
taagccaaaaatgaatgctaactcc

SEQ ID NO: 5705835 - DNA, 25 bp, Homo sapien
tactgtcaccttgatggacaagttt

SEQ ID NO: 5705836 - DNA, 25 bp, Homo sapien
gtggcccaggagacagcacaccacc

SEQ ID NO: 5705837 - DNA, 25 bp, Homo sapien
gaaaacttgagaggcactctgccct

SEQ ID NO: 5705838 - DNA, 25 bp, Homo sapien
ctgtcaccttgatggacaagtttca

SEQ ID NO: 5705839 - DNA, 25 bp, Homo sapien
tgacagtgttaaccgtgaaaacttg

SEQ ID NO: 5705840 - DNA, 25 bp, Homo sapien
tcctcaggactgaccagttagctgg

SEQ ID NO: 5705841 - DNA, 25 bp, Homo sapien
cagcttggcacagttaacaacatca

SEQ ID NO: 5705842 - DNA, 25 bp, Homo sapien
cctggatctgccggaaggagagcat

SEQ ID NO: 5705843 - DNA, 25 bp, Homo sapien
ccagtcataataggtgacagtgtta

SEQ ID NO: 5705844 - DNA, 25 bp, Homo sapien
tagaacttgacagcagccttctgag

SEQ ID NO: 5705845 - DNA, 25 bp, Homo sapien
caggctccttgggacccgcggttcc

SEQ ID NO: 5705846 - DNA, 25 bp, Homo sapien
aactggagtaaacttcccctcacca

SEQ ID NO: 5705847 - DNA, 25 bp, Homo sapien
ctgaggccacacatcatttccagtc

SEQ ID NO: 5705848 - DNA, 25 bp, Homo sapien
agagcatcagtacaagttctttgtg

SEQ ID NO: 5705849 - DNA, 25 bp, Homo sapien
ttgtccaggcagagcagctcctgca

SEQ ID NO: 5705850 - DNA, 25 bp, Homo sapien
aagtacgtcaccaccttgttataca

SEQ ID NO: 5705851 - DNA, 25 bp, Homo sapien
taaccagccagcttggcacagttaa

SEQ ID NO: 5705852 - DNA, 25 bp, Homo sapien
tcccctcaccagaagccacaataac

SEQ ID NO: 5705853 - DNA, 25 bp, Homo sapien
ctcccgttatgccctttgctcctgg

SEQ ID NO: 5705854 - DNA, 25 bp, Homo sapien
acagcacaccaccaggctccacacg

SEQ ID NO: 5705855 - DNA, 25 bp, Homo sapien
aaaattctgggaaacagggactgag

SEQ ID NO: 5705856 - DNA, 25 bp, Homo sapien
aaaactgactttgaagtatttgatg

SEQ ID NO: 5705857 - DNA, 25 bp, Homo sapien
ttatacaagcccatatgaagagctg

SEQ ID NO: 5705858 - DNA, 25 bp, Homo sapien
ttccgggagtcccttgctcagggtc

SEQ ID NO: 5705859 - DNA, 25 bp, Homo sapien
tttacttggtatacctgagtttggg

SEQ ID NO: 5705860 - DNA, 25 bp, Homo sapien
agcgtgattttacaaggtcccgtgg

SEQ ID NO: 5705861 - DNA, 25 bp, Homo sapien
ttgacagcagccttctgagtctggg

SEQ ID NO: 5705862 - DNA, 25 bp, Homo sapien
cacagttaacaacatcattcaagtg

SEQ ID NO: 5705863 - DNA, 25 bp, Homo sapien
gctggctctgcagccttaaggccat

SEQ ID NO: 5705864 - DNA, 25 bp, Homo sapien
tggacgcacgacccttccgagccca

SEQ ID NO: 5705865 - DNA, 25 bp, Homo sapien
atgggcaataccagcagtgagcgcg

SEQ ID NO: 5705866 - DNA, 25 bp, Homo sapien
ccgcccaggctcggccaacggtgtt

SEQ ID NO: 5705867 - DNA, 25 bp, Homo sapien
agaagtacgtcaccaccttgttata

SEQ ID NO: 5705868 - DNA, 25 bp, Homo sapien
atcctgaacaaggacacggggattt

SEQ ID NO: 5705869 - DNA, 25 bp, Homo sapien
gctcggccaacggtgtttcgatgga

SEQ ID NO: 5705870 - DNA, 25 bp, Homo sapien
gaagtatttgatgctttaatggtgg

SEQ ID NO: 5705871 - DNA, 25 bp, Homo sapien
tgagctgtccagttctcccccagga

SEQ ID NO: 5705872 - DNA, 25 bp, Homo sapien
tgtccagctttttattccagtcata

SEQ ID NO: 5705873 - DNA, 25 bp, Homo sapien
caaggatggagtgatggtgctcagc

SEQ ID NO: 5705874 - DNA, 25 bp, Homo sapien
ttcatacctgccctggtcctgcttg

SEQ ID NO: 5705875 - DNA, 25 bp, Homo sapien
gggactgaggccacacatcatttcc

SEQ ID NO: 5705876 - DNA, 25 bp, Homo sapien
gacacggggatttcctgtgatccag

SEQ ID NO: 5705877 - DNA, 25 bp, Homo sapien
tattctgaaaggaatgtagaacttg

SEQ ID NO: 5705878 - DNA, 25 bp, Homo sapien
ccacgtctagaagtcacatgaactc

SEQ ID NO: 5705879 - DNA, 25 bp, Homo sapien
tacctgccctggtcctgcttgaagg

SEQ ID NO: 5705880 - DNA, 25 bp, Homo sapien
gccgcggcttgcctgggcaggtaaa

SEQ ID NO: 5705881 - DNA, 25 bp, Homo sapien
gatggtggcccaggagacagcacac

SEQ ID NO: 5705882 - DNA, 25 bp, Homo sapien
ggcgccgtccgccttccctgtgtcc

SEQ ID NO: 5705883 - DNA, 25 bp, Homo sapien
tgtaagcagaggtggctggctctgc

SEQ ID NO: 5705884 - DNA, 25 bp, Homo sapien
ttctcagaacagacttttcaacctg

SEQ ID NO: 5705885 - DNA, 25 bp, Homo sapien
attagaagctttctgatttctagat

SEQ ID NO: 5705886 - DNA, 25 bp, Homo sapien
aatctgttctcagaacagacttttc

SEQ ID NO: 5705887 - DNA, 25 bp, Homo sapien
gaggccacacatcatttccagtcat

SEQ ID NO: 5705888 - DNA, 25 bp, Homo sapien
cctattctccccccacatctcctcc

SEQ ID NO: 5705889 - DNA, 25 bp, Homo sapien
tttaatggtggattcccaaaagtgc

SEQ ID NO: 5705890 - DNA, 25 bp, Homo sapien
ccagttctcccccaggaccctacca

SEQ ID NO: 5705891 - DNA, 25 bp, Homo sapien
gtggcagaggatctgcagccctggc

SEQ ID NO: 5705892 - DNA, 25 bp, Homo sapien
acgtctgcaaacccgaagagcgctt

SEQ ID NO: 5705893 - DNA, 25 bp, Homo sapien
cagtgaggcgccgtccgccttccct

SEQ ID NO: 5705894 - DNA, 25 bp, Homo sapien
gatttcctgtgatccagctttgctt

SEQ ID NO: 5705895 - DNA, 25 bp, Homo sapien
tgtgagtcagcggaagctcccgtta

SEQ ID NO: 5705896 - DNA, 25 bp, Homo sapien
gggcaggtaaagcgcgattgcgaga

SEQ ID NO: 5705897 - DNA, 25 bp, Homo sapien
aaggagagcatcagtacaagttctt

SEQ ID NO: 5705898 - DNA, 25 bp, Homo sapien
tttttattccagtcataataggtga

SEQ ID NO: 5705899 - DNA, 25 bp, Homo sapien
aggtttgtccaggcagagcagctcc

SEQ ID NO: 5705900 - DNA, 25 bp, Homo sapien
ccgcgctggagcggcatggtggcca

SEQ ID NO: 5705901 - DNA, 25 bp, Homo sapien
gtctgcaaacccgaagagcgctttc

SEQ ID NO: 5705902 - DNA, 25 bp, Homo sapien
tttattccagtcataataggtgaca

SEQ ID NO: 5705903 - DNA, 25 bp, Homo sapien
acatctcctccaggtcatcctgaac

SEQ ID NO: 5705904 - DNA, 25 bp, Homo sapien
ctgggtcaggaagatgtcctttgga

SEQ ID NO: 5705905 - DNA, 25 bp, Homo sapien
tgcttattctgaaaggaatgtagaa

SEQ ID NO: 5705906 - DNA, 25 bp, Homo sapien
ccgtggcaccttgctcaggacctct

SEQ ID NO: 5705907 - DNA, 25 bp, Homo sapien
ctttgagcctcggggactcatcaag

SEQ ID NO: 5705908 - DNA, 25 bp, Homo sapien
tcttccactccgaggaaatcaaggc

SEQ ID NO: 5705909 - DNA, 25 bp, Homo sapien
actcctttgccagtaaaattctggg

SEQ ID NO: 5705910 - DNA, 25 bp, Homo sapien
aggctcggccaacggtgtttcgatg

SEQ ID NO: 5705911 - DNA, 25 bp, Homo sapien
accagttagctggcaggttgtccag

SEQ ID NO: 5705912 - DNA, 25 bp, Homo sapien
aaggtcccgtggcaccttgctcagg

SEQ ID NO: 5705913 - DNA, 25 bp, Homo sapien
tcctgcagcgcctcggtctgtgaca

SEQ ID NO: 5705914 - DNA, 25 bp, Homo sapien
acggggacaggcccaagatcctgat

SEQ ID NO: 5705915 - DNA, 25 bp, Homo sapien
gcggtgcatgaggctgggtgcagtt

SEQ ID NO: 5705916 - DNA, 25 bp, Homo sapien
gcttggcacagttaacaacatcatt

SEQ ID NO: 5705917 - DNA, 25 bp, Homo sapien
gccgactcagccggaaccggctccc

SEQ ID NO: 5705918 - DNA, 25 bp, Homo sapien
gttaacaacatcattcaagtgaaga

SEQ ID NO: 5705919 - DNA, 25 bp, Homo sapien
tgggttccagtatttacttggtata

SEQ ID NO: 5705920 - DNA, 25 bp, Homo sapien
gatggacaagtttcaataaaacttt

SEQ ID NO: 5705921 - DNA, 25 bp, Homo sapien
gccattttttaagtcaccacgtcta

SEQ ID NO: 5705922 - DNA, 25 bp, Homo sapien
ggaccaaagcagacttctgtatacg

SEQ ID NO: 5705923 - DNA, 25 bp, Homo sapien
ctgctcagcaataatctgttctcag

SEQ ID NO: 5705924 - DNA, 25 bp, Homo sapien
cggtacaagaagaagtacgtcacca

SEQ ID NO: 5705925 - DNA, 25 bp, Homo sapien
cccactagcccaggttgctgtgagt

SEQ ID NO: 5705926 - DNA, 25 bp, Homo sapien
ataagacgccccggagggacagctc

SEQ ID NO: 5705927 - DNA, 25 bp, Homo sapien
tgggaaagtgtcggtttatcttcgc

SEQ ID NO: 5705928 - DNA, 25 bp, Homo sapien
cgagagctcggcaaccctgccgact

SEQ ID NO: 5705929 - DNA, 25 bp, Homo sapien
acaagcccatatgaagagctggggg

SEQ ID NO: 5705930 - DNA, 25 bp, Homo sapien
catgaggctgggtgcagttctaaac

SEQ ID NO: 5705931 - DNA, 25 bp, Homo sapien
gtgctccgactccttccgcaggctc

SEQ ID NO: 5705932 - DNA, 25 bp, Homo sapien
ccgagcccatagtaaccagccagct

SEQ ID NO: 5705933 - DNA, 25 bp, Homo sapien
ttaagtcaccacgtctagaagtcac

SEQ ID NO: 5705934 - DNA, 25 bp, Homo sapien
gcttgaaggtttgtccaggcagagc

SEQ ID NO: 5705935 - DNA, 25 bp, Homo sapien
atgctaactcctttgccagtaaaat

SEQ ID NO: 5705936 - DNA, 25 bp, Homo sapien
ggagtgagctccctgggttccagta

SEQ ID NO: 5705937 - DNA, 25 bp, Homo sapien
acatttcatacctgccctggtcctg

SEQ ID NO: 5705938 - DNA, 25 bp, Homo sapien
agtcctcctagcacccccatggctt

SEQ ID NO: 5705939 - DNA, 25 bp, Homo sapien
tcagcggaagctcccgttatgccct

SEQ ID NO: 5705940 - DNA, 25 bp, Homo sapien
gtcatgctgaaccacctatacgcgc

SEQ ID NO: 5705941 - DNA, 25 bp, Homo sapien
acagattgtctctcggctccaggga

SEQ ID NO: 5705942 - DNA, 25 bp, Homo sapien
gcaggtaaagcgcgattgcgagagc

SEQ ID NO: 5705943 - DNA, 25 bp, Homo sapien
accggtacaagaagaagtacgtcac

SEQ ID NO: 5705944 - DNA, 25 bp, Homo sapien
ttctcgatttttcttaagccaaaaa

SEQ ID NO: 5705945 - DNA, 25 bp, Homo sapien
cttgttatacaagcccatatgaaga

SEQ ID NO: 5705946 - DNA, 25 bp, Homo sapien
ggcctggcagcatgatctggaagtg

SEQ ID NO: 5705947 - DNA, 25 bp, Homo sapien
ggtttatcttcgcgccccttgcgtt

SEQ ID NO: 5705948 - DNA, 25 bp, Homo sapien
cattctcgatttttcttaagccaaa

SEQ ID NO: 5705949 - DNA, 25 bp, Homo sapien
ggagtaaacttcccctcaccagaag

SEQ ID NO: 5705950 - DNA, 25 bp, Homo sapien
gtggatggtcagtggacgcacgacc

SEQ ID NO: 5705951 - DNA, 25 bp, Homo sapien
gctgtgagtcagcggaagctcccgt

SEQ ID NO: 5705952 - DNA, 25 bp, Homo sapien
ttgaaggtttgtccaggcagagcag

SEQ ID NO: 5705953 - DNA, 25 bp, Homo sapien
acaaggtcccgtggcaccttgctca

SEQ ID NO: 5705954 - DNA, 25 bp, Homo sapien
cagaggatctgcagccctggccccg

SEQ ID NO: 5705955 - DNA, 25 bp, Homo sapien
caccaaggacggggacaggcccaag

SEQ ID NO: 5705956 - DNA, 25 bp, Homo sapien
cagtcatctgtgtgtttttaaggcc

SEQ ID NO: 5705957 - DNA, 25 bp, Homo sapien
cttcaaaatcaacaacagattgtct

SEQ ID NO: 5705958 - DNA, 25 bp, Homo sapien
cctagcacccccatggctttgagcc

SEQ ID NO: 5705959 - DNA, 25 bp, Homo sapien
attactgtcaccttgatggacaagt

SEQ ID NO: 5705960 - DNA, 25 bp, Homo sapien
gtttacttatctgggtccttcaaca

SEQ ID NO: 5705961 - DNA, 25 bp, Homo sapien
gctgccggatttctccattcagctg

SEQ ID NO: 5705962 - DNA, 25 bp, Homo sapien
tccagtcatctgtgtgtttttaagg

SEQ ID NO: 5705963 - DNA, 25 bp, Homo sapien
tgggtgcagttctaaacctacattc

SEQ ID NO: 5705964 - DNA, 25 bp, Homo sapien
tgtgtttttaaggccagccacttgt

SEQ ID NO: 5705965 - DNA, 25 bp, Homo sapien
gcccatagtaaccagccagcttggc

SEQ ID NO: 5705966 - DNA, 25 bp, Homo sapien
acagtgttaaccgtgaaaacttgag

SEQ ID NO: 5705967 - DNA, 25 bp, Homo sapien
gatggtgctcagcgcaacccaccgg

SEQ ID NO: 5705968 - DNA, 25 bp, Homo sapien
gaattactgtcaccttgatggacaa

SEQ ID NO: 5705969 - DNA, 25 bp, Homo sapien
aggggtggcagaggatctgcagccc

SEQ ID NO: 5705970 - DNA, 25 bp, Homo sapien
cgcggcttgcctgggcaggtaaagc

SEQ ID NO: 5705971 - DNA, 25 bp, Homo sapien
ctcatttcacactcttcagaagaca

SEQ ID NO: 5705972 - DNA, 25 bp, Homo sapien
ccataagacgccccggagggacagc

SEQ ID NO: 5705973 - DNA, 25 bp, Homo sapien
tcctggcctggcagcatgatctgga

SEQ ID NO: 5705974 - DNA, 25 bp, Homo sapien
gaagagcgctttcgggcacccccta

SEQ ID NO: 5705975 - DNA, 25 bp, Homo sapien
ccctcaccagaagccacaataactt

SEQ ID NO: 5705976 - DNA, 25 bp, Homo sapien
ggcatggtggccataagacgccccg

SEQ ID NO: 5705977 - DNA, 25 bp, Homo sapien
gcgcgccgcgctggagcggcatggt

SEQ ID NO: 5705978 - DNA, 25 bp, Homo sapien
accctaccatcaggagccctacgtc

SEQ ID NO: 5705979 - DNA, 25 bp, Homo sapien
tttgatgctttaatggtggattccc

SEQ ID NO: 5705980 - DNA, 25 bp, Homo sapien
acactcttcagaagacatttcatac

SEQ ID NO: 5705981 - DNA, 25 bp, Homo sapien
tatacgcgctgtctatcaaggatgg

SEQ ID NO: 5705982 - DNA, 25 bp, Homo sapien
taggtgacagtgttaaccgtgaaaa

SEQ ID NO: 5705983 - DNA, 25 bp, Homo sapien
gtgatccagctttgcttcctgagcc

SEQ ID NO: 5705984 - DNA, 25 bp, Homo sapien
atttctatagaaattagaagctttc

SEQ ID NO: 5705985 - DNA, 25 bp, Homo sapien
ttccagtcataataggtgacagtgt

SEQ ID NO: 5705986 - DNA, 25 bp, Homo sapien
gttagctggcaggttgtccagcttt

SEQ ID NO: 5705987 - DNA, 25 bp, Homo sapien
aactttgtagccatcctggatctgc

SEQ ID NO: 5705988 - DNA, 25 bp, Homo sapien
gtttcttacagtcatgtgcactaag

SEQ ID NO: 5705989 - DNA, 25 bp, Homo sapien
cgaagacgccgacctcttccactcc

SEQ ID NO: 5705990 - DNA, 25 bp, Homo sapien
gagcgcgccgcgctggagcggcatg

SEQ ID NO: 5705991 - DNA, 25 bp, Homo sapien
acgtcaccaccttgttatacaagcc

SEQ ID NO: 5705992 - DNA, 25 bp, Homo sapien
aatcaacaacagattgtctctcggc

SEQ ID NO: 5705993 - DNA, 25 bp, Homo sapien
gcaccccctattctccccccacatc

SEQ ID NO: 5705994 - DNA, 25 bp, Homo sapien
agtaaacttcccctcaccagaagcc

SEQ ID NO: 5705995 - DNA, 25 bp, Homo sapien
tttttgtaagcagaggtggctggct

SEQ ID NO: 5705996 - DNA, 25 bp, Homo sapien
tggtatacctgagtttgggggtacc

SEQ ID NO: 5705997 - DNA, 25 bp, Homo sapien
ccccacatctcctccaggtcatcct

SEQ ID NO: 5705998 - DNA, 25 bp, Homo sapien
taactcctttgccagtaaaattctg

SEQ ID NO: 5705999 - DNA, 25 bp, Homo sapien
cccttgctcagggtccctttcctgc

SEQ ID NO: 5706000 - DNA, 25 bp, Homo sapien
cacggggatttcctgtgatccagct

SEQ ID NO: 5706001 - DNA, 25 bp, Homo sapien
ccagggaggtgtcatttctatagaa

SEQ ID NO: 5706002 - DNA, 25 bp, Homo sapien
tcctgtgatccagctttgcttcctg

SEQ ID NO: 5706003 - DNA, 25 bp, Homo sapien
cctcttccctataaaatcacacagc

SEQ ID NO: 5706004 - DNA, 25 bp, Homo sapien
accttgttatacaagcccatatgaa

SEQ ID NO: 5706005 - DNA, 25 bp, Homo sapien
gggagtcccttgctcagggtccctt

SEQ ID NO: 5706006 - DNA, 25 bp, Homo sapien
cgcagacccccatcatgggcaatac

SEQ ID NO: 5706007 - DNA, 25 bp, Homo sapien
aaggcaccagagaaggaggaattcc

SEQ ID NO: 5706008 - DNA, 25 bp, Homo sapien
gtcaccacgtctagaagtcacatga

SEQ ID NO: 5706009 - DNA, 25 bp, Homo sapien
taccagcagtgagcgcgccgcgctg

SEQ ID NO: 5706010 - DNA, 25 bp, Homo sapien
cagttgctgttgcttattctgaaag

SEQ ID NO: 5706011 - DNA, 25 bp, Homo sapien
tacccactagcccaggttgctgtga

SEQ ID NO: 5706012 - DNA, 25 bp, Homo sapien
gcagccctggccccgcggtgcatga

SEQ ID NO: 5706013 - DNA, 25 bp, Homo sapien
agctcccgttatgccctttgctcct

SEQ ID NO: 5706014 - DNA, 25 bp, Homo sapien
ctccattcagctggatgatcctcag

SEQ ID NO: 5706015 - DNA, 25 bp, Homo sapien
ggttccgggagtcccttgctcaggg

SEQ ID NO: 5706016 - DNA, 25 bp, Homo sapien
ggaagtgaatgataaagctcccgcc

SEQ ID NO: 5706017 - DNA, 25 bp, Homo sapien
aacaacagattgtctctcggctcca

SEQ ID NO: 5706018 - DNA, 25 bp, Homo sapien
atctgcagccctggccccgcggtgc

SEQ ID NO: 5706019 - DNA, 25 bp, Homo sapien
tccccgcagacccccatcatgggca

SEQ ID NO: 5706020 - DNA, 25 bp, Homo sapien
ttctccattcagctggatgatcctc

SEQ ID NO: 5706021 - DNA, 25 bp, Homo sapien
tcgccacagatgtacccactagccc

SEQ ID NO: 5706022 - DNA, 25 bp, Homo sapien
caataatctgttctcagaacagact

SEQ ID NO: 5706023 - DNA, 25 bp, Homo sapien
acccccatggctttgagcctcgggg

SEQ ID NO: 5706024 - DNA, 25 bp, Homo sapien
ggaagtttacttatctgggtccttc

SEQ ID NO: 5706025 - DNA, 25 bp, Homo sapien
aagacgccccggagggacagctcgg

SEQ ID NO: 5706026 - DNA, 25 bp, Homo sapien
gtcacatgaactctgctcagcaata

SEQ ID NO: 5706027 - DNA, 25 bp, Homo sapien
cccaggagacagcacaccaccaggc

SEQ ID NO: 5706028 - DNA, 25 bp, Homo sapien
tggattcccaaaagtgctccgatgt

SEQ ID NO: 5706029 - DNA, 25 bp, Homo sapien
tacgcgctgtctatcaaggatggag

SEQ ID NO: 5706030 - DNA, 25 bp, Homo sapien
ctagaagtcacatgaactctgctca

SEQ ID NO: 5706031 - DNA, 25 bp, Homo sapien
tggtggccataagacgccccggagg

SEQ ID NO: 5706032 - DNA, 25 bp, Homo sapien
agtgagctccctgggttccagtatt

SEQ ID NO: 5706033 - DNA, 25 bp, Homo sapien
caggagacagcacaccaccaggctc

SEQ ID NO: 5706034 - DNA, 25 bp, Homo sapien
ctgccctcttccctataaaatcaca

SEQ ID NO: 5706035 - DNA, 25 bp, Homo sapien
ggtgacagtgttaaccgtgaaaact

SEQ ID NO: 5706036 - DNA, 25 bp, Homo sapien
cgccgtccgccttccctgtgtcccc

SEQ ID NO: 5706037 - DNA, 25 bp, Homo sapien
tgctgaaccacctatacgcgctgtc

SEQ ID NO: 5706038 - DNA, 25 bp, Homo sapien
aaagtgtcggtttatcttcgcgccc

SEQ ID NO: 5706039 - DNA, 25 bp, Homo sapien
ccaccttgttatacaagcccatatg

SEQ ID NO: 5706040 - DNA, 25 bp, Homo sapien
aggccagccacttgtccctgttgag

SEQ ID NO: 5706041 - DNA, 25 bp, Homo sapien
caacaactggagtaaacttcccctc

SEQ ID NO: 5706042 - DNA, 25 bp, Homo sapien
ttggcacagttaacaacatcattca

SEQ ID NO: 5706043 - DNA, 25 bp, Homo sapien
ccagtatttacttggtatacctgag

SEQ ID NO: 5706044 - DNA, 25 bp, Homo sapien
tggacaagtttcaataaaactttgt

SEQ ID NO: 5706045 - DNA, 25 bp, Homo sapien
cactaagtactctttttgtaagcag

SEQ ID NO: 5706046 - DNA, 25 bp, Homo sapien
ccaagatcctgatggacagccccga

SEQ ID NO: 5706047 - DNA, 25 bp, Homo sapien
ttttttaagtcaccacgtctagaag

SEQ ID NO: 5706048 - DNA, 25 bp, Homo sapien
gatccagctttgcttcctgagccca

SEQ ID NO: 5706049 - DNA, 25 bp, Homo sapien
gatggacagccccgaagacgccgac

SEQ ID NO: 5706050 - DNA, 25 bp, Homo sapien
gacttttcaaaacagtgaattactg

SEQ ID NO: 5706051 - DNA, 25 bp, Homo sapien
ccccatggctttgagcctcggggac

SEQ ID NO: 5706052 - DNA, 25 bp, Homo sapien
gaatgctaactcctttgccagtaaa

SEQ ID NO: 5706053 - DNA, 25 bp, Homo sapien
ctctgccctcttccctataaaatca

SEQ ID NO: 5706054 - DNA, 25 bp, Homo sapien
atcctggatctgccggaaggagagc

SEQ ID NO: 5706055 - DNA, 25 bp, Homo sapien
tcaggacctctgcccctagttagca

SEQ ID NO: 5706056 - DNA, 25 bp, Homo sapien
gggcaataccagcagtgagcgcgcc

SEQ ID NO: 5706057 - DNA, 25 bp, Homo sapien
cttacagtcatgtgcactaagtact

SEQ ID NO: 5706058 - DNA, 25 bp, Homo sapien
gaagaagtacgtcaccaccttgtta

SEQ ID NO: 5706059 - DNA, 25 bp, Homo sapien
gggtccttcaacaactggagtaaac

SEQ ID NO: 5706060 - DNA, 25 bp, Homo sapien
aaacccgaagagcgctttcgggcac

SEQ ID NO: 5706061 - DNA, 25 bp, Homo sapien
ggtgtttcgatggacggggggcgga

SEQ ID NO: 5706062 - DNA, 25 bp, Homo sapien
taaacctacattctcgatttttctt

SEQ ID NO: 5706063 - DNA, 25 bp, Homo sapien
agcagctcctgcagcgcctcggtct

SEQ ID NO: 5706064 - DNA, 25 bp, Homo sapien
tatttacttggtatacctgagtttg

SEQ ID NO: 5706065 - DNA, 25 bp, Homo sapien
agctcagtttcccgggagtcgccac

SEQ ID NO: 5706066 - DNA, 25 bp, Homo sapien
caggaagatgtcctttggaccaaag

SEQ ID NO: 5706067 - DNA, 25 bp, Homo sapien
aagccacaataactttgtagccatc

SEQ ID NO: 5706068 - DNA, 25 bp, Homo sapien
ccctttcctgcagtgaggcgccgtc

SEQ ID NO: 5706069 - DNA, 25 bp, Homo sapien
cctatacgcgctgtctatcaaggat

SEQ ID NO: 5706070 - DNA, 25 bp, Homo sapien
ccaatcacgtcatgctgaaccacct

SEQ ID NO: 5706071 - DNA, 25 bp, Homo sapien
gagcccatagtaaccagccagcttg

SEQ ID NO: 5706072 - DNA, 25 bp, Homo sapien
cggggactcatcaagtccaagaaaa

SEQ ID NO: 5706073 - DNA, 25 bp, Homo sapien
tccgaggaaatcaaggcaccagaga

SEQ ID NO: 5706074 - DNA, 25 bp, Homo sapien
ggatttctccattcagctggatgat

SEQ ID NO: 5706075 - DNA, 25 bp, Homo sapien
cacatgaactctgctcagcaataat

SEQ ID NO: 5706076 - DNA, 25 bp, Homo sapien
ccatagtaaccagccagcttggcac

SEQ ID NO: 5706077 - DNA, 25 bp, Homo sapien
cgttatgccctttgctcctggtggg

SEQ ID NO: 5706078 - DNA, 25 bp, Homo sapien
tcagcgcaacccaccggtacaagaa

SEQ ID NO: 5706079 - DNA, 25 bp, Homo sapien
ccagcagtgagcgcgccgcgctgga

SEQ ID NO: 5706080 - DNA, 25 bp, Homo sapien
gtaaaattctgggaaacagggactg

SEQ ID NO: 5706081 - DNA, 25 bp, Homo sapien
ctccacacgtgcatgctttccccaa

SEQ ID NO: 5706082 - DNA, 25 bp, Homo sapien
gccacttgtccctgttgaggcctgg

SEQ ID NO: 5706083 - DNA, 25 bp, Homo sapien
cgattgcgagagctcggcaaccctg

SEQ ID NO: 5706084 - DNA, 25 bp, Homo sapien
ggactgaccagttagctggcaggtt

SEQ ID NO: 5706085 - DNA, 25 bp, Homo sapien
tccctgttgaggcctggctatggaa

SEQ ID NO: 5706086 - DNA, 25 bp, Homo sapien
gcccgaggggcgtggtgtcctggtg

SEQ ID NO: 5706087 - DNA, 25 bp, Homo sapien
aatcaaggcaccagagaaggaggaa

SEQ ID NO: 5706088 - DNA, 25 bp, Homo sapien
taacaacatcattcaagtgaagaaa

SEQ ID NO: 5706089 - DNA, 25 bp, Homo sapien
ctatagaaattagaagctttctgat

SEQ ID NO: 5706090 - DNA, 25 bp, Homo sapien
gttgggaaagtgtcggtttatcttc

SEQ ID NO: 5706091 - DNA, 25 bp, Homo sapien
tgcagttctaaacctacattctcga

SEQ ID NO: 5706092 - DNA, 25 bp, Homo sapien
attgctcatttcacactcttcagaa

SEQ ID NO: 5706093 - DNA, 25 bp, Homo sapien
aggccattttttaagtcaccacgtc

SEQ ID NO: 5706094 - DNA, 25 bp, Homo sapien
ggcggaaaggaagtttacttatctg

SEQ ID NO: 5706095 - DNA, 25 bp, Homo sapien
ctgatggacagccccgaagacgccg

SEQ ID NO: 5706096 - DNA, 25 bp, Homo sapien
gctccgactccttccgcaggctcct

SEQ ID NO: 5706097 - DNA, 25 bp, Homo sapien
ggcaccagagaaggaggaattcctg

SEQ ID NO: 5706098 - DNA, 25 bp, Homo sapien
aaaacagtgaattactgtcaccttg

SEQ ID NO: 5706099 - DNA, 25 bp, Homo sapien
actaaatacagtgttggtcttgcct

SEQ ID NO: 5706100 - DNA, 25 bp, Homo sapien
agctcggcaaccctgccgactcagc

SEQ ID NO: 5706101 - DNA, 25 bp, Homo sapien
cccaggaccctaccatcaggagccc

SEQ ID NO: 5706102 - DNA, 25 bp, Homo sapien
gtatacgcagctcagtttcccggga

SEQ ID NO: 5706103 - DNA, 25 bp, Homo sapien
tgtccccgcagacccccatcatggg

SEQ ID NO: 5706104 - DNA, 25 bp, Homo sapien
attcctggcctggcagcatgatctg

SEQ ID NO: 5706105 - DNA, 25 bp, Homo sapien
atgataaagctcccgcccaggctcg

SEQ ID NO: 5706106 - DNA, 25 bp, Homo sapien
ggcaccaaggacggggacaggccca

SEQ ID NO: 5706107 - DNA, 25 bp, Homo sapien
cgccccttgcgttcttgccgcggct

SEQ ID NO: 5706108 - DNA, 25 bp, Homo sapien
cgcacgacccttccgagcccatagt

SEQ ID NO: 5706109 - DNA, 25 bp, Homo sapien
ctgtccagttctcccccaggaccct

SEQ ID NO: 5706110 - DNA, 25 bp, Homo sapien
cctgtgtccccgcagacccccatca

SEQ ID NO: 5706111 - DNA, 25 bp, Homo sapien
tgttatacaagcccatatgaagagc

SEQ ID NO: 5706112 - DNA, 25 bp, Homo sapien
cacgacccttccgagcccatagtaa

SEQ ID NO: 5706113 - DNA, 25 bp, Homo sapien
gtcatctgtgtgtttttaaggccag

SEQ ID NO: 5706114 - DNA, 25 bp, Homo sapien
ggggcgtggtgtcctggtgctccga

SEQ ID NO: 5706115 - DNA, 25 bp, Homo sapien
ggtgcagttctaaacctacattctc

SEQ ID NO: 5706116 - DNA, 25 bp, Homo sapien
cacaccaccaggctccacacgtgca

SEQ ID NO: 5706117 - DNA, 25 bp, Homo sapien
agaagccacaataactttgtagcca

SEQ ID NO: 5706118 - DNA, 25 bp, Homo sapien
tgtctgagctgtccagttctccccc

SEQ ID NO: 5706119 - DNA, 25 bp, Homo sapien
gactcatcaagtccaagaaaagagg

SEQ ID NO: 5706120 - DNA, 25 bp, Homo sapien
agccaaaaatgaatgctaactcctt

SEQ ID NO: 5706121 - DNA, 25 bp, Homo sapien
gaaacagggactgaggccacacatc

SEQ ID NO: 5706122 - DNA, 25 bp, Homo sapien
tctttttgtaagcagaggtggctgg

SEQ ID NO: 5706123 - DNA, 25 bp, Homo sapien
ggccaacggtgtttcgatggacggg

SEQ ID NO: 5706124 - DNA, 25 bp, Homo sapien
cagaacagacttttcaacctgctgc

SEQ ID NO: 5706125 - DNA, 25 bp, Homo sapien
ctgagcccaatcacgtcatgctgaa

SEQ ID NO: 5706126 - DNA, 25 bp, Homo sapien
gaggcgccgtccgccttccctgtgt

SEQ ID NO: 5706127 - DNA, 25 bp, Homo sapien
agccctggccccgcggtgcatgagg

SEQ ID NO: 5706128 - DNA, 25 bp, Homo sapien
agtcagcggaagctcccgttatgcc

SEQ ID NO: 5706129 - DNA, 25 bp, Homo sapien
gacaagtttcaataaaactttgtaa

SEQ ID NO: 5706130 - DNA, 25 bp, Homo sapien
catgatctggaagtgaatgataaag

SEQ ID NO: 5706131 - DNA, 25 bp, Homo sapien
ccaggctcggccaacggtgtttcga

SEQ ID NO: 5706132 - DNA, 25 bp, Homo sapien
cccctagttagcaagactgcagcag

SEQ ID NO: 5706133 - DNA, 25 bp, Homo sapien
agcaataatctgttctcagaacaga

SEQ ID NO: 5706134 - DNA, 25 bp, Homo sapien
atacgcagctcagtttcccgggagt

SEQ ID NO: 5706135 - DNA, 25 bp, Homo sapien
ctttggaccaaagcagacttctgta

SEQ ID NO: 5706136 - DNA, 25 bp, Homo sapien
ctgcttgaaggtttgtccaggcaga

SEQ ID NO: 5706137 - DNA, 25 bp, Homo sapien
tccttcaaaatcaacaacagattgt

SEQ ID NO: 5706138 - DNA, 25 bp, Homo sapien
cactagcccaggttgctgtgagtca

SEQ ID NO: 5706139 - DNA, 25 bp, Homo sapien
gcggttgggaaagtgtcggtttatc

SEQ ID NO: 5706140 - DNA, 25 bp, Homo sapien
tggaactaaatacagtgttggtctt

SEQ ID NO: 5706141 - DNA, 25 bp, Homo sapien
tctgtgacagtcctcctagcacccc

SEQ ID NO: 5706142 - DNA, 25 bp, Homo sapien
acttctgtatacgcagctcagtttc

SEQ ID NO: 5706143 - DNA, 25 bp, Homo sapien
catacctgccctggtcctgcttgaa

SEQ ID NO: 5706144 - DNA, 25 bp, Homo sapien
gatgtacccactagcccaggttgct

SEQ ID NO: 5706145 - DNA, 25 bp, Homo sapien
cggcttgcctgggcaggtaaagcgc

SEQ ID NO: 5706146 - DNA, 25 bp, Homo sapien
ctataaaatcacacagcgtgatttt

SEQ ID NO: 5706147 - DNA, 25 bp, Homo sapien
gccagcttggcacagttaacaacat

SEQ ID NO: 5706148 - DNA, 25 bp, Homo sapien
ccgtccgccttccctgtgtccccgc

SEQ ID NO: 5706149 - DNA, 25 bp, Homo sapien
cgctttcgggcaccccctattctcc

SEQ ID NO: 5706150 - DNA, 25 bp, Homo sapien
ctttgccagtaaaattctgggaaac

SEQ ID NO: 5706151 - DNA, 25 bp, Homo sapien
aggtaaagcgcgattgcgagagctc

SEQ ID NO: 5706152 - DNA, 25 bp, Homo sapien
gctcagcgcaacccaccggtacaag

SEQ ID NO: 5706153 - DNA, 25 bp, Homo sapien
ggccccgcggtgcatgaggctgggt

SEQ ID NO: 5706154 - DNA, 25 bp, Homo sapien
atgaatgctaactcctttgccagta

SEQ ID NO: 5706155 - DNA, 25 bp, Homo sapien
gaagctttctgatttctagatgagg

SEQ ID NO: 5706156 - DNA, 25 bp, Homo sapien
ccgacctcttccactccgaggaaat

SEQ ID NO: 5706157 - DNA, 25 bp, Homo sapien
agcgcctcggtctgtgacagtcctc

SEQ ID NO: 5706158 - DNA, 25 bp, Homo sapien
gcgccgcgctggagcggcatggtgg

SEQ ID NO: 5706159 - DNA, 25 bp, Homo sapien
tttaaggccagccacttgtccctgt

SEQ ID NO: 5706160 - DNA, 25 bp, Homo sapien
tcggctccagggaggtgtcatttct

SEQ ID NO: 5706161 - DNA, 25 bp, Homo sapien
gcaataccagcagtgagcgcgccgc

SEQ ID NO: 5706162 - DNA, 25 bp, Homo sapien
caccaccttgttatacaagcccata

SEQ ID NO: 5706163 - DNA, 25 bp, Homo sapien
gtacaagaagaagtacgtcaccacc

SEQ ID NO: 5706164 - DNA, 25 bp, Homo sapien
gacccccatcatgggcaataccagc

SEQ ID NO: 5706165 - DNA, 25 bp, Homo sapien
ggcgtggtgtcctggtgctccgact

SEQ ID NO: 5706166 - DNA, 25 bp, Homo sapien
ttccgagcccatagtaaccagccag

SEQ ID NO: 5706167 - DNA, 25 bp, Homo sapien
ccctggtcctgcttgaaggtttgtc

SEQ ID NO: 5706168 - DNA, 25 bp, Homo sapien
ttcttaagccaaaaatgaatgctaa

SEQ ID NO: 5706169 - DNA, 25 bp, Homo sapien
gaaatcaaggcaccagagaaggagg

SEQ ID NO: 5706170 - DNA, 25 bp, Homo sapien
cctttgctcctggtgggagagggag

SEQ ID NO: 5706171 - DNA, 25 bp, Homo sapien
aaagtgctccgatgtgtctgagctg

SEQ ID NO: 5706172 - DNA, 25 bp, Homo sapien
cctctgcccctagttagcaagactg

SEQ ID NO: 5706173 - DNA, 25 bp, Homo sapien
tatttgatgctttaatggtggattc

SEQ ID NO: 5706174 - DNA, 25 bp, Homo sapien
tacagtcatgtgcactaagtactct

SEQ ID NO: 5706175 - DNA, 25 bp, Homo sapien
cttttcaaaacagtgaattactgtc

SEQ ID NO: 5706176 - DNA, 25 bp, Homo sapien
tgccggatttctccattcagctgga

SEQ ID NO: 5706177 - DNA, 25 bp, Homo sapien
tccagctttttattccagtcataat

SEQ ID NO: 5706178 - DNA, 25 bp, Homo sapien
ggaggaattcctggcctggcagcat

SEQ ID NO: 5706179 - DNA, 25 bp, Homo sapien
gctcaggacctctgcccctagttag

SEQ ID NO: 5706180 - DNA, 25 bp, Homo sapien
ccaaaaatgaatgctaactcctttg

SEQ ID NO: 5706181 - DNA, 25 bp, Homo sapien
cctaccatcaggagccctacgtctg

SEQ ID NO: 5706182 - DNA, 25 bp, Homo sapien
tgttaaccgtgaaaacttgagaggc

SEQ ID NO: 5706183 - DNA, 25 bp, Homo sapien
agcccaggttgctgtgagtcagcgg

SEQ ID NO: 5706184 - DNA, 25 bp, Homo sapien
aatcacgtcatgctgaaccacctat

SEQ ID NO: 5706185 - DNA, 25 bp, Homo sapien
tgaacaaggacacggggatttcctg

SEQ ID NO: 5706186 - DNA, 25 bp, Homo sapien
aatgtagaacttgacagcagccttc

SEQ ID NO: 5706187 - DNA, 25 bp, Homo sapien
tttttaaggccagccacttgtccct

SEQ ID NO: 5706188 - DNA, 25 bp, Homo sapien
cagtaaaattctgggaaacagggac

SEQ ID NO: 5706189 - DNA, 25 bp, Homo sapien
gccagccacttgtccctgttgaggc

SEQ ID NO: 5706190 - DNA, 25 bp, Homo sapien
acttatctgggtccttcaacaactg

SEQ ID NO: 5706191 - DNA, 25 bp, Homo sapien
cagccccgaagacgccgacctcttc

SEQ ID NO: 5706192 - DNA, 25 bp, Homo sapien
gtctatcaaggatggagtgatggtg

SEQ ID NO: 5706193 - DNA, 25 bp, Homo sapien
aattctgggaaacagggactgaggc

SEQ ID NO: 5706194 - DNA, 25 bp, Homo sapien
ggggcggatggtggcccaggagaca

SEQ ID NO: 5706195 - DNA, 25 bp, Homo sapien
agagcgctttcgggcaccccctatt

SEQ ID NO: 5706196 - DNA, 25 bp, Homo sapien
agagcagctcctgcagcgcctcggt

SEQ ID NO: 5706197 - DNA, 25 bp, Homo sapien
ttgcctgggcaggtaaagcgcgatt

SEQ ID NO: 5706198 - DNA, 25 bp, Homo sapien
atttttcttaagccaaaaatgaatg

SEQ ID NO: 5706199 - DNA, 25 bp, Homo sapien
caccagagaaggaggaattcctggc

SEQ ID NO: 5706200 - DNA, 25 bp, Homo sapien
attcagctggatgatcctcaggact

SEQ ID NO: 5706201 - DNA, 25 bp, Homo sapien
tcctcctagcacccccatggctttg

SEQ ID NO: 5706202 - DNA, 25 bp, Homo sapien
gctttaatggtggattcccaaaagt

SEQ ID NO: 5706203 - DNA, 25 bp, Homo sapien
aggacctctgcccctagttagcaag

SEQ ID NO: 5706204 - DNA, 25 bp, Homo sapien
cgcgccccttgcgttcttgccgcgg

SEQ ID NO: 5706205 - DNA, 25 bp, Homo sapien
attgcgagagctcggcaaccctgcc

SEQ ID NO: 5706206 - DNA, 25 bp, Homo sapien
caccaccaggctccacacgtgcatg

SEQ ID NO: 5706207 - DNA, 25 bp, Homo sapien
caaggacacggggatttcctgtgat

SEQ ID NO: 5706208 - DNA, 25 bp, Homo sapien
ccattcagctggatgatcctcagga

SEQ ID NO: 5706209 - DNA, 25 bp, Homo sapien
cagttaacaacatcattcaagtgaa

SEQ ID NO: 5706210 - DNA, 25 bp, Homo sapien
tccaggtcatcctgaacaaggacac

SEQ ID NO: 5706211 - DNA, 25 bp, Homo sapien
agagggaatggactgtacattgctc

SEQ ID NO: 5706212 - DNA, 25 bp, Homo sapien
aactgactttgaagtatttgatgct

SEQ ID NO: 5706213 - DNA, 25 bp, Homo sapien
ctgatttctagatgaggttttacaa

SEQ ID NO: 5706214 - DNA, 25 bp, Homo sapien
tggctctgcagccttaaggccattt

SEQ ID NO: 5706215 - DNA, 25 bp, Homo sapien
ggggacaggcccaagatcctgatgg

SEQ ID NO: 5706216 - DNA, 25 bp, Homo sapien
atcaaggatggagtgatggtgctca

SEQ ID NO: 5706217 - DNA, 25 bp, Homo sapien
ttcttacagtcatgtgcactaagta

SEQ ID NO: 5706218 - DNA, 25 bp, Homo sapien
cttccgcaggctccttgggacccgc

SEQ ID NO: 5706219 - DNA, 25 bp, Homo sapien
cagttagctggcaggttgtccagct

SEQ ID NO: 5706220 - DNA, 25 bp, Homo sapien
aaacttgagaggcactctgccctct

SEQ ID NO: 5706221 - DNA, 25 bp, Homo sapien
agggacagctcggggggcaccaagg

SEQ ID NO: 5706222 - DNA, 25 bp, Homo sapien
tcagcaataatctgttctcagaaca

SEQ ID NO: 5706223 - DNA, 25 bp, Homo sapien
tgttctcagaacagacttttcaacc

SEQ ID NO: 5706224 - DNA, 25 bp, Homo sapien
tcaaaacagtgaattactgtcacct

SEQ ID NO: 5706225 - DNA, 25 bp, Homo sapien
ttttacaaggtcccgtggcaccttg

SEQ ID NO: 5706226 - DNA, 25 bp, Homo sapien
gacgccgacctcttccactccgagg

SEQ ID NO: 5706227 - DNA, 25 bp, Homo sapien
cagacccccatcatgggcaatacca

SEQ ID NO: 5706228 - DNA, 25 bp, Homo sapien
tgcttcctgagcccaatcacgtcat

SEQ ID NO: 5706229 - DNA, 25 bp, Homo sapien
tgaggctgggtgcagttctaaacct

SEQ ID NO: 5706230 - DNA, 25 bp, Homo sapien
atttctccattcagctggatgatcc

SEQ ID NO: 5706231 - DNA, 25 bp, Homo sapien
agcacaccaccaggctccacacgtg

SEQ ID NO: 5706232 - DNA, 25 bp, Homo sapien
atgatcctcaggactgaccagttag

SEQ ID NO: 5706233 - DNA, 25 bp, Homo sapien
cgatttttcttaagccaaaaatgaa

SEQ ID NO: 5706234 - DNA, 25 bp, Homo sapien
ttatgccctttgctcctggtgggag

SEQ ID NO: 5706235 - DNA, 25 bp, Homo sapien
gaatgataaagctcccgcccaggct

SEQ ID NO: 5706236 - DNA, 25 bp, Homo sapien
ttggggaaagcatgcacgtgtggag

SEQ ID NO: 5706237 - DNA, 25 bp, Homo sapien
aacactgtatttagttccatagcca

SEQ ID NO: 5706238 - DNA, 25 bp, Homo sapien
aaggagttagcattcatttttggct

SEQ ID NO: 5706239 - DNA, 25 bp, Homo sapien
gaccctgagcaagggactcccggaa

SEQ ID NO: 5706240 - DNA, 25 bp, Homo sapien
gctgctgtcaagttctacattcctt

SEQ ID NO: 5706241 - DNA, 25 bp, Homo sapien
aggtatgaaatgtcttctgaagagt

SEQ ID NO: 5706242 - DNA, 25 bp, Homo sapien
atctagaaatcagaaagcttctaat

SEQ ID NO: 5706243 - DNA, 25 bp, Homo sapien
ttactatgggctcggaagggtcgtg

SEQ ID NO: 5706244 - DNA, 25 bp, Homo sapien
cgcgctcactgctggtattgcccat

SEQ ID NO: 5706245 - DNA, 25 bp, Homo sapien
cacgtgtggagcctggtggtgtgct

SEQ ID NO: 5706246 - DNA, 25 bp, Homo sapien
atagccaggcctcaacagggacaag

SEQ ID NO: 5706247 - DNA, 25 bp, Homo sapien
tgggttgcgctgagcaccatcactc

SEQ ID NO: 5706248 - DNA, 25 bp, Homo sapien
ttgaaaagtctgttctgagaacaga

SEQ ID NO: 5706249 - DNA, 25 bp, Homo sapien
attatgactggaataaaaagctgga

SEQ ID NO: 5706250 - DNA, 25 bp, Homo sapien
tgtacagtccattccctcttgggga

SEQ ID NO: 5706251 - DNA, 25 bp, Homo sapien
gcgggtcccaaggagcctgcggaag

SEQ ID NO: 5706252 - DNA, 25 bp, Homo sapien
ggctcaaagccatgggggtgctagg

SEQ ID NO: 5706253 - DNA, 25 bp, Homo sapien
ccgcgggtcccaaggagcctgcgga

SEQ ID NO: 5706254 - DNA, 25 bp, Homo sapien
gcacttttgggaatccaccattaaa

SEQ ID NO: 5706255 - DNA, 25 bp, Homo sapien
gttgttgaaggacccagataagtaa

SEQ ID NO: 5706256 - DNA, 25 bp, Homo sapien
tggacagctcagacacatcggagca

SEQ ID NO: 5706257 - DNA, 25 bp, Homo sapien
gagttcatgtgacttctagacgtgg

SEQ ID NO: 5706258 - DNA, 25 bp, Homo sapien
gtggctggccttaaaaacacacaga

SEQ ID NO: 5706259 - DNA, 25 bp, Homo sapien
acgctgtgtgattttatagggaaga

SEQ ID NO: 5706260 - DNA, 25 bp, Homo sapien
aatactggaacccagggagctcact

SEQ ID NO: 5706261 - DNA, 25 bp, Homo sapien
agcattcatttttggcttaagaaaa

SEQ ID NO: 5706262 - DNA, 25 bp, Homo sapien
gggggtctgcggggacacagggaag

SEQ ID NO: 5706263 - DNA, 25 bp, Homo sapien
gggaccctgagcaagggactcccgg

SEQ ID NO: 5706264 - DNA, 25 bp, Homo sapien
tatgggctcggaagggtcgtgcgtc

SEQ ID NO: 5706265 - DNA, 25 bp, Homo sapien
acaatctgttgttgattttgaagga

SEQ ID NO: 5706266 - DNA, 25 bp, Homo sapien
cccaggcaagccgcggcaagaacgc

SEQ ID NO: 5706267 - DNA, 25 bp, Homo sapien
acagggacaagtggctggccttaaa

SEQ ID NO: 5706268 - DNA, 25 bp, Homo sapien
caccatcactccatccttgatagac

SEQ ID NO: 5706269 - DNA, 25 bp, Homo sapien
tggagaaatccggcagcaggttgaa

SEQ ID NO: 5706270 - DNA, 25 bp, Homo sapien
gctacaaagttattgtggcttctgg

SEQ ID NO: 5706271 - DNA, 25 bp, Homo sapien
atgacacctccctggagccgagaga

SEQ ID NO: 5706272 - DNA, 25 bp, Homo sapien
aaggctgcagagccagccacctctg

SEQ ID NO: 5706273 - DNA, 25 bp, Homo sapien
gagctgtccctccggggcgtcttat

SEQ ID NO: 5706274 - DNA, 25 bp, Homo sapien
tcttctgaagagtgtgaaatgagca

SEQ ID NO: 5706275 - DNA, 25 bp, Homo sapien
gcctcaacagggacaagtggctggc

SEQ ID NO: 5706276 - DNA, 25 bp, Homo sapien
agtgtgaaatgagcaatgtacagtc

SEQ ID NO: 5706277 - DNA, 25 bp, Homo sapien
tcctttcagaataagcaacagcaac

SEQ ID NO: 5706278 - DNA, 25 bp, Homo sapien
tggggggagaatagggggtgcccga

SEQ ID NO: 5706279 - DNA, 25 bp, Homo sapien
gaaggacccagataagtaaacttcc

SEQ ID NO: 5706280 - DNA, 25 bp, Homo sapien
gggctagtgggtacatctgtggcga

SEQ ID NO: 5706281 - DNA, 25 bp, Homo sapien
cttgatttcctcggagtggaagagg

SEQ ID NO: 5706282 - DNA, 25 bp, Homo sapien
tgggcctgtccccgtccttggtgcc

SEQ ID NO: 5706283 - DNA, 25 bp, Homo sapien
cgcaaggggcgcgaagataaaccga

SEQ ID NO: 5706284 - DNA, 25 bp, Homo sapien
tgtggagcctggtggtgtgctgtct

SEQ ID NO: 5706285 - DNA, 25 bp, Homo sapien
agaactgcacccagcctcatgcacc

SEQ ID NO: 5706286 - DNA, 25 bp, Homo sapien
cctgcccaggcaagccgcggcaaga

SEQ ID NO: 5706287 - DNA, 25 bp, Homo sapien
gtatttagttccatagccaggcctc

SEQ ID NO: 5706288 - DNA, 25 bp, Homo sapien
gctgactcacagcaacctgggctag

SEQ ID NO: 5706289 - DNA, 25 bp, Homo sapien
tcacagaccgaggcgctgcaggagc

SEQ ID NO: 5706290 - DNA, 25 bp, Homo sapien
ggacaacctgccagctaactggtca

SEQ ID NO: 5706291 - DNA, 25 bp, Homo sapien
tccaaaggacatcttcctgacccag

SEQ ID NO: 5706292 - DNA, 25 bp, Homo sapien
ccgcggcaagaacgcaaggggcgcg

SEQ ID NO: 5706293 - DNA, 25 bp, Homo sapien
gctcctgatggtagggtcctggggg

SEQ ID NO: 5706294 - DNA, 25 bp, Homo sapien
tatgactggaataaaaagctggaca

SEQ ID NO: 5706295 - DNA, 25 bp, Homo sapien
cagctcttcatatgggcttgtataa

SEQ ID NO: 5706296 - DNA, 25 bp, Homo sapien
tgccaggccaggaattcctccttct

SEQ ID NO: 5706297 - DNA, 25 bp, Homo sapien
gttttcttcacttgaatgatgttgt

SEQ ID NO: 5706298 - DNA, 25 bp, Homo sapien
gtgcacatgactgtaagaaacaatt

SEQ ID NO: 5706299 - DNA, 25 bp, Homo sapien
cgtgattgggctcaggaagcaaagc

SEQ ID NO: 5706300 - DNA, 25 bp, Homo sapien
gaagtctgctttggtccaaaggaca

SEQ ID NO: 5706301 - DNA, 25 bp, Homo sapien
ctttatcattcacttccagatcatg

SEQ ID NO: 5706302 - DNA, 25 bp, Homo sapien
tgccagctaactggtcagtcctgag

SEQ ID NO: 5706303 - DNA, 25 bp, Homo sapien
cgcccccagctcttcatatgggctt

SEQ ID NO: 5706304 - DNA, 25 bp, Homo sapien
ccagctaactggtcagtcctgagga

SEQ ID NO: 5706305 - DNA, 25 bp, Homo sapien
caagtaaatactggaacccagggag

SEQ ID NO: 5706306 - DNA, 25 bp, Homo sapien
cagtccattccctcttggggaaagc

SEQ ID NO: 5706307 - DNA, 25 bp, Homo sapien
ttctacattcctttcagaataagca

SEQ ID NO: 5706308 - DNA, 25 bp, Homo sapien
agacacatcggagcacttttgggaa

SEQ ID NO: 5706309 - DNA, 25 bp, Homo sapien
agtggaagaggtcggcgtcttcggg

SEQ ID NO: 5706310 - DNA, 25 bp, Homo sapien
gagctctcgcaatcgcgctttacct

SEQ ID NO: 5706311 - DNA, 25 bp, Homo sapien
gagctgcgtatacagaagtctgctt

SEQ ID NO: 5706312 - DNA, 25 bp, Homo sapien
ctgcggaaggagtcggagcaccagg

SEQ ID NO: 5706313 - DNA, 25 bp, Homo sapien
tagtgggtacatctgtggcgactcc

SEQ ID NO: 5706314 - DNA, 25 bp, Homo sapien
acatcggagcacttttgggaatcca

SEQ ID NO: 5706315 - DNA, 25 bp, Homo sapien
ttcttgtaccggtgggttgcgctga

SEQ ID NO: 5706316 - DNA, 25 bp, Homo sapien
ttatcattcacttccagatcatgct

SEQ ID NO: 5706317 - DNA, 25 bp, Homo sapien
atcagaaagcttctaatttctatag

SEQ ID NO: 5706318 - DNA, 25 bp, Homo sapien
tcacctattatgactggaataaaaa

SEQ ID NO: 5706319 - DNA, 25 bp, Homo sapien
cagaaagcttctaatttctatagaa

SEQ ID NO: 5706320 - DNA, 25 bp, Homo sapien
ttgtaaaacctcatctagaaatcag

SEQ ID NO: 5706321 - DNA, 25 bp, Homo sapien
tgccacgggaccttgtaaaatcacg

SEQ ID NO: 5706322 - DNA, 25 bp, Homo sapien
tttgaaggacaggcaagaccaacac

SEQ ID NO: 5706323 - DNA, 25 bp, Homo sapien
caaggtgacagtaattcactgtttt

SEQ ID NO: 5706324 - DNA, 25 bp, Homo sapien
ccttaaggctgcagagccagccacc

SEQ ID NO: 5706325 - DNA, 25 bp, Homo sapien
gcctgcggaaggagtcggagcacca

SEQ ID NO: 5706326 - DNA, 25 bp, Homo sapien
tgattgggctcaggaagcaaagctg

SEQ ID NO: 5706327 - DNA, 25 bp, Homo sapien
tattgtggcttctggtgaggggaag

SEQ ID NO: 5706328 - DNA, 25 bp, Homo sapien
gcaatcgcgctttacctgcccaggc

SEQ ID NO: 5706329 - DNA, 25 bp, Homo sapien
cgtagggctcctgatggtagggtcc

SEQ ID NO: 5706330 - DNA, 25 bp, Homo sapien
taccggtgggttgcgctgagcacca

SEQ ID NO: 5706331 - DNA, 25 bp, Homo sapien
aaatggccttaaggctgcagagcca

SEQ ID NO: 5706332 - DNA, 25 bp, Homo sapien
gaggggaagtttactccagttgttg

SEQ ID NO: 5706333 - DNA, 25 bp, Homo sapien
attttactggcaaaggagttagcat

SEQ ID NO: 5706334 - DNA, 25 bp, Homo sapien
ggagtggaagaggtcggcgtcttcg

SEQ ID NO: 5706335 - DNA, 25 bp, Homo sapien
aatctgttgttgattttgaaggaca

SEQ ID NO: 5706336 - DNA, 25 bp, Homo sapien
ggaccagggcaggtatgaaatgtct

SEQ ID NO: 5706337 - DNA, 25 bp, Homo sapien
cttgggcctgtccccgtccttggtg

SEQ ID NO: 5706338 - DNA, 25 bp, Homo sapien
cactgcaggaaagggaccctgagca

SEQ ID NO: 5706339 - DNA, 25 bp, Homo sapien
ctcaaagccatgggggtgctaggag

SEQ ID NO: 5706340 - DNA, 25 bp, Homo sapien
gtccttgttcaggatgacctggagg

SEQ ID NO: 5706341 - DNA, 25 bp, Homo sapien
ccctctcccaccaggagcaaagggc

SEQ ID NO: 5706342 - DNA, 25 bp, Homo sapien
tgtataacaaggtggtgacgtactt

SEQ ID NO: 5706343 - DNA, 25 bp, Homo sapien
aagtttactccagttgttgaaggac

SEQ ID NO: 5706344 - DNA, 25 bp, Homo sapien
cttatggccaccatgccgctccagc

SEQ ID NO: 5706345 - DNA, 25 bp, Homo sapien
agcagagttcatgtgacttctagac

SEQ ID NO: 5706346 - DNA, 25 bp, Homo sapien
tctctggtgccttgatttcctcgga

SEQ ID NO: 5706347 - DNA, 25 bp, Homo sapien
ggacaggcaagaccaacactgtatt

SEQ ID NO: 5706348 - DNA, 25 bp, Homo sapien
aggcctcaacagggacaagtggctg

SEQ ID NO: 5706349 - DNA, 25 bp, Homo sapien
taaaaaatggccttaaggctgcaga

SEQ ID NO: 5706350 - DNA, 25 bp, Homo sapien
agcaggttgaaaagtctgttctgag

SEQ ID NO: 5706351 - DNA, 25 bp, Homo sapien
tggccgagcctgggcgggagcttta

SEQ ID NO: 5706352 - DNA, 25 bp, Homo sapien
ccagccacctctgcttacaaaaaga

SEQ ID NO: 5706353 - DNA, 25 bp, Homo sapien
ccgagctgtccctccggggcgtctt

SEQ ID NO: 5706354 - DNA, 25 bp, Homo sapien
gctgcagtcttgctaactaggggca

SEQ ID NO: 5706355 - DNA, 25 bp, Homo sapien
ccaggccaggaattcctccttctct

SEQ ID NO: 5706356 - DNA, 25 bp, Homo sapien
ttctatagaaatgacacctccctgg

SEQ ID NO: 5706357 - DNA, 25 bp, Homo sapien
tcatctagaaatcagaaagcttcta

SEQ ID NO: 5706358 - DNA, 25 bp, Homo sapien
gtctgcggggacacagggaaggcgg

SEQ ID NO: 5706359 - DNA, 25 bp, Homo sapien
tgactggaataaaaagctggacaac

SEQ ID NO: 5706360 - DNA, 25 bp, Homo sapien
gggaatccaccattaaagcatcaaa

SEQ ID NO: 5706361 - DNA, 25 bp, Homo sapien
ttcacttccagatcatgctgccagg

SEQ ID NO: 5706362 - DNA, 25 bp, Homo sapien
agccgcggcaagaacgcaaggggcg

SEQ ID NO: 5706363 - DNA, 25 bp, Homo sapien
ggatcatccagctgaatggagaaat

SEQ ID NO: 5706364 - DNA, 25 bp, Homo sapien
gctgtctcctgggccaccatccgcc

SEQ ID NO: 5706365 - DNA, 25 bp, Homo sapien
tgatgttgttaactgtgccaagctg

SEQ ID NO: 5706366 - DNA, 25 bp, Homo sapien
ctttggtccaaaggacatcttcctg

SEQ ID NO: 5706367 - DNA, 25 bp, Homo sapien
gcagagccagccacctctgcttaca

SEQ ID NO: 5706368 - DNA, 25 bp, Homo sapien
aggggcgcgaagataaaccgacact

SEQ ID NO: 5706369 - DNA, 25 bp, Homo sapien
atgggggtctgcggggacacaggga

SEQ ID NO: 5706370 - DNA, 25 bp, Homo sapien
caaagaacttgtactgatgctctcc

SEQ ID NO: 5706371 - DNA, 25 bp, Homo sapien
acctctgcttacaaaaagagtactt

SEQ ID NO: 5706372 - DNA, 25 bp, Homo sapien
ctcagaaggctgctgtcaagttcta

SEQ ID NO: 5706373 - DNA, 25 bp, Homo sapien
gatggtagggtcctgggggagaact

SEQ ID NO: 5706374 - DNA, 25 bp, Homo sapien
catccagctgaatggagaaatccgg

SEQ ID NO: 5706375 - DNA, 25 bp, Homo sapien
tctcgcaatcgcgctttacctgccc

SEQ ID NO: 5706376 - DNA, 25 bp, Homo sapien
atttctatagaaatgacacctccct

SEQ ID NO: 5706377 - DNA, 25 bp, Homo sapien
ccaggcctcaacagggacaagtggc

SEQ ID NO: 5706378 - DNA, 25 bp, Homo sapien
cccagactcagaaggctgctgtcaa

SEQ ID NO: 5706379 - DNA, 25 bp, Homo sapien
caagctggctggttactatgggctc

SEQ ID NO: 5706380 - DNA, 25 bp, Homo sapien
tgattttgaaggacaggcaagacca

SEQ ID NO: 5706381 - DNA, 25 bp, Homo sapien
gtccattccctcttggggaaagcat

SEQ ID NO: 5706382 - DNA, 25 bp, Homo sapien
cagcaactgctgcagtcttgctaac

SEQ ID NO: 5706383 - DNA, 25 bp, Homo sapien
ctgacccagactcagaaggctgctg

SEQ ID NO: 5706384 - DNA, 25 bp, Homo sapien
actgtcacctattatgactggaata

SEQ ID NO: 5706385 - DNA, 25 bp, Homo sapien
atgagtccccgaggctcaaagccat

SEQ ID NO: 5706386 - DNA, 25 bp, Homo sapien
cttcttcttgtaccggtgggttgcg

SEQ ID NO: 5706387 - DNA, 25 bp, Homo sapien
acctggaggagatgtggggggagaa

SEQ ID NO: 5706388 - DNA, 25 bp, Homo sapien
gcgctttacctgcccaggcaagccg

SEQ ID NO: 5706389 - DNA, 25 bp, Homo sapien
atgcaccgcggggccagggctgcag

SEQ ID NO: 5706390 - DNA, 25 bp, Homo sapien
ctgagctgcgtatacagaagtctgc

SEQ ID NO: 5706391 - DNA, 25 bp, Homo sapien
tccggggcgtcttatggccaccatg

SEQ ID NO: 5706392 - DNA, 25 bp, Homo sapien
tgagcagagttcatgtgacttctag

SEQ ID NO: 5706393 - DNA, 25 bp, Homo sapien
ttactccagttgttgaaggacccag

SEQ ID NO: 5706394 - DNA, 25 bp, Homo sapien
tctggtgaggggaagtttactccag

SEQ ID NO: 5706395 - DNA, 25 bp, Homo sapien
gttgttaactgtgccaagctggctg

SEQ ID NO: 5706396 - DNA, 25 bp, Homo sapien
cataacgggagcttccgctgactca

SEQ ID NO: 5706397 - DNA, 25 bp, Homo sapien
tggcttaagaaaaatcgagaatgta

SEQ ID NO: 5706398 - DNA, 25 bp, Homo sapien
caagttctacattcctttcagaata

SEQ ID NO: 5706399 - DNA, 25 bp, Homo sapien
gggtctgcggggacacagggaaggc

SEQ ID NO: 5706400 - DNA, 25 bp, Homo sapien
gttcatgtgacttctagacgtggtg

SEQ ID NO: 5706401 - DNA, 25 bp, Homo sapien
aaatgagcaatgtacagtccattcc

SEQ ID NO: 5706402 - DNA, 25 bp, Homo sapien
caacctgggctagtgggtacatctg

SEQ ID NO: 5706403 - DNA, 25 bp, Homo sapien
ttttcttggacttgatgagtccccg

SEQ ID NO: 5706404 - DNA, 25 bp, Homo sapien
ctctgcttacaaaaagagtacttag

SEQ ID NO: 5706405 - DNA, 25 bp, Homo sapien
aatcacgctgtgtgattttataggg

SEQ ID NO: 5706406 - DNA, 25 bp, Homo sapien
cagctcagacacatcggagcacttt

SEQ ID NO: 5706407 - DNA, 25 bp, Homo sapien
aaagcatgcacgtgtggagcctggt

SEQ ID NO: 5706408 - DNA, 25 bp, Homo sapien
aatggagaaatccggcagcaggttg

SEQ ID NO: 5706409 - DNA, 25 bp, Homo sapien
cattcatttttggcttaagaaaaat

SEQ ID NO: 5706410 - DNA, 25 bp, Homo sapien
gacttaaaaaatggccttaaggctg

SEQ ID NO: 5706411 - DNA, 25 bp, Homo sapien
cgtggtgacttaaaaaatggcctta

SEQ ID NO: 5706412 - DNA, 25 bp, Homo sapien
acagattattgctgagcagagttca

SEQ ID NO: 5706413 - DNA, 25 bp, Homo sapien
actggacagctcagacacatcggag

SEQ ID NO: 5706414 - DNA, 25 bp, Homo sapien
gcaggtatgaaatgtcttctgaaga

SEQ ID NO: 5706415 - DNA, 25 bp, Homo sapien
aagcaaagctggatcacaggaaatc

SEQ ID NO: 5706416 - DNA, 25 bp, Homo sapien
cttcctgacccagactcagaaggct

SEQ ID NO: 5706417 - DNA, 25 bp, Homo sapien
ctagaaatcagaaagcttctaattt

SEQ ID NO: 5706418 - DNA, 25 bp, Homo sapien
aggatgacctggaggagatgtgggg

SEQ ID NO: 5706419 - DNA, 25 bp, Homo sapien
agaccgaggcgctgcaggagctgct

SEQ ID NO: 5706420 - DNA, 25 bp, Homo sapien
aactcaggtataccaagtaaatact

SEQ ID NO: 5706421 - DNA, 25 bp, Homo sapien
atcttcctgacccagactcagaagg

SEQ ID NO: 5706422 - DNA, 25 bp, Homo sapien
gtcttgctaactaggggcagaggtc

SEQ ID NO: 5706423 - DNA, 25 bp, Homo sapien
agctaactggtcagtcctgaggatc

SEQ ID NO: 5706424 - DNA, 25 bp, Homo sapien
gggagctcactcctccctctcccac

SEQ ID NO: 5706425 - DNA, 25 bp, Homo sapien
aacctgccagctaactggtcagtcc

SEQ ID NO: 5706426 - DNA, 25 bp, Homo sapien
gaatgtaggtttagaactgcaccca

SEQ ID NO: 5706427 - DNA, 25 bp, Homo sapien
acaacctgccagctaactggtcagt

SEQ ID NO: 5706428 - DNA, 25 bp, Homo sapien
tacagaagtctgctttggtccaaag

SEQ ID NO: 5706429 - DNA, 25 bp, Homo sapien
gagcctggtggtgtgctgtctcctg

SEQ ID NO: 5706430 - DNA, 25 bp, Homo sapien
cctgagcaaggtgccacgggacctt

SEQ ID NO: 5706431 - DNA, 25 bp, Homo sapien
gtaattcactgttttgaaaagtcac

SEQ ID NO: 5706432 - DNA, 25 bp, Homo sapien
agctttatcattcacttccagatca

SEQ ID NO: 5706433 - DNA, 25 bp, Homo sapien
cagttttcttcacttgaatgatgtt

SEQ ID NO: 5706434 - DNA, 25 bp, Homo sapien
tataacaaggtggtgacgtacttct

SEQ ID NO: 5706435 - DNA, 25 bp, Homo sapien
gagccggttccggctgagtcggcag

SEQ ID NO: 5706436 - DNA, 25 bp, Homo sapien
agtcggcagggttgccgagctctcg

SEQ ID NO: 5706437 - DNA, 25 bp, Homo sapien
actcccgggaaactgagctgcgtat

SEQ ID NO: 5706438 - DNA, 25 bp, Homo sapien
gaaaagtctgttctgagaacagatt

SEQ ID NO: 5706439 - DNA, 25 bp, Homo sapien
ggctcaggaagcaaagctggatcac

SEQ ID NO: 5706440 - DNA, 25 bp, Homo sapien
aggcaagaccaacactgtatttagt

SEQ ID NO: 5706441 - DNA, 25 bp, Homo sapien
agaggtcggcgtcttcggggctgtc

SEQ ID NO: 5706442 - DNA, 25 bp, Homo sapien
cggagcacttttgggaatccaccat

SEQ ID NO: 5706443 - DNA, 25 bp, Homo sapien
aaggacatcttcctgacccagactc

SEQ ID NO: 5706444 - DNA, 25 bp, Homo sapien
cggcgcctcactgcaggaaagggac

SEQ ID NO: 5706445 - DNA, 25 bp, Homo sapien
cagatcatgctgccaggccaggaat

SEQ ID NO: 5706446 - DNA, 25 bp, Homo sapien
tggagccgagagacaatctgttgtt

SEQ ID NO: 5706447 - DNA, 25 bp, Homo sapien
ccgtccttggtgccccccgagctgt

SEQ ID NO: 5706448 - DNA, 25 bp, Homo sapien
ctctcaagttttcacggttaacact

SEQ ID NO: 5706449 - DNA, 25 bp, Homo sapien
gaccaacactgtatttagttccata

SEQ ID NO: 5706450 - DNA, 25 bp, Homo sapien
tgagtcggcagggttgccgagctct

SEQ ID NO: 5706451 - DNA, 25 bp, Homo sapien
tgaaggacaggcaagaccaacactg

SEQ ID NO: 5706452 - DNA, 25 bp, Homo sapien
tccttccggcagatccaggatggct

SEQ ID NO: 5706453 - DNA, 25 bp, Homo sapien
gtcttcggggctgtccatcaggatc

SEQ ID NO: 5706454 - DNA, 25 bp, Homo sapien
ggaaggagtcggagcaccaggacac

SEQ ID NO: 5706455 - DNA, 25 bp, Homo sapien
aattcctccttctctggtgccttga

SEQ ID NO: 5706456 - DNA, 25 bp, Homo sapien
actgaccatccacaaagaacttgta

SEQ ID NO: 5706457 - DNA, 25 bp, Homo sapien
agtaaatactggaacccagggagct

SEQ ID NO: 5706458 - DNA, 25 bp, Homo sapien
gggttgccgagctctcgcaatcgcg

SEQ ID NO: 5706459 - DNA, 25 bp, Homo sapien
aagaacttgtactgatgctctcctt

SEQ ID NO: 5706460 - DNA, 25 bp, Homo sapien
agatgactggaaatgatgtgtggcc

SEQ ID NO: 5706461 - DNA, 25 bp, Homo sapien
caccaggacaccacgcccctcgggc

SEQ ID NO: 5706462 - DNA, 25 bp, Homo sapien
acactgtcacctattatgactggaa

SEQ ID NO: 5706463 - DNA, 25 bp, Homo sapien
gtgggtacatctgtggcgactcccg

SEQ ID NO: 5706464 - DNA, 25 bp, Homo sapien
accattaaagcatcaaatacttcaa

SEQ ID NO: 5706465 - DNA, 25 bp, Homo sapien
gctgccaggccaggaattcctcctt

SEQ ID NO: 5706466 - DNA, 25 bp, Homo sapien
gttccggctgagtcggcagggttgc

SEQ ID NO: 5706467 - DNA, 25 bp, Homo sapien
cgggccgggagccggttccggctga

SEQ ID NO: 5706468 - DNA, 25 bp, Homo sapien
gcgctgagcaccatcactccatcct

SEQ ID NO: 5706469 - DNA, 25 bp, Homo sapien
tccctccggggcgtcttatggccac

SEQ ID NO: 5706470 - DNA, 25 bp, Homo sapien
acttgtccatcaaggtgacagtaat

SEQ ID NO: 5706471 - DNA, 25 bp, Homo sapien
gtagggtcctgggggagaactggac

SEQ ID NO: 5706472 - DNA, 25 bp, Homo sapien
aggagcctgcggaaggagtcggagc

SEQ ID NO: 5706473 - DNA, 25 bp, Homo sapien
aaaaacacacagatgactggaaatg

SEQ ID NO: 5706474 - DNA, 25 bp, Homo sapien
acgggaccttgtaaaatcacgctgt

SEQ ID NO: 5706475 - DNA, 25 bp, Homo sapien
ccctgtttcccagaattttactggc

SEQ ID NO: 5706476 - DNA, 25 bp, Homo sapien
ctcagtccctgtttcccagaatttt

SEQ ID NO: 5706477 - DNA, 25 bp, Homo sapien
aagaaaaatcgagaatgtaggttta

SEQ ID NO: 5706478 - DNA, 25 bp, Homo sapien
aaggcggacggcgcctcactgcagg

SEQ ID NO: 5706479 - DNA, 25 bp, Homo sapien
cagaattttactggcaaaggagtta

SEQ ID NO: 5706480 - DNA, 25 bp, Homo sapien
ggagctttatcattcacttccagat

SEQ ID NO: 5706481 - DNA, 25 bp, Homo sapien
ttcaagcaggaccagggcaggtatg

SEQ ID NO: 5706482 - DNA, 25 bp, Homo sapien
cccaaggagcctgcggaaggagtcg

SEQ ID NO: 5706483 - DNA, 25 bp, Homo sapien
ttctgaagagtgtgaaatgagcaat

SEQ ID NO: 5706484 - DNA, 25 bp, Homo sapien
gggctgcagatcctctgccacccct

SEQ ID NO: 5706485 - DNA, 25 bp, Homo sapien
atctgtggcgactcccgggaaactg

SEQ ID NO: 5706486 - DNA, 25 bp, Homo sapien
ccgggagccggttccggctgagtcg

SEQ ID NO: 5706487 - DNA, 25 bp, Homo sapien
actcctccctctcccaccaggagca

SEQ ID NO: 5706488 - DNA, 25 bp, Homo sapien
tttggcttaagaaaaatcgagaatg

SEQ ID NO: 5706489 - DNA, 25 bp, Homo sapien
ggacacagggaaggcggacggcgcc

SEQ ID NO: 5706490 - DNA, 25 bp, Homo sapien
ggtgggttgcgctgagcaccatcac

SEQ ID NO: 5706491 - DNA, 25 bp, Homo sapien
tccttctctggtgccttgatttcct

SEQ ID NO: 5706492 - DNA, 25 bp, Homo sapien
cccatgatgggggtctgcggggaca

SEQ ID NO: 5706493 - DNA, 25 bp, Homo sapien
gtatgaaatgtcttctgaagagtgt

SEQ ID NO: 5706494 - DNA, 25 bp, Homo sapien
cttctggtgaggggaagtttactcc

SEQ ID NO: 5706495 - DNA, 25 bp, Homo sapien
aaagctggatcacaggaaatccccg

SEQ ID NO: 5706496 - DNA, 25 bp, Homo sapien
gtttcccagaattttactggcaaag

SEQ ID NO: 5706497 - DNA, 25 bp, Homo sapien
gctgtgtgattttatagggaagagg

SEQ ID NO: 5706498 - DNA, 25 bp, Homo sapien
gaacttgtactgatgctctccttcc

SEQ ID NO: 5706499 - DNA, 25 bp, Homo sapien
gttattgtggcttctggtgagggga

SEQ ID NO: 5706500 - DNA, 25 bp, Homo sapien
ctcactgctggtattgcccatgatg

SEQ ID NO: 5706501 - DNA, 25 bp, Homo sapien
ttcactgttttgaaaagtcacaaaa

SEQ ID NO: 5706502 - DNA, 25 bp, Homo sapien
gacttgatgagtccccgaggctcaa

SEQ ID NO: 5706503 - DNA, 25 bp, Homo sapien
gcttaagaaaaatcgagaatgtagg

SEQ ID NO: 5706504 - DNA, 25 bp, Homo sapien
ttgaaggacccagataagtaaactt

SEQ ID NO: 5706505 - DNA, 25 bp, Homo sapien
aaaatcgagaatgtaggtttagaac

SEQ ID NO: 5706506 - DNA, 25 bp, Homo sapien
ggctcggaagggtcgtgcgtccact

SEQ ID NO: 5706507 - DNA, 25 bp, Homo sapien
tagacagcgcgtataggtggttcag

SEQ ID NO: 5706508 - DNA, 25 bp, Homo sapien
cggcagcaggttgaaaagtctgttc

SEQ ID NO: 5706509 - DNA, 25 bp, Homo sapien
agccagccacctctgcttacaaaaa

SEQ ID NO: 5706510 - DNA, 25 bp, Homo sapien
catcgaaacaccgttggccgagcct

SEQ ID NO: 5706511 - DNA, 25 bp, Homo sapien
aactgtgccaagctggctggttact

SEQ ID NO: 5706512 - DNA, 25 bp, Homo sapien
catgggggtgctaggaggactgtca

SEQ ID NO: 5706513 - DNA, 25 bp, Homo sapien
gatgacctggaggagatgtgggggg

SEQ ID NO: 5706514 - DNA, 25 bp, Homo sapien
caaggagcctgcggaaggagtcgga

SEQ ID NO: 5706515 - DNA, 25 bp, Homo sapien
gcagcaggttgaaaagtctgttctg

SEQ ID NO: 5706516 - DNA, 25 bp, Homo sapien
tcagacacatcggagcacttttggg

SEQ ID NO: 5706517 - DNA, 25 bp, Homo sapien
caggcaagccgcggcaagaacgcaa

SEQ ID NO: 5706518 - DNA, 25 bp, Homo sapien
ctctcccaccaggagcaaagggcat

SEQ ID NO: 5706519 - DNA, 25 bp, Homo sapien
aactgctgcagtcttgctaactagg

SEQ ID NO: 5706520 - DNA, 25 bp, Homo sapien
ttaaagcatcaaatacttcaaagtc

SEQ ID NO: 5706521 - DNA, 25 bp, Homo sapien
ggtcagtcctgaggatcatccagct

SEQ ID NO: 5706522 - DNA, 25 bp, Homo sapien
caaagccatgggggtgctaggagga

SEQ ID NO: 5706523 - DNA, 25 bp, Homo sapien
agattattgctgagcagagttcatg

SEQ ID NO: 5706524 - DNA, 25 bp, Homo sapien
ggccttaaaaacacacagatgactg

SEQ ID NO: 5706525 - DNA, 25 bp, Homo sapien
acattcctttcagaataagcaacag

SEQ ID NO: 5706526 - DNA, 25 bp, Homo sapien
agtctgctttggtccaaaggacatc

SEQ ID NO: 5706527 - DNA, 25 bp, Homo sapien
ttggtccaaaggacatcttcctgac

SEQ ID NO: 5706528 - DNA, 25 bp, Homo sapien
ttaagaaaaatcgagaatgtaggtt

SEQ ID NO: 5706529 - DNA, 25 bp, Homo sapien
gggtcccaaggagcctgcggaagga

SEQ ID NO: 5706530 - DNA, 25 bp, Homo sapien
ggttactatgggctcggaagggtcg

SEQ ID NO: 5706531 - DNA, 25 bp, Homo sapien
caggaagcaaagctggatcacagga

SEQ ID NO: 5706532 - DNA, 25 bp, Homo sapien
aggatggctacaaagttattgtggc

SEQ ID NO: 5706533 - DNA, 25 bp, Homo sapien
agggtcgtgcgtccactgaccatcc

SEQ ID NO: 5706534 - DNA, 25 bp, Homo sapien
gacagtaattcactgttttgaaaag

SEQ ID NO: 5706535 - DNA, 25 bp, Homo sapien
agaaacaattgtaaaacctcatcta

SEQ ID NO: 5706536 - DNA, 25 bp, Homo sapien
gccagggctgcagatcctctgccac

SEQ ID NO: 5706537 - DNA, 25 bp, Homo sapien
gccttgatttcctcggagtggaaga

SEQ ID NO: 5706538 - DNA, 25 bp, Homo sapien
aggctgctgtcaagttctacattcc

SEQ ID NO: 5706539 - DNA, 25 bp, Homo sapien
attccctcttggggaaagcatgcac

SEQ ID NO: 5706540 - DNA, 25 bp, Homo sapien
ccatcactccatccttgatagacag

SEQ ID NO: 5706541 - DNA, 25 bp, Homo sapien
gcctcactgcaggaaagggaccctg

SEQ ID NO: 5706542 - DNA, 25 bp, Homo sapien
aggagcaaagggcataacgggagct

SEQ ID NO: 5706543 - DNA, 25 bp, Homo sapien
agggcataacgggagcttccgctga

SEQ ID NO: 5706544 - DNA, 25 bp, Homo sapien
gacgtgattgggctcaggaagcaaa

SEQ ID NO: 5706545 - DNA, 25 bp, Homo sapien
tgtccctccggggcgtcttatggcc

SEQ ID NO: 5706546 - DNA, 25 bp, Homo sapien
cctgccagctaactggtcagtcctg

SEQ ID NO: 5706547 - DNA, 25 bp, Homo sapien
gagcaatgtacagtccattccctct

SEQ ID NO: 5706548 - DNA, 25 bp, Homo sapien
aagaccaacactgtatttagttcca

SEQ ID NO: 5706549 - DNA, 25 bp, Homo sapien
ggacatcttcctgacccagactcag

SEQ ID NO: 5706550 - DNA, 25 bp, Homo sapien
gggaaactgagctgcgtatacagaa

SEQ ID NO: 5706551 - DNA, 25 bp, Homo sapien
atgctctccttccggcagatccagg

SEQ ID NO: 5706552 - DNA, 25 bp, Homo sapien
ttaactgtgccaagctggctggtta

SEQ ID NO: 5706553 - DNA, 25 bp, Homo sapien
ttacaaaaagagtacttagtgcaca

SEQ ID NO: 5706554 - DNA, 25 bp, Homo sapien
gacggcgcctcactgcaggaaaggg

SEQ ID NO: 5706555 - DNA, 25 bp, Homo sapien
gccatgggggtgctaggaggactgt

SEQ ID NO: 5706556 - DNA, 25 bp, Homo sapien
ttgtaaaatcacgctgtgtgatttt

SEQ ID NO: 5706557 - DNA, 25 bp, Homo sapien
aactgcacccagcctcatgcaccgc

SEQ ID NO: 5706558 - DNA, 25 bp, Homo sapien
gcttacaaaaagagtacttagtgca

SEQ ID NO: 5706559 - DNA, 25 bp, Homo sapien
catcaaatacttcaaagtcagtttt

SEQ ID NO: 5706560 - DNA, 25 bp, Homo sapien
cctccctcttttcttggacttgatg

SEQ ID NO: 5706561 - DNA, 25 bp, Homo sapien
cggttaacactgtcacctattatga

SEQ ID NO: 5706562 - DNA, 25 bp, Homo sapien
gagcacttttgggaatccaccatta

SEQ ID NO: 5706563 - DNA, 25 bp, Homo sapien
aactggtcagtcctgaggatcatcc

SEQ ID NO: 5706564 - DNA, 25 bp, Homo sapien
cccagctcttcatatgggcttgtat

SEQ ID NO: 5706565 - DNA, 25 bp, Homo sapien
ccttgatagacagcgcgtataggtg

SEQ ID NO: 5706566 - DNA, 25 bp, Homo sapien
attcctttcagaataagcaacagca

SEQ ID NO: 5706567 - DNA, 25 bp, Homo sapien
tggccaccatgccgctccagcgcgg

SEQ ID NO: 5706568 - DNA, 25 bp, Homo sapien
gtttactccagttgttgaaggaccc

SEQ ID NO: 5706569 - DNA, 25 bp, Homo sapien
tgcgtatacagaagtctgctttggt

SEQ ID NO: 5706570 - DNA, 25 bp, Homo sapien
ctcggaagggtcgtgcgtccactga

SEQ ID NO: 5706571 - DNA, 25 bp, Homo sapien
gaaatgtcttctgaagagtgtgaaa

SEQ ID NO: 5706572 - DNA, 25 bp, Homo sapien
cgagagacaatctgttgttgatttt

SEQ ID NO: 5706573 - DNA, 25 bp, Homo sapien
ggtgccacgggaccttgtaaaatca

SEQ ID NO: 5706574 - DNA, 25 bp, Homo sapien
gagaatgtaggtttagaactgcacc

SEQ ID NO: 5706575 - DNA, 25 bp, Homo sapien
aaaaagagtacttagtgcacatgac

SEQ ID NO: 5706576 - DNA, 25 bp, Homo sapien
cggctgagtcggcagggttgccgag

SEQ ID NO: 5706577 - DNA, 25 bp, Homo sapien
acaaaaagagtacttagtgcacatg

SEQ ID NO: 5706578 - DNA, 25 bp, Homo sapien
gacccagactcagaaggctgctgtc

SEQ ID NO: 5706579 - DNA, 25 bp, Homo sapien
gctgcaggagctgctctgcctggac

SEQ ID NO: 5706580 - DNA, 25 bp, Homo sapien
caccacgcccctcgggccgggagcc

SEQ ID NO: 5706581 - DNA, 25 bp, Homo sapien
ggggaagtttactccagttgttgaa

SEQ ID NO: 5706582 - DNA, 25 bp, Homo sapien
gatcatgctgccaggccaggaattc

SEQ ID NO: 5706583 - DNA, 25 bp, Homo sapien
gttcaggatgacctggaggagatgt

SEQ ID NO: 5706584 - DNA, 25 bp, Homo sapien
gatgtggggggagaatagggggtgc

SEQ ID NO: 5706585 - DNA, 25 bp, Homo sapien
tggtgacgtacttcttcttgtaccg

SEQ ID NO: 5706586 - DNA, 25 bp, Homo sapien
ggcagggttgccgagctctcgcaat

SEQ ID NO: 5706587 - DNA, 25 bp, Homo sapien
caagcaggaccagggcaggtatgaa

SEQ ID NO: 5706588 - DNA, 25 bp, Homo sapien
tgcaggagctgctctgcctggacaa

SEQ ID NO: 5706589 - DNA, 25 bp, Homo sapien
ccccgtgtccttgttcaggatgacc

SEQ ID NO: 5706590 - DNA, 25 bp, Homo sapien
cagaagtctgctttggtccaaagga

SEQ ID NO: 5706591 - DNA, 25 bp, Homo sapien
gtcagttttcttcacttgaatgatg

SEQ ID NO: 5706592 - DNA, 25 bp, Homo sapien
cattaaagcatcaaatacttcaaag

SEQ ID NO: 5706593 - DNA, 25 bp, Homo sapien
gccggttccggctgagtcggcaggg

SEQ ID NO: 5706594 - DNA, 25 bp, Homo sapien
attattgctgagcagagttcatgtg

SEQ ID NO: 5706595 - DNA, 25 bp, Homo sapien
cgaggcgctgcaggagctgctctgc

SEQ ID NO: 5706596 - DNA, 25 bp, Homo sapien
aactaggggcagaggtcctgagcaa

SEQ ID NO: 5706597 - DNA, 25 bp, Homo sapien
ggtcctgggggagaactggacagct

SEQ ID NO: 5706598 - DNA, 25 bp, Homo sapien
gtgacttctagacgtggtgacttaa

SEQ ID NO: 5706599 - DNA, 25 bp, Homo sapien
actatgggctcggaagggtcgtgcg

SEQ ID NO: 5706600 - DNA, 25 bp, Homo sapien
ctccctctcccaccaggagcaaagg

SEQ ID NO: 5706601 - DNA, 25 bp, Homo sapien
ctgctgcagtcttgctaactagggg

SEQ ID NO: 5706602 - DNA, 25 bp, Homo sapien
ggctgcagagccagccacctctgct

SEQ ID NO: 5706603 - DNA, 25 bp, Homo sapien
aaaaagctggacaacctgccagcta

SEQ ID NO: 5706604 - DNA, 25 bp, Homo sapien
aatcgcgctttacctgcccaggcaa

SEQ ID NO: 5706605 - DNA, 25 bp, Homo sapien
gaagaggtcggcgtcttcggggctg

SEQ ID NO: 5706606 - DNA, 25 bp, Homo sapien
tgatgggggtctgcggggacacagg

SEQ ID NO: 5706607 - DNA, 25 bp, Homo sapien
ctggttactatgggctcggaagggt

SEQ ID NO: 5706608 - DNA, 25 bp, Homo sapien
tcctccctctcccaccaggagcaaa

SEQ ID NO: 5706609 - DNA, 25 bp, Homo sapien
ctgagcaagggactcccggaaccgc

SEQ ID NO: 5706610 - DNA, 25 bp, Homo sapien
tccgccccccgtccatcgaaacacc

SEQ ID NO: 5706611 - DNA, 25 bp, Homo sapien
acacatcggagcacttttgggaatc

SEQ ID NO: 5706612 - DNA, 25 bp, Homo sapien
cccagaattttactggcaaaggagt

SEQ ID NO: 5706613 - DNA, 25 bp, Homo sapien
ttcacggttaacactgtcacctatt

SEQ ID NO: 5706614 - DNA, 25 bp, Homo sapien
catgcacgtgtggagcctggtggtg

SEQ ID NO: 5706615 - DNA, 25 bp, Homo sapien
cctggacaaaccttcaagcaggacc

SEQ ID NO: 5706616 - DNA, 25 bp, Homo sapien
aagtggctggccttaaaaacacaca

SEQ ID NO: 5706617 - DNA, 25 bp, Homo sapien
ctaactggtcagtcctgaggatcat

SEQ ID NO: 5706618 - DNA, 25 bp, Homo sapien
agcatcaaatacttcaaagtcagtt

SEQ ID NO: 5706619 - DNA, 25 bp, Homo sapien
gggggtgcccgaaagcgctcttcgg

SEQ ID NO: 5706620 - DNA, 25 bp, Homo sapien
cggaagggtcgtgcgtccactgacc

SEQ ID NO: 5706621 - DNA, 25 bp, Homo sapien
gctgaatggagaaatccggcagcag

SEQ ID NO: 5706622 - DNA, 25 bp, Homo sapien
ctgcttacaaaaagagtacttagtg

SEQ ID NO: 5706623 - DNA, 25 bp, Homo sapien
gagaacagattattgctgagcagag

SEQ ID NO: 5706624 - DNA, 25 bp, Homo sapien
tggtattgcccatgatgggggtctg

SEQ ID NO: 5706625 - DNA, 25 bp, Homo sapien
aaccgcgggtcccaaggagcctgcg

SEQ ID NO: 5706626 - DNA, 25 bp, Homo sapien
cccccaaactcaggtataccaagta

SEQ ID NO: 5706627 - DNA, 25 bp, Homo sapien
ggatcacaggaaatccccgtgtcct

SEQ ID NO: 5706628 - DNA, 25 bp, Homo sapien
ttggtgccccccgagctgtccctcc

SEQ ID NO: 5706629 - DNA, 25 bp, Homo sapien
tgtgattttatagggaagagggcag

SEQ ID NO: 5706630 - DNA, 25 bp, Homo sapien
gggtacatctgtggcgactcccggg

SEQ ID NO: 5706631 - DNA, 25 bp, Homo sapien
taacgggagcttccgctgactcaca

SEQ ID NO: 5706632 - DNA, 25 bp, Homo sapien
tcgtgcgtccactgaccatccacaa

SEQ ID NO: 5706633 - DNA, 25 bp, Homo sapien
tcttcttgtaccggtgggttgcgct

SEQ ID NO: 5706634 - DNA, 25 bp, Homo sapien
ccatagccaggcctcaacagggaca

SEQ ID NO: 5706635 - DNA, 25 bp, Homo sapien
attgcccatgatgggggtctgcggg

SEQ ID NO: 5706636 - DNA, 25 bp, Homo sapien
tcggggctgtccatcaggatcttgg

SEQ ID NO: 5706637 - DNA, 25 bp, Homo sapien
cgtatacagaagtctgctttggtcc

SEQ ID NO: 5706638 - DNA, 25 bp, Homo sapien
cttgctaactaggggcagaggtcct

SEQ ID NO: 5706639 - DNA, 25 bp, Homo sapien
acttttgggaatccaccattaaagc

SEQ ID NO: 5706640 - DNA, 25 bp, Homo sapien
ctgggctagtgggtacatctgtggc

SEQ ID NO: 5706641 - DNA, 25 bp, Homo sapien
ttcagaataagcaacagcaactgct

SEQ ID NO: 5706642 - DNA, 25 bp, Homo sapien
atcactccatccttgatagacagcg

SEQ ID NO: 5706643 - DNA, 25 bp, Homo sapien
atcattcacttccagatcatgctgc

SEQ ID NO: 5706644 - DNA, 25 bp, Homo sapien
ttgtccatcaaggtgacagtaattc

SEQ ID NO: 5706645 - DNA, 25 bp, Homo sapien
ttgggaatccaccattaaagcatca

SEQ ID NO: 5706646 - DNA, 25 bp, Homo sapien
acaaagttttattgaaacttgtcca

SEQ ID NO: 5706647 - DNA, 25 bp, Homo sapien
ctcactgcaggaaagggaccctgag

SEQ ID NO: 5706648 - DNA, 25 bp, Homo sapien
caacagggacaagtggctggcctta

SEQ ID NO: 5706649 - DNA, 25 bp, Homo sapien
cccaccaggagcaaagggcataacg

SEQ ID NO: 5706650 - DNA, 25 bp, Homo sapien
gctcttcgggtttgcagacgtaggg

SEQ ID NO: 5706651 - DNA, 25 bp, Homo sapien
ggaagtttactccagttgttgaagg

SEQ ID NO: 5706652 - DNA, 25 bp, Homo sapien
ctgggggagaactggacagctcaga

SEQ ID NO: 5706653 - DNA, 25 bp, Homo sapien
aaaacctcatctagaaatcagaaag

SEQ ID NO: 5706654 - DNA, 25 bp, Homo sapien
cagaataagcaacagcaactgctgc

SEQ ID NO: 5706655 - DNA, 25 bp, Homo sapien
tcggcagggttgccgagctctcgca

SEQ ID NO: 5706656 - DNA, 25 bp, Homo sapien
cttgatgagtccccgaggctcaaag

SEQ ID NO: 5706657 - DNA, 25 bp, Homo sapien
atgtaggtttagaactgcacccagc

SEQ ID NO: 5706658 - DNA, 25 bp, Homo sapien
gtcttatggccaccatgccgctcca

SEQ ID NO: 5706659 - DNA, 25 bp, Homo sapien
gtgctgtctcctgggccaccatccg

SEQ ID NO: 5706660 - DNA, 25 bp, Homo sapien
tcttcacttgaatgatgttgttaac

SEQ ID NO: 5706661 - DNA, 25 bp, Homo sapien
gaaactgagctgcgtatacagaagt

SEQ ID NO: 5706662 - DNA, 25 bp, Homo sapien
ctaggggcagaggtcctgagcaagg

SEQ ID NO: 5706663 - DNA, 25 bp, Homo sapien
tacctgcccaggcaagccgcggcaa

SEQ ID NO: 5706664 - DNA, 25 bp, Homo sapien
cggggcgtcttatggccaccatgcc

SEQ ID NO: 5706665 - DNA, 25 bp, Homo sapien
cattcacttccagatcatgctgcca

SEQ ID NO: 5706666 - DNA, 25 bp, Homo sapien
gaagggtcgtgcgtccactgaccat

SEQ ID NO: 5706667 - DNA, 25 bp, Homo sapien
ccttggtgccccccgagctgtccct

SEQ ID NO: 5706668 - DNA, 25 bp, Homo sapien
cgactcccgggaaactgagctgcgt

SEQ ID NO: 5706669 - DNA, 25 bp, Homo sapien
tggaataaaaagctggacaacctgc

SEQ ID NO: 5706670 - DNA, 25 bp, Homo sapien
gtacatctgtggcgactcccgggaa

SEQ ID NO: 5706671 - DNA, 25 bp, Homo sapien
gcacatgactgtaagaaacaattgt

SEQ ID NO: 5706672 - DNA, 25 bp, Homo sapien
tgattttatagggaagagggcagag

SEQ ID NO: 5706673 - DNA, 25 bp, Homo sapien
ctggccttaaaaacacacagatgac

SEQ ID NO: 5706674 - DNA, 25 bp, Homo sapien
gtgtccttgttcaggatgacctgga

SEQ ID NO: 5706675 - DNA, 25 bp, Homo sapien
gcaatgtacagtccattccctcttg

SEQ ID NO: 5706676 - DNA, 25 bp, Homo sapien
tctgctttggtccaaaggacatctt

SEQ ID NO: 5706677 - DNA, 25 bp, Homo sapien
ctgcaggaaagggaccctgagcaag

SEQ ID NO: 5706678 - DNA, 25 bp, Homo sapien
gctccagcgcggcgcgctcactgct

SEQ ID NO: 5706679 - DNA, 25 bp, Homo sapien
ggaaagcatgcacgtgtggagcctg

SEQ ID NO: 5706680 - DNA, 25 bp, Homo sapien
gtgtgctgtctcctgggccaccatc

SEQ ID NO: 5706681 - DNA, 25 bp, Homo sapien
acagaccgaggcgctgcaggagctg

SEQ ID NO: 5706682 - DNA, 25 bp, Homo sapien
agctggatcacaggaaatccccgtg

SEQ ID NO: 5706683 - DNA, 25 bp, Homo sapien
tttttggcttaagaaaaatcgagaa

SEQ ID NO: 5706684 - DNA, 25 bp, Homo sapien
cagttgttgaaggacccagataagt

SEQ ID NO: 5706685 - DNA, 25 bp, Homo sapien
ggaacccagggagctcactcctccc

SEQ ID NO: 5706686 - DNA, 25 bp, Homo sapien
cactgtatttagttccatagccagg

SEQ ID NO: 5706687 - DNA, 25 bp, Homo sapien
tcttggggaaagcatgcacgtgtgg

SEQ ID NO: 5706688 - DNA, 25 bp, Homo sapien
tgcagtcttgctaactaggggcaga

SEQ ID NO: 5706689 - DNA, 25 bp, Homo sapien
gggccagggctgcagatcctctgcc

SEQ ID NO: 5706690 - DNA, 25 bp, Homo sapien
aggaaagggaccctgagcaagggac

SEQ ID NO: 5706691 - DNA, 25 bp, Homo sapien
agttttcacggttaacactgtcacc

SEQ ID NO: 5706692 - DNA, 25 bp, Homo sapien
agcaacctgggctagtgggtacatc

SEQ ID NO: 5706693 - DNA, 25 bp, Homo sapien
actgatgctctccttccggcagatc

SEQ ID NO: 5706694 - DNA, 25 bp, Homo sapien
aggggcagaggtcctgagcaaggtg

SEQ ID NO: 5706695 - DNA, 25 bp, Homo sapien
gtccctgtttcccagaattttactg

SEQ ID NO: 5706696 - DNA, 25 bp, Homo sapien
ttgtactgatgctctccttccggca

SEQ ID NO: 5706697 - DNA, 25 bp, Homo sapien
ccttcaagcaggaccagggcaggta

SEQ ID NO: 5706698 - DNA, 25 bp, Homo sapien
cagcgcgtataggtggttcagcatg

SEQ ID NO: 5706699 - DNA, 25 bp, Homo sapien
ccgttggccgagcctgggcgggagc

SEQ ID NO: 5706700 - DNA, 25 bp, Homo sapien
tgcagacgtagggctcctgatggta

SEQ ID NO: 5706701 - DNA, 25 bp, Homo sapien
tagggggtgcccgaaagcgctcttc

SEQ ID NO: 5706702 - DNA, 25 bp, Homo sapien
cttaaaaaatggccttaaggctgca

SEQ ID NO: 5706703 - DNA, 25 bp, Homo sapien
aaatccccgtgtccttgttcaggat

SEQ ID NO: 5706704 - DNA, 25 bp, Homo sapien
cagtaattcactgttttgaaaagtc

SEQ ID NO: 5706705 - DNA, 25 bp, Homo sapien
atccgcccccagctcttcatatggg

SEQ ID NO: 5706706 - DNA, 25 bp, Homo sapien
accatgccgctccagcgcggcgcgc

SEQ ID NO: 5706707 - DNA, 25 bp, Homo sapien
tgaatgatgttgttaactgtgccaa

SEQ ID NO: 5706708 - DNA, 25 bp, Homo sapien
ctgcagagccagccacctctgctta

SEQ ID NO: 5706709 - DNA, 25 bp, Homo sapien
gtgacgtacttcttcttgtaccggt

SEQ ID NO: 5706710 - DNA, 25 bp, Homo sapien
atcttgggcctgtccccgtccttgg

SEQ ID NO: 5706711 - DNA, 25 bp, Homo sapien
cttccagatcatgctgccaggccag

SEQ ID NO: 5706712 - DNA, 25 bp, Homo sapien
agtcggagcaccaggacaccacgcc

SEQ ID NO: 5706713 - DNA, 25 bp, Homo sapien
gctctcgcaatcgcgctttacctgc

SEQ ID NO: 5706714 - DNA, 25 bp, Homo sapien
tggcctcagtccctgtttcccagaa

SEQ ID NO: 5706715 - DNA, 25 bp, Homo sapien
gggaagagggcagagtgcctctcaa

SEQ ID NO: 5706716 - DNA, 25 bp, Homo sapien
cggcgtcttcggggctgtccatcag

SEQ ID NO: 5706717 - DNA, 25 bp, Homo sapien
ccttgttcaggatgacctggaggag

SEQ ID NO: 5706718 - DNA, 25 bp, Homo sapien
agaaatgacacctccctggagccga

SEQ ID NO: 5706719 - DNA, 25 bp, Homo sapien
aaacaattgtaaaacctcatctaga

SEQ ID NO: 5706720 - DNA, 25 bp, Homo sapien
atgatgtgtggcctcagtccctgtt

SEQ ID NO: 5706721 - DNA, 25 bp, Homo sapien
gacgtggtgacttaaaaaatggcct

SEQ ID NO: 5706722 - DNA, 25 bp, Homo sapien
agccacctctgcttacaaaaagagt

SEQ ID NO: 5706723 - DNA, 25 bp, Homo sapien
ttattgaaacttgtccatcaaggtg

SEQ ID NO: 5706724 - DNA, 25 bp, Homo sapien
gcgaagataaaccgacactttccca

SEQ ID NO: 5706725 - DNA, 25 bp, Homo sapien
ggtataccaagtaaatactggaacc

SEQ ID NO: 5706726 - DNA, 25 bp, Homo sapien
cagcgcggcgcgctcactgctggta

SEQ ID NO: 5706727 - DNA, 25 bp, Homo sapien
gactcagaaggctgctgtcaagttc

SEQ ID NO: 5706728 - DNA, 25 bp, Homo sapien
tgatgagtccccgaggctcaaagcc

SEQ ID NO: 5706729 - DNA, 25 bp, Homo sapien
ggggtgctaggaggactgtcacaga

SEQ ID NO: 5706730 - DNA, 25 bp, Homo sapien
tgaatggagaaatccggcagcaggt

SEQ ID NO: 5706731 - DNA, 25 bp, Homo sapien
catttttggcttaagaaaaatcgag

SEQ ID NO: 5706732 - DNA, 25 bp, Homo sapien
tgtggggggagaatagggggtgccc

SEQ ID NO: 5706733 - DNA, 25 bp, Homo sapien
tgaaacttgtccatcaaggtgacag

SEQ ID NO: 5706734 - DNA, 25 bp, Homo sapien
ggggctgtccatcaggatcttgggc

SEQ ID NO: 5706735 - DNA, 25 bp, Homo sapien
atgacgtgattgggctcaggaagca

SEQ ID NO: 5706736 - DNA, 25 bp, Homo sapien
gggggagaactggacagctcagaca

SEQ ID NO: 5706737 - DNA, 25 bp, Homo sapien
gcaagaccaacactgtatttagttc

SEQ ID NO: 5706738 - DNA, 25 bp, Homo sapien
ccaccattaaagcatcaaatacttc

SEQ ID NO: 5706739 - DNA, 25 bp, Homo sapien
ggagctgctctgcctggacaaacct

SEQ ID NO: 5706740 - DNA, 25 bp, Homo sapien
cctccctggagccgagagacaatct

SEQ ID NO: 5706741 - DNA, 25 bp, Homo sapien
gggcagaggtcctgagcaaggtgcc

SEQ ID NO: 5706742 - DNA, 25 bp, Homo sapien
attttatagggaagagggcagagtg

SEQ ID NO: 5706743 - DNA, 25 bp, Homo sapien
aaagtctgttctgagaacagattat

SEQ ID NO: 5706744 - DNA, 25 bp, Homo sapien
aggaggactgtcacagaccgaggcg

SEQ ID NO: 5706745 - DNA, 25 bp, Homo sapien
gcctctcaagttttcacggttaaca

SEQ ID NO: 5706746 - DNA, 25 bp, Homo sapien
tgggctcaggaagcaaagctggatc

SEQ ID NO: 5706747 - DNA, 25 bp, Homo sapien
ctttcagaataagcaacagcaactg

SEQ ID NO: 5706748 - DNA, 25 bp, Homo sapien
aaagggcataacgggagcttccgct

SEQ ID NO: 5706749 - DNA, 25 bp, Homo sapien
ccctgagcaagggactcccggaacc

SEQ ID NO: 5706750 - DNA, 25 bp, Homo sapien
tgcccatgatgggggtctgcgggga

SEQ ID NO: 5706751 - DNA, 25 bp, Homo sapien
ctgtcaagttctacattcctttcag

SEQ ID NO: 5706752 - DNA, 25 bp, Homo sapien
tccggctgagtcggcagggttgccg

SEQ ID NO: 5706753 - DNA, 25 bp, Homo sapien
gagaactggacagctcagacacatc

SEQ ID NO: 5706754 - DNA, 25 bp, Homo sapien
atccttgatagacagcgcgtatagg

SEQ ID NO: 5706755 - DNA, 25 bp, Homo sapien
caggaattcctccttctctggtgcc

SEQ ID NO: 5706756 - DNA, 25 bp, Homo sapien
ctggaggagatgtggggggagaata

SEQ ID NO: 5706757 - DNA, 25 bp, Homo sapien
acaaggtggtgacgtacttcttctt

SEQ ID NO: 5706758 - DNA, 25 bp, Homo sapien
aattgtaaaacctcatctagaaatc

SEQ ID NO: 5706759 - DNA, 25 bp, Homo sapien
tacccccaaactcaggtataccaag

SEQ ID NO: 5706760 - DNA, 25 bp, Homo sapien
tccctggagccgagagacaatctgt

SEQ ID NO: 5706761 - DNA, 25 bp, Homo sapien
cagggcaggtatgaaatgtcttctg

SEQ ID NO: 5706762 - DNA, 25 bp, Homo sapien
caggtataccaagtaaatactggaa

SEQ ID NO: 5706763 - DNA, 25 bp, Homo sapien
atgagcaatgtacagtccattccct

SEQ ID NO: 5706764 - DNA, 25 bp, Homo sapien
cagtccctgtttcccagaattttac

SEQ ID NO: 5706765 - DNA, 25 bp, Homo sapien
ccatcaaggtgacagtaattcactg

SEQ ID NO: 5706766 - DNA, 25 bp, Homo sapien
ttcagcatgacgtgattgggctcag

SEQ ID NO: 5706767 - DNA, 25 bp, Homo sapien
tctccttccggcagatccaggatgg

SEQ ID NO: 5706768 - DNA, 25 bp, Homo sapien
ggatcttgggcctgtccccgtcctt

SEQ ID NO: 5706769 - DNA, 25 bp, Homo sapien
cgctcactgctggtattgcccatga

SEQ ID NO: 5706770 - DNA, 25 bp, Homo sapien
ttcttggacttgatgagtccccgag

SEQ ID NO: 5706771 - DNA, 25 bp, Homo sapien
agacaatctgttgttgattttgaag

SEQ ID NO: 5706772 - DNA, 25 bp, Homo sapien
ttacaaagttttattgaaacttgtc

SEQ ID NO: 5706773 - DNA, 25 bp, Homo sapien
gcagaggtcctgagcaaggtgccac

SEQ ID NO: 5706774 - DNA, 25 bp, Homo sapien
atccaccattaaagcatcaaatact

SEQ ID NO: 5706775 - DNA, 25 bp, Homo sapien
ctgtggcgactcccgggaaactgag

SEQ ID NO: 5706776 - DNA, 25 bp, Homo sapien
gggtgcccgaaagcgctcttcgggt

SEQ ID NO: 5706777 - DNA, 25 bp, Homo sapien
aggtggttcagcatgacgtgattgg

SEQ ID NO: 5706778 - DNA, 25 bp, Homo sapien
ttagcattcatttttggcttaagaa

SEQ ID NO: 5706779 - DNA, 25 bp, Homo sapien
ggagttagcattcatttttggctta

SEQ ID NO: 5706780 - DNA, 25 bp, Homo sapien
ctgatggtagggtcctgggggagaa

SEQ ID NO: 5706781 - DNA, 25 bp, Homo sapien
aaccttcaagcaggaccagggcagg

SEQ ID NO: 5706782 - DNA, 25 bp, Homo sapien
gagtccccgaggctcaaagccatgg

SEQ ID NO: 5706783 - DNA, 25 bp, Homo sapien
gctagtgggtacatctgtggcgact

SEQ ID NO: 5706784 - DNA, 25 bp, Homo sapien
ggtgctaggaggactgtcacagacc

SEQ ID NO: 5706785 - DNA, 25 bp, Homo sapien
agtacttagtgcacatgactgtaag

SEQ ID NO: 5706786 - DNA, 25 bp, Homo sapien
tgcctggacaaaccttcaagcagga

SEQ ID NO: 5706787 - DNA, 25 bp, Homo sapien
gtccttggtgccccccgagctgtcc

SEQ ID NO: 5706788 - DNA, 25 bp, Homo sapien
ggggacacagggaaggcggacggcg

SEQ ID NO: 5706789 - DNA, 25 bp, Homo sapien
tatacagaagtctgctttggtccaa

SEQ ID NO: 5706790 - DNA, 25 bp, Homo sapien
gccaagctggctggttactatgggc

SEQ ID NO: 5706791 - DNA, 25 bp, Homo sapien
aagccatgggggtgctaggaggact

SEQ ID NO: 5706792 - DNA, 25 bp, Homo sapien
ggagaatagggggtgcccgaaagcg

SEQ ID NO: 5706793 - DNA, 25 bp, Homo sapien
gcggaaggagtcggagcaccaggac

SEQ ID NO: 5706794 - DNA, 25 bp, Homo sapien
cagactcagaaggctgctgtcaagt

SEQ ID NO: 5706795 - DNA, 25 bp, Homo sapien
atgtgacttctagacgtggtgactt

SEQ ID NO: 5706796 - DNA, 25 bp, Homo sapien
tgcccaggcaagccgcggcaagaac

SEQ ID NO: 5706797 - DNA, 25 bp, Homo sapien
gtactgatgctctccttccggcaga

SEQ ID NO: 5706798 - DNA, 25 bp, Homo sapien
gtccatcaaggtgacagtaattcac

SEQ ID NO: 5706799 - DNA, 25 bp, Homo sapien
gggcgcgaagataaaccgacacttt

SEQ ID NO: 5706800 - DNA, 25 bp, Homo sapien
actccagttgttgaaggacccagat

SEQ ID NO: 5706801 - DNA, 25 bp, Homo sapien
gcgcctcactgcaggaaagggaccc

SEQ ID NO: 5706802 - DNA, 25 bp, Homo sapien
tatagggaagagggcagagtgcctc

SEQ ID NO: 5706803 - DNA, 25 bp, Homo sapien
tgttgttgattttgaaggacaggca

SEQ ID NO: 5706804 - DNA, 25 bp, Homo sapien
atagaaatgacacctccctggagcc

SEQ ID NO: 5706805 - DNA, 25 bp, Homo sapien
tatggccaccatgccgctccagcgc

SEQ ID NO: 5706806 - DNA, 25 bp, Homo sapien
gggagccggttccggctgagtcggc

SEQ ID NO: 5706807 - DNA, 25 bp, Homo sapien
cgtgtggagcctggtggtgtgctgt

SEQ ID NO: 5706808 - DNA, 25 bp, Homo sapien
tgccgagctctcgcaatcgcgcttt

SEQ ID NO: 5706809 - DNA, 25 bp, Homo sapien
ccgagctctcgcaatcgcgctttac

SEQ ID NO: 5706810 - DNA, 25 bp, Homo sapien
atgctgccaggccaggaattcctcc

SEQ ID NO: 5706811 - DNA, 25 bp, Homo sapien
agctcactcctccctctcccaccag

SEQ ID NO: 5706812 - DNA, 25 bp, Homo sapien
cgggagctttatcattcacttccag

SEQ ID NO: 5706813 - DNA, 25 bp, Homo sapien
agcctgggcgggagctttatcattc

SEQ ID NO: 5706814 - DNA, 25 bp, Homo sapien
ggtggtgacgtacttcttcttgtac

SEQ ID NO: 5706815 - DNA, 25 bp, Homo sapien
tgagcaaggtgccacgggaccttgt

SEQ ID NO: 5706816 - DNA, 25 bp, Homo sapien
gaattttactggcaaaggagttagc

SEQ ID NO: 5706817 - DNA, 25 bp, Homo sapien
caggttgaaaagtctgttctgagaa

SEQ ID NO: 5706818 - DNA, 25 bp, Homo sapien
atcaggatcttgggcctgtccccgt

SEQ ID NO: 5706819 - DNA, 25 bp, Homo sapien
ttgtggcttctggtgaggggaagtt

SEQ ID NO: 5706820 - DNA, 25 bp, Homo sapien
cggacggcgcctcactgcaggaaag

SEQ ID NO: 5706821 - DNA, 25 bp, Homo sapien
tttgcagacgtagggctcctgatgg

SEQ ID NO: 5706822 - DNA, 25 bp, Homo sapien
gcccgaaagcgctcttcgggtttgc

SEQ ID NO: 5706823 - DNA, 25 bp, Homo sapien
gtggcttctggtgaggggaagttta

SEQ ID NO: 5706824 - DNA, 25 bp, Homo sapien
agatccaggatggctacaaagttat

SEQ ID NO: 5706825 - DNA, 25 bp, Homo sapien
tccctcttggggaaagcatgcacgt

SEQ ID NO: 5706826 - DNA, 25 bp, Homo sapien
tcatgtgacttctagacgtggtgac

SEQ ID NO: 5706827 - DNA, 25 bp, Homo sapien
gacagcgcgtataggtggttcagca

SEQ ID NO: 5706828 - DNA, 25 bp, Homo sapien
ctgaagagtgtgaaatgagcaatgt

SEQ ID NO: 5706829 - DNA, 25 bp, Homo sapien
gcggggacacagggaaggcggacgg

SEQ ID NO: 5706830 - DNA, 25 bp, Homo sapien
ttccgctgactcacagcaacctggg

SEQ ID NO: 5706831 - DNA, 25 bp, Homo sapien
ccatcaggatcttgggcctgtcccc

SEQ ID NO: 5706832 - DNA, 25 bp, Homo sapien
ggggaaagcatgcacgtgtggagcc

SEQ ID NO: 5706833 - DNA, 25 bp, Homo sapien
accagggcaggtatgaaatgtcttc

SEQ ID NO: 5706834 - DNA, 25 bp, Homo sapien
cttcggggctgtccatcaggatctt

SEQ ID NO: 5706835 - DNA, 25 bp, Homo sapien
gagatgtggggggagaatagggggt

SEQ ID NO: 5706836 - DNA, 25 bp, Homo sapien
ctggaacccagggagctcactcctc

SEQ ID NO: 5706837 - DNA, 25 bp, Homo sapien
acacagatgactggaaatgatgtgt

SEQ ID NO: 5706838 - DNA, 25 bp, Homo sapien
tgttaactgtgccaagctggctggt

SEQ ID NO: 5706839 - DNA, 25 bp, Homo sapien
gagcctgcggaaggagtcggagcac

SEQ ID NO: 5706840 - DNA, 25 bp, Homo sapien
ccccgaggctcaaagccatgggggt

SEQ ID NO: 5706841 - DNA, 25 bp, Homo sapien
ggcttctggtgaggggaagtttact

SEQ ID NO: 5706842 - DNA, 25 bp, Homo sapien
gctcagacacatcggagcacttttg

SEQ ID NO: 5706843 - DNA, 25 bp, Homo sapien
ctcaacagggacaagtggctggcct

SEQ ID NO: 5706844 - DNA, 25 bp, Homo sapien
aaatacttcaaagtcagttttcttc

SEQ ID NO: 5706845 - DNA, 25 bp, Homo sapien
gaaagggaccctgagcaagggactc

SEQ ID NO: 5706846 - DNA, 25 bp, Homo sapien
ctgtatttagttccatagccaggcc

SEQ ID NO: 5706847 - DNA, 25 bp, Homo sapien
ggcaaaggagttagcattcattttt

SEQ ID NO: 5706848 - DNA, 25 bp, Homo sapien
ccgaggctcaaagccatgggggtgc

SEQ ID NO: 5706849 - DNA, 25 bp, Homo sapien
aaacttgtccatcaaggtgacagta

SEQ ID NO: 5706850 - DNA, 25 bp, Homo sapien
agggtcctgggggagaactggacag

SEQ ID NO: 5706851 - DNA, 25 bp, Homo sapien
tcacgctgtgtgattttatagggaa

SEQ ID NO: 5706852 - DNA, 25 bp, Homo sapien
ctcaggtataccaagtaaatactgg

SEQ ID NO: 5706853 - DNA, 25 bp, Homo sapien
gaactggacagctcagacacatcgg

SEQ ID NO: 5706854 - DNA, 25 bp, Homo sapien
tgggggtgctaggaggactgtcaca

SEQ ID NO: 5706855 - DNA, 25 bp, Homo sapien
tgtgaaatgagcaatgtacagtcca

SEQ ID NO: 5706856 - DNA, 25 bp, Homo sapien
gcagatccaggatggctacaaagtt

SEQ ID NO: 5706857 - DNA, 25 bp, Homo sapien
gaatccaccattaaagcatcaaata

SEQ ID NO: 5706858 - DNA, 25 bp, Homo sapien
caaactcaggtataccaagtaaata

SEQ ID NO: 5706859 - DNA, 25 bp, Homo sapien
ctcaggaagcaaagctggatcacag

SEQ ID NO: 5706860 - DNA, 25 bp, Homo sapien
ggttcagcatgacgtgattgggctc

SEQ ID NO: 5706861 - DNA, 25 bp, Homo sapien
gaggatcatccagctgaatggagaa

SEQ ID NO: 5706862 - DNA, 25 bp, Homo sapien
ttgttgattttgaaggacaggcaag

SEQ ID NO: 5706863 - DNA, 25 bp, Homo sapien
tggtgacttaaaaaatggccttaag

SEQ ID NO: 5706864 - DNA, 25 bp, Homo sapien
gcctggtggtgtgctgtctcctggg

SEQ ID NO: 5706865 - DNA, 25 bp, Homo sapien
tccatcgaaacaccgttggccgagc

SEQ ID NO: 5706866 - DNA, 25 bp, Homo sapien
ttcgggtttgcagacgtagggctcc

SEQ ID NO: 5706867 - DNA, 25 bp, Homo sapien
tggtgccttgatttcctcggagtgg

SEQ ID NO: 5706868 - DNA, 25 bp, Homo sapien
ccattccctcttggggaaagcatgc

SEQ ID NO: 5706869 - DNA, 25 bp, Homo sapien
gaaagcgctcttcgggtttgcagac

SEQ ID NO: 5706870 - DNA, 25 bp, Homo sapien
gtgacagtaattcactgttttgaaa

SEQ ID NO: 5706871 - DNA, 25 bp, Homo sapien
gacacctccctggagccgagagaca

SEQ ID NO: 5706872 - DNA, 25 bp, Homo sapien
tgactcacagcaacctgggctagtg

SEQ ID NO: 5706873 - DNA, 25 bp, Homo sapien
acatctgtggcgactcccgggaaac

SEQ ID NO: 5706874 - DNA, 25 bp, Homo sapien
cctgggcgggagctttatcattcac

SEQ ID NO: 5706875 - DNA, 25 bp, Homo sapien
aaagagtacttagtgcacatgactg

SEQ ID NO: 5706876 - DNA, 25 bp, Homo sapien
ctgaggatcatccagctgaatggag

SEQ ID NO: 5706877 - DNA, 25 bp, Homo sapien
agttttattgaaacttgtccatcaa

SEQ ID NO: 5706878 - DNA, 25 bp, Homo sapien
catgccgctccagcgcggcgcgctc

SEQ ID NO: 5706879 - DNA, 25 bp, Homo sapien
tggctacaaagttattgtggcttct

SEQ ID NO: 5706880 - DNA, 25 bp, Homo sapien
ccgtgtccttgttcaggatgacctg

SEQ ID NO: 5706881 - DNA, 25 bp, Homo sapien
actggaataaaaagctggacaacct

SEQ ID NO: 5706882 - DNA, 25 bp, Homo sapien
ccaggatggctacaaagttattgtg

SEQ ID NO: 5706883 - DNA, 25 bp, Homo sapien
aaatgatgtgtggcctcagtccctg

SEQ ID NO: 5706884 - DNA, 25 bp, Homo sapien
tttacctgcccaggcaagccgcggc

SEQ ID NO: 5706885 - DNA, 25 bp, Homo sapien
ataggtggttcagcatgacgtgatt

SEQ ID NO: 5706886 - DNA, 25 bp, Homo sapien
cttctagacgtggtgacttaaaaaa

SEQ ID NO: 5706887 - DNA, 25 bp, Homo sapien
ggaggagatgtggggggagaatagg

SEQ ID NO: 5706888 - DNA, 25 bp, Homo sapien
tggaagaggtcggcgtcttcggggc

SEQ ID NO: 5706889 - DNA, 25 bp, Homo sapien
ttaaaaacacacagatgactggaaa

SEQ ID NO: 5706890 - DNA, 25 bp, Homo sapien
acttcaaagtcagttttcttcactt

SEQ ID NO: 5706891 - DNA, 25 bp, Homo sapien
aacgcaaggggcgcgaagataaacc

SEQ ID NO: 5706892 - DNA, 25 bp, Homo sapien
ttgatagacagcgcgtataggtggt

SEQ ID NO: 5706893 - DNA, 25 bp, Homo sapien
cgtccatcgaaacaccgttggccga

SEQ ID NO: 5706894 - DNA, 25 bp, Homo sapien
gggaccttgtaaaatcacgctgtgt

SEQ ID NO: 5706895 - DNA, 25 bp, Homo sapien
gcctcagtccctgtttcccagaatt

SEQ ID NO: 5706896 - DNA, 25 bp, Homo sapien
cttctctggtgccttgatttcctcg

SEQ ID NO: 5706897 - DNA, 25 bp, Homo sapien
acaagtggctggccttaaaaacaca

SEQ ID NO: 5706898 - DNA, 25 bp, Homo sapien
ttaaggctgcagagccagccacctc

SEQ ID NO: 5706899 - DNA, 25 bp, Homo sapien
gtattgcccatgatgggggtctgcg

SEQ ID NO: 5706900 - DNA, 25 bp, Homo sapien
tctgttgttgattttgaaggacagg

SEQ ID NO: 5706901 - DNA, 25 bp, Homo sapien
tgtgtgattttatagggaagagggc

SEQ ID NO: 5706902 - DNA, 25 bp, Homo sapien
ggtttgcagacgtagggctcctgat

SEQ ID NO: 5706903 - DNA, 25 bp, Homo sapien
gtccactgaccatccacaaagaact

SEQ ID NO: 5706904 - DNA, 25 bp, Homo sapien
ggaattcctccttctctggtgcctt

SEQ ID NO: 5706905 - DNA, 25 bp, Homo sapien
tccagcgcggcgcgctcactgctgg

SEQ ID NO: 5706906 - DNA, 25 bp, Homo sapien
tgaccatccacaaagaacttgtact

SEQ ID NO: 5706907 - DNA, 25 bp, Homo sapien
ttcacttgaatgatgttgttaactg

SEQ ID NO: 5706908 - DNA, 25 bp, Homo sapien
cacggttaacactgtcacctattat

SEQ ID NO: 5706909 - DNA, 25 bp, Homo sapien
gactgtaagaaacaattgtaaaacc

SEQ ID NO: 5706910 - DNA, 25 bp, Homo sapien
acgggagcttccgctgactcacagc

SEQ ID NO: 5706911 - DNA, 25 bp, Homo sapien
atttagttccatagccaggcctcaa

SEQ ID NO: 5706912 - DNA, 25 bp, Homo sapien
agggaaggcggacggcgcctcactg

SEQ ID NO: 5706913 - DNA, 25 bp, Homo sapien
ttttcacggttaacactgtcaccta

SEQ ID NO: 5706914 - DNA, 25 bp, Homo sapien
ccaggacaccacgcccctcgggccg

SEQ ID NO: 5706915 - DNA, 25 bp, Homo sapien
gacaaaccttcaagcaggaccaggg

SEQ ID NO: 5706916 - DNA, 25 bp, Homo sapien
agttccatagccaggcctcaacagg

SEQ ID NO: 5706917 - DNA, 25 bp, Homo sapien
atcggagcacttttgggaatccacc

SEQ ID NO: 5706918 - DNA, 25 bp, Homo sapien
ttccatagccaggcctcaacaggga

SEQ ID NO: 5706919 - DNA, 25 bp, Homo sapien
caagaacgcaaggggcgcgaagata

SEQ ID NO: 5706920 - DNA, 25 bp, Homo sapien
gttaacactgtcacctattatgact

SEQ ID NO: 5706921 - DNA, 25 bp, Homo sapien
acatgactgtaagaaacaattgtaa

SEQ ID NO: 5706922 - DNA, 25 bp, Homo sapien
tgtaccggtgggttgcgctgagcac

SEQ ID NO: 5706923 - DNA, 25 bp, Homo sapien
tccagatcatgctgccaggccagga

SEQ ID NO: 5706924 - DNA, 25 bp, Homo sapien
ttcatatgggcttgtataacaaggt

SEQ ID NO: 5706925 - DNA, 25 bp, Homo sapien
cctcttttcttggacttgatgagtc

SEQ ID NO: 5706926 - DNA, 25 bp, Homo sapien
tctaatttctatagaaatgacacct

SEQ ID NO: 5706927 - DNA, 25 bp, Homo sapien
agctggacaacctgccagctaactg

SEQ ID NO: 5706928 - DNA, 25 bp, Homo sapien
gacccagataagtaaacttcctttc

SEQ ID NO: 5706929 - DNA, 25 bp, Homo sapien
atacttcaaagtcagttttcttcac

SEQ ID NO: 5706930 - DNA, 25 bp, Homo sapien
acaggcaagaccaacactgtattta

SEQ ID NO: 5706931 - DNA, 25 bp, Homo sapien
aatccggcagcaggttgaaaagtct

SEQ ID NO: 5706932 - DNA, 25 bp, Homo sapien
ggctggttactatgggctcggaagg

SEQ ID NO: 5706933 - DNA, 25 bp, Homo sapien
gataaaccgacactttcccaaccgc

SEQ ID NO: 5706934 - DNA, 25 bp, Homo sapien
gctcttcatatgggcttgtataaca

SEQ ID NO: 5706935 - DNA, 25 bp, Homo sapien
gccgagagacaatctgttgttgatt

SEQ ID NO: 5706936 - DNA, 25 bp, Homo sapien
ctattatgactggaataaaaagctg

SEQ ID NO: 5706937 - DNA, 25 bp, Homo sapien
tgctaggaggactgtcacagaccga

SEQ ID NO: 5706938 - DNA, 25 bp, Homo sapien
gaccttgtaaaatcacgctgtgtga

SEQ ID NO: 5706939 - DNA, 25 bp, Homo sapien
gttgattttgaaggacaggcaagac

SEQ ID NO: 5706940 - DNA, 25 bp, Homo sapien
gccaggaattcctccttctctggtg

SEQ ID NO: 5706941 - DNA, 25 bp, Homo sapien
gaagagggcagagtgcctctcaagt

SEQ ID NO: 5706942 - DNA, 25 bp, Homo sapien
tttcttcacttgaatgatgttgtta

SEQ ID NO: 5706943 - DNA, 25 bp, Homo sapien
atccccgtgtccttgttcaggatga

SEQ ID NO: 5706944 - DNA, 25 bp, Homo sapien
ggttgcgctgagcaccatcactcca

SEQ ID NO: 5706945 - DNA, 25 bp, Homo sapien
aacctcatctagaaatcagaaagct

SEQ ID NO: 5706946 - DNA, 25 bp, Homo sapien
atgactgtaagaaacaattgtaaaa

SEQ ID NO: 5706947 - DNA, 25 bp, Homo sapien
ctcccaccaggagcaaagggcataa

SEQ ID NO: 5706948 - DNA, 25 bp, Homo sapien
accatccacaaagaacttgtactga

SEQ ID NO: 5706949 - DNA, 25 bp, Homo sapien
ctacattcctttcagaataagcaac

SEQ ID NO: 5706950 - DNA, 25 bp, Homo sapien
agaacgcaaggggcgcgaagataaa

SEQ ID NO: 5706951 - DNA, 25 bp, Homo sapien
caaggggcgcgaagataaaccgaca

SEQ ID NO: 5706952 - DNA, 25 bp, Homo sapien
tggagcctggtggtgtgctgtctcc

SEQ ID NO: 5706953 - DNA, 25 bp, Homo sapien
cagagttcatgtgacttctagacgt

SEQ ID NO: 5706954 - DNA, 25 bp, Homo sapien
caccgttggccgagcctgggcggga

SEQ ID NO: 5706955 - DNA, 25 bp, Homo sapien
aggtcctgagcaaggtgccacggga

SEQ ID NO: 5706956 - DNA, 25 bp, Homo sapien
agcaaggtgccacgggaccttgtaa

SEQ ID NO: 5706957 - DNA, 25 bp, Homo sapien
ctggtcagtcctgaggatcatccag

SEQ ID NO: 5706958 - DNA, 25 bp, Homo sapien
aagggaccctgagcaagggactccc

SEQ ID NO: 5706959 - DNA, 25 bp, Homo sapien
aaaaatggccttaaggctgcagagc

SEQ ID NO: 5706960 - DNA, 25 bp, Homo sapien
ccgaaagcgctcttcgggtttgcag

SEQ ID NO: 5706961 - DNA, 25 bp, Homo sapien
tagtgcacatgactgtaagaaacaa

SEQ ID NO: 5706962 - DNA, 25 bp, Homo sapien
aacaccgttggccgagcctgggcgg

SEQ ID NO: 5706963 - DNA, 25 bp, Homo sapien
gtcccaaggagcctgcggaaggagt

SEQ ID NO: 5706964 - DNA, 25 bp, Homo sapien
gcaggaaagggaccctgagcaaggg

SEQ ID NO: 5706965 - DNA, 25 bp, Homo sapien
cagctgaatggagaaatccggcagc

SEQ ID NO: 5706966 - DNA, 25 bp, Homo sapien
cttgaatgatgttgttaactgtgcc

SEQ ID NO: 5706967 - DNA, 25 bp, Homo sapien
ggaagcaaagctggatcacaggaaa

SEQ ID NO: 5706968 - DNA, 25 bp, Homo sapien
aaagcatcaaatacttcaaagtcag

SEQ ID NO: 5706969 - DNA, 25 bp, Homo sapien
gtccatcaggatcttgggcctgtcc

SEQ ID NO: 5706970 - DNA, 25 bp, Homo sapien
agagggcagagtgcctctcaagttt

SEQ ID NO: 5706971 - DNA, 25 bp, Homo sapien
tacaaagttattgtggcttctggtg

SEQ ID NO: 5706972 - DNA, 25 bp, Homo sapien
caggagctgctctgcctggacaaac

SEQ ID NO: 5706973 - DNA, 25 bp, Homo sapien
acatcttcctgacccagactcagaa

SEQ ID NO: 5706974 - DNA, 25 bp, Homo sapien
gtttagaactgcacccagcctcatg

SEQ ID NO: 5706975 - DNA, 25 bp, Homo sapien
aaagttttattgaaacttgtccatc

SEQ ID NO: 5706976 - DNA, 25 bp, Homo sapien
tcgaaacaccgttggccgagcctgg

SEQ ID NO: 5706977 - DNA, 25 bp, Homo sapien
gggcgtcttatggccaccatgccgc

SEQ ID NO: 5706978 - DNA, 25 bp, Homo sapien
tactggcaaaggagttagcattcat

SEQ ID NO: 5706979 - DNA, 25 bp, Homo sapien
ttctgagaacagattattgctgagc

SEQ ID NO: 5706980 - DNA, 25 bp, Homo sapien
tgtcttctgaagagtgtgaaatgag

SEQ ID NO: 5706981 - DNA, 25 bp, Homo sapien
tccggcagatccaggatggctacaa

SEQ ID NO: 5706982 - DNA, 25 bp, Homo sapien
agggacaagtggctggccttaaaaa

SEQ ID NO: 5706983 - DNA, 25 bp, Homo sapien
tggacaaaccttcaagcaggaccag

SEQ ID NO: 5706984 - DNA, 25 bp, Homo sapien
cagagtgcctctcaagttttcacgg

SEQ ID NO: 5706985 - DNA, 25 bp, Homo sapien
tcccgggaaactgagctgcgtatac

SEQ ID NO: 5706986 - DNA, 25 bp, Homo sapien
agcaggaccagggcaggtatgaaat

SEQ ID NO: 5706987 - DNA, 25 bp, Homo sapien
actcacagcaacctgggctagtggg

SEQ ID NO: 5706988 - DNA, 25 bp, Homo sapien
agctgctctgcctggacaaaccttc

SEQ ID NO: 5706989 - DNA, 25 bp, Homo sapien
gtaaaatcacgctgtgtgattttat

SEQ ID NO: 5706990 - DNA, 25 bp, Homo sapien
agcaccaggacaccacgcccctcgg

SEQ ID NO: 5706991 - DNA, 25 bp, Homo sapien
catccacaaagaacttgtactgatg

SEQ ID NO: 5706992 - DNA, 25 bp, Homo sapien
ctgctggtattgcccatgatggggg

SEQ ID NO: 5706993 - DNA, 25 bp, Homo sapien
atgaaatgtcttctgaagagtgtga

SEQ ID NO: 5706994 - DNA, 25 bp, Homo sapien
aggagatgtggggggagaatagggg

SEQ ID NO: 5706995 - DNA, 25 bp, Homo sapien
cagataagtaaacttcctttccgcc

SEQ ID NO: 5706996 - DNA, 25 bp, Homo sapien
agctggctggttactatgggctcgg

SEQ ID NO: 5706997 - DNA, 25 bp, Homo sapien
ggcataacgggagcttccgctgact

SEQ ID NO: 5706998 - DNA, 25 bp, Homo sapien
ctccatccttgatagacagcgcgta

SEQ ID NO: 5706999 - DNA, 25 bp, Homo sapien
tacttcttcttgtaccggtgggttg

SEQ ID NO: 5707000 - DNA, 25 bp, Homo sapien
gctgagcaccatcactccatccttg

SEQ ID NO: 5707001 - DNA, 25 bp, Homo sapien
gtggcgactcccgggaaactgagct

SEQ ID NO: 5707002 - DNA, 25 bp, Homo sapien
ccttgtaaaatcacgctgtgtgatt

SEQ ID NO: 5707003 - DNA, 25 bp, Homo sapien
cggcagatccaggatggctacaaag

SEQ ID NO: 5707004 - DNA, 25 bp, Homo sapien
aatgatgttgttaactgtgccaagc

SEQ ID NO: 5707005 - DNA, 25 bp, Homo sapien
cacctccctggagccgagagacaat

SEQ ID NO: 5707006 - DNA, 25 bp, Homo sapien
agttagcattcatttttggcttaag

SEQ ID NO: 5707007 - DNA, 25 bp, Homo sapien
ggtggtgtgctgtctcctgggccac

SEQ ID NO: 5707008 - DNA, 25 bp, Homo sapien
ccaacactgtatttagttccatagc

SEQ ID NO: 5707009 - DNA, 25 bp, Homo sapien
tcctgatggtagggtcctgggggag

SEQ ID NO: 5707010 - DNA, 25 bp, Homo sapien
tcctgaggatcatccagctgaatgg

SEQ ID NO: 5707011 - DNA, 25 bp, Homo sapien
gcgcgtataggtggttcagcatgac

SEQ ID NO: 5707012 - DNA, 25 bp, Homo sapien
ataagcaacagcaactgctgcagtc

SEQ ID NO: 5707013 - DNA, 25 bp, Homo sapien
cctcggagtggaagaggtcggcgtc

SEQ ID NO: 5707014 - DNA, 25 bp, Homo sapien
gtccccgaggctcaaagccatgggg

SEQ ID NO: 5707015 - DNA, 25 bp, Homo sapien
tgctgtcaagttctacattcctttc

SEQ ID NO: 5707016 - DNA, 25 bp, Homo sapien
acacacagatgactggaaatgatgt

SEQ ID NO: 5707017 - DNA, 25 bp, Homo sapien
aatcgagaatgtaggtttagaactg

SEQ ID NO: 5707018 - DNA, 25 bp, Homo sapien
caccaggagcaaagggcataacggg

SEQ ID NO: 5707019 - DNA, 25 bp, Homo sapien
gctgagtcggcagggttgccgagct

SEQ ID NO: 5707020 - DNA, 25 bp, Homo sapien
gctttacctgcccaggcaagccgcg

SEQ ID NO: 5707021 - DNA, 25 bp, Homo sapien
ggactgtcacagaccgaggcgctgc

SEQ ID NO: 5707022 - DNA, 25 bp, Homo sapien
ggcgactcccgggaaactgagctgc

SEQ ID NO: 5707023 - DNA, 25 bp, Homo sapien
cttgtataacaaggtggtgacgtac

SEQ ID NO: 5707024 - DNA, 25 bp, Homo sapien
acctattatgactggaataaaaagc

SEQ ID NO: 5707025 - DNA, 25 bp, Homo sapien
ggcttgtataacaaggtggtgacgt

SEQ ID NO: 5707026 - DNA, 25 bp, Homo sapien
tcacagcaacctgggctagtgggta

SEQ ID NO: 5707027 - DNA, 25 bp, Homo sapien
gaacagattattgctgagcagagtt

SEQ ID NO: 5707028 - DNA, 25 bp, Homo sapien
gcacccagcctcatgcaccgcgggg

SEQ ID NO: 5707029 - DNA, 25 bp, Homo sapien
caggatcttgggcctgtccccgtcc

SEQ ID NO: 5707030 - DNA, 25 bp, Homo sapien
taacactgtcacctattatgactgg

SEQ ID NO: 5707031 - DNA, 25 bp, Homo sapien
tgggcgggagctttatcattcactt

SEQ ID NO: 5707032 - DNA, 25 bp, Homo sapien
taacaaggtggtgacgtacttcttc

SEQ ID NO: 5707033 - DNA, 25 bp, Homo sapien
ggtacccccaaactcaggtatacca

SEQ ID NO: 5707034 - DNA, 25 bp, Homo sapien
tgtgtggcctcagtccctgtttccc

SEQ ID NO: 5707035 - DNA, 25 bp, Homo sapien
agcaccatcactccatccttgatag

SEQ ID NO: 5707036 - DNA, 25 bp, Homo sapien
agcctcatgcaccgcggggccaggg

SEQ ID NO: 5707037 - DNA, 25 bp, Homo sapien
gacagctcagacacatcggagcact

SEQ ID NO: 5707038 - DNA, 25 bp, Homo sapien
taaatactggaacccagggagctca

SEQ ID NO: 5707039 - DNA, 25 bp, Homo sapien
ctgctctgcctggacaaaccttcaa

SEQ ID NO: 5707040 - DNA, 25 bp, Homo sapien
attgggctcaggaagcaaagctgga

SEQ ID NO: 5707041 - DNA, 25 bp, Homo sapien
tgttctgagaacagattattgctga

SEQ ID NO: 5707042 - DNA, 25 bp, Homo sapien
ctcaagttttcacggttaacactgt

SEQ ID NO: 5707043 - DNA, 25 bp, Homo sapien
ttcaaagtcagttttcttcacttga

SEQ ID NO: 5707044 - DNA, 25 bp, Homo sapien
ccgctccagcgcggcgcgctcactg

SEQ ID NO: 5707045 - DNA, 25 bp, Homo sapien
ctggctggttactatgggctcggaa

SEQ ID NO: 5707046 - DNA, 25 bp, Homo sapien
tcatgcaccgcggggccagggctgc

SEQ ID NO: 5707047 - DNA, 25 bp, Homo sapien
gcgtccactgaccatccacaaagaa

SEQ ID NO: 5707048 - DNA, 25 bp, Homo sapien
cctcttggggaaagcatgcacgtgt

SEQ ID NO: 5707049 - DNA, 25 bp, Homo sapien
tccctcttttcttggacttgatgag

SEQ ID NO: 5707050 - DNA, 25 bp, Homo sapien
ttcccagaattttactggcaaagga

SEQ ID NO: 5707051 - DNA, 25 bp, Homo sapien
acaattgtaaaacctcatctagaaa

SEQ ID NO: 5707052 - DNA, 25 bp, Homo sapien
aatgtcttctgaagagtgtgaaatg

SEQ ID NO: 5707053 - DNA, 25 bp, Homo sapien
taatttctatagaaatgacacctcc

SEQ ID NO: 5707054 - DNA, 25 bp, Homo sapien
gagtgcctctcaagttttcacggtt

SEQ ID NO: 5707055 - DNA, 25 bp, Homo sapien
aaaatcacgctgtgtgattttatag

SEQ ID NO: 5707056 - DNA, 25 bp, Homo sapien
gctgtccctccggggcgtcttatgg

SEQ ID NO: 5707057 - DNA, 25 bp, Homo sapien
agagtgtgaaatgagcaatgtacag

SEQ ID NO: 5707058 - DNA, 25 bp, Homo sapien
ctgagaacagattattgctgagcag

SEQ ID NO: 5707059 - DNA, 25 bp, Homo sapien
agccaggcctcaacagggacaagtg

SEQ ID NO: 5707060 - DNA, 25 bp, Homo sapien
tgtcacagaccgaggcgctgcagga

SEQ ID NO: 5707061 - DNA, 25 bp, Homo sapien
gctctccttccggcagatccaggat

SEQ ID NO: 5707062 - DNA, 25 bp, Homo sapien
gggagcttccgctgactcacagcaa

SEQ ID NO: 5707063 - DNA, 25 bp, Homo sapien
gtcctgagcaaggtgccacgggacc

SEQ ID NO: 5707064 - DNA, 25 bp, Homo sapien
ctggtggtgtgctgtctcctgggcc

SEQ ID NO: 5707065 - DNA, 25 bp, Homo sapien
cagggagctcactcctccctctccc

SEQ ID NO: 5707066 - DNA, 25 bp, Homo sapien
tccacaaagaacttgtactgatgct

SEQ ID NO: 5707067 - DNA, 25 bp, Homo sapien
gtggttcagcatgacgtgattgggc

SEQ ID NO: 5707068 - DNA, 25 bp, Homo sapien
ggacaccacgcccctcgggccggga

SEQ ID NO: 5707069 - DNA, 25 bp, Homo sapien
cccccagctcttcatatgggcttgt

SEQ ID NO: 5707070 - DNA, 25 bp, Homo sapien
ggagcaccaggacaccacgcccctc

SEQ ID NO: 5707071 - DNA, 25 bp, Homo sapien
ggcggacggcgcctcactgcaggaa

SEQ ID NO: 5707072 - DNA, 25 bp, Homo sapien
ggaaatccccgtgtccttgttcagg

SEQ ID NO: 5707073 - DNA, 25 bp, Homo sapien
gccgagcctgggcgggagctttatc

SEQ ID NO: 5707074 - DNA, 25 bp, Homo sapien
caaaggagttagcattcatttttgg

SEQ ID NO: 5707075 - DNA, 25 bp, Homo sapien
gtgcgtccactgaccatccacaaag

SEQ ID NO: 5707076 - DNA, 25 bp, Homo sapien
cacaaagaacttgtactgatgctct

SEQ ID NO: 5707077 - DNA, 25 bp, Homo sapien
ccacgggaccttgtaaaatcacgct

SEQ ID NO: 5707078 - DNA, 25 bp, Homo sapien
ctgcggggacacagggaaggcggac

SEQ ID NO: 5707079 - DNA, 25 bp, Homo sapien
ttagaactgcacccagcctcatgca

SEQ ID NO: 5707080 - DNA, 25 bp, Homo sapien
aaatgacacctccctggagccgaga

SEQ ID NO: 5707081 - DNA, 25 bp, Homo sapien
aggccaggaattcctccttctctgg

SEQ ID NO: 5707082 - DNA, 25 bp, Homo sapien
gaggactgtcacagaccgaggcgct

SEQ ID NO: 5707083 - DNA, 25 bp, Homo sapien
ggtcgtgcgtccactgaccatccac

SEQ ID NO: 5707084 - DNA, 25 bp, Homo sapien
agaggtcctgagcaaggtgccacgg

SEQ ID NO: 5707085 - DNA, 25 bp, Homo sapien
cttggacttgatgagtccccgaggc

SEQ ID NO: 5707086 - DNA, 25 bp, Homo sapien
aggtttagaactgcacccagcctca

SEQ ID NO: 5707087 - DNA, 25 bp, Homo sapien
ttgctgagcagagttcatgtgactt

SEQ ID NO: 5707088 - DNA, 25 bp, Homo sapien
tcagtcctgaggatcatccagctga

SEQ ID NO: 5707089 - DNA, 25 bp, Homo sapien
tcttcatatgggcttgtataacaag

SEQ ID NO: 5707090 - DNA, 25 bp, Homo sapien
ttcatttttggcttaagaaaaatcg

SEQ ID NO: 5707091 - DNA, 25 bp, Homo sapien
ggcagagtgcctctcaagttttcac

SEQ ID NO: 5707092 - DNA, 25 bp, Homo sapien
accgcggggccagggctgcagatcc

SEQ ID NO: 5707093 - DNA, 25 bp, Homo sapien
aatagggggtgcccgaaagcgctct

SEQ ID NO: 5707094 - DNA, 25 bp, Homo sapien
taagaaacaattgtaaaacctcatc

SEQ ID NO: 5707095 - DNA, 25 bp, Homo sapien
atgttgttaactgtgccaagctggc

SEQ ID NO: 5707096 - DNA, 25 bp, Homo sapien
cgggtttgcagacgtagggctcctg

SEQ ID NO: 5707097 - DNA, 25 bp, Homo sapien
ttgttcaggatgacctggaggagat

SEQ ID NO: 5707098 - DNA, 25 bp, Homo sapien
ggctgtccatcaggatcttgggcct

SEQ ID NO: 5707099 - DNA, 25 bp, Homo sapien
ctggcaaaggagttagcattcattt

SEQ ID NO: 5707100 - DNA, 25 bp, Homo sapien
gcatgacgtgattgggctcaggaag

SEQ ID NO: 5707101 - DNA, 25 bp, Homo sapien
cactgttttgaaaagtcacaaaaaa

SEQ ID NO: 5707102 - DNA, 25 bp, Homo sapien
gaaggctgctgtcaagttctacatt

SEQ ID NO: 5707103 - DNA, 25 bp, Homo sapien
agggcagagtgcctctcaagttttc

SEQ ID NO: 5707104 - DNA, 25 bp, Homo sapien
aaatcagaaagcttctaatttctat

SEQ ID NO: 5707105 - DNA, 25 bp, Homo sapien
ccaggagcaaagggcataacgggag

SEQ ID NO: 5707106 - DNA, 25 bp, Homo sapien
tacttagtgcacatgactgtaagaa

SEQ ID NO: 5707107 - DNA, 25 bp, Homo sapien
ctgtccatcaggatcttgggcctgt

SEQ ID NO: 5707108 - DNA, 25 bp, Homo sapien
tgacctggaggagatgtggggggag

SEQ ID NO: 5707109 - DNA, 25 bp, Homo sapien
gaaacaccgttggccgagcctgggc

SEQ ID NO: 5707110 - DNA, 25 bp, Homo sapien
ctgtttcccagaattttactggcaa

SEQ ID NO: 5707111 - DNA, 25 bp, Homo sapien
gatggctacaaagttattgtggctt

SEQ ID NO: 5707112 - DNA, 25 bp, Homo sapien
tcctgacccagactcagaaggctgc

SEQ ID NO: 5707113 - DNA, 25 bp, Homo sapien
ttttgggaatccaccattaaagcat

SEQ ID NO: 5707114 - DNA, 25 bp, Homo sapien
gaataagcaacagcaactgctgcag

SEQ ID NO: 5707115 - DNA, 25 bp, Homo sapien
agaatagggggtgcccgaaagcgct

SEQ ID NO: 5707116 - DNA, 25 bp, Homo sapien
aagcgctcttcgggtttgcagacgt

SEQ ID NO: 5707117 - DNA, 25 bp, Homo sapien
cagcatgacgtgattgggctcagga

SEQ ID NO: 5707118 - DNA, 25 bp, Homo sapien
tgagcaccatcactccatccttgat

SEQ ID NO: 5707119 - DNA, 25 bp, Homo sapien
taccaagtaaatactggaacccagg

SEQ ID NO: 5707120 - DNA, 25 bp, Homo sapien
gacgtacttcttcttgtaccggtgg

SEQ ID NO: 5707121 - DNA, 25 bp, Homo sapien
gagaaatccggcagcaggttgaaaa

SEQ ID NO: 5707122 - DNA, 25 bp, Homo sapien
aattcactgttttgaaaagtcacaa

SEQ ID NO: 5707123 - DNA, 25 bp, Homo sapien
caaagtcagttttcttcacttgaat

SEQ ID NO: 5707124 - DNA, 25 bp, Homo sapien
acccagcctcatgcaccgcggggcc

SEQ ID NO: 5707125 - DNA, 25 bp, Homo sapien
gctgagcagagttcatgtgacttct

SEQ ID NO: 5707126 - DNA, 25 bp, Homo sapien
acacagggaaggcggacggcgcctc

SEQ ID NO: 5707127 - DNA, 25 bp, Homo sapien
gagcttccgctgactcacagcaacc

SEQ ID NO: 5707128 - DNA, 25 bp, Homo sapien
gcgtataggtggttcagcatgacgt

SEQ ID NO: 5707129 - DNA, 25 bp, Homo sapien
agagccagccacctctgcttacaaa

SEQ ID NO: 5707130 - DNA, 25 bp, Homo sapien
tccggcagcaggttgaaaagtctgt

SEQ ID NO: 5707131 - DNA, 25 bp, Homo sapien
cacaggaaatccccgtgtccttgtt

SEQ ID NO: 5707132 - DNA, 25 bp, Homo sapien
ctggatcacaggaaatccccgtgtc

SEQ ID NO: 5707133 - DNA, 25 bp, Homo sapien
tccagctgaatggagaaatccggca

SEQ ID NO: 5707134 - DNA, 25 bp, Homo sapien
agcatgcacgtgtggagcctggtgg

SEQ ID NO: 5707135 - DNA, 25 bp, Homo sapien
atcaaggtgacagtaattcactgtt

SEQ ID NO: 5707136 - DNA, 25 bp, Homo sapien
tctagacgtggtgacttaaaaaatg

SEQ ID NO: 5707137 - DNA, 25 bp, Homo sapien
attgaaacttgtccatcaaggtgac

SEQ ID NO: 5707138 - DNA, 25 bp, Homo sapien
tgtctcctgggccaccatccgcccc

SEQ ID NO: 5707139 - DNA, 25 bp, Homo sapien
tttatagggaagagggcagagtgcc

SEQ ID NO: 5707140 - DNA, 25 bp, Homo sapien
gactggaaatgatgtgtggcctcag

SEQ ID NO: 5707141 - DNA, 25 bp, Homo sapien
gcgctgcaggagctgctctgcctgg

SEQ ID NO: 5707142 - DNA, 25 bp, Homo sapien
cccgtccatcgaaacaccgttggcc

SEQ ID NO: 5707143 - DNA, 25 bp, Homo sapien
tccagttgttgaaggacccagataa

SEQ ID NO: 5707144 - DNA, 25 bp, Homo sapien
gtgccttgatttcctcggagtggaa

SEQ ID NO: 5707145 - DNA, 25 bp, Homo sapien
ggacaagtggctggccttaaaaaca

SEQ ID NO: 5707146 - DNA, 25 bp, Homo sapien
tcggagcaccaggacaccacgcccc

SEQ ID NO: 5707147 - DNA, 25 bp, Homo sapien
tcttcgggtttgcagacgtagggct

SEQ ID NO: 5707148 - DNA, 25 bp, Homo sapien
gaaagcttctaatttctatagaaat

SEQ ID NO: 5707149 - DNA, 25 bp, Homo sapien
tctggtgccttgatttcctcggagt

SEQ ID NO: 5707150 - DNA, 25 bp, Homo sapien
tgttgaaggacccagataagtaaac

SEQ ID NO: 5707151 - DNA, 25 bp, Homo sapien
aactgagctgcgtatacagaagtct

SEQ ID NO: 5707152 - DNA, 25 bp, Homo sapien
gcaacagcaactgctgcagtcttgc

SEQ ID NO: 5707153 - DNA, 25 bp, Homo sapien
cctggagccgagagacaatctgttg

SEQ ID NO: 5707154 - DNA, 25 bp, Homo sapien
cggttccggctgagtcggcagggtt

SEQ ID NO: 5707155 - DNA, 25 bp, Homo sapien
ggagtcggagcaccaggacaccacg

SEQ ID NO: 5707156 - DNA, 25 bp, Homo sapien
aaagctggacaacctgccagctaac

SEQ ID NO: 5707157 - DNA, 25 bp, Homo sapien
ccgggaaactgagctgcgtatacag

SEQ ID NO: 5707158 - DNA, 25 bp, Homo sapien
ggttgaaaagtctgttctgagaaca

SEQ ID NO: 5707159 - DNA, 25 bp, Homo sapien
tctgcctggacaaaccttcaagcag

SEQ ID NO: 5707160 - DNA, 25 bp, Homo sapien
ggcgcgctcactgctggtattgccc

SEQ ID NO: 5707161 - DNA, 25 bp, Homo sapien
atccaggatggctacaaagttattg

SEQ ID NO: 5707162 - DNA, 25 bp, Homo sapien
agagtacttagtgcacatgactgta

SEQ ID NO: 5707163 - DNA, 25 bp, Homo sapien
gtcggcgtcttcggggctgtccatc

SEQ ID NO: 5707164 - DNA, 25 bp, Homo sapien
actgtcacagaccgaggcgctgcag

SEQ ID NO: 5707165 - DNA, 25 bp, Homo sapien
gcgcgaagataaaccgacactttcc

SEQ ID NO: 5707166 - DNA, 25 bp, Homo sapien
tgccgctccagcgcggcgcgctcac

SEQ ID NO: 5707167 - DNA, 25 bp, Homo sapien
tgaaatgagcaatgtacagtccatt

SEQ ID NO: 5707168 - DNA, 25 bp, Homo sapien
cttccggcagatccaggatggctac

SEQ ID NO: 5707169 - DNA, 25 bp, Homo sapien
tcgcgctttacctgcccaggcaagc

SEQ ID NO: 5707170 - DNA, 25 bp, Homo sapien
agttctacattcctttcagaataag

SEQ ID NO: 5707171 - DNA, 25 bp, Homo sapien
tgatttcctcggagtggaagaggtc

SEQ ID NO: 5707172 - DNA, 25 bp, Homo sapien
aggtcggcgtcttcggggctgtcca

SEQ ID NO: 5707173 - DNA, 25 bp, Homo sapien
gttgccgagctctcgcaatcgcgct

SEQ ID NO: 5707174 - DNA, 25 bp, Homo sapien
caaagttattgtggcttctggtgag

SEQ ID NO: 5707175 - DNA, 25 bp, Homo sapien
aagtcagttttcttcacttgaatga

SEQ ID NO: 5707176 - DNA, 25 bp, Homo sapien
atcacaggaaatccccgtgtccttg

SEQ ID NO: 5707177 - DNA, 25 bp, Homo sapien
cttagtgcacatgactgtaagaaac

SEQ ID NO: 5707178 - DNA, 25 bp, Homo sapien
gcaaagggcataacgggagcttccg

SEQ ID NO: 5707179 - DNA, 25 bp, Homo sapien
agtcctgaggatcatccagctgaat

SEQ ID NO: 5707180 - DNA, 25 bp, Homo sapien
ctgtgccaagctggctggttactat

SEQ ID NO: 5707181 - DNA, 25 bp, Homo sapien
tgggcttgtataacaaggtggtgac

SEQ ID NO: 5707182 - DNA, 25 bp, Homo sapien
gcaaagctggatcacaggaaatccc

SEQ ID NO: 5707183 - DNA, 25 bp, Homo sapien
ggcaagccgcggcaagaacgcaagg

SEQ ID NO: 5707184 - DNA, 25 bp, Homo sapien
ccactgaccatccacaaagaacttg

SEQ ID NO: 5707185 - DNA, 25 bp, Homo sapien
tcctgggggagaactggacagctca

SEQ ID NO: 5707186 - DNA, 25 bp, Homo sapien
gatgtgtggcctcagtccctgtttc

SEQ ID NO: 5707187 - DNA, 25 bp, Homo sapien
aggcgctgcaggagctgctctgcct

SEQ ID NO: 5707188 - DNA, 25 bp, Homo sapien
tctgttctgagaacagattattgct

SEQ ID NO: 5707189 - DNA, 25 bp, Homo sapien
ggcgggagctttatcattcacttcc

SEQ ID NO: 5707190 - DNA, 25 bp, Homo sapien
gtgaggggaagtttactccagttgt

SEQ ID NO: 5707191 - DNA, 25 bp, Homo sapien
aagttattgtggcttctggtgaggg

SEQ ID NO: 5707192 - DNA, 25 bp, Homo sapien
ttcctccttctctggtgccttgatt

SEQ ID NO: 5707193 - DNA, 25 bp, Homo sapien
tcaggatgacctggaggagatgtgg

SEQ ID NO: 5707194 - DNA, 25 bp, Homo sapien
caagccgcggcaagaacgcaagggg

SEQ ID NO: 5707195 - DNA, 25 bp, Homo sapien
gcaccgcggggccagggctgcagat

SEQ ID NO: 5707196 - DNA, 25 bp, Homo sapien
gaggctcaaagccatgggggtgcta

SEQ ID NO: 5707197 - DNA, 25 bp, Homo sapien
ggctggccttaaaaacacacagatg

SEQ ID NO: 5707198 - DNA, 25 bp, Homo sapien
cctcatgcaccgcggggccagggct

SEQ ID NO: 5707199 - DNA, 25 bp, Homo sapien
gggagaactggacagctcagacaca

SEQ ID NO: 5707200 - DNA, 25 bp, Homo sapien
aaacacacagatgactggaaatgat

SEQ ID NO: 5707201 - DNA, 25 bp, Homo sapien
tgtcacctattatgactggaataaa

SEQ ID NO: 5707202 - DNA, 25 bp, Homo sapien
gcgtcttatggccaccatgccgctc

SEQ ID NO: 5707203 - DNA, 25 bp, Homo sapien
gggcaggtatgaaatgtcttctgaa

SEQ ID NO: 5707204 - DNA, 25 bp, Homo sapien
tgatgctctccttccggcagatcca

SEQ ID NO: 5707205 - DNA, 25 bp, Homo sapien
gagcaaagggcataacgggagcttc

SEQ ID NO: 5707206 - DNA, 25 bp, Homo sapien
ccttaaaaacacacagatgactgga

SEQ ID NO: 5707207 - DNA, 25 bp, Homo sapien
gcttccgctgactcacagcaacctg

SEQ ID NO: 5707208 - DNA, 25 bp, Homo sapien
cgcggggccagggctgcagatcctc

SEQ ID NO: 5707209 - DNA, 25 bp, Homo sapien
acctgggctagtgggtacatctgtg

SEQ ID NO: 5707210 - DNA, 25 bp, Homo sapien
cccagggagctcactcctccctctc

SEQ ID NO: 5707211 - DNA, 25 bp, Homo sapien
gaagagtgtgaaatgagcaatgtac

SEQ ID NO: 5707212 - DNA, 25 bp, Homo sapien
aacagcaactgctgcagtcttgcta

SEQ ID NO: 5707213 - DNA, 25 bp, Homo sapien
tggtgaggggaagtttactccagtt

SEQ ID NO: 5707214 - DNA, 25 bp, Homo sapien
gcgcggcgcgctcactgctggtatt

SEQ ID NO: 5707215 - DNA, 25 bp, Homo sapien
tcgcaatcgcgctttacctgcccag

SEQ ID NO: 5707216 - DNA, 25 bp, Homo sapien
tcgagaatgtaggtttagaactgca

SEQ ID NO: 5707217 - DNA, 25 bp, Homo sapien
tacagtccattccctcttggggaaa

SEQ ID NO: 5707218 - DNA, 25 bp, Homo sapien
gtgcctctcaagttttcacggttaa

SEQ ID NO: 5707219 - DNA, 25 bp, Homo sapien
gtcaagttctacattcctttcagaa

SEQ ID NO: 5707220 - DNA, 25 bp, Homo sapien
atgactggaaatgatgtgtggcctc

SEQ ID NO: 5707221 - DNA, 25 bp, Homo sapien
tggtagggtcctgggggagaactgg

SEQ ID NO: 5707222 - DNA, 25 bp, Homo sapien
cacttccagatcatgctgccaggcc

SEQ ID NO: 5707223 - DNA, 25 bp, Homo sapien
ggccttaaggctgcagagccagcca

SEQ ID NO: 5707224 - DNA, 25 bp, Homo sapien
ctaactaggggcagaggtcctgagc

SEQ ID NO: 5707225 - DNA, 25 bp, Homo sapien
atcatccagctgaatggagaaatcc

SEQ ID NO: 5707226 - DNA, 25 bp, Homo sapien
tggtgtgctgtctcctgggccacca

SEQ ID NO: 5707227 - DNA, 25 bp, Homo sapien
cggggccagggctgcagatcctctg

SEQ ID NO: 5707228 - DNA, 25 bp, Homo sapien
cagtcttgctaactaggggcagagg

SEQ ID NO: 5707229 - DNA, 25 bp, Homo sapien
gctctgcctggacaaaccttcaagc

SEQ ID NO: 5707230 - DNA, 25 bp, Homo sapien
catgatgggggtctgcggggacaca

SEQ ID NO: 5707231 - DNA, 25 bp, Homo sapien
tgcacgtgtggagcctggtggtgtg

SEQ ID NO: 5707232 - DNA, 25 bp, Homo sapien
agaaatcagaaagcttctaatttct

SEQ ID NO: 5707233 - DNA, 25 bp, Homo sapien
cttctaatttctatagaaatgacac

SEQ ID NO: 5707234 - DNA, 25 bp, Homo sapien
ggccgggagccggttccggctgagt

SEQ ID NO: 5707235 - DNA, 25 bp, Homo sapien
aagcaacagcaactgctgcagtctt

SEQ ID NO: 5707236 - DNA, 25 bp, Homo sapien
tagggctcctgatggtagggtcctg

SEQ ID NO: 5707237 - DNA, 25 bp, Homo sapien
gcggcaagaacgcaaggggcgcgaa

SEQ ID NO: 5707238 - DNA, 25 bp, Homo sapien
gctgcgtatacagaagtctgctttg

SEQ ID NO: 5707239 - DNA, 25 bp, Homo sapien
caaaggacatcttcctgacccagac

SEQ ID NO: 5707240 - DNA, 25 bp, Homo sapien
gaataaaaagctggacaacctgcca

SEQ ID NO: 5707241 - DNA, 25 bp, Homo sapien
cgagcctgggcgggagctttatcat

SEQ ID NO: 5707242 - DNA, 25 bp, Homo sapien
ctaggaggactgtcacagaccgagg

SEQ ID NO: 5707243 - DNA, 25 bp, Homo sapien
tatgggcttgtataacaaggtggtg

SEQ ID NO: 5707244 - DNA, 25 bp, Homo sapien
cactccatccttgatagacagcgcg

SEQ ID NO: 5707245 - DNA, 25 bp, Homo sapien
cctcatctagaaatcagaaagcttc

SEQ ID NO: 5707246 - DNA, 25 bp, Homo sapien
agtctgttctgagaacagattattg

SEQ ID NO: 5707247 - DNA, 25 bp, Homo sapien
cctccttctctggtgccttgatttc

SEQ ID NO: 5707248 - DNA, 25 bp, Homo sapien
acagcaacctgggctagtgggtaca

SEQ ID NO: 5707249 - DNA, 25 bp, Homo sapien
ttcctcggagtggaagaggtcggcg

SEQ ID NO: 5707250 - DNA, 25 bp, Homo sapien
acttgtactgatgctctccttccgg

SEQ ID NO: 5707251 - DNA, 25 bp, Homo sapien
acagggaaggcggacggcgcctcac

SEQ ID NO: 5707252 - DNA, 25 bp, Homo sapien
tggacttgatgagtccccgaggctc

SEQ ID NO: 5707253 - DNA, 25 bp, Homo sapien
cagggttgccgagctctcgcaatcg

SEQ ID NO: 5707254 - DNA, 25 bp, Homo sapien
catatgggcttgtataacaaggtgg

SEQ ID NO: 5707255 - DNA, 25 bp, Homo sapien
ataaaaagctggacaacctgccagc

SEQ ID NO: 5707256 - DNA, 25 bp, Homo sapien
tagggaagagggcagagtgcctctc

SEQ ID NO: 5707257 - DNA, 25 bp, Homo sapien
tataccaagtaaatactggaaccca

SEQ ID NO: 5707258 - DNA, 25 bp, Homo sapien
tcggagtggaagaggtcggcgtctt

SEQ ID NO: 5707259 - DNA, 25 bp, Homo sapien
gagcaagggactcccggaaccgcgg

SEQ ID NO: 5707260 - DNA, 25 bp, Homo sapien
atttcctcggagtggaagaggtcgg

SEQ ID NO: 5707261 - DNA, 25 bp, Homo sapien
gagccgagagacaatctgttgttga

SEQ ID NO: 5707262 - DNA, 25 bp, Homo sapien
cacttgaatgatgttgttaactgtg

SEQ ID NO: 5707263 - DNA, 25 bp, Homo sapien
tgctttggtccaaaggacatcttcc

SEQ ID NO: 5707264 - DNA, 25 bp, Homo sapien
tgctaactaggggcagaggtcctga

SEQ ID NO: 5707265 - DNA, 25 bp, Homo sapien
tactggaacccagggagctcactcc

SEQ ID NO: 5707266 - DNA, 25 bp, Homo sapien
cactgctggtattgcccatgatggg

SEQ ID NO: 5707267 - DNA, 25 bp, Homo sapien
tgtaagaaacaattgtaaaacctca

SEQ ID NO: 5707268 - DNA, 25 bp, Homo sapien
caggaaatccccgtgtccttgttca

SEQ ID NO: 5707269 - DNA, 25 bp, Homo sapien
ctggacaacctgccagctaactggt

SEQ ID NO: 5707270 - DNA, 25 bp, Homo sapien
tcatgctgccaggccaggaattcct

SEQ ID NO: 5707271 - DNA, 25 bp, Homo sapien
tcaaatacttcaaagtcagttttct

SEQ ID NO: 5707272 - DNA, 25 bp, Homo sapien
cagggctgcagatcctctgccaccc

SEQ ID NO: 5707273 - DNA, 25 bp, Homo sapien
ccagcctcatgcaccgcggggccag

SEQ ID NO: 5707274 - DNA, 25 bp, Homo sapien
ggaaatgatgtgtggcctcagtccc

SEQ ID NO: 5707275 - DNA, 25 bp, Homo sapien
gacgtagggctcctgatggtagggt

SEQ ID NO: 5707276 - DNA, 25 bp, Homo sapien
tagacgtggtgacttaaaaaatggc

SEQ ID NO: 5707277 - DNA, 25 bp, Homo sapien
ccacctctgcttacaaaaagagtac

SEQ ID NO: 5707278 - DNA, 25 bp, Homo sapien
ccgctgactcacagcaacctgggct

SEQ ID NO: 5707279 - DNA, 25 bp, Homo sapien
gttggccgagcctgggcgggagctt

SEQ ID NO: 5707280 - DNA, 25 bp, Homo sapien
gaaaaatcgagaatgtaggtttaga

SEQ ID NO: 5707281 - DNA, 25 bp, Homo sapien
atggccttaaggctgcagagccagc

SEQ ID NO: 5707282 - DNA, 25 bp, Homo sapien
gtgacttaaaaaatggccttaaggc

SEQ ID NO: 5707283 - DNA, 25 bp, Homo sapien
attttgaaggacaggcaagaccaac

SEQ ID NO: 5707284 - DNA, 25 bp, Homo sapien
gcggcgcgctcactgctggtattgc

SEQ ID NO: 5707285 - DNA, 25 bp, Homo sapien
aacccagggagctcactcctccctc

SEQ ID NO: 5707286 - DNA, 25 bp, Homo sapien
ggtccaaaggacatcttcctgaccc

SEQ ID NO: 5707287 - DNA, 25 bp, Homo sapien
tgtggcctcagtccctgtttcccag

SEQ ID NO: 5707288 - DNA, 25 bp, Homo sapien
ttgcgctgagcaccatcactccatc

SEQ ID NO: 5707289 - DNA, 25 bp, Homo sapien
caaggtgccacgggaccttgtaaaa

SEQ ID NO: 5707290 - DNA, 25 bp, Homo sapien
agagacaatctgttgttgattttga

SEQ ID NO: 5707291 - DNA, 25 bp, Homo sapien
ggcaagaacgcaaggggcgcgaaga

SEQ ID NO: 5707292 - DNA, 25 bp, Homo sapien
tttactggcaaaggagttagcattc

SEQ ID NO: 5707293 - DNA, 25 bp, Homo sapien
gggctcctgatggtagggtcctggg

SEQ ID NO: 5707294 - DNA, 25 bp, Homo sapien
ggaaggcggacggcgcctcactgca

SEQ ID NO: 5707295 - DNA, 25 bp, Homo sapien
ctggaaatgatgtgtggcctcagtc

SEQ ID NO: 5707296 - DNA, 25 bp, Homo sapien
gcgtcttcggggctgtccatcagga

SEQ ID NO: 5707297 - DNA, 25 bp, Homo sapien
caggaccagggcaggtatgaaatgt

SEQ ID NO: 5707298 - DNA, 25 bp, Homo sapien
gtgccaagctggctggttactatgg

SEQ ID NO: 5707299 - DNA, 25 bp, Homo sapien
gtaaaacctcatctagaaatcagaa

SEQ ID NO: 5707300 - DNA, 25 bp, Homo sapien
ccaccatgccgctccagcgcggcgc

SEQ ID NO: 5707301 - DNA, 25 bp, Homo sapien
gtataggtggttcagcatgacgtga

SEQ ID NO: 5707302 - DNA, 25 bp, Homo sapien
cccaaactcaggtataccaagtaaa

SEQ ID NO: 5707303 - DNA, 25 bp, Homo sapien
gctggtattgcccatgatgggggtc

SEQ ID NO: 5707304 - DNA, 25 bp, Homo sapien
gtgcccgaaagcgctcttcgggttt

SEQ ID NO: 5707305 - DNA, 25 bp, Homo sapien
cttgtaccggtgggttgcgctgagc

SEQ ID NO: 5707306 - DNA, 25 bp, Homo sapien
ccggtgggttgcgctgagcaccatc

SEQ ID NO: 5707307 - DNA, 25 bp, Homo sapien
acagatgactggaaatgatgtgtgg

SEQ ID NO: 5707308 - DNA, 25 bp, Homo sapien
tattgctgagcagagttcatgtgac

SEQ ID NO: 5707309 - DNA, 25 bp, Homo sapien
tgggctcggaagggtcgtgcgtcca

SEQ ID NO: 5707310 - DNA, 25 bp, Homo sapien
ctatagaaatgacacctccctggag

SEQ ID NO: 5707311 - DNA, 25 bp, Homo sapien
aaggagtcggagcaccaggacacca

SEQ ID NO: 5707312 - DNA, 25 bp, Homo sapien
ctgcacccagcctcatgcaccgcgg

SEQ ID NO: 5707313 - DNA, 25 bp, Homo sapien
gatagacagcgcgtataggtggttc

SEQ ID NO: 5707314 - DNA, 25 bp, Homo sapien
ccatccttgatagacagcgcgtata

SEQ ID NO: 5707315 - DNA, 25 bp, Homo sapien
gcgctcttcgggtttgcagacgtag

SEQ ID NO: 5707316 - DNA, 25 bp, Homo sapien
gaaatccggcagcaggttgaaaagt

SEQ ID NO: 5707317 - DNA, 25 bp, Homo sapien
ttagttccatagccaggcctcaaca

SEQ ID NO: 5707318 - DNA, 25 bp, Homo sapien
accgaggcgctgcaggagctgctct

SEQ ID NO: 5707319 - DNA, 25 bp, Homo sapien
aaggtggtgacgtacttcttcttgt

SEQ ID NO: 5707320 - DNA, 25 bp, Homo sapien
aaggacaggcaagaccaacactgta

SEQ ID NO: 5707321 - DNA, 25 bp, Homo sapien
cctccggggcgtcttatggccacca

SEQ ID NO: 5707322 - DNA, 25 bp, Homo sapien
gtaggtttagaactgcacccagcct

SEQ ID NO: 5707323 - DNA, 25 bp, Homo sapien
cagacgtagggctcctgatggtagg

SEQ ID NO: 5707324 - DNA, 25 bp, Homo sapien
caaaccttcaagcaggaccagggca

SEQ ID NO: 5707325 - DNA, 25 bp, Homo sapien
gacttctagacgtggtgacttaaaa

SEQ ID NO: 5707326 - DNA, 25 bp, Homo sapien
tcttttcttggacttgatgagtccc

SEQ ID NO: 5707327 - DNA, 25 bp, Homo sapien
ttttattgaaacttgtccatcaagg

SEQ ID NO: 5707328 - DNA, 25 bp, Homo sapien
caagttttcacggttaacactgtca

SEQ ID NO: 5707329 - DNA, 25 bp, Homo sapien
gcaactgctgcagtcttgctaacta

SEQ ID NO: 5707330 - DNA, 25 bp, Homo sapien
ggaaccgcgggtcccaaggagcctg

SEQ ID NO: 5707331 - DNA, 25 bp, Homo sapien
aggtgacagtaattcactgttttga

SEQ ID NO: 5707332 - DNA, 25 bp, Homo sapien
gaagataaaccgacactttcccaac

SEQ ID NO: 5707333 - DNA, 25 bp, Homo sapien
cagaaggctgctgtcaagttctaca

SEQ ID NO: 5707334 - DNA, 25 bp, Homo sapien
aatgtacagtccattccctcttggg

SEQ ID NO: 5707335 - DNA, 25 bp, Homo sapien
agatctttgaataaacattaaggag

SEQ ID NO: 5707336 - DNA, 25 bp, Homo sapien
ctccttaatgtttattcaaagatct

SEQ ID NO: 5707337 - DNA, 25 bp, Homo sapien
gaagaagatctttgaataaacatta

SEQ ID NO: 5707338 - DNA, 25 bp, Homo sapien
taatgtttattcaaagatcttcttc

SEQ ID NO: 5707339 - DNA, 25 bp, Homo sapien
gttagccgtttcctgtcgagcccac

SEQ ID NO: 5707340 - DNA, 25 bp, Homo sapien
gtgggctcgacaggaaacggctaac

SEQ ID NO: 5707341 - DNA, 25 bp, Homo sapien
ggggcgtcgtccctagcccgggagc

SEQ ID NO: 5707342 - DNA, 25 bp, Homo sapien
aggcattcttaaaaacttaggcttg

SEQ ID NO: 5707343 - DNA, 25 bp, Homo sapien
cggagccgtagttacggtcgactgg

SEQ ID NO: 5707344 - DNA, 25 bp, Homo sapien
ccttcctattgggcgaattccctca

SEQ ID NO: 5707345 - DNA, 25 bp, Homo sapien
tcctgggctcaagcagtcctcctgc

SEQ ID NO: 5707346 - DNA, 25 bp, Homo sapien
tgcaaagatgattgtccctggggaa

SEQ ID NO: 5707347 - DNA, 25 bp, Homo sapien
ttttgctgtggttggatacagatac

SEQ ID NO: 5707348 - DNA, 25 bp, Homo sapien
tagtttgactttttataattgaacc

SEQ ID NO: 5707349 - DNA, 25 bp, Homo sapien
aagctcctttcacttcgctagtaag

SEQ ID NO: 5707350 - DNA, 25 bp, Homo sapien
ctgtcagcgacgtccaggagctgat

SEQ ID NO: 5707351 - DNA, 25 bp, Homo sapien
tataataaacacagcttgcccagtt

SEQ ID NO: 5707352 - DNA, 25 bp, Homo sapien
aggttctcacactcaattccaaagc

SEQ ID NO: 5707353 - DNA, 25 bp, Homo sapien
ggacctgtaccaagtccgcaccgcc

SEQ ID NO: 5707354 - DNA, 25 bp, Homo sapien
ggaattccctggattgtgggcaagt

SEQ ID NO: 5707355 - DNA, 25 bp, Homo sapien
ggcagtgtggtgcagcacagtgagg

SEQ ID NO: 5707356 - DNA, 25 bp, Homo sapien
ccccggtcagacgtggacctgtacc

SEQ ID NO: 5707357 - DNA, 25 bp, Homo sapien
cccactgctagtttgactttttata

SEQ ID NO: 5707358 - DNA, 25 bp, Homo sapien
ctttctgttttggcagttctgccag

SEQ ID NO: 5707359 - DNA, 25 bp, Homo sapien
atcttcccttgccctggacttgggt

SEQ ID NO: 5707360 - DNA, 25 bp, Homo sapien
ccacgggccttcgccaaagtgaaca

SEQ ID NO: 5707361 - DNA, 25 bp, Homo sapien
ctgggatcacaggcgtgagccactg

SEQ ID NO: 5707362 - DNA, 25 bp, Homo sapien
ctctgtgaacacccagaacttccag

SEQ ID NO: 5707363 - DNA, 25 bp, Homo sapien
ttccacgtattttccagtctctttt

SEQ ID NO: 5707364 - DNA, 25 bp, Homo sapien
tctcgaactcctgggctcaagcagt

SEQ ID NO: 5707365 - DNA, 25 bp, Homo sapien
atctgggaccacaggcgtgcaccac

SEQ ID NO: 5707366 - DNA, 25 bp, Homo sapien
agtgctgggatcacaggcgtgagcc

SEQ ID NO: 5707367 - DNA, 25 bp, Homo sapien
ccggcgtcgtgactgtcagcgacgt

SEQ ID NO: 5707368 - DNA, 25 bp, Homo sapien
atgcatagctaatttattttttgta

SEQ ID NO: 5707369 - DNA, 25 bp, Homo sapien
tcagatggggtcagaagagcttcat

SEQ ID NO: 5707370 - DNA, 25 bp, Homo sapien
ggcttgtaacctgaacttctgtgtg

SEQ ID NO: 5707371 - DNA, 25 bp, Homo sapien
gggcaaaacaggctagcaattgcaa

SEQ ID NO: 5707372 - DNA, 25 bp, Homo sapien
atgatcacaaggcagtgatgaagca

SEQ ID NO: 5707373 - DNA, 25 bp, Homo sapien
ggttaagtactgtgcttcctcagca

SEQ ID NO: 5707374 - DNA, 25 bp, Homo sapien
agcttgccttgatgggattggtatt

SEQ ID NO: 5707375 - DNA, 25 bp, Homo sapien
ccagcttgccttgatgggattggta

SEQ ID NO: 5707376 - DNA, 25 bp, Homo sapien
agccgcaaactgggtcagagtgaga

SEQ ID NO: 5707377 - DNA, 25 bp, Homo sapien
ttcccctctggtagccacagacatg

SEQ ID NO: 5707378 - DNA, 25 bp, Homo sapien
tgtgttccttgggactggttttgct

SEQ ID NO: 5707379 - DNA, 25 bp, Homo sapien
agccgctggtggactgtgagggcta

SEQ ID NO: 5707380 - DNA, 25 bp, Homo sapien
tcgtgactgtcagcgacgtccagga

SEQ ID NO: 5707381 - DNA, 25 bp, Homo sapien
cctattgggcgaattccctcaaact

SEQ ID NO: 5707382 - DNA, 25 bp, Homo sapien
caggcacaacatcatatgcctgcag

SEQ ID NO: 5707383 - DNA, 25 bp, Homo sapien
agctgaatttcttatgaccctccca

SEQ ID NO: 5707384 - DNA, 25 bp, Homo sapien
caggcaagccctgtgttccttggga

SEQ ID NO: 5707385 - DNA, 25 bp, Homo sapien
agttttacagtgctgatatgaccct

SEQ ID NO: 5707386 - DNA, 25 bp, Homo sapien
tgcggcgcaaggaggagatagaagc

SEQ ID NO: 5707387 - DNA, 25 bp, Homo sapien
attttccagtctcttttataaagtc

SEQ ID NO: 5707388 - DNA, 25 bp, Homo sapien
gaacagtaacaggaaagcatcttcc

SEQ ID NO: 5707389 - DNA, 25 bp, Homo sapien
tttaataaagagttttacagtgctg

SEQ ID NO: 5707390 - DNA, 25 bp, Homo sapien
cctggacttgggtctagggatttcc

SEQ ID NO: 5707391 - DNA, 25 bp, Homo sapien
cggccctaaataggaattccctgga

SEQ ID NO: 5707392 - DNA, 25 bp, Homo sapien
acgtggacctgtaccaagtccgcac

SEQ ID NO: 5707393 - DNA, 25 bp, Homo sapien
tggtggactgtgagggctacccccg

SEQ ID NO: 5707394 - DNA, 25 bp, Homo sapien
ctccccagccagcatcgcgggtctg

SEQ ID NO: 5707395 - DNA, 25 bp, Homo sapien
acagggaaagcctggaggcttccca

SEQ ID NO: 5707396 - DNA, 25 bp, Homo sapien
attgtgggcaagtgggcggaagtta

SEQ ID NO: 5707397 - DNA, 25 bp, Homo sapien
tcctgtcagcttcctctttaggaac

SEQ ID NO: 5707398 - DNA, 25 bp, Homo sapien
tccctgaagcataaggatctggaag

SEQ ID NO: 5707399 - DNA, 25 bp, Homo sapien
gatgtccgacgaggaagcgaggcag

SEQ ID NO: 5707400 - DNA, 25 bp, Homo sapien
tatttctttgcactgaggccttgct

SEQ ID NO: 5707401 - DNA, 25 bp, Homo sapien
agtagctccctttggagaacaggga

SEQ ID NO: 5707402 - DNA, 25 bp, Homo sapien
tcgcgggtctgcaagtggatgatga

SEQ ID NO: 5707403 - DNA, 25 bp, Homo sapien
ccagggccctccacgggccttcgcc

SEQ ID NO: 5707404 - DNA, 25 bp, Homo sapien
aggcgtgcaccaccatgcatagcta

SEQ ID NO: 5707405 - DNA, 25 bp, Homo sapien
ccctagcccgggagccgggtctctg

SEQ ID NO: 5707406 - DNA, 25 bp, Homo sapien
tgtgggcaagtgggcggaagttatt

SEQ ID NO: 5707407 - DNA, 25 bp, Homo sapien
ggttggtctcgaactcctgggctca

SEQ ID NO: 5707408 - DNA, 25 bp, Homo sapien
ccacaggcgtgcaccaccatgcata

SEQ ID NO: 5707409 - DNA, 25 bp, Homo sapien
tttttgtttttgttttctggagaca

SEQ ID NO: 5707410 - DNA, 25 bp, Homo sapien
attattcctctgcaaagatgattgt

SEQ ID NO: 5707411 - DNA, 25 bp, Homo sapien
ggccggcgtcgtgactgtcagcgac

SEQ ID NO: 5707412 - DNA, 25 bp, Homo sapien
tcctttcacttcgctagtaagaacc

SEQ ID NO: 5707413 - DNA, 25 bp, Homo sapien
actcaattccaaagccttcctattg

SEQ ID NO: 5707414 - DNA, 25 bp, Homo sapien
tatgaccctgttgtcaccccagctg

SEQ ID NO: 5707415 - DNA, 25 bp, Homo sapien
gcggaggctcctcgcaggccggcgt

SEQ ID NO: 5707416 - DNA, 25 bp, Homo sapien
cacaaattaggccacggccctaaat

SEQ ID NO: 5707417 - DNA, 25 bp, Homo sapien
caacatcatatgcctgcagaatgat

SEQ ID NO: 5707418 - DNA, 25 bp, Homo sapien
aataggaattccctggattgtgggc

SEQ ID NO: 5707419 - DNA, 25 bp, Homo sapien
ttgggcgaattccctcaaactctat

SEQ ID NO: 5707420 - DNA, 25 bp, Homo sapien
ttcctattgggcgaattccctcaaa

SEQ ID NO: 5707421 - DNA, 25 bp, Homo sapien
acacagcttgcccagttaaaaaaaa

SEQ ID NO: 5707422 - DNA, 25 bp, Homo sapien
cagaagagcttcatagaaagttggg

SEQ ID NO: 5707423 - DNA, 25 bp, Homo sapien
cagcttagacttgttccaacacgct

SEQ ID NO: 5707424 - DNA, 25 bp, Homo sapien
tgctgtggatacggaaatggttaag

SEQ ID NO: 5707425 - DNA, 25 bp, Homo sapien
ggagccgggtctctggagtcgcggc

SEQ ID NO: 5707426 - DNA, 25 bp, Homo sapien
gagaacagggaaagcctggaggctt

SEQ ID NO: 5707427 - DNA, 25 bp, Homo sapien
taggcttggcctctttcacaaatta

SEQ ID NO: 5707428 - DNA, 25 bp, Homo sapien
agaaagttgggcaaaacaggctagc

SEQ ID NO: 5707429 - DNA, 25 bp, Homo sapien
caggttggtctcgaactcctgggct

SEQ ID NO: 5707430 - DNA, 25 bp, Homo sapien
tctcacactcaattccaaagccttc

SEQ ID NO: 5707431 - DNA, 25 bp, Homo sapien
tttttgttttctggagacaaggtct

SEQ ID NO: 5707432 - DNA, 25 bp, Homo sapien
gtggcccagcgtggtgtcctgtcag

SEQ ID NO: 5707433 - DNA, 25 bp, Homo sapien
agtactgtggcccaccagtgtaatc

SEQ ID NO: 5707434 - DNA, 25 bp, Homo sapien
aggaggagatagaagcgcagatcaa

SEQ ID NO: 5707435 - DNA, 25 bp, Homo sapien
tcagacgtggacctgtaccaagtcc

SEQ ID NO: 5707436 - DNA, 25 bp, Homo sapien
catggctgaggcccacaaagaggcc

SEQ ID NO: 5707437 - DNA, 25 bp, Homo sapien
tacggtcgactggggcgtcgtccct

SEQ ID NO: 5707438 - DNA, 25 bp, Homo sapien
tggaaagccaaaaaggcattgggat

SEQ ID NO: 5707439 - DNA, 25 bp, Homo sapien
gcgcagatcaaggccaactatgacg

SEQ ID NO: 5707440 - DNA, 25 bp, Homo sapien
agccgggtctctggagtcgcggccc

SEQ ID NO: 5707441 - DNA, 25 bp, Homo sapien
gctggtggactgtgagggctacccc

SEQ ID NO: 5707442 - DNA, 25 bp, Homo sapien
aaatggttaagtactgtgcttcctc

SEQ ID NO: 5707443 - DNA, 25 bp, Homo sapien
ctcagcagctgggctgtcagggcca

SEQ ID NO: 5707444 - DNA, 25 bp, Homo sapien
acaaggagaagcaggcccgggacat

SEQ ID NO: 5707445 - DNA, 25 bp, Homo sapien
ttccaaagccttcctattgggcgaa

SEQ ID NO: 5707446 - DNA, 25 bp, Homo sapien
caaggccaactatgacgtgctggaa

SEQ ID NO: 5707447 - DNA, 25 bp, Homo sapien
cactgcgcccagcccactgctagtt

SEQ ID NO: 5707448 - DNA, 25 bp, Homo sapien
tctggtagccacagacatgctgtgt

SEQ ID NO: 5707449 - DNA, 25 bp, Homo sapien
ccacaggttctcacactcaattcca

SEQ ID NO: 5707450 - DNA, 25 bp, Homo sapien
atagctaatttattttttgtagaga

SEQ ID NO: 5707451 - DNA, 25 bp, Homo sapien
ccgcccaagtatctgggaccacagg

SEQ ID NO: 5707452 - DNA, 25 bp, Homo sapien
ctacccccggtcagacgtggacctg

SEQ ID NO: 5707453 - DNA, 25 bp, Homo sapien
gctagtttgactttttataattgaa

SEQ ID NO: 5707454 - DNA, 25 bp, Homo sapien
acttgttccaacacgctgggcagga

SEQ ID NO: 5707455 - DNA, 25 bp, Homo sapien
ccgctggtggactgtgagggctacc

SEQ ID NO: 5707456 - DNA, 25 bp, Homo sapien
gttgaccaggttggtctcgaactcc

SEQ ID NO: 5707457 - DNA, 25 bp, Homo sapien
acagtgctgatatgaccctgttgtc

SEQ ID NO: 5707458 - DNA, 25 bp, Homo sapien
tacagataccagcttgccttgatgg

SEQ ID NO: 5707459 - DNA, 25 bp, Homo sapien
gactgtcagcgacgtccaggagctg

SEQ ID NO: 5707460 - DNA, 25 bp, Homo sapien
ccagcccactgctagtttgactttt

SEQ ID NO: 5707461 - DNA, 25 bp, Homo sapien
gccgtagttacggtcgactggggcg

SEQ ID NO: 5707462 - DNA, 25 bp, Homo sapien
ctgatgcggcgcaaggaggagatag

SEQ ID NO: 5707463 - DNA, 25 bp, Homo sapien
ttctgtgtggtggcagtactgtggc

SEQ ID NO: 5707464 - DNA, 25 bp, Homo sapien
tatgcctgcagaatgatcacaaggc

SEQ ID NO: 5707465 - DNA, 25 bp, Homo sapien
ggatgatgagattgtggagttcggc

SEQ ID NO: 5707466 - DNA, 25 bp, Homo sapien
tcagggccatagtagctccctttgg

SEQ ID NO: 5707467 - DNA, 25 bp, Homo sapien
tagttacggtcgactggggcgtcgt

SEQ ID NO: 5707468 - DNA, 25 bp, Homo sapien
acaggcgtgcaccaccatgcatagc

SEQ ID NO: 5707469 - DNA, 25 bp, Homo sapien
acattattcctctgcaaagatgatt

SEQ ID NO: 5707470 - DNA, 25 bp, Homo sapien
agaacttccagtcactgcataacat

SEQ ID NO: 5707471 - DNA, 25 bp, Homo sapien
gctgaggcccacaaagaggccatga

SEQ ID NO: 5707472 - DNA, 25 bp, Homo sapien
tgagccgcaaactgggtcagagtga

SEQ ID NO: 5707473 - DNA, 25 bp, Homo sapien
tgaacgagccgctggtggactgtga

SEQ ID NO: 5707474 - DNA, 25 bp, Homo sapien
caaagtgaacagcatcagccccggc

SEQ ID NO: 5707475 - DNA, 25 bp, Homo sapien
acagacatgctgtgtttaccaatgt

SEQ ID NO: 5707476 - DNA, 25 bp, Homo sapien
agtcgcggcccggggttcacgatgt

SEQ ID NO: 5707477 - DNA, 25 bp, Homo sapien
tccgacgaggaagcgaggcagagcg

SEQ ID NO: 5707478 - DNA, 25 bp, Homo sapien
agtgttcatttccccagttcttgca

SEQ ID NO: 5707479 - DNA, 25 bp, Homo sapien
gttacggtcgactggggcgtcgtcc

SEQ ID NO: 5707480 - DNA, 25 bp, Homo sapien
gaagccttgacgctgtgggcactgc

SEQ ID NO: 5707481 - DNA, 25 bp, Homo sapien
gctgaggtatggataggaacgagta

SEQ ID NO: 5707482 - DNA, 25 bp, Homo sapien
cgcaggccggcgtcgtgactgtcag

SEQ ID NO: 5707483 - DNA, 25 bp, Homo sapien
taaaaacttaggcttggcctctttc

SEQ ID NO: 5707484 - DNA, 25 bp, Homo sapien
gaccaacatatttctttgcactgag

SEQ ID NO: 5707485 - DNA, 25 bp, Homo sapien
cctgcagaatgatcacaaggcagtg

SEQ ID NO: 5707486 - DNA, 25 bp, Homo sapien
ttagacttgttccaacacgctgggc

SEQ ID NO: 5707487 - DNA, 25 bp, Homo sapien
ctagcccgggagccgggtctctgga

SEQ ID NO: 5707488 - DNA, 25 bp, Homo sapien
ggaaaaggactgctgggctgcaaca

SEQ ID NO: 5707489 - DNA, 25 bp, Homo sapien
gctgggcaggaaaaggactgctggg

SEQ ID NO: 5707490 - DNA, 25 bp, Homo sapien
ctcgcaggccggcgtcgtgactgtc

SEQ ID NO: 5707491 - DNA, 25 bp, Homo sapien
aagccaaaaaggcattgggatgaac

SEQ ID NO: 5707492 - DNA, 25 bp, Homo sapien
ccagtgtaatctccctggattaagg

SEQ ID NO: 5707493 - DNA, 25 bp, Homo sapien
tgaggggaagcccctgaatgtgaca

SEQ ID NO: 5707494 - DNA, 25 bp, Homo sapien
gaacgagtagatcagacctcttgaa

SEQ ID NO: 5707495 - DNA, 25 bp, Homo sapien
caggccggcgtcgtgactgtcagcg

SEQ ID NO: 5707496 - DNA, 25 bp, Homo sapien
agaggccatgagccgcaaactgggt

SEQ ID NO: 5707497 - DNA, 25 bp, Homo sapien
gggaagcccctgaatgtgacagtga

SEQ ID NO: 5707498 - DNA, 25 bp, Homo sapien
attgcatgttctaattccacgtatt

SEQ ID NO: 5707499 - DNA, 25 bp, Homo sapien
aggtggaggaggccctgcaccagct

SEQ ID NO: 5707500 - DNA, 25 bp, Homo sapien
ggctacccccggtcagacgtggacc

SEQ ID NO: 5707501 - DNA, 25 bp, Homo sapien
agtaacaggaaagcatcttcccttg

SEQ ID NO: 5707502 - DNA, 25 bp, Homo sapien
tcgtccctagcccgggagccgggtc

SEQ ID NO: 5707503 - DNA, 25 bp, Homo sapien
ccctgtgttgaccaggttggtctcg

SEQ ID NO: 5707504 - DNA, 25 bp, Homo sapien
gtgaacagcatcagccccggctccc

SEQ ID NO: 5707505 - DNA, 25 bp, Homo sapien
tttgctgtttaaattgcatgttcta

SEQ ID NO: 5707506 - DNA, 25 bp, Homo sapien
tgggtcagagtgagagccagggccc

SEQ ID NO: 5707507 - DNA, 25 bp, Homo sapien
ttgaacctcctggctatgccctgag

SEQ ID NO: 5707508 - DNA, 25 bp, Homo sapien
acctcctggctatgccctgagatca

SEQ ID NO: 5707509 - DNA, 25 bp, Homo sapien
ttcctctttaggaacccaccagagg

SEQ ID NO: 5707510 - DNA, 25 bp, Homo sapien
ataattgaacctcctggctatgccc

SEQ ID NO: 5707511 - DNA, 25 bp, Homo sapien
tcacactcaattccaaagccttcct

SEQ ID NO: 5707512 - DNA, 25 bp, Homo sapien
ctctttcacaaattaggccacggcc

SEQ ID NO: 5707513 - DNA, 25 bp, Homo sapien
ggcctcctaaagtgctgggatcaca

SEQ ID NO: 5707514 - DNA, 25 bp, Homo sapien
tcctcctgccttggcctcctaaagt

SEQ ID NO: 5707515 - DNA, 25 bp, Homo sapien
ttttacagtgctgatatgaccctgt

SEQ ID NO: 5707516 - DNA, 25 bp, Homo sapien
agactataataaacacagcttgccc

SEQ ID NO: 5707517 - DNA, 25 bp, Homo sapien
attccctcaaactctatttgacctg

SEQ ID NO: 5707518 - DNA, 25 bp, Homo sapien
gcaccagctgcacgctcgcgacaag

SEQ ID NO: 5707519 - DNA, 25 bp, Homo sapien
ggcgtcgtccctagcccgggagccg

SEQ ID NO: 5707520 - DNA, 25 bp, Homo sapien
gggaccacaggcgtgcaccaccatg

SEQ ID NO: 5707521 - DNA, 25 bp, Homo sapien
cctgaagcataaggatctggaagag

SEQ ID NO: 5707522 - DNA, 25 bp, Homo sapien
acctgacagccatacgtattcccct

SEQ ID NO: 5707523 - DNA, 25 bp, Homo sapien
ccacaaagaggccatgagccgcaaa

SEQ ID NO: 5707524 - DNA, 25 bp, Homo sapien
atcatatgcctgcagaatgatcaca

SEQ ID NO: 5707525 - DNA, 25 bp, Homo sapien
ctcttttataaagtctcagactata

SEQ ID NO: 5707526 - DNA, 25 bp, Homo sapien
gcgtgagccactgcgcccagcccac

SEQ ID NO: 5707527 - DNA, 25 bp, Homo sapien
gttctcacactcaattccaaagcct

SEQ ID NO: 5707528 - DNA, 25 bp, Homo sapien
cgtcgtgactgtcagcgacgtccag

SEQ ID NO: 5707529 - DNA, 25 bp, Homo sapien
gatcaaggttcactgaagccttgac

SEQ ID NO: 5707530 - DNA, 25 bp, Homo sapien
ccaaaccaaagctcagatggggtca

SEQ ID NO: 5707531 - DNA, 25 bp, Homo sapien
ctccacgggccttcgccaaagtgaa

SEQ ID NO: 5707532 - DNA, 25 bp, Homo sapien
gatgagattgtggagttcggctctg

SEQ ID NO: 5707533 - DNA, 25 bp, Homo sapien
gagttcggctctgtgaacacccaga

SEQ ID NO: 5707534 - DNA, 25 bp, Homo sapien
cctctttaggaacccaccagagggc

SEQ ID NO: 5707535 - DNA, 25 bp, Homo sapien
atactttgaattattttttcctctc

SEQ ID NO: 5707536 - DNA, 25 bp, Homo sapien
tatgaccctcccaaaccaaagctca

SEQ ID NO: 5707537 - DNA, 25 bp, Homo sapien
agacatgctgtgtttaccaatgttt

SEQ ID NO: 5707538 - DNA, 25 bp, Homo sapien
accctcccaaaccaaagctcagatg

SEQ ID NO: 5707539 - DNA, 25 bp, Homo sapien
cactgaggccttgctgctgtggata

SEQ ID NO: 5707540 - DNA, 25 bp, Homo sapien
acgagtagatcagacctcttgaaaa

SEQ ID NO: 5707541 - DNA, 25 bp, Homo sapien
acaccagcttagacttgttccaaca

SEQ ID NO: 5707542 - DNA, 25 bp, Homo sapien
agggaaagcctggaggcttcccagg

SEQ ID NO: 5707543 - DNA, 25 bp, Homo sapien
tttctttgcactgaggccttgctgc

SEQ ID NO: 5707544 - DNA, 25 bp, Homo sapien
gccctaaataggaattccctggatt

SEQ ID NO: 5707545 - DNA, 25 bp, Homo sapien
aggccaactatgacgtgctggaaag

SEQ ID NO: 5707546 - DNA, 25 bp, Homo sapien
agggcagcaagctcctttcacttcg

SEQ ID NO: 5707547 - DNA, 25 bp, Homo sapien
aaggactgctgggctgcaacattat

SEQ ID NO: 5707548 - DNA, 25 bp, Homo sapien
agatcagacctcttgaaaatgctta

SEQ ID NO: 5707549 - DNA, 25 bp, Homo sapien
gaggcttcccaggtggcccagcgtg

SEQ ID NO: 5707550 - DNA, 25 bp, Homo sapien
atggtatcagtgttcatttccccag

SEQ ID NO: 5707551 - DNA, 25 bp, Homo sapien
aaactctatttgacctgacagccat

SEQ ID NO: 5707552 - DNA, 25 bp, Homo sapien
agcatcgcgggtctgcaagtggatg

SEQ ID NO: 5707553 - DNA, 25 bp, Homo sapien
ttggcagtgtggtgcagcacagtga

SEQ ID NO: 5707554 - DNA, 25 bp, Homo sapien
caggggggaaaaacaccagcttaga

SEQ ID NO: 5707555 - DNA, 25 bp, Homo sapien
ggcaagtgggcggaagttattctgg

SEQ ID NO: 5707556 - DNA, 25 bp, Homo sapien
ggtaaaatggttctcagggattcct

SEQ ID NO: 5707557 - DNA, 25 bp, Homo sapien
gggaacagtaacaggaaagcatctt

SEQ ID NO: 5707558 - DNA, 25 bp, Homo sapien
gttccaacacgctgggcaggaaaag

SEQ ID NO: 5707559 - DNA, 25 bp, Homo sapien
tgccttgatgggattggtattgctg

SEQ ID NO: 5707560 - DNA, 25 bp, Homo sapien
tgctgtgtgcttccagccacaggtt

SEQ ID NO: 5707561 - DNA, 25 bp, Homo sapien
gagccactgcgcccagcccactgct

SEQ ID NO: 5707562 - DNA, 25 bp, Homo sapien
tgacctgacagccatacgtattccc

SEQ ID NO: 5707563 - DNA, 25 bp, Homo sapien
atggataggaacgagtagatcagac

SEQ ID NO: 5707564 - DNA, 25 bp, Homo sapien
caccagagggcagcaagctcctttc

SEQ ID NO: 5707565 - DNA, 25 bp, Homo sapien
caacttgtcttctctccctgaagca

SEQ ID NO: 5707566 - DNA, 25 bp, Homo sapien
aaagccttcctattgggcgaattcc

SEQ ID NO: 5707567 - DNA, 25 bp, Homo sapien
gccactgcgcccagcccactgctag

SEQ ID NO: 5707568 - DNA, 25 bp, Homo sapien
gcccagcccactgctagtttgactt

SEQ ID NO: 5707569 - DNA, 25 bp, Homo sapien
cttgtaacctgaacttctgtgtggt

SEQ ID NO: 5707570 - DNA, 25 bp, Homo sapien
gctgtggttggatacagataccagc

SEQ ID NO: 5707571 - DNA, 25 bp, Homo sapien
gcaaaacaggctagcaattgcaaag

SEQ ID NO: 5707572 - DNA, 25 bp, Homo sapien
gtatctgggaccacaggcgtgcacc

SEQ ID NO: 5707573 - DNA, 25 bp, Homo sapien
ggcccggggttcacgatgtccgacg

SEQ ID NO: 5707574 - DNA, 25 bp, Homo sapien
gtggcccaccagtgtaatctccctg

SEQ ID NO: 5707575 - DNA, 25 bp, Homo sapien
caacattattcctctgcaaagatga

SEQ ID NO: 5707576 - DNA, 25 bp, Homo sapien
acctgaacttctgtgtggtggcagt

SEQ ID NO: 5707577 - DNA, 25 bp, Homo sapien
aatgtgacagtgatccgcagggggg

SEQ ID NO: 5707578 - DNA, 25 bp, Homo sapien
gcaaactgggtcagagtgagagcca

SEQ ID NO: 5707579 - DNA, 25 bp, Homo sapien
acttgtcttctctccctgaagcata

SEQ ID NO: 5707580 - DNA, 25 bp, Homo sapien
tgccttggcctcctaaagtgctggg

SEQ ID NO: 5707581 - DNA, 25 bp, Homo sapien
acaaggcagtgatgaagcaggtgga

SEQ ID NO: 5707582 - DNA, 25 bp, Homo sapien
gtctctggagtcgcggcccggggtt

SEQ ID NO: 5707583 - DNA, 25 bp, Homo sapien
ggcacaacatcatatgcctgcagaa

SEQ ID NO: 5707584 - DNA, 25 bp, Homo sapien
aaccgctgaggtatggataggaacg

SEQ ID NO: 5707585 - DNA, 25 bp, Homo sapien
gaagagcttcatagaaagttgggca

SEQ ID NO: 5707586 - DNA, 25 bp, Homo sapien
gccacggccctaaataggaattccc

SEQ ID NO: 5707587 - DNA, 25 bp, Homo sapien
ggcggagccgtagttacggtcgact

SEQ ID NO: 5707588 - DNA, 25 bp, Homo sapien
aagcatcttcccttgccctggactt

SEQ ID NO: 5707589 - DNA, 25 bp, Homo sapien
agccttgacgctgtgggcactgcct

SEQ ID NO: 5707590 - DNA, 25 bp, Homo sapien
aggggaagcccctgaatgtgacagt

SEQ ID NO: 5707591 - DNA, 25 bp, Homo sapien
cttgccttgatgggattggtattgc

SEQ ID NO: 5707592 - DNA, 25 bp, Homo sapien
ggattgtgggcaagtgggcggaagt

SEQ ID NO: 5707593 - DNA, 25 bp, Homo sapien
ctgttttggcagttctgccaggcaa

SEQ ID NO: 5707594 - DNA, 25 bp, Homo sapien
tgaagcaggtggaggaggccctgca

SEQ ID NO: 5707595 - DNA, 25 bp, Homo sapien
gatatgaccctgttgtcaccccagc

SEQ ID NO: 5707596 - DNA, 25 bp, Homo sapien
actgggtcagagtgagagccagggc

SEQ ID NO: 5707597 - DNA, 25 bp, Homo sapien
cgacaaggagaagcaggcccgggac

SEQ ID NO: 5707598 - DNA, 25 bp, Homo sapien
ctgcaccagctgcacgctcgcgaca

SEQ ID NO: 5707599 - DNA, 25 bp, Homo sapien
cctaaataggaattccctggattgt

SEQ ID NO: 5707600 - DNA, 25 bp, Homo sapien
catgttctaattccacgtattttcc

SEQ ID NO: 5707601 - DNA, 25 bp, Homo sapien
aagcaggtggaggaggccctgcacc

SEQ ID NO: 5707602 - DNA, 25 bp, Homo sapien
ctgaggccttgctgctgtggatacg

SEQ ID NO: 5707603 - DNA, 25 bp, Homo sapien
cggaagttattctggcaggtactgg

SEQ ID NO: 5707604 - DNA, 25 bp, Homo sapien
aagcgcagatcaaggccaactatga

SEQ ID NO: 5707605 - DNA, 25 bp, Homo sapien
ctccctggattaaggcattcttaaa

SEQ ID NO: 5707606 - DNA, 25 bp, Homo sapien
cgactggggcgtcgtccctagcccg

SEQ ID NO: 5707607 - DNA, 25 bp, Homo sapien
agtgggcggaagttattctggcagg

SEQ ID NO: 5707608 - DNA, 25 bp, Homo sapien
gcccgggacatggctgaggcccaca

SEQ ID NO: 5707609 - DNA, 25 bp, Homo sapien
tcctcgcaggccggcgtcgtgactg

SEQ ID NO: 5707610 - DNA, 25 bp, Homo sapien
ccctccacgggccttcgccaaagtg

SEQ ID NO: 5707611 - DNA, 25 bp, Homo sapien
ggccctgcaccagctgcacgctcgc

SEQ ID NO: 5707612 - DNA, 25 bp, Homo sapien
ctaatttattttttgtagagacagg

SEQ ID NO: 5707613 - DNA, 25 bp, Homo sapien
tgtttgctgtttaaattgcatgttc

SEQ ID NO: 5707614 - DNA, 25 bp, Homo sapien
gacttgggtctagggatttccaact

SEQ ID NO: 5707615 - DNA, 25 bp, Homo sapien
cgggagccgggtctctggagtcgcg

SEQ ID NO: 5707616 - DNA, 25 bp, Homo sapien
gcaggtactggtgtgattattatta

SEQ ID NO: 5707617 - DNA, 25 bp, Homo sapien
ccttgatgggattggtattgctgtg

SEQ ID NO: 5707618 - DNA, 25 bp, Homo sapien
aacattggcagtgtggtgcagcaca

SEQ ID NO: 5707619 - DNA, 25 bp, Homo sapien
cagcaagctcctttcacttcgctag

SEQ ID NO: 5707620 - DNA, 25 bp, Homo sapien
ccaggctggagtgcagtgtcgtgat

SEQ ID NO: 5707621 - DNA, 25 bp, Homo sapien
catttccccagttcttgcacaccgc

SEQ ID NO: 5707622 - DNA, 25 bp, Homo sapien
cacgctcgcgacaaggagaagcagg

SEQ ID NO: 5707623 - DNA, 25 bp, Homo sapien
taacaggaaagcatcttcccttgcc

SEQ ID NO: 5707624 - DNA, 25 bp, Homo sapien
tttggcagttctgccaggcaagccc

SEQ ID NO: 5707625 - DNA, 25 bp, Homo sapien
tcacccaggctggagtgcagtgtcg

SEQ ID NO: 5707626 - DNA, 25 bp, Homo sapien
actgtgagggctacccccggtcaga

SEQ ID NO: 5707627 - DNA, 25 bp, Homo sapien
ccaacatatttctttgcactgaggc

SEQ ID NO: 5707628 - DNA, 25 bp, Homo sapien
tttggagaacagggaaagcctggag

SEQ ID NO: 5707629 - DNA, 25 bp, Homo sapien
tacgtattcccctctggtagccaca

SEQ ID NO: 5707630 - DNA, 25 bp, Homo sapien
gcatcttcccttgccctggacttgg

SEQ ID NO: 5707631 - DNA, 25 bp, Homo sapien
ccaaagccttcctattgggcgaatt

SEQ ID NO: 5707632 - DNA, 25 bp, Homo sapien
cccaccagtgtaatctccctggatt

SEQ ID NO: 5707633 - DNA, 25 bp, Homo sapien
ctcctgccttggcctcctaaagtgc

SEQ ID NO: 5707634 - DNA, 25 bp, Homo sapien
gcggcccggggttcacgatgtccga

SEQ ID NO: 5707635 - DNA, 25 bp, Homo sapien
gtgcaccaccatgcatagctaattt

SEQ ID NO: 5707636 - DNA, 25 bp, Homo sapien
gtgagccactgcgcccagcccactg

SEQ ID NO: 5707637 - DNA, 25 bp, Homo sapien
gagatcagcgctattttgtaaaccg

SEQ ID NO: 5707638 - DNA, 25 bp, Homo sapien
atagaaagttgggcaaaacaggcta

SEQ ID NO: 5707639 - DNA, 25 bp, Homo sapien
gacctcttgaaaatgcttattcttc

SEQ ID NO: 5707640 - DNA, 25 bp, Homo sapien
ggataggaacgagtagatcagacct

SEQ ID NO: 5707641 - DNA, 25 bp, Homo sapien
tgggcggagccgtagttacggtcga

SEQ ID NO: 5707642 - DNA, 25 bp, Homo sapien
ggcgtcgtgactgtcagcgacgtcc

SEQ ID NO: 5707643 - DNA, 25 bp, Homo sapien
acccaggctggagtgcagtgtcgtg

SEQ ID NO: 5707644 - DNA, 25 bp, Homo sapien
attttttgtagagacagggtctccc

SEQ ID NO: 5707645 - DNA, 25 bp, Homo sapien
aacaggctagcaattgcaaagtcag

SEQ ID NO: 5707646 - DNA, 25 bp, Homo sapien
gatcagcgctattttgtaaaccgct

SEQ ID NO: 5707647 - DNA, 25 bp, Homo sapien
tcagccccggctccccagccagcat

SEQ ID NO: 5707648 - DNA, 25 bp, Homo sapien
ccttgccctggacttgggtctaggg

SEQ ID NO: 5707649 - DNA, 25 bp, Homo sapien
ggcaagccctgtgttccttgggact

SEQ ID NO: 5707650 - DNA, 25 bp, Homo sapien
acgtattttccagtctcttttataa

SEQ ID NO: 5707651 - DNA, 25 bp, Homo sapien
atggtaaaatggttctcagggattc

SEQ ID NO: 5707652 - DNA, 25 bp, Homo sapien
tcacaaggcagtgatgaagcaggtg

SEQ ID NO: 5707653 - DNA, 25 bp, Homo sapien
acacgctgggcaggaaaaggactgc

SEQ ID NO: 5707654 - DNA, 25 bp, Homo sapien
tcggctctgtgaacacccagaactt

SEQ ID NO: 5707655 - DNA, 25 bp, Homo sapien
ttctaattccacgtattttccagtc

SEQ ID NO: 5707656 - DNA, 25 bp, Homo sapien
gctgtgtttaccaatgtttgctgtt

SEQ ID NO: 5707657 - DNA, 25 bp, Homo sapien
tttccagtctcttttataaagtctc

SEQ ID NO: 5707658 - DNA, 25 bp, Homo sapien
tgcatgttctaattccacgtatttt

SEQ ID NO: 5707659 - DNA, 25 bp, Homo sapien
tgtaatctccctggattaaggcatt

SEQ ID NO: 5707660 - DNA, 25 bp, Homo sapien
acaggcgtgagccactgcgcccagc

SEQ ID NO: 5707661 - DNA, 25 bp, Homo sapien
tgtgacagtgatccgcaggggggaa

SEQ ID NO: 5707662 - DNA, 25 bp, Homo sapien
tcgccaaagtgaacagcatcagccc

SEQ ID NO: 5707663 - DNA, 25 bp, Homo sapien
aacttccagtcactgcataacattg

SEQ ID NO: 5707664 - DNA, 25 bp, Homo sapien
cagccatacgtattcccctctggta

SEQ ID NO: 5707665 - DNA, 25 bp, Homo sapien
cctcaaactctatttgacctgacag

SEQ ID NO: 5707666 - DNA, 25 bp, Homo sapien
aaaaggcattgggatgaacgagccg

SEQ ID NO: 5707667 - DNA, 25 bp, Homo sapien
actcctgggctcaagcagtcctcct

SEQ ID NO: 5707668 - DNA, 25 bp, Homo sapien
gacagccatacgtattcccctctgg

SEQ ID NO: 5707669 - DNA, 25 bp, Homo sapien
cagggattcctgccaatactttgaa

SEQ ID NO: 5707670 - DNA, 25 bp, Homo sapien
caggctttgaccaacatatttcttt

SEQ ID NO: 5707671 - DNA, 25 bp, Homo sapien
gcgacgtccaggagctgatgcggcg

SEQ ID NO: 5707672 - DNA, 25 bp, Homo sapien
aaatgcttattcttcctccctttta

SEQ ID NO: 5707673 - DNA, 25 bp, Homo sapien
tgagattgtggagttcggctctgtg

SEQ ID NO: 5707674 - DNA, 25 bp, Homo sapien
gcaagtggatgatgagattgtggag

SEQ ID NO: 5707675 - DNA, 25 bp, Homo sapien
gatacagataccagcttgccttgat

SEQ ID NO: 5707676 - DNA, 25 bp, Homo sapien
agatggggtcagaagagcttcatag

SEQ ID NO: 5707677 - DNA, 25 bp, Homo sapien
gaaagccaaaaaggcattgggatga

SEQ ID NO: 5707678 - DNA, 25 bp, Homo sapien
gagtgcagtgtcgtgatcaaggttc

SEQ ID NO: 5707679 - DNA, 25 bp, Homo sapien
ggaggaggccctgcaccagctgcac

SEQ ID NO: 5707680 - DNA, 25 bp, Homo sapien
tcctctccatggtatcagtgttcat

SEQ ID NO: 5707681 - DNA, 25 bp, Homo sapien
cttcgccaaagtgaacagcatcagc

SEQ ID NO: 5707682 - DNA, 25 bp, Homo sapien
ggttctcagggattcctgccaatac

SEQ ID NO: 5707683 - DNA, 25 bp, Homo sapien
ggcattgggatgaacgagccgctgg

SEQ ID NO: 5707684 - DNA, 25 bp, Homo sapien
ttgaaaatgcttattcttcctccct

SEQ ID NO: 5707685 - DNA, 25 bp, Homo sapien
tgggtctagggatttccaacttgtc

SEQ ID NO: 5707686 - DNA, 25 bp, Homo sapien
ctttgaccaacatatttctttgcac

SEQ ID NO: 5707687 - DNA, 25 bp, Homo sapien
gctgcaacattattcctctgcaaag

SEQ ID NO: 5707688 - DNA, 25 bp, Homo sapien
agccacagacatgctgtgtttacca

SEQ ID NO: 5707689 - DNA, 25 bp, Homo sapien
tggcagttctgccaggcaagccctg

SEQ ID NO: 5707690 - DNA, 25 bp, Homo sapien
gtgatgaagcaggtggaggaggccc

SEQ ID NO: 5707691 - DNA, 25 bp, Homo sapien
actggtgtgattattattattattt

SEQ ID NO: 5707692 - DNA, 25 bp, Homo sapien
aaagttgggcaaaacaggctagcaa

SEQ ID NO: 5707693 - DNA, 25 bp, Homo sapien
accgctttctgttttggcagttctg

SEQ ID NO: 5707694 - DNA, 25 bp, Homo sapien
attttgtaaaccgctgaggtatgga

SEQ ID NO: 5707695 - DNA, 25 bp, Homo sapien
agagggcagcaagctcctttcactt

SEQ ID NO: 5707696 - DNA, 25 bp, Homo sapien
gctgcacgctcgcgacaaggagaag

SEQ ID NO: 5707697 - DNA, 25 bp, Homo sapien
ttattctggcaggtactggtgtgat

SEQ ID NO: 5707698 - DNA, 25 bp, Homo sapien
ggaaaaacaccagcttagacttgtt

SEQ ID NO: 5707699 - DNA, 25 bp, Homo sapien
agccctgtgttccttgggactggtt

SEQ ID NO: 5707700 - DNA, 25 bp, Homo sapien
tgagagccagggccctccacgggcc

SEQ ID NO: 5707701 - DNA, 25 bp, Homo sapien
ttctggagacaaggtcttgctttgt

SEQ ID NO: 5707702 - DNA, 25 bp, Homo sapien
ccccagctgaatttcttatgaccct

SEQ ID NO: 5707703 - DNA, 25 bp, Homo sapien
ggaggctcctcgcaggccggcgtcg

SEQ ID NO: 5707704 - DNA, 25 bp, Homo sapien
ttgactttttataattgaacctcct

SEQ ID NO: 5707705 - DNA, 25 bp, Homo sapien
ccaggtggcccagcgtggtgtcctg

SEQ ID NO: 5707706 - DNA, 25 bp, Homo sapien
ccttggcctcctaaagtgctgggat

SEQ ID NO: 5707707 - DNA, 25 bp, Homo sapien
cttggcctctttcacaaattaggcc

SEQ ID NO: 5707708 - DNA, 25 bp, Homo sapien
gtctccctgtgttgaccaggttggt

SEQ ID NO: 5707709 - DNA, 25 bp, Homo sapien
actctatttgacctgacagccatac

SEQ ID NO: 5707710 - DNA, 25 bp, Homo sapien
cagtcactgcataacattggcagtg

SEQ ID NO: 5707711 - DNA, 25 bp, Homo sapien
gctcctcgcaggccggcgtcgtgac

SEQ ID NO: 5707712 - DNA, 25 bp, Homo sapien
cagcgacgtccaggagctgatgcgg

SEQ ID NO: 5707713 - DNA, 25 bp, Homo sapien
agacttgttccaacacgctgggcag

SEQ ID NO: 5707714 - DNA, 25 bp, Homo sapien
aaagtgctgggatcacaggcgtgag

SEQ ID NO: 5707715 - DNA, 25 bp, Homo sapien
ctggagacaaggtcttgctttgtca

SEQ ID NO: 5707716 - DNA, 25 bp, Homo sapien
attgcaaagtcaggctttgaccaac

SEQ ID NO: 5707717 - DNA, 25 bp, Homo sapien
ctccatggtatcagtgttcatttcc

SEQ ID NO: 5707718 - DNA, 25 bp, Homo sapien
cgctattttgtaaaccgctgaggta

SEQ ID NO: 5707719 - DNA, 25 bp, Homo sapien
gcccaagtatctgggaccacaggcg

SEQ ID NO: 5707720 - DNA, 25 bp, Homo sapien
cccagcgtggtgtcctgtcagcttc

SEQ ID NO: 5707721 - DNA, 25 bp, Homo sapien
tttgacctgacagccatacgtattc

SEQ ID NO: 5707722 - DNA, 25 bp, Homo sapien
cttgggtctagggatttccaacttg

SEQ ID NO: 5707723 - DNA, 25 bp, Homo sapien
gtgatcaaggttcactgaagccttg

SEQ ID NO: 5707724 - DNA, 25 bp, Homo sapien
gaggaagcgaggcagagcggaggct

SEQ ID NO: 5707725 - DNA, 25 bp, Homo sapien
ctggggcgtcgtccctagcccggga

SEQ ID NO: 5707726 - DNA, 25 bp, Homo sapien
tgggcaggaaaaggactgctgggct

SEQ ID NO: 5707727 - DNA, 25 bp, Homo sapien
ccatggtatcagtgttcatttcccc

SEQ ID NO: 5707728 - DNA, 25 bp, Homo sapien
ggcagagcggaggctcctcgcaggc

SEQ ID NO: 5707729 - DNA, 25 bp, Homo sapien
ttgggatgaacgagccgctggtgga

SEQ ID NO: 5707730 - DNA, 25 bp, Homo sapien
agcatcagccccggctccccagcca

SEQ ID NO: 5707731 - DNA, 25 bp, Homo sapien
gaactcctgggctcaagcagtcctc

SEQ ID NO: 5707732 - DNA, 25 bp, Homo sapien
ctattttgtaaaccgctgaggtatg

SEQ ID NO: 5707733 - DNA, 25 bp, Homo sapien
tccctttggagaacagggaaagcct

SEQ ID NO: 5707734 - DNA, 25 bp, Homo sapien
gttcggctctgtgaacacccagaac

SEQ ID NO: 5707735 - DNA, 25 bp, Homo sapien
tttgttttctggagacaaggtcttg

SEQ ID NO: 5707736 - DNA, 25 bp, Homo sapien
gcagtgtcgtgatcaaggttcactg

SEQ ID NO: 5707737 - DNA, 25 bp, Homo sapien
agatagaagcgcagatcaaggccaa

SEQ ID NO: 5707738 - DNA, 25 bp, Homo sapien
gagcggaggctcctcgcaggccggc

SEQ ID NO: 5707739 - DNA, 25 bp, Homo sapien
ccccggctccccagccagcatcgcg

SEQ ID NO: 5707740 - DNA, 25 bp, Homo sapien
caatactttgaattattttttcctc

SEQ ID NO: 5707741 - DNA, 25 bp, Homo sapien
ggagtcgcggcccggggttcacgat

SEQ ID NO: 5707742 - DNA, 25 bp, Homo sapien
ctttttataattgaacctcctggct

SEQ ID NO: 5707743 - DNA, 25 bp, Homo sapien
tctccctgaagcataaggatctgga

SEQ ID NO: 5707744 - DNA, 25 bp, Homo sapien
ccatagtagctccctttggagaaca

SEQ ID NO: 5707745 - DNA, 25 bp, Homo sapien
gtcgactggggcgtcgtccctagcc

SEQ ID NO: 5707746 - DNA, 25 bp, Homo sapien
aaattgcatgttctaattccacgta

SEQ ID NO: 5707747 - DNA, 25 bp, Homo sapien
tattcctctgcaaagatgattgtcc

SEQ ID NO: 5707748 - DNA, 25 bp, Homo sapien
acagcatcagccccggctccccagc

SEQ ID NO: 5707749 - DNA, 25 bp, Homo sapien
gagacagggtctccctgtgttgacc

SEQ ID NO: 5707750 - DNA, 25 bp, Homo sapien
cagcgtggtgtcctgtcagcttcct

SEQ ID NO: 5707751 - DNA, 25 bp, Homo sapien
cgtccaggagctgatgcggcgcaag

SEQ ID NO: 5707752 - DNA, 25 bp, Homo sapien
aggcccgggacatggctgaggccca

SEQ ID NO: 5707753 - DNA, 25 bp, Homo sapien
caccagtgtaatctccctggattaa

SEQ ID NO: 5707754 - DNA, 25 bp, Homo sapien
gtctgcaagtggatgatgagattgt

SEQ ID NO: 5707755 - DNA, 25 bp, Homo sapien
aagtggatgatgagattgtggagtt

SEQ ID NO: 5707756 - DNA, 25 bp, Homo sapien
atggttctcagggattcctgccaat

SEQ ID NO: 5707757 - DNA, 25 bp, Homo sapien
tcagactataataaacacagcttgc

SEQ ID NO: 5707758 - DNA, 25 bp, Homo sapien
agccccggctccccagccagcatcg

SEQ ID NO: 5707759 - DNA, 25 bp, Homo sapien
attgtggagttcggctctgtgaaca

SEQ ID NO: 5707760 - DNA, 25 bp, Homo sapien
ttcttatgaccctcccaaaccaaag

SEQ ID NO: 5707761 - DNA, 25 bp, Homo sapien
ccagaacttccagtcactgcataac

SEQ ID NO: 5707762 - DNA, 25 bp, Homo sapien
ttcacttcgctagtaagaacccctc

SEQ ID NO: 5707763 - DNA, 25 bp, Homo sapien
tgtccgacgaggaagcgaggcagag

SEQ ID NO: 5707764 - DNA, 25 bp, Homo sapien
gaacctcctggctatgccctgagat

SEQ ID NO: 5707765 - DNA, 25 bp, Homo sapien
tttgtcacccaggctggagtgcagt

SEQ ID NO: 5707766 - DNA, 25 bp, Homo sapien
aaacaccagcttagacttgttccaa

SEQ ID NO: 5707767 - DNA, 25 bp, Homo sapien
cctcccaaaccaaagctcagatggg

SEQ ID NO: 5707768 - DNA, 25 bp, Homo sapien
gctggaaagccaaaaaggcattggg

SEQ ID NO: 5707769 - DNA, 25 bp, Homo sapien
aaactgggtcagagtgagagccagg

SEQ ID NO: 5707770 - DNA, 25 bp, Homo sapien
aagcagtcctcctgccttggcctcc

SEQ ID NO: 5707771 - DNA, 25 bp, Homo sapien
ttaaggcattcttaaaaacttaggc

SEQ ID NO: 5707772 - DNA, 25 bp, Homo sapien
tttttcctctccatggtatcagtgt

SEQ ID NO: 5707773 - DNA, 25 bp, Homo sapien
agccagggccctccacgggccttcg

SEQ ID NO: 5707774 - DNA, 25 bp, Homo sapien
gcagttctgccaggcaagccctgtg

SEQ ID NO: 5707775 - DNA, 25 bp, Homo sapien
aggtggcccagcgtggtgtcctgtc

SEQ ID NO: 5707776 - DNA, 25 bp, Homo sapien
tagggatttccaacttgtcttctct

SEQ ID NO: 5707777 - DNA, 25 bp, Homo sapien
taaataggaattccctggattgtgg

SEQ ID NO: 5707778 - DNA, 25 bp, Homo sapien
aaggcagtgatgaagcaggtggagg

SEQ ID NO: 5707779 - DNA, 25 bp, Homo sapien
tttaagatggtaaaatggttctcag

SEQ ID NO: 5707780 - DNA, 25 bp, Homo sapien
tgtggttggatacagataccagctt

SEQ ID NO: 5707781 - DNA, 25 bp, Homo sapien
cgcaaggaggagatagaagcgcaga

SEQ ID NO: 5707782 - DNA, 25 bp, Homo sapien
ttgtcttctctccctgaagcataag

SEQ ID NO: 5707783 - DNA, 25 bp, Homo sapien
ttccctggattgtgggcaagtgggc

SEQ ID NO: 5707784 - DNA, 25 bp, Homo sapien
caccccagctgaatttcttatgacc

SEQ ID NO: 5707785 - DNA, 25 bp, Homo sapien
tttgaattattttttcctctccatg

SEQ ID NO: 5707786 - DNA, 25 bp, Homo sapien
aagcaggcccgggacatggctgagg

SEQ ID NO: 5707787 - DNA, 25 bp, Homo sapien
ataaagagttttacagtgctgatat

SEQ ID NO: 5707788 - DNA, 25 bp, Homo sapien
actgcctcagccgcccaagtatctg

SEQ ID NO: 5707789 - DNA, 25 bp, Homo sapien
aaggttcactgaagccttgacgctg

SEQ ID NO: 5707790 - DNA, 25 bp, Homo sapien
gtcaccccagctgaatttcttatga

SEQ ID NO: 5707791 - DNA, 25 bp, Homo sapien
gcgtgcaccaccatgcatagctaat

SEQ ID NO: 5707792 - DNA, 25 bp, Homo sapien
gggctgcaacattattcctctgcaa

SEQ ID NO: 5707793 - DNA, 25 bp, Homo sapien
ttgtctcttttaagatggtaaaatg

SEQ ID NO: 5707794 - DNA, 25 bp, Homo sapien
ccatgcatagctaatttattttttg

SEQ ID NO: 5707795 - DNA, 25 bp, Homo sapien
ggggaaaaacaccagcttagacttg

SEQ ID NO: 5707796 - DNA, 25 bp, Homo sapien
gaaaatgcttattcttcctcccttt

SEQ ID NO: 5707797 - DNA, 25 bp, Homo sapien
tccagtcactgcataacattggcag

SEQ ID NO: 5707798 - DNA, 25 bp, Homo sapien
aattgaacctcctggctatgccctg

SEQ ID NO: 5707799 - DNA, 25 bp, Homo sapien
ctcgcgacaaggagaagcaggcccg

SEQ ID NO: 5707800 - DNA, 25 bp, Homo sapien
gtgcagtgtcgtgatcaaggttcac

SEQ ID NO: 5707801 - DNA, 25 bp, Homo sapien
tggacttgggtctagggatttccaa

SEQ ID NO: 5707802 - DNA, 25 bp, Homo sapien
ctaattccacgtattttccagtctc

SEQ ID NO: 5707803 - DNA, 25 bp, Homo sapien
cgcaggggggaaaaacaccagctta

SEQ ID NO: 5707804 - DNA, 25 bp, Homo sapien
ttgccctggacttgggtctagggat

SEQ ID NO: 5707805 - DNA, 25 bp, Homo sapien
gtcagcttcctctttaggaacccac

SEQ ID NO: 5707806 - DNA, 25 bp, Homo sapien
acgggccttcgccaaagtgaacagc

SEQ ID NO: 5707807 - DNA, 25 bp, Homo sapien
ttgacgctgtgggcactgcctcagc

SEQ ID NO: 5707808 - DNA, 25 bp, Homo sapien
ggcggaagttattctggcaggtact

SEQ ID NO: 5707809 - DNA, 25 bp, Homo sapien
cgcaccgccaggcacaacatcatat

SEQ ID NO: 5707810 - DNA, 25 bp, Homo sapien
tgacagtgatccgcaggggggaaaa

SEQ ID NO: 5707811 - DNA, 25 bp, Homo sapien
aatgtttgctgtttaaattgcatgt

SEQ ID NO: 5707812 - DNA, 25 bp, Homo sapien
tgttgtcaccccagctgaatttctt

SEQ ID NO: 5707813 - DNA, 25 bp, Homo sapien
tgtcagggccatagtagctcccttt

SEQ ID NO: 5707814 - DNA, 25 bp, Homo sapien
tgcaacattattcctctgcaaagat

SEQ ID NO: 5707815 - DNA, 25 bp, Homo sapien
acatcatatgcctgcagaatgatca

SEQ ID NO: 5707816 - DNA, 25 bp, Homo sapien
cgtagttacggtcgactggggcgtc

SEQ ID NO: 5707817 - DNA, 25 bp, Homo sapien
ggctctgtgaacacccagaacttcc

SEQ ID NO: 5707818 - DNA, 25 bp, Homo sapien
tgagggctacccccggtcagacgtg

SEQ ID NO: 5707819 - DNA, 25 bp, Homo sapien
gtttaaattgcatgttctaattcca

SEQ ID NO: 5707820 - DNA, 25 bp, Homo sapien
agttattctggcaggtactggtgtg

SEQ ID NO: 5707821 - DNA, 25 bp, Homo sapien
tgacgtgctggaaagccaaaaaggc

SEQ ID NO: 5707822 - DNA, 25 bp, Homo sapien
ttctgccaggcaagccctgtgttcc

SEQ ID NO: 5707823 - DNA, 25 bp, Homo sapien
cccggggttcacgatgtccgacgag

SEQ ID NO: 5707824 - DNA, 25 bp, Homo sapien
tttgtaaaccgctgaggtatggata

SEQ ID NO: 5707825 - DNA, 25 bp, Homo sapien
tcttgctttgtcacccaggctggag

SEQ ID NO: 5707826 - DNA, 25 bp, Homo sapien
ctgatatgaccctgttgtcacccca

SEQ ID NO: 5707827 - DNA, 25 bp, Homo sapien
aggccatgagccgcaaactgggtca

SEQ ID NO: 5707828 - DNA, 25 bp, Homo sapien
aaggatctggaagaggcttgtaacc

SEQ ID NO: 5707829 - DNA, 25 bp, Homo sapien
ctgtgaacacccagaacttccagtc

SEQ ID NO: 5707830 - DNA, 25 bp, Homo sapien
ggagatagaagcgcagatcaaggcc

SEQ ID NO: 5707831 - DNA, 25 bp, Homo sapien
gacagggtctccctgtgttgaccag

SEQ ID NO: 5707832 - DNA, 25 bp, Homo sapien
atcagacctcttgaaaatgcttatt

SEQ ID NO: 5707833 - DNA, 25 bp, Homo sapien
ctgtggatacggaaatggttaagta

SEQ ID NO: 5707834 - DNA, 25 bp, Homo sapien
gaagcccctgaatgtgacagtgatc

SEQ ID NO: 5707835 - DNA, 25 bp, Homo sapien
cgctttctgttttggcagttctgcc

SEQ ID NO: 5707836 - DNA, 25 bp, Homo sapien
tgattgtccctggggaacagtaaca

SEQ ID NO: 5707837 - DNA, 25 bp, Homo sapien
tctttaggaacccaccagagggcag

SEQ ID NO: 5707838 - DNA, 25 bp, Homo sapien
ccttgacgctgtgggcactgcctca

SEQ ID NO: 5707839 - DNA, 25 bp, Homo sapien
ctgcaagtggatgatgagattgtgg

SEQ ID NO: 5707840 - DNA, 25 bp, Homo sapien
tcgtgatcaaggttcactgaagcct

SEQ ID NO: 5707841 - DNA, 25 bp, Homo sapien
aaaaggactgctgggctgcaacatt

SEQ ID NO: 5707842 - DNA, 25 bp, Homo sapien
ggtggcagtactgtggcccaccagt

SEQ ID NO: 5707843 - DNA, 25 bp, Homo sapien
ggactgctgggctgcaacattattc

SEQ ID NO: 5707844 - DNA, 25 bp, Homo sapien
tcttgcacaccgctttctgttttgg

SEQ ID NO: 5707845 - DNA, 25 bp, Homo sapien
acaaagaggccatgagccgcaaact

SEQ ID NO: 5707846 - DNA, 25 bp, Homo sapien
gccatgagccgcaaactgggtcaga

SEQ ID NO: 5707847 - DNA, 25 bp, Homo sapien
ccctgcaccagctgcacgctcgcga

SEQ ID NO: 5707848 - DNA, 25 bp, Homo sapien
ttgatgggattggtattgctgtgtg

SEQ ID NO: 5707849 - DNA, 25 bp, Homo sapien
ctgtcagcttcctctttaggaaccc

SEQ ID NO: 5707850 - DNA, 25 bp, Homo sapien
attgtccctggggaacagtaacagg

SEQ ID NO: 5707851 - DNA, 25 bp, Homo sapien
accctgttgtcaccccagctgaatt

SEQ ID NO: 5707852 - DNA, 25 bp, Homo sapien
ttttctggagacaaggtcttgcttt

SEQ ID NO: 5707853 - DNA, 25 bp, Homo sapien
atacggaaatggttaagtactgtgc

SEQ ID NO: 5707854 - DNA, 25 bp, Homo sapien
tctcagactataataaacacagctt

SEQ ID NO: 5707855 - DNA, 25 bp, Homo sapien
gtagatcagacctcttgaaaatgct

SEQ ID NO: 5707856 - DNA, 25 bp, Homo sapien
ggaacccaccagagggcagcaagct

SEQ ID NO: 5707857 - DNA, 25 bp, Homo sapien
gagccgtagttacggtcgactgggg

SEQ ID NO: 5707858 - DNA, 25 bp, Homo sapien
gggatttccaacttgtcttctctcc

SEQ ID NO: 5707859 - DNA, 25 bp, Homo sapien
aattattttttcctctccatggtat

SEQ ID NO: 5707860 - DNA, 25 bp, Homo sapien
cgagccgctggtggactgtgagggc

SEQ ID NO: 5707861 - DNA, 25 bp, Homo sapien
gatgcggcgcaaggaggagatagaa

SEQ ID NO: 5707862 - DNA, 25 bp, Homo sapien
cgctgtgggcactgcctcagccgcc

SEQ ID NO: 5707863 - DNA, 25 bp, Homo sapien
tattttttgtctcttttaagatggt

SEQ ID NO: 5707864 - DNA, 25 bp, Homo sapien
ttataattgaacctcctggctatgc

SEQ ID NO: 5707865 - DNA, 25 bp, Homo sapien
tgcctgcagaatgatcacaaggcag

SEQ ID NO: 5707866 - DNA, 25 bp, Homo sapien
tcgcggcccggggttcacgatgtcc

SEQ ID NO: 5707867 - DNA, 25 bp, Homo sapien
ccgggtctctggagtcgcggcccgg

SEQ ID NO: 5707868 - DNA, 25 bp, Homo sapien
ctgaatttcttatgaccctcccaaa

SEQ ID NO: 5707869 - DNA, 25 bp, Homo sapien
ttctgttttggcagttctgccaggc

SEQ ID NO: 5707870 - DNA, 25 bp, Homo sapien
gccaactatgacgtgctggaaagcc

SEQ ID NO: 5707871 - DNA, 25 bp, Homo sapien
ctgagatcagcgctattttgtaaac

SEQ ID NO: 5707872 - DNA, 25 bp, Homo sapien
gatgaacgagccgctggtggactgt

SEQ ID NO: 5707873 - DNA, 25 bp, Homo sapien
taataaagagttttacagtgctgat

SEQ ID NO: 5707874 - DNA, 25 bp, Homo sapien
tcaaggttcactgaagccttgacgc

SEQ ID NO: 5707875 - DNA, 25 bp, Homo sapien
tgaattattttttcctctccatggt

SEQ ID NO: 5707876 - DNA, 25 bp, Homo sapien
tcgaactcctgggctcaagcagtcc

SEQ ID NO: 5707877 - DNA, 25 bp, Homo sapien
agcgctattttgtaaaccgctgagg

SEQ ID NO: 5707878 - DNA, 25 bp, Homo sapien
tgaatgtgacagtgatccgcagggg

SEQ ID NO: 5707879 - DNA, 25 bp, Homo sapien
ttgggcaaaacaggctagcaattgc

SEQ ID NO: 5707880 - DNA, 25 bp, Homo sapien
acgaggaagcgaggcagagcggagg

SEQ ID NO: 5707881 - DNA, 25 bp, Homo sapien
gtaccaagtccgcaccgccaggcac

SEQ ID NO: 5707882 - DNA, 25 bp, Homo sapien
ccagccagcatcgcgggtctgcaag

SEQ ID NO: 5707883 - DNA, 25 bp, Homo sapien
ctctggagtcgcggcccggggttca

SEQ ID NO: 5707884 - DNA, 25 bp, Homo sapien
gtgtgcttccagccacaggttctca

SEQ ID NO: 5707885 - DNA, 25 bp, Homo sapien
aagtcaggctttgaccaacatattt

SEQ ID NO: 5707886 - DNA, 25 bp, Homo sapien
ggtctcgaactcctgggctcaagca

SEQ ID NO: 5707887 - DNA, 25 bp, Homo sapien
gtgtggtggcagtactgtggcccac

SEQ ID NO: 5707888 - DNA, 25 bp, Homo sapien
ggtcttgctttgtcacccaggctgg

SEQ ID NO: 5707889 - DNA, 25 bp, Homo sapien
ctggattgtgggcaagtgggcggaa

SEQ ID NO: 5707890 - DNA, 25 bp, Homo sapien
tgtaaaccgctgaggtatggatagg

SEQ ID NO: 5707891 - DNA, 25 bp, Homo sapien
aacccaccagagggcagcaagctcc

SEQ ID NO: 5707892 - DNA, 25 bp, Homo sapien
ctgccaggcaagccctgtgttcctt

SEQ ID NO: 5707893 - DNA, 25 bp, Homo sapien
ctgaagccttgacgctgtgggcact

SEQ ID NO: 5707894 - DNA, 25 bp, Homo sapien
ccaatgtttgctgtttaaattgcat

SEQ ID NO: 5707895 - DNA, 25 bp, Homo sapien
tactgtggcccaccagtgtaatctc

SEQ ID NO: 5707896 - DNA, 25 bp, Homo sapien
aagtactgtgcttcctcagcagctg

SEQ ID NO: 5707897 - DNA, 25 bp, Homo sapien
atctccctggattaaggcattctta

SEQ ID NO: 5707898 - DNA, 25 bp, Homo sapien
tatgccctgagatcagcgctatttt

SEQ ID NO: 5707899 - DNA, 25 bp, Homo sapien
atgcttattcttcctcccttttatt

SEQ ID NO: 5707900 - DNA, 25 bp, Homo sapien
ttgttccaacacgctgggcaggaaa

SEQ ID NO: 5707901 - DNA, 25 bp, Homo sapien
tgtagagacagggtctccctgtgtt

SEQ ID NO: 5707902 - DNA, 25 bp, Homo sapien
ggcagcaagctcctttcacttcgct

SEQ ID NO: 5707903 - DNA, 25 bp, Homo sapien
cttcatagaaagttgggcaaaacag

SEQ ID NO: 5707904 - DNA, 25 bp, Homo sapien
ataggaacgagtagatcagacctct

SEQ ID NO: 5707905 - DNA, 25 bp, Homo sapien
cctggctatgccctgagatcagcgc

SEQ ID NO: 5707906 - DNA, 25 bp, Homo sapien
acccagaacttccagtcactgcata

SEQ ID NO: 5707907 - DNA, 25 bp, Homo sapien
gcttcctctttaggaacccaccaga

SEQ ID NO: 5707908 - DNA, 25 bp, Homo sapien
tcccaaaccaaagctcagatggggt

SEQ ID NO: 5707909 - DNA, 25 bp, Homo sapien
tattgggcgaattccctcaaactct

SEQ ID NO: 5707910 - DNA, 25 bp, Homo sapien
caaattaggccacggccctaaatag

SEQ ID NO: 5707911 - DNA, 25 bp, Homo sapien
tgaggcccacaaagaggccatgagc

SEQ ID NO: 5707912 - DNA, 25 bp, Homo sapien
cattggcagtgtggtgcagcacagt

SEQ ID NO: 5707913 - DNA, 25 bp, Homo sapien
gtggtgcagcacagtgaggggaagc

SEQ ID NO: 5707914 - DNA, 25 bp, Homo sapien
tctttgcactgaggccttgctgctg

SEQ ID NO: 5707915 - DNA, 25 bp, Homo sapien
ctcagggattcctgccaatactttg

SEQ ID NO: 5707916 - DNA, 25 bp, Homo sapien
agggccatagtagctccctttggag

SEQ ID NO: 5707917 - DNA, 25 bp, Homo sapien
aaaacaggctagcaattgcaaagtc

SEQ ID NO: 5707918 - DNA, 25 bp, Homo sapien
tggaggcttcccaggtggcccagcg

SEQ ID NO: 5707919 - DNA, 25 bp, Homo sapien
gcaccaccatgcatagctaatttat

SEQ ID NO: 5707920 - DNA, 25 bp, Homo sapien
gggtctgcaagtggatgatgagatt

SEQ ID NO: 5707921 - DNA, 25 bp, Homo sapien
cagaatgatcacaaggcagtgatga

SEQ ID NO: 5707922 - DNA, 25 bp, Homo sapien
tggatacagataccagcttgccttg

SEQ ID NO: 5707923 - DNA, 25 bp, Homo sapien
tggtgtgattattattattattttt

SEQ ID NO: 5707924 - DNA, 25 bp, Homo sapien
gctccctttggagaacagggaaagc

SEQ ID NO: 5707925 - DNA, 25 bp, Homo sapien
taggaattccctggattgtgggcaa

SEQ ID NO: 5707926 - DNA, 25 bp, Homo sapien
cctcctaaagtgctgggatcacagg

SEQ ID NO: 5707927 - DNA, 25 bp, Homo sapien
ttaggccacggccctaaataggaat

SEQ ID NO: 5707928 - DNA, 25 bp, Homo sapien
cctcttgaaaatgcttattcttcct

SEQ ID NO: 5707929 - DNA, 25 bp, Homo sapien
cagtgatgaagcaggtggaggaggc

SEQ ID NO: 5707930 - DNA, 25 bp, Homo sapien
cgtattcccctctggtagccacaga

SEQ ID NO: 5707931 - DNA, 25 bp, Homo sapien
agtctcagactataataaacacagc

SEQ ID NO: 5707932 - DNA, 25 bp, Homo sapien
ggtctagggatttccaacttgtctt

SEQ ID NO: 5707933 - DNA, 25 bp, Homo sapien
tgggcggaagttattctggcaggta

SEQ ID NO: 5707934 - DNA, 25 bp, Homo sapien
cttttataaagtctcagactataat

SEQ ID NO: 5707935 - DNA, 25 bp, Homo sapien
tctggcaggtactggtgtgattatt

SEQ ID NO: 5707936 - DNA, 25 bp, Homo sapien
caaagctcagatggggtcagaagag

SEQ ID NO: 5707937 - DNA, 25 bp, Homo sapien
gccatacgtattcccctctggtagc

SEQ ID NO: 5707938 - DNA, 25 bp, Homo sapien
cctggaggcttcccaggtggcccag

SEQ ID NO: 5707939 - DNA, 25 bp, Homo sapien
tcaattccaaagccttcctattggg

SEQ ID NO: 5707940 - DNA, 25 bp, Homo sapien
caccgccaggcacaacatcatatgc

SEQ ID NO: 5707941 - DNA, 25 bp, Homo sapien
gcttccagccacaggttctcacact

SEQ ID NO: 5707942 - DNA, 25 bp, Homo sapien
gtgcttccagccacaggttctcaca

SEQ ID NO: 5707943 - DNA, 25 bp, Homo sapien
gcaggtggaggaggccctgcaccag

SEQ ID NO: 5707944 - DNA, 25 bp, Homo sapien
cctgttgtcaccccagctgaatttc

SEQ ID NO: 5707945 - DNA, 25 bp, Homo sapien
gcaagctcctttcacttcgctagta

SEQ ID NO: 5707946 - DNA, 25 bp, Homo sapien
agacaaggtcttgctttgtcaccca

SEQ ID NO: 5707947 - DNA, 25 bp, Homo sapien
ggactgtgagggctacccccggtca

SEQ ID NO: 5707948 - DNA, 25 bp, Homo sapien
gttttggcagttctgccaggcaagc

SEQ ID NO: 5707949 - DNA, 25 bp, Homo sapien
gtgggcactgcctcagccgcccaag

SEQ ID NO: 5707950 - DNA, 25 bp, Homo sapien
gacgctgtgggcactgcctcagccg

SEQ ID NO: 5707951 - DNA, 25 bp, Homo sapien
actataataaacacagcttgcccag

SEQ ID NO: 5707952 - DNA, 25 bp, Homo sapien
gcttagacttgttccaacacgctgg

SEQ ID NO: 5707953 - DNA, 25 bp, Homo sapien
ctcttttaagatggtaaaatggttc

SEQ ID NO: 5707954 - DNA, 25 bp, Homo sapien
taagatggtaaaatggttctcaggg

SEQ ID NO: 5707955 - DNA, 25 bp, Homo sapien
tgttcatttccccagttcttgcaca

SEQ ID NO: 5707956 - DNA, 25 bp, Homo sapien
cttcctcagcagctgggctgtcagg

SEQ ID NO: 5707957 - DNA, 25 bp, Homo sapien
agcttcatagaaagttgggcaaaac

SEQ ID NO: 5707958 - DNA, 25 bp, Homo sapien
ggcaggaaaaggactgctgggctgc

SEQ ID NO: 5707959 - DNA, 25 bp, Homo sapien
cggtcgactggggcgtcgtccctag

SEQ ID NO: 5707960 - DNA, 25 bp, Homo sapien
ccagctgaatttcttatgaccctcc

SEQ ID NO: 5707961 - DNA, 25 bp, Homo sapien
actttgaattattttttcctctcca

SEQ ID NO: 5707962 - DNA, 25 bp, Homo sapien
ggagacaaggtcttgctttgtcacc

SEQ ID NO: 5707963 - DNA, 25 bp, Homo sapien
ctggattaaggcattcttaaaaact

SEQ ID NO: 5707964 - DNA, 25 bp, Homo sapien
cttttaagatggtaaaatggttctc

SEQ ID NO: 5707965 - DNA, 25 bp, Homo sapien
gaggagatagaagcgcagatcaagg

SEQ ID NO: 5707966 - DNA, 25 bp, Homo sapien
gactggttttgctgtggttggatac

SEQ ID NO: 5707967 - DNA, 25 bp, Homo sapien
gatgaagcaggtggaggaggccctg

SEQ ID NO: 5707968 - DNA, 25 bp, Homo sapien
ggtgtcctgtcagcttcctctttag

SEQ ID NO: 5707969 - DNA, 25 bp, Homo sapien
tattcccctctggtagccacagaca

SEQ ID NO: 5707970 - DNA, 25 bp, Homo sapien
tccctcaaactctatttgacctgac

SEQ ID NO: 5707971 - DNA, 25 bp, Homo sapien
gcagtcctcctgccttggcctccta

SEQ ID NO: 5707972 - DNA, 25 bp, Homo sapien
gcataaggatctggaagaggcttgt

SEQ ID NO: 5707973 - DNA, 25 bp, Homo sapien
ctgacagccatacgtattcccctct

SEQ ID NO: 5707974 - DNA, 25 bp, Homo sapien
aggaggccctgcaccagctgcacgc

SEQ ID NO: 5707975 - DNA, 25 bp, Homo sapien
ttgaccaacatatttctttgcactg

SEQ ID NO: 5707976 - DNA, 25 bp, Homo sapien
ccagagggcagcaagctcctttcac

SEQ ID NO: 5707977 - DNA, 25 bp, Homo sapien
tgctgatatgaccctgttgtcaccc

SEQ ID NO: 5707978 - DNA, 25 bp, Homo sapien
ttttttgtctcttttaagatggtaa

SEQ ID NO: 5707979 - DNA, 25 bp, Homo sapien
aagatgattgtccctggggaacagt

SEQ ID NO: 5707980 - DNA, 25 bp, Homo sapien
ctgaacttctgtgtggtggcagtac

SEQ ID NO: 5707981 - DNA, 25 bp, Homo sapien
aattccacgtattttccagtctctt

SEQ ID NO: 5707982 - DNA, 25 bp, Homo sapien
acccccggtcagacgtggacctgta

SEQ ID NO: 5707983 - DNA, 25 bp, Homo sapien
ggctttgaccaacatatttctttgc

SEQ ID NO: 5707984 - DNA, 25 bp, Homo sapien
gaattccctcaaactctatttgacc

SEQ ID NO: 5707985 - DNA, 25 bp, Homo sapien
gcccacaaagaggccatgagccgca

SEQ ID NO: 5707986 - DNA, 25 bp, Homo sapien
agccagcatcgcgggtctgcaagtg

SEQ ID NO: 5707987 - DNA, 25 bp, Homo sapien
tgaagcataaggatctggaagaggc

SEQ ID NO: 5707988 - DNA, 25 bp, Homo sapien
tgtaacctgaacttctgtgtggtgg

SEQ ID NO: 5707989 - DNA, 25 bp, Homo sapien
aaagaggccatgagccgcaaactgg

SEQ ID NO: 5707990 - DNA, 25 bp, Homo sapien
cgacgaggaagcgaggcagagcgga

SEQ ID NO: 5707991 - DNA, 25 bp, Homo sapien
actgtgcttcctcagcagctgggct

SEQ ID NO: 5707992 - DNA, 25 bp, Homo sapien
cagtgatccgcaggggggaaaaaca

SEQ ID NO: 5707993 - DNA, 25 bp, Homo sapien
cccctgaatgtgacagtgatccgca

SEQ ID NO: 5707994 - DNA, 25 bp, Homo sapien
tttccaacttgtcttctctccctga

SEQ ID NO: 5707995 - DNA, 25 bp, Homo sapien
aggctggagtgcagtgtcgtgatca

SEQ ID NO: 5707996 - DNA, 25 bp, Homo sapien
gggatcacaggcgtgagccactgcg

SEQ ID NO: 5707997 - DNA, 25 bp, Homo sapien
atttattttttgtagagacagggtc

SEQ ID NO: 5707998 - DNA, 25 bp, Homo sapien
ctaaagtgctgggatcacaggcgtg

SEQ ID NO: 5707999 - DNA, 25 bp, Homo sapien
ttctcagggattcctgccaatactt

SEQ ID NO: 5708000 - DNA, 25 bp, Homo sapien
atggttaagtactgtgcttcctcag

SEQ ID NO: 5708001 - DNA, 25 bp, Homo sapien
accaccatgcatagctaatttattt

SEQ ID NO: 5708002 - DNA, 25 bp, Homo sapien
ttcttaaaaacttaggcttggcctc

SEQ ID NO: 5708003 - DNA, 25 bp, Homo sapien
gccctggacttgggtctagggattt

SEQ ID NO: 5708004 - DNA, 25 bp, Homo sapien
gcagtactgtggcccaccagtgtaa

SEQ ID NO: 5708005 - DNA, 25 bp, Homo sapien
aggcccacaaagaggccatgagccg

SEQ ID NO: 5708006 - DNA, 25 bp, Homo sapien
cttctctccctgaagcataaggatc

SEQ ID NO: 5708007 - DNA, 25 bp, Homo sapien
tccgcaccgccaggcacaacatcat

SEQ ID NO: 5708008 - DNA, 25 bp, Homo sapien
gcctctttcacaaattaggccacgg

SEQ ID NO: 5708009 - DNA, 25 bp, Homo sapien
agtgaggggaagcccctgaatgtga

SEQ ID NO: 5708010 - DNA, 25 bp, Homo sapien
gtgttgaccaggttggtctcgaact

SEQ ID NO: 5708011 - DNA, 25 bp, Homo sapien
cagcttcctctttaggaacccacca

SEQ ID NO: 5708012 - DNA, 25 bp, Homo sapien
atgctgtgtttaccaatgtttgctg

SEQ ID NO: 5708013 - DNA, 25 bp, Homo sapien
atctggaagaggcttgtaacctgaa

SEQ ID NO: 5708014 - DNA, 25 bp, Homo sapien
cctctgcaaagatgattgtccctgg

SEQ ID NO: 5708015 - DNA, 25 bp, Homo sapien
taacctgaacttctgtgtggtggca

SEQ ID NO: 5708016 - DNA, 25 bp, Homo sapien
gggcgaattccctcaaactctattt

SEQ ID NO: 5708017 - DNA, 25 bp, Homo sapien
tgaccctcccaaaccaaagctcaga

SEQ ID NO: 5708018 - DNA, 25 bp, Homo sapien
gtcactgcataacattggcagtgtg

SEQ ID NO: 5708019 - DNA, 25 bp, Homo sapien
gggctcaagcagtcctcctgccttg

SEQ ID NO: 5708020 - DNA, 25 bp, Homo sapien
cagtctcttttataaagtctcagac

SEQ ID NO: 5708021 - DNA, 25 bp, Homo sapien
gaatgatcacaaggcagtgatgaag

SEQ ID NO: 5708022 - DNA, 25 bp, Homo sapien
tatcagtgttcatttccccagttct

SEQ ID NO: 5708023 - DNA, 25 bp, Homo sapien
aacgagccgctggtggactgtgagg

SEQ ID NO: 5708024 - DNA, 25 bp, Homo sapien
tttgtttttgttttctggagacaag

SEQ ID NO: 5708025 - DNA, 25 bp, Homo sapien
agacgtggacctgtaccaagtccgc

SEQ ID NO: 5708026 - DNA, 25 bp, Homo sapien
ccgctgaggtatggataggaacgag

SEQ ID NO: 5708027 - DNA, 25 bp, Homo sapien
taataaacacagcttgcccagttaa

SEQ ID NO: 5708028 - DNA, 25 bp, Homo sapien
ttattttttgtagagacagggtctc

SEQ ID NO: 5708029 - DNA, 25 bp, Homo sapien
agagcttcatagaaagttgggcaaa

SEQ ID NO: 5708030 - DNA, 25 bp, Homo sapien
ttccagccacaggttctcacactca

SEQ ID NO: 5708031 - DNA, 25 bp, Homo sapien
tggctgaggcccacaaagaggccat

SEQ ID NO: 5708032 - DNA, 25 bp, Homo sapien
gtcagaagagcttcatagaaagttg

SEQ ID NO: 5708033 - DNA, 25 bp, Homo sapien
ttacagtgctgatatgaccctgttg

SEQ ID NO: 5708034 - DNA, 25 bp, Homo sapien
tcatagaaagttgggcaaaacaggc

SEQ ID NO: 5708035 - DNA, 25 bp, Homo sapien
gttcacgatgtccgacgaggaagcg

SEQ ID NO: 5708036 - DNA, 25 bp, Homo sapien
ggaaatggttaagtactgtgcttcc

SEQ ID NO: 5708037 - DNA, 25 bp, Homo sapien
tgggattggtattgctgtgtgcttc

SEQ ID NO: 5708038 - DNA, 25 bp, Homo sapien
gctgctgtggatacggaaatggtta

SEQ ID NO: 5708039 - DNA, 25 bp, Homo sapien
tggggaacagtaacaggaaagcatc

SEQ ID NO: 5708040 - DNA, 25 bp, Homo sapien
gggattcctgccaatactttgaatt

SEQ ID NO: 5708041 - DNA, 25 bp, Homo sapien
cttccagtcactgcataacattggc

SEQ ID NO: 5708042 - DNA, 25 bp, Homo sapien
gtgatccgcaggggggaaaaacacc

SEQ ID NO: 5708043 - DNA, 25 bp, Homo sapien
ttaaattgcatgttctaattccacg

SEQ ID NO: 5708044 - DNA, 25 bp, Homo sapien
tgtttaccaatgtttgctgtttaaa

SEQ ID NO: 5708045 - DNA, 25 bp, Homo sapien
ggcccaccagtgtaatctccctgga

SEQ ID NO: 5708046 - DNA, 25 bp, Homo sapien
tgaggtatggataggaacgagtaga

SEQ ID NO: 5708047 - DNA, 25 bp, Homo sapien
acactcaattccaaagccttcctat

SEQ ID NO: 5708048 - DNA, 25 bp, Homo sapien
tccaggagctgatgcggcgcaagga

SEQ ID NO: 5708049 - DNA, 25 bp, Homo sapien
gctatgccctgagatcagcgctatt

SEQ ID NO: 5708050 - DNA, 25 bp, Homo sapien
caattgcaaagtcaggctttgacca

SEQ ID NO: 5708051 - DNA, 25 bp, Homo sapien
agcctggaggcttcccaggtggccc

SEQ ID NO: 5708052 - DNA, 25 bp, Homo sapien
ccctggattgtgggcaagtgggcgg

SEQ ID NO: 5708053 - DNA, 25 bp, Homo sapien
aagaggcttgtaacctgaacttctg

SEQ ID NO: 5708054 - DNA, 25 bp, Homo sapien
ccttgctgctgtggatacggaaatg

SEQ ID NO: 5708055 - DNA, 25 bp, Homo sapien
gtggatgatgagattgtggagttcg

SEQ ID NO: 5708056 - DNA, 25 bp, Homo sapien
tcccaggtggcccagcgtggtgtcc

SEQ ID NO: 5708057 - DNA, 25 bp, Homo sapien
gccaggcaagccctgtgttccttgg

SEQ ID NO: 5708058 - DNA, 25 bp, Homo sapien
ggatctggaagaggcttgtaacctg

SEQ ID NO: 5708059 - DNA, 25 bp, Homo sapien
cagacctcttgaaaatgcttattct

SEQ ID NO: 5708060 - DNA, 25 bp, Homo sapien
tcaaactctatttgacctgacagcc

SEQ ID NO: 5708061 - DNA, 25 bp, Homo sapien
tttaggaacccaccagagggcagca

SEQ ID NO: 5708062 - DNA, 25 bp, Homo sapien
aggaacgagtagatcagacctcttg

SEQ ID NO: 5708063 - DNA, 25 bp, Homo sapien
ccggctccccagccagcatcgcggg

SEQ ID NO: 5708064 - DNA, 25 bp, Homo sapien
gctgtcagggccatagtagctccct

SEQ ID NO: 5708065 - DNA, 25 bp, Homo sapien
tttttaataaagagttttacagtgc

SEQ ID NO: 5708066 - DNA, 25 bp, Homo sapien
ctctccatggtatcagtgttcattt

SEQ ID NO: 5708067 - DNA, 25 bp, Homo sapien
gatgggattggtattgctgtgtgct

SEQ ID NO: 5708068 - DNA, 25 bp, Homo sapien
agtgagagccagggccctccacggg

SEQ ID NO: 5708069 - DNA, 25 bp, Homo sapien
agtgtcgtgatcaaggttcactgaa

SEQ ID NO: 5708070 - DNA, 25 bp, Homo sapien
caccatgcatagctaatttattttt

SEQ ID NO: 5708071 - DNA, 25 bp, Homo sapien
aattccctggattgtgggcaagtgg

SEQ ID NO: 5708072 - DNA, 25 bp, Homo sapien
ttgctttgtcacccaggctggagtg

SEQ ID NO: 5708073 - DNA, 25 bp, Homo sapien
cgcgacaaggagaagcaggcccggg

SEQ ID NO: 5708074 - DNA, 25 bp, Homo sapien
catgagccgcaaactgggtcagagt

SEQ ID NO: 5708075 - DNA, 25 bp, Homo sapien
tgaccctgttgtcaccccagctgaa

SEQ ID NO: 5708076 - DNA, 25 bp, Homo sapien
tgcctcagccgcccaagtatctggg

SEQ ID NO: 5708077 - DNA, 25 bp, Homo sapien
ataaagtctcagactataataaaca

SEQ ID NO: 5708078 - DNA, 25 bp, Homo sapien
ttcatttccccagttcttgcacacc

SEQ ID NO: 5708079 - DNA, 25 bp, Homo sapien
ctgtgtgcttccagccacaggttct

SEQ ID NO: 5708080 - DNA, 25 bp, Homo sapien
catatgcctgcagaatgatcacaag

SEQ ID NO: 5708081 - DNA, 25 bp, Homo sapien
ggctccccagccagcatcgcgggtc

SEQ ID NO: 5708082 - DNA, 25 bp, Homo sapien
atggggtcagaagagcttcatagaa

SEQ ID NO: 5708083 - DNA, 25 bp, Homo sapien
gctcctttcacttcgctagtaagaa

SEQ ID NO: 5708084 - DNA, 25 bp, Homo sapien
cagataccagcttgccttgatggga

SEQ ID NO: 5708085 - DNA, 25 bp, Homo sapien
acacccagaacttccagtcactgca

SEQ ID NO: 5708086 - DNA, 25 bp, Homo sapien
cttaggcttggcctctttcacaaat

SEQ ID NO: 5708087 - DNA, 25 bp, Homo sapien
ggcttggcctctttcacaaattagg

SEQ ID NO: 5708088 - DNA, 25 bp, Homo sapien
acagtaacaggaaagcatcttccct

SEQ ID NO: 5708089 - DNA, 25 bp, Homo sapien
gtactggtgtgattattattattat

SEQ ID NO: 5708090 - DNA, 25 bp, Homo sapien
cccctctggtagccacagacatgct

SEQ ID NO: 5708091 - DNA, 25 bp, Homo sapien
ctgtgggcactgcctcagccgccca

SEQ ID NO: 5708092 - DNA, 25 bp, Homo sapien
cccaccagagggcagcaagctcctt

SEQ ID NO: 5708093 - DNA, 25 bp, Homo sapien
cagagcggaggctcctcgcaggccg

SEQ ID NO: 5708094 - DNA, 25 bp, Homo sapien
ctggagtcgcggcccggggttcacg

SEQ ID NO: 5708095 - DNA, 25 bp, Homo sapien
gcataacattggcagtgtggtgcag

SEQ ID NO: 5708096 - DNA, 25 bp, Homo sapien
ccacagacatgctgtgtttaccaat

SEQ ID NO: 5708097 - DNA, 25 bp, Homo sapien
ctgtgttgaccaggttggtctcgaa

SEQ ID NO: 5708098 - DNA, 25 bp, Homo sapien
tctatttgacctgacagccatacgt

SEQ ID NO: 5708099 - DNA, 25 bp, Homo sapien
acgtgctggaaagccaaaaaggcat

SEQ ID NO: 5708100 - DNA, 25 bp, Homo sapien
cctttggagaacagggaaagcctgg

SEQ ID NO: 5708101 - DNA, 25 bp, Homo sapien
ccacgtattttccagtctcttttat

SEQ ID NO: 5708102 - DNA, 25 bp, Homo sapien
gaccacaggcgtgcaccaccatgca

SEQ ID NO: 5708103 - DNA, 25 bp, Homo sapien
tggtagccacagacatgctgtgttt

SEQ ID NO: 5708104 - DNA, 25 bp, Homo sapien
gtccctagcccgggagccgggtctc

SEQ ID NO: 5708105 - DNA, 25 bp, Homo sapien
cagcagctgggctgtcagggccata

SEQ ID NO: 5708106 - DNA, 25 bp, Homo sapien
gctttgtcacccaggctggagtgca

SEQ ID NO: 5708107 - DNA, 25 bp, Homo sapien
gaggcagagcggaggctcctcgcag

SEQ ID NO: 5708108 - DNA, 25 bp, Homo sapien
gtcttctctccctgaagcataagga

SEQ ID NO: 5708109 - DNA, 25 bp, Homo sapien
tcagcgctattttgtaaaccgctga

SEQ ID NO: 5708110 - DNA, 25 bp, Homo sapien
gtgctggaaagccaaaaaggcattg

SEQ ID NO: 5708111 - DNA, 25 bp, Homo sapien
ccggtcagacgtggacctgtaccaa

SEQ ID NO: 5708112 - DNA, 25 bp, Homo sapien
caagccctgtgttccttgggactgg

SEQ ID NO: 5708113 - DNA, 25 bp, Homo sapien
caaggaggagatagaagcgcagatc

SEQ ID NO: 5708114 - DNA, 25 bp, Homo sapien
actgctgggctgcaacattattcct

SEQ ID NO: 5708115 - DNA, 25 bp, Homo sapien
ctgtttaaattgcatgttctaattc

SEQ ID NO: 5708116 - DNA, 25 bp, Homo sapien
agaagcaggcccgggacatggctga

SEQ ID NO: 5708117 - DNA, 25 bp, Homo sapien
tgcagcacagtgaggggaagcccct

SEQ ID NO: 5708118 - DNA, 25 bp, Homo sapien
tcccttgccctggacttgggtctag

SEQ ID NO: 5708119 - DNA, 25 bp, Homo sapien
gaacttctgtgtggtggcagtactg

SEQ ID NO: 5708120 - DNA, 25 bp, Homo sapien
acatgctgtgtttaccaatgtttgc

SEQ ID NO: 5708121 - DNA, 25 bp, Homo sapien
accaggttggtctcgaactcctggg

SEQ ID NO: 5708122 - DNA, 25 bp, Homo sapien
gggctgtcagggccatagtagctcc

SEQ ID NO: 5708123 - DNA, 25 bp, Homo sapien
tcttgaaaatgcttattcttcctcc

SEQ ID NO: 5708124 - DNA, 25 bp, Homo sapien
cttcccaggtggcccagcgtggtgt

SEQ ID NO: 5708125 - DNA, 25 bp, Homo sapien
gatcacaggcgtgagccactgcgcc

SEQ ID NO: 5708126 - DNA, 25 bp, Homo sapien
caacacgctgggcaggaaaaggact

SEQ ID NO: 5708127 - DNA, 25 bp, Homo sapien
atttcttatgaccctcccaaaccaa

SEQ ID NO: 5708128 - DNA, 25 bp, Homo sapien
ccaagtatctgggaccacaggcgtg

SEQ ID NO: 5708129 - DNA, 25 bp, Homo sapien
agctgggctgtcagggccatagtag

SEQ ID NO: 5708130 - DNA, 25 bp, Homo sapien
tttattttttgtctcttttaagatg

SEQ ID NO: 5708131 - DNA, 25 bp, Homo sapien
gggccttcgccaaagtgaacagcat

SEQ ID NO: 5708132 - DNA, 25 bp, Homo sapien
tcagtgttcatttccccagttcttg

SEQ ID NO: 5708133 - DNA, 25 bp, Homo sapien
ctgcataacattggcagtgtggtgc

SEQ ID NO: 5708134 - DNA, 25 bp, Homo sapien
cctgaatgtgacagtgatccgcagg

SEQ ID NO: 5708135 - DNA, 25 bp, Homo sapien
caggagctgatgcggcgcaaggagg

SEQ ID NO: 5708136 - DNA, 25 bp, Homo sapien
tcaagcagtcctcctgccttggcct

SEQ ID NO: 5708137 - DNA, 25 bp, Homo sapien
tcacaggcgtgagccactgcgccca

SEQ ID NO: 5708138 - DNA, 25 bp, Homo sapien
atgatgagattgtggagttcggctc

SEQ ID NO: 5708139 - DNA, 25 bp, Homo sapien
gggacatggctgaggcccacaaaga

SEQ ID NO: 5708140 - DNA, 25 bp, Homo sapien
gcgcccagcccactgctagtttgac

SEQ ID NO: 5708141 - DNA, 25 bp, Homo sapien
acttctgtgtggtggcagtactgtg

SEQ ID NO: 5708142 - DNA, 25 bp, Homo sapien
tgtgtttaccaatgtttgctgttta

SEQ ID NO: 5708143 - DNA, 25 bp, Homo sapien
ttttgtctcttttaagatggtaaaa

SEQ ID NO: 5708144 - DNA, 25 bp, Homo sapien
gaacacccagaacttccagtcactg

SEQ ID NO: 5708145 - DNA, 25 bp, Homo sapien
acaccgctttctgttttggcagttc

SEQ ID NO: 5708146 - DNA, 25 bp, Homo sapien
catgggcggagccgtagttacggtc

SEQ ID NO: 5708147 - DNA, 25 bp, Homo sapien
gaacagggaaagcctggaggcttcc

SEQ ID NO: 5708148 - DNA, 25 bp, Homo sapien
gctcaagcagtcctcctgccttggc

SEQ ID NO: 5708149 - DNA, 25 bp, Homo sapien
caactatgacgtgctggaaagccaa

SEQ ID NO: 5708150 - DNA, 25 bp, Homo sapien
gccttcgccaaagtgaacagcatca

SEQ ID NO: 5708151 - DNA, 25 bp, Homo sapien
catcgcgggtctgcaagtggatgat

SEQ ID NO: 5708152 - DNA, 25 bp, Homo sapien
attctggcaggtactggtgtgatta

SEQ ID NO: 5708153 - DNA, 25 bp, Homo sapien
ggccctccacgggccttcgccaaag

SEQ ID NO: 5708154 - DNA, 25 bp, Homo sapien
tggtattgctgtgtgcttccagcca

SEQ ID NO: 5708155 - DNA, 25 bp, Homo sapien
gggtctctggagtcgcggcccgggg

SEQ ID NO: 5708156 - DNA, 25 bp, Homo sapien
ccccagccagcatcgcgggtctgca

SEQ ID NO: 5708157 - DNA, 25 bp, Homo sapien
ttgggactggttttgctgtggttgg

SEQ ID NO: 5708158 - DNA, 25 bp, Homo sapien
accaagtccgcaccgccaggcacaa

SEQ ID NO: 5708159 - DNA, 25 bp, Homo sapien
ggaagcgaggcagagcggaggctcc

SEQ ID NO: 5708160 - DNA, 25 bp, Homo sapien
tgtcgtgatcaaggttcactgaagc

SEQ ID NO: 5708161 - DNA, 25 bp, Homo sapien
caggctagcaattgcaaagtcaggc

SEQ ID NO: 5708162 - DNA, 25 bp, Homo sapien
ctgggaccacaggcgtgcaccacca

SEQ ID NO: 5708163 - DNA, 25 bp, Homo sapien
gcaggcccgggacatggctgaggcc

SEQ ID NO: 5708164 - DNA, 25 bp, Homo sapien
ctgggctcaagcagtcctcctgcct

SEQ ID NO: 5708165 - DNA, 25 bp, Homo sapien
tttaccaatgtttgctgtttaaatt

SEQ ID NO: 5708166 - DNA, 25 bp, Homo sapien
acggaaatggttaagtactgtgctt

SEQ ID NO: 5708167 - DNA, 25 bp, Homo sapien
aagtgaacagcatcagccccggctc

SEQ ID NO: 5708168 - DNA, 25 bp, Homo sapien
acgctgggcaggaaaaggactgctg

SEQ ID NO: 5708169 - DNA, 25 bp, Homo sapien
tttttgtagagacagggtctccctg

SEQ ID NO: 5708170 - DNA, 25 bp, Homo sapien
tctagggatttccaacttgtcttct

SEQ ID NO: 5708171 - DNA, 25 bp, Homo sapien
tgtgagggctacccccggtcagacg

SEQ ID NO: 5708172 - DNA, 25 bp, Homo sapien
ttcactgaagccttgacgctgtggg

SEQ ID NO: 5708173 - DNA, 25 bp, Homo sapien
caagtccgcaccgccaggcacaaca

SEQ ID NO: 5708174 - DNA, 25 bp, Homo sapien
ttaagtactgtgcttcctcagcagc

SEQ ID NO: 5708175 - DNA, 25 bp, Homo sapien
aaagcctggaggcttcccaggtggc

SEQ ID NO: 5708176 - DNA, 25 bp, Homo sapien
tgtttttgtttttgttttctggaga

SEQ ID NO: 5708177 - DNA, 25 bp, Homo sapien
gcagatcaaggccaactatgacgtg

SEQ ID NO: 5708178 - DNA, 25 bp, Homo sapien
actatgacgtgctggaaagccaaaa

SEQ ID NO: 5708179 - DNA, 25 bp, Homo sapien
ggttttgctgtggttggatacagat

SEQ ID NO: 5708180 - DNA, 25 bp, Homo sapien
ttcacaaattaggccacggccctaa

SEQ ID NO: 5708181 - DNA, 25 bp, Homo sapien
aaggtcttgctttgtcacccaggct

SEQ ID NO: 5708182 - DNA, 25 bp, Homo sapien
gtctcttttataaagtctcagacta

SEQ ID NO: 5708183 - DNA, 25 bp, Homo sapien
catcagccccggctccccagccagc

SEQ ID NO: 5708184 - DNA, 25 bp, Homo sapien
agcaattgcaaagtcaggctttgac

SEQ ID NO: 5708185 - DNA, 25 bp, Homo sapien
agcccctgaatgtgacagtgatccg

SEQ ID NO: 5708186 - DNA, 25 bp, Homo sapien
tggagtgcagtgtcgtgatcaaggt

SEQ ID NO: 5708187 - DNA, 25 bp, Homo sapien
ggaaagcctggaggcttcccaggtg

SEQ ID NO: 5708188 - DNA, 25 bp, Homo sapien
tgtgcttcctcagcagctgggctgt

SEQ ID NO: 5708189 - DNA, 25 bp, Homo sapien
cgctcgcgacaaggagaagcaggcc

SEQ ID NO: 5708190 - DNA, 25 bp, Homo sapien
ggctagcaattgcaaagtcaggctt

SEQ ID NO: 5708191 - DNA, 25 bp, Homo sapien
agattgtggagttcggctctgtgaa

SEQ ID NO: 5708192 - DNA, 25 bp, Homo sapien
ctagcaattgcaaagtcaggctttg

SEQ ID NO: 5708193 - DNA, 25 bp, Homo sapien
cactgaagccttgacgctgtgggca

SEQ ID NO: 5708194 - DNA, 25 bp, Homo sapien
aaaccaaagctcagatggggtcaga

SEQ ID NO: 5708195 - DNA, 25 bp, Homo sapien
ctttcacttcgctagtaagaacccc

SEQ ID NO: 5708196 - DNA, 25 bp, Homo sapien
gttcttgcacaccgctttctgtttt

SEQ ID NO: 5708197 - DNA, 25 bp, Homo sapien
gtggactgtgagggctacccccggt

SEQ ID NO: 5708198 - DNA, 25 bp, Homo sapien
agtccgcaccgccaggcacaacatc

SEQ ID NO: 5708199 - DNA, 25 bp, Homo sapien
gggatgaacgagccgctggtggact

SEQ ID NO: 5708200 - DNA, 25 bp, Homo sapien
gcgtggtgtcctgtcagcttcctct

SEQ ID NO: 5708201 - DNA, 25 bp, Homo sapien
agccttcctattgggcgaattccct

SEQ ID NO: 5708202 - DNA, 25 bp, Homo sapien
cagctgcacgctcgcgacaaggaga

SEQ ID NO: 5708203 - DNA, 25 bp, Homo sapien
ccgggacatggctgaggcccacaaa

SEQ ID NO: 5708204 - DNA, 25 bp, Homo sapien
agtgctgatatgaccctgttgtcac

SEQ ID NO: 5708205 - DNA, 25 bp, Homo sapien
cggcgcaaggaggagatagaagcgc

SEQ ID NO: 5708206 - DNA, 25 bp, Homo sapien
tttgcactgaggccttgctgctgtg

SEQ ID NO: 5708207 - DNA, 25 bp, Homo sapien
tgcagaatgatcacaaggcagtgat

SEQ ID NO: 5708208 - DNA, 25 bp, Homo sapien
gcgaattccctcaaactctatttga

SEQ ID NO: 5708209 - DNA, 25 bp, Homo sapien
ccgcaaactgggtcagagtgagagc

SEQ ID NO: 5708210 - DNA, 25 bp, Homo sapien
ttttataattgaacctcctggctat

SEQ ID NO: 5708211 - DNA, 25 bp, Homo sapien
tgggcaagtgggcggaagttattct

SEQ ID NO: 5708212 - DNA, 25 bp, Homo sapien
gatccgcaggggggaaaaacaccag

SEQ ID NO: 5708213 - DNA, 25 bp, Homo sapien
atagaagcgcagatcaaggccaact

SEQ ID NO: 5708214 - DNA, 25 bp, Homo sapien
gatttccaacttgtcttctctccct

SEQ ID NO: 5708215 - DNA, 25 bp, Homo sapien
caaagatgattgtccctggggaaca

SEQ ID NO: 5708216 - DNA, 25 bp, Homo sapien
ctgggctgcaacattattcctctgc

SEQ ID NO: 5708217 - DNA, 25 bp, Homo sapien
ccttgggactggttttgctgtggtt

SEQ ID NO: 5708218 - DNA, 25 bp, Homo sapien
agtcctcctgccttggcctcctaaa

SEQ ID NO: 5708219 - DNA, 25 bp, Homo sapien
agagccagggccctccacgggcctt

SEQ ID NO: 5708220 - DNA, 25 bp, Homo sapien
tgctgtttaaattgcatgttctaat

SEQ ID NO: 5708221 - DNA, 25 bp, Homo sapien
ggatacggaaatggttaagtactgt

SEQ ID NO: 5708222 - DNA, 25 bp, Homo sapien
gaggccttgctgctgtggatacgga

SEQ ID NO: 5708223 - DNA, 25 bp, Homo sapien
tgttctaattccacgtattttccag

SEQ ID NO: 5708224 - DNA, 25 bp, Homo sapien
ggttcactgaagccttgacgctgtg

SEQ ID NO: 5708225 - DNA, 25 bp, Homo sapien
cctgccttggcctcctaaagtgctg

SEQ ID NO: 5708226 - DNA, 25 bp, Homo sapien
gtctcttttaagatggtaaaatggt

SEQ ID NO: 5708227 - DNA, 25 bp, Homo sapien
ttgtcaccccagctgaatttcttat

SEQ ID NO: 5708228 - DNA, 25 bp, Homo sapien
ttcctgccaatactttgaattattt

SEQ ID NO: 5708229 - DNA, 25 bp, Homo sapien
gcagctgggctgtcagggccatagt

SEQ ID NO: 5708230 - DNA, 25 bp, Homo sapien
tcctcagcagctgggctgtcagggc

SEQ ID NO: 5708231 - DNA, 25 bp, Homo sapien
tcagccgcccaagtatctgggacca

SEQ ID NO: 5708232 - DNA, 25 bp, Homo sapien
tatttgacctgacagccatacgtat

SEQ ID NO: 5708233 - DNA, 25 bp, Homo sapien
tccaacacgctgggcaggaaaagga

SEQ ID NO: 5708234 - DNA, 25 bp, Homo sapien
gggcactgcctcagccgcccaagta

SEQ ID NO: 5708235 - DNA, 25 bp, Homo sapien
taggaacccaccagagggcagcaag

SEQ ID NO: 5708236 - DNA, 25 bp, Homo sapien
ctgtggcccaccagtgtaatctccc

SEQ ID NO: 5708237 - DNA, 25 bp, Homo sapien
tccccagttcttgcacaccgctttc

SEQ ID NO: 5708238 - DNA, 25 bp, Homo sapien
tgcttcctcagcagctgggctgtca

SEQ ID NO: 5708239 - DNA, 25 bp, Homo sapien
aaatggttctcagggattcctgcca

SEQ ID NO: 5708240 - DNA, 25 bp, Homo sapien
atcaaggccaactatgacgtgctgg

SEQ ID NO: 5708241 - DNA, 25 bp, Homo sapien
ccagccacaggttctcacactcaat

SEQ ID NO: 5708242 - DNA, 25 bp, Homo sapien
aacttaggcttggcctctttcacaa

SEQ ID NO: 5708243 - DNA, 25 bp, Homo sapien
tgcacgctcgcgacaaggagaagca

SEQ ID NO: 5708244 - DNA, 25 bp, Homo sapien
gccaaaaaggcattgggatgaacga

SEQ ID NO: 5708245 - DNA, 25 bp, Homo sapien
tgttttctggagacaaggtcttgct

SEQ ID NO: 5708246 - DNA, 25 bp, Homo sapien
aattccaaagccttcctattgggcg

SEQ ID NO: 5708247 - DNA, 25 bp, Homo sapien
agcccgggagccgggtctctggagt

SEQ ID NO: 5708248 - DNA, 25 bp, Homo sapien
gcgggtctgcaagtggatgatgaga

SEQ ID NO: 5708249 - DNA, 25 bp, Homo sapien
taaaatggttctcagggattcctgc

SEQ ID NO: 5708250 - DNA, 25 bp, Homo sapien
aggcgtgagccactgcgcccagccc

SEQ ID NO: 5708251 - DNA, 25 bp, Homo sapien
tgtccctggggaacagtaacaggaa

SEQ ID NO: 5708252 - DNA, 25 bp, Homo sapien
agggctacccccggtcagacgtgga

SEQ ID NO: 5708253 - DNA, 25 bp, Homo sapien
ccgccaggcacaacatcatatgcct

SEQ ID NO: 5708254 - DNA, 25 bp, Homo sapien
ttattttttcctctccatggtatca

SEQ ID NO: 5708255 - DNA, 25 bp, Homo sapien
cacttcgctagtaagaacccctccg

SEQ ID NO: 5708256 - DNA, 25 bp, Homo sapien
gtggtgtcctgtcagcttcctcttt

SEQ ID NO: 5708257 - DNA, 25 bp, Homo sapien
tggagttcggctctgtgaacaccca

SEQ ID NO: 5708258 - DNA, 25 bp, Homo sapien
ataacattggcagtgtggtgcagca

SEQ ID NO: 5708259 - DNA, 25 bp, Homo sapien
gtggacctgtaccaagtccgcaccg

SEQ ID NO: 5708260 - DNA, 25 bp, Homo sapien
catacgtattcccctctggtagcca

SEQ ID NO: 5708261 - DNA, 25 bp, Homo sapien
cctgccaatactttgaattattttt

SEQ ID NO: 5708262 - DNA, 25 bp, Homo sapien
aaaacttaggcttggcctctttcac

SEQ ID NO: 5708263 - DNA, 25 bp, Homo sapien
gcatagctaatttattttttgtaga

SEQ ID NO: 5708264 - DNA, 25 bp, Homo sapien
tgctgggctgcaacattattcctct

SEQ ID NO: 5708265 - DNA, 25 bp, Homo sapien
ttcctctgcaaagatgattgtccct

SEQ ID NO: 5708266 - DNA, 25 bp, Homo sapien
aaggagaagcaggcccgggacatgg

SEQ ID NO: 5708267 - DNA, 25 bp, Homo sapien
taccagcttgccttgatgggattgg

SEQ ID NO: 5708268 - DNA, 25 bp, Homo sapien
gaacagcatcagccccggctcccca

SEQ ID NO: 5708269 - DNA, 25 bp, Homo sapien
accaaagctcagatggggtcagaag

SEQ ID NO: 5708270 - DNA, 25 bp, Homo sapien
acaaggtcttgctttgtcacccagg

SEQ ID NO: 5708271 - DNA, 25 bp, Homo sapien
gattcctgccaatactttgaattat

SEQ ID NO: 5708272 - DNA, 25 bp, Homo sapien
gcacaccgctttctgttttggcagt

SEQ ID NO: 5708273 - DNA, 25 bp, Homo sapien
agtgtaatctccctggattaaggca

SEQ ID NO: 5708274 - DNA, 25 bp, Homo sapien
ataaggatctggaagaggcttgtaa

SEQ ID NO: 5708275 - DNA, 25 bp, Homo sapien
ggagaagcaggcccgggacatggct

SEQ ID NO: 5708276 - DNA, 25 bp, Homo sapien
gcgaggcagagcggaggctcctcgc

SEQ ID NO: 5708277 - DNA, 25 bp, Homo sapien
tgcaaagtcaggctttgaccaacat

SEQ ID NO: 5708278 - DNA, 25 bp, Homo sapien
gtattttccagtctcttttataaag

SEQ ID NO: 5708279 - DNA, 25 bp, Homo sapien
ttgctgctgtggatacggaaatggt

SEQ ID NO: 5708280 - DNA, 25 bp, Homo sapien
gaaagcatcttcccttgccctggac

SEQ ID NO: 5708281 - DNA, 25 bp, Homo sapien
attttttcctctccatggtatcagt

SEQ ID NO: 5708282 - DNA, 25 bp, Homo sapien
gaggccctgcaccagctgcacgctc

SEQ ID NO: 5708283 - DNA, 25 bp, Homo sapien
caggaaaaggactgctgggctgcaa

SEQ ID NO: 5708284 - DNA, 25 bp, Homo sapien
aagcgaggcagagcggaggctcctc

SEQ ID NO: 5708285 - DNA, 25 bp, Homo sapien
aggaaagcatcttcccttgccctgg

SEQ ID NO: 5708286 - DNA, 25 bp, Homo sapien
cacggccctaaataggaattccctg

SEQ ID NO: 5708287 - DNA, 25 bp, Homo sapien
ttggcctcctaaagtgctgggatca

SEQ ID NO: 5708288 - DNA, 25 bp, Homo sapien
gtggatacggaaatggttaagtact

SEQ ID NO: 5708289 - DNA, 25 bp, Homo sapien
ggcccagcgtggtgtcctgtcagct

SEQ ID NO: 5708290 - DNA, 25 bp, Homo sapien
cactgctagtttgactttttataat

SEQ ID NO: 5708291 - DNA, 25 bp, Homo sapien
cacaacatcatatgcctgcagaatg

SEQ ID NO: 5708292 - DNA, 25 bp, Homo sapien
aggctcctcgcaggccggcgtcgtg

SEQ ID NO: 5708293 - DNA, 25 bp, Homo sapien
cagggtctccctgtgttgaccaggt

SEQ ID NO: 5708294 - DNA, 25 bp, Homo sapien
cggggttcacgatgtccgacgagga

SEQ ID NO: 5708295 - DNA, 25 bp, Homo sapien
acaggttctcacactcaattccaaa

SEQ ID NO: 5708296 - DNA, 25 bp, Homo sapien
gagtagatcagacctcttgaaaatg

SEQ ID NO: 5708297 - DNA, 25 bp, Homo sapien
aagtatctgggaccacaggcgtgca

SEQ ID NO: 5708298 - DNA, 25 bp, Homo sapien
gccaaagtgaacagcatcagccccg

SEQ ID NO: 5708299 - DNA, 25 bp, Homo sapien
tttcctctccatggtatcagtgttc

SEQ ID NO: 5708300 - DNA, 25 bp, Homo sapien
ctggaagaggcttgtaacctgaact

SEQ ID NO: 5708301 - DNA, 25 bp, Homo sapien
tgcactgaggccttgctgctgtgga

SEQ ID NO: 5708302 - DNA, 25 bp, Homo sapien
ggccttgctgctgtggatacggaaa

SEQ ID NO: 5708303 - DNA, 25 bp, Homo sapien
aaagagttttacagtgctgatatga

SEQ ID NO: 5708304 - DNA, 25 bp, Homo sapien
tggcagtactgtggcccaccagtgt

SEQ ID NO: 5708305 - DNA, 25 bp, Homo sapien
gtcaggctttgaccaacatatttct

SEQ ID NO: 5708306 - DNA, 25 bp, Homo sapien
tttgtagagacagggtctccctgtg

SEQ ID NO: 5708307 - DNA, 25 bp, Homo sapien
aaaaacaccagcttagacttgttcc

SEQ ID NO: 5708308 - DNA, 25 bp, Homo sapien
gctggagtgcagtgtcgtgatcaag

SEQ ID NO: 5708309 - DNA, 25 bp, Homo sapien
ggattggtattgctgtgtgcttcca

SEQ ID NO: 5708310 - DNA, 25 bp, Homo sapien
catatttctttgcactgaggccttg

SEQ ID NO: 5708311 - DNA, 25 bp, Homo sapien
accagcttagacttgttccaacacg

SEQ ID NO: 5708312 - DNA, 25 bp, Homo sapien
tttccccagttcttgcacaccgctt

SEQ ID NO: 5708313 - DNA, 25 bp, Homo sapien
ataaacacagcttgcccagttaaaa

SEQ ID NO: 5708314 - DNA, 25 bp, Homo sapien
gtattgctgtgtgcttccagccaca

SEQ ID NO: 5708315 - DNA, 25 bp, Homo sapien
tgtggagttcggctctgtgaacacc

SEQ ID NO: 5708316 - DNA, 25 bp, Homo sapien
gaagttattctggcaggtactggtg

SEQ ID NO: 5708317 - DNA, 25 bp, Homo sapien
gggtctccctgtgttgaccaggttg

SEQ ID NO: 5708318 - DNA, 25 bp, Homo sapien
ttgcacaccgctttctgttttggca

SEQ ID NO: 5708319 - DNA, 25 bp, Homo sapien
gactttttataattgaacctcctgg

SEQ ID NO: 5708320 - DNA, 25 bp, Homo sapien
ggtgcagcacagtgaggggaagccc

SEQ ID NO: 5708321 - DNA, 25 bp, Homo sapien
gggactggttttgctgtggttggat

SEQ ID NO: 5708322 - DNA, 25 bp, Homo sapien
ggtatcagtgttcatttccccagtt

SEQ ID NO: 5708323 - DNA, 25 bp, Homo sapien
ttgctgtggttggatacagatacca

SEQ ID NO: 5708324 - DNA, 25 bp, Homo sapien
ggtcagagtgagagccagggccctc

SEQ ID NO: 5708325 - DNA, 25 bp, Homo sapien
gctcagatggggtcagaagagcttc

SEQ ID NO: 5708326 - DNA, 25 bp, Homo sapien
ggattaaggcattcttaaaaactta

SEQ ID NO: 5708327 - DNA, 25 bp, Homo sapien
cctcagccgcccaagtatctgggac

SEQ ID NO: 5708328 - DNA, 25 bp, Homo sapien
gtcagcgacgtccaggagctgatgc

SEQ ID NO: 5708329 - DNA, 25 bp, Homo sapien
agagttttacagtgctgatatgacc

SEQ ID NO: 5708330 - DNA, 25 bp, Homo sapien
cctctggtagccacagacatgctgt

SEQ ID NO: 5708331 - DNA, 25 bp, Homo sapien
tcctaaagtgctgggatcacaggcg

SEQ ID NO: 5708332 - DNA, 25 bp, Homo sapien
tggagaacagggaaagcctggaggc

SEQ ID NO: 5708333 - DNA, 25 bp, Homo sapien
gaggcttgtaacctgaacttctgtg

SEQ ID NO: 5708334 - DNA, 25 bp, Homo sapien
cctgtgttccttgggactggttttg

SEQ ID NO: 5708335 - DNA, 25 bp, Homo sapien
gaatttcttatgaccctcccaaacc

SEQ ID NO: 5708336 - DNA, 25 bp, Homo sapien
cttatgaccctcccaaaccaaagct

SEQ ID NO: 5708337 - DNA, 25 bp, Homo sapien
accagctgcacgctcgcgacaagga

SEQ ID NO: 5708338 - DNA, 25 bp, Homo sapien
ccctgagatcagcgctattttgtaa

SEQ ID NO: 5708339 - DNA, 25 bp, Homo sapien
tggcctctttcacaaattaggccac

SEQ ID NO: 5708340 - DNA, 25 bp, Homo sapien
gacatggctgaggcccacaaagagg

SEQ ID NO: 5708341 - DNA, 25 bp, Homo sapien
gtgactgtcagcgacgtccaggagc

SEQ ID NO: 5708342 - DNA, 25 bp, Homo sapien
gtggtggcagtactgtggcccacca

SEQ ID NO: 5708343 - DNA, 25 bp, Homo sapien
aaggcattgggatgaacgagccgct

SEQ ID NO: 5708344 - DNA, 25 bp, Homo sapien
cactgcataacattggcagtgtggt

SEQ ID NO: 5708345 - DNA, 25 bp, Homo sapien
agatggtaaaatggttctcagggat

SEQ ID NO: 5708346 - DNA, 25 bp, Homo sapien
tccagtctcttttataaagtctcag

SEQ ID NO: 5708347 - DNA, 25 bp, Homo sapien
tgtttttgttttctggagacaaggt

SEQ ID NO: 5708348 - DNA, 25 bp, Homo sapien
tatgacgtgctggaaagccaaaaag

SEQ ID NO: 5708349 - DNA, 25 bp, Homo sapien
agccacaggttctcacactcaattc

SEQ ID NO: 5708350 - DNA, 25 bp, Homo sapien
tgtcctgtcagcttcctctttagga

SEQ ID NO: 5708351 - DNA, 25 bp, Homo sapien
taaaccgctgaggtatggataggaa

SEQ ID NO: 5708352 - DNA, 25 bp, Homo sapien
gataccagcttgccttgatgggatt

SEQ ID NO: 5708353 - DNA, 25 bp, Homo sapien
aggtactggtgtgattattattatt

SEQ ID NO: 5708354 - DNA, 25 bp, Homo sapien
ggagctgatgcggcgcaaggaggag

SEQ ID NO: 5708355 - DNA, 25 bp, Homo sapien
cattgggatgaacgagccgctggtg

SEQ ID NO: 5708356 - DNA, 25 bp, Homo sapien
ggcttcccaggtggcccagcgtggt

SEQ ID NO: 5708357 - DNA, 25 bp, Homo sapien
ccagcatcgcgggtctgcaagtgga

SEQ ID NO: 5708358 - DNA, 25 bp, Homo sapien
ggcagtgatgaagcaggtggaggag

SEQ ID NO: 5708359 - DNA, 25 bp, Homo sapien
aagcataaggatctggaagaggctt

SEQ ID NO: 5708360 - DNA, 25 bp, Homo sapien
tgttccttgggactggttttgctgt

SEQ ID NO: 5708361 - DNA, 25 bp, Homo sapien
taatctccctggattaaggcattct

SEQ ID NO: 5708362 - DNA, 25 bp, Homo sapien
ccctggattaaggcattcttaaaaa

SEQ ID NO: 5708363 - DNA, 25 bp, Homo sapien
aggtatggataggaacgagtagatc

SEQ ID NO: 5708364 - DNA, 25 bp, Homo sapien
caagtgggcggaagttattctggca

SEQ ID NO: 5708365 - DNA, 25 bp, Homo sapien
tctgcaaagatgattgtccctgggg

SEQ ID NO: 5708366 - DNA, 25 bp, Homo sapien
ggaagaggcttgtaacctgaacttc

SEQ ID NO: 5708367 - DNA, 25 bp, Homo sapien
gcattcttaaaaacttaggcttggc

SEQ ID NO: 5708368 - DNA, 25 bp, Homo sapien
agttgggcaaaacaggctagcaatt

SEQ ID NO: 5708369 - DNA, 25 bp, Homo sapien
gcactgcctcagccgcccaagtatc

SEQ ID NO: 5708370 - DNA, 25 bp, Homo sapien
caaagtcaggctttgaccaacatat

SEQ ID NO: 5708371 - DNA, 25 bp, Homo sapien
gggttcacgatgtccgacgaggaag

SEQ ID NO: 5708372 - DNA, 25 bp, Homo sapien
tgccctgagatcagcgctattttgt

SEQ ID NO: 5708373 - DNA, 25 bp, Homo sapien
tggttggatacagataccagcttgc

SEQ ID NO: 5708374 - DNA, 25 bp, Homo sapien
gtatggataggaacgagtagatcag

SEQ ID NO: 5708375 - DNA, 25 bp, Homo sapien
tgtgtttttgtttttgttttctgga

SEQ ID NO: 5708376 - DNA, 25 bp, Homo sapien
cttcccttgccctggacttgggtct

SEQ ID NO: 5708377 - DNA, 25 bp, Homo sapien
ctgggctgtcagggccatagtagct

SEQ ID NO: 5708378 - DNA, 25 bp, Homo sapien
agggccctccacgggccttcgccaa

SEQ ID NO: 5708379 - DNA, 25 bp, Homo sapien
ctccctgtgttgaccaggttggtct

SEQ ID NO: 5708380 - DNA, 25 bp, Homo sapien
ctgtaccaagtccgcaccgccaggc

SEQ ID NO: 5708381 - DNA, 25 bp, Homo sapien
attggtattgctgtgtgcttccagc

SEQ ID NO: 5708382 - DNA, 25 bp, Homo sapien
ctgcgcccagcccactgctagtttg

SEQ ID NO: 5708383 - DNA, 25 bp, Homo sapien
aaagtctcagactataataaacaca

SEQ ID NO: 5708384 - DNA, 25 bp, Homo sapien
ggccatagtagctccctttggagaa

SEQ ID NO: 5708385 - DNA, 25 bp, Homo sapien
tagagacagggtctccctgtgttga

SEQ ID NO: 5708386 - DNA, 25 bp, Homo sapien
ctcctggctatgccctgagatcagc

SEQ ID NO: 5708387 - DNA, 25 bp, Homo sapien
tcacgatgtccgacgaggaagcgag

SEQ ID NO: 5708388 - DNA, 25 bp, Homo sapien
gatcacaaggcagtgatgaagcagg

SEQ ID NO: 5708389 - DNA, 25 bp, Homo sapien
agaagcgcagatcaaggccaactat

SEQ ID NO: 5708390 - DNA, 25 bp, Homo sapien
aggccacggccctaaataggaattc

SEQ ID NO: 5708391 - DNA, 25 bp, Homo sapien
ctggttttgctgtggttggatacag

SEQ ID NO: 5708392 - DNA, 25 bp, Homo sapien
cccgggagccgggtctctggagtcg

SEQ ID NO: 5708393 - DNA, 25 bp, Homo sapien
agatcaaggccaactatgacgtgct

SEQ ID NO: 5708394 - DNA, 25 bp, Homo sapien
ctttcacaaattaggccacggccct

SEQ ID NO: 5708395 - DNA, 25 bp, Homo sapien
aaacacagcttgcccagttaaaaaa

SEQ ID NO: 5708396 - DNA, 25 bp, Homo sapien
tccaacttgtcttctctccctgaag

SEQ ID NO: 5708397 - DNA, 25 bp, Homo sapien
ctgtgtggtggcagtactgtggccc

SEQ ID NO: 5708398 - DNA, 25 bp, Homo sapien
gtttgactttttataattgaacctc

SEQ ID NO: 5708399 - DNA, 25 bp, Homo sapien
acgatgtccgacgaggaagcgaggc

SEQ ID NO: 5708400 - DNA, 25 bp, Homo sapien
atagtagctccctttggagaacagg

SEQ ID NO: 5708401 - DNA, 25 bp, Homo sapien
agttctgccaggcaagccctgtgtt

SEQ ID NO: 5708402 - DNA, 25 bp, Homo sapien
tgtgtgtttttgtttttgttttctg

SEQ ID NO: 5708403 - DNA, 25 bp, Homo sapien
tagctccctttggagaacagggaaa

SEQ ID NO: 5708404 - DNA, 25 bp, Homo sapien
tgtcacccaggctggagtgcagtgt

SEQ ID NO: 5708405 - DNA, 25 bp, Homo sapien
agctgatgcggcgcaaggaggagat

SEQ ID NO: 5708406 - DNA, 25 bp, Homo sapien
gacgtccaggagctgatgcggcgca

SEQ ID NO: 5708407 - DNA, 25 bp, Homo sapien
acctgtaccaagtccgcaccgccag

SEQ ID NO: 5708408 - DNA, 25 bp, Homo sapien
tggcaggtactggtgtgattattat

SEQ ID NO: 5708409 - DNA, 25 bp, Homo sapien
ggtcagacgtggacctgtaccaagt

SEQ ID NO: 5708410 - DNA, 25 bp, Homo sapien
attgctgtgtgcttccagccacagg

SEQ ID NO: 5708411 - DNA, 25 bp, Homo sapien
gttggatacagataccagcttgcct

SEQ ID NO: 5708412 - DNA, 25 bp, Homo sapien
agccgcccaagtatctgggaccaca

SEQ ID NO: 5708413 - DNA, 25 bp, Homo sapien
tgccaatactttgaattattttttc

SEQ ID NO: 5708414 - DNA, 25 bp, Homo sapien
acaggaaagcatcttcccttgccct

SEQ ID NO: 5708415 - DNA, 25 bp, Homo sapien
gtactgtgcttcctcagcagctggg

SEQ ID NO: 5708416 - DNA, 25 bp, Homo sapien
tgctgggatcacaggcgtgagccac

SEQ ID NO: 5708417 - DNA, 25 bp, Homo sapien
ctgctagtttgactttttataattg

SEQ ID NO: 5708418 - DNA, 25 bp, Homo sapien
gatgattgtccctggggaacagtaa

SEQ ID NO: 5708419 - DNA, 25 bp, Homo sapien
ttccttgggactggttttgctgtgg

SEQ ID NO: 5708420 - DNA, 25 bp, Homo sapien
agagtgagagccagggccctccacg

SEQ ID NO: 5708421 - DNA, 25 bp, Homo sapien
gggtcagaagagcttcatagaaagt

SEQ ID NO: 5708422 - DNA, 25 bp, Homo sapien
tggctatgccctgagatcagcgcta

SEQ ID NO: 5708423 - DNA, 25 bp, Homo sapien
aattaggccacggccctaaatagga

SEQ ID NO: 5708424 - DNA, 25 bp, Homo sapien
agctaatttattttttgtagagaca

SEQ ID NO: 5708425 - DNA, 25 bp, Homo sapien
tgaccaggttggtctcgaactcctg

SEQ ID NO: 5708426 - DNA, 25 bp, Homo sapien
cccagttcttgcacaccgctttctg

SEQ ID NO: 5708427 - DNA, 25 bp, Homo sapien
gtggaggaggccctgcaccagctgc

SEQ ID NO: 5708428 - DNA, 25 bp, Homo sapien
gtagccacagacatgctgtgtttac

SEQ ID NO: 5708429 - DNA, 25 bp, Homo sapien
tcagagtgagagccagggccctcca

SEQ ID NO: 5708430 - DNA, 25 bp, Homo sapien
caaaaaggcattgggatgaacgagc

SEQ ID NO: 5708431 - DNA, 25 bp, Homo sapien
gtgaacacccagaacttccagtcac

SEQ ID NO: 5708432 - DNA, 25 bp, Homo sapien
gccaggcacaacatcatatgcctgc

SEQ ID NO: 5708433 - DNA, 25 bp, Homo sapien
taccaatgtttgctgtttaaattgc

SEQ ID NO: 5708434 - DNA, 25 bp, Homo sapien
agcccactgctagtttgacttttta

SEQ ID NO: 5708435 - DNA, 25 bp, Homo sapien
cagttcttgcacaccgctttctgtt

SEQ ID NO: 5708436 - DNA, 25 bp, Homo sapien
aacatatttctttgcactgaggcct

SEQ ID NO: 5708437 - DNA, 25 bp, Homo sapien
tctctccctgaagcataaggatctg

SEQ ID NO: 5708438 - DNA, 25 bp, Homo sapien
ttggtctcgaactcctgggctcaag

SEQ ID NO: 5708439 - DNA, 25 bp, Homo sapien
tgggcggctgaggcagtgcccacag

SEQ ID NO: 5708440 - DNA, 25 bp, Homo sapien
tttttaagaatgccttaatccaggg

SEQ ID NO: 5708441 - DNA, 25 bp, Homo sapien
cgtgttggaacaagtctaagctggt

SEQ ID NO: 5708442 - DNA, 25 bp, Homo sapien
atgaacactgataccatggagagga

SEQ ID NO: 5708443 - DNA, 25 bp, Homo sapien
gcaataccaatcccatcaaggcaag

SEQ ID NO: 5708444 - DNA, 25 bp, Homo sapien
gtgcagctggtgcagggcctcctcc

SEQ ID NO: 5708445 - DNA, 25 bp, Homo sapien
tagcctgttttgcccaactttctat

SEQ ID NO: 5708446 - DNA, 25 bp, Homo sapien
tgggcgcagtggctcacgcctgtga

SEQ ID NO: 5708447 - DNA, 25 bp, Homo sapien
tttgtgggcctcagccatgtcccgg

SEQ ID NO: 5708448 - DNA, 25 bp, Homo sapien
gctcatggcctctttgtgggcctca

SEQ ID NO: 5708449 - DNA, 25 bp, Homo sapien
catttccgtatccacagcagcaagg

SEQ ID NO: 5708450 - DNA, 25 bp, Homo sapien
caacctggtcaacacagggagaccc

SEQ ID NO: 5708451 - DNA, 25 bp, Homo sapien
cgctctgcctcgcttcctcgtcgga

SEQ ID NO: 5708452 - DNA, 25 bp, Homo sapien
ccacaatctcatcatccacttgcag

SEQ ID NO: 5708453 - DNA, 25 bp, Homo sapien
agggtcataagaaattcagctgggg

SEQ ID NO: 5708454 - DNA, 25 bp, Homo sapien
ctgcccagcgtgttggaacaagtct

SEQ ID NO: 5708455 - DNA, 25 bp, Homo sapien
cagtgaaccttgatcacgacactgc

SEQ ID NO: 5708456 - DNA, 25 bp, Homo sapien
ttcctatccatacctcagcggttta

SEQ ID NO: 5708457 - DNA, 25 bp, Homo sapien
ctggcagaactgccaaaacagaaag

SEQ ID NO: 5708458 - DNA, 25 bp, Homo sapien
gcatcagctcctggacgtcgctgac

SEQ ID NO: 5708459 - DNA, 25 bp, Homo sapien
aggaggttcaattataaaaagtcaa

SEQ ID NO: 5708460 - DNA, 25 bp, Homo sapien
ctgccaatgttatgcagtgactgga

SEQ ID NO: 5708461 - DNA, 25 bp, Homo sapien
aactccacaatctcatcatccactt

SEQ ID NO: 5708462 - DNA, 25 bp, Homo sapien
actgataccatggagaggaaaaaat

SEQ ID NO: 5708463 - DNA, 25 bp, Homo sapien
tccagagacccggctcccgggctag

SEQ ID NO: 5708464 - DNA, 25 bp, Homo sapien
taatttgtgaaagaggccaagccta

SEQ ID NO: 5708465 - DNA, 25 bp, Homo sapien
ctgccctctggtgggttcctaaaga

SEQ ID NO: 5708466 - DNA, 25 bp, Homo sapien
cccaggagttcgagaccaacctggt

SEQ ID NO: 5708467 - DNA, 25 bp, Homo sapien
agccaggaggttcaattataaaaag

SEQ ID NO: 5708468 - DNA, 25 bp, Homo sapien
gcttctatctcctccttgcgccgca

SEQ ID NO: 5708469 - DNA, 25 bp, Homo sapien
cggtttacaaaatagcgctgatctc

SEQ ID NO: 5708470 - DNA, 25 bp, Homo sapien
cagggagattacactggtgggccac

SEQ ID NO: 5708471 - DNA, 25 bp, Homo sapien
aagcctccaggctttccctgttctc

SEQ ID NO: 5708472 - DNA, 25 bp, Homo sapien
ggtcaacacagggagaccctgtctc

SEQ ID NO: 5708473 - DNA, 25 bp, Homo sapien
cttgggcggctgaggcagtgcccac

SEQ ID NO: 5708474 - DNA, 25 bp, Homo sapien
tttccgtatccacagcagcaaggcc

SEQ ID NO: 5708475 - DNA, 25 bp, Homo sapien
gctgaggcagtgcccacagcgtcaa

SEQ ID NO: 5708476 - DNA, 25 bp, Homo sapien
tgcacgcctgtggtcccagatactt

SEQ ID NO: 5708477 - DNA, 25 bp, Homo sapien
ccccagggacaatcatctttgcaga

SEQ ID NO: 5708478 - DNA, 25 bp, Homo sapien
ccagtcgaccgtaactacggctccg

SEQ ID NO: 5708479 - DNA, 25 bp, Homo sapien
acgccggcctgcgaggagcctccgc

SEQ ID NO: 5708480 - DNA, 25 bp, Homo sapien
tggccctgacagcccagctgctgag

SEQ ID NO: 5708481 - DNA, 25 bp, Homo sapien
gtcaaactagcagtgggctgggcgc

SEQ ID NO: 5708482 - DNA, 25 bp, Homo sapien
gctttggaattgagtgtgagaacct

SEQ ID NO: 5708483 - DNA, 25 bp, Homo sapien
cctggctctcactctgacccagttt

SEQ ID NO: 5708484 - DNA, 25 bp, Homo sapien
tcgcgagcgtgcagctggtgcaggg

SEQ ID NO: 5708485 - DNA, 25 bp, Homo sapien
atgatgttgtgcctggcggtgcgga

SEQ ID NO: 5708486 - DNA, 25 bp, Homo sapien
tggtaaacacagcatgtctgtggct

SEQ ID NO: 5708487 - DNA, 25 bp, Homo sapien
cgccgcatcagctcctggacgtcgc

SEQ ID NO: 5708488 - DNA, 25 bp, Homo sapien
gctggggtgacaacagggtcatatc

SEQ ID NO: 5708489 - DNA, 25 bp, Homo sapien
ttcttactagcgaagtgaaaggagc

SEQ ID NO: 5708490 - DNA, 25 bp, Homo sapien
tgtctctacaaaaaataaattagct

SEQ ID NO: 5708491 - DNA, 25 bp, Homo sapien
aattcaaagtattggcaggaatccc

SEQ ID NO: 5708492 - DNA, 25 bp, Homo sapien
atggctgtcaggtcaaatagagttt

SEQ ID NO: 5708493 - DNA, 25 bp, Homo sapien
caggagttcgagaccaacctggtca

SEQ ID NO: 5708494 - DNA, 25 bp, Homo sapien
ttttcaagaggtctgatctactcgt

SEQ ID NO: 5708495 - DNA, 25 bp, Homo sapien
aggaagctgacaggacaccacgctg

SEQ ID NO: 5708496 - DNA, 25 bp, Homo sapien
ggaagatgctttcctgttactgttc

SEQ ID NO: 5708497 - DNA, 25 bp, Homo sapien
ccagaggggaatacgtatggctgtc

SEQ ID NO: 5708498 - DNA, 25 bp, Homo sapien
tcacagtccaccagcggctcgttca

SEQ ID NO: 5708499 - DNA, 25 bp, Homo sapien
tctgtggctaccagaggggaatacg

SEQ ID NO: 5708500 - DNA, 25 bp, Homo sapien
cacagcaataccaatcccatcaagg

SEQ ID NO: 5708501 - DNA, 25 bp, Homo sapien
acgtatggctgtcaggtcaaataga

SEQ ID NO: 5708502 - DNA, 25 bp, Homo sapien
actgttccccagggacaatcatctt

SEQ ID NO: 5708503 - DNA, 25 bp, Homo sapien
gactttgcaattgctagcctgtttt

SEQ ID NO: 5708504 - DNA, 25 bp, Homo sapien
ataggaaggctttggaattgagtgt

SEQ ID NO: 5708505 - DNA, 25 bp, Homo sapien
gcaggaatccctgagaaccatttta

SEQ ID NO: 5708506 - DNA, 25 bp, Homo sapien
ccttgatctgcgcttctatctcctc

SEQ ID NO: 5708507 - DNA, 25 bp, Homo sapien
aaagggagctactatggccctgaca

SEQ ID NO: 5708508 - DNA, 25 bp, Homo sapien
aataccaatcccatcaaggcaagct

SEQ ID NO: 5708509 - DNA, 25 bp, Homo sapien
ggtcatatcagcactgtaaaactct

SEQ ID NO: 5708510 - DNA, 25 bp, Homo sapien
tcaaatagagtttgagggaattcgc

SEQ ID NO: 5708511 - DNA, 25 bp, Homo sapien
tttgagggaattcgcccaataggaa

SEQ ID NO: 5708512 - DNA, 25 bp, Homo sapien
actctgacccagtttgcggctcatg

SEQ ID NO: 5708513 - DNA, 25 bp, Homo sapien
aggcagtgcccacagcgtcaaggct

SEQ ID NO: 5708514 - DNA, 25 bp, Homo sapien
tttgggagggtcataagaaattcag

SEQ ID NO: 5708515 - DNA, 25 bp, Homo sapien
agcaagaccttgtctccagaaaaca

SEQ ID NO: 5708516 - DNA, 25 bp, Homo sapien
ctccaggctttccctgttctccaaa

SEQ ID NO: 5708517 - DNA, 25 bp, Homo sapien
ctgagaaccattttaccatcttaaa

SEQ ID NO: 5708518 - DNA, 25 bp, Homo sapien
ttttttttaactgggcaagctgtgt

SEQ ID NO: 5708519 - DNA, 25 bp, Homo sapien
ggcctctttgtgggcctcagccatg

SEQ ID NO: 5708520 - DNA, 25 bp, Homo sapien
gatccttatgcttcagggagagaag

SEQ ID NO: 5708521 - DNA, 25 bp, Homo sapien
cttcatcactgccttgtgatcattc

SEQ ID NO: 5708522 - DNA, 25 bp, Homo sapien
aagcacagtacttaaccatttccgt

SEQ ID NO: 5708523 - DNA, 25 bp, Homo sapien
tactcgttcctatccatacctcagc

SEQ ID NO: 5708524 - DNA, 25 bp, Homo sapien
ataccatggagaggaaaaaataatt

SEQ ID NO: 5708525 - DNA, 25 bp, Homo sapien
tgtctgtggctaccagaggggaata

SEQ ID NO: 5708526 - DNA, 25 bp, Homo sapien
gcatagccaggaggttcaattataa

SEQ ID NO: 5708527 - DNA, 25 bp, Homo sapien
aatttaaacagcaaacattggtaaa

SEQ ID NO: 5708528 - DNA, 25 bp, Homo sapien
ccgcatcagctcctggacgtcgctg

SEQ ID NO: 5708529 - DNA, 25 bp, Homo sapien
tgttcacagagccgaactccacaat

SEQ ID NO: 5708530 - DNA, 25 bp, Homo sapien
gaacactgataccatggagaggaaa

SEQ ID NO: 5708531 - DNA, 25 bp, Homo sapien
gcccagcgtgttggaacaagtctaa

SEQ ID NO: 5708532 - DNA, 25 bp, Homo sapien
ataaattagctatgcatggtggtgc

SEQ ID NO: 5708533 - DNA, 25 bp, Homo sapien
gttatgcagtgactggaagttctgg

SEQ ID NO: 5708534 - DNA, 25 bp, Homo sapien
gaggagcctccgctctgcctcgctt

SEQ ID NO: 5708535 - DNA, 25 bp, Homo sapien
ccaaccacagcaaaaccagtcccaa

SEQ ID NO: 5708536 - DNA, 25 bp, Homo sapien
acaatccagggaattcctatttagg

SEQ ID NO: 5708537 - DNA, 25 bp, Homo sapien
tgtgggcctcagccatgtcccgggc

SEQ ID NO: 5708538 - DNA, 25 bp, Homo sapien
tgagcccaggagttcgagaccaacc

SEQ ID NO: 5708539 - DNA, 25 bp, Homo sapien
cacgtctgaccgggggtagccctca

SEQ ID NO: 5708540 - DNA, 25 bp, Homo sapien
acagcccagctgctgaggaagcaca

SEQ ID NO: 5708541 - DNA, 25 bp, Homo sapien
accccatctgagctttggtttggga

SEQ ID NO: 5708542 - DNA, 25 bp, Homo sapien
tggaattgagtgtgagaacctgtgg

SEQ ID NO: 5708543 - DNA, 25 bp, Homo sapien
ttgctagcctgttttgcccaacttt

SEQ ID NO: 5708544 - DNA, 25 bp, Homo sapien
ctaaagaggaagctgacaggacacc

SEQ ID NO: 5708545 - DNA, 25 bp, Homo sapien
gcagctggtgcagggcctcctccac

SEQ ID NO: 5708546 - DNA, 25 bp, Homo sapien
gcctcctccacctgcttcatcactg

SEQ ID NO: 5708547 - DNA, 25 bp, Homo sapien
agttggccttgatctgcgcttctat

SEQ ID NO: 5708548 - DNA, 25 bp, Homo sapien
gggaattcctatttagggccgtggc

SEQ ID NO: 5708549 - DNA, 25 bp, Homo sapien
cagggaattcctatttagggccgtg

SEQ ID NO: 5708550 - DNA, 25 bp, Homo sapien
agggacaatcatctttgcagaggaa

SEQ ID NO: 5708551 - DNA, 25 bp, Homo sapien
ggtccacgtctgaccgggggtagcc

SEQ ID NO: 5708552 - DNA, 25 bp, Homo sapien
tccttgcgccgcatcagctcctgga

SEQ ID NO: 5708553 - DNA, 25 bp, Homo sapien
gccctcacagtccaccagcggctcg

SEQ ID NO: 5708554 - DNA, 25 bp, Homo sapien
cactccagcctgggtgacaaagcaa

SEQ ID NO: 5708555 - DNA, 25 bp, Homo sapien
aaagaggaagctgacaggacaccac

SEQ ID NO: 5708556 - DNA, 25 bp, Homo sapien
ggaagttctgggtgttcacagagcc

SEQ ID NO: 5708557 - DNA, 25 bp, Homo sapien
ccagcggctcgttcatcccaatgcc

SEQ ID NO: 5708558 - DNA, 25 bp, Homo sapien
tcatggcctctttgtgggcctcagc

SEQ ID NO: 5708559 - DNA, 25 bp, Homo sapien
attagctatgcatggtggtgcacgc

SEQ ID NO: 5708560 - DNA, 25 bp, Homo sapien
gcttgcctggcagaactgccaaaac

SEQ ID NO: 5708561 - DNA, 25 bp, Homo sapien
cgaactccacaatctcatcatccac

SEQ ID NO: 5708562 - DNA, 25 bp, Homo sapien
tgaaccccgggccgcgactccagag

SEQ ID NO: 5708563 - DNA, 25 bp, Homo sapien
tgatgctgttcactttggcgaaggc

SEQ ID NO: 5708564 - DNA, 25 bp, Homo sapien
ctgttttgcccaactttctatgaag

SEQ ID NO: 5708565 - DNA, 25 bp, Homo sapien
gacgccccagtcgaccgtaactacg

SEQ ID NO: 5708566 - DNA, 25 bp, Homo sapien
ttgcagcccagcagtccttttcctg

SEQ ID NO: 5708567 - DNA, 25 bp, Homo sapien
ggtgcacgcctgtggtcccagatac

SEQ ID NO: 5708568 - DNA, 25 bp, Homo sapien
ccagggcaagggaagatgctttcct

SEQ ID NO: 5708569 - DNA, 25 bp, Homo sapien
ggaaaatacgtggaattagaacatg

SEQ ID NO: 5708570 - DNA, 25 bp, Homo sapien
cgggcctgcttctccttgtcgcgag

SEQ ID NO: 5708571 - DNA, 25 bp, Homo sapien
ggcggtgcggacttggtacaggtcc

SEQ ID NO: 5708572 - DNA, 25 bp, Homo sapien
gcagcaaggcctcagtgcaaagaaa

SEQ ID NO: 5708573 - DNA, 25 bp, Homo sapien
tggctaccagaggggaatacgtatg

SEQ ID NO: 5708574 - DNA, 25 bp, Homo sapien
ctggaaaatacgtggaattagaaca

SEQ ID NO: 5708575 - DNA, 25 bp, Homo sapien
ctagacccaagtccagggcaaggga

SEQ ID NO: 5708576 - DNA, 25 bp, Homo sapien
aatgttgcagcccagcagtcctttt

SEQ ID NO: 5708577 - DNA, 25 bp, Homo sapien
cagctgctgaggaagcacagtactt

SEQ ID NO: 5708578 - DNA, 25 bp, Homo sapien
ccaatcccatcaaggcaagctggta

SEQ ID NO: 5708579 - DNA, 25 bp, Homo sapien
gtgaaagaggccaagcctaagtttt

SEQ ID NO: 5708580 - DNA, 25 bp, Homo sapien
aatagcgctgatctcagggcatagc

SEQ ID NO: 5708581 - DNA, 25 bp, Homo sapien
ctccacaatctcatcatccacttgc

SEQ ID NO: 5708582 - DNA, 25 bp, Homo sapien
gctatgcatggtggtgcacgcctgt

SEQ ID NO: 5708583 - DNA, 25 bp, Homo sapien
aggaggactgcttgagcccaggagt

SEQ ID NO: 5708584 - DNA, 25 bp, Homo sapien
tgggtgacaaagcaagaccttgtct

SEQ ID NO: 5708585 - DNA, 25 bp, Homo sapien
ggagctactatggccctgacagccc

SEQ ID NO: 5708586 - DNA, 25 bp, Homo sapien
gttttgcccaactttctatgaagct

SEQ ID NO: 5708587 - DNA, 25 bp, Homo sapien
gaagaataagcattttcaagaggtc

SEQ ID NO: 5708588 - DNA, 25 bp, Homo sapien
atacgtatggctgtcaggtcaaata

SEQ ID NO: 5708589 - DNA, 25 bp, Homo sapien
ggaagcctccaggctttccctgttc

SEQ ID NO: 5708590 - DNA, 25 bp, Homo sapien
gcatatgatgttgtgcctggcggtg

SEQ ID NO: 5708591 - DNA, 25 bp, Homo sapien
gaataatgttgcagcccagcagtcc

SEQ ID NO: 5708592 - DNA, 25 bp, Homo sapien
cccctgcggatcactgtcacattca

SEQ ID NO: 5708593 - DNA, 25 bp, Homo sapien
gtttacaaaatagcgctgatctcag

SEQ ID NO: 5708594 - DNA, 25 bp, Homo sapien
aacacagggagaccctgtctctaca

SEQ ID NO: 5708595 - DNA, 25 bp, Homo sapien
ttcactttggcgaaggcccgtggag

SEQ ID NO: 5708596 - DNA, 25 bp, Homo sapien
ttaactgggcaagctgtgtttatta

SEQ ID NO: 5708597 - DNA, 25 bp, Homo sapien
tttccctgttctccaaagggagcta

SEQ ID NO: 5708598 - DNA, 25 bp, Homo sapien
cactgccaatgttatgcagtgactg

SEQ ID NO: 5708599 - DNA, 25 bp, Homo sapien
tcgttcatcccaatgcctttttggc

SEQ ID NO: 5708600 - DNA, 25 bp, Homo sapien
cagtgactggaagttctgggtgttc

SEQ ID NO: 5708601 - DNA, 25 bp, Homo sapien
aagtgaaaggagcttgctgccctct

SEQ ID NO: 5708602 - DNA, 25 bp, Homo sapien
atctcctccttgcgccgcatcagct

SEQ ID NO: 5708603 - DNA, 25 bp, Homo sapien
tcctatttagggccgtggcctaatt

SEQ ID NO: 5708604 - DNA, 25 bp, Homo sapien
cgggctagggacgacgccccagtcg

SEQ ID NO: 5708605 - DNA, 25 bp, Homo sapien
ttgatctgcgcttctatctcctcct

SEQ ID NO: 5708606 - DNA, 25 bp, Homo sapien
tgatctcagggcatagccaggaggt

SEQ ID NO: 5708607 - DNA, 25 bp, Homo sapien
cagtgcaaagaaatatgttggtcaa

SEQ ID NO: 5708608 - DNA, 25 bp, Homo sapien
gaggaagcacagtacttaaccattt

SEQ ID NO: 5708609 - DNA, 25 bp, Homo sapien
gcctgttttgcccaactttctatga

SEQ ID NO: 5708610 - DNA, 25 bp, Homo sapien
acaccacgctgggccacctgggaag

SEQ ID NO: 5708611 - DNA, 25 bp, Homo sapien
ctgacagtcacgacgccggcctgcg

SEQ ID NO: 5708612 - DNA, 25 bp, Homo sapien
tggcaggaatccctgagaaccattt

SEQ ID NO: 5708613 - DNA, 25 bp, Homo sapien
ggcctaatttgtgaaagaggccaag

SEQ ID NO: 5708614 - DNA, 25 bp, Homo sapien
gagaggaaaaaataattcaaagtat

SEQ ID NO: 5708615 - DNA, 25 bp, Homo sapien
accacactgccaatgttatgcagtg

SEQ ID NO: 5708616 - DNA, 25 bp, Homo sapien
gtgggttcctaaagaggaagctgac

SEQ ID NO: 5708617 - DNA, 25 bp, Homo sapien
gtatggctgtcaggtcaaatagagt

SEQ ID NO: 5708618 - DNA, 25 bp, Homo sapien
tttgcggctcatggcctctttgtgg

SEQ ID NO: 5708619 - DNA, 25 bp, Homo sapien
aaacattggtaaacacagcatgtct

SEQ ID NO: 5708620 - DNA, 25 bp, Homo sapien
cgtgaaccccgggccgcgactccag

SEQ ID NO: 5708621 - DNA, 25 bp, Homo sapien
cctccttgcgccgcatcagctcctg

SEQ ID NO: 5708622 - DNA, 25 bp, Homo sapien
gggcctcctccacctgcttcatcac

SEQ ID NO: 5708623 - DNA, 25 bp, Homo sapien
tcatcccaatgcctttttggctttc

SEQ ID NO: 5708624 - DNA, 25 bp, Homo sapien
gtgcctggcggtgcggacttggtac

SEQ ID NO: 5708625 - DNA, 25 bp, Homo sapien
atagccaggaggttcaattataaaa

SEQ ID NO: 5708626 - DNA, 25 bp, Homo sapien
tccacctgcttcatcactgccttgt

SEQ ID NO: 5708627 - DNA, 25 bp, Homo sapien
tgagtgtgagaacctgtggctggaa

SEQ ID NO: 5708628 - DNA, 25 bp, Homo sapien
ttggccttgatctgcgcttctatct

SEQ ID NO: 5708629 - DNA, 25 bp, Homo sapien
tgctgccctctggtgggttcctaaa

SEQ ID NO: 5708630 - DNA, 25 bp, Homo sapien
gcctggcagaactgccaaaacagaa

SEQ ID NO: 5708631 - DNA, 25 bp, Homo sapien
gtgcggacttggtacaggtccacgt

SEQ ID NO: 5708632 - DNA, 25 bp, Homo sapien
aagacaagttggaaatccctagacc

SEQ ID NO: 5708633 - DNA, 25 bp, Homo sapien
atcgtgaaccccgggccgcgactcc

SEQ ID NO: 5708634 - DNA, 25 bp, Homo sapien
tgcccaactttctatgaagctcttc

SEQ ID NO: 5708635 - DNA, 25 bp, Homo sapien
cagatccttatgcttcagggagaga

SEQ ID NO: 5708636 - DNA, 25 bp, Homo sapien
aggcctcagtgcaaagaaatatgtt

SEQ ID NO: 5708637 - DNA, 25 bp, Homo sapien
cggggctgatgctgttcactttggc

SEQ ID NO: 5708638 - DNA, 25 bp, Homo sapien
gccgaactccacaatctcatcatcc

SEQ ID NO: 5708639 - DNA, 25 bp, Homo sapien
cctgcttctccttgtcgcgagcgtg

SEQ ID NO: 5708640 - DNA, 25 bp, Homo sapien
cagtcacgacgccggcctgcgagga

SEQ ID NO: 5708641 - DNA, 25 bp, Homo sapien
cctccgctctgcctcgcttcctcgt

SEQ ID NO: 5708642 - DNA, 25 bp, Homo sapien
tcatcactgccttgtgatcattctg

SEQ ID NO: 5708643 - DNA, 25 bp, Homo sapien
ccatgtcccgggcctgcttctcctt

SEQ ID NO: 5708644 - DNA, 25 bp, Homo sapien
ggccgtggcctaatttgtgaaagag

SEQ ID NO: 5708645 - DNA, 25 bp, Homo sapien
aatcatctttgcagaggaataatgt

SEQ ID NO: 5708646 - DNA, 25 bp, Homo sapien
ttcaaagtattggcaggaatccctg

SEQ ID NO: 5708647 - DNA, 25 bp, Homo sapien
agctttggtttgggagggtcataag

SEQ ID NO: 5708648 - DNA, 25 bp, Homo sapien
acactgcactccagcctgggtgaca

SEQ ID NO: 5708649 - DNA, 25 bp, Homo sapien
tcctgcccagcgtgttggaacaagt

SEQ ID NO: 5708650 - DNA, 25 bp, Homo sapien
atcagctcctggacgtcgctgacag

SEQ ID NO: 5708651 - DNA, 25 bp, Homo sapien
ccagcacgtcatagttggccttgat

SEQ ID NO: 5708652 - DNA, 25 bp, Homo sapien
tgtggtcccagatacttgggcggct

SEQ ID NO: 5708653 - DNA, 25 bp, Homo sapien
tcctcgtcggacatcgtgaaccccg

SEQ ID NO: 5708654 - DNA, 25 bp, Homo sapien
tgatcccagcactttaggaggccaa

SEQ ID NO: 5708655 - DNA, 25 bp, Homo sapien
gttggtcaaagcctgactttgcaat

SEQ ID NO: 5708656 - DNA, 25 bp, Homo sapien
attggtaaacacagcatgtctgtgg

SEQ ID NO: 5708657 - DNA, 25 bp, Homo sapien
actttctatgaagctcttctgaccc

SEQ ID NO: 5708658 - DNA, 25 bp, Homo sapien
cgacactgcactccagcctgggtga

SEQ ID NO: 5708659 - DNA, 25 bp, Homo sapien
tggtcaaagcctgactttgcaattg

SEQ ID NO: 5708660 - DNA, 25 bp, Homo sapien
taccagaggggaatacgtatggctg

SEQ ID NO: 5708661 - DNA, 25 bp, Homo sapien
acgacgccccagtcgaccgtaacta

SEQ ID NO: 5708662 - DNA, 25 bp, Homo sapien
gtatctgtatccaaccacagcaaaa

SEQ ID NO: 5708663 - DNA, 25 bp, Homo sapien
ccaaggaacacagggcttgcctggc

SEQ ID NO: 5708664 - DNA, 25 bp, Homo sapien
tgcggatcactgtcacattcagggg

SEQ ID NO: 5708665 - DNA, 25 bp, Homo sapien
tctcatcatccacttgcagacccgc

SEQ ID NO: 5708666 - DNA, 25 bp, Homo sapien
gaggaaaaaataattcaaagtattg

SEQ ID NO: 5708667 - DNA, 25 bp, Homo sapien
cctcactgtgctgcaccacactgcc

SEQ ID NO: 5708668 - DNA, 25 bp, Homo sapien
atgaagctcttctgaccccatctga

SEQ ID NO: 5708669 - DNA, 25 bp, Homo sapien
tcccaaggaacacagggcttgcctg

SEQ ID NO: 5708670 - DNA, 25 bp, Homo sapien
gcctcgcttcctcgtcggacatcgt

SEQ ID NO: 5708671 - DNA, 25 bp, Homo sapien
cctgtctctacaaaaaataaattag

SEQ ID NO: 5708672 - DNA, 25 bp, Homo sapien
ccaggctttccctgttctccaaagg

SEQ ID NO: 5708673 - DNA, 25 bp, Homo sapien
accaacctggtcaacacagggagac

SEQ ID NO: 5708674 - DNA, 25 bp, Homo sapien
agttcgagaccaacctggtcaacac

SEQ ID NO: 5708675 - DNA, 25 bp, Homo sapien
agcacacagcaataccaatcccatc

SEQ ID NO: 5708676 - DNA, 25 bp, Homo sapien
tacaaaaaataaattagctatgcat

SEQ ID NO: 5708677 - DNA, 25 bp, Homo sapien
tgttccccagggacaatcatctttg

SEQ ID NO: 5708678 - DNA, 25 bp, Homo sapien
gggccctggctctcactctgaccca

SEQ ID NO: 5708679 - DNA, 25 bp, Homo sapien
tgaccccatctgagctttggtttgg

SEQ ID NO: 5708680 - DNA, 25 bp, Homo sapien
actgccaaaacagaaagcggtgtgc

SEQ ID NO: 5708681 - DNA, 25 bp, Homo sapien
acaatctcatcatccacttgcagac

SEQ ID NO: 5708682 - DNA, 25 bp, Homo sapien
gcctcttccagatccttatgcttca

SEQ ID NO: 5708683 - DNA, 25 bp, Homo sapien
tgccttaatccagggagattacact

SEQ ID NO: 5708684 - DNA, 25 bp, Homo sapien
ggagcttgctgccctctggtgggtt

SEQ ID NO: 5708685 - DNA, 25 bp, Homo sapien
acccaagtccagggcaagggaagat

SEQ ID NO: 5708686 - DNA, 25 bp, Homo sapien
gagactggaaaatacgtggaattag

SEQ ID NO: 5708687 - DNA, 25 bp, Homo sapien
ggcgaaggcccgtggagggccctgg

SEQ ID NO: 5708688 - DNA, 25 bp, Homo sapien
aggcatatgatgttgtgcctggcgg

SEQ ID NO: 5708689 - DNA, 25 bp, Homo sapien
ttctccaaagggagctactatggcc

SEQ ID NO: 5708690 - DNA, 25 bp, Homo sapien
ccctgagaaccattttaccatctta

SEQ ID NO: 5708691 - DNA, 25 bp, Homo sapien
agttggaaatccctagacccaagtc

SEQ ID NO: 5708692 - DNA, 25 bp, Homo sapien
cacagaagttcaggttacaagcctc

SEQ ID NO: 5708693 - DNA, 25 bp, Homo sapien
ggtgtgcaagaactggggaaatgaa

SEQ ID NO: 5708694 - DNA, 25 bp, Homo sapien
atgttatgcagtgactggaagttct

SEQ ID NO: 5708695 - DNA, 25 bp, Homo sapien
agaaatatgttggtcaaagcctgac

SEQ ID NO: 5708696 - DNA, 25 bp, Homo sapien
tagccctcacagtccaccagcggct

SEQ ID NO: 5708697 - DNA, 25 bp, Homo sapien
tgttactgttccccagggacaatca

SEQ ID NO: 5708698 - DNA, 25 bp, Homo sapien
accatcttaaaagagacaaaaaata

SEQ ID NO: 5708699 - DNA, 25 bp, Homo sapien
cacgctgggccacctgggaagcctc

SEQ ID NO: 5708700 - DNA, 25 bp, Homo sapien
tgcggctcatggcctctttgtgggc

SEQ ID NO: 5708701 - DNA, 25 bp, Homo sapien
gagccgaactccacaatctcatcat

SEQ ID NO: 5708702 - DNA, 25 bp, Homo sapien
tagcgctgatctcagggcatagcca

SEQ ID NO: 5708703 - DNA, 25 bp, Homo sapien
atgtcccgggcctgcttctccttgt

SEQ ID NO: 5708704 - DNA, 25 bp, Homo sapien
tgcagggcctcctccacctgcttca

SEQ ID NO: 5708705 - DNA, 25 bp, Homo sapien
cgtggagggccctggctctcactct

SEQ ID NO: 5708706 - DNA, 25 bp, Homo sapien
caaggcaggaggactgcttgagccc

SEQ ID NO: 5708707 - DNA, 25 bp, Homo sapien
acccagtttgcggctcatggcctct

SEQ ID NO: 5708708 - DNA, 25 bp, Homo sapien
ttccagcacgtcatagttggccttg

SEQ ID NO: 5708709 - DNA, 25 bp, Homo sapien
ttacaaaatagcgctgatctcaggg

SEQ ID NO: 5708710 - DNA, 25 bp, Homo sapien
cttctccttgtcgcgagcgtgcagc

SEQ ID NO: 5708711 - DNA, 25 bp, Homo sapien
ggacgacgccccagtcgaccgtaac

SEQ ID NO: 5708712 - DNA, 25 bp, Homo sapien
agggagctactatggccctgacagc

SEQ ID NO: 5708713 - DNA, 25 bp, Homo sapien
tttaggaggccaaggcaggaggact

SEQ ID NO: 5708714 - DNA, 25 bp, Homo sapien
ccgtggcctaatttgtgaaagaggc

SEQ ID NO: 5708715 - DNA, 25 bp, Homo sapien
tcccatcaaggcaagctggtatctg

SEQ ID NO: 5708716 - DNA, 25 bp, Homo sapien
atcccagcactttaggaggccaagg

SEQ ID NO: 5708717 - DNA, 25 bp, Homo sapien
tcctaaagaggaagctgacaggaca

SEQ ID NO: 5708718 - DNA, 25 bp, Homo sapien
gaccctgtctctacaaaaaataaat

SEQ ID NO: 5708719 - DNA, 25 bp, Homo sapien
gcctccaggctttccctgttctcca

SEQ ID NO: 5708720 - DNA, 25 bp, Homo sapien
cccaatgcctttttggctttccagc

SEQ ID NO: 5708721 - DNA, 25 bp, Homo sapien
actgtcacattcaggggcttcccct

SEQ ID NO: 5708722 - DNA, 25 bp, Homo sapien
gcccacaatccagggaattcctatt

SEQ ID NO: 5708723 - DNA, 25 bp, Homo sapien
cactttggcgaaggcccgtggaggg

SEQ ID NO: 5708724 - DNA, 25 bp, Homo sapien
gcaggcatatgatgttgtgcctggc

SEQ ID NO: 5708725 - DNA, 25 bp, Homo sapien
ttccccagggacaatcatctttgca

SEQ ID NO: 5708726 - DNA, 25 bp, Homo sapien
gatacttgggcggctgaggcagtgc

SEQ ID NO: 5708727 - DNA, 25 bp, Homo sapien
tctcactctgacccagtttgcggct

SEQ ID NO: 5708728 - DNA, 25 bp, Homo sapien
gcgctgatctcagggcatagccagg

SEQ ID NO: 5708729 - DNA, 25 bp, Homo sapien
gctgttcactttggcgaaggcccgt

SEQ ID NO: 5708730 - DNA, 25 bp, Homo sapien
gtcaaagcctgactttgcaattgct

SEQ ID NO: 5708731 - DNA, 25 bp, Homo sapien
agcgaagtgaaaggagcttgctgcc

SEQ ID NO: 5708732 - DNA, 25 bp, Homo sapien
aaatatgttggtcaaagcctgactt

SEQ ID NO: 5708733 - DNA, 25 bp, Homo sapien
ggttcaattataaaaagtcaaacta

SEQ ID NO: 5708734 - DNA, 25 bp, Homo sapien
gtctgagactttataaaagagactg

SEQ ID NO: 5708735 - DNA, 25 bp, Homo sapien
ccttaatccagggagattacactgg

SEQ ID NO: 5708736 - DNA, 25 bp, Homo sapien
ccaaaacagaaagcggtgtgcaaga

SEQ ID NO: 5708737 - DNA, 25 bp, Homo sapien
ttcctgttactgttccccagggaca

SEQ ID NO: 5708738 - DNA, 25 bp, Homo sapien
ctgagactttataaaagagactgga

SEQ ID NO: 5708739 - DNA, 25 bp, Homo sapien
ttcagctggggtgacaacagggtca

SEQ ID NO: 5708740 - DNA, 25 bp, Homo sapien
ggcccgtggagggccctggctctca

SEQ ID NO: 5708741 - DNA, 25 bp, Homo sapien
ccagtcccaaggaacacagggcttg

SEQ ID NO: 5708742 - DNA, 25 bp, Homo sapien
tacctcagcggtttacaaaatagcg

SEQ ID NO: 5708743 - DNA, 25 bp, Homo sapien
tgtggctggaagcacacagcaatac

SEQ ID NO: 5708744 - DNA, 25 bp, Homo sapien
tccgctctgcctcgcttcctcgtcg

SEQ ID NO: 5708745 - DNA, 25 bp, Homo sapien
atcacgacactgcactccagcctgg

SEQ ID NO: 5708746 - DNA, 25 bp, Homo sapien
aaagcaagaccttgtctccagaaaa

SEQ ID NO: 5708747 - DNA, 25 bp, Homo sapien
ctgatctactcgttcctatccatac

SEQ ID NO: 5708748 - DNA, 25 bp, Homo sapien
gtactgccaccacacagaagttcag

SEQ ID NO: 5708749 - DNA, 25 bp, Homo sapien
cccaactttctatgaagctcttctg

SEQ ID NO: 5708750 - DNA, 25 bp, Homo sapien
gaaagcggtgtgcaagaactgggga

SEQ ID NO: 5708751 - DNA, 25 bp, Homo sapien
ctcgtcggacatcgtgaaccccggg

SEQ ID NO: 5708752 - DNA, 25 bp, Homo sapien
caagaactggggaaatgaacactga

SEQ ID NO: 5708753 - DNA, 25 bp, Homo sapien
tactagcgaagtgaaaggagcttgc

SEQ ID NO: 5708754 - DNA, 25 bp, Homo sapien
caccagtacctgccagaataacttc

SEQ ID NO: 5708755 - DNA, 25 bp, Homo sapien
ccacagcaaaaccagtcccaaggaa

SEQ ID NO: 5708756 - DNA, 25 bp, Homo sapien
gctctcactctgacccagtttgcgg

SEQ ID NO: 5708757 - DNA, 25 bp, Homo sapien
taataataatcacaccagtacctgc

SEQ ID NO: 5708758 - DNA, 25 bp, Homo sapien
aataagcattttcaagaggtctgat

SEQ ID NO: 5708759 - DNA, 25 bp, Homo sapien
ggacaatcatctttgcagaggaata

SEQ ID NO: 5708760 - DNA, 25 bp, Homo sapien
cttgtgatcattctgcaggcatatg

SEQ ID NO: 5708761 - DNA, 25 bp, Homo sapien
aatacgtggaattagaacatgcaat

SEQ ID NO: 5708762 - DNA, 25 bp, Homo sapien
agaactggggaaatgaacactgata

SEQ ID NO: 5708763 - DNA, 25 bp, Homo sapien
atcaaggcaagctggtatctgtatc

SEQ ID NO: 5708764 - DNA, 25 bp, Homo sapien
tatgcttcagggagagaagacaagt

SEQ ID NO: 5708765 - DNA, 25 bp, Homo sapien
tggctctcactctgacccagtttgc

SEQ ID NO: 5708766 - DNA, 25 bp, Homo sapien
ctctgcctcgcttcctcgtcggaca

SEQ ID NO: 5708767 - DNA, 25 bp, Homo sapien
atatgttggtcaaagcctgactttg

SEQ ID NO: 5708768 - DNA, 25 bp, Homo sapien
gcacagtacttaaccatttccgtat

SEQ ID NO: 5708769 - DNA, 25 bp, Homo sapien
ccagtttgcggctcatggcctcttt

SEQ ID NO: 5708770 - DNA, 25 bp, Homo sapien
tgcatggtggtgcacgcctgtggtc

SEQ ID NO: 5708771 - DNA, 25 bp, Homo sapien
agaatgccttaatccagggagatta

SEQ ID NO: 5708772 - DNA, 25 bp, Homo sapien
agcacgtcatagttggccttgatct

SEQ ID NO: 5708773 - DNA, 25 bp, Homo sapien
caagttggaaatccctagacccaag

SEQ ID NO: 5708774 - DNA, 25 bp, Homo sapien
taagctggtgtttttcccccctgcg

SEQ ID NO: 5708775 - DNA, 25 bp, Homo sapien
gggaatacgtatggctgtcaggtca

SEQ ID NO: 5708776 - DNA, 25 bp, Homo sapien
gggcttcccctcactgtgctgcacc

SEQ ID NO: 5708777 - DNA, 25 bp, Homo sapien
cctgggtgacaaagcaagaccttgt

SEQ ID NO: 5708778 - DNA, 25 bp, Homo sapien
caattataaaaagtcaaactagcag

SEQ ID NO: 5708779 - DNA, 25 bp, Homo sapien
acaagcctcttccagatccttatgc

SEQ ID NO: 5708780 - DNA, 25 bp, Homo sapien
cccacagcgtcaaggcttcagtgaa

SEQ ID NO: 5708781 - DNA, 25 bp, Homo sapien
cgatgctggctggggagccggggct

SEQ ID NO: 5708782 - DNA, 25 bp, Homo sapien
ggtacaggtccacgtctgaccgggg

SEQ ID NO: 5708783 - DNA, 25 bp, Homo sapien
cagagacccggctcccgggctaggg

SEQ ID NO: 5708784 - DNA, 25 bp, Homo sapien
gtccagggcaagggaagatgctttc

SEQ ID NO: 5708785 - DNA, 25 bp, Homo sapien
aaagaaatatgttggtcaaagcctg

SEQ ID NO: 5708786 - DNA, 25 bp, Homo sapien
ccgggccgcgactccagagacccgg

SEQ ID NO: 5708787 - DNA, 25 bp, Homo sapien
aataacttccgcccacttgcccaca

SEQ ID NO: 5708788 - DNA, 25 bp, Homo sapien
cgtcggacatcgtgaaccccgggcc

SEQ ID NO: 5708789 - DNA, 25 bp, Homo sapien
ctttggtttgggagggtcataagaa

SEQ ID NO: 5708790 - DNA, 25 bp, Homo sapien
tagtctgagactttataaaagagac

SEQ ID NO: 5708791 - DNA, 25 bp, Homo sapien
ccaaagggagctactatggccctga

SEQ ID NO: 5708792 - DNA, 25 bp, Homo sapien
atctttgcagaggaataatgttgca

SEQ ID NO: 5708793 - DNA, 25 bp, Homo sapien
taagcattttcaagaggtctgatct

SEQ ID NO: 5708794 - DNA, 25 bp, Homo sapien
tcatctttgcagaggaataatgttg

SEQ ID NO: 5708795 - DNA, 25 bp, Homo sapien
cacagcgtcaaggcttcagtgaacc

SEQ ID NO: 5708796 - DNA, 25 bp, Homo sapien
gcgtgcagctggtgcagggcctcct

SEQ ID NO: 5708797 - DNA, 25 bp, Homo sapien
cggatcactgtcacattcaggggct

SEQ ID NO: 5708798 - DNA, 25 bp, Homo sapien
ggaaatgaacactgataccatggag

SEQ ID NO: 5708799 - DNA, 25 bp, Homo sapien
gctttccctgttctccaaagggagc

SEQ ID NO: 5708800 - DNA, 25 bp, Homo sapien
tgaccgggggtagccctcacagtcc

SEQ ID NO: 5708801 - DNA, 25 bp, Homo sapien
aaatgaacactgataccatggagag

SEQ ID NO: 5708802 - DNA, 25 bp, Homo sapien
taccaatcccatcaaggcaagctgg

SEQ ID NO: 5708803 - DNA, 25 bp, Homo sapien
ctagcgaagtgaaaggagcttgctg

SEQ ID NO: 5708804 - DNA, 25 bp, Homo sapien
tctgagctttggtttgggagggtca

SEQ ID NO: 5708805 - DNA, 25 bp, Homo sapien
ctccagcctgggtgacaaagcaaga

SEQ ID NO: 5708806 - DNA, 25 bp, Homo sapien
cccatctgagctttggtttgggagg

SEQ ID NO: 5708807 - DNA, 25 bp, Homo sapien
atgcaatttaaacagcaaacattgg

SEQ ID NO: 5708808 - DNA, 25 bp, Homo sapien
ggggaaatgaacactgataccatgg

SEQ ID NO: 5708809 - DNA, 25 bp, Homo sapien
ctttgcaattgctagcctgttttgc

SEQ ID NO: 5708810 - DNA, 25 bp, Homo sapien
gggcatagccaggaggttcaattat

SEQ ID NO: 5708811 - DNA, 25 bp, Homo sapien
gccggggctgatgctgttcactttg

SEQ ID NO: 5708812 - DNA, 25 bp, Homo sapien
ttggcgaaggcccgtggagggccct

SEQ ID NO: 5708813 - DNA, 25 bp, Homo sapien
agaataacttccgcccacttgccca

SEQ ID NO: 5708814 - DNA, 25 bp, Homo sapien
gaaagaggccaagcctaagttttta

SEQ ID NO: 5708815 - DNA, 25 bp, Homo sapien
tgctgaggaagcacagtacttaacc

SEQ ID NO: 5708816 - DNA, 25 bp, Homo sapien
aagcctcttccagatccttatgctt

SEQ ID NO: 5708817 - DNA, 25 bp, Homo sapien
acttccgcccacttgcccacaatcc

SEQ ID NO: 5708818 - DNA, 25 bp, Homo sapien
cagctcctggacgtcgctgacagtc

SEQ ID NO: 5708819 - DNA, 25 bp, Homo sapien
gaaaggagcttgctgccctctggtg

SEQ ID NO: 5708820 - DNA, 25 bp, Homo sapien
agggaagatgctttcctgttactgt

SEQ ID NO: 5708821 - DNA, 25 bp, Homo sapien
agcagtgggctgggcgcagtggctc

SEQ ID NO: 5708822 - DNA, 25 bp, Homo sapien
attataaaaagtcaaactagcagtg

SEQ ID NO: 5708823 - DNA, 25 bp, Homo sapien
gagattacactggtgggccacagta

SEQ ID NO: 5708824 - DNA, 25 bp, Homo sapien
gcctgactttgcaattgctagcctg

SEQ ID NO: 5708825 - DNA, 25 bp, Homo sapien
aggccaaggcaggaggactgcttga

SEQ ID NO: 5708826 - DNA, 25 bp, Homo sapien
cccgcgatgctggctggggagccgg

SEQ ID NO: 5708827 - DNA, 25 bp, Homo sapien
tacttgggcggctgaggcagtgccc

SEQ ID NO: 5708828 - DNA, 25 bp, Homo sapien
tatggccctgacagcccagctgctg

SEQ ID NO: 5708829 - DNA, 25 bp, Homo sapien
ggagggtcataagaaattcagctgg

SEQ ID NO: 5708830 - DNA, 25 bp, Homo sapien
gcccacttgcccacaatccagggaa

SEQ ID NO: 5708831 - DNA, 25 bp, Homo sapien
gggctgatgctgttcactttggcga

SEQ ID NO: 5708832 - DNA, 25 bp, Homo sapien
ctatttagggccgtggcctaatttg

SEQ ID NO: 5708833 - DNA, 25 bp, Homo sapien
tgtgctgcaccacactgccaatgtt

SEQ ID NO: 5708834 - DNA, 25 bp, Homo sapien
ccacttgcccacaatccagggaatt

SEQ ID NO: 5708835 - DNA, 25 bp, Homo sapien
ggggtagccctcacagtccaccagc

SEQ ID NO: 5708836 - DNA, 25 bp, Homo sapien
agaataagcattttcaagaggtctg

SEQ ID NO: 5708837 - DNA, 25 bp, Homo sapien
ggttcttactagcgaagtgaaagga

SEQ ID NO: 5708838 - DNA, 25 bp, Homo sapien
cacagggagaccctgtctctacaaa

SEQ ID NO: 5708839 - DNA, 25 bp, Homo sapien
tgcaagaactggggaaatgaacact

SEQ ID NO: 5708840 - DNA, 25 bp, Homo sapien
gcggacttggtacaggtccacgtct

SEQ ID NO: 5708841 - DNA, 25 bp, Homo sapien
ggctcacgcctgtgatcccagcact

SEQ ID NO: 5708842 - DNA, 25 bp, Homo sapien
acactgataccatggagaggaaaaa

SEQ ID NO: 5708843 - DNA, 25 bp, Homo sapien
cctgcttcatcactgccttgtgatc

SEQ ID NO: 5708844 - DNA, 25 bp, Homo sapien
ccagcgtgttggaacaagtctaagc

SEQ ID NO: 5708845 - DNA, 25 bp, Homo sapien
ttcaagaggtctgatctactcgttc

SEQ ID NO: 5708846 - DNA, 25 bp, Homo sapien
gttctgggtgttcacagagccgaac

SEQ ID NO: 5708847 - DNA, 25 bp, Homo sapien
ggagttcgagaccaacctggtcaac

SEQ ID NO: 5708848 - DNA, 25 bp, Homo sapien
caactttctatgaagctcttctgac

SEQ ID NO: 5708849 - DNA, 25 bp, Homo sapien
acttggtacaggtccacgtctgacc

SEQ ID NO: 5708850 - DNA, 25 bp, Homo sapien
tcagcggtttacaaaatagcgctga

SEQ ID NO: 5708851 - DNA, 25 bp, Homo sapien
cacagtactgccaccacacagaagt

SEQ ID NO: 5708852 - DNA, 25 bp, Homo sapien
gggttcctaaagaggaagctgacag

SEQ ID NO: 5708853 - DNA, 25 bp, Homo sapien
ccagtacctgccagaataacttccg

SEQ ID NO: 5708854 - DNA, 25 bp, Homo sapien
tgggaagcctccaggctttccctgt

SEQ ID NO: 5708855 - DNA, 25 bp, Homo sapien
ccctagacccaagtccagggcaagg

SEQ ID NO: 5708856 - DNA, 25 bp, Homo sapien
atgttggtcaaagcctgactttgca

SEQ ID NO: 5708857 - DNA, 25 bp, Homo sapien
catacctcagcggtttacaaaatag

SEQ ID NO: 5708858 - DNA, 25 bp, Homo sapien
gaattcctatttagggccgtggcct

SEQ ID NO: 5708859 - DNA, 25 bp, Homo sapien
atgcctttttggctttccagcacgt

SEQ ID NO: 5708860 - DNA, 25 bp, Homo sapien
cgactccagagacccggctcccggg

SEQ ID NO: 5708861 - DNA, 25 bp, Homo sapien
tccagggagattacactggtgggcc

SEQ ID NO: 5708862 - DNA, 25 bp, Homo sapien
tgtgatcccagcactttaggaggcc

SEQ ID NO: 5708863 - DNA, 25 bp, Homo sapien
tctgaccgggggtagccctcacagt

SEQ ID NO: 5708864 - DNA, 25 bp, Homo sapien
aagtccagggcaagggaagatgctt

SEQ ID NO: 5708865 - DNA, 25 bp, Homo sapien
agctggtgcagggcctcctccacct

SEQ ID NO: 5708866 - DNA, 25 bp, Homo sapien
tcatcatccacttgcagacccgcga

SEQ ID NO: 5708867 - DNA, 25 bp, Homo sapien
gcagtccttttcctgcccagcgtgt

SEQ ID NO: 5708868 - DNA, 25 bp, Homo sapien
tgttgtgcctggcggtgcggacttg

SEQ ID NO: 5708869 - DNA, 25 bp, Homo sapien
ggaggaagaataagcattttcaaga

SEQ ID NO: 5708870 - DNA, 25 bp, Homo sapien
ggtagccctcacagtccaccagcgg

SEQ ID NO: 5708871 - DNA, 25 bp, Homo sapien
taacttccgcccacttgcccacaat

SEQ ID NO: 5708872 - DNA, 25 bp, Homo sapien
cttgtctccagaaaacaaaaacaaa

SEQ ID NO: 5708873 - DNA, 25 bp, Homo sapien
cctcagcggtttacaaaatagcgct

SEQ ID NO: 5708874 - DNA, 25 bp, Homo sapien
aactgggcaagctgtgtttattata

SEQ ID NO: 5708875 - DNA, 25 bp, Homo sapien
caagtctaagctggtgtttttcccc

SEQ ID NO: 5708876 - DNA, 25 bp, Homo sapien
ttttaccatcttaaaagagacaaaa

SEQ ID NO: 5708877 - DNA, 25 bp, Homo sapien
ggacaccacgctgggccacctggga

SEQ ID NO: 5708878 - DNA, 25 bp, Homo sapien
gcaattgctagcctgttttgcccaa

SEQ ID NO: 5708879 - DNA, 25 bp, Homo sapien
ttgcaattgctagcctgttttgccc

SEQ ID NO: 5708880 - DNA, 25 bp, Homo sapien
gaatccctgagaaccattttaccat

SEQ ID NO: 5708881 - DNA, 25 bp, Homo sapien
agagaagacaagttggaaatcccta

SEQ ID NO: 5708882 - DNA, 25 bp, Homo sapien
gagacccggctcccgggctagggac

SEQ ID NO: 5708883 - DNA, 25 bp, Homo sapien
caagaccttgtctccagaaaacaaa

SEQ ID NO: 5708884 - DNA, 25 bp, Homo sapien
tcctggacgtcgctgacagtcacga

SEQ ID NO: 5708885 - DNA, 25 bp, Homo sapien
tgatcattctgcaggcatatgatgt

SEQ ID NO: 5708886 - DNA, 25 bp, Homo sapien
cccaataggaaggctttggaattga

SEQ ID NO: 5708887 - DNA, 25 bp, Homo sapien
ctgcctcgcttcctcgtcggacatc

SEQ ID NO: 5708888 - DNA, 25 bp, Homo sapien
cctgggaagcctccaggctttccct

SEQ ID NO: 5708889 - DNA, 25 bp, Homo sapien
tgtgatcattctgcaggcatatgat

SEQ ID NO: 5708890 - DNA, 25 bp, Homo sapien
gacccgcgatgctggctggggagcc

SEQ ID NO: 5708891 - DNA, 25 bp, Homo sapien
cttcagggagagaagacaagttgga

SEQ ID NO: 5708892 - DNA, 25 bp, Homo sapien
cctgttctccaaagggagctactat

SEQ ID NO: 5708893 - DNA, 25 bp, Homo sapien
gtggtgcacgcctgtggtcccagat

SEQ ID NO: 5708894 - DNA, 25 bp, Homo sapien
cagacccgcgatgctggctggggag

SEQ ID NO: 5708895 - DNA, 25 bp, Homo sapien
ttcgagaccaacctggtcaacacag

SEQ ID NO: 5708896 - DNA, 25 bp, Homo sapien
ataattcaaagtattggcaggaatc

SEQ ID NO: 5708897 - DNA, 25 bp, Homo sapien
atgctggctggggagccggggctga

SEQ ID NO: 5708898 - DNA, 25 bp, Homo sapien
cacactgccaatgttatgcagtgac

SEQ ID NO: 5708899 - DNA, 25 bp, Homo sapien
cagtactgccaccacacagaagttc

SEQ ID NO: 5708900 - DNA, 25 bp, Homo sapien
tggtcccagatacttgggcggctga

SEQ ID NO: 5708901 - DNA, 25 bp, Homo sapien
gagaaccattttaccatcttaaaag

SEQ ID NO: 5708902 - DNA, 25 bp, Homo sapien
tccagggaattcctatttagggccg

SEQ ID NO: 5708903 - DNA, 25 bp, Homo sapien
accttgtctccagaaaacaaaaaca

SEQ ID NO: 5708904 - DNA, 25 bp, Homo sapien
tccttttcctgcccagcgtgttgga

SEQ ID NO: 5708905 - DNA, 25 bp, Homo sapien
agaccttgtctccagaaaacaaaaa

SEQ ID NO: 5708906 - DNA, 25 bp, Homo sapien
cctgttactgttccccagggacaat

SEQ ID NO: 5708907 - DNA, 25 bp, Homo sapien
agggagagaagacaagttggaaatc

SEQ ID NO: 5708908 - DNA, 25 bp, Homo sapien
aggcttcagtgaaccttgatcacga

SEQ ID NO: 5708909 - DNA, 25 bp, Homo sapien
tcaacacagggagaccctgtctcta

SEQ ID NO: 5708910 - DNA, 25 bp, Homo sapien
agcttgctgccctctggtgggttcc

SEQ ID NO: 5708911 - DNA, 25 bp, Homo sapien
ttagggccgtggcctaatttgtgaa

SEQ ID NO: 5708912 - DNA, 25 bp, Homo sapien
agccatgtcccgggcctgcttctcc

SEQ ID NO: 5708913 - DNA, 25 bp, Homo sapien
ctgggcaagctgtgtttattatagt

SEQ ID NO: 5708914 - DNA, 25 bp, Homo sapien
ttcgcccaataggaaggctttggaa

SEQ ID NO: 5708915 - DNA, 25 bp, Homo sapien
gggtgacaacagggtcatatcagca

SEQ ID NO: 5708916 - DNA, 25 bp, Homo sapien
tttaaacagcaaacattggtaaaca

SEQ ID NO: 5708917 - DNA, 25 bp, Homo sapien
ccagcctgggtgacaaagcaagacc

SEQ ID NO: 5708918 - DNA, 25 bp, Homo sapien
ggtcaaatagagtttgagggaattc

SEQ ID NO: 5708919 - DNA, 25 bp, Homo sapien
actttaggaggccaaggcaggagga

SEQ ID NO: 5708920 - DNA, 25 bp, Homo sapien
ctgcaggcatatgatgttgtgcctg

SEQ ID NO: 5708921 - DNA, 25 bp, Homo sapien
gccggcctgcgaggagcctccgctc

SEQ ID NO: 5708922 - DNA, 25 bp, Homo sapien
ctggggaaatgaacactgataccat

SEQ ID NO: 5708923 - DNA, 25 bp, Homo sapien
cttgagcccaggagttcgagaccaa

SEQ ID NO: 5708924 - DNA, 25 bp, Homo sapien
aaatagagtttgagggaattcgccc

SEQ ID NO: 5708925 - DNA, 25 bp, Homo sapien
acgtcgctgacagtcacgacgccgg

SEQ ID NO: 5708926 - DNA, 25 bp, Homo sapien
actgtgctgcaccacactgccaatg

SEQ ID NO: 5708927 - DNA, 25 bp, Homo sapien
ggaacacagggcttgcctggcagaa

SEQ ID NO: 5708928 - DNA, 25 bp, Homo sapien
cttttcctgcccagcgtgttggaac

SEQ ID NO: 5708929 - DNA, 25 bp, Homo sapien
agaggaagctgacaggacaccacgc

SEQ ID NO: 5708930 - DNA, 25 bp, Homo sapien
cttactagcgaagtgaaaggagctt

SEQ ID NO: 5708931 - DNA, 25 bp, Homo sapien
gccctgacagcccagctgctgagga

SEQ ID NO: 5708932 - DNA, 25 bp, Homo sapien
ggttacaagcctcttccagatcctt

SEQ ID NO: 5708933 - DNA, 25 bp, Homo sapien
cacacagcaataccaatcccatcaa

SEQ ID NO: 5708934 - DNA, 25 bp, Homo sapien
tcactgtgctgcaccacactgccaa

SEQ ID NO: 5708935 - DNA, 25 bp, Homo sapien
gtcccgggcctgcttctccttgtcg

SEQ ID NO: 5708936 - DNA, 25 bp, Homo sapien
gcctggcggtgcggacttggtacag

SEQ ID NO: 5708937 - DNA, 25 bp, Homo sapien
tgttgcagcccagcagtccttttcc

SEQ ID NO: 5708938 - DNA, 25 bp, Homo sapien
ttcaattataaaaagtcaaactagc

SEQ ID NO: 5708939 - DNA, 25 bp, Homo sapien
tcagggagagaagacaagttggaaa

SEQ ID NO: 5708940 - DNA, 25 bp, Homo sapien
gactggaaaatacgtggaattagaa

SEQ ID NO: 5708941 - DNA, 25 bp, Homo sapien
agttcaggttacaagcctcttccag

SEQ ID NO: 5708942 - DNA, 25 bp, Homo sapien
ctgactttgcaattgctagcctgtt

SEQ ID NO: 5708943 - DNA, 25 bp, Homo sapien
ggtcataagaaattcagctggggtg

SEQ ID NO: 5708944 - DNA, 25 bp, Homo sapien
gctggctggggagccggggctgatg

SEQ ID NO: 5708945 - DNA, 25 bp, Homo sapien
cacgcctgtggtcccagatacttgg

SEQ ID NO: 5708946 - DNA, 25 bp, Homo sapien
aggcaagctggtatctgtatccaac

SEQ ID NO: 5708947 - DNA, 25 bp, Homo sapien
gcaaacattggtaaacacagcatgt

SEQ ID NO: 5708948 - DNA, 25 bp, Homo sapien
ctttccagcacgtcatagttggcct

SEQ ID NO: 5708949 - DNA, 25 bp, Homo sapien
aggaatccctgagaaccattttacc

SEQ ID NO: 5708950 - DNA, 25 bp, Homo sapien
tgttggaacaagtctaagctggtgt

SEQ ID NO: 5708951 - DNA, 25 bp, Homo sapien
agtttttaagaatgccttaatccag

SEQ ID NO: 5708952 - DNA, 25 bp, Homo sapien
tctacaaaaaataaattagctatgc

SEQ ID NO: 5708953 - DNA, 25 bp, Homo sapien
ctggtcaacacagggagaccctgtc

SEQ ID NO: 5708954 - DNA, 25 bp, Homo sapien
aaaagtcaaactagcagtgggctgg

SEQ ID NO: 5708955 - DNA, 25 bp, Homo sapien
tacttaaccatttccgtatccacag

SEQ ID NO: 5708956 - DNA, 25 bp, Homo sapien
tgtctccagaaaacaaaaacaaaaa

SEQ ID NO: 5708957 - DNA, 25 bp, Homo sapien
aattgctagcctgttttgcccaact

SEQ ID NO: 5708958 - DNA, 25 bp, Homo sapien
gctggtatctgtatccaaccacagc

SEQ ID NO: 5708959 - DNA, 25 bp, Homo sapien
gtcaaggcttcagtgaaccttgatc

SEQ ID NO: 5708960 - DNA, 25 bp, Homo sapien
tatagtctgagactttataaaagag

SEQ ID NO: 5708961 - DNA, 25 bp, Homo sapien
agtccaccagcggctcgttcatccc

SEQ ID NO: 5708962 - DNA, 25 bp, Homo sapien
agctgacaggacaccacgctgggcc

SEQ ID NO: 5708963 - DNA, 25 bp, Homo sapien
tggtatctgtatccaaccacagcaa

SEQ ID NO: 5708964 - DNA, 25 bp, Homo sapien
tctccttgtcgcgagcgtgcagctg

SEQ ID NO: 5708965 - DNA, 25 bp, Homo sapien
agggcaagggaagatgctttcctgt

SEQ ID NO: 5708966 - DNA, 25 bp, Homo sapien
atggcctctttgtgggcctcagcca

SEQ ID NO: 5708967 - DNA, 25 bp, Homo sapien
attggcaggaatccctgagaaccat

SEQ ID NO: 5708968 - DNA, 25 bp, Homo sapien
cccagcagtccttttcctgcccagc

SEQ ID NO: 5708969 - DNA, 25 bp, Homo sapien
tgggtgttcacagagccgaactcca

SEQ ID NO: 5708970 - DNA, 25 bp, Homo sapien
ttttaactgggcaagctgtgtttat

SEQ ID NO: 5708971 - DNA, 25 bp, Homo sapien
agaagacaagttggaaatccctaga

SEQ ID NO: 5708972 - DNA, 25 bp, Homo sapien
agaacctgtggctggaagcacacag

SEQ ID NO: 5708973 - DNA, 25 bp, Homo sapien
gtatccaaccacagcaaaaccagtc

SEQ ID NO: 5708974 - DNA, 25 bp, Homo sapien
tgcttctccttgtcgcgagcgtgca

SEQ ID NO: 5708975 - DNA, 25 bp, Homo sapien
gaggggttcttactagcgaagtgaa

SEQ ID NO: 5708976 - DNA, 25 bp, Homo sapien
ctggtgcagggcctcctccacctgc

SEQ ID NO: 5708977 - DNA, 25 bp, Homo sapien
tgtttattatagtctgagactttat

SEQ ID NO: 5708978 - DNA, 25 bp, Homo sapien
cagcagtccttttcctgcccagcgt

SEQ ID NO: 5708979 - DNA, 25 bp, Homo sapien
aatgccttaatccagggagattaca

SEQ ID NO: 5708980 - DNA, 25 bp, Homo sapien
acacagcatgtctgtggctaccaga

SEQ ID NO: 5708981 - DNA, 25 bp, Homo sapien
tagaacatgcaatttaaacagcaaa

SEQ ID NO: 5708982 - DNA, 25 bp, Homo sapien
tgggagggtcataagaaattcagct

SEQ ID NO: 5708983 - DNA, 25 bp, Homo sapien
ccaggaggttcaattataaaaagtc

SEQ ID NO: 5708984 - DNA, 25 bp, Homo sapien
cagggagaccctgtctctacaaaaa

SEQ ID NO: 5708985 - DNA, 25 bp, Homo sapien
taaaagggaggaagaataagcattt

SEQ ID NO: 5708986 - DNA, 25 bp, Homo sapien
aattcgcccaataggaaggctttgg

SEQ ID NO: 5708987 - DNA, 25 bp, Homo sapien
gtcgctgacagtcacgacgccggcc

SEQ ID NO: 5708988 - DNA, 25 bp, Homo sapien
cctaatttgtgaaagaggccaagcc

SEQ ID NO: 5708989 - DNA, 25 bp, Homo sapien
gaggttcaattataaaaagtcaaac

SEQ ID NO: 5708990 - DNA, 25 bp, Homo sapien
tggagggccctggctctcactctga

SEQ ID NO: 5708991 - DNA, 25 bp, Homo sapien
aactagcagtgggctgggcgcagtg

SEQ ID NO: 5708992 - DNA, 25 bp, Homo sapien
tgcttgagcccaggagttcgagacc

SEQ ID NO: 5708993 - DNA, 25 bp, Homo sapien
tggaagcacacagcaataccaatcc

SEQ ID NO: 5708994 - DNA, 25 bp, Homo sapien
cggcctgcgaggagcctccgctctg

SEQ ID NO: 5708995 - DNA, 25 bp, Homo sapien
acagggtcatatcagcactgtaaaa

SEQ ID NO: 5708996 - DNA, 25 bp, Homo sapien
aaaaataaattagctatgcatggtg

SEQ ID NO: 5708997 - DNA, 25 bp, Homo sapien
ctttgcagaggaataatgttgcagc

SEQ ID NO: 5708998 - DNA, 25 bp, Homo sapien
gcttcagtgaaccttgatcacgaca

SEQ ID NO: 5708999 - DNA, 25 bp, Homo sapien
acactggtgggccacagtactgcca

SEQ ID NO: 5709000 - DNA, 25 bp, Homo sapien
ctagggacgacgccccagtcgaccg

SEQ ID NO: 5709001 - DNA, 25 bp, Homo sapien
caagggaagatgctttcctgttact

SEQ ID NO: 5709002 - DNA, 25 bp, Homo sapien
ctttggcgaaggcccgtggagggcc

SEQ ID NO: 5709003 - DNA, 25 bp, Homo sapien
gctaccagaggggaatacgtatggc

SEQ ID NO: 5709004 - DNA, 25 bp, Homo sapien
gggagattacactggtgggccacag

SEQ ID NO: 5709005 - DNA, 25 bp, Homo sapien
ttcccccctgcggatcactgtcaca

SEQ ID NO: 5709006 - DNA, 25 bp, Homo sapien
caggtccacgtctgaccgggggtag

SEQ ID NO: 5709007 - DNA, 25 bp, Homo sapien
tcagccatgtcccgggcctgcttct

SEQ ID NO: 5709008 - DNA, 25 bp, Homo sapien
aggaataatgttgcagcccagcagt

SEQ ID NO: 5709009 - DNA, 25 bp, Homo sapien
tctggtgggttcctaaagaggaagc

SEQ ID NO: 5709010 - DNA, 25 bp, Homo sapien
cagggcatagccaggaggttcaatt

SEQ ID NO: 5709011 - DNA, 25 bp, Homo sapien
gctgctgaggaagcacagtacttaa

SEQ ID NO: 5709012 - DNA, 25 bp, Homo sapien
gctgatctcagggcatagccaggag

SEQ ID NO: 5709013 - DNA, 25 bp, Homo sapien
tacaggtccacgtctgaccgggggt

SEQ ID NO: 5709014 - DNA, 25 bp, Homo sapien
gggccacagtactgccaccacacag

SEQ ID NO: 5709015 - DNA, 25 bp, Homo sapien
gggccgcgactccagagacccggct

SEQ ID NO: 5709016 - DNA, 25 bp, Homo sapien
gtgggccacagtactgccaccacac

SEQ ID NO: 5709017 - DNA, 25 bp, Homo sapien
agaggggaatacgtatggctgtcag

SEQ ID NO: 5709018 - DNA, 25 bp, Homo sapien
gtcccagatacttgggcggctgagg

SEQ ID NO: 5709019 - DNA, 25 bp, Homo sapien
atctgtatccaaccacagcaaaacc

SEQ ID NO: 5709020 - DNA, 25 bp, Homo sapien
aggtctgatctactcgttcctatcc

SEQ ID NO: 5709021 - DNA, 25 bp, Homo sapien
caaagtattggcaggaatccctgag

SEQ ID NO: 5709022 - DNA, 25 bp, Homo sapien
cctatccatacctcagcggtttaca

SEQ ID NO: 5709023 - DNA, 25 bp, Homo sapien
gctagcctgttttgcccaactttct

SEQ ID NO: 5709024 - DNA, 25 bp, Homo sapien
gccctctggtgggttcctaaagagg

SEQ ID NO: 5709025 - DNA, 25 bp, Homo sapien
attagaacatgcaatttaaacagca

SEQ ID NO: 5709026 - DNA, 25 bp, Homo sapien
attatagtctgagactttataaaag

SEQ ID NO: 5709027 - DNA, 25 bp, Homo sapien
cacgacgccggcctgcgaggagcct

SEQ ID NO: 5709028 - DNA, 25 bp, Homo sapien
atccctgagaaccattttaccatct

SEQ ID NO: 5709029 - DNA, 25 bp, Homo sapien
atttagggccgtggcctaatttgtg

SEQ ID NO: 5709030 - DNA, 25 bp, Homo sapien
ctttataaaagagactggaaaatac

SEQ ID NO: 5709031 - DNA, 25 bp, Homo sapien
aagttctgggtgttcacagagccga

SEQ ID NO: 5709032 - DNA, 25 bp, Homo sapien
gaattagaacatgcaatttaaacag

SEQ ID NO: 5709033 - DNA, 25 bp, Homo sapien
cgcgatgctggctggggagccgggg

SEQ ID NO: 5709034 - DNA, 25 bp, Homo sapien
ttggtacaggtccacgtctgaccgg

SEQ ID NO: 5709035 - DNA, 25 bp, Homo sapien
ctgcgaggagcctccgctctgcctc

SEQ ID NO: 5709036 - DNA, 25 bp, Homo sapien
cttgtcgcgagcgtgcagctggtgc

SEQ ID NO: 5709037 - DNA, 25 bp, Homo sapien
tcacattcaggggcttcccctcact

SEQ ID NO: 5709038 - DNA, 25 bp, Homo sapien
tgggcctcagccatgtcccgggcct

SEQ ID NO: 5709039 - DNA, 25 bp, Homo sapien
agaggtctgatctactcgttcctat

SEQ ID NO: 5709040 - DNA, 25 bp, Homo sapien
cgaagtgaaaggagcttgctgccct

SEQ ID NO: 5709041 - DNA, 25 bp, Homo sapien
tgtgcaagaactggggaaatgaaca

SEQ ID NO: 5709042 - DNA, 25 bp, Homo sapien
cacacagaagttcaggttacaagcc

SEQ ID NO: 5709043 - DNA, 25 bp, Homo sapien
ctcctccacctgcttcatcactgcc

SEQ ID NO: 5709044 - DNA, 25 bp, Homo sapien
atatcagcactgtaaaactctttat

SEQ ID NO: 5709045 - DNA, 25 bp, Homo sapien
cctgccagaataacttccgcccact

SEQ ID NO: 5709046 - DNA, 25 bp, Homo sapien
ctcacgcctgtgatcccagcacttt

SEQ ID NO: 5709047 - DNA, 25 bp, Homo sapien
ataagaaattcagctggggtgacaa

SEQ ID NO: 5709048 - DNA, 25 bp, Homo sapien
agggaattcgcccaataggaaggct

SEQ ID NO: 5709049 - DNA, 25 bp, Homo sapien
taatcacaccagtacctgccagaat

SEQ ID NO: 5709050 - DNA, 25 bp, Homo sapien
tccacgtctgaccgggggtagccct

SEQ ID NO: 5709051 - DNA, 25 bp, Homo sapien
aaaaataattcaaagtattggcagg

SEQ ID NO: 5709052 - DNA, 25 bp, Homo sapien
aggggcttcccctcactgtgctgca

SEQ ID NO: 5709053 - DNA, 25 bp, Homo sapien
aagtattggcaggaatccctgagaa

SEQ ID NO: 5709054 - DNA, 25 bp, Homo sapien
ccagaataacttccgcccacttgcc

SEQ ID NO: 5709055 - DNA, 25 bp, Homo sapien
aaatccctagacccaagtccagggc

SEQ ID NO: 5709056 - DNA, 25 bp, Homo sapien
gagggccctggctctcactctgacc

SEQ ID NO: 5709057 - DNA, 25 bp, Homo sapien
acaaagcaagaccttgtctccagaa

SEQ ID NO: 5709058 - DNA, 25 bp, Homo sapien
gaactgccaaaacagaaagcggtgt

SEQ ID NO: 5709059 - DNA, 25 bp, Homo sapien
agaccaacctggtcaacacagggag

SEQ ID NO: 5709060 - DNA, 25 bp, Homo sapien
cagaaagcggtgtgcaagaactggg

SEQ ID NO: 5709061 - DNA, 25 bp, Homo sapien
taaccatttccgtatccacagcagc

SEQ ID NO: 5709062 - DNA, 25 bp, Homo sapien
ataataatcacaccagtacctgcca

SEQ ID NO: 5709063 - DNA, 25 bp, Homo sapien
aacagcaaacattggtaaacacagc

SEQ ID NO: 5709064 - DNA, 25 bp, Homo sapien
ggtgttcacagagccgaactccaca

SEQ ID NO: 5709065 - DNA, 25 bp, Homo sapien
cccccctgcggatcactgtcacatt

SEQ ID NO: 5709066 - DNA, 25 bp, Homo sapien
ttgcctggcagaactgccaaaacag

SEQ ID NO: 5709067 - DNA, 25 bp, Homo sapien
gcgcttctatctcctccttgcgccg

SEQ ID NO: 5709068 - DNA, 25 bp, Homo sapien
gagaccctgtctctacaaaaaataa

SEQ ID NO: 5709069 - DNA, 25 bp, Homo sapien
aggaaggctttggaattgagtgtga

SEQ ID NO: 5709070 - DNA, 25 bp, Homo sapien
ttaatccagggagattacactggtg

SEQ ID NO: 5709071 - DNA, 25 bp, Homo sapien
taaacagcaaacattggtaaacaca

SEQ ID NO: 5709072 - DNA, 25 bp, Homo sapien
gcctttttggctttccagcacgtca

SEQ ID NO: 5709073 - DNA, 25 bp, Homo sapien
ctgaggaagcacagtacttaaccat

SEQ ID NO: 5709074 - DNA, 25 bp, Homo sapien
atttgtgaaagaggccaagcctaag

SEQ ID NO: 5709075 - DNA, 25 bp, Homo sapien
tttaagaatgccttaatccagggag

SEQ ID NO: 5709076 - DNA, 25 bp, Homo sapien
cgctgggccacctgggaagcctcca

SEQ ID NO: 5709077 - DNA, 25 bp, Homo sapien
gagactttataaaagagactggaaa

SEQ ID NO: 5709078 - DNA, 25 bp, Homo sapien
cattttcaagaggtctgatctactc

SEQ ID NO: 5709079 - DNA, 25 bp, Homo sapien
aaataataataataatcacaccagt

SEQ ID NO: 5709080 - DNA, 25 bp, Homo sapien
gttcatcccaatgcctttttggctt

SEQ ID NO: 5709081 - DNA, 25 bp, Homo sapien
tctgaccccatctgagctttggttt

SEQ ID NO: 5709082 - DNA, 25 bp, Homo sapien
ggagagaagacaagttggaaatccc

SEQ ID NO: 5709083 - DNA, 25 bp, Homo sapien
gaagcacacagcaataccaatccca

SEQ ID NO: 5709084 - DNA, 25 bp, Homo sapien
tgtgtttattatagtctgagacttt

SEQ ID NO: 5709085 - DNA, 25 bp, Homo sapien
ttttggctttccagcacgtcatagt

SEQ ID NO: 5709086 - DNA, 25 bp, Homo sapien
tccttgtcgcgagcgtgcagctggt

SEQ ID NO: 5709087 - DNA, 25 bp, Homo sapien
catgtctgtggctaccagaggggaa

SEQ ID NO: 5709088 - DNA, 25 bp, Homo sapien
ggacgtcgctgacagtcacgacgcc

SEQ ID NO: 5709089 - DNA, 25 bp, Homo sapien
ccaccacacagaagttcaggttaca

SEQ ID NO: 5709090 - DNA, 25 bp, Homo sapien
cagcactttaggaggccaaggcagg

SEQ ID NO: 5709091 - DNA, 25 bp, Homo sapien
ggcctgcttctccttgtcgcgagcg

SEQ ID NO: 5709092 - DNA, 25 bp, Homo sapien
aaataaattagctatgcatggtggt

SEQ ID NO: 5709093 - DNA, 25 bp, Homo sapien
acagtccaccagcggctcgttcatc

SEQ ID NO: 5709094 - DNA, 25 bp, Homo sapien
cgacgccggcctgcgaggagcctcc

SEQ ID NO: 5709095 - DNA, 25 bp, Homo sapien
ctcctccttgcgccgcatcagctcc

SEQ ID NO: 5709096 - DNA, 25 bp, Homo sapien
gccaatgttatgcagtgactggaag

SEQ ID NO: 5709097 - DNA, 25 bp, Homo sapien
aagctgtgtttattatagtctgaga

SEQ ID NO: 5709098 - DNA, 25 bp, Homo sapien
ttctgcaggcatatgatgttgtgcc

SEQ ID NO: 5709099 - DNA, 25 bp, Homo sapien
atcactgccttgtgatcattctgca

SEQ ID NO: 5709100 - DNA, 25 bp, Homo sapien
cagcgtcaaggcttcagtgaacctt

SEQ ID NO: 5709101 - DNA, 25 bp, Homo sapien
catcttaaaagagacaaaaaataaa

SEQ ID NO: 5709102 - DNA, 25 bp, Homo sapien
tgtttttcccccctgcggatcactg

SEQ ID NO: 5709103 - DNA, 25 bp, Homo sapien
ttactgttccccagggacaatcatc

SEQ ID NO: 5709104 - DNA, 25 bp, Homo sapien
tgccaaaacagaaagcggtgtgcaa

SEQ ID NO: 5709105 - DNA, 25 bp, Homo sapien
gctcgttcatcccaatgcctttttg

SEQ ID NO: 5709106 - DNA, 25 bp, Homo sapien
ctccaaagggagctactatggccct

SEQ ID NO: 5709107 - DNA, 25 bp, Homo sapien
attcctatttagggccgtggcctaa

SEQ ID NO: 5709108 - DNA, 25 bp, Homo sapien
ggacatcgtgaaccccgggccgcga

SEQ ID NO: 5709109 - DNA, 25 bp, Homo sapien
gcctgcgaggagcctccgctctgcc

SEQ ID NO: 5709110 - DNA, 25 bp, Homo sapien
accttgatcacgacactgcactcca

SEQ ID NO: 5709111 - DNA, 25 bp, Homo sapien
acttgcccacaatccagggaattcc

SEQ ID NO: 5709112 - DNA, 25 bp, Homo sapien
gccttgtgatcattctgcaggcata

SEQ ID NO: 5709113 - DNA, 25 bp, Homo sapien
cattctgcaggcatatgatgttgtg

SEQ ID NO: 5709114 - DNA, 25 bp, Homo sapien
tgacccagtttgcggctcatggcct

SEQ ID NO: 5709115 - DNA, 25 bp, Homo sapien
gaattgagtgtgagaacctgtggct

SEQ ID NO: 5709116 - DNA, 25 bp, Homo sapien
cattttaccatcttaaaagagacaa

SEQ ID NO: 5709117 - DNA, 25 bp, Homo sapien
aggctttggaattgagtgtgagaac

SEQ ID NO: 5709118 - DNA, 25 bp, Homo sapien
ggtgacaaagcaagaccttgtctcc

SEQ ID NO: 5709119 - DNA, 25 bp, Homo sapien
tccacttgcagacccgcgatgctgg

SEQ ID NO: 5709120 - DNA, 25 bp, Homo sapien
ttgcagaggaataatgttgcagccc

SEQ ID NO: 5709121 - DNA, 25 bp, Homo sapien
tggggagccggggctgatgctgttc

SEQ ID NO: 5709122 - DNA, 25 bp, Homo sapien
caaaaaataaattagctatgcatgg

SEQ ID NO: 5709123 - DNA, 25 bp, Homo sapien
cggctcatggcctctttgtgggcct

SEQ ID NO: 5709124 - DNA, 25 bp, Homo sapien
gatgttgtgcctggcggtgcggact

SEQ ID NO: 5709125 - DNA, 25 bp, Homo sapien
ataatgttgcagcccagcagtcctt

SEQ ID NO: 5709126 - DNA, 25 bp, Homo sapien
atagttggccttgatctgcgcttct

SEQ ID NO: 5709127 - DNA, 25 bp, Homo sapien
cagctggggtgacaacagggtcata

SEQ ID NO: 5709128 - DNA, 25 bp, Homo sapien
gaagctcttctgaccccatctgagc

SEQ ID NO: 5709129 - DNA, 25 bp, Homo sapien
cacagagccgaactccacaatctca

SEQ ID NO: 5709130 - DNA, 25 bp, Homo sapien
gctggggagccggggctgatgctgt

SEQ ID NO: 5709131 - DNA, 25 bp, Homo sapien
cccagcactttaggaggccaaggca

SEQ ID NO: 5709132 - DNA, 25 bp, Homo sapien
gcctaagtttttaagaatgccttaa

SEQ ID NO: 5709133 - DNA, 25 bp, Homo sapien
ggcaagggaagatgctttcctgtta

SEQ ID NO: 5709134 - DNA, 25 bp, Homo sapien
cttaaccatttccgtatccacagca

SEQ ID NO: 5709135 - DNA, 25 bp, Homo sapien
tcatagttggccttgatctgcgctt

SEQ ID NO: 5709136 - DNA, 25 bp, Homo sapien
tgagctttggtttgggagggtcata

SEQ ID NO: 5709137 - DNA, 25 bp, Homo sapien
caatgttatgcagtgactggaagtt

SEQ ID NO: 5709138 - DNA, 25 bp, Homo sapien
tgcccacagcgtcaaggcttcagtg

SEQ ID NO: 5709139 - DNA, 25 bp, Homo sapien
ctttttggctttccagcacgtcata

SEQ ID NO: 5709140 - DNA, 25 bp, Homo sapien
actatggccctgacagcccagctgc

SEQ ID NO: 5709141 - DNA, 25 bp, Homo sapien
actggtgggccacagtactgccacc

SEQ ID NO: 5709142 - DNA, 25 bp, Homo sapien
cagcaaacattggtaaacacagcat

SEQ ID NO: 5709143 - DNA, 25 bp, Homo sapien
ttggctttccagcacgtcatagttg

SEQ ID NO: 5709144 - DNA, 25 bp, Homo sapien
ctggacgtcgctgacagtcacgacg

SEQ ID NO: 5709145 - DNA, 25 bp, Homo sapien
agcccagctgctgaggaagcacagt

SEQ ID NO: 5709146 - DNA, 25 bp, Homo sapien
atcagcactgtaaaactctttatta

SEQ ID NO: 5709147 - DNA, 25 bp, Homo sapien
tcactgtcacattcaggggcttccc

SEQ ID NO: 5709148 - DNA, 25 bp, Homo sapien
cttgcgccgcatcagctcctggacg

SEQ ID NO: 5709149 - DNA, 25 bp, Homo sapien
gcagcccagcagtccttttcctgcc

SEQ ID NO: 5709150 - DNA, 25 bp, Homo sapien
accacgctgggccacctgggaagcc

SEQ ID NO: 5709151 - DNA, 25 bp, Homo sapien
ggaaatccctagacccaagtccagg

SEQ ID NO: 5709152 - DNA, 25 bp, Homo sapien
taagtttttaagaatgccttaatcc

SEQ ID NO: 5709153 - DNA, 25 bp, Homo sapien
gccacctgggaagcctccaggcttt

SEQ ID NO: 5709154 - DNA, 25 bp, Homo sapien
tctgggtgttcacagagccgaactc

SEQ ID NO: 5709155 - DNA, 25 bp, Homo sapien
aagctggtatctgtatccaaccaca

SEQ ID NO: 5709156 - DNA, 25 bp, Homo sapien
cgaaggcccgtggagggccctggct

SEQ ID NO: 5709157 - DNA, 25 bp, Homo sapien
agtcccaaggaacacagggcttgcc

SEQ ID NO: 5709158 - DNA, 25 bp, Homo sapien
gcaagctgtgtttattatagtctga

SEQ ID NO: 5709159 - DNA, 25 bp, Homo sapien
ggctttccagcacgtcatagttggc

SEQ ID NO: 5709160 - DNA, 25 bp, Homo sapien
cttccagatccttatgcttcaggga

SEQ ID NO: 5709161 - DNA, 25 bp, Homo sapien
tgccagaataacttccgcccacttg

SEQ ID NO: 5709162 - DNA, 25 bp, Homo sapien
aagagactggaaaatacgtggaatt

SEQ ID NO: 5709163 - DNA, 25 bp, Homo sapien
gcactgtaaaactctttattaaaaa

SEQ ID NO: 5709164 - DNA, 25 bp, Homo sapien
gggccacctgggaagcctccaggct

SEQ ID NO: 5709165 - DNA, 25 bp, Homo sapien
gaaccttgatcacgacactgcactc

SEQ ID NO: 5709166 - DNA, 25 bp, Homo sapien
agcaaggcctcagtgcaaagaaata

SEQ ID NO: 5709167 - DNA, 25 bp, Homo sapien
aagatgctttcctgttactgttccc

SEQ ID NO: 5709168 - DNA, 25 bp, Homo sapien
taaaaagtcaaactagcagtgggct

SEQ ID NO: 5709169 - DNA, 25 bp, Homo sapien
tgaggcagtgcccacagcgtcaagg

SEQ ID NO: 5709170 - DNA, 25 bp, Homo sapien
agcaaaaccagtcccaaggaacaca

SEQ ID NO: 5709171 - DNA, 25 bp, Homo sapien
cgcccaataggaaggctttggaatt

SEQ ID NO: 5709172 - DNA, 25 bp, Homo sapien
gaaccattttaccatcttaaaagag

SEQ ID NO: 5709173 - DNA, 25 bp, Homo sapien
ttgtgaaagaggccaagcctaagtt

SEQ ID NO: 5709174 - DNA, 25 bp, Homo sapien
cccgggcctgcttctccttgtcgcg

SEQ ID NO: 5709175 - DNA, 25 bp, Homo sapien
cttgatcacgacactgcactccagc

SEQ ID NO: 5709176 - DNA, 25 bp, Homo sapien
gctggaagcacacagcaataccaat

SEQ ID NO: 5709177 - DNA, 25 bp, Homo sapien
caccagcggctcgttcatcccaatg

SEQ ID NO: 5709178 - DNA, 25 bp, Homo sapien
gcaagctggtatctgtatccaacca

SEQ ID NO: 5709179 - DNA, 25 bp, Homo sapien
tccatacctcagcggtttacaaaat

SEQ ID NO: 5709180 - DNA, 25 bp, Homo sapien
gatctgcgcttctatctcctccttg

SEQ ID NO: 5709181 - DNA, 25 bp, Homo sapien
tgagaacctgtggctggaagcacac

SEQ ID NO: 5709182 - DNA, 25 bp, Homo sapien
ctgacaggacaccacgctgggccac

SEQ ID NO: 5709183 - DNA, 25 bp, Homo sapien
tgcttcagggagagaagacaagttg

SEQ ID NO: 5709184 - DNA, 25 bp, Homo sapien
ccccagtcgaccgtaactacggctc

SEQ ID NO: 5709185 - DNA, 25 bp, Homo sapien
acagtacttaaccatttccgtatcc

SEQ ID NO: 5709186 - DNA, 25 bp, Homo sapien
aatccagggaattcctatttagggc

SEQ ID NO: 5709187 - DNA, 25 bp, Homo sapien
agtcgaccgtaactacggctccgcc

SEQ ID NO: 5709188 - DNA, 25 bp, Homo sapien
gacagtcacgacgccggcctgcgag

SEQ ID NO: 5709189 - DNA, 25 bp, Homo sapien
tgatcacgacactgcactccagcct

SEQ ID NO: 5709190 - DNA, 25 bp, Homo sapien
gcaggaggactgcttgagcccagga

SEQ ID NO: 5709191 - DNA, 25 bp, Homo sapien
gattacactggtgggccacagtact

SEQ ID NO: 5709192 - DNA, 25 bp, Homo sapien
gatgctttcctgttactgttcccca

SEQ ID NO: 5709193 - DNA, 25 bp, Homo sapien
agtgcccacagcgtcaaggcttcag

SEQ ID NO: 5709194 - DNA, 25 bp, Homo sapien
tggagaggaaaaaataattcaaagt

SEQ ID NO: 5709195 - DNA, 25 bp, Homo sapien
ggaattcgcccaataggaaggcttt

SEQ ID NO: 5709196 - DNA, 25 bp, Homo sapien
ggactgcttgagcccaggagttcga

SEQ ID NO: 5709197 - DNA, 25 bp, Homo sapien
tgccaccacacagaagttcaggtta

SEQ ID NO: 5709198 - DNA, 25 bp, Homo sapien
agagtttgagggaattcgcccaata

SEQ ID NO: 5709199 - DNA, 25 bp, Homo sapien
cggctgaggcagtgcccacagcgtc

SEQ ID NO: 5709200 - DNA, 25 bp, Homo sapien
cctcagccatgtcccgggcctgctt

SEQ ID NO: 5709201 - DNA, 25 bp, Homo sapien
tggggtgacaacagggtcatatcag

SEQ ID NO: 5709202 - DNA, 25 bp, Homo sapien
cgcctgtggtcccagatacttgggc

SEQ ID NO: 5709203 - DNA, 25 bp, Homo sapien
tccttatgcttcagggagagaagac

SEQ ID NO: 5709204 - DNA, 25 bp, Homo sapien
ttgcccacaatccagggaattccta

SEQ ID NO: 5709205 - DNA, 25 bp, Homo sapien
aacacagggcttgcctggcagaact

SEQ ID NO: 5709206 - DNA, 25 bp, Homo sapien
agcggctcgttcatcccaatgcctt

SEQ ID NO: 5709207 - DNA, 25 bp, Homo sapien
agcccaggagttcgagaccaacctg

SEQ ID NO: 5709208 - DNA, 25 bp, Homo sapien
agcctgggtgacaaagcaagacctt

SEQ ID NO: 5709209 - DNA, 25 bp, Homo sapien
cttgcagacccgcgatgctggctgg

SEQ ID NO: 5709210 - DNA, 25 bp, Homo sapien
taggaggccaaggcaggaggactgc

SEQ ID NO: 5709211 - DNA, 25 bp, Homo sapien
aaaatagcgctgatctcagggcata

SEQ ID NO: 5709212 - DNA, 25 bp, Homo sapien
cggtgcggacttggtacaggtccac

SEQ ID NO: 5709213 - DNA, 25 bp, Homo sapien
tacctgccagaataacttccgccca

SEQ ID NO: 5709214 - DNA, 25 bp, Homo sapien
cacgcctgtgatcccagcactttag

SEQ ID NO: 5709215 - DNA, 25 bp, Homo sapien
gacaggacaccacgctgggccacct

SEQ ID NO: 5709216 - DNA, 25 bp, Homo sapien
gccctggctctcactctgacccagt

SEQ ID NO: 5709217 - DNA, 25 bp, Homo sapien
ctggaagttctgggtgttcacagag

SEQ ID NO: 5709218 - DNA, 25 bp, Homo sapien
accacacagaagttcaggttacaag

SEQ ID NO: 5709219 - DNA, 25 bp, Homo sapien
tatccatacctcagcggtttacaaa

SEQ ID NO: 5709220 - DNA, 25 bp, Homo sapien
gctcctggacgtcgctgacagtcac

SEQ ID NO: 5709221 - DNA, 25 bp, Homo sapien
tgctgcaccacactgccaatgttat

SEQ ID NO: 5709222 - DNA, 25 bp, Homo sapien
tgcttcatcactgccttgtgatcat

SEQ ID NO: 5709223 - DNA, 25 bp, Homo sapien
ggagcctccgctctgcctcgcttcc

SEQ ID NO: 5709224 - DNA, 25 bp, Homo sapien
tatccacagcagcaaggcctcagtg

SEQ ID NO: 5709225 - DNA, 25 bp, Homo sapien
tcgaccgtaactacggctccgccca

SEQ ID NO: 5709226 - DNA, 25 bp, Homo sapien
tgcagacccgcgatgctggctgggg

SEQ ID NO: 5709227 - DNA, 25 bp, Homo sapien
atcacaccagtacctgccagaataa

SEQ ID NO: 5709228 - DNA, 25 bp, Homo sapien
accatttccgtatccacagcagcaa

SEQ ID NO: 5709229 - DNA, 25 bp, Homo sapien
ttcaggttacaagcctcttccagat

SEQ ID NO: 5709230 - DNA, 25 bp, Homo sapien
gccaaggcaggaggactgcttgagc

SEQ ID NO: 5709231 - DNA, 25 bp, Homo sapien
gacaagttggaaatccctagaccca

SEQ ID NO: 5709232 - DNA, 25 bp, Homo sapien
tgataccatggagaggaaaaaataa

SEQ ID NO: 5709233 - DNA, 25 bp, Homo sapien
tctgcgcttctatctcctccttgcg

SEQ ID NO: 5709234 - DNA, 25 bp, Homo sapien
attgagtgtgagaacctgtggctgg

SEQ ID NO: 5709235 - DNA, 25 bp, Homo sapien
ggtgcagggcctcctccacctgctt

SEQ ID NO: 5709236 - DNA, 25 bp, Homo sapien
gagccggggctgatgctgttcactt

SEQ ID NO: 5709237 - DNA, 25 bp, Homo sapien
caataggaaggctttggaattgagt

SEQ ID NO: 5709238 - DNA, 25 bp, Homo sapien
cctgacagcccagctgctgaggaag

SEQ ID NO: 5709239 - DNA, 25 bp, Homo sapien
ctactatggccctgacagcccagct

SEQ ID NO: 5709240 - DNA, 25 bp, Homo sapien
aggaagaataagcattttcaagagg

SEQ ID NO: 5709241 - DNA, 25 bp, Homo sapien
gttcctaaagaggaagctgacagga

SEQ ID NO: 5709242 - DNA, 25 bp, Homo sapien
gggcttgcctggcagaactgccaaa

SEQ ID NO: 5709243 - DNA, 25 bp, Homo sapien
catccacttgcagacccgcgatgct

SEQ ID NO: 5709244 - DNA, 25 bp, Homo sapien
tgtgagaacctgtggctggaagcac

SEQ ID NO: 5709245 - DNA, 25 bp, Homo sapien
gtgcaaagaaatatgttggtcaaag

SEQ ID NO: 5709246 - DNA, 25 bp, Homo sapien
gtattggcaggaatccctgagaacc

SEQ ID NO: 5709247 - DNA, 25 bp, Homo sapien
ggaggccaaggcaggaggactgctt

SEQ ID NO: 5709248 - DNA, 25 bp, Homo sapien
ggtttgggagggtcataagaaattc

SEQ ID NO: 5709249 - DNA, 25 bp, Homo sapien
ataataataataatcacaccagtac

SEQ ID NO: 5709250 - DNA, 25 bp, Homo sapien
aattcagctggggtgacaacagggt

SEQ ID NO: 5709251 - DNA, 25 bp, Homo sapien
ggcgcagtggctcacgcctgtgatc

SEQ ID NO: 5709252 - DNA, 25 bp, Homo sapien
cgagaccaacctggtcaacacaggg

SEQ ID NO: 5709253 - DNA, 25 bp, Homo sapien
cgtcatagttggccttgatctgcgc

SEQ ID NO: 5709254 - DNA, 25 bp, Homo sapien
gccgcgactccagagacccggctcc

SEQ ID NO: 5709255 - DNA, 25 bp, Homo sapien
gtgacaacagggtcatatcagcact

SEQ ID NO: 5709256 - DNA, 25 bp, Homo sapien
gggagccggggctgatgctgttcac

SEQ ID NO: 5709257 - DNA, 25 bp, Homo sapien
gctgggcgcagtggctcacgcctgt

SEQ ID NO: 5709258 - DNA, 25 bp, Homo sapien
gcaaagaaatatgttggtcaaagcc

SEQ ID NO: 5709259 - DNA, 25 bp, Homo sapien
tgagggaattcgcccaataggaagg

SEQ ID NO: 5709260 - DNA, 25 bp, Homo sapien
gccacagtactgccaccacacagaa

SEQ ID NO: 5709261 - DNA, 25 bp, Homo sapien
tggtgggccacagtactgccaccac

SEQ ID NO: 5709262 - DNA, 25 bp, Homo sapien
tctccagaaaacaaaaacaaaaaca

SEQ ID NO: 5709263 - DNA, 25 bp, Homo sapien
accattttaccatcttaaaagagac

SEQ ID NO: 5709264 - DNA, 25 bp, Homo sapien
gtgactggaagttctgggtgttcac

SEQ ID NO: 5709265 - DNA, 25 bp, Homo sapien
ccgcccacttgcccacaatccaggg

SEQ ID NO: 5709266 - DNA, 25 bp, Homo sapien
gccaagcctaagtttttaagaatgc

SEQ ID NO: 5709267 - DNA, 25 bp, Homo sapien
cagtgggctgggcgcagtggctcac

SEQ ID NO: 5709268 - DNA, 25 bp, Homo sapien
aactggggaaatgaacactgatacc

SEQ ID NO: 5709269 - DNA, 25 bp, Homo sapien
tcataagaaattcagctggggtgac

SEQ ID NO: 5709270 - DNA, 25 bp, Homo sapien
acagcaaaaccagtcccaaggaaca

SEQ ID NO: 5709271 - DNA, 25 bp, Homo sapien
tttcctgcccagcgtgttggaacaa

SEQ ID NO: 5709272 - DNA, 25 bp, Homo sapien
cgcgactccagagacccggctcccg

SEQ ID NO: 5709273 - DNA, 25 bp, Homo sapien
atccaaccacagcaaaaccagtccc

SEQ ID NO: 5709274 - DNA, 25 bp, Homo sapien
caatgcctttttggctttccagcac

SEQ ID NO: 5709275 - DNA, 25 bp, Homo sapien
tccaccagcggctcgttcatcccaa

SEQ ID NO: 5709276 - DNA, 25 bp, Homo sapien
gaagttcaggttacaagcctcttcc

SEQ ID NO: 5709277 - DNA, 25 bp, Homo sapien
tggctggggagccggggctgatgct

SEQ ID NO: 5709278 - DNA, 25 bp, Homo sapien
acatcgtgaaccccgggccgcgact

SEQ ID NO: 5709279 - DNA, 25 bp, Homo sapien
agacccaagtccagggcaagggaag

SEQ ID NO: 5709280 - DNA, 25 bp, Homo sapien
cccagatacttgggcggctgaggca

SEQ ID NO: 5709281 - DNA, 25 bp, Homo sapien
cagatacttgggcggctgaggcagt

SEQ ID NO: 5709282 - DNA, 25 bp, Homo sapien
cagcagcaaggcctcagtgcaaaga

SEQ ID NO: 5709283 - DNA, 25 bp, Homo sapien
cagcaataccaatcccatcaaggca

SEQ ID NO: 5709284 - DNA, 25 bp, Homo sapien
ggacttggtacaggtccacgtctga

SEQ ID NO: 5709285 - DNA, 25 bp, Homo sapien
cttcctcgtcggacatcgtgaaccc

SEQ ID NO: 5709286 - DNA, 25 bp, Homo sapien
ccacaatccagggaattcctattta

SEQ ID NO: 5709287 - DNA, 25 bp, Homo sapien
caaggcaagctggtatctgtatcca

SEQ ID NO: 5709288 - DNA, 25 bp, Homo sapien
gatcactgtcacattcaggggcttc

SEQ ID NO: 5709289 - DNA, 25 bp, Homo sapien
tcatatcagcactgtaaaactcttt

SEQ ID NO: 5709290 - DNA, 25 bp, Homo sapien
gcgtcaaggcttcagtgaaccttga

SEQ ID NO: 5709291 - DNA, 25 bp, Homo sapien
tgcgccgcatcagctcctggacgtc

SEQ ID NO: 5709292 - DNA, 25 bp, Homo sapien
aacctgtggctggaagcacacagca

SEQ ID NO: 5709293 - DNA, 25 bp, Homo sapien
aatcccatcaaggcaagctggtatc

SEQ ID NO: 5709294 - DNA, 25 bp, Homo sapien
acaatcatctttgcagaggaataat

SEQ ID NO: 5709295 - DNA, 25 bp, Homo sapien
gacccggctcccgggctagggacga

SEQ ID NO: 5709296 - DNA, 25 bp, Homo sapien
cacctgcttcatcactgccttgtga

SEQ ID NO: 5709297 - DNA, 25 bp, Homo sapien
ttcagtgaaccttgatcacgacact

SEQ ID NO: 5709298 - DNA, 25 bp, Homo sapien
gagcgtgcagctggtgcagggcctc

SEQ ID NO: 5709299 - DNA, 25 bp, Homo sapien
cacagggcttgcctggcagaactgc

SEQ ID NO: 5709300 - DNA, 25 bp, Homo sapien
ttaccatcttaaaagagacaaaaaa

SEQ ID NO: 5709301 - DNA, 25 bp, Homo sapien
atcattctgcaggcatatgatgttg

SEQ ID NO: 5709302 - DNA, 25 bp, Homo sapien
actgccaccacacagaagttcaggt

SEQ ID NO: 5709303 - DNA, 25 bp, Homo sapien
tgcactccagcctgggtgacaaagc

SEQ ID NO: 5709304 - DNA, 25 bp, Homo sapien
aaccccgggccgcgactccagagac

SEQ ID NO: 5709305 - DNA, 25 bp, Homo sapien
cgtctgaccgggggtagccctcaca

SEQ ID NO: 5709306 - DNA, 25 bp, Homo sapien
cagagccgaactccacaatctcatc

SEQ ID NO: 5709307 - DNA, 25 bp, Homo sapien
caaggcctcagtgcaaagaaatatg

SEQ ID NO: 5709308 - DNA, 25 bp, Homo sapien
agcctccgctctgcctcgcttcctc

SEQ ID NO: 5709309 - DNA, 25 bp, Homo sapien
gaatacgtatggctgtcaggtcaaa

SEQ ID NO: 5709310 - DNA, 25 bp, Homo sapien
cgtggaattagaacatgcaatttaa

SEQ ID NO: 5709311 - DNA, 25 bp, Homo sapien
ctgggccacctgggaagcctccagg

SEQ ID NO: 5709312 - DNA, 25 bp, Homo sapien
gcaccacactgccaatgttatgcag

SEQ ID NO: 5709313 - DNA, 25 bp, Homo sapien
ctatctcctccttgcgccgcatcag

SEQ ID NO: 5709314 - DNA, 25 bp, Homo sapien
acctggtcaacacagggagaccctg

SEQ ID NO: 5709315 - DNA, 25 bp, Homo sapien
cagtggctcacgcctgtgatcccag

SEQ ID NO: 5709316 - DNA, 25 bp, Homo sapien
gcaatttaaacagcaaacattggta

SEQ ID NO: 5709317 - DNA, 25 bp, Homo sapien
agaggaataatgttgcagcccagca

SEQ ID NO: 5709318 - DNA, 25 bp, Homo sapien
cgtatccacagcagcaaggcctcag

SEQ ID NO: 5709319 - DNA, 25 bp, Homo sapien
actgcactccagcctgggtgacaaa

SEQ ID NO: 5709320 - DNA, 25 bp, Homo sapien
tttgcccaactttctatgaagctct

SEQ ID NO: 5709321 - DNA, 25 bp, Homo sapien
ccagggacaatcatctttgcagagg

SEQ ID NO: 5709322 - DNA, 25 bp, Homo sapien
caggttacaagcctcttccagatcc

SEQ ID NO: 5709323 - DNA, 25 bp, Homo sapien
cacgacactgcactccagcctgggt

SEQ ID NO: 5709324 - DNA, 25 bp, Homo sapien
ctagcagtgggctgggcgcagtggc

SEQ ID NO: 5709325 - DNA, 25 bp, Homo sapien
ctcagggcatagccaggaggttcaa

SEQ ID NO: 5709326 - DNA, 25 bp, Homo sapien
ttgtgcctggcggtgcggacttggt

SEQ ID NO: 5709327 - DNA, 25 bp, Homo sapien
aataaaagggaggaagaataagcat

SEQ ID NO: 5709328 - DNA, 25 bp, Homo sapien
gtggctcacgcctgtgatcccagca

SEQ ID NO: 5709329 - DNA, 25 bp, Homo sapien
cttatgcttcagggagagaagacaa

SEQ ID NO: 5709330 - DNA, 25 bp, Homo sapien
gctgtgtttattatagtctgagact

SEQ ID NO: 5709331 - DNA, 25 bp, Homo sapien
gctcccgggctagggacgacgcccc

SEQ ID NO: 5709332 - DNA, 25 bp, Homo sapien
agcattttcaagaggtctgatctac

SEQ ID NO: 5709333 - DNA, 25 bp, Homo sapien
aaggcccgtggagggccctggctct

SEQ ID NO: 5709334 - DNA, 25 bp, Homo sapien
tccagaaaacaaaaacaaaaacaca

SEQ ID NO: 5709335 - DNA, 25 bp, Homo sapien
atcatccacttgcagacccgcgatg

SEQ ID NO: 5709336 - DNA, 25 bp, Homo sapien
ggaagcacagtacttaaccatttcc

SEQ ID NO: 5709337 - DNA, 25 bp, Homo sapien
tccacagcagcaaggcctcagtgca

SEQ ID NO: 5709338 - DNA, 25 bp, Homo sapien
agctactatggccctgacagcccag

SEQ ID NO: 5709339 - DNA, 25 bp, Homo sapien
gaacatgcaatttaaacagcaaaca

SEQ ID NO: 5709340 - DNA, 25 bp, Homo sapien
acattggtaaacacagcatgtctgt

SEQ ID NO: 5709341 - DNA, 25 bp, Homo sapien
gaaaaaataattcaaagtattggca

SEQ ID NO: 5709342 - DNA, 25 bp, Homo sapien
aaaagagactggaaaatacgtggaa

SEQ ID NO: 5709343 - DNA, 25 bp, Homo sapien
agtgtgagaacctgtggctggaagc

SEQ ID NO: 5709344 - DNA, 25 bp, Homo sapien
tctctacaaaaaataaattagctat

SEQ ID NO: 5709345 - DNA, 25 bp, Homo sapien
gcagaggaataatgttgcagcccag

SEQ ID NO: 5709346 - DNA, 25 bp, Homo sapien
ttacactggtgggccacagtactgc

SEQ ID NO: 5709347 - DNA, 25 bp, Homo sapien
tccagatccttatgcttcagggaga

SEQ ID NO: 5709348 - DNA, 25 bp, Homo sapien
gcactttaggaggccaaggcaggag

SEQ ID NO: 5709349 - DNA, 25 bp, Homo sapien
tccctgttctccaaagggagctact

SEQ ID NO: 5709350 - DNA, 25 bp, Homo sapien
cgctgacagtcacgacgccggcctg

SEQ ID NO: 5709351 - DNA, 25 bp, Homo sapien
cacagcagcaaggcctcagtgcaaa

SEQ ID NO: 5709352 - DNA, 25 bp, Homo sapien
cggctcccgggctagggacgacgcc

SEQ ID NO: 5709353 - DNA, 25 bp, Homo sapien
gaaattcagctggggtgacaacagg

SEQ ID NO: 5709354 - DNA, 25 bp, Homo sapien
gaaggctttggaattgagtgtgaga

SEQ ID NO: 5709355 - DNA, 25 bp, Homo sapien
cagaaaacaaaaacaaaaacacaca

SEQ ID NO: 5709356 - DNA, 25 bp, Homo sapien
agcggtttacaaaatagcgctgatc

SEQ ID NO: 5709357 - DNA, 25 bp, Homo sapien
atgctgttcactttggcgaaggccc

SEQ ID NO: 5709358 - DNA, 25 bp, Homo sapien
cctgtgatcccagcactttaggagg

SEQ ID NO: 5709359 - DNA, 25 bp, Homo sapien
aaataattcaaagtattggcaggaa

SEQ ID NO: 5709360 - DNA, 25 bp, Homo sapien
cgttcctatccatacctcagcggtt

SEQ ID NO: 5709361 - DNA, 25 bp, Homo sapien
ctgtcaggtcaaatagagtttgagg

SEQ ID NO: 5709362 - DNA, 25 bp, Homo sapien
gaggactgcttgagcccaggagttc

SEQ ID NO: 5709363 - DNA, 25 bp, Homo sapien
atcccaatgcctttttggctttcca

SEQ ID NO: 5709364 - DNA, 25 bp, Homo sapien
agcatgtctgtggctaccagagggg

SEQ ID NO: 5709365 - DNA, 25 bp, Homo sapien
cctgtggctggaagcacacagcaat

SEQ ID NO: 5709366 - DNA, 25 bp, Homo sapien
agcgtgttggaacaagtctaagctg

SEQ ID NO: 5709367 - DNA, 25 bp, Homo sapien
caaagcctgactttgcaattgctag

SEQ ID NO: 5709368 - DNA, 25 bp, Homo sapien
aaggaacacagggcttgcctggcag

SEQ ID NO: 5709369 - DNA, 25 bp, Homo sapien
gcgagcgtgcagctggtgcagggcc

SEQ ID NO: 5709370 - DNA, 25 bp, Homo sapien
cacttgcagacccgcgatgctggct

SEQ ID NO: 5709371 - DNA, 25 bp, Homo sapien
ctgtatccaaccacagcaaaaccag

SEQ ID NO: 5709372 - DNA, 25 bp, Homo sapien
tatgcagtgactggaagttctgggt

SEQ ID NO: 5709373 - DNA, 25 bp, Homo sapien
gtaaacacagcatgtctgtggctac

SEQ ID NO: 5709374 - DNA, 25 bp, Homo sapien
ggaacaagtctaagctggtgttttt

SEQ ID NO: 5709375 - DNA, 25 bp, Homo sapien
agtttgagggaattcgcccaatagg

SEQ ID NO: 5709376 - DNA, 25 bp, Homo sapien
aaagggaggaagaataagcattttc

SEQ ID NO: 5709377 - DNA, 25 bp, Homo sapien
caaggcttcagtgaaccttgatcac

SEQ ID NO: 5709378 - DNA, 25 bp, Homo sapien
cagaactgccaaaacagaaagcggt

SEQ ID NO: 5709379 - DNA, 25 bp, Homo sapien
ggtgtttttcccccctgcggatcac

SEQ ID NO: 5709380 - DNA, 25 bp, Homo sapien
gaagctgacaggacaccacgctggg

SEQ ID NO: 5709381 - DNA, 25 bp, Homo sapien
gcagtgcccacagcgtcaaggcttc

SEQ ID NO: 5709382 - DNA, 25 bp, Homo sapien
cggaggggttcttactagcgaagtg

SEQ ID NO: 5709383 - DNA, 25 bp, Homo sapien
aataataataatcacaccagtacct

SEQ ID NO: 5709384 - DNA, 25 bp, Homo sapien
cccagctgctgaggaagcacagtac

SEQ ID NO: 5709385 - DNA, 25 bp, Homo sapien
gctgatgctgttcactttggcgaag

SEQ ID NO: 5709386 - DNA, 25 bp, Homo sapien
gcggtgtgcaagaactggggaaatg

SEQ ID NO: 5709387 - DNA, 25 bp, Homo sapien
aaccagtcccaaggaacacagggct

SEQ ID NO: 5709388 - DNA, 25 bp, Homo sapien
ttggtttgggagggtcataagaaat

SEQ ID NO: 5709389 - DNA, 25 bp, Homo sapien
catggtggtgcacgcctgtggtccc

SEQ ID NO: 5709390 - DNA, 25 bp, Homo sapien
aagcctgactttgcaattgctagcc

SEQ ID NO: 5709391 - DNA, 25 bp, Homo sapien
ggctgtcaggtcaaatagagtttga

SEQ ID NO: 5709392 - DNA, 25 bp, Homo sapien
gactttataaaagagactggaaaat

SEQ ID NO: 5709393 - DNA, 25 bp, Homo sapien
tttggaattgagtgtgagaacctgt

SEQ ID NO: 5709394 - DNA, 25 bp, Homo sapien
tacgtggaattagaacatgcaattt

SEQ ID NO: 5709395 - DNA, 25 bp, Homo sapien
aaccacagcaaaaccagtcccaagg

SEQ ID NO: 5709396 - DNA, 25 bp, Homo sapien
agtacttaaccatttccgtatccac

SEQ ID NO: 5709397 - DNA, 25 bp, Homo sapien
agggacgacgccccagtcgaccgta

SEQ ID NO: 5709398 - DNA, 25 bp, Homo sapien
gcgaggagcctccgctctgcctcgc

SEQ ID NO: 5709399 - DNA, 25 bp, Homo sapien
tccgtatccacagcagcaaggcctc

SEQ ID NO: 5709400 - DNA, 25 bp, Homo sapien
aggcaggaggactgcttgagcccag

SEQ ID NO: 5709401 - DNA, 25 bp, Homo sapien
tggtgggttcctaaagaggaagctg

SEQ ID NO: 5709402 - DNA, 25 bp, Homo sapien
cagggcttgcctggcagaactgcca

SEQ ID NO: 5709403 - DNA, 25 bp, Homo sapien
gcctcagtgcaaagaaatatgttgg

SEQ ID NO: 5709404 - DNA, 25 bp, Homo sapien
aggggaatacgtatggctgtcaggt

SEQ ID NO: 5709405 - DNA, 25 bp, Homo sapien
aatccagggagattacactggtggg

SEQ ID NO: 5709406 - DNA, 25 bp, Homo sapien
ccatcaaggcaagctggtatctgta

SEQ ID NO: 5709407 - DNA, 25 bp, Homo sapien
aacagaaagcggtgtgcaagaactg

SEQ ID NO: 5709408 - DNA, 25 bp, Homo sapien
ggctagggacgacgccccagtcgac

SEQ ID NO: 5709409 - DNA, 25 bp, Homo sapien
acagcatgtctgtggctaccagagg

SEQ ID NO: 5709410 - DNA, 25 bp, Homo sapien
tctttgtgggcctcagccatgtccc

SEQ ID NO: 5709411 - DNA, 25 bp, Homo sapien
gtgaaccttgatcacgacactgcac

SEQ ID NO: 5709412 - DNA, 25 bp, Homo sapien
tctaagctggtgtttttcccccctg

SEQ ID NO: 5709413 - DNA, 25 bp, Homo sapien
cacgtcatagttggccttgatctgc

SEQ ID NO: 5709414 - DNA, 25 bp, Homo sapien
aaaacagaaagcggtgtgcaagaac

SEQ ID NO: 5709415 - DNA, 25 bp, Homo sapien
gggctgggcgcagtggctcacgcct

SEQ ID NO: 5709416 - DNA, 25 bp, Homo sapien
ctcttctgaccccatctgagctttg

SEQ ID NO: 5709417 - DNA, 25 bp, Homo sapien
cgcctgtgatcccagcactttagga

SEQ ID NO: 5709418 - DNA, 25 bp, Homo sapien
gaccgtaactacggctccgcccatg

SEQ ID NO: 5709419 - DNA, 25 bp, Homo sapien
tctgacccagtttgcggctcatggc

SEQ ID NO: 5709420 - DNA, 25 bp, Homo sapien
cacctgggaagcctccaggctttcc

SEQ ID NO: 5709421 - DNA, 25 bp, Homo sapien
gtggcctaatttgtgaaagaggcca

SEQ ID NO: 5709422 - DNA, 25 bp, Homo sapien
ttggaaatccctagacccaagtcca

SEQ ID NO: 5709423 - DNA, 25 bp, Homo sapien
gcttcccctcactgtgctgcaccac

SEQ ID NO: 5709424 - DNA, 25 bp, Homo sapien
acatgcaatttaaacagcaaacatt

SEQ ID NO: 5709425 - DNA, 25 bp, Homo sapien
ctggcggtgcggacttggtacaggt

SEQ ID NO: 5709426 - DNA, 25 bp, Homo sapien
aaggagcttgctgccctctggtggg

SEQ ID NO: 5709427 - DNA, 25 bp, Homo sapien
cgccccagtcgaccgtaactacggc

SEQ ID NO: 5709428 - DNA, 25 bp, Homo sapien
tctactcgttcctatccatacctca

SEQ ID NO: 5709429 - DNA, 25 bp, Homo sapien
catctgagctttggtttgggagggt

SEQ ID NO: 5709430 - DNA, 25 bp, Homo sapien
ctgcaccacactgccaatgttatgc

SEQ ID NO: 5709431 - DNA, 25 bp, Homo sapien
tggaattagaacatgcaatttaaac

SEQ ID NO: 5709432 - DNA, 25 bp, Homo sapien
aagcggtgtgcaagaactggggaaa

SEQ ID NO: 5709433 - DNA, 25 bp, Homo sapien
tggctggaagcacacagcaatacca

SEQ ID NO: 5709434 - DNA, 25 bp, Homo sapien
ggcggctgaggcagtgcccacagcg

SEQ ID NO: 5709435 - DNA, 25 bp, Homo sapien
caggtcaaatagagtttgagggaat

SEQ ID NO: 5709436 - DNA, 25 bp, Homo sapien
agcccagcagtccttttcctgccca

SEQ ID NO: 5709437 - DNA, 25 bp, Homo sapien
cagaagttcaggttacaagcctctt

SEQ ID NO: 5709438 - DNA, 25 bp, Homo sapien
catggagaggaaaaaataattcaaa

SEQ ID NO: 5709439 - DNA, 25 bp, Homo sapien
ctatgaagctcttctgaccccatct

SEQ ID NO: 5709440 - DNA, 25 bp, Homo sapien
atatgatgttgtgcctggcggtgcg

SEQ ID NO: 5709441 - DNA, 25 bp, Homo sapien
ctcgttcctatccatacctcagcgg

SEQ ID NO: 5709442 - DNA, 25 bp, Homo sapien
tatgcatggtggtgcacgcctgtgg

SEQ ID NO: 5709443 - DNA, 25 bp, Homo sapien
ctggtgtttttcccccctgcggatc

SEQ ID NO: 5709444 - DNA, 25 bp, Homo sapien
gtgaaaggagcttgctgccctctgg

SEQ ID NO: 5709445 - DNA, 25 bp, Homo sapien
ttttcccccctgcggatcactgtca

SEQ ID NO: 5709446 - DNA, 25 bp, Homo sapien
tgtggctaccagaggggaatacgta

SEQ ID NO: 5709447 - DNA, 25 bp, Homo sapien
cctccacctgcttcatcactgcctt

SEQ ID NO: 5709448 - DNA, 25 bp, Homo sapien
tgacaaagcaagaccttgtctccag

SEQ ID NO: 5709449 - DNA, 25 bp, Homo sapien
agggtcatatcagcactgtaaaact

SEQ ID NO: 5709450 - DNA, 25 bp, Homo sapien
cgcagtggctcacgcctgtgatccc

SEQ ID NO: 5709451 - DNA, 25 bp, Homo sapien
ggccttgatctgcgcttctatctcc

SEQ ID NO: 5709452 - DNA, 25 bp, Homo sapien
tgtcgcgagcgtgcagctggtgcag

SEQ ID NO: 5709453 - DNA, 25 bp, Homo sapien
gggcaagctgtgtttattatagtct

SEQ ID NO: 5709454 - DNA, 25 bp, Homo sapien
cggctcgttcatcccaatgcctttt

SEQ ID NO: 5709455 - DNA, 25 bp, Homo sapien
aagaaattcagctggggtgacaaca

SEQ ID NO: 5709456 - DNA, 25 bp, Homo sapien
gtctgatctactcgttcctatccat

SEQ ID NO: 5709457 - DNA, 25 bp, Homo sapien
ttccgcccacttgcccacaatccag

SEQ ID NO: 5709458 - DNA, 25 bp, Homo sapien
tggtggtgcacgcctgtggtcccag

SEQ ID NO: 5709459 - DNA, 25 bp, Homo sapien
actccagagacccggctcccgggct

SEQ ID NO: 5709460 - DNA, 25 bp, Homo sapien
ataaaagagactggaaaatacgtgg

SEQ ID NO: 5709461 - DNA, 25 bp, Homo sapien
aacaagtctaagctggtgtttttcc

SEQ ID NO: 5709462 - DNA, 25 bp, Homo sapien
caaaaccagtcccaaggaacacagg

SEQ ID NO: 5709463 - DNA, 25 bp, Homo sapien
accgggggtagccctcacagtccac

SEQ ID NO: 5709464 - DNA, 25 bp, Homo sapien
aggctttccctgttctccaaaggga

SEQ ID NO: 5709465 - DNA, 25 bp, Homo sapien
cctctttgtgggcctcagccatgtc

SEQ ID NO: 5709466 - DNA, 25 bp, Homo sapien
aaaaataataataataatcacacca

SEQ ID NO: 5709467 - DNA, 25 bp, Homo sapien
actgcttgagcccaggagttcgaga

SEQ ID NO: 5709468 - DNA, 25 bp, Homo sapien
cctcacagtccaccagcggctcgtt

SEQ ID NO: 5709469 - DNA, 25 bp, Homo sapien
atagagtttgagggaattcgcccaa

SEQ ID NO: 5709470 - DNA, 25 bp, Homo sapien
cactgccttgtgatcattctgcagg

SEQ ID NO: 5709471 - DNA, 25 bp, Homo sapien
gacaacagggtcatatcagcactgt

SEQ ID NO: 5709472 - DNA, 25 bp, Homo sapien
gtcacgacgccggcctgcgaggagc

SEQ ID NO: 5709473 - DNA, 25 bp, Homo sapien
ctcgcttcctcgtcggacatcgtga

SEQ ID NO: 5709474 - DNA, 25 bp, Homo sapien
ttataaaagagactggaaaatacgt

SEQ ID NO: 5709475 - DNA, 25 bp, Homo sapien
cagcactgtaaaactctttattaaa

SEQ ID NO: 5709476 - DNA, 25 bp, Homo sapien
atctcagggcatagccaggaggttc

SEQ ID NO: 5709477 - DNA, 25 bp, Homo sapien
ggcagaactgccaaaacagaaagcg

SEQ ID NO: 5709478 - DNA, 25 bp, Homo sapien
tgcagtgactggaagttctgggtgt

SEQ ID NO: 5709479 - DNA, 25 bp, Homo sapien
caaactagcagtgggctgggcgcag

SEQ ID NO: 5709480 - DNA, 25 bp, Homo sapien
gtgggctgggcgcagtggctcacgc

SEQ ID NO: 5709481 - DNA, 25 bp, Homo sapien
cttgctgccctctggtgggttccta

SEQ ID NO: 5709482 - DNA, 25 bp, Homo sapien
gggagaccctgtctctacaaaaaat

SEQ ID NO: 5709483 - DNA, 25 bp, Homo sapien
tgtcacattcaggggcttcccctca

SEQ ID NO: 5709484 - DNA, 25 bp, Homo sapien
aataatcacaccagtacctgccaga

SEQ ID NO: 5709485 - DNA, 25 bp, Homo sapien
cagggcctcctccacctgcttcatc

SEQ ID NO: 5709486 - DNA, 25 bp, Homo sapien
ctcagtgcaaagaaatatgttggtc

SEQ ID NO: 5709487 - DNA, 25 bp, Homo sapien
aagtcaaactagcagtgggctgggc

SEQ ID NO: 5709488 - DNA, 25 bp, Homo sapien
gaggccaagcctaagtttttaagaa

SEQ ID NO: 5709489 - DNA, 25 bp, Homo sapien
ttcacagagccgaactccacaatct

SEQ ID NO: 5709490 - DNA, 25 bp, Homo sapien
gatctactcgttcctatccatacct

SEQ ID NO: 5709491 - DNA, 25 bp, Homo sapien
caagaggtctgatctactcgttcct

SEQ ID NO: 5709492 - DNA, 25 bp, Homo sapien
accatggagaggaaaaaataattca

SEQ ID NO: 5709493 - DNA, 25 bp, Homo sapien
aaaatacgtggaattagaacatgca

SEQ ID NO: 5709494 - DNA, 25 bp, Homo sapien
cctgtggtcccagatacttgggcgg

SEQ ID NO: 5709495 - DNA, 25 bp, Homo sapien
tataaaaagtcaaactagcagtggg

SEQ ID NO: 5709496 - DNA, 25 bp, Homo sapien
agggccgtggcctaatttgtgaaag

SEQ ID NO: 5709497 - DNA, 25 bp, Homo sapien
tcccgggctagggacgacgccccag

SEQ ID NO: 5709498 - DNA, 25 bp, Homo sapien
agggaggaagaataagcattttcaa

SEQ ID NO: 5709499 - DNA, 25 bp, Homo sapien
aaattagctatgcatggtggtgcac

SEQ ID NO: 5709500 - DNA, 25 bp, Homo sapien
gtcaggtcaaatagagtttgaggga

SEQ ID NO: 5709501 - DNA, 25 bp, Homo sapien
ggggttcttactagcgaagtgaaag

SEQ ID NO: 5709502 - DNA, 25 bp, Homo sapien
tgttctccaaagggagctactatgg

SEQ ID NO: 5709503 - DNA, 25 bp, Homo sapien
ccaagtccagggcaagggaagatgc

SEQ ID NO: 5709504 - DNA, 25 bp, Homo sapien
cctgcggatcactgtcacattcagg

SEQ ID NO: 5709505 - DNA, 25 bp, Homo sapien
agtccttttcctgcccagcgtgttg

SEQ ID NO: 5709506 - DNA, 25 bp, Homo sapien
cccgtggagggccctggctctcact

SEQ ID NO: 5709507 - DNA, 25 bp, Homo sapien
aaacacagcatgtctgtggctacca

SEQ ID NO: 5709508 - DNA, 25 bp, Homo sapien
ctgccttgtgatcattctgcaggca

SEQ ID NO: 5709509 - DNA, 25 bp, Homo sapien
tgttcactttggcgaaggcccgtgg

SEQ ID NO: 5709510 - DNA, 25 bp, Homo sapien
tcggacatcgtgaaccccgggccgc

SEQ ID NO: 5709511 - DNA, 25 bp, Homo sapien
aatctcatcatccacttgcagaccc

SEQ ID NO: 5709512 - DNA, 25 bp, Homo sapien
tagctatgcatggtggtgcacgcct

SEQ ID NO: 5709513 - DNA, 25 bp, Homo sapien
ctcttccagatccttatgcttcagg

SEQ ID NO: 5709514 - DNA, 25 bp, Homo sapien
agtttgcggctcatggcctctttgt

SEQ ID NO: 5709515 - DNA, 25 bp, Homo sapien
ttctatgaagctcttctgaccccat

SEQ ID NO: 5709516 - DNA, 25 bp, Homo sapien
cgggggtagccctcacagtccacca

SEQ ID NO: 5709517 - DNA, 25 bp, Homo sapien
acaaaatagcgctgatctcagggca

SEQ ID NO: 5709518 - DNA, 25 bp, Homo sapien
taagaatgccttaatccagggagat

SEQ ID NO: 5709519 - DNA, 25 bp, Homo sapien
atccctagacccaagtccagggcaa

SEQ ID NO: 5709520 - DNA, 25 bp, Homo sapien
cctctggtgggttcctaaagaggaa

SEQ ID NO: 5709521 - DNA, 25 bp, Homo sapien
agtacctgccagaataacttccgcc

SEQ ID NO: 5709522 - DNA, 25 bp, Homo sapien
ttctatctcctccttgcgccgcatc

SEQ ID NO: 5709523 - DNA, 25 bp, Homo sapien
caacagggtcatatcagcactgtaa

SEQ ID NO: 5709524 - DNA, 25 bp, Homo sapien
tgacagcccagctgctgaggaagca

SEQ ID NO: 5709525 - DNA, 25 bp, Homo sapien
tcactctgacccagtttgcggctca

SEQ ID NO: 5709526 - DNA, 25 bp, Homo sapien
ggcctcagccatgtcccgggcctgc

SEQ ID NO: 5709527 - DNA, 25 bp, Homo sapien
ttggaacaagtctaagctggtgttt

SEQ ID NO: 5709528 - DNA, 25 bp, Homo sapien
ttttttaactgggcaagctgtgttt

SEQ ID NO: 5709529 - DNA, 25 bp, Homo sapien
ccccgggccgcgactccagagaccc

SEQ ID NO: 5709530 - DNA, 25 bp, Homo sapien
gactggaagttctgggtgttcacag

SEQ ID NO: 5709531 - DNA, 25 bp, Homo sapien
caggacaccacgctgggccacctgg

SEQ ID NO: 5709532 - DNA, 25 bp, Homo sapien
caagcctaagtttttaagaatgcct

SEQ ID NO: 5709533 - DNA, 25 bp, Homo sapien
cgcttcctcgtcggacatcgtgaac

SEQ ID NO: 5709534 - DNA, 25 bp, Homo sapien
cacaccagtacctgccagaataact

SEQ ID NO: 5709535 - DNA, 25 bp, Homo sapien
cttctgaccccatctgagctttggt

SEQ ID NO: 5709536 - DNA, 25 bp, Homo sapien
ttacaagcctcttccagatccttat

SEQ ID NO: 5709537 - DNA, 25 bp, Homo sapien
tactggtcgtgctcgggtcgtgtcc

SEQ ID NO: 5709538 - DNA, 25 bp, Homo sapien
ggacacgacccgagcacgaccagta

SEQ ID NO: 5709539 - DNA, 25 bp, Homo sapien
ggaaggcacgggagctcgcccccgg

SEQ ID NO: 5709540 - DNA, 25 bp, Homo sapien
ccgggggcgagctcccgtgccttcc

SEQ ID NO: 5709541 - DNA, 25 bp, Homo sapien
ggacgccctggtttgtttgcacaag

SEQ ID NO: 5709542 - DNA, 25 bp, Homo sapien
cttgtgcaaacaaaccagggcgtcc

SEQ ID NO: 5709543 - DNA, 25 bp, Homo sapien
gtcccgagaagtgcagcccccaacc

SEQ ID NO: 5709544 - DNA, 25 bp, Homo sapien
ggttgggggctgcacttctcgggac

SEQ ID NO: 5709545 - DNA, 25 bp, Homo sapien
cgcgcggaccgtcgcggaccgtcgg

SEQ ID NO: 5709546 - DNA, 25 bp, Homo sapien
ccgacggtccgcgacggtccgcgcg

SEQ ID NO: 5709547 - DNA, 25 bp, Homo sapien
acgcgcggaccgtcgcggaccgtcg

SEQ ID NO: 5709548 - DNA, 25 bp, Homo sapien
cgacggtccgcgacggtccgcgcgt

SEQ ID NO: 5709549 - DNA, 25 bp, Homo sapien
gacgcgcggaccgtcgcggaccgtc

SEQ ID NO: 5709550 - DNA, 25 bp, Homo sapien
gacggtccgcgacggtccgcgcgtc

SEQ ID NO: 5709551 - DNA, 25 bp, Homo sapien
gacggtggtggcgacgcaccgggac

SEQ ID NO: 5709552 - DNA, 25 bp, Homo sapien
gtcccggtgcgtcgccaccaccgtc

SEQ ID NO: 5709553 - DNA, 25 bp, Homo sapien
gtggtggcgacgcaccgggacgagc

SEQ ID NO: 5709554 - DNA, 25 bp, Homo sapien
gctcgtcccggtgcgtcgccaccac

SEQ ID NO: 5709555 - DNA, 25 bp, Homo sapien
ttcttgtttgcaacactaatacatt

SEQ ID NO: 5709556 - DNA, 25 bp, Homo sapien
aatgtattagtgttgcaaacaagaa

SEQ ID NO: 5709557 - DNA, 25 bp, Homo sapien
ggttacaggccccacattgaccccg

SEQ ID NO: 5709558 - DNA, 25 bp, Homo sapien
cggggtcaatgtggggcctgtaacc

SEQ ID NO: 5709559 - DNA, 25 bp, Homo sapien
cgggtccccagggacagcctccgac

SEQ ID NO: 5709560 - DNA, 25 bp, Homo sapien
gtcggaggctgtccctggggacccg

SEQ ID NO: 5709561 - DNA, 25 bp, Homo sapien
agatttccaaagagatttagtataa

SEQ ID NO: 5709562 - DNA, 25 bp, Homo sapien
ttatactaaatctctttggaaatct

SEQ ID NO: 5709563 - DNA, 25 bp, Homo sapien
cgtgctgccgccacctccgctcgga

SEQ ID NO: 5709564 - DNA, 25 bp, Homo sapien
tccgagcggaggtggcggcagcacg

SEQ ID NO: 5709565 - DNA, 25 bp, Homo sapien
gactcattaggtgatcttaatgaaa

SEQ ID NO: 5709566 - DNA, 25 bp, Homo sapien
tttcattaagatcacctaatgagtc

SEQ ID NO: 5709567 - DNA, 25 bp, Homo sapien
gtatttaccaggaagagaatccgta

SEQ ID NO: 5709568 - DNA, 25 bp, Homo sapien
tacggattctcttcctggtaaatac

SEQ ID NO: 5709569 - DNA, 25 bp, Homo sapien
tggtccgcgcggcaagaccgcgaga

SEQ ID NO: 5709570 - DNA, 25 bp, Homo sapien
tctcgcggtcttgccgcgcggacca

SEQ ID NO: 5709571 - DNA, 25 bp, Homo sapien
acgaccgtggtactcttgtgagtgg

SEQ ID NO: 5709572 - DNA, 25 bp, Homo sapien
ccactcacaagagtaccacggtcgt

SEQ ID NO: 5709573 - DNA, 25 bp, Homo sapien
gtacaggttgcactaacctttagtg

SEQ ID NO: 5709574 - DNA, 25 bp, Homo sapien
cactaaaggttagtgcaacctgtac

SEQ ID NO: 5709575 - DNA, 25 bp, Homo sapien
gaacaacgtctacatgctgtctccc

SEQ ID NO: 5709576 - DNA, 25 bp, Homo sapien
tgaaccagaggatgacggagaacct

SEQ ID NO: 5709577 - DNA, 25 bp, Homo sapien
acagaagccacaaacaggctcatag

SEQ ID NO: 5709578 - DNA, 25 bp, Homo sapien
atggctgatggaaatgaaggtcctc

SEQ ID NO: 5709579 - DNA, 25 bp, Homo sapien
ggccccctccgcctccggctccgtc

SEQ ID NO: 5709580 - DNA, 25 bp, Homo sapien
gccatcatcatctacccgctgtgtg

SEQ ID NO: 5709581 - DNA, 25 bp, Homo sapien
cggtctccttgtcagaatttaggaa

SEQ ID NO: 5709582 - DNA, 25 bp, Homo sapien
ccctcgggggctttcggctcccaca

SEQ ID NO: 5709583 - DNA, 25 bp, Homo sapien
cagagaagccaggagcacccggcgt

SEQ ID NO: 5709584 - DNA, 25 bp, Homo sapien
ctggaggggggcctgccaggactcc

SEQ ID NO: 5709585 - DNA, 25 bp, Homo sapien
ctattgactgctcccctgccctagt

SEQ ID NO: 5709586 - DNA, 25 bp, Homo sapien
ggcctgtccctgtctctctgacagc

SEQ ID NO: 5709587 - DNA, 25 bp, Homo sapien
gtcctcaccacagtccacagaagcc

SEQ ID NO: 5709588 - DNA, 25 bp, Homo sapien
agtccttgccgcacgcgtaggcatc

SEQ ID NO: 5709589 - DNA, 25 bp, Homo sapien
gagaagccaggagcacccggcgtcc

SEQ ID NO: 5709590 - DNA, 25 bp, Homo sapien
gacaagttccgcagcgtgctggtgg

SEQ ID NO: 5709591 - DNA, 25 bp, Homo sapien
agcctgcagagccccgctgtccttg

SEQ ID NO: 5709592 - DNA, 25 bp, Homo sapien
gtgttcctacgcttccctccagtcc

SEQ ID NO: 5709593 - DNA, 25 bp, Homo sapien
cccccgctgtgcaggagacccagct

SEQ ID NO: 5709594 - DNA, 25 bp, Homo sapien
tgagcttctgcctgccccacaagat

SEQ ID NO: 5709595 - DNA, 25 bp, Homo sapien
agaacctgcagcagctagcccaaga

SEQ ID NO: 5709596 - DNA, 25 bp, Homo sapien
caagttccgcagcgtgctggtggtg

SEQ ID NO: 5709597 - DNA, 25 bp, Homo sapien
tgatcctggcgctccaggatgaggt

SEQ ID NO: 5709598 - DNA, 25 bp, Homo sapien
ctctgtgttcctacgcttccctcca

SEQ ID NO: 5709599 - DNA, 25 bp, Homo sapien
gagaagccctgtcacctgtgcacat

SEQ ID NO: 5709600 - DNA, 25 bp, Homo sapien
tatgtctgcctgatggcctcaccca

SEQ ID NO: 5709601 - DNA, 25 bp, Homo sapien
tccaggatgaggtgtccgccatggc

SEQ ID NO: 5709602 - DNA, 25 bp, Homo sapien
agctctcgtgtcctggaggaagagc

SEQ ID NO: 5709603 - DNA, 25 bp, Homo sapien
actgatgattctccccagcatccac

SEQ ID NO: 5709604 - DNA, 25 bp, Homo sapien
cctggcattgggtggatgcgggctg

SEQ ID NO: 5709605 - DNA, 25 bp, Homo sapien
agccctgtcacctgtgcacatcttg

SEQ ID NO: 5709606 - DNA, 25 bp, Homo sapien
attgggtggatgcgggctggccgtg

SEQ ID NO: 5709607 - DNA, 25 bp, Homo sapien
agcttcctattgactgctcccctgc

SEQ ID NO: 5709608 - DNA, 25 bp, Homo sapien
ggtggttccgctgtggggctgctgc

SEQ ID NO: 5709609 - DNA, 25 bp, Homo sapien
gtggcctgtccctgtctctctgaca

SEQ ID NO: 5709610 - DNA, 25 bp, Homo sapien
tgccgtccgttcttgccaagttctc

SEQ ID NO: 5709611 - DNA, 25 bp, Homo sapien
acgcttccctccagtccttgccgca

SEQ ID NO: 5709612 - DNA, 25 bp, Homo sapien
ttgtgaagtgccctgtggccccctc

SEQ ID NO: 5709613 - DNA, 25 bp, Homo sapien
ccagacatgggttgatcacctagag

SEQ ID NO: 5709614 - DNA, 25 bp, Homo sapien
cccttcactgcccgggtcggcggtc

SEQ ID NO: 5709615 - DNA, 25 bp, Homo sapien
catctggggcacgagggcctgggct

SEQ ID NO: 5709616 - DNA, 25 bp, Homo sapien
gcccctggtggttccgctgtggggc

SEQ ID NO: 5709617 - DNA, 25 bp, Homo sapien
ccagccccatcagcgtgattctggt

SEQ ID NO: 5709618 - DNA, 25 bp, Homo sapien
gagaacacgcggcgctcccagctgc

SEQ ID NO: 5709619 - DNA, 25 bp, Homo sapien
ggtgatcaagaccacatctgctgtg

SEQ ID NO: 5709620 - DNA, 25 bp, Homo sapien
acctcaaggaagcttatgacagcct

SEQ ID NO: 5709621 - DNA, 25 bp, Homo sapien
tttcctggcccagtcctcaccacag

SEQ ID NO: 5709622 - DNA, 25 bp, Homo sapien
gctggagaagccctgtcacctgtgc

SEQ ID NO: 5709623 - DNA, 25 bp, Homo sapien
gcccccagctctcgtgtcctggagg

SEQ ID NO: 5709624 - DNA, 25 bp, Homo sapien
cccgtgctgaggctgagccctcttg

SEQ ID NO: 5709625 - DNA, 25 bp, Homo sapien
ctccttggaccccccagtctgtggc

SEQ ID NO: 5709626 - DNA, 25 bp, Homo sapien
ggccttgctgcaggttttccagctt

SEQ ID NO: 5709627 - DNA, 25 bp, Homo sapien
ggctgctgccctctgtgttcctacg

SEQ ID NO: 5709628 - DNA, 25 bp, Homo sapien
atcagcgtgattctggtgagctcgg

SEQ ID NO: 5709629 - DNA, 25 bp, Homo sapien
ggacctcaaggaagcttatgacagc

SEQ ID NO: 5709630 - DNA, 25 bp, Homo sapien
tgggtgagcttcctattgactgctc

SEQ ID NO: 5709631 - DNA, 25 bp, Homo sapien
tgacggagaacctgctggccagcct

SEQ ID NO: 5709632 - DNA, 25 bp, Homo sapien
cttccgcggccgccaccacctggag

SEQ ID NO: 5709633 - DNA, 25 bp, Homo sapien
ctgtgtgagaacaacgtctacatgc

SEQ ID NO: 5709634 - DNA, 25 bp, Homo sapien
gagaggacgacgtccccttcactgc

SEQ ID NO: 5709635 - DNA, 25 bp, Homo sapien
acgaggagcgccgctgccagtacct

SEQ ID NO: 5709636 - DNA, 25 bp, Homo sapien
gcttcacatcaacagctggctggag

SEQ ID NO: 5709637 - DNA, 25 bp, Homo sapien
cctggtcctgaccatctggggcacg

SEQ ID NO: 5709638 - DNA, 25 bp, Homo sapien
ttcaaggcccatgtgggctgtgcgt

SEQ ID NO: 5709639 - DNA, 25 bp, Homo sapien
cccgggtcggcggtcgcagcctcag

SEQ ID NO: 5709640 - DNA, 25 bp, Homo sapien
cccagcatggacaactccagcgcag

SEQ ID NO: 5709641 - DNA, 25 bp, Homo sapien
gccaccgtgctgcagcacgaggagc

SEQ ID NO: 5709642 - DNA, 25 bp, Homo sapien
gttcctacgcttccctccagtcctt

SEQ ID NO: 5709643 - DNA, 25 bp, Homo sapien
ccctgagcccaggcggagggcggaa

SEQ ID NO: 5709644 - DNA, 25 bp, Homo sapien
gattctccccagcatccacaccggg

SEQ ID NO: 5709645 - DNA, 25 bp, Homo sapien
cgtcctcctcaggccccctccgcct

SEQ ID NO: 5709646 - DNA, 25 bp, Homo sapien
catagccaagctgtgacctggtcct

SEQ ID NO: 5709647 - DNA, 25 bp, Homo sapien
cggccccacggcgggatgcgggaca

SEQ ID NO: 5709648 - DNA, 25 bp, Homo sapien
tgctaggctggagaagccctgtcac

SEQ ID NO: 5709649 - DNA, 25 bp, Homo sapien
tctacatgctgtctcccaatgccag

SEQ ID NO: 5709650 - DNA, 25 bp, Homo sapien
cacctgctccttggaccccccagtc

SEQ ID NO: 5709651 - DNA, 25 bp, Homo sapien
cttcctcccaggctaccctgagcct

SEQ ID NO: 5709652 - DNA, 25 bp, Homo sapien
accctgtcattgccgtcttccaggc

SEQ ID NO: 5709653 - DNA, 25 bp, Homo sapien
ggctggccgtggcccagtgaagcct

SEQ ID NO: 5709654 - DNA, 25 bp, Homo sapien
attgactgctcccctgccctagtgc

SEQ ID NO: 5709655 - DNA, 25 bp, Homo sapien
agatgcggacctggccttgctgcag

SEQ ID NO: 5709656 - DNA, 25 bp, Homo sapien
actgcccgggtcggcggtcgcagcc

SEQ ID NO: 5709657 - DNA, 25 bp, Homo sapien
caccagccccatcagcgtgattctg

SEQ ID NO: 5709658 - DNA, 25 bp, Homo sapien
cgggggctttcggctcccacactga

SEQ ID NO: 5709659 - DNA, 25 bp, Homo sapien
ctggccgtggcccagtgaagcctgc

SEQ ID NO: 5709660 - DNA, 25 bp, Homo sapien
cttcctattgactgctcccctgccc

SEQ ID NO: 5709661 - DNA, 25 bp, Homo sapien
ggctttcggctcccacactgatgat

SEQ ID NO: 5709662 - DNA, 25 bp, Homo sapien
atgccctgctgctgctcagtgatga

SEQ ID NO: 5709663 - DNA, 25 bp, Homo sapien
ctgtggggctgctgccctctgtgtt

SEQ ID NO: 5709664 - DNA, 25 bp, Homo sapien
cagtcctcaccacagtccacagaag

SEQ ID NO: 5709665 - DNA, 25 bp, Homo sapien
tacttcccagcggggactcgccact

SEQ ID NO: 5709666 - DNA, 25 bp, Homo sapien
cccctgccctagtgcgggtgatcaa

SEQ ID NO: 5709667 - DNA, 25 bp, Homo sapien
gaggaccctgtcattgccgtcttcc

SEQ ID NO: 5709668 - DNA, 25 bp, Homo sapien
catccagctgcacacctatgtctgc

SEQ ID NO: 5709669 - DNA, 25 bp, Homo sapien
ttctccttgccggtctccttgtcag

SEQ ID NO: 5709670 - DNA, 25 bp, Homo sapien
gctgccctctgtgttcctacgcttc

SEQ ID NO: 5709671 - DNA, 25 bp, Homo sapien
caggctaccctgagcctttcctggc

SEQ ID NO: 5709672 - DNA, 25 bp, Homo sapien
cccgctgtgcaggagacccagctca

SEQ ID NO: 5709673 - DNA, 25 bp, Homo sapien
gtgaagtgccctgtggccccctccc

SEQ ID NO: 5709674 - DNA, 25 bp, Homo sapien
ttgcccctggtggttccgctgtggg

SEQ ID NO: 5709675 - DNA, 25 bp, Homo sapien
acactgatgattctccccagcatcc

SEQ ID NO: 5709676 - DNA, 25 bp, Homo sapien
tcattgccgtcttccaggctctgct

SEQ ID NO: 5709677 - DNA, 25 bp, Homo sapien
ctgagccctcttggccctgaggcct

SEQ ID NO: 5709678 - DNA, 25 bp, Homo sapien
tcttgccaagttctccttgccggtc

SEQ ID NO: 5709679 - DNA, 25 bp, Homo sapien
ccgtgctgcagcacgaggagcgccg

SEQ ID NO: 5709680 - DNA, 25 bp, Homo sapien
acccacgaggaccctgtcattgccg

SEQ ID NO: 5709681 - DNA, 25 bp, Homo sapien
ggtggtgaccacccacgaggaccct

SEQ ID NO: 5709682 - DNA, 25 bp, Homo sapien
gagggcctgggctggccctgctagg

SEQ ID NO: 5709683 - DNA, 25 bp, Homo sapien
ccagatggtggtgtggatgctgcag

SEQ ID NO: 5709684 - DNA, 25 bp, Homo sapien
ggggcaataagctgctgttcaggta

SEQ ID NO: 5709685 - DNA, 25 bp, Homo sapien
gtctgtggccaccctgaagaatgtg

SEQ ID NO: 5709686 - DNA, 25 bp, Homo sapien
cggggactcgccactgaaccagagg

SEQ ID NO: 5709687 - DNA, 25 bp, Homo sapien
gctcatctggtgtactggggcaagg

SEQ ID NO: 5709688 - DNA, 25 bp, Homo sapien
catgaacgcgcagccatcctcagtg

SEQ ID NO: 5709689 - DNA, 25 bp, Homo sapien
tgactgctcccctgccctagtgcgg

SEQ ID NO: 5709690 - DNA, 25 bp, Homo sapien
gccggtctccttgtcagaatttagg

SEQ ID NO: 5709691 - DNA, 25 bp, Homo sapien
tcatctggtgtactggggcaaggcc

SEQ ID NO: 5709692 - DNA, 25 bp, Homo sapien
ctaaggcacagttttctagaaataa

SEQ ID NO: 5709693 - DNA, 25 bp, Homo sapien
acccgggaggccaagctgatcctgg

SEQ ID NO: 5709694 - DNA, 25 bp, Homo sapien
ttccatttgtgaagtgccctgtggc

SEQ ID NO: 5709695 - DNA, 25 bp, Homo sapien
ccttgtcagaatttaggaatcccct

SEQ ID NO: 5709696 - DNA, 25 bp, Homo sapien
cccgctgtccttgcccctggtggtt

SEQ ID NO: 5709697 - DNA, 25 bp, Homo sapien
gctacttcccagcggggactcgcca

SEQ ID NO: 5709698 - DNA, 25 bp, Homo sapien
gccccagcatggacaactccagcgc

SEQ ID NO: 5709699 - DNA, 25 bp, Homo sapien
cccgctgtgtgagaacaacgtctac

SEQ ID NO: 5709700 - DNA, 25 bp, Homo sapien
acaactccagcgcagagctacttcc

SEQ ID NO: 5709701 - DNA, 25 bp, Homo sapien
ccagcgaggaggagccccgtccgcg

SEQ ID NO: 5709702 - DNA, 25 bp, Homo sapien
cgctcgcgtctccccaccccagggc

SEQ ID NO: 5709703 - DNA, 25 bp, Homo sapien
gtgctgcagcacgaggagcgccgct

SEQ ID NO: 5709704 - DNA, 25 bp, Homo sapien
accacatctgctgtgaagaacctgc

SEQ ID NO: 5709705 - DNA, 25 bp, Homo sapien
ccttgcccctggtggttccgctgtg

SEQ ID NO: 5709706 - DNA, 25 bp, Homo sapien
cagtgataaactgtctgcataacct

SEQ ID NO: 5709707 - DNA, 25 bp, Homo sapien
cgggtgatcaagaccacatctgctg

SEQ ID NO: 5709708 - DNA, 25 bp, Homo sapien
gggcgtagttcggcttcacatcaac

SEQ ID NO: 5709709 - DNA, 25 bp, Homo sapien
gctgcagcacgaggagcgccgctgc

SEQ ID NO: 5709710 - DNA, 25 bp, Homo sapien
acatgggttgatcacctagaggagc

SEQ ID NO: 5709711 - DNA, 25 bp, Homo sapien
agcatgaacgcgcagccatcctcag

SEQ ID NO: 5709712 - DNA, 25 bp, Homo sapien
aacctgcagcagctagcccaagatg

SEQ ID NO: 5709713 - DNA, 25 bp, Homo sapien
atcctgcccaagtgcaagctggcca

SEQ ID NO: 5709714 - DNA, 25 bp, Homo sapien
caacgagaacacgcggcgctcccag

SEQ ID NO: 5709715 - DNA, 25 bp, Homo sapien
tcccagacaagtaagccgcgtagca

SEQ ID NO: 5709716 - DNA, 25 bp, Homo sapien
ccttcaaggcccatgtgggctgtgc

SEQ ID NO: 5709717 - DNA, 25 bp, Homo sapien
cacatcaacagctggctggaggtga

SEQ ID NO: 5709718 - DNA, 25 bp, Homo sapien
ggagctctggctaaggcacagtttt

SEQ ID NO: 5709719 - DNA, 25 bp, Homo sapien
gcgctccaggatgaggtgtccgcca

SEQ ID NO: 5709720 - DNA, 25 bp, Homo sapien
ctgggtgaggccgcatccttcaagg

SEQ ID NO: 5709721 - DNA, 25 bp, Homo sapien
ccgggaggccaagctgatcctggcg

SEQ ID NO: 5709722 - DNA, 25 bp, Homo sapien
tgctcagtgatgagaagtccttgct

SEQ ID NO: 5709723 - DNA, 25 bp, Homo sapien
gaggagcgccgctgccagtacctca

SEQ ID NO: 5709724 - DNA, 25 bp, Homo sapien
cgcagccatcctcagtgtacccgca

SEQ ID NO: 5709725 - DNA, 25 bp, Homo sapien
cagccatcctcagtgtacccgcagc

SEQ ID NO: 5709726 - DNA, 25 bp, Homo sapien
gtctctgggtgaggccgcatccttc

SEQ ID NO: 5709727 - DNA, 25 bp, Homo sapien
ggaggcatggcccactgtgcaggac

SEQ ID NO: 5709728 - DNA, 25 bp, Homo sapien
gggcacgagggcctgggctggccct

SEQ ID NO: 5709729 - DNA, 25 bp, Homo sapien
tgagaagtccttgctgggtgagctt

SEQ ID NO: 5709730 - DNA, 25 bp, Homo sapien
tcgccaccgtgctgcagcacgagga

SEQ ID NO: 5709731 - DNA, 25 bp, Homo sapien
cctcgtcctcctcaggccccctccg

SEQ ID NO: 5709732 - DNA, 25 bp, Homo sapien
ggtcctcagtccccattccatcaca

SEQ ID NO: 5709733 - DNA, 25 bp, Homo sapien
ctgtgaagaacctgcagcagctagc

SEQ ID NO: 5709734 - DNA, 25 bp, Homo sapien
agatggtggtgtggatgctgcagcg

SEQ ID NO: 5709735 - DNA, 25 bp, Homo sapien
gggcctggcgctacgtactcaggcc

SEQ ID NO: 5709736 - DNA, 25 bp, Homo sapien
gaagtgccctgtggccccctcccca

SEQ ID NO: 5709737 - DNA, 25 bp, Homo sapien
atgagcaggacggcgattccaggcc

SEQ ID NO: 5709738 - DNA, 25 bp, Homo sapien
ccacactgatgattctccccagcat

SEQ ID NO: 5709739 - DNA, 25 bp, Homo sapien
acacgcggcgctcccagctgctcat

SEQ ID NO: 5709740 - DNA, 25 bp, Homo sapien
ggggtgcgcaggtgggcgctcgcgt

SEQ ID NO: 5709741 - DNA, 25 bp, Homo sapien
catcaacagctggctggaggtgagc

SEQ ID NO: 5709742 - DNA, 25 bp, Homo sapien
ccctccagtccttgccgcacgcgta

SEQ ID NO: 5709743 - DNA, 25 bp, Homo sapien
ctccttgccggtctccttgtcagaa

SEQ ID NO: 5709744 - DNA, 25 bp, Homo sapien
cccaccagttcccatctcatgacct

SEQ ID NO: 5709745 - DNA, 25 bp, Homo sapien
ttgctgcaggttttccagcttgcag

SEQ ID NO: 5709746 - DNA, 25 bp, Homo sapien
cgatgacatgaccctcaccagcccc

SEQ ID NO: 5709747 - DNA, 25 bp, Homo sapien
caccgggcctggcgctacgtactca

SEQ ID NO: 5709748 - DNA, 25 bp, Homo sapien
aagctgctgttcaggtaccccttcc

SEQ ID NO: 5709749 - DNA, 25 bp, Homo sapien
ctgctcccctgagcccaggcggagg

SEQ ID NO: 5709750 - DNA, 25 bp, Homo sapien
aagccatccgcccctaccatgccct

SEQ ID NO: 5709751 - DNA, 25 bp, Homo sapien
cgcctccggctccgtcctcctctgg

SEQ ID NO: 5709752 - DNA, 25 bp, Homo sapien
ttcccatctcatgacctgccgtccg

SEQ ID NO: 5709753 - DNA, 25 bp, Homo sapien
ctgttcaggtaccccttccagagaa

SEQ ID NO: 5709754 - DNA, 25 bp, Homo sapien
tcctggaggaagagctagctccaga

SEQ ID NO: 5709755 - DNA, 25 bp, Homo sapien
tccagtctgatccccccagaggcca

SEQ ID NO: 5709756 - DNA, 25 bp, Homo sapien
gggaggccaagctgatcctggcgct

SEQ ID NO: 5709757 - DNA, 25 bp, Homo sapien
aagtaagccgcgtagcagatacgct

SEQ ID NO: 5709758 - DNA, 25 bp, Homo sapien
ctcctcaggccccctccgcctccgg

SEQ ID NO: 5709759 - DNA, 25 bp, Homo sapien
cagctgctcatgctgtttgacaagt

SEQ ID NO: 5709760 - DNA, 25 bp, Homo sapien
tcctcagtccccattccatcacatc

SEQ ID NO: 5709761 - DNA, 25 bp, Homo sapien
ctgaggctgagccctcttggccctg

SEQ ID NO: 5709762 - DNA, 25 bp, Homo sapien
cgctacgtactcaggcccccagctc

SEQ ID NO: 5709763 - DNA, 25 bp, Homo sapien
cgctgtccttgcccctggtggttcc

SEQ ID NO: 5709764 - DNA, 25 bp, Homo sapien
tgcacgtcgggcgtagttcggcttc

SEQ ID NO: 5709765 - DNA, 25 bp, Homo sapien
cctgtcattgccgtcttccaggctc

SEQ ID NO: 5709766 - DNA, 25 bp, Homo sapien
cagaatttaggaatcccctggcccc

SEQ ID NO: 5709767 - DNA, 25 bp, Homo sapien
gcctcagcacgcccaacgccctcag

SEQ ID NO: 5709768 - DNA, 25 bp, Homo sapien
cgtttctcagaccctccttctgtcc

SEQ ID NO: 5709769 - DNA, 25 bp, Homo sapien
ctccccagcacctctgtctgccatg

SEQ ID NO: 5709770 - DNA, 25 bp, Homo sapien
cagcatggacaactccagcgcagag

SEQ ID NO: 5709771 - DNA, 25 bp, Homo sapien
gggtgaggccgcatccttcaaggcc

SEQ ID NO: 5709772 - DNA, 25 bp, Homo sapien
aggcatctccacgctggaggggggc

SEQ ID NO: 5709773 - DNA, 25 bp, Homo sapien
cgcgtagcagatacgctgccagcaa

SEQ ID NO: 5709774 - DNA, 25 bp, Homo sapien
tccccccgtgctgaggctgagccct

SEQ ID NO: 5709775 - DNA, 25 bp, Homo sapien
ggtggtgtggatgctgcagcgccgg

SEQ ID NO: 5709776 - DNA, 25 bp, Homo sapien
ctcagcacgcccaacgccctcagct

SEQ ID NO: 5709777 - DNA, 25 bp, Homo sapien
ccccagcacctctgtctgccatgcg

SEQ ID NO: 5709778 - DNA, 25 bp, Homo sapien
ggccgtggcccagtgaagcctgcag

SEQ ID NO: 5709779 - DNA, 25 bp, Homo sapien
accccccagtctgtggccaccctga

SEQ ID NO: 5709780 - DNA, 25 bp, Homo sapien
cacatctgctgtgaagaacctgcag

SEQ ID NO: 5709781 - DNA, 25 bp, Homo sapien
tccgcctccggctccgtcctcctct

SEQ ID NO: 5709782 - DNA, 25 bp, Homo sapien
gacctgccgtccgttcttgccaagt

SEQ ID NO: 5709783 - DNA, 25 bp, Homo sapien
cggcttcacatcaacagctggctgg

SEQ ID NO: 5709784 - DNA, 25 bp, Homo sapien
gctttggctccccaaccagcagcga

SEQ ID NO: 5709785 - DNA, 25 bp, Homo sapien
catgtttgccaggctccttcactac

SEQ ID NO: 5709786 - DNA, 25 bp, Homo sapien
accctgaagaatgtgcagaaacact

SEQ ID NO: 5709787 - DNA, 25 bp, Homo sapien
tgtgcgtttctcagaccctccttct

SEQ ID NO: 5709788 - DNA, 25 bp, Homo sapien
tggaaatgaaggtcctcagtcccca

SEQ ID NO: 5709789 - DNA, 25 bp, Homo sapien
ggggcaaggccatcatcatctaccc

SEQ ID NO: 5709790 - DNA, 25 bp, Homo sapien
ccatggctgatggaaatgaaggtcc

SEQ ID NO: 5709791 - DNA, 25 bp, Homo sapien
cagcacgcccaacgccctcagcttt

SEQ ID NO: 5709792 - DNA, 25 bp, Homo sapien
cctttcctggcccagtcctcaccac

SEQ ID NO: 5709793 - DNA, 25 bp, Homo sapien
tctacccgctgtgtgagaacaacgt

SEQ ID NO: 5709794 - DNA, 25 bp, Homo sapien
ttccaggccaacgcagacccgtcag

SEQ ID NO: 5709795 - DNA, 25 bp, Homo sapien
taccatgccctgctgctgctcagtg

SEQ ID NO: 5709796 - DNA, 25 bp, Homo sapien
aagtccttgctgggtgagcttccta

SEQ ID NO: 5709797 - DNA, 25 bp, Homo sapien
gccccacggcgggatgcgggacaac

SEQ ID NO: 5709798 - DNA, 25 bp, Homo sapien
tatgtacaacgagaacacgcggcgc

SEQ ID NO: 5709799 - DNA, 25 bp, Homo sapien
gaagagctagctccagacatgggtt

SEQ ID NO: 5709800 - DNA, 25 bp, Homo sapien
cccctaccatgccctgctgctgctc

SEQ ID NO: 5709801 - DNA, 25 bp, Homo sapien
catgctgtttgacaagttccgcagc

SEQ ID NO: 5709802 - DNA, 25 bp, Homo sapien
cgcgcagccatcctcagtgtacccg

SEQ ID NO: 5709803 - DNA, 25 bp, Homo sapien
ccaagctgatcctggcgctccagga

SEQ ID NO: 5709804 - DNA, 25 bp, Homo sapien
agtacctcacccgggaggccaagct

SEQ ID NO: 5709805 - DNA, 25 bp, Homo sapien
cctccagtctgatccccccagaggc

SEQ ID NO: 5709806 - DNA, 25 bp, Homo sapien
gtgcagaaacacttgtgtggcctgt

SEQ ID NO: 5709807 - DNA, 25 bp, Homo sapien
tttggctccccaaccagcagcgatg

SEQ ID NO: 5709808 - DNA, 25 bp, Homo sapien
ctcgcgtctccccaccccagggctc

SEQ ID NO: 5709809 - DNA, 25 bp, Homo sapien
ccagacaagtaagccgcgtagcaga

SEQ ID NO: 5709810 - DNA, 25 bp, Homo sapien
tacacctgctccttggaccccccag

SEQ ID NO: 5709811 - DNA, 25 bp, Homo sapien
ctggcccccgctgtgcaggagaccc

SEQ ID NO: 5709812 - DNA, 25 bp, Homo sapien
tgcagcacgaggagcgccgctgcca

SEQ ID NO: 5709813 - DNA, 25 bp, Homo sapien
cctgtccctgtctctctgacagcct

SEQ ID NO: 5709814 - DNA, 25 bp, Homo sapien
atcaagaccacatctgctgtgaaga

SEQ ID NO: 5709815 - DNA, 25 bp, Homo sapien
tctgccatgcgcttcttcctcccag

SEQ ID NO: 5709816 - DNA, 25 bp, Homo sapien
gtcagaatttaggaatcccctggcc

SEQ ID NO: 5709817 - DNA, 25 bp, Homo sapien
gtctgatccccccagaggccatcga

SEQ ID NO: 5709818 - DNA, 25 bp, Homo sapien
ccaggcggagggcggaaggctgctg

SEQ ID NO: 5709819 - DNA, 25 bp, Homo sapien
gattccaggccaacgcagacccgtc

SEQ ID NO: 5709820 - DNA, 25 bp, Homo sapien
tgcccaagtgcaagctggccaggga

SEQ ID NO: 5709821 - DNA, 25 bp, Homo sapien
atgctgcagcgccggcttctcatcc

SEQ ID NO: 5709822 - DNA, 25 bp, Homo sapien
tgcagcgccggcttctcatccagct

SEQ ID NO: 5709823 - DNA, 25 bp, Homo sapien
ggccagggacctcaaggaagcttat

SEQ ID NO: 5709824 - DNA, 25 bp, Homo sapien
ccatttgtgaagtgccctgtggccc

SEQ ID NO: 5709825 - DNA, 25 bp, Homo sapien
ctaggctggagaagccctgtcacct

SEQ ID NO: 5709826 - DNA, 25 bp, Homo sapien
ggtgtactggggcaaggccatcatc

SEQ ID NO: 5709827 - DNA, 25 bp, Homo sapien
cgcctccggctccgtcctcctcagg

SEQ ID NO: 5709828 - DNA, 25 bp, Homo sapien
accctgagcctttcctggcccagtc

SEQ ID NO: 5709829 - DNA, 25 bp, Homo sapien
ccatgccctgctgctgctcagtgat

SEQ ID NO: 5709830 - DNA, 25 bp, Homo sapien
ctgaaagccatccgcccctaccatg

SEQ ID NO: 5709831 - DNA, 25 bp, Homo sapien
gctccttcactacttccgcggccgc

SEQ ID NO: 5709832 - DNA, 25 bp, Homo sapien
ggccgcatccttcaaggcccatgtg

SEQ ID NO: 5709833 - DNA, 25 bp, Homo sapien
gcgcttcttcctcccaggctaccct

SEQ ID NO: 5709834 - DNA, 25 bp, Homo sapien
atgattctccccagcatccacaccg

SEQ ID NO: 5709835 - DNA, 25 bp, Homo sapien
tgctggccagcctgtcggagcatga

SEQ ID NO: 5709836 - DNA, 25 bp, Homo sapien
tccttctgtccctacacctgctcct

SEQ ID NO: 5709837 - DNA, 25 bp, Homo sapien
tgctcatgctgtttgacaagttccg

SEQ ID NO: 5709838 - DNA, 25 bp, Homo sapien
ccagtacctcacccgggaggccaag

SEQ ID NO: 5709839 - DNA, 25 bp, Homo sapien
ctacgcttccctccagtccttgccg

SEQ ID NO: 5709840 - DNA, 25 bp, Homo sapien
tgccctagtgcgggtgatcaagacc

SEQ ID NO: 5709841 - DNA, 25 bp, Homo sapien
caagaccacatctgctgtgaagaac

SEQ ID NO: 5709842 - DNA, 25 bp, Homo sapien
agagctagctccagacatgggttga

SEQ ID NO: 5709843 - DNA, 25 bp, Homo sapien
cgtgtcctggaggaagagctagctc

SEQ ID NO: 5709844 - DNA, 25 bp, Homo sapien
ctcagtgtacccgcagcccagaacc

SEQ ID NO: 5709845 - DNA, 25 bp, Homo sapien
cacctatgtctgcctgatggcctca

SEQ ID NO: 5709846 - DNA, 25 bp, Homo sapien
cgcgtctccccaccccagggctccc

SEQ ID NO: 5709847 - DNA, 25 bp, Homo sapien
aggcccccagctctcgtgtcctgga

SEQ ID NO: 5709848 - DNA, 25 bp, Homo sapien
cttatgacagcctgtgcacgtcggg

SEQ ID NO: 5709849 - DNA, 25 bp, Homo sapien
tcacccgggaggccaagctgatcct

SEQ ID NO: 5709850 - DNA, 25 bp, Homo sapien
cgctgtgtgagaacaacgtctacat

SEQ ID NO: 5709851 - DNA, 25 bp, Homo sapien
ccatgcgcttcttcctcccaggcta

SEQ ID NO: 5709852 - DNA, 25 bp, Homo sapien
tgatgagcaggacggcgattccagg

SEQ ID NO: 5709853 - DNA, 25 bp, Homo sapien
tgcacatcttgctggtggaggcatg

SEQ ID NO: 5709854 - DNA, 25 bp, Homo sapien
gcattgggtggatgcgggctggccg

SEQ ID NO: 5709855 - DNA, 25 bp, Homo sapien
tggatgcgggctggccgtggcccag

SEQ ID NO: 5709856 - DNA, 25 bp, Homo sapien
tgtactggggcaaggccatcatcat

SEQ ID NO: 5709857 - DNA, 25 bp, Homo sapien
gtcgcagcctcagcacgcccaacgc

SEQ ID NO: 5709858 - DNA, 25 bp, Homo sapien
gagcctgaaagccatccgcccctac

SEQ ID NO: 5709859 - DNA, 25 bp, Homo sapien
tcccctgagcccaggcggagggcgg

SEQ ID NO: 5709860 - DNA, 25 bp, Homo sapien
ctggtgtactggggcaaggccatca

SEQ ID NO: 5709861 - DNA, 25 bp, Homo sapien
gatgacggagaacctgctggccagc

SEQ ID NO: 5709862 - DNA, 25 bp, Homo sapien
cgtgctggtggtgaccacccacgag

SEQ ID NO: 5709863 - DNA, 25 bp, Homo sapien
ggcctccagtctgatccccccagag

SEQ ID NO: 5709864 - DNA, 25 bp, Homo sapien
cagagccccgctgtccttgcccctg

SEQ ID NO: 5709865 - DNA, 25 bp, Homo sapien
tgccgcacgcgtaggcatctccacg

SEQ ID NO: 5709866 - DNA, 25 bp, Homo sapien
cgtagcagatacgctgccagcaaca

SEQ ID NO: 5709867 - DNA, 25 bp, Homo sapien
cgcatgtttgccaggctccttcact

SEQ ID NO: 5709868 - DNA, 25 bp, Homo sapien
cgccgctgccagtacctcacccggg

SEQ ID NO: 5709869 - DNA, 25 bp, Homo sapien
gtgggctgtgcgtttctcagaccct

SEQ ID NO: 5709870 - DNA, 25 bp, Homo sapien
ctcatgctgtttgacaagttccgca

SEQ ID NO: 5709871 - DNA, 25 bp, Homo sapien
cagccccagcatggacaactccagc

SEQ ID NO: 5709872 - DNA, 25 bp, Homo sapien
caggttttccagcttgcagctcatc

SEQ ID NO: 5709873 - DNA, 25 bp, Homo sapien
ttgacaagttccgcagcgtgctggt

SEQ ID NO: 5709874 - DNA, 25 bp, Homo sapien
cagggctccccccgtgctgaggctg

SEQ ID NO: 5709875 - DNA, 25 bp, Homo sapien
gcacccggcgtcccagacaagtaag

SEQ ID NO: 5709876 - DNA, 25 bp, Homo sapien
ggcccagtcctcaccacagtccaca

SEQ ID NO: 5709877 - DNA, 25 bp, Homo sapien
gagctacttcccagcggggactcgc

SEQ ID NO: 5709878 - DNA, 25 bp, Homo sapien
aggacggcgattccaggccaacgca

SEQ ID NO: 5709879 - DNA, 25 bp, Homo sapien
ggactcctgtctctgggtgaggccg

SEQ ID NO: 5709880 - DNA, 25 bp, Homo sapien
cttctgtccctacacctgctccttg

SEQ ID NO: 5709881 - DNA, 25 bp, Homo sapien
aggtaccccttccagagaagccagg

SEQ ID NO: 5709882 - DNA, 25 bp, Homo sapien
gttcaggtaccccttccagagaagc

SEQ ID NO: 5709883 - DNA, 25 bp, Homo sapien
acaagatccactatgcggcctccag

SEQ ID NO: 5709884 - DNA, 25 bp, Homo sapien
gcagaaacacttgtgtggcctgtcc

SEQ ID NO: 5709885 - DNA, 25 bp, Homo sapien
gagcacccggcgtcccagacaagta

SEQ ID NO: 5709886 - DNA, 25 bp, Homo sapien
cagcgtatgtctgtactccccgctg

SEQ ID NO: 5709887 - DNA, 25 bp, Homo sapien
ttctcccaccagttcccatctcatg

SEQ ID NO: 5709888 - DNA, 25 bp, Homo sapien
tagaggagctctggctaaggcacag

SEQ ID NO: 5709889 - DNA, 25 bp, Homo sapien
gacctccgcatgtttgccaggctcc

SEQ ID NO: 5709890 - DNA, 25 bp, Homo sapien
ctgtctctgggtgaggccgcatcct

SEQ ID NO: 5709891 - DNA, 25 bp, Homo sapien
tcaccacagtccacagaagccacaa

SEQ ID NO: 5709892 - DNA, 25 bp, Homo sapien
tggctccccaaccagcagcgatgac

SEQ ID NO: 5709893 - DNA, 25 bp, Homo sapien
atgtgcagaaacacttgtgtggcct

SEQ ID NO: 5709894 - DNA, 25 bp, Homo sapien
caaacaggctcatagccaagctgtg

SEQ ID NO: 5709895 - DNA, 25 bp, Homo sapien
agaccctccttctgtccctacacct

SEQ ID NO: 5709896 - DNA, 25 bp, Homo sapien
gcctgccaggactcctgtctctggg

SEQ ID NO: 5709897 - DNA, 25 bp, Homo sapien
cttccagagaagccaggagcacccg

SEQ ID NO: 5709898 - DNA, 25 bp, Homo sapien
tacatgctgtctcccaatgccagcg

SEQ ID NO: 5709899 - DNA, 25 bp, Homo sapien
gtgtgagaacaacgtctacatgctg

SEQ ID NO: 5709900 - DNA, 25 bp, Homo sapien
cctgccctagtgcgggtgatcaaga

SEQ ID NO: 5709901 - DNA, 25 bp, Homo sapien
ggagccccgtccgcgagaggacgac

SEQ ID NO: 5709902 - DNA, 25 bp, Homo sapien
ggccaccctgaagaatgtgcagaaa

SEQ ID NO: 5709903 - DNA, 25 bp, Homo sapien
cggcttctcatccagctgcacacct

SEQ ID NO: 5709904 - DNA, 25 bp, Homo sapien
ggacaactccagcgcagagctactt

SEQ ID NO: 5709905 - DNA, 25 bp, Homo sapien
ttctccccagcatccacaccgggcc

SEQ ID NO: 5709906 - DNA, 25 bp, Homo sapien
gtaccccttccagagaagccaggag

SEQ ID NO: 5709907 - DNA, 25 bp, Homo sapien
cgggtcggcggtcgcagcctcagca

SEQ ID NO: 5709908 - DNA, 25 bp, Homo sapien
ggcgctacgtactcaggcccccagc

SEQ ID NO: 5709909 - DNA, 25 bp, Homo sapien
gctccgtcctcctcaggccccctcc

SEQ ID NO: 5709910 - DNA, 25 bp, Homo sapien
tctgcctgatggcctcacccagcga

SEQ ID NO: 5709911 - DNA, 25 bp, Homo sapien
gtggatgctgcagcgccggcttctc

SEQ ID NO: 5709912 - DNA, 25 bp, Homo sapien
ggcgctcgcgtctccccaccccagg

SEQ ID NO: 5709913 - DNA, 25 bp, Homo sapien
tcttgctggtggaggcatggcccac

SEQ ID NO: 5709914 - DNA, 25 bp, Homo sapien
ccctgaggcctggcattgggtggat

SEQ ID NO: 5709915 - DNA, 25 bp, Homo sapien
atccttcaaggcccatgtgggctgt

SEQ ID NO: 5709916 - DNA, 25 bp, Homo sapien
gggttgatcacctagaggagctctg

SEQ ID NO: 5709917 - DNA, 25 bp, Homo sapien
cagcgccggcttctcatccagctgc

SEQ ID NO: 5709918 - DNA, 25 bp, Homo sapien
gctgggtgagcttcctattgactgc

SEQ ID NO: 5709919 - DNA, 25 bp, Homo sapien
tcacatcctgcccaagtgcaagctg

SEQ ID NO: 5709920 - DNA, 25 bp, Homo sapien
ggtgggcgctcgcgtctccccaccc

SEQ ID NO: 5709921 - DNA, 25 bp, Homo sapien
ggcgtcccagacaagtaagccgcgt

SEQ ID NO: 5709922 - DNA, 25 bp, Homo sapien
gtgcaggagacccagctcatccaga

SEQ ID NO: 5709923 - DNA, 25 bp, Homo sapien
gcccaggcggagggcggaaggctgc

SEQ ID NO: 5709924 - DNA, 25 bp, Homo sapien
ccttggaccccccagtctgtggcca

SEQ ID NO: 5709925 - DNA, 25 bp, Homo sapien
ccggcgtcccagacaagtaagccgc

SEQ ID NO: 5709926 - DNA, 25 bp, Homo sapien
cccaggctaccctgagcctttcctg

SEQ ID NO: 5709927 - DNA, 25 bp, Homo sapien
tggccctgctaggctggagaagccc

SEQ ID NO: 5709928 - DNA, 25 bp, Homo sapien
ggaccctgtcattgccgtcttccag

SEQ ID NO: 5709929 - DNA, 25 bp, Homo sapien
tcctacgcttccctccagtccttgc

SEQ ID NO: 5709930 - DNA, 25 bp, Homo sapien
ccttgctgggtgagcttcctattga

SEQ ID NO: 5709931 - DNA, 25 bp, Homo sapien
gaggagattatgtacaacgagaaca

SEQ ID NO: 5709932 - DNA, 25 bp, Homo sapien
ctcccagctgctcatgctgtttgac

SEQ ID NO: 5709933 - DNA, 25 bp, Homo sapien
tgccatgcgcttcttcctcccaggc

SEQ ID NO: 5709934 - DNA, 25 bp, Homo sapien
caacacgggcgaccatgctgatgag

SEQ ID NO: 5709935 - DNA, 25 bp, Homo sapien
ttccagcttgcagctcatctggtgt

SEQ ID NO: 5709936 - DNA, 25 bp, Homo sapien
cagctcatccagatggtggtgtgga

SEQ ID NO: 5709937 - DNA, 25 bp, Homo sapien
ttcacatcaacagctggctggaggt

SEQ ID NO: 5709938 - DNA, 25 bp, Homo sapien
tgaaggtcctcagtccccattccat

SEQ ID NO: 5709939 - DNA, 25 bp, Homo sapien
ccaccacctggaggagattatgtac

SEQ ID NO: 5709940 - DNA, 25 bp, Homo sapien
gatgagaagtccttgctgggtgagc

SEQ ID NO: 5709941 - DNA, 25 bp, Homo sapien
ctctgctcccctgagcccaggcgga

SEQ ID NO: 5709942 - DNA, 25 bp, Homo sapien
ccgttcttgccaagttctccttgcc

SEQ ID NO: 5709943 - DNA, 25 bp, Homo sapien
ctccccagcatccacaccgggcctg

SEQ ID NO: 5709944 - DNA, 25 bp, Homo sapien
ctgggctggccctgctaggctggag

SEQ ID NO: 5709945 - DNA, 25 bp, Homo sapien
gcagcgtgctggtggtgaccaccca

SEQ ID NO: 5709946 - DNA, 25 bp, Homo sapien
tgaacgcgcagccatcctcagtgta

SEQ ID NO: 5709947 - DNA, 25 bp, Homo sapien
ctggggcaaggccatcatcatctac

SEQ ID NO: 5709948 - DNA, 25 bp, Homo sapien
ctttcggctcccacactgatgattc

SEQ ID NO: 5709949 - DNA, 25 bp, Homo sapien
ctcagtgatgagaagtccttgctgg

SEQ ID NO: 5709950 - DNA, 25 bp, Homo sapien
cggccgccaccacctggaggagatt

SEQ ID NO: 5709951 - DNA, 25 bp, Homo sapien
tgaggacctccgcatgtttgccagg

SEQ ID NO: 5709952 - DNA, 25 bp, Homo sapien
tgcagcagctagcccaagatgcgga

SEQ ID NO: 5709953 - DNA, 25 bp, Homo sapien
acgcggcgctcccagctgctcatgc

SEQ ID NO: 5709954 - DNA, 25 bp, Homo sapien
gtccttgcccctggtggttccgctg

SEQ ID NO: 5709955 - DNA, 25 bp, Homo sapien
agttcggcttcacatcaacagctgg

SEQ ID NO: 5709956 - DNA, 25 bp, Homo sapien
cccccgtgctgaggctgagccctct

SEQ ID NO: 5709957 - DNA, 25 bp, Homo sapien
cctgctggccagcctgtcggagcat

SEQ ID NO: 5709958 - DNA, 25 bp, Homo sapien
agcttatgacagcctgtgcacgtcg

SEQ ID NO: 5709959 - DNA, 25 bp, Homo sapien
gaaccctgaggacctccgcatgttt

SEQ ID NO: 5709960 - DNA, 25 bp, Homo sapien
tgatggcctcacccagcgaggagga

SEQ ID NO: 5709961 - DNA, 25 bp, Homo sapien
tgggcgctcgcgtctccccacccca

SEQ ID NO: 5709962 - DNA, 25 bp, Homo sapien
gcggcgctcccagctgctcatgctg

SEQ ID NO: 5709963 - DNA, 25 bp, Homo sapien
ctccagacatgggttgatcacctag

SEQ ID NO: 5709964 - DNA, 25 bp, Homo sapien
ccagctctcgtgtcctggaggaaga

SEQ ID NO: 5709965 - DNA, 25 bp, Homo sapien
ctgtgcaggaccccaccctcggggg

SEQ ID NO: 5709966 - DNA, 25 bp, Homo sapien
ttgccaagttctccttgccggtctc

SEQ ID NO: 5709967 - DNA, 25 bp, Homo sapien
aggatgacggagaacctgctggcca

SEQ ID NO: 5709968 - DNA, 25 bp, Homo sapien
gcgggatgcgggacaacaccagccc

SEQ ID NO: 5709969 - DNA, 25 bp, Homo sapien
cttcactacttccgcggccgccacc

SEQ ID NO: 5709970 - DNA, 25 bp, Homo sapien
agctagctccagacatgggttgatc

SEQ ID NO: 5709971 - DNA, 25 bp, Homo sapien
tcttggccctgaggcctggcattgg

SEQ ID NO: 5709972 - DNA, 25 bp, Homo sapien
actgaaccagaggatgacggagaac

SEQ ID NO: 5709973 - DNA, 25 bp, Homo sapien
tgcagctcatctggtgtactggggc

SEQ ID NO: 5709974 - DNA, 25 bp, Homo sapien
tgcccgggtcggcggtcgcagcctc

SEQ ID NO: 5709975 - DNA, 25 bp, Homo sapien
atttgtgaagtgccctgtggccccc

SEQ ID NO: 5709976 - DNA, 25 bp, Homo sapien
ggctgagccctcttggccctgaggc

SEQ ID NO: 5709977 - DNA, 25 bp, Homo sapien
aacgccctcagctttggctccccaa

SEQ ID NO: 5709978 - DNA, 25 bp, Homo sapien
agggacctcaaggaagcttatgaca

SEQ ID NO: 5709979 - DNA, 25 bp, Homo sapien
gaagaacctgcagcagctagcccaa

SEQ ID NO: 5709980 - DNA, 25 bp, Homo sapien
aacagctggctggaggtgagcttct

SEQ ID NO: 5709981 - DNA, 25 bp, Homo sapien
ggccccctccccagcacctctgtct

SEQ ID NO: 5709982 - DNA, 25 bp, Homo sapien
ccccattccatcacatcctgcccaa

SEQ ID NO: 5709983 - DNA, 25 bp, Homo sapien
ccatcagcgtgattctggtgagctc

SEQ ID NO: 5709984 - DNA, 25 bp, Homo sapien
acgtactcaggcccccagctctcgt

SEQ ID NO: 5709985 - DNA, 25 bp, Homo sapien
ctgtggccaccctgaagaatgtgca

SEQ ID NO: 5709986 - DNA, 25 bp, Homo sapien
cctgtgcacgtcgggcgtagttcgg

SEQ ID NO: 5709987 - DNA, 25 bp, Homo sapien
ttggaccccccagtctgtggccacc

SEQ ID NO: 5709988 - DNA, 25 bp, Homo sapien
cccggccccacggcgggatgcggga

SEQ ID NO: 5709989 - DNA, 25 bp, Homo sapien
tcggagcatgaacgcgcagccatcc

SEQ ID NO: 5709990 - DNA, 25 bp, Homo sapien
cagtgaagcctgcagagccccgctg

SEQ ID NO: 5709991 - DNA, 25 bp, Homo sapien
actccccgctggccgagcagttctc

SEQ ID NO: 5709992 - DNA, 25 bp, Homo sapien
gtcgtatcgccaccgtgctgcagca

SEQ ID NO: 5709993 - DNA, 25 bp, Homo sapien
gccatcctcagtgtacccgcagccc

SEQ ID NO: 5709994 - DNA, 25 bp, Homo sapien
ccgtggcccagtgaagcctgcagag

SEQ ID NO: 5709995 - DNA, 25 bp, Homo sapien
cacagtccacagaagccacaaacag

SEQ ID NO: 5709996 - DNA, 25 bp, Homo sapien
tgcgtttctcagaccctccttctgt

SEQ ID NO: 5709997 - DNA, 25 bp, Homo sapien
tccatcacatcctgcccaagtgcaa

SEQ ID NO: 5709998 - DNA, 25 bp, Homo sapien
atacgctgccagcaacacgggcgac

SEQ ID NO: 5709999 - DNA, 25 bp, Homo sapien
gcagctagcccaagatgcggacctg

SEQ ID NO: 5710000 - DNA, 25 bp, Homo sapien
atgaggtgtccgccatggctgatgg

SEQ ID NO: 5710001 - DNA, 25 bp, Homo sapien
ctggccagggacctcaaggaagctt

SEQ ID NO: 5710002 - DNA, 25 bp, Homo sapien
ttttccagcttgcagctcatctggt

SEQ ID NO: 5710003 - DNA, 25 bp, Homo sapien
gtgaccacccacgaggaccctgtca

SEQ ID NO: 5710004 - DNA, 25 bp, Homo sapien
ggcccagtgaagcctgcagagcccc

SEQ ID NO: 5710005 - DNA, 25 bp, Homo sapien
ccgtccgttcttgccaagttctcct

SEQ ID NO: 5710006 - DNA, 25 bp, Homo sapien
aggaggagccccgtccgcgagagga

SEQ ID NO: 5710007 - DNA, 25 bp, Homo sapien
gatgcgggctggccgtggcccagtg

SEQ ID NO: 5710008 - DNA, 25 bp, Homo sapien
cgcaggtgggcgctcgcgtctcccc

SEQ ID NO: 5710009 - DNA, 25 bp, Homo sapien
catcacatcctgcccaagtgcaagc

SEQ ID NO: 5710010 - DNA, 25 bp, Homo sapien
agctctggctaaggcacagttttct

SEQ ID NO: 5710011 - DNA, 25 bp, Homo sapien
gggatgcgggacaacaccagcccca

SEQ ID NO: 5710012 - DNA, 25 bp, Homo sapien
tcctggcccagtcctcaccacagtc

SEQ ID NO: 5710013 - DNA, 25 bp, Homo sapien
tcgggcgtagttcggcttcacatca

SEQ ID NO: 5710014 - DNA, 25 bp, Homo sapien
tgtctctctgacagccttccatttg

SEQ ID NO: 5710015 - DNA, 25 bp, Homo sapien
aagccacaaacaggctcatagccaa

SEQ ID NO: 5710016 - DNA, 25 bp, Homo sapien
ccagcctgtcggagcatgaacgcgc

SEQ ID NO: 5710017 - DNA, 25 bp, Homo sapien
gtgtggatgctgcagcgccggcttc

SEQ ID NO: 5710018 - DNA, 25 bp, Homo sapien
acttgtgtggcctgtccctgtctct

SEQ ID NO: 5710019 - DNA, 25 bp, Homo sapien
gtttgacaagttccgcagcgtgctg

SEQ ID NO: 5710020 - DNA, 25 bp, Homo sapien
accacctggaggagattatgtacaa

SEQ ID NO: 5710021 - DNA, 25 bp, Homo sapien
agcctgtcggagcatgaacgcgcag

SEQ ID NO: 5710022 - DNA, 25 bp, Homo sapien
tccccccagaggccatcgaacggag

SEQ ID NO: 5710023 - DNA, 25 bp, Homo sapien
ctccttgtcagaatttaggaatccc

SEQ ID NO: 5710024 - DNA, 25 bp, Homo sapien
aggacctccgcatgtttgccaggct

SEQ ID NO: 5710025 - DNA, 25 bp, Homo sapien
cggctccgtcctcctctggccccct

SEQ ID NO: 5710026 - DNA, 25 bp, Homo sapien
taggaatcccctggcccccgctgtg

SEQ ID NO: 5710027 - DNA, 25 bp, Homo sapien
ggagcaggggcaataagctgctgtt

SEQ ID NO: 5710028 - DNA, 25 bp, Homo sapien
gaagcttatgacagcctgtgcacgt

SEQ ID NO: 5710029 - DNA, 25 bp, Homo sapien
ccattccatcacatcctgcccaagt

SEQ ID NO: 5710030 - DNA, 25 bp, Homo sapien
atggacaactccagcgcagagctac

SEQ ID NO: 5710031 - DNA, 25 bp, Homo sapien
cgaggaggagccccgtccgcgagag

SEQ ID NO: 5710032 - DNA, 25 bp, Homo sapien
cagaggccatcgaacggagcctgaa

SEQ ID NO: 5710033 - DNA, 25 bp, Homo sapien
gcagttctcccaccagttcccatct

SEQ ID NO: 5710034 - DNA, 25 bp, Homo sapien
cagctttggctccccaaccagcagc

SEQ ID NO: 5710035 - DNA, 25 bp, Homo sapien
ctccagcgcagagctacttcccagc

SEQ ID NO: 5710036 - DNA, 25 bp, Homo sapien
agacatgggttgatcacctagagga

SEQ ID NO: 5710037 - DNA, 25 bp, Homo sapien
ggctaccctgagcctttcctggccc

SEQ ID NO: 5710038 - DNA, 25 bp, Homo sapien
gtagttcggcttcacatcaacagct

SEQ ID NO: 5710039 - DNA, 25 bp, Homo sapien
agccccgtccgcgagaggacgacgt

SEQ ID NO: 5710040 - DNA, 25 bp, Homo sapien
acgctggaggggggcctgccaggac

SEQ ID NO: 5710041 - DNA, 25 bp, Homo sapien
tctcagaccctccttctgtccctac

SEQ ID NO: 5710042 - DNA, 25 bp, Homo sapien
tcatcatctacccgctgtgtgagaa

SEQ ID NO: 5710043 - DNA, 25 bp, Homo sapien
gaacacgcggcgctcccagctgctc

SEQ ID NO: 5710044 - DNA, 25 bp, Homo sapien
ctcccaatgccagcgtatgtctgta

SEQ ID NO: 5710045 - DNA, 25 bp, Homo sapien
aagatccactatgcggcctccagtc

SEQ ID NO: 5710046 - DNA, 25 bp, Homo sapien
tctctgacagccttccatttgtgaa

SEQ ID NO: 5710047 - DNA, 25 bp, Homo sapien
aactgtctgcataacctgtcccgtc

SEQ ID NO: 5710048 - DNA, 25 bp, Homo sapien
cctgcagagccccgctgtccttgcc

SEQ ID NO: 5710049 - DNA, 25 bp, Homo sapien
tcactgcccgggtcggcggtcgcag

SEQ ID NO: 5710050 - DNA, 25 bp, Homo sapien
tcaggtaccccttccagagaagcca

SEQ ID NO: 5710051 - DNA, 25 bp, Homo sapien
ccccacaagatccactatgcggcct

SEQ ID NO: 5710052 - DNA, 25 bp, Homo sapien
tccccgctggccgagcagttctccc

SEQ ID NO: 5710053 - DNA, 25 bp, Homo sapien
tgaagaatgtgcagaaacacttgtg

SEQ ID NO: 5710054 - DNA, 25 bp, Homo sapien
tctgacagccttccatttgtgaagt

SEQ ID NO: 5710055 - DNA, 25 bp, Homo sapien
agccccatcagcgtgattctggtga

SEQ ID NO: 5710056 - DNA, 25 bp, Homo sapien
accccttccagagaagccaggagca

SEQ ID NO: 5710057 - DNA, 25 bp, Homo sapien
acgctgccagcaacacgggcgacca

SEQ ID NO: 5710058 - DNA, 25 bp, Homo sapien
aatgaaggtcctcagtccccattcc

SEQ ID NO: 5710059 - DNA, 25 bp, Homo sapien
gtgaggccgcatccttcaaggccca

SEQ ID NO: 5710060 - DNA, 25 bp, Homo sapien
gggctggccctgctaggctggagaa

SEQ ID NO: 5710061 - DNA, 25 bp, Homo sapien
agcctgtgcacgtcgggcgtagttc

SEQ ID NO: 5710062 - DNA, 25 bp, Homo sapien
tgaccctcaccagccccagcatgga

SEQ ID NO: 5710063 - DNA, 25 bp, Homo sapien
ctggaggaagagctagctccagaca

SEQ ID NO: 5710064 - DNA, 25 bp, Homo sapien
tatcgccaccgtgctgcagcacgag

SEQ ID NO: 5710065 - DNA, 25 bp, Homo sapien
gcgtaggcatctccacgctggaggg

SEQ ID NO: 5710066 - DNA, 25 bp, Homo sapien
gcttcttcctcccaggctaccctga

SEQ ID NO: 5710067 - DNA, 25 bp, Homo sapien
cctccgcctccggctccgtcctcct

SEQ ID NO: 5710068 - DNA, 25 bp, Homo sapien
ctggcgctacgtactcaggccccca

SEQ ID NO: 5710069 - DNA, 25 bp, Homo sapien
tccttgccgcacgcgtaggcatctc

SEQ ID NO: 5710070 - DNA, 25 bp, Homo sapien
gccgcgtagcagatacgctgccagc

SEQ ID NO: 5710071 - DNA, 25 bp, Homo sapien
ccgtcttccaggctctgctcccctg

SEQ ID NO: 5710072 - DNA, 25 bp, Homo sapien
aatcccctggcccccgctgtgcagg

SEQ ID NO: 5710073 - DNA, 25 bp, Homo sapien
ccagcatccacaccgggcctggcgc

SEQ ID NO: 5710074 - DNA, 25 bp, Homo sapien
attatgtacaacgagaacacgcggc

SEQ ID NO: 5710075 - DNA, 25 bp, Homo sapien
ccacaagatccactatgcggcctcc

SEQ ID NO: 5710076 - DNA, 25 bp, Homo sapien
cctcaggccccctccgcctccggct

SEQ ID NO: 5710077 - DNA, 25 bp, Homo sapien
catcatcatctacccgctgtgtgag

SEQ ID NO: 5710078 - DNA, 25 bp, Homo sapien
tgcctgatggcctcacccagcgagg

SEQ ID NO: 5710079 - DNA, 25 bp, Homo sapien
aggcggagggcggaaggctgctggg

SEQ ID NO: 5710080 - DNA, 25 bp, Homo sapien
ccctcagctttggctccccaaccag

SEQ ID NO: 5710081 - DNA, 25 bp, Homo sapien
gctccccaaccagcagcgatgacat

SEQ ID NO: 5710082 - DNA, 25 bp, Homo sapien
cctagaggagctctggctaaggcac

SEQ ID NO: 5710083 - DNA, 25 bp, Homo sapien
tccagctgcacacctatgtctgcct

SEQ ID NO: 5710084 - DNA, 25 bp, Homo sapien
ccctagtgcgggtgatcaagaccac

SEQ ID NO: 5710085 - DNA, 25 bp, Homo sapien
cctgaccatctggggcacgagggcc

SEQ ID NO: 5710086 - DNA, 25 bp, Homo sapien
gacccagctcatccagatggtggtg

SEQ ID NO: 5710087 - DNA, 25 bp, Homo sapien
ctctggctaaggcacagttttctag

SEQ ID NO: 5710088 - DNA, 25 bp, Homo sapien
gctggaggtgagcttctgcctgccc

SEQ ID NO: 5710089 - DNA, 25 bp, Homo sapien
tggaggagattatgtacaacgagaa

SEQ ID NO: 5710090 - DNA, 25 bp, Homo sapien
cctccggctccgtcctcctcaggcc

SEQ ID NO: 5710091 - DNA, 25 bp, Homo sapien
gtgacctggtcctgaccatctgggg

SEQ ID NO: 5710092 - DNA, 25 bp, Homo sapien
aggaagcttatgacagcctgtgcac

SEQ ID NO: 5710093 - DNA, 25 bp, Homo sapien
ctgatggaaatgaaggtcctcagtc

SEQ ID NO: 5710094 - DNA, 25 bp, Homo sapien
agtgccctgtggccccctccccagc

SEQ ID NO: 5710095 - DNA, 25 bp, Homo sapien
tgtcattgccgtcttccaggctctg

SEQ ID NO: 5710096 - DNA, 25 bp, Homo sapien
gccaagttctccttgccggtctcct

SEQ ID NO: 5710097 - DNA, 25 bp, Homo sapien
tgctgtctcccaatgccagcgtatg

SEQ ID NO: 5710098 - DNA, 25 bp, Homo sapien
ctgtccttgcccctggtggttccgc

SEQ ID NO: 5710099 - DNA, 25 bp, Homo sapien
tcctcctctggccccctccgccccc

SEQ ID NO: 5710100 - DNA, 25 bp, Homo sapien
gcctggcgctacgtactcaggcccc

SEQ ID NO: 5710101 - DNA, 25 bp, Homo sapien
ggcccccgctgtgcaggagacccag

SEQ ID NO: 5710102 - DNA, 25 bp, Homo sapien
gcgtatgtctgtactccccgctggc

SEQ ID NO: 5710103 - DNA, 25 bp, Homo sapien
tcagaccctccttctgtccctacac

SEQ ID NO: 5710104 - DNA, 25 bp, Homo sapien
cgctggccgagcagttctcccacca

SEQ ID NO: 5710105 - DNA, 25 bp, Homo sapien
tctcatgacctgccgtccgttcttg

SEQ ID NO: 5710106 - DNA, 25 bp, Homo sapien
gactcgccactgaaccagaggatga

SEQ ID NO: 5710107 - DNA, 25 bp, Homo sapien
gcacgcgtaggcatctccacgctgg

SEQ ID NO: 5710108 - DNA, 25 bp, Homo sapien
ggaccccccagtctgtggccaccct

SEQ ID NO: 5710109 - DNA, 25 bp, Homo sapien
ggagcgccgctgccagtacctcacc

SEQ ID NO: 5710110 - DNA, 25 bp, Homo sapien
ccaccccagggctccccccgtgctg

SEQ ID NO: 5710111 - DNA, 25 bp, Homo sapien
ctggtggtgaccacccacgaggacc

SEQ ID NO: 5710112 - DNA, 25 bp, Homo sapien
gggactcgccactgaaccagaggat

SEQ ID NO: 5710113 - DNA, 25 bp, Homo sapien
ctggggtgcgcaggtgggcgctcgc

SEQ ID NO: 5710114 - DNA, 25 bp, Homo sapien
cgccaccacctggaggagattatgt

SEQ ID NO: 5710115 - DNA, 25 bp, Homo sapien
ccatgctgatgagcaggacggcgat

SEQ ID NO: 5710116 - DNA, 25 bp, Homo sapien
ttcggctcccacactgatgattctc

SEQ ID NO: 5710117 - DNA, 25 bp, Homo sapien
tccccaaccagcagcgatgacatga

SEQ ID NO: 5710118 - DNA, 25 bp, Homo sapien
tttctcagaccctccttctgtccct

SEQ ID NO: 5710119 - DNA, 25 bp, Homo sapien
gcacgcccaacgccctcagctttgg

SEQ ID NO: 5710120 - DNA, 25 bp, Homo sapien
cagctgcacacctatgtctgcctga

SEQ ID NO: 5710121 - DNA, 25 bp, Homo sapien
ccccagctctcgtgtcctggaggaa

SEQ ID NO: 5710122 - DNA, 25 bp, Homo sapien
ctctgggtgaggccgcatccttcaa

SEQ ID NO: 5710123 - DNA, 25 bp, Homo sapien
tggtcctgaccatctggggcacgag

SEQ ID NO: 5710124 - DNA, 25 bp, Homo sapien
gagcccaggcggagggcggaaggct

SEQ ID NO: 5710125 - DNA, 25 bp, Homo sapien
gctgctcatgctgtttgacaagttc

SEQ ID NO: 5710126 - DNA, 25 bp, Homo sapien
ttccctccagtccttgccgcacgcg

SEQ ID NO: 5710127 - DNA, 25 bp, Homo sapien
agacaagtaagccgcgtagcagata

SEQ ID NO: 5710128 - DNA, 25 bp, Homo sapien
ggctctgctcccctgagcccaggcg

SEQ ID NO: 5710129 - DNA, 25 bp, Homo sapien
gcgagaggacgacgtccccttcact

SEQ ID NO: 5710130 - DNA, 25 bp, Homo sapien
tagccaagctgtgacctggtcctga

SEQ ID NO: 5710131 - DNA, 25 bp, Homo sapien
gtgatgagaagtccttgctgggtga

SEQ ID NO: 5710132 - DNA, 25 bp, Homo sapien
ccctgtcacctgtgcacatcttgct

SEQ ID NO: 5710133 - DNA, 25 bp, Homo sapien
agccaggagcacccggcgtcccaga

SEQ ID NO: 5710134 - DNA, 25 bp, Homo sapien
acaacgtctacatgctgtctcccaa

SEQ ID NO: 5710135 - DNA, 25 bp, Homo sapien
ttgctggtggaggcatggcccactg

SEQ ID NO: 5710136 - DNA, 25 bp, Homo sapien
gagcaggacggcgattccaggccaa

SEQ ID NO: 5710137 - DNA, 25 bp, Homo sapien
aacaccagccccatcagcgtgattc

SEQ ID NO: 5710138 - DNA, 25 bp, Homo sapien
agcggggactcgccactgaaccaga

SEQ ID NO: 5710139 - DNA, 25 bp, Homo sapien
cagcacgaggagcgccgctgccagt

SEQ ID NO: 5710140 - DNA, 25 bp, Homo sapien
tcaacagctggctggaggtgagctt

SEQ ID NO: 5710141 - DNA, 25 bp, Homo sapien
cctccggctccgtcctcctctggcc

SEQ ID NO: 5710142 - DNA, 25 bp, Homo sapien
cagtgatgagaagtccttgctgggt

SEQ ID NO: 5710143 - DNA, 25 bp, Homo sapien
acccagcgaggaggagccccgtccg

SEQ ID NO: 5710144 - DNA, 25 bp, Homo sapien
ccagttcccatctcatgacctgccg

SEQ ID NO: 5710145 - DNA, 25 bp, Homo sapien
ctgtggccccctccccagcacctct

SEQ ID NO: 5710146 - DNA, 25 bp, Homo sapien
aaccagaggatgacggagaacctgc

SEQ ID NO: 5710147 - DNA, 25 bp, Homo sapien
ccaccctgaagaatgtgcagaaaca

SEQ ID NO: 5710148 - DNA, 25 bp, Homo sapien
cctgagcctttcctggcccagtcct

SEQ ID NO: 5710149 - DNA, 25 bp, Homo sapien
ggtcggcggtcgcagcctcagcacg

SEQ ID NO: 5710150 - DNA, 25 bp, Homo sapien
tgtttgccaggctccttcactactt

SEQ ID NO: 5710151 - DNA, 25 bp, Homo sapien
caaggaagcttatgacagcctgtgc

SEQ ID NO: 5710152 - DNA, 25 bp, Homo sapien
tgctgctgctcagtgatgagaagtc

SEQ ID NO: 5710153 - DNA, 25 bp, Homo sapien
ccttgccggtctccttgtcagaatt

SEQ ID NO: 5710154 - DNA, 25 bp, Homo sapien
acagccttccatttgtgaagtgccc

SEQ ID NO: 5710155 - DNA, 25 bp, Homo sapien
cgtccccttcactgcccgggtcggc

SEQ ID NO: 5710156 - DNA, 25 bp, Homo sapien
tatgacagcctgtgcacgtcgggcg

SEQ ID NO: 5710157 - DNA, 25 bp, Homo sapien
tgctgaggctgagccctcttggccc

SEQ ID NO: 5710158 - DNA, 25 bp, Homo sapien
agcacctctgtctgccatgcgcttc

SEQ ID NO: 5710159 - DNA, 25 bp, Homo sapien
cgccactgaaccagaggatgacgga

SEQ ID NO: 5710160 - DNA, 25 bp, Homo sapien
cccctccgcctccggctccgtcctc

SEQ ID NO: 5710161 - DNA, 25 bp, Homo sapien
tccggctccgtcctcctcaggcccc

SEQ ID NO: 5710162 - DNA, 25 bp, Homo sapien
ccgctgccagtacctcacccgggag

SEQ ID NO: 5710163 - DNA, 25 bp, Homo sapien
caagttctccttgccggtctccttg

SEQ ID NO: 5710164 - DNA, 25 bp, Homo sapien
ctgctgctcagtgatgagaagtcct

SEQ ID NO: 5710165 - DNA, 25 bp, Homo sapien
ggcctcacccagcgaggaggagccc

SEQ ID NO: 5710166 - DNA, 25 bp, Homo sapien
gaggccgcatccttcaaggcccatg

SEQ ID NO: 5710167 - DNA, 25 bp, Homo sapien
cgaacggagcctgaaagccatccgc

SEQ ID NO: 5710168 - DNA, 25 bp, Homo sapien
gcatctccacgctggaggggggcct

SEQ ID NO: 5710169 - DNA, 25 bp, Homo sapien
gcttccctccagtccttgccgcacg

SEQ ID NO: 5710170 - DNA, 25 bp, Homo sapien
aagaatgtgcagaaacacttgtgtg

SEQ ID NO: 5710171 - DNA, 25 bp, Homo sapien
gtgagaacaacgtctacatgctgtc

SEQ ID NO: 5710172 - DNA, 25 bp, Homo sapien
ctgctgccctctgtgttcctacgct

SEQ ID NO: 5710173 - DNA, 25 bp, Homo sapien
gccagcgtatgtctgtactccccgc

SEQ ID NO: 5710174 - DNA, 25 bp, Homo sapien
ctccagtccttgccgcacgcgtagg

SEQ ID NO: 5710175 - DNA, 25 bp, Homo sapien
aggggggcctgccaggactcctgtc

SEQ ID NO: 5710176 - DNA, 25 bp, Homo sapien
tcccgtcgtatcgccaccgtgctgc

SEQ ID NO: 5710177 - DNA, 25 bp, Homo sapien
gcaggagacccagctcatccagatg

SEQ ID NO: 5710178 - DNA, 25 bp, Homo sapien
ccgcagcgtgctggtggtgaccacc

SEQ ID NO: 5710179 - DNA, 25 bp, Homo sapien
cccactgtgcaggaccccaccctcg

SEQ ID NO: 5710180 - DNA, 25 bp, Homo sapien
tctgtccctacacctgctccttgga

SEQ ID NO: 5710181 - DNA, 25 bp, Homo sapien
gtggaggcatggcccactgtgcagg

SEQ ID NO: 5710182 - DNA, 25 bp, Homo sapien
gcgaccatgctgatgagcaggacgg

SEQ ID NO: 5710183 - DNA, 25 bp, Homo sapien
cctctgtctgccatgcgcttcttcc

SEQ ID NO: 5710184 - DNA, 25 bp, Homo sapien
tcctcctcaggccccctccgcctcc

SEQ ID NO: 5710185 - DNA, 25 bp, Homo sapien
cctgtctctctgacagccttccatt

SEQ ID NO: 5710186 - DNA, 25 bp, Homo sapien
ttcttcctcccaggctaccctgagc

SEQ ID NO: 5710187 - DNA, 25 bp, Homo sapien
gggcctgccaggactcctgtctctg

SEQ ID NO: 5710188 - DNA, 25 bp, Homo sapien
gagggcggaaggctgctggggtgcg

SEQ ID NO: 5710189 - DNA, 25 bp, Homo sapien
ctggcccagtcctcaccacagtcca

SEQ ID NO: 5710190 - DNA, 25 bp, Homo sapien
ccccatcagcgtgattctggtgagc

SEQ ID NO: 5710191 - DNA, 25 bp, Homo sapien
acatcctgcccaagtgcaagctggc

SEQ ID NO: 5710192 - DNA, 25 bp, Homo sapien
cagctcatctggtgtactggggcaa

SEQ ID NO: 5710193 - DNA, 25 bp, Homo sapien
aggaagagctagctccagacatggg

SEQ ID NO: 5710194 - DNA, 25 bp, Homo sapien
cggagcctgaaagccatccgcccct

SEQ ID NO: 5710195 - DNA, 25 bp, Homo sapien
atgcggacctggccttgctgcaggt

SEQ ID NO: 5710196 - DNA, 25 bp, Homo sapien
gagccccgctgtccttgcccctggt

SEQ ID NO: 5710197 - DNA, 25 bp, Homo sapien
tgcagagccccgctgtccttgcccc

SEQ ID NO: 5710198 - DNA, 25 bp, Homo sapien
tgcctgccccacaagatccactatg

SEQ ID NO: 5710199 - DNA, 25 bp, Homo sapien
ccttgctgcaggttttccagcttgc

SEQ ID NO: 5710200 - DNA, 25 bp, Homo sapien
catcctcagtgtacccgcagcccag

SEQ ID NO: 5710201 - DNA, 25 bp, Homo sapien
atggcctcacccagcgaggaggagc

SEQ ID NO: 5710202 - DNA, 25 bp, Homo sapien
attgccgtcttccaggctctgctcc

SEQ ID NO: 5710203 - DNA, 25 bp, Homo sapien
gcaggacggcgattccaggccaacg

SEQ ID NO: 5710204 - DNA, 25 bp, Homo sapien
catccacaccgggcctggcgctacg

SEQ ID NO: 5710205 - DNA, 25 bp, Homo sapien
aggcccatgtgggctgtgcgtttct

SEQ ID NO: 5710206 - DNA, 25 bp, Homo sapien
ctgtctgcataacctgtcccgtcgt

SEQ ID NO: 5710207 - DNA, 25 bp, Homo sapien
tcaggccccctccgcctccggctcc

SEQ ID NO: 5710208 - DNA, 25 bp, Homo sapien
cgggctggccgtggcccagtgaagc

SEQ ID NO: 5710209 - DNA, 25 bp, Homo sapien
cagctggctggaggtgagcttctgc

SEQ ID NO: 5710210 - DNA, 25 bp, Homo sapien
cgcctcgtcctcctcaggccccctc

SEQ ID NO: 5710211 - DNA, 25 bp, Homo sapien
tccctacacctgctccttggacccc

SEQ ID NO: 5710212 - DNA, 25 bp, Homo sapien
gagaacaacgtctacatgctgtctc

SEQ ID NO: 5710213 - DNA, 25 bp, Homo sapien
cctgccgtccgttcttgccaagttc

SEQ ID NO: 5710214 - DNA, 25 bp, Homo sapien
gcgtgattctggtgagctcggggag

SEQ ID NO: 5710215 - DNA, 25 bp, Homo sapien
gcccaacgccctcagctttggctcc

SEQ ID NO: 5710216 - DNA, 25 bp, Homo sapien
gcctgggctggccctgctaggctgg

SEQ ID NO: 5710217 - DNA, 25 bp, Homo sapien
ttgtcagaatttaggaatcccctgg

SEQ ID NO: 5710218 - DNA, 25 bp, Homo sapien
acctggccttgctgcaggttttcca

SEQ ID NO: 5710219 - DNA, 25 bp, Homo sapien
gaggccatcgaacggagcctgaaag

SEQ ID NO: 5710220 - DNA, 25 bp, Homo sapien
cggcgattccaggccaacgcagacc

SEQ ID NO: 5710221 - DNA, 25 bp, Homo sapien
tgacagcctgtgcacgtcgggcgta

SEQ ID NO: 5710222 - DNA, 25 bp, Homo sapien
ccgtcagtgataaactgtctgcata

SEQ ID NO: 5710223 - DNA, 25 bp, Homo sapien
agtgcgggtgatcaagaccacatct

SEQ ID NO: 5710224 - DNA, 25 bp, Homo sapien
cagtccacagaagccacaaacaggc

SEQ ID NO: 5710225 - DNA, 25 bp, Homo sapien
ctacgtactcaggcccccagctctc

SEQ ID NO: 5710226 - DNA, 25 bp, Homo sapien
agttcccatctcatgacctgccgtc

SEQ ID NO: 5710227 - DNA, 25 bp, Homo sapien
aaacacttgtgtggcctgtccctgt

SEQ ID NO: 5710228 - DNA, 25 bp, Homo sapien
tggtgaccacccacgaggaccctgt

SEQ ID NO: 5710229 - DNA, 25 bp, Homo sapien
gcatggacaactccagcgcagagct

SEQ ID NO: 5710230 - DNA, 25 bp, Homo sapien
gataaactgtctgcataacctgtcc

SEQ ID NO: 5710231 - DNA, 25 bp, Homo sapien
aggcatggcccactgtgcaggaccc

SEQ ID NO: 5710232 - DNA, 25 bp, Homo sapien
gcggcctccagtctgatccccccag

SEQ ID NO: 5710233 - DNA, 25 bp, Homo sapien
cctcttggccctgaggcctggcatt

SEQ ID NO: 5710234 - DNA, 25 bp, Homo sapien
gtccttgctgggtgagcttcctatt

SEQ ID NO: 5710235 - DNA, 25 bp, Homo sapien
ggggctttcggctcccacactgatg

SEQ ID NO: 5710236 - DNA, 25 bp, Homo sapien
tccagagaagccaggagcacccggc

SEQ ID NO: 5710237 - DNA, 25 bp, Homo sapien
gagcagttctcccaccagttcccat

SEQ ID NO: 5710238 - DNA, 25 bp, Homo sapien
tcccacactgatgattctccccagc

SEQ ID NO: 5710239 - DNA, 25 bp, Homo sapien
tgtccctgtctctctgacagccttc

SEQ ID NO: 5710240 - DNA, 25 bp, Homo sapien
tcatgacctgccgtccgttcttgcc

SEQ ID NO: 5710241 - DNA, 25 bp, Homo sapien
actcctgtctctgggtgaggccgca

SEQ ID NO: 5710242 - DNA, 25 bp, Homo sapien
accccagggctccccccgtgctgag

SEQ ID NO: 5710243 - DNA, 25 bp, Homo sapien
agcgtgctggtggtgaccacccacg

SEQ ID NO: 5710244 - DNA, 25 bp, Homo sapien
cctgaggacctccgcatgtttgcca

SEQ ID NO: 5710245 - DNA, 25 bp, Homo sapien
atgacatgaccctcaccagccccag

SEQ ID NO: 5710246 - DNA, 25 bp, Homo sapien
cctgcagcagctagcccaagatgcg

SEQ ID NO: 5710247 - DNA, 25 bp, Homo sapien
actcaggcccccagctctcgtgtcc

SEQ ID NO: 5710248 - DNA, 25 bp, Homo sapien
ggatgaggtgtccgccatggctgat

SEQ ID NO: 5710249 - DNA, 25 bp, Homo sapien
tccgtcctcctctggccccctccgc

SEQ ID NO: 5710250 - DNA, 25 bp, Homo sapien
gctcccctgagcccaggcggagggc

SEQ ID NO: 5710251 - DNA, 25 bp, Homo sapien
atgccagcgtatgtctgtactcccc

SEQ ID NO: 5710252 - DNA, 25 bp, Homo sapien
aggctggagaagccctgtcacctgt

SEQ ID NO: 5710253 - DNA, 25 bp, Homo sapien
cacaaacaggctcatagccaagctg

SEQ ID NO: 5710254 - DNA, 25 bp, Homo sapien
ggctcatagccaagctgtgacctgg

SEQ ID NO: 5710255 - DNA, 25 bp, Homo sapien
agcccaagatgcggacctggccttg

SEQ ID NO: 5710256 - DNA, 25 bp, Homo sapien
gtggccccctccccagcacctctgt

SEQ ID NO: 5710257 - DNA, 25 bp, Homo sapien
ggcctggcattgggtggatgcgggc

SEQ ID NO: 5710258 - DNA, 25 bp, Homo sapien
atgggttgatcacctagaggagctc

SEQ ID NO: 5710259 - DNA, 25 bp, Homo sapien
gttcttgccaagttctccttgccgg

SEQ ID NO: 5710260 - DNA, 25 bp, Homo sapien
tgccccacaagatccactatgcggc

SEQ ID NO: 5710261 - DNA, 25 bp, Homo sapien
gaggctgagccctcttggccctgag

SEQ ID NO: 5710262 - DNA, 25 bp, Homo sapien
gggcctgggctggccctgctaggct

SEQ ID NO: 5710263 - DNA, 25 bp, Homo sapien
tctggggcacgagggcctgggctgg

SEQ ID NO: 5710264 - DNA, 25 bp, Homo sapien
agctccagacatgggttgatcacct

SEQ ID NO: 5710265 - DNA, 25 bp, Homo sapien
acgagaacacgcggcgctcccagct

SEQ ID NO: 5710266 - DNA, 25 bp, Homo sapien
ctagcccaagatgcggacctggcct

SEQ ID NO: 5710267 - DNA, 25 bp, Homo sapien
ctatgcggcctccagtctgatcccc

SEQ ID NO: 5710268 - DNA, 25 bp, Homo sapien
acccgcagcccagaaccctgaggac

SEQ ID NO: 5710269 - DNA, 25 bp, Homo sapien
gaggacgacgtccccttcactgccc

SEQ ID NO: 5710270 - DNA, 25 bp, Homo sapien
gcccatgtgggctgtgcgtttctca

SEQ ID NO: 5710271 - DNA, 25 bp, Homo sapien
tacccgctgtgtgagaacaacgtct

SEQ ID NO: 5710272 - DNA, 25 bp, Homo sapien
gtatgtctgtactccccgctggccg

SEQ ID NO: 5710273 - DNA, 25 bp, Homo sapien
ggccaagctgatcctggcgctccag

SEQ ID NO: 5710274 - DNA, 25 bp, Homo sapien
acgcagacccgtcagtgataaactg

SEQ ID NO: 5710275 - DNA, 25 bp, Homo sapien
tgaccatctggggcacgagggcctg

SEQ ID NO: 5710276 - DNA, 25 bp, Homo sapien
agcgatgacatgaccctcaccagcc

SEQ ID NO: 5710277 - DNA, 25 bp, Homo sapien
gtcctgaccatctggggcacgaggg

SEQ ID NO: 5710278 - DNA, 25 bp, Homo sapien
agcgcagagctacttcccagcgggg

SEQ ID NO: 5710279 - DNA, 25 bp, Homo sapien
caaggcccatgtgggctgtgcgttt

SEQ ID NO: 5710280 - DNA, 25 bp, Homo sapien
gctgctgttcaggtaccccttccag

SEQ ID NO: 5710281 - DNA, 25 bp, Homo sapien
gccctgctgctgctcagtgatgaga

SEQ ID NO: 5710282 - DNA, 25 bp, Homo sapien
ctgtcacctgtgcacatcttgctgg

SEQ ID NO: 5710283 - DNA, 25 bp, Homo sapien
cccatctcatgacctgccgtccgtt

SEQ ID NO: 5710284 - DNA, 25 bp, Homo sapien
agacccgtcagtgataaactgtctg

SEQ ID NO: 5710285 - DNA, 25 bp, Homo sapien
ccgagcagttctcccaccagttccc

SEQ ID NO: 5710286 - DNA, 25 bp, Homo sapien
gccaagctgtgacctggtcctgacc

SEQ ID NO: 5710287 - DNA, 25 bp, Homo sapien
ctgaggcctggcattgggtggatgc

SEQ ID NO: 5710288 - DNA, 25 bp, Homo sapien
gcgattccaggccaacgcagacccg

SEQ ID NO: 5710289 - DNA, 25 bp, Homo sapien
cccaaccagcagcgatgacatgacc

SEQ ID NO: 5710290 - DNA, 25 bp, Homo sapien
ccacccacgaggaccctgtcattgc

SEQ ID NO: 5710291 - DNA, 25 bp, Homo sapien
gcacgagggcctgggctggccctgc

SEQ ID NO: 5710292 - DNA, 25 bp, Homo sapien
cgctcccagctgctcatgctgtttg

SEQ ID NO: 5710293 - DNA, 25 bp, Homo sapien
ggtgagcttcctattgactgctccc

SEQ ID NO: 5710294 - DNA, 25 bp, Homo sapien
tggcgctccaggatgaggtgtccgc

SEQ ID NO: 5710295 - DNA, 25 bp, Homo sapien
cgtcctcctctggccccctccgccc

SEQ ID NO: 5710296 - DNA, 25 bp, Homo sapien
ggttttccagcttgcagctcatctg

SEQ ID NO: 5710297 - DNA, 25 bp, Homo sapien
tgtcctggaggaagagctagctcca

SEQ ID NO: 5710298 - DNA, 25 bp, Homo sapien
aggccaacgcagacccgtcagtgat

SEQ ID NO: 5710299 - DNA, 25 bp, Homo sapien
tccgcggccgccaccacctggagga

SEQ ID NO: 5710300 - DNA, 25 bp, Homo sapien
aggctccttcactacttccgcggcc

SEQ ID NO: 5710301 - DNA, 25 bp, Homo sapien
aactccagcgcagagctacttccca

SEQ ID NO: 5710302 - DNA, 25 bp, Homo sapien
tggctggaggtgagcttctgcctgc

SEQ ID NO: 5710303 - DNA, 25 bp, Homo sapien
ccatgtgggctgtgcgtttctcaga

SEQ ID NO: 5710304 - DNA, 25 bp, Homo sapien
tccgctgtggggctgctgccctctg

SEQ ID NO: 5710305 - DNA, 25 bp, Homo sapien
ttccgcagcgtgctggtggtgacca

SEQ ID NO: 5710306 - DNA, 25 bp, Homo sapien
gtccgcgagaggacgacgtcccctt

SEQ ID NO: 5710307 - DNA, 25 bp, Homo sapien
cccttccagagaagccaggagcacc

SEQ ID NO: 5710308 - DNA, 25 bp, Homo sapien
ggcccactgtgcaggaccccaccct

SEQ ID NO: 5710309 - DNA, 25 bp, Homo sapien
acaagtaagccgcgtagcagatacg

SEQ ID NO: 5710310 - DNA, 25 bp, Homo sapien
ccctctgtgttcctacgcttccctc

SEQ ID NO: 5710311 - DNA, 25 bp, Homo sapien
cacatcttgctggtggaggcatggc

SEQ ID NO: 5710312 - DNA, 25 bp, Homo sapien
tccgcccctaccatgccctgctgct

SEQ ID NO: 5710313 - DNA, 25 bp, Homo sapien
agaacctgctggccagcctgtcgga

SEQ ID NO: 5710314 - DNA, 25 bp, Homo sapien
tgcgggctggccgtggcccagtgaa

SEQ ID NO: 5710315 - DNA, 25 bp, Homo sapien
caccgtgctgcagcacgaggagcgc

SEQ ID NO: 5710316 - DNA, 25 bp, Homo sapien
gtccccattccatcacatcctgccc

SEQ ID NO: 5710317 - DNA, 25 bp, Homo sapien
tgctgtgaagaacctgcagcagcta

SEQ ID NO: 5710318 - DNA, 25 bp, Homo sapien
tgagcttcctattgactgctcccct

SEQ ID NO: 5710319 - DNA, 25 bp, Homo sapien
cgtcccagacaagtaagccgcgtag

SEQ ID NO: 5710320 - DNA, 25 bp, Homo sapien
gtactcaggcccccagctctcgtgt

SEQ ID NO: 5710321 - DNA, 25 bp, Homo sapien
catgctgtctcccaatgccagcgta

SEQ ID NO: 5710322 - DNA, 25 bp, Homo sapien
gatccactatgcggcctccagtctg

SEQ ID NO: 5710323 - DNA, 25 bp, Homo sapien
atcatctacccgctgtgtgagaaca

SEQ ID NO: 5710324 - DNA, 25 bp, Homo sapien
cctgtcggagcatgaacgcgcagcc

SEQ ID NO: 5710325 - DNA, 25 bp, Homo sapien
caaggccatcatcatctacccgctg

SEQ ID NO: 5710326 - DNA, 25 bp, Homo sapien
tgtgcacgtcgggcgtagttcggct

SEQ ID NO: 5710327 - DNA, 25 bp, Homo sapien
ctggccagcctgtcggagcatgaac

SEQ ID NO: 5710328 - DNA, 25 bp, Homo sapien
ggtgagcttctgcctgccccacaag

SEQ ID NO: 5710329 - DNA, 25 bp, Homo sapien
catctacccgctgtgtgagaacaac

SEQ ID NO: 5710330 - DNA, 25 bp, Homo sapien
ttgccggtctccttgtcagaattta

SEQ ID NO: 5710331 - DNA, 25 bp, Homo sapien
cacctctgtctgccatgcgcttctt

SEQ ID NO: 5710332 - DNA, 25 bp, Homo sapien
ctgcataacctgtcccgtcgtatcg

SEQ ID NO: 5710333 - DNA, 25 bp, Homo sapien
gccaggactcctgtctctgggtgag

SEQ ID NO: 5710334 - DNA, 25 bp, Homo sapien
tgccagcaacacgggcgaccatgct

SEQ ID NO: 5710335 - DNA, 25 bp, Homo sapien
caagctgtgacctggtcctgaccat

SEQ ID NO: 5710336 - DNA, 25 bp, Homo sapien
ggagattatgtacaacgagaacacg

SEQ ID NO: 5710337 - DNA, 25 bp, Homo sapien
tgcgcaggtgggcgctcgcgtctcc

SEQ ID NO: 5710338 - DNA, 25 bp, Homo sapien
acgggcgaccatgctgatgagcagg

SEQ ID NO: 5710339 - DNA, 25 bp, Homo sapien
aggagacccagctcatccagatggt

SEQ ID NO: 5710340 - DNA, 25 bp, Homo sapien
cactatgcggcctccagtctgatcc

SEQ ID NO: 5710341 - DNA, 25 bp, Homo sapien
gaccatgctgatgagcaggacggcg

SEQ ID NO: 5710342 - DNA, 25 bp, Homo sapien
tagcagatacgctgccagcaacacg

SEQ ID NO: 5710343 - DNA, 25 bp, Homo sapien
tgctcccctgccctagtgcgggtga

SEQ ID NO: 5710344 - DNA, 25 bp, Homo sapien
cgacgtccccttcactgcccgggtc

SEQ ID NO: 5710345 - DNA, 25 bp, Homo sapien
cctccttctgtccctacacctgctc

SEQ ID NO: 5710346 - DNA, 25 bp, Homo sapien
tgatcaagaccacatctgctgtgaa

SEQ ID NO: 5710347 - DNA, 25 bp, Homo sapien
tgctggtggtgaccacccacgagga

SEQ ID NO: 5710348 - DNA, 25 bp, Homo sapien
tccacaccgggcctggcgctacgta

SEQ ID NO: 5710349 - DNA, 25 bp, Homo sapien
aaggtcctcagtccccattccatca

SEQ ID NO: 5710350 - DNA, 25 bp, Homo sapien
ctcccaccagttcccatctcatgac

SEQ ID NO: 5710351 - DNA, 25 bp, Homo sapien
ccttccatttgtgaagtgccctgtg

SEQ ID NO: 5710352 - DNA, 25 bp, Homo sapien
gcctgaaagccatccgcccctacca

SEQ ID NO: 5710353 - DNA, 25 bp, Homo sapien
aacggagcctgaaagccatccgccc

SEQ ID NO: 5710354 - DNA, 25 bp, Homo sapien
ctcgtgtcctggaggaagagctagc

SEQ ID NO: 5710355 - DNA, 25 bp, Homo sapien
cagtgtacccgcagcccagaaccct

SEQ ID NO: 5710356 - DNA, 25 bp, Homo sapien
agctgtgacctggtcctgaccatct

SEQ ID NO: 5710357 - DNA, 25 bp, Homo sapien
ccagaggatgacggagaacctgctg

SEQ ID NO: 5710358 - DNA, 25 bp, Homo sapien
cctaccatgccctgctgctgctcag

SEQ ID NO: 5710359 - DNA, 25 bp, Homo sapien
gtcagtgataaactgtctgcataac

SEQ ID NO: 5710360 - DNA, 25 bp, Homo sapien
caggatgaggtgtccgccatggctg

SEQ ID NO: 5710361 - DNA, 25 bp, Homo sapien
tcgtcctcctcaggccccctccgcc

SEQ ID NO: 5710362 - DNA, 25 bp, Homo sapien
ctggtggttccgctgtggggctgct

SEQ ID NO: 5710363 - DNA, 25 bp, Homo sapien
agttccgcagcgtgctggtggtgac

SEQ ID NO: 5710364 - DNA, 25 bp, Homo sapien
cagtctgtggccaccctgaagaatg

SEQ ID NO: 5710365 - DNA, 25 bp, Homo sapien
ggagcatgaacgcgcagccatcctc

SEQ ID NO: 5710366 - DNA, 25 bp, Homo sapien
agcccagaaccctgaggacctccgc

SEQ ID NO: 5710367 - DNA, 25 bp, Homo sapien
tgtgcacatcttgctggtggaggca

SEQ ID NO: 5710368 - DNA, 25 bp, Homo sapien
cctatgtctgcctgatggcctcacc

SEQ ID NO: 5710369 - DNA, 25 bp, Homo sapien
agaagccacaaacaggctcatagcc

SEQ ID NO: 5710370 - DNA, 25 bp, Homo sapien
cctcaccagccccagcatggacaac

SEQ ID NO: 5710371 - DNA, 25 bp, Homo sapien
gctccaggatgaggtgtccgccatg

SEQ ID NO: 5710372 - DNA, 25 bp, Homo sapien
tgccctgtggccccctccccagcac

SEQ ID NO: 5710373 - DNA, 25 bp, Homo sapien
tggttccgctgtggggctgctgccc

SEQ ID NO: 5710374 - DNA, 25 bp, Homo sapien
ggagaacctgctggccagcctgtcg

SEQ ID NO: 5710375 - DNA, 25 bp, Homo sapien
gacatgaccctcaccagccccagca

SEQ ID NO: 5710376 - DNA, 25 bp, Homo sapien
gagacccagctcatccagatggtgg

SEQ ID NO: 5710377 - DNA, 25 bp, Homo sapien
gctccccccgtgctgaggctgagcc

SEQ ID NO: 5710378 - DNA, 25 bp, Homo sapien
cgtatcgccaccgtgctgcagcacg

SEQ ID NO: 5710379 - DNA, 25 bp, Homo sapien
cctgccccacaagatccactatgcg

SEQ ID NO: 5710380 - DNA, 25 bp, Homo sapien
ccatcgaacggagcctgaaagccat

SEQ ID NO: 5710381 - DNA, 25 bp, Homo sapien
aacgtctacatgctgtctcccaatg

SEQ ID NO: 5710382 - DNA, 25 bp, Homo sapien
tggtgtggatgctgcagcgccggct

SEQ ID NO: 5710383 - DNA, 25 bp, Homo sapien
ataagctgctgttcaggtacccctt

SEQ ID NO: 5710384 - DNA, 25 bp, Homo sapien
agatacgctgccagcaacacgggcg

SEQ ID NO: 5710385 - DNA, 25 bp, Homo sapien
cctgcccaagtgcaagctggccagg

SEQ ID NO: 5710386 - DNA, 25 bp, Homo sapien
gcatccttcaaggcccatgtgggct

SEQ ID NO: 5710387 - DNA, 25 bp, Homo sapien
gctggctggaggtgagcttctgcct

SEQ ID NO: 5710388 - DNA, 25 bp, Homo sapien
ccctggtggttccgctgtggggctg

SEQ ID NO: 5710389 - DNA, 25 bp, Homo sapien
gcatggcccactgtgcaggacccca

SEQ ID NO: 5710390 - DNA, 25 bp, Homo sapien
gtcacctgtgcacatcttgctggtg

SEQ ID NO: 5710391 - DNA, 25 bp, Homo sapien
cccaatgccagcgtatgtctgtact

SEQ ID NO: 5710392 - DNA, 25 bp, Homo sapien
gcgccggcttctcatccagctgcac

SEQ ID NO: 5710393 - DNA, 25 bp, Homo sapien
tctgctgtgaagaacctgcagcagc

SEQ ID NO: 5710394 - DNA, 25 bp, Homo sapien
tctgtctgccatgcgcttcttcctc

SEQ ID NO: 5710395 - DNA, 25 bp, Homo sapien
gaggtgtccgccatggctgatggaa

SEQ ID NO: 5710396 - DNA, 25 bp, Homo sapien
tccaggctctgctcccctgagccca

SEQ ID NO: 5710397 - DNA, 25 bp, Homo sapien
cacctgtgcacatcttgctggtgga

SEQ ID NO: 5710398 - DNA, 25 bp, Homo sapien
tccgcatgtttgccaggctccttca

SEQ ID NO: 5710399 - DNA, 25 bp, Homo sapien
ggcgctcccagctgctcatgctgtt

SEQ ID NO: 5710400 - DNA, 25 bp, Homo sapien
gcagcgatgacatgaccctcaccag

SEQ ID NO: 5710401 - DNA, 25 bp, Homo sapien
tgagcctttcctggcccagtcctca

SEQ ID NO: 5710402 - DNA, 25 bp, Homo sapien
acccggcgtcccagacaagtaagcc

SEQ ID NO: 5710403 - DNA, 25 bp, Homo sapien
tcactacttccgcggccgccaccac

SEQ ID NO: 5710404 - DNA, 25 bp, Homo sapien
atcacctagaggagctctggctaag

SEQ ID NO: 5710405 - DNA, 25 bp, Homo sapien
tccactatgcggcctccagtctgat

SEQ ID NO: 5710406 - DNA, 25 bp, Homo sapien
gagccctcttggccctgaggcctgg

SEQ ID NO: 5710407 - DNA, 25 bp, Homo sapien
tccgtcctcctcaggccccctccgc

SEQ ID NO: 5710408 - DNA, 25 bp, Homo sapien
cggcgggatgcgggacaacaccagc

SEQ ID NO: 5710409 - DNA, 25 bp, Homo sapien
ccaggctccttcactacttccgcgg

SEQ ID NO: 5710410 - DNA, 25 bp, Homo sapien
gccctcttggccctgaggcctggca

SEQ ID NO: 5710411 - DNA, 25 bp, Homo sapien
cagtctgatccccccagaggccatc

SEQ ID NO: 5710412 - DNA, 25 bp, Homo sapien
atgcggcctccagtctgatcccccc

SEQ ID NO: 5710413 - DNA, 25 bp, Homo sapien
gggggcctgccaggactcctgtctc

SEQ ID NO: 5710414 - DNA, 25 bp, Homo sapien
ctcagtccccattccatcacatcct

SEQ ID NO: 5710415 - DNA, 25 bp, Homo sapien
ccgtccgcgagaggacgacgtcccc

SEQ ID NO: 5710416 - DNA, 25 bp, Homo sapien
gtccgttcttgccaagttctccttg

SEQ ID NO: 5710417 - DNA, 25 bp, Homo sapien
tgtcccgtcgtatcgccaccgtgct

SEQ ID NO: 5710418 - DNA, 25 bp, Homo sapien
cacctggaggagattatgtacaacg

SEQ ID NO: 5710419 - DNA, 25 bp, Homo sapien
ggtgcgcaggtgggcgctcgcgtct

SEQ ID NO: 5710420 - DNA, 25 bp, Homo sapien
gctgatcctggcgctccaggatgag

SEQ ID NO: 5710421 - DNA, 25 bp, Homo sapien
ttgtgtggcctgtccctgtctctct

SEQ ID NO: 5710422 - DNA, 25 bp, Homo sapien
gttccgctgtggggctgctgccctc

SEQ ID NO: 5710423 - DNA, 25 bp, Homo sapien
cacgtcgggcgtagttcggcttcac

SEQ ID NO: 5710424 - DNA, 25 bp, Homo sapien
ccacagaagccacaaacaggctcat

SEQ ID NO: 5710425 - DNA, 25 bp, Homo sapien
tcggcggtcgcagcctcagcacgcc

SEQ ID NO: 5710426 - DNA, 25 bp, Homo sapien
tccgccatggctgatggaaatgaag

SEQ ID NO: 5710427 - DNA, 25 bp, Homo sapien
caaccagcagcgatgacatgaccct

SEQ ID NO: 5710428 - DNA, 25 bp, Homo sapien
gctggtggaggcatggcccactgtg

SEQ ID NO: 5710429 - DNA, 25 bp, Homo sapien
ctgagcccaggcggagggcggaagg

SEQ ID NO: 5710430 - DNA, 25 bp, Homo sapien
gccccggccccacggcgggatgcgg

SEQ ID NO: 5710431 - DNA, 25 bp, Homo sapien
acggagaacctgctggccagcctgt

SEQ ID NO: 5710432 - DNA, 25 bp, Homo sapien
cgctgtggggctgctgccctctgtg

SEQ ID NO: 5710433 - DNA, 25 bp, Homo sapien
ggccagcctgtcggagcatgaacgc

SEQ ID NO: 5710434 - DNA, 25 bp, Homo sapien
gctccgtcctcctctggccccctcc

SEQ ID NO: 5710435 - DNA, 25 bp, Homo sapien
gccggcttctcatccagctgcacac

SEQ ID NO: 5710436 - DNA, 25 bp, Homo sapien
aagccgcgtagcagatacgctgcca

SEQ ID NO: 5710437 - DNA, 25 bp, Homo sapien
cctccgcatgtttgccaggctcctt

SEQ ID NO: 5710438 - DNA, 25 bp, Homo sapien
aacaggctcatagccaagctgtgac

SEQ ID NO: 5710439 - DNA, 25 bp, Homo sapien
ctcaaggaagcttatgacagcctgt

SEQ ID NO: 5710440 - DNA, 25 bp, Homo sapien
ggctgatggaaatgaaggtcctcag

SEQ ID NO: 5710441 - DNA, 25 bp, Homo sapien
tcaggcccccagctctcgtgtcctg

SEQ ID NO: 5710442 - DNA, 25 bp, Homo sapien
agcgaggaggagccccgtccgcgag

SEQ ID NO: 5710443 - DNA, 25 bp, Homo sapien
ccgcacgcgtaggcatctccacgct

SEQ ID NO: 5710444 - DNA, 25 bp, Homo sapien
gatggaaatgaaggtcctcagtccc

SEQ ID NO: 5710445 - DNA, 25 bp, Homo sapien
aacgcgcagccatcctcagtgtacc

SEQ ID NO: 5710446 - DNA, 25 bp, Homo sapien
tcaccagccccagcatggacaactc

SEQ ID NO: 5710447 - DNA, 25 bp, Homo sapien
atctggtgtactggggcaaggccat

SEQ ID NO: 5710448 - DNA, 25 bp, Homo sapien
ataacctgtcccgtcgtatcgccac

SEQ ID NO: 5710449 - DNA, 25 bp, Homo sapien
cagcctcagcacgcccaacgccctc

SEQ ID NO: 5710450 - DNA, 25 bp, Homo sapien
gcataacctgtcccgtcgtatcgcc

SEQ ID NO: 5710451 - DNA, 25 bp, Homo sapien
acaacaccagccccatcagcgtgat

SEQ ID NO: 5710452 - DNA, 25 bp, Homo sapien
cccagaaccctgaggacctccgcat

SEQ ID NO: 5710453 - DNA, 25 bp, Homo sapien
tggcattgggtggatgcgggctggc

SEQ ID NO: 5710454 - DNA, 25 bp, Homo sapien
gcgtagttcggcttcacatcaacag

SEQ ID NO: 5710455 - DNA, 25 bp, Homo sapien
tgatcacctagaggagctctggcta

SEQ ID NO: 5710456 - DNA, 25 bp, Homo sapien
ttcggcttcacatcaacagctggct

SEQ ID NO: 5710457 - DNA, 25 bp, Homo sapien
tcctcagtgtacccgcagcccagaa

SEQ ID NO: 5710458 - DNA, 25 bp, Homo sapien
ccctggcccccgctgtgcaggagac

SEQ ID NO: 5710459 - DNA, 25 bp, Homo sapien
agattatgtacaacgagaacacgcg

SEQ ID NO: 5710460 - DNA, 25 bp, Homo sapien
ccgtcgtatcgccaccgtgctgcag

SEQ ID NO: 5710461 - DNA, 25 bp, Homo sapien
cccagtcctcaccacagtccacaga

SEQ ID NO: 5710462 - DNA, 25 bp, Homo sapien
cgcccctaccatgccctgctgctgc

SEQ ID NO: 5710463 - DNA, 25 bp, Homo sapien
tcacccagcgaggaggagccccgtc

SEQ ID NO: 5710464 - DNA, 25 bp, Homo sapien
cagaaccctgaggacctccgcatgt

SEQ ID NO: 5710465 - DNA, 25 bp, Homo sapien
gtacccgcagcccagaaccctgagg

SEQ ID NO: 5710466 - DNA, 25 bp, Homo sapien
gattctggtgagctcggggagcagg

SEQ ID NO: 5710467 - DNA, 25 bp, Homo sapien
actgctcccctgccctagtgcgggt

SEQ ID NO: 5710468 - DNA, 25 bp, Homo sapien
caggtgggcgctcgcgtctccccac

SEQ ID NO: 5710469 - DNA, 25 bp, Homo sapien
gtactccccgctggccgagcagttc

SEQ ID NO: 5710470 - DNA, 25 bp, Homo sapien
gctgcacacctatgtctgcctgatg

SEQ ID NO: 5710471 - DNA, 25 bp, Homo sapien
gtctcccaatgccagcgtatgtctg

SEQ ID NO: 5710472 - DNA, 25 bp, Homo sapien
caagatgcggacctggccttgctgc

SEQ ID NO: 5710473 - DNA, 25 bp, Homo sapien
aggccatcatcatctacccgctgtg

SEQ ID NO: 5710474 - DNA, 25 bp, Homo sapien
tggaggtgagcttctgcctgcccca

SEQ ID NO: 5710475 - DNA, 25 bp, Homo sapien
caagctggccagggacctcaaggaa

SEQ ID NO: 5710476 - DNA, 25 bp, Homo sapien
ttgctgggtgagcttcctattgact

SEQ ID NO: 5710477 - DNA, 25 bp, Homo sapien
cgtctacatgctgtctcccaatgcc

SEQ ID NO: 5710478 - DNA, 25 bp, Homo sapien
cgccatggctgatggaaatgaaggt

SEQ ID NO: 5710479 - DNA, 25 bp, Homo sapien
gctcatccagatggtggtgtggatg

SEQ ID NO: 5710480 - DNA, 25 bp, Homo sapien
ctggctaaggcacagttttctagaa

SEQ ID NO: 5710481 - DNA, 25 bp, Homo sapien
ctgtgacctggtcctgaccatctgg

SEQ ID NO: 5710482 - DNA, 25 bp, Homo sapien
gtctccttgtcagaatttaggaatc

SEQ ID NO: 5710483 - DNA, 25 bp, Homo sapien
ctcgggggctttcggctcccacact

SEQ ID NO: 5710484 - DNA, 25 bp, Homo sapien
cctcacccgggaggccaagctgatc

SEQ ID NO: 5710485 - DNA, 25 bp, Homo sapien
agtgcaagctggccagggacctcaa

SEQ ID NO: 5710486 - DNA, 25 bp, Homo sapien
gtggccaccctgaagaatgtgcaga

SEQ ID NO: 5710487 - DNA, 25 bp, Homo sapien
caccctcgggggctttcggctccca

SEQ ID NO: 5710488 - DNA, 25 bp, Homo sapien
aacctgtcccgtcgtatcgccaccg

SEQ ID NO: 5710489 - DNA, 25 bp, Homo sapien
agttctcccaccagttcccatctca

SEQ ID NO: 5710490 - DNA, 25 bp, Homo sapien
cccacggcgggatgcgggacaacac

SEQ ID NO: 5710491 - DNA, 25 bp, Homo sapien
tgtctgcctgatggcctcacccagc

SEQ ID NO: 5710492 - DNA, 25 bp, Homo sapien
ccccagcatccacaccgggcctggc

SEQ ID NO: 5710493 - DNA, 25 bp, Homo sapien
tcccctggcccccgctgtgcaggag

SEQ ID NO: 5710494 - DNA, 25 bp, Homo sapien
tgctgttcaggtaccccttccagag

SEQ ID NO: 5710495 - DNA, 25 bp, Homo sapien
ccccgtccgcgagaggacgacgtcc

SEQ ID NO: 5710496 - DNA, 25 bp, Homo sapien
tgtccctacacctgctccttggacc

SEQ ID NO: 5710497 - DNA, 25 bp, Homo sapien
gtctgtactccccgctggccgagca

SEQ ID NO: 5710498 - DNA, 25 bp, Homo sapien
gccatccgcccctaccatgccctgc

SEQ ID NO: 5710499 - DNA, 25 bp, Homo sapien
tgctccttggaccccccagtctgtg

SEQ ID NO: 5710500 - DNA, 25 bp, Homo sapien
cctggaggagattatgtacaacgag

SEQ ID NO: 5710501 - DNA, 25 bp, Homo sapien
tccgcctccggctccgtcctcctca

SEQ ID NO: 5710502 - DNA, 25 bp, Homo sapien
gtgcaggaccccaccctcgggggct

SEQ ID NO: 5710503 - DNA, 25 bp, Homo sapien
cactgtgcaggaccccaccctcggg

SEQ ID NO: 5710504 - DNA, 25 bp, Homo sapien
tgcgggacaacaccagccccatcag

SEQ ID NO: 5710505 - DNA, 25 bp, Homo sapien
tccccttcactgcccgggtcggcgg

SEQ ID NO: 5710506 - DNA, 25 bp, Homo sapien
gcacgaggagcgccgctgccagtac

SEQ ID NO: 5710507 - DNA, 25 bp, Homo sapien
tggtggaggcatggcccactgtgca

SEQ ID NO: 5710508 - DNA, 25 bp, Homo sapien
ggaatcccctggcccccgctgtgca

SEQ ID NO: 5710509 - DNA, 25 bp, Homo sapien
agcaggggcaataagctgctgttca

SEQ ID NO: 5710510 - DNA, 25 bp, Homo sapien
aggagcacccggcgtcccagacaag

SEQ ID NO: 5710511 - DNA, 25 bp, Homo sapien
gggcgaccatgctgatgagcaggac

SEQ ID NO: 5710512 - DNA, 25 bp, Homo sapien
ggacgacgtccccttcactgcccgg

SEQ ID NO: 5710513 - DNA, 25 bp, Homo sapien
tgccgtcttccaggctctgctcccc

SEQ ID NO: 5710514 - DNA, 25 bp, Homo sapien
tgggtggatgcgggctggccgtggc

SEQ ID NO: 5710515 - DNA, 25 bp, Homo sapien
tcccagcggggactcgccactgaac

SEQ ID NO: 5710516 - DNA, 25 bp, Homo sapien
ctctcgtgtcctggaggaagagcta

SEQ ID NO: 5710517 - DNA, 25 bp, Homo sapien
caggctcatagccaagctgtgacct

SEQ ID NO: 5710518 - DNA, 25 bp, Homo sapien
ctgatccccccagaggccatcgaac

SEQ ID NO: 5710519 - DNA, 25 bp, Homo sapien
ccagcacctctgtctgccatgcgct

SEQ ID NO: 5710520 - DNA, 25 bp, Homo sapien
agaaacacttgtgtggcctgtccct

SEQ ID NO: 5710521 - DNA, 25 bp, Homo sapien
gccgccaccacctggaggagattat

SEQ ID NO: 5710522 - DNA, 25 bp, Homo sapien
gcagatacgctgccagcaacacggg

SEQ ID NO: 5710523 - DNA, 25 bp, Homo sapien
acacgggcgaccatgctgatgagca

SEQ ID NO: 5710524 - DNA, 25 bp, Homo sapien
ctcccctgccctagtgcgggtgatc

SEQ ID NO: 5710525 - DNA, 25 bp, Homo sapien
ccagcggggactcgccactgaacca

SEQ ID NO: 5710526 - DNA, 25 bp, Homo sapien
ggaggaagagctagctccagacatg

SEQ ID NO: 5710527 - DNA, 25 bp, Homo sapien
ccacgaggaccctgtcattgccgtc

SEQ ID NO: 5710528 - DNA, 25 bp, Homo sapien
tggagaagccctgtcacctgtgcac

SEQ ID NO: 5710529 - DNA, 25 bp, Homo sapien
cagcagctagcccaagatgcggacc

SEQ ID NO: 5710530 - DNA, 25 bp, Homo sapien
ggccatcgaacggagcctgaaagcc

SEQ ID NO: 5710531 - DNA, 25 bp, Homo sapien
atggcccactgtgcaggaccccacc

SEQ ID NO: 5710532 - DNA, 25 bp, Homo sapien
caggctctgctcccctgagcccagg

SEQ ID NO: 5710533 - DNA, 25 bp, Homo sapien
cccgcctcgtcctcctcaggccccc

SEQ ID NO: 5710534 - DNA, 25 bp, Homo sapien
ctgtctcccaatgccagcgtatgtc

SEQ ID NO: 5710535 - DNA, 25 bp, Homo sapien
tccggctccgtcctcctctggcccc

SEQ ID NO: 5710536 - DNA, 25 bp, Homo sapien
tgacagccttccatttgtgaagtgc

SEQ ID NO: 5710537 - DNA, 25 bp, Homo sapien
caacgcagacccgtcagtgataaac

SEQ ID NO: 5710538 - DNA, 25 bp, Homo sapien
ctcatagccaagctgtgacctggtc

SEQ ID NO: 5710539 - DNA, 25 bp, Homo sapien
taaactgtctgcataacctgtcccg

SEQ ID NO: 5710540 - DNA, 25 bp, Homo sapien
acccgtcagtgataaactgtctgca

SEQ ID NO: 5710541 - DNA, 25 bp, Homo sapien
tgtacaacgagaacacgcggcgctc

SEQ ID NO: 5710542 - DNA, 25 bp, Homo sapien
cctcaccacagtccacagaagccac

SEQ ID NO: 5710543 - DNA, 25 bp, Homo sapien
cggccccggccccacggcgggatgc

SEQ ID NO: 5710544 - DNA, 25 bp, Homo sapien
atgtgggctgtgcgtttctcagacc

SEQ ID NO: 5710545 - DNA, 25 bp, Homo sapien
agcgccgctgccagtacctcacccg

SEQ ID NO: 5710546 - DNA, 25 bp, Homo sapien
gctgatgagcaggacggcgattcca

SEQ ID NO: 5710547 - DNA, 25 bp, Homo sapien
cccccagtctgtggccaccctgaag

SEQ ID NO: 5710548 - DNA, 25 bp, Homo sapien
tgcaggttttccagcttgcagctca

SEQ ID NO: 5710549 - DNA, 25 bp, Homo sapien
tgccaggctccttcactacttccgc

SEQ ID NO: 5710550 - DNA, 25 bp, Homo sapien
cctggcgctccaggatgaggtgtcc

SEQ ID NO: 5710551 - DNA, 25 bp, Homo sapien
agaccacatctgctgtgaagaacct

SEQ ID NO: 5710552 - DNA, 25 bp, Homo sapien
cctcacccagcgaggaggagccccg

SEQ ID NO: 5710553 - DNA, 25 bp, Homo sapien
tactggggcaaggccatcatcatct

SEQ ID NO: 5710554 - DNA, 25 bp, Homo sapien
tacaacgagaacacgcggcgctccc

SEQ ID NO: 5710555 - DNA, 25 bp, Homo sapien
gctgcaggttttccagcttgcagct

SEQ ID NO: 5710556 - DNA, 25 bp, Homo sapien
acgcccaacgccctcagctttggct

SEQ ID NO: 5710557 - DNA, 25 bp, Homo sapien
agcaacacgggcgaccatgctgatg

SEQ ID NO: 5710558 - DNA, 25 bp, Homo sapien
gctgcagcgccggcttctcatccag

SEQ ID NO: 5710559 - DNA, 25 bp, Homo sapien
cttccaggctctgctcccctgagcc

SEQ ID NO: 5710560 - DNA, 25 bp, Homo sapien
gctggccctgctaggctggagaagc

SEQ ID NO: 5710561 - DNA, 25 bp, Homo sapien
cttcactgcccgggtcggcggtcgc

SEQ ID NO: 5710562 - DNA, 25 bp, Homo sapien
gtgtacccgcagcccagaaccctga

SEQ ID NO: 5710563 - DNA, 25 bp, Homo sapien
tgccctctgtgttcctacgcttccc

SEQ ID NO: 5710564 - DNA, 25 bp, Homo sapien
tccttcactacttccgcggccgcca

SEQ ID NO: 5710565 - DNA, 25 bp, Homo sapien
ggaggggggcctgccaggactcctg

SEQ ID NO: 5710566 - DNA, 25 bp, Homo sapien
cttgcagctcatctggtgtactggg

SEQ ID NO: 5710567 - DNA, 25 bp, Homo sapien
tgcgggtgatcaagaccacatctgc

SEQ ID NO: 5710568 - DNA, 25 bp, Homo sapien
acagcctgtgcacgtcgggcgtagt

SEQ ID NO: 5710569 - DNA, 25 bp, Homo sapien
cctgaagaatgtgcagaaacacttg

SEQ ID NO: 5710570 - DNA, 25 bp, Homo sapien
ctcatccagctgcacacctatgtct

SEQ ID NO: 5710571 - DNA, 25 bp, Homo sapien
ttggccctgaggcctggcattgggt

SEQ ID NO: 5710572 - DNA, 25 bp, Homo sapien
ccgcgagaggacgacgtccccttca

SEQ ID NO: 5710573 - DNA, 25 bp, Homo sapien
cccagaggccatcgaacggagcctg

SEQ ID NO: 5710574 - DNA, 25 bp, Homo sapien
cccagctcatccagatggtggtgtg

SEQ ID NO: 5710575 - DNA, 25 bp, Homo sapien
tacttccgcggccgccaccacctgg

SEQ ID NO: 5710576 - DNA, 25 bp, Homo sapien
ccagcaacacgggcgaccatgctga

SEQ ID NO: 5710577 - DNA, 25 bp, Homo sapien
gaagcctgcagagccccgctgtcct

SEQ ID NO: 5710578 - DNA, 25 bp, Homo sapien
gtccacagaagccacaaacaggctc

SEQ ID NO: 5710579 - DNA, 25 bp, Homo sapien
ggcacagttttctagaaataaaaca

SEQ ID NO: 5710580 - DNA, 25 bp, Homo sapien
cctgtcccgtcgtatcgccaccgtg

SEQ ID NO: 5710581 - DNA, 25 bp, Homo sapien
acacttgtgtggcctgtccctgtct

SEQ ID NO: 5710582 - DNA, 25 bp, Homo sapien
caggggcaataagctgctgttcagg

SEQ ID NO: 5710583 - DNA, 25 bp, Homo sapien
ttctcatccagctgcacacctatgt

SEQ ID NO: 5710584 - DNA, 25 bp, Homo sapien
agctggccagggacctcaaggaagc

SEQ ID NO: 5710585 - DNA, 25 bp, Homo sapien
cgtcgggcgtagttcggcttcacat

SEQ ID NO: 5710586 - DNA, 25 bp, Homo sapien
tcctctggccccctccgcccccggc

SEQ ID NO: 5710587 - DNA, 25 bp, Homo sapien
cagcagcgatgacatgaccctcacc

SEQ ID NO: 5710588 - DNA, 25 bp, Homo sapien
atcgaacggagcctgaaagccatcc

SEQ ID NO: 5710589 - DNA, 25 bp, Homo sapien
gctgccagcaacacgggcgaccatg

SEQ ID NO: 5710590 - DNA, 25 bp, Homo sapien
catctcatgacctgccgtccgttct

SEQ ID NO: 5710591 - DNA, 25 bp, Homo sapien
gaaagccatccgcccctaccatgcc

SEQ ID NO: 5710592 - DNA, 25 bp, Homo sapien
ctcgccactgaaccagaggatgacg

SEQ ID NO: 5710593 - DNA, 25 bp, Homo sapien
ctcccaggctaccctgagcctttcc

SEQ ID NO: 5710594 - DNA, 25 bp, Homo sapien
tgcacacctatgtctgcctgatggc

SEQ ID NO: 5710595 - DNA, 25 bp, Homo sapien
cggtcgcagcctcagcacgcccaac

SEQ ID NO: 5710596 - DNA, 25 bp, Homo sapien
cagagctacttcccagcggggactc

SEQ ID NO: 5710597 - DNA, 25 bp, Homo sapien
ctgtactccccgctggccgagcagt

SEQ ID NO: 5710598 - DNA, 25 bp, Homo sapien
cccaagatgcggacctggccttgct

SEQ ID NO: 5710599 - DNA, 25 bp, Homo sapien
ctgtgttcctacgcttccctccagt

SEQ ID NO: 5710600 - DNA, 25 bp, Homo sapien
cccaagtgcaagctggccagggacc

SEQ ID NO: 5710601 - DNA, 25 bp, Homo sapien
tctctctgacagccttccatttgtg

SEQ ID NO: 5710602 - DNA, 25 bp, Homo sapien
ctagtgcgggtgatcaagaccacat

SEQ ID NO: 5710603 - DNA, 25 bp, Homo sapien
actacttccgcggccgccaccacct

SEQ ID NO: 5710604 - DNA, 25 bp, Homo sapien
cccgctggccgagcagttctcccac

SEQ ID NO: 5710605 - DNA, 25 bp, Homo sapien
ctgtgcaggagacccagctcatcca

SEQ ID NO: 5710606 - DNA, 25 bp, Homo sapien
ctgccaggactcctgtctctgggtg

SEQ ID NO: 5710607 - DNA, 25 bp, Homo sapien
ccgggcctggcgctacgtactcagg

SEQ ID NO: 5710608 - DNA, 25 bp, Homo sapien
cgctgtgcaggagacccagctcatc

SEQ ID NO: 5710609 - DNA, 25 bp, Homo sapien
agcctttcctggcccagtcctcacc

SEQ ID NO: 5710610 - DNA, 25 bp, Homo sapien
atgtctgtactccccgctggccgag

SEQ ID NO: 5710611 - DNA, 25 bp, Homo sapien
gcagacccgtcagtgataaactgtc

SEQ ID NO: 5710612 - DNA, 25 bp, Homo sapien
aacctgctggccagcctgtcggagc

SEQ ID NO: 5710613 - DNA, 25 bp, Homo sapien
tgatgattctccccagcatccacac

SEQ ID NO: 5710614 - DNA, 25 bp, Homo sapien
cgcggccgccaccacctggaggaga

SEQ ID NO: 5710615 - DNA, 25 bp, Homo sapien
cacacctatgtctgcctgatggcct

SEQ ID NO: 5710616 - DNA, 25 bp, Homo sapien
aagctgatcctggcgctccaggatg

SEQ ID NO: 5710617 - DNA, 25 bp, Homo sapien
ccaggagcacccggcgtcccagaca

SEQ ID NO: 5710618 - DNA, 25 bp, Homo sapien
acgagggcctgggctggccctgcta

SEQ ID NO: 5710619 - DNA, 25 bp, Homo sapien
ccccctccccagcacctctgtctgc

SEQ ID NO: 5710620 - DNA, 25 bp, Homo sapien
cacctagaggagctctggctaaggc

SEQ ID NO: 5710621 - DNA, 25 bp, Homo sapien
accatctggggcacgagggcctggg

SEQ ID NO: 5710622 - DNA, 25 bp, Homo sapien
ccgcagcccagaaccctgaggacct

SEQ ID NO: 5710623 - DNA, 25 bp, Homo sapien
catccgcccctaccatgccctgctg

SEQ ID NO: 5710624 - DNA, 25 bp, Homo sapien
gatgcgggacaacaccagccccatc

SEQ ID NO: 5710625 - DNA, 25 bp, Homo sapien
attccatcacatcctgcccaagtgc

SEQ ID NO: 5710626 - DNA, 25 bp, Homo sapien
gacctggtcctgaccatctggggca

SEQ ID NO: 5710627 - DNA, 25 bp, Homo sapien
ggccctgaggcctggcattgggtgg

SEQ ID NO: 5710628 - DNA, 25 bp, Homo sapien
gctgtgcgtttctcagaccctcctt

SEQ ID NO: 5710629 - DNA, 25 bp, Homo sapien
gtaagccgcgtagcagatacgctgc

SEQ ID NO: 5710630 - DNA, 25 bp, Homo sapien
cgcagcctcagcacgcccaacgccc

SEQ ID NO: 5710631 - DNA, 25 bp, Homo sapien
accctcaccagccccagcatggaca

SEQ ID NO: 5710632 - DNA, 25 bp, Homo sapien
cggctccgtcctcctcaggccccct

SEQ ID NO: 5710633 - DNA, 25 bp, Homo sapien
gttgatcacctagaggagctctggc

SEQ ID NO: 5710634 - DNA, 25 bp, Homo sapien
tcatccagatggtggtgtggatgct

SEQ ID NO: 5710635 - DNA, 25 bp, Homo sapien
gaggccaagctgatcctggcgctcc

SEQ ID NO: 5710636 - DNA, 25 bp, Homo sapien
tgccagtacctcacccgggaggcca

SEQ ID NO: 5710637 - DNA, 25 bp, Homo sapien
cagtccccattccatcacatcctgc

SEQ ID NO: 5710638 - DNA, 25 bp, Homo sapien
caccagttcccatctcatgacctgc

SEQ ID NO: 5710639 - DNA, 25 bp, Homo sapien
ctggccgagcagttctcccaccagt

SEQ ID NO: 5710640 - DNA, 25 bp, Homo sapien
cccagtgaagcctgcagagccccgc

SEQ ID NO: 5710641 - DNA, 25 bp, Homo sapien
tcctgtctctgggtgaggccgcatc

SEQ ID NO: 5710642 - DNA, 25 bp, Homo sapien
catgaccctcaccagccccagcatg

SEQ ID NO: 5710643 - DNA, 25 bp, Homo sapien
agctagcccaagatgcggacctggc

SEQ ID NO: 5710644 - DNA, 25 bp, Homo sapien
gaggagctctggctaaggcacagtt

SEQ ID NO: 5710645 - DNA, 25 bp, Homo sapien
tccctgtctctctgacagccttcca

SEQ ID NO: 5710646 - DNA, 25 bp, Homo sapien
ggggctgctgccctctgtgttccta

SEQ ID NO: 5710647 - DNA, 25 bp, Homo sapien
cgcagagctacttcccagcggggac

SEQ ID NO: 5710648 - DNA, 25 bp, Homo sapien
gtggggctgctgccctctgtgttcc

SEQ ID NO: 5710649 - DNA, 25 bp, Homo sapien
cctgctccttggaccccccagtctg

SEQ ID NO: 5710650 - DNA, 25 bp, Homo sapien
cccagtctgtggccaccctgaagaa

SEQ ID NO: 5710651 - DNA, 25 bp, Homo sapien
caatgccagcgtatgtctgtactcc

SEQ ID NO: 5710652 - DNA, 25 bp, Homo sapien
cccagggctccccccgtgctgaggc

SEQ ID NO: 5710653 - DNA, 25 bp, Homo sapien
tttgccaggctccttcactacttcc

SEQ ID NO: 5710654 - DNA, 25 bp, Homo sapien
accagcagcgatgacatgaccctca

SEQ ID NO: 5710655 - DNA, 25 bp, Homo sapien
accagccccagcatggacaactcca

SEQ ID NO: 5710656 - DNA, 25 bp, Homo sapien
cttctgcctgccccacaagatccac

SEQ ID NO: 5710657 - DNA, 25 bp, Homo sapien
gctcccacactgatgattctcccca

SEQ ID NO: 5710658 - DNA, 25 bp, Homo sapien
tctgcctgccccacaagatccacta

SEQ ID NO: 5710659 - DNA, 25 bp, Homo sapien
cttcccagcggggactcgccactga

SEQ ID NO: 5710660 - DNA, 25 bp, Homo sapien
gctgctcagtgatgagaagtccttg

SEQ ID NO: 5710661 - DNA, 25 bp, Homo sapien
acgcgtaggcatctccacgctggag

SEQ ID NO: 5710662 - DNA, 25 bp, Homo sapien
agcttctgcctgccccacaagatcc

SEQ ID NO: 5710663 - DNA, 25 bp, Homo sapien
gaggagccccgtccgcgagaggacg

SEQ ID NO: 5710664 - DNA, 25 bp, Homo sapien
ggctaaggcacagttttctagaaat

SEQ ID NO: 5710665 - DNA, 25 bp, Homo sapien
cagcgtgattctggtgagctcgggg

SEQ ID NO: 5710666 - DNA, 25 bp, Homo sapien
tgtcggagcatgaacgcgcagccat

SEQ ID NO: 5710667 - DNA, 25 bp, Homo sapien
agccttccatttgtgaagtgccctg

SEQ ID NO: 5710668 - DNA, 25 bp, Homo sapien
cccccagaggccatcgaacggagcc

SEQ ID NO: 5710669 - DNA, 25 bp, Homo sapien
tgtccgccatggctgatggaaatga

SEQ ID NO: 5710670 - DNA, 25 bp, Homo sapien
cgggacaacaccagccccatcagcg

SEQ ID NO: 5710671 - DNA, 25 bp, Homo sapien
gaagccaggagcacccggcgtccca

SEQ ID NO: 5710672 - DNA, 25 bp, Homo sapien
gacggcgattccaggccaacgcaga

SEQ ID NO: 5710673 - DNA, 25 bp, Homo sapien
ggacctggccttgctgcaggttttc

SEQ ID NO: 5710674 - DNA, 25 bp, Homo sapien
caataagctgctgttcaggtacccc

SEQ ID NO: 5710675 - DNA, 25 bp, Homo sapien
cccagctgctcatgctgtttgacaa

SEQ ID NO: 5710676 - DNA, 25 bp, Homo sapien
cgccctcagctttggctccccaacc

SEQ ID NO: 5710677 - DNA, 25 bp, Homo sapien
ccaggccaacgcagacccgtcagtg

SEQ ID NO: 5710678 - DNA, 25 bp, Homo sapien
ccactgaaccagaggatgacggaga

SEQ ID NO: 5710679 - DNA, 25 bp, Homo sapien
tttaggaatcccctggcccccgctg

SEQ ID NO: 5710680 - DNA, 25 bp, Homo sapien
gaatgtgcagaaacacttgtgtggc

SEQ ID NO: 5710681 - DNA, 25 bp, Homo sapien
cctacacctgctccttggacccccc

SEQ ID NO: 5710682 - DNA, 25 bp, Homo sapien
ggtgtccgccatggctgatggaaat

SEQ ID NO: 5710683 - DNA, 25 bp, Homo sapien
accctccttctgtccctacacctgc

SEQ ID NO: 5710684 - DNA, 25 bp, Homo sapien
gggctgtgcgtttctcagaccctcc

SEQ ID NO: 5710685 - DNA, 25 bp, Homo sapien
gccacaaacaggctcatagccaagc

SEQ ID NO: 5710686 - DNA, 25 bp, Homo sapien
cgtgctgaggctgagccctcttggc

SEQ ID NO: 5710687 - DNA, 25 bp, Homo sapien
agcttgcagctcatctggtgtactg

SEQ ID NO: 5710688 - DNA, 25 bp, Homo sapien
cacggcgggatgcgggacaacacca

SEQ ID NO: 5710689 - DNA, 25 bp, Homo sapien
gctgccagtacctcacccgggaggc

SEQ ID NO: 5710690 - DNA, 25 bp, Homo sapien
atcctggcgctccaggatgaggtgt

SEQ ID NO: 5710691 - DNA, 25 bp, Homo sapien
cctgtgcacatcttgctggtggagg

SEQ ID NO: 5710692 - DNA, 25 bp, Homo sapien
cctgatggcctcacccagcgaggag

SEQ ID NO: 5710693 - DNA, 25 bp, Homo sapien
gtgataaactgtctgcataacctgt

SEQ ID NO: 5710694 - DNA, 25 bp, Homo sapien
ggacaacaccagccccatcagcgtg

SEQ ID NO: 5710695 - DNA, 25 bp, Homo sapien
gatccccccagaggccatcgaacgg

SEQ ID NO: 5710696 - DNA, 25 bp, Homo sapien
ctcagctttggctccccaaccagca

SEQ ID NO: 5710697 - DNA, 25 bp, Homo sapien
ggatgctgcagcgccggcttctcat

SEQ ID NO: 5710698 - DNA, 25 bp, Homo sapien
gtaggcatctccacgctggaggggg

SEQ ID NO: 5710699 - DNA, 25 bp, Homo sapien
atgcgcttcttcctcccaggctacc

SEQ ID NO: 5710700 - DNA, 25 bp, Homo sapien
acgaggaccctgtcattgccgtctt

SEQ ID NO: 5710701 - DNA, 25 bp, Homo sapien
gggctccccccgtgctgaggctgag

SEQ ID NO: 5710702 - DNA, 25 bp, Homo sapien
gccaacgcagacccgtcagtgataa

SEQ ID NO: 5710703 - DNA, 25 bp, Homo sapien
gcggacctggccttgctgcaggttt

SEQ ID NO: 5710704 - DNA, 25 bp, Homo sapien
tgcaagctggccagggacctcaagg

SEQ ID NO: 5710705 - DNA, 25 bp, Homo sapien
gaggcctggcattgggtggatgcgg

SEQ ID NO: 5710706 - DNA, 25 bp, Homo sapien
caggactcctgtctctgggtgaggc

SEQ ID NO: 5710707 - DNA, 25 bp, Homo sapien
tacctcacccgggaggccaagctga

SEQ ID NO: 5710708 - DNA, 25 bp, Homo sapien
gtgaagaacctgcagcagctagccc

SEQ ID NO: 5710709 - DNA, 25 bp, Homo sapien
gaccacccacgaggaccctgtcatt

SEQ ID NO: 5710710 - DNA, 25 bp, Homo sapien
gaggtgagcttctgcctgccccaca

SEQ ID NO: 5710711 - DNA, 25 bp, Homo sapien
ctagctccagacatgggttgatcac

SEQ ID NO: 5710712 - DNA, 25 bp, Homo sapien
ggcaaggccatcatcatctacccgc

SEQ ID NO: 5710713 - DNA, 25 bp, Homo sapien
agaagtccttgctgggtgagcttcc

SEQ ID NO: 5710714 - DNA, 25 bp, Homo sapien
atggtggtgtggatgctgcagcgcc

SEQ ID NO: 5710715 - DNA, 25 bp, Homo sapien
ggcggtcgcagcctcagcacgccca

SEQ ID NO: 5710716 - DNA, 25 bp, Homo sapien
tcctcccaggctaccctgagccttt

SEQ ID NO: 5710717 - DNA, 25 bp, Homo sapien
ggcaataagctgctgttcaggtacc

SEQ ID NO: 5710718 - DNA, 25 bp, Homo sapien
catctgctgtgaagaacctgcagca

SEQ ID NO: 5710719 - DNA, 25 bp, Homo sapien
ctccacgctggaggggggcctgcca

SEQ ID NO: 5710720 - DNA, 25 bp, Homo sapien
ctggccttgctgcaggttttccagc

SEQ ID NO: 5710721 - DNA, 25 bp, Homo sapien
gcttctcatccagctgcacacctat

SEQ ID NO: 5710722 - DNA, 25 bp, Homo sapien
gccccgctgtccttgcccctggtgg

SEQ ID NO: 5710723 - DNA, 25 bp, Homo sapien
atccagatggtggtgtggatgctgc

SEQ ID NO: 5710724 - DNA, 25 bp, Homo sapien
ccctgtggccccctccccagcacct

SEQ ID NO: 5710725 - DNA, 25 bp, Homo sapien
gtggcccagtgaagcctgcagagcc

SEQ ID NO: 5710726 - DNA, 25 bp, Homo sapien
tcctattgactgctcccctgcccta

SEQ ID NO: 5710727 - DNA, 25 bp, Homo sapien
ctaccctgagcctttcctggcccag

SEQ ID NO: 5710728 - DNA, 25 bp, Homo sapien
gcagcccagaaccctgaggacctcc

SEQ ID NO: 5710729 - DNA, 25 bp, Homo sapien
gccctgctaggctggagaagccctg

SEQ ID NO: 5710730 - DNA, 25 bp, Homo sapien
gtgattctggtgagctcggggagca

SEQ ID NO: 5710731 - DNA, 25 bp, Homo sapien
catcttgctggtggaggcatggccc

SEQ ID NO: 5710732 - DNA, 25 bp, Homo sapien
ccgcatccttcaaggcccatgtggg

SEQ ID NO: 5710733 - DNA, 25 bp, Homo sapien
gtgaagcctgcagagccccgctgtc

SEQ ID NO: 5710734 - DNA, 25 bp, Homo sapien
cttgccgcacgcgtaggcatctcca

SEQ ID NO: 5710735 - DNA, 25 bp, Homo sapien
cggctcccacactgatgattctccc

SEQ ID NO: 5710736 - DNA, 25 bp, Homo sapien
cctgctgctgctcagtgatgagaag

SEQ ID NO: 5710737 - DNA, 25 bp, Homo sapien
accctgaggacctccgcatgtttgc

SEQ ID NO: 5710738 - DNA, 25 bp, Homo sapien
accacagtccacagaagccacaaac

SEQ ID NO: 5710739 - DNA, 25 bp, Homo sapien
gaagccctgtcacctgtgcacatct

SEQ ID NO: 5710740 - DNA, 25 bp, Homo sapien
ccagggacctcaaggaagcttatga

SEQ ID NO: 5710741 - DNA, 25 bp, Homo sapien
ccagcttgcagctcatctggtgtac

SEQ ID NO: 5710742 - DNA, 25 bp, Homo sapien
agcatccacaccgggcctggcgcta

SEQ ID NO: 5710743 - DNA, 25 bp, Homo sapien
agaggatgacggagaacctgctggc

SEQ ID NO: 5710744 - DNA, 25 bp, Homo sapien
cacaccgggcctggcgctacgtact

SEQ ID NO: 5710745 - DNA, 25 bp, Homo sapien
tgctgtttgacaagttccgcagcgt

SEQ ID NO: 5710746 - DNA, 25 bp, Homo sapien
gaaatgaaggtcctcagtccccatt

SEQ ID NO: 5710747 - DNA, 25 bp, Homo sapien
ggtggatgcgggctggccgtggccc

SEQ ID NO: 5710748 - DNA, 25 bp, Homo sapien
caagtgcaagctggccagggacctc

SEQ ID NO: 5710749 - DNA, 25 bp, Homo sapien
gtcttccaggctctgctcccctgag

SEQ ID NO: 5710750 - DNA, 25 bp, Homo sapien
ctgtttgacaagttccgcagcgtgc

SEQ ID NO: 5710751 - DNA, 25 bp, Homo sapien
agttctccttgccggtctccttgtc

SEQ ID NO: 5710752 - DNA, 25 bp, Homo sapien
gtctgcataacctgtcccgtcgtat

SEQ ID NO: 5710753 - DNA, 25 bp, Homo sapien
ccctccccagcacctctgtctgcca

SEQ ID NO: 5710754 - DNA, 25 bp, Homo sapien
ggccgagcagttctcccaccagttc

SEQ ID NO: 5710755 - DNA, 25 bp, Homo sapien
tgtctgccatgcgcttcttcctccc

SEQ ID NO: 5710756 - DNA, 25 bp, Homo sapien
cctgctaggctggagaagccctgtc

SEQ ID NO: 5710757 - DNA, 25 bp, Homo sapien
ccagtccttgccgcacgcgtaggca

SEQ ID NO: 5710758 - DNA, 25 bp, Homo sapien
atgacctgccgtccgttcttgccaa

SEQ ID NO: 5710759 - DNA, 25 bp, Homo sapien
atgctgatgagcaggacggcgattc

SEQ ID NO: 5710760 - DNA, 25 bp, Homo sapien
ccaacgccctcagctttggctcccc

SEQ ID NO: 5710761 - DNA, 25 bp, Homo sapien
gtgtggcctgtccctgtctctctga

SEQ ID NO: 5710762 - DNA, 25 bp, Homo sapien
aaggcacagttttctagaaataaaa

SEQ ID NO: 5710763 - DNA, 25 bp, Homo sapien
ccagcgcagagctacttcccagcgg

SEQ ID NO: 5710764 - DNA, 25 bp, Homo sapien
ttctcgttgtacataatctcctcca

SEQ ID NO: 5710765 - DNA, 25 bp, Homo sapien
ggtcatgtcatcgctgctggttggg

SEQ ID NO: 5710766 - DNA, 25 bp, Homo sapien
tggcagacagaggtgctggggaggg

SEQ ID NO: 5710767 - DNA, 25 bp, Homo sapien
tcatgctccgacaggctggccagca

SEQ ID NO: 5710768 - DNA, 25 bp, Homo sapien
cagtacaccagatgagctgcaagct

SEQ ID NO: 5710769 - DNA, 25 bp, Homo sapien
gacaaggagaccggcaaggagaact

SEQ ID NO: 5710770 - DNA, 25 bp, Homo sapien
gcttggctatgagcctgtttgtggc

SEQ ID NO: 5710771 - DNA, 25 bp, Homo sapien
agagggctcagcctcagcacggggg

SEQ ID NO: 5710772 - DNA, 25 bp, Homo sapien
ttgatcacccgcactagggcagggg

SEQ ID NO: 5710773 - DNA, 25 bp, Homo sapien
gctcacccagcaaggacttctcatc

SEQ ID NO: 5710774 - DNA, 25 bp, Homo sapien
tccgtcatcctctggttcagtggcg

SEQ ID NO: 5710775 - DNA, 25 bp, Homo sapien
tggcggccgcggaagtagtgaagga

SEQ ID NO: 5710776 - DNA, 25 bp, Homo sapien
gctggaaaacctgcagcaaggccag

SEQ ID NO: 5710777 - DNA, 25 bp, Homo sapien
catcagtgtgggagccgaaagcccc

SEQ ID NO: 5710778 - DNA, 25 bp, Homo sapien
gaggctgcgaccgccgacccgggca

SEQ ID NO: 5710779 - DNA, 25 bp, Homo sapien
ggtgctcctggcttctctggaaggg

SEQ ID NO: 5710780 - DNA, 25 bp, Homo sapien
aggccaggtccgcatcttgggctag

SEQ ID NO: 5710781 - DNA, 25 bp, Homo sapien
ttcctccaggacacgagagctgggg

SEQ ID NO: 5710782 - DNA, 25 bp, Homo sapien
gacgggtctgcgttggcctggaatc

SEQ ID NO: 5710783 - DNA, 25 bp, Homo sapien
cggaacttgtcaaacagcatgagca

SEQ ID NO: 5710784 - DNA, 25 bp, Homo sapien
ccgcactagggcaggggagcagtca

SEQ ID NO: 5710785 - DNA, 25 bp, Homo sapien
tgagggtcatgtcatcgctgctggt

SEQ ID NO: 5710786 - DNA, 25 bp, Homo sapien
aggctgtcataagcttccttgaggt

SEQ ID NO: 5710787 - DNA, 25 bp, Homo sapien
gcctcccgggtgaggtactggcagc

SEQ ID NO: 5710788 - DNA, 25 bp, Homo sapien
agcaaggacttctcatcactgagca

SEQ ID NO: 5710789 - DNA, 25 bp, Homo sapien
ccccgagctcaccagaatcacgctg

SEQ ID NO: 5710790 - DNA, 25 bp, Homo sapien
gccacagggcacttcacaaatggaa

SEQ ID NO: 5710791 - DNA, 25 bp, Homo sapien
caggaaaggctcagggtagcctggg

SEQ ID NO: 5710792 - DNA, 25 bp, Homo sapien
agccggaggcggagggggcctgagg

SEQ ID NO: 5710793 - DNA, 25 bp, Homo sapien
gatgtgatggaatggggactgagga

SEQ ID NO: 5710794 - DNA, 25 bp, Homo sapien
aagctggaaaacctgcagcaaggcc

SEQ ID NO: 5710795 - DNA, 25 bp, Homo sapien
gagaccggcaaggagaacttggcaa

SEQ ID NO: 5710796 - DNA, 25 bp, Homo sapien
ctccaggtggtggcggccgcggaag

SEQ ID NO: 5710797 - DNA, 25 bp, Homo sapien
cttcagggtggccacagactggggg

SEQ ID NO: 5710798 - DNA, 25 bp, Homo sapien
atggctttcaggctccgttcgatgg

SEQ ID NO: 5710799 - DNA, 25 bp, Homo sapien
catagtggatcttgtggggcaggca

SEQ ID NO: 5710800 - DNA, 25 bp, Homo sapien
tgtgggagccgaaagcccccgaggg

SEQ ID NO: 5710801 - DNA, 25 bp, Homo sapien
agggtcctcgtgggtggtcaccacc

SEQ ID NO: 5710802 - DNA, 25 bp, Homo sapien
ttctgggctgcgggtacactgagga

SEQ ID NO: 5710803 - DNA, 25 bp, Homo sapien
gcaggggagcagtcaataggaagct

SEQ ID NO: 5710804 - DNA, 25 bp, Homo sapien
agatgggaactggtgggagaactgc

SEQ ID NO: 5710805 - DNA, 25 bp, Homo sapien
ccgttcgatggcctctggggggatc

SEQ ID NO: 5710806 - DNA, 25 bp, Homo sapien
caccaccatctggatgagctgggtc

SEQ ID NO: 5710807 - DNA, 25 bp, Homo sapien
agcagagcctggaagacggcaatga

SEQ ID NO: 5710808 - DNA, 25 bp, Homo sapien
gcggccgcggaagtagtgaaggagc

SEQ ID NO: 5710809 - DNA, 25 bp, Homo sapien
gtcctcagggttctgggctgcgggt

SEQ ID NO: 5710810 - DNA, 25 bp, Homo sapien
gtggatcttgtggggcaggcagaag

SEQ ID NO: 5710811 - DNA, 25 bp, Homo sapien
ccagcctagcagggccagcccaggc

SEQ ID NO: 5710812 - DNA, 25 bp, Homo sapien
gtgggccatgcctccaccagcaaga

SEQ ID NO: 5710813 - DNA, 25 bp, Homo sapien
agatgtggtcttgatcacccgcact

SEQ ID NO: 5710814 - DNA, 25 bp, Homo sapien
cctgctcatcagcatggtcgcccgt

SEQ ID NO: 5710815 - DNA, 25 bp, Homo sapien
agcccccgagggtggggtcctgcac

SEQ ID NO: 5710816 - DNA, 25 bp, Homo sapien
tgaggactgggccaggaaaggctca

SEQ ID NO: 5710817 - DNA, 25 bp, Homo sapien
cgtgctgaggctgcgaccgccgacc

SEQ ID NO: 5710818 - DNA, 25 bp, Homo sapien
aggcttcactgggccacggccagcc

SEQ ID NO: 5710819 - DNA, 25 bp, Homo sapien
ggggccagaggaggacggagccgga

SEQ ID NO: 5710820 - DNA, 25 bp, Homo sapien
cagaatcacgctgatggggctggtg

SEQ ID NO: 5710821 - DNA, 25 bp, Homo sapien
ttggcctggaatcgccgtcctgctc

SEQ ID NO: 5710822 - DNA, 25 bp, Homo sapien
ggatggctttcaggctccgttcgat

SEQ ID NO: 5710823 - DNA, 25 bp, Homo sapien
tgggaagtagctctgcgctggagtt

SEQ ID NO: 5710824 - DNA, 25 bp, Homo sapien
tggggactgaggaccttcatttcca

SEQ ID NO: 5710825 - DNA, 25 bp, Homo sapien
cgagggtggggtcctgcacagtggg

SEQ ID NO: 5710826 - DNA, 25 bp, Homo sapien
cacagcgggtagatgatgatggcct

SEQ ID NO: 5710827 - DNA, 25 bp, Homo sapien
gcagcgtatctgctacgcggcttac

SEQ ID NO: 5710828 - DNA, 25 bp, Homo sapien
tacttgtctgggacgccgggtgctc

SEQ ID NO: 5710829 - DNA, 25 bp, Homo sapien
gactggggggtccaaggagcaggtg

SEQ ID NO: 5710830 - DNA, 25 bp, Homo sapien
ggggcctgaggaggacggagccgga

SEQ ID NO: 5710831 - DNA, 25 bp, Homo sapien
ctctaggtgatcaacccatgtctgg

SEQ ID NO: 5710832 - DNA, 25 bp, Homo sapien
agaacggacggcaggtcatgagatg

SEQ ID NO: 5710833 - DNA, 25 bp, Homo sapien
gaatcatcagtgtgggagccgaaag

SEQ ID NO: 5710834 - DNA, 25 bp, Homo sapien
acccaatgccaggcctcagggccaa

SEQ ID NO: 5710835 - DNA, 25 bp, Homo sapien
atgctccgacaggctggccagcagg

SEQ ID NO: 5710836 - DNA, 25 bp, Homo sapien
tgggacgccgggtgctcctggcttc

SEQ ID NO: 5710837 - DNA, 25 bp, Homo sapien
tgaaggagcctggcaaacatgcgga

SEQ ID NO: 5710838 - DNA, 25 bp, Homo sapien
atgtcatcgctgctggttggggagc

SEQ ID NO: 5710839 - DNA, 25 bp, Homo sapien
gcctcacccagagacaggagtcctg

SEQ ID NO: 5710840 - DNA, 25 bp, Homo sapien
gagaacttggcaagaacggacggca

SEQ ID NO: 5710841 - DNA, 25 bp, Homo sapien
agtacgtagcgccaggcccggtgtg

SEQ ID NO: 5710842 - DNA, 25 bp, Homo sapien
tgttctcgttgtacataatctcctc

SEQ ID NO: 5710843 - DNA, 25 bp, Homo sapien
gtgctggggagggggccacagggca

SEQ ID NO: 5710844 - DNA, 25 bp, Homo sapien
tcaggcagacataggtgtgcagctg

SEQ ID NO: 5710845 - DNA, 25 bp, Homo sapien
tcctcctcgctgggtgaggccatca

SEQ ID NO: 5710846 - DNA, 25 bp, Homo sapien
agctgggagcgccgcgtgttctcgt

SEQ ID NO: 5710847 - DNA, 25 bp, Homo sapien
cagcttgcacttgggcaggatgtga

SEQ ID NO: 5710848 - DNA, 25 bp, Homo sapien
acgtcgtcctctcgcggacggggct

SEQ ID NO: 5710849 - DNA, 25 bp, Homo sapien
cctggggtggggagacgcgagcgcc

SEQ ID NO: 5710850 - DNA, 25 bp, Homo sapien
gccatggcggacacctcatcctgga

SEQ ID NO: 5710851 - DNA, 25 bp, Homo sapien
cgtgccccagatggtcaggaccagg

SEQ ID NO: 5710852 - DNA, 25 bp, Homo sapien
acagaaggagggtctgagaaacgca

SEQ ID NO: 5710853 - DNA, 25 bp, Homo sapien
atcctctggttcagtggcgagtccc

SEQ ID NO: 5710854 - DNA, 25 bp, Homo sapien
ctcacacagcgggtagatgatgatg

SEQ ID NO: 5710855 - DNA, 25 bp, Homo sapien
ggcaaggacagcggggctctgcagg

SEQ ID NO: 5710856 - DNA, 25 bp, Homo sapien
tacactgaggatggctgcgcgttca

SEQ ID NO: 5710857 - DNA, 25 bp, Homo sapien
ggtgaggactgggccaggaaaggct

SEQ ID NO: 5710858 - DNA, 25 bp, Homo sapien
gagccctggggtggggagacgcgag

SEQ ID NO: 5710859 - DNA, 25 bp, Homo sapien
gcttctctggaaggggtacctgaac

SEQ ID NO: 5710860 - DNA, 25 bp, Homo sapien
aagctcacctccagccagctgttga

SEQ ID NO: 5710861 - DNA, 25 bp, Homo sapien
ggaagtagctctgcgctggagttgt

SEQ ID NO: 5710862 - DNA, 25 bp, Homo sapien
cggtggcgatacgacgggacaggtt

SEQ ID NO: 5710863 - DNA, 25 bp, Homo sapien
gggccatgcctccaccagcaagatg

SEQ ID NO: 5710864 - DNA, 25 bp, Homo sapien
tcctccaggtggtggcggccgcgga

SEQ ID NO: 5710865 - DNA, 25 bp, Homo sapien
tctgagaaacgcacagcccacatgg

SEQ ID NO: 5710866 - DNA, 25 bp, Homo sapien
accatctggatgagctgggtctcct

SEQ ID NO: 5710867 - DNA, 25 bp, Homo sapien
aaggggacgtcgtcctctcgcggac

SEQ ID NO: 5710868 - DNA, 25 bp, Homo sapien
gcagacagaggtgctggggaggggg

SEQ ID NO: 5710869 - DNA, 25 bp, Homo sapien
aatgccaggcctcagggccaagagg

SEQ ID NO: 5710870 - DNA, 25 bp, Homo sapien
cttgtctgggacgccgggtgctcct

SEQ ID NO: 5710871 - DNA, 25 bp, Homo sapien
caggagtcctggcaggcccccctcc

SEQ ID NO: 5710872 - DNA, 25 bp, Homo sapien
tagctgctgcaggttcttcacagca

SEQ ID NO: 5710873 - DNA, 25 bp, Homo sapien
ggatcagactggaggccgcatagtg

SEQ ID NO: 5710874 - DNA, 25 bp, Homo sapien
tgctggttggggagccaaagctgag

SEQ ID NO: 5710875 - DNA, 25 bp, Homo sapien
gggcggagggggccagaggaggacg

SEQ ID NO: 5710876 - DNA, 25 bp, Homo sapien
gcgttgggcgtgctgaggctgcgac

SEQ ID NO: 5710877 - DNA, 25 bp, Homo sapien
ttgggagacagcatgtagacgttgt

SEQ ID NO: 5710878 - DNA, 25 bp, Homo sapien
cctctggttcagtggcgagtccccg

SEQ ID NO: 5710879 - DNA, 25 bp, Homo sapien
aggcggagggggcctgaggaggacg

SEQ ID NO: 5710880 - DNA, 25 bp, Homo sapien
accagaatcacgctgatggggctgg

SEQ ID NO: 5710881 - DNA, 25 bp, Homo sapien
agcgccaggatcagcttggcctccc

SEQ ID NO: 5710882 - DNA, 25 bp, Homo sapien
acgagagctgggggcctgagtacgt

SEQ ID NO: 5710883 - DNA, 25 bp, Homo sapien
gggaggaagaagcgcatggcagaca

SEQ ID NO: 5710884 - DNA, 25 bp, Homo sapien
acagaggtgctggggagggggccac

SEQ ID NO: 5710885 - DNA, 25 bp, Homo sapien
tcacccagcaaggacttctcatcac

SEQ ID NO: 5710886 - DNA, 25 bp, Homo sapien
gaggtccctggccagcttgcacttg

SEQ ID NO: 5710887 - DNA, 25 bp, Homo sapien
tggcttctctggaaggggtacctga

SEQ ID NO: 5710888 - DNA, 25 bp, Homo sapien
acagggacaggccacacaagtgttt

SEQ ID NO: 5710889 - DNA, 25 bp, Homo sapien
tgaaggggacgtcgtcctctcgcgg

SEQ ID NO: 5710890 - DNA, 25 bp, Homo sapien
cagacatacgctggcattgggagac

SEQ ID NO: 5710891 - DNA, 25 bp, Homo sapien
gagaagccggcgctgcagcatccac

SEQ ID NO: 5710892 - DNA, 25 bp, Homo sapien
tccaccagcaagatgtgcacaggtg

SEQ ID NO: 5710893 - DNA, 25 bp, Homo sapien
ctggggctggtgagggtcatgtcat

SEQ ID NO: 5710894 - DNA, 25 bp, Homo sapien
tagcagggccagcccaggccctcgt

SEQ ID NO: 5710895 - DNA, 25 bp, Homo sapien
ggccctcgtgccccagatggtcagg

SEQ ID NO: 5710896 - DNA, 25 bp, Homo sapien
ggatgctggggagaatcatcagtgt

SEQ ID NO: 5710897 - DNA, 25 bp, Homo sapien
cacagcagatgtggtcttgatcacc

SEQ ID NO: 5710898 - DNA, 25 bp, Homo sapien
gggaagcgtaggaacacagagggca

SEQ ID NO: 5710899 - DNA, 25 bp, Homo sapien
acccagcaaggacttctcatcactg

SEQ ID NO: 5710900 - DNA, 25 bp, Homo sapien
aggagaacttggcaagaacggacgg

SEQ ID NO: 5710901 - DNA, 25 bp, Homo sapien
ctgcgaccgccgacccgggcagtga

SEQ ID NO: 5710902 - DNA, 25 bp, Homo sapien
gcgctcctcgtgctgcagcacggtg

SEQ ID NO: 5710903 - DNA, 25 bp, Homo sapien
agggccagcccaggccctcgtgccc

SEQ ID NO: 5710904 - DNA, 25 bp, Homo sapien
cctgcacagtgggccatgcctccac

SEQ ID NO: 5710905 - DNA, 25 bp, Homo sapien
ggatcttgtggggcaggcagaagct

SEQ ID NO: 5710906 - DNA, 25 bp, Homo sapien
gcttgcacttgggcaggatgtgatg

SEQ ID NO: 5710907 - DNA, 25 bp, Homo sapien
tgggctcaggggagcagagcctgga

SEQ ID NO: 5710908 - DNA, 25 bp, Homo sapien
ctggggggatcagactggaggccgc

SEQ ID NO: 5710909 - DNA, 25 bp, Homo sapien
atgagaagccggcgctgcagcatcc

SEQ ID NO: 5710910 - DNA, 25 bp, Homo sapien
caagatgtgcacaggtgacagggct

SEQ ID NO: 5710911 - DNA, 25 bp, Homo sapien
tctgtggactgtggtgaggactggg

SEQ ID NO: 5710912 - DNA, 25 bp, Homo sapien
gccacggccagcccgcatccaccca

SEQ ID NO: 5710913 - DNA, 25 bp, Homo sapien
tgcctacgcgtgcggcaaggactgg

SEQ ID NO: 5710914 - DNA, 25 bp, Homo sapien
ccttgaaggatgcggcctcacccag

SEQ ID NO: 5710915 - DNA, 25 bp, Homo sapien
tcaacccatgtctggagctagctct

SEQ ID NO: 5710916 - DNA, 25 bp, Homo sapien
ggacacctcatcctggagcgccagg

SEQ ID NO: 5710917 - DNA, 25 bp, Homo sapien
gccgcatagtggatcttgtggggca

SEQ ID NO: 5710918 - DNA, 25 bp, Homo sapien
ggagtcctggcaggcccccctccag

SEQ ID NO: 5710919 - DNA, 25 bp, Homo sapien
cagccatggcggacacctcatcctg

SEQ ID NO: 5710920 - DNA, 25 bp, Homo sapien
gggtggggagacgcgagcgcccacc

SEQ ID NO: 5710921 - DNA, 25 bp, Homo sapien
cgttggcctggaatcgccgtcctgc

SEQ ID NO: 5710922 - DNA, 25 bp, Homo sapien
ggccgcggaagtagtgaaggagcct

SEQ ID NO: 5710923 - DNA, 25 bp, Homo sapien
cgccaggatcagcttggcctcccgg

SEQ ID NO: 5710924 - DNA, 25 bp, Homo sapien
tcatgtcatcgctgctggttgggga

SEQ ID NO: 5710925 - DNA, 25 bp, Homo sapien
aggatgtgatggaatggggactgag

SEQ ID NO: 5710926 - DNA, 25 bp, Homo sapien
gcgagcgcccacctgcgcaccccag

SEQ ID NO: 5710927 - DNA, 25 bp, Homo sapien
cttagccagagctcctctaggtgat

SEQ ID NO: 5710928 - DNA, 25 bp, Homo sapien
gaagcgcatggcagacagaggtgct

SEQ ID NO: 5710929 - DNA, 25 bp, Homo sapien
gtactggcagcggcgctcctcgtgc

SEQ ID NO: 5710930 - DNA, 25 bp, Homo sapien
gttgttctcacacagcgggtagatg

SEQ ID NO: 5710931 - DNA, 25 bp, Homo sapien
ctcatcctggagcgccaggatcagc

SEQ ID NO: 5710932 - DNA, 25 bp, Homo sapien
ctagaaaactgtgccttagccagag

SEQ ID NO: 5710933 - DNA, 25 bp, Homo sapien
tggggagaatcatcagtgtgggagc

SEQ ID NO: 5710934 - DNA, 25 bp, Homo sapien
tgttgctggcagcgtatctgctacg

SEQ ID NO: 5710935 - DNA, 25 bp, Homo sapien
cgacgtgcacaggctgtcataagct

SEQ ID NO: 5710936 - DNA, 25 bp, Homo sapien
ctttcaggctccgttcgatggcctc

SEQ ID NO: 5710937 - DNA, 25 bp, Homo sapien
ctggaagacggcaatgacagggtcc

SEQ ID NO: 5710938 - DNA, 25 bp, Homo sapien
ggctttcaggctccgttcgatggcc

SEQ ID NO: 5710939 - DNA, 25 bp, Homo sapien
gtttgtggcttctgtggactgtggt

SEQ ID NO: 5710940 - DNA, 25 bp, Homo sapien
tggtgttgtcccgcatcccgccgtg

SEQ ID NO: 5710941 - DNA, 25 bp, Homo sapien
cagactggaggccgcatagtggatc

SEQ ID NO: 5710942 - DNA, 25 bp, Homo sapien
gcgttcatgctccgacaggctggcc

SEQ ID NO: 5710943 - DNA, 25 bp, Homo sapien
gacagggcttctccagcctagcagg

SEQ ID NO: 5710944 - DNA, 25 bp, Homo sapien
gggcaggcagaagctcacctccagc

SEQ ID NO: 5710945 - DNA, 25 bp, Homo sapien
ggtacactgaggatggctgcgcgtt

SEQ ID NO: 5710946 - DNA, 25 bp, Homo sapien
gagcaggtgtagggacagaaggagg

SEQ ID NO: 5710947 - DNA, 25 bp, Homo sapien
aggttcttcacagcagatgtggtct

SEQ ID NO: 5710948 - DNA, 25 bp, Homo sapien
tctggttcagtggcgagtccccgct

SEQ ID NO: 5710949 - DNA, 25 bp, Homo sapien
gagaactgctcggccagcggggagt

SEQ ID NO: 5710950 - DNA, 25 bp, Homo sapien
ccaggtcacagcttggctatgagcc

SEQ ID NO: 5710951 - DNA, 25 bp, Homo sapien
tgccccagatggtcaggaccaggtc

SEQ ID NO: 5710952 - DNA, 25 bp, Homo sapien
ccgggcagtgaaggggacgtcgtcc

SEQ ID NO: 5710953 - DNA, 25 bp, Homo sapien
cggccagcccgcatccacccaatgc

SEQ ID NO: 5710954 - DNA, 25 bp, Homo sapien
tggaaaacctgcagcaaggccaggt

SEQ ID NO: 5710955 - DNA, 25 bp, Homo sapien
gtcctggcaggcccccctccagcgt

SEQ ID NO: 5710956 - DNA, 25 bp, Homo sapien
agctgggtctcctgcacagcggggg

SEQ ID NO: 5710957 - DNA, 25 bp, Homo sapien
cggtgtggatgctggggagaatcat

SEQ ID NO: 5710958 - DNA, 25 bp, Homo sapien
tggggtggggagacgcgagcgccca

SEQ ID NO: 5710959 - DNA, 25 bp, Homo sapien
ctgtgccttagccagagctcctcta

SEQ ID NO: 5710960 - DNA, 25 bp, Homo sapien
acaggctgtcataagcttccttgag

SEQ ID NO: 5710961 - DNA, 25 bp, Homo sapien
gccgggtgctcctggcttctctgga

SEQ ID NO: 5710962 - DNA, 25 bp, Homo sapien
aggtactggcagcggcgctcctcgt

SEQ ID NO: 5710963 - DNA, 25 bp, Homo sapien
tgggccttgaaggatgcggcctcac

SEQ ID NO: 5710964 - DNA, 25 bp, Homo sapien
tgcctccaccagcaagatgtgcaca

SEQ ID NO: 5710965 - DNA, 25 bp, Homo sapien
aagacggcaatgacagggtcctcgt

SEQ ID NO: 5710966 - DNA, 25 bp, Homo sapien
tgagctgcaagctggaaaacctgca

SEQ ID NO: 5710967 - DNA, 25 bp, Homo sapien
tgaggccatcaggcagacataggtg

SEQ ID NO: 5710968 - DNA, 25 bp, Homo sapien
agatgtgcacaggtgacagggcttc

SEQ ID NO: 5710969 - DNA, 25 bp, Homo sapien
acaccagatgagctgcaagctggaa

SEQ ID NO: 5710970 - DNA, 25 bp, Homo sapien
tggtcgcccgtgttgctggcagcgt

SEQ ID NO: 5710971 - DNA, 25 bp, Homo sapien
gctcacctccagccagctgttgatg

SEQ ID NO: 5710972 - DNA, 25 bp, Homo sapien
ggccttgccccagtacaccagatga

SEQ ID NO: 5710973 - DNA, 25 bp, Homo sapien
accagatgagctgcaagctggaaaa

SEQ ID NO: 5710974 - DNA, 25 bp, Homo sapien
ctcggccagcggggagtacagacat

SEQ ID NO: 5710975 - DNA, 25 bp, Homo sapien
tgctcctggcttctctggaaggggt

SEQ ID NO: 5710976 - DNA, 25 bp, Homo sapien
ataatctcctccaggtggtggcggc

SEQ ID NO: 5710977 - DNA, 25 bp, Homo sapien
cggccagcggggagtacagacatac

SEQ ID NO: 5710978 - DNA, 25 bp, Homo sapien
agacagggacaggccacacaagtgt

SEQ ID NO: 5710979 - DNA, 25 bp, Homo sapien
cagggcacttcacaaatggaaggct

SEQ ID NO: 5710980 - DNA, 25 bp, Homo sapien
gcggcttacttgtctgggacgccgg

SEQ ID NO: 5710981 - DNA, 25 bp, Homo sapien
agaaaactgtgccttagccagagct

SEQ ID NO: 5710982 - DNA, 25 bp, Homo sapien
caaggagaacttggcaagaacggac

SEQ ID NO: 5710983 - DNA, 25 bp, Homo sapien
gagctcctctaggtgatcaacccat

SEQ ID NO: 5710984 - DNA, 25 bp, Homo sapien
ggaggccgcatagtggatcttgtgg

SEQ ID NO: 5710985 - DNA, 25 bp, Homo sapien
actagggcaggggagcagtcaatag

SEQ ID NO: 5710986 - DNA, 25 bp, Homo sapien
gtgccttagccagagctcctctagg

SEQ ID NO: 5710987 - DNA, 25 bp, Homo sapien
aagaagcgcatggcagacagaggtg

SEQ ID NO: 5710988 - DNA, 25 bp, Homo sapien
cgtgctgcagcacggtggcgatacg

SEQ ID NO: 5710989 - DNA, 25 bp, Homo sapien
cagcggaaccaccaggggcaaggac

SEQ ID NO: 5710990 - DNA, 25 bp, Homo sapien
gaaaacctgcagcaaggccaggtcc

SEQ ID NO: 5710991 - DNA, 25 bp, Homo sapien
ggcggagggggcctgaggaggacga

SEQ ID NO: 5710992 - DNA, 25 bp, Homo sapien
gggagccctggggtggggagacgcg

SEQ ID NO: 5710993 - DNA, 25 bp, Homo sapien
ggggggtccaaggagcaggtgtagg

SEQ ID NO: 5710994 - DNA, 25 bp, Homo sapien
catgctggggctggtgagggtcatg

SEQ ID NO: 5710995 - DNA, 25 bp, Homo sapien
agacataggtgtgcagctggatgag

SEQ ID NO: 5710996 - DNA, 25 bp, Homo sapien
tggtaggggcggatggctttcaggc

SEQ ID NO: 5710997 - DNA, 25 bp, Homo sapien
aataggaagctcacccagcaaggac

SEQ ID NO: 5710998 - DNA, 25 bp, Homo sapien
ctggagcgccaggatcagcttggcc

SEQ ID NO: 5710999 - DNA, 25 bp, Homo sapien
actggcagcggcgctcctcgtgctg

SEQ ID NO: 5711000 - DNA, 25 bp, Homo sapien
agacgcgagcgcccacctgcgcacc

SEQ ID NO: 5711001 - DNA, 25 bp, Homo sapien
aggccgcatagtggatcttgtgggg

SEQ ID NO: 5711002 - DNA, 25 bp, Homo sapien
aaacctgcagcaaggccaggtccgc

SEQ ID NO: 5711003 - DNA, 25 bp, Homo sapien
cgtatctgctacgcggcttacttgt

SEQ ID NO: 5711004 - DNA, 25 bp, Homo sapien
ccagcaagatgtgcacaggtgacag

SEQ ID NO: 5711005 - DNA, 25 bp, Homo sapien
atcagccatggcggacacctcatcc

SEQ ID NO: 5711006 - DNA, 25 bp, Homo sapien
atgcggaggtcctcagggttctggg

SEQ ID NO: 5711007 - DNA, 25 bp, Homo sapien
cgacaggctggccagcaggttctcc

SEQ ID NO: 5711008 - DNA, 25 bp, Homo sapien
ggacgtcgtcctctcgcggacgggg

SEQ ID NO: 5711009 - DNA, 25 bp, Homo sapien
acctcatcctggagcgccaggatca

SEQ ID NO: 5711010 - DNA, 25 bp, Homo sapien
ctcacccagagacaggagtcctggc

SEQ ID NO: 5711011 - DNA, 25 bp, Homo sapien
tgagctgggtctcctgcacagcggg

SEQ ID NO: 5711012 - DNA, 25 bp, Homo sapien
tggccacagactggggggtccaagg

SEQ ID NO: 5711013 - DNA, 25 bp, Homo sapien
ggtggtcaccaccagcacgctgcgg

SEQ ID NO: 5711014 - DNA, 25 bp, Homo sapien
ggaccttcatttccatcagccatgg

SEQ ID NO: 5711015 - DNA, 25 bp, Homo sapien
aacccatgtctggagctagctcttc

SEQ ID NO: 5711016 - DNA, 25 bp, Homo sapien
tcctctaggtgatcaacccatgtct

SEQ ID NO: 5711017 - DNA, 25 bp, Homo sapien
ctgatggggctggtgttgtcccgca

SEQ ID NO: 5711018 - DNA, 25 bp, Homo sapien
ctcgcggacggggctcctcctcgct

SEQ ID NO: 5711019 - DNA, 25 bp, Homo sapien
agagacagggacaggccacacaagt

SEQ ID NO: 5711020 - DNA, 25 bp, Homo sapien
ggacagaaggagggtctgagaaacg

SEQ ID NO: 5711021 - DNA, 25 bp, Homo sapien
cgccgtcctgctcatcagcatggtc

SEQ ID NO: 5711022 - DNA, 25 bp, Homo sapien
aggaccaggtcacagcttggctatg

SEQ ID NO: 5711023 - DNA, 25 bp, Homo sapien
gtcaaacagcatgagcagctgggag

SEQ ID NO: 5711024 - DNA, 25 bp, Homo sapien
ttatttctagaaaactgtgccttag

SEQ ID NO: 5711025 - DNA, 25 bp, Homo sapien
ggagccaaagctgagggcgttgggc

SEQ ID NO: 5711026 - DNA, 25 bp, Homo sapien
gtagctctgcgctggagttgtccat

SEQ ID NO: 5711027 - DNA, 25 bp, Homo sapien
gagctagctcttcctccaggacacg

SEQ ID NO: 5711028 - DNA, 25 bp, Homo sapien
ttctcacacagcgggtagatgatga

SEQ ID NO: 5711029 - DNA, 25 bp, Homo sapien
gccctccgcctgggctcaggggagc

SEQ ID NO: 5711030 - DNA, 25 bp, Homo sapien
ccaggcctcagggccaagagggctc

SEQ ID NO: 5711031 - DNA, 25 bp, Homo sapien
gggcaggatgtgatggaatggggac

SEQ ID NO: 5711032 - DNA, 25 bp, Homo sapien
ccttgaggtccctggccagcttgca

SEQ ID NO: 5711033 - DNA, 25 bp, Homo sapien
tgaggaggacggagccggaggcgga

SEQ ID NO: 5711034 - DNA, 25 bp, Homo sapien
ctaggtgatcaacccatgtctggag

SEQ ID NO: 5711035 - DNA, 25 bp, Homo sapien
gtgtggatgctggggagaatcatca

SEQ ID NO: 5711036 - DNA, 25 bp, Homo sapien
cattcttcagggtggccacagactg

SEQ ID NO: 5711037 - DNA, 25 bp, Homo sapien
ggaagctcacccagcaaggacttct

SEQ ID NO: 5711038 - DNA, 25 bp, Homo sapien
acctccagccagctgttgatgtgaa

SEQ ID NO: 5711039 - DNA, 25 bp, Homo sapien
ttcactgggccacggccagcccgca

SEQ ID NO: 5711040 - DNA, 25 bp, Homo sapien
ggctcagcctcagcacggggggagc

SEQ ID NO: 5711041 - DNA, 25 bp, Homo sapien
gtggtcttgatcacccgcactaggg

SEQ ID NO: 5711042 - DNA, 25 bp, Homo sapien
gaactggtgggagaactgctcggcc

SEQ ID NO: 5711043 - DNA, 25 bp, Homo sapien
cagagggcagcagccccacagcgga

SEQ ID NO: 5711044 - DNA, 25 bp, Homo sapien
tgctgcagcacggtggcgatacgac

SEQ ID NO: 5711045 - DNA, 25 bp, Homo sapien
ccggaggcggagggggcctgaggag

SEQ ID NO: 5711046 - DNA, 25 bp, Homo sapien
agggggccagaggaggacggagccg

SEQ ID NO: 5711047 - DNA, 25 bp, Homo sapien
agggggcctgaggaggacggagccg

SEQ ID NO: 5711048 - DNA, 25 bp, Homo sapien
caggccctcgtgccccagatggtca

SEQ ID NO: 5711049 - DNA, 25 bp, Homo sapien
agcctggcaaacatgcggaggtcct

SEQ ID NO: 5711050 - DNA, 25 bp, Homo sapien
ttcacaaatggaaggctgtcagaga

SEQ ID NO: 5711051 - DNA, 25 bp, Homo sapien
gcaggttctccgtcatcctctggtt

SEQ ID NO: 5711052 - DNA, 25 bp, Homo sapien
cccacatgggccttgaaggatgcgg

SEQ ID NO: 5711053 - DNA, 25 bp, Homo sapien
ggcatggtaggggcggatggctttc

SEQ ID NO: 5711054 - DNA, 25 bp, Homo sapien
gttgtcccgcatcccgccgtggggc

SEQ ID NO: 5711055 - DNA, 25 bp, Homo sapien
atgatgatggccttgccccagtaca

SEQ ID NO: 5711056 - DNA, 25 bp, Homo sapien
ttgaggtccctggccagcttgcact

SEQ ID NO: 5711057 - DNA, 25 bp, Homo sapien
cacagactggggggtccaaggagca

SEQ ID NO: 5711058 - DNA, 25 bp, Homo sapien
gagcagcagcagggcatggtagggg

SEQ ID NO: 5711059 - DNA, 25 bp, Homo sapien
tcagtgtgggagccgaaagcccccg

SEQ ID NO: 5711060 - DNA, 25 bp, Homo sapien
tgaggtactggcagcggcgctcctc

SEQ ID NO: 5711061 - DNA, 25 bp, Homo sapien
gagggcagcagccccacagcggaac

SEQ ID NO: 5711062 - DNA, 25 bp, Homo sapien
taggaacacagagggcagcagcccc

SEQ ID NO: 5711063 - DNA, 25 bp, Homo sapien
atgagcctgtttgtggcttctgtgg

SEQ ID NO: 5711064 - DNA, 25 bp, Homo sapien
cactgaggatggctgcgcgttcatg

SEQ ID NO: 5711065 - DNA, 25 bp, Homo sapien
cgcccgtgttgctggcagcgtatct

SEQ ID NO: 5711066 - DNA, 25 bp, Homo sapien
cctccgcctgggctcaggggagcag

SEQ ID NO: 5711067 - DNA, 25 bp, Homo sapien
acgttgttctcacacagcgggtaga

SEQ ID NO: 5711068 - DNA, 25 bp, Homo sapien
tatctgctacgcggcttacttgtct

SEQ ID NO: 5711069 - DNA, 25 bp, Homo sapien
cacacaagtgtttctgcacattctt

SEQ ID NO: 5711070 - DNA, 25 bp, Homo sapien
agcgtggagatgcctacgcgtgcgg

SEQ ID NO: 5711071 - DNA, 25 bp, Homo sapien
gtggcttctgtggactgtggtgagg

SEQ ID NO: 5711072 - DNA, 25 bp, Homo sapien
cgtgggtggtcaccaccagcacgct

SEQ ID NO: 5711073 - DNA, 25 bp, Homo sapien
caaacagcatgagcagctgggagcg

SEQ ID NO: 5711074 - DNA, 25 bp, Homo sapien
gggagcgccgcgtgttctcgttgta

SEQ ID NO: 5711075 - DNA, 25 bp, Homo sapien
gttgtccatgctggggctggtgagg

SEQ ID NO: 5711076 - DNA, 25 bp, Homo sapien
ggagcctggcaaacatgcggaggtc

SEQ ID NO: 5711077 - DNA, 25 bp, Homo sapien
tcaggaccaggtcacagcttggcta

SEQ ID NO: 5711078 - DNA, 25 bp, Homo sapien
gccttagccagagctcctctaggtg

SEQ ID NO: 5711079 - DNA, 25 bp, Homo sapien
ggagccggaggcggagggggcctga

SEQ ID NO: 5711080 - DNA, 25 bp, Homo sapien
acaggtgacagggcttctccagcct

SEQ ID NO: 5711081 - DNA, 25 bp, Homo sapien
tgatggccttgccccagtacaccag

SEQ ID NO: 5711082 - DNA, 25 bp, Homo sapien
caggctccgttcgatggcctctggg

SEQ ID NO: 5711083 - DNA, 25 bp, Homo sapien
aggacttctcatcactgagcagcag

SEQ ID NO: 5711084 - DNA, 25 bp, Homo sapien
tggcgagtccccgctgggaagtagc

SEQ ID NO: 5711085 - DNA, 25 bp, Homo sapien
ccagctgttgatgtgaagccgaact

SEQ ID NO: 5711086 - DNA, 25 bp, Homo sapien
tctgggacgccgggtgctcctggct

SEQ ID NO: 5711087 - DNA, 25 bp, Homo sapien
gcaatgacagggtcctcgtgggtgg

SEQ ID NO: 5711088 - DNA, 25 bp, Homo sapien
catccacaccaccatctggatgagc

SEQ ID NO: 5711089 - DNA, 25 bp, Homo sapien
cgtagcgccaggcccggtgtggatg

SEQ ID NO: 5711090 - DNA, 25 bp, Homo sapien
gacccgggcagtgaaggggacgtcg

SEQ ID NO: 5711091 - DNA, 25 bp, Homo sapien
agcaaggccaggtccgcatcttggg

SEQ ID NO: 5711092 - DNA, 25 bp, Homo sapien
gagggggccacagggcacttcacaa

SEQ ID NO: 5711093 - DNA, 25 bp, Homo sapien
gcagcatccacaccaccatctggat

SEQ ID NO: 5711094 - DNA, 25 bp, Homo sapien
aggcagacataggtgtgcagctgga

SEQ ID NO: 5711095 - DNA, 25 bp, Homo sapien
ggagggggccagaggaggacggagc

SEQ ID NO: 5711096 - DNA, 25 bp, Homo sapien
gccagcttgcacttgggcaggatgt

SEQ ID NO: 5711097 - DNA, 25 bp, Homo sapien
ggccaggggattcctaaattctgac

SEQ ID NO: 5711098 - DNA, 25 bp, Homo sapien
gaggatggctgcgcgttcatgctcc

SEQ ID NO: 5711099 - DNA, 25 bp, Homo sapien
gcagccttccgccctccgcctgggc

SEQ ID NO: 5711100 - DNA, 25 bp, Homo sapien
cacatgggccttgaaggatgcggcc

SEQ ID NO: 5711101 - DNA, 25 bp, Homo sapien
agggtagcctgggaggaagaagcgc

SEQ ID NO: 5711102 - DNA, 25 bp, Homo sapien
ggagggggcctgaggaggacggagc

SEQ ID NO: 5711103 - DNA, 25 bp, Homo sapien
agggacagaaggagggtctgagaaa

SEQ ID NO: 5711104 - DNA, 25 bp, Homo sapien
gcgccgcgtgttctcgttgtacata

SEQ ID NO: 5711105 - DNA, 25 bp, Homo sapien
ctgtttgtggcttctgtggactgtg

SEQ ID NO: 5711106 - DNA, 25 bp, Homo sapien
ggggctctgcaggcttcactgggcc

SEQ ID NO: 5711107 - DNA, 25 bp, Homo sapien
actacgcccgacgtgcacaggctgt

SEQ ID NO: 5711108 - DNA, 25 bp, Homo sapien
aggtggtggcggccgcggaagtagt

SEQ ID NO: 5711109 - DNA, 25 bp, Homo sapien
gggagacagcatgtagacgttgttc

SEQ ID NO: 5711110 - DNA, 25 bp, Homo sapien
catcttgggctagctgctgcaggtt

SEQ ID NO: 5711111 - DNA, 25 bp, Homo sapien
atccacccaatgccaggcctcaggg

SEQ ID NO: 5711112 - DNA, 25 bp, Homo sapien
ggggtacctgaacagcagcttattg

SEQ ID NO: 5711113 - DNA, 25 bp, Homo sapien
cccggtgtggatgctggggagaatc

SEQ ID NO: 5711114 - DNA, 25 bp, Homo sapien
agcacggtggcgatacgacgggaca

SEQ ID NO: 5711115 - DNA, 25 bp, Homo sapien
gcctcagggccaagagggctcagcc

SEQ ID NO: 5711116 - DNA, 25 bp, Homo sapien
gtttatcactgacgggtctgcgttg

SEQ ID NO: 5711117 - DNA, 25 bp, Homo sapien
tcacccgcactagggcaggggagca

SEQ ID NO: 5711118 - DNA, 25 bp, Homo sapien
ccccctccagcgtggagatgcctac

SEQ ID NO: 5711119 - DNA, 25 bp, Homo sapien
gatgcctacgcgtgcggcaaggact

SEQ ID NO: 5711120 - DNA, 25 bp, Homo sapien
cacaagtgtttctgcacattcttca

SEQ ID NO: 5711121 - DNA, 25 bp, Homo sapien
gggagaactgctcggccagcgggga

SEQ ID NO: 5711122 - DNA, 25 bp, Homo sapien
ctgaggctgcgaccgccgacccggg

SEQ ID NO: 5711123 - DNA, 25 bp, Homo sapien
aggttctccgtcatcctctggttca

SEQ ID NO: 5711124 - DNA, 25 bp, Homo sapien
agatggtcaggaccaggtcacagct

SEQ ID NO: 5711125 - DNA, 25 bp, Homo sapien
cagcgggggccaggggattcctaaa

SEQ ID NO: 5711126 - DNA, 25 bp, Homo sapien
gcaggcttcactgggccacggccag

SEQ ID NO: 5711127 - DNA, 25 bp, Homo sapien
gacggcaggtcatgagatgggaact

SEQ ID NO: 5711128 - DNA, 25 bp, Homo sapien
aaacgcacagcccacatgggccttg

SEQ ID NO: 5711129 - DNA, 25 bp, Homo sapien
gaccggcaaggagaacttggcaaga

SEQ ID NO: 5711130 - DNA, 25 bp, Homo sapien
gacagtttatcactgacgggtctgc

SEQ ID NO: 5711131 - DNA, 25 bp, Homo sapien
agaggaggacggagccggaggcgga

SEQ ID NO: 5711132 - DNA, 25 bp, Homo sapien
ggggagcagagcctggaagacggca

SEQ ID NO: 5711133 - DNA, 25 bp, Homo sapien
tagggcaggggagcagtcaatagga

SEQ ID NO: 5711134 - DNA, 25 bp, Homo sapien
caggggagcagagcctggaagacgg

SEQ ID NO: 5711135 - DNA, 25 bp, Homo sapien
ggactggagggaagcgtaggaacac

SEQ ID NO: 5711136 - DNA, 25 bp, Homo sapien
agaagctcacctccagccagctgtt

SEQ ID NO: 5711137 - DNA, 25 bp, Homo sapien
gggcacttcacaaatggaaggctgt

SEQ ID NO: 5711138 - DNA, 25 bp, Homo sapien
aggtcctcagggttctgggctgcgg

SEQ ID NO: 5711139 - DNA, 25 bp, Homo sapien
acgcacagcccacatgggccttgaa

SEQ ID NO: 5711140 - DNA, 25 bp, Homo sapien
tgcggcaaggactggagggaagcgt

SEQ ID NO: 5711141 - DNA, 25 bp, Homo sapien
cctagcagggccagcccaggccctc

SEQ ID NO: 5711142 - DNA, 25 bp, Homo sapien
tgccaggcctcagggccaagagggc

SEQ ID NO: 5711143 - DNA, 25 bp, Homo sapien
cacagcggaaccaccaggggcaagg

SEQ ID NO: 5711144 - DNA, 25 bp, Homo sapien
caagtgtttctgcacattcttcagg

SEQ ID NO: 5711145 - DNA, 25 bp, Homo sapien
acgcgagcgcccacctgcgcacccc

SEQ ID NO: 5711146 - DNA, 25 bp, Homo sapien
ggtccaaggagcaggtgtagggaca

SEQ ID NO: 5711147 - DNA, 25 bp, Homo sapien
cgcggacggggctcctcctcgctgg

SEQ ID NO: 5711148 - DNA, 25 bp, Homo sapien
ctggcattgggagacagcatgtaga

SEQ ID NO: 5711149 - DNA, 25 bp, Homo sapien
cactgggccacggccagcccgcatc

SEQ ID NO: 5711150 - DNA, 25 bp, Homo sapien
cagcatgagcagctgggagcgccgc

SEQ ID NO: 5711151 - DNA, 25 bp, Homo sapien
gtcaccaccagcacgctgcggaact

SEQ ID NO: 5711152 - DNA, 25 bp, Homo sapien
cacagtgggccatgcctccaccagc

SEQ ID NO: 5711153 - DNA, 25 bp, Homo sapien
agagagacagggacaggccacacaa

SEQ ID NO: 5711154 - DNA, 25 bp, Homo sapien
cctgaacagcagcttattgcccctg

SEQ ID NO: 5711155 - DNA, 25 bp, Homo sapien
gatcacccgcactagggcaggggag

SEQ ID NO: 5711156 - DNA, 25 bp, Homo sapien
gcttcactgggccacggccagcccg

SEQ ID NO: 5711157 - DNA, 25 bp, Homo sapien
ctcctgcacagcgggggccagggga

SEQ ID NO: 5711158 - DNA, 25 bp, Homo sapien
ggagcagagcctggaagacggcaat

SEQ ID NO: 5711159 - DNA, 25 bp, Homo sapien
catgagatgggaactggtgggagaa

SEQ ID NO: 5711160 - DNA, 25 bp, Homo sapien
agcgtatctgctacgcggcttactt

SEQ ID NO: 5711161 - DNA, 25 bp, Homo sapien
taaattctgacaaggagaccggcaa

SEQ ID NO: 5711162 - DNA, 25 bp, Homo sapien
gccaggaaaggctcagggtagcctg

SEQ ID NO: 5711163 - DNA, 25 bp, Homo sapien
gattcctaaattctgacaaggagac

SEQ ID NO: 5711164 - DNA, 25 bp, Homo sapien
ttgcacttgggcaggatgtgatgga

SEQ ID NO: 5711165 - DNA, 25 bp, Homo sapien
ggggatcagactggaggccgcatag

SEQ ID NO: 5711166 - DNA, 25 bp, Homo sapien
gctgggaagtagctctgcgctggag

SEQ ID NO: 5711167 - DNA, 25 bp, Homo sapien
cctccaggacacgagagctgggggc

SEQ ID NO: 5711168 - DNA, 25 bp, Homo sapien
ccaccagcacgctgcggaacttgtc

SEQ ID NO: 5711169 - DNA, 25 bp, Homo sapien
ggttggggagccaaagctgagggcg

SEQ ID NO: 5711170 - DNA, 25 bp, Homo sapien
gtcctgcacagtgggccatgcctcc

SEQ ID NO: 5711171 - DNA, 25 bp, Homo sapien
ctccagcgtggagatgcctacgcgt

SEQ ID NO: 5711172 - DNA, 25 bp, Homo sapien
agtgtgggagccgaaagcccccgag

SEQ ID NO: 5711173 - DNA, 25 bp, Homo sapien
gcagcagccccacagcggaaccacc

SEQ ID NO: 5711174 - DNA, 25 bp, Homo sapien
ggtccgcatcttgggctagctgctg

SEQ ID NO: 5711175 - DNA, 25 bp, Homo sapien
ctcgtgggtggtcaccaccagcacg

SEQ ID NO: 5711176 - DNA, 25 bp, Homo sapien
gaaggctgtcagagagacagggaca

SEQ ID NO: 5711177 - DNA, 25 bp, Homo sapien
ttggcaagaacggacggcaggtcat

SEQ ID NO: 5711178 - DNA, 25 bp, Homo sapien
gctagctcttcctccaggacacgag

SEQ ID NO: 5711179 - DNA, 25 bp, Homo sapien
ttcttcagggtggccacagactggg

SEQ ID NO: 5711180 - DNA, 25 bp, Homo sapien
cctacgcgtgcggcaaggactggag

SEQ ID NO: 5711181 - DNA, 25 bp, Homo sapien
cacggtggcgatacgacgggacagg

SEQ ID NO: 5711182 - DNA, 25 bp, Homo sapien
agccggcgctgcagcatccacacca

SEQ ID NO: 5711183 - DNA, 25 bp, Homo sapien
cacacagcgggtagatgatgatggc

SEQ ID NO: 5711184 - DNA, 25 bp, Homo sapien
tgtgatggaatggggactgaggacc

SEQ ID NO: 5711185 - DNA, 25 bp, Homo sapien
tacgcccgacgtgcacaggctgtca

SEQ ID NO: 5711186 - DNA, 25 bp, Homo sapien
aaggagcctggcaaacatgcggagg

SEQ ID NO: 5711187 - DNA, 25 bp, Homo sapien
ggggcctgagtacgtagcgccaggc

SEQ ID NO: 5711188 - DNA, 25 bp, Homo sapien
ttctctggaaggggtacctgaacag

SEQ ID NO: 5711189 - DNA, 25 bp, Homo sapien
ctgcagcatccacaccaccatctgg

SEQ ID NO: 5711190 - DNA, 25 bp, Homo sapien
gtgcagctggatgagaagccggcgc

SEQ ID NO: 5711191 - DNA, 25 bp, Homo sapien
gcagaagctcacctccagccagctg

SEQ ID NO: 5711192 - DNA, 25 bp, Homo sapien
ccaccatctggatgagctgggtctc

SEQ ID NO: 5711193 - DNA, 25 bp, Homo sapien
cttctgtggactgtggtgaggactg

SEQ ID NO: 5711194 - DNA, 25 bp, Homo sapien
gcacttcacaaatggaaggctgtca

SEQ ID NO: 5711195 - DNA, 25 bp, Homo sapien
gctggtgttgtcccgcatcccgccg

SEQ ID NO: 5711196 - DNA, 25 bp, Homo sapien
ctgggctgcgggtacactgaggatg

SEQ ID NO: 5711197 - DNA, 25 bp, Homo sapien
gggcagcagccccacagcggaacca

SEQ ID NO: 5711198 - DNA, 25 bp, Homo sapien
ccagaggaggacggagccggaggcg

SEQ ID NO: 5711199 - DNA, 25 bp, Homo sapien
ccgaactacgcccgacgtgcacagg

SEQ ID NO: 5711200 - DNA, 25 bp, Homo sapien
aaaggctcagggtagcctgggagga

SEQ ID NO: 5711201 - DNA, 25 bp, Homo sapien
ctcagcacggggggagccctggggt

SEQ ID NO: 5711202 - DNA, 25 bp, Homo sapien
gcgccaggcccggtgtggatgctgg

SEQ ID NO: 5711203 - DNA, 25 bp, Homo sapien
tgtcataagcttccttgaggtccct

SEQ ID NO: 5711204 - DNA, 25 bp, Homo sapien
gcggggctctgcaggcttcactggg

SEQ ID NO: 5711205 - DNA, 25 bp, Homo sapien
ctgcaggttcttcacagcagatgtg

SEQ ID NO: 5711206 - DNA, 25 bp, Homo sapien
cctgaggaggacggagccggaggcg

SEQ ID NO: 5711207 - DNA, 25 bp, Homo sapien
tcctcgtgctgcagcacggtggcga

SEQ ID NO: 5711208 - DNA, 25 bp, Homo sapien
gagggcgttgggcgtgctgaggctg

SEQ ID NO: 5711209 - DNA, 25 bp, Homo sapien
cttcatttccatcagccatggcgga

SEQ ID NO: 5711210 - DNA, 25 bp, Homo sapien
gagctgggggcctgagtacgtagcg

SEQ ID NO: 5711211 - DNA, 25 bp, Homo sapien
gggtcctgcacagtgggccatgcct

SEQ ID NO: 5711212 - DNA, 25 bp, Homo sapien
ccgccgacccgggcagtgaagggga

SEQ ID NO: 5711213 - DNA, 25 bp, Homo sapien
gatgagctgggtctcctgcacagcg

SEQ ID NO: 5711214 - DNA, 25 bp, Homo sapien
tgcggaacttgtcaaacagcatgag

SEQ ID NO: 5711215 - DNA, 25 bp, Homo sapien
gaaggatgcggcctcacccagagac

SEQ ID NO: 5711216 - DNA, 25 bp, Homo sapien
gggctagctgctgcaggttcttcac

SEQ ID NO: 5711217 - DNA, 25 bp, Homo sapien
cagtttatcactgacgggtctgcgt

SEQ ID NO: 5711218 - DNA, 25 bp, Homo sapien
ctccccgagctcaccagaatcacgc

SEQ ID NO: 5711219 - DNA, 25 bp, Homo sapien
ggtgagggtcatgtcatcgctgctg

SEQ ID NO: 5711220 - DNA, 25 bp, Homo sapien
aggtcacagcttggctatgagcctg

SEQ ID NO: 5711221 - DNA, 25 bp, Homo sapien
ctcgtgctgcagcacggtggcgata

SEQ ID NO: 5711222 - DNA, 25 bp, Homo sapien
catgtctggagctagctcttcctcc

SEQ ID NO: 5711223 - DNA, 25 bp, Homo sapien
cgcaccccagcagccttccgccctc

SEQ ID NO: 5711224 - DNA, 25 bp, Homo sapien
gcgagtccccgctgggaagtagctc

SEQ ID NO: 5711225 - DNA, 25 bp, Homo sapien
gcctgtttgtggcttctgtggactg

SEQ ID NO: 5711226 - DNA, 25 bp, Homo sapien
agggtggggtcctgcacagtgggcc

SEQ ID NO: 5711227 - DNA, 25 bp, Homo sapien
ctccagccagctgttgatgtgaagc

SEQ ID NO: 5711228 - DNA, 25 bp, Homo sapien
tagctcttcctccaggacacgagag

SEQ ID NO: 5711229 - DNA, 25 bp, Homo sapien
tggatgagctgggtctcctgcacag

SEQ ID NO: 5711230 - DNA, 25 bp, Homo sapien
ttgggctagctgctgcaggttcttc

SEQ ID NO: 5711231 - DNA, 25 bp, Homo sapien
gcaggttcttcacagcagatgtggt

SEQ ID NO: 5711232 - DNA, 25 bp, Homo sapien
tgtctgggacgccgggtgctcctgg

SEQ ID NO: 5711233 - DNA, 25 bp, Homo sapien
ggctggtgagggtcatgtcatcgct

SEQ ID NO: 5711234 - DNA, 25 bp, Homo sapien
tgacagggtcctcgtgggtggtcac

SEQ ID NO: 5711235 - DNA, 25 bp, Homo sapien
ccagcgtggagatgcctacgcgtgc

SEQ ID NO: 5711236 - DNA, 25 bp, Homo sapien
gacagcggggctctgcaggcttcac

SEQ ID NO: 5711237 - DNA, 25 bp, Homo sapien
ctgggccacggccagcccgcatcca

SEQ ID NO: 5711238 - DNA, 25 bp, Homo sapien
atggctgcgcgttcatgctccgaca

SEQ ID NO: 5711239 - DNA, 25 bp, Homo sapien
gtggggagacgcgagcgcccacctg

SEQ ID NO: 5711240 - DNA, 25 bp, Homo sapien
cgtcctctcgcggacggggctcctc

SEQ ID NO: 5711241 - DNA, 25 bp, Homo sapien
tttctgcacattcttcagggtggcc

SEQ ID NO: 5711242 - DNA, 25 bp, Homo sapien
tcacctccagccagctgttgatgtg

SEQ ID NO: 5711243 - DNA, 25 bp, Homo sapien
gcgaccgccgacccgggcagtgaag

SEQ ID NO: 5711244 - DNA, 25 bp, Homo sapien
cccagagacaggagtcctggcaggc

SEQ ID NO: 5711245 - DNA, 25 bp, Homo sapien
agccgaactacgcccgacgtgcaca

SEQ ID NO: 5711246 - DNA, 25 bp, Homo sapien
gcggaaccaccaggggcaaggacag

SEQ ID NO: 5711247 - DNA, 25 bp, Homo sapien
tagcgccaggcccggtgtggatgct

SEQ ID NO: 5711248 - DNA, 25 bp, Homo sapien
catggtaggggcggatggctttcag

SEQ ID NO: 5711249 - DNA, 25 bp, Homo sapien
tcaataggaagctcacccagcaagg

SEQ ID NO: 5711250 - DNA, 25 bp, Homo sapien
gcccccctccagcgtggagatgcct

SEQ ID NO: 5711251 - DNA, 25 bp, Homo sapien
ggaaaggctcagggtagcctgggag

SEQ ID NO: 5711252 - DNA, 25 bp, Homo sapien
cagactggggggtccaaggagcagg

SEQ ID NO: 5711253 - DNA, 25 bp, Homo sapien
ggcgctgcagcatccacaccaccat

SEQ ID NO: 5711254 - DNA, 25 bp, Homo sapien
gggctgcgggtacactgaggatggc

SEQ ID NO: 5711255 - DNA, 25 bp, Homo sapien
ggtggcggccgcggaagtagtgaag

SEQ ID NO: 5711256 - DNA, 25 bp, Homo sapien
tggccagcaggttctccgtcatcct

SEQ ID NO: 5711257 - DNA, 25 bp, Homo sapien
acataggtgtgcagctggatgagaa

SEQ ID NO: 5711258 - DNA, 25 bp, Homo sapien
ggatgagaagccggcgctgcagcat

SEQ ID NO: 5711259 - DNA, 25 bp, Homo sapien
ccagatggtcaggaccaggtcacag

SEQ ID NO: 5711260 - DNA, 25 bp, Homo sapien
gctcctcctcgctgggtgaggccat

SEQ ID NO: 5711261 - DNA, 25 bp, Homo sapien
ctggaggccgcatagtggatcttgt

SEQ ID NO: 5711262 - DNA, 25 bp, Homo sapien
gtgttgtcccgcatcccgccgtggg

SEQ ID NO: 5711263 - DNA, 25 bp, Homo sapien
ctcagggccaagagggctcagcctc

SEQ ID NO: 5711264 - DNA, 25 bp, Homo sapien
ggacaggttatgcagacagtttatc

SEQ ID NO: 5711265 - DNA, 25 bp, Homo sapien
aatgacagggtcctcgtgggtggtc

SEQ ID NO: 5711266 - DNA, 25 bp, Homo sapien
ctgacgggtctgcgttggcctggaa

SEQ ID NO: 5711267 - DNA, 25 bp, Homo sapien
ccaatgccaggcctcagggccaaga

SEQ ID NO: 5711268 - DNA, 25 bp, Homo sapien
tccatgctggggctggtgagggtca

SEQ ID NO: 5711269 - DNA, 25 bp, Homo sapien
tgaacagcagcttattgcccctgct

SEQ ID NO: 5711270 - DNA, 25 bp, Homo sapien
gttgatgtgaagccgaactacgccc

SEQ ID NO: 5711271 - DNA, 25 bp, Homo sapien
gcaaggactggagggaagcgtagga

SEQ ID NO: 5711272 - DNA, 25 bp, Homo sapien
gctgcgggtacactgaggatggctg

SEQ ID NO: 5711273 - DNA, 25 bp, Homo sapien
ctgggccaggaaaggctcagggtag

SEQ ID NO: 5711274 - DNA, 25 bp, Homo sapien
atcatcagtgtgggagccgaaagcc

SEQ ID NO: 5711275 - DNA, 25 bp, Homo sapien
cgtcatcctctggttcagtggcgag

SEQ ID NO: 5711276 - DNA, 25 bp, Homo sapien
cgcatcttgggctagctgctgcagg

SEQ ID NO: 5711277 - DNA, 25 bp, Homo sapien
caggcccggtgtggatgctggggag

SEQ ID NO: 5711278 - DNA, 25 bp, Homo sapien
aatctcctccaggtggtggcggccg

SEQ ID NO: 5711279 - DNA, 25 bp, Homo sapien
tacagacatacgctggcattgggag

SEQ ID NO: 5711280 - DNA, 25 bp, Homo sapien
agcggcgctcctcgtgctgcagcac

SEQ ID NO: 5711281 - DNA, 25 bp, Homo sapien
agggacaggccacacaagtgtttct

SEQ ID NO: 5711282 - DNA, 25 bp, Homo sapien
ccgccctccgcctgggctcagggga

SEQ ID NO: 5711283 - DNA, 25 bp, Homo sapien
gttcatgctccgacaggctggccag

SEQ ID NO: 5711284 - DNA, 25 bp, Homo sapien
gctggggagggggccacagggcact

SEQ ID NO: 5711285 - DNA, 25 bp, Homo sapien
gtgaagccgaactacgcccgacgtg

SEQ ID NO: 5711286 - DNA, 25 bp, Homo sapien
ggctctgcaggcttcactgggccac

SEQ ID NO: 5711287 - DNA, 25 bp, Homo sapien
tggagctagctcttcctccaggaca

SEQ ID NO: 5711288 - DNA, 25 bp, Homo sapien
aacagcagcttattgcccctgctcc

SEQ ID NO: 5711289 - DNA, 25 bp, Homo sapien
cttctcatcactgagcagcagcagg

SEQ ID NO: 5711290 - DNA, 25 bp, Homo sapien
ctcccgggtgaggtactggcagcgg

SEQ ID NO: 5711291 - DNA, 25 bp, Homo sapien
tgcagacagtttatcactgacgggt

SEQ ID NO: 5711292 - DNA, 25 bp, Homo sapien
atacgacgggacaggttatgcagac

SEQ ID NO: 5711293 - DNA, 25 bp, Homo sapien
gctgcggaacttgtcaaacagcatg

SEQ ID NO: 5711294 - DNA, 25 bp, Homo sapien
tctcctccaggtggtggcggccgcg

SEQ ID NO: 5711295 - DNA, 25 bp, Homo sapien
ctgcagcacggtggcgatacgacgg

SEQ ID NO: 5711296 - DNA, 25 bp, Homo sapien
gggcttctccagcctagcagggcca

SEQ ID NO: 5711297 - DNA, 25 bp, Homo sapien
ggccttgaaggatgcggcctcaccc

SEQ ID NO: 5711298 - DNA, 25 bp, Homo sapien
aggtgatcaacccatgtctggagct

SEQ ID NO: 5711299 - DNA, 25 bp, Homo sapien
gcgcgttcatgctccgacaggctgg

SEQ ID NO: 5711300 - DNA, 25 bp, Homo sapien
ccctccagcgtggagatgcctacgc

SEQ ID NO: 5711301 - DNA, 25 bp, Homo sapien
tgctggggctggtgagggtcatgtc

SEQ ID NO: 5711302 - DNA, 25 bp, Homo sapien
gcggacacctcatcctggagcgcca

SEQ ID NO: 5711303 - DNA, 25 bp, Homo sapien
cggcaatgacagggtcctcgtgggt

SEQ ID NO: 5711304 - DNA, 25 bp, Homo sapien
acccgcactagggcaggggagcagt

SEQ ID NO: 5711305 - DNA, 25 bp, Homo sapien
gagggggcctgaggaggacgaggcg

SEQ ID NO: 5711306 - DNA, 25 bp, Homo sapien
tcttcctccaggacacgagagctgg

SEQ ID NO: 5711307 - DNA, 25 bp, Homo sapien
ctgagggcgttgggcgtgctgaggc

SEQ ID NO: 5711308 - DNA, 25 bp, Homo sapien
atggccttgccccagtacaccagat

SEQ ID NO: 5711309 - DNA, 25 bp, Homo sapien
ccagcccaggccctcgtgccccaga

SEQ ID NO: 5711310 - DNA, 25 bp, Homo sapien
aaacatgcggaggtcctcagggttc

SEQ ID NO: 5711311 - DNA, 25 bp, Homo sapien
tgcggcctcacccagagacaggagt

SEQ ID NO: 5711312 - DNA, 25 bp, Homo sapien
ctatgagcctgtttgtggcttctgt

SEQ ID NO: 5711313 - DNA, 25 bp, Homo sapien
ttggctatgagcctgtttgtggctt

SEQ ID NO: 5711314 - DNA, 25 bp, Homo sapien
gcgggtagatgatgatggccttgcc

SEQ ID NO: 5711315 - DNA, 25 bp, Homo sapien
ggggctggtgagggtcatgtcatcg

SEQ ID NO: 5711316 - DNA, 25 bp, Homo sapien
tggcggacacctcatcctggagcgc

SEQ ID NO: 5711317 - DNA, 25 bp, Homo sapien
tctgcgttggcctggaatcgccgtc

SEQ ID NO: 5711318 - DNA, 25 bp, Homo sapien
ttggggagccaaagctgagggcgtt

SEQ ID NO: 5711319 - DNA, 25 bp, Homo sapien
ggaagacggcaatgacagggtcctc

SEQ ID NO: 5711320 - DNA, 25 bp, Homo sapien
aagtagtgaaggagcctggcaaaca

SEQ ID NO: 5711321 - DNA, 25 bp, Homo sapien
tcatttccatcagccatggcggaca

SEQ ID NO: 5711322 - DNA, 25 bp, Homo sapien
gctgggtgaggccatcaggcagaca

SEQ ID NO: 5711323 - DNA, 25 bp, Homo sapien
agctggatgagaagccggcgctgca

SEQ ID NO: 5711324 - DNA, 25 bp, Homo sapien
tgctcatcagcatggtcgcccgtgt

SEQ ID NO: 5711325 - DNA, 25 bp, Homo sapien
ggaagtagtgaaggagcctggcaaa

SEQ ID NO: 5711326 - DNA, 25 bp, Homo sapien
tggggagggggccacagggcacttc

SEQ ID NO: 5711327 - DNA, 25 bp, Homo sapien
ggaggcggagggggcctgaggagga

SEQ ID NO: 5711328 - DNA, 25 bp, Homo sapien
ctgcgcgttcatgctccgacaggct

SEQ ID NO: 5711329 - DNA, 25 bp, Homo sapien
tgctccccgagctcaccagaatcac

SEQ ID NO: 5711330 - DNA, 25 bp, Homo sapien
gggaactggtgggagaactgctcgg

SEQ ID NO: 5711331 - DNA, 25 bp, Homo sapien
gccccacagcggaaccaccaggggc

SEQ ID NO: 5711332 - DNA, 25 bp, Homo sapien
ccccagatggtcaggaccaggtcac

SEQ ID NO: 5711333 - DNA, 25 bp, Homo sapien
gcagggccagcccaggccctcgtgc

SEQ ID NO: 5711334 - DNA, 25 bp, Homo sapien
tccgcctgggctcaggggagcagag

SEQ ID NO: 5711335 - DNA, 25 bp, Homo sapien
gttgggcgtgctgaggctgcgaccg

SEQ ID NO: 5711336 - DNA, 25 bp, Homo sapien
gggcgttgggcgtgctgaggctgcg

SEQ ID NO: 5711337 - DNA, 25 bp, Homo sapien
ctgaggatggctgcgcgttcatgct

SEQ ID NO: 5711338 - DNA, 25 bp, Homo sapien
tctcatcactgagcagcagcagggc

SEQ ID NO: 5711339 - DNA, 25 bp, Homo sapien
ctgggaggaagaagcgcatggcaga

SEQ ID NO: 5711340 - DNA, 25 bp, Homo sapien
ggagtacagacatacgctggcattg

SEQ ID NO: 5711341 - DNA, 25 bp, Homo sapien
ttgccccagtacaccagatgagctg

SEQ ID NO: 5711342 - DNA, 25 bp, Homo sapien
cccatgtctggagctagctcttcct

SEQ ID NO: 5711343 - DNA, 25 bp, Homo sapien
ttcctaaattctgacaaggagaccg

SEQ ID NO: 5711344 - DNA, 25 bp, Homo sapien
gaccgccgacccgggcagtgaaggg

SEQ ID NO: 5711345 - DNA, 25 bp, Homo sapien
tgtcccgcatcccgccgtggggccg

SEQ ID NO: 5711346 - DNA, 25 bp, Homo sapien
agcagccccacagcggaaccaccag

SEQ ID NO: 5711347 - DNA, 25 bp, Homo sapien
gggcagtgaaggggacgtcgtcctc

SEQ ID NO: 5711348 - DNA, 25 bp, Homo sapien
gtcacagcttggctatgagcctgtt

SEQ ID NO: 5711349 - DNA, 25 bp, Homo sapien
gtcatgagatgggaactggtgggag

SEQ ID NO: 5711350 - DNA, 25 bp, Homo sapien
ataggtgtgcagctggatgagaagc

SEQ ID NO: 5711351 - DNA, 25 bp, Homo sapien
ggttctgggctgcgggtacactgag

SEQ ID NO: 5711352 - DNA, 25 bp, Homo sapien
aaggactggagggaagcgtaggaac

SEQ ID NO: 5711353 - DNA, 25 bp, Homo sapien
cagtgggccatgcctccaccagcaa

SEQ ID NO: 5711354 - DNA, 25 bp, Homo sapien
tcagcttggcctcccgggtgaggta

SEQ ID NO: 5711355 - DNA, 25 bp, Homo sapien
tctgcacattcttcagggtggccac

SEQ ID NO: 5711356 - DNA, 25 bp, Homo sapien
cccagtacaccagatgagctgcaag

SEQ ID NO: 5711357 - DNA, 25 bp, Homo sapien
atcactgacgggtctgcgttggcct

SEQ ID NO: 5711358 - DNA, 25 bp, Homo sapien
gctcctctaggtgatcaacccatgt

SEQ ID NO: 5711359 - DNA, 25 bp, Homo sapien
gcacttgggcaggatgtgatggaat

SEQ ID NO: 5711360 - DNA, 25 bp, Homo sapien
caggtccgcatcttgggctagctgc

SEQ ID NO: 5711361 - DNA, 25 bp, Homo sapien
cggacggcaggtcatgagatgggaa

SEQ ID NO: 5711362 - DNA, 25 bp, Homo sapien
tcctctcgcggacggggctcctcct

SEQ ID NO: 5711363 - DNA, 25 bp, Homo sapien
ttgtacataatctcctccaggtggt

SEQ ID NO: 5711364 - DNA, 25 bp, Homo sapien
gacggcaatgacagggtcctcgtgg

SEQ ID NO: 5711365 - DNA, 25 bp, Homo sapien
ccaggtggtggcggccgcggaagta

SEQ ID NO: 5711366 - DNA, 25 bp, Homo sapien
caccagcaagatgtgcacaggtgac

SEQ ID NO: 5711367 - DNA, 25 bp, Homo sapien
agcatggtcgcccgtgttgctggca

SEQ ID NO: 5711368 - DNA, 25 bp, Homo sapien
gttcttcacagcagatgtggtcttg

SEQ ID NO: 5711369 - DNA, 25 bp, Homo sapien
ccggcgctgcagcatccacaccacc

SEQ ID NO: 5711370 - DNA, 25 bp, Homo sapien
aggccacacaagtgtttctgcacat

SEQ ID NO: 5711371 - DNA, 25 bp, Homo sapien
gttctccgtcatcctctggttcagt

SEQ ID NO: 5711372 - DNA, 25 bp, Homo sapien
cgatacgacgggacaggttatgcag

SEQ ID NO: 5711373 - DNA, 25 bp, Homo sapien
atgagcagctgggagcgccgcgtgt

SEQ ID NO: 5711374 - DNA, 25 bp, Homo sapien
ctcatcagcatggtcgcccgtgttg

SEQ ID NO: 5711375 - DNA, 25 bp, Homo sapien
cggcaaggactggagggaagcgtag

SEQ ID NO: 5711376 - DNA, 25 bp, Homo sapien
gaggaccttcatttccatcagccat

SEQ ID NO: 5711377 - DNA, 25 bp, Homo sapien
caaggacagcggggctctgcaggct

SEQ ID NO: 5711378 - DNA, 25 bp, Homo sapien
gccaagagggctcagcctcagcacg

SEQ ID NO: 5711379 - DNA, 25 bp, Homo sapien
gacgggacaggttatgcagacagtt

SEQ ID NO: 5711380 - DNA, 25 bp, Homo sapien
tccaggacacgagagctgggggcct

SEQ ID NO: 5711381 - DNA, 25 bp, Homo sapien
cgcccgacgtgcacaggctgtcata

SEQ ID NO: 5711382 - DNA, 25 bp, Homo sapien
tcgctgggtgaggccatcaggcaga

SEQ ID NO: 5711383 - DNA, 25 bp, Homo sapien
cactgacgggtctgcgttggcctgg

SEQ ID NO: 5711384 - DNA, 25 bp, Homo sapien
agtggcgagtccccgctgggaagta

SEQ ID NO: 5711385 - DNA, 25 bp, Homo sapien
ggcaagaacggacggcaggtcatga

SEQ ID NO: 5711386 - DNA, 25 bp, Homo sapien
catgcctccaccagcaagatgtgca

SEQ ID NO: 5711387 - DNA, 25 bp, Homo sapien
tctggatgagctgggtctcctgcac

SEQ ID NO: 5711388 - DNA, 25 bp, Homo sapien
tgcacagcgggggccaggggattcc

SEQ ID NO: 5711389 - DNA, 25 bp, Homo sapien
ctgagcagcagcagggcatggtagg

SEQ ID NO: 5711390 - DNA, 25 bp, Homo sapien
gctagctgctgcaggttcttcacag

SEQ ID NO: 5711391 - DNA, 25 bp, Homo sapien
tcagcatggtcgcccgtgttgctgg

SEQ ID NO: 5711392 - DNA, 25 bp, Homo sapien
aatggggactgaggaccttcatttc

SEQ ID NO: 5711393 - DNA, 25 bp, Homo sapien
ctccgttcgatggcctctgggggga

SEQ ID NO: 5711394 - DNA, 25 bp, Homo sapien
gcctggaagacggcaatgacagggt

SEQ ID NO: 5711395 - DNA, 25 bp, Homo sapien
cgcgtgcggcaaggactggagggaa

SEQ ID NO: 5711396 - DNA, 25 bp, Homo sapien
acgcggcttacttgtctgggacgcc

SEQ ID NO: 5711397 - DNA, 25 bp, Homo sapien
tgatggaatggggactgaggacctt

SEQ ID NO: 5711398 - DNA, 25 bp, Homo sapien
tcagggtggccacagactggggggt

SEQ ID NO: 5711399 - DNA, 25 bp, Homo sapien
ccgcggaagtagtgaaggagcctgg

SEQ ID NO: 5711400 - DNA, 25 bp, Homo sapien
aacggacggcaggtcatgagatggg

SEQ ID NO: 5711401 - DNA, 25 bp, Homo sapien
gggccacggccagcccgcatccacc

SEQ ID NO: 5711402 - DNA, 25 bp, Homo sapien
ctggggggtccaaggagcaggtgta

SEQ ID NO: 5711403 - DNA, 25 bp, Homo sapien
ctgttgatgtgaagccgaactacgc

SEQ ID NO: 5711404 - DNA, 25 bp, Homo sapien
ggctgcgaccgccgacccgggcagt

SEQ ID NO: 5711405 - DNA, 25 bp, Homo sapien
agggctcagcctcagcacgggggga

SEQ ID NO: 5711406 - DNA, 25 bp, Homo sapien
ggggagtacagacatacgctggcat

SEQ ID NO: 5711407 - DNA, 25 bp, Homo sapien
gactggaggccgcatagtggatctt

SEQ ID NO: 5711408 - DNA, 25 bp, Homo sapien
agaggtgctggggagggggccacag

SEQ ID NO: 5711409 - DNA, 25 bp, Homo sapien
gaacttggcaagaacggacggcagg

SEQ ID NO: 5711410 - DNA, 25 bp, Homo sapien
gagcagtcaataggaagctcaccca

SEQ ID NO: 5711411 - DNA, 25 bp, Homo sapien
ggcttctgtggactgtggtgaggac

SEQ ID NO: 5711412 - DNA, 25 bp, Homo sapien
tagtggatcttgtggggcaggcaga

SEQ ID NO: 5711413 - DNA, 25 bp, Homo sapien
gagtccccgctgggaagtagctctg

SEQ ID NO: 5711414 - DNA, 25 bp, Homo sapien
gtagacgttgttctcacacagcggg

SEQ ID NO: 5711415 - DNA, 25 bp, Homo sapien
ggagacgcgagcgcccacctgcgca

SEQ ID NO: 5711416 - DNA, 25 bp, Homo sapien
ttccgccctccgcctgggctcaggg

SEQ ID NO: 5711417 - DNA, 25 bp, Homo sapien
cctcgctgggtgaggccatcaggca

SEQ ID NO: 5711418 - DNA, 25 bp, Homo sapien
tcatcactgagcagcagcagggcat

SEQ ID NO: 5711419 - DNA, 25 bp, Homo sapien
tgatgtgaagccgaactacgcccga

SEQ ID NO: 5711420 - DNA, 25 bp, Homo sapien
cggacggggctcctcctcgctgggt

SEQ ID NO: 5711421 - DNA, 25 bp, Homo sapien
ggggacgtcgtcctctcgcggacgg

SEQ ID NO: 5711422 - DNA, 25 bp, Homo sapien
ctggaaggggtacctgaacagcagc

SEQ ID NO: 5711423 - DNA, 25 bp, Homo sapien
gcttctccagcctagcagggccagc

SEQ ID NO: 5711424 - DNA, 25 bp, Homo sapien
gacttctcatcactgagcagcagca

SEQ ID NO: 5711425 - DNA, 25 bp, Homo sapien
ggggccaggggattcctaaattctg

SEQ ID NO: 5711426 - DNA, 25 bp, Homo sapien
ggcttacttgtctgggacgccgggt

SEQ ID NO: 5711427 - DNA, 25 bp, Homo sapien
ggcgatacgacgggacaggttatgc

SEQ ID NO: 5711428 - DNA, 25 bp, Homo sapien
ctctggaaggggtacctgaacagca

SEQ ID NO: 5711429 - DNA, 25 bp, Homo sapien
ccagccagctgttgatgtgaagccg

SEQ ID NO: 5711430 - DNA, 25 bp, Homo sapien
cccccgagggtggggtcctgcacag

SEQ ID NO: 5711431 - DNA, 25 bp, Homo sapien
gaggacggagccggaggcggagggg

SEQ ID NO: 5711432 - DNA, 25 bp, Homo sapien
tcaccagaatcacgctgatggggct

SEQ ID NO: 5711433 - DNA, 25 bp, Homo sapien
aggtgtgcagctggatgagaagccg

SEQ ID NO: 5711434 - DNA, 25 bp, Homo sapien
gtgggagaactgctcggccagcggg

SEQ ID NO: 5711435 - DNA, 25 bp, Homo sapien
gtcctgctcatcagcatggtcgccc

SEQ ID NO: 5711436 - DNA, 25 bp, Homo sapien
cgggtacactgaggatggctgcgcg

SEQ ID NO: 5711437 - DNA, 25 bp, Homo sapien
gctccgacaggctggccagcaggtt

SEQ ID NO: 5711438 - DNA, 25 bp, Homo sapien
actggagggaagcgtaggaacacag

SEQ ID NO: 5711439 - DNA, 25 bp, Homo sapien
catcgctgctggttggggagccaaa

SEQ ID NO: 5711440 - DNA, 25 bp, Homo sapien
ggaatggggactgaggaccttcatt

SEQ ID NO: 5711441 - DNA, 25 bp, Homo sapien
gtagggacagaaggagggtctgaga

SEQ ID NO: 5711442 - DNA, 25 bp, Homo sapien
cagcacgctgcggaacttgtcaaac

SEQ ID NO: 5711443 - DNA, 25 bp, Homo sapien
gccgcgtgttctcgttgtacataat

SEQ ID NO: 5711444 - DNA, 25 bp, Homo sapien
cggcaggtcatgagatgggaactgg

SEQ ID NO: 5711445 - DNA, 25 bp, Homo sapien
ggacaggccacacaagtgtttctgc

SEQ ID NO: 5711446 - DNA, 25 bp, Homo sapien
tccaaggagcaggtgtagggacaga

SEQ ID NO: 5711447 - DNA, 25 bp, Homo sapien
gccccagtacaccagatgagctgca

SEQ ID NO: 5711448 - DNA, 25 bp, Homo sapien
gccagcaggttctccgtcatcctct

SEQ ID NO: 5711449 - DNA, 25 bp, Homo sapien
ccaggggattcctaaattctgacaa

SEQ ID NO: 5711450 - DNA, 25 bp, Homo sapien
ggtacctgaacagcagcttattgcc

SEQ ID NO: 5711451 - DNA, 25 bp, Homo sapien
agtcaataggaagctcacccagcaa

SEQ ID NO: 5711452 - DNA, 25 bp, Homo sapien
ctacgcggcttacttgtctgggacg

SEQ ID NO: 5711453 - DNA, 25 bp, Homo sapien
gcctctggggggatcagactggagg

SEQ ID NO: 5711454 - DNA, 25 bp, Homo sapien
ggcccggtgtggatgctggggagaa

SEQ ID NO: 5711455 - DNA, 25 bp, Homo sapien
cacattcttcagggtggccacagac

SEQ ID NO: 5711456 - DNA, 25 bp, Homo sapien
cactgagcagcagcagggcatggta

SEQ ID NO: 5711457 - DNA, 25 bp, Homo sapien
tgggcgtgctgaggctgcgaccgcc

SEQ ID NO: 5711458 - DNA, 25 bp, Homo sapien
acctgcagcaaggccaggtccgcat

SEQ ID NO: 5711459 - DNA, 25 bp, Homo sapien
cgctgcagcatccacaccaccatct

SEQ ID NO: 5711460 - DNA, 25 bp, Homo sapien
gaccaggtcacagcttggctatgag

SEQ ID NO: 5711461 - DNA, 25 bp, Homo sapien
ggtcaggaccaggtcacagcttggc

SEQ ID NO: 5711462 - DNA, 25 bp, Homo sapien
gccgggggcggagggggccagagga

SEQ ID NO: 5711463 - DNA, 25 bp, Homo sapien
tcagggttctgggctgcgggtacac

SEQ ID NO: 5711464 - DNA, 25 bp, Homo sapien
ttctccagcctagcagggccagccc

SEQ ID NO: 5711465 - DNA, 25 bp, Homo sapien
gctcagggtagcctgggaggaagaa

SEQ ID NO: 5711466 - DNA, 25 bp, Homo sapien
aaggagggtctgagaaacgcacagc

SEQ ID NO: 5711467 - DNA, 25 bp, Homo sapien
cctcagggttctgggctgcgggtac

SEQ ID NO: 5711468 - DNA, 25 bp, Homo sapien
tgagaaacgcacagcccacatgggc

SEQ ID NO: 5711469 - DNA, 25 bp, Homo sapien
ctgcaagctggaaaacctgcagcaa

SEQ ID NO: 5711470 - DNA, 25 bp, Homo sapien
agcccacatgggccttgaaggatgc

SEQ ID NO: 5711471 - DNA, 25 bp, Homo sapien
ggctatgagcctgtttgtggcttct

SEQ ID NO: 5711472 - DNA, 25 bp, Homo sapien
cctggcaaacatgcggaggtcctca

SEQ ID NO: 5711473 - DNA, 25 bp, Homo sapien
gctggagttgtccatgctggggctg

SEQ ID NO: 5711474 - DNA, 25 bp, Homo sapien
tatgcagacagtttatcactgacgg

SEQ ID NO: 5711475 - DNA, 25 bp, Homo sapien
gccctggggtggggagacgcgagcg

SEQ ID NO: 5711476 - DNA, 25 bp, Homo sapien
catacgctggcattgggagacagca

SEQ ID NO: 5711477 - DNA, 25 bp, Homo sapien
gaagccgaactacgcccgacgtgca

SEQ ID NO: 5711478 - DNA, 25 bp, Homo sapien
ccgcatcccgccgtggggccggggc

SEQ ID NO: 5711479 - DNA, 25 bp, Homo sapien
gctgctgcaggttcttcacagcaga

SEQ ID NO: 5711480 - DNA, 25 bp, Homo sapien
gcagcacggtggcgatacgacggga

SEQ ID NO: 5711481 - DNA, 25 bp, Homo sapien
cgggtgaggtactggcagcggcgct

SEQ ID NO: 5711482 - DNA, 25 bp, Homo sapien
catctggatgagctgggtctcctgc

SEQ ID NO: 5711483 - DNA, 25 bp, Homo sapien
cagcttggctatgagcctgtttgtg

SEQ ID NO: 5711484 - DNA, 25 bp, Homo sapien
cgctggcattgggagacagcatgta

SEQ ID NO: 5711485 - DNA, 25 bp, Homo sapien
gatcagcttggcctcccgggtgagg

SEQ ID NO: 5711486 - DNA, 25 bp, Homo sapien
ccacccaatgccaggcctcagggcc

SEQ ID NO: 5711487 - DNA, 25 bp, Homo sapien
tggcagcgtatctgctacgcggctt

SEQ ID NO: 5711488 - DNA, 25 bp, Homo sapien
tggcaggcccccctccagcgtggag

SEQ ID NO: 5711489 - DNA, 25 bp, Homo sapien
gggagggggccacagggcacttcac

SEQ ID NO: 5711490 - DNA, 25 bp, Homo sapien
aacacagagggcagcagccccacag

SEQ ID NO: 5711491 - DNA, 25 bp, Homo sapien
tggttcagtggcgagtccccgctgg

SEQ ID NO: 5711492 - DNA, 25 bp, Homo sapien
tacgtagcgccaggcccggtgtgga

SEQ ID NO: 5711493 - DNA, 25 bp, Homo sapien
ccaccaggggcaaggacagcggggc

SEQ ID NO: 5711494 - DNA, 25 bp, Homo sapien
cagagctcctctaggtgatcaaccc

SEQ ID NO: 5711495 - DNA, 25 bp, Homo sapien
cacgctgatggggctggtgttgtcc

SEQ ID NO: 5711496 - DNA, 25 bp, Homo sapien
gaatcacgctgatggggctggtgtt

SEQ ID NO: 5711497 - DNA, 25 bp, Homo sapien
cctaaattctgacaaggagaccggc

SEQ ID NO: 5711498 - DNA, 25 bp, Homo sapien
gtcgtcctctcgcggacggggctcc

SEQ ID NO: 5711499 - DNA, 25 bp, Homo sapien
gagatgcctacgcgtgcggcaagga

SEQ ID NO: 5711500 - DNA, 25 bp, Homo sapien
gggtagatgatgatggccttgcccc

SEQ ID NO: 5711501 - DNA, 25 bp, Homo sapien
ctcaggggagcagagcctggaagac

SEQ ID NO: 5711502 - DNA, 25 bp, Homo sapien
caaggagcaggtgtagggacagaag

SEQ ID NO: 5711503 - DNA, 25 bp, Homo sapien
cttacttgtctgggacgccgggtgc

SEQ ID NO: 5711504 - DNA, 25 bp, Homo sapien
aatggaaggctgtcagagagacagg

SEQ ID NO: 5711505 - DNA, 25 bp, Homo sapien
tcgatggcctctggggggatcagac

SEQ ID NO: 5711506 - DNA, 25 bp, Homo sapien
ctgcaggcttcactgggccacggcc

SEQ ID NO: 5711507 - DNA, 25 bp, Homo sapien
ttgtggcttctgtggactgtggtga

SEQ ID NO: 5711508 - DNA, 25 bp, Homo sapien
gtcgcccgtgttgctggcagcgtat

SEQ ID NO: 5711509 - DNA, 25 bp, Homo sapien
tggcagcggcgctcctcgtgctgca

SEQ ID NO: 5711510 - DNA, 25 bp, Homo sapien
aggtgctggggagggggccacaggg

SEQ ID NO: 5711511 - DNA, 25 bp, Homo sapien
tggaaggctgtcagagagacaggga

SEQ ID NO: 5711512 - DNA, 25 bp, Homo sapien
gcagtcaataggaagctcacccagc

SEQ ID NO: 5711513 - DNA, 25 bp, Homo sapien
tgtccatgctggggctggtgagggt

SEQ ID NO: 5711514 - DNA, 25 bp, Homo sapien
ggaagaagcgcatggcagacagagg

SEQ ID NO: 5711515 - DNA, 25 bp, Homo sapien
caaatggaaggctgtcagagagaca

SEQ ID NO: 5711516 - DNA, 25 bp, Homo sapien
aggctgtcagagagacagggacagg

SEQ ID NO: 5711517 - DNA, 25 bp, Homo sapien
ggacacgagagctgggggcctgagt

SEQ ID NO: 5711518 - DNA, 25 bp, Homo sapien
ccttccgccctccgcctgggctcag

SEQ ID NO: 5711519 - DNA, 25 bp, Homo sapien
agctgcaagctggaaaacctgcagc

SEQ ID NO: 5711520 - DNA, 25 bp, Homo sapien
gcaggcagaagctcacctccagcca

SEQ ID NO: 5711521 - DNA, 25 bp, Homo sapien
catggcagacagaggtgctggggag

SEQ ID NO: 5711522 - DNA, 25 bp, Homo sapien
ttatcactgacgggtctgcgttggc

SEQ ID NO: 5711523 - DNA, 25 bp, Homo sapien
acgccgggtgctcctggcttctctg

SEQ ID NO: 5711524 - DNA, 25 bp, Homo sapien
gggggccacagggcacttcacaaat

SEQ ID NO: 5711525 - DNA, 25 bp, Homo sapien
tcatcctctggttcagtggcgagtc

SEQ ID NO: 5711526 - DNA, 25 bp, Homo sapien
gctcttcctccaggacacgagagct

SEQ ID NO: 5711527 - DNA, 25 bp, Homo sapien
gtccccgctgggaagtagctctgcg

SEQ ID NO: 5711528 - DNA, 25 bp, Homo sapien
ccatcagccatggcggacacctcat

SEQ ID NO: 5711529 - DNA, 25 bp, Homo sapien
gagacagcatgtagacgttgttctc

SEQ ID NO: 5711530 - DNA, 25 bp, Homo sapien
agggttctgggctgcgggtacactg

SEQ ID NO: 5711531 - DNA, 25 bp, Homo sapien
ctcctggcttctctggaaggggtac

SEQ ID NO: 5711532 - DNA, 25 bp, Homo sapien
acgctgcggaacttgtcaaacagca

SEQ ID NO: 5711533 - DNA, 25 bp, Homo sapien
ccaaagctgagggcgttgggcgtgc

SEQ ID NO: 5711534 - DNA, 25 bp, Homo sapien
ggagggtctgagaaacgcacagccc

SEQ ID NO: 5711535 - DNA, 25 bp, Homo sapien
cagcagccttccgccctccgcctgg

SEQ ID NO: 5711536 - DNA, 25 bp, Homo sapien
ttccatcagccatggcggacacctc

SEQ ID NO: 5711537 - DNA, 25 bp, Homo sapien
acgtgcacaggctgtcataagcttc

SEQ ID NO: 5711538 - DNA, 25 bp, Homo sapien
aggtgtagggacagaaggagggtct

SEQ ID NO: 5711539 - DNA, 25 bp, Homo sapien
cacggccagcccgcatccacccaat

SEQ ID NO: 5711540 - DNA, 25 bp, Homo sapien
gggccacagggcacttcacaaatgg

SEQ ID NO: 5711541 - DNA, 25 bp, Homo sapien
gttatgcagacagtttatcactgac

SEQ ID NO: 5711542 - DNA, 25 bp, Homo sapien
ctctgcgctggagttgtccatgctg

SEQ ID NO: 5711543 - DNA, 25 bp, Homo sapien
cacccagagacaggagtcctggcag

SEQ ID NO: 5711544 - DNA, 25 bp, Homo sapien
tgtggggcaggcagaagctcacctc

SEQ ID NO: 5711545 - DNA, 25 bp, Homo sapien
aggctggccagcaggttctccgtca

SEQ ID NO: 5711546 - DNA, 25 bp, Homo sapien
tacctgaacagcagcttattgcccc

SEQ ID NO: 5711547 - DNA, 25 bp, Homo sapien
gctgctggttggggagccaaagctg

SEQ ID NO: 5711548 - DNA, 25 bp, Homo sapien
gatggcctctggggggatcagactg

SEQ ID NO: 5711549 - DNA, 25 bp, Homo sapien
gcccgcatccacccaatgccaggcc

SEQ ID NO: 5711550 - DNA, 25 bp, Homo sapien
agacgttgttctcacacagcgggta

SEQ ID NO: 5711551 - DNA, 25 bp, Homo sapien
aactgtgccttagccagagctcctc

SEQ ID NO: 5711552 - DNA, 25 bp, Homo sapien
gtacaccagatgagctgcaagctgg

SEQ ID NO: 5711553 - DNA, 25 bp, Homo sapien
gctcctcgtgctgcagcacggtggc

SEQ ID NO: 5711554 - DNA, 25 bp, Homo sapien
ctctcgcggacggggctcctcctcg

SEQ ID NO: 5711555 - DNA, 25 bp, Homo sapien
ccgagctcaccagaatcacgctgat

SEQ ID NO: 5711556 - DNA, 25 bp, Homo sapien
ttgctggcagcgtatctgctacgcg

SEQ ID NO: 5711557 - DNA, 25 bp, Homo sapien
gttcagtggcgagtccccgctggga

SEQ ID NO: 5711558 - DNA, 25 bp, Homo sapien
gcatcccgccgtggggccggggccg

SEQ ID NO: 5711559 - DNA, 25 bp, Homo sapien
tggtgggagaactgctcggccagcg

SEQ ID NO: 5711560 - DNA, 25 bp, Homo sapien
gcatgtagacgttgttctcacacag

SEQ ID NO: 5711561 - DNA, 25 bp, Homo sapien
ctcagcctcagcacggggggagccc

SEQ ID NO: 5711562 - DNA, 25 bp, Homo sapien
cctgggctcaggggagcagagcctg

SEQ ID NO: 5711563 - DNA, 25 bp, Homo sapien
gagcctggaagacggcaatgacagg

SEQ ID NO: 5711564 - DNA, 25 bp, Homo sapien
tcagggtagcctgggaggaagaagc

SEQ ID NO: 5711565 - DNA, 25 bp, Homo sapien
gcacaggtgacagggcttctccagc

SEQ ID NO: 5711566 - DNA, 25 bp, Homo sapien
tggggcaggcagaagctcacctcca

SEQ ID NO: 5711567 - DNA, 25 bp, Homo sapien
gagttgtccatgctggggctggtga

SEQ ID NO: 5711568 - DNA, 25 bp, Homo sapien
tggtcaccaccagcacgctgcggaa

SEQ ID NO: 5711569 - DNA, 25 bp, Homo sapien
taggaagctcacccagcaaggactt

SEQ ID NO: 5711570 - DNA, 25 bp, Homo sapien
ctctggggggatcagactggaggcc

SEQ ID NO: 5711571 - DNA, 25 bp, Homo sapien
aagctcacccagcaaggacttctca

SEQ ID NO: 5711572 - DNA, 25 bp, Homo sapien
tccctggccagcttgcacttgggca

SEQ ID NO: 5711573 - DNA, 25 bp, Homo sapien
gcacgctgcggaacttgtcaaacag

SEQ ID NO: 5711574 - DNA, 25 bp, Homo sapien
agtacagacatacgctggcattggg

SEQ ID NO: 5711575 - DNA, 25 bp, Homo sapien
ggctgcgcgttcatgctccgacagg

SEQ ID NO: 5711576 - DNA, 25 bp, Homo sapien
tggaatcgccgtcctgctcatcagc

SEQ ID NO: 5711577 - DNA, 25 bp, Homo sapien
ccccgctgggaagtagctctgcgct

SEQ ID NO: 5711578 - DNA, 25 bp, Homo sapien
gaagcgtaggaacacagagggcagc

SEQ ID NO: 5711579 - DNA, 25 bp, Homo sapien
aggacagcggggctctgcaggcttc

SEQ ID NO: 5711580 - DNA, 25 bp, Homo sapien
cgtaggaacacagagggcagcagcc

SEQ ID NO: 5711581 - DNA, 25 bp, Homo sapien
gcagctggatgagaagccggcgctg

SEQ ID NO: 5711582 - DNA, 25 bp, Homo sapien
tgctgcaggttcttcacagcagatg

SEQ ID NO: 5711583 - DNA, 25 bp, Homo sapien
ctggttggggagccaaagctgaggg

SEQ ID NO: 5711584 - DNA, 25 bp, Homo sapien
atttccatcagccatggcggacacc

SEQ ID NO: 5711585 - DNA, 25 bp, Homo sapien
acatgcggaggtcctcagggttctg

SEQ ID NO: 5711586 - DNA, 25 bp, Homo sapien
gcatgagcagctgggagcgccgcgt

SEQ ID NO: 5711587 - DNA, 25 bp, Homo sapien
gagcagctgggagcgccgcgtgttc

SEQ ID NO: 5711588 - DNA, 25 bp, Homo sapien
cgggtgctcctggcttctctggaag

SEQ ID NO: 5711589 - DNA, 25 bp, Homo sapien
catcctggagcgccaggatcagctt

SEQ ID NO: 5711590 - DNA, 25 bp, Homo sapien
gaggaagaagcgcatggcagacaga

SEQ ID NO: 5711591 - DNA, 25 bp, Homo sapien
tcttgggctagctgctgcaggttct

SEQ ID NO: 5711592 - DNA, 25 bp, Homo sapien
tgtctggagctagctcttcctccag

SEQ ID NO: 5711593 - DNA, 25 bp, Homo sapien
ccgctgggaagtagctctgcgctgg

SEQ ID NO: 5711594 - DNA, 25 bp, Homo sapien
aggttatgcagacagtttatcactg

SEQ ID NO: 5711595 - DNA, 25 bp, Homo sapien
gggggcggagggggccagaggagga

SEQ ID NO: 5711596 - DNA, 25 bp, Homo sapien
gcaggatgtgatggaatggggactg

SEQ ID NO: 5711597 - DNA, 25 bp, Homo sapien
tgagatgggaactggtgggagaact

SEQ ID NO: 5711598 - DNA, 25 bp, Homo sapien
gccacacaagtgtttctgcacattc

SEQ ID NO: 5711599 - DNA, 25 bp, Homo sapien
tccgacaggctggccagcaggttct

SEQ ID NO: 5711600 - DNA, 25 bp, Homo sapien
ggtgaggccatcaggcagacatagg

SEQ ID NO: 5711601 - DNA, 25 bp, Homo sapien
cagccccacagcggaaccaccaggg

SEQ ID NO: 5711602 - DNA, 25 bp, Homo sapien
agtgaaggggacgtcgtcctctcgc

SEQ ID NO: 5711603 - DNA, 25 bp, Homo sapien
acacctcatcctggagcgccaggat

SEQ ID NO: 5711604 - DNA, 25 bp, Homo sapien
gccgacccgggcagtgaaggggacg

SEQ ID NO: 5711605 - DNA, 25 bp, Homo sapien
acttgggcaggatgtgatggaatgg

SEQ ID NO: 5711606 - DNA, 25 bp, Homo sapien
gcagcggcgctcctcgtgctgcagc

SEQ ID NO: 5711607 - DNA, 25 bp, Homo sapien
cccaggccctcgtgccccagatggt

SEQ ID NO: 5711608 - DNA, 25 bp, Homo sapien
cggcgctcctcgtgctgcagcacgg

SEQ ID NO: 5711609 - DNA, 25 bp, Homo sapien
aggtgacagggcttctccagcctag

SEQ ID NO: 5711610 - DNA, 25 bp, Homo sapien
tggagggaagcgtaggaacacagag

SEQ ID NO: 5711611 - DNA, 25 bp, Homo sapien
tcataagcttccttgaggtccctgg

SEQ ID NO: 5711612 - DNA, 25 bp, Homo sapien
gatcaacccatgtctggagctagct

SEQ ID NO: 5711613 - DNA, 25 bp, Homo sapien
ctgaggaccttcatttccatcagcc

SEQ ID NO: 5711614 - DNA, 25 bp, Homo sapien
agggcatggtaggggcggatggctt

SEQ ID NO: 5711615 - DNA, 25 bp, Homo sapien
cagcatgtagacgttgttctcacac

SEQ ID NO: 5711616 - DNA, 25 bp, Homo sapien
ggcattgggagacagcatgtagacg

SEQ ID NO: 5711617 - DNA, 25 bp, Homo sapien
gagctcaccagaatcacgctgatgg

SEQ ID NO: 5711618 - DNA, 25 bp, Homo sapien
cagcagggcatggtaggggcggatg

SEQ ID NO: 5711619 - DNA, 25 bp, Homo sapien
atgtgcacaggtgacagggcttctc

SEQ ID NO: 5711620 - DNA, 25 bp, Homo sapien
agacagaggtgctggggagggggcc

SEQ ID NO: 5711621 - DNA, 25 bp, Homo sapien
tctccgtcatcctctggttcagtgg

SEQ ID NO: 5711622 - DNA, 25 bp, Homo sapien
agcatccacaccaccatctggatga

SEQ ID NO: 5711623 - DNA, 25 bp, Homo sapien
gcagggcatggtaggggcggatggc

SEQ ID NO: 5711624 - DNA, 25 bp, Homo sapien
gacaggagtcctggcaggcccccct

SEQ ID NO: 5711625 - DNA, 25 bp, Homo sapien
cgtgttctcgttgtacataatctcc

SEQ ID NO: 5711626 - DNA, 25 bp, Homo sapien
cgcatggcagacagaggtgctgggg

SEQ ID NO: 5711627 - DNA, 25 bp, Homo sapien
gaactacgcccgacgtgcacaggct

SEQ ID NO: 5711628 - DNA, 25 bp, Homo sapien
gacggagccggaggcggagggggcc

SEQ ID NO: 5711629 - DNA, 25 bp, Homo sapien
ggaaccaccaggggcaaggacagcg

SEQ ID NO: 5711630 - DNA, 25 bp, Homo sapien
gtgcacaggtgacagggcttctcca

SEQ ID NO: 5711631 - DNA, 25 bp, Homo sapien
cgtgcggcaaggactggagggaagc

SEQ ID NO: 5711632 - DNA, 25 bp, Homo sapien
acttggcaagaacggacggcaggtc

SEQ ID NO: 5711633 - DNA, 25 bp, Homo sapien
cctggccagcttgcacttgggcagg

SEQ ID NO: 5711634 - DNA, 25 bp, Homo sapien
tggggctggtgttgtcccgcatccc

SEQ ID NO: 5711635 - DNA, 25 bp, Homo sapien
cacagcttggctatgagcctgtttg

SEQ ID NO: 5711636 - DNA, 25 bp, Homo sapien
gaatcgccgtcctgctcatcagcat

SEQ ID NO: 5711637 - DNA, 25 bp, Homo sapien
aggatcagcttggcctcccgggtga

SEQ ID NO: 5711638 - DNA, 25 bp, Homo sapien
ctgtggtgaggactgggccaggaaa

SEQ ID NO: 5711639 - DNA, 25 bp, Homo sapien
tggagatgcctacgcgtgcggcaag

SEQ ID NO: 5711640 - DNA, 25 bp, Homo sapien
aacagcatgagcagctgggagcgcc

SEQ ID NO: 5711641 - DNA, 25 bp, Homo sapien
gccagagctcctctaggtgatcaac

SEQ ID NO: 5711642 - DNA, 25 bp, Homo sapien
tgtcagagagacagggacaggccac

SEQ ID NO: 5711643 - DNA, 25 bp, Homo sapien
ataagcttccttgaggtccctggcc

SEQ ID NO: 5711644 - DNA, 25 bp, Homo sapien
atcagactggaggccgcatagtgga

SEQ ID NO: 5711645 - DNA, 25 bp, Homo sapien
gcggggagtacagacatacgctggc

SEQ ID NO: 5711646 - DNA, 25 bp, Homo sapien
cctccaccagcaagatgtgcacagg

SEQ ID NO: 5711647 - DNA, 25 bp, Homo sapien
ttttatttctagaaaactgtgcctt

SEQ ID NO: 5711648 - DNA, 25 bp, Homo sapien
catcaggcagacataggtgtgcagc

SEQ ID NO: 5711649 - DNA, 25 bp, Homo sapien
tgtggactgtggtgaggactgggcc

SEQ ID NO: 5711650 - DNA, 25 bp, Homo sapien
ggggcaaggacagcggggctctgca

SEQ ID NO: 5711651 - DNA, 25 bp, Homo sapien
ctgggagcgccgcgtgttctcgttg

SEQ ID NO: 5711652 - DNA, 25 bp, Homo sapien
gcctcagcacggggggagccctggg

SEQ ID NO: 5711653 - DNA, 25 bp, Homo sapien
aggagaccggcaaggagaacttggc

SEQ ID NO: 5711654 - DNA, 25 bp, Homo sapien
gccatcaggcagacataggtgtgca

SEQ ID NO: 5711655 - DNA, 25 bp, Homo sapien
cagcgggtagatgatgatggccttg

SEQ ID NO: 5711656 - DNA, 25 bp, Homo sapien
atcactgagcagcagcagggcatgg

SEQ ID NO: 5711657 - DNA, 25 bp, Homo sapien
gccaggtccgcatcttgggctagct

SEQ ID NO: 5711658 - DNA, 25 bp, Homo sapien
atggtcaggaccaggtcacagcttg

SEQ ID NO: 5711659 - DNA, 25 bp, Homo sapien
agtgaaggagcctggcaaacatgcg

SEQ ID NO: 5711660 - DNA, 25 bp, Homo sapien
gctggccagcaggttctccgtcatc

SEQ ID NO: 5711661 - DNA, 25 bp, Homo sapien
catggtcgcccgtgttgctggcagc

SEQ ID NO: 5711662 - DNA, 25 bp, Homo sapien
ggaacacagagggcagcagccccac

SEQ ID NO: 5711663 - DNA, 25 bp, Homo sapien
ctggatgagaagccggcgctgcagc

SEQ ID NO: 5711664 - DNA, 25 bp, Homo sapien
cagcccgcatccacccaatgccagg

SEQ ID NO: 5711665 - DNA, 25 bp, Homo sapien
gtggtgaggactgggccaggaaagg

SEQ ID NO: 5711666 - DNA, 25 bp, Homo sapien
cacaaatggaaggctgtcagagaga

SEQ ID NO: 5711667 - DNA, 25 bp, Homo sapien
tgcacattcttcagggtggccacag

SEQ ID NO: 5711668 - DNA, 25 bp, Homo sapien
tctggagctagctcttcctccagga

SEQ ID NO: 5711669 - DNA, 25 bp, Homo sapien
ccaggatcagcttggcctcccgggt

SEQ ID NO: 5711670 - DNA, 25 bp, Homo sapien
tgctcggccagcggggagtacagac

SEQ ID NO: 5711671 - DNA, 25 bp, Homo sapien
ggtgaggtactggcagcggcgctcc

SEQ ID NO: 5711672 - DNA, 25 bp, Homo sapien
ggtctgagaaacgcacagcccacat

SEQ ID NO: 5711673 - DNA, 25 bp, Homo sapien
ggctcaggggagcagagcctggaag

SEQ ID NO: 5711674 - DNA, 25 bp, Homo sapien
aggatgcggcctcacccagagacag

SEQ ID NO: 5711675 - DNA, 25 bp, Homo sapien
acaggctggccagcaggttctccgt

SEQ ID NO: 5711676 - DNA, 25 bp, Homo sapien
tcgctgctggttggggagccaaagc

SEQ ID NO: 5711677 - DNA, 25 bp, Homo sapien
tgcgttggcctggaatcgccgtcct

SEQ ID NO: 5711678 - DNA, 25 bp, Homo sapien
gcggaggtcctcagggttctgggct

SEQ ID NO: 5711679 - DNA, 25 bp, Homo sapien
gtgtagggacagaaggagggtctga

SEQ ID NO: 5711680 - DNA, 25 bp, Homo sapien
cctgagtacgtagcgccaggcccgg

SEQ ID NO: 5711681 - DNA, 25 bp, Homo sapien
agccttccgccctccgcctgggctc

SEQ ID NO: 5711682 - DNA, 25 bp, Homo sapien
gcaaacatgcggaggtcctcagggt

SEQ ID NO: 5711683 - DNA, 25 bp, Homo sapien
cgtggagatgcctacgcgtgcggca

SEQ ID NO: 5711684 - DNA, 25 bp, Homo sapien
tgggtgaggccatcaggcagacata

SEQ ID NO: 5711685 - DNA, 25 bp, Homo sapien
ttgaaggatgcggcctcacccagag

SEQ ID NO: 5711686 - DNA, 25 bp, Homo sapien
tggcaaacatgcggaggtcctcagg

SEQ ID NO: 5711687 - DNA, 25 bp, Homo sapien
ggtagcctgggaggaagaagcgcat

SEQ ID NO: 5711688 - DNA, 25 bp, Homo sapien
agctgttgatgtgaagccgaactac

SEQ ID NO: 5711689 - DNA, 25 bp, Homo sapien
cctgcacagcgggggccaggggatt

SEQ ID NO: 5711690 - DNA, 25 bp, Homo sapien
gccagcccgcatccacccaatgcca

SEQ ID NO: 5711691 - DNA, 25 bp, Homo sapien
atcacgctgatggggctggtgttgt

SEQ ID NO: 5711692 - DNA, 25 bp, Homo sapien
gatgatggccttgccccagtacacc

SEQ ID NO: 5711693 - DNA, 25 bp, Homo sapien
ctgggtctcctgcacagcgggggcc

SEQ ID NO: 5711694 - DNA, 25 bp, Homo sapien
tcccgcatcccgccgtggggccggg

SEQ ID NO: 5711695 - DNA, 25 bp, Homo sapien
ggtggccacagactggggggtccaa

SEQ ID NO: 5711696 - DNA, 25 bp, Homo sapien
gtagtgaaggagcctggcaaacatg

SEQ ID NO: 5711697 - DNA, 25 bp, Homo sapien
tgggtggtcaccaccagcacgctgc

SEQ ID NO: 5711698 - DNA, 25 bp, Homo sapien
gagcctgtttgtggcttctgtggac

SEQ ID NO: 5711699 - DNA, 25 bp, Homo sapien
aggggagcagtcaataggaagctca

SEQ ID NO: 5711700 - DNA, 25 bp, Homo sapien
tgcacagtgggccatgcctccacca

SEQ ID NO: 5711701 - DNA, 25 bp, Homo sapien
cagcacggggggagccctggggtgg

SEQ ID NO: 5711702 - DNA, 25 bp, Homo sapien
ctctgcaggcttcactgggccacgg

SEQ ID NO: 5711703 - DNA, 25 bp, Homo sapien
tcttgatcacccgcactagggcagg

SEQ ID NO: 5711704 - DNA, 25 bp, Homo sapien
gactgggccaggaaaggctcagggt

SEQ ID NO: 5711705 - DNA, 25 bp, Homo sapien
cagggccaagagggctcagcctcag

SEQ ID NO: 5711706 - DNA, 25 bp, Homo sapien
atcttgtggggcaggcagaagctca

SEQ ID NO: 5711707 - DNA, 25 bp, Homo sapien
gtggatgctggggagaatcatcagt

SEQ ID NO: 5711708 - DNA, 25 bp, Homo sapien
cacagggcacttcacaaatggaagg

SEQ ID NO: 5711709 - DNA, 25 bp, Homo sapien
tgttttatttctagaaaactgtgcc

SEQ ID NO: 5711710 - DNA, 25 bp, Homo sapien
tggcctcccgggtgaggtactggca

SEQ ID NO: 5711711 - DNA, 25 bp, Homo sapien
cattgggagacagcatgtagacgtt

SEQ ID NO: 5711712 - DNA, 25 bp, Homo sapien
agcttggcctcccgggtgaggtact

SEQ ID NO: 5711713 - DNA, 25 bp, Homo sapien
gacggggctcctcctcgctgggtga

SEQ ID NO: 5711714 - DNA, 25 bp, Homo sapien
cagacagtttatcactgacgggtct

SEQ ID NO: 5711715 - DNA, 25 bp, Homo sapien
agtgtttctgcacattcttcagggt

SEQ ID NO: 5711716 - DNA, 25 bp, Homo sapien
cagatgagctgcaagctggaaaacc

SEQ ID NO: 5711717 - DNA, 25 bp, Homo sapien
tccgcatcttgggctagctgctgca

SEQ ID NO: 5711718 - DNA, 25 bp, Homo sapien
tgctgaggctgcgaccgccgacccg

SEQ ID NO: 5711719 - DNA, 25 bp, Homo sapien
tagcctgggaggaagaagcgcatgg

SEQ ID NO: 5711720 - DNA, 25 bp, Homo sapien
gtagatgatgatggccttgccccag

SEQ ID NO: 5711721 - DNA, 25 bp, Homo sapien
ctgcgctggagttgtccatgctggg

SEQ ID NO: 5711722 - DNA, 25 bp, Homo sapien
ccgtcctgctcatcagcatggtcgc

SEQ ID NO: 5711723 - DNA, 25 bp, Homo sapien
gggcaggggagcagtcaataggaag

SEQ ID NO: 5711724 - DNA, 25 bp, Homo sapien
aggggattcctaaattctgacaagg

SEQ ID NO: 5711725 - DNA, 25 bp, Homo sapien
ttctgacaaggagaccggcaaggag

SEQ ID NO: 5711726 - DNA, 25 bp, Homo sapien
cagcagatgtggtcttgatcacccg

SEQ ID NO: 5711727 - DNA, 25 bp, Homo sapien
agggtggccacagactggggggtcc

SEQ ID NO: 5711728 - DNA, 25 bp, Homo sapien
ggtctgcgttggcctggaatcgccg

SEQ ID NO: 5711729 - DNA, 25 bp, Homo sapien
caaggacttctcatcactgagcagc

SEQ ID NO: 5711730 - DNA, 25 bp, Homo sapien
ctggtgagggtcatgtcatcgctgc

SEQ ID NO: 5711731 - DNA, 25 bp, Homo sapien
ttcaggctccgttcgatggcctctg

SEQ ID NO: 5711732 - DNA, 25 bp, Homo sapien
caagaacggacggcaggtcatgaga

SEQ ID NO: 5711733 - DNA, 25 bp, Homo sapien
ttgtcaaacagcatgagcagctggg

SEQ ID NO: 5711734 - DNA, 25 bp, Homo sapien
gagggaagcgtaggaacacagaggg

SEQ ID NO: 5711735 - DNA, 25 bp, Homo sapien
tgggagccgaaagcccccgagggtg

SEQ ID NO: 5711736 - DNA, 25 bp, Homo sapien
gcatccacccaatgccaggcctcag

SEQ ID NO: 5711737 - DNA, 25 bp, Homo sapien
gggattcctaaattctgacaaggag

SEQ ID NO: 5711738 - DNA, 25 bp, Homo sapien
acgacgggacaggttatgcagacag

SEQ ID NO: 5711739 - DNA, 25 bp, Homo sapien
cccgacgtgcacaggctgtcataag

SEQ ID NO: 5711740 - DNA, 25 bp, Homo sapien
ttccttgaggtccctggccagcttg

SEQ ID NO: 5711741 - DNA, 25 bp, Homo sapien
ctgcagcaaggccaggtccgcatct

SEQ ID NO: 5711742 - DNA, 25 bp, Homo sapien
cgggacaggttatgcagacagttta

SEQ ID NO: 5711743 - DNA, 25 bp, Homo sapien
ggcgtgctgaggctgcgaccgccga

SEQ ID NO: 5711744 - DNA, 25 bp, Homo sapien
cctggaatcgccgtcctgctcatca

SEQ ID NO: 5711745 - DNA, 25 bp, Homo sapien
cgtgttgctggcagcgtatctgcta

SEQ ID NO: 5711746 - DNA, 25 bp, Homo sapien
gactgtggtgaggactgggccagga

SEQ ID NO: 5711747 - DNA, 25 bp, Homo sapien
ggctccgttcgatggcctctggggg

SEQ ID NO: 5711748 - DNA, 25 bp, Homo sapien
ctccagcctagcagggccagcccag

SEQ ID NO: 5711749 - DNA, 25 bp, Homo sapien
tggccagcttgcacttgggcaggat

SEQ ID NO: 5711750 - DNA, 25 bp, Homo sapien
gtggtggcggccgcggaagtagtga

SEQ ID NO: 5711751 - DNA, 25 bp, Homo sapien
catgggccttgaaggatgcggcctc

SEQ ID NO: 5711752 - DNA, 25 bp, Homo sapien
cttgtggggcaggcagaagctcacc

SEQ ID NO: 5711753 - DNA, 25 bp, Homo sapien
tgagtacgtagcgccaggcccggtg

SEQ ID NO: 5711754 - DNA, 25 bp, Homo sapien
gctgtcataagcttccttgaggtcc

SEQ ID NO: 5711755 - DNA, 25 bp, Homo sapien
aggctcagggtagcctgggaggaag

SEQ ID NO: 5711756 - DNA, 25 bp, Homo sapien
aggtcatgagatgggaactggtggg

SEQ ID NO: 5711757 - DNA, 25 bp, Homo sapien
gagacaggagtcctggcaggccccc

SEQ ID NO: 5711758 - DNA, 25 bp, Homo sapien
gcacaggctgtcataagcttccttg

SEQ ID NO: 5711759 - DNA, 25 bp, Homo sapien
gccatgcctccaccagcaagatgtg

SEQ ID NO: 5711760 - DNA, 25 bp, Homo sapien
cgcatagtggatcttgtggggcagg

SEQ ID NO: 5711761 - DNA, 25 bp, Homo sapien
agccaaagctgagggcgttgggcgt

SEQ ID NO: 5711762 - DNA, 25 bp, Homo sapien
gggcggatggctttcaggctccgtt

SEQ ID NO: 5711763 - DNA, 25 bp, Homo sapien
gggactgaggaccttcatttccatc

SEQ ID NO: 5711764 - DNA, 25 bp, Homo sapien
cccgggtgaggtactggcagcggcg

SEQ ID NO: 5711765 - DNA, 25 bp, Homo sapien
aattctgacaaggagaccggcaagg

SEQ ID NO: 5711766 - DNA, 25 bp, Homo sapien
cttggcctcccgggtgaggtactgg

SEQ ID NO: 5711767 - DNA, 25 bp, Homo sapien
gggctggtgttgtcccgcatcccgc

SEQ ID NO: 5711768 - DNA, 25 bp, Homo sapien
ttctagaaaactgtgccttagccag

SEQ ID NO: 5711769 - DNA, 25 bp, Homo sapien
gtgtgcagctggatgagaagccggc

SEQ ID NO: 5711770 - DNA, 25 bp, Homo sapien
gaacttgtcaaacagcatgagcagc

SEQ ID NO: 5711771 - DNA, 25 bp, Homo sapien
gtacataatctcctccaggtggtgg

SEQ ID NO: 5711772 - DNA, 25 bp, Homo sapien
ccctcgtgccccagatggtcaggac

SEQ ID NO: 5711773 - DNA, 25 bp, Homo sapien
gactgaggaccttcatttccatcag

SEQ ID NO: 5711774 - DNA, 25 bp, Homo sapien
aaccaccaggggcaaggacagcggg

SEQ ID NO: 5711775 - DNA, 25 bp, Homo sapien
gccacagactggggggtccaaggag

SEQ ID NO: 5711776 - DNA, 25 bp, Homo sapien
ccgcatccacccaatgccaggcctc

SEQ ID NO: 5711777 - DNA, 25 bp, Homo sapien
tacgcgtgcggcaaggactggaggg

SEQ ID NO: 5711778 - DNA, 25 bp, Homo sapien
cgggtctgcgttggcctggaatcgc

SEQ ID NO: 5711779 - DNA, 25 bp, Homo sapien
gggtctcctgcacagcgggggccag

SEQ ID NO: 5711780 - DNA, 25 bp, Homo sapien
aggggcggatggctttcaggctccg

SEQ ID NO: 5711781 - DNA, 25 bp, Homo sapien
gcacagcccacatgggccttgaagg

SEQ ID NO: 5711782 - DNA, 25 bp, Homo sapien
gaactgctcggccagcggggagtac

SEQ ID NO: 5711783 - DNA, 25 bp, Homo sapien
gctggcagcgtatctgctacgcggc

SEQ ID NO: 5711784 - DNA, 25 bp, Homo sapien
ccggcaaggagaacttggcaagaac

SEQ ID NO: 5711785 - DNA, 25 bp, Homo sapien
gcagctgggagcgccgcgtgttctc

SEQ ID NO: 5711786 - DNA, 25 bp, Homo sapien
gtgacagggcttctccagcctagca

SEQ ID NO: 5711787 - DNA, 25 bp, Homo sapien
agccagctgttgatgtgaagccgaa

SEQ ID NO: 5711788 - DNA, 25 bp, Homo sapien
accaggggcaaggacagcggggctc

SEQ ID NO: 5711789 - DNA, 25 bp, Homo sapien
gctgggggcctgagtacgtagcgcc

SEQ ID NO: 5711790 - DNA, 25 bp, Homo sapien
accttcatttccatcagccatggcg

SEQ ID NO: 5711791 - DNA, 25 bp, Homo sapien
aagtagctctgcgctggagttgtcc

SEQ ID NO: 5711792 - DNA, 25 bp, Homo sapien
gatgcggcctcacccagagacagga

SEQ ID NO: 5711793 - DNA, 25 bp, Homo sapien
gatgagctgcaagctggaaaacctg

SEQ ID NO: 5711794 - DNA, 25 bp, Homo sapien
acacgagagctgggggcctgagtac

SEQ ID NO: 5711795 - DNA, 25 bp, Homo sapien
caggacacgagagctgggggcctga

SEQ ID NO: 5711796 - DNA, 25 bp, Homo sapien
aggccatcaggcagacataggtgtg

SEQ ID NO: 5711797 - DNA, 25 bp, Homo sapien
caaggccaggtccgcatcttgggct

SEQ ID NO: 5711798 - DNA, 25 bp, Homo sapien
cctggcttctctggaaggggtacct

SEQ ID NO: 5711799 - DNA, 25 bp, Homo sapien
gcggaagtagtgaaggagcctggca

SEQ ID NO: 5711800 - DNA, 25 bp, Homo sapien
tgggggcctgagtacgtagcgccag

SEQ ID NO: 5711801 - DNA, 25 bp, Homo sapien
gcagcaaggccaggtccgcatcttg

SEQ ID NO: 5711802 - DNA, 25 bp, Homo sapien
cccgagggtggggtcctgcacagtg

SEQ ID NO: 5711803 - DNA, 25 bp, Homo sapien
gaagccggcgctgcagcatccacac

SEQ ID NO: 5711804 - DNA, 25 bp, Homo sapien
tgctacgcggcttacttgtctggga

SEQ ID NO: 5711805 - DNA, 25 bp, Homo sapien
caccaccagcacgctgcggaacttg

SEQ ID NO: 5711806 - DNA, 25 bp, Homo sapien
agcccaggccctcgtgccccagatg

SEQ ID NO: 5711807 - DNA, 25 bp, Homo sapien
caaggagaccggcaaggagaacttg

SEQ ID NO: 5711808 - DNA, 25 bp, Homo sapien
cacaccaccatctggatgagctggg

SEQ ID NO: 5711809 - DNA, 25 bp, Homo sapien
agcgtaggaacacagagggcagcag

SEQ ID NO: 5711810 - DNA, 25 bp, Homo sapien
ctcgttgtacataatctcctccagg

SEQ ID NO: 5711811 - DNA, 25 bp, Homo sapien
caggggcaaggacagcggggctctg

SEQ ID NO: 5711812 - DNA, 25 bp, Homo sapien
ggacgccgggtgctcctggcttctc

SEQ ID NO: 5711813 - DNA, 25 bp, Homo sapien
cccgtgttgctggcagcgtatctgc

SEQ ID NO: 5711814 - DNA, 25 bp, Homo sapien
agctgagggcgttgggcgtgctgag

SEQ ID NO: 5711815 - DNA, 25 bp, Homo sapien
gtcatcgctgctggttggggagcca

SEQ ID NO: 5711816 - DNA, 25 bp, Homo sapien
gagcgccgcgtgttctcgttgtaca

SEQ ID NO: 5711817 - DNA, 25 bp, Homo sapien
gcagatgtggtcttgatcacccgca

SEQ ID NO: 5711818 - DNA, 25 bp, Homo sapien
cagggcttctccagcctagcagggc

SEQ ID NO: 5711819 - DNA, 25 bp, Homo sapien
cgctgatggggctggtgttgtcccg

SEQ ID NO: 5711820 - DNA, 25 bp, Homo sapien
gtctcctgcacagcgggggccaggg

SEQ ID NO: 5711821 - DNA, 25 bp, Homo sapien
agctctgcgctggagttgtccatgc

SEQ ID NO: 5711822 - DNA, 25 bp, Homo sapien
cgcgtgttctcgttgtacataatct

SEQ ID NO: 5711823 - DNA, 25 bp, Homo sapien
gcaggtgtagggacagaaggagggt

SEQ ID NO: 5711824 - DNA, 25 bp, Homo sapien
ggggtccaaggagcaggtgtaggga

SEQ ID NO: 5711825 - DNA, 25 bp, Homo sapien
acaggttatgcagacagtttatcac

SEQ ID NO: 5711826 - DNA, 25 bp, Homo sapien
tacgctggcattgggagacagcatg

SEQ ID NO: 5711827 - DNA, 25 bp, Homo sapien
gggccaagagggctcagcctcagca

SEQ ID NO: 5711828 - DNA, 25 bp, Homo sapien
aggactgggccaggaaaggctcagg

SEQ ID NO: 5711829 - DNA, 25 bp, Homo sapien
ggggggatcagactggaggccgcat

SEQ ID NO: 5711830 - DNA, 25 bp, Homo sapien
gtggcgatacgacgggacaggttat

SEQ ID NO: 5711831 - DNA, 25 bp, Homo sapien
actgctcggccagcggggagtacag

SEQ ID NO: 5711832 - DNA, 25 bp, Homo sapien
cgcctgggctcaggggagcagagcc

SEQ ID NO: 5711833 - DNA, 25 bp, Homo sapien
cggggctcctcctcgctgggtgagg

SEQ ID NO: 5711834 - DNA, 25 bp, Homo sapien
gcagtgaaggggacgtcgtcctctc

SEQ ID NO: 5711835 - DNA, 25 bp, Homo sapien
gacagcatgtagacgttgttctcac

SEQ ID NO: 5711836 - DNA, 25 bp, Homo sapien
atgtagacgttgttctcacacagcg

SEQ ID NO: 5711837 - DNA, 25 bp, Homo sapien
ggagcgccaggatcagcttggcctc

SEQ ID NO: 5711838 - DNA, 25 bp, Homo sapien
aggcctcagggccaagagggctcag

SEQ ID NO: 5711839 - DNA, 25 bp, Homo sapien
tggactgtggtgaggactgggccag

SEQ ID NO: 5711840 - DNA, 25 bp, Homo sapien
gggccaggaaaggctcagggtagcc

SEQ ID NO: 5711841 - DNA, 25 bp, Homo sapien
agcgcatggcagacagaggtgctgg

SEQ ID NO: 5711842 - DNA, 25 bp, Homo sapien
gcctgggaggaagaagcgcatggca

SEQ ID NO: 5711843 - DNA, 25 bp, Homo sapien
tcctcgtgggtggtcaccaccagca

SEQ ID NO: 5711844 - DNA, 25 bp, Homo sapien
gagaatcatcagtgtgggagccgaa

SEQ ID NO: 5711845 - DNA, 25 bp, Homo sapien
ggatggctgcgcgttcatgctccga

SEQ ID NO: 5711846 - DNA, 25 bp, Homo sapien
cccagcagccttccgccctccgcct

SEQ ID NO: 5711847 - DNA, 25 bp, Homo sapien
tcagagagacagggacaggccacac

SEQ ID NO: 5711848 - DNA, 25 bp, Homo sapien
gctgtcagagagacagggacaggcc

SEQ ID NO: 5711849 - DNA, 25 bp, Homo sapien
cacagagggcagcagccccacagcg

SEQ ID NO: 5711850 - DNA, 25 bp, Homo sapien
cagcaggttctccgtcatcctctgg

SEQ ID NO: 5711851 - DNA, 25 bp, Homo sapien
acagcccacatgggccttgaaggat

SEQ ID NO: 5711852 - DNA, 25 bp, Homo sapien
agcagcagggcatggtaggggcgga

SEQ ID NO: 5711853 - DNA, 25 bp, Homo sapien
ctgacaaggagaccggcaaggagaa

SEQ ID NO: 5711854 - DNA, 25 bp, Homo sapien
gcggatggctttcaggctccgttcg

SEQ ID NO: 5711855 - DNA, 25 bp, Homo sapien
agaaacgcacagcccacatgggcct

SEQ ID NO: 5711856 - DNA, 25 bp, Homo sapien
acagggtcctcgtgggtggtcacca

SEQ ID NO: 5711857 - DNA, 25 bp, Homo sapien
gatggggctggtgttgtcccgcatc

SEQ ID NO: 5711858 - DNA, 25 bp, Homo sapien
acttgtcaaacagcatgagcagctg

SEQ ID NO: 5711859 - DNA, 25 bp, Homo sapien
accagcacgctgcggaacttgtcaa

SEQ ID NO: 5711860 - DNA, 25 bp, Homo sapien
aagcttccttgaggtccctggccag

SEQ ID NO: 5711861 - DNA, 25 bp, Homo sapien
ggtcttgatcacccgcactagggca

SEQ ID NO: 5711862 - DNA, 25 bp, Homo sapien
ccttgccccagtacaccagatgagc

SEQ ID NO: 5711863 - DNA, 25 bp, Homo sapien
gccagcggggagtacagacatacgc

SEQ ID NO: 5711864 - DNA, 25 bp, Homo sapien
gggctcctcctcgctgggtgaggcc

SEQ ID NO: 5711865 - DNA, 25 bp, Homo sapien
cccacagcggaaccaccaggggcaa

SEQ ID NO: 5711866 - DNA, 25 bp, Homo sapien
gcagacataggtgtgcagctggatg

SEQ ID NO: 5711867 - DNA, 25 bp, Homo sapien
ttgggcaggatgtgatggaatgggg

SEQ ID NO: 5711868 - DNA, 25 bp, Homo sapien
gcgctggagttgtccatgctggggc

SEQ ID NO: 5711869 - DNA, 25 bp, Homo sapien
tcagtggcgagtccccgctgggaag

SEQ ID NO: 5711870 - DNA, 25 bp, Homo sapien
cacagcgggggccaggggattccta

SEQ ID NO: 5711871 - DNA, 25 bp, Homo sapien
gttcgatggcctctggggggatcag

SEQ ID NO: 5711872 - DNA, 25 bp, Homo sapien
ggaaggggtacctgaacagcagctt

SEQ ID NO: 5711873 - DNA, 25 bp, Homo sapien
ctcctcgctgggtgaggccatcagg

SEQ ID NO: 5711874 - DNA, 25 bp, Homo sapien
ctcgtgccccagatggtcaggacca

SEQ ID NO: 5711875 - DNA, 25 bp, Homo sapien
atgtgaagccgaactacgcccgacg

SEQ ID NO: 5711876 - DNA, 25 bp, Homo sapien
ggcctggaatcgccgtcctgctcat

SEQ ID NO: 5711877 - DNA, 25 bp, Homo sapien
agcaagatgtgcacaggtgacaggg

SEQ ID NO: 5711878 - DNA, 25 bp, Homo sapien
tgcgggtacactgaggatggctgcg

SEQ ID NO: 5711879 - DNA, 25 bp, Homo sapien
atcgccgtcctgctcatcagcatgg

SEQ ID NO: 5711880 - DNA, 25 bp, Homo sapien
agggtcatgtcatcgctgctggttg

SEQ ID NO: 5711881 - DNA, 25 bp, Homo sapien
gcagcagcagggcatggtaggggcg

SEQ ID NO: 5711882 - DNA, 25 bp, Homo sapien
tgtttctgcacattcttcagggtgg

SEQ ID NO: 5711883 - DNA, 25 bp, Homo sapien
aggcagaagctcacctccagccagc

SEQ ID NO: 5711884 - DNA, 25 bp, Homo sapien
cagagacaggagtcctggcaggccc

SEQ ID NO: 5711885 - DNA, 25 bp, Homo sapien
aaagctgagggcgttgggcgtgctg

SEQ ID NO: 5711886 - DNA, 25 bp, Homo sapien
aggaggacggagccggaggcggagg

SEQ ID NO: 5711887 - DNA, 25 bp, Homo sapien
aaggggtacctgaacagcagcttat

SEQ ID NO: 5711888 - DNA, 25 bp, Homo sapien
gcttccttgaggtccctggccagct

SEQ ID NO: 5711889 - DNA, 25 bp, Homo sapien
tcttcacagcagatgtggtcttgat

SEQ ID NO: 5711890 - DNA, 25 bp, Homo sapien
ttcacagcagatgtggtcttgatca

SEQ ID NO: 5711891 - DNA, 25 bp, Homo sapien
gggggcctgaggaggacgaggcggg

SEQ ID NO: 5711892 - DNA, 25 bp, Homo sapien
agatgatgatggccttgccccagta

SEQ ID NO: 5711893 - DNA, 25 bp, Homo sapien
tgttctcacacagcgggtagatgat

SEQ ID NO: 5711894 - DNA, 25 bp, Homo sapien
gtaggggcggatggctttcaggctc

SEQ ID NO: 5711895 - DNA, 25 bp, Homo sapien
tagccagagctcctctaggtgatca

SEQ ID NO: 5711896 - DNA, 25 bp, Homo sapien
cctgctccccgagctcaccagaatc

SEQ ID NO: 5711897 - DNA, 25 bp, Homo sapien
atgctggggagaatcatcagtgtgg

SEQ ID NO: 5711898 - DNA, 25 bp, Homo sapien
ggggagacgcgagcgcccacctgcg

SEQ ID NO: 5711899 - DNA, 25 bp, Homo sapien
acttcacaaatggaaggctgtcaga

SEQ ID NO: 5711900 - DNA, 25 bp, Homo sapien
atgtggtcttgatcacccgcactag

SEQ ID NO: 5711901 - DNA, 25 bp, Homo sapien
aggagcaggtgtagggacagaagga

SEQ ID NO: 5711902 - DNA, 25 bp, Homo sapien
atggaatggggactgaggaccttca

SEQ ID NO: 5711903 - DNA, 25 bp, Homo sapien
gctcaccagaatcacgctgatgggg

SEQ ID NO: 5711904 - DNA, 25 bp, Homo sapien
tggagttgtccatgctggggctggt

SEQ ID NO: 5711905 - DNA, 25 bp, Homo sapien
atgggaactggtgggagaactgctc

SEQ ID NO: 5711906 - DNA, 25 bp, Homo sapien
actggtgggagaactgctcggccag

SEQ ID NO: 5711907 - DNA, 25 bp, Homo sapien
gtgcacaggctgtcataagcttcct

SEQ ID NO: 5711908 - DNA, 25 bp, Homo sapien
cgttgtacataatctcctccaggtg

SEQ ID NO: 5711909 - DNA, 25 bp, Homo sapien
ggtccctggccagcttgcacttggg

SEQ ID NO: 5711910 - DNA, 25 bp, Homo sapien
cggcctcacccagagacaggagtcc

SEQ ID NO: 5711911 - DNA, 25 bp, Homo sapien
cagcggggctctgcaggcttcactg

SEQ ID NO: 5711912 - DNA, 25 bp, Homo sapien
gacatacgctggcattgggagacag

SEQ ID NO: 5711913 - DNA, 25 bp, Homo sapien
cagagcctggaagacggcaatgaca

SEQ ID NO: 5711914 - DNA, 25 bp, Homo sapien
cggagggggcctgaggaggacgagg

SEQ ID NO: 5711915 - DNA, 25 bp, Homo sapien
gctggggagaatcatcagtgtggga

SEQ ID NO: 5711916 - DNA, 25 bp, Homo sapien
catcagcatggtcgcccgtgttgct

SEQ ID NO: 5711917 - DNA, 25 bp, Homo sapien
gagagctgggggcctgagtacgtag

SEQ ID NO: 5711918 - DNA, 25 bp, Homo sapien
gggagcagtcaataggaagctcacc

SEQ ID NO: 5711919 - DNA, 25 bp, Homo sapien
ggccagaggaggacggagccggagg

SEQ ID NO: 5711920 - DNA, 25 bp, Homo sapien
cagcggggagtacagacatacgctg

SEQ ID NO: 5711921 - DNA, 25 bp, Homo sapien
cagcctcagcacggggggagccctg

SEQ ID NO: 5711922 - DNA, 25 bp, Homo sapien
gcggagggggccagaggaggacgga

SEQ ID NO: 5711923 - DNA, 25 bp, Homo sapien
acataatctcctccaggtggtggcg

SEQ ID NO: 5711924 - DNA, 25 bp, Homo sapien
caagagggctcagcctcagcacggg

SEQ ID NO: 5711925 - DNA, 25 bp, Homo sapien
ggcaaggagaacttggcaagaacgg

SEQ ID NO: 5711926 - DNA, 25 bp, Homo sapien
ggcctgaggaggacggagccggagg

SEQ ID NO: 5711927 - DNA, 25 bp, Homo sapien
agaaggagggtctgagaaacgcaca

SEQ ID NO: 5711928 - DNA, 25 bp, Homo sapien
gcactagggcaggggagcagtcaat

SEQ ID NO: 5711929 - DNA, 25 bp, Homo sapien
gcaggtcatgagatgggaactggtg

SEQ ID NO: 5711930 - DNA, 25 bp, Homo sapien
gcggagggggcctgaggaggacgga

SEQ ID NO: 5711931 - DNA, 25 bp, Homo sapien
tctgctacgcggcttacttgtctgg

SEQ ID NO: 5711932 - DNA, 25 bp, Homo sapien
agggtctgagaaacgcacagcccac

SEQ ID NO: 5711933 - DNA, 25 bp, Homo sapien
aaaactgtgccttagccagagctcc

SEQ ID NO: 5711934 - DNA, 25 bp, Homo sapien
ggtggggtcctgcacagtgggccat

SEQ ID NO: 5711935 - DNA, 25 bp, Homo sapien
tcctggagcgccaggatcagcttgg

SEQ ID NO: 5711936 - DNA, 25 bp, Homo sapien
tggcctctggggggatcagactgga

SEQ ID NO: 5711937 - DNA, 25 bp, Homo sapien
gggagaatcatcagtgtgggagccg

SEQ ID NO: 5711938 - DNA, 25 bp, Homo sapien
ggaggtcctcagggttctgggctgc

SEQ ID NO: 5711939 - DNA, 25 bp, Homo sapien
agcctagcagggccagcccaggccc

SEQ ID NO: 5711940 - DNA, 25 bp, Homo sapien
ggcctgagtacgtagcgccaggccc

SEQ ID NO: 5711941 - DNA, 25 bp, Homo sapien
aggcccccctccagcgtggagatgc

SEQ ID NO: 5711942 - DNA, 25 bp, Homo sapien
tccacaccaccatctggatgagctg

SEQ ID NO: 5711943 - DNA, 25 bp, Homo sapien
ccagcaaggacttctcatcactgag

SEQ ID NO: 5711944 - DNA, 25 bp, Homo sapien
gtgatcaacccatgtctggagctag

SEQ ID NO: 5711945 - DNA, 25 bp, Homo sapien
acaggccacacaagtgtttctgcac

SEQ ID NO: 5711946 - DNA, 25 bp, Homo sapien
gccaggcccggtgtggatgctgggg

SEQ ID NO: 5711947 - DNA, 25 bp, Homo sapien
catggcggacacctcatcctggagc

SEQ ID NO: 5711948 - DNA, 25 bp, Homo sapien
atttctagaaaactgtgccttagcc

SEQ ID NO: 5711949 - DNA, 25 bp, Homo sapien
ggggagccaaagctgagggcgttgg

SEQ ID NO: 5711950 - DNA, 25 bp, Homo sapien
gcaagctggaaaacctgcagcaagg

SEQ ID NO: 5711951 - DNA, 25 bp, Homo sapien
tggggtcctgcacagtgggccatgc

SEQ ID NO: 5711952 - DNA, 25 bp, Homo sapien
ggtcctcgtgggtggtcaccaccag

SEQ ID NO: 5711953 - DNA, 25 bp, Homo sapien
accaccggactctaacatcgttgac

SEQ ID NO: 5711954 - DNA, 25 bp, Homo sapien
gtcaacgatgttagagtccggtggt

SEQ ID NO: 5711955 - DNA, 25 bp, Homo sapien
ttaaaaggctgtatcttcgaccagg

SEQ ID NO: 5711956 - DNA, 25 bp, Homo sapien
cctggtcgaagatacagccttttaa

SEQ ID NO: 5711957 - DNA, 25 bp, Homo sapien
cctgtccctcgggtgcacaccctct

SEQ ID NO: 5711958 - DNA, 25 bp, Homo sapien
agagggtgtgcacccgagggacagg

SEQ ID NO: 5711959 - DNA, 25 bp, Homo sapien
ttatggagtatttcactatcaggtc

SEQ ID NO: 5711960 - DNA, 25 bp, Homo sapien
gacctgatagtgaaatactccataa

SEQ ID NO: 5711961 - DNA, 25 bp, Homo sapien
aagatgggtacctactgtctagtag

SEQ ID NO: 5711962 - DNA, 25 bp, Homo sapien
ctactagacagtaggtacccatctt

SEQ ID NO: 5711963 - DNA, 25 bp, Homo sapien
gtgtgagaacagcaatcgggtcact

SEQ ID NO: 5711964 - DNA, 25 bp, Homo sapien
agtgacccgattgctgttctcacac

SEQ ID NO: 5711965 - DNA, 25 bp, Homo sapien
caccttcgaggaggtttcgtcgagt

SEQ ID NO: 5711966 - DNA, 25 bp, Homo sapien
actcgacgaaacctcctcgaaggtg

SEQ ID NO: 5711967 - DNA, 25 bp, Homo sapien
aatgataaaagaacaatcttgagtc

SEQ ID NO: 5711968 - DNA, 25 bp, Homo sapien
gactcaagattgttcttttatcatt

SEQ ID NO: 5711969 - DNA, 25 bp, Homo sapien
acgattatggtaccaggttctgtaa

SEQ ID NO: 5711970 - DNA, 25 bp, Homo sapien
ttacagaacctggtaccataatcgt

SEQ ID NO: 5711971 - DNA, 25 bp, Homo sapien
atcaaagtgtagaaactggtataag

SEQ ID NO: 5711972 - DNA, 25 bp, Homo sapien
cttataccagtttctacactttgat

SEQ ID NO: 5711973 - DNA, 25 bp, Homo sapien
actttctaccgagaatgaatactct

SEQ ID NO: 5711974 - DNA, 25 bp, Homo sapien
agagtattcattctcggtagaaagt

SEQ ID NO: 5711975 - DNA, 25 bp, Homo sapien
ctgaccgcggcgcaggtccaccggc

SEQ ID NO: 5711976 - DNA, 25 bp, Homo sapien
gccggtggacctgcgccgcggtcag

SEQ ID NO: 5711977 - DNA, 25 bp, Homo sapien
cgccgcctaggagcccgcccgtcgg

SEQ ID NO: 5711978 - DNA, 25 bp, Homo sapien
ccgacgggcgggctcctaggcggcg

SEQ ID NO: 5711979 - DNA, 25 bp, Homo sapien
taaaatgtacaatcttggaaaaagt

SEQ ID NO: 5711980 - DNA, 25 bp, Homo sapien
actttttccaagattgtacatttta

SEQ ID NO: 5711981 - DNA, 25 bp, Homo sapien
cggggtcacagcacggcctcgccga

SEQ ID NO: 5711982 - DNA, 25 bp, Homo sapien
tcggcgaggccgtgctgtgaccccg

SEQ ID NO: 5711983 - DNA, 25 bp, Homo sapien
ctcggggtcacagcacggcctcgcc

SEQ ID NO: 5711984 - DNA, 25 bp, Homo sapien
ggcgaggccgtgctgtgaccccgag

SEQ ID NO: 5711985 - DNA, 25 bp, Homo sapien
tttacgactcctacaaagattcctt

SEQ ID NO: 5711986 - DNA, 25 bp, Homo sapien
aaggaatctttgtaggagtcgtaaa

SEQ ID NO: 5711987 - DNA, 25 bp, Homo sapien
acgtccgtggcaggcggggcgcgcg

SEQ ID NO: 5711988 - DNA, 25 bp, Homo sapien
cgcgcgccccgcctgccacggacgt

SEQ ID NO: 5711989 - DNA, 25 bp, Homo sapien
cgggattaggagaatttggagtatc

SEQ ID NO: 5711990 - DNA, 25 bp, Homo sapien
gatactccaaattctcctaatcccg

SEQ ID NO: 5711991 - DNA, 25 bp, Homo sapien
gggtgtgccgcactgcgcgcgagcc

SEQ ID NO: 5711992 - DNA, 25 bp, Homo sapien
ggctcgcgcgcagtgcggcacaccc

SEQ ID NO: 5711993 - DNA, 25 bp, Homo sapien
cctctccggtcgcggcgcgtcgtcg

SEQ ID NO: 5711994 - DNA, 25 bp, Homo sapien
cgacgacgcgccgcgaccggagagg

SEQ ID NO: 5711995 - DNA, 25 bp, Homo sapien
caaaagagaaatagctactactcgt

SEQ ID NO: 5711996 - DNA, 25 bp, Homo sapien
acgagtagtagctatttctcttttg

SEQ ID NO: 5711997 - DNA, 25 bp, Homo sapien
tgacttgttcatgcaaatctaaccg

SEQ ID NO: 5711998 - DNA, 25 bp, Homo sapien
cggttagatttgcatgaacaagtca

SEQ ID NO: 5711999 - DNA, 25 bp, Homo sapien
ggaccgttccctcgcccgcacccgc

SEQ ID NO: 5712000 - DNA, 25 bp, Homo sapien
gcgggtgcgggcgagggaacggtcc

SEQ ID NO: 5712001 - DNA, 25 bp, Homo sapien
tagttaaagtgccggtgttctggtg

SEQ ID NO: 5712002 - DNA, 25 bp, Homo sapien
caccagaacaccggcactttaacta

SEQ ID NO: 5712003 - DNA, 25 bp, Homo sapien
acgacgaaattgctcacactaaagt

SEQ ID NO: 5712004 - DNA, 25 bp, Homo sapien
actttagtgtgagcaatttcgtcgt

SEQ ID NO: 5712005 - DNA, 25 bp, Homo sapien
tctcgtggtcccgaagcttttgtcg

SEQ ID NO: 5712006 - DNA, 25 bp, Homo sapien
cgacaaaagcttcgggaccacgaga

SEQ ID NO: 5712007 - DNA, 25 bp, Homo sapien
agacggcgtgcgaggtgcacgcgcc

SEQ ID NO: 5712008 - DNA, 25 bp, Homo sapien
ggcgcgtgcacctcgcacgccgtct

SEQ ID NO: 5712009 - DNA, 25 bp, Homo sapien
gtcctctttcggtgaaagtgtctct

SEQ ID NO: 5712010 - DNA, 25 bp, Homo sapien
agagacactttcaccgaaagaggac

SEQ ID NO: 5712011 - DNA, 25 bp, Homo sapien
gtcgcacgggccgtcttcctccact

SEQ ID NO: 5712012 - DNA, 25 bp, Homo sapien
agtggaggaagacggcccgtgcgac

SEQ ID NO: 5712013 - DNA, 25 bp, Homo sapien
attaagatgacgaaagaggagtccc

SEQ ID NO: 5712014 - DNA, 25 bp, Homo sapien
gggactcctctttcgtcatcttaat

SEQ ID NO: 5712015 - DNA, 25 bp, Homo sapien
gccttggtgtcccatgacgcgacct

SEQ ID NO: 5712016 - DNA, 25 bp, Homo sapien
aggtcgcgtcatgggacaccaaggc

SEQ ID NO: 5712017 - DNA, 25 bp, Homo sapien
gatctcccgtatccgaggtcggtgt

SEQ ID NO: 5712018 - DNA, 25 bp, Homo sapien
acaccgacctcggatacgggagatc

SEQ ID NO: 5712019 - DNA, 25 bp, Homo sapien
aagatctcttcggtatacccctagc

SEQ ID NO: 5712020 - DNA, 25 bp, Homo sapien
gctaggggtataccgaagagatctt

SEQ ID NO: 5712021 - DNA, 25 bp, Homo sapien
tcgtggcgcagctcgcctcgcgcgc

SEQ ID NO: 5712022 - DNA, 25 bp, Homo sapien
gcgcgcgaggcgagctgcgccacga

SEQ ID NO: 5712023 - DNA, 25 bp, Homo sapien
gccctcgtggcgcagctcgcctcgc

SEQ ID NO: 5712024 - DNA, 25 bp, Homo sapien
gcgaggcgagctgcgccacgagggc

SEQ ID NO: 5712025 - DNA, 25 bp, Homo sapien
gagacctatgtagcgagatggtaga

SEQ ID NO: 5712026 - DNA, 25 bp, Homo sapien
tctaccatctcgctacataggtctc

SEQ ID NO: 5712027 - DNA, 25 bp, Homo sapien
ttcctctaatttaagggagaagaac

SEQ ID NO: 5712028 - DNA, 25 bp, Homo sapien
gttcttctcccttaaattagaggaa

SEQ ID NO: 5712029 - DNA, 25 bp, Homo sapien
gaaaatgttcaatcttgtttaaagt

SEQ ID NO: 5712030 - DNA, 25 bp, Homo sapien
actttaaacaagattgaacattttc

SEQ ID NO: 5712031 - DNA, 25 bp, Homo sapien
gaattcgtagactgtcacccagagt

SEQ ID NO: 5712032 - DNA, 25 bp, Homo sapien
actctgggtgacagtctacgaattc

SEQ ID NO: 5712033 - DNA, 25 bp, Homo sapien
caggtgtcacattcgtaagtttcat

SEQ ID NO: 5712034 - DNA, 25 bp, Homo sapien
atgaaacttacgaatgtgacacctg

SEQ ID NO: 5712035 - DNA, 25 bp, Homo sapien
tgaaatctgtagtgggaccctccgg

SEQ ID NO: 5712036 - DNA, 25 bp, Homo sapien
ccggagggtcccactacagatttca

SEQ ID NO: 5712037 - DNA, 25 bp, Homo sapien
gacaggaatccttccgacaaggaat

SEQ ID NO: 5712038 - DNA, 25 bp, Homo sapien
attccttgtcggaaggattcctgtc

SEQ ID NO: 5712039 - DNA, 25 bp, Homo sapien
ccccggagaaccctcctagtgacga

SEQ ID NO: 5712040 - DNA, 25 bp, Homo sapien
tcgtcactaggagggttctccgggg

SEQ ID NO: 5712041 - DNA, 25 bp, Homo sapien
gaggtggtttcgtccacatatgtcc

SEQ ID NO: 5712042 - DNA, 25 bp, Homo sapien
ggacatatgtggacgaaaccacctc

SEQ ID NO: 5712043 - DNA, 25 bp, Homo sapien
acaacttcatgattttgaacaaagt

SEQ ID NO: 5712044 - DNA, 25 bp, Homo sapien
actttgttcaaaatcatgaagttgt

SEQ ID NO: 5712045 - DNA, 25 bp, Homo sapien
aaaaaagtctctaggatgatttaag

SEQ ID NO: 5712046 - DNA, 25 bp, Homo sapien
cttaaatcatcctagagactttttt

SEQ ID NO: 5712047 - DNA, 25 bp, Homo sapien
ggacccacgacggtgccggtggcgg

SEQ ID NO: 5712048 - DNA, 25 bp, Homo sapien
ccgccaccggcaccgtcgtgggtcc

SEQ ID NO: 5712049 - DNA, 25 bp, Homo sapien
aaagtgatttatacatattacaaag

SEQ ID NO: 5712050 - DNA, 25 bp, Homo sapien
ctttgtaatatgtataaatcacttt

SEQ ID NO: 5712051 - DNA, 25 bp, Homo sapien
aattctgaaagtgatttatacatat

SEQ ID NO: 5712052 - DNA, 25 bp, Homo sapien
atatgtataaatcactttcagaatt

SEQ ID NO: 5712053 - DNA, 25 bp, Homo sapien
taacggttcttccacatgtctttat

SEQ ID NO: 5712054 - DNA, 25 bp, Homo sapien
ataaagacatgtggaagaaccgtta

SEQ ID NO: 5712055 - DNA, 25 bp, Homo sapien
gtcggtccacgacatcgacccacgg

SEQ ID NO: 5712056 - DNA, 25 bp, Homo sapien
ccgtgggtcgatgtcgtggaccgac

SEQ ID NO: 5712057 - DNA, 25 bp, Homo sapien
cccctttgtacgtgtagacgtccac

SEQ ID NO: 5712058 - DNA, 25 bp, Homo sapien
gtggacgtctacacgtacaaagggg

SEQ ID NO: 5712059 - DNA, 25 bp, Homo sapien
cacgtccccggcgaggtccggatcc

SEQ ID NO: 5712060 - DNA, 25 bp, Homo sapien
ggatccggacctcgccggggacgtg

SEQ ID NO: 5712061 - DNA, 25 bp, Homo sapien
gacattatgtcttaagacaaacaaa

SEQ ID NO: 5712062 - DNA, 25 bp, Homo sapien
tttgtttgtcttaagacataatgtc

SEQ ID NO: 5712063 - DNA, 25 bp, Homo sapien
tcgccctttcccacacggagccggc

SEQ ID NO: 5712064 - DNA, 25 bp, Homo sapien
gccggctccgtgtgggaaagggcga

SEQ ID NO: 5712065 - DNA, 25 bp, Homo sapien
ggccggccaccgtcggtggcgtccg

SEQ ID NO: 5712066 - DNA, 25 bp, Homo sapien
cggacgccaccgacggtggccggcc

SEQ ID NO: 5712067 - DNA, 25 bp, Homo sapien
cctgacttcgcggtgcaccgaaaga

SEQ ID NO: 5712068 - DNA, 25 bp, Homo sapien
tctttcggtgcaccgcgaagtcagg

SEQ ID NO: 5712069 - DNA, 25 bp, Homo sapien
gacacggactcggattacaagaggt

SEQ ID NO: 5712070 - DNA, 25 bp, Homo sapien
acctcttgtaatccgagtccgtgtc

SEQ ID NO: 5712071 - DNA, 25 bp, Homo sapien
aaggaaaagacgtatcagataaggt

SEQ ID NO: 5712072 - DNA, 25 bp, Homo sapien
accttatctgatacgtcttttcctt

SEQ ID NO: 5712073 - DNA, 25 bp, Homo sapien
cttaagagagggtgtttacatttat

SEQ ID NO: 5712074 - DNA, 25 bp, Homo sapien
ataaatgtaaacaccctctcttaag

SEQ ID NO: 5712075 - DNA, 25 bp, Homo sapien
gacagacgacgcaacccaatttttc

SEQ ID NO: 5712076 - DNA, 25 bp, Homo sapien
gaaaaattgggttgcgtcgtctgtc

SEQ ID NO: 5712077 - DNA, 25 bp, Homo sapien
tctcagtgtttaaatgacttcagag

SEQ ID NO: 5712078 - DNA, 25 bp, Homo sapien
ctctgaagtcatttaaacactgaga

SEQ ID NO: 5712079 - DNA, 25 bp, Homo sapien
gccgggccgctgtcccaggcccgtc

SEQ ID NO: 5712080 - DNA, 25 bp, Homo sapien
gacgggcctgggacagcggcccggc

SEQ ID NO: 5712081 - DNA, 25 bp, Homo sapien
gggtgtggctgcgggcgcctggccg

SEQ ID NO: 5712082 - DNA, 25 bp, Homo sapien
cggccaggcgcccgcagccacaccc

SEQ ID NO: 5712083 - DNA, 25 bp, Homo sapien
gacgttacagacctttaaatataac

SEQ ID NO: 5712084 - DNA, 25 bp, Homo sapien
gttatatttaaaggtctgtaacgtc

SEQ ID NO: 5712085 - DNA, 25 bp, Homo sapien
tcgtcgccggaggaaatgactcgcg

SEQ ID NO: 5712086 - DNA, 25 bp, Homo sapien
cgcgagtcatttcctccggcgacga

SEQ ID NO: 5712087 - DNA, 25 bp, Homo sapien
ggcaagaagaaagaacgccctttgt

SEQ ID NO: 5712088 - DNA, 25 bp, Homo sapien
acaaagggcgttctttcttcttgcc

SEQ ID NO: 5712089 - DNA, 25 bp, Homo sapien
gtagttcggaaccttggcgtccacg

SEQ ID NO: 5712090 - DNA, 25 bp, Homo sapien
cgtggacgccaaggttccgaactac

SEQ ID NO: 5712091 - DNA, 25 bp, Homo sapien
gtgactacaagaagttacttcagca

SEQ ID NO: 5712092 - DNA, 25 bp, Homo sapien
tgctgaagtaacttcttgtagtcac

SEQ ID NO: 5712093 - DNA, 25 bp, Homo sapien
attaccatttttgaactatattatc

SEQ ID NO: 5712094 - DNA, 25 bp, Homo sapien
gataatatagttcaaaaatggtaat

SEQ ID NO: 5712095 - DNA, 25 bp, Homo sapien
cggagctgaccctggttacgactgt

SEQ ID NO: 5712096 - DNA, 25 bp, Homo sapien
acagtcgtaaccagggtcagctccg

SEQ ID NO: 5712097 - DNA, 25 bp, Homo sapien
tatagagtttctttagattcttaaa

SEQ ID NO: 5712098 - DNA, 25 bp, Homo sapien
tttaagaatctaaagaaactctata

SEQ ID NO: 5712099 - DNA, 25 bp, Homo sapien
ggacgacctaggtacaccagactcg

SEQ ID NO: 5712100 - DNA, 25 bp, Homo sapien
cgagtctggtgtacctaggtcgtcc

SEQ ID NO: 5712101 - DNA, 25 bp, Homo sapien
agtcccctcgtgtctcaggtacgtg

SEQ ID NO: 5712102 - DNA, 25 bp, Homo sapien
cacgtacctgagacacgaggggact

SEQ ID NO: 5712103 - DNA, 25 bp, Homo sapien
taaaacctgaaaaataatcttatct

SEQ ID NO: 5712104 - DNA, 25 bp, Homo sapien
agataagattatttttcaggtttta

SEQ ID NO: 5712105 - DNA, 25 bp, Homo sapien
aaaacacttcattcgagaagtgtag

SEQ ID NO: 5712106 - DNA, 25 bp, Homo sapien
ctacacttctcgaatgaagtgtttt

SEQ ID NO: 5712107 - DNA, 25 bp, Homo sapien
tttctttctgtgttacaaaacaatc

SEQ ID NO: 5712108 - DNA, 25 bp, Homo sapien
gattgttttgtaacacagaaagaaa

SEQ ID NO: 5712109 - DNA, 25 bp, Homo sapien
ctcggaccttggacacaaccctaag

SEQ ID NO: 5712110 - DNA, 25 bp, Homo sapien
cttagggttgtgtccaaggtccgag

SEQ ID NO: 5712111 - DNA, 25 bp, Homo sapien
atccggtggaaacgtctcgacagag

SEQ ID NO: 5712112 - DNA, 25 bp, Homo sapien
ctctgtcgagacgtttccaccggat

SEQ ID NO: 5712113 - DNA, 25 bp, Homo sapien
ccctggtgtacgtgtctgagataaa

SEQ ID NO: 5712114 - DNA, 25 bp, Homo sapien
tttatctcagacacgtacaccaggg

SEQ ID NO: 5712115 - DNA, 25 bp, Homo sapien
cccgggtgtgcgaggcgggtgtatc

SEQ ID NO: 5712116 - DNA, 25 bp, Homo sapien
gatacacccgcctcgcacacccggg

SEQ ID NO: 5712117 - DNA, 25 bp, Homo sapien
gtactggtattgtccaccgtgtggg

SEQ ID NO: 5712118 - DNA, 25 bp, Homo sapien
cccacacggtggacaataccagtac

SEQ ID NO: 5712119 - DNA, 25 bp, Homo sapien
acagctgggaaagggtaccccgtgc

SEQ ID NO: 5712120 - DNA, 25 bp, Homo sapien
gcacggggtaccctttcccagctgt

SEQ ID NO: 5712121 - DNA, 25 bp, Homo sapien
cacgacctgcggttggaggtatccc

SEQ ID NO: 5712122 - DNA, 25 bp, Homo sapien
gggatacctccaaccgcaggtcgtg

SEQ ID NO: 5712123 - DNA, 25 bp, Homo sapien
aaatctaaaggactcatttgcatct

SEQ ID NO: 5712124 - DNA, 25 bp, Homo sapien
agatgcaaatgagtcctttagattt

SEQ ID NO: 5712125 - DNA, 25 bp, Homo sapien
cacggccgaggccggaggtctaggt

SEQ ID NO: 5712126 - DNA, 25 bp, Homo sapien
acctagacctccggcctcggccgtg

SEQ ID NO: 5712127 - DNA, 25 bp, Homo sapien
acacggccgaggccggaggtctagg

SEQ ID NO: 5712128 - DNA, 25 bp, Homo sapien
cctagacctccggcctcggccgtgt

SEQ ID NO: 5712129 - DNA, 25 bp, Homo sapien
agtcagggcttcactaaccactttg

SEQ ID NO: 5712130 - DNA, 25 bp, Homo sapien
caaagtggttagtgaagccctgact

SEQ ID NO: 5712131 - DNA, 25 bp, Homo sapien
ctagtccttaacacctactaagtcg

SEQ ID NO: 5712132 - DNA, 25 bp, Homo sapien
cgacttagtaggtgttaaggactag

SEQ ID NO: 5712133 - DNA, 25 bp, Homo sapien
acggaggcgtaggagcacccgggac

SEQ ID NO: 5712134 - DNA, 25 bp, Homo sapien
gtcccgggtgctcctacgcctccgt

SEQ ID NO: 5712135 - DNA, 25 bp, Homo sapien
agagacggaggcgtaggagcacccg

SEQ ID NO: 5712136 - DNA, 25 bp, Homo sapien
cgggtgctcctacgcctccgtctct

SEQ ID NO: 5712137 - DNA, 25 bp, Homo sapien
gcggcggcaccgacgcggtcaccac

SEQ ID NO: 5712138 - DNA, 25 bp, Homo sapien
gtggtgaccgcgtcggtgccgccgc

SEQ ID NO: 5712139 - DNA, 25 bp, Homo sapien
gcggagcgacaacagcctatttcgt

SEQ ID NO: 5712140 - DNA, 25 bp, Homo sapien
acgaaataggctgttgtcgctccgc

SEQ ID NO: 5712141 - DNA, 25 bp, Homo sapien
aaaagttttcatcttaagactagta

SEQ ID NO: 5712142 - DNA, 25 bp, Homo sapien
tactagtcttaagatgaaaactttt

SEQ ID NO: 5712143 - DNA, 25 bp, Homo sapien
taaaaaagttttcatcttaagacta

SEQ ID NO: 5712144 - DNA, 25 bp, Homo sapien
tagtcttaagatgaaaactttttta

SEQ ID NO: 5712145 - DNA, 25 bp, Homo sapien
ggagacgagataagagtttcagact

SEQ ID NO: 5712146 - DNA, 25 bp, Homo sapien
agtctgaaactcttatctcgtctcc

SEQ ID NO: 5712147 - DNA, 25 bp, Homo sapien
cgggtaaactcaatactcacacaac

SEQ ID NO: 5712148 - DNA, 25 bp, Homo sapien
gttgtgtgagtattgagtttacccg

SEQ ID NO: 5712149 - DNA, 25 bp, Homo sapien
ttaaaatgtcgtatcctccttcaat

SEQ ID NO: 5712150 - DNA, 25 bp, Homo sapien
attgaaggaggatacgacattttaa

SEQ ID NO: 5712151 - DNA, 25 bp, Homo sapien
cattcgaggtactgagcaggtacat

SEQ ID NO: 5712152 - DNA, 25 bp, Homo sapien
atgtacctgctcagtacctcgaatg

SEQ ID NO: 5712153 - DNA, 25 bp, Homo sapien
tatctacttaataacttgaagtttt

SEQ ID NO: 5712154 - DNA, 25 bp, Homo sapien
aaaacttcaagttattaagtagata

SEQ ID NO: 5712155 - DNA, 25 bp, Homo sapien
tcggcgtcgcgggtgagccccgtcc

SEQ ID NO: 5712156 - DNA, 25 bp, Homo sapien
ggacggggctcacccgcgacgccga

SEQ ID NO: 5712157 - DNA, 25 bp, Homo sapien
ctcggcgtcgcgggtgagccccgtc

SEQ ID NO: 5712158 - DNA, 25 bp, Homo sapien
gacggggctcacccgcgacgccgag

SEQ ID NO: 5712159 - DNA, 25 bp, Homo sapien
gggtggcgtgcctggcctctccacc

SEQ ID NO: 5712160 - DNA, 25 bp, Homo sapien
ggtggagaggccaggcacgccaccc

SEQ ID NO: 5712161 - DNA, 25 bp, Homo sapien
ggaattatccgtaccttcacaagcg

SEQ ID NO: 5712162 - DNA, 25 bp, Homo sapien
cgcttgtgaaggtacggataattcc

SEQ ID NO: 5712163 - DNA, 25 bp, Homo sapien
gttctctcaggactagggatttggg

SEQ ID NO: 5712164 - DNA, 25 bp, Homo sapien
cccaaatccctagtcctgagagaac

SEQ ID NO: 5712165 - DNA, 25 bp, Homo sapien
cgttcggatcttggactagtgtgac

SEQ ID NO: 5712166 - DNA, 25 bp, Homo sapien
gtcacactagtccaagatccgaacg

SEQ ID NO: 5712167 - DNA, 25 bp, Homo sapien
aagactaaaggactagtggtttata

SEQ ID NO: 5712168 - DNA, 25 bp, Homo sapien
tataaaccactagtcctttagtctt

SEQ ID NO: 5712169 - DNA, 25 bp, Homo sapien
agtccactcacacccggttgggaag

SEQ ID NO: 5712170 - DNA, 25 bp, Homo sapien
cttcccaaccgggtgtgagtggact

SEQ ID NO: 5712171 - DNA, 25 bp, Homo sapien
aggagacggagcgcgacgtgggcgt

SEQ ID NO: 5712172 - DNA, 25 bp, Homo sapien
acgcccacgtcgcgctccgtctcct

SEQ ID NO: 5712173 - DNA, 25 bp, Homo sapien
gaccagggcgcttccacccttttcg

SEQ ID NO: 5712174 - DNA, 25 bp, Homo sapien
cgaaaagggtggaagcgccctggtc

SEQ ID NO: 5712175 - DNA, 25 bp, Homo sapien
ggactaggacgaggtgggacgagtg

SEQ ID NO: 5712176 - DNA, 25 bp, Homo sapien
cactcgtcccacctcgtcctagtcc

SEQ ID NO: 5712177 - DNA, 25 bp, Homo sapien
gtccaggtggcccgccggtcgggag

SEQ ID NO: 5712178 - DNA, 25 bp, Homo sapien
ctcccgaccggcgggccacctggac

SEQ ID NO: 5712179 - DNA, 25 bp, Homo sapien
accatactcctcagacggttcacat

SEQ ID NO: 5712180 - DNA, 25 bp, Homo sapien
atgtgaaccgtctgaggagtatggt

SEQ ID NO: 5712181 - DNA, 25 bp, Homo sapien
gtaaaccccggacctctgcggtagc

SEQ ID NO: 5712182 - DNA, 25 bp, Homo sapien
gctaccgcagaggtccggggtttac

SEQ ID NO: 5712183 - DNA, 25 bp, Homo sapien
gaggcagaacgtttggtgactgtca

SEQ ID NO: 5712184 - DNA, 25 bp, Homo sapien
tgacagtcaccaaacgttctgcctc

SEQ ID NO: 5712185 - DNA, 25 bp, Homo sapien
taaccgtttatcacagttttcccat

SEQ ID NO: 5712186 - DNA, 25 bp, Homo sapien
atgggaaaactgtgataaacggtta

SEQ ID NO: 5712187 - DNA, 25 bp, Homo sapien
ccctaaacccgacatataacaagaa

SEQ ID NO: 5712188 - DNA, 25 bp, Homo sapien
ttcttgttatatgtcgggtttaggg

SEQ ID NO: 5712189 - DNA, 25 bp, Homo sapien
actgtttagacttggtcatcatgta

SEQ ID NO: 5712190 - DNA, 25 bp, Homo sapien
tacatgatgaccaagtctaaacagt

SEQ ID NO: 5712191 - DNA, 25 bp, Homo sapien
ccctacagggctcccgaaggatctg

SEQ ID NO: 5712192 - DNA, 25 bp, Homo sapien
cagatccttcgggagccctgtaggg

SEQ ID NO: 5712193 - DNA, 25 bp, Homo sapien
ggggtagaactttccgagcttgtcg

SEQ ID NO: 5712194 - DNA, 25 bp, Homo sapien
cgacaagctcggaaagttctacccc

SEQ ID NO: 5712195 - DNA, 25 bp, Homo sapien
gaggacagacaatcgtgaaacgtgt

SEQ ID NO: 5712196 - DNA, 25 bp, Homo sapien
acacgtttcacgattgtctgtcctc

SEQ ID NO: 5712197 - DNA, 25 bp, Homo sapien
gagaacgctgacaacctcaggaccc

SEQ ID NO: 5712198 - DNA, 25 bp, Homo sapien
gggtcctgaggttgtcagcgttctc

SEQ ID NO: 5712199 - DNA, 25 bp, Homo sapien
gccccggggcgcgtccacgtcactg

SEQ ID NO: 5712200 - DNA, 25 bp, Homo sapien
cagtgacgtggacgcgccccggggc

SEQ ID NO: 5712201 - DNA, 25 bp, Homo sapien
gctcagacagggagggcgccctcga

SEQ ID NO: 5712202 - DNA, 25 bp, Homo sapien
tcgagggcgccctccctgtctgagc

SEQ ID NO: 5712203 - DNA, 25 bp, Homo sapien
aacctcatgagggttgacccgtgac

SEQ ID NO: 5712204 - DNA, 25 bp, Homo sapien
gtcacgggtcaaccctcatgaggtt

SEQ ID NO: 5712205 - DNA, 25 bp, Homo sapien
agtaggtaatggtgctgggcacact

SEQ ID NO: 5712206 - DNA, 25 bp, Homo sapien
agtgtgcccagcaccattacctact

SEQ ID NO: 5712207 - DNA, 25 bp, Homo sapien
tcggtctgaggataggccagacact

SEQ ID NO: 5712208 - DNA, 25 bp, Homo sapien
agtgtctggcctatcctcagaccga

SEQ ID NO: 5712209 - DNA, 25 bp, Homo sapien
tttgtagtcatagtagcagcaagta

SEQ ID NO: 5712210 - DNA, 25 bp, Homo sapien
tacttgctgctactatgactacaaa

SEQ ID NO: 5712211 - DNA, 25 bp, Homo sapien
ttactacggttcattgacaaagtag

SEQ ID NO: 5712212 - DNA, 25 bp, Homo sapien
ctactttgtcaatgaaccgtagtaa

SEQ ID NO: 5712213 - DNA, 25 bp, Homo sapien
agaaactgagttgatccgaaaaacc

SEQ ID NO: 5712214 - DNA, 25 bp, Homo sapien
ggtttttcggatcaactcagtttct

SEQ ID NO: 5712215 - DNA, 25 bp, Homo sapien
aggtgagcttgactcgattgtctcg

SEQ ID NO: 5712216 - DNA, 25 bp, Homo sapien
cgagacaatcgagtcaagctcacct

SEQ ID NO: 5712217 - DNA, 25 bp, Homo sapien
ttttcaagaaaccagcgacgacaag

SEQ ID NO: 5712218 - DNA, 25 bp, Homo sapien
cttgtcgtcgctggtttcttgaaaa

SEQ ID NO: 5712219 - DNA, 25 bp, Homo sapien
acgttcattaacaaatctcaattat

SEQ ID NO: 5712220 - DNA, 25 bp, Homo sapien
ataattgagatttgttaatgaacgt

SEQ ID NO: 5712221 - DNA, 25 bp, Homo sapien
gggccgtgagggccggtctccgagg

SEQ ID NO: 5712222 - DNA, 25 bp, Homo sapien
cctcggagaccggccctcacggccc

SEQ ID NO: 5712223 - DNA, 25 bp, Homo sapien
ggggccgtgagggccggtctccgag

SEQ ID NO: 5712224 - DNA, 25 bp, Homo sapien
ctcggagaccggccctcacggcccc

SEQ ID NO: 5712225 - DNA, 25 bp, Homo sapien
gtgtcgggttgcgtcccgacttcag

SEQ ID NO: 5712226 - DNA, 25 bp, Homo sapien
ctgaagtcgggacgcaacccgacac

SEQ ID NO: 5712227 - DNA, 25 bp, Homo sapien
gtatgtctttataatctcctcagag

SEQ ID NO: 5712228 - DNA, 25 bp, Homo sapien
ctctgaggagattataaagacatac

SEQ ID NO: 5712229 - DNA, 25 bp, Homo sapien
tcaagaaacagataatgcaactccg

SEQ ID NO: 5712230 - DNA, 25 bp, Homo sapien
cggagttgcattatctgtttcttga

SEQ ID NO: 5712231 - DNA, 25 bp, Homo sapien
gactgaatcagattttccaaatcct

SEQ ID NO: 5712232 - DNA, 25 bp, Homo sapien
aggatttggaaaatctgattcagtc

SEQ ID NO: 5712233 - DNA, 25 bp, Homo sapien
ggtagtcggcgggaagcacctccgg

SEQ ID NO: 5712234 - DNA, 25 bp, Homo sapien
ccggaggtgcttcccgccgactacc

SEQ ID NO: 5712235 - DNA, 25 bp, Homo sapien
ttatggctcgtaccgtccgtgtcag

SEQ ID NO: 5712236 - DNA, 25 bp, Homo sapien
ctgacacggacggtacgagccataa

SEQ ID NO: 5712237 - DNA, 25 bp, Homo sapien
acgtctatggtctagttaagattcg

SEQ ID NO: 5712238 - DNA, 25 bp, Homo sapien
cgaatcttaactagaccatagacgt

SEQ ID NO: 5712239 - DNA, 25 bp, Homo sapien
gacctcgtgagcttgctgggtaagt

SEQ ID NO: 5712240 - DNA, 25 bp, Homo sapien
acttacccagcaagctcacgaggtc

SEQ ID NO: 5712241 - DNA, 25 bp, Homo sapien
cattctaccatcaaaccttagtgac

SEQ ID NO: 5712242 - DNA, 25 bp, Homo sapien
gtcactaaggtttgatggtagaatg

SEQ ID NO: 5712243 - DNA, 25 bp, Homo sapien
gggcatccgtataggtactaagtcg

SEQ ID NO: 5712244 - DNA, 25 bp, Homo sapien
cgacttagtacctatacggatgccc

SEQ ID NO: 5712245 - DNA, 25 bp, Homo sapien
cctccctccttctctcctcgtcggt

SEQ ID NO: 5712246 - DNA, 25 bp, Homo sapien
accgacgaggagagaaggagggagg

SEQ ID NO: 5712247 - DNA, 25 bp, Homo sapien
tccgggtcgagacacggtcgcggac

SEQ ID NO: 5712248 - DNA, 25 bp, Homo sapien
gtccgcgaccgtgtctcgacccgga

SEQ ID NO: 5712249 - DNA, 25 bp, Homo sapien
ttgtgtcaagacataacttattcta

SEQ ID NO: 5712250 - DNA, 25 bp, Homo sapien
tagaataagttatgtcttgacacaa

SEQ ID NO: 5712251 - DNA, 25 bp, Homo sapien
caacgcgactaatctcggcagcggg

SEQ ID NO: 5712252 - DNA, 25 bp, Homo sapien
cccgctgccgagattagtcgcgttg

SEQ ID NO: 5712253 - DNA, 25 bp, Homo sapien
tcatattggttaatgaagacccatc

SEQ ID NO: 5712254 - DNA, 25 bp, Homo sapien
gatgggtcttcattaaccaatatga

SEQ ID NO: 5712255 - DNA, 25 bp, Homo sapien
attacgacgaaaacgacactataaa

SEQ ID NO: 5712256 - DNA, 25 bp, Homo sapien
tttatagtgtcgttttcgtcgtaat

SEQ ID NO: 5712257 - DNA, 25 bp, Homo sapien
tttcctcctgaataacaaacctaca

SEQ ID NO: 5712258 - DNA, 25 bp, Homo sapien
tgtaggtttgttattcaggaggaaa

SEQ ID NO: 5712259 - DNA, 25 bp, Homo sapien
atttcaaaatatcactagacgaaac

SEQ ID NO: 5712260 - DNA, 25 bp, Homo sapien
gtttcgtctagtgatattttgaaat

SEQ ID NO: 5712261 - DNA, 25 bp, Homo sapien
acccgggagccttcccttgtgacta

SEQ ID NO: 5712262 - DNA, 25 bp, Homo sapien
tagtcacaagggaaggctcccgggt

SEQ ID NO: 5712263 - DNA, 25 bp, Homo sapien
ggacctgacggaacccgaagatcgt

SEQ ID NO: 5712264 - DNA, 25 bp, Homo sapien
acgatcttcgggttccgtcaggtcc

SEQ ID NO: 5712265 - DNA, 25 bp, Homo sapien
taggtagacaggttccgtgaggaac

SEQ ID NO: 5712266 - DNA, 25 bp, Homo sapien
gttcctcacggaacctgtctaccta

SEQ ID NO: 5712267 - DNA, 25 bp, Homo sapien
gagtctatatttttatctgcagaaa

SEQ ID NO: 5712268 - DNA, 25 bp, Homo sapien
tttctgcagataaaaatatagactc

SEQ ID NO: 5712269 - DNA, 25 bp, Homo sapien
gacccaatttgtggttcgagggact

SEQ ID NO: 5712270 - DNA, 25 bp, Homo sapien
agtccctcgaaccacaaattgggtc

SEQ ID NO: 5712271 - DNA, 25 bp, Homo sapien
gccggctcgagctggcgactccagg

SEQ ID NO: 5712272 - DNA, 25 bp, Homo sapien
cctggagtcgccagctcgagccggc

SEQ ID NO: 5712273 - DNA, 25 bp, Homo sapien
tcccagggccggctcgagctggcga

SEQ ID NO: 5712274 - DNA, 25 bp, Homo sapien
tcgccagctcgagccggccctggga

SEQ ID NO: 5712275 - DNA, 25 bp, Homo sapien
gacggagcgatccgaagtcctggag

SEQ ID NO: 5712276 - DNA, 25 bp, Homo sapien
ctccaggacttcggatcgctccgtc

SEQ ID NO: 5712277 - DNA, 25 bp, Homo sapien
gagggcccggttcgcgggtgtcctc

SEQ ID NO: 5712278 - DNA, 25 bp, Homo sapien
gaggacacccgcgaaccgggccctc

SEQ ID NO: 5712279 - DNA, 25 bp, Homo sapien
gggctgccctgcggggccggtgtgt

SEQ ID NO: 5712280 - DNA, 25 bp, Homo sapien
acacaccggccccgcagggcagccc

SEQ ID NO: 5712281 - DNA, 25 bp, Homo sapien
aagtgagcgtgtagacgtgggtctc

SEQ ID NO: 5712282 - DNA, 25 bp, Homo sapien
gagacccacgtctacacgctcactt

SEQ ID NO: 5712283 - DNA, 25 bp, Homo sapien
ttatgtgtaaccttgtatatttttc

SEQ ID NO: 5712284 - DNA, 25 bp, Homo sapien
gaaaaatatacaaggttacacataa

SEQ ID NO: 5712285 - DNA, 25 bp, Homo sapien
acgacccagacactttgattgagac

SEQ ID NO: 5712286 - DNA, 25 bp, Homo sapien
gtctcaatcaaagtgtctgggtcgt

SEQ ID NO: 5712287 - DNA, 25 bp, Homo sapien
tacggagactctaaaccacccctta

SEQ ID NO: 5712288 - DNA, 25 bp, Homo sapien
taaggggtggtttagagtctccgta

SEQ ID NO: 5712289 - DNA, 25 bp, Homo sapien
gcgtcctccccttgtacgcacacac

SEQ ID NO: 5712290 - DNA, 25 bp, Homo sapien
gtgtgtgcgtacaaggggaggacgc

SEQ ID NO: 5712291 - DNA, 25 bp, Homo sapien
tttgagagagttaaaatgttacata

SEQ ID NO: 5712292 - DNA, 25 bp, Homo sapien
tatgtaacattttaactctctcaaa

SEQ ID NO: 5712293 - DNA, 25 bp, Homo sapien
tcattccaccgtctctttggagtag

SEQ ID NO: 5712294 - DNA, 25 bp, Homo sapien
ctactccaaagagacggtggaatga

SEQ ID NO: 5712295 - DNA, 25 bp, Homo sapien
tagaggtgaaaagttattcagcaaa

SEQ ID NO: 5712296 - DNA, 25 bp, Homo sapien
tttgctgaataacttttcacctcta

SEQ ID NO: 5712297 - DNA, 25 bp, Homo sapien
gatattggtcaagtagtgtcgtcat

SEQ ID NO: 5712298 - DNA, 25 bp, Homo sapien
atgacgacactacttgaccaatatc

SEQ ID NO: 5712299 - DNA, 25 bp, Homo sapien
gagcaccgcacgtaggacgtccacg

SEQ ID NO: 5712300 - DNA, 25 bp, Homo sapien
cgtggacgtcctacgtgcggtgctc

SEQ ID NO: 5712301 - DNA, 25 bp, Homo sapien
gatgccatccattactatctttttc

SEQ ID NO: 5712302 - DNA, 25 bp, Homo sapien
gaaaaagatagtaatggatggcatc

SEQ ID NO: 5712303 - DNA, 25 bp, Homo sapien
ggtagtcttgatgttcatcacccaa

SEQ ID NO: 5712304 - DNA, 25 bp, Homo sapien
ttgggtgatgaacatcaagactacc

SEQ ID NO: 5712305 - DNA, 25 bp, Homo sapien
agacggaggggtctctgcgtccgta

SEQ ID NO: 5712306 - DNA, 25 bp, Homo sapien
tacggacgcagagacccctccgtct

SEQ ID NO: 5712307 - DNA, 25 bp, Homo sapien
gaggcggcgactgtggcgagcgggg

SEQ ID NO: 5712308 - DNA, 25 bp, Homo sapien
ccccgctcgccacagtcgccgcctc

SEQ ID NO: 5712309 - DNA, 25 bp, Homo sapien
cacatgtctacttcggacgttgcct

SEQ ID NO: 5712310 - DNA, 25 bp, Homo sapien
aggcaacgtccgaagtagacatgtg

SEQ ID NO: 5712311 - DNA, 25 bp, Homo sapien
actctagtctgttgaccacattcag

SEQ ID NO: 5712312 - DNA, 25 bp, Homo sapien
ctgaatgtggtcaacagactagagt

SEQ ID NO: 5712313 - DNA, 25 bp, Homo sapien
gatcccgtgtcggacggttagaccg

SEQ ID NO: 5712314 - DNA, 25 bp, Homo sapien
cggtctaaccgtccgacacgggatc

SEQ ID NO: 5712315 - DNA, 25 bp, Homo sapien
gtgagggaccgacatgcgtctgtgg

SEQ ID NO: 5712316 - DNA, 25 bp, Homo sapien
ccacagacgcatgtcggtccctcac

SEQ ID NO: 5712317 - DNA, 25 bp, Homo sapien
aaggaggagcattcatagaagacat

SEQ ID NO: 5712318 - DNA, 25 bp, Homo sapien
atgtcttctatgaatgctcctcctt

SEQ ID NO: 5712319 - DNA, 25 bp, Homo sapien
taaagtgagacgacattctatataa

SEQ ID NO: 5712320 - DNA, 25 bp, Homo sapien
ttatatagaatgtcgtctcacttta

SEQ ID NO: 5712321 - DNA, 25 bp, Homo sapien
tagacctcattgcaatagtaaaagt

SEQ ID NO: 5712322 - DNA, 25 bp, Homo sapien
acttttactattgcaatgaggtcta

SEQ ID NO: 5712323 - DNA, 25 bp, Homo sapien
tatcttgcgataaagtgatattact

SEQ ID NO: 5712324 - DNA, 25 bp, Homo sapien
agtaatatcactttatcgcaagata

SEQ ID NO: 5712325 - DNA, 25 bp, Homo sapien
aatctggaatagtcctccgagagct

SEQ ID NO: 5712326 - DNA, 25 bp, Homo sapien
agctctcggaggactattccagatt

SEQ ID NO: 5712327 - DNA, 25 bp, Homo sapien
gaccgtccctgagcagtactggttc

SEQ ID NO: 5712328 - DNA, 25 bp, Homo sapien
gaaccagtactgctcagggacggtc

SEQ ID NO: 5712329 - DNA, 25 bp, Homo sapien
gatggcgcggtcagggtcccccggg

SEQ ID NO: 5712330 - DNA, 25 bp, Homo sapien
cccgggggaccctgaccgcgccatc

SEQ ID NO: 5712331 - DNA, 25 bp, Homo sapien
attagacacgaaaagtatacctaac

SEQ ID NO: 5712332 - DNA, 25 bp, Homo sapien
gttaggtatacttttcgtgtctaat

SEQ ID NO: 5712333 - DNA, 25 bp, Homo sapien
cgggtcctactcgtgttccgaggtc

SEQ ID NO: 5712334 - DNA, 25 bp, Homo sapien
gacctcggaacacgagtaggacccg

SEQ ID NO: 5712335 - DNA, 25 bp, Homo sapien
actttgttaatagtcaagttcaaag

SEQ ID NO: 5712336 - DNA, 25 bp, Homo sapien
ctttgaacttgactattaacaaagt

SEQ ID NO: 5712337 - DNA, 25 bp, Homo sapien
ccctgggctcaggacgagaggtaca

SEQ ID NO: 5712338 - DNA, 25 bp, Homo sapien
tgtacctctcgtcctgagcccaggg

SEQ ID NO: 5712339 - DNA, 25 bp, Homo sapien
aaaactaaggcattggtaaggcact

SEQ ID NO: 5712340 - DNA, 25 bp, Homo sapien
agtgccttaccaatgccttagtttt

SEQ ID NO: 5712341 - DNA, 25 bp, Homo sapien
ggacgaacagagaccgggacgtcac

SEQ ID NO: 5712342 - DNA, 25 bp, Homo sapien
gtgacgtcccggtctctgttcgtcc

SEQ ID NO: 5712343 - DNA, 25 bp, Homo sapien
aactgaacggatcccaactcaatag

SEQ ID NO: 5712344 - DNA, 25 bp, Homo sapien
ctattgagttgggatccgttcagtt

SEQ ID NO: 5712345 - DNA, 25 bp, Homo sapien
agacccaatgtatgtgtcctgaaag

SEQ ID NO: 5712346 - DNA, 25 bp, Homo sapien
ctttcaggacacatacattgggtct

SEQ ID NO: 5712347 - DNA, 25 bp, Homo sapien
gactctaaaaccctagtgaacaatg

SEQ ID NO: 5712348 - DNA, 25 bp, Homo sapien
cattgttcactagggttttagagtc

SEQ ID NO: 5712349 - DNA, 25 bp, Homo sapien
ggtgtaatacttatagtccaagacg

SEQ ID NO: 5712350 - DNA, 25 bp, Homo sapien
cgtcttggactataagtattacacc

SEQ ID NO: 5712351 - DNA, 25 bp, Homo sapien
agacggtaagatgaagaaagactcg

SEQ ID NO: 5712352 - DNA, 25 bp, Homo sapien
cgagtctttcttcatcttaccgtct

SEQ ID NO: 5712353 - DNA, 25 bp, Homo sapien
agactaaacacatagaccgacacat

SEQ ID NO: 5712354 - DNA, 25 bp, Homo sapien
atgtgtcggtctatgtgtttagtct

SEQ ID NO: 5712355 - DNA, 25 bp, Homo sapien
gggcgtcccaggaaccacctcgagg

SEQ ID NO: 5712356 - DNA, 25 bp, Homo sapien
cctcgaggtggttcctgggacgccc

SEQ ID NO: 5712357 - DNA, 25 bp, Homo sapien
taatagtgtgatttacgaaaaacaa

SEQ ID NO: 5712358 - DNA, 25 bp, Homo sapien
ttgtttttcgtaaatcacactatta

SEQ ID NO: 5712359 - DNA, 25 bp, Homo sapien
gatttaatagtgtgatttacgaaaa

SEQ ID NO: 5712360 - DNA, 25 bp, Homo sapien
ttttcgtaaatcacactattaaatc

SEQ ID NO: 5712361 - DNA, 25 bp, Homo sapien
cacttcctagtgtctgtcaaaccct

SEQ ID NO: 5712362 - DNA, 25 bp, Homo sapien
agggtttgacagacactaggaagtg

SEQ ID NO: 5712363 - DNA, 25 bp, Homo sapien
taccaccaccactgcgtccccgtcc

SEQ ID NO: 5712364 - DNA, 25 bp, Homo sapien
ggacggggacgcagtggtggtggta

SEQ ID NO: 5712365 - DNA, 25 bp, Homo sapien
cggcacgtccgctcactgcggcctg

SEQ ID NO: 5712366 - DNA, 25 bp, Homo sapien
caggccgcagtgagcggacgtgccg

SEQ ID NO: 5712367 - DNA, 25 bp, Homo sapien
cctctgtcgtagacacctgggtaca

SEQ ID NO: 5712368 - DNA, 25 bp, Homo sapien
tgtacccaggtgtctacgacagagg

SEQ ID NO: 5712369 - DNA, 25 bp, Homo sapien
cccctgtcacatagggtcacccacg

SEQ ID NO: 5712370 - DNA, 25 bp, Homo sapien
cgtgggtgaccctatgtgacagggg

SEQ ID NO: 5712371 - DNA, 25 bp, Homo sapien
gaaaattggatctaagactgaatca

SEQ ID NO: 5712372 - DNA, 25 bp, Homo sapien
tgattcagtcttagatccaattttc

SEQ ID NO: 5712373 - DNA, 25 bp, Homo sapien
gacttactgtacctctattctttaa

SEQ ID NO: 5712374 - DNA, 25 bp, Homo sapien
ttaaagaatagaggtacagtaagtc

SEQ ID NO: 5712375 - DNA, 25 bp, Homo sapien
ttcctcactcacctctcgcgacgta

SEQ ID NO: 5712376 - DNA, 25 bp, Homo sapien
tacgtcgcgagaggtgagtgaggaa

SEQ ID NO: 5712377 - DNA, 25 bp, Homo sapien
aacgtctagtctcgtgagttactgt

SEQ ID NO: 5712378 - DNA, 25 bp, Homo sapien
acagtaactcacgagactagacgtt

SEQ ID NO: 5712379 - DNA, 25 bp, Homo sapien
atcctccccataaatacatcctatt

SEQ ID NO: 5712380 - DNA, 25 bp, Homo sapien
aataggatgtatttatggggaggat

SEQ ID NO: 5712381 - DNA, 25 bp, Homo sapien
ccgaaaggagaatagtagtgtttac

SEQ ID NO: 5712382 - DNA, 25 bp, Homo sapien
gtaaacactactattctcctttcgg

SEQ ID NO: 5712383 - DNA, 25 bp, Homo sapien
ttctctactcttctgaaactgaaaa

SEQ ID NO: 5712384 - DNA, 25 bp, Homo sapien
ttttcagtttcagaagagtagagaa

SEQ ID NO: 5712385 - DNA, 25 bp, Homo sapien
tctactgtcatttctgaattaaaca

SEQ ID NO: 5712386 - DNA, 25 bp, Homo sapien
tgtttaattcagaaatgacagtaga

SEQ ID NO: 5712387 - DNA, 25 bp, Homo sapien
ctaagagtcttcagacggactgaaa

SEQ ID NO: 5712388 - DNA, 25 bp, Homo sapien
tttcagtccgtctgaagactcttag

SEQ ID NO: 5712389 - DNA, 25 bp, Homo sapien
ctctggagaacagtagtttgaaaaa

SEQ ID NO: 5712390 - DNA, 25 bp, Homo sapien
tttttcaaactactgttctccagag

SEQ ID NO: 5712391 - DNA, 25 bp, Homo sapien
gtcttgtaacgtgtcggacttttga

SEQ ID NO: 5712392 - DNA, 25 bp, Homo sapien
tcaaaagtccgacacgttacaagac

SEQ ID NO: 5712393 - DNA, 25 bp, Homo sapien
ctctcccgtcggatcggcgcggacg

SEQ ID NO: 5712394 - DNA, 25 bp, Homo sapien
cgtccgcgccgatccgacgggagag

SEQ ID NO: 5712395 - DNA, 25 bp, Homo sapien
accccagtttgtcgacatcctcttt

SEQ ID NO: 5712396 - DNA, 25 bp, Homo sapien
aaagaggatgtcgacaaactggggt

SEQ ID NO: 5712397 - DNA, 25 bp, Homo sapien
gccaccgttcgttctgggacgcccg

SEQ ID NO: 5712398 - DNA, 25 bp, Homo sapien
cgggcgtcccagaacgaacggtggc

SEQ ID NO: 5712399 - DNA, 25 bp, Homo sapien
tgccaccgttcgttctgggacgccc

SEQ ID NO: 5712400 - DNA, 25 bp, Homo sapien
gggcgtcccagaacgaacggtggca

SEQ ID NO: 5712401 - DNA, 25 bp, Homo sapien
cgcgggcgctcctcgggtccaaagg

SEQ ID NO: 5712402 - DNA, 25 bp, Homo sapien
cctttggacccgaggagcgcccgcg

SEQ ID NO: 5712403 - DNA, 25 bp, Homo sapien
acccaggactgggaaaccacgagtc

SEQ ID NO: 5712404 - DNA, 25 bp, Homo sapien
gactcgtggtttcccagtcctgggt

SEQ ID NO: 5712405 - DNA, 25 bp, Homo sapien
gttcgtgtgctcgattttacctcgg

SEQ ID NO: 5712406 - DNA, 25 bp, Homo sapien
ccgaggtaaaatcgagcacacgaac

SEQ ID NO: 5712407 - DNA, 25 bp, Homo sapien
tgaacccccggtcctgtggatactc

SEQ ID NO: 5712408 - DNA, 25 bp, Homo sapien
gagtatccacaggaccgggggttca

SEQ ID NO: 5712409 - DNA, 25 bp, Homo sapien
atcttgtgccccacagtagccatct

SEQ ID NO: 5712410 - DNA, 25 bp, Homo sapien
agatggctactgtggggcacaagat

SEQ ID NO: 5712411 - DNA, 25 bp, Homo sapien
gaaaagttctacattttgactcttg

SEQ ID NO: 5712412 - DNA, 25 bp, Homo sapien
caagagtcaaaatgtagaacttttc

SEQ ID NO: 5712413 - DNA, 25 bp, Homo sapien
tcttggtcaacgaagtccaaggtct

SEQ ID NO: 5712414 - DNA, 25 bp, Homo sapien
agaccttggacttcgttgaccaaga

SEQ ID NO: 5712415 - DNA, 25 bp, Homo sapien
ggccggtgaagagtcatttcccgta

SEQ ID NO: 5712416 - DNA, 25 bp, Homo sapien
tacgggaaatgactcttcaccggcc

SEQ ID NO: 5712417 - DNA, 25 bp, Homo sapien
aatctaactttatgtcagttatttt

SEQ ID NO: 5712418 - DNA, 25 bp, Homo sapien
aaaataactgacataaagttagatt

SEQ ID NO: 5712419 - DNA, 25 bp, Homo sapien
tattcatctccggtttaagtttaat

SEQ ID NO: 5712420 - DNA, 25 bp, Homo sapien
attaaacttaaaccggagatgaata

SEQ ID NO: 5712421 - DNA, 25 bp, Homo sapien
ttatcgacactaatttctatctccg

SEQ ID NO: 5712422 - DNA, 25 bp, Homo sapien
cggagatagaaattagtgtcgataa

SEQ ID NO: 5712423 - DNA, 25 bp, Homo sapien
aggacgaggaacgtacgagagagcg

SEQ ID NO: 5712424 - DNA, 25 bp, Homo sapien
cgctctctcgtacgttcctcgtcct

SEQ ID NO: 5712425 - DNA, 25 bp, Homo sapien
gtggagggtggaccgcgccgcggac

SEQ ID NO: 5712426 - DNA, 25 bp, Homo sapien
gtccgcggcgcggtccaccctccac

SEQ ID NO: 5712427 - DNA, 25 bp, Homo sapien
ggcacgatccgaggtggagggtgga

SEQ ID NO: 5712428 - DNA, 25 bp, Homo sapien
tccaccctccacctcggatcgtgcc

SEQ ID NO: 5712429 - DNA, 25 bp, Homo sapien
aaaggtgtgtctcataaaactaatt

SEQ ID NO: 5712430 - DNA, 25 bp, Homo sapien
aattagttttatgagacacaccttt

SEQ ID NO: 5712431 - DNA, 25 bp, Homo sapien
tattattttggtaagaacttgaact

SEQ ID NO: 5712432 - DNA, 25 bp, Homo sapien
agttcaagttcttaccaaaataata

SEQ ID NO: 5712433 - DNA, 25 bp, Homo sapien
ttcccatgcaacgactgctccacct

SEQ ID NO: 5712434 - DNA, 25 bp, Homo sapien
aggtggagcagtcgttgcatgggaa

SEQ ID NO: 5712435 - DNA, 25 bp, Homo sapien
gacgactaaaccgtccaaggctacg

SEQ ID NO: 5712436 - DNA, 25 bp, Homo sapien
cgtagccttggacggtttagtcgtc

SEQ ID NO: 5712437 - DNA, 25 bp, Homo sapien
taaaatcaacccttctataattaat

SEQ ID NO: 5712438 - DNA, 25 bp, Homo sapien
attaattatagaagggttgatttta

SEQ ID NO: 5712439 - DNA, 25 bp, Homo sapien
ataattaatcgactttgaatccttt

SEQ ID NO: 5712440 - DNA, 25 bp, Homo sapien
aaaggattcaaagtcgattaattat

SEQ ID NO: 5712441 - DNA, 25 bp, Homo sapien
aaaatcaggtaatagttaccagtat

SEQ ID NO: 5712442 - DNA, 25 bp, Homo sapien
atactggtaactattacctgatttt

SEQ ID NO: 5712443 - DNA, 25 bp, Homo sapien
ctcgtataaacttctacacgtataa

SEQ ID NO: 5712444 - DNA, 25 bp, Homo sapien
ttatacgtgtagaagtttatacgag

SEQ ID NO: 5712445 - DNA, 25 bp, Homo sapien
cttgtcgtgaccccaggcgtgaccg

SEQ ID NO: 5712446 - DNA, 25 bp, Homo sapien
cggtcacgcctggggtcacgacaag

SEQ ID NO: 5712447 - DNA, 25 bp, Homo sapien
gtggttcccgacaagggtcaggagg

SEQ ID NO: 5712448 - DNA, 25 bp, Homo sapien
cctcctgacccttgtcgggaaccac

SEQ ID NO: 5712449 - DNA, 25 bp, Homo sapien
tccgcgaccggcaccccactggccc

SEQ ID NO: 5712450 - DNA, 25 bp, Homo sapien
gggccagtggggtgccggtcgcgga

SEQ ID NO: 5712451 - DNA, 25 bp, Homo sapien
cgccattagtcacggagaaccaaag

SEQ ID NO: 5712452 - DNA, 25 bp, Homo sapien
ctttggttctccgtgactaatggcg

SEQ ID NO: 5712453 - DNA, 25 bp, Homo sapien
cctcatatcttaaggcgacttggat

SEQ ID NO: 5712454 - DNA, 25 bp, Homo sapien
atccaagtcgccttaagatatgagg

SEQ ID NO: 5712455 - DNA, 25 bp, Homo sapien
taaaacaatcttaagaaaaccacat

SEQ ID NO: 5712456 - DNA, 25 bp, Homo sapien
atgtggttttcttaagattgtttta

SEQ ID NO: 5712457 - DNA, 25 bp, Homo sapien
tcgagtcatgattagaccagctact

SEQ ID NO: 5712458 - DNA, 25 bp, Homo sapien
agtagctggtctaatcatgactcga

SEQ ID NO: 5712459 - DNA, 25 bp, Homo sapien
ctatgggaaacgactagacttagac

SEQ ID NO: 5712460 - DNA, 25 bp, Homo sapien
gtctaagtctagtcgtttcccatag

SEQ ID NO: 5712461 - DNA, 25 bp, Homo sapien
agtccaatataaatcggaccaccgc

SEQ ID NO: 5712462 - DNA, 25 bp, Homo sapien
gcggtggtccgatttatattggact

SEQ ID NO: 5712463 - DNA, 25 bp, Homo sapien
cgtcttcagtatcacggtctaccag

SEQ ID NO: 5712464 - DNA, 25 bp, Homo sapien
ctggtagaccgtgatactgaagacg

SEQ ID NO: 5712465 - DNA, 25 bp, Homo sapien
gattgtatgaggtatttggtcaaaa

SEQ ID NO: 5712466 - DNA, 25 bp, Homo sapien
ttttgaccaaatacctcatacaatc

SEQ ID NO: 5712467 - DNA, 25 bp, Homo sapien
caagactaactgtagattcagaggg

SEQ ID NO: 5712468 - DNA, 25 bp, Homo sapien
ccctctgaatctacagttagtcttg

SEQ ID NO: 5712469 - DNA, 25 bp, Homo sapien
gggcacgacacccagtcaggctccg

SEQ ID NO: 5712470 - DNA, 25 bp, Homo sapien
cggagcctgactgggtgtcgtgccc

SEQ ID NO: 5712471 - DNA, 25 bp, Homo sapien
cctcgtgaggtgctcttgttcctat

SEQ ID NO: 5712472 - DNA, 25 bp, Homo sapien
ataggaacaagagcacctcacgagg

SEQ ID NO: 5712473 - DNA, 25 bp, Homo sapien
acacaatgttcctcctggtaacgac

SEQ ID NO: 5712474 - DNA, 25 bp, Homo sapien
gtcgttaccaggaggaacattgtgt

SEQ ID NO: 5712475 - DNA, 25 bp, Homo sapien
cgggaactcagcgacacgatccttt

SEQ ID NO: 5712476 - DNA, 25 bp, Homo sapien
aaaggatcgtgtcgctgagttcccg

SEQ ID NO: 5712477 - DNA, 25 bp, Homo sapien
aaacgccctgggcatacaaacgagt

SEQ ID NO: 5712478 - DNA, 25 bp, Homo sapien
actcgtttgtatgcccagggcgttt

SEQ ID NO: 5712479 - DNA, 25 bp, Homo sapien
cctgaaggtcatttaaaggtccgag

SEQ ID NO: 5712480 - DNA, 25 bp, Homo sapien
ctcggacctttaaatgaccttcagg

SEQ ID NO: 5712481 - DNA, 25 bp, Homo sapien
cggcagtggacgagcgcctcctcga

SEQ ID NO: 5712482 - DNA, 25 bp, Homo sapien
tcgaggaggcgctcgtccactgccg

SEQ ID NO: 5712483 - DNA, 25 bp, Homo sapien
tatcctcggtttgtccggtcgacct

SEQ ID NO: 5712484 - DNA, 25 bp, Homo sapien
aggtcgaccggacaaaccgaggata

SEQ ID NO: 5712485 - DNA, 25 bp, Homo sapien
gcccctcccactcccacccgacgcg

SEQ ID NO: 5712486 - DNA, 25 bp, Homo sapien
cgcgtcgggtgggagtgggaggggc

SEQ ID NO: 5712487 - DNA, 25 bp, Homo sapien
acctccgcgatcccagggcaccccg

SEQ ID NO: 5712488 - DNA, 25 bp, Homo sapien
cggggtgccctgggatcgcggaggt

SEQ ID NO: 5712489 - DNA, 25 bp, Homo sapien
acagaccgaagaatcgaagggggta

SEQ ID NO: 5712490 - DNA, 25 bp, Homo sapien
tacccccttcgattcttcggtctgt

SEQ ID NO: 5712491 - DNA, 25 bp, Homo sapien
gcggcgcctcggaagggcggccgcc

SEQ ID NO: 5712492 - DNA, 25 bp, Homo sapien
ggcggccgcccttccgaggcgccgc

SEQ ID NO: 5712493 - DNA, 25 bp, Homo sapien
aaggtgaccgcgtccggcgacgggc

SEQ ID NO: 5712494 - DNA, 25 bp, Homo sapien
gcccgtcgccggacgcggtcacctt

SEQ ID NO: 5712495 - DNA, 25 bp, Homo sapien
agtataccaacgacggaagaagact

SEQ ID NO: 5712496 - DNA, 25 bp, Homo sapien
agtcttcttccgtcgttggtatact

SEQ ID NO: 5712497 - DNA, 25 bp, Homo sapien
ttctataaagaggaaagtttcagta

SEQ ID NO: 5712498 - DNA, 25 bp, Homo sapien
tactgaaactttcctctttatagaa

SEQ ID NO: 5712499 - DNA, 25 bp, Homo sapien
aaaaagccaggtaggactcgtgatg

SEQ ID NO: 5712500 - DNA, 25 bp, Homo sapien
catcacgagtcctacctggcttttt

SEQ ID NO: 5712501 - DNA, 25 bp, Homo sapien
gacgccaccggggccgcacgagtcc

SEQ ID NO: 5712502 - DNA, 25 bp, Homo sapien
ggactcgtgcggccccggtggcgtc

SEQ ID NO: 5712503 - DNA, 25 bp, Homo sapien
gggtactttatagtcctcccactaa

SEQ ID NO: 5712504 - DNA, 25 bp, Homo sapien
ttagtgggaggactataaagtaccc

SEQ ID NO: 5712505 - DNA, 25 bp, Homo sapien
gcgacatttctatttctctacaaaa

SEQ ID NO: 5712506 - DNA, 25 bp, Homo sapien
ttttgtagagaaatagaaatgtcgc

SEQ ID NO: 5712507 - DNA, 25 bp, Homo sapien
acggtcacgtgtgctctcgtccagg

SEQ ID NO: 5712508 - DNA, 25 bp, Homo sapien
cctggacgagagcacacgtgaccgt

SEQ ID NO: 5712509 - DNA, 25 bp, Homo sapien
cgaaaggaccggagccgccacacct

SEQ ID NO: 5712510 - DNA, 25 bp, Homo sapien
aggtgtggcggctccggtcctttcg

SEQ ID NO: 5712511 - DNA, 25 bp, Homo sapien
ttttctctagaagtagtatctacgt

SEQ ID NO: 5712512 - DNA, 25 bp, Homo sapien
acgtagatactacttctagagaaaa

SEQ ID NO: 5712513 - DNA, 25 bp, Homo sapien
ggtcagacaggatacccctcgtcaa

SEQ ID NO: 5712514 - DNA, 25 bp, Homo sapien
ttgacgaggggtatcctgtctgacc

SEQ ID NO: 5712515 - DNA, 25 bp, Homo sapien
ctgaatattactgtttaccaataat

SEQ ID NO: 5712516 - DNA, 25 bp, Homo sapien
attattggtaaacagtaatattcag

SEQ ID NO: 5712517 - DNA, 25 bp, Homo sapien
attcatctgaatattactgtttacc

SEQ ID NO: 5712518 - DNA, 25 bp, Homo sapien
ggtaaacagtaatattcagatgaat

SEQ ID NO: 5712519 - DNA, 25 bp, Homo sapien
gacccagtcgggaccacgcctcctc

SEQ ID NO: 5712520 - DNA, 25 bp, Homo sapien
gaggaggcgtggtcccgactgggtc

SEQ ID NO: 5712521 - DNA, 25 bp, Homo sapien
gtgacttttacagcccgtccagaac

SEQ ID NO: 5712522 - DNA, 25 bp, Homo sapien
gttctggacgggctgtaaaagtcac

SEQ ID NO: 5712523 - DNA, 25 bp, Homo sapien
cggtgtagatgcatgagtgtgtttt

SEQ ID NO: 5712524 - DNA, 25 bp, Homo sapien
aaaacacactcatgcatctacaccg

SEQ ID NO: 5712525 - DNA, 25 bp, Homo sapien
ggtgactcccagaccttcctctcga

SEQ ID NO: 5712526 - DNA, 25 bp, Homo sapien
tcgagaggaaggtctgggagtcacc

SEQ ID NO: 5712527 - DNA, 25 bp, Homo sapien
gacggtgttcggaggtgactcccag

SEQ ID NO: 5712528 - DNA, 25 bp, Homo sapien
ctgggagtcacctccgaacaccgtc

SEQ ID NO: 5712529 - DNA, 25 bp, Homo sapien
gaggtggagcgtgtacgcccgccgg

SEQ ID NO: 5712530 - DNA, 25 bp, Homo sapien
ccggcgggcgtacacgctccacctc

SEQ ID NO: 5712531 - DNA, 25 bp, Homo sapien
cgtccagagggtaaagtggacgaaa

SEQ ID NO: 5712532 - DNA, 25 bp, Homo sapien
tttcgtccactttaccctctggacg

SEQ ID NO: 5712533 - DNA, 25 bp, Homo sapien
catcggtgagatattccatcatcat

SEQ ID NO: 5712534 - DNA, 25 bp, Homo sapien
atgatgatggaatatctcaccgatg

SEQ ID NO: 5712535 - DNA, 25 bp, Homo sapien
atttatcgctcgtaaatttcgaaag

SEQ ID NO: 5712536 - DNA, 25 bp, Homo sapien
ctttcgaaatttacgagcgataaat

SEQ ID NO: 5712537 - DNA, 25 bp, Homo sapien
aaggaacactaaatacacggttgac

SEQ ID NO: 5712538 - DNA, 25 bp, Homo sapien
gtcaaccgtgtatttagtgttcctt

SEQ ID NO: 5712539 - DNA, 25 bp, Homo sapien
agtgacttaagacatttctggataa

SEQ ID NO: 5712540 - DNA, 25 bp, Homo sapien
ttatccagaaatgtcttaagtcact

SEQ ID NO: 5712541 - DNA, 25 bp, Homo sapien
ttatcgagaccctgtattaaagtag

SEQ ID NO: 5712542 - DNA, 25 bp, Homo sapien
ctactttaatacagggtctcgataa

SEQ ID NO: 5712543 - DNA, 25 bp, Homo sapien
caaatcggtgcaaactcttactaag

SEQ ID NO: 5712544 - DNA, 25 bp, Homo sapien
cttagtaagagtttgcaccgatttg

SEQ ID NO: 5712545 - DNA, 25 bp, Homo sapien
gacgcggagcctcgtcgggtgctcg

SEQ ID NO: 5712546 - DNA, 25 bp, Homo sapien
cgagcacccgacgaggctccgcgtc

SEQ ID NO: 5712547 - DNA, 25 bp, Homo sapien
ggttcccgaatatgaggccctccct

SEQ ID NO: 5712548 - DNA, 25 bp, Homo sapien
agggagggcctcatattcgggaacc

SEQ ID NO: 5712549 - DNA, 25 bp, Homo sapien
ttatattagtaattccattatcagt

SEQ ID NO: 5712550 - DNA, 25 bp, Homo sapien
actgataatggaattactaatataa

SEQ ID NO: 5712551 - DNA, 25 bp, Homo sapien
attatattagtaattccattatcag

SEQ ID NO: 5712552 - DNA, 25 bp, Homo sapien
ctgataatggaattactaatataat

SEQ ID NO: 5712553 - DNA, 25 bp, Homo sapien
gatattatattagtaattccattat

SEQ ID NO: 5712554 - DNA, 25 bp, Homo sapien
ataatggaattactaatataatatc

SEQ ID NO: 5712555 - DNA, 25 bp, Homo sapien
atgtccgaagcattttgtaacgacg

SEQ ID NO: 5712556 - DNA, 25 bp, Homo sapien
cgtcgttacaaaatgcttcggacat

SEQ ID NO: 5712557 - DNA, 25 bp, Homo sapien
gcttagactgagtccacaactctaa

SEQ ID NO: 5712558 - DNA, 25 bp, Homo sapien
ttagagttgtggactcagtctaagc

SEQ ID NO: 5712559 - DNA, 25 bp, Homo sapien
agatttataagataattaagtctct

SEQ ID NO: 5712560 - DNA, 25 bp, Homo sapien
agagacttaattatcttataaatct

SEQ ID NO: 5712561 - DNA, 25 bp, Homo sapien
acgtgtttctgttcatcttaagtag

SEQ ID NO: 5712562 - DNA, 25 bp, Homo sapien
ctacttaagatgaacagaaacacgt

SEQ ID NO: 5712563 - DNA, 25 bp, Homo sapien
agagttgacctctataacagcgaag

SEQ ID NO: 5712564 - DNA, 25 bp, Homo sapien
cttcgctgttatagaggtcaactct

SEQ ID NO: 5712565 - DNA, 25 bp, Homo sapien
cgtaacctgagacgacagccgtaat

SEQ ID NO: 5712566 - DNA, 25 bp, Homo sapien
attacggctgtcgtctcaggttacg

SEQ ID NO: 5712567 - DNA, 25 bp, Homo sapien
accgacgaaagtgactcggatgagg

SEQ ID NO: 5712568 - DNA, 25 bp, Homo sapien
cctcatccgagtcactttcgtcggt

SEQ ID NO: 5712569 - DNA, 25 bp, Homo sapien
acttgacggtgttctgagaatagaa

SEQ ID NO: 5712570 - DNA, 25 bp, Homo sapien
ttctattctcagaacaccgtcaagt

SEQ ID NO: 5712571 - DNA, 25 bp, Homo sapien
aacctctacgacttaaccactaatc

SEQ ID NO: 5712572 - DNA, 25 bp, Homo sapien
gattagtggttaagtcgtagaggtt

SEQ ID NO: 5712573 - DNA, 25 bp, Homo sapien
agtggcatctccaggtgcaaggtga

SEQ ID NO: 5712574 - DNA, 25 bp, Homo sapien
tcaccttgcacctggagatgccact

SEQ ID NO: 5712575 - DNA, 25 bp, Homo sapien
agtcggggtcagtatctcgacttga

SEQ ID NO: 5712576 - DNA, 25 bp, Homo sapien
tcaagtcgagatactgaccccgact

SEQ ID NO: 5712577 - DNA, 25 bp, Homo sapien
gacgtaaattttgtgtgttggtgtc

SEQ ID NO: 5712578 - DNA, 25 bp, Homo sapien
gacaccaacacacaaaatttacgtc

SEQ ID NO: 5712579 - DNA, 25 bp, Homo sapien
gaagtctgggtcacgggacataaag

SEQ ID NO: 5712580 - DNA, 25 bp, Homo sapien
ctttatgtcccgtgacccagacttc

SEQ ID NO: 5712581 - DNA, 25 bp, Homo sapien
agttagtttgcgactatgataaagt

SEQ ID NO: 5712582 - DNA, 25 bp, Homo sapien
actttatcatagtcgcaaactaact

SEQ ID NO: 5712583 - DNA, 25 bp, Homo sapien
ggagaagaacggcttgactttccca

SEQ ID NO: 5712584 - DNA, 25 bp, Homo sapien
gtacaaggtgttcgtggttggcgag

SEQ ID NO: 5712585 - DNA, 25 bp, Homo sapien
agctacttgggaggctgaggcagga

SEQ ID NO: 5712586 - DNA, 25 bp, Homo sapien
ccgcccttctcggcgggcagcgcgc

SEQ ID NO: 5712587 - DNA, 25 bp, Homo sapien
tccctagaaactctggccgggcatg

SEQ ID NO: 5712588 - DNA, 25 bp, Homo sapien
acagagcaagactcctcaaaaaaca

SEQ ID NO: 5712589 - DNA, 25 bp, Homo sapien
tgagatacagacaccatggcttctg

SEQ ID NO: 5712590 - DNA, 25 bp, Homo sapien
cattgacatcaatgccttcccaggg

SEQ ID NO: 5712591 - DNA, 25 bp, Homo sapien
ccccgcccaggcataagcctgactc

SEQ ID NO: 5712592 - DNA, 25 bp, Homo sapien
tggcgagtcctacaccgtggtccag

SEQ ID NO: 5712593 - DNA, 25 bp, Homo sapien
tcctccccttgtgagaaagggtctg

SEQ ID NO: 5712594 - DNA, 25 bp, Homo sapien
tatttgctaactagtcttgttttga

SEQ ID NO: 5712595 - DNA, 25 bp, Homo sapien
aggccagcctggccacaccccgatg

SEQ ID NO: 5712596 - DNA, 25 bp, Homo sapien
agcctcccgcactgctcaggggaga

SEQ ID NO: 5712597 - DNA, 25 bp, Homo sapien
ctctggccgggcatggcggctcacg

SEQ ID NO: 5712598 - DNA, 25 bp, Homo sapien
accgggaggcagagaagtgcagctg

SEQ ID NO: 5712599 - DNA, 25 bp, Homo sapien
gaatgatagccagtccctggagctg

SEQ ID NO: 5712600 - DNA, 25 bp, Homo sapien
tgtatgagatacagacaccatggct

SEQ ID NO: 5712601 - DNA, 25 bp, Homo sapien
gcctgtagtcccagctacttgggag

SEQ ID NO: 5712602 - DNA, 25 bp, Homo sapien
acctctcagaagctcactctgaaaa

SEQ ID NO: 5712603 - DNA, 25 bp, Homo sapien
gaaccttagccggccgatcgaggag

SEQ ID NO: 5712604 - DNA, 25 bp, Homo sapien
gcataagcctgactcaggtgataca

SEQ ID NO: 5712605 - DNA, 25 bp, Homo sapien
tcccttcaagagtcatctgtgacct

SEQ ID NO: 5712606 - DNA, 25 bp, Homo sapien
agaaccctgcttgaccgctccaagt

SEQ ID NO: 5712607 - DNA, 25 bp, Homo sapien
cctgggctttgtgacaaatgctgtt

SEQ ID NO: 5712608 - DNA, 25 bp, Homo sapien
tggagtacagttaatgttgtgttta

SEQ ID NO: 5712609 - DNA, 25 bp, Homo sapien
ggtggtttcagggacaaggtgtcgc

SEQ ID NO: 5712610 - DNA, 25 bp, Homo sapien
ctctgctgcctcaggccagcctggc

SEQ ID NO: 5712611 - DNA, 25 bp, Homo sapien
gcttcactaatgtccctggggtctg

SEQ ID NO: 5712612 - DNA, 25 bp, Homo sapien
cggtctagtggagtacagttaatgt

SEQ ID NO: 5712613 - DNA, 25 bp, Homo sapien
gacaaggtgtcgctgtgatctctgt

SEQ ID NO: 5712614 - DNA, 25 bp, Homo sapien
aaccctgcttgaccgctccaagtcc

SEQ ID NO: 5712615 - DNA, 25 bp, Homo sapien
ttctctctgcacagccattgtcagt

SEQ ID NO: 5712616 - DNA, 25 bp, Homo sapien
atcgtgttcaaccaggagggcctga

SEQ ID NO: 5712617 - DNA, 25 bp, Homo sapien
tgtccttctagcctggaagaccagt

SEQ ID NO: 5712618 - DNA, 25 bp, Homo sapien
aacaaccagacagggcagcacgccg

SEQ ID NO: 5712619 - DNA, 25 bp, Homo sapien
cacatcagaccgtgagtccatcttc

SEQ ID NO: 5712620 - DNA, 25 bp, Homo sapien
cagcctggtgaccgggaggcagaga

SEQ ID NO: 5712621 - DNA, 25 bp, Homo sapien
cgaccagaatgatagccagtccctg

SEQ ID NO: 5712622 - DNA, 25 bp, Homo sapien
tccaagtcctatgagctcatccgga

SEQ ID NO: 5712623 - DNA, 25 bp, Homo sapien
atgcccaccctgagaccatcgtcct

SEQ ID NO: 5712624 - DNA, 25 bp, Homo sapien
atgagctcatccggaagattgaggc

SEQ ID NO: 5712625 - DNA, 25 bp, Homo sapien
gccagtccctggagctggtgcacag

SEQ ID NO: 5712626 - DNA, 25 bp, Homo sapien
gccctctcttctattccctagaaac

SEQ ID NO: 5712627 - DNA, 25 bp, Homo sapien
cgaggaccaggccgaggaggaagtg

SEQ ID NO: 5712628 - DNA, 25 bp, Homo sapien
ctgtcccctcctacagcctggccga

SEQ ID NO: 5712629 - DNA, 25 bp, Homo sapien
gatcattcacccggtgggatccccg

SEQ ID NO: 5712630 - DNA, 25 bp, Homo sapien
agatgcagacctttctgaaagggaa

SEQ ID NO: 5712631 - DNA, 25 bp, Homo sapien
tccttctagcctggaagaccagttc

SEQ ID NO: 5712632 - DNA, 25 bp, Homo sapien
ggcaacagagcaagactcctcaaaa

SEQ ID NO: 5712633 - DNA, 25 bp, Homo sapien
caggtgatacaggcgaggcttctcc

SEQ ID NO: 5712634 - DNA, 25 bp, Homo sapien
acggagctggacaagatcgagggcg

SEQ ID NO: 5712635 - DNA, 25 bp, Homo sapien
aacggtctagtggagtacagttaat

SEQ ID NO: 5712636 - DNA, 25 bp, Homo sapien
cagtcatctgccccgcccaggcata

SEQ ID NO: 5712637 - DNA, 25 bp, Homo sapien
cgctccctgccatcagaaccctgct

SEQ ID NO: 5712638 - DNA, 25 bp, Homo sapien
ctcaagaacttctccgcaggcacat

SEQ ID NO: 5712639 - DNA, 25 bp, Homo sapien
gtacagttaatgttgtgtttatttc

SEQ ID NO: 5712640 - DNA, 25 bp, Homo sapien
aagaccagttcttggctcttgggca

SEQ ID NO: 5712641 - DNA, 25 bp, Homo sapien
gctgccctaaaggagcacgacccct

SEQ ID NO: 5712642 - DNA, 25 bp, Homo sapien
cttcccgagctgtggctcatgggcc

SEQ ID NO: 5712643 - DNA, 25 bp, Homo sapien
gaggcgtaggttgcagtgagccaag

SEQ ID NO: 5712644 - DNA, 25 bp, Homo sapien
cctacatggaagacgacaggatctg

SEQ ID NO: 5712645 - DNA, 25 bp, Homo sapien
catccgggagctctcccgggccctg

SEQ ID NO: 5712646 - DNA, 25 bp, Homo sapien
tccatcttcttcaacagccacaacg

SEQ ID NO: 5712647 - DNA, 25 bp, Homo sapien
gggatggaggttgtgcagctgaacc

SEQ ID NO: 5712648 - DNA, 25 bp, Homo sapien
ggcctgaacgccatccagccaccct

SEQ ID NO: 5712649 - DNA, 25 bp, Homo sapien
aggcagagaagtgcagctgtccttg

SEQ ID NO: 5712650 - DNA, 25 bp, Homo sapien
agtgagtgagcctcccgcactgctc

SEQ ID NO: 5712651 - DNA, 25 bp, Homo sapien
ttgaactcgggaggcgtaggttgca

SEQ ID NO: 5712652 - DNA, 25 bp, Homo sapien
tgcgggtggctttgggatgggtggt

SEQ ID NO: 5712653 - DNA, 25 bp, Homo sapien
acagcctggccgacccccttcctcc

SEQ ID NO: 5712654 - DNA, 25 bp, Homo sapien
aagccggagtcgtcatcggtcctga

SEQ ID NO: 5712655 - DNA, 25 bp, Homo sapien
ttacattttcccttcaagagtcatc

SEQ ID NO: 5712656 - DNA, 25 bp, Homo sapien
catgaagaaataaacaatagcgcca

SEQ ID NO: 5712657 - DNA, 25 bp, Homo sapien
caaatgctgtttgcttcaagctgtt

SEQ ID NO: 5712658 - DNA, 25 bp, Homo sapien
tggaagaccgactgaagtaggaagc

SEQ ID NO: 5712659 - DNA, 25 bp, Homo sapien
agcctggccgacccccttcctccag

SEQ ID NO: 5712660 - DNA, 25 bp, Homo sapien
gattgaggcctacatggaagacgac

SEQ ID NO: 5712661 - DNA, 25 bp, Homo sapien
catgaccatgtatgagatacagaca

SEQ ID NO: 5712662 - DNA, 25 bp, Homo sapien
gagggatggaggttgtgcagctgaa

SEQ ID NO: 5712663 - DNA, 25 bp, Homo sapien
cttttcagaaatgattacattttcc

SEQ ID NO: 5712664 - DNA, 25 bp, Homo sapien
ctggacgtcatcatccacaagctga

SEQ ID NO: 5712665 - DNA, 25 bp, Homo sapien
tggaagacgacaggatctgctcgcc

SEQ ID NO: 5712666 - DNA, 25 bp, Homo sapien
gtacatcgatgcccaccctgagacc

SEQ ID NO: 5712667 - DNA, 25 bp, Homo sapien
gcccaccctgagaccatcgtcctgg

SEQ ID NO: 5712668 - DNA, 25 bp, Homo sapien
aaagcagctgttgcctgccagacag

SEQ ID NO: 5712669 - DNA, 25 bp, Homo sapien
cgggccctgcggcaggcactgggcg

SEQ ID NO: 5712670 - DNA, 25 bp, Homo sapien
caagaacttctccgcaggcacatca

SEQ ID NO: 5712671 - DNA, 25 bp, Homo sapien
cctacaccgtggtccagaggccctc

SEQ ID NO: 5712672 - DNA, 25 bp, Homo sapien
tgggatccccggcagctccttctcc

SEQ ID NO: 5712673 - DNA, 25 bp, Homo sapien
gacagggcagcacgccgtcattgac

SEQ ID NO: 5712674 - DNA, 25 bp, Homo sapien
cagactcggcctgtgggcgatttcc

SEQ ID NO: 5712675 - DNA, 25 bp, Homo sapien
tcatgggccattggattcagagacc

SEQ ID NO: 5712676 - DNA, 25 bp, Homo sapien
tcccatgggtcctccccttgtgaga

SEQ ID NO: 5712677 - DNA, 25 bp, Homo sapien
gaccaagggagccagcctgtcgttt

SEQ ID NO: 5712678 - DNA, 25 bp, Homo sapien
gtgctttatagaaggctggaagacc

SEQ ID NO: 5712679 - DNA, 25 bp, Homo sapien
ccctggagctggtgcacaggttcca

SEQ ID NO: 5712680 - DNA, 25 bp, Homo sapien
gctgctggagaagaacggcttgact

SEQ ID NO: 5712681 - DNA, 25 bp, Homo sapien
ctccccgcccgaggaggaagatgca

SEQ ID NO: 5712682 - DNA, 25 bp, Homo sapien
ggggagagctggtgagcatgactcc

SEQ ID NO: 5712683 - DNA, 25 bp, Homo sapien
ggctttgggatgggtggtttcaggg

SEQ ID NO: 5712684 - DNA, 25 bp, Homo sapien
atcccaagctggttcgtacttaatt

SEQ ID NO: 5712685 - DNA, 25 bp, Homo sapien
gtgcagctgaaccttagccggccga

SEQ ID NO: 5712686 - DNA, 25 bp, Homo sapien
gagggcgtgttcgagcggccgagcg

SEQ ID NO: 5712687 - DNA, 25 bp, Homo sapien
ggacgtcatcatccacaagctgact

SEQ ID NO: 5712688 - DNA, 25 bp, Homo sapien
caggctccccgcccgaggaggaaga

SEQ ID NO: 5712689 - DNA, 25 bp, Homo sapien
ttgcttgaactcgggaggcgtaggt

SEQ ID NO: 5712690 - DNA, 25 bp, Homo sapien
agcacccagacccccccttttcaga

SEQ ID NO: 5712691 - DNA, 25 bp, Homo sapien
aatgctgtttgcttcaagctgttca

SEQ ID NO: 5712692 - DNA, 25 bp, Homo sapien
tgagccaactgagcaaagcagctgt

SEQ ID NO: 5712693 - DNA, 25 bp, Homo sapien
gacctggtggtgtggagggactgtc

SEQ ID NO: 5712694 - DNA, 25 bp, Homo sapien
attcacccggtgggatccccggcag

SEQ ID NO: 5712695 - DNA, 25 bp, Homo sapien
gtagtcccagctacttgggaggctg

SEQ ID NO: 5712696 - DNA, 25 bp, Homo sapien
gatgttgctgttcctgccgacacct

SEQ ID NO: 5712697 - DNA, 25 bp, Homo sapien
ggaggaagtggcggcggcggcggcg

SEQ ID NO: 5712698 - DNA, 25 bp, Homo sapien
tccttctccttcccgagctgtggct

SEQ ID NO: 5712699 - DNA, 25 bp, Homo sapien
tgtcagtgtggtttggagtgagtga

SEQ ID NO: 5712700 - DNA, 25 bp, Homo sapien
ttggattcagagaccttgagctggg

SEQ ID NO: 5712701 - DNA, 25 bp, Homo sapien
ctgtgatctctgtatttgctaacta

SEQ ID NO: 5712702 - DNA, 25 bp, Homo sapien
agactcctcaaaaaacaaacaaaca

SEQ ID NO: 5712703 - DNA, 25 bp, Homo sapien
acgcctgtcatcccagcacttaggg

SEQ ID NO: 5712704 - DNA, 25 bp, Homo sapien
aggaagatgcagacctttctgaaag

SEQ ID NO: 5712705 - DNA, 25 bp, Homo sapien
agctgttcacaagcaacttcaccag

SEQ ID NO: 5712706 - DNA, 25 bp, Homo sapien
atggagctcacgagcctgtgcgggg

SEQ ID NO: 5712707 - DNA, 25 bp, Homo sapien
ccgtcattgacatcaatgccttccc

SEQ ID NO: 5712708 - DNA, 25 bp, Homo sapien
tgacgtcatccttgaagccgaccag

SEQ ID NO: 5712709 - DNA, 25 bp, Homo sapien
ccatcctggccaacatggtgaaacc

SEQ ID NO: 5712710 - DNA, 25 bp, Homo sapien
atttctgtaactgtaggggtggagt

SEQ ID NO: 5712711 - DNA, 25 bp, Homo sapien
gcgatttcctccggacccaggctcc

SEQ ID NO: 5712712 - DNA, 25 bp, Homo sapien
ggaagattgaggcctacatggaaga

SEQ ID NO: 5712713 - DNA, 25 bp, Homo sapien
atatgcataatatacatgaccatgt

SEQ ID NO: 5712714 - DNA, 25 bp, Homo sapien
tcgtcctggacccgctccctgccat

SEQ ID NO: 5712715 - DNA, 25 bp, Homo sapien
acatacatatgcataatatacatga

SEQ ID NO: 5712716 - DNA, 25 bp, Homo sapien
tgaagccgaccagaatgatagccag

SEQ ID NO: 5712717 - DNA, 25 bp, Homo sapien
tgcgtggtccagaatttcatcaacc

SEQ ID NO: 5712718 - DNA, 25 bp, Homo sapien
agcacttagggaggccgaggcaggt

SEQ ID NO: 5712719 - DNA, 25 bp, Homo sapien
tggttggcgagtcctacaccgtggt

SEQ ID NO: 5712720 - DNA, 25 bp, Homo sapien
tgccccgcccaggcataagcctgac

SEQ ID NO: 5712721 - DNA, 25 bp, Homo sapien
agaacttctccgcaggcacatcaga

SEQ ID NO: 5712722 - DNA, 25 bp, Homo sapien
tatagaaggctggaagaccgactga

SEQ ID NO: 5712723 - DNA, 25 bp, Homo sapien
gttcactccatgaggttaggacact

SEQ ID NO: 5712724 - DNA, 25 bp, Homo sapien
gggaggccgaggcaggtggatcaca

SEQ ID NO: 5712725 - DNA, 25 bp, Homo sapien
ccttgtgagaaagggtctgtgctgt

SEQ ID NO: 5712726 - DNA, 25 bp, Homo sapien
ccaagggagccagcctgtcgtttgt

SEQ ID NO: 5712727 - DNA, 25 bp, Homo sapien
ctggccacaccccgatgccacagtc

SEQ ID NO: 5712728 - DNA, 25 bp, Homo sapien
ttgacatcaatgccttcccagggga

SEQ ID NO: 5712729 - DNA, 25 bp, Homo sapien
gactgcgcgccccagctccgatccc

SEQ ID NO: 5712730 - DNA, 25 bp, Homo sapien
cgggaggcagagaagtgcagctgtc

SEQ ID NO: 5712731 - DNA, 25 bp, Homo sapien
ctgaggcaggagaattgcttgaact

SEQ ID NO: 5712732 - DNA, 25 bp, Homo sapien
ctcacgagatggctatcgtgttcaa

SEQ ID NO: 5712733 - DNA, 25 bp, Homo sapien
cctccagcctggtgaccgggaggca

SEQ ID NO: 5712734 - DNA, 25 bp, Homo sapien
agaccgactgaagtaggaagctgtc

SEQ ID NO: 5712735 - DNA, 25 bp, Homo sapien
cccccttcctccagggctgtgtgga

SEQ ID NO: 5712736 - DNA, 25 bp, Homo sapien
ctgctgaatggcttcactaatgtcc

SEQ ID NO: 5712737 - DNA, 25 bp, Homo sapien
ctcccgggccctgcggcaggcactg

SEQ ID NO: 5712738 - DNA, 25 bp, Homo sapien
ctttgggatgggtggtttcagggac

SEQ ID NO: 5712739 - DNA, 25 bp, Homo sapien
gggaagagagttggctactggctga

SEQ ID NO: 5712740 - DNA, 25 bp, Homo sapien
ctgaaccttagccggccgatcgagg

SEQ ID NO: 5712741 - DNA, 25 bp, Homo sapien
tccgatccccgttccgcgtccccgc

SEQ ID NO: 5712742 - DNA, 25 bp, Homo sapien
ccgcaactgctgaatggcttcacta

SEQ ID NO: 5712743 - DNA, 25 bp, Homo sapien
cgccgggaggaggtgcccactcgct

SEQ ID NO: 5712744 - DNA, 25 bp, Homo sapien
aacagccacaacgtgtcaaagccgg

SEQ ID NO: 5712745 - DNA, 25 bp, Homo sapien
atgcagacctttctgaaagggaaga

SEQ ID NO: 5712746 - DNA, 25 bp, Homo sapien
acgccgtcctgtacaaggtgttcgt

SEQ ID NO: 5712747 - DNA, 25 bp, Homo sapien
cctgagaccatcgtcctggacccgc

SEQ ID NO: 5712748 - DNA, 25 bp, Homo sapien
cacgagcctgtgcggggatgacacc

SEQ ID NO: 5712749 - DNA, 25 bp, Homo sapien
tggtttggagtgagtgagcctcccg

SEQ ID NO: 5712750 - DNA, 25 bp, Homo sapien
taccttctctctgcacagccattgt

SEQ ID NO: 5712751 - DNA, 25 bp, Homo sapien
tggctcatgggccattggattcaga

SEQ ID NO: 5712752 - DNA, 25 bp, Homo sapien
gcaaagcagctgttgcctgccagac

SEQ ID NO: 5712753 - DNA, 25 bp, Homo sapien
cttctccttcccgagctgtggctca

SEQ ID NO: 5712754 - DNA, 25 bp, Homo sapien
cagaagctcactctgaaaagccact

SEQ ID NO: 5712755 - DNA, 25 bp, Homo sapien
tttcatcaaccacaacgccgtcctg

SEQ ID NO: 5712756 - DNA, 25 bp, Homo sapien
ccggaagattgaggcctacatggaa

SEQ ID NO: 5712757 - DNA, 25 bp, Homo sapien
tccttgaagccgaccagaatgatag

SEQ ID NO: 5712758 - DNA, 25 bp, Homo sapien
tcttgggcactcacattggccactg

SEQ ID NO: 5712759 - DNA, 25 bp, Homo sapien
ctggcaacagagcaagactcctcaa

SEQ ID NO: 5712760 - DNA, 25 bp, Homo sapien
tgccgacacctgggctttgtgacaa

SEQ ID NO: 5712761 - DNA, 25 bp, Homo sapien
taatttgtatacatacatatgcata

SEQ ID NO: 5712762 - DNA, 25 bp, Homo sapien
cgcgcgaggaccaggccgaggagga

SEQ ID NO: 5712763 - DNA, 25 bp, Homo sapien
tgatttctaacggtctagtggagta

SEQ ID NO: 5712764 - DNA, 25 bp, Homo sapien
gacccctccagcctggtgaccggga

SEQ ID NO: 5712765 - DNA, 25 bp, Homo sapien
aagaccaagggagccagcctgtcgt

SEQ ID NO: 5712766 - DNA, 25 bp, Homo sapien
cccccccttttcagaaatgattaca

SEQ ID NO: 5712767 - DNA, 25 bp, Homo sapien
agccaactgagcaaagcagctgttg

SEQ ID NO: 5712768 - DNA, 25 bp, Homo sapien
gacgaggtcatccgggagctctccc

SEQ ID NO: 5712769 - DNA, 25 bp, Homo sapien
ggtgaaaccccatctctactaaaaa

SEQ ID NO: 5712770 - DNA, 25 bp, Homo sapien
gccggagtcgtcatcggtcctgacg

SEQ ID NO: 5712771 - DNA, 25 bp, Homo sapien
acatcgatgcccaccctgagaccat

SEQ ID NO: 5712772 - DNA, 25 bp, Homo sapien
aacaaacaaactctgatcattcacc

SEQ ID NO: 5712773 - DNA, 25 bp, Homo sapien
ccaagatcgcaccactgcactccag

SEQ ID NO: 5712774 - DNA, 25 bp, Homo sapien
tcctgtacaaggtgttcgtggttgg

SEQ ID NO: 5712775 - DNA, 25 bp, Homo sapien
tcctccagggctgtgtggaatcacc

SEQ ID NO: 5712776 - DNA, 25 bp, Homo sapien
taaacaatagcgccagccgttaaaa

SEQ ID NO: 5712777 - DNA, 25 bp, Homo sapien
tcacaaggtcaagagatcgacacca

SEQ ID NO: 5712778 - DNA, 25 bp, Homo sapien
ggttcgtacttaatttgtatacata

SEQ ID NO: 5712779 - DNA, 25 bp, Homo sapien
gctgaatggcttcactaatgtccct

SEQ ID NO: 5712780 - DNA, 25 bp, Homo sapien
tgagaccatcgtcctggacccgctc

SEQ ID NO: 5712781 - DNA, 25 bp, Homo sapien
gaggaggaagatgcagacctttctg

SEQ ID NO: 5712782 - DNA, 25 bp, Homo sapien
atggctatcgtgttcaaccaggagg

SEQ ID NO: 5712783 - DNA, 25 bp, Homo sapien
ggacaagatcgagggcgtgttcgag

SEQ ID NO: 5712784 - DNA, 25 bp, Homo sapien
ctgtacaaggtgttcgtggttggcg

SEQ ID NO: 5712785 - DNA, 25 bp, Homo sapien
agtggctcatggcaccaactctcac

SEQ ID NO: 5712786 - DNA, 25 bp, Homo sapien
tttgctaactagtcttgttttgatt

SEQ ID NO: 5712787 - DNA, 25 bp, Homo sapien
gaggcctacatggaagacgacagga

SEQ ID NO: 5712788 - DNA, 25 bp, Homo sapien
aagtgcagctgtccttgacaaaggc

SEQ ID NO: 5712789 - DNA, 25 bp, Homo sapien
agcacgccgtcattgacatcaatgc

SEQ ID NO: 5712790 - DNA, 25 bp, Homo sapien
catggaagacgacaggatctgctcg

SEQ ID NO: 5712791 - DNA, 25 bp, Homo sapien
tccagcctggcaacagagcaagact

SEQ ID NO: 5712792 - DNA, 25 bp, Homo sapien
ggccctcactcaagaacttctccgc

SEQ ID NO: 5712793 - DNA, 25 bp, Homo sapien
accgtgagtccatcttcttcaacag

SEQ ID NO: 5712794 - DNA, 25 bp, Homo sapien
gctcgccgccgcccttctcggcggg

SEQ ID NO: 5712795 - DNA, 25 bp, Homo sapien
actgaagtaggaagctgtcacatgt

SEQ ID NO: 5712796 - DNA, 25 bp, Homo sapien
cccttcctccagggctgtgtggaat

SEQ ID NO: 5712797 - DNA, 25 bp, Homo sapien
tgactccatggcctcctgctggttg

SEQ ID NO: 5712798 - DNA, 25 bp, Homo sapien
ccattgtcagtgtggtttggagtga

SEQ ID NO: 5712799 - DNA, 25 bp, Homo sapien
cagaggccctcactcaagaacttct

SEQ ID NO: 5712800 - DNA, 25 bp, Homo sapien
atggcggctcacgcctgtcatccca

SEQ ID NO: 5712801 - DNA, 25 bp, Homo sapien
gcccaggcataagcctgactcaggt

SEQ ID NO: 5712802 - DNA, 25 bp, Homo sapien
gtgctgtgtaccttctctctgcaca

SEQ ID NO: 5712803 - DNA, 25 bp, Homo sapien
aaaattagctggacatggtggtggg

SEQ ID NO: 5712804 - DNA, 25 bp, Homo sapien
gaagtggcggcggcggcggcgggac

SEQ ID NO: 5712805 - DNA, 25 bp, Homo sapien
ccagagtggctcatggcaccaactc

SEQ ID NO: 5712806 - DNA, 25 bp, Homo sapien
gaaataaacaatagcgccagccgtt

SEQ ID NO: 5712807 - DNA, 25 bp, Homo sapien
cagccacaacgtgtcaaagccggag

SEQ ID NO: 5712808 - DNA, 25 bp, Homo sapien
aatacaaaaattagctggacatggt

SEQ ID NO: 5712809 - DNA, 25 bp, Homo sapien
tgttgcctgccagacagccacccca

SEQ ID NO: 5712810 - DNA, 25 bp, Homo sapien
accactgcactccagcctggcaaca

SEQ ID NO: 5712811 - DNA, 25 bp, Homo sapien
tgacggagctggacaagatcgaggg

SEQ ID NO: 5712812 - DNA, 25 bp, Homo sapien
gagtcgtcatcggtcctgacggagc

SEQ ID NO: 5712813 - DNA, 25 bp, Homo sapien
cgagcctgtgcggggatgacaccat

SEQ ID NO: 5712814 - DNA, 25 bp, Homo sapien
tgttcctgccgacacctgggctttg

SEQ ID NO: 5712815 - DNA, 25 bp, Homo sapien
ttcgtacttaatttgtatacataca

SEQ ID NO: 5712816 - DNA, 25 bp, Homo sapien
ggccgagcgacgaggtcatccggga

SEQ ID NO: 5712817 - DNA, 25 bp, Homo sapien
ctggccgacccccttcctccagggc

SEQ ID NO: 5712818 - DNA, 25 bp, Homo sapien
tagaaactctggccgggcatggcgg

SEQ ID NO: 5712819 - DNA, 25 bp, Homo sapien
ggttccaggagtacatcgatgccca

SEQ ID NO: 5712820 - DNA, 25 bp, Homo sapien
atacatatgcataatatacatgacc

SEQ ID NO: 5712821 - DNA, 25 bp, Homo sapien
tcatccacaagctgactgacgtcat

SEQ ID NO: 5712822 - DNA, 25 bp, Homo sapien
ggctgaggcaggagaattgcttgaa

SEQ ID NO: 5712823 - DNA, 25 bp, Homo sapien
tgagcatgactccatggcctcctgc

SEQ ID NO: 5712824 - DNA, 25 bp, Homo sapien
tggaggttgtgcagctgaaccttag

SEQ ID NO: 5712825 - DNA, 25 bp, Homo sapien
agaagctgaatttccaggccttcgc

SEQ ID NO: 5712826 - DNA, 25 bp, Homo sapien
ctggccgcaactgctgaatggcttc

SEQ ID NO: 5712827 - DNA, 25 bp, Homo sapien
ggcaggtggatcacaaggtcaagag

SEQ ID NO: 5712828 - DNA, 25 bp, Homo sapien
cccctcctacagcctggccgacccc

SEQ ID NO: 5712829 - DNA, 25 bp, Homo sapien
tcatggagctcacgagcctgtgcgg

SEQ ID NO: 5712830 - DNA, 25 bp, Homo sapien
gatgacaccatgcggctgctggaga

SEQ ID NO: 5712831 - DNA, 25 bp, Homo sapien
gctgactgacgtcatccttgaagcc

SEQ ID NO: 5712832 - DNA, 25 bp, Homo sapien
gaaagggaagagagttggctactgg

SEQ ID NO: 5712833 - DNA, 25 bp, Homo sapien
ccctggacgtcatcatccacaagct

SEQ ID NO: 5712834 - DNA, 25 bp, Homo sapien
gtcactcttcggcatcgacatcatc

SEQ ID NO: 5712835 - DNA, 25 bp, Homo sapien
tgcaggaagcgagggatggaggttg

SEQ ID NO: 5712836 - DNA, 25 bp, Homo sapien
acgacaggatctgctcgccaccctt

SEQ ID NO: 5712837 - DNA, 25 bp, Homo sapien
gcgtccccgccgccgggaggaggtg

SEQ ID NO: 5712838 - DNA, 25 bp, Homo sapien
actcacagggatttcaccaggatgt

SEQ ID NO: 5712839 - DNA, 25 bp, Homo sapien
accccatctctactaaaaatacaaa

SEQ ID NO: 5712840 - DNA, 25 bp, Homo sapien
ccgcaggagcacccagaccccccct

SEQ ID NO: 5712841 - DNA, 25 bp, Homo sapien
atacagacaccatggcttctgtcca

SEQ ID NO: 5712842 - DNA, 25 bp, Homo sapien
ttatttctgtaactgtaggggtgga

SEQ ID NO: 5712843 - DNA, 25 bp, Homo sapien
catgtatgagatacagacaccatgg

SEQ ID NO: 5712844 - DNA, 25 bp, Homo sapien
ttggctactggctgagcgagaagaa

SEQ ID NO: 5712845 - DNA, 25 bp, Homo sapien
ctccggacccaggctccccgcccga

SEQ ID NO: 5712846 - DNA, 25 bp, Homo sapien
ccgccgccgggaggaggtgcccact

SEQ ID NO: 5712847 - DNA, 25 bp, Homo sapien
caggatctgctcgccacccttcatg

SEQ ID NO: 5712848 - DNA, 25 bp, Homo sapien
gctcatccggaagattgaggcctac

SEQ ID NO: 5712849 - DNA, 25 bp, Homo sapien
cgtggttggcgagtcctacaccgtg

SEQ ID NO: 5712850 - DNA, 25 bp, Homo sapien
tgtggtttggagtgagtgagcctcc

SEQ ID NO: 5712851 - DNA, 25 bp, Homo sapien
agagaagtgcagctgtccttgacaa

SEQ ID NO: 5712852 - DNA, 25 bp, Homo sapien
ctgtgacctggtggtgtggagggac

SEQ ID NO: 5712853 - DNA, 25 bp, Homo sapien
catccttgaagccgaccagaatgat

SEQ ID NO: 5712854 - DNA, 25 bp, Homo sapien
cttagccggccgatcgaggagcagg

SEQ ID NO: 5712855 - DNA, 25 bp, Homo sapien
agctgaaccttagccggccgatcga

SEQ ID NO: 5712856 - DNA, 25 bp, Homo sapien
cttcaacagccacaacgtgtcaaag

SEQ ID NO: 5712857 - DNA, 25 bp, Homo sapien
ttgcaaaaccagagtggctcatggc

SEQ ID NO: 5712858 - DNA, 25 bp, Homo sapien
ctaacggtctagtggagtacagtta

SEQ ID NO: 5712859 - DNA, 25 bp, Homo sapien
ctcaggtgatacaggcgaggcttct

SEQ ID NO: 5712860 - DNA, 25 bp, Homo sapien
gctgtgcaggaagcgagggatggag

SEQ ID NO: 5712861 - DNA, 25 bp, Homo sapien
tagggaggccgaggcaggtggatca

SEQ ID NO: 5712862 - DNA, 25 bp, Homo sapien
ccctgcggcaggcactgggcgtgtc

SEQ ID NO: 5712863 - DNA, 25 bp, Homo sapien
ggcggcggcggcgggactgcgcgcc

SEQ ID NO: 5712864 - DNA, 25 bp, Homo sapien
ttgaccgctccaagtcctatgagct

SEQ ID NO: 5712865 - DNA, 25 bp, Homo sapien
accatggcttctgtccattggctca

SEQ ID NO: 5712866 - DNA, 25 bp, Homo sapien
gccattggattcagagaccttgagc

SEQ ID NO: 5712867 - DNA, 25 bp, Homo sapien
tgtaggggtggagtataaacctaac

SEQ ID NO: 5712868 - DNA, 25 bp, Homo sapien
agctggtgagcatgactccatggcc

SEQ ID NO: 5712869 - DNA, 25 bp, Homo sapien
tctgattctcacccgcaggagcacc

SEQ ID NO: 5712870 - DNA, 25 bp, Homo sapien
gggacaaggtgtcgctgtgatctct

SEQ ID NO: 5712871 - DNA, 25 bp, Homo sapien
cacaacgtgtcaaagccggagtcgt

SEQ ID NO: 5712872 - DNA, 25 bp, Homo sapien
ctgaaagggaagagagttggctact

SEQ ID NO: 5712873 - DNA, 25 bp, Homo sapien
gaccagttcttggctcttgggcact

SEQ ID NO: 5712874 - DNA, 25 bp, Homo sapien
tgaatggcttcactaatgtccctgg

SEQ ID NO: 5712875 - DNA, 25 bp, Homo sapien
gcaacttcaccagaatcccaagctg

SEQ ID NO: 5712876 - DNA, 25 bp, Homo sapien
acactgcgggtggctttgggatggg

SEQ ID NO: 5712877 - DNA, 25 bp, Homo sapien
gccatcagaaccctgcttgaccgct

SEQ ID NO: 5712878 - DNA, 25 bp, Homo sapien
tcgagggcgtgttcgagcggccgag

SEQ ID NO: 5712879 - DNA, 25 bp, Homo sapien
gtcaaagccggagtcgtcatcggtc

SEQ ID NO: 5712880 - DNA, 25 bp, Homo sapien
agctggttcgtacttaatttgtata

SEQ ID NO: 5712881 - DNA, 25 bp, Homo sapien
cgagaagaaaatcaagaagctgaat

SEQ ID NO: 5712882 - DNA, 25 bp, Homo sapien
gctcttgggcactcacattggccac

SEQ ID NO: 5712883 - DNA, 25 bp, Homo sapien
cagctccgatccccgttccgcgtcc

SEQ ID NO: 5712884 - DNA, 25 bp, Homo sapien
tgaccgggaggcagagaagtgcagc

SEQ ID NO: 5712885 - DNA, 25 bp, Homo sapien
agaccttgagctgggtgctggctgc

SEQ ID NO: 5712886 - DNA, 25 bp, Homo sapien
cttgaagccgaccagaatgatagcc

SEQ ID NO: 5712887 - DNA, 25 bp, Homo sapien
gtcatctgccccgcccaggcataag

SEQ ID NO: 5712888 - DNA, 25 bp, Homo sapien
cccatctctactaaaaatacaaaaa

SEQ ID NO: 5712889 - DNA, 25 bp, Homo sapien
aatatacatgaccatgtatgagata

SEQ ID NO: 5712890 - DNA, 25 bp, Homo sapien
agtcctatgagctcatccggaagat

SEQ ID NO: 5712891 - DNA, 25 bp, Homo sapien
tcccagctacttgggaggctgaggc

SEQ ID NO: 5712892 - DNA, 25 bp, Homo sapien
caaccagacagggcagcacgccgtc

SEQ ID NO: 5712893 - DNA, 25 bp, Homo sapien
tccagcctggtgaccgggaggcaga

SEQ ID NO: 5712894 - DNA, 25 bp, Homo sapien
gcccttctcggcgggcagcgcgcga

SEQ ID NO: 5712895 - DNA, 25 bp, Homo sapien
ctgtgtggaatcacctctcagaagc

SEQ ID NO: 5712896 - DNA, 25 bp, Homo sapien
aatggcttcactaatgtccctgggg

SEQ ID NO: 5712897 - DNA, 25 bp, Homo sapien
aactagtcttgttttgatttctaac

SEQ ID NO: 5712898 - DNA, 25 bp, Homo sapien
ttgcttcaagctgttcacaagcaac

SEQ ID NO: 5712899 - DNA, 25 bp, Homo sapien
gggtgctggctgccctaaaggagca

SEQ ID NO: 5712900 - DNA, 25 bp, Homo sapien
acaccccgatgccacagtcatctgc

SEQ ID NO: 5712901 - DNA, 25 bp, Homo sapien
gaagctcactctgaaaagccactca

SEQ ID NO: 5712902 - DNA, 25 bp, Homo sapien
ataatatacatgaccatgtatgaga

SEQ ID NO: 5712903 - DNA, 25 bp, Homo sapien
cggacccaggctccccgcccgagga

SEQ ID NO: 5712904 - DNA, 25 bp, Homo sapien
agcaagactcctcaaaaaacaaaca

SEQ ID NO: 5712905 - DNA, 25 bp, Homo sapien
gagtcctacaccgtggtccagaggc

SEQ ID NO: 5712906 - DNA, 25 bp, Homo sapien
ttgttttgatttctaacggtctagt

SEQ ID NO: 5712907 - DNA, 25 bp, Homo sapien
tgattctcacccgcaggagcaccca

SEQ ID NO: 5712908 - DNA, 25 bp, Homo sapien
tttgtccttctagcctggaagacca

SEQ ID NO: 5712909 - DNA, 25 bp, Homo sapien
tggctcttgggcactcacattggcc

SEQ ID NO: 5712910 - DNA, 25 bp, Homo sapien
ggaggtgcccactcgctcgcggcgc

SEQ ID NO: 5712911 - DNA, 25 bp, Homo sapien
gggaggaggtgcccactcgctcgcg

SEQ ID NO: 5712912 - DNA, 25 bp, Homo sapien
gaatcccaagctggttcgtacttaa

SEQ ID NO: 5712913 - DNA, 25 bp, Homo sapien
catcccagcacttagggaggccgag

SEQ ID NO: 5712914 - DNA, 25 bp, Homo sapien
gctcgccacccttcatggagctcac

SEQ ID NO: 5712915 - DNA, 25 bp, Homo sapien
gtctgtatctgccctctcttctatt

SEQ ID NO: 5712916 - DNA, 25 bp, Homo sapien
tgagtccatcttcttcaacagccac

SEQ ID NO: 5712917 - DNA, 25 bp, Homo sapien
tccatgaggttaggacactgcgggt

SEQ ID NO: 5712918 - DNA, 25 bp, Homo sapien
gtcgctgtgatctctgtatttgcta

SEQ ID NO: 5712919 - DNA, 25 bp, Homo sapien
caagtcctatgagctcatccggaag

SEQ ID NO: 5712920 - DNA, 25 bp, Homo sapien
aggagcagggccccctggacgtcat

SEQ ID NO: 5712921 - DNA, 25 bp, Homo sapien
ggccccctggacgtcatcatccaca

SEQ ID NO: 5712922 - DNA, 25 bp, Homo sapien
catggcctcctgctggttggggtct

SEQ ID NO: 5712923 - DNA, 25 bp, Homo sapien
ttcgtggttggcgagtcctacaccg

SEQ ID NO: 5712924 - DNA, 25 bp, Homo sapien
atttgcaaaaccagagtggctcatg

SEQ ID NO: 5712925 - DNA, 25 bp, Homo sapien
cccagctccgatccccgttccgcgt

SEQ ID NO: 5712926 - DNA, 25 bp, Homo sapien
tggtttcagggacaaggtgtcgctg

SEQ ID NO: 5712927 - DNA, 25 bp, Homo sapien
gcatggcggctcacgcctgtcatcc

SEQ ID NO: 5712928 - DNA, 25 bp, Homo sapien
ggagctggacaagatcgagggcgtg

SEQ ID NO: 5712929 - DNA, 25 bp, Homo sapien
aacaaactctgatcattcacccggt

SEQ ID NO: 5712930 - DNA, 25 bp, Homo sapien
cagccaccccaagaccaagggagcc

SEQ ID NO: 5712931 - DNA, 25 bp, Homo sapien
agctggacaagatcgagggcgtgtt

SEQ ID NO: 5712932 - DNA, 25 bp, Homo sapien
ccaccctgcgtggtccagaatttca

SEQ ID NO: 5712933 - DNA, 25 bp, Homo sapien
ccgacacctgggctttgtgacaaat

SEQ ID NO: 5712934 - DNA, 25 bp, Homo sapien
ggagggcctgaacgccatccagcca

SEQ ID NO: 5712935 - DNA, 25 bp, Homo sapien
cgcgccggccgccagactcggcctg

SEQ ID NO: 5712936 - DNA, 25 bp, Homo sapien
ccgcccaggcataagcctgactcag

SEQ ID NO: 5712937 - DNA, 25 bp, Homo sapien
ccatgggtcctccccttgtgagaaa

SEQ ID NO: 5712938 - DNA, 25 bp, Homo sapien
gcctgtcgtttgtccttctagcctg

SEQ ID NO: 5712939 - DNA, 25 bp, Homo sapien
caagctggttcgtacttaatttgta

SEQ ID NO: 5712940 - DNA, 25 bp, Homo sapien
actttcccattcatttgcaaaacca

SEQ ID NO: 5712941 - DNA, 25 bp, Homo sapien
tgtgtaccttctctctgcacagcca

SEQ ID NO: 5712942 - DNA, 25 bp, Homo sapien
agggctgtgtggaatcacctctcag

SEQ ID NO: 5712943 - DNA, 25 bp, Homo sapien
tcagagaccttgagctgggtgctgg

SEQ ID NO: 5712944 - DNA, 25 bp, Homo sapien
aatttccaggccttcgccgagctgt

SEQ ID NO: 5712945 - DNA, 25 bp, Homo sapien
ggatccccggcagctccttctcctt

SEQ ID NO: 5712946 - DNA, 25 bp, Homo sapien
tcctccggacccaggctccccgccc

SEQ ID NO: 5712947 - DNA, 25 bp, Homo sapien
ttggggtcttcttctgattctcacc

SEQ ID NO: 5712948 - DNA, 25 bp, Homo sapien
gctcattcgcctggtcgcatgttca

SEQ ID NO: 5712949 - DNA, 25 bp, Homo sapien
cagctgttgcctgccagacagccac

SEQ ID NO: 5712950 - DNA, 25 bp, Homo sapien
atttctaacggtctagtggagtaca

SEQ ID NO: 5712951 - DNA, 25 bp, Homo sapien
cgccggccgccagactcggcctgtg

SEQ ID NO: 5712952 - DNA, 25 bp, Homo sapien
ccttcaagagtcatctgtgacctgg

SEQ ID NO: 5712953 - DNA, 25 bp, Homo sapien
cagcctctgctgcctcaggccagcc

SEQ ID NO: 5712954 - DNA, 25 bp, Homo sapien
gggccattggattcagagaccttga

SEQ ID NO: 5712955 - DNA, 25 bp, Homo sapien
cttgagctgggtgctggctgcccta

SEQ ID NO: 5712956 - DNA, 25 bp, Homo sapien
gtttcagggacaaggtgtcgctgtg

SEQ ID NO: 5712957 - DNA, 25 bp, Homo sapien
gacaccatcctggccaacatggtga

SEQ ID NO: 5712958 - DNA, 25 bp, Homo sapien
gaagagagttggctactggctgagc

SEQ ID NO: 5712959 - DNA, 25 bp, Homo sapien
ggaagaccagttcttggctcttggg

SEQ ID NO: 5712960 - DNA, 25 bp, Homo sapien
tgtgcggggatgacaccatgcggct

SEQ ID NO: 5712961 - DNA, 25 bp, Homo sapien
gcttgaactcgggaggcgtaggttg

SEQ ID NO: 5712962 - DNA, 25 bp, Homo sapien
acctttctgaaagggaagagagttg

SEQ ID NO: 5712963 - DNA, 25 bp, Homo sapien
agggccccctggacgtcatcatcca

SEQ ID NO: 5712964 - DNA, 25 bp, Homo sapien
gcggccgagcgacgaggtcatccgg

SEQ ID NO: 5712965 - DNA, 25 bp, Homo sapien
gacccgctccctgccatcagaaccc

SEQ ID NO: 5712966 - DNA, 25 bp, Homo sapien
tacaaaaattagctggacatggtgg

SEQ ID NO: 5712967 - DNA, 25 bp, Homo sapien
ccccttgtgagaaagggtctgtgct

SEQ ID NO: 5712968 - DNA, 25 bp, Homo sapien
atgatagccagtccctggagctggt

SEQ ID NO: 5712969 - DNA, 25 bp, Homo sapien
cagggacaaggtgtcgctgtgatct

SEQ ID NO: 5712970 - DNA, 25 bp, Homo sapien
ggtcaagagatcgacaccatcctgg

SEQ ID NO: 5712971 - DNA, 25 bp, Homo sapien
agccaagatcgcaccactgcactcc

SEQ ID NO: 5712972 - DNA, 25 bp, Homo sapien
cgagatggctatcgtgttcaaccag

SEQ ID NO: 5712973 - DNA, 25 bp, Homo sapien
gcctgtgggcgatttcctccggacc

SEQ ID NO: 5712974 - DNA, 25 bp, Homo sapien
attcgcctggtcgcatgttcactcc

SEQ ID NO: 5712975 - DNA, 25 bp, Homo sapien
cgtgagtccatcttcttcaacagcc

SEQ ID NO: 5712976 - DNA, 25 bp, Homo sapien
gatcgacaccatcctggccaacatg

SEQ ID NO: 5712977 - DNA, 25 bp, Homo sapien
gtgacctggtggtgtggagggactg

SEQ ID NO: 5712978 - DNA, 25 bp, Homo sapien
agaccatcgtcctggacccgctccc

SEQ ID NO: 5712979 - DNA, 25 bp, Homo sapien
tggcggcggcggcggcgggactgcg

SEQ ID NO: 5712980 - DNA, 25 bp, Homo sapien
gatgggtggtttcagggacaaggtg

SEQ ID NO: 5712981 - DNA, 25 bp, Homo sapien
gtaggaagctgtcacatgtttgagc

SEQ ID NO: 5712982 - DNA, 25 bp, Homo sapien
gacacctgggctttgtgacaaatgc

SEQ ID NO: 5712983 - DNA, 25 bp, Homo sapien
agtggcggcggcggcggcgggactg

SEQ ID NO: 5712984 - DNA, 25 bp, Homo sapien
cttggctcttgggcactcacattgg

SEQ ID NO: 5712985 - DNA, 25 bp, Homo sapien
ccaggagtacatcgatgcccaccct

SEQ ID NO: 5712986 - DNA, 25 bp, Homo sapien
ttccgcgtccccgccgccgggagga

SEQ ID NO: 5712987 - DNA, 25 bp, Homo sapien
aagcctgactcaggtgatacaggcg

SEQ ID NO: 5712988 - DNA, 25 bp, Homo sapien
gagctgtgcaggaagcgagggatgg

SEQ ID NO: 5712989 - DNA, 25 bp, Homo sapien
gtgacaaatgctgtttgcttcaagc

SEQ ID NO: 5712990 - DNA, 25 bp, Homo sapien
ctgccctctcttctattccctagaa

SEQ ID NO: 5712991 - DNA, 25 bp, Homo sapien
atgcataatatacatgaccatgtat

SEQ ID NO: 5712992 - DNA, 25 bp, Homo sapien
tcgcggcgcgcgccggccgccagac

SEQ ID NO: 5712993 - DNA, 25 bp, Homo sapien
gtcatcatccacaagctgactgacg

SEQ ID NO: 5712994 - DNA, 25 bp, Homo sapien
caggttccaggagtacatcgatgcc

SEQ ID NO: 5712995 - DNA, 25 bp, Homo sapien
ccgaggaggaagatgcagacctttc

SEQ ID NO: 5712996 - DNA, 25 bp, Homo sapien
agtcccagctacttgggaggctgag

SEQ ID NO: 5712997 - DNA, 25 bp, Homo sapien
ggccgaggcaggtggatcacaaggt

SEQ ID NO: 5712998 - DNA, 25 bp, Homo sapien
ccgagctgtgcaggaagcgagggat

SEQ ID NO: 5712999 - DNA, 25 bp, Homo sapien
gcagggccccctggacgtcatcatc

SEQ ID NO: 5713000 - DNA, 25 bp, Homo sapien
catggcttctgtccattggctcatt

SEQ ID NO: 5713001 - DNA, 25 bp, Homo sapien
cccttttcagaaatgattacatttt

SEQ ID NO: 5713002 - DNA, 25 bp, Homo sapien
gggcgcctgtagtcccagctacttg

SEQ ID NO: 5713003 - DNA, 25 bp, Homo sapien
ggtgcacaggttccaggagtacatc

SEQ ID NO: 5713004 - DNA, 25 bp, Homo sapien
ctcctgctggttggggtcttcttct

SEQ ID NO: 5713005 - DNA, 25 bp, Homo sapien
ctcacgagcctgtgcggggatgaca

SEQ ID NO: 5713006 - DNA, 25 bp, Homo sapien
gacaaatgctgtttgcttcaagctg

SEQ ID NO: 5713007 - DNA, 25 bp, Homo sapien
cacccttcatggagctcacgagcct

SEQ ID NO: 5713008 - DNA, 25 bp, Homo sapien
tcgacatcatcatcaacaaccagac

SEQ ID NO: 5713009 - DNA, 25 bp, Homo sapien
tgaagtaggaagctgtcacatgttt

SEQ ID NO: 5713010 - DNA, 25 bp, Homo sapien
agacctttctgaaagggaagagagt

SEQ ID NO: 5713011 - DNA, 25 bp, Homo sapien
agcgcgcgaggaccaggccgaggag

SEQ ID NO: 5713012 - DNA, 25 bp, Homo sapien
aacaaacaaacaaacaaactctgat

SEQ ID NO: 5713013 - DNA, 25 bp, Homo sapien
ggattcagagaccttgagctgggtg

SEQ ID NO: 5713014 - DNA, 25 bp, Homo sapien
cccctccagcctggtgaccgggagg

SEQ ID NO: 5713015 - DNA, 25 bp, Homo sapien
ggcggctcacgcctgtcatcccagc

SEQ ID NO: 5713016 - DNA, 25 bp, Homo sapien
ctggtcgcatgttcactccatgagg

SEQ ID NO: 5713017 - DNA, 25 bp, Homo sapien
ggcccagcctctgctgcctcaggcc

SEQ ID NO: 5713018 - DNA, 25 bp, Homo sapien
ctgttcacaagcaacttcaccagaa

SEQ ID NO: 5713019 - DNA, 25 bp, Homo sapien
ctcttcggcatcgacatcatcatca

SEQ ID NO: 5713020 - DNA, 25 bp, Homo sapien
acgtgtcaaagccggagtcgtcatc

SEQ ID NO: 5713021 - DNA, 25 bp, Homo sapien
ggcgtaggttgcagtgagccaagat

SEQ ID NO: 5713022 - DNA, 25 bp, Homo sapien
tcacgcctgtcatcccagcacttag

SEQ ID NO: 5713023 - DNA, 25 bp, Homo sapien
tccaggccttcgccgagctgtgcag

SEQ ID NO: 5713024 - DNA, 25 bp, Homo sapien
cacgccgtcattgacatcaatgcct

SEQ ID NO: 5713025 - DNA, 25 bp, Homo sapien
ccatccagccaccctgcgtggtcca

SEQ ID NO: 5713026 - DNA, 25 bp, Homo sapien
gggcagcgcgcgaggaccaggccga

SEQ ID NO: 5713027 - DNA, 25 bp, Homo sapien
gaggttgtgcagctgaaccttagcc

SEQ ID NO: 5713028 - DNA, 25 bp, Homo sapien
gatcgagggcgtgttcgagcggccg

SEQ ID NO: 5713029 - DNA, 25 bp, Homo sapien
ggtggtgggcgcctgtagtcccagc

SEQ ID NO: 5713030 - DNA, 25 bp, Homo sapien
gccagcctgtcgtttgtccttctag

SEQ ID NO: 5713031 - DNA, 25 bp, Homo sapien
ccaactctcacgagatggctatcgt

SEQ ID NO: 5713032 - DNA, 25 bp, Homo sapien
ggccgacccccttcctccagggctg

SEQ ID NO: 5713033 - DNA, 25 bp, Homo sapien
ttctattccctagaaactctggccg

SEQ ID NO: 5713034 - DNA, 25 bp, Homo sapien
cctggacccgctccctgccatcaga

SEQ ID NO: 5713035 - DNA, 25 bp, Homo sapien
aacctaacttttggaaacatgaaga

SEQ ID NO: 5713036 - DNA, 25 bp, Homo sapien
ttgtgagaaagggtctgtgctgtgt

SEQ ID NO: 5713037 - DNA, 25 bp, Homo sapien
gtccttgacaaaggcccagcctctg

SEQ ID NO: 5713038 - DNA, 25 bp, Homo sapien
ccagctacttgggaggctgaggcag

SEQ ID NO: 5713039 - DNA, 25 bp, Homo sapien
gtcatccttgaagccgaccagaatg

SEQ ID NO: 5713040 - DNA, 25 bp, Homo sapien
cgtgttcaaccaggagggcctgaac

SEQ ID NO: 5713041 - DNA, 25 bp, Homo sapien
gagggactgtcccctcctacagcct

SEQ ID NO: 5713042 - DNA, 25 bp, Homo sapien
acccggtgggatccccggcagctcc

SEQ ID NO: 5713043 - DNA, 25 bp, Homo sapien
gtcatcccagcacttagggaggccg

SEQ ID NO: 5713044 - DNA, 25 bp, Homo sapien
ggagaattgcttgaactcgggaggc

SEQ ID NO: 5713045 - DNA, 25 bp, Homo sapien
agttcttggctcttgggcactcaca

SEQ ID NO: 5713046 - DNA, 25 bp, Homo sapien
ctgctcgccacccttcatggagctc

SEQ ID NO: 5713047 - DNA, 25 bp, Homo sapien
tcacccgcaggagcacccagacccc

SEQ ID NO: 5713048 - DNA, 25 bp, Homo sapien
ggcttctcccatgggtcctcccctt

SEQ ID NO: 5713049 - DNA, 25 bp, Homo sapien
aaatcaagaagctgaatttccaggc

SEQ ID NO: 5713050 - DNA, 25 bp, Homo sapien
ccccgccgccgggaggaggtgccca

SEQ ID NO: 5713051 - DNA, 25 bp, Homo sapien
gtcctacaccgtggtccagaggccc

SEQ ID NO: 5713052 - DNA, 25 bp, Homo sapien
ggtcctccccttgtgagaaagggtc

SEQ ID NO: 5713053 - DNA, 25 bp, Homo sapien
gcgtgtcactcttcggcatcgacat

SEQ ID NO: 5713054 - DNA, 25 bp, Homo sapien
cctctcttctattccctagaaactc

SEQ ID NO: 5713055 - DNA, 25 bp, Homo sapien
gtttggagtgagtgagcctcccgca

SEQ ID NO: 5713056 - DNA, 25 bp, Homo sapien
gaccgctccaagtcctatgagctca

SEQ ID NO: 5713057 - DNA, 25 bp, Homo sapien
caggagaattgcttgaactcgggag

SEQ ID NO: 5713058 - DNA, 25 bp, Homo sapien
acccgcaggagcacccagacccccc

SEQ ID NO: 5713059 - DNA, 25 bp, Homo sapien
gaactcgggaggcgtaggttgcagt

SEQ ID NO: 5713060 - DNA, 25 bp, Homo sapien
gcggcaggcactgggcgtgtcactc

SEQ ID NO: 5713061 - DNA, 25 bp, Homo sapien
ggccacaccccgatgccacagtcat

SEQ ID NO: 5713062 - DNA, 25 bp, Homo sapien
gcagacctttctgaaagggaagaga

SEQ ID NO: 5713063 - DNA, 25 bp, Homo sapien
ctttgtgacaaatgctgtttgcttc

SEQ ID NO: 5713064 - DNA, 25 bp, Homo sapien
ttcttctgattctcacccgcaggag

SEQ ID NO: 5713065 - DNA, 25 bp, Homo sapien
gggcactcacattggccactggccg

SEQ ID NO: 5713066 - DNA, 25 bp, Homo sapien
cagggcagcacgccgtcattgacat

SEQ ID NO: 5713067 - DNA, 25 bp, Homo sapien
caaaaattagctggacatggtggtg

SEQ ID NO: 5713068 - DNA, 25 bp, Homo sapien
gaccaggccgaggaggaagtggcgg

SEQ ID NO: 5713069 - DNA, 25 bp, Homo sapien
tgacaccatgcggctgctggagaag

SEQ ID NO: 5713070 - DNA, 25 bp, Homo sapien
cggcgggcagcgcgcgaggaccagg

SEQ ID NO: 5713071 - DNA, 25 bp, Homo sapien
ccaagaccaagggagccagcctgtc

SEQ ID NO: 5713072 - DNA, 25 bp, Homo sapien
aggtgcccactcgctcgcggcgcgc

SEQ ID NO: 5713073 - DNA, 25 bp, Homo sapien
cactaatgtccctggggtctgtatc

SEQ ID NO: 5713074 - DNA, 25 bp, Homo sapien
tagcctggaagaccagttcttggct

SEQ ID NO: 5713075 - DNA, 25 bp, Homo sapien
atcaaccacaacgccgtcctgtaca

SEQ ID NO: 5713076 - DNA, 25 bp, Homo sapien
ccccggcagctccttctccttcccg

SEQ ID NO: 5713077 - DNA, 25 bp, Homo sapien
acagttaatgttgtgtttatttctg

SEQ ID NO: 5713078 - DNA, 25 bp, Homo sapien
aaggtgttcgtggttggcgagtcct

SEQ ID NO: 5713079 - DNA, 25 bp, Homo sapien
agtggagtacagttaatgttgtgtt

SEQ ID NO: 5713080 - DNA, 25 bp, Homo sapien
aattgcttgaactcgggaggcgtag

SEQ ID NO: 5713081 - DNA, 25 bp, Homo sapien
aacgccatccagccaccctgcgtgg

SEQ ID NO: 5713082 - DNA, 25 bp, Homo sapien
atctgtgacctggtggtgtggaggg

SEQ ID NO: 5713083 - DNA, 25 bp, Homo sapien
gcctggaagaccagttcttggctct

SEQ ID NO: 5713084 - DNA, 25 bp, Homo sapien
ctgtgctgtgtaccttctctctgca

SEQ ID NO: 5713085 - DNA, 25 bp, Homo sapien
agctgtccttgacaaaggcccagcc

SEQ ID NO: 5713086 - DNA, 25 bp, Homo sapien
ctggtgagcatgactccatggcctc

SEQ ID NO: 5713087 - DNA, 25 bp, Homo sapien
ggcatcgacatcatcatcaacaacc

SEQ ID NO: 5713088 - DNA, 25 bp, Homo sapien
tggctgagcgagaagaaaatcaaga

SEQ ID NO: 5713089 - DNA, 25 bp, Homo sapien
gctcacgcctgtcatcccagcactt

SEQ ID NO: 5713090 - DNA, 25 bp, Homo sapien
ctgtagtcccagctacttgggaggc

SEQ ID NO: 5713091 - DNA, 25 bp, Homo sapien
ctaactagtcttgttttgatttcta

SEQ ID NO: 5713092 - DNA, 25 bp, Homo sapien
tgaacgccatccagccaccctgcgt

SEQ ID NO: 5713093 - DNA, 25 bp, Homo sapien
ctgatcattcacccggtgggatccc

SEQ ID NO: 5713094 - DNA, 25 bp, Homo sapien
ccccaagaccaagggagccagcctg

SEQ ID NO: 5713095 - DNA, 25 bp, Homo sapien
gcgggcgctcgccgccgcccttctc

SEQ ID NO: 5713096 - DNA, 25 bp, Homo sapien
actcgggaggcgtaggttgcagtga

SEQ ID NO: 5713097 - DNA, 25 bp, Homo sapien
ttcgccgagctgtgcaggaagcgag

SEQ ID NO: 5713098 - DNA, 25 bp, Homo sapien
ccagcacttagggaggccgaggcag

SEQ ID NO: 5713099 - DNA, 25 bp, Homo sapien
tgttgtgtttatttctgtaactgta

SEQ ID NO: 5713100 - DNA, 25 bp, Homo sapien
gtggtccagaggccctcactcaaga

SEQ ID NO: 5713101 - DNA, 25 bp, Homo sapien
caaagccggagtcgtcatcggtcct

SEQ ID NO: 5713102 - DNA, 25 bp, Homo sapien
ccctaaaggagcacgacccctccag

SEQ ID NO: 5713103 - DNA, 25 bp, Homo sapien
catcgtcctggacccgctccctgcc

SEQ ID NO: 5713104 - DNA, 25 bp, Homo sapien
tgtatttgctaactagtcttgtttt

SEQ ID NO: 5713105 - DNA, 25 bp, Homo sapien
tggtggtgtggagggactgtcccct

SEQ ID NO: 5713106 - DNA, 25 bp, Homo sapien
aaggtcaagagatcgacaccatcct

SEQ ID NO: 5713107 - DNA, 25 bp, Homo sapien
ggttgtgcagctgaaccttagccgg

SEQ ID NO: 5713108 - DNA, 25 bp, Homo sapien
ctgaaaagccactcacagggatttc

SEQ ID NO: 5713109 - DNA, 25 bp, Homo sapien
tgcggggatgacaccatgcggctgc

SEQ ID NO: 5713110 - DNA, 25 bp, Homo sapien
catcttcttcaacagccacaacgtg

SEQ ID NO: 5713111 - DNA, 25 bp, Homo sapien
gtccctggagctggtgcacaggttc

SEQ ID NO: 5713112 - DNA, 25 bp, Homo sapien
ggaatcacctctcagaagctcactc

SEQ ID NO: 5713113 - DNA, 25 bp, Homo sapien
agagtcatctgtgacctggtggtgt

SEQ ID NO: 5713114 - DNA, 25 bp, Homo sapien
agagtggctcatggcaccaactctc

SEQ ID NO: 5713115 - DNA, 25 bp, Homo sapien
aagggtctgtgctgtgtaccttctc

SEQ ID NO: 5713116 - DNA, 25 bp, Homo sapien
gatctctgtatttgctaactagtct

SEQ ID NO: 5713117 - DNA, 25 bp, Homo sapien
acaccatgcggctgctggagaagaa

SEQ ID NO: 5713118 - DNA, 25 bp, Homo sapien
cccttcatggagctcacgagcctgt

SEQ ID NO: 5713119 - DNA, 25 bp, Homo sapien
gggactgtcccctcctacagcctgg

SEQ ID NO: 5713120 - DNA, 25 bp, Homo sapien
tcccgcactgctcaggggagagctg

SEQ ID NO: 5713121 - DNA, 25 bp, Homo sapien
tcttctattccctagaaactctggc

SEQ ID NO: 5713122 - DNA, 25 bp, Homo sapien
gaaaatcaagaagctgaatttccag

SEQ ID NO: 5713123 - DNA, 25 bp, Homo sapien
tcaggccagcctggccacaccccga

SEQ ID NO: 5713124 - DNA, 25 bp, Homo sapien
cccagcctctgctgcctcaggccag

SEQ ID NO: 5713125 - DNA, 25 bp, Homo sapien
gtcatccgggagctctcccgggccc

SEQ ID NO: 5713126 - DNA, 25 bp, Homo sapien
gtcctgacggagctggacaagatcg

SEQ ID NO: 5713127 - DNA, 25 bp, Homo sapien
ggccgggcatggcggctcacgcctg

SEQ ID NO: 5713128 - DNA, 25 bp, Homo sapien
atacatacatatgcataatatacat

SEQ ID NO: 5713129 - DNA, 25 bp, Homo sapien
aacaatagcgccagccgttaaaaaa

SEQ ID NO: 5713130 - DNA, 25 bp, Homo sapien
ctagtggagtacagttaatgttgtg

SEQ ID NO: 5713131 - DNA, 25 bp, Homo sapien
atggcaccaactctcacgagatggc

SEQ ID NO: 5713132 - DNA, 25 bp, Homo sapien
cggcctgtgggcgatttcctccgga

SEQ ID NO: 5713133 - DNA, 25 bp, Homo sapien
cgctgtgatctctgtatttgctaac

SEQ ID NO: 5713134 - DNA, 25 bp, Homo sapien
tcatcggtcctgacggagctggaca

SEQ ID NO: 5713135 - DNA, 25 bp, Homo sapien
ccaggcataagcctgactcaggtga

SEQ ID NO: 5713136 - DNA, 25 bp, Homo sapien
ccgaggcaggtggatcacaaggtca

SEQ ID NO: 5713137 - DNA, 25 bp, Homo sapien
ggcaggagaattgcttgaactcggg

SEQ ID NO: 5713138 - DNA, 25 bp, Homo sapien
gacccccttcctccagggctgtgtg

SEQ ID NO: 5713139 - DNA, 25 bp, Homo sapien
ggtcgcatgttcactccatgaggtt

SEQ ID NO: 5713140 - DNA, 25 bp, Homo sapien
ccaactgagcaaagcagctgttgcc

SEQ ID NO: 5713141 - DNA, 25 bp, Homo sapien
tcaacaaccagacagggcagcacgc

SEQ ID NO: 5713142 - DNA, 25 bp, Homo sapien
tctcccatgggtcctccccttgtga

SEQ ID NO: 5713143 - DNA, 25 bp, Homo sapien
acatggtggtgggcgcctgtagtcc

SEQ ID NO: 5713144 - DNA, 25 bp, Homo sapien
cccgggccctgcggcaggcactggg

SEQ ID NO: 5713145 - DNA, 25 bp, Homo sapien
gctgtgtaccttctctctgcacagc

SEQ ID NO: 5713146 - DNA, 25 bp, Homo sapien
ctaatgtccctggggtctgtatctg

SEQ ID NO: 5713147 - DNA, 25 bp, Homo sapien
ggatttcaccaggatgttgctgttc

SEQ ID NO: 5713148 - DNA, 25 bp, Homo sapien
ccttctcggcgggcagcgcgcgagg

SEQ ID NO: 5713149 - DNA, 25 bp, Homo sapien
gatttcctccggacccaggctcccc

SEQ ID NO: 5713150 - DNA, 25 bp, Homo sapien
aacttctccgcaggcacatcagacc

SEQ ID NO: 5713151 - DNA, 25 bp, Homo sapien
tcttcttcaacagccacaacgtgtc

SEQ ID NO: 5713152 - DNA, 25 bp, Homo sapien
gctgttgcctgccagacagccaccc

SEQ ID NO: 5713153 - DNA, 25 bp, Homo sapien
gggcgatttcctccggacccaggct

SEQ ID NO: 5713154 - DNA, 25 bp, Homo sapien
gcgagtcctacaccgtggtccagag

SEQ ID NO: 5713155 - DNA, 25 bp, Homo sapien
ctggtgaccgggaggcagagaagtg

SEQ ID NO: 5713156 - DNA, 25 bp, Homo sapien
tctcttctattccctagaaactctg

SEQ ID NO: 5713157 - DNA, 25 bp, Homo sapien
tgttcaaccaggagggcctgaacgc

SEQ ID NO: 5713158 - DNA, 25 bp, Homo sapien
caggtggatcacaaggtcaagagat

SEQ ID NO: 5713159 - DNA, 25 bp, Homo sapien
cactgggcgtgtcactcttcggcat

SEQ ID NO: 5713160 - DNA, 25 bp, Homo sapien
accatgtatgagatacagacaccat

SEQ ID NO: 5713161 - DNA, 25 bp, Homo sapien
caacagagcaagactcctcaaaaaa

SEQ ID NO: 5713162 - DNA, 25 bp, Homo sapien
gtgggcgcctgtagtcccagctact

SEQ ID NO: 5713163 - DNA, 25 bp, Homo sapien
tcgctcgcggcgcgcgccggccgcc

SEQ ID NO: 5713164 - DNA, 25 bp, Homo sapien
tcacattggccactggccgcaactg

SEQ ID NO: 5713165 - DNA, 25 bp, Homo sapien
ctgccagacagccaccccaagacca

SEQ ID NO: 5713166 - DNA, 25 bp, Homo sapien
gcggcgcgcgccggccgccagactc

SEQ ID NO: 5713167 - DNA, 25 bp, Homo sapien
tctccgcaggcacatcagaccgtga

SEQ ID NO: 5713168 - DNA, 25 bp, Homo sapien
ccagttcttggctcttgggcactca

SEQ ID NO: 5713169 - DNA, 25 bp, Homo sapien
agctcacgagcctgtgcggggatga

SEQ ID NO: 5713170 - DNA, 25 bp, Homo sapien
ctacttgggaggctgaggcaggaga

SEQ ID NO: 5713171 - DNA, 25 bp, Homo sapien
agtgagccaagatcgcaccactgca

SEQ ID NO: 5713172 - DNA, 25 bp, Homo sapien
aataaacaatagcgccagccgttaa

SEQ ID NO: 5713173 - DNA, 25 bp, Homo sapien
cagcctgtcgtttgtccttctagcc

SEQ ID NO: 5713174 - DNA, 25 bp, Homo sapien
cgtacttaatttgtatacatacata

SEQ ID NO: 5713175 - DNA, 25 bp, Homo sapien
catcagaccgtgagtccatcttctt

SEQ ID NO: 5713176 - DNA, 25 bp, Homo sapien
acatatgcataatatacatgaccat

SEQ ID NO: 5713177 - DNA, 25 bp, Homo sapien
ttgtgacaaatgctgtttgcttcaa

SEQ ID NO: 5713178 - DNA, 25 bp, Homo sapien
caagaagctgaatttccaggccttc

SEQ ID NO: 5713179 - DNA, 25 bp, Homo sapien
cgatcgaggagcagggccccctgga

SEQ ID NO: 5713180 - DNA, 25 bp, Homo sapien
ccgacccccttcctccagggctgtg

SEQ ID NO: 5713181 - DNA, 25 bp, Homo sapien
tcaacagccacaacgtgtcaaagcc

SEQ ID NO: 5713182 - DNA, 25 bp, Homo sapien
ttaatgttgtgtttatttctgtaac

SEQ ID NO: 5713183 - DNA, 25 bp, Homo sapien
gttttgatttctaacggtctagtgg

SEQ ID NO: 5713184 - DNA, 25 bp, Homo sapien
catctctactaaaaatacaaaaatt

SEQ ID NO: 5713185 - DNA, 25 bp, Homo sapien
tccagaggccctcactcaagaactt

SEQ ID NO: 5713186 - DNA, 25 bp, Homo sapien
ggctttgtgacaaatgctgtttgct

SEQ ID NO: 5713187 - DNA, 25 bp, Homo sapien
agtgagcctcccgcactgctcaggg

SEQ ID NO: 5713188 - DNA, 25 bp, Homo sapien
ggggactgccaagtgtgctttatag

SEQ ID NO: 5713189 - DNA, 25 bp, Homo sapien
ctggtgcacaggttccaggagtaca

SEQ ID NO: 5713190 - DNA, 25 bp, Homo sapien
ctcagaagctcactctgaaaagcca

SEQ ID NO: 5713191 - DNA, 25 bp, Homo sapien
ctgtgggcgatttcctccggaccca

SEQ ID NO: 5713192 - DNA, 25 bp, Homo sapien
ttcaagagtcatctgtgacctggtg

SEQ ID NO: 5713193 - DNA, 25 bp, Homo sapien
agaattgcttgaactcgggaggcgt

SEQ ID NO: 5713194 - DNA, 25 bp, Homo sapien
catcaatgccttcccaggggactgc

SEQ ID NO: 5713195 - DNA, 25 bp, Homo sapien
gggcgtgttcgagcggccgagcgac

SEQ ID NO: 5713196 - DNA, 25 bp, Homo sapien
caccaactctcacgagatggctatc

SEQ ID NO: 5713197 - DNA, 25 bp, Homo sapien
gaacggcttgactttcccattcatt

SEQ ID NO: 5713198 - DNA, 25 bp, Homo sapien
agctgggtgctggctgccctaaagg

SEQ ID NO: 5713199 - DNA, 25 bp, Homo sapien
cctgctggttggggtcttcttctga

SEQ ID NO: 5713200 - DNA, 25 bp, Homo sapien
gctgttcctgccgacacctgggctt

SEQ ID NO: 5713201 - DNA, 25 bp, Homo sapien
cccgctccctgccatcagaaccctg

SEQ ID NO: 5713202 - DNA, 25 bp, Homo sapien
ctgtcgtttgtccttctagcctgga

SEQ ID NO: 5713203 - DNA, 25 bp, Homo sapien
ggcctacatggaagacgacaggatc

SEQ ID NO: 5713204 - DNA, 25 bp, Homo sapien
cactctgaaaagccactcacaggga

SEQ ID NO: 5713205 - DNA, 25 bp, Homo sapien
gtttgcttcaagctgttcacaagca

SEQ ID NO: 5713206 - DNA, 25 bp, Homo sapien
tgccctaaaggagcacgacccctcc

SEQ ID NO: 5713207 - DNA, 25 bp, Homo sapien
cactcaagaacttctccgcaggcac

SEQ ID NO: 5713208 - DNA, 25 bp, Homo sapien
ttgcctgccagacagccaccccaag

SEQ ID NO: 5713209 - DNA, 25 bp, Homo sapien
aggccgaggaggaagtggcggcggc

SEQ ID NO: 5713210 - DNA, 25 bp, Homo sapien
tttccaggccttcgccgagctgtgc

SEQ ID NO: 5713211 - DNA, 25 bp, Homo sapien
gcccactcgctcgcggcgcgcgccg

SEQ ID NO: 5713212 - DNA, 25 bp, Homo sapien
cggctcacgcctgtcatcccagcac

SEQ ID NO: 5713213 - DNA, 25 bp, Homo sapien
gccgaccagaatgatagccagtccc

SEQ ID NO: 5713214 - DNA, 25 bp, Homo sapien
gccaacatggtgaaaccccatctct

SEQ ID NO: 5713215 - DNA, 25 bp, Homo sapien
agggcctgaacgccatccagccacc

SEQ ID NO: 5713216 - DNA, 25 bp, Homo sapien
atcctggccaacatggtgaaacccc

SEQ ID NO: 5713217 - DNA, 25 bp, Homo sapien
ccattcatttgcaaaaccagagtgg

SEQ ID NO: 5713218 - DNA, 25 bp, Homo sapien
acagccattgtcagtgtggtttgga

SEQ ID NO: 5713219 - DNA, 25 bp, Homo sapien
cgactgaagtaggaagctgtcacat

SEQ ID NO: 5713220 - DNA, 25 bp, Homo sapien
tggcttctgtccattggctcattcg

SEQ ID NO: 5713221 - DNA, 25 bp, Homo sapien
gctccgatccccgttccgcgtcccc

SEQ ID NO: 5713222 - DNA, 25 bp, Homo sapien
gggtctgtgctgtgtaccttctctc

SEQ ID NO: 5713223 - DNA, 25 bp, Homo sapien
caccgtggtccagaggccctcactc

SEQ ID NO: 5713224 - DNA, 25 bp, Homo sapien
tccatggcctcctgctggttggggt

SEQ ID NO: 5713225 - DNA, 25 bp, Homo sapien
cctgccgacacctgggctttgtgac

SEQ ID NO: 5713226 - DNA, 25 bp, Homo sapien
gagctcatccggaagattgaggcct

SEQ ID NO: 5713227 - DNA, 25 bp, Homo sapien
ggccctgcggcaggcactgggcgtg

SEQ ID NO: 5713228 - DNA, 25 bp, Homo sapien
ctcaggggagagctggtgagcatga

SEQ ID NO: 5713229 - DNA, 25 bp, Homo sapien
caagagtcatctgtgacctggtggt

SEQ ID NO: 5713230 - DNA, 25 bp, Homo sapien
ccctcactcaagaacttctccgcag

SEQ ID NO: 5713231 - DNA, 25 bp, Homo sapien
cttaatttgtatacatacatatgca

SEQ ID NO: 5713232 - DNA, 25 bp, Homo sapien
aagctgaatttccaggccttcgccg

SEQ ID NO: 5713233 - DNA, 25 bp, Homo sapien
cggagtcgtcatcggtcctgacgga

SEQ ID NO: 5713234 - DNA, 25 bp, Homo sapien
ggcagctccttctccttcccgagct

SEQ ID NO: 5713235 - DNA, 25 bp, Homo sapien
gtcgtcatcggtcctgacggagctg

SEQ ID NO: 5713236 - DNA, 25 bp, Homo sapien
ccagacccccccttttcagaaatga

SEQ ID NO: 5713237 - DNA, 25 bp, Homo sapien
acgacccctccagcctggtgaccgg

SEQ ID NO: 5713238 - DNA, 25 bp, Homo sapien
gaagacgacaggatctgctcgccac

SEQ ID NO: 5713239 - DNA, 25 bp, Homo sapien
gacagccaccccaagaccaagggag

SEQ ID NO: 5713240 - DNA, 25 bp, Homo sapien
gcctggccacaccccgatgccacag

SEQ ID NO: 5713241 - DNA, 25 bp, Homo sapien
tcacaagcaacttcaccagaatccc

SEQ ID NO: 5713242 - DNA, 25 bp, Homo sapien
cgcaggcacatcagaccgtgagtcc

SEQ ID NO: 5713243 - DNA, 25 bp, Homo sapien
ggtgaccgggaggcagagaagtgca

SEQ ID NO: 5713244 - DNA, 25 bp, Homo sapien
accatcgtcctggacccgctccctg

SEQ ID NO: 5713245 - DNA, 25 bp, Homo sapien
attccctagaaactctggccgggca

SEQ ID NO: 5713246 - DNA, 25 bp, Homo sapien
acagggatttcaccaggatgttgct

SEQ ID NO: 5713247 - DNA, 25 bp, Homo sapien
ggcacatcagaccgtgagtccatct

SEQ ID NO: 5713248 - DNA, 25 bp, Homo sapien
agacgacaggatctgctcgccaccc

SEQ ID NO: 5713249 - DNA, 25 bp, Homo sapien
tcattcgcctggtcgcatgttcact

SEQ ID NO: 5713250 - DNA, 25 bp, Homo sapien
aggagtacatcgatgcccaccctga

SEQ ID NO: 5713251 - DNA, 25 bp, Homo sapien
ttgtgtttatttctgtaactgtagg

SEQ ID NO: 5713252 - DNA, 25 bp, Homo sapien
attggccactggccgcaactgctga

SEQ ID NO: 5713253 - DNA, 25 bp, Homo sapien
caaacaaacaaacaaactctgatca

SEQ ID NO: 5713254 - DNA, 25 bp, Homo sapien
catcatccacaagctgactgacgtc

SEQ ID NO: 5713255 - DNA, 25 bp, Homo sapien
aagctgactgacgtcatccttgaag

SEQ ID NO: 5713256 - DNA, 25 bp, Homo sapien
agtcatctgtgacctggtggtgtgg

SEQ ID NO: 5713257 - DNA, 25 bp, Homo sapien
cttgactttcccattcatttgcaaa

SEQ ID NO: 5713258 - DNA, 25 bp, Homo sapien
tggcctcctgctggttggggtcttc

SEQ ID NO: 5713259 - DNA, 25 bp, Homo sapien
gaaagggtctgtgctgtgtaccttc

SEQ ID NO: 5713260 - DNA, 25 bp, Homo sapien
gaggaggtgcccactcgctcgcggc

SEQ ID NO: 5713261 - DNA, 25 bp, Homo sapien
actgccaagtgtgctttatagaagg

SEQ ID NO: 5713262 - DNA, 25 bp, Homo sapien
tgtggctcatgggccattggattca

SEQ ID NO: 5713263 - DNA, 25 bp, Homo sapien
tcggcatcgacatcatcatcaacaa

SEQ ID NO: 5713264 - DNA, 25 bp, Homo sapien
ccactcacagggatttcaccaggat

SEQ ID NO: 5713265 - DNA, 25 bp, Homo sapien
atgttcactccatgaggttaggaca

SEQ ID NO: 5713266 - DNA, 25 bp, Homo sapien
tcctatgagctcatccggaagattg

SEQ ID NO: 5713267 - DNA, 25 bp, Homo sapien
agccactcacagggatttcaccagg

SEQ ID NO: 5713268 - DNA, 25 bp, Homo sapien
tctctgtatttgctaactagtcttg

SEQ ID NO: 5713269 - DNA, 25 bp, Homo sapien
aagaaaatcaagaagctgaatttcc

SEQ ID NO: 5713270 - DNA, 25 bp, Homo sapien
cctcaggccagcctggccacacccc

SEQ ID NO: 5713271 - DNA, 25 bp, Homo sapien
gcagctgtccttgacaaaggcccag

SEQ ID NO: 5713272 - DNA, 25 bp, Homo sapien
ctctgaaaagccactcacagggatt

SEQ ID NO: 5713273 - DNA, 25 bp, Homo sapien
gtctagtggagtacagttaatgttg

SEQ ID NO: 5713274 - DNA, 25 bp, Homo sapien
ggtccagaggccctcactcaagaac

SEQ ID NO: 5713275 - DNA, 25 bp, Homo sapien
gccagacagccaccccaagaccaag

SEQ ID NO: 5713276 - DNA, 25 bp, Homo sapien
agtgtggtttggagtgagtgagcct

SEQ ID NO: 5713277 - DNA, 25 bp, Homo sapien
gaggcaggagaattgcttgaactcg

SEQ ID NO: 5713278 - DNA, 25 bp, Homo sapien
aacaaacaaacaaactctgatcatt

SEQ ID NO: 5713279 - DNA, 25 bp, Homo sapien
ggcgcgcgccggccgccagactcgg

SEQ ID NO: 5713280 - DNA, 25 bp, Homo sapien
ggacactgcgggtggctttgggatg

SEQ ID NO: 5713281 - DNA, 25 bp, Homo sapien
ccaagtgtgctttatagaaggctgg

SEQ ID NO: 5713282 - DNA, 25 bp, Homo sapien
ggtgtggagggactgtcccctccta

SEQ ID NO: 5713283 - DNA, 25 bp, Homo sapien
gcgagggatggaggttgtgcagctg

SEQ ID NO: 5713284 - DNA, 25 bp, Homo sapien
cagctccttctccttcccgagctgt

SEQ ID NO: 5713285 - DNA, 25 bp, Homo sapien
gggcatggcggctcacgcctgtcat

SEQ ID NO: 5713286 - DNA, 25 bp, Homo sapien
gccccagctccgatccccgttccgc

SEQ ID NO: 5713287 - DNA, 25 bp, Homo sapien
tagaaggctggaagaccgactgaag

SEQ ID NO: 5713288 - DNA, 25 bp, Homo sapien
ctcggcctgtgggcgatttcctccg

SEQ ID NO: 5713289 - DNA, 25 bp, Homo sapien
gccacaacgtgtcaaagccggagtc

SEQ ID NO: 5713290 - DNA, 25 bp, Homo sapien
ctccccttgtgagaaagggtctgtg

SEQ ID NO: 5713291 - DNA, 25 bp, Homo sapien
gctcatgggccattggattcagaga

SEQ ID NO: 5713292 - DNA, 25 bp, Homo sapien
ctctgatcattcacccggtgggatc

SEQ ID NO: 5713293 - DNA, 25 bp, Homo sapien
aggagcacgacccctccagcctggt

SEQ ID NO: 5713294 - DNA, 25 bp, Homo sapien
cactcttcggcatcgacatcatcat

SEQ ID NO: 5713295 - DNA, 25 bp, Homo sapien
aattagctggacatggtggtgggcg

SEQ ID NO: 5713296 - DNA, 25 bp, Homo sapien
cttcaccagaatcccaagctggttc

SEQ ID NO: 5713297 - DNA, 25 bp, Homo sapien
tttatagaaggctggaagaccgact

SEQ ID NO: 5713298 - DNA, 25 bp, Homo sapien
ggcaccaactctcacgagatggcta

SEQ ID NO: 5713299 - DNA, 25 bp, Homo sapien
acgtcatcatccacaagctgactga

SEQ ID NO: 5713300 - DNA, 25 bp, Homo sapien
gagcagggccccctggacgtcatca

SEQ ID NO: 5713301 - DNA, 25 bp, Homo sapien
agaatttcatcaaccacaacgccgt

SEQ ID NO: 5713302 - DNA, 25 bp, Homo sapien
gtcgtttgtccttctagcctggaag

SEQ ID NO: 5713303 - DNA, 25 bp, Homo sapien
gagcaaagcagctgttgcctgccag

SEQ ID NO: 5713304 - DNA, 25 bp, Homo sapien
cacgagatggctatcgtgttcaacc

SEQ ID NO: 5713305 - DNA, 25 bp, Homo sapien
gagccagcctgtcgtttgtccttct

SEQ ID NO: 5713306 - DNA, 25 bp, Homo sapien
aagggaagagagttggctactggct

SEQ ID NO: 5713307 - DNA, 25 bp, Homo sapien
agctggacatggtggtgggcgcctg

SEQ ID NO: 5713308 - DNA, 25 bp, Homo sapien
ttcccaggggactgccaagtgtgct

SEQ ID NO: 5713309 - DNA, 25 bp, Homo sapien
aactgagcaaagcagctgttgcctg

SEQ ID NO: 5713310 - DNA, 25 bp, Homo sapien
acttgggaggctgaggcaggagaat

SEQ ID NO: 5713311 - DNA, 25 bp, Homo sapien
catcaacaaccagacagggcagcac

SEQ ID NO: 5713312 - DNA, 25 bp, Homo sapien
aggaagctgtcacatgtttgagcca

SEQ ID NO: 5713313 - DNA, 25 bp, Homo sapien
actccatgaggttaggacactgcgg

SEQ ID NO: 5713314 - DNA, 25 bp, Homo sapien
ccctgcttgaccgctccaagtccta

SEQ ID NO: 5713315 - DNA, 25 bp, Homo sapien
gtgggcgatttcctccggacccagg

SEQ ID NO: 5713316 - DNA, 25 bp, Homo sapien
gcgaggcttctcccatgggtcctcc

SEQ ID NO: 5713317 - DNA, 25 bp, Homo sapien
atggtgaaaccccatctctactaaa

SEQ ID NO: 5713318 - DNA, 25 bp, Homo sapien
gagatcgacaccatcctggccaaca

SEQ ID NO: 5713319 - DNA, 25 bp, Homo sapien
tggctcattcgcctggtcgcatgtt

SEQ ID NO: 5713320 - DNA, 25 bp, Homo sapien
acaaggtgttcgtggttggcgagtc

SEQ ID NO: 5713321 - DNA, 25 bp, Homo sapien
cgcgaggaccaggccgaggaggaag

SEQ ID NO: 5713322 - DNA, 25 bp, Homo sapien
gtcacatgtttgagccaactgagca

SEQ ID NO: 5713323 - DNA, 25 bp, Homo sapien
ctggagctggtgcacaggttccagg

SEQ ID NO: 5713324 - DNA, 25 bp, Homo sapien
ctggagaagaacggcttgactttcc

SEQ ID NO: 5713325 - DNA, 25 bp, Homo sapien
ctccctgccatcagaaccctgcttg

SEQ ID NO: 5713326 - DNA, 25 bp, Homo sapien
gggaggcgtaggttgcagtgagcca

SEQ ID NO: 5713327 - DNA, 25 bp, Homo sapien
ctgtttgcttcaagctgttcacaag

SEQ ID NO: 5713328 - DNA, 25 bp, Homo sapien
gcaactgctgaatggcttcactaat

SEQ ID NO: 5713329 - DNA, 25 bp, Homo sapien
accttagccggccgatcgaggagca

SEQ ID NO: 5713330 - DNA, 25 bp, Homo sapien
gcagcgcgcgaggaccaggccgagg

SEQ ID NO: 5713331 - DNA, 25 bp, Homo sapien
ctggttggggtcttcttctgattct

SEQ ID NO: 5713332 - DNA, 25 bp, Homo sapien
gttggcgagtcctacaccgtggtcc

SEQ ID NO: 5713333 - DNA, 25 bp, Homo sapien
cgccatccagccaccctgcgtggtc

SEQ ID NO: 5713334 - DNA, 25 bp, Homo sapien
aagattgaggcctacatggaagacg

SEQ ID NO: 5713335 - DNA, 25 bp, Homo sapien
caaactctgatcattcacccggtgg

SEQ ID NO: 5713336 - DNA, 25 bp, Homo sapien
cgggagctctcccgggccctgcggc

SEQ ID NO: 5713337 - DNA, 25 bp, Homo sapien
ggggtcttcttctgattctcacccg

SEQ ID NO: 5713338 - DNA, 25 bp, Homo sapien
ccattggctcattcgcctggtcgca

SEQ ID NO: 5713339 - DNA, 25 bp, Homo sapien
atcatcaacaaccagacagggcagc

SEQ ID NO: 5713340 - DNA, 25 bp, Homo sapien
aagaacggcttgactttcccattca

SEQ ID NO: 5713341 - DNA, 25 bp, Homo sapien
gaggcttctcccatgggtcctcccc

SEQ ID NO: 5713342 - DNA, 25 bp, Homo sapien
gatccccgttccgcgtccccgccgc

SEQ ID NO: 5713343 - DNA, 25 bp, Homo sapien
gccgatcgaggagcagggccccctg

SEQ ID NO: 5713344 - DNA, 25 bp, Homo sapien
tgttcgtggttggcgagtcctacac

SEQ ID NO: 5713345 - DNA, 25 bp, Homo sapien
tacatgaccatgtatgagatacaga

SEQ ID NO: 5713346 - DNA, 25 bp, Homo sapien
cttcatggagctcacgagcctgtgc

SEQ ID NO: 5713347 - DNA, 25 bp, Homo sapien
agcagctgttgcctgccagacagcc

SEQ ID NO: 5713348 - DNA, 25 bp, Homo sapien
tcatttgcaaaaccagagtggctca

SEQ ID NO: 5713349 - DNA, 25 bp, Homo sapien
tcacctctcagaagctcactctgaa

SEQ ID NO: 5713350 - DNA, 25 bp, Homo sapien
agatggctatcgtgttcaaccagga

SEQ ID NO: 5713351 - DNA, 25 bp, Homo sapien
aggatgttgctgttcctgccgacac

SEQ ID NO: 5713352 - DNA, 25 bp, Homo sapien
agctgtcacatgtttgagccaactg

SEQ ID NO: 5713353 - DNA, 25 bp, Homo sapien
tcttcttctgattctcacccgcagg

SEQ ID NO: 5713354 - DNA, 25 bp, Homo sapien
tcgccgccgcccttctcggcgggca

SEQ ID NO: 5713355 - DNA, 25 bp, Homo sapien
cctaacttttggaaacatgaagaaa

SEQ ID NO: 5713356 - DNA, 25 bp, Homo sapien
ccttctctctgcacagccattgtca

SEQ ID NO: 5713357 - DNA, 25 bp, Homo sapien
tcgacaccatcctggccaacatggt

SEQ ID NO: 5713358 - DNA, 25 bp, Homo sapien
tcatcaaccacaacgccgtcctgta

SEQ ID NO: 5713359 - DNA, 25 bp, Homo sapien
aatgttgtgtttatttctgtaactg

SEQ ID NO: 5713360 - DNA, 25 bp, Homo sapien
ttcaccaggatgttgctgttcctgc

SEQ ID NO: 5713361 - DNA, 25 bp, Homo sapien
ttcttcaacagccacaacgtgtcaa

SEQ ID NO: 5713362 - DNA, 25 bp, Homo sapien
aactctggccgggcatggcggctca

SEQ ID NO: 5713363 - DNA, 25 bp, Homo sapien
attcatttgcaaaaccagagtggct

SEQ ID NO: 5713364 - DNA, 25 bp, Homo sapien
gcctggtgaccgggaggcagagaag

SEQ ID NO: 5713365 - DNA, 25 bp, Homo sapien
agttaatgttgtgtttatttctgta

SEQ ID NO: 5713366 - DNA, 25 bp, Homo sapien
catcagaaccctgcttgaccgctcc

SEQ ID NO: 5713367 - DNA, 25 bp, Homo sapien
tgccaagtgtgctttatagaaggct

SEQ ID NO: 5713368 - DNA, 25 bp, Homo sapien
cctgacggagctggacaagatcgag

SEQ ID NO: 5713369 - DNA, 25 bp, Homo sapien
gaaactctggccgggcatggcggct

SEQ ID NO: 5713370 - DNA, 25 bp, Homo sapien
acagacaccatggcttctgtccatt

SEQ ID NO: 5713371 - DNA, 25 bp, Homo sapien
gcaaaaccagagtggctcatggcac

SEQ ID NO: 5713372 - DNA, 25 bp, Homo sapien
gtgtcgctgtgatctctgtatttgc

SEQ ID NO: 5713373 - DNA, 25 bp, Homo sapien
atcgaggagcagggccccctggacg

SEQ ID NO: 5713374 - DNA, 25 bp, Homo sapien
gacccaggctccccgcccgaggagg

SEQ ID NO: 5713375 - DNA, 25 bp, Homo sapien
gtatacatacatatgcataatatac

SEQ ID NO: 5713376 - DNA, 25 bp, Homo sapien
cttctcccatgggtcctccccttgt

SEQ ID NO: 5713377 - DNA, 25 bp, Homo sapien
ttcctgccgacacctgggctttgtg

SEQ ID NO: 5713378 - DNA, 25 bp, Homo sapien
ctgccatcagaaccctgcttgaccg

SEQ ID NO: 5713379 - DNA, 25 bp, Homo sapien
tgaggttaggacactgcgggtggct

SEQ ID NO: 5713380 - DNA, 25 bp, Homo sapien
aactgctgaatggcttcactaatgt

SEQ ID NO: 5713381 - DNA, 25 bp, Homo sapien
ttctcggcgggcagcgcgcgaggac

SEQ ID NO: 5713382 - DNA, 25 bp, Homo sapien
gactcaggtgatacaggcgaggctt

SEQ ID NO: 5713383 - DNA, 25 bp, Homo sapien
ccttgacaaaggcccagcctctgct

SEQ ID NO: 5713384 - DNA, 25 bp, Homo sapien
gccgtcctgtacaaggtgttcgtgg

SEQ ID NO: 5713385 - DNA, 25 bp, Homo sapien
gccacccttcatggagctcacgagc

SEQ ID NO: 5713386 - DNA, 25 bp, Homo sapien
caaacaaactctgatcattcacccg

SEQ ID NO: 5713387 - DNA, 25 bp, Homo sapien
aaggcccagcctctgctgcctcagg

SEQ ID NO: 5713388 - DNA, 25 bp, Homo sapien
cttctgattctcacccgcaggagca

SEQ ID NO: 5713389 - DNA, 25 bp, Homo sapien
tgaaaccccatctctactaaaaata

SEQ ID NO: 5713390 - DNA, 25 bp, Homo sapien
ccctgccatcagaaccctgcttgac

SEQ ID NO: 5713391 - DNA, 25 bp, Homo sapien
actccagcctggcaacagagcaaga

SEQ ID NO: 5713392 - DNA, 25 bp, Homo sapien
tagccggccgatcgaggagcagggc

SEQ ID NO: 5713393 - DNA, 25 bp, Homo sapien
ggctgtgtggaatcacctctcagaa

SEQ ID NO: 5713394 - DNA, 25 bp, Homo sapien
ggtggatcacaaggtcaagagatcg

SEQ ID NO: 5713395 - DNA, 25 bp, Homo sapien
gcttgaccgctccaagtcctatgag

SEQ ID NO: 5713396 - DNA, 25 bp, Homo sapien
tttgagccaactgagcaaagcagct

SEQ ID NO: 5713397 - DNA, 25 bp, Homo sapien
caccatcctggccaacatggtgaaa

SEQ ID NO: 5713398 - DNA, 25 bp, Homo sapien
tgcacaggttccaggagtacatcga

SEQ ID NO: 5713399 - DNA, 25 bp, Homo sapien
gatggaggttgtgcagctgaacctt

SEQ ID NO: 5713400 - DNA, 25 bp, Homo sapien
tcccagcacttagggaggccgaggc

SEQ ID NO: 5713401 - DNA, 25 bp, Homo sapien
ccagggctgtgtggaatcacctctc

SEQ ID NO: 5713402 - DNA, 25 bp, Homo sapien
ggactgccaagtgtgctttatagaa

SEQ ID NO: 5713403 - DNA, 25 bp, Homo sapien
caaacaaacaaacaaacaaactctg

SEQ ID NO: 5713404 - DNA, 25 bp, Homo sapien
cgccgcccttctcggcgggcagcgc

SEQ ID NO: 5713405 - DNA, 25 bp, Homo sapien
ttccaggagtacatcgatgcccacc

SEQ ID NO: 5713406 - DNA, 25 bp, Homo sapien
gcataatatacatgaccatgtatga

SEQ ID NO: 5713407 - DNA, 25 bp, Homo sapien
acaaggtcaagagatcgacaccatc

SEQ ID NO: 5713408 - DNA, 25 bp, Homo sapien
tggcttcactaatgtccctggggtc

SEQ ID NO: 5713409 - DNA, 25 bp, Homo sapien
atccggaagattgaggcctacatgg

SEQ ID NO: 5713410 - DNA, 25 bp, Homo sapien
agcgagaagaaaatcaagaagctga

SEQ ID NO: 5713411 - DNA, 25 bp, Homo sapien
attttcccttcaagagtcatctgtg

SEQ ID NO: 5713412 - DNA, 25 bp, Homo sapien
ctagtcttgttttgatttctaacgg

SEQ ID NO: 5713413 - DNA, 25 bp, Homo sapien
ctgtcacatgtttgagccaactgag

SEQ ID NO: 5713414 - DNA, 25 bp, Homo sapien
ctctcccgggccctgcggcaggcac

SEQ ID NO: 5713415 - DNA, 25 bp, Homo sapien
cggccgatcgaggagcagggccccc

SEQ ID NO: 5713416 - DNA, 25 bp, Homo sapien
aaagccactcacagggatttcacca

SEQ ID NO: 5713417 - DNA, 25 bp, Homo sapien
gtggtgtggagggactgtcccctcc

SEQ ID NO: 5713418 - DNA, 25 bp, Homo sapien
atccccggcagctccttctccttcc

SEQ ID NO: 5713419 - DNA, 25 bp, Homo sapien
tgagcgagaagaaaatcaagaagct

SEQ ID NO: 5713420 - DNA, 25 bp, Homo sapien
tgctgtttgcttcaagctgttcaca

SEQ ID NO: 5713421 - DNA, 25 bp, Homo sapien
tatgagatacagacaccatggcttc

SEQ ID NO: 5713422 - DNA, 25 bp, Homo sapien
cctggccaacatggtgaaaccccat

SEQ ID NO: 5713423 - DNA, 25 bp, Homo sapien
tgcggctgctggagaagaacggctt

SEQ ID NO: 5713424 - DNA, 25 bp, Homo sapien
tgccttcccaggggactgccaagtg

SEQ ID NO: 5713425 - DNA, 25 bp, Homo sapien
ccaggatgttgctgttcctgccgac

SEQ ID NO: 5713426 - DNA, 25 bp, Homo sapien
gcgctcgccgccgcccttctcggcg

SEQ ID NO: 5713427 - DNA, 25 bp, Homo sapien
ctactggctgagcgagaagaaaatc

SEQ ID NO: 5713428 - DNA, 25 bp, Homo sapien
ccgcccgaggaggaagatgcagacc

SEQ ID NO: 5713429 - DNA, 25 bp, Homo sapien
gcgggactgcgcgccccagctccga

SEQ ID NO: 5713430 - DNA, 25 bp, Homo sapien
ggttgcagtgagccaagatcgcacc

SEQ ID NO: 5713431 - DNA, 25 bp, Homo sapien
ctggacaagatcgagggcgtgttcg

SEQ ID NO: 5713432 - DNA, 25 bp, Homo sapien
tcatcatcaacaaccagacagggca

SEQ ID NO: 5713433 - DNA, 25 bp, Homo sapien
tgagctgggtgctggctgccctaaa

SEQ ID NO: 5713434 - DNA, 25 bp, Homo sapien
tttcccttcaagagtcatctgtgac

SEQ ID NO: 5713435 - DNA, 25 bp, Homo sapien
ctgcggcaggcactgggcgtgtcac

SEQ ID NO: 5713436 - DNA, 25 bp, Homo sapien
tcgcctggtcgcatgttcactccat

SEQ ID NO: 5713437 - DNA, 25 bp, Homo sapien
attgtcagtgtggtttggagtgagt

SEQ ID NO: 5713438 - DNA, 25 bp, Homo sapien
ggctatcgtgttcaaccaggagggc

SEQ ID NO: 5713439 - DNA, 25 bp, Homo sapien
agagttggctactggctgagcgaga

SEQ ID NO: 5713440 - DNA, 25 bp, Homo sapien
tcagtgtggtttggagtgagtgagc

SEQ ID NO: 5713441 - DNA, 25 bp, Homo sapien
cttcggcatcgacatcatcatcaac

SEQ ID NO: 5713442 - DNA, 25 bp, Homo sapien
gggcgtgtcactcttcggcatcgac

SEQ ID NO: 5713443 - DNA, 25 bp, Homo sapien
gtgctggctgccctaaaggagcacg

SEQ ID NO: 5713444 - DNA, 25 bp, Homo sapien
aaccagagtggctcatggcaccaac

SEQ ID NO: 5713445 - DNA, 25 bp, Homo sapien
agttggctactggctgagcgagaag

SEQ ID NO: 5713446 - DNA, 25 bp, Homo sapien
agagaccttgagctgggtgctggct

SEQ ID NO: 5713447 - DNA, 25 bp, Homo sapien
taggacactgcgggtggctttggga

SEQ ID NO: 5713448 - DNA, 25 bp, Homo sapien
tggccaacatggtgaaaccccatct

SEQ ID NO: 5713449 - DNA, 25 bp, Homo sapien
ccagaatttcatcaaccacaacgcc

SEQ ID NO: 5713450 - DNA, 25 bp, Homo sapien
gtgtgctttatagaaggctggaaga

SEQ ID NO: 5713451 - DNA, 25 bp, Homo sapien
caaccaggagggcctgaacgccatc

SEQ ID NO: 5713452 - DNA, 25 bp, Homo sapien
aagtgtgctttatagaaggctggaa

SEQ ID NO: 5713453 - DNA, 25 bp, Homo sapien
actgtaggggtggagtataaaccta

SEQ ID NO: 5713454 - DNA, 25 bp, Homo sapien
cattggattcagagaccttgagctg

SEQ ID NO: 5713455 - DNA, 25 bp, Homo sapien
tccgcaggcacatcagaccgtgagt

SEQ ID NO: 5713456 - DNA, 25 bp, Homo sapien
ggtgttcgtggttggcgagtcctac

SEQ ID NO: 5713457 - DNA, 25 bp, Homo sapien
tcacagggatttcaccaggatgttg

SEQ ID NO: 5713458 - DNA, 25 bp, Homo sapien
ggctactggctgagcgagaagaaaa

SEQ ID NO: 5713459 - DNA, 25 bp, Homo sapien
accatgcggctgctggagaagaacg

SEQ ID NO: 5713460 - DNA, 25 bp, Homo sapien
gcgtgttcgagcggccgagcgacga

SEQ ID NO: 5713461 - DNA, 25 bp, Homo sapien
ggccgccagactcggcctgtgggcg

SEQ ID NO: 5713462 - DNA, 25 bp, Homo sapien
tcgcatgttcactccatgaggttag

SEQ ID NO: 5713463 - DNA, 25 bp, Homo sapien
tggatcacaaggtcaagagatcgac

SEQ ID NO: 5713464 - DNA, 25 bp, Homo sapien
agagcaagactcctcaaaaaacaaa

SEQ ID NO: 5713465 - DNA, 25 bp, Homo sapien
tgagccaagatcgcaccactgcact

SEQ ID NO: 5713466 - DNA, 25 bp, Homo sapien
gacatcatcatcaacaaccagacag

SEQ ID NO: 5713467 - DNA, 25 bp, Homo sapien
gtgtcaaagccggagtcgtcatcgg

SEQ ID NO: 5713468 - DNA, 25 bp, Homo sapien
ttgacaaaggcccagcctctgctgc

SEQ ID NO: 5713469 - DNA, 25 bp, Homo sapien
gacaaaggcccagcctctgctgcct

SEQ ID NO: 5713470 - DNA, 25 bp, Homo sapien
gggatgacaccatgcggctgctgga

SEQ ID NO: 5713471 - DNA, 25 bp, Homo sapien
atcggtcctgacggagctggacaag

SEQ ID NO: 5713472 - DNA, 25 bp, Homo sapien
tcagaaccctgcttgaccgctccaa

SEQ ID NO: 5713473 - DNA, 25 bp, Homo sapien
aggtcatccgggagctctcccgggc

SEQ ID NO: 5713474 - DNA, 25 bp, Homo sapien
gtgtcactcttcggcatcgacatca

SEQ ID NO: 5713475 - DNA, 25 bp, Homo sapien
cgtcctgtacaaggtgttcgtggtt

SEQ ID NO: 5713476 - DNA, 25 bp, Homo sapien
gatcgcaccactgcactccagcctg

SEQ ID NO: 5713477 - DNA, 25 bp, Homo sapien
cctgcgtggtccagaatttcatcaa

SEQ ID NO: 5713478 - DNA, 25 bp, Homo sapien
cggggatgacaccatgcggctgctg

SEQ ID NO: 5713479 - DNA, 25 bp, Homo sapien
gcgcgccccagctccgatccccgtt

SEQ ID NO: 5713480 - DNA, 25 bp, Homo sapien
ttgtatacatacatatgcataatat

SEQ ID NO: 5713481 - DNA, 25 bp, Homo sapien
ctccagggctgtgtggaatcacctc

SEQ ID NO: 5713482 - DNA, 25 bp, Homo sapien
ggccgcaactgctgaatggcttcac

SEQ ID NO: 5713483 - DNA, 25 bp, Homo sapien
atcaagaagctgaatttccaggcct

SEQ ID NO: 5713484 - DNA, 25 bp, Homo sapien
caacgtgtcaaagccggagtcgtca

SEQ ID NO: 5713485 - DNA, 25 bp, Homo sapien
aacttcaccagaatcccaagctggt

SEQ ID NO: 5713486 - DNA, 25 bp, Homo sapien
gcagagaagtgcagctgtccttgac

SEQ ID NO: 5713487 - DNA, 25 bp, Homo sapien
aggaagtggcggcggcggcggcggg

SEQ ID NO: 5713488 - DNA, 25 bp, Homo sapien
aatttcatcaaccacaacgccgtcc

SEQ ID NO: 5713489 - DNA, 25 bp, Homo sapien
ccggtgggatccccggcagctcctt

SEQ ID NO: 5713490 - DNA, 25 bp, Homo sapien
cgtaggttgcagtgagccaagatcg

SEQ ID NO: 5713491 - DNA, 25 bp, Homo sapien
gccactggccgcaactgctgaatgg

SEQ ID NO: 5713492 - DNA, 25 bp, Homo sapien
accctgcgtggtccagaatttcatc

SEQ ID NO: 5713493 - DNA, 25 bp, Homo sapien
ggtgatacaggcgaggcttctccca

SEQ ID NO: 5713494 - DNA, 25 bp, Homo sapien
tatacatgaccatgtatgagataca

SEQ ID NO: 5713495 - DNA, 25 bp, Homo sapien
ggaggaagatgcagacctttctgaa

SEQ ID NO: 5713496 - DNA, 25 bp, Homo sapien
catcatcatcaacaaccagacaggg

SEQ ID NO: 5713497 - DNA, 25 bp, Homo sapien
cgaggagcagggccccctggacgtc

SEQ ID NO: 5713498 - DNA, 25 bp, Homo sapien
gcctggtcgcatgttcactccatga

SEQ ID NO: 5713499 - DNA, 25 bp, Homo sapien
gccagactcggcctgtgggcgattt

SEQ ID NO: 5713500 - DNA, 25 bp, Homo sapien
cccgatgccacagtcatctgccccg

SEQ ID NO: 5713501 - DNA, 25 bp, Homo sapien
accaggagggcctgaacgccatcca

SEQ ID NO: 5713502 - DNA, 25 bp, Homo sapien
gttcgagcggccgagcgacgaggtc

SEQ ID NO: 5713503 - DNA, 25 bp, Homo sapien
cgaggtcatccgggagctctcccgg

SEQ ID NO: 5713504 - DNA, 25 bp, Homo sapien
ctttctgaaagggaagagagttggc

SEQ ID NO: 5713505 - DNA, 25 bp, Homo sapien
tcactccatgaggttaggacactgc

SEQ ID NO: 5713506 - DNA, 25 bp, Homo sapien
gccacagtcatctgccccgcccagg

SEQ ID NO: 5713507 - DNA, 25 bp, Homo sapien
gatagccagtccctggagctggtgc

SEQ ID NO: 5713508 - DNA, 25 bp, Homo sapien
gaaggctggaagaccgactgaagta

SEQ ID NO: 5713509 - DNA, 25 bp, Homo sapien
tggtgggcgcctgtagtcccagcta

SEQ ID NO: 5713510 - DNA, 25 bp, Homo sapien
actgcgggtggctttgggatgggtg

SEQ ID NO: 5713511 - DNA, 25 bp, Homo sapien
ctggaagaccagttcttggctcttg

SEQ ID NO: 5713512 - DNA, 25 bp, Homo sapien
ctgcactccagcctggcaacagagc

SEQ ID NO: 5713513 - DNA, 25 bp, Homo sapien
ttcaagctgttcacaagcaacttca

SEQ ID NO: 5713514 - DNA, 25 bp, Homo sapien
cctcctacagcctggccgaccccct

SEQ ID NO: 5713515 - DNA, 25 bp, Homo sapien
ttgtgcagctgaaccttagccggcc

SEQ ID NO: 5713516 - DNA, 25 bp, Homo sapien
ttgggatgggtggtttcagggacaa

SEQ ID NO: 5713517 - DNA, 25 bp, Homo sapien
ggagctggtgcacaggttccaggag

SEQ ID NO: 5713518 - DNA, 25 bp, Homo sapien
agctctcccgggccctgcggcaggc

SEQ ID NO: 5713519 - DNA, 25 bp, Homo sapien
cagtccctggagctggtgcacaggt

SEQ ID NO: 5713520 - DNA, 25 bp, Homo sapien
caggcacatcagaccgtgagtccat

SEQ ID NO: 5713521 - DNA, 25 bp, Homo sapien
tcagaccgtgagtccatcttcttca

SEQ ID NO: 5713522 - DNA, 25 bp, Homo sapien
ggtcttcttctgattctcacccgca

SEQ ID NO: 5713523 - DNA, 25 bp, Homo sapien
gggcagcacgccgtcattgacatca

SEQ ID NO: 5713524 - DNA, 25 bp, Homo sapien
ctgactcaggtgatacaggcgaggc

SEQ ID NO: 5713525 - DNA, 25 bp, Homo sapien
agaagaaaatcaagaagctgaattt

SEQ ID NO: 5713526 - DNA, 25 bp, Homo sapien
acaccatggcttctgtccattggct

SEQ ID NO: 5713527 - DNA, 25 bp, Homo sapien
gctgtggctcatgggccattggatt

SEQ ID NO: 5713528 - DNA, 25 bp, Homo sapien
actcacattggccactggccgcaac

SEQ ID NO: 5713529 - DNA, 25 bp, Homo sapien
gggtctgtatctgccctctcttcta

SEQ ID NO: 5713530 - DNA, 25 bp, Homo sapien
ccccgcccgaggaggaagatgcaga

SEQ ID NO: 5713531 - DNA, 25 bp, Homo sapien
acttttggaaacatgaagaaataaa

SEQ ID NO: 5713532 - DNA, 25 bp, Homo sapien
cttctccgcaggcacatcagaccgt

SEQ ID NO: 5713533 - DNA, 25 bp, Homo sapien
gagtacagttaatgttgtgtttatt

SEQ ID NO: 5713534 - DNA, 25 bp, Homo sapien
agatacagacaccatggcttctgtc

SEQ ID NO: 5713535 - DNA, 25 bp, Homo sapien
attcagagaccttgagctgggtgct

SEQ ID NO: 5713536 - DNA, 25 bp, Homo sapien
cttagggaggccgaggcaggtggat

SEQ ID NO: 5713537 - DNA, 25 bp, Homo sapien
gctgaatttccaggccttcgccgag

SEQ ID NO: 5713538 - DNA, 25 bp, Homo sapien
tcccattcatttgcaaaaccagagt

SEQ ID NO: 5713539 - DNA, 25 bp, Homo sapien
aatgccttcccaggggactgccaag

SEQ ID NO: 5713540 - DNA, 25 bp, Homo sapien
tttcagaaatgattacattttccct

SEQ ID NO: 5713541 - DNA, 25 bp, Homo sapien
gagcgacgaggtcatccgggagctc

SEQ ID NO: 5713542 - DNA, 25 bp, Homo sapien
cacagtcatctgccccgcccaggca

SEQ ID NO: 5713543 - DNA, 25 bp, Homo sapien
gagctgtggctcatgggccattgga

SEQ ID NO: 5713544 - DNA, 25 bp, Homo sapien
gtgatctctgtatttgctaactagt

SEQ ID NO: 5713545 - DNA, 25 bp, Homo sapien
ggccttcgccgagctgtgcaggaag

SEQ ID NO: 5713546 - DNA, 25 bp, Homo sapien
tataaacctaacttttggaaacatg

SEQ ID NO: 5713547 - DNA, 25 bp, Homo sapien
gcggcggcggcggcgggactgcgcg

SEQ ID NO: 5713548 - DNA, 25 bp, Homo sapien
gctggaagaccgactgaagtaggaa

SEQ ID NO: 5713549 - DNA, 25 bp, Homo sapien
ccaccctgagaccatcgtcctggac

SEQ ID NO: 5713550 - DNA, 25 bp, Homo sapien
aagcaacttcaccagaatcccaagc

SEQ ID NO: 5713551 - DNA, 25 bp, Homo sapien
agagagttggctactggctgagcga

SEQ ID NO: 5713552 - DNA, 25 bp, Homo sapien
agaaatgattacattttcccttcaa

SEQ ID NO: 5713553 - DNA, 25 bp, Homo sapien
acaggcgaggcttctcccatgggtc

SEQ ID NO: 5713554 - DNA, 25 bp, Homo sapien
ttctgtccattggctcattcgcctg

SEQ ID NO: 5713555 - DNA, 25 bp, Homo sapien
gtgcgcgggcgctcgccgccgccct

SEQ ID NO: 5713556 - DNA, 25 bp, Homo sapien
tcgggaggcgtaggttgcagtgagc

SEQ ID NO: 5713557 - DNA, 25 bp, Homo sapien
cactggccgcaactgctgaatggct

SEQ ID NO: 5713558 - DNA, 25 bp, Homo sapien
ggagtgagtgagcctcccgcactgc

SEQ ID NO: 5713559 - DNA, 25 bp, Homo sapien
cggcgggactgcgcgccccagctcc

SEQ ID NO: 5713560 - DNA, 25 bp, Homo sapien
gtgcagctgtccttgacaaaggccc

SEQ ID NO: 5713561 - DNA, 25 bp, Homo sapien
gcttctgtccattggctcattcgcc

SEQ ID NO: 5713562 - DNA, 25 bp, Homo sapien
catctgccccgcccaggcataagcc

SEQ ID NO: 5713563 - DNA, 25 bp, Homo sapien
gactgtcccctcctacagcctggcc

SEQ ID NO: 5713564 - DNA, 25 bp, Homo sapien
tggccactggccgcaactgctgaat

SEQ ID NO: 5713565 - DNA, 25 bp, Homo sapien
gcctggcaacagagcaagactcctc

SEQ ID NO: 5713566 - DNA, 25 bp, Homo sapien
gctcgcggcgcgcgccggccgccag

SEQ ID NO: 5713567 - DNA, 25 bp, Homo sapien
agctggtgcacaggttccaggagta

SEQ ID NO: 5713568 - DNA, 25 bp, Homo sapien
tcgccacccttcatggagctcacga

SEQ ID NO: 5713569 - DNA, 25 bp, Homo sapien
caaccacaacgccgtcctgtacaag

SEQ ID NO: 5713570 - DNA, 25 bp, Homo sapien
gtccattggctcattcgcctggtcg

SEQ ID NO: 5713571 - DNA, 25 bp, Homo sapien
ctgtccattggctcattcgcctggt

SEQ ID NO: 5713572 - DNA, 25 bp, Homo sapien
ggctccccgcccgaggaggaagatg

SEQ ID NO: 5713573 - DNA, 25 bp, Homo sapien
cggctgctggagaagaacggcttga

SEQ ID NO: 5713574 - DNA, 25 bp, Homo sapien
aggcgaggcttctcccatgggtcct

SEQ ID NO: 5713575 - DNA, 25 bp, Homo sapien
cagaatcccaagctggttcgtactt

SEQ ID NO: 5713576 - DNA, 25 bp, Homo sapien
ccgagcgacgaggtcatccgggagc

SEQ ID NO: 5713577 - DNA, 25 bp, Homo sapien
cacaggttccaggagtacatcgatg

SEQ ID NO: 5713578 - DNA, 25 bp, Homo sapien
atccacaagctgactgacgtcatcc

SEQ ID NO: 5713579 - DNA, 25 bp, Homo sapien
gttcacaagcaacttcaccagaatc

SEQ ID NO: 5713580 - DNA, 25 bp, Homo sapien
gtccagaatttcatcaaccacaacg

SEQ ID NO: 5713581 - DNA, 25 bp, Homo sapien
actccatggcctcctgctggttggg

SEQ ID NO: 5713582 - DNA, 25 bp, Homo sapien
aaaccccatctctactaaaaataca

SEQ ID NO: 5713583 - DNA, 25 bp, Homo sapien
aagggagccagcctgtcgtttgtcc

SEQ ID NO: 5713584 - DNA, 25 bp, Homo sapien
caagactcctcaaaaaacaaacaaa

SEQ ID NO: 5713585 - DNA, 25 bp, Homo sapien
cttctagcctggaagaccagttctt

SEQ ID NO: 5713586 - DNA, 25 bp, Homo sapien
tgtaccttctctctgcacagccatt

SEQ ID NO: 5713587 - DNA, 25 bp, Homo sapien
caggcactgggcgtgtcactcttcg

SEQ ID NO: 5713588 - DNA, 25 bp, Homo sapien
gctggctgccctaaaggagcacgac

SEQ ID NO: 5713589 - DNA, 25 bp, Homo sapien
ctggacatggtggtgggcgcctgta

SEQ ID NO: 5713590 - DNA, 25 bp, Homo sapien
gccagcctggccacaccccgatgcc

SEQ ID NO: 5713591 - DNA, 25 bp, Homo sapien
gccggccgatcgaggagcagggccc

SEQ ID NO: 5713592 - DNA, 25 bp, Homo sapien
tcaatgccttcccaggggactgcca

SEQ ID NO: 5713593 - DNA, 25 bp, Homo sapien
caggccttcgccgagctgtgcagga

SEQ ID NO: 5713594 - DNA, 25 bp, Homo sapien
aagcgagggatggaggttgtgcagc

SEQ ID NO: 5713595 - DNA, 25 bp, Homo sapien
attctcacccgcaggagcacccaga

SEQ ID NO: 5713596 - DNA, 25 bp, Homo sapien
ctctcacgagatggctatcgtgttc

SEQ ID NO: 5713597 - DNA, 25 bp, Homo sapien
actggctgagcgagaagaaaatcaa

SEQ ID NO: 5713598 - DNA, 25 bp, Homo sapien
gcctcctgctggttggggtcttctt

SEQ ID NO: 5713599 - DNA, 25 bp, Homo sapien
gtccccgccgccgggaggaggtgcc

SEQ ID NO: 5713600 - DNA, 25 bp, Homo sapien
ttcactaatgtccctggggtctgta

SEQ ID NO: 5713601 - DNA, 25 bp, Homo sapien
ccgctccaagtcctatgagctcatc

SEQ ID NO: 5713602 - DNA, 25 bp, Homo sapien
ctacagcctggccgacccccttcct

SEQ ID NO: 5713603 - DNA, 25 bp, Homo sapien
ctgggtgctggctgccctaaaggag

SEQ ID NO: 5713604 - DNA, 25 bp, Homo sapien
ttcagggacaaggtgtcgctgtgat

SEQ ID NO: 5713605 - DNA, 25 bp, Homo sapien
actcgctcgcggcgcgcgccggccg

SEQ ID NO: 5713606 - DNA, 25 bp, Homo sapien
ggagctcacgagcctgtgcggggat

SEQ ID NO: 5713607 - DNA, 25 bp, Homo sapien
gggactgcgcgccccagctccgatc

SEQ ID NO: 5713608 - DNA, 25 bp, Homo sapien
caggaagcgagggatggaggttgtg

SEQ ID NO: 5713609 - DNA, 25 bp, Homo sapien
atttcaccaggatgttgctgttcct

SEQ ID NO: 5713610 - DNA, 25 bp, Homo sapien
catgaggttaggacactgcgggtgg

SEQ ID NO: 5713611 - DNA, 25 bp, Homo sapien
caatagcgccagccgttaaaaaaaa

SEQ ID NO: 5713612 - DNA, 25 bp, Homo sapien
gggatgggtggtttcagggacaagg

SEQ ID NO: 5713613 - DNA, 25 bp, Homo sapien
agcatgactccatggcctcctgctg

SEQ ID NO: 5713614 - DNA, 25 bp, Homo sapien
taggttgcagtgagccaagatcgca

SEQ ID NO: 5713615 - DNA, 25 bp, Homo sapien
gcctgccagacagccaccccaagac

SEQ ID NO: 5713616 - DNA, 25 bp, Homo sapien
cccaggctccccgcccgaggaggaa

SEQ ID NO: 5713617 - DNA, 25 bp, Homo sapien
tcattcacccggtgggatccccggc

SEQ ID NO: 5713618 - DNA, 25 bp, Homo sapien
ccccctggacgtcatcatccacaag

SEQ ID NO: 5713619 - DNA, 25 bp, Homo sapien
cacaacgccgtcctgtacaaggtgt

SEQ ID NO: 5713620 - DNA, 25 bp, Homo sapien
gaaaagccactcacagggatttcac

SEQ ID NO: 5713621 - DNA, 25 bp, Homo sapien
gacccccccttttcagaaatgatta

SEQ ID NO: 5713622 - DNA, 25 bp, Homo sapien
gtgtggaatcacctctcagaagctc

SEQ ID NO: 5713623 - DNA, 25 bp, Homo sapien
gcgggcagcgcgcgaggaccaggcc

SEQ ID NO: 5713624 - DNA, 25 bp, Homo sapien
atgccacagtcatctgccccgccca

SEQ ID NO: 5713625 - DNA, 25 bp, Homo sapien
ccgccagactcggcctgtgggcgat

SEQ ID NO: 5713626 - DNA, 25 bp, Homo sapien
cgatgcccaccctgagaccatcgtc

SEQ ID NO: 5713627 - DNA, 25 bp, Homo sapien
gcctctgctgcctcaggccagcctg

SEQ ID NO: 5713628 - DNA, 25 bp, Homo sapien
ataagcctgactcaggtgatacagg

SEQ ID NO: 5713629 - DNA, 25 bp, Homo sapien
tagccagtccctggagctggtgcac

SEQ ID NO: 5713630 - DNA, 25 bp, Homo sapien
tgaagaaataaacaatagcgccagc

SEQ ID NO: 5713631 - DNA, 25 bp, Homo sapien
gcactccagcctggcaacagagcaa

SEQ ID NO: 5713632 - DNA, 25 bp, Homo sapien
ccagccaccctgcgtggtccagaat

SEQ ID NO: 5713633 - DNA, 25 bp, Homo sapien
ccacaccccgatgccacagtcatct

SEQ ID NO: 5713634 - DNA, 25 bp, Homo sapien
caacgccgtcctgtacaaggtgttc

SEQ ID NO: 5713635 - DNA, 25 bp, Homo sapien
gaagatgcagacctttctgaaaggg

SEQ ID NO: 5713636 - DNA, 25 bp, Homo sapien
aaaaccagagtggctcatggcacca

SEQ ID NO: 5713637 - DNA, 25 bp, Homo sapien
ctgagcaaagcagctgttgcctgcc

SEQ ID NO: 5713638 - DNA, 25 bp, Homo sapien
cgccgtcattgacatcaatgccttc

SEQ ID NO: 5713639 - DNA, 25 bp, Homo sapien
tcgagcggccgagcgacgaggtcat

SEQ ID NO: 5713640 - DNA, 25 bp, Homo sapien
tcaagagatcgacaccatcctggcc

SEQ ID NO: 5713641 - DNA, 25 bp, Homo sapien
ctggccgggcatggcggctcacgcc

SEQ ID NO: 5713642 - DNA, 25 bp, Homo sapien
gtggaatcacctctcagaagctcac

SEQ ID NO: 5713643 - DNA, 25 bp, Homo sapien
agtccatcttcttcaacagccacaa

SEQ ID NO: 5713644 - DNA, 25 bp, Homo sapien
gcgcctgtagtcccagctacttggg

SEQ ID NO: 5713645 - DNA, 25 bp, Homo sapien
cgtcatcggtcctgacggagctgga

SEQ ID NO: 5713646 - DNA, 25 bp, Homo sapien
ctatgagctcatccggaagattgag

SEQ ID NO: 5713647 - DNA, 25 bp, Homo sapien
cctgaacgccatccagccaccctgc

SEQ ID NO: 5713648 - DNA, 25 bp, Homo sapien
tggagggactgtcccctcctacagc

SEQ ID NO: 5713649 - DNA, 25 bp, Homo sapien
gtggagtataaacctaacttttgga

SEQ ID NO: 5713650 - DNA, 25 bp, Homo sapien
ccttcgccgagctgtgcaggaagcg

SEQ ID NO: 5713651 - DNA, 25 bp, Homo sapien
gcacagccattgtcagtgtggtttg

SEQ ID NO: 5713652 - DNA, 25 bp, Homo sapien
cctagaaactctggccgggcatggc

SEQ ID NO: 5713653 - DNA, 25 bp, Homo sapien
tcaccagaatcccaagctggttcgt

SEQ ID NO: 5713654 - DNA, 25 bp, Homo sapien
ctcactctgaaaagccactcacagg

SEQ ID NO: 5713655 - DNA, 25 bp, Homo sapien
aagatcgcaccactgcactccagcc

SEQ ID NO: 5713656 - DNA, 25 bp, Homo sapien
ttgaggcctacatggaagacgacag

SEQ ID NO: 5713657 - DNA, 25 bp, Homo sapien
catgactccatggcctcctgctggt

SEQ ID NO: 5713658 - DNA, 25 bp, Homo sapien
ccaggccgaggaggaagtggcggcg

SEQ ID NO: 5713659 - DNA, 25 bp, Homo sapien
ctgcacagccattgtcagtgtggtt

SEQ ID NO: 5713660 - DNA, 25 bp, Homo sapien
cctgtgcggggatgacaccatgcgg

SEQ ID NO: 5713661 - DNA, 25 bp, Homo sapien
gagtacatcgatgcccaccctgaga

SEQ ID NO: 5713662 - DNA, 25 bp, Homo sapien
gtcccctcctacagcctggccgacc

SEQ ID NO: 5713663 - DNA, 25 bp, Homo sapien
gtttatttctgtaactgtaggggtg

SEQ ID NO: 5713664 - DNA, 25 bp, Homo sapien
ttgggaggctgaggcaggagaattg

SEQ ID NO: 5713665 - DNA, 25 bp, Homo sapien
aaatgattacattttcccttcaaga

SEQ ID NO: 5713666 - DNA, 25 bp, Homo sapien
gctgcctcaggccagcctggccaca

SEQ ID NO: 5713667 - DNA, 25 bp, Homo sapien
ccgagctgtggctcatgggccattg

SEQ ID NO: 5713668 - DNA, 25 bp, Homo sapien
accccgatgccacagtcatctgccc

SEQ ID NO: 5713669 - DNA, 25 bp, Homo sapien
gtgcccactcgctcgcggcgcgcgc

SEQ ID NO: 5713670 - DNA, 25 bp, Homo sapien
catgcggctgctggagaagaacggc

SEQ ID NO: 5713671 - DNA, 25 bp, Homo sapien
gactcggcctgtgggcgatttcctc

SEQ ID NO: 5713672 - DNA, 25 bp, Homo sapien
tctgccccgcccaggcataagcctg

SEQ ID NO: 5713673 - DNA, 25 bp, Homo sapien
agccaccctgcgtggtccagaattt

SEQ ID NO: 5713674 - DNA, 25 bp, Homo sapien
atcgatgcccaccctgagaccatcg

SEQ ID NO: 5713675 - DNA, 25 bp, Homo sapien
tctccttcccgagctgtggctcatg

SEQ ID NO: 5713676 - DNA, 25 bp, Homo sapien
gcacgacccctccagcctggtgacc

SEQ ID NO: 5713677 - DNA, 25 bp, Homo sapien
ccgaggaggaagtggcggcggcggc

SEQ ID NO: 5713678 - DNA, 25 bp, Homo sapien
tgttgctgttcctgccgacacctgg

SEQ ID NO: 5713679 - DNA, 25 bp, Homo sapien
atacaggcgaggcttctcccatggg

SEQ ID NO: 5713680 - DNA, 25 bp, Homo sapien
cagcctggcaacagagcaagactcc

SEQ ID NO: 5713681 - DNA, 25 bp, Homo sapien
tacttaatttgtatacatacatatg

SEQ ID NO: 5713682 - DNA, 25 bp, Homo sapien
ttggagtgagtgagcctcccgcact

SEQ ID NO: 5713683 - DNA, 25 bp, Homo sapien
gatcacaaggtcaagagatcgacac

SEQ ID NO: 5713684 - DNA, 25 bp, Homo sapien
acggcttgactttcccattcatttg

SEQ ID NO: 5713685 - DNA, 25 bp, Homo sapien
ttcaaccaggagggcctgaacgcca

SEQ ID NO: 5713686 - DNA, 25 bp, Homo sapien
cactgcactccagcctggcaacaga

SEQ ID NO: 5713687 - DNA, 25 bp, Homo sapien
cccccttttcagaaatgattacatt

SEQ ID NO: 5713688 - DNA, 25 bp, Homo sapien
attggctcattcgcctggtcgcatg

SEQ ID NO: 5713689 - DNA, 25 bp, Homo sapien
ctatcgtgttcaaccaggagggcct

SEQ ID NO: 5713690 - DNA, 25 bp, Homo sapien
ccttcccaggggactgccaagtgtg

SEQ ID NO: 5713691 - DNA, 25 bp, Homo sapien
tacaccgtggtccagaggccctcac

SEQ ID NO: 5713692 - DNA, 25 bp, Homo sapien
gtgtttatttctgtaactgtagggg

SEQ ID NO: 5713693 - DNA, 25 bp, Homo sapien
acaagatcgagggcgtgttcgagcg

SEQ ID NO: 5713694 - DNA, 25 bp, Homo sapien
accagaatgatagccagtccctgga

SEQ ID NO: 5713695 - DNA, 25 bp, Homo sapien
ttcttggctcttgggcactcacatt

SEQ ID NO: 5713696 - DNA, 25 bp, Homo sapien
ccgtggtccagaggccctcactcaa

SEQ ID NO: 5713697 - DNA, 25 bp, Homo sapien
acattttcccttcaagagtcatctg

SEQ ID NO: 5713698 - DNA, 25 bp, Homo sapien
tgagcctcccgcactgctcagggga

SEQ ID NO: 5713699 - DNA, 25 bp, Homo sapien
tgtccctggggtctgtatctgccct

SEQ ID NO: 5713700 - DNA, 25 bp, Homo sapien
tggctgccctaaaggagcacgaccc

SEQ ID NO: 5713701 - DNA, 25 bp, Homo sapien
tgggctttgtgacaaatgctgtttg

SEQ ID NO: 5713702 - DNA, 25 bp, Homo sapien
accacaacgccgtcctgtacaaggt

SEQ ID NO: 5713703 - DNA, 25 bp, Homo sapien
tggtccagaatttcatcaaccacaa

SEQ ID NO: 5713704 - DNA, 25 bp, Homo sapien
aagccgaccagaatgatagccagtc

SEQ ID NO: 5713705 - DNA, 25 bp, Homo sapien
caccccaagaccaagggagccagcc

SEQ ID NO: 5713706 - DNA, 25 bp, Homo sapien
gcatgttcactccatgaggttagga

SEQ ID NO: 5713707 - DNA, 25 bp, Homo sapien
cggcggcggcgggactgcgcgcccc

SEQ ID NO: 5713708 - DNA, 25 bp, Homo sapien
agagctggtgagcatgactccatgg

SEQ ID NO: 5713709 - DNA, 25 bp, Homo sapien
taacttttggaaacatgaagaaata

SEQ ID NO: 5713710 - DNA, 25 bp, Homo sapien
gtcattgacatcaatgccttcccag

SEQ ID NO: 5713711 - DNA, 25 bp, Homo sapien
tcacccggtgggatccccggcagct

SEQ ID NO: 5713712 - DNA, 25 bp, Homo sapien
tgtgcaggaagcgagggatggaggt

SEQ ID NO: 5713713 - DNA, 25 bp, Homo sapien
tcatccggaagattgaggcctacat

SEQ ID NO: 5713714 - DNA, 25 bp, Homo sapien
tgaccatgtatgagatacagacacc

SEQ ID NO: 5713715 - DNA, 25 bp, Homo sapien
gattacattttcccttcaagagtca

SEQ ID NO: 5713716 - DNA, 25 bp, Homo sapien
aatgtccctggggtctgtatctgcc

SEQ ID NO: 5713717 - DNA, 25 bp, Homo sapien
aaaatacaaaaattagctggacatg

SEQ ID NO: 5713718 - DNA, 25 bp, Homo sapien
tgactttcccattcatttgcaaaac

SEQ ID NO: 5713719 - DNA, 25 bp, Homo sapien
agaccgtgagtccatcttcttcaac

SEQ ID NO: 5713720 - DNA, 25 bp, Homo sapien
ggttggggtcttcttctgattctca

SEQ ID NO: 5713721 - DNA, 25 bp, Homo sapien
gctttatagaaggctggaagaccga

SEQ ID NO: 5713722 - DNA, 25 bp, Homo sapien
gacaggatctgctcgccacccttca

SEQ ID NO: 5713723 - DNA, 25 bp, Homo sapien
gaggccctcactcaagaacttctcc

SEQ ID NO: 5713724 - DNA, 25 bp, Homo sapien
ctgtatctgccctctcttctattcc

SEQ ID NO: 5713725 - DNA, 25 bp, Homo sapien
tgctggttggggtcttcttctgatt

SEQ ID NO: 5713726 - DNA, 25 bp, Homo sapien
gcctgtcatcccagcacttagggag

SEQ ID NO: 5713727 - DNA, 25 bp, Homo sapien
gcaccactgcactccagcctggcaa

SEQ ID NO: 5713728 - DNA, 25 bp, Homo sapien
tgagtgagcctcccgcactgctcag

SEQ ID NO: 5713729 - DNA, 25 bp, Homo sapien
ctcactcaagaacttctccgcaggc

SEQ ID NO: 5713730 - DNA, 25 bp, Homo sapien
aagagatcgacaccatcctggccaa

SEQ ID NO: 5713731 - DNA, 25 bp, Homo sapien
tgctaactagtcttgttttgatttc

SEQ ID NO: 5713732 - DNA, 25 bp, Homo sapien
ttgcagtgagccaagatcgcaccac

SEQ ID NO: 5713733 - DNA, 25 bp, Homo sapien
ggcaggcactgggcgtgtcactctt

SEQ ID NO: 5713734 - DNA, 25 bp, Homo sapien
caggggagagctggtgagcatgact

SEQ ID NO: 5713735 - DNA, 25 bp, Homo sapien
cctcccgcactgctcaggggagagc

SEQ ID NO: 5713736 - DNA, 25 bp, Homo sapien
cagacagggcagcacgccgtcattg

SEQ ID NO: 5713737 - DNA, 25 bp, Homo sapien
tgaatttccaggccttcgccgagct

SEQ ID NO: 5713738 - DNA, 25 bp, Homo sapien
ttctaacggtctagtggagtacagt

SEQ ID NO: 5713739 - DNA, 25 bp, Homo sapien
tctgtatttgctaactagtcttgtt

SEQ ID NO: 5713740 - DNA, 25 bp, Homo sapien
agacaccatggcttctgtccattgg

SEQ ID NO: 5713741 - DNA, 25 bp, Homo sapien
ctctcagaagctcactctgaaaagc

SEQ ID NO: 5713742 - DNA, 25 bp, Homo sapien
gcggcggcgggactgcgcgccccag

SEQ ID NO: 5713743 - DNA, 25 bp, Homo sapien
gcagcacgccgtcattgacatcaat

SEQ ID NO: 5713744 - DNA, 25 bp, Homo sapien
aggttaggacactgcgggtggcttt

SEQ ID NO: 5713745 - DNA, 25 bp, Homo sapien
agcctgtgcggggatgacaccatgc

SEQ ID NO: 5713746 - DNA, 25 bp, Homo sapien
cgtggtccagaatttcatcaaccac

SEQ ID NO: 5713747 - DNA, 25 bp, Homo sapien
atggtggtgggcgcctgtagtccca

SEQ ID NO: 5713748 - DNA, 25 bp, Homo sapien
ttgctgttcctgccgacacctgggc

SEQ ID NO: 5713749 - DNA, 25 bp, Homo sapien
aactctgatcattcacccggtggga

SEQ ID NO: 5713750 - DNA, 25 bp, Homo sapien
cggtcctgacggagctggacaagat

SEQ ID NO: 5713751 - DNA, 25 bp, Homo sapien
gcgacgaggtcatccgggagctctc

SEQ ID NO: 5713752 - DNA, 25 bp, Homo sapien
caaaggcccagcctctgctgcctca

SEQ ID NO: 5713753 - DNA, 25 bp, Homo sapien
ctctctgcacagccattgtcagtgt

SEQ ID NO: 5713754 - DNA, 25 bp, Homo sapien
tgatacaggcgaggcttctcccatg

SEQ ID NO: 5713755 - DNA, 25 bp, Homo sapien
ccggccgccagactcggcctgtggg

SEQ ID NO: 5713756 - DNA, 25 bp, Homo sapien
ggagctctcccgggccctgcggcag

SEQ ID NO: 5713757 - DNA, 25 bp, Homo sapien
gttaggacactgcgggtggctttgg

SEQ ID NO: 5713758 - DNA, 25 bp, Homo sapien
tcccgagctgtggctcatgggccat

SEQ ID NO: 5713759 - DNA, 25 bp, Homo sapien
acaagctgactgacgtcatccttga

SEQ ID NO: 5713760 - DNA, 25 bp, Homo sapien
accctgagaccatcgtcctggaccc

SEQ ID NO: 5713761 - DNA, 25 bp, Homo sapien
aggtgtcgctgtgatctctgtattt

SEQ ID NO: 5713762 - DNA, 25 bp, Homo sapien
gtctgtgctgtgtaccttctctctg

SEQ ID NO: 5713763 - DNA, 25 bp, Homo sapien
tgctggagaagaacggcttgacttt

SEQ ID NO: 5713764 - DNA, 25 bp, Homo sapien
acatggtgaaaccccatctctacta

SEQ ID NO: 5713765 - DNA, 25 bp, Homo sapien
gcccgaggaggaagatgcagacctt

SEQ ID NO: 5713766 - DNA, 25 bp, Homo sapien
agggatttcaccaggatgttgctgt

SEQ ID NO: 5713767 - DNA, 25 bp, Homo sapien
ctgggcgtgtcactcttcggcatcg

SEQ ID NO: 5713768 - DNA, 25 bp, Homo sapien
gaagctgtcacatgtttgagccaac

SEQ ID NO: 5713769 - DNA, 25 bp, Homo sapien
gacatcaatgccttcccaggggact

SEQ ID NO: 5713770 - DNA, 25 bp, Homo sapien
cgtttgtccttctagcctggaagac

SEQ ID NO: 5713771 - DNA, 25 bp, Homo sapien
cacatgtttgagccaactgagcaaa

SEQ ID NO: 5713772 - DNA, 25 bp, Homo sapien
aggctggaagaccgactgaagtagg

SEQ ID NO: 5713773 - DNA, 25 bp, Homo sapien
tctcacccgcaggagcacccagacc

SEQ ID NO: 5713774 - DNA, 25 bp, Homo sapien
ctcggcgggcagcgcgcgaggacca

SEQ ID NO: 5713775 - DNA, 25 bp, Homo sapien
gtgttcgagcggccgagcgacgagg

SEQ ID NO: 5713776 - DNA, 25 bp, Homo sapien
gctgagcgagaagaaaatcaagaag

SEQ ID NO: 5713777 - DNA, 25 bp, Homo sapien
gaggctgaggcaggagaattgcttg

SEQ ID NO: 5713778 - DNA, 25 bp, Homo sapien
cgccgagctgtgcaggaagcgaggg

SEQ ID NO: 5713779 - DNA, 25 bp, Homo sapien
ccgggaggaggtgcccactcgctcg

SEQ ID NO: 5713780 - DNA, 25 bp, Homo sapien
accagaatcccaagctggttcgtac

SEQ ID NO: 5713781 - DNA, 25 bp, Homo sapien
ttgggcactcacattggccactggc

SEQ ID NO: 5713782 - DNA, 25 bp, Homo sapien
agctcactctgaaaagccactcaca

SEQ ID NO: 5713783 - DNA, 25 bp, Homo sapien
gcaggagcacccagacccccccttt

SEQ ID NO: 5713784 - DNA, 25 bp, Homo sapien
aactctcacgagatggctatcgtgt

SEQ ID NO: 5713785 - DNA, 25 bp, Homo sapien
tcctacagcctggccgacccccttc

SEQ ID NO: 5713786 - DNA, 25 bp, Homo sapien
tccttcccgagctgtggctcatggg

SEQ ID NO: 5713787 - DNA, 25 bp, Homo sapien
aagtaggaagctgtcacatgtttga

SEQ ID NO: 5713788 - DNA, 25 bp, Homo sapien
ctggttcgtacttaatttgtataca

SEQ ID NO: 5713789 - DNA, 25 bp, Homo sapien
ctgctgcctcaggccagcctggcca

SEQ ID NO: 5713790 - DNA, 25 bp, Homo sapien
tcttgttttgatttctaacggtcta

SEQ ID NO: 5713791 - DNA, 25 bp, Homo sapien
gccaccccaagaccaagggagccag

SEQ ID NO: 5713792 - DNA, 25 bp, Homo sapien
atgattacattttcccttcaagagt

SEQ ID NO: 5713793 - DNA, 25 bp, Homo sapien
gcgcgggcgctcgccgccgcccttc

SEQ ID NO: 5713794 - DNA, 25 bp, Homo sapien
ccactcgctcgcggcgcgcgccggc

SEQ ID NO: 5713795 - DNA, 25 bp, Homo sapien
ccgggcatggcggctcacgcctgtc

SEQ ID NO: 5713796 - DNA, 25 bp, Homo sapien
ctgtccttgacaaaggcccagcctc

SEQ ID NO: 5713797 - DNA, 25 bp, Homo sapien
acgtcatccttgaagccgaccagaa

SEQ ID NO: 5713798 - DNA, 25 bp, Homo sapien
cgcgcgccggccgccagactcggcc

SEQ ID NO: 5713799 - DNA, 25 bp, Homo sapien
gggcgctcgccgccgcccttctcgg

SEQ ID NO: 5713800 - DNA, 25 bp, Homo sapien
aagatcgagggcgtgttcgagcggc

SEQ ID NO: 5713801 - DNA, 25 bp, Homo sapien
cttcctccagggctgtgtggaatca

SEQ ID NO: 5713802 - DNA, 25 bp, Homo sapien
caacatggtgaaaccccatctctac

SEQ ID NO: 5713803 - DNA, 25 bp, Homo sapien
gagcacgacccctccagcctggtga

SEQ ID NO: 5713804 - DNA, 25 bp, Homo sapien
accgactgaagtaggaagctgtcac

SEQ ID NO: 5713805 - DNA, 25 bp, Homo sapien
cagaatgatagccagtccctggagc

SEQ ID NO: 5713806 - DNA, 25 bp, Homo sapien
cgatgccacagtcatctgccccgcc

SEQ ID NO: 5713807 - DNA, 25 bp, Homo sapien
gcagctgaaccttagccggccgatc

SEQ ID NO: 5713808 - DNA, 25 bp, Homo sapien
atctgccctctcttctattccctag

SEQ ID NO: 5713809 - DNA, 25 bp, Homo sapien
ccacaagctgactgacgtcatcctt

SEQ ID NO: 5713810 - DNA, 25 bp, Homo sapien
tgtttgagccaactgagcaaagcag

SEQ ID NO: 5713811 - DNA, 25 bp, Homo sapien
ggcactgggcgtgtcactcttcggc

SEQ ID NO: 5713812 - DNA, 25 bp, Homo sapien
tttcctccggacccaggctccccgc

SEQ ID NO: 5713813 - DNA, 25 bp, Homo sapien
taaaaatacaaaaattagctggaca

SEQ ID NO: 5713814 - DNA, 25 bp, Homo sapien
gggagccagcctgtcgtttgtcctt

SEQ ID NO: 5713815 - DNA, 25 bp, Homo sapien
gtggctttgggatgggtggtttcag

SEQ ID NO: 5713816 - DNA, 25 bp, Homo sapien
aggaccaggccgaggaggaagtggc

SEQ ID NO: 5713817 - DNA, 25 bp, Homo sapien
taaacctaacttttggaaacatgaa

SEQ ID NO: 5713818 - DNA, 25 bp, Homo sapien
gaggccgaggcaggtggatcacaag

SEQ ID NO: 5713819 - DNA, 25 bp, Homo sapien
aacatgaagaaataaacaatagcgc

SEQ ID NO: 5713820 - DNA, 25 bp, Homo sapien
gtgagaaagggtctgtgctgtgtac

SEQ ID NO: 5713821 - DNA, 25 bp, Homo sapien
gcgccccagctccgatccccgttcc

SEQ ID NO: 5713822 - DNA, 25 bp, Homo sapien
cacctgggctttgtgacaaatgctg

SEQ ID NO: 5713823 - DNA, 25 bp, Homo sapien
atgggccattggattcagagacctt

SEQ ID NO: 5713824 - DNA, 25 bp, Homo sapien
gctcatggcaccaactctcacgaga

SEQ ID NO: 5713825 - DNA, 25 bp, Homo sapien
ggaagcgagggatggaggttgtgca

SEQ ID NO: 5713826 - DNA, 25 bp, Homo sapien
caggagggcctgaacgccatccagc

SEQ ID NO: 5713827 - DNA, 25 bp, Homo sapien
tttcccattcatttgcaaaaccaga

SEQ ID NO: 5713828 - DNA, 25 bp, Homo sapien
caggggactgccaagtgtgctttat

SEQ ID NO: 5713829 - DNA, 25 bp, Homo sapien
cagcctggccacaccccgatgccac

SEQ ID NO: 5713830 - DNA, 25 bp, Homo sapien
agccattgtcagtgtggtttggagt

SEQ ID NO: 5713831 - DNA, 25 bp, Homo sapien
actgacgtcatccttgaagccgacc

SEQ ID NO: 5713832 - DNA, 25 bp, Homo sapien
tgggtggtttcagggacaaggtgtc

SEQ ID NO: 5713833 - DNA, 25 bp, Homo sapien
atttgtatacatacatatgcataat

SEQ ID NO: 5713834 - DNA, 25 bp, Homo sapien
gccgccgcccttctcggcgggcagc

SEQ ID NO: 5713835 - DNA, 25 bp, Homo sapien
tctagcctggaagaccagttcttgg

SEQ ID NO: 5713836 - DNA, 25 bp, Homo sapien
tgactgacgtcatccttgaagccga

SEQ ID NO: 5713837 - DNA, 25 bp, Homo sapien
ccggcagctccttctccttcccgag

SEQ ID NO: 5713838 - DNA, 25 bp, Homo sapien
tcatctgtgacctggtggtgtggag

SEQ ID NO: 5713839 - DNA, 25 bp, Homo sapien
gccgccgggaggaggtgcccactcg

SEQ ID NO: 5713840 - DNA, 25 bp, Homo sapien
gcagtgagccaagatcgcaccactg

SEQ ID NO: 5713841 - DNA, 25 bp, Homo sapien
tgtggagggactgtcccctcctaca

SEQ ID NO: 5713842 - DNA, 25 bp, Homo sapien
tcatggcaccaactctcacgagatg

SEQ ID NO: 5713843 - DNA, 25 bp, Homo sapien
gtatctgccctctcttctattccct

SEQ ID NO: 5713844 - DNA, 25 bp, Homo sapien
cccaagctggttcgtacttaatttg

SEQ ID NO: 5713845 - DNA, 25 bp, Homo sapien
tgcctcaggccagcctggccacacc

SEQ ID NO: 5713846 - DNA, 25 bp, Homo sapien
accttgagctgggtgctggctgccc

SEQ ID NO: 5713847 - DNA, 25 bp, Homo sapien
gggtggctttgggatgggtggtttc

SEQ ID NO: 5713848 - DNA, 25 bp, Homo sapien
aggcataagcctgactcaggtgata

SEQ ID NO: 5713849 - DNA, 25 bp, Homo sapien
caaacaaacaaactctgatcattca

SEQ ID NO: 5713850 - DNA, 25 bp, Homo sapien
gaggaggaagtggcggcggcggcgg

SEQ ID NO: 5713851 - DNA, 25 bp, Homo sapien
agaagaacggcttgactttcccatt

SEQ ID NO: 5713852 - DNA, 25 bp, Homo sapien
acattggccactggccgcaactgct

SEQ ID NO: 5713853 - DNA, 25 bp, Homo sapien
tttgatttctaacggtctagtggag

SEQ ID NO: 5713854 - DNA, 25 bp, Homo sapien
accagacagggcagcacgccgtcat

SEQ ID NO: 5713855 - DNA, 25 bp, Homo sapien
ggtgggatccccggcagctccttct

SEQ ID NO: 5713856 - DNA, 25 bp, Homo sapien
gcctgactcaggtgatacaggcgag

SEQ ID NO: 5713857 - DNA, 25 bp, Homo sapien
ggcttgactttcccattcatttgca

SEQ ID NO: 5713858 - DNA, 25 bp, Homo sapien
gctccaagtcctatgagctcatccg

SEQ ID NO: 5713859 - DNA, 25 bp, Homo sapien
ggaggcagagaagtgcagctgtcct

SEQ ID NO: 5713860 - DNA, 25 bp, Homo sapien
tccctggggtctgtatctgccctct

SEQ ID NO: 5713861 - DNA, 25 bp, Homo sapien
cagacagccaccccaagaccaaggg

SEQ ID NO: 5713862 - DNA, 25 bp, Homo sapien
ggatctgctcgccacccttcatgga

SEQ ID NO: 5713863 - DNA, 25 bp, Homo sapien
atgggtcctccccttgtgagaaagg

SEQ ID NO: 5713864 - DNA, 25 bp, Homo sapien
tcagaaatgattacattttcccttc

SEQ ID NO: 5713865 - DNA, 25 bp, Homo sapien
ggcggcgggactgcgcgccccagct

SEQ ID NO: 5713866 - DNA, 25 bp, Homo sapien
ttagctggacatggtggtgggcgcc

SEQ ID NO: 5713867 - DNA, 25 bp, Homo sapien
ggtgagcatgactccatggcctcct

SEQ ID NO: 5713868 - DNA, 25 bp, Homo sapien
cccaggggactgccaagtgtgcttt

SEQ ID NO: 5713869 - DNA, 25 bp, Homo sapien
gctccttctccttcccgagctgtgg

SEQ ID NO: 5713870 - DNA, 25 bp, Homo sapien
acaagcaacttcaccagaatcccaa

SEQ ID NO: 5713871 - DNA, 25 bp, Homo sapien
tcgcaccactgcactccagcctggc

SEQ ID NO: 5713872 - DNA, 25 bp, Homo sapien
gtcctggacccgctccctgccatca

SEQ ID NO: 5713873 - DNA, 25 bp, Homo sapien
gagaaagggtctgtgctgtgtacct

SEQ ID NO: 5713874 - DNA, 25 bp, Homo sapien
caagctgttcacaagcaacttcacc

SEQ ID NO: 5713875 - DNA, 25 bp, Homo sapien
gggaggctgaggcaggagaattgct

SEQ ID NO: 5713876 - DNA, 25 bp, Homo sapien
agtcttgttttgatttctaacggtc

SEQ ID NO: 5713877 - DNA, 25 bp, Homo sapien
aagaaataaacaatagcgccagccg

SEQ ID NO: 5713878 - DNA, 25 bp, Homo sapien
catcgacatcatcatcaacaaccag

SEQ ID NO: 5713879 - DNA, 25 bp, Homo sapien
ctgcttgaccgctccaagtcctatg

SEQ ID NO: 5713880 - DNA, 25 bp, Homo sapien
caccaggatgttgctgttcctgccg

SEQ ID NO: 5713881 - DNA, 25 bp, Homo sapien
gcactcacattggccactggccgca

SEQ ID NO: 5713882 - DNA, 25 bp, Homo sapien
atctgctcgccacccttcatggagc

SEQ ID NO: 5713883 - DNA, 25 bp, Homo sapien
tggctcatggcaccaactctcacga

SEQ ID NO: 5713884 - DNA, 25 bp, Homo sapien
tggggtctgtatctgccctctcttc

SEQ ID NO: 5713885 - DNA, 25 bp, Homo sapien
cctggggtctgtatctgccctctct

SEQ ID NO: 5713886 - DNA, 25 bp, Homo sapien
agaagtgcagctgtccttgacaaag

SEQ ID NO: 5713887 - DNA, 25 bp, Homo sapien
atccagccaccctgcgtggtccaga

SEQ ID NO: 5713888 - DNA, 25 bp, Homo sapien
ctgtcatcccagcacttagggaggc

SEQ ID NO: 5713889 - DNA, 25 bp, Homo sapien
tacatggaagacgacaggatctgct

SEQ ID NO: 5713890 - DNA, 25 bp, Homo sapien
ctctgcacagccattgtcagtgtgg

SEQ ID NO: 5713891 - DNA, 25 bp, Homo sapien
gaggcaggtggatcacaaggtcaag

SEQ ID NO: 5713892 - DNA, 25 bp, Homo sapien
gcttcaagctgttcacaagcaactt

SEQ ID NO: 5713893 - DNA, 25 bp, Homo sapien
ttctgaaagggaagagagttggcta

SEQ ID NO: 5713894 - DNA, 25 bp, Homo sapien
ctaaaggagcacgacccctccagcc

SEQ ID NO: 5713895 - DNA, 25 bp, Homo sapien
gaagaccgactgaagtaggaagctg

SEQ ID NO: 5713896 - DNA, 25 bp, Homo sapien
cctggtggtgtggagggactgtccc

SEQ ID NO: 5713897 - DNA, 25 bp, Homo sapien
catgtttgagccaactgagcaaagc

SEQ ID NO: 5713898 - DNA, 25 bp, Homo sapien
aaaggagcacgacccctccagcctg

SEQ ID NO: 5713899 - DNA, 25 bp, Homo sapien
tggacccgctccctgccatcagaac

SEQ ID NO: 5713900 - DNA, 25 bp, Homo sapien
ctattccctagaaactctggccggg

SEQ ID NO: 5713901 - DNA, 25 bp, Homo sapien
ctgcgcgccccagctccgatccccg

SEQ ID NO: 5713902 - DNA, 25 bp, Homo sapien
cacttagggaggccgaggcaggtgg

SEQ ID NO: 5713903 - DNA, 25 bp, Homo sapien
tccgggagctctcccgggccctgcg

SEQ ID NO: 5713904 - DNA, 25 bp, Homo sapien
ggagcacccagacccccccttttca

SEQ ID NO: 5713905 - DNA, 25 bp, Homo sapien
ggagagctggtgagcatgactccat

SEQ ID NO: 5713906 - DNA, 25 bp, Homo sapien
gagcggccgagcgacgaggtcatcc

SEQ ID NO: 5713907 - DNA, 25 bp, Homo sapien
aatcacctctcagaagctcactctg

SEQ ID NO: 5713908 - DNA, 25 bp, Homo sapien
caaggtgtcgctgtgatctctgtat

SEQ ID NO: 5713909 - DNA, 25 bp, Homo sapien
ggacatggtggtgggcgcctgtagt

SEQ ID NO: 5713910 - DNA, 25 bp, Homo sapien
gtggttgatgaaattctggaccacg

SEQ ID NO: 5713911 - DNA, 25 bp, Homo sapien
ctctggaccacggtgtaggactcgc

SEQ ID NO: 5713912 - DNA, 25 bp, Homo sapien
cagtgcctgccgcagggcccgggag

SEQ ID NO: 5713913 - DNA, 25 bp, Homo sapien
aataaacacaacattaactgtactc

SEQ ID NO: 5713914 - DNA, 25 bp, Homo sapien
ttgacacgttgtggctgttgaagaa

SEQ ID NO: 5713915 - DNA, 25 bp, Homo sapien
gcgaaggcctggaaattcagcttct

SEQ ID NO: 5713916 - DNA, 25 bp, Homo sapien
ggtcaccaggctggaggggtcgtgc

SEQ ID NO: 5713917 - DNA, 25 bp, Homo sapien
gcttctgagaggtgattccacacag

SEQ ID NO: 5713918 - DNA, 25 bp, Homo sapien
caccaccatgtccagctaatttttg

SEQ ID NO: 5713919 - DNA, 25 bp, Homo sapien
tgcgaccaggcgaatgagccaatgg

SEQ ID NO: 5713920 - DNA, 25 bp, Homo sapien
caaaccacactgacaatggctgtgc

SEQ ID NO: 5713921 - DNA, 25 bp, Homo sapien
ttggccaggatggtgtcgatctctt

SEQ ID NO: 5713922 - DNA, 25 bp, Homo sapien
gggattctggtgaagttgcttgtga

SEQ ID NO: 5713923 - DNA, 25 bp, Homo sapien
tggtcctcgcgcgctgcccgccgag

SEQ ID NO: 5713924 - DNA, 25 bp, Homo sapien
ccacagctcgggaaggagaaggagc

SEQ ID NO: 5713925 - DNA, 25 bp, Homo sapien
tcatgctcaccagctctcccctgag

SEQ ID NO: 5713926 - DNA, 25 bp, Homo sapien
ctccggctttgacacgttgtggctg

SEQ ID NO: 5713927 - DNA, 25 bp, Homo sapien
agtgaacatgcgaccaggcgaatga

SEQ ID NO: 5713928 - DNA, 25 bp, Homo sapien
acaatggctgtgcagagagaaggta

SEQ ID NO: 5713929 - DNA, 25 bp, Homo sapien
agcaacatcctggtgaaatccctgt

SEQ ID NO: 5713930 - DNA, 25 bp, Homo sapien
attaactgtactccactagaccgtt

SEQ ID NO: 5713931 - DNA, 25 bp, Homo sapien
acgacaggctggctcccttggtctt

SEQ ID NO: 5713932 - DNA, 25 bp, Homo sapien
gtgacacgcccagtgcctgccgcag

SEQ ID NO: 5713933 - DNA, 25 bp, Homo sapien
gttcaggccctcctggttgaacacg

SEQ ID NO: 5713934 - DNA, 25 bp, Homo sapien
tgggcacctcctcccggcggcgggg

SEQ ID NO: 5713935 - DNA, 25 bp, Homo sapien
cccgccgccgccgccgccacttcct

SEQ ID NO: 5713936 - DNA, 25 bp, Homo sapien
actggtcttccaggctagaaggaca

SEQ ID NO: 5713937 - DNA, 25 bp, Homo sapien
cacaaagcccaggtgtcggcaggaa

SEQ ID NO: 5713938 - DNA, 25 bp, Homo sapien
gggtggctgtctggcaggcaacagc

SEQ ID NO: 5713939 - DNA, 25 bp, Homo sapien
cggccagagtttctagggaatagaa

SEQ ID NO: 5713940 - DNA, 25 bp, Homo sapien
actccacccctacagttacagaaat

SEQ ID NO: 5713941 - DNA, 25 bp, Homo sapien
tcccctgagcagtgcgggaggctca

SEQ ID NO: 5713942 - DNA, 25 bp, Homo sapien
gcctggaaattcagcttcttgattt

SEQ ID NO: 5713943 - DNA, 25 bp, Homo sapien
ccacgaacaccttgtacaggacggc

SEQ ID NO: 5713944 - DNA, 25 bp, Homo sapien
tcatgtatattatgcatatgtatgt

SEQ ID NO: 5713945 - DNA, 25 bp, Homo sapien
gctgcccgccgagaagggcggcggc

SEQ ID NO: 5713946 - DNA, 25 bp, Homo sapien
tgagctcataggacttggagcggtc

SEQ ID NO: 5713947 - DNA, 25 bp, Homo sapien
ggcttcaaggatgacgtcagtcagc

SEQ ID NO: 5713948 - DNA, 25 bp, Homo sapien
gggtccaggacgatggtctcagggt

SEQ ID NO: 5713949 - DNA, 25 bp, Homo sapien
gggcccgggagagctcccggatgac

SEQ ID NO: 5713950 - DNA, 25 bp, Homo sapien
gggcctctggaccacggtgtaggac

SEQ ID NO: 5713951 - DNA, 25 bp, Homo sapien
gctggatggcgttcaggccctcctg

SEQ ID NO: 5713952 - DNA, 25 bp, Homo sapien
tcttccatgtaggcctcaatcttcc

SEQ ID NO: 5713953 - DNA, 25 bp, Homo sapien
atgccgaagagtgacacgcccagtg

SEQ ID NO: 5713954 - DNA, 25 bp, Homo sapien
cgagcgagtgggcacctcctcccgg

SEQ ID NO: 5713955 - DNA, 25 bp, Homo sapien
tcgtgagctccatgaagggtggcga

SEQ ID NO: 5713956 - DNA, 25 bp, Homo sapien
acgcagggtggctggatggcgttca

SEQ ID NO: 5713957 - DNA, 25 bp, Homo sapien
gactccggctttgacacgttgtggc

SEQ ID NO: 5713958 - DNA, 25 bp, Homo sapien
ccgagaagggcggcggcgagcgccc

SEQ ID NO: 5713959 - DNA, 25 bp, Homo sapien
gcttgggattctggtgaagttgctt

SEQ ID NO: 5713960 - DNA, 25 bp, Homo sapien
ttgaagggaaaatgtaatcatttct

SEQ ID NO: 5713961 - DNA, 25 bp, Homo sapien
aatgggaaagtcaagccgttcttct

SEQ ID NO: 5713962 - DNA, 25 bp, Homo sapien
atcagagtttgtttgtttgtttgtt

SEQ ID NO: 5713963 - DNA, 25 bp, Homo sapien
tccatgaagggtggcgagcagatcc

SEQ ID NO: 5713964 - DNA, 25 bp, Homo sapien
tcaccaggctggaggggtcgtgctc

SEQ ID NO: 5713965 - DNA, 25 bp, Homo sapien
acagcaacatcctggtgaaatccct

SEQ ID NO: 5713966 - DNA, 25 bp, Homo sapien
tgtatttttagtagagatggggttt

SEQ ID NO: 5713967 - DNA, 25 bp, Homo sapien
gcggcggggacgcggaacggggatc

SEQ ID NO: 5713968 - DNA, 25 bp, Homo sapien
cagcttgggattctggtgaagttgc

SEQ ID NO: 5713969 - DNA, 25 bp, Homo sapien
gaggctgggcctttgtcaaggacag

SEQ ID NO: 5713970 - DNA, 25 bp, Homo sapien
aatgatcagagtttgtttgtttgtt

SEQ ID NO: 5713971 - DNA, 25 bp, Homo sapien
gcgctattgtttatttcttcatgtt

SEQ ID NO: 5713972 - DNA, 25 bp, Homo sapien
cagcgacaccttgtccctgaaacca

SEQ ID NO: 5713973 - DNA, 25 bp, Homo sapien
gacacgcccagtgcctgccgcaggg

SEQ ID NO: 5713974 - DNA, 25 bp, Homo sapien
tgcccgccgagaagggcggcggcga

SEQ ID NO: 5713975 - DNA, 25 bp, Homo sapien
ggtgaatgatcagagtttgtttgtt

SEQ ID NO: 5713976 - DNA, 25 bp, Homo sapien
cctggtcctcgcgcgctgcccgccg

SEQ ID NO: 5713977 - DNA, 25 bp, Homo sapien
ggcaacagctgctttgctcagttgg

SEQ ID NO: 5713978 - DNA, 25 bp, Homo sapien
caaattaagtacgaaccagcttggg

SEQ ID NO: 5713979 - DNA, 25 bp, Homo sapien
tcagaagaagaccccaaccagcagg

SEQ ID NO: 5713980 - DNA, 25 bp, Homo sapien
gtacgaaccagcttgggattctggt

SEQ ID NO: 5713981 - DNA, 25 bp, Homo sapien
gaaaggtctgcatcttcctcctcgg

SEQ ID NO: 5713982 - DNA, 25 bp, Homo sapien
tgtgagtgcccaagagccaagaact

SEQ ID NO: 5713983 - DNA, 25 bp, Homo sapien
ttccagccttctataaagcacactt

SEQ ID NO: 5713984 - DNA, 25 bp, Homo sapien
ggagctggggcgcgcagtcccgccg

SEQ ID NO: 5713985 - DNA, 25 bp, Homo sapien
tgagccacagctcgggaaggagaag

SEQ ID NO: 5713986 - DNA, 25 bp, Homo sapien
ttcttctcgctcagccagtagccaa

SEQ ID NO: 5713987 - DNA, 25 bp, Homo sapien
accgggtgaatgatcagagtttgtt

SEQ ID NO: 5713988 - DNA, 25 bp, Homo sapien
ctgaaaccacccatcccaaagccac

SEQ ID NO: 5713989 - DNA, 25 bp, Homo sapien
accaggcgaatgagccaatggacag

SEQ ID NO: 5713990 - DNA, 25 bp, Homo sapien
ggagaaggagctgccggggatccca

SEQ ID NO: 5713991 - DNA, 25 bp, Homo sapien
gtgacagcttcctacttcagtcggt

SEQ ID NO: 5713992 - DNA, 25 bp, Homo sapien
tttcttcatgtttccaaaagttagg

SEQ ID NO: 5713993 - DNA, 25 bp, Homo sapien
ccggtcaccaggctggaggggtcgt

SEQ ID NO: 5713994 - DNA, 25 bp, Homo sapien
gaaatccctgtgagtggcttttcag

SEQ ID NO: 5713995 - DNA, 25 bp, Homo sapien
tagccatctcgtgagagttggtgcc

SEQ ID NO: 5713996 - DNA, 25 bp, Homo sapien
tcagtcggtcttccagccttctata

SEQ ID NO: 5713997 - DNA, 25 bp, Homo sapien
gtggctgttgaagaagatggactca

SEQ ID NO: 5713998 - DNA, 25 bp, Homo sapien
caggctagaaggacaaacgacaggc

SEQ ID NO: 5713999 - DNA, 25 bp, Homo sapien
gtcaaggacagctgcacttctctgc

SEQ ID NO: 5714000 - DNA, 25 bp, Homo sapien
aggggacagtccctccacaccacca

SEQ ID NO: 5714001 - DNA, 25 bp, Homo sapien
tgtaggaggggacagtccctccaca

SEQ ID NO: 5714002 - DNA, 25 bp, Homo sapien
ggagtcatgctcaccagctctcccc

SEQ ID NO: 5714003 - DNA, 25 bp, Homo sapien
cagggcccgggagagctcccggatg

SEQ ID NO: 5714004 - DNA, 25 bp, Homo sapien
ctccctaagtgctgggatgacaggc

SEQ ID NO: 5714005 - DNA, 25 bp, Homo sapien
gagcagtgcgggaggctcactcact

SEQ ID NO: 5714006 - DNA, 25 bp, Homo sapien
cgtcagtcagcttgtggatgatgac

SEQ ID NO: 5714007 - DNA, 25 bp, Homo sapien
ggctttgacacgttgtggctgttga

SEQ ID NO: 5714008 - DNA, 25 bp, Homo sapien
accaccaggtcacagatgactcttg

SEQ ID NO: 5714009 - DNA, 25 bp, Homo sapien
aggactcgccaaccacgaacacctt

SEQ ID NO: 5714010 - DNA, 25 bp, Homo sapien
tgtaatcatttctgaaaaggggggg

SEQ ID NO: 5714011 - DNA, 25 bp, Homo sapien
agccgccatgcccggccagagtttc

SEQ ID NO: 5714012 - DNA, 25 bp, Homo sapien
ggctggagtgcagtggtgcgatctt

SEQ ID NO: 5714013 - DNA, 25 bp, Homo sapien
tcagcttgtggatgatgacgtccag

SEQ ID NO: 5714014 - DNA, 25 bp, Homo sapien
agctcgggaaggagaaggagctgcc

SEQ ID NO: 5714015 - DNA, 25 bp, Homo sapien
agagggcagatacagaccccaggga

SEQ ID NO: 5714016 - DNA, 25 bp, Homo sapien
gtcaggcttatgcctgggcggggca

SEQ ID NO: 5714017 - DNA, 25 bp, Homo sapien
gagagttggtgccatgagccactct

SEQ ID NO: 5714018 - DNA, 25 bp, Homo sapien
agcgagtgggcacctcctcccggcg

SEQ ID NO: 5714019 - DNA, 25 bp, Homo sapien
accccaaccagcaggaggccatgga

SEQ ID NO: 5714020 - DNA, 25 bp, Homo sapien
gcagcagaggctgggcctttgtcaa

SEQ ID NO: 5714021 - DNA, 25 bp, Homo sapien
agatcacagcgacaccttgtccctg

SEQ ID NO: 5714022 - DNA, 25 bp, Homo sapien
aattaagtacgaaccagcttgggat

SEQ ID NO: 5714023 - DNA, 25 bp, Homo sapien
ccaaccacgaacaccttgtacagga

SEQ ID NO: 5714024 - DNA, 25 bp, Homo sapien
tacagaccccagggacattagtgaa

SEQ ID NO: 5714025 - DNA, 25 bp, Homo sapien
tgatgacgtccagggggccctgctc

SEQ ID NO: 5714026 - DNA, 25 bp, Homo sapien
tcatttctgaaaagggggggtctgg

SEQ ID NO: 5714027 - DNA, 25 bp, Homo sapien
gcgggtccaggacgatggtctcagg

SEQ ID NO: 5714028 - DNA, 25 bp, Homo sapien
tacagttacagaaataaacacaaca

SEQ ID NO: 5714029 - DNA, 25 bp, Homo sapien
gtcttccaggctagaaggacaaacg

SEQ ID NO: 5714030 - DNA, 25 bp, Homo sapien
caacctccatccctcgcttcctgca

SEQ ID NO: 5714031 - DNA, 25 bp, Homo sapien
ggtcttccagccttctataaagcac

SEQ ID NO: 5714032 - DNA, 25 bp, Homo sapien
tccggaggaaatcgcccacaggccg

SEQ ID NO: 5714033 - DNA, 25 bp, Homo sapien
aatcaaaacaagactagttagcaaa

SEQ ID NO: 5714034 - DNA, 25 bp, Homo sapien
ccaatggacagaagccatggtgtct

SEQ ID NO: 5714035 - DNA, 25 bp, Homo sapien
tcaaacatgtgacagcttcctactt

SEQ ID NO: 5714036 - DNA, 25 bp, Homo sapien
gcccgggagagctcccggatgacct

SEQ ID NO: 5714037 - DNA, 25 bp, Homo sapien
gcctccctaagtgctgggatgacag

SEQ ID NO: 5714038 - DNA, 25 bp, Homo sapien
gacagaagccatggtgtctgtatct

SEQ ID NO: 5714039 - DNA, 25 bp, Homo sapien
agtcccctgggaaggcattgatgtc

SEQ ID NO: 5714040 - DNA, 25 bp, Homo sapien
agcaattctcctgcctcagcctccc

SEQ ID NO: 5714041 - DNA, 25 bp, Homo sapien
tgaacagcttgaagcaaacagcatt

SEQ ID NO: 5714042 - DNA, 25 bp, Homo sapien
tgcctcccggtcaccaggctggagg

SEQ ID NO: 5714043 - DNA, 25 bp, Homo sapien
ttgaacacgatagccatctcgtgag

SEQ ID NO: 5714044 - DNA, 25 bp, Homo sapien
tagccaactctcttccctttcagaa

SEQ ID NO: 5714045 - DNA, 25 bp, Homo sapien
gaaggcattgatgtcaatgacggcg

SEQ ID NO: 5714046 - DNA, 25 bp, Homo sapien
ggccggctaaggttcagctgcacaa

SEQ ID NO: 5714047 - DNA, 25 bp, Homo sapien
aaccacgaacaccttgtacaggacg

SEQ ID NO: 5714048 - DNA, 25 bp, Homo sapien
cctcgcgcgctgcccgccgagaagg

SEQ ID NO: 5714049 - DNA, 25 bp, Homo sapien
cttcttgattttcttctcgctcagc

SEQ ID NO: 5714050 - DNA, 25 bp, Homo sapien
cttgtggatgatgacgtccaggggg

SEQ ID NO: 5714051 - DNA, 25 bp, Homo sapien
ggcttatgcctgggcggggcagatg

SEQ ID NO: 5714052 - DNA, 25 bp, Homo sapien
ggctcccttggtcttggggtggctg

SEQ ID NO: 5714053 - DNA, 25 bp, Homo sapien
cgggtgaatgatcagagtttgtttg

SEQ ID NO: 5714054 - DNA, 25 bp, Homo sapien
gtcaatgacggcgtgctgccctgtc

SEQ ID NO: 5714055 - DNA, 25 bp, Homo sapien
caagcaattctcctgcctcagcctc

SEQ ID NO: 5714056 - DNA, 25 bp, Homo sapien
atgtgcctgcggagaagttcttgag

SEQ ID NO: 5714057 - DNA, 25 bp, Homo sapien
gaccgttagaaatcaaaacaagact

SEQ ID NO: 5714058 - DNA, 25 bp, Homo sapien
ggcgttgtggttgatgaaattctgg

SEQ ID NO: 5714059 - DNA, 25 bp, Homo sapien
ggcgagcagatcctgtcgtcttcca

SEQ ID NO: 5714060 - DNA, 25 bp, Homo sapien
cgcccacaggccgagtctggcggcc

SEQ ID NO: 5714061 - DNA, 25 bp, Homo sapien
cagggagcgggtccaggacgatggt

SEQ ID NO: 5714062 - DNA, 25 bp, Homo sapien
ggaggggacagtccctccacaccac

SEQ ID NO: 5714063 - DNA, 25 bp, Homo sapien
tttgtttgttttttgaggagtcttg

SEQ ID NO: 5714064 - DNA, 25 bp, Homo sapien
ccctgaaaccacccatcccaaagcc

SEQ ID NO: 5714065 - DNA, 25 bp, Homo sapien
aaggacaaacgacaggctggctccc

SEQ ID NO: 5714066 - DNA, 25 bp, Homo sapien
cacccctacagttacagaaataaac

SEQ ID NO: 5714067 - DNA, 25 bp, Homo sapien
tcggcttcaaggatgacgtcagtca

SEQ ID NO: 5714068 - DNA, 25 bp, Homo sapien
tttgcaaatgaatgggaaagtcaag

SEQ ID NO: 5714069 - DNA, 25 bp, Homo sapien
cgggaggctcactcactccaaacca

SEQ ID NO: 5714070 - DNA, 25 bp, Homo sapien
tttttgtatttttagtagagatggg

SEQ ID NO: 5714071 - DNA, 25 bp, Homo sapien
tctgggtgctcctgcgggtgagaat

SEQ ID NO: 5714072 - DNA, 25 bp, Homo sapien
tcacctgagtcaggcttatgcctgg

SEQ ID NO: 5714073 - DNA, 25 bp, Homo sapien
ctcctttagggcagccagcacccag

SEQ ID NO: 5714074 - DNA, 25 bp, Homo sapien
tcgggcggggagcctgggtccggag

SEQ ID NO: 5714075 - DNA, 25 bp, Homo sapien
aaaacaagactagttagcaaataca

SEQ ID NO: 5714076 - DNA, 25 bp, Homo sapien
ggccaatgtgagtgcccaagagcca

SEQ ID NO: 5714077 - DNA, 25 bp, Homo sapien
cggcgtgctgccctgtctggttgtt

SEQ ID NO: 5714078 - DNA, 25 bp, Homo sapien
gattttcttctcgctcagccagtag

SEQ ID NO: 5714079 - DNA, 25 bp, Homo sapien
ctggagtgcagtggtgcgatcttgg

SEQ ID NO: 5714080 - DNA, 25 bp, Homo sapien
gcacaggctcgtgagctccatgaag

SEQ ID NO: 5714081 - DNA, 25 bp, Homo sapien
ggagtgcagtggtgcgatcttggct

SEQ ID NO: 5714082 - DNA, 25 bp, Homo sapien
atggtgtcatccccgcacaggctcg

SEQ ID NO: 5714083 - DNA, 25 bp, Homo sapien
ttgaagcaaacagcatttgtcacaa

SEQ ID NO: 5714084 - DNA, 25 bp, Homo sapien
atgtcgatgccgaagagtgacacgc

SEQ ID NO: 5714085 - DNA, 25 bp, Homo sapien
accttgtacaggacggcgttgtggt

SEQ ID NO: 5714086 - DNA, 25 bp, Homo sapien
agagatggggtttcaccatgttggc

SEQ ID NO: 5714087 - DNA, 25 bp, Homo sapien
cccctacagttacagaaataaacac

SEQ ID NO: 5714088 - DNA, 25 bp, Homo sapien
ttcctcctcgggcggggagcctggg

SEQ ID NO: 5714089 - DNA, 25 bp, Homo sapien
ttgtccctgaaaccacccatcccaa

SEQ ID NO: 5714090 - DNA, 25 bp, Homo sapien
tgtgatccacctgcctcggcctccc

SEQ ID NO: 5714091 - DNA, 25 bp, Homo sapien
atcattctggtcggcttcaaggatg

SEQ ID NO: 5714092 - DNA, 25 bp, Homo sapien
catgagccacagctcgggaaggaga

SEQ ID NO: 5714093 - DNA, 25 bp, Homo sapien
tgcctgggcggggcagatgactgtg

SEQ ID NO: 5714094 - DNA, 25 bp, Homo sapien
tgatcagagtttgtttgtttgtttg

SEQ ID NO: 5714095 - DNA, 25 bp, Homo sapien
agcacacttggcagtcccctgggaa

SEQ ID NO: 5714096 - DNA, 25 bp, Homo sapien
caagcagggttctgatggcagggag

SEQ ID NO: 5714097 - DNA, 25 bp, Homo sapien
gcggggacgcggaacggggatcgga

SEQ ID NO: 5714098 - DNA, 25 bp, Homo sapien
cagttggctcaaacatgtgacagct

SEQ ID NO: 5714099 - DNA, 25 bp, Homo sapien
cctcgtcgctcggccgctcgaacac

SEQ ID NO: 5714100 - DNA, 25 bp, Homo sapien
ggactcacggtctgatgtgcctgcg

SEQ ID NO: 5714101 - DNA, 25 bp, Homo sapien
gaggagtcttgctctgttgccaggc

SEQ ID NO: 5714102 - DNA, 25 bp, Homo sapien
gcatttgtcacaaagcccaggtgtc

SEQ ID NO: 5714103 - DNA, 25 bp, Homo sapien
agctcataggacttggagcggtcaa

SEQ ID NO: 5714104 - DNA, 25 bp, Homo sapien
ctagggaatagaagagagggcagat

SEQ ID NO: 5714105 - DNA, 25 bp, Homo sapien
atggcccatgagccacagctcggga

SEQ ID NO: 5714106 - DNA, 25 bp, Homo sapien
gccatgcccggccagagtttctagg

SEQ ID NO: 5714107 - DNA, 25 bp, Homo sapien
gacctcgtcgctcggccgctcgaac

SEQ ID NO: 5714108 - DNA, 25 bp, Homo sapien
tctgtatctcatacatggtcatgta

SEQ ID NO: 5714109 - DNA, 25 bp, Homo sapien
gctcagccagtagccaactctcttc

SEQ ID NO: 5714110 - DNA, 25 bp, Homo sapien
gtcgtcttccatgtaggcctcaatc

SEQ ID NO: 5714111 - DNA, 25 bp, Homo sapien
tttgttttttgaggagtcttgctct

SEQ ID NO: 5714112 - DNA, 25 bp, Homo sapien
tatgtatacaaattaagtacgaacc

SEQ ID NO: 5714113 - DNA, 25 bp, Homo sapien
ctgcacagctcggcgaaggcctgga

SEQ ID NO: 5714114 - DNA, 25 bp, Homo sapien
aagttgcttgtgaacagcttgaagc

SEQ ID NO: 5714115 - DNA, 25 bp, Homo sapien
caactctcttccctttcagaaaggt

SEQ ID NO: 5714116 - DNA, 25 bp, Homo sapien
atggagtgaacatgcgaccaggcga

SEQ ID NO: 5714117 - DNA, 25 bp, Homo sapien
ggacggcgttgtggttgatgaaatt

SEQ ID NO: 5714118 - DNA, 25 bp, Homo sapien
ctggctatcattctggtcggcttca

SEQ ID NO: 5714119 - DNA, 25 bp, Homo sapien
ctccacaccaccaggtcacagatga

SEQ ID NO: 5714120 - DNA, 25 bp, Homo sapien
agctgctttgctcagttggctcaaa

SEQ ID NO: 5714121 - DNA, 25 bp, Homo sapien
acacagcacagaccctttctcacaa

SEQ ID NO: 5714122 - DNA, 25 bp, Homo sapien
gcctgccgcagggcccgggagagct

SEQ ID NO: 5714123 - DNA, 25 bp, Homo sapien
ttttcagagtgagcttctgagaggt

SEQ ID NO: 5714124 - DNA, 25 bp, Homo sapien
gcgctgcccgccgagaagggcggcg

SEQ ID NO: 5714125 - DNA, 25 bp, Homo sapien
acaggctcgtgagctccatgaaggg

SEQ ID NO: 5714126 - DNA, 25 bp, Homo sapien
tccagggggccctgctcctcgatcg

SEQ ID NO: 5714127 - DNA, 25 bp, Homo sapien
cggccgctcgaacacgccctcgatc

SEQ ID NO: 5714128 - DNA, 25 bp, Homo sapien
gcgcgcgccgcgagcgagtgggcac

SEQ ID NO: 5714129 - DNA, 25 bp, Homo sapien
ccctaagtgctgggatgacaggcgt

SEQ ID NO: 5714130 - DNA, 25 bp, Homo sapien
ctgcctcggcctccctaagtgctgg

SEQ ID NO: 5714131 - DNA, 25 bp, Homo sapien
tgggactacaggcgcccaccaccat

SEQ ID NO: 5714132 - DNA, 25 bp, Homo sapien
tgagccactctggttttgcaaatga

SEQ ID NO: 5714133 - DNA, 25 bp, Homo sapien
cctcctggttgaacacgatagccat

SEQ ID NO: 5714134 - DNA, 25 bp, Homo sapien
cttctctgcctcccggtcaccaggc

SEQ ID NO: 5714135 - DNA, 25 bp, Homo sapien
cttgaccttgtgatccacctgcctc

SEQ ID NO: 5714136 - DNA, 25 bp, Homo sapien
gtgagctccatgaagggtggcgagc

SEQ ID NO: 5714137 - DNA, 25 bp, Homo sapien
agccttctataaagcacacttggca

SEQ ID NO: 5714138 - DNA, 25 bp, Homo sapien
cacaacctccatccctcgcttcctg

SEQ ID NO: 5714139 - DNA, 25 bp, Homo sapien
catgtttccaaaagttaggtttata

SEQ ID NO: 5714140 - DNA, 25 bp, Homo sapien
gcttttcagagtgagcttctgagag

SEQ ID NO: 5714141 - DNA, 25 bp, Homo sapien
ccgatgacgactccggctttgacac

SEQ ID NO: 5714142 - DNA, 25 bp, Homo sapien
tatgtatgtatacaaattaagtacg

SEQ ID NO: 5714143 - DNA, 25 bp, Homo sapien
aatgaatgggaaagtcaagccgttc

SEQ ID NO: 5714144 - DNA, 25 bp, Homo sapien
tcaagccgttcttctccagcagccg

SEQ ID NO: 5714145 - DNA, 25 bp, Homo sapien
ttctataaagcacacttggcagtcc

SEQ ID NO: 5714146 - DNA, 25 bp, Homo sapien
ctcagttggctcaaacatgtgacag

SEQ ID NO: 5714147 - DNA, 25 bp, Homo sapien
ggggcgcgcagtcccgccgccgccg

SEQ ID NO: 5714148 - DNA, 25 bp, Homo sapien
caggctggctcccttggtcttgggg

SEQ ID NO: 5714149 - DNA, 25 bp, Homo sapien
tcttcatgtttccaaaagttaggtt

SEQ ID NO: 5714150 - DNA, 25 bp, Homo sapien
gacgtcagtcagcttgtggatgatg

SEQ ID NO: 5714151 - DNA, 25 bp, Homo sapien
gctcactcactccaaaccacactga

SEQ ID NO: 5714152 - DNA, 25 bp, Homo sapien
cctgaggcagcagaggctgggcctt

SEQ ID NO: 5714153 - DNA, 25 bp, Homo sapien
aatttttgtatttttagtagagatg

SEQ ID NO: 5714154 - DNA, 25 bp, Homo sapien
cttggggtggctgtctggcaggcaa

SEQ ID NO: 5714155 - DNA, 25 bp, Homo sapien
cgagcagatcctgtcgtcttccatg

SEQ ID NO: 5714156 - DNA, 25 bp, Homo sapien
cgcttcctgcacagctcggcgaagg

SEQ ID NO: 5714157 - DNA, 25 bp, Homo sapien
caagtagctgggactacaggcgccc

SEQ ID NO: 5714158 - DNA, 25 bp, Homo sapien
tcttccctttcagaaaggtctgcat

SEQ ID NO: 5714159 - DNA, 25 bp, Homo sapien
accagcaggaggccatggagtcatg

SEQ ID NO: 5714160 - DNA, 25 bp, Homo sapien
gcagccgcatggtgtcatccccgca

SEQ ID NO: 5714161 - DNA, 25 bp, Homo sapien
ttttttttaacggctggcgctattg

SEQ ID NO: 5714162 - DNA, 25 bp, Homo sapien
ggaggaagggggtcggccaggctgt

SEQ ID NO: 5714163 - DNA, 25 bp, Homo sapien
ggcgcgcagtcccgccgccgccgcc

SEQ ID NO: 5714164 - DNA, 25 bp, Homo sapien
cgccgagaagggcggcggcgagcgc

SEQ ID NO: 5714165 - DNA, 25 bp, Homo sapien
aggtacacagcacagaccctttctc

SEQ ID NO: 5714166 - DNA, 25 bp, Homo sapien
ctgtggcatcggggtgtggccaggc

SEQ ID NO: 5714167 - DNA, 25 bp, Homo sapien
gtccaggacgatggtctcagggtgg

SEQ ID NO: 5714168 - DNA, 25 bp, Homo sapien
ggaaagtcaagccgttcttctccag

SEQ ID NO: 5714169 - DNA, 25 bp, Homo sapien
aacagcatttgtcacaaagcccagg

SEQ ID NO: 5714170 - DNA, 25 bp, Homo sapien
gggttctgatggcagggagcgggtc

SEQ ID NO: 5714171 - DNA, 25 bp, Homo sapien
ccacgcagggtggctggatggcgtt

SEQ ID NO: 5714172 - DNA, 25 bp, Homo sapien
attatgcatatgtatgtatacaaat

SEQ ID NO: 5714173 - DNA, 25 bp, Homo sapien
tttagtagagatggggtttcaccat

SEQ ID NO: 5714174 - DNA, 25 bp, Homo sapien
tcgctcagccagtagccaactctct

SEQ ID NO: 5714175 - DNA, 25 bp, Homo sapien
ggccatggagtcatgctcaccagct

SEQ ID NO: 5714176 - DNA, 25 bp, Homo sapien
cggaggaaatcgcccacaggccgag

SEQ ID NO: 5714177 - DNA, 25 bp, Homo sapien
ccgccacttcctcctcggcctggtc

SEQ ID NO: 5714178 - DNA, 25 bp, Homo sapien
cagccctggaggaagggggtcggcc

SEQ ID NO: 5714179 - DNA, 25 bp, Homo sapien
ggacattagtgaagccattcagcag

SEQ ID NO: 5714180 - DNA, 25 bp, Homo sapien
gtcgctcggccgctcgaacacgccc

SEQ ID NO: 5714181 - DNA, 25 bp, Homo sapien
tcctggttgaacacgatagccatct

SEQ ID NO: 5714182 - DNA, 25 bp, Homo sapien
tcccggatgacctcgtcgctcggcc

SEQ ID NO: 5714183 - DNA, 25 bp, Homo sapien
gttgcttgtgaacagcttgaagcaa

SEQ ID NO: 5714184 - DNA, 25 bp, Homo sapien
tcgatcggccggctaaggttcagct

SEQ ID NO: 5714185 - DNA, 25 bp, Homo sapien
tggcgctattgtttatttcttcatg

SEQ ID NO: 5714186 - DNA, 25 bp, Homo sapien
cgccctcgatcttgtccagctccgt

SEQ ID NO: 5714187 - DNA, 25 bp, Homo sapien
aacacaacattaactgtactccact

SEQ ID NO: 5714188 - DNA, 25 bp, Homo sapien
ctagaaggacaaacgacaggctggc

SEQ ID NO: 5714189 - DNA, 25 bp, Homo sapien
atcttggctcactgcaacctacgcc

SEQ ID NO: 5714190 - DNA, 25 bp, Homo sapien
tgttttttgaggagtcttgctctgt

SEQ ID NO: 5714191 - DNA, 25 bp, Homo sapien
tgtcatccccgcacaggctcgtgag

SEQ ID NO: 5714192 - DNA, 25 bp, Homo sapien
tcagccagtagccaactctcttccc

SEQ ID NO: 5714193 - DNA, 25 bp, Homo sapien
agcagggttctgatggcagggagcg

SEQ ID NO: 5714194 - DNA, 25 bp, Homo sapien
tgaaattctggaccacgcagggtgg

SEQ ID NO: 5714195 - DNA, 25 bp, Homo sapien
gggactggctatcattctggtcggc

SEQ ID NO: 5714196 - DNA, 25 bp, Homo sapien
gccgaagagtgacacgcccagtgcc

SEQ ID NO: 5714197 - DNA, 25 bp, Homo sapien
atggcagggagcgggtccaggacga

SEQ ID NO: 5714198 - DNA, 25 bp, Homo sapien
cgtccagggggccctgctcctcgat

SEQ ID NO: 5714199 - DNA, 25 bp, Homo sapien
agccgcatggtgtcatccccgcaca

SEQ ID NO: 5714200 - DNA, 25 bp, Homo sapien
tctgaatccaatggcccatgagcca

SEQ ID NO: 5714201 - DNA, 25 bp, Homo sapien
tgccctgtctggttgttgatgatga

SEQ ID NO: 5714202 - DNA, 25 bp, Homo sapien
ggttgatgaaattctggaccacgca

SEQ ID NO: 5714203 - DNA, 25 bp, Homo sapien
tcggcctggtcctcgcgcgctgccc

SEQ ID NO: 5714204 - DNA, 25 bp, Homo sapien
atgacctcgtcgctcggccgctcga

SEQ ID NO: 5714205 - DNA, 25 bp, Homo sapien
tacaaattaagtacgaaccagcttg

SEQ ID NO: 5714206 - DNA, 25 bp, Homo sapien
cacaggccgagtctggcggccggcg

SEQ ID NO: 5714207 - DNA, 25 bp, Homo sapien
ctccactagaccgttagaaatcaaa

SEQ ID NO: 5714208 - DNA, 25 bp, Homo sapien
gccggcgcgcgccgcgagcgagtgg

SEQ ID NO: 5714209 - DNA, 25 bp, Homo sapien
ggtctcagggtgggcatcgatgtac

SEQ ID NO: 5714210 - DNA, 25 bp, Homo sapien
tcgtgagagttggtgccatgagcca

SEQ ID NO: 5714211 - DNA, 25 bp, Homo sapien
gactcgccaaccacgaacaccttgt

SEQ ID NO: 5714212 - DNA, 25 bp, Homo sapien
agggggggtctgggtgctcctgcgg

SEQ ID NO: 5714213 - DNA, 25 bp, Homo sapien
cctggaacctgtgcaccagctccag

SEQ ID NO: 5714214 - DNA, 25 bp, Homo sapien
gcctttgtcaaggacagctgcactt

SEQ ID NO: 5714215 - DNA, 25 bp, Homo sapien
tgaacatgcgaccaggcgaatgagc

SEQ ID NO: 5714216 - DNA, 25 bp, Homo sapien
tctgcctcccggtcaccaggctgga

SEQ ID NO: 5714217 - DNA, 25 bp, Homo sapien
gtgcctgcggagaagttcttgagtg

SEQ ID NO: 5714218 - DNA, 25 bp, Homo sapien
atggactcacggtctgatgtgcctg

SEQ ID NO: 5714219 - DNA, 25 bp, Homo sapien
ctcccaagtagctgggactacaggc

SEQ ID NO: 5714220 - DNA, 25 bp, Homo sapien
tatctcatacatggtcatgtatatt

SEQ ID NO: 5714221 - DNA, 25 bp, Homo sapien
tgcaaatgaatgggaaagtcaagcc

SEQ ID NO: 5714222 - DNA, 25 bp, Homo sapien
ggccaggctgtaggaggggacagtc

SEQ ID NO: 5714223 - DNA, 25 bp, Homo sapien
actccaaaccacactgacaatggct

SEQ ID NO: 5714224 - DNA, 25 bp, Homo sapien
cacacagccctggaggaagggggtc

SEQ ID NO: 5714225 - DNA, 25 bp, Homo sapien
accttgtgatccacctgcctcggcc

SEQ ID NO: 5714226 - DNA, 25 bp, Homo sapien
tctgatggcagggagcgggtccagg

SEQ ID NO: 5714227 - DNA, 25 bp, Homo sapien
cctgctcctcgatcggccggctaag

SEQ ID NO: 5714228 - DNA, 25 bp, Homo sapien
ctcctcgatcggccggctaaggttc

SEQ ID NO: 5714229 - DNA, 25 bp, Homo sapien
ggcctgaggcagcagaggctgggcc

SEQ ID NO: 5714230 - DNA, 25 bp, Homo sapien
tcagggtgggcatcgatgtactcct

SEQ ID NO: 5714231 - DNA, 25 bp, Homo sapien
gaagccatggtgtctgtatctcata

SEQ ID NO: 5714232 - DNA, 25 bp, Homo sapien
tcaaaacaagactagttagcaaata

SEQ ID NO: 5714233 - DNA, 25 bp, Homo sapien
catcttcctcctcgggcggggagcc

SEQ ID NO: 5714234 - DNA, 25 bp, Homo sapien
actcacggtctgatgtgcctgcgga

SEQ ID NO: 5714235 - DNA, 25 bp, Homo sapien
tctggaccacgcagggtggctggat

SEQ ID NO: 5714236 - DNA, 25 bp, Homo sapien
cacgttgtggctgttgaagaagatg

SEQ ID NO: 5714237 - DNA, 25 bp, Homo sapien
gtgcctgccgcagggcccgggagag

SEQ ID NO: 5714238 - DNA, 25 bp, Homo sapien
ggaaggagaaggagctgccggggat

SEQ ID NO: 5714239 - DNA, 25 bp, Homo sapien
attcagcttcttgattttcttctcg

SEQ ID NO: 5714240 - DNA, 25 bp, Homo sapien
cccgagttcaagcaattctcctgcc

SEQ ID NO: 5714241 - DNA, 25 bp, Homo sapien
catcgatgtactcctggaacctgtg

SEQ ID NO: 5714242 - DNA, 25 bp, Homo sapien
ttgtcacaaagcccaggtgtcggca

SEQ ID NO: 5714243 - DNA, 25 bp, Homo sapien
ccgccgccgccgccacttcctcctc

SEQ ID NO: 5714244 - DNA, 25 bp, Homo sapien
tgggcggggcagatgactgtggcat

SEQ ID NO: 5714245 - DNA, 25 bp, Homo sapien
ggctggcctgaggcagcagaggctg

SEQ ID NO: 5714246 - DNA, 25 bp, Homo sapien
tttttagtagagatggggtttcacc

SEQ ID NO: 5714247 - DNA, 25 bp, Homo sapien
ggcatcggggtgtggccaggctggc

SEQ ID NO: 5714248 - DNA, 25 bp, Homo sapien
tcaaggatgacgtcagtcagcttgt

SEQ ID NO: 5714249 - DNA, 25 bp, Homo sapien
ctcccttggtcttggggtggctgtc

SEQ ID NO: 5714250 - DNA, 25 bp, Homo sapien
gacaccttgtccctgaaaccaccca

SEQ ID NO: 5714251 - DNA, 25 bp, Homo sapien
tgtgaacagcttgaagcaaacagca

SEQ ID NO: 5714252 - DNA, 25 bp, Homo sapien
gaacagcaacatcctggtgaaatcc

SEQ ID NO: 5714253 - DNA, 25 bp, Homo sapien
tggtgtcgatctcttgaccttgtga

SEQ ID NO: 5714254 - DNA, 25 bp, Homo sapien
cccagctcaaggtctctgaatccaa

SEQ ID NO: 5714255 - DNA, 25 bp, Homo sapien
tgctcctcgatcggccggctaaggt

SEQ ID NO: 5714256 - DNA, 25 bp, Homo sapien
gttggtgccatgagccactctggtt

SEQ ID NO: 5714257 - DNA, 25 bp, Homo sapien
ttccatgtaggcctcaatcttccgg

SEQ ID NO: 5714258 - DNA, 25 bp, Homo sapien
tcggtcttccagccttctataaagc

SEQ ID NO: 5714259 - DNA, 25 bp, Homo sapien
ccaagaactggtcttccaggctaga

SEQ ID NO: 5714260 - DNA, 25 bp, Homo sapien
tccggatgagctcataggacttgga

SEQ ID NO: 5714261 - DNA, 25 bp, Homo sapien
gtccctccacaccaccaggtcacag

SEQ ID NO: 5714262 - DNA, 25 bp, Homo sapien
attctcctgcctcagcctcccaagt

SEQ ID NO: 5714263 - DNA, 25 bp, Homo sapien
agctgccggggatcccaccgggtga

SEQ ID NO: 5714264 - DNA, 25 bp, Homo sapien
atcgcccacaggccgagtctggcgg

SEQ ID NO: 5714265 - DNA, 25 bp, Homo sapien
tctctgaatccaatggcccatgagc

SEQ ID NO: 5714266 - DNA, 25 bp, Homo sapien
ggggacgcggaacggggatcggagc

SEQ ID NO: 5714267 - DNA, 25 bp, Homo sapien
acctgagtcaggcttatgcctgggc

SEQ ID NO: 5714268 - DNA, 25 bp, Homo sapien
tgggtccggaggaaatcgcccacag

SEQ ID NO: 5714269 - DNA, 25 bp, Homo sapien
tctgcatcttcctcctcgggcgggg

SEQ ID NO: 5714270 - DNA, 25 bp, Homo sapien
agtgtcctaacctcatggagtgaac

SEQ ID NO: 5714271 - DNA, 25 bp, Homo sapien
ggcgtgagccgccatgcccggccag

SEQ ID NO: 5714272 - DNA, 25 bp, Homo sapien
tgtactcctggaacctgtgcaccag

SEQ ID NO: 5714273 - DNA, 25 bp, Homo sapien
tctcgtgagagttggtgccatgagc

SEQ ID NO: 5714274 - DNA, 25 bp, Homo sapien
cgttcttctccagcagccgcatggt

SEQ ID NO: 5714275 - DNA, 25 bp, Homo sapien
aggctcgtgagctccatgaagggtg

SEQ ID NO: 5714276 - DNA, 25 bp, Homo sapien
gaccctttctcacaaggggaggacc

SEQ ID NO: 5714277 - DNA, 25 bp, Homo sapien
agggacattagtgaagccattcagc

SEQ ID NO: 5714278 - DNA, 25 bp, Homo sapien
tagaagagagggcagatacagaccc

SEQ ID NO: 5714279 - DNA, 25 bp, Homo sapien
tcccggtcaccaggctggaggggtc

SEQ ID NO: 5714280 - DNA, 25 bp, Homo sapien
tttgctcagttggctcaaacatgtg

SEQ ID NO: 5714281 - DNA, 25 bp, Homo sapien
caggctggcctgaggcagcagaggc

SEQ ID NO: 5714282 - DNA, 25 bp, Homo sapien
gagtcaggcttatgcctgggcgggg

SEQ ID NO: 5714283 - DNA, 25 bp, Homo sapien
caggctggagtgcagtggtgcgatc

SEQ ID NO: 5714284 - DNA, 25 bp, Homo sapien
acactgacaatggctgtgcagagag

SEQ ID NO: 5714285 - DNA, 25 bp, Homo sapien
cagagtttctagggaatagaagaga

SEQ ID NO: 5714286 - DNA, 25 bp, Homo sapien
tttatttcttcatgtttccaaaagt

SEQ ID NO: 5714287 - DNA, 25 bp, Homo sapien
attgatgtcaatgacggcgtgctgc

SEQ ID NO: 5714288 - DNA, 25 bp, Homo sapien
agggcagatacagaccccagggaca

SEQ ID NO: 5714289 - DNA, 25 bp, Homo sapien
tatcacctgagtcaggcttatgcct

SEQ ID NO: 5714290 - DNA, 25 bp, Homo sapien
gtggcgagcagatcctgtcgtcttc

SEQ ID NO: 5714291 - DNA, 25 bp, Homo sapien
ctggaggaagggggtcggccaggct

SEQ ID NO: 5714292 - DNA, 25 bp, Homo sapien
ctcggcgaaggcctggaaattcagc

SEQ ID NO: 5714293 - DNA, 25 bp, Homo sapien
acctgcctcggcctccctaagtgct

SEQ ID NO: 5714294 - DNA, 25 bp, Homo sapien
catgttggccaggatggtgtcgatc

SEQ ID NO: 5714295 - DNA, 25 bp, Homo sapien
gaacctgtgcaccagctccagggac

SEQ ID NO: 5714296 - DNA, 25 bp, Homo sapien
atcttccggatgagctcataggact

SEQ ID NO: 5714297 - DNA, 25 bp, Homo sapien
tcactgcaacctacgcctcccgagt

SEQ ID NO: 5714298 - DNA, 25 bp, Homo sapien
ggtgattccacacagccctggagga

SEQ ID NO: 5714299 - DNA, 25 bp, Homo sapien
ggaatagaagagagggcagatacag

SEQ ID NO: 5714300 - DNA, 25 bp, Homo sapien
gcttcctacttcagtcggtcttcca

SEQ ID NO: 5714301 - DNA, 25 bp, Homo sapien
ctggaccacggtgtaggactcgcca

SEQ ID NO: 5714302 - DNA, 25 bp, Homo sapien
cggggcagatgactgtggcatcggg

SEQ ID NO: 5714303 - DNA, 25 bp, Homo sapien
actagttagcaaatacagagatcac

SEQ ID NO: 5714304 - DNA, 25 bp, Homo sapien
acctgtgcaccagctccagggactg

SEQ ID NO: 5714305 - DNA, 25 bp, Homo sapien
ataaagcacacttggcagtcccctg

SEQ ID NO: 5714306 - DNA, 25 bp, Homo sapien
accatgtccagctaatttttgtatt

SEQ ID NO: 5714307 - DNA, 25 bp, Homo sapien
actcactccaaaccacactgacaat

SEQ ID NO: 5714308 - DNA, 25 bp, Homo sapien
cattctggtcggcttcaaggatgac

SEQ ID NO: 5714309 - DNA, 25 bp, Homo sapien
cagggggccctgctcctcgatcggc

SEQ ID NO: 5714310 - DNA, 25 bp, Homo sapien
gaaggtacacagcacagaccctttc

SEQ ID NO: 5714311 - DNA, 25 bp, Homo sapien
tagggcagccagcacccagctcaag

SEQ ID NO: 5714312 - DNA, 25 bp, Homo sapien
ttcaagcaattctcctgcctcagcc

SEQ ID NO: 5714313 - DNA, 25 bp, Homo sapien
tccaaaccacactgacaatggctgt

SEQ ID NO: 5714314 - DNA, 25 bp, Homo sapien
acaaacgacaggctggctcccttgg

SEQ ID NO: 5714315 - DNA, 25 bp, Homo sapien
agatgactgtggcatcggggtgtgg

SEQ ID NO: 5714316 - DNA, 25 bp, Homo sapien
gcctctggaccacggtgtaggactc

SEQ ID NO: 5714317 - DNA, 25 bp, Homo sapien
gagagaaggtacacagcacagaccc

SEQ ID NO: 5714318 - DNA, 25 bp, Homo sapien
gggggccctgctcctcgatcggccg

SEQ ID NO: 5714319 - DNA, 25 bp, Homo sapien
ggtccggaggaaatcgcccacaggc

SEQ ID NO: 5714320 - DNA, 25 bp, Homo sapien
acaaggggaggacccatgggagaag

SEQ ID NO: 5714321 - DNA, 25 bp, Homo sapien
gtccctgaaaccacccatcccaaag

SEQ ID NO: 5714322 - DNA, 25 bp, Homo sapien
tgcatcttcctcctcgggcggggag

SEQ ID NO: 5714323 - DNA, 25 bp, Homo sapien
gagtgagcttctgagaggtgattcc

SEQ ID NO: 5714324 - DNA, 25 bp, Homo sapien
atgtaggcctcaatcttccggatga

SEQ ID NO: 5714325 - DNA, 25 bp, Homo sapien
cccaagagccaagaactggtcttcc

SEQ ID NO: 5714326 - DNA, 25 bp, Homo sapien
tggctcactgcaacctacgcctccc

SEQ ID NO: 5714327 - DNA, 25 bp, Homo sapien
ttgtggttgatgaaattctggacca

SEQ ID NO: 5714328 - DNA, 25 bp, Homo sapien
cagtggccaatgtgagtgcccaaga

SEQ ID NO: 5714329 - DNA, 25 bp, Homo sapien
agtcggtcttccagccttctataaa

SEQ ID NO: 5714330 - DNA, 25 bp, Homo sapien
gaagccattcagcagttgcggccag

SEQ ID NO: 5714331 - DNA, 25 bp, Homo sapien
tacttcagtcggtcttccagccttc

SEQ ID NO: 5714332 - DNA, 25 bp, Homo sapien
gctggcgctattgtttatttcttca

SEQ ID NO: 5714333 - DNA, 25 bp, Homo sapien
tgcatatgtatgtatacaaattaag

SEQ ID NO: 5714334 - DNA, 25 bp, Homo sapien
ttaagtacgaaccagcttgggattc

SEQ ID NO: 5714335 - DNA, 25 bp, Homo sapien
ccctcgcttcctgcacagctcggcg

SEQ ID NO: 5714336 - DNA, 25 bp, Homo sapien
cctgggcggggcagatgactgtggc

SEQ ID NO: 5714337 - DNA, 25 bp, Homo sapien
gatacagaccccagggacattagtg

SEQ ID NO: 5714338 - DNA, 25 bp, Homo sapien
gaaataaacacaacattaactgtac

SEQ ID NO: 5714339 - DNA, 25 bp, Homo sapien
tcctgcctcagcctcccaagtagct

SEQ ID NO: 5714340 - DNA, 25 bp, Homo sapien
aggcattgatgtcaatgacggcgtg

SEQ ID NO: 5714341 - DNA, 25 bp, Homo sapien
cacgcccagtgcctgccgcagggcc

SEQ ID NO: 5714342 - DNA, 25 bp, Homo sapien
cgagtgggcacctcctcccggcggc

SEQ ID NO: 5714343 - DNA, 25 bp, Homo sapien
ctggaggggtcgtgctcctttaggg

SEQ ID NO: 5714344 - DNA, 25 bp, Homo sapien
gatagccatctcgtgagagttggtg

SEQ ID NO: 5714345 - DNA, 25 bp, Homo sapien
gatgactcttgaagggaaaatgtaa

SEQ ID NO: 5714346 - DNA, 25 bp, Homo sapien
ccaccgggtgaatgatcagagtttg

SEQ ID NO: 5714347 - DNA, 25 bp, Homo sapien
aggacagctgcacttctctgcctcc

SEQ ID NO: 5714348 - DNA, 25 bp, Homo sapien
atgtgacagcttcctacttcagtcg

SEQ ID NO: 5714349 - DNA, 25 bp, Homo sapien
cgaatgagccaatggacagaagcca

SEQ ID NO: 5714350 - DNA, 25 bp, Homo sapien
cagttacagaaataaacacaacatt

SEQ ID NO: 5714351 - DNA, 25 bp, Homo sapien
actgcaacctacgcctcccgagttc

SEQ ID NO: 5714352 - DNA, 25 bp, Homo sapien
gatgagctcataggacttggagcgg

SEQ ID NO: 5714353 - DNA, 25 bp, Homo sapien
cccacaggccgagtctggcggccgg

SEQ ID NO: 5714354 - DNA, 25 bp, Homo sapien
catgggagaagcctcgcctgtatca

SEQ ID NO: 5714355 - DNA, 25 bp, Homo sapien
ggtcggcttcaaggatgacgtcagt

SEQ ID NO: 5714356 - DNA, 25 bp, Homo sapien
gctgcacttctctgcctcccggtca

SEQ ID NO: 5714357 - DNA, 25 bp, Homo sapien
agccatggtgtctgtatctcataca

SEQ ID NO: 5714358 - DNA, 25 bp, Homo sapien
ggctgttgaagaagatggactcacg

SEQ ID NO: 5714359 - DNA, 25 bp, Homo sapien
aaggagctgccggggatcccaccgg

SEQ ID NO: 5714360 - DNA, 25 bp, Homo sapien
aacggggatcggagctggggcgcgc

SEQ ID NO: 5714361 - DNA, 25 bp, Homo sapien
cgttgtggctgttgaagaagatgga

SEQ ID NO: 5714362 - DNA, 25 bp, Homo sapien
ggtgtggccaggctggcctgaggca

SEQ ID NO: 5714363 - DNA, 25 bp, Homo sapien
gtcttggggtggctgtctggcaggc

SEQ ID NO: 5714364 - DNA, 25 bp, Homo sapien
gaggaaatcgcccacaggccgagtc

SEQ ID NO: 5714365 - DNA, 25 bp, Homo sapien
cagcctcccaagtagctgggactac

SEQ ID NO: 5714366 - DNA, 25 bp, Homo sapien
gacagtccctccacaccaccaggtc

SEQ ID NO: 5714367 - DNA, 25 bp, Homo sapien
cttccggatgagctcataggacttg

SEQ ID NO: 5714368 - DNA, 25 bp, Homo sapien
cggcctccctaagtgctgggatgac

SEQ ID NO: 5714369 - DNA, 25 bp, Homo sapien
tcttcctcctcgggcggggagcctg

SEQ ID NO: 5714370 - DNA, 25 bp, Homo sapien
gccaactctcttccctttcagaaag

SEQ ID NO: 5714371 - DNA, 25 bp, Homo sapien
taggacttggagcggtcaagcaggg

SEQ ID NO: 5714372 - DNA, 25 bp, Homo sapien
gtcccgccgccgccgccgccacttc

SEQ ID NO: 5714373 - DNA, 25 bp, Homo sapien
tgtcctaacctcatggagtgaacat

SEQ ID NO: 5714374 - DNA, 25 bp, Homo sapien
tcctaacctcatggagtgaacatgc

SEQ ID NO: 5714375 - DNA, 25 bp, Homo sapien
gcaggaacagcaacatcctggtgaa

SEQ ID NO: 5714376 - DNA, 25 bp, Homo sapien
gtgccatgagccactctggttttgc

SEQ ID NO: 5714377 - DNA, 25 bp, Homo sapien
gctcaaacatgtgacagcttcctac

SEQ ID NO: 5714378 - DNA, 25 bp, Homo sapien
gccctgctcctcgatcggccggcta

SEQ ID NO: 5714379 - DNA, 25 bp, Homo sapien
ctcgcttcctgcacagctcggcgaa

SEQ ID NO: 5714380 - DNA, 25 bp, Homo sapien
cgatcttggctcactgcaacctacg

SEQ ID NO: 5714381 - DNA, 25 bp, Homo sapien
cccagtgcctgccgcagggcccggg

SEQ ID NO: 5714382 - DNA, 25 bp, Homo sapien
caggacggcgttgtggttgatgaaa

SEQ ID NO: 5714383 - DNA, 25 bp, Homo sapien
tgctcagttggctcaaacatgtgac

SEQ ID NO: 5714384 - DNA, 25 bp, Homo sapien
gcagtgcgggaggctcactcactcc

SEQ ID NO: 5714385 - DNA, 25 bp, Homo sapien
tactcctggaacctgtgcaccagct

SEQ ID NO: 5714386 - DNA, 25 bp, Homo sapien
ctgtgcaccagctccagggactggc

SEQ ID NO: 5714387 - DNA, 25 bp, Homo sapien
gttgaagaagatggactcacggtct

SEQ ID NO: 5714388 - DNA, 25 bp, Homo sapien
gggcagatgactgtggcatcggggt

SEQ ID NO: 5714389 - DNA, 25 bp, Homo sapien
acagctcgggaaggagaaggagctg

SEQ ID NO: 5714390 - DNA, 25 bp, Homo sapien
tttgtatttttagtagagatggggt

SEQ ID NO: 5714391 - DNA, 25 bp, Homo sapien
gtctggcggccggcgcgcgccgcga

SEQ ID NO: 5714392 - DNA, 25 bp, Homo sapien
agggtgggcatcgatgtactcctgg

SEQ ID NO: 5714393 - DNA, 25 bp, Homo sapien
tcttccagccttctataaagcacac

SEQ ID NO: 5714394 - DNA, 25 bp, Homo sapien
gtgagggcctctggaccacggtgta

SEQ ID NO: 5714395 - DNA, 25 bp, Homo sapien
catgtccagctaatttttgtatttt

SEQ ID NO: 5714396 - DNA, 25 bp, Homo sapien
ctggctcccttggtcttggggtggc

SEQ ID NO: 5714397 - DNA, 25 bp, Homo sapien
cgtgctcctttagggcagccagcac

SEQ ID NO: 5714398 - DNA, 25 bp, Homo sapien
acggtctgatgtgcctgcggagaag

SEQ ID NO: 5714399 - DNA, 25 bp, Homo sapien
cttgtacaggacggcgttgtggttg

SEQ ID NO: 5714400 - DNA, 25 bp, Homo sapien
gtgtcggcaggaacagcaacatcct

SEQ ID NO: 5714401 - DNA, 25 bp, Homo sapien
tgcagagagaaggtacacagcacag

SEQ ID NO: 5714402 - DNA, 25 bp, Homo sapien
cagggttctgatggcagggagcggg

SEQ ID NO: 5714403 - DNA, 25 bp, Homo sapien
catatgtatgtatacaaattaagta

SEQ ID NO: 5714404 - DNA, 25 bp, Homo sapien
agccagtagccaactctcttccctt

SEQ ID NO: 5714405 - DNA, 25 bp, Homo sapien
cagagagaaggtacacagcacagac

SEQ ID NO: 5714406 - DNA, 25 bp, Homo sapien
tccctgtgagtggcttttcagagtg

SEQ ID NO: 5714407 - DNA, 25 bp, Homo sapien
tctcctgcctcagcctcccaagtag

SEQ ID NO: 5714408 - DNA, 25 bp, Homo sapien
tcttgctctgttgccaggctggagt

SEQ ID NO: 5714409 - DNA, 25 bp, Homo sapien
gacgatggtctcagggtgggcatcg

SEQ ID NO: 5714410 - DNA, 25 bp, Homo sapien
acattaactgtactccactagaccg

SEQ ID NO: 5714411 - DNA, 25 bp, Homo sapien
tatttcttcatgtttccaaaagtta

SEQ ID NO: 5714412 - DNA, 25 bp, Homo sapien
ctggcaggcaacagctgctttgctc

SEQ ID NO: 5714413 - DNA, 25 bp, Homo sapien
ggggtttcaccatgttggccaggat

SEQ ID NO: 5714414 - DNA, 25 bp, Homo sapien
cgggaaggagaaggagctgccgggg

SEQ ID NO: 5714415 - DNA, 25 bp, Homo sapien
gagctcccggatgacctcgtcgctc

SEQ ID NO: 5714416 - DNA, 25 bp, Homo sapien
ctggcggccggcgcgcgccgcgagc

SEQ ID NO: 5714417 - DNA, 25 bp, Homo sapien
gaggtgattccacacagccctggag

SEQ ID NO: 5714418 - DNA, 25 bp, Homo sapien
actgtactccactagaccgttagaa

SEQ ID NO: 5714419 - DNA, 25 bp, Homo sapien
attcagcagttgcggccagtggcca

SEQ ID NO: 5714420 - DNA, 25 bp, Homo sapien
ctgagcagtgcgggaggctcactca

SEQ ID NO: 5714421 - DNA, 25 bp, Homo sapien
gccctggaggaagggggtcggccag

SEQ ID NO: 5714422 - DNA, 25 bp, Homo sapien
ccatggagtcatgctcaccagctct

SEQ ID NO: 5714423 - DNA, 25 bp, Homo sapien
cgcccagtgcctgccgcagggcccg

SEQ ID NO: 5714424 - DNA, 25 bp, Homo sapien
tgggcatcgatgtactcctggaacc

SEQ ID NO: 5714425 - DNA, 25 bp, Homo sapien
gacagcttcctacttcagtcggtct

SEQ ID NO: 5714426 - DNA, 25 bp, Homo sapien
cgttgtggttgatgaaattctggac

SEQ ID NO: 5714427 - DNA, 25 bp, Homo sapien
aatggacagaagccatggtgtctgt

SEQ ID NO: 5714428 - DNA, 25 bp, Homo sapien
tccacacagccctggaggaaggggg

SEQ ID NO: 5714429 - DNA, 25 bp, Homo sapien
ggctaaggttcagctgcacaacctc

SEQ ID NO: 5714430 - DNA, 25 bp, Homo sapien
tagctgggactacaggcgcccacca

SEQ ID NO: 5714431 - DNA, 25 bp, Homo sapien
gagctccatgaagggtggcgagcag

SEQ ID NO: 5714432 - DNA, 25 bp, Homo sapien
gagtgacacgcccagtgcctgccgc

SEQ ID NO: 5714433 - DNA, 25 bp, Homo sapien
tttctcacaaggggaggacccatgg

SEQ ID NO: 5714434 - DNA, 25 bp, Homo sapien
cttccaggctagaaggacaaacgac

SEQ ID NO: 5714435 - DNA, 25 bp, Homo sapien
gtaggactcgccaaccacgaacacc

SEQ ID NO: 5714436 - DNA, 25 bp, Homo sapien
ccaccatgtccagctaatttttgta

SEQ ID NO: 5714437 - DNA, 25 bp, Homo sapien
cagagtttgtttgtttgtttgtttg

SEQ ID NO: 5714438 - DNA, 25 bp, Homo sapien
tatgcatatgtatgtatacaaatta

SEQ ID NO: 5714439 - DNA, 25 bp, Homo sapien
tcgatgtactcctggaacctgtgca

SEQ ID NO: 5714440 - DNA, 25 bp, Homo sapien
tgtgcagagagaaggtacacagcac

SEQ ID NO: 5714441 - DNA, 25 bp, Homo sapien
agccactctggttttgcaaatgaat

SEQ ID NO: 5714442 - DNA, 25 bp, Homo sapien
ccctccacaccaccaggtcacagat

SEQ ID NO: 5714443 - DNA, 25 bp, Homo sapien
gaaggcctggaaattcagcttcttg

SEQ ID NO: 5714444 - DNA, 25 bp, Homo sapien
aacatgcgaccaggcgaatgagcca

SEQ ID NO: 5714445 - DNA, 25 bp, Homo sapien
acctccatccctcgcttcctgcaca

SEQ ID NO: 5714446 - DNA, 25 bp, Homo sapien
tcaggccctcctggttgaacacgat

SEQ ID NO: 5714447 - DNA, 25 bp, Homo sapien
ctcggcctccctaagtgctgggatg

SEQ ID NO: 5714448 - DNA, 25 bp, Homo sapien
cataggacttggagcggtcaagcag

SEQ ID NO: 5714449 - DNA, 25 bp, Homo sapien
cttatgcctgggcggggcagatgac

SEQ ID NO: 5714450 - DNA, 25 bp, Homo sapien
gatgatgtcgatgccgaagagtgac

SEQ ID NO: 5714451 - DNA, 25 bp, Homo sapien
gccagtggccaatgtgagtgcccaa

SEQ ID NO: 5714452 - DNA, 25 bp, Homo sapien
ggaaaatgtaatcatttctgaaaag

SEQ ID NO: 5714453 - DNA, 25 bp, Homo sapien
agtgggcacctcctcccggcggcgg

SEQ ID NO: 5714454 - DNA, 25 bp, Homo sapien
gagagctcccggatgacctcgtcgc

SEQ ID NO: 5714455 - DNA, 25 bp, Homo sapien
ctcggccgctcgaacacgccctcga

SEQ ID NO: 5714456 - DNA, 25 bp, Homo sapien
caggctggaggggtcgtgctccttt

SEQ ID NO: 5714457 - DNA, 25 bp, Homo sapien
gccatctcgtgagagttggtgccat

SEQ ID NO: 5714458 - DNA, 25 bp, Homo sapien
ggcggggcagatgactgtggcatcg

SEQ ID NO: 5714459 - DNA, 25 bp, Homo sapien
gcgcgccgcgagcgagtgggcacct

SEQ ID NO: 5714460 - DNA, 25 bp, Homo sapien
gttagaaatcaaaacaagactagtt

SEQ ID NO: 5714461 - DNA, 25 bp, Homo sapien
gctgggactacaggcgcccaccacc

SEQ ID NO: 5714462 - DNA, 25 bp, Homo sapien
ggctgggcctttgtcaaggacagct

SEQ ID NO: 5714463 - DNA, 25 bp, Homo sapien
ggctatcattctggtcggcttcaag

SEQ ID NO: 5714464 - DNA, 25 bp, Homo sapien
gtgagcttctgagaggtgattccac

SEQ ID NO: 5714465 - DNA, 25 bp, Homo sapien
tgggtgctcctgcgggtgagaatca

SEQ ID NO: 5714466 - DNA, 25 bp, Homo sapien
tgatccacctgcctcggcctcccta

SEQ ID NO: 5714467 - DNA, 25 bp, Homo sapien
cgctcgaacacgccctcgatcttgt

SEQ ID NO: 5714468 - DNA, 25 bp, Homo sapien
ctgccggggatcccaccgggtgaat

SEQ ID NO: 5714469 - DNA, 25 bp, Homo sapien
gctctcccctgagcagtgcgggagg

SEQ ID NO: 5714470 - DNA, 25 bp, Homo sapien
cggcgaaggcctggaaattcagctt

SEQ ID NO: 5714471 - DNA, 25 bp, Homo sapien
gcctcccgagttcaagcaattctcc

SEQ ID NO: 5714472 - DNA, 25 bp, Homo sapien
gactgtggcatcggggtgtggccag

SEQ ID NO: 5714473 - DNA, 25 bp, Homo sapien
tgtggatgatgacgtccagggggcc

SEQ ID NO: 5714474 - DNA, 25 bp, Homo sapien
gggaaggcattgatgtcaatgacgg

SEQ ID NO: 5714475 - DNA, 25 bp, Homo sapien
ggggtgtggccaggctggcctgagg

SEQ ID NO: 5714476 - DNA, 25 bp, Homo sapien
tgcgggtgagaatcagaagaagacc

SEQ ID NO: 5714477 - DNA, 25 bp, Homo sapien
agtgcgggaggctcactcactccaa

SEQ ID NO: 5714478 - DNA, 25 bp, Homo sapien
gccgccgccacttcctcctcggcct

SEQ ID NO: 5714479 - DNA, 25 bp, Homo sapien
ggacaaacgacaggctggctccctt

SEQ ID NO: 5714480 - DNA, 25 bp, Homo sapien
agatggactcacggtctgatgtgcc

SEQ ID NO: 5714481 - DNA, 25 bp, Homo sapien
cgatggtctcagggtgggcatcgat

SEQ ID NO: 5714482 - DNA, 25 bp, Homo sapien
ctgtctggcaggcaacagctgcttt

SEQ ID NO: 5714483 - DNA, 25 bp, Homo sapien
gacaggctggctcccttggtcttgg

SEQ ID NO: 5714484 - DNA, 25 bp, Homo sapien
gtatattatgcatatgtatgtatac

SEQ ID NO: 5714485 - DNA, 25 bp, Homo sapien
ctgcctcagcctcccaagtagctgg

SEQ ID NO: 5714486 - DNA, 25 bp, Homo sapien
caggcgtgagccgccatgcccggcc

SEQ ID NO: 5714487 - DNA, 25 bp, Homo sapien
actgacaatggctgtgcagagagaa

SEQ ID NO: 5714488 - DNA, 25 bp, Homo sapien
tcgcgcgctgcccgccgagaagggc

SEQ ID NO: 5714489 - DNA, 25 bp, Homo sapien
tagtagagatggggtttcaccatgt

SEQ ID NO: 5714490 - DNA, 25 bp, Homo sapien
aaattctggaccacgcagggtggct

SEQ ID NO: 5714491 - DNA, 25 bp, Homo sapien
aatgtaatcatttctgaaaaggggg

SEQ ID NO: 5714492 - DNA, 25 bp, Homo sapien
caatggcccatgagccacagctcgg

SEQ ID NO: 5714493 - DNA, 25 bp, Homo sapien
acctacgcctcccgagttcaagcaa

SEQ ID NO: 5714494 - DNA, 25 bp, Homo sapien
atttgtcacaaagcccaggtgtcgg

SEQ ID NO: 5714495 - DNA, 25 bp, Homo sapien
agcagaggctgggcctttgtcaagg

SEQ ID NO: 5714496 - DNA, 25 bp, Homo sapien
agaagaagaccccaaccagcaggag

SEQ ID NO: 5714497 - DNA, 25 bp, Homo sapien
atccctcgcttcctgcacagctcgg

SEQ ID NO: 5714498 - DNA, 25 bp, Homo sapien
gcggaacggggatcggagctggggc

SEQ ID NO: 5714499 - DNA, 25 bp, Homo sapien
ggttcagctgcacaacctccatccc

SEQ ID NO: 5714500 - DNA, 25 bp, Homo sapien
ggaaattcagcttcttgattttctt

SEQ ID NO: 5714501 - DNA, 25 bp, Homo sapien
aacggctggcgctattgtttatttc

SEQ ID NO: 5714502 - DNA, 25 bp, Homo sapien
cagaagccatggtgtctgtatctca

SEQ ID NO: 5714503 - DNA, 25 bp, Homo sapien
gtcaagcagggttctgatggcaggg

SEQ ID NO: 5714504 - DNA, 25 bp, Homo sapien
cttgtccagctccgtcaggaccgat

SEQ ID NO: 5714505 - DNA, 25 bp, Homo sapien
gatcccaccgggtgaatgatcagag

SEQ ID NO: 5714506 - DNA, 25 bp, Homo sapien
cagtggtgcgatcttggctcactgc

SEQ ID NO: 5714507 - DNA, 25 bp, Homo sapien
actctggttttgcaaatgaatggga

SEQ ID NO: 5714508 - DNA, 25 bp, Homo sapien
cgaacacgccctcgatcttgtccag

SEQ ID NO: 5714509 - DNA, 25 bp, Homo sapien
tgcgggaggctcactcactccaaac

SEQ ID NO: 5714510 - DNA, 25 bp, Homo sapien
cgcagtcccgccgccgccgccgcca

SEQ ID NO: 5714511 - DNA, 25 bp, Homo sapien
tagaccgttagaaatcaaaacaaga

SEQ ID NO: 5714512 - DNA, 25 bp, Homo sapien
caattctcctgcctcagcctcccaa

SEQ ID NO: 5714513 - DNA, 25 bp, Homo sapien
tcctgcacagctcggcgaaggcctg

SEQ ID NO: 5714514 - DNA, 25 bp, Homo sapien
cgcagggcccgggagagctcccgga

SEQ ID NO: 5714515 - DNA, 25 bp, Homo sapien
agcaaacagcatttgtcacaaagcc

SEQ ID NO: 5714516 - DNA, 25 bp, Homo sapien
ttctgagaggtgattccacacagcc

SEQ ID NO: 5714517 - DNA, 25 bp, Homo sapien
accagctccagggactggctatcat

SEQ ID NO: 5714518 - DNA, 25 bp, Homo sapien
cagatcctgtcgtcttccatgtagg

SEQ ID NO: 5714519 - DNA, 25 bp, Homo sapien
gcctcaatcttccggatgagctcat

SEQ ID NO: 5714520 - DNA, 25 bp, Homo sapien
atgacaggcgtgagccgccatgccc

SEQ ID NO: 5714521 - DNA, 25 bp, Homo sapien
cgatctcttgaccttgtgatccacc

SEQ ID NO: 5714522 - DNA, 25 bp, Homo sapien
agaagcctcgcctgtatcacctgag

SEQ ID NO: 5714523 - DNA, 25 bp, Homo sapien
ggggagcctgggtccggaggaaatc

SEQ ID NO: 5714524 - DNA, 25 bp, Homo sapien
tgggaaagtcaagccgttcttctcc

SEQ ID NO: 5714525 - DNA, 25 bp, Homo sapien
acatggtcatgtatattatgcatat

SEQ ID NO: 5714526 - DNA, 25 bp, Homo sapien
cggtgtaggactcgccaaccacgaa

SEQ ID NO: 5714527 - DNA, 25 bp, Homo sapien
gcagtgtcctaacctcatggagtga

SEQ ID NO: 5714528 - DNA, 25 bp, Homo sapien
ggtttcaccatgttggccaggatgg

SEQ ID NO: 5714529 - DNA, 25 bp, Homo sapien
cagcaggaggccatggagtcatgct

SEQ ID NO: 5714530 - DNA, 25 bp, Homo sapien
caacatcctggtgaaatccctgtga

SEQ ID NO: 5714531 - DNA, 25 bp, Homo sapien
ccggctttgacacgttgtggctgtt

SEQ ID NO: 5714532 - DNA, 25 bp, Homo sapien
ggatgacaggcgtgagccgccatgc

SEQ ID NO: 5714533 - DNA, 25 bp, Homo sapien
agtgcccaagagccaagaactggtc

SEQ ID NO: 5714534 - DNA, 25 bp, Homo sapien
gtcgatgccgaagagtgacacgccc

SEQ ID NO: 5714535 - DNA, 25 bp, Homo sapien
cggggatcccaccgggtgaatgatc

SEQ ID NO: 5714536 - DNA, 25 bp, Homo sapien
ggcgaatgagccaatggacagaagc

SEQ ID NO: 5714537 - DNA, 25 bp, Homo sapien
accacccatcccaaagccacccgca

SEQ ID NO: 5714538 - DNA, 25 bp, Homo sapien
cctacagttacagaaataaacacaa

SEQ ID NO: 5714539 - DNA, 25 bp, Homo sapien
gtcggcaggaacagcaacatcctgg

SEQ ID NO: 5714540 - DNA, 25 bp, Homo sapien
tagtgaagccattcagcagttgcgg

SEQ ID NO: 5714541 - DNA, 25 bp, Homo sapien
agagccaagaactggtcttccaggc

SEQ ID NO: 5714542 - DNA, 25 bp, Homo sapien
cagtccctccacaccaccaggtcac

SEQ ID NO: 5714543 - DNA, 25 bp, Homo sapien
ctgagaggtgattccacacagccct

SEQ ID NO: 5714544 - DNA, 25 bp, Homo sapien
ggactacaggcgcccaccaccatgt

SEQ ID NO: 5714545 - DNA, 25 bp, Homo sapien
ccagtagccaactctcttccctttc

SEQ ID NO: 5714546 - DNA, 25 bp, Homo sapien
ccttgtccctgaaaccacccatccc

SEQ ID NO: 5714547 - DNA, 25 bp, Homo sapien
ggctagaaggacaaacgacaggctg

SEQ ID NO: 5714548 - DNA, 25 bp, Homo sapien
gccgttcttctccagcagccgcatg

SEQ ID NO: 5714549 - DNA, 25 bp, Homo sapien
atgactgtggcatcggggtgtggcc

SEQ ID NO: 5714550 - DNA, 25 bp, Homo sapien
agcagatcctgtcgtcttccatgta

SEQ ID NO: 5714551 - DNA, 25 bp, Homo sapien
caaggacagctgcacttctctgcct

SEQ ID NO: 5714552 - DNA, 25 bp, Homo sapien
cgaagagtgacacgcccagtgcctg

SEQ ID NO: 5714553 - DNA, 25 bp, Homo sapien
ggcgcccaccaccatgtccagctaa

SEQ ID NO: 5714554 - DNA, 25 bp, Homo sapien
ctttgacacgttgtggctgttgaag

SEQ ID NO: 5714555 - DNA, 25 bp, Homo sapien
ggggggtctgggtgctcctgcgggt

SEQ ID NO: 5714556 - DNA, 25 bp, Homo sapien
cagaaaggtctgcatcttcctcctc

SEQ ID NO: 5714557 - DNA, 25 bp, Homo sapien
gaccgatgacgactccggctttgac

SEQ ID NO: 5714558 - DNA, 25 bp, Homo sapien
cacccatcccaaagccacccgcagt

SEQ ID NO: 5714559 - DNA, 25 bp, Homo sapien
tcatccccgcacaggctcgtgagct

SEQ ID NO: 5714560 - DNA, 25 bp, Homo sapien
aaggatgacgtcagtcagcttgtgg

SEQ ID NO: 5714561 - DNA, 25 bp, Homo sapien
cccgccgagaagggcggcggcgagc

SEQ ID NO: 5714562 - DNA, 25 bp, Homo sapien
ggccaggatggtgtcgatctcttga

SEQ ID NO: 5714563 - DNA, 25 bp, Homo sapien
ccggatgacctcgtcgctcggccgc

SEQ ID NO: 5714564 - DNA, 25 bp, Homo sapien
aagggtggcgagcagatcctgtcgt

SEQ ID NO: 5714565 - DNA, 25 bp, Homo sapien
cacggtgtaggactcgccaaccacg

SEQ ID NO: 5714566 - DNA, 25 bp, Homo sapien
gctcccggatgacctcgtcgctcgg

SEQ ID NO: 5714567 - DNA, 25 bp, Homo sapien
ggggtctgggtgctcctgcgggtga

SEQ ID NO: 5714568 - DNA, 25 bp, Homo sapien
ctcagcctcccaagtagctgggact

SEQ ID NO: 5714569 - DNA, 25 bp, Homo sapien
tgatggcagggagcgggtccaggac

SEQ ID NO: 5714570 - DNA, 25 bp, Homo sapien
ctataaagcacacttggcagtcccc

SEQ ID NO: 5714571 - DNA, 25 bp, Homo sapien
gcagatgactgtggcatcggggtgt

SEQ ID NO: 5714572 - DNA, 25 bp, Homo sapien
ccgagtctggcggccggcgcgcgcc

SEQ ID NO: 5714573 - DNA, 25 bp, Homo sapien
ccgcacaggctcgtgagctccatga

SEQ ID NO: 5714574 - DNA, 25 bp, Homo sapien
tcctcccggcggcggggacgcggaa

SEQ ID NO: 5714575 - DNA, 25 bp, Homo sapien
ctgttgaagaagatggactcacggt

SEQ ID NO: 5714576 - DNA, 25 bp, Homo sapien
gagaaggtacacagcacagaccctt

SEQ ID NO: 5714577 - DNA, 25 bp, Homo sapien
gaggccatggagtcatgctcaccag

SEQ ID NO: 5714578 - DNA, 25 bp, Homo sapien
ctttcagaaaggtctgcatcttcct

SEQ ID NO: 5714579 - DNA, 25 bp, Homo sapien
cagctctcccctgagcagtgcggga

SEQ ID NO: 5714580 - DNA, 25 bp, Homo sapien
cttggctcactgcaacctacgcctc

SEQ ID NO: 5714581 - DNA, 25 bp, Homo sapien
ggcggccggcgcgcgccgcgagcga

SEQ ID NO: 5714582 - DNA, 25 bp, Homo sapien
gcttgaagcaaacagcatttgtcac

SEQ ID NO: 5714583 - DNA, 25 bp, Homo sapien
aatgtgagtgcccaagagccaagaa

SEQ ID NO: 5714584 - DNA, 25 bp, Homo sapien
aagaagatggactcacggtctgatg

SEQ ID NO: 5714585 - DNA, 25 bp, Homo sapien
ccaaagccacccgcagtgtcctaac

SEQ ID NO: 5714586 - DNA, 25 bp, Homo sapien
gctgccctgtctggttgttgatgat

SEQ ID NO: 5714587 - DNA, 25 bp, Homo sapien
atggggtttcaccatgttggccagg

SEQ ID NO: 5714588 - DNA, 25 bp, Homo sapien
gcctgcggagaagttcttgagtgag

SEQ ID NO: 5714589 - DNA, 25 bp, Homo sapien
ggatgacctcgtcgctcggccgctc

SEQ ID NO: 5714590 - DNA, 25 bp, Homo sapien
tcagcagttgcggccagtggccaat

SEQ ID NO: 5714591 - DNA, 25 bp, Homo sapien
atccccgcacaggctcgtgagctcc

SEQ ID NO: 5714592 - DNA, 25 bp, Homo sapien
catctcgtgagagttggtgccatga

SEQ ID NO: 5714593 - DNA, 25 bp, Homo sapien
cccggccagagtttctagggaatag

SEQ ID NO: 5714594 - DNA, 25 bp, Homo sapien
ccaggacgatggtctcagggtgggc

SEQ ID NO: 5714595 - DNA, 25 bp, Homo sapien
gcagccagcacccagctcaaggtct

SEQ ID NO: 5714596 - DNA, 25 bp, Homo sapien
aggctgtaggaggggacagtccctc

SEQ ID NO: 5714597 - DNA, 25 bp, Homo sapien
tgaaaagggggggtctgggtgctcc

SEQ ID NO: 5714598 - DNA, 25 bp, Homo sapien
cctgtgagtggcttttcagagtgag

SEQ ID NO: 5714599 - DNA, 25 bp, Homo sapien
agccagcacccagctcaaggtctct

SEQ ID NO: 5714600 - DNA, 25 bp, Homo sapien
agccaatggacagaagccatggtgt

SEQ ID NO: 5714601 - DNA, 25 bp, Homo sapien
ggagcggtcaagcagggttctgatg

SEQ ID NO: 5714602 - DNA, 25 bp, Homo sapien
atccacctgcctcggcctccctaag

SEQ ID NO: 5714603 - DNA, 25 bp, Homo sapien
gcgttcaggccctcctggttgaaca

SEQ ID NO: 5714604 - DNA, 25 bp, Homo sapien
gttacagaaataaacacaacattaa

SEQ ID NO: 5714605 - DNA, 25 bp, Homo sapien
gccgcgagcgagtgggcacctcctc

SEQ ID NO: 5714606 - DNA, 25 bp, Homo sapien
cttcctcctcggcctggtcctcgcg

SEQ ID NO: 5714607 - DNA, 25 bp, Homo sapien
gtcacaaagcccaggtgtcggcagg

SEQ ID NO: 5714608 - DNA, 25 bp, Homo sapien
tctcgctcagccagtagccaactct

SEQ ID NO: 5714609 - DNA, 25 bp, Homo sapien
ccctgtctggttgttgatgatgatg

SEQ ID NO: 5714610 - DNA, 25 bp, Homo sapien
gctcactgcaacctacgcctcccga

SEQ ID NO: 5714611 - DNA, 25 bp, Homo sapien
ggctggaggggtcgtgctcctttag

SEQ ID NO: 5714612 - DNA, 25 bp, Homo sapien
gtgcaccagctccagggactggcta

SEQ ID NO: 5714613 - DNA, 25 bp, Homo sapien
tgaccttgtgatccacctgcctcgg

SEQ ID NO: 5714614 - DNA, 25 bp, Homo sapien
tgcttgtgaacagcttgaagcaaac

SEQ ID NO: 5714615 - DNA, 25 bp, Homo sapien
gttctgatggcagggagcgggtcca

SEQ ID NO: 5714616 - DNA, 25 bp, Homo sapien
ttgagtgagggcctctggaccacgg

SEQ ID NO: 5714617 - DNA, 25 bp, Homo sapien
tctgttgccaggctggagtgcagtg

SEQ ID NO: 5714618 - DNA, 25 bp, Homo sapien
gtgtcgatctcttgaccttgtgatc

SEQ ID NO: 5714619 - DNA, 25 bp, Homo sapien
ccaatgtgagtgcccaagagccaag

SEQ ID NO: 5714620 - DNA, 25 bp, Homo sapien
tgggagaagcctcgcctgtatcacc

SEQ ID NO: 5714621 - DNA, 25 bp, Homo sapien
tggatgatgacgtccagggggccct

SEQ ID NO: 5714622 - DNA, 25 bp, Homo sapien
gagaagggcggcggcgagcgcccgc

SEQ ID NO: 5714623 - DNA, 25 bp, Homo sapien
taaacacaacattaactgtactcca

SEQ ID NO: 5714624 - DNA, 25 bp, Homo sapien
gcctcggcctccctaagtgctggga

SEQ ID NO: 5714625 - DNA, 25 bp, Homo sapien
ggcaggcaacagctgctttgctcag

SEQ ID NO: 5714626 - DNA, 25 bp, Homo sapien
ctcgccaaccacgaacaccttgtac

SEQ ID NO: 5714627 - DNA, 25 bp, Homo sapien
gatggtgtcgatctcttgaccttgt

SEQ ID NO: 5714628 - DNA, 25 bp, Homo sapien
gtggcatcggggtgtggccaggctg

SEQ ID NO: 5714629 - DNA, 25 bp, Homo sapien
tgtttgtttgttttttgaggagtct

SEQ ID NO: 5714630 - DNA, 25 bp, Homo sapien
ggggtcggccaggctgtaggagggg

SEQ ID NO: 5714631 - DNA, 25 bp, Homo sapien
cctcccggtcaccaggctggagggg

SEQ ID NO: 5714632 - DNA, 25 bp, Homo sapien
ccagccttctataaagcacacttgg

SEQ ID NO: 5714633 - DNA, 25 bp, Homo sapien
ctcctgcgggtgagaatcagaagaa

SEQ ID NO: 5714634 - DNA, 25 bp, Homo sapien
gaagcaaacagcatttgtcacaaag

SEQ ID NO: 5714635 - DNA, 25 bp, Homo sapien
tggcgttcaggccctcctggttgaa

SEQ ID NO: 5714636 - DNA, 25 bp, Homo sapien
cacaacattaactgtactccactag

SEQ ID NO: 5714637 - DNA, 25 bp, Homo sapien
agggaaaatgtaatcatttctgaaa

SEQ ID NO: 5714638 - DNA, 25 bp, Homo sapien
acccgcagtgtcctaacctcatgga

SEQ ID NO: 5714639 - DNA, 25 bp, Homo sapien
tcacaaggggaggacccatgggaga

SEQ ID NO: 5714640 - DNA, 25 bp, Homo sapien
tggtgaaatccctgtgagtggcttt

SEQ ID NO: 5714641 - DNA, 25 bp, Homo sapien
cgccgccacttcctcctcggcctgg

SEQ ID NO: 5714642 - DNA, 25 bp, Homo sapien
gctgggatgacaggcgtgagccgcc

SEQ ID NO: 5714643 - DNA, 25 bp, Homo sapien
aagcctcgcctgtatcacctgagtc

SEQ ID NO: 5714644 - DNA, 25 bp, Homo sapien
ggtctgcatcttcctcctcgggcgg

SEQ ID NO: 5714645 - DNA, 25 bp, Homo sapien
tgggatgacaggcgtgagccgccat

SEQ ID NO: 5714646 - DNA, 25 bp, Homo sapien
ggatgacgtcagtcagcttgtggat

SEQ ID NO: 5714647 - DNA, 25 bp, Homo sapien
cagaccccagggacattagtgaagc

SEQ ID NO: 5714648 - DNA, 25 bp, Homo sapien
gggtcgtgctcctttagggcagcca

SEQ ID NO: 5714649 - DNA, 25 bp, Homo sapien
ggaacggggatcggagctggggcgc

SEQ ID NO: 5714650 - DNA, 25 bp, Homo sapien
ccggctaaggttcagctgcacaacc

SEQ ID NO: 5714651 - DNA, 25 bp, Homo sapien
catcggggtgtggccaggctggcct

SEQ ID NO: 5714652 - DNA, 25 bp, Homo sapien
tatacaaattaagtacgaaccagct

SEQ ID NO: 5714653 - DNA, 25 bp, Homo sapien
ctgcggagaagttcttgagtgaggg

SEQ ID NO: 5714654 - DNA, 25 bp, Homo sapien
ccgcatggtgtcatccccgcacagg

SEQ ID NO: 5714655 - DNA, 25 bp, Homo sapien
tgagtgcccaagagccaagaactgg

SEQ ID NO: 5714656 - DNA, 25 bp, Homo sapien
gtacacagcacagaccctttctcac

SEQ ID NO: 5714657 - DNA, 25 bp, Homo sapien
aatgagccaatggacagaagccatg

SEQ ID NO: 5714658 - DNA, 25 bp, Homo sapien
actcttgaagggaaaatgtaatcat

SEQ ID NO: 5714659 - DNA, 25 bp, Homo sapien
ttctggtgaagttgcttgtgaacag

SEQ ID NO: 5714660 - DNA, 25 bp, Homo sapien
gggatcccaccgggtgaatgatcag

SEQ ID NO: 5714661 - DNA, 25 bp, Homo sapien
cggcgcgcgccgcgagcgagtgggc

SEQ ID NO: 5714662 - DNA, 25 bp, Homo sapien
catcccaaagccacccgcagtgtcc

SEQ ID NO: 5714663 - DNA, 25 bp, Homo sapien
gggtggcgagcagatcctgtcgtct

SEQ ID NO: 5714664 - DNA, 25 bp, Homo sapien
gccgctcgaacacgccctcgatctt

SEQ ID NO: 5714665 - DNA, 25 bp, Homo sapien
cctgggtccggaggaaatcgcccac

SEQ ID NO: 5714666 - DNA, 25 bp, Homo sapien
caagagccaagaactggtcttccag

SEQ ID NO: 5714667 - DNA, 25 bp, Homo sapien
ctggggcgcgcagtcccgccgccgc

SEQ ID NO: 5714668 - DNA, 25 bp, Homo sapien
agtcaagccgttcttctccagcagc

SEQ ID NO: 5714669 - DNA, 25 bp, Homo sapien
ttcagaaaggtctgcatcttcctcc

SEQ ID NO: 5714670 - DNA, 25 bp, Homo sapien
tagttagcaaatacagagatcacag

SEQ ID NO: 5714671 - DNA, 25 bp, Homo sapien
cttggcagtcccctgggaaggcatt

SEQ ID NO: 5714672 - DNA, 25 bp, Homo sapien
ctggtcggcttcaaggatgacgtca

SEQ ID NO: 5714673 - DNA, 25 bp, Homo sapien
tgaatgggaaagtcaagccgttctt

SEQ ID NO: 5714674 - DNA, 25 bp, Homo sapien
gggccctgctcctcgatcggccggc

SEQ ID NO: 5714675 - DNA, 25 bp, Homo sapien
cgcctgtatcacctgagtcaggctt

SEQ ID NO: 5714676 - DNA, 25 bp, Homo sapien
tgcaacctacgcctcccgagttcaa

SEQ ID NO: 5714677 - DNA, 25 bp, Homo sapien
ctggttgttgatgatgatgtcgatg

SEQ ID NO: 5714678 - DNA, 25 bp, Homo sapien
gccgcagggcccgggagagctcccg

SEQ ID NO: 5714679 - DNA, 25 bp, Homo sapien
ttccctttcagaaaggtctgcatct

SEQ ID NO: 5714680 - DNA, 25 bp, Homo sapien
cacttcctcctcggcctggtcctcg

SEQ ID NO: 5714681 - DNA, 25 bp, Homo sapien
catgcccggccagagtttctaggga

SEQ ID NO: 5714682 - DNA, 25 bp, Homo sapien
ctccatccctcgcttcctgcacagc

SEQ ID NO: 5714683 - DNA, 25 bp, Homo sapien
ctcataggacttggagcggtcaagc

SEQ ID NO: 5714684 - DNA, 25 bp, Homo sapien
acagcacagaccctttctcacaagg

SEQ ID NO: 5714685 - DNA, 25 bp, Homo sapien
cgcgcagtcccgccgccgccgccgc

SEQ ID NO: 5714686 - DNA, 25 bp, Homo sapien
ccctttcagaaaggtctgcatcttc

SEQ ID NO: 5714687 - DNA, 25 bp, Homo sapien
cgatcttgtccagctccgtcaggac

SEQ ID NO: 5714688 - DNA, 25 bp, Homo sapien
acgaaccagcttgggattctggtga

SEQ ID NO: 5714689 - DNA, 25 bp, Homo sapien
tcccaaagccacccgcagtgtccta

SEQ ID NO: 5714690 - DNA, 25 bp, Homo sapien
ttgattttcttctcgctcagccagt

SEQ ID NO: 5714691 - DNA, 25 bp, Homo sapien
aagtacgaaccagcttgggattctg

SEQ ID NO: 5714692 - DNA, 25 bp, Homo sapien
aggaagggggtcggccaggctgtag

SEQ ID NO: 5714693 - DNA, 25 bp, Homo sapien
gaaaccacccatcccaaagccaccc

SEQ ID NO: 5714694 - DNA, 25 bp, Homo sapien
gcgcgctgcccgccgagaagggcgg

SEQ ID NO: 5714695 - DNA, 25 bp, Homo sapien
aggaccgatgacgactccggctttg

SEQ ID NO: 5714696 - DNA, 25 bp, Homo sapien
atcttgtccagctccgtcaggaccg

SEQ ID NO: 5714697 - DNA, 25 bp, Homo sapien
tgagaatcagaagaagaccccaacc

SEQ ID NO: 5714698 - DNA, 25 bp, Homo sapien
ttgtggctgttgaagaagatggact

SEQ ID NO: 5714699 - DNA, 25 bp, Homo sapien
tgtatctcatacatggtcatgtata

SEQ ID NO: 5714700 - DNA, 25 bp, Homo sapien
agtggcttttcagagtgagcttctg

SEQ ID NO: 5714701 - DNA, 25 bp, Homo sapien
aaggtctgcatcttcctcctcgggc

SEQ ID NO: 5714702 - DNA, 25 bp, Homo sapien
tactccactagaccgttagaaatca

SEQ ID NO: 5714703 - DNA, 25 bp, Homo sapien
cacttctctgcctcccggtcaccag

SEQ ID NO: 5714704 - DNA, 25 bp, Homo sapien
aaacgacaggctggctcccttggtc

SEQ ID NO: 5714705 - DNA, 25 bp, Homo sapien
ctgctttgctcagttggctcaaaca

SEQ ID NO: 5714706 - DNA, 25 bp, Homo sapien
gagcgggtccaggacgatggtctca

SEQ ID NO: 5714707 - DNA, 25 bp, Homo sapien
aggacccatgggagaagcctcgcct

SEQ ID NO: 5714708 - DNA, 25 bp, Homo sapien
atggtcatgtatattatgcatatgt

SEQ ID NO: 5714709 - DNA, 25 bp, Homo sapien
aaacatgtgacagcttcctacttca

SEQ ID NO: 5714710 - DNA, 25 bp, Homo sapien
tgcgatcttggctcactgcaaccta

SEQ ID NO: 5714711 - DNA, 25 bp, Homo sapien
aggtgtcggcaggaacagcaacatc

SEQ ID NO: 5714712 - DNA, 25 bp, Homo sapien
gtgaagccattcagcagttgcggcc

SEQ ID NO: 5714713 - DNA, 25 bp, Homo sapien
aaaatgtaatcatttctgaaaaggg

SEQ ID NO: 5714714 - DNA, 25 bp, Homo sapien
gttaggtttatactccacccctaca

SEQ ID NO: 5714715 - DNA, 25 bp, Homo sapien
gaacacgatagccatctcgtgagag

SEQ ID NO: 5714716 - DNA, 25 bp, Homo sapien
ggaccacggtgtaggactcgccaac

SEQ ID NO: 5714717 - DNA, 25 bp, Homo sapien
tgtccagctaatttttgtattttta

SEQ ID NO: 5714718 - DNA, 25 bp, Homo sapien
catgcgaccaggcgaatgagccaat

SEQ ID NO: 5714719 - DNA, 25 bp, Homo sapien
gactggctatcattctggtcggctt

SEQ ID NO: 5714720 - DNA, 25 bp, Homo sapien
ctatcattctggtcggcttcaagga

SEQ ID NO: 5714721 - DNA, 25 bp, Homo sapien
gacgtccagggggccctgctcctcg

SEQ ID NO: 5714722 - DNA, 25 bp, Homo sapien
gcaggaggccatggagtcatgctca

SEQ ID NO: 5714723 - DNA, 25 bp, Homo sapien
cagttgcggccagtggccaatgtga

SEQ ID NO: 5714724 - DNA, 25 bp, Homo sapien
aacagcttgaagcaaacagcatttg

SEQ ID NO: 5714725 - DNA, 25 bp, Homo sapien
ctaacctcatggagtgaacatgcga

SEQ ID NO: 5714726 - DNA, 25 bp, Homo sapien
ggcctggtcctcgcgcgctgcccgc

SEQ ID NO: 5714727 - DNA, 25 bp, Homo sapien
tatgcctgggcggggcagatgactg

SEQ ID NO: 5714728 - DNA, 25 bp, Homo sapien
tgtccagctccgtcaggaccgatga

SEQ ID NO: 5714729 - DNA, 25 bp, Homo sapien
aacacgccctcgatcttgtccagct

SEQ ID NO: 5714730 - DNA, 25 bp, Homo sapien
accagcttgggattctggtgaagtt

SEQ ID NO: 5714731 - DNA, 25 bp, Homo sapien
ccattcagcagttgcggccagtggc

SEQ ID NO: 5714732 - DNA, 25 bp, Homo sapien
actagaccgttagaaatcaaaacaa

SEQ ID NO: 5714733 - DNA, 25 bp, Homo sapien
cgcgagcgagtgggcacctcctccc

SEQ ID NO: 5714734 - DNA, 25 bp, Homo sapien
aggctcactcactccaaaccacact

SEQ ID NO: 5714735 - DNA, 25 bp, Homo sapien
ttttaacggctggcgctattgttta

SEQ ID NO: 5714736 - DNA, 25 bp, Homo sapien
tcacggtctgatgtgcctgcggaga

SEQ ID NO: 5714737 - DNA, 25 bp, Homo sapien
cctggtgaaatccctgtgagtggct

SEQ ID NO: 5714738 - DNA, 25 bp, Homo sapien
tcctcgggcggggagcctgggtccg

SEQ ID NO: 5714739 - DNA, 25 bp, Homo sapien
cgcccaccaccatgtccagctaatt

SEQ ID NO: 5714740 - DNA, 25 bp, Homo sapien
gagggcctctggaccacggtgtagg

SEQ ID NO: 5714741 - DNA, 25 bp, Homo sapien
tgaatgatcagagtttgtttgtttg

SEQ ID NO: 5714742 - DNA, 25 bp, Homo sapien
ggagaagcctcgcctgtatcacctg

SEQ ID NO: 5714743 - DNA, 25 bp, Homo sapien
gatcggccggctaaggttcagctgc

SEQ ID NO: 5714744 - DNA, 25 bp, Homo sapien
gttggctcaaacatgtgacagcttc

SEQ ID NO: 5714745 - DNA, 25 bp, Homo sapien
tgatgtcgatgccgaagagtgacac

SEQ ID NO: 5714746 - DNA, 25 bp, Homo sapien
tctgatgtgcctgcggagaagttct

SEQ ID NO: 5714747 - DNA, 25 bp, Homo sapien
ttctggtcggcttcaaggatgacgt

SEQ ID NO: 5714748 - DNA, 25 bp, Homo sapien
gctgtaggaggggacagtccctcca

SEQ ID NO: 5714749 - DNA, 25 bp, Homo sapien
tggacagaagccatggtgtctgtat

SEQ ID NO: 5714750 - DNA, 25 bp, Homo sapien
tggtcttccaggctagaaggacaaa

SEQ ID NO: 5714751 - DNA, 25 bp, Homo sapien
ctgtcgtcttccatgtaggcctcaa

SEQ ID NO: 5714752 - DNA, 25 bp, Homo sapien
ccttctataaagcacacttggcagt

SEQ ID NO: 5714753 - DNA, 25 bp, Homo sapien
atggagtcatgctcaccagctctcc

SEQ ID NO: 5714754 - DNA, 25 bp, Homo sapien
aggcctggaaattcagcttcttgat

SEQ ID NO: 5714755 - DNA, 25 bp, Homo sapien
ccctcgatcttgtccagctccgtca

SEQ ID NO: 5714756 - DNA, 25 bp, Homo sapien
gcatggtgtcatccccgcacaggct

SEQ ID NO: 5714757 - DNA, 25 bp, Homo sapien
cccaccaccatgtccagctaatttt

SEQ ID NO: 5714758 - DNA, 25 bp, Homo sapien
tgaagaagatggactcacggtctga

SEQ ID NO: 5714759 - DNA, 25 bp, Homo sapien
gtgagagttggtgccatgagccact

SEQ ID NO: 5714760 - DNA, 25 bp, Homo sapien
gagaggtgattccacacagccctgg

SEQ ID NO: 5714761 - DNA, 25 bp, Homo sapien
cggccagtggccaatgtgagtgccc

SEQ ID NO: 5714762 - DNA, 25 bp, Homo sapien
gatgaaattctggaccacgcagggt

SEQ ID NO: 5714763 - DNA, 25 bp, Homo sapien
ggcacctcctcccggcggcggggac

SEQ ID NO: 5714764 - DNA, 25 bp, Homo sapien
cagaccctttctcacaaggggagga

SEQ ID NO: 5714765 - DNA, 25 bp, Homo sapien
gttcttgagtgagggcctctggacc

SEQ ID NO: 5714766 - DNA, 25 bp, Homo sapien
atgatgatgtcgatgccgaagagtg

SEQ ID NO: 5714767 - DNA, 25 bp, Homo sapien
gctccagggactggctatcattctg

SEQ ID NO: 5714768 - DNA, 25 bp, Homo sapien
ggacttggagcggtcaagcagggtt

SEQ ID NO: 5714769 - DNA, 25 bp, Homo sapien
caacctacgcctcccgagttcaagc

SEQ ID NO: 5714770 - DNA, 25 bp, Homo sapien
tagcaaatacagagatcacagcgac

SEQ ID NO: 5714771 - DNA, 25 bp, Homo sapien
tgaagggtggcgagcagatcctgtc

SEQ ID NO: 5714772 - DNA, 25 bp, Homo sapien
cggtcaagcagggttctgatggcag

SEQ ID NO: 5714773 - DNA, 25 bp, Homo sapien
attagtgaagccattcagcagttgc

SEQ ID NO: 5714774 - DNA, 25 bp, Homo sapien
ttttttaacggctggcgctattgtt

SEQ ID NO: 5714775 - DNA, 25 bp, Homo sapien
gatgatgacgtccagggggccctgc

SEQ ID NO: 5714776 - DNA, 25 bp, Homo sapien
gctcgtgagctccatgaagggtggc

SEQ ID NO: 5714777 - DNA, 25 bp, Homo sapien
acagctgctttgctcagttggctca

SEQ ID NO: 5714778 - DNA, 25 bp, Homo sapien
aaatacagagatcacagcgacacct

SEQ ID NO: 5714779 - DNA, 25 bp, Homo sapien
aatagaagagagggcagatacagac

SEQ ID NO: 5714780 - DNA, 25 bp, Homo sapien
tgtttgttttttgaggagtcttgct

SEQ ID NO: 5714781 - DNA, 25 bp, Homo sapien
ggggaggacccatgggagaagcctc

SEQ ID NO: 5714782 - DNA, 25 bp, Homo sapien
cgagttcaagcaattctcctgcctc

SEQ ID NO: 5714783 - DNA, 25 bp, Homo sapien
ctaaggttcagctgcacaacctcca

SEQ ID NO: 5714784 - DNA, 25 bp, Homo sapien
ggctggctcccttggtcttggggtg

SEQ ID NO: 5714785 - DNA, 25 bp, Homo sapien
gccatgagccactctggttttgcaa

SEQ ID NO: 5714786 - DNA, 25 bp, Homo sapien
ttcatgtttccaaaagttaggttta

SEQ ID NO: 5714787 - DNA, 25 bp, Homo sapien
tcggagctggggcgcgcagtcccgc

SEQ ID NO: 5714788 - DNA, 25 bp, Homo sapien
tcagtcagcttgtggatgatgacgt

SEQ ID NO: 5714789 - DNA, 25 bp, Homo sapien
cagatgactcttgaagggaaaatgt

SEQ ID NO: 5714790 - DNA, 25 bp, Homo sapien
tgacaatggctgtgcagagagaagg

SEQ ID NO: 5714791 - DNA, 25 bp, Homo sapien
tcatggagtgaacatgcgaccaggc

SEQ ID NO: 5714792 - DNA, 25 bp, Homo sapien
agtgcagtggtgcgatcttggctca

SEQ ID NO: 5714793 - DNA, 25 bp, Homo sapien
ggagtcttgctctgttgccaggctg

SEQ ID NO: 5714794 - DNA, 25 bp, Homo sapien
cacttggcagtcccctgggaaggca

SEQ ID NO: 5714795 - DNA, 25 bp, Homo sapien
tcttgattttcttctcgctcagcca

SEQ ID NO: 5714796 - DNA, 25 bp, Homo sapien
ggtctgatgtgcctgcggagaagtt

SEQ ID NO: 5714797 - DNA, 25 bp, Homo sapien
ttttgaggagtcttgctctgttgcc

SEQ ID NO: 5714798 - DNA, 25 bp, Homo sapien
tggaacctgtgcaccagctccaggg

SEQ ID NO: 5714799 - DNA, 25 bp, Homo sapien
tgactcttgaagggaaaatgtaatc

SEQ ID NO: 5714800 - DNA, 25 bp, Homo sapien
agaccccaaccagcaggaggccatg

SEQ ID NO: 5714801 - DNA, 25 bp, Homo sapien
cttgtgaacagcttgaagcaaacag

SEQ ID NO: 5714802 - DNA, 25 bp, Homo sapien
ttgctctgttgccaggctggagtgc

SEQ ID NO: 5714803 - DNA, 25 bp, Homo sapien
cggcaggaacagcaacatcctggtg

SEQ ID NO: 5714804 - DNA, 25 bp, Homo sapien
ccactagaccgttagaaatcaaaac

SEQ ID NO: 5714805 - DNA, 25 bp, Homo sapien
ggaaatcgcccacaggccgagtctg

SEQ ID NO: 5714806 - DNA, 25 bp, Homo sapien
aggcctcaatcttccggatgagctc

SEQ ID NO: 5714807 - DNA, 25 bp, Homo sapien
ggtgggcatcgatgtactcctggaa

SEQ ID NO: 5714808 - DNA, 25 bp, Homo sapien
cagctccagggactggctatcattc

SEQ ID NO: 5714809 - DNA, 25 bp, Homo sapien
gaccccagggacattagtgaagcca

SEQ ID NO: 5714810 - DNA, 25 bp, Homo sapien
tggctgtgcagagagaaggtacaca

SEQ ID NO: 5714811 - DNA, 25 bp, Homo sapien
gaagatggactcacggtctgatgtg

SEQ ID NO: 5714812 - DNA, 25 bp, Homo sapien
tctctgcctcccggtcaccaggctg

SEQ ID NO: 5714813 - DNA, 25 bp, Homo sapien
cagctcaaggtctctgaatccaatg

SEQ ID NO: 5714814 - DNA, 25 bp, Homo sapien
ccctgagcagtgcgggaggctcact

SEQ ID NO: 5714815 - DNA, 25 bp, Homo sapien
ctggtgaagttgcttgtgaacagct

SEQ ID NO: 5714816 - DNA, 25 bp, Homo sapien
gcaaatacagagatcacagcgacac

SEQ ID NO: 5714817 - DNA, 25 bp, Homo sapien
aggtcacagatgactcttgaaggga

SEQ ID NO: 5714818 - DNA, 25 bp, Homo sapien
gtggccaatgtgagtgcccaagagc

SEQ ID NO: 5714819 - DNA, 25 bp, Homo sapien
cacccagctcaaggtctctgaatcc

SEQ ID NO: 5714820 - DNA, 25 bp, Homo sapien
cctcctcgggcggggagcctgggtc

SEQ ID NO: 5714821 - DNA, 25 bp, Homo sapien
actacaggcgcccaccaccatgtcc

SEQ ID NO: 5714822 - DNA, 25 bp, Homo sapien
tggtcttggggtggctgtctggcag

SEQ ID NO: 5714823 - DNA, 25 bp, Homo sapien
ccacccgcagtgtcctaacctcatg

SEQ ID NO: 5714824 - DNA, 25 bp, Homo sapien
ggtcggccaggctgtaggaggggac

SEQ ID NO: 5714825 - DNA, 25 bp, Homo sapien
agcttgtggatgatgacgtccaggg

SEQ ID NO: 5714826 - DNA, 25 bp, Homo sapien
tgcagtggtgcgatcttggctcact

SEQ ID NO: 5714827 - DNA, 25 bp, Homo sapien
tgaggcagcagaggctgggcctttg

SEQ ID NO: 5714828 - DNA, 25 bp, Homo sapien
attctggaccacgcagggtggctgg

SEQ ID NO: 5714829 - DNA, 25 bp, Homo sapien
aagagtgacacgcccagtgcctgcc

SEQ ID NO: 5714830 - DNA, 25 bp, Homo sapien
ctgtctggttgttgatgatgatgtc

SEQ ID NO: 5714831 - DNA, 25 bp, Homo sapien
gcacagctcggcgaaggcctggaaa

SEQ ID NO: 5714832 - DNA, 25 bp, Homo sapien
aggcagcagaggctgggcctttgtc

SEQ ID NO: 5714833 - DNA, 25 bp, Homo sapien
ctggaaattcagcttcttgattttc

SEQ ID NO: 5714834 - DNA, 25 bp, Homo sapien
atattatgcatatgtatgtatacaa

SEQ ID NO: 5714835 - DNA, 25 bp, Homo sapien
cagagtgagcttctgagaggtgatt

SEQ ID NO: 5714836 - DNA, 25 bp, Homo sapien
tctcagggtgggcatcgatgtactc

SEQ ID NO: 5714837 - DNA, 25 bp, Homo sapien
cagggactggctatcattctggtcg

SEQ ID NO: 5714838 - DNA, 25 bp, Homo sapien
aaagtcaagccgttcttctccagca

SEQ ID NO: 5714839 - DNA, 25 bp, Homo sapien
accacggtgtaggactcgccaacca

SEQ ID NO: 5714840 - DNA, 25 bp, Homo sapien
tgagccaatggacagaagccatggt

SEQ ID NO: 5714841 - DNA, 25 bp, Homo sapien
agcggtcaagcagggttctgatggc

SEQ ID NO: 5714842 - DNA, 25 bp, Homo sapien
tggcagtcccctgggaaggcattga

SEQ ID NO: 5714843 - DNA, 25 bp, Homo sapien
ggtggctggatggcgttcaggccct

SEQ ID NO: 5714844 - DNA, 25 bp, Homo sapien
ccagggacattagtgaagccattca

SEQ ID NO: 5714845 - DNA, 25 bp, Homo sapien
ggtcatgtatattatgcatatgtat

SEQ ID NO: 5714846 - DNA, 25 bp, Homo sapien
tgtctgtatctcatacatggtcatg

SEQ ID NO: 5714847 - DNA, 25 bp, Homo sapien
gcgccgcgagcgagtgggcacctcc

SEQ ID NO: 5714848 - DNA, 25 bp, Homo sapien
tggaccacgcagggtggctggatgg

SEQ ID NO: 5714849 - DNA, 25 bp, Homo sapien
ccccgcacaggctcgtgagctccat

SEQ ID NO: 5714850 - DNA, 25 bp, Homo sapien
cagcttcctacttcagtcggtcttc

SEQ ID NO: 5714851 - DNA, 25 bp, Homo sapien
ggacgcggaacggggatcggagctg

SEQ ID NO: 5714852 - DNA, 25 bp, Homo sapien
gcgacaccttgtccctgaaaccacc

SEQ ID NO: 5714853 - DNA, 25 bp, Homo sapien
tcagcttcttgattttcttctcgct

SEQ ID NO: 5714854 - DNA, 25 bp, Homo sapien
tggctggatggcgttcaggccctcc

SEQ ID NO: 5714855 - DNA, 25 bp, Homo sapien
cttcaaggatgacgtcagtcagctt

SEQ ID NO: 5714856 - DNA, 25 bp, Homo sapien
tgagccgccatgcccggccagagtt

SEQ ID NO: 5714857 - DNA, 25 bp, Homo sapien
ggaggctcactcactccaaaccaca

SEQ ID NO: 5714858 - DNA, 25 bp, Homo sapien
tgcggccagtggccaatgtgagtgc

SEQ ID NO: 5714859 - DNA, 25 bp, Homo sapien
gtgctgccctgtctggttgttgatg

SEQ ID NO: 5714860 - DNA, 25 bp, Homo sapien
ctcctcggcctggtcctcgcgcgct

SEQ ID NO: 5714861 - DNA, 25 bp, Homo sapien
atggtgtctgtatctcatacatggt

SEQ ID NO: 5714862 - DNA, 25 bp, Homo sapien
tctgaaaagggggggtctgggtgct

SEQ ID NO: 5714863 - DNA, 25 bp, Homo sapien
ggaggacccatgggagaagcctcgc

SEQ ID NO: 5714864 - DNA, 25 bp, Homo sapien
tgcacaacctccatccctcgcttcc

SEQ ID NO: 5714865 - DNA, 25 bp, Homo sapien
gtcctcgcgcgctgcccgccgagaa

SEQ ID NO: 5714866 - DNA, 25 bp, Homo sapien
gccaggctggcctgaggcagcagag

SEQ ID NO: 5714867 - DNA, 25 bp, Homo sapien
aggatggtgtcgatctcttgacctt

SEQ ID NO: 5714868 - DNA, 25 bp, Homo sapien
tggccaggctggcctgaggcagcag

SEQ ID NO: 5714869 - DNA, 25 bp, Homo sapien
cgtcttccatgtaggcctcaatctt

SEQ ID NO: 5714870 - DNA, 25 bp, Homo sapien
cacacttggcagtcccctgggaagg

SEQ ID NO: 5714871 - DNA, 25 bp, Homo sapien
gtctggttgttgatgatgatgtcga

SEQ ID NO: 5714872 - DNA, 25 bp, Homo sapien
ggcagatacagaccccagggacatt

SEQ ID NO: 5714873 - DNA, 25 bp, Homo sapien
tggttttgcaaatgaatgggaaagt

SEQ ID NO: 5714874 - DNA, 25 bp, Homo sapien
agatggggtttcaccatgttggcca

SEQ ID NO: 5714875 - DNA, 25 bp, Homo sapien
tggctcaaacatgtgacagcttcct

SEQ ID NO: 5714876 - DNA, 25 bp, Homo sapien
ggtgctcctgcgggtgagaatcaga

SEQ ID NO: 5714877 - DNA, 25 bp, Homo sapien
ggttgaacacgatagccatctcgtg

SEQ ID NO: 5714878 - DNA, 25 bp, Homo sapien
caggccgagtctggcggccggcgcg

SEQ ID NO: 5714879 - DNA, 25 bp, Homo sapien
aggaacagcaacatcctggtgaaat

SEQ ID NO: 5714880 - DNA, 25 bp, Homo sapien
attccacacagccctggaggaaggg

SEQ ID NO: 5714881 - DNA, 25 bp, Homo sapien
gtgctgggatgacaggcgtgagccg

SEQ ID NO: 5714882 - DNA, 25 bp, Homo sapien
caccttgtccctgaaaccacccatc

SEQ ID NO: 5714883 - DNA, 25 bp, Homo sapien
caaagcccaggtgtcggcaggaaca

SEQ ID NO: 5714884 - DNA, 25 bp, Homo sapien
gggatcggagctggggcgcgcagtc

SEQ ID NO: 5714885 - DNA, 25 bp, Homo sapien
caatcttccggatgagctcatagga

SEQ ID NO: 5714886 - DNA, 25 bp, Homo sapien
tgtatgtatacaaattaagtacgaa

SEQ ID NO: 5714887 - DNA, 25 bp, Homo sapien
cgtcaggaccgatgacgactccggc

SEQ ID NO: 5714888 - DNA, 25 bp, Homo sapien
acgaacaccttgtacaggacggcgt

SEQ ID NO: 5714889 - DNA, 25 bp, Homo sapien
ccactctggttttgcaaatgaatgg

SEQ ID NO: 5714890 - DNA, 25 bp, Homo sapien
tccaatggcccatgagccacagctc

SEQ ID NO: 5714891 - DNA, 25 bp, Homo sapien
ttgatgaaattctggaccacgcagg

SEQ ID NO: 5714892 - DNA, 25 bp, Homo sapien
tgtgagtggcttttcagagtgagct

SEQ ID NO: 5714893 - DNA, 25 bp, Homo sapien
gttttgcaaatgaatgggaaagtca

SEQ ID NO: 5714894 - DNA, 25 bp, Homo sapien
gcctcccaagtagctgggactacag

SEQ ID NO: 5714895 - DNA, 25 bp, Homo sapien
caggcgaatgagccaatggacagaa

SEQ ID NO: 5714896 - DNA, 25 bp, Homo sapien
ccatccctcgcttcctgcacagctc

SEQ ID NO: 5714897 - DNA, 25 bp, Homo sapien
agagatcacagcgacaccttgtccc

SEQ ID NO: 5714898 - DNA, 25 bp, Homo sapien
ttaacggctggcgctattgtttatt

SEQ ID NO: 5714899 - DNA, 25 bp, Homo sapien
taatcatttctgaaaagggggggtc

SEQ ID NO: 5714900 - DNA, 25 bp, Homo sapien
agggtggctggatggcgttcaggcc

SEQ ID NO: 5714901 - DNA, 25 bp, Homo sapien
gctgcacaacctccatccctcgctt

SEQ ID NO: 5714902 - DNA, 25 bp, Homo sapien
cagatacagaccccagggacattag

SEQ ID NO: 5714903 - DNA, 25 bp, Homo sapien
gctccatgaagggtggcgagcagat

SEQ ID NO: 5714904 - DNA, 25 bp, Homo sapien
gtcgatctcttgaccttgtgatcca

SEQ ID NO: 5714905 - DNA, 25 bp, Homo sapien
gatcctgtcgtcttccatgtaggcc

SEQ ID NO: 5714906 - DNA, 25 bp, Homo sapien
tcggggtgtggccaggctggcctga

SEQ ID NO: 5714907 - DNA, 25 bp, Homo sapien
cctttagggcagccagcacccagct

SEQ ID NO: 5714908 - DNA, 25 bp, Homo sapien
atgtatattatgcatatgtatgtat

SEQ ID NO: 5714909 - DNA, 25 bp, Homo sapien
cttcagtcggtcttccagccttcta

SEQ ID NO: 5714910 - DNA, 25 bp, Homo sapien
ttctagggaatagaagagagggcag

SEQ ID NO: 5714911 - DNA, 25 bp, Homo sapien
tctcacaaggggaggacccatggga

SEQ ID NO: 5714912 - DNA, 25 bp, Homo sapien
ggtctgggtgctcctgcgggtgaga

SEQ ID NO: 5714913 - DNA, 25 bp, Homo sapien
cctgcgggtgagaatcagaagaaga

SEQ ID NO: 5714914 - DNA, 25 bp, Homo sapien
cagctgcacttctctgcctcccggt

SEQ ID NO: 5714915 - DNA, 25 bp, Homo sapien
cagaggctgggcctttgtcaaggac

SEQ ID NO: 5714916 - DNA, 25 bp, Homo sapien
gaaatcaaaacaagactagttagca

SEQ ID NO: 5714917 - DNA, 25 bp, Homo sapien
tgacgactccggctttgacacgttg

SEQ ID NO: 5714918 - DNA, 25 bp, Homo sapien
agttcaagcaattctcctgcctcag

SEQ ID NO: 5714919 - DNA, 25 bp, Homo sapien
gtctggcaggcaacagctgctttgc

SEQ ID NO: 5714920 - DNA, 25 bp, Homo sapien
tgctcctttagggcagccagcaccc

SEQ ID NO: 5714921 - DNA, 25 bp, Homo sapien
ggagtgaacatgcgaccaggcgaat

SEQ ID NO: 5714922 - DNA, 25 bp, Homo sapien
taggtttatactccacccctacagt

SEQ ID NO: 5714923 - DNA, 25 bp, Homo sapien
ctgggcctttgtcaaggacagctgc

SEQ ID NO: 5714924 - DNA, 25 bp, Homo sapien
cgccgccgccgccgccacttcctcc

SEQ ID NO: 5714925 - DNA, 25 bp, Homo sapien
ttcagctgcacaacctccatccctc

SEQ ID NO: 5714926 - DNA, 25 bp, Homo sapien
gacacgttgtggctgttgaagaaga

SEQ ID NO: 5714927 - DNA, 25 bp, Homo sapien
cggctggcgctattgtttatttctt

SEQ ID NO: 5714928 - DNA, 25 bp, Homo sapien
gaagaccccaaccagcaggaggcca

SEQ ID NO: 5714929 - DNA, 25 bp, Homo sapien
aagccgttcttctccagcagccgca

SEQ ID NO: 5714930 - DNA, 25 bp, Homo sapien
cccatgggagaagcctcgcctgtat

SEQ ID NO: 5714931 - DNA, 25 bp, Homo sapien
tcctcctcggcctggtcctcgcgcg

SEQ ID NO: 5714932 - DNA, 25 bp, Homo sapien
cggatgagctcataggacttggagc

SEQ ID NO: 5714933 - DNA, 25 bp, Homo sapien
ccagcacccagctcaaggtctctga

SEQ ID NO: 5714934 - DNA, 25 bp, Homo sapien
cacagcgacaccttgtccctgaaac

SEQ ID NO: 5714935 - DNA, 25 bp, Homo sapien
cgaccaggcgaatgagccaatggac

SEQ ID NO: 5714936 - DNA, 25 bp, Homo sapien
aaattcagcttcttgattttcttct

SEQ ID NO: 5714937 - DNA, 25 bp, Homo sapien
gcagtcccctgggaaggcattgatg

SEQ ID NO: 5714938 - DNA, 25 bp, Homo sapien
gagtctggcggccggcgcgcgccgc

SEQ ID NO: 5714939 - DNA, 25 bp, Homo sapien
tggggtggctgtctggcaggcaaca

SEQ ID NO: 5714940 - DNA, 25 bp, Homo sapien
aaggagaaggagctgccggggatcc

SEQ ID NO: 5714941 - DNA, 25 bp, Homo sapien
tgattccacacagccctggaggaag

SEQ ID NO: 5714942 - DNA, 25 bp, Homo sapien
ccacactgacaatggctgtgcagag

SEQ ID NO: 5714943 - DNA, 25 bp, Homo sapien
acggcgttgtggttgatgaaattct

SEQ ID NO: 5714944 - DNA, 25 bp, Homo sapien
gcccaggtgtcggcaggaacagcaa

SEQ ID NO: 5714945 - DNA, 25 bp, Homo sapien
cagcatttgtcacaaagcccaggtg

SEQ ID NO: 5714946 - DNA, 25 bp, Homo sapien
gtagagatggggtttcaccatgttg

SEQ ID NO: 5714947 - DNA, 25 bp, Homo sapien
gccagagtttctagggaatagaaga

SEQ ID NO: 5714948 - DNA, 25 bp, Homo sapien
cgatgccgaagagtgacacgcccag

SEQ ID NO: 5714949 - DNA, 25 bp, Homo sapien
tacaggcgcccaccaccatgtccag

SEQ ID NO: 5714950 - DNA, 25 bp, Homo sapien
cagcagccgcatggtgtcatccccg

SEQ ID NO: 5714951 - DNA, 25 bp, Homo sapien
aaagccacccgcagtgtcctaacct

SEQ ID NO: 5714952 - DNA, 25 bp, Homo sapien
cgctcggccgctcgaacacgccctc

SEQ ID NO: 5714953 - DNA, 25 bp, Homo sapien
acaccttgtacaggacggcgttgtg

SEQ ID NO: 5714954 - DNA, 25 bp, Homo sapien
acagagatcacagcgacaccttgtc

SEQ ID NO: 5714955 - DNA, 25 bp, Homo sapien
tgtatcacctgagtcaggcttatgc

SEQ ID NO: 5714956 - DNA, 25 bp, Homo sapien
aaggtctctgaatccaatggcccat

SEQ ID NO: 5714957 - DNA, 25 bp, Homo sapien
cagcttgaagcaaacagcatttgtc

SEQ ID NO: 5714958 - DNA, 25 bp, Homo sapien
ctgggaaggcattgatgtcaatgac

SEQ ID NO: 5714959 - DNA, 25 bp, Homo sapien
gacagctgcacttctctgcctcccg

SEQ ID NO: 5714960 - DNA, 25 bp, Homo sapien
aatccaatggcccatgagccacagc

SEQ ID NO: 5714961 - DNA, 25 bp, Homo sapien
ggcagggagcgggtccaggacgatg

SEQ ID NO: 5714962 - DNA, 25 bp, Homo sapien
ccaggtgtcggcaggaacagcaaca

SEQ ID NO: 5714963 - DNA, 25 bp, Homo sapien
gagtttctagggaatagaagagagg

SEQ ID NO: 5714964 - DNA, 25 bp, Homo sapien
gacaggcgtgagccgccatgcccgg

SEQ ID NO: 5714965 - DNA, 25 bp, Homo sapien
tccagggactggctatcattctggt

SEQ ID NO: 5714966 - DNA, 25 bp, Homo sapien
gctgtgcagagagaaggtacacagc

SEQ ID NO: 5714967 - DNA, 25 bp, Homo sapien
ggtgtcatccccgcacaggctcgtg

SEQ ID NO: 5714968 - DNA, 25 bp, Homo sapien
gagtgagggcctctggaccacggtg

SEQ ID NO: 5714969 - DNA, 25 bp, Homo sapien
aagttcttgagtgagggcctctgga

SEQ ID NO: 5714970 - DNA, 25 bp, Homo sapien
agcacccagctcaaggtctctgaat

SEQ ID NO: 5714971 - DNA, 25 bp, Homo sapien
cctgtatcacctgagtcaggcttat

SEQ ID NO: 5714972 - DNA, 25 bp, Homo sapien
ccaggctgtaggaggggacagtccc

SEQ ID NO: 5714973 - DNA, 25 bp, Homo sapien
aagaactggtcttccaggctagaag

SEQ ID NO: 5714974 - DNA, 25 bp, Homo sapien
acattagtgaagccattcagcagtt

SEQ ID NO: 5714975 - DNA, 25 bp, Homo sapien
acgcggaacggggatcggagctggg

SEQ ID NO: 5714976 - DNA, 25 bp, Homo sapien
aggaggccatggagtcatgctcacc

SEQ ID NO: 5714977 - DNA, 25 bp, Homo sapien
acatcctggtgaaatccctgtgagt

SEQ ID NO: 5714978 - DNA, 25 bp, Homo sapien
agaaggacaaacgacaggctggctc

SEQ ID NO: 5714979 - DNA, 25 bp, Homo sapien
ggtgcgatcttggctcactgcaacc

SEQ ID NO: 5714980 - DNA, 25 bp, Homo sapien
ggtctctgaatccaatggcccatga

SEQ ID NO: 5714981 - DNA, 25 bp, Homo sapien
cccaagtagctgggactacaggcgc

SEQ ID NO: 5714982 - DNA, 25 bp, Homo sapien
gcggagaagttcttgagtgagggcc

SEQ ID NO: 5714983 - DNA, 25 bp, Homo sapien
tctcatacatggtcatgtatattat

SEQ ID NO: 5714984 - DNA, 25 bp, Homo sapien
ctggcctgaggcagcagaggctggg

SEQ ID NO: 5714985 - DNA, 25 bp, Homo sapien
caatgacggcgtgctgccctgtctg

SEQ ID NO: 5714986 - DNA, 25 bp, Homo sapien
gaccacgcagggtggctggatggcg

SEQ ID NO: 5714987 - DNA, 25 bp, Homo sapien
gtcacagatgactcttgaagggaaa

SEQ ID NO: 5714988 - DNA, 25 bp, Homo sapien
aaagcacacttggcagtcccctggg

SEQ ID NO: 5714989 - DNA, 25 bp, Homo sapien
gccctcctggttgaacacgatagcc

SEQ ID NO: 5714990 - DNA, 25 bp, Homo sapien
ggttgttgatgatgatgtcgatgcc

SEQ ID NO: 5714991 - DNA, 25 bp, Homo sapien
agtcttgctctgttgccaggctgga

SEQ ID NO: 5714992 - DNA, 25 bp, Homo sapien
ggtgaagttgcttgtgaacagcttg

SEQ ID NO: 5714993 - DNA, 25 bp, Homo sapien
agactagttagcaaatacagagatc

SEQ ID NO: 5714994 - DNA, 25 bp, Homo sapien
ctggttgaacacgatagccatctcg

SEQ ID NO: 5714995 - DNA, 25 bp, Homo sapien
cttgtgatccacctgcctcggcctc

SEQ ID NO: 5714996 - DNA, 25 bp, Homo sapien
atgacggcgtgctgccctgtctggt

SEQ ID NO: 5714997 - DNA, 25 bp, Homo sapien
atgacgtcagtcagcttgtggatga

SEQ ID NO: 5714998 - DNA, 25 bp, Homo sapien
ccatggtgtctgtatctcatacatg

SEQ ID NO: 5714999 - DNA, 25 bp, Homo sapien
tggatggcgttcaggccctcctggt

SEQ ID NO: 5715000 - DNA, 25 bp, Homo sapien
tcttgaagggaaaatgtaatcattt

SEQ ID NO: 5715001 - DNA, 25 bp, Homo sapien
tctcttccctttcagaaaggtctgc

SEQ ID NO: 5715002 - DNA, 25 bp, Homo sapien
ctgagtcaggcttatgcctgggcgg

SEQ ID NO: 5715003 - DNA, 25 bp, Homo sapien
gaaccagcttgggattctggtgaag

SEQ ID NO: 5715004 - DNA, 25 bp, Homo sapien
ggagctgccggggatcccaccgggt

SEQ ID NO: 5715005 - DNA, 25 bp, Homo sapien
tctcccctgagcagtgcgggaggct

SEQ ID NO: 5715006 - DNA, 25 bp, Homo sapien
gatgacgactccggctttgacacgt

SEQ ID NO: 5715007 - DNA, 25 bp, Homo sapien
acacgatagccatctcgtgagagtt

SEQ ID NO: 5715008 - DNA, 25 bp, Homo sapien
tttagggcagccagcacccagctca

SEQ ID NO: 5715009 - DNA, 25 bp, Homo sapien
gtaggcctcaatcttccggatgagc

SEQ ID NO: 5715010 - DNA, 25 bp, Homo sapien
gtggctgtctggcaggcaacagctg

SEQ ID NO: 5715011 - DNA, 25 bp, Homo sapien
ctcgcctgtatcacctgagtcaggc

SEQ ID NO: 5715012 - DNA, 25 bp, Homo sapien
tgcccaagagccaagaactggtctt

SEQ ID NO: 5715013 - DNA, 25 bp, Homo sapien
cagaaataaacacaacattaactgt

SEQ ID NO: 5715014 - DNA, 25 bp, Homo sapien
tccgtcaggaccgatgacgactccg

SEQ ID NO: 5715015 - DNA, 25 bp, Homo sapien
gggagagctcccggatgacctcgtc

SEQ ID NO: 5715016 - DNA, 25 bp, Homo sapien
aggacgatggtctcagggtgggcat

SEQ ID NO: 5715017 - DNA, 25 bp, Homo sapien
tctggttttgcaaatgaatgggaaa

SEQ ID NO: 5715018 - DNA, 25 bp, Homo sapien
aatccctgtgagtggcttttcagag

SEQ ID NO: 5715019 - DNA, 25 bp, Homo sapien
cagctgcacaacctccatccctcgc

SEQ ID NO: 5715020 - DNA, 25 bp, Homo sapien
gtgaaatccctgtgagtggcttttc

SEQ ID NO: 5715021 - DNA, 25 bp, Homo sapien
tcactcactccaaaccacactgaca

SEQ ID NO: 5715022 - DNA, 25 bp, Homo sapien
cctcggcctggtcctcgcgcgctgc

SEQ ID NO: 5715023 - DNA, 25 bp, Homo sapien
ttttttgaggagtcttgctctgttg

SEQ ID NO: 5715024 - DNA, 25 bp, Homo sapien
acttggagcggtcaagcagggttct

SEQ ID NO: 5715025 - DNA, 25 bp, Homo sapien
tcctgtcgtcttccatgtaggcctc

SEQ ID NO: 5715026 - DNA, 25 bp, Homo sapien
gcggggagcctgggtccggaggaaa

SEQ ID NO: 5715027 - DNA, 25 bp, Homo sapien
cttggtcttggggtggctgtctggc

SEQ ID NO: 5715028 - DNA, 25 bp, Homo sapien
agctggggcgcgcagtcccgccgcc

SEQ ID NO: 5715029 - DNA, 25 bp, Homo sapien
tccacccctacagttacagaaataa

SEQ ID NO: 5715030 - DNA, 25 bp, Homo sapien
aatggctgtgcagagagaaggtaca

SEQ ID NO: 5715031 - DNA, 25 bp, Homo sapien
taactgtactccactagaccgttag

SEQ ID NO: 5715032 - DNA, 25 bp, Homo sapien
ccaggtcacagatgactcttgaagg

SEQ ID NO: 5715033 - DNA, 25 bp, Homo sapien
aacctcatggagtgaacatgcgacc

SEQ ID NO: 5715034 - DNA, 25 bp, Homo sapien
cctcatggagtgaacatgcgaccag

SEQ ID NO: 5715035 - DNA, 25 bp, Homo sapien
ttgtcaaggacagctgcacttctct

SEQ ID NO: 5715036 - DNA, 25 bp, Homo sapien
agggggtcggccaggctgtaggagg

SEQ ID NO: 5715037 - DNA, 25 bp, Homo sapien
aagcccaggtgtcggcaggaacagc

SEQ ID NO: 5715038 - DNA, 25 bp, Homo sapien
gaagagagggcagatacagacccca

SEQ ID NO: 5715039 - DNA, 25 bp, Homo sapien
ccatgtaggcctcaatcttccggat

SEQ ID NO: 5715040 - DNA, 25 bp, Homo sapien
ttgggattctggtgaagttgcttgt

SEQ ID NO: 5715041 - DNA, 25 bp, Homo sapien
agtcagcttgtggatgatgacgtcc

SEQ ID NO: 5715042 - DNA, 25 bp, Homo sapien
ttcttctccagcagccgcatggtgt

SEQ ID NO: 5715043 - DNA, 25 bp, Homo sapien
tggtgccatgagccactctggtttt

SEQ ID NO: 5715044 - DNA, 25 bp, Homo sapien
ctcgatcttgtccagctccgtcagg

SEQ ID NO: 5715045 - DNA, 25 bp, Homo sapien
ggcccatgagccacagctcgggaag

SEQ ID NO: 5715046 - DNA, 25 bp, Homo sapien
cctttctcacaaggggaggacccat

SEQ ID NO: 5715047 - DNA, 25 bp, Homo sapien
cacctcctcccggcggcggggacgc

SEQ ID NO: 5715048 - DNA, 25 bp, Homo sapien
aaatcgcccacaggccgagtctggc

SEQ ID NO: 5715049 - DNA, 25 bp, Homo sapien
aaggttcagctgcacaacctccatc

SEQ ID NO: 5715050 - DNA, 25 bp, Homo sapien
agccattcagcagttgcggccagtg

SEQ ID NO: 5715051 - DNA, 25 bp, Homo sapien
acgcctcccgagttcaagcaattct

SEQ ID NO: 5715052 - DNA, 25 bp, Homo sapien
gttgcggccagtggccaatgtgagt

SEQ ID NO: 5715053 - DNA, 25 bp, Homo sapien
ggcatcgatgtactcctggaacctg

SEQ ID NO: 5715054 - DNA, 25 bp, Homo sapien
gccgccgccgccacttcctcctcgg

SEQ ID NO: 5715055 - DNA, 25 bp, Homo sapien
agcctgggtccggaggaaatcgccc

SEQ ID NO: 5715056 - DNA, 25 bp, Homo sapien
cacagaccctttctcacaaggggag

SEQ ID NO: 5715057 - DNA, 25 bp, Homo sapien
caggcttatgcctgggcggggcaga

SEQ ID NO: 5715058 - DNA, 25 bp, Homo sapien
gcattgatgtcaatgacggcgtgct

SEQ ID NO: 5715059 - DNA, 25 bp, Homo sapien
caggcaacagctgctttgctcagtt

SEQ ID NO: 5715060 - DNA, 25 bp, Homo sapien
ccaggatggtgtcgatctcttgacc

SEQ ID NO: 5715061 - DNA, 25 bp, Homo sapien
ctaagtgctgggatgacaggcgtga

SEQ ID NO: 5715062 - DNA, 25 bp, Homo sapien
atcacagcgacaccttgtccctgaa

SEQ ID NO: 5715063 - DNA, 25 bp, Homo sapien
tcactccaaaccacactgacaatgg

SEQ ID NO: 5715064 - DNA, 25 bp, Homo sapien
cccttggtcttggggtggctgtctg

SEQ ID NO: 5715065 - DNA, 25 bp, Homo sapien
ccgggagagctcccggatgacctcg

SEQ ID NO: 5715066 - DNA, 25 bp, Homo sapien
agcagttgcggccagtggccaatgt

SEQ ID NO: 5715067 - DNA, 25 bp, Homo sapien
gattctggtgaagttgcttgtgaac

SEQ ID NO: 5715068 - DNA, 25 bp, Homo sapien
gaagggaaaatgtaatcatttctga

SEQ ID NO: 5715069 - DNA, 25 bp, Homo sapien
tttcaccatgttggccaggatggtg

SEQ ID NO: 5715070 - DNA, 25 bp, Homo sapien
aagtgctgggatgacaggcgtgagc

SEQ ID NO: 5715071 - DNA, 25 bp, Homo sapien
gatcggagctggggcgcgcagtccc

SEQ ID NO: 5715072 - DNA, 25 bp, Homo sapien
gccggggatcccaccgggtgaatga

SEQ ID NO: 5715073 - DNA, 25 bp, Homo sapien
ttttcttctcgctcagccagtagcc

SEQ ID NO: 5715074 - DNA, 25 bp, Homo sapien
agcacagaccctttctcacaagggg

SEQ ID NO: 5715075 - DNA, 25 bp, Homo sapien
tagaaatcaaaacaagactagttag

SEQ ID NO: 5715076 - DNA, 25 bp, Homo sapien
gttagcaaatacagagatcacagcg

SEQ ID NO: 5715077 - DNA, 25 bp, Homo sapien
caggcgcccaccaccatgtccagct

SEQ ID NO: 5715078 - DNA, 25 bp, Homo sapien
tccagctccgtcaggaccgatgacg

SEQ ID NO: 5715079 - DNA, 25 bp, Homo sapien
accaggctggaggggtcgtgctcct

SEQ ID NO: 5715080 - DNA, 25 bp, Homo sapien
cctcgatcggccggctaaggttcag

SEQ ID NO: 5715081 - DNA, 25 bp, Homo sapien
tccagcagccgcatggtgtcatccc

SEQ ID NO: 5715082 - DNA, 25 bp, Homo sapien
gctccgtcaggaccgatgacgactc

SEQ ID NO: 5715083 - DNA, 25 bp, Homo sapien
gggagcgggtccaggacgatggtct

SEQ ID NO: 5715084 - DNA, 25 bp, Homo sapien
gggcggggagcctgggtccggagga

SEQ ID NO: 5715085 - DNA, 25 bp, Homo sapien
tgtacaggacggcgttgtggttgat

SEQ ID NO: 5715086 - DNA, 25 bp, Homo sapien
ccacctgcctcggcctccctaagtg

SEQ ID NO: 5715087 - DNA, 25 bp, Homo sapien
gagcttctgagaggtgattccacac

SEQ ID NO: 5715088 - DNA, 25 bp, Homo sapien
gctcaaggtctctgaatccaatggc

SEQ ID NO: 5715089 - DNA, 25 bp, Homo sapien
tcaaggtctctgaatccaatggccc

SEQ ID NO: 5715090 - DNA, 25 bp, Homo sapien
agtagccaactctcttccctttcag

SEQ ID NO: 5715091 - DNA, 25 bp, Homo sapien
tccaaaagttaggtttatactccac

SEQ ID NO: 5715092 - DNA, 25 bp, Homo sapien
tccaggctagaaggacaaacgacag

SEQ ID NO: 5715093 - DNA, 25 bp, Homo sapien
ctcaatcttccggatgagctcatag

SEQ ID NO: 5715094 - DNA, 25 bp, Homo sapien
tgtatacaaattaagtacgaaccag

SEQ ID NO: 5715095 - DNA, 25 bp, Homo sapien
ggctgtctggcaggcaacagctgct

SEQ ID NO: 5715096 - DNA, 25 bp, Homo sapien
tcttgagtgagggcctctggaccac

SEQ ID NO: 5715097 - DNA, 25 bp, Homo sapien
tgcacttctctgcctcccggtcacc

SEQ ID NO: 5715098 - DNA, 25 bp, Homo sapien
tcccaccgggtgaatgatcagagtt

SEQ ID NO: 5715099 - DNA, 25 bp, Homo sapien
atgacgtccagggggccctgctcct

SEQ ID NO: 5715100 - DNA, 25 bp, Homo sapien
tggcttttcagagtgagcttctgag

SEQ ID NO: 5715101 - DNA, 25 bp, Homo sapien
ttcagagtgagcttctgagaggtga

SEQ ID NO: 5715102 - DNA, 25 bp, Homo sapien
caacagctgctttgctcagttggct

SEQ ID NO: 5715103 - DNA, 25 bp, Homo sapien
caagactagttagcaaatacagaga

SEQ ID NO: 5715104 - DNA, 25 bp, Homo sapien
ggagcctgggtccggaggaaatcgc

SEQ ID NO: 5715105 - DNA, 25 bp, Homo sapien
ccacaccaccaggtcacagatgact

SEQ ID NO: 5715106 - DNA, 25 bp, Homo sapien
agtagctgggactacaggcgcccac

SEQ ID NO: 5715107 - DNA, 25 bp, Homo sapien
ctgccgcagggcccgggagagctcc

SEQ ID NO: 5715108 - DNA, 25 bp, Homo sapien
ggtgagaatcagaagaagaccccaa

SEQ ID NO: 5715109 - DNA, 25 bp, Homo sapien
ttgccaggctggagtgcagtggtgc

SEQ ID NO: 5715110 - DNA, 25 bp, Homo sapien
agaaggagctgccggggatcccacc

SEQ ID NO: 5715111 - DNA, 25 bp, Homo sapien
cccatgagccacagctcgggaagga

SEQ ID NO: 5715112 - DNA, 25 bp, Homo sapien
gttgatgatgatgtcgatgccgaag

SEQ ID NO: 5715113 - DNA, 25 bp, Homo sapien
agggaatagaagagagggcagatac

SEQ ID NO: 5715114 - DNA, 25 bp, Homo sapien
gcctcagcctcccaagtagctggga

SEQ ID NO: 5715115 - DNA, 25 bp, Homo sapien
tgaatccaatggcccatgagccaca

SEQ ID NO: 5715116 - DNA, 25 bp, Homo sapien
ccctgggaaggcattgatgtcaatg

SEQ ID NO: 5715117 - DNA, 25 bp, Homo sapien
cttcctgcacagctcggcgaaggcc

SEQ ID NO: 5715118 - DNA, 25 bp, Homo sapien
aacaagactagttagcaaatacaga

SEQ ID NO: 5715119 - DNA, 25 bp, Homo sapien
cggggatcggagctggggcgcgcag

SEQ ID NO: 5715120 - DNA, 25 bp, Homo sapien
gggcagccagcacccagctcaaggt

SEQ ID NO: 5715121 - DNA, 25 bp, Homo sapien
gtcgtgctcctttagggcagccagc

SEQ ID NO: 5715122 - DNA, 25 bp, Homo sapien
catgagccactctggttttgcaaat

SEQ ID NO: 5715123 - DNA, 25 bp, Homo sapien
ttgttgatgatgatgtcgatgccga

SEQ ID NO: 5715124 - DNA, 25 bp, Homo sapien
tatttttagtagagatggggtttca

SEQ ID NO: 5715125 - DNA, 25 bp, Homo sapien
tcatacatggtcatgtatattatgc

SEQ ID NO: 5715126 - DNA, 25 bp, Homo sapien
agccacagctcgggaaggagaagga

SEQ ID NO: 5715127 - DNA, 25 bp, Homo sapien
aaccacactgacaatggctgtgcag

SEQ ID NO: 5715128 - DNA, 25 bp, Homo sapien
gtggtgcgatcttggctcactgcaa

SEQ ID NO: 5715129 - DNA, 25 bp, Homo sapien
gaacaccttgtacaggacggcgttg

SEQ ID NO: 5715130 - DNA, 25 bp, Homo sapien
ggaggggtcgtgctcctttagggca

SEQ ID NO: 5715131 - DNA, 25 bp, Homo sapien
atacatggtcatgtatattatgcat

SEQ ID NO: 5715132 - DNA, 25 bp, Homo sapien
atgtcaatgacggcgtgctgccctg

SEQ ID NO: 5715133 - DNA, 25 bp, Homo sapien
cttctcgctcagccagtagccaact

SEQ ID NO: 5715134 - DNA, 25 bp, Homo sapien
gacggcgtgctgccctgtctggttg

SEQ ID NO: 5715135 - DNA, 25 bp, Homo sapien
caaacagcatttgtcacaaagccca

SEQ ID NO: 5715136 - DNA, 25 bp, Homo sapien
agaatcagaagaagaccccaaccag

SEQ ID NO: 5715137 - DNA, 25 bp, Homo sapien
ggccgagtctggcggccggcgcgcg

SEQ ID NO: 5715138 - DNA, 25 bp, Homo sapien
aggggtcgtgctcctttagggcagc

SEQ ID NO: 5715139 - DNA, 25 bp, Homo sapien
gagttggtgccatgagccactctgg

SEQ ID NO: 5715140 - DNA, 25 bp, Homo sapien
caccaggtcacagatgactcttgaa

SEQ ID NO: 5715141 - DNA, 25 bp, Homo sapien
ctcgaacacgccctcgatcttgtcc

SEQ ID NO: 5715142 - DNA, 25 bp, Homo sapien
tacaggacggcgttgtggttgatga

SEQ ID NO: 5715143 - DNA, 25 bp, Homo sapien
aggccctcctggttgaacacgatag

SEQ ID NO: 5715144 - DNA, 25 bp, Homo sapien
gggacagtccctccacaccaccagg

SEQ ID NO: 5715145 - DNA, 25 bp, Homo sapien
tcgtcgctcggccgctcgaacacgc

SEQ ID NO: 5715146 - DNA, 25 bp, Homo sapien
ctttgtcaaggacagctgcacttct

SEQ ID NO: 5715147 - DNA, 25 bp, Homo sapien
tacagaaataaacacaacattaact

SEQ ID NO: 5715148 - DNA, 25 bp, Homo sapien
ccgttagaaatcaaaacaagactag

SEQ ID NO: 5715149 - DNA, 25 bp, Homo sapien
agcttcttgattttcttctcgctca

SEQ ID NO: 5715150 - DNA, 25 bp, Homo sapien
tcggccaggctgtaggaggggacag

SEQ ID NO: 5715151 - DNA, 25 bp, Homo sapien
cctacttcagtcggtcttccagcct

SEQ ID NO: 5715152 - DNA, 25 bp, Homo sapien
tgctcctgcgggtgagaatcagaag

SEQ ID NO: 5715153 - DNA, 25 bp, Homo sapien
gctctgttgccaggctggagtgcag

SEQ ID NO: 5715154 - DNA, 25 bp, Homo sapien
acaccaccaggtcacagatgactct

SEQ ID NO: 5715155 - DNA, 25 bp, Homo sapien
gctttgctcagttggctcaaacatg

SEQ ID NO: 5715156 - DNA, 25 bp, Homo sapien
cgccaaccacgaacaccttgtacag

SEQ ID NO: 5715157 - DNA, 25 bp, Homo sapien
ccgccatgcccggccagagtttcta

SEQ ID NO: 5715158 - DNA, 25 bp, Homo sapien
caaatgaatgggaaagtcaagccgt

SEQ ID NO: 5715159 - DNA, 25 bp, Homo sapien
ggagaagttcttgagtgagggcctc

SEQ ID NO: 5715160 - DNA, 25 bp, Homo sapien
agggcggcggcgagcgcccgcgcac

SEQ ID NO: 5715161 - DNA, 25 bp, Homo sapien
gcaccagctccagggactggctatc

SEQ ID NO: 5715162 - DNA, 25 bp, Homo sapien
tgtactccactagaccgttagaaat

SEQ ID NO: 5715163 - DNA, 25 bp, Homo sapien
actctcttccctttcagaaaggtct

SEQ ID NO: 5715164 - DNA, 25 bp, Homo sapien
tgttggccaggatggtgtcgatctc

SEQ ID NO: 5715165 - DNA, 25 bp, Homo sapien
agccacccgcagtgtcctaacctca

SEQ ID NO: 5715166 - DNA, 25 bp, Homo sapien
cttctccagcagccgcatggtgtca

SEQ ID NO: 5715167 - DNA, 25 bp, Homo sapien
accatgttggccaggatggtgtcga

SEQ ID NO: 5715168 - DNA, 25 bp, Homo sapien
agctcggcgaaggcctggaaattca

SEQ ID NO: 5715169 - DNA, 25 bp, Homo sapien
tgcccggccagagtttctagggaat

SEQ ID NO: 5715170 - DNA, 25 bp, Homo sapien
ccccagggacattagtgaagccatt

SEQ ID NO: 5715171 - DNA, 25 bp, Homo sapien
ctcgggaaggagaaggagctgccgg

SEQ ID NO: 5715172 - DNA, 25 bp, Homo sapien
gaagggcggcggcgagcgcccgcgc

SEQ ID NO: 5715173 - DNA, 25 bp, Homo sapien
cacagatgactcttgaagggaaaat

SEQ ID NO: 5715174 - DNA, 25 bp, Homo sapien
tcggccggctaaggttcagctgcac

SEQ ID NO: 5715175 - DNA, 25 bp, Homo sapien
gggcctttgtcaaggacagctgcac

SEQ ID NO: 5715176 - DNA, 25 bp, Homo sapien
cacagccctggaggaagggggtcgg

SEQ ID NO: 5715177 - DNA, 25 bp, Homo sapien
gtttctagggaatagaagagagggc

SEQ ID NO: 5715178 - DNA, 25 bp, Homo sapien
acgactccggctttgacacgttgtg

SEQ ID NO: 5715179 - DNA, 25 bp, Homo sapien
ctacgcctcccgagttcaagcaatt

SEQ ID NO: 5715180 - DNA, 25 bp, Homo sapien
ggtgtctgtatctcatacatggtca

SEQ ID NO: 5715181 - DNA, 25 bp, Homo sapien
gccaggctggagtgcagtggtgcga

SEQ ID NO: 5715182 - DNA, 25 bp, Homo sapien
atctcttgaccttgtgatccacctg

SEQ ID NO: 5715183 - DNA, 25 bp, Homo sapien
gacccatgggagaagcctcgcctgt

SEQ ID NO: 5715184 - DNA, 25 bp, Homo sapien
tgttgccaggctggagtgcagtggt

SEQ ID NO: 5715185 - DNA, 25 bp, Homo sapien
atcctggtgaaatccctgtgagtgg

SEQ ID NO: 5715186 - DNA, 25 bp, Homo sapien
tcaccatgttggccaggatggtgtc

SEQ ID NO: 5715187 - DNA, 25 bp, Homo sapien
aaagggggggtctgggtgctcctgc

SEQ ID NO: 5715188 - DNA, 25 bp, Homo sapien
gcctcgcctgtatcacctgagtcag

SEQ ID NO: 5715189 - DNA, 25 bp, Homo sapien
gatgtactcctggaacctgtgcacc

SEQ ID NO: 5715190 - DNA, 25 bp, Homo sapien
ctcccgagttcaagcaattctcctg

SEQ ID NO: 5715191 - DNA, 25 bp, Homo sapien
gaactggtcttccaggctagaagga

SEQ ID NO: 5715192 - DNA, 25 bp, Homo sapien
acagctcggcgaaggcctggaaatt

SEQ ID NO: 5715193 - DNA, 25 bp, Homo sapien
tcaggaccgatgacgactccggctt

SEQ ID NO: 5715194 - DNA, 25 bp, Homo sapien
gtgtaggactcgccaaccacgaaca

SEQ ID NO: 5715195 - DNA, 25 bp, Homo sapien
agccaagaactggtcttccaggcta

SEQ ID NO: 5715196 - DNA, 25 bp, Homo sapien
atacagagatcacagcgacaccttg

SEQ ID NO: 5715197 - DNA, 25 bp, Homo sapien
gcagggtggctggatggcgttcagg

SEQ ID NO: 5715198 - DNA, 25 bp, Homo sapien
ttggagcggtcaagcagggttctga

SEQ ID NO: 5715199 - DNA, 25 bp, Homo sapien
atggtctcagggtgggcatcgatgt

SEQ ID NO: 5715200 - DNA, 25 bp, Homo sapien
cgggtgagaatcagaagaagacccc

SEQ ID NO: 5715201 - DNA, 25 bp, Homo sapien
agtcatgctcaccagctctcccctg

SEQ ID NO: 5715202 - DNA, 25 bp, Homo sapien
aagaagaccccaaccagcaggaggc

SEQ ID NO: 5715203 - DNA, 25 bp, Homo sapien
tgaagttgcttgtgaacagcttgaa

SEQ ID NO: 5715204 - DNA, 25 bp, Homo sapien
cccaaccagcaggaggccatggagt

SEQ ID NO: 5715205 - DNA, 25 bp, Homo sapien
ctcctggaacctgtgcaccagctcc

SEQ ID NO: 5715206 - DNA, 25 bp, Homo sapien
tgatgtgcctgcggagaagttcttg

SEQ ID NO: 5715207 - DNA, 25 bp, Homo sapien
cagtcccgccgccgccgccgccact

SEQ ID NO: 5715208 - DNA, 25 bp, Homo sapien
caaccagcaggaggccatggagtca

SEQ ID NO: 5715209 - DNA, 25 bp, Homo sapien
tgatgtcaatgacggcgtgctgccc

SEQ ID NO: 5715210 - DNA, 25 bp, Homo sapien
cgtgagccgccatgcccggccagag

SEQ ID NO: 5715211 - DNA, 25 bp, Homo sapien
gccacttcctcctcggcctggtcct

SEQ ID NO: 5715212 - DNA, 25 bp, Homo sapien
aatcagaagaagaccccaaccagca

SEQ ID NO: 5715213 - DNA, 25 bp, Homo sapien
ttcctacttcagtcggtcttccagc

SEQ ID NO: 5715214 - DNA, 25 bp, Homo sapien
cggccggcgcgcgccgcgagcgagt

SEQ ID NO: 5715215 - DNA, 25 bp, Homo sapien
tgatgatgatgtcgatgccgaagag

SEQ ID NO: 5715216 - DNA, 25 bp, Homo sapien
agagagggcagatacagaccccagg

SEQ ID NO: 5715217 - DNA, 25 bp, Homo sapien
gatggcgttcaggccctcctggttg

SEQ ID NO: 5715218 - DNA, 25 bp, Homo sapien
taggaggggacagtccctccacacc

SEQ ID NO: 5715219 - DNA, 25 bp, Homo sapien
gaagggggtcggccaggctgtagga

SEQ ID NO: 5715220 - DNA, 25 bp, Homo sapien
ttgaggagtcttgctctgttgccag

SEQ ID NO: 5715221 - DNA, 25 bp, Homo sapien
tgtggccaggctggcctgaggcagc

SEQ ID NO: 5715222 - DNA, 25 bp, Homo sapien
ccgcagtgtcctaacctcatggagt

SEQ ID NO: 5715223 - DNA, 25 bp, Homo sapien
acgatagccatctcgtgagagttgg

SEQ ID NO: 5715224 - DNA, 25 bp, Homo sapien
ctcttgaccttgtgatccacctgcc

SEQ ID NO: 5715225 - DNA, 25 bp, Homo sapien
acatgtgacagcttcctacttcagt

SEQ ID NO: 5715226 - DNA, 25 bp, Homo sapien
catgaagggtggcgagcagatcctg

SEQ ID NO: 5715227 - DNA, 25 bp, Homo sapien
cagctccgtcaggaccgatgacgac

SEQ ID NO: 5715228 - DNA, 25 bp, Homo sapien
tctccagcagccgcatggtgtcatc

SEQ ID NO: 5715229 - DNA, 25 bp, Homo sapien
caacattaactgtactccactagac

SEQ ID NO: 5715230 - DNA, 25 bp, Homo sapien
cacgccctcgatcttgtccagctcc

SEQ ID NO: 5715231 - DNA, 25 bp, Homo sapien
cccatcccaaagccacccgcagtgt

SEQ ID NO: 5715232 - DNA, 25 bp, Homo sapien
tcccctgggaaggcattgatgtcaa

SEQ ID NO: 5715233 - DNA, 25 bp, Homo sapien
agaagttcttgagtgagggcctctg

SEQ ID NO: 5715234 - DNA, 25 bp, Homo sapien
tgagtggcttttcagagtgagcttc

SEQ ID NO: 5715235 - DNA, 25 bp, Homo sapien
aaggggaggacccatgggagaagcc

SEQ ID NO: 5715236 - DNA, 25 bp, Homo sapien
gcgtgctgccctgtctggttgttga

SEQ ID NO: 5715237 - DNA, 25 bp, Homo sapien
ttataaaatttcactacttgtttgt

SEQ ID NO: 5715238 - DNA, 25 bp, Homo sapien
acaaacaagtagtgaaattttataa

SEQ ID NO: 5715239 - DNA, 25 bp, Homo sapien
ttgtcctggagcgtacatcctgtag

SEQ ID NO: 5715240 - DNA, 25 bp, Homo sapien
ctacaggatgtacgctccaggacaa

SEQ ID NO: 5715241 - DNA, 25 bp, Homo sapien
tttgtcaagttatataagaaaccgt

SEQ ID NO: 5715242 - DNA, 25 bp, Homo sapien
acggtttcttatataacttgacaaa

SEQ ID NO: 5715243 - DNA, 25 bp, Homo sapien
tcctattatcataatgattatcaca

SEQ ID NO: 5715244 - DNA, 25 bp, Homo sapien
tgtgataatcattatgataatagga

SEQ ID NO: 5715245 - DNA, 25 bp, Homo sapien
aaccacatatctcgatgaacagagt

SEQ ID NO: 5715246 - DNA, 25 bp, Homo sapien
actctgttcatcgagatatgtggtt

SEQ ID NO: 5715247 - DNA, 25 bp, Homo sapien
aagcacaataatggagaagtaatag

SEQ ID NO: 5715248 - DNA, 25 bp, Homo sapien
ctattacttctccattattgtgctt

SEQ ID NO: 5715249 - DNA, 25 bp, Homo sapien
gcctgttcgtgcgaactctaaaatt

SEQ ID NO: 5715250 - DNA, 25 bp, Homo sapien
aattttagagttcgcacgaacaggc

SEQ ID NO: 5715251 - DNA, 25 bp, Homo sapien
gggccccctgagagggtcggagaac

SEQ ID NO: 5715252 - DNA, 25 bp, Homo sapien
gttctccgaccctctcagggggccc

SEQ ID NO: 5715253 - DNA, 25 bp, Homo sapien
ggtcgccacccgacacccgagcctg

SEQ ID NO: 5715254 - DNA, 25 bp, Homo sapien
caggctcgggtgtcgggtggcgacc

SEQ ID NO: 5715255 - DNA, 25 bp, Homo sapien
gggtgacgcaccaatggatgacaag

SEQ ID NO: 5715256 - DNA, 25 bp, Homo sapien
cttgtcatccattggtgcgtcaccc

SEQ ID NO: 5715257 - DNA, 25 bp, Homo sapien
agaaagagcttcacgtcgggacaat

SEQ ID NO: 5715258 - DNA, 25 bp, Homo sapien
attgtcccgacgtgaagctctttct

SEQ ID NO: 5715259 - DNA, 25 bp, Homo sapien
ctgtttatacgattagtctaattta

SEQ ID NO: 5715260 - DNA, 25 bp, Homo sapien
taaattagactaatcgtataaacag

SEQ ID NO: 5715261 - DNA, 25 bp, Homo sapien
tcaacccagtcagggcggtgggagg

SEQ ID NO: 5715262 - DNA, 25 bp, Homo sapien
cctcccaccgccctgactgggttga

SEQ ID NO: 5715263 - DNA, 25 bp, Homo sapien
agttggtattctggtatccaccacc

SEQ ID NO: 5715264 - DNA, 25 bp, Homo sapien
ggtggtggataccagaataccaact

SEQ ID NO: 5715265 - DNA, 25 bp, Homo sapien
gacctatgttttacaagattaaaat

SEQ ID NO: 5715266 - DNA, 25 bp, Homo sapien
attttaatcttgtaaaacataggtc

SEQ ID NO: 5715267 - DNA, 25 bp, Homo sapien
atatattaatttttacgtagtggta

SEQ ID NO: 5715268 - DNA, 25 bp, Homo sapien
taccactacgtaaaaattaatatat

SEQ ID NO: 5715269 - DNA, 25 bp, Homo sapien
aggagcggaaccaccagtaggacag

SEQ ID NO: 5715270 - DNA, 25 bp, Homo sapien
ctgtcctactggtggttccgctcct

SEQ ID NO: 5715271 - DNA, 25 bp, Homo sapien
tagtcaatgaagattagaaccaaat

SEQ ID NO: 5715272 - DNA, 25 bp, Homo sapien
atttggttctaatcttcattgacta

SEQ ID NO: 5715273 - DNA, 25 bp, Homo sapien
acttatgtgagaaaacagcaacaac

SEQ ID NO: 5715274 - DNA, 25 bp, Homo sapien
gttgttgctgttttctcacataagt

SEQ ID NO: 5715275 - DNA, 25 bp, Homo sapien
ccaagcgcttcacgaaggtttcgtt

SEQ ID NO: 5715276 - DNA, 25 bp, Homo sapien
aacgaaaccttcgtgaagcgcttgg

SEQ ID NO: 5715277 - DNA, 25 bp, Homo sapien
cacctcctgggtttgtgctgaccag

SEQ ID NO: 5715278 - DNA, 25 bp, Homo sapien
ctggtcagcacaaacccaggaggtg

SEQ ID NO: 5715279 - DNA, 25 bp, Homo sapien
tgtcttagacttattcggagtttac

SEQ ID NO: 5715280 - DNA, 25 bp, Homo sapien
gtaaactccgaataagtctaagaca

SEQ ID NO: 5715281 - DNA, 25 bp, Homo sapien
ttatttaaacttcatgtagcatgta

SEQ ID NO: 5715282 - DNA, 25 bp, Homo sapien
tacatgctacatgaagtttaaataa

SEQ ID NO: 5715283 - DNA, 25 bp, Homo sapien
tccaccgcgggctcagaccggcttg

SEQ ID NO: 5715284 - DNA, 25 bp, Homo sapien
caagccggtctgagcccgcggtgga

SEQ ID NO: 5715285 - DNA, 25 bp, Homo sapien
agtctgtcgcagacgtggcctgccc

SEQ ID NO: 5715286 - DNA, 25 bp, Homo sapien
gggcaggccacgtctgcgacagact

SEQ ID NO: 5715287 - DNA, 25 bp, Homo sapien
ttgatagttgcatcctacaaagact

SEQ ID NO: 5715288 - DNA, 25 bp, Homo sapien
agtctttgtaggatgcaactatcaa

SEQ ID NO: 5715289 - DNA, 25 bp, Homo sapien
gttgtgaccagtagtgaaacagcgt

SEQ ID NO: 5715290 - DNA, 25 bp, Homo sapien
acgctgtttcactactggtcacaac

SEQ ID NO: 5715291 - DNA, 25 bp, Homo sapien
atgttcaacacgtcaatccagggag

SEQ ID NO: 5715292 - DNA, 25 bp, Homo sapien
ctccctggattgacgtgttgaacat

SEQ ID NO: 5715293 - DNA, 25 bp, Homo sapien
tttctgcttaatgttggtttctgag

SEQ ID NO: 5715294 - DNA, 25 bp, Homo sapien
ctcagaaaccaacattaagcagaaa

SEQ ID NO: 5715295 - DNA, 25 bp, Homo sapien
gtcttgatcttcttagagggaacac

SEQ ID NO: 5715296 - DNA, 25 bp, Homo sapien
gtgttccctctaagaagatcaagac

SEQ ID NO: 5715297 - DNA, 25 bp, Homo sapien
tagacgaaggctttatctttatatg

SEQ ID NO: 5715298 - DNA, 25 bp, Homo sapien
catataaagataaagccttcgtcta

SEQ ID NO: 5715299 - DNA, 25 bp, Homo sapien
attaaaatagacgaaggctttatct

SEQ ID NO: 5715300 - DNA, 25 bp, Homo sapien
agataaagccttcgtctattttaat

SEQ ID NO: 5715301 - DNA, 25 bp, Homo sapien
cctcagagctcctttgggtactttt

SEQ ID NO: 5715302 - DNA, 25 bp, Homo sapien
aaaagtacccaaaggagctctgagg

SEQ ID NO: 5715303 - DNA, 25 bp, Homo sapien
aaaccgacgacactaggacatcggt

SEQ ID NO: 5715304 - DNA, 25 bp, Homo sapien
accgatgtcctagtgtcgtcggttt

SEQ ID NO: 5715305 - DNA, 25 bp, Homo sapien
ttcctcgaaacaagggtctactaag

SEQ ID NO: 5715306 - DNA, 25 bp, Homo sapien
cttagtagacccttgtttcgaggaa

SEQ ID NO: 5715307 - DNA, 25 bp, Homo sapien
actgataaacgtttggaaaatctat

SEQ ID NO: 5715308 - DNA, 25 bp, Homo sapien
atagattttccaaacgtttatcagt

SEQ ID NO: 5715309 - DNA, 25 bp, Homo sapien
gtcttttcacaagtagtattaacat

SEQ ID NO: 5715310 - DNA, 25 bp, Homo sapien
atgttaatactacttgtgaaaagac

SEQ ID NO: 5715311 - DNA, 25 bp, Homo sapien
agtctcacatctttcagacacttgg

SEQ ID NO: 5715312 - DNA, 25 bp, Homo sapien
ccaagtgtctgaaagatgtgagact

SEQ ID NO: 5715313 - DNA, 25 bp, Homo sapien
acgggcaagtggacaggacccgagg

SEQ ID NO: 5715314 - DNA, 25 bp, Homo sapien
cctcgggtcctgtccacttgcccgt

SEQ ID NO: 5715315 - DNA, 25 bp, Homo sapien
tgcgacgcgaacacctctagcaaca

SEQ ID NO: 5715316 - DNA, 25 bp, Homo sapien
tgttgctagaggtgttcgcgtcgca

SEQ ID NO: 5715317 - DNA, 25 bp, Homo sapien
gtatcctaagagatattaatcttat

SEQ ID NO: 5715318 - DNA, 25 bp, Homo sapien
ataagattaatatctcttaggatac

SEQ ID NO: 5715319 - DNA, 25 bp, Homo sapien
gccggcgccgggaggctgtcggcgt

SEQ ID NO: 5715320 - DNA, 25 bp, Homo sapien
acgccgacagcctcccggcgccggc

SEQ ID NO: 5715321 - DNA, 25 bp, Homo sapien
cgcctcgccgagtctctaaactgtt

SEQ ID NO: 5715322 - DNA, 25 bp, Homo sapien
aacagtttagagactcggcgaggcg

SEQ ID NO: 5715323 - DNA, 25 bp, Homo sapien
ggtacttaacacgtatgcccaggcg

SEQ ID NO: 5715324 - DNA, 25 bp, Homo sapien
cgcctgggcatacgtgttaagtacc

SEQ ID NO: 5715325 - DNA, 25 bp, Homo sapien
aataacaaagagattaactcggatt

SEQ ID NO: 5715326 - DNA, 25 bp, Homo sapien
aatccgagttaatctctttgttatt

SEQ ID NO: 5715327 - DNA, 25 bp, Homo sapien
gaaagtaatattgacttccatttac

SEQ ID NO: 5715328 - DNA, 25 bp, Homo sapien
gtaaatggaagtcaatattactttc

SEQ ID NO: 5715329 - DNA, 25 bp, Homo sapien
tcgcgtcctgacagagggcgccgcg

SEQ ID NO: 5715330 - DNA, 25 bp, Homo sapien
cgcggcgccctctgtcaggacgcga

SEQ ID NO: 5715331 - DNA, 25 bp, Homo sapien
gtagccggctagaaggacctgctcg

SEQ ID NO: 5715332 - DNA, 25 bp, Homo sapien
cgagcaggtccttctagccggctac

SEQ ID NO: 5715333 - DNA, 25 bp, Homo sapien
atccgatttataagactagaattaa

SEQ ID NO: 5715334 - DNA, 25 bp, Homo sapien
ttaattctagtcttataaatcggat

SEQ ID NO: 5715335 - DNA, 25 bp, Homo sapien
attagagtatcgtaagacaaatatt

SEQ ID NO: 5715336 - DNA, 25 bp, Homo sapien
aatatttgtcttacgatactctaat

SEQ ID NO: 5715337 - DNA, 25 bp, Homo sapien
gggcgtggtggcgctccgtggtcgg

SEQ ID NO: 5715338 - DNA, 25 bp, Homo sapien
ccgaccacggagcgccaccacgccc

SEQ ID NO: 5715339 - DNA, 25 bp, Homo sapien
agggcgtggtggcgctccgtggtcg

SEQ ID NO: 5715340 - DNA, 25 bp, Homo sapien
cgaccacggagcgccaccacgccct

SEQ ID NO: 5715341 - DNA, 25 bp, Homo sapien
gactctgaaatcgtgtccgactcag

SEQ ID NO: 5715342 - DNA, 25 bp, Homo sapien
ctgagtcggacacgatttcagagtc

SEQ ID NO: 5715343 - DNA, 25 bp, Homo sapien
tcataagcatgagaaagaagcacag

SEQ ID NO: 5715344 - DNA, 25 bp, Homo sapien
ctgtgcttctttctcatgcttatga

SEQ ID NO: 5715345 - DNA, 25 bp, Homo sapien
aaaggtactaaaatttcatgtgagt

SEQ ID NO: 5715346 - DNA, 25 bp, Homo sapien
actcacatgaaattttagtaccttt

SEQ ID NO: 5715347 - DNA, 25 bp, Homo sapien
aacgcgagacaggccgagtcccgaa

SEQ ID NO: 5715348 - DNA, 25 bp, Homo sapien
ttcgggactcggcctgtctcgcgtt

SEQ ID NO: 5715349 - DNA, 25 bp, Homo sapien
ggtcctgtccaacatccaacataag

SEQ ID NO: 5715350 - DNA, 25 bp, Homo sapien
cttatgttggatgttggacaggacc

SEQ ID NO: 5715351 - DNA, 25 bp, Homo sapien
taggtaggcctaagtcacgtaagac

SEQ ID NO: 5715352 - DNA, 25 bp, Homo sapien
gtcttacgtgacttaggcctaccta

SEQ ID NO: 5715353 - DNA, 25 bp, Homo sapien
aacattacgtatttaaaccagacat

SEQ ID NO: 5715354 - DNA, 25 bp, Homo sapien
atgtctggtttaaatacgtaatgtt

SEQ ID NO: 5715355 - DNA, 25 bp, Homo sapien
aagtcatctgtatagtcctctctaa

SEQ ID NO: 5715356 - DNA, 25 bp, Homo sapien
ttagagaggactatacagatgactt

SEQ ID NO: 5715357 - DNA, 25 bp, Homo sapien
aggcctgattgtatagtcccacgac

SEQ ID NO: 5715358 - DNA, 25 bp, Homo sapien
gtcgtgggactatacaatcaggcct

SEQ ID NO: 5715359 - DNA, 25 bp, Homo sapien
gtctactgacaggttacatcgatag

SEQ ID NO: 5715360 - DNA, 25 bp, Homo sapien
ctatcgatgtaacctgtcagtagac

SEQ ID NO: 5715361 - DNA, 25 bp, Homo sapien
ttcaagtctcaacttcgtctaagac

SEQ ID NO: 5715362 - DNA, 25 bp, Homo sapien
gtcttagacgaagttgagacttgaa

SEQ ID NO: 5715363 - DNA, 25 bp, Homo sapien
gagtctcgttcgtaataaatcttat

SEQ ID NO: 5715364 - DNA, 25 bp, Homo sapien
ataagatttattacgaacgagactc

SEQ ID NO: 5715365 - DNA, 25 bp, Homo sapien
cgagggtgcccacgacgggcgcggg

SEQ ID NO: 5715366 - DNA, 25 bp, Homo sapien
cccgcgcccgtcgtgggcaccctcg

SEQ ID NO: 5715367 - DNA, 25 bp, Homo sapien
ggcgagggtgcccacgacgggcgcg

SEQ ID NO: 5715368 - DNA, 25 bp, Homo sapien
cgcgcccgtcgtgggcaccctcgcc

SEQ ID NO: 5715369 - DNA, 25 bp, Homo sapien
aattcaatgcatgactagaagtacc

SEQ ID NO: 5715370 - DNA, 25 bp, Homo sapien
ggtacttctagtcatgcattgaatt

SEQ ID NO: 5715371 - DNA, 25 bp, Homo sapien
cacaaagatcctgtattggagaaag

SEQ ID NO: 5715372 - DNA, 25 bp, Homo sapien
ctttctccaatacaggatctttgtg

SEQ ID NO: 5715373 - DNA, 25 bp, Homo sapien
ctacattatgctacgcgccacgagt

SEQ ID NO: 5715374 - DNA, 25 bp, Homo sapien
actcgtggcgcgtagcataatgtag

SEQ ID NO: 5715375 - DNA, 25 bp, Homo sapien
ctgtgggacctggagtgccgggggt

SEQ ID NO: 5715376 - DNA, 25 bp, Homo sapien
acccccggcactccaggtcccacag

SEQ ID NO: 5715377 - DNA, 25 bp, Homo sapien
catccaccgttcattaataatagta

SEQ ID NO: 5715378 - DNA, 25 bp, Homo sapien
tactattattaatgaacggtggatg

SEQ ID NO: 5715379 - DNA, 25 bp, Homo sapien
tacaaatctaaaggcttagaccaaa

SEQ ID NO: 5715380 - DNA, 25 bp, Homo sapien
tttggtctaagcctttagatttgta

SEQ ID NO: 5715381 - DNA, 25 bp, Homo sapien
gacgcgtcttcccggtcggcacccc

SEQ ID NO: 5715382 - DNA, 25 bp, Homo sapien
ggggtgccgaccgggaagacgcgtc

SEQ ID NO: 5715383 - DNA, 25 bp, Homo sapien
ggtcttcggacaccgcgaccgggag

SEQ ID NO: 5715384 - DNA, 25 bp, Homo sapien
ctcccggtcgcggtgtccgaagacc

SEQ ID NO: 5715385 - DNA, 25 bp, Homo sapien
tgagacacgaaaacactcgtattca

SEQ ID NO: 5715386 - DNA, 25 bp, Homo sapien
tgaatacgagtgttttcgtgtctca

SEQ ID NO: 5715387 - DNA, 25 bp, Homo sapien
ggcgccgccctcgtcctggggaagg

SEQ ID NO: 5715388 - DNA, 25 bp, Homo sapien
ccttccccaggacgagggcggcgcc

SEQ ID NO: 5715389 - DNA, 25 bp, Homo sapien
agggaacagttagttatgtgtcaag

SEQ ID NO: 5715390 - DNA, 25 bp, Homo sapien
cttgacacataactaactgttccct

SEQ ID NO: 5715391 - DNA, 25 bp, Homo sapien
atcgaactatccgatcaagaaaaag

SEQ ID NO: 5715392 - DNA, 25 bp, Homo sapien
ctttttcttgatcggatagttcgat

SEQ ID NO: 5715393 - DNA, 25 bp, Homo sapien
gggacgaccgtgcccgtgaccgcga

SEQ ID NO: 5715394 - DNA, 25 bp, Homo sapien
tcgcggtcacgggcacggtcgtccc

SEQ ID NO: 5715395 - DNA, 25 bp, Homo sapien
acgggacgaccgtgcccgtgaccgc

SEQ ID NO: 5715396 - DNA, 25 bp, Homo sapien
gcggtcacgggcacggtcgtcccgt

SEQ ID NO: 5715397 - DNA, 25 bp, Homo sapien
aagaaacaaagaacatatggttagg

SEQ ID NO: 5715398 - DNA, 25 bp, Homo sapien
cctaaccatatgttctttgtttctt

SEQ ID NO: 5715399 - DNA, 25 bp, Homo sapien
aacacttatgggtctccaacccgtc

SEQ ID NO: 5715400 - DNA, 25 bp, Homo sapien
gacgggttggagacccataagtgtt

SEQ ID NO: 5715401 - DNA, 25 bp, Homo sapien
atttgaatggtatatctactatttg

SEQ ID NO: 5715402 - DNA, 25 bp, Homo sapien
caaatagtagatataccattcaaat

SEQ ID NO: 5715403 - DNA, 25 bp, Homo sapien
tcgggtagattgtcaccggaacaaa

SEQ ID NO: 5715404 - DNA, 25 bp, Homo sapien
tttgttccggtgacaatctacccga

SEQ ID NO: 5715405 - DNA, 25 bp, Homo sapien
gaaacgaatcgcaaggaccgcagga

SEQ ID NO: 5715406 - DNA, 25 bp, Homo sapien
tcctgcggtccttgcgattcgtttc

SEQ ID NO: 5715407 - DNA, 25 bp, Homo sapien
aaccttcgaactcatttagagtcgt

SEQ ID NO: 5715408 - DNA, 25 bp, Homo sapien
acgactctaaatgagttcgaaggtt

SEQ ID NO: 5715409 - DNA, 25 bp, Homo sapien
aagattacatttgaacacactgaat

SEQ ID NO: 5715410 - DNA, 25 bp, Homo sapien
attcagtgtgttcaaatgtaatctt

SEQ ID NO: 5715411 - DNA, 25 bp, Homo sapien
tctactaatgatatagagaaccgat

SEQ ID NO: 5715412 - DNA, 25 bp, Homo sapien
atcggttctctatatcattagtaga

SEQ ID NO: 5715413 - DNA, 25 bp, Homo sapien
tttaagaacttagtggttaatgtat

SEQ ID NO: 5715414 - DNA, 25 bp, Homo sapien
atacattaaccactaagttcttaaa

SEQ ID NO: 5715415 - DNA, 25 bp, Homo sapien
aattgataagaccagtaatggtagt

SEQ ID NO: 5715416 - DNA, 25 bp, Homo sapien
actaccattactggtcttatcaatt

SEQ ID NO: 5715417 - DNA, 25 bp, Homo sapien
ttcacgcgagctcaccgaagaactg

SEQ ID NO: 5715418 - DNA, 25 bp, Homo sapien
cagttcttcggtgagctcgcgtgaa

SEQ ID NO: 5715419 - DNA, 25 bp, Homo sapien
ggaccaccaaggtcgggaagtatgt

SEQ ID NO: 5715420 - DNA, 25 bp, Homo sapien
acatacttcccgaccttggtggtcc

SEQ ID NO: 5715421 - DNA, 25 bp, Homo sapien
accggacttagaccaccggctctca

SEQ ID NO: 5715422 - DNA, 25 bp, Homo sapien
tgagagccggtggtctaagtccggt

SEQ ID NO: 5715423 - DNA, 25 bp, Homo sapien
caggacgtgggatgaaggatagaag

SEQ ID NO: 5715424 - DNA, 25 bp, Homo sapien
cttctatccttcatcccacgtcctg

SEQ ID NO: 5715425 - DNA, 25 bp, Homo sapien
aaatgagcttaacgttctcctttat

SEQ ID NO: 5715426 - DNA, 25 bp, Homo sapien
ataaaggagaacgttaagctcattt

SEQ ID NO: 5715427 - DNA, 25 bp, Homo sapien
gtccaccgtcgttagtacatgagtt

SEQ ID NO: 5715428 - DNA, 25 bp, Homo sapien
aactcatgtactaacgacggtggac

SEQ ID NO: 5715429 - DNA, 25 bp, Homo sapien
agaccaaggagccacctcgacatta

SEQ ID NO: 5715430 - DNA, 25 bp, Homo sapien
taatgtcgaggtggctccttggtct

SEQ ID NO: 5715431 - DNA, 25 bp, Homo sapien
tcaaaatctggttatctgaccatac

SEQ ID NO: 5715432 - DNA, 25 bp, Homo sapien
gtatggtcagataaccagattttga

SEQ ID NO: 5715433 - DNA, 25 bp, Homo sapien
cagatttaataatagtgacgtttaa

SEQ ID NO: 5715434 - DNA, 25 bp, Homo sapien
ttaaacgtcactattattaaatctg

SEQ ID NO: 5715435 - DNA, 25 bp, Homo sapien
tgaaaaagtattgtagtaacccaca

SEQ ID NO: 5715436 - DNA, 25 bp, Homo sapien
tgtgggttactacaatactttttca

SEQ ID NO: 5715437 - DNA, 25 bp, Homo sapien
aaacgtgttatatatcataacaaat

SEQ ID NO: 5715438 - DNA, 25 bp, Homo sapien
atttgttatgatatataacacgttt

SEQ ID NO: 5715439 - DNA, 25 bp, Homo sapien
tggaacaagtcaaaggagtgaaacg

SEQ ID NO: 5715440 - DNA, 25 bp, Homo sapien
cgtttcactcctttgacttgttcca

SEQ ID NO: 5715441 - DNA, 25 bp, Homo sapien
ggcatcccccgggtgagacgacggg

SEQ ID NO: 5715442 - DNA, 25 bp, Homo sapien
cccgtcgtctcacccgggggatgcc

SEQ ID NO: 5715443 - DNA, 25 bp, Homo sapien
gaattagacacaccattttcgacca

SEQ ID NO: 5715444 - DNA, 25 bp, Homo sapien
tggtcgaaaatggtgtgtctaattc

SEQ ID NO: 5715445 - DNA, 25 bp, Homo sapien
acaaacattatcaaacttcttagta

SEQ ID NO: 5715446 - DNA, 25 bp, Homo sapien
tactaagaagtttgataatgtttgt

SEQ ID NO: 5715447 - DNA, 25 bp, Homo sapien
ttttcgtcaattttagaggtcggta

SEQ ID NO: 5715448 - DNA, 25 bp, Homo sapien
taccgacctctaaaattgacgaaaa

SEQ ID NO: 5715449 - DNA, 25 bp, Homo sapien
agaggtgagactggtggattaaggt

SEQ ID NO: 5715450 - DNA, 25 bp, Homo sapien
accttaatccaccagtctcacctct

SEQ ID NO: 5715451 - DNA, 25 bp, Homo sapien
ccaccgtaaccgtataatcacagat

SEQ ID NO: 5715452 - DNA, 25 bp, Homo sapien
atctgtgattatacggttacggtgg

SEQ ID NO: 5715453 - DNA, 25 bp, Homo sapien
gagaaaccaaagtggttagagaaat

SEQ ID NO: 5715454 - DNA, 25 bp, Homo sapien
atttctctaaccactttggtttctc

SEQ ID NO: 5715455 - DNA, 25 bp, Homo sapien
tcgaaagtcaccaggattctctcct

SEQ ID NO: 5715456 - DNA, 25 bp, Homo sapien
aggagagaatcctggtgactttcga

SEQ ID NO: 5715457 - DNA, 25 bp, Homo sapien
aaagaaacttcatagagaaaggtac

SEQ ID NO: 5715458 - DNA, 25 bp, Homo sapien
gtacctttctctatgaagtttcttt

SEQ ID NO: 5715459 - DNA, 25 bp, Homo sapien
gtcccccgatgcgaaccaatgtttt

SEQ ID NO: 5715460 - DNA, 25 bp, Homo sapien
aaaacattggttcgcatcgggggac

SEQ ID NO: 5715461 - DNA, 25 bp, Homo sapien
agctacaggttgtcccccgatgcga

SEQ ID NO: 5715462 - DNA, 25 bp, Homo sapien
tcgcatcgggggacaacctgtagct

SEQ ID NO: 5715463 - DNA, 25 bp, Homo sapien
agtttataaacgagaattgcagtat

SEQ ID NO: 5715464 - DNA, 25 bp, Homo sapien
atactgcaattctcgtttataaact

SEQ ID NO: 5715465 - DNA, 25 bp, Homo sapien
gccaccgggtcgtgtcccgcaaagg

SEQ ID NO: 5715466 - DNA, 25 bp, Homo sapien
cctttgcgggacacgacccggtggc

SEQ ID NO: 5715467 - DNA, 25 bp, Homo sapien
catggtgtgttagagatcgtgttaa

SEQ ID NO: 5715468 - DNA, 25 bp, Homo sapien
ttaacacgatctctaacacaccatg

SEQ ID NO: 5715469 - DNA, 25 bp, Homo sapien
aatttggaaatctcactattgttat

SEQ ID NO: 5715470 - DNA, 25 bp, Homo sapien
ataacaatagtgagatttccaaatt

SEQ ID NO: 5715471 - DNA, 25 bp, Homo sapien
gatagtcggcgctcacaggtaacat

SEQ ID NO: 5715472 - DNA, 25 bp, Homo sapien
atgttacctgtgagcgccgactatc

SEQ ID NO: 5715473 - DNA, 25 bp, Homo sapien
cgtctacagagacggagttggtccc

SEQ ID NO: 5715474 - DNA, 25 bp, Homo sapien
gggaccaactccgtctctgtagacg

SEQ ID NO: 5715475 - DNA, 25 bp, Homo sapien
aacagtttgggaaaggacattgact

SEQ ID NO: 5715476 - DNA, 25 bp, Homo sapien
agtcaatgtcctttcccaaactgtt

SEQ ID NO: 5715477 - DNA, 25 bp, Homo sapien
gtctttaccgtgactcgtccagggg

SEQ ID NO: 5715478 - DNA, 25 bp, Homo sapien
cccctggacgagtcacggtaaagac

SEQ ID NO: 5715479 - DNA, 25 bp, Homo sapien
ccgaacgtagtaatctttcagatct

SEQ ID NO: 5715480 - DNA, 25 bp, Homo sapien
agatctgaaagattactacgttcgg

SEQ ID NO: 5715481 - DNA, 25 bp, Homo sapien
gacgtcgggacacgaactgtcaaac

SEQ ID NO: 5715482 - DNA, 25 bp, Homo sapien
gtttgacagttcgtgtcccgacgtc

SEQ ID NO: 5715483 - DNA, 25 bp, Homo sapien
aaagagattctccttggacttatac

SEQ ID NO: 5715484 - DNA, 25 bp, Homo sapien
gtataagtccaaggagaatctcttt

SEQ ID NO: 5715485 - DNA, 25 bp, Homo sapien
aagtaagactcgttcgaaagagtag

SEQ ID NO: 5715486 - DNA, 25 bp, Homo sapien
ctactctttcgaacgagtcttactt

SEQ ID NO: 5715487 - DNA, 25 bp, Homo sapien
gttataattatcactaactaaggtt

SEQ ID NO: 5715488 - DNA, 25 bp, Homo sapien
aaccttagttagtgataattataac

SEQ ID NO: 5715489 - DNA, 25 bp, Homo sapien
cgtcccgacggacaggaaaagacac

SEQ ID NO: 5715490 - DNA, 25 bp, Homo sapien
gtgtcttttcctgtccgtcgggacg

SEQ ID NO: 5715491 - DNA, 25 bp, Homo sapien
tgtgggtccctctacaaagattaca

SEQ ID NO: 5715492 - DNA, 25 bp, Homo sapien
tgtaatctttgtagagggacccaca

SEQ ID NO: 5715493 - DNA, 25 bp, Homo sapien
ggacgccccggcgcagggggcctcg

SEQ ID NO: 5715494 - DNA, 25 bp, Homo sapien
cgaggccccctgcgccggggcgtcc

SEQ ID NO: 5715495 - DNA, 25 bp, Homo sapien
tccgttctccggaagagtccctggg

SEQ ID NO: 5715496 - DNA, 25 bp, Homo sapien
cccagggactcttccggagaacgga

SEQ ID NO: 5715497 - DNA, 25 bp, Homo sapien
ctcccgcaccgtcgcgccgtcacgc

SEQ ID NO: 5715498 - DNA, 25 bp, Homo sapien
gcgtgacggcgcgacggtgcgggag

SEQ ID NO: 5715499 - DNA, 25 bp, Homo sapien
ctccaaactacccttgtcatagaca

SEQ ID NO: 5715500 - DNA, 25 bp, Homo sapien
tgtctatgacaagggtagtttggag

SEQ ID NO: 5715501 - DNA, 25 bp, Homo sapien
gagggcgcgccttaaccttagggcc

SEQ ID NO: 5715502 - DNA, 25 bp, Homo sapien
ggccctaaggttaaggcgcgccctc

SEQ ID NO: 5715503 - DNA, 25 bp, Homo sapien
ttactgtagatgaccgtaggaccat

SEQ ID NO: 5715504 - DNA, 25 bp, Homo sapien
atggtcctacggtcatctacagtaa

SEQ ID NO: 5715505 - DNA, 25 bp, Homo sapien
ggttcaggccctctattccgtctac

SEQ ID NO: 5715506 - DNA, 25 bp, Homo sapien
gtagacggaatagagggcctgaacc

SEQ ID NO: 5715507 - DNA, 25 bp, Homo sapien
aaaggtcaagtcttctctatgtttt

SEQ ID NO: 5715508 - DNA, 25 bp, Homo sapien
aaaacatagagaagacttgaccttt

SEQ ID NO: 5715509 - DNA, 25 bp, Homo sapien
cgagagttaagatcggtagtaacag

SEQ ID NO: 5715510 - DNA, 25 bp, Homo sapien
ctgttactaccgatcttaactctcg

SEQ ID NO: 5715511 - DNA, 25 bp, Homo sapien
gacctaacacggtcactccggacgt

SEQ ID NO: 5715512 - DNA, 25 bp, Homo sapien
acgtccggagtgaccgtgttaggtc

SEQ ID NO: 5715513 - DNA, 25 bp, Homo sapien
cactgttatccttgttttgtagccg

SEQ ID NO: 5715514 - DNA, 25 bp, Homo sapien
cggctacaaaacaaggataacagtg

SEQ ID NO: 5715515 - DNA, 25 bp, Homo sapien
gggtcgtgagcgggtccctccacgg

SEQ ID NO: 5715516 - DNA, 25 bp, Homo sapien
ccgtggagggacccgctcacgaccc

SEQ ID NO: 5715517 - DNA, 25 bp, Homo sapien
aacacgggtgttgggactgtgctca

SEQ ID NO: 5715518 - DNA, 25 bp, Homo sapien
tgagcacagtcccaacacccgtgtt

SEQ ID NO: 5715519 - DNA, 25 bp, Homo sapien
ctgaactcaacgttggactaccaag

SEQ ID NO: 5715520 - DNA, 25 bp, Homo sapien
cttggtagtccaacgttgagttcag

SEQ ID NO: 5715521 - DNA, 25 bp, Homo sapien
aggacgagaggatacccaccttcat

SEQ ID NO: 5715522 - DNA, 25 bp, Homo sapien
atgaaggtgggtatcctctcgtcct

SEQ ID NO: 5715523 - DNA, 25 bp, Homo sapien
tggagatctactccaaggacgagag

SEQ ID NO: 5715524 - DNA, 25 bp, Homo sapien
ctctcgtccttggagtagatctcca

SEQ ID NO: 5715525 - DNA, 25 bp, Homo sapien
tcgaccggaaccacggcggaaggtc

SEQ ID NO: 5715526 - DNA, 25 bp, Homo sapien
gaccttccgccgtggttccggtcga

SEQ ID NO: 5715527 - DNA, 25 bp, Homo sapien
ccgtcgtccttgtaacaggtcctat

SEQ ID NO: 5715528 - DNA, 25 bp, Homo sapien
ataggacctgttacaaggacgacgg

SEQ ID NO: 5715529 - DNA, 25 bp, Homo sapien
ggtcctcgtcctgcccgtccctccg

SEQ ID NO: 5715530 - DNA, 25 bp, Homo sapien
cggagggacgggcaggacgaggacc

SEQ ID NO: 5715531 - DNA, 25 bp, Homo sapien
actagtgatatctattacgaaaccc

SEQ ID NO: 5715532 - DNA, 25 bp, Homo sapien
gggtttcgtaatagatatcactagt

SEQ ID NO: 5715533 - DNA, 25 bp, Homo sapien
ctcagtgcgtccaggtgcggcgtca

SEQ ID NO: 5715534 - DNA, 25 bp, Homo sapien
tgacgccgcacctggacgcactgag

SEQ ID NO: 5715535 - DNA, 25 bp, Homo sapien
gacaccaccgggttttccgcagtag

SEQ ID NO: 5715536 - DNA, 25 bp, Homo sapien
ctactgcggaaaacccggtggtgtc

SEQ ID NO: 5715537 - DNA, 25 bp, Homo sapien
cctcttcttattaattgtacatact

SEQ ID NO: 5715538 - DNA, 25 bp, Homo sapien
agtatgtacaattaataagaagagg

SEQ ID NO: 5715539 - DNA, 25 bp, Homo sapien
gggtgacatgtaggtgggcggtcga

SEQ ID NO: 5715540 - DNA, 25 bp, Homo sapien
tcgaccgcccacctacatgtcaccc

SEQ ID NO: 5715541 - DNA, 25 bp, Homo sapien
aatagagttatatctgatttaagac

SEQ ID NO: 5715542 - DNA, 25 bp, Homo sapien
gtcttaaatcagatataactctatt

SEQ ID NO: 5715543 - DNA, 25 bp, Homo sapien
gaatagagttatatctgatttaaga

SEQ ID NO: 5715544 - DNA, 25 bp, Homo sapien
tcttaaatcagatataactctattc

SEQ ID NO: 5715545 - DNA, 25 bp, Homo sapien
ggtgccgcacttgcgcgtcactcac

SEQ ID NO: 5715546 - DNA, 25 bp, Homo sapien
gtgagtgacgcgcaagtgcggcacc

SEQ ID NO: 5715547 - DNA, 25 bp, Homo sapien
gacctccccgttcccgtctccgcga

SEQ ID NO: 5715548 - DNA, 25 bp, Homo sapien
tcgcggagacgggaacggggaggtc

SEQ ID NO: 5715549 - DNA, 25 bp, Homo sapien
gagggacggtgagccattcccgaca

SEQ ID NO: 5715550 - DNA, 25 bp, Homo sapien
tgtcgggaatggctcaccgtccctc

SEQ ID NO: 5715551 - DNA, 25 bp, Homo sapien
gaatttctgaaatgtgaaagggtct

SEQ ID NO: 5715552 - DNA, 25 bp, Homo sapien
agaccctttcacatttcagaaattc

SEQ ID NO: 5715553 - DNA, 25 bp, Homo sapien
taagttaacacaaacacctaggtca

SEQ ID NO: 5715554 - DNA, 25 bp, Homo sapien
tgacctaggtgtttgtgttaactta

SEQ ID NO: 5715555 - DNA, 25 bp, Homo sapien
aagcggcggacgtttcacgcgacgc

SEQ ID NO: 5715556 - DNA, 25 bp, Homo sapien
gcgtcgcgtgaaacgtccgccgctt

SEQ ID NO: 5715557 - DNA, 25 bp, Homo sapien
gacgttctttccaccgcgataccag

SEQ ID NO: 5715558 - DNA, 25 bp, Homo sapien
ctggtatcgcggtggaaagaacgtc

SEQ ID NO: 5715559 - DNA, 25 bp, Homo sapien
agtggaaccgacagagagtcctcga

SEQ ID NO: 5715560 - DNA, 25 bp, Homo sapien
tcgaggactctctgtcggttccact

SEQ ID NO: 5715561 - DNA, 25 bp, Homo sapien
gattagtgttgaagtctatggctag

SEQ ID NO: 5715562 - DNA, 25 bp, Homo sapien
ctagccatagacttcaacactaatc

SEQ ID NO: 5715563 - DNA, 25 bp, Homo sapien
aatctagttcaataaaactctttta

SEQ ID NO: 5715564 - DNA, 25 bp, Homo sapien
taaaagagttttattgaactagatt

SEQ ID NO: 5715565 - DNA, 25 bp, Homo sapien
cacaaccctgccgagggtagtcgta

SEQ ID NO: 5715566 - DNA, 25 bp, Homo sapien
tacgactaccctcggcagggttgtg

SEQ ID NO: 5715567 - DNA, 25 bp, Homo sapien
ccgtcggaaatagcaaaaccagtct

SEQ ID NO: 5715568 - DNA, 25 bp, Homo sapien
agactggttttgctatttccgacgg

SEQ ID NO: 5715569 - DNA, 25 bp, Homo sapien
cggaggaggataagaccgacgggaa

SEQ ID NO: 5715570 - DNA, 25 bp, Homo sapien
ttcccgtcggtcttatcctcctccg

SEQ ID NO: 5715571 - DNA, 25 bp, Homo sapien
acaataatgtagacgtcaatgatat

SEQ ID NO: 5715572 - DNA, 25 bp, Homo sapien
atatcattgacgtctacattattgt

SEQ ID NO: 5715573 - DNA, 25 bp, Homo sapien
cgagaccccacgtctacttgaaacg

SEQ ID NO: 5715574 - DNA, 25 bp, Homo sapien
cgtttcaagtagacgtggggtctcg

SEQ ID NO: 5715575 - DNA, 25 bp, Homo sapien
tctttcgtaaagacatgttcgtgtg

SEQ ID NO: 5715576 - DNA, 25 bp, Homo sapien
cacacgaacatgtctttacgaaaga

SEQ ID NO: 5715577 - DNA, 25 bp, Homo sapien
aatcaggtgagacttgttaaacaac

SEQ ID NO: 5715578 - DNA, 25 bp, Homo sapien
gttgtttaacaagtctcacctgatt

SEQ ID NO: 5715579 - DNA, 25 bp, Homo sapien
ctctctcggaacgtgggcagagagg

SEQ ID NO: 5715580 - DNA, 25 bp, Homo sapien
cctctctgcccacgttccgagagag

SEQ ID NO: 5715581 - DNA, 25 bp, Homo sapien
ctctctctcggaacgtgggcagaga

SEQ ID NO: 5715582 - DNA, 25 bp, Homo sapien
tctctgcccacgttccgagagagag

SEQ ID NO: 5715583 - DNA, 25 bp, Homo sapien
cctacttggatgtgtatcctgccat

SEQ ID NO: 5715584 - DNA, 25 bp, Homo sapien
atggcaggatacacatccaagtagg

SEQ ID NO: 5715585 - DNA, 25 bp, Homo sapien
gtggtactgtttgaagtggaacctc

SEQ ID NO: 5715586 - DNA, 25 bp, Homo sapien
gaggttccacttcaaacagtaccac

SEQ ID NO: 5715587 - DNA, 25 bp, Homo sapien
tacctcatatgaatcgagtgtaaag

SEQ ID NO: 5715588 - DNA, 25 bp, Homo sapien
ctttacactcgattcatatgaggta

SEQ ID NO: 5715589 - DNA, 25 bp, Homo sapien
gacaatttaagaactaaaccaaaga

SEQ ID NO: 5715590 - DNA, 25 bp, Homo sapien
tctttggtttagttcttaaattgtc

SEQ ID NO: 5715591 - DNA, 25 bp, Homo sapien
actgtccattcctcccggattaggt

SEQ ID NO: 5715592 - DNA, 25 bp, Homo sapien
acctaatccgggaggaatggacagt

SEQ ID NO: 5715593 - DNA, 25 bp, Homo sapien
tccccacaaccggcgcttcccgtgt

SEQ ID NO: 5715594 - DNA, 25 bp, Homo sapien
acacgggaagcgccggttgtgggga

SEQ ID NO: 5715595 - DNA, 25 bp, Homo sapien
acgtcaccccaggtcccctgaagtg

SEQ ID NO: 5715596 - DNA, 25 bp, Homo sapien
cacttcaggggacctggggtgacgt

SEQ ID NO: 5715597 - DNA, 25 bp, Homo sapien
ctgcacccgactctataaaagaggt

SEQ ID NO: 5715598 - DNA, 25 bp, Homo sapien
acctcttttatagagtcgggtgcag

SEQ ID NO: 5715599 - DNA, 25 bp, Homo sapien
ctaccaagtcctaacagtgctatgt

SEQ ID NO: 5715600 - DNA, 25 bp, Homo sapien
acatagcactgttaggacttggtag

SEQ ID NO: 5715601 - DNA, 25 bp, Homo sapien
taccgtagaatgtgtcttttaagac

SEQ ID NO: 5715602 - DNA, 25 bp, Homo sapien
gtcttaaaagacacattctacggta

SEQ ID NO: 5715603 - DNA, 25 bp, Homo sapien
tctacgcagtggacatcgactacct

SEQ ID NO: 5715604 - DNA, 25 bp, Homo sapien
aggtagtcgatgtccactgcgtaga

SEQ ID NO: 5715605 - DNA, 25 bp, Homo sapien
acctttatatttttgcgttattgag

SEQ ID NO: 5715606 - DNA, 25 bp, Homo sapien
ctcaataacgcaaaaatataaaggt

SEQ ID NO: 5715607 - DNA, 25 bp, Homo sapien
tcggggtcgacccgccgtcgcagag

SEQ ID NO: 5715608 - DNA, 25 bp, Homo sapien
ctctgcgacggcgggtcgaccccga

SEQ ID NO: 5715609 - DNA, 25 bp, Homo sapien
tgtcaagatggtaacatggaggaaa

SEQ ID NO: 5715610 - DNA, 25 bp, Homo sapien
tttcctccatgttaccatcttgaca

SEQ ID NO: 5715611 - DNA, 25 bp, Homo sapien
agacaaagtgagtacgacggtgtcg

SEQ ID NO: 5715612 - DNA, 25 bp, Homo sapien
cgacaccgtcgtactcactttgtct

SEQ ID NO: 5715613 - DNA, 25 bp, Homo sapien
aaataatctctgtgataagttaaat

SEQ ID NO: 5715614 - DNA, 25 bp, Homo sapien
atttaacttatcacagagattattt

SEQ ID NO: 5715615 - DNA, 25 bp, Homo sapien
aacgaaggacaactgctgtcgagag

SEQ ID NO: 5715616 - DNA, 25 bp, Homo sapien
ctctcgacagcagttgtccttcgtt

SEQ ID NO: 5715617 - DNA, 25 bp, Homo sapien
ttaaaagaactctcttatgactcat

SEQ ID NO: 5715618 - DNA, 25 bp, Homo sapien
atgagtcataagagagttcttttaa

SEQ ID NO: 5715619 - DNA, 25 bp, Homo sapien
gaggacgggacaccgctgtcggtcg

SEQ ID NO: 5715620 - DNA, 25 bp, Homo sapien
cgaccgacagcggtgtcccgtcctc

SEQ ID NO: 5715621 - DNA, 25 bp, Homo sapien
aacataaccgaatcaagaatgttag

SEQ ID NO: 5715622 - DNA, 25 bp, Homo sapien
ctaacattcttgattcggttatgtt

SEQ ID NO: 5715623 - DNA, 25 bp, Homo sapien
gcctaggaggcgagtcgtttcaccg

SEQ ID NO: 5715624 - DNA, 25 bp, Homo sapien
cggtgaaacgactcgcctcctaggc

SEQ ID NO: 5715625 - DNA, 25 bp, Homo sapien
gcccacgcgtcctcgtgccagggtg

SEQ ID NO: 5715626 - DNA, 25 bp, Homo sapien
caccctggcacgaggacgcgtgggc

SEQ ID NO: 5715627 - DNA, 25 bp, Homo sapien
ctgtcgacccccggccttcactcgt

SEQ ID NO: 5715628 - DNA, 25 bp, Homo sapien
acgagtgaaggccgggggtcgacag

SEQ ID NO: 5715629 - DNA, 25 bp, Homo sapien
aggaggctgtcttgccgtccaccgg

SEQ ID NO: 5715630 - DNA, 25 bp, Homo sapien
ccggtggacggcaagacagcctcct

SEQ ID NO: 5715631 - DNA, 25 bp, Homo sapien
gggtcgcgccccaggtacaggtccc

SEQ ID NO: 5715632 - DNA, 25 bp, Homo sapien
gggacctgtacctggggcgcgaccc

SEQ ID NO: 5715633 - DNA, 25 bp, Homo sapien
acataaagtcgggaacatttgttca

SEQ ID NO: 5715634 - DNA, 25 bp, Homo sapien
tgaacaaatgttcccgactttatgt

SEQ ID NO: 5715635 - DNA, 25 bp, Homo sapien
taattccattgactcgtggaaaagt

SEQ ID NO: 5715636 - DNA, 25 bp, Homo sapien
acttttccacgagtcaatggaatta

SEQ ID NO: 5715637 - DNA, 25 bp, Homo sapien
gacgggagccacacgtctcaggcga

SEQ ID NO: 5715638 - DNA, 25 bp, Homo sapien
tcgcctgagacgtgtggctcccgtc

SEQ ID NO: 5715639 - DNA, 25 bp, Homo sapien
actgttcccaacagtactgttttgt

SEQ ID NO: 5715640 - DNA, 25 bp, Homo sapien
acaaaacagtactgttgggaacagt

SEQ ID NO: 5715641 - DNA, 25 bp, Homo sapien
gttcttcggacgagccggggccgta

SEQ ID NO: 5715642 - DNA, 25 bp, Homo sapien
tacggccccggctcgtccgaagaac

SEQ ID NO: 5715643 - DNA, 25 bp, Homo sapien
gccttgtcgcaaaggcccagtccgt

SEQ ID NO: 5715644 - DNA, 25 bp, Homo sapien
acggactgggcctttgcgacaaggc

SEQ ID NO: 5715645 - DNA, 25 bp, Homo sapien
ccgcggcgacatgggcccttacgcc

SEQ ID NO: 5715646 - DNA, 25 bp, Homo sapien
ggcgtaagggcccatgtcgccgcgg

SEQ ID NO: 5715647 - DNA, 25 bp, Homo sapien
gttttggactcatcatagatgtaat

SEQ ID NO: 5715648 - DNA, 25 bp, Homo sapien
attacatctatgatgagtccaaaac

SEQ ID NO: 5715649 - DNA, 25 bp, Homo sapien
cgttaacgtacaggcaggaagagac

SEQ ID NO: 5715650 - DNA, 25 bp, Homo sapien
gtctcttcctgcctgtacgttaacg

SEQ ID NO: 5715651 - DNA, 25 bp, Homo sapien
gatctgcgtccacgcaagggcagct

SEQ ID NO: 5715652 - DNA, 25 bp, Homo sapien
agctgcccttgcgtggacgcagatc

SEQ ID NO: 5715653 - DNA, 25 bp, Homo sapien
acccacagacaagaagagtcctccg

SEQ ID NO: 5715654 - DNA, 25 bp, Homo sapien
cggaggactcttcttgtctgtgggt

SEQ ID NO: 5715655 - DNA, 25 bp, Homo sapien
aactgaaatgatcataaagacttcg

SEQ ID NO: 5715656 - DNA, 25 bp, Homo sapien
cgaagtctttatgatcatttcagtt

SEQ ID NO: 5715657 - DNA, 25 bp, Homo sapien
gatatgcgactgagaactcttctca

SEQ ID NO: 5715658 - DNA, 25 bp, Homo sapien
tgagaagagttctcagtcgcatatc

SEQ ID NO: 5715659 - DNA, 25 bp, Homo sapien
tggcactccccccttgacccggcgt

SEQ ID NO: 5715660 - DNA, 25 bp, Homo sapien
acgccgggtcaaggggggagtgcca

SEQ ID NO: 5715661 - DNA, 25 bp, Homo sapien
tacgtcttcgaggttcatacccgga

SEQ ID NO: 5715662 - DNA, 25 bp, Homo sapien
tccgggtatgaacctcgaagacgta

SEQ ID NO: 5715663 - DNA, 25 bp, Homo sapien
atttcgaaacggttgtcgtctgcct

SEQ ID NO: 5715664 - DNA, 25 bp, Homo sapien
aggcagacgacaaccgtttcgaaat

SEQ ID NO: 5715665 - DNA, 25 bp, Homo sapien
tagagcgacgttaactttagagacg

SEQ ID NO: 5715666 - DNA, 25 bp, Homo sapien
cgtctctaaagttaacgtcgctcta

SEQ ID NO: 5715667 - DNA, 25 bp, Homo sapien
taaagacttatcgggtaaacattct

SEQ ID NO: 5715668 - DNA, 25 bp, Homo sapien
agaatgtttacccgataagtcttta

SEQ ID NO: 5715669 - DNA, 25 bp, Homo sapien
ttgggactcgtgagtcgcacaggac

SEQ ID NO: 5715670 - DNA, 25 bp, Homo sapien
gtcctgtgcgactcacgagtcccaa

SEQ ID NO: 5715671 - DNA, 25 bp, Homo sapien
aacaataaagaagcgtaagatcaag

SEQ ID NO: 5715672 - DNA, 25 bp, Homo sapien
cttgatcttacgcttctttattgtt

SEQ ID NO: 5715673 - DNA, 25 bp, Homo sapien
tacatacatacgtactatatgtctc

SEQ ID NO: 5715674 - DNA, 25 bp, Homo sapien
gagacatatagtacgtatgtatgta

SEQ ID NO: 5715675 - DNA, 25 bp, Homo sapien
ggagtcttaccttgattacttgaac

SEQ ID NO: 5715676 - DNA, 25 bp, Homo sapien
gttcaagtaatcaaggtaagactcc

SEQ ID NO: 5715677 - DNA, 25 bp, Homo sapien
ccagccgacgaaacggcgtcgcagg

SEQ ID NO: 5715678 - DNA, 25 bp, Homo sapien
cctgcgacgccgtttcgtcggctgg

SEQ ID NO: 5715679 - DNA, 25 bp, Homo sapien
ggagacccggaaccgcgagtcccca

SEQ ID NO: 5715680 - DNA, 25 bp, Homo sapien
tggggactcgcggttccgggtctcc

SEQ ID NO: 5715681 - DNA, 25 bp, Homo sapien
ttatcttactcaaccgtttcccgac

SEQ ID NO: 5715682 - DNA, 25 bp, Homo sapien
gtcgggaaacggttgagtaagataa

SEQ ID NO: 5715683 - DNA, 25 bp, Homo sapien
gaccgaccacagtcgactgtcgcct

SEQ ID NO: 5715684 - DNA, 25 bp, Homo sapien
aggcgacagtcgactgtggtcggtc

SEQ ID NO: 5715685 - DNA, 25 bp, Homo sapien
cgaggaccacacgatgtttccgaag

SEQ ID NO: 5715686 - DNA, 25 bp, Homo sapien
cttcggaaacatcgtgtggtcctcg

SEQ ID NO: 5715687 - DNA, 25 bp, Homo sapien
cgaggaataaaaagactcagacctt

SEQ ID NO: 5715688 - DNA, 25 bp, Homo sapien
aaggtctgagtctttttattcctcg

SEQ ID NO: 5715689 - DNA, 25 bp, Homo sapien
ctctaagacttgacccaggggaaag

SEQ ID NO: 5715690 - DNA, 25 bp, Homo sapien
ctttcccctgggtcaagtcttagag

SEQ ID NO: 5715691 - DNA, 25 bp, Homo sapien
ttgttattaattacaaaacgggaca

SEQ ID NO: 5715692 - DNA, 25 bp, Homo sapien
tgtcccgttttgtaattaataacaa

SEQ ID NO: 5715693 - DNA, 25 bp, Homo sapien
cctcgtctcgtgagagatgtcgacg

SEQ ID NO: 5715694 - DNA, 25 bp, Homo sapien
cgtcgacatctctcacgagacgagg

SEQ ID NO: 5715695 - DNA, 25 bp, Homo sapien
agacggtctgccgtcgccgaaggac

SEQ ID NO: 5715696 - DNA, 25 bp, Homo sapien
gtccttcggcgacggcagaccgtct

SEQ ID NO: 5715697 - DNA, 25 bp, Homo sapien
ggccgccatgccccggtccgaccct

SEQ ID NO: 5715698 - DNA, 25 bp, Homo sapien
agggtcggaccggggcatggcggcc

SEQ ID NO: 5715699 - DNA, 25 bp, Homo sapien
attatttacaagtgttctatgtacg

SEQ ID NO: 5715700 - DNA, 25 bp, Homo sapien
cgtacatagaacacttgtaaataat

SEQ ID NO: 5715701 - DNA, 25 bp, Homo sapien
ctctgactctgtatctcccacagga

SEQ ID NO: 5715702 - DNA, 25 bp, Homo sapien
tcctgtgggagatacagagtcagag

SEQ ID NO: 5715703 - DNA, 25 bp, Homo sapien
acctgtggtgggactgggccactcc

SEQ ID NO: 5715704 - DNA, 25 bp, Homo sapien
ggagtggcccagtcccaccacaggt

SEQ ID NO: 5715705 - DNA, 25 bp, Homo sapien
gaagcaggagtagcctctgtcctcg

SEQ ID NO: 5715706 - DNA, 25 bp, Homo sapien
cgaggacagaggctactcctgcttc

SEQ ID NO: 5715707 - DNA, 25 bp, Homo sapien
ggtgccggtaggtacgactggtcga

SEQ ID NO: 5715708 - DNA, 25 bp, Homo sapien
tcgaccagtcgtacctaccggcacc

SEQ ID NO: 5715709 - DNA, 25 bp, Homo sapien
ttccctacggcagtcgaaccgacga

SEQ ID NO: 5715710 - DNA, 25 bp, Homo sapien
tcgtcggttcgactgccgtagggaa

SEQ ID NO: 5715711 - DNA, 25 bp, Homo sapien
aaacggtttatcctctcacccagag

SEQ ID NO: 5715712 - DNA, 25 bp, Homo sapien
ctctgggtgagaggataaaccgttt

SEQ ID NO: 5715713 - DNA, 25 bp, Homo sapien
tgaaagaaagacgtactattaatat

SEQ ID NO: 5715714 - DNA, 25 bp, Homo sapien
atattaatagtacgtctttctttca

SEQ ID NO: 5715715 - DNA, 25 bp, Homo sapien
acactttaagacatactctataaac

SEQ ID NO: 5715716 - DNA, 25 bp, Homo sapien
gtttatagagtatgtcttaaagtgt

SEQ ID NO: 5715717 - DNA, 25 bp, Homo sapien
ttcgataacgggtagacccgcaccg

SEQ ID NO: 5715718 - DNA, 25 bp, Homo sapien
cggtgcgggtctacccgttatcgaa

SEQ ID NO: 5715719 - DNA, 25 bp, Homo sapien
aaaggcgagtcatgaagaggtccaa

SEQ ID NO: 5715720 - DNA, 25 bp, Homo sapien
ttggacctcttcatgactcgccttt

SEQ ID NO: 5715721 - DNA, 25 bp, Homo sapien
accgacgtaacgtcagtcacacaga

SEQ ID NO: 5715722 - DNA, 25 bp, Homo sapien
tctgtgtgactgacgttacgtcggt

SEQ ID NO: 5715723 - DNA, 25 bp, Homo sapien
gcggctggcaagcaggagtgtcggt

SEQ ID NO: 5715724 - DNA, 25 bp, Homo sapien
accgacactcctgcttgccagccgc

SEQ ID NO: 5715725 - DNA, 25 bp, Homo sapien
tgacacctcggagcggctggcaagc

SEQ ID NO: 5715726 - DNA, 25 bp, Homo sapien
gcttgccagccgctccgaggtgtca

SEQ ID NO: 5715727 - DNA, 25 bp, Homo sapien
caaaatactttagacagggtcaact

SEQ ID NO: 5715728 - DNA, 25 bp, Homo sapien
agttgaccctgtctaaagtattttg

SEQ ID NO: 5715729 - DNA, 25 bp, Homo sapien
gcgggcgccgctagagctagggcga

SEQ ID NO: 5715730 - DNA, 25 bp, Homo sapien
tcgccctagctctagcggcgcccgc

SEQ ID NO: 5715731 - DNA, 25 bp, Homo sapien
gcgagaccacaagggcgcaagcaca

SEQ ID NO: 5715732 - DNA, 25 bp, Homo sapien
tgtgcttgcgcccttgtggtctcgc

SEQ ID NO: 5715733 - DNA, 25 bp, Homo sapien
taaaaagattcaaccatttattact

SEQ ID NO: 5715734 - DNA, 25 bp, Homo sapien
agtaataaatggttgaatcttttta

SEQ ID NO: 5715735 - DNA, 25 bp, Homo sapien
cccgacgatatggtcctcgacgaag

SEQ ID NO: 5715736 - DNA, 25 bp, Homo sapien
cttcgtcgaggaccatatcgtcggg

SEQ ID NO: 5715737 - DNA, 25 bp, Homo sapien
ggtccgacggggactcactcggact

SEQ ID NO: 5715738 - DNA, 25 bp, Homo sapien
agtccgagtgagtccccgtcggacc

SEQ ID NO: 5715739 - DNA, 25 bp, Homo sapien
acactgattcacagaattgatgtcc

SEQ ID NO: 5715740 - DNA, 25 bp, Homo sapien
ggacatcaattctgtgaatcagtgt

SEQ ID NO: 5715741 - DNA, 25 bp, Homo sapien
cccaggcgtccgagttgggtcggtg

SEQ ID NO: 5715742 - DNA, 25 bp, Homo sapien
caccgacccaactcggacgcctggg

SEQ ID NO: 5715743 - DNA, 25 bp, Homo sapien
cttcgttccggactgcggtggtcct

SEQ ID NO: 5715744 - DNA, 25 bp, Homo sapien
aggaccaccgcagtccggaacgaag

SEQ ID NO: 5715745 - DNA, 25 bp, Homo sapien
acataaatctttaaaactgacagta

SEQ ID NO: 5715746 - DNA, 25 bp, Homo sapien
tactgtcagttttaaagatttatgt

SEQ ID NO: 5715747 - DNA, 25 bp, Homo sapien
aaatgtattcgataccgggtacaag

SEQ ID NO: 5715748 - DNA, 25 bp, Homo sapien
cttgtacccggtatcgaatacattt

SEQ ID NO: 5715749 - DNA, 25 bp, Homo sapien
agttatgtgtcagtagccctcgggt

SEQ ID NO: 5715750 - DNA, 25 bp, Homo sapien
acccgagggctactgacacataact

SEQ ID NO: 5715751 - DNA, 25 bp, Homo sapien
aaggacgaaagagtgtaaaagatga

SEQ ID NO: 5715752 - DNA, 25 bp, Homo sapien
tcatcttttacactctttcgtcctt

SEQ ID NO: 5715753 - DNA, 25 bp, Homo sapien
caaactcgagtccaagcttctcctt

SEQ ID NO: 5715754 - DNA, 25 bp, Homo sapien
aaggagaagcttggactcgagtttg

SEQ ID NO: 5715755 - DNA, 25 bp, Homo sapien
cgcaggaggtcgcaggcgggccggg

SEQ ID NO: 5715756 - DNA, 25 bp, Homo sapien
cccggcccgcctgcgacctcctgcg

SEQ ID NO: 5715757 - DNA, 25 bp, Homo sapien
gaccccgtcgctttcgtccttgtcc

SEQ ID NO: 5715758 - DNA, 25 bp, Homo sapien
ggacaaggacgaaagcgacggggtc

SEQ ID NO: 5715759 - DNA, 25 bp, Homo sapien
atggtgccgatttggtcctgtagag

SEQ ID NO: 5715760 - DNA, 25 bp, Homo sapien
ctctacaggaccaaatcggcaccat

SEQ ID NO: 5715761 - DNA, 25 bp, Homo sapien
gtctacgaaacttgtgtctgtacgt

SEQ ID NO: 5715762 - DNA, 25 bp, Homo sapien
acgtacagacacaagtttcgtagac

SEQ ID NO: 5715763 - DNA, 25 bp, Homo sapien
tgtctacgaaacttgtgtctgtacg

SEQ ID NO: 5715764 - DNA, 25 bp, Homo sapien
cgtacagacacaagtttcgtagaca

SEQ ID NO: 5715765 - DNA, 25 bp, Homo sapien
gacggccccggccaccaaatacaca

SEQ ID NO: 5715766 - DNA, 25 bp, Homo sapien
tgtgtatttggtggccggggccgtc

SEQ ID NO: 5715767 - DNA, 25 bp, Homo sapien
gtcacggtctctttattagaaatag

SEQ ID NO: 5715768 - DNA, 25 bp, Homo sapien
ctatttctaataaagagaccgtgac

SEQ ID NO: 5715769 - DNA, 25 bp, Homo sapien
gtctcggcgaaccgccgaagggact

SEQ ID NO: 5715770 - DNA, 25 bp, Homo sapien
agtcccttcggcggttcgccgagac

SEQ ID NO: 5715771 - DNA, 25 bp, Homo sapien
gccccgccgagctcccggacacagc

SEQ ID NO: 5715772 - DNA, 25 bp, Homo sapien
gctgtgtccgggagctcggcggggc

SEQ ID NO: 5715773 - DNA, 25 bp, Homo sapien
cacaagcattactaaagtcgtcatt

SEQ ID NO: 5715774 - DNA, 25 bp, Homo sapien
aatgacgactttagtaatgcttgtg

SEQ ID NO: 5715775 - DNA, 25 bp, Homo sapien
gacgaggtaacgttcttcaggggta

SEQ ID NO: 5715776 - DNA, 25 bp, Homo sapien
tacccctgaagaacgttacctcgtc

SEQ ID NO: 5715777 - DNA, 25 bp, Homo sapien
agtgcgacacccgtcgacctgtgta

SEQ ID NO: 5715778 - DNA, 25 bp, Homo sapien
tacacaggtcgacgggtgtcgcact

SEQ ID NO: 5715779 - DNA, 25 bp, Homo sapien
tcgaggtcgttcctgcccggagtaa

SEQ ID NO: 5715780 - DNA, 25 bp, Homo sapien
ttactccgggcaggaacgacctcga

SEQ ID NO: 5715781 - DNA, 25 bp, Homo sapien
ctggcgtagcgggacgaacgactcc

SEQ ID NO: 5715782 - DNA, 25 bp, Homo sapien
ggagtcgttcgtcccgctacgccag

SEQ ID NO: 5715783 - DNA, 25 bp, Homo sapien
ggattcagtatgcatcaaagacaac

SEQ ID NO: 5715784 - DNA, 25 bp, Homo sapien
gttgtctttgatgcatactgaatcc

SEQ ID NO: 5715785 - DNA, 25 bp, Homo sapien
tctgtgccttagtaagacggaaccc

SEQ ID NO: 5715786 - DNA, 25 bp, Homo sapien
gggttccgtcttactaaggcacaga

SEQ ID NO: 5715787 - DNA, 25 bp, Homo sapien
tcttcgtctccaaccatacctttga

SEQ ID NO: 5715788 - DNA, 25 bp, Homo sapien
tcaaaggtatggttggagacgaaga

SEQ ID NO: 5715789 - DNA, 25 bp, Homo sapien
actgcaacgaaatacaagaaatact

SEQ ID NO: 5715790 - DNA, 25 bp, Homo sapien
agtatttcttgtatttcgttgcagt

SEQ ID NO: 5715791 - DNA, 25 bp, Homo sapien
cgtctcttgactacaccttgaatag

SEQ ID NO: 5715792 - DNA, 25 bp, Homo sapien
ctattcaaggtgtagtcaagagacg

SEQ ID NO: 5715793 - DNA, 25 bp, Homo sapien
ctacaatgagtcaccttccttaaag

SEQ ID NO: 5715794 - DNA, 25 bp, Homo sapien
ctttaaggaaggtgactcattgtag

SEQ ID NO: 5715795 - DNA, 25 bp, Homo sapien
gtgactgagagtctgggcttgggaa

SEQ ID NO: 5715796 - DNA, 25 bp, Homo sapien
ttcccaagcccagactctcagtcac

SEQ ID NO: 5715797 - DNA, 25 bp, Homo sapien
acgtttcttattgtctataatagaa

SEQ ID NO: 5715798 - DNA, 25 bp, Homo sapien
ttctattatagacaataagaaacgt

SEQ ID NO: 5715799 - DNA, 25 bp, Homo sapien
ggttcctcttgaaatcttccccgac

SEQ ID NO: 5715800 - DNA, 25 bp, Homo sapien
gtcggggaagatttcaagaggaacc

SEQ ID NO: 5715801 - DNA, 25 bp, Homo sapien
ggccgaggcctgttcgcgtcgaacc

SEQ ID NO: 5715802 - DNA, 25 bp, Homo sapien
ggttcgacgcgaacaggcctcggcc

SEQ ID NO: 5715803 - DNA, 25 bp, Homo sapien
tttaaataaagacactctctttcgt

SEQ ID NO: 5715804 - DNA, 25 bp, Homo sapien
acgaaagagagtgtctttatttaaa

SEQ ID NO: 5715805 - DNA, 25 bp, Homo sapien
ggtagccctacaacctatcactgaa

SEQ ID NO: 5715806 - DNA, 25 bp, Homo sapien
ttcagtgataggttgtagggctacc

SEQ ID NO: 5715807 - DNA, 25 bp, Homo sapien
ttaagtattcgttcatctattcggg

SEQ ID NO: 5715808 - DNA, 25 bp, Homo sapien
cccgaatagatgaacgaatacttaa

SEQ ID NO: 5715809 - DNA, 25 bp, Homo sapien
acacgtcgcaatttgactcggttcc

SEQ ID NO: 5715810 - DNA, 25 bp, Homo sapien
ggaaccgagtcaaattgcgacgtgt

SEQ ID NO: 5715811 - DNA, 25 bp, Homo sapien
taccaggccccacgcgtcgcgggcc

SEQ ID NO: 5715812 - DNA, 25 bp, Homo sapien
ggcccgcgacgcgtggggcctggta

SEQ ID NO: 5715813 - DNA, 25 bp, Homo sapien
cgggaggtcacggtccgcgcgtgtc

SEQ ID NO: 5715814 - DNA, 25 bp, Homo sapien
gacacgcgcggaccgtgacctcccg

SEQ ID NO: 5715815 - DNA, 25 bp, Homo sapien
aacctctgttcctgccacaagcagg

SEQ ID NO: 5715816 - DNA, 25 bp, Homo sapien
cctgcttgtggcaggaacagaggtt

SEQ ID NO: 5715817 - DNA, 25 bp, Homo sapien
ccctattaaggaaacaacgtcacat

SEQ ID NO: 5715818 - DNA, 25 bp, Homo sapien
atgtgacgttgtttccttaataggg

SEQ ID NO: 5715819 - DNA, 25 bp, Homo sapien
ggccccgccacagcctccgcccgta

SEQ ID NO: 5715820 - DNA, 25 bp, Homo sapien
tacgggcggaggctgtggcggggcc

SEQ ID NO: 5715821 - DNA, 25 bp, Homo sapien
acaggtccggagggagggctgtggc

SEQ ID NO: 5715822 - DNA, 25 bp, Homo sapien
gccacagccctccctccggacctgt

SEQ ID NO: 5715823 - DNA, 25 bp, Homo sapien
aaatcctcactccttgtgacaaacc

SEQ ID NO: 5715824 - DNA, 25 bp, Homo sapien
ggtttgtcacaaggagtgaggattt

SEQ ID NO: 5715825 - DNA, 25 bp, Homo sapien
cctcggacggcgcgaccggggctcc

SEQ ID NO: 5715826 - DNA, 25 bp, Homo sapien
ggagccccggtcgcgccgtccgagg

SEQ ID NO: 5715827 - DNA, 25 bp, Homo sapien
ccctcggacggcgcgaccggggctc

SEQ ID NO: 5715828 - DNA, 25 bp, Homo sapien
gagccccggtcgcgccgtccgaggg

SEQ ID NO: 5715829 - DNA, 25 bp, Homo sapien
actcagacagaagtgactaaaaggt

SEQ ID NO: 5715830 - DNA, 25 bp, Homo sapien
accttttagtcacttctgtctgagt

SEQ ID NO: 5715831 - DNA, 25 bp, Homo sapien
gcgagcccgccgaaggtcgaaggcc

SEQ ID NO: 5715832 - DNA, 25 bp, Homo sapien
ggccttcgaccttcggcgggctcgc

SEQ ID NO: 5715833 - DNA, 25 bp, Homo sapien
aagtacgacaaactgacaggagtga

SEQ ID NO: 5715834 - DNA, 25 bp, Homo sapien
tcactcctgtcagtttgtcgtactt

SEQ ID NO: 5715835 - DNA, 25 bp, Homo sapien
gaacgtattagaccccgataactgt

SEQ ID NO: 5715836 - DNA, 25 bp, Homo sapien
acagttatcggggtctaatacgttc

SEQ ID NO: 5715837 - DNA, 25 bp, Homo sapien
atctgtttatagtctaatcgataac

SEQ ID NO: 5715838 - DNA, 25 bp, Homo sapien
gttatcgattagactataaacagat

SEQ ID NO: 5715839 - DNA, 25 bp, Homo sapien
acattcactccggttgtctcgagac

SEQ ID NO: 5715840 - DNA, 25 bp, Homo sapien
gtctcgagacaaccggagtgaatgt

SEQ ID NO: 5715841 - DNA, 25 bp, Homo sapien
acttcaacgaccttctagactcggt

SEQ ID NO: 5715842 - DNA, 25 bp, Homo sapien
accgagtctagaaggtcgttgaagt

SEQ ID NO: 5715843 - DNA, 25 bp, Homo sapien
agtgtcaaaaaggttgtcgtcacaa

SEQ ID NO: 5715844 - DNA, 25 bp, Homo sapien
ttgtgacgacaacctttttgacact

SEQ ID NO: 5715845 - DNA, 25 bp, Homo sapien
aagagttctactaaagatcgaaaga

SEQ ID NO: 5715846 - DNA, 25 bp, Homo sapien
tctttcgatctttagtagaactctt

SEQ ID NO: 5715847 - DNA, 25 bp, Homo sapien
gatagacataaatccgacgacaaaa

SEQ ID NO: 5715848 - DNA, 25 bp, Homo sapien
ttttgtcgtcggatttatgtctatc

SEQ ID NO: 5715849 - DNA, 25 bp, Homo sapien
taaaatatagactgtgaaagaatac

SEQ ID NO: 5715850 - DNA, 25 bp, Homo sapien
gtattctttcacagtctatatttta

SEQ ID NO: 5715851 - DNA, 25 bp, Homo sapien
tattattaccacttggtcttattgg

SEQ ID NO: 5715852 - DNA, 25 bp, Homo sapien
ccaataagaccaagtggtaataata

SEQ ID NO: 5715853 - DNA, 25 bp, Homo sapien
tcctcagtggggtattttgatcacc

SEQ ID NO: 5715854 - DNA, 25 bp, Homo sapien
ggtgatcaaaataccccactgagga

SEQ ID NO: 5715855 - DNA, 25 bp, Homo sapien
actgattacgtcgaacctctgacct

SEQ ID NO: 5715856 - DNA, 25 bp, Homo sapien
aggtcagaggttcgacgtaatcagt

SEQ ID NO: 5715857 - DNA, 25 bp, Homo sapien
gtacgtctgtagtccattctatccg

SEQ ID NO: 5715858 - DNA, 25 bp, Homo sapien
cggatagaatggactacagacgtac

SEQ ID NO: 5715859 - DNA, 25 bp, Homo sapien
ccccaccagcaggtctgtgtccgtc

SEQ ID NO: 5715860 - DNA, 25 bp, Homo sapien
gacggacacagacctgctggtgggg

SEQ ID NO: 5715861 - DNA, 25 bp, Homo sapien
gatgtcttacttattatggttgacg

SEQ ID NO: 5715862 - DNA, 25 bp, Homo sapien
cgtcaaccataataagtaagacatc

SEQ ID NO: 5715863 - DNA, 25 bp, Homo sapien
gcaacgtaagttaacagagatgtct

SEQ ID NO: 5715864 - DNA, 25 bp, Homo sapien
agacatctctgttaacttacgttgc

SEQ ID NO: 5715865 - DNA, 25 bp, Homo sapien
aaagacagtctgttggttcatccaa

SEQ ID NO: 5715866 - DNA, 25 bp, Homo sapien
ttggatgaaccaacagactgtcttt

SEQ ID NO: 5715867 - DNA, 25 bp, Homo sapien
cgggtccgctcttcgtggccggcac

SEQ ID NO: 5715868 - DNA, 25 bp, Homo sapien
gtgccggccacgaagagcggacccg

SEQ ID NO: 5715869 - DNA, 25 bp, Homo sapien
agtcattgcctttaaaaatacgacc

SEQ ID NO: 5715870 - DNA, 25 bp, Homo sapien
ggtcgtatttttaaaggcaatgact

SEQ ID NO: 5715871 - DNA, 25 bp, Homo sapien
ctctgggaacacatttggaagacat

SEQ ID NO: 5715872 - DNA, 25 bp, Homo sapien
atgtcttccaaatgtgttcccagag

SEQ ID NO: 5715873 - DNA, 25 bp, Homo sapien
agtctccggctctcgtcggtcggca

SEQ ID NO: 5715874 - DNA, 25 bp, Homo sapien
tgccgaccgacgagagccggagact

SEQ ID NO: 5715875 - DNA, 25 bp, Homo sapien
ggggtccgactcaccgctcgcccga

SEQ ID NO: 5715876 - DNA, 25 bp, Homo sapien
tcgggcgagcggtgagtcggacccc

SEQ ID NO: 5715877 - DNA, 25 bp, Homo sapien
tgcctgggcgacgaccgtgtcctgt

SEQ ID NO: 5715878 - DNA, 25 bp, Homo sapien
acaggacacggtcgtcgcccaggca

SEQ ID NO: 5715879 - DNA, 25 bp, Homo sapien
ctttctcgtctcctacgatttacac

SEQ ID NO: 5715880 - DNA, 25 bp, Homo sapien
gtgtaaatcgtaggagacgagaaag

SEQ ID NO: 5715881 - DNA, 25 bp, Homo sapien
atcaccttctaccttcgtgcccagc

SEQ ID NO: 5715882 - DNA, 25 bp, Homo sapien
gctgggcacgaaggtagaaggtgat

SEQ ID NO: 5715883 - DNA, 25 bp, Homo sapien
aaaagagaacatctttcgtcaagta

SEQ ID NO: 5715884 - DNA, 25 bp, Homo sapien
tacttgacgaaagatgttctctttt

SEQ ID NO: 5715885 - DNA, 25 bp, Homo sapien
caccacccctgaacacggaggtcct

SEQ ID NO: 5715886 - DNA, 25 bp, Homo sapien
aggacctccgtgttcaggggtggtg

SEQ ID NO: 5715887 - DNA, 25 bp, Homo sapien
gcgcccggcttcctccgctctccgg

SEQ ID NO: 5715888 - DNA, 25 bp, Homo sapien
ccggagagcggaggaagccgggcgc

SEQ ID NO: 5715889 - DNA, 25 bp, Homo sapien
agcccggagggtctcgcccggcgcc

SEQ ID NO: 5715890 - DNA, 25 bp, Homo sapien
ggcgccgggcgagaccctccgggct

SEQ ID NO: 5715891 - DNA, 25 bp, Homo sapien
cggcttcctccgctctccggcgcga

SEQ ID NO: 5715892 - DNA, 25 bp, Homo sapien
tcgcgccggagagcggaggaagccg

SEQ ID NO: 5715893 - DNA, 25 bp, Homo sapien
tttatattgttcgttgacttctaaa

SEQ ID NO: 5715894 - DNA, 25 bp, Homo sapien
tttagaagtcaacgaacaatataaa

SEQ ID NO: 5715895 - DNA, 25 bp, Homo sapien
aatttatattgttcgttgacttcta

SEQ ID NO: 5715896 - DNA, 25 bp, Homo sapien
tagaagtcaacgaacaatataaatt

SEQ ID NO: 5715897 - DNA, 25 bp, Homo sapien
ccaggcgtggcgctctcccacgccc

SEQ ID NO: 5715898 - DNA, 25 bp, Homo sapien
gggcgtgggagagcgccacgcctgg

SEQ ID NO: 5715899 - DNA, 25 bp, Homo sapien
caggggcaagacgaaccctagtcgt

SEQ ID NO: 5715900 - DNA, 25 bp, Homo sapien
acgactagggttcgtcttgcccctg

SEQ ID NO: 5715901 - DNA, 25 bp, Homo sapien
ctaatctgtacgagagacttatcat

SEQ ID NO: 5715902 - DNA, 25 bp, Homo sapien
atgataagtctctcgtacagattag

SEQ ID NO: 5715903 - DNA, 25 bp, Homo sapien
tcctctccactcctttgcgacgagg

SEQ ID NO: 5715904 - DNA, 25 bp, Homo sapien
cctcgtcgcaaaggagtggagagga

SEQ ID NO: 5715905 - DNA, 25 bp, Homo sapien
ccacggagcctgagtcccgaggacc

SEQ ID NO: 5715906 - DNA, 25 bp, Homo sapien
ggtcctcgggactcaggctccgtgg

SEQ ID NO: 5715907 - DNA, 25 bp, Homo sapien
gtctgtacgatgagacctctcaagg

SEQ ID NO: 5715908 - DNA, 25 bp, Homo sapien
ccttgagaggtctcatcgtacagac

SEQ ID NO: 5715909 - DNA, 25 bp, Homo sapien
cggggccgacgcgtccaccccagac

SEQ ID NO: 5715910 - DNA, 25 bp, Homo sapien
gtctggggtggacgcgtcggccccg

SEQ ID NO: 5715911 - DNA, 25 bp, Homo sapien
ctcgctccgctcccctgcgaccggg

SEQ ID NO: 5715912 - DNA, 25 bp, Homo sapien
cccggtcgcaggggagcggagcgag

SEQ ID NO: 5715913 - DNA, 25 bp, Homo sapien
gaccgcgcagatcgagcgccagtct

SEQ ID NO: 5715914 - DNA, 25 bp, Homo sapien
agactggcgctcgatctgcgcggtc

SEQ ID NO: 5715915 - DNA, 25 bp, Homo sapien
cggaggaaacctcagtagtcatggt

SEQ ID NO: 5715916 - DNA, 25 bp, Homo sapien
accatgactactgaggtttcctccg

SEQ ID NO: 5715917 - DNA, 25 bp, Homo sapien
aaacacatattgtttgtgagttatg

SEQ ID NO: 5715918 - DNA, 25 bp, Homo sapien
cataactcacaaacaatatgtgttt

SEQ ID NO: 5715919 - DNA, 25 bp, Homo sapien
tcatatatgccatttaagagacagt

SEQ ID NO: 5715920 - DNA, 25 bp, Homo sapien
actgtctcttaaatggcatatatga

SEQ ID NO: 5715921 - DNA, 25 bp, Homo sapien
agtaggttacgatcctctagagggt

SEQ ID NO: 5715922 - DNA, 25 bp, Homo sapien
accctctagaggatcgtaacctact

SEQ ID NO: 5715923 - DNA, 25 bp, Homo sapien
gtataatatttcttatgtcataagt

SEQ ID NO: 5715924 - DNA, 25 bp, Homo sapien
acttatgacataagaaatattatac

SEQ ID NO: 5715925 - DNA, 25 bp, Homo sapien
actctaacttaaagatcacctttca

SEQ ID NO: 5715926 - DNA, 25 bp, Homo sapien
tgaaaggtgatctttaagttagagt

SEQ ID NO: 5715927 - DNA, 25 bp, Homo sapien
accttgacccggctccatccacggc

SEQ ID NO: 5715928 - DNA, 25 bp, Homo sapien
gccgtggatggagccgggtcaaggt

SEQ ID NO: 5715929 - DNA, 25 bp, Homo sapien
ctattcctctctcgcctggttcggg

SEQ ID NO: 5715930 - DNA, 25 bp, Homo sapien
cccgaaccaggcgagagaggaatag

SEQ ID NO: 5715931 - DNA, 25 bp, Homo sapien
gaaaactccttataattggaacagg

SEQ ID NO: 5715932 - DNA, 25 bp, Homo sapien
cctgttccaattataaggagttttc

SEQ ID NO: 5715933 - DNA, 25 bp, Homo sapien
agtactataaaaagtttcaactgat

SEQ ID NO: 5715934 - DNA, 25 bp, Homo sapien
atcagttgaaactttttatagtact

SEQ ID NO: 5715935 - DNA, 25 bp, Homo sapien
tatttattatgtctttctctgtttg

SEQ ID NO: 5715936 - DNA, 25 bp, Homo sapien
caaacagagaaagacataataaata

SEQ ID NO: 5715937 - DNA, 25 bp, Homo sapien
atatttattatgtctttctctgttt

SEQ ID NO: 5715938 - DNA, 25 bp, Homo sapien
aaacagagaaagacataataaatat

SEQ ID NO: 5715939 - DNA, 25 bp, Homo sapien
gatatttattatgtctttctctgtt

SEQ ID NO: 5715940 - DNA, 25 bp, Homo sapien
aacagagaaagacataataaatatc

SEQ ID NO: 5715941 - DNA, 25 bp, Homo sapien
tctcttgtcctattctttagaaaaa

SEQ ID NO: 5715942 - DNA, 25 bp, Homo sapien
tttttctaaagaataggacaagaga

SEQ ID NO: 5715943 - DNA, 25 bp, Homo sapien
aaaactatgaaattgtaggaattgt

SEQ ID NO: 5715944 - DNA, 25 bp, Homo sapien
acaattcctacaatttcatagtttt

SEQ ID NO: 5715945 - DNA, 25 bp, Homo sapien
ctggaaccccttcggcgtcatcgtg

SEQ ID NO: 5715946 - DNA, 25 bp, Homo sapien
cacgatgacgccgaaggggttccag

SEQ ID NO: 5715947 - DNA, 25 bp, Homo sapien
gtaaggagacattcggacggtccgc

SEQ ID NO: 5715948 - DNA, 25 bp, Homo sapien
gcggaccgtccgaatgtctccttac

SEQ ID NO: 5715949 - DNA, 25 bp, Homo sapien
cgtaggttgtgaaggagccggtgag

SEQ ID NO: 5715950 - DNA, 25 bp, Homo sapien
ctcaccggctccttcacaacctacg

SEQ ID NO: 5715951 - DNA, 25 bp, Homo sapien
gtagttcgagaaatacctttcgacg

SEQ ID NO: 5715952 - DNA, 25 bp, Homo sapien
cgtcgaaaggtatttctcgaactac

SEQ ID NO: 5715953 - DNA, 25 bp, Homo sapien
cagtgagacgacttctaagtgtaag

SEQ ID NO: 5715954 - DNA, 25 bp, Homo sapien
cttacacttagaagtcgtctcactg

SEQ ID NO: 5715955 - DNA, 25 bp, Homo sapien
cccctgggcgtcgtcctgcggggtg

SEQ ID NO: 5715956 - DNA, 25 bp, Homo sapien
caccccgcaggacgacgcccagggg

SEQ ID NO: 5715957 - DNA, 25 bp, Homo sapien
taaacaggacgactgattaaggacc

SEQ ID NO: 5715958 - DNA, 25 bp, Homo sapien
ggtccttaatcagtcgtcctgttta

SEQ ID NO: 5715959 - DNA, 25 bp, Homo sapien
gtcacctggtgcacgaaaccaaccg

SEQ ID NO: 5715960 - DNA, 25 bp, Homo sapien
cggttggtttcgtgcaccaggtgac

SEQ ID NO: 5715961 - DNA, 25 bp, Homo sapien
agacgtcgccctgggtgcggggggc

SEQ ID NO: 5715962 - DNA, 25 bp, Homo sapien
gccccccgcacccagggcgacgtct

SEQ ID NO: 5715963 - DNA, 25 bp, Homo sapien
gacaaaacgttaactcgcatcaccc

SEQ ID NO: 5715964 - DNA, 25 bp, Homo sapien
gggtgatgcgagttaacgttttgtc

SEQ ID NO: 5715965 - DNA, 25 bp, Homo sapien
agatagtagtgtaattcaagtattt

SEQ ID NO: 5715966 - DNA, 25 bp, Homo sapien
aaatacttgaattacactactatct

SEQ ID NO: 5715967 - DNA, 25 bp, Homo sapien
tagtagtgtaattcaagtatttaca

SEQ ID NO: 5715968 - DNA, 25 bp, Homo sapien
tgtaaatacttgaattacactacta

SEQ ID NO: 5715969 - DNA, 25 bp, Homo sapien
atagtagtgtaattcaagtatttac

SEQ ID NO: 5715970 - DNA, 25 bp, Homo sapien
gtaaatacttgaattacactactat

SEQ ID NO: 5715971 - DNA, 25 bp, Homo sapien
caatttcagtagattgggtaccatt

SEQ ID NO: 5715972 - DNA, 25 bp, Homo sapien
aatggtacccaatctactgaaattg

SEQ ID NO: 5715973 - DNA, 25 bp, Homo sapien
cgccgcgcctccttccccgacggca

SEQ ID NO: 5715974 - DNA, 25 bp, Homo sapien
tgccgtcggggaaggaggcgcggcg

SEQ ID NO: 5715975 - DNA, 25 bp, Homo sapien
ccgccgcgcctccttccccgacggc

SEQ ID NO: 5715976 - DNA, 25 bp, Homo sapien
gccgtcggggaaggaggcgcggcgg

SEQ ID NO: 5715977 - DNA, 25 bp, Homo sapien
acccggcctccgcagcgccgccgcg

SEQ ID NO: 5715978 - DNA, 25 bp, Homo sapien
cgcggcggcgctgcggaggccgggt

SEQ ID NO: 5715979 - DNA, 25 bp, Homo sapien
gccgcgcctccttccccgacggcac

SEQ ID NO: 5715980 - DNA, 25 bp, Homo sapien
gtgccgtcggggaaggaggcgcggc

SEQ ID NO: 5715981 - DNA, 25 bp, Homo sapien
gtagaaacaatatcagaaatagacc

SEQ ID NO: 5715982 - DNA, 25 bp, Homo sapien
ggtctatttctgatattgtttctac

SEQ ID NO: 5715983 - DNA, 25 bp, Homo sapien
tagtgtaatcagtgtgcaacgaact

SEQ ID NO: 5715984 - DNA, 25 bp, Homo sapien
agttcgttgcacactgattacacta

SEQ ID NO: 5715985 - DNA, 25 bp, Homo sapien
agtagagaagcgacatttccggtca

SEQ ID NO: 5715986 - DNA, 25 bp, Homo sapien
tgaccggaaatgtcgcttctctact

SEQ ID NO: 5715987 - DNA, 25 bp, Homo sapien
tagacgttgcccaccaaccgtgacg

SEQ ID NO: 5715988 - DNA, 25 bp, Homo sapien
cgtcacggttggtgggcaacgtcta

SEQ ID NO: 5715989 - DNA, 25 bp, Homo sapien
tcaggacactttgtccccggaacgg

SEQ ID NO: 5715990 - DNA, 25 bp, Homo sapien
ccgttccggggacaaagtgtcctga

SEQ ID NO: 5715991 - DNA, 25 bp, Homo sapien
tatttacattgactccttaacaaga

SEQ ID NO: 5715992 - DNA, 25 bp, Homo sapien
tcttgttaaggagtcaatgtaaata

SEQ ID NO: 5715993 - DNA, 25 bp, Homo sapien
cttagtatgtgcagaaacggaacgt

SEQ ID NO: 5715994 - DNA, 25 bp, Homo sapien
acgttccgtttctgcacatactaag

SEQ ID NO: 5715995 - DNA, 25 bp, Homo sapien
gggtccagactccacggttgccgac

SEQ ID NO: 5715996 - DNA, 25 bp, Homo sapien
gtcggcaaccgtggagtctggaccc

SEQ ID NO: 5715997 - DNA, 25 bp, Homo sapien
gagacgagcaaagttggtatttacc

SEQ ID NO: 5715998 - DNA, 25 bp, Homo sapien
ggtaaataccaactttgctcgtctc

SEQ ID NO: 5715999 - DNA, 25 bp, Homo sapien
gggaggccccggcaccctagaccac

SEQ ID NO: 5716000 - DNA, 25 bp, Homo sapien
gtggtctagggtgccggggcctccc

SEQ ID NO: 5716001 - DNA, 25 bp, Homo sapien
ttttcgatggggaccctctgtgcag

SEQ ID NO: 5716002 - DNA, 25 bp, Homo sapien
ctgcacagagggtccccatcgaaaa

SEQ ID NO: 5716003 - DNA, 25 bp, Homo sapien
cgccgtccctcgagggcccgtcgac

SEQ ID NO: 5716004 - DNA, 25 bp, Homo sapien
gtcgacgggccctcgagggacggcg

SEQ ID NO: 5716005 - DNA, 25 bp, Homo sapien
cgtcactgtgacaggcacatctgca

SEQ ID NO: 5716006 - DNA, 25 bp, Homo sapien
tgcagatgtgcctgtcacagtgacg

SEQ ID NO: 5716007 - DNA, 25 bp, Homo sapien
tacttcatattgatagaacaaaata

SEQ ID NO: 5716008 - DNA, 25 bp, Homo sapien
tattttgttctatcaatatgaagta

SEQ ID NO: 5716009 - DNA, 25 bp, Homo sapien
cgtcgccgtctgcggggccgggaac

SEQ ID NO: 5716010 - DNA, 25 bp, Homo sapien
gttcccggccccgcagacggcgacg

SEQ ID NO: 5716011 - DNA, 25 bp, Homo sapien
ttggctcgcgcactgcgtttcgccg

SEQ ID NO: 5716012 - DNA, 25 bp, Homo sapien
cggcgaaacgcagtgcgcgagccaa

SEQ ID NO: 5716013 - DNA, 25 bp, Homo sapien
acatcgaaaggtcctcaagataacg

SEQ ID NO: 5716014 - DNA, 25 bp, Homo sapien
cgttatcttgaggacctttcgatgt

SEQ ID NO: 5716015 - DNA, 25 bp, Homo sapien
gagttgtattccgaaagccatttac

SEQ ID NO: 5716016 - DNA, 25 bp, Homo sapien
gtaaatggctttcggaatacaactc

SEQ ID NO: 5716017 - DNA, 25 bp, Homo sapien
gtcaatccattgacttcggctttcc

SEQ ID NO: 5716018 - DNA, 25 bp, Homo sapien
ggaaagccgaagtcaatggattgac

SEQ ID NO: 5716019 - DNA, 25 bp, Homo sapien
aaaattatattggttcacgacaagt

SEQ ID NO: 5716020 - DNA, 25 bp, Homo sapien
acttgtcgtgaaccaatataatttt

SEQ ID NO: 5716021 - DNA, 25 bp, Homo sapien
gtaaaaattatattggttcacgaca

SEQ ID NO: 5716022 - DNA, 25 bp, Homo sapien
tgtcgtgaaccaatataatttttac

SEQ ID NO: 5716023 - DNA, 25 bp, Homo sapien
gtgacttcaactgtcactagaagta

SEQ ID NO: 5716024 - DNA, 25 bp, Homo sapien
tacttctagtgacagttgaagtcac

SEQ ID NO: 5716025 - DNA, 25 bp, Homo sapien
tcctacttgtcggtaggtccgtctc

SEQ ID NO: 5716026 - DNA, 25 bp, Homo sapien
gagacggacctaccgacaagtagga

SEQ ID NO: 5716027 - DNA, 25 bp, Homo sapien
attcggtacatgacaccacgggtag

SEQ ID NO: 5716028 - DNA, 25 bp, Homo sapien
ctacccgtggtgtcatgtaccgaat

SEQ ID NO: 5716029 - DNA, 25 bp, Homo sapien
tcctcgtcgggtgtcgccgcaggcc

SEQ ID NO: 5716030 - DNA, 25 bp, Homo sapien
ggcctgcggcgacacccgacgagga

SEQ ID NO: 5716031 - DNA, 25 bp, Homo sapien
gaggtttcggtgatgactcgccctt

SEQ ID NO: 5716032 - DNA, 25 bp, Homo sapien
aagggcgagtcatcaccgaaacctc

SEQ ID NO: 5716033 - DNA, 25 bp, Homo sapien
gcggtccgggtctggcgacctatcc

SEQ ID NO: 5716034 - DNA, 25 bp, Homo sapien
ggataggtcgccagacccggaccgc

SEQ ID NO: 5716035 - DNA, 25 bp, Homo sapien
caaacgctttcagcaggcggtccgg

SEQ ID NO: 5716036 - DNA, 25 bp, Homo sapien
ccggaccgcctgctgaaagcgtttg

SEQ ID NO: 5716037 - DNA, 25 bp, Homo sapien
ccccacacaccctccgtcctacgag

SEQ ID NO: 5716038 - DNA, 25 bp, Homo sapien
ctcgtaggacggagggtgtgtgggg

SEQ ID NO: 5716039 - DNA, 25 bp, Homo sapien
tggagattacagtcaaggttaccgt

SEQ ID NO: 5716040 - DNA, 25 bp, Homo sapien
acggtaaccttgactgtaatctcca

SEQ ID NO: 5716041 - DNA, 25 bp, Homo sapien
tctccgggagccttccactgacagt

SEQ ID NO: 5716042 - DNA, 25 bp, Homo sapien
actgtcagtggaaggctcccggaga

SEQ ID NO: 5716043 - DNA, 25 bp, Homo sapien
ccgtgaccgccgagatagtccgact

SEQ ID NO: 5716044 - DNA, 25 bp, Homo sapien
agtcggactatctcggcggtcacgg

SEQ ID NO: 5716045 - DNA, 25 bp, Homo sapien
cacggctataccactgttactaagg

SEQ ID NO: 5716046 - DNA, 25 bp, Homo sapien
ccttagtaacagtggtatagccgtg

SEQ ID NO: 5716047 - DNA, 25 bp, Homo sapien
ggtgtacgtctgagatgacggaact

SEQ ID NO: 5716048 - DNA, 25 bp, Homo sapien
agttccgtcatctcagacgtacacc

SEQ ID NO: 5716049 - DNA, 25 bp, Homo sapien
cggaccgccgtccgtgacaggggag

SEQ ID NO: 5716050 - DNA, 25 bp, Homo sapien
ctcccctgtcacggacggcggtccg

SEQ ID NO: 5716051 - DNA, 25 bp, Homo sapien
gtacgtactcgtgctcggtggtaaa

SEQ ID NO: 5716052 - DNA, 25 bp, Homo sapien
tttaccaccgagcacgagtacgtac

SEQ ID NO: 5716053 - DNA, 25 bp, Homo sapien
caaccaagagtatctatgataacaa

SEQ ID NO: 5716054 - DNA, 25 bp, Homo sapien
ttgttatcatagatactcttggttg

SEQ ID NO: 5716055 - DNA, 25 bp, Homo sapien
ggaccgagtgcatcgtcgttcagac

SEQ ID NO: 5716056 - DNA, 25 bp, Homo sapien
gtctgaacgacgatgcactcggtcc

SEQ ID NO: 5716057 - DNA, 25 bp, Homo sapien
cgttcgaggtgagtatctttaacac

SEQ ID NO: 5716058 - DNA, 25 bp, Homo sapien
gtgttaaagatactcacctcgaacg

SEQ ID NO: 5716059 - DNA, 25 bp, Homo sapien
tcggcgtcgagggaaagctgtccag

SEQ ID NO: 5716060 - DNA, 25 bp, Homo sapien
ctggacagctttccctcgacgccga

SEQ ID NO: 5716061 - DNA, 25 bp, Homo sapien
ttcggttcggggatgcccctcgacg

SEQ ID NO: 5716062 - DNA, 25 bp, Homo sapien
cgtcgaggggcatccccgaaccgaa

SEQ ID NO: 5716063 - DNA, 25 bp, Homo sapien
tctgataaccaatacataagataaa

SEQ ID NO: 5716064 - DNA, 25 bp, Homo sapien
tttatcttatgtattggttatcaga

SEQ ID NO: 5716065 - DNA, 25 bp, Homo sapien
gtcgggtttcactcagtccagaacc

SEQ ID NO: 5716066 - DNA, 25 bp, Homo sapien
ggttctggactgagtgaaacccgac

SEQ ID NO: 5716067 - DNA, 25 bp, Homo sapien
tcaacccgtctcctcgcgggcgcgg

SEQ ID NO: 5716068 - DNA, 25 bp, Homo sapien
ccgcgcccgcgaggagacgggttga

SEQ ID NO: 5716069 - DNA, 25 bp, Homo sapien
ggacctcggcgacgacgacgccgac

SEQ ID NO: 5716070 - DNA, 25 bp, Homo sapien
gtcggcgtcgtcgtcgccgaggtcc

SEQ ID NO: 5716071 - DNA, 25 bp, Homo sapien
aaggttcttggctccgcaagaggag

SEQ ID NO: 5716072 - DNA, 25 bp, Homo sapien
ctcctcttgcggagccaagaacctt

SEQ ID NO: 5716073 - DNA, 25 bp, Homo sapien
gggactcaccgggttcccagagaag

SEQ ID NO: 5716074 - DNA, 25 bp, Homo sapien
cttctctgggaacccggtgagtccc

SEQ ID NO: 5716075 - DNA, 25 bp, Homo sapien
gacggcggcgaggccagccgggagg

SEQ ID NO: 5716076 - DNA, 25 bp, Homo sapien
cctcccggctggcctcgccgccgtc

SEQ ID NO: 5716077 - DNA, 25 bp, Homo sapien
cagcgggccgtgaggagtggaagtg

SEQ ID NO: 5716078 - DNA, 25 bp, Homo sapien
cacttccactcctcacggcccgctg

SEQ ID NO: 5716079 - DNA, 25 bp, Homo sapien
ctacctataggagggagaaacacgg

SEQ ID NO: 5716080 - DNA, 25 bp, Homo sapien
ccgtgtttctccctcctataggtag

SEQ ID NO: 5716081 - DNA, 25 bp, Homo sapien
ttatctagtgaaaagagctaaaacg

SEQ ID NO: 5716082 - DNA, 25 bp, Homo sapien
cgttttagctcttttcactagataa

SEQ ID NO: 5716083 - DNA, 25 bp, Homo sapien
caggtccagtcccaccacggtcgac

SEQ ID NO: 5716084 - DNA, 25 bp, Homo sapien
gtcgaccgtggtgggactggacctg

SEQ ID NO: 5716085 - DNA, 25 bp, Homo sapien
cgtcggtagccacccctggtcgagt

SEQ ID NO: 5716086 - DNA, 25 bp, Homo sapien
actcgaccaggggtggctaccgacg

SEQ ID NO: 5716087 - DNA, 25 bp, Homo sapien
actttttctgcaacgaacattttat

SEQ ID NO: 5716088 - DNA, 25 bp, Homo sapien
ataaaatgttcgttgcagaaaaagt

SEQ ID NO: 5716089 - DNA, 25 bp, Homo sapien
tagaaggcgggcagacaccagcccc

SEQ ID NO: 5716090 - DNA, 25 bp, Homo sapien
ggggctggtgtctgcccgccttcta

SEQ ID NO: 5716091 - DNA, 25 bp, Homo sapien
gaccgtcgacctgtcggcactgtga

SEQ ID NO: 5716092 - DNA, 25 bp, Homo sapien
tcacagtgccgacaggtcgacggtc

SEQ ID NO: 5716093 - DNA, 25 bp, Homo sapien
aactattatcgatagacctcttaaa

SEQ ID NO: 5716094 - DNA, 25 bp, Homo sapien
tttaagaggtctatcgataatagtt

SEQ ID NO: 5716095 - DNA, 25 bp, Homo sapien
tattatcgatagacctcttaaattt

SEQ ID NO: 5716096 - DNA, 25 bp, Homo sapien
aaatttaagaggtctatcgataata

SEQ ID NO: 5716097 - DNA, 25 bp, Homo sapien
attagatgaatttagaggaacacat

SEQ ID NO: 5716098 - DNA, 25 bp, Homo sapien
atgtgttcctctaaattcatctaat

SEQ ID NO: 5716099 - DNA, 25 bp, Homo sapien
ggtaatatcaaaccacttggtcacg

SEQ ID NO: 5716100 - DNA, 25 bp, Homo sapien
cgtgaccaagtggtttgatattacc

SEQ ID NO: 5716101 - DNA, 25 bp, Homo sapien
gatctccccatgtctaccaacggag

SEQ ID NO: 5716102 - DNA, 25 bp, Homo sapien
ctccgttggtagacatggggagatc

SEQ ID NO: 5716103 - DNA, 25 bp, Homo sapien
gactcacagggaccgacaggtacga

SEQ ID NO: 5716104 - DNA, 25 bp, Homo sapien
tcgtacctgtcggtccctgtgagtc

SEQ ID NO: 5716105 - DNA, 25 bp, Homo sapien
gcccctctggccccggccctcgacg

SEQ ID NO: 5716106 - DNA, 25 bp, Homo sapien
cgtcgagggccggggccagaggggc

SEQ ID NO: 5716107 - DNA, 25 bp, Homo sapien
gtcccggtgtctgggtgtcaggtcg

SEQ ID NO: 5716108 - DNA, 25 bp, Homo sapien
cgacctgacacccagacaccgggac

SEQ ID NO: 5716109 - DNA, 25 bp, Homo sapien
ggtgccgtaggcctcccctgagccc

SEQ ID NO: 5716110 - DNA, 25 bp, Homo sapien
gggctcaggggaggcctacggcacc

SEQ ID NO: 5716111 - DNA, 25 bp, Homo sapien
gtgtctcccatcgtgccgaaccgtg

SEQ ID NO: 5716112 - DNA, 25 bp, Homo sapien
cacggttcggcacgatgggagacac

SEQ ID NO: 5716113 - DNA, 25 bp, Homo sapien
gtcttgttccgtgaactctggttca

SEQ ID NO: 5716114 - DNA, 25 bp, Homo sapien
tgaaccagagttcacggaacaagac

SEQ ID NO: 5716115 - DNA, 25 bp, Homo sapien
gggttgcacgtgtaccgagggagcc

SEQ ID NO: 5716116 - DNA, 25 bp, Homo sapien
ggctccctcggtacacgtgcaaccc

SEQ ID NO: 5716117 - DNA, 25 bp, Homo sapien
cactcaatagtaaggttccaaggac

SEQ ID NO: 5716118 - DNA, 25 bp, Homo sapien
gtccttggaaccttactattgagtg

SEQ ID NO: 5716119 - DNA, 25 bp, Homo sapien
tccgtgtcccttctatgggtgttag

SEQ ID NO: 5716120 - DNA, 25 bp, Homo sapien
ctaacacccatagaagggacacgga

SEQ ID NO: 5716121 - DNA, 25 bp, Homo sapien
cttcggtccggcgagacgaaggtcc

SEQ ID NO: 5716122 - DNA, 25 bp, Homo sapien
ggaccttcgtctcgccggaccgaag

SEQ ID NO: 5716123 - DNA, 25 bp, Homo sapien
aactgacaaagactacgtatccgac

SEQ ID NO: 5716124 - DNA, 25 bp, Homo sapien
gtcggatacgtagtctttgtcagtt

SEQ ID NO: 5716125 - DNA, 25 bp, Homo sapien
ctcctgaccgccggtgtctcgtccc

SEQ ID NO: 5716126 - DNA, 25 bp, Homo sapien
gggacgagacaccggcggtcaggag

SEQ ID NO: 5716127 - DNA, 25 bp, Homo sapien
gaccctctcctgaccgccggtgtct

SEQ ID NO: 5716128 - DNA, 25 bp, Homo sapien
agacaccggcggtcaggagagggtc

SEQ ID NO: 5716129 - DNA, 25 bp, Homo sapien
aataataacgactatgacaatatga

SEQ ID NO: 5716130 - DNA, 25 bp, Homo sapien
tcatattgtcatagtcgttattatt

SEQ ID NO: 5716131 - DNA, 25 bp, Homo sapien
atctcgtgccgagtgtttctgtcgt

SEQ ID NO: 5716132 - DNA, 25 bp, Homo sapien
acgacagaaacactcggcacgagat

SEQ ID NO: 5716133 - DNA, 25 bp, Homo sapien
acagtccgtcaaataagtgaaaatt

SEQ ID NO: 5716134 - DNA, 25 bp, Homo sapien
aattttcacttatttgacggactgt

SEQ ID NO: 5716135 - DNA, 25 bp, Homo sapien
ggtatccttcatccaagataaacgt

SEQ ID NO: 5716136 - DNA, 25 bp, Homo sapien
acgtttatcttggatgaaggatacc

SEQ ID NO: 5716137 - DNA, 25 bp, Homo sapien
taaggctcaagattcagtgtttagc

SEQ ID NO: 5716138 - DNA, 25 bp, Homo sapien
gctaaacactgaatcttgagcctta

SEQ ID NO: 5716139 - DNA, 25 bp, Homo sapien
cggctcggtacgccctacggcccac

SEQ ID NO: 5716140 - DNA, 25 bp, Homo sapien
gtgggccgtagggcgtaccgagccg

SEQ ID NO: 5716141 - DNA, 25 bp, Homo sapien
actcggctcggtacgccctacggcc

SEQ ID NO: 5716142 - DNA, 25 bp, Homo sapien
ggccgtagggcgtaccgagccgagt

SEQ ID NO: 5716143 - DNA, 25 bp, Homo sapien
gccgccctcgcgcgtgggccccggg

SEQ ID NO: 5716144 - DNA, 25 bp, Homo sapien
cccggggcccacgcgcgagggcggc

SEQ ID NO: 5716145 - DNA, 25 bp, Homo sapien
gcgccgccctcgcgcgtgggccccg

SEQ ID NO: 5716146 - DNA, 25 bp, Homo sapien
cggggcccacgcgcgagggcggcgc

SEQ ID NO: 5716147 - DNA, 25 bp, Homo sapien
agataaagactcagatatttatagg

SEQ ID NO: 5716148 - DNA, 25 bp, Homo sapien
cctataaatatctgagtctttatct

SEQ ID NO: 5716149 - DNA, 25 bp, Homo sapien
gaattaagataaagactcagatatt

SEQ ID NO: 5716150 - DNA, 25 bp, Homo sapien
aatatctgagtctttatcttaattc

SEQ ID NO: 5716151 - DNA, 25 bp, Homo sapien
ccgtcagagtccctgaacgagagac

SEQ ID NO: 5716152 - DNA, 25 bp, Homo sapien
gtctctcgttcagggactctgacgg

SEQ ID NO: 5716153 - DNA, 25 bp, Homo sapien
gagttctttgaagtcgagggaagaa

SEQ ID NO: 5716154 - DNA, 25 bp, Homo sapien
ttcttccctcgacttcaaagaactc

SEQ ID NO: 5716155 - DNA, 25 bp, Homo sapien
ctttaatatatcttcagtagtctca

SEQ ID NO: 5716156 - DNA, 25 bp, Homo sapien
tgagactactgaagatatattaaag

SEQ ID NO: 5716157 - DNA, 25 bp, Homo sapien
aatgagtctcggttgtgactcaccc

SEQ ID NO: 5716158 - DNA, 25 bp, Homo sapien
gggtgagtcacaaccgagactcatt

SEQ ID NO: 5716159 - DNA, 25 bp, Homo sapien
cctctatgtcgggttccaccaagta

SEQ ID NO: 5716160 - DNA, 25 bp, Homo sapien
tacttggtggaacccgacatagagg

SEQ ID NO: 5716161 - DNA, 25 bp, Homo sapien
atttattataaatcacgacatgtag

SEQ ID NO: 5716162 - DNA, 25 bp, Homo sapien
ctacatgtcgtgatttataataaat

SEQ ID NO: 5716163 - DNA, 25 bp, Homo sapien
taatagaaacttcaatgaactaaat

SEQ ID NO: 5716164 - DNA, 25 bp, Homo sapien
atttagttcattgaagtttctatta

SEQ ID NO: 5716165 - DNA, 25 bp, Homo sapien
ccttcttactcacgtaatagagtag

SEQ ID NO: 5716166 - DNA, 25 bp, Homo sapien
ctactctattacgtgagtaagaagg

SEQ ID NO: 5716167 - DNA, 25 bp, Homo sapien
gtcgacgtgtctcggccgccctctc

SEQ ID NO: 5716168 - DNA, 25 bp, Homo sapien
gagagggcggccgagacacgtcgac

SEQ ID NO: 5716169 - DNA, 25 bp, Homo sapien
tagtcgacgtgtctcggccgccctc

SEQ ID NO: 5716170 - DNA, 25 bp, Homo sapien
gagggcggccgagacacgtcgacta

SEQ ID NO: 5716171 - DNA, 25 bp, Homo sapien
ggtgtcgggtagtaatttgtcgagg

SEQ ID NO: 5716172 - DNA, 25 bp, Homo sapien
cctcgacaaattactacccgacacc

SEQ ID NO: 5716173 - DNA, 25 bp, Homo sapien
gcgggttccgcggcccgcggtcgag

SEQ ID NO: 5716174 - DNA, 25 bp, Homo sapien
ctcgaccgcgggccgcggaacccgc

SEQ ID NO: 5716175 - DNA, 25 bp, Homo sapien
tgatgtagattttatcaagaccaac

SEQ ID NO: 5716176 - DNA, 25 bp, Homo sapien
gttggtcttgataaaatctacatca

SEQ ID NO: 5716177 - DNA, 25 bp, Homo sapien
atattagttttcaaaagtcactaag

SEQ ID NO: 5716178 - DNA, 25 bp, Homo sapien
cttagtgacttttgaaaactaatat

SEQ ID NO: 5716179 - DNA, 25 bp, Homo sapien
gtcgtgtcgagcgacgtgtcggcgg

SEQ ID NO: 5716180 - DNA, 25 bp, Homo sapien
ccgccgacacgtcgctcgacacgac

SEQ ID NO: 5716181 - DNA, 25 bp, Homo sapien
cgaccgggccctgacgtgtcggcgg

SEQ ID NO: 5716182 - DNA, 25 bp, Homo sapien
ccgccgacacgtcagggcccggtcg

SEQ ID NO: 5716183 - DNA, 25 bp, Homo sapien
aggacttagtttcgtcgttggactg

SEQ ID NO: 5716184 - DNA, 25 bp, Homo sapien
cagtccaacgacgaaactaagtcct

SEQ ID NO: 5716185 - DNA, 25 bp, Homo sapien
ggagtcacgaggggtatcggactgt

SEQ ID NO: 5716186 - DNA, 25 bp, Homo sapien
acagtccgatacccctcgtgactcc

SEQ ID NO: 5716187 - DNA, 25 bp, Homo sapien
tactcgatcaatatgcccatcccag

SEQ ID NO: 5716188 - DNA, 25 bp, Homo sapien
ctgggatgggcatattgatcgagta

SEQ ID NO: 5716189 - DNA, 25 bp, Homo sapien
acatgaatgactttagtggttgact

SEQ ID NO: 5716190 - DNA, 25 bp, Homo sapien
agtcaaccactaaagtcattcatgt

SEQ ID NO: 5716191 - DNA, 25 bp, Homo sapien
gatacctttgtctatataaatattt

SEQ ID NO: 5716192 - DNA, 25 bp, Homo sapien
aaatatttatatagacaaaggtatc

SEQ ID NO: 5716193 - DNA, 25 bp, Homo sapien
aaagagtgattgtttctgaaacaac

SEQ ID NO: 5716194 - DNA, 25 bp, Homo sapien
gttgtttcagaaacaatcactcttt

SEQ ID NO: 5716195 - DNA, 25 bp, Homo sapien
ggtaacaggtgaccctaaaaagaca

SEQ ID NO: 5716196 - DNA, 25 bp, Homo sapien
tgtctttttagggtcacctgttacc

SEQ ID NO: 5716197 - DNA, 25 bp, Homo sapien
aaaagtagtccagattaaaacatga

SEQ ID NO: 5716198 - DNA, 25 bp, Homo sapien
tcatgttttaatctggactactttt

SEQ ID NO: 5716199 - DNA, 25 bp, Homo sapien
gtactaaaaagagtttgcctaagaa

SEQ ID NO: 5716200 - DNA, 25 bp, Homo sapien
ttcttaggcaaactctttttagtac

SEQ ID NO: 5716201 - DNA, 25 bp, Homo sapien
cgacgacggtgttaatcgaactaag

SEQ ID NO: 5716202 - DNA, 25 bp, Homo sapien
cttagttcgattaacaccgtcgtcg

SEQ ID NO: 5716203 - DNA, 25 bp, Homo sapien
agtcacggtttacgtatcgtaggga

SEQ ID NO: 5716204 - DNA, 25 bp, Homo sapien
tccctacgatacgtaaaccgtgact

SEQ ID NO: 5716205 - DNA, 25 bp, Homo sapien
cgacccagcaaggataaacaaagtt

SEQ ID NO: 5716206 - DNA, 25 bp, Homo sapien
aactttgtttatccttgctgggtcg

SEQ ID NO: 5716207 - DNA, 25 bp, Homo sapien
ggtactagttttggcagacgaccca

SEQ ID NO: 5716208 - DNA, 25 bp, Homo sapien
tgggtcgtctgccaaaactagtacc

SEQ ID NO: 5716209 - DNA, 25 bp, Homo sapien
tagaaattataatggtacctgtaat

SEQ ID NO: 5716210 - DNA, 25 bp, Homo sapien
attacaggtaccattataatttcta

SEQ ID NO: 5716211 - DNA, 25 bp, Homo sapien
ccggttatcccgttgagtatcgacc

SEQ ID NO: 5716212 - DNA, 25 bp, Homo sapien
ggtcgatactcaacgggataaccgg

SEQ ID NO: 5716213 - DNA, 25 bp, Homo sapien
cccgtcggcaggagcataggtcaca

SEQ ID NO: 5716214 - DNA, 25 bp, Homo sapien
tgtgacctatgctcctgccgacggg

SEQ ID NO: 5716215 - DNA, 25 bp, Homo sapien
aaaagacgtttgatactagtgaaat

SEQ ID NO: 5716216 - DNA, 25 bp, Homo sapien
atttcactagtatcaaacgtctttt

SEQ ID NO: 5716217 - DNA, 25 bp, Homo sapien
ggtcgcgggtgcactgaaggaggtc

SEQ ID NO: 5716218 - DNA, 25 bp, Homo sapien
gacctccttcagtgcacccgcgacc

SEQ ID NO: 5716219 - DNA, 25 bp, Homo sapien
gtatcgaaacactgagggccgtaag

SEQ ID NO: 5716220 - DNA, 25 bp, Homo sapien
cttacggccctcagtgtttcgatac

SEQ ID NO: 5716221 - DNA, 25 bp, Homo sapien
ccggcgtgctactcggccggagcct

SEQ ID NO: 5716222 - DNA, 25 bp, Homo sapien
aggctccggccgagtagcacgccgg

SEQ ID NO: 5716223 - DNA, 25 bp, Homo sapien
cgagtcataatgattcaacgaataa

SEQ ID NO: 5716224 - DNA, 25 bp, Homo sapien
ttattcgttgaatcattatgactcg

SEQ ID NO: 5716225 - DNA, 25 bp, Homo sapien
catgtgcgtccggggtgcacacggg

SEQ ID NO: 5716226 - DNA, 25 bp, Homo sapien
cccgtgtgcaccccggacgcacatg

SEQ ID NO: 5716227 - DNA, 25 bp, Homo sapien
acacacggcaccagaggtctggacg

SEQ ID NO: 5716228 - DNA, 25 bp, Homo sapien
cgtccagacctctggtgccgtgtgt

SEQ ID NO: 5716229 - DNA, 25 bp, Homo sapien
aatcataaacggaagtcgataaaaa

SEQ ID NO: 5716230 - DNA, 25 bp, Homo sapien
tttttatcgacttccgtttatgatt

SEQ ID NO: 5716231 - DNA, 25 bp, Homo sapien
tggtaatttaacatcattaccatat

SEQ ID NO: 5716232 - DNA, 25 bp, Homo sapien
atatggtaatgatgttaaattacca

SEQ ID NO: 5716233 - DNA, 25 bp, Homo sapien
tccccgacgtgtttcccggcacagt

SEQ ID NO: 5716234 - DNA, 25 bp, Homo sapien
actgtgccgggaaacacgtcgggga

SEQ ID NO: 5716235 - DNA, 25 bp, Homo sapien
tcacggcgcccgtcgtgaggtcctg

SEQ ID NO: 5716236 - DNA, 25 bp, Homo sapien
caggacctcacgacgggcgccgtga

SEQ ID NO: 5716237 - DNA, 25 bp, Homo sapien
gacagaaaccccatccatgccagtt

SEQ ID NO: 5716238 - DNA, 25 bp, Homo sapien
aactggcatggatggggtttctgtc

SEQ ID NO: 5716239 - DNA, 25 bp, Homo sapien
cattattttagacagtgttacatct

SEQ ID NO: 5716240 - DNA, 25 bp, Homo sapien
agatgtaacactgtctaaaataatg

SEQ ID NO: 5716241 - DNA, 25 bp, Homo sapien
aatctacacttaatttggaaataag

SEQ ID NO: 5716242 - DNA, 25 bp, Homo sapien
cttatttccaaattaagtgtagatt

SEQ ID NO: 5716243 - DNA, 25 bp, Homo sapien
taccactgccactgtccttaacgag

SEQ ID NO: 5716244 - DNA, 25 bp, Homo sapien
ctcgttaaggacagtggcagtggta

SEQ ID NO: 5716245 - DNA, 25 bp, Homo sapien
gagaccccgggcacgtctcgagggt

SEQ ID NO: 5716246 - DNA, 25 bp, Homo sapien
accctcgagacgtgcccggggtctc

SEQ ID NO: 5716247 - DNA, 25 bp, Homo sapien
gtaaagagttggacaaaaataacat

SEQ ID NO: 5716248 - DNA, 25 bp, Homo sapien
atgttatttttgtccaactctttac

SEQ ID NO: 5716249 - DNA, 25 bp, Homo sapien
cttacttagagaacgtgaggtagat

SEQ ID NO: 5716250 - DNA, 25 bp, Homo sapien
atctacctcacgttctctaagtaag

SEQ ID NO: 5716251 - DNA, 25 bp, Homo sapien
gtactttcacttaatcgtctttgta

SEQ ID NO: 5716252 - DNA, 25 bp, Homo sapien
tacaaagacgattaagtgaaagtac

SEQ ID NO: 5716253 - DNA, 25 bp, Homo sapien
cctcgacacccgtccagtcgaaggg

SEQ ID NO: 5716254 - DNA, 25 bp, Homo sapien
cccttcgactggacgggtgtcgagg

SEQ ID NO: 5716255 - DNA, 25 bp, Homo sapien
aaggtctattcgttccggagggtga

SEQ ID NO: 5716256 - DNA, 25 bp, Homo sapien
tcaccctccggaacgaatagacctt

SEQ ID NO: 5716257 - DNA, 25 bp, Homo sapien
cgacggcccgtgtgccggcggccga

SEQ ID NO: 5716258 - DNA, 25 bp, Homo sapien
tcggccgccggcacacgggccgtcg

SEQ ID NO: 5716259 - DNA, 25 bp, Homo sapien
cattctggaataaacgataccgtat

SEQ ID NO: 5716260 - DNA, 25 bp, Homo sapien
atacggtatcgtttattccagaatg

SEQ ID NO: 5716261 - DNA, 25 bp, Homo sapien
ctaatattagacaatgggtattaaa

SEQ ID NO: 5716262 - DNA, 25 bp, Homo sapien
tttaatacccattgtctaatattag

SEQ ID NO: 5716263 - DNA, 25 bp, Homo sapien
caataattcaactaacgataaacgt

SEQ ID NO: 5716264 - DNA, 25 bp, Homo sapien
acgtttatcgttagttgaattattg

SEQ ID NO: 5716265 - DNA, 25 bp, Homo sapien
aatttaactaatatacaagacattg

SEQ ID NO: 5716266 - DNA, 25 bp, Homo sapien
caatgtcttgtatattagttaaatt

SEQ ID NO: 5716267 - DNA, 25 bp, Homo sapien
tgtattgtcattattgactcagact

SEQ ID NO: 5716268 - DNA, 25 bp, Homo sapien
agtctgagtcaataatgacaataca

SEQ ID NO: 5716269 - DNA, 25 bp, Homo sapien
gacaaagttctcacgtcagaggtaa

SEQ ID NO: 5716270 - DNA, 25 bp, Homo sapien
ttacctctgacgtgagaactttgtc

SEQ ID NO: 5716271 - DNA, 25 bp, Homo sapien
aatatccttctgtcgttatcgtaga

SEQ ID NO: 5716272 - DNA, 25 bp, Homo sapien
tctacgataacgacagaaggatatt

SEQ ID NO: 5716273 - DNA, 25 bp, Homo sapien
actggagacgcctgaagtacagagt

SEQ ID NO: 5716274 - DNA, 25 bp, Homo sapien
actctgtacttcaggcgtctccagt

SEQ ID NO: 5716275 - DNA, 25 bp, Homo sapien
ttttatcttcatgacacaattctgt

SEQ ID NO: 5716276 - DNA, 25 bp, Homo sapien
acagaattgtgtcatgaagataaaa

SEQ ID NO: 5716277 - DNA, 25 bp, Homo sapien
ttgtcggtgaccttaacggctgccc

SEQ ID NO: 5716278 - DNA, 25 bp, Homo sapien
gggcagccgttaaggtcaccgacaa

SEQ ID NO: 5716279 - DNA, 25 bp, Homo sapien
tccggggcgggtagtcgtacgcctc

SEQ ID NO: 5716280 - DNA, 25 bp, Homo sapien
gaggcgtacgactacccgccccgga

SEQ ID NO: 5716281 - DNA, 25 bp, Homo sapien
aaactgtaactaggagtatagggag

SEQ ID NO: 5716282 - DNA, 25 bp, Homo sapien
ctccctatactcctagttacagttt

SEQ ID NO: 5716283 - DNA, 25 bp, Homo sapien
gagccgtcgtggcaggtggtgtcgg

SEQ ID NO: 5716284 - DNA, 25 bp, Homo sapien
ccgacaccacctgccacgacggctc

SEQ ID NO: 5716285 - DNA, 25 bp, Homo sapien
cgcggcggcggcaccccgaagagag

SEQ ID NO: 5716286 - DNA, 25 bp, Homo sapien
ctctcttcggggtgccgccgccgcg

SEQ ID NO: 5716287 - DNA, 25 bp, Homo sapien
actagagaaaggaataagttcttta

SEQ ID NO: 5716288 - DNA, 25 bp, Homo sapien
taaagaacttattcctttctctagt

SEQ ID NO: 5716289 - DNA, 25 bp, Homo sapien
caacggtcgtagcagtacagcaaac

SEQ ID NO: 5716290 - DNA, 25 bp, Homo sapien
gtttgctgtactgctacgaccgttg

SEQ ID NO: 5716291 - DNA, 25 bp, Homo sapien
gagacctcctacggtagcccaccga

SEQ ID NO: 5716292 - DNA, 25 bp, Homo sapien
tcggtgggctaccgtaggaggtctc

SEQ ID NO: 5716293 - DNA, 25 bp, Homo sapien
ccgtgtccccactctgagtacgaaa

SEQ ID NO: 5716294 - DNA, 25 bp, Homo sapien
tttcgtactcagagtggggacacgg

SEQ ID NO: 5716295 - DNA, 25 bp, Homo sapien
agagtaactagtattagaggtcccg

SEQ ID NO: 5716296 - DNA, 25 bp, Homo sapien
cgggacctctaatactagttactct

SEQ ID NO: 5716297 - DNA, 25 bp, Homo sapien
ggaaacttctccaggatgactcatt

SEQ ID NO: 5716298 - DNA, 25 bp, Homo sapien
aatgagtcatcctggagaagtttcc

SEQ ID NO: 5716299 - DNA, 25 bp, Homo sapien
tcacttcagcgaccaaggtgggttc

SEQ ID NO: 5716300 - DNA, 25 bp, Homo sapien
gaacccaccttggtcgctgaagtga

SEQ ID NO: 5716301 - DNA, 25 bp, Homo sapien
atcttatcacggctaattgaaaata

SEQ ID NO: 5716302 - DNA, 25 bp, Homo sapien
tattttcaattagccgtgataagat

SEQ ID NO: 5716303 - DNA, 25 bp, Homo sapien
cgaattgcaattggacggcgtgcgt

SEQ ID NO: 5716304 - DNA, 25 bp, Homo sapien
acgcacgccgtccaattgcaattcg

SEQ ID NO: 5716305 - DNA, 25 bp, Homo sapien
gaacttcgttcctttgtcacgaaaa

SEQ ID NO: 5716306 - DNA, 25 bp, Homo sapien
ttttcgtgacaaaggaacgaagttc

SEQ ID NO: 5716307 - DNA, 25 bp, Homo sapien
gccgcgacccctgtgccctcttcct

SEQ ID NO: 5716308 - DNA, 25 bp, Homo sapien
aggaagagggcacaggggtcgcggc

SEQ ID NO: 5716309 - DNA, 25 bp, Homo sapien
tagtaataacaaacctgaaaataat

SEQ ID NO: 5716310 - DNA, 25 bp, Homo sapien
attattttcaggtttgttattacta

SEQ ID NO: 5716311 - DNA, 25 bp, Homo sapien
aataatataaattcctgtcctcaat

SEQ ID NO: 5716312 - DNA, 25 bp, Homo sapien
attgaggacaggaatttatattatt

SEQ ID NO: 5716313 - DNA, 25 bp, Homo sapien
cggcgcgggcccgggtagacgctgg

SEQ ID NO: 5716314 - DNA, 25 bp, Homo sapien
ccagcgtctacccgggcccgcgccg

SEQ ID NO: 5716315 - DNA, 25 bp, Homo sapien
ggaacgaaaggcaagaagggactac

SEQ ID NO: 5716316 - DNA, 25 bp, Homo sapien
gtagtcccttcttgcctttcgttcc

SEQ ID NO: 5716317 - DNA, 25 bp, Homo sapien
aactccattgtaacaggaactaggt

SEQ ID NO: 5716318 - DNA, 25 bp, Homo sapien
acctagttcctgttacaatggagtt

SEQ ID NO: 5716319 - DNA, 25 bp, Homo sapien
gaatttattagccttcggtattagt

SEQ ID NO: 5716320 - DNA, 25 bp, Homo sapien
actaataccgaaggctaataaattc

SEQ ID NO: 5716321 - DNA, 25 bp, Homo sapien
aaagtctgttatcgtcactgaaaac

SEQ ID NO: 5716322 - DNA, 25 bp, Homo sapien
gttttcagtgacgataacagacttt

SEQ ID NO: 5716323 - DNA, 25 bp, Homo sapien
aagacgtcggtggattggttcgctt

SEQ ID NO: 5716324 - DNA, 25 bp, Homo sapien
aagcgaaccaatccaccgacgtctt

SEQ ID NO: 5716325 - DNA, 25 bp, Homo sapien
tccaggagtatgacgggtgccgggt

SEQ ID NO: 5716326 - DNA, 25 bp, Homo sapien
acccggcacccgtcatactcctgga

SEQ ID NO: 5716327 - DNA, 25 bp, Homo sapien
gtttacgtcctaggagcccggagtg

SEQ ID NO: 5716328 - DNA, 25 bp, Homo sapien
cactccgggctcctaggacgtaaac

SEQ ID NO: 5716329 - DNA, 25 bp, Homo sapien
tccaccgtcgtttcccgccggagag

SEQ ID NO: 5716330 - DNA, 25 bp, Homo sapien
ctctccggcgggaaacgacggtgga

SEQ ID NO: 5716331 - DNA, 25 bp, Homo sapien
gaaaacagttaaagtattaggctta

SEQ ID NO: 5716332 - DNA, 25 bp, Homo sapien
taagcctaatactttaactgttttc

SEQ ID NO: 5716333 - DNA, 25 bp, Homo sapien
cctggcagccagcgcgggacgagtg

SEQ ID NO: 5716334 - DNA, 25 bp, Homo sapien
cactcgtcccgcgctggctgccagg

SEQ ID NO: 5716335 - DNA, 25 bp, Homo sapien
tcccgacagtgctcccacggcaggt

SEQ ID NO: 5716336 - DNA, 25 bp, Homo sapien
acctgccgtgggagcactgtcggga

SEQ ID NO: 5716337 - DNA, 25 bp, Homo sapien
gcccgaagtactggaactaaagacc

SEQ ID NO: 5716338 - DNA, 25 bp, Homo sapien
ggtctttagttccagtacttcgggc

SEQ ID NO: 5716339 - DNA, 25 bp, Homo sapien
attatcatctatagtaacgttatac

SEQ ID NO: 5716340 - DNA, 25 bp, Homo sapien
gtataacgttactatagatgataat

SEQ ID NO: 5716341 - DNA, 25 bp, Homo sapien
gggtacaggagctcagggttgtgac

SEQ ID NO: 5716342 - DNA, 25 bp, Homo sapien
gtcacaaccctgagctcctgtaccc

SEQ ID NO: 5716343 - DNA, 25 bp, Homo sapien
taatagtattttcacaatctacagt

SEQ ID NO: 5716344 - DNA, 25 bp, Homo sapien
actgtagattgtgaaaatactatta

SEQ ID NO: 5716345 - DNA, 25 bp, Homo sapien
aaggaacaggacgacaaactaagac

SEQ ID NO: 5716346 - DNA, 25 bp, Homo sapien
gtcttagtttgtcgtcctgttcctt

SEQ ID NO: 5716347 - DNA, 25 bp, Homo sapien
cagggaagtagggccgaggacagag

SEQ ID NO: 5716348 - DNA, 25 bp, Homo sapien
ctctgtcctcggccctacttccctg

SEQ ID NO: 5716349 - DNA, 25 bp, Homo sapien
tgaccgagaggctcccggtccaccg

SEQ ID NO: 5716350 - DNA, 25 bp, Homo sapien
cggtggaccgggagcctctcggtca

SEQ ID NO: 5716351 - DNA, 25 bp, Homo sapien
ggtattgtcggtggactctcatggt

SEQ ID NO: 5716352 - DNA, 25 bp, Homo sapien
accatgagagtccaccgacaatacc

SEQ ID NO: 5716353 - DNA, 25 bp, Homo sapien
gtccgccgccggaactgcggtggac

SEQ ID NO: 5716354 - DNA, 25 bp, Homo sapien
gtccaccgcagttccggcggcggac

SEQ ID NO: 5716355 - DNA, 25 bp, Homo sapien
tttagatccggaaaatgtcactagt

SEQ ID NO: 5716356 - DNA, 25 bp, Homo sapien
actagtgacattttccggatctaaa

SEQ ID NO: 5716357 - DNA, 25 bp, Homo sapien
caccccggcgcgtcgataccggcct

SEQ ID NO: 5716358 - DNA, 25 bp, Homo sapien
aggccggtatcgacgcgccggggtg

SEQ ID NO: 5716359 - DNA, 25 bp, Homo sapien
gccctacagacagagcggcgtttct

SEQ ID NO: 5716360 - DNA, 25 bp, Homo sapien
agaaacgccgctctgtctgtagggc

SEQ ID NO: 5716361 - DNA, 25 bp, Homo sapien
gacggctggcgtgtcgaggagaggt

SEQ ID NO: 5716362 - DNA, 25 bp, Homo sapien
acctctcctcgacacgccagccgtc

SEQ ID NO: 5716363 - DNA, 25 bp, Homo sapien
tcataggacctcagaaataattgat

SEQ ID NO: 5716364 - DNA, 25 bp, Homo sapien
atcaattatttctgaggtcctatga

SEQ ID NO: 5716365 - DNA, 25 bp, Homo sapien
acgtgactgtgcacttacacacaca

SEQ ID NO: 5716366 - DNA, 25 bp, Homo sapien
tgtgtgtgtaagtgcacagtcacgt

SEQ ID NO: 5716367 - DNA, 25 bp, Homo sapien
attcaacattttctagtactagttt

SEQ ID NO: 5716368 - DNA, 25 bp, Homo sapien
aaactagtactagaaaatgttgaat

SEQ ID NO: 5716369 - DNA, 25 bp, Homo sapien
gacccctctactcggggcggacacc

SEQ ID NO: 5716370 - DNA, 25 bp, Homo sapien
ggtgtccgccccgagtagaggggtc

SEQ ID NO: 5716371 - DNA, 25 bp, Homo sapien
ggagatactggtagcacccccggag

SEQ ID NO: 5716372 - DNA, 25 bp, Homo sapien
ctccgggggtgctaccagtatctcc

SEQ ID NO: 5716373 - DNA, 25 bp, Homo sapien
agagggtgagactaccggctacaac

SEQ ID NO: 5716374 - DNA, 25 bp, Homo sapien
gttgtagccggtagtctcaccctct

SEQ ID NO: 5716375 - DNA, 25 bp, Homo sapien
tctctcttttattggttttcattat

SEQ ID NO: 5716376 - DNA, 25 bp, Homo sapien
ataatgaaaaccaataaaagagaga

SEQ ID NO: 5716377 - DNA, 25 bp, Homo sapien
ggaggagaggtgacttttgggttgt

SEQ ID NO: 5716378 - DNA, 25 bp, Homo sapien
acaacccaaaagtcacctctcctcc

SEQ ID NO: 5716379 - DNA, 25 bp, Homo sapien
tcgtcgtataacgagtggcagaccg

SEQ ID NO: 5716380 - DNA, 25 bp, Homo sapien
cggtctgccactcgttatacgacga

SEQ ID NO: 5716381 - DNA, 25 bp, Homo sapien
gtccctcgtggcagaaaactcctgt

SEQ ID NO: 5716382 - DNA, 25 bp, Homo sapien
acaggagttttctgccacgagggac

SEQ ID NO: 5716383 - DNA, 25 bp, Homo sapien
tgaagactagattcgaagaaaggtt

SEQ ID NO: 5716384 - DNA, 25 bp, Homo sapien
aacctttcttcgaatctagtcttca

SEQ ID NO: 5716385 - DNA, 25 bp, Homo sapien
cgagctcgtaagacgacgcgagtac

SEQ ID NO: 5716386 - DNA, 25 bp, Homo sapien
gtactcgcgtcgtcttacgagctcg

SEQ ID NO: 5716387 - DNA, 25 bp, Homo sapien
gaggcccggtgtagtaacttatgcg

SEQ ID NO: 5716388 - DNA, 25 bp, Homo sapien
cgcataagttactacaccgggcctc

SEQ ID NO: 5716389 - DNA, 25 bp, Homo sapien
ggaccaccaagggttcatctcgtac

SEQ ID NO: 5716390 - DNA, 25 bp, Homo sapien
gtacgagatgaacccttggtggtcc

SEQ ID NO: 5716391 - DNA, 25 bp, Homo sapien
aactattagaacataagaaagacgt

SEQ ID NO: 5716392 - DNA, 25 bp, Homo sapien
acgtctttcttatgttctaatagtt

SEQ ID NO: 5716393 - DNA, 25 bp, Homo sapien
ctacaggaagcttaccagtaaatca

SEQ ID NO: 5716394 - DNA, 25 bp, Homo sapien
tgatttactggtaagcttcctgtag

SEQ ID NO: 5716395 - DNA, 25 bp, Homo sapien
accacctaagtagtctatacgttct

SEQ ID NO: 5716396 - DNA, 25 bp, Homo sapien
agaacgtatagactacttaggtggt

SEQ ID NO: 5716397 - DNA, 25 bp, Homo sapien
gtgactcgtccccttaggaggacac

SEQ ID NO: 5716398 - DNA, 25 bp, Homo sapien
gtgtcctcctaaggggacgagtcac

SEQ ID NO: 5716399 - DNA, 25 bp, Homo sapien
caagaccggggatgacctgaaacgt

SEQ ID NO: 5716400 - DNA, 25 bp, Homo sapien
acgtttcaggtcatccccggtcttg

SEQ ID NO: 5716401 - DNA, 25 bp, Homo sapien
cgtcctctatctactggacgtaaag

SEQ ID NO: 5716402 - DNA, 25 bp, Homo sapien
ctttacgtccagtagatagaggacg

SEQ ID NO: 5716403 - DNA, 25 bp, Homo sapien
tgtcacgactgctgtacccagaaat

SEQ ID NO: 5716404 - DNA, 25 bp, Homo sapien
atttctgggtacagcagtcgtgaca

SEQ ID NO: 5716405 - DNA, 25 bp, Homo sapien
tcccacgccccacgctcgtccggtc

SEQ ID NO: 5716406 - DNA, 25 bp, Homo sapien
gaccggacgagcgtggggcgtggga

SEQ ID NO: 5716407 - DNA, 25 bp, Homo sapien
gagacgaggtcactatttgaaaagt

SEQ ID NO: 5716408 - DNA, 25 bp, Homo sapien
acttttcaaatagtgacctcgtctc

SEQ ID NO: 5716409 - DNA, 25 bp, Homo sapien
cagtccaggtccacggaaacggagt

SEQ ID NO: 5716410 - DNA, 25 bp, Homo sapien
actccgtttccgtggacctggactg

SEQ ID NO: 5716411 - DNA, 25 bp, Homo sapien
taaaacgactataatctctagtcat

SEQ ID NO: 5716412 - DNA, 25 bp, Homo sapien
atgactagagattatagtcgtttta

SEQ ID NO: 5716413 - DNA, 25 bp, Homo sapien
acccctctcgtgtcactacgagccc

SEQ ID NO: 5716414 - DNA, 25 bp, Homo sapien
gggctcgtagtgacacgagaggggt

SEQ ID NO: 5716415 - DNA, 25 bp, Homo sapien
agtgtcactcctacgtacaactacg

SEQ ID NO: 5716416 - DNA, 25 bp, Homo sapien
cgtagttgtacgtaggagtgacact

SEQ ID NO: 5716417 - DNA, 25 bp, Homo sapien
gaggtcgcgggcgcggcacgggacg

SEQ ID NO: 5716418 - DNA, 25 bp, Homo sapien
cgtcccgtgccgcgcccgcgacctc

SEQ ID NO: 5716419 - DNA, 25 bp, Homo sapien
atctatgaagattataataagtcca

SEQ ID NO: 5716420 - DNA, 25 bp, Homo sapien
tggacttattataatcttcatagat

SEQ ID NO: 5716421 - DNA, 25 bp, Homo sapien
ctatgaagattataataagtccaaa

SEQ ID NO: 5716422 - DNA, 25 bp, Homo sapien
tttggacttattataatcttcatag

SEQ ID NO: 5716423 - DNA, 25 bp, Homo sapien
aatatgagtaccatagtaatttcgt

SEQ ID NO: 5716424 - DNA, 25 bp, Homo sapien
acgaaattactatggtactcatatt

SEQ ID NO: 5716425 - DNA, 25 bp, Homo sapien
cacagaggaagggtcgagttcccag

SEQ ID NO: 5716426 - DNA, 25 bp, Homo sapien
ctgggaactcgacccttcctctgtg

SEQ ID NO: 5716427 - DNA, 25 bp, Homo sapien
gtgggccttcgggcgacgggtcgta

SEQ ID NO: 5716428 - DNA, 25 bp, Homo sapien
tacgacccgtcgcccgaaggcccac

SEQ ID NO: 5716429 - DNA, 25 bp, Homo sapien
tttgtgactaagaatcttactcgct

SEQ ID NO: 5716430 - DNA, 25 bp, Homo sapien
agcgagtaagattcttagtcacaaa

SEQ ID NO: 5716431 - DNA, 25 bp, Homo sapien
gactaactgattcacttctttataa

SEQ ID NO: 5716432 - DNA, 25 bp, Homo sapien
ttataaagaagtgaatcagttagtc

SEQ ID NO: 5716433 - DNA, 25 bp, Homo sapien
aagactaactgattcacttctttat

SEQ ID NO: 5716434 - DNA, 25 bp, Homo sapien
ataaagaagtgaatcagttagtctt

SEQ ID NO: 5716435 - DNA, 25 bp, Homo sapien
acaaaagaacatgacccggtgttcc

SEQ ID NO: 5716436 - DNA, 25 bp, Homo sapien
ggaacaccgggtcatgttcttttgt

SEQ ID NO: 5716437 - DNA, 25 bp, Homo sapien
ctcttggagtcgagcccttggcgcc

SEQ ID NO: 5716438 - DNA, 25 bp, Homo sapien
ggcgccaagggctcgactccaagag

SEQ ID NO: 5716439 - DNA, 25 bp, Homo sapien
aagggtttaatagaagagatcttta

SEQ ID NO: 5716440 - DNA, 25 bp, Homo sapien
taaagatctcttctattaaaccctt

SEQ ID NO: 5716441 - DNA, 25 bp, Homo sapien
tgccggtgggactgcggcccgactg

SEQ ID NO: 5716442 - DNA, 25 bp, Homo sapien
cagtcgggccgcagtcccaccggca

SEQ ID NO: 5716443 - DNA, 25 bp, Homo sapien
cgcgagaaccctcccctcgccctgt

SEQ ID NO: 5716444 - DNA, 25 bp, Homo sapien
acagggcgaggggagggttctcgcg

SEQ ID NO: 5716445 - DNA, 25 bp, Homo sapien
gtcttcccagggtttcttcgccacg

SEQ ID NO: 5716446 - DNA, 25 bp, Homo sapien
cgtggcgaagaaaccctgggaagac

SEQ ID NO: 5716447 - DNA, 25 bp, Homo sapien
gcccgtgtctcggatatagatgggt

SEQ ID NO: 5716448 - DNA, 25 bp, Homo sapien
acccatctatatccgagacacgggc

SEQ ID NO: 5716449 - DNA, 25 bp, Homo sapien
aactccgtgagtttgacagattaac

SEQ ID NO: 5716450 - DNA, 25 bp, Homo sapien
gttaatctgtcaaactcacggagtt

SEQ ID NO: 5716451 - DNA, 25 bp, Homo sapien
gaagtgtttacttagaccataacat

SEQ ID NO: 5716452 - DNA, 25 bp, Homo sapien
atgttatggtctaagtaaacacttc

SEQ ID NO: 5716453 - DNA, 25 bp, Homo sapien
aacatcaggcgggtcgagaaacgac

SEQ ID NO: 5716454 - DNA, 25 bp, Homo sapien
gtcgtttctcgacccgcctgatgtt

SEQ ID NO: 5716455 - DNA, 25 bp, Homo sapien
gacccgggactcgagtggaactggg

SEQ ID NO: 5716456 - DNA, 25 bp, Homo sapien
cccagttccactcgagtcccgggtc

SEQ ID NO: 5716457 - DNA, 25 bp, Homo sapien
ttgttaaacaacattttcttaagta

SEQ ID NO: 5716458 - DNA, 25 bp, Homo sapien
tacttaagaaaatgttgtttaacaa

SEQ ID NO: 5716459 - DNA, 25 bp, Homo sapien
aggttgtttctcataaaataaatac

SEQ ID NO: 5716460 - DNA, 25 bp, Homo sapien
gtatttattttatgagaaacaacct

SEQ ID NO: 5716461 - DNA, 25 bp, Homo sapien
tgtcgagcggagacgagactgaggt

SEQ ID NO: 5716462 - DNA, 25 bp, Homo sapien
acctcagtctcgtctccgctcgaca

SEQ ID NO: 5716463 - DNA, 25 bp, Homo sapien
ggcacccgcgcaggaccggcgacgt

SEQ ID NO: 5716464 - DNA, 25 bp, Homo sapien
acgtcgccggtcctgcgcgggtgcc

SEQ ID NO: 5716465 - DNA, 25 bp, Homo sapien
ccggcacccgcgcaggaccggcgac

SEQ ID NO: 5716466 - DNA, 25 bp, Homo sapien
gtcgccggtcctgcgcgggtgccgg

SEQ ID NO: 5716467 - DNA, 25 bp, Homo sapien
cgcggagccgcgacctctccgagcc

SEQ ID NO: 5716468 - DNA, 25 bp, Homo sapien
ggctcggagaggtcgcggctccgcg

SEQ ID NO: 5716469 - DNA, 25 bp, Homo sapien
gcgcggagccgcgacctctccgagc

SEQ ID NO: 5716470 - DNA, 25 bp, Homo sapien
gctcggagaggtcgcggctccgcgc

SEQ ID NO: 5716471 - DNA, 25 bp, Homo sapien
tcgggcccagcctctcctcgggagg

SEQ ID NO: 5716472 - DNA, 25 bp, Homo sapien
cctcccgaggagaggctgggcccga

SEQ ID NO: 5716473 - DNA, 25 bp, Homo sapien
cctcttcgggcccagtctctcctcg

SEQ ID NO: 5716474 - DNA, 25 bp, Homo sapien
cgaggagagactgggcccgaagagg

SEQ ID NO: 5716475 - DNA, 25 bp, Homo sapien
ttgtgcaagactcctcaaatcatat

SEQ ID NO: 5716476 - DNA, 25 bp, Homo sapien
atatgatttgaggagtcttgcacaa

SEQ ID NO: 5716477 - DNA, 25 bp, Homo sapien
tgtccgtgactctgccacgggagcc

SEQ ID NO: 5716478 - DNA, 25 bp, Homo sapien
ggctcccgtggcagagtcacggaca

SEQ ID NO: 5716479 - DNA, 25 bp, Homo sapien
ggactagagactcgtccccagcagc

SEQ ID NO: 5716480 - DNA, 25 bp, Homo sapien
gctgctggggacgagtctctagtcc

SEQ ID NO: 5716481 - DNA, 25 bp, Homo sapien
acctccacgtcccgtccaagtcctc

SEQ ID NO: 5716482 - DNA, 25 bp, Homo sapien
gaggacttggacgggacgtggaggt

SEQ ID NO: 5716483 - DNA, 25 bp, Homo sapien
gccctggcgtggcctgaggccggcg

SEQ ID NO: 5716484 - DNA, 25 bp, Homo sapien
cgccggcctcaggccacgccagggc

SEQ ID NO: 5716485 - DNA, 25 bp, Homo sapien
gttaaaacttatgaccattaatact

SEQ ID NO: 5716486 - DNA, 25 bp, Homo sapien
agtattaatggtcataagttttaac

SEQ ID NO: 5716487 - DNA, 25 bp, Homo sapien
acagtaacgatggagtgattgggac

SEQ ID NO: 5716488 - DNA, 25 bp, Homo sapien
gtcccaatcactccatcgttactgt

SEQ ID NO: 5716489 - DNA, 25 bp, Homo sapien
ccccactttagaagggtagatagac

SEQ ID NO: 5716490 - DNA, 25 bp, Homo sapien
gtctatctacccttctaaagtgggg

SEQ ID NO: 5716491 - DNA, 25 bp, Homo sapien
tcggcccctcggcccgcccgacgtc

SEQ ID NO: 5716492 - DNA, 25 bp, Homo sapien
gacgtcgggcgggccgaggggccga

SEQ ID NO: 5716493 - DNA, 25 bp, Homo sapien
ccgaccgagcccacacgtgtgccca

SEQ ID NO: 5716494 - DNA, 25 bp, Homo sapien
tgggcacacgtgtgggctcggtcgg

SEQ ID NO: 5716495 - DNA, 25 bp, Homo sapien
tagcgacgccgaaccccaaggcggg

SEQ ID NO: 5716496 - DNA, 25 bp, Homo sapien
cccgccttggggttcggcgtcgcta

SEQ ID NO: 5716497 - DNA, 25 bp, Homo sapien
tcgaccagagttccgagtctcacgt

SEQ ID NO: 5716498 - DNA, 25 bp, Homo sapien
acgtgagactcggaactctggtcga

SEQ ID NO: 5716499 - DNA, 25 bp, Homo sapien
ccctcgccgtccgagccgcagccgg

SEQ ID NO: 5716500 - DNA, 25 bp, Homo sapien
ccggctgcggctcggacggcgaggg

SEQ ID NO: 5716501 - DNA, 25 bp, Homo sapien
tccctcgccgtccgagccgcagccg

SEQ ID NO: 5716502 - DNA, 25 bp, Homo sapien
cggctgcggctcggacggcgaggga

SEQ ID NO: 5716503 - DNA, 25 bp, Homo sapien
tccggcggagtctgtgttaaggtaa

SEQ ID NO: 5716504 - DNA, 25 bp, Homo sapien
ttaccttaacacagactccgccgga

SEQ ID NO: 5716505 - DNA, 25 bp, Homo sapien
gctccgggcgtctcgcgcgggcaga

SEQ ID NO: 5716506 - DNA, 25 bp, Homo sapien
tctgcccgcgcgagacgcccggagc

SEQ ID NO: 5716507 - DNA, 25 bp, Homo sapien
ttatactggggagattacaacgaca

SEQ ID NO: 5716508 - DNA, 25 bp, Homo sapien
tgtcgttgtaatctccccagtataa

SEQ ID NO: 5716509 - DNA, 25 bp, Homo sapien
gtgtgtcggtcaatatgaattttct

SEQ ID NO: 5716510 - DNA, 25 bp, Homo sapien
agaaaattcatattgaccgacacac

SEQ ID NO: 5716511 - DNA, 25 bp, Homo sapien
accttgcatgaattatgataaactt

SEQ ID NO: 5716512 - DNA, 25 bp, Homo sapien
aagtttatcataattcatgcaaggt

SEQ ID NO: 5716513 - DNA, 25 bp, Homo sapien
aataataatttactcaatcgagaat

SEQ ID NO: 5716514 - DNA, 25 bp, Homo sapien
attctcgattgagtaaattattatt

SEQ ID NO: 5716515 - DNA, 25 bp, Homo sapien
cgtccagcctacaaagattgtgact

SEQ ID NO: 5716516 - DNA, 25 bp, Homo sapien
agtcacaatctttgtaggctggacg

SEQ ID NO: 5716517 - DNA, 25 bp, Homo sapien
aaatgactttagacgtaaatgatcc

SEQ ID NO: 5716518 - DNA, 25 bp, Homo sapien
ggatcatttacgtctaaagtcattt

SEQ ID NO: 5716519 - DNA, 25 bp, Homo sapien
tcgtagtagttatcgtataagtata

SEQ ID NO: 5716520 - DNA, 25 bp, Homo sapien
tatacttatacgataactactacga

SEQ ID NO: 5716521 - DNA, 25 bp, Homo sapien
cgtcggagacttagtctacatactt

SEQ ID NO: 5716522 - DNA, 25 bp, Homo sapien
aagtatgtagactaagtctccgacg

SEQ ID NO: 5716523 - DNA, 25 bp, Homo sapien
gtccgctacccgccacggcccggac

SEQ ID NO: 5716524 - DNA, 25 bp, Homo sapien
gtccgggccgtggcgggtagcggac

SEQ ID NO: 5716525 - DNA, 25 bp, Homo sapien
agtccgctacccgccacggcccgga

SEQ ID NO: 5716526 - DNA, 25 bp, Homo sapien
tccgggccgtggcgggtagcggact

SEQ ID NO: 5716527 - DNA, 25 bp, Homo sapien
ggacgcaccaggtgcggacagggta

SEQ ID NO: 5716528 - DNA, 25 bp, Homo sapien
taccctgtccgcacctggtgcgtcc

SEQ ID NO: 5716529 - DNA, 25 bp, Homo sapien
acacgggtgcatcccggaaacgtac

SEQ ID NO: 5716530 - DNA, 25 bp, Homo sapien
gtacgtttccgggatgcacccgtgt

SEQ ID NO: 5716531 - DNA, 25 bp, Homo sapien
aggagacgagctcttcgggaaggac

SEQ ID NO: 5716532 - DNA, 25 bp, Homo sapien
gtccttcccgaagagctcgtctcct

SEQ ID NO: 5716533 - DNA, 25 bp, Homo sapien
gacccgtgggcgacccccacgtcga

SEQ ID NO: 5716534 - DNA, 25 bp, Homo sapien
tcgacgtgggggtcgcccacgggtc

SEQ ID NO: 5716535 - DNA, 25 bp, Homo sapien
tctgggacttcgtcacacattggtt

SEQ ID NO: 5716536 - DNA, 25 bp, Homo sapien
aaccaatgtgtgacgaagtcccaga

SEQ ID NO: 5716537 - DNA, 25 bp, Homo sapien
acggtcggcgcgaaagagtacctga

SEQ ID NO: 5716538 - DNA, 25 bp, Homo sapien
tcaggtactctttcgcgccgaccgt

SEQ ID NO: 5716539 - DNA, 25 bp, Homo sapien
gacgggggagattgaggttcggatg

SEQ ID NO: 5716540 - DNA, 25 bp, Homo sapien
catccgaacctcaatctcccccgtc

SEQ ID NO: 5716541 - DNA, 25 bp, Homo sapien
gataattcttttttagtactatgta

SEQ ID NO: 5716542 - DNA, 25 bp, Homo sapien
tacatagtactaaaaaagaattatc

SEQ ID NO: 5716543 - DNA, 25 bp, Homo sapien
atgtctaaagattctttacacagac

SEQ ID NO: 5716544 - DNA, 25 bp, Homo sapien
gtctgtgtaaagaatctttagacat

SEQ ID NO: 5716545 - DNA, 25 bp, Homo sapien
gacttccgtcttaccctctccttcg

SEQ ID NO: 5716546 - DNA, 25 bp, Homo sapien
cgaaggagagggtaagacggaagtc

SEQ ID NO: 5716547 - DNA, 25 bp, Homo sapien
ggaagaatggtcagaggagaaatat

SEQ ID NO: 5716548 - DNA, 25 bp, Homo sapien
atatttctcctctgaccattcttcc

SEQ ID NO: 5716549 - DNA, 25 bp, Homo sapien
acaatccttcctgttatttgagact

SEQ ID NO: 5716550 - DNA, 25 bp, Homo sapien
agtctcaaataacaggaaggattgt

SEQ ID NO: 5716551 - DNA, 25 bp, Homo sapien
agaaatatttcctaacataataaag

SEQ ID NO: 5716552 - DNA, 25 bp, Homo sapien
ctttattatgttaggaaatatttct

SEQ ID NO: 5716553 - DNA, 25 bp, Homo sapien
ggtgcggggacactgcgccctcggg

SEQ ID NO: 5716554 - DNA, 25 bp, Homo sapien
cccgagggcgcagtgtccccgcacc

SEQ ID NO: 5716555 - DNA, 25 bp, Homo sapien
cctaacttagtgcatacggtaacag

SEQ ID NO: 5716556 - DNA, 25 bp, Homo sapien
ctgttaccgtatgcactaagttagg

SEQ ID NO: 5716557 - DNA, 25 bp, Homo sapien
cttttctcgagtttcacttcagatg

SEQ ID NO: 5716558 - DNA, 25 bp, Homo sapien
catctgaagtgaaactcgagaaaag

SEQ ID NO: 5716559 - DNA, 25 bp, Homo sapien
aaactatagtagtatcaaagatctt

SEQ ID NO: 5716560 - DNA, 25 bp, Homo sapien
aagatctttgatactactatagttt

SEQ ID NO: 5716561 - DNA, 25 bp, Homo sapien
agcgggtgcacgagaccggttcggt

SEQ ID NO: 5716562 - DNA, 25 bp, Homo sapien
accgaaccggtctcgtgcacccgct

SEQ ID NO: 5716563 - DNA, 25 bp, Homo sapien
ctgactccaagcctaccaatggtaa

SEQ ID NO: 5716564 - DNA, 25 bp, Homo sapien
ttaccattggtaggcttggagtcag

SEQ ID NO: 5716565 - DNA, 25 bp, Homo sapien
tttcggtatccttagtcagagagaa

SEQ ID NO: 5716566 - DNA, 25 bp, Homo sapien
ttctctctgactaaggataccgaaa

SEQ ID NO: 5716567 - DNA, 25 bp, Homo sapien
ctacgtcagtaataggaacagaagt

SEQ ID NO: 5716568 - DNA, 25 bp, Homo sapien
acttctgttcctattactgacgtag

SEQ ID NO: 5716569 - DNA, 25 bp, Homo sapien
tactcaaaccgtcttctcagaacca

SEQ ID NO: 5716570 - DNA, 25 bp, Homo sapien
tggttctgagaagacggtttgagta

SEQ ID NO: 5716571 - DNA, 25 bp, Homo sapien
cgagacgactgctacctcgccgtcg

SEQ ID NO: 5716572 - DNA, 25 bp, Homo sapien
cgacggcgaggtagcagtcgtctcg

SEQ ID NO: 5716573 - DNA, 25 bp, Homo sapien
aagatactactgacataaaaagtta

SEQ ID NO: 5716574 - DNA, 25 bp, Homo sapien
taactttttatgtcagtagtatctt

SEQ ID NO: 5716575 - DNA, 25 bp, Homo sapien
tatgtattactattagaccccgatt

SEQ ID NO: 5716576 - DNA, 25 bp, Homo sapien
aatcggggtctaatagtaatacata

SEQ ID NO: 5716577 - DNA, 25 bp, Homo sapien
tctcaaaaattatagtgtgactagt

SEQ ID NO: 5716578 - DNA, 25 bp, Homo sapien
actagtcacactataatttttgaga

SEQ ID NO: 5716579 - DNA, 25 bp, Homo sapien
tcgcgcccagagtttcgacggacgt

SEQ ID NO: 5716580 - DNA, 25 bp, Homo sapien
acgtccgtcgaaactctgggcgcga

SEQ ID NO: 5716581 - DNA, 25 bp, Homo sapien
cccgattcccgactcatgtcctcaa

SEQ ID NO: 5716582 - DNA, 25 bp, Homo sapien
ttgaggacatgagtcgggaatcggg

SEQ ID NO: 5716583 - DNA, 25 bp, Homo sapien
acttctatgtagatttgggtaattt

SEQ ID NO: 5716584 - DNA, 25 bp, Homo sapien
aaattacccaaatctacatagaagt

SEQ ID NO: 5716585 - DNA, 25 bp, Homo sapien
ggtcaggggcggaactgccgggtcg

SEQ ID NO: 5716586 - DNA, 25 bp, Homo sapien
cgacccggcagttccgcccctgacc

SEQ ID NO: 5716587 - DNA, 25 bp, Homo sapien
acagattgaaggtattggagaagta

SEQ ID NO: 5716588 - DNA, 25 bp, Homo sapien
tacttctccaataccttcaatctgt

SEQ ID NO: 5716589 - DNA, 25 bp, Homo sapien
gaggtctgagacatagattcgatat

SEQ ID NO: 5716590 - DNA, 25 bp, Homo sapien
atatcgaatctatgtctcagacctc

SEQ ID NO: 5716591 - DNA, 25 bp, Homo sapien
gatctacttctcgtccagttttctg

SEQ ID NO: 5716592 - DNA, 25 bp, Homo sapien
cagaaaactggacgagaagtagatc

SEQ ID NO: 5716593 - DNA, 25 bp, Homo sapien
agttcaccgtagttacatgtgtcga

SEQ ID NO: 5716594 - DNA, 25 bp, Homo sapien
tcgacacatgtaactacggtgaact

SEQ ID NO: 5716595 - DNA, 25 bp, Homo sapien
aaaagaagaaaagttatgatctcga

SEQ ID NO: 5716596 - DNA, 25 bp, Homo sapien
tcgagatcataacttttcttctttt

SEQ ID NO: 5716597 - DNA, 25 bp, Homo sapien
gtttcagtactgactcgggaccttt

SEQ ID NO: 5716598 - DNA, 25 bp, Homo sapien
aaaggtcccgagtcagtactgaaac

SEQ ID NO: 5716599 - DNA, 25 bp, Homo sapien
gaggaggactgagggtacagacggg

SEQ ID NO: 5716600 - DNA, 25 bp, Homo sapien
cccgtctgtaccctcagtcctcctc

SEQ ID NO: 5716601 - DNA, 25 bp, Homo sapien
ccttcggaggcgcagtgtcttcgtc

SEQ ID NO: 5716602 - DNA, 25 bp, Homo sapien
gacgaagacactgcgcctccgaagg

SEQ ID NO: 5716603 - DNA, 25 bp, Homo sapien
tctcgggtgcgaggccttcggaggc

SEQ ID NO: 5716604 - DNA, 25 bp, Homo sapien
gcctccgaaggcctcgcacccgaga

SEQ ID NO: 5716605 - DNA, 25 bp, Homo sapien
cctgtgaggcccgatcaaaaggtcg

SEQ ID NO: 5716606 - DNA, 25 bp, Homo sapien
cgaccttttgatcgggcctcacagg

SEQ ID NO: 5716607 - DNA, 25 bp, Homo sapien
tcggacgccccacggtgccgtcggt

SEQ ID NO: 5716608 - DNA, 25 bp, Homo sapien
accgacggcaccgtggggcgtccga

SEQ ID NO: 5716609 - DNA, 25 bp, Homo sapien
gacgggaccgccgacccggaatcaa

SEQ ID NO: 5716610 - DNA, 25 bp, Homo sapien
ttgattccgggtcggcggtcccgtc

SEQ ID NO: 5716611 - DNA, 25 bp, Homo sapien
cgacagaaaaccaatctctgcgggt

SEQ ID NO: 5716612 - DNA, 25 bp, Homo sapien
acccgcagagattggttttctgtcg

SEQ ID NO: 5716613 - DNA, 25 bp, Homo sapien
cggagcccagggtattctggttgac

SEQ ID NO: 5716614 - DNA, 25 bp, Homo sapien
gtcaaccagaataccctgggctccg

SEQ ID NO: 5716615 - DNA, 25 bp, Homo sapien
aggtccccagcatgagtcgaagaca

SEQ ID NO: 5716616 - DNA, 25 bp, Homo sapien
tgtcttcgactcatgctggggacct

SEQ ID NO: 5716617 - DNA, 25 bp, Homo sapien
gacctgcccttccccggggctcctg

SEQ ID NO: 5716618 - DNA, 25 bp, Homo sapien
caggagccccggggaagggcaggtc

SEQ ID NO: 5716619 - DNA, 25 bp, Homo sapien
gatccagaccgagaatcgtggaaga

SEQ ID NO: 5716620 - DNA, 25 bp, Homo sapien
tcttccacgattctcggtctggatc

SEQ ID NO: 5716621 - DNA, 25 bp, Homo sapien
ttgataagtccggtgtatatgcaag

SEQ ID NO: 5716622 - DNA, 25 bp, Homo sapien
cttgcatatacaccggacttatcaa

SEQ ID NO: 5716623 - DNA, 25 bp, Homo sapien
gaaggccgccaccgcccggagccat

SEQ ID NO: 5716624 - DNA, 25 bp, Homo sapien
atggctccgggcggtggcggccttc

SEQ ID NO: 5716625 - DNA, 25 bp, Homo sapien
ggagcgcctggcgtgcctaggccga

SEQ ID NO: 5716626 - DNA, 25 bp, Homo sapien
tcggcctaggcacgccaggcgctcc

SEQ ID NO: 5716627 - DNA, 25 bp, Homo sapien
gcccaggagcgcctggcgtgcctag

SEQ ID NO: 5716628 - DNA, 25 bp, Homo sapien
ctaggcacgccaggcgctcctgggc

SEQ ID NO: 5716629 - DNA, 25 bp, Homo sapien
tccggtggaagtgtgactacaagtc

SEQ ID NO: 5716630 - DNA, 25 bp, Homo sapien
gacttgtagtcacacttccaccgga

SEQ ID NO: 5716631 - DNA, 25 bp, Homo sapien
gccgcgcgcggtccagggcggaggc

SEQ ID NO: 5716632 - DNA, 25 bp, Homo sapien
gcctccgccctggaccgcgcgcggc

SEQ ID NO: 5716633 - DNA, 25 bp, Homo sapien
ccgccgcgcgcggtccagggcggag

SEQ ID NO: 5716634 - DNA, 25 bp, Homo sapien
ctccgccctggaccgcgcgcggcgg

SEQ ID NO: 5716635 - DNA, 25 bp, Homo sapien
gccgccgcgcgcggtccagggcgga

SEQ ID NO: 5716636 - DNA, 25 bp, Homo sapien
tccgccctggaccgcgcgcggcggc

SEQ ID NO: 5716637 - DNA, 25 bp, Homo sapien
aattcgtttgtatctcgatgctccg

SEQ ID NO: 5716638 - DNA, 25 bp, Homo sapien
cggagcatcgagatacaaacgaatt

SEQ ID NO: 5716639 - DNA, 25 bp, Homo sapien
tcctctccactaacagaaaggggtc

SEQ ID NO: 5716640 - DNA, 25 bp, Homo sapien
gacccctttctgttagtggagagga

SEQ ID NO: 5716641 - DNA, 25 bp, Homo sapien
gcgcctagcggacgcggtgacaggg

SEQ ID NO: 5716642 - DNA, 25 bp, Homo sapien
ccctgtcaccgcgtccgctaggcgc

SEQ ID NO: 5716643 - DNA, 25 bp, Homo sapien
gtcgcggagcgcgcgggacaggccg

SEQ ID NO: 5716644 - DNA, 25 bp, Homo sapien
cggcctgtcccgcgcgctccgcgac

SEQ ID NO: 5716645 - DNA, 25 bp, Homo sapien
ggatagataacggaacacttgtatt

SEQ ID NO: 5716646 - DNA, 25 bp, Homo sapien
aatacaagtgttccgttatctatcc

SEQ ID NO: 5716647 - DNA, 25 bp, Homo sapien
cgtctccgaggccaggactgttacg

SEQ ID NO: 5716648 - DNA, 25 bp, Homo sapien
cgtaacagtcctggcctcggagacg

SEQ ID NO: 5716649 - DNA, 25 bp, Homo sapien
tctgcccgttcccacggcgagggta

SEQ ID NO: 5716650 - DNA, 25 bp, Homo sapien
taccctcgccgtgggaacgggcaga

SEQ ID NO: 5716651 - DNA, 25 bp, Homo sapien
gctggcgacacccacgcgtcccttc

SEQ ID NO: 5716652 - DNA, 25 bp, Homo sapien
gaagggacgcgtgggtgtcgccagc

SEQ ID NO: 5716653 - DNA, 25 bp, Homo sapien
atatggaacttgatatatacggtgt

SEQ ID NO: 5716654 - DNA, 25 bp, Homo sapien
acaccgtatatatcaagttccatat

SEQ ID NO: 5716655 - DNA, 25 bp, Homo sapien
gtgggggtgctcgaccgcgggtcaa

SEQ ID NO: 5716656 - DNA, 25 bp, Homo sapien
ttgacccgcggtcgagcacccccac

SEQ ID NO: 5716657 - DNA, 25 bp, Homo sapien
ccaaccgtacctcgtctcacaccgg

SEQ ID NO: 5716658 - DNA, 25 bp, Homo sapien
ccggtgtgagacgaggtacggttgg

SEQ ID NO: 5716659 - DNA, 25 bp, Homo sapien
tctacggctactgggcacgagactc

SEQ ID NO: 5716660 - DNA, 25 bp, Homo sapien
gagtctcgtgcccagtagccgtaga

SEQ ID NO: 5716661 - DNA, 25 bp, Homo sapien
gtagagttttgagttgaacgaacaa

SEQ ID NO: 5716662 - DNA, 25 bp, Homo sapien
ttgttcgttcaactcaaaactctac

SEQ ID NO: 5716663 - DNA, 25 bp, Homo sapien
tcggtctgctccgaaacttcggaac

SEQ ID NO: 5716664 - DNA, 25 bp, Homo sapien
gttccgaagtttcggagcagaccga

SEQ ID NO: 5716665 - DNA, 25 bp, Homo sapien
acgcccccgacgccggcatcgatgg

SEQ ID NO: 5716666 - DNA, 25 bp, Homo sapien
ccatcgatgccggcgtcgggggcgt

SEQ ID NO: 5716667 - DNA, 25 bp, Homo sapien
tcggctccgggttcgcgtcagcccc

SEQ ID NO: 5716668 - DNA, 25 bp, Homo sapien
ggggctgacgcgaacccggagccga

SEQ ID NO: 5716669 - DNA, 25 bp, Homo sapien
gtcggctccgggttcgcgtcagccc

SEQ ID NO: 5716670 - DNA, 25 bp, Homo sapien
gggctgacgcgaacccggagccgac

SEQ ID NO: 5716671 - DNA, 25 bp, Homo sapien
cagggaactaaaagattggacacga

SEQ ID NO: 5716672 - DNA, 25 bp, Homo sapien
tcgtgtccaatcttttagttccctg

SEQ ID NO: 5716673 - DNA, 25 bp, Homo sapien
ttggccttcaaactcctcccctcgt

SEQ ID NO: 5716674 - DNA, 25 bp, Homo sapien
acgaggggaggagtttgaaggccaa

SEQ ID NO: 5716675 - DNA, 25 bp, Homo sapien
gcccgtcggtcggtcggccacggag

SEQ ID NO: 5716676 - DNA, 25 bp, Homo sapien
ctccgtggccgaccgaccgacgggc

SEQ ID NO: 5716677 - DNA, 25 bp, Homo sapien
ttagtagaaattgaagaacagggag

SEQ ID NO: 5716678 - DNA, 25 bp, Homo sapien
ctccctgttcttcaatttctactaa

SEQ ID NO: 5716679 - DNA, 25 bp, Homo sapien
ggactcgactggtgagcggaaggag

SEQ ID NO: 5716680 - DNA, 25 bp, Homo sapien
ctccttccgctcaccagtcgagtcc

SEQ ID NO: 5716681 - DNA, 25 bp, Homo sapien
acactatatgtgactgtttgaatat

SEQ ID NO: 5716682 - DNA, 25 bp, Homo sapien
atattcaaacagtcacatatagtgt

SEQ ID NO: 5716683 - DNA, 25 bp, Homo sapien
ccacagtggtgaagattacactgag

SEQ ID NO: 5716684 - DNA, 25 bp, Homo sapien
ctcagtgtaatcttcaccactgtgg

SEQ ID NO: 5716685 - DNA, 25 bp, Homo sapien
agttgtaaaattcgaccactaggta

SEQ ID NO: 5716686 - DNA, 25 bp, Homo sapien
tacctagtggtcgaattttacaact

SEQ ID NO: 5716687 - DNA, 25 bp, Homo sapien
gagcccgggagtagtcactgagtat

SEQ ID NO: 5716688 - DNA, 25 bp, Homo sapien
atactcagtgactactcccgggctc

SEQ ID NO: 5716689 - DNA, 25 bp, Homo sapien
cctcccggagctacaggtcggacgg

SEQ ID NO: 5716690 - DNA, 25 bp, Homo sapien
ccgtccgacctgtagctccgggagg

SEQ ID NO: 5716691 - DNA, 25 bp, Homo sapien
aagacttggcctaagggtagaacat

SEQ ID NO: 5716692 - DNA, 25 bp, Homo sapien
atgttctacccttaggccaagtctt

SEQ ID NO: 5716693 - DNA, 25 bp, Homo sapien
cgcgcgcagcgtacgcggcctagta

SEQ ID NO: 5716694 - DNA, 25 bp, Homo sapien
tactaggccgcgtacgctgcgcgcg

SEQ ID NO: 5716695 - DNA, 25 bp, Homo sapien
gtgcccgggtgtcggtcgccgcgcg

SEQ ID NO: 5716696 - DNA, 25 bp, Homo sapien
cgcgcggcgaccgacacccgggcac

SEQ ID NO: 5716697 - DNA, 25 bp, Homo sapien
gcgggtgcccgggtgtcggtcgccg

SEQ ID NO: 5716698 - DNA, 25 bp, Homo sapien
cggcgaccgacacccgggcacccgc

SEQ ID NO: 5716699 - DNA, 25 bp, Homo sapien
atattttacaattttagaccactta

SEQ ID NO: 5716700 - DNA, 25 bp, Homo sapien
taagtggtctaaaattgtaaaatat

SEQ ID NO: 5716701 - DNA, 25 bp, Homo sapien
ggtgtaagtcgatatgtcgagagaa

SEQ ID NO: 5716702 - DNA, 25 bp, Homo sapien
ttctctcgacatatcgacttacacc

SEQ ID NO: 5716703 - DNA, 25 bp, Homo sapien
gaaccaggtcccgcagcccctcggg

SEQ ID NO: 5716704 - DNA, 25 bp, Homo sapien
cccgaggggctgcgggacctggttc

SEQ ID NO: 5716705 - DNA, 25 bp, Homo sapien
tcggcgtgtgtgcagagggtggtct

SEQ ID NO: 5716706 - DNA, 25 bp, Homo sapien
agaccaccctctgcacacacgccga

SEQ ID NO: 5716707 - DNA, 25 bp, Homo sapien
aagatttggtgtgactcttatatcc

SEQ ID NO: 5716708 - DNA, 25 bp, Homo sapien
ggatataagagtcacaccaaatctt

SEQ ID NO: 5716709 - DNA, 25 bp, Homo sapien
gatgagtaggtgtgtctgtctttcg

SEQ ID NO: 5716710 - DNA, 25 bp, Homo sapien
cgaaagacagacacacctactcatc

SEQ ID NO: 5716711 - DNA, 25 bp, Homo sapien
tataattctaaaaggtcctttgatt

SEQ ID NO: 5716712 - DNA, 25 bp, Homo sapien
aatcaaaggaccttttagaattata

SEQ ID NO: 5716713 - DNA, 25 bp, Homo sapien
gccgtggtctcccagttgcaaaacc

SEQ ID NO: 5716714 - DNA, 25 bp, Homo sapien
ggttttgcaactgggagaccacggc

SEQ ID NO: 5716715 - DNA, 25 bp, Homo sapien
aggggtgccgggtctctcccaacac

SEQ ID NO: 5716716 - DNA, 25 bp, Homo sapien
gtgttgggagagacccggcacccct

SEQ ID NO: 5716717 - DNA, 25 bp, Homo sapien
accgaccaataagggctgtgactgg

SEQ ID NO: 5716718 - DNA, 25 bp, Homo sapien
ccagtcacagcccttattggtcggt

SEQ ID NO: 5716719 - DNA, 25 bp, Homo sapien
acgcaccttcgcagaggtgatgcac

SEQ ID NO: 5716720 - DNA, 25 bp, Homo sapien
gtgcatcacctctgcgaaggtgcgt

SEQ ID NO: 5716721 - DNA, 25 bp, Homo sapien
ttaaagaagacttacttaaagacaa

SEQ ID NO: 5716722 - DNA, 25 bp, Homo sapien
ttgtctttaagtaagtcttctttaa

SEQ ID NO: 5716723 - DNA, 25 bp, Homo sapien
gttgtcccacgtaaagaaaacagat

SEQ ID NO: 5716724 - DNA, 25 bp, Homo sapien
atctgttttctttacgtgggacaac

SEQ ID NO: 5716725 - DNA, 25 bp, Homo sapien
gtagtagcggacgttggaggaagtc

SEQ ID NO: 5716726 - DNA, 25 bp, Homo sapien
gacttcctccaacgtccgctactac

SEQ ID NO: 5716727 - DNA, 25 bp, Homo sapien
ttttgtctcatttaacataacggag

SEQ ID NO: 5716728 - DNA, 25 bp, Homo sapien
ctccgttatgttaaatgagacaaaa

SEQ ID NO: 5716729 - DNA, 25 bp, Homo sapien
gtttcaaattgaacacacaagcgaa

SEQ ID NO: 5716730 - DNA, 25 bp, Homo sapien
ttcgcttgtgtgttcaatttgaaac

SEQ ID NO: 5716731 - DNA, 25 bp, Homo sapien
ggtcggtggcggcgaagaccggtgg

SEQ ID NO: 5716732 - DNA, 25 bp, Homo sapien
ccaccggtcttcgccgccaccgacc

SEQ ID NO: 5716733 - DNA, 25 bp, Homo sapien
cgcgacatggttacctccccgcgct

SEQ ID NO: 5716734 - DNA, 25 bp, Homo sapien
agcgcggggaggtaaccatgtcgcg

SEQ ID NO: 5716735 - DNA, 25 bp, Homo sapien
cgagcagaggccaagtgccgacaca

SEQ ID NO: 5716736 - DNA, 25 bp, Homo sapien
tgtgtcggcacttggcctctgctcg

SEQ ID NO: 5716737 - DNA, 25 bp, Homo sapien
atgatttgatagttgtattttacag

SEQ ID NO: 5716738 - DNA, 25 bp, Homo sapien
ctgtaaaatacaactatcaaatcat

SEQ ID NO: 5716739 - DNA, 25 bp, Homo sapien
cgggtgcgtactctggttctcacgt

SEQ ID NO: 5716740 - DNA, 25 bp, Homo sapien
acgtgagaaccagagtacgcacccg

SEQ ID NO: 5716741 - DNA, 25 bp, Homo sapien
caccgtgaaatagaaccgtcagcac

SEQ ID NO: 5716742 - DNA, 25 bp, Homo sapien
gtgctgacggttctatttcacggtg

SEQ ID NO: 5716743 - DNA, 25 bp, Homo sapien
actccaggtcgatgccaacggcagg

SEQ ID NO: 5716744 - DNA, 25 bp, Homo sapien
cctgccgttggcatcgacctggagt

SEQ ID NO: 5716745 - DNA, 25 bp, Homo sapien
acttcgaagactcggtgatactcac

SEQ ID NO: 5716746 - DNA, 25 bp, Homo sapien
gtgagtatcaccgagtcttcgaagt

SEQ ID NO: 5716747 - DNA, 25 bp, Homo sapien
tgtgggagcacgtcgaagacactct

SEQ ID NO: 5716748 - DNA, 25 bp, Homo sapien
agagtgtcttcgacgtgctcccaca

SEQ ID NO: 5716749 - DNA, 25 bp, Homo sapien
atggcgagtcgaccaggagacggta

SEQ ID NO: 5716750 - DNA, 25 bp, Homo sapien
taccgtctcctggtcgactcgccat

SEQ ID NO: 5716751 - DNA, 25 bp, Homo sapien
gacgtcatccttgaacccgttatgg

SEQ ID NO: 5716752 - DNA, 25 bp, Homo sapien
ccataacgggttcaaggatgacgtc

SEQ ID NO: 5716753 - DNA, 25 bp, Homo sapien
actatattgtagttttttcacataa

SEQ ID NO: 5716754 - DNA, 25 bp, Homo sapien
ttatgtgaaaaaactacaatatagt

SEQ ID NO: 5716755 - DNA, 25 bp, Homo sapien
aattactatattgtagttttttcac

SEQ ID NO: 5716756 - DNA, 25 bp, Homo sapien
gtgaaaaaactacaatatagtaatt

SEQ ID NO: 5716757 - DNA, 25 bp, Homo sapien
gtgttcttctcaagtttcgattttt

SEQ ID NO: 5716758 - DNA, 25 bp, Homo sapien
aaaaatcgaaacttgagaagaacac

SEQ ID NO: 5716759 - DNA, 25 bp, Homo sapien
cgtcgttgttgacgatgatgaagat

SEQ ID NO: 5716760 - DNA, 25 bp, Homo sapien
atcttcatcatcgtcaacaacgacg

SEQ ID NO: 5716761 - DNA, 25 bp, Homo sapien
ccttccatccgtagaagtctttacc

SEQ ID NO: 5716762 - DNA, 25 bp, Homo sapien
ggtaaagacttctacggatggaagg

SEQ ID NO: 5716763 - DNA, 25 bp, Homo sapien
tctttgtgtctgtggacaaaacaac

SEQ ID NO: 5716764 - DNA, 25 bp, Homo sapien
gttgttttgtccacagacacaaaga

SEQ ID NO: 5716765 - DNA, 25 bp, Homo sapien
tctcaaattcgtgtccacgctacag

SEQ ID NO: 5716766 - DNA, 25 bp, Homo sapien
ctgtagcgtggacacgaatttgaga

SEQ ID NO: 5716767 - DNA, 25 bp, Homo sapien
caggggcctgggtcctcgcacgacc

SEQ ID NO: 5716768 - DNA, 25 bp, Homo sapien
ggtcgtgcgaggacccaggcccctg

SEQ ID NO: 5716769 - DNA, 25 bp, Homo sapien
aatcatagaccttgcagtgaaaaag

SEQ ID NO: 5716770 - DNA, 25 bp, Homo sapien
ctttttcactgcaaggtctatgatt

SEQ ID NO: 5716771 - DNA, 25 bp, Homo sapien
agacaataccagtaattccttttga

SEQ ID NO: 5716772 - DNA, 25 bp, Homo sapien
tcaaaaggaattactggtattgtct

SEQ ID NO: 5716773 - DNA, 25 bp, Homo sapien
tcctgtagcccgagaaacccccagg

SEQ ID NO: 5716774 - DNA, 25 bp, Homo sapien
cctgggggtttctcgggctacagga

SEQ ID NO: 5716775 - DNA, 25 bp, Homo sapien
tccgggacgttggtctcgagtccag

SEQ ID NO: 5716776 - DNA, 25 bp, Homo sapien
ctggactcgagaccaacgtcccgga

SEQ ID NO: 5716777 - DNA, 25 bp, Homo sapien
aaatagaattcacaaaagagttctc

SEQ ID NO: 5716778 - DNA, 25 bp, Homo sapien
gagaactcttttgtgaattctattt

SEQ ID NO: 5716779 - DNA, 25 bp, Homo sapien
gaattccaattctagagaattttag

SEQ ID NO: 5716780 - DNA, 25 bp, Homo sapien
ctaaaattctctagaattggaattc

SEQ ID NO: 5716781 - DNA, 25 bp, Homo sapien
atacagaacattaatatagggtttc

SEQ ID NO: 5716782 - DNA, 25 bp, Homo sapien
gaaaccctatattaatgttctgtat

SEQ ID NO: 5716783 - DNA, 25 bp, Homo sapien
gagcggaggcgcaccgagggccgta

SEQ ID NO: 5716784 - DNA, 25 bp, Homo sapien
tacggccctcggtgcgcctccgctc

SEQ ID NO: 5716785 - DNA, 25 bp, Homo sapien
tcgaagagaagaagtacagtaagac

SEQ ID NO: 5716786 - DNA, 25 bp, Homo sapien
gtcttactgtacttcttctcttcga

SEQ ID NO: 5716787 - DNA, 25 bp, Homo sapien
acccatccggtctggggcgtccgac

SEQ ID NO: 5716788 - DNA, 25 bp, Homo sapien
gtcggacgccccagaccggatgggt

SEQ ID NO: 5716789 - DNA, 25 bp, Homo sapien
ggcaccgccggcaggtccggaccct

SEQ ID NO: 5716790 - DNA, 25 bp, Homo sapien
agggtccggacctgccggcggtgcc

SEQ ID NO: 5716791 - DNA, 25 bp, Homo sapien
agcgagaggtgtaatgctagttcct

SEQ ID NO: 5716792 - DNA, 25 bp, Homo sapien
aggaactagcattacacctctcgct

SEQ ID NO: 5716793 - DNA, 25 bp, Homo sapien
gacgcctgtgtttcgacccaccttg

SEQ ID NO: 5716794 - DNA, 25 bp, Homo sapien
caaggtgggtcgaaacacaggcgtc

SEQ ID NO: 5716795 - DNA, 25 bp, Homo sapien
gtgggccacttaccggcggactcgg

SEQ ID NO: 5716796 - DNA, 25 bp, Homo sapien
ccgagtccgccggtaagtggcccac

SEQ ID NO: 5716797 - DNA, 25 bp, Homo sapien
gggcgctgtcggaggctcgcggggg

SEQ ID NO: 5716798 - DNA, 25 bp, Homo sapien
cccccgcgagcctccgacagcgccc

SEQ ID NO: 5716799 - DNA, 25 bp, Homo sapien
gggccccagtcgtggcgcctctggg

SEQ ID NO: 5716800 - DNA, 25 bp, Homo sapien
cccagaggcgccacgactggggccc

SEQ ID NO: 5716801 - DNA, 25 bp, Homo sapien
gacttctactgcgtttgtttaggac

SEQ ID NO: 5716802 - DNA, 25 bp, Homo sapien
gtcctaaacaaacgcagtagaagtc

SEQ ID NO: 5716803 - DNA, 25 bp, Homo sapien
ggaccatatccttcgattgagagct

SEQ ID NO: 5716804 - DNA, 25 bp, Homo sapien
agctctcaatcgaaggatatggtcc

SEQ ID NO: 5716805 - DNA, 25 bp, Homo sapien
ccgtggaagagataccttctagaat

SEQ ID NO: 5716806 - DNA, 25 bp, Homo sapien
attctagaaggtatctcttccacgg

SEQ ID NO: 5716807 - DNA, 25 bp, Homo sapien
tcggtgcacgcctcggtgctcggct

SEQ ID NO: 5716808 - DNA, 25 bp, Homo sapien
agccgagcaccgaggcgtgcaccga

SEQ ID NO: 5716809 - DNA, 25 bp, Homo sapien
gaacatattacactgacttaaacaa

SEQ ID NO: 5716810 - DNA, 25 bp, Homo sapien
ttgtttaagtcagtgtaatatgttc

SEQ ID NO: 5716811 - DNA, 25 bp, Homo sapien
cgagagtcggcagcggaccccggga

SEQ ID NO: 5716812 - DNA, 25 bp, Homo sapien
tcccggggtccgctgccgactctcg

SEQ ID NO: 5716813 - DNA, 25 bp, Homo sapien
gccgagagtcggcagcggaccccgg

SEQ ID NO: 5716814 - DNA, 25 bp, Homo sapien
ccggggtccgctgccgactctcggc

SEQ ID NO: 5716815 - DNA, 25 bp, Homo sapien
cttcgcgagacggccgacgccacct

SEQ ID NO: 5716816 - DNA, 25 bp, Homo sapien
aggtggcgtcggccgtctcgcgaag

SEQ ID NO: 5716817 - DNA, 25 bp, Homo sapien
accgcactccgatccccgagggcga

SEQ ID NO: 5716818 - DNA, 25 bp, Homo sapien
tcgccctcggggatcggagtgcggt

SEQ ID NO: 5716819 - DNA, 25 bp, Homo sapien
gtccagggaaggcacaaaccgccga

SEQ ID NO: 5716820 - DNA, 25 bp, Homo sapien
tcggcggtttgtgccttccctggac

SEQ ID NO: 5716821 - DNA, 25 bp, Homo sapien
gactcctagacacagcagtggggaa

SEQ ID NO: 5716822 - DNA, 25 bp, Homo sapien
ttccccactgctgtgtctaggagtc

SEQ ID NO: 5716823 - DNA, 25 bp, Homo sapien
gagggcgccgctgtcgcccctgggc

SEQ ID NO: 5716824 - DNA, 25 bp, Homo sapien
gcccaggggcgacagcggcgccctc

SEQ ID NO: 5716825 - DNA, 25 bp, Homo sapien
tcgacataacgacgagtatttgtac

SEQ ID NO: 5716826 - DNA, 25 bp, Homo sapien
gtacaaatactcgtcgttatgtcga

SEQ ID NO: 5716827 - DNA, 25 bp, Homo sapien
tctcgaaactctctctgcataaacc

SEQ ID NO: 5716828 - DNA, 25 bp, Homo sapien
ggtttatgcagagagagtttcgaga

SEQ ID NO: 5716829 - DNA, 25 bp, Homo sapien
agtaacaaggaaagtacagtcggaa

SEQ ID NO: 5716830 - DNA, 25 bp, Homo sapien
ttccgactgtactttccttgttact

SEQ ID NO: 5716831 - DNA, 25 bp, Homo sapien
gacaccaggatagataggttgaaag

SEQ ID NO: 5716832 - DNA, 25 bp, Homo sapien
ctttcaacctatctatcctggtgtc

SEQ ID NO: 5716833 - DNA, 25 bp, Homo sapien
gaaggcccggtaggtgtggagggta

SEQ ID NO: 5716834 - DNA, 25 bp, Homo sapien
taccctccacacctaccgggccttc

SEQ ID NO: 5716835 - DNA, 25 bp, Homo sapien
ggttttgcatttcacgactcgtaca

SEQ ID NO: 5716836 - DNA, 25 bp, Homo sapien
tgtacgagtcgtgaaatgcaaaacc

SEQ ID NO: 5716837 - DNA, 25 bp, Homo sapien
cgtctcttcaatggcagtcggttca

SEQ ID NO: 5716838 - DNA, 25 bp, Homo sapien
tgaaccgactgccattgaagagacg

SEQ ID NO: 5716839 - DNA, 25 bp, Homo sapien
gattagtacttaactatagtttaat

SEQ ID NO: 5716840 - DNA, 25 bp, Homo sapien
attaaactatagttaagtactaatc

SEQ ID NO: 5716841 - DNA, 25 bp, Homo sapien
gctcggcctcgtcgcgttccgcgac

SEQ ID NO: 5716842 - DNA, 25 bp, Homo sapien
gtcgcggaacgcgacgaggccgagc

SEQ ID NO: 5716843 - DNA, 25 bp, Homo sapien
ggtgtgaacggggtcctgacagagg

SEQ ID NO: 5716844 - DNA, 25 bp, Homo sapien
cctctgtcaggaccccgttcacacc

SEQ ID NO: 5716845 - DNA, 25 bp, Homo sapien
tttagaggcttcggtccgtgggtac

SEQ ID NO: 5716846 - DNA, 25 bp, Homo sapien
gtacccacggaccgaagcctctaaa

SEQ ID NO: 5716847 - DNA, 25 bp, Homo sapien
ccgtcacctttttgaggtacagaag

SEQ ID NO: 5716848 - DNA, 25 bp, Homo sapien
cttctgtacctcaaaaaggtgacgg

SEQ ID NO: 5716849 - DNA, 25 bp, Homo sapien
gccctgcccccgagaggcgtcctgt

SEQ ID NO: 5716850 - DNA, 25 bp, Homo sapien
acaggacgcctctcgggggcagggc

SEQ ID NO: 5716851 - DNA, 25 bp, Homo sapien
aggagtggcaaagagattttgagta

SEQ ID NO: 5716852 - DNA, 25 bp, Homo sapien
tactcaaaatctctttgccactcct

SEQ ID NO: 5716853 - DNA, 25 bp, Homo sapien
ggtttattaacttacactcgcgacg

SEQ ID NO: 5716854 - DNA, 25 bp, Homo sapien
cgtcgcgagtgtaagttaataaacc

SEQ ID NO: 5716855 - DNA, 25 bp, Homo sapien
aatgagactttagagaatttgagtg

SEQ ID NO: 5716856 - DNA, 25 bp, Homo sapien
cactcaaattctctaaagtctcatt

SEQ ID NO: 5716857 - DNA, 25 bp, Homo sapien
cgtcgttactgacacagacactact

SEQ ID NO: 5716858 - DNA, 25 bp, Homo sapien
agtagtgtctgtgtcagtaacgacg

SEQ ID NO: 5716859 - DNA, 25 bp, Homo sapien
tactcttataggttagaagattttt

SEQ ID NO: 5716860 - DNA, 25 bp, Homo sapien
aaaaatcttctaacctataagagta

SEQ ID NO: 5716861 - DNA, 25 bp, Homo sapien
ttactcttataggttagaagatttt

SEQ ID NO: 5716862 - DNA, 25 bp, Homo sapien
aaaatcttctaacctataagagtaa

SEQ ID NO: 5716863 - DNA, 25 bp, Homo sapien
gggctggttctcaaaagtgtccaag

SEQ ID NO: 5716864 - DNA, 25 bp, Homo sapien
cttggacacttttgagaaccagccc

SEQ ID NO: 5716865 - DNA, 25 bp, Homo sapien
gcggaggcgtccgaggagcggcgac

SEQ ID NO: 5716866 - DNA, 25 bp, Homo sapien
gtcgccgctcctcggacgcctccgc

SEQ ID NO: 5716867 - DNA, 25 bp, Homo sapien
tcggctggggtagcgtgtgcgtcgt

SEQ ID NO: 5716868 - DNA, 25 bp, Homo sapien
acgacgcacacgctaccccagccga

SEQ ID NO: 5716869 - DNA, 25 bp, Homo sapien
gaaacagtctcaaacggtcgagtgg

SEQ ID NO: 5716870 - DNA, 25 bp, Homo sapien
ccactcgaccgtttgagactgtttc

SEQ ID NO: 5716871 - DNA, 25 bp, Homo sapien
gatgaccagttgatattgaagatat

SEQ ID NO: 5716872 - DNA, 25 bp, Homo sapien
atatcttcaatatcaactggtcatc

SEQ ID NO: 5716873 - DNA, 25 bp, Homo sapien
gaaactcatacttctttgaagacta

SEQ ID NO: 5716874 - DNA, 25 bp, Homo sapien
tagtcttcaaagaagtatgagtttc

SEQ ID NO: 5716875 - DNA, 25 bp, Homo sapien
ctaaagagaagacttatactcttca

SEQ ID NO: 5716876 - DNA, 25 bp, Homo sapien
tgaagagtataagtcttctctttag

SEQ ID NO: 5716877 - DNA, 25 bp, Homo sapien
gcggccggcgtcggtggctcgagtg

SEQ ID NO: 5716878 - DNA, 25 bp, Homo sapien
cactcgagccaccgacgccggccgc

SEQ ID NO: 5716879 - DNA, 25 bp, Homo sapien
tggcggccggcgtcggtggctcgag

SEQ ID NO: 5716880 - DNA, 25 bp, Homo sapien
ctcgagccaccgacgccggccgcca

SEQ ID NO: 5716881 - DNA, 25 bp, Homo sapien
ggggttggcggccggcgtcggtggc

SEQ ID NO: 5716882 - DNA, 25 bp, Homo sapien
gccaccgacgccggccgccaacccc

SEQ ID NO: 5716883 - DNA, 25 bp, Homo sapien
taatttacttaaatcatcgacaaaa

SEQ ID NO: 5716884 - DNA, 25 bp, Homo sapien
ttttgtcgatgatttaagtaaatta

SEQ ID NO: 5716885 - DNA, 25 bp, Homo sapien
ggctccgagtcagcacctgtcccac

SEQ ID NO: 5716886 - DNA, 25 bp, Homo sapien
gtgggacaggtgctgactcggagcc

SEQ ID NO: 5716887 - DNA, 25 bp, Homo sapien
agagggtgggtctcacccgacgtta

SEQ ID NO: 5716888 - DNA, 25 bp, Homo sapien
taacgtcgggtgagacccaccctct

SEQ ID NO: 5716889 - DNA, 25 bp, Homo sapien
gtgaggtgagacagacgaccggaac

SEQ ID NO: 5716890 - DNA, 25 bp, Homo sapien
gttccggtcgtctgtctcacctcac

SEQ ID NO: 5716891 - DNA, 25 bp, Homo sapien
gggaaggtgcagtcggttcctgaga

SEQ ID NO: 5716892 - DNA, 25 bp, Homo sapien
tctcaggaaccgactgcaccttccc

SEQ ID NO: 5716893 - DNA, 25 bp, Homo sapien
tatcttttcatctacaaaactttaa

SEQ ID NO: 5716894 - DNA, 25 bp, Homo sapien
ttaaagttttgtagatgaaaagata

SEQ ID NO: 5716895 - DNA, 25 bp, Homo sapien
gcgttgcccttgtttactctcacac

SEQ ID NO: 5716896 - DNA, 25 bp, Homo sapien
gtgtgagagtaaacaagggcaacgc

SEQ ID NO: 5716897 - DNA, 25 bp, Homo sapien
ggagggtcaggaccgccgctacggg

SEQ ID NO: 5716898 - DNA, 25 bp, Homo sapien
cccgtagcggcggtcctgaccctcc

SEQ ID NO: 5716899 - DNA, 25 bp, Homo sapien
gacacctctccggctcgcgacgggc

SEQ ID NO: 5716900 - DNA, 25 bp, Homo sapien
gcccgtcgcgagccggagaggtgtc

SEQ ID NO: 5716901 - DNA, 25 bp, Homo sapien
acgatgttacattcagtttcgttaa

SEQ ID NO: 5716902 - DNA, 25 bp, Homo sapien
ttaacgaaactgaatgtaacatcgt

SEQ ID NO: 5716903 - DNA, 25 bp, Homo sapien
agtctcaaaaatgtcagtcttgtgt

SEQ ID NO: 5716904 - DNA, 25 bp, Homo sapien
acacaagactgacatttttgagact

SEQ ID NO: 5716905 - DNA, 25 bp, Homo sapien
ttggacaactcttaatagcgtctat

SEQ ID NO: 5716906 - DNA, 25 bp, Homo sapien
atagacgctattaagagttgtccaa

SEQ ID NO: 5716907 - DNA, 25 bp, Homo sapien
ccttagcagcccagcatttcccgaa

SEQ ID NO: 5716908 - DNA, 25 bp, Homo sapien
tgacgggccaggccctggagggcag

SEQ ID NO: 5716909 - DNA, 25 bp, Homo sapien
aagcggtccgctgaacaccatgcgg

SEQ ID NO: 5716910 - DNA, 25 bp, Homo sapien
gcctccagcttcacccctaagcagc

SEQ ID NO: 5716911 - DNA, 25 bp, Homo sapien
ggaaggtagcgaggccagcgtcgcc

SEQ ID NO: 5716912 - DNA, 25 bp, Homo sapien
ggggaggcagcgggagctcagtggc

SEQ ID NO: 5716913 - DNA, 25 bp, Homo sapien
ctcccagctctactccaggccccgt

SEQ ID NO: 5716914 - DNA, 25 bp, Homo sapien
acaatgttaacaggccactgaccat

SEQ ID NO: 5716915 - DNA, 25 bp, Homo sapien
caacccactctggctcccacctttt

SEQ ID NO: 5716916 - DNA, 25 bp, Homo sapien
gccgctcggcgtgccgcccaggctc

SEQ ID NO: 5716917 - DNA, 25 bp, Homo sapien
aaggggcggagtgcttcgaggagct

SEQ ID NO: 5716918 - DNA, 25 bp, Homo sapien
gcccgggtttgccctggctggacgg

SEQ ID NO: 5716919 - DNA, 25 bp, Homo sapien
ccgttgccgtctgcacccagaccct

SEQ ID NO: 5716920 - DNA, 25 bp, Homo sapien
acccggccgtgctgaatgcgcagca

SEQ ID NO: 5716921 - DNA, 25 bp, Homo sapien
agccccgcgcacgcccgcctgaccg

SEQ ID NO: 5716922 - DNA, 25 bp, Homo sapien
gtcaggtggaccctgtaaatacatc

SEQ ID NO: 5716923 - DNA, 25 bp, Homo sapien
accggccactacctgtgcaatgcct

SEQ ID NO: 5716924 - DNA, 25 bp, Homo sapien
aacagatggacgtcgaggaccgggc

SEQ ID NO: 5716925 - DNA, 25 bp, Homo sapien
actcatcaagcccaagcgaagactg

SEQ ID NO: 5716926 - DNA, 25 bp, Homo sapien
ttttcggcttcccacccacgccacc

SEQ ID NO: 5716927 - DNA, 25 bp, Homo sapien
ccacatccatcctagcagggccccg

SEQ ID NO: 5716928 - DNA, 25 bp, Homo sapien
aaataatttattttgctcttgtttc

SEQ ID NO: 5716929 - DNA, 25 bp, Homo sapien
gcccagcatttcccgaaggccgaca

SEQ ID NO: 5716930 - DNA, 25 bp, Homo sapien
ccagaccctgagccgccgccgccgg

SEQ ID NO: 5716931 - DNA, 25 bp, Homo sapien
aggagctgtcaaagtgcatgcagga

SEQ ID NO: 5716932 - DNA, 25 bp, Homo sapien
ggacaaggacggcgtcaagtaccag

SEQ ID NO: 5716933 - DNA, 25 bp, Homo sapien
ccccgcgcacgcccgcctgaccgga

SEQ ID NO: 5716934 - DNA, 25 bp, Homo sapien
ctgagccaaagccagagtggccacg

SEQ ID NO: 5716935 - DNA, 25 bp, Homo sapien
acagccccgcgcacgcccgcctgac

SEQ ID NO: 5716936 - DNA, 25 bp, Homo sapien
gcctgccgccacatccatcctagca

SEQ ID NO: 5716937 - DNA, 25 bp, Homo sapien
agctgtcccaagtcctccggttctt

SEQ ID NO: 5716938 - DNA, 25 bp, Homo sapien
gcagcccgaggagaggacaaggacg

SEQ ID NO: 5716939 - DNA, 25 bp, Homo sapien
acaaggacggcgtcaagtaccaggt

SEQ ID NO: 5716940 - DNA, 25 bp, Homo sapien
gaccggaggccagatgtgccgccca

SEQ ID NO: 5716941 - DNA, 25 bp, Homo sapien
tgcaaattgtcagacgacaaccacc

SEQ ID NO: 5716942 - DNA, 25 bp, Homo sapien
gccgcccaggctctgctggtgagcg

SEQ ID NO: 5716943 - DNA, 25 bp, Homo sapien
tacccctcctatgtgccggcggctg

SEQ ID NO: 5716944 - DNA, 25 bp, Homo sapien
tggacacatggcacctgtgggccac

SEQ ID NO: 5716945 - DNA, 25 bp, Homo sapien
cgcccaggcctagctactatgggca

SEQ ID NO: 5716946 - DNA, 25 bp, Homo sapien
ggcctccctcacccctacagcaacc

SEQ ID NO: 5716947 - DNA, 25 bp, Homo sapien
ctccgacgcccatccacccctcctc

SEQ ID NO: 5716948 - DNA, 25 bp, Homo sapien
ccagcctctccttcggccaccccca

SEQ ID NO: 5716949 - DNA, 25 bp, Homo sapien
gagacttggtggtctgagctgtccc

SEQ ID NO: 5716950 - DNA, 25 bp, Homo sapien
gcctgaccggaggccagatgtgccg

SEQ ID NO: 5716951 - DNA, 25 bp, Homo sapien
ccgaccactcatcaagcccaagcga

SEQ ID NO: 5716952 - DNA, 25 bp, Homo sapien
tgcacccctcagctgctggaggccc

SEQ ID NO: 5716953 - DNA, 25 bp, Homo sapien
actctggctcccaccttttcggctt

SEQ ID NO: 5716954 - DNA, 25 bp, Homo sapien
ggggccacagccacccctctctggc

SEQ ID NO: 5716955 - DNA, 25 bp, Homo sapien
tagcagggccccgtcgcccaccagg

SEQ ID NO: 5716956 - DNA, 25 bp, Homo sapien
gctgtcaaagtgcatgcaggagaag

SEQ ID NO: 5716957 - DNA, 25 bp, Homo sapien
cccacccacgccacccaaagaagtg

SEQ ID NO: 5716958 - DNA, 25 bp, Homo sapien
gcctgccgcgcacctcgccctgctc

SEQ ID NO: 5716959 - DNA, 25 bp, Homo sapien
gattcccaggccagggctgggtcac

SEQ ID NO: 5716960 - DNA, 25 bp, Homo sapien
cagcggactcttccaccccggaggc

SEQ ID NO: 5716961 - DNA, 25 bp, Homo sapien
ggggggtagtgcagcccgaggagag

SEQ ID NO: 5716962 - DNA, 25 bp, Homo sapien
agcgcagcaaggctcgttcctgttc

SEQ ID NO: 5716963 - DNA, 25 bp, Homo sapien
tagccgaactccaggctgggctgag

SEQ ID NO: 5716964 - DNA, 25 bp, Homo sapien
aatttattttgctcttgtttctaac

SEQ ID NO: 5716965 - DNA, 25 bp, Homo sapien
cggggaccctgtctgcaacgcctgt

SEQ ID NO: 5716966 - DNA, 25 bp, Homo sapien
ttcccaggccagggctgggtcacag

SEQ ID NO: 5716967 - DNA, 25 bp, Homo sapien
caccacccgggcctggcgcacaact

SEQ ID NO: 5716968 - DNA, 25 bp, Homo sapien
cctcagctgctggaggccctggagg

SEQ ID NO: 5716969 - DNA, 25 bp, Homo sapien
cgctcggcgtgccgcccaggctctg

SEQ ID NO: 5716970 - DNA, 25 bp, Homo sapien
gagctgtcaaagtgcatgcaggaga

SEQ ID NO: 5716971 - DNA, 25 bp, Homo sapien
gatgggtggaccaaacccttagcag

SEQ ID NO: 5716972 - DNA, 25 bp, Homo sapien
ccacccaaagaagtgtctcctgacc

SEQ ID NO: 5716973 - DNA, 25 bp, Homo sapien
tgttcagaaggccgggagtgtgtca

SEQ ID NO: 5716974 - DNA, 25 bp, Homo sapien
ctcacgcgcgggcgcgcgtctccta

SEQ ID NO: 5716975 - DNA, 25 bp, Homo sapien
caccttttcggcttcccacccacgc

SEQ ID NO: 5716976 - DNA, 25 bp, Homo sapien
actacaagctgcacaatgttaacag

SEQ ID NO: 5716977 - DNA, 25 bp, Homo sapien
cacagattcccaggccagggctggg

SEQ ID NO: 5716978 - DNA, 25 bp, Homo sapien
ctcagcctgcaccctcttctcctct

SEQ ID NO: 5716979 - DNA, 25 bp, Homo sapien
cacctacccctcctatgtgccggcg

SEQ ID NO: 5716980 - DNA, 25 bp, Homo sapien
acccctaagcagcgcagcaaggctc

SEQ ID NO: 5716981 - DNA, 25 bp, Homo sapien
ccgcgcacgcccgcctgaccggagg

SEQ ID NO: 5716982 - DNA, 25 bp, Homo sapien
ccggaagatgtccaacaagtccaag

SEQ ID NO: 5716983 - DNA, 25 bp, Homo sapien
gatggcgcacccggccgtgctgaat

SEQ ID NO: 5716984 - DNA, 25 bp, Homo sapien
agagcatgaagatggaaagtggcag

SEQ ID NO: 5716985 - DNA, 25 bp, Homo sapien
ctccagcctcatcttccgcgggggg

SEQ ID NO: 5716986 - DNA, 25 bp, Homo sapien
cctctggcttccctctctgaaatag

SEQ ID NO: 5716987 - DNA, 25 bp, Homo sapien
ccgtgctgaatgcgcagcaccccga

SEQ ID NO: 5716988 - DNA, 25 bp, Homo sapien
gccagagtggccacggcccagggag

SEQ ID NO: 5716989 - DNA, 25 bp, Homo sapien
tcccccttcagtgcagctgccctgg

SEQ ID NO: 5716990 - DNA, 25 bp, Homo sapien
ggcctagctactatgggcacccagc

SEQ ID NO: 5716991 - DNA, 25 bp, Homo sapien
accacaagatgaatgggcagaaccg

SEQ ID NO: 5716992 - DNA, 25 bp, Homo sapien
accctgagccgccgccgccggccat

SEQ ID NO: 5716993 - DNA, 25 bp, Homo sapien
cccactccgacgcccatccacccct

SEQ ID NO: 5716994 - DNA, 25 bp, Homo sapien
tctcctggagggcgcccagcagcct

SEQ ID NO: 5716995 - DNA, 25 bp, Homo sapien
ataatttattttgctcttgtttcta

SEQ ID NO: 5716996 - DNA, 25 bp, Homo sapien
ctgcacaatgttaacaggccactga

SEQ ID NO: 5716997 - DNA, 25 bp, Homo sapien
gggtgagctggtgcctgctttgacg

SEQ ID NO: 5716998 - DNA, 25 bp, Homo sapien
aatgcctgtggcctctaccacaaga

SEQ ID NO: 5716999 - DNA, 25 bp, Homo sapien
gaccactcatcaagcccaagcgaag

SEQ ID NO: 5717000 - DNA, 25 bp, Homo sapien
agccacccctctctggcggcgggac

SEQ ID NO: 5717001 - DNA, 25 bp, Homo sapien
tggacgtcgaggaccgggcactccc

SEQ ID NO: 5717002 - DNA, 25 bp, Homo sapien
tgagctgtcccaagtcctccggttc

SEQ ID NO: 5717003 - DNA, 25 bp, Homo sapien
tgggtggaccaaacccttagcagcc

SEQ ID NO: 5717004 - DNA, 25 bp, Homo sapien
gcacccagaccctgagccgccgccg

SEQ ID NO: 5717005 - DNA, 25 bp, Homo sapien
agaaccgaccactcatcaagcccaa

SEQ ID NO: 5717006 - DNA, 25 bp, Homo sapien
aaacccttagcagcccagcatttcc

SEQ ID NO: 5717007 - DNA, 25 bp, Homo sapien
ttatggcgccgaaacgccaacgggg

SEQ ID NO: 5717008 - DNA, 25 bp, Homo sapien
gcacgcccgcctgaccggaggccag

SEQ ID NO: 5717009 - DNA, 25 bp, Homo sapien
ttctccaagacgccactgcacccct

SEQ ID NO: 5717010 - DNA, 25 bp, Homo sapien
cctgtcttgtcaggtggaccctgta

SEQ ID NO: 5717011 - DNA, 25 bp, Homo sapien
acacaccaccccatccccacctacc

SEQ ID NO: 5717012 - DNA, 25 bp, Homo sapien
caacaagtccaagaagagcaagaaa

SEQ ID NO: 5717013 - DNA, 25 bp, Homo sapien
tgccagcccggctcggcccagcacc

SEQ ID NO: 5717014 - DNA, 25 bp, Homo sapien
tctattgcctgccgccacatccatc

SEQ ID NO: 5717015 - DNA, 25 bp, Homo sapien
tggcctctaccacaagatgaatggg

SEQ ID NO: 5717016 - DNA, 25 bp, Homo sapien
caaccccgctcacgcgcgggcgcgc

SEQ ID NO: 5717017 - DNA, 25 bp, Homo sapien
ttagcagcccagcatttcccgaagg

SEQ ID NO: 5717018 - DNA, 25 bp, Homo sapien
acagttgtttggagaacaacaagga

SEQ ID NO: 5717019 - DNA, 25 bp, Homo sapien
cccttggctttgaggccgaagctgc

SEQ ID NO: 5717020 - DNA, 25 bp, Homo sapien
gtgcagcccgaggagaggacaagga

SEQ ID NO: 5717021 - DNA, 25 bp, Homo sapien
tttcccgaaggccgacaccactcct

SEQ ID NO: 5717022 - DNA, 25 bp, Homo sapien
tctccttcggccacccccacccgtc

SEQ ID NO: 5717023 - DNA, 25 bp, Homo sapien
ttgctcttgtttctaacaaggactt

SEQ ID NO: 5717024 - DNA, 25 bp, Homo sapien
ccctacagcaacccactctggctcc

SEQ ID NO: 5717025 - DNA, 25 bp, Homo sapien
caaagccagagtggccacggcccag

SEQ ID NO: 5717026 - DNA, 25 bp, Homo sapien
agctgcacaatgttaacaggccact

SEQ ID NO: 5717027 - DNA, 25 bp, Homo sapien
gcgcacgcccgcctgaccggaggcc

SEQ ID NO: 5717028 - DNA, 25 bp, Homo sapien
cggcggctgcccacgactacagcag

SEQ ID NO: 5717029 - DNA, 25 bp, Homo sapien
gtgcctgctttgacgggccaggccc

SEQ ID NO: 5717030 - DNA, 25 bp, Homo sapien
aactgtggggccacagccacccctc

SEQ ID NO: 5717031 - DNA, 25 bp, Homo sapien
ccagcccggctcggcccagcacccc

SEQ ID NO: 5717032 - DNA, 25 bp, Homo sapien
aagcagcgcagcaaggctcgttcct

SEQ ID NO: 5717033 - DNA, 25 bp, Homo sapien
acaccactcctgccagcccggctcg

SEQ ID NO: 5717034 - DNA, 25 bp, Homo sapien
aagcagccctctctgccgctgcggc

SEQ ID NO: 5717035 - DNA, 25 bp, Homo sapien
cacctgaccgctgcccaggtggggt

SEQ ID NO: 5717036 - DNA, 25 bp, Homo sapien
gactcgcagggcaacccctactatg

SEQ ID NO: 5717037 - DNA, 25 bp, Homo sapien
cctgccagcagttactgtgaatgtt

SEQ ID NO: 5717038 - DNA, 25 bp, Homo sapien
cttcacccctaagcagcgcagcaag

SEQ ID NO: 5717039 - DNA, 25 bp, Homo sapien
ctggggggaccggcctccagcttca

SEQ ID NO: 5717040 - DNA, 25 bp, Homo sapien
ttcaaccccctcgcctcctactctg

SEQ ID NO: 5717041 - DNA, 25 bp, Homo sapien
agcgcaagccacagcctgtcttgtc

SEQ ID NO: 5717042 - DNA, 25 bp, Homo sapien
caggcctagctactatgggcaccca

SEQ ID NO: 5717043 - DNA, 25 bp, Homo sapien
ccgctgagaggctgcctccgcacct

SEQ ID NO: 5717044 - DNA, 25 bp, Homo sapien
cagcaccccgactcacaccacccgg

SEQ ID NO: 5717045 - DNA, 25 bp, Homo sapien
tcctggggggaccggcctccagctt

SEQ ID NO: 5717046 - DNA, 25 bp, Homo sapien
ccgacgcccatccacccctcctcca

SEQ ID NO: 5717047 - DNA, 25 bp, Homo sapien
ttcctgttcagaaggccgggagtgt

SEQ ID NO: 5717048 - DNA, 25 bp, Homo sapien
ccacagccacccctctctggcggcg

SEQ ID NO: 5717049 - DNA, 25 bp, Homo sapien
tggctttgaggccgaagctgctgtg

SEQ ID NO: 5717050 - DNA, 25 bp, Homo sapien
ccagcttcacccctaagcagcgcag

SEQ ID NO: 5717051 - DNA, 25 bp, Homo sapien
gtgagcgccgccaccccgcgcccag

SEQ ID NO: 5717052 - DNA, 25 bp, Homo sapien
ccgcctgccgcgcacctcgccctgc

SEQ ID NO: 5717053 - DNA, 25 bp, Homo sapien
gggccacctcccgcccttcagccac

SEQ ID NO: 5717054 - DNA, 25 bp, Homo sapien
tgaggccgaagctgctgtgactgtg

SEQ ID NO: 5717055 - DNA, 25 bp, Homo sapien
ccctaagcagcgcagcaaggctcgt

SEQ ID NO: 5717056 - DNA, 25 bp, Homo sapien
caggaaggaaacaacattttcttga

SEQ ID NO: 5717057 - DNA, 25 bp, Homo sapien
ctggcggcgggacggcaccggccac

SEQ ID NO: 5717058 - DNA, 25 bp, Homo sapien
acctgtgggccacctcccgcccttc

SEQ ID NO: 5717059 - DNA, 25 bp, Homo sapien
tacatggaacccgcgcagctgctgc

SEQ ID NO: 5717060 - DNA, 25 bp, Homo sapien
cgccacatccatcctagcagggccc

SEQ ID NO: 5717061 - DNA, 25 bp, Homo sapien
ttcagaaggccgggagtgtgtcaac

SEQ ID NO: 5717062 - DNA, 25 bp, Homo sapien
agggctgggtcacaggaaggaaaca

SEQ ID NO: 5717063 - DNA, 25 bp, Homo sapien
gaggcttcctggggggaccggcctc

SEQ ID NO: 5717064 - DNA, 25 bp, Homo sapien
tcaagtaccaggtgtcactgacgga

SEQ ID NO: 5717065 - DNA, 25 bp, Homo sapien
actcggaaccggaagatgtccaaca

SEQ ID NO: 5717066 - DNA, 25 bp, Homo sapien
gggcagaaccgaccactcatcaagc

SEQ ID NO: 5717067 - DNA, 25 bp, Homo sapien
catgcaggagaagtcatcccccttc

SEQ ID NO: 5717068 - DNA, 25 bp, Homo sapien
ggtttcctgcatggacagttgtttg

SEQ ID NO: 5717069 - DNA, 25 bp, Homo sapien
atcctagcagggccccgtcgcccac

SEQ ID NO: 5717070 - DNA, 25 bp, Homo sapien
ggacctcagcctgcaccctcttctc

SEQ ID NO: 5717071 - DNA, 25 bp, Homo sapien
acccagaccctgagccgccgccgcc

SEQ ID NO: 5717072 - DNA, 25 bp, Homo sapien
aatgcgcagcaccccgactcacacc

SEQ ID NO: 5717073 - DNA, 25 bp, Homo sapien
ccacaacccctggaccgtgagcccc

SEQ ID NO: 5717074 - DNA, 25 bp, Homo sapien
ccagcctgctacacaccaccccatc

SEQ ID NO: 5717075 - DNA, 25 bp, Homo sapien
caggccctggagggcagagacaatc

SEQ ID NO: 5717076 - DNA, 25 bp, Homo sapien
gcccgcctgccgcgcacctcgccct

SEQ ID NO: 5717077 - DNA, 25 bp, Homo sapien
gagcagccgcgctggatggcgcacc

SEQ ID NO: 5717078 - DNA, 25 bp, Homo sapien
cccatccccacctacccctcctatg

SEQ ID NO: 5717079 - DNA, 25 bp, Homo sapien
tcacccctacagcaacccactctgg

SEQ ID NO: 5717080 - DNA, 25 bp, Homo sapien
aggcggacaaaagcggtccgctgaa

SEQ ID NO: 5717081 - DNA, 25 bp, Homo sapien
tttctgctaacccttcaaccccctc

SEQ ID NO: 5717082 - DNA, 25 bp, Homo sapien
ctcctgccagcccggctcggcccag

SEQ ID NO: 5717083 - DNA, 25 bp, Homo sapien
gcagccctctctgccgctgcggccc

SEQ ID NO: 5717084 - DNA, 25 bp, Homo sapien
cagatggacgtcgaggaccgggcac

SEQ ID NO: 5717085 - DNA, 25 bp, Homo sapien
gccgacaccactcctgccagcccgg

SEQ ID NO: 5717086 - DNA, 25 bp, Homo sapien
cagggcaacccctactatgccaacc

SEQ ID NO: 5717087 - DNA, 25 bp, Homo sapien
aggagaggacaaggacggcgtcaag

SEQ ID NO: 5717088 - DNA, 25 bp, Homo sapien
tgcaggagaagtcatcccccttcag

SEQ ID NO: 5717089 - DNA, 25 bp, Homo sapien
ctaacaaggacttggagacttggtg

SEQ ID NO: 5717090 - DNA, 25 bp, Homo sapien
tattttgctcttgtttctaacaagg

SEQ ID NO: 5717091 - DNA, 25 bp, Homo sapien
tccaacaagtccaagaagagcaaga

SEQ ID NO: 5717092 - DNA, 25 bp, Homo sapien
cagcaccccctctcctggagggcgc

SEQ ID NO: 5717093 - DNA, 25 bp, Homo sapien
gagcgccgccaccccgcgcccaggt

SEQ ID NO: 5717094 - DNA, 25 bp, Homo sapien
ttgtttctaacaaggacttggagac

SEQ ID NO: 5717095 - DNA, 25 bp, Homo sapien
tggcgcacccggccgtgctgaatgc

SEQ ID NO: 5717096 - DNA, 25 bp, Homo sapien
ctcctgaccctagcaccacgggggc

SEQ ID NO: 5717097 - DNA, 25 bp, Homo sapien
gtgaatgttccccaccgctgagagg

SEQ ID NO: 5717098 - DNA, 25 bp, Homo sapien
tgcggccgctcggcgtgccgcccag

SEQ ID NO: 5717099 - DNA, 25 bp, Homo sapien
agatttgtggggacctcagcctgca

SEQ ID NO: 5717100 - DNA, 25 bp, Homo sapien
acctcagcctgcaccctcttctcct

SEQ ID NO: 5717101 - DNA, 25 bp, Homo sapien
gccatggaggtggcgccggagcagc

SEQ ID NO: 5717102 - DNA, 25 bp, Homo sapien
ctgcaccctcttctcctctggcttc

SEQ ID NO: 5717103 - DNA, 25 bp, Homo sapien
tgctgtgactgtgtccccttactga

SEQ ID NO: 5717104 - DNA, 25 bp, Homo sapien
atggcgccgaaacgccaacggggac

SEQ ID NO: 5717105 - DNA, 25 bp, Homo sapien
gtggggccacagccacccctctctg

SEQ ID NO: 5717106 - DNA, 25 bp, Homo sapien
gcccacgactacagcagcggactct

SEQ ID NO: 5717107 - DNA, 25 bp, Homo sapien
agcctgtcttgtcaggtggaccctg

SEQ ID NO: 5717108 - DNA, 25 bp, Homo sapien
gatgtccaacaagtccaagaagagc

SEQ ID NO: 5717109 - DNA, 25 bp, Homo sapien
ctccagcctctccttcggccacccc

SEQ ID NO: 5717110 - DNA, 25 bp, Homo sapien
tgaatgcgcagcaccccgactcaca

SEQ ID NO: 5717111 - DNA, 25 bp, Homo sapien
cccagcagcctgccagcagttactg

SEQ ID NO: 5717112 - DNA, 25 bp, Homo sapien
ctgctggaggccctggaggcccact

SEQ ID NO: 5717113 - DNA, 25 bp, Homo sapien
ctgccctggctggacacatggcacc

SEQ ID NO: 5717114 - DNA, 25 bp, Homo sapien
aaccggaagatgtccaacaagtcca

SEQ ID NO: 5717115 - DNA, 25 bp, Homo sapien
tcgactcgcagggcaacccctacta

SEQ ID NO: 5717116 - DNA, 25 bp, Homo sapien
caaggacttggagacttggtggtct

SEQ ID NO: 5717117 - DNA, 25 bp, Homo sapien
cctgcccactccgacgcccatccac

SEQ ID NO: 5717118 - DNA, 25 bp, Homo sapien
agcgtcgccccgggactcgctgctc

SEQ ID NO: 5717119 - DNA, 25 bp, Homo sapien
cccacgccacccaaagaagtgtctc

SEQ ID NO: 5717120 - DNA, 25 bp, Homo sapien
cctagcagggccccgtcgcccacca

SEQ ID NO: 5717121 - DNA, 25 bp, Homo sapien
gccccgggactcgctgctcaagtct

SEQ ID NO: 5717122 - DNA, 25 bp, Homo sapien
atggacagttgtttggagaacaaca

SEQ ID NO: 5717123 - DNA, 25 bp, Homo sapien
tgtcactgacggagagcatgaagat

SEQ ID NO: 5717124 - DNA, 25 bp, Homo sapien
agcccaagcgaagactgtcggccgc

SEQ ID NO: 5717125 - DNA, 25 bp, Homo sapien
cccagctctactccaggccccgtcc

SEQ ID NO: 5717126 - DNA, 25 bp, Homo sapien
gccgcccaccgcgcctcgctcgggc

SEQ ID NO: 5717127 - DNA, 25 bp, Homo sapien
caagcgaagactgtcggccgccaga

SEQ ID NO: 5717128 - DNA, 25 bp, Homo sapien
ctccggacacatcctgcccactccg

SEQ ID NO: 5717129 - DNA, 25 bp, Homo sapien
cgccactgcacccctcagctgctgg

SEQ ID NO: 5717130 - DNA, 25 bp, Homo sapien
agggatccagactcggaaccggaag

SEQ ID NO: 5717131 - DNA, 25 bp, Homo sapien
gcagctgccctggctggacacatgg

SEQ ID NO: 5717132 - DNA, 25 bp, Homo sapien
cctgcgcccaggcctagctactatg

SEQ ID NO: 5717133 - DNA, 25 bp, Homo sapien
caggaaggtagcgaggccagcgtcg

SEQ ID NO: 5717134 - DNA, 25 bp, Homo sapien
cagcccgggtttgccctggctggac

SEQ ID NO: 5717135 - DNA, 25 bp, Homo sapien
cggcctccagcttcacccctaagca

SEQ ID NO: 5717136 - DNA, 25 bp, Homo sapien
accccctctcctggagggcgcccag

SEQ ID NO: 5717137 - DNA, 25 bp, Homo sapien
ctgtgcaatgcctgtggcctctacc

SEQ ID NO: 5717138 - DNA, 25 bp, Homo sapien
ctcccttggctttgaggccgaagct

SEQ ID NO: 5717139 - DNA, 25 bp, Homo sapien
tcaactgtggggccacagccacccc

SEQ ID NO: 5717140 - DNA, 25 bp, Homo sapien
gcgccaggaaggtagcgaggccagc

SEQ ID NO: 5717141 - DNA, 25 bp, Homo sapien
attggcgggtccacttgccagggct

SEQ ID NO: 5717142 - DNA, 25 bp, Homo sapien
gccatgggctagggaacagatggac

SEQ ID NO: 5717143 - DNA, 25 bp, Homo sapien
aggtggggtttcctgcatggacagt

SEQ ID NO: 5717144 - DNA, 25 bp, Homo sapien
acagcctgtcttgtcaggtggaccc

SEQ ID NO: 5717145 - DNA, 25 bp, Homo sapien
aacaaggacttggagacttggtggt

SEQ ID NO: 5717146 - DNA, 25 bp, Homo sapien
cgccacccaaagaagtgtctcctga

SEQ ID NO: 5717147 - DNA, 25 bp, Homo sapien
tctcccagatcgctcccttggcttt

SEQ ID NO: 5717148 - DNA, 25 bp, Homo sapien
acttgttgcacagcccgggtttgcc

SEQ ID NO: 5717149 - DNA, 25 bp, Homo sapien
aagagccggcacctgttgtgcaaat

SEQ ID NO: 5717150 - DNA, 25 bp, Homo sapien
agccgcgctggatggcgcacccggc

SEQ ID NO: 5717151 - DNA, 25 bp, Homo sapien
ccccgtcgcccaccaggcggacaaa

SEQ ID NO: 5717152 - DNA, 25 bp, Homo sapien
gtggggtttcctgcatggacagttg

SEQ ID NO: 5717153 - DNA, 25 bp, Homo sapien
gggggcgccgcccaccgcgcctcgc

SEQ ID NO: 5717154 - DNA, 25 bp, Homo sapien
cccgaggagaggacaaggacggcgt

SEQ ID NO: 5717155 - DNA, 25 bp, Homo sapien
ccccttactgagcgcaagccacagc

SEQ ID NO: 5717156 - DNA, 25 bp, Homo sapien
ggccccgtcgcccaccaggcggaca

SEQ ID NO: 5717157 - DNA, 25 bp, Homo sapien
ggagctcagtggcctccctcacccc

SEQ ID NO: 5717158 - DNA, 25 bp, Homo sapien
cgcctgtggcctctactacaagctg

SEQ ID NO: 5717159 - DNA, 25 bp, Homo sapien
gcgaggccagcgtcgccccgggact

SEQ ID NO: 5717160 - DNA, 25 bp, Homo sapien
gggtcacaggaaggaaacaacattt

SEQ ID NO: 5717161 - DNA, 25 bp, Homo sapien
ccctgtaaatacatcctttttctgc

SEQ ID NO: 5717162 - DNA, 25 bp, Homo sapien
ggaccgggcactcccgggatgggtg

SEQ ID NO: 5717163 - DNA, 25 bp, Homo sapien
ttcgaggagctgtcaaagtgcatgc

SEQ ID NO: 5717164 - DNA, 25 bp, Homo sapien
ttctcctctggcttccctctctgaa

SEQ ID NO: 5717165 - DNA, 25 bp, Homo sapien
aacggggaccctgtctgcaacgcct

SEQ ID NO: 5717166 - DNA, 25 bp, Homo sapien
tccgctgaacaccatgcggccgctc

SEQ ID NO: 5717167 - DNA, 25 bp, Homo sapien
gcaacgcctgtggcctctactacaa

SEQ ID NO: 5717168 - DNA, 25 bp, Homo sapien
cccaggctctgctggtgagcgccgc

SEQ ID NO: 5717169 - DNA, 25 bp, Homo sapien
ccacttgccagggctctgggggcag

SEQ ID NO: 5717170 - DNA, 25 bp, Homo sapien
ccacacttgttgcacagcccgggtt

SEQ ID NO: 5717171 - DNA, 25 bp, Homo sapien
cggcacctgttgtgcaaattgtcag

SEQ ID NO: 5717172 - DNA, 25 bp, Homo sapien
acgactacagcagcggactcttcca

SEQ ID NO: 5717173 - DNA, 25 bp, Homo sapien
gtttctaacaaggacttggagactt

SEQ ID NO: 5717174 - DNA, 25 bp, Homo sapien
ccgaaggccgacaccactcctgcca

SEQ ID NO: 5717175 - DNA, 25 bp, Homo sapien
caatcacgggcggtcctgcacagat

SEQ ID NO: 5717176 - DNA, 25 bp, Homo sapien
ttcttgaaaggggaaacgtctccca

SEQ ID NO: 5717177 - DNA, 25 bp, Homo sapien
cagtggcctccctcacccctacagc

SEQ ID NO: 5717178 - DNA, 25 bp, Homo sapien
atcctgcccactccgacgcccatcc

SEQ ID NO: 5717179 - DNA, 25 bp, Homo sapien
cctgaccgctgcccaggtggggttt

SEQ ID NO: 5717180 - DNA, 25 bp, Homo sapien
cactccgacgcccatccacccctcc

SEQ ID NO: 5717181 - DNA, 25 bp, Homo sapien
ctctactacaagctgcacaatgtta

SEQ ID NO: 5717182 - DNA, 25 bp, Homo sapien
tcacccctaagcagcgcagcaaggc

SEQ ID NO: 5717183 - DNA, 25 bp, Homo sapien
gacggcaccggccactacctgtgca

SEQ ID NO: 5717184 - DNA, 25 bp, Homo sapien
tggcgggtccacttgccagggctct

SEQ ID NO: 5717185 - DNA, 25 bp, Homo sapien
ctcacaccacccgggcctggcgcac

SEQ ID NO: 5717186 - DNA, 25 bp, Homo sapien
ggggacctcagcctgcaccctcttc

SEQ ID NO: 5717187 - DNA, 25 bp, Homo sapien
ggccacggcccagggagggtgagct

SEQ ID NO: 5717188 - DNA, 25 bp, Homo sapien
ctcctctggcttccctctctgaaat

SEQ ID NO: 5717189 - DNA, 25 bp, Homo sapien
gcacctgttgtgcaaattgtcagac

SEQ ID NO: 5717190 - DNA, 25 bp, Homo sapien
accaccttatggcgccgaaacgcca

SEQ ID NO: 5717191 - DNA, 25 bp, Homo sapien
cgcccaggtcccgcgagcccgcctg

SEQ ID NO: 5717192 - DNA, 25 bp, Homo sapien
ggcaaaaataatttattttgctctt

SEQ ID NO: 5717193 - DNA, 25 bp, Homo sapien
tcgccccgggactcgctgctcaagt

SEQ ID NO: 5717194 - DNA, 25 bp, Homo sapien
acatcctgcccactccgacgcccat

SEQ ID NO: 5717195 - DNA, 25 bp, Homo sapien
agggcgcccagcagcctgccagcag

SEQ ID NO: 5717196 - DNA, 25 bp, Homo sapien
ccgcgagcccgcctgccgcgcacct

SEQ ID NO: 5717197 - DNA, 25 bp, Homo sapien
caccgcgcctcgctcgggccgttgc

SEQ ID NO: 5717198 - DNA, 25 bp, Homo sapien
cccagcaccccctctcctggagggc

SEQ ID NO: 5717199 - DNA, 25 bp, Homo sapien
acaccatgcggccgctcggcgtgcc

SEQ ID NO: 5717200 - DNA, 25 bp, Homo sapien
gcctctactacaagctgcacaatgt

SEQ ID NO: 5717201 - DNA, 25 bp, Homo sapien
gccgggagtgtgtcaactgtggggc

SEQ ID NO: 5717202 - DNA, 25 bp, Homo sapien
tcttgtttctaacaaggacttggag

SEQ ID NO: 5717203 - DNA, 25 bp, Homo sapien
ctcggcgtgccgcccaggctctgct

SEQ ID NO: 5717204 - DNA, 25 bp, Homo sapien
cgcccatccacccctcctccagcct

SEQ ID NO: 5717205 - DNA, 25 bp, Homo sapien
ctgcccacgactacagcagcggact

SEQ ID NO: 5717206 - DNA, 25 bp, Homo sapien
aaaagcggtccgctgaacaccatgc

SEQ ID NO: 5717207 - DNA, 25 bp, Homo sapien
cctcgcctcctactctgagacaaaa

SEQ ID NO: 5717208 - DNA, 25 bp, Homo sapien
ggccactgaccatgaagaaggaagg

SEQ ID NO: 5717209 - DNA, 25 bp, Homo sapien
aggctgggctgagccaaagccagag

SEQ ID NO: 5717210 - DNA, 25 bp, Homo sapien
gctggacacatggcacctgtgggcc

SEQ ID NO: 5717211 - DNA, 25 bp, Homo sapien
gcagcgcagcaaggctcgttcctgt

SEQ ID NO: 5717212 - DNA, 25 bp, Homo sapien
gaaggcaaccatttttagaaggaaa

SEQ ID NO: 5717213 - DNA, 25 bp, Homo sapien
cccctcctatgtgccggcggctgcc

SEQ ID NO: 5717214 - DNA, 25 bp, Homo sapien
cgaagactgtcggccgccagaagag

SEQ ID NO: 5717215 - DNA, 25 bp, Homo sapien
acgtcttcttcaatcacctcgactc

SEQ ID NO: 5717216 - DNA, 25 bp, Homo sapien
agccctctctgccgctgcggcccac

SEQ ID NO: 5717217 - DNA, 25 bp, Homo sapien
gcgcagctgctgcctccagacgagg

SEQ ID NO: 5717218 - DNA, 25 bp, Homo sapien
tggaacccgcgcagctgctgcctcc

SEQ ID NO: 5717219 - DNA, 25 bp, Homo sapien
aagactgtcggccgccagaagagcc

SEQ ID NO: 5717220 - DNA, 25 bp, Homo sapien
cacaactacatggaacccgcgcagc

SEQ ID NO: 5717221 - DNA, 25 bp, Homo sapien
ccgtccagcatggtgaccgccatgg

SEQ ID NO: 5717222 - DNA, 25 bp, Homo sapien
tgcgcccaggcctagctactatggg

SEQ ID NO: 5717223 - DNA, 25 bp, Homo sapien
tcgccctgctcccagctctactcca

SEQ ID NO: 5717224 - DNA, 25 bp, Homo sapien
cgccagaagagccggcacctgttgt

SEQ ID NO: 5717225 - DNA, 25 bp, Homo sapien
ggagaacaacaaggacaactttatg

SEQ ID NO: 5717226 - DNA, 25 bp, Homo sapien
agcctcatcttccgcggggggtagt

SEQ ID NO: 5717227 - DNA, 25 bp, Homo sapien
cgcgcccaggtcccgcgagcccgcc

SEQ ID NO: 5717228 - DNA, 25 bp, Homo sapien
agaagtcatcccccttcagtgcagc

SEQ ID NO: 5717229 - DNA, 25 bp, Homo sapien
ggagaagtcatcccccttcagtgca

SEQ ID NO: 5717230 - DNA, 25 bp, Homo sapien
tggaggtggcgccggagcagccgcg

SEQ ID NO: 5717231 - DNA, 25 bp, Homo sapien
gcccaggtggggtttcctgcatgga

SEQ ID NO: 5717232 - DNA, 25 bp, Homo sapien
ggccagggctgggtcacaggaagga

SEQ ID NO: 5717233 - DNA, 25 bp, Homo sapien
ccgcctgaccggaggccagatgtgc

SEQ ID NO: 5717234 - DNA, 25 bp, Homo sapien
tttgaggccgaagctgctgtgactg

SEQ ID NO: 5717235 - DNA, 25 bp, Homo sapien
ggctcgttcctgttcagaaggccgg

SEQ ID NO: 5717236 - DNA, 25 bp, Homo sapien
aaggacaactttatgtagagaaaag

SEQ ID NO: 5717237 - DNA, 25 bp, Homo sapien
acagccacccctctctggcggcggg

SEQ ID NO: 5717238 - DNA, 25 bp, Homo sapien
agggaacagatggacgtcgaggacc

SEQ ID NO: 5717239 - DNA, 25 bp, Homo sapien
ctatgggcacccagcctgctacaca

SEQ ID NO: 5717240 - DNA, 25 bp, Homo sapien
gcagctgctgcctccagacgaggtg

SEQ ID NO: 5717241 - DNA, 25 bp, Homo sapien
tactatgccaaccccgctcacgcgc

SEQ ID NO: 5717242 - DNA, 25 bp, Homo sapien
gtctgcacccagaccctgagccgcc

SEQ ID NO: 5717243 - DNA, 25 bp, Homo sapien
ctacagcagcggactcttccacccc

SEQ ID NO: 5717244 - DNA, 25 bp, Homo sapien
cgcgcgggcgcgcgtctcctacagc

SEQ ID NO: 5717245 - DNA, 25 bp, Homo sapien
aggcagcgggagctcagtggcctcc

SEQ ID NO: 5717246 - DNA, 25 bp, Homo sapien
ccttctccaagacgccactgcaccc

SEQ ID NO: 5717247 - DNA, 25 bp, Homo sapien
ctatgccaaccccgctcacgcgcgg

SEQ ID NO: 5717248 - DNA, 25 bp, Homo sapien
cctccgcacctgaccgctgcccagg

SEQ ID NO: 5717249 - DNA, 25 bp, Homo sapien
ctgcaacgcctgtggcctctactac

SEQ ID NO: 5717250 - DNA, 25 bp, Homo sapien
ttcagtgcagctgccctggctggac

SEQ ID NO: 5717251 - DNA, 25 bp, Homo sapien
cagagtggccacggcccagggaggg

SEQ ID NO: 5717252 - DNA, 25 bp, Homo sapien
ccagatcgctcccttggctttgagg

SEQ ID NO: 5717253 - DNA, 25 bp, Homo sapien
cgggcggtcctgcacagattcccag

SEQ ID NO: 5717254 - DNA, 25 bp, Homo sapien
ggccctggaggcccactctctgtgt

SEQ ID NO: 5717255 - DNA, 25 bp, Homo sapien
gacgggggcaaagcagccctctctg

SEQ ID NO: 5717256 - DNA, 25 bp, Homo sapien
cctactatgccaaccccgctcacgc

SEQ ID NO: 5717257 - DNA, 25 bp, Homo sapien
aagatgtccaacaagtccaagaaga

SEQ ID NO: 5717258 - DNA, 25 bp, Homo sapien
atttgtggggacctcagcctgcacc

SEQ ID NO: 5717259 - DNA, 25 bp, Homo sapien
ggggctgcgtctccagcctcatctt

SEQ ID NO: 5717260 - DNA, 25 bp, Homo sapien
ggtgtcactgacggagagcatgaag

SEQ ID NO: 5717261 - DNA, 25 bp, Homo sapien
gggcgccgcccaccgcgcctcgctc

SEQ ID NO: 5717262 - DNA, 25 bp, Homo sapien
cagttactgtgaatgttccccaccg

SEQ ID NO: 5717263 - DNA, 25 bp, Homo sapien
tggtggtctgagctgtcccaagtcc

SEQ ID NO: 5717264 - DNA, 25 bp, Homo sapien
gtcgcccaccaggcggacaaaagcg

SEQ ID NO: 5717265 - DNA, 25 bp, Homo sapien
cggcaccggccactacctgtgcaat

SEQ ID NO: 5717266 - DNA, 25 bp, Homo sapien
cctgagccgccgccgccggccatgg

SEQ ID NO: 5717267 - DNA, 25 bp, Homo sapien
ccctggagggcagagacaatcacgg

SEQ ID NO: 5717268 - DNA, 25 bp, Homo sapien
gaccctgtctgcaacgcctgtggcc

SEQ ID NO: 5717269 - DNA, 25 bp, Homo sapien
caggtcccgcgagcccgcctgccgc

SEQ ID NO: 5717270 - DNA, 25 bp, Homo sapien
cgtcgaggaccgggcactcccggga

SEQ ID NO: 5717271 - DNA, 25 bp, Homo sapien
agctgctgcctccagacgaggtgga

SEQ ID NO: 5717272 - DNA, 25 bp, Homo sapien
ccctctctgccgctgcggcccacca

SEQ ID NO: 5717273 - DNA, 25 bp, Homo sapien
agcgggagctcagtggcctccctca

SEQ ID NO: 5717274 - DNA, 25 bp, Homo sapien
cctccagacgaggtggacgtcttct

SEQ ID NO: 5717275 - DNA, 25 bp, Homo sapien
gcggacaaaagcggtccgctgaaca

SEQ ID NO: 5717276 - DNA, 25 bp, Homo sapien
tgccagcagttactgtgaatgttcc

SEQ ID NO: 5717277 - DNA, 25 bp, Homo sapien
cttcctcgggattggcgggtccact

SEQ ID NO: 5717278 - DNA, 25 bp, Homo sapien
tctggctcccaccttttcggcttcc

SEQ ID NO: 5717279 - DNA, 25 bp, Homo sapien
cgttcctgttcagaaggccgggagt

SEQ ID NO: 5717280 - DNA, 25 bp, Homo sapien
gctcttgtttctaacaaggacttgg

SEQ ID NO: 5717281 - DNA, 25 bp, Homo sapien
tgagaggctgcctccgcacctgacc

SEQ ID NO: 5717282 - DNA, 25 bp, Homo sapien
ggctgcccacgactacagcagcgga

SEQ ID NO: 5717283 - DNA, 25 bp, Homo sapien
gggacggcaccggccactacctgtg

SEQ ID NO: 5717284 - DNA, 25 bp, Homo sapien
gccggcacctgttgtgcaaattgtc

SEQ ID NO: 5717285 - DNA, 25 bp, Homo sapien
acacttgttgcacagcccgggtttg

SEQ ID NO: 5717286 - DNA, 25 bp, Homo sapien
agcagcggactcttccaccccggag

SEQ ID NO: 5717287 - DNA, 25 bp, Homo sapien
ccaaagaagtgtctcctgaccctag

SEQ ID NO: 5717288 - DNA, 25 bp, Homo sapien
gggggcagatttgtggggacctcag

SEQ ID NO: 5717289 - DNA, 25 bp, Homo sapien
ccagactcggaaccggaagatgtcc

SEQ ID NO: 5717290 - DNA, 25 bp, Homo sapien
gtgaccgccatgggctagggaacag

SEQ ID NO: 5717291 - DNA, 25 bp, Homo sapien
ggcccaccaccacaacccctggacc

SEQ ID NO: 5717292 - DNA, 25 bp, Homo sapien
ggagtgtgtcaactgtggggccaca

SEQ ID NO: 5717293 - DNA, 25 bp, Homo sapien
ccaacggggaccctgtctgcaacgc

SEQ ID NO: 5717294 - DNA, 25 bp, Homo sapien
ctactacaagctgcacaatgttaac

SEQ ID NO: 5717295 - DNA, 25 bp, Homo sapien
ctcgcagggcaacccctactatgcc

SEQ ID NO: 5717296 - DNA, 25 bp, Homo sapien
ttaacaggccactgaccatgaagaa

SEQ ID NO: 5717297 - DNA, 25 bp, Homo sapien
ccacgactacagcagcggactcttc

SEQ ID NO: 5717298 - DNA, 25 bp, Homo sapien
atgccaaccccgctcacgcgcgggc

SEQ ID NO: 5717299 - DNA, 25 bp, Homo sapien
tttgacgggccaggccctggagggc

SEQ ID NO: 5717300 - DNA, 25 bp, Homo sapien
gtcatcccccttcagtgcagctgcc

SEQ ID NO: 5717301 - DNA, 25 bp, Homo sapien
cttcggccacccccacccgtccagc

SEQ ID NO: 5717302 - DNA, 25 bp, Homo sapien
caagcccaagcgaagactgtcggcc

SEQ ID NO: 5717303 - DNA, 25 bp, Homo sapien
cgctcgggccgttgccgtctgcacc

SEQ ID NO: 5717304 - DNA, 25 bp, Homo sapien
ggacaactttatgtagagaaaagga

SEQ ID NO: 5717305 - DNA, 25 bp, Homo sapien
tcggcccagcaccccctctcctgga

SEQ ID NO: 5717306 - DNA, 25 bp, Homo sapien
gggagggtgagctggtgcctgcttt

SEQ ID NO: 5717307 - DNA, 25 bp, Homo sapien
cgggattggcgggtccacttgccag

SEQ ID NO: 5717308 - DNA, 25 bp, Homo sapien
tctgtctattgcctgccgccacatc

SEQ ID NO: 5717309 - DNA, 25 bp, Homo sapien
ccttttcggcttcccacccacgcca

SEQ ID NO: 5717310 - DNA, 25 bp, Homo sapien
gctcccaccttttcggcttcccacc

SEQ ID NO: 5717311 - DNA, 25 bp, Homo sapien
aggcccactctctgtgtacccaggg

SEQ ID NO: 5717312 - DNA, 25 bp, Homo sapien
ctggagggcagagacaatcacgggc

SEQ ID NO: 5717313 - DNA, 25 bp, Homo sapien
acccgggcctggcgcacaactacat

SEQ ID NO: 5717314 - DNA, 25 bp, Homo sapien
tgggctgagccaaagccagagtggc

SEQ ID NO: 5717315 - DNA, 25 bp, Homo sapien
tcctatgtgccggcggctgcccacg

SEQ ID NO: 5717316 - DNA, 25 bp, Homo sapien
acgaaggcaaccatttttagaagga

SEQ ID NO: 5717317 - DNA, 25 bp, Homo sapien
ggggtttcctgcatggacagttgtt

SEQ ID NO: 5717318 - DNA, 25 bp, Homo sapien
gacgtcgaggaccgggcactcccgg

SEQ ID NO: 5717319 - DNA, 25 bp, Homo sapien
caccacaacccctggaccgtgagcc

SEQ ID NO: 5717320 - DNA, 25 bp, Homo sapien
actgagcgcaagccacagcctgtct

SEQ ID NO: 5717321 - DNA, 25 bp, Homo sapien
cgcccaggctctgctggtgagcgcc

SEQ ID NO: 5717322 - DNA, 25 bp, Homo sapien
tgaagatggaaagtggcagtcccct

SEQ ID NO: 5717323 - DNA, 25 bp, Homo sapien
gtggccacggcccagggagggtgag

SEQ ID NO: 5717324 - DNA, 25 bp, Homo sapien
agcttcacccctaagcagcgcagca

SEQ ID NO: 5717325 - DNA, 25 bp, Homo sapien
tgcacagattcccaggccagggctg

SEQ ID NO: 5717326 - DNA, 25 bp, Homo sapien
aagtgtctcctgaccctagcaccac

SEQ ID NO: 5717327 - DNA, 25 bp, Homo sapien
gaggtggcgccggagcagccgcgct

SEQ ID NO: 5717328 - DNA, 25 bp, Homo sapien
cagacgaggtggacgtcttcttcaa

SEQ ID NO: 5717329 - DNA, 25 bp, Homo sapien
gtgccggcggctgcccacgactaca

SEQ ID NO: 5717330 - DNA, 25 bp, Homo sapien
ctaccacaagatgaatgggcagaac

SEQ ID NO: 5717331 - DNA, 25 bp, Homo sapien
ggaggccagatgtgccgcccacact

SEQ ID NO: 5717332 - DNA, 25 bp, Homo sapien
gccctgctcccagctctactccagg

SEQ ID NO: 5717333 - DNA, 25 bp, Homo sapien
actgaccatgaagaaggaagggatc

SEQ ID NO: 5717334 - DNA, 25 bp, Homo sapien
ctgaaatagccgaactccaggctgg

SEQ ID NO: 5717335 - DNA, 25 bp, Homo sapien
aaccgaccactcatcaagcccaagc

SEQ ID NO: 5717336 - DNA, 25 bp, Homo sapien
ccaccaccttatggcgccgaaacgc

SEQ ID NO: 5717337 - DNA, 25 bp, Homo sapien
cgaggtggacgtcttcttcaatcac

SEQ ID NO: 5717338 - DNA, 25 bp, Homo sapien
ggcggtcctgcacagattcccaggc

SEQ ID NO: 5717339 - DNA, 25 bp, Homo sapien
ggcgcgcgtctcctacagccccgcg

SEQ ID NO: 5717340 - DNA, 25 bp, Homo sapien
agaggctgcctccgcacctgaccgc

SEQ ID NO: 5717341 - DNA, 25 bp, Homo sapien
accaggtgtcactgacggagagcat

SEQ ID NO: 5717342 - DNA, 25 bp, Homo sapien
cccaggtcccgcgagcccgcctgcc

SEQ ID NO: 5717343 - DNA, 25 bp, Homo sapien
tctgagctgtcccaagtcctccggt

SEQ ID NO: 5717344 - DNA, 25 bp, Homo sapien
aggctgcctccgcacctgaccgctg

SEQ ID NO: 5717345 - DNA, 25 bp, Homo sapien
aacgtctcccagatcgctcccttgg

SEQ ID NO: 5717346 - DNA, 25 bp, Homo sapien
tgtggcctctaccacaagatgaatg

SEQ ID NO: 5717347 - DNA, 25 bp, Homo sapien
aaatacatcctttttctgctaaccc

SEQ ID NO: 5717348 - DNA, 25 bp, Homo sapien
gagtggccacggcccagggagggtg

SEQ ID NO: 5717349 - DNA, 25 bp, Homo sapien
acggagagcatgaagatggaaagtg

SEQ ID NO: 5717350 - DNA, 25 bp, Homo sapien
accactcctgccagcccggctcggc

SEQ ID NO: 5717351 - DNA, 25 bp, Homo sapien
aattgtcagacgacaaccaccacct

SEQ ID NO: 5717352 - DNA, 25 bp, Homo sapien
tccccaccgctgagaggctgcctcc

SEQ ID NO: 5717353 - DNA, 25 bp, Homo sapien
gcagaaccgaccactcatcaagccc

SEQ ID NO: 5717354 - DNA, 25 bp, Homo sapien
ccagcgtcgccccgggactcgctgc

SEQ ID NO: 5717355 - DNA, 25 bp, Homo sapien
ggaggcagcgggagctcagtggcct

SEQ ID NO: 5717356 - DNA, 25 bp, Homo sapien
gccggagcagccgcgctggatggcg

SEQ ID NO: 5717357 - DNA, 25 bp, Homo sapien
tggatggcgcacccggccgtgctga

SEQ ID NO: 5717358 - DNA, 25 bp, Homo sapien
tgtcaaagtgcatgcaggagaagtc

SEQ ID NO: 5717359 - DNA, 25 bp, Homo sapien
gatgtgccgcccacacttgttgcac

SEQ ID NO: 5717360 - DNA, 25 bp, Homo sapien
tgcgcagcaccccgactcacaccac

SEQ ID NO: 5717361 - DNA, 25 bp, Homo sapien
gtggcagtcccctgcgcccaggcct

SEQ ID NO: 5717362 - DNA, 25 bp, Homo sapien
agcctgccagcagttactgtgaatg

SEQ ID NO: 5717363 - DNA, 25 bp, Homo sapien
gacgggacagacgaaggcaaccatt

SEQ ID NO: 5717364 - DNA, 25 bp, Homo sapien
acaaccaccaccttatggcgccgaa

SEQ ID NO: 5717365 - DNA, 25 bp, Homo sapien
gaatgttccccaccgctgagaggct

SEQ ID NO: 5717366 - DNA, 25 bp, Homo sapien
gggcctggcgcacaactacatggaa

SEQ ID NO: 5717367 - DNA, 25 bp, Homo sapien
catggaggtggcgccggagcagccg

SEQ ID NO: 5717368 - DNA, 25 bp, Homo sapien
gaggccctggaggcccactctctgt

SEQ ID NO: 5717369 - DNA, 25 bp, Homo sapien
ctgtaaatacatcctttttctgcta

SEQ ID NO: 5717370 - DNA, 25 bp, Homo sapien
tccgcacctgaccgctgcccaggtg

SEQ ID NO: 5717371 - DNA, 25 bp, Homo sapien
ggttcttcctcgggattggcgggtc

SEQ ID NO: 5717372 - DNA, 25 bp, Homo sapien
caagatgaatgggcagaaccgacca

SEQ ID NO: 5717373 - DNA, 25 bp, Homo sapien
actctctgtgtacccaggggctggg

SEQ ID NO: 5717374 - DNA, 25 bp, Homo sapien
aaagaagtgtctcctgaccctagca

SEQ ID NO: 5717375 - DNA, 25 bp, Homo sapien
cacagcccgggtttgccctggctgg

SEQ ID NO: 5717376 - DNA, 25 bp, Homo sapien
acagcaacccactctggctcccacc

SEQ ID NO: 5717377 - DNA, 25 bp, Homo sapien
agcctgctacacaccaccccatccc

SEQ ID NO: 5717378 - DNA, 25 bp, Homo sapien
ggagggcgcccagcagcctgccagc

SEQ ID NO: 5717379 - DNA, 25 bp, Homo sapien
cacctcccgcccttcagccactccg

SEQ ID NO: 5717380 - DNA, 25 bp, Homo sapien
cccaccgctgagaggctgcctccgc

SEQ ID NO: 5717381 - DNA, 25 bp, Homo sapien
tactgtgaatgttccccaccgctga

SEQ ID NO: 5717382 - DNA, 25 bp, Homo sapien
ggccagcgtcgccccgggactcgct

SEQ ID NO: 5717383 - DNA, 25 bp, Homo sapien
agctgccctggctggacacatggca

SEQ ID NO: 5717384 - DNA, 25 bp, Homo sapien
gcggactcttccaccccggaggctt

SEQ ID NO: 5717385 - DNA, 25 bp, Homo sapien
ctggaggcccactctctgtgtaccc

SEQ ID NO: 5717386 - DNA, 25 bp, Homo sapien
gctgaatgcgcagcaccccgactca

SEQ ID NO: 5717387 - DNA, 25 bp, Homo sapien
gccctggctggacacatggcacctg

SEQ ID NO: 5717388 - DNA, 25 bp, Homo sapien
cctagctactatgggcacccagcct

SEQ ID NO: 5717389 - DNA, 25 bp, Homo sapien
aaccaccaccttatggcgccgaaac

SEQ ID NO: 5717390 - DNA, 25 bp, Homo sapien
ggcccagcaccccctctcctggagg

SEQ ID NO: 5717391 - DNA, 25 bp, Homo sapien
tgaaaggggaaacgtctcccagatc

SEQ ID NO: 5717392 - DNA, 25 bp, Homo sapien
gggcacccagcctgctacacaccac

SEQ ID NO: 5717393 - DNA, 25 bp, Homo sapien
gacgaggtggacgtcttcttcaatc

SEQ ID NO: 5717394 - DNA, 25 bp, Homo sapien
caggtggaccctgtaaatacatcct

SEQ ID NO: 5717395 - DNA, 25 bp, Homo sapien
catggcacctgtgggccacctcccg

SEQ ID NO: 5717396 - DNA, 25 bp, Homo sapien
cagcctgcaccctcttctcctctgg

SEQ ID NO: 5717397 - DNA, 25 bp, Homo sapien
cccggctcggcccagcaccccctct

SEQ ID NO: 5717398 - DNA, 25 bp, Homo sapien
cgctgcccaggtggggtttcctgca

SEQ ID NO: 5717399 - DNA, 25 bp, Homo sapien
gccaggaaggtagcgaggccagcgt

SEQ ID NO: 5717400 - DNA, 25 bp, Homo sapien
gggcagatttgtggggacctcagcc

SEQ ID NO: 5717401 - DNA, 25 bp, Homo sapien
ggaaccggaagatgtccaacaagtc

SEQ ID NO: 5717402 - DNA, 25 bp, Homo sapien
tctactccaggccccgtccgcccgg

SEQ ID NO: 5717403 - DNA, 25 bp, Homo sapien
cctcgccctgctcccagctctactc

SEQ ID NO: 5717404 - DNA, 25 bp, Homo sapien
tgctacacaccaccccatccccacc

SEQ ID NO: 5717405 - DNA, 25 bp, Homo sapien
ggcgtcaagtaccaggtgtcactga

SEQ ID NO: 5717406 - DNA, 25 bp, Homo sapien
aacaggccactgaccatgaagaagg

SEQ ID NO: 5717407 - DNA, 25 bp, Homo sapien
ctctgggggcagatttgtggggacc

SEQ ID NO: 5717408 - DNA, 25 bp, Homo sapien
caggccactgaccatgaagaaggaa

SEQ ID NO: 5717409 - DNA, 25 bp, Homo sapien
aagctgctgtgactgtgtcccctta

SEQ ID NO: 5717410 - DNA, 25 bp, Homo sapien
ggctgagccaaagccagagtggcca

SEQ ID NO: 5717411 - DNA, 25 bp, Homo sapien
gcgtgccgcccaggctctgctggtg

SEQ ID NO: 5717412 - DNA, 25 bp, Homo sapien
actgacggagagcatgaagatggaa

SEQ ID NO: 5717413 - DNA, 25 bp, Homo sapien
gtgcttcgaggagctgtcaaagtgc

SEQ ID NO: 5717414 - DNA, 25 bp, Homo sapien
cctccggttcttcctcgggattggc

SEQ ID NO: 5717415 - DNA, 25 bp, Homo sapien
gcacccggccgtgctgaatgcgcag

SEQ ID NO: 5717416 - DNA, 25 bp, Homo sapien
ctgtcccaagtcctccggttcttcc

SEQ ID NO: 5717417 - DNA, 25 bp, Homo sapien
cggccatggaggtggcgccggagca

SEQ ID NO: 5717418 - DNA, 25 bp, Homo sapien
accctcttctcctctggcttccctc

SEQ ID NO: 5717419 - DNA, 25 bp, Homo sapien
tgcatgcaggagaagtcatccccct

SEQ ID NO: 5717420 - DNA, 25 bp, Homo sapien
caggctctgctggtgagcgccgcca

SEQ ID NO: 5717421 - DNA, 25 bp, Homo sapien
cgcccaccaggcggacaaaagcggt

SEQ ID NO: 5717422 - DNA, 25 bp, Homo sapien
gcaccacgggggctgcgtctccagc

SEQ ID NO: 5717423 - DNA, 25 bp, Homo sapien
ctggagggcgcccagcagcctgcca

SEQ ID NO: 5717424 - DNA, 25 bp, Homo sapien
cacccctcagctgctggaggccctg

SEQ ID NO: 5717425 - DNA, 25 bp, Homo sapien
cccacctacccctcctatgtgccgg

SEQ ID NO: 5717426 - DNA, 25 bp, Homo sapien
ggtcccgcgagcccgcctgccgcgc

SEQ ID NO: 5717427 - DNA, 25 bp, Homo sapien
gacgccactgcacccctcagctgct

SEQ ID NO: 5717428 - DNA, 25 bp, Homo sapien
ccactcatcaagcccaagcgaagac

SEQ ID NO: 5717429 - DNA, 25 bp, Homo sapien
gaagggatccagactcggaaccgga

SEQ ID NO: 5717430 - DNA, 25 bp, Homo sapien
cgcaagccacagcctgtcttgtcag

SEQ ID NO: 5717431 - DNA, 25 bp, Homo sapien
ttcaatcacctcgactcgcagggca

SEQ ID NO: 5717432 - DNA, 25 bp, Homo sapien
atcacgggcggtcctgcacagattc

SEQ ID NO: 5717433 - DNA, 25 bp, Homo sapien
caatcacctcgactcgcagggcaac

SEQ ID NO: 5717434 - DNA, 25 bp, Homo sapien
ggcagagacaatcacgggcggtcct

SEQ ID NO: 5717435 - DNA, 25 bp, Homo sapien
acccagcctgctacacaccacccca

SEQ ID NO: 5717436 - DNA, 25 bp, Homo sapien
tcttgtcaggtggaccctgtaaata

SEQ ID NO: 5717437 - DNA, 25 bp, Homo sapien
gacaatcacgggcggtcctgcacag

SEQ ID NO: 5717438 - DNA, 25 bp, Homo sapien
gtgtccccttactgagcgcaagcca

SEQ ID NO: 5717439 - DNA, 25 bp, Homo sapien
gtttggagaacaacaaggacaactt

SEQ ID NO: 5717440 - DNA, 25 bp, Homo sapien
cggctcggcccagcaccccctctcc

SEQ ID NO: 5717441 - DNA, 25 bp, Homo sapien
tgctcaagtctgtctattgcctgcc

SEQ ID NO: 5717442 - DNA, 25 bp, Homo sapien
cgtgagccccttctccaagacgcca

SEQ ID NO: 5717443 - DNA, 25 bp, Homo sapien
gccactacctgtgcaatgcctgtgg

SEQ ID NO: 5717444 - DNA, 25 bp, Homo sapien
agaacaacaaggacaactttatgta

SEQ ID NO: 5717445 - DNA, 25 bp, Homo sapien
accatgcggccgctcggcgtgccgc

SEQ ID NO: 5717446 - DNA, 25 bp, Homo sapien
gctttgacgggccaggccctggagg

SEQ ID NO: 5717447 - DNA, 25 bp, Homo sapien
ggacagacgaaggcaaccattttta

SEQ ID NO: 5717448 - DNA, 25 bp, Homo sapien
caacccctggaccgtgagccccttc

SEQ ID NO: 5717449 - DNA, 25 bp, Homo sapien
atcacctcgactcgcagggcaaccc

SEQ ID NO: 5717450 - DNA, 25 bp, Homo sapien
cactacctgtgcaatgcctgtggcc

SEQ ID NO: 5717451 - DNA, 25 bp, Homo sapien
gcctctaccacaagatgaatgggca

SEQ ID NO: 5717452 - DNA, 25 bp, Homo sapien
ctgtcggccgccagaagagccggca

SEQ ID NO: 5717453 - DNA, 25 bp, Homo sapien
caccgctgagaggctgcctccgcac

SEQ ID NO: 5717454 - DNA, 25 bp, Homo sapien
acgggccaggccctggagggcagag

SEQ ID NO: 5717455 - DNA, 25 bp, Homo sapien
cgggggcaaagcagccctctctgcc

SEQ ID NO: 5717456 - DNA, 25 bp, Homo sapien
tcgaggaccgggcactcccgggatg

SEQ ID NO: 5717457 - DNA, 25 bp, Homo sapien
ctgggggcagatttgtggggacctc

SEQ ID NO: 5717458 - DNA, 25 bp, Homo sapien
cacatggcacctgtgggccacctcc

SEQ ID NO: 5717459 - DNA, 25 bp, Homo sapien
cggcttcccacccacgccacccaaa

SEQ ID NO: 5717460 - DNA, 25 bp, Homo sapien
ccagcctcatcttccgcggggggta

SEQ ID NO: 5717461 - DNA, 25 bp, Homo sapien
gccaaccccgctcacgcgcgggcgc

SEQ ID NO: 5717462 - DNA, 25 bp, Homo sapien
gaaggccgacaccactcctgccagc

SEQ ID NO: 5717463 - DNA, 25 bp, Homo sapien
tgaagaaggaagggatccagactcg

SEQ ID NO: 5717464 - DNA, 25 bp, Homo sapien
cgctcccttggctttgaggccgaag

SEQ ID NO: 5717465 - DNA, 25 bp, Homo sapien
tcctgcatggacagttgtttggaga

SEQ ID NO: 5717466 - DNA, 25 bp, Homo sapien
agtgtgtcaactgtggggccacagc

SEQ ID NO: 5717467 - DNA, 25 bp, Homo sapien
ggctgcgtctccagcctcatcttcc

SEQ ID NO: 5717468 - DNA, 25 bp, Homo sapien
tgaccatgaagaaggaagggatcca

SEQ ID NO: 5717469 - DNA, 25 bp, Homo sapien
ccggccgtgctgaatgcgcagcacc

SEQ ID NO: 5717470 - DNA, 25 bp, Homo sapien
gcaccccgactcacaccacccgggc

SEQ ID NO: 5717471 - DNA, 25 bp, Homo sapien
caaaaataatttattttgctcttgt

SEQ ID NO: 5717472 - DNA, 25 bp, Homo sapien
ctagggaacagatggacgtcgagga

SEQ ID NO: 5717473 - DNA, 25 bp, Homo sapien
gtcggccgccagaagagccggcacc

SEQ ID NO: 5717474 - DNA, 25 bp, Homo sapien
gggcaacccctactatgccaacccc

SEQ ID NO: 5717475 - DNA, 25 bp, Homo sapien
ctaagcagcgcagcaaggctcgttc

SEQ ID NO: 5717476 - DNA, 25 bp, Homo sapien
acccgtccagcatggtgaccgccat

SEQ ID NO: 5717477 - DNA, 25 bp, Homo sapien
ccccgactcacaccacccgggcctg

SEQ ID NO: 5717478 - DNA, 25 bp, Homo sapien
aactccaggctgggctgagccaaag

SEQ ID NO: 5717479 - DNA, 25 bp, Homo sapien
tcgcctcctactctgagacaaaaaa

SEQ ID NO: 5717480 - DNA, 25 bp, Homo sapien
tgcctgtggcctctaccacaagatg

SEQ ID NO: 5717481 - DNA, 25 bp, Homo sapien
ccagcatggtgaccgccatgggcta

SEQ ID NO: 5717482 - DNA, 25 bp, Homo sapien
aacgccaacggggaccctgtctgca

SEQ ID NO: 5717483 - DNA, 25 bp, Homo sapien
ttcagccactccggacacatcctgc

SEQ ID NO: 5717484 - DNA, 25 bp, Homo sapien
tccttcggccacccccacccgtcca

SEQ ID NO: 5717485 - DNA, 25 bp, Homo sapien
caccaggcggacaaaagcggtccgc

SEQ ID NO: 5717486 - DNA, 25 bp, Homo sapien
gacgacaaccaccaccttatggcgc

SEQ ID NO: 5717487 - DNA, 25 bp, Homo sapien
cggccgctcggcgtgccgcccaggc

SEQ ID NO: 5717488 - DNA, 25 bp, Homo sapien
cggtcctgcacagattcccaggcca

SEQ ID NO: 5717489 - DNA, 25 bp, Homo sapien
ggtggaccctgtaaatacatccttt

SEQ ID NO: 5717490 - DNA, 25 bp, Homo sapien
gccacctcccgcccttcagccactc

SEQ ID NO: 5717491 - DNA, 25 bp, Homo sapien
aaaggggaaacgtctcccagatcgc

SEQ ID NO: 5717492 - DNA, 25 bp, Homo sapien
tcctggagggcgcccagcagcctgc

SEQ ID NO: 5717493 - DNA, 25 bp, Homo sapien
ccacggcccagggagggtgagctgg

SEQ ID NO: 5717494 - DNA, 25 bp, Homo sapien
aacccctactatgccaaccccgctc

SEQ ID NO: 5717495 - DNA, 25 bp, Homo sapien
gtcctccggttcttcctcgggattg

SEQ ID NO: 5717496 - DNA, 25 bp, Homo sapien
aagtcatcccccttcagtgcagctg

SEQ ID NO: 5717497 - DNA, 25 bp, Homo sapien
catgggctagggaacagatggacgt

SEQ ID NO: 5717498 - DNA, 25 bp, Homo sapien
aagtggcagtcccctgcgcccaggc

SEQ ID NO: 5717499 - DNA, 25 bp, Homo sapien
gcccttcagccactccggacacatc

SEQ ID NO: 5717500 - DNA, 25 bp, Homo sapien
tctgctaacccttcaaccccctcgc

SEQ ID NO: 5717501 - DNA, 25 bp, Homo sapien
gctgctgtgactgtgtccccttact

SEQ ID NO: 5717502 - DNA, 25 bp, Homo sapien
gggccaggccctggagggcagagac

SEQ ID NO: 5717503 - DNA, 25 bp, Homo sapien
agactcggaaccggaagatgtccaa

SEQ ID NO: 5717504 - DNA, 25 bp, Homo sapien
gccgaagctgctgtgactgtgtccc

SEQ ID NO: 5717505 - DNA, 25 bp, Homo sapien
gagccaaagccagagtggccacggc

SEQ ID NO: 5717506 - DNA, 25 bp, Homo sapien
ctcgttcctgttcagaaggccggga

SEQ ID NO: 5717507 - DNA, 25 bp, Homo sapien
agcccgaggagaggacaaggacggc

SEQ ID NO: 5717508 - DNA, 25 bp, Homo sapien
cttggtggtctgagctgtcccaagt

SEQ ID NO: 5717509 - DNA, 25 bp, Homo sapien
gcagcgggagctcagtggcctccct

SEQ ID NO: 5717510 - DNA, 25 bp, Homo sapien
cacctcgactcgcagggcaacccct

SEQ ID NO: 5717511 - DNA, 25 bp, Homo sapien
gaaacgtctcccagatcgctccctt

SEQ ID NO: 5717512 - DNA, 25 bp, Homo sapien
gagccggcacctgttgtgcaaattg

SEQ ID NO: 5717513 - DNA, 25 bp, Homo sapien
caaagcagccctctctgccgctgcg

SEQ ID NO: 5717514 - DNA, 25 bp, Homo sapien
cctgctcccagctctactccaggcc

SEQ ID NO: 5717515 - DNA, 25 bp, Homo sapien
ccaaacccttagcagcccagcattt

SEQ ID NO: 5717516 - DNA, 25 bp, Homo sapien
ctgccgctgcggcccaccaccacaa

SEQ ID NO: 5717517 - DNA, 25 bp, Homo sapien
catttcccgaaggccgacaccactc

SEQ ID NO: 5717518 - DNA, 25 bp, Homo sapien
cccaggcctagctactatgggcacc

SEQ ID NO: 5717519 - DNA, 25 bp, Homo sapien
gccaggccctggagggcagagacaa

SEQ ID NO: 5717520 - DNA, 25 bp, Homo sapien
agcatgaagatggaaagtggcagtc

SEQ ID NO: 5717521 - DNA, 25 bp, Homo sapien
cccctactatgccaaccccgctcac

SEQ ID NO: 5717522 - DNA, 25 bp, Homo sapien
agcagttactgtgaatgttccccac

SEQ ID NO: 5717523 - DNA, 25 bp, Homo sapien
ctctgctggtgagcgccgccacccc

SEQ ID NO: 5717524 - DNA, 25 bp, Homo sapien
tgtgcaaattgtcagacgacaacca

SEQ ID NO: 5717525 - DNA, 25 bp, Homo sapien
accgggcactcccgggatgggtgga

SEQ ID NO: 5717526 - DNA, 25 bp, Homo sapien
gcaccggccactacctgtgcaatgc

SEQ ID NO: 5717527 - DNA, 25 bp, Homo sapien
gggaaacgtctcccagatcgctccc

SEQ ID NO: 5717528 - DNA, 25 bp, Homo sapien
agcgggggaggcagcgggagctcag

SEQ ID NO: 5717529 - DNA, 25 bp, Homo sapien
gcttccctctctgaaatagccgaac

SEQ ID NO: 5717530 - DNA, 25 bp, Homo sapien
tggtgagcgccgccaccccgcgccc

SEQ ID NO: 5717531 - DNA, 25 bp, Homo sapien
gagcgccaggaaggtagcgaggcca

SEQ ID NO: 5717532 - DNA, 25 bp, Homo sapien
cagggagggtgagctggtgcctgct

SEQ ID NO: 5717533 - DNA, 25 bp, Homo sapien
ccttcagccactccggacacatcct

SEQ ID NO: 5717534 - DNA, 25 bp, Homo sapien
gtaaatacatcctttttctgctaac

SEQ ID NO: 5717535 - DNA, 25 bp, Homo sapien
gtaccaggtgtcactgacggagagc

SEQ ID NO: 5717536 - DNA, 25 bp, Homo sapien
ggattggcgggtccacttgccaggg

SEQ ID NO: 5717537 - DNA, 25 bp, Homo sapien
agatgaatgggcagaaccgaccact

SEQ ID NO: 5717538 - DNA, 25 bp, Homo sapien
ggaaggaaacaacattttcttgaaa

SEQ ID NO: 5717539 - DNA, 25 bp, Homo sapien
cgacaccactcctgccagcccggct

SEQ ID NO: 5717540 - DNA, 25 bp, Homo sapien
cagagacaatcacgggcggtcctgc

SEQ ID NO: 5717541 - DNA, 25 bp, Homo sapien
gtgactgtgtccccttactgagcgc

SEQ ID NO: 5717542 - DNA, 25 bp, Homo sapien
ccacccgggcctggcgcacaactac

SEQ ID NO: 5717543 - DNA, 25 bp, Homo sapien
gtccagcatggtgaccgccatgggc

SEQ ID NO: 5717544 - DNA, 25 bp, Homo sapien
tcccgaaggccgacaccactcctgc

SEQ ID NO: 5717545 - DNA, 25 bp, Homo sapien
tccacccctcctccagcctctcctt

SEQ ID NO: 5717546 - DNA, 25 bp, Homo sapien
ggaccgtgagccccttctccaagac

SEQ ID NO: 5717547 - DNA, 25 bp, Homo sapien
gatggaaagtggcagtcccctgcgc

SEQ ID NO: 5717548 - DNA, 25 bp, Homo sapien
gcctgcaccctcttctcctctggct

SEQ ID NO: 5717549 - DNA, 25 bp, Homo sapien
acacatcctgcccactccgacgccc

SEQ ID NO: 5717550 - DNA, 25 bp, Homo sapien
cccctcagctgctggaggccctgga

SEQ ID NO: 5717551 - DNA, 25 bp, Homo sapien
tgaccgctgcccaggtggggtttcc

SEQ ID NO: 5717552 - DNA, 25 bp, Homo sapien
aagatggaaagtggcagtcccctgc

SEQ ID NO: 5717553 - DNA, 25 bp, Homo sapien
tggaaagtggcagtcccctgcgccc

SEQ ID NO: 5717554 - DNA, 25 bp, Homo sapien
actcgctgctcaagtctgtctattg

SEQ ID NO: 5717555 - DNA, 25 bp, Homo sapien
gcaatgcctgtggcctctaccacaa

SEQ ID NO: 5717556 - DNA, 25 bp, Homo sapien
catggaacccgcgcagctgctgcct

SEQ ID NO: 5717557 - DNA, 25 bp, Homo sapien
gaaacgccaacggggaccctgtctg

SEQ ID NO: 5717558 - DNA, 25 bp, Homo sapien
gacgcccatccacccctcctccagc

SEQ ID NO: 5717559 - DNA, 25 bp, Homo sapien
ctgtggggccacagccacccctctc

SEQ ID NO: 5717560 - DNA, 25 bp, Homo sapien
ggcggcgggacggcaccggccacta

SEQ ID NO: 5717561 - DNA, 25 bp, Homo sapien
agcctctccttcggccacccccacc

SEQ ID NO: 5717562 - DNA, 25 bp, Homo sapien
gacttggtggtctgagctgtcccaa

SEQ ID NO: 5717563 - DNA, 25 bp, Homo sapien
agggcagagacaatcacgggcggtc

SEQ ID NO: 5717564 - DNA, 25 bp, Homo sapien
tccccacctacccctcctatgtgcc

SEQ ID NO: 5717565 - DNA, 25 bp, Homo sapien
gtgagctggtgcctgctttgacggg

SEQ ID NO: 5717566 - DNA, 25 bp, Homo sapien
ggggtagtgcagcccgaggagagga

SEQ ID NO: 5717567 - DNA, 25 bp, Homo sapien
tccagacgaggtggacgtcttcttc

SEQ ID NO: 5717568 - DNA, 25 bp, Homo sapien
ccttcagtgcagctgccctggctgg

SEQ ID NO: 5717569 - DNA, 25 bp, Homo sapien
ccgcccacacttgttgcacagcccg

SEQ ID NO: 5717570 - DNA, 25 bp, Homo sapien
caagtctgtctattgcctgccgcca

SEQ ID NO: 5717571 - DNA, 25 bp, Homo sapien
cgctcacgcgcgggcgcgcgtctcc

SEQ ID NO: 5717572 - DNA, 25 bp, Homo sapien
ggtggcgccggagcagccgcgctgg

SEQ ID NO: 5717573 - DNA, 25 bp, Homo sapien
ctgcatggacagttgtttggagaac

SEQ ID NO: 5717574 - DNA, 25 bp, Homo sapien
tgcctccagacgaggtggacgtctt

SEQ ID NO: 5717575 - DNA, 25 bp, Homo sapien
ttgcctgccgccacatccatcctag

SEQ ID NO: 5717576 - DNA, 25 bp, Homo sapien
tcccgcgagcccgcctgccgcgcac

SEQ ID NO: 5717577 - DNA, 25 bp, Homo sapien
caggagaagtcatcccccttcagtg

SEQ ID NO: 5717578 - DNA, 25 bp, Homo sapien
cctgttcagaaggccgggagtgtgt

SEQ ID NO: 5717579 - DNA, 25 bp, Homo sapien
tcttccaccccggaggcttcctggg

SEQ ID NO: 5717580 - DNA, 25 bp, Homo sapien
cctcctatgtgccggcggctgccca

SEQ ID NO: 5717581 - DNA, 25 bp, Homo sapien
cgcagcaccccgactcacaccaccc

SEQ ID NO: 5717582 - DNA, 25 bp, Homo sapien
tggtgcctgctttgacgggccaggc

SEQ ID NO: 5717583 - DNA, 25 bp, Homo sapien
tggagacttggtggtctgagctgtc

SEQ ID NO: 5717584 - DNA, 25 bp, Homo sapien
agatcgctcccttggctttgaggcc

SEQ ID NO: 5717585 - DNA, 25 bp, Homo sapien
acatcctttttctgctaacccttca

SEQ ID NO: 5717586 - DNA, 25 bp, Homo sapien
gtcctgcacagattcccaggccagg

SEQ ID NO: 5717587 - DNA, 25 bp, Homo sapien
aggggaaacgtctcccagatcgctc

SEQ ID NO: 5717588 - DNA, 25 bp, Homo sapien
cgccaccccgcgcccaggtcccgcg

SEQ ID NO: 5717589 - DNA, 25 bp, Homo sapien
cttggctttgaggccgaagctgctg

SEQ ID NO: 5717590 - DNA, 25 bp, Homo sapien
ggacgtcttcttcaatcacctcgac

SEQ ID NO: 5717591 - DNA, 25 bp, Homo sapien
gaccctgtaaatacatcctttttct

SEQ ID NO: 5717592 - DNA, 25 bp, Homo sapien
agaccctgagccgccgccgccggcc

SEQ ID NO: 5717593 - DNA, 25 bp, Homo sapien
cactccggacacatcctgcccactc

SEQ ID NO: 5717594 - DNA, 25 bp, Homo sapien
cttcctggggggaccggcctccagc

SEQ ID NO: 5717595 - DNA, 25 bp, Homo sapien
gcccgcctgaccggaggccagatgt

SEQ ID NO: 5717596 - DNA, 25 bp, Homo sapien
ccactctctgtgtacccaggggctg

SEQ ID NO: 5717597 - DNA, 25 bp, Homo sapien
cgcccgggggcgccgcccaccgcgc

SEQ ID NO: 5717598 - DNA, 25 bp, Homo sapien
ctctgaaatagccgaactccaggct

SEQ ID NO: 5717599 - DNA, 25 bp, Homo sapien
cgggcgcgcgtctcctacagccccg

SEQ ID NO: 5717600 - DNA, 25 bp, Homo sapien
aaggtagcgaggccagcgtcgcccc

SEQ ID NO: 5717601 - DNA, 25 bp, Homo sapien
ttgtcaggtggaccctgtaaataca

SEQ ID NO: 5717602 - DNA, 25 bp, Homo sapien
tgccgcccacacttgttgcacagcc

SEQ ID NO: 5717603 - DNA, 25 bp, Homo sapien
tagtgcagcccgaggagaggacaag

SEQ ID NO: 5717604 - DNA, 25 bp, Homo sapien
acccccacccgtccagcatggtgac

SEQ ID NO: 5717605 - DNA, 25 bp, Homo sapien
ctgcgtctccagcctcatcttccgc

SEQ ID NO: 5717606 - DNA, 25 bp, Homo sapien
gcagggccccgtcgcccaccaggcg

SEQ ID NO: 5717607 - DNA, 25 bp, Homo sapien
gctgcctccgcacctgaccgctgcc

SEQ ID NO: 5717608 - DNA, 25 bp, Homo sapien
cgcccagcagcctgccagcagttac

SEQ ID NO: 5717609 - DNA, 25 bp, Homo sapien
atgggcagaaccgaccactcatcaa

SEQ ID NO: 5717610 - DNA, 25 bp, Homo sapien
ccaggctgggctgagccaaagccag

SEQ ID NO: 5717611 - DNA, 25 bp, Homo sapien
gtggtctgagctgtcccaagtcctc

SEQ ID NO: 5717612 - DNA, 25 bp, Homo sapien
ttgttgcacagcccgggtttgccct

SEQ ID NO: 5717613 - DNA, 25 bp, Homo sapien
cgccaacggggaccctgtctgcaac

SEQ ID NO: 5717614 - DNA, 25 bp, Homo sapien
agccacagcctgtcttgtcaggtgg

SEQ ID NO: 5717615 - DNA, 25 bp, Homo sapien
ggtctgagctgtcccaagtcctccg

SEQ ID NO: 5717616 - DNA, 25 bp, Homo sapien
agcatggtgaccgccatgggctagg

SEQ ID NO: 5717617 - DNA, 25 bp, Homo sapien
aacaacaaggacaactttatgtaga

SEQ ID NO: 5717618 - DNA, 25 bp, Homo sapien
acccactctggctcccaccttttcg

SEQ ID NO: 5717619 - DNA, 25 bp, Homo sapien
atgggcacccagcctgctacacacc

SEQ ID NO: 5717620 - DNA, 25 bp, Homo sapien
ggacaaaagcggtccgctgaacacc

SEQ ID NO: 5717621 - DNA, 25 bp, Homo sapien
cgcacctcgccctgctcccagctct

SEQ ID NO: 5717622 - DNA, 25 bp, Homo sapien
gtgtctcctgaccctagcaccacgg

SEQ ID NO: 5717623 - DNA, 25 bp, Homo sapien
gccgctgcggcccaccaccacaacc

SEQ ID NO: 5717624 - DNA, 25 bp, Homo sapien
agaagtgtctcctgaccctagcacc

SEQ ID NO: 5717625 - DNA, 25 bp, Homo sapien
gtcccctgcgcccaggcctagctac

SEQ ID NO: 5717626 - DNA, 25 bp, Homo sapien
gaaaggggcggagtgcttcgaggag

SEQ ID NO: 5717627 - DNA, 25 bp, Homo sapien
cggccactacctgtgcaatgcctgt

SEQ ID NO: 5717628 - DNA, 25 bp, Homo sapien
ggatccagactcggaaccggaagat

SEQ ID NO: 5717629 - DNA, 25 bp, Homo sapien
cccctcctccagcctctccttcggc

SEQ ID NO: 5717630 - DNA, 25 bp, Homo sapien
ctcgggattggcgggtccacttgcc

SEQ ID NO: 5717631 - DNA, 25 bp, Homo sapien
caagtcctccggttcttcctcggga

SEQ ID NO: 5717632 - DNA, 25 bp, Homo sapien
ggtggaccaaacccttagcagccca

SEQ ID NO: 5717633 - DNA, 25 bp, Homo sapien
cttgaaaggggaaacgtctcccaga

SEQ ID NO: 5717634 - DNA, 25 bp, Homo sapien
agcccggctcggcccagcaccccct

SEQ ID NO: 5717635 - DNA, 25 bp, Homo sapien
agcagcccagcatttcccgaaggcc

SEQ ID NO: 5717636 - DNA, 25 bp, Homo sapien
ccagcagttactgtgaatgttcccc

SEQ ID NO: 5717637 - DNA, 25 bp, Homo sapien
gccaaagccagagtggccacggccc

SEQ ID NO: 5717638 - DNA, 25 bp, Homo sapien
cgaggagctgtcaaagtgcatgcag

SEQ ID NO: 5717639 - DNA, 25 bp, Homo sapien
aatgttaacaggccactgaccatga

SEQ ID NO: 5717640 - DNA, 25 bp, Homo sapien
ctgaccggaggccagatgtgccgcc

SEQ ID NO: 5717641 - DNA, 25 bp, Homo sapien
gctggaggccctggaggcccactct

SEQ ID NO: 5717642 - DNA, 25 bp, Homo sapien
tggcttccctctctgaaatagccga

SEQ ID NO: 5717643 - DNA, 25 bp, Homo sapien
gggtttgccctggctggacgggggc

SEQ ID NO: 5717644 - DNA, 25 bp, Homo sapien
ggctagggaacagatggacgtcgag

SEQ ID NO: 5717645 - DNA, 25 bp, Homo sapien
gaccgccatgggctagggaacagat

SEQ ID NO: 5717646 - DNA, 25 bp, Homo sapien
gctgctcaagtctgtctattgcctg

SEQ ID NO: 5717647 - DNA, 25 bp, Homo sapien
tgtgtcaactgtggggccacagcca

SEQ ID NO: 5717648 - DNA, 25 bp, Homo sapien
gcgggacggcaccggccactacctg

SEQ ID NO: 5717649 - DNA, 25 bp, Homo sapien
ccgcccttcagccactccggacaca

SEQ ID NO: 5717650 - DNA, 25 bp, Homo sapien
ccacccccacccgtccagcatggtg

SEQ ID NO: 5717651 - DNA, 25 bp, Homo sapien
ggccctggagggcagagacaatcac

SEQ ID NO: 5717652 - DNA, 25 bp, Homo sapien
gccgccgccggccatggaggtggcg

SEQ ID NO: 5717653 - DNA, 25 bp, Homo sapien
tggctcccaccttttcggcttccca

SEQ ID NO: 5717654 - DNA, 25 bp, Homo sapien
ctcagtggcctccctcacccctaca

SEQ ID NO: 5717655 - DNA, 25 bp, Homo sapien
gagaggacaaggacggcgtcaagta

SEQ ID NO: 5717656 - DNA, 25 bp, Homo sapien
gcggcccaccaccacaacccctgga

SEQ ID NO: 5717657 - DNA, 25 bp, Homo sapien
agccccttctccaagacgccactgc

SEQ ID NO: 5717658 - DNA, 25 bp, Homo sapien
agctgctggaggccctggaggccca

SEQ ID NO: 5717659 - DNA, 25 bp, Homo sapien
ctgccgcgcacctcgccctgctccc

SEQ ID NO: 5717660 - DNA, 25 bp, Homo sapien
ttcggcttcccacccacgccaccca

SEQ ID NO: 5717661 - DNA, 25 bp, Homo sapien
cgtctcctacagccccgcgcacgcc

SEQ ID NO: 5717662 - DNA, 25 bp, Homo sapien
tcggaaccggaagatgtccaacaag

SEQ ID NO: 5717663 - DNA, 25 bp, Homo sapien
cctgaccctagcaccacgggggctg

SEQ ID NO: 5717664 - DNA, 25 bp, Homo sapien
tcaaagtgcatgcaggagaagtcat

SEQ ID NO: 5717665 - DNA, 25 bp, Homo sapien
ctcgggccgttgccgtctgcaccca

SEQ ID NO: 5717666 - DNA, 25 bp, Homo sapien
cctggctggacacatggcacctgtg

SEQ ID NO: 5717667 - DNA, 25 bp, Homo sapien
tggaccaaacccttagcagcccagc

SEQ ID NO: 5717668 - DNA, 25 bp, Homo sapien
cctgctacacaccaccccatcccca

SEQ ID NO: 5717669 - DNA, 25 bp, Homo sapien
caggccagggctgggtcacaggaag

SEQ ID NO: 5717670 - DNA, 25 bp, Homo sapien
ccttactgagcgcaagccacagcct

SEQ ID NO: 5717671 - DNA, 25 bp, Homo sapien
ctcgctcgggccgttgccgtctgca

SEQ ID NO: 5717672 - DNA, 25 bp, Homo sapien
cagcaaggctcgttcctgttcagaa

SEQ ID NO: 5717673 - DNA, 25 bp, Homo sapien
tcccaccttttcggcttcccaccca

SEQ ID NO: 5717674 - DNA, 25 bp, Homo sapien
ccgtcgcccaccaggcggacaaaag

SEQ ID NO: 5717675 - DNA, 25 bp, Homo sapien
cgggagctcagtggcctccctcacc

SEQ ID NO: 5717676 - DNA, 25 bp, Homo sapien
cactcccgggatgggtggaccaaac

SEQ ID NO: 5717677 - DNA, 25 bp, Homo sapien
gcacccagcctgctacacaccaccc

SEQ ID NO: 5717678 - DNA, 25 bp, Homo sapien
cgggacagacgaaggcaaccatttt

SEQ ID NO: 5717679 - DNA, 25 bp, Homo sapien
gcgagcccgcctgccgcgcacctcg

SEQ ID NO: 5717680 - DNA, 25 bp, Homo sapien
gaggacaaggacggcgtcaagtacc

SEQ ID NO: 5717681 - DNA, 25 bp, Homo sapien
ggcagtcccctgcgcccaggcctag

SEQ ID NO: 5717682 - DNA, 25 bp, Homo sapien
gaaggccgggagtgtgtcaactgtg

SEQ ID NO: 5717683 - DNA, 25 bp, Homo sapien
tgctaacccttcaaccccctcgcct

SEQ ID NO: 5717684 - DNA, 25 bp, Homo sapien
gcacaatgttaacaggccactgacc

SEQ ID NO: 5717685 - DNA, 25 bp, Homo sapien
ctgtgggccacctcccgcccttcag

SEQ ID NO: 5717686 - DNA, 25 bp, Homo sapien
tggaccctgtaaatacatccttttt

SEQ ID NO: 5717687 - DNA, 25 bp, Homo sapien
gtctcctgaccctagcaccacgggg

SEQ ID NO: 5717688 - DNA, 25 bp, Homo sapien
cagtcccctgcgcccaggcctagct

SEQ ID NO: 5717689 - DNA, 25 bp, Homo sapien
gttgccgtctgcacccagaccctga

SEQ ID NO: 5717690 - DNA, 25 bp, Homo sapien
cccctgcgcccaggcctagctacta

SEQ ID NO: 5717691 - DNA, 25 bp, Homo sapien
ccgccgccgccggccatggaggtgg

SEQ ID NO: 5717692 - DNA, 25 bp, Homo sapien
gcaccccctctcctggagggcgccc

SEQ ID NO: 5717693 - DNA, 25 bp, Homo sapien
cagcccagcatttcccgaaggccga

SEQ ID NO: 5717694 - DNA, 25 bp, Homo sapien
gggtccacttgccagggctctgggg

SEQ ID NO: 5717695 - DNA, 25 bp, Homo sapien
tcgctgctcaagtctgtctattgcc

SEQ ID NO: 5717696 - DNA, 25 bp, Homo sapien
ttgccagggctctgggggcagattt

SEQ ID NO: 5717697 - DNA, 25 bp, Homo sapien
gttgtgcaaattgtcagacgacaac

SEQ ID NO: 5717698 - DNA, 25 bp, Homo sapien
gccgccagaagagccggcacctgtt

SEQ ID NO: 5717699 - DNA, 25 bp, Homo sapien
cgcacaactacatggaacccgcgca

SEQ ID NO: 5717700 - DNA, 25 bp, Homo sapien
tcctcgggattggcgggtccacttg

SEQ ID NO: 5717701 - DNA, 25 bp, Homo sapien
catccacccctcctccagcctctcc

SEQ ID NO: 5717702 - DNA, 25 bp, Homo sapien
aaggctcgttcctgttcagaaggcc

SEQ ID NO: 5717703 - DNA, 25 bp, Homo sapien
cctgccagcccggctcggcccagca

SEQ ID NO: 5717704 - DNA, 25 bp, Homo sapien
tcagctgctggaggccctggaggcc

SEQ ID NO: 5717705 - DNA, 25 bp, Homo sapien
gcctcgctcgggccgttgccgtctg

SEQ ID NO: 5717706 - DNA, 25 bp, Homo sapien
acccaaagaagtgtctcctgaccct

SEQ ID NO: 5717707 - DNA, 25 bp, Homo sapien
ccaccaccacaacccctggaccgtg

SEQ ID NO: 5717708 - DNA, 25 bp, Homo sapien
gtgcaatgcctgtggcctctaccac

SEQ ID NO: 5717709 - DNA, 25 bp, Homo sapien
gtggacgtcttcttcaatcacctcg

SEQ ID NO: 5717710 - DNA, 25 bp, Homo sapien
tggaggccctggaggcccactctct

SEQ ID NO: 5717711 - DNA, 25 bp, Homo sapien
atcgctcccttggctttgaggccga

SEQ ID NO: 5717712 - DNA, 25 bp, Homo sapien
cccagggagggtgagctggtgcctg

SEQ ID NO: 5717713 - DNA, 25 bp, Homo sapien
gtgctgaatgcgcagcaccccgact

SEQ ID NO: 5717714 - DNA, 25 bp, Homo sapien
ctgggtcacaggaaggaaacaacat

SEQ ID NO: 5717715 - DNA, 25 bp, Homo sapien
actacatggaacccgcgcagctgct

SEQ ID NO: 5717716 - DNA, 25 bp, Homo sapien
cactcctgccagcccggctcggccc

SEQ ID NO: 5717717 - DNA, 25 bp, Homo sapien
cctacccctcctatgtgccggcggc

SEQ ID NO: 5717718 - DNA, 25 bp, Homo sapien
atccatcctagcagggccccgtcgc

SEQ ID NO: 5717719 - DNA, 25 bp, Homo sapien
tggctggacacatggcacctgtggg

SEQ ID NO: 5717720 - DNA, 25 bp, Homo sapien
ggtagcgaggccagcgtcgccccgg

SEQ ID NO: 5717721 - DNA, 25 bp, Homo sapien
cggccgccagaagagccggcacctg

SEQ ID NO: 5717722 - DNA, 25 bp, Homo sapien
catggtgaccgccatgggctaggga

SEQ ID NO: 5717723 - DNA, 25 bp, Homo sapien
ggggggaccggcctccagcttcacc

SEQ ID NO: 5717724 - DNA, 25 bp, Homo sapien
ggccacccccacccgtccagcatgg

SEQ ID NO: 5717725 - DNA, 25 bp, Homo sapien
tgtctattgcctgccgccacatcca

SEQ ID NO: 5717726 - DNA, 25 bp, Homo sapien
cgcgcacctcgccctgctcccagct

SEQ ID NO: 5717727 - DNA, 25 bp, Homo sapien
tgtcttgtcaggtggaccctgtaaa

SEQ ID NO: 5717728 - DNA, 25 bp, Homo sapien
gacttggagacttggtggtctgagc

SEQ ID NO: 5717729 - DNA, 25 bp, Homo sapien
ccgggcctggcgcacaactacatgg

SEQ ID NO: 5717730 - DNA, 25 bp, Homo sapien
ctctgccgctgcggcccaccaccac

SEQ ID NO: 5717731 - DNA, 25 bp, Homo sapien
acccgcgcagctgctgcctccagac

SEQ ID NO: 5717732 - DNA, 25 bp, Homo sapien
cacctcgccctgctcccagctctac

SEQ ID NO: 5717733 - DNA, 25 bp, Homo sapien
acaaggacaactttatgtagagaaa

SEQ ID NO: 5717734 - DNA, 25 bp, Homo sapien
acccttagcagcccagcatttcccg

SEQ ID NO: 5717735 - DNA, 25 bp, Homo sapien
ggcttcctggggggaccggcctcca

SEQ ID NO: 5717736 - DNA, 25 bp, Homo sapien
cgcgtctcctacagccccgcgcacg

SEQ ID NO: 5717737 - DNA, 25 bp, Homo sapien
tgaccctagcaccacgggggctgcg

SEQ ID NO: 5717738 - DNA, 25 bp, Homo sapien
gcagccgcgctggatggcgcacccg

SEQ ID NO: 5717739 - DNA, 25 bp, Homo sapien
ctgtgaatgttccccaccgctgaga

SEQ ID NO: 5717740 - DNA, 25 bp, Homo sapien
ccccttctccaagacgccactgcac

SEQ ID NO: 5717741 - DNA, 25 bp, Homo sapien
ttccctctctgaaatagccgaactc

SEQ ID NO: 5717742 - DNA, 25 bp, Homo sapien
cacgcgcgggcgcgcgtctcctaca

SEQ ID NO: 5717743 - DNA, 25 bp, Homo sapien
gtccccttactgagcgcaagccaca

SEQ ID NO: 5717744 - DNA, 25 bp, Homo sapien
acaaaagcggtccgctgaacaccat

SEQ ID NO: 5717745 - DNA, 25 bp, Homo sapien
cccctcgcctcctactctgagacaa

SEQ ID NO: 5717746 - DNA, 25 bp, Homo sapien
cttggagacttggtggtctgagctg

SEQ ID NO: 5717747 - DNA, 25 bp, Homo sapien
gccgcgcacctcgccctgctcccag

SEQ ID NO: 5717748 - DNA, 25 bp, Homo sapien
cctcccgcccttcagccactccgga

SEQ ID NO: 5717749 - DNA, 25 bp, Homo sapien
tagcaccacgggggctgcgtctcca

SEQ ID NO: 5717750 - DNA, 25 bp, Homo sapien
ctctggcggcgggacggcaccggcc

SEQ ID NO: 5717751 - DNA, 25 bp, Homo sapien
cgcgcgtctcctacagccccgcgca

SEQ ID NO: 5717752 - DNA, 25 bp, Homo sapien
tgggctagggaacagatggacgtcg

SEQ ID NO: 5717753 - DNA, 25 bp, Homo sapien
agaagagccggcacctgttgtgcaa

SEQ ID NO: 5717754 - DNA, 25 bp, Homo sapien
ggacagttgtttggagaacaacaag

SEQ ID NO: 5717755 - DNA, 25 bp, Homo sapien
tcttcaatcacctcgactcgcaggg

SEQ ID NO: 5717756 - DNA, 25 bp, Homo sapien
ggcggagtgcttcgaggagctgtca

SEQ ID NO: 5717757 - DNA, 25 bp, Homo sapien
ttgtttggagaacaacaaggacaac

SEQ ID NO: 5717758 - DNA, 25 bp, Homo sapien
ctccaggctgggctgagccaaagcc

SEQ ID NO: 5717759 - DNA, 25 bp, Homo sapien
ggcaaagcagccctctctgccgctg

SEQ ID NO: 5717760 - DNA, 25 bp, Homo sapien
ggagggcagagacaatcacgggcgg

SEQ ID NO: 5717761 - DNA, 25 bp, Homo sapien
atccagactcggaaccggaagatgt

SEQ ID NO: 5717762 - DNA, 25 bp, Homo sapien
gctttgaggccgaagctgctgtgac

SEQ ID NO: 5717763 - DNA, 25 bp, Homo sapien
cctcacccctacagcaacccactct

SEQ ID NO: 5717764 - DNA, 25 bp, Homo sapien
gctgcctccagacgaggtggacgtc

SEQ ID NO: 5717765 - DNA, 25 bp, Homo sapien
tgtcaactgtggggccacagccacc

SEQ ID NO: 5717766 - DNA, 25 bp, Homo sapien
ctacctgtgcaatgcctgtggcctc

SEQ ID NO: 5717767 - DNA, 25 bp, Homo sapien
cacccacgccacccaaagaagtgtc

SEQ ID NO: 5717768 - DNA, 25 bp, Homo sapien
ttttgctcttgtttctaacaaggac

SEQ ID NO: 5717769 - DNA, 25 bp, Homo sapien
cccaccgcgcctcgctcgggccgtt

SEQ ID NO: 5717770 - DNA, 25 bp, Homo sapien
gtccacttgccagggctctgggggc

SEQ ID NO: 5717771 - DNA, 25 bp, Homo sapien
agctcagtggcctccctcaccccta

SEQ ID NO: 5717772 - DNA, 25 bp, Homo sapien
cctcatcttccgcggggggtagtgc

SEQ ID NO: 5717773 - DNA, 25 bp, Homo sapien
cggagcagccgcgctggatggcgca

SEQ ID NO: 5717774 - DNA, 25 bp, Homo sapien
gcaagaaaggggcggagtgcttcga

SEQ ID NO: 5717775 - DNA, 25 bp, Homo sapien
ccttatggcgccgaaacgccaacgg

SEQ ID NO: 5717776 - DNA, 25 bp, Homo sapien
aagccagagtggccacggcccaggg

SEQ ID NO: 5717777 - DNA, 25 bp, Homo sapien
aggtggacgtcttcttcaatcacct

SEQ ID NO: 5717778 - DNA, 25 bp, Homo sapien
cgcgggcgcgcgtctcctacagccc

SEQ ID NO: 5717779 - DNA, 25 bp, Homo sapien
accgtgagccccttctccaagacgc

SEQ ID NO: 5717780 - DNA, 25 bp, Homo sapien
ccctggctggacgggggcaaagcag

SEQ ID NO: 5717781 - DNA, 25 bp, Homo sapien
tagctactatgggcacccagcctgc

SEQ ID NO: 5717782 - DNA, 25 bp, Homo sapien
accccgctcacgcgcgggcgcgcgt

SEQ ID NO: 5717783 - DNA, 25 bp, Homo sapien
catcccccttcagtgcagctgccct

SEQ ID NO: 5717784 - DNA, 25 bp, Homo sapien
tttcctgcatggacagttgtttgga

SEQ ID NO: 5717785 - DNA, 25 bp, Homo sapien
ccgtctgcacccagaccctgagccg

SEQ ID NO: 5717786 - DNA, 25 bp, Homo sapien
ctcctactctgagacaaaaaaaaaa

SEQ ID NO: 5717787 - DNA, 25 bp, Homo sapien
agacgaaggcaaccatttttagaag

SEQ ID NO: 5717788 - DNA, 25 bp, Homo sapien
cagacgacaaccaccaccttatggc

SEQ ID NO: 5717789 - DNA, 25 bp, Homo sapien
tcttctcctctggcttccctctctg

SEQ ID NO: 5717790 - DNA, 25 bp, Homo sapien
ccacccgtccagcatggtgaccgcc

SEQ ID NO: 5717791 - DNA, 25 bp, Homo sapien
ctccagcttcacccctaagcagcgc

SEQ ID NO: 5717792 - DNA, 25 bp, Homo sapien
gtcacaggaaggaaacaacattttc

SEQ ID NO: 5717793 - DNA, 25 bp, Homo sapien
ggcccagggagggtgagctggtgcc

SEQ ID NO: 5717794 - DNA, 25 bp, Homo sapien
tttattttgctcttgtttctaacaa

SEQ ID NO: 5717795 - DNA, 25 bp, Homo sapien
caagccacagcctgtcttgtcaggt

SEQ ID NO: 5717796 - DNA, 25 bp, Homo sapien
cagcagcctgccagcagttactgtg

SEQ ID NO: 5717797 - DNA, 25 bp, Homo sapien
ccttcaaccccctcgcctcctactc

SEQ ID NO: 5717798 - DNA, 25 bp, Homo sapien
cgggggaggcagcgggagctcagtg

SEQ ID NO: 5717799 - DNA, 25 bp, Homo sapien
gctactatgggcacccagcctgcta

SEQ ID NO: 5717800 - DNA, 25 bp, Homo sapien
gactgtcggccgccagaagagccgg

SEQ ID NO: 5717801 - DNA, 25 bp, Homo sapien
ctctctggcggcgggacggcaccgg

SEQ ID NO: 5717802 - DNA, 25 bp, Homo sapien
tgagccgccgccgccggccatggag

SEQ ID NO: 5717803 - DNA, 25 bp, Homo sapien
tgccgtctgcacccagaccctgagc

SEQ ID NO: 5717804 - DNA, 25 bp, Homo sapien
tcccagatcgctcccttggctttga

SEQ ID NO: 5717805 - DNA, 25 bp, Homo sapien
aaggacggcgtcaagtaccaggtgt

SEQ ID NO: 5717806 - DNA, 25 bp, Homo sapien
gactcacaccacccgggcctggcgc

SEQ ID NO: 5717807 - DNA, 25 bp, Homo sapien
gtttgccctggctggacgggggcaa

SEQ ID NO: 5717808 - DNA, 25 bp, Homo sapien
ggactcgctgctcaagtctgtctat

SEQ ID NO: 5717809 - DNA, 25 bp, Homo sapien
ctgaacaccatgcggccgctcggcg

SEQ ID NO: 5717810 - DNA, 25 bp, Homo sapien
atgtgccggcggctgcccacgacta

SEQ ID NO: 5717811 - DNA, 25 bp, Homo sapien
cgggagtgtgtcaactgtggggcca

SEQ ID NO: 5717812 - DNA, 25 bp, Homo sapien
tgtccaacaagtccaagaagagcaa

SEQ ID NO: 5717813 - DNA, 25 bp, Homo sapien
cccaagcgaagactgtcggccgcca

SEQ ID NO: 5717814 - DNA, 25 bp, Homo sapien
gcgcacccggccgtgctgaatgcgc

SEQ ID NO: 5717815 - DNA, 25 bp, Homo sapien
gcccacacttgttgcacagcccggg

SEQ ID NO: 5717816 - DNA, 25 bp, Homo sapien
ggacacatcctgcccactccgacgc

SEQ ID NO: 5717817 - DNA, 25 bp, Homo sapien
ccgactcacaccacccgggcctggc

SEQ ID NO: 5717818 - DNA, 25 bp, Homo sapien
ggaccggcctccagcttcaccccta

SEQ ID NO: 5717819 - DNA, 25 bp, Homo sapien
gcctcctactctgagacaaaaaaaa

SEQ ID NO: 5717820 - DNA, 25 bp, Homo sapien
ccaggcggacaaaagcggtccgctg

SEQ ID NO: 5717821 - DNA, 25 bp, Homo sapien
ctgtgtccccttactgagcgcaagc

SEQ ID NO: 5717822 - DNA, 25 bp, Homo sapien
cttcttcaatcacctcgactcgcag

SEQ ID NO: 5717823 - DNA, 25 bp, Homo sapien
gactgtgtccccttactgagcgcaa

SEQ ID NO: 5717824 - DNA, 25 bp, Homo sapien
gcgggtccacttgccagggctctgg

SEQ ID NO: 5717825 - DNA, 25 bp, Homo sapien
agttgtttggagaacaacaaggaca

SEQ ID NO: 5717826 - DNA, 25 bp, Homo sapien
acggcccagggagggtgagctggtg

SEQ ID NO: 5717827 - DNA, 25 bp, Homo sapien
ttctaacaaggacttggagacttgg

SEQ ID NO: 5717828 - DNA, 25 bp, Homo sapien
aggccagatgtgccgcccacacttg

SEQ ID NO: 5717829 - DNA, 25 bp, Homo sapien
cctagcaccacgggggctgcgtctc

SEQ ID NO: 5717830 - DNA, 25 bp, Homo sapien
ctgctgcctccagacgaggtggacg

SEQ ID NO: 5717831 - DNA, 25 bp, Homo sapien
tgtggcctctactacaagctgcaca

SEQ ID NO: 5717832 - DNA, 25 bp, Homo sapien
gactacagcagcggactcttccacc

SEQ ID NO: 5717833 - DNA, 25 bp, Homo sapien
tgcctccgcacctgaccgctgccca

SEQ ID NO: 5717834 - DNA, 25 bp, Homo sapien
ggtagtgcagcccgaggagaggaca

SEQ ID NO: 5717835 - DNA, 25 bp, Homo sapien
ccggacacatcctgcccactccgac

SEQ ID NO: 5717836 - DNA, 25 bp, Homo sapien
tgtgccgcccacacttgttgcacag

SEQ ID NO: 5717837 - DNA, 25 bp, Homo sapien
cgaggagaggacaaggacggcgtca

SEQ ID NO: 5717838 - DNA, 25 bp, Homo sapien
ggggcaaagcagccctctctgccgc

SEQ ID NO: 5717839 - DNA, 25 bp, Homo sapien
tcccgcccttcagccactccggaca

SEQ ID NO: 5717840 - DNA, 25 bp, Homo sapien
aagaaggaagggatccagactcgga

SEQ ID NO: 5717841 - DNA, 25 bp, Homo sapien
atcaagcccaagcgaagactgtcgg

SEQ ID NO: 5717842 - DNA, 25 bp, Homo sapien
gctggacgggggcaaagcagccctc

SEQ ID NO: 5717843 - DNA, 25 bp, Homo sapien
ctgcccaggtggggtttcctgcatg

SEQ ID NO: 5717844 - DNA, 25 bp, Homo sapien
ttcccacccacgccacccaaagaag

SEQ ID NO: 5717845 - DNA, 25 bp, Homo sapien
caaccccctcgcctcctactctgag

SEQ ID NO: 5717846 - DNA, 25 bp, Homo sapien
acttgccagggctctgggggcagat

SEQ ID NO: 5717847 - DNA, 25 bp, Homo sapien
gcttcccacccacgccacccaaaga

SEQ ID NO: 5717848 - DNA, 25 bp, Homo sapien
cctcgactcgcagggcaacccctac

SEQ ID NO: 5717849 - DNA, 25 bp, Homo sapien
gctctactccaggccccgtccgccc

SEQ ID NO: 5717850 - DNA, 25 bp, Homo sapien
accatgaagaaggaagggatccaga

SEQ ID NO: 5717851 - DNA, 25 bp, Homo sapien
tggcgccggagcagccgcgctggat

SEQ ID NO: 5717852 - DNA, 25 bp, Homo sapien
ccgccatgggctagggaacagatgg

SEQ ID NO: 5717853 - DNA, 25 bp, Homo sapien
ggaagatgtccaacaagtccaagaa

SEQ ID NO: 5717854 - DNA, 25 bp, Homo sapien
aagaaaggggcggagtgcttcgagg

SEQ ID NO: 5717855 - DNA, 25 bp, Homo sapien
ccctggaccgtgagccccttctcca

SEQ ID NO: 5717856 - DNA, 25 bp, Homo sapien
acctgttgtgcaaattgtcagacga

SEQ ID NO: 5717857 - DNA, 25 bp, Homo sapien
gggaccctgtctgcaacgcctgtgg

SEQ ID NO: 5717858 - DNA, 25 bp, Homo sapien
atcctttttctgctaacccttcaac

SEQ ID NO: 5717859 - DNA, 25 bp, Homo sapien
tcactgacggagagcatgaagatgg

SEQ ID NO: 5717860 - DNA, 25 bp, Homo sapien
gcaccctcttctcctctggcttccc

SEQ ID NO: 5717861 - DNA, 25 bp, Homo sapien
gctggtgcctgctttgacgggccag

SEQ ID NO: 5717862 - DNA, 25 bp, Homo sapien
catgaagatggaaagtggcagtccc

SEQ ID NO: 5717863 - DNA, 25 bp, Homo sapien
cctgcacagattcccaggccagggc

SEQ ID NO: 5717864 - DNA, 25 bp, Homo sapien
ggcgcacaactacatggaacccgcg

SEQ ID NO: 5717865 - DNA, 25 bp, Homo sapien
tcctccagcctctccttcggccacc

SEQ ID NO: 5717866 - DNA, 25 bp, Homo sapien
caccttatggcgccgaaacgccaac

SEQ ID NO: 5717867 - DNA, 25 bp, Homo sapien
cacgggcggtcctgcacagattccc

SEQ ID NO: 5717868 - DNA, 25 bp, Homo sapien
ccggaggccagatgtgccgcccaca

SEQ ID NO: 5717869 - DNA, 25 bp, Homo sapien
cgctgaacaccatgcggccgctcgg

SEQ ID NO: 5717870 - DNA, 25 bp, Homo sapien
aggccgggagtgtgtcaactgtggg

SEQ ID NO: 5717871 - DNA, 25 bp, Homo sapien
ctggaccgtgagccccttctccaag

SEQ ID NO: 5717872 - DNA, 25 bp, Homo sapien
ctctctgaaatagccgaactccagg

SEQ ID NO: 5717873 - DNA, 25 bp, Homo sapien
acccctctctggcggcgggacggca

SEQ ID NO: 5717874 - DNA, 25 bp, Homo sapien
tggtgaccgccatgggctagggaac

SEQ ID NO: 5717875 - DNA, 25 bp, Homo sapien
atgaatgggcagaaccgaccactca

SEQ ID NO: 5717876 - DNA, 25 bp, Homo sapien
gtggcctccctcacccctacagcaa

SEQ ID NO: 5717877 - DNA, 25 bp, Homo sapien
gagggtgagctggtgcctgctttga

SEQ ID NO: 5717878 - DNA, 25 bp, Homo sapien
ggccacagccacccctctctggcgg

SEQ ID NO: 5717879 - DNA, 25 bp, Homo sapien
cagattcccaggccagggctgggtc

SEQ ID NO: 5717880 - DNA, 25 bp, Homo sapien
aaagtgcatgcaggagaagtcatcc

SEQ ID NO: 5717881 - DNA, 25 bp, Homo sapien
ggaacagatggacgtcgaggaccgg

SEQ ID NO: 5717882 - DNA, 25 bp, Homo sapien
gcctggcgcacaactacatggaacc

SEQ ID NO: 5717883 - DNA, 25 bp, Homo sapien
ccacagcctgtcttgtcaggtggac

SEQ ID NO: 5717884 - DNA, 25 bp, Homo sapien
ggacggcgtcaagtaccaggtgtca

SEQ ID NO: 5717885 - DNA, 25 bp, Homo sapien
cccgggactcgctgctcaagtctgt

SEQ ID NO: 5717886 - DNA, 25 bp, Homo sapien
ccaggtggggtttcctgcatggaca

SEQ ID NO: 5717887 - DNA, 25 bp, Homo sapien
catgaagaaggaagggatccagact

SEQ ID NO: 5717888 - DNA, 25 bp, Homo sapien
acccctacagcaacccactctggct

SEQ ID NO: 5717889 - DNA, 25 bp, Homo sapien
accctagcaccacgggggctgcgtc

SEQ ID NO: 5717890 - DNA, 25 bp, Homo sapien
ggactcttccaccccggaggcttcc

SEQ ID NO: 5717891 - DNA, 25 bp, Homo sapien
ctgctttgacgggccaggccctgga

SEQ ID NO: 5717892 - DNA, 25 bp, Homo sapien
gccggccatggaggtggcgccggag

SEQ ID NO: 5717893 - DNA, 25 bp, Homo sapien
ctctaccacaagatgaatgggcaga

SEQ ID NO: 5717894 - DNA, 25 bp, Homo sapien
gcggtccgctgaacaccatgcggcc

SEQ ID NO: 5717895 - DNA, 25 bp, Homo sapien
tgcccactccgacgcccatccaccc

SEQ ID NO: 5717896 - DNA, 25 bp, Homo sapien
ccaagacgccactgcacccctcagc

SEQ ID NO: 5717897 - DNA, 25 bp, Homo sapien
caactacatggaacccgcgcagctg

SEQ ID NO: 5717898 - DNA, 25 bp, Homo sapien
aggccgacaccactcctgccagccc

SEQ ID NO: 5717899 - DNA, 25 bp, Homo sapien
gcgcctcgctcgggccgttgccgtc

SEQ ID NO: 5717900 - DNA, 25 bp, Homo sapien
aagtaccaggtgtcactgacggaga

SEQ ID NO: 5717901 - DNA, 25 bp, Homo sapien
gccgaactccaggctgggctgagcc

SEQ ID NO: 5717902 - DNA, 25 bp, Homo sapien
gcagcctgccagcagttactgtgaa

SEQ ID NO: 5717903 - DNA, 25 bp, Homo sapien
gtcagacgacaaccaccaccttatg

SEQ ID NO: 5717904 - DNA, 25 bp, Homo sapien
tggacgggggcaaagcagccctctc

SEQ ID NO: 5717905 - DNA, 25 bp, Homo sapien
ggctgggtcacaggaaggaaacaac

SEQ ID NO: 5717906 - DNA, 25 bp, Homo sapien
ggccgtgctgaatgcgcagcacccc

SEQ ID NO: 5717907 - DNA, 25 bp, Homo sapien
gtcccaagtcctccggttcttcctc

SEQ ID NO: 5717908 - DNA, 25 bp, Homo sapien
acgcccgcctgaccggaggccagat

SEQ ID NO: 5717909 - DNA, 25 bp, Homo sapien
actcttccaccccggaggcttcctg

SEQ ID NO: 5717910 - DNA, 25 bp, Homo sapien
acaagtccaagaagagcaagaaagg

SEQ ID NO: 5717911 - DNA, 25 bp, Homo sapien
ggcactcccgggatgggtggaccaa

SEQ ID NO: 5717912 - DNA, 25 bp, Homo sapien
ctgcggcccaccaccacaacccctg

SEQ ID NO: 5717913 - DNA, 25 bp, Homo sapien
atacatcctttttctgctaaccctt

SEQ ID NO: 5717914 - DNA, 25 bp, Homo sapien
ccgcgcagctgctgcctccagacga

SEQ ID NO: 5717915 - DNA, 25 bp, Homo sapien
gacacatggcacctgtgggccacct

SEQ ID NO: 5717916 - DNA, 25 bp, Homo sapien
ccgcgcctcgctcgggccgttgccg

SEQ ID NO: 5717917 - DNA, 25 bp, Homo sapien
acctgtgcaatgcctgtggcctcta

SEQ ID NO: 5717918 - DNA, 25 bp, Homo sapien
gccagggctctgggggcagatttgt

SEQ ID NO: 5717919 - DNA, 25 bp, Homo sapien
tcatcttccgcggggggtagtgcag

SEQ ID NO: 5717920 - DNA, 25 bp, Homo sapien
gagacaatcacgggcggtcctgcac

SEQ ID NO: 5717921 - DNA, 25 bp, Homo sapien
cgtcaagtaccaggtgtcactgacg

SEQ ID NO: 5717922 - DNA, 25 bp, Homo sapien
aacgcctgtggcctctactacaagc

SEQ ID NO: 5717923 - DNA, 25 bp, Homo sapien
agtctgtctattgcctgccgccaca

SEQ ID NO: 5717924 - DNA, 25 bp, Homo sapien
gcatggacagttgtttggagaacaa

SEQ ID NO: 5717925 - DNA, 25 bp, Homo sapien
gttccccaccgctgagaggctgcct

SEQ ID NO: 5717926 - DNA, 25 bp, Homo sapien
gctggtgagcgccgccaccccgcgc

SEQ ID NO: 5717927 - DNA, 25 bp, Homo sapien
ggaggcccactctctgtgtacccag

SEQ ID NO: 5717928 - DNA, 25 bp, Homo sapien
agcatttcccgaaggccgacaccac

SEQ ID NO: 5717929 - DNA, 25 bp, Homo sapien
aggccgaagctgctgtgactgtgtc

SEQ ID NO: 5717930 - DNA, 25 bp, Homo sapien
gccgccacatccatcctagcagggc

SEQ ID NO: 5717931 - DNA, 25 bp, Homo sapien
accccgcgcccaggtcccgcgagcc

SEQ ID NO: 5717932 - DNA, 25 bp, Homo sapien
gttgcacagcccgggtttgccctgg

SEQ ID NO: 5717933 - DNA, 25 bp, Homo sapien
ctgtgactgtgtccccttactgagc

SEQ ID NO: 5717934 - DNA, 25 bp, Homo sapien
cacaggaaggaaacaacattttctt

SEQ ID NO: 5717935 - DNA, 25 bp, Homo sapien
gaggaccgggcactcccgggatggg

SEQ ID NO: 5717936 - DNA, 25 bp, Homo sapien
cgaactccaggctgggctgagccaa

SEQ ID NO: 5717937 - DNA, 25 bp, Homo sapien
ccacccctctctggcggcgggacgg

SEQ ID NO: 5717938 - DNA, 25 bp, Homo sapien
ttcttcctcgggattggcgggtcca

SEQ ID NO: 5717939 - DNA, 25 bp, Homo sapien
agtgcatgcaggagaagtcatcccc

SEQ ID NO: 5717940 - DNA, 25 bp, Homo sapien
gatggacgtcgaggaccgggcactc

SEQ ID NO: 5717941 - DNA, 25 bp, Homo sapien
tagcgaggccagcgtcgccccggga

SEQ ID NO: 5717942 - DNA, 25 bp, Homo sapien
gtggggacctcagcctgcaccctct

SEQ ID NO: 5717943 - DNA, 25 bp, Homo sapien
gaaatagccgaactccaggctgggc

SEQ ID NO: 5717944 - DNA, 25 bp, Homo sapien
gaacaccatgcggccgctcggcgtg

SEQ ID NO: 5717945 - DNA, 25 bp, Homo sapien
tgctcccagctctactccaggcccc

SEQ ID NO: 5717946 - DNA, 25 bp, Homo sapien
gtgggccacctcccgcccttcagcc

SEQ ID NO: 5717947 - DNA, 25 bp, Homo sapien
accaccacaacccctggaccgtgag

SEQ ID NO: 5717948 - DNA, 25 bp, Homo sapien
gggacgggacagacgaaggcaacca

SEQ ID NO: 5717949 - DNA, 25 bp, Homo sapien
ggtccgctgaacaccatgcggccgc

SEQ ID NO: 5717950 - DNA, 25 bp, Homo sapien
gctggatggcgcacccggccgtgct

SEQ ID NO: 5717951 - DNA, 25 bp, Homo sapien
cagctctactccaggccccgtccgc

SEQ ID NO: 5717952 - DNA, 25 bp, Homo sapien
caggtgtcactgacggagagcatga

SEQ ID NO: 5717953 - DNA, 25 bp, Homo sapien
ccagaagagccggcacctgttgtgc

SEQ ID NO: 5717954 - DNA, 25 bp, Homo sapien
cgggccgttgccgtctgcacccaga

SEQ ID NO: 5717955 - DNA, 25 bp, Homo sapien
ccctggaggcccactctctgtgtac

SEQ ID NO: 5717956 - DNA, 25 bp, Homo sapien
cccctctcctggagggcgcccagca

SEQ ID NO: 5717957 - DNA, 25 bp, Homo sapien
acggcgtcaagtaccaggtgtcact

SEQ ID NO: 5717958 - DNA, 25 bp, Homo sapien
gaaggaagggatccagactcggaac

SEQ ID NO: 5717959 - DNA, 25 bp, Homo sapien
gctgggctgagccaaagccagagtg

SEQ ID NO: 5717960 - DNA, 25 bp, Homo sapien
gccgccaccccgcgcccaggtcccg

SEQ ID NO: 5717961 - DNA, 25 bp, Homo sapien
ggcgcccagcagcctgccagcagtt

SEQ ID NO: 5717962 - DNA, 25 bp, Homo sapien
ctgtctgcaacgcctgtggcctcta

SEQ ID NO: 5717963 - DNA, 25 bp, Homo sapien
ctatgtgccggcggctgcccacgac

SEQ ID NO: 5717964 - DNA, 25 bp, Homo sapien
cctgtggcctctaccacaagatgaa

SEQ ID NO: 5717965 - DNA, 25 bp, Homo sapien
ggaggggacgggacagacgaaggca

SEQ ID NO: 5717966 - DNA, 25 bp, Homo sapien
ttagaaggaaaaaggattaggcaaa

SEQ ID NO: 5717967 - DNA, 25 bp, Homo sapien
cccgctcacgcgcgggcgcgcgtct

SEQ ID NO: 5717968 - DNA, 25 bp, Homo sapien
cgtcgccccgggactcgctgctcaa

SEQ ID NO: 5717969 - DNA, 25 bp, Homo sapien
acatccatcctagcagggccccgtc

SEQ ID NO: 5717970 - DNA, 25 bp, Homo sapien
ccctgtctgcaacgcctgtggcctc

SEQ ID NO: 5717971 - DNA, 25 bp, Homo sapien
cagtgcagctgccctggctggacac

SEQ ID NO: 5717972 - DNA, 25 bp, Homo sapien
cagatgtgccgcccacacttgttgc

SEQ ID NO: 5717973 - DNA, 25 bp, Homo sapien
tggcacctgtgggccacctcccgcc

SEQ ID NO: 5717974 - DNA, 25 bp, Homo sapien
tgttaacaggccactgaccatgaag

SEQ ID NO: 5717975 - DNA, 25 bp, Homo sapien
tctcctacagccccgcgcacgcccg

SEQ ID NO: 5717976 - DNA, 25 bp, Homo sapien
cggcgtgccgcccaggctctgctgg

SEQ ID NO: 5717977 - DNA, 25 bp, Homo sapien
gcaaggctcgttcctgttcagaagg

SEQ ID NO: 5717978 - DNA, 25 bp, Homo sapien
cacaagatgaatgggcagaaccgac

SEQ ID NO: 5717979 - DNA, 25 bp, Homo sapien
catgcggccgctcggcgtgccgccc

SEQ ID NO: 5717980 - DNA, 25 bp, Homo sapien
aggaagggatccagactcggaaccg

SEQ ID NO: 5717981 - DNA, 25 bp, Homo sapien
gcgtctccagcctcatcttccgcgg

SEQ ID NO: 5717982 - DNA, 25 bp, Homo sapien
caacaaggacaactttatgtagaga

SEQ ID NO: 5717983 - DNA, 25 bp, Homo sapien
cggcgggacggcaccggccactacc

SEQ ID NO: 5717984 - DNA, 25 bp, Homo sapien
ggctctgctggtgagcgccgccacc

SEQ ID NO: 5717985 - DNA, 25 bp, Homo sapien
accgctgcccaggtggggtttcctg

SEQ ID NO: 5717986 - DNA, 25 bp, Homo sapien
ttgtggggacctcagcctgcaccct

SEQ ID NO: 5717987 - DNA, 25 bp, Homo sapien
accggcctccagcttcacccctaag

SEQ ID NO: 5717988 - DNA, 25 bp, Homo sapien
ccctctctgaaatagccgaactcca

SEQ ID NO: 5717989 - DNA, 25 bp, Homo sapien
gttactgtgaatgttccccaccgct

SEQ ID NO: 5717990 - DNA, 25 bp, Homo sapien
cgcagggcaacccctactatgccaa

SEQ ID NO: 5717991 - DNA, 25 bp, Homo sapien
gccagatgtgccgcccacacttgtt

SEQ ID NO: 5717992 - DNA, 25 bp, Homo sapien
ctgccgccacatccatcctagcagg

SEQ ID NO: 5717993 - DNA, 25 bp, Homo sapien
cctgtggcctctactacaagctgca

SEQ ID NO: 5717994 - DNA, 25 bp, Homo sapien
agccgccgccgccggccatggaggt

SEQ ID NO: 5717995 - DNA, 25 bp, Homo sapien
aggacttggagacttggtggtctga

SEQ ID NO: 5717996 - DNA, 25 bp, Homo sapien
cgacaaccaccaccttatggcgccg

SEQ ID NO: 5717997 - DNA, 25 bp, Homo sapien
cctcctccagcctctccttcggcca

SEQ ID NO: 5717998 - DNA, 25 bp, Homo sapien
gagcccgcctgccgcgcacctcgcc

SEQ ID NO: 5717999 - DNA, 25 bp, Homo sapien
tcggccacccccacccgtccagcat

SEQ ID NO: 5718000 - DNA, 25 bp, Homo sapien
cgccgccggccatggaggtggcgcc

SEQ ID NO: 5718001 - DNA, 25 bp, Homo sapien
gagtgcttcgaggagctgtcaaagt

SEQ ID NO: 5718002 - DNA, 25 bp, Homo sapien
ccgcgctggatggcgcacccggccg

SEQ ID NO: 5718003 - DNA, 25 bp, Homo sapien
gcgccgccaccccgcgcccaggtcc

SEQ ID NO: 5718004 - DNA, 25 bp, Homo sapien
gaatgggcagaaccgaccactcatc

SEQ ID NO: 5718005 - DNA, 25 bp, Homo sapien
cgcacctgaccgctgcccaggtggg

SEQ ID NO: 5718006 - DNA, 25 bp, Homo sapien
ccagcatttcccgaaggccgacacc

SEQ ID NO: 5718007 - DNA, 25 bp, Homo sapien
cgcagcaaggctcgttcctgttcag

SEQ ID NO: 5718008 - DNA, 25 bp, Homo sapien
gcaacccctactatgccaaccccgc

SEQ ID NO: 5718009 - DNA, 25 bp, Homo sapien
agggccccgtcgcccaccaggcgga

SEQ ID NO: 5718010 - DNA, 25 bp, Homo sapien
gaacccgcgcagctgctgcctccag

SEQ ID NO: 5718011 - DNA, 25 bp, Homo sapien
tgagcgcaagccacagcctgtcttg

SEQ ID NO: 5718012 - DNA, 25 bp, Homo sapien
cggagtgcttcgaggagctgtcaaa

SEQ ID NO: 5718013 - DNA, 25 bp, Homo sapien
gctgagaggctgcctccgcacctga

SEQ ID NO: 5718014 - DNA, 25 bp, Homo sapien
ctacagcaacccactctggctccca

SEQ ID NO: 5718015 - DNA, 25 bp, Homo sapien
catccccacctacccctcctatgtg

SEQ ID NO: 5718016 - DNA, 25 bp, Homo sapien
cgggactcgctgctcaagtctgtct

SEQ ID NO: 5718017 - DNA, 25 bp, Homo sapien
ggccgttgccgtctgcacccagacc

SEQ ID NO: 5718018 - DNA, 25 bp, Homo sapien
gcagatttgtggggacctcagcctg

SEQ ID NO: 5718019 - DNA, 25 bp, Homo sapien
cacaccacccgggcctggcgcacaa

SEQ ID NO: 5718020 - DNA, 25 bp, Homo sapien
ccagggctgggtcacaggaaggaaa

SEQ ID NO: 5718021 - DNA, 25 bp, Homo sapien
actgcacccctcagctgctggaggc

SEQ ID NO: 5718022 - DNA, 25 bp, Homo sapien
acccctggaccgtgagccccttctc

SEQ ID NO: 5718023 - DNA, 25 bp, Homo sapien
tccggttcttcctcgggattggcgg

SEQ ID NO: 5718024 - DNA, 25 bp, Homo sapien
cgggcactcccgggatgggtggacc

SEQ ID NO: 5718025 - DNA, 25 bp, Homo sapien
ttactgagcgcaagccacagcctgt

SEQ ID NO: 5718026 - DNA, 25 bp, Homo sapien
aagacgccactgcacccctcagctg

SEQ ID NO: 5718027 - DNA, 25 bp, Homo sapien
ccactgaccatgaagaaggaaggga

SEQ ID NO: 5718028 - DNA, 25 bp, Homo sapien
aatagccgaactccaggctgggctg

SEQ ID NO: 5718029 - DNA, 25 bp, Homo sapien
gcctgctttgacgggccaggccctg

SEQ ID NO: 5718030 - DNA, 25 bp, Homo sapien
cccgcgcccaggtcccgcgagcccg

SEQ ID NO: 5718031 - DNA, 25 bp, Homo sapien
ctctctgccgctgcggcccaccacc

SEQ ID NO: 5718032 - DNA, 25 bp, Homo sapien
tccctcacccctacagcaacccact

SEQ ID NO: 5718033 - DNA, 25 bp, Homo sapien
gcggctgcccacgactacagcagcg

SEQ ID NO: 5718034 - DNA, 25 bp, Homo sapien
ccccttcagtgcagctgccctggct

SEQ ID NO: 5718035 - DNA, 25 bp, Homo sapien
gaccaaacccttagcagcccagcat

SEQ ID NO: 5718036 - DNA, 25 bp, Homo sapien
ttggagaacaacaaggacaacttta

SEQ ID NO: 5718037 - DNA, 25 bp, Homo sapien
cctccctcacccctacagcaaccca

SEQ ID NO: 5718038 - DNA, 25 bp, Homo sapien
cctctcctggagggcgcccagcagc

SEQ ID NO: 5718039 - DNA, 25 bp, Homo sapien
cacgccacccaaagaagtgtctcct

SEQ ID NO: 5718040 - DNA, 25 bp, Homo sapien
atgttccccaccgctgagaggctgc

SEQ ID NO: 5718041 - DNA, 25 bp, Homo sapien
gcgccgcccaccgcgcctcgctcgg

SEQ ID NO: 5718042 - DNA, 25 bp, Homo sapien
tactatgggcacccagcctgctaca

SEQ ID NO: 5718043 - DNA, 25 bp, Homo sapien
gaggccagcgtcgccccgggactcg

SEQ ID NO: 5718044 - DNA, 25 bp, Homo sapien
ctgcacccagaccctgagccgccgc

SEQ ID NO: 5718045 - DNA, 25 bp, Homo sapien
ccactctggctcccaccttttcggc

SEQ ID NO: 5718046 - DNA, 25 bp, Homo sapien
gcccactctctgtgtacccaggggc

SEQ ID NO: 5718047 - DNA, 25 bp, Homo sapien
cacccctcctccagcctctccttcg

SEQ ID NO: 5718048 - DNA, 25 bp, Homo sapien
tcatcaagcccaagcgaagactgtc

SEQ ID NO: 5718049 - DNA, 25 bp, Homo sapien
accacgggggctgcgtctccagcct

SEQ ID NO: 5718050 - DNA, 25 bp, Homo sapien
gccggcggctgcccacgactacagc

SEQ ID NO: 5718051 - DNA, 25 bp, Homo sapien
cccaggccagggctgggtcacagga

SEQ ID NO: 5718052 - DNA, 25 bp, Homo sapien
gtcttcttcaatcacctcgactcgc

SEQ ID NO: 5718053 - DNA, 25 bp, Homo sapien
agcaacccactctggctcccacctt

SEQ ID NO: 5718054 - DNA, 25 bp, Homo sapien
ctgttgtgcaaattgtcagacgaca

SEQ ID NO: 5718055 - DNA, 25 bp, Homo sapien
ttgtcagacgacaaccaccacctta

SEQ ID NO: 5718056 - DNA, 25 bp, Homo sapien
tcctacagccccgcgcacgcccgcc

SEQ ID NO: 5718057 - DNA, 25 bp, Homo sapien
acagcagcggactcttccaccccgg

SEQ ID NO: 5718058 - DNA, 25 bp, Homo sapien
ccctctctggcggcgggacggcacc

SEQ ID NO: 5718059 - DNA, 25 bp, Homo sapien
ccccacccgtccagcatggtgaccg

SEQ ID NO: 5718060 - DNA, 25 bp, Homo sapien
ctcaagtctgtctattgcctgccgc

SEQ ID NO: 5718061 - DNA, 25 bp, Homo sapien
acagacgaaggcaaccatttttaga

SEQ ID NO: 5718062 - DNA, 25 bp, Homo sapien
aggggacgggacagacgaaggcaac

SEQ ID NO: 5718063 - DNA, 25 bp, Homo sapien
gcacctgtgggccacctcccgccct

SEQ ID NO: 5718064 - DNA, 25 bp, Homo sapien
gtgcagctgccctggctggacacat

SEQ ID NO: 5718065 - DNA, 25 bp, Homo sapien
gagctggtgcctgctttgacgggcc

SEQ ID NO: 5718066 - DNA, 25 bp, Homo sapien
ccactgcacccctcagctgctggag

SEQ ID NO: 5718067 - DNA, 25 bp, Homo sapien
ctccaagacgccactgcacccctca

SEQ ID NO: 5718068 - DNA, 25 bp, Homo sapien
tccgcccgggggcgccgcccaccgc

SEQ ID NO: 5718069 - DNA, 25 bp, Homo sapien
ccgggggcgccgcccaccgcgcctc

SEQ ID NO: 5718070 - DNA, 25 bp, Homo sapien
tattgcctgccgccacatccatcct

SEQ ID NO: 5718071 - DNA, 25 bp, Homo sapien
cagaaggccgggagtgtgtcaactg

SEQ ID NO: 5718072 - DNA, 25 bp, Homo sapien
cgctgcggcccaccaccacaacccc

SEQ ID NO: 5718073 - DNA, 25 bp, Homo sapien
ggggcggagtgcttcgaggagctgt

SEQ ID NO: 5718074 - DNA, 25 bp, Homo sapien
ctacagccccgcgcacgcccgcctg

SEQ ID NO: 5718075 - DNA, 25 bp, Homo sapien
tgacggagagcatgaagatggaaag

SEQ ID NO: 5718076 - DNA, 25 bp, Homo sapien
caagctgcacaatgttaacaggcca

SEQ ID NO: 5718077 - DNA, 25 bp, Homo sapien
ctacacaccaccccatccccaccta

SEQ ID NO: 5718078 - DNA, 25 bp, Homo sapien
ccatcctagcagggccccgtcgccc

SEQ ID NO: 5718079 - DNA, 25 bp, Homo sapien
gcttcgaggagctgtcaaagtgcat

SEQ ID NO: 5718080 - DNA, 25 bp, Homo sapien
gctcggcccagcaccccctctcctg

SEQ ID NO: 5718081 - DNA, 25 bp, Homo sapien
cgggggctgcgtctccagcctcatc

SEQ ID NO: 5718082 - DNA, 25 bp, Homo sapien
ggggaccggcctccagcttcacccc

SEQ ID NO: 5718083 - DNA, 25 bp, Homo sapien
ctggcgcacaactacatggaacccg

SEQ ID NO: 5718084 - DNA, 25 bp, Homo sapien
cccatccacccctcctccagcctct

SEQ ID NO: 5718085 - DNA, 25 bp, Homo sapien
cttccgcggggggtagtgcagcccg

SEQ ID NO: 5718086 - DNA, 25 bp, Homo sapien
tctggcttccctctctgaaatagcc

SEQ ID NO: 5718087 - DNA, 25 bp, Homo sapien
gggatgggtggaccaaacccttagc

SEQ ID NO: 5718088 - DNA, 25 bp, Homo sapien
tgcacagcccgggtttgccctggct

SEQ ID NO: 5718089 - DNA, 25 bp, Homo sapien
ggagagcatgaagatggaaagtggc

SEQ ID NO: 5718090 - DNA, 25 bp, Homo sapien
gcgccggagcagccgcgctggatgg

SEQ ID NO: 5718091 - DNA, 25 bp, Homo sapien
agcgaagactgtcggccgccagaag

SEQ ID NO: 5718092 - DNA, 25 bp, Homo sapien
atcttccgcggggggtagtgcagcc

SEQ ID NO: 5718093 - DNA, 25 bp, Homo sapien
tacaagctgcacaatgttaacaggc

SEQ ID NO: 5718094 - DNA, 25 bp, Homo sapien
cacgggggctgcgtctccagcctca

SEQ ID NO: 5718095 - DNA, 25 bp, Homo sapien
ccaccccgcgcccaggtcccgcgag

SEQ ID NO: 5718096 - DNA, 25 bp, Homo sapien
cctcttctcctctggcttccctctc

SEQ ID NO: 5718097 - DNA, 25 bp, Homo sapien
gtgagcgccaggaaggtagcgaggc

SEQ ID NO: 5718098 - DNA, 25 bp, Homo sapien
accccctcgcctcctactctgagac

SEQ ID NO: 5718099 - DNA, 25 bp, Homo sapien
tggcctctactacaagctgcacaat

SEQ ID NO: 5718100 - DNA, 25 bp, Homo sapien
caaattgtcagacgacaaccaccac

SEQ ID NO: 5718101 - DNA, 25 bp, Homo sapien
gcgctggatggcgcacccggccgtg

SEQ ID NO: 5718102 - DNA, 25 bp, Homo sapien
gtctgcaacgcctgtggcctctact

SEQ ID NO: 5718103 - DNA, 25 bp, Homo sapien
cccaccaggcggacaaaagcggtcc

SEQ ID NO: 5718104 - DNA, 25 bp, Homo sapien
cagccactccggacacatcctgccc

SEQ ID NO: 5718105 - DNA, 25 bp, Homo sapien
ctgctggtgagcgccgccaccccgc

SEQ ID NO: 5718106 - DNA, 25 bp, Homo sapien
gtctccagcctcatcttccgcgggg

SEQ ID NO: 5718107 - DNA, 25 bp, Homo sapien
gaaagtggcagtcccctgcgcccag

SEQ ID NO: 5718108 - DNA, 25 bp, Homo sapien
tgagccccttctccaagacgccact

SEQ ID NO: 5718109 - DNA, 25 bp, Homo sapien
gaaacaacattttcttgaaagggga

SEQ ID NO: 5718110 - DNA, 25 bp, Homo sapien
cgcccaccgcgcctcgctcgggccg

SEQ ID NO: 5718111 - DNA, 25 bp, Homo sapien
cgtctcccagatcgctcccttggct

SEQ ID NO: 5718112 - DNA, 25 bp, Homo sapien
cgaagctgctgtgactgtgtcccct

SEQ ID NO: 5718113 - DNA, 25 bp, Homo sapien
gccactccggacacatcctgcccac

SEQ ID NO: 5718114 - DNA, 25 bp, Homo sapien
gtgccgcccaggctctgctggtgag

SEQ ID NO: 5718115 - DNA, 25 bp, Homo sapien
gcggcaggcaatagacagacttgag

SEQ ID NO: 5718116 - DNA, 25 bp, Homo sapien
tgcgccatccagcgcggctgctccg

SEQ ID NO: 5718117 - DNA, 25 bp, Homo sapien
cggcggcggctcagggtctgggtgc

SEQ ID NO: 5718118 - DNA, 25 bp, Homo sapien
ggtgtgtagcaggctgggtgcccat

SEQ ID NO: 5718119 - DNA, 25 bp, Homo sapien
tacagggtccacctgacaagacagg

SEQ ID NO: 5718120 - DNA, 25 bp, Homo sapien
gcaacggcccgagcgaggcgcggtg

SEQ ID NO: 5718121 - DNA, 25 bp, Homo sapien
tgtagcaggctgggtgcccatagta

SEQ ID NO: 5718122 - DNA, 25 bp, Homo sapien
tgctgcgctgcttaggggtgaagct

SEQ ID NO: 5718123 - DNA, 25 bp, Homo sapien
gggagcgatctgggagacgtttccc

SEQ ID NO: 5718124 - DNA, 25 bp, Homo sapien
ggtggtgggccgcagcggcagagag

SEQ ID NO: 5718125 - DNA, 25 bp, Homo sapien
gccctggcctgggaatctgtgcagg

SEQ ID NO: 5718126 - DNA, 25 bp, Homo sapien
caggctgaggtccccacaaatctgc

SEQ ID NO: 5718127 - DNA, 25 bp, Homo sapien
ggctcacggtccaggggttgtggtg

SEQ ID NO: 5718128 - DNA, 25 bp, Homo sapien
cggttccgagtctggatcccttcct

SEQ ID NO: 5718129 - DNA, 25 bp, Homo sapien
aggatgtatttacagggtccacctg

SEQ ID NO: 5718130 - DNA, 25 bp, Homo sapien
actcccggccttctgaacaggaacg

SEQ ID NO: 5718131 - DNA, 25 bp, Homo sapien
ccatggccggcggcggcggctcagg

SEQ ID NO: 5718132 - DNA, 25 bp, Homo sapien
tgctagggtcaggagacacttcttt

SEQ ID NO: 5718133 - DNA, 25 bp, Homo sapien
aacaactgtccatgcaggaaacccc

SEQ ID NO: 5718134 - DNA, 25 bp, Homo sapien
gcggtgggcggcgcccccgggcgga

SEQ ID NO: 5718135 - DNA, 25 bp, Homo sapien
agcagctgaggggtgcagtggcgtc

SEQ ID NO: 5718136 - DNA, 25 bp, Homo sapien
gccactgagctcccgctgcctcccc

SEQ ID NO: 5718137 - DNA, 25 bp, Homo sapien
ggtgagggaggccactgagctcccg

SEQ ID NO: 5718138 - DNA, 25 bp, Homo sapien
tagtaggggttgccctgcgagtcga

SEQ ID NO: 5718139 - DNA, 25 bp, Homo sapien
atgttgtttccttcctgtgacccag

SEQ ID NO: 5718140 - DNA, 25 bp, Homo sapien
tcccctttcaagaaaatgttgtttc

SEQ ID NO: 5718141 - DNA, 25 bp, Homo sapien
ctgggcggcacgccgagcggccgca

SEQ ID NO: 5718142 - DNA, 25 bp, Homo sapien
gggtacacagagagtgggcctccag

SEQ ID NO: 5718143 - DNA, 25 bp, Homo sapien
cagtcacagcagcttcggcctcaaa

SEQ ID NO: 5718144 - DNA, 25 bp, Homo sapien
acaaatctgcccccagagccctggc

SEQ ID NO: 5718145 - DNA, 25 bp, Homo sapien
gcccccagagccctggcaagtggac

SEQ ID NO: 5718146 - DNA, 25 bp, Homo sapien
ccagcgcggctgctccggcgccacc

SEQ ID NO: 5718147 - DNA, 25 bp, Homo sapien
cgggaaatgctgggctgctaagggt

SEQ ID NO: 5718148 - DNA, 25 bp, Homo sapien
tctcctgcatgcactttgacagctc

SEQ ID NO: 5718149 - DNA, 25 bp, Homo sapien
ctttggctcagcccagcctggagtt

SEQ ID NO: 5718150 - DNA, 25 bp, Homo sapien
aggcagcctctcagcggtggggaac

SEQ ID NO: 5718151 - DNA, 25 bp, Homo sapien
aggaacgagccttgctgcgctgctt

SEQ ID NO: 5718152 - DNA, 25 bp, Homo sapien
gccgcagcggcagagagggctgctt

SEQ ID NO: 5718153 - DNA, 25 bp, Homo sapien
ggaggcagcctctcagcggtgggga

SEQ ID NO: 5718154 - DNA, 25 bp, Homo sapien
tggtgggcgacggggccctgctagg

SEQ ID NO: 5718155 - DNA, 25 bp, Homo sapien
gcattgcacaggtagtggccggtgc

SEQ ID NO: 5718156 - DNA, 25 bp, Homo sapien
ctggaggcagcagctgcgcgggttc

SEQ ID NO: 5718157 - DNA, 25 bp, Homo sapien
tgtaggagacgcgcgcccgcgcgtg

SEQ ID NO: 5718158 - DNA, 25 bp, Homo sapien
gcggtcaggtgcggaggcagcctct

SEQ ID NO: 5718159 - DNA, 25 bp, Homo sapien
ctgaggtccccacaaatctgccccc

SEQ ID NO: 5718160 - DNA, 25 bp, Homo sapien
cgtcagtgacacctggtacttgacg

SEQ ID NO: 5718161 - DNA, 25 bp, Homo sapien
agggtctgggtgcagacggcaacgg

SEQ ID NO: 5718162 - DNA, 25 bp, Homo sapien
tttcaagaaaatgttgtttccttcc

SEQ ID NO: 5718163 - DNA, 25 bp, Homo sapien
atgctctccgtcagtgacacctggt

SEQ ID NO: 5718164 - DNA, 25 bp, Homo sapien
acctgggcgcggggtggcggcgctc

SEQ ID NO: 5718165 - DNA, 25 bp, Homo sapien
tcatggtcagtggcctgttaacatt

SEQ ID NO: 5718166 - DNA, 25 bp, Homo sapien
ctgccactttccatcttcatgctct

SEQ ID NO: 5718167 - DNA, 25 bp, Homo sapien
gggagtgcccggtcctcgacgtcca

SEQ ID NO: 5718168 - DNA, 25 bp, Homo sapien
ccacctccatggccggcggcggcgg

SEQ ID NO: 5718169 - DNA, 25 bp, Homo sapien
ccagctcaccctccctgggccgtgg

SEQ ID NO: 5718170 - DNA, 25 bp, Homo sapien
tgggctgctaagggtttggtccacc

SEQ ID NO: 5718171 - DNA, 25 bp, Homo sapien
ggtgtgagtcggggtgctgcgcatt

SEQ ID NO: 5718172 - DNA, 25 bp, Homo sapien
gtagagctgggagcagggcgaggtg

SEQ ID NO: 5718173 - DNA, 25 bp, Homo sapien
cacttctttgggtggcgtgggtggg

SEQ ID NO: 5718174 - DNA, 25 bp, Homo sapien
tgacacctggtacttgacgccgtcc

SEQ ID NO: 5718175 - DNA, 25 bp, Homo sapien
cttgacgccgtccttgtcctctcct

SEQ ID NO: 5718176 - DNA, 25 bp, Homo sapien
cacagtcacagcagcttcggcctca

SEQ ID NO: 5718177 - DNA, 25 bp, Homo sapien
ttgcgctcagtaaggggacacagtc

SEQ ID NO: 5718178 - DNA, 25 bp, Homo sapien
cggtcaggcgggcgtgcgcggggct

SEQ ID NO: 5718179 - DNA, 25 bp, Homo sapien
tcccggggcgacgctggcctcgcta

SEQ ID NO: 5718180 - DNA, 25 bp, Homo sapien
tgtgagtcggggtgctgcgcattca

SEQ ID NO: 5718181 - DNA, 25 bp, Homo sapien
ccacctgacaagacaggctgtggct

SEQ ID NO: 5718182 - DNA, 25 bp, Homo sapien
ggtgccggctcttctggcggccgac

SEQ ID NO: 5718183 - DNA, 25 bp, Homo sapien
agtgacacctggtacttgacgccgt

SEQ ID NO: 5718184 - DNA, 25 bp, Homo sapien
ggggtggccgaaggagaggctggag

SEQ ID NO: 5718185 - DNA, 25 bp, Homo sapien
atgggcgtcggagtgggcaggatgt

SEQ ID NO: 5718186 - DNA, 25 bp, Homo sapien
tcctgtgacccagccctggcctggg

SEQ ID NO: 5718187 - DNA, 25 bp, Homo sapien
ggcgaggtgcgcggcaggcgggctc

SEQ ID NO: 5718188 - DNA, 25 bp, Homo sapien
aagccgaaaaggtgggagccagagt

SEQ ID NO: 5718189 - DNA, 25 bp, Homo sapien
caatagacagacttgagcagcgagt

SEQ ID NO: 5718190 - DNA, 25 bp, Homo sapien
ctcaccagcagagcctgggcggcac

SEQ ID NO: 5718191 - DNA, 25 bp, Homo sapien
tttccttctaaaaatggttgccttc

SEQ ID NO: 5718192 - DNA, 25 bp, Homo sapien
tcaggagacacttctttgggtggcg

SEQ ID NO: 5718193 - DNA, 25 bp, Homo sapien
gcctccagcagctgaggggtgcagt

SEQ ID NO: 5718194 - DNA, 25 bp, Homo sapien
cgcggctgctccggcgccacctcca

SEQ ID NO: 5718195 - DNA, 25 bp, Homo sapien
gctgtggccccacagttgacacact

SEQ ID NO: 5718196 - DNA, 25 bp, Homo sapien
gcctgggcgcaggggactgccactt

SEQ ID NO: 5718197 - DNA, 25 bp, Homo sapien
gtgcccggtcctcgacgtccatctg

SEQ ID NO: 5718198 - DNA, 25 bp, Homo sapien
accccacctgggcagcggtcaggtg

SEQ ID NO: 5718199 - DNA, 25 bp, Homo sapien
ccttgttagaaacaagagcaaaata

SEQ ID NO: 5718200 - DNA, 25 bp, Homo sapien
ggaaatgctgggctgctaagggttt

SEQ ID NO: 5718201 - DNA, 25 bp, Homo sapien
tctgcccattcatcttgtggtagag

SEQ ID NO: 5718202 - DNA, 25 bp, Homo sapien
ggaggccactgagctcccgctgcct

SEQ ID NO: 5718203 - DNA, 25 bp, Homo sapien
caggaaaccccacctgggcagcggt

SEQ ID NO: 5718204 - DNA, 25 bp, Homo sapien
ccttcgggaaatgctgggctgctaa

SEQ ID NO: 5718205 - DNA, 25 bp, Homo sapien
tcctgcatgcactttgacagctcct

SEQ ID NO: 5718206 - DNA, 25 bp, Homo sapien
agaggctggaggaggggtggatggg

SEQ ID NO: 5718207 - DNA, 25 bp, Homo sapien
agcctctcagcggtggggaacattc

SEQ ID NO: 5718208 - DNA, 25 bp, Homo sapien
gagcggccgcatggtgttcagcgga

SEQ ID NO: 5718209 - DNA, 25 bp, Homo sapien
tgtcctctcctcgggctgcactacc

SEQ ID NO: 5718210 - DNA, 25 bp, Homo sapien
gcgagtcgaggtgattgaagaagac

SEQ ID NO: 5718211 - DNA, 25 bp, Homo sapien
gcccggtcctcgacgtccatctgtt

SEQ ID NO: 5718212 - DNA, 25 bp, Homo sapien
agacagacttgagcagcgagtcccg

SEQ ID NO: 5718213 - DNA, 25 bp, Homo sapien
gcccctgggtacacagagagtgggc

SEQ ID NO: 5718214 - DNA, 25 bp, Homo sapien
gtgggccgcagcggcagagagggct

SEQ ID NO: 5718215 - DNA, 25 bp, Homo sapien
gtgcggaggcagcctctcagcggtg

SEQ ID NO: 5718216 - DNA, 25 bp, Homo sapien
cataggaggggtaggtggggatggg

SEQ ID NO: 5718217 - DNA, 25 bp, Homo sapien
tggcttgcgctcagtaaggggacac

SEQ ID NO: 5718218 - DNA, 25 bp, Homo sapien
ggcgggaggtggcccacaggtgcca

SEQ ID NO: 5718219 - DNA, 25 bp, Homo sapien
ccctccctgggccgtggccactctg

SEQ ID NO: 5718220 - DNA, 25 bp, Homo sapien
gcctgttaacattgtgcagcttgta

SEQ ID NO: 5718221 - DNA, 25 bp, Homo sapien
gccactttccatcttcatgctctcc

SEQ ID NO: 5718222 - DNA, 25 bp, Homo sapien
aggctgggtgcccatagtagctagg

SEQ ID NO: 5718223 - DNA, 25 bp, Homo sapien
taacattgtgcagcttgtagtagag

SEQ ID NO: 5718224 - DNA, 25 bp, Homo sapien
gggttgccctgcgagtcgaggtgat

SEQ ID NO: 5718225 - DNA, 25 bp, Homo sapien
aggagaagagggtgcaggctgaggt

SEQ ID NO: 5718226 - DNA, 25 bp, Homo sapien
cggagtggctgaagggcgggaggtg

SEQ ID NO: 5718227 - DNA, 25 bp, Homo sapien
cagctgcactgaagggggatgactt

SEQ ID NO: 5718228 - DNA, 25 bp, Homo sapien
ggaagatgaggctggagacgcagcc

SEQ ID NO: 5718229 - DNA, 25 bp, Homo sapien
ggaggcagcagctgcgcgggttcca

SEQ ID NO: 5718230 - DNA, 25 bp, Homo sapien
acaggcgttgcagacagggtccccg

SEQ ID NO: 5718231 - DNA, 25 bp, Homo sapien
gcccgtgattgtctctgccctccag

SEQ ID NO: 5718232 - DNA, 25 bp, Homo sapien
tgcaggctgaggtccccacaaatct

SEQ ID NO: 5718233 - DNA, 25 bp, Homo sapien
cactttccatcttcatgctctccgt

SEQ ID NO: 5718234 - DNA, 25 bp, Homo sapien
ggcaggcaatagacagacttgagca

SEQ ID NO: 5718235 - DNA, 25 bp, Homo sapien
gcaacaagtgtgggcggcacatctg

SEQ ID NO: 5718236 - DNA, 25 bp, Homo sapien
ggaaaccccacctgggcagcggtca

SEQ ID NO: 5718237 - DNA, 25 bp, Homo sapien
gggtgcagtggcgtcttggagaagg

SEQ ID NO: 5718238 - DNA, 25 bp, Homo sapien
gctgggctgctaagggtttggtcca

SEQ ID NO: 5718239 - DNA, 25 bp, Homo sapien
gtgggcgacggggccctgctaggat

SEQ ID NO: 5718240 - DNA, 25 bp, Homo sapien
gtctccaagtccttgttagaaacaa

SEQ ID NO: 5718241 - DNA, 25 bp, Homo sapien
gagggaagccagaggagaagagggt

SEQ ID NO: 5718242 - DNA, 25 bp, Homo sapien
caggcgggcgtgcgcggggctgtag

SEQ ID NO: 5718243 - DNA, 25 bp, Homo sapien
caccagcagagcctgggcggcacgc

SEQ ID NO: 5718244 - DNA, 25 bp, Homo sapien
ccgttggcgtttcggcgccataagg

SEQ ID NO: 5718245 - DNA, 25 bp, Homo sapien
acaggcattgcacaggtagtggccg

SEQ ID NO: 5718246 - DNA, 25 bp, Homo sapien
gagacgcagcccccgtggtgctagg

SEQ ID NO: 5718247 - DNA, 25 bp, Homo sapien
gacacttctttgggtggcgtgggtg

SEQ ID NO: 5718248 - DNA, 25 bp, Homo sapien
cacaggtagtggccggtgccgtccc

SEQ ID NO: 5718249 - DNA, 25 bp, Homo sapien
tgccctgcgagtcgaggtgattgaa

SEQ ID NO: 5718250 - DNA, 25 bp, Homo sapien
gcacaacaggtgccggctcttctgg

SEQ ID NO: 5718251 - DNA, 25 bp, Homo sapien
tggcgtcttggagaaggggctcacg

SEQ ID NO: 5718252 - DNA, 25 bp, Homo sapien
ttttttttttgtctcagagtaggag

SEQ ID NO: 5718253 - DNA, 25 bp, Homo sapien
caccagctcaccctccctgggccgt

SEQ ID NO: 5718254 - DNA, 25 bp, Homo sapien
ggccggtgccgtcccgccgccagag

SEQ ID NO: 5718255 - DNA, 25 bp, Homo sapien
tgggtgggaagccgaaaaggtggga

SEQ ID NO: 5718256 - DNA, 25 bp, Homo sapien
cggaggacttgggacagctcagacc

SEQ ID NO: 5718257 - DNA, 25 bp, Homo sapien
cgtccttgtcctctcctcgggctgc

SEQ ID NO: 5718258 - DNA, 25 bp, Homo sapien
gcggcagagagggctgctttgcccc

SEQ ID NO: 5718259 - DNA, 25 bp, Homo sapien
ggctgctaagggtttggtccaccca

SEQ ID NO: 5718260 - DNA, 25 bp, Homo sapien
tgtggcggcaggcaatagacagact

SEQ ID NO: 5718261 - DNA, 25 bp, Homo sapien
tacataaagttgtccttgttgttct

SEQ ID NO: 5718262 - DNA, 25 bp, Homo sapien
caggtgccatgtgtccagccagggc

SEQ ID NO: 5718263 - DNA, 25 bp, Homo sapien
tcggcctcaaagccaagggagcgat

SEQ ID NO: 5718264 - DNA, 25 bp, Homo sapien
gaagaagacgtccacctcgtctgga

SEQ ID NO: 5718265 - DNA, 25 bp, Homo sapien
ggacggggcctggagtagagctggg

SEQ ID NO: 5718266 - DNA, 25 bp, Homo sapien
ttcgggaaatgctgggctgctaagg

SEQ ID NO: 5718267 - DNA, 25 bp, Homo sapien
ttgctgtaggggtgagggaggccac

SEQ ID NO: 5718268 - DNA, 25 bp, Homo sapien
tggttgccttcgtctgtcccgtccc

SEQ ID NO: 5718269 - DNA, 25 bp, Homo sapien
cacaggtgccatgtgtccagccagg

SEQ ID NO: 5718270 - DNA, 25 bp, Homo sapien
caggcccgggtggtgtgagtcgggg

SEQ ID NO: 5718271 - DNA, 25 bp, Homo sapien
ccgggagtgcccggtcctcgacgtc

SEQ ID NO: 5718272 - DNA, 25 bp, Homo sapien
gatcccttccttcttcatggtcagt

SEQ ID NO: 5718273 - DNA, 25 bp, Homo sapien
ggtgcaggctgaggtccccacaaat

SEQ ID NO: 5718274 - DNA, 25 bp, Homo sapien
ccggggtggaagagtccgctgctgt

SEQ ID NO: 5718275 - DNA, 25 bp, Homo sapien
tgtgggcggcacatctggcctccgg

SEQ ID NO: 5718276 - DNA, 25 bp, Homo sapien
ccgcggaagatgaggctggagacgc

SEQ ID NO: 5718277 - DNA, 25 bp, Homo sapien
gggacagctcagaccaccaagtctc

SEQ ID NO: 5718278 - DNA, 25 bp, Homo sapien
gatgtggcggcaggcaatagacaga

SEQ ID NO: 5718279 - DNA, 25 bp, Homo sapien
ctgttaacattgtgcagcttgtagt

SEQ ID NO: 5718280 - DNA, 25 bp, Homo sapien
ggtccccacaaatctgcccccagag

SEQ ID NO: 5718281 - DNA, 25 bp, Homo sapien
ggctgaggtccccacaaatctgccc

SEQ ID NO: 5718282 - DNA, 25 bp, Homo sapien
gtcaggcgggcgtgcgcggggctgt

SEQ ID NO: 5718283 - DNA, 25 bp, Homo sapien
gggcgacggggccctgctaggatgg

SEQ ID NO: 5718284 - DNA, 25 bp, Homo sapien
ccggcacataggaggggtaggtggg

SEQ ID NO: 5718285 - DNA, 25 bp, Homo sapien
cttttgtccgcctggtgggcgacgg

SEQ ID NO: 5718286 - DNA, 25 bp, Homo sapien
aagggagcgatctgggagacgtttc

SEQ ID NO: 5718287 - DNA, 25 bp, Homo sapien
ccgggcggacggggcctggagtaga

SEQ ID NO: 5718288 - DNA, 25 bp, Homo sapien
aacaggtgccggctcttctggcggc

SEQ ID NO: 5718289 - DNA, 25 bp, Homo sapien
aggaccgcccgtgattgtctctgcc

SEQ ID NO: 5718290 - DNA, 25 bp, Homo sapien
ctgcatgcactttgacagctcctcg

SEQ ID NO: 5718291 - DNA, 25 bp, Homo sapien
tggcctcgctaccttcctggcgctc

SEQ ID NO: 5718292 - DNA, 25 bp, Homo sapien
agagtgggcctccagggcctccagc

SEQ ID NO: 5718293 - DNA, 25 bp, Homo sapien
ccagccagggcaaacccgggctgtg

SEQ ID NO: 5718294 - DNA, 25 bp, Homo sapien
ccggccttctgaacaggaacgagcc

SEQ ID NO: 5718295 - DNA, 25 bp, Homo sapien
gcggcggctcagggtctgggtgcag

SEQ ID NO: 5718296 - DNA, 25 bp, Homo sapien
ggcggcacatctggcctccggtcag

SEQ ID NO: 5718297 - DNA, 25 bp, Homo sapien
ctccagcagctgaggggtgcagtgg

SEQ ID NO: 5718298 - DNA, 25 bp, Homo sapien
agcaggcaccagctcaccctccctg

SEQ ID NO: 5718299 - DNA, 25 bp, Homo sapien
agcacggccgggtgcgccatccagc

SEQ ID NO: 5718300 - DNA, 25 bp, Homo sapien
caccatgctggacgggtgggggtgg

SEQ ID NO: 5718301 - DNA, 25 bp, Homo sapien
cggttctgcccattcatcttgtggt

SEQ ID NO: 5718302 - DNA, 25 bp, Homo sapien
gggttagcagaaaaaggatgtattt

SEQ ID NO: 5718303 - DNA, 25 bp, Homo sapien
ggtgcagacggcaacggcccgagcg

SEQ ID NO: 5718304 - DNA, 25 bp, Homo sapien
gggccgtggccactctggctttggc

SEQ ID NO: 5718305 - DNA, 25 bp, Homo sapien
gaggccacaggcattgcacaggtag

SEQ ID NO: 5718306 - DNA, 25 bp, Homo sapien
ggttccatgtagttgtgcgccaggc

SEQ ID NO: 5718307 - DNA, 25 bp, Homo sapien
gatgtatttacagggtccacctgac

SEQ ID NO: 5718308 - DNA, 25 bp, Homo sapien
ttgtggtagaggccacaggcattgc

SEQ ID NO: 5718309 - DNA, 25 bp, Homo sapien
cagacagggtccccgttggcgtttc

SEQ ID NO: 5718310 - DNA, 25 bp, Homo sapien
tgctccggcgccacctccatggccg

SEQ ID NO: 5718311 - DNA, 25 bp, Homo sapien
ctggctttggctcagcccagcctgg

SEQ ID NO: 5718312 - DNA, 25 bp, Homo sapien
tgttggacatcttccggttccgagt

SEQ ID NO: 5718313 - DNA, 25 bp, Homo sapien
tcaagaaaatgttgtttccttcctg

SEQ ID NO: 5718314 - DNA, 25 bp, Homo sapien
gaggtccccacaaatctgcccccag

SEQ ID NO: 5718315 - DNA, 25 bp, Homo sapien
gcttgtagtagaggccacaggcgtt

SEQ ID NO: 5718316 - DNA, 25 bp, Homo sapien
gggagcagggcgaggtgcgcggcag

SEQ ID NO: 5718317 - DNA, 25 bp, Homo sapien
ggcgacgctggcctcgctaccttcc

SEQ ID NO: 5718318 - DNA, 25 bp, Homo sapien
gggcgcggggtggcggcgctcacca

SEQ ID NO: 5718319 - DNA, 25 bp, Homo sapien
ggggaacattcacagtaactgctgg

SEQ ID NO: 5718320 - DNA, 25 bp, Homo sapien
gtggtagaggccacaggcattgcac

SEQ ID NO: 5718321 - DNA, 25 bp, Homo sapien
cgacgctggcctcgctaccttcctg

SEQ ID NO: 5718322 - DNA, 25 bp, Homo sapien
cggggctgtaggagacgcgcgcccg

SEQ ID NO: 5718323 - DNA, 25 bp, Homo sapien
tccagggcctggcccgtcaaagcag

SEQ ID NO: 5718324 - DNA, 25 bp, Homo sapien
ctcaccctccctgggccgtggccac

SEQ ID NO: 5718325 - DNA, 25 bp, Homo sapien
cctccagggcctccagcagctgagg

SEQ ID NO: 5718326 - DNA, 25 bp, Homo sapien
cacctgggcagcggtcaggtgcgga

SEQ ID NO: 5718327 - DNA, 25 bp, Homo sapien
gacttgttggacatcttccggttcc

SEQ ID NO: 5718328 - DNA, 25 bp, Homo sapien
accgcttttgtccgcctggtgggcg

SEQ ID NO: 5718329 - DNA, 25 bp, Homo sapien
agaaaaaggatgtatttacagggtc

SEQ ID NO: 5718330 - DNA, 25 bp, Homo sapien
gtagctaggcctgggcgcaggggac

SEQ ID NO: 5718331 - DNA, 25 bp, Homo sapien
gggtccacctgacaagacaggctgt

SEQ ID NO: 5718332 - DNA, 25 bp, Homo sapien
ggcggtcaccatgctggacgggtgg

SEQ ID NO: 5718333 - DNA, 25 bp, Homo sapien
ggtggcgtgggtgggaagccgaaaa

SEQ ID NO: 5718334 - DNA, 25 bp, Homo sapien
gcgcgcccgcgcgtgagcggggttg

SEQ ID NO: 5718335 - DNA, 25 bp, Homo sapien
tctctacataaagttgtccttgttg

SEQ ID NO: 5718336 - DNA, 25 bp, Homo sapien
cagttgacacactcccggccttctg

SEQ ID NO: 5718337 - DNA, 25 bp, Homo sapien
gtagttgtgcgccaggcccgggtgg

SEQ ID NO: 5718338 - DNA, 25 bp, Homo sapien
ctgcgagtcgaggtgattgaagaag

SEQ ID NO: 5718339 - DNA, 25 bp, Homo sapien
acgtccatctgttccctagcccatg

SEQ ID NO: 5718340 - DNA, 25 bp, Homo sapien
cactgagctcccgctgcctcccccg

SEQ ID NO: 5718341 - DNA, 25 bp, Homo sapien
gcccccgtggtgctagggtcaggag

SEQ ID NO: 5718342 - DNA, 25 bp, Homo sapien
aggcagcagctgcgcgggttccatg

SEQ ID NO: 5718343 - DNA, 25 bp, Homo sapien
gctgtagtcgtgggcagccgccggc

SEQ ID NO: 5718344 - DNA, 25 bp, Homo sapien
tgtggcttgcgctcagtaaggggac

SEQ ID NO: 5718345 - DNA, 25 bp, Homo sapien
acctccatggccggcggcggcggct

SEQ ID NO: 5718346 - DNA, 25 bp, Homo sapien
cctttcttgctcttcttggacttgt

SEQ ID NO: 5718347 - DNA, 25 bp, Homo sapien
tgggtggcgtgggtgggaagccgaa

SEQ ID NO: 5718348 - DNA, 25 bp, Homo sapien
gtgtccagccagggcagctgcactg

SEQ ID NO: 5718349 - DNA, 25 bp, Homo sapien
gcggcgctcaccagcagagcctggg

SEQ ID NO: 5718350 - DNA, 25 bp, Homo sapien
gtctgacaatttgcacaacaggtgc

SEQ ID NO: 5718351 - DNA, 25 bp, Homo sapien
gagcgaggcgcggtgggcggcgccc

SEQ ID NO: 5718352 - DNA, 25 bp, Homo sapien
taggtggggatggggtggtgtgtag

SEQ ID NO: 5718353 - DNA, 25 bp, Homo sapien
atagacagacttgagcagcgagtcc

SEQ ID NO: 5718354 - DNA, 25 bp, Homo sapien
ggaggtggcccacaggtgccatgtg

SEQ ID NO: 5718355 - DNA, 25 bp, Homo sapien
gaggcgcggtgggcggcgcccccgg

SEQ ID NO: 5718356 - DNA, 25 bp, Homo sapien
tgttcagcggaccgcttttgtccgc

SEQ ID NO: 5718357 - DNA, 25 bp, Homo sapien
tccttcctgtgacccagccctggcc

SEQ ID NO: 5718358 - DNA, 25 bp, Homo sapien
cgggcgtgcgcggggctgtaggaga

SEQ ID NO: 5718359 - DNA, 25 bp, Homo sapien
gagtggtgtcggccttcgggaaatg

SEQ ID NO: 5718360 - DNA, 25 bp, Homo sapien
tgaagctggaggccggtccccccag

SEQ ID NO: 5718361 - DNA, 25 bp, Homo sapien
ggcagagagggctgctttgcccccg

SEQ ID NO: 5718362 - DNA, 25 bp, Homo sapien
ttttttgtctcagagtaggaggcga

SEQ ID NO: 5718363 - DNA, 25 bp, Homo sapien
gctggacgggtgggggtggccgaag

SEQ ID NO: 5718364 - DNA, 25 bp, Homo sapien
agttgtgcgccaggcccgggtggtg

SEQ ID NO: 5718365 - DNA, 25 bp, Homo sapien
gctggagacgcagcccccgtggtgc

SEQ ID NO: 5718366 - DNA, 25 bp, Homo sapien
tagaggccacaggcattgcacaggt

SEQ ID NO: 5718367 - DNA, 25 bp, Homo sapien
ggtgcgccatccagcgcggctgctc

SEQ ID NO: 5718368 - DNA, 25 bp, Homo sapien
ctggcccgtcaaagcaggcaccagc

SEQ ID NO: 5718369 - DNA, 25 bp, Homo sapien
tctccgtcagtgacacctggtactt

SEQ ID NO: 5718370 - DNA, 25 bp, Homo sapien
ttgaagaagacgtccacctcgtctg

SEQ ID NO: 5718371 - DNA, 25 bp, Homo sapien
gttaacattgtgcagcttgtagtag

SEQ ID NO: 5718372 - DNA, 25 bp, Homo sapien
tcctctcctcgggctgcactacccc

SEQ ID NO: 5718373 - DNA, 25 bp, Homo sapien
ccgcatggtgttcagcggaccgctt

SEQ ID NO: 5718374 - DNA, 25 bp, Homo sapien
ctaggcctgggcgcaggggactgcc

SEQ ID NO: 5718375 - DNA, 25 bp, Homo sapien
cagctgcgcgggttccatgtagttg

SEQ ID NO: 5718376 - DNA, 25 bp, Homo sapien
gggactgccactttccatcttcatg

SEQ ID NO: 5718377 - DNA, 25 bp, Homo sapien
gacaatttgcacaacaggtgccggc

SEQ ID NO: 5718378 - DNA, 25 bp, Homo sapien
tggatcccttccttcttcatggtca

SEQ ID NO: 5718379 - DNA, 25 bp, Homo sapien
agccctggcaagtggacccgccaat

SEQ ID NO: 5718380 - DNA, 25 bp, Homo sapien
ggagagggggtgctgggccgagccg

SEQ ID NO: 5718381 - DNA, 25 bp, Homo sapien
ggccggcggcggcggctcagggtct

SEQ ID NO: 5718382 - DNA, 25 bp, Homo sapien
agcggtggggaacattcacagtaac

SEQ ID NO: 5718383 - DNA, 25 bp, Homo sapien
gagggggttgaagggttagcagaaa

SEQ ID NO: 5718384 - DNA, 25 bp, Homo sapien
tgcgcgggttccatgtagttgtgcg

SEQ ID NO: 5718385 - DNA, 25 bp, Homo sapien
ccggctcttctggcggccgacagtc

SEQ ID NO: 5718386 - DNA, 25 bp, Homo sapien
cggcccgagcgaggcgcggtgggcg

SEQ ID NO: 5718387 - DNA, 25 bp, Homo sapien
gtcttggagaaggggctcacggtcc

SEQ ID NO: 5718388 - DNA, 25 bp, Homo sapien
tgcacaggtagtggccggtgccgtc

SEQ ID NO: 5718389 - DNA, 25 bp, Homo sapien
gtcccgccgccagagaggggtggct

SEQ ID NO: 5718390 - DNA, 25 bp, Homo sapien
ctgtgcaggaccgcccgtgattgtc

SEQ ID NO: 5718391 - DNA, 25 bp, Homo sapien
ggtgtcggccttcgggaaatgctgg

SEQ ID NO: 5718392 - DNA, 25 bp, Homo sapien
tgcttaggggtgaagctggaggccg

SEQ ID NO: 5718393 - DNA, 25 bp, Homo sapien
ctgggaatctgtgcaggaccgcccg

SEQ ID NO: 5718394 - DNA, 25 bp, Homo sapien
tgggttgctgtaggggtgagggagg

SEQ ID NO: 5718395 - DNA, 25 bp, Homo sapien
cgtggccactctggctttggctcag

SEQ ID NO: 5718396 - DNA, 25 bp, Homo sapien
gggcgtcggagtgggcaggatgtgt

SEQ ID NO: 5718397 - DNA, 25 bp, Homo sapien
ccaagggagcgatctgggagacgtt

SEQ ID NO: 5718398 - DNA, 25 bp, Homo sapien
gtggctgaagggcgggaggtggccc

SEQ ID NO: 5718399 - DNA, 25 bp, Homo sapien
gctggaggaggggtggatgggcgtc

SEQ ID NO: 5718400 - DNA, 25 bp, Homo sapien
tgccttcgtctgtcccgtcccctcc

SEQ ID NO: 5718401 - DNA, 25 bp, Homo sapien
cgccatccagcgcggctgctccggc

SEQ ID NO: 5718402 - DNA, 25 bp, Homo sapien
aagatgaggctggagacgcagcccc

SEQ ID NO: 5718403 - DNA, 25 bp, Homo sapien
aaaccccacctgggcagcggtcagg

SEQ ID NO: 5718404 - DNA, 25 bp, Homo sapien
ttgtctctgccctccagggcctggc

SEQ ID NO: 5718405 - DNA, 25 bp, Homo sapien
tgcccattcatcttgtggtagaggc

SEQ ID NO: 5718406 - DNA, 25 bp, Homo sapien
gtcttcgcttgggcttgatgagtgg

SEQ ID NO: 5718407 - DNA, 25 bp, Homo sapien
gcgcggggtggcggcgctcaccagc

SEQ ID NO: 5718408 - DNA, 25 bp, Homo sapien
tctggatcccttccttcttcatggt

SEQ ID NO: 5718409 - DNA, 25 bp, Homo sapien
cagcccccgtggtgctagggtcagg

SEQ ID NO: 5718410 - DNA, 25 bp, Homo sapien
cgagtctggatcccttccttcttca

SEQ ID NO: 5718411 - DNA, 25 bp, Homo sapien
acattgtgcagcttgtagtagaggc

SEQ ID NO: 5718412 - DNA, 25 bp, Homo sapien
tccgctgctgtagtcgtgggcagcc

SEQ ID NO: 5718413 - DNA, 25 bp, Homo sapien
atctgtgcaggaccgcccgtgattg

SEQ ID NO: 5718414 - DNA, 25 bp, Homo sapien
gcgctgcttaggggtgaagctggag

SEQ ID NO: 5718415 - DNA, 25 bp, Homo sapien
ggccgcatggtgttcagcggaccgc

SEQ ID NO: 5718416 - DNA, 25 bp, Homo sapien
gttgccctgcgagtcgaggtgattg

SEQ ID NO: 5718417 - DNA, 25 bp, Homo sapien
gaagggggatgacttctcctgcatg

SEQ ID NO: 5718418 - DNA, 25 bp, Homo sapien
acctggtacttgacgccgtccttgt

SEQ ID NO: 5718419 - DNA, 25 bp, Homo sapien
ttttttttgtctcagagtaggaggc

SEQ ID NO: 5718420 - DNA, 25 bp, Homo sapien
ggtgctagggtcaggagacacttct

SEQ ID NO: 5718421 - DNA, 25 bp, Homo sapien
tgcactgaagggggatgacttctcc

SEQ ID NO: 5718422 - DNA, 25 bp, Homo sapien
tttgtccgcctggtgggcgacgggg

SEQ ID NO: 5718423 - DNA, 25 bp, Homo sapien
ggggcctggagtagagctgggagca

SEQ ID NO: 5718424 - DNA, 25 bp, Homo sapien
tgaggggtgcagtggcgtcttggag

SEQ ID NO: 5718425 - DNA, 25 bp, Homo sapien
cggccgggtgcgccatccagcgcgg

SEQ ID NO: 5718426 - DNA, 25 bp, Homo sapien
gtggggaacattcacagtaactgct

SEQ ID NO: 5718427 - DNA, 25 bp, Homo sapien
cggtggggaacattcacagtaactg

SEQ ID NO: 5718428 - DNA, 25 bp, Homo sapien
gcgttgcagacagggtccccgttgg

SEQ ID NO: 5718429 - DNA, 25 bp, Homo sapien
tgctgcgcattcagcacggccgggt

SEQ ID NO: 5718430 - DNA, 25 bp, Homo sapien
atccagcgcggctgctccggcgcca

SEQ ID NO: 5718431 - DNA, 25 bp, Homo sapien
tccaaacaactgtccatgcaggaaa

SEQ ID NO: 5718432 - DNA, 25 bp, Homo sapien
gtggtgtgtagcaggctgggtgccc

SEQ ID NO: 5718433 - DNA, 25 bp, Homo sapien
cgccggcacataggaggggtaggtg

SEQ ID NO: 5718434 - DNA, 25 bp, Homo sapien
gtcacagcagcttcggcctcaaagc

SEQ ID NO: 5718435 - DNA, 25 bp, Homo sapien
ccccgtggtgctagggtcaggagac

SEQ ID NO: 5718436 - DNA, 25 bp, Homo sapien
gcagcctctcagcggtggggaacat

SEQ ID NO: 5718437 - DNA, 25 bp, Homo sapien
gagcagcgagtcccggggcgacgct

SEQ ID NO: 5718438 - DNA, 25 bp, Homo sapien
gccgagccgggctggcaggagtggt

SEQ ID NO: 5718439 - DNA, 25 bp, Homo sapien
tggccactctggctttggctcagcc

SEQ ID NO: 5718440 - DNA, 25 bp, Homo sapien
tggacgggtgggggtggccgaagga

SEQ ID NO: 5718441 - DNA, 25 bp, Homo sapien
cgccgccagagaggggtggctgtgg

SEQ ID NO: 5718442 - DNA, 25 bp, Homo sapien
agccagagtgggttgctgtaggggt

SEQ ID NO: 5718443 - DNA, 25 bp, Homo sapien
ctctgccctccagggcctggcccgt

SEQ ID NO: 5718444 - DNA, 25 bp, Homo sapien
acttgggacagctcagaccaccaag

SEQ ID NO: 5718445 - DNA, 25 bp, Homo sapien
gcggcacgccgagcggccgcatggt

SEQ ID NO: 5718446 - DNA, 25 bp, Homo sapien
aagggttagcagaaaaaggatgtat

SEQ ID NO: 5718447 - DNA, 25 bp, Homo sapien
gtccagccagggcaaacccgggctg

SEQ ID NO: 5718448 - DNA, 25 bp, Homo sapien
ccgggctggcaggagtggtgtcggc

SEQ ID NO: 5718449 - DNA, 25 bp, Homo sapien
ctgttccctagcccatggcggtcac

SEQ ID NO: 5718450 - DNA, 25 bp, Homo sapien
gttgtccttgttgttctccaaacaa

SEQ ID NO: 5718451 - DNA, 25 bp, Homo sapien
ccagggcagctgcactgaaggggga

SEQ ID NO: 5718452 - DNA, 25 bp, Homo sapien
tagaggccacaggcgttgcagacag

SEQ ID NO: 5718453 - DNA, 25 bp, Homo sapien
cttggagaaggggctcacggtccag

SEQ ID NO: 5718454 - DNA, 25 bp, Homo sapien
gcccgggtggtgtgagtcggggtgc

SEQ ID NO: 5718455 - DNA, 25 bp, Homo sapien
ttcttcatggtcagtggcctgttaa

SEQ ID NO: 5718456 - DNA, 25 bp, Homo sapien
tcgtctggaggcagcagctgcgcgg

SEQ ID NO: 5718457 - DNA, 25 bp, Homo sapien
ggggatgacttctcctgcatgcact

SEQ ID NO: 5718458 - DNA, 25 bp, Homo sapien
ggagaggctggaggaggggtggatg

SEQ ID NO: 5718459 - DNA, 25 bp, Homo sapien
cttaggggtgaagctggaggccggt

SEQ ID NO: 5718460 - DNA, 25 bp, Homo sapien
gtttggtccacccatcccgggagtg

SEQ ID NO: 5718461 - DNA, 25 bp, Homo sapien
ccatctgttccctagcccatggcgg

SEQ ID NO: 5718462 - DNA, 25 bp, Homo sapien
ggtctgggtgcagacggcaacggcc

SEQ ID NO: 5718463 - DNA, 25 bp, Homo sapien
cctggtgggcgacggggccctgcta

SEQ ID NO: 5718464 - DNA, 25 bp, Homo sapien
cccgccgccagagaggggtggctgt

SEQ ID NO: 5718465 - DNA, 25 bp, Homo sapien
gcgacggggccctgctaggatggat

SEQ ID NO: 5718466 - DNA, 25 bp, Homo sapien
atggtgttcagcggaccgcttttgt

SEQ ID NO: 5718467 - DNA, 25 bp, Homo sapien
aggctggaggaggggtggatgggcg

SEQ ID NO: 5718468 - DNA, 25 bp, Homo sapien
tggaggaggggtggatgggcgtcgg

SEQ ID NO: 5718469 - DNA, 25 bp, Homo sapien
gagggctgctttgcccccgtccagc

SEQ ID NO: 5718470 - DNA, 25 bp, Homo sapien
ccgcccgtgattgtctctgccctcc

SEQ ID NO: 5718471 - DNA, 25 bp, Homo sapien
catagtagctaggcctgggcgcagg

SEQ ID NO: 5718472 - DNA, 25 bp, Homo sapien
ctctggctttggctcagcccagcct

SEQ ID NO: 5718473 - DNA, 25 bp, Homo sapien
ggggtgaagctggaggccggtcccc

SEQ ID NO: 5718474 - DNA, 25 bp, Homo sapien
gacgggtgggggtggccgaaggaga

SEQ ID NO: 5718475 - DNA, 25 bp, Homo sapien
atgcactttgacagctcctcgaagc

SEQ ID NO: 5718476 - DNA, 25 bp, Homo sapien
tccggttccgagtctggatcccttc

SEQ ID NO: 5718477 - DNA, 25 bp, Homo sapien
caccctccctgggccgtggccactc

SEQ ID NO: 5718478 - DNA, 25 bp, Homo sapien
acttgagcagcgagtcccggggcga

SEQ ID NO: 5718479 - DNA, 25 bp, Homo sapien
tagcaggctgggtgcccatagtagc

SEQ ID NO: 5718480 - DNA, 25 bp, Homo sapien
tgcagacggcaacggcccgagcgag

SEQ ID NO: 5718481 - DNA, 25 bp, Homo sapien
gatgagtggtcggttctgcccattc

SEQ ID NO: 5718482 - DNA, 25 bp, Homo sapien
cttctaaaaatggttgccttcgtct

SEQ ID NO: 5718483 - DNA, 25 bp, Homo sapien
aagaaccggaggacttgggacagct

SEQ ID NO: 5718484 - DNA, 25 bp, Homo sapien
aggctggagacgcagcccccgtggt

SEQ ID NO: 5718485 - DNA, 25 bp, Homo sapien
ggtccaggggttgtggtggtgggcc

SEQ ID NO: 5718486 - DNA, 25 bp, Homo sapien
ctgacaatttgcacaacaggtgccg

SEQ ID NO: 5718487 - DNA, 25 bp, Homo sapien
ggtcaggagacacttctttgggtgg

SEQ ID NO: 5718488 - DNA, 25 bp, Homo sapien
ggcacataggaggggtaggtgggga

SEQ ID NO: 5718489 - DNA, 25 bp, Homo sapien
gggcaggatgtgtccggagtggctg

SEQ ID NO: 5718490 - DNA, 25 bp, Homo sapien
ctgcgcattcagcacggccgggtgc

SEQ ID NO: 5718491 - DNA, 25 bp, Homo sapien
tgtccatgcaggaaaccccacctgg

SEQ ID NO: 5718492 - DNA, 25 bp, Homo sapien
cagggtccacctgacaagacaggct

SEQ ID NO: 5718493 - DNA, 25 bp, Homo sapien
ggcagccgccggcacataggagggg

SEQ ID NO: 5718494 - DNA, 25 bp, Homo sapien
ttgtgcgccaggcccgggtggtgtg

SEQ ID NO: 5718495 - DNA, 25 bp, Homo sapien
attgcacaggtagtggccggtgccg

SEQ ID NO: 5718496 - DNA, 25 bp, Homo sapien
aggctgctgggcgccctccaggaga

SEQ ID NO: 5718497 - DNA, 25 bp, Homo sapien
tcagcggtggggaacattcacagta

SEQ ID NO: 5718498 - DNA, 25 bp, Homo sapien
tccgagtctggatcccttccttctt

SEQ ID NO: 5718499 - DNA, 25 bp, Homo sapien
ctcgcgggacctgggcgcggggtgg

SEQ ID NO: 5718500 - DNA, 25 bp, Homo sapien
ttgcccccgtccagccagggcaaac

SEQ ID NO: 5718501 - DNA, 25 bp, Homo sapien
tccggtcaggcgggcgtgcgcgggg

SEQ ID NO: 5718502 - DNA, 25 bp, Homo sapien
cataaagttgtccttgttgttctcc

SEQ ID NO: 5718503 - DNA, 25 bp, Homo sapien
agctaggcctgggcgcaggggactg

SEQ ID NO: 5718504 - DNA, 25 bp, Homo sapien
tgaagggttagcagaaaaaggatgt

SEQ ID NO: 5718505 - DNA, 25 bp, Homo sapien
tttgggtggcgtgggtgggaagccg

SEQ ID NO: 5718506 - DNA, 25 bp, Homo sapien
tgcaggaaaccccacctgggcagcg

SEQ ID NO: 5718507 - DNA, 25 bp, Homo sapien
tggcggccgacagtcttcgcttggg

SEQ ID NO: 5718508 - DNA, 25 bp, Homo sapien
caagtggacccgccaatcccgagga

SEQ ID NO: 5718509 - DNA, 25 bp, Homo sapien
tgggtgcagacggcaacggcccgag

SEQ ID NO: 5718510 - DNA, 25 bp, Homo sapien
cgccgagcggccgcatggtgttcag

SEQ ID NO: 5718511 - DNA, 25 bp, Homo sapien
tccatgcaggaaaccccacctgggc

SEQ ID NO: 5718512 - DNA, 25 bp, Homo sapien
cccagcccctgggtacacagagagt

SEQ ID NO: 5718513 - DNA, 25 bp, Homo sapien
ccacaggcgttgcagacagggtccc

SEQ ID NO: 5718514 - DNA, 25 bp, Homo sapien
cagcggcagagagggctgctttgcc

SEQ ID NO: 5718515 - DNA, 25 bp, Homo sapien
aggatggatgtggcggcaggcaata

SEQ ID NO: 5718516 - DNA, 25 bp, Homo sapien
gcaggggactgccactttccatctt

SEQ ID NO: 5718517 - DNA, 25 bp, Homo sapien
agtggtcggttctgcccattcatct

SEQ ID NO: 5718518 - DNA, 25 bp, Homo sapien
ctcctcgaagcactccgcccctttc

SEQ ID NO: 5718519 - DNA, 25 bp, Homo sapien
ctgctaagggtttggtccacccatc

SEQ ID NO: 5718520 - DNA, 25 bp, Homo sapien
gtgacccagccctggcctgggaatc

SEQ ID NO: 5718521 - DNA, 25 bp, Homo sapien
tggtcggttctgcccattcatcttg

SEQ ID NO: 5718522 - DNA, 25 bp, Homo sapien
gtggcccacaggtgccatgtgtcca

SEQ ID NO: 5718523 - DNA, 25 bp, Homo sapien
gccgccggcacataggaggggtagg

SEQ ID NO: 5718524 - DNA, 25 bp, Homo sapien
gttggcgtttcggcgccataaggtg

SEQ ID NO: 5718525 - DNA, 25 bp, Homo sapien
ccggtcctcgacgtccatctgttcc

SEQ ID NO: 5718526 - DNA, 25 bp, Homo sapien
tcatgctctccgtcagtgacacctg

SEQ ID NO: 5718527 - DNA, 25 bp, Homo sapien
ggtagaggccacaggcattgcacag

SEQ ID NO: 5718528 - DNA, 25 bp, Homo sapien
gagccttgctgcgctgcttaggggt

SEQ ID NO: 5718529 - DNA, 25 bp, Homo sapien
gaggaagaaccggaggacttgggac

SEQ ID NO: 5718530 - DNA, 25 bp, Homo sapien
acggggcctggagtagagctgggag

SEQ ID NO: 5718531 - DNA, 25 bp, Homo sapien
cctgggcagcggtcaggtgcggagg

SEQ ID NO: 5718532 - DNA, 25 bp, Homo sapien
gctgaggggtgcagtggcgtcttgg

SEQ ID NO: 5718533 - DNA, 25 bp, Homo sapien
agagccctggcaagtggacccgcca

SEQ ID NO: 5718534 - DNA, 25 bp, Homo sapien
agtgtgggcggcacatctggcctcc

SEQ ID NO: 5718535 - DNA, 25 bp, Homo sapien
ggggtggctgtggccccacagttga

SEQ ID NO: 5718536 - DNA, 25 bp, Homo sapien
gggaatctgtgcaggaccgcccgtg

SEQ ID NO: 5718537 - DNA, 25 bp, Homo sapien
gcaggaccgcccgtgattgtctctg

SEQ ID NO: 5718538 - DNA, 25 bp, Homo sapien
ccgcgcgtgagcggggttggcatag

SEQ ID NO: 5718539 - DNA, 25 bp, Homo sapien
gacccgccaatcccgaggaagaacc

SEQ ID NO: 5718540 - DNA, 25 bp, Homo sapien
catgcaggaaaccccacctgggcag

SEQ ID NO: 5718541 - DNA, 25 bp, Homo sapien
tctcagcggtggggaacattcacag

SEQ ID NO: 5718542 - DNA, 25 bp, Homo sapien
gtccccgttggcgtttcggcgccat

SEQ ID NO: 5718543 - DNA, 25 bp, Homo sapien
tctgggtgcagacggcaacggcccg

SEQ ID NO: 5718544 - DNA, 25 bp, Homo sapien
gcacatctggcctccggtcaggcgg

SEQ ID NO: 5718545 - DNA, 25 bp, Homo sapien
agagctgggagcagggcgaggtgcg

SEQ ID NO: 5718546 - DNA, 25 bp, Homo sapien
cagagaggggtggctgtggccccac

SEQ ID NO: 5718547 - DNA, 25 bp, Homo sapien
gacggggccctgctaggatggatgt

SEQ ID NO: 5718548 - DNA, 25 bp, Homo sapien
gtccttgttagaaacaagagcaaaa

SEQ ID NO: 5718549 - DNA, 25 bp, Homo sapien
cctcgaagcactccgcccctttctt

SEQ ID NO: 5718550 - DNA, 25 bp, Homo sapien
ctagggtcaggagacacttctttgg

SEQ ID NO: 5718551 - DNA, 25 bp, Homo sapien
ccatccagcgcggctgctccggcgc

SEQ ID NO: 5718552 - DNA, 25 bp, Homo sapien
atcttccggttccgagtctggatcc

SEQ ID NO: 5718553 - DNA, 25 bp, Homo sapien
cgggctcgcgggacctgggcgcggg

SEQ ID NO: 5718554 - DNA, 25 bp, Homo sapien
ggtgggaagccgaaaaggtgggagc

SEQ ID NO: 5718555 - DNA, 25 bp, Homo sapien
agggggatgacttctcctgcatgca

SEQ ID NO: 5718556 - DNA, 25 bp, Homo sapien
cgcagcccccgtggtgctagggtca

SEQ ID NO: 5718557 - DNA, 25 bp, Homo sapien
accggaggacttgggacagctcaga

SEQ ID NO: 5718558 - DNA, 25 bp, Homo sapien
ccatcttcatgctctccgtcagtga

SEQ ID NO: 5718559 - DNA, 25 bp, Homo sapien
ttctgaacaggaacgagccttgctg

SEQ ID NO: 5718560 - DNA, 25 bp, Homo sapien
gcctggcccgtcaaagcaggcacca

SEQ ID NO: 5718561 - DNA, 25 bp, Homo sapien
gaagagtccgctgctgtagtcgtgg

SEQ ID NO: 5718562 - DNA, 25 bp, Homo sapien
ggtggctgtggccccacagttgaca

SEQ ID NO: 5718563 - DNA, 25 bp, Homo sapien
tagtcgtgggcagccgccggcacat

SEQ ID NO: 5718564 - DNA, 25 bp, Homo sapien
aggggtggatgggcgtcggagtggg

SEQ ID NO: 5718565 - DNA, 25 bp, Homo sapien
ccgtccagccagggcaaacccgggc

SEQ ID NO: 5718566 - DNA, 25 bp, Homo sapien
acaagagcaaaataaattatttttg

SEQ ID NO: 5718567 - DNA, 25 bp, Homo sapien
caaacaactgtccatgcaggaaacc

SEQ ID NO: 5718568 - DNA, 25 bp, Homo sapien
ccaagtctccaagtccttgttagaa

SEQ ID NO: 5718569 - DNA, 25 bp, Homo sapien
gcctgggaatctgtgcaggaccgcc

SEQ ID NO: 5718570 - DNA, 25 bp, Homo sapien
tttctctacataaagttgtccttgt

SEQ ID NO: 5718571 - DNA, 25 bp, Homo sapien
cggctcagggtctgggtgcagacgg

SEQ ID NO: 5718572 - DNA, 25 bp, Homo sapien
tgagtggtcggttctgcccattcat

SEQ ID NO: 5718573 - DNA, 25 bp, Homo sapien
gagaggggtggctgtggccccacag

SEQ ID NO: 5718574 - DNA, 25 bp, Homo sapien
gctcagtaaggggacacagtcacag

SEQ ID NO: 5718575 - DNA, 25 bp, Homo sapien
gcagtggcgtcttggagaaggggct

SEQ ID NO: 5718576 - DNA, 25 bp, Homo sapien
tcttcttggacttgttggacatctt

SEQ ID NO: 5718577 - DNA, 25 bp, Homo sapien
gacccagccctggcctgggaatctg

SEQ ID NO: 5718578 - DNA, 25 bp, Homo sapien
atctgttccctagcccatggcggtc

SEQ ID NO: 5718579 - DNA, 25 bp, Homo sapien
cacagtaactgctggcaggctgctg

SEQ ID NO: 5718580 - DNA, 25 bp, Homo sapien
ggtcctcgacgtccatctgttccct

SEQ ID NO: 5718581 - DNA, 25 bp, Homo sapien
cgtgcgcggggctgtaggagacgcg

SEQ ID NO: 5718582 - DNA, 25 bp, Homo sapien
cctccaggagagggggtgctgggcc

SEQ ID NO: 5718583 - DNA, 25 bp, Homo sapien
gcaggatgtgtccggagtggctgaa

SEQ ID NO: 5718584 - DNA, 25 bp, Homo sapien
ggtggaagagtccgctgctgtagtc

SEQ ID NO: 5718585 - DNA, 25 bp, Homo sapien
ccccccgcggaagatgaggctggag

SEQ ID NO: 5718586 - DNA, 25 bp, Homo sapien
ctgcgctgcttaggggtgaagctgg

SEQ ID NO: 5718587 - DNA, 25 bp, Homo sapien
gtgcaacaagtgtgggcggcacatc

SEQ ID NO: 5718588 - DNA, 25 bp, Homo sapien
gcgatctgggagacgtttccccttt

SEQ ID NO: 5718589 - DNA, 25 bp, Homo sapien
gagcgatctgggagacgtttcccct

SEQ ID NO: 5718590 - DNA, 25 bp, Homo sapien
ttggtccacccatcccgggagtgcc

SEQ ID NO: 5718591 - DNA, 25 bp, Homo sapien
ggtcaggtgcggaggcagcctctca

SEQ ID NO: 5718592 - DNA, 25 bp, Homo sapien
ttcagagagggaagccagaggagaa

SEQ ID NO: 5718593 - DNA, 25 bp, Homo sapien
gaaacaagagcaaaataaattattt

SEQ ID NO: 5718594 - DNA, 25 bp, Homo sapien
tcccgggagtgcccggtcctcgacg

SEQ ID NO: 5718595 - DNA, 25 bp, Homo sapien
ccctgggccgtggccactctggctt

SEQ ID NO: 5718596 - DNA, 25 bp, Homo sapien
gcgcattcagcacggccgggtgcgc

SEQ ID NO: 5718597 - DNA, 25 bp, Homo sapien
gcagggcgaggtgcgcggcaggcgg

SEQ ID NO: 5718598 - DNA, 25 bp, Homo sapien
gagcagggcgaggtgcgcggcaggc

SEQ ID NO: 5718599 - DNA, 25 bp, Homo sapien
gatctgggagacgtttcccctttca

SEQ ID NO: 5718600 - DNA, 25 bp, Homo sapien
gctcttcttggacttgttggacatc

SEQ ID NO: 5718601 - DNA, 25 bp, Homo sapien
cgagccgggctggcaggagtggtgt

SEQ ID NO: 5718602 - DNA, 25 bp, Homo sapien
tgccgtcccgccgccagagaggggt

SEQ ID NO: 5718603 - DNA, 25 bp, Homo sapien
ggctttggctcagcccagcctggag

SEQ ID NO: 5718604 - DNA, 25 bp, Homo sapien
gtgggcaggatgtgtccggagtggc

SEQ ID NO: 5718605 - DNA, 25 bp, Homo sapien
gggcctggcccgtcaaagcaggcac

SEQ ID NO: 5718606 - DNA, 25 bp, Homo sapien
ttggacatcttccggttccgagtct

SEQ ID NO: 5718607 - DNA, 25 bp, Homo sapien
tgctaggatggatgtggcggcaggc

SEQ ID NO: 5718608 - DNA, 25 bp, Homo sapien
agacgcgcgcccgcgcgtgagcggg

SEQ ID NO: 5718609 - DNA, 25 bp, Homo sapien
cttcatgctctccgtcagtgacacc

SEQ ID NO: 5718610 - DNA, 25 bp, Homo sapien
gacagtcttcgcttgggcttgatga

SEQ ID NO: 5718611 - DNA, 25 bp, Homo sapien
ggaagcctccggggtggaagagtcc

SEQ ID NO: 5718612 - DNA, 25 bp, Homo sapien
tcttgctcttcttggacttgttgga

SEQ ID NO: 5718613 - DNA, 25 bp, Homo sapien
gtctcagagtaggaggcgagggggt

SEQ ID NO: 5718614 - DNA, 25 bp, Homo sapien
gtgcgcggcaggcgggctcgcggga

SEQ ID NO: 5718615 - DNA, 25 bp, Homo sapien
agggcgggaggtggcccacaggtgc

SEQ ID NO: 5718616 - DNA, 25 bp, Homo sapien
tcgtctgacaatttgcacaacaggt

SEQ ID NO: 5718617 - DNA, 25 bp, Homo sapien
gatgtgtccggagtggctgaagggc

SEQ ID NO: 5718618 - DNA, 25 bp, Homo sapien
ccatgtgtccagccagggcagctgc

SEQ ID NO: 5718619 - DNA, 25 bp, Homo sapien
cagcccagcctggagttcggctatt

SEQ ID NO: 5718620 - DNA, 25 bp, Homo sapien
tcccggccttctgaacaggaacgag

SEQ ID NO: 5718621 - DNA, 25 bp, Homo sapien
acatctggcctccggtcaggcgggc

SEQ ID NO: 5718622 - DNA, 25 bp, Homo sapien
cttcatggtcagtggcctgttaaca

SEQ ID NO: 5718623 - DNA, 25 bp, Homo sapien
acagacttgagcagcgagtcccggg

SEQ ID NO: 5718624 - DNA, 25 bp, Homo sapien
tgtaggggtgagggaggccactgag

SEQ ID NO: 5718625 - DNA, 25 bp, Homo sapien
gtcaccatgctggacgggtgggggt

SEQ ID NO: 5718626 - DNA, 25 bp, Homo sapien
caggtgccggctcttctggcggccg

SEQ ID NO: 5718627 - DNA, 25 bp, Homo sapien
agcgagtcccggggcgacgctggcc

SEQ ID NO: 5718628 - DNA, 25 bp, Homo sapien
ggtgggggtggccgaaggagaggct

SEQ ID NO: 5718629 - DNA, 25 bp, Homo sapien
gcctgggcggcacgccgagcggccg

SEQ ID NO: 5718630 - DNA, 25 bp, Homo sapien
actgtccatgcaggaaaccccacct

SEQ ID NO: 5718631 - DNA, 25 bp, Homo sapien
ccccgcggaagatgaggctggagac

SEQ ID NO: 5718632 - DNA, 25 bp, Homo sapien
cttgttgttctccaaacaactgtcc

SEQ ID NO: 5718633 - DNA, 25 bp, Homo sapien
ccagaggagaagagggtgcaggctg

SEQ ID NO: 5718634 - DNA, 25 bp, Homo sapien
cgagtcccggggcgacgctggcctc

SEQ ID NO: 5718635 - DNA, 25 bp, Homo sapien
ccggggcgacgctggcctcgctacc

SEQ ID NO: 5718636 - DNA, 25 bp, Homo sapien
aagctggaggccggtccccccagga

SEQ ID NO: 5718637 - DNA, 25 bp, Homo sapien
ctccggcgccacctccatggccggc

SEQ ID NO: 5718638 - DNA, 25 bp, Homo sapien
ggtggttgtcgtctgacaatttgca

SEQ ID NO: 5718639 - DNA, 25 bp, Homo sapien
gcggcaggcgggctcgcgggacctg

SEQ ID NO: 5718640 - DNA, 25 bp, Homo sapien
actaccccccgcggaagatgaggct

SEQ ID NO: 5718641 - DNA, 25 bp, Homo sapien
cccatcccgggagtgcccggtcctc

SEQ ID NO: 5718642 - DNA, 25 bp, Homo sapien
cttttctctacataaagttgtcctt

SEQ ID NO: 5718643 - DNA, 25 bp, Homo sapien
tccctagcccatggcggtcaccatg

SEQ ID NO: 5718644 - DNA, 25 bp, Homo sapien
aacattcacagtaactgctggcagg

SEQ ID NO: 5718645 - DNA, 25 bp, Homo sapien
taaaaatggttgccttcgtctgtcc

SEQ ID NO: 5718646 - DNA, 25 bp, Homo sapien
gcgagggggttgaagggttagcaga

SEQ ID NO: 5718647 - DNA, 25 bp, Homo sapien
tgctgggccgagccgggctggcagg

SEQ ID NO: 5718648 - DNA, 25 bp, Homo sapien
cgaaggagaggctggaggaggggtg

SEQ ID NO: 5718649 - DNA, 25 bp, Homo sapien
cttgttggacatcttccggttccga

SEQ ID NO: 5718650 - DNA, 25 bp, Homo sapien
tcccttccttcttcatggtcagtgg

SEQ ID NO: 5718651 - DNA, 25 bp, Homo sapien
aggtggtggttgtcgtctgacaatt

SEQ ID NO: 5718652 - DNA, 25 bp, Homo sapien
cctggagttcggctatttcagagag

SEQ ID NO: 5718653 - DNA, 25 bp, Homo sapien
caggcaatagacagacttgagcagc

SEQ ID NO: 5718654 - DNA, 25 bp, Homo sapien
cgacgtccatctgttccctagccca

SEQ ID NO: 5718655 - DNA, 25 bp, Homo sapien
gcgtttcggcgccataaggtggtgg

SEQ ID NO: 5718656 - DNA, 25 bp, Homo sapien
tgcgcggggctgtaggagacgcgcg

SEQ ID NO: 5718657 - DNA, 25 bp, Homo sapien
tgtcggccttcgggaaatgctgggc

SEQ ID NO: 5718658 - DNA, 25 bp, Homo sapien
tgtagtcgtgggcagccgccggcac

SEQ ID NO: 5718659 - DNA, 25 bp, Homo sapien
tctttgggtggcgtgggtgggaagc

SEQ ID NO: 5718660 - DNA, 25 bp, Homo sapien
gaaaatgttgtttccttcctgtgac

SEQ ID NO: 5718661 - DNA, 25 bp, Homo sapien
cctggcctgggaatctgtgcaggac

SEQ ID NO: 5718662 - DNA, 25 bp, Homo sapien
cagcggtcaggtgcggaggcagcct

SEQ ID NO: 5718663 - DNA, 25 bp, Homo sapien
gccgggtgcgccatccagcgcggct

SEQ ID NO: 5718664 - DNA, 25 bp, Homo sapien
cacggtccaggggttgtggtggtgg

SEQ ID NO: 5718665 - DNA, 25 bp, Homo sapien
gagaaggggctcacggtccaggggt

SEQ ID NO: 5718666 - DNA, 25 bp, Homo sapien
gaagagggtgcaggctgaggtcccc

SEQ ID NO: 5718667 - DNA, 25 bp, Homo sapien
ctgcactaccccccgcggaagatga

SEQ ID NO: 5718668 - DNA, 25 bp, Homo sapien
acatcttccggttccgagtctggat

SEQ ID NO: 5718669 - DNA, 25 bp, Homo sapien
agtgggttgctgtaggggtgaggga

SEQ ID NO: 5718670 - DNA, 25 bp, Homo sapien
ccagagtgggttgctgtaggggtga

SEQ ID NO: 5718671 - DNA, 25 bp, Homo sapien
gggcggcacgccgagcggccgcatg

SEQ ID NO: 5718672 - DNA, 25 bp, Homo sapien
ccgagcggccgcatggtgttcagcg

SEQ ID NO: 5718673 - DNA, 25 bp, Homo sapien
gttcggctatttcagagagggaagc

SEQ ID NO: 5718674 - DNA, 25 bp, Homo sapien
aggggactgccactttccatcttca

SEQ ID NO: 5718675 - DNA, 25 bp, Homo sapien
tggcggcgctcaccagcagagcctg

SEQ ID NO: 5718676 - DNA, 25 bp, Homo sapien
ttcatcttgtggtagaggccacagg

SEQ ID NO: 5718677 - DNA, 25 bp, Homo sapien
ggggtggcggcgctcaccagcagag

SEQ ID NO: 5718678 - DNA, 25 bp, Homo sapien
cgcggggctgtaggagacgcgcgcc

SEQ ID NO: 5718679 - DNA, 25 bp, Homo sapien
tggcgtttcggcgccataaggtggt

SEQ ID NO: 5718680 - DNA, 25 bp, Homo sapien
tcctcgacgtccatctgttccctag

SEQ ID NO: 5718681 - DNA, 25 bp, Homo sapien
ccgccagagaggggtggctgtggcc

SEQ ID NO: 5718682 - DNA, 25 bp, Homo sapien
gtcgtgggcagccgccggcacatag

SEQ ID NO: 5718683 - DNA, 25 bp, Homo sapien
agtcggggtgctgcgcattcagcac

SEQ ID NO: 5718684 - DNA, 25 bp, Homo sapien
gccaggcccgggtggtgtgagtcgg

SEQ ID NO: 5718685 - DNA, 25 bp, Homo sapien
aacccgggctgtgcaacaagtgtgg

SEQ ID NO: 5718686 - DNA, 25 bp, Homo sapien
gttgaagggttagcagaaaaaggat

SEQ ID NO: 5718687 - DNA, 25 bp, Homo sapien
ggagccagagtgggttgctgtaggg

SEQ ID NO: 5718688 - DNA, 25 bp, Homo sapien
ctgtgacccagccctggcctgggaa

SEQ ID NO: 5718689 - DNA, 25 bp, Homo sapien
aaaaaggatgtatttacagggtcca

SEQ ID NO: 5718690 - DNA, 25 bp, Homo sapien
gagtaggaggcgagggggttgaagg

SEQ ID NO: 5718691 - DNA, 25 bp, Homo sapien
agcttcggcctcaaagccaagggag

SEQ ID NO: 5718692 - DNA, 25 bp, Homo sapien
cgctgctgtagtcgtgggcagccgc

SEQ ID NO: 5718693 - DNA, 25 bp, Homo sapien
ccagcctggagttcggctatttcag

SEQ ID NO: 5718694 - DNA, 25 bp, Homo sapien
gctctccgtcagtgacacctggtac

SEQ ID NO: 5718695 - DNA, 25 bp, Homo sapien
gcagcagctgcgcgggttccatgta

SEQ ID NO: 5718696 - DNA, 25 bp, Homo sapien
gtcggttctgcccattcatcttgtg

SEQ ID NO: 5718697 - DNA, 25 bp, Homo sapien
cagggcctccagcagctgaggggtg

SEQ ID NO: 5718698 - DNA, 25 bp, Homo sapien
gagcctgggcggcacgccgagcggc

SEQ ID NO: 5718699 - DNA, 25 bp, Homo sapien
tgagtcggggtgctgcgcattcagc

SEQ ID NO: 5718700 - DNA, 25 bp, Homo sapien
ccatgctggacgggtgggggtggcc

SEQ ID NO: 5718701 - DNA, 25 bp, Homo sapien
tggagtagagctgggagcagggcga

SEQ ID NO: 5718702 - DNA, 25 bp, Homo sapien
ggggttggcatagtaggggttgccc

SEQ ID NO: 5718703 - DNA, 25 bp, Homo sapien
gccccacagttgacacactcccggc

SEQ ID NO: 5718704 - DNA, 25 bp, Homo sapien
cagggcctggcccgtcaaagcaggc

SEQ ID NO: 5718705 - DNA, 25 bp, Homo sapien
aggggacacagtcacagcagcttcg

SEQ ID NO: 5718706 - DNA, 25 bp, Homo sapien
tccaggagagggggtgctgggccga

SEQ ID NO: 5718707 - DNA, 25 bp, Homo sapien
ggctgcactaccccccgcggaagat

SEQ ID NO: 5718708 - DNA, 25 bp, Homo sapien
gcttgggcttgatgagtggtcggtt

SEQ ID NO: 5718709 - DNA, 25 bp, Homo sapien
tggatgtggcggcaggcaatagaca

SEQ ID NO: 5718710 - DNA, 25 bp, Homo sapien
ccatggcggtcaccatgctggacgg

SEQ ID NO: 5718711 - DNA, 25 bp, Homo sapien
agccagggcaaacccgggctgtgca

SEQ ID NO: 5718712 - DNA, 25 bp, Homo sapien
caagacaggctgtggcttgcgctca

SEQ ID NO: 5718713 - DNA, 25 bp, Homo sapien
gcaggagtggtgtcggccttcggga

SEQ ID NO: 5718714 - DNA, 25 bp, Homo sapien
gcatggtgttcagcggaccgctttt

SEQ ID NO: 5718715 - DNA, 25 bp, Homo sapien
ctcacggtccaggggttgtggtggt

SEQ ID NO: 5718716 - DNA, 25 bp, Homo sapien
ttgagcagcgagtcccggggcgacg

SEQ ID NO: 5718717 - DNA, 25 bp, Homo sapien
acgagccttgctgcgctgcttaggg

SEQ ID NO: 5718718 - DNA, 25 bp, Homo sapien
gggtggatgggcgtcggagtgggca

SEQ ID NO: 5718719 - DNA, 25 bp, Homo sapien
gtaggggttgccctgcgagtcgagg

SEQ ID NO: 5718720 - DNA, 25 bp, Homo sapien
gcattcagcacggccgggtgcgcca

SEQ ID NO: 5718721 - DNA, 25 bp, Homo sapien
tgtgtagcaggctgggtgcccatag

SEQ ID NO: 5718722 - DNA, 25 bp, Homo sapien
gtgcgccaggcccgggtggtgtgag

SEQ ID NO: 5718723 - DNA, 25 bp, Homo sapien
acgcgcgcccgcgcgtgagcggggt

SEQ ID NO: 5718724 - DNA, 25 bp, Homo sapien
gctaagggtttggtccacccatccc

SEQ ID NO: 5718725 - DNA, 25 bp, Homo sapien
catcttgtggtagaggccacaggca

SEQ ID NO: 5718726 - DNA, 25 bp, Homo sapien
gcgtcttggagaaggggctcacggt

SEQ ID NO: 5718727 - DNA, 25 bp, Homo sapien
gtggtgtgagtcggggtgctgcgca

SEQ ID NO: 5718728 - DNA, 25 bp, Homo sapien
ggaagaaccggaggacttgggacag

SEQ ID NO: 5718729 - DNA, 25 bp, Homo sapien
cgggacctgggcgcggggtggcggc

SEQ ID NO: 5718730 - DNA, 25 bp, Homo sapien
cagccctggcctgggaatctgtgca

SEQ ID NO: 5718731 - DNA, 25 bp, Homo sapien
ggaacattcacagtaactgctggca

SEQ ID NO: 5718732 - DNA, 25 bp, Homo sapien
tggcctgggaatctgtgcaggaccg

SEQ ID NO: 5718733 - DNA, 25 bp, Homo sapien
cagacggcaacggcccgagcgaggc

SEQ ID NO: 5718734 - DNA, 25 bp, Homo sapien
ggttgtggtggtgggccgcagcggc

SEQ ID NO: 5718735 - DNA, 25 bp, Homo sapien
aggccactgagctcccgctgcctcc

SEQ ID NO: 5718736 - DNA, 25 bp, Homo sapien
ggagacgcgcgcccgcgcgtgagcg

SEQ ID NO: 5718737 - DNA, 25 bp, Homo sapien
ggcggcggcggctcagggtctgggt

SEQ ID NO: 5718738 - DNA, 25 bp, Homo sapien
ggcaaacccgggctgtgcaacaagt

SEQ ID NO: 5718739 - DNA, 25 bp, Homo sapien
caggcgggctcgcgggacctgggcg

SEQ ID NO: 5718740 - DNA, 25 bp, Homo sapien
ttttgtctcagagtaggaggcgagg

SEQ ID NO: 5718741 - DNA, 25 bp, Homo sapien
ggtcagtggcctgttaacattgtgc

SEQ ID NO: 5718742 - DNA, 25 bp, Homo sapien
ggacttgggacagctcagaccacca

SEQ ID NO: 5718743 - DNA, 25 bp, Homo sapien
tgcagacagggtccccgttggcgtt

SEQ ID NO: 5718744 - DNA, 25 bp, Homo sapien
atgtgtccagccagggcagctgcac

SEQ ID NO: 5718745 - DNA, 25 bp, Homo sapien
ggctcgcgggacctgggcgcggggt

SEQ ID NO: 5718746 - DNA, 25 bp, Homo sapien
cttctttgggtggcgtgggtgggaa

SEQ ID NO: 5718747 - DNA, 25 bp, Homo sapien
ctgctggcaggctgctgggcgccct

SEQ ID NO: 5718748 - DNA, 25 bp, Homo sapien
tctccaaacaactgtccatgcagga

SEQ ID NO: 5718749 - DNA, 25 bp, Homo sapien
gactgccactttccatcttcatgct

SEQ ID NO: 5718750 - DNA, 25 bp, Homo sapien
ggtggccgaaggagaggctggagga

SEQ ID NO: 5718751 - DNA, 25 bp, Homo sapien
gcttgatgagtggtcggttctgccc

SEQ ID NO: 5718752 - DNA, 25 bp, Homo sapien
tgggaagccgaaaaggtgggagcca

SEQ ID NO: 5718753 - DNA, 25 bp, Homo sapien
gctggcaggagtggtgtcggccttc

SEQ ID NO: 5718754 - DNA, 25 bp, Homo sapien
ggccttcgggaaatgctgggctgct

SEQ ID NO: 5718755 - DNA, 25 bp, Homo sapien
tagcagaaaaaggatgtatttacag

SEQ ID NO: 5718756 - DNA, 25 bp, Homo sapien
cgaggtgcgcggcaggcgggctcgc

SEQ ID NO: 5718757 - DNA, 25 bp, Homo sapien
gggaagccagaggagaagagggtgc

SEQ ID NO: 5718758 - DNA, 25 bp, Homo sapien
gttgacacactcccggccttctgaa

SEQ ID NO: 5718759 - DNA, 25 bp, Homo sapien
agccgggctggcaggagtggtgtcg

SEQ ID NO: 5718760 - DNA, 25 bp, Homo sapien
ggggtgctgggccgagccgggctgg

SEQ ID NO: 5718761 - DNA, 25 bp, Homo sapien
aggcgagggggttgaagggttagca

SEQ ID NO: 5718762 - DNA, 25 bp, Homo sapien
tcgcttgggcttgatgagtggtcgg

SEQ ID NO: 5718763 - DNA, 25 bp, Homo sapien
aggtgcgcggcaggcgggctcgcgg

SEQ ID NO: 5718764 - DNA, 25 bp, Homo sapien
ggtggggatggggtggtgtgtagca

SEQ ID NO: 5718765 - DNA, 25 bp, Homo sapien
tccgtcagtgacacctggtacttga

SEQ ID NO: 5718766 - DNA, 25 bp, Homo sapien
gctgtaggggtgagggaggccactg

SEQ ID NO: 5718767 - DNA, 25 bp, Homo sapien
gtgattgaagaagacgtccacctcg

SEQ ID NO: 5718768 - DNA, 25 bp, Homo sapien
tcttgtggtagaggccacaggcatt

SEQ ID NO: 5718769 - DNA, 25 bp, Homo sapien
tcagaccaccaagtctccaagtcct

SEQ ID NO: 5718770 - DNA, 25 bp, Homo sapien
agagtccgctgctgtagtcgtgggc

SEQ ID NO: 5718771 - DNA, 25 bp, Homo sapien
ggcaagtggacccgccaatcccgag

SEQ ID NO: 5718772 - DNA, 25 bp, Homo sapien
agacttgagcagcgagtcccggggc

SEQ ID NO: 5718773 - DNA, 25 bp, Homo sapien
ccgagcgaggcgcggtgggcggcgc

SEQ ID NO: 5718774 - DNA, 25 bp, Homo sapien
gacagctcagaccaccaagtctcca

SEQ ID NO: 5718775 - DNA, 25 bp, Homo sapien
tgagggaggccactgagctcccgct

SEQ ID NO: 5718776 - DNA, 25 bp, Homo sapien
gaatctgtgcaggaccgcccgtgat

SEQ ID NO: 5718777 - DNA, 25 bp, Homo sapien
gtggtggtgggccgcagcggcagag

SEQ ID NO: 5718778 - DNA, 25 bp, Homo sapien
ggggctcacggtccaggggttgtgg

SEQ ID NO: 5718779 - DNA, 25 bp, Homo sapien
gagaagagggtgcaggctgaggtcc

SEQ ID NO: 5718780 - DNA, 25 bp, Homo sapien
aggtgattgaagaagacgtccacct

SEQ ID NO: 5718781 - DNA, 25 bp, Homo sapien
agctcaccctccctgggccgtggcc

SEQ ID NO: 5718782 - DNA, 25 bp, Homo sapien
ggaccgcttttgtccgcctggtggg

SEQ ID NO: 5718783 - DNA, 25 bp, Homo sapien
ggacctgggcgcggggtggcggcgc

SEQ ID NO: 5718784 - DNA, 25 bp, Homo sapien
gggcgccctccaggagagggggtgc

SEQ ID NO: 5718785 - DNA, 25 bp, Homo sapien
cacctcgtctggaggcagcagctgc

SEQ ID NO: 5718786 - DNA, 25 bp, Homo sapien
tgggcagccgccggcacataggagg

SEQ ID NO: 5718787 - DNA, 25 bp, Homo sapien
gaccgcccgtgattgtctctgccct

SEQ ID NO: 5718788 - DNA, 25 bp, Homo sapien
ggtaggtggggatggggtggtgtgt

SEQ ID NO: 5718789 - DNA, 25 bp, Homo sapien
gggtggtgtgagtcggggtgctgcg

SEQ ID NO: 5718790 - DNA, 25 bp, Homo sapien
ggaggggtggatgggcgtcggagtg

SEQ ID NO: 5718791 - DNA, 25 bp, Homo sapien
ccttccttcttcatggtcagtggcc

SEQ ID NO: 5718792 - DNA, 25 bp, Homo sapien
ctaggatggatgtggcggcaggcaa

SEQ ID NO: 5718793 - DNA, 25 bp, Homo sapien
agaccaccaagtctccaagtccttg

SEQ ID NO: 5718794 - DNA, 25 bp, Homo sapien
agtaaggggacacagtcacagcagc

SEQ ID NO: 5718795 - DNA, 25 bp, Homo sapien
agctgggagcagggcgaggtgcgcg

SEQ ID NO: 5718796 - DNA, 25 bp, Homo sapien
ggcggctcagggtctgggtgcagac

SEQ ID NO: 5718797 - DNA, 25 bp, Homo sapien
tctgggagacgtttcccctttcaag

SEQ ID NO: 5718798 - DNA, 25 bp, Homo sapien
aagtctccaagtccttgttagaaac

SEQ ID NO: 5718799 - DNA, 25 bp, Homo sapien
gcggaccgcttttgtccgcctggtg

SEQ ID NO: 5718800 - DNA, 25 bp, Homo sapien
gccagagaggggtggctgtggcccc

SEQ ID NO: 5718801 - DNA, 25 bp, Homo sapien
ctgaagggcgggaggtggcccacag

SEQ ID NO: 5718802 - DNA, 25 bp, Homo sapien
ccgggtggtgtgagtcggggtgctg

SEQ ID NO: 5718803 - DNA, 25 bp, Homo sapien
gagttcggctatttcagagagggaa

SEQ ID NO: 5718804 - DNA, 25 bp, Homo sapien
tgacagctcctcgaagcactccgcc

SEQ ID NO: 5718805 - DNA, 25 bp, Homo sapien
gcgtcggagtgggcaggatgtgtcc

SEQ ID NO: 5718806 - DNA, 25 bp, Homo sapien
tgggagccagagtgggttgctgtag

SEQ ID NO: 5718807 - DNA, 25 bp, Homo sapien
cccacagttgacacactcccggcct

SEQ ID NO: 5718808 - DNA, 25 bp, Homo sapien
cgcctggtgggcgacggggccctgc

SEQ ID NO: 5718809 - DNA, 25 bp, Homo sapien
gcggaggcagcctctcagcggtggg

SEQ ID NO: 5718810 - DNA, 25 bp, Homo sapien
gatggggtggtgtgtagcaggctgg

SEQ ID NO: 5718811 - DNA, 25 bp, Homo sapien
gtggccggtgccgtcccgccgccag

SEQ ID NO: 5718812 - DNA, 25 bp, Homo sapien
cagtcttcgcttgggcttgatgagt

SEQ ID NO: 5718813 - DNA, 25 bp, Homo sapien
gctgtaggagacgcgcgcccgcgcg

SEQ ID NO: 5718814 - DNA, 25 bp, Homo sapien
gcgccaggcccgggtggtgtgagtc

SEQ ID NO: 5718815 - DNA, 25 bp, Homo sapien
cctctcagcggtggggaacattcac

SEQ ID NO: 5718816 - DNA, 25 bp, Homo sapien
tttcttgctcttcttggacttgttg

SEQ ID NO: 5718817 - DNA, 25 bp, Homo sapien
gctgcgcgggttccatgtagttgtg

SEQ ID NO: 5718818 - DNA, 25 bp, Homo sapien
gggccctgctaggatggatgtggcg

SEQ ID NO: 5718819 - DNA, 25 bp, Homo sapien
gagtgggcaggatgtgtccggagtg

SEQ ID NO: 5718820 - DNA, 25 bp, Homo sapien
ggggtggaagagtccgctgctgtag

SEQ ID NO: 5718821 - DNA, 25 bp, Homo sapien
gcagaaaaaggatgtatttacaggg

SEQ ID NO: 5718822 - DNA, 25 bp, Homo sapien
tgacacactcccggccttctgaaca

SEQ ID NO: 5718823 - DNA, 25 bp, Homo sapien
tgtgtccggagtggctgaagggcgg

SEQ ID NO: 5718824 - DNA, 25 bp, Homo sapien
ggccacaggcattgcacaggtagtg

SEQ ID NO: 5718825 - DNA, 25 bp, Homo sapien
tatttacagggtccacctgacaaga

SEQ ID NO: 5718826 - DNA, 25 bp, Homo sapien
ggtacttgacgccgtccttgtcctc

SEQ ID NO: 5718827 - DNA, 25 bp, Homo sapien
gtccacctgacaagacaggctgtgg

SEQ ID NO: 5718828 - DNA, 25 bp, Homo sapien
gaggacttgggacagctcagaccac

SEQ ID NO: 5718829 - DNA, 25 bp, Homo sapien
agcgcggctgctccggcgccacctc

SEQ ID NO: 5718830 - DNA, 25 bp, Homo sapien
agcctggagttcggctatttcagag

SEQ ID NO: 5718831 - DNA, 25 bp, Homo sapien
cagcttgtagtagaggccacaggcg

SEQ ID NO: 5718832 - DNA, 25 bp, Homo sapien
attgtgcagcttgtagtagaggcca

SEQ ID NO: 5718833 - DNA, 25 bp, Homo sapien
atgctggacgggtgggggtggccga

SEQ ID NO: 5718834 - DNA, 25 bp, Homo sapien
ccccgttggcgtttcggcgccataa

SEQ ID NO: 5718835 - DNA, 25 bp, Homo sapien
acagagagtgggcctccagggcctc

SEQ ID NO: 5718836 - DNA, 25 bp, Homo sapien
ctggcaagtggacccgccaatcccg

SEQ ID NO: 5718837 - DNA, 25 bp, Homo sapien
ccagggcaaacccgggctgtgcaac

SEQ ID NO: 5718838 - DNA, 25 bp, Homo sapien
aacggcccgagcgaggcgcggtggg

SEQ ID NO: 5718839 - DNA, 25 bp, Homo sapien
gggccgagccgggctggcaggagtg

SEQ ID NO: 5718840 - DNA, 25 bp, Homo sapien
ctgggcgccctccaggagagggggt

SEQ ID NO: 5718841 - DNA, 25 bp, Homo sapien
ccttctgaacaggaacgagccttgc

SEQ ID NO: 5718842 - DNA, 25 bp, Homo sapien
ggcccgtcaaagcaggcaccagctc

SEQ ID NO: 5718843 - DNA, 25 bp, Homo sapien
tccacccatcccgggagtgcccggt

SEQ ID NO: 5718844 - DNA, 25 bp, Homo sapien
caggggttgtggtggtgggccgcag

SEQ ID NO: 5718845 - DNA, 25 bp, Homo sapien
gcggggttggcatagtaggggttgc

SEQ ID NO: 5718846 - DNA, 25 bp, Homo sapien
gggcttgatgagtggtcggttctgc

SEQ ID NO: 5718847 - DNA, 25 bp, Homo sapien
gggtggtgtgtagcaggctgggtgc

SEQ ID NO: 5718848 - DNA, 25 bp, Homo sapien
cttcggcctcaaagccaagggagcg

SEQ ID NO: 5718849 - DNA, 25 bp, Homo sapien
ggcccacaggtgccatgtgtccagc

SEQ ID NO: 5718850 - DNA, 25 bp, Homo sapien
ctccctgggccgtggccactctggc

SEQ ID NO: 5718851 - DNA, 25 bp, Homo sapien
tggctgtggccccacagttgacaca

SEQ ID NO: 5718852 - DNA, 25 bp, Homo sapien
ggggtgctgcgcattcagcacggcc

SEQ ID NO: 5718853 - DNA, 25 bp, Homo sapien
tgtttccttcctgtgacccagccct

SEQ ID NO: 5718854 - DNA, 25 bp, Homo sapien
ggaagccgaaaaggtgggagccaga

SEQ ID NO: 5718855 - DNA, 25 bp, Homo sapien
gcttgcgctcagtaaggggacacag

SEQ ID NO: 5718856 - DNA, 25 bp, Homo sapien
gagtagagctgggagcagggcgagg

SEQ ID NO: 5718857 - DNA, 25 bp, Homo sapien
cttcgcttgggcttgatgagtggtc

SEQ ID NO: 5718858 - DNA, 25 bp, Homo sapien
ctgggcgcggggtggcggcgctcac

SEQ ID NO: 5718859 - DNA, 25 bp, Homo sapien
gtccatctgttccctagcccatggc

SEQ ID NO: 5718860 - DNA, 25 bp, Homo sapien
cttctggcggccgacagtcttcgct

SEQ ID NO: 5718861 - DNA, 25 bp, Homo sapien
gaaggggctcacggtccaggggttg

SEQ ID NO: 5718862 - DNA, 25 bp, Homo sapien
ctttccatcttcatgctctccgtca

SEQ ID NO: 5718863 - DNA, 25 bp, Homo sapien
agtagaggccacaggcgttgcagac

SEQ ID NO: 5718864 - DNA, 25 bp, Homo sapien
ggcgccacctccatggccggcggcg

SEQ ID NO: 5718865 - DNA, 25 bp, Homo sapien
gccgaaggagaggctggaggagggg

SEQ ID NO: 5718866 - DNA, 25 bp, Homo sapien
acgctggcctcgctaccttcctggc

SEQ ID NO: 5718867 - DNA, 25 bp, Homo sapien
cagcagcttcggcctcaaagccaag

SEQ ID NO: 5718868 - DNA, 25 bp, Homo sapien
gcagcgagtcccggggcgacgctgg

SEQ ID NO: 5718869 - DNA, 25 bp, Homo sapien
gagtggctgaagggcgggaggtggc

SEQ ID NO: 5718870 - DNA, 25 bp, Homo sapien
ttgggcttgatgagtggtcggttct

SEQ ID NO: 5718871 - DNA, 25 bp, Homo sapien
tagcccatggcggtcaccatgctgg

SEQ ID NO: 5718872 - DNA, 25 bp, Homo sapien
gcagcttcggcctcaaagccaaggg

SEQ ID NO: 5718873 - DNA, 25 bp, Homo sapien
gggacacagtcacagcagcttcggc

SEQ ID NO: 5718874 - DNA, 25 bp, Homo sapien
tgggggtggccgaaggagaggctgg

SEQ ID NO: 5718875 - DNA, 25 bp, Homo sapien
ggctgaagggcgggaggtggcccac

SEQ ID NO: 5718876 - DNA, 25 bp, Homo sapien
aaggagaggctggaggaggggtgga

SEQ ID NO: 5718877 - DNA, 25 bp, Homo sapien
gagtcgaggtgattgaagaagacgt

SEQ ID NO: 5718878 - DNA, 25 bp, Homo sapien
taccccccgcggaagatgaggctgg

SEQ ID NO: 5718879 - DNA, 25 bp, Homo sapien
ccccagagccctggcaagtggaccc

SEQ ID NO: 5718880 - DNA, 25 bp, Homo sapien
acacctggtacttgacgccgtcctt

SEQ ID NO: 5718881 - DNA, 25 bp, Homo sapien
gaggccggtccccccaggaagcctc

SEQ ID NO: 5718882 - DNA, 25 bp, Homo sapien
gggcctccagcagctgaggggtgca

SEQ ID NO: 5718883 - DNA, 25 bp, Homo sapien
ttggctcagcccagcctggagttcg

SEQ ID NO: 5718884 - DNA, 25 bp, Homo sapien
cccgggctgtgcaacaagtgtgggc

SEQ ID NO: 5718885 - DNA, 25 bp, Homo sapien
ctgggcgcaggggactgccactttc

SEQ ID NO: 5718886 - DNA, 25 bp, Homo sapien
gcggccgacagtcttcgcttgggct

SEQ ID NO: 5718887 - DNA, 25 bp, Homo sapien
ctgccctccagggcctggcccgtca

SEQ ID NO: 5718888 - DNA, 25 bp, Homo sapien
gccctccagggcctggcccgtcaaa

SEQ ID NO: 5718889 - DNA, 25 bp, Homo sapien
ttgtagtagaggccacaggcgttgc

SEQ ID NO: 5718890 - DNA, 25 bp, Homo sapien
tgggcagcggtcaggtgcggaggca

SEQ ID NO: 5718891 - DNA, 25 bp, Homo sapien
ggtgcccatagtagctaggcctggg

SEQ ID NO: 5718892 - DNA, 25 bp, Homo sapien
tggggatggggtggtgtgtagcagg

SEQ ID NO: 5718893 - DNA, 25 bp, Homo sapien
ctccggggtggaagagtccgctgct

SEQ ID NO: 5718894 - DNA, 25 bp, Homo sapien
cagcggaccgcttttgtccgcctgg

SEQ ID NO: 5718895 - DNA, 25 bp, Homo sapien
gttagcagaaaaaggatgtatttac

SEQ ID NO: 5718896 - DNA, 25 bp, Homo sapien
cacataggaggggtaggtggggatg

SEQ ID NO: 5718897 - DNA, 25 bp, Homo sapien
tgtccggagtggctgaagggcggga

SEQ ID NO: 5718898 - DNA, 25 bp, Homo sapien
cgaaaaggtgggagccagagtgggt

SEQ ID NO: 5718899 - DNA, 25 bp, Homo sapien
agggtcaggagacacttctttgggt

SEQ ID NO: 5718900 - DNA, 25 bp, Homo sapien
gtccagccagggcagctgcactgaa

SEQ ID NO: 5718901 - DNA, 25 bp, Homo sapien
ccagcagagcctgggcggcacgccg

SEQ ID NO: 5718902 - DNA, 25 bp, Homo sapien
cagagcctgggcggcacgccgagcg

SEQ ID NO: 5718903 - DNA, 25 bp, Homo sapien
ggcctcaaagccaagggagcgatct

SEQ ID NO: 5718904 - DNA, 25 bp, Homo sapien
ccctgcgagtcgaggtgattgaaga

SEQ ID NO: 5718905 - DNA, 25 bp, Homo sapien
tcagggtctgggtgcagacggcaac

SEQ ID NO: 5718906 - DNA, 25 bp, Homo sapien
gcccgcgcgtgagcggggttggcat

SEQ ID NO: 5718907 - DNA, 25 bp, Homo sapien
atggcggtcaccatgctggacgggt

SEQ ID NO: 5718908 - DNA, 25 bp, Homo sapien
cggcgccataaggtggtggttgtcg

SEQ ID NO: 5718909 - DNA, 25 bp, Homo sapien
gaacaggaacgagccttgctgcgct

SEQ ID NO: 5718910 - DNA, 25 bp, Homo sapien
tagaaacaagagcaaaataaattat

SEQ ID NO: 5718911 - DNA, 25 bp, Homo sapien
catcccgggagtgcccggtcctcga

SEQ ID NO: 5718912 - DNA, 25 bp, Homo sapien
atggtcagtggcctgttaacattgt

SEQ ID NO: 5718913 - DNA, 25 bp, Homo sapien
taggagacgcgcgcccgcgcgtgag

SEQ ID NO: 5718914 - DNA, 25 bp, Homo sapien
ggctgtgcaacaagtgtgggcggca

SEQ ID NO: 5718915 - DNA, 25 bp, Homo sapien
ggcaatagacagacttgagcagcga

SEQ ID NO: 5718916 - DNA, 25 bp, Homo sapien
cttcctgtgacccagccctggcctg

SEQ ID NO: 5718917 - DNA, 25 bp, Homo sapien
cggagtgggcaggatgtgtccggag

SEQ ID NO: 5718918 - DNA, 25 bp, Homo sapien
aaatgctgggctgctaagggtttgg

SEQ ID NO: 5718919 - DNA, 25 bp, Homo sapien
tgacgccgtccttgtcctctcctcg

SEQ ID NO: 5718920 - DNA, 25 bp, Homo sapien
gttgtttccttcctgtgacccagcc

SEQ ID NO: 5718921 - DNA, 25 bp, Homo sapien
agagagtgggcctccagggcctcca

SEQ ID NO: 5718922 - DNA, 25 bp, Homo sapien
cagccgccggcacataggaggggta

SEQ ID NO: 5718923 - DNA, 25 bp, Homo sapien
aaggtgggagccagagtgggttgct

SEQ ID NO: 5718924 - DNA, 25 bp, Homo sapien
cacgccgagcggccgcatggtgttc

SEQ ID NO: 5718925 - DNA, 25 bp, Homo sapien
ggcctggagtagagctgggagcagg

SEQ ID NO: 5718926 - DNA, 25 bp, Homo sapien
aagacgtccacctcgtctggaggca

SEQ ID NO: 5718927 - DNA, 25 bp, Homo sapien
ggctcagcccagcctggagttcggc

SEQ ID NO: 5718928 - DNA, 25 bp, Homo sapien
tccttttctctacataaagttgtcc

SEQ ID NO: 5718929 - DNA, 25 bp, Homo sapien
cgtcaaagcaggcaccagctcaccc

SEQ ID NO: 5718930 - DNA, 25 bp, Homo sapien
ctcagagtaggaggcgagggggttg

SEQ ID NO: 5718931 - DNA, 25 bp, Homo sapien
gcctccggggtggaagagtccgctg

SEQ ID NO: 5718932 - DNA, 25 bp, Homo sapien
ggtgttcagcggaccgcttttgtcc

SEQ ID NO: 5718933 - DNA, 25 bp, Homo sapien
ttgatgagtggtcggttctgcccat

SEQ ID NO: 5718934 - DNA, 25 bp, Homo sapien
cccatagtagctaggcctgggcgca

SEQ ID NO: 5718935 - DNA, 25 bp, Homo sapien
gcatgcactttgacagctcctcgaa

SEQ ID NO: 5718936 - DNA, 25 bp, Homo sapien
ccagcagctgaggggtgcagtggcg

SEQ ID NO: 5718937 - DNA, 25 bp, Homo sapien
gggcggacggggcctggagtagagc

SEQ ID NO: 5718938 - DNA, 25 bp, Homo sapien
acaggaacgagccttgctgcgctgc

SEQ ID NO: 5718939 - DNA, 25 bp, Homo sapien
tcggggtgctgcgcattcagcacgg

SEQ ID NO: 5718940 - DNA, 25 bp, Homo sapien
ggatgggcgtcggagtgggcaggat

SEQ ID NO: 5718941 - DNA, 25 bp, Homo sapien
tctaaaaatggttgccttcgtctgt

SEQ ID NO: 5718942 - DNA, 25 bp, Homo sapien
agaagacgtccacctcgtctggagg

SEQ ID NO: 5718943 - DNA, 25 bp, Homo sapien
aggggttgccctgcgagtcgaggtg

SEQ ID NO: 5718944 - DNA, 25 bp, Homo sapien
cagagtaggaggcgagggggttgaa

SEQ ID NO: 5718945 - DNA, 25 bp, Homo sapien
ggcatagtaggggttgccctgcgag

SEQ ID NO: 5718946 - DNA, 25 bp, Homo sapien
cagcccctgggtacacagagagtgg

SEQ ID NO: 5718947 - DNA, 25 bp, Homo sapien
gcccatggcggtcaccatgctggac

SEQ ID NO: 5718948 - DNA, 25 bp, Homo sapien
gctggcaggctgctgggcgccctcc

SEQ ID NO: 5718949 - DNA, 25 bp, Homo sapien
taaggggacacagtcacagcagctt

SEQ ID NO: 5718950 - DNA, 25 bp, Homo sapien
tttccttcctgtgacccagccctgg

SEQ ID NO: 5718951 - DNA, 25 bp, Homo sapien
agtgggcctccagggcctccagcag

SEQ ID NO: 5718952 - DNA, 25 bp, Homo sapien
tgcagcttgtagtagaggccacagg

SEQ ID NO: 5718953 - DNA, 25 bp, Homo sapien
tggagttcggctatttcagagaggg

SEQ ID NO: 5718954 - DNA, 25 bp, Homo sapien
tgctgggcgccctccaggagagggg

SEQ ID NO: 5718955 - DNA, 25 bp, Homo sapien
gcaggctgggtgcccatagtagcta

SEQ ID NO: 5718956 - DNA, 25 bp, Homo sapien
tggtgggccgcagcggcagagaggg

SEQ ID NO: 5718957 - DNA, 25 bp, Homo sapien
cctcaaagccaagggagcgatctgg

SEQ ID NO: 5718958 - DNA, 25 bp, Homo sapien
cattcacagtaactgctggcaggct

SEQ ID NO: 5718959 - DNA, 25 bp, Homo sapien
ggtgctgcgcattcagcacggccgg

SEQ ID NO: 5718960 - DNA, 25 bp, Homo sapien
ccggtgccgtcccgccgccagagag

SEQ ID NO: 5718961 - DNA, 25 bp, Homo sapien
caggagagggggtgctgggccgagc

SEQ ID NO: 5718962 - DNA, 25 bp, Homo sapien
ccctggcaagtggacccgccaatcc

SEQ ID NO: 5718963 - DNA, 25 bp, Homo sapien
ctatttcagagagggaagccagagg

SEQ ID NO: 5718964 - DNA, 25 bp, Homo sapien
cttgtcctctcctcgggctgcacta

SEQ ID NO: 5718965 - DNA, 25 bp, Homo sapien
ggtgccgtcccgccgccagagaggg

SEQ ID NO: 5718966 - DNA, 25 bp, Homo sapien
gacgtccacctcgtctggaggcagc

SEQ ID NO: 5718967 - DNA, 25 bp, Homo sapien
gaagccagaggagaagagggtgcag

SEQ ID NO: 5718968 - DNA, 25 bp, Homo sapien
gcccccgtccagccagggcaaaccc

SEQ ID NO: 5718969 - DNA, 25 bp, Homo sapien
gcggggtggcggcgctcaccagcag

SEQ ID NO: 5718970 - DNA, 25 bp, Homo sapien
cacagttgacacactcccggccttc

SEQ ID NO: 5718971 - DNA, 25 bp, Homo sapien
agaggagaagagggtgcaggctgag

SEQ ID NO: 5718972 - DNA, 25 bp, Homo sapien
gcactttgacagctcctcgaagcac

SEQ ID NO: 5718973 - DNA, 25 bp, Homo sapien
ctgctgtagtcgtgggcagccgccg

SEQ ID NO: 5718974 - DNA, 25 bp, Homo sapien
cccacctgggcagcggtcaggtgcg

SEQ ID NO: 5718975 - DNA, 25 bp, Homo sapien
cctccggtcaggcgggcgtgcgcgg

SEQ ID NO: 5718976 - DNA, 25 bp, Homo sapien
ctcttctggcggccgacagtcttcg

SEQ ID NO: 5718977 - DNA, 25 bp, Homo sapien
gcggccgcatggtgttcagcggacc

SEQ ID NO: 5718978 - DNA, 25 bp, Homo sapien
taggggtgagggaggccactgagct

SEQ ID NO: 5718979 - DNA, 25 bp, Homo sapien
gacacagtcacagcagcttcggcct

SEQ ID NO: 5718980 - DNA, 25 bp, Homo sapien
tgtggccccacagttgacacactcc

SEQ ID NO: 5718981 - DNA, 25 bp, Homo sapien
gttagaaacaagagcaaaataaatt

SEQ ID NO: 5718982 - DNA, 25 bp, Homo sapien
ggcgtgcgcggggctgtaggagacg

SEQ ID NO: 5718983 - DNA, 25 bp, Homo sapien
ttcggcgccataaggtggtggttgt

SEQ ID NO: 5718984 - DNA, 25 bp, Homo sapien
ggctcttctggcggccgacagtctt

SEQ ID NO: 5718985 - DNA, 25 bp, Homo sapien
taaagttgtccttgttgttctccaa

SEQ ID NO: 5718986 - DNA, 25 bp, Homo sapien
aaaaggtgggagccagagtgggttg

SEQ ID NO: 5718987 - DNA, 25 bp, Homo sapien
aagagcaaaataaattatttttgcc

SEQ ID NO: 5718988 - DNA, 25 bp, Homo sapien
gccataaggtggtggttgtcgtctg

SEQ ID NO: 5718989 - DNA, 25 bp, Homo sapien
tcccgaggaagaaccggaggacttg

SEQ ID NO: 5718990 - DNA, 25 bp, Homo sapien
agggcagctgcactgaagggggatg

SEQ ID NO: 5718991 - DNA, 25 bp, Homo sapien
catagtaggggttgccctgcgagtc

SEQ ID NO: 5718992 - DNA, 25 bp, Homo sapien
gcggacggggcctggagtagagctg

SEQ ID NO: 5718993 - DNA, 25 bp, Homo sapien
caccaagtctccaagtccttgttag

SEQ ID NO: 5718994 - DNA, 25 bp, Homo sapien
gagacacttctttgggtggcgtggg

SEQ ID NO: 5718995 - DNA, 25 bp, Homo sapien
agggcgaggtgcgcggcaggcgggc

SEQ ID NO: 5718996 - DNA, 25 bp, Homo sapien
acactcccggccttctgaacaggaa

SEQ ID NO: 5718997 - DNA, 25 bp, Homo sapien
cacagcagcttcggcctcaaagcca

SEQ ID NO: 5718998 - DNA, 25 bp, Homo sapien
tcggccttcgggaaatgctgggctg

SEQ ID NO: 5718999 - DNA, 25 bp, Homo sapien
aagaaaatgttgtttccttcctgtg

SEQ ID NO: 5719000 - DNA, 25 bp, Homo sapien
taggggtgaagctggaggccggtcc

SEQ ID NO: 5719001 - DNA, 25 bp, Homo sapien
cccaggaagcctccggggtggaaga

SEQ ID NO: 5719002 - DNA, 25 bp, Homo sapien
cgggtgcgccatccagcgcggctgc

SEQ ID NO: 5719003 - DNA, 25 bp, Homo sapien
agccaagggagcgatctgggagacg

SEQ ID NO: 5719004 - DNA, 25 bp, Homo sapien
gcgcggcaggcgggctcgcgggacc

SEQ ID NO: 5719005 - DNA, 25 bp, Homo sapien
ggcaccagctcaccctccctgggcc

SEQ ID NO: 5719006 - DNA, 25 bp, Homo sapien
gaaccggaggacttgggacagctca

SEQ ID NO: 5719007 - DNA, 25 bp, Homo sapien
cctgctaggatggatgtggcggcag

SEQ ID NO: 5719008 - DNA, 25 bp, Homo sapien
cactctggctttggctcagcccagc

SEQ ID NO: 5719009 - DNA, 25 bp, Homo sapien
ttgtggtggtgggccgcagcggcag

SEQ ID NO: 5719010 - DNA, 25 bp, Homo sapien
aggcattgcacaggtagtggccggt

SEQ ID NO: 5719011 - DNA, 25 bp, Homo sapien
ttcagcggaccgcttttgtccgcct

SEQ ID NO: 5719012 - DNA, 25 bp, Homo sapien
cgtgggcagccgccggcacatagga

SEQ ID NO: 5719013 - DNA, 25 bp, Homo sapien
gtggatgggcgtcggagtgggcagg

SEQ ID NO: 5719014 - DNA, 25 bp, Homo sapien
cccattcatcttgtggtagaggcca

SEQ ID NO: 5719015 - DNA, 25 bp, Homo sapien
gatggatgtggcggcaggcaataga

SEQ ID NO: 5719016 - DNA, 25 bp, Homo sapien
gcgcgtgagcggggttggcatagta

SEQ ID NO: 5719017 - DNA, 25 bp, Homo sapien
cagctgaggggtgcagtggcgtctt

SEQ ID NO: 5719018 - DNA, 25 bp, Homo sapien
ttgcacaacaggtgccggctcttct

SEQ ID NO: 5719019 - DNA, 25 bp, Homo sapien
agggcaaacccgggctgtgcaacaa

SEQ ID NO: 5719020 - DNA, 25 bp, Homo sapien
tcagtaaggggacacagtcacagca

SEQ ID NO: 5719021 - DNA, 25 bp, Homo sapien
gatgaggctggagacgcagcccccg

SEQ ID NO: 5719022 - DNA, 25 bp, Homo sapien
tcggctatttcagagagggaagcca

SEQ ID NO: 5719023 - DNA, 25 bp, Homo sapien
ggccgacagtcttcgcttgggcttg

SEQ ID NO: 5719024 - DNA, 25 bp, Homo sapien
gccgtggccactctggctttggctc

SEQ ID NO: 5719025 - DNA, 25 bp, Homo sapien
ggttgctgtaggggtgagggaggcc

SEQ ID NO: 5719026 - DNA, 25 bp, Homo sapien
tcagtgacacctggtacttgacgcc

SEQ ID NO: 5719027 - DNA, 25 bp, Homo sapien
gggctggcaggagtggtgtcggcct

SEQ ID NO: 5719028 - DNA, 25 bp, Homo sapien
caggaagcctccggggtggaagagt

SEQ ID NO: 5719029 - DNA, 25 bp, Homo sapien
gccaatcccgaggaagaaccggagg

SEQ ID NO: 5719030 - DNA, 25 bp, Homo sapien
cgccacctccatggccggcggcggc

SEQ ID NO: 5719031 - DNA, 25 bp, Homo sapien
gggatggggtggtgtgtagcaggct

SEQ ID NO: 5719032 - DNA, 25 bp, Homo sapien
cactgaagggggatgacttctcctg

SEQ ID NO: 5719033 - DNA, 25 bp, Homo sapien
gtacacagagagtgggcctccaggg

SEQ ID NO: 5719034 - DNA, 25 bp, Homo sapien
cagctcagaccaccaagtctccaag

SEQ ID NO: 5719035 - DNA, 25 bp, Homo sapien
ccacaggcattgcacaggtagtggc

SEQ ID NO: 5719036 - DNA, 25 bp, Homo sapien
gtctctgccctccagggcctggccc

SEQ ID NO: 5719037 - DNA, 25 bp, Homo sapien
cgctcaccagcagagcctgggcggc

SEQ ID NO: 5719038 - DNA, 25 bp, Homo sapien
tgttgttctccaaacaactgtccat

SEQ ID NO: 5719039 - DNA, 25 bp, Homo sapien
gctgctccggcgccacctccatggc

SEQ ID NO: 5719040 - DNA, 25 bp, Homo sapien
tccgcctggtgggcgacggggccct

SEQ ID NO: 5719041 - DNA, 25 bp, Homo sapien
gacggcaacggcccgagcgaggcgc

SEQ ID NO: 5719042 - DNA, 25 bp, Homo sapien
atggccggcggcggcggctcagggt

SEQ ID NO: 5719043 - DNA, 25 bp, Homo sapien
ccgtgattgtctctgccctccaggg

SEQ ID NO: 5719044 - DNA, 25 bp, Homo sapien
cacccatcccgggagtgcccggtcc

SEQ ID NO: 5719045 - DNA, 25 bp, Homo sapien
gattgtctctgccctccagggcctg

SEQ ID NO: 5719046 - DNA, 25 bp, Homo sapien
aggctgtggcttgcgctcagtaagg

SEQ ID NO: 5719047 - DNA, 25 bp, Homo sapien
ggggcgacgctggcctcgctacctt

SEQ ID NO: 5719048 - DNA, 25 bp, Homo sapien
cgcgggttccatgtagttgtgcgcc

SEQ ID NO: 5719049 - DNA, 25 bp, Homo sapien
tcaaagcaggcaccagctcaccctc

SEQ ID NO: 5719050 - DNA, 25 bp, Homo sapien
gacaagacaggctgtggcttgcgct

SEQ ID NO: 5719051 - DNA, 25 bp, Homo sapien
gcctcgctaccttcctggcgctcac

SEQ ID NO: 5719052 - DNA, 25 bp, Homo sapien
tctggcggccgacagtcttcgcttg

SEQ ID NO: 5719053 - DNA, 25 bp, Homo sapien
ggtgctgggccgagccgggctggca

SEQ ID NO: 5719054 - DNA, 25 bp, Homo sapien
gtgagcggggttggcatagtagggg

SEQ ID NO: 5719055 - DNA, 25 bp, Homo sapien
caggtagtggccggtgccgtcccgc

SEQ ID NO: 5719056 - DNA, 25 bp, Homo sapien
aactgctggcaggctgctgggcgcc

SEQ ID NO: 5719057 - DNA, 25 bp, Homo sapien
ggtgccatgtgtccagccagggcag

SEQ ID NO: 5719058 - DNA, 25 bp, Homo sapien
cagtaactgctggcaggctgctggg

SEQ ID NO: 5719059 - DNA, 25 bp, Homo sapien
agccagaggagaagagggtgcaggc

SEQ ID NO: 5719060 - DNA, 25 bp, Homo sapien
tggcggcaggcaatagacagacttg

SEQ ID NO: 5719061 - DNA, 25 bp, Homo sapien
cgggaggtggcccacaggtgccatg

SEQ ID NO: 5719062 - DNA, 25 bp, Homo sapien
ttcacagtaactgctggcaggctgc

SEQ ID NO: 5719063 - DNA, 25 bp, Homo sapien
cacggccgggtgcgccatccagcgc

SEQ ID NO: 5719064 - DNA, 25 bp, Homo sapien
gtcgaggtgattgaagaagacgtcc

SEQ ID NO: 5719065 - DNA, 25 bp, Homo sapien
ctgggtacacagagagtgggcctcc

SEQ ID NO: 5719066 - DNA, 25 bp, Homo sapien
gttctgcccattcatcttgtggtag

SEQ ID NO: 5719067 - DNA, 25 bp, Homo sapien
cccgtcaaagcaggcaccagctcac

SEQ ID NO: 5719068 - DNA, 25 bp, Homo sapien
atctggcctccggtcaggcgggcgt

SEQ ID NO: 5719069 - DNA, 25 bp, Homo sapien
tggacttgttggacatcttccggtt

SEQ ID NO: 5719070 - DNA, 25 bp, Homo sapien
aaatctgcccccagagccctggcaa

SEQ ID NO: 5719071 - DNA, 25 bp, Homo sapien
gctcagggtctgggtgcagacggca

SEQ ID NO: 5719072 - DNA, 25 bp, Homo sapien
ctccaagtccttgttagaaacaaga

SEQ ID NO: 5719073 - DNA, 25 bp, Homo sapien
gcactaccccccgcggaagatgagg

SEQ ID NO: 5719074 - DNA, 25 bp, Homo sapien
cagagagggctgctttgcccccgtc

SEQ ID NO: 5719075 - DNA, 25 bp, Homo sapien
tggcctgttaacattgtgcagcttg

SEQ ID NO: 5719076 - DNA, 25 bp, Homo sapien
aggcgttgcagacagggtccccgtt

SEQ ID NO: 5719077 - DNA, 25 bp, Homo sapien
gctgctgggcgccctccaggagagg

SEQ ID NO: 5719078 - DNA, 25 bp, Homo sapien
ggccttctgaacaggaacgagcctt

SEQ ID NO: 5719079 - DNA, 25 bp, Homo sapien
gcgtgggtgggaagccgaaaaggtg

SEQ ID NO: 5719080 - DNA, 25 bp, Homo sapien
tggagaaggggctcacggtccaggg

SEQ ID NO: 5719081 - DNA, 25 bp, Homo sapien
ctggtacttgacgccgtccttgtcc

SEQ ID NO: 5719082 - DNA, 25 bp, Homo sapien
gtagtagaggccacaggcgttgcag

SEQ ID NO: 5719083 - DNA, 25 bp, Homo sapien
tgcccatagtagctaggcctgggcg

SEQ ID NO: 5719084 - DNA, 25 bp, Homo sapien
atgtagttgtgcgccaggcccgggt

SEQ ID NO: 5719085 - DNA, 25 bp, Homo sapien
gaggggtggctgtggccccacagtt

SEQ ID NO: 5719086 - DNA, 25 bp, Homo sapien
gcgcggtgggcggcgcccccgggcg

SEQ ID NO: 5719087 - DNA, 25 bp, Homo sapien
acgccgtccttgtcctctcctcggg

SEQ ID NO: 5719088 - DNA, 25 bp, Homo sapien
aagttgtccttgttgttctccaaac

SEQ ID NO: 5719089 - DNA, 25 bp, Homo sapien
acagctcctcgaagcactccgcccc

SEQ ID NO: 5719090 - DNA, 25 bp, Homo sapien
gctggcctcgctaccttcctggcgc

SEQ ID NO: 5719091 - DNA, 25 bp, Homo sapien
accaccaagtctccaagtccttgtt

SEQ ID NO: 5719092 - DNA, 25 bp, Homo sapien
agtggacccgccaatcccgaggaag

SEQ ID NO: 5719093 - DNA, 25 bp, Homo sapien
ggtgaagctggaggccggtcccccc

SEQ ID NO: 5719094 - DNA, 25 bp, Homo sapien
ccgacagtcttcgcttgggcttgat

SEQ ID NO: 5719095 - DNA, 25 bp, Homo sapien
caggcaccagctcaccctccctggg

SEQ ID NO: 5719096 - DNA, 25 bp, Homo sapien
gcgcaggggactgccactttccatc

SEQ ID NO: 5719097 - DNA, 25 bp, Homo sapien
tggcaggagtggtgtcggccttcgg

SEQ ID NO: 5719098 - DNA, 25 bp, Homo sapien
gcgcccgcgcgtgagcggggttggc

SEQ ID NO: 5719099 - DNA, 25 bp, Homo sapien
ctctcctcgggctgcactacccccc

SEQ ID NO: 5719100 - DNA, 25 bp, Homo sapien
ctgagctcccgctgcctcccccgct

SEQ ID NO: 5719101 - DNA, 25 bp, Homo sapien
ccaagtccttgttagaaacaagagc

SEQ ID NO: 5719102 - DNA, 25 bp, Homo sapien
tgtccgcctggtgggcgacggggcc

SEQ ID NO: 5719103 - DNA, 25 bp, Homo sapien
gttccctagcccatggcggtcacca

SEQ ID NO: 5719104 - DNA, 25 bp, Homo sapien
ctgggccgagccgggctggcaggag

SEQ ID NO: 5719105 - DNA, 25 bp, Homo sapien
cgcgggacctgggcgcggggtggcg

SEQ ID NO: 5719106 - DNA, 25 bp, Homo sapien
tagtagctaggcctgggcgcagggg

SEQ ID NO: 5719107 - DNA, 25 bp, Homo sapien
tgtatttacagggtccacctgacaa

SEQ ID NO: 5719108 - DNA, 25 bp, Homo sapien
aagcctccggggtggaagagtccgc

SEQ ID NO: 5719109 - DNA, 25 bp, Homo sapien
gttgtcgtctgacaatttgcacaac

SEQ ID NO: 5719110 - DNA, 25 bp, Homo sapien
ggggttgtggtggtgggccgcagcg

SEQ ID NO: 5719111 - DNA, 25 bp, Homo sapien
gcgctcagtaaggggacacagtcac

SEQ ID NO: 5719112 - DNA, 25 bp, Homo sapien
tcaggtgcggaggcagcctctcagc

SEQ ID NO: 5719113 - DNA, 25 bp, Homo sapien
tggttgtcgtctgacaatttgcaca

SEQ ID NO: 5719114 - DNA, 25 bp, Homo sapien
agacaggctgtggcttgcgctcagt

SEQ ID NO: 5719115 - DNA, 25 bp, Homo sapien
agtggcgtcttggagaaggggctca

SEQ ID NO: 5719116 - DNA, 25 bp, Homo sapien
gtcggagtgggcaggatgtgtccgg

SEQ ID NO: 5719117 - DNA, 25 bp, Homo sapien
gctgcactgaagggggatgacttct

SEQ ID NO: 5719118 - DNA, 25 bp, Homo sapien
ccagccagggcagctgcactgaagg

SEQ ID NO: 5719119 - DNA, 25 bp, Homo sapien
cagagagggaagccagaggagaaga

SEQ ID NO: 5719120 - DNA, 25 bp, Homo sapien
tggagacgcagcccccgtggtgcta

SEQ ID NO: 5719121 - DNA, 25 bp, Homo sapien
cggtcaccatgctggacgggtgggg

SEQ ID NO: 5719122 - DNA, 25 bp, Homo sapien
ctgacaagacaggctgtggcttgcg

SEQ ID NO: 5719123 - DNA, 25 bp, Homo sapien
aatggttgccttcgtctgtcccgtc

SEQ ID NO: 5719124 - DNA, 25 bp, Homo sapien
ttgtctcagagtaggaggcgagggg

SEQ ID NO: 5719125 - DNA, 25 bp, Homo sapien
gagtgcccggtcctcgacgtccatc

SEQ ID NO: 5719126 - DNA, 25 bp, Homo sapien
atgacttctcctgcatgcactttga

SEQ ID NO: 5719127 - DNA, 25 bp, Homo sapien
tgggcctccagggcctccagcagct

SEQ ID NO: 5719128 - DNA, 25 bp, Homo sapien
tggggtggtgtgtagcaggctgggt

SEQ ID NO: 5719129 - DNA, 25 bp, Homo sapien
agggggtgctgggccgagccgggct

SEQ ID NO: 5719130 - DNA, 25 bp, Homo sapien
ccctgggtacacagagagtgggcct

SEQ ID NO: 5719131 - DNA, 25 bp, Homo sapien
ggtagtggccggtgccgtcccgccg

SEQ ID NO: 5719132 - DNA, 25 bp, Homo sapien
ctccatggccggcggcggcggctca

SEQ ID NO: 5719133 - DNA, 25 bp, Homo sapien
ccggcggcggcggctcagggtctgg

SEQ ID NO: 5719134 - DNA, 25 bp, Homo sapien
agtcccggggcgacgctggcctcgc

SEQ ID NO: 5719135 - DNA, 25 bp, Homo sapien
ctcgacgtccatctgttccctagcc

SEQ ID NO: 5719136 - DNA, 25 bp, Homo sapien
gccttgctgcgctgcttaggggtga

SEQ ID NO: 5719137 - DNA, 25 bp, Homo sapien
gattgaagaagacgtccacctcgtc

SEQ ID NO: 5719138 - DNA, 25 bp, Homo sapien
ctgctttgcccccgtccagccaggg

SEQ ID NO: 5719139 - DNA, 25 bp, Homo sapien
cgggctgtgcaacaagtgtgggcgg

SEQ ID NO: 5719140 - DNA, 25 bp, Homo sapien
ccatgtagttgtgcgccaggcccgg

SEQ ID NO: 5719141 - DNA, 25 bp, Homo sapien
aaaatggttgccttcgtctgtcccg

SEQ ID NO: 5719142 - DNA, 25 bp, Homo sapien
gagcggggttggcatagtaggggtt

SEQ ID NO: 5719143 - DNA, 25 bp, Homo sapien
cgggttccatgtagttgtgcgccag

SEQ ID NO: 5719144 - DNA, 25 bp, Homo sapien
ggcaggcgggctcgcgggacctggg

SEQ ID NO: 5719145 - DNA, 25 bp, Homo sapien
gtgcagtggcgtcttggagaagggg

SEQ ID NO: 5719146 - DNA, 25 bp, Homo sapien
cggcacatctggcctccggtcaggc

SEQ ID NO: 5719147 - DNA, 25 bp, Homo sapien
cccacaggtgccatgtgtccagcca

SEQ ID NO: 5719148 - DNA, 25 bp, Homo sapien
cttgctgcgctgcttaggggtgaag

SEQ ID NO: 5719149 - DNA, 25 bp, Homo sapien
tttgacagctcctcgaagcactccg

SEQ ID NO: 5719150 - DNA, 25 bp, Homo sapien
ggttggcatagtaggggttgccctg

SEQ ID NO: 5719151 - DNA, 25 bp, Homo sapien
tagtggccggtgccgtcccgccgcc

SEQ ID NO: 5719152 - DNA, 25 bp, Homo sapien
ggcacgccgagcggccgcatggtgt

SEQ ID NO: 5719153 - DNA, 25 bp, Homo sapien
tgggtgcccatagtagctaggcctg

SEQ ID NO: 5719154 - DNA, 25 bp, Homo sapien
agcagagcctgggcggcacgccgag

SEQ ID NO: 5719155 - DNA, 25 bp, Homo sapien
gccctgctaggatggatgtggcggc

SEQ ID NO: 5719156 - DNA, 25 bp, Homo sapien
gttgcagacagggtccccgttggcg

SEQ ID NO: 5719157 - DNA, 25 bp, Homo sapien
ccagagccctggcaagtggacccgc

SEQ ID NO: 5719158 - DNA, 25 bp, Homo sapien
gtaactgctggcaggctgctgggcg

SEQ ID NO: 5719159 - DNA, 25 bp, Homo sapien
ggtggcggcgctcaccagcagagcc

SEQ ID NO: 5719160 - DNA, 25 bp, Homo sapien
tcaaagccaagggagcgatctggga

SEQ ID NO: 5719161 - DNA, 25 bp, Homo sapien
tgccggctcttctggcggccgacag

SEQ ID NO: 5719162 - DNA, 25 bp, Homo sapien
gtggtggttgtcgtctgacaatttg

SEQ ID NO: 5719163 - DNA, 25 bp, Homo sapien
gggccgcagcggcagagagggctgc

SEQ ID NO: 5719164 - DNA, 25 bp, Homo sapien
agtctggatcccttccttcttcatg

SEQ ID NO: 5719165 - DNA, 25 bp, Homo sapien
ttggcatagtaggggttgccctgcg

SEQ ID NO: 5719166 - DNA, 25 bp, Homo sapien
atgctgggctgctaagggtttggtc

SEQ ID NO: 5719167 - DNA, 25 bp, Homo sapien
caagtgtgggcggcacatctggcct

SEQ ID NO: 5719168 - DNA, 25 bp, Homo sapien
gtctggaggcagcagctgcgcgggt

SEQ ID NO: 5719169 - DNA, 25 bp, Homo sapien
tccagggcctccagcagctgagggg

SEQ ID NO: 5719170 - DNA, 25 bp, Homo sapien
ccgtggtgctagggtcaggagacac

SEQ ID NO: 5719171 - DNA, 25 bp, Homo sapien
cggcaacggcccgagcgaggcgcgg

SEQ ID NO: 5719172 - DNA, 25 bp, Homo sapien
ggcctccagggcctccagcagctga

SEQ ID NO: 5719173 - DNA, 25 bp, Homo sapien
atttgcacaacaggtgccggctctt

SEQ ID NO: 5719174 - DNA, 25 bp, Homo sapien
gctggaggccggtccccccaggaag

SEQ ID NO: 5719175 - DNA, 25 bp, Homo sapien
ttgggacagctcagaccaccaagtc

SEQ ID NO: 5719176 - DNA, 25 bp, Homo sapien
ggggtgagggaggccactgagctcc

SEQ ID NO: 5719177 - DNA, 25 bp, Homo sapien
acaggctgtggcttgcgctcagtaa

SEQ ID NO: 5719178 - DNA, 25 bp, Homo sapien
gaacgagccttgctgcgctgcttag

SEQ ID NO: 5719179 - DNA, 25 bp, Homo sapien
ggcgctcaccagcagagcctgggcg

SEQ ID NO: 5719180 - DNA, 25 bp, Homo sapien
tggaagagtccgctgctgtagtcgt

SEQ ID NO: 5719181 - DNA, 25 bp, Homo sapien
ccgtcccgccgccagagaggggtgg

SEQ ID NO: 5719182 - DNA, 25 bp, Homo sapien
cctggagtagagctgggagcagggc

SEQ ID NO: 5719183 - DNA, 25 bp, Homo sapien
gctgggtgcccatagtagctaggcc

SEQ ID NO: 5719184 - DNA, 25 bp, Homo sapien
taaggtggtggttgtcgtctgacaa

SEQ ID NO: 5719185 - DNA, 25 bp, Homo sapien
agagtgggttgctgtaggggtgagg

SEQ ID NO: 5719186 - DNA, 25 bp, Homo sapien
agtccgctgctgtagtcgtgggcag

SEQ ID NO: 5719187 - DNA, 25 bp, Homo sapien
gttctccaaacaactgtccatgcag

SEQ ID NO: 5719188 - DNA, 25 bp, Homo sapien
gccgaaaaggtgggagccagagtgg

SEQ ID NO: 5719189 - DNA, 25 bp, Homo sapien
gcccgagcgaggcgcggtgggcggc

SEQ ID NO: 5719190 - DNA, 25 bp, Homo sapien
aaagccaagggagcgatctgggaga

SEQ ID NO: 5719191 - DNA, 25 bp, Homo sapien
agggaggccactgagctcccgctgc

SEQ ID NO: 5719192 - DNA, 25 bp, Homo sapien
cttggacttgttggacatcttccgg

SEQ ID NO: 5719193 - DNA, 25 bp, Homo sapien
ggacatcttccggttccgagtctgg

SEQ ID NO: 5719194 - DNA, 25 bp, Homo sapien
gccactctggctttggctcagccca

SEQ ID NO: 5719195 - DNA, 25 bp, Homo sapien
ggccacaggcgttgcagacagggtc

SEQ ID NO: 5719196 - DNA, 25 bp, Homo sapien
tttgcctaatcctttttccttctaa

SEQ ID NO: 5719197 - DNA, 25 bp, Homo sapien
ctgcccccagagccctggcaagtgg

SEQ ID NO: 5719198 - DNA, 25 bp, Homo sapien
tgggcggcacatctggcctccggtc

SEQ ID NO: 5719199 - DNA, 25 bp, Homo sapien
ttgttagaaacaagagcaaaataaa

SEQ ID NO: 5719200 - DNA, 25 bp, Homo sapien
acctgacaagacaggctgtggcttg

SEQ ID NO: 5719201 - DNA, 25 bp, Homo sapien
cgcttttgtccgcctggtgggcgac

SEQ ID NO: 5719202 - DNA, 25 bp, Homo sapien
tgtgcagcttgtagtagaggccaca

SEQ ID NO: 5719203 - DNA, 25 bp, Homo sapien
cccagccctggcctgggaatctgtg

SEQ ID NO: 5719204 - DNA, 25 bp, Homo sapien
gttgccttcgtctgtcccgtcccct

SEQ ID NO: 5719205 - DNA, 25 bp, Homo sapien
cgtccacctcgtctggaggcagcag

SEQ ID NO: 5719206 - DNA, 25 bp, Homo sapien
gctgtggcttgcgctcagtaagggg

SEQ ID NO: 5719207 - DNA, 25 bp, Homo sapien
aacaagtgtgggcggcacatctggc

SEQ ID NO: 5719208 - DNA, 25 bp, Homo sapien
tacttgacgccgtccttgtcctctc

SEQ ID NO: 5719209 - DNA, 25 bp, Homo sapien
tggccgaaggagaggctggaggagg

SEQ ID NO: 5719210 - DNA, 25 bp, Homo sapien
ctgtgcaacaagtgtgggcggcaca

SEQ ID NO: 5719211 - DNA, 25 bp, Homo sapien
agccagggcagctgcactgaagggg

SEQ ID NO: 5719212 - DNA, 25 bp, Homo sapien
aggtgcggaggcagcctctcagcgg

SEQ ID NO: 5719213 - DNA, 25 bp, Homo sapien
acacagagagtgggcctccagggcc

SEQ ID NO: 5719214 - DNA, 25 bp, Homo sapien
ttccatcttcatgctctccgtcagt

SEQ ID NO: 5719215 - DNA, 25 bp, Homo sapien
gggcgcaggggactgccactttcca

SEQ ID NO: 5719216 - DNA, 25 bp, Homo sapien
acacactcccggccttctgaacagg

SEQ ID NO: 5719217 - DNA, 25 bp, Homo sapien
acaacaggtgccggctcttctggcg

SEQ ID NO: 5719218 - DNA, 25 bp, Homo sapien
gtggtgtcggccttcgggaaatgct

SEQ ID NO: 5719219 - DNA, 25 bp, Homo sapien
tgtcgtctgacaatttgcacaacag

SEQ ID NO: 5719220 - DNA, 25 bp, Homo sapien
ggcagcggtcaggtgcggaggcagc

SEQ ID NO: 5719221 - DNA, 25 bp, Homo sapien
ttccttcttcatggtcagtggcctg

SEQ ID NO: 5719222 - DNA, 25 bp, Homo sapien
cggctgctccggcgccacctccatg

SEQ ID NO: 5719223 - DNA, 25 bp, Homo sapien
tgggagacgtttcccctttcaagaa

SEQ ID NO: 5719224 - DNA, 25 bp, Homo sapien
aggatgtgtccggagtggctgaagg

SEQ ID NO: 5719225 - DNA, 25 bp, Homo sapien
gttccgagtctggatcccttccttc

SEQ ID NO: 5719226 - DNA, 25 bp, Homo sapien
aaatgttgtttccttcctgtgaccc

SEQ ID NO: 5719227 - DNA, 25 bp, Homo sapien
caatcccgaggaagaaccggaggac

SEQ ID NO: 5719228 - DNA, 25 bp, Homo sapien
gcgtgagcggggttggcatagtagg

SEQ ID NO: 5719229 - DNA, 25 bp, Homo sapien
gcaggctgctgggcgccctccagga

SEQ ID NO: 5719230 - DNA, 25 bp, Homo sapien
agggtgcaggctgaggtccccacaa

SEQ ID NO: 5719231 - DNA, 25 bp, Homo sapien
ttgttctccaaacaactgtccatgc

SEQ ID NO: 5719232 - DNA, 25 bp, Homo sapien
cgcagcggcagagagggctgctttg

SEQ ID NO: 5719233 - DNA, 25 bp, Homo sapien
tccttgttgttctccaaacaactgt

SEQ ID NO: 5719234 - DNA, 25 bp, Homo sapien
cgggctgcactaccccccgcggaag

SEQ ID NO: 5719235 - DNA, 25 bp, Homo sapien
tggacccgccaatcccgaggaagaa

SEQ ID NO: 5719236 - DNA, 25 bp, Homo sapien
ccgccaatcccgaggaagaaccgga

SEQ ID NO: 5719237 - DNA, 25 bp, Homo sapien
ggcgggctcgcgggacctgggcgcg

SEQ ID NO: 5719238 - DNA, 25 bp, Homo sapien
cttctcctgcatgcactttgacagc

SEQ ID NO: 5719239 - DNA, 25 bp, Homo sapien
aggcctgggcgcaggggactgccac

SEQ ID NO: 5719240 - DNA, 25 bp, Homo sapien
atttcagagagggaagccagaggag

SEQ ID NO: 5719241 - DNA, 25 bp, Homo sapien
aagtccttgttagaaacaagagcaa

SEQ ID NO: 5719242 - DNA, 25 bp, Homo sapien
gccgtccttgtcctctcctcgggct

SEQ ID NO: 5719243 - DNA, 25 bp, Homo sapien
gcggaagatgaggctggagacgcag

SEQ ID NO: 5719244 - DNA, 25 bp, Homo sapien
tcagtggcctgttaacattgtgcag

SEQ ID NO: 5719245 - DNA, 25 bp, Homo sapien
aggtggcccacaggtgccatgtgtc

SEQ ID NO: 5719246 - DNA, 25 bp, Homo sapien
ccttcttcatggtcagtggcctgtt

SEQ ID NO: 5719247 - DNA, 25 bp, Homo sapien
tgccatgtgtccagccagggcagct

SEQ ID NO: 5719248 - DNA, 25 bp, Homo sapien
cctcgtctggaggcagcagctgcgc

SEQ ID NO: 5719249 - DNA, 25 bp, Homo sapien
ctgggccgtggccactctggctttg

SEQ ID NO: 5719250 - DNA, 25 bp, Homo sapien
tggccccacagttgacacactcccg

SEQ ID NO: 5719251 - DNA, 25 bp, Homo sapien
aggggtgcagtggcgtcttggagaa

SEQ ID NO: 5719252 - DNA, 25 bp, Homo sapien
gacgcagcccccgtggtgctagggt

SEQ ID NO: 5719253 - DNA, 25 bp, Homo sapien
atcttcatgctctccgtcagtgaca

SEQ ID NO: 5719254 - DNA, 25 bp, Homo sapien
gctcagaccaccaagtctccaagtc

SEQ ID NO: 5719255 - DNA, 25 bp, Homo sapien
tgaggctggagacgcagcccccgtg

SEQ ID NO: 5719256 - DNA, 25 bp, Homo sapien
aaaggatgtatttacagggtccacc

SEQ ID NO: 5719257 - DNA, 25 bp, Homo sapien
gtttcggcgccataaggtggtggtt

SEQ ID NO: 5719258 - DNA, 25 bp, Homo sapien
ggctatttcagagagggaagccaga

SEQ ID NO: 5719259 - DNA, 25 bp, Homo sapien
tccaggggttgtggtggtgggccgc

SEQ ID NO: 5719260 - DNA, 25 bp, Homo sapien
caactgtccatgcaggaaaccccac

SEQ ID NO: 5719261 - DNA, 25 bp, Homo sapien
cctagcccatggcggtcaccatgct

SEQ ID NO: 5719262 - DNA, 25 bp, Homo sapien
gtggtgctagggtcaggagacactt

SEQ ID NO: 5719263 - DNA, 25 bp, Homo sapien
gaggaggggtggatgggcgtcggag

SEQ ID NO: 5719264 - DNA, 25 bp, Homo sapien
agagggggtgctgggccgagccggg

SEQ ID NO: 5719265 - DNA, 25 bp, Homo sapien
ctgaagggggatgacttctcctgca

SEQ ID NO: 5719266 - DNA, 25 bp, Homo sapien
cttccggttccgagtctggatccct

SEQ ID NO: 5719267 - DNA, 25 bp, Homo sapien
attcagcacggccgggtgcgccatc

SEQ ID NO: 5719268 - DNA, 25 bp, Homo sapien
gtgcaggaccgcccgtgattgtctc

SEQ ID NO: 5719269 - DNA, 25 bp, Homo sapien
tccttgtcctctcctcgggctgcac

SEQ ID NO: 5719270 - DNA, 25 bp, Homo sapien
gctgcttaggggtgaagctggaggc

SEQ ID NO: 5719271 - DNA, 25 bp, Homo sapien
ctgggagcagggcgaggtgcgcggc

SEQ ID NO: 5719272 - DNA, 25 bp, Homo sapien
cctccagggcctggcccgtcaaagc

SEQ ID NO: 5719273 - DNA, 25 bp, Homo sapien
ctggcctccggtcaggcgggcgtgc

SEQ ID NO: 5719274 - DNA, 25 bp, Homo sapien
gccctccaggagagggggtgctggg

SEQ ID NO: 5719275 - DNA, 25 bp, Homo sapien
tcagcacggccgggtgcgccatcca

SEQ ID NO: 5719276 - DNA, 25 bp, Homo sapien
tccttctaaaaatggttgccttcgt

SEQ ID NO: 5719277 - DNA, 25 bp, Homo sapien
ttccatgtagttgtgcgccaggccc

SEQ ID NO: 5719278 - DNA, 25 bp, Homo sapien
tgtccttgttgttctccaaacaact

SEQ ID NO: 5719279 - DNA, 25 bp, Homo sapien
ggtccacccatcccgggagtgcccg

SEQ ID NO: 5719280 - DNA, 25 bp, Homo sapien
aggagtggtgtcggccttcgggaaa

SEQ ID NO: 5719281 - DNA, 25 bp, Homo sapien
ttcttggacttgttggacatcttcc

SEQ ID NO: 5719282 - DNA, 25 bp, Homo sapien
gtgattgtctctgccctccagggcc

SEQ ID NO: 5719283 - DNA, 25 bp, Homo sapien
ctcagcccagcctggagttcggcta

SEQ ID NO: 5719284 - DNA, 25 bp, Homo sapien
tggcaggctgctgggcgccctccag

SEQ ID NO: 5719285 - DNA, 25 bp, Homo sapien
cattcatcttgtggtagaggccaca

SEQ ID NO: 5719286 - DNA, 25 bp, Homo sapien
tggcgtgggtgggaagccgaaaagg

SEQ ID NO: 5719287 - DNA, 25 bp, Homo sapien
tggaggccggtccccccaggaagcc

SEQ ID NO: 5719288 - DNA, 25 bp, Homo sapien
gagagggaagccagaggagaagagg

SEQ ID NO: 5719289 - DNA, 25 bp, Homo sapien
tttacagggtccacctgacaagaca

SEQ ID NO: 5719290 - DNA, 25 bp, Homo sapien
gggctgtaggagacgcgcgcccgcg

SEQ ID NO: 5719291 - DNA, 25 bp, Homo sapien
gcccagcctggagttcggctatttc

SEQ ID NO: 5719292 - DNA, 25 bp, Homo sapien
ggtgggagccagagtgggttgctgt

SEQ ID NO: 5719293 - DNA, 25 bp, Homo sapien
ctgaacaggaacgagccttgctgcg

SEQ ID NO: 5719294 - DNA, 25 bp, Homo sapien
tccacctcgtctggaggcagcagct

SEQ ID NO: 5719295 - DNA, 25 bp, Homo sapien
gcgccctccaggagagggggtgctg

SEQ ID NO: 5719296 - DNA, 25 bp, Homo sapien
agagggtgcaggctgaggtccccac

SEQ ID NO: 5719297 - DNA, 25 bp, Homo sapien
aaagcaggcaccagctcaccctccc

SEQ ID NO: 5719298 - DNA, 25 bp, Homo sapien
gaggccacaggcgttgcagacaggg

SEQ ID NO: 5719299 - DNA, 25 bp, Homo sapien
caatttgcacaacaggtgccggctc

SEQ ID NO: 5719300 - DNA, 25 bp, Homo sapien
ggatgacttctcctgcatgcacttt

SEQ ID NO: 5719301 - DNA, 25 bp, Homo sapien
atctgcccccagagccctggcaagt

SEQ ID NO: 5719302 - DNA, 25 bp, Homo sapien
aggagacacttctttgggtggcgtg

SEQ ID NO: 5719303 - DNA, 25 bp, Homo sapien
caaacccgggctgtgcaacaagtgt

SEQ ID NO: 5719304 - DNA, 25 bp, Homo sapien
ggcctccggtcaggcgggcgtgcgc

SEQ ID NO: 5719305 - DNA, 25 bp, Homo sapien
cataaggtggtggttgtcgtctgac

SEQ ID NO: 5719306 - DNA, 25 bp, Homo sapien
agcagctgcgcgggttccatgtagt

SEQ ID NO: 5719307 - DNA, 25 bp, Homo sapien
ggcagctgcactgaagggggatgac

SEQ ID NO: 5719308 - DNA, 25 bp, Homo sapien
gagagggctgctttgcccccgtcca

SEQ ID NO: 5719309 - DNA, 25 bp, Homo sapien
tctacataaagttgtccttgttgtt

SEQ ID NO: 5719310 - DNA, 25 bp, Homo sapien
ggcgggcgtgcgcggggctgtagga

SEQ ID NO: 5719311 - DNA, 25 bp, Homo sapien
gacttctcctgcatgcactttgaca

SEQ ID NO: 5719312 - DNA, 25 bp, Homo sapien
agtggcctgttaacattgtgcagct

SEQ ID NO: 5719313 - DNA, 25 bp, Homo sapien
agctcctcgaagcactccgcccctt

SEQ ID NO: 5719314 - DNA, 25 bp, Homo sapien
gcgccataaggtggtggttgtcgtc

SEQ ID NO: 5719315 - DNA, 25 bp, Homo sapien
tcgaagcactccgcccctttcttgc

SEQ ID NO: 5719316 - DNA, 25 bp, Homo sapien
gcgaggcgcggtgggcggcgccccc

SEQ ID NO: 5719317 - DNA, 25 bp, Homo sapien
gaagggcgggaggtggcccacaggt

SEQ ID NO: 5719318 - DNA, 25 bp, Homo sapien
cggggccctgctaggatggatgtgg

SEQ ID NO: 5719319 - DNA, 25 bp, Homo sapien
cgaggtgattgaagaagacgtccac

SEQ ID NO: 5719320 - DNA, 25 bp, Homo sapien
tccggagtggctgaagggcgggagg

SEQ ID NO: 5719321 - DNA, 25 bp, Homo sapien
actttgacagctcctcgaagcactc

SEQ ID NO: 5719322 - DNA, 25 bp, Homo sapien
ttgctcttcttggacttgttggaca

SEQ ID NO: 5719323 - DNA, 25 bp, Homo sapien
ggggcctcctcgcggagccgcagcc

SEQ ID NO: 5719324 - DNA, 25 bp, Homo sapien
ggctgcggctccgcgaggaggcccc

SEQ ID NO: 5719325 - DNA, 25 bp, Homo sapien
gacgtatcttggtgaatccgacaac

SEQ ID NO: 5719326 - DNA, 25 bp, Homo sapien
gttgtcggattcaccaagatacgtc

SEQ ID NO: 5719327 - DNA, 25 bp, Homo sapien
gacttccgagggactggtctccctc

SEQ ID NO: 5719328 - DNA, 25 bp, Homo sapien
gagggagaccagtccctcggaagtc

SEQ ID NO: 5719329 - DNA, 25 bp, Homo sapien
ggaataaacatcaagacaccattat

SEQ ID NO: 5719330 - DNA, 25 bp, Homo sapien
ataatggtgtcttgatgtttattcc

SEQ ID NO: 5719331 - DNA, 25 bp, Homo sapien
gggtcacgacactagtgctaacata

SEQ ID NO: 5719332 - DNA, 25 bp, Homo sapien
tatgttagcactagtgtcgtgaccc

SEQ ID NO: 5719333 - DNA, 25 bp, Homo sapien
catttcgaaacctgaatagaagtat

SEQ ID NO: 5719334 - DNA, 25 bp, Homo sapien
atacttctattcaggtttcgaaatg

SEQ ID NO: 5719335 - DNA, 25 bp, Homo sapien
aggaacggtcactggcacatttttc

SEQ ID NO: 5719336 - DNA, 25 bp, Homo sapien
gaaaaatgtgccagtgaccgttcct

SEQ ID NO: 5719337 - DNA, 25 bp, Homo sapien
atgggcaaacctctatctgtgtttc

SEQ ID NO: 5719338 - DNA, 25 bp, Homo sapien
gaaacacagatagaggtttgcccat

SEQ ID NO: 5719339 - DNA, 25 bp, Homo sapien
gtcctcttggcgacacagtcgtcag

SEQ ID NO: 5719340 - DNA, 25 bp, Homo sapien
ctgacgactgtgtcgccaagaggac

SEQ ID NO: 5719341 - DNA, 25 bp, Homo sapien
gaggtccacctaggctataacttat

SEQ ID NO: 5719342 - DNA, 25 bp, Homo sapien
ataagttatagcctaggtggacctc

SEQ ID NO: 5719343 - DNA, 25 bp, Homo sapien
cgtaaatctttaaatcgaggattaa

SEQ ID NO: 5719344 - DNA, 25 bp, Homo sapien
ttaatcctcgatttaaagatttacg

SEQ ID NO: 5719345 - DNA, 25 bp, Homo sapien
tttgaattctttggataccgtttgt

SEQ ID NO: 5719346 - DNA, 25 bp, Homo sapien
acaaacggtatccaaagaattcaaa

SEQ ID NO: 5719347 - DNA, 25 bp, Homo sapien
tccttcgtcgcggaaccaccacctt

SEQ ID NO: 5719348 - DNA, 25 bp, Homo sapien
aaggtggtggttccgcgacgaagga

SEQ ID NO: 5719349 - DNA, 25 bp, Homo sapien
aacggttatttgcagacttatttag

SEQ ID NO: 5719350 - DNA, 25 bp, Homo sapien
ctaaataagtctgcaaataaccgtt

SEQ ID NO: 5719351 - DNA, 25 bp, Homo sapien
cgaaaattatagaccaagaaccagt

SEQ ID NO: 5719352 - DNA, 25 bp, Homo sapien
actggttcttggtctataattttcg

SEQ ID NO: 5719353 - DNA, 25 bp, Homo sapien
ttttacacactcctaatcatatttg

SEQ ID NO: 5719354 - DNA, 25 bp, Homo sapien
caaatatgattaggagtgtgtaaaa

SEQ ID NO: 5719355 - DNA, 25 bp, Homo sapien
cttttacacactcctaatcatattt

SEQ ID NO: 5719356 - DNA, 25 bp, Homo sapien
aaatatgattaggagtgtgtaaaag

SEQ ID NO: 5719357 - DNA, 25 bp, Homo sapien
tcgcgcggggcggtgggacgtcgac

SEQ ID NO: 5719358 - DNA, 25 bp, Homo sapien
gtcgacgtcccaccgccccgcgcga

SEQ ID NO: 5719359 - DNA, 25 bp, Homo sapien
atacagcaatagaaacagttataat

SEQ ID NO: 5719360 - DNA, 25 bp, Homo sapien
attataactgtttctattgctgtat

SEQ ID NO: 5719361 - DNA, 25 bp, Homo sapien
tgaactacgtggctacctgcgtcct

SEQ ID NO: 5719362 - DNA, 25 bp, Homo sapien
aggacgcaggtagccacgtagttca

SEQ ID NO: 5719363 - DNA, 25 bp, Homo sapien
aacggcattctgtcacttcttaatt

SEQ ID NO: 5719364 - DNA, 25 bp, Homo sapien
aattaagaagtgacagaatgccgtt

SEQ ID NO: 5719365 - DNA, 25 bp, Homo sapien
tccccgatcccacaccgactccata

SEQ ID NO: 5719366 - DNA, 25 bp, Homo sapien
tatggagtcggtgtgggatcgggga

SEQ ID NO: 5719367 - DNA, 25 bp, Homo sapien
tcgagggggtacagccaagacacct

SEQ ID NO: 5719368 - DNA, 25 bp, Homo sapien
aggtgtcttggctgtaccccctcga

SEQ ID NO: 5719369 - DNA, 25 bp, Homo sapien
tccggtgatctacaacgaagctcct

SEQ ID NO: 5719370 - DNA, 25 bp, Homo sapien
aggagcttcgttgtagatcaccgga

SEQ ID NO: 5719371 - DNA, 25 bp, Homo sapien
cctatgtacaggtctagaaacctat

SEQ ID NO: 5719372 - DNA, 25 bp, Homo sapien
ataggtttctagacctgtacatagg

SEQ ID NO: 5719373 - DNA, 25 bp, Homo sapien
gagccctctcgcctcggtgccggca

SEQ ID NO: 5719374 - DNA, 25 bp, Homo sapien
tgccggcaccgaggcgagagggctc

SEQ ID NO: 5719375 - DNA, 25 bp, Homo sapien
acattagcgtgaataagttggttac

SEQ ID NO: 5719376 - DNA, 25 bp, Homo sapien
gtaaccaacttattcacgctaatgt

SEQ ID NO: 5719377 - DNA, 25 bp, Homo sapien
ggggctcgcgcgggctgcgcacccg

SEQ ID NO: 5719378 - DNA, 25 bp, Homo sapien
cgggtgcgcagcccgcgcgagcccc

SEQ ID NO: 5719379 - DNA, 25 bp, Homo sapien
gggggctcgcgcgggctgcgcaccc

SEQ ID NO: 5719380 - DNA, 25 bp, Homo sapien
gggtgcgcagcccgcgcgagccccc

SEQ ID NO: 5719381 - DNA, 25 bp, Homo sapien
aatgttaggtcacaagggtatgtat

SEQ ID NO: 5719382 - DNA, 25 bp, Homo sapien
atacatacccttgtgacctaacatt

SEQ ID NO: 5719383 - DNA, 25 bp, Homo sapien
aggcggaaaggagaaatgtataaat

SEQ ID NO: 5719384 - DNA, 25 bp, Homo sapien
atttatacatttctcctttccgcct

SEQ ID NO: 5719385 - DNA, 25 bp, Homo sapien
ctctatttgggaggcgcccgctcag

SEQ ID NO: 5719386 - DNA, 25 bp, Homo sapien
ctgagcgggcgcctcccaaatagag

SEQ ID NO: 5719387 - DNA, 25 bp, Homo sapien
agtgtatattaggtataggatttct

SEQ ID NO: 5719388 - DNA, 25 bp, Homo sapien
agaaatcctatacctaatatacact

SEQ ID NO: 5719389 - DNA, 25 bp, Homo sapien
accacgtcttccctggcatgtctag

SEQ ID NO: 5719390 - DNA, 25 bp, Homo sapien
ctagacatgccagggaagacgtggt

SEQ ID NO: 5719391 - DNA, 25 bp, Homo sapien
atcaatttaagttgtaactttacat

SEQ ID NO: 5719392 - DNA, 25 bp, Homo sapien
atgtaaagttacaacttaaattgat

SEQ ID NO: 5719393 - DNA, 25 bp, Homo sapien
ttttctatcaatttaagttgtaact

SEQ ID NO: 5719394 - DNA, 25 bp, Homo sapien
agttacaacttaaattgatagaaaa

SEQ ID NO: 5719395 - DNA, 25 bp, Homo sapien
attttctatcaatttaagttgtaac

SEQ ID NO: 5719396 - DNA, 25 bp, Homo sapien
gttacaacttaaattgatagaaaat

SEQ ID NO: 5719397 - DNA, 25 bp, Homo sapien
gaattttctatcaatttaagttgta

SEQ ID NO: 5719398 - DNA, 25 bp, Homo sapien
tacaacttaaattgatagaaaattc

SEQ ID NO: 5719399 - DNA, 25 bp, Homo sapien
gaaacctggtattcaaagagtttta

SEQ ID NO: 5719400 - DNA, 25 bp, Homo sapien
taaaactctttgaataccaggtttc

SEQ ID NO: 5719401 - DNA, 25 bp, Homo sapien
gggggcggacgagggtacaggtcac

SEQ ID NO: 5719402 - DNA, 25 bp, Homo sapien
gtgacctgtaccctcgtccgccccc

SEQ ID NO: 5719403 - DNA, 25 bp, Homo sapien
ttactaaaacgttattatctcattt

SEQ ID NO: 5719404 - DNA, 25 bp, Homo sapien
aaatgagataataacgttttagtaa

SEQ ID NO: 5719405 - DNA, 25 bp, Homo sapien
cggcgggtctccagacccggcccgc

SEQ ID NO: 5719406 - DNA, 25 bp, Homo sapien
gcgggccgggtctggagacccgccg

SEQ ID NO: 5719407 - DNA, 25 bp, Homo sapien
ctcactgacttgattactttcttat

SEQ ID NO: 5719408 - DNA, 25 bp, Homo sapien
ataagaaagtaatcaagtcagtgag

SEQ ID NO: 5719409 - DNA, 25 bp, Homo sapien
gtggcaccggggatacgcccaccga

SEQ ID NO: 5719410 - DNA, 25 bp, Homo sapien
tcggtgggcgtatccccggtgccac

SEQ ID NO: 5719411 - DNA, 25 bp, Homo sapien
gattaatagtactaattcatcttcg

SEQ ID NO: 5719412 - DNA, 25 bp, Homo sapien
cgaagatgaattagtactattaatc

SEQ ID NO: 5719413 - DNA, 25 bp, Homo sapien
agtgtccaggtcctggtccaaaaac

SEQ ID NO: 5719414 - DNA, 25 bp, Homo sapien
gtttttggaccaggacctggacact

SEQ ID NO: 5719415 - DNA, 25 bp, Homo sapien
taaaactaatccgaggaagacctgc

SEQ ID NO: 5719416 - DNA, 25 bp, Homo sapien
gcaggtcttcctcggattagtttta

SEQ ID NO: 5719417 - DNA, 25 bp, Homo sapien
gtgacccagttactttgtcaaaaat

SEQ ID NO: 5719418 - DNA, 25 bp, Homo sapien
atttttgacaaagtaactgggtcac

SEQ ID NO: 5719419 - DNA, 25 bp, Homo sapien
tggctcaaatcaccacataaaaggt

SEQ ID NO: 5719420 - DNA, 25 bp, Homo sapien
accttttatgtggtgatttgagcca

SEQ ID NO: 5719421 - DNA, 25 bp, Homo sapien
cttcgttttgcgagacagggtcttt

SEQ ID NO: 5719422 - DNA, 25 bp, Homo sapien
aaagaccctgtctcgcaaaacgaag

SEQ ID NO: 5719423 - DNA, 25 bp, Homo sapien
cgtgacgtcgctcgcgtcttcgcga

SEQ ID NO: 5719424 - DNA, 25 bp, Homo sapien
tcgcgaagacgcgagcgacgtcacg

SEQ ID NO: 5719425 - DNA, 25 bp, Homo sapien
gggtaggcacagacgaggacctcaa

SEQ ID NO: 5719426 - DNA, 25 bp, Homo sapien
ttgaggtcctcgtctgtgcctaccc

SEQ ID NO: 5719427 - DNA, 25 bp, Homo sapien
aaaaacaggttcaacagtagaaaga

SEQ ID NO: 5719428 - DNA, 25 bp, Homo sapien
tctttctactgttgaacctgttttt

SEQ ID NO: 5719429 - DNA, 25 bp, Homo sapien
tatatgtagttcatttacccggact

SEQ ID NO: 5719430 - DNA, 25 bp, Homo sapien
agtccgggtaaatgaactacatata

SEQ ID NO: 5719431 - DNA, 25 bp, Homo sapien
ccgtcgtgagtattcgaagaggtaa

SEQ ID NO: 5719432 - DNA, 25 bp, Homo sapien
ttacctcttcgaatactcacgacgg

SEQ ID NO: 5719433 - DNA, 25 bp, Homo sapien
agaaagaacagttgtcaaaattatt

SEQ ID NO: 5719434 - DNA, 25 bp, Homo sapien
aataattttgacaactgttctttct

SEQ ID NO: 5719435 - DNA, 25 bp, Homo sapien
ctgtgtagttcatggcgtccgtgac

SEQ ID NO: 5719436 - DNA, 25 bp, Homo sapien
gtcacggacgccatgaactacacag

SEQ ID NO: 5719437 - DNA, 25 bp, Homo sapien
gcggtgcgaggtcctgtccccttcg

SEQ ID NO: 5719438 - DNA, 25 bp, Homo sapien
cgaaggggacaggacctcgcaccgc

SEQ ID NO: 5719439 - DNA, 25 bp, Homo sapien
ggcggccgcggaggcagtcccctgt

SEQ ID NO: 5719440 - DNA, 25 bp, Homo sapien
acaggggactgcctccgcggccgcc

SEQ ID NO: 5719441 - DNA, 25 bp, Homo sapien
gggcggccgcggaggcagtcccctg

SEQ ID NO: 5719442 - DNA, 25 bp, Homo sapien
caggggactgcctccgcggccgccc

SEQ ID NO: 5719443 - DNA, 25 bp, Homo sapien
gagggcggccgcggaggcagtcccc

SEQ ID NO: 5719444 - DNA, 25 bp, Homo sapien
ggggactgcctccgcggccgccctc

SEQ ID NO: 5719445 - DNA, 25 bp, Homo sapien
ccgggacccgtcgcgccgtctcctc

SEQ ID NO: 5719446 - DNA, 25 bp, Homo sapien
gaggagacggcgcgacgggtcccgg

SEQ ID NO: 5719447 - DNA, 25 bp, Homo sapien
cacccgcgtcgcggcccgtcccagg

SEQ ID NO: 5719448 - DNA, 25 bp, Homo sapien
cctgggacgggccgcgacgcgggtg

SEQ ID NO: 5719449 - DNA, 25 bp, Homo sapien
agcgccacccgcgtcgcggcccgtc

SEQ ID NO: 5719450 - DNA, 25 bp, Homo sapien
gacgggccgcgacgcgggtggcgct

SEQ ID NO: 5719451 - DNA, 25 bp, Homo sapien
gaccgggtgagcgagttccgggtgg

SEQ ID NO: 5719452 - DNA, 25 bp, Homo sapien
ccacccggaactcgctcacccggtc

SEQ ID NO: 5719453 - DNA, 25 bp, Homo sapien
cgtcgtagacctcgcgcaggacgtc

SEQ ID NO: 5719454 - DNA, 25 bp, Homo sapien
gacgtcctgcgcgaggtctacgacg

SEQ ID NO: 5719455 - DNA, 25 bp, Homo sapien
gcgggaggccccggactacgaggag

SEQ ID NO: 5719456 - DNA, 25 bp, Homo sapien
ctcctcgtagtccggggcctcccgc

SEQ ID NO: 5719457 - DNA, 25 bp, Homo sapien
gggtcgaaggacacgagggccaggt

SEQ ID NO: 5719458 - DNA, 25 bp, Homo sapien
acctggccctcgtgtccttcgaccc

SEQ ID NO: 5719459 - DNA, 25 bp, Homo sapien
cgtctacaacgatgcttccagtcgg

SEQ ID NO: 5719460 - DNA, 25 bp, Homo sapien
ccgactggaagcatcgttgtagacg

SEQ ID NO: 5719461 - DNA, 25 bp, Homo sapien
ttcagtttggtctgggccttctcac

SEQ ID NO: 5719462 - DNA, 25 bp, Homo sapien
gtgagaaggcccagaccaaactgaa

SEQ ID NO: 5719463 - DNA, 25 bp, Homo sapien
cacttccaacagtccagtgacaaac

SEQ ID NO: 5719464 - DNA, 25 bp, Homo sapien
gtttgtcactggactgttggaagtg

SEQ ID NO: 5719465 - DNA, 25 bp, Homo sapien
gaacggtgggaacgtgctccaacac

SEQ ID NO: 5719466 - DNA, 25 bp, Homo sapien
gtgttggagcacgttcccaccgttc

SEQ ID NO: 5719467 - DNA, 25 bp, Homo sapien
gactgtgtcctgaaccccagcaagt

SEQ ID NO: 5719468 - DNA, 25 bp, Homo sapien
acttgctggggttcaggacacagtc

SEQ ID NO: 5719469 - DNA, 25 bp, Homo sapien
ggttcgaccccgacctgcacgtctc

SEQ ID NO: 5719470 - DNA, 25 bp, Homo sapien
gagacgtgcaggtcggggtcgaacc

SEQ ID NO: 5719471 - DNA, 25 bp, Homo sapien
atttgtacgggcccgaagctacacg

SEQ ID NO: 5719472 - DNA, 25 bp, Homo sapien
cgtgtagcttcgggcccgtacaaat

SEQ ID NO: 5719473 - DNA, 25 bp, Homo sapien
ccaataggactgtgcgggtagccct

SEQ ID NO: 5719474 - DNA, 25 bp, Homo sapien
agggctacccgcacagtcctattgg

SEQ ID NO: 5719475 - DNA, 25 bp, Homo sapien
cgactccacgaaaaactgcttgcgt

SEQ ID NO: 5719476 - DNA, 25 bp, Homo sapien
acgcaagcagtttttcgtggagtcg

SEQ ID NO: 5719477 - DNA, 25 bp, Homo sapien
actggcgtgacccggctccgacaat

SEQ ID NO: 5719478 - DNA, 25 bp, Homo sapien
attgtcggagccgggtcacgccagt

SEQ ID NO: 5719479 - DNA, 25 bp, Homo sapien
actacaattagactaaatactttaa

SEQ ID NO: 5719480 - DNA, 25 bp, Homo sapien
ttaaagtatttagtctaattgtagt

SEQ ID NO: 5719481 - DNA, 25 bp, Homo sapien
aactacaattagactaaatacttta

SEQ ID NO: 5719482 - DNA, 25 bp, Homo sapien
taaagtatttagtctaattgtagtt

SEQ ID NO: 5719483 - DNA, 25 bp, Homo sapien
cggtccggacgtcgtgggggcgtgc

SEQ ID NO: 5719484 - DNA, 25 bp, Homo sapien
gcacgcccccacgacgtccggaccg

SEQ ID NO: 5719485 - DNA, 25 bp, Homo sapien
taacacaggtctttatttaattagt

SEQ ID NO: 5719486 - DNA, 25 bp, Homo sapien
actaattaaataaagacctgtgtta

SEQ ID NO: 5719487 - DNA, 25 bp, Homo sapien
gtgtacgtgaggaactgtagacaag

SEQ ID NO: 5719488 - DNA, 25 bp, Homo sapien
cttgtctacagttcctcacgtacac

SEQ ID NO: 5719489 - DNA, 25 bp, Homo sapien
actgtggcgcgccggtcggtccggc

SEQ ID NO: 5719490 - DNA, 25 bp, Homo sapien
gccggaccgaccggcgcgccacagt

SEQ ID NO: 5719491 - DNA, 25 bp, Homo sapien
agctactgggcccttctcaaagacg

SEQ ID NO: 5719492 - DNA, 25 bp, Homo sapien
cgtctttgagaagggcccagtagct

SEQ ID NO: 5719493 - DNA, 25 bp, Homo sapien
tcaccgtatctgtccaacgaccacc

SEQ ID NO: 5719494 - DNA, 25 bp, Homo sapien
ggtggtcgttggacagatacggtga

SEQ ID NO: 5719495 - DNA, 25 bp, Homo sapien
ggacgaggaagggaaccgagtcacg

SEQ ID NO: 5719496 - DNA, 25 bp, Homo sapien
cgtgactcggttcccttcctcgtcc

SEQ ID NO: 5719497 - DNA, 25 bp, Homo sapien
aactaagaactaggacatgaccaaa

SEQ ID NO: 5719498 - DNA, 25 bp, Homo sapien
tttggtcatgtcctagttcttagtt

SEQ ID NO: 5719499 - DNA, 25 bp, Homo sapien
actcagggtctaggaggagctggag

SEQ ID NO: 5719500 - DNA, 25 bp, Homo sapien
ctccagctcctcctagaccctgagt

SEQ ID NO: 5719501 - DNA, 25 bp, Homo sapien
cgagggcctgattcacgcctgcgcg

SEQ ID NO: 5719502 - DNA, 25 bp, Homo sapien
cgcgcaggcgtgaatcaggccctcg

SEQ ID NO: 5719503 - DNA, 25 bp, Homo sapien
gtctaccctcttatccctgttctgg

SEQ ID NO: 5719504 - DNA, 25 bp, Homo sapien
ccagaacagggataagagggtagac

SEQ ID NO: 5719505 - DNA, 25 bp, Homo sapien
aaatcgggtctacctacttgtccac

SEQ ID NO: 5719506 - DNA, 25 bp, Homo sapien
gtggacaagtaggtagacccgattt

SEQ ID NO: 5719507 - DNA, 25 bp, Homo sapien
gttatcgtcgcgaccggtaaccacg

SEQ ID NO: 5719508 - DNA, 25 bp, Homo sapien
cgtggttaccggtcgcgacgataac

SEQ ID NO: 5719509 - DNA, 25 bp, Homo sapien
atatttattcttacaccaaggacat

SEQ ID NO: 5719510 - DNA, 25 bp, Homo sapien
atgtccttggtgtaagaataaatat

SEQ ID NO: 5719511 - DNA, 25 bp, Homo sapien
gagtagatcaacagattataagtac

SEQ ID NO: 5719512 - DNA, 25 bp, Homo sapien
gtacttataatctgttgatctactc

SEQ ID NO: 5719513 - DNA, 25 bp, Homo sapien
gcccgcacggacacccgcagtcccc

SEQ ID NO: 5719514 - DNA, 25 bp, Homo sapien
ggggactgcgggtgtccgtgcgggc

SEQ ID NO: 5719515 - DNA, 25 bp, Homo sapien
accggtgctcggacgggtcatccct

SEQ ID NO: 5719516 - DNA, 25 bp, Homo sapien
agggatgacccgtccgagcaccggt

SEQ ID NO: 5719517 - DNA, 25 bp, Homo sapien
gagattgaactcgatagtaaagtga

SEQ ID NO: 5719518 - DNA, 25 bp, Homo sapien
tcactttactatcgagttcaatctc

SEQ ID NO: 5719519 - DNA, 25 bp, Homo sapien
cctctttgtcctcgcggattccatg

SEQ ID NO: 5719520 - DNA, 25 bp, Homo sapien
catggaatccgcgaggacaaagagg

SEQ ID NO: 5719521 - DNA, 25 bp, Homo sapien
gactcccgtctacgagaccctcttc

SEQ ID NO: 5719522 - DNA, 25 bp, Homo sapien
gaagagggtctcgtagacgggagtc

SEQ ID NO: 5719523 - DNA, 25 bp, Homo sapien
gacgtgccactccacaggccccggt

SEQ ID NO: 5719524 - DNA, 25 bp, Homo sapien
accggggcctgtggagtggcacgtc

SEQ ID NO: 5719525 - DNA, 25 bp, Homo sapien
gaccaacacgatttcttaagaggta

SEQ ID NO: 5719526 - DNA, 25 bp, Homo sapien
tacctcttaagaaatcgtgttggtc

SEQ ID NO: 5719527 - DNA, 25 bp, Homo sapien
actattttctatactaccgaaagac

SEQ ID NO: 5719528 - DNA, 25 bp, Homo sapien
gtctttcggtagtatagaaaatagt

SEQ ID NO: 5719529 - DNA, 25 bp, Homo sapien
aactagaggtgtacatcacctatgt

SEQ ID NO: 5719530 - DNA, 25 bp, Homo sapien
acataggtgatgtacacctctagtt

SEQ ID NO: 5719531 - DNA, 25 bp, Homo sapien
gactgccggacgaaagggacacttt

SEQ ID NO: 5719532 - DNA, 25 bp, Homo sapien
aaagtgtccctttcgtccggcagtc

SEQ ID NO: 5719533 - DNA, 25 bp, Homo sapien
caagaagctgacactaaggacattt

SEQ ID NO: 5719534 - DNA, 25 bp, Homo sapien
aaatgtccttagtgtcagcttcttg

SEQ ID NO: 5719535 - DNA, 25 bp, Homo sapien
cacatacgcccgtgtgtaagtttat

SEQ ID NO: 5719536 - DNA, 25 bp, Homo sapien
ataaacttacacacgggcgtatgtg

SEQ ID NO: 5719537 - DNA, 25 bp, Homo sapien
tcgactaaatgacggccactcccgg

SEQ ID NO: 5719538 - DNA, 25 bp, Homo sapien
ccgggagtggccgtcatttagtcga

SEQ ID NO: 5719539 - DNA, 25 bp, Homo sapien
cctgggactcctgggcgcgggcgag

SEQ ID NO: 5719540 - DNA, 25 bp, Homo sapien
ctcgcccgcgcccaggagtcccagg

SEQ ID NO: 5719541 - DNA, 25 bp, Homo sapien
aatcgttcggactcaacatctcacg

SEQ ID NO: 5719542 - DNA, 25 bp, Homo sapien
cgtgagatgttgagtccgaacgatt

SEQ ID NO: 5719543 - DNA, 25 bp, Homo sapien
agtaacctggacatcactccggacg

SEQ ID NO: 5719544 - DNA, 25 bp, Homo sapien
cctcttcctcttcctggagagaaca

SEQ ID NO: 5719545 - DNA, 25 bp, Homo sapien
gtaccaaaatctacgtggatgcagt

SEQ ID NO: 5719546 - DNA, 25 bp, Homo sapien
cacctgcatcatcctggccgcctgc

SEQ ID NO: 5719547 - DNA, 25 bp, Homo sapien
tacgtctccttcctcttcctgggct

SEQ ID NO: 5719548 - DNA, 25 bp, Homo sapien
ctcgctctatataggaatcctgttc

SEQ ID NO: 5719549 - DNA, 25 bp, Homo sapien
tcatccctccacccctcatcttcgg

SEQ ID NO: 5719550 - DNA, 25 bp, Homo sapien
gaggcaccccctggagccagacagc

SEQ ID NO: 5719551 - DNA, 25 bp, Homo sapien
aggcgggcgagatccgctggggcgc

SEQ ID NO: 5719552 - DNA, 25 bp, Homo sapien
gggcatcggtgctacccctgtgcag

SEQ ID NO: 5719553 - DNA, 25 bp, Homo sapien
ttctcctccttcgtttgttgggctt

SEQ ID NO: 5719554 - DNA, 25 bp, Homo sapien
gatcggctgcggcggcatcgtcatg

SEQ ID NO: 5719555 - DNA, 25 bp, Homo sapien
gggtatcttcctgggaggtcttttg

SEQ ID NO: 5719556 - DNA, 25 bp, Homo sapien
cggggctggcatcgactccacctgc

SEQ ID NO: 5719557 - DNA, 25 bp, Homo sapien
cttgggatgactgcgatcccgtgtg

SEQ ID NO: 5719558 - DNA, 25 bp, Homo sapien
gccatgctctccgaaagagaatacg

SEQ ID NO: 5719559 - DNA, 25 bp, Homo sapien
acctgccccgaatcacattcacctt

SEQ ID NO: 5719560 - DNA, 25 bp, Homo sapien
gtcctctacgacaatgtggtctacc

SEQ ID NO: 5719561 - DNA, 25 bp, Homo sapien
ccctactcgccctgcaataataact

SEQ ID NO: 5719562 - DNA, 25 bp, Homo sapien
cttagcgtgctcctccctgtccgag

SEQ ID NO: 5719563 - DNA, 25 bp, Homo sapien
tccttcgtttgttgggcttcatccc

SEQ ID NO: 5719564 - DNA, 25 bp, Homo sapien
cagggggacgaggcgcagaggaaca

SEQ ID NO: 5719565 - DNA, 25 bp, Homo sapien
ccggccgcgcctgatcggctgcggc

SEQ ID NO: 5719566 - DNA, 25 bp, Homo sapien
aatctcacgggctgtgcgtgcctca

SEQ ID NO: 5719567 - DNA, 25 bp, Homo sapien
gacgtgggtgtgatcgctagcagct

SEQ ID NO: 5719568 - DNA, 25 bp, Homo sapien
gtgccaagaggccttcctcactttc

SEQ ID NO: 5719569 - DNA, 25 bp, Homo sapien
accaacctgttgcatagaatggagg

SEQ ID NO: 5719570 - DNA, 25 bp, Homo sapien
agtacctggagcagcagtttaacct

SEQ ID NO: 5719571 - DNA, 25 bp, Homo sapien
gctcctccctgtccgagaacccgag

SEQ ID NO: 5719572 - DNA, 25 bp, Homo sapien
attcggatggccatgctcgtcaacc

SEQ ID NO: 5719573 - DNA, 25 bp, Homo sapien
cctgctttgctggctgcaacagcac

SEQ ID NO: 5719574 - DNA, 25 bp, Homo sapien
agggcgggctgagcaccagcacaga

SEQ ID NO: 5719575 - DNA, 25 bp, Homo sapien
gatggcttgccgacatgctttagaa

SEQ ID NO: 5719576 - DNA, 25 bp, Homo sapien
gtcaccaagcacctgctctcaaacc

SEQ ID NO: 5719577 - DNA, 25 bp, Homo sapien
gggaatgctcctctgactgagggct

SEQ ID NO: 5719578 - DNA, 25 bp, Homo sapien
ttccacccatccctctacctcctct

SEQ ID NO: 5719579 - DNA, 25 bp, Homo sapien
gaatgctcctctgactgagggctcc

SEQ ID NO: 5719580 - DNA, 25 bp, Homo sapien
gaccccgacctcatctgcctcaacc

SEQ ID NO: 5719581 - DNA, 25 bp, Homo sapien
ctcttcctgggctgcgacactggcc

SEQ ID NO: 5719582 - DNA, 25 bp, Homo sapien
acagacaccctcagtcatcatcctc

SEQ ID NO: 5719583 - DNA, 25 bp, Homo sapien
gggaagtacctggagcagcagttta

SEQ ID NO: 5719584 - DNA, 25 bp, Homo sapien
cgagggcgggctgagcaccagcaca

SEQ ID NO: 5719585 - DNA, 25 bp, Homo sapien
tccttcgccttcatcctgtacacca

SEQ ID NO: 5719586 - DNA, 25 bp, Homo sapien
ggggtggctttctgctctgcggtgc

SEQ ID NO: 5719587 - DNA, 25 bp, Homo sapien
gacctcgcgggcctcacttagcgtg

SEQ ID NO: 5719588 - DNA, 25 bp, Homo sapien
ccaaacagctctcagagtaggcatc

SEQ ID NO: 5719589 - DNA, 25 bp, Homo sapien
gcatcggtgctacccctgtgcagcc

SEQ ID NO: 5719590 - DNA, 25 bp, Homo sapien
tggccctcttcctcttcctggagag

SEQ ID NO: 5719591 - DNA, 25 bp, Homo sapien
ttgggtttccacagtccctgccccc

SEQ ID NO: 5719592 - DNA, 25 bp, Homo sapien
acttgctgctcattggggcccaggt

SEQ ID NO: 5719593 - DNA, 25 bp, Homo sapien
tcgtcgggcggcggccggagcggcg

SEQ ID NO: 5719594 - DNA, 25 bp, Homo sapien
atcgccatcgcgctcaaatccttcg

SEQ ID NO: 5719595 - DNA, 25 bp, Homo sapien
acaatgtggtctaccgatacctgta

SEQ ID NO: 5719596 - DNA, 25 bp, Homo sapien
ttgctgctcattggggcccaggtgc

SEQ ID NO: 5719597 - DNA, 25 bp, Homo sapien
acgggctgtgcgtgcctcaccaccg

SEQ ID NO: 5719598 - DNA, 25 bp, Homo sapien
aaggactcctcgctctatataggaa

SEQ ID NO: 5719599 - DNA, 25 bp, Homo sapien
gaacagccctccaccacccacagac

SEQ ID NO: 5719600 - DNA, 25 bp, Homo sapien
cctgtctgcctgctttgctggctgc

SEQ ID NO: 5719601 - DNA, 25 bp, Homo sapien
gtacatactgtacgtttgctgaaaa

SEQ ID NO: 5719602 - DNA, 25 bp, Homo sapien
agcagcttcgagatcgggaacctgg

SEQ ID NO: 5719603 - DNA, 25 bp, Homo sapien
gctacgtctccttcctcttcctggg

SEQ ID NO: 5719604 - DNA, 25 bp, Homo sapien
atactgtacgtttgctgaaaattat

SEQ ID NO: 5719605 - DNA, 25 bp, Homo sapien
gtgcgccctgatgctggcgcagggc

SEQ ID NO: 5719606 - DNA, 25 bp, Homo sapien
cctgatgctggcgcagggcacggtg

SEQ ID NO: 5719607 - DNA, 25 bp, Homo sapien
aataactgtgaatgccaaaccgatt

SEQ ID NO: 5719608 - DNA, 25 bp, Homo sapien
tgcggaggaaggactcctcgctcta

SEQ ID NO: 5719609 - DNA, 25 bp, Homo sapien
gtacttgctgctcattggggcccag

SEQ ID NO: 5719610 - DNA, 25 bp, Homo sapien
aaacagctctcagagtaggcatctt

SEQ ID NO: 5719611 - DNA, 25 bp, Homo sapien
gaatcctgttcacgatgctggtatt

SEQ ID NO: 5719612 - DNA, 25 bp, Homo sapien
acggtgggcgcctacctggtgagcg

SEQ ID NO: 5719613 - DNA, 25 bp, Homo sapien
cccctgtgcagcccctgggcgtctc

SEQ ID NO: 5719614 - DNA, 25 bp, Homo sapien
ttcggggcacgcgggcaccggccgc

SEQ ID NO: 5719615 - DNA, 25 bp, Homo sapien
gggctggcatcgactccacctgcct

SEQ ID NO: 5719616 - DNA, 25 bp, Homo sapien
gtgtggggcagatggcatcacctac

SEQ ID NO: 5719617 - DNA, 25 bp, Homo sapien
gctgctcattggggcccaggtgctc

SEQ ID NO: 5719618 - DNA, 25 bp, Homo sapien
cgtggcagtgcctgaggaaaaacta

SEQ ID NO: 5719619 - DNA, 25 bp, Homo sapien
tgcctgctttgctggctgcaacagc

SEQ ID NO: 5719620 - DNA, 25 bp, Homo sapien
tgtgttcacctgcatcatcctggcc

SEQ ID NO: 5719621 - DNA, 25 bp, Homo sapien
gcggcagcggcggcggcggcggcgg

SEQ ID NO: 5719622 - DNA, 25 bp, Homo sapien
gccatggaaagcgagcaggccatgc

SEQ ID NO: 5719623 - DNA, 25 bp, Homo sapien
atgctggcgcagggcacggtgggcg

SEQ ID NO: 5719624 - DNA, 25 bp, Homo sapien
ctgggtgccaagaggccttcctcac

SEQ ID NO: 5719625 - DNA, 25 bp, Homo sapien
cacgttctgtggggagcaaggcgcc

SEQ ID NO: 5719626 - DNA, 25 bp, Homo sapien
caacctgttgcatagaatggagggg

SEQ ID NO: 5719627 - DNA, 25 bp, Homo sapien
catggcacagacaccctcagtcatc

SEQ ID NO: 5719628 - DNA, 25 bp, Homo sapien
gtatttggaccagcctgcgggttta

SEQ ID NO: 5719629 - DNA, 25 bp, Homo sapien
acagccctccaccacccacagacct

SEQ ID NO: 5719630 - DNA, 25 bp, Homo sapien
ggggaaaaagcacatactcaataga

SEQ ID NO: 5719631 - DNA, 25 bp, Homo sapien
cctggctcagccctggacccctact

SEQ ID NO: 5719632 - DNA, 25 bp, Homo sapien
tgtttccagcagctgagagtgatcc

SEQ ID NO: 5719633 - DNA, 25 bp, Homo sapien
ctgcggcggcatcgtcatggcgctg

SEQ ID NO: 5719634 - DNA, 25 bp, Homo sapien
tgccaaaccgattccttcactccag

SEQ ID NO: 5719635 - DNA, 25 bp, Homo sapien
atcggtgccatggcacagacaccct

SEQ ID NO: 5719636 - DNA, 25 bp, Homo sapien
agcgctgacgtgggtgtgatcgcta

SEQ ID NO: 5719637 - DNA, 25 bp, Homo sapien
gctcgtcaacctggtgtccactgct

SEQ ID NO: 5719638 - DNA, 25 bp, Homo sapien
gcagagcgctgacgtgggtgtgatc

SEQ ID NO: 5719639 - DNA, 25 bp, Homo sapien
caagtaacctggacatcactccgga

SEQ ID NO: 5719640 - DNA, 25 bp, Homo sapien
gttccctatggaaacagcacagcac

SEQ ID NO: 5719641 - DNA, 25 bp, Homo sapien
ctgccccgaatcacattcaccttca

SEQ ID NO: 5719642 - DNA, 25 bp, Homo sapien
accacgagggcgggctgagcaccag

SEQ ID NO: 5719643 - DNA, 25 bp, Homo sapien
aaaactataaacgctacatcaaaaa

SEQ ID NO: 5719644 - DNA, 25 bp, Homo sapien
gggcgagatccgctggggcgccgag

SEQ ID NO: 5719645 - DNA, 25 bp, Homo sapien
ctgtccgagaacccgagggtcccca

SEQ ID NO: 5719646 - DNA, 25 bp, Homo sapien
acgtggatgcagtcttcattgacac

SEQ ID NO: 5719647 - DNA, 25 bp, Homo sapien
gctgcaacagcacgaatctcacggg

SEQ ID NO: 5719648 - DNA, 25 bp, Homo sapien
gcgatcccgtgtgcttgtctgggta

SEQ ID NO: 5719649 - DNA, 25 bp, Homo sapien
ccatgtggattatccagccagtgtg

SEQ ID NO: 5719650 - DNA, 25 bp, Homo sapien
ttcgtgagctacttcggggcacgcg

SEQ ID NO: 5719651 - DNA, 25 bp, Homo sapien
gcatcgactccacctgcctgttctg

SEQ ID NO: 5719652 - DNA, 25 bp, Homo sapien
acagcacctggctcagccctggacc

SEQ ID NO: 5719653 - DNA, 25 bp, Homo sapien
tttagaaactcccctcttgggaatg

SEQ ID NO: 5719654 - DNA, 25 bp, Homo sapien
gctgtgcgtgcctcaccaccgtccc

SEQ ID NO: 5719655 - DNA, 25 bp, Homo sapien
tcctccctgtccgagaacccgaggg

SEQ ID NO: 5719656 - DNA, 25 bp, Homo sapien
cgggctgagcaccagcacagagtac

SEQ ID NO: 5719657 - DNA, 25 bp, Homo sapien
gagtgtggtactctgtatttttgca

SEQ ID NO: 5719658 - DNA, 25 bp, Homo sapien
ggacatcactccggacgacccccgc

SEQ ID NO: 5719659 - DNA, 25 bp, Homo sapien
gggcgagcgggaaagcggcagcggc

SEQ ID NO: 5719660 - DNA, 25 bp, Homo sapien
aaagaaggtgtcctgcttttccaac

SEQ ID NO: 5719661 - DNA, 25 bp, Homo sapien
ctcaaccggacggctaccaacatga

SEQ ID NO: 5719662 - DNA, 25 bp, Homo sapien
ttgccgacatgctttagaaactccc

SEQ ID NO: 5719663 - DNA, 25 bp, Homo sapien
ccccaagcgcaggcctgtgatgagg

SEQ ID NO: 5719664 - DNA, 25 bp, Homo sapien
gctcatcctcttcgtgagctacttc

SEQ ID NO: 5719665 - DNA, 25 bp, Homo sapien
tcctgaggcaccccctggagccaga

SEQ ID NO: 5719666 - DNA, 25 bp, Homo sapien
aggaatcctgttcacgatgctggta

SEQ ID NO: 5719667 - DNA, 25 bp, Homo sapien
aaaaagcacatactcaatagatttt

SEQ ID NO: 5719668 - DNA, 25 bp, Homo sapien
gcccgaccccgacctcatctgcctc

SEQ ID NO: 5719669 - DNA, 25 bp, Homo sapien
gcagcctgatcggtgccatggcaca

SEQ ID NO: 5719670 - DNA, 25 bp, Homo sapien
gggacgaggcgcagaggaacaagaa

SEQ ID NO: 5719671 - DNA, 25 bp, Homo sapien
gtcagcatcgccatcgcgctcaaat

SEQ ID NO: 5719672 - DNA, 25 bp, Homo sapien
cagctgcttgggatgactgcgatcc

SEQ ID NO: 5719673 - DNA, 25 bp, Homo sapien
gcgcctgcgtcctctacgacaatgt

SEQ ID NO: 5719674 - DNA, 25 bp, Homo sapien
ggagcacgttctgtggggagcaagg

SEQ ID NO: 5719675 - DNA, 25 bp, Homo sapien
gcttgccgacatgctttagaaactc

SEQ ID NO: 5719676 - DNA, 25 bp, Homo sapien
cgtggttcctggaaaatgccccagt

SEQ ID NO: 5719677 - DNA, 25 bp, Homo sapien
ggcttcatccctccacccctcatct

SEQ ID NO: 5719678 - DNA, 25 bp, Homo sapien
tacgtttgctgaaaattatattaaa

SEQ ID NO: 5719679 - DNA, 25 bp, Homo sapien
tgctgacctggtgtgcaaattccct

SEQ ID NO: 5719680 - DNA, 25 bp, Homo sapien
tgcaataataactgtgaatgccaaa

SEQ ID NO: 5719681 - DNA, 25 bp, Homo sapien
ttcgagatcgggaacctggcgctca

SEQ ID NO: 5719682 - DNA, 25 bp, Homo sapien
tcgccttcatcctgtacaccaccac

SEQ ID NO: 5719683 - DNA, 25 bp, Homo sapien
cctgttcacgatgctggtatttgga

SEQ ID NO: 5719684 - DNA, 25 bp, Homo sapien
tgttctggagcacgttctgtgggga

SEQ ID NO: 5719685 - DNA, 25 bp, Homo sapien
tggtgagcgtcctgaccaccctgga

SEQ ID NO: 5719686 - DNA, 25 bp, Homo sapien
aatgccccagtcctgggtgccaaga

SEQ ID NO: 5719687 - DNA, 25 bp, Homo sapien
cacgtggcagtgcctgaggaaaaac

SEQ ID NO: 5719688 - DNA, 25 bp, Homo sapien
aactcaagtcttacgctttgggagt

SEQ ID NO: 5719689 - DNA, 25 bp, Homo sapien
atgtttgggtttccacagtccctgc

SEQ ID NO: 5719690 - DNA, 25 bp, Homo sapien
ctggcttcgctgcctttttggggaa

SEQ ID NO: 5719691 - DNA, 25 bp, Homo sapien
cctggccctcttcctcttcctggag

SEQ ID NO: 5719692 - DNA, 25 bp, Homo sapien
aatcacattcaccttcagaagactc

SEQ ID NO: 5719693 - DNA, 25 bp, Homo sapien
atgtgatgtaaagtacatactgtac

SEQ ID NO: 5719694 - DNA, 25 bp, Homo sapien
tgggtctctaaagagtcatgctgac

SEQ ID NO: 5719695 - DNA, 25 bp, Homo sapien
tggcgctcatcctcttcgtgagcta

SEQ ID NO: 5719696 - DNA, 25 bp, Homo sapien
cgtgcggaggaaggactcctcgctc

SEQ ID NO: 5719697 - DNA, 25 bp, Homo sapien
cactgcttgctacgtctccttcctc

SEQ ID NO: 5719698 - DNA, 25 bp, Homo sapien
tgggggccattcggatggccatgct

SEQ ID NO: 5719699 - DNA, 25 bp, Homo sapien
gtatttttgcagcgtttattttcca

SEQ ID NO: 5719700 - DNA, 25 bp, Homo sapien
cgctggatcggagcctggtggggtg

SEQ ID NO: 5719701 - DNA, 25 bp, Homo sapien
gacccccgctggatcggagcctggt

SEQ ID NO: 5719702 - DNA, 25 bp, Homo sapien
gtgatcccgaaggtcaccaagcacc

SEQ ID NO: 5719703 - DNA, 25 bp, Homo sapien
ctcagagtaggcatctttcctgggt

SEQ ID NO: 5719704 - DNA, 25 bp, Homo sapien
ctctgcggtgccttactcttcttct

SEQ ID NO: 5719705 - DNA, 25 bp, Homo sapien
agctcagcctgtctgccctgggggc

SEQ ID NO: 5719706 - DNA, 25 bp, Homo sapien
agctgagagtgatcccgaaggtcac

SEQ ID NO: 5719707 - DNA, 25 bp, Homo sapien
acgctacatcaaaaaccacgagggc

SEQ ID NO: 5719708 - DNA, 25 bp, Homo sapien
tgctctccgaaagagaatacgagag

SEQ ID NO: 5719709 - DNA, 25 bp, Homo sapien
tagcgtgctcctccctgtccgagaa

SEQ ID NO: 5719710 - DNA, 25 bp, Homo sapien
ggagtactccaaacagctctcagag

SEQ ID NO: 5719711 - DNA, 25 bp, Homo sapien
cagcctgcgggtttatcctgggctc

SEQ ID NO: 5719712 - DNA, 25 bp, Homo sapien
agccagacagcagtgcctcctgttt

SEQ ID NO: 5719713 - DNA, 25 bp, Homo sapien
tgcctgttctggagcacgttctgtg

SEQ ID NO: 5719714 - DNA, 25 bp, Homo sapien
gacgaggcgcagaggaacaagaaaa

SEQ ID NO: 5719715 - DNA, 25 bp, Homo sapien
agcctgatcggtgccatggcacaga

SEQ ID NO: 5719716 - DNA, 25 bp, Homo sapien
catcatcctggccgcctgcatggag

SEQ ID NO: 5719717 - DNA, 25 bp, Homo sapien
gctcctctgactgagggctccaaca

SEQ ID NO: 5719718 - DNA, 25 bp, Homo sapien
accacctcttctgccaaccagctgc

SEQ ID NO: 5719719 - DNA, 25 bp, Homo sapien
ctgggcgcgctgctgtcggcgctgc

SEQ ID NO: 5719720 - DNA, 25 bp, Homo sapien
agcacctggctcagccctggacccc

SEQ ID NO: 5719721 - DNA, 25 bp, Homo sapien
catcctcatcaggacagtcagccct

SEQ ID NO: 5719722 - DNA, 25 bp, Homo sapien
cctgtgcagcccctgggcgtctcct

SEQ ID NO: 5719723 - DNA, 25 bp, Homo sapien
taccaacatgatgtacttgctgctc

SEQ ID NO: 5719724 - DNA, 25 bp, Homo sapien
tcatcctggccgcctgcatggagat

SEQ ID NO: 5719725 - DNA, 25 bp, Homo sapien
gcttgctacgtctccttcctcttcc

SEQ ID NO: 5719726 - DNA, 25 bp, Homo sapien
gcgagcaggccatgctctccgaaag

SEQ ID NO: 5719727 - DNA, 25 bp, Homo sapien
cgttctgtggggagcaaggcgcctg

SEQ ID NO: 5719728 - DNA, 25 bp, Homo sapien
cctgggctctttctgtaccaaaatc

SEQ ID NO: 5719729 - DNA, 25 bp, Homo sapien
tgccccagtcctgggtgccaagagg

SEQ ID NO: 5719730 - DNA, 25 bp, Homo sapien
aaatgagcagtttagaaatatgtga

SEQ ID NO: 5719731 - DNA, 25 bp, Homo sapien
tacatcgacgaccacgtgcggagga

SEQ ID NO: 5719732 - DNA, 25 bp, Homo sapien
ctcttgatgtttgggtttccacagt

SEQ ID NO: 5719733 - DNA, 25 bp, Homo sapien
actcgccctgcaataataactgtga

SEQ ID NO: 5719734 - DNA, 25 bp, Homo sapien
ctggggcgccgagggccgcgacgtc

SEQ ID NO: 5719735 - DNA, 25 bp, Homo sapien
tggcagtgcctgaggaaaaactata

SEQ ID NO: 5719736 - DNA, 25 bp, Homo sapien
ctgccaaccagctgcttgggatgac

SEQ ID NO: 5719737 - DNA, 25 bp, Homo sapien
gtggggtggctttctgctctgcggt

SEQ ID NO: 5719738 - DNA, 25 bp, Homo sapien
ccgacctcatctgcctcaaccggac

SEQ ID NO: 5719739 - DNA, 25 bp, Homo sapien
ccaacggctcgggcggcgacgaggg

SEQ ID NO: 5719740 - DNA, 25 bp, Homo sapien
cacccacagacctcgcgggcctcac

SEQ ID NO: 5719741 - DNA, 25 bp, Homo sapien
tcgcgggcctcacttagcgtgctcc

SEQ ID NO: 5719742 - DNA, 25 bp, Homo sapien
tgagaacgcaaccgtggttcctgga

SEQ ID NO: 5719743 - DNA, 25 bp, Homo sapien
tcccgtgtgcttgtctgggtatctt

SEQ ID NO: 5719744 - DNA, 25 bp, Homo sapien
tccactgcttgctacgtctccttcc

SEQ ID NO: 5719745 - DNA, 25 bp, Homo sapien
atctttcctgggtctctaaagagtc

SEQ ID NO: 5719746 - DNA, 25 bp, Homo sapien
agccctccaccacccacagacctcg

SEQ ID NO: 5719747 - DNA, 25 bp, Homo sapien
atgactgcgatcccgtgtgcttgtc

SEQ ID NO: 5719748 - DNA, 25 bp, Homo sapien
agacagcagtgcctcctgtttccag

SEQ ID NO: 5719749 - DNA, 25 bp, Homo sapien
ctgcagcctgatcggtgccatggca

SEQ ID NO: 5719750 - DNA, 25 bp, Homo sapien
ccttgtgtccgagtgcgccctgatg

SEQ ID NO: 5719751 - DNA, 25 bp, Homo sapien
acctgcagagcgctgacgtgggtgt

SEQ ID NO: 5719752 - DNA, 25 bp, Homo sapien
gctgctgtcggcgctgcccgagttc

SEQ ID NO: 5719753 - DNA, 25 bp, Homo sapien
ctgagagtgatcccgaaggtcacca

SEQ ID NO: 5719754 - DNA, 25 bp, Homo sapien
cccacagacctcgcgggcctcactt

SEQ ID NO: 5719755 - DNA, 25 bp, Homo sapien
ctcccctcttgggaatgctcctctg

SEQ ID NO: 5719756 - DNA, 25 bp, Homo sapien
ttgaggccccaagcgcaggcctgtg

SEQ ID NO: 5719757 - DNA, 25 bp, Homo sapien
tatggaaacagcacagcacctggct

SEQ ID NO: 5719758 - DNA, 25 bp, Homo sapien
gcacctgctctcaaaccctgtgttc

SEQ ID NO: 5719759 - DNA, 25 bp, Homo sapien
ctttctgtaccaaaatctacgtgga

SEQ ID NO: 5719760 - DNA, 25 bp, Homo sapien
gccgacatgctttagaaactcccct

SEQ ID NO: 5719761 - DNA, 25 bp, Homo sapien
aagctgagggcctggccctcttcct

SEQ ID NO: 5719762 - DNA, 25 bp, Homo sapien
cacttagcgtgctcctccctgtccg

SEQ ID NO: 5719763 - DNA, 25 bp, Homo sapien
gcagcgtttattttccaaatgagca

SEQ ID NO: 5719764 - DNA, 25 bp, Homo sapien
tcatcatcctcatcaggacagtcag

SEQ ID NO: 5719765 - DNA, 25 bp, Homo sapien
ctacgtggatgcagtcttcattgac

SEQ ID NO: 5719766 - DNA, 25 bp, Homo sapien
ccctggagcgtaggttcaacctgca

SEQ ID NO: 5719767 - DNA, 25 bp, Homo sapien
ttgggaatgctcctctgactgaggg

SEQ ID NO: 5719768 - DNA, 25 bp, Homo sapien
gagaaaacctgccccgaatcacatt

SEQ ID NO: 5719769 - DNA, 25 bp, Homo sapien
aagcggcagcggcggcggcggcggc

SEQ ID NO: 5719770 - DNA, 25 bp, Homo sapien
caccggccgcgcctgatcggctgcg

SEQ ID NO: 5719771 - DNA, 25 bp, Homo sapien
aatgccaaaccgattccttcactcc

SEQ ID NO: 5719772 - DNA, 25 bp, Homo sapien
ctccggacgacccccgctggatcgg

SEQ ID NO: 5719773 - DNA, 25 bp, Homo sapien
aggaaaaactataaacgctacatca

SEQ ID NO: 5719774 - DNA, 25 bp, Homo sapien
gaccaaagaggtgacttatggtcag

SEQ ID NO: 5719775 - DNA, 25 bp, Homo sapien
gctctcaaaccctgtgttcacctgc

SEQ ID NO: 5719776 - DNA, 25 bp, Homo sapien
aaagcacatactcaatagatttttg

SEQ ID NO: 5719777 - DNA, 25 bp, Homo sapien
aaaatgccccagtcctgggtgccaa

SEQ ID NO: 5719778 - DNA, 25 bp, Homo sapien
cgaggggcccgaccccgacctcatc

SEQ ID NO: 5719779 - DNA, 25 bp, Homo sapien
tggtgtgcaaattcccttccaccca

SEQ ID NO: 5719780 - DNA, 25 bp, Homo sapien
cttcatccctccacccctcatcttc

SEQ ID NO: 5719781 - DNA, 25 bp, Homo sapien
catgatgtacttgctgctcattggg

SEQ ID NO: 5719782 - DNA, 25 bp, Homo sapien
gcgggaaagcggcagcggcggcggc

SEQ ID NO: 5719783 - DNA, 25 bp, Homo sapien
cgctagcagcttcgagatcgggaac

SEQ ID NO: 5719784 - DNA, 25 bp, Homo sapien
gaagaagccgggcggttcgtcgggc

SEQ ID NO: 5719785 - DNA, 25 bp, Homo sapien
caaccggacggctaccaacatgatg

SEQ ID NO: 5719786 - DNA, 25 bp, Homo sapien
acccaccagtacaagtacgaggcgg

SEQ ID NO: 5719787 - DNA, 25 bp, Homo sapien
cgaccacgtgcggaggaaggactcc

SEQ ID NO: 5719788 - DNA, 25 bp, Homo sapien
tgcgtgcctcaccaccgtccctgct

SEQ ID NO: 5719789 - DNA, 25 bp, Homo sapien
aaaaaccacgagggcgggctgagca

SEQ ID NO: 5719790 - DNA, 25 bp, Homo sapien
ggtgtccactgcttgctacgtctcc

SEQ ID NO: 5719791 - DNA, 25 bp, Homo sapien
ctcaaatccttcgccttcatcctgt

SEQ ID NO: 5719792 - DNA, 25 bp, Homo sapien
cctgtttccagcagctgagagtgat

SEQ ID NO: 5719793 - DNA, 25 bp, Homo sapien
ggcgcctacctggtgagcgtcctga

SEQ ID NO: 5719794 - DNA, 25 bp, Homo sapien
gaacccgagggtccccatgtggatt

SEQ ID NO: 5719795 - DNA, 25 bp, Homo sapien
cctggagcagcagtttaacctcacc

SEQ ID NO: 5719796 - DNA, 25 bp, Homo sapien
tcacattcaccttcagaagactcct

SEQ ID NO: 5719797 - DNA, 25 bp, Homo sapien
gtacgaggcgggcgagatccgctgg

SEQ ID NO: 5719798 - DNA, 25 bp, Homo sapien
ctgcagagcgctgacgtgggtgtga

SEQ ID NO: 5719799 - DNA, 25 bp, Homo sapien
ctttcctgggtctctaaagagtcat

SEQ ID NO: 5719800 - DNA, 25 bp, Homo sapien
tgtgcagcccctgggcgtctcctac

SEQ ID NO: 5719801 - DNA, 25 bp, Homo sapien
caaggcgcctgcgtcctctacgaca

SEQ ID NO: 5719802 - DNA, 25 bp, Homo sapien
gtcaacctggtgtccactgcttgct

SEQ ID NO: 5719803 - DNA, 25 bp, Homo sapien
aaatcagccgagagggtaaaaacca

SEQ ID NO: 5719804 - DNA, 25 bp, Homo sapien
tctctaaagagtcatgctgacctgg

SEQ ID NO: 5719805 - DNA, 25 bp, Homo sapien
cgcgggcaccggccgcgcctgatcg

SEQ ID NO: 5719806 - DNA, 25 bp, Homo sapien
cggtgccatggcacagacaccctca

SEQ ID NO: 5719807 - DNA, 25 bp, Homo sapien
tgcaacagcacgaatctcacgggct

SEQ ID NO: 5719808 - DNA, 25 bp, Homo sapien
cgtaggttcaacctgcagagcgctg

SEQ ID NO: 5719809 - DNA, 25 bp, Homo sapien
attccttcactccagtgtgtggggc

SEQ ID NO: 5719810 - DNA, 25 bp, Homo sapien
gattgcagtggtggctggcttcgct

SEQ ID NO: 5719811 - DNA, 25 bp, Homo sapien
aaatctacgtggatgcagtcttcat

SEQ ID NO: 5719812 - DNA, 25 bp, Homo sapien
attcccttccacccatccctctacc

SEQ ID NO: 5719813 - DNA, 25 bp, Homo sapien
cttcgccttcatcctgtacaccacc

SEQ ID NO: 5719814 - DNA, 25 bp, Homo sapien
ttttctcctccttcgtttgttgggc

SEQ ID NO: 5719815 - DNA, 25 bp, Homo sapien
ttgtgtccgagtgcgccctgatgct

SEQ ID NO: 5719816 - DNA, 25 bp, Homo sapien
tggccctgtggctggggttactgtt

SEQ ID NO: 5719817 - DNA, 25 bp, Homo sapien
tcagccctggacccctactcgccct

SEQ ID NO: 5719818 - DNA, 25 bp, Homo sapien
gatgcaggggaagaagccgggcggt

SEQ ID NO: 5719819 - DNA, 25 bp, Homo sapien
cacatactcaatagatttttgagtg

SEQ ID NO: 5719820 - DNA, 25 bp, Homo sapien
cagagtaggcatctttcctgggtct

SEQ ID NO: 5719821 - DNA, 25 bp, Homo sapien
gactgagaaaacctgccccgaatca

SEQ ID NO: 5719822 - DNA, 25 bp, Homo sapien
cacgagggcgggctgagcaccagca

SEQ ID NO: 5719823 - DNA, 25 bp, Homo sapien
tggctcagccctggacccctactcg

SEQ ID NO: 5719824 - DNA, 25 bp, Homo sapien
agaaggtgtcctgcttttccaacat

SEQ ID NO: 5719825 - DNA, 25 bp, Homo sapien
tctttttctcctccttcgtttgttg

SEQ ID NO: 5719826 - DNA, 25 bp, Homo sapien
tcctcactttcctctgtgtgatgtg

SEQ ID NO: 5719827 - DNA, 25 bp, Homo sapien
caacagctttaatgaaatcagccga

SEQ ID NO: 5719828 - DNA, 25 bp, Homo sapien
gagaacagccctccaccacccacag

SEQ ID NO: 5719829 - DNA, 25 bp, Homo sapien
tggctggggttactgttccctatgg

SEQ ID NO: 5719830 - DNA, 25 bp, Homo sapien
catcaggacagtcagccctgaactc

SEQ ID NO: 5719831 - DNA, 25 bp, Homo sapien
tgtgatcgctagcagcttcgagatc

SEQ ID NO: 5719832 - DNA, 25 bp, Homo sapien
gtctgccctgggggccattcggatg

SEQ ID NO: 5719833 - DNA, 25 bp, Homo sapien
gtctaccgatacctgtatgtcagca

SEQ ID NO: 5719834 - DNA, 25 bp, Homo sapien
ccgagggccgcgacgtctgcgcagc

SEQ ID NO: 5719835 - DNA, 25 bp, Homo sapien
ctggagcgtaggttcaacctgcaga

SEQ ID NO: 5719836 - DNA, 25 bp, Homo sapien
ttcggggctggcatcgactccacct

SEQ ID NO: 5719837 - DNA, 25 bp, Homo sapien
ccaccacgtggcagtgcctgaggaa

SEQ ID NO: 5719838 - DNA, 25 bp, Homo sapien
ccgccatggaaagcgagcaggccat

SEQ ID NO: 5719839 - DNA, 25 bp, Homo sapien
tgaaatcagccgagagggtaaaaac

SEQ ID NO: 5719840 - DNA, 25 bp, Homo sapien
gccctgcaataataactgtgaatgc

SEQ ID NO: 5719841 - DNA, 25 bp, Homo sapien
ggcggttcgtcgggcggcggccgga

SEQ ID NO: 5719842 - DNA, 25 bp, Homo sapien
cctggccgcctgcatggagattgca

SEQ ID NO: 5719843 - DNA, 25 bp, Homo sapien
cgacgtctgcgcagccaacggctcg

SEQ ID NO: 5719844 - DNA, 25 bp, Homo sapien
accctgtgttcacctgcatcatcct

SEQ ID NO: 5719845 - DNA, 25 bp, Homo sapien
tgtacaccaccacgtggcagtgcct

SEQ ID NO: 5719846 - DNA, 25 bp, Homo sapien
ggtactctgtatttttgcagcgttt

SEQ ID NO: 5719847 - DNA, 25 bp, Homo sapien
catcgacgaccacgtgcggaggaag

SEQ ID NO: 5719848 - DNA, 25 bp, Homo sapien
gtgcctcctgtttccagcagctgag

SEQ ID NO: 5719849 - DNA, 25 bp, Homo sapien
ctcaatagatttttgagtgtggtac

SEQ ID NO: 5719850 - DNA, 25 bp, Homo sapien
tggtggggtggctttctgctctgcg

SEQ ID NO: 5719851 - DNA, 25 bp, Homo sapien
gtgtggtcctttgaggccccaagcg

SEQ ID NO: 5719852 - DNA, 25 bp, Homo sapien
ctcagcctgtctgccctgggggcca

SEQ ID NO: 5719853 - DNA, 25 bp, Homo sapien
gccctcttcctcttcctggagagaa

SEQ ID NO: 5719854 - DNA, 25 bp, Homo sapien
ctcctctggggatggcttgccgaca

SEQ ID NO: 5719855 - DNA, 25 bp, Homo sapien
cctcatctgcctcaaccggacggct

SEQ ID NO: 5719856 - DNA, 25 bp, Homo sapien
acttcggggcacgcgggcaccggcc

SEQ ID NO: 5719857 - DNA, 25 bp, Homo sapien
cagcacagcacctggctcagccctg

SEQ ID NO: 5719858 - DNA, 25 bp, Homo sapien
cgtcatggcgctgggcgcgctgctg

SEQ ID NO: 5719859 - DNA, 25 bp, Homo sapien
cacgtgcggaggaaggactcctcgc

SEQ ID NO: 5719860 - DNA, 25 bp, Homo sapien
cggctaccaacatgatgtacttgct

SEQ ID NO: 5719861 - DNA, 25 bp, Homo sapien
cccgaatcacattcaccttcagaag

SEQ ID NO: 5719862 - DNA, 25 bp, Homo sapien
ccgtccctgctgagaacgcaaccgt

SEQ ID NO: 5719863 - DNA, 25 bp, Homo sapien
gatggcatcacctacctgtctgcct

SEQ ID NO: 5719864 - DNA, 25 bp, Homo sapien
tactctgtatttttgcagcgtttat

SEQ ID NO: 5719865 - DNA, 25 bp, Homo sapien
aggcgcagaggaacaagaaaaagaa

SEQ ID NO: 5719866 - DNA, 25 bp, Homo sapien
cctctggggatggcttgccgacatg

SEQ ID NO: 5719867 - DNA, 25 bp, Homo sapien
atggccatgctcgtcaacctggtgt

SEQ ID NO: 5719868 - DNA, 25 bp, Homo sapien
ctgggtatcttcctgggaggtcttt

SEQ ID NO: 5719869 - DNA, 25 bp, Homo sapien
ttttccaacatcaagatcttccttg

SEQ ID NO: 5719870 - DNA, 25 bp, Homo sapien
cgctggggcgccgagggccgcgacg

SEQ ID NO: 5719871 - DNA, 25 bp, Homo sapien
tatggtcaggagtactccaaacagc

SEQ ID NO: 5719872 - DNA, 25 bp, Homo sapien
cgcgctcaaatccttcgccttcatc

SEQ ID NO: 5719873 - DNA, 25 bp, Homo sapien
cttcgctgcctttttggggaagtac

SEQ ID NO: 5719874 - DNA, 25 bp, Homo sapien
gcctgcgggtttatcctgggctctt

SEQ ID NO: 5719875 - DNA, 25 bp, Homo sapien
gtacaagtacgaggcgggcgagatc

SEQ ID NO: 5719876 - DNA, 25 bp, Homo sapien
ccctctacctcctctggggatggct

SEQ ID NO: 5719877 - DNA, 25 bp, Homo sapien
tggggaagtacctggagcagcagtt

SEQ ID NO: 5719878 - DNA, 25 bp, Homo sapien
gaggtcttttggtgaagaagctcag

SEQ ID NO: 5719879 - DNA, 25 bp, Homo sapien
cacctacctgtctgcctgctttgct

SEQ ID NO: 5719880 - DNA, 25 bp, Homo sapien
ggcagcggcggcggcggcggcggcg

SEQ ID NO: 5719881 - DNA, 25 bp, Homo sapien
cactccggacgacccccgctggatc

SEQ ID NO: 5719882 - DNA, 25 bp, Homo sapien
gggctgtgcgtgcctcaccaccgtc

SEQ ID NO: 5719883 - DNA, 25 bp, Homo sapien
tggcacagacaccctcagtcatcat

SEQ ID NO: 5719884 - DNA, 25 bp, Homo sapien
ctggacatcactccggacgaccccc

SEQ ID NO: 5719885 - DNA, 25 bp, Homo sapien
gagatccgctggggcgccgagggcc

SEQ ID NO: 5719886 - DNA, 25 bp, Homo sapien
atcactccggacgacccccgctgga

SEQ ID NO: 5719887 - DNA, 25 bp, Homo sapien
gggccgcgacgtctgcgcagccaac

SEQ ID NO: 5719888 - DNA, 25 bp, Homo sapien
ccggacgacccccgctggatcggag

SEQ ID NO: 5719889 - DNA, 25 bp, Homo sapien
ctctccgaaagagaatacgagagac

SEQ ID NO: 5719890 - DNA, 25 bp, Homo sapien
acctgtatgtcagcatcgccatcgc

SEQ ID NO: 5719891 - DNA, 25 bp, Homo sapien
cgggaacctggcgctcatcctcttc

SEQ ID NO: 5719892 - DNA, 25 bp, Homo sapien
tgaggaccaaagaggtgacttatgg

SEQ ID NO: 5719893 - DNA, 25 bp, Homo sapien
actcctcgctctatataggaatcct

SEQ ID NO: 5719894 - DNA, 25 bp, Homo sapien
ctccgaaagagaatacgagagaccc

SEQ ID NO: 5719895 - DNA, 25 bp, Homo sapien
cggtgctacccctgtgcagcccctg

SEQ ID NO: 5719896 - DNA, 25 bp, Homo sapien
tggtggctggcttcgctgccttttt

SEQ ID NO: 5719897 - DNA, 25 bp, Homo sapien
ccctccaccacccacagacctcgcg

SEQ ID NO: 5719898 - DNA, 25 bp, Homo sapien
aaattcccttccacccatccctcta

SEQ ID NO: 5719899 - DNA, 25 bp, Homo sapien
cgctttgggagttctttttctcctc

SEQ ID NO: 5719900 - DNA, 25 bp, Homo sapien
ggtcctgaggcaccccctggagcca

SEQ ID NO: 5719901 - DNA, 25 bp, Homo sapien
atcagccgagagggtaaaaaccaac

SEQ ID NO: 5719902 - DNA, 25 bp, Homo sapien
tgatgtgtatctgcagcctgatcgg

SEQ ID NO: 5719903 - DNA, 25 bp, Homo sapien
taggttcaacctgcagagcgctgac

SEQ ID NO: 5719904 - DNA, 25 bp, Homo sapien
cggcggccggagcggcgagctgcag

SEQ ID NO: 5719905 - DNA, 25 bp, Homo sapien
tggcatcacctacctgtctgcctgc

SEQ ID NO: 5719906 - DNA, 25 bp, Homo sapien
cgcctacctggtgagcgtcctgacc

SEQ ID NO: 5719907 - DNA, 25 bp, Homo sapien
ggattatccagccagtgtgtggtcc

SEQ ID NO: 5719908 - DNA, 25 bp, Homo sapien
tcactccagtgtgtggggcagatgg

SEQ ID NO: 5719909 - DNA, 25 bp, Homo sapien
cgtgggtgtgatcgctagcagcttc

SEQ ID NO: 5719910 - DNA, 25 bp, Homo sapien
caccctggagcgtaggttcaacctg

SEQ ID NO: 5719911 - DNA, 25 bp, Homo sapien
atcatcctcatcaggacagtcagcc

SEQ ID NO: 5719912 - DNA, 25 bp, Homo sapien
ctgagaaaacctgccccgaatcaca

SEQ ID NO: 5719913 - DNA, 25 bp, Homo sapien
aagcgagcaggccatgctctccgaa

SEQ ID NO: 5719914 - DNA, 25 bp, Homo sapien
tggaaacagcacagcacctggctca

SEQ ID NO: 5719915 - DNA, 25 bp, Homo sapien
ggagcgtaggttcaacctgcagagc

SEQ ID NO: 5719916 - DNA, 25 bp, Homo sapien
gtgtccgagtgcgccctgatgctgg

SEQ ID NO: 5719917 - DNA, 25 bp, Homo sapien
gagggtccccatgtggattatccag

SEQ ID NO: 5719918 - DNA, 25 bp, Homo sapien
gcctgtgatgaggaccaaagaggtg

SEQ ID NO: 5719919 - DNA, 25 bp, Homo sapien
gtaggcatctttcctgggtctctaa

SEQ ID NO: 5719920 - DNA, 25 bp, Homo sapien
catactcaatagatttttgagtgtg

SEQ ID NO: 5719921 - DNA, 25 bp, Homo sapien
gcctcacttagcgtgctcctccctg

SEQ ID NO: 5719922 - DNA, 25 bp, Homo sapien
ggcggcggccggagcggcgagctgc

SEQ ID NO: 5719923 - DNA, 25 bp, Homo sapien
tccagccagtgtgtggtcctttgag

SEQ ID NO: 5719924 - DNA, 25 bp, Homo sapien
gaccccgccatggaaagcgagcagg

SEQ ID NO: 5719925 - DNA, 25 bp, Homo sapien
gcacagcacctggctcagccctgga

SEQ ID NO: 5719926 - DNA, 25 bp, Homo sapien
atcctgttcacgatgctggtatttg

SEQ ID NO: 5719927 - DNA, 25 bp, Homo sapien
gctgcttgggatgactgcgatcccg

SEQ ID NO: 5719928 - DNA, 25 bp, Homo sapien
accagcctgcgggtttatcctgggc

SEQ ID NO: 5719929 - DNA, 25 bp, Homo sapien
acgcaaccgtggttcctggaaaatg

SEQ ID NO: 5719930 - DNA, 25 bp, Homo sapien
ctgggcatcggtgctacccctgtgc

SEQ ID NO: 5719931 - DNA, 25 bp, Homo sapien
aggacagtcagccctgaactcaagt

SEQ ID NO: 5719932 - DNA, 25 bp, Homo sapien
ggacccctactcgccctgcaataat

SEQ ID NO: 5719933 - DNA, 25 bp, Homo sapien
tcttccctcttgatgtttgggtttc

SEQ ID NO: 5719934 - DNA, 25 bp, Homo sapien
gtggggcagatggcatcacctacct

SEQ ID NO: 5719935 - DNA, 25 bp, Homo sapien
caagcccagcaacggggtcctgagg

SEQ ID NO: 5719936 - DNA, 25 bp, Homo sapien
catggagattgcagtggtggctggc

SEQ ID NO: 5719937 - DNA, 25 bp, Homo sapien
cctcaccacctcttctgccaaccag

SEQ ID NO: 5719938 - DNA, 25 bp, Homo sapien
gcgggcctcacttagcgtgctcctc

SEQ ID NO: 5719939 - DNA, 25 bp, Homo sapien
acccgagggtccccatgtggattat

SEQ ID NO: 5719940 - DNA, 25 bp, Homo sapien
cctcttctgccaaccagctgcttgg

SEQ ID NO: 5719941 - DNA, 25 bp, Homo sapien
accaaaatctacgtggatgcagtct

SEQ ID NO: 5719942 - DNA, 25 bp, Homo sapien
gcgctcatcctcttcgtgagctact

SEQ ID NO: 5719943 - DNA, 25 bp, Homo sapien
cctccttcgtttgttgggcttcatc

SEQ ID NO: 5719944 - DNA, 25 bp, Homo sapien
tcttcttctcttccctcttgatgtt

SEQ ID NO: 5719945 - DNA, 25 bp, Homo sapien
tcctgggtgccaagaggccttcctc

SEQ ID NO: 5719946 - DNA, 25 bp, Homo sapien
gcctgtctgccctgggggccattcg

SEQ ID NO: 5719947 - DNA, 25 bp, Homo sapien
cgctctatataggaatcctgttcac

SEQ ID NO: 5719948 - DNA, 25 bp, Homo sapien
ggatgcagtcttcattgacacaagt

SEQ ID NO: 5719949 - DNA, 25 bp, Homo sapien
tccttcactccagtgtgtggggcag

SEQ ID NO: 5719950 - DNA, 25 bp, Homo sapien
ccctgggcgtctcctacatcgacga

SEQ ID NO: 5719951 - DNA, 25 bp, Homo sapien
attcaccttcagaagactcctttgt

SEQ ID NO: 5719952 - DNA, 25 bp, Homo sapien
ccccagtcctgggtgccaagaggcc

SEQ ID NO: 5719953 - DNA, 25 bp, Homo sapien
tccttcctcttcctgggctgcgaca

SEQ ID NO: 5719954 - DNA, 25 bp, Homo sapien
gctttagaaactcccctcttgggaa

SEQ ID NO: 5719955 - DNA, 25 bp, Homo sapien
tcttcggggctggcatcgactccac

SEQ ID NO: 5719956 - DNA, 25 bp, Homo sapien
ctgactgagggctccaacagcttta

SEQ ID NO: 5719957 - DNA, 25 bp, Homo sapien
cctcttgggaatgctcctctgactg

SEQ ID NO: 5719958 - DNA, 25 bp, Homo sapien
acagcagtgcctcctgtttccagca

SEQ ID NO: 5719959 - DNA, 25 bp, Homo sapien
ctgtgatgaggaccaaagaggtgac

SEQ ID NO: 5719960 - DNA, 25 bp, Homo sapien
ggaccagcctgcgggtttatcctgg

SEQ ID NO: 5719961 - DNA, 25 bp, Homo sapien
gcccaggtgctcctgggcatcggtg

SEQ ID NO: 5719962 - DNA, 25 bp, Homo sapien
atcgcgctcaaatccttcgccttca

SEQ ID NO: 5719963 - DNA, 25 bp, Homo sapien
gcaaccgtggttcctggaaaatgcc

SEQ ID NO: 5719964 - DNA, 25 bp, Homo sapien
ccaggtgctcctgggcatcggtgct

SEQ ID NO: 5719965 - DNA, 25 bp, Homo sapien
ctacttcggggcacgcgggcaccgg

SEQ ID NO: 5719966 - DNA, 25 bp, Homo sapien
cctgtgttcacctgcatcatcctgg

SEQ ID NO: 5719967 - DNA, 25 bp, Homo sapien
gagagaacagccctccaccacccac

SEQ ID NO: 5719968 - DNA, 25 bp, Homo sapien
cgggcggcggccggagcggcgagct

SEQ ID NO: 5719969 - DNA, 25 bp, Homo sapien
ctgctgagaacgcaaccgtggttcc

SEQ ID NO: 5719970 - DNA, 25 bp, Homo sapien
cttatggtcaggagtactccaaaca

SEQ ID NO: 5719971 - DNA, 25 bp, Homo sapien
ggtggctttctgctctgcggtgcct

SEQ ID NO: 5719972 - DNA, 25 bp, Homo sapien
gaggaaggactcctcgctctatata

SEQ ID NO: 5719973 - DNA, 25 bp, Homo sapien
gaaactcccctcttgggaatgctcc

SEQ ID NO: 5719974 - DNA, 25 bp, Homo sapien
ctctgtatttttgcagcgtttattt

SEQ ID NO: 5719975 - DNA, 25 bp, Homo sapien
ttgcagcgtttattttccaaatgag

SEQ ID NO: 5719976 - DNA, 25 bp, Homo sapien
ctatataggaatcctgttcacgatg

SEQ ID NO: 5719977 - DNA, 25 bp, Homo sapien
ccacccctcatcttcggggctggca

SEQ ID NO: 5719978 - DNA, 25 bp, Homo sapien
caaatccttcgccttcatcctgtac

SEQ ID NO: 5719979 - DNA, 25 bp, Homo sapien
ttctgtaccaaaatctacgtggatg

SEQ ID NO: 5719980 - DNA, 25 bp, Homo sapien
gcgtgctcctccctgtccgagaacc

SEQ ID NO: 5719981 - DNA, 25 bp, Homo sapien
gtggtactctgtatttttgcagcgt

SEQ ID NO: 5719982 - DNA, 25 bp, Homo sapien
gtcggcgctgcccgagttcctgacc

SEQ ID NO: 5719983 - DNA, 25 bp, Homo sapien
atgctggtatttggaccagcctgcg

SEQ ID NO: 5719984 - DNA, 25 bp, Homo sapien
gccgcgacgtctgcgcagccaacgg

SEQ ID NO: 5719985 - DNA, 25 bp, Homo sapien
cagtgtgtggggcagatggcatcac

SEQ ID NO: 5719986 - DNA, 25 bp, Homo sapien
ctctttctgtaccaaaatctacgtg

SEQ ID NO: 5719987 - DNA, 25 bp, Homo sapien
aagagtcatgctgacctggtgtgca

SEQ ID NO: 5719988 - DNA, 25 bp, Homo sapien
cctcttcctggagagaacagccctc

SEQ ID NO: 5719989 - DNA, 25 bp, Homo sapien
ttccaacatcaagatcttccttgtg

SEQ ID NO: 5719990 - DNA, 25 bp, Homo sapien
acatcactccggacgacccccgctg

SEQ ID NO: 5719991 - DNA, 25 bp, Homo sapien
ctctacctcctctggggatggcttg

SEQ ID NO: 5719992 - DNA, 25 bp, Homo sapien
acctggtgtccactgcttgctacgt

SEQ ID NO: 5719993 - DNA, 25 bp, Homo sapien
aggggcccgaccccgacctcatctg

SEQ ID NO: 5719994 - DNA, 25 bp, Homo sapien
ccaacatgatgtacttgctgctcat

SEQ ID NO: 5719995 - DNA, 25 bp, Homo sapien
cttcctgggaggtcttttggtgaag

SEQ ID NO: 5719996 - DNA, 25 bp, Homo sapien
agcaaggcgcctgcgtcctctacga

SEQ ID NO: 5719997 - DNA, 25 bp, Homo sapien
tcctgggctgcgacactggccctgt

SEQ ID NO: 5719998 - DNA, 25 bp, Homo sapien
gtccccatgtggattatccagccag

SEQ ID NO: 5719999 - DNA, 25 bp, Homo sapien
gtggatgcagtcttcattgacacaa

SEQ ID NO: 5720000 - DNA, 25 bp, Homo sapien
tactcaatagatttttgagtgtggt

SEQ ID NO: 5720001 - DNA, 25 bp, Homo sapien
tcccgaaggtcaccaagcacctgct

SEQ ID NO: 5720002 - DNA, 25 bp, Homo sapien
ggcgctgggcgcgctgctgtcggcg

SEQ ID NO: 5720003 - DNA, 25 bp, Homo sapien
tgatgtacttgctgctcattggggc

SEQ ID NO: 5720004 - DNA, 25 bp, Homo sapien
gtgtgcaaattcccttccacccatc

SEQ ID NO: 5720005 - DNA, 25 bp, Homo sapien
tgtgcgtgcctcaccaccgtccctg

SEQ ID NO: 5720006 - DNA, 25 bp, Homo sapien
tcatcctgtacaccaccacgtggca

SEQ ID NO: 5720007 - DNA, 25 bp, Homo sapien
gctgcctttttggggaagtacctgg

SEQ ID NO: 5720008 - DNA, 25 bp, Homo sapien
ggacgacccccgctggatcggagcc

SEQ ID NO: 5720009 - DNA, 25 bp, Homo sapien
ctttcctctgtgtgatgtgtatctg

SEQ ID NO: 5720010 - DNA, 25 bp, Homo sapien
ctgtatttttgcagcgtttattttc

SEQ ID NO: 5720011 - DNA, 25 bp, Homo sapien
tgctctgcggtgccttactcttctt

SEQ ID NO: 5720012 - DNA, 25 bp, Homo sapien
gggatggcttgccgacatgctttag

SEQ ID NO: 5720013 - DNA, 25 bp, Homo sapien
cactcagaccccgccatggaaagcg

SEQ ID NO: 5720014 - DNA, 25 bp, Homo sapien
gggttactgttccctatggaaacag

SEQ ID NO: 5720015 - DNA, 25 bp, Homo sapien
ccgaaggtcaccaagcacctgctct

SEQ ID NO: 5720016 - DNA, 25 bp, Homo sapien
ccaccagtacaagtacgaggcgggc

SEQ ID NO: 5720017 - DNA, 25 bp, Homo sapien
gtttatcctgggctctttctgtacc

SEQ ID NO: 5720018 - DNA, 25 bp, Homo sapien
tttggggaagtacctggagcagcag

SEQ ID NO: 5720019 - DNA, 25 bp, Homo sapien
tggaggggggaaaaagcacatactc

SEQ ID NO: 5720020 - DNA, 25 bp, Homo sapien
gcgggtttatcctgggctctttctg

SEQ ID NO: 5720021 - DNA, 25 bp, Homo sapien
tcttgggaatgctcctctgactgag

SEQ ID NO: 5720022 - DNA, 25 bp, Homo sapien
tgcctgaggaaaaactataaacgct

SEQ ID NO: 5720023 - DNA, 25 bp, Homo sapien
ggtctctaaagagtcatgctgacct

SEQ ID NO: 5720024 - DNA, 25 bp, Homo sapien
ttgagactgagaaaacctgccccga

SEQ ID NO: 5720025 - DNA, 25 bp, Homo sapien
gcgctgcccgagttcctgacccacc

SEQ ID NO: 5720026 - DNA, 25 bp, Homo sapien
tggcttgccgacatgctttagaaac

SEQ ID NO: 5720027 - DNA, 25 bp, Homo sapien
gcctgcgtcctctacgacaatgtgg

SEQ ID NO: 5720028 - DNA, 25 bp, Homo sapien
caccaccacgtggcagtgcctgagg

SEQ ID NO: 5720029 - DNA, 25 bp, Homo sapien
gcgcagccaacggctcgggcggcga

SEQ ID NO: 5720030 - DNA, 25 bp, Homo sapien
accagctgcttgggatgactgcgat

SEQ ID NO: 5720031 - DNA, 25 bp, Homo sapien
tgtgaatgccaaaccgattccttca

SEQ ID NO: 5720032 - DNA, 25 bp, Homo sapien
ctcaagtcttacgctttgggagttc

SEQ ID NO: 5720033 - DNA, 25 bp, Homo sapien
agcacgttctgtggggagcaaggcg

SEQ ID NO: 5720034 - DNA, 25 bp, Homo sapien
tggaaagcgagcaggccatgctctc

SEQ ID NO: 5720035 - DNA, 25 bp, Homo sapien
cacgatgctggtatttggaccagcc

SEQ ID NO: 5720036 - DNA, 25 bp, Homo sapien
ccctggagccagacagcagtgcctc

SEQ ID NO: 5720037 - DNA, 25 bp, Homo sapien
ttccttgtgtccgagtgcgccctga

SEQ ID NO: 5720038 - DNA, 25 bp, Homo sapien
ctgcgcagccaacggctcgggcggc

SEQ ID NO: 5720039 - DNA, 25 bp, Homo sapien
tcacgggctgtgcgtgcctcaccac

SEQ ID NO: 5720040 - DNA, 25 bp, Homo sapien
atacgagagacccaagcccagcaac

SEQ ID NO: 5720041 - DNA, 25 bp, Homo sapien
caccgtccctgctgagaacgcaacc

SEQ ID NO: 5720042 - DNA, 25 bp, Homo sapien
atccctccacccctcatcttcgggg

SEQ ID NO: 5720043 - DNA, 25 bp, Homo sapien
cccgcactcagaccccgccatggaa

SEQ ID NO: 5720044 - DNA, 25 bp, Homo sapien
aagaagctcagcctgtctgccctgg

SEQ ID NO: 5720045 - DNA, 25 bp, Homo sapien
gagggctccaacagctttaatgaaa

SEQ ID NO: 5720046 - DNA, 25 bp, Homo sapien
atgtggattatccagccagtgtgtg

SEQ ID NO: 5720047 - DNA, 25 bp, Homo sapien
tgtaaagtacatactgtacgtttgc

SEQ ID NO: 5720048 - DNA, 25 bp, Homo sapien
gagactgagaaaacctgccccgaat

SEQ ID NO: 5720049 - DNA, 25 bp, Homo sapien
taacctggacatcactccggacgac

SEQ ID NO: 5720050 - DNA, 25 bp, Homo sapien
gcgcaggcctgtgatgaggaccaaa

SEQ ID NO: 5720051 - DNA, 25 bp, Homo sapien
actggccctgtggctggggttactg

SEQ ID NO: 5720052 - DNA, 25 bp, Homo sapien
cagccagtgtgtggtcctttgaggc

SEQ ID NO: 5720053 - DNA, 25 bp, Homo sapien
gcggccggagcggcgagctgcaggg

SEQ ID NO: 5720054 - DNA, 25 bp, Homo sapien
atctgcctcaaccggacggctacca

SEQ ID NO: 5720055 - DNA, 25 bp, Homo sapien
gagagggtaaaaaccaacctgttgc

SEQ ID NO: 5720056 - DNA, 25 bp, Homo sapien
gtgacttatggtcaggagtactcca

SEQ ID NO: 5720057 - DNA, 25 bp, Homo sapien
ttaatgaaatcagccgagagggtaa

SEQ ID NO: 5720058 - DNA, 25 bp, Homo sapien
cctttgtgagaagctgagggcctgg

SEQ ID NO: 5720059 - DNA, 25 bp, Homo sapien
gccttcatcctgtacaccaccacgt

SEQ ID NO: 5720060 - DNA, 25 bp, Homo sapien
tcctgggcatcggtgctacccctgt

SEQ ID NO: 5720061 - DNA, 25 bp, Homo sapien
acaagtacgaggcgggcgagatccg

SEQ ID NO: 5720062 - DNA, 25 bp, Homo sapien
agccaacggctcgggcggcgacgag

SEQ ID NO: 5720063 - DNA, 25 bp, Homo sapien
tcttcctggagagaacagccctcca

SEQ ID NO: 5720064 - DNA, 25 bp, Homo sapien
gaaaacctgccccgaatcacattca

SEQ ID NO: 5720065 - DNA, 25 bp, Homo sapien
cctgcaataataactgtgaatgcca

SEQ ID NO: 5720066 - DNA, 25 bp, Homo sapien
tgggtgtgatcgctagcagcttcga

SEQ ID NO: 5720067 - DNA, 25 bp, Homo sapien
aaaccgattccttcactccagtgtg

SEQ ID NO: 5720068 - DNA, 25 bp, Homo sapien
ccgtgtgcttgtctgggtatcttcc

SEQ ID NO: 5720069 - DNA, 25 bp, Homo sapien
tgttcacctgcatcatcctggccgc

SEQ ID NO: 5720070 - DNA, 25 bp, Homo sapien
ggagcctggtggggtggctttctgc

SEQ ID NO: 5720071 - DNA, 25 bp, Homo sapien
gcagtgcctgaggaaaaactataaa

SEQ ID NO: 5720072 - DNA, 25 bp, Homo sapien
ccctggacccctactcgccctgcaa

SEQ ID NO: 5720073 - DNA, 25 bp, Homo sapien
cgatgctggtatttggaccagcctg

SEQ ID NO: 5720074 - DNA, 25 bp, Homo sapien
tgtgagaagctgagggcctggccct

SEQ ID NO: 5720075 - DNA, 25 bp, Homo sapien
gagcaggccatgctctccgaaagag

SEQ ID NO: 5720076 - DNA, 25 bp, Homo sapien
gaggccccaagcgcaggcctgtgat

SEQ ID NO: 5720077 - DNA, 25 bp, Homo sapien
tgcccccgcactcagaccccgccat

SEQ ID NO: 5720078 - DNA, 25 bp, Homo sapien
atgtgtatctgcagcctgatcggtg

SEQ ID NO: 5720079 - DNA, 25 bp, Homo sapien
atcgactccacctgcctgttctgga

SEQ ID NO: 5720080 - DNA, 25 bp, Homo sapien
tacccctgtgcagcccctgggcgtc

SEQ ID NO: 5720081 - DNA, 25 bp, Homo sapien
ctcctttgtgagaagctgagggcct

SEQ ID NO: 5720082 - DNA, 25 bp, Homo sapien
gggcctcacttagcgtgctcctccc

SEQ ID NO: 5720083 - DNA, 25 bp, Homo sapien
cgattccttcactccagtgtgtggg

SEQ ID NO: 5720084 - DNA, 25 bp, Homo sapien
agtggtggctggcttcgctgccttt

SEQ ID NO: 5720085 - DNA, 25 bp, Homo sapien
cgcactcagaccccgccatggaaag

SEQ ID NO: 5720086 - DNA, 25 bp, Homo sapien
gtcaggagtactccaaacagctctc

SEQ ID NO: 5720087 - DNA, 25 bp, Homo sapien
aagcgcaggcctgtgatgaggacca

SEQ ID NO: 5720088 - DNA, 25 bp, Homo sapien
caccccctggagccagacagcagtg

SEQ ID NO: 5720089 - DNA, 25 bp, Homo sapien
cagcccctgggcgtctcctacatcg

SEQ ID NO: 5720090 - DNA, 25 bp, Homo sapien
aagtacatactgtacgtttgctgaa

SEQ ID NO: 5720091 - DNA, 25 bp, Homo sapien
ggggcacgcgggcaccggccgcgcc

SEQ ID NO: 5720092 - DNA, 25 bp, Homo sapien
gtgtatctgcagcctgatcggtgcc

SEQ ID NO: 5720093 - DNA, 25 bp, Homo sapien
cagtgtgtggtcctttgaggcccca

SEQ ID NO: 5720094 - DNA, 25 bp, Homo sapien
tggcatcgactccacctgcctgttc

SEQ ID NO: 5720095 - DNA, 25 bp, Homo sapien
tcggctgcggcggcatcgtcatggc

SEQ ID NO: 5720096 - DNA, 25 bp, Homo sapien
acggggtcctgaggcaccccctgga

SEQ ID NO: 5720097 - DNA, 25 bp, Homo sapien
gggcgtctcctacatcgacgaccac

SEQ ID NO: 5720098 - DNA, 25 bp, Homo sapien
cggcatcgtcatggcgctgggcgcg

SEQ ID NO: 5720099 - DNA, 25 bp, Homo sapien
ctgccctgggggccattcggatggc

SEQ ID NO: 5720100 - DNA, 25 bp, Homo sapien
tctcaaaccctgtgttcacctgcat

SEQ ID NO: 5720101 - DNA, 25 bp, Homo sapien
acagcacgaatctcacgggctgtgc

SEQ ID NO: 5720102 - DNA, 25 bp, Homo sapien
gagtaggcatctttcctgggtctct

SEQ ID NO: 5720103 - DNA, 25 bp, Homo sapien
tgggcgcctacctggtgagcgtcct

SEQ ID NO: 5720104 - DNA, 25 bp, Homo sapien
gctggggttactgttccctatggaa

SEQ ID NO: 5720105 - DNA, 25 bp, Homo sapien
tttttggggaagtacctggagcagc

SEQ ID NO: 5720106 - DNA, 25 bp, Homo sapien
atgtcagcatcgccatcgcgctcaa

SEQ ID NO: 5720107 - DNA, 25 bp, Homo sapien
tggtcaggagtactccaaacagctc

SEQ ID NO: 5720108 - DNA, 25 bp, Homo sapien
tcaaaccctgtgttcacctgcatca

SEQ ID NO: 5720109 - DNA, 25 bp, Homo sapien
cagtacaagtacgaggcgggcgaga

SEQ ID NO: 5720110 - DNA, 25 bp, Homo sapien
aaaaaccaacctgttgcatagaatg

SEQ ID NO: 5720111 - DNA, 25 bp, Homo sapien
tgtggctggggttactgttccctat

SEQ ID NO: 5720112 - DNA, 25 bp, Homo sapien
tgctttgctggctgcaacagcacga

SEQ ID NO: 5720113 - DNA, 25 bp, Homo sapien
tggttcctggaaaatgccccagtcc

SEQ ID NO: 5720114 - DNA, 25 bp, Homo sapien
gcaggccatgctctccgaaagagaa

SEQ ID NO: 5720115 - DNA, 25 bp, Homo sapien
aactcccctcttgggaatgctcctc

SEQ ID NO: 5720116 - DNA, 25 bp, Homo sapien
gcagtttagaaatatgtgatgtaaa

SEQ ID NO: 5720117 - DNA, 25 bp, Homo sapien
ctcatcaggacagtcagccctgaac

SEQ ID NO: 5720118 - DNA, 25 bp, Homo sapien
acaccctcagtcatcatcctcatca

SEQ ID NO: 5720119 - DNA, 25 bp, Homo sapien
acagagtaccaagacattgagactg

SEQ ID NO: 5720120 - DNA, 25 bp, Homo sapien
ccgagaacccgagggtccccatgtg

SEQ ID NO: 5720121 - DNA, 25 bp, Homo sapien
gtctgcgcagccaacggctcgggcg

SEQ ID NO: 5720122 - DNA, 25 bp, Homo sapien
cacaagtaacctggacatcactccg

SEQ ID NO: 5720123 - DNA, 25 bp, Homo sapien
tgatgctggcgcagggcacggtggg

SEQ ID NO: 5720124 - DNA, 25 bp, Homo sapien
tttctgctctgcggtgccttactct

SEQ ID NO: 5720125 - DNA, 25 bp, Homo sapien
gccccgaatcacattcaccttcaga

SEQ ID NO: 5720126 - DNA, 25 bp, Homo sapien
cacctgcctgttctggagcacgttc

SEQ ID NO: 5720127 - DNA, 25 bp, Homo sapien
taaagagtcatgctgacctggtgtg

SEQ ID NO: 5720128 - DNA, 25 bp, Homo sapien
ataggaatcctgttcacgatgctgg

SEQ ID NO: 5720129 - DNA, 25 bp, Homo sapien
tcgctgcctttttggggaagtacct

SEQ ID NO: 5720130 - DNA, 25 bp, Homo sapien
gtggggagcaaggcgcctgcgtcct

SEQ ID NO: 5720131 - DNA, 25 bp, Homo sapien
attggggcccaggtgctcctgggca

SEQ ID NO: 5720132 - DNA, 25 bp, Homo sapien
acagtccctgcccccgcactcagac

SEQ ID NO: 5720133 - DNA, 25 bp, Homo sapien
gcggtgccttactcttcttctcttc

SEQ ID NO: 5720134 - DNA, 25 bp, Homo sapien
gacgaggggcccgaccccgacctca

SEQ ID NO: 5720135 - DNA, 25 bp, Homo sapien
ttaaaagcactattttaattcttaa

SEQ ID NO: 5720136 - DNA, 25 bp, Homo sapien
tatccagccagtgtgtggtcctttg

SEQ ID NO: 5720137 - DNA, 25 bp, Homo sapien
tcaccaccgtccctgctgagaacgc

SEQ ID NO: 5720138 - DNA, 25 bp, Homo sapien
agccctggacccctactcgccctgc

SEQ ID NO: 5720139 - DNA, 25 bp, Homo sapien
gccaagaggccttcctcactttcct

SEQ ID NO: 5720140 - DNA, 25 bp, Homo sapien
gggtgccaagaggccttcctcactt

SEQ ID NO: 5720141 - DNA, 25 bp, Homo sapien
gcacagacaccctcagtcatcatcc

SEQ ID NO: 5720142 - DNA, 25 bp, Homo sapien
ctcctccttcgtttgttgggcttca

SEQ ID NO: 5720143 - DNA, 25 bp, Homo sapien
gagaatacgagagacccaagcccag

SEQ ID NO: 5720144 - DNA, 25 bp, Homo sapien
ggagcggcgagctgcagggggacga

SEQ ID NO: 5720145 - DNA, 25 bp, Homo sapien
cagccctgaactcaagtcttacgct

SEQ ID NO: 5720146 - DNA, 25 bp, Homo sapien
atttggaccagcctgcgggtttatc

SEQ ID NO: 5720147 - DNA, 25 bp, Homo sapien
ccgagtgcgccctgatgctggcgca

SEQ ID NO: 5720148 - DNA, 25 bp, Homo sapien
ctgtatgtcagcatcgccatcgcgc

SEQ ID NO: 5720149 - DNA, 25 bp, Homo sapien
tttgtgagaagctgagggcctggcc

SEQ ID NO: 5720150 - DNA, 25 bp, Homo sapien
ggtcctttgaggccccaagcgcagg

SEQ ID NO: 5720151 - DNA, 25 bp, Homo sapien
ggcctggccctcttcctcttcctgg

SEQ ID NO: 5720152 - DNA, 25 bp, Homo sapien
agtccctgcccccgcactcagaccc

SEQ ID NO: 5720153 - DNA, 25 bp, Homo sapien
caccaagcacctgctctcaaaccct

SEQ ID NO: 5720154 - DNA, 25 bp, Homo sapien
ccaaaccgattccttcactccagtg

SEQ ID NO: 5720155 - DNA, 25 bp, Homo sapien
cctgaccaccctggagcgtaggttc

SEQ ID NO: 5720156 - DNA, 25 bp, Homo sapien
gacggctaccaacatgatgtacttg

SEQ ID NO: 5720157 - DNA, 25 bp, Homo sapien
cgtttgctgaaaattatattaaaag

SEQ ID NO: 5720158 - DNA, 25 bp, Homo sapien
acactggccctgtggctggggttac

SEQ ID NO: 5720159 - DNA, 25 bp, Homo sapien
cgacactggccctgtggctggggtt

SEQ ID NO: 5720160 - DNA, 25 bp, Homo sapien
cgaatctcacgggctgtgcgtgcct

SEQ ID NO: 5720161 - DNA, 25 bp, Homo sapien
gtttaacctcaccacctcttctgcc

SEQ ID NO: 5720162 - DNA, 25 bp, Homo sapien
catcttcggggctggcatcgactcc

SEQ ID NO: 5720163 - DNA, 25 bp, Homo sapien
tcgccctgcaataataactgtgaat

SEQ ID NO: 5720164 - DNA, 25 bp, Homo sapien
ggcttcgctgcctttttggggaagt

SEQ ID NO: 5720165 - DNA, 25 bp, Homo sapien
cttcatcctgtacaccaccacgtgg

SEQ ID NO: 5720166 - DNA, 25 bp, Homo sapien
tggccgcctgcatggagattgcagt

SEQ ID NO: 5720167 - DNA, 25 bp, Homo sapien
ccccgccatggaaagcgagcaggcc

SEQ ID NO: 5720168 - DNA, 25 bp, Homo sapien
ctcctgtttccagcagctgagagtg

SEQ ID NO: 5720169 - DNA, 25 bp, Homo sapien
agaggccttcctcactttcctctgt

SEQ ID NO: 5720170 - DNA, 25 bp, Homo sapien
cctgtggctggggttactgttccct

SEQ ID NO: 5720171 - DNA, 25 bp, Homo sapien
gccgcctgcatggagattgcagtgg

SEQ ID NO: 5720172 - DNA, 25 bp, Homo sapien
ggctggcttcgctgcctttttgggg

SEQ ID NO: 5720173 - DNA, 25 bp, Homo sapien
ggaaggactcctcgctctatatagg

SEQ ID NO: 5720174 - DNA, 25 bp, Homo sapien
cgcagggcacggtgggcgcctacct

SEQ ID NO: 5720175 - DNA, 25 bp, Homo sapien
cgacaatgtggtctaccgatacctg

SEQ ID NO: 5720176 - DNA, 25 bp, Homo sapien
ctggaaaatgccccagtcctgggtg

SEQ ID NO: 5720177 - DNA, 25 bp, Homo sapien
gcgtcctgaccaccctggagcgtag

SEQ ID NO: 5720178 - DNA, 25 bp, Homo sapien
acccatccctctacctcctctgggg

SEQ ID NO: 5720179 - DNA, 25 bp, Homo sapien
ttatcctgggctctttctgtaccaa

SEQ ID NO: 5720180 - DNA, 25 bp, Homo sapien
ctctgactgagggctccaacagctt

SEQ ID NO: 5720181 - DNA, 25 bp, Homo sapien
cctgggtctctaaagagtcatgctg

SEQ ID NO: 5720182 - DNA, 25 bp, Homo sapien
gcagcagtttaacctcaccacctct

SEQ ID NO: 5720183 - DNA, 25 bp, Homo sapien
cggaggaaggactcctcgctctata

SEQ ID NO: 5720184 - DNA, 25 bp, Homo sapien
cgaggcgcagaggaacaagaaaaag

SEQ ID NO: 5720185 - DNA, 25 bp, Homo sapien
gtcgggcggcggccggagcggcgag

SEQ ID NO: 5720186 - DNA, 25 bp, Homo sapien
gctttctgctctgcggtgccttact

SEQ ID NO: 5720187 - DNA, 25 bp, Homo sapien
agacaccctcagtcatcatcctcat

SEQ ID NO: 5720188 - DNA, 25 bp, Homo sapien
atacctgtatgtcagcatcgccatc

SEQ ID NO: 5720189 - DNA, 25 bp, Homo sapien
ccaagcacctgctctcaaaccctgt

SEQ ID NO: 5720190 - DNA, 25 bp, Homo sapien
ccattcggatggccatgctcgtcaa

SEQ ID NO: 5720191 - DNA, 25 bp, Homo sapien
agcagtttaacctcaccacctcttc

SEQ ID NO: 5720192 - DNA, 25 bp, Homo sapien
agtgcctgaggaaaaactataaacg

SEQ ID NO: 5720193 - DNA, 25 bp, Homo sapien
tcagtcatcatcctcatcaggacag

SEQ ID NO: 5720194 - DNA, 25 bp, Homo sapien
caaaatctacgtggatgcagtcttc

SEQ ID NO: 5720195 - DNA, 25 bp, Homo sapien
gggcacggtgggcgcctacctggtg

SEQ ID NO: 5720196 - DNA, 25 bp, Homo sapien
ttcctctgtgtgatgtgtatctgca

SEQ ID NO: 5720197 - DNA, 25 bp, Homo sapien
ttgtctgggtatcttcctgggaggt

SEQ ID NO: 5720198 - DNA, 25 bp, Homo sapien
ctggtgtccactgcttgctacgtct

SEQ ID NO: 5720199 - DNA, 25 bp, Homo sapien
ccgaccccgacctcatctgcctcaa

SEQ ID NO: 5720200 - DNA, 25 bp, Homo sapien
tgagggcctggccctcttcctcttc

SEQ ID NO: 5720201 - DNA, 25 bp, Homo sapien
catcaaaaaccacgagggcgggctg

SEQ ID NO: 5720202 - DNA, 25 bp, Homo sapien
ttttgcagcgtttattttccaaatg

SEQ ID NO: 5720203 - DNA, 25 bp, Homo sapien
caaccagctgcttgggatgactgcg

SEQ ID NO: 5720204 - DNA, 25 bp, Homo sapien
agcccagcaacggggtcctgaggca

SEQ ID NO: 5720205 - DNA, 25 bp, Homo sapien
gggcccgaccccgacctcatctgcc

SEQ ID NO: 5720206 - DNA, 25 bp, Homo sapien
ctgtcggcgctgcccgagttcctga

SEQ ID NO: 5720207 - DNA, 25 bp, Homo sapien
agggcctggccctcttcctcttcct

SEQ ID NO: 5720208 - DNA, 25 bp, Homo sapien
cagggcacggtgggcgcctacctgg

SEQ ID NO: 5720209 - DNA, 25 bp, Homo sapien
cagtcagccctgaactcaagtctta

SEQ ID NO: 5720210 - DNA, 25 bp, Homo sapien
atttttgcagcgtttattttccaaa

SEQ ID NO: 5720211 - DNA, 25 bp, Homo sapien
ctgcctcaaccggacggctaccaac

SEQ ID NO: 5720212 - DNA, 25 bp, Homo sapien
actgtgaatgccaaaccgattcctt

SEQ ID NO: 5720213 - DNA, 25 bp, Homo sapien
gtgatgtaaagtacatactgtacgt

SEQ ID NO: 5720214 - DNA, 25 bp, Homo sapien
gcggcggcatcgtcatggcgctggg

SEQ ID NO: 5720215 - DNA, 25 bp, Homo sapien
ggagccagacagcagtgcctcctgt

SEQ ID NO: 5720216 - DNA, 25 bp, Homo sapien
tcaggacagtcagccctgaactcaa

SEQ ID NO: 5720217 - DNA, 25 bp, Homo sapien
tctcacgggctgtgcgtgcctcacc

SEQ ID NO: 5720218 - DNA, 25 bp, Homo sapien
cctgcatcatcctggccgcctgcat

SEQ ID NO: 5720219 - DNA, 25 bp, Homo sapien
gatcccgaaggtcaccaagcacctg

SEQ ID NO: 5720220 - DNA, 25 bp, Homo sapien
gactcctttgtgagaagctgagggc

SEQ ID NO: 5720221 - DNA, 25 bp, Homo sapien
aaacctgccccgaatcacattcacc

SEQ ID NO: 5720222 - DNA, 25 bp, Homo sapien
cggacggctaccaacatgatgtact

SEQ ID NO: 5720223 - DNA, 25 bp, Homo sapien
cctatggaaacagcacagcacctgg

SEQ ID NO: 5720224 - DNA, 25 bp, Homo sapien
gagagtgatcccgaaggtcaccaag

SEQ ID NO: 5720225 - DNA, 25 bp, Homo sapien
gctggctgcaacagcacgaatctca

SEQ ID NO: 5720226 - DNA, 25 bp, Homo sapien
tcttctgccaaccagctgcttggga

SEQ ID NO: 5720227 - DNA, 25 bp, Homo sapien
cctggtggggtggctttctgctctg

SEQ ID NO: 5720228 - DNA, 25 bp, Homo sapien
gtgcttgtctgggtatcttcctggg

SEQ ID NO: 5720229 - DNA, 25 bp, Homo sapien
gatcttccttgtgtccgagtgcgcc

SEQ ID NO: 5720230 - DNA, 25 bp, Homo sapien
ctgcgtcctctacgacaatgtggtc

SEQ ID NO: 5720231 - DNA, 25 bp, Homo sapien
ccttactcttcttctcttccctctt

SEQ ID NO: 5720232 - DNA, 25 bp, Homo sapien
acctggacatcactccggacgaccc

SEQ ID NO: 5720233 - DNA, 25 bp, Homo sapien
agatttttgagtgtggtactctgta

SEQ ID NO: 5720234 - DNA, 25 bp, Homo sapien
tctgtgtgatgtgtatctgcagcct

SEQ ID NO: 5720235 - DNA, 25 bp, Homo sapien
gcaggcctgtgatgaggaccaaaga

SEQ ID NO: 5720236 - DNA, 25 bp, Homo sapien
gacagtcagccctgaactcaagtct

SEQ ID NO: 5720237 - DNA, 25 bp, Homo sapien
ttgacacaagtaacctggacatcac

SEQ ID NO: 5720238 - DNA, 25 bp, Homo sapien
tcaccttcagaagactcctttgtga

SEQ ID NO: 5720239 - DNA, 25 bp, Homo sapien
ggccattcggatggccatgctcgtc

SEQ ID NO: 5720240 - DNA, 25 bp, Homo sapien
cagcagctgagagtgatcccgaagg

SEQ ID NO: 5720241 - DNA, 25 bp, Homo sapien
cattgacacaagtaacctggacatc

SEQ ID NO: 5720242 - DNA, 25 bp, Homo sapien
agtactccaaacagctctcagagta

SEQ ID NO: 5720243 - DNA, 25 bp, Homo sapien
tcagaagactcctttgtgagaagct

SEQ ID NO: 5720244 - DNA, 25 bp, Homo sapien
gagattgcagtggtggctggcttcg

SEQ ID NO: 5720245 - DNA, 25 bp, Homo sapien
ttctgccaaccagctgcttgggatg

SEQ ID NO: 5720246 - DNA, 25 bp, Homo sapien
ttgttgggcttcatccctccacccc

SEQ ID NO: 5720247 - DNA, 25 bp, Homo sapien
caagaggccttcctcactttcctct

SEQ ID NO: 5720248 - DNA, 25 bp, Homo sapien
cacgcgggcaccggccgcgcctgat

SEQ ID NO: 5720249 - DNA, 25 bp, Homo sapien
gctgagaacgcaaccgtggttcctg

SEQ ID NO: 5720250 - DNA, 25 bp, Homo sapien
gcatcgtcatggcgctgggcgcgct

SEQ ID NO: 5720251 - DNA, 25 bp, Homo sapien
acctgctctcaaaccctgtgttcac

SEQ ID NO: 5720252 - DNA, 25 bp, Homo sapien
catcaagatcttccttgtgtccgag

SEQ ID NO: 5720253 - DNA, 25 bp, Homo sapien
cttctcttccctcttgatgtttggg

SEQ ID NO: 5720254 - DNA, 25 bp, Homo sapien
gtctgggtatcttcctgggaggtct

SEQ ID NO: 5720255 - DNA, 25 bp, Homo sapien
gccgggcggttcgtcgggcggcggc

SEQ ID NO: 5720256 - DNA, 25 bp, Homo sapien
aactataaacgctacatcaaaaacc

SEQ ID NO: 5720257 - DNA, 25 bp, Homo sapien
gagtcatgctgacctggtgtgcaaa

SEQ ID NO: 5720258 - DNA, 25 bp, Homo sapien
ccagtcctgggtgccaagaggcctt

SEQ ID NO: 5720259 - DNA, 25 bp, Homo sapien
gtttccacagtccctgcccccgcac

SEQ ID NO: 5720260 - DNA, 25 bp, Homo sapien
tcctcttcctgggctgcgacactgg

SEQ ID NO: 5720261 - DNA, 25 bp, Homo sapien
ggctgagcaccagcacagagtacca

SEQ ID NO: 5720262 - DNA, 25 bp, Homo sapien
tgcccgagttcctgacccaccagta

SEQ ID NO: 5720263 - DNA, 25 bp, Homo sapien
gagcagcagtttaacctcaccacct

SEQ ID NO: 5720264 - DNA, 25 bp, Homo sapien
tcttcattgacacaagtaacctgga

SEQ ID NO: 5720265 - DNA, 25 bp, Homo sapien
ggtgtcctgcttttccaacatcaag

SEQ ID NO: 5720266 - DNA, 25 bp, Homo sapien
cggttcgtcgggcggcggccggagc

SEQ ID NO: 5720267 - DNA, 25 bp, Homo sapien
ggggccattcggatggccatgctcg

SEQ ID NO: 5720268 - DNA, 25 bp, Homo sapien
gtggtcctttgaggccccaagcgca

SEQ ID NO: 5720269 - DNA, 25 bp, Homo sapien
gggggacgaggcgcagaggaacaag

SEQ ID NO: 5720270 - DNA, 25 bp, Homo sapien
cagcaacggggtcctgaggcacccc

SEQ ID NO: 5720271 - DNA, 25 bp, Homo sapien
tgctcattggggcccaggtgctcct

SEQ ID NO: 5720272 - DNA, 25 bp, Homo sapien
cacagacctcgcgggcctcacttag

SEQ ID NO: 5720273 - DNA, 25 bp, Homo sapien
ccgaaagagaatacgagagacccaa

SEQ ID NO: 5720274 - DNA, 25 bp, Homo sapien
agcgtttattttccaaatgagcagt

SEQ ID NO: 5720275 - DNA, 25 bp, Homo sapien
gacacaagtaacctggacatcactc

SEQ ID NO: 5720276 - DNA, 25 bp, Homo sapien
tgagctacttcggggcacgcgggca

SEQ ID NO: 5720277 - DNA, 25 bp, Homo sapien
gccagtgtgtggtcctttgaggccc

SEQ ID NO: 5720278 - DNA, 25 bp, Homo sapien
gtatctgcagcctgatcggtgccat

SEQ ID NO: 5720279 - DNA, 25 bp, Homo sapien
gcttgtctgggtatcttcctgggag

SEQ ID NO: 5720280 - DNA, 25 bp, Homo sapien
agcgtaggttcaacctgcagagcgc

SEQ ID NO: 5720281 - DNA, 25 bp, Homo sapien
gacctcatctgcctcaaccggacgg

SEQ ID NO: 5720282 - DNA, 25 bp, Homo sapien
ggcgggctgagcaccagcacagagt

SEQ ID NO: 5720283 - DNA, 25 bp, Homo sapien
ctgcttttccaacatcaagatcttc

SEQ ID NO: 5720284 - DNA, 25 bp, Homo sapien
tctgctctgcggtgccttactcttc

SEQ ID NO: 5720285 - DNA, 25 bp, Homo sapien
ggctctttctgtaccaaaatctacg

SEQ ID NO: 5720286 - DNA, 25 bp, Homo sapien
aagcacctgctctcaaaccctgtgt

SEQ ID NO: 5720287 - DNA, 25 bp, Homo sapien
ctaccgatacctgtatgtcagcatc

SEQ ID NO: 5720288 - DNA, 25 bp, Homo sapien
ttgagtgtggtactctgtatttttg

SEQ ID NO: 5720289 - DNA, 25 bp, Homo sapien
acctcctctggggatggcttgccga

SEQ ID NO: 5720290 - DNA, 25 bp, Homo sapien
ttcacctgcatcatcctggccgcct

SEQ ID NO: 5720291 - DNA, 25 bp, Homo sapien
cgctgacgtgggtgtgatcgctagc

SEQ ID NO: 5720292 - DNA, 25 bp, Homo sapien
gggtaaaaaccaacctgttgcatag

SEQ ID NO: 5720293 - DNA, 25 bp, Homo sapien
gatcggagcctggtggggtggcttt

SEQ ID NO: 5720294 - DNA, 25 bp, Homo sapien
tctcttccctcttgatgtttgggtt

SEQ ID NO: 5720295 - DNA, 25 bp, Homo sapien
cacgaatctcacgggctgtgcgtgc

SEQ ID NO: 5720296 - DNA, 25 bp, Homo sapien
aatgtggtctaccgatacctgtatg

SEQ ID NO: 5720297 - DNA, 25 bp, Homo sapien
cacctggctcagccctggaccccta

SEQ ID NO: 5720298 - DNA, 25 bp, Homo sapien
agtaccaagacattgagactgagaa

SEQ ID NO: 5720299 - DNA, 25 bp, Homo sapien
atgctcgtcaacctggtgtccactg

SEQ ID NO: 5720300 - DNA, 25 bp, Homo sapien
ctataaacgctacatcaaaaaccac

SEQ ID NO: 5720301 - DNA, 25 bp, Homo sapien
accaccgtccctgctgagaacgcaa

SEQ ID NO: 5720302 - DNA, 25 bp, Homo sapien
gctggcatcgactccacctgcctgt

SEQ ID NO: 5720303 - DNA, 25 bp, Homo sapien
aacagcacagcacctggctcagccc

SEQ ID NO: 5720304 - DNA, 25 bp, Homo sapien
gaaagcgagcaggccatgctctccg

SEQ ID NO: 5720305 - DNA, 25 bp, Homo sapien
gtccctgctgagaacgcaaccgtgg

SEQ ID NO: 5720306 - DNA, 25 bp, Homo sapien
tggggcccaggtgctcctgggcatc

SEQ ID NO: 5720307 - DNA, 25 bp, Homo sapien
gctcctgggcatcggtgctacccct

SEQ ID NO: 5720308 - DNA, 25 bp, Homo sapien
gctaccaacatgatgtacttgctgc

SEQ ID NO: 5720309 - DNA, 25 bp, Homo sapien
ttcctgacccaccagtacaagtacg

SEQ ID NO: 5720310 - DNA, 25 bp, Homo sapien
tgaccaccctggagcgtaggttcaa

SEQ ID NO: 5720311 - DNA, 25 bp, Homo sapien
tgcgacactggccctgtggctgggg

SEQ ID NO: 5720312 - DNA, 25 bp, Homo sapien
gtgtggtactctgtatttttgcagc

SEQ ID NO: 5720313 - DNA, 25 bp, Homo sapien
gcctcctgtttccagcagctgagag

SEQ ID NO: 5720314 - DNA, 25 bp, Homo sapien
gtgcaaattcccttccacccatccc

SEQ ID NO: 5720315 - DNA, 25 bp, Homo sapien
agcctggtggggtggctttctgctc

SEQ ID NO: 5720316 - DNA, 25 bp, Homo sapien
cagcacagagtaccaagacattgag

SEQ ID NO: 5720317 - DNA, 25 bp, Homo sapien
cctcgcgggcctcacttagcgtgct

SEQ ID NO: 5720318 - DNA, 25 bp, Homo sapien
atctacgtggatgcagtcttcattg

SEQ ID NO: 5720319 - DNA, 25 bp, Homo sapien
ccagacagcagtgcctcctgtttcc

SEQ ID NO: 5720320 - DNA, 25 bp, Homo sapien
cctgggggccattcggatggccatg

SEQ ID NO: 5720321 - DNA, 25 bp, Homo sapien
ggggggaaaaagcacatactcaata

SEQ ID NO: 5720322 - DNA, 25 bp, Homo sapien
tcctgcttttccaacatcaagatct

SEQ ID NO: 5720323 - DNA, 25 bp, Homo sapien
acgtctgcgcagccaacggctcggg

SEQ ID NO: 5720324 - DNA, 25 bp, Homo sapien
ttacgctttgggagttctttttctc

SEQ ID NO: 5720325 - DNA, 25 bp, Homo sapien
acagctttaatgaaatcagccgaga

SEQ ID NO: 5720326 - DNA, 25 bp, Homo sapien
gtgagcgtcctgaccaccctggagc

SEQ ID NO: 5720327 - DNA, 25 bp, Homo sapien
ctgcttgctacgtctccttcctctt

SEQ ID NO: 5720328 - DNA, 25 bp, Homo sapien
agtcatcatcctcatcaggacagtc

SEQ ID NO: 5720329 - DNA, 25 bp, Homo sapien
ccacagtccctgcccccgcactcag

SEQ ID NO: 5720330 - DNA, 25 bp, Homo sapien
ggatggccatgctcgtcaacctggt

SEQ ID NO: 5720331 - DNA, 25 bp, Homo sapien
gagtgcgccctgatgctggcgcagg

SEQ ID NO: 5720332 - DNA, 25 bp, Homo sapien
catgctctccgaaagagaatacgag

SEQ ID NO: 5720333 - DNA, 25 bp, Homo sapien
cgacatgctttagaaactcccctct

SEQ ID NO: 5720334 - DNA, 25 bp, Homo sapien
gacattgagactgagaaaacctgcc

SEQ ID NO: 5720335 - DNA, 25 bp, Homo sapien
ggctgcggcggcatcgtcatggcgc

SEQ ID NO: 5720336 - DNA, 25 bp, Homo sapien
atgtacttgctgctcattggggccc

SEQ ID NO: 5720337 - DNA, 25 bp, Homo sapien
cctacctggtgagcgtcctgaccac

SEQ ID NO: 5720338 - DNA, 25 bp, Homo sapien
aggcgcctgcgtcctctacgacaat

SEQ ID NO: 5720339 - DNA, 25 bp, Homo sapien
ttaacctcaccacctcttctgccaa

SEQ ID NO: 5720340 - DNA, 25 bp, Homo sapien
ctgaggcaccccctggagccagaca

SEQ ID NO: 5720341 - DNA, 25 bp, Homo sapien
tctacgacaatgtggtctaccgata

SEQ ID NO: 5720342 - DNA, 25 bp, Homo sapien
ccaaatgagcagtttagaaatatgt

SEQ ID NO: 5720343 - DNA, 25 bp, Homo sapien
gccctgtggctggggttactgttcc

SEQ ID NO: 5720344 - DNA, 25 bp, Homo sapien
taactgtgaatgccaaaccgattcc

SEQ ID NO: 5720345 - DNA, 25 bp, Homo sapien
cttcctcactttcctctgtgtgatg

SEQ ID NO: 5720346 - DNA, 25 bp, Homo sapien
cagtttaacctcaccacctcttctg

SEQ ID NO: 5720347 - DNA, 25 bp, Homo sapien
ccccatgtggattatccagccagtg

SEQ ID NO: 5720348 - DNA, 25 bp, Homo sapien
atcgggaacctggcgctcatcctct

SEQ ID NO: 5720349 - DNA, 25 bp, Homo sapien
gacttatggtcaggagtactccaaa

SEQ ID NO: 5720350 - DNA, 25 bp, Homo sapien
tctccttcctcttcctgggctgcga

SEQ ID NO: 5720351 - DNA, 25 bp, Homo sapien
cctgcccccgcactcagaccccgcc

SEQ ID NO: 5720352 - DNA, 25 bp, Homo sapien
gtgatgaggaccaaagaggtgactt

SEQ ID NO: 5720353 - DNA, 25 bp, Homo sapien
atgctttagaaactcccctcttggg

SEQ ID NO: 5720354 - DNA, 25 bp, Homo sapien
tggtctaccgatacctgtatgtcag

SEQ ID NO: 5720355 - DNA, 25 bp, Homo sapien
tccacctgcctgttctggagcacgt

SEQ ID NO: 5720356 - DNA, 25 bp, Homo sapien
ccctgctgagaacgcaaccgtggtt

SEQ ID NO: 5720357 - DNA, 25 bp, Homo sapien
ttgctggctgcaacagcacgaatct

SEQ ID NO: 5720358 - DNA, 25 bp, Homo sapien
gcgccctgatgctggcgcagggcac

SEQ ID NO: 5720359 - DNA, 25 bp, Homo sapien
gaagccgggcggttcgtcgggcggc

SEQ ID NO: 5720360 - DNA, 25 bp, Homo sapien
ctgggcgtctcctacatcgacgacc

SEQ ID NO: 5720361 - DNA, 25 bp, Homo sapien
ccgcgcctgatcggctgcggcggca

SEQ ID NO: 5720362 - DNA, 25 bp, Homo sapien
atctgcagcctgatcggtgccatgg

SEQ ID NO: 5720363 - DNA, 25 bp, Homo sapien
cctgacccaccagtacaagtacgag

SEQ ID NO: 5720364 - DNA, 25 bp, Homo sapien
ttgcagtggtggctggcttcgctgc

SEQ ID NO: 5720365 - DNA, 25 bp, Homo sapien
ggcgccgagggccgcgacgtctgcg

SEQ ID NO: 5720366 - DNA, 25 bp, Homo sapien
ctccacccctcatcttcggggctgg

SEQ ID NO: 5720367 - DNA, 25 bp, Homo sapien
atggcgctgggcgcgctgctgtcgg

SEQ ID NO: 5720368 - DNA, 25 bp, Homo sapien
gcgtctcctacatcgacgaccacgt

SEQ ID NO: 5720369 - DNA, 25 bp, Homo sapien
gttcctggaaaatgccccagtcctg

SEQ ID NO: 5720370 - DNA, 25 bp, Homo sapien
ggtgaagaagctcagcctgtctgcc

SEQ ID NO: 5720371 - DNA, 25 bp, Homo sapien
cttgatgtttgggtttccacagtcc

SEQ ID NO: 5720372 - DNA, 25 bp, Homo sapien
atataggaatcctgttcacgatgct

SEQ ID NO: 5720373 - DNA, 25 bp, Homo sapien
agaagctgagggcctggccctcttc

SEQ ID NO: 5720374 - DNA, 25 bp, Homo sapien
ctttgaggccccaagcgcaggcctg

SEQ ID NO: 5720375 - DNA, 25 bp, Homo sapien
cctggtgagcgtcctgaccaccctg

SEQ ID NO: 5720376 - DNA, 25 bp, Homo sapien
tgtggtctaccgatacctgtatgtc

SEQ ID NO: 5720377 - DNA, 25 bp, Homo sapien
ttggaccagcctgcgggtttatcct

SEQ ID NO: 5720378 - DNA, 25 bp, Homo sapien
catgctgacctggtgtgcaaattcc

SEQ ID NO: 5720379 - DNA, 25 bp, Homo sapien
gaagctcagcctgtctgccctgggg

SEQ ID NO: 5720380 - DNA, 25 bp, Homo sapien
tgatgtttgggtttccacagtccct

SEQ ID NO: 5720381 - DNA, 25 bp, Homo sapien
agaggtgacttatggtcaggagtac

SEQ ID NO: 5720382 - DNA, 25 bp, Homo sapien
agcacgaatctcacgggctgtgcgt

SEQ ID NO: 5720383 - DNA, 25 bp, Homo sapien
cctgtacaccaccacgtggcagtgc

SEQ ID NO: 5720384 - DNA, 25 bp, Homo sapien
ccaagcgcaggcctgtgatgaggac

SEQ ID NO: 5720385 - DNA, 25 bp, Homo sapien
tggagagaacagccctccaccaccc

SEQ ID NO: 5720386 - DNA, 25 bp, Homo sapien
ctgagggctccaacagctttaatga

SEQ ID NO: 5720387 - DNA, 25 bp, Homo sapien
gccctgatgctggcgcagggcacgg

SEQ ID NO: 5720388 - DNA, 25 bp, Homo sapien
gggaaagcggcagcggcggcggcgg

SEQ ID NO: 5720389 - DNA, 25 bp, Homo sapien
cccgctggatcggagcctggtgggg

SEQ ID NO: 5720390 - DNA, 25 bp, Homo sapien
accagcacagagtaccaagacattg

SEQ ID NO: 5720391 - DNA, 25 bp, Homo sapien
tgtctgcctgctttgctggctgcaa

SEQ ID NO: 5720392 - DNA, 25 bp, Homo sapien
atgcagtcttcattgacacaagtaa

SEQ ID NO: 5720393 - DNA, 25 bp, Homo sapien
gttcgtcgggcggcggccggagcgg

SEQ ID NO: 5720394 - DNA, 25 bp, Homo sapien
gtgctacccctgtgcagcccctggg

SEQ ID NO: 5720395 - DNA, 25 bp, Homo sapien
ccctcttgatgtttgggtttccaca

SEQ ID NO: 5720396 - DNA, 25 bp, Homo sapien
cagcttcgagatcgggaacctggcg

SEQ ID NO: 5720397 - DNA, 25 bp, Homo sapien
gcggcggcggcggcggcggcggcgg

SEQ ID NO: 5720398 - DNA, 25 bp, Homo sapien
tacctgtctgcctgctttgctggct

SEQ ID NO: 5720399 - DNA, 25 bp, Homo sapien
ggggagcaaggcgcctgcgtcctct

SEQ ID NO: 5720400 - DNA, 25 bp, Homo sapien
aagacattgagactgagaaaacctg

SEQ ID NO: 5720401 - DNA, 25 bp, Homo sapien
gctggtatttggaccagcctgcggg

SEQ ID NO: 5720402 - DNA, 25 bp, Homo sapien
gccctgaactcaagtcttacgcttt

SEQ ID NO: 5720403 - DNA, 25 bp, Homo sapien
caagtcttacgctttgggagttctt

SEQ ID NO: 5720404 - DNA, 25 bp, Homo sapien
gcagtggtggctggcttcgctgcct

SEQ ID NO: 5720405 - DNA, 25 bp, Homo sapien
gatccgctggggcgccgagggccgc

SEQ ID NO: 5720406 - DNA, 25 bp, Homo sapien
tggggatggcttgccgacatgcttt

SEQ ID NO: 5720407 - DNA, 25 bp, Homo sapien
agatcgggaacctggcgctcatcct

SEQ ID NO: 5720408 - DNA, 25 bp, Homo sapien
cagcctgtctgccctgggggccatt

SEQ ID NO: 5720409 - DNA, 25 bp, Homo sapien
ctgacgtgggtgtgatcgctagcag

SEQ ID NO: 5720410 - DNA, 25 bp, Homo sapien
ttcctcttcctggagagaacagccc

SEQ ID NO: 5720411 - DNA, 25 bp, Homo sapien
ttggtgaagaagctcagcctgtctg

SEQ ID NO: 5720412 - DNA, 25 bp, Homo sapien
agttcctgacccaccagtacaagta

SEQ ID NO: 5720413 - DNA, 25 bp, Homo sapien
gtgccatggcacagacaccctcagt

SEQ ID NO: 5720414 - DNA, 25 bp, Homo sapien
tgttcacgatgctggtatttggacc

SEQ ID NO: 5720415 - DNA, 25 bp, Homo sapien
ctggcgcagggcacggtgggcgcct

SEQ ID NO: 5720416 - DNA, 25 bp, Homo sapien
ccccctggagccagacagcagtgcc

SEQ ID NO: 5720417 - DNA, 25 bp, Homo sapien
aaaccctgtgttcacctgcatcatc

SEQ ID NO: 5720418 - DNA, 25 bp, Homo sapien
acatactgtacgtttgctgaaaatt

SEQ ID NO: 5720419 - DNA, 25 bp, Homo sapien
ctgtaccaaaatctacgtggatgca

SEQ ID NO: 5720420 - DNA, 25 bp, Homo sapien
gagcgggaaagcggcagcggcggcg

SEQ ID NO: 5720421 - DNA, 25 bp, Homo sapien
tcttcgtgagctacttcggggcacg

SEQ ID NO: 5720422 - DNA, 25 bp, Homo sapien
cagcatcgccatcgcgctcaaatcc

SEQ ID NO: 5720423 - DNA, 25 bp, Homo sapien
cgggcaccggccgcgcctgatcggc

SEQ ID NO: 5720424 - DNA, 25 bp, Homo sapien
actcttcttctcttccctcttgatg

SEQ ID NO: 5720425 - DNA, 25 bp, Homo sapien
cagcggcggcggcggcggcggcggc

SEQ ID NO: 5720426 - DNA, 25 bp, Homo sapien
cgccatcgcgctcaaatccttcgcc

SEQ ID NO: 5720427 - DNA, 25 bp, Homo sapien
gggctccaacagctttaatgaaatc

SEQ ID NO: 5720428 - DNA, 25 bp, Homo sapien
acccctactcgccctgcaataataa

SEQ ID NO: 5720429 - DNA, 25 bp, Homo sapien
gagggccgcgacgtctgcgcagcca

SEQ ID NO: 5720430 - DNA, 25 bp, Homo sapien
aggcatctttcctgggtctctaaag

SEQ ID NO: 5720431 - DNA, 25 bp, Homo sapien
ccaaagaggtgacttatggtcagga

SEQ ID NO: 5720432 - DNA, 25 bp, Homo sapien
actccacctgcctgttctggagcac

SEQ ID NO: 5720433 - DNA, 25 bp, Homo sapien
cctgcctgttctggagcacgttctg

SEQ ID NO: 5720434 - DNA, 25 bp, Homo sapien
gtttgggtttccacagtccctgccc

SEQ ID NO: 5720435 - DNA, 25 bp, Homo sapien
gttactgttccctatggaaacagca

SEQ ID NO: 5720436 - DNA, 25 bp, Homo sapien
cgtgcctcaccaccgtccctgctga

SEQ ID NO: 5720437 - DNA, 25 bp, Homo sapien
cctgcatggagattgcagtggtggc

SEQ ID NO: 5720438 - DNA, 25 bp, Homo sapien
tgccttactcttcttctcttccctc

SEQ ID NO: 5720439 - DNA, 25 bp, Homo sapien
gctgagggcctggccctcttcctct

SEQ ID NO: 5720440 - DNA, 25 bp, Homo sapien
ctgaaaattatattaaaagcactat

SEQ ID NO: 5720441 - DNA, 25 bp, Homo sapien
cagtgcctcctgtttccagcagctg

SEQ ID NO: 5720442 - DNA, 25 bp, Homo sapien
tcctggaaaatgccccagtcctggg

SEQ ID NO: 5720443 - DNA, 25 bp, Homo sapien
aggtcaccaagcacctgctctcaaa

SEQ ID NO: 5720444 - DNA, 25 bp, Homo sapien
ttcctggagagaacagccctccacc

SEQ ID NO: 5720445 - DNA, 25 bp, Homo sapien
ctcattggggcccaggtgctcctgg

SEQ ID NO: 5720446 - DNA, 25 bp, Homo sapien
gacgaccacgtgcggaggaaggact

SEQ ID NO: 5720447 - DNA, 25 bp, Homo sapien
gcgtcctctacgacaatgtggtcta

SEQ ID NO: 5720448 - DNA, 25 bp, Homo sapien
ccatcgcgctcaaatccttcgcctt

SEQ ID NO: 5720449 - DNA, 25 bp, Homo sapien
cgcctgcatggagattgcagtggtg

SEQ ID NO: 5720450 - DNA, 25 bp, Homo sapien
gagcagtttagaaatatgtgatgta

SEQ ID NO: 5720451 - DNA, 25 bp, Homo sapien
tggtatttggaccagcctgcgggtt

SEQ ID NO: 5720452 - DNA, 25 bp, Homo sapien
cctcagtcatcatcctcatcaggac

SEQ ID NO: 5720453 - DNA, 25 bp, Homo sapien
tttattttccaaatgagcagtttag

SEQ ID NO: 5720454 - DNA, 25 bp, Homo sapien
gtgtgcttgtctgggtatcttcctg

SEQ ID NO: 5720455 - DNA, 25 bp, Homo sapien
cgagatcgggaacctggcgctcatc

SEQ ID NO: 5720456 - DNA, 25 bp, Homo sapien
tcatggcgctgggcgcgctgctgtc

SEQ ID NO: 5720457 - DNA, 25 bp, Homo sapien
ctcactttcctctgtgtgatgtgta

SEQ ID NO: 5720458 - DNA, 25 bp, Homo sapien
tgtgtgatgtgtatctgcagcctga

SEQ ID NO: 5720459 - DNA, 25 bp, Homo sapien
aacctggcgctcatcctcttcgtga

SEQ ID NO: 5720460 - DNA, 25 bp, Homo sapien
gagtgatcccgaaggtcaccaagca

SEQ ID NO: 5720461 - DNA, 25 bp, Homo sapien
agcagtgcctcctgtttccagcagc

SEQ ID NO: 5720462 - DNA, 25 bp, Homo sapien
ctacctcctctggggatggcttgcc

SEQ ID NO: 5720463 - DNA, 25 bp, Homo sapien
agctttaatgaaatcagccgagagg

SEQ ID NO: 5720464 - DNA, 25 bp, Homo sapien
ctagcagcttcgagatcgggaacct

SEQ ID NO: 5720465 - DNA, 25 bp, Homo sapien
gagcgtcctgaccaccctggagcgt

SEQ ID NO: 5720466 - DNA, 25 bp, Homo sapien
ccgagggtccccatgtggattatcc

SEQ ID NO: 5720467 - DNA, 25 bp, Homo sapien
tgtacgtttgctgaaaattatatta

SEQ ID NO: 5720468 - DNA, 25 bp, Homo sapien
acgacccccgctggatcggagcctg

SEQ ID NO: 5720469 - DNA, 25 bp, Homo sapien
atcgctagcagcttcgagatcggga

SEQ ID NO: 5720470 - DNA, 25 bp, Homo sapien
gtccgagaacccgagggtccccatg

SEQ ID NO: 5720471 - DNA, 25 bp, Homo sapien
cgccgagggccgcgacgtctgcgca

SEQ ID NO: 5720472 - DNA, 25 bp, Homo sapien
ggtgtgatcgctagcagcttcgaga

SEQ ID NO: 5720473 - DNA, 25 bp, Homo sapien
tgtccactgcttgctacgtctcctt

SEQ ID NO: 5720474 - DNA, 25 bp, Homo sapien
gcctcaaccggacggctaccaacat

SEQ ID NO: 5720475 - DNA, 25 bp, Homo sapien
aggaccaaagaggtgacttatggtc

SEQ ID NO: 5720476 - DNA, 25 bp, Homo sapien
ctgatcggctgcggcggcatcgtca

SEQ ID NO: 5720477 - DNA, 25 bp, Homo sapien
gggaggtcttttggtgaagaagctc

SEQ ID NO: 5720478 - DNA, 25 bp, Homo sapien
tactccaaacagctctcagagtagg

SEQ ID NO: 5720479 - DNA, 25 bp, Homo sapien
tcatctgcctcaaccggacggctac

SEQ ID NO: 5720480 - DNA, 25 bp, Homo sapien
gggctgcgacactggccctgtggct

SEQ ID NO: 5720481 - DNA, 25 bp, Homo sapien
cgtgagctacttcggggcacgcggg

SEQ ID NO: 5720482 - DNA, 25 bp, Homo sapien
gggtttatcctgggctctttctgta

SEQ ID NO: 5720483 - DNA, 25 bp, Homo sapien
tgcctttttggggaagtacctggag

SEQ ID NO: 5720484 - DNA, 25 bp, Homo sapien
gaaagcggcagcggcggcggcggcg

SEQ ID NO: 5720485 - DNA, 25 bp, Homo sapien
acatgctttagaaactcccctcttg

SEQ ID NO: 5720486 - DNA, 25 bp, Homo sapien
atcctggccgcctgcatggagattg

SEQ ID NO: 5720487 - DNA, 25 bp, Homo sapien
tcttccttgtgtccgagtgcgccct

SEQ ID NO: 5720488 - DNA, 25 bp, Homo sapien
cccagcaacggggtcctgaggcacc

SEQ ID NO: 5720489 - DNA, 25 bp, Homo sapien
tgggatgactgcgatcccgtgtgct

SEQ ID NO: 5720490 - DNA, 25 bp, Homo sapien
ttgctacgtctccttcctcttcctg

SEQ ID NO: 5720491 - DNA, 25 bp, Homo sapien
caataataactgtgaatgccaaacc

SEQ ID NO: 5720492 - DNA, 25 bp, Homo sapien
tctgcctgctttgctggctgcaaca

SEQ ID NO: 5720493 - DNA, 25 bp, Homo sapien
ttcttctcttccctcttgatgtttg

SEQ ID NO: 5720494 - DNA, 25 bp, Homo sapien
actccagtgtgtggggcagatggca

SEQ ID NO: 5720495 - DNA, 25 bp, Homo sapien
aaaccaacctgttgcatagaatgga

SEQ ID NO: 5720496 - DNA, 25 bp, Homo sapien
ttcattgacacaagtaacctggaca

SEQ ID NO: 5720497 - DNA, 25 bp, Homo sapien
gcagctgagagtgatcccgaaggtc

SEQ ID NO: 5720498 - DNA, 25 bp, Homo sapien
tcctttgaggccccaagcgcaggcc

SEQ ID NO: 5720499 - DNA, 25 bp, Homo sapien
tagaaactcccctcttgggaatgct

SEQ ID NO: 5720500 - DNA, 25 bp, Homo sapien
accacccacagacctcgcgggcctc

SEQ ID NO: 5720501 - DNA, 25 bp, Homo sapien
ggcagatggcatcacctacctgtct

SEQ ID NO: 5720502 - DNA, 25 bp, Homo sapien
aagactcctttgtgagaagctgagg

SEQ ID NO: 5720503 - DNA, 25 bp, Homo sapien
agaagactcctttgtgagaagctga

SEQ ID NO: 5720504 - DNA, 25 bp, Homo sapien
tacgacaatgtggtctaccgatacc

SEQ ID NO: 5720505 - DNA, 25 bp, Homo sapien
ttccacagtccctgcccccgcactc

SEQ ID NO: 5720506 - DNA, 25 bp, Homo sapien
acgagagacccaagcccagcaacgg

SEQ ID NO: 5720507 - DNA, 25 bp, Homo sapien
cctgaactcaagtcttacgctttgg

SEQ ID NO: 5720508 - DNA, 25 bp, Homo sapien
ccatccctctacctcctctggggat

SEQ ID NO: 5720509 - DNA, 25 bp, Homo sapien
atcggtgctacccctgtgcagcccc

SEQ ID NO: 5720510 - DNA, 25 bp, Homo sapien
gtatgtcagcatcgccatcgcgctc

SEQ ID NO: 5720511 - DNA, 25 bp, Homo sapien
cgactccacctgcctgttctggagc

SEQ ID NO: 5720512 - DNA, 25 bp, Homo sapien
ccctccacccctcatcttcggggct

SEQ ID NO: 5720513 - DNA, 25 bp, Homo sapien
aaacgctacatcaaaaaccacgagg

SEQ ID NO: 5720514 - DNA, 25 bp, Homo sapien
ttcacgatgctggtatttggaccag

SEQ ID NO: 5720515 - DNA, 25 bp, Homo sapien
gtttgttgggcttcatccctccacc

SEQ ID NO: 5720516 - DNA, 25 bp, Homo sapien
tcgacgaccacgtgcggaggaagga

SEQ ID NO: 5720517 - DNA, 25 bp, Homo sapien
gtgctcctgggcatcggtgctaccc

SEQ ID NO: 5720518 - DNA, 25 bp, Homo sapien
ggaaaaagcacatactcaatagatt

SEQ ID NO: 5720519 - DNA, 25 bp, Homo sapien
cttcctcttcctgggctgcgacact

SEQ ID NO: 5720520 - DNA, 25 bp, Homo sapien
accagtacaagtacgaggcgggcga

SEQ ID NO: 5720521 - DNA, 25 bp, Homo sapien
atatgtgatgtaaagtacatactgt

SEQ ID NO: 5720522 - DNA, 25 bp, Homo sapien
aggccttcctcactttcctctgtgt

SEQ ID NO: 5720523 - DNA, 25 bp, Homo sapien
atgagcagtttagaaatatgtgatg

SEQ ID NO: 5720524 - DNA, 25 bp, Homo sapien
ctcctacatcgacgaccacgtgcgg

SEQ ID NO: 5720525 - DNA, 25 bp, Homo sapien
gcgctgctgtcggcgctgcccgagt

SEQ ID NO: 5720526 - DNA, 25 bp, Homo sapien
ttttgagtgtggtactctgtatttt

SEQ ID NO: 5720527 - DNA, 25 bp, Homo sapien
tgagaagctgagggcctggccctct

SEQ ID NO: 5720528 - DNA, 25 bp, Homo sapien
tgggcttcatccctccacccctcat

SEQ ID NO: 5720529 - DNA, 25 bp, Homo sapien
gcatcacctacctgtctgcctgctt

SEQ ID NO: 5720530 - DNA, 25 bp, Homo sapien
gtatcttcctgggaggtcttttggt

SEQ ID NO: 5720531 - DNA, 25 bp, Homo sapien
accgattccttcactccagtgtgtg

SEQ ID NO: 5720532 - DNA, 25 bp, Homo sapien
ggtgggcgcctacctggtgagcgtc

SEQ ID NO: 5720533 - DNA, 25 bp, Homo sapien
gcttcgagatcgggaacctggcgct

SEQ ID NO: 5720534 - DNA, 25 bp, Homo sapien
tgaagaagctcagcctgtctgccct

SEQ ID NO: 5720535 - DNA, 25 bp, Homo sapien
aacatgatgtacttgctgctcattg

SEQ ID NO: 5720536 - DNA, 25 bp, Homo sapien
agaaaaagaaggtgtcctgcttttc

SEQ ID NO: 5720537 - DNA, 25 bp, Homo sapien
gctacccctgtgcagcccctgggcg

SEQ ID NO: 5720538 - DNA, 25 bp, Homo sapien
gggtttccacagtccctgcccccgc

SEQ ID NO: 5720539 - DNA, 25 bp, Homo sapien
atcctcttcgtgagctacttcgggg

SEQ ID NO: 5720540 - DNA, 25 bp, Homo sapien
cctctacgacaatgtggtctaccga

SEQ ID NO: 5720541 - DNA, 25 bp, Homo sapien
aatccttcgccttcatcctgtacac

SEQ ID NO: 5720542 - DNA, 25 bp, Homo sapien
caacctggtgtccactgcttgctac

SEQ ID NO: 5720543 - DNA, 25 bp, Homo sapien
gctccaacagctttaatgaaatcag

SEQ ID NO: 5720544 - DNA, 25 bp, Homo sapien
gtcatgctgacctggtgtgcaaatt

SEQ ID NO: 5720545 - DNA, 25 bp, Homo sapien
ctgcggtgccttactcttcttctct

SEQ ID NO: 5720546 - DNA, 25 bp, Homo sapien
ccacccatccctctacctcctctgg

SEQ ID NO: 5720547 - DNA, 25 bp, Homo sapien
atcctgtacaccaccacgtggcagt

SEQ ID NO: 5720548 - DNA, 25 bp, Homo sapien
tgcttgggatgactgcgatcccgtg

SEQ ID NO: 5720549 - DNA, 25 bp, Homo sapien
tctggggatggcttgccgacatgct

SEQ ID NO: 5720550 - DNA, 25 bp, Homo sapien
gtctcctacatcgacgaccacgtgc

SEQ ID NO: 5720551 - DNA, 25 bp, Homo sapien
gctgcgacactggccctgtggctgg

SEQ ID NO: 5720552 - DNA, 25 bp, Homo sapien
cctttttggggaagtacctggagca

SEQ ID NO: 5720553 - DNA, 25 bp, Homo sapien
cgctcaaatccttcgccttcatcct

SEQ ID NO: 5720554 - DNA, 25 bp, Homo sapien
ttcctgggtctctaaagagtcatgc

SEQ ID NO: 5720555 - DNA, 25 bp, Homo sapien
ctgggctgcgacactggccctgtgg

SEQ ID NO: 5720556 - DNA, 25 bp, Homo sapien
gtggattatccagccagtgtgtggt

SEQ ID NO: 5720557 - DNA, 25 bp, Homo sapien
ctggacccctactcgccctgcaata

SEQ ID NO: 5720558 - DNA, 25 bp, Homo sapien
gaaaaactataaacgctacatcaaa

SEQ ID NO: 5720559 - DNA, 25 bp, Homo sapien
tcttttggtgaagaagctcagcctg

SEQ ID NO: 5720560 - DNA, 25 bp, Homo sapien
gcaccagcacagagtaccaagacat

SEQ ID NO: 5720561 - DNA, 25 bp, Homo sapien
gcgcagaggaacaagaaaaagaaaa

SEQ ID NO: 5720562 - DNA, 25 bp, Homo sapien
ctccaccacccacagacctcgcggg

SEQ ID NO: 5720563 - DNA, 25 bp, Homo sapien
gtaaaaaccaacctgttgcatagaa

SEQ ID NO: 5720564 - DNA, 25 bp, Homo sapien
tcgtttgttgggcttcatccctcca

SEQ ID NO: 5720565 - DNA, 25 bp, Homo sapien
aacatcaagatcttccttgtgtccg

SEQ ID NO: 5720566 - DNA, 25 bp, Homo sapien
actgtacgtttgctgaaaattatat

SEQ ID NO: 5720567 - DNA, 25 bp, Homo sapien
atcctgggctctttctgtaccaaaa

SEQ ID NO: 5720568 - DNA, 25 bp, Homo sapien
cgcgacgtctgcgcagccaacggct

SEQ ID NO: 5720569 - DNA, 25 bp, Homo sapien
cttcctgggctgcgacactggccct

SEQ ID NO: 5720570 - DNA, 25 bp, Homo sapien
accacgtgcggaggaaggactcctc

SEQ ID NO: 5720571 - DNA, 25 bp, Homo sapien
tacaccaccacgtggcagtgcctga

SEQ ID NO: 5720572 - DNA, 25 bp, Homo sapien
gcagccaacggctcgggcggcgacg

SEQ ID NO: 5720573 - DNA, 25 bp, Homo sapien
cgatacctgtatgtcagcatcgcca

SEQ ID NO: 5720574 - DNA, 25 bp, Homo sapien
cctacatcgacgaccacgtgcggag

SEQ ID NO: 5720575 - DNA, 25 bp, Homo sapien
gtcagccctgaactcaagtcttacg

SEQ ID NO: 5720576 - DNA, 25 bp, Homo sapien
tccaacagctttaatgaaatcagcc

SEQ ID NO: 5720577 - DNA, 25 bp, Homo sapien
ccccgacctcatctgcctcaaccgg

SEQ ID NO: 5720578 - DNA, 25 bp, Homo sapien
ctctatataggaatcctgttcacga

SEQ ID NO: 5720579 - DNA, 25 bp, Homo sapien
cctggagagaacagccctccaccac

SEQ ID NO: 5720580 - DNA, 25 bp, Homo sapien
aaaaagaaggtgtcctgcttttcca

SEQ ID NO: 5720581 - DNA, 25 bp, Homo sapien
tcttacgctttgggagttctttttc

SEQ ID NO: 5720582 - DNA, 25 bp, Homo sapien
aggtgctcctgggcatcggtgctac

SEQ ID NO: 5720583 - DNA, 25 bp, Homo sapien
tgctgtcggcgctgcccgagttcct

SEQ ID NO: 5720584 - DNA, 25 bp, Homo sapien
gggcccaggtgctcctgggcatcgg

SEQ ID NO: 5720585 - DNA, 25 bp, Homo sapien
aagtacgaggcgggcgagatccgct

SEQ ID NO: 5720586 - DNA, 25 bp, Homo sapien
ctgtggggagcaaggcgcctgcgtc

SEQ ID NO: 5720587 - DNA, 25 bp, Homo sapien
tcggatggccatgctcgtcaacctg

SEQ ID NO: 5720588 - DNA, 25 bp, Homo sapien
cctcttcgtgagctacttcggggca

SEQ ID NO: 5720589 - DNA, 25 bp, Homo sapien
cccccgcactcagaccccgccatgg

SEQ ID NO: 5720590 - DNA, 25 bp, Homo sapien
tgaggaaaaactataaacgctacat

SEQ ID NO: 5720591 - DNA, 25 bp, Homo sapien
gcatcgccatcgcgctcaaatcctt

SEQ ID NO: 5720592 - DNA, 25 bp, Homo sapien
ggcggcatcgtcatggcgctgggcg

SEQ ID NO: 5720593 - DNA, 25 bp, Homo sapien
ctcacttagcgtgctcctccctgtc

SEQ ID NO: 5720594 - DNA, 25 bp, Homo sapien
gagggtaaaaaccaacctgttgcat

SEQ ID NO: 5720595 - DNA, 25 bp, Homo sapien
atgctcctctgactgagggctccaa

SEQ ID NO: 5720596 - DNA, 25 bp, Homo sapien
ctctcagagtaggcatctttcctgg

SEQ ID NO: 5720597 - DNA, 25 bp, Homo sapien
ttctgtggggagcaaggcgcctgcg

SEQ ID NO: 5720598 - DNA, 25 bp, Homo sapien
accgtggttcctggaaaatgcccca

SEQ ID NO: 5720599 - DNA, 25 bp, Homo sapien
ctgggaggtcttttggtgaagaagc

SEQ ID NO: 5720600 - DNA, 25 bp, Homo sapien
tttccagcagctgagagtgatcccg

SEQ ID NO: 5720601 - DNA, 25 bp, Homo sapien
gctacatcaaaaaccacgagggcgg

SEQ ID NO: 5720602 - DNA, 25 bp, Homo sapien
gcagtcttcattgacacaagtaacc

SEQ ID NO: 5720603 - DNA, 25 bp, Homo sapien
ggttcaacctgcagagcgctgacgt

SEQ ID NO: 5720604 - DNA, 25 bp, Homo sapien
cggcgctgcccgagttcctgaccca

SEQ ID NO: 5720605 - DNA, 25 bp, Homo sapien
aggcctgtgatgaggaccaaagagg

SEQ ID NO: 5720606 - DNA, 25 bp, Homo sapien
ttccaaatgagcagtttagaaatat

SEQ ID NO: 5720607 - DNA, 25 bp, Homo sapien
ggggtcctgaggcaccccctggagc

SEQ ID NO: 5720608 - DNA, 25 bp, Homo sapien
gagcaccagcacagagtaccaagac

SEQ ID NO: 5720609 - DNA, 25 bp, Homo sapien
taaagtacatactgtacgtttgctg

SEQ ID NO: 5720610 - DNA, 25 bp, Homo sapien
gtgctcctccctgtccgagaacccg

SEQ ID NO: 5720611 - DNA, 25 bp, Homo sapien
tgcaggggaagaagccgggcggttc

SEQ ID NO: 5720612 - DNA, 25 bp, Homo sapien
cttcactccagtgtgtggggcagat

SEQ ID NO: 5720613 - DNA, 25 bp, Homo sapien
aaaccacgagggcgggctgagcacc

SEQ ID NO: 5720614 - DNA, 25 bp, Homo sapien
cccgagttcctgacccaccagtaca

SEQ ID NO: 5720615 - DNA, 25 bp, Homo sapien
aatgaaatcagccgagagggtaaaa

SEQ ID NO: 5720616 - DNA, 25 bp, Homo sapien
gccctgggggccattcggatggcca

SEQ ID NO: 5720617 - DNA, 25 bp, Homo sapien
tccctgcccccgcactcagaccccg

SEQ ID NO: 5720618 - DNA, 25 bp, Homo sapien
ccaacatcaagatcttccttgtgtc

SEQ ID NO: 5720619 - DNA, 25 bp, Homo sapien
tgcatggagattgcagtggtggctg

SEQ ID NO: 5720620 - DNA, 25 bp, Homo sapien
atcacctacctgtctgcctgctttg

SEQ ID NO: 5720621 - DNA, 25 bp, Homo sapien
ggcaccggccgcgcctgatcggctg

SEQ ID NO: 5720622 - DNA, 25 bp, Homo sapien
tcctcatcaggacagtcagccctga

SEQ ID NO: 5720623 - DNA, 25 bp, Homo sapien
cctgttctggagcacgttctgtggg

SEQ ID NO: 5720624 - DNA, 25 bp, Homo sapien
ttcaacctgcagagcgctgacgtgg

SEQ ID NO: 5720625 - DNA, 25 bp, Homo sapien
tgtcctgcttttccaacatcaagat

SEQ ID NO: 5720626 - DNA, 25 bp, Homo sapien
tgatcgctagcagcttcgagatcgg

SEQ ID NO: 5720627 - DNA, 25 bp, Homo sapien
agagcgctgacgtgggtgtgatcgc

SEQ ID NO: 5720628 - DNA, 25 bp, Homo sapien
aacctcaccacctcttctgccaacc

SEQ ID NO: 5720629 - DNA, 25 bp, Homo sapien
ctcagaccccgccatggaaagcgag

SEQ ID NO: 5720630 - DNA, 25 bp, Homo sapien
aaagaggtgacttatggtcaggagt

SEQ ID NO: 5720631 - DNA, 25 bp, Homo sapien
ccctcatcttcggggctggcatcga

SEQ ID NO: 5720632 - DNA, 25 bp, Homo sapien
cattgagactgagaaaacctgcccc

SEQ ID NO: 5720633 - DNA, 25 bp, Homo sapien
ttttccaaatgagcagtttagaaat

SEQ ID NO: 5720634 - DNA, 25 bp, Homo sapien
ccaccacccacagacctcgcgggcc

SEQ ID NO: 5720635 - DNA, 25 bp, Homo sapien
agctacttcggggcacgcgggcacc

SEQ ID NO: 5720636 - DNA, 25 bp, Homo sapien
cagaccccgccatggaaagcgagca

SEQ ID NO: 5720637 - DNA, 25 bp, Homo sapien
gtgtgtggggcagatggcatcacct

SEQ ID NO: 5720638 - DNA, 25 bp, Homo sapien
ggtgccttactcttcttctcttccc

SEQ ID NO: 5720639 - DNA, 25 bp, Homo sapien
atcgtcatggcgctgggcgcgctgc

SEQ ID NO: 5720640 - DNA, 25 bp, Homo sapien
tggagattgcagtggtggctggctt

SEQ ID NO: 5720641 - DNA, 25 bp, Homo sapien
ctttgctggctgcaacagcacgaat

SEQ ID NO: 5720642 - DNA, 25 bp, Homo sapien
atccctctacctcctctggggatgg

SEQ ID NO: 5720643 - DNA, 25 bp, Homo sapien
cgtctccttcctcttcctgggctgc

SEQ ID NO: 5720644 - DNA, 25 bp, Homo sapien
gagaacccgagggtccccatgtgga

SEQ ID NO: 5720645 - DNA, 25 bp, Homo sapien
ctactcgccctgcaataataactgt

SEQ ID NO: 5720646 - DNA, 25 bp, Homo sapien
gggcgcgctgctgtcggcgctgccc

SEQ ID NO: 5720647 - DNA, 25 bp, Homo sapien
cccaagcccagcaacggggtcctga

SEQ ID NO: 5720648 - DNA, 25 bp, Homo sapien
gggtccccatgtggattatccagcc

SEQ ID NO: 5720649 - DNA, 25 bp, Homo sapien
cttcagaagactcctttgtgagaag

SEQ ID NO: 5720650 - DNA, 25 bp, Homo sapien
cctggtgtgcaaattcccttccacc

SEQ ID NO: 5720651 - DNA, 25 bp, Homo sapien
ggggcagatggcatcacctacctgt

SEQ ID NO: 5720652 - DNA, 25 bp, Homo sapien
gatgtaaagtacatactgtacgttt

SEQ ID NO: 5720653 - DNA, 25 bp, Homo sapien
caacctgcagagcgctgacgtgggt

SEQ ID NO: 5720654 - DNA, 25 bp, Homo sapien
ctggagcacgttctgtggggagcaa

SEQ ID NO: 5720655 - DNA, 25 bp, Homo sapien
tcaccacctcttctgccaaccagct

SEQ ID NO: 5720656 - DNA, 25 bp, Homo sapien
accttcagaagactcctttgtgaga

SEQ ID NO: 5720657 - DNA, 25 bp, Homo sapien
gtggctggcttcgctgcctttttgg

SEQ ID NO: 5720658 - DNA, 25 bp, Homo sapien
gaaggtcaccaagcacctgctctca

SEQ ID NO: 5720659 - DNA, 25 bp, Homo sapien
ctcatcttcggggctggcatcgact

SEQ ID NO: 5720660 - DNA, 25 bp, Homo sapien
gccatggcacagacaccctcagtca

SEQ ID NO: 5720661 - DNA, 25 bp, Homo sapien
tacatcaaaaaccacgagggcgggc

SEQ ID NO: 5720662 - DNA, 25 bp, Homo sapien
atttttgagtgtggtactctgtatt

SEQ ID NO: 5720663 - DNA, 25 bp, Homo sapien
taccaagacattgagactgagaaaa

SEQ ID NO: 5720664 - DNA, 25 bp, Homo sapien
gctcagccctggacccctactcgcc

SEQ ID NO: 5720665 - DNA, 25 bp, Homo sapien
cctacctgtctgcctgctttgctgg

SEQ ID NO: 5720666 - DNA, 25 bp, Homo sapien
cgaatcacattcaccttcagaagac

SEQ ID NO: 5720667 - DNA, 25 bp, Homo sapien
accctcagtcatcatcctcatcagg

SEQ ID NO: 5720668 - DNA, 25 bp, Homo sapien
aagatcttccttgtgtccgagtgcg

SEQ ID NO: 5720669 - DNA, 25 bp, Homo sapien
tcggagcctggtggggtggctttct

SEQ ID NO: 5720670 - DNA, 25 bp, Homo sapien
gtccgagtgcgccctgatgctggcg

SEQ ID NO: 5720671 - DNA, 25 bp, Homo sapien
cctcaccaccgtccctgctgagaac

SEQ ID NO: 5720672 - DNA, 25 bp, Homo sapien
ggaacctggcgctcatcctcttcgt

SEQ ID NO: 5720673 - DNA, 25 bp, Homo sapien
tacctggagcagcagtttaacctca

SEQ ID NO: 5720674 - DNA, 25 bp, Homo sapien
ggagcaaggcgcctgcgtcctctac

SEQ ID NO: 5720675 - DNA, 25 bp, Homo sapien
ctccctgtccgagaacccgagggtc

SEQ ID NO: 5720676 - DNA, 25 bp, Homo sapien
ggtcttttggtgaagaagctcagcc

SEQ ID NO: 5720677 - DNA, 25 bp, Homo sapien
caatagatttttgagtgtggtactc

SEQ ID NO: 5720678 - DNA, 25 bp, Homo sapien
tcgtcaacctggtgtccactgcttg

SEQ ID NO: 5720679 - DNA, 25 bp, Homo sapien
ggcacgcgggcaccggccgcgcctg

SEQ ID NO: 5720680 - DNA, 25 bp, Homo sapien
ggactcctcgctctatataggaatc

SEQ ID NO: 5720681 - DNA, 25 bp, Homo sapien
tgcagcccctgggcgtctcctacat

SEQ ID NO: 5720682 - DNA, 25 bp, Homo sapien
gcaacggggtcctgaggcaccccct

SEQ ID NO: 5720683 - DNA, 25 bp, Homo sapien
tgcatcatcctggccgcctgcatgg

SEQ ID NO: 5720684 - DNA, 25 bp, Homo sapien
ctggagccagacagcagtgcctcct

SEQ ID NO: 5720685 - DNA, 25 bp, Homo sapien
aaatatgtgatgtaaagtacatact

SEQ ID NO: 5720686 - DNA, 25 bp, Homo sapien
ctgctctcaaaccctgtgttcacct

SEQ ID NO: 5720687 - DNA, 25 bp, Homo sapien
gcatctttcctgggtctctaaagag

SEQ ID NO: 5720688 - DNA, 25 bp, Homo sapien
aggtgacttatggtcaggagtactc

SEQ ID NO: 5720689 - DNA, 25 bp, Homo sapien
gcctgatcggctgcggcggcatcgt

SEQ ID NO: 5720690 - DNA, 25 bp, Homo sapien
ttttggtgaagaagctcagcctgtc

SEQ ID NO: 5720691 - DNA, 25 bp, Homo sapien
cactttcctctgtgtgatgtgtatc

SEQ ID NO: 5720692 - DNA, 25 bp, Homo sapien
ccatgctcgtcaacctggtgtccac

SEQ ID NO: 5720693 - DNA, 25 bp, Homo sapien
gcgagatccgctggggcgccgaggg

SEQ ID NO: 5720694 - DNA, 25 bp, Homo sapien
tactgttccctatggaaacagcaca

SEQ ID NO: 5720695 - DNA, 25 bp, Homo sapien
cccccgctggatcggagcctggtgg

SEQ ID NO: 5720696 - DNA, 25 bp, Homo sapien
agctctcagagtaggcatctttcct

SEQ ID NO: 5720697 - DNA, 25 bp, Homo sapien
agtcctgggtgccaagaggccttcc

SEQ ID NO: 5720698 - DNA, 25 bp, Homo sapien
tcctcgctctatataggaatcctgt

SEQ ID NO: 5720699 - DNA, 25 bp, Homo sapien
agaacgcaaccgtggttcctggaaa

SEQ ID NO: 5720700 - DNA, 25 bp, Homo sapien
tcaagatcttccttgtgtccgagtg

SEQ ID NO: 5720701 - DNA, 25 bp, Homo sapien
ttactcttcttctcttccctcttga

SEQ ID NO: 5720702 - DNA, 25 bp, Homo sapien
accaccctggagcgtaggttcaacc

SEQ ID NO: 5720703 - DNA, 25 bp, Homo sapien
cgctgggcgcgctgctgtcggcgct

SEQ ID NO: 5720704 - DNA, 25 bp, Homo sapien
ctccaaacagctctcagagtaggca

SEQ ID NO: 5720705 - DNA, 25 bp, Homo sapien
gatcccgtgtgcttgtctgggtatc

SEQ ID NO: 5720706 - DNA, 25 bp, Homo sapien
cgtttattttccaaatgagcagttt

SEQ ID NO: 5720707 - DNA, 25 bp, Homo sapien
tccagtgtgtggggcagatggcatc

SEQ ID NO: 5720708 - DNA, 25 bp, Homo sapien
ctgacctggtgtgcaaattcccttc

SEQ ID NO: 5720709 - DNA, 25 bp, Homo sapien
cctggcgctcatcctcttcgtgagc

SEQ ID NO: 5720710 - DNA, 25 bp, Homo sapien
gagacccaagcccagcaacggggtc

SEQ ID NO: 5720711 - DNA, 25 bp, Homo sapien
cccctcttgggaatgctcctctgac

SEQ ID NO: 5720712 - DNA, 25 bp, Homo sapien
tacctggtgagcgtcctgaccaccc

SEQ ID NO: 5720713 - DNA, 25 bp, Homo sapien
cagatggcatcacctacctgtctgc

SEQ ID NO: 5720714 - DNA, 25 bp, Homo sapien
aggccatgctctccgaaagagaata

SEQ ID NO: 5720715 - DNA, 25 bp, Homo sapien
acattcaccttcagaagactccttt

SEQ ID NO: 5720716 - DNA, 25 bp, Homo sapien
ggccccaagcgcaggcctgtgatga

SEQ ID NO: 5720717 - DNA, 25 bp, Homo sapien
catggaaagcgagcaggccatgctc

SEQ ID NO: 5720718 - DNA, 25 bp, Homo sapien
cgagttcctgacccaccagtacaag

SEQ ID NO: 5720719 - DNA, 25 bp, Homo sapien
tggagcagcagtttaacctcaccac

SEQ ID NO: 5720720 - DNA, 25 bp, Homo sapien
ggccatgctcgtcaacctggtgtcc

SEQ ID NO: 5720721 - DNA, 25 bp, Homo sapien
accacgtggcagtgcctgaggaaaa

SEQ ID NO: 5720722 - DNA, 25 bp, Homo sapien
tcctgggaggtcttttggtgaagaa

SEQ ID NO: 5720723 - DNA, 25 bp, Homo sapien
gaaaaagaaaaagaaggtgtcctgc

SEQ ID NO: 5720724 - DNA, 25 bp, Homo sapien
gactgagggctccaacagctttaat

SEQ ID NO: 5720725 - DNA, 25 bp, Homo sapien
tattttccaaatgagcagtttagaa

SEQ ID NO: 5720726 - DNA, 25 bp, Homo sapien
gcgagcgggaaagcggcagcggcgg

SEQ ID NO: 5720727 - DNA, 25 bp, Homo sapien
tccgctggggcgccgagggccgcga

SEQ ID NO: 5720728 - DNA, 25 bp, Homo sapien
ccaagacattgagactgagaaaacc

SEQ ID NO: 5720729 - DNA, 25 bp, Homo sapien
tgatcggtgccatggcacagacacc

SEQ ID NO: 5720730 - DNA, 25 bp, Homo sapien
ctgagcaccagcacagagtaccaag

SEQ ID NO: 5720731 - DNA, 25 bp, Homo sapien
tgcctcaccaccgtccctgctgaga

SEQ ID NO: 5720732 - DNA, 25 bp, Homo sapien
ataataactgtgaatgccaaaccga

SEQ ID NO: 5720733 - DNA, 25 bp, Homo sapien
gtgtgtggtcctttgaggccccaag

SEQ ID NO: 5720734 - DNA, 25 bp, Homo sapien
ctttaatgaaatcagccgagagggt

SEQ ID NO: 5720735 - DNA, 25 bp, Homo sapien
agagtaccaagacattgagactgag

SEQ ID NO: 5720736 - DNA, 25 bp, Homo sapien
cttcgtttgttgggcttcatccctc

SEQ ID NO: 5720737 - DNA, 25 bp, Homo sapien
tcatcctcttcgtgagctacttcgg

SEQ ID NO: 5720738 - DNA, 25 bp, Homo sapien
gtcctgaccaccctggagcgtaggt

SEQ ID NO: 5720739 - DNA, 25 bp, Homo sapien
ttctggagcacgttctgtggggagc

SEQ ID NO: 5720740 - DNA, 25 bp, Homo sapien
gacccaagcccagcaacggggtcct

SEQ ID NO: 5720741 - DNA, 25 bp, Homo sapien
gttgggcttcatccctccacccctc

SEQ ID NO: 5720742 - DNA, 25 bp, Homo sapien
gcacggtgggcgcctacctggtgag

SEQ ID NO: 5720743 - DNA, 25 bp, Homo sapien
gcgcctgatcggctgcggcggcatc

SEQ ID NO: 5720744 - DNA, 25 bp, Homo sapien
accggacggctaccaacatgatgta

SEQ ID NO: 5720745 - DNA, 25 bp, Homo sapien
tgaactcaagtcttacgctttggga

SEQ ID NO: 5720746 - DNA, 25 bp, Homo sapien
gaagtacctggagcagcagtttaac

SEQ ID NO: 5720747 - DNA, 25 bp, Homo sapien
gcacagagtaccaagacattgagac

SEQ ID NO: 5720748 - DNA, 25 bp, Homo sapien
ccttccacccatccctctacctcct

SEQ ID NO: 5720749 - DNA, 25 bp, Homo sapien
tccagcagctgagagtgatcccgaa

SEQ ID NO: 5720750 - DNA, 25 bp, Homo sapien
agtcttcattgacacaagtaacctg

SEQ ID NO: 5720751 - DNA, 25 bp, Homo sapien
atcttcctgggaggtcttttggtga

SEQ ID NO: 5720752 - DNA, 25 bp, Homo sapien
tgtgatgtgtatctgcagcctgatc

SEQ ID NO: 5720753 - DNA, 25 bp, Homo sapien
tggctttctgctctgcggtgcctta

SEQ ID NO: 5720754 - DNA, 25 bp, Homo sapien
gcaaattcccttccacccatccctc

SEQ ID NO: 5720755 - DNA, 25 bp, Homo sapien
gcgcgctgctgtcggcgctgcccga

SEQ ID NO: 5720756 - DNA, 25 bp, Homo sapien
gcttttccaacatcaagatcttcct

SEQ ID NO: 5720757 - DNA, 25 bp, Homo sapien
gatgaggaccaaagaggtgacttat

SEQ ID NO: 5720758 - DNA, 25 bp, Homo sapien
ctgcgggtttatcctgggctctttc

SEQ ID NO: 5720759 - DNA, 25 bp, Homo sapien
acccctcatcttcggggctggcatc

SEQ ID NO: 5720760 - DNA, 25 bp, Homo sapien
tgggctctttctgtaccaaaatcta

SEQ ID NO: 5720761 - DNA, 25 bp, Homo sapien
tccctatggaaacagcacagcacct

SEQ ID NO: 5720762 - DNA, 25 bp, Homo sapien
aagagaatacgagagacccaagccc

SEQ ID NO: 5720763 - DNA, 25 bp, Homo sapien
attatccagccagtgtgtggtcctt

SEQ ID NO: 5720764 - DNA, 25 bp, Homo sapien
accgatacctgtatgtcagcatcgc

SEQ ID NO: 5720765 - DNA, 25 bp, Homo sapien
gaatacgagagacccaagcccagca

SEQ ID NO: 5720766 - DNA, 25 bp, Homo sapien
ggaaaatgccccagtcctgggtgcc

SEQ ID NO: 5720767 - DNA, 25 bp, Homo sapien
ttccctcttgatgtttgggtttcca

SEQ ID NO: 5720768 - DNA, 25 bp, Homo sapien
ggccgcgcctgatcggctgcggcgg

SEQ ID NO: 5720769 - DNA, 25 bp, Homo sapien
tgacccaccagtacaagtacgaggc

SEQ ID NO: 5720770 - DNA, 25 bp, Homo sapien
ataaacgctacatcaaaaaccacga

SEQ ID NO: 5720771 - DNA, 25 bp, Homo sapien
gccaaccagctgcttgggatgactg

SEQ ID NO: 5720772 - DNA, 25 bp, Homo sapien
atagatttttgagtgtggtactctg

SEQ ID NO: 5720773 - DNA, 25 bp, Homo sapien
caggagtactccaaacagctctcag

SEQ ID NO: 5720774 - DNA, 25 bp, Homo sapien
cctctgtgtgatgtgtatctgcagc

SEQ ID NO: 5720775 - DNA, 25 bp, Homo sapien
ctgtctgccctgggggccattcgga

SEQ ID NO: 5720776 - DNA, 25 bp, Homo sapien
cctgaggaaaaactataaacgctac

SEQ ID NO: 5720777 - DNA, 25 bp, Homo sapien
acagctctcagagtaggcatctttc

SEQ ID NO: 5720778 - DNA, 25 bp, Homo sapien
cctgatcggtgccatggcacagaca

SEQ ID NO: 5720779 - DNA, 25 bp, Homo sapien
tcctctgactgagggctccaacagc

SEQ ID NO: 5720780 - DNA, 25 bp, Homo sapien
gactgcgatcccgtgtgcttgtctg

SEQ ID NO: 5720781 - DNA, 25 bp, Homo sapien
ggcaccccctggagccagacagcag

SEQ ID NO: 5720782 - DNA, 25 bp, Homo sapien
gagagacccaagcccagcaacgggg

SEQ ID NO: 5720783 - DNA, 25 bp, Homo sapien
ggatgactgcgatcccgtgtgcttg

SEQ ID NO: 5720784 - DNA, 25 bp, Homo sapien
ggggcgccgagggccgcgacgtctg

SEQ ID NO: 5720785 - DNA, 25 bp, Homo sapien
gaaagagaatacgagagacccaagc

SEQ ID NO: 5720786 - DNA, 25 bp, Homo sapien
tggggttactgttccctatggaaac

SEQ ID NO: 5720787 - DNA, 25 bp, Homo sapien
tcttcctcttcctggagagaacagc

SEQ ID NO: 5720788 - DNA, 25 bp, Homo sapien
tgaatgccaaaccgattccttcact

SEQ ID NO: 5720789 - DNA, 25 bp, Homo sapien
ctgcgatcccgtgtgcttgtctggg

SEQ ID NO: 5720790 - DNA, 25 bp, Homo sapien
ctgttccctatggaaacagcacagc

SEQ ID NO: 5720791 - DNA, 25 bp, Homo sapien
gcccctgggcgtctcctacatcgac

SEQ ID NO: 5720792 - DNA, 25 bp, Homo sapien
gctgcccgagttcctgacccaccag

SEQ ID NO: 5720793 - DNA, 25 bp, Homo sapien
gaggggggaaaaagcacatactcaa

SEQ ID NO: 5720794 - DNA, 25 bp, Homo sapien
cacctcttctgccaaccagctgctt

SEQ ID NO: 5720795 - DNA, 25 bp, Homo sapien
ggcgcagggcacggtgggcgcctac

SEQ ID NO: 5720796 - DNA, 25 bp, Homo sapien
ttgggagttctttttctcctccttc

SEQ ID NO: 5720797 - DNA, 25 bp, Homo sapien
gcgggcgagatccgctggggcgccg

SEQ ID NO: 5720798 - DNA, 25 bp, Homo sapien
agcacatactcaatagatttttgag

SEQ ID NO: 5720799 - DNA, 25 bp, Homo sapien
caacagcacgaatctcacgggctgt

SEQ ID NO: 5720800 - DNA, 25 bp, Homo sapien
aaggtgtcctgcttttccaacatca

SEQ ID NO: 5720801 - DNA, 25 bp, Homo sapien
cagacctcgcgggcctcacttagcg

SEQ ID NO: 5720802 - DNA, 25 bp, Homo sapien
tggctgcaacagcacgaatctcacg

SEQ ID NO: 5720803 - DNA, 25 bp, Homo sapien
tctaaagagtcatgctgacctggtg

SEQ ID NO: 5720804 - DNA, 25 bp, Homo sapien
gccttcctcactttcctctgtgtga

SEQ ID NO: 5720805 - DNA, 25 bp, Homo sapien
gaaacagcacagcacctggctcagc

SEQ ID NO: 5720806 - DNA, 25 bp, Homo sapien
gacctggtgtgcaaattcccttcca

SEQ ID NO: 5720807 - DNA, 25 bp, Homo sapien
tcccttccacccatccctctacctc

SEQ ID NO: 5720808 - DNA, 25 bp, Homo sapien
gcggcgacgaggggcccgaccccga

SEQ ID NO: 5720809 - DNA, 25 bp, Homo sapien
tcaaaaaccacgagggcgggctgag

SEQ ID NO: 5720810 - DNA, 25 bp, Homo sapien
cagatgaggtcggggtcgggcccct

SEQ ID NO: 5720811 - DNA, 25 bp, Homo sapien
tagagggatgggtggaagggaattt

SEQ ID NO: 5720812 - DNA, 25 bp, Homo sapien
tctcggctgatttcattaaagctgt

SEQ ID NO: 5720813 - DNA, 25 bp, Homo sapien
ctggtgggtcaggaactcgggcagc

SEQ ID NO: 5720814 - DNA, 25 bp, Homo sapien
gtgtcaatgaagactgcatccacgt

SEQ ID NO: 5720815 - DNA, 25 bp, Homo sapien
acgtcagcgctctgcaggttgaacc

SEQ ID NO: 5720816 - DNA, 25 bp, Homo sapien
gtctcaatgtcttggtactctgtgc

SEQ ID NO: 5720817 - DNA, 25 bp, Homo sapien
tagattttggtacagaaagagccca

SEQ ID NO: 5720818 - DNA, 25 bp, Homo sapien
ccgatctcgaagctgctagcgatca

SEQ ID NO: 5720819 - DNA, 25 bp, Homo sapien
tggtcctcatcacaggcctgcgctt

SEQ ID NO: 5720820 - DNA, 25 bp, Homo sapien
attcgtgctgttgcagccagcaaag

SEQ ID NO: 5720821 - DNA, 25 bp, Homo sapien
aggcacgcacagcccgtgagattcg

SEQ ID NO: 5720822 - DNA, 25 bp, Homo sapien
catcaagagggaagagaagaagagt

SEQ ID NO: 5720823 - DNA, 25 bp, Homo sapien
gataaacccgcaggctggtccaaat

SEQ ID NO: 5720824 - DNA, 25 bp, Homo sapien
ttctttttcttgttcctctgcgcct

SEQ ID NO: 5720825 - DNA, 25 bp, Homo sapien
cgccagcatcagggcgcactcggac

SEQ ID NO: 5720826 - DNA, 25 bp, Homo sapien
ggccaggatgatgcaggtgaacaca

SEQ ID NO: 5720827 - DNA, 25 bp, Homo sapien
tctcacaaaggagtcttctgaaggt

SEQ ID NO: 5720828 - DNA, 25 bp, Homo sapien
agcaagtacatcatgttggtagccg

SEQ ID NO: 5720829 - DNA, 25 bp, Homo sapien
gcagcaagtacatcatgttggtagc

SEQ ID NO: 5720830 - DNA, 25 bp, Homo sapien
cacctctttggtcctcatcacaggc

SEQ ID NO: 5720831 - DNA, 25 bp, Homo sapien
gggcagcgccgacagcagcgcgccc

SEQ ID NO: 5720832 - DNA, 25 bp, Homo sapien
atcaggcgcggccggtgcccgcgtg

SEQ ID NO: 5720833 - DNA, 25 bp, Homo sapien
ctttagagacccaggaaagatgcct

SEQ ID NO: 5720834 - DNA, 25 bp, Homo sapien
ggactgtggaaacccaaacatcaag

SEQ ID NO: 5720835 - DNA, 25 bp, Homo sapien
atccccagaggaggtagagggatgg

SEQ ID NO: 5720836 - DNA, 25 bp, Homo sapien
gagcttcttcaccaaaagacctccc

SEQ ID NO: 5720837 - DNA, 25 bp, Homo sapien
ggagccctcagtcagaggagcattc

SEQ ID NO: 5720838 - DNA, 25 bp, Homo sapien
ctctcgtattctctttcggagagca

SEQ ID NO: 5720839 - DNA, 25 bp, Homo sapien
caagcagtggacaccaggttgacga

SEQ ID NO: 5720840 - DNA, 25 bp, Homo sapien
ctctttcggagagcatggcctgctc

SEQ ID NO: 5720841 - DNA, 25 bp, Homo sapien
gactgtcctgatgaggatgatgact

SEQ ID NO: 5720842 - DNA, 25 bp, Homo sapien
ctgggccccaatgagcagcaagtac

SEQ ID NO: 5720843 - DNA, 25 bp, Homo sapien
gctctgcaggttgaacctacgctcc

SEQ ID NO: 5720844 - DNA, 25 bp, Homo sapien
gcacgcacagcccgtgagattcgtg

SEQ ID NO: 5720845 - DNA, 25 bp, Homo sapien
ttctctttcggagagcatggcctgc

SEQ ID NO: 5720846 - DNA, 25 bp, Homo sapien
ccacgtcagcgctctgcaggttgaa

SEQ ID NO: 5720847 - DNA, 25 bp, Homo sapien
gaccctcgggttctcggacagggag

SEQ ID NO: 5720848 - DNA, 25 bp, Homo sapien
gggcctcaaaggaccacacactggc

SEQ ID NO: 5720849 - DNA, 25 bp, Homo sapien
gtagcaagcagtggacaccaggttg

SEQ ID NO: 5720850 - DNA, 25 bp, Homo sapien
ctcagtctcaatgtcttggtactct

SEQ ID NO: 5720851 - DNA, 25 bp, Homo sapien
ggtccagggctgagccaggtgctgt

SEQ ID NO: 5720852 - DNA, 25 bp, Homo sapien
gagaaaaagaactcccaaagcgtaa

SEQ ID NO: 5720853 - DNA, 25 bp, Homo sapien
aggtgctgtgctgtttccataggga

SEQ ID NO: 5720854 - DNA, 25 bp, Homo sapien
atgcaggtgaacacagggtttgaga

SEQ ID NO: 5720855 - DNA, 25 bp, Homo sapien
agaggaagagggccaggccctcagc

SEQ ID NO: 5720856 - DNA, 25 bp, Homo sapien
ccgcacgtggtcgtcgatgtaggag

SEQ ID NO: 5720857 - DNA, 25 bp, Homo sapien
atagtgcttttaatataattttcag

SEQ ID NO: 5720858 - DNA, 25 bp, Homo sapien
ccgtgccctgcgccagcatcagggc

SEQ ID NO: 5720859 - DNA, 25 bp, Homo sapien
ttgggtctctcgtattctctttcgg

SEQ ID NO: 5720860 - DNA, 25 bp, Homo sapien
ccaaaaaggcagcgaagccagccac

SEQ ID NO: 5720861 - DNA, 25 bp, Homo sapien
cgccgctccggccgccgcccgacga

SEQ ID NO: 5720862 - DNA, 25 bp, Homo sapien
tgccatctgccccacacactggagt

SEQ ID NO: 5720863 - DNA, 25 bp, Homo sapien
caggtgcttggtgaccttcgggatc

SEQ ID NO: 5720864 - DNA, 25 bp, Homo sapien
tgctggtgctcagcccgccctcgtg

SEQ ID NO: 5720865 - DNA, 25 bp, Homo sapien
tcgtgctgttgcagccagcaaagca

SEQ ID NO: 5720866 - DNA, 25 bp, Homo sapien
aggctgcagatacacatcacacaga

SEQ ID NO: 5720867 - DNA, 25 bp, Homo sapien
aggaagaggaagagggccaggccct

SEQ ID NO: 5720868 - DNA, 25 bp, Homo sapien
gttggctgcgcagacgtcgcggccc

SEQ ID NO: 5720869 - DNA, 25 bp, Homo sapien
gccgatcaggcgcggccggtgcccg

SEQ ID NO: 5720870 - DNA, 25 bp, Homo sapien
gagctgtttggagtactcctgacca

SEQ ID NO: 5720871 - DNA, 25 bp, Homo sapien
gcggccctcggcgccccagcggatc

SEQ ID NO: 5720872 - DNA, 25 bp, Homo sapien
tctttggtcctcatcacaggcctgc

SEQ ID NO: 5720873 - DNA, 25 bp, Homo sapien
acagtatgtactttacatcacatat

SEQ ID NO: 5720874 - DNA, 25 bp, Homo sapien
tcaggcactgccacgtggtggtgta

SEQ ID NO: 5720875 - DNA, 25 bp, Homo sapien
agaggatgagcgccaggttcccgat

SEQ ID NO: 5720876 - DNA, 25 bp, Homo sapien
acgtagcaagcagtggacaccaggt

SEQ ID NO: 5720877 - DNA, 25 bp, Homo sapien
aggatgaaggcgaaggatttgagcg

SEQ ID NO: 5720878 - DNA, 25 bp, Homo sapien
tggagggctgttctctccaggaaga

SEQ ID NO: 5720879 - DNA, 25 bp, Homo sapien
cccaatgagcagcaagtacatcatg

SEQ ID NO: 5720880 - DNA, 25 bp, Homo sapien
cggagtgatgtccaggttacttgtg

SEQ ID NO: 5720881 - DNA, 25 bp, Homo sapien
aatctattgagtatgtgctttttcc

SEQ ID NO: 5720882 - DNA, 25 bp, Homo sapien
agactgcatccacgtagattttggt

SEQ ID NO: 5720883 - DNA, 25 bp, Homo sapien
tttggcattcacagttattattgca

SEQ ID NO: 5720884 - DNA, 25 bp, Homo sapien
gactctttagagacccaggaaagat

SEQ ID NO: 5720885 - DNA, 25 bp, Homo sapien
gtgaggcccgcgaggtctgtgggtg

SEQ ID NO: 5720886 - DNA, 25 bp, Homo sapien
atgagcagcaagtacatcatgttgg

SEQ ID NO: 5720887 - DNA, 25 bp, Homo sapien
cgccgacagcagcgcgcccagcgcc

SEQ ID NO: 5720888 - DNA, 25 bp, Homo sapien
gggcttgggtctctcgtattctctt

SEQ ID NO: 5720889 - DNA, 25 bp, Homo sapien
aggtgaacacagggtttgagagcag

SEQ ID NO: 5720890 - DNA, 25 bp, Homo sapien
ttttcagcaaacgtacagtatgtac

SEQ ID NO: 5720891 - DNA, 25 bp, Homo sapien
tgatgtagcgtttatagtttttcct

SEQ ID NO: 5720892 - DNA, 25 bp, Homo sapien
ctggaaacaggaggcactgctgtct

SEQ ID NO: 5720893 - DNA, 25 bp, Homo sapien
gtcctcatcacaggcctgcgcttgg

SEQ ID NO: 5720894 - DNA, 25 bp, Homo sapien
ccagcatcagggcgcactcggacac

SEQ ID NO: 5720895 - DNA, 25 bp, Homo sapien
gatctcgaagctgctagcgatcaca

SEQ ID NO: 5720896 - DNA, 25 bp, Homo sapien
agacccaggaaagatgcctactctg

SEQ ID NO: 5720897 - DNA, 25 bp, Homo sapien
gaaagagcccaggataaacccgcag

SEQ ID NO: 5720898 - DNA, 25 bp, Homo sapien
tcaggaactcgggcagcgccgacag

SEQ ID NO: 5720899 - DNA, 25 bp, Homo sapien
ccagtgtcgcagcccaggaagagga

SEQ ID NO: 5720900 - DNA, 25 bp, Homo sapien
cagggtggtcaggacgctcaccagg

SEQ ID NO: 5720901 - DNA, 25 bp, Homo sapien
ggctgcacaggggtagcaccgatgc

SEQ ID NO: 5720902 - DNA, 25 bp, Homo sapien
ctgagagctgtttggagtactcctg

SEQ ID NO: 5720903 - DNA, 25 bp, Homo sapien
cacactcaaaaatctattgagtatg

SEQ ID NO: 5720904 - DNA, 25 bp, Homo sapien
caggttgacgagcatggccatccga

SEQ ID NO: 5720905 - DNA, 25 bp, Homo sapien
gggtcgtccggagtgatgtccaggt

SEQ ID NO: 5720906 - DNA, 25 bp, Homo sapien
ccaaagcgtaagacttgagttcagg

SEQ ID NO: 5720907 - DNA, 25 bp, Homo sapien
tactggtgggtcaggaactcgggca

SEQ ID NO: 5720908 - DNA, 25 bp, Homo sapien
gacgagcatggccatccgaatggcc

SEQ ID NO: 5720909 - DNA, 25 bp, Homo sapien
ctgctagcgatcacacccacgtcag

SEQ ID NO: 5720910 - DNA, 25 bp, Homo sapien
ttccatagggaacagtaaccccagc

SEQ ID NO: 5720911 - DNA, 25 bp, Homo sapien
ggtcaggaactcgggcagcgccgac

SEQ ID NO: 5720912 - DNA, 25 bp, Homo sapien
aggcaccgcagagcagaaagccacc

SEQ ID NO: 5720913 - DNA, 25 bp, Homo sapien
gagggctgttctctccaggaagagg

SEQ ID NO: 5720914 - DNA, 25 bp, Homo sapien
tccttcctccgcacgtggtcgtcga

SEQ ID NO: 5720915 - DNA, 25 bp, Homo sapien
cctcaggcactgccacgtggtggtg

SEQ ID NO: 5720916 - DNA, 25 bp, Homo sapien
ctccatgcaggcggccaggatgatg

SEQ ID NO: 5720917 - DNA, 25 bp, Homo sapien
agcatggccatccgaatggccccca

SEQ ID NO: 5720918 - DNA, 25 bp, Homo sapien
tctcgaagctgctagcgatcacacc

SEQ ID NO: 5720919 - DNA, 25 bp, Homo sapien
aagcccaacaaacgaaggaggagaa

SEQ ID NO: 5720920 - DNA, 25 bp, Homo sapien
tttccaggaaccacggttgcgttct

SEQ ID NO: 5720921 - DNA, 25 bp, Homo sapien
caggaaccacggttgcgttctcagc

SEQ ID NO: 5720922 - DNA, 25 bp, Homo sapien
cacgctaagtgaggcccgcgaggtc

SEQ ID NO: 5720923 - DNA, 25 bp, Homo sapien
gtaggcgcccaccgtgccctgcgcc

SEQ ID NO: 5720924 - DNA, 25 bp, Homo sapien
aggatgagcgccaggttcccgatct

SEQ ID NO: 5720925 - DNA, 25 bp, Homo sapien
gagtaccacactcaaaaatctattg

SEQ ID NO: 5720926 - DNA, 25 bp, Homo sapien
aatgtgattcggggcaggttttctc

SEQ ID NO: 5720927 - DNA, 25 bp, Homo sapien
ctcgccgctccggccgccgcccgac

SEQ ID NO: 5720928 - DNA, 25 bp, Homo sapien
agggcgagtaggggtccagggctga

SEQ ID NO: 5720929 - DNA, 25 bp, Homo sapien
cacactggctggataatccacatgg

SEQ ID NO: 5720930 - DNA, 25 bp, Homo sapien
caggggctgcacaggggtagcaccg

SEQ ID NO: 5720931 - DNA, 25 bp, Homo sapien
ccagcggatctcgcccgcctcgtac

SEQ ID NO: 5720932 - DNA, 25 bp, Homo sapien
gtaggagacgcccaggggctgcaca

SEQ ID NO: 5720933 - DNA, 25 bp, Homo sapien
tcgcagcccaggaagaggaaggaga

SEQ ID NO: 5720934 - DNA, 25 bp, Homo sapien
gcatgactctttagagacccaggaa

SEQ ID NO: 5720935 - DNA, 25 bp, Homo sapien
catacaggtatcggtagaccacatt

SEQ ID NO: 5720936 - DNA, 25 bp, Homo sapien
cgtagattttggtacagaaagagcc

SEQ ID NO: 5720937 - DNA, 25 bp, Homo sapien
cagagcagaaagccaccccaccagg

SEQ ID NO: 5720938 - DNA, 25 bp, Homo sapien
actgctcatttggaaaataaacgct

SEQ ID NO: 5720939 - DNA, 25 bp, Homo sapien
gaggagcacgctaagtgaggcccgc

SEQ ID NO: 5720940 - DNA, 25 bp, Homo sapien
atgtcttggtactctgtgctggtgc

SEQ ID NO: 5720941 - DNA, 25 bp, Homo sapien
gtttccatagggaacagtaacccca

SEQ ID NO: 5720942 - DNA, 25 bp, Homo sapien
tccagcgggggtcgtccggagtgat

SEQ ID NO: 5720943 - DNA, 25 bp, Homo sapien
cagcccgccctcgtggtttttgatg

SEQ ID NO: 5720944 - DNA, 25 bp, Homo sapien
ctcggcgccccagcggatctcgccc

SEQ ID NO: 5720945 - DNA, 25 bp, Homo sapien
catcagggcgcactcggacacaagg

SEQ ID NO: 5720946 - DNA, 25 bp, Homo sapien
aggcaggtggagtcgatgccagccc

SEQ ID NO: 5720947 - DNA, 25 bp, Homo sapien
ccacggttgcgttctcagcagggac

SEQ ID NO: 5720948 - DNA, 25 bp, Homo sapien
cagaacaggcaggtggagtcgatgc

SEQ ID NO: 5720949 - DNA, 25 bp, Homo sapien
gaagagaagaagagtaaggcaccgc

SEQ ID NO: 5720950 - DNA, 25 bp, Homo sapien
tttgatgtagcgtttatagtttttc

SEQ ID NO: 5720951 - DNA, 25 bp, Homo sapien
tctcagcagggacggtggtgaggca

SEQ ID NO: 5720952 - DNA, 25 bp, Homo sapien
aaataaacgctgcaaaaatacagag

SEQ ID NO: 5720953 - DNA, 25 bp, Homo sapien
aggagcacctgggccccaatgagca

SEQ ID NO: 5720954 - DNA, 25 bp, Homo sapien
tgattcggggcaggttttctcagtc

SEQ ID NO: 5720955 - DNA, 25 bp, Homo sapien
agcgcgcccagcgccatgacgatgc

SEQ ID NO: 5720956 - DNA, 25 bp, Homo sapien
cctcagcttctcacaaaggagtctt

SEQ ID NO: 5720957 - DNA, 25 bp, Homo sapien
tgcttggtgaccttcgggatcactc

SEQ ID NO: 5720958 - DNA, 25 bp, Homo sapien
cggacacaaggaagatcttgatgtt

SEQ ID NO: 5720959 - DNA, 25 bp, Homo sapien
agtaaggcaccgcagagcagaaagc

SEQ ID NO: 5720960 - DNA, 25 bp, Homo sapien
tggagtactcctgaccataagtcac

SEQ ID NO: 5720961 - DNA, 25 bp, Homo sapien
agccgtccggttgaggcagatgagg

SEQ ID NO: 5720962 - DNA, 25 bp, Homo sapien
ctctccaggaagaggaagagggcca

SEQ ID NO: 5720963 - DNA, 25 bp, Homo sapien
catcatgttggtagccgtccggttg

SEQ ID NO: 5720964 - DNA, 25 bp, Homo sapien
aggccctcagcttctcacaaaggag

SEQ ID NO: 5720965 - DNA, 25 bp, Homo sapien
tagagcgaggagtccttcctccgca

SEQ ID NO: 5720966 - DNA, 25 bp, Homo sapien
cgcgaggtctgtgggtggtggaggg

SEQ ID NO: 5720967 - DNA, 25 bp, Homo sapien
gtacttccccaaaaaggcagcgaag

SEQ ID NO: 5720968 - DNA, 25 bp, Homo sapien
tggtagccgtccggttgaggcagat

SEQ ID NO: 5720969 - DNA, 25 bp, Homo sapien
gaggcactgctgtctggctccaggg

SEQ ID NO: 5720970 - DNA, 25 bp, Homo sapien
cccgcgtgccccgaagtagctcacg

SEQ ID NO: 5720971 - DNA, 25 bp, Homo sapien
gcagcgcgcccagcgccatgacgat

SEQ ID NO: 5720972 - DNA, 25 bp, Homo sapien
attaaagctgttggagccctcagtc

SEQ ID NO: 5720973 - DNA, 25 bp, Homo sapien
ggggtgcctcaggaccccgttgctg

SEQ ID NO: 5720974 - DNA, 25 bp, Homo sapien
ctcgctttccatggcggggtctgag

SEQ ID NO: 5720975 - DNA, 25 bp, Homo sapien
aatccacatggggaccctcgggttc

SEQ ID NO: 5720976 - DNA, 25 bp, Homo sapien
aggggtagcaccgatgcccaggagc

SEQ ID NO: 5720977 - DNA, 25 bp, Homo sapien
ggccaggccctcagcttctcacaaa

SEQ ID NO: 5720978 - DNA, 25 bp, Homo sapien
gtgaggaaggcctcttggcacccag

SEQ ID NO: 5720979 - DNA, 25 bp, Homo sapien
caccaggtcagcatgactctttaga

SEQ ID NO: 5720980 - DNA, 25 bp, Homo sapien
gtagccgtccggttgaggcagatga

SEQ ID NO: 5720981 - DNA, 25 bp, Homo sapien
ccgatccagcgggggtcgtccggag

SEQ ID NO: 5720982 - DNA, 25 bp, Homo sapien
ggccctcggcgccccagcggatctc

SEQ ID NO: 5720983 - DNA, 25 bp, Homo sapien
tttgagagcaggtgcttggtgacct

SEQ ID NO: 5720984 - DNA, 25 bp, Homo sapien
gcagcccaggaagaggaaggagacg

SEQ ID NO: 5720985 - DNA, 25 bp, Homo sapien
ggggtggagggatgaagcccaacaa

SEQ ID NO: 5720986 - DNA, 25 bp, Homo sapien
cctcgtggtttttgatgtagcgttt

SEQ ID NO: 5720987 - DNA, 25 bp, Homo sapien
acccacgtcagcgctctgcaggttg

SEQ ID NO: 5720988 - DNA, 25 bp, Homo sapien
cattcccaagaggggagtttctaaa

SEQ ID NO: 5720989 - DNA, 25 bp, Homo sapien
cgcgtgccccgaagtagctcacgaa

SEQ ID NO: 5720990 - DNA, 25 bp, Homo sapien
aaaatctattgagtatgtgcttttt

SEQ ID NO: 5720991 - DNA, 25 bp, Homo sapien
catgtcggcaagccatccccagagg

SEQ ID NO: 5720992 - DNA, 25 bp, Homo sapien
gccccacacactggagtgaaggaat

SEQ ID NO: 5720993 - DNA, 25 bp, Homo sapien
cccaggaagatacccagacaagcac

SEQ ID NO: 5720994 - DNA, 25 bp, Homo sapien
gacggtggtgaggcacgcacagccc

SEQ ID NO: 5720995 - DNA, 25 bp, Homo sapien
cggatctcgcccgcctcgtacttgt

SEQ ID NO: 5720996 - DNA, 25 bp, Homo sapien
tttggagtactcctgaccataagtc

SEQ ID NO: 5720997 - DNA, 25 bp, Homo sapien
ccgccgcagccgatcaggcgcggcc

SEQ ID NO: 5720998 - DNA, 25 bp, Homo sapien
ggacaccaggttgacgagcatggcc

SEQ ID NO: 5720999 - DNA, 25 bp, Homo sapien
ctgacatacaggtatcggtagacca

SEQ ID NO: 5721000 - DNA, 25 bp, Homo sapien
gcaggcggccaggatgatgcaggtg

SEQ ID NO: 5721001 - DNA, 25 bp, Homo sapien
ctgagtgcgggggcagggactgtgg

SEQ ID NO: 5721002 - DNA, 25 bp, Homo sapien
gctgttctctccaggaagaggaaga

SEQ ID NO: 5721003 - DNA, 25 bp, Homo sapien
cagcgggggtcgtccggagtgatgt

SEQ ID NO: 5721004 - DNA, 25 bp, Homo sapien
gctgctccaggtacttccccaaaaa

SEQ ID NO: 5721005 - DNA, 25 bp, Homo sapien
gaccacattgtcgtagaggacgcag

SEQ ID NO: 5721006 - DNA, 25 bp, Homo sapien
gatgaggtcggggtcgggcccctcg

SEQ ID NO: 5721007 - DNA, 25 bp, Homo sapien
tacatcacatatttctaaactgctc

SEQ ID NO: 5721008 - DNA, 25 bp, Homo sapien
acttgtgtcaatgaagactgcatcc

SEQ ID NO: 5721009 - DNA, 25 bp, Homo sapien
aggtctgtgggtggtggagggctgt

SEQ ID NO: 5721010 - DNA, 25 bp, Homo sapien
tcaggaccccgttgctgggcttggg

SEQ ID NO: 5721011 - DNA, 25 bp, Homo sapien
ccaccaggctccgatccagcggggg

SEQ ID NO: 5721012 - DNA, 25 bp, Homo sapien
aacccgcaggctggtccaaatacca

SEQ ID NO: 5721013 - DNA, 25 bp, Homo sapien
tgagcgccaggttcccgatctcgaa

SEQ ID NO: 5721014 - DNA, 25 bp, Homo sapien
ccgccgccgccgctgccgctttccc

SEQ ID NO: 5721015 - DNA, 25 bp, Homo sapien
ccgtccggttgaggcagatgaggtc

SEQ ID NO: 5721016 - DNA, 25 bp, Homo sapien
gaaagtgaggaaggcctcttggcac

SEQ ID NO: 5721017 - DNA, 25 bp, Homo sapien
cattttccaggaaccacggttgcgt

SEQ ID NO: 5721018 - DNA, 25 bp, Homo sapien
tgagccaggtgctgtgctgtttcca

SEQ ID NO: 5721019 - DNA, 25 bp, Homo sapien
tcatgttggtagccgtccggttgag

SEQ ID NO: 5721020 - DNA, 25 bp, Homo sapien
ccccgaagatgaggggtggagggat

SEQ ID NO: 5721021 - DNA, 25 bp, Homo sapien
gggctgttctctccaggaagaggaa

SEQ ID NO: 5721022 - DNA, 25 bp, Homo sapien
ttggcacccaggactggggcatttt

SEQ ID NO: 5721023 - DNA, 25 bp, Homo sapien
ggtacagaaagagcccaggataaac

SEQ ID NO: 5721024 - DNA, 25 bp, Homo sapien
gtggtcgtcgatgtaggagacgccc

SEQ ID NO: 5721025 - DNA, 25 bp, Homo sapien
atggcggggtctgagtgcgggggca

SEQ ID NO: 5721026 - DNA, 25 bp, Homo sapien
gagagcatggcctgctcgctttcca

SEQ ID NO: 5721027 - DNA, 25 bp, Homo sapien
ggttggcagaagaggtggtgaggtt

SEQ ID NO: 5721028 - DNA, 25 bp, Homo sapien
accaaaagacctcccaggaagatac

SEQ ID NO: 5721029 - DNA, 25 bp, Homo sapien
catggccatccgaatggcccccagg

SEQ ID NO: 5721030 - DNA, 25 bp, Homo sapien
ctcgggttctcggacagggaggagc

SEQ ID NO: 5721031 - DNA, 25 bp, Homo sapien
ttcttgttcctctgcgcctcgtccc

SEQ ID NO: 5721032 - DNA, 25 bp, Homo sapien
ggctccgatccagcgggggtcgtcc

SEQ ID NO: 5721033 - DNA, 25 bp, Homo sapien
gcccaacaaacgaaggaggagaaaa

SEQ ID NO: 5721034 - DNA, 25 bp, Homo sapien
tgccagccccgaagatgaggggtgg

SEQ ID NO: 5721035 - DNA, 25 bp, Homo sapien
gtagcgtttatagtttttcctcagg

SEQ ID NO: 5721036 - DNA, 25 bp, Homo sapien
taaagctgttggagccctcagtcag

SEQ ID NO: 5721037 - DNA, 25 bp, Homo sapien
ctgtgggtggtggagggctgttctc

SEQ ID NO: 5721038 - DNA, 25 bp, Homo sapien
cccacagaacgtgctccagaacagg

SEQ ID NO: 5721039 - DNA, 25 bp, Homo sapien
caaataccagcatcgtgaacaggat

SEQ ID NO: 5721040 - DNA, 25 bp, Homo sapien
tgctggaaacaggaggcactgctgt

SEQ ID NO: 5721041 - DNA, 25 bp, Homo sapien
tgtgctgtttccatagggaacagta

SEQ ID NO: 5721042 - DNA, 25 bp, Homo sapien
ccaggaaagatgcctactctgagag

SEQ ID NO: 5721043 - DNA, 25 bp, Homo sapien
gcccgacgaaccgcccggcttcttc

SEQ ID NO: 5721044 - DNA, 25 bp, Homo sapien
gcccgccctcgtggtttttgatgta

SEQ ID NO: 5721045 - DNA, 25 bp, Homo sapien
tcaggctgcagatacacatcacaca

SEQ ID NO: 5721046 - DNA, 25 bp, Homo sapien
tttggaaaataaacgctgcaaaaat

SEQ ID NO: 5721047 - DNA, 25 bp, Homo sapien
cgcagtcatcccaagcagctggttg

SEQ ID NO: 5721048 - DNA, 25 bp, Homo sapien
agggcgcactcggacacaaggaaga

SEQ ID NO: 5721049 - DNA, 25 bp, Homo sapien
caagcacacgggatcgcagtcatcc

SEQ ID NO: 5721050 - DNA, 25 bp, Homo sapien
tccagggtggtcaggacgctcacca

SEQ ID NO: 5721051 - DNA, 25 bp, Homo sapien
gaagatgaggggtggagggatgaag

SEQ ID NO: 5721052 - DNA, 25 bp, Homo sapien
ccatctgccccacacactggagtga

SEQ ID NO: 5721053 - DNA, 25 bp, Homo sapien
tacttgtactggtgggtcaggaact

SEQ ID NO: 5721054 - DNA, 25 bp, Homo sapien
ccggttgaggcagatgaggtcgggg

SEQ ID NO: 5721055 - DNA, 25 bp, Homo sapien
tggtttttaccctctcggctgattt

SEQ ID NO: 5721056 - DNA, 25 bp, Homo sapien
ccacgtggtggtgtacaggatgaag

SEQ ID NO: 5721057 - DNA, 25 bp, Homo sapien
gaacacagggtttgagagcaggtgc

SEQ ID NO: 5721058 - DNA, 25 bp, Homo sapien
cccgcaggctggtccaaataccagc

SEQ ID NO: 5721059 - DNA, 25 bp, Homo sapien
tatcggtagaccacattgtcgtaga

SEQ ID NO: 5721060 - DNA, 25 bp, Homo sapien
ttttaccctctcggctgatttcatt

SEQ ID NO: 5721061 - DNA, 25 bp, Homo sapien
cctgcgcttggggcctcaaaggacc

SEQ ID NO: 5721062 - DNA, 25 bp, Homo sapien
agaaagccaccccaccaggctccga

SEQ ID NO: 5721063 - DNA, 25 bp, Homo sapien
gatgctgacatacaggtatcggtag

SEQ ID NO: 5721064 - DNA, 25 bp, Homo sapien
tcggtttggcattcacagttattat

SEQ ID NO: 5721065 - DNA, 25 bp, Homo sapien
ctgactgtcctgatgaggatgatga

SEQ ID NO: 5721066 - DNA, 25 bp, Homo sapien
agtatgtactttacatcacatattt

SEQ ID NO: 5721067 - DNA, 25 bp, Homo sapien
atcttgatgttggaaaagcaggaca

SEQ ID NO: 5721068 - DNA, 25 bp, Homo sapien
gagcgaggagtccttcctccgcacg

SEQ ID NO: 5721069 - DNA, 25 bp, Homo sapien
ctcatttggaaaataaacgctgcaa

SEQ ID NO: 5721070 - DNA, 25 bp, Homo sapien
tgccatggcaccgatcaggctgcag

SEQ ID NO: 5721071 - DNA, 25 bp, Homo sapien
cgcactcggacacaaggaagatctt

SEQ ID NO: 5721072 - DNA, 25 bp, Homo sapien
agctcgccgctccggccgccgcccg

SEQ ID NO: 5721073 - DNA, 25 bp, Homo sapien
tcctccgcacgtggtcgtcgatgta

SEQ ID NO: 5721074 - DNA, 25 bp, Homo sapien
acacagaggaaagtgaggaaggcct

SEQ ID NO: 5721075 - DNA, 25 bp, Homo sapien
caccgatcaggctgcagatacacat

SEQ ID NO: 5721076 - DNA, 25 bp, Homo sapien
gggctgagccaggtgctgtgctgtt

SEQ ID NO: 5721077 - DNA, 25 bp, Homo sapien
cgtcgccgcccgagccgttggctgc

SEQ ID NO: 5721078 - DNA, 25 bp, Homo sapien
attcacagttattattgcagggcga

SEQ ID NO: 5721079 - DNA, 25 bp, Homo sapien
ggccagtgtcgcagcccaggaagag

SEQ ID NO: 5721080 - DNA, 25 bp, Homo sapien
aagagggaagagaagaagagtaagg

SEQ ID NO: 5721081 - DNA, 25 bp, Homo sapien
atgactctttagagacccaggaaag

SEQ ID NO: 5721082 - DNA, 25 bp, Homo sapien
ttgctccccacagaacgtgctccag

SEQ ID NO: 5721083 - DNA, 25 bp, Homo sapien
gcgatggcgatgctgacatacaggt

SEQ ID NO: 5721084 - DNA, 25 bp, Homo sapien
gcagctcgccgctccggccgccgcc

SEQ ID NO: 5721085 - DNA, 25 bp, Homo sapien
ggaaccacggttgcgttctcagcag

SEQ ID NO: 5721086 - DNA, 25 bp, Homo sapien
caggaagatacccagacaagcacac

SEQ ID NO: 5721087 - DNA, 25 bp, Homo sapien
tctgaaggtgaatgtgattcggggc

SEQ ID NO: 5721088 - DNA, 25 bp, Homo sapien
gcagaaagccaccccaccaggctcc

SEQ ID NO: 5721089 - DNA, 25 bp, Homo sapien
gattcctatatagagcgaggagtcc

SEQ ID NO: 5721090 - DNA, 25 bp, Homo sapien
cgaagccagccaccactgcaatctc

SEQ ID NO: 5721091 - DNA, 25 bp, Homo sapien
gatcaggctgcagatacacatcaca

SEQ ID NO: 5721092 - DNA, 25 bp, Homo sapien
ctttcggagagcatggcctgctcgc

SEQ ID NO: 5721093 - DNA, 25 bp, Homo sapien
gatggcgatgctgacatacaggtat

SEQ ID NO: 5721094 - DNA, 25 bp, Homo sapien
tccccacagaacgtgctccagaaca

SEQ ID NO: 5721095 - DNA, 25 bp, Homo sapien
tgcagatacacatcacacagaggaa

SEQ ID NO: 5721096 - DNA, 25 bp, Homo sapien
tgttctctccaggaagaggaagagg

SEQ ID NO: 5721097 - DNA, 25 bp, Homo sapien
ctggctggataatccacatggggac

SEQ ID NO: 5721098 - DNA, 25 bp, Homo sapien
cagtaaccccagccacagggccagt

SEQ ID NO: 5721099 - DNA, 25 bp, Homo sapien
agcaaagcaggcagacaggtaggtg

SEQ ID NO: 5721100 - DNA, 25 bp, Homo sapien
tcccgatctcgaagctgctagcgat

SEQ ID NO: 5721101 - DNA, 25 bp, Homo sapien
cacgtagattttggtacagaaagag

SEQ ID NO: 5721102 - DNA, 25 bp, Homo sapien
gatcacacccacgtcagcgctctgc

SEQ ID NO: 5721103 - DNA, 25 bp, Homo sapien
tgaaggcgaaggatttgagcgcgat

SEQ ID NO: 5721104 - DNA, 25 bp, Homo sapien
aaagccaccccaccaggctccgatc

SEQ ID NO: 5721105 - DNA, 25 bp, Homo sapien
tcaggacgctcaccaggtaggcgcc

SEQ ID NO: 5721106 - DNA, 25 bp, Homo sapien
ccaggtacttccccaaaaaggcagc

SEQ ID NO: 5721107 - DNA, 25 bp, Homo sapien
aatacagagtaccacactcaaaaat

SEQ ID NO: 5721108 - DNA, 25 bp, Homo sapien
atgttggaaaagcaggacaccttct

SEQ ID NO: 5721109 - DNA, 25 bp, Homo sapien
aagaagagtaaggcaccgcagagca

SEQ ID NO: 5721110 - DNA, 25 bp, Homo sapien
gaagatcttgatgttggaaaagcag

SEQ ID NO: 5721111 - DNA, 25 bp, Homo sapien
ggcctgcgcttggggcctcaaagga

SEQ ID NO: 5721112 - DNA, 25 bp, Homo sapien
ccgccctcgtggtttttgatgtagc

SEQ ID NO: 5721113 - DNA, 25 bp, Homo sapien
gcattcacagttattattgcagggc

SEQ ID NO: 5721114 - DNA, 25 bp, Homo sapien
gtcagcatgactctttagagaccca

SEQ ID NO: 5721115 - DNA, 25 bp, Homo sapien
gtgctgtgctgtttccatagggaac

SEQ ID NO: 5721116 - DNA, 25 bp, Homo sapien
gtctgagtgcgggggcagggactgt

SEQ ID NO: 5721117 - DNA, 25 bp, Homo sapien
cagaagaggtggtgaggttaaactg

SEQ ID NO: 5721118 - DNA, 25 bp, Homo sapien
gaggagcattcccaagaggggagtt

SEQ ID NO: 5721119 - DNA, 25 bp, Homo sapien
aaccacggttgcgttctcagcaggg

SEQ ID NO: 5721120 - DNA, 25 bp, Homo sapien
cccaggggctgcacaggggtagcac

SEQ ID NO: 5721121 - DNA, 25 bp, Homo sapien
gccctcgtggtttttgatgtagcgt

SEQ ID NO: 5721122 - DNA, 25 bp, Homo sapien
cactggagtgaaggaatcggtttgg

SEQ ID NO: 5721123 - DNA, 25 bp, Homo sapien
cgaatggcccccagggcagacaggc

SEQ ID NO: 5721124 - DNA, 25 bp, Homo sapien
gtctgtgggtggtggagggctgttc

SEQ ID NO: 5721125 - DNA, 25 bp, Homo sapien
agcagtggacaccaggttgacgagc

SEQ ID NO: 5721126 - DNA, 25 bp, Homo sapien
cgccttgctccccacagaacgtgct

SEQ ID NO: 5721127 - DNA, 25 bp, Homo sapien
tgaaggtgaatgtgattcggggcag

SEQ ID NO: 5721128 - DNA, 25 bp, Homo sapien
cagtcagaggagcattcccaagagg

SEQ ID NO: 5721129 - DNA, 25 bp, Homo sapien
gatctcgcccgcctcgtacttgtac

SEQ ID NO: 5721130 - DNA, 25 bp, Homo sapien
aggacgcaggcgccttgctccccac

SEQ ID NO: 5721131 - DNA, 25 bp, Homo sapien
ccgatcaggctgcagatacacatca

SEQ ID NO: 5721132 - DNA, 25 bp, Homo sapien
gaactcccaaagcgtaagacttgag

SEQ ID NO: 5721133 - DNA, 25 bp, Homo sapien
cacacactggctggataatccacat

SEQ ID NO: 5721134 - DNA, 25 bp, Homo sapien
cgccgccgccgccgctgccgctttc

SEQ ID NO: 5721135 - DNA, 25 bp, Homo sapien
gttcagggctgactgtcctgatgag

SEQ ID NO: 5721136 - DNA, 25 bp, Homo sapien
ggtgcctcaggaccccgttgctggg

SEQ ID NO: 5721137 - DNA, 25 bp, Homo sapien
agggtgtctgtgccatggcaccgat

SEQ ID NO: 5721138 - DNA, 25 bp, Homo sapien
tgacgatgccgccgcagccgatcag

SEQ ID NO: 5721139 - DNA, 25 bp, Homo sapien
ggagtcgatgccagccccgaagatg

SEQ ID NO: 5721140 - DNA, 25 bp, Homo sapien
ggcctgctcgctttccatggcgggg

SEQ ID NO: 5721141 - DNA, 25 bp, Homo sapien
ttgacgagcatggccatccgaatgg

SEQ ID NO: 5721142 - DNA, 25 bp, Homo sapien
ccgccgctgccgctttcccgctcgc

SEQ ID NO: 5721143 - DNA, 25 bp, Homo sapien
gcggccaggatgatgcaggtgaaca

SEQ ID NO: 5721144 - DNA, 25 bp, Homo sapien
ctcaaaaatctattgagtatgtgct

SEQ ID NO: 5721145 - DNA, 25 bp, Homo sapien
ttattattgcagggcgagtaggggt

SEQ ID NO: 5721146 - DNA, 25 bp, Homo sapien
agcggatctcgcccgcctcgtactt

SEQ ID NO: 5721147 - DNA, 25 bp, Homo sapien
acgtggtcgtcgatgtaggagacgc

SEQ ID NO: 5721148 - DNA, 25 bp, Homo sapien
ggttgaggcagatgaggtcggggtc

SEQ ID NO: 5721149 - DNA, 25 bp, Homo sapien
gcgccatgacgatgccgccgcagcc

SEQ ID NO: 5721150 - DNA, 25 bp, Homo sapien
aagcaggcagacaggtaggtgatgc

SEQ ID NO: 5721151 - DNA, 25 bp, Homo sapien
tgaggttaaactgctgctccaggta

SEQ ID NO: 5721152 - DNA, 25 bp, Homo sapien
tgccgccgcagccgatcaggcgcgg

SEQ ID NO: 5721153 - DNA, 25 bp, Homo sapien
ttctcagtctcaatgtcttggtact

SEQ ID NO: 5721154 - DNA, 25 bp, Homo sapien
ttcagcaaacgtacagtatgtactt

SEQ ID NO: 5721155 - DNA, 25 bp, Homo sapien
cagaaagagcccaggataaacccgc

SEQ ID NO: 5721156 - DNA, 25 bp, Homo sapien
agcagggacggtggtgaggcacgca

SEQ ID NO: 5721157 - DNA, 25 bp, Homo sapien
ctacgctccagggtggtcaggacgc

SEQ ID NO: 5721158 - DNA, 25 bp, Homo sapien
gccgccgccgccgccgctgccgctt

SEQ ID NO: 5721159 - DNA, 25 bp, Homo sapien
tggcgatgctgacatacaggtatcg

SEQ ID NO: 5721160 - DNA, 25 bp, Homo sapien
cctcaggaccccgttgctgggcttg

SEQ ID NO: 5721161 - DNA, 25 bp, Homo sapien
ccagggcagacaggctgagcttctt

SEQ ID NO: 5721162 - DNA, 25 bp, Homo sapien
gaacaggattcctatatagagcgag

SEQ ID NO: 5721163 - DNA, 25 bp, Homo sapien
agcatcagggcgcactcggacacaa

SEQ ID NO: 5721164 - DNA, 25 bp, Homo sapien
tgaggtcggggtcgggcccctcgtc

SEQ ID NO: 5721165 - DNA, 25 bp, Homo sapien
cttctgaaggtgaatgtgattcggg

SEQ ID NO: 5721166 - DNA, 25 bp, Homo sapien
gtcaatgaagactgcatccacgtag

SEQ ID NO: 5721167 - DNA, 25 bp, Homo sapien
taaggcaccgcagagcagaaagcca

SEQ ID NO: 5721168 - DNA, 25 bp, Homo sapien
tgttcctctgcgcctcgtccccctg

SEQ ID NO: 5721169 - DNA, 25 bp, Homo sapien
gaaagatgcctactctgagagctgt

SEQ ID NO: 5721170 - DNA, 25 bp, Homo sapien
gcaggcagacaggtaggtgatgcca

SEQ ID NO: 5721171 - DNA, 25 bp, Homo sapien
acgcacagcccgtgagattcgtgct

SEQ ID NO: 5721172 - DNA, 25 bp, Homo sapien
agccgttggctgcgcagacgtcgcg

SEQ ID NO: 5721173 - DNA, 25 bp, Homo sapien
atggcctgctcgctttccatggcgg

SEQ ID NO: 5721174 - DNA, 25 bp, Homo sapien
tgactgagggtgtctgtgccatggc

SEQ ID NO: 5721175 - DNA, 25 bp, Homo sapien
cgaaggatttgagcgcgatggcgat

SEQ ID NO: 5721176 - DNA, 25 bp, Homo sapien
aggtaggcgcccaccgtgccctgcg

SEQ ID NO: 5721177 - DNA, 25 bp, Homo sapien
agtccttcctccgcacgtggtcgtc

SEQ ID NO: 5721178 - DNA, 25 bp, Homo sapien
ccccagggcagacaggctgagcttc

SEQ ID NO: 5721179 - DNA, 25 bp, Homo sapien
gcgcgatggcgatgctgacatacag

SEQ ID NO: 5721180 - DNA, 25 bp, Homo sapien
gcatggcctgctcgctttccatggc

SEQ ID NO: 5721181 - DNA, 25 bp, Homo sapien
atttctaaactgctcatttggaaaa

SEQ ID NO: 5721182 - DNA, 25 bp, Homo sapien
gtcttggtactctgtgctggtgctc

SEQ ID NO: 5721183 - DNA, 25 bp, Homo sapien
cctatatagagcgaggagtccttcc

SEQ ID NO: 5721184 - DNA, 25 bp, Homo sapien
catccacgtagattttggtacagaa

SEQ ID NO: 5721185 - DNA, 25 bp, Homo sapien
ttctaaagcatgtcggcaagccatc

SEQ ID NO: 5721186 - DNA, 25 bp, Homo sapien
gcgatcacacccacgtcagcgctct

SEQ ID NO: 5721187 - DNA, 25 bp, Homo sapien
ctttccatggcggggtctgagtgcg

SEQ ID NO: 5721188 - DNA, 25 bp, Homo sapien
accgcagagcagaaagccaccccac

SEQ ID NO: 5721189 - DNA, 25 bp, Homo sapien
aggcagacaggtaggtgatgccatc

SEQ ID NO: 5721190 - DNA, 25 bp, Homo sapien
ggccggtgcccgcgtgccccgaagt

SEQ ID NO: 5721191 - DNA, 25 bp, Homo sapien
ggtttgagagcaggtgcttggtgac

SEQ ID NO: 5721192 - DNA, 25 bp, Homo sapien
atctccatgcaggcggccaggatga

SEQ ID NO: 5721193 - DNA, 25 bp, Homo sapien
caggctgagcttcttcaccaaaaga

SEQ ID NO: 5721194 - DNA, 25 bp, Homo sapien
cttgatgttggaaaagcaggacacc

SEQ ID NO: 5721195 - DNA, 25 bp, Homo sapien
gacgcaggcgccttgctccccacag

SEQ ID NO: 5721196 - DNA, 25 bp, Homo sapien
aggcactgccacgtggtggtgtaca

SEQ ID NO: 5721197 - DNA, 25 bp, Homo sapien
gccatccgaatggcccccagggcag

SEQ ID NO: 5721198 - DNA, 25 bp, Homo sapien
ttccatggcggggtctgagtgcggg

SEQ ID NO: 5721199 - DNA, 25 bp, Homo sapien
aagagcccaggataaacccgcaggc

SEQ ID NO: 5721200 - DNA, 25 bp, Homo sapien
agggcagacaggctgagcttcttca

SEQ ID NO: 5721201 - DNA, 25 bp, Homo sapien
tccagggggtgcctcaggaccccgt

SEQ ID NO: 5721202 - DNA, 25 bp, Homo sapien
gatgaagcccaacaaacgaaggagg

SEQ ID NO: 5721203 - DNA, 25 bp, Homo sapien
accaggttgacgagcatggccatcc

SEQ ID NO: 5721204 - DNA, 25 bp, Homo sapien
gggtggtcaggacgctcaccaggta

SEQ ID NO: 5721205 - DNA, 25 bp, Homo sapien
tattgcagggcgagtaggggtccag

SEQ ID NO: 5721206 - DNA, 25 bp, Homo sapien
cccaggaagaggaaggagacgtagc

SEQ ID NO: 5721207 - DNA, 25 bp, Homo sapien
agaggggagtttctaaagcatgtcg

SEQ ID NO: 5721208 - DNA, 25 bp, Homo sapien
aagtgaggcccgcgaggtctgtggg

SEQ ID NO: 5721209 - DNA, 25 bp, Homo sapien
cttttaatataattttcagcaaacg

SEQ ID NO: 5721210 - DNA, 25 bp, Homo sapien
ttcctatatagagcgaggagtcctt

SEQ ID NO: 5721211 - DNA, 25 bp, Homo sapien
ttgcagccagcaaagcaggcagaca

SEQ ID NO: 5721212 - DNA, 25 bp, Homo sapien
gtagaggacgcaggcgccttgctcc

SEQ ID NO: 5721213 - DNA, 25 bp, Homo sapien
cccaccgtgccctgcgccagcatca

SEQ ID NO: 5721214 - DNA, 25 bp, Homo sapien
ggtttggcattcacagttattattg

SEQ ID NO: 5721215 - DNA, 25 bp, Homo sapien
gatgccgccgcagccgatcaggcgc

SEQ ID NO: 5721216 - DNA, 25 bp, Homo sapien
ttgaggcagatgaggtcggggtcgg

SEQ ID NO: 5721217 - DNA, 25 bp, Homo sapien
ttttctttttcttgttcctctgcgc

SEQ ID NO: 5721218 - DNA, 25 bp, Homo sapien
tgaggcacgcacagcccgtgagatt

SEQ ID NO: 5721219 - DNA, 25 bp, Homo sapien
ctcagtcagaggagcattcccaaga

SEQ ID NO: 5721220 - DNA, 25 bp, Homo sapien
cagaggagcattcccaagaggggag

SEQ ID NO: 5721221 - DNA, 25 bp, Homo sapien
ggagcacgctaagtgaggcccgcga

SEQ ID NO: 5721222 - DNA, 25 bp, Homo sapien
caggttgaacctacgctccagggtg

SEQ ID NO: 5721223 - DNA, 25 bp, Homo sapien
cagcaaacgtacagtatgtacttta

SEQ ID NO: 5721224 - DNA, 25 bp, Homo sapien
gcgggggtcgtccggagtgatgtcc

SEQ ID NO: 5721225 - DNA, 25 bp, Homo sapien
tgctcgctttccatggcggggtctg

SEQ ID NO: 5721226 - DNA, 25 bp, Homo sapien
ccaggtgctgtgctgtttccatagg

SEQ ID NO: 5721227 - DNA, 25 bp, Homo sapien
ggttctcggacagggaggagcacgc

SEQ ID NO: 5721228 - DNA, 25 bp, Homo sapien
cctctttggtcctcatcacaggcct

SEQ ID NO: 5721229 - DNA, 25 bp, Homo sapien
ttttcctcaggcactgccacgtggt

SEQ ID NO: 5721230 - DNA, 25 bp, Homo sapien
actcctgaccataagtcacctcttt

SEQ ID NO: 5721231 - DNA, 25 bp, Homo sapien
gagggatgggtggaagggaatttgc

SEQ ID NO: 5721232 - DNA, 25 bp, Homo sapien
gcaggacaccttctttttctttttc

SEQ ID NO: 5721233 - DNA, 25 bp, Homo sapien
caggcgcggccggtgcccgcgtgcc

SEQ ID NO: 5721234 - DNA, 25 bp, Homo sapien
gaggagtccttcctccgcacgtggt

SEQ ID NO: 5721235 - DNA, 25 bp, Homo sapien
cggtggtgaggcacgcacagcccgt

SEQ ID NO: 5721236 - DNA, 25 bp, Homo sapien
ttttcttgttcctctgcgcctcgtc

SEQ ID NO: 5721237 - DNA, 25 bp, Homo sapien
aactgctgctccaggtacttcccca

SEQ ID NO: 5721238 - DNA, 25 bp, Homo sapien
catgacgatgccgccgcagccgatc

SEQ ID NO: 5721239 - DNA, 25 bp, Homo sapien
gagcgcgatggcgatgctgacatac

SEQ ID NO: 5721240 - DNA, 25 bp, Homo sapien
gatgccatctgccccacacactgga

SEQ ID NO: 5721241 - DNA, 25 bp, Homo sapien
tcggcaagccatccccagaggaggt

SEQ ID NO: 5721242 - DNA, 25 bp, Homo sapien
gaaaataaacgctgcaaaaatacag

SEQ ID NO: 5721243 - DNA, 25 bp, Homo sapien
cagacgtcgcggccctcggcgcccc

SEQ ID NO: 5721244 - DNA, 25 bp, Homo sapien
ctaaagcatgtcggcaagccatccc

SEQ ID NO: 5721245 - DNA, 25 bp, Homo sapien
gatgccagccccgaagatgaggggt

SEQ ID NO: 5721246 - DNA, 25 bp, Homo sapien
ctctcagctgctggaaacaggaggc

SEQ ID NO: 5721247 - DNA, 25 bp, Homo sapien
gctccagaacaggcaggtggagtcg

SEQ ID NO: 5721248 - DNA, 25 bp, Homo sapien
gcagcgccgacagcagcgcgcccag

SEQ ID NO: 5721249 - DNA, 25 bp, Homo sapien
ttgagtatgtgctttttcccccctc

SEQ ID NO: 5721250 - DNA, 25 bp, Homo sapien
ggcagatgaggtcggggtcgggccc

SEQ ID NO: 5721251 - DNA, 25 bp, Homo sapien
cttgttcctctgcgcctcgtccccc

SEQ ID NO: 5721252 - DNA, 25 bp, Homo sapien
aggatgatgcaggtgaacacagggt

SEQ ID NO: 5721253 - DNA, 25 bp, Homo sapien
aagcagctggttggcagaagaggtg

SEQ ID NO: 5721254 - DNA, 25 bp, Homo sapien
tgggtggaagggaatttgcacacca

SEQ ID NO: 5721255 - DNA, 25 bp, Homo sapien
agcgtaagacttgagttcagggctg

SEQ ID NO: 5721256 - DNA, 25 bp, Homo sapien
aggtggagtcgatgccagccccgaa

SEQ ID NO: 5721257 - DNA, 25 bp, Homo sapien
taccagcatcgtgaacaggattcct

SEQ ID NO: 5721258 - DNA, 25 bp, Homo sapien
aggtacttccccaaaaaggcagcga

SEQ ID NO: 5721259 - DNA, 25 bp, Homo sapien
ccttcgggatcactctcagctgctg

SEQ ID NO: 5721260 - DNA, 25 bp, Homo sapien
gggggtcgtccggagtgatgtccag

SEQ ID NO: 5721261 - DNA, 25 bp, Homo sapien
gtccggttgaggcagatgaggtcgg

SEQ ID NO: 5721262 - DNA, 25 bp, Homo sapien
gcggccggtgcccgcgtgccccgaa

SEQ ID NO: 5721263 - DNA, 25 bp, Homo sapien
agcccgtgagattcgtgctgttgca

SEQ ID NO: 5721264 - DNA, 25 bp, Homo sapien
cccaaacatcaagagggaagagaag

SEQ ID NO: 5721265 - DNA, 25 bp, Homo sapien
gccgctgccgctttcccgctcgccc

SEQ ID NO: 5721266 - DNA, 25 bp, Homo sapien
ggctgagcttcttcaccaaaagacc

SEQ ID NO: 5721267 - DNA, 25 bp, Homo sapien
gggagtttctaaagcatgtcggcaa

SEQ ID NO: 5721268 - DNA, 25 bp, Homo sapien
tgtctgtgccatggcaccgatcagg

SEQ ID NO: 5721269 - DNA, 25 bp, Homo sapien
gaagagtaaggcaccgcagagcaga

SEQ ID NO: 5721270 - DNA, 25 bp, Homo sapien
cgctaagtgaggcccgcgaggtctg

SEQ ID NO: 5721271 - DNA, 25 bp, Homo sapien
tcggggcaggttttctcagtctcaa

SEQ ID NO: 5721272 - DNA, 25 bp, Homo sapien
gagggatgaagcccaacaaacgaag

SEQ ID NO: 5721273 - DNA, 25 bp, Homo sapien
ctggtccaaataccagcatcgtgaa

SEQ ID NO: 5721274 - DNA, 25 bp, Homo sapien
tttttgatgtagcgtttatagtttt

SEQ ID NO: 5721275 - DNA, 25 bp, Homo sapien
ggctgactgtcctgatgaggatgat

SEQ ID NO: 5721276 - DNA, 25 bp, Homo sapien
gacaagcacacgggatcgcagtcat

SEQ ID NO: 5721277 - DNA, 25 bp, Homo sapien
tccacgtagattttggtacagaaag

SEQ ID NO: 5721278 - DNA, 25 bp, Homo sapien
tgagattcgtgctgttgcagccagc

SEQ ID NO: 5721279 - DNA, 25 bp, Homo sapien
ggtttttgatgtagcgtttatagtt

SEQ ID NO: 5721280 - DNA, 25 bp, Homo sapien
agacttgagttcagggctgactgtc

SEQ ID NO: 5721281 - DNA, 25 bp, Homo sapien
cgctttccatggcggggtctgagtg

SEQ ID NO: 5721282 - DNA, 25 bp, Homo sapien
ctttttcttgttcctctgcgcctcg

SEQ ID NO: 5721283 - DNA, 25 bp, Homo sapien
tttcattaaagctgttggagccctc

SEQ ID NO: 5721284 - DNA, 25 bp, Homo sapien
ccccagaggaggtagagggatgggt

SEQ ID NO: 5721285 - DNA, 25 bp, Homo sapien
ccgccgccgccgccgccgctgccgc

SEQ ID NO: 5721286 - DNA, 25 bp, Homo sapien
tgcgcagacgtcgcggccctcggcg

SEQ ID NO: 5721287 - DNA, 25 bp, Homo sapien
ctgctgtctggctccagggggtgcc

SEQ ID NO: 5721288 - DNA, 25 bp, Homo sapien
tgtgccatggcaccgatcaggctgc

SEQ ID NO: 5721289 - DNA, 25 bp, Homo sapien
tccattctatgcaacaggttggttt

SEQ ID NO: 5721290 - DNA, 25 bp, Homo sapien
ggctgatttcattaaagctgttgga

SEQ ID NO: 5721291 - DNA, 25 bp, Homo sapien
cccgcgaggtctgtgggtggtggag

SEQ ID NO: 5721292 - DNA, 25 bp, Homo sapien
acgctccagggtggtcaggacgctc

SEQ ID NO: 5721293 - DNA, 25 bp, Homo sapien
gaggatgatgactgagggtgtctgt

SEQ ID NO: 5721294 - DNA, 25 bp, Homo sapien
gcctcgtacttgtactggtgggtca

SEQ ID NO: 5721295 - DNA, 25 bp, Homo sapien
ccagccccgaagatgaggggtggag

SEQ ID NO: 5721296 - DNA, 25 bp, Homo sapien
gcctcaaaggaccacacactggctg

SEQ ID NO: 5721297 - DNA, 25 bp, Homo sapien
cagaacgtgctccagaacaggcagg

SEQ ID NO: 5721298 - DNA, 25 bp, Homo sapien
agctgctagcgatcacacccacgtc

SEQ ID NO: 5721299 - DNA, 25 bp, Homo sapien
ttggcagaagaggtggtgaggttaa

SEQ ID NO: 5721300 - DNA, 25 bp, Homo sapien
gtgccctgcgccagcatcagggcgc

SEQ ID NO: 5721301 - DNA, 25 bp, Homo sapien
tggccatccgaatggcccccagggc

SEQ ID NO: 5721302 - DNA, 25 bp, Homo sapien
gcaggtgaacacagggtttgagagc

SEQ ID NO: 5721303 - DNA, 25 bp, Homo sapien
ggcgcactcggacacaaggaagatc

SEQ ID NO: 5721304 - DNA, 25 bp, Homo sapien
gcaaacgtacagtatgtactttaca

SEQ ID NO: 5721305 - DNA, 25 bp, Homo sapien
acaaaggagtcttctgaaggtgaat

SEQ ID NO: 5721306 - DNA, 25 bp, Homo sapien
cagccgatcaggcgcggccggtgcc

SEQ ID NO: 5721307 - DNA, 25 bp, Homo sapien
aaaggcagcgaagccagccaccact

SEQ ID NO: 5721308 - DNA, 25 bp, Homo sapien
aaggcgaaggatttgagcgcgatgg

SEQ ID NO: 5721309 - DNA, 25 bp, Homo sapien
agggccaggccctcagcttctcaca

SEQ ID NO: 5721310 - DNA, 25 bp, Homo sapien
ataattttcagcaaacgtacagtat

SEQ ID NO: 5721311 - DNA, 25 bp, Homo sapien
cttggtactctgtgctggtgctcag

SEQ ID NO: 5721312 - DNA, 25 bp, Homo sapien
gagcccaggataaacccgcaggctg

SEQ ID NO: 5721313 - DNA, 25 bp, Homo sapien
aaccccagccacagggccagtgtcg

SEQ ID NO: 5721314 - DNA, 25 bp, Homo sapien
cgcaggcgccttgctccccacagaa

SEQ ID NO: 5721315 - DNA, 25 bp, Homo sapien
cacccaggactggggcattttccag

SEQ ID NO: 5721316 - DNA, 25 bp, Homo sapien
acgctgcaaaaatacagagtaccac

SEQ ID NO: 5721317 - DNA, 25 bp, Homo sapien
tggtactctgtgctggtgctcagcc

SEQ ID NO: 5721318 - DNA, 25 bp, Homo sapien
gtacagtatgtactttacatcacat

SEQ ID NO: 5721319 - DNA, 25 bp, Homo sapien
cagcatgactctttagagacccagg

SEQ ID NO: 5721320 - DNA, 25 bp, Homo sapien
cgggatcgcagtcatcccaagcagc

SEQ ID NO: 5721321 - DNA, 25 bp, Homo sapien
agacaggtaggtgatgccatctgcc

SEQ ID NO: 5721322 - DNA, 25 bp, Homo sapien
gcaacaggttggtttttaccctctc

SEQ ID NO: 5721323 - DNA, 25 bp, Homo sapien
acctcccaggaagatacccagacaa

SEQ ID NO: 5721324 - DNA, 25 bp, Homo sapien
ggaatttgcacaccaggtcagcatg

SEQ ID NO: 5721325 - DNA, 25 bp, Homo sapien
actgcaatctccatgcaggcggcca

SEQ ID NO: 5721326 - DNA, 25 bp, Homo sapien
ctgcacaggggtagcaccgatgccc

SEQ ID NO: 5721327 - DNA, 25 bp, Homo sapien
ccctcagtcagaggagcattcccaa

SEQ ID NO: 5721328 - DNA, 25 bp, Homo sapien
cgtttatagtttttcctcaggcact

SEQ ID NO: 5721329 - DNA, 25 bp, Homo sapien
gaggcccgcgaggtctgtgggtggt

SEQ ID NO: 5721330 - DNA, 25 bp, Homo sapien
gtcctgatgaggatgatgactgagg

SEQ ID NO: 5721331 - DNA, 25 bp, Homo sapien
cgcccaggggctgcacaggggtagc

SEQ ID NO: 5721332 - DNA, 25 bp, Homo sapien
ctcgtattctctttcggagagcatg

SEQ ID NO: 5721333 - DNA, 25 bp, Homo sapien
tgcctactctgagagctgtttggag

SEQ ID NO: 5721334 - DNA, 25 bp, Homo sapien
cagggaggagcacgctaagtgaggc

SEQ ID NO: 5721335 - DNA, 25 bp, Homo sapien
aagaggaaggagacgtagcaagcag

SEQ ID NO: 5721336 - DNA, 25 bp, Homo sapien
gatgggtggaagggaatttgcacac

SEQ ID NO: 5721337 - DNA, 25 bp, Homo sapien
gacgtcgcggccctcggcgccccag

SEQ ID NO: 5721338 - DNA, 25 bp, Homo sapien
caggctggtccaaataccagcatcg

SEQ ID NO: 5721339 - DNA, 25 bp, Homo sapien
gttcccgatctcgaagctgctagcg

SEQ ID NO: 5721340 - DNA, 25 bp, Homo sapien
ggctggataatccacatggggaccc

SEQ ID NO: 5721341 - DNA, 25 bp, Homo sapien
caagaggggagtttctaaagcatgt

SEQ ID NO: 5721342 - DNA, 25 bp, Homo sapien
ggaacagtaaccccagccacagggc

SEQ ID NO: 5721343 - DNA, 25 bp, Homo sapien
gccaccactgcaatctccatgcagg

SEQ ID NO: 5721344 - DNA, 25 bp, Homo sapien
caggcctgcgcttggggcctcaaag

SEQ ID NO: 5721345 - DNA, 25 bp, Homo sapien
agcacgctaagtgaggcccgcgagg

SEQ ID NO: 5721346 - DNA, 25 bp, Homo sapien
gatgtccaggttacttgtgtcaatg

SEQ ID NO: 5721347 - DNA, 25 bp, Homo sapien
ccaggtcagcatgactctttagaga

SEQ ID NO: 5721348 - DNA, 25 bp, Homo sapien
gtgctgttgcagccagcaaagcagg

SEQ ID NO: 5721349 - DNA, 25 bp, Homo sapien
atgtaggagacgcccaggggctgca

SEQ ID NO: 5721350 - DNA, 25 bp, Homo sapien
attcggggcaggttttctcagtctc

SEQ ID NO: 5721351 - DNA, 25 bp, Homo sapien
catcccaagcagctggttggcagaa

SEQ ID NO: 5721352 - DNA, 25 bp, Homo sapien
atgatgactgagggtgtctgtgcca

SEQ ID NO: 5721353 - DNA, 25 bp, Homo sapien
actgcatccacgtagattttggtac

SEQ ID NO: 5721354 - DNA, 25 bp, Homo sapien
gggtggtggagggctgttctctcca

SEQ ID NO: 5721355 - DNA, 25 bp, Homo sapien
tatatagagcgaggagtccttcctc

SEQ ID NO: 5721356 - DNA, 25 bp, Homo sapien
gccgccgccgccgccgccgccgctg

SEQ ID NO: 5721357 - DNA, 25 bp, Homo sapien
gttaaactgctgctccaggtacttc

SEQ ID NO: 5721358 - DNA, 25 bp, Homo sapien
ggatgatgactgagggtgtctgtgc

SEQ ID NO: 5721359 - DNA, 25 bp, Homo sapien
accacactcaaaaatctattgagta

SEQ ID NO: 5721360 - DNA, 25 bp, Homo sapien
tcaccaaaagacctcccaggaagat

SEQ ID NO: 5721361 - DNA, 25 bp, Homo sapien
ggaaggcctcttggcacccaggact

SEQ ID NO: 5721362 - DNA, 25 bp, Homo sapien
ggtgaatgtgattcggggcaggttt

SEQ ID NO: 5721363 - DNA, 25 bp, Homo sapien
gtggtgaggttaaactgctgctcca

SEQ ID NO: 5721364 - DNA, 25 bp, Homo sapien
ggcaccgatcaggctgcagatacac

SEQ ID NO: 5721365 - DNA, 25 bp, Homo sapien
aaagcgtaagacttgagttcagggc

SEQ ID NO: 5721366 - DNA, 25 bp, Homo sapien
gggatgggtggaagggaatttgcac

SEQ ID NO: 5721367 - DNA, 25 bp, Homo sapien
gggaggagcacgctaagtgaggccc

SEQ ID NO: 5721368 - DNA, 25 bp, Homo sapien
cactgctgtctggctccagggggtg

SEQ ID NO: 5721369 - DNA, 25 bp, Homo sapien
aggagtcttctgaaggtgaatgtga

SEQ ID NO: 5721370 - DNA, 25 bp, Homo sapien
ccccgaagtagctcacgaagaggat

SEQ ID NO: 5721371 - DNA, 25 bp, Homo sapien
ccttgctccccacagaacgtgctcc

SEQ ID NO: 5721372 - DNA, 25 bp, Homo sapien
agaagaagagtaaggcaccgcagag

SEQ ID NO: 5721373 - DNA, 25 bp, Homo sapien
ctcaatgtcttggtactctgtgctg

SEQ ID NO: 5721374 - DNA, 25 bp, Homo sapien
tgttgcagccagcaaagcaggcaga

SEQ ID NO: 5721375 - DNA, 25 bp, Homo sapien
caacaaacgaaggaggagaaaaaga

SEQ ID NO: 5721376 - DNA, 25 bp, Homo sapien
gaaggaggagaaaaagaactcccaa

SEQ ID NO: 5721377 - DNA, 25 bp, Homo sapien
tgtccaggttacttgtgtcaatgaa

SEQ ID NO: 5721378 - DNA, 25 bp, Homo sapien
gtgaacacagggtttgagagcaggt

SEQ ID NO: 5721379 - DNA, 25 bp, Homo sapien
gtcgatgtaggagacgcccaggggc

SEQ ID NO: 5721380 - DNA, 25 bp, Homo sapien
gcacgtggtcgtcgatgtaggagac

SEQ ID NO: 5721381 - DNA, 25 bp, Homo sapien
tgaagcccaacaaacgaaggaggag

SEQ ID NO: 5721382 - DNA, 25 bp, Homo sapien
tgcatccacgtagattttggtacag

SEQ ID NO: 5721383 - DNA, 25 bp, Homo sapien
gcttgggtctctcgtattctctttc

SEQ ID NO: 5721384 - DNA, 25 bp, Homo sapien
cgccgccgctgccgctttcccgctc

SEQ ID NO: 5721385 - DNA, 25 bp, Homo sapien
agggaatttgcacaccaggtcagca

SEQ ID NO: 5721386 - DNA, 25 bp, Homo sapien
atggcaccgatcaggctgcagatac

SEQ ID NO: 5721387 - DNA, 25 bp, Homo sapien
gctgtgctgtttccatagggaacag

SEQ ID NO: 5721388 - DNA, 25 bp, Homo sapien
tcatcacaggcctgcgcttggggcc

SEQ ID NO: 5721389 - DNA, 25 bp, Homo sapien
aggcggccaggatgatgcaggtgaa

SEQ ID NO: 5721390 - DNA, 25 bp, Homo sapien
aaactgctcatttggaaaataaacg

SEQ ID NO: 5721391 - DNA, 25 bp, Homo sapien
ccccagccacagggccagtgtcgca

SEQ ID NO: 5721392 - DNA, 25 bp, Homo sapien
tagcgatcacacccacgtcagcgct

SEQ ID NO: 5721393 - DNA, 25 bp, Homo sapien
gaaccgcccggcttcttcccctgca

SEQ ID NO: 5721394 - DNA, 25 bp, Homo sapien
gagcagcaagtacatcatgttggta

SEQ ID NO: 5721395 - DNA, 25 bp, Homo sapien
gtcacctctttggtcctcatcacag

SEQ ID NO: 5721396 - DNA, 25 bp, Homo sapien
cgtccggagtgatgtccaggttact

SEQ ID NO: 5721397 - DNA, 25 bp, Homo sapien
aatggcccccagggcagacaggctg

SEQ ID NO: 5721398 - DNA, 25 bp, Homo sapien
acccaggaaagatgcctactctgag

SEQ ID NO: 5721399 - DNA, 25 bp, Homo sapien
ttaagaattaaaatagtgcttttaa

SEQ ID NO: 5721400 - DNA, 25 bp, Homo sapien
ccatagggaacagtaaccccagcca

SEQ ID NO: 5721401 - DNA, 25 bp, Homo sapien
agccccgaagatgaggggtggaggg

SEQ ID NO: 5721402 - DNA, 25 bp, Homo sapien
gctgctggaaacaggaggcactgct

SEQ ID NO: 5721403 - DNA, 25 bp, Homo sapien
ctggtgctcagcccgccctcgtggt

SEQ ID NO: 5721404 - DNA, 25 bp, Homo sapien
gatgatgcaggtgaacacagggttt

SEQ ID NO: 5721405 - DNA, 25 bp, Homo sapien
tgcgccagcatcagggcgcactcgg

SEQ ID NO: 5721406 - DNA, 25 bp, Homo sapien
caagtacatcatgttggtagccgtc

SEQ ID NO: 5721407 - DNA, 25 bp, Homo sapien
ttgcgttctcagcagggacggtggt

SEQ ID NO: 5721408 - DNA, 25 bp, Homo sapien
cagggctgagccaggtgctgtgctg

SEQ ID NO: 5721409 - DNA, 25 bp, Homo sapien
caagccatccccagaggaggtagag

SEQ ID NO: 5721410 - DNA, 25 bp, Homo sapien
caccaggtaggcgcccaccgtgccc

SEQ ID NO: 5721411 - DNA, 25 bp, Homo sapien
agatcttgatgttggaaaagcagga

SEQ ID NO: 5721412 - DNA, 25 bp, Homo sapien
cccagcgccatgacgatgccgccgc

SEQ ID NO: 5721413 - DNA, 25 bp, Homo sapien
tagctcacgaagaggatgagcgcca

SEQ ID NO: 5721414 - DNA, 25 bp, Homo sapien
tctgtgctggtgctcagcccgccct

SEQ ID NO: 5721415 - DNA, 25 bp, Homo sapien
tacacatcacacagaggaaagtgag

SEQ ID NO: 5721416 - DNA, 25 bp, Homo sapien
gagtactcctgaccataagtcacct

SEQ ID NO: 5721417 - DNA, 25 bp, Homo sapien
taatataattttcagcaaacgtaca

SEQ ID NO: 5721418 - DNA, 25 bp, Homo sapien
ggctggtccaaataccagcatcgtg

SEQ ID NO: 5721419 - DNA, 25 bp, Homo sapien
tcacagttattattgcagggcgagt

SEQ ID NO: 5721420 - DNA, 25 bp, Homo sapien
agtcgatgccagccccgaagatgag

SEQ ID NO: 5721421 - DNA, 25 bp, Homo sapien
tcacgaagaggatgagcgccaggtt

SEQ ID NO: 5721422 - DNA, 25 bp, Homo sapien
acacccacgtcagcgctctgcaggt

SEQ ID NO: 5721423 - DNA, 25 bp, Homo sapien
agagcaggtgcttggtgaccttcgg

SEQ ID NO: 5721424 - DNA, 25 bp, Homo sapien
caaaaatacagagtaccacactcaa

SEQ ID NO: 5721425 - DNA, 25 bp, Homo sapien
tacagagtaccacactcaaaaatct

SEQ ID NO: 5721426 - DNA, 25 bp, Homo sapien
tgatgttggaaaagcaggacacctt

SEQ ID NO: 5721427 - DNA, 25 bp, Homo sapien
tgatgaggatgatgactgagggtgt

SEQ ID NO: 5721428 - DNA, 25 bp, Homo sapien
agcaggtgcttggtgaccttcggga

SEQ ID NO: 5721429 - DNA, 25 bp, Homo sapien
gggatgaagcccaacaaacgaagga

SEQ ID NO: 5721430 - DNA, 25 bp, Homo sapien
tggtgaccttcgggatcactctcag

SEQ ID NO: 5721431 - DNA, 25 bp, Homo sapien
cgcttggggcctcaaaggaccacac

SEQ ID NO: 5721432 - DNA, 25 bp, Homo sapien
aacccaaacatcaagagggaagaga

SEQ ID NO: 5721433 - DNA, 25 bp, Homo sapien
ggcccgcgaggtctgtgggtggtgg

SEQ ID NO: 5721434 - DNA, 25 bp, Homo sapien
atgtagcgtttatagtttttcctca

SEQ ID NO: 5721435 - DNA, 25 bp, Homo sapien
ccccaaaaaggcagcgaagccagcc

SEQ ID NO: 5721436 - DNA, 25 bp, Homo sapien
gctgcgcagacgtcgcggccctcgg

SEQ ID NO: 5721437 - DNA, 25 bp, Homo sapien
ccagcaaagcaggcagacaggtagg

SEQ ID NO: 5721438 - DNA, 25 bp, Homo sapien
cgcccgagccgttggctgcgcagac

SEQ ID NO: 5721439 - DNA, 25 bp, Homo sapien
ggcggggtctgagtgcgggggcagg

SEQ ID NO: 5721440 - DNA, 25 bp, Homo sapien
gcgatgctgacatacaggtatcggt

SEQ ID NO: 5721441 - DNA, 25 bp, Homo sapien
ccaggatgatgcaggtgaacacagg

SEQ ID NO: 5721442 - DNA, 25 bp, Homo sapien
gaggagaaaaagaactcccaaagcg

SEQ ID NO: 5721443 - DNA, 25 bp, Homo sapien
cgggttctcggacagggaggagcac

SEQ ID NO: 5721444 - DNA, 25 bp, Homo sapien
ctgaccataagtcacctctttggtc

SEQ ID NO: 5721445 - DNA, 25 bp, Homo sapien
acggttgcgttctcagcagggacgg

SEQ ID NO: 5721446 - DNA, 25 bp, Homo sapien
caggactggggcattttccaggaac

SEQ ID NO: 5721447 - DNA, 25 bp, Homo sapien
ggtccaaataccagcatcgtgaaca

SEQ ID NO: 5721448 - DNA, 25 bp, Homo sapien
cttggggcctcaaaggaccacacac

SEQ ID NO: 5721449 - DNA, 25 bp, Homo sapien
acgaagaggatgagcgccaggttcc

SEQ ID NO: 5721450 - DNA, 25 bp, Homo sapien
tcgaagctgctagcgatcacaccca

SEQ ID NO: 5721451 - DNA, 25 bp, Homo sapien
caatgaagactgcatccacgtagat

SEQ ID NO: 5721452 - DNA, 25 bp, Homo sapien
gtcatcccaagcagctggttggcag

SEQ ID NO: 5721453 - DNA, 25 bp, Homo sapien
aggtcagcatgactctttagagacc

SEQ ID NO: 5721454 - DNA, 25 bp, Homo sapien
gtttttcctcaggcactgccacgtg

SEQ ID NO: 5721455 - DNA, 25 bp, Homo sapien
ccgcctcgtacttgtactggtgggt

SEQ ID NO: 5721456 - DNA, 25 bp, Homo sapien
gccgcagccgatcaggcgcggccgg

SEQ ID NO: 5721457 - DNA, 25 bp, Homo sapien
cccgtgagattcgtgctgttgcagc

SEQ ID NO: 5721458 - DNA, 25 bp, Homo sapien
aggggagtttctaaagcatgtcggc

SEQ ID NO: 5721459 - DNA, 25 bp, Homo sapien
gagtatgtgctttttcccccctcca

SEQ ID NO: 5721460 - DNA, 25 bp, Homo sapien
agcgaagccagccaccactgcaatc

SEQ ID NO: 5721461 - DNA, 25 bp, Homo sapien
aaggatttgagcgcgatggcgatgc

SEQ ID NO: 5721462 - DNA, 25 bp, Homo sapien
ttctcggacagggaggagcacgcta

SEQ ID NO: 5721463 - DNA, 25 bp, Homo sapien
cacacgggatcgcagtcatcccaag

SEQ ID NO: 5721464 - DNA, 25 bp, Homo sapien
ctcagcccgccctcgtggtttttga

SEQ ID NO: 5721465 - DNA, 25 bp, Homo sapien
tggaaacccaaacatcaagagggaa

SEQ ID NO: 5721466 - DNA, 25 bp, Homo sapien
gggcagggactgtggaaacccaaac

SEQ ID NO: 5721467 - DNA, 25 bp, Homo sapien
accacacactggctggataatccac

SEQ ID NO: 5721468 - DNA, 25 bp, Homo sapien
acagttattattgcagggcgagtag

SEQ ID NO: 5721469 - DNA, 25 bp, Homo sapien
catttggaaaataaacgctgcaaaa

SEQ ID NO: 5721470 - DNA, 25 bp, Homo sapien
agcatgtcggcaagccatccccaga

SEQ ID NO: 5721471 - DNA, 25 bp, Homo sapien
gctgtctggctccagggggtgcctc

SEQ ID NO: 5721472 - DNA, 25 bp, Homo sapien
aggagacgcccaggggctgcacagg

SEQ ID NO: 5721473 - DNA, 25 bp, Homo sapien
gacgctcaccaggtaggcgcccacc

SEQ ID NO: 5721474 - DNA, 25 bp, Homo sapien
acctgggccccaatgagcagcaagt

SEQ ID NO: 5721475 - DNA, 25 bp, Homo sapien
ggcgcggccggtgcccgcgtgcccc

SEQ ID NO: 5721476 - DNA, 25 bp, Homo sapien
cggcgccccagcggatctcgcccgc

SEQ ID NO: 5721477 - DNA, 25 bp, Homo sapien
tgcgcttggggcctcaaaggaccac

SEQ ID NO: 5721478 - DNA, 25 bp, Homo sapien
agccctcagtcagaggagcattccc

SEQ ID NO: 5721479 - DNA, 25 bp, Homo sapien
ggggcaggttttctcagtctcaatg

SEQ ID NO: 5721480 - DNA, 25 bp, Homo sapien
atttgagcgcgatggcgatgctgac

SEQ ID NO: 5721481 - DNA, 25 bp, Homo sapien
gagagctgtttggagtactcctgac

SEQ ID NO: 5721482 - DNA, 25 bp, Homo sapien
gaagggaatttgcacaccaggtcag

SEQ ID NO: 5721483 - DNA, 25 bp, Homo sapien
ggagtccttcctccgcacgtggtcg

SEQ ID NO: 5721484 - DNA, 25 bp, Homo sapien
ccccaccaggctccgatccagcggg

SEQ ID NO: 5721485 - DNA, 25 bp, Homo sapien
gcacagcccgtgagattcgtgctgt

SEQ ID NO: 5721486 - DNA, 25 bp, Homo sapien
taagacttgagttcagggctgactg

SEQ ID NO: 5721487 - DNA, 25 bp, Homo sapien
tggggaccctcgggttctcggacag

SEQ ID NO: 5721488 - DNA, 25 bp, Homo sapien
aaggaccacacactggctggataat

SEQ ID NO: 5721489 - DNA, 25 bp, Homo sapien
ttagagacccaggaaagatgcctac

SEQ ID NO: 5721490 - DNA, 25 bp, Homo sapien
ggggtccagggctgagccaggtgct

SEQ ID NO: 5721491 - DNA, 25 bp, Homo sapien
gtcagcgctctgcaggttgaaccta

SEQ ID NO: 5721492 - DNA, 25 bp, Homo sapien
caggttacttgtgtcaatgaagact

SEQ ID NO: 5721493 - DNA, 25 bp, Homo sapien
tcgtcgatgtaggagacgcccaggg

SEQ ID NO: 5721494 - DNA, 25 bp, Homo sapien
agctggttggcagaagaggtggtga

SEQ ID NO: 5721495 - DNA, 25 bp, Homo sapien
ttaccctctcggctgatttcattaa

SEQ ID NO: 5721496 - DNA, 25 bp, Homo sapien
gtgaacaggattcctatatagagcg

SEQ ID NO: 5721497 - DNA, 25 bp, Homo sapien
tgctgggcttgggtctctcgtattc

SEQ ID NO: 5721498 - DNA, 25 bp, Homo sapien
gctgcagatacacatcacacagagg

SEQ ID NO: 5721499 - DNA, 25 bp, Homo sapien
cccagacaagcacacgggatcgcag

SEQ ID NO: 5721500 - DNA, 25 bp, Homo sapien
ccaggaagaggaagagggccaggcc

SEQ ID NO: 5721501 - DNA, 25 bp, Homo sapien
cagacaggctgagcttcttcaccaa

SEQ ID NO: 5721502 - DNA, 25 bp, Homo sapien
tgcccaggagcacctgggccccaat

SEQ ID NO: 5721503 - DNA, 25 bp, Homo sapien
gatccagcgggggtcgtccggagtg

SEQ ID NO: 5721504 - DNA, 25 bp, Homo sapien
actcgggcagcgccgacagcagcgc

SEQ ID NO: 5721505 - DNA, 25 bp, Homo sapien
gaagtagctcacgaagaggatgagc

SEQ ID NO: 5721506 - DNA, 25 bp, Homo sapien
agcaccgatgcccaggagcacctgg

SEQ ID NO: 5721507 - DNA, 25 bp, Homo sapien
gatacccagacaagcacacgggatc

SEQ ID NO: 5721508 - DNA, 25 bp, Homo sapien
aggtgatgccatctgccccacacac

SEQ ID NO: 5721509 - DNA, 25 bp, Homo sapien
gcgaggagtccttcctccgcacgtg

SEQ ID NO: 5721510 - DNA, 25 bp, Homo sapien
cgctcaccaggtaggcgcccaccgt

SEQ ID NO: 5721511 - DNA, 25 bp, Homo sapien
ctccaggaagaggaagagggccagg

SEQ ID NO: 5721512 - DNA, 25 bp, Homo sapien
gaggaaggagacgtagcaagcagtg

SEQ ID NO: 5721513 - DNA, 25 bp, Homo sapien
gtaggtgatgccatctgccccacac

SEQ ID NO: 5721514 - DNA, 25 bp, Homo sapien
cacagaacgtgctccagaacaggca

SEQ ID NO: 5721515 - DNA, 25 bp, Homo sapien
aaggaatcggtttggcattcacagt

SEQ ID NO: 5721516 - DNA, 25 bp, Homo sapien
tgctcagcccgccctcgtggttttt

SEQ ID NO: 5721517 - DNA, 25 bp, Homo sapien
actctgtgctggtgctcagcccgcc

SEQ ID NO: 5721518 - DNA, 25 bp, Homo sapien
agacgtagcaagcagtggacaccag

SEQ ID NO: 5721519 - DNA, 25 bp, Homo sapien
gaggcagatgaggtcggggtcgggc

SEQ ID NO: 5721520 - DNA, 25 bp, Homo sapien
ataagtcacctctttggtcctcatc

SEQ ID NO: 5721521 - DNA, 25 bp, Homo sapien
tccaggaaccacggttgcgttctca

SEQ ID NO: 5721522 - DNA, 25 bp, Homo sapien
cgcgcccagcgccatgacgatgccg

SEQ ID NO: 5721523 - DNA, 25 bp, Homo sapien
ggtcaggacgctcaccaggtaggcg

SEQ ID NO: 5721524 - DNA, 25 bp, Homo sapien
gcagctggttggcagaagaggtggt

SEQ ID NO: 5721525 - DNA, 25 bp, Homo sapien
gacagggaggagcacgctaagtgag

SEQ ID NO: 5721526 - DNA, 25 bp, Homo sapien
gttggaaaagcaggacaccttcttt

SEQ ID NO: 5721527 - DNA, 25 bp, Homo sapien
gttctcagcagggacggtggtgagg

SEQ ID NO: 5721528 - DNA, 25 bp, Homo sapien
cccctccattctatgcaacaggttg

SEQ ID NO: 5721529 - DNA, 25 bp, Homo sapien
caggcgccttgctccccacagaacg

SEQ ID NO: 5721530 - DNA, 25 bp, Homo sapien
gaactcgggcagcgccgacagcagc

SEQ ID NO: 5721531 - DNA, 25 bp, Homo sapien
actcccaaagcgtaagacttgagtt

SEQ ID NO: 5721532 - DNA, 25 bp, Homo sapien
ctggttggcagaagaggtggtgagg

SEQ ID NO: 5721533 - DNA, 25 bp, Homo sapien
tgcaaaaatacagagtaccacactc

SEQ ID NO: 5721534 - DNA, 25 bp, Homo sapien
tgctgtttccatagggaacagtaac

SEQ ID NO: 5721535 - DNA, 25 bp, Homo sapien
gatgactgagggtgtctgtgccatg

SEQ ID NO: 5721536 - DNA, 25 bp, Homo sapien
gaccccgttgctgggcttgggtctc

SEQ ID NO: 5721537 - DNA, 25 bp, Homo sapien
agaggaggtagagggatgggtggaa

SEQ ID NO: 5721538 - DNA, 25 bp, Homo sapien
ggaaggagacgtagcaagcagtgga

SEQ ID NO: 5721539 - DNA, 25 bp, Homo sapien
aggaactcgggcagcgccgacagca

SEQ ID NO: 5721540 - DNA, 25 bp, Homo sapien
gcacctgggccccaatgagcagcaa

SEQ ID NO: 5721541 - DNA, 25 bp, Homo sapien
ccgacagcagcgcgcccagcgccat

SEQ ID NO: 5721542 - DNA, 25 bp, Homo sapien
cagtcatcccaagcagctggttggc

SEQ ID NO: 5721543 - DNA, 25 bp, Homo sapien
ttcccaagaggggagtttctaaagc

SEQ ID NO: 5721544 - DNA, 25 bp, Homo sapien
taaactgctgctccaggtacttccc

SEQ ID NO: 5721545 - DNA, 25 bp, Homo sapien
gatttcattaaagctgttggagccc

SEQ ID NO: 5721546 - DNA, 25 bp, Homo sapien
agcgtttatagtttttcctcaggca

SEQ ID NO: 5721547 - DNA, 25 bp, Homo sapien
ggatcactctcagctgctggaaaca

SEQ ID NO: 5721548 - DNA, 25 bp, Homo sapien
caaagcaggcagacaggtaggtgat

SEQ ID NO: 5721549 - DNA, 25 bp, Homo sapien
gttggtagccgtccggttgaggcag

SEQ ID NO: 5721550 - DNA, 25 bp, Homo sapien
ttggtacagaaagagcccaggataa

SEQ ID NO: 5721551 - DNA, 25 bp, Homo sapien
cacgggatcgcagtcatcccaagca

SEQ ID NO: 5721552 - DNA, 25 bp, Homo sapien
cgcccaccgtgccctgcgccagcat

SEQ ID NO: 5721553 - DNA, 25 bp, Homo sapien
acatatttctaaactgctcatttgg

SEQ ID NO: 5721554 - DNA, 25 bp, Homo sapien
gagttcagggctgactgtcctgatg

SEQ ID NO: 5721555 - DNA, 25 bp, Homo sapien
tcagcagggacggtggtgaggcacg

SEQ ID NO: 5721556 - DNA, 25 bp, Homo sapien
cactcggacacaaggaagatcttga

SEQ ID NO: 5721557 - DNA, 25 bp, Homo sapien
ggtagaccacattgtcgtagaggac

SEQ ID NO: 5721558 - DNA, 25 bp, Homo sapien
cacaggcctgcgcttggggcctcaa

SEQ ID NO: 5721559 - DNA, 25 bp, Homo sapien
agtagctcacgaagaggatgagcgc

SEQ ID NO: 5721560 - DNA, 25 bp, Homo sapien
ggaagaggaaggagacgtagcaagc

SEQ ID NO: 5721561 - DNA, 25 bp, Homo sapien
ggatttgagcgcgatggcgatgctg

SEQ ID NO: 5721562 - DNA, 25 bp, Homo sapien
tttgcacaccaggtcagcatgactc

SEQ ID NO: 5721563 - DNA, 25 bp, Homo sapien
cgccgccgccgccgccgccgctgcc

SEQ ID NO: 5721564 - DNA, 25 bp, Homo sapien
caaacatcaagagggaagagaagaa

SEQ ID NO: 5721565 - DNA, 25 bp, Homo sapien
aggaaagatgcctactctgagagct

SEQ ID NO: 5721566 - DNA, 25 bp, Homo sapien
cagatacacatcacacagaggaaag

SEQ ID NO: 5721567 - DNA, 25 bp, Homo sapien
gtgaccttcgggatcactctcagct

SEQ ID NO: 5721568 - DNA, 25 bp, Homo sapien
atgaagactgcatccacgtagattt

SEQ ID NO: 5721569 - DNA, 25 bp, Homo sapien
gtacaggatgaaggcgaaggatttg

SEQ ID NO: 5721570 - DNA, 25 bp, Homo sapien
ggtatcggtagaccacattgtcgta

SEQ ID NO: 5721571 - DNA, 25 bp, Homo sapien
cactggctggataatccacatgggg

SEQ ID NO: 5721572 - DNA, 25 bp, Homo sapien
acaggaggcactgctgtctggctcc

SEQ ID NO: 5721573 - DNA, 25 bp, Homo sapien
tactctgagagctgtttggagtact

SEQ ID NO: 5721574 - DNA, 25 bp, Homo sapien
gtgggtggtggagggctgttctctc

SEQ ID NO: 5721575 - DNA, 25 bp, Homo sapien
gcccaggataaacccgcaggctggt

SEQ ID NO: 5721576 - DNA, 25 bp, Homo sapien
tgtttggagtactcctgaccataag

SEQ ID NO: 5721577 - DNA, 25 bp, Homo sapien
ggagcattcccaagaggggagtttc

SEQ ID NO: 5721578 - DNA, 25 bp, Homo sapien
gctgagccaggtgctgtgctgtttc

SEQ ID NO: 5721579 - DNA, 25 bp, Homo sapien
cgcaggctggtccaaataccagcat

SEQ ID NO: 5721580 - DNA, 25 bp, Homo sapien
cctctcggctgatttcattaaagct

SEQ ID NO: 5721581 - DNA, 25 bp, Homo sapien
ctcggacagggaggagcacgctaag

SEQ ID NO: 5721582 - DNA, 25 bp, Homo sapien
ccctcgggttctcggacagggagga

SEQ ID NO: 5721583 - DNA, 25 bp, Homo sapien
atcacaggcctgcgcttggggcctc

SEQ ID NO: 5721584 - DNA, 25 bp, Homo sapien
ggtgcccgcgtgccccgaagtagct

SEQ ID NO: 5721585 - DNA, 25 bp, Homo sapien
tcagggctgactgtcctgatgagga

SEQ ID NO: 5721586 - DNA, 25 bp, Homo sapien
tggaaaagcaggacaccttcttttt

SEQ ID NO: 5721587 - DNA, 25 bp, Homo sapien
ggagtgaaggaatcggtttggcatt

SEQ ID NO: 5721588 - DNA, 25 bp, Homo sapien
gagcatggcctgctcgctttccatg

SEQ ID NO: 5721589 - DNA, 25 bp, Homo sapien
ccatccccagaggaggtagagggat

SEQ ID NO: 5721590 - DNA, 25 bp, Homo sapien
caccgatgcccaggagcacctgggc

SEQ ID NO: 5721591 - DNA, 25 bp, Homo sapien
gagtgcgggggcagggactgtggaa

SEQ ID NO: 5721592 - DNA, 25 bp, Homo sapien
cctgcgccagcatcagggcgcactc

SEQ ID NO: 5721593 - DNA, 25 bp, Homo sapien
ccggtgcccgcgtgccccgaagtag

SEQ ID NO: 5721594 - DNA, 25 bp, Homo sapien
tgtcgcagcccaggaagaggaagga

SEQ ID NO: 5721595 - DNA, 25 bp, Homo sapien
ccctcggcgccccagcggatctcgc

SEQ ID NO: 5721596 - DNA, 25 bp, Homo sapien
cggagagcatggcctgctcgctttc

SEQ ID NO: 5721597 - DNA, 25 bp, Homo sapien
tacaggtatcggtagaccacattgt

SEQ ID NO: 5721598 - DNA, 25 bp, Homo sapien
gaaaaagaactcccaaagcgtaaga

SEQ ID NO: 5721599 - DNA, 25 bp, Homo sapien
ccgaagatgaggggtggagggatga

SEQ ID NO: 5721600 - DNA, 25 bp, Homo sapien
tcacaaaggagtcttctgaaggtga

SEQ ID NO: 5721601 - DNA, 25 bp, Homo sapien
cctgctcgctttccatggcggggtc

SEQ ID NO: 5721602 - DNA, 25 bp, Homo sapien
cgagtaggggtccagggctgagcca

SEQ ID NO: 5721603 - DNA, 25 bp, Homo sapien
caccactgcaatctccatgcaggcg

SEQ ID NO: 5721604 - DNA, 25 bp, Homo sapien
tagtttttcctcaggcactgccacg

SEQ ID NO: 5721605 - DNA, 25 bp, Homo sapien
aagtgaggaaggcctcttggcaccc

SEQ ID NO: 5721606 - DNA, 25 bp, Homo sapien
agcacacgggatcgcagtcatccca

SEQ ID NO: 5721607 - DNA, 25 bp, Homo sapien
acaccaggttgacgagcatggccat

SEQ ID NO: 5721608 - DNA, 25 bp, Homo sapien
tgaaggaatcggtttggcattcaca

SEQ ID NO: 5721609 - DNA, 25 bp, Homo sapien
gcgttctcagcagggacggtggtga

SEQ ID NO: 5721610 - DNA, 25 bp, Homo sapien
tgagagcaggtgcttggtgaccttc

SEQ ID NO: 5721611 - DNA, 25 bp, Homo sapien
aatttgcacaccaggtcagcatgac

SEQ ID NO: 5721612 - DNA, 25 bp, Homo sapien
gatgaaggcgaaggatttgagcgcg

SEQ ID NO: 5721613 - DNA, 25 bp, Homo sapien
aagctgttggagccctcagtcagag

SEQ ID NO: 5721614 - DNA, 25 bp, Homo sapien
ccgaagtagctcacgaagaggatga

SEQ ID NO: 5721615 - DNA, 25 bp, Homo sapien
tggggcattttccaggaaccacggt

SEQ ID NO: 5721616 - DNA, 25 bp, Homo sapien
cattctatgcaacaggttggttttt

SEQ ID NO: 5721617 - DNA, 25 bp, Homo sapien
actggggcattttccaggaaccacg

SEQ ID NO: 5721618 - DNA, 25 bp, Homo sapien
aggataaacccgcaggctggtccaa

SEQ ID NO: 5721619 - DNA, 25 bp, Homo sapien
tctgtgccatggcaccgatcaggct

SEQ ID NO: 5721620 - DNA, 25 bp, Homo sapien
cagacaagcacacgggatcgcagtc

SEQ ID NO: 5721621 - DNA, 25 bp, Homo sapien
caatgagcagcaagtacatcatgtt

SEQ ID NO: 5721622 - DNA, 25 bp, Homo sapien
ccactgcaatctccatgcaggcggc

SEQ ID NO: 5721623 - DNA, 25 bp, Homo sapien
tgaatgtgattcggggcaggttttc

SEQ ID NO: 5721624 - DNA, 25 bp, Homo sapien
agatgaggggtggagggatgaagcc

SEQ ID NO: 5721625 - DNA, 25 bp, Homo sapien
agggctgactgtcctgatgaggatg

SEQ ID NO: 5721626 - DNA, 25 bp, Homo sapien
gtgcgggggcagggactgtggaaac

SEQ ID NO: 5721627 - DNA, 25 bp, Homo sapien
tgccacgtggtggtgtacaggatga

SEQ ID NO: 5721628 - DNA, 25 bp, Homo sapien
ggagacgtagcaagcagtggacacc

SEQ ID NO: 5721629 - DNA, 25 bp, Homo sapien
gttgctgggcttgggtctctcgtat

SEQ ID NO: 5721630 - DNA, 25 bp, Homo sapien
ctctttagagacccaggaaagatgc

SEQ ID NO: 5721631 - DNA, 25 bp, Homo sapien
ttcggagagcatggcctgctcgctt

SEQ ID NO: 5721632 - DNA, 25 bp, Homo sapien
cgtattctctttcggagagcatggc

SEQ ID NO: 5721633 - DNA, 25 bp, Homo sapien
cgggatcactctcagctgctggaaa

SEQ ID NO: 5721634 - DNA, 25 bp, Homo sapien
aatcggtttggcattcacagttatt

SEQ ID NO: 5721635 - DNA, 25 bp, Homo sapien
gtggtttttgatgtagcgtttatag

SEQ ID NO: 5721636 - DNA, 25 bp, Homo sapien
gggggcagggactgtggaaacccaa

SEQ ID NO: 5721637 - DNA, 25 bp, Homo sapien
tgcaggttgaacctacgctccaggg

SEQ ID NO: 5721638 - DNA, 25 bp, Homo sapien
ccaggttcccgatctcgaagctgct

SEQ ID NO: 5721639 - DNA, 25 bp, Homo sapien
ttccccaaaaaggcagcgaagccag

SEQ ID NO: 5721640 - DNA, 25 bp, Homo sapien
ccaggccctcagcttctcacaaagg

SEQ ID NO: 5721641 - DNA, 25 bp, Homo sapien
atatttctaaactgctcatttggaa

SEQ ID NO: 5721642 - DNA, 25 bp, Homo sapien
tcgatgccagccccgaagatgaggg

SEQ ID NO: 5721643 - DNA, 25 bp, Homo sapien
gacaggctgagcttcttcaccaaaa

SEQ ID NO: 5721644 - DNA, 25 bp, Homo sapien
cccgagccgttggctgcgcagacgt

SEQ ID NO: 5721645 - DNA, 25 bp, Homo sapien
cgcagacgtcgcggccctcggcgcc

SEQ ID NO: 5721646 - DNA, 25 bp, Homo sapien
agaggaaagtgaggaaggcctcttg

SEQ ID NO: 5721647 - DNA, 25 bp, Homo sapien
agtaggggtccagggctgagccagg

SEQ ID NO: 5721648 - DNA, 25 bp, Homo sapien
tttggtcctcatcacaggcctgcgc

SEQ ID NO: 5721649 - DNA, 25 bp, Homo sapien
tctggctccagggggtgcctcagga

SEQ ID NO: 5721650 - DNA, 25 bp, Homo sapien
acagggccagtgtcgcagcccagga

SEQ ID NO: 5721651 - DNA, 25 bp, Homo sapien
agagaagaagagtaaggcaccgcag

SEQ ID NO: 5721652 - DNA, 25 bp, Homo sapien
gacgcccaggggctgcacaggggta

SEQ ID NO: 5721653 - DNA, 25 bp, Homo sapien
cgtgagattcgtgctgttgcagcca

SEQ ID NO: 5721654 - DNA, 25 bp, Homo sapien
ggtgtctgtgccatggcaccgatca

SEQ ID NO: 5721655 - DNA, 25 bp, Homo sapien
gggacggtggtgaggcacgcacagc

SEQ ID NO: 5721656 - DNA, 25 bp, Homo sapien
aaaaaggcagcgaagccagccacca

SEQ ID NO: 5721657 - DNA, 25 bp, Homo sapien
gccagccaccactgcaatctccatg

SEQ ID NO: 5721658 - DNA, 25 bp, Homo sapien
caggtatcggtagaccacattgtcg

SEQ ID NO: 5721659 - DNA, 25 bp, Homo sapien
caatgtcttggtactctgtgctggt

SEQ ID NO: 5721660 - DNA, 25 bp, Homo sapien
gaagactgcatccacgtagattttg

SEQ ID NO: 5721661 - DNA, 25 bp, Homo sapien
cgcagccgatcaggcgcggccggtg

SEQ ID NO: 5721662 - DNA, 25 bp, Homo sapien
cgatgtaggagacgcccaggggctg

SEQ ID NO: 5721663 - DNA, 25 bp, Homo sapien
ccgctccggccgccgcccgacgaac

SEQ ID NO: 5721664 - DNA, 25 bp, Homo sapien
acgtgctccagaacaggcaggtgga

SEQ ID NO: 5721665 - DNA, 25 bp, Homo sapien
tcctgaccataagtcacctctttgg

SEQ ID NO: 5721666 - DNA, 25 bp, Homo sapien
atgttggtagccgtccggttgaggc

SEQ ID NO: 5721667 - DNA, 25 bp, Homo sapien
cgcccagcgccatgacgatgccgcc

SEQ ID NO: 5721668 - DNA, 25 bp, Homo sapien
gaagagggccaggccctcagcttct

SEQ ID NO: 5721669 - DNA, 25 bp, Homo sapien
ctggataatccacatggggaccctc

SEQ ID NO: 5721670 - DNA, 25 bp, Homo sapien
agaggacgcaggcgccttgctcccc

SEQ ID NO: 5721671 - DNA, 25 bp, Homo sapien
ctgccccacacactggagtgaagga

SEQ ID NO: 5721672 - DNA, 25 bp, Homo sapien
ggaagatacccagacaagcacacgg

SEQ ID NO: 5721673 - DNA, 25 bp, Homo sapien
agggactgtggaaacccaaacatca

SEQ ID NO: 5721674 - DNA, 25 bp, Homo sapien
gtctctcgtattctctttcggagag

SEQ ID NO: 5721675 - DNA, 25 bp, Homo sapien
gaccttcgggatcactctcagctgc

SEQ ID NO: 5721676 - DNA, 25 bp, Homo sapien
cgcagagcagaaagccaccccacca

SEQ ID NO: 5721677 - DNA, 25 bp, Homo sapien
gaaacccaaacatcaagagggaaga

SEQ ID NO: 5721678 - DNA, 25 bp, Homo sapien
ggttacttgtgtcaatgaagactgc

SEQ ID NO: 5721679 - DNA, 25 bp, Homo sapien
catggggaccctcgggttctcggac

SEQ ID NO: 5721680 - DNA, 25 bp, Homo sapien
gcgggggcagggactgtggaaaccc

SEQ ID NO: 5721681 - DNA, 25 bp, Homo sapien
ggtggagggatgaagcccaacaaac

SEQ ID NO: 5721682 - DNA, 25 bp, Homo sapien
ggtgggtcaggaactcgggcagcgc

SEQ ID NO: 5721683 - DNA, 25 bp, Homo sapien
ataatccacatggggaccctcgggt

SEQ ID NO: 5721684 - DNA, 25 bp, Homo sapien
gccgccgcccgacgaaccgcccggc

SEQ ID NO: 5721685 - DNA, 25 bp, Homo sapien
catccgaatggcccccagggcagac

SEQ ID NO: 5721686 - DNA, 25 bp, Homo sapien
acaggtaggtgatgccatctgcccc

SEQ ID NO: 5721687 - DNA, 25 bp, Homo sapien
cagctgctggaaacaggaggcactg

SEQ ID NO: 5721688 - DNA, 25 bp, Homo sapien
gctgttggagccctcagtcagagga

SEQ ID NO: 5721689 - DNA, 25 bp, Homo sapien
gcgctctgcaggttgaacctacgct

SEQ ID NO: 5721690 - DNA, 25 bp, Homo sapien
tgagggtgtctgtgccatggcaccg

SEQ ID NO: 5721691 - DNA, 25 bp, Homo sapien
tcattaaagctgttggagccctcag

SEQ ID NO: 5721692 - DNA, 25 bp, Homo sapien
ggggctgcacaggggtagcaccgat

SEQ ID NO: 5721693 - DNA, 25 bp, Homo sapien
cacactggagtgaaggaatcggttt

SEQ ID NO: 5721694 - DNA, 25 bp, Homo sapien
ccacattgtcgtagaggacgcaggc

SEQ ID NO: 5721695 - DNA, 25 bp, Homo sapien
agcgccaggttcccgatctcgaagc

SEQ ID NO: 5721696 - DNA, 25 bp, Homo sapien
tctgcaggttgaacctacgctccag

SEQ ID NO: 5721697 - DNA, 25 bp, Homo sapien
tccagggctgagccaggtgctgtgc

SEQ ID NO: 5721698 - DNA, 25 bp, Homo sapien
tggggcctcaaaggaccacacactg

SEQ ID NO: 5721699 - DNA, 25 bp, Homo sapien
agattcgtgctgttgcagccagcaa

SEQ ID NO: 5721700 - DNA, 25 bp, Homo sapien
ccccgttgctgggcttgggtctctc

SEQ ID NO: 5721701 - DNA, 25 bp, Homo sapien
tggagggatgaagcccaacaaacga

SEQ ID NO: 5721702 - DNA, 25 bp, Homo sapien
ggcaagccatccccagaggaggtag

SEQ ID NO: 5721703 - DNA, 25 bp, Homo sapien
agttattattgcagggcgagtaggg

SEQ ID NO: 5721704 - DNA, 25 bp, Homo sapien
acgtacagtatgtactttacatcac

SEQ ID NO: 5721705 - DNA, 25 bp, Homo sapien
tggctgcgcagacgtcgcggccctc

SEQ ID NO: 5721706 - DNA, 25 bp, Homo sapien
cactctcagctgctggaaacaggag

SEQ ID NO: 5721707 - DNA, 25 bp, Homo sapien
caccgtgccctgcgccagcatcagg

SEQ ID NO: 5721708 - DNA, 25 bp, Homo sapien
agcatcgtgaacaggattcctatat

SEQ ID NO: 5721709 - DNA, 25 bp, Homo sapien
agtgtcgcagcccaggaagaggaag

SEQ ID NO: 5721710 - DNA, 25 bp, Homo sapien
gaccataagtcacctctttggtcct

SEQ ID NO: 5721711 - DNA, 25 bp, Homo sapien
caatctccatgcaggcggccaggat

SEQ ID NO: 5721712 - DNA, 25 bp, Homo sapien
catcacacagaggaaagtgaggaag

SEQ ID NO: 5721713 - DNA, 25 bp, Homo sapien
cttcctccgcacgtggtcgtcgatg

SEQ ID NO: 5721714 - DNA, 25 bp, Homo sapien
ccgccgccgccgccgccgccgccgc

SEQ ID NO: 5721715 - DNA, 25 bp, Homo sapien
tcgggcagcgccgacagcagcgcgc

SEQ ID NO: 5721716 - DNA, 25 bp, Homo sapien
gtgtacaggatgaaggcgaaggatt

SEQ ID NO: 5721717 - DNA, 25 bp, Homo sapien
tccggagtgatgtccaggttacttg

SEQ ID NO: 5721718 - DNA, 25 bp, Homo sapien
tcacacccacgtcagcgctctgcag

SEQ ID NO: 5721719 - DNA, 25 bp, Homo sapien
aggaggcactgctgtctggctccag

SEQ ID NO: 5721720 - DNA, 25 bp, Homo sapien
gcaggtggagtcgatgccagccccg

SEQ ID NO: 5721721 - DNA, 25 bp, Homo sapien
cacatggggaccctcgggttctcgg

SEQ ID NO: 5721722 - DNA, 25 bp, Homo sapien
tccaggttacttgtgtcaatgaaga

SEQ ID NO: 5721723 - DNA, 25 bp, Homo sapien
gcccgcctcgtacttgtactggtgg

SEQ ID NO: 5721724 - DNA, 25 bp, Homo sapien
gacagcagcgcgcccagcgccatga

SEQ ID NO: 5721725 - DNA, 25 bp, Homo sapien
ccagcatcgtgaacaggattcctat

SEQ ID NO: 5721726 - DNA, 25 bp, Homo sapien
aggtaggtgatgccatctgccccac

SEQ ID NO: 5721727 - DNA, 25 bp, Homo sapien
gggccccaatgagcagcaagtacat

SEQ ID NO: 5721728 - DNA, 25 bp, Homo sapien
cagtggacaccaggttgacgagcat

SEQ ID NO: 5721729 - DNA, 25 bp, Homo sapien
aagtcacctctttggtcctcatcac

SEQ ID NO: 5721730 - DNA, 25 bp, Homo sapien
cctgatgaggatgatgactgagggt

SEQ ID NO: 5721731 - DNA, 25 bp, Homo sapien
tgtctggctccagggggtgcctcag

SEQ ID NO: 5721732 - DNA, 25 bp, Homo sapien
taggggtccagggctgagccaggtg

SEQ ID NO: 5721733 - DNA, 25 bp, Homo sapien
atataattttcagcaaacgtacagt

SEQ ID NO: 5721734 - DNA, 25 bp, Homo sapien
ccagaggaggtagagggatgggtgg

SEQ ID NO: 5721735 - DNA, 25 bp, Homo sapien
gatgcccaggagcacctgggcccca

SEQ ID NO: 5721736 - DNA, 25 bp, Homo sapien
cacacactggagtgaaggaatcggt

SEQ ID NO: 5721737 - DNA, 25 bp, Homo sapien
ctgggcttgggtctctcgtattctc

SEQ ID NO: 5721738 - DNA, 25 bp, Homo sapien
cagtctcaatgtcttggtactctgt

SEQ ID NO: 5721739 - DNA, 25 bp, Homo sapien
cgccaggttcccgatctcgaagctg

SEQ ID NO: 5721740 - DNA, 25 bp, Homo sapien
cagggacggtggtgaggcacgcaca

SEQ ID NO: 5721741 - DNA, 25 bp, Homo sapien
gaagaggaagagggccaggccctca

SEQ ID NO: 5721742 - DNA, 25 bp, Homo sapien
caccccaccaggctccgatccagcg

SEQ ID NO: 5721743 - DNA, 25 bp, Homo sapien
aggaaagtgaggaaggcctcttggc

SEQ ID NO: 5721744 - DNA, 25 bp, Homo sapien
gcagcgaagccagccaccactgcaa

SEQ ID NO: 5721745 - DNA, 25 bp, Homo sapien
tcagcttctcacaaaggagtcttct

SEQ ID NO: 5721746 - DNA, 25 bp, Homo sapien
ctcggacacaaggaagatcttgatg

SEQ ID NO: 5721747 - DNA, 25 bp, Homo sapien
cctcatcacaggcctgcgcttgggg

SEQ ID NO: 5721748 - DNA, 25 bp, Homo sapien
ctcaccaggtaggcgcccaccgtgc

SEQ ID NO: 5721749 - DNA, 25 bp, Homo sapien
tgggtcaggaactcgggcagcgccg

SEQ ID NO: 5721750 - DNA, 25 bp, Homo sapien
cccacacactggagtgaaggaatcg

SEQ ID NO: 5721751 - DNA, 25 bp, Homo sapien
ctccgatccagcgggggtcgtccgg

SEQ ID NO: 5721752 - DNA, 25 bp, Homo sapien
ttgtgtcaatgaagactgcatccac

SEQ ID NO: 5721753 - DNA, 25 bp, Homo sapien
aggattcctatatagagcgaggagt

SEQ ID NO: 5721754 - DNA, 25 bp, Homo sapien
cgtcgcggccctcggcgccccagcg

SEQ ID NO: 5721755 - DNA, 25 bp, Homo sapien
tgtcgtagaggacgcaggcgccttg

SEQ ID NO: 5721756 - DNA, 25 bp, Homo sapien
ccatggcaccgatcaggctgcagat

SEQ ID NO: 5721757 - DNA, 25 bp, Homo sapien
gtaaccccagccacagggccagtgt

SEQ ID NO: 5721758 - DNA, 25 bp, Homo sapien
ccgatgcccaggagcacctgggccc

SEQ ID NO: 5721759 - DNA, 25 bp, Homo sapien
ggactggggcattttccaggaacca

SEQ ID NO: 5721760 - DNA, 25 bp, Homo sapien
tcggggtcgggcccctcgtcgccgc

SEQ ID NO: 5721761 - DNA, 25 bp, Homo sapien
gctgcaaaaatacagagtaccacac

SEQ ID NO: 5721762 - DNA, 25 bp, Homo sapien
aacatcaagagggaagagaagaaga

SEQ ID NO: 5721763 - DNA, 25 bp, Homo sapien
gccgccgccgctgccgctttcccgc

SEQ ID NO: 5721764 - DNA, 25 bp, Homo sapien
tcccaagcagctggttggcagaaga

SEQ ID NO: 5721765 - DNA, 25 bp, Homo sapien
ggtgctcagcccgccctcgtggttt

SEQ ID NO: 5721766 - DNA, 25 bp, Homo sapien
tattgagtatgtgctttttcccccc

SEQ ID NO: 5721767 - DNA, 25 bp, Homo sapien
ctgtttccatagggaacagtaaccc

SEQ ID NO: 5721768 - DNA, 25 bp, Homo sapien
ctgcagctcgccgctccggccgccg

SEQ ID NO: 5721769 - DNA, 25 bp, Homo sapien
gagacgcccaggggctgcacagggg

SEQ ID NO: 5721770 - DNA, 25 bp, Homo sapien
ttggagccctcagtcagaggagcat

SEQ ID NO: 5721771 - DNA, 25 bp, Homo sapien
tacccagacaagcacacgggatcgc

SEQ ID NO: 5721772 - DNA, 25 bp, Homo sapien
cgtacttgtactggtgggtcaggaa

SEQ ID NO: 5721773 - DNA, 25 bp, Homo sapien
aggttaaactgctgctccaggtact

SEQ ID NO: 5721774 - DNA, 25 bp, Homo sapien
aaacgtacagtatgtactttacatc

SEQ ID NO: 5721775 - DNA, 25 bp, Homo sapien
accaggctccgatccagcgggggtc

SEQ ID NO: 5721776 - DNA, 25 bp, Homo sapien
aagaactcccaaagcgtaagacttg

SEQ ID NO: 5721777 - DNA, 25 bp, Homo sapien
acgtggtggtgtacaggatgaaggc

SEQ ID NO: 5721778 - DNA, 25 bp, Homo sapien
ggtgcttggtgaccttcgggatcac

SEQ ID NO: 5721779 - DNA, 25 bp, Homo sapien
gtttctaaagcatgtcggcaagcca

SEQ ID NO: 5721780 - DNA, 25 bp, Homo sapien
gtggtggagggctgttctctccagg

SEQ ID NO: 5721781 - DNA, 25 bp, Homo sapien
ggtgaggcacgcacagcccgtgaga

SEQ ID NO: 5721782 - DNA, 25 bp, Homo sapien
aaagacctcccaggaagatacccag

SEQ ID NO: 5721783 - DNA, 25 bp, Homo sapien
tccgaatggcccccagggcagacag

SEQ ID NO: 5721784 - DNA, 25 bp, Homo sapien
tcgcccgcctcgtacttgtactggt

SEQ ID NO: 5721785 - DNA, 25 bp, Homo sapien
gctccagggtggtcaggacgctcac

SEQ ID NO: 5721786 - DNA, 25 bp, Homo sapien
cagccaccactgcaatctccatgca

SEQ ID NO: 5721787 - DNA, 25 bp, Homo sapien
aaggtgaatgtgattcggggcaggt

SEQ ID NO: 5721788 - DNA, 25 bp, Homo sapien
ggtcgtcgatgtaggagacgcccag

SEQ ID NO: 5721789 - DNA, 25 bp, Homo sapien
aaagcatgtcggcaagccatcccca

SEQ ID NO: 5721790 - DNA, 25 bp, Homo sapien
agtgaaggaatcggtttggcattca

SEQ ID NO: 5721791 - DNA, 25 bp, Homo sapien
aggcgcccaccgtgccctgcgccag

SEQ ID NO: 5721792 - DNA, 25 bp, Homo sapien
ttgcagggcgagtaggggtccaggg

SEQ ID NO: 5721793 - DNA, 25 bp, Homo sapien
tgctcatttggaaaataaacgctgc

SEQ ID NO: 5721794 - DNA, 25 bp, Homo sapien
gcagccagcaaagcaggcagacagg

SEQ ID NO: 5721795 - DNA, 25 bp, Homo sapien
ccgttggctgcgcagacgtcgcggc

SEQ ID NO: 5721796 - DNA, 25 bp, Homo sapien
gagcagaaagccaccccaccaggct

SEQ ID NO: 5721797 - DNA, 25 bp, Homo sapien
tgtgattcggggcaggttttctcag

SEQ ID NO: 5721798 - DNA, 25 bp, Homo sapien
atcactctcagctgctggaaacagg

SEQ ID NO: 5721799 - DNA, 25 bp, Homo sapien
gcactgccacgtggtggtgtacagg

SEQ ID NO: 5721800 - DNA, 25 bp, Homo sapien
acattgtcgtagaggacgcaggcgc

SEQ ID NO: 5721801 - DNA, 25 bp, Homo sapien
tctattgagtatgtgctttttcccc

SEQ ID NO: 5721802 - DNA, 25 bp, Homo sapien
ttcttcaccaaaagacctcccagga

SEQ ID NO: 5721803 - DNA, 25 bp, Homo sapien
gatgcctactctgagagctgtttgg

SEQ ID NO: 5721804 - DNA, 25 bp, Homo sapien
ctgatttcattaaagctgttggagc

SEQ ID NO: 5721805 - DNA, 25 bp, Homo sapien
tatagagcgaggagtccttcctccg

SEQ ID NO: 5721806 - DNA, 25 bp, Homo sapien
gaggggtggagggatgaagcccaac

SEQ ID NO: 5721807 - DNA, 25 bp, Homo sapien
aaacgctgcaaaaatacagagtacc

SEQ ID NO: 5721808 - DNA, 25 bp, Homo sapien
aggacgctcaccaggtaggcgccca

SEQ ID NO: 5721809 - DNA, 25 bp, Homo sapien
gaacaggcaggtggagtcgatgcca

SEQ ID NO: 5721810 - DNA, 25 bp, Homo sapien
cccaagaggggagtttctaaagcat

SEQ ID NO: 5721811 - DNA, 25 bp, Homo sapien
ctccaggtacttccccaaaaaggca

SEQ ID NO: 5721812 - DNA, 25 bp, Homo sapien
cttggtgaccttcgggatcactctc

SEQ ID NO: 5721813 - DNA, 25 bp, Homo sapien
ggttgcgttctcagcagggacggtg

SEQ ID NO: 5721814 - DNA, 25 bp, Homo sapien
tcaagagggaagagaagaagagtaa

SEQ ID NO: 5721815 - DNA, 25 bp, Homo sapien
gatgagcgccaggttcccgatctcg

SEQ ID NO: 5721816 - DNA, 25 bp, Homo sapien
agccaggtgctgtgctgtttccata

SEQ ID NO: 5721817 - DNA, 25 bp, Homo sapien
cttctcacaaaggagtcttctgaag

SEQ ID NO: 5721818 - DNA, 25 bp, Homo sapien
cggggtctgagtgcgggggcaggga

SEQ ID NO: 5721819 - DNA, 25 bp, Homo sapien
tccaaataccagcatcgtgaacagg

SEQ ID NO: 5721820 - DNA, 25 bp, Homo sapien
aaggcctcttggcacccaggactgg

SEQ ID NO: 5721821 - DNA, 25 bp, Homo sapien
tgcccgcgtgccccgaagtagctca

SEQ ID NO: 5721822 - DNA, 25 bp, Homo sapien
ggcaggttttctcagtctcaatgtc

SEQ ID NO: 5721823 - DNA, 25 bp, Homo sapien
ttctaaactgctcatttggaaaata

SEQ ID NO: 5721824 - DNA, 25 bp, Homo sapien
gctagcgatcacacccacgtcagcg

SEQ ID NO: 5721825 - DNA, 25 bp, Homo sapien
ggcgaaggatttgagcgcgatggcg

SEQ ID NO: 5721826 - DNA, 25 bp, Homo sapien
agagacccaggaaagatgcctactc

SEQ ID NO: 5721827 - DNA, 25 bp, Homo sapien
gcgccccagcggatctcgcccgcct

SEQ ID NO: 5721828 - DNA, 25 bp, Homo sapien
ccagccacagggccagtgtcgcagc

SEQ ID NO: 5721829 - DNA, 25 bp, Homo sapien
tgtactggtgggtcaggaactcggg

SEQ ID NO: 5721830 - DNA, 25 bp, Homo sapien
gtggacaccaggttgacgagcatgg

SEQ ID NO: 5721831 - DNA, 25 bp, Homo sapien
ccatggcggggtctgagtgcggggg

SEQ ID NO: 5721832 - DNA, 25 bp, Homo sapien
tcgcggccctcggcgccccagcgga

SEQ ID NO: 5721833 - DNA, 25 bp, Homo sapien
cgaggtctgtgggtggtggagggct

SEQ ID NO: 5721834 - DNA, 25 bp, Homo sapien
ttcctcaggcactgccacgtggtgg

SEQ ID NO: 5721835 - DNA, 25 bp, Homo sapien
tacatcatgttggtagccgtccggt

SEQ ID NO: 5721836 - DNA, 25 bp, Homo sapien
ttttctcagtctcaatgtcttggta

SEQ ID NO: 5721837 - DNA, 25 bp, Homo sapien
gctccccacagaacgtgctccagaa

SEQ ID NO: 5721838 - DNA, 25 bp, Homo sapien
gaagaggtggtgaggttaaactgct

SEQ ID NO: 5721839 - DNA, 25 bp, Homo sapien
caaaagacctcccaggaagataccc

SEQ ID NO: 5721840 - DNA, 25 bp, Homo sapien
ggtgaggttaaactgctgctccagg

SEQ ID NO: 5721841 - DNA, 25 bp, Homo sapien
acaggggtagcaccgatgcccagga

SEQ ID NO: 5721842 - DNA, 25 bp, Homo sapien
gtgatgccatctgccccacacactg

SEQ ID NO: 5721843 - DNA, 25 bp, Homo sapien
acctacgctccagggtggtcaggac

SEQ ID NO: 5721844 - DNA, 25 bp, Homo sapien
ccaggataaacccgcaggctggtcc

SEQ ID NO: 5721845 - DNA, 25 bp, Homo sapien
ctgtcctgatgaggatgatgactga

SEQ ID NO: 5721846 - DNA, 25 bp, Homo sapien
ccctgcagctcgccgctccggccgc

SEQ ID NO: 5721847 - DNA, 25 bp, Homo sapien
accgcccggcttcttcccctgcatc

SEQ ID NO: 5721848 - DNA, 25 bp, Homo sapien
agccacagggccagtgtcgcagccc

SEQ ID NO: 5721849 - DNA, 25 bp, Homo sapien
tggctccagggggtgcctcaggacc

SEQ ID NO: 5721850 - DNA, 25 bp, Homo sapien
ctcgtcgccgcccgagccgttggct

SEQ ID NO: 5721851 - DNA, 25 bp, Homo sapien
gagtcttctgaaggtgaatgtgatt

SEQ ID NO: 5721852 - DNA, 25 bp, Homo sapien
tgtgctggtgctcagcccgccctcg

SEQ ID NO: 5721853 - DNA, 25 bp, Homo sapien
tcgccgcccgagccgttggctgcgc

SEQ ID NO: 5721854 - DNA, 25 bp, Homo sapien
ccacagggccagtgtcgcagcccag

SEQ ID NO: 5721855 - DNA, 25 bp, Homo sapien
ataaacgctgcaaaaatacagagta

SEQ ID NO: 5721856 - DNA, 25 bp, Homo sapien
ctaagtgaggcccgcgaggtctgtg

SEQ ID NO: 5721857 - DNA, 25 bp, Homo sapien
gtcgtccggagtgatgtccaggtta

SEQ ID NO: 5721858 - DNA, 25 bp, Homo sapien
ccaggtaggcgcccaccgtgccctg

SEQ ID NO: 5721859 - DNA, 25 bp, Homo sapien
tcggtagaccacattgtcgtagagg

SEQ ID NO: 5721860 - DNA, 25 bp, Homo sapien
aaaggagtcttctgaaggtgaatgt

SEQ ID NO: 5721861 - DNA, 25 bp, Homo sapien
agagggccaggccctcagcttctca

SEQ ID NO: 5721862 - DNA, 25 bp, Homo sapien
gccctcagcttctcacaaaggagtc

SEQ ID NO: 5721863 - DNA, 25 bp, Homo sapien
tacagaaagagcccaggataaaccc

SEQ ID NO: 5721864 - DNA, 25 bp, Homo sapien
gtttttaccctctcggctgatttca

SEQ ID NO: 5721865 - DNA, 25 bp, Homo sapien
gagtttctaaagcatgtcggcaagc

SEQ ID NO: 5721866 - DNA, 25 bp, Homo sapien
aaacaggaggcactgctgtctggct

SEQ ID NO: 5721867 - DNA, 25 bp, Homo sapien
aataccagcatcgtgaacaggattc

SEQ ID NO: 5721868 - DNA, 25 bp, Homo sapien
gagtgatgtccaggttacttgtgtc

SEQ ID NO: 5721869 - DNA, 25 bp, Homo sapien
ggataatccacatggggaccctcgg

SEQ ID NO: 5721870 - DNA, 25 bp, Homo sapien
gtactctgtgctggtgctcagcccg

SEQ ID NO: 5721871 - DNA, 25 bp, Homo sapien
tagaccacattgtcgtagaggacgc

SEQ ID NO: 5721872 - DNA, 25 bp, Homo sapien
gtggagtcgatgccagccccgaaga

SEQ ID NO: 5721873 - DNA, 25 bp, Homo sapien
gattttggtacagaaagagcccagg

SEQ ID NO: 5721874 - DNA, 25 bp, Homo sapien
acacagggtttgagagcaggtgctt

SEQ ID NO: 5721875 - DNA, 25 bp, Homo sapien
aggaagatcttgatgttggaaaagc

SEQ ID NO: 5721876 - DNA, 25 bp, Homo sapien
gaggaaggcctcttggcacccagga

SEQ ID NO: 5721877 - DNA, 25 bp, Homo sapien
acagcccgtgagattcgtgctgttg

SEQ ID NO: 5721878 - DNA, 25 bp, Homo sapien
accctctcggctgatttcattaaag

SEQ ID NO: 5721879 - DNA, 25 bp, Homo sapien
cagagtaccacactcaaaaatctat

SEQ ID NO: 5721880 - DNA, 25 bp, Homo sapien
gcagggcgagtaggggtccagggct

SEQ ID NO: 5721881 - DNA, 25 bp, Homo sapien
gtcagaggagcattcccaagagggg

SEQ ID NO: 5721882 - DNA, 25 bp, Homo sapien
ctcaaaggaccacacactggctgga

SEQ ID NO: 5721883 - DNA, 25 bp, Homo sapien
gtggtggtgtacaggatgaaggcga

SEQ ID NO: 5721884 - DNA, 25 bp, Homo sapien
cggacagggaggagcacgctaagtg

SEQ ID NO: 5721885 - DNA, 25 bp, Homo sapien
tcacatatttctaaactgctcattt

SEQ ID NO: 5721886 - DNA, 25 bp, Homo sapien
agccagcaaagcaggcagacaggta

SEQ ID NO: 5721887 - DNA, 25 bp, Homo sapien
cctccattctatgcaacaggttggt

SEQ ID NO: 5721888 - DNA, 25 bp, Homo sapien
aggaagagggccaggccctcagctt

SEQ ID NO: 5721889 - DNA, 25 bp, Homo sapien
agtacatcatgttggtagccgtccg

SEQ ID NO: 5721890 - DNA, 25 bp, Homo sapien
tttatagtttttcctcaggcactgc

SEQ ID NO: 5721891 - DNA, 25 bp, Homo sapien
atgaggatgatgactgagggtgtct

SEQ ID NO: 5721892 - DNA, 25 bp, Homo sapien
tgcaatctccatgcaggcggccagg

SEQ ID NO: 5721893 - DNA, 25 bp, Homo sapien
gagcacctgggccccaatgagcagc

SEQ ID NO: 5721894 - DNA, 25 bp, Homo sapien
ctcccaggaagatacccagacaagc

SEQ ID NO: 5721895 - DNA, 25 bp, Homo sapien
aggcagcgaagccagccaccactgc

SEQ ID NO: 5721896 - DNA, 25 bp, Homo sapien
gagggaagagaagaagagtaaggca

SEQ ID NO: 5721897 - DNA, 25 bp, Homo sapien
cactcaaaaatctattgagtatgtg

SEQ ID NO: 5721898 - DNA, 25 bp, Homo sapien
ggcgccttgctccccacagaacgtg

SEQ ID NO: 5721899 - DNA, 25 bp, Homo sapien
ctccgcacgtggtcgtcgatgtagg

SEQ ID NO: 5721900 - DNA, 25 bp, Homo sapien
caggctccgatccagcgggggtcgt

SEQ ID NO: 5721901 - DNA, 25 bp, Homo sapien
actgtggaaacccaaacatcaagag

SEQ ID NO: 5721902 - DNA, 25 bp, Homo sapien
ttcgggatcactctcagctgctgga

SEQ ID NO: 5721903 - DNA, 25 bp, Homo sapien
tgatgcaggtgaacacagggtttga

SEQ ID NO: 5721904 - DNA, 25 bp, Homo sapien
ctctgagagctgtttggagtactcc

SEQ ID NO: 5721905 - DNA, 25 bp, Homo sapien
ggttgacgagcatggccatccgaat

SEQ ID NO: 5721906 - DNA, 25 bp, Homo sapien
cttcaccaaaagacctcccaggaag

SEQ ID NO: 5721907 - DNA, 25 bp, Homo sapien
gctgtttggagtactcctgaccata

SEQ ID NO: 5721908 - DNA, 25 bp, Homo sapien
gcacaggggtagcaccgatgcccag

SEQ ID NO: 5721909 - DNA, 25 bp, Homo sapien
ctatgcaacaggttggtttttaccc

SEQ ID NO: 5721910 - DNA, 25 bp, Homo sapien
caggaagaggaaggagacgtagcaa

SEQ ID NO: 5721911 - DNA, 25 bp, Homo sapien
acagggtttgagagcaggtgcttgg

SEQ ID NO: 5721912 - DNA, 25 bp, Homo sapien
agggaacagtaaccccagccacagg

SEQ ID NO: 5721913 - DNA, 25 bp, Homo sapien
tcggctgatttcattaaagctgttg

SEQ ID NO: 5721914 - DNA, 25 bp, Homo sapien
gtcttctgaaggtgaatgtgattcg

SEQ ID NO: 5721915 - DNA, 25 bp, Homo sapien
aagatacccagacaagcacacggga

SEQ ID NO: 5721916 - DNA, 25 bp, Homo sapien
cgtaagacttgagttcagggctgac

SEQ ID NO: 5721917 - DNA, 25 bp, Homo sapien
tcccaaagcgtaagacttgagttca

SEQ ID NO: 5721918 - DNA, 25 bp, Homo sapien
cctcttggcacccaggactggggca

SEQ ID NO: 5721919 - DNA, 25 bp, Homo sapien
gggtctgagtgcgggggcagggact

SEQ ID NO: 5721920 - DNA, 25 bp, Homo sapien
gaagctgctagcgatcacacccacg

SEQ ID NO: 5721921 - DNA, 25 bp, Homo sapien
gaacctacgctccagggtggtcagg

SEQ ID NO: 5721922 - DNA, 25 bp, Homo sapien
ggcattttccaggaaccacggttgc

SEQ ID NO: 5721923 - DNA, 25 bp, Homo sapien
cccaggactggggcattttccagga

SEQ ID NO: 5721924 - DNA, 25 bp, Homo sapien
ctaaactgctcatttggaaaataaa

SEQ ID NO: 5721925 - DNA, 25 bp, Homo sapien
gggtagcaccgatgcccaggagcac

SEQ ID NO: 5721926 - DNA, 25 bp, Homo sapien
tggcattcacagttattattgcagg

SEQ ID NO: 5721927 - DNA, 25 bp, Homo sapien
gccccaatgagcagcaagtacatca

SEQ ID NO: 5721928 - DNA, 25 bp, Homo sapien
gtaccacactcaaaaatctattgag

SEQ ID NO: 5721929 - DNA, 25 bp, Homo sapien
gctccggccgccgcccgacgaaccg

SEQ ID NO: 5721930 - DNA, 25 bp, Homo sapien
aattttcagcaaacgtacagtatgt

SEQ ID NO: 5721931 - DNA, 25 bp, Homo sapien
acaggatgaaggcgaaggatttgag

SEQ ID NO: 5721932 - DNA, 25 bp, Homo sapien
ccataagtcacctctttggtcctca

SEQ ID NO: 5721933 - DNA, 25 bp, Homo sapien
ccatgcaggcggccaggatgatgca

SEQ ID NO: 5721934 - DNA, 25 bp, Homo sapien
actgagggtgtctgtgccatggcac

SEQ ID NO: 5721935 - DNA, 25 bp, Homo sapien
cacaccaggtcagcatgactcttta

SEQ ID NO: 5721936 - DNA, 25 bp, Homo sapien
ggtggagggctgttctctccaggaa

SEQ ID NO: 5721937 - DNA, 25 bp, Homo sapien
agggccagtgtcgcagcccaggaag

SEQ ID NO: 5721938 - DNA, 25 bp, Homo sapien
gcttcttcaccaaaagacctcccag

SEQ ID NO: 5721939 - DNA, 25 bp, Homo sapien
aaaatacagagtaccacactcaaaa

SEQ ID NO: 5721940 - DNA, 25 bp, Homo sapien
ctcagctgctggaaacaggaggcac

SEQ ID NO: 5721941 - DNA, 25 bp, Homo sapien
ttgagttcagggctgactgtcctga

SEQ ID NO: 5721942 - DNA, 25 bp, Homo sapien
tgctccaggtacttccccaaaaagg

SEQ ID NO: 5721943 - DNA, 25 bp, Homo sapien
gccgcccgacgaaccgcccggcttc

SEQ ID NO: 5721944 - DNA, 25 bp, Homo sapien
aaggagacgtagcaagcagtggaca

SEQ ID NO: 5721945 - DNA, 25 bp, Homo sapien
ggatcgcagtcatcccaagcagctg

SEQ ID NO: 5721946 - DNA, 25 bp, Homo sapien
agggtttgagagcaggtgcttggtg

SEQ ID NO: 5721947 - DNA, 25 bp, Homo sapien
cagcagcgcgcccagcgccatgacg

SEQ ID NO: 5721948 - DNA, 25 bp, Homo sapien
atctgccccacacactggagtgaag

SEQ ID NO: 5721949 - DNA, 25 bp, Homo sapien
gctccagggggtgcctcaggacccc

SEQ ID NO: 5721950 - DNA, 25 bp, Homo sapien
cgagccgttggctgcgcagacgtcg

SEQ ID NO: 5721951 - DNA, 25 bp, Homo sapien
gcaccgcagagcagaaagccacccc

SEQ ID NO: 5721952 - DNA, 25 bp, Homo sapien
ttttggtacagaaagagcccaggat

SEQ ID NO: 5721953 - DNA, 25 bp, Homo sapien
atagggaacagtaaccccagccaca

SEQ ID NO: 5721954 - DNA, 25 bp, Homo sapien
tgctgacatacaggtatcggtagac

SEQ ID NO: 5721955 - DNA, 25 bp, Homo sapien
acgatgccgccgcagccgatcaggc

SEQ ID NO: 5721956 - DNA, 25 bp, Homo sapien
aagccagccaccactgcaatctcca

SEQ ID NO: 5721957 - DNA, 25 bp, Homo sapien
tgcctcaggaccccgttgctgggct

SEQ ID NO: 5721958 - DNA, 25 bp, Homo sapien
agaggtggtgaggttaaactgctgc

SEQ ID NO: 5721959 - DNA, 25 bp, Homo sapien
ttgagcgcgatggcgatgctgacat

SEQ ID NO: 5721960 - DNA, 25 bp, Homo sapien
acttgagttcagggctgactgtcct

SEQ ID NO: 5721961 - DNA, 25 bp, Homo sapien
tcgtagaggacgcaggcgccttgct

SEQ ID NO: 5721962 - DNA, 25 bp, Homo sapien
gaagaggatgagcgccaggttcccg

SEQ ID NO: 5721963 - DNA, 25 bp, Homo sapien
gccatgacgatgccgccgcagccga

SEQ ID NO: 5721964 - DNA, 25 bp, Homo sapien
aagatgcctactctgagagctgttt

SEQ ID NO: 5721965 - DNA, 25 bp, Homo sapien
attattgcagggcgagtaggggtcc

SEQ ID NO: 5721966 - DNA, 25 bp, Homo sapien
aggaccccgttgctgggcttgggtc

SEQ ID NO: 5721967 - DNA, 25 bp, Homo sapien
cgatcaggcgcggccggtgcccgcg

SEQ ID NO: 5721968 - DNA, 25 bp, Homo sapien
cacaaggaagatcttgatgttggaa

SEQ ID NO: 5721969 - DNA, 25 bp, Homo sapien
caaaaatctattgagtatgtgcttt

SEQ ID NO: 5721970 - DNA, 25 bp, Homo sapien
tggaaaataaacgctgcaaaaatac

SEQ ID NO: 5721971 - DNA, 25 bp, Homo sapien
acaggcaggtggagtcgatgccagc

SEQ ID NO: 5721972 - DNA, 25 bp, Homo sapien
ggtggaagggaatttgcacaccagg

SEQ ID NO: 5721973 - DNA, 25 bp, Homo sapien
ggcagaagaggtggtgaggttaaac

SEQ ID NO: 5721974 - DNA, 25 bp, Homo sapien
gcagacaggtaggtgatgccatctg

SEQ ID NO: 5721975 - DNA, 25 bp, Homo sapien
ggcagacaggctgagcttcttcacc

SEQ ID NO: 5721976 - DNA, 25 bp, Homo sapien
agagtaaggcaccgcagagcagaaa

SEQ ID NO: 5721977 - DNA, 25 bp, Homo sapien
ggtagagggatgggtggaagggaat

SEQ ID NO: 5721978 - DNA, 25 bp, Homo sapien
gacacaaggaagatcttgatgttgg

SEQ ID NO: 5721979 - DNA, 25 bp, Homo sapien
ggaatcggtttggcattcacagtta

SEQ ID NO: 5721980 - DNA, 25 bp, Homo sapien
ctcgtacttgtactggtgggtcagg

SEQ ID NO: 5721981 - DNA, 25 bp, Homo sapien
gtggtcaggacgctcaccaggtagg

SEQ ID NO: 5721982 - DNA, 25 bp, Homo sapien
gtagcaccgatgcccaggagcacct

SEQ ID NO: 5721983 - DNA, 25 bp, Homo sapien
cagcgctctgcaggttgaacctacg

SEQ ID NO: 5721984 - DNA, 25 bp, Homo sapien
ggtggtgtacaggatgaaggcgaag

SEQ ID NO: 5721985 - DNA, 25 bp, Homo sapien
tggcccccagggcagacaggctgag

SEQ ID NO: 5721986 - DNA, 25 bp, Homo sapien
atgaggggtggagggatgaagccca

SEQ ID NO: 5721987 - DNA, 25 bp, Homo sapien
actgccacgtggtggtgtacaggat

SEQ ID NO: 5721988 - DNA, 25 bp, Homo sapien
tccacatggggaccctcgggttctc

SEQ ID NO: 5721989 - DNA, 25 bp, Homo sapien
catcacatatttctaaactgctcat

SEQ ID NO: 5721990 - DNA, 25 bp, Homo sapien
ccaggagcacctgggccccaatgag

SEQ ID NO: 5721991 - DNA, 25 bp, Homo sapien
tgtcggcaagccatccccagaggag

SEQ ID NO: 5721992 - DNA, 25 bp, Homo sapien
tggaagggaatttgcacaccaggtc

SEQ ID NO: 5721993 - DNA, 25 bp, Homo sapien
cctactctgagagctgtttggagta

SEQ ID NO: 5721994 - DNA, 25 bp, Homo sapien
aggttcccgatctcgaagctgctag

SEQ ID NO: 5721995 - DNA, 25 bp, Homo sapien
gtgatgtccaggttacttgtgtcaa

SEQ ID NO: 5721996 - DNA, 25 bp, Homo sapien
gaacgtgctccagaacaggcaggtg

SEQ ID NO: 5721997 - DNA, 25 bp, Homo sapien
gccgcccgagccgttggctgcgcag

SEQ ID NO: 5721998 - DNA, 25 bp, Homo sapien
attgtcgtagaggacgcaggcgcct

SEQ ID NO: 5721999 - DNA, 25 bp, Homo sapien
gcccccagggcagacaggctgagct

SEQ ID NO: 5722000 - DNA, 25 bp, Homo sapien
gtgctccagaacaggcaggtggagt

SEQ ID NO: 5722001 - DNA, 25 bp, Homo sapien
cgtgccccgaagtagctcacgaaga

SEQ ID NO: 5722002 - DNA, 25 bp, Homo sapien
agcaagcagtggacaccaggttgac

SEQ ID NO: 5722003 - DNA, 25 bp, Homo sapien
caaaggaccacacactggctggata

SEQ ID NO: 5722004 - DNA, 25 bp, Homo sapien
gcagggactgtggaaacccaaacat

SEQ ID NO: 5722005 - DNA, 25 bp, Homo sapien
ttgaacctacgctccagggtggtca

SEQ ID NO: 5722006 - DNA, 25 bp, Homo sapien
agcgccgacagcagcgcgcccagcg

SEQ ID NO: 5722007 - DNA, 25 bp, Homo sapien
agcccaggaagaggaaggagacgta

SEQ ID NO: 5722008 - DNA, 25 bp, Homo sapien
agccatccccagaggaggtagaggg

SEQ ID NO: 5722009 - DNA, 25 bp, Homo sapien
tcacacagaggaaagtgaggaaggc

SEQ ID NO: 5722010 - DNA, 25 bp, Homo sapien
tggtgtacaggatgaaggcgaagga

SEQ ID NO: 5722011 - DNA, 25 bp, Homo sapien
ggcactgctgtctggctccaggggg

SEQ ID NO: 5722012 - DNA, 25 bp, Homo sapien
gacatacaggtatcggtagaccaca

SEQ ID NO: 5722013 - DNA, 25 bp, Homo sapien
gctcacgaagaggatgagcgccagg

SEQ ID NO: 5722014 - DNA, 25 bp, Homo sapien
tgtggaaacccaaacatcaagaggg

SEQ ID NO: 5722015 - DNA, 25 bp, Homo sapien
agacctcccaggaagatacccagac

SEQ ID NO: 5722016 - DNA, 25 bp, Homo sapien
tattctctttcggagagcatggcct

SEQ ID NO: 5722017 - DNA, 25 bp, Homo sapien
cagcgccatgacgatgccgccgcag

SEQ ID NO: 5722018 - DNA, 25 bp, Homo sapien
ggaccacacactggctggataatcc

SEQ ID NO: 5722019 - DNA, 25 bp, Homo sapien
caggttttctcagtctcaatgtctt

SEQ ID NO: 5722020 - DNA, 25 bp, Homo sapien
tcttggcacccaggactggggcatt

SEQ ID NO: 5722021 - DNA, 25 bp, Homo sapien
caaggaagatcttgatgttggaaaa

SEQ ID NO: 5722022 - DNA, 25 bp, Homo sapien
aacagtaaccccagccacagggcca

SEQ ID NO: 5722023 - DNA, 25 bp, Homo sapien
ccaagcagctggttggcagaagagg

SEQ ID NO: 5722024 - DNA, 25 bp, Homo sapien
tgttggagccctcagtcagaggagc

SEQ ID NO: 5722025 - DNA, 25 bp, Homo sapien
tctcgcccgcctcgtacttgtactg

SEQ ID NO: 5722026 - DNA, 25 bp, Homo sapien
tttaatataattttcagcaaacgta

SEQ ID NO: 5722027 - DNA, 25 bp, Homo sapien
cacatcacacagaggaaagtgagga

SEQ ID NO: 5722028 - DNA, 25 bp, Homo sapien
ggaaacaggaggcactgctgtctgg

SEQ ID NO: 5722029 - DNA, 25 bp, Homo sapien
tatagtttttcctcaggcactgcca

SEQ ID NO: 5722030 - DNA, 25 bp, Homo sapien
cgagcatggccatccgaatggcccc

SEQ ID NO: 5722031 - DNA, 25 bp, Homo sapien
ctgagcttcttcaccaaaagacctc

SEQ ID NO: 5722032 - DNA, 25 bp, Homo sapien
catcgtgaacaggattcctatatag

SEQ ID NO: 5722033 - DNA, 25 bp, Homo sapien
ccctcgtcgccgcccgagccgttgg

SEQ ID NO: 5722034 - DNA, 25 bp, Homo sapien
ggttgaacctacgctccagggtggt

SEQ ID NO: 5722035 - DNA, 25 bp, Homo sapien
ggcgagtaggggtccagggctgagc

SEQ ID NO: 5722036 - DNA, 25 bp, Homo sapien
tgcacaccaggtcagcatgactctt

SEQ ID NO: 5722037 - DNA, 25 bp, Homo sapien
atgcaggcggccaggatgatgcagg

SEQ ID NO: 5722038 - DNA, 25 bp, Homo sapien
ttctatgcaacaggttggtttttac

SEQ ID NO: 5722039 - DNA, 25 bp, Homo sapien
gatacacatcacacagaggaaagtg

SEQ ID NO: 5722040 - DNA, 25 bp, Homo sapien
tcgtgaacaggattcctatatagag

SEQ ID NO: 5722041 - DNA, 25 bp, Homo sapien
ggcacccaggactggggcattttcc

SEQ ID NO: 5722042 - DNA, 25 bp, Homo sapien
ttacttgtgtcaatgaagactgcat

SEQ ID NO: 5722043 - DNA, 25 bp, Homo sapien
ctggagtgaaggaatcggtttggca

SEQ ID NO: 5722044 - DNA, 25 bp, Homo sapien
ggttttctcagtctcaatgtcttgg

SEQ ID NO: 5722045 - DNA, 25 bp, Homo sapien
ttctctccaggaagaggaagagggc

SEQ ID NO: 5722046 - DNA, 25 bp, Homo sapien
gggtctctcgtattctctttcggag

SEQ ID NO: 5722047 - DNA, 25 bp, Homo sapien
tccagaacaggcaggtggagtcgat

SEQ ID NO: 5722048 - DNA, 25 bp, Homo sapien
acagaggaaagtgaggaaggcctct

SEQ ID NO: 5722049 - DNA, 25 bp, Homo sapien
taaacccgcaggctggtccaaatac

SEQ ID NO: 5722050 - DNA, 25 bp, Homo sapien
gaaaagcaggacaccttctttttct

SEQ ID NO: 5722051 - DNA, 25 bp, Homo sapien
tttacatcacatatttctaaactgc

SEQ ID NO: 5722052 - DNA, 25 bp, Homo sapien
tcgtccccctgcagctcgccgctcc

SEQ ID NO: 5722053 - DNA, 25 bp, Homo sapien
aggtggtgaggttaaactgctgctc

SEQ ID NO: 5722054 - DNA, 25 bp, Homo sapien
acaggattcctatatagagcgagga

SEQ ID NO: 5722055 - DNA, 25 bp, Homo sapien
cttgtactggtgggtcaggaactcg

SEQ ID NO: 5722056 - DNA, 25 bp, Homo sapien
tgccccgaagtagctcacgaagagg

SEQ ID NO: 5722057 - DNA, 25 bp, Homo sapien
gtggtgaggcacgcacagcccgtga

SEQ ID NO: 5722058 - DNA, 25 bp, Homo sapien
gctgttgcagccagcaaagcaggca

SEQ ID NO: 5722059 - DNA, 25 bp, Homo sapien
gttggtttttaccctctcggctgat

SEQ ID NO: 5722060 - DNA, 25 bp, Homo sapien
acttccccaaaaaggcagcgaagcc

SEQ ID NO: 5722061 - DNA, 25 bp, Homo sapien
gtactcctgaccataagtcacctct

SEQ ID NO: 5722062 - DNA, 25 bp, Homo sapien
ggcctcttggcacccaggactgggg

SEQ ID NO: 5722063 - DNA, 25 bp, Homo sapien
agcttctcacaaaggagtcttctga

SEQ ID NO: 5722064 - DNA, 25 bp, Homo sapien
atgcaacaggttggtttttaccctc

SEQ ID NO: 5722065 - DNA, 25 bp, Homo sapien
atcgcagtcatcccaagcagctggt

SEQ ID NO: 5722066 - DNA, 25 bp, Homo sapien
ctgctgctccaggtacttccccaaa

SEQ ID NO: 5722067 - DNA, 25 bp, Homo sapien
ccgttgctgggcttgggtctctcgt

SEQ ID NO: 5722068 - DNA, 25 bp, Homo sapien
gccctgcgccagcatcagggcgcac

SEQ ID NO: 5722069 - DNA, 25 bp, Homo sapien
tcagggcgcactcggacacaaggaa

SEQ ID NO: 5722070 - DNA, 25 bp, Homo sapien
gaggtagagggatgggtggaaggga

SEQ ID NO: 5722071 - DNA, 25 bp, Homo sapien
tcgtggtttttgatgtagcgtttat

SEQ ID NO: 5722072 - DNA, 25 bp, Homo sapien
aggaggtagagggatgggtggaagg

SEQ ID NO: 5722073 - DNA, 25 bp, Homo sapien
tccggccgccgcccgacgaaccgcc

SEQ ID NO: 5722074 - DNA, 25 bp, Homo sapien
gggaagagaagaagagtaaggcacc

SEQ ID NO: 5722075 - DNA, 25 bp, Homo sapien
agcattcccaagaggggagtttcta

SEQ ID NO: 5722076 - DNA, 25 bp, Homo sapien
agggggtgcctcaggaccccgttgc

SEQ ID NO: 5722077 - DNA, 25 bp, Homo sapien
agctccgggtcattcctggggtggg

SEQ ID NO: 5722078 - DNA, 25 bp, Homo sapien
cggtcacctttgtcccggtgtccaa

SEQ ID NO: 5722079 - DNA, 25 bp, Homo sapien
cgcttctgggaagcccgtggcaggg

SEQ ID NO: 5722080 - DNA, 25 bp, Homo sapien
gtggacgacatcctcgcggcagtcc

SEQ ID NO: 5722081 - DNA, 25 bp, Homo sapien
tctgtggtgaaacatttccacgcaa

SEQ ID NO: 5722082 - DNA, 25 bp, Homo sapien
tccgcccgaccacacgcctcgtgac

SEQ ID NO: 5722083 - DNA, 25 bp, Homo sapien
tttccacgcaaaccagacctcaaag

SEQ ID NO: 5722084 - DNA, 25 bp, Homo sapien
taaagccctgaaccaggaacgggtg

SEQ ID NO: 5722085 - DNA, 25 bp, Homo sapien
ggggcacaagttttatggtcccagg

SEQ ID NO: 5722086 - DNA, 25 bp, Homo sapien
gtgaccatcatgctggccaacaatg

SEQ ID NO: 5722087 - DNA, 25 bp, Homo sapien
tccaaagctgcccccaccaccctgc

SEQ ID NO: 5722088 - DNA, 25 bp, Homo sapien
ccgcggagctggtgacccagaactg

SEQ ID NO: 5722089 - DNA, 25 bp, Homo sapien
accctgcagagctcacagggcccag

SEQ ID NO: 5722090 - DNA, 25 bp, Homo sapien
gtggtgaagcggaaacacttagctt

SEQ ID NO: 5722091 - DNA, 25 bp, Homo sapien
ggacgacatcctcgcggcagtccgc

SEQ ID NO: 5722092 - DNA, 25 bp, Homo sapien
gctctggcatttggacacacatcac

SEQ ID NO: 5722093 - DNA, 25 bp, Homo sapien
tattcagcaggaagaaaggccaagg

SEQ ID NO: 5722094 - DNA, 25 bp, Homo sapien
agctggaggaccaggcctagcactg

SEQ ID NO: 5722095 - DNA, 25 bp, Homo sapien
tgaagcaggccgtggcgcagctgga

SEQ ID NO: 5722096 - DNA, 25 bp, Homo sapien
agacctcaaagggacacacaggtgg

SEQ ID NO: 5722097 - DNA, 25 bp, Homo sapien
ttttgttttgatcatggcctctaca

SEQ ID NO: 5722098 - DNA, 25 bp, Homo sapien
attttgaggaaacacttgccagaaa

SEQ ID NO: 5722099 - DNA, 25 bp, Homo sapien
gcccacatagaaccgtcctccagtg

SEQ ID NO: 5722100 - DNA, 25 bp, Homo sapien
ctggtggaagaacaagtggcagcgg

SEQ ID NO: 5722101 - DNA, 25 bp, Homo sapien
gcagcgcgtggatgtggaggacctg

SEQ ID NO: 5722102 - DNA, 25 bp, Homo sapien
gggacagagaacaccccaatgattg

SEQ ID NO: 5722103 - DNA, 25 bp, Homo sapien
tttgtcccggtgtccaaggtgagcg

SEQ ID NO: 5722104 - DNA, 25 bp, Homo sapien
cggatgctgcacaggccttggggaa

SEQ ID NO: 5722105 - DNA, 25 bp, Homo sapien
accctccccactgggaactgggcac

SEQ ID NO: 5722106 - DNA, 25 bp, Homo sapien
gcgcagctggaggaccaggcctagc

SEQ ID NO: 5722107 - DNA, 25 bp, Homo sapien
cactgggaactgggcacgcctgttg

SEQ ID NO: 5722108 - DNA, 25 bp, Homo sapien
ccagagtggtctcttctcgggccct

SEQ ID NO: 5722109 - DNA, 25 bp, Homo sapien
ggagtcattttcagtggaataacat

SEQ ID NO: 5722110 - DNA, 25 bp, Homo sapien
tggtgaatttacccctctctaccct

SEQ ID NO: 5722111 - DNA, 25 bp, Homo sapien
ccgcccacatgggaccgcccacatg

SEQ ID NO: 5722112 - DNA, 25 bp, Homo sapien
agcggtcacctttgtcccggtgtcc

SEQ ID NO: 5722113 - DNA, 25 bp, Homo sapien
tccccaccccgcttctgggaagccc

SEQ ID NO: 5722114 - DNA, 25 bp, Homo sapien
agtggcagcggtcacctttgtcccg

SEQ ID NO: 5722115 - DNA, 25 bp, Homo sapien
gcctagcactggggccgccttcccc

SEQ ID NO: 5722116 - DNA, 25 bp, Homo sapien
tggggtgggaatcggatcatccctg

SEQ ID NO: 5722117 - DNA, 25 bp, Homo sapien
gcctgctctgctcagcgcccaccgc

SEQ ID NO: 5722118 - DNA, 25 bp, Homo sapien
ggattcttttctcaaaatgctctgg

SEQ ID NO: 5722119 - DNA, 25 bp, Homo sapien
acatgggaccgcccacatgggaccg

SEQ ID NO: 5722120 - DNA, 25 bp, Homo sapien
tatccaggccatgaccaaggccatg

SEQ ID NO: 5722121 - DNA, 25 bp, Homo sapien
gaccaaggccatgtgggaagcctgg

SEQ ID NO: 5722122 - DNA, 25 bp, Homo sapien
ccaacaatgagactggcattgtcat

SEQ ID NO: 5722123 - DNA, 25 bp, Homo sapien
acttagctttatccaccctccccac

SEQ ID NO: 5722124 - DNA, 25 bp, Homo sapien
tcggtcagaagagaatccatctgaa

SEQ ID NO: 5722125 - DNA, 25 bp, Homo sapien
cgtgggccgcagcaccaccagggcc

SEQ ID NO: 5722126 - DNA, 25 bp, Homo sapien
caggcacccagcggcttcccaatac

SEQ ID NO: 5722127 - DNA, 25 bp, Homo sapien
gaatttacccctctctaccctatgc

SEQ ID NO: 5722128 - DNA, 25 bp, Homo sapien
ccagaagttatccaggccatgacca

SEQ ID NO: 5722129 - DNA, 25 bp, Homo sapien
cgcccacataggaccgcccacatgg

SEQ ID NO: 5722130 - DNA, 25 bp, Homo sapien
ctggagccagaagttatccaggcca

SEQ ID NO: 5722131 - DNA, 25 bp, Homo sapien
cagggtttcagctccaacctcgctg

SEQ ID NO: 5722132 - DNA, 25 bp, Homo sapien
gttatccaggccatgaccaaggcca

SEQ ID NO: 5722133 - DNA, 25 bp, Homo sapien
gatgataggggggaaacctcaagat

SEQ ID NO: 5722134 - DNA, 25 bp, Homo sapien
cccttttgatcattaactcagggtt

SEQ ID NO: 5722135 - DNA, 25 bp, Homo sapien
gtgctgctgagctacggtgtcccct

SEQ ID NO: 5722136 - DNA, 25 bp, Homo sapien
gatcatccctgactcagcttatacc

SEQ ID NO: 5722137 - DNA, 25 bp, Homo sapien
tccaaggtgagcgggcagacagagg

SEQ ID NO: 5722138 - DNA, 25 bp, Homo sapien
tgcagagctcacagggcccaggaca

SEQ ID NO: 5722139 - DNA, 25 bp, Homo sapien
ggccgcagcaccaccagggccgagg

SEQ ID NO: 5722140 - DNA, 25 bp, Homo sapien
aggcctgctctgctcagcgcccacc

SEQ ID NO: 5722141 - DNA, 25 bp, Homo sapien
cgcctcgtgaccatcatgctggcca

SEQ ID NO: 5722142 - DNA, 25 bp, Homo sapien
tgtggttttacggttcaaggaacta

SEQ ID NO: 5722143 - DNA, 25 bp, Homo sapien
gctccaacctcgctgagttggtgca

SEQ ID NO: 5722144 - DNA, 25 bp, Homo sapien
tgtcgatatttgcataggagtcatt

SEQ ID NO: 5722145 - DNA, 25 bp, Homo sapien
cctgtccctgaaatcagtcagcgca

SEQ ID NO: 5722146 - DNA, 25 bp, Homo sapien
cacgcctcgtgaccatcatgctggc

SEQ ID NO: 5722147 - DNA, 25 bp, Homo sapien
cagggacagagaacaccccaatgat

SEQ ID NO: 5722148 - DNA, 25 bp, Homo sapien
actgggcacgcctgttgtgagtgcc

SEQ ID NO: 5722149 - DNA, 25 bp, Homo sapien
tccctggaaccctgcagagctcaca

SEQ ID NO: 5722150 - DNA, 25 bp, Homo sapien
gtcctggagtgccagcgagtgtgca

SEQ ID NO: 5722151 - DNA, 25 bp, Homo sapien
tgccaggatgactgtctcatgcccc

SEQ ID NO: 5722152 - DNA, 25 bp, Homo sapien
ggagaggaaagtttatatggactat

SEQ ID NO: 5722153 - DNA, 25 bp, Homo sapien
tggaggacctgggcgtggacttcct

SEQ ID NO: 5722154 - DNA, 25 bp, Homo sapien
cctgttgtgagtgccctttcctgga

SEQ ID NO: 5722155 - DNA, 25 bp, Homo sapien
agcctcgcgaagatgatagggggga

SEQ ID NO: 5722156 - DNA, 25 bp, Homo sapien
gaggacctgggcgtggacttcctta

SEQ ID NO: 5722157 - DNA, 25 bp, Homo sapien
gcacagggttgtccctccagttccc

SEQ ID NO: 5722158 - DNA, 25 bp, Homo sapien
tccttccctggaaccctgcagagct

SEQ ID NO: 5722159 - DNA, 25 bp, Homo sapien
ggaagcagcgcgtggatgtggagga

SEQ ID NO: 5722160 - DNA, 25 bp, Homo sapien
aaggccgcggagctggtgacccaga

SEQ ID NO: 5722161 - DNA, 25 bp, Homo sapien
gatagaatccaagtatttataactc

SEQ ID NO: 5722162 - DNA, 25 bp, Homo sapien
aacgcccacatgggaccgcccacat

SEQ ID NO: 5722163 - DNA, 25 bp, Homo sapien
gaccgcccacatagaaccgtcctcc

SEQ ID NO: 5722164 - DNA, 25 bp, Homo sapien
ggaggtggacaagaacggaatttca

SEQ ID NO: 5722165 - DNA, 25 bp, Homo sapien
cgggaaagcctcgcgaagatgatag

SEQ ID NO: 5722166 - DNA, 25 bp, Homo sapien
tccagtggtgaagcggaaacactta

SEQ ID NO: 5722167 - DNA, 25 bp, Homo sapien
gaagagaggctggaagctgaattcg

SEQ ID NO: 5722168 - DNA, 25 bp, Homo sapien
caatgattgctggccttgggaaggc

SEQ ID NO: 5722169 - DNA, 25 bp, Homo sapien
ccaagtatttataactcattgtcag

SEQ ID NO: 5722170 - DNA, 25 bp, Homo sapien
atggactataatgcaacgactcccc

SEQ ID NO: 5722171 - DNA, 25 bp, Homo sapien
gcctggggaaatcccagcagcccgt

SEQ ID NO: 5722172 - DNA, 25 bp, Homo sapien
gctgtgccaggatgactgtctcatg

SEQ ID NO: 5722173 - DNA, 25 bp, Homo sapien
tcattacttcctcggtggaacacga

SEQ ID NO: 5722174 - DNA, 25 bp, Homo sapien
gagtgccagcgagtgtgcaccccca

SEQ ID NO: 5722175 - DNA, 25 bp, Homo sapien
ctttatccaccctccccactgggaa

SEQ ID NO: 5722176 - DNA, 25 bp, Homo sapien
ccttacaatcgtggggcacaagttt

SEQ ID NO: 5722177 - DNA, 25 bp, Homo sapien
agaggtggacgacatcctcgcggca

SEQ ID NO: 5722178 - DNA, 25 bp, Homo sapien
aggaccaggcctagcactggggccg

SEQ ID NO: 5722179 - DNA, 25 bp, Homo sapien
ctcaagatataatcttcacttccgg

SEQ ID NO: 5722180 - DNA, 25 bp, Homo sapien
gttccctcctgagggctgtgccagg

SEQ ID NO: 5722181 - DNA, 25 bp, Homo sapien
ctttccagagtggtctcttctcggg

SEQ ID NO: 5722182 - DNA, 25 bp, Homo sapien
agcggctgcgggaaacacaactcgc

SEQ ID NO: 5722183 - DNA, 25 bp, Homo sapien
acatgagggacgtccgcgactacct

SEQ ID NO: 5722184 - DNA, 25 bp, Homo sapien
aggtgagcgggcagacagaggtgga

SEQ ID NO: 5722185 - DNA, 25 bp, Homo sapien
tatgctatttggaggtggacaagaa

SEQ ID NO: 5722186 - DNA, 25 bp, Homo sapien
ggaaacacaactcgccggagaggaa

SEQ ID NO: 5722187 - DNA, 25 bp, Homo sapien
acatgggaccgcccacatagaaccg

SEQ ID NO: 5722188 - DNA, 25 bp, Homo sapien
gtcccttttgatcattaactcaggg

SEQ ID NO: 5722189 - DNA, 25 bp, Homo sapien
agctggtgacccagaactgcgaggc

SEQ ID NO: 5722190 - DNA, 25 bp, Homo sapien
agtggcccccagcctcggccaggcc

SEQ ID NO: 5722191 - DNA, 25 bp, Homo sapien
cctgaccctgttccgcccactggca

SEQ ID NO: 5722192 - DNA, 25 bp, Homo sapien
acaccaacgccgcataggaccgccc

SEQ ID NO: 5722193 - DNA, 25 bp, Homo sapien
cagaggattcttttctcaaaatgct

SEQ ID NO: 5722194 - DNA, 25 bp, Homo sapien
ttttaatgtgtggttttacggttca

SEQ ID NO: 5722195 - DNA, 25 bp, Homo sapien
cctctggcctcagtgcacagtggcc

SEQ ID NO: 5722196 - DNA, 25 bp, Homo sapien
tcttgtcccttttgatcattaactc

SEQ ID NO: 5722197 - DNA, 25 bp, Homo sapien
gggacacacaggtgggcaccacagc

SEQ ID NO: 5722198 - DNA, 25 bp, Homo sapien
cataggagtcattttcagtggaata

SEQ ID NO: 5722199 - DNA, 25 bp, Homo sapien
ctgcgcacttccctgtccacggtcc

SEQ ID NO: 5722200 - DNA, 25 bp, Homo sapien
gctgctgagctacggtgtccccttc

SEQ ID NO: 5722201 - DNA, 25 bp, Homo sapien
cctggaagagaggctggaagctgaa

SEQ ID NO: 5722202 - DNA, 25 bp, Homo sapien
gcctcagtgcacagtggcccccagc

SEQ ID NO: 5722203 - DNA, 25 bp, Homo sapien
tgtgggggccgcgtgccactcggac

SEQ ID NO: 5722204 - DNA, 25 bp, Homo sapien
atcatgaacgtaggaaacttgattt

SEQ ID NO: 5722205 - DNA, 25 bp, Homo sapien
cactgagtcaaataatttagtaatc

SEQ ID NO: 5722206 - DNA, 25 bp, Homo sapien
tgaggcccacatgagggacgtccgc

SEQ ID NO: 5722207 - DNA, 25 bp, Homo sapien
atgatgattttgaggaaacacttgc

SEQ ID NO: 5722208 - DNA, 25 bp, Homo sapien
tcacagggcccaggacaccaacgcc

SEQ ID NO: 5722209 - DNA, 25 bp, Homo sapien
cagttccctcctgagggctgtgcca

SEQ ID NO: 5722210 - DNA, 25 bp, Homo sapien
gagggctgtgccaggatgactgtct

SEQ ID NO: 5722211 - DNA, 25 bp, Homo sapien
ccagcctcggccaggcctgctctgc

SEQ ID NO: 5722212 - DNA, 25 bp, Homo sapien
acacttagctttatccaccctcccc

SEQ ID NO: 5722213 - DNA, 25 bp, Homo sapien
cacaagttttatggtcccaggattg

SEQ ID NO: 5722214 - DNA, 25 bp, Homo sapien
atgagactggcattgtcatgcctgt

SEQ ID NO: 5722215 - DNA, 25 bp, Homo sapien
cctatgctatttggaggtggacaag

SEQ ID NO: 5722216 - DNA, 25 bp, Homo sapien
ggcagctgggctacctcccatcctc

SEQ ID NO: 5722217 - DNA, 25 bp, Homo sapien
ggggaagcagcgcgtggatgtggag

SEQ ID NO: 5722218 - DNA, 25 bp, Homo sapien
ctaccctatgctatttggaggtgga

SEQ ID NO: 5722219 - DNA, 25 bp, Homo sapien
aacacgactccatccggctgcccct

SEQ ID NO: 5722220 - DNA, 25 bp, Homo sapien
cgaccacacgcctcgtgaccatcat

SEQ ID NO: 5722221 - DNA, 25 bp, Homo sapien
tacctggaagagaggctggaagctg

SEQ ID NO: 5722222 - DNA, 25 bp, Homo sapien
tggtgcagctccgggtcattcctgg

SEQ ID NO: 5722223 - DNA, 25 bp, Homo sapien
cctggagcacctggtggaagaacaa

SEQ ID NO: 5722224 - DNA, 25 bp, Homo sapien
cacaggtgggcaccacagcccagtg

SEQ ID NO: 5722225 - DNA, 25 bp, Homo sapien
gcccacataggaccgcccacatagg

SEQ ID NO: 5722226 - DNA, 25 bp, Homo sapien
aacatttccacgcaaaccagacctc

SEQ ID NO: 5722227 - DNA, 25 bp, Homo sapien
cctggaaccctgcagagctcacagg

SEQ ID NO: 5722228 - DNA, 25 bp, Homo sapien
cagcggcttcccaatacctgtaact

SEQ ID NO: 5722229 - DNA, 25 bp, Homo sapien
tttgatcatggcctctacatgcacc

SEQ ID NO: 5722230 - DNA, 25 bp, Homo sapien
gtgaaacatttccacgcaaaccaga

SEQ ID NO: 5722231 - DNA, 25 bp, Homo sapien
agacagaggtggacgacatcctcgc

SEQ ID NO: 5722232 - DNA, 25 bp, Homo sapien
ccagtttccttccctggaaccctgc

SEQ ID NO: 5722233 - DNA, 25 bp, Homo sapien
gacagagaacaccccaatgattgct

SEQ ID NO: 5722234 - DNA, 25 bp, Homo sapien
cctggagtgccagcgagtgtgcacc

SEQ ID NO: 5722235 - DNA, 25 bp, Homo sapien
ttgtcagccaaatgctatcatgaac

SEQ ID NO: 5722236 - DNA, 25 bp, Homo sapien
tattataaatgcagctcgggaaagc

SEQ ID NO: 5722237 - DNA, 25 bp, Homo sapien
ggtgaagcggaaacacttagcttta

SEQ ID NO: 5722238 - DNA, 25 bp, Homo sapien
tttccatccggggaccccggcttca

SEQ ID NO: 5722239 - DNA, 25 bp, Homo sapien
gaaacatttccacgcaaaccagacc

SEQ ID NO: 5722240 - DNA, 25 bp, Homo sapien
aaacacaactcgccggagaggaaag

SEQ ID NO: 5722241 - DNA, 25 bp, Homo sapien
ggccatgtgggaagcctggggaaat

SEQ ID NO: 5722242 - DNA, 25 bp, Homo sapien
agccagaagttatccaggccatgac

SEQ ID NO: 5722243 - DNA, 25 bp, Homo sapien
atgggaccgcccacatgggaccgcc

SEQ ID NO: 5722244 - DNA, 25 bp, Homo sapien
agtttccaggcacccagcggcttcc

SEQ ID NO: 5722245 - DNA, 25 bp, Homo sapien
gcattaaagccctgaaccaggaacg

SEQ ID NO: 5722246 - DNA, 25 bp, Homo sapien
ccaggatgactgtctcatgccccct

SEQ ID NO: 5722247 - DNA, 25 bp, Homo sapien
cgcaaaccagacctcaaagggacac

SEQ ID NO: 5722248 - DNA, 25 bp, Homo sapien
ccgcagcaccaccagggccgaggtg

SEQ ID NO: 5722249 - DNA, 25 bp, Homo sapien
atttagtaatccattctgtggtgaa

SEQ ID NO: 5722250 - DNA, 25 bp, Homo sapien
agtccctttccaaagctgcccccac

SEQ ID NO: 5722251 - DNA, 25 bp, Homo sapien
catccggggaccccggcttcaaggc

SEQ ID NO: 5722252 - DNA, 25 bp, Homo sapien
ttatggtcccaggattggcgcactt

SEQ ID NO: 5722253 - DNA, 25 bp, Homo sapien
ctgagttggtgcagctccgggtcat

SEQ ID NO: 5722254 - DNA, 25 bp, Homo sapien
tgctgagctacggtgtccccttcga

SEQ ID NO: 5722255 - DNA, 25 bp, Homo sapien
acataggaccgcccacataggaccg

SEQ ID NO: 5722256 - DNA, 25 bp, Homo sapien
aattaacgaataaaagatttcagtg

SEQ ID NO: 5722257 - DNA, 25 bp, Homo sapien
gtcagccaaatgctatcatgaacgt

SEQ ID NO: 5722258 - DNA, 25 bp, Homo sapien
gggtcattcctggggtgggaatcgg

SEQ ID NO: 5722259 - DNA, 25 bp, Homo sapien
cctcctgagggctgtgccaggatga

SEQ ID NO: 5722260 - DNA, 25 bp, Homo sapien
tgaccctgttccgcccactggcaat

SEQ ID NO: 5722261 - DNA, 25 bp, Homo sapien
ccacggggaccagccgtccccagtg

SEQ ID NO: 5722262 - DNA, 25 bp, Homo sapien
gaaacttgatttttttgttttgatc

SEQ ID NO: 5722263 - DNA, 25 bp, Homo sapien
ccaccctgctcctctggcctcagtg

SEQ ID NO: 5722264 - DNA, 25 bp, Homo sapien
accgcccacatgggaacgcccacat

SEQ ID NO: 5722265 - DNA, 25 bp, Homo sapien
atcacatgtcgatatttgcatagga

SEQ ID NO: 5722266 - DNA, 25 bp, Homo sapien
gcggcttcccaatacctgtaacttt

SEQ ID NO: 5722267 - DNA, 25 bp, Homo sapien
cttccctggaaccctgcagagctca

SEQ ID NO: 5722268 - DNA, 25 bp, Homo sapien
ggcagggcacagggttgtccctcca

SEQ ID NO: 5722269 - DNA, 25 bp, Homo sapien
tttccaaagctgcccccaccaccct

SEQ ID NO: 5722270 - DNA, 25 bp, Homo sapien
atttttttgttttgatcatggcctc

SEQ ID NO: 5722271 - DNA, 25 bp, Homo sapien
ccacgtggtgcttgcgcagtgccga

SEQ ID NO: 5722272 - DNA, 25 bp, Homo sapien
catcctcgcggcagtccgcccgacc

SEQ ID NO: 5722273 - DNA, 25 bp, Homo sapien
aagtttatatggactataatgcaac

SEQ ID NO: 5722274 - DNA, 25 bp, Homo sapien
gcccagtgaagggggccaagcccca

SEQ ID NO: 5722275 - DNA, 25 bp, Homo sapien
gcctctacatgcacctttccagagt

SEQ ID NO: 5722276 - DNA, 25 bp, Homo sapien
cgctgagttggtgcagctccgggtc

SEQ ID NO: 5722277 - DNA, 25 bp, Homo sapien
ggacaagaacggaatttcaggccag

SEQ ID NO: 5722278 - DNA, 25 bp, Homo sapien
agaagagaatccatctgaatagcca

SEQ ID NO: 5722279 - DNA, 25 bp, Homo sapien
ttacaatcgtggggcacaagtttta

SEQ ID NO: 5722280 - DNA, 25 bp, Homo sapien
tgatcatggcctctacatgcacctt

SEQ ID NO: 5722281 - DNA, 25 bp, Homo sapien
tcagcgtgggccgcagcaccaccag

SEQ ID NO: 5722282 - DNA, 25 bp, Homo sapien
aaacctcaagatataatcttcactt

SEQ ID NO: 5722283 - DNA, 25 bp, Homo sapien
caatgagactggcattgtcatgcct

SEQ ID NO: 5722284 - DNA, 25 bp, Homo sapien
ccacataggaccgcccacatgggac

SEQ ID NO: 5722285 - DNA, 25 bp, Homo sapien
atcccagcagcccgtattcagcagg

SEQ ID NO: 5722286 - DNA, 25 bp, Homo sapien
tctgcattttgtcctggagtgccag

SEQ ID NO: 5722287 - DNA, 25 bp, Homo sapien
ctgagctacggtgtccccttcgacg

SEQ ID NO: 5722288 - DNA, 25 bp, Homo sapien
actggcaatcagggctgcgcacttc

SEQ ID NO: 5722289 - DNA, 25 bp, Homo sapien
accccgcttctgggaagcccgtggc

SEQ ID NO: 5722290 - DNA, 25 bp, Homo sapien
gtggggcacaagttttatggtccca

SEQ ID NO: 5722291 - DNA, 25 bp, Homo sapien
tttccaggcacccagcggcttccca

SEQ ID NO: 5722292 - DNA, 25 bp, Homo sapien
ctggaagatagaatccaagtattta

SEQ ID NO: 5722293 - DNA, 25 bp, Homo sapien
caagatataatcttcacttccgggg

SEQ ID NO: 5722294 - DNA, 25 bp, Homo sapien
aagcccgtggcagggcacagggttg

SEQ ID NO: 5722295 - DNA, 25 bp, Homo sapien
aactgcgaggcttatgaggcccaca

SEQ ID NO: 5722296 - DNA, 25 bp, Homo sapien
aacgactcccctggagccagaagtt

SEQ ID NO: 5722297 - DNA, 25 bp, Homo sapien
gccccatttcattacttcctcggtg

SEQ ID NO: 5722298 - DNA, 25 bp, Homo sapien
agccagtttccaggcacccagcggc

SEQ ID NO: 5722299 - DNA, 25 bp, Homo sapien
ccctctctaccctatgctatttgga

SEQ ID NO: 5722300 - DNA, 25 bp, Homo sapien
tgactgtctcatgccccctctgcat

SEQ ID NO: 5722301 - DNA, 25 bp, Homo sapien
agcctgaccctgttccgcccactgg

SEQ ID NO: 5722302 - DNA, 25 bp, Homo sapien
ggacttccttacaatcgtggggcac

SEQ ID NO: 5722303 - DNA, 25 bp, Homo sapien
gcccaccgcccaccacccctcctgc

SEQ ID NO: 5722304 - DNA, 25 bp, Homo sapien
gaccgcccacataggaccgcccaca

SEQ ID NO: 5722305 - DNA, 25 bp, Homo sapien
ctcgctgagttggtgcagctccggg

SEQ ID NO: 5722306 - DNA, 25 bp, Homo sapien
caaaatgctctggcatttggacaca

SEQ ID NO: 5722307 - DNA, 25 bp, Homo sapien
atacgaggacttggtgaatttaccc

SEQ ID NO: 5722308 - DNA, 25 bp, Homo sapien
cccgcttctgggaagcccgtggcag

SEQ ID NO: 5722309 - DNA, 25 bp, Homo sapien
agggggccaagccccatttcattac

SEQ ID NO: 5722310 - DNA, 25 bp, Homo sapien
ctcagcttataccttaattttattt

SEQ ID NO: 5722311 - DNA, 25 bp, Homo sapien
ctatcatgaacgtaggaaacttgat

SEQ ID NO: 5722312 - DNA, 25 bp, Homo sapien
agaaaggccaaggatattataaatg

SEQ ID NO: 5722313 - DNA, 25 bp, Homo sapien
catccggctgcccctggagcacctg

SEQ ID NO: 5722314 - DNA, 25 bp, Homo sapien
ttccagagtggtctcttctcgggcc

SEQ ID NO: 5722315 - DNA, 25 bp, Homo sapien
cgcgtggatgtggaggacctgggcg

SEQ ID NO: 5722316 - DNA, 25 bp, Homo sapien
cccctctgcattttgtcctggagtg

SEQ ID NO: 5722317 - DNA, 25 bp, Homo sapien
caacgccgcataggaccgcccacat

SEQ ID NO: 5722318 - DNA, 25 bp, Homo sapien
gtgtccccttcgacgtggccaggaa

SEQ ID NO: 5722319 - DNA, 25 bp, Homo sapien
gccctgaaccaggaacgggtggcag

SEQ ID NO: 5722320 - DNA, 25 bp, Homo sapien
ccctgtccacggtccccaggccttc

SEQ ID NO: 5722321 - DNA, 25 bp, Homo sapien
gtatttataactcattgtcagccaa

SEQ ID NO: 5722322 - DNA, 25 bp, Homo sapien
ccatcatgctggccaacaatgagac

SEQ ID NO: 5722323 - DNA, 25 bp, Homo sapien
ggccttcctgtcttgtcccttttga

SEQ ID NO: 5722324 - DNA, 25 bp, Homo sapien
tgggcacgcctgttgtgagtgccct

SEQ ID NO: 5722325 - DNA, 25 bp, Homo sapien
tcttttctcaaaatgctctggcatt

SEQ ID NO: 5722326 - DNA, 25 bp, Homo sapien
catgctggccaacaatgagactggc

SEQ ID NO: 5722327 - DNA, 25 bp, Homo sapien
gcagcaccaccagggccgaggtgga

SEQ ID NO: 5722328 - DNA, 25 bp, Homo sapien
gcccacatgagggacgtccgcgact

SEQ ID NO: 5722329 - DNA, 25 bp, Homo sapien
gggaccgcccacatgggaccgccca

SEQ ID NO: 5722330 - DNA, 25 bp, Homo sapien
cattgtcagccaaatgctatcatga

SEQ ID NO: 5722331 - DNA, 25 bp, Homo sapien
gtccacggtccccaggccttcctgt

SEQ ID NO: 5722332 - DNA, 25 bp, Homo sapien
aactcattgtcagccaaatgctatc

SEQ ID NO: 5722333 - DNA, 25 bp, Homo sapien
ctacatgatgattttgaggaaacac

SEQ ID NO: 5722334 - DNA, 25 bp, Homo sapien
agttttatggtcccaggattggcgc

SEQ ID NO: 5722335 - DNA, 25 bp, Homo sapien
gcacagtggcccccagcctcggcca

SEQ ID NO: 5722336 - DNA, 25 bp, Homo sapien
cgactccatccggctgcccctggag

SEQ ID NO: 5722337 - DNA, 25 bp, Homo sapien
ttggcgcactttatatacgaggact

SEQ ID NO: 5722338 - DNA, 25 bp, Homo sapien
tgctatcatgaacgtaggaaacttg

SEQ ID NO: 5722339 - DNA, 25 bp, Homo sapien
tggcagcggtcacctttgtcccggt

SEQ ID NO: 5722340 - DNA, 25 bp, Homo sapien
gccagggacagagaacaccccaatg

SEQ ID NO: 5722341 - DNA, 25 bp, Homo sapien
cttgatttttttgttttgatcatgg

SEQ ID NO: 5722342 - DNA, 25 bp, Homo sapien
cagtgcacagtggcccccagcctcg

SEQ ID NO: 5722343 - DNA, 25 bp, Homo sapien
atctggaagatagaatccaagtatt

SEQ ID NO: 5722344 - DNA, 25 bp, Homo sapien
acatgggaccgcccacataggaccg

SEQ ID NO: 5722345 - DNA, 25 bp, Homo sapien
tggttttacggttcaaggaactaca

SEQ ID NO: 5722346 - DNA, 25 bp, Homo sapien
cctggaaggtgtttttatctggaag

SEQ ID NO: 5722347 - DNA, 25 bp, Homo sapien
gttgtccctccagttccctcctgag

SEQ ID NO: 5722348 - DNA, 25 bp, Homo sapien
tttgatcattaactcagggtttcag

SEQ ID NO: 5722349 - DNA, 25 bp, Homo sapien
gagctcacagggcccaggacaccaa

SEQ ID NO: 5722350 - DNA, 25 bp, Homo sapien
gacatcctcgcggcagtccgcccga

SEQ ID NO: 5722351 - DNA, 25 bp, Homo sapien
cgcgactacctggaagagaggctgg

SEQ ID NO: 5722352 - DNA, 25 bp, Homo sapien
cctgtcttgtcccttttgatcatta

SEQ ID NO: 5722353 - DNA, 25 bp, Homo sapien
taattttatttgcagaggattcttt

SEQ ID NO: 5722354 - DNA, 25 bp, Homo sapien
gttttgatcatggcctctacatgca

SEQ ID NO: 5722355 - DNA, 25 bp, Homo sapien
tcggccaggcctgctctgctcagcg

SEQ ID NO: 5722356 - DNA, 25 bp, Homo sapien
ccccttcgacgtggccaggaacgcg

SEQ ID NO: 5722357 - DNA, 25 bp, Homo sapien
ctgggcgtggacttccttacaatcg

SEQ ID NO: 5722358 - DNA, 25 bp, Homo sapien
agatataatcttcacttccgggggc

SEQ ID NO: 5722359 - DNA, 25 bp, Homo sapien
ggacaccaacgccgcataggaccgc

SEQ ID NO: 5722360 - DNA, 25 bp, Homo sapien
ccggagaggaaagtttatatggact

SEQ ID NO: 5722361 - DNA, 25 bp, Homo sapien
agctttatccaccctccccactggg

SEQ ID NO: 5722362 - DNA, 25 bp, Homo sapien
atcggatcatccctgactcagctta

SEQ ID NO: 5722363 - DNA, 25 bp, Homo sapien
gggtgggaatcggatcatccctgac

SEQ ID NO: 5722364 - DNA, 25 bp, Homo sapien
cggtggaacacgactccatccggct

SEQ ID NO: 5722365 - DNA, 25 bp, Homo sapien
gaaccctgcagagctcacagggccc

SEQ ID NO: 5722366 - DNA, 25 bp, Homo sapien
catcctcgtgcacacggatgctgca

SEQ ID NO: 5722367 - DNA, 25 bp, Homo sapien
acagaggtggacgacatcctcgcgg

SEQ ID NO: 5722368 - DNA, 25 bp, Homo sapien
ggggggaaacctcaagatataatct

SEQ ID NO: 5722369 - DNA, 25 bp, Homo sapien
acaatcgtggggcacaagttttatg

SEQ ID NO: 5722370 - DNA, 25 bp, Homo sapien
acataggaccgcccacatgggaccg

SEQ ID NO: 5722371 - DNA, 25 bp, Homo sapien
cagggcacagggttgtccctccagt

SEQ ID NO: 5722372 - DNA, 25 bp, Homo sapien
cgaggtggacctcgtcgtgcaggac

SEQ ID NO: 5722373 - DNA, 25 bp, Homo sapien
ttataactcattgtcagccaaatgc

SEQ ID NO: 5722374 - DNA, 25 bp, Homo sapien
gatgtggaggacctgggcgtggact

SEQ ID NO: 5722375 - DNA, 25 bp, Homo sapien
agaaccgtcctccagtggtgaagcg

SEQ ID NO: 5722376 - DNA, 25 bp, Homo sapien
ttgtgagtgccctttcctggaaggt

SEQ ID NO: 5722377 - DNA, 25 bp, Homo sapien
ccaggaacgggtggcagctgggcta

SEQ ID NO: 5722378 - DNA, 25 bp, Homo sapien
cctgcagagctcacagggcccagga

SEQ ID NO: 5722379 - DNA, 25 bp, Homo sapien
cttccccaccccgcttctgggaagc

SEQ ID NO: 5722380 - DNA, 25 bp, Homo sapien
aagaacggaatttcaggccagggac

SEQ ID NO: 5722381 - DNA, 25 bp, Homo sapien
aggtggacctcgtcgtgcaggacct

SEQ ID NO: 5722382 - DNA, 25 bp, Homo sapien
ggccacgtggtgcttgcgcagtgcc

SEQ ID NO: 5722383 - DNA, 25 bp, Homo sapien
cccaatgattgctggccttgggaag

SEQ ID NO: 5722384 - DNA, 25 bp, Homo sapien
actcccctggagccagaagttatcc

SEQ ID NO: 5722385 - DNA, 25 bp, Homo sapien
tctggcctcagtgcacagtggcccc

SEQ ID NO: 5722386 - DNA, 25 bp, Homo sapien
ggacacacatcacatgtcgatattt

SEQ ID NO: 5722387 - DNA, 25 bp, Homo sapien
gggaccgcccacatagaaccgtcct

SEQ ID NO: 5722388 - DNA, 25 bp, Homo sapien
gataggggggaaacctcaagatata

SEQ ID NO: 5722389 - DNA, 25 bp, Homo sapien
tcctcggtggaacacgactccatcc

SEQ ID NO: 5722390 - DNA, 25 bp, Homo sapien
cagtcagcgcattaaagccctgaac

SEQ ID NO: 5722391 - DNA, 25 bp, Homo sapien
tgcacacggatgctgcacaggcctt

SEQ ID NO: 5722392 - DNA, 25 bp, Homo sapien
ttaacgaataaaagatttcagtgcc

SEQ ID NO: 5722393 - DNA, 25 bp, Homo sapien
ggaagcccgtggcagggcacagggt

SEQ ID NO: 5722394 - DNA, 25 bp, Homo sapien
gcgctccggctcagcgtgggccgca

SEQ ID NO: 5722395 - DNA, 25 bp, Homo sapien
tgtgtggttttacggttcaaggaac

SEQ ID NO: 5722396 - DNA, 25 bp, Homo sapien
gcgtgccactcggaccacggggacc

SEQ ID NO: 5722397 - DNA, 25 bp, Homo sapien
ttctcaaaatgctctggcatttgga

SEQ ID NO: 5722398 - DNA, 25 bp, Homo sapien
ctgagtcaaataatttagtaatcca

SEQ ID NO: 5722399 - DNA, 25 bp, Homo sapien
caaagggacacacaggtgggcacca

SEQ ID NO: 5722400 - DNA, 25 bp, Homo sapien
cgcataggaccgcccacatgggaac

SEQ ID NO: 5722401 - DNA, 25 bp, Homo sapien
caaataatttagtaatccattctgt

SEQ ID NO: 5722402 - DNA, 25 bp, Homo sapien
aacttgatttttttgttttgatcat

SEQ ID NO: 5722403 - DNA, 25 bp, Homo sapien
gaccccggcttcaaggccacgtggt

SEQ ID NO: 5722404 - DNA, 25 bp, Homo sapien
ccagacctcaaagggacacacaggt

SEQ ID NO: 5722405 - DNA, 25 bp, Homo sapien
cccctggagcacctggtggaagaac

SEQ ID NO: 5722406 - DNA, 25 bp, Homo sapien
aggaaacacttgccagaaactaaat

SEQ ID NO: 5722407 - DNA, 25 bp, Homo sapien
ccgtggcagggcacagggttgtccc

SEQ ID NO: 5722408 - DNA, 25 bp, Homo sapien
gctggaagctgaattcggtcagaag

SEQ ID NO: 5722409 - DNA, 25 bp, Homo sapien
cccactgggaactgggcacgcctgt

SEQ ID NO: 5722410 - DNA, 25 bp, Homo sapien
atttggacacacatcacatgtcgat

SEQ ID NO: 5722411 - DNA, 25 bp, Homo sapien
ttatctggaagatagaatccaagta

SEQ ID NO: 5722412 - DNA, 25 bp, Homo sapien
tatttgcagaggattcttttctcaa

SEQ ID NO: 5722413 - DNA, 25 bp, Homo sapien
ggaaggccgcggagctggtgaccca

SEQ ID NO: 5722414 - DNA, 25 bp, Homo sapien
aaccgtcctccagtggtgaagcgga

SEQ ID NO: 5722415 - DNA, 25 bp, Homo sapien
acggaatttcaggccagggacagag

SEQ ID NO: 5722416 - DNA, 25 bp, Homo sapien
tatgaggcccacatgagggacgtcc

SEQ ID NO: 5722417 - DNA, 25 bp, Homo sapien
gcagcccgtattcagcaggaagaaa

SEQ ID NO: 5722418 - DNA, 25 bp, Homo sapien
tccaggccatgaccaaggccatgtg

SEQ ID NO: 5722419 - DNA, 25 bp, Homo sapien
acatcacatgtcgatatttgcatag

SEQ ID NO: 5722420 - DNA, 25 bp, Homo sapien
tgggaagcccgtggcagggcacagg

SEQ ID NO: 5722421 - DNA, 25 bp, Homo sapien
tcctcgtgcacacggatgctgcaca

SEQ ID NO: 5722422 - DNA, 25 bp, Homo sapien
tgcttgcgcagtgccgagtgctgat

SEQ ID NO: 5722423 - DNA, 25 bp, Homo sapien
cactttatatacgaggacttggtga

SEQ ID NO: 5722424 - DNA, 25 bp, Homo sapien
cctttccaaagctgcccccaccacc

SEQ ID NO: 5722425 - DNA, 25 bp, Homo sapien
aagggacacacaggtgggcaccaca

SEQ ID NO: 5722426 - DNA, 25 bp, Homo sapien
tacggtgtccccttcgacgtggcca

SEQ ID NO: 5722427 - DNA, 25 bp, Homo sapien
acctcaaagggacacacaggtgggc

SEQ ID NO: 5722428 - DNA, 25 bp, Homo sapien
gagtgccctttcctggaaggtgttt

SEQ ID NO: 5722429 - DNA, 25 bp, Homo sapien
tcgtggggcacaagttttatggtcc

SEQ ID NO: 5722430 - DNA, 25 bp, Homo sapien
tgcctgtccctgaaatcagtcagcg

SEQ ID NO: 5722431 - DNA, 25 bp, Homo sapien
tgggccgcagcaccaccagggccga

SEQ ID NO: 5722432 - DNA, 25 bp, Homo sapien
tgtccctccagttccctcctgaggg

SEQ ID NO: 5722433 - DNA, 25 bp, Homo sapien
tctcatgccccctctgcattttgtc

SEQ ID NO: 5722434 - DNA, 25 bp, Homo sapien
attacttcctcggtggaacacgact

SEQ ID NO: 5722435 - DNA, 25 bp, Homo sapien
cagccaaatgctatcatgaacgtag

SEQ ID NO: 5722436 - DNA, 25 bp, Homo sapien
gggtttcagctccaacctcgctgag

SEQ ID NO: 5722437 - DNA, 25 bp, Homo sapien
tttgcagaggattcttttctcaaaa

SEQ ID NO: 5722438 - DNA, 25 bp, Homo sapien
ggtcagaagagaatccatctgaata

SEQ ID NO: 5722439 - DNA, 25 bp, Homo sapien
ataggaccgcccacatgggaccgcc

SEQ ID NO: 5722440 - DNA, 25 bp, Homo sapien
acgacatcctcgcggcagtccgccc

SEQ ID NO: 5722441 - DNA, 25 bp, Homo sapien
gcgcccaccgcccaccacccctcct

SEQ ID NO: 5722442 - DNA, 25 bp, Homo sapien
gccgtggcgcagctggaggaccagg

SEQ ID NO: 5722443 - DNA, 25 bp, Homo sapien
aagccccatttcattacttcctcgg

SEQ ID NO: 5722444 - DNA, 25 bp, Homo sapien
aaccaggaacgggtggcagctgggc

SEQ ID NO: 5722445 - DNA, 25 bp, Homo sapien
cctggggtgggaatcggatcatccc

SEQ ID NO: 5722446 - DNA, 25 bp, Homo sapien
ctacatgcacctttccagagtggtc

SEQ ID NO: 5722447 - DNA, 25 bp, Homo sapien
aggattggcgcactttatatacgag

SEQ ID NO: 5722448 - DNA, 25 bp, Homo sapien
ctcgcggcagtccgcccgaccacac

SEQ ID NO: 5722449 - DNA, 25 bp, Homo sapien
ggggccaagccccatttcattactt

SEQ ID NO: 5722450 - DNA, 25 bp, Homo sapien
tcatccctgactcagcttatacctt

SEQ ID NO: 5722451 - DNA, 25 bp, Homo sapien
ctgctctgctcagcgcccaccgccc

SEQ ID NO: 5722452 - DNA, 25 bp, Homo sapien
taggaccgcccacatgggaacgccc

SEQ ID NO: 5722453 - DNA, 25 bp, Homo sapien
ccaccagggccgaggtggacctcgt

SEQ ID NO: 5722454 - DNA, 25 bp, Homo sapien
ccaggattggcgcactttatatacg

SEQ ID NO: 5722455 - DNA, 25 bp, Homo sapien
tctgggaagcccgtggcagggcaca

SEQ ID NO: 5722456 - DNA, 25 bp, Homo sapien
ccggtgtccaaggtgagcgggcaga

SEQ ID NO: 5722457 - DNA, 25 bp, Homo sapien
gcgcattaaagccctgaaccaggaa

SEQ ID NO: 5722458 - DNA, 25 bp, Homo sapien
cagggccgaggtggacctcgtcgtg

SEQ ID NO: 5722459 - DNA, 25 bp, Homo sapien
aatgtgtggttttacggttcaagga

SEQ ID NO: 5722460 - DNA, 25 bp, Homo sapien
ttcctgtcttgtcccttttgatcat

SEQ ID NO: 5722461 - DNA, 25 bp, Homo sapien
tgtcttgtcccttttgatcattaac

SEQ ID NO: 5722462 - DNA, 25 bp, Homo sapien
caagttttatggtcccaggattggc

SEQ ID NO: 5722463 - DNA, 25 bp, Homo sapien
ccatctgaatagccagtttccaggc

SEQ ID NO: 5722464 - DNA, 25 bp, Homo sapien
atttggaggtggacaagaacggaat

SEQ ID NO: 5722465 - DNA, 25 bp, Homo sapien
ttagtccctttccaaagctgccccc

SEQ ID NO: 5722466 - DNA, 25 bp, Homo sapien
tgggaccgcccacatagaaccgccc

SEQ ID NO: 5722467 - DNA, 25 bp, Homo sapien
gcagctcgggaaagcctcgcgaaga

SEQ ID NO: 5722468 - DNA, 25 bp, Homo sapien
gcccgtggcagggcacagggttgtc

SEQ ID NO: 5722469 - DNA, 25 bp, Homo sapien
ggcacccagcggcttcccaatacct

SEQ ID NO: 5722470 - DNA, 25 bp, Homo sapien
actgtctcatgccccctctgcattt

SEQ ID NO: 5722471 - DNA, 25 bp, Homo sapien
tgcgggaaacacaactcgccggaga

SEQ ID NO: 5722472 - DNA, 25 bp, Homo sapien
gcgggcagacagaggtggacgacat

SEQ ID NO: 5722473 - DNA, 25 bp, Homo sapien
ccctcctgcttccccgagcctgacc

SEQ ID NO: 5722474 - DNA, 25 bp, Homo sapien
gctgcgggaaacacaactcgccgga

SEQ ID NO: 5722475 - DNA, 25 bp, Homo sapien
gtggtctcttctcgggcccttttta

SEQ ID NO: 5722476 - DNA, 25 bp, Homo sapien
atccatctgaatagccagtttccag

SEQ ID NO: 5722477 - DNA, 25 bp, Homo sapien
gtgagcgggcagacagaggtggacg

SEQ ID NO: 5722478 - DNA, 25 bp, Homo sapien
ccactggcaatcagggctgcgcact

SEQ ID NO: 5722479 - DNA, 25 bp, Homo sapien
ctcgcgaagatgataggggggaaac

SEQ ID NO: 5722480 - DNA, 25 bp, Homo sapien
ggccgccttccccaccccgcttctg

SEQ ID NO: 5722481 - DNA, 25 bp, Homo sapien
accagggccgaggtggacctcgtcg

SEQ ID NO: 5722482 - DNA, 25 bp, Homo sapien
ccacggtccccaggccttcctgtct

SEQ ID NO: 5722483 - DNA, 25 bp, Homo sapien
cgtgcacacggatgctgcacaggcc

SEQ ID NO: 5722484 - DNA, 25 bp, Homo sapien
ctctacatgcacctttccagagtgg

SEQ ID NO: 5722485 - DNA, 25 bp, Homo sapien
atcagtcagcgcattaaagccctga

SEQ ID NO: 5722486 - DNA, 25 bp, Homo sapien
ataccttaattttatttgcagagga

SEQ ID NO: 5722487 - DNA, 25 bp, Homo sapien
ggccttggggaagcagcgcgtggat

SEQ ID NO: 5722488 - DNA, 25 bp, Homo sapien
ttttatctggaagatagaatccaag

SEQ ID NO: 5722489 - DNA, 25 bp, Homo sapien
ctcaaaatgctctggcatttggaca

SEQ ID NO: 5722490 - DNA, 25 bp, Homo sapien
gagctacggtgtccccttcgacgtg

SEQ ID NO: 5722491 - DNA, 25 bp, Homo sapien
tgcccccaccaccctgctcctctgg

SEQ ID NO: 5722492 - DNA, 25 bp, Homo sapien
cccacatgggaacgcccacatggga

SEQ ID NO: 5722493 - DNA, 25 bp, Homo sapien
agaactgcgaggcttatgaggccca

SEQ ID NO: 5722494 - DNA, 25 bp, Homo sapien
gtgaatttacccctctctaccctat

SEQ ID NO: 5722495 - DNA, 25 bp, Homo sapien
ggcacaagttttatggtcccaggat

SEQ ID NO: 5722496 - DNA, 25 bp, Homo sapien
cgcccgaccacacgcctcgtgacca

SEQ ID NO: 5722497 - DNA, 25 bp, Homo sapien
cctgctcctctggcctcagtgcaca

SEQ ID NO: 5722498 - DNA, 25 bp, Homo sapien
tgccctttcctggaaggtgttttta

SEQ ID NO: 5722499 - DNA, 25 bp, Homo sapien
ttttatggtcccaggattggcgcac

SEQ ID NO: 5722500 - DNA, 25 bp, Homo sapien
tggaataacatttttaatgtgtggt

SEQ ID NO: 5722501 - DNA, 25 bp, Homo sapien
tccccaggccttcctgtcttgtccc

SEQ ID NO: 5722502 - DNA, 25 bp, Homo sapien
tcgtgcaggacctgaagcaggccgt

SEQ ID NO: 5722503 - DNA, 25 bp, Homo sapien
ataggaccgcccacataggaccgcc

SEQ ID NO: 5722504 - DNA, 25 bp, Homo sapien
cagcaggaagaaaggccaaggatat

SEQ ID NO: 5722505 - DNA, 25 bp, Homo sapien
acccctcctgcttccccgagcctga

SEQ ID NO: 5722506 - DNA, 25 bp, Homo sapien
acctcaagatataatcttcacttcc

SEQ ID NO: 5722507 - DNA, 25 bp, Homo sapien
tgctggccaacaatgagactggcat

SEQ ID NO: 5722508 - DNA, 25 bp, Homo sapien
tgctatttggaggtggacaagaacg

SEQ ID NO: 5722509 - DNA, 25 bp, Homo sapien
acagtggcccccagcctcggccagg

SEQ ID NO: 5722510 - DNA, 25 bp, Homo sapien
cgggggcactgagtcaaataattta

SEQ ID NO: 5722511 - DNA, 25 bp, Homo sapien
tgaaatcagtcagcgcattaaagcc

SEQ ID NO: 5722512 - DNA, 25 bp, Homo sapien
taggagtcattttcagtggaataac

SEQ ID NO: 5722513 - DNA, 25 bp, Homo sapien
agtcattttcagtggaataacattt

SEQ ID NO: 5722514 - DNA, 25 bp, Homo sapien
acttccctgtccacggtccccaggc

SEQ ID NO: 5722515 - DNA, 25 bp, Homo sapien
gaacggaatttcaggccagggacag

SEQ ID NO: 5722516 - DNA, 25 bp, Homo sapien
atgcacctttccagagtggtctctt

SEQ ID NO: 5722517 - DNA, 25 bp, Homo sapien
ggacctcgtcgtgcaggacctgaag

SEQ ID NO: 5722518 - DNA, 25 bp, Homo sapien
aggtggacaagaacggaatttcagg

SEQ ID NO: 5722519 - DNA, 25 bp, Homo sapien
aacacttgccagaaactaaattaac

SEQ ID NO: 5722520 - DNA, 25 bp, Homo sapien
gcatttggacacacatcacatgtcg

SEQ ID NO: 5722521 - DNA, 25 bp, Homo sapien
ccacatgggaccgcccacataggac

SEQ ID NO: 5722522 - DNA, 25 bp, Homo sapien
gcggagctggtgacccagaactgcg

SEQ ID NO: 5722523 - DNA, 25 bp, Homo sapien
gcccccagcctcggccaggcctgct

SEQ ID NO: 5722524 - DNA, 25 bp, Homo sapien
cgcccacatagaaccgcccacatag

SEQ ID NO: 5722525 - DNA, 25 bp, Homo sapien
caggccttggggaagcagcgcgtgg

SEQ ID NO: 5722526 - DNA, 25 bp, Homo sapien
ggccaggcctgctctgctcagcgcc

SEQ ID NO: 5722527 - DNA, 25 bp, Homo sapien
tgtggtgaaacatttccacgcaaac

SEQ ID NO: 5722528 - DNA, 25 bp, Homo sapien
gtggacttccttacaatcgtggggc

SEQ ID NO: 5722529 - DNA, 25 bp, Homo sapien
ataacatttttaatgtgtggtttta

SEQ ID NO: 5722530 - DNA, 25 bp, Homo sapien
gctctgctcagcgcccaccgcccac

SEQ ID NO: 5722531 - DNA, 25 bp, Homo sapien
ttagctttatccaccctccccactg

SEQ ID NO: 5722532 - DNA, 25 bp, Homo sapien
cctccccactgggaactgggcacgc

SEQ ID NO: 5722533 - DNA, 25 bp, Homo sapien
atccaagtatttataactcattgtc

SEQ ID NO: 5722534 - DNA, 25 bp, Homo sapien
tccccactgggaactgggcacgcct

SEQ ID NO: 5722535 - DNA, 25 bp, Homo sapien
tggaagctgaattcggtcagaagag

SEQ ID NO: 5722536 - DNA, 25 bp, Homo sapien
tcccggtgtccaaggtgagcgggca

SEQ ID NO: 5722537 - DNA, 25 bp, Homo sapien
ccgcccacatagaaccgtcctccag

SEQ ID NO: 5722538 - DNA, 25 bp, Homo sapien
caaaccagacctcaaagggacacac

SEQ ID NO: 5722539 - DNA, 25 bp, Homo sapien
tgtccaaggtgagcgggcagacaga

SEQ ID NO: 5722540 - DNA, 25 bp, Homo sapien
ggtcccaggattggcgcactttata

SEQ ID NO: 5722541 - DNA, 25 bp, Homo sapien
tggcccccagcctcggccaggcctg

SEQ ID NO: 5722542 - DNA, 25 bp, Homo sapien
ggagccagaagttatccaggccatg

SEQ ID NO: 5722543 - DNA, 25 bp, Homo sapien
gcccacatgggaccgcccacataga

SEQ ID NO: 5722544 - DNA, 25 bp, Homo sapien
ggaaacctcaagatataatcttcac

SEQ ID NO: 5722545 - DNA, 25 bp, Homo sapien
caaagctgcccccaccaccctgctc

SEQ ID NO: 5722546 - DNA, 25 bp, Homo sapien
cccgaccacacgcctcgtgaccatc

SEQ ID NO: 5722547 - DNA, 25 bp, Homo sapien
tttgaggaaacacttgccagaaact

SEQ ID NO: 5722548 - DNA, 25 bp, Homo sapien
accctatgctatttggaggtggaca

SEQ ID NO: 5722549 - DNA, 25 bp, Homo sapien
atttacccctctctaccctatgcta

SEQ ID NO: 5722550 - DNA, 25 bp, Homo sapien
ttgtcatgcctgtccctgaaatcag

SEQ ID NO: 5722551 - DNA, 25 bp, Homo sapien
gtgcacagtggcccccagcctcggc

SEQ ID NO: 5722552 - DNA, 25 bp, Homo sapien
tctggcatttggacacacatcacat

SEQ ID NO: 5722553 - DNA, 25 bp, Homo sapien
gacttggtgaatttacccctctcta

SEQ ID NO: 5722554 - DNA, 25 bp, Homo sapien
ccacatgggaccgcccacatagaac

SEQ ID NO: 5722555 - DNA, 25 bp, Homo sapien
tgtccctgaaatcagtcagcgcatt

SEQ ID NO: 5722556 - DNA, 25 bp, Homo sapien
ccgggtcattcctggggtgggaatc

SEQ ID NO: 5722557 - DNA, 25 bp, Homo sapien
tttacggttcaaggaactacatgat

SEQ ID NO: 5722558 - DNA, 25 bp, Homo sapien
gaggcttatgaggcccacatgaggg

SEQ ID NO: 5722559 - DNA, 25 bp, Homo sapien
gaacaccccaatgattgctggcctt

SEQ ID NO: 5722560 - DNA, 25 bp, Homo sapien
actccatccggctgcccctggagca

SEQ ID NO: 5722561 - DNA, 25 bp, Homo sapien
gtggacaagaacggaatttcaggcc

SEQ ID NO: 5722562 - DNA, 25 bp, Homo sapien
ggaacgcccacatgggaccgcccac

SEQ ID NO: 5722563 - DNA, 25 bp, Homo sapien
cccagcggcttcccaatacctgtaa

SEQ ID NO: 5722564 - DNA, 25 bp, Homo sapien
ctttatatacgaggacttggtgaat

SEQ ID NO: 5722565 - DNA, 25 bp, Homo sapien
ggggcactgagtcaaataatttagt

SEQ ID NO: 5722566 - DNA, 25 bp, Homo sapien
gacacacaggtgggcaccacagccc

SEQ ID NO: 5722567 - DNA, 25 bp, Homo sapien
cctgaagcaggccgtggcgcagctg

SEQ ID NO: 5722568 - DNA, 25 bp, Homo sapien
ccagcggctgcgggaaacacaactc

SEQ ID NO: 5722569 - DNA, 25 bp, Homo sapien
gagggacgtccgcgactacctggaa

SEQ ID NO: 5722570 - DNA, 25 bp, Homo sapien
gccttgggaaggccgcggagctggt

SEQ ID NO: 5722571 - DNA, 25 bp, Homo sapien
tccacgcaaaccagacctcaaaggg

SEQ ID NO: 5722572 - DNA, 25 bp, Homo sapien
ctccgggtcattcctggggtgggaa

SEQ ID NO: 5722573 - DNA, 25 bp, Homo sapien
tggcatttggacacacatcacatgt

SEQ ID NO: 5722574 - DNA, 25 bp, Homo sapien
cccaccaccctgctcctctggcctc

SEQ ID NO: 5722575 - DNA, 25 bp, Homo sapien
gagtgtgcacccccagtttccttcc

SEQ ID NO: 5722576 - DNA, 25 bp, Homo sapien
tcaaggaactacatgatgattttga

SEQ ID NO: 5722577 - DNA, 25 bp, Homo sapien
gtgggaatcggatcatccctgactc

SEQ ID NO: 5722578 - DNA, 25 bp, Homo sapien
ctggccaacaatgagactggcattg

SEQ ID NO: 5722579 - DNA, 25 bp, Homo sapien
ccagtgtgggggccgcgtgccactc

SEQ ID NO: 5722580 - DNA, 25 bp, Homo sapien
ttccctgtccacggtccccaggcct

SEQ ID NO: 5722581 - DNA, 25 bp, Homo sapien
ggtgtccaaggtgagcgggcagaca

SEQ ID NO: 5722582 - DNA, 25 bp, Homo sapien
tgtgccaggatgactgtctcatgcc

SEQ ID NO: 5722583 - DNA, 25 bp, Homo sapien
tttcaggccagggacagagaacacc

SEQ ID NO: 5722584 - DNA, 25 bp, Homo sapien
gcaggaagaaaggccaaggatatta

SEQ ID NO: 5722585 - DNA, 25 bp, Homo sapien
ttccttacaatcgtggggcacaagt

SEQ ID NO: 5722586 - DNA, 25 bp, Homo sapien
ttatccaccctccccactgggaact

SEQ ID NO: 5722587 - DNA, 25 bp, Homo sapien
tcttcacttccgggggcactgagtc

SEQ ID NO: 5722588 - DNA, 25 bp, Homo sapien
gttcaaggaactacatgatgatttt

SEQ ID NO: 5722589 - DNA, 25 bp, Homo sapien
ggcactgagtcaaataatttagtaa

SEQ ID NO: 5722590 - DNA, 25 bp, Homo sapien
accacacgcctcgtgaccatcatgc

SEQ ID NO: 5722591 - DNA, 25 bp, Homo sapien
cttcaaggccacgtggtgcttgcgc

SEQ ID NO: 5722592 - DNA, 25 bp, Homo sapien
gtgcacccccagtttccttccctgg

SEQ ID NO: 5722593 - DNA, 25 bp, Homo sapien
gaataacatttttaatgtgtggttt

SEQ ID NO: 5722594 - DNA, 25 bp, Homo sapien
tttcagtggaataacatttttaatg

SEQ ID NO: 5722595 - DNA, 25 bp, Homo sapien
aatcagggctgcgcacttccctgtc

SEQ ID NO: 5722596 - DNA, 25 bp, Homo sapien
cttcccaatacctgtaacttttcca

SEQ ID NO: 5722597 - DNA, 25 bp, Homo sapien
tgaaccaggaacgggtggcagctgg

SEQ ID NO: 5722598 - DNA, 25 bp, Homo sapien
gtgtttttatctggaagatagaatc

SEQ ID NO: 5722599 - DNA, 25 bp, Homo sapien
ttgctggccttgggaaggccgcgga

SEQ ID NO: 5722600 - DNA, 25 bp, Homo sapien
cacttccgggggcactgagtcaaat

SEQ ID NO: 5722601 - DNA, 25 bp, Homo sapien
tttgcataggagtcattttcagtgg

SEQ ID NO: 5722602 - DNA, 25 bp, Homo sapien
cgactcccctggagccagaagttat

SEQ ID NO: 5722603 - DNA, 25 bp, Homo sapien
gcagcggtcacctttgtcccggtgt

SEQ ID NO: 5722604 - DNA, 25 bp, Homo sapien
catgggaacgcccacatgggaccgc

SEQ ID NO: 5722605 - DNA, 25 bp, Homo sapien
cagcgcccaccgcccaccacccctc

SEQ ID NO: 5722606 - DNA, 25 bp, Homo sapien
gaatcggatcatccctgactcagct

SEQ ID NO: 5722607 - DNA, 25 bp, Homo sapien
attctgtggtgaaacatttccacgc

SEQ ID NO: 5722608 - DNA, 25 bp, Homo sapien
agaggaaagtttatatggactataa

SEQ ID NO: 5722609 - DNA, 25 bp, Homo sapien
gctcagcgtgggccgcagcaccacc

SEQ ID NO: 5722610 - DNA, 25 bp, Homo sapien
ggagctggtgacccagaactgcgag

SEQ ID NO: 5722611 - DNA, 25 bp, Homo sapien
tcaaggccacgtggtgcttgcgcag

SEQ ID NO: 5722612 - DNA, 25 bp, Homo sapien
tgttccgcccactggcaatcagggc

SEQ ID NO: 5722613 - DNA, 25 bp, Homo sapien
gtggcagggcacagggttgtccctc

SEQ ID NO: 5722614 - DNA, 25 bp, Homo sapien
cccgtattcagcaggaagaaaggcc

SEQ ID NO: 5722615 - DNA, 25 bp, Homo sapien
agtaatccattctgtggtgaaacat

SEQ ID NO: 5722616 - DNA, 25 bp, Homo sapien
ccacataggaccgcccacataggac

SEQ ID NO: 5722617 - DNA, 25 bp, Homo sapien
cgcggcagtccgcccgaccacacgc

SEQ ID NO: 5722618 - DNA, 25 bp, Homo sapien
cgtattcagcaggaagaaaggccaa

SEQ ID NO: 5722619 - DNA, 25 bp, Homo sapien
acttccttacaatcgtggggcacaa

SEQ ID NO: 5722620 - DNA, 25 bp, Homo sapien
tccaggcacccagcggcttcccaat

SEQ ID NO: 5722621 - DNA, 25 bp, Homo sapien
gtgccgagtgctgatggccagtgtg

SEQ ID NO: 5722622 - DNA, 25 bp, Homo sapien
gaatagccagtttccaggcacccag

SEQ ID NO: 5722623 - DNA, 25 bp, Homo sapien
acgccgcataggaccgcccacatgg

SEQ ID NO: 5722624 - DNA, 25 bp, Homo sapien
gggtggcagctgggctacctcccat

SEQ ID NO: 5722625 - DNA, 25 bp, Homo sapien
ccccagcctcggccaggcctgctct

SEQ ID NO: 5722626 - DNA, 25 bp, Homo sapien
aggaacgggtggcagctgggctacc

SEQ ID NO: 5722627 - DNA, 25 bp, Homo sapien
gccagcgagtgtgcacccccagttt

SEQ ID NO: 5722628 - DNA, 25 bp, Homo sapien
gtggtgcttgcgcagtgccgagtgc

SEQ ID NO: 5722629 - DNA, 25 bp, Homo sapien
cagagctcacagggcccaggacacc

SEQ ID NO: 5722630 - DNA, 25 bp, Homo sapien
acaagaacggaatttcaggccaggg

SEQ ID NO: 5722631 - DNA, 25 bp, Homo sapien
ccacatgagggacgtccgcgactac

SEQ ID NO: 5722632 - DNA, 25 bp, Homo sapien
ctcgccggagaggaaagtttatatg

SEQ ID NO: 5722633 - DNA, 25 bp, Homo sapien
tgcgcagtgccgagtgctgatggcc

SEQ ID NO: 5722634 - DNA, 25 bp, Homo sapien
gtgccactcggaccacggggaccag

SEQ ID NO: 5722635 - DNA, 25 bp, Homo sapien
ctatttggaggtggacaagaacgga

SEQ ID NO: 5722636 - DNA, 25 bp, Homo sapien
ttttagtccctttccaaagctgccc

SEQ ID NO: 5722637 - DNA, 25 bp, Homo sapien
gggccgaggtggacctcgtcgtgca

SEQ ID NO: 5722638 - DNA, 25 bp, Homo sapien
tggccttgggaaggccgcggagctg

SEQ ID NO: 5722639 - DNA, 25 bp, Homo sapien
accccaatgattgctggccttggga

SEQ ID NO: 5722640 - DNA, 25 bp, Homo sapien
gcagctccgggtcattcctggggtg

SEQ ID NO: 5722641 - DNA, 25 bp, Homo sapien
ccctgactcagcttataccttaatt

SEQ ID NO: 5722642 - DNA, 25 bp, Homo sapien
tcccaggattggcgcactttatata

SEQ ID NO: 5722643 - DNA, 25 bp, Homo sapien
ttggaggtggacaagaacggaattt

SEQ ID NO: 5722644 - DNA, 25 bp, Homo sapien
aggacttggtgaatttacccctctc

SEQ ID NO: 5722645 - DNA, 25 bp, Homo sapien
ttccgcccactggcaatcagggctg

SEQ ID NO: 5722646 - DNA, 25 bp, Homo sapien
cggcagtccgcccgaccacacgcct

SEQ ID NO: 5722647 - DNA, 25 bp, Homo sapien
ggcccaggacaccaacgccgcatag

SEQ ID NO: 5722648 - DNA, 25 bp, Homo sapien
attttcagtggaataacatttttaa

SEQ ID NO: 5722649 - DNA, 25 bp, Homo sapien
cgtccccagtgctgctgagctacgg

SEQ ID NO: 5722650 - DNA, 25 bp, Homo sapien
cttgccagaaactaaattaacgaat

SEQ ID NO: 5722651 - DNA, 25 bp, Homo sapien
aagcaggccgtggcgcagctggagg

SEQ ID NO: 5722652 - DNA, 25 bp, Homo sapien
cgcagtgccgagtgctgatggccag

SEQ ID NO: 5722653 - DNA, 25 bp, Homo sapien
cactcggaccacggggaccagccgt

SEQ ID NO: 5722654 - DNA, 25 bp, Homo sapien
cccacataggaccgcccacatggga

SEQ ID NO: 5722655 - DNA, 25 bp, Homo sapien
cccgagcctgaccctgttccgccca

SEQ ID NO: 5722656 - DNA, 25 bp, Homo sapien
acggtccccaggccttcctgtcttg

SEQ ID NO: 5722657 - DNA, 25 bp, Homo sapien
ggcacgcctgttgtgagtgcccttt

SEQ ID NO: 5722658 - DNA, 25 bp, Homo sapien
ccaggcctagcactggggccgcctt

SEQ ID NO: 5722659 - DNA, 25 bp, Homo sapien
gaagaacaagtggcagcggtcacct

SEQ ID NO: 5722660 - DNA, 25 bp, Homo sapien
gctgcccccaccaccctgctcctct

SEQ ID NO: 5722661 - DNA, 25 bp, Homo sapien
tatttgcataggagtcattttcagt

SEQ ID NO: 5722662 - DNA, 25 bp, Homo sapien
ttggacacacatcacatgtcgatat

SEQ ID NO: 5722663 - DNA, 25 bp, Homo sapien
ccctggagccagaagttatccaggc

SEQ ID NO: 5722664 - DNA, 25 bp, Homo sapien
ccaccgcccaccacccctcctgctt

SEQ ID NO: 5722665 - DNA, 25 bp, Homo sapien
ccttcctgtcttgtcccttttgatc

SEQ ID NO: 5722666 - DNA, 25 bp, Homo sapien
tccggggaccccggcttcaaggcca

SEQ ID NO: 5722667 - DNA, 25 bp, Homo sapien
caggtgggcaccacagcccagtgaa

SEQ ID NO: 5722668 - DNA, 25 bp, Homo sapien
atggccagtgtgggggccgcgtgcc

SEQ ID NO: 5722669 - DNA, 25 bp, Homo sapien
tcgtgaccatcatgctggccaacaa

SEQ ID NO: 5722670 - DNA, 25 bp, Homo sapien
cacatgggaacgcccacatgggacc

SEQ ID NO: 5722671 - DNA, 25 bp, Homo sapien
cttctgggaagcccgtggcagggca

SEQ ID NO: 5722672 - DNA, 25 bp, Homo sapien
gagaatccatctgaatagccagttt

SEQ ID NO: 5722673 - DNA, 25 bp, Homo sapien
gccgagtgctgatggccagtgtggg

SEQ ID NO: 5722674 - DNA, 25 bp, Homo sapien
tgttgtgagtgccctttcctggaag

SEQ ID NO: 5722675 - DNA, 25 bp, Homo sapien
ctcgtcgtgcaggacctgaagcagg

SEQ ID NO: 5722676 - DNA, 25 bp, Homo sapien
aagatagaatccaagtatttataac

SEQ ID NO: 5722677 - DNA, 25 bp, Homo sapien
ccggcttcaaggccacgtggtgctt

SEQ ID NO: 5722678 - DNA, 25 bp, Homo sapien
ctagcactggggccgccttccccac

SEQ ID NO: 5722679 - DNA, 25 bp, Homo sapien
ccttggggaagcagcgcgtggatgt

SEQ ID NO: 5722680 - DNA, 25 bp, Homo sapien
aactcgccggagaggaaagtttata

SEQ ID NO: 5722681 - DNA, 25 bp, Homo sapien
aggccgtggcgcagctggaggacca

SEQ ID NO: 5722682 - DNA, 25 bp, Homo sapien
aggacctgaagcaggccgtggcgca

SEQ ID NO: 5722683 - DNA, 25 bp, Homo sapien
gaagggggccaagccccatttcatt

SEQ ID NO: 5722684 - DNA, 25 bp, Homo sapien
gcagtccgcccgaccacacgcctcg

SEQ ID NO: 5722685 - DNA, 25 bp, Homo sapien
gcccagcggctgcgggaaacacaac

SEQ ID NO: 5722686 - DNA, 25 bp, Homo sapien
tgggaacgcccacatgggaccgccc

SEQ ID NO: 5722687 - DNA, 25 bp, Homo sapien
gggctgtgccaggatgactgtctca

SEQ ID NO: 5722688 - DNA, 25 bp, Homo sapien
tcaggccagggacagagaacacccc

SEQ ID NO: 5722689 - DNA, 25 bp, Homo sapien
tgatttttttgttttgatcatggcc

SEQ ID NO: 5722690 - DNA, 25 bp, Homo sapien
tggcgcagctggaggaccaggccta

SEQ ID NO: 5722691 - DNA, 25 bp, Homo sapien
acacaactcgccggagaggaaagtt

SEQ ID NO: 5722692 - DNA, 25 bp, Homo sapien
acggggaccagccgtccccagtgct

SEQ ID NO: 5722693 - DNA, 25 bp, Homo sapien
gaagctgaattcggtcagaagagaa

SEQ ID NO: 5722694 - DNA, 25 bp, Homo sapien
ccacatagaaccgtcctccagtggt

SEQ ID NO: 5722695 - DNA, 25 bp, Homo sapien
atcatggcctctacatgcacctttc

SEQ ID NO: 5722696 - DNA, 25 bp, Homo sapien
ccaggaacgcgctccggctcagcgt

SEQ ID NO: 5722697 - DNA, 25 bp, Homo sapien
acagggttgtccctccagttccctc

SEQ ID NO: 5722698 - DNA, 25 bp, Homo sapien
gggaccccggcttcaaggccacgtg

SEQ ID NO: 5722699 - DNA, 25 bp, Homo sapien
ggaccgcccacatgggaacgcccac

SEQ ID NO: 5722700 - DNA, 25 bp, Homo sapien
cttggtgaatttacccctctctacc

SEQ ID NO: 5722701 - DNA, 25 bp, Homo sapien
acatgcacctttccagagtggtctc

SEQ ID NO: 5722702 - DNA, 25 bp, Homo sapien
ggaccacggggaccagccgtcccca

SEQ ID NO: 5722703 - DNA, 25 bp, Homo sapien
aggaaagtttatatggactataatg

SEQ ID NO: 5722704 - DNA, 25 bp, Homo sapien
agctcgggaaagcctcgcgaagatg

SEQ ID NO: 5722705 - DNA, 25 bp, Homo sapien
gtcattcctggggtgggaatcggat

SEQ ID NO: 5722706 - DNA, 25 bp, Homo sapien
catttccacgcaaaccagacctcaa

SEQ ID NO: 5722707 - DNA, 25 bp, Homo sapien
ttttttgttttgatcatggcctcta

SEQ ID NO: 5722708 - DNA, 25 bp, Homo sapien
aactacatgatgattttgaggaaac

SEQ ID NO: 5722709 - DNA, 25 bp, Homo sapien
cctttgtcccggtgtccaaggtgag

SEQ ID NO: 5722710 - DNA, 25 bp, Homo sapien
gtgccagcgagtgtgcacccccagt

SEQ ID NO: 5722711 - DNA, 25 bp, Homo sapien
atagaaccgtcctccagtggtgaag

SEQ ID NO: 5722712 - DNA, 25 bp, Homo sapien
agtggaataacatttttaatgtgtg

SEQ ID NO: 5722713 - DNA, 25 bp, Homo sapien
gacctgaagcaggccgtggcgcagc

SEQ ID NO: 5722714 - DNA, 25 bp, Homo sapien
cagagaacaccccaatgattgctgg

SEQ ID NO: 5722715 - DNA, 25 bp, Homo sapien
gacgtccgcgactacctggaagaga

SEQ ID NO: 5722716 - DNA, 25 bp, Homo sapien
tgcttccccgagcctgaccctgttc

SEQ ID NO: 5722717 - DNA, 25 bp, Homo sapien
cgaggacttggtgaatttacccctc

SEQ ID NO: 5722718 - DNA, 25 bp, Homo sapien
ccatgaccaaggccatgtgggaagc

SEQ ID NO: 5722719 - DNA, 25 bp, Homo sapien
aagtatttataactcattgtcagcc

SEQ ID NO: 5722720 - DNA, 25 bp, Homo sapien
ggaagatagaatccaagtatttata

SEQ ID NO: 5722721 - DNA, 25 bp, Homo sapien
gattgctggccttgggaaggccgcg

SEQ ID NO: 5722722 - DNA, 25 bp, Homo sapien
tccccagtgctgctgagctacggtg

SEQ ID NO: 5722723 - DNA, 25 bp, Homo sapien
gcgagtgtgcacccccagtttcctt

SEQ ID NO: 5722724 - DNA, 25 bp, Homo sapien
acctgggcgtggacttccttacaat

SEQ ID NO: 5722725 - DNA, 25 bp, Homo sapien
gctggccttgggaaggccgcggagc

SEQ ID NO: 5722726 - DNA, 25 bp, Homo sapien
atggtcccaggattggcgcacttta

SEQ ID NO: 5722727 - DNA, 25 bp, Homo sapien
cctgttccgcccactggcaatcagg

SEQ ID NO: 5722728 - DNA, 25 bp, Homo sapien
acgcgctccggctcagcgtgggccg

SEQ ID NO: 5722729 - DNA, 25 bp, Homo sapien
gagcacctggtggaagaacaagtgg

SEQ ID NO: 5722730 - DNA, 25 bp, Homo sapien
agggctgcgcacttccctgtccacg

SEQ ID NO: 5722731 - DNA, 25 bp, Homo sapien
aatcttcacttccgggggcactgag

SEQ ID NO: 5722732 - DNA, 25 bp, Homo sapien
atatggactataatgcaacgactcc

SEQ ID NO: 5722733 - DNA, 25 bp, Homo sapien
cttttgatcattaactcagggtttc

SEQ ID NO: 5722734 - DNA, 25 bp, Homo sapien
gcagacagaggtggacgacatcctc

SEQ ID NO: 5722735 - DNA, 25 bp, Homo sapien
ggcttcccaatacctgtaacttttc

SEQ ID NO: 5722736 - DNA, 25 bp, Homo sapien
aaggccacgtggtgcttgcgcagtg

SEQ ID NO: 5722737 - DNA, 25 bp, Homo sapien
tgaagcggaaacacttagctttatc

SEQ ID NO: 5722738 - DNA, 25 bp, Homo sapien
tccagttccctcctgagggctgtgc

SEQ ID NO: 5722739 - DNA, 25 bp, Homo sapien
agcccgtattcagcaggaagaaagg

SEQ ID NO: 5722740 - DNA, 25 bp, Homo sapien
aaacacttagctttatccaccctcc

SEQ ID NO: 5722741 - DNA, 25 bp, Homo sapien
tcccaatacctgtaacttttccatc

SEQ ID NO: 5722742 - DNA, 25 bp, Homo sapien
accctgttccgcccactggcaatca

SEQ ID NO: 5722743 - DNA, 25 bp, Homo sapien
cacctttgtcccggtgtccaaggtg

SEQ ID NO: 5722744 - DNA, 25 bp, Homo sapien
gcccacatgggaccgcccacatggg

SEQ ID NO: 5722745 - DNA, 25 bp, Homo sapien
gaaccgcccacataggaccgcccac

SEQ ID NO: 5722746 - DNA, 25 bp, Homo sapien
gtgcagctccgggtcattcctgggg

SEQ ID NO: 5722747 - DNA, 25 bp, Homo sapien
agaggctggaagctgaattcggtca

SEQ ID NO: 5722748 - DNA, 25 bp, Homo sapien
ctgaattcggtcagaagagaatcca

SEQ ID NO: 5722749 - DNA, 25 bp, Homo sapien
cagctccaacctcgctgagttggtg

SEQ ID NO: 5722750 - DNA, 25 bp, Homo sapien
catgcctgtccctgaaatcagtcag

SEQ ID NO: 5722751 - DNA, 25 bp, Homo sapien
attcggtcagaagagaatccatctg

SEQ ID NO: 5722752 - DNA, 25 bp, Homo sapien
taatgcaacgactcccctggagcca

SEQ ID NO: 5722753 - DNA, 25 bp, Homo sapien
gctacggtgtccccttcgacgtggc

SEQ ID NO: 5722754 - DNA, 25 bp, Homo sapien
tgctcagcgcccaccgcccaccacc

SEQ ID NO: 5722755 - DNA, 25 bp, Homo sapien
ctcggaccacggggaccagccgtcc

SEQ ID NO: 5722756 - DNA, 25 bp, Homo sapien
gagtcaaataatttagtaatccatt

SEQ ID NO: 5722757 - DNA, 25 bp, Homo sapien
ggaaatcccagcagcccgtattcag

SEQ ID NO: 5722758 - DNA, 25 bp, Homo sapien
cccaccacccctcctgcttccccga

SEQ ID NO: 5722759 - DNA, 25 bp, Homo sapien
ttaatgtgtggttttacggttcaag

SEQ ID NO: 5722760 - DNA, 25 bp, Homo sapien
ggggaccagccgtccccagtgctgc

SEQ ID NO: 5722761 - DNA, 25 bp, Homo sapien
agaagttatccaggccatgaccaag

SEQ ID NO: 5722762 - DNA, 25 bp, Homo sapien
ctcctctggcctcagtgcacagtgg

SEQ ID NO: 5722763 - DNA, 25 bp, Homo sapien
ccgcccacataggaccgcccacata

SEQ ID NO: 5722764 - DNA, 25 bp, Homo sapien
acaccccaatgattgctggccttgg

SEQ ID NO: 5722765 - DNA, 25 bp, Homo sapien
gaagaaaggccaaggatattataaa

SEQ ID NO: 5722766 - DNA, 25 bp, Homo sapien
tcagaagagaatccatctgaatagc

SEQ ID NO: 5722767 - DNA, 25 bp, Homo sapien
tgatcattaactcagggtttcagct

SEQ ID NO: 5722768 - DNA, 25 bp, Homo sapien
gaaagtttatatggactataatgca

SEQ ID NO: 5722769 - DNA, 25 bp, Homo sapien
ggcattgtcatgcctgtccctgaaa

SEQ ID NO: 5722770 - DNA, 25 bp, Homo sapien
cgaataaaagatttcagtgcccgaa

SEQ ID NO: 5722771 - DNA, 25 bp, Homo sapien
aaatgctctggcatttggacacaca

SEQ ID NO: 5722772 - DNA, 25 bp, Homo sapien
cattaactcagggtttcagctccaa

SEQ ID NO: 5722773 - DNA, 25 bp, Homo sapien
cagtgccgagtgctgatggccagtg

SEQ ID NO: 5722774 - DNA, 25 bp, Homo sapien
atgcaacgactcccctggagccaga

SEQ ID NO: 5722775 - DNA, 25 bp, Homo sapien
gcaggccgtggcgcagctggaggac

SEQ ID NO: 5722776 - DNA, 25 bp, Homo sapien
tcccctggagccagaagttatccag

SEQ ID NO: 5722777 - DNA, 25 bp, Homo sapien
atgagggacgtccgcgactacctgg

SEQ ID NO: 5722778 - DNA, 25 bp, Homo sapien
aggaacgcgctccggctcagcgtgg

SEQ ID NO: 5722779 - DNA, 25 bp, Homo sapien
tttccttccctggaaccctgcagag

SEQ ID NO: 5722780 - DNA, 25 bp, Homo sapien
gtcctccagtggtgaagcggaaaca

SEQ ID NO: 5722781 - DNA, 25 bp, Homo sapien
agcctcggccaggcctgctctgctc

SEQ ID NO: 5722782 - DNA, 25 bp, Homo sapien
cgagtgctgatggccagtgtggggg

SEQ ID NO: 5722783 - DNA, 25 bp, Homo sapien
gtggcagctgggctacctcccatcc

SEQ ID NO: 5722784 - DNA, 25 bp, Homo sapien
cataggaccgcccacatgggaacgc

SEQ ID NO: 5722785 - DNA, 25 bp, Homo sapien
tgctcctctggcctcagtgcacagt

SEQ ID NO: 5722786 - DNA, 25 bp, Homo sapien
atagccagtttccaggcacccagcg

SEQ ID NO: 5722787 - DNA, 25 bp, Homo sapien
tataatgcaacgactcccctggagc

SEQ ID NO: 5722788 - DNA, 25 bp, Homo sapien
cttcctcggtggaacacgactccat

SEQ ID NO: 5722789 - DNA, 25 bp, Homo sapien
accgcccacataggaccgcccacat

SEQ ID NO: 5722790 - DNA, 25 bp, Homo sapien
atgggaccgcccacataggaccgcc

SEQ ID NO: 5722791 - DNA, 25 bp, Homo sapien
ggcgcactttatatacgaggacttg

SEQ ID NO: 5722792 - DNA, 25 bp, Homo sapien
tacctgtaacttttccatccgggga

SEQ ID NO: 5722793 - DNA, 25 bp, Homo sapien
catggcctctacatgcacctttcca

SEQ ID NO: 5722794 - DNA, 25 bp, Homo sapien
gctcacagggcccaggacaccaacg

SEQ ID NO: 5722795 - DNA, 25 bp, Homo sapien
ccaggcctgctctgctcagcgccca

SEQ ID NO: 5722796 - DNA, 25 bp, Homo sapien
tcagtggaataacatttttaatgtg

SEQ ID NO: 5722797 - DNA, 25 bp, Homo sapien
tacggttcaaggaactacatgatga

SEQ ID NO: 5722798 - DNA, 25 bp, Homo sapien
tccggctgcccctggagcacctggt

SEQ ID NO: 5722799 - DNA, 25 bp, Homo sapien
cctccagtggtgaagcggaaacact

SEQ ID NO: 5722800 - DNA, 25 bp, Homo sapien
aagctgcccccaccaccctgctcct

SEQ ID NO: 5722801 - DNA, 25 bp, Homo sapien
cacacgcctcgtgaccatcatgctg

SEQ ID NO: 5722802 - DNA, 25 bp, Homo sapien
ggccgcggagctggtgacccagaac

SEQ ID NO: 5722803 - DNA, 25 bp, Homo sapien
gtttatatggactataatgcaacga

SEQ ID NO: 5722804 - DNA, 25 bp, Homo sapien
gaccaggcctagcactggggccgcc

SEQ ID NO: 5722805 - DNA, 25 bp, Homo sapien
agcaccaccagggccgaggtggacc

SEQ ID NO: 5722806 - DNA, 25 bp, Homo sapien
acgggtggcagctgggctacctccc

SEQ ID NO: 5722807 - DNA, 25 bp, Homo sapien
ctacctcccatcctcgtgcacacgg

SEQ ID NO: 5722808 - DNA, 25 bp, Homo sapien
cgccttccccaccccgcttctggga

SEQ ID NO: 5722809 - DNA, 25 bp, Homo sapien
tcattttcagtggaataacattttt

SEQ ID NO: 5722810 - DNA, 25 bp, Homo sapien
cagtgctgctgagctacggtgtccc

SEQ ID NO: 5722811 - DNA, 25 bp, Homo sapien
acctcccatcctcgtgcacacggat

SEQ ID NO: 5722812 - DNA, 25 bp, Homo sapien
aactcagggtttcagctccaacctc

SEQ ID NO: 5722813 - DNA, 25 bp, Homo sapien
attcttttctcaaaatgctctggca

SEQ ID NO: 5722814 - DNA, 25 bp, Homo sapien
gaatccatctgaatagccagtttcc

SEQ ID NO: 5722815 - DNA, 25 bp, Homo sapien
gctgcccctggagcacctggtggaa

SEQ ID NO: 5722816 - DNA, 25 bp, Homo sapien
catagaaccgcccacataggaccgc

SEQ ID NO: 5722817 - DNA, 25 bp, Homo sapien
gcaacgactcccctggagccagaag

SEQ ID NO: 5722818 - DNA, 25 bp, Homo sapien
aagttatccaggccatgaccaaggc

SEQ ID NO: 5722819 - DNA, 25 bp, Homo sapien
tggcctctacatgcacctttccaga

SEQ ID NO: 5722820 - DNA, 25 bp, Homo sapien
gaacgcgctccggctcagcgtgggc

SEQ ID NO: 5722821 - DNA, 25 bp, Homo sapien
ggaagcctggggaaatcccagcagc

SEQ ID NO: 5722822 - DNA, 25 bp, Homo sapien
tccgggggcactgagtcaaataatt

SEQ ID NO: 5722823 - DNA, 25 bp, Homo sapien
ggccaacaatgagactggcattgtc

SEQ ID NO: 5722824 - DNA, 25 bp, Homo sapien
aggatgactgtctcatgccccctct

SEQ ID NO: 5722825 - DNA, 25 bp, Homo sapien
gtttcagctccaacctcgctgagtt

SEQ ID NO: 5722826 - DNA, 25 bp, Homo sapien
ggtggaagaacaagtggcagcggtc

SEQ ID NO: 5722827 - DNA, 25 bp, Homo sapien
ccaccccgcttctgggaagcccgtg

SEQ ID NO: 5722828 - DNA, 25 bp, Homo sapien
tggagtgccagcgagtgtgcacccc

SEQ ID NO: 5722829 - DNA, 25 bp, Homo sapien
gattggcgcactttatatacgagga

SEQ ID NO: 5722830 - DNA, 25 bp, Homo sapien
ttcagcaggaagaaaggccaaggat

SEQ ID NO: 5722831 - DNA, 25 bp, Homo sapien
gcggaaacacttagctttatccacc

SEQ ID NO: 5722832 - DNA, 25 bp, Homo sapien
gatattataaatgcagctcgggaaa

SEQ ID NO: 5722833 - DNA, 25 bp, Homo sapien
ttttgtcctggagtgccagcgagtg

SEQ ID NO: 5722834 - DNA, 25 bp, Homo sapien
aaatcccagcagcccgtattcagca

SEQ ID NO: 5722835 - DNA, 25 bp, Homo sapien
aggccaaggatattataaatgcagc

SEQ ID NO: 5722836 - DNA, 25 bp, Homo sapien
ccgtcctccagtggtgaagcggaaa

SEQ ID NO: 5722837 - DNA, 25 bp, Homo sapien
ctcagcgcccaccgcccaccacccc

SEQ ID NO: 5722838 - DNA, 25 bp, Homo sapien
ctcgggaaagcctcgcgaagatgat

SEQ ID NO: 5722839 - DNA, 25 bp, Homo sapien
ttatatacgaggacttggtgaattt

SEQ ID NO: 5722840 - DNA, 25 bp, Homo sapien
cacgcaaaccagacctcaaagggac

SEQ ID NO: 5722841 - DNA, 25 bp, Homo sapien
gctccggctcagcgtgggccgcagc

SEQ ID NO: 5722842 - DNA, 25 bp, Homo sapien
ttcgacgtggccaggaacgcgctcc

SEQ ID NO: 5722843 - DNA, 25 bp, Homo sapien
ctgagggctgtgccaggatgactgt

SEQ ID NO: 5722844 - DNA, 25 bp, Homo sapien
gcgtggacttccttacaatcgtggg

SEQ ID NO: 5722845 - DNA, 25 bp, Homo sapien
ctggggaaatcccagcagcccgtat

SEQ ID NO: 5722846 - DNA, 25 bp, Homo sapien
cgtcgtgcaggacctgaagcaggcc

SEQ ID NO: 5722847 - DNA, 25 bp, Homo sapien
tccctttccaaagctgcccccacca

SEQ ID NO: 5722848 - DNA, 25 bp, Homo sapien
cctgaaatcagtcagcgcattaaag

SEQ ID NO: 5722849 - DNA, 25 bp, Homo sapien
ccccggcttcaaggccacgtggtgc

SEQ ID NO: 5722850 - DNA, 25 bp, Homo sapien
cgactacctggaagagaggctggaa

SEQ ID NO: 5722851 - DNA, 25 bp, Homo sapien
tgattttgaggaaacacttgccaga

SEQ ID NO: 5722852 - DNA, 25 bp, Homo sapien
ccacccctcctgcttccccgagcct

SEQ ID NO: 5722853 - DNA, 25 bp, Homo sapien
ggctacctcccatcctcgtgcacac

SEQ ID NO: 5722854 - DNA, 25 bp, Homo sapien
atgaccaaggccatgtgggaagcct

SEQ ID NO: 5722855 - DNA, 25 bp, Homo sapien
cccccaccaccctgctcctctggcc

SEQ ID NO: 5722856 - DNA, 25 bp, Homo sapien
gggcacagggttgtccctccagttc

SEQ ID NO: 5722857 - DNA, 25 bp, Homo sapien
tggagcacctggtggaagaacaagt

SEQ ID NO: 5722858 - DNA, 25 bp, Homo sapien
aataaaagatttcagtgcccgaaaa

SEQ ID NO: 5722859 - DNA, 25 bp, Homo sapien
catttcattacttcctcggtggaac

SEQ ID NO: 5722860 - DNA, 25 bp, Homo sapien
cgggaaacacaactcgccggagagg

SEQ ID NO: 5722861 - DNA, 25 bp, Homo sapien
aggaagaaaggccaaggatattata

SEQ ID NO: 5722862 - DNA, 25 bp, Homo sapien
agggcccaggacaccaacgccgcat

SEQ ID NO: 5722863 - DNA, 25 bp, Homo sapien
ccacatgggaccgcccacatgggac

SEQ ID NO: 5722864 - DNA, 25 bp, Homo sapien
ttgtcccttttgatcattaactcag

SEQ ID NO: 5722865 - DNA, 25 bp, Homo sapien
tcctcgcggcagtccgcccgaccac

SEQ ID NO: 5722866 - DNA, 25 bp, Homo sapien
gcccacatgggaccgcccacatagg

SEQ ID NO: 5722867 - DNA, 25 bp, Homo sapien
gccgcataggaccgcccacatggga

SEQ ID NO: 5722868 - DNA, 25 bp, Homo sapien
aacaatgagactggcattgtcatgc

SEQ ID NO: 5722869 - DNA, 25 bp, Homo sapien
tgctgcacaggccttggggaagcag

SEQ ID NO: 5722870 - DNA, 25 bp, Homo sapien
gagcgggcagacagaggtggacgac

SEQ ID NO: 5722871 - DNA, 25 bp, Homo sapien
tggcaatcagggctgcgcacttccc

SEQ ID NO: 5722872 - DNA, 25 bp, Homo sapien
gtggacctcgtcgtgcaggacctga

SEQ ID NO: 5722873 - DNA, 25 bp, Homo sapien
gggaccgcccacataggaccgccca

SEQ ID NO: 5722874 - DNA, 25 bp, Homo sapien
ataactcattgtcagccaaatgcta

SEQ ID NO: 5722875 - DNA, 25 bp, Homo sapien
gggacgtccgcgactacctggaaga

SEQ ID NO: 5722876 - DNA, 25 bp, Homo sapien
gcaatcagggctgcgcacttccctg

SEQ ID NO: 5722877 - DNA, 25 bp, Homo sapien
cggctcagcgtgggccgcagcacca

SEQ ID NO: 5722878 - DNA, 25 bp, Homo sapien
cggatcatccctgactcagcttata

SEQ ID NO: 5722879 - DNA, 25 bp, Homo sapien
ctttttagtccctttccaaagctgc

SEQ ID NO: 5722880 - DNA, 25 bp, Homo sapien
aagcggaaacacttagctttatcca

SEQ ID NO: 5722881 - DNA, 25 bp, Homo sapien
accctgctcctctggcctcagtgca

SEQ ID NO: 5722882 - DNA, 25 bp, Homo sapien
aagcagcgcgtggatgtggaggacc

SEQ ID NO: 5722883 - DNA, 25 bp, Homo sapien
cccaggacaccaacgccgcatagga

SEQ ID NO: 5722884 - DNA, 25 bp, Homo sapien
tccggctcagcgtgggccgcagcac

SEQ ID NO: 5722885 - DNA, 25 bp, Homo sapien
aggcccacatgagggacgtccgcga

SEQ ID NO: 5722886 - DNA, 25 bp, Homo sapien
caccaccagggccgaggtggacctc

SEQ ID NO: 5722887 - DNA, 25 bp, Homo sapien
ggaggaccaggcctagcactggggc

SEQ ID NO: 5722888 - DNA, 25 bp, Homo sapien
tccaacctcgctgagttggtgcagc

SEQ ID NO: 5722889 - DNA, 25 bp, Homo sapien
aagccctgaaccaggaacgggtggc

SEQ ID NO: 5722890 - DNA, 25 bp, Homo sapien
ccattctgtggtgaaacatttccac

SEQ ID NO: 5722891 - DNA, 25 bp, Homo sapien
gcgcacttccctgtccacggtcccc

SEQ ID NO: 5722892 - DNA, 25 bp, Homo sapien
gaactgggcacgcctgttgtgagtg

SEQ ID NO: 5722893 - DNA, 25 bp, Homo sapien
gccccctctgcattttgtcctggag

SEQ ID NO: 5722894 - DNA, 25 bp, Homo sapien
caggccttcctgtcttgtccctttt

SEQ ID NO: 5722895 - DNA, 25 bp, Homo sapien
acacatcacatgtcgatatttgcat

SEQ ID NO: 5722896 - DNA, 25 bp, Homo sapien
ttggggaagcagcgcgtggatgtgg

SEQ ID NO: 5722897 - DNA, 25 bp, Homo sapien
agtgtgggggccgcgtgccactcgg

SEQ ID NO: 5722898 - DNA, 25 bp, Homo sapien
atccaccctccccactgggaactgg

SEQ ID NO: 5722899 - DNA, 25 bp, Homo sapien
gaccgcccacatgggaccgcccaca

SEQ ID NO: 5722900 - DNA, 25 bp, Homo sapien
ttataaatgcagctcgggaaagcct

SEQ ID NO: 5722901 - DNA, 25 bp, Homo sapien
accagccgtccccagtgctgctgag

SEQ ID NO: 5722902 - DNA, 25 bp, Homo sapien
caagtggcagcggtcacctttgtcc

SEQ ID NO: 5722903 - DNA, 25 bp, Homo sapien
ggcttcaaggccacgtggtgcttgc

SEQ ID NO: 5722904 - DNA, 25 bp, Homo sapien
gcttataccttaattttatttgcag

SEQ ID NO: 5722905 - DNA, 25 bp, Homo sapien
gggcagacagaggtggacgacatcc

SEQ ID NO: 5722906 - DNA, 25 bp, Homo sapien
cctgaaccaggaacgggtggcagct

SEQ ID NO: 5722907 - DNA, 25 bp, Homo sapien
gtccccttcgacgtggccaggaacg

SEQ ID NO: 5722908 - DNA, 25 bp, Homo sapien
ccagtttccaggcacccagcggctt

SEQ ID NO: 5722909 - DNA, 25 bp, Homo sapien
catgggaccgcccacatagaaccgc

SEQ ID NO: 5722910 - DNA, 25 bp, Homo sapien
gtcagcgcattaaagccctgaacca

SEQ ID NO: 5722911 - DNA, 25 bp, Homo sapien
ggtccccaggccttcctgtcttgtc

SEQ ID NO: 5722912 - DNA, 25 bp, Homo sapien
ggccaagccccatttcattacttcc

SEQ ID NO: 5722913 - DNA, 25 bp, Homo sapien
gaattcggtcagaagagaatccatc

SEQ ID NO: 5722914 - DNA, 25 bp, Homo sapien
gaacgggtggcagctgggctacctc

SEQ ID NO: 5722915 - DNA, 25 bp, Homo sapien
atccctgactcagcttataccttaa

SEQ ID NO: 5722916 - DNA, 25 bp, Homo sapien
ccgcccacatgggaccgcccacata

SEQ ID NO: 5722917 - DNA, 25 bp, Homo sapien
ctcggtggaacacgactccatccgg

SEQ ID NO: 5722918 - DNA, 25 bp, Homo sapien
ttataccttaattttatttgcagag

SEQ ID NO: 5722919 - DNA, 25 bp, Homo sapien
aagagaatccatctgaatagccagt

SEQ ID NO: 5722920 - DNA, 25 bp, Homo sapien
tctgctcagcgcccaccgcccacca

SEQ ID NO: 5722921 - DNA, 25 bp, Homo sapien
tggatgtggaggacctgggcgtgga

SEQ ID NO: 5722922 - DNA, 25 bp, Homo sapien
ccaagccccatttcattacttcctc

SEQ ID NO: 5722923 - DNA, 25 bp, Homo sapien
accttaattttatttgcagaggatt

SEQ ID NO: 5722924 - DNA, 25 bp, Homo sapien
cttgcgcagtgccgagtgctgatgg

SEQ ID NO: 5722925 - DNA, 25 bp, Homo sapien
ccaccctccccactgggaactgggc

SEQ ID NO: 5722926 - DNA, 25 bp, Homo sapien
catgtcgatatttgcataggagtca

SEQ ID NO: 5722927 - DNA, 25 bp, Homo sapien
tgcacaggccttggggaagcagcgc

SEQ ID NO: 5722928 - DNA, 25 bp, Homo sapien
cagcttataccttaattttatttgc

SEQ ID NO: 5722929 - DNA, 25 bp, Homo sapien
ggccatgaccaaggccatgtgggaa

SEQ ID NO: 5722930 - DNA, 25 bp, Homo sapien
ccgcccactggcaatcagggctgcg

SEQ ID NO: 5722931 - DNA, 25 bp, Homo sapien
gtctcttctcgggccctttttagtc

SEQ ID NO: 5722932 - DNA, 25 bp, Homo sapien
aaatcagtcagcgcattaaagccct

SEQ ID NO: 5722933 - DNA, 25 bp, Homo sapien
cctcgtgaccatcatgctggccaac

SEQ ID NO: 5722934 - DNA, 25 bp, Homo sapien
cgcccacatgggaacgcccacatgg

SEQ ID NO: 5722935 - DNA, 25 bp, Homo sapien
atcatgctggccaacaatgagactg

SEQ ID NO: 5722936 - DNA, 25 bp, Homo sapien
tcctgagggctgtgccaggatgact

SEQ ID NO: 5722937 - DNA, 25 bp, Homo sapien
aaccagacctcaaagggacacacag

SEQ ID NO: 5722938 - DNA, 25 bp, Homo sapien
caaatgctatcatgaacgtaggaaa

SEQ ID NO: 5722939 - DNA, 25 bp, Homo sapien
ctctctaccctatgctatttggagg

SEQ ID NO: 5722940 - DNA, 25 bp, Homo sapien
ggggaaacctcaagatataatcttc

SEQ ID NO: 5722941 - DNA, 25 bp, Homo sapien
atataatcttcacttccgggggcac

SEQ ID NO: 5722942 - DNA, 25 bp, Homo sapien
cacgcctgttgtgagtgccctttcc

SEQ ID NO: 5722943 - DNA, 25 bp, Homo sapien
cgtccgcgactacctggaagagagg

SEQ ID NO: 5722944 - DNA, 25 bp, Homo sapien
caccaccctgctcctctggcctcag

SEQ ID NO: 5722945 - DNA, 25 bp, Homo sapien
cccatcctcgtgcacacggatgctg

SEQ ID NO: 5722946 - DNA, 25 bp, Homo sapien
ggtgcttgcgcagtgccgagtgctg

SEQ ID NO: 5722947 - DNA, 25 bp, Homo sapien
cagtgaagggggccaagccccattt

SEQ ID NO: 5722948 - DNA, 25 bp, Homo sapien
ctcgtgcacacggatgctgcacagg

SEQ ID NO: 5722949 - DNA, 25 bp, Homo sapien
gtcaaataatttagtaatccattct

SEQ ID NO: 5722950 - DNA, 25 bp, Homo sapien
cagcgcattaaagccctgaaccagg

SEQ ID NO: 5722951 - DNA, 25 bp, Homo sapien
taatccattctgtggtgaaacattt

SEQ ID NO: 5722952 - DNA, 25 bp, Homo sapien
ggcttatgaggcccacatgagggac

SEQ ID NO: 5722953 - DNA, 25 bp, Homo sapien
cgcctgttgtgagtgccctttcctg

SEQ ID NO: 5722954 - DNA, 25 bp, Homo sapien
tggaaggtgtttttatctggaagat

SEQ ID NO: 5722955 - DNA, 25 bp, Homo sapien
gcacttccctgtccacggtccccag

SEQ ID NO: 5722956 - DNA, 25 bp, Homo sapien
gccgtccccagtgctgctgagctac

SEQ ID NO: 5722957 - DNA, 25 bp, Homo sapien
aaatgcagctcgggaaagcctcgcg

SEQ ID NO: 5722958 - DNA, 25 bp, Homo sapien
cacgactccatccggctgcccctgg

SEQ ID NO: 5722959 - DNA, 25 bp, Homo sapien
atatacgaggacttggtgaatttac

SEQ ID NO: 5722960 - DNA, 25 bp, Homo sapien
gtttttatctggaagatagaatcca

SEQ ID NO: 5722961 - DNA, 25 bp, Homo sapien
gaaacacttgccagaaactaaatta

SEQ ID NO: 5722962 - DNA, 25 bp, Homo sapien
tccctcctgagggctgtgccaggat

SEQ ID NO: 5722963 - DNA, 25 bp, Homo sapien
gagttggtgcagctccgggtcattc

SEQ ID NO: 5722964 - DNA, 25 bp, Homo sapien
gagactggcattgtcatgcctgtcc

SEQ ID NO: 5722965 - DNA, 25 bp, Homo sapien
agagaggctggaagctgaattcggt

SEQ ID NO: 5722966 - DNA, 25 bp, Homo sapien
tccatccggggaccccggcttcaag

SEQ ID NO: 5722967 - DNA, 25 bp, Homo sapien
acctcgtcgtgcaggacctgaagca

SEQ ID NO: 5722968 - DNA, 25 bp, Homo sapien
cttccccgagcctgaccctgttccg

SEQ ID NO: 5722969 - DNA, 25 bp, Homo sapien
ggtgacccagaactgcgaggcttat

SEQ ID NO: 5722970 - DNA, 25 bp, Homo sapien
gccgaggtggacctcgtcgtgcagg

SEQ ID NO: 5722971 - DNA, 25 bp, Homo sapien
ggggaaatcccagcagcccgtattc

SEQ ID NO: 5722972 - DNA, 25 bp, Homo sapien
gtggccaggaacgcgctccggctca

SEQ ID NO: 5722973 - DNA, 25 bp, Homo sapien
ctgcgaggcttatgaggcccacatg

SEQ ID NO: 5722974 - DNA, 25 bp, Homo sapien
ttacccctctctaccctatgctatt

SEQ ID NO: 5722975 - DNA, 25 bp, Homo sapien
acagggcccaggacaccaacgccgc

SEQ ID NO: 5722976 - DNA, 25 bp, Homo sapien
cccagtgctgctgagctacggtgtc

SEQ ID NO: 5722977 - DNA, 25 bp, Homo sapien
atttataactcattgtcagccaaat

SEQ ID NO: 5722978 - DNA, 25 bp, Homo sapien
ccttcgacgtggccaggaacgcgct

SEQ ID NO: 5722979 - DNA, 25 bp, Homo sapien
ggactataatgcaacgactcccctg

SEQ ID NO: 5722980 - DNA, 25 bp, Homo sapien
cacataggaccgcccacatgggaac

SEQ ID NO: 5722981 - DNA, 25 bp, Homo sapien
cccaggccttcctgtcttgtccctt

SEQ ID NO: 5722982 - DNA, 25 bp, Homo sapien
cctcggccaggcctgctctgctcag

SEQ ID NO: 5722983 - DNA, 25 bp, Homo sapien
ttcacttccgggggcactgagtcaa

SEQ ID NO: 5722984 - DNA, 25 bp, Homo sapien
gtcatgcctgtccctgaaatcagtc

SEQ ID NO: 5722985 - DNA, 25 bp, Homo sapien
aaaggccaaggatattataaatgca

SEQ ID NO: 5722986 - DNA, 25 bp, Homo sapien
cttccgggggcactgagtcaaataa

SEQ ID NO: 5722987 - DNA, 25 bp, Homo sapien
ccaatacctgtaacttttccatccg

SEQ ID NO: 5722988 - DNA, 25 bp, Homo sapien
acatagaaccgtcctccagtggtga

SEQ ID NO: 5722989 - DNA, 25 bp, Homo sapien
atctgaatagccagtttccaggcac

SEQ ID NO: 5722990 - DNA, 25 bp, Homo sapien
tgggcaccacagcccagtgaagggg

SEQ ID NO: 5722991 - DNA, 25 bp, Homo sapien
ggtgggcaccacagcccagtgaagg

SEQ ID NO: 5722992 - DNA, 25 bp, Homo sapien
aaggaactacatgatgattttgagg

SEQ ID NO: 5722993 - DNA, 25 bp, Homo sapien
tgtggaggacctgggcgtggacttc

SEQ ID NO: 5722994 - DNA, 25 bp, Homo sapien
cggttcaaggaactacatgatgatt

SEQ ID NO: 5722995 - DNA, 25 bp, Homo sapien
gtgagtgccctttcctggaaggtgt

SEQ ID NO: 5722996 - DNA, 25 bp, Homo sapien
cacacaggtgggcaccacagcccag

SEQ ID NO: 5722997 - DNA, 25 bp, Homo sapien
acctcgctgagttggtgcagctccg

SEQ ID NO: 5722998 - DNA, 25 bp, Homo sapien
gccaaggatattataaatgcagctc

SEQ ID NO: 5722999 - DNA, 25 bp, Homo sapien
ctttcctggaaggtgtttttatctg

SEQ ID NO: 5723000 - DNA, 25 bp, Homo sapien
tccctccagttccctcctgagggct

SEQ ID NO: 5723001 - DNA, 25 bp, Homo sapien
tagaaccgcccacataggaccgccc

SEQ ID NO: 5723002 - DNA, 25 bp, Homo sapien
cgccggagaggaaagtttatatgga

SEQ ID NO: 5723003 - DNA, 25 bp, Homo sapien
tttatttgcagaggattcttttctc

SEQ ID NO: 5723004 - DNA, 25 bp, Homo sapien
tacttcctcggtggaacacgactcc

SEQ ID NO: 5723005 - DNA, 25 bp, Homo sapien
gcccactggcaatcagggctgcgca

SEQ ID NO: 5723006 - DNA, 25 bp, Homo sapien
gtgaagggggccaagccccatttca

SEQ ID NO: 5723007 - DNA, 25 bp, Homo sapien
tccatccggctgcccctggagcacc

SEQ ID NO: 5723008 - DNA, 25 bp, Homo sapien
tgcataggagtcattttcagtggaa

SEQ ID NO: 5723009 - DNA, 25 bp, Homo sapien
atgggaccgcccacatagaaccgtc

SEQ ID NO: 5723010 - DNA, 25 bp, Homo sapien
gttggtgcagctccgggtcattcct

SEQ ID NO: 5723011 - DNA, 25 bp, Homo sapien
cctccagttccctcctgagggctgt

SEQ ID NO: 5723012 - DNA, 25 bp, Homo sapien
tgccagaaactaaattaacgaataa

SEQ ID NO: 5723013 - DNA, 25 bp, Homo sapien
acgcccacatgggaccgcccacata

SEQ ID NO: 5723014 - DNA, 25 bp, Homo sapien
tagaatccaagtatttataactcat

SEQ ID NO: 5723015 - DNA, 25 bp, Homo sapien
tggaaccctgcagagctcacagggc

SEQ ID NO: 5723016 - DNA, 25 bp, Homo sapien
aagcctggggaaatcccagcagccc

SEQ ID NO: 5723017 - DNA, 25 bp, Homo sapien
cccacatagaaccgcccacatagga

SEQ ID NO: 5723018 - DNA, 25 bp, Homo sapien
gtcacctttgtcccggtgtccaagg

SEQ ID NO: 5723019 - DNA, 25 bp, Homo sapien
ctcattgtcagccaaatgctatcat

SEQ ID NO: 5723020 - DNA, 25 bp, Homo sapien
ggccgcgtgccactcggaccacggg

SEQ ID NO: 5723021 - DNA, 25 bp, Homo sapien
cacaggccttggggaagcagcgcgt

SEQ ID NO: 5723022 - DNA, 25 bp, Homo sapien
aataatttagtaatccattctgtgg

SEQ ID NO: 5723023 - DNA, 25 bp, Homo sapien
cagcagcccgtattcagcaggaaga

SEQ ID NO: 5723024 - DNA, 25 bp, Homo sapien
ttgttttgatcatggcctctacatg

SEQ ID NO: 5723025 - DNA, 25 bp, Homo sapien
ggaaacacttagctttatccaccct

SEQ ID NO: 5723026 - DNA, 25 bp, Homo sapien
acctggtggaagaacaagtggcagc

SEQ ID NO: 5723027 - DNA, 25 bp, Homo sapien
cgtggcgcagctggaggaccaggcc

SEQ ID NO: 5723028 - DNA, 25 bp, Homo sapien
attttatttgcagaggattcttttc

SEQ ID NO: 5723029 - DNA, 25 bp, Homo sapien
atgccccctctgcattttgtcctgg

SEQ ID NO: 5723030 - DNA, 25 bp, Homo sapien
aggccagggacagagaacaccccaa

SEQ ID NO: 5723031 - DNA, 25 bp, Homo sapien
agtttccttccctggaaccctgcag

SEQ ID NO: 5723032 - DNA, 25 bp, Homo sapien
acctttccagagtggtctcttctcg

SEQ ID NO: 5723033 - DNA, 25 bp, Homo sapien
tggtgaaacatttccacgcaaacca

SEQ ID NO: 5723034 - DNA, 25 bp, Homo sapien
cttatgaggcccacatgagggacgt

SEQ ID NO: 5723035 - DNA, 25 bp, Homo sapien
cattttgtcctggagtgccagcgag

SEQ ID NO: 5723036 - DNA, 25 bp, Homo sapien
caggccatgaccaaggccatgtggg

SEQ ID NO: 5723037 - DNA, 25 bp, Homo sapien
gtgtgcacccccagtttccttccct

SEQ ID NO: 5723038 - DNA, 25 bp, Homo sapien
atgattgctggccttgggaaggccg

SEQ ID NO: 5723039 - DNA, 25 bp, Homo sapien
atgcagctcgggaaagcctcgcgaa

SEQ ID NO: 5723040 - DNA, 25 bp, Homo sapien
acccagaactgcgaggcttatgagg

SEQ ID NO: 5723041 - DNA, 25 bp, Homo sapien
agcgcgtggatgtggaggacctggg

SEQ ID NO: 5723042 - DNA, 25 bp, Homo sapien
ttaactcagggtttcagctccaacc

SEQ ID NO: 5723043 - DNA, 25 bp, Homo sapien
aggtggacgacatcctcgcggcagt

SEQ ID NO: 5723044 - DNA, 25 bp, Homo sapien
agctgaattcggtcagaagagaatc

SEQ ID NO: 5723045 - DNA, 25 bp, Homo sapien
agagtggtctcttctcgggcccttt

SEQ ID NO: 5723046 - DNA, 25 bp, Homo sapien
tgggctacctcccatcctcgtgcac

SEQ ID NO: 5723047 - DNA, 25 bp, Homo sapien
aatgctatcatgaacgtaggaaact

SEQ ID NO: 5723048 - DNA, 25 bp, Homo sapien
cggctgcccctggagcacctggtgg

SEQ ID NO: 5723049 - DNA, 25 bp, Homo sapien
gactcagcttataccttaattttat

SEQ ID NO: 5723050 - DNA, 25 bp, Homo sapien
ctgactcagcttataccttaatttt

SEQ ID NO: 5723051 - DNA, 25 bp, Homo sapien
gcaggacctgaagcaggccgtggcg

SEQ ID NO: 5723052 - DNA, 25 bp, Homo sapien
aaagcctcgcgaagatgataggggg

SEQ ID NO: 5723053 - DNA, 25 bp, Homo sapien
gggttgtccctccagttccctcctg

SEQ ID NO: 5723054 - DNA, 25 bp, Homo sapien
aatttcaggccagggacagagaaca

SEQ ID NO: 5723055 - DNA, 25 bp, Homo sapien
cagtggtgaagcggaaacacttagc

SEQ ID NO: 5723056 - DNA, 25 bp, Homo sapien
gccactcggaccacggggaccagcc

SEQ ID NO: 5723057 - DNA, 25 bp, Homo sapien
tggcctcagtgcacagtggccccca

SEQ ID NO: 5723058 - DNA, 25 bp, Homo sapien
ggaccagccgtccccagtgctgctg

SEQ ID NO: 5723059 - DNA, 25 bp, Homo sapien
cgcactttatatacgaggacttggt

SEQ ID NO: 5723060 - DNA, 25 bp, Homo sapien
caaggtgagcgggcagacagaggtg

SEQ ID NO: 5723061 - DNA, 25 bp, Homo sapien
gctgggctacctcccatcctcgtgc

SEQ ID NO: 5723062 - DNA, 25 bp, Homo sapien
tgcattttgtcctggagtgccagcg

SEQ ID NO: 5723063 - DNA, 25 bp, Homo sapien
ttgtcctggagtgccagcgagtgtg

SEQ ID NO: 5723064 - DNA, 25 bp, Homo sapien
aacaagtggcagcggtcacctttgt

SEQ ID NO: 5723065 - DNA, 25 bp, Homo sapien
ctgtccacggtccccaggccttcct

SEQ ID NO: 5723066 - DNA, 25 bp, Homo sapien
ctgaatagccagtttccaggcaccc

SEQ ID NO: 5723067 - DNA, 25 bp, Homo sapien
tccccgagcctgaccctgttccgcc

SEQ ID NO: 5723068 - DNA, 25 bp, Homo sapien
cacttgccagaaactaaattaacga

SEQ ID NO: 5723069 - DNA, 25 bp, Homo sapien
ttcctggggtgggaatcggatcatc

SEQ ID NO: 5723070 - DNA, 25 bp, Homo sapien
ggaaagcctcgcgaagatgataggg

SEQ ID NO: 5723071 - DNA, 25 bp, Homo sapien
acccctctctaccctatgctatttg

SEQ ID NO: 5723072 - DNA, 25 bp, Homo sapien
gttttacggttcaaggaactacatg

SEQ ID NO: 5723073 - DNA, 25 bp, Homo sapien
tgggggccgcgtgccactcggacca

SEQ ID NO: 5723074 - DNA, 25 bp, Homo sapien
aggtgtttttatctggaagatagaa

SEQ ID NO: 5723075 - DNA, 25 bp, Homo sapien
aaggccatgtgggaagcctggggaa

SEQ ID NO: 5723076 - DNA, 25 bp, Homo sapien
agcactggggccgccttccccaccc

SEQ ID NO: 5723077 - DNA, 25 bp, Homo sapien
agcgtgggccgcagcaccaccaggg

SEQ ID NO: 5723078 - DNA, 25 bp, Homo sapien
acatgatgattttgaggaaacactt

SEQ ID NO: 5723079 - DNA, 25 bp, Homo sapien
ggccagtgtgggggccgcgtgccac

SEQ ID NO: 5723080 - DNA, 25 bp, Homo sapien
ttcagctccaacctcgctgagttgg

SEQ ID NO: 5723081 - DNA, 25 bp, Homo sapien
gatatttgcataggagtcattttca

SEQ ID NO: 5723082 - DNA, 25 bp, Homo sapien
cccatttcattacttcctcggtgga

SEQ ID NO: 5723083 - DNA, 25 bp, Homo sapien
aggatattataaatgcagctcggga

SEQ ID NO: 5723084 - DNA, 25 bp, Homo sapien
cggctgcgggaaacacaactcgccg

SEQ ID NO: 5723085 - DNA, 25 bp, Homo sapien
aggaccgcccacatgggaccgccca

SEQ ID NO: 5723086 - DNA, 25 bp, Homo sapien
tggaagaacaagtggcagcggtcac

SEQ ID NO: 5723087 - DNA, 25 bp, Homo sapien
cacggatgctgcacaggccttgggg

SEQ ID NO: 5723088 - DNA, 25 bp, Homo sapien
atcattaactcagggtttcagctcc

SEQ ID NO: 5723089 - DNA, 25 bp, Homo sapien
tgacccagaactgcgaggcttatga

SEQ ID NO: 5723090 - DNA, 25 bp, Homo sapien
gtgcaggacctgaagcaggccgtgg

SEQ ID NO: 5723091 - DNA, 25 bp, Homo sapien
atgctctggcatttggacacacatc

SEQ ID NO: 5723092 - DNA, 25 bp, Homo sapien
gccaaatgctatcatgaacgtagga

SEQ ID NO: 5723093 - DNA, 25 bp, Homo sapien
aggctggaagctgaattcggtcaga

SEQ ID NO: 5723094 - DNA, 25 bp, Homo sapien
gcgaggcttatgaggcccacatgag

SEQ ID NO: 5723095 - DNA, 25 bp, Homo sapien
tcatgccccctctgcattttgtcct

SEQ ID NO: 5723096 - DNA, 25 bp, Homo sapien
gtggaacacgactccatccggctgc

SEQ ID NO: 5723097 - DNA, 25 bp, Homo sapien
actataatgcaacgactcccctgga

SEQ ID NO: 5723098 - DNA, 25 bp, Homo sapien
tgcagaggattcttttctcaaaatg

SEQ ID NO: 5723099 - DNA, 25 bp, Homo sapien
ggaccgcccacatagaaccgcccac

SEQ ID NO: 5723100 - DNA, 25 bp, Homo sapien
cacatagaaccgcccacataggacc

SEQ ID NO: 5723101 - DNA, 25 bp, Homo sapien
tgcccctggagcacctggtggaaga

SEQ ID NO: 5723102 - DNA, 25 bp, Homo sapien
cctgcttccccgagcctgaccctgt

SEQ ID NO: 5723103 - DNA, 25 bp, Homo sapien
cagcgagtgtgcacccccagtttcc

SEQ ID NO: 5723104 - DNA, 25 bp, Homo sapien
tgtcccggtgtccaaggtgagcggg

SEQ ID NO: 5723105 - DNA, 25 bp, Homo sapien
accgcccacatagaaccgcccacat

SEQ ID NO: 5723106 - DNA, 25 bp, Homo sapien
ctcctgcttccccgagcctgaccct

SEQ ID NO: 5723107 - DNA, 25 bp, Homo sapien
cattgtcatgcctgtccctgaaatc

SEQ ID NO: 5723108 - DNA, 25 bp, Homo sapien
ctctaccctatgctatttggaggtg

SEQ ID NO: 5723109 - DNA, 25 bp, Homo sapien
gatgattttgaggaaacacttgcca

SEQ ID NO: 5723110 - DNA, 25 bp, Homo sapien
cttgggaaggccgcggagctggtga

SEQ ID NO: 5723111 - DNA, 25 bp, Homo sapien
accaacgccgcataggaccgcccac

SEQ ID NO: 5723112 - DNA, 25 bp, Homo sapien
tgggaaggccgcggagctggtgacc

SEQ ID NO: 5723113 - DNA, 25 bp, Homo sapien
gggcgtggacttccttacaatcgtg

SEQ ID NO: 5723114 - DNA, 25 bp, Homo sapien
ctggtgacccagaactgcgaggctt

SEQ ID NO: 5723115 - DNA, 25 bp, Homo sapien
gcagctggaggaccaggcctagcac

SEQ ID NO: 5723116 - DNA, 25 bp, Homo sapien
tcgatatttgcataggagtcatttt

SEQ ID NO: 5723117 - DNA, 25 bp, Homo sapien
gactggcattgtcatgcctgtccct

SEQ ID NO: 5723118 - DNA, 25 bp, Homo sapien
ttttctcaaaatgctctggcatttg

SEQ ID NO: 5723119 - DNA, 25 bp, Homo sapien
ccatgtgggaagcctggggaaatcc

SEQ ID NO: 5723120 - DNA, 25 bp, Homo sapien
ctggaggaccaggcctagcactggg

SEQ ID NO: 5723121 - DNA, 25 bp, Homo sapien
aggcctagcactggggccgccttcc

SEQ ID NO: 5723122 - DNA, 25 bp, Homo sapien
cggtgtccccttcgacgtggccagg

SEQ ID NO: 5723123 - DNA, 25 bp, Homo sapien
gatgctgcacaggccttggggaagc

SEQ ID NO: 5723124 - DNA, 25 bp, Homo sapien
acacacatcacatgtcgatatttgc

SEQ ID NO: 5723125 - DNA, 25 bp, Homo sapien
ctcagtgcacagtggcccccagcct

SEQ ID NO: 5723126 - DNA, 25 bp, Homo sapien
ggacctgggcgtggacttccttaca

SEQ ID NO: 5723127 - DNA, 25 bp, Homo sapien
aatcgtggggcacaagttttatggt

SEQ ID NO: 5723128 - DNA, 25 bp, Homo sapien
gcacctttccagagtggtctcttct

SEQ ID NO: 5723129 - DNA, 25 bp, Homo sapien
ctgggaactgggcacgcctgttgtg

SEQ ID NO: 5723130 - DNA, 25 bp, Homo sapien
gaatccaagtatttataactcattg

SEQ ID NO: 5723131 - DNA, 25 bp, Homo sapien
gatgactgtctcatgccccctctgc

SEQ ID NO: 5723132 - DNA, 25 bp, Homo sapien
agaacaagtggcagcggtcaccttt

SEQ ID NO: 5723133 - DNA, 25 bp, Homo sapien
agtccgcccgaccacacgcctcgtg

SEQ ID NO: 5723134 - DNA, 25 bp, Homo sapien
catgaacgtaggaaacttgattttt

SEQ ID NO: 5723135 - DNA, 25 bp, Homo sapien
ataatcttcacttccgggggcactg

SEQ ID NO: 5723136 - DNA, 25 bp, Homo sapien
ggaacacgactccatccggctgccc

SEQ ID NO: 5723137 - DNA, 25 bp, Homo sapien
cagctgggctacctcccatcctcgt

SEQ ID NO: 5723138 - DNA, 25 bp, Homo sapien
aacgaataaaagatttcagtgcccg

SEQ ID NO: 5723139 - DNA, 25 bp, Homo sapien
cgacgtggccaggaacgcgctccgg

SEQ ID NO: 5723140 - DNA, 25 bp, Homo sapien
atccattctgtggtgaaacatttcc

SEQ ID NO: 5723141 - DNA, 25 bp, Homo sapien
tccctgaaatcagtcagcgcattaa

SEQ ID NO: 5723142 - DNA, 25 bp, Homo sapien
taaaagatttcagtgcccgaaaaaa

SEQ ID NO: 5723143 - DNA, 25 bp, Homo sapien
tggaagagaggctggaagctgaatt

SEQ ID NO: 5723144 - DNA, 25 bp, Homo sapien
ttatatggactataatgcaacgact

SEQ ID NO: 5723145 - DNA, 25 bp, Homo sapien
gaccatcatgctggccaacaatgag

SEQ ID NO: 5723146 - DNA, 25 bp, Homo sapien
cacccagcggcttcccaatacctgt

SEQ ID NO: 5723147 - DNA, 25 bp, Homo sapien
ggggccgcgtgccactcggaccacg

SEQ ID NO: 5723148 - DNA, 25 bp, Homo sapien
cttaattttatttgcagaggattct

SEQ ID NO: 5723149 - DNA, 25 bp, Homo sapien
caaggatattataaatgcagctcgg

SEQ ID NO: 5723150 - DNA, 25 bp, Homo sapien
acaactcgccggagaggaaagttta

SEQ ID NO: 5723151 - DNA, 25 bp, Homo sapien
acgtggccaggaacgcgctccggct

SEQ ID NO: 5723152 - DNA, 25 bp, Homo sapien
accgcccaccacccctcctgcttcc

SEQ ID NO: 5723153 - DNA, 25 bp, Homo sapien
taggggggaaacctcaagatataat

SEQ ID NO: 5723154 - DNA, 25 bp, Homo sapien
cattcctggggtgggaatcggatca

SEQ ID NO: 5723155 - DNA, 25 bp, Homo sapien
cacatgtcgatatttgcataggagt

SEQ ID NO: 5723156 - DNA, 25 bp, Homo sapien
ctcaaagggacacacaggtgggcac

SEQ ID NO: 5723157 - DNA, 25 bp, Homo sapien
ggctgcgcacttccctgtccacggt

SEQ ID NO: 5723158 - DNA, 25 bp, Homo sapien
taatttagtaatccattctgtggtg

SEQ ID NO: 5723159 - DNA, 25 bp, Homo sapien
ctcccatcctcgtgcacacggatgc

SEQ ID NO: 5723160 - DNA, 25 bp, Homo sapien
tccgcgactacctggaagagaggct

SEQ ID NO: 5723161 - DNA, 25 bp, Homo sapien
cctctgcattttgtcctggagtgcc

SEQ ID NO: 5723162 - DNA, 25 bp, Homo sapien
actacctggaagagaggctggaagc

SEQ ID NO: 5723163 - DNA, 25 bp, Homo sapien
caccacccctcctgcttccccgagc

SEQ ID NO: 5723164 - DNA, 25 bp, Homo sapien
cagccgtccccagtgctgctgagct

SEQ ID NO: 5723165 - DNA, 25 bp, Homo sapien
tgaggaaacacttgccagaaactaa

SEQ ID NO: 5723166 - DNA, 25 bp, Homo sapien
caggacaccaacgccgcataggacc

SEQ ID NO: 5723167 - DNA, 25 bp, Homo sapien
caacctcgctgagttggtgcagctc

SEQ ID NO: 5723168 - DNA, 25 bp, Homo sapien
gggaactgggcacgcctgttgtgag

SEQ ID NO: 5723169 - DNA, 25 bp, Homo sapien
aggaccgcccacataggaccgccca

SEQ ID NO: 5723170 - DNA, 25 bp, Homo sapien
cgagcctgaccctgttccgcccact

SEQ ID NO: 5723171 - DNA, 25 bp, Homo sapien
ggaactacatgatgattttgaggaa

SEQ ID NO: 5723172 - DNA, 25 bp, Homo sapien
ctggcattgtcatgcctgtccctga

SEQ ID NO: 5723173 - DNA, 25 bp, Homo sapien
cgtggatgtggaggacctgggcgtg

SEQ ID NO: 5723174 - DNA, 25 bp, Homo sapien
ggccaggaacgcgctccggctcagc

SEQ ID NO: 5723175 - DNA, 25 bp, Homo sapien
ttcctggaaggtgtttttatctgga

SEQ ID NO: 5723176 - DNA, 25 bp, Homo sapien
ccagaactgcgaggcttatgaggcc

SEQ ID NO: 5723177 - DNA, 25 bp, Homo sapien
cgcccaccacccctcctgcttcccc

SEQ ID NO: 5723178 - DNA, 25 bp, Homo sapien
gcacctggtggaagaacaagtggca

SEQ ID NO: 5723179 - DNA, 25 bp, Homo sapien
tgtctcatgccccctctgcattttg

SEQ ID NO: 5723180 - DNA, 25 bp, Homo sapien
gaggattcttttctcaaaatgctct

SEQ ID NO: 5723181 - DNA, 25 bp, Homo sapien
cccagcagcccgtattcagcaggaa

SEQ ID NO: 5723182 - DNA, 25 bp, Homo sapien
gcacccccagtttccttccctggaa

SEQ ID NO: 5723183 - DNA, 25 bp, Homo sapien
cacacggatgctgcacaggccttgg

SEQ ID NO: 5723184 - DNA, 25 bp, Homo sapien
gagaacaccccaatgattgctggcc

SEQ ID NO: 5723185 - DNA, 25 bp, Homo sapien
ttagtaatccattctgtggtgaaac

SEQ ID NO: 5723186 - DNA, 25 bp, Homo sapien
ctcagggtttcagctccaacctcgc

SEQ ID NO: 5723187 - DNA, 25 bp, Homo sapien
gaaggtgtttttatctggaagatag

SEQ ID NO: 5723188 - DNA, 25 bp, Homo sapien
tttcattacttcctcggtggaacac

SEQ ID NO: 5723189 - DNA, 25 bp, Homo sapien
tcagggctgcgcacttccctgtcca

SEQ ID NO: 5723190 - DNA, 25 bp, Homo sapien
ccgcgtgccactcggaccacgggga

SEQ ID NO: 5723191 - DNA, 25 bp, Homo sapien
acgtggtgcttgcgcagtgccgagt

SEQ ID NO: 5723192 - DNA, 25 bp, Homo sapien
ggaatttcaggccagggacagagaa

SEQ ID NO: 5723193 - DNA, 25 bp, Homo sapien
ataaatgcagctcgggaaagcctcg

SEQ ID NO: 5723194 - DNA, 25 bp, Homo sapien
gggaatcggatcatccctgactcag

SEQ ID NO: 5723195 - DNA, 25 bp, Homo sapien
ggtggtgctgcggcccacgctgagc

SEQ ID NO: 5723196 - DNA, 25 bp, Homo sapien
atgcggcgttggtgtcctgggccct

SEQ ID NO: 5723197 - DNA, 25 bp, Homo sapien
cacccgttcctggttcagggcttta

SEQ ID NO: 5723198 - DNA, 25 bp, Homo sapien
tccaaatagcatagggtagagaggg

SEQ ID NO: 5723199 - DNA, 25 bp, Homo sapien
gacaaccctgtgccctgccacgggc

SEQ ID NO: 5723200 - DNA, 25 bp, Homo sapien
agttacaggtattgggaagccgctg

SEQ ID NO: 5723201 - DNA, 25 bp, Homo sapien
tgactcctatgcaaatatcgacatg

SEQ ID NO: 5723202 - DNA, 25 bp, Homo sapien
atgccagtctcattgttggccagca

SEQ ID NO: 5723203 - DNA, 25 bp, Homo sapien
gctaggcctggtcctccagctgcgc

SEQ ID NO: 5723204 - DNA, 25 bp, Homo sapien
gcgaggatgtcgtccacctctgtct

SEQ ID NO: 5723205 - DNA, 25 bp, Homo sapien
gctgcggcccacgctgagccggagc

SEQ ID NO: 5723206 - DNA, 25 bp, Homo sapien
ccctggcctgaaattccgttcttgt

SEQ ID NO: 5723207 - DNA, 25 bp, Homo sapien
tataaatacttggattctatcttcc

SEQ ID NO: 5723208 - DNA, 25 bp, Homo sapien
ctggccatcagcactcggcactgcg

SEQ ID NO: 5723209 - DNA, 25 bp, Homo sapien
ttcctctccggcgagttgtgtttcc

SEQ ID NO: 5723210 - DNA, 25 bp, Homo sapien
ggcgctgagcagagcaggcctggcc

SEQ ID NO: 5723211 - DNA, 25 bp, Homo sapien
attgtaaggaagtccacgcccaggt

SEQ ID NO: 5723212 - DNA, 25 bp, Homo sapien
ggtcaggctcggggaagcaggaggg

SEQ ID NO: 5723213 - DNA, 25 bp, Homo sapien
gattctcttctgaccgaattcagct

SEQ ID NO: 5723214 - DNA, 25 bp, Homo sapien
tgaaccgtaaaaccacacattaaaa

SEQ ID NO: 5723215 - DNA, 25 bp, Homo sapien
cccagtggggagggtggataaagct

SEQ ID NO: 5723216 - DNA, 25 bp, Homo sapien
cgtcgaaggggacaccgtagctcag

SEQ ID NO: 5723217 - DNA, 25 bp, Homo sapien
ttgactcagtgcccccggaagtgaa

SEQ ID NO: 5723218 - DNA, 25 bp, Homo sapien
atgacaatgccagtctcattgttgg

SEQ ID NO: 5723219 - DNA, 25 bp, Homo sapien
ctatgcaaatatcgacatgtgatgt

SEQ ID NO: 5723220 - DNA, 25 bp, Homo sapien
gagcagggtggtgggggcagctttg

SEQ ID NO: 5723221 - DNA, 25 bp, Homo sapien
agacaggaaggcctggggaccgtgg

SEQ ID NO: 5723222 - DNA, 25 bp, Homo sapien
tcctatgcaaatatcgacatgtgat

SEQ ID NO: 5723223 - DNA, 25 bp, Homo sapien
cccagtgctaggcctggtcctccag

SEQ ID NO: 5723224 - DNA, 25 bp, Homo sapien
gtagtcgcggacgtccctcatgtgg

SEQ ID NO: 5723225 - DNA, 25 bp, Homo sapien
cgcggccttcccaaggccagcaatc

SEQ ID NO: 5723226 - DNA, 25 bp, Homo sapien
atgtgggcgttcccatgtgggcggt

SEQ ID NO: 5723227 - DNA, 25 bp, Homo sapien
cctgcttcaggtcctgcacgacgag

SEQ ID NO: 5723228 - DNA, 25 bp, Homo sapien
ggcctggtcctccagctgcgccacg

SEQ ID NO: 5723229 - DNA, 25 bp, Homo sapien
gcgagttgtgtttcccgcagccgct

SEQ ID NO: 5723230 - DNA, 25 bp, Homo sapien
atgtgggcggtcctatgtgggcggt

SEQ ID NO: 5723231 - DNA, 25 bp, Homo sapien
aagcaccacgtggccttgaagccgg

SEQ ID NO: 5723232 - DNA, 25 bp, Homo sapien
attgggaagccgctgggtgcctgga

SEQ ID NO: 5723233 - DNA, 25 bp, Homo sapien
taatttagtttctggcaagtgtttc

SEQ ID NO: 5723234 - DNA, 25 bp, Homo sapien
ggtcctccacatccacgcgctgctt

SEQ ID NO: 5723235 - DNA, 25 bp, Homo sapien
accaggtgctccaggggcagccgga

SEQ ID NO: 5723236 - DNA, 25 bp, Homo sapien
ggctgacaatgagttataaatactt

SEQ ID NO: 5723237 - DNA, 25 bp, Homo sapien
tttcttcctgctgaatacgggctgc

SEQ ID NO: 5723238 - DNA, 25 bp, Homo sapien
tgggaccataaaacttgtgccccac

SEQ ID NO: 5723239 - DNA, 25 bp, Homo sapien
ctgagttaatgatcaaaagggacaa

SEQ ID NO: 5723240 - DNA, 25 bp, Homo sapien
gagggaactggagggacaaccctgt

SEQ ID NO: 5723241 - DNA, 25 bp, Homo sapien
aggcttcccacatggccttggtcat

SEQ ID NO: 5723242 - DNA, 25 bp, Homo sapien
ccggagcgcgttcctggccacgtcg

SEQ ID NO: 5723243 - DNA, 25 bp, Homo sapien
gggccctgtgagctctgcagggttc

SEQ ID NO: 5723244 - DNA, 25 bp, Homo sapien
gggatgatccgattcccaccccagg

SEQ ID NO: 5723245 - DNA, 25 bp, Homo sapien
cttctgaccgaattcagcttccagc

SEQ ID NO: 5723246 - DNA, 25 bp, Homo sapien
ctcttctgaccgaattcagcttcca

SEQ ID NO: 5723247 - DNA, 25 bp, Homo sapien
ggcctgcttcaggtcctgcacgacg

SEQ ID NO: 5723248 - DNA, 25 bp, Homo sapien
gctccaggggagtcgttgcattata

SEQ ID NO: 5723249 - DNA, 25 bp, Homo sapien
gagtcagggatgatccgattcccac

SEQ ID NO: 5723250 - DNA, 25 bp, Homo sapien
cttcaggtcctgcacgacgaggtcc

SEQ ID NO: 5723251 - DNA, 25 bp, Homo sapien
gtcctccagctgcgccacggcctgc

SEQ ID NO: 5723252 - DNA, 25 bp, Homo sapien
caacaggcgtgcccagttcccagtg

SEQ ID NO: 5723253 - DNA, 25 bp, Homo sapien
taagctgagtcagggatgatccgat

SEQ ID NO: 5723254 - DNA, 25 bp, Homo sapien
ataagcctcgcagttctgggtcacc

SEQ ID NO: 5723255 - DNA, 25 bp, Homo sapien
gcgtgcccagttcccagtggggagg

SEQ ID NO: 5723256 - DNA, 25 bp, Homo sapien
tgaaattccgttcttgtccacctcc

SEQ ID NO: 5723257 - DNA, 25 bp, Homo sapien
ttccccaaggcctgtgcagcatccg

SEQ ID NO: 5723258 - DNA, 25 bp, Homo sapien
gccttgaagccggggtccccggatg

SEQ ID NO: 5723259 - DNA, 25 bp, Homo sapien
acaccgggacaaaggtgaccgctgc

SEQ ID NO: 5723260 - DNA, 25 bp, Homo sapien
gcaggaggggtggtgggcggtgggc

SEQ ID NO: 5723261 - DNA, 25 bp, Homo sapien
ttcgcgaggctttcccgagctgcat

SEQ ID NO: 5723262 - DNA, 25 bp, Homo sapien
gcccacgctgagccggagcgcgttc

SEQ ID NO: 5723263 - DNA, 25 bp, Homo sapien
tcggccctggtggtgctgcggccca

SEQ ID NO: 5723264 - DNA, 25 bp, Homo sapien
aaatgttattccactgaaaatgact

SEQ ID NO: 5723265 - DNA, 25 bp, Homo sapien
agtgcgcagccctgattgccagtgg

SEQ ID NO: 5723266 - DNA, 25 bp, Homo sapien
agttcccagtggggagggtggataa

SEQ ID NO: 5723267 - DNA, 25 bp, Homo sapien
cgttggtgtcctgggccctgtgagc

SEQ ID NO: 5723268 - DNA, 25 bp, Homo sapien
cttccaggaaagggcactcacaaca

SEQ ID NO: 5723269 - DNA, 25 bp, Homo sapien
gaggccatgatcaaaacaaaaaaat

SEQ ID NO: 5723270 - DNA, 25 bp, Homo sapien
gcactcggcactgcgcaagcaccac

SEQ ID NO: 5723271 - DNA, 25 bp, Homo sapien
tcctgggccctgtgagctctgcagg

SEQ ID NO: 5723272 - DNA, 25 bp, Homo sapien
gccgaggctgggggccactgtgcac

SEQ ID NO: 5723273 - DNA, 25 bp, Homo sapien
gcatttggctgacaatgagttataa

SEQ ID NO: 5723274 - DNA, 25 bp, Homo sapien
cccgtggtccgagtggcacgcggcc

SEQ ID NO: 5723275 - DNA, 25 bp, Homo sapien
ttcccaccccaggaatgacccggag

SEQ ID NO: 5723276 - DNA, 25 bp, Homo sapien
gtgggcggtcctatgtgggcggttc

SEQ ID NO: 5723277 - DNA, 25 bp, Homo sapien
ttttttcgggcactgaaatctttta

SEQ ID NO: 5723278 - DNA, 25 bp, Homo sapien
atcctgggaccataaaacttgtgcc

SEQ ID NO: 5723279 - DNA, 25 bp, Homo sapien
ccacttgttcttccaccaggtgctc

SEQ ID NO: 5723280 - DNA, 25 bp, Homo sapien
accacacattaaaaatgttattcca

SEQ ID NO: 5723281 - DNA, 25 bp, Homo sapien
gatcaaaacaaaaaaatcaagtttc

SEQ ID NO: 5723282 - DNA, 25 bp, Homo sapien
ctggaaactggctattcagatggat

SEQ ID NO: 5723283 - DNA, 25 bp, Homo sapien
catgtgggcctcataagcctcgcag

SEQ ID NO: 5723284 - DNA, 25 bp, Homo sapien
ttatagtccatataaactttcctct

SEQ ID NO: 5723285 - DNA, 25 bp, Homo sapien
gtgcccagttcccagtggggagggt

SEQ ID NO: 5723286 - DNA, 25 bp, Homo sapien
gaggggtaaattcaccaagtcctcg

SEQ ID NO: 5723287 - DNA, 25 bp, Homo sapien
cacacattaaaaatgttattccact

SEQ ID NO: 5723288 - DNA, 25 bp, Homo sapien
agctgccacccgttcctggttcagg

SEQ ID NO: 5723289 - DNA, 25 bp, Homo sapien
caggcctggccgaggctgggggcca

SEQ ID NO: 5723290 - DNA, 25 bp, Homo sapien
atcattggggtgttctctgtccctg

SEQ ID NO: 5723291 - DNA, 25 bp, Homo sapien
aatgaaatggggcttggcccccttc

SEQ ID NO: 5723292 - DNA, 25 bp, Homo sapien
tggctccaggggagtcgttgcatta

SEQ ID NO: 5723293 - DNA, 25 bp, Homo sapien
atgtttcaccacagaatggattact

SEQ ID NO: 5723294 - DNA, 25 bp, Homo sapien
tattcagatggattctcttctgacc

SEQ ID NO: 5723295 - DNA, 25 bp, Homo sapien
caaaatgcagagggggcatgagaca

SEQ ID NO: 5723296 - DNA, 25 bp, Homo sapien
tcctacgttcatgatagcatttggc

SEQ ID NO: 5723297 - DNA, 25 bp, Homo sapien
agagcaggcctggccgaggctgggg

SEQ ID NO: 5723298 - DNA, 25 bp, Homo sapien
gccagcatgatggtcacgaggcgtg

SEQ ID NO: 5723299 - DNA, 25 bp, Homo sapien
aggacaaaatgcagagggggcatga

SEQ ID NO: 5723300 - DNA, 25 bp, Homo sapien
taatatccttggcctttcttcctgc

SEQ ID NO: 5723301 - DNA, 25 bp, Homo sapien
ctgaggccagaggagcagggtggtg

SEQ ID NO: 5723302 - DNA, 25 bp, Homo sapien
ggcctcataagcctcgcagttctgg

SEQ ID NO: 5723303 - DNA, 25 bp, Homo sapien
ctccaggggcagccggatggagtcg

SEQ ID NO: 5723304 - DNA, 25 bp, Homo sapien
acaggtattgggaagccgctgggtg

SEQ ID NO: 5723305 - DNA, 25 bp, Homo sapien
ccactctggaaaggtgcatgtagag

SEQ ID NO: 5723306 - DNA, 25 bp, Homo sapien
ccagctgccacccgttcctggttca

SEQ ID NO: 5723307 - DNA, 25 bp, Homo sapien
gccctgtgagctctgcagggttcca

SEQ ID NO: 5723308 - DNA, 25 bp, Homo sapien
gcagccggatggagtcgtgttccac

SEQ ID NO: 5723309 - DNA, 25 bp, Homo sapien
gcggcgttggtgtcctgggccctgt

SEQ ID NO: 5723310 - DNA, 25 bp, Homo sapien
ctggggaccgtggacagggaagtgc

SEQ ID NO: 5723311 - DNA, 25 bp, Homo sapien
agcctctcttccaggtagtcgcgga

SEQ ID NO: 5723312 - DNA, 25 bp, Homo sapien
cagggaagtgcgcagccctgattgc

SEQ ID NO: 5723313 - DNA, 25 bp, Homo sapien
cttgaagccggggtccccggatgga

SEQ ID NO: 5723314 - DNA, 25 bp, Homo sapien
gggaggtagcccagctgccacccgt

SEQ ID NO: 5723315 - DNA, 25 bp, Homo sapien
gctgcgccacggcctgcttcaggtc

SEQ ID NO: 5723316 - DNA, 25 bp, Homo sapien
gaggatgtcgtccacctctgtctgc

SEQ ID NO: 5723317 - DNA, 25 bp, Homo sapien
agtcctcgtatataaagtgcgccaa

SEQ ID NO: 5723318 - DNA, 25 bp, Homo sapien
ttgttggccagcatgatggtcacga

SEQ ID NO: 5723319 - DNA, 25 bp, Homo sapien
gacaccgtagctcagcagcactggg

SEQ ID NO: 5723320 - DNA, 25 bp, Homo sapien
cctgcacgacgaggtccacctcggc

SEQ ID NO: 5723321 - DNA, 25 bp, Homo sapien
tggtttgcgtggaaatgtttcacca

SEQ ID NO: 5723322 - DNA, 25 bp, Homo sapien
gatggaaaagttacaggtattggga

SEQ ID NO: 5723323 - DNA, 25 bp, Homo sapien
tccttgaaccgtaaaaccacacatt

SEQ ID NO: 5723324 - DNA, 25 bp, Homo sapien
tgggcgctgagcagagcaggcctgg

SEQ ID NO: 5723325 - DNA, 25 bp, Homo sapien
agggaaggaaactgggggtgcacac

SEQ ID NO: 5723326 - DNA, 25 bp, Homo sapien
tgggtcaccagctccgcggccttcc

SEQ ID NO: 5723327 - DNA, 25 bp, Homo sapien
tggtcatggcctggataacttctgg

SEQ ID NO: 5723328 - DNA, 25 bp, Homo sapien
tcttcgcgaggctttcccgagctgc

SEQ ID NO: 5723329 - DNA, 25 bp, Homo sapien
cgccacggcctgcttcaggtcctgc

SEQ ID NO: 5723330 - DNA, 25 bp, Homo sapien
tcaaaagggacaagacaggaaggcc

SEQ ID NO: 5723331 - DNA, 25 bp, Homo sapien
cttctggctccaggggagtcgttgc

SEQ ID NO: 5723332 - DNA, 25 bp, Homo sapien
gtgatgtgtgtccaaatgccagagc

SEQ ID NO: 5723333 - DNA, 25 bp, Homo sapien
agtccacgcccaggtcctccacatc

SEQ ID NO: 5723334 - DNA, 25 bp, Homo sapien
agggctttaatgcgctgactgattt

SEQ ID NO: 5723335 - DNA, 25 bp, Homo sapien
tccatataaactttcctctccggcg

SEQ ID NO: 5723336 - DNA, 25 bp, Homo sapien
cctcggccctggtggtgctgcggcc

SEQ ID NO: 5723337 - DNA, 25 bp, Homo sapien
cgaattcagcttccagcctctcttc

SEQ ID NO: 5723338 - DNA, 25 bp, Homo sapien
cagcactcggcactgcgcaagcacc

SEQ ID NO: 5723339 - DNA, 25 bp, Homo sapien
ttccagcctctcttccaggtagtcg

SEQ ID NO: 5723340 - DNA, 25 bp, Homo sapien
tgccagtgggcggaacagggtcagg

SEQ ID NO: 5723341 - DNA, 25 bp, Homo sapien
ttacaggtattgggaagccgctggg

SEQ ID NO: 5723342 - DNA, 25 bp, Homo sapien
agagcattttgagaaaagaatcctc

SEQ ID NO: 5723343 - DNA, 25 bp, Homo sapien
ttcctggccacgtcgaaggggacac

SEQ ID NO: 5723344 - DNA, 25 bp, Homo sapien
tgtaaggaagtccacgcccaggtcc

SEQ ID NO: 5723345 - DNA, 25 bp, Homo sapien
cagcgaggttggagctgaaaccctg

SEQ ID NO: 5723346 - DNA, 25 bp, Homo sapien
tccccgtggtccgagtggcacgcgg

SEQ ID NO: 5723347 - DNA, 25 bp, Homo sapien
tcttccaggtagtcgcggacgtccc

SEQ ID NO: 5723348 - DNA, 25 bp, Homo sapien
acttgtgccccacgattgtaaggaa

SEQ ID NO: 5723349 - DNA, 25 bp, Homo sapien
cggagctgcaccaactcagcgaggt

SEQ ID NO: 5723350 - DNA, 25 bp, Homo sapien
acatccacgcgctgcttccccaagg

SEQ ID NO: 5723351 - DNA, 25 bp, Homo sapien
cacatggccttggtcatggcctgga

SEQ ID NO: 5723352 - DNA, 25 bp, Homo sapien
cggccttcccaaggccagcaatcat

SEQ ID NO: 5723353 - DNA, 25 bp, Homo sapien
gaccgctgccacttgttcttccacc

SEQ ID NO: 5723354 - DNA, 25 bp, Homo sapien
ttttgagaaaagaatcctctgcaaa

SEQ ID NO: 5723355 - DNA, 25 bp, Homo sapien
ctctgcaaataaaattaaggtataa

SEQ ID NO: 5723356 - DNA, 25 bp, Homo sapien
ggcactgcgcaagcaccacgtggcc

SEQ ID NO: 5723357 - DNA, 25 bp, Homo sapien
ttcccagtggggagggtggataaag

SEQ ID NO: 5723358 - DNA, 25 bp, Homo sapien
gtgggcggtcccatgtgggcgttcc

SEQ ID NO: 5723359 - DNA, 25 bp, Homo sapien
aagggacaagacaggaaggcctggg

SEQ ID NO: 5723360 - DNA, 25 bp, Homo sapien
aagctaagtgtttccgcttcaccac

SEQ ID NO: 5723361 - DNA, 25 bp, Homo sapien
ctggcactccaggacaaaatgcaga

SEQ ID NO: 5723362 - DNA, 25 bp, Homo sapien
atgacccggagctgcaccaactcag

SEQ ID NO: 5723363 - DNA, 25 bp, Homo sapien
gtcacgaggcgtgtggtcgggcgga

SEQ ID NO: 5723364 - DNA, 25 bp, Homo sapien
tgaaaatgactcctatgcaaatatc

SEQ ID NO: 5723365 - DNA, 25 bp, Homo sapien
ttaatgcgctgactgatttcaggga

SEQ ID NO: 5723366 - DNA, 25 bp, Homo sapien
atcaagtttcctacgttcatgatag

SEQ ID NO: 5723367 - DNA, 25 bp, Homo sapien
ggaagcaggaggggtggtgggcggt

SEQ ID NO: 5723368 - DNA, 25 bp, Homo sapien
tgagccggagcgcgttcctggccac

SEQ ID NO: 5723369 - DNA, 25 bp, Homo sapien
agcgcgttcctggccacgtcgaagg

SEQ ID NO: 5723370 - DNA, 25 bp, Homo sapien
ggaagtaatgaaatggggcttggcc

SEQ ID NO: 5723371 - DNA, 25 bp, Homo sapien
tgccgcgaggatgtcgtccacctct

SEQ ID NO: 5723372 - DNA, 25 bp, Homo sapien
aaaatcatcatgtagttccttgaac

SEQ ID NO: 5723373 - DNA, 25 bp, Homo sapien
catataaactttcctctccggcgag

SEQ ID NO: 5723374 - DNA, 25 bp, Homo sapien
ggaaggaaactgggggtgcacactc

SEQ ID NO: 5723375 - DNA, 25 bp, Homo sapien
gcggttctatgtgggcggtcccatg

SEQ ID NO: 5723376 - DNA, 25 bp, Homo sapien
gggaactggagggacaaccctgtgc

SEQ ID NO: 5723377 - DNA, 25 bp, Homo sapien
ctgcgcaagcaccacgtggccttga

SEQ ID NO: 5723378 - DNA, 25 bp, Homo sapien
tctggctccaggggagtcgttgcat

SEQ ID NO: 5723379 - DNA, 25 bp, Homo sapien
tggacagggaagtgcgcagccctga

SEQ ID NO: 5723380 - DNA, 25 bp, Homo sapien
ccatgtgggcggtcctatgcggcgt

SEQ ID NO: 5723381 - DNA, 25 bp, Homo sapien
atgtgggcggttctatgtgggcggt

SEQ ID NO: 5723382 - DNA, 25 bp, Homo sapien
cagataaaaacaccttccaggaaag

SEQ ID NO: 5723383 - DNA, 25 bp, Homo sapien
gatggtcacgaggcgtgtggtcggg

SEQ ID NO: 5723384 - DNA, 25 bp, Homo sapien
gctgagccggagcgcgttcctggcc

SEQ ID NO: 5723385 - DNA, 25 bp, Homo sapien
atccacgcgctgcttccccaaggcc

SEQ ID NO: 5723386 - DNA, 25 bp, Homo sapien
ggtgtcctgggccctgtgagctctg

SEQ ID NO: 5723387 - DNA, 25 bp, Homo sapien
gcggtcccatgtgggcgttcccatg

SEQ ID NO: 5723388 - DNA, 25 bp, Homo sapien
agggacaggcatgacaatgccagtc

SEQ ID NO: 5723389 - DNA, 25 bp, Homo sapien
ttactaaattatttgactcagtgcc

SEQ ID NO: 5723390 - DNA, 25 bp, Homo sapien
gagctgcaccaactcagcgaggttg

SEQ ID NO: 5723391 - DNA, 25 bp, Homo sapien
gtggggagggtggataaagctaagt

SEQ ID NO: 5723392 - DNA, 25 bp, Homo sapien
acaggaaggcctggggaccgtggac

SEQ ID NO: 5723393 - DNA, 25 bp, Homo sapien
ggcggccccagtgctaggcctggtc

SEQ ID NO: 5723394 - DNA, 25 bp, Homo sapien
ttcagcttccagcctctcttccagg

SEQ ID NO: 5723395 - DNA, 25 bp, Homo sapien
cactcacaacaggcgtgcccagttc

SEQ ID NO: 5723396 - DNA, 25 bp, Homo sapien
catcttcgcgaggctttcccgagct

SEQ ID NO: 5723397 - DNA, 25 bp, Homo sapien
ccaggtagtcgcggacgtccctcat

SEQ ID NO: 5723398 - DNA, 25 bp, Homo sapien
atgatagcatttggctgacaatgag

SEQ ID NO: 5723399 - DNA, 25 bp, Homo sapien
gaggatgggaggtagcccagctgcc

SEQ ID NO: 5723400 - DNA, 25 bp, Homo sapien
tcccaaggccagcaatcattggggt

SEQ ID NO: 5723401 - DNA, 25 bp, Homo sapien
actgaaaatgactcctatgcaaata

SEQ ID NO: 5723402 - DNA, 25 bp, Homo sapien
ttgagaaaagaatcctctgcaaata

SEQ ID NO: 5723403 - DNA, 25 bp, Homo sapien
acgcgctgcttccccaaggcctgtg

SEQ ID NO: 5723404 - DNA, 25 bp, Homo sapien
tgccctgccacgggcttcccagaag

SEQ ID NO: 5723405 - DNA, 25 bp, Homo sapien
tatatcttgaggtttcccccctatc

SEQ ID NO: 5723406 - DNA, 25 bp, Homo sapien
tgcattatagtccatataaactttc

SEQ ID NO: 5723407 - DNA, 25 bp, Homo sapien
acgaggatgggaggtagcccagctg

SEQ ID NO: 5723408 - DNA, 25 bp, Homo sapien
acggctggtccccgtggtccgagtg

SEQ ID NO: 5723409 - DNA, 25 bp, Homo sapien
cactgaggccagaggagcagggtgg

SEQ ID NO: 5723410 - DNA, 25 bp, Homo sapien
gttctgggtcaccagctccgcggcc

SEQ ID NO: 5723411 - DNA, 25 bp, Homo sapien
acagaatggattactaaattatttg

SEQ ID NO: 5723412 - DNA, 25 bp, Homo sapien
atcttccagataaaaacaccttcca

SEQ ID NO: 5723413 - DNA, 25 bp, Homo sapien
ggggtgttctctgtccctggcctga

SEQ ID NO: 5723414 - DNA, 25 bp, Homo sapien
cccaccccaggaatgacccggagct

SEQ ID NO: 5723415 - DNA, 25 bp, Homo sapien
ataacttctggctccaggggagtcg

SEQ ID NO: 5723416 - DNA, 25 bp, Homo sapien
cccccacactggccatcagcactcg

SEQ ID NO: 5723417 - DNA, 25 bp, Homo sapien
aatcatcatgtagttccttgaaccg

SEQ ID NO: 5723418 - DNA, 25 bp, Homo sapien
taaattatttgactcagtgcccccg

SEQ ID NO: 5723419 - DNA, 25 bp, Homo sapien
tgccacttgttcttccaccaggtgc

SEQ ID NO: 5723420 - DNA, 25 bp, Homo sapien
tgtggtgcccacctgtgtgtccctt

SEQ ID NO: 5723421 - DNA, 25 bp, Homo sapien
gttaatttagtttctggcaagtgtt

SEQ ID NO: 5723422 - DNA, 25 bp, Homo sapien
ctttaatgcgctgactgatttcagg

SEQ ID NO: 5723423 - DNA, 25 bp, Homo sapien
tgcatttataatatccttggccttt

SEQ ID NO: 5723424 - DNA, 25 bp, Homo sapien
cttggattctatcttccagataaaa

SEQ ID NO: 5723425 - DNA, 25 bp, Homo sapien
tcgttgcattatagtccatataaac

SEQ ID NO: 5723426 - DNA, 25 bp, Homo sapien
gtgcctggaaactggctattcagat

SEQ ID NO: 5723427 - DNA, 25 bp, Homo sapien
cgagaagagaccactctggaaaggt

SEQ ID NO: 5723428 - DNA, 25 bp, Homo sapien
aagagaccactctggaaaggtgcat

SEQ ID NO: 5723429 - DNA, 25 bp, Homo sapien
gtgccccacgattgtaaggaagtcc

SEQ ID NO: 5723430 - DNA, 25 bp, Homo sapien
acttgttcttccaccaggtgctcca

SEQ ID NO: 5723431 - DNA, 25 bp, Homo sapien
tatgtgggcggtcccatgtgggcgt

SEQ ID NO: 5723432 - DNA, 25 bp, Homo sapien
agtccatataaactttcctctccgg

SEQ ID NO: 5723433 - DNA, 25 bp, Homo sapien
ctgagcagagcaggcctggccgagg

SEQ ID NO: 5723434 - DNA, 25 bp, Homo sapien
ggcggtcctatgtgggcggtcctat

SEQ ID NO: 5723435 - DNA, 25 bp, Homo sapien
ggcggtcccatgtgggcggtcctat

SEQ ID NO: 5723436 - DNA, 25 bp, Homo sapien
ggacggctggtccccgtggtccgag

SEQ ID NO: 5723437 - DNA, 25 bp, Homo sapien
ctatcttccagataaaaacaccttc

SEQ ID NO: 5723438 - DNA, 25 bp, Homo sapien
accctgtgccctgccacgggcttcc

SEQ ID NO: 5723439 - DNA, 25 bp, Homo sapien
ctcaccttggacaccgggacaaagg

SEQ ID NO: 5723440 - DNA, 25 bp, Homo sapien
actgggggtgcacactcgctggcac

SEQ ID NO: 5723441 - DNA, 25 bp, Homo sapien
ggccactgtgcactgaggccagagg

SEQ ID NO: 5723442 - DNA, 25 bp, Homo sapien
gacaatgccagtctcattgttggcc

SEQ ID NO: 5723443 - DNA, 25 bp, Homo sapien
tctgaccgaattcagcttccagcct

SEQ ID NO: 5723444 - DNA, 25 bp, Homo sapien
aaacttgtgccccacgattgtaagg

SEQ ID NO: 5723445 - DNA, 25 bp, Homo sapien
tggattactaaattatttgactcag

SEQ ID NO: 5723446 - DNA, 25 bp, Homo sapien
tgcgcagccctgattgccagtgggc

SEQ ID NO: 5723447 - DNA, 25 bp, Homo sapien
cacgattgtaaggaagtccacgccc

SEQ ID NO: 5723448 - DNA, 25 bp, Homo sapien
tgcttcaggtcctgcacgacgaggt

SEQ ID NO: 5723449 - DNA, 25 bp, Homo sapien
aactttcctctccggcgagttgtgt

SEQ ID NO: 5723450 - DNA, 25 bp, Homo sapien
gtggcacgcggcccccacactggcc

SEQ ID NO: 5723451 - DNA, 25 bp, Homo sapien
tggtgggcggtgggcgctgagcaga

SEQ ID NO: 5723452 - DNA, 25 bp, Homo sapien
atgtgggcggtcctatgcggcgttg

SEQ ID NO: 5723453 - DNA, 25 bp, Homo sapien
ggtcccatgtgggcgttcccatgtg

SEQ ID NO: 5723454 - DNA, 25 bp, Homo sapien
tagagaggggtaaattcaccaagtc

SEQ ID NO: 5723455 - DNA, 25 bp, Homo sapien
tggataaagctaagtgtttccgctt

SEQ ID NO: 5723456 - DNA, 25 bp, Homo sapien
cagttctgggtcaccagctccgcgg

SEQ ID NO: 5723457 - DNA, 25 bp, Homo sapien
ctacgttcatgatagcatttggctg

SEQ ID NO: 5723458 - DNA, 25 bp, Homo sapien
tgtccaaatgccagagcattttgag

SEQ ID NO: 5723459 - DNA, 25 bp, Homo sapien
tgtgccctgccacgggcttcccaga

SEQ ID NO: 5723460 - DNA, 25 bp, Homo sapien
ggtggtgggggcagctttggaaagg

SEQ ID NO: 5723461 - DNA, 25 bp, Homo sapien
cctctgtctgcccgctcaccttgga

SEQ ID NO: 5723462 - DNA, 25 bp, Homo sapien
tgcacactcgctggcactccaggac

SEQ ID NO: 5723463 - DNA, 25 bp, Homo sapien
atttggctgacaatgagttataaat

SEQ ID NO: 5723464 - DNA, 25 bp, Homo sapien
tgtgggcggtcctatgtgggcggtc

SEQ ID NO: 5723465 - DNA, 25 bp, Homo sapien
ggaagccgctgggtgcctggaaact

SEQ ID NO: 5723466 - DNA, 25 bp, Homo sapien
tgccagagcattttgagaaaagaat

SEQ ID NO: 5723467 - DNA, 25 bp, Homo sapien
cagcttccagcctctcttccaggta

SEQ ID NO: 5723468 - DNA, 25 bp, Homo sapien
ggaaggcggccccagtgctaggcct

SEQ ID NO: 5723469 - DNA, 25 bp, Homo sapien
agccggagcgcgttcctggccacgt

SEQ ID NO: 5723470 - DNA, 25 bp, Homo sapien
gcttccagcctctcttccaggtagt

SEQ ID NO: 5723471 - DNA, 25 bp, Homo sapien
ggtgctccaggggcagccggatgga

SEQ ID NO: 5723472 - DNA, 25 bp, Homo sapien
tcagggacaggcatgacaatgccag

SEQ ID NO: 5723473 - DNA, 25 bp, Homo sapien
atttccccaggcttcccacatggcc

SEQ ID NO: 5723474 - DNA, 25 bp, Homo sapien
ccagcaatcattggggtgttctctg

SEQ ID NO: 5723475 - DNA, 25 bp, Homo sapien
ggggaagcaggaggggtggtgggcg

SEQ ID NO: 5723476 - DNA, 25 bp, Homo sapien
aggcgtgcccagttcccagtgggga

SEQ ID NO: 5723477 - DNA, 25 bp, Homo sapien
ccctcaggagggaactggagggaca

SEQ ID NO: 5723478 - DNA, 25 bp, Homo sapien
ggtagagaggggtaaattcaccaag

SEQ ID NO: 5723479 - DNA, 25 bp, Homo sapien
ggtgcacactcgctggcactccagg

SEQ ID NO: 5723480 - DNA, 25 bp, Homo sapien
cagcatccgtgtgcacgaggatggg

SEQ ID NO: 5723481 - DNA, 25 bp, Homo sapien
tcaggtcctgcacgacgaggtccac

SEQ ID NO: 5723482 - DNA, 25 bp, Homo sapien
tgaccgaattcagcttccagcctct

SEQ ID NO: 5723483 - DNA, 25 bp, Homo sapien
actcctatgcaaatatcgacatgtg

SEQ ID NO: 5723484 - DNA, 25 bp, Homo sapien
tccacgcccaggtcctccacatcca

SEQ ID NO: 5723485 - DNA, 25 bp, Homo sapien
cactgcgcaagcaccacgtggcctt

SEQ ID NO: 5723486 - DNA, 25 bp, Homo sapien
ggatgggaggtagcccagctgccac

SEQ ID NO: 5723487 - DNA, 25 bp, Homo sapien
ccctatcatcttcgcgaggctttcc

SEQ ID NO: 5723488 - DNA, 25 bp, Homo sapien
ggactgccgcgaggatgtcgtccac

SEQ ID NO: 5723489 - DNA, 25 bp, Homo sapien
tgttctctgtccctggcctgaaatt

SEQ ID NO: 5723490 - DNA, 25 bp, Homo sapien
actgtgcactgaggccagaggagca

SEQ ID NO: 5723491 - DNA, 25 bp, Homo sapien
aagtgtttcctcaaaatcatcatgt

SEQ ID NO: 5723492 - DNA, 25 bp, Homo sapien
ccccaaggcctgtgcagcatccgtg

SEQ ID NO: 5723493 - DNA, 25 bp, Homo sapien
gtattgggaagccgctgggtgcctg

SEQ ID NO: 5723494 - DNA, 25 bp, Homo sapien
gaaaggtgcatgtagaggccatgat

SEQ ID NO: 5723495 - DNA, 25 bp, Homo sapien
agtcgttgcattatagtccatataa

SEQ ID NO: 5723496 - DNA, 25 bp, Homo sapien
caaatagcatagggtagagaggggt

SEQ ID NO: 5723497 - DNA, 25 bp, Homo sapien
atatcgacatgtgatgtgtgtccaa

SEQ ID NO: 5723498 - DNA, 25 bp, Homo sapien
cccggagctgcaccaactcagcgag

SEQ ID NO: 5723499 - DNA, 25 bp, Homo sapien
aatgccagagcattttgagaaaaga

SEQ ID NO: 5723500 - DNA, 25 bp, Homo sapien
tggttcagggctttaatgcgctgac

SEQ ID NO: 5723501 - DNA, 25 bp, Homo sapien
ctgtccctggcctgaaattccgttc

SEQ ID NO: 5723502 - DNA, 25 bp, Homo sapien
gttataaatacttggattctatctt

SEQ ID NO: 5723503 - DNA, 25 bp, Homo sapien
aaggccagcaatcattggggtgttc

SEQ ID NO: 5723504 - DNA, 25 bp, Homo sapien
ggatggagtcgtgttccaccgagga

SEQ ID NO: 5723505 - DNA, 25 bp, Homo sapien
ggcatgagacagtcatcctggcaca

SEQ ID NO: 5723506 - DNA, 25 bp, Homo sapien
atccgtgtgcacgaggatgggaggt

SEQ ID NO: 5723507 - DNA, 25 bp, Homo sapien
ttccagggaaggaaactgggggtgc

SEQ ID NO: 5723508 - DNA, 25 bp, Homo sapien
gatggattctcttctgaccgaattc

SEQ ID NO: 5723509 - DNA, 25 bp, Homo sapien
gtgttccaccgaggaagtaatgaaa

SEQ ID NO: 5723510 - DNA, 25 bp, Homo sapien
ccccaggaatgacccggagctgcac

SEQ ID NO: 5723511 - DNA, 25 bp, Homo sapien
tgtagaggccatgatcaaaacaaaa

SEQ ID NO: 5723512 - DNA, 25 bp, Homo sapien
gcccagctgccacccgttcctggtt

SEQ ID NO: 5723513 - DNA, 25 bp, Homo sapien
ctgcagggttccagggaaggaaact

SEQ ID NO: 5723514 - DNA, 25 bp, Homo sapien
cactgggctgtggtgcccacctgtg

SEQ ID NO: 5723515 - DNA, 25 bp, Homo sapien
aggctttcccgagctgcatttataa

SEQ ID NO: 5723516 - DNA, 25 bp, Homo sapien
gtgcgccaatcctgggaccataaaa

SEQ ID NO: 5723517 - DNA, 25 bp, Homo sapien
gcctggggaccgtggacagggaagt

SEQ ID NO: 5723518 - DNA, 25 bp, Homo sapien
cacctcggccctggtggtgctgcgg

SEQ ID NO: 5723519 - DNA, 25 bp, Homo sapien
ctccaggacaaaatgcagagggggc

SEQ ID NO: 5723520 - DNA, 25 bp, Homo sapien
acggcctgcttcaggtcctgcacga

SEQ ID NO: 5723521 - DNA, 25 bp, Homo sapien
aggaggggtggtgggcggtgggcgc

SEQ ID NO: 5723522 - DNA, 25 bp, Homo sapien
tgtgggcggtcccatgtgggcggtc

SEQ ID NO: 5723523 - DNA, 25 bp, Homo sapien
cctgattgccagtgggcggaacagg

SEQ ID NO: 5723524 - DNA, 25 bp, Homo sapien
gaacagggtcaggctcggggaagca

SEQ ID NO: 5723525 - DNA, 25 bp, Homo sapien
tcaggctcggggaagcaggaggggt

SEQ ID NO: 5723526 - DNA, 25 bp, Homo sapien
gttccaccgaggaagtaatgaaatg

SEQ ID NO: 5723527 - DNA, 25 bp, Homo sapien
gccacgtcgaaggggacaccgtagc

SEQ ID NO: 5723528 - DNA, 25 bp, Homo sapien
attgccagtgggcggaacagggtca

SEQ ID NO: 5723529 - DNA, 25 bp, Homo sapien
gggacaagacaggaaggcctgggga

SEQ ID NO: 5723530 - DNA, 25 bp, Homo sapien
aaaggtgaccgctgccacttgttct

SEQ ID NO: 5723531 - DNA, 25 bp, Homo sapien
ccagcctctcttccaggtagtcgcg

SEQ ID NO: 5723532 - DNA, 25 bp, Homo sapien
tagcccagctgccacccgttcctgg

SEQ ID NO: 5723533 - DNA, 25 bp, Homo sapien
agccctcaggagggaactggaggga

SEQ ID NO: 5723534 - DNA, 25 bp, Homo sapien
cggcgagttgtgtttcccgcagccg

SEQ ID NO: 5723535 - DNA, 25 bp, Homo sapien
ttccactgaaaatgactcctatgca

SEQ ID NO: 5723536 - DNA, 25 bp, Homo sapien
accgaattcagcttccagcctctct

SEQ ID NO: 5723537 - DNA, 25 bp, Homo sapien
gattcccaccccaggaatgacccgg

SEQ ID NO: 5723538 - DNA, 25 bp, Homo sapien
gattctatcttccagataaaaacac

SEQ ID NO: 5723539 - DNA, 25 bp, Homo sapien
agaagagaccactctggaaaggtgc

SEQ ID NO: 5723540 - DNA, 25 bp, Homo sapien
cataaaacttgtgccccacgattgt

SEQ ID NO: 5723541 - DNA, 25 bp, Homo sapien
gggcttcccagaagcggggtgggga

SEQ ID NO: 5723542 - DNA, 25 bp, Homo sapien
gctgcaccaactcagcgaggttgga

SEQ ID NO: 5723543 - DNA, 25 bp, Homo sapien
cccgctcaccttggacaccgggaca

SEQ ID NO: 5723544 - DNA, 25 bp, Homo sapien
gcggtcctatgtgggcggttctatg

SEQ ID NO: 5723545 - DNA, 25 bp, Homo sapien
ttcgggcactgaaatcttttattcg

SEQ ID NO: 5723546 - DNA, 25 bp, Homo sapien
agaatggattactaaattatttgac

SEQ ID NO: 5723547 - DNA, 25 bp, Homo sapien
taaagtgcgccaatcctgggaccat

SEQ ID NO: 5723548 - DNA, 25 bp, Homo sapien
gccgctgggtgcctggaaactggct

SEQ ID NO: 5723549 - DNA, 25 bp, Homo sapien
aaagggcccgagaagagaccactct

SEQ ID NO: 5723550 - DNA, 25 bp, Homo sapien
gggcggtcctatgcggcgttggtgt

SEQ ID NO: 5723551 - DNA, 25 bp, Homo sapien
agcaggcctggccgaggctgggggc

SEQ ID NO: 5723552 - DNA, 25 bp, Homo sapien
caccgaggaagtaatgaaatggggc

SEQ ID NO: 5723553 - DNA, 25 bp, Homo sapien
acgttcatgatagcatttggctgac

SEQ ID NO: 5723554 - DNA, 25 bp, Homo sapien
ggggtggtgggcggtgggcgctgag

SEQ ID NO: 5723555 - DNA, 25 bp, Homo sapien
actctggaaaggtgcatgtagaggc

SEQ ID NO: 5723556 - DNA, 25 bp, Homo sapien
aatgcgctgactgatttcagggaca

SEQ ID NO: 5723557 - DNA, 25 bp, Homo sapien
tgggcctcataagcctcgcagttct

SEQ ID NO: 5723558 - DNA, 25 bp, Homo sapien
ggccagaggagcagggtggtggggg

SEQ ID NO: 5723559 - DNA, 25 bp, Homo sapien
tctcttccaggtagtcgcggacgtc

SEQ ID NO: 5723560 - DNA, 25 bp, Homo sapien
gcaagcaccacgtggccttgaagcc

SEQ ID NO: 5723561 - DNA, 25 bp, Homo sapien
tccgcggccttcccaaggccagcaa

SEQ ID NO: 5723562 - DNA, 25 bp, Homo sapien
taaagctaagtgtttccgcttcacc

SEQ ID NO: 5723563 - DNA, 25 bp, Homo sapien
caggggagtcgttgcattatagtcc

SEQ ID NO: 5723564 - DNA, 25 bp, Homo sapien
atacgggctgctgggatttccccag

SEQ ID NO: 5723565 - DNA, 25 bp, Homo sapien
aagtgcgccaatcctgggaccataa

SEQ ID NO: 5723566 - DNA, 25 bp, Homo sapien
agtttctggcaagtgtttcctcaaa

SEQ ID NO: 5723567 - DNA, 25 bp, Homo sapien
gtaaattcaccaagtcctcgtatat

SEQ ID NO: 5723568 - DNA, 25 bp, Homo sapien
ctggtggtgctgcggcccacgctga

SEQ ID NO: 5723569 - DNA, 25 bp, Homo sapien
cactgaaatcttttattcgttaatt

SEQ ID NO: 5723570 - DNA, 25 bp, Homo sapien
ctgccacgggcttcccagaagcggg

SEQ ID NO: 5723571 - DNA, 25 bp, Homo sapien
gataaagctaagtgtttccgcttca

SEQ ID NO: 5723572 - DNA, 25 bp, Homo sapien
cgctgagcagagcaggcctggccga

SEQ ID NO: 5723573 - DNA, 25 bp, Homo sapien
caccaactcagcgaggttggagctg

SEQ ID NO: 5723574 - DNA, 25 bp, Homo sapien
cgctggcactccaggacaaaatgca

SEQ ID NO: 5723575 - DNA, 25 bp, Homo sapien
ggggcatgagacagtcatcctggca

SEQ ID NO: 5723576 - DNA, 25 bp, Homo sapien
aggctgggggccactgtgcactgag

SEQ ID NO: 5723577 - DNA, 25 bp, Homo sapien
ctgtgtgtccctttgaggtctggtt

SEQ ID NO: 5723578 - DNA, 25 bp, Homo sapien
tgtgcagcatccgtgtgcacgagga

SEQ ID NO: 5723579 - DNA, 25 bp, Homo sapien
cacgtcgaaggggacaccgtagctc

SEQ ID NO: 5723580 - DNA, 25 bp, Homo sapien
tcttcctgctgaatacgggctgctg

SEQ ID NO: 5723581 - DNA, 25 bp, Homo sapien
catgtagaggccatgatcaaaacaa

SEQ ID NO: 5723582 - DNA, 25 bp, Homo sapien
ctgggtgcctggaaactggctattc

SEQ ID NO: 5723583 - DNA, 25 bp, Homo sapien
ggaggacggttctatgtgggcggtc

SEQ ID NO: 5723584 - DNA, 25 bp, Homo sapien
tatataaagtgcgccaatcctggga

SEQ ID NO: 5723585 - DNA, 25 bp, Homo sapien
agacagtcatcctggcacagccctc

SEQ ID NO: 5723586 - DNA, 25 bp, Homo sapien
gtccctcatgtgggcctcataagcc

SEQ ID NO: 5723587 - DNA, 25 bp, Homo sapien
ttcactgggctgtggtgcccacctg

SEQ ID NO: 5723588 - DNA, 25 bp, Homo sapien
tggattctatcttccagataaaaac

SEQ ID NO: 5723589 - DNA, 25 bp, Homo sapien
gtcctatgtgggcggtcctatgtgg

SEQ ID NO: 5723590 - DNA, 25 bp, Homo sapien
gtcccatgtgggcggtcctatgtgg

SEQ ID NO: 5723591 - DNA, 25 bp, Homo sapien
gtagctcagcagcactggggacggc

SEQ ID NO: 5723592 - DNA, 25 bp, Homo sapien
acaggcgtgcccagttcccagtggg

SEQ ID NO: 5723593 - DNA, 25 bp, Homo sapien
aaactggctattcagatggattctc

SEQ ID NO: 5723594 - DNA, 25 bp, Homo sapien
aaataaaattaaggtataagctgag

SEQ ID NO: 5723595 - DNA, 25 bp, Homo sapien
gcccccggaagtgaagattatatct

SEQ ID NO: 5723596 - DNA, 25 bp, Homo sapien
tgtagttccttgaaccgtaaaacca

SEQ ID NO: 5723597 - DNA, 25 bp, Homo sapien
cttgtccacctccaaatagcatagg

SEQ ID NO: 5723598 - DNA, 25 bp, Homo sapien
ggatttccccaggcttcccacatgg

SEQ ID NO: 5723599 - DNA, 25 bp, Homo sapien
gtggaaatgtttcaccacagaatgg

SEQ ID NO: 5723600 - DNA, 25 bp, Homo sapien
caccgtagctcagcagcactgggga

SEQ ID NO: 5723601 - DNA, 25 bp, Homo sapien
ccactgaaaatgactcctatgcaaa

SEQ ID NO: 5723602 - DNA, 25 bp, Homo sapien
ctgggctgtggtgcccacctgtgtg

SEQ ID NO: 5723603 - DNA, 25 bp, Homo sapien
ccctgccacgggcttcccagaagcg

SEQ ID NO: 5723604 - DNA, 25 bp, Homo sapien
gaatacgggctgctgggatttcccc

SEQ ID NO: 5723605 - DNA, 25 bp, Homo sapien
cggccccagtgctaggcctggtcct

SEQ ID NO: 5723606 - DNA, 25 bp, Homo sapien
gttggccagcatgatggtcacgagg

SEQ ID NO: 5723607 - DNA, 25 bp, Homo sapien
ccacgcgctgcttccccaaggcctg

SEQ ID NO: 5723608 - DNA, 25 bp, Homo sapien
gtcatggcctggataacttctggct

SEQ ID NO: 5723609 - DNA, 25 bp, Homo sapien
tcaccagctccgcggccttcccaag

SEQ ID NO: 5723610 - DNA, 25 bp, Homo sapien
ctggataacttctggctccagggga

SEQ ID NO: 5723611 - DNA, 25 bp, Homo sapien
cgctgggtgcctggaaactggctat

SEQ ID NO: 5723612 - DNA, 25 bp, Homo sapien
ccctgagttaatgatcaaaagggac

SEQ ID NO: 5723613 - DNA, 25 bp, Homo sapien
accactggaggacggttctatgtgg

SEQ ID NO: 5723614 - DNA, 25 bp, Homo sapien
agcaatcattggggtgttctctgtc

SEQ ID NO: 5723615 - DNA, 25 bp, Homo sapien
ttggacaccgggacaaaggtgaccg

SEQ ID NO: 5723616 - DNA, 25 bp, Homo sapien
aaatgtttcaccacagaatggatta

SEQ ID NO: 5723617 - DNA, 25 bp, Homo sapien
gcacgaggatgggaggtagcccagc

SEQ ID NO: 5723618 - DNA, 25 bp, Homo sapien
ggcacgcggcccccacactggccat

SEQ ID NO: 5723619 - DNA, 25 bp, Homo sapien
ggtagcccagctgccacccgttcct

SEQ ID NO: 5723620 - DNA, 25 bp, Homo sapien
aggggcagccggatggagtcgtgtt

SEQ ID NO: 5723621 - DNA, 25 bp, Homo sapien
acgggctgctgggatttccccaggc

SEQ ID NO: 5723622 - DNA, 25 bp, Homo sapien
atgcaaatatcgacatgtgatgtgt

SEQ ID NO: 5723623 - DNA, 25 bp, Homo sapien
caatgccagtctcattgttggccag

SEQ ID NO: 5723624 - DNA, 25 bp, Homo sapien
ctcatgtgggcctcataagcctcgc

SEQ ID NO: 5723625 - DNA, 25 bp, Homo sapien
acagggtcaggctcggggaagcagg

SEQ ID NO: 5723626 - DNA, 25 bp, Homo sapien
tccacctccaaatagcatagggtag

SEQ ID NO: 5723627 - DNA, 25 bp, Homo sapien
ttggggtgttctctgtccctggcct

SEQ ID NO: 5723628 - DNA, 25 bp, Homo sapien
aacttctggctccaggggagtcgtt

SEQ ID NO: 5723629 - DNA, 25 bp, Homo sapien
ccgtagctcagcagcactggggacg

SEQ ID NO: 5723630 - DNA, 25 bp, Homo sapien
catttataatatccttggcctttct

SEQ ID NO: 5723631 - DNA, 25 bp, Homo sapien
gtgggcggtgggcgctgagcagagc

SEQ ID NO: 5723632 - DNA, 25 bp, Homo sapien
aattcagcttccagcctctcttcca

SEQ ID NO: 5723633 - DNA, 25 bp, Homo sapien
cattaaaaatgttattccactgaaa

SEQ ID NO: 5723634 - DNA, 25 bp, Homo sapien
tcctcgtatataaagtgcgccaatc

SEQ ID NO: 5723635 - DNA, 25 bp, Homo sapien
tcataagcctcgcagttctgggtca

SEQ ID NO: 5723636 - DNA, 25 bp, Homo sapien
gcagcactggggacggctggtcccc

SEQ ID NO: 5723637 - DNA, 25 bp, Homo sapien
cccaggtcctccacatccacgcgct

SEQ ID NO: 5723638 - DNA, 25 bp, Homo sapien
ggaccataaaacttgtgccccacga

SEQ ID NO: 5723639 - DNA, 25 bp, Homo sapien
tattccactgaaaatgactcctatg

SEQ ID NO: 5723640 - DNA, 25 bp, Homo sapien
gaactggagggacaaccctgtgccc

SEQ ID NO: 5723641 - DNA, 25 bp, Homo sapien
gactaaaaagggcccgagaagagac

SEQ ID NO: 5723642 - DNA, 25 bp, Homo sapien
taatgatcaaaagggacaagacagg

SEQ ID NO: 5723643 - DNA, 25 bp, Homo sapien
ctgaaaccctgagttaatgatcaaa

SEQ ID NO: 5723644 - DNA, 25 bp, Homo sapien
acagtcatcctggcacagccctcag

SEQ ID NO: 5723645 - DNA, 25 bp, Homo sapien
ctggcctgaaattccgttcttgtcc

SEQ ID NO: 5723646 - DNA, 25 bp, Homo sapien
gtttgcgtggaaatgtttcaccaca

SEQ ID NO: 5723647 - DNA, 25 bp, Homo sapien
ttctcttctgaccgaattcagcttc

SEQ ID NO: 5723648 - DNA, 25 bp, Homo sapien
ttcaccacagaatggattactaaat

SEQ ID NO: 5723649 - DNA, 25 bp, Homo sapien
taaggaagtccacgcccaggtcctc

SEQ ID NO: 5723650 - DNA, 25 bp, Homo sapien
ctgccacccgttcctggttcagggc

SEQ ID NO: 5723651 - DNA, 25 bp, Homo sapien
ggtccccgtggtccgagtggcacgc

SEQ ID NO: 5723652 - DNA, 25 bp, Homo sapien
gagctgcatttataatatccttggc

SEQ ID NO: 5723653 - DNA, 25 bp, Homo sapien
cgcagttctgggtcaccagctccgc

SEQ ID NO: 5723654 - DNA, 25 bp, Homo sapien
cgaggctttcccgagctgcatttat

SEQ ID NO: 5723655 - DNA, 25 bp, Homo sapien
ttctatcttccagataaaaacacct

SEQ ID NO: 5723656 - DNA, 25 bp, Homo sapien
gccaatcctgggaccataaaacttg

SEQ ID NO: 5723657 - DNA, 25 bp, Homo sapien
cgtggtccgagtggcacgcggcccc

SEQ ID NO: 5723658 - DNA, 25 bp, Homo sapien
ctgacaatgagttataaatacttgg

SEQ ID NO: 5723659 - DNA, 25 bp, Homo sapien
gtcgtccacctctgtctgcccgctc

SEQ ID NO: 5723660 - DNA, 25 bp, Homo sapien
cagtgcccccggaagtgaagattat

SEQ ID NO: 5723661 - DNA, 25 bp, Homo sapien
atgtgggcggtcccatgtgggcgtt

SEQ ID NO: 5723662 - DNA, 25 bp, Homo sapien
cctggttcagggctttaatgcgctg

SEQ ID NO: 5723663 - DNA, 25 bp, Homo sapien
ccaggaatgacccggagctgcacca

SEQ ID NO: 5723664 - DNA, 25 bp, Homo sapien
gctgggggccactgtgcactgaggc

SEQ ID NO: 5723665 - DNA, 25 bp, Homo sapien
tgtgcactgaggccagaggagcagg

SEQ ID NO: 5723666 - DNA, 25 bp, Homo sapien
ccgctgccacttgttcttccaccag

SEQ ID NO: 5723667 - DNA, 25 bp, Homo sapien
ggtcctatgtgggcggttctatgtg

SEQ ID NO: 5723668 - DNA, 25 bp, Homo sapien
gcggacgtccctcatgtgggcctca

SEQ ID NO: 5723669 - DNA, 25 bp, Homo sapien
cctcaaaatcatcatgtagttcctt

SEQ ID NO: 5723670 - DNA, 25 bp, Homo sapien
ctcagtgcccccggaagtgaagatt

SEQ ID NO: 5723671 - DNA, 25 bp, Homo sapien
aaggtgcatgtagaggccatgatca

SEQ ID NO: 5723672 - DNA, 25 bp, Homo sapien
aaggcctgtgcagcatccgtgtgca

SEQ ID NO: 5723673 - DNA, 25 bp, Homo sapien
tgcggcccacgctgagccggagcgc

SEQ ID NO: 5723674 - DNA, 25 bp, Homo sapien
ccggatggagtcgtgttccaccgag

SEQ ID NO: 5723675 - DNA, 25 bp, Homo sapien
gtgaccgctgccacttgttcttcca

SEQ ID NO: 5723676 - DNA, 25 bp, Homo sapien
gttattccactgaaaatgactccta

SEQ ID NO: 5723677 - DNA, 25 bp, Homo sapien
gaggggtggtgggcggtgggcgctg

SEQ ID NO: 5723678 - DNA, 25 bp, Homo sapien
atgagttataaatacttggattcta

SEQ ID NO: 5723679 - DNA, 25 bp, Homo sapien
gatgtgtgtccaaatgccagagcat

SEQ ID NO: 5723680 - DNA, 25 bp, Homo sapien
gcccacctgtgtgtccctttgaggt

SEQ ID NO: 5723681 - DNA, 25 bp, Homo sapien
ttggagctgaaaccctgagttaatg

SEQ ID NO: 5723682 - DNA, 25 bp, Homo sapien
gagaggggtaaattcaccaagtcct

SEQ ID NO: 5723683 - DNA, 25 bp, Homo sapien
agcactggggacggctggtccccgt

SEQ ID NO: 5723684 - DNA, 25 bp, Homo sapien
tataaactttcctctccggcgagtt

SEQ ID NO: 5723685 - DNA, 25 bp, Homo sapien
ggaccgtggacagggaagtgcgcag

SEQ ID NO: 5723686 - DNA, 25 bp, Homo sapien
ggcggaacagggtcaggctcgggga

SEQ ID NO: 5723687 - DNA, 25 bp, Homo sapien
actaaattatttgactcagtgcccc

SEQ ID NO: 5723688 - DNA, 25 bp, Homo sapien
tataagctgagtcagggatgatccg

SEQ ID NO: 5723689 - DNA, 25 bp, Homo sapien
gccagtctcattgttggccagcatg

SEQ ID NO: 5723690 - DNA, 25 bp, Homo sapien
gacagggaagtgcgcagccctgatt

SEQ ID NO: 5723691 - DNA, 25 bp, Homo sapien
cggatggaaaagttacaggtattgg

SEQ ID NO: 5723692 - DNA, 25 bp, Homo sapien
cctgggaccataaaacttgtgcccc

SEQ ID NO: 5723693 - DNA, 25 bp, Homo sapien
ggcgttggtgtcctgggccctgtga

SEQ ID NO: 5723694 - DNA, 25 bp, Homo sapien
aggtagtcgcggacgtccctcatgt

SEQ ID NO: 5723695 - DNA, 25 bp, Homo sapien
aattaaggtataagctgagtcaggg

SEQ ID NO: 5723696 - DNA, 25 bp, Homo sapien
ctgcttccccaaggcctgtgcagca

SEQ ID NO: 5723697 - DNA, 25 bp, Homo sapien
cacctccaaatagcatagggtagag

SEQ ID NO: 5723698 - DNA, 25 bp, Homo sapien
gcggtgggcgctgagcagagcaggc

SEQ ID NO: 5723699 - DNA, 25 bp, Homo sapien
tggcacagccctcaggagggaactg

SEQ ID NO: 5723700 - DNA, 25 bp, Homo sapien
agggggcatgagacagtcatcctgg

SEQ ID NO: 5723701 - DNA, 25 bp, Homo sapien
gtcagggatgatccgattcccaccc

SEQ ID NO: 5723702 - DNA, 25 bp, Homo sapien
tccaggaaagggcactcacaacagg

SEQ ID NO: 5723703 - DNA, 25 bp, Homo sapien
caccacagaatggattactaaatta

SEQ ID NO: 5723704 - DNA, 25 bp, Homo sapien
agggtcaggctcggggaagcaggag

SEQ ID NO: 5723705 - DNA, 25 bp, Homo sapien
gtcctatgtgggcggtcccatgtgg

SEQ ID NO: 5723706 - DNA, 25 bp, Homo sapien
ggagtcgtgttccaccgaggaagta

SEQ ID NO: 5723707 - DNA, 25 bp, Homo sapien
tagcatagggtagagaggggtaaat

SEQ ID NO: 5723708 - DNA, 25 bp, Homo sapien
aaatcaagtttcctacgttcatgat

SEQ ID NO: 5723709 - DNA, 25 bp, Homo sapien
gttctatgtgggcggtcccatgtgg

SEQ ID NO: 5723710 - DNA, 25 bp, Homo sapien
ggcccgagaagagaccactctggaa

SEQ ID NO: 5723711 - DNA, 25 bp, Homo sapien
gccacgggcttcccagaagcggggt

SEQ ID NO: 5723712 - DNA, 25 bp, Homo sapien
atccttggcctttcttcctgctgaa

SEQ ID NO: 5723713 - DNA, 25 bp, Homo sapien
aggagcagggtggtgggggcagctt

SEQ ID NO: 5723714 - DNA, 25 bp, Homo sapien
agctgagtcagggatgatccgattc

SEQ ID NO: 5723715 - DNA, 25 bp, Homo sapien
gacaagacaggaaggcctggggacc

SEQ ID NO: 5723716 - DNA, 25 bp, Homo sapien
tcatcatgtagttccttgaaccgta

SEQ ID NO: 5723717 - DNA, 25 bp, Homo sapien
attccgttcttgtccacctccaaat

SEQ ID NO: 5723718 - DNA, 25 bp, Homo sapien
aggtcctgcacgacgaggtccacct

SEQ ID NO: 5723719 - DNA, 25 bp, Homo sapien
gtcccatgtgggcggtcccatgtgg

SEQ ID NO: 5723720 - DNA, 25 bp, Homo sapien
cctgtgcagcatccgtgtgcacgag

SEQ ID NO: 5723721 - DNA, 25 bp, Homo sapien
aggggacaccgtagctcagcagcac

SEQ ID NO: 5723722 - DNA, 25 bp, Homo sapien
gacccggagctgcaccaactcagcg

SEQ ID NO: 5723723 - DNA, 25 bp, Homo sapien
gggcagccggatggagtcgtgttcc

SEQ ID NO: 5723724 - DNA, 25 bp, Homo sapien
ccccctatcatcttcgcgaggcttt

SEQ ID NO: 5723725 - DNA, 25 bp, Homo sapien
gagaccactctggaaaggtgcatgt

SEQ ID NO: 5723726 - DNA, 25 bp, Homo sapien
actgccgcgaggatgtcgtccacct

SEQ ID NO: 5723727 - DNA, 25 bp, Homo sapien
ttggcctttcttcctgctgaatacg

SEQ ID NO: 5723728 - DNA, 25 bp, Homo sapien
ggccatgatcaaaacaaaaaaatca

SEQ ID NO: 5723729 - DNA, 25 bp, Homo sapien
tccaccgaggaagtaatgaaatggg

SEQ ID NO: 5723730 - DNA, 25 bp, Homo sapien
gcgctgcttccccaaggcctgtgca

SEQ ID NO: 5723731 - DNA, 25 bp, Homo sapien
gtttcccccctatcatcttcgcgag

SEQ ID NO: 5723732 - DNA, 25 bp, Homo sapien
gaggttggagctgaaaccctgagtt

SEQ ID NO: 5723733 - DNA, 25 bp, Homo sapien
ccagggaaggaaactgggggtgcac

SEQ ID NO: 5723734 - DNA, 25 bp, Homo sapien
ggggagggtggataaagctaagtgt

SEQ ID NO: 5723735 - DNA, 25 bp, Homo sapien
aatagcatagggtagagaggggtaa

SEQ ID NO: 5723736 - DNA, 25 bp, Homo sapien
aaggcggccccagtgctaggcctgg

SEQ ID NO: 5723737 - DNA, 25 bp, Homo sapien
ggtctggtttgcgtggaaatgtttc

SEQ ID NO: 5723738 - DNA, 25 bp, Homo sapien
ggatgtcgtccacctctgtctgccc

SEQ ID NO: 5723739 - DNA, 25 bp, Homo sapien
tccacctctgtctgcccgctcacct

SEQ ID NO: 5723740 - DNA, 25 bp, Homo sapien
gttcccatgtgggcggtcctatgtg

SEQ ID NO: 5723741 - DNA, 25 bp, Homo sapien
gtccctggcctgaaattccgttctt

SEQ ID NO: 5723742 - DNA, 25 bp, Homo sapien
gaatgacccggagctgcaccaactc

SEQ ID NO: 5723743 - DNA, 25 bp, Homo sapien
gcagggtggtgggggcagctttgga

SEQ ID NO: 5723744 - DNA, 25 bp, Homo sapien
aaactgggggtgcacactcgctggc

SEQ ID NO: 5723745 - DNA, 25 bp, Homo sapien
ccacgctgagccggagcgcgttcct

SEQ ID NO: 5723746 - DNA, 25 bp, Homo sapien
gaagtgcgcagccctgattgccagt

SEQ ID NO: 5723747 - DNA, 25 bp, Homo sapien
gactgatttcagggacaggcatgac

SEQ ID NO: 5723748 - DNA, 25 bp, Homo sapien
tgtgtccaaatgccagagcattttg

SEQ ID NO: 5723749 - DNA, 25 bp, Homo sapien
tgattgccagtgggcggaacagggt

SEQ ID NO: 5723750 - DNA, 25 bp, Homo sapien
ctgagtcagggatgatccgattccc

SEQ ID NO: 5723751 - DNA, 25 bp, Homo sapien
cacattaaaaatgttattccactga

SEQ ID NO: 5723752 - DNA, 25 bp, Homo sapien
ctgactgatttcagggacaggcatg

SEQ ID NO: 5723753 - DNA, 25 bp, Homo sapien
cccacactggccatcagcactcggc

SEQ ID NO: 5723754 - DNA, 25 bp, Homo sapien
tgtgagctctgcagggttccaggga

SEQ ID NO: 5723755 - DNA, 25 bp, Homo sapien
agagggggcatgagacagtcatcct

SEQ ID NO: 5723756 - DNA, 25 bp, Homo sapien
gcgttcccatgtgggcggtcctatg

SEQ ID NO: 5723757 - DNA, 25 bp, Homo sapien
aatgactcctatgcaaatatcgaca

SEQ ID NO: 5723758 - DNA, 25 bp, Homo sapien
gggcggtgggcgctgagcagagcag

SEQ ID NO: 5723759 - DNA, 25 bp, Homo sapien
aggaatgacccggagctgcaccaac

SEQ ID NO: 5723760 - DNA, 25 bp, Homo sapien
tttccgcttcaccactggaggacgg

SEQ ID NO: 5723761 - DNA, 25 bp, Homo sapien
ttagtttctggcaagtgtttcctca

SEQ ID NO: 5723762 - DNA, 25 bp, Homo sapien
tgggaagccgctgggtgcctggaaa

SEQ ID NO: 5723763 - DNA, 25 bp, Homo sapien
tggtgctgcggcccacgctgagccg

SEQ ID NO: 5723764 - DNA, 25 bp, Homo sapien
ctttgaggtctggtttgcgtggaaa

SEQ ID NO: 5723765 - DNA, 25 bp, Homo sapien
ccatgatcaaaacaaaaaaatcaag

SEQ ID NO: 5723766 - DNA, 25 bp, Homo sapien
tgggggccactgtgcactgaggcca

SEQ ID NO: 5723767 - DNA, 25 bp, Homo sapien
atttagtttctggcaagtgtttcct

SEQ ID NO: 5723768 - DNA, 25 bp, Homo sapien
aggcctggggaccgtggacagggaa

SEQ ID NO: 5723769 - DNA, 25 bp, Homo sapien
ggacgtccctcatgtgggcctcata

SEQ ID NO: 5723770 - DNA, 25 bp, Homo sapien
attcaccaagtcctcgtatataaag

SEQ ID NO: 5723771 - DNA, 25 bp, Homo sapien
gcaccacgtggccttgaagccgggg

SEQ ID NO: 5723772 - DNA, 25 bp, Homo sapien
attatatcttgaggtttccccccta

SEQ ID NO: 5723773 - DNA, 25 bp, Homo sapien
gttcagggctttaatgcgctgactg

SEQ ID NO: 5723774 - DNA, 25 bp, Homo sapien
gcatccgtgtgcacgaggatgggag

SEQ ID NO: 5723775 - DNA, 25 bp, Homo sapien
catgagacagtcatcctggcacagc

SEQ ID NO: 5723776 - DNA, 25 bp, Homo sapien
tctggaaaggtgcatgtagaggcca

SEQ ID NO: 5723777 - DNA, 25 bp, Homo sapien
aggaaggcctggggaccgtggacag

SEQ ID NO: 5723778 - DNA, 25 bp, Homo sapien
ggtccacctcggccctggtggtgct

SEQ ID NO: 5723779 - DNA, 25 bp, Homo sapien
gcagctttggaaagggactaaaaag

SEQ ID NO: 5723780 - DNA, 25 bp, Homo sapien
ggaaactgggggtgcacactcgctg

SEQ ID NO: 5723781 - DNA, 25 bp, Homo sapien
gcgaggttggagctgaaaccctgag

SEQ ID NO: 5723782 - DNA, 25 bp, Homo sapien
atcatcttcgcgaggctttcccgag

SEQ ID NO: 5723783 - DNA, 25 bp, Homo sapien
ggtggataaagctaagtgtttccgc

SEQ ID NO: 5723784 - DNA, 25 bp, Homo sapien
agtgggcggaacagggtcaggctcg

SEQ ID NO: 5723785 - DNA, 25 bp, Homo sapien
atagggtagagaggggtaaattcac

SEQ ID NO: 5723786 - DNA, 25 bp, Homo sapien
gggcggttctatgtgggcggtccca

SEQ ID NO: 5723787 - DNA, 25 bp, Homo sapien
agctcagcagcactggggacggctg

SEQ ID NO: 5723788 - DNA, 25 bp, Homo sapien
gagaaaagaatcctctgcaaataaa

SEQ ID NO: 5723789 - DNA, 25 bp, Homo sapien
tccgttcttgtccacctccaaatag

SEQ ID NO: 5723790 - DNA, 25 bp, Homo sapien
atgttattccactgaaaatgactcc

SEQ ID NO: 5723791 - DNA, 25 bp, Homo sapien
gaaggggacaccgtagctcagcagc

SEQ ID NO: 5723792 - DNA, 25 bp, Homo sapien
ctgggccctgtgagctctgcagggt

SEQ ID NO: 5723793 - DNA, 25 bp, Homo sapien
ggggaaggcggccccagtgctaggc

SEQ ID NO: 5723794 - DNA, 25 bp, Homo sapien
aggaagtccacgcccaggtcctcca

SEQ ID NO: 5723795 - DNA, 25 bp, Homo sapien
gcagagggggcatgagacagtcatc

SEQ ID NO: 5723796 - DNA, 25 bp, Homo sapien
caggtgctccaggggcagccggatg

SEQ ID NO: 5723797 - DNA, 25 bp, Homo sapien
gcagagcaggcctggccgaggctgg

SEQ ID NO: 5723798 - DNA, 25 bp, Homo sapien
taaatacttggattctatcttccag

SEQ ID NO: 5723799 - DNA, 25 bp, Homo sapien
tcctatgcggcgttggtgtcctggg

SEQ ID NO: 5723800 - DNA, 25 bp, Homo sapien
aggcgtgtggtcgggcggactgccg

SEQ ID NO: 5723801 - DNA, 25 bp, Homo sapien
gaccactctggaaaggtgcatgtag

SEQ ID NO: 5723802 - DNA, 25 bp, Homo sapien
tcaccactggaggacggttctatgt

SEQ ID NO: 5723803 - DNA, 25 bp, Homo sapien
aaatggggcttggcccccttcactg

SEQ ID NO: 5723804 - DNA, 25 bp, Homo sapien
tccccggatggaaaagttacaggta

SEQ ID NO: 5723805 - DNA, 25 bp, Homo sapien
gtgcccccggaagtgaagattatat

SEQ ID NO: 5723806 - DNA, 25 bp, Homo sapien
ggtcgggcggactgccgcgaggatg

SEQ ID NO: 5723807 - DNA, 25 bp, Homo sapien
gtgtttcctcaaaatcatcatgtag

SEQ ID NO: 5723808 - DNA, 25 bp, Homo sapien
ccaactcagcgaggttggagctgaa

SEQ ID NO: 5723809 - DNA, 25 bp, Homo sapien
gaaggcctggggaccgtggacaggg

SEQ ID NO: 5723810 - DNA, 25 bp, Homo sapien
cctatgtgggcggtcctatgtgggc

SEQ ID NO: 5723811 - DNA, 25 bp, Homo sapien
gttcttccaccaggtgctccagggg

SEQ ID NO: 5723812 - DNA, 25 bp, Homo sapien
ctcagcagcactggggacggctggt

SEQ ID NO: 5723813 - DNA, 25 bp, Homo sapien
tcccatgtgggcgttcccatgtggg

SEQ ID NO: 5723814 - DNA, 25 bp, Homo sapien
cactggaggacggttctatgtgggc

SEQ ID NO: 5723815 - DNA, 25 bp, Homo sapien
agaatcctctgcaaataaaattaag

SEQ ID NO: 5723816 - DNA, 25 bp, Homo sapien
gatttcagggacaggcatgacaatg

SEQ ID NO: 5723817 - DNA, 25 bp, Homo sapien
aaccctgagttaatgatcaaaaggg

SEQ ID NO: 5723818 - DNA, 25 bp, Homo sapien
caggagggaactggagggacaaccc

SEQ ID NO: 5723819 - DNA, 25 bp, Homo sapien
gagttgtgtttcccgcagccgctgg

SEQ ID NO: 5723820 - DNA, 25 bp, Homo sapien
ccccggaagtgaagattatatcttg

SEQ ID NO: 5723821 - DNA, 25 bp, Homo sapien
gtgtccctttgaggtctggtttgcg

SEQ ID NO: 5723822 - DNA, 25 bp, Homo sapien
ccatcagcactcggcactgcgcaag

SEQ ID NO: 5723823 - DNA, 25 bp, Homo sapien
tcatcctggcacagccctcaggagg

SEQ ID NO: 5723824 - DNA, 25 bp, Homo sapien
aaatatcgacatgtgatgtgtgtcc

SEQ ID NO: 5723825 - DNA, 25 bp, Homo sapien
tttcctacgttcatgatagcatttg

SEQ ID NO: 5723826 - DNA, 25 bp, Homo sapien
ggacaccgggacaaaggtgaccgct

SEQ ID NO: 5723827 - DNA, 25 bp, Homo sapien
ctccacatccacgcgctgcttcccc

SEQ ID NO: 5723828 - DNA, 25 bp, Homo sapien
cccgagaagagaccactctggaaag

SEQ ID NO: 5723829 - DNA, 25 bp, Homo sapien
atgtcgtccacctctgtctgcccgc

SEQ ID NO: 5723830 - DNA, 25 bp, Homo sapien
gagttaatgatcaaaagggacaaga

SEQ ID NO: 5723831 - DNA, 25 bp, Homo sapien
tcggggaagcaggaggggtggtggg

SEQ ID NO: 5723832 - DNA, 25 bp, Homo sapien
agtcgcggacgtccctcatgtgggc

SEQ ID NO: 5723833 - DNA, 25 bp, Homo sapien
gaagtccacgcccaggtcctccaca

SEQ ID NO: 5723834 - DNA, 25 bp, Homo sapien
tttataatatccttggcctttcttc

SEQ ID NO: 5723835 - DNA, 25 bp, Homo sapien
tgggggtgcacactcgctggcactc

SEQ ID NO: 5723836 - DNA, 25 bp, Homo sapien
cactcgctggcactccaggacaaaa

SEQ ID NO: 5723837 - DNA, 25 bp, Homo sapien
tatgtgggcggtcctatgtgggcgg

SEQ ID NO: 5723838 - DNA, 25 bp, Homo sapien
cctatgtgggcggtcccatgtgggc

SEQ ID NO: 5723839 - DNA, 25 bp, Homo sapien
cccacgattgtaaggaagtccacgc

SEQ ID NO: 5723840 - DNA, 25 bp, Homo sapien
ccaggcttcccacatggccttggtc

SEQ ID NO: 5723841 - DNA, 25 bp, Homo sapien
taaaacttgtgccccacgattgtaa

SEQ ID NO: 5723842 - DNA, 25 bp, Homo sapien
gcatgacaatgccagtctcattgtt

SEQ ID NO: 5723843 - DNA, 25 bp, Homo sapien
gcgcaagcaccacgtggccttgaag

SEQ ID NO: 5723844 - DNA, 25 bp, Homo sapien
tatgtgggcggtcccatgtgggcgg

SEQ ID NO: 5723845 - DNA, 25 bp, Homo sapien
cccatgtgggcggtcccatgtgggc

SEQ ID NO: 5723846 - DNA, 25 bp, Homo sapien
ggtataagctgagtcagggatgatc

SEQ ID NO: 5723847 - DNA, 25 bp, Homo sapien
gtttcaccacagaatggattactaa

SEQ ID NO: 5723848 - DNA, 25 bp, Homo sapien
acgctgagccggagcgcgttcctgg

SEQ ID NO: 5723849 - DNA, 25 bp, Homo sapien
gctattcagatggattctcttctga

SEQ ID NO: 5723850 - DNA, 25 bp, Homo sapien
catgtgggcggtcccatgtgggcgg

SEQ ID NO: 5723851 - DNA, 25 bp, Homo sapien
ttctctgtccctggcctgaaattcc

SEQ ID NO: 5723852 - DNA, 25 bp, Homo sapien
ttcctcaaaatcatcatgtagttcc

SEQ ID NO: 5723853 - DNA, 25 bp, Homo sapien
tcctatgtgggcggttctatgtggg

SEQ ID NO: 5723854 - DNA, 25 bp, Homo sapien
gacaatgagttataaatacttggat

SEQ ID NO: 5723855 - DNA, 25 bp, Homo sapien
tcccgagctgcatttataatatcct

SEQ ID NO: 5723856 - DNA, 25 bp, Homo sapien
ctcgcagttctgggtcaccagctcc

SEQ ID NO: 5723857 - DNA, 25 bp, Homo sapien
cacgcccaggtcctccacatccacg

SEQ ID NO: 5723858 - DNA, 25 bp, Homo sapien
cggtcctatgtgggcggtcccatgt

SEQ ID NO: 5723859 - DNA, 25 bp, Homo sapien
ggggtgcacactcgctggcactcca

SEQ ID NO: 5723860 - DNA, 25 bp, Homo sapien
cggttctatgtgggcggtcccatgt

SEQ ID NO: 5723861 - DNA, 25 bp, Homo sapien
tgaaatggggcttggcccccttcac

SEQ ID NO: 5723862 - DNA, 25 bp, Homo sapien
cttccagataaaaacaccttccagg

SEQ ID NO: 5723863 - DNA, 25 bp, Homo sapien
ggggaccgtggacagggaagtgcgc

SEQ ID NO: 5723864 - DNA, 25 bp, Homo sapien
aggacggttctatgtgggcggtccc

SEQ ID NO: 5723865 - DNA, 25 bp, Homo sapien
cctgctgaatacgggctgctgggat

SEQ ID NO: 5723866 - DNA, 25 bp, Homo sapien
gccttcccaaggccagcaatcattg

SEQ ID NO: 5723867 - DNA, 25 bp, Homo sapien
cagccctgattgccagtgggcggaa

SEQ ID NO: 5723868 - DNA, 25 bp, Homo sapien
tggcaagtgtttcctcaaaatcatc

SEQ ID NO: 5723869 - DNA, 25 bp, Homo sapien
gggcggtcccatgtgggcgttccca

SEQ ID NO: 5723870 - DNA, 25 bp, Homo sapien
tcccatgtgggcggtcctatgtggg

SEQ ID NO: 5723871 - DNA, 25 bp, Homo sapien
gcaaatatcgacatgtgatgtgtgt

SEQ ID NO: 5723872 - DNA, 25 bp, Homo sapien
gccccagtgctaggcctggtcctcc

SEQ ID NO: 5723873 - DNA, 25 bp, Homo sapien
cggtcccatgtgggcggtcccatgt

SEQ ID NO: 5723874 - DNA, 25 bp, Homo sapien
accataaaacttgtgccccacgatt

SEQ ID NO: 5723875 - DNA, 25 bp, Homo sapien
agtttcctacgttcatgatagcatt

SEQ ID NO: 5723876 - DNA, 25 bp, Homo sapien
aagcctcgcagttctgggtcaccag

SEQ ID NO: 5723877 - DNA, 25 bp, Homo sapien
caggaaagggcactcacaacaggcg

SEQ ID NO: 5723878 - DNA, 25 bp, Homo sapien
cgcttcaccactggaggacggttct

SEQ ID NO: 5723879 - DNA, 25 bp, Homo sapien
caatcctgggaccataaaacttgtg

SEQ ID NO: 5723880 - DNA, 25 bp, Homo sapien
ctggtccccgtggtccgagtggcac

SEQ ID NO: 5723881 - DNA, 25 bp, Homo sapien
gcctggaaactggctattcagatgg

SEQ ID NO: 5723882 - DNA, 25 bp, Homo sapien
aaggtataagctgagtcagggatga

SEQ ID NO: 5723883 - DNA, 25 bp, Homo sapien
tccacctcggccctggtggtgctgc

SEQ ID NO: 5723884 - DNA, 25 bp, Homo sapien
aaaatgactcctatgcaaatatcga

SEQ ID NO: 5723885 - DNA, 25 bp, Homo sapien
taaactttcctctccggcgagttgt

SEQ ID NO: 5723886 - DNA, 25 bp, Homo sapien
agtcatcctggcacagccctcagga

SEQ ID NO: 5723887 - DNA, 25 bp, Homo sapien
cgttcttgtccacctccaaatagca

SEQ ID NO: 5723888 - DNA, 25 bp, Homo sapien
aaattccgttcttgtccacctccaa

SEQ ID NO: 5723889 - DNA, 25 bp, Homo sapien
cattatagtccatataaactttcct

SEQ ID NO: 5723890 - DNA, 25 bp, Homo sapien
ggctttaatgcgctgactgatttca

SEQ ID NO: 5723891 - DNA, 25 bp, Homo sapien
cgctcaccttggacaccgggacaaa

SEQ ID NO: 5723892 - DNA, 25 bp, Homo sapien
atcttgaggtttcccccctatcatc

SEQ ID NO: 5723893 - DNA, 25 bp, Homo sapien
cttgaaccgtaaaaccacacattaa

SEQ ID NO: 5723894 - DNA, 25 bp, Homo sapien
ttttcgggcactgaaatcttttatt

SEQ ID NO: 5723895 - DNA, 25 bp, Homo sapien
cttcaccactggaggacggttctat

SEQ ID NO: 5723896 - DNA, 25 bp, Homo sapien
cctgaaattccgttcttgtccacct

SEQ ID NO: 5723897 - DNA, 25 bp, Homo sapien
ttcagatggattctcttctgaccga

SEQ ID NO: 5723898 - DNA, 25 bp, Homo sapien
accgtggacagggaagtgcgcagcc

SEQ ID NO: 5723899 - DNA, 25 bp, Homo sapien
tgcccgctcaccttggacaccggga

SEQ ID NO: 5723900 - DNA, 25 bp, Homo sapien
tggccagcatgatggtcacgaggcg

SEQ ID NO: 5723901 - DNA, 25 bp, Homo sapien
acgtccctcatgtgggcctcataag

SEQ ID NO: 5723902 - DNA, 25 bp, Homo sapien
ggacaaaggtgaccgctgccacttg

SEQ ID NO: 5723903 - DNA, 25 bp, Homo sapien
gtgggggcagctttggaaagggact

SEQ ID NO: 5723904 - DNA, 25 bp, Homo sapien
atgatggtcacgaggcgtgtggtcg

SEQ ID NO: 5723905 - DNA, 25 bp, Homo sapien
ggagcgcgttcctggccacgtcgaa

SEQ ID NO: 5723906 - DNA, 25 bp, Homo sapien
catggcctggataacttctggctcc

SEQ ID NO: 5723907 - DNA, 25 bp, Homo sapien
taggcctggtcctccagctgcgcca

SEQ ID NO: 5723908 - DNA, 25 bp, Homo sapien
cctccaaatagcatagggtagagag

SEQ ID NO: 5723909 - DNA, 25 bp, Homo sapien
ccgcgaggatgtcgtccacctctgt

SEQ ID NO: 5723910 - DNA, 25 bp, Homo sapien
gcctggataacttctggctccaggg

SEQ ID NO: 5723911 - DNA, 25 bp, Homo sapien
aggcatgacaatgccagtctcattg

SEQ ID NO: 5723912 - DNA, 25 bp, Homo sapien
ttaaggtataagctgagtcagggat

SEQ ID NO: 5723913 - DNA, 25 bp, Homo sapien
gtgctaggcctggtcctccagctgc

SEQ ID NO: 5723914 - DNA, 25 bp, Homo sapien
accaagtcctcgtatataaagtgcg

SEQ ID NO: 5723915 - DNA, 25 bp, Homo sapien
ccagttcccagtggggagggtggat

SEQ ID NO: 5723916 - DNA, 25 bp, Homo sapien
ttgtgccccacgattgtaaggaagt

SEQ ID NO: 5723917 - DNA, 25 bp, Homo sapien
tctggcaagtgtttcctcaaaatca

SEQ ID NO: 5723918 - DNA, 25 bp, Homo sapien
gatcaaaagggacaagacaggaagg

SEQ ID NO: 5723919 - DNA, 25 bp, Homo sapien
gcttcccagaagcggggtggggaag

SEQ ID NO: 5723920 - DNA, 25 bp, Homo sapien
tggtccgagtggcacgcggccccca

SEQ ID NO: 5723921 - DNA, 25 bp, Homo sapien
gctgcatttataatatccttggcct

SEQ ID NO: 5723922 - DNA, 25 bp, Homo sapien
tcaaaatcatcatgtagttccttga

SEQ ID NO: 5723923 - DNA, 25 bp, Homo sapien
ccaaggccagcaatcattggggtgt

SEQ ID NO: 5723924 - DNA, 25 bp, Homo sapien
cgacgaggtccacctcggccctggt

SEQ ID NO: 5723925 - DNA, 25 bp, Homo sapien
attcgttaatttagtttctggcaag

SEQ ID NO: 5723926 - DNA, 25 bp, Homo sapien
gggcgttcccatgtgggcggtccta

SEQ ID NO: 5723927 - DNA, 25 bp, Homo sapien
cggaacagggtcaggctcggggaag

SEQ ID NO: 5723928 - DNA, 25 bp, Homo sapien
gctttcccgagctgcatttataata

SEQ ID NO: 5723929 - DNA, 25 bp, Homo sapien
ccggaagtgaagattatatcttgag

SEQ ID NO: 5723930 - DNA, 25 bp, Homo sapien
cgtggacagggaagtgcgcagccct

SEQ ID NO: 5723931 - DNA, 25 bp, Homo sapien
cgttcctggccacgtcgaaggggac

SEQ ID NO: 5723932 - DNA, 25 bp, Homo sapien
tggggacggctggtccccgtggtcc

SEQ ID NO: 5723933 - DNA, 25 bp, Homo sapien
gctgctgggatttccccaggcttcc

SEQ ID NO: 5723934 - DNA, 25 bp, Homo sapien
ccagtgggcggaacagggtcaggct

SEQ ID NO: 5723935 - DNA, 25 bp, Homo sapien
gggcggactgccgcgaggatgtcgt

SEQ ID NO: 5723936 - DNA, 25 bp, Homo sapien
tgcatgtagaggccatgatcaaaac

SEQ ID NO: 5723937 - DNA, 25 bp, Homo sapien
cctggccgaggctgggggccactgt

SEQ ID NO: 5723938 - DNA, 25 bp, Homo sapien
cgaggcgtgtggtcgggcggactgc

SEQ ID NO: 5723939 - DNA, 25 bp, Homo sapien
gcggtcctatgcggcgttggtgtcc

SEQ ID NO: 5723940 - DNA, 25 bp, Homo sapien
gccctgattgccagtgggcggaaca

SEQ ID NO: 5723941 - DNA, 25 bp, Homo sapien
gttcatgatagcatttggctgacaa

SEQ ID NO: 5723942 - DNA, 25 bp, Homo sapien
ctcgtatataaagtgcgccaatcct

SEQ ID NO: 5723943 - DNA, 25 bp, Homo sapien
aggtattgggaagccgctgggtgcc

SEQ ID NO: 5723944 - DNA, 25 bp, Homo sapien
cagctccgcggccttcccaaggcca

SEQ ID NO: 5723945 - DNA, 25 bp, Homo sapien
ggggagtcgttgcattatagtccat

SEQ ID NO: 5723946 - DNA, 25 bp, Homo sapien
agtgtttccgcttcaccactggagg

SEQ ID NO: 5723947 - DNA, 25 bp, Homo sapien
ggacaggcatgacaatgccagtctc

SEQ ID NO: 5723948 - DNA, 25 bp, Homo sapien
tgctgaatacgggctgctgggattt

SEQ ID NO: 5723949 - DNA, 25 bp, Homo sapien
agggcactcacaacaggcgtgccca

SEQ ID NO: 5723950 - DNA, 25 bp, Homo sapien
tgcactgaggccagaggagcagggt

SEQ ID NO: 5723951 - DNA, 25 bp, Homo sapien
gggacaaccctgtgccctgccacgg

SEQ ID NO: 5723952 - DNA, 25 bp, Homo sapien
tcgggcggactgccgcgaggatgtc

SEQ ID NO: 5723953 - DNA, 25 bp, Homo sapien
gtctcattgttggccagcatgatgg

SEQ ID NO: 5723954 - DNA, 25 bp, Homo sapien
ggcctttcttcctgctgaatacggg

SEQ ID NO: 5723955 - DNA, 25 bp, Homo sapien
gtccctttgaggtctggtttgcgtg

SEQ ID NO: 5723956 - DNA, 25 bp, Homo sapien
ggtgggcgctgagcagagcaggcct

SEQ ID NO: 5723957 - DNA, 25 bp, Homo sapien
tctatgtgggcggtcccatgtgggc

SEQ ID NO: 5723958 - DNA, 25 bp, Homo sapien
ttggtgtcctgggccctgtgagctc

SEQ ID NO: 5723959 - DNA, 25 bp, Homo sapien
aaggaaactgggggtgcacactcgc

SEQ ID NO: 5723960 - DNA, 25 bp, Homo sapien
atatccttggcctttcttcctgctg

SEQ ID NO: 5723961 - DNA, 25 bp, Homo sapien
ccgtgtgcacgaggatgggaggtag

SEQ ID NO: 5723962 - DNA, 25 bp, Homo sapien
gatagcatttggctgacaatgagtt

SEQ ID NO: 5723963 - DNA, 25 bp, Homo sapien
tcgttaatttagtttctggcaagtg

SEQ ID NO: 5723964 - DNA, 25 bp, Homo sapien
catgtagttccttgaaccgtaaaac

SEQ ID NO: 5723965 - DNA, 25 bp, Homo sapien
tagttccttgaaccgtaaaaccaca

SEQ ID NO: 5723966 - DNA, 25 bp, Homo sapien
gtcctgcacgacgaggtccacctcg

SEQ ID NO: 5723967 - DNA, 25 bp, Homo sapien
tcatgatagcatttggctgacaatg

SEQ ID NO: 5723968 - DNA, 25 bp, Homo sapien
gcgtgtggtcgggcggactgccgcg

SEQ ID NO: 5723969 - DNA, 25 bp, Homo sapien
cctgtgagctctgcagggttccagg

SEQ ID NO: 5723970 - DNA, 25 bp, Homo sapien
gattactaaattatttgactcagtg

SEQ ID NO: 5723971 - DNA, 25 bp, Homo sapien
gcaagtgtttcctcaaaatcatcat

SEQ ID NO: 5723972 - DNA, 25 bp, Homo sapien
tggtcctccagctgcgccacggcct

SEQ ID NO: 5723973 - DNA, 25 bp, Homo sapien
gcatagggtagagaggggtaaattc

SEQ ID NO: 5723974 - DNA, 25 bp, Homo sapien
agggtggtgggggcagctttggaaa

SEQ ID NO: 5723975 - DNA, 25 bp, Homo sapien
aatacttggattctatcttccagat

SEQ ID NO: 5723976 - DNA, 25 bp, Homo sapien
tccagctgcgccacggcctgcttca

SEQ ID NO: 5723977 - DNA, 25 bp, Homo sapien
tgatccgattcccaccccaggaatg

SEQ ID NO: 5723978 - DNA, 25 bp, Homo sapien
gtccgagtggcacgcggcccccaca

SEQ ID NO: 5723979 - DNA, 25 bp, Homo sapien
cgggacaaaggtgaccgctgccact

SEQ ID NO: 5723980 - DNA, 25 bp, Homo sapien
ggagtcgttgcattatagtccatat

SEQ ID NO: 5723981 - DNA, 25 bp, Homo sapien
gcccagttcccagtggggagggtgg

SEQ ID NO: 5723982 - DNA, 25 bp, Homo sapien
atgggaggtagcccagctgccaccc

SEQ ID NO: 5723983 - DNA, 25 bp, Homo sapien
cacgacgaggtccacctcggccctg

SEQ ID NO: 5723984 - DNA, 25 bp, Homo sapien
tggcctggataacttctggctccag

SEQ ID NO: 5723985 - DNA, 25 bp, Homo sapien
cgcgaggctttcccgagctgcattt

SEQ ID NO: 5723986 - DNA, 25 bp, Homo sapien
gtgtgtccctttgaggtctggtttg

SEQ ID NO: 5723987 - DNA, 25 bp, Homo sapien
cctggccacgtcgaaggggacaccg

SEQ ID NO: 5723988 - DNA, 25 bp, Homo sapien
aaacaccttccaggaaagggcactc

SEQ ID NO: 5723989 - DNA, 25 bp, Homo sapien
ccatgtgggcgttcccatgtgggcg

SEQ ID NO: 5723990 - DNA, 25 bp, Homo sapien
cctgtgccctgccacgggcttccca

SEQ ID NO: 5723991 - DNA, 25 bp, Homo sapien
tccgcttcaccactggaggacggtt

SEQ ID NO: 5723992 - DNA, 25 bp, Homo sapien
ccagagcattttgagaaaagaatcc

SEQ ID NO: 5723993 - DNA, 25 bp, Homo sapien
ctgaatacgggctgctgggatttcc

SEQ ID NO: 5723994 - DNA, 25 bp, Homo sapien
tcagggctttaatgcgctgactgat

SEQ ID NO: 5723995 - DNA, 25 bp, Homo sapien
tgcgctgactgatttcagggacagg

SEQ ID NO: 5723996 - DNA, 25 bp, Homo sapien
ctgatttcagggacaggcatgacaa

SEQ ID NO: 5723997 - DNA, 25 bp, Homo sapien
aaaagggacaagacaggaaggcctg

SEQ ID NO: 5723998 - DNA, 25 bp, Homo sapien
ttggctgacaatgagttataaatac

SEQ ID NO: 5723999 - DNA, 25 bp, Homo sapien
ctcacaacaggcgtgcccagttccc

SEQ ID NO: 5724000 - DNA, 25 bp, Homo sapien
cactggccatcagcactcggcactg

SEQ ID NO: 5724001 - DNA, 25 bp, Homo sapien
gaggtagcccagctgccacccgttc

SEQ ID NO: 5724002 - DNA, 25 bp, Homo sapien
gacaaaatgcagagggggcatgaga

SEQ ID NO: 5724003 - DNA, 25 bp, Homo sapien
ctatgtgggcggttctatgtgggcg

SEQ ID NO: 5724004 - DNA, 25 bp, Homo sapien
cacgaggcgtgtggtcgggcggact

SEQ ID NO: 5724005 - DNA, 25 bp, Homo sapien
aaaaatgttattccactgaaaatga

SEQ ID NO: 5724006 - DNA, 25 bp, Homo sapien
ccatgtgggcggtcctatgtgggcg

SEQ ID NO: 5724007 - DNA, 25 bp, Homo sapien
gggtggggaaggcggccccagtgct

SEQ ID NO: 5724008 - DNA, 25 bp, Homo sapien
cgggcactgaaatcttttattcgtt

SEQ ID NO: 5724009 - DNA, 25 bp, Homo sapien
aactcagcgaggttggagctgaaac

SEQ ID NO: 5724010 - DNA, 25 bp, Homo sapien
ctatgcggcgttggtgtcctgggcc

SEQ ID NO: 5724011 - DNA, 25 bp, Homo sapien
caaatgccagagcattttgagaaaa

SEQ ID NO: 5724012 - DNA, 25 bp, Homo sapien
acaccttccaggaaagggcactcac

SEQ ID NO: 5724013 - DNA, 25 bp, Homo sapien
accgggacaaaggtgaccgctgcca

SEQ ID NO: 5724014 - DNA, 25 bp, Homo sapien
tggctattcagatggattctcttct

SEQ ID NO: 5724015 - DNA, 25 bp, Homo sapien
cagcagcactggggacggctggtcc

SEQ ID NO: 5724016 - DNA, 25 bp, Homo sapien
ggccatcagcactcggcactgcgca

SEQ ID NO: 5724017 - DNA, 25 bp, Homo sapien
gttccttgaaccgtaaaaccacaca

SEQ ID NO: 5724018 - DNA, 25 bp, Homo sapien
aagcaggaggggtggtgggcggtgg

SEQ ID NO: 5724019 - DNA, 25 bp, Homo sapien
tccagataaaaacaccttccaggaa

SEQ ID NO: 5724020 - DNA, 25 bp, Homo sapien
tcgaaggggacaccgtagctcagca

SEQ ID NO: 5724021 - DNA, 25 bp, Homo sapien
gaagattatatcttgaggtttcccc

SEQ ID NO: 5724022 - DNA, 25 bp, Homo sapien
acatgtgatgtgtgtccaaatgcca

SEQ ID NO: 5724023 - DNA, 25 bp, Homo sapien
ggttggagctgaaaccctgagttaa

SEQ ID NO: 5724024 - DNA, 25 bp, Homo sapien
ccaaggcctgtgcagcatccgtgtg

SEQ ID NO: 5724025 - DNA, 25 bp, Homo sapien
caccttggacaccgggacaaaggtg

SEQ ID NO: 5724026 - DNA, 25 bp, Homo sapien
tataaagtgcgccaatcctgggacc

SEQ ID NO: 5724027 - DNA, 25 bp, Homo sapien
ggtcaccagctccgcggccttccca

SEQ ID NO: 5724028 - DNA, 25 bp, Homo sapien
aatggattactaaattatttgactc

SEQ ID NO: 5724029 - DNA, 25 bp, Homo sapien
gccccacgattgtaaggaagtccac

SEQ ID NO: 5724030 - DNA, 25 bp, Homo sapien
caagtcctcgtatataaagtgcgcc

SEQ ID NO: 5724031 - DNA, 25 bp, Homo sapien
tagcatttggctgacaatgagttat

SEQ ID NO: 5724032 - DNA, 25 bp, Homo sapien
cctcataagcctcgcagttctgggt

SEQ ID NO: 5724033 - DNA, 25 bp, Homo sapien
gctaagtgtttccgcttcaccactg

SEQ ID NO: 5724034 - DNA, 25 bp, Homo sapien
gctgtggtgcccacctgtgtgtccc

SEQ ID NO: 5724035 - DNA, 25 bp, Homo sapien
tgtgtgtccaaatgccagagcattt

SEQ ID NO: 5724036 - DNA, 25 bp, Homo sapien
tgcaccaactcagcgaggttggagc

SEQ ID NO: 5724037 - DNA, 25 bp, Homo sapien
tcggcactgcgcaagcaccacgtgg

SEQ ID NO: 5724038 - DNA, 25 bp, Homo sapien
ttaaaaatgttattccactgaaaat

SEQ ID NO: 5724039 - DNA, 25 bp, Homo sapien
gggggcagctttggaaagggactaa

SEQ ID NO: 5724040 - DNA, 25 bp, Homo sapien
cggtcctatgtgggcggtcctatgt

SEQ ID NO: 5724041 - DNA, 25 bp, Homo sapien
gcaaataaaattaaggtataagctg

SEQ ID NO: 5724042 - DNA, 25 bp, Homo sapien
ggcctgaaattccgttcttgtccac

SEQ ID NO: 5724043 - DNA, 25 bp, Homo sapien
tggccacgtcgaaggggacaccgta

SEQ ID NO: 5724044 - DNA, 25 bp, Homo sapien
tgtgggcctcataagcctcgcagtt

SEQ ID NO: 5724045 - DNA, 25 bp, Homo sapien
cgtccacctctgtctgcccgctcac

SEQ ID NO: 5724046 - DNA, 25 bp, Homo sapien
ttgaggtctggtttgcgtggaaatg

SEQ ID NO: 5724047 - DNA, 25 bp, Homo sapien
gagttataaatacttggattctatc

SEQ ID NO: 5724048 - DNA, 25 bp, Homo sapien
ccacctgtgtgtccctttgaggtct

SEQ ID NO: 5724049 - DNA, 25 bp, Homo sapien
cgattgtaaggaagtccacgcccag

SEQ ID NO: 5724050 - DNA, 25 bp, Homo sapien
tccaggggagtcgttgcattatagt

SEQ ID NO: 5724051 - DNA, 25 bp, Homo sapien
cggtcccatgtgggcggtcctatgt

SEQ ID NO: 5724052 - DNA, 25 bp, Homo sapien
ccaggggcagccggatggagtcgtg

SEQ ID NO: 5724053 - DNA, 25 bp, Homo sapien
ggcactcacaacaggcgtgcccagt

SEQ ID NO: 5724054 - DNA, 25 bp, Homo sapien
ggtgcatgtagaggccatgatcaaa

SEQ ID NO: 5724055 - DNA, 25 bp, Homo sapien
tcccagaagcggggtggggaaggcg

SEQ ID NO: 5724056 - DNA, 25 bp, Homo sapien
cgacatgtgatgtgtgtccaaatgc

SEQ ID NO: 5724057 - DNA, 25 bp, Homo sapien
tctggtttgcgtggaaatgtttcac

SEQ ID NO: 5724058 - DNA, 25 bp, Homo sapien
ccaggacaaaatgcagagggggcat

SEQ ID NO: 5724059 - DNA, 25 bp, Homo sapien
cattgttggccagcatgatggtcac

SEQ ID NO: 5724060 - DNA, 25 bp, Homo sapien
gcctcgcagttctgggtcaccagct

SEQ ID NO: 5724061 - DNA, 25 bp, Homo sapien
gttcccatgtgggcggtcctatgcg

SEQ ID NO: 5724062 - DNA, 25 bp, Homo sapien
gggaagtgcgcagccctgattgcca

SEQ ID NO: 5724063 - DNA, 25 bp, Homo sapien
ggcggtcctatgtgggcggtcccat

SEQ ID NO: 5724064 - DNA, 25 bp, Homo sapien
caagacaggaaggcctggggaccgt

SEQ ID NO: 5724065 - DNA, 25 bp, Homo sapien
acgaggtccacctcggccctggtgg

SEQ ID NO: 5724066 - DNA, 25 bp, Homo sapien
tgagctctgcagggttccagggaag

SEQ ID NO: 5724067 - DNA, 25 bp, Homo sapien
gacggttctatgtgggcggtcccat

SEQ ID NO: 5724068 - DNA, 25 bp, Homo sapien
caagtttcctacgttcatgatagca

SEQ ID NO: 5724069 - DNA, 25 bp, Homo sapien
acagccctcaggagggaactggagg

SEQ ID NO: 5724070 - DNA, 25 bp, Homo sapien
ggcggtcccatgtgggcggtcccat

SEQ ID NO: 5724071 - DNA, 25 bp, Homo sapien
aaagaatcctctgcaaataaaatta

SEQ ID NO: 5724072 - DNA, 25 bp, Homo sapien
taaaaagggcccgagaagagaccac

SEQ ID NO: 5724073 - DNA, 25 bp, Homo sapien
tgaagccggggtccccggatggaaa

SEQ ID NO: 5724074 - DNA, 25 bp, Homo sapien
ggcactccaggacaaaatgcagagg

SEQ ID NO: 5724075 - DNA, 25 bp, Homo sapien
gctccgcggccttcccaaggccagc

SEQ ID NO: 5724076 - DNA, 25 bp, Homo sapien
ccagaggagcagggtggtgggggca

SEQ ID NO: 5724077 - DNA, 25 bp, Homo sapien
tctgggtcaccagctccgcggcctt

SEQ ID NO: 5724078 - DNA, 25 bp, Homo sapien
atagtccatataaactttcctctcc

SEQ ID NO: 5724079 - DNA, 25 bp, Homo sapien
ttattcgttaatttagtttctggca

SEQ ID NO: 5724080 - DNA, 25 bp, Homo sapien
accttccaggaaagggcactcacaa

SEQ ID NO: 5724081 - DNA, 25 bp, Homo sapien
gaggtctggtttgcgtggaaatgtt

SEQ ID NO: 5724082 - DNA, 25 bp, Homo sapien
cacaacaggcgtgcccagttcccag

SEQ ID NO: 5724083 - DNA, 25 bp, Homo sapien
gaggaagtaatgaaatggggcttgg

SEQ ID NO: 5724084 - DNA, 25 bp, Homo sapien
acctgtgtgtccctttgaggtctgg

SEQ ID NO: 5724085 - DNA, 25 bp, Homo sapien
atcatgtagttccttgaaccgtaaa

SEQ ID NO: 5724086 - DNA, 25 bp, Homo sapien
caggtcctccacatccacgcgctgc

SEQ ID NO: 5724087 - DNA, 25 bp, Homo sapien
tgtctgcccgctcaccttggacacc

SEQ ID NO: 5724088 - DNA, 25 bp, Homo sapien
cctctcttccaggtagtcgcggacg

SEQ ID NO: 5724089 - DNA, 25 bp, Homo sapien
tgtccacctccaaatagcatagggt

SEQ ID NO: 5724090 - DNA, 25 bp, Homo sapien
ttgttcttccaccaggtgctccagg

SEQ ID NO: 5724091 - DNA, 25 bp, Homo sapien
tcccccctatcatcttcgcgaggct

SEQ ID NO: 5724092 - DNA, 25 bp, Homo sapien
gggctgctgggatttccccaggctt

SEQ ID NO: 5724093 - DNA, 25 bp, Homo sapien
atcgacatgtgatgtgtgtccaaat

SEQ ID NO: 5724094 - DNA, 25 bp, Homo sapien
gtgtggtcgggcggactgccgcgag

SEQ ID NO: 5724095 - DNA, 25 bp, Homo sapien
cgtatataaagtgcgccaatcctgg

SEQ ID NO: 5724096 - DNA, 25 bp, Homo sapien
caatcattggggtgttctctgtccc

SEQ ID NO: 5724097 - DNA, 25 bp, Homo sapien
ggccagcaatcattggggtgttctc

SEQ ID NO: 5724098 - DNA, 25 bp, Homo sapien
gggcagctttggaaagggactaaaa

SEQ ID NO: 5724099 - DNA, 25 bp, Homo sapien
aggctcggggaagcaggaggggtgg

SEQ ID NO: 5724100 - DNA, 25 bp, Homo sapien
aaagttacaggtattgggaagccgc

SEQ ID NO: 5724101 - DNA, 25 bp, Homo sapien
atggagtcgtgttccaccgaggaag

SEQ ID NO: 5724102 - DNA, 25 bp, Homo sapien
ctcgctggcactccaggacaaaatg

SEQ ID NO: 5724103 - DNA, 25 bp, Homo sapien
cgcagccctgattgccagtgggcgg

SEQ ID NO: 5724104 - DNA, 25 bp, Homo sapien
tcctccacatccacgcgctgcttcc

SEQ ID NO: 5724105 - DNA, 25 bp, Homo sapien
cacgggcttcccagaagcggggtgg

SEQ ID NO: 5724106 - DNA, 25 bp, Homo sapien
taaaaacaccttccaggaaagggca

SEQ ID NO: 5724107 - DNA, 25 bp, Homo sapien
actggagggacaaccctgtgccctg

SEQ ID NO: 5724108 - DNA, 25 bp, Homo sapien
ggccctggtggtgctgcggcccacg

SEQ ID NO: 5724109 - DNA, 25 bp, Homo sapien
ctggaggacggttctatgtgggcgg

SEQ ID NO: 5724110 - DNA, 25 bp, Homo sapien
ggcactgaaatcttttattcgttaa

SEQ ID NO: 5724111 - DNA, 25 bp, Homo sapien
gtaatgaaatggggcttggccccct

SEQ ID NO: 5724112 - DNA, 25 bp, Homo sapien
acaaaggtgaccgctgccacttgtt

SEQ ID NO: 5724113 - DNA, 25 bp, Homo sapien
tggccttgaagccggggtccccgga

SEQ ID NO: 5724114 - DNA, 25 bp, Homo sapien
tgcgccacggcctgcttcaggtcct

SEQ ID NO: 5724115 - DNA, 25 bp, Homo sapien
tggggcttggcccccttcactgggc

SEQ ID NO: 5724116 - DNA, 25 bp, Homo sapien
tgggcggtcctatgtgggcggtcct

SEQ ID NO: 5724117 - DNA, 25 bp, Homo sapien
ttcctggttcagggctttaatgcgc

SEQ ID NO: 5724118 - DNA, 25 bp, Homo sapien
ccccttcactgggctgtggtgccca

SEQ ID NO: 5724119 - DNA, 25 bp, Homo sapien
ggataacttctggctccaggggagt

SEQ ID NO: 5724120 - DNA, 25 bp, Homo sapien
ccacggcctgcttcaggtcctgcac

SEQ ID NO: 5724121 - DNA, 25 bp, Homo sapien
aagccgctgggtgcctggaaactgg

SEQ ID NO: 5724122 - DNA, 25 bp, Homo sapien
gtgggcgttcccatgtgggcggtcc

SEQ ID NO: 5724123 - DNA, 25 bp, Homo sapien
aattatttgactcagtgcccccgga

SEQ ID NO: 5724124 - DNA, 25 bp, Homo sapien
cctggtcctccagctgcgccacggc

SEQ ID NO: 5724125 - DNA, 25 bp, Homo sapien
agctgaaaccctgagttaatgatca

SEQ ID NO: 5724126 - DNA, 25 bp, Homo sapien
gatgatccgattcccaccccaggaa

SEQ ID NO: 5724127 - DNA, 25 bp, Homo sapien
gtgcccacctgtgtgtccctttgag

SEQ ID NO: 5724128 - DNA, 25 bp, Homo sapien
ccactgtgcactgaggccagaggag

SEQ ID NO: 5724129 - DNA, 25 bp, Homo sapien
ctcattgttggccagcatgatggtc

SEQ ID NO: 5724130 - DNA, 25 bp, Homo sapien
cttggtcatggcctggataacttct

SEQ ID NO: 5724131 - DNA, 25 bp, Homo sapien
gcagggttccagggaaggaaactgg

SEQ ID NO: 5724132 - DNA, 25 bp, Homo sapien
gtgggcggttctatgtgggcggtcc

SEQ ID NO: 5724133 - DNA, 25 bp, Homo sapien
tggattctcttctgaccgaattcag

SEQ ID NO: 5724134 - DNA, 25 bp, Homo sapien
cactccaggacaaaatgcagagggg

SEQ ID NO: 5724135 - DNA, 25 bp, Homo sapien
tacttggattctatcttccagataa

SEQ ID NO: 5724136 - DNA, 25 bp, Homo sapien
gtttcctcaaaatcatcatgtagtt

SEQ ID NO: 5724137 - DNA, 25 bp, Homo sapien
cagtgctaggcctggtcctccagct

SEQ ID NO: 5724138 - DNA, 25 bp, Homo sapien
gggtaaattcaccaagtcctcgtat

SEQ ID NO: 5724139 - DNA, 25 bp, Homo sapien
aagtaatgaaatggggcttggcccc

SEQ ID NO: 5724140 - DNA, 25 bp, Homo sapien
tcttccaccaggtgctccaggggca

SEQ ID NO: 5724141 - DNA, 25 bp, Homo sapien
ttccccaggcttcccacatggcctt

SEQ ID NO: 5724142 - DNA, 25 bp, Homo sapien
gggctgtggtgcccacctgtgtgtc

SEQ ID NO: 5724143 - DNA, 25 bp, Homo sapien
aaaccacacattaaaaatgttattc

SEQ ID NO: 5724144 - DNA, 25 bp, Homo sapien
gtgtgcacgaggatgggaggtagcc

SEQ ID NO: 5724145 - DNA, 25 bp, Homo sapien
tgtttccgcttcaccactggaggac

SEQ ID NO: 5724146 - DNA, 25 bp, Homo sapien
tggccgaggctgggggccactgtgc

SEQ ID NO: 5724147 - DNA, 25 bp, Homo sapien
ggaaactggctattcagatggattc

SEQ ID NO: 5724148 - DNA, 25 bp, Homo sapien
cattttgagaaaagaatcctctgca

SEQ ID NO: 5724149 - DNA, 25 bp, Homo sapien
gcgccaatcctgggaccataaaact

SEQ ID NO: 5724150 - DNA, 25 bp, Homo sapien
cggcccacgctgagccggagcgcgt

SEQ ID NO: 5724151 - DNA, 25 bp, Homo sapien
gaggtccacctcggccctggtggtg

SEQ ID NO: 5724152 - DNA, 25 bp, Homo sapien
acaggcatgacaatgccagtctcat

SEQ ID NO: 5724153 - DNA, 25 bp, Homo sapien
tggtgcccacctgtgtgtccctttg

SEQ ID NO: 5724154 - DNA, 25 bp, Homo sapien
agccggatggagtcgtgttccaccg

SEQ ID NO: 5724155 - DNA, 25 bp, Homo sapien
cccacatggccttggtcatggcctg

SEQ ID NO: 5724156 - DNA, 25 bp, Homo sapien
atttgactcagtgcccccggaagtg

SEQ ID NO: 5724157 - DNA, 25 bp, Homo sapien
cagatggattctcttctgaccgaat

SEQ ID NO: 5724158 - DNA, 25 bp, Homo sapien
ggagctgaaaccctgagttaatgat

SEQ ID NO: 5724159 - DNA, 25 bp, Homo sapien
catggccttggtcatggcctggata

SEQ ID NO: 5724160 - DNA, 25 bp, Homo sapien
tataatatccttggcctttcttcct

SEQ ID NO: 5724161 - DNA, 25 bp, Homo sapien
tttctggcaagtgtttcctcaaaat

SEQ ID NO: 5724162 - DNA, 25 bp, Homo sapien
cgcgttcctggccacgtcgaagggg

SEQ ID NO: 5724163 - DNA, 25 bp, Homo sapien
tggaaaagttacaggtattgggaag

SEQ ID NO: 5724164 - DNA, 25 bp, Homo sapien
tcgtgttccaccgaggaagtaatga

SEQ ID NO: 5724165 - DNA, 25 bp, Homo sapien
cagctgcgccacggcctgcttcagg

SEQ ID NO: 5724166 - DNA, 25 bp, Homo sapien
gtgcacgaggatgggaggtagccca

SEQ ID NO: 5724167 - DNA, 25 bp, Homo sapien
ggaagtgaagattatatcttgaggt

SEQ ID NO: 5724168 - DNA, 25 bp, Homo sapien
agggtagagaggggtaaattcacca

SEQ ID NO: 5724169 - DNA, 25 bp, Homo sapien
atgcagagggggcatgagacagtca

SEQ ID NO: 5724170 - DNA, 25 bp, Homo sapien
agcattttgagaaaagaatcctctg

SEQ ID NO: 5724171 - DNA, 25 bp, Homo sapien
cctctccggcgagttgtgtttcccg

SEQ ID NO: 5724172 - DNA, 25 bp, Homo sapien
ctatcatcttcgcgaggctttcccg

SEQ ID NO: 5724173 - DNA, 25 bp, Homo sapien
actcggcactgcgcaagcaccacgt

SEQ ID NO: 5724174 - DNA, 25 bp, Homo sapien
tcaccaagtcctcgtatataaagtg

SEQ ID NO: 5724175 - DNA, 25 bp, Homo sapien
accacgtggccttgaagccggggtc

SEQ ID NO: 5724176 - DNA, 25 bp, Homo sapien
cagggatgatccgattcccacccca

SEQ ID NO: 5724177 - DNA, 25 bp, Homo sapien
cagcatgatggtcacgaggcgtgtg

SEQ ID NO: 5724178 - DNA, 25 bp, Homo sapien
ttcttgtccacctccaaatagcata

SEQ ID NO: 5724179 - DNA, 25 bp, Homo sapien
tccggcgagttgtgtttcccgcagc

SEQ ID NO: 5724180 - DNA, 25 bp, Homo sapien
tgtcctgggccctgtgagctctgca

SEQ ID NO: 5724181 - DNA, 25 bp, Homo sapien
ccgagctgcatttataatatccttg

SEQ ID NO: 5724182 - DNA, 25 bp, Homo sapien
aagtgaagattatatcttgaggttt

SEQ ID NO: 5724183 - DNA, 25 bp, Homo sapien
gggtgcctggaaactggctattcag

SEQ ID NO: 5724184 - DNA, 25 bp, Homo sapien
gaggccagaggagcagggtggtggg

SEQ ID NO: 5724185 - DNA, 25 bp, Homo sapien
ctcaggagggaactggagggacaac

SEQ ID NO: 5724186 - DNA, 25 bp, Homo sapien
ggtggtgggcggtgggcgctgagca

SEQ ID NO: 5724187 - DNA, 25 bp, Homo sapien
ctctgtccctggcctgaaattccgt

SEQ ID NO: 5724188 - DNA, 25 bp, Homo sapien
cgctgactgatttcagggacaggca

SEQ ID NO: 5724189 - DNA, 25 bp, Homo sapien
tggagggacaaccctgtgccctgcc

SEQ ID NO: 5724190 - DNA, 25 bp, Homo sapien
gtgaagattatatcttgaggtttcc

SEQ ID NO: 5724191 - DNA, 25 bp, Homo sapien
gtgctgcggcccacgctgagccgga

SEQ ID NO: 5724192 - DNA, 25 bp, Homo sapien
gagtggcacgcggcccccacactgg

SEQ ID NO: 5724193 - DNA, 25 bp, Homo sapien
tggccttggtcatggcctggataac

SEQ ID NO: 5724194 - DNA, 25 bp, Homo sapien
tgggcggtcccatgtgggcggtcct

SEQ ID NO: 5724195 - DNA, 25 bp, Homo sapien
ccaccaggtgctccaggggcagccg

SEQ ID NO: 5724196 - DNA, 25 bp, Homo sapien
gtggtcgggcggactgccgcgagga

SEQ ID NO: 5724197 - DNA, 25 bp, Homo sapien
aaaattaaggtataagctgagtcag

SEQ ID NO: 5724198 - DNA, 25 bp, Homo sapien
ccttggacaccgggacaaaggtgac

SEQ ID NO: 5724199 - DNA, 25 bp, Homo sapien
agattatatcttgaggtttcccccc

SEQ ID NO: 5724200 - DNA, 25 bp, Homo sapien
ggggccactgtgcactgaggccaga

SEQ ID NO: 5724201 - DNA, 25 bp, Homo sapien
caatgagttataaatacttggattc

SEQ ID NO: 5724202 - DNA, 25 bp, Homo sapien
gctcggggaagcaggaggggtggtg

SEQ ID NO: 5724203 - DNA, 25 bp, Homo sapien
tttcagggacaggcatgacaatgcc

SEQ ID NO: 5724204 - DNA, 25 bp, Homo sapien
ttccaggtagtcgcggacgtccctc

SEQ ID NO: 5724205 - DNA, 25 bp, Homo sapien
cactggggacggctggtccccgtgg

SEQ ID NO: 5724206 - DNA, 25 bp, Homo sapien
cagtggggagggtggataaagctaa

SEQ ID NO: 5724207 - DNA, 25 bp, Homo sapien
ccttggcctttcttcctgctgaata

SEQ ID NO: 5724208 - DNA, 25 bp, Homo sapien
ggcctggccgaggctgggggccact

SEQ ID NO: 5724209 - DNA, 25 bp, Homo sapien
gccttggtcatggcctggataactt

SEQ ID NO: 5724210 - DNA, 25 bp, Homo sapien
agggtggataaagctaagtgtttcc

SEQ ID NO: 5724211 - DNA, 25 bp, Homo sapien
cgaggctgggggccactgtgcactg

SEQ ID NO: 5724212 - DNA, 25 bp, Homo sapien
cacactcgctggcactccaggacaa

SEQ ID NO: 5724213 - DNA, 25 bp, Homo sapien
ccacatccacgcgctgcttccccaa

SEQ ID NO: 5724214 - DNA, 25 bp, Homo sapien
ccctggtggtgctgcggcccacgct

SEQ ID NO: 5724215 - DNA, 25 bp, Homo sapien
gtggggaaggcggccccagtgctag

SEQ ID NO: 5724216 - DNA, 25 bp, Homo sapien
cttcccaaggccagcaatcattggg

SEQ ID NO: 5724217 - DNA, 25 bp, Homo sapien
cacactggccatcagcactcggcac

SEQ ID NO: 5724218 - DNA, 25 bp, Homo sapien
gtgggcggtcctatgcggcgttggt

SEQ ID NO: 5724219 - DNA, 25 bp, Homo sapien
gcacagccctcaggagggaactgga

SEQ ID NO: 5724220 - DNA, 25 bp, Homo sapien
aggtgaccgctgccacttgttcttc

SEQ ID NO: 5724221 - DNA, 25 bp, Homo sapien
gcatgatggtcacgaggcgtgtggt

SEQ ID NO: 5724222 - DNA, 25 bp, Homo sapien
atgatcaaaagggacaagacaggaa

SEQ ID NO: 5724223 - DNA, 25 bp, Homo sapien
tgggcggaacagggtcaggctcggg

SEQ ID NO: 5724224 - DNA, 25 bp, Homo sapien
gttgtgtttcccgcagccgctgggc

SEQ ID NO: 5724225 - DNA, 25 bp, Homo sapien
gagggacaaccctgtgccctgccac

SEQ ID NO: 5724226 - DNA, 25 bp, Homo sapien
ccttcactgggctgtggtgcccacc

SEQ ID NO: 5724227 - DNA, 25 bp, Homo sapien
ggaaagggcactcacaacaggcgtg

SEQ ID NO: 5724228 - DNA, 25 bp, Homo sapien
tcgcggacgtccctcatgtgggcct

SEQ ID NO: 5724229 - DNA, 25 bp, Homo sapien
cgttcctggttcagggctttaatgc

SEQ ID NO: 5724230 - DNA, 25 bp, Homo sapien
tggtgggggcagctttggaaaggga

SEQ ID NO: 5724231 - DNA, 25 bp, Homo sapien
agctctgcagggttccagggaagga

SEQ ID NO: 5724232 - DNA, 25 bp, Homo sapien
aaagggcactcacaacaggcgtgcc

SEQ ID NO: 5724233 - DNA, 25 bp, Homo sapien
gactcagtgcccccggaagtgaaga

SEQ ID NO: 5724234 - DNA, 25 bp, Homo sapien
gttaatgatcaaaagggacaagaca

SEQ ID NO: 5724235 - DNA, 25 bp, Homo sapien
cctccagctgcgccacggcctgctt

SEQ ID NO: 5724236 - DNA, 25 bp, Homo sapien
gttgcattatagtccatataaactt

SEQ ID NO: 5724237 - DNA, 25 bp, Homo sapien
tctccggcgagttgtgtttcccgca

SEQ ID NO: 5724238 - DNA, 25 bp, Homo sapien
ttatttgactcagtgcccccggaag

SEQ ID NO: 5724239 - DNA, 25 bp, Homo sapien
agaggagcagggtggtgggggcagc

SEQ ID NO: 5724240 - DNA, 25 bp, Homo sapien
cacctctgtctgcccgctcaccttg

SEQ ID NO: 5724241 - DNA, 25 bp, Homo sapien
tgcagcatccgtgtgcacgaggatg

SEQ ID NO: 5724242 - DNA, 25 bp, Homo sapien
tggaaaggtgcatgtagaggccatg

SEQ ID NO: 5724243 - DNA, 25 bp, Homo sapien
ggagggtggataaagctaagtgttt

SEQ ID NO: 5724244 - DNA, 25 bp, Homo sapien
gggcggtcctatgtgggcggttcta

SEQ ID NO: 5724245 - DNA, 25 bp, Homo sapien
taagtgtttccgcttcaccactgga

SEQ ID NO: 5724246 - DNA, 25 bp, Homo sapien
gcggactgccgcgaggatgtcgtcc

SEQ ID NO: 5724247 - DNA, 25 bp, Homo sapien
ttcccacatggccttggtcatggcc

SEQ ID NO: 5724248 - DNA, 25 bp, Homo sapien
tgagacagtcatcctggcacagccc

SEQ ID NO: 5724249 - DNA, 25 bp, Homo sapien
gcgtggaaatgtttcaccacagaat

SEQ ID NO: 5724250 - DNA, 25 bp, Homo sapien
atgtgatgtgtgtccaaatgccaga

SEQ ID NO: 5724251 - DNA, 25 bp, Homo sapien
taaaaccacacattaaaaatgttat

SEQ ID NO: 5724252 - DNA, 25 bp, Homo sapien
ccgagtggcacgcggcccccacact

SEQ ID NO: 5724253 - DNA, 25 bp, Homo sapien
aaaaatcaagtttcctacgttcatg

SEQ ID NO: 5724254 - DNA, 25 bp, Homo sapien
ccgattcccaccccaggaatgaccc

SEQ ID NO: 5724255 - DNA, 25 bp, Homo sapien
agtcgtgttccaccgaggaagtaat

SEQ ID NO: 5724256 - DNA, 25 bp, Homo sapien
gaaaagaatcctctgcaaataaaat

SEQ ID NO: 5724257 - DNA, 25 bp, Homo sapien
atcctggcacagccctcaggaggga

SEQ ID NO: 5724258 - DNA, 25 bp, Homo sapien
ttccaccaggtgctccaggggcagc

SEQ ID NO: 5724259 - DNA, 25 bp, Homo sapien
gagcagagcaggcctggccgaggct

SEQ ID NO: 5724260 - DNA, 25 bp, Homo sapien
cattggggtgttctctgtccctggc

SEQ ID NO: 5724261 - DNA, 25 bp, Homo sapien
aaatgcagagggggcatgagacagt

SEQ ID NO: 5724262 - DNA, 25 bp, Homo sapien
tcccatgtgggcggtcctatgcggc

SEQ ID NO: 5724263 - DNA, 25 bp, Homo sapien
gctgccacttgttcttccaccaggt

SEQ ID NO: 5724264 - DNA, 25 bp, Homo sapien
ccacagaatggattactaaattatt

SEQ ID NO: 5724265 - DNA, 25 bp, Homo sapien
ataaaattaaggtataagctgagtc

SEQ ID NO: 5724266 - DNA, 25 bp, Homo sapien
gcttccccaaggcctgtgcagcatc

SEQ ID NO: 5724267 - DNA, 25 bp, Homo sapien
atgatcaaaacaaaaaaatcaagtt

SEQ ID NO: 5724268 - DNA, 25 bp, Homo sapien
ttcctgctgaatacgggctgctggg

SEQ ID NO: 5724269 - DNA, 25 bp, Homo sapien
actggctattcagatggattctctt

SEQ ID NO: 5724270 - DNA, 25 bp, Homo sapien
tagaggccatgatcaaaacaaaaaa

SEQ ID NO: 5724271 - DNA, 25 bp, Homo sapien
cacgtggccttgaagccggggtccc

SEQ ID NO: 5724272 - DNA, 25 bp, Homo sapien
ttgcgtggaaatgtttcaccacaga

SEQ ID NO: 5724273 - DNA, 25 bp, Homo sapien
caaccctgtgccctgccacgggctt

SEQ ID NO: 5724274 - DNA, 25 bp, Homo sapien
cctttcttcctgctgaatacgggct

SEQ ID NO: 5724275 - DNA, 25 bp, Homo sapien
ctcagcgaggttggagctgaaaccc

SEQ ID NO: 5724276 - DNA, 25 bp, Homo sapien
cagaagcggggtggggaaggcggcc

SEQ ID NO: 5724277 - DNA, 25 bp, Homo sapien
ccgaggaagtaatgaaatggggctt

SEQ ID NO: 5724278 - DNA, 25 bp, Homo sapien
ctctgcagggttccagggaaggaaa

SEQ ID NO: 5724279 - DNA, 25 bp, Homo sapien
tttcccgagctgcatttataatatc

SEQ ID NO: 5724280 - DNA, 25 bp, Homo sapien
tcctctgcaaataaaattaaggtat

SEQ ID NO: 5724281 - DNA, 25 bp, Homo sapien
gaaaccctgagttaatgatcaaaag

SEQ ID NO: 5724282 - DNA, 25 bp, Homo sapien
gcttcccacatggccttggtcatgg

SEQ ID NO: 5724283 - DNA, 25 bp, Homo sapien
gccacccgttcctggttcagggctt

SEQ ID NO: 5724284 - DNA, 25 bp, Homo sapien
cagtctcattgttggccagcatgat

SEQ ID NO: 5724285 - DNA, 25 bp, Homo sapien
ggaaatgtttcaccacagaatggat

SEQ ID NO: 5724286 - DNA, 25 bp, Homo sapien
gaaaagttacaggtattgggaagcc

SEQ ID NO: 5724287 - DNA, 25 bp, Homo sapien
ccctttgaggtctggtttgcgtgga

SEQ ID NO: 5724288 - DNA, 25 bp, Homo sapien
ccctcatgtgggcctcataagcctc

SEQ ID NO: 5724289 - DNA, 25 bp, Homo sapien
tggtcacgaggcgtgtggtcgggcg

SEQ ID NO: 5724290 - DNA, 25 bp, Homo sapien
cctggcacagccctcaggagggaac

SEQ ID NO: 5724291 - DNA, 25 bp, Homo sapien
ggtgttctctgtccctggcctgaaa

SEQ ID NO: 5724292 - DNA, 25 bp, Homo sapien
atcagcactcggcactgcgcaagca

SEQ ID NO: 5724293 - DNA, 25 bp, Homo sapien
aaattcaccaagtcctcgtatataa

SEQ ID NO: 5724294 - DNA, 25 bp, Homo sapien
ggtcctatgcggcgttggtgtcctg

SEQ ID NO: 5724295 - DNA, 25 bp, Homo sapien
gggacaccgtagctcagcagcactg

SEQ ID NO: 5724296 - DNA, 25 bp, Homo sapien
aatcctctgcaaataaaattaaggt

SEQ ID NO: 5724297 - DNA, 25 bp, Homo sapien
tgggcggtcctatgtgggcggtccc

SEQ ID NO: 5724298 - DNA, 25 bp, Homo sapien
accagctccgcggccttcccaaggc

SEQ ID NO: 5724299 - DNA, 25 bp, Homo sapien
tctgtctgcccgctcaccttggaca

SEQ ID NO: 5724300 - DNA, 25 bp, Homo sapien
tgctccaggggcagccggatggagt

SEQ ID NO: 5724301 - DNA, 25 bp, Homo sapien
agggcccgagaagagaccactctgg

SEQ ID NO: 5724302 - DNA, 25 bp, Homo sapien
tgggcggtcccatgtgggcggtccc

SEQ ID NO: 5724303 - DNA, 25 bp, Homo sapien
cgcccaggtcctccacatccacgcg

SEQ ID NO: 5724304 - DNA, 25 bp, Homo sapien
tgcacgacgaggtccacctcggccc

SEQ ID NO: 5724305 - DNA, 25 bp, Homo sapien
ggcctgtgcagcatccgtgtgcacg

SEQ ID NO: 5724306 - DNA, 25 bp, Homo sapien
ctgcaaataaaattaaggtataagc

SEQ ID NO: 5724307 - DNA, 25 bp, Homo sapien
tccaaatgccagagcattttgagaa

SEQ ID NO: 5724308 - DNA, 25 bp, Homo sapien
ggctggtccccgtggtccgagtggc

SEQ ID NO: 5724309 - DNA, 25 bp, Homo sapien
tctgcccgctcaccttggacaccgg

SEQ ID NO: 5724310 - DNA, 25 bp, Homo sapien
caccccaggaatgacccggagctgc

SEQ ID NO: 5724311 - DNA, 25 bp, Homo sapien
atccgattcccaccccaggaatgac

SEQ ID NO: 5724312 - DNA, 25 bp, Homo sapien
ctttcctctccggcgagttgtgttt

SEQ ID NO: 5724313 - DNA, 25 bp, Homo sapien
ccggtctacgaaggatattattact

SEQ ID NO: 5724314 - DNA, 25 bp, Homo sapien
agtaataatatccttcgtagaccgg

SEQ ID NO: 5724315 - DNA, 25 bp, Homo sapien
gtcccggtgcgttgtccgacgccga

SEQ ID NO: 5724316 - DNA, 25 bp, Homo sapien
tcggcgtcggacaacgcaccgggac

SEQ ID NO: 5724317 - DNA, 25 bp, Homo sapien
agtcattactgtacccacggcgaag

SEQ ID NO: 5724318 - DNA, 25 bp, Homo sapien
cttcgccgtgggtacagtaatgact

SEQ ID NO: 5724319 - DNA, 25 bp, Homo sapien
agaccaactcccgaggacgttgtgt

SEQ ID NO: 5724320 - DNA, 25 bp, Homo sapien
acacaacgtcctcgggagttggtct

SEQ ID NO: 5724321 - DNA, 25 bp, Homo sapien
tgtacgcacgggaaggacggacgag

SEQ ID NO: 5724322 - DNA, 25 bp, Homo sapien
ctcgtccgtccttcccgtgcgtaca

SEQ ID NO: 5724323 - DNA, 25 bp, Homo sapien
acgtcgtcgaccaggccgttcaggg

SEQ ID NO: 5724324 - DNA, 25 bp, Homo sapien
ccctgaacggcctggtcgacgacgt

SEQ ID NO: 5724325 - DNA, 25 bp, Homo sapien
acactcggcattttagcgtcgagtg

SEQ ID NO: 5724326 - DNA, 25 bp, Homo sapien
cactcgacgctaaaatgccgagtgt

SEQ ID NO: 5724327 - DNA, 25 bp, Homo sapien
actcgatactcgtattgacagtagt

SEQ ID NO: 5724328 - DNA, 25 bp, Homo sapien
actactgtcaatacgagtatcgagt

SEQ ID NO: 5724329 - DNA, 25 bp, Homo sapien
ccggcggctggtgcgttgccaacct

SEQ ID NO: 5724330 - DNA, 25 bp, Homo sapien
aggttggcaacgcaccagccgccgg

SEQ ID NO: 5724331 - DNA, 25 bp, Homo sapien
gacccggcggctggtgcgttgccaa

SEQ ID NO: 5724332 - DNA, 25 bp, Homo sapien
ttggcaacgcaccagccgccgggtc

SEQ ID NO: 5724333 - DNA, 25 bp, Homo sapien
cagtgccaccacatggtttagaggt

SEQ ID NO: 5724334 - DNA, 25 bp, Homo sapien
acctctaaaccatgtggtggcactg

SEQ ID NO: 5724335 - DNA, 25 bp, Homo sapien
gaagaggaaatttgaacccgaagag

SEQ ID NO: 5724336 - DNA, 25 bp, Homo sapien
ctcttcgggttcaaatttcctcttc

SEQ ID NO: 5724337 - DNA, 25 bp, Homo sapien
gcccgaggcggtgcgccactacctt

SEQ ID NO: 5724338 - DNA, 25 bp, Homo sapien
aaggtagtggcgcaccgcctcgggc

SEQ ID NO: 5724339 - DNA, 25 bp, Homo sapien
ggcctgtgcccgaggcggtgcgcca

SEQ ID NO: 5724340 - DNA, 25 bp, Homo sapien
tggcgcaccgcctcgggcacaggcc

SEQ ID NO: 5724341 - DNA, 25 bp, Homo sapien
cgactccgtcgtgacttagaaggta

SEQ ID NO: 5724342 - DNA, 25 bp, Homo sapien
taccttctaagtcacgacggagtcg

SEQ ID NO: 5724343 - DNA, 25 bp, Homo sapien
caatgggctacatattattcataac

SEQ ID NO: 5724344 - DNA, 25 bp, Homo sapien
gttatgaataatatgtagcccattg

SEQ ID NO: 5724345 - DNA, 25 bp, Homo sapien
ccctacacctgactgtgacagttag

SEQ ID NO: 5724346 - DNA, 25 bp, Homo sapien
ctaactgtcacagtcaggtgtaggg

SEQ ID NO: 5724347 - DNA, 25 bp, Homo sapien
gcatctgaggcctgggacctcgtac

SEQ ID NO: 5724348 - DNA, 25 bp, Homo sapien
gtacgaggtcccaggcctcagatgc

SEQ ID NO: 5724349 - DNA, 25 bp, Homo sapien
aaggtgtcggaggacaaatgagggt

SEQ ID NO: 5724350 - DNA, 25 bp, Homo sapien
accctcatttgtcctccgacacctt

SEQ ID NO: 5724351 - DNA, 25 bp, Homo sapien
tcttcgtctccctccacgcacacac

SEQ ID NO: 5724352 - DNA, 25 bp, Homo sapien
gtgtgtgcgtggagggagacgaaga

SEQ ID NO: 5724353 - DNA, 25 bp, Homo sapien
gtaatctccacggacaggaacttat

SEQ ID NO: 5724354 - DNA, 25 bp, Homo sapien
ataagttcctgtccgtggagattac

SEQ ID NO: 5724355 - DNA, 25 bp, Homo sapien
tactctcataaccaaaaggtaaaat

SEQ ID NO: 5724356 - DNA, 25 bp, Homo sapien
attttaccttttggttatgagagta

SEQ ID NO: 5724357 - DNA, 25 bp, Homo sapien
actccgggctcttcgtccgtcggtg

SEQ ID NO: 5724358 - DNA, 25 bp, Homo sapien
caccgacggacgaagagcccggagt

SEQ ID NO: 5724359 - DNA, 25 bp, Homo sapien
cctgtccgggggttgcctctacgac

SEQ ID NO: 5724360 - DNA, 25 bp, Homo sapien
gtcgtagaggcaacccccggacagg

SEQ ID NO: 5724361 - DNA, 25 bp, Homo sapien
ttaatatacgttttgtaaaacacaa

SEQ ID NO: 5724362 - DNA, 25 bp, Homo sapien
ttgtgttttacaaaacgtatattaa

SEQ ID NO: 5724363 - DNA, 25 bp, Homo sapien
tttaatatacgttttgtaaaacaca

SEQ ID NO: 5724364 - DNA, 25 bp, Homo sapien
tgtgttttacaaaacgtatattaaa

SEQ ID NO: 5724365 - DNA, 25 bp, Homo sapien
taatagaagttaccatgacaaaagt

SEQ ID NO: 5724366 - DNA, 25 bp, Homo sapien
acttttgtcatggtaacttctatta

SEQ ID NO: 5724367 - DNA, 25 bp, Homo sapien
gtgcggccgcggagtccaggcccgt

SEQ ID NO: 5724368 - DNA, 25 bp, Homo sapien
acgggcctggactccgcggccgcac

SEQ ID NO: 5724369 - DNA, 25 bp, Homo sapien
tacttgacgggagaggcgtcgtacg

SEQ ID NO: 5724370 - DNA, 25 bp, Homo sapien
cgtacgacgcctctcccgtcaagta

SEQ ID NO: 5724371 - DNA, 25 bp, Homo sapien
atatcctacttgtcgttcttcttgt

SEQ ID NO: 5724372 - DNA, 25 bp, Homo sapien
acaagaagaacgacaagtaggatat

SEQ ID NO: 5724373 - DNA, 25 bp, Homo sapien
caaccgtattgagttcagtctgaac

SEQ ID NO: 5724374 - DNA, 25 bp, Homo sapien
gttcagactgaactcaatacggttg

SEQ ID NO: 5724375 - DNA, 25 bp, Homo sapien
acttactacagagggtgcttcttac

SEQ ID NO: 5724376 - DNA, 25 bp, Homo sapien
gtaagaagcaccctctgtagtaagt

SEQ ID NO: 5724377 - DNA, 25 bp, Homo sapien
tcacccctgccgccaccggcccagt

SEQ ID NO: 5724378 - DNA, 25 bp, Homo sapien
actgggccggtggcggcaggggtga

SEQ ID NO: 5724379 - DNA, 25 bp, Homo sapien
gatcctcacccctgccgccaccggc

SEQ ID NO: 5724380 - DNA, 25 bp, Homo sapien
gccggtggcggcaggggtgaggatc

SEQ ID NO: 5724381 - DNA, 25 bp, Homo sapien
cgggacgggcagaggaagtggaccg

SEQ ID NO: 5724382 - DNA, 25 bp, Homo sapien
cggtccacttcctctgcccgtcccg

SEQ ID NO: 5724383 - DNA, 25 bp, Homo sapien
atttgttatccagatatcaagacag

SEQ ID NO: 5724384 - DNA, 25 bp, Homo sapien
ctgtcttgatatctggataacaaat

SEQ ID NO: 5724385 - DNA, 25 bp, Homo sapien
ctcatgtcctggttgttcgtcccag

SEQ ID NO: 5724386 - DNA, 25 bp, Homo sapien
ctgggacgaacaaccaggacatgag

SEQ ID NO: 5724387 - DNA, 25 bp, Homo sapien
ggacggagtagtgattgaaccaaag

SEQ ID NO: 5724388 - DNA, 25 bp, Homo sapien
ctttggttcaatcactactccgtcc

SEQ ID NO: 5724389 - DNA, 25 bp, Homo sapien
cagaaacgtccacgcccaccacttg

SEQ ID NO: 5724390 - DNA, 25 bp, Homo sapien
caagtggtgggcgtggacgtttctg

SEQ ID NO: 5724391 - DNA, 25 bp, Homo sapien
cgcggcccctgaccgagccccgcgc

SEQ ID NO: 5724392 - DNA, 25 bp, Homo sapien
gcgcggggctcggtcaggggccgcg

SEQ ID NO: 5724393 - DNA, 25 bp, Homo sapien
gcgcggcccctgaccgagccccgcg

SEQ ID NO: 5724394 - DNA, 25 bp, Homo sapien
cgcggggctcggtcaggggccgcgc

SEQ ID NO: 5724395 - DNA, 25 bp, Homo sapien
ggcccctgaccgagccccgcgcgac

SEQ ID NO: 5724396 - DNA, 25 bp, Homo sapien
gtcgcgcggggctcggtcaggggcc

SEQ ID NO: 5724397 - DNA, 25 bp, Homo sapien
cggcccctgaccgagccccgcgcga

SEQ ID NO: 5724398 - DNA, 25 bp, Homo sapien
tcgcgcggggctcggtcaggggccg

SEQ ID NO: 5724399 - DNA, 25 bp, Homo sapien
gtatgtgatcaaggtctaaatgtag

SEQ ID NO: 5724400 - DNA, 25 bp, Homo sapien
ctacatttagaccttgatcacatac

SEQ ID NO: 5724401 - DNA, 25 bp, Homo sapien
tgtctgaataaatactgtaaaagtt

SEQ ID NO: 5724402 - DNA, 25 bp, Homo sapien
aacttttacagtatttattcagaca

SEQ ID NO: 5724403 - DNA, 25 bp, Homo sapien
tttgtctgaataaatactgtaaaag

SEQ ID NO: 5724404 - DNA, 25 bp, Homo sapien
cttttacagtatttattcagacaaa

SEQ ID NO: 5724405 - DNA, 25 bp, Homo sapien
agacctggtaactgggacggttaga

SEQ ID NO: 5724406 - DNA, 25 bp, Homo sapien
tctaaccgtcccagttaccaggtct

SEQ ID NO: 5724407 - DNA, 25 bp, Homo sapien
ggaagacgggcgacggttagggcga

SEQ ID NO: 5724408 - DNA, 25 bp, Homo sapien
tcgccctaaccgtcgcccgtcttcc

SEQ ID NO: 5724409 - DNA, 25 bp, Homo sapien
gacgtcaacattggtgtggtgcgac

SEQ ID NO: 5724410 - DNA, 25 bp, Homo sapien
gtcgcaccacaccaatgttgacgtc

SEQ ID NO: 5724411 - DNA, 25 bp, Homo sapien
agggtatcttgtccctgacacggta

SEQ ID NO: 5724412 - DNA, 25 bp, Homo sapien
taccgtgtcagggacaagataccct

SEQ ID NO: 5724413 - DNA, 25 bp, Homo sapien
agatattatgatgaggacaaaagtg

SEQ ID NO: 5724414 - DNA, 25 bp, Homo sapien
cacttttgtcctcatcataatatct

SEQ ID NO: 5724415 - DNA, 25 bp, Homo sapien
acaaccattggtattgacagtgtgg

SEQ ID NO: 5724416 - DNA, 25 bp, Homo sapien
ccacactgtcaataccaatggttgt

SEQ ID NO: 5724417 - DNA, 25 bp, Homo sapien
ggactcctttgcacactgtgacctt

SEQ ID NO: 5724418 - DNA, 25 bp, Homo sapien
aaggtcacagtgtgcaaaggagtcc

SEQ ID NO: 5724419 - DNA, 25 bp, Homo sapien
cctcgtccccgaccgacacatgggg

SEQ ID NO: 5724420 - DNA, 25 bp, Homo sapien
ccccatgtgtcggtcggggacgagg

SEQ ID NO: 5724421 - DNA, 25 bp, Homo sapien
agacacgacggacttgacttcttta

SEQ ID NO: 5724422 - DNA, 25 bp, Homo sapien
taaagaagtcaagtccgtcgtgtct

SEQ ID NO: 5724423 - DNA, 25 bp, Homo sapien
gccatccccggcgccaggttcggct

SEQ ID NO: 5724424 - DNA, 25 bp, Homo sapien
agccgaacctggcgccggggatggc

SEQ ID NO: 5724425 - DNA, 25 bp, Homo sapien
cgagggtcgttcgataccaattcac

SEQ ID NO: 5724426 - DNA, 25 bp, Homo sapien
gtgaattggtatcgaacgaccctcg

SEQ ID NO: 5724427 - DNA, 25 bp, Homo sapien
tggagactatttccgaggacacacc

SEQ ID NO: 5724428 - DNA, 25 bp, Homo sapien
ggtgtgtcctcggaaatagtctcca

SEQ ID NO: 5724429 - DNA, 25 bp, Homo sapien
gtcgtgtcccgtcagccagtgggtc

SEQ ID NO: 5724430 - DNA, 25 bp, Homo sapien
gacccactggctgacgggacacgac

SEQ ID NO: 5724431 - DNA, 25 bp, Homo sapien
attttctcttgttgaataatgttct

SEQ ID NO: 5724432 - DNA, 25 bp, Homo sapien
agaacattattcaacaagagaaaat

SEQ ID NO: 5724433 - DNA, 25 bp, Homo sapien
taattttctcttgttgaataatgtt

SEQ ID NO: 5724434 - DNA, 25 bp, Homo sapien
aacattattcaacaagagaaaatta

SEQ ID NO: 5724435 - DNA, 25 bp, Homo sapien
gactcgtcactactacccatgtggt

SEQ ID NO: 5724436 - DNA, 25 bp, Homo sapien
accacatgggtagtagtgacgagtc

SEQ ID NO: 5724437 - DNA, 25 bp, Homo sapien
gggtgtgaccgacagggcctcagtg

SEQ ID NO: 5724438 - DNA, 25 bp, Homo sapien
cactgaggccctgtcggtcacaccc

SEQ ID NO: 5724439 - DNA, 25 bp, Homo sapien
aaagaaaatatgtcacacaacacga

SEQ ID NO: 5724440 - DNA, 25 bp, Homo sapien
tcgtgttgtgtgacatattttcttt

SEQ ID NO: 5724441 - DNA, 25 bp, Homo sapien
gaccactattggactagcaaagcat

SEQ ID NO: 5724442 - DNA, 25 bp, Homo sapien
atgctttgctagtccaatagtggtc

SEQ ID NO: 5724443 - DNA, 25 bp, Homo sapien
ttaccaatatctaaatgaattaggt

SEQ ID NO: 5724444 - DNA, 25 bp, Homo sapien
acctaattcatttagatattggtaa

SEQ ID NO: 5724445 - DNA, 25 bp, Homo sapien
ttttaccaatatctaaatgaattag

SEQ ID NO: 5724446 - DNA, 25 bp, Homo sapien
ctaattcatttagatattggtaaaa

SEQ ID NO: 5724447 - DNA, 25 bp, Homo sapien
gaggtactcggataacataaattaa

SEQ ID NO: 5724448 - DNA, 25 bp, Homo sapien
ttaatttatgttatccgagtacctc

SEQ ID NO: 5724449 - DNA, 25 bp, Homo sapien
acatctgcggacgtgtccaggggga

SEQ ID NO: 5724450 - DNA, 25 bp, Homo sapien
tccccctggacacgtccgcagatgt

SEQ ID NO: 5724451 - DNA, 25 bp, Homo sapien
tctttaccgtgtttctatggtcaaa

SEQ ID NO: 5724452 - DNA, 25 bp, Homo sapien
tttgaccatagaaacacggtaaaga

SEQ ID NO: 5724453 - DNA, 25 bp, Homo sapien
gacgacccggcccacggacacccaa

SEQ ID NO: 5724454 - DNA, 25 bp, Homo sapien
ttgggtgtccgtgggccgggtcgtc

SEQ ID NO: 5724455 - DNA, 25 bp, Homo sapien
gaggaagttatgtatctagtttaga

SEQ ID NO: 5724456 - DNA, 25 bp, Homo sapien
tctaaactagatacataacttcctc

SEQ ID NO: 5724457 - DNA, 25 bp, Homo sapien
cctgttagattatagtacgagcaag

SEQ ID NO: 5724458 - DNA, 25 bp, Homo sapien
cttgctcgtactataatctaacagg

SEQ ID NO: 5724459 - DNA, 25 bp, Homo sapien
tcgccgaggacacgggcgccggtgc

SEQ ID NO: 5724460 - DNA, 25 bp, Homo sapien
gcaccggcgcccgtgtcctcggcga

SEQ ID NO: 5724461 - DNA, 25 bp, Homo sapien
tacctcaagcgacatgtacttcggg

SEQ ID NO: 5724462 - DNA, 25 bp, Homo sapien
cccgaagtacatgtcgcttgaggta

SEQ ID NO: 5724463 - DNA, 25 bp, Homo sapien
caattggccagtaggtgtttataac

SEQ ID NO: 5724464 - DNA, 25 bp, Homo sapien
gttataaacacctactggccaattg

SEQ ID NO: 5724465 - DNA, 25 bp, Homo sapien
caccatgtgttcctcctgccgaagg

SEQ ID NO: 5724466 - DNA, 25 bp, Homo sapien
ccttcggcaggaggaacacatggtg

SEQ ID NO: 5724467 - DNA, 25 bp, Homo sapien
cgacttgcggttgaccaatcgacga

SEQ ID NO: 5724468 - DNA, 25 bp, Homo sapien
tcgtcgattggtcaaccgcaagtcg

SEQ ID NO: 5724469 - DNA, 25 bp, Homo sapien
gctgacgccttctgacgcgagccta

SEQ ID NO: 5724470 - DNA, 25 bp, Homo sapien
taggctcgcgtcagaaggcgtcagc

SEQ ID NO: 5724471 - DNA, 25 bp, Homo sapien
ccggtcctctccagacgggtaggtc

SEQ ID NO: 5724472 - DNA, 25 bp, Homo sapien
gacctacccgtctggagaggaccgg

SEQ ID NO: 5724473 - DNA, 25 bp, Homo sapien
agtaggtaggactaacattctcagt

SEQ ID NO: 5724474 - DNA, 25 bp, Homo sapien
actgagaatgttagtcctacctact

SEQ ID NO: 5724475 - DNA, 25 bp, Homo sapien
ctcactctagcttaacaaacctaag

SEQ ID NO: 5724476 - DNA, 25 bp, Homo sapien
cttaggtttgttaagctagagtgag

SEQ ID NO: 5724477 - DNA, 25 bp, Homo sapien
acgccccgactaggcggtctcggga

SEQ ID NO: 5724478 - DNA, 25 bp, Homo sapien
tcccgagaccgcctagtcggggcgt

SEQ ID NO: 5724479 - DNA, 25 bp, Homo sapien
gacggcccggaggttagagccgccg

SEQ ID NO: 5724480 - DNA, 25 bp, Homo sapien
cggcggctctaacctccgggccgtc

SEQ ID NO: 5724481 - DNA, 25 bp, Homo sapien
gcgtctcgactatgccggagctatg

SEQ ID NO: 5724482 - DNA, 25 bp, Homo sapien
catagctccggcatagtcgagacgc

SEQ ID NO: 5724483 - DNA, 25 bp, Homo sapien
cagacacagtcgaaacggatcgtca

SEQ ID NO: 5724484 - DNA, 25 bp, Homo sapien
tgacgatccgtttcgactgtgtctg

SEQ ID NO: 5724485 - DNA, 25 bp, Homo sapien
gcgtagcgtgtgcaggcaacggtgt

SEQ ID NO: 5724486 - DNA, 25 bp, Homo sapien
acaccgttgcctgcacacgctacgc

SEQ ID NO: 5724487 - DNA, 25 bp, Homo sapien
tccgtgaacgggttgctcggaccgg

SEQ ID NO: 5724488 - DNA, 25 bp, Homo sapien
ccggtccgagcaacccgttcacgga

SEQ ID NO: 5724489 - DNA, 25 bp, Homo sapien
gggtggttaccctttgagctcacag

SEQ ID NO: 5724490 - DNA, 25 bp, Homo sapien
ctgtgagctcaaagggtaaccaccc

SEQ ID NO: 5724491 - DNA, 25 bp, Homo sapien
ggcgtatcaaatgactcccagatct

SEQ ID NO: 5724492 - DNA, 25 bp, Homo sapien
agatctgggagtcatttgatacgcc

SEQ ID NO: 5724493 - DNA, 25 bp, Homo sapien
ttcttgagaccgggtatgacaagag

SEQ ID NO: 5724494 - DNA, 25 bp, Homo sapien
ctcttgtcatacccggtctcaagaa

SEQ ID NO: 5724495 - DNA, 25 bp, Homo sapien
agtcgtggcattgttggtttaagtt

SEQ ID NO: 5724496 - DNA, 25 bp, Homo sapien
aacttaaaccaacaatgccacgact

SEQ ID NO: 5724497 - DNA, 25 bp, Homo sapien
gtatagtgtctcttataaaatataa

SEQ ID NO: 5724498 - DNA, 25 bp, Homo sapien
ttatattttataagagacactatac

SEQ ID NO: 5724499 - DNA, 25 bp, Homo sapien
tgtatagtgtctcttataaaatata

SEQ ID NO: 5724500 - DNA, 25 bp, Homo sapien
tatattttataagagacactataca

SEQ ID NO: 5724501 - DNA, 25 bp, Homo sapien
ttgtatagtgtctcttataaaatat

SEQ ID NO: 5724502 - DNA, 25 bp, Homo sapien
atattttataagagacactatacaa

SEQ ID NO: 5724503 - DNA, 25 bp, Homo sapien
cagctgtggttgaccccacgccccg

SEQ ID NO: 5724504 - DNA, 25 bp, Homo sapien
cggggcgtggggtcaaccacagctg

SEQ ID NO: 5724505 - DNA, 25 bp, Homo sapien
ctccaaacctcccaatgtaacgagg

SEQ ID NO: 5724506 - DNA, 25 bp, Homo sapien
cctcgttacattgggaggtttggag

SEQ ID NO: 5724507 - DNA, 25 bp, Homo sapien
acccttcctgggttctagtcagttg

SEQ ID NO: 5724508 - DNA, 25 bp, Homo sapien
caactgactagaacccaggaagggt

SEQ ID NO: 5724509 - DNA, 25 bp, Homo sapien
aaccacggttagtcacaaacaggtg

SEQ ID NO: 5724510 - DNA, 25 bp, Homo sapien
cacctgtttgtgactaaccgtggtt

SEQ ID NO: 5724511 - DNA, 25 bp, Homo sapien
cctaagctccaaagggaatcttaat

SEQ ID NO: 5724512 - DNA, 25 bp, Homo sapien
ttaaattgttctgtgaggcacaggc

SEQ ID NO: 5724513 - DNA, 25 bp, Homo sapien
gctcagaaaagaattaggattctgc

SEQ ID NO: 5724514 - DNA, 25 bp, Homo sapien
cactgagtggagctcagaaaagaat

SEQ ID NO: 5724515 - DNA, 25 bp, Homo sapien
tcagttcccactgttggtttttata

SEQ ID NO: 5724516 - DNA, 25 bp, Homo sapien
acaggcattatacttaagcatgaac

SEQ ID NO: 5724517 - DNA, 25 bp, Homo sapien
aaaggccctcctgtggtcattctga

SEQ ID NO: 5724518 - DNA, 25 bp, Homo sapien
gctggacagtagagggtgcatatcc

SEQ ID NO: 5724519 - DNA, 25 bp, Homo sapien
catttcgttactacatttagtggac

SEQ ID NO: 5724520 - DNA, 25 bp, Homo sapien
tccagactcagttcccactgttggt

SEQ ID NO: 5724521 - DNA, 25 bp, Homo sapien
agcttttcctgctattcctaggtaa

SEQ ID NO: 5724522 - DNA, 25 bp, Homo sapien
attcctaggtaaaggccctcctgtg

SEQ ID NO: 5724523 - DNA, 25 bp, Homo sapien
agaattaggattctgcacacattta

SEQ ID NO: 5724524 - DNA, 25 bp, Homo sapien
acatttcgttactacatttagtgga

SEQ ID NO: 5724525 - DNA, 25 bp, Homo sapien
gaagcaattcatgcttactgggagg

SEQ ID NO: 5724526 - DNA, 25 bp, Homo sapien
caagcacaatagatttgtgatgaac

SEQ ID NO: 5724527 - DNA, 25 bp, Homo sapien
ctcccgccccccagtgactcgaggg

SEQ ID NO: 5724528 - DNA, 25 bp, Homo sapien
ccctcgagtcactggggggcgggag

SEQ ID NO: 5724529 - DNA, 25 bp, Homo sapien
cgaaggggcgcttcagaccgtaaga

SEQ ID NO: 5724530 - DNA, 25 bp, Homo sapien
tcttacggtctgaagcgccccttcg

SEQ ID NO: 5724531 - DNA, 25 bp, Homo sapien
tggtggtcctgggcatcgagccacc

SEQ ID NO: 5724532 - DNA, 25 bp, Homo sapien
ggtggctcgatgcccaggaccacca

SEQ ID NO: 5724533 - DNA, 25 bp, Homo sapien
gggagtcgacaaacttgtcaacggt

SEQ ID NO: 5724534 - DNA, 25 bp, Homo sapien
accgttgacaagtttgtcgactccc

SEQ ID NO: 5724535 - DNA, 25 bp, Homo sapien
acttggtatctacttcaatgtgtat

SEQ ID NO: 5724536 - DNA, 25 bp, Homo sapien
atacacattgaagtagataccaagt

SEQ ID NO: 5724537 - DNA, 25 bp, Homo sapien
ttcctagtaacagaattaaaagaag

SEQ ID NO: 5724538 - DNA, 25 bp, Homo sapien
cttcttttaattctgttactaggaa

SEQ ID NO: 5724539 - DNA, 25 bp, Homo sapien
aagagtgaagataacataaatagac

SEQ ID NO: 5724540 - DNA, 25 bp, Homo sapien
gtctatttatgttatcttcactctt

SEQ ID NO: 5724541 - DNA, 25 bp, Homo sapien
gtcactcataatactaaggaaatat

SEQ ID NO: 5724542 - DNA, 25 bp, Homo sapien
atatttccttagtattatgagtgac

SEQ ID NO: 5724543 - DNA, 25 bp, Homo sapien
gaagcggtggagatcgccggagggt

SEQ ID NO: 5724544 - DNA, 25 bp, Homo sapien
accctccggcgatctccaccgcttc

SEQ ID NO: 5724545 - DNA, 25 bp, Homo sapien
acatcagtaggcatgtgcaccgtag

SEQ ID NO: 5724546 - DNA, 25 bp, Homo sapien
ctacggtgcacatgcctactgatgt

SEQ ID NO: 5724547 - DNA, 25 bp, Homo sapien
caaaaacaactgtagtaggactcgt

SEQ ID NO: 5724548 - DNA, 25 bp, Homo sapien
acgagtcctactacagttgtttttg

SEQ ID NO: 5724549 - DNA, 25 bp, Homo sapien
ctcagtaacatgagatagaaacaat

SEQ ID NO: 5724550 - DNA, 25 bp, Homo sapien
attgtttctatctcatgttactgag

SEQ ID NO: 5724551 - DNA, 25 bp, Homo sapien
acaggaaggcgatgatgacgattgt

SEQ ID NO: 5724552 - DNA, 25 bp, Homo sapien
acaatcgtcatcatcgccttcctgt

SEQ ID NO: 5724553 - DNA, 25 bp, Homo sapien
gcggcgacgaccacgagcggagccg

SEQ ID NO: 5724554 - DNA, 25 bp, Homo sapien
cggctccgctcgtggtcgtcgccgc

SEQ ID NO: 5724555 - DNA, 25 bp, Homo sapien
cacaagcccgaagagagcgacggcg

SEQ ID NO: 5724556 - DNA, 25 bp, Homo sapien
cgccgtcgctctcttcgggcttgtg

SEQ ID NO: 5724557 - DNA, 25 bp, Homo sapien
ggcatcattagctggtttaaatctt

SEQ ID NO: 5724558 - DNA, 25 bp, Homo sapien
aagatttaaaccagctaatgatgcc

SEQ ID NO: 5724559 - DNA, 25 bp, Homo sapien
aaggagtgcacgttgtctctgtagt

SEQ ID NO: 5724560 - DNA, 25 bp, Homo sapien
actacagagacaacgtgcactcctt

SEQ ID NO: 5724561 - DNA, 25 bp, Homo sapien
gggttattccgttactcaggactct

SEQ ID NO: 5724562 - DNA, 25 bp, Homo sapien
agagtcctgagtaacggaataaccc

SEQ ID NO: 5724563 - DNA, 25 bp, Homo sapien
cacagttaccgaggctgaaggttcc

SEQ ID NO: 5724564 - DNA, 25 bp, Homo sapien
ggaaccttcagcctcggtaactgtg

SEQ ID NO: 5724565 - DNA, 25 bp, Homo sapien
tagaatccagttgtaaacactaaag

SEQ ID NO: 5724566 - DNA, 25 bp, Homo sapien
ctttagtgtttacaactggattcta

SEQ ID NO: 5724567 - DNA, 25 bp, Homo sapien
ccgttcatttgtaccgactagcata

SEQ ID NO: 5724568 - DNA, 25 bp, Homo sapien
tatgctagtcggtacaaatgaacgg

SEQ ID NO: 5724569 - DNA, 25 bp, Homo sapien
aagcttacttatgaaatttggttgt

SEQ ID NO: 5724570 - DNA, 25 bp, Homo sapien
acaaccaaatttcataagtaagctt

SEQ ID NO: 5724571 - DNA, 25 bp, Homo sapien
gaaaaatcgaacataggattgttaa

SEQ ID NO: 5724572 - DNA, 25 bp, Homo sapien
ttaacaatcctatgttcgatttttc

SEQ ID NO: 5724573 - DNA, 25 bp, Homo sapien
ccacccgtcgcggaggagagcggac

SEQ ID NO: 5724574 - DNA, 25 bp, Homo sapien
gtccgctctcctccgcgacgggtgg

SEQ ID NO: 5724575 - DNA, 25 bp, Homo sapien
agtacaccggggtgttagaccttgc

SEQ ID NO: 5724576 - DNA, 25 bp, Homo sapien
gcaaggtctaacaccccggtgtact

SEQ ID NO: 5724577 - DNA, 25 bp, Homo sapien
atgacaagggcgtttctatagaatt

SEQ ID NO: 5724578 - DNA, 25 bp, Homo sapien
aattctatagaaacgcccttgtcat

SEQ ID NO: 5724579 - DNA, 25 bp, Homo sapien
ttgtcttctttactttaaacaagta

SEQ ID NO: 5724580 - DNA, 25 bp, Homo sapien
tacttgtttaaagtaaagaagacaa

SEQ ID NO: 5724581 - DNA, 25 bp, Homo sapien
gaggcccgtagtcgccccgagggtc

SEQ ID NO: 5724582 - DNA, 25 bp, Homo sapien
gaccctcggggcgactacgggcctc

SEQ ID NO: 5724583 - DNA, 25 bp, Homo sapien
acagggacgacacaggcggacgtcc

SEQ ID NO: 5724584 - DNA, 25 bp, Homo sapien
ggacgtccgcctgtgtcgtccctgt

SEQ ID NO: 5724585 - DNA, 25 bp, Homo sapien
ggaaacccattgtcgacgtacctgt

SEQ ID NO: 5724586 - DNA, 25 bp, Homo sapien
acaggtacgtcgacaatgggtttcc

SEQ ID NO: 5724587 - DNA, 25 bp, Homo sapien
tggagtgagtgctcctcgccgacgc

SEQ ID NO: 5724588 - DNA, 25 bp, Homo sapien
gcgtcggcgaggagcactcactcca

SEQ ID NO: 5724589 - DNA, 25 bp, Homo sapien
tccggtccggactgttcctttcgag

SEQ ID NO: 5724590 - DNA, 25 bp, Homo sapien
ctcgaaaggaacagtccggaccgga

SEQ ID NO: 5724591 - DNA, 25 bp, Homo sapien
gcgcgacgtgttaccgccgagactt

SEQ ID NO: 5724592 - DNA, 25 bp, Homo sapien
aagtctcggcggtaacacgtcgcgc

SEQ ID NO: 5724593 - DNA, 25 bp, Homo sapien
cttgcagccgcgtccgcggttccga

SEQ ID NO: 5724594 - DNA, 25 bp, Homo sapien
tcggaaccgcggacgcggctgcaag

SEQ ID NO: 5724595 - DNA, 25 bp, Homo sapien
gacctttgggctacccgcacgccta

SEQ ID NO: 5724596 - DNA, 25 bp, Homo sapien
taggcgtgcgggtagcccaaaggtc

SEQ ID NO: 5724597 - DNA, 25 bp, Homo sapien
ccggttcgtgtgccagcgggggctc

SEQ ID NO: 5724598 - DNA, 25 bp, Homo sapien
gagcccccgctggcacacgaaccgg

SEQ ID NO: 5724599 - DNA, 25 bp, Homo sapien
tcagccggtctggacgtagggcgca

SEQ ID NO: 5724600 - DNA, 25 bp, Homo sapien
tgcgccctacgtccagaccggctga

SEQ ID NO: 5724601 - DNA, 25 bp, Homo sapien
cgtttaggcacgacaaagacgtgag

SEQ ID NO: 5724602 - DNA, 25 bp, Homo sapien
ctcacgtctttgtcgtgcctaaacg

SEQ ID NO: 5724603 - DNA, 25 bp, Homo sapien
gagggtcttccagggcaacctaggg

SEQ ID NO: 5724604 - DNA, 25 bp, Homo sapien
ccctaggttgccctggaagaccctc

SEQ ID NO: 5724605 - DNA, 25 bp, Homo sapien
tcgtgacgaggaaccccactctccg

SEQ ID NO: 5724606 - DNA, 25 bp, Homo sapien
cggagagtggggttcctcgtcacga

SEQ ID NO: 5724607 - DNA, 25 bp, Homo sapien
gataaagattaaggtactagtgatt

SEQ ID NO: 5724608 - DNA, 25 bp, Homo sapien
aatcactagtaccttaatctttatc

SEQ ID NO: 5724609 - DNA, 25 bp, Homo sapien
cagtggtgtatctactactcctcac

SEQ ID NO: 5724610 - DNA, 25 bp, Homo sapien
gtgaggagtagtagatacaccactg

SEQ ID NO: 5724611 - DNA, 25 bp, Homo sapien
tatacatacaccctcatacgtgtgg

SEQ ID NO: 5724612 - DNA, 25 bp, Homo sapien
ccacacgtatgagggtgtatgtata

SEQ ID NO: 5724613 - DNA, 25 bp, Homo sapien
tagacagtagactatcacagaaacg

SEQ ID NO: 5724614 - DNA, 25 bp, Homo sapien
cgtttctgtgatagtctactgtcta

SEQ ID NO: 5724615 - DNA, 25 bp, Homo sapien
acgtcacgggatgacaggtggtggg

SEQ ID NO: 5724616 - DNA, 25 bp, Homo sapien
cccaccacctgtcatcccgtgacgt

SEQ ID NO: 5724617 - DNA, 25 bp, Homo sapien
gattacagccttacaccgtgaaccg

SEQ ID NO: 5724618 - DNA, 25 bp, Homo sapien
cggttcacggtgtaaggctgtaatc

SEQ ID NO: 5724619 - DNA, 25 bp, Homo sapien
ctggaaggacgtccaagctccagag

SEQ ID NO: 5724620 - DNA, 25 bp, Homo sapien
ctctggagcttggacgtccttccag

SEQ ID NO: 5724621 - DNA, 25 bp, Homo sapien
tcgtcgggtcggtgccccaggcccc

SEQ ID NO: 5724622 - DNA, 25 bp, Homo sapien
ggggcctggggcaccgacccgacga

SEQ ID NO: 5724623 - DNA, 25 bp, Homo sapien
gtcgtcgggtcggtgccccaggccc

SEQ ID NO: 5724624 - DNA, 25 bp, Homo sapien
gggcctggggcaccgacccgacgac

SEQ ID NO: 5724625 - DNA, 25 bp, Homo sapien
gtcggtgccccaggccccggtggag

SEQ ID NO: 5724626 - DNA, 25 bp, Homo sapien
ctccaccggggcctggggcaccgac

SEQ ID NO: 5724627 - DNA, 25 bp, Homo sapien
caactaagtgttatccgagcacacg

SEQ ID NO: 5724628 - DNA, 25 bp, Homo sapien
cgtgtgctcggataacacttagttg

SEQ ID NO: 5724629 - DNA, 25 bp, Homo sapien
ttcacttctaaatggttcatgtaat

SEQ ID NO: 5724630 - DNA, 25 bp, Homo sapien
attacatgaaccatttagaagtgaa

SEQ ID NO: 5724631 - DNA, 25 bp, Homo sapien
gcaggaaaacgcctacactggcacc

SEQ ID NO: 5724632 - DNA, 25 bp, Homo sapien
ggtgccagtgtaggcgttttcctgc

SEQ ID NO: 5724633 - DNA, 25 bp, Homo sapien
acgaaacagaggctggagagaccga

SEQ ID NO: 5724634 - DNA, 25 bp, Homo sapien
tcggtctctccagcctctgtttcgt

SEQ ID NO: 5724635 - DNA, 25 bp, Homo sapien
actcccacgcgcaaagactgaagca

SEQ ID NO: 5724636 - DNA, 25 bp, Homo sapien
tgcttcagtctttgcgcgtgggagt

SEQ ID NO: 5724637 - DNA, 25 bp, Homo sapien
aacctttgaagtgacctcagggaag

SEQ ID NO: 5724638 - DNA, 25 bp, Homo sapien
cttccctgaggtcacttcaaaggtt

SEQ ID NO: 5724639 - DNA, 25 bp, Homo sapien
gcttcatttattaaactacgctcac

SEQ ID NO: 5724640 - DNA, 25 bp, Homo sapien
gtgagcgtagtttaataaatgaagc

SEQ ID NO: 5724641 - DNA, 25 bp, Homo sapien
acaagaacgtacctttgtagtctat

SEQ ID NO: 5724642 - DNA, 25 bp, Homo sapien
atagactacaaaggtacgttcttgt

SEQ ID NO: 5724643 - DNA, 25 bp, Homo sapien
ttttgacttgaatagaacttaaaag

SEQ ID NO: 5724644 - DNA, 25 bp, Homo sapien
cttttaagttctattcaagtcaaaa

SEQ ID NO: 5724645 - DNA, 25 bp, Homo sapien
gattcttctccatcgtgactttacc

SEQ ID NO: 5724646 - DNA, 25 bp, Homo sapien
ggtaaagtcacgatggagaagaatc

SEQ ID NO: 5724647 - DNA, 25 bp, Homo sapien
gggacgggacccgtgcggtccatgt

SEQ ID NO: 5724648 - DNA, 25 bp, Homo sapien
acatggaccgcacgggtcccgtccc

SEQ ID NO: 5724649 - DNA, 25 bp, Homo sapien
cgggtgggccgactgtcgcgggctc

SEQ ID NO: 5724650 - DNA, 25 bp, Homo sapien
gagcccgcgacagtcggcccacccg

SEQ ID NO: 5724651 - DNA, 25 bp, Homo sapien
ccacgccggtgtatccgtagattga

SEQ ID NO: 5724652 - DNA, 25 bp, Homo sapien
tcaatctacggatacaccggcgtgg

SEQ ID NO: 5724653 - DNA, 25 bp, Homo sapien
ccacctgacacgtccctccaacccg

SEQ ID NO: 5724654 - DNA, 25 bp, Homo sapien
cgggttggagggacgtgtcaggtgg

SEQ ID NO: 5724655 - DNA, 25 bp, Homo sapien
tcgtgcgaccggtgacgatgtaaac

SEQ ID NO: 5724656 - DNA, 25 bp, Homo sapien
gtttacatcgtcaccggtcgcacga

SEQ ID NO: 5724657 - DNA, 25 bp, Homo sapien
aaggcctactgcgacctgtcgaagt

SEQ ID NO: 5724658 - DNA, 25 bp, Homo sapien
acttcgacaggtcgcagtaggcctt

SEQ ID NO: 5724659 - DNA, 25 bp, Homo sapien
ggtcgcacgggagactcgacggaga

SEQ ID NO: 5724660 - DNA, 25 bp, Homo sapien
tctccgtcgagtctcccgtgcgacc

SEQ ID NO: 5724661 - DNA, 25 bp, Homo sapien
cctatttagtcgaattggtagtgtt

SEQ ID NO: 5724662 - DNA, 25 bp, Homo sapien
aacactaccaattcgactaaatagg

SEQ ID NO: 5724663 - DNA, 25 bp, Homo sapien
tcttaatattagaccttacaagaac

SEQ ID NO: 5724664 - DNA, 25 bp, Homo sapien
gttcttgtaaggtctaatattaaga

SEQ ID NO: 5724665 - DNA, 25 bp, Homo sapien
agatgacacatttcactggacgtat

SEQ ID NO: 5724666 - DNA, 25 bp, Homo sapien
atacgtccagtgaaatgtgtcatct

SEQ ID NO: 5724667 - DNA, 25 bp, Homo sapien
aactaggccggtacaagtcttcatg

SEQ ID NO: 5724668 - DNA, 25 bp, Homo sapien
catgaagacttgtaccggcctagtt

SEQ ID NO: 5724669 - DNA, 25 bp, Homo sapien
cggctagtcacgcatgactctgagt

SEQ ID NO: 5724670 - DNA, 25 bp, Homo sapien
actcagagtcatgcgtgactagccg

SEQ ID NO: 5724671 - DNA, 25 bp, Homo sapien
cggagcttcgcaaccgcagacgcag

SEQ ID NO: 5724672 - DNA, 25 bp, Homo sapien
ctgcgtctgcggttgcgaagctccg

SEQ ID NO: 5724673 - DNA, 25 bp, Homo sapien
acggaggcccacccactcccggcac

SEQ ID NO: 5724674 - DNA, 25 bp, Homo sapien
gtgccgggagtgggtgggcctccgt

SEQ ID NO: 5724675 - DNA, 25 bp, Homo sapien
gaatcggaaacgaagactacattaa

SEQ ID NO: 5724676 - DNA, 25 bp, Homo sapien
ttaatgtagtcttcgtttccgattc

SEQ ID NO: 5724677 - DNA, 25 bp, Homo sapien
cctccagcctcctcgttcgacaccg

SEQ ID NO: 5724678 - DNA, 25 bp, Homo sapien
cggtgtcgaacgaggaggctggagg

SEQ ID NO: 5724679 - DNA, 25 bp, Homo sapien
taccagtccgaaccagtgactcgag

SEQ ID NO: 5724680 - DNA, 25 bp, Homo sapien
ctcgagtcactggttcggactggta

SEQ ID NO: 5724681 - DNA, 25 bp, Homo sapien
ggggtgtgccacaagacgttcctcc

SEQ ID NO: 5724682 - DNA, 25 bp, Homo sapien
ggaggaacgtcttgtggcacacccc

SEQ ID NO: 5724683 - DNA, 25 bp, Homo sapien
accacagtgaccaaaagccctcagg

SEQ ID NO: 5724684 - DNA, 25 bp, Homo sapien
cctgagggcttttggtcactgtggt

SEQ ID NO: 5724685 - DNA, 25 bp, Homo sapien
agaaactaccatcttctacggtgag

SEQ ID NO: 5724686 - DNA, 25 bp, Homo sapien
ctcaccgtagaagatggtagtttct

SEQ ID NO: 5724687 - DNA, 25 bp, Homo sapien
gacttccgttctgaaagtcaccggg

SEQ ID NO: 5724688 - DNA, 25 bp, Homo sapien
cccggtgactttcagaacggaagtc

SEQ ID NO: 5724689 - DNA, 25 bp, Homo sapien
cgtctgggaccagcgaaacggtgtg

SEQ ID NO: 5724690 - DNA, 25 bp, Homo sapien
cacaccgtttcgctggtcccagacg

SEQ ID NO: 5724691 - DNA, 25 bp, Homo sapien
taaagaccgtcacaacattgaaacg

SEQ ID NO: 5724692 - DNA, 25 bp, Homo sapien
cgtttcaatgttgtgacggtcttta

SEQ ID NO: 5724693 - DNA, 25 bp, Homo sapien
gacgggtccgcgtccgggagccgag

SEQ ID NO: 5724694 - DNA, 25 bp, Homo sapien
ctcggctcccggacgcggacccgtc

SEQ ID NO: 5724695 - DNA, 25 bp, Homo sapien
gaagggataccgagacgtggtccct

SEQ ID NO: 5724696 - DNA, 25 bp, Homo sapien
agggaccacgtctcggtatcccttc

SEQ ID NO: 5724697 - DNA, 25 bp, Homo sapien
caatgaaagacttacatcaaataat

SEQ ID NO: 5724698 - DNA, 25 bp, Homo sapien
attatttgatgtaagtctttcattg

SEQ ID NO: 5724699 - DNA, 25 bp, Homo sapien
gaaccactcatcaatgaaagactta

SEQ ID NO: 5724700 - DNA, 25 bp, Homo sapien
taagtctttcattgatgagtggttc

SEQ ID NO: 5724701 - DNA, 25 bp, Homo sapien
ggcctgcttcaccccgctcccgccg

SEQ ID NO: 5724702 - DNA, 25 bp, Homo sapien
cggcgggagcggggtgaagcaggcc

SEQ ID NO: 5724703 - DNA, 25 bp, Homo sapien
gcgtcaggggtcaccggccggcccg

SEQ ID NO: 5724704 - DNA, 25 bp, Homo sapien
cgggccggccggtgacccctgacgc

SEQ ID NO: 5724705 - DNA, 25 bp, Homo sapien
ggttgaacattacttcacctcaaac

SEQ ID NO: 5724706 - DNA, 25 bp, Homo sapien
gtttgaggtgaagtaatgttcaacc

SEQ ID NO: 5724707 - DNA, 25 bp, Homo sapien
acactcatttctcaaatttagaatt

SEQ ID NO: 5724708 - DNA, 25 bp, Homo sapien
aattctaaatttgagaaatgagtgt

SEQ ID NO: 5724709 - DNA, 25 bp, Homo sapien
ggcacagacacgtgccgtcgtgcca

SEQ ID NO: 5724710 - DNA, 25 bp, Homo sapien
tggcacgacggcacgtgtctgtgcc

SEQ ID NO: 5724711 - DNA, 25 bp, Homo sapien
tcattaagacgagaagctccttacg

SEQ ID NO: 5724712 - DNA, 25 bp, Homo sapien
cgtaaggagcttctcgtcttaatga

SEQ ID NO: 5724713 - DNA, 25 bp, Homo sapien
agattgcataagaagagtgcataag

SEQ ID NO: 5724714 - DNA, 25 bp, Homo sapien
cttatgcactcttcttatgcaatct

SEQ ID NO: 5724715 - DNA, 25 bp, Homo sapien
gcctgtctttgtcccgggaggtcca

SEQ ID NO: 5724716 - DNA, 25 bp, Homo sapien
tggacctcccgggacaaagacaggc

SEQ ID NO: 5724717 - DNA, 25 bp, Homo sapien
tagtagtggaacgaggtacgttact

SEQ ID NO: 5724718 - DNA, 25 bp, Homo sapien
agtaacgtacctcgttccactacta

SEQ ID NO: 5724719 - DNA, 25 bp, Homo sapien
tatctctgtgctactaatttttata

SEQ ID NO: 5724720 - DNA, 25 bp, Homo sapien
tataaaaattagtagcacagagata

SEQ ID NO: 5724721 - DNA, 25 bp, Homo sapien
gtggaccaatacacccggtctccgt

SEQ ID NO: 5724722 - DNA, 25 bp, Homo sapien
acggagaccgggtgtattggtccac

SEQ ID NO: 5724723 - DNA, 25 bp, Homo sapien
cacaagcgactataaatgtttacag

SEQ ID NO: 5724724 - DNA, 25 bp, Homo sapien
ctgtaaacatttatagtcgcttgtg

SEQ ID NO: 5724725 - DNA, 25 bp, Homo sapien
tcgcgggtcttccacgagcgagagt

SEQ ID NO: 5724726 - DNA, 25 bp, Homo sapien
actctcgctcgtggaagacccgcga

SEQ ID NO: 5724727 - DNA, 25 bp, Homo sapien
aggaggttcgtcagggcgtcaccca

SEQ ID NO: 5724728 - DNA, 25 bp, Homo sapien
tgggtgacgccctgacgaacctcct

SEQ ID NO: 5724729 - DNA, 25 bp, Homo sapien
ccgaactgtcccttgatactagtaa

SEQ ID NO: 5724730 - DNA, 25 bp, Homo sapien
ttactagtatcaagggacagttcgg

SEQ ID NO: 5724731 - DNA, 25 bp, Homo sapien
cccagcgagggacgaagcggcggcg

SEQ ID NO: 5724732 - DNA, 25 bp, Homo sapien
cgccgccgcttcgtccctcgctggg

SEQ ID NO: 5724733 - DNA, 25 bp, Homo sapien
ccggccaccgccactccgaccgttg

SEQ ID NO: 5724734 - DNA, 25 bp, Homo sapien
caacggtcggagtggcggtggccgg

SEQ ID NO: 5724735 - DNA, 25 bp, Homo sapien
agccgcgggcgctgcccctgaccag

SEQ ID NO: 5724736 - DNA, 25 bp, Homo sapien
ctggtcaggggcagcgcccgcggct

SEQ ID NO: 5724737 - DNA, 25 bp, Homo sapien
tcgcagctcggtcggcagccgcggg

SEQ ID NO: 5724738 - DNA, 25 bp, Homo sapien
cccgcggctgccgaccgagctgcga

SEQ ID NO: 5724739 - DNA, 25 bp, Homo sapien
ccggttctccagtatctcaggtaag

SEQ ID NO: 5724740 - DNA, 25 bp, Homo sapien
cttacctgagatactggagaaccgg

SEQ ID NO: 5724741 - DNA, 25 bp, Homo sapien
cgcggagacggccccctcttcggac

SEQ ID NO: 5724742 - DNA, 25 bp, Homo sapien
gtccgaagagggggccgtctccgcg

SEQ ID NO: 5724743 - DNA, 25 bp, Homo sapien
aaggtatgactaaagggttagacca

SEQ ID NO: 5724744 - DNA, 25 bp, Homo sapien
tggtctaaccctttagtcatacctt

SEQ ID NO: 5724745 - DNA, 25 bp, Homo sapien
gtgtcgaaacagtctgaggagccgt

SEQ ID NO: 5724746 - DNA, 25 bp, Homo sapien
acggctcctcagactgtttcgacac

SEQ ID NO: 5724747 - DNA, 25 bp, Homo sapien
gtcaccgtcgccggtcgacagaccc

SEQ ID NO: 5724748 - DNA, 25 bp, Homo sapien
gggtctgtcgaccggcgacggtgac

SEQ ID NO: 5724749 - DNA, 25 bp, Homo sapien
cttcttgtattctaggagacataag

SEQ ID NO: 5724750 - DNA, 25 bp, Homo sapien
cttatgtctcctagaatacaagaag

SEQ ID NO: 5724751 - DNA, 25 bp, Homo sapien
agggacctgaggacgcctaggtacc

SEQ ID NO: 5724752 - DNA, 25 bp, Homo sapien
ggtacctaggcgtcctcaggtccct

SEQ ID NO: 5724753 - DNA, 25 bp, Homo sapien
gacgactcgtcggtccctgtcgggg

SEQ ID NO: 5724754 - DNA, 25 bp, Homo sapien
ccccgacagggaccgacgagtcgtc

SEQ ID NO: 5724755 - DNA, 25 bp, Homo sapien
gtcgacctccgctggtcgcggcccg

SEQ ID NO: 5724756 - DNA, 25 bp, Homo sapien
cgggccgcgaccagcggaggtcgac

SEQ ID NO: 5724757 - DNA, 25 bp, Homo sapien
ggtccggccggcgagtgttggctcg

SEQ ID NO: 5724758 - DNA, 25 bp, Homo sapien
cgagccaacactcgccggccggacc

SEQ ID NO: 5724759 - DNA, 25 bp, Homo sapien
cgccgcgcccgaccgccaccgaggt

SEQ ID NO: 5724760 - DNA, 25 bp, Homo sapien
acctcggtggcggtcgggcgcggcg

SEQ ID NO: 5724761 - DNA, 25 bp, Homo sapien
cccgacgcccgtccaccgccgcgcc

SEQ ID NO: 5724762 - DNA, 25 bp, Homo sapien
ggcgcggcggtggacgggcgtcggg

SEQ ID NO: 5724763 - DNA, 25 bp, Homo sapien
gtcgagagtttatatcctacagaat

SEQ ID NO: 5724764 - DNA, 25 bp, Homo sapien
attctgtaggatataaactctcgac

SEQ ID NO: 5724765 - DNA, 25 bp, Homo sapien
tccctctcgtccgagccgcggcgcc

SEQ ID NO: 5724766 - DNA, 25 bp, Homo sapien
ggcgccgcggctcggacgagaggga

SEQ ID NO: 5724767 - DNA, 25 bp, Homo sapien
ggtctgagtctacgtaattatcaat

SEQ ID NO: 5724768 - DNA, 25 bp, Homo sapien
attgataattacgtagactcagacc

SEQ ID NO: 5724769 - DNA, 25 bp, Homo sapien
cccaggacgtcgtctacgtcgtcca

SEQ ID NO: 5724770 - DNA, 25 bp, Homo sapien
tggacgacgtagacgacgtcctggg

SEQ ID NO: 5724771 - DNA, 25 bp, Homo sapien
cccagggtaccatccatcaagatac

SEQ ID NO: 5724772 - DNA, 25 bp, Homo sapien
gtatcttgatggatggtaccctggg

SEQ ID NO: 5724773 - DNA, 25 bp, Homo sapien
gtacccgcccatggccctgagtctc

SEQ ID NO: 5724774 - DNA, 25 bp, Homo sapien
gagactcagggccatgggcgggtac

SEQ ID NO: 5724775 - DNA, 25 bp, Homo sapien
caccgtactacaccagcaagttggg

SEQ ID NO: 5724776 - DNA, 25 bp, Homo sapien
cccaacttgctggtgtagtacggtg

SEQ ID NO: 5724777 - DNA, 25 bp, Homo sapien
gacacgggccggagcctcggcgacc

SEQ ID NO: 5724778 - DNA, 25 bp, Homo sapien
ggtcgccgaggctccggcccgtgtc

SEQ ID NO: 5724779 - DNA, 25 bp, Homo sapien
gagcctcggcgaccgtccgcagggg

SEQ ID NO: 5724780 - DNA, 25 bp, Homo sapien
cccctgcggacggtcgccgaggctc

SEQ ID NO: 5724781 - DNA, 25 bp, Homo sapien
gatatactcgacactgaacatttta

SEQ ID NO: 5724782 - DNA, 25 bp, Homo sapien
taaaatgttcagtgtcgagtatatc

SEQ ID NO: 5724783 - DNA, 25 bp, Homo sapien
ttctaaatctaattgacctgttcta

SEQ ID NO: 5724784 - DNA, 25 bp, Homo sapien
tagaacaggtcaattagatttagaa

SEQ ID NO: 5724785 - DNA, 25 bp, Homo sapien
aagatgtaagtagtttcattcttta

SEQ ID NO: 5724786 - DNA, 25 bp, Homo sapien
taaagaatgaaactacttacatctt

SEQ ID NO: 5724787 - DNA, 25 bp, Homo sapien
gaaggcaaccatctcgaaagagtgt

SEQ ID NO: 5724788 - DNA, 25 bp, Homo sapien
acactctttcgagatggttgccttc

SEQ ID NO: 5724789 - DNA, 25 bp, Homo sapien
aacagaaatctcccgtcaaagtcga

SEQ ID NO: 5724790 - DNA, 25 bp, Homo sapien
tcgactttgacgggagatttctgtt

SEQ ID NO: 5724791 - DNA, 25 bp, Homo sapien
aactttaaactcttggacattagac

SEQ ID NO: 5724792 - DNA, 25 bp, Homo sapien
gtctaatgtccaagagtttaaagtt

SEQ ID NO: 5724793 - DNA, 25 bp, Homo sapien
cgtccagacccgcactctacggggt

SEQ ID NO: 5724794 - DNA, 25 bp, Homo sapien
accccgtagagtgcgggtctggacg

SEQ ID NO: 5724795 - DNA, 25 bp, Homo sapien
gaaaaattggtttattactagatat

SEQ ID NO: 5724796 - DNA, 25 bp, Homo sapien
atatctagtaataaaccaatttttc

SEQ ID NO: 5724797 - DNA, 25 bp, Homo sapien
caggcagttcgcctcctggacgaca

SEQ ID NO: 5724798 - DNA, 25 bp, Homo sapien
tgtcgtccaggaggcgaactgcctg

SEQ ID NO: 5724799 - DNA, 25 bp, Homo sapien
cttccttaatccacattataagacg

SEQ ID NO: 5724800 - DNA, 25 bp, Homo sapien
cgtcttataatgtggattaaggaag

SEQ ID NO: 5724801 - DNA, 25 bp, Homo sapien
agtccatccacgtccccacaccccc

SEQ ID NO: 5724802 - DNA, 25 bp, Homo sapien
gggggtgtggggacgtggatggact

SEQ ID NO: 5724803 - DNA, 25 bp, Homo sapien
ccatcgcgcggcgagctaccccccc

SEQ ID NO: 5724804 - DNA, 25 bp, Homo sapien
gggggggtagctcgccgcgcgatgg

SEQ ID NO: 5724805 - DNA, 25 bp, Homo sapien
ctcgacctccatcgcgcggcgagct

SEQ ID NO: 5724806 - DNA, 25 bp, Homo sapien
agctcgccgcgcgatggaggtcgag

SEQ ID NO: 5724807 - DNA, 25 bp, Homo sapien
atcgcgcggcgagctacccccccgc

SEQ ID NO: 5724808 - DNA, 25 bp, Homo sapien
gcgggggggtagctcgccgcgcgat

SEQ ID NO: 5724809 - DNA, 25 bp, Homo sapien
cgaccaccggatagcatatgatccc

SEQ ID NO: 5724810 - DNA, 25 bp, Homo sapien
gggatcatatgctatccggtggtcg

SEQ ID NO: 5724811 - DNA, 25 bp, Homo sapien
tgggtacgaaccaacggagaacacc

SEQ ID NO: 5724812 - DNA, 25 bp, Homo sapien
ggtgttctccgttggttcgtaccca

SEQ ID NO: 5724813 - DNA, 25 bp, Homo sapien
gaggacttccgaacgggccgcccca

SEQ ID NO: 5724814 - DNA, 25 bp, Homo sapien
tggggcggcccgttcggaagtcctc

SEQ ID NO: 5724815 - DNA, 25 bp, Homo sapien
gggaccccctcgctccggacgcgcg

SEQ ID NO: 5724816 - DNA, 25 bp, Homo sapien
cgcgcgtccggagcgagggggtccc

SEQ ID NO: 5724817 - DNA, 25 bp, Homo sapien
cgggaccccctcgctccggacgcgc

SEQ ID NO: 5724818 - DNA, 25 bp, Homo sapien
gcgcgtccggagcgagggggtcccg

SEQ ID NO: 5724819 - DNA, 25 bp, Homo sapien
tcatcgagagcgtcagaggtgtaag

SEQ ID NO: 5724820 - DNA, 25 bp, Homo sapien
cttacacctctgacgctctcgatga

SEQ ID NO: 5724821 - DNA, 25 bp, Homo sapien
gcgtcgcggacctacacgaagataa

SEQ ID NO: 5724822 - DNA, 25 bp, Homo sapien
ttatcttcgtgtaggtccgcgacgc

SEQ ID NO: 5724823 - DNA, 25 bp, Homo sapien
ttttgaacattagtcacttattctt

SEQ ID NO: 5724824 - DNA, 25 bp, Homo sapien
aagaataagtgactaatgttcaaaa

SEQ ID NO: 5724825 - DNA, 25 bp, Homo sapien
ttaattcaggaaacacaaaacatat

SEQ ID NO: 5724826 - DNA, 25 bp, Homo sapien
atatgttttgtgtttcctgaattaa

SEQ ID NO: 5724827 - DNA, 25 bp, Homo sapien
ctccacgccaggagcggttgcgcag

SEQ ID NO: 5724828 - DNA, 25 bp, Homo sapien
ctgcgcaaccgctcctggcgtggag

SEQ ID NO: 5724829 - DNA, 25 bp, Homo sapien
gtagtccctacagcctcgcaaagcg

SEQ ID NO: 5724830 - DNA, 25 bp, Homo sapien
cgctttgcgaggctgtagggactac

SEQ ID NO: 5724831 - DNA, 25 bp, Homo sapien
tcctgtggttgtcgccgaagtcacc

SEQ ID NO: 5724832 - DNA, 25 bp, Homo sapien
ggtgacttcggcgacaaccacagga

SEQ ID NO: 5724833 - DNA, 25 bp, Homo sapien
agcgttcctgtggttgtcgccgaag

SEQ ID NO: 5724834 - DNA, 25 bp, Homo sapien
cttcggcgacaaccacaggaacgct

SEQ ID NO: 5724835 - DNA, 25 bp, Homo sapien
gagggagcgtccccggcctcgggcc

SEQ ID NO: 5724836 - DNA, 25 bp, Homo sapien
ggcccgaggccggggacgctccctc

SEQ ID NO: 5724837 - DNA, 25 bp, Homo sapien
aactttatagatcatactactgtcg

SEQ ID NO: 5724838 - DNA, 25 bp, Homo sapien
cgacagtagtatgatctataaagtt

SEQ ID NO: 5724839 - DNA, 25 bp, Homo sapien
gtcagggacacttgccgagacttgt

SEQ ID NO: 5724840 - DNA, 25 bp, Homo sapien
acaagtctcggcaagtgtccctgac

SEQ ID NO: 5724841 - DNA, 25 bp, Homo sapien
aagagtctttgcaggtgtagaaggt

SEQ ID NO: 5724842 - DNA, 25 bp, Homo sapien
accttctacacctgcaaagactctt

SEQ ID NO: 5724843 - DNA, 25 bp, Homo sapien
cactattggaactgtgaccgatgac

SEQ ID NO: 5724844 - DNA, 25 bp, Homo sapien
gtcatcggtcacagttccaatagtg

SEQ ID NO: 5724845 - DNA, 25 bp, Homo sapien
gacgtctctaaacgaatcgtgtccg

SEQ ID NO: 5724846 - DNA, 25 bp, Homo sapien
cggacacgattcgtttagagacgtc

SEQ ID NO: 5724847 - DNA, 25 bp, Homo sapien
cgccgacgggcctcccctagcgccc

SEQ ID NO: 5724848 - DNA, 25 bp, Homo sapien
gggcgctaggggaggcccgtcggcg

SEQ ID NO: 5724849 - DNA, 25 bp, Homo sapien
cgacgggcctcccctagcgcccgga

SEQ ID NO: 5724850 - DNA, 25 bp, Homo sapien
tccgggcgctaggggaggcccgtcg

SEQ ID NO: 5724851 - DNA, 25 bp, Homo sapien
gccgacgggcctcccctagcgcccg

SEQ ID NO: 5724852 - DNA, 25 bp, Homo sapien
cgggcgctaggggaggcccgtcggc

SEQ ID NO: 5724853 - DNA, 25 bp, Homo sapien
tgatagtagtagtccgtagttgtgg

SEQ ID NO: 5724854 - DNA, 25 bp, Homo sapien
ccacaactacggactactactatca

SEQ ID NO: 5724855 - DNA, 25 bp, Homo sapien
ctactcgaagtagtatgtgagacac

SEQ ID NO: 5724856 - DNA, 25 bp, Homo sapien
gtgtctcacatactacttcgagtag

SEQ ID NO: 5724857 - DNA, 25 bp, Homo sapien
acatctctactacgaaggcgctcaa

SEQ ID NO: 5724858 - DNA, 25 bp, Homo sapien
ttgagcgccttcgtagtagagatgt

SEQ ID NO: 5724859 - DNA, 25 bp, Homo sapien
aaactctttagtatctaatgaggaa

SEQ ID NO: 5724860 - DNA, 25 bp, Homo sapien
ttcctcattagatactaaagagttt

SEQ ID NO: 5724861 - DNA, 25 bp, Homo sapien
gaattttcttaaactctttagtatc

SEQ ID NO: 5724862 - DNA, 25 bp, Homo sapien
gatactaaagagtttaagaaaattc

SEQ ID NO: 5724863 - DNA, 25 bp, Homo sapien
attaatcttgtcgacggaggtaccc

SEQ ID NO: 5724864 - DNA, 25 bp, Homo sapien
gggtacctccgtcgacaagattaat

SEQ ID NO: 5724865 - DNA, 25 bp, Homo sapien
ggtaaggtgacctgggtcggtggtg

SEQ ID NO: 5724866 - DNA, 25 bp, Homo sapien
caccaccgacccaggtcaccttacc

SEQ ID NO: 5724867 - DNA, 25 bp, Homo sapien
tcgtctatgcgtttcgggcggcacg

SEQ ID NO: 5724868 - DNA, 25 bp, Homo sapien
cgtgccgcccgaaacgcatagacga

SEQ ID NO: 5724869 - DNA, 25 bp, Homo sapien
tgtcttaagtaggtcacaaaccctc

SEQ ID NO: 5724870 - DNA, 25 bp, Homo sapien
gagggtttgtgacctacttaagaca

SEQ ID NO: 5724871 - DNA, 25 bp, Homo sapien
aaagaccgtcatactcacgtcgtcg

SEQ ID NO: 5724872 - DNA, 25 bp, Homo sapien
cgacgacgtgagtatgacggtcttt

SEQ ID NO: 5724873 - DNA, 25 bp, Homo sapien
cgaatccgtcttccgtagtagaaaa

SEQ ID NO: 5724874 - DNA, 25 bp, Homo sapien
ttttctactacggaagacggattcg

SEQ ID NO: 5724875 - DNA, 25 bp, Homo sapien
aggtcactgtattcaagtaactcgt

SEQ ID NO: 5724876 - DNA, 25 bp, Homo sapien
acgagttacttgaatacagtgacct

SEQ ID NO: 5724877 - DNA, 25 bp, Homo sapien
gaccgagcgggcacccccgcggtac

SEQ ID NO: 5724878 - DNA, 25 bp, Homo sapien
gtaccgcgggggtgcccgctcggtc

SEQ ID NO: 5724879 - DNA, 25 bp, Homo sapien
cttccgacgggcgaaggtctacgcg

SEQ ID NO: 5724880 - DNA, 25 bp, Homo sapien
cgcgtagaccttcgcccgtcggaag

SEQ ID NO: 5724881 - DNA, 25 bp, Homo sapien
gcggggcggagtccctgggcggagt

SEQ ID NO: 5724882 - DNA, 25 bp, Homo sapien
actccgcccagggactccgccccgc

SEQ ID NO: 5724883 - DNA, 25 bp, Homo sapien
agcggggcggagtccctgggcggag

SEQ ID NO: 5724884 - DNA, 25 bp, Homo sapien
ctccgcccagggactccgccccgct

SEQ ID NO: 5724885 - DNA, 25 bp, Homo sapien
tagaacggaaagtttgaatacattc

SEQ ID NO: 5724886 - DNA, 25 bp, Homo sapien
gaatgtattcaaactttccgttcta

SEQ ID NO: 5724887 - DNA, 25 bp, Homo sapien
agtagaacggaaagtttgaatacat

SEQ ID NO: 5724888 - DNA, 25 bp, Homo sapien
atgtattcaaactttccgttctact

SEQ ID NO: 5724889 - DNA, 25 bp, Homo sapien
acttaaacctatgatacttatagtg

SEQ ID NO: 5724890 - DNA, 25 bp, Homo sapien
cactataagtatcataggtttaagt

SEQ ID NO: 5724891 - DNA, 25 bp, Homo sapien
cttccagactctcctcaccgacccc

SEQ ID NO: 5724892 - DNA, 25 bp, Homo sapien
ggggtcggtgaggagagtctggaag

SEQ ID NO: 5724893 - DNA, 25 bp, Homo sapien
aattataccaactatattattgtat

SEQ ID NO: 5724894 - DNA, 25 bp, Homo sapien
atacaataatatagttggtataatt

SEQ ID NO: 5724895 - DNA, 25 bp, Homo sapien
agcaactcacactataacctcgtct

SEQ ID NO: 5724896 - DNA, 25 bp, Homo sapien
agacgaggttatagtgtgagttgct

SEQ ID NO: 5724897 - DNA, 25 bp, Homo sapien
gaaattctcttctcgtctgctgagt

SEQ ID NO: 5724898 - DNA, 25 bp, Homo sapien
actcagcagacgagaagagaatttc

SEQ ID NO: 5724899 - DNA, 25 bp, Homo sapien
tcgggagtgaatttatcgtcaaatg

SEQ ID NO: 5724900 - DNA, 25 bp, Homo sapien
catttgacgataaattcactcccga

SEQ ID NO: 5724901 - DNA, 25 bp, Homo sapien
gacctggtctccctgactccactcc

SEQ ID NO: 5724902 - DNA, 25 bp, Homo sapien
ggagtggagtcagggagaccaggtc

SEQ ID NO: 5724903 - DNA, 25 bp, Homo sapien
cgggtaccactcttggcgtcgaggt

SEQ ID NO: 5724904 - DNA, 25 bp, Homo sapien
acctcgacgccaagagtggtacccg

SEQ ID NO: 5724905 - DNA, 25 bp, Homo sapien
gtcgtccgatgtgcgttccagcccc

SEQ ID NO: 5724906 - DNA, 25 bp, Homo sapien
ggggctggaacgcacatcggacgac

SEQ ID NO: 5724907 - DNA, 25 bp, Homo sapien
tatccgtagttctatccgtccctgt

SEQ ID NO: 5724908 - DNA, 25 bp, Homo sapien
acagggacggatagaactacggata

SEQ ID NO: 5724909 - DNA, 25 bp, Homo sapien
tttggaaagcttactgacgtcccgg

SEQ ID NO: 5724910 - DNA, 25 bp, Homo sapien
ccgggacgtcagtaagctttccaaa

SEQ ID NO: 5724911 - DNA, 25 bp, Homo sapien
gacgtagttatagtcattgaaggaa

SEQ ID NO: 5724912 - DNA, 25 bp, Homo sapien
ttccttcaatgactataactacgtc

SEQ ID NO: 5724913 - DNA, 25 bp, Homo sapien
gggtagctctcacaactcgaggtct

SEQ ID NO: 5724914 - DNA, 25 bp, Homo sapien
agacctcgagttgtgagagctaccc

SEQ ID NO: 5724915 - DNA, 25 bp, Homo sapien
cagaagttaactggatatagcttca

SEQ ID NO: 5724916 - DNA, 25 bp, Homo sapien
tgaagctatatccagttaacttctg

SEQ ID NO: 5724917 - DNA, 25 bp, Homo sapien
gccgggccgggctccactctccttg

SEQ ID NO: 5724918 - DNA, 25 bp, Homo sapien
caaggagagtggagcccggcccggc

SEQ ID NO: 5724919 - DNA, 25 bp, Homo sapien
ccttctcgccgggccgggctccact

SEQ ID NO: 5724920 - DNA, 25 bp, Homo sapien
agtggagcccggcccggcgagaagg

SEQ ID NO: 5724921 - DNA, 25 bp, Homo sapien
tttcctgttaaacgagttaattata

SEQ ID NO: 5724922 - DNA, 25 bp, Homo sapien
tataattaactcgtttaacaggaaa

SEQ ID NO: 5724923 - DNA, 25 bp, Homo sapien
tacgtggaaaacatagcactcctcc

SEQ ID NO: 5724924 - DNA, 25 bp, Homo sapien
ggaggagtgctatgttttccacgta

SEQ ID NO: 5724925 - DNA, 25 bp, Homo sapien
acagactgtgtgacaaagattggcg

SEQ ID NO: 5724926 - DNA, 25 bp, Homo sapien
cgccaatctttgtcacacagtctgt

SEQ ID NO: 5724927 - DNA, 25 bp, Homo sapien
agggcgtgcgctcgcgcgtgcacgt

SEQ ID NO: 5724928 - DNA, 25 bp, Homo sapien
acgtgcacgcgcgagcgcacgccct

SEQ ID NO: 5724929 - DNA, 25 bp, Homo sapien
cgttacgggaatccaccgtagtcca

SEQ ID NO: 5724930 - DNA, 25 bp, Homo sapien
tggactacggtggattcccgtaacg

SEQ ID NO: 5724931 - DNA, 25 bp, Homo sapien
tgttcgtcagactatgaaacaggag

SEQ ID NO: 5724932 - DNA, 25 bp, Homo sapien
ctcctgtttcatagtctgacgaaca

SEQ ID NO: 5724933 - DNA, 25 bp, Homo sapien
acttgattgacttgaaaggaaagat

SEQ ID NO: 5724934 - DNA, 25 bp, Homo sapien
atctttcctttcaagtcaatcaagt

SEQ ID NO: 5724935 - DNA, 25 bp, Homo sapien
catcgggtttaagtttctgaatcct

SEQ ID NO: 5724936 - DNA, 25 bp, Homo sapien
aggattcagaaacttaaacccgatg

SEQ ID NO: 5724937 - DNA, 25 bp, Homo sapien
tactcatcgggtttaagtttctgaa

SEQ ID NO: 5724938 - DNA, 25 bp, Homo sapien
ttcagaaacttaaacccgatgagta

SEQ ID NO: 5724939 - DNA, 25 bp, Homo sapien
ggtgcccggttctcgcgtgcctggg

SEQ ID NO: 5724940 - DNA, 25 bp, Homo sapien
cccaggcacgcgagaaccgggcacc

SEQ ID NO: 5724941 - DNA, 25 bp, Homo sapien
ccggaaccgaaaatgcgtcgttgat

SEQ ID NO: 5724942 - DNA, 25 bp, Homo sapien
atcaacgacgcattttcggttccgg

SEQ ID NO: 5724943 - DNA, 25 bp, Homo sapien
tcggacgaggtacgtcttgactaag

SEQ ID NO: 5724944 - DNA, 25 bp, Homo sapien
cttagtcaagacgtacctcgtccga

SEQ ID NO: 5724945 - DNA, 25 bp, Homo sapien
ccggcgccccacccgagctcggtgg

SEQ ID NO: 5724946 - DNA, 25 bp, Homo sapien
ccaccgagctcgggtggggcgccgg

SEQ ID NO: 5724947 - DNA, 25 bp, Homo sapien
cccggcgccccacccgagctcggtg

SEQ ID NO: 5724948 - DNA, 25 bp, Homo sapien
caccgagctcgggtggggcgccggg

SEQ ID NO: 5724949 - DNA, 25 bp, Homo sapien
gacggtgccctccccggcgccccac

SEQ ID NO: 5724950 - DNA, 25 bp, Homo sapien
gtggggcgccggggagggcaccgtc

SEQ ID NO: 5724951 - DNA, 25 bp, Homo sapien
tgtggaccgatttgacaagtcgttt

SEQ ID NO: 5724952 - DNA, 25 bp, Homo sapien
aaacgacttgtcaaatcggtccaca

SEQ ID NO: 5724953 - DNA, 25 bp, Homo sapien
tagatatagatttagaagtgactgt

SEQ ID NO: 5724954 - DNA, 25 bp, Homo sapien
acagtcacttctaaatctatatcta

SEQ ID NO: 5724955 - DNA, 25 bp, Homo sapien
gtagaaaaccctactcatgaagtac

SEQ ID NO: 5724956 - DNA, 25 bp, Homo sapien
gtacttcatgagtagggttttctac

SEQ ID NO: 5724957 - DNA, 25 bp, Homo sapien
cttcgcgcgggcaccgggggttatg

SEQ ID NO: 5724958 - DNA, 25 bp, Homo sapien
cataacccccggtgcccgcgcgaag

SEQ ID NO: 5724959 - DNA, 25 bp, Homo sapien
gtcctccttccatccggtggactgt

SEQ ID NO: 5724960 - DNA, 25 bp, Homo sapien
acagtccaccggatggaaggaggac

SEQ ID NO: 5724961 - DNA, 25 bp, Homo sapien
gctctctgcctgagcccgactgagg

SEQ ID NO: 5724962 - DNA, 25 bp, Homo sapien
cctcagtcgggctcaggcagagagc

SEQ ID NO: 5724963 - DNA, 25 bp, Homo sapien
agggaccctcgtcggagcctcggac

SEQ ID NO: 5724964 - DNA, 25 bp, Homo sapien
gtccgaggctccgacgagggtccct

SEQ ID NO: 5724965 - DNA, 25 bp, Homo sapien
gcgtcgggcgcgtcctacgttccgg

SEQ ID NO: 5724966 - DNA, 25 bp, Homo sapien
ccggaacgtaggacgcgcccgacgc

SEQ ID NO: 5724967 - DNA, 25 bp, Homo sapien
gtcgggcgcgtcctacgttccgggc

SEQ ID NO: 5724968 - DNA, 25 bp, Homo sapien
gcccggaacgtaggacgcgcccgac

SEQ ID NO: 5724969 - DNA, 25 bp, Homo sapien
ggacggaccgagcagccgcggcgtg

SEQ ID NO: 5724970 - DNA, 25 bp, Homo sapien
cacgccgcggctgctcggtccgtcc

SEQ ID NO: 5724971 - DNA, 25 bp, Homo sapien
gaggggtcctgggtctggtcgcgtc

SEQ ID NO: 5724972 - DNA, 25 bp, Homo sapien
gacgcgaccagacccaggacccctc

SEQ ID NO: 5724973 - DNA, 25 bp, Homo sapien
ggggtcctgggtctggtcgcgtcgg

SEQ ID NO: 5724974 - DNA, 25 bp, Homo sapien
ccgacgcgaccagacccaggacccc

SEQ ID NO: 5724975 - DNA, 25 bp, Homo sapien
cgaaatctagataccctccgtacag

SEQ ID NO: 5724976 - DNA, 25 bp, Homo sapien
ctgtacggagggtatctagatttcg

SEQ ID NO: 5724977 - DNA, 25 bp, Homo sapien
tctttcgtccaaaatggcgaccagg

SEQ ID NO: 5724978 - DNA, 25 bp, Homo sapien
cctggtcgccattttggacgaaaga

SEQ ID NO: 5724979 - DNA, 25 bp, Homo sapien
cggcctctcgctgtccccgccccgg

SEQ ID NO: 5724980 - DNA, 25 bp, Homo sapien
ccggggcggggacagcgagaggccg

SEQ ID NO: 5724981 - DNA, 25 bp, Homo sapien
ccttaggtacgaacatagggttcag

SEQ ID NO: 5724982 - DNA, 25 bp, Homo sapien
ctgaaccctatgttcgtacctaagg

SEQ ID NO: 5724983 - DNA, 25 bp, Homo sapien
gtgacacccccgtccgacggcgtct

SEQ ID NO: 5724984 - DNA, 25 bp, Homo sapien
agacgccgtcggacgggggtgtcac

SEQ ID NO: 5724985 - DNA, 25 bp, Homo sapien
agtttagagcactgttgctcgaagg

SEQ ID NO: 5724986 - DNA, 25 bp, Homo sapien
ccttcgagcaacagtgctctaaact

SEQ ID NO: 5724987 - DNA, 25 bp, Homo sapien
actcatggaaagtggacgggtccac

SEQ ID NO: 5724988 - DNA, 25 bp, Homo sapien
gtggacccgtccactttccatgagt

SEQ ID NO: 5724989 - DNA, 25 bp, Homo sapien
ctcggaaacccgtcatcgggcgggc

SEQ ID NO: 5724990 - DNA, 25 bp, Homo sapien
gcccgcccgatgacgggtttccgag

SEQ ID NO: 5724991 - DNA, 25 bp, Homo sapien
accgccccgggcactcaccaccgtc

SEQ ID NO: 5724992 - DNA, 25 bp, Homo sapien
gacggtggtgagtgcccggggcggt

SEQ ID NO: 5724993 - DNA, 25 bp, Homo sapien
cctctgttcggtctcaggtggatcg

SEQ ID NO: 5724994 - DNA, 25 bp, Homo sapien
cgatccacctgagaccgaacagagg

SEQ ID NO: 5724995 - DNA, 25 bp, Homo sapien
gttgaaggaccgattccacattgac

SEQ ID NO: 5724996 - DNA, 25 bp, Homo sapien
gtcaatgtggaatcggtccttcaac

SEQ ID NO: 5724997 - DNA, 25 bp, Homo sapien
gacaacagacagtaatcgggcaaac

SEQ ID NO: 5724998 - DNA, 25 bp, Homo sapien
gtttgcccgattactgtctgttgtc

SEQ ID NO: 5724999 - DNA, 25 bp, Homo sapien
taacaaagacaacagtttcggaggt

SEQ ID NO: 5725000 - DNA, 25 bp, Homo sapien
acctccgaaactgttgtctttgtta

SEQ ID NO: 5725001 - DNA, 25 bp, Homo sapien
caggagtggtcggtgcaagtctgta

SEQ ID NO: 5725002 - DNA, 25 bp, Homo sapien
tacagacttgcaccgaccactcctg

SEQ ID NO: 5725003 - DNA, 25 bp, Homo sapien
atccctgccggcacgacccgactgt

SEQ ID NO: 5725004 - DNA, 25 bp, Homo sapien
acagtcgggtcgtgccggcagggat

SEQ ID NO: 5725005 - DNA, 25 bp, Homo sapien
aaacggctttcgacgcccgcggcgc

SEQ ID NO: 5725006 - DNA, 25 bp, Homo sapien
gcgccgcgggcgtcgaaagccgttt

SEQ ID NO: 5725007 - DNA, 25 bp, Homo sapien
aggtgtggtccgagagacctctcct

SEQ ID NO: 5725008 - DNA, 25 bp, Homo sapien
aggagaggtctctcggaccacacct

SEQ ID NO: 5725009 - DNA, 25 bp, Homo sapien
gtcctctgatattactgaaaaccaa

SEQ ID NO: 5725010 - DNA, 25 bp, Homo sapien
ttggttttcagtaatatcagaggac

SEQ ID NO: 5725011 - DNA, 25 bp, Homo sapien
agaccgtcggccttcaggttctacg

SEQ ID NO: 5725012 - DNA, 25 bp, Homo sapien
cgtagaacctgaaggccgacggtct

SEQ ID NO: 5725013 - DNA, 25 bp, Homo sapien
ggccccggagacagcatccggacgt

SEQ ID NO: 5725014 - DNA, 25 bp, Homo sapien
acgtccggatgctgtctccggggcc

SEQ ID NO: 5725015 - DNA, 25 bp, Homo sapien
cgccccacagaaggaacagggacga

SEQ ID NO: 5725016 - DNA, 25 bp, Homo sapien
tcgtccctgttccttctgtggggcg

SEQ ID NO: 5725017 - DNA, 25 bp, Homo sapien
tatagaaatgaacaggcatttatgt

SEQ ID NO: 5725018 - DNA, 25 bp, Homo sapien
acataaatgcctgttcatttctata

SEQ ID NO: 5725019 - DNA, 25 bp, Homo sapien
cgaggaaacttctactaacaatact

SEQ ID NO: 5725020 - DNA, 25 bp, Homo sapien
agtattgttagtagaagtttcctcg

SEQ ID NO: 5725021 - DNA, 25 bp, Homo sapien
tttttataacttgaagatacatcgt

SEQ ID NO: 5725022 - DNA, 25 bp, Homo sapien
acgatgtatcttcaagttataaaaa

SEQ ID NO: 5725023 - DNA, 25 bp, Homo sapien
tgacgactgttctaagaccacgtgg

SEQ ID NO: 5725024 - DNA, 25 bp, Homo sapien
ccacgtggtcttagaacagtcgtca

SEQ ID NO: 5725025 - DNA, 25 bp, Homo sapien
gggccagccgctgagcgccggtcgg

SEQ ID NO: 5725026 - DNA, 25 bp, Homo sapien
ccgaccggcgctcagcggctggccc

SEQ ID NO: 5725027 - DNA, 25 bp, Homo sapien
tcgggccagccgctgagcgccggtc

SEQ ID NO: 5725028 - DNA, 25 bp, Homo sapien
gaccggcgctcagcggctggcccga

SEQ ID NO: 5725029 - DNA, 25 bp, Homo sapien
gacgtcgggccagccgctgagcgcc

SEQ ID NO: 5725030 - DNA, 25 bp, Homo sapien
ggcgctcagcggctggcccgacgtc

SEQ ID NO: 5725031 - DNA, 25 bp, Homo sapien
tcgttccgggacgggcagcggcctg

SEQ ID NO: 5725032 - DNA, 25 bp, Homo sapien
caggccgctgcccgtcccggaacga

SEQ ID NO: 5725033 - DNA, 25 bp, Homo sapien
tgtcgtaaccgactacgacgtgggt

SEQ ID NO: 5725034 - DNA, 25 bp, Homo sapien
acccacgtcgtagtcggttacgaca

SEQ ID NO: 5725035 - DNA, 25 bp, Homo sapien
agtcagaaaataacagtctaaagta

SEQ ID NO: 5725036 - DNA, 25 bp, Homo sapien
tactttagactgttattttctgact

SEQ ID NO: 5725037 - DNA, 25 bp, Homo sapien
cagaagaactgagttccacacccaa

SEQ ID NO: 5725038 - DNA, 25 bp, Homo sapien
ttgggtgtggaactcagttcttctg

SEQ ID NO: 5725039 - DNA, 25 bp, Homo sapien
cactagtgaaatgacaccggtaaat

SEQ ID NO: 5725040 - DNA, 25 bp, Homo sapien
atttaccggtgtcatttcactagtg

SEQ ID NO: 5725041 - DNA, 25 bp, Homo sapien
aacagtcgtaattgtagaaactacg

SEQ ID NO: 5725042 - DNA, 25 bp, Homo sapien
cgtagtttctacaattacgactgtt

SEQ ID NO: 5725043 - DNA, 25 bp, Homo sapien
ggaagtccgacaacctccttcaagg

SEQ ID NO: 5725044 - DNA, 25 bp, Homo sapien
ccttgaaggaggttgtcggacttcc

SEQ ID NO: 5725045 - DNA, 25 bp, Homo sapien
aggaacaagggcaccgacggacaag

SEQ ID NO: 5725046 - DNA, 25 bp, Homo sapien
cttgtccgtcggtgcccttgttcct

SEQ ID NO: 5725047 - DNA, 25 bp, Homo sapien
tttaccgggcgggagaacacgccac

SEQ ID NO: 5725048 - DNA, 25 bp, Homo sapien
gtggcgtgttctcccgcccggtaaa

SEQ ID NO: 5725049 - DNA, 25 bp, Homo sapien
ggtgctacgtgtaggaggccctcct

SEQ ID NO: 5725050 - DNA, 25 bp, Homo sapien
aggagggcctcctacacgtagcacc

SEQ ID NO: 5725051 - DNA, 25 bp, Homo sapien
tccggacgacgtgatttttgacagt

SEQ ID NO: 5725052 - DNA, 25 bp, Homo sapien
actgtcaaaaatcacgtcgtccgga

SEQ ID NO: 5725053 - DNA, 25 bp, Homo sapien
agttttctttcgtacacacttacac

SEQ ID NO: 5725054 - DNA, 25 bp, Homo sapien
gtgtaagtgtgtacgaaagaaaact

SEQ ID NO: 5725055 - DNA, 25 bp, Homo sapien
gcagccgcattcccccacacaggcg

SEQ ID NO: 5725056 - DNA, 25 bp, Homo sapien
cgcctgtgtgggggaatgcggctgc

SEQ ID NO: 5725057 - DNA, 25 bp, Homo sapien
tagtaaaaaatcctggtcaccgaac

SEQ ID NO: 5725058 - DNA, 25 bp, Homo sapien
gttcggtgaccaggattttttacta

SEQ ID NO: 5725059 - DNA, 25 bp, Homo sapien
gtgtagatcatattaaacattttaa

SEQ ID NO: 5725060 - DNA, 25 bp, Homo sapien
ttaaaatgtttaatatgatctacac

SEQ ID NO: 5725061 - DNA, 25 bp, Homo sapien
tgtgtagatcatattaaacatttta

SEQ ID NO: 5725062 - DNA, 25 bp, Homo sapien
taaaatgtttaatatgatctacaca

SEQ ID NO: 5725063 - DNA, 25 bp, Homo sapien
tatgtgtagatcatattaaacattt

SEQ ID NO: 5725064 - DNA, 25 bp, Homo sapien
aaatgtttaatatgatctacacata

SEQ ID NO: 5725065 - DNA, 25 bp, Homo sapien
gttgtttatgtgtagatcatattaa

SEQ ID NO: 5725066 - DNA, 25 bp, Homo sapien
ttaatatgatctacacataaacaac

SEQ ID NO: 5725067 - DNA, 25 bp, Homo sapien
aggttcataaatcttggttgaaagt

SEQ ID NO: 5725068 - DNA, 25 bp, Homo sapien
actttcaaccaagatttatgaacct

SEQ ID NO: 5725069 - DNA, 25 bp, Homo sapien
tgtatacgtgccacccttgggtcgg

SEQ ID NO: 5725070 - DNA, 25 bp, Homo sapien
ccgacccaagggtggcacgtataca

SEQ ID NO: 5725071 - DNA, 25 bp, Homo sapien
aatttgttctttagactctgactta

SEQ ID NO: 5725072 - DNA, 25 bp, Homo sapien
taagtcagagtctaaagaacaaatt

SEQ ID NO: 5725073 - DNA, 25 bp, Homo sapien
ctgctccggcttcctttgagaccct

SEQ ID NO: 5725074 - DNA, 25 bp, Homo sapien
agggtctcaaaggaagccggagcag

SEQ ID NO: 5725075 - DNA, 25 bp, Homo sapien
gccgccggagcctcggcacccttcc

SEQ ID NO: 5725076 - DNA, 25 bp, Homo sapien
ggaagggtgccgaggctccggcggc

SEQ ID NO: 5725077 - DNA, 25 bp, Homo sapien
tcgctcccctccggcgccgccggag

SEQ ID NO: 5725078 - DNA, 25 bp, Homo sapien
ctccggcggcgccggaggggagcga

SEQ ID NO: 5725079 - DNA, 25 bp, Homo sapien
aaccacctacaggtcattgtctcag

SEQ ID NO: 5725080 - DNA, 25 bp, Homo sapien
ctgagacaatgacctgtaggtggtt

SEQ ID NO: 5725081 - DNA, 25 bp, Homo sapien
ctaggtcgcgtgacccgtggctgga

SEQ ID NO: 5725082 - DNA, 25 bp, Homo sapien
tccagccacgggtcacgcgacctag

SEQ ID NO: 5725083 - DNA, 25 bp, Homo sapien
ttttcggtagacgatgttaatatgt

SEQ ID NO: 5725084 - DNA, 25 bp, Homo sapien
acatattaacatcgtctaccgaaaa

SEQ ID NO: 5725085 - DNA, 25 bp, Homo sapien
cgtcgtgcctgcctagacctcgaaa

SEQ ID NO: 5725086 - DNA, 25 bp, Homo sapien
tttcgaggtctaggcaggcacgacg

SEQ ID NO: 5725087 - DNA, 25 bp, Homo sapien
aaccctttagccacttcatgttgag

SEQ ID NO: 5725088 - DNA, 25 bp, Homo sapien
ctcaacatgaagtggctaaagggtt

SEQ ID NO: 5725089 - DNA, 25 bp, Homo sapien
aagtctgaatcccagtttcacaccc

SEQ ID NO: 5725090 - DNA, 25 bp, Homo sapien
gggtgtgaaactgggattcagactt

SEQ ID NO: 5725091 - DNA, 25 bp, Homo sapien
ggaggcggacgaagtccgggacgga

SEQ ID NO: 5725092 - DNA, 25 bp, Homo sapien
tccgtcccggacttcgtccgcctcc

SEQ ID NO: 5725093 - DNA, 25 bp, Homo sapien
aaactcactctatcagactcttaag

SEQ ID NO: 5725094 - DNA, 25 bp, Homo sapien
cttaagagtctgatagagtgagttt

SEQ ID NO: 5725095 - DNA, 25 bp, Homo sapien
gagtcgacgcgggacctggcaccgg

SEQ ID NO: 5725096 - DNA, 25 bp, Homo sapien
ccggtgccaggtcccgcgtcgactc

SEQ ID NO: 5725097 - DNA, 25 bp, Homo sapien
ttttgaaattcttattacattagta

SEQ ID NO: 5725098 - DNA, 25 bp, Homo sapien
tactaatgtaataagaatttcaaaa

SEQ ID NO: 5725099 - DNA, 25 bp, Homo sapien
tttttgaaattcttattacattagt

SEQ ID NO: 5725100 - DNA, 25 bp, Homo sapien
actaatgtaataagaatttcaaaaa

SEQ ID NO: 5725101 - DNA, 25 bp, Homo sapien
gactctattgacgtcacggggtcca

SEQ ID NO: 5725102 - DNA, 25 bp, Homo sapien
tggaccccgtgacgtcaatagagtc

SEQ ID NO: 5725103 - DNA, 25 bp, Homo sapien
accacagtacacatcggggaagtca

SEQ ID NO: 5725104 - DNA, 25 bp, Homo sapien
tgacttccccgatgtgtactgtggt

SEQ ID NO: 5725105 - DNA, 25 bp, Homo sapien
ctcagacgcataaggggcttgtccg

SEQ ID NO: 5725106 - DNA, 25 bp, Homo sapien
cggacaagccccttatgcgtctgag

SEQ ID NO: 5725107 - DNA, 25 bp, Homo sapien
gcgaccccgtcctggttccactacc

SEQ ID NO: 5725108 - DNA, 25 bp, Homo sapien
ggtagtggaaccaggacggggtcgc

SEQ ID NO: 5725109 - DNA, 25 bp, Homo sapien
gccgtgacccctcacacacgacagg

SEQ ID NO: 5725110 - DNA, 25 bp, Homo sapien
cctgtcgtgtgtgaggggtcacggc

SEQ ID NO: 5725111 - DNA, 25 bp, Homo sapien
gtgacaagggacactaattaaaggg

SEQ ID NO: 5725112 - DNA, 25 bp, Homo sapien
ccctttaattagtgtcccttgtcac

SEQ ID NO: 5725113 - DNA, 25 bp, Homo sapien
caccggacccccttggcagagacgt

SEQ ID NO: 5725114 - DNA, 25 bp, Homo sapien
acgtctctgccaagggggtccggtg

SEQ ID NO: 5725115 - DNA, 25 bp, Homo sapien
ccaccggacccccttggcagagacg

SEQ ID NO: 5725116 - DNA, 25 bp, Homo sapien
cgtctctgccaagggggtccggtgg

SEQ ID NO: 5725117 - DNA, 25 bp, Homo sapien
gatcggccactcctcccacccccct

SEQ ID NO: 5725118 - DNA, 25 bp, Homo sapien
aggggggtgggaggagtggccgatc

SEQ ID NO: 5725119 - DNA, 25 bp, Homo sapien
agagacaaagtatcgggtcctgtac

SEQ ID NO: 5725120 - DNA, 25 bp, Homo sapien
gtacaggacccgatactttgtctct

SEQ ID NO: 5725121 - DNA, 25 bp, Homo sapien
ggaactcttgcatgtccaactctgt

SEQ ID NO: 5725122 - DNA, 25 bp, Homo sapien
acagagttggacatgcaagagttcc

SEQ ID NO: 5725123 - DNA, 25 bp, Homo sapien
gcgcccctcgctcacccctggtccc

SEQ ID NO: 5725124 - DNA, 25 bp, Homo sapien
gggaccaggggtgagcgaggggcgc

SEQ ID NO: 5725125 - DNA, 25 bp, Homo sapien
acactcccgaagtgtaccggcaggg

SEQ ID NO: 5725126 - DNA, 25 bp, Homo sapien
ccctgccggtacacttcgggagtgt

SEQ ID NO: 5725127 - DNA, 25 bp, Homo sapien
cttaacacccgggtgcagcacccct

SEQ ID NO: 5725128 - DNA, 25 bp, Homo sapien
aggggtgctgcacccgggtgttaag

SEQ ID NO: 5725129 - DNA, 25 bp, Homo sapien
tcccggacccgaatgtggacgggtc

SEQ ID NO: 5725130 - DNA, 25 bp, Homo sapien
gacccgtccacattcgggtccggga

SEQ ID NO: 5725131 - DNA, 25 bp, Homo sapien
cacggtacacacgaggttccttctt

SEQ ID NO: 5725132 - DNA, 25 bp, Homo sapien
aagaaggaacctcgtgtgtaccgtg

SEQ ID NO: 5725133 - DNA, 25 bp, Homo sapien
taaaagagctgtataaattggagaa

SEQ ID NO: 5725134 - DNA, 25 bp, Homo sapien
ttctccaatttatacagctctttta

SEQ ID NO: 5725135 - DNA, 25 bp, Homo sapien
aagacacagtagtctacgcccgtgg

SEQ ID NO: 5725136 - DNA, 25 bp, Homo sapien
ccacgggcgtagactactgtgtctt

SEQ ID NO: 5725137 - DNA, 25 bp, Homo sapien
gacccgactcttctgcggcagccgg

SEQ ID NO: 5725138 - DNA, 25 bp, Homo sapien
ccggctgccgcagaagagtcgggtc

SEQ ID NO: 5725139 - DNA, 25 bp, Homo sapien
gacatgaaatttgatagtcgtacta

SEQ ID NO: 5725140 - DNA, 25 bp, Homo sapien
tagtacgactatcaaatttcatgtc

SEQ ID NO: 5725141 - DNA, 25 bp, Homo sapien
gggtaccccttgtatgactggacag

SEQ ID NO: 5725142 - DNA, 25 bp, Homo sapien
ctgtccagtcatacaaggggtaccc

SEQ ID NO: 5725143 - DNA, 25 bp, Homo sapien
ttcacgtgttcttaaagttcaagaa

SEQ ID NO: 5725144 - DNA, 25 bp, Homo sapien
ttcttgaactttaagaacacgtgaa

SEQ ID NO: 5725145 - DNA, 25 bp, Homo sapien
cgaacactttatagacccaaagacg

SEQ ID NO: 5725146 - DNA, 25 bp, Homo sapien
cgtctttgggtctataaagtgttcg

SEQ ID NO: 5725147 - DNA, 25 bp, Homo sapien
gccaggtcgacgagggcgcccgggt

SEQ ID NO: 5725148 - DNA, 25 bp, Homo sapien
acccgggcgccctcgtcgacctggc

SEQ ID NO: 5725149 - DNA, 25 bp, Homo sapien
ctggcccagggcgagaggattacgg

SEQ ID NO: 5725150 - DNA, 25 bp, Homo sapien
ccgtaatcctctcgccctgggccag

SEQ ID NO: 5725151 - DNA, 25 bp, Homo sapien
gcgctccagccgcgggaggcccctg

SEQ ID NO: 5725152 - DNA, 25 bp, Homo sapien
caggggcctcccgcggctggagcgc

SEQ ID NO: 5725153 - DNA, 25 bp, Homo sapien
cgtaggtcagtttggagacctcaat

SEQ ID NO: 5725154 - DNA, 25 bp, Homo sapien
attgaggtctccaaactgacctacg

SEQ ID NO: 5725155 - DNA, 25 bp, Homo sapien
ccgtcctcacttccgtccgtccgac

SEQ ID NO: 5725156 - DNA, 25 bp, Homo sapien
gtcggacggacggaagtgaggacgg

SEQ ID NO: 5725157 - DNA, 25 bp, Homo sapien
tctcgttgtcactgagtccgggtct

SEQ ID NO: 5725158 - DNA, 25 bp, Homo sapien
agacccggactcagtgacaacgaga

SEQ ID NO: 5725159 - DNA, 25 bp, Homo sapien
agtgtaagaagttaacttccttgat

SEQ ID NO: 5725160 - DNA, 25 bp, Homo sapien
atcaaggaagttaacttcttacact

SEQ ID NO: 5725161 - DNA, 25 bp, Homo sapien
ggcgtcgcgcactgggccccgatgt

SEQ ID NO: 5725162 - DNA, 25 bp, Homo sapien
acatcggggcccagtgcgcgacgcc

SEQ ID NO: 5725163 - DNA, 25 bp, Homo sapien
cccctacctcacactggaggtgtcc

SEQ ID NO: 5725164 - DNA, 25 bp, Homo sapien
ggacacctccagtgtgaggtagggg

SEQ ID NO: 5725165 - DNA, 25 bp, Homo sapien
tttagtacagagagtaattctcctt

SEQ ID NO: 5725166 - DNA, 25 bp, Homo sapien
aaggagaattactctctgtactaaa

SEQ ID NO: 5725167 - DNA, 25 bp, Homo sapien
taaaatagtataggtgtgaattgtg

SEQ ID NO: 5725168 - DNA, 25 bp, Homo sapien
cacaattcacacctatactatttta

SEQ ID NO: 5725169 - DNA, 25 bp, Homo sapien
ctcttggtgtcggctcggcgtccga

SEQ ID NO: 5725170 - DNA, 25 bp, Homo sapien
tcggacgccgagccgacaccaagag

SEQ ID NO: 5725171 - DNA, 25 bp, Homo sapien
gtctcttggtgtcggctcggcgtcc

SEQ ID NO: 5725172 - DNA, 25 bp, Homo sapien
ggacgccgagccgacaccaagagac

SEQ ID NO: 5725173 - DNA, 25 bp, Homo sapien
gcctgtcccactgacccgacgacgg

SEQ ID NO: 5725174 - DNA, 25 bp, Homo sapien
ccgtcgtcgggtcagtgggacaggc

SEQ ID NO: 5725175 - DNA, 25 bp, Homo sapien
acaacgcccggcacctcggcgccgg

SEQ ID NO: 5725176 - DNA, 25 bp, Homo sapien
ccggcgccgaggtgccgggcgttgt

SEQ ID NO: 5725177 - DNA, 25 bp, Homo sapien
gacaacgcccggcacctcggcgccg

SEQ ID NO: 5725178 - DNA, 25 bp, Homo sapien
cggcgccgaggtgccgggcgttgtc

SEQ ID NO: 5725179 - DNA, 25 bp, Homo sapien
cgacaacgcccggcacctcggcgcc

SEQ ID NO: 5725180 - DNA, 25 bp, Homo sapien
ggcgccgaggtgccgggcgttgtcg

SEQ ID NO: 5725181 - DNA, 25 bp, Homo sapien
gtcgtccatcggccgctccgggtta

SEQ ID NO: 5725182 - DNA, 25 bp, Homo sapien
taacccggagcggccgatggacgac

SEQ ID NO: 5725183 - DNA, 25 bp, Homo sapien
gggtccttacggctgcgggtgggtc

SEQ ID NO: 5725184 - DNA, 25 bp, Homo sapien
gacccacccgcagccgtaaggaccc

SEQ ID NO: 5725185 - DNA, 25 bp, Homo sapien
agtgtcaaaaatacgagcttaggag

SEQ ID NO: 5725186 - DNA, 25 bp, Homo sapien
ctcctaagctcgtatttttgacact

SEQ ID NO: 5725187 - DNA, 25 bp, Homo sapien
gaatctagtttcgaaggaaacttca

SEQ ID NO: 5725188 - DNA, 25 bp, Homo sapien
tgaagtttccttcgaaactagattc

SEQ ID NO: 5725189 - DNA, 25 bp, Homo sapien
tcttgacgaaaatctttctattgag

SEQ ID NO: 5725190 - DNA, 25 bp, Homo sapien
ctcaatagaaagattttcgtcaaga

SEQ ID NO: 5725191 - DNA, 25 bp, Homo sapien
gttggatatattacgactgaatagg

SEQ ID NO: 5725192 - DNA, 25 bp, Homo sapien
cctattcagtcgtaatatatccaac

SEQ ID NO: 5725193 - DNA, 25 bp, Homo sapien
tctgcggtcgattccgtcacctcgg

SEQ ID NO: 5725194 - DNA, 25 bp, Homo sapien
ccgaggtgacggaatcgaccgcaga

SEQ ID NO: 5725195 - DNA, 25 bp, Homo sapien
accgcagtcaagtgtctgaggcgac

SEQ ID NO: 5725196 - DNA, 25 bp, Homo sapien
gtcgcctcagacacttgactgcggt

SEQ ID NO: 5725197 - DNA, 25 bp, Homo sapien
ccgaccctctctgggcgcggggtcc

SEQ ID NO: 5725198 - DNA, 25 bp, Homo sapien
ggaccccgcgcccagagagggtcgg

SEQ ID NO: 5725199 - DNA, 25 bp, Homo sapien
cgccgcggcaggacgtgacgggccg

SEQ ID NO: 5725200 - DNA, 25 bp, Homo sapien
cggcccgtcacgtcctgccgcggcg

SEQ ID NO: 5725201 - DNA, 25 bp, Homo sapien
gcggcgccgcggcaggacgtgacgg

SEQ ID NO: 5725202 - DNA, 25 bp, Homo sapien
ccgtcacgtcctgccgcggcgccgc

SEQ ID NO: 5725203 - DNA, 25 bp, Homo sapien
aacgagacttttttacactggtgga

SEQ ID NO: 5725204 - DNA, 25 bp, Homo sapien
tccaccagtgtaaaaaagtctcgtt

SEQ ID NO: 5725205 - DNA, 25 bp, Homo sapien
tcgaggccgaggcacgcacacactt

SEQ ID NO: 5725206 - DNA, 25 bp, Homo sapien
aagtgtgtgcgtgcctcggcctcga

SEQ ID NO: 5725207 - DNA, 25 bp, Homo sapien
gacccgcaccgtccgtgtatcaccc

SEQ ID NO: 5725208 - DNA, 25 bp, Homo sapien
gggtgatacacggacggtgcgggtc

SEQ ID NO: 5725209 - DNA, 25 bp, Homo sapien
attactgcttctcttatgattgtgg

SEQ ID NO: 5725210 - DNA, 25 bp, Homo sapien
ccacaatcataagagaagcagtaat

SEQ ID NO: 5725211 - DNA, 25 bp, Homo sapien
gtcgtgggacgggcgcccgacccca

SEQ ID NO: 5725212 - DNA, 25 bp, Homo sapien
tggggtcgggcgcccgtcccacgac

SEQ ID NO: 5725213 - DNA, 25 bp, Homo sapien
gaaatcgtccagtcaaaaaggacac

SEQ ID NO: 5725214 - DNA, 25 bp, Homo sapien
gtgtcctttttgactggacgatttc

SEQ ID NO: 5725215 - DNA, 25 bp, Homo sapien
aggtcactggcgtgcaggacccgcc

SEQ ID NO: 5725216 - DNA, 25 bp, Homo sapien
ggcgggtcctgcacgccagtgacct

SEQ ID NO: 5725217 - DNA, 25 bp, Homo sapien
tttgtcgcgttgaaaaagtgtaaag

SEQ ID NO: 5725218 - DNA, 25 bp, Homo sapien
ctttacactttttcaacgcgacaaa

SEQ ID NO: 5725219 - DNA, 25 bp, Homo sapien
cgcgctacgccgcacgctcgcgtcg

SEQ ID NO: 5725220 - DNA, 25 bp, Homo sapien
cgacgcgagcgtgcggcgtagcgcg

SEQ ID NO: 5725221 - DNA, 25 bp, Homo sapien
gtcccggtgtttaacgaccacgaca

SEQ ID NO: 5725222 - DNA, 25 bp, Homo sapien
tgtcgtggtcgttaaacaccgggac

SEQ ID NO: 5725223 - DNA, 25 bp, Homo sapien
cccctgccacgcgcgccggagagcg

SEQ ID NO: 5725224 - DNA, 25 bp, Homo sapien
cgctctccggcgcgcgtggcagggg

SEQ ID NO: 5725225 - DNA, 25 bp, Homo sapien
ttacttcttgtctcttcggtctgtt

SEQ ID NO: 5725226 - DNA, 25 bp, Homo sapien
aacagaccgaagagacaagaagtaa

SEQ ID NO: 5725227 - DNA, 25 bp, Homo sapien
ttgtaataaaacaggatcgaccttt

SEQ ID NO: 5725228 - DNA, 25 bp, Homo sapien
aaaggtcgatcctgttttattacaa

SEQ ID NO: 5725229 - DNA, 25 bp, Homo sapien
tacaagaaattactcacagaacaag

SEQ ID NO: 5725230 - DNA, 25 bp, Homo sapien
cttgttctgtgagtaatttcttgta

SEQ ID NO: 5725231 - DNA, 25 bp, Homo sapien
ccagtccactgacgcgccgcccgac

SEQ ID NO: 5725232 - DNA, 25 bp, Homo sapien
gtcgggcggcgcgtcagtggactgg

SEQ ID NO: 5725233 - DNA, 25 bp, Homo sapien
gcccagtccactgacgcgccgcccg

SEQ ID NO: 5725234 - DNA, 25 bp, Homo sapien
cgggcggcgcgtcagtggactgggc

SEQ ID NO: 5725235 - DNA, 25 bp, Homo sapien
gtagtgaagatctccccagggcgaa

SEQ ID NO: 5725236 - DNA, 25 bp, Homo sapien
ttcgccctggggagatcttcactac

SEQ ID NO: 5725237 - DNA, 25 bp, Homo sapien
ggtcaggcgcctctcgccgaaacaa

SEQ ID NO: 5725238 - DNA, 25 bp, Homo sapien
ttgtttcggcgagaggcgcctgacc

SEQ ID NO: 5725239 - DNA, 25 bp, Homo sapien
ttcggtccccaggtccacacggagg

SEQ ID NO: 5725240 - DNA, 25 bp, Homo sapien
cctccgtgtggacctggggaccgaa

SEQ ID NO: 5725241 - DNA, 25 bp, Homo sapien
caaggcggcgggaccgcgactgtcg

SEQ ID NO: 5725242 - DNA, 25 bp, Homo sapien
cgacagtcgcggtcccgccgccttg

SEQ ID NO: 5725243 - DNA, 25 bp, Homo sapien
taaacagactgaaaccttagaaatg

SEQ ID NO: 5725244 - DNA, 25 bp, Homo sapien
catttctaaggtttcagtctgttta

SEQ ID NO: 5725245 - DNA, 25 bp, Homo sapien
acacagtagacttagaccaacctat

SEQ ID NO: 5725246 - DNA, 25 bp, Homo sapien
ataggttggtctaagtctactgtgt

SEQ ID NO: 5725247 - DNA, 25 bp, Homo sapien
gccgatctcggactagcgtgtccac

SEQ ID NO: 5725248 - DNA, 25 bp, Homo sapien
gtggacacgctagtccgagatcggc

SEQ ID NO: 5725249 - DNA, 25 bp, Homo sapien
ggtctcgatgggtacccttccacac

SEQ ID NO: 5725250 - DNA, 25 bp, Homo sapien
gtgtggaagggtacccatcgagacc

SEQ ID NO: 5725251 - DNA, 25 bp, Homo sapien
ctgtgggtgcggagggctcaggtgg

SEQ ID NO: 5725252 - DNA, 25 bp, Homo sapien
ccacctgagccctccgcacccacag

SEQ ID NO: 5725253 - DNA, 25 bp, Homo sapien
ttggacatcacaaaaaactaggttc

SEQ ID NO: 5725254 - DNA, 25 bp, Homo sapien
gaacctagttttttgtgatgtccaa

SEQ ID NO: 5725255 - DNA, 25 bp, Homo sapien
ggcgggcggtcccgagggaagactg

SEQ ID NO: 5725256 - DNA, 25 bp, Homo sapien
cagtcttccctcgggaccgcccgcc

SEQ ID NO: 5725257 - DNA, 25 bp, Homo sapien
aaataatttctttagtgatcgacag

SEQ ID NO: 5725258 - DNA, 25 bp, Homo sapien
ctgtcgatcactaaagaaattattt

SEQ ID NO: 5725259 - DNA, 25 bp, Homo sapien
gaaggctctccgggccggtggccga

SEQ ID NO: 5725260 - DNA, 25 bp, Homo sapien
tcggccaccggcccggagagccttc

SEQ ID NO: 5725261 - DNA, 25 bp, Homo sapien
gacttatagaatagaaaggcacaat

SEQ ID NO: 5725262 - DNA, 25 bp, Homo sapien
attgtgcctttctattctataagtc

SEQ ID NO: 5725263 - DNA, 25 bp, Homo sapien
gtgctcgccctgtcggatctagccg

SEQ ID NO: 5725264 - DNA, 25 bp, Homo sapien
cggctagatccgacagggcgagcac

SEQ ID NO: 5725265 - DNA, 25 bp, Homo sapien
ctctgtatcgggaagttcatttcat

SEQ ID NO: 5725266 - DNA, 25 bp, Homo sapien
atgaaatgaacttcccgatacagag

SEQ ID NO: 5725267 - DNA, 25 bp, Homo sapien
gactgttggccacctctttggcgtg

SEQ ID NO: 5725268 - DNA, 25 bp, Homo sapien
cacgccaaagaggtggccaacagtc

SEQ ID NO: 5725269 - DNA, 25 bp, Homo sapien
cagagggtactggagctcaggaggt

SEQ ID NO: 5725270 - DNA, 25 bp, Homo sapien
acctcctgagctccagtaccctctg

SEQ ID NO: 5725271 - DNA, 25 bp, Homo sapien
gtaggttatatcatcacgggtggta

SEQ ID NO: 5725272 - DNA, 25 bp, Homo sapien
taccacccgtgatgatataacctac

SEQ ID NO: 5725273 - DNA, 25 bp, Homo sapien
gcgggacgtcaggtactgggggcgg

SEQ ID NO: 5725274 - DNA, 25 bp, Homo sapien
ccgcccccagtacctgacgtcccgc

SEQ ID NO: 5725275 - DNA, 25 bp, Homo sapien
cggtcgcccaggtcggcgcaggagc

SEQ ID NO: 5725276 - DNA, 25 bp, Homo sapien
gctcctgcgccgacctgggcgaccg

SEQ ID NO: 5725277 - DNA, 25 bp, Homo sapien
gaaaactcaactcatcgtttactat

SEQ ID NO: 5725278 - DNA, 25 bp, Homo sapien
atagtaaacgatgagttgagttttc

SEQ ID NO: 5725279 - DNA, 25 bp, Homo sapien
gttggtgcctttgtgatccagagag

SEQ ID NO: 5725280 - DNA, 25 bp, Homo sapien
ctctctggatcacaaaggcaccaac

SEQ ID NO: 5725281 - DNA, 25 bp, Homo sapien
ctttttagacataatctcttagatg

SEQ ID NO: 5725282 - DNA, 25 bp, Homo sapien
catctaagagattatgtctaaaaag

SEQ ID NO: 5725283 - DNA, 25 bp, Homo sapien
cctttttagacataatctcttagat

SEQ ID NO: 5725284 - DNA, 25 bp, Homo sapien
atctaagagattatgtctaaaaagg

SEQ ID NO: 5725285 - DNA, 25 bp, Homo sapien
agaccgtttattgactataactggt

SEQ ID NO: 5725286 - DNA, 25 bp, Homo sapien
accagttatagtcaataaacggtct

SEQ ID NO: 5725287 - DNA, 25 bp, Homo sapien
gtccctgcgtgtcgagcggtagaac

SEQ ID NO: 5725288 - DNA, 25 bp, Homo sapien
gttctaccgctcgacacgcagggac

SEQ ID NO: 5725289 - DNA, 25 bp, Homo sapien
gtgtgtcgggacttcggaagccagg

SEQ ID NO: 5725290 - DNA, 25 bp, Homo sapien
cctggcttccgaagtcccgacacac

SEQ ID NO: 5725291 - DNA, 25 bp, Homo sapien
agtggaagggaatcactgaccgacg

SEQ ID NO: 5725292 - DNA, 25 bp, Homo sapien
cgtcggtcagtgattcccttccact

SEQ ID NO: 5725293 - DNA, 25 bp, Homo sapien
aaacttctctcttctattgccatat

SEQ ID NO: 5725294 - DNA, 25 bp, Homo sapien
atatggcaatagaagagagaagttt

SEQ ID NO: 5725295 - DNA, 25 bp, Homo sapien
acagacgagtctcaccgtcgcgcgg

SEQ ID NO: 5725296 - DNA, 25 bp, Homo sapien
ccgcgcgacggtgagactcgtctgt

SEQ ID NO: 5725297 - DNA, 25 bp, Homo sapien
aaagtgagaagaggagtagatggta

SEQ ID NO: 5725298 - DNA, 25 bp, Homo sapien
taccatctactcctcttctcacttt

SEQ ID NO: 5725299 - DNA, 25 bp, Homo sapien
atcgttctttataaagacacgtgta

SEQ ID NO: 5725300 - DNA, 25 bp, Homo sapien
tacacgtgtctttataaagaacgat

SEQ ID NO: 5725301 - DNA, 25 bp, Homo sapien
tccctacctcgccaggaggtccagt

SEQ ID NO: 5725302 - DNA, 25 bp, Homo sapien
actggacctcctggcgaggtaggga

SEQ ID NO: 5725303 - DNA, 25 bp, Homo sapien
tcagaggtttatcacgtagtcacat

SEQ ID NO: 5725304 - DNA, 25 bp, Homo sapien
atgtgactacgtgataaacctctga

SEQ ID NO: 5725305 - DNA, 25 bp, Homo sapien
gacgaacgagattaacgacgtcatg

SEQ ID NO: 5725306 - DNA, 25 bp, Homo sapien
catgacgtcgttaatctcgttcgtc

SEQ ID NO: 5725307 - DNA, 25 bp, Homo sapien
gatttattgcctcgaaaagtgaggt

SEQ ID NO: 5725308 - DNA, 25 bp, Homo sapien
acctcacttttcgaggcaataaatc

SEQ ID NO: 5725309 - DNA, 25 bp, Homo sapien
acgtcagcagcaaaaggtcaattaa

SEQ ID NO: 5725310 - DNA, 25 bp, Homo sapien
ttaattgaccttttgctgctgacgt

SEQ ID NO: 5725311 - DNA, 25 bp, Homo sapien
agtcaacgatccaatgccgaaaagt

SEQ ID NO: 5725312 - DNA, 25 bp, Homo sapien
acttttcggcattggatcgttgact

SEQ ID NO: 5725313 - DNA, 25 bp, Homo sapien
ggccctccaccgggcgccaccacag

SEQ ID NO: 5725314 - DNA, 25 bp, Homo sapien
ctgtggtggcgcccggtggagggcc

SEQ ID NO: 5725315 - DNA, 25 bp, Homo sapien
cccacgcgtcggcaccggccgtcgg

SEQ ID NO: 5725316 - DNA, 25 bp, Homo sapien
ccgacggccggtgccgacgcgtggg

SEQ ID NO: 5725317 - DNA, 25 bp, Homo sapien
ccccacgcgtcggcaccggccgtcg

SEQ ID NO: 5725318 - DNA, 25 bp, Homo sapien
cgacggccggtgccgacgcgtgggg

SEQ ID NO: 5725319 - DNA, 25 bp, Homo sapien
gtactcttcccgtttgtccaaacga

SEQ ID NO: 5725320 - DNA, 25 bp, Homo sapien
tcgtttggacaaacgggaagagtac

SEQ ID NO: 5725321 - DNA, 25 bp, Homo sapien
tgtctgagtcacgtcagcccgaccc

SEQ ID NO: 5725322 - DNA, 25 bp, Homo sapien
gggtcgggctgacgtgactcagaca

SEQ ID NO: 5725323 - DNA, 25 bp, Homo sapien
agtccaccgtcagggatcccgtaga

SEQ ID NO: 5725324 - DNA, 25 bp, Homo sapien
tctacgggatccctgacggtggact

SEQ ID NO: 5725325 - DNA, 25 bp, Homo sapien
gttacacatcagaagccaaaacggg

SEQ ID NO: 5725326 - DNA, 25 bp, Homo sapien
cccgttttggcttctgatgtgtaac

SEQ ID NO: 5725327 - DNA, 25 bp, Homo sapien
ggagacaccgtggtccacgtaggtc

SEQ ID NO: 5725328 - DNA, 25 bp, Homo sapien
gacctacgtggaccacggtgtctcc

SEQ ID NO: 5725329 - DNA, 25 bp, Homo sapien
cagcaccgcccctgagcgcctgtgg

SEQ ID NO: 5725330 - DNA, 25 bp, Homo sapien
ccacaggcgctcaggggcggtgctg

SEQ ID NO: 5725331 - DNA, 25 bp, Homo sapien
gcagcaccgcccctgagcgcctgtg

SEQ ID NO: 5725332 - DNA, 25 bp, Homo sapien
cacaggcgctcaggggcggtgctgc

SEQ ID NO: 5725333 - DNA, 25 bp, Homo sapien
agtacgacacaggagccccgggacc

SEQ ID NO: 5725334 - DNA, 25 bp, Homo sapien
ggtcccggggctcctgtgtcgtact

SEQ ID NO: 5725335 - DNA, 25 bp, Homo sapien
tcatgtctagattaaactgtagtta

SEQ ID NO: 5725336 - DNA, 25 bp, Homo sapien
taactacagtttaatctagacatga

SEQ ID NO: 5725337 - DNA, 25 bp, Homo sapien
ataagcataagtttactactacgaa

SEQ ID NO: 5725338 - DNA, 25 bp, Homo sapien
ttcgtagtagtaaacttatgcttat

SEQ ID NO: 5725339 - DNA, 25 bp, Homo sapien
tgatgttagtaaacgtcatagtaaa

SEQ ID NO: 5725340 - DNA, 25 bp, Homo sapien
tttactatgacgtttactaacatca

SEQ ID NO: 5725341 - DNA, 25 bp, Homo sapien
tgtttgatgttagtaaacgtcatag

SEQ ID NO: 5725342 - DNA, 25 bp, Homo sapien
ctatgacgtttactaacatcaaaca

SEQ ID NO: 5725343 - DNA, 25 bp, Homo sapien
gaggacgccgggtgtgtccaccctc

SEQ ID NO: 5725344 - DNA, 25 bp, Homo sapien
gagggtggacacacccggcgtcctc

SEQ ID NO: 5725345 - DNA, 25 bp, Homo sapien
aacgttcaggtcgtctcaagtggac

SEQ ID NO: 5725346 - DNA, 25 bp, Homo sapien
gtccacttgagacgacctgaacgtt

SEQ ID NO: 5725347 - DNA, 25 bp, Homo sapien
ttattttaaacttcagtacacccag

SEQ ID NO: 5725348 - DNA, 25 bp, Homo sapien
ctgggtgtactgaagtttaaaataa

SEQ ID NO: 5725349 - DNA, 25 bp, Homo sapien
ttcaaactgtaattagaggaaagac

SEQ ID NO: 5725350 - DNA, 25 bp, Homo sapien
gtctttcctctaattacagtttgaa

SEQ ID NO: 5725351 - DNA, 25 bp, Homo sapien
ccctatcggttacgcgtccaggtcg

SEQ ID NO: 5725352 - DNA, 25 bp, Homo sapien
cgacctggacgcgtaaccgataggg

SEQ ID NO: 5725353 - DNA, 25 bp, Homo sapien
caactgccgacggaccagagaacga

SEQ ID NO: 5725354 - DNA, 25 bp, Homo sapien
tcgttctctggtccgtcggcagttg

SEQ ID NO: 5725355 - DNA, 25 bp, Homo sapien
acaaagtgaacctaatcgtagaaaa

SEQ ID NO: 5725356 - DNA, 25 bp, Homo sapien
ttttctacgattaggttcactttgt

SEQ ID NO: 5725357 - DNA, 25 bp, Homo sapien
gttattgagtatcgtatattatagt

SEQ ID NO: 5725358 - DNA, 25 bp, Homo sapien
actataatatacgatactcaataac

SEQ ID NO: 5725359 - DNA, 25 bp, Homo sapien
caaaaactattaatcgtgtgaatag

SEQ ID NO: 5725360 - DNA, 25 bp, Homo sapien
ctattcacacgattaatagtttttg

SEQ ID NO: 5725361 - DNA, 25 bp, Homo sapien
tttccatctacaatgggaacgacac

SEQ ID NO: 5725362 - DNA, 25 bp, Homo sapien
gtgtcgttcccattgtagatggaaa

SEQ ID NO: 5725363 - DNA, 25 bp, Homo sapien
gggcgacagaccagacgcggggacg

SEQ ID NO: 5725364 - DNA, 25 bp, Homo sapien
cgtccccgcgtctggtctgtcgccc

SEQ ID NO: 5725365 - DNA, 25 bp, Homo sapien
gcaccaccgttgcggacatacgccg

SEQ ID NO: 5725366 - DNA, 25 bp, Homo sapien
cggcgtatgtccgcaacggtggtgc

SEQ ID NO: 5725367 - DNA, 25 bp, Homo sapien
tggacccgtcattcgcaccggtaga

SEQ ID NO: 5725368 - DNA, 25 bp, Homo sapien
tctaccggtgcgaatgacgggtcca

SEQ ID NO: 5725369 - DNA, 25 bp, Homo sapien
ggccgctctcggacgcgaacgctgt

SEQ ID NO: 5725370 - DNA, 25 bp, Homo sapien
acagcgttcgcgtccgagagcggcc

SEQ ID NO: 5725371 - DNA, 25 bp, Homo sapien
gagccctcggccaccaccccgaggg

SEQ ID NO: 5725372 - DNA, 25 bp, Homo sapien
ccctcggggtggtggccgagggctc

SEQ ID NO: 5725373 - DNA, 25 bp, Homo sapien
agggtaagtcgcacaggtgaaacga

SEQ ID NO: 5725374 - DNA, 25 bp, Homo sapien
tcgtttcacctgtgcgacttaccct

SEQ ID NO: 5725375 - DNA, 25 bp, Homo sapien
gccgacgtcggatccgcgggtcctg

SEQ ID NO: 5725376 - DNA, 25 bp, Homo sapien
caggacccgcggatccgacgtcggc

SEQ ID NO: 5725377 - DNA, 25 bp, Homo sapien
ttagtggccggcgggcagtgagtcg

SEQ ID NO: 5725378 - DNA, 25 bp, Homo sapien
cgactcactgcccgccggccactaa

SEQ ID NO: 5725379 - DNA, 25 bp, Homo sapien
tatctcaggattgaaaacaagtaat

SEQ ID NO: 5725380 - DNA, 25 bp, Homo sapien
attacttgttttcaatcctgagata

SEQ ID NO: 5725381 - DNA, 25 bp, Homo sapien
cctgctcgggcgggtcgcactaccg

SEQ ID NO: 5725382 - DNA, 25 bp, Homo sapien
cggtagtgcgacccgcccgagcagg

SEQ ID NO: 5725383 - DNA, 25 bp, Homo sapien
agacctttcggtctaatggagacag

SEQ ID NO: 5725384 - DNA, 25 bp, Homo sapien
ctgtctccattagaccgaaaggtct

SEQ ID NO: 5725385 - DNA, 25 bp, Homo sapien
tccttccggacgcgtggggccaccc

SEQ ID NO: 5725386 - DNA, 25 bp, Homo sapien
gggtggccccacgcgtccggaagga

SEQ ID NO: 5725387 - DNA, 25 bp, Homo sapien
gacgacaacattcagacgctcttga

SEQ ID NO: 5725388 - DNA, 25 bp, Homo sapien
tcaagagcgtctgaatgttgtcgtc

SEQ ID NO: 5725389 - DNA, 25 bp, Homo sapien
acaatttagtcttaattgtcgaaag

SEQ ID NO: 5725390 - DNA, 25 bp, Homo sapien
ctttcgacaattaagactaaattgt

SEQ ID NO: 5725391 - DNA, 25 bp, Homo sapien
tgtaagactttacagaaatctttcg

SEQ ID NO: 5725392 - DNA, 25 bp, Homo sapien
cgaaagatttctgtaaagtcttaca

SEQ ID NO: 5725393 - DNA, 25 bp, Homo sapien
gaacagacccttaccaagtatgaag

SEQ ID NO: 5725394 - DNA, 25 bp, Homo sapien
cttcatacttggtaagggtctgttc

SEQ ID NO: 5725395 - DNA, 25 bp, Homo sapien
gttgatctgtctcgaaacgctgcgg

SEQ ID NO: 5725396 - DNA, 25 bp, Homo sapien
ccgcagcgtttcgagacagatcaac

SEQ ID NO: 5725397 - DNA, 25 bp, Homo sapien
ctctcttctgagtcatgcagttgaa

SEQ ID NO: 5725398 - DNA, 25 bp, Homo sapien
ttcaactgcatgactcagaagagag

SEQ ID NO: 5725399 - DNA, 25 bp, Homo sapien
aactaaacgattgtcctgtggaaga

SEQ ID NO: 5725400 - DNA, 25 bp, Homo sapien
tcttccacaggacaatcgtttagtt

SEQ ID NO: 5725401 - DNA, 25 bp, Homo sapien
tgtacgttaacactcctaaggaagg

SEQ ID NO: 5725402 - DNA, 25 bp, Homo sapien
ccttccttaggagtgttaacgtaca

SEQ ID NO: 5725403 - DNA, 25 bp, Homo sapien
tggacgcggtctcgggagtacccgg

SEQ ID NO: 5725404 - DNA, 25 bp, Homo sapien
ccgggtactcccgagaccgcgtcca

SEQ ID NO: 5725405 - DNA, 25 bp, Homo sapien
caaaactaagtttctcaaagcttat

SEQ ID NO: 5725406 - DNA, 25 bp, Homo sapien
ataagctttgagaaacttagttttg

SEQ ID NO: 5725407 - DNA, 25 bp, Homo sapien
tcgacggaccctgatgtgagggtcc

SEQ ID NO: 5725408 - DNA, 25 bp, Homo sapien
ggaccctcacatcagggtccgtcga

SEQ ID NO: 5725409 - DNA, 25 bp, Homo sapien
gaggccgccagaggctaccgccctc

SEQ ID NO: 5725410 - DNA, 25 bp, Homo sapien
gagggcggtagcctctggcggcctc

SEQ ID NO: 5725411 - DNA, 25 bp, Homo sapien
ggacggaggcgcgaggcgtccaggc

SEQ ID NO: 5725412 - DNA, 25 bp, Homo sapien
gcctggacgcctcgcgcctccgtcc

SEQ ID NO: 5725413 - DNA, 25 bp, Homo sapien
tcggaccgcagcacccctgtctccg

SEQ ID NO: 5725414 - DNA, 25 bp, Homo sapien
cggagacaggggtgctgcggtccga

SEQ ID NO: 5725415 - DNA, 25 bp, Homo sapien
tagcgacgttgtcgaccccaaggac

SEQ ID NO: 5725416 - DNA, 25 bp, Homo sapien
gtccttggggtcgacaacgtcgcta

SEQ ID NO: 5725417 - DNA, 25 bp, Homo sapien
ggacggggccccttgcgtgtggcag

SEQ ID NO: 5725418 - DNA, 25 bp, Homo sapien
ctgccacacgcaaggggccccgtcc

SEQ ID NO: 5725419 - DNA, 25 bp, Homo sapien
ccgagtaacataggacaaaatggta

SEQ ID NO: 5725420 - DNA, 25 bp, Homo sapien
taccattttgtcctatgttactcgg

SEQ ID NO: 5725421 - DNA, 25 bp, Homo sapien
tcgtcccttcatcggtctcctgtcg

SEQ ID NO: 5725422 - DNA, 25 bp, Homo sapien
cgacaggagaccgatgaagggacga

SEQ ID NO: 5725423 - DNA, 25 bp, Homo sapien
gatacattcactggtcgtcacctcg

SEQ ID NO: 5725424 - DNA, 25 bp, Homo sapien
cgaggtgacgaccagtgaatgtatc

SEQ ID NO: 5725425 - DNA, 25 bp, Homo sapien
cgtcggtggcggcgtgtcggtggca

SEQ ID NO: 5725426 - DNA, 25 bp, Homo sapien
tgccaccgacacgccgccaccgacg

SEQ ID NO: 5725427 - DNA, 25 bp, Homo sapien
gaaatatgataaaacgtacttataa

SEQ ID NO: 5725428 - DNA, 25 bp, Homo sapien
ttataagtacgttttatcatatttc

SEQ ID NO: 5725429 - DNA, 25 bp, Homo sapien
actacgtctgtatatttaattaaaa

SEQ ID NO: 5725430 - DNA, 25 bp, Homo sapien
ttttaattaaatatacagacgtagt

SEQ ID NO: 5725431 - DNA, 25 bp, Homo sapien
aaactacgtctgtatatttaattaa

SEQ ID NO: 5725432 - DNA, 25 bp, Homo sapien
ttaattaaatatacagacgtagttt

SEQ ID NO: 5725433 - DNA, 25 bp, Homo sapien
tgaccgcgggaggagtccctcagcc

SEQ ID NO: 5725434 - DNA, 25 bp, Homo sapien
ggctgagggactcctcccgcggtca

SEQ ID NO: 5725435 - DNA, 25 bp, Homo sapien
gtcgggcgttcgtccgggtctccac

SEQ ID NO: 5725436 - DNA, 25 bp, Homo sapien
gtggagacccggacgaacgcccgac

SEQ ID NO: 5725437 - DNA, 25 bp, Homo sapien
attgcgtggaatgtcgaccgatgta

SEQ ID NO: 5725438 - DNA, 25 bp, Homo sapien
tacatcggtcgacattccacgcaat

SEQ ID NO: 5725439 - DNA, 25 bp, Homo sapien
tcgccccccgcgcccagccggctcg

SEQ ID NO: 5725440 - DNA, 25 bp, Homo sapien
cgagccggctgggcgcggggggcga

SEQ ID NO: 5725441 - DNA, 25 bp, Homo sapien
gatcagcccgtgaccccgtagaagt

SEQ ID NO: 5725442 - DNA, 25 bp, Homo sapien
acttctacggggtcacgggctgatc

SEQ ID NO: 5725443 - DNA, 25 bp, Homo sapien
ctgcgggacgacacggctaaacgtc

SEQ ID NO: 5725444 - DNA, 25 bp, Homo sapien
gacgtttagccgtgtcgtcccgcag

SEQ ID NO: 5725445 - DNA, 25 bp, Homo sapien
tatccaggaacctcccaactaaaag

SEQ ID NO: 5725446 - DNA, 25 bp, Homo sapien
cttttagttgggaggttcctggata

SEQ ID NO: 5725447 - DNA, 25 bp, Homo sapien
acatttttctcttgtgttgcgatta

SEQ ID NO: 5725448 - DNA, 25 bp, Homo sapien
taatcgcaacacaagagaaaaatgt

SEQ ID NO: 5725449 - DNA, 25 bp, Homo sapien
gggtgggcggcggcagggcacgcgt

SEQ ID NO: 5725450 - DNA, 25 bp, Homo sapien
acgcgtgccctgccgccgcccaccc

SEQ ID NO: 5725451 - DNA, 25 bp, Homo sapien
gagccccgcgccacgcgcgtcgacg

SEQ ID NO: 5725452 - DNA, 25 bp, Homo sapien
cgtcgacgcgcgtggcgcggggctc

SEQ ID NO: 5725453 - DNA, 25 bp, Homo sapien
gaatgcaggcatcttacagactatt

SEQ ID NO: 5725454 - DNA, 25 bp, Homo sapien
ccatcctgaggcaagagaagactat

SEQ ID NO: 5725455 - DNA, 25 bp, Homo sapien
cggcttactttcaaggaagtatttg

SEQ ID NO: 5725456 - DNA, 25 bp, Homo sapien
agttggaggatcacctagtaacaca

SEQ ID NO: 5725457 - DNA, 25 bp, Homo sapien
tgaagttggaggatcacctagtaac

SEQ ID NO: 5725458 - DNA, 25 bp, Homo sapien
cgactggaagaggaagtagccttaa

SEQ ID NO: 5725459 - DNA, 25 bp, Homo sapien
gacgactggaagaggaagtagcctt

SEQ ID NO: 5725460 - DNA, 25 bp, Homo sapien
tgatgcctgtatggagacatttgac

SEQ ID NO: 5725461 - DNA, 25 bp, Homo sapien
ggacaattctttgacctaatgaagt

SEQ ID NO: 5725462 - DNA, 25 bp, Homo sapien
ttcggaacaggtgtatgatgcctgt

SEQ ID NO: 5725463 - DNA, 25 bp, Homo sapien
cctgaggcaagagaagactatgata

SEQ ID NO: 5725464 - DNA, 25 bp, Homo sapien
gacaattctttgacctaatgaagtt

SEQ ID NO: 5725465 - DNA, 25 bp, Homo sapien
ccatttggtaaaggaaggacgactg

SEQ ID NO: 5725466 - DNA, 25 bp, Homo sapien
ccaaaacattgtttctgcttcgggg

SEQ ID NO: 5725467 - DNA, 25 bp, Homo sapien
cggaacaggtgtatgatgcctgtat

SEQ ID NO: 5725468 - DNA, 25 bp, Homo sapien
caacccaacggcttactttcaagga

SEQ ID NO: 5725469 - DNA, 25 bp, Homo sapien
acgtgatagtgctacggtgtgtgac

SEQ ID NO: 5725470 - DNA, 25 bp, Homo sapien
gtcacacaccgtagcactatcacgt

SEQ ID NO: 5725471 - DNA, 25 bp, Homo sapien
ttatgaaggggaattgtcagtccct

SEQ ID NO: 5725472 - DNA, 25 bp, Homo sapien
agggactgacaattccccttcataa

SEQ ID NO: 5725473 - DNA, 25 bp, Homo sapien
caggcgattctttctcgaagtggaa

SEQ ID NO: 5725474 - DNA, 25 bp, Homo sapien
ttccacttcgagaaagaatcgcctg

SEQ ID NO: 5725475 - DNA, 25 bp, Homo sapien
cgactgtgaggaacaggtctagacc

SEQ ID NO: 5725476 - DNA, 25 bp, Homo sapien
ggtctagacctgttcctcacagtcg

SEQ ID NO: 5725477 - DNA, 25 bp, Homo sapien
actcctattttgttctgtatttggg

SEQ ID NO: 5725478 - DNA, 25 bp, Homo sapien
cccaaatacagaacaaaataggagt

SEQ ID NO: 5725479 - DNA, 25 bp, Homo sapien
ccgagaagggctgaggagttgaggt

SEQ ID NO: 5725480 - DNA, 25 bp, Homo sapien
acctcaactcctcagcccttctcgg

SEQ ID NO: 5725481 - DNA, 25 bp, Homo sapien
gttagaaaagtaattatattccaga

SEQ ID NO: 5725482 - DNA, 25 bp, Homo sapien
tctggaatataattacttttctaac

SEQ ID NO: 5725483 - DNA, 25 bp, Homo sapien
gaggtcccgccccgaggaggccgag

SEQ ID NO: 5725484 - DNA, 25 bp, Homo sapien
ctcggcctcctcggggcgggacctc

SEQ ID NO: 5725485 - DNA, 25 bp, Homo sapien
tcacggggtcccagtggactgacag

SEQ ID NO: 5725486 - DNA, 25 bp, Homo sapien
ctgtcagtccactgggaccccgtga

SEQ ID NO: 5725487 - DNA, 25 bp, Homo sapien
tttgagtcgcctctgagggtgaggg

SEQ ID NO: 5725488 - DNA, 25 bp, Homo sapien
ccctcaccctcagaggcgactcaaa

SEQ ID NO: 5725489 - DNA, 25 bp, Homo sapien
tttcatatacaacaatttcttttgt

SEQ ID NO: 5725490 - DNA, 25 bp, Homo sapien
acaaaagaaattgttgtatatgaaa

SEQ ID NO: 5725491 - DNA, 25 bp, Homo sapien
gatttcatatacaacaatttctttt

SEQ ID NO: 5725492 - DNA, 25 bp, Homo sapien
aaaagaaattgttgtatatgaaatc

SEQ ID NO: 5725493 - DNA, 25 bp, Homo sapien
ttcatatacaacaatttcttttgta

SEQ ID NO: 5725494 - DNA, 25 bp, Homo sapien
tacaaaagaaattgttgtatatgaa

SEQ ID NO: 5725495 - DNA, 25 bp, Homo sapien
cggaccccagtcactcccctgcgac

SEQ ID NO: 5725496 - DNA, 25 bp, Homo sapien
gtcgcaggggagtgactggggtccg

SEQ ID NO: 5725497 - DNA, 25 bp, Homo sapien
ccggcctcggacgtagacaagggaa

SEQ ID NO: 5725498 - DNA, 25 bp, Homo sapien
ttcccttgtctacgtccgaggccgg

SEQ ID NO: 5725499 - DNA, 25 bp, Homo sapien
tgtcccgaggccgtccgagaacttt

SEQ ID NO: 5725500 - DNA, 25 bp, Homo sapien
aaagttctcggacggcctcgggaca

SEQ ID NO: 5725501 - DNA, 25 bp, Homo sapien
ccgcggtcagcgtcacttttggctc

SEQ ID NO: 5725502 - DNA, 25 bp, Homo sapien
gagccaaaagtgacgctgaccgcgg

SEQ ID NO: 5725503 - DNA, 25 bp, Homo sapien
tgtcgaccaacatcataacgtaccg

SEQ ID NO: 5725504 - DNA, 25 bp, Homo sapien
cggtacgttatgatgttggtcgaca

SEQ ID NO: 5725505 - DNA, 25 bp, Homo sapien
ttgccggcagacacccgctgggatt

SEQ ID NO: 5725506 - DNA, 25 bp, Homo sapien
aatcccagcgggtgtctgccggcaa

SEQ ID NO: 5725507 - DNA, 25 bp, Homo sapien
gcagacgttttacgtgccattggtg

SEQ ID NO: 5725508 - DNA, 25 bp, Homo sapien
caccaatggcacgtaaaacgtctgc

SEQ ID NO: 5725509 - DNA, 25 bp, Homo sapien
agtaagatcatcaattacaaagttt

SEQ ID NO: 5725510 - DNA, 25 bp, Homo sapien
aaactttgtaattgatgatcttact

SEQ ID NO: 5725511 - DNA, 25 bp, Homo sapien
ggcgtgtcggcgtggtccgggcccc

SEQ ID NO: 5725512 - DNA, 25 bp, Homo sapien
ggggcccggaccacgccgacacgcc

SEQ ID NO: 5725513 - DNA, 25 bp, Homo sapien
aacgaagactggactgagacggaag

SEQ ID NO: 5725514 - DNA, 25 bp, Homo sapien
cttccgtctcagtccagtcttcgtt

SEQ ID NO: 5725515 - DNA, 25 bp, Homo sapien
tgtcgggaaatggactaaaacttcc

SEQ ID NO: 5725516 - DNA, 25 bp, Homo sapien
ggaagttttagtccatttcccgaca

SEQ ID NO: 5725517 - DNA, 25 bp, Homo sapien
caggggcgtcggcggctaggcggta

SEQ ID NO: 5725518 - DNA, 25 bp, Homo sapien
taccgcctagccgccgacgcccctg

SEQ ID NO: 5725519 - DNA, 25 bp, Homo sapien
gagtatatttcgagagaaagaacag

SEQ ID NO: 5725520 - DNA, 25 bp, Homo sapien
ctgttctttctctcgaaatatactc

SEQ ID NO: 5725521 - DNA, 25 bp, Homo sapien
ggcgtcggggagacccgcggcgtcg

SEQ ID NO: 5725522 - DNA, 25 bp, Homo sapien
cgacgccgcgggtctccccgacgcc

SEQ ID NO: 5725523 - DNA, 25 bp, Homo sapien
cccgcacgaggagggcggccgaggt

SEQ ID NO: 5725524 - DNA, 25 bp, Homo sapien
acctcggccgccctcctcgtgcggg

SEQ ID NO: 5725525 - DNA, 25 bp, Homo sapien
ggcggacccgcacgaggagggcggc

SEQ ID NO: 5725526 - DNA, 25 bp, Homo sapien
gccgccctcctcgtgcgggtccgcc

SEQ ID NO: 5725527 - DNA, 25 bp, Homo sapien
agacctgaaggacaacgctccgtcg

SEQ ID NO: 5725528 - DNA, 25 bp, Homo sapien
cgacggagcgttgtccttcaggtct

SEQ ID NO: 5725529 - DNA, 25 bp, Homo sapien
acaaatgtcacaccgggcctcgcag

SEQ ID NO: 5725530 - DNA, 25 bp, Homo sapien
ctgcgaggcccggtgtgacatttgt

SEQ ID NO: 5725531 - DNA, 25 bp, Homo sapien
gtccttcatagaacagaagaccaca

SEQ ID NO: 5725532 - DNA, 25 bp, Homo sapien
tgtggtcttctgttctatgaaggac

SEQ ID NO: 5725533 - DNA, 25 bp, Homo sapien
aaaagtccagctcggtcaccgggtc

SEQ ID NO: 5725534 - DNA, 25 bp, Homo sapien
gacccggtgaccgagctggactttt

SEQ ID NO: 5725535 - DNA, 25 bp, Homo sapien
ggccctggggtcaactcggccctat

SEQ ID NO: 5725536 - DNA, 25 bp, Homo sapien
atagggccgagttgaccccagggcc

SEQ ID NO: 5725537 - DNA, 25 bp, Homo sapien
ggtctcgtatatctgggtaaagact

SEQ ID NO: 5725538 - DNA, 25 bp, Homo sapien
agtctttacccagatatacgagacc

SEQ ID NO: 5725539 - DNA, 25 bp, Homo sapien
actcctgtggtatttccagtcgttt

SEQ ID NO: 5725540 - DNA, 25 bp, Homo sapien
aaacgactggaaataccacaggagt

SEQ ID NO: 5725541 - DNA, 25 bp, Homo sapien
aacgtacacgcacgtcccaggagtg

SEQ ID NO: 5725542 - DNA, 25 bp, Homo sapien
cactcctgggacgtgcgtgtacgtt

SEQ ID NO: 5725543 - DNA, 25 bp, Homo sapien
tcaactggggttagtagtgttactt

SEQ ID NO: 5725544 - DNA, 25 bp, Homo sapien
aagtaacactactaaccccagttga

SEQ ID NO: 5725545 - DNA, 25 bp, Homo sapien
accggggcgtcgtggtgcccgtggc

SEQ ID NO: 5725546 - DNA, 25 bp, Homo sapien
gccacgggcaccacgacgccccggt

SEQ ID NO: 5725547 - DNA, 25 bp, Homo sapien
gtttcggaggaccattactttgtaa

SEQ ID NO: 5725548 - DNA, 25 bp, Homo sapien
ttacaaagtaatggtcctccgaaac

SEQ ID NO: 5725549 - DNA, 25 bp, Homo sapien
aggtcttgacattgtggagttctaa

SEQ ID NO: 5725550 - DNA, 25 bp, Homo sapien
ttagaactccacaatgtcaagacct

SEQ ID NO: 5725551 - DNA, 25 bp, Homo sapien
gaacctccgtaaagatgctgaaaag

SEQ ID NO: 5725552 - DNA, 25 bp, Homo sapien
cttttcagcatctttacggaggttc

SEQ ID NO: 5725553 - DNA, 25 bp, Homo sapien
gtatcagttacaccagttttactac

SEQ ID NO: 5725554 - DNA, 25 bp, Homo sapien
gtagtaaaactggtgtaactgatac

SEQ ID NO: 5725555 - DNA, 25 bp, Homo sapien
ctgtggtagacttcacagagaggac

SEQ ID NO: 5725556 - DNA, 25 bp, Homo sapien
gtcctctctgtgaagtctaccacag

SEQ ID NO: 5725557 - DNA, 25 bp, Homo sapien
gaatcaaaagcttaagctcagaaag

SEQ ID NO: 5725558 - DNA, 25 bp, Homo sapien
ctttctgagcttaagcttttgattc

SEQ ID NO: 5725559 - DNA, 25 bp, Homo sapien
gagagggcccccttggactcggtcc

SEQ ID NO: 5725560 - DNA, 25 bp, Homo sapien
ggaccgagtccaagggggccctctc

SEQ ID NO: 5725561 - DNA, 25 bp, Homo sapien
gtcgtcttgttcctaacaaaccgat

SEQ ID NO: 5725562 - DNA, 25 bp, Homo sapien
atcggtttgttaggaacaagacgac

SEQ ID NO: 5725563 - DNA, 25 bp, Homo sapien
gagggacccgcaggtcgtgggctcc

SEQ ID NO: 5725564 - DNA, 25 bp, Homo sapien
ggagcccacgacctgcgggtccctc

SEQ ID NO: 5725565 - DNA, 25 bp, Homo sapien
acgagactcttatcgggccctcgtt

SEQ ID NO: 5725566 - DNA, 25 bp, Homo sapien
aacgagggcccgataagagtctcgt

SEQ ID NO: 5725567 - DNA, 25 bp, Homo sapien
tgttctttaactagtatcatgttta

SEQ ID NO: 5725568 - DNA, 25 bp, Homo sapien
taaacatgatactagttaaagaaca

SEQ ID NO: 5725569 - DNA, 25 bp, Homo sapien
agtaacatcttaaggtgtcaataaa

SEQ ID NO: 5725570 - DNA, 25 bp, Homo sapien
tttattgacaccttaagatgttact

SEQ ID NO: 5725571 - DNA, 25 bp, Homo sapien
cgagggtaaaggagttgttataaga

SEQ ID NO: 5725572 - DNA, 25 bp, Homo sapien
tcttataacaactcctttaccctcg

SEQ ID NO: 5725573 - DNA, 25 bp, Homo sapien
ttagtgtttgtcgtgacacgaatta

SEQ ID NO: 5725574 - DNA, 25 bp, Homo sapien
taattcgtgtcacgacaaacactaa

SEQ ID NO: 5725575 - DNA, 25 bp, Homo sapien
attagtgtttgtcgtgacacgaatt

SEQ ID NO: 5725576 - DNA, 25 bp, Homo sapien
aattcgtgtcacgacaaacactaat

SEQ ID NO: 5725577 - DNA, 25 bp, Homo sapien
ccaggtgacaggactttcccttcgc

SEQ ID NO: 5725578 - DNA, 25 bp, Homo sapien
gcgaagggaaagtcctgtcacctgg

SEQ ID NO: 5725579 - DNA, 25 bp, Homo sapien
cctcagagacccccggccaccacgg

SEQ ID NO: 5725580 - DNA, 25 bp, Homo sapien
ccgtggtggccgggggtctctgagg

SEQ ID NO: 5725581 - DNA, 25 bp, Homo sapien
aggcgaagacgactctaacttctac

SEQ ID NO: 5725582 - DNA, 25 bp, Homo sapien
gtagaagttagagtcgtcttcgcct

SEQ ID NO: 5725583 - DNA, 25 bp, Homo sapien
acattaatgacgatttatttccacg

SEQ ID NO: 5725584 - DNA, 25 bp, Homo sapien
cgtggaaataaatcgtcattaatgt

SEQ ID NO: 5725585 - DNA, 25 bp, Homo sapien
acattatgtcatatggtaccggaac

SEQ ID NO: 5725586 - DNA, 25 bp, Homo sapien
gttccggtaccatatgacataatgt

SEQ ID NO: 5725587 - DNA, 25 bp, Homo sapien
cccttcgcagcccgtaagaaaggag

SEQ ID NO: 5725588 - DNA, 25 bp, Homo sapien
ctcctttcttacgggctgcgaaggg

SEQ ID NO: 5725589 - DNA, 25 bp, Homo sapien
agagaagctacgtctctctgtcaca

SEQ ID NO: 5725590 - DNA, 25 bp, Homo sapien
tgtgacagagagacgtagcttctct

SEQ ID NO: 5725591 - DNA, 25 bp, Homo sapien
taagtaatagacgtgtatctgtccg

SEQ ID NO: 5725592 - DNA, 25 bp, Homo sapien
cggacagatacacgtctattactta

SEQ ID NO: 5725593 - DNA, 25 bp, Homo sapien
atcggtcctagatattggtccccac

SEQ ID NO: 5725594 - DNA, 25 bp, Homo sapien
gtggggaccaatatctaggaccgat

SEQ ID NO: 5725595 - DNA, 25 bp, Homo sapien
ctgtcctagtctccgggcatcccgt

SEQ ID NO: 5725596 - DNA, 25 bp, Homo sapien
acgggatgcccggagactaggacag

SEQ ID NO: 5725597 - DNA, 25 bp, Homo sapien
gtcatctatcagaacaatccgtccc

SEQ ID NO: 5725598 - DNA, 25 bp, Homo sapien
gggacggattgttctgatagatgac

SEQ ID NO: 5725599 - DNA, 25 bp, Homo sapien
gtgtgtttatacaaagtacctcttt

SEQ ID NO: 5725600 - DNA, 25 bp, Homo sapien
aaagaggtactttgtataaacacac

SEQ ID NO: 5725601 - DNA, 25 bp, Homo sapien
gcggtcccggtgcacgccggcaggt

SEQ ID NO: 5725602 - DNA, 25 bp, Homo sapien
acctgccggcgtgcaccgggaccgc

SEQ ID NO: 5725603 - DNA, 25 bp, Homo sapien
ctctttctccacgtagttattctag

SEQ ID NO: 5725604 - DNA, 25 bp, Homo sapien
ctagaataactacgtggagaaagag

SEQ ID NO: 5725605 - DNA, 25 bp, Homo sapien
tcagaacgacaattcagagtagagt

SEQ ID NO: 5725606 - DNA, 25 bp, Homo sapien
actctactctgaattgtcgttctga

SEQ ID NO: 5725607 - DNA, 25 bp, Homo sapien
gtacgaagctcacctcgaaaacacg

SEQ ID NO: 5725608 - DNA, 25 bp, Homo sapien
cgtgttttcgaggtgagcttcgtac

SEQ ID NO: 5725609 - DNA, 25 bp, Homo sapien
tcgacactggggcttgggcacctca

SEQ ID NO: 5725610 - DNA, 25 bp, Homo sapien
tgaggtgcccaagccccagtgtcga

SEQ ID NO: 5725611 - DNA, 25 bp, Homo sapien
accggggcagggagggcgccagtcg

SEQ ID NO: 5725612 - DNA, 25 bp, Homo sapien
cgactggcgccctccctgccccggt

SEQ ID NO: 5725613 - DNA, 25 bp, Homo sapien
gggtgcaccatgtaaacacgtcgtc

SEQ ID NO: 5725614 - DNA, 25 bp, Homo sapien
gacgacgtgtttacatggtgcaccc

SEQ ID NO: 5725615 - DNA, 25 bp, Homo sapien
tactactttaacagcaaatgaataa

SEQ ID NO: 5725616 - DNA, 25 bp, Homo sapien
ttattcatttgctgttaaagtagta

SEQ ID NO: 5725617 - DNA, 25 bp, Homo sapien
acataataactgacttccaagaagg

SEQ ID NO: 5725618 - DNA, 25 bp, Homo sapien
ccttcttggaagtcagttattatgt

SEQ ID NO: 5725619 - DNA, 25 bp, Homo sapien
tgggtggagcctgcgtcggccccgt

SEQ ID NO: 5725620 - DNA, 25 bp, Homo sapien
acggggccgacgcaggctccaccca

SEQ ID NO: 5725621 - DNA, 25 bp, Homo sapien
aaagtcgatgactttcccaacgacg

SEQ ID NO: 5725622 - DNA, 25 bp, Homo sapien
cgtcgttgggaaagtcatcgacttt

SEQ ID NO: 5725623 - DNA, 25 bp, Homo sapien
cacgaggaacctgacgaagctgtta

SEQ ID NO: 5725624 - DNA, 25 bp, Homo sapien
taacagcttcgtcaggttcctcgtg

SEQ ID NO: 5725625 - DNA, 25 bp, Homo sapien
gtaaaagggtacctgaacgagcagc

SEQ ID NO: 5725626 - DNA, 25 bp, Homo sapien
gctgctcgttcaggtacccttttac

SEQ ID NO: 5725627 - DNA, 25 bp, Homo sapien
cccggaatcaggacgacgggtgtat

SEQ ID NO: 5725628 - DNA, 25 bp, Homo sapien
atacacccgtcgtcctgattccggg

SEQ ID NO: 5725629 - DNA, 25 bp, Homo sapien
gggtgagctaccctggtacccatct

SEQ ID NO: 5725630 - DNA, 25 bp, Homo sapien
agatgggtaccagggtagctcaccc

SEQ ID NO: 5725631 - DNA, 25 bp, Homo sapien
aattacatagtaaaacctgacgtct

SEQ ID NO: 5725632 - DNA, 25 bp, Homo sapien
agacgtcaggttttactatgtaatt

SEQ ID NO: 5725633 - DNA, 25 bp, Homo sapien
gaagcaacattattaacaatatgta

SEQ ID NO: 5725634 - DNA, 25 bp, Homo sapien
tacatattgttaataatgttgcttc

SEQ ID NO: 5725635 - DNA, 25 bp, Homo sapien
gaggaagcaacattattaacaatat

SEQ ID NO: 5725636 - DNA, 25 bp, Homo sapien
atattgttaataatgttgcttcctc

SEQ ID NO: 5725637 - DNA, 25 bp, Homo sapien
aacacaaaactcttatttgctacat

SEQ ID NO: 5725638 - DNA, 25 bp, Homo sapien
atgtagcaaataagagttttgtgtt

SEQ ID NO: 5725639 - DNA, 25 bp, Homo sapien
gaacgtagtccccagaggtgggtga

SEQ ID NO: 5725640 - DNA, 25 bp, Homo sapien
tcacccacctctggggactacgttc

SEQ ID NO: 5725641 - DNA, 25 bp, Homo sapien
gtgcaaaactttcgactgtaacaaa

SEQ ID NO: 5725642 - DNA, 25 bp, Homo sapien
tttgttacagtcgaaagttttgcac

SEQ ID NO: 5725643 - DNA, 25 bp, Homo sapien
actaagacggagactgcgtcaggga

SEQ ID NO: 5725644 - DNA, 25 bp, Homo sapien
tccctgacgcagtctccgtcttagt

SEQ ID NO: 5725645 - DNA, 25 bp, Homo sapien
gacccaaggtctctcggcctgagaa

SEQ ID NO: 5725646 - DNA, 25 bp, Homo sapien
ttctcaggccgagagaccttgggtc

SEQ ID NO: 5725647 - DNA, 25 bp, Homo sapien
agtgtaagcgggaaagtgggagtat

SEQ ID NO: 5725648 - DNA, 25 bp, Homo sapien
atactcccactttcccgcttacact

SEQ ID NO: 5725649 - DNA, 25 bp, Homo sapien
gaggtcaggaccgactcccgtgggt

SEQ ID NO: 5725650 - DNA, 25 bp, Homo sapien
acccacgggagtcggtcctgacctc

SEQ ID NO: 5725651 - DNA, 25 bp, Homo sapien
aaccgcggacccttgcatgacgcgg

SEQ ID NO: 5725652 - DNA, 25 bp, Homo sapien
ccgcgtcatgcaagggtccgcggtt

SEQ ID NO: 5725653 - DNA, 25 bp, Homo sapien
ctcacttcggtctgcgacggcggga

SEQ ID NO: 5725654 - DNA, 25 bp, Homo sapien
tcccgccgtcgcagaccgaagtgag

SEQ ID NO: 5725655 - DNA, 25 bp, Homo sapien
ctccctagcgccgtccgggccctcc

SEQ ID NO: 5725656 - DNA, 25 bp, Homo sapien
ggagggcccggacggcgctagggag

SEQ ID NO: 5725657 - DNA, 25 bp, Homo sapien
agaaaaatctgactcttcgccttat

SEQ ID NO: 5725658 - DNA, 25 bp, Homo sapien
ataaggcgaagagtcagatttttct

SEQ ID NO: 5725659 - DNA, 25 bp, Homo sapien
aatccaggcccctcctgtccgaggt

SEQ ID NO: 5725660 - DNA, 25 bp, Homo sapien
acctcggacaggaggggcctggatt

SEQ ID NO: 5725661 - DNA, 25 bp, Homo sapien
tcctacccttagcccatcccttggt

SEQ ID NO: 5725662 - DNA, 25 bp, Homo sapien
accaagggatgggctaagggtagga

SEQ ID NO: 5725663 - DNA, 25 bp, Homo sapien
ttgtcggcacatgagtcgaccgtcg

SEQ ID NO: 5725664 - DNA, 25 bp, Homo sapien
cgacggtcgactcatgtgccgacaa

SEQ ID NO: 5725665 - DNA, 25 bp, Homo sapien
aggagtgtcagcgttattatgaaaa

SEQ ID NO: 5725666 - DNA, 25 bp, Homo sapien
ttttcataataacgctgacactcct

SEQ ID NO: 5725667 - DNA, 25 bp, Homo sapien
cggggtcacttattaacagtaacag

SEQ ID NO: 5725668 - DNA, 25 bp, Homo sapien
ctgttactgttaataagtgaccccg

SEQ ID NO: 5725669 - DNA, 25 bp, Homo sapien
ggttacagcggttcgtacccgagga

SEQ ID NO: 5725670 - DNA, 25 bp, Homo sapien
tcctcgggtacgaaccgctgtaacc

SEQ ID NO: 5725671 - DNA, 25 bp, Homo sapien
atgtattatacattctttcgtaaaa

SEQ ID NO: 5725672 - DNA, 25 bp, Homo sapien
ttttacgaaagaatgtataatacat

SEQ ID NO: 5725673 - DNA, 25 bp, Homo sapien
tttgagaggaacctacctttgtcct

SEQ ID NO: 5725674 - DNA, 25 bp, Homo sapien
aggacaaaggtaggttcctctcaaa

SEQ ID NO: 5725675 - DNA, 25 bp, Homo sapien
ccgcccaccgccctgcgcgtcgacc

SEQ ID NO: 5725676 - DNA, 25 bp, Homo sapien
ggtcgacgcgcagggcggtgggcgg

SEQ ID NO: 5725677 - DNA, 25 bp, Homo sapien
tataaagatcgaagagtatcagaaa

SEQ ID NO: 5725678 - DNA, 25 bp, Homo sapien
tttctgatactcttcgatctttata

SEQ ID NO: 5725679 - DNA, 25 bp, Homo sapien
ggtggcctgcctaccaggctcctgg

SEQ ID NO: 5725680 - DNA, 25 bp, Homo sapien
ccaggagcctggtaggcaggccacc

SEQ ID NO: 5725681 - DNA, 25 bp, Homo sapien
tcgtcagttttagaaacacaattaa

SEQ ID NO: 5725682 - DNA, 25 bp, Homo sapien
ttaattgtgtttctaaaactgacga

SEQ ID NO: 5725683 - DNA, 25 bp, Homo sapien
tagctcttcgaaagtcccggcgccg

SEQ ID NO: 5725684 - DNA, 25 bp, Homo sapien
cggcgccgggactttcgaagagcta

SEQ ID NO: 5725685 - DNA, 25 bp, Homo sapien
cgtagctcttcgaaagtcccggcgc

SEQ ID NO: 5725686 - DNA, 25 bp, Homo sapien
gcgccgggactttcgaagagctacg

SEQ ID NO: 5725687 - DNA, 25 bp, Homo sapien
aagagatggtctcataaccttaagt

SEQ ID NO: 5725688 - DNA, 25 bp, Homo sapien
acttaaggttatgagaccatctctt

SEQ ID NO: 5725689 - DNA, 25 bp, Homo sapien
atgtccccgacctggcagtggtgga

SEQ ID NO: 5725690 - DNA, 25 bp, Homo sapien
tccaccactgccaggtcggggacat

SEQ ID NO: 5725691 - DNA, 25 bp, Homo sapien
agataaatgccgaaaaaatcgacgg

SEQ ID NO: 5725692 - DNA, 25 bp, Homo sapien
ccgtcgattttttcggcatttatct

SEQ ID NO: 5725693 - DNA, 25 bp, Homo sapien
tcttgttccggtcgcttcacctcgt

SEQ ID NO: 5725694 - DNA, 25 bp, Homo sapien
acgaggtgaagcgaccggaacaaga

SEQ ID NO: 5725695 - DNA, 25 bp, Homo sapien
gtggcttttcgtcaacattactaaa

SEQ ID NO: 5725696 - DNA, 25 bp, Homo sapien
tttagtaatgttgacgaaaagccac

SEQ ID NO: 5725697 - DNA, 25 bp, Homo sapien
atcatcctcctgtggaactacgggt

SEQ ID NO: 5725698 - DNA, 25 bp, Homo sapien
acccgtagttccacaggaggatgat

SEQ ID NO: 5725699 - DNA, 25 bp, Homo sapien
tagaaaacatagattgttctattca

SEQ ID NO: 5725700 - DNA, 25 bp, Homo sapien
tgaatagaacaatctatgttttcta

SEQ ID NO: 5725701 - DNA, 25 bp, Homo sapien
aaaacatagattgttctattcaaat

SEQ ID NO: 5725702 - DNA, 25 bp, Homo sapien
atttgaatagaacaatctatgtttt

SEQ ID NO: 5725703 - DNA, 25 bp, Homo sapien
taaaccgtgtaacgtcaatgggtct

SEQ ID NO: 5725704 - DNA, 25 bp, Homo sapien
agacccattgacgttacacggttta

SEQ ID NO: 5725705 - DNA, 25 bp, Homo sapien
agtaaggacgaaatcacttgaacta

SEQ ID NO: 5725706 - DNA, 25 bp, Homo sapien
tagttcaagtgatttcgtccttact

SEQ ID NO: 5725707 - DNA, 25 bp, Homo sapien
gtcgggacctggtcaccctcctgta

SEQ ID NO: 5725708 - DNA, 25 bp, Homo sapien
tacaggagggtgaccaggtcccgac

SEQ ID NO: 5725709 - DNA, 25 bp, Homo sapien
ctcctcctcagtgttcctgtgtggt

SEQ ID NO: 5725710 - DNA, 25 bp, Homo sapien
accacacaggaacactgaggaggag

SEQ ID NO: 5725711 - DNA, 25 bp, Homo sapien
tcgggttatccgcttcggtcactac

SEQ ID NO: 5725712 - DNA, 25 bp, Homo sapien
gtagtgaccgaagcggataacccga

SEQ ID NO: 5725713 - DNA, 25 bp, Homo sapien
cggacacgacttggctagtctgaat

SEQ ID NO: 5725714 - DNA, 25 bp, Homo sapien
attcagactagccaagtcgtgtccg

SEQ ID NO: 5725715 - DNA, 25 bp, Homo sapien
gacctgtcggcacagtgattttacg

SEQ ID NO: 5725716 - DNA, 25 bp, Homo sapien
cgtaaaatcactgtgccgacaggtc

SEQ ID NO: 5725717 - DNA, 25 bp, Homo sapien
gacgcccgagtcggtcatcagcggg

SEQ ID NO: 5725718 - DNA, 25 bp, Homo sapien
cccgctgatgaccgactcgggcgtc

SEQ ID NO: 5725719 - DNA, 25 bp, Homo sapien
atgtcaatcattagtttgatttaca

SEQ ID NO: 5725720 - DNA, 25 bp, Homo sapien
tgtaaatcaaactaatgattgacat

SEQ ID NO: 5725721 - DNA, 25 bp, Homo sapien
acgagagcaccttcgggccacccta

SEQ ID NO: 5725722 - DNA, 25 bp, Homo sapien
tagggtggcccgaaggtgctctcgt

SEQ ID NO: 5725723 - DNA, 25 bp, Homo sapien
cgaagttatatttccaatgacgtat

SEQ ID NO: 5725724 - DNA, 25 bp, Homo sapien
atacgtcattggaaatataacttcg

SEQ ID NO: 5725725 - DNA, 25 bp, Homo sapien
cacaagtctagttgagaactgtact

SEQ ID NO: 5725726 - DNA, 25 bp, Homo sapien
agtacagttctcaactagacttgtg

SEQ ID NO: 5725727 - DNA, 25 bp, Homo sapien
gggaggaccagatatgggcacccta

SEQ ID NO: 5725728 - DNA, 25 bp, Homo sapien
tagggtgcccatatctggtcctccc

SEQ ID NO: 5725729 - DNA, 25 bp, Homo sapien
aaagtttgttagatatgactaatat

SEQ ID NO: 5725730 - DNA, 25 bp, Homo sapien
atattagtcatatctaacaaacttt

SEQ ID NO: 5725731 - DNA, 25 bp, Homo sapien
aaaagtttgttagatatgactaata

SEQ ID NO: 5725732 - DNA, 25 bp, Homo sapien
tattagtcatatctaacaaactttt

SEQ ID NO: 5725733 - DNA, 25 bp, Homo sapien
aagtttgttagatatgactaatatt

SEQ ID NO: 5725734 - DNA, 25 bp, Homo sapien
aatattagtcatatctaacaaactt

SEQ ID NO: 5725735 - DNA, 25 bp, Homo sapien
tctgttgagaccaggagtccacctc

SEQ ID NO: 5725736 - DNA, 25 bp, Homo sapien
gaggtggactcctggtctcaacaga

SEQ ID NO: 5725737 - DNA, 25 bp, Homo sapien
gacctcaccgtcgagcggtacgtgt

SEQ ID NO: 5725738 - DNA, 25 bp, Homo sapien
acacgtaccgctcgacggtgaggtc

SEQ ID NO: 5725739 - DNA, 25 bp, Homo sapien
gtcgcgcaggatcgacacggctcga

SEQ ID NO: 5725740 - DNA, 25 bp, Homo sapien
tcgagccgtgtcgatcctgcgcgac

SEQ ID NO: 5725741 - DNA, 25 bp, Homo sapien
tttttatgtgttcatctaattatgt

SEQ ID NO: 5725742 - DNA, 25 bp, Homo sapien
acataattagatgaacacataaaaa

SEQ ID NO: 5725743 - DNA, 25 bp, Homo sapien
cactcatcgacaaatttccaaatct

SEQ ID NO: 5725744 - DNA, 25 bp, Homo sapien
agatttggaaatttgtcgatgagtg

SEQ ID NO: 5725745 - DNA, 25 bp, Homo sapien
cccgtgcccctctcgcagaccctgg

SEQ ID NO: 5725746 - DNA, 25 bp, Homo sapien
ccagggtctgcgagaggggcacggg

SEQ ID NO: 5725747 - DNA, 25 bp, Homo sapien
ccggcgccggcgtgtccgtccctcg

SEQ ID NO: 5725748 - DNA, 25 bp, Homo sapien
cgagggacggacacgccggcgccgg

SEQ ID NO: 5725749 - DNA, 25 bp, Homo sapien
cccggcgccggcgtgtccgtccctc

SEQ ID NO: 5725750 - DNA, 25 bp, Homo sapien
gagggacggacacgccggcgccggg

SEQ ID NO: 5725751 - DNA, 25 bp, Homo sapien
ggtgaggttccgtcgggcccggcgc

SEQ ID NO: 5725752 - DNA, 25 bp, Homo sapien
gcgccgggcccgacggaacctcacc

SEQ ID NO: 5725753 - DNA, 25 bp, Homo sapien
cggcgccggcgtgtccgtccctcgt

SEQ ID NO: 5725754 - DNA, 25 bp, Homo sapien
acgagggacggacacgccggcgccg

SEQ ID NO: 5725755 - DNA, 25 bp, Homo sapien
accgtacgaagatttctgtagtctt

SEQ ID NO: 5725756 - DNA, 25 bp, Homo sapien
aagactacagaaatcttcgtacggt

SEQ ID NO: 5725757 - DNA, 25 bp, Homo sapien
agtccacgggaatccggacgcgtcg

SEQ ID NO: 5725758 - DNA, 25 bp, Homo sapien
cgacgcgtccggattcccgtggact

SEQ ID NO: 5725759 - DNA, 25 bp, Homo sapien
ccacctcgtgcctcacggagaggag

SEQ ID NO: 5725760 - DNA, 25 bp, Homo sapien
ctcctctccgtgaggcacgaggtgg

SEQ ID NO: 5725761 - DNA, 25 bp, Homo sapien
ttcatgtctccttaatctctagtga

SEQ ID NO: 5725762 - DNA, 25 bp, Homo sapien
tcactagagattaaggagacatgaa

SEQ ID NO: 5725763 - DNA, 25 bp, Homo sapien
gtgacccatgcctgtgcaggggctc

SEQ ID NO: 5725764 - DNA, 25 bp, Homo sapien
gagcccctgcacaggcatgggtcac

SEQ ID NO: 5725765 - DNA, 25 bp, Homo sapien
ccgtagacccgtcggcacgacgtgt

SEQ ID NO: 5725766 - DNA, 25 bp, Homo sapien
acacgtcgtgccgacgggtctacgg

SEQ ID NO: 5725767 - DNA, 25 bp, Homo sapien
tgttataccaaatcgataaacttct

SEQ ID NO: 5725768 - DNA, 25 bp, Homo sapien
agaagtttatcgatttggtataaca

SEQ ID NO: 5725769 - DNA, 25 bp, Homo sapien
gtcccgtgtcatctcgtcgttccgc

SEQ ID NO: 5725770 - DNA, 25 bp, Homo sapien
gcggaacgacgagatgacacgggac

SEQ ID NO: 5725771 - DNA, 25 bp, Homo sapien
ttcccgagaggatcgtcctgaggtt

SEQ ID NO: 5725772 - DNA, 25 bp, Homo sapien
aacctcaggacgatcctctcgggaa

SEQ ID NO: 5725773 - DNA, 25 bp, Homo sapien
gagcccgacggacggtaacctcaac

SEQ ID NO: 5725774 - DNA, 25 bp, Homo sapien
gttgaggttaccgtccgtcgggctc

SEQ ID NO: 5725775 - DNA, 25 bp, Homo sapien
gggagcccgacggacggtaacctca

SEQ ID NO: 5725776 - DNA, 25 bp, Homo sapien
tgaggttaccgtccgtcgggctccc

SEQ ID NO: 5725777 - DNA, 25 bp, Homo sapien
attgcacgatcagacgagggactcc

SEQ ID NO: 5725778 - DNA, 25 bp, Homo sapien
ggagtccctcgtctgatcgtgcaat

SEQ ID NO: 5725779 - DNA, 25 bp, Homo sapien
cttacgagagatctagtcaggtacc

SEQ ID NO: 5725780 - DNA, 25 bp, Homo sapien
ggtacctgactagatctctcgtaag

SEQ ID NO: 5725781 - DNA, 25 bp, Homo sapien
gacgacttaaaaacttgaacatttc

SEQ ID NO: 5725782 - DNA, 25 bp, Homo sapien
gaaatgttcaagtttttaagtcgtc

SEQ ID NO: 5725783 - DNA, 25 bp, Homo sapien
tggccctggctgtccgccatggcgt

SEQ ID NO: 5725784 - DNA, 25 bp, Homo sapien
acgccatggcggacagccagggcca

SEQ ID NO: 5725785 - DNA, 25 bp, Homo sapien
agtcctttcctgtcaccacacaggg

SEQ ID NO: 5725786 - DNA, 25 bp, Homo sapien
ccctgtgtggtgacaggaaaggact

SEQ ID NO: 5725787 - DNA, 25 bp, Homo sapien
gagttattatagcataaacaaaaag

SEQ ID NO: 5725788 - DNA, 25 bp, Homo sapien
ctttttgtttatgctataataactc

SEQ ID NO: 5725789 - DNA, 25 bp, Homo sapien
agagttattatagcataaacaaaaa

SEQ ID NO: 5725790 - DNA, 25 bp, Homo sapien
tttttgtttatgctataataactct

SEQ ID NO: 5725791 - DNA, 25 bp, Homo sapien
tgacgtacacgtttggaaaggtgat

SEQ ID NO: 5725792 - DNA, 25 bp, Homo sapien
atcacctttccaaacgtgtacgtca

SEQ ID NO: 5725793 - DNA, 25 bp, Homo sapien
cttgcgagttaccttcctgccaggg

SEQ ID NO: 5725794 - DNA, 25 bp, Homo sapien
ccctggcaggaaggtaactcgcaag

SEQ ID NO: 5725795 - DNA, 25 bp, Homo sapien
acctgtacagggtgaaccgaggacg

SEQ ID NO: 5725796 - DNA, 25 bp, Homo sapien
cgtcctcggttcaccctgtacaggt

SEQ ID NO: 5725797 - DNA, 25 bp, Homo sapien
gtgcggcccaagacgcgacacacag

SEQ ID NO: 5725798 - DNA, 25 bp, Homo sapien
ctgtgtgtcgcgtcttgggccgcac

SEQ ID NO: 5725799 - DNA, 25 bp, Homo sapien
tccgcgcgaaggaacgcgcacgggc

SEQ ID NO: 5725800 - DNA, 25 bp, Homo sapien
gcccgtgcgcgttccttcgcgcgga

SEQ ID NO: 5725801 - DNA, 25 bp, Homo sapien
ttcaacctaaacgaatcatgtttta

SEQ ID NO: 5725802 - DNA, 25 bp, Homo sapien
taaaacatgattcgtttaggttgaa

SEQ ID NO: 5725803 - DNA, 25 bp, Homo sapien
gaatacatctagtctaaggtctctt

SEQ ID NO: 5725804 - DNA, 25 bp, Homo sapien
aagagaccttagactagatgtattc

SEQ ID NO: 5725805 - DNA, 25 bp, Homo sapien
gtccttctaaaccagtaactattaa

SEQ ID NO: 5725806 - DNA, 25 bp, Homo sapien
ttaatagttactggtttagaaggac

SEQ ID NO: 5725807 - DNA, 25 bp, Homo sapien
agagaaagagtgtcggtattattaa

SEQ ID NO: 5725808 - DNA, 25 bp, Homo sapien
ttaataataccgacactctttctct

SEQ ID NO: 5725809 - DNA, 25 bp, Homo sapien
atatataacattctactagaagact

SEQ ID NO: 5725810 - DNA, 25 bp, Homo sapien
agtcttctagtagaatgttatatat

SEQ ID NO: 5725811 - DNA, 25 bp, Homo sapien
aaactctgtacccttgtaagtgcac

SEQ ID NO: 5725812 - DNA, 25 bp, Homo sapien
gtgcacttacaagggtacagagttt

SEQ ID NO: 5725813 - DNA, 25 bp, Homo sapien
ggtgagtcggtaacggtcaccttga

SEQ ID NO: 5725814 - DNA, 25 bp, Homo sapien
tcaaggtgaccgttaccgactcacc

SEQ ID NO: 5725815 - DNA, 25 bp, Homo sapien
taatcctttattagatgacttataa

SEQ ID NO: 5725816 - DNA, 25 bp, Homo sapien
ttataagtcatctaataaaggatta

SEQ ID NO: 5725817 - DNA, 25 bp, Homo sapien
atcctttattagatgacttataaag

SEQ ID NO: 5725818 - DNA, 25 bp, Homo sapien
ctttataagtcatctaataaaggat

SEQ ID NO: 5725819 - DNA, 25 bp, Homo sapien
aatcctttattagatgacttataaa

SEQ ID NO: 5725820 - DNA, 25 bp, Homo sapien
tttataagtcatctaataaaggatt

SEQ ID NO: 5725821 - DNA, 25 bp, Homo sapien
ctcctgacgtcccccctgcggtcgg

SEQ ID NO: 5725822 - DNA, 25 bp, Homo sapien
ccgaccgcaggggggacgtcaggag

SEQ ID NO: 5725823 - DNA, 25 bp, Homo sapien
gcagaagtcgaaccccacggggtat

SEQ ID NO: 5725824 - DNA, 25 bp, Homo sapien
ataccccgtggggttcgacttctgc

SEQ ID NO: 5725825 - DNA, 25 bp, Homo sapien
ggtcggtcttcatccccgtatcggt

SEQ ID NO: 5725826 - DNA, 25 bp, Homo sapien
accgatacggggatgaagaccgacc

SEQ ID NO: 5725827 - DNA, 25 bp, Homo sapien
ccgcggggccaggaggtccggtgtg

SEQ ID NO: 5725828 - DNA, 25 bp, Homo sapien
cacaccggacctcctggccccgcgg

SEQ ID NO: 5725829 - DNA, 25 bp, Homo sapien
gggtcatccctcaggagtcaacggt

SEQ ID NO: 5725830 - DNA, 25 bp, Homo sapien
accgttgactcctgagggatgaccc

SEQ ID NO: 5725831 - DNA, 25 bp, Homo sapien
ggagactcacatgggagaccccggt

SEQ ID NO: 5725832 - DNA, 25 bp, Homo sapien
accggggtctcccatgtgagtctcc

SEQ ID NO: 5725833 - DNA, 25 bp, Homo sapien
gggacgtgccactcgaggcccggtc

SEQ ID NO: 5725834 - DNA, 25 bp, Homo sapien
gaccgggcctcgagtggcacgtccc

SEQ ID NO: 5725835 - DNA, 25 bp, Homo sapien
aggtgactgaaggtcaccggtgacc

SEQ ID NO: 5725836 - DNA, 25 bp, Homo sapien
ggtcaccggtgaccttcagtcacct

SEQ ID NO: 5725837 - DNA, 25 bp, Homo sapien
tccggaccgacgagaccctaaacag

SEQ ID NO: 5725838 - DNA, 25 bp, Homo sapien
ctgtttagggtctcgtcggtccgga

SEQ ID NO: 5725839 - DNA, 25 bp, Homo sapien
gtaatggaagtacaaatcggacgtc

SEQ ID NO: 5725840 - DNA, 25 bp, Homo sapien
gacgtccgatttgtacttccattac

SEQ ID NO: 5725841 - DNA, 25 bp, Homo sapien
ggccctgggatctcggccgctaagc

SEQ ID NO: 5725842 - DNA, 25 bp, Homo sapien
gcttagcggccgagatcccagggcc

SEQ ID NO: 5725843 - DNA, 25 bp, Homo sapien
gaccagggcgtcgacacactagtac

SEQ ID NO: 5725844 - DNA, 25 bp, Homo sapien
gtactagtgtgtcgacgccctggtc

SEQ ID NO: 5725845 - DNA, 25 bp, Homo sapien
tcgaggctaaccacctgaaggcggg

SEQ ID NO: 5725846 - DNA, 25 bp, Homo sapien
cccgccttcaggtggttagcctcga

SEQ ID NO: 5725847 - DNA, 25 bp, Homo sapien
gacacatctgagactgcgacattgt

SEQ ID NO: 5725848 - DNA, 25 bp, Homo sapien
acaatgtcgcagtctcagatgtgtc

SEQ ID NO: 5725849 - DNA, 25 bp, Homo sapien
tgcctccttcaaagcacgcacgcgg

SEQ ID NO: 5725850 - DNA, 25 bp, Homo sapien
ccgcgtgcgtgctttgaaggaggca

SEQ ID NO: 5725851 - DNA, 25 bp, Homo sapien
cacgttgcgagtttcaggtgagcat

SEQ ID NO: 5725852 - DNA, 25 bp, Homo sapien
atgctcacctgaaactcgcaacgtg

SEQ ID NO: 5725853 - DNA, 25 bp, Homo sapien
atttttacgagagacctttcataag

SEQ ID NO: 5725854 - DNA, 25 bp, Homo sapien
cttatgaaaggtctctcgtaaaaat

SEQ ID NO: 5725855 - DNA, 25 bp, Homo sapien
tataggagatctattctttacatac

SEQ ID NO: 5725856 - DNA, 25 bp, Homo sapien
gtatgtaaagaatagatctcctata

SEQ ID NO: 5725857 - DNA, 25 bp, Homo sapien
accataagaaattcgcttattctag

SEQ ID NO: 5725858 - DNA, 25 bp, Homo sapien
ctagaataagcgaatttcttatggt

SEQ ID NO: 5725859 - DNA, 25 bp, Homo sapien
atatttagtttgtttcatgtttgta

SEQ ID NO: 5725860 - DNA, 25 bp, Homo sapien
tacaaacatgaaacaaactaaatat

SEQ ID NO: 5725861 - DNA, 25 bp, Homo sapien
tgtgaattctcataaccttaaaaat

SEQ ID NO: 5725862 - DNA, 25 bp, Homo sapien
atttttaaggttatgagaattcaca

SEQ ID NO: 5725863 - DNA, 25 bp, Homo sapien
cgactatgaccggaggtttcggcaa

SEQ ID NO: 5725864 - DNA, 25 bp, Homo sapien
ttgccgaaacctccggtcatagtcg

SEQ ID NO: 5725865 - DNA, 25 bp, Homo sapien
aaaccgtgactctagaggttggtgt

SEQ ID NO: 5725866 - DNA, 25 bp, Homo sapien
acaccaacctctagagtcacggttt

SEQ ID NO: 5725867 - DNA, 25 bp, Homo sapien
cccgagcaatggtactcgggtccca

SEQ ID NO: 5725868 - DNA, 25 bp, Homo sapien
tgggacccgagtaccattgctcggg

SEQ ID NO: 5725869 - DNA, 25 bp, Homo sapien
cggaggccctctgaggaaccgttaa

SEQ ID NO: 5725870 - DNA, 25 bp, Homo sapien
ttaacggttcctcagagggcctccg

SEQ ID NO: 5725871 - DNA, 25 bp, Homo sapien
gactaaaccataatgcaacttgaac

SEQ ID NO: 5725872 - DNA, 25 bp, Homo sapien
gttcaagttgcattatggtttagtc

SEQ ID NO: 5725873 - DNA, 25 bp, Homo sapien
ggactgtcgggtcgcgggggactcg

SEQ ID NO: 5725874 - DNA, 25 bp, Homo sapien
cgagtcccccgcgacccgacagtcc

SEQ ID NO: 5725875 - DNA, 25 bp, Homo sapien
tcggtacttgttctagtctaaaaca

SEQ ID NO: 5725876 - DNA, 25 bp, Homo sapien
tgttttagactagaacaagtaccga

SEQ ID NO: 5725877 - DNA, 25 bp, Homo sapien
tgtctaatatatataaatcacagta

SEQ ID NO: 5725878 - DNA, 25 bp, Homo sapien
tactgtgatttatatatattagaca

SEQ ID NO: 5725879 - DNA, 25 bp, Homo sapien
atgtctaatatatataaatcacagt

SEQ ID NO: 5725880 - DNA, 25 bp, Homo sapien
actgtgatttatatatattagacat

SEQ ID NO: 5725881 - DNA, 25 bp, Homo sapien
tatgtctaatatatataaatcacag

SEQ ID NO: 5725882 - DNA, 25 bp, Homo sapien
ctgtgatttatatatattagacata

SEQ ID NO: 5725883 - DNA, 25 bp, Homo sapien
cggtgcgactgcgagggagggccga

SEQ ID NO: 5725884 - DNA, 25 bp, Homo sapien
tcggccctccctcgcagtcgcaccg

SEQ ID NO: 5725885 - DNA, 25 bp, Homo sapien
cgggcggcccggtgcgactgcgagg

SEQ ID NO: 5725886 - DNA, 25 bp, Homo sapien
cctcgcagtcgcaccgggccgcccg

SEQ ID NO: 5725887 - DNA, 25 bp, Homo sapien
ggaccccggcacgcgggagggaggc

SEQ ID NO: 5725888 - DNA, 25 bp, Homo sapien
gcctccctcccgcgtgccggggtcc

SEQ ID NO: 5725889 - DNA, 25 bp, Homo sapien
tccacggtcgtagatgcagggagaa

SEQ ID NO: 5725890 - DNA, 25 bp, Homo sapien
ttctccctgcatctacgaccgtgga

SEQ ID NO: 5725891 - DNA, 25 bp, Homo sapien
agtgagtactgtacttcgtcggcac

SEQ ID NO: 5725892 - DNA, 25 bp, Homo sapien
gtgccgacgaagtacagtactcact

SEQ ID NO: 5725893 - DNA, 25 bp, Homo sapien
gacgtaccgagggtatgacctttgg

SEQ ID NO: 5725894 - DNA, 25 bp, Homo sapien
ccaaaggtcataccctcggtacgtc

SEQ ID NO: 5725895 - DNA, 25 bp, Homo sapien
gctccagcgcgagcgcgccccactc

SEQ ID NO: 5725896 - DNA, 25 bp, Homo sapien
gagtggggcgcgctcgcgctggagc

SEQ ID NO: 5725897 - DNA, 25 bp, Homo sapien
cctgtcgctccagcgcgagcgcgcc

SEQ ID NO: 5725898 - DNA, 25 bp, Homo sapien
ggcgcgctcgcgctggagcgacagg

SEQ ID NO: 5725899 - DNA, 25 bp, Homo sapien
cttaacagtattaggtgtatgataa

SEQ ID NO: 5725900 - DNA, 25 bp, Homo sapien
ttatcatacacctaatactgttaag

SEQ ID NO: 5725901 - DNA, 25 bp, Homo sapien
aggtccacgtagctcttacgtctgt

SEQ ID NO: 5725902 - DNA, 25 bp, Homo sapien
acagacgtaagagctacgtggacct

SEQ ID NO: 5725903 - DNA, 25 bp, Homo sapien
tgttcccgaattaaagaccaggtct

SEQ ID NO: 5725904 - DNA, 25 bp, Homo sapien
agacctggtctttaattcgggaaca

SEQ ID NO: 5725905 - DNA, 25 bp, Homo sapien
cgcggctcgcgtcgcaggcgccgta

SEQ ID NO: 5725906 - DNA, 25 bp, Homo sapien
tacggcgcctgcgacgcgagccgcg

SEQ ID NO: 5725907 - DNA, 25 bp, Homo sapien
ccgcggctcgcgtcgcaggcgccgt

SEQ ID NO: 5725908 - DNA, 25 bp, Homo sapien
acggcgcctgcgacgcgagccgcgg

SEQ ID NO: 5725909 - DNA, 25 bp, Homo sapien
gccgcggctcgcgtcgcaggcgccg

SEQ ID NO: 5725910 - DNA, 25 bp, Homo sapien
cggcgcctgcgacgcgagccgcggc

SEQ ID NO: 5725911 - DNA, 25 bp, Homo sapien
gagcgccgcggctcgcgtcgcaggc

SEQ ID NO: 5725912 - DNA, 25 bp, Homo sapien
gcctgcgacgcgagccgcggcgctc

SEQ ID NO: 5725913 - DNA, 25 bp, Homo sapien
cccgtcgagtcgtctgaggccttgg

SEQ ID NO: 5725914 - DNA, 25 bp, Homo sapien
ccaaggcctcagacgactcgacggg

SEQ ID NO: 5725915 - DNA, 25 bp, Homo sapien
cacacatctccataaccgttaccta

SEQ ID NO: 5725916 - DNA, 25 bp, Homo sapien
taggtaacggttatggagatgtgtg

SEQ ID NO: 5725917 - DNA, 25 bp, Homo sapien
actaagacaaccaacggtataagtc

SEQ ID NO: 5725918 - DNA, 25 bp, Homo sapien
gacttataccgttggttgtcttagt

SEQ ID NO: 5725919 - DNA, 25 bp, Homo sapien
agagtcaccagattaccccttgtgg

SEQ ID NO: 5725920 - DNA, 25 bp, Homo sapien
ccacaaggggtaatctggtgactct

SEQ ID NO: 5725921 - DNA, 25 bp, Homo sapien
tactcctgggtgccgggccaccgta

SEQ ID NO: 5725922 - DNA, 25 bp, Homo sapien
tacggtggcccggcacccaggagta

SEQ ID NO: 5725923 - DNA, 25 bp, Homo sapien
aataggtgtacgtttgcattggtgg

SEQ ID NO: 5725924 - DNA, 25 bp, Homo sapien
ccaccaatgcaaacgtacacctatt

SEQ ID NO: 5725925 - DNA, 25 bp, Homo sapien
acaggtgcgtgcccggccgcacaaa

SEQ ID NO: 5725926 - DNA, 25 bp, Homo sapien
tttgtgcggccgggcacgcacctgt

SEQ ID NO: 5725927 - DNA, 25 bp, Homo sapien
cccgtggcatcctctctgtgtagac

SEQ ID NO: 5725928 - DNA, 25 bp, Homo sapien
gtctacacagagaggatgccacggg

SEQ ID NO: 5725929 - DNA, 25 bp, Homo sapien
gccctcgtgcgcttctccgtcccta

SEQ ID NO: 5725930 - DNA, 25 bp, Homo sapien
tagggacggagaagcgcacgagggc

SEQ ID NO: 5725931 - DNA, 25 bp, Homo sapien
aaggacacatgccaggaccttctcc

SEQ ID NO: 5725932 - DNA, 25 bp, Homo sapien
ggagaaggtcctggcatgtgtcctt

SEQ ID NO: 5725933 - DNA, 25 bp, Homo sapien
tcgcgcccatggagacagtccgcgg

SEQ ID NO: 5725934 - DNA, 25 bp, Homo sapien
ccgcggactgtctccatgggcgcga

SEQ ID NO: 5725935 - DNA, 25 bp, Homo sapien
gacatggtaacttcttagaaggaca

SEQ ID NO: 5725936 - DNA, 25 bp, Homo sapien
tgtccttctaagaagttaccatgtc

SEQ ID NO: 5725937 - DNA, 25 bp, Homo sapien
cgcccagccacggactccctctccc

SEQ ID NO: 5725938 - DNA, 25 bp, Homo sapien
gggagagggagtccgtggctgggcg

SEQ ID NO: 5725939 - DNA, 25 bp, Homo sapien
gttcctggacgcgcccccggctcgg

SEQ ID NO: 5725940 - DNA, 25 bp, Homo sapien
ccgagccgggggcgcgtccaggaac

SEQ ID NO: 5725941 - DNA, 25 bp, Homo sapien
tgggcgccggcgatgtgtgcccggc

SEQ ID NO: 5725942 - DNA, 25 bp, Homo sapien
gccgggcacacatcgccggcgccca

SEQ ID NO: 5725943 - DNA, 25 bp, Homo sapien
tttctacaagtaagtactagttcga

SEQ ID NO: 5725944 - DNA, 25 bp, Homo sapien
tcgaactagtacttacttgtagaaa

SEQ ID NO: 5725945 - DNA, 25 bp, Homo sapien
gacaaaaattttaatatactactgt

SEQ ID NO: 5725946 - DNA, 25 bp, Homo sapien
acagtagtatattaaaatttttgtc

SEQ ID NO: 5725947 - DNA, 25 bp, Homo sapien
agacaaaaattttaatatactactg

SEQ ID NO: 5725948 - DNA, 25 bp, Homo sapien
cagtagtatattaaaatttttgtct

SEQ ID NO: 5725949 - DNA, 25 bp, Homo sapien
cgaccgtgtgagctagctgtgagag

SEQ ID NO: 5725950 - DNA, 25 bp, Homo sapien
ctctcacagctagctcacacggtcg

SEQ ID NO: 5725951 - DNA, 25 bp, Homo sapien
tatgctgttctcgtcttcttataag

SEQ ID NO: 5725952 - DNA, 25 bp, Homo sapien
cttataagaagacgagaacagcata

SEQ ID NO: 5725953 - DNA, 25 bp, Homo sapien
ccgtagacccctttaaagatgacat

SEQ ID NO: 5725954 - DNA, 25 bp, Homo sapien
atgtcatctttaaaggggtctacgg

SEQ ID NO: 5725955 - DNA, 25 bp, Homo sapien
cggggctgagcgaccgcgtccccat

SEQ ID NO: 5725956 - DNA, 25 bp, Homo sapien
atggggacgcggtcgctcagccccg

SEQ ID NO: 5725957 - DNA, 25 bp, Homo sapien
ttacgaaccaccatatggacccggt

SEQ ID NO: 5725958 - DNA, 25 bp, Homo sapien
accgggtccatatggtggttcgtaa

SEQ ID NO: 5725959 - DNA, 25 bp, Homo sapien
ttcgccgaccgtacgacttggtgtc

SEQ ID NO: 5725960 - DNA, 25 bp, Homo sapien
gacaccaagtcgtacggtcggcgaa

SEQ ID NO: 5725961 - DNA, 25 bp, Homo sapien
ttcacccgtgtgataatcgttgaaa

SEQ ID NO: 5725962 - DNA, 25 bp, Homo sapien
tttcaacgattatcacacgggtgaa

SEQ ID NO: 5725963 - DNA, 25 bp, Homo sapien
gatttatagtcataatcataatcat

SEQ ID NO: 5725964 - DNA, 25 bp, Homo sapien
atgattatgattatgactataaatc

SEQ ID NO: 5725965 - DNA, 25 bp, Homo sapien
atatttgacactcctcgagaaaatg

SEQ ID NO: 5725966 - DNA, 25 bp, Homo sapien
cattttctcgaggagtgtcaaatat

SEQ ID NO: 5725967 - DNA, 25 bp, Homo sapien
cacttgagtcatcccgaacgttggt

SEQ ID NO: 5725968 - DNA, 25 bp, Homo sapien
accaacgttcgggatgactcaagtg

SEQ ID NO: 5725969 - DNA, 25 bp, Homo sapien
gaacctaaacaagaaatagtctaaa

SEQ ID NO: 5725970 - DNA, 25 bp, Homo sapien
tttagactatttcttgtttaggttc

SEQ ID NO: 5725971 - DNA, 25 bp, Homo sapien
aatccgttgaactattccatagggt

SEQ ID NO: 5725972 - DNA, 25 bp, Homo sapien
accctatggaatagttcaacggatt

SEQ ID NO: 5725973 - DNA, 25 bp, Homo sapien
ttttaggtaattcagagacgtcttc

SEQ ID NO: 5725974 - DNA, 25 bp, Homo sapien
gaagacgtctctgaattacctaaaa

SEQ ID NO: 5725975 - DNA, 25 bp, Homo sapien
agagtgacttgcgagggcgggagac

SEQ ID NO: 5725976 - DNA, 25 bp, Homo sapien
gtctcccgccctcgcaagtcactct

SEQ ID NO: 5725977 - DNA, 25 bp, Homo sapien
gtccctgcccggctgggtcgcggtg

SEQ ID NO: 5725978 - DNA, 25 bp, Homo sapien
caccgcgacccagccgggcagggac

SEQ ID NO: 5725979 - DNA, 25 bp, Homo sapien
gtccaaaggtagaacgaaagtgtat

SEQ ID NO: 5725980 - DNA, 25 bp, Homo sapien
atacactttcgttctacctttggac

SEQ ID NO: 5725981 - DNA, 25 bp, Homo sapien
agagatttagttcattcctgtatag

SEQ ID NO: 5725982 - DNA, 25 bp, Homo sapien
ctatacaggaatgaactaaatctct

SEQ ID NO: 5725983 - DNA, 25 bp, Homo sapien
ggaggatcgcggctcgggtccggcc

SEQ ID NO: 5725984 - DNA, 25 bp, Homo sapien
ggccggacccgagccgcgatcctcc

SEQ ID NO: 5725985 - DNA, 25 bp, Homo sapien
agagcctcggggcgtccccgcgtct

SEQ ID NO: 5725986 - DNA, 25 bp, Homo sapien
agacgcggggacgccccgaggctct

SEQ ID NO: 5725987 - DNA, 25 bp, Homo sapien
gagcctcggggcgtccccgcgtctc

SEQ ID NO: 5725988 - DNA, 25 bp, Homo sapien
gagacgcggggacgccccgaggctc

SEQ ID NO: 5725989 - DNA, 25 bp, Homo sapien
aaaacaaacgcagctaggcgctcgg

SEQ ID NO: 5725990 - DNA, 25 bp, Homo sapien
ccgagcgcctagctgcgtttgtttt

SEQ ID NO: 5725991 - DNA, 25 bp, Homo sapien
tccgcccgtcgctccatggtagggc

SEQ ID NO: 5725992 - DNA, 25 bp, Homo sapien
gccctaccatggagcgacgggcgga

SEQ ID NO: 5725993 - DNA, 25 bp, Homo sapien
cctccaccgccgggtgccgaccgga

SEQ ID NO: 5725994 - DNA, 25 bp, Homo sapien
tccggtcggcacccggcggtggagg

SEQ ID NO: 5725995 - DNA, 25 bp, Homo sapien
gaggtcctggacgtccgggcgcggg

SEQ ID NO: 5725996 - DNA, 25 bp, Homo sapien
cccgcgcccggacgtccaggacctc

SEQ ID NO: 5725997 - DNA, 25 bp, Homo sapien
cccatagggttaggctcgggacgcc

SEQ ID NO: 5725998 - DNA, 25 bp, Homo sapien
ggcgtcccgagcctaaccctatggg

SEQ ID NO: 5725999 - DNA, 25 bp, Homo sapien
tcccctcctgcaactcctgcgccgc

SEQ ID NO: 5726000 - DNA, 25 bp, Homo sapien
gcggcgcaggagttgcaggagggga

SEQ ID NO: 5726001 - DNA, 25 bp, Homo sapien
tcggggagggacaggcgcggaccct

SEQ ID NO: 5726002 - DNA, 25 bp, Homo sapien
agggtccgcgcctgtccctccccga

SEQ ID NO: 5726003 - DNA, 25 bp, Homo sapien
ctcggggagggacaggcgcggaccc

SEQ ID NO: 5726004 - DNA, 25 bp, Homo sapien
gggtccgcgcctgtccctccccgag

SEQ ID NO: 5726005 - DNA, 25 bp, Homo sapien
gaaggtgaatagaggggtcccgttg

SEQ ID NO: 5726006 - DNA, 25 bp, Homo sapien
caacgggacccctctattcaccttc

SEQ ID NO: 5726007 - DNA, 25 bp, Homo sapien
tttaagggtcgaggccccggtcgca

SEQ ID NO: 5726008 - DNA, 25 bp, Homo sapien
tgcgaccggggcctcgacccttaaa

SEQ ID NO: 5726009 - DNA, 25 bp, Homo sapien
tcgtcgtacggccatcgtcttcggt

SEQ ID NO: 5726010 - DNA, 25 bp, Homo sapien
accgaagacgatggccgtacgacga

SEQ ID NO: 5726011 - DNA, 25 bp, Homo sapien
atgaaacctaatgggtactttataa

SEQ ID NO: 5726012 - DNA, 25 bp, Homo sapien
ttataaagtacccattaggtttcat

SEQ ID NO: 5726013 - DNA, 25 bp, Homo sapien
gacttctctgccggacggacagtcc

SEQ ID NO: 5726014 - DNA, 25 bp, Homo sapien
ggactgtccgtccggcagagaagtc

SEQ ID NO: 5726015 - DNA, 25 bp, Homo sapien
aataaacatcaaagacatcattgta

SEQ ID NO: 5726016 - DNA, 25 bp, Homo sapien
tacaatgatgtctttgatgtttatt

SEQ ID NO: 5726017 - DNA, 25 bp, Homo sapien
atgatgatgattagaaggtgagaag

SEQ ID NO: 5726018 - DNA, 25 bp, Homo sapien
cttctcaccttctaatcatcatcat

SEQ ID NO: 5726019 - DNA, 25 bp, Homo sapien
catttccggtcgacttcgttaataa

SEQ ID NO: 5726020 - DNA, 25 bp, Homo sapien
ttattaacgaagtcgaccggaaatg

SEQ ID NO: 5726021 - DNA, 25 bp, Homo sapien
cttcacgaaccagtagaaaggtaag

SEQ ID NO: 5726022 - DNA, 25 bp, Homo sapien
cttacctttctactggttcgtgaag

SEQ ID NO: 5726023 - DNA, 25 bp, Homo sapien
ggtgtcttgtgcatcgaacccggtg

SEQ ID NO: 5726024 - DNA, 25 bp, Homo sapien
caccgggttcgatgcacaagacacc

SEQ ID NO: 5726025 - DNA, 25 bp, Homo sapien
aggtcccgcggcctcggacgagccc

SEQ ID NO: 5726026 - DNA, 25 bp, Homo sapien
gggctcgtccgaggccgcgggacct

SEQ ID NO: 5726027 - DNA, 25 bp, Homo sapien
ggcggcggtccccgcgagcagaggt

SEQ ID NO: 5726028 - DNA, 25 bp, Homo sapien
acctctgctcgcggggaccgccgcc

SEQ ID NO: 5726029 - DNA, 25 bp, Homo sapien
cggcggcggtccccgcgagcagagg

SEQ ID NO: 5726030 - DNA, 25 bp, Homo sapien
cctctgctcgcggggaccgccgccg

SEQ ID NO: 5726031 - DNA, 25 bp, Homo sapien
ctccaacagggccaggtctccgagt

SEQ ID NO: 5726032 - DNA, 25 bp, Homo sapien
actcggagacctggccctgttggag

SEQ ID NO: 5726033 - DNA, 25 bp, Homo sapien
cgtcgacgaccaggtctcggaaagt

SEQ ID NO: 5726034 - DNA, 25 bp, Homo sapien
actttccgagacctggtcgtcgacg

SEQ ID NO: 5726035 - DNA, 25 bp, Homo sapien
cagcggtcgacggttgtcgcgggct

SEQ ID NO: 5726036 - DNA, 25 bp, Homo sapien
agcccgcgacaaccgtcgaccgctg

SEQ ID NO: 5726037 - DNA, 25 bp, Homo sapien
ctagagtctacatcgacgcagtccg

SEQ ID NO: 5726038 - DNA, 25 bp, Homo sapien
cggactgcgtcgatgtagactctag

SEQ ID NO: 5726039 - DNA, 25 bp, Homo sapien
cgtgatacgaccgtcgatttgttct

SEQ ID NO: 5726040 - DNA, 25 bp, Homo sapien
agaacaaatcgacggtcgtatcacg

SEQ ID NO: 5726041 - DNA, 25 bp, Homo sapien
agggaaaaacagagtactatacgac

SEQ ID NO: 5726042 - DNA, 25 bp, Homo sapien
gtcgtatagtactctgtttttccct

SEQ ID NO: 5726043 - DNA, 25 bp, Homo sapien
agacacaacgacacattgagattcg

SEQ ID NO: 5726044 - DNA, 25 bp, Homo sapien
cgaatctcaatgtgtcgttgtgtct

SEQ ID NO: 5726045 - DNA, 25 bp, Homo sapien
gaccagacgtaaaggttgagctcct

SEQ ID NO: 5726046 - DNA, 25 bp, Homo sapien
aggagctcaacctttacgtctggtc

SEQ ID NO: 5726047 - DNA, 25 bp, Homo sapien
tcctctccccggacagaggtaggcg

SEQ ID NO: 5726048 - DNA, 25 bp, Homo sapien
cgcctacctctgtccggggagagga

SEQ ID NO: 5726049 - DNA, 25 bp, Homo sapien
cctgtcccgcgcggacgggttctcg

SEQ ID NO: 5726050 - DNA, 25 bp, Homo sapien
cgagaacccgtccgcgcgggacagg

SEQ ID NO: 5726051 - DNA, 25 bp, Homo sapien
gcctgtcccgcgcggacgggttctc

SEQ ID NO: 5726052 - DNA, 25 bp, Homo sapien
gagaacccgtccgcgcgggacaggc

SEQ ID NO: 5726053 - DNA, 25 bp, Homo sapien
accagtaccgatctccggagggaga

SEQ ID NO: 5726054 - DNA, 25 bp, Homo sapien
tctccctccggagatcggtactggt

SEQ ID NO: 5726055 - DNA, 25 bp, Homo sapien
ctgttcctactaggtgtcggcccag

SEQ ID NO: 5726056 - DNA, 25 bp, Homo sapien
ctgggccgacacctagtaggaacag

SEQ ID NO: 5726057 - DNA, 25 bp, Homo sapien
tctgaggtccctcatcgaagtcacc

SEQ ID NO: 5726058 - DNA, 25 bp, Homo sapien
ggtgacttcgatgagggacctcaga

SEQ ID NO: 5726059 - DNA, 25 bp, Homo sapien
cggtcgtactatcggccggcactcg

SEQ ID NO: 5726060 - DNA, 25 bp, Homo sapien
cgagtgccggccgatagtacgaccg

SEQ ID NO: 5726061 - DNA, 25 bp, Homo sapien
gttgtagctagaacctacgcgagtt

SEQ ID NO: 5726062 - DNA, 25 bp, Homo sapien
aactcgcgtaggttctagctacaac

SEQ ID NO: 5726063 - DNA, 25 bp, Homo sapien
gtttacatgtaatattttagataat

SEQ ID NO: 5726064 - DNA, 25 bp, Homo sapien
attatctaaaatattacatgtaaac

SEQ ID NO: 5726065 - DNA, 25 bp, Homo sapien
agtttacatgtaatattttagataa

SEQ ID NO: 5726066 - DNA, 25 bp, Homo sapien
ttatctaaaatattacatgtaaact

SEQ ID NO: 5726067 - DNA, 25 bp, Homo sapien
cacccacgtctgctagggactggtg

SEQ ID NO: 5726068 - DNA, 25 bp, Homo sapien
caccagtccctagcagacgtgggtg

SEQ ID NO: 5726069 - DNA, 25 bp, Homo sapien
ctccctcctgtcaccggacacggtg

SEQ ID NO: 5726070 - DNA, 25 bp, Homo sapien
caccgtgtccggtgacaggagggag

SEQ ID NO: 5726071 - DNA, 25 bp, Homo sapien
gacctcaccccctgtccacaccaga

SEQ ID NO: 5726072 - DNA, 25 bp, Homo sapien
tctggtgtggacagggggtgaggtc

SEQ ID NO: 5726073 - DNA, 25 bp, Homo sapien
ccccgatgtggacggtagagggtac

SEQ ID NO: 5726074 - DNA, 25 bp, Homo sapien
gtaccctctaccgtccacatcgggg

SEQ ID NO: 5726075 - DNA, 25 bp, Homo sapien
ggagtcggtgaccagatcatcttcg

SEQ ID NO: 5726076 - DNA, 25 bp, Homo sapien
cgaagatgatctggtcaccgactcc

SEQ ID NO: 5726077 - DNA, 25 bp, Homo sapien
atcagtactttaatcaccgtttgac

SEQ ID NO: 5726078 - DNA, 25 bp, Homo sapien
gtcaaacggtgattaaagtactgat

SEQ ID NO: 5726079 - DNA, 25 bp, Homo sapien
agggacagtatccactcacgtagag

SEQ ID NO: 5726080 - DNA, 25 bp, Homo sapien
ctctacgtgagtggatactgtccct

SEQ ID NO: 5726081 - DNA, 25 bp, Homo sapien
acccgctccgtcgacacctcgccct

SEQ ID NO: 5726082 - DNA, 25 bp, Homo sapien
agggcgaggtgtcgacggagcgggt

SEQ ID NO: 5726083 - DNA, 25 bp, Homo sapien
acgatcacggcttttcttccgtcga

SEQ ID NO: 5726084 - DNA, 25 bp, Homo sapien
tcgacggaagaaaagccgtgatcgt

SEQ ID NO: 5726085 - DNA, 25 bp, Homo sapien
cgtccctcgacaggagctggaagga

SEQ ID NO: 5726086 - DNA, 25 bp, Homo sapien
tccttccagctcctgtcgagggacg

SEQ ID NO: 5726087 - DNA, 25 bp, Homo sapien
aatttcttaagctgaaacagaagag

SEQ ID NO: 5726088 - DNA, 25 bp, Homo sapien
ctcttctgtttcagcttaagaaatt

SEQ ID NO: 5726089 - DNA, 25 bp, Homo sapien
tagtagagaaatcctgggagaaaga

SEQ ID NO: 5726090 - DNA, 25 bp, Homo sapien
tctttctcccaggatttctctacta

SEQ ID NO: 5726091 - DNA, 25 bp, Homo sapien
ctaccgacgcgatcccgaggctgtg

SEQ ID NO: 5726092 - DNA, 25 bp, Homo sapien
cacagcctcgggatcgcgtcggtag

SEQ ID NO: 5726093 - DNA, 25 bp, Homo sapien
cccggcgctgcgagacccttggtgt

SEQ ID NO: 5726094 - DNA, 25 bp, Homo sapien
acaccaagggtctcgcagcgccggg

SEQ ID NO: 5726095 - DNA, 25 bp, Homo sapien
gagctcagaccgaacctcaagagac

SEQ ID NO: 5726096 - DNA, 25 bp, Homo sapien
gtctcttgaggttcggtctgagctc

SEQ ID NO: 5726097 - DNA, 25 bp, Homo sapien
aagtctgggacgcaggcccaggcgg

SEQ ID NO: 5726098 - DNA, 25 bp, Homo sapien
ccgcctgggcctgcgtcccagactt

SEQ ID NO: 5726099 - DNA, 25 bp, Homo sapien
gtgtgtacgtcagggccattgtccg

SEQ ID NO: 5726100 - DNA, 25 bp, Homo sapien
cggacaatggccctgacgtacacac

SEQ ID NO: 5726101 - DNA, 25 bp, Homo sapien
tgaccctacccgtctgctgttcggg

SEQ ID NO: 5726102 - DNA, 25 bp, Homo sapien
cccgaacagcagacgggtagggtca

SEQ ID NO: 5726103 - DNA, 25 bp, Homo sapien
ggcacgtcccgtcccaatacccgtc

SEQ ID NO: 5726104 - DNA, 25 bp, Homo sapien
gacgggtattgggacgggacgtgcc

SEQ ID NO: 5726105 - DNA, 25 bp, Homo sapien
tgctcctgcttcaggacccgagaca

SEQ ID NO: 5726106 - DNA, 25 bp, Homo sapien
tgtctcgggtcctgaagcaggagca

SEQ ID NO: 5726107 - DNA, 25 bp, Homo sapien
aggacaaggatcaacgacaggaagt

SEQ ID NO: 5726108 - DNA, 25 bp, Homo sapien
acttcctgtcgttgatccttgtcct

SEQ ID NO: 5726109 - DNA, 25 bp, Homo sapien
agggtcacaggaccagcaagggacc

SEQ ID NO: 5726110 - DNA, 25 bp, Homo sapien
ggtcccttgctggtcctgtgaccct

SEQ ID NO: 5726111 - DNA, 25 bp, Homo sapien
atgtagattacataagtcgatctaa

SEQ ID NO: 5726112 - DNA, 25 bp, Homo sapien
ttagatcgacttatgtaatctacat

SEQ ID NO: 5726113 - DNA, 25 bp, Homo sapien
accctctccaacatcggtgaccggg

SEQ ID NO: 5726114 - DNA, 25 bp, Homo sapien
cccggtcaccgatgttggagagggt

SEQ ID NO: 5726115 - DNA, 25 bp, Homo sapien
accgggacacgggccgctacgagag

SEQ ID NO: 5726116 - DNA, 25 bp, Homo sapien
ctctcgtagcggcccgtgtcccggt

SEQ ID NO: 5726117 - DNA, 25 bp, Homo sapien
cctctctcaataaacaggtatcgag

SEQ ID NO: 5726118 - DNA, 25 bp, Homo sapien
ctcgatacctgtttattgagagagg

SEQ ID NO: 5726119 - DNA, 25 bp, Homo sapien
ggtcctttcctctcgggccgaagaa

SEQ ID NO: 5726120 - DNA, 25 bp, Homo sapien
ttcttcggcccgagaggaaaggacc

SEQ ID NO: 5726121 - DNA, 25 bp, Homo sapien
gactgtaatgtgtcaccccgttccc

SEQ ID NO: 5726122 - DNA, 25 bp, Homo sapien
gggaacggggtgacacattacagtc

SEQ ID NO: 5726123 - DNA, 25 bp, Homo sapien
acgaacttcttagagaaaacagaat

SEQ ID NO: 5726124 - DNA, 25 bp, Homo sapien
attctgttttctctaagaagttcgt

SEQ ID NO: 5726125 - DNA, 25 bp, Homo sapien
tagacagacgtatctcaacatttcg

SEQ ID NO: 5726126 - DNA, 25 bp, Homo sapien
cgaaatgttgagatacgtctgtcta

SEQ ID NO: 5726127 - DNA, 25 bp, Homo sapien
acccttggcgctggcgcgtgactgt

SEQ ID NO: 5726128 - DNA, 25 bp, Homo sapien
acagtcacgcgccagcgccaagggt

SEQ ID NO: 5726129 - DNA, 25 bp, Homo sapien
ccccaactggacgtatcccagtgga

SEQ ID NO: 5726130 - DNA, 25 bp, Homo sapien
tccactgggatacgtccagttgggg

SEQ ID NO: 5726131 - DNA, 25 bp, Homo sapien
aaagttgtagatgggacacctatgg

SEQ ID NO: 5726132 - DNA, 25 bp, Homo sapien
ccataggtgtcccatctacaacttt

SEQ ID NO: 5726133 - DNA, 25 bp, Homo sapien
cgggtctccgatgcacgtccgcacc

SEQ ID NO: 5726134 - DNA, 25 bp, Homo sapien
ggtgcggacgtgcatcggagacccg

SEQ ID NO: 5726135 - DNA, 25 bp, Homo sapien
ctcgagtcgtacctgcccgggggtc

SEQ ID NO: 5726136 - DNA, 25 bp, Homo sapien
gacccccgggcaggtacgactcgag

SEQ ID NO: 5726137 - DNA, 25 bp, Homo sapien
gcgcccccgctaccgacgggaggga

SEQ ID NO: 5726138 - DNA, 25 bp, Homo sapien
tccctcccgtcggtagcgggggcgc

SEQ ID NO: 5726139 - DNA, 25 bp, Homo sapien
ccgtggcgcgcggttctgggcggtg

SEQ ID NO: 5726140 - DNA, 25 bp, Homo sapien
caccgcccagaaccgcgcgccacgg

SEQ ID NO: 5726141 - DNA, 25 bp, Homo sapien
tccgtggcgcgcggttctgggcggt

SEQ ID NO: 5726142 - DNA, 25 bp, Homo sapien
accgcccagaaccgcgcgccacgga

SEQ ID NO: 5726143 - DNA, 25 bp, Homo sapien
tcgccgcggcgccccgttctcgccc

SEQ ID NO: 5726144 - DNA, 25 bp, Homo sapien
gggcgagaacggggcgccgcggcga

SEQ ID NO: 5726145 - DNA, 25 bp, Homo sapien
gtcctcgtccccaccggtggtagag

SEQ ID NO: 5726146 - DNA, 25 bp, Homo sapien
ctctaccaccggtggggacgaggac

SEQ ID NO: 5726147 - DNA, 25 bp, Homo sapien
cagtcgcctgccggtccagacgccc

SEQ ID NO: 5726148 - DNA, 25 bp, Homo sapien
gggcgtctggaccggcaggcgactg

SEQ ID NO: 5726149 - DNA, 25 bp, Homo sapien
gggtgaaggtgctgtggccgtcccc

SEQ ID NO: 5726150 - DNA, 25 bp, Homo sapien
ggggacggccacagcaccttcaccc

SEQ ID NO: 5726151 - DNA, 25 bp, Homo sapien
gtcttgttctttgatatttcaagat

SEQ ID NO: 5726152 - DNA, 25 bp, Homo sapien
atcttgaaatatcaaagaacaagac

SEQ ID NO: 5726153 - DNA, 25 bp, Homo sapien
agtcttgttctttgatatttcaaga

SEQ ID NO: 5726154 - DNA, 25 bp, Homo sapien
tcttgaaatatcaaagaacaagact

SEQ ID NO: 5726155 - DNA, 25 bp, Homo sapien
ccaactgtagtcatggttgttcaag

SEQ ID NO: 5726156 - DNA, 25 bp, Homo sapien
cttgaacaaccatgactacagttgg

SEQ ID NO: 5726157 - DNA, 25 bp, Homo sapien
cgtgacccggtcaggtactcccgag

SEQ ID NO: 5726158 - DNA, 25 bp, Homo sapien
ctcgggagtacctgaccgggtcacg

SEQ ID NO: 5726159 - DNA, 25 bp, Homo sapien
gacttctaaaaagtcattatttctt

SEQ ID NO: 5726160 - DNA, 25 bp, Homo sapien
aagaaataatgactttttagaagtc

SEQ ID NO: 5726161 - DNA, 25 bp, Homo sapien
acaacctagaaacacgatattgtag

SEQ ID NO: 5726162 - DNA, 25 bp, Homo sapien
ctacaatatcgtgtttctaggttgt

SEQ ID NO: 5726163 - DNA, 25 bp, Homo sapien
tatatttcaagcaaggtcttttaag

SEQ ID NO: 5726164 - DNA, 25 bp, Homo sapien
cttaaaagaccttgcttgaaatata

SEQ ID NO: 5726165 - DNA, 25 bp, Homo sapien
gtgagagactaaggaaaatattata

SEQ ID NO: 5726166 - DNA, 25 bp, Homo sapien
tataatattttccttagtctctcac

SEQ ID NO: 5726167 - DNA, 25 bp, Homo sapien
gaaactctgagtcccttgtcctccg

SEQ ID NO: 5726168 - DNA, 25 bp, Homo sapien
cggaggacaagggactcagagtttc

SEQ ID NO: 5726169 - DNA, 25 bp, Homo sapien
cgcgaagtgtctacgtcacgggttc

SEQ ID NO: 5726170 - DNA, 25 bp, Homo sapien
gaacccgtgacgtagacacttcgcg

SEQ ID NO: 5726171 - DNA, 25 bp, Homo sapien
cgactggcccggaccagcggacgaa

SEQ ID NO: 5726172 - DNA, 25 bp, Homo sapien
ttcgtccgctggtccgggccagtcg

SEQ ID NO: 5726173 - DNA, 25 bp, Homo sapien
cagagacaccgcacgagtagtaggt

SEQ ID NO: 5726174 - DNA, 25 bp, Homo sapien
acctactactcgtgcggtgtctctg

SEQ ID NO: 5726175 - DNA, 25 bp, Homo sapien
tccttcgtcccagcggaccctgacg

SEQ ID NO: 5726176 - DNA, 25 bp, Homo sapien
cgtcagggtccgctgggacgaagga

SEQ ID NO: 5726177 - DNA, 25 bp, Homo sapien
tcgttctcgactacccggtgtgcac

SEQ ID NO: 5726178 - DNA, 25 bp, Homo sapien
gtgcacaccgggtagtcgagaacga

SEQ ID NO: 5726179 - DNA, 25 bp, Homo sapien
aggtccacttcacctccacagcagt

SEQ ID NO: 5726180 - DNA, 25 bp, Homo sapien
actgctgtggaggtgaagtggacct

SEQ ID NO: 5726181 - DNA, 25 bp, Homo sapien
aacacaacatcacatctttgaagac

SEQ ID NO: 5726182 - DNA, 25 bp, Homo sapien
gtcttcaaagatgtgatgttgtgtt

SEQ ID NO: 5726183 - DNA, 25 bp, Homo sapien
gtccttcttcggagtcacggcggtc

SEQ ID NO: 5726184 - DNA, 25 bp, Homo sapien
gaccgccgtgactccgaagaaggac

SEQ ID NO: 5726185 - DNA, 25 bp, Homo sapien
gccccgggggacagaccctcacctc

SEQ ID NO: 5726186 - DNA, 25 bp, Homo sapien
gaggtgagggtctgtcccccggggc

SEQ ID NO: 5726187 - DNA, 25 bp, Homo sapien
gtccataagataaaaactccaaggt

SEQ ID NO: 5726188 - DNA, 25 bp, Homo sapien
accttggagtttttatcttatggac

SEQ ID NO: 5726189 - DNA, 25 bp, Homo sapien
gagacggtccttccgcctgaggcgc

SEQ ID NO: 5726190 - DNA, 25 bp, Homo sapien
gcgcctcaggcggaaggaccgtctc

SEQ ID NO: 5726191 - DNA, 25 bp, Homo sapien
tactggccccacaggaggtactggc

SEQ ID NO: 5726192 - DNA, 25 bp, Homo sapien
gccagtacctcctgtggggccagta

SEQ ID NO: 5726193 - DNA, 25 bp, Homo sapien
ttaactacgcagactttaaagacca

SEQ ID NO: 5726194 - DNA, 25 bp, Homo sapien
tggtctttaaagtctgcgtagttaa

SEQ ID NO: 5726195 - DNA, 25 bp, Homo sapien
atccggccctccctgacgcacccag

SEQ ID NO: 5726196 - DNA, 25 bp, Homo sapien
ctgggtgcgtcagggagggccggat

SEQ ID NO: 5726197 - DNA, 25 bp, Homo sapien
cgacgaccgaggtccactttggtgt

SEQ ID NO: 5726198 - DNA, 25 bp, Homo sapien
acaccaaagtggacctcggtcgtcg

SEQ ID NO: 5726199 - DNA, 25 bp, Homo sapien
tccggcctcgctccgcagccctacg

SEQ ID NO: 5726200 - DNA, 25 bp, Homo sapien
cgtagggctgcggagcgaggccgga

SEQ ID NO: 5726201 - DNA, 25 bp, Homo sapien
ctattacacctcataccataggact

SEQ ID NO: 5726202 - DNA, 25 bp, Homo sapien
agtcctatggtatgaggtgtaatag

SEQ ID NO: 5726203 - DNA, 25 bp, Homo sapien
attttatacaagtacttgttgaggt

SEQ ID NO: 5726204 - DNA, 25 bp, Homo sapien
acctcaacaagtacttgtataaaat

SEQ ID NO: 5726205 - DNA, 25 bp, Homo sapien
aaactataattcctatcaataggga

SEQ ID NO: 5726206 - DNA, 25 bp, Homo sapien
tccctattgataggaattatagttt

SEQ ID NO: 5726207 - DNA, 25 bp, Homo sapien
ggagaattgccactgtaagggtccg

SEQ ID NO: 5726208 - DNA, 25 bp, Homo sapien
cggacccttacagtggcaattctcc

SEQ ID NO: 5726209 - DNA, 25 bp, Homo sapien
ctaaagtgtagacgtacatagactc

SEQ ID NO: 5726210 - DNA, 25 bp, Homo sapien
gagtctatgtacgtctacactttag

SEQ ID NO: 5726211 - DNA, 25 bp, Homo sapien
gaaatctccggccaagcactaaact

SEQ ID NO: 5726212 - DNA, 25 bp, Homo sapien
agtttagtgcttggccggagatttc

SEQ ID NO: 5726213 - DNA, 25 bp, Homo sapien
acatttcgtgatctagacttaaggg

SEQ ID NO: 5726214 - DNA, 25 bp, Homo sapien
cccttaagtctagatcacgaaatgt

SEQ ID NO: 5726215 - DNA, 25 bp, Homo sapien
accctggagcatccgacccgtggtg

SEQ ID NO: 5726216 - DNA, 25 bp, Homo sapien
caccacgggtcggatgctccagggt

SEQ ID NO: 5726217 - DNA, 25 bp, Homo sapien
caacatataaaatcgccaagagaag

SEQ ID NO: 5726218 - DNA, 25 bp, Homo sapien
cttctcttggcgattttatatgttg

SEQ ID NO: 5726219 - DNA, 25 bp, Homo sapien
gaacggagaatagacccctgactcg

SEQ ID NO: 5726220 - DNA, 25 bp, Homo sapien
cgagtcaggggtctattctccgttc

SEQ ID NO: 5726221 - DNA, 25 bp, Homo sapien
tccagggcgcagaccgggagtcccc

SEQ ID NO: 5726222 - DNA, 25 bp, Homo sapien
ggggactcccggtctgcgccctgga

SEQ ID NO: 5726223 - DNA, 25 bp, Homo sapien
gaccttgcccagtggtcccgacggg

SEQ ID NO: 5726224 - DNA, 25 bp, Homo sapien
cccgtcgggaccactgggcaaggtc

SEQ ID NO: 5726225 - DNA, 25 bp, Homo sapien
aagaccttgcccagtggtcccgacg

SEQ ID NO: 5726226 - DNA, 25 bp, Homo sapien
cgtcgggaccactgggcaaggtctt

SEQ ID NO: 5726227 - DNA, 25 bp, Homo sapien
aatcttatccatctttagatataaa

SEQ ID NO: 5726228 - DNA, 25 bp, Homo sapien
tttatatctaaagatggataagatt

SEQ ID NO: 5726229 - DNA, 25 bp, Homo sapien
acgcggctctctcccgcggccgggt

SEQ ID NO: 5726230 - DNA, 25 bp, Homo sapien
acccggccgcgggagagagccgcgt

SEQ ID NO: 5726231 - DNA, 25 bp, Homo sapien
ggaactctggtagggtctgggacgg

SEQ ID NO: 5726232 - DNA, 25 bp, Homo sapien
ccgtcccagaccctaccagagttcc

SEQ ID NO: 5726233 - DNA, 25 bp, Homo sapien
cgcaatagtattgctgctggtactg

SEQ ID NO: 5726234 - DNA, 25 bp, Homo sapien
cagtaccagcagcaatactattgcg

SEQ ID NO: 5726235 - DNA, 25 bp, Homo sapien
ggaaataacgtggctttgtgagtaa

SEQ ID NO: 5726236 - DNA, 25 bp, Homo sapien
ttactcacaaagccacgttatttcc

SEQ ID NO: 5726237 - DNA, 25 bp, Homo sapien
actcgtcatgtgtagggaagatgac

SEQ ID NO: 5726238 - DNA, 25 bp, Homo sapien
gtcatcttccctacacatgacgagt

SEQ ID NO: 5726239 - DNA, 25 bp, Homo sapien
cgaccccggtgtgcggttgcaggtg

SEQ ID NO: 5726240 - DNA, 25 bp, Homo sapien
cacctgcaaccgcacaccggggtcg

SEQ ID NO: 5726241 - DNA, 25 bp, Homo sapien
tatcgcggagcaccccggcgatctt

SEQ ID NO: 5726242 - DNA, 25 bp, Homo sapien
aagatcgccggggtgctccgcgata

SEQ ID NO: 5726243 - DNA, 25 bp, Homo sapien
ggtctcgacgccccggtgccgaccc

SEQ ID NO: 5726244 - DNA, 25 bp, Homo sapien
gggtcggcaccggggcgtcgagacc

SEQ ID NO: 5726245 - DNA, 25 bp, Homo sapien
cacagggtctcgacgccccggtgcc

SEQ ID NO: 5726246 - DNA, 25 bp, Homo sapien
ggcaccggggcgtcgagaccctgtg

SEQ ID NO: 5726247 - DNA, 25 bp, Homo sapien
tcccccgcgacgtcgcgggccgcga

SEQ ID NO: 5726248 - DNA, 25 bp, Homo sapien
tcgcggcccgcgacgtcgcggggga

SEQ ID NO: 5726249 - DNA, 25 bp, Homo sapien
gagacaccttcacaaactccgacgt

SEQ ID NO: 5726250 - DNA, 25 bp, Homo sapien
acgtcggagtttgtgaaggtgtctc

SEQ ID NO: 5726251 - DNA, 25 bp, Homo sapien
ttcccgctcaccggtgcgtcctcgc

SEQ ID NO: 5726252 - DNA, 25 bp, Homo sapien
gcgaggacgcaccggtgagcgggaa

SEQ ID NO: 5726253 - DNA, 25 bp, Homo sapien
tatttgtactagtcaaaactataca

SEQ ID NO: 5726254 - DNA, 25 bp, Homo sapien
tgtatagttttgactagtacaaata

SEQ ID NO: 5726255 - DNA, 25 bp, Homo sapien
agactggtgccccaggacgggttgt

SEQ ID NO: 5726256 - DNA, 25 bp, Homo sapien
acaacccgtcctggggcaccagtct

SEQ ID NO: 5726257 - DNA, 25 bp, Homo sapien
ggtctgtacaccgacgtgacgagga

SEQ ID NO: 5726258 - DNA, 25 bp, Homo sapien
tcctcgtcacgtcggtgtacagacc

SEQ ID NO: 5726259 - DNA, 25 bp, Homo sapien
cgtccttttcttattacacctctat

SEQ ID NO: 5726260 - DNA, 25 bp, Homo sapien
atagaggtgtaataagaaaaggacg

SEQ ID NO: 5726261 - DNA, 25 bp, Homo sapien
ttctcctcccggagtaaagataccg

SEQ ID NO: 5726262 - DNA, 25 bp, Homo sapien
cggtatctttactccgggaggagaa

SEQ ID NO: 5726263 - DNA, 25 bp, Homo sapien
gtgccccgccggaacagggtggcgg

SEQ ID NO: 5726264 - DNA, 25 bp, Homo sapien
ccgccaccctgttccggcggggcac

SEQ ID NO: 5726265 - DNA, 25 bp, Homo sapien
aatattgattaaattcgagaagacg

SEQ ID NO: 5726266 - DNA, 25 bp, Homo sapien
cgtcttctcgaatttaatcaatatt

SEQ ID NO: 5726267 - DNA, 25 bp, Homo sapien
acgtccgtggcagacggtcacgagt

SEQ ID NO: 5726268 - DNA, 25 bp, Homo sapien
actcgtgaccgtctgccacggacgt

SEQ ID NO: 5726269 - DNA, 25 bp, Homo sapien
gagaccccggcccaacaggttcgga

SEQ ID NO: 5726270 - DNA, 25 bp, Homo sapien
tccgaacctgttgggccggggtctc

SEQ ID NO: 5726271 - DNA, 25 bp, Homo sapien
gaccgccacgcgctggacccgaccg

SEQ ID NO: 5726272 - DNA, 25 bp, Homo sapien
cggtcgggtccagcgcgtggcggtc

SEQ ID NO: 5726273 - DNA, 25 bp, Homo sapien
ttcggatccccgtaccttaagttca

SEQ ID NO: 5726274 - DNA, 25 bp, Homo sapien
tgaacttaaggtacggggatccgaa

SEQ ID NO: 5726275 - DNA, 25 bp, Homo sapien
gaaatgtaatggtttaagaacaaat

SEQ ID NO: 5726276 - DNA, 25 bp, Homo sapien
atttgttcttaaaccattacatttc

SEQ ID NO: 5726277 - DNA, 25 bp, Homo sapien
tagaccctgccgttccgataggcac

SEQ ID NO: 5726278 - DNA, 25 bp, Homo sapien
gtgcctatcggaacggcagggtcta

SEQ ID NO: 5726279 - DNA, 25 bp, Homo sapien
aacatgtagtacttctatgggacct

SEQ ID NO: 5726280 - DNA, 25 bp, Homo sapien
aggtcccatagaagtactacatgtt

SEQ ID NO: 5726281 - DNA, 25 bp, Homo sapien
ctcggcgccgaagggaaacgtagta

SEQ ID NO: 5726282 - DNA, 25 bp, Homo sapien
tactacgtttcccttcggcgccgag

SEQ ID NO: 5726283 - DNA, 25 bp, Homo sapien
acccactcacactcccgaagtgcac

SEQ ID NO: 5726284 - DNA, 25 bp, Homo sapien
gtgcacttcgggagtgtgagtgggt

SEQ ID NO: 5726285 - DNA, 25 bp, Homo sapien
tagcccctgagtctaccgacctact

SEQ ID NO: 5726286 - DNA, 25 bp, Homo sapien
agtaggtcggtagactcaggggcta

SEQ ID NO: 5726287 - DNA, 25 bp, Homo sapien
gtaggttcgtcccaggccacatctc

SEQ ID NO: 5726288 - DNA, 25 bp, Homo sapien
gagatgtggcctgggacgaacctac

SEQ ID NO: 5726289 - DNA, 25 bp, Homo sapien
cataggccacggacgtctaggacac

SEQ ID NO: 5726290 - DNA, 25 bp, Homo sapien
gtgtcctagacgtccgtggcctatg

SEQ ID NO: 5726291 - DNA, 25 bp, Homo sapien
tgccccataggccacggacgtctag

SEQ ID NO: 5726292 - DNA, 25 bp, Homo sapien
ctagacgtccgtggcctatggggca

SEQ ID NO: 5726293 - DNA, 25 bp, Homo sapien
cgtctgttccgtgaggcgaaggaca

SEQ ID NO: 5726294 - DNA, 25 bp, Homo sapien
tgtccttcgcctcacggaacagacg

SEQ ID NO: 5726295 - DNA, 25 bp, Homo sapien
ggaaaccgacgctactgtctaccgt

SEQ ID NO: 5726296 - DNA, 25 bp, Homo sapien
acggtagacagtagcgtcggtttcc

SEQ ID NO: 5726297 - DNA, 25 bp, Homo sapien
tctcctctcctaaatccgagtccgg

SEQ ID NO: 5726298 - DNA, 25 bp, Homo sapien
ccggactcggatttaggagaggaga

SEQ ID NO: 5726299 - DNA, 25 bp, Homo sapien
aacgtcgtcaacatcacagtcgagg

SEQ ID NO: 5726300 - DNA, 25 bp, Homo sapien
cctcgactgtgatgttgacgacgtt

SEQ ID NO: 5726301 - DNA, 25 bp, Homo sapien
gaaaaccgacgggcacgtcgccgcc

SEQ ID NO: 5726302 - DNA, 25 bp, Homo sapien
ggcggcgacgtgcccgtcggttttc

SEQ ID NO: 5726303 - DNA, 25 bp, Homo sapien
gagactgtccgctaaccaacgaaaa

SEQ ID NO: 5726304 - DNA, 25 bp, Homo sapien
ttttcgttggttagcggacagtctc

SEQ ID NO: 5726305 - DNA, 25 bp, Homo sapien
ctctcgtctcaccagccacgaccct

SEQ ID NO: 5726306 - DNA, 25 bp, Homo sapien
agggtcgtggctggtgagacgagag

SEQ ID NO: 5726307 - DNA, 25 bp, Homo sapien
cacccctcgggctagatcgaatcag

SEQ ID NO: 5726308 - DNA, 25 bp, Homo sapien
ctgattcgatctagcccgaggggtg

SEQ ID NO: 5726309 - DNA, 25 bp, Homo sapien
atggtacatgttagactgaagggtc

SEQ ID NO: 5726310 - DNA, 25 bp, Homo sapien
gacccttcagtctaacatgtaccat

SEQ ID NO: 5726311 - DNA, 25 bp, Homo sapien
ggcggacgaggcaccatattccgtc

SEQ ID NO: 5726312 - DNA, 25 bp, Homo sapien
gacggaatatggtgcctcgtccgcc

SEQ ID NO: 5726313 - DNA, 25 bp, Homo sapien
ggaaagagaccatctacgaaacccc

SEQ ID NO: 5726314 - DNA, 25 bp, Homo sapien
ggggtttcgtagatggtctctttcc

SEQ ID NO: 5726315 - DNA, 25 bp, Homo sapien
acgatggagatacaatcccagtttt

SEQ ID NO: 5726316 - DNA, 25 bp, Homo sapien
aaaactgggattgtatctccatcgt

SEQ ID NO: 5726317 - DNA, 25 bp, Homo sapien
cgacggtgggccctgtatcggacgg

SEQ ID NO: 5726318 - DNA, 25 bp, Homo sapien
ccgtccgatacagggcccaccgtcg

SEQ ID NO: 5726319 - DNA, 25 bp, Homo sapien
gtggcgtgcgacatgcgggcccctg

SEQ ID NO: 5726320 - DNA, 25 bp, Homo sapien
caggggcccgcatgtcgcacgccac

SEQ ID NO: 5726321 - DNA, 25 bp, Homo sapien
agtatcaagtcactaaggagtttac

SEQ ID NO: 5726322 - DNA, 25 bp, Homo sapien
gtaaactccttagtgacttgatact

SEQ ID NO: 5726323 - DNA, 25 bp, Homo sapien
cgcccgtctcgagcgggctccgtcg

SEQ ID NO: 5726324 - DNA, 25 bp, Homo sapien
cgacggagcccgctcgagacgggcg

SEQ ID NO: 5726325 - DNA, 25 bp, Homo sapien
ccgcccgtctcgagcgggctccgtc

SEQ ID NO: 5726326 - DNA, 25 bp, Homo sapien
gacggagcccgctcgagacgggcgg

SEQ ID NO: 5726327 - DNA, 25 bp, Homo sapien
gcaccgaccggcgaccacccgcccc

SEQ ID NO: 5726328 - DNA, 25 bp, Homo sapien
ggggcgggtggtcgccggtcggtgc

SEQ ID NO: 5726329 - DNA, 25 bp, Homo sapien
aaactttagtaagacacgagtatca

SEQ ID NO: 5726330 - DNA, 25 bp, Homo sapien
tgatactcgtgtcttactaaagttt

SEQ ID NO: 5726331 - DNA, 25 bp, Homo sapien
aacgagcgcagggaaggcgctccgg

SEQ ID NO: 5726332 - DNA, 25 bp, Homo sapien
ccggagcgccttccctgcgctcgtt

SEQ ID NO: 5726333 - DNA, 25 bp, Homo sapien
ggtctcgggcccgaacgagcgcagg

SEQ ID NO: 5726334 - DNA, 25 bp, Homo sapien
cctgcgctcgttcgggcccgagacc

SEQ ID NO: 5726335 - DNA, 25 bp, Homo sapien
atgttttcgtagaccaaaatgagac

SEQ ID NO: 5726336 - DNA, 25 bp, Homo sapien
gtctcattttggtctacgaaaacat

SEQ ID NO: 5726337 - DNA, 25 bp, Homo sapien
atcggaaagagcgtagccaccaccg

SEQ ID NO: 5726338 - DNA, 25 bp, Homo sapien
cggtggtggctacgctctttccgat

SEQ ID NO: 5726339 - DNA, 25 bp, Homo sapien
gggccgagacgggctccgataggac

SEQ ID NO: 5726340 - DNA, 25 bp, Homo sapien
gtcctatcggagcccgtctcggccc

SEQ ID NO: 5726341 - DNA, 25 bp, Homo sapien
acgtccgcggcccgtgagccgtggg

SEQ ID NO: 5726342 - DNA, 25 bp, Homo sapien
cccacggctcacgggccgcggacgt

SEQ ID NO: 5726343 - DNA, 25 bp, Homo sapien
ttacggtagttacagaaagatgtat

SEQ ID NO: 5726344 - DNA, 25 bp, Homo sapien
atacatctttctgtaactaccgtaa

SEQ ID NO: 5726345 - DNA, 25 bp, Homo sapien
ctcgaccggcctcacccacagccgg

SEQ ID NO: 5726346 - DNA, 25 bp, Homo sapien
ccggctgtgggtgaggccggtcgag

SEQ ID NO: 5726347 - DNA, 25 bp, Homo sapien
ggtgtcaatcgtcaatgtatcagtc

SEQ ID NO: 5726348 - DNA, 25 bp, Homo sapien
gactgatacattgacgattgacacc

SEQ ID NO: 5726349 - DNA, 25 bp, Homo sapien
gccgggtcccgatccagaggacgta

SEQ ID NO: 5726350 - DNA, 25 bp, Homo sapien
tacgtcctctggatcgggacccggc

SEQ ID NO: 5726351 - DNA, 25 bp, Homo sapien
gtgctaacaaatgtcatagagaccc

SEQ ID NO: 5726352 - DNA, 25 bp, Homo sapien
gggtctctatgacatttgttagcac

SEQ ID NO: 5726353 - DNA, 25 bp, Homo sapien
gacggactccgatcagcccctggcg

SEQ ID NO: 5726354 - DNA, 25 bp, Homo sapien
cgccaggggctgatcggagtccgtc

SEQ ID NO: 5726355 - DNA, 25 bp, Homo sapien
cgatcagcccctggcgcgcggccct

SEQ ID NO: 5726356 - DNA, 25 bp, Homo sapien
agggccgcgcgccaggggctgatcg

SEQ ID NO: 5726357 - DNA, 25 bp, Homo sapien
cggactccgatcagcccctggcgcg

SEQ ID NO: 5726358 - DNA, 25 bp, Homo sapien
cgcgccaggggctgatcggagtccg

SEQ ID NO: 5726359 - DNA, 25 bp, Homo sapien
agtgtcgaccagttgtactcgttgg

SEQ ID NO: 5726360 - DNA, 25 bp, Homo sapien
ccaacgagtacaactggtcgacact

SEQ ID NO: 5726361 - DNA, 25 bp, Homo sapien
gcggacacggcgactcctggaagta

SEQ ID NO: 5726362 - DNA, 25 bp, Homo sapien
tacttccaggagtcgccgtgtccgc

SEQ ID NO: 5726363 - DNA, 25 bp, Homo sapien
aaagtatcacataatagaaccataa

SEQ ID NO: 5726364 - DNA, 25 bp, Homo sapien
ttatggttctattatgtgatacttt

SEQ ID NO: 5726365 - DNA, 25 bp, Homo sapien
atctcgtcgtatgttgcattgaaac

SEQ ID NO: 5726366 - DNA, 25 bp, Homo sapien
gtttcaatgcaacatacgacgagat

SEQ ID NO: 5726367 - DNA, 25 bp, Homo sapien
gtcagacctcccgaagggcatccgg

SEQ ID NO: 5726368 - DNA, 25 bp, Homo sapien
ccggatgcccttcgggaggtctgac

SEQ ID NO: 5726369 - DNA, 25 bp, Homo sapien
gtgaggccagactccgcgacggaca

SEQ ID NO: 5726370 - DNA, 25 bp, Homo sapien
tgtccgtcgcggagtctggcctcac

SEQ ID NO: 5726371 - DNA, 25 bp, Homo sapien
cctcgagcggccagcggggacgcga

SEQ ID NO: 5726372 - DNA, 25 bp, Homo sapien
tcgcgtccccgctggccgctcgagg

SEQ ID NO: 5726373 - DNA, 25 bp, Homo sapien
gggtcccgctctgacgtcactgcgc

SEQ ID NO: 5726374 - DNA, 25 bp, Homo sapien
gcgcagtgacgtcagagcgggaccc

SEQ ID NO: 5726375 - DNA, 25 bp, Homo sapien
tcctacacgacgagtcgccaagggt

SEQ ID NO: 5726376 - DNA, 25 bp, Homo sapien
acccttggcgactcgtcgtgtagga

SEQ ID NO: 5726377 - DNA, 25 bp, Homo sapien
gtggtcgtctggtgacgttaaacag

SEQ ID NO: 5726378 - DNA, 25 bp, Homo sapien
ctgtttaacgtcaccagacgaccac

SEQ ID NO: 5726379 - DNA, 25 bp, Homo sapien
gcggaactatgccacagtagttatt

SEQ ID NO: 5726380 - DNA, 25 bp, Homo sapien
aataactactgtggcatagttccgc

SEQ ID NO: 5726381 - DNA, 25 bp, Homo sapien
tagggccctcggtggcccgcaagtc

SEQ ID NO: 5726382 - DNA, 25 bp, Homo sapien
gacttgcgggccaccgagggcccta

SEQ ID NO: 5726383 - DNA, 25 bp, Homo sapien
ttgcccactctccgctgttgcgtca

SEQ ID NO: 5726384 - DNA, 25 bp, Homo sapien
tgacgcaacagcggagagtgggcaa

SEQ ID NO: 5726385 - DNA, 25 bp, Homo sapien
aaacgaaaaattcctgacaccacac

SEQ ID NO: 5726386 - DNA, 25 bp, Homo sapien
gtgtggtgtcaggaatttttcgttt

SEQ ID NO: 5726387 - DNA, 25 bp, Homo sapien
atacgccaacaaggtcgtactcggt

SEQ ID NO: 5726388 - DNA, 25 bp, Homo sapien
accgagtacgaccttgttggcgtat

SEQ ID NO: 5726389 - DNA, 25 bp, Homo sapien
ttctctttgcaacctttataaaact

SEQ ID NO: 5726390 - DNA, 25 bp, Homo sapien
agttttataaaggttgcaaagagaa

SEQ ID NO: 5726391 - DNA, 25 bp, Homo sapien
cgactcacggcgtgctgcgggaagg

SEQ ID NO: 5726392 - DNA, 25 bp, Homo sapien
ccttcccgcagcacgccgtgagtcg

SEQ ID NO: 5726393 - DNA, 25 bp, Homo sapien
tgggtaggccaacggtgtgactgtc

SEQ ID NO: 5726394 - DNA, 25 bp, Homo sapien
gacagtcacaccgttggcctaccca

SEQ ID NO: 5726395 - DNA, 25 bp, Homo sapien
gaccatttatatcctgaggggtgct

SEQ ID NO: 5726396 - DNA, 25 bp, Homo sapien
agcacccctcaggatataaatggtc

SEQ ID NO: 5726397 - DNA, 25 bp, Homo sapien
atatcctgaggggtgcttcagatgg

SEQ ID NO: 5726398 - DNA, 25 bp, Homo sapien
ccatctgaagcacccctcaggatat

SEQ ID NO: 5726399 - DNA, 25 bp, Homo sapien
ttgacccaccaaaacgcctggactg

SEQ ID NO: 5726400 - DNA, 25 bp, Homo sapien
cagtccaggcgttttggtgggtcaa

SEQ ID NO: 5726401 - DNA, 25 bp, Homo sapien
acgaagatcgtatgacaacggagac

SEQ ID NO: 5726402 - DNA, 25 bp, Homo sapien
gtctccgttgtcatacgatcttcgt

SEQ ID NO: 5726403 - DNA, 25 bp, Homo sapien
gaccgtagaccaagaaggaagtccc

SEQ ID NO: 5726404 - DNA, 25 bp, Homo sapien
gggacttccttcttggtctacggtc

SEQ ID NO: 5726405 - DNA, 25 bp, Homo sapien
gagcaagtgtggtcacaggacactg

SEQ ID NO: 5726406 - DNA, 25 bp, Homo sapien
cagtgtcctgtgaccacacttgctc

SEQ ID NO: 5726407 - DNA, 25 bp, Homo sapien
ctcgggacggcatctgactggacac

SEQ ID NO: 5726408 - DNA, 25 bp, Homo sapien
gtgtccagtcagatgccgtcccgag

SEQ ID NO: 5726409 - DNA, 25 bp, Homo sapien
agatagggattacaatggagaaaag

SEQ ID NO: 5726410 - DNA, 25 bp, Homo sapien
cttttctccattgtaatccctatct

SEQ ID NO: 5726411 - DNA, 25 bp, Homo sapien
tcccagtatccatttgaccagttat

SEQ ID NO: 5726412 - DNA, 25 bp, Homo sapien
ataactggtcaaatggatactggga

SEQ ID NO: 5726413 - DNA, 25 bp, Homo sapien
gtcctacccgtcctctgtggtccag

SEQ ID NO: 5726414 - DNA, 25 bp, Homo sapien
ctggaccacagaggacgggtaggac

SEQ ID NO: 5726415 - DNA, 25 bp, Homo sapien
cagggtgggtccgggtgagtcggta

SEQ ID NO: 5726416 - DNA, 25 bp, Homo sapien
taccgactcacccggacccaccctg

SEQ ID NO: 5726417 - DNA, 25 bp, Homo sapien
gtggagtagaccgcgggaacagagg

SEQ ID NO: 5726418 - DNA, 25 bp, Homo sapien
cctctgttcccgcggtctactccac

SEQ ID NO: 5726419 - DNA, 25 bp, Homo sapien
caatgtgtactgtggtcacggaaac

SEQ ID NO: 5726420 - DNA, 25 bp, Homo sapien
gtttccgtgaccacagtacacattg

SEQ ID NO: 5726421 - DNA, 25 bp, Homo sapien
cttagaatctaaacagtcaggaaaa

SEQ ID NO: 5726422 - DNA, 25 bp, Homo sapien
ttttcctgactgtttagattctaag

SEQ ID NO: 5726423 - DNA, 25 bp, Homo sapien
aagatgaccatggaatggttactcc

SEQ ID NO: 5726424 - DNA, 25 bp, Homo sapien
ggagtaaccattccatggtcatctt

SEQ ID NO: 5726425 - DNA, 25 bp, Homo sapien
cgggtctcctcggtcgtgccgcccg

SEQ ID NO: 5726426 - DNA, 25 bp, Homo sapien
cgggcggcacgaccgaggagacccg

SEQ ID NO: 5726427 - DNA, 25 bp, Homo sapien
tcgtccttagctcggtctacgcttg

SEQ ID NO: 5726428 - DNA, 25 bp, Homo sapien
caagcgtagaccgagctaaggacga

SEQ ID NO: 5726429 - DNA, 25 bp, Homo sapien
gggaccctctccgactgggtgccct

SEQ ID NO: 5726430 - DNA, 25 bp, Homo sapien
agggcacccagtcggagagggtccc

SEQ ID NO: 5726431 - DNA, 25 bp, Homo sapien
acgggcggctcgctcccgcggggcc

SEQ ID NO: 5726432 - DNA, 25 bp, Homo sapien
ggccccgcgggagcgagccgcccgt

SEQ ID NO: 5726433 - DNA, 25 bp, Homo sapien
cacgggcggctcgctcccgcggggc

SEQ ID NO: 5726434 - DNA, 25 bp, Homo sapien
gccccgcgggagcgagccgcccgtg

SEQ ID NO: 5726435 - DNA, 25 bp, Homo sapien
acacgggcggctcgctcccgcgggg

SEQ ID NO: 5726436 - DNA, 25 bp, Homo sapien
ccccgcgggagcgagccgcccgtgt

SEQ ID NO: 5726437 - DNA, 25 bp, Homo sapien
tcgtaaaagactcggcacaactcac

SEQ ID NO: 5726438 - DNA, 25 bp, Homo sapien
gtgagttgtgccgagtcttttacga

SEQ ID NO: 5726439 - DNA, 25 bp, Homo sapien
agaccgactttatgaaggtaccgtc

SEQ ID NO: 5726440 - DNA, 25 bp, Homo sapien
gacggtaccttcataaagtcggtct

SEQ ID NO: 5726441 - DNA, 25 bp, Homo sapien
gcgcggccaggcataaacgtcctct

SEQ ID NO: 5726442 - DNA, 25 bp, Homo sapien
agaggacgtttatgcctggccgcgc

SEQ ID NO: 5726443 - DNA, 25 bp, Homo sapien
cgcccgagtcgcaagactaaggctc

SEQ ID NO: 5726444 - DNA, 25 bp, Homo sapien
gagccttagtcttgcgactcgggcg

SEQ ID NO: 5726445 - DNA, 25 bp, Homo sapien
ggtggaacaaagacctacctcggtc

SEQ ID NO: 5726446 - DNA, 25 bp, Homo sapien
gaccgaggtaggtctttgttccacc

SEQ ID NO: 5726447 - DNA, 25 bp, Homo sapien
tcagcccctgccagcccctctgagt

SEQ ID NO: 5726448 - DNA, 25 bp, Homo sapien
actcagaggggctggcaggggctga

SEQ ID NO: 5726449 - DNA, 25 bp, Homo sapien
tgaacattaagtaaatgactgagat

SEQ ID NO: 5726450 - DNA, 25 bp, Homo sapien
atctcagtcatttacttaatgttca

SEQ ID NO: 5726451 - DNA, 25 bp, Homo sapien
cggcgggccggaagggctcgtgtgg

SEQ ID NO: 5726452 - DNA, 25 bp, Homo sapien
ccacacgagcccttccggcccgccg

SEQ ID NO: 5726453 - DNA, 25 bp, Homo sapien
gggctgtggacgcttcgcgccgtgg

SEQ ID NO: 5726454 - DNA, 25 bp, Homo sapien
ccacggcgcgaagcgtccacagccc

SEQ ID NO: 5726455 - DNA, 25 bp, Homo sapien
acacacaggtgccagtctcgagact

SEQ ID NO: 5726456 - DNA, 25 bp, Homo sapien
agtctcgagactggcacctgtgtgt

SEQ ID NO: 5726457 - DNA, 25 bp, Homo sapien
gtcacggcgcccgtgacctcggccg

SEQ ID NO: 5726458 - DNA, 25 bp, Homo sapien
cggccgaggtcacgggcgccgtgac

SEQ ID NO: 5726459 - DNA, 25 bp, Homo sapien
atatccttcataccagggtaatcct

SEQ ID NO: 5726460 - DNA, 25 bp, Homo sapien
aggattaccctggtatgaaggatat

SEQ ID NO: 5726461 - DNA, 25 bp, Homo sapien
actcataaaacagaccattactagc

SEQ ID NO: 5726462 - DNA, 25 bp, Homo sapien
gctagtaatggtctgttttatgagt

SEQ ID NO: 5726463 - DNA, 25 bp, Homo sapien
caagtggtctggaccgtacaggtag

SEQ ID NO: 5726464 - DNA, 25 bp, Homo sapien
ctacctgtacggtccagaccacttg

SEQ ID NO: 5726465 - DNA, 25 bp, Homo sapien
ggttaagaacacgaaatgaatatgg

SEQ ID NO: 5726466 - DNA, 25 bp, Homo sapien
ccatattcatttcgtgttcttaacc

SEQ ID NO: 5726467 - DNA, 25 bp, Homo sapien
cagggtactgcacctgagatcaggt

SEQ ID NO: 5726468 - DNA, 25 bp, Homo sapien
acctgatctcaggtgcagtaccctg

SEQ ID NO: 5726469 - DNA, 25 bp, Homo sapien
taccgtgacgatgttgcgacgccgt

SEQ ID NO: 5726470 - DNA, 25 bp, Homo sapien
acggcgtcgcaacatcgtcacggta

SEQ ID NO: 5726471 - DNA, 25 bp, Homo sapien
agactggtggcaactctccctgaca

SEQ ID NO: 5726472 - DNA, 25 bp, Homo sapien
tgtcagggagagttgccaccagtct

SEQ ID NO: 5726473 - DNA, 25 bp, Homo sapien
gagaatttcttgactaccaatattc

SEQ ID NO: 5726474 - DNA, 25 bp, Homo sapien
gaatattggtagtcaagaaattctc

SEQ ID NO: 5726475 - DNA, 25 bp, Homo sapien
gggacgtctgggagacccggtgaag

SEQ ID NO: 5726476 - DNA, 25 bp, Homo sapien
cttcaccgggtctcccagacgtccc

SEQ ID NO: 5726477 - DNA, 25 bp, Homo sapien
acgaacggctgagtagtgatcggaa

SEQ ID NO: 5726478 - DNA, 25 bp, Homo sapien
ttccgatcactactcagccgttcgt

SEQ ID NO: 5726479 - DNA, 25 bp, Homo sapien
ggtatttagtgggagacccttgagc

SEQ ID NO: 5726480 - DNA, 25 bp, Homo sapien
gctcaagggtctcccactaaatacc

SEQ ID NO: 5726481 - DNA, 25 bp, Homo sapien
atgtaaaggcattcctattccggta

SEQ ID NO: 5726482 - DNA, 25 bp, Homo sapien
taccggaataggaatgcctttacat

SEQ ID NO: 5726483 - DNA, 25 bp, Homo sapien
cagattgtttcgtgcattcttacaa

SEQ ID NO: 5726484 - DNA, 25 bp, Homo sapien
ttgtaagaatgcacgaaacaatctg

SEQ ID NO: 5726485 - DNA, 25 bp, Homo sapien
cacgtacgctccttaaggggcggga

SEQ ID NO: 5726486 - DNA, 25 bp, Homo sapien
tcccgccccttaaggagcgtacgtg

SEQ ID NO: 5726487 - DNA, 25 bp, Homo sapien
acacttattcttaccatgtgtttag

SEQ ID NO: 5726488 - DNA, 25 bp, Homo sapien
ctaaacacatggtaagaataagtgt

SEQ ID NO: 5726489 - DNA, 25 bp, Homo sapien
gggttaggcgaacggagaacatggg

SEQ ID NO: 5726490 - DNA, 25 bp, Homo sapien
cccatgttctccgttcgcctaaccc

SEQ ID NO: 5726491 - DNA, 25 bp, Homo sapien
aacttatccgtccttggacaagtag

SEQ ID NO: 5726492 - DNA, 25 bp, Homo sapien
ctacttgtccaaggacggataagtt

SEQ ID NO: 5726493 - DNA, 25 bp, Homo sapien
cacacttagtatagaagtcgttgac

SEQ ID NO: 5726494 - DNA, 25 bp, Homo sapien
gtcaacgacttctatactaagtgtg

SEQ ID NO: 5726495 - DNA, 25 bp, Homo sapien
gctgggaggggccgcgcgagacatg

SEQ ID NO: 5726496 - DNA, 25 bp, Homo sapien
catgtctcgcgcggcccctcccagc

SEQ ID NO: 5726497 - DNA, 25 bp, Homo sapien
accctgacataagtgccatccttgg

SEQ ID NO: 5726498 - DNA, 25 bp, Homo sapien
ccaaggatggcacttatgtcagggt

SEQ ID NO: 5726499 - DNA, 25 bp, Homo sapien
cgggacgcacccacttacacagtga

SEQ ID NO: 5726500 - DNA, 25 bp, Homo sapien
tcactgtgtaagtgggtgcgtcccg

SEQ ID NO: 5726501 - DNA, 25 bp, Homo sapien
ctcgacgccactcccgtctgggcgt

SEQ ID NO: 5726502 - DNA, 25 bp, Homo sapien
acgcccagacgggagtggcgtcgag

SEQ ID NO: 5726503 - DNA, 25 bp, Homo sapien
acttcgtcatcttccatctaacctt

SEQ ID NO: 5726504 - DNA, 25 bp, Homo sapien
aaggttagatggaagatgacgaagt

SEQ ID NO: 5726505 - DNA, 25 bp, Homo sapien
ccgtacactgttgtgcctttggtat

SEQ ID NO: 5726506 - DNA, 25 bp, Homo sapien
ataccaaaggcacaacagtgtacgg

SEQ ID NO: 5726507 - DNA, 25 bp, Homo sapien
ttcggcgagcctctctgcgtccctg

SEQ ID NO: 5726508 - DNA, 25 bp, Homo sapien
cagggacgcagagaggctcgccgaa

SEQ ID NO: 5726509 - DNA, 25 bp, Homo sapien
ctctggttcccaactcacctcagta

SEQ ID NO: 5726510 - DNA, 25 bp, Homo sapien
tactgaggtgagttgggaaccagag

SEQ ID NO: 5726511 - DNA, 25 bp, Homo sapien
cccatccggtgggagactccgggta

SEQ ID NO: 5726512 - DNA, 25 bp, Homo sapien
tacccggagtctcccaccggatggg

SEQ ID NO: 5726513 - DNA, 25 bp, Homo sapien
atttcctggctcacacgggacgtag

SEQ ID NO: 5726514 - DNA, 25 bp, Homo sapien
ctacgtcccgtgtgagccaggaaat

SEQ ID NO: 5726515 - DNA, 25 bp, Homo sapien
agaccctagtcatcctgtgtcgtcg

SEQ ID NO: 5726516 - DNA, 25 bp, Homo sapien
cgacgacacaggatgactagggtct

SEQ ID NO: 5726517 - DNA, 25 bp, Homo sapien
tcggcgggtccttcgccgaggggta

SEQ ID NO: 5726518 - DNA, 25 bp, Homo sapien
tacccctcggcgaaggacccgccga

SEQ ID NO: 5726519 - DNA, 25 bp, Homo sapien
gtccgagaacctcgccgtatcggtg

SEQ ID NO: 5726520 - DNA, 25 bp, Homo sapien
caccgatacggcgaggttctcggac

SEQ ID NO: 5726521 - DNA, 25 bp, Homo sapien
acttttacataattgtcgtcgacgg

SEQ ID NO: 5726522 - DNA, 25 bp, Homo sapien
ccgtcgacgacaattatgtaaaagt

SEQ ID NO: 5726523 - DNA, 25 bp, Homo sapien
accatcttcagtctttttctttaat

SEQ ID NO: 5726524 - DNA, 25 bp, Homo sapien
attaaagaaaaagactgaagatggt

SEQ ID NO: 5726525 - DNA, 25 bp, Homo sapien
gtcttcaatcgttgtgccgggtcac

SEQ ID NO: 5726526 - DNA, 25 bp, Homo sapien
gtgacccggcacaacgattgaagac

SEQ ID NO: 5726527 - DNA, 25 bp, Homo sapien
cggtgaaagagccacgaccagtacc

SEQ ID NO: 5726528 - DNA, 25 bp, Homo sapien
ggtactggtcgtggctctttcaccg

SEQ ID NO: 5726529 - DNA, 25 bp, Homo sapien
tatttagttgaacccatccattgtt

SEQ ID NO: 5726530 - DNA, 25 bp, Homo sapien
aacaatggatgggttcaactaaata

SEQ ID NO: 5726531 - DNA, 25 bp, Homo sapien
tcatcttggccggtcgggagctccg

SEQ ID NO: 5726532 - DNA, 25 bp, Homo sapien
cggagctcccgaccggccaagatga

SEQ ID NO: 5726533 - DNA, 25 bp, Homo sapien
cggaacgcgcggcttttccagctcc

SEQ ID NO: 5726534 - DNA, 25 bp, Homo sapien
ggagctggaaaagccgcgcgttccg

SEQ ID NO: 5726535 - DNA, 25 bp, Homo sapien
cgacctccgtcggcgcgacgcaccg

SEQ ID NO: 5726536 - DNA, 25 bp, Homo sapien
cggtgcgtcgcgccgacggaggtcg

SEQ ID NO: 5726537 - DNA, 25 bp, Homo sapien
tctccgctgtgcacccggggccgcg

SEQ ID NO: 5726538 - DNA, 25 bp, Homo sapien
cgcggccccgggtgcacagcggaga

SEQ ID NO: 5726539 - DNA, 25 bp, Homo sapien
ttctccgctgtgcacccggggccgc

SEQ ID NO: 5726540 - DNA, 25 bp, Homo sapien
gcggccccgggtgcacagcggagaa

SEQ ID NO: 5726541 - DNA, 25 bp, Homo sapien
agaacaaaggtcactgctactgagg

SEQ ID NO: 5726542 - DNA, 25 bp, Homo sapien
cctcagtagcagtgacctttgttct

SEQ ID NO: 5726543 - DNA, 25 bp, Homo sapien
ctactggacccccagaacctgaggt

SEQ ID NO: 5726544 - DNA, 25 bp, Homo sapien
acctcaggttctgggggtccagtag

SEQ ID NO: 5726545 - DNA, 25 bp, Homo sapien
gtccaggtctcggtaagtcggacct

SEQ ID NO: 5726546 - DNA, 25 bp, Homo sapien
aggtccgacttaccgagacctggac

SEQ ID NO: 5726547 - DNA, 25 bp, Homo sapien
aacattgaatcgtataacctttaaa

SEQ ID NO: 5726548 - DNA, 25 bp, Homo sapien
tttaaaggttatacgattcaatgtt

SEQ ID NO: 5726549 - DNA, 25 bp, Homo sapien
gggacttggcagaaggaagtgcaag

SEQ ID NO: 5726550 - DNA, 25 bp, Homo sapien
cttgcacttccttctgccaagtccc

SEQ ID NO: 5726551 - DNA, 25 bp, Homo sapien
ccacaccgcctcctcccggctcgtc

SEQ ID NO: 5726552 - DNA, 25 bp, Homo sapien
gacgagccgggaggaggcggtgtgg

SEQ ID NO: 5726553 - DNA, 25 bp, Homo sapien
gccgggaactgcagtgagtccctga

SEQ ID NO: 5726554 - DNA, 25 bp, Homo sapien
tcagggactcactgcagttcccggc

SEQ ID NO: 5726555 - DNA, 25 bp, Homo sapien
ttcgagccagtagtagtaaaatatc

SEQ ID NO: 5726556 - DNA, 25 bp, Homo sapien
gatattttactactactggctcgaa

SEQ ID NO: 5726557 - DNA, 25 bp, Homo sapien
tcgaccaggtgtcacgtagctccga

SEQ ID NO: 5726558 - DNA, 25 bp, Homo sapien
tcggagctacgtgacacctggtcga

SEQ ID NO: 5726559 - DNA, 25 bp, Homo sapien
atcatataaaactaagctacttatt

SEQ ID NO: 5726560 - DNA, 25 bp, Homo sapien
aataagtagcttagttttatatgat

SEQ ID NO: 5726561 - DNA, 25 bp, Homo sapien
aatcatataaaactaagctacttat

SEQ ID NO: 5726562 - DNA, 25 bp, Homo sapien
ataagtagcttagttttatatgatt

SEQ ID NO: 5726563 - DNA, 25 bp, Homo sapien
gaaggtgatctctgaggagaccgtg

SEQ ID NO: 5726564 - DNA, 25 bp, Homo sapien
cacggtctcctcagagatcaccttc

SEQ ID NO: 5726565 - DNA, 25 bp, Homo sapien
aagttctggagattcctgtattacc

SEQ ID NO: 5726566 - DNA, 25 bp, Homo sapien
ggtaatacaggaatctccagaactt

SEQ ID NO: 5726567 - DNA, 25 bp, Homo sapien
tattattattgtcgcgtaaaactcc

SEQ ID NO: 5726568 - DNA, 25 bp, Homo sapien
ggagttttacgcgacaataataata

SEQ ID NO: 5726569 - DNA, 25 bp, Homo sapien
tcggagagaccggtgtactcagaga

SEQ ID NO: 5726570 - DNA, 25 bp, Homo sapien
tctctgagtacaccggtctctccga

SEQ ID NO: 5726571 - DNA, 25 bp, Homo sapien
aatccaacttaagtgttcttaacat

SEQ ID NO: 5726572 - DNA, 25 bp, Homo sapien
atgttaagaacacttaagttggatt

SEQ ID NO: 5726573 - DNA, 25 bp, Homo sapien
aaatatagcgagtctcgtaggacag

SEQ ID NO: 5726574 - DNA, 25 bp, Homo sapien
ctgtcctacgagactcgctatattt

SEQ ID NO: 5726575 - DNA, 25 bp, Homo sapien
ctttattcatgactttacaaagtta

SEQ ID NO: 5726576 - DNA, 25 bp, Homo sapien
taactttgtaaagtcatgaataaag

SEQ ID NO: 5726577 - DNA, 25 bp, Homo sapien
tgagaagtaataatccttgaagaat

SEQ ID NO: 5726578 - DNA, 25 bp, Homo sapien
attcttcaaggattattacttctca

SEQ ID NO: 5726579 - DNA, 25 bp, Homo sapien
acgaagataccttttcctgcccatt

SEQ ID NO: 5726580 - DNA, 25 bp, Homo sapien
aatgggcaggaaaaggtatcttcgt

SEQ ID NO: 5726581 - DNA, 25 bp, Homo sapien
tttgtgacctgatacttaaacgact

SEQ ID NO: 5726582 - DNA, 25 bp, Homo sapien
agtcgtttaagtatcaggtcacaaa

SEQ ID NO: 5726583 - DNA, 25 bp, Homo sapien
cgcctcaggaccgtcagccctaccc

SEQ ID NO: 5726584 - DNA, 25 bp, Homo sapien
gggtagggctgacggtcctgaggcg

SEQ ID NO: 5726585 - DNA, 25 bp, Homo sapien
cacccggcgcgcctcttgcgcggtc

SEQ ID NO: 5726586 - DNA, 25 bp, Homo sapien
gaccgcgcaagaggcgcgccgggtg

SEQ ID NO: 5726587 - DNA, 25 bp, Homo sapien
gtcgtcttcctggtacatcccgtgt

SEQ ID NO: 5726588 - DNA, 25 bp, Homo sapien
acacgggatgtaccaggaagacgac

SEQ ID NO: 5726589 - DNA, 25 bp, Homo sapien
agtcgggcgcgagaggagccgcggg

SEQ ID NO: 5726590 - DNA, 25 bp, Homo sapien
cccgcggctcctctcgcgcccgact

SEQ ID NO: 5726591 - DNA, 25 bp, Homo sapien
aaccggagaccgagtttctatatct

SEQ ID NO: 5726592 - DNA, 25 bp, Homo sapien
agatatagaaactcggtctccggtt

SEQ ID NO: 5726593 - DNA, 25 bp, Homo sapien
cctgcgtcgcctcccgaaccccctc

SEQ ID NO: 5726594 - DNA, 25 bp, Homo sapien
gagggggttcgggaggcgacgcagg

SEQ ID NO: 5726595 - DNA, 25 bp, Homo sapien
agaaagagactctatagactcagtg

SEQ ID NO: 5726596 - DNA, 25 bp, Homo sapien
cactgagtctatagagtctctttct

SEQ ID NO: 5726597 - DNA, 25 bp, Homo sapien
atattagtatccacagtctttggag

SEQ ID NO: 5726598 - DNA, 25 bp, Homo sapien
ctccaaagactgtggatactaatat

SEQ ID NO: 5726599 - DNA, 25 bp, Homo sapien
acggggctttcagaagggacgacac

SEQ ID NO: 5726600 - DNA, 25 bp, Homo sapien
gtgtcgtcccttctgaaagccccgt

SEQ ID NO: 5726601 - DNA, 25 bp, Homo sapien
gcgcggaaggcccggaccgcgggtg

SEQ ID NO: 5726602 - DNA, 25 bp, Homo sapien
cacccgcggtccgggccttccgcgc

SEQ ID NO: 5726603 - DNA, 25 bp, Homo sapien
ggagacgactcctgagcaggagaac

SEQ ID NO: 5726604 - DNA, 25 bp, Homo sapien
gttctcctgctcaggagtcgtctcc

SEQ ID NO: 5726605 - DNA, 25 bp, Homo sapien
agtctcaaaaagtcctatgtaagga

SEQ ID NO: 5726606 - DNA, 25 bp, Homo sapien
tccttacataggactttttgagact

SEQ ID NO: 5726607 - DNA, 25 bp, Homo sapien
tgcgacccgacctcggcttcatttg

SEQ ID NO: 5726608 - DNA, 25 bp, Homo sapien
caaatgaagccgaggtcgggtcgca

SEQ ID NO: 5726609 - DNA, 25 bp, Homo sapien
aaaccagtctcccagaaataactcg

SEQ ID NO: 5726610 - DNA, 25 bp, Homo sapien
cgagttatttctgggagactggttt

SEQ ID NO: 5726611 - DNA, 25 bp, Homo sapien
taaaacattttatgtatccagtatc

SEQ ID NO: 5726612 - DNA, 25 bp, Homo sapien
gatactggatacataaaatgtttta

SEQ ID NO: 5726613 - DNA, 25 bp, Homo sapien
tttcctgtgcagacccgggtgtgga

SEQ ID NO: 5726614 - DNA, 25 bp, Homo sapien
tccacacccgggtctgcacaggaaa

SEQ ID NO: 5726615 - DNA, 25 bp, Homo sapien
gctggcgtggcccaggcgagggccg

SEQ ID NO: 5726616 - DNA, 25 bp, Homo sapien
cggccctcgcctgggccacgccagc

SEQ ID NO: 5726617 - DNA, 25 bp, Homo sapien
cgggcgactgcggtgaggaacggcc

SEQ ID NO: 5726618 - DNA, 25 bp, Homo sapien
ggccgttcctcaccgcagtcgcccg

SEQ ID NO: 5726619 - DNA, 25 bp, Homo sapien
agagaaaaggaagtgagtgtaggta

SEQ ID NO: 5726620 - DNA, 25 bp, Homo sapien
tacctacactcacttccttttctct

SEQ ID NO: 5726621 - DNA, 25 bp, Homo sapien
taccttaagaaagaagtctacgacg

SEQ ID NO: 5726622 - DNA, 25 bp, Homo sapien
cgtcgtagacttctttcttaaggta

SEQ ID NO: 5726623 - DNA, 25 bp, Homo sapien
gtcgggtccagggtccacggaccga

SEQ ID NO: 5726624 - DNA, 25 bp, Homo sapien
tcggtccgtggaccctggacccgac

SEQ ID NO: 5726625 - DNA, 25 bp, Homo sapien
tgtctttgaaaagttttagatcgta

SEQ ID NO: 5726626 - DNA, 25 bp, Homo sapien
tacgatctaaaacttttcaaagaca

SEQ ID NO: 5726627 - DNA, 25 bp, Homo sapien
aaaacaaaaattgtcataactagtg

SEQ ID NO: 5726628 - DNA, 25 bp, Homo sapien
cactagttatgacaatttttgtttt

SEQ ID NO: 5726629 - DNA, 25 bp, Homo sapien
acaaaaattgtcataactagtgtaa

SEQ ID NO: 5726630 - DNA, 25 bp, Homo sapien
ttacactagttatgacaatttttgt

SEQ ID NO: 5726631 - DNA, 25 bp, Homo sapien
ggtactcgtcgaaggaccccacatg

SEQ ID NO: 5726632 - DNA, 25 bp, Homo sapien
catgtggggtccttcgacgagtacc

SEQ ID NO: 5726633 - DNA, 25 bp, Homo sapien
gtcggtcgccgtcggcggacacggg

SEQ ID NO: 5726634 - DNA, 25 bp, Homo sapien
cccgtgtccgccgacggcgaccgac

SEQ ID NO: 5726635 - DNA, 25 bp, Homo sapien
agttctaacattccaaagatagact

SEQ ID NO: 5726636 - DNA, 25 bp, Homo sapien
agtctatctttggaatgttagaact

SEQ ID NO: 5726637 - DNA, 25 bp, Homo sapien
cccgacgggggctgtgaagtcctcg

SEQ ID NO: 5726638 - DNA, 25 bp, Homo sapien
cgaggacttcacagcccccgtcggg

SEQ ID NO: 5726639 - DNA, 25 bp, Homo sapien
atgaacatcgcccctagagactcat

SEQ ID NO: 5726640 - DNA, 25 bp, Homo sapien
atgagtctctaggggcgatgttcat

SEQ ID NO: 5726641 - DNA, 25 bp, Homo sapien
gagtggacccccttcgcagtgtgag

SEQ ID NO: 5726642 - DNA, 25 bp, Homo sapien
ctcacactgcgaagggggtccactc

SEQ ID NO: 5726643 - DNA, 25 bp, Homo sapien
aacgtttctgtaccgttctgacctc

SEQ ID NO: 5726644 - DNA, 25 bp, Homo sapien
gaggtcagaacggtacagaaacgtt

SEQ ID NO: 5726645 - DNA, 25 bp, Homo sapien
cagtaccccctcagtcgaacgagaa

SEQ ID NO: 5726646 - DNA, 25 bp, Homo sapien
ttctcgttcgactgagggggtactg

SEQ ID NO: 5726647 - DNA, 25 bp, Homo sapien
gtagccaccggagcagggttcagta

SEQ ID NO: 5726648 - DNA, 25 bp, Homo sapien
tactgaaccctgctccggtggctac

SEQ ID NO: 5726649 - DNA, 25 bp, Homo sapien
cctaaagattctaaacatgtcaaca

SEQ ID NO: 5726650 - DNA, 25 bp, Homo sapien
tgttgacatgtttagaatctttagg

SEQ ID NO: 5726651 - DNA, 25 bp, Homo sapien
ttgtcgctttgtaaacaaacttaag

SEQ ID NO: 5726652 - DNA, 25 bp, Homo sapien
cttaagtttgtttacaaagcgacaa

SEQ ID NO: 5726653 - DNA, 25 bp, Homo sapien
cgacaaataacagacttctatacag

SEQ ID NO: 5726654 - DNA, 25 bp, Homo sapien
ctgtatagaagtctgttatttgtcg

SEQ ID NO: 5726655 - DNA, 25 bp, Homo sapien
gtgtgtcctggattaagaactttac

SEQ ID NO: 5726656 - DNA, 25 bp, Homo sapien
gtaaagttcttaatccaggacacac

SEQ ID NO: 5726657 - DNA, 25 bp, Homo sapien
gctcggtcgagaccgccgctgaccc

SEQ ID NO: 5726658 - DNA, 25 bp, Homo sapien
gggtcagcggcggtctcgaccgagc

SEQ ID NO: 5726659 - DNA, 25 bp, Homo sapien
atcctgctttacaggatcatgtaaa

SEQ ID NO: 5726660 - DNA, 25 bp, Homo sapien
tgttcctgctttctctttcagtatt

SEQ ID NO: 5726661 - DNA, 25 bp, Homo sapien
gcactttagtgattgcttttattac

SEQ ID NO: 5726662 - DNA, 25 bp, Homo sapien
acctttatccctgcttatctgaaac

SEQ ID NO: 5726663 - DNA, 25 bp, Homo sapien
tgtgcccatcatctctgcctttgag

SEQ ID NO: 5726664 - DNA, 25 bp, Homo sapien
cagagtctcgctctgtcgcccaggc

SEQ ID NO: 5726665 - DNA, 25 bp, Homo sapien
ggcatataaattccccatatttgtg

SEQ ID NO: 5726666 - DNA, 25 bp, Homo sapien
cttgtgatatgcacgtggccgacat

SEQ ID NO: 5726667 - DNA, 25 bp, Homo sapien
ggaggggatgtggaccacagtactc

SEQ ID NO: 5726668 - DNA, 25 bp, Homo sapien
gtggggagcatcagagaaggccagg

SEQ ID NO: 5726669 - DNA, 25 bp, Homo sapien
atcccctgggtgcgaggagagtgat

SEQ ID NO: 5726670 - DNA, 25 bp, Homo sapien
ttcccactttcattcaatcaacctg

SEQ ID NO: 5726671 - DNA, 25 bp, Homo sapien
aaaccaaaaatgttcttcatccagg

SEQ ID NO: 5726672 - DNA, 25 bp, Homo sapien
ccacaggaggtgtgatagagccttt

SEQ ID NO: 5726673 - DNA, 25 bp, Homo sapien
tttcagctgcagttgaagagcctga

SEQ ID NO: 5726674 - DNA, 25 bp, Homo sapien
atttcagtgccatacatgttattgt

SEQ ID NO: 5726675 - DNA, 25 bp, Homo sapien
cccaggctggagggcagtggcacga

SEQ ID NO: 5726676 - DNA, 25 bp, Homo sapien
ctggagagaaagaactggaatttcg

SEQ ID NO: 5726677 - DNA, 25 bp, Homo sapien
ctttgagtgtgggactccaggccag

SEQ ID NO: 5726678 - DNA, 25 bp, Homo sapien
ctgcatcgtggcactcctctcgcat

SEQ ID NO: 5726679 - DNA, 25 bp, Homo sapien
cttcatatctctcccttctttacct

SEQ ID NO: 5726680 - DNA, 25 bp, Homo sapien
gttggacctattgccaggaatgttt

SEQ ID NO: 5726681 - DNA, 25 bp, Homo sapien
tttagtagagacagggtttcaccat

SEQ ID NO: 5726682 - DNA, 25 bp, Homo sapien
gatcgtggggttgaccaacaagatg

SEQ ID NO: 5726683 - DNA, 25 bp, Homo sapien
ctttgcccatggaagtctcaaagat

SEQ ID NO: 5726684 - DNA, 25 bp, Homo sapien
tactgaaatgagcctcgtggggagc

SEQ ID NO: 5726685 - DNA, 25 bp, Homo sapien
gcactcctctcgcatggtgtggagg

SEQ ID NO: 5726686 - DNA, 25 bp, Homo sapien
ctcccttctttaccttcatttcatc

SEQ ID NO: 5726687 - DNA, 25 bp, Homo sapien
cacgccattctcctgcctcagcctt

SEQ ID NO: 5726688 - DNA, 25 bp, Homo sapien
tctgagctttgttactgaaatgagc

SEQ ID NO: 5726689 - DNA, 25 bp, Homo sapien
actcctctcgcatggtgtggagggc

SEQ ID NO: 5726690 - DNA, 25 bp, Homo sapien
aacatcttctggagaaggacatcat

SEQ ID NO: 5726691 - DNA, 25 bp, Homo sapien
cacctccccatcatccacgccaagt

SEQ ID NO: 5726692 - DNA, 25 bp, Homo sapien
gcggcctgtgcgttcccttcagtac

SEQ ID NO: 5726693 - DNA, 25 bp, Homo sapien
gagacagagtctcgctctgtcgccc

SEQ ID NO: 5726694 - DNA, 25 bp, Homo sapien
gatggcactttagtgattgctttta

SEQ ID NO: 5726695 - DNA, 25 bp, Homo sapien
gtgagtcctgtcccctttacaagaa

SEQ ID NO: 5726696 - DNA, 25 bp, Homo sapien
ggatatgttgctcaccaccctttct

SEQ ID NO: 5726697 - DNA, 25 bp, Homo sapien
tttctgtgaagccctttgcctgtag

SEQ ID NO: 5726698 - DNA, 25 bp, Homo sapien
caagcaaggccacctggaggatatg

SEQ ID NO: 5726699 - DNA, 25 bp, Homo sapien
ctgtgccgccacctctacctgttcc

SEQ ID NO: 5726700 - DNA, 25 bp, Homo sapien
attattagaacatcttctggagaag

SEQ ID NO: 5726701 - DNA, 25 bp, Homo sapien
tttcgttggttgtttctctgagctt

SEQ ID NO: 5726702 - DNA, 25 bp, Homo sapien
ttgtcctagagtgagagtttggaag

SEQ ID NO: 5726703 - DNA, 25 bp, Homo sapien
cccaaagtgttgggattacaggcgt

SEQ ID NO: 5726704 - DNA, 25 bp, Homo sapien
ggtgctagccaaacagctgttgttg

SEQ ID NO: 5726705 - DNA, 25 bp, Homo sapien
tgatagagcctttgatcttcaggat

SEQ ID NO: 5726706 - DNA, 25 bp, Homo sapien
ccctcccacatgatgtcacctcccc

SEQ ID NO: 5726707 - DNA, 25 bp, Homo sapien
cctagacaataaagatggtcctctc

SEQ ID NO: 5726708 - DNA, 25 bp, Homo sapien
gccttcaggtgaagccttgcactcc

SEQ ID NO: 5726709 - DNA, 25 bp, Homo sapien
ggttcctggtacatcgaggctcttg

SEQ ID NO: 5726710 - DNA, 25 bp, Homo sapien
aaggatcgggaaggttatgctcctg

SEQ ID NO: 5726711 - DNA, 25 bp, Homo sapien
gtcacctccccatcatccacgccaa

SEQ ID NO: 5726712 - DNA, 25 bp, Homo sapien
gtggcctagcactggtgttgagcaa

SEQ ID NO: 5726713 - DNA, 25 bp, Homo sapien
gccttgcatttgtaccttattgatc

SEQ ID NO: 5726714 - DNA, 25 bp, Homo sapien
tgttggctgctgccaccaaatctgt

SEQ ID NO: 5726715 - DNA, 25 bp, Homo sapien
gttctttgttcctgctttctctttc

SEQ ID NO: 5726716 - DNA, 25 bp, Homo sapien
caacaagatggaaagaaccacgcag

SEQ ID NO: 5726717 - DNA, 25 bp, Homo sapien
cttttggctctgaagaagcaaacat

SEQ ID NO: 5726718 - DNA, 25 bp, Homo sapien
ctcccgggttcacgccattctcctg

SEQ ID NO: 5726719 - DNA, 25 bp, Homo sapien
tgttagccgggatggtcttgatctc

SEQ ID NO: 5726720 - DNA, 25 bp, Homo sapien
cacctctctgtctttttccttcctg

SEQ ID NO: 5726721 - DNA, 25 bp, Homo sapien
tgcccgccaccgtgcccggctaatt

SEQ ID NO: 5726722 - DNA, 25 bp, Homo sapien
gttgggattacaggcgtgagccact

SEQ ID NO: 5726723 - DNA, 25 bp, Homo sapien
cccacatgatgtcacctccccatca

SEQ ID NO: 5726724 - DNA, 25 bp, Homo sapien
ttacaagaagctccgcctgtcgaca

SEQ ID NO: 5726725 - DNA, 25 bp, Homo sapien
tgtctttttccttcctgagaaacgt

SEQ ID NO: 5726726 - DNA, 25 bp, Homo sapien
agtctcggcctcgtggcctagcact

SEQ ID NO: 5726727 - DNA, 25 bp, Homo sapien
gctgccaccaaatctgtctagaatc

SEQ ID NO: 5726728 - DNA, 25 bp, Homo sapien
aggggacgcaggatattgggagtgt

SEQ ID NO: 5726729 - DNA, 25 bp, Homo sapien
cagggatgtgggaatctcccagact

SEQ ID NO: 5726730 - DNA, 25 bp, Homo sapien
tactgcagcgccacccagtggaagg

SEQ ID NO: 5726731 - DNA, 25 bp, Homo sapien
ccggtgcaaggagatgtctgaatac

SEQ ID NO: 5726732 - DNA, 25 bp, Homo sapien
atcctccgccctttttgtcctagag

SEQ ID NO: 5726733 - DNA, 25 bp, Homo sapien
gtctcaaagatctttcgttggttgt

SEQ ID NO: 5726734 - DNA, 25 bp, Homo sapien
cagtgccatacatgttattgttttc

SEQ ID NO: 5726735 - DNA, 25 bp, Homo sapien
aaggtgtccaaatttaatgtagaca

SEQ ID NO: 5726736 - DNA, 25 bp, Homo sapien
tgtccaaatttaatgtagacattat

SEQ ID NO: 5726737 - DNA, 25 bp, Homo sapien
caagcttttgggctatgacgtccat

SEQ ID NO: 5726738 - DNA, 25 bp, Homo sapien
tcttctggagaaggacatcatcacc

SEQ ID NO: 5726739 - DNA, 25 bp, Homo sapien
ggcagtttcagccagaatgtggaac

SEQ ID NO: 5726740 - DNA, 25 bp, Homo sapien
ccaggccagctccttttctgtgaag

SEQ ID NO: 5726741 - DNA, 25 bp, Homo sapien
gttgagctgtgactacgacttgagt

SEQ ID NO: 5726742 - DNA, 25 bp, Homo sapien
tcttggtccaccttccagcacaagg

SEQ ID NO: 5726743 - DNA, 25 bp, Homo sapien
aaggacatcatcaccttggaaatga

SEQ ID NO: 5726744 - DNA, 25 bp, Homo sapien
tagatggcactttagtgattgcttt

SEQ ID NO: 5726745 - DNA, 25 bp, Homo sapien
agagggcatataaattccccatatt

SEQ ID NO: 5726746 - DNA, 25 bp, Homo sapien
gtggcacgatctcagctcactgcaa

SEQ ID NO: 5726747 - DNA, 25 bp, Homo sapien
acgccaactgcccaagcctacagaa

SEQ ID NO: 5726748 - DNA, 25 bp, Homo sapien
atttgtgttcagttccagcttttgt

SEQ ID NO: 5726749 - DNA, 25 bp, Homo sapien
cctttgatcttcaggatgcacggtt

SEQ ID NO: 5726750 - DNA, 25 bp, Homo sapien
tgtgatatgcacgtggccgacatgc

SEQ ID NO: 5726751 - DNA, 25 bp, Homo sapien
gcgggaaatggcggcgccgagcgcg

SEQ ID NO: 5726752 - DNA, 25 bp, Homo sapien
gaaatgagggagctcatccaggcca

SEQ ID NO: 5726753 - DNA, 25 bp, Homo sapien
attttatcaaacacacttccagctg

SEQ ID NO: 5726754 - DNA, 25 bp, Homo sapien
cgagtcacggactcctgcatcgtgg

SEQ ID NO: 5726755 - DNA, 25 bp, Homo sapien
gtagagacagggtttcaccatgtta

SEQ ID NO: 5726756 - DNA, 25 bp, Homo sapien
caaagtgttgggattacaggcgtga

SEQ ID NO: 5726757 - DNA, 25 bp, Homo sapien
cccttttccggtgtgtgagtcctgt

SEQ ID NO: 5726758 - DNA, 25 bp, Homo sapien
ctcccacatgatgtcacctccccat

SEQ ID NO: 5726759 - DNA, 25 bp, Homo sapien
cgccattctcctgcctcagccttcc

SEQ ID NO: 5726760 - DNA, 25 bp, Homo sapien
caccaccctttctgggcttcagcat

SEQ ID NO: 5726761 - DNA, 25 bp, Homo sapien
atccaggcctgccgtggagatgaga

SEQ ID NO: 5726762 - DNA, 25 bp, Homo sapien
actcctgcatcgtggcactcctctc

SEQ ID NO: 5726763 - DNA, 25 bp, Homo sapien
actgctccagctccaagaggttttt

SEQ ID NO: 5726764 - DNA, 25 bp, Homo sapien
gctcaagtgttttctgagcgggctt

SEQ ID NO: 5726765 - DNA, 25 bp, Homo sapien
ttcactggagagaaagaactggaat

SEQ ID NO: 5726766 - DNA, 25 bp, Homo sapien
actccctagacaataaagatggtcc

SEQ ID NO: 5726767 - DNA, 25 bp, Homo sapien
gtgttgagcaatgtgcacttcactg

SEQ ID NO: 5726768 - DNA, 25 bp, Homo sapien
aggaagaatggtgtgtttccctaga

SEQ ID NO: 5726769 - DNA, 25 bp, Homo sapien
tgccccctcagggatgtgggaatct

SEQ ID NO: 5726770 - DNA, 25 bp, Homo sapien
atattgggagtgtgtggcatgcatc

SEQ ID NO: 5726771 - DNA, 25 bp, Homo sapien
agtcaccctcttcaagcttttgggc

SEQ ID NO: 5726772 - DNA, 25 bp, Homo sapien
tttttttgtatttttagtagagaca

SEQ ID NO: 5726773 - DNA, 25 bp, Homo sapien
gtggccgacatgctggttaaggtga

SEQ ID NO: 5726774 - DNA, 25 bp, Homo sapien
ccaaagtgggcagtttcagccagaa

SEQ ID NO: 5726775 - DNA, 25 bp, Homo sapien
cttggaaatgagggagctcatccag

SEQ ID NO: 5726776 - DNA, 25 bp, Homo sapien
tgaccaacaagatggaaagaaccac

SEQ ID NO: 5726777 - DNA, 25 bp, Homo sapien
gaccacaggaggtgtgatagagcct

SEQ ID NO: 5726778 - DNA, 25 bp, Homo sapien
caaggagatgtctgaatactgcagc

SEQ ID NO: 5726779 - DNA, 25 bp, Homo sapien
caccgttgagctgtgactacgactt

SEQ ID NO: 5726780 - DNA, 25 bp, Homo sapien
ttagaacatcttctggagaaggaca

SEQ ID NO: 5726781 - DNA, 25 bp, Homo sapien
agcgccacccagtggaaggacactc

SEQ ID NO: 5726782 - DNA, 25 bp, Homo sapien
gaagaatggtgtgtttccctagact

SEQ ID NO: 5726783 - DNA, 25 bp, Homo sapien
tgccggtaaagaaaagttgccgaag

SEQ ID NO: 5726784 - DNA, 25 bp, Homo sapien
aaaatgttcttcatccaggcctgcc

SEQ ID NO: 5726785 - DNA, 25 bp, Homo sapien
atcttttatttcattcatatcctcc

SEQ ID NO: 5726786 - DNA, 25 bp, Homo sapien
acaggaggtgtgatagagcctttga

SEQ ID NO: 5726787 - DNA, 25 bp, Homo sapien
acctagaaacctttatccctgctta

SEQ ID NO: 5726788 - DNA, 25 bp, Homo sapien
tgctccagctccaagaggtttttca

SEQ ID NO: 5726789 - DNA, 25 bp, Homo sapien
tagcactggtgttgagcaatgtgca

SEQ ID NO: 5726790 - DNA, 25 bp, Homo sapien
ctcctcaacttgctgcctaagaggg

SEQ ID NO: 5726791 - DNA, 25 bp, Homo sapien
gactgcccacgcgctcagacatgat

SEQ ID NO: 5726792 - DNA, 25 bp, Homo sapien
aagccctttgcctgtagagccagcc

SEQ ID NO: 5726793 - DNA, 25 bp, Homo sapien
agctccaactcccgggttcacgcca

SEQ ID NO: 5726794 - DNA, 25 bp, Homo sapien
aagaaccacgcaggatcccctgggt

SEQ ID NO: 5726795 - DNA, 25 bp, Homo sapien
ttttttgagacagagtctcgctctg

SEQ ID NO: 5726796 - DNA, 25 bp, Homo sapien
tggtacatcgaggctcttgctcaag

SEQ ID NO: 5726797 - DNA, 25 bp, Homo sapien
gcatcgtggcactcctctcgcatgg

SEQ ID NO: 5726798 - DNA, 25 bp, Homo sapien
tggaaggacactcttggctcgtttg

SEQ ID NO: 5726799 - DNA, 25 bp, Homo sapien
cctcgtggggagcatcagagaaggc

SEQ ID NO: 5726800 - DNA, 25 bp, Homo sapien
catataggttgcagtctcggcctcg

SEQ ID NO: 5726801 - DNA, 25 bp, Homo sapien
tctcccttactattcccactttcat

SEQ ID NO: 5726802 - DNA, 25 bp, Homo sapien
ttttttttgagacagagtctcgctc

SEQ ID NO: 5726803 - DNA, 25 bp, Homo sapien
agaacatcttctggagaaggacatc

SEQ ID NO: 5726804 - DNA, 25 bp, Homo sapien
tcctctctgccttcaggtgaagcct

SEQ ID NO: 5726805 - DNA, 25 bp, Homo sapien
gcacaccgagtcacggactcctgca

SEQ ID NO: 5726806 - DNA, 25 bp, Homo sapien
caaatctgtctagaatcctgcttta

SEQ ID NO: 5726807 - DNA, 25 bp, Homo sapien
gaagccttgcactcctgaattttat

SEQ ID NO: 5726808 - DNA, 25 bp, Homo sapien
tttccttcctgagaaacgtccatct

SEQ ID NO: 5726809 - DNA, 25 bp, Homo sapien
agttacctgcacaccgagtcacgga

SEQ ID NO: 5726810 - DNA, 25 bp, Homo sapien
acttccagctggcatataggttgca

SEQ ID NO: 5726811 - DNA, 25 bp, Homo sapien
tcaacttgctgcctaagaggggtcc

SEQ ID NO: 5726812 - DNA, 25 bp, Homo sapien
cttcagtactgcagcgccacccagt

SEQ ID NO: 5726813 - DNA, 25 bp, Homo sapien
atgttgctcaccaccctttctgggc

SEQ ID NO: 5726814 - DNA, 25 bp, Homo sapien
ttttatttcagtgccatacatgtta

SEQ ID NO: 5726815 - DNA, 25 bp, Homo sapien
ggagggcgccatctatggtgtggat

SEQ ID NO: 5726816 - DNA, 25 bp, Homo sapien
cgatctcagctcactgcaagctcca

SEQ ID NO: 5726817 - DNA, 25 bp, Homo sapien
ttgacaacgccaactgcccaagcct

SEQ ID NO: 5726818 - DNA, 25 bp, Homo sapien
ctgcagcgccacccagtggaaggac

SEQ ID NO: 5726819 - DNA, 25 bp, Homo sapien
tgggcttcagcatgtactcccaccg

SEQ ID NO: 5726820 - DNA, 25 bp, Homo sapien
agatgagactgatcgtggggttgac

SEQ ID NO: 5726821 - DNA, 25 bp, Homo sapien
tatctagatttctagaaaagcttcc

SEQ ID NO: 5726822 - DNA, 25 bp, Homo sapien
cctagcactggtgttgagcaatgtg

SEQ ID NO: 5726823 - DNA, 25 bp, Homo sapien
ctagaaacctttatccctgcttatc

SEQ ID NO: 5726824 - DNA, 25 bp, Homo sapien
atctctgcctttgagtgtgggactc

SEQ ID NO: 5726825 - DNA, 25 bp, Homo sapien
atgtgaccagactgcacaggaaatg

SEQ ID NO: 5726826 - DNA, 25 bp, Homo sapien
atcgggaaggttatgctcctggcac

SEQ ID NO: 5726827 - DNA, 25 bp, Homo sapien
caacgccaactgcccaagcctacag

SEQ ID NO: 5726828 - DNA, 25 bp, Homo sapien
agaaaagttgccgaagatgagactg

SEQ ID NO: 5726829 - DNA, 25 bp, Homo sapien
gaaaagcttcctagcttatctccct

SEQ ID NO: 5726830 - DNA, 25 bp, Homo sapien
cacgcaggatcccctgggtgcgagg

SEQ ID NO: 5726831 - DNA, 25 bp, Homo sapien
cgcatggtgtggagggcgccatcta

SEQ ID NO: 5726832 - DNA, 25 bp, Homo sapien
tttggctctgaagaagcaaacatga

SEQ ID NO: 5726833 - DNA, 25 bp, Homo sapien
aggcctgccgtggagatgagactga

SEQ ID NO: 5726834 - DNA, 25 bp, Homo sapien
tcatcctgttggctgctgccaccaa

SEQ ID NO: 5726835 - DNA, 25 bp, Homo sapien
tctgtctagaatcctgctttacagg

SEQ ID NO: 5726836 - DNA, 25 bp, Homo sapien
atatgcacgtggccgacatgctggt

SEQ ID NO: 5726837 - DNA, 25 bp, Homo sapien
gcccacgcgctcagacatgatatgc

SEQ ID NO: 5726838 - DNA, 25 bp, Homo sapien
caacctagaaacctttatccctgct

SEQ ID NO: 5726839 - DNA, 25 bp, Homo sapien
tggaaagaaccacgcaggatcccct

SEQ ID NO: 5726840 - DNA, 25 bp, Homo sapien
caggctggagggcagtggcacgatc

SEQ ID NO: 5726841 - DNA, 25 bp, Homo sapien
aactggaatttcgctctggagggga

SEQ ID NO: 5726842 - DNA, 25 bp, Homo sapien
tgtctgagagaccatctcctatctt

SEQ ID NO: 5726843 - DNA, 25 bp, Homo sapien
catgcggaacaccaaacgaggttcc

SEQ ID NO: 5726844 - DNA, 25 bp, Homo sapien
tcatccacgccaagtggaagccact

SEQ ID NO: 5726845 - DNA, 25 bp, Homo sapien
acacacttccagctggcatataggt

SEQ ID NO: 5726846 - DNA, 25 bp, Homo sapien
ggttcacgccattctcctgcctcag

SEQ ID NO: 5726847 - DNA, 25 bp, Homo sapien
ggtgcccgccaccgtgcccggctaa

SEQ ID NO: 5726848 - DNA, 25 bp, Homo sapien
cctttctgggcttcagcatgtactc

SEQ ID NO: 5726849 - DNA, 25 bp, Homo sapien
ctagccaaacagctgttgttgagcg

SEQ ID NO: 5726850 - DNA, 25 bp, Homo sapien
agagaccatctcctatcttttattt

SEQ ID NO: 5726851 - DNA, 25 bp, Homo sapien
caaagatctttcgttggttgtttct

SEQ ID NO: 5726852 - DNA, 25 bp, Homo sapien
tacattagttaagatgtctgagaga

SEQ ID NO: 5726853 - DNA, 25 bp, Homo sapien
tctgtgaagccctttgcctgtagag

SEQ ID NO: 5726854 - DNA, 25 bp, Homo sapien
gaacactccctagacaataaagatg

SEQ ID NO: 5726855 - DNA, 25 bp, Homo sapien
agctcatccaggccaaagtgggcag

SEQ ID NO: 5726856 - DNA, 25 bp, Homo sapien
acttcatatctagatttctagaaaa

SEQ ID NO: 5726857 - DNA, 25 bp, Homo sapien
gcactcctgaattttatcaaacaca

SEQ ID NO: 5726858 - DNA, 25 bp, Homo sapien
ggaaactgctccagctccaagaggt

SEQ ID NO: 5726859 - DNA, 25 bp, Homo sapien
ttccagcacaaggagctgatggccg

SEQ ID NO: 5726860 - DNA, 25 bp, Homo sapien
tgagctttgttactgaaatgagcct

SEQ ID NO: 5726861 - DNA, 25 bp, Homo sapien
aacttcccaacttccctgatcttta

SEQ ID NO: 5726862 - DNA, 25 bp, Homo sapien
atttaatgtagacattatcttttgg

SEQ ID NO: 5726863 - DNA, 25 bp, Homo sapien
tctttcgttggttgtttctctgagc

SEQ ID NO: 5726864 - DNA, 25 bp, Homo sapien
cacgatctcagctcactgcaagctc

SEQ ID NO: 5726865 - DNA, 25 bp, Homo sapien
cgccatctatggtgtggatgggaaa

SEQ ID NO: 5726866 - DNA, 25 bp, Homo sapien
accatctcctatcttttatttcatt

SEQ ID NO: 5726867 - DNA, 25 bp, Homo sapien
cctgcctcaaagggactgccgccat

SEQ ID NO: 5726868 - DNA, 25 bp, Homo sapien
agccaacattgccttgcatttgtac

SEQ ID NO: 5726869 - DNA, 25 bp, Homo sapien
ggccgctgacaggggacgcaggata

SEQ ID NO: 5726870 - DNA, 25 bp, Homo sapien
aaggtgaacgcacttatcaaggatc

SEQ ID NO: 5726871 - DNA, 25 bp, Homo sapien
tgtactcccaccgttgagctgtgac

SEQ ID NO: 5726872 - DNA, 25 bp, Homo sapien
cagccagaatgtggaactcctcaac

SEQ ID NO: 5726873 - DNA, 25 bp, Homo sapien
ggagaaggacatcatcaccttggaa

SEQ ID NO: 5726874 - DNA, 25 bp, Homo sapien
ttcctggtacatcgaggctcttgct

SEQ ID NO: 5726875 - DNA, 25 bp, Homo sapien
tgctcaccaccctttctgggcttca

SEQ ID NO: 5726876 - DNA, 25 bp, Homo sapien
catccaggccaaagtgggcagtttc

SEQ ID NO: 5726877 - DNA, 25 bp, Homo sapien
gtggggttgaccaacaagatggaaa

SEQ ID NO: 5726878 - DNA, 25 bp, Homo sapien
agggagaccaagcaaggccacctgg

SEQ ID NO: 5726879 - DNA, 25 bp, Homo sapien
agcctacagaacaaaccaaaaatgt

SEQ ID NO: 5726880 - DNA, 25 bp, Homo sapien
ccagcttttgtagatggcactttag

SEQ ID NO: 5726881 - DNA, 25 bp, Homo sapien
agctgttgttgagcgaattattaga

SEQ ID NO: 5726882 - DNA, 25 bp, Homo sapien
cctggaggatatgttgctcaccacc

SEQ ID NO: 5726883 - DNA, 25 bp, Homo sapien
tctctgtctttttccttcctgagaa

SEQ ID NO: 5726884 - DNA, 25 bp, Homo sapien
cctggtacatcgaggctcttgctca

SEQ ID NO: 5726885 - DNA, 25 bp, Homo sapien
tgttttcaacctagaaacctttatc

SEQ ID NO: 5726886 - DNA, 25 bp, Homo sapien
tccggtgtgtgagtcctgtcccctt

SEQ ID NO: 5726887 - DNA, 25 bp, Homo sapien
agagcctgacaagtgaagttgtaaa

SEQ ID NO: 5726888 - DNA, 25 bp, Homo sapien
tctctctcccttactattcccactt

SEQ ID NO: 5726889 - DNA, 25 bp, Homo sapien
tcccaacttccctgatctttaagac

SEQ ID NO: 5726890 - DNA, 25 bp, Homo sapien
ccactggaccacaggaggtgtgata

SEQ ID NO: 5726891 - DNA, 25 bp, Homo sapien
tgagcaatgtgcacttcactggaga

SEQ ID NO: 5726892 - DNA, 25 bp, Homo sapien
tcaaacacacttccagctggcatat

SEQ ID NO: 5726893 - DNA, 25 bp, Homo sapien
attccaccggtgcaaggagatgtct

SEQ ID NO: 5726894 - DNA, 25 bp, Homo sapien
ggcgtgagccactgcgcccgggcaa

SEQ ID NO: 5726895 - DNA, 25 bp, Homo sapien
aagtctcaaagatctttcgttggtt

SEQ ID NO: 5726896 - DNA, 25 bp, Homo sapien
ttgttactgaaatgagcctcgtggg

SEQ ID NO: 5726897 - DNA, 25 bp, Homo sapien
ggcttcagcatgtactcccaccgtt

SEQ ID NO: 5726898 - DNA, 25 bp, Homo sapien
cttggttggacctattgccaggaat

SEQ ID NO: 5726899 - DNA, 25 bp, Homo sapien
actgagggagaccaagcaaggccac

SEQ ID NO: 5726900 - DNA, 25 bp, Homo sapien
cagtggcacgatctcagctcactgc

SEQ ID NO: 5726901 - DNA, 25 bp, Homo sapien
tcgtggggttgaccaacaagatgga

SEQ ID NO: 5726902 - DNA, 25 bp, Homo sapien
cgccgagcgcggggtcttggtccac

SEQ ID NO: 5726903 - DNA, 25 bp, Homo sapien
acatcatcaccttggaaatgaggga

SEQ ID NO: 5726904 - DNA, 25 bp, Homo sapien
tcatatcctccgccctttttgtcct

SEQ ID NO: 5726905 - DNA, 25 bp, Homo sapien
ggtccaccttccagcacaaggagct

SEQ ID NO: 5726906 - DNA, 25 bp, Homo sapien
ccatggaagtctcaaagatctttcg

SEQ ID NO: 5726907 - DNA, 25 bp, Homo sapien
gtgactacgacttgagtctcccttt

SEQ ID NO: 5726908 - DNA, 25 bp, Homo sapien
tttctgagcgggcttgtgatatgca

SEQ ID NO: 5726909 - DNA, 25 bp, Homo sapien
gttgaccaacaagatggaaagaacc

SEQ ID NO: 5726910 - DNA, 25 bp, Homo sapien
tacatgttattgttttcaacctaga

SEQ ID NO: 5726911 - DNA, 25 bp, Homo sapien
gtgaagccttgcactcctgaatttt

SEQ ID NO: 5726912 - DNA, 25 bp, Homo sapien
agtcacggactcctgcatcgtggca

SEQ ID NO: 5726913 - DNA, 25 bp, Homo sapien
tcccttactattcccactttcattc

SEQ ID NO: 5726914 - DNA, 25 bp, Homo sapien
caggatattgggagtgtgtggcatg

SEQ ID NO: 5726915 - DNA, 25 bp, Homo sapien
tggtgttgagcaatgtgcacttcac

SEQ ID NO: 5726916 - DNA, 25 bp, Homo sapien
ctccaactcccgggttcacgccatt

SEQ ID NO: 5726917 - DNA, 25 bp, Homo sapien
atctcctgacctcatgatccaccca

SEQ ID NO: 5726918 - DNA, 25 bp, Homo sapien
gtcttgatctcctgacctcatgatc

SEQ ID NO: 5726919 - DNA, 25 bp, Homo sapien
ggaaatgcaagagaaactgcagaat

SEQ ID NO: 5726920 - DNA, 25 bp, Homo sapien
cagtgtccagaagcggcctgtgcgt

SEQ ID NO: 5726921 - DNA, 25 bp, Homo sapien
gtaaatgctcaaagatgtaatgtag

SEQ ID NO: 5726922 - DNA, 25 bp, Homo sapien
catctctctcccttactattcccac

SEQ ID NO: 5726923 - DNA, 25 bp, Homo sapien
gcatgcatcctcatcatcaggaaac

SEQ ID NO: 5726924 - DNA, 25 bp, Homo sapien
aaacacacttccagctggcatatag

SEQ ID NO: 5726925 - DNA, 25 bp, Homo sapien
tgcccaagcctacagaacaaaccaa

SEQ ID NO: 5726926 - DNA, 25 bp, Homo sapien
gaaccacgcaggatcccctgggtgc

SEQ ID NO: 5726927 - DNA, 25 bp, Homo sapien
tccaccggtgcaaggagatgtctga

SEQ ID NO: 5726928 - DNA, 25 bp, Homo sapien
aagtgaagttgtaaacacagtgtgg

SEQ ID NO: 5726929 - DNA, 25 bp, Homo sapien
gtgggactccaggccagctcctttt

SEQ ID NO: 5726930 - DNA, 25 bp, Homo sapien
ggcacagaattccaccggtgcaagg

SEQ ID NO: 5726931 - DNA, 25 bp, Homo sapien
gacgcaggatattgggagtgtgtgg

SEQ ID NO: 5726932 - DNA, 25 bp, Homo sapien
gaccacagtactctagtcaccctct

SEQ ID NO: 5726933 - DNA, 25 bp, Homo sapien
tataaattccccatatttgtgttca

SEQ ID NO: 5726934 - DNA, 25 bp, Homo sapien
caggcgtgagccactgcgcccgggc

SEQ ID NO: 5726935 - DNA, 25 bp, Homo sapien
ttacaggatcatgtaaatgctcaaa

SEQ ID NO: 5726936 - DNA, 25 bp, Homo sapien
gaggtttttcagctctttgacaacg

SEQ ID NO: 5726937 - DNA, 25 bp, Homo sapien
ctttctctttcagtattaaactctc

SEQ ID NO: 5726938 - DNA, 25 bp, Homo sapien
aatgtttcagctgcagttgaagagc

SEQ ID NO: 5726939 - DNA, 25 bp, Homo sapien
tgtagatggcactttagtgattgct

SEQ ID NO: 5726940 - DNA, 25 bp, Homo sapien
agggagctcatccaggccaaagtgg

SEQ ID NO: 5726941 - DNA, 25 bp, Homo sapien
tggttggacctattgccaggaatgt

SEQ ID NO: 5726942 - DNA, 25 bp, Homo sapien
gacattatcttttggctctgaagaa

SEQ ID NO: 5726943 - DNA, 25 bp, Homo sapien
ccgagtggtgctagccaaacagctg

SEQ ID NO: 5726944 - DNA, 25 bp, Homo sapien
gatcatgtaaatgctcaaagatgta

SEQ ID NO: 5726945 - DNA, 25 bp, Homo sapien
tagtgattgcttttattacattagt

SEQ ID NO: 5726946 - DNA, 25 bp, Homo sapien
aaggcaccgcagcctgtcagccaac

SEQ ID NO: 5726947 - DNA, 25 bp, Homo sapien
ccaaacgaggttcctggtacatcga

SEQ ID NO: 5726948 - DNA, 25 bp, Homo sapien
caccctcccacatgatgtcacctcc

SEQ ID NO: 5726949 - DNA, 25 bp, Homo sapien
agagaaagaactggaatttcgctct

SEQ ID NO: 5726950 - DNA, 25 bp, Homo sapien
gatttctagaaaagcttcctagctt

SEQ ID NO: 5726951 - DNA, 25 bp, Homo sapien
tcaaagatgtaatgtagttctttgt

SEQ ID NO: 5726952 - DNA, 25 bp, Homo sapien
agggtttcaccatgttagccgggat

SEQ ID NO: 5726953 - DNA, 25 bp, Homo sapien
tctagaatcctgctttacaggatca

SEQ ID NO: 5726954 - DNA, 25 bp, Homo sapien
aatggcggcgccgagcgcggggtct

SEQ ID NO: 5726955 - DNA, 25 bp, Homo sapien
actggtgttgagcaatgtgcacttc

SEQ ID NO: 5726956 - DNA, 25 bp, Homo sapien
ggattacaggcgtgagccactgcgc

SEQ ID NO: 5726957 - DNA, 25 bp, Homo sapien
ccttccagcacaaggagctgatggc

SEQ ID NO: 5726958 - DNA, 25 bp, Homo sapien
ggccaggaagaatggtgtgtttccc

SEQ ID NO: 5726959 - DNA, 25 bp, Homo sapien
ggaactcctcaacttgctgcctaag

SEQ ID NO: 5726960 - DNA, 25 bp, Homo sapien
tggatgggaaactgctccagctcca

SEQ ID NO: 5726961 - DNA, 25 bp, Homo sapien
cttatctccctgcttcatatctctc

SEQ ID NO: 5726962 - DNA, 25 bp, Homo sapien
ttgtgttcagttccagcttttgtag

SEQ ID NO: 5726963 - DNA, 25 bp, Homo sapien
cctgctttctctttcagtattaaac

SEQ ID NO: 5726964 - DNA, 25 bp, Homo sapien
aactcccgggttcacgccattctcc

SEQ ID NO: 5726965 - DNA, 25 bp, Homo sapien
ggaatgtttcagctgcagttgaaga

SEQ ID NO: 5726966 - DNA, 25 bp, Homo sapien
accaaatctgtctagaatcctgctt

SEQ ID NO: 5726967 - DNA, 25 bp, Homo sapien
gccagaatgtggaactcctcaactt

SEQ ID NO: 5726968 - DNA, 25 bp, Homo sapien
acgtggccgacatgctggttaaggt

SEQ ID NO: 5726969 - DNA, 25 bp, Homo sapien
agctttgttactgaaatgagcctcg

SEQ ID NO: 5726970 - DNA, 25 bp, Homo sapien
acctgttcccaggacaccctcccac

SEQ ID NO: 5726971 - DNA, 25 bp, Homo sapien
gagtctcgctctgtcgcccaggctg

SEQ ID NO: 5726972 - DNA, 25 bp, Homo sapien
cggtttctgttctgccccctcaggg

SEQ ID NO: 5726973 - DNA, 25 bp, Homo sapien
accacctctctgtctttttccttcc

SEQ ID NO: 5726974 - DNA, 25 bp, Homo sapien
agctctttgacaacgccaactgccc

SEQ ID NO: 5726975 - DNA, 25 bp, Homo sapien
tattgccaggaatgtttcagctgca

SEQ ID NO: 5726976 - DNA, 25 bp, Homo sapien
gcctcccaaagtgttgggattacag

SEQ ID NO: 5726977 - DNA, 25 bp, Homo sapien
gaagttgtaaacacagtgtggttat

SEQ ID NO: 5726978 - DNA, 25 bp, Homo sapien
ggagtgtgtggcatgcatcctcatc

SEQ ID NO: 5726979 - DNA, 25 bp, Homo sapien
aatctgtctagaatcctgctttaca

SEQ ID NO: 5726980 - DNA, 25 bp, Homo sapien
gtggagggcgccatctatggtgtgg

SEQ ID NO: 5726981 - DNA, 25 bp, Homo sapien
tcaggatgcacggtttctgttctgc

SEQ ID NO: 5726982 - DNA, 25 bp, Homo sapien
ctttatccctgcttatctgaaactt

SEQ ID NO: 5726983 - DNA, 25 bp, Homo sapien
agcttttgggctatgacgtccatgt

SEQ ID NO: 5726984 - DNA, 25 bp, Homo sapien
tagtagagacagggtttcaccatgt

SEQ ID NO: 5726985 - DNA, 25 bp, Homo sapien
ggaagtctcaaagatctttcgttgg

SEQ ID NO: 5726986 - DNA, 25 bp, Homo sapien
tatgtggcttttatttcagtgccat

SEQ ID NO: 5726987 - DNA, 25 bp, Homo sapien
aagcactgagggagaccaagcaagg

SEQ ID NO: 5726988 - DNA, 25 bp, Homo sapien
tgcttcatatctctcccttctttac

SEQ ID NO: 5726989 - DNA, 25 bp, Homo sapien
gagtggtgctagccaaacagctgtt

SEQ ID NO: 5726990 - DNA, 25 bp, Homo sapien
gagccagccttggttggacctattg

SEQ ID NO: 5726991 - DNA, 25 bp, Homo sapien
tgcaaggagatgtctgaatactgca

SEQ ID NO: 5726992 - DNA, 25 bp, Homo sapien
accaaaaatgttcttcatccaggcc

SEQ ID NO: 5726993 - DNA, 25 bp, Homo sapien
aaacagctgttgttgagcgaattat

SEQ ID NO: 5726994 - DNA, 25 bp, Homo sapien
aatactgcagcactctgtgccgcca

SEQ ID NO: 5726995 - DNA, 25 bp, Homo sapien
tgtcccctttacaagaagctccgcc

SEQ ID NO: 5726996 - DNA, 25 bp, Homo sapien
tatcaaggatcgggaaggttatgct

SEQ ID NO: 5726997 - DNA, 25 bp, Homo sapien
aaagtgggcagtttcagccagaatg

SEQ ID NO: 5726998 - DNA, 25 bp, Homo sapien
gaaacttcccaacttccctgatctt

SEQ ID NO: 5726999 - DNA, 25 bp, Homo sapien
ttattacattagttaagatgtctga

SEQ ID NO: 5727000 - DNA, 25 bp, Homo sapien
ggctggagggcagtggcacgatctc

SEQ ID NO: 5727001 - DNA, 25 bp, Homo sapien
aaacctttatccctgcttatctgaa

SEQ ID NO: 5727002 - DNA, 25 bp, Homo sapien
tgacaggggacgcaggatattggga

SEQ ID NO: 5727003 - DNA, 25 bp, Homo sapien
tttaccttcatttcatcctgttggc

SEQ ID NO: 5727004 - DNA, 25 bp, Homo sapien
gtcctagagtgagagtttggaaggt

SEQ ID NO: 5727005 - DNA, 25 bp, Homo sapien
ggagagaaagaactggaatttcgct

SEQ ID NO: 5727006 - DNA, 25 bp, Homo sapien
acggactcctgcatcgtggcactcc

SEQ ID NO: 5727007 - DNA, 25 bp, Homo sapien
acatcgaggctcttgctcaagtgtt

SEQ ID NO: 5727008 - DNA, 25 bp, Homo sapien
gttctgccccctcagggatgtggga

SEQ ID NO: 5727009 - DNA, 25 bp, Homo sapien
tactcccaccgttgagctgtgacta

SEQ ID NO: 5727010 - DNA, 25 bp, Homo sapien
tcctagcttatctccctgcttcata

SEQ ID NO: 5727011 - DNA, 25 bp, Homo sapien
attctcctgcctcagccttccaagt

SEQ ID NO: 5727012 - DNA, 25 bp, Homo sapien
acttgtttcctgtgcccatcatctc

SEQ ID NO: 5727013 - DNA, 25 bp, Homo sapien
agtggaaggacactcttggctcgtt

SEQ ID NO: 5727014 - DNA, 25 bp, Homo sapien
tggcactttagtgattgcttttatt

SEQ ID NO: 5727015 - DNA, 25 bp, Homo sapien
actctaaaaaagaaccgagtggtgc

SEQ ID NO: 5727016 - DNA, 25 bp, Homo sapien
tagacattatcttttggctctgaag

SEQ ID NO: 5727017 - DNA, 25 bp, Homo sapien
ctagcttatctccctgcttcatatc

SEQ ID NO: 5727018 - DNA, 25 bp, Homo sapien
ggcttgtgatatgcacgtggccgac

SEQ ID NO: 5727019 - DNA, 25 bp, Homo sapien
ttggctgctgccaccaaatctgtct

SEQ ID NO: 5727020 - DNA, 25 bp, Homo sapien
gcacttcatatctagatttctagaa

SEQ ID NO: 5727021 - DNA, 25 bp, Homo sapien
tagttctttgttcctgctttctctt

SEQ ID NO: 5727022 - DNA, 25 bp, Homo sapien
ggcgccatctatggtgtggatggga

SEQ ID NO: 5727023 - DNA, 25 bp, Homo sapien
gctgggactacaggtgcccgccacc

SEQ ID NO: 5727024 - DNA, 25 bp, Homo sapien
atgcatcctcatcatcaggaaactc

SEQ ID NO: 5727025 - DNA, 25 bp, Homo sapien
tggcggcgccgagcgcggggtcttg

SEQ ID NO: 5727026 - DNA, 25 bp, Homo sapien
gacgtccatgttctatgtgaccaga

SEQ ID NO: 5727027 - DNA, 25 bp, Homo sapien
ttgccttgcatttgtaccttattga

SEQ ID NO: 5727028 - DNA, 25 bp, Homo sapien
gaagcaaacatgactagagacgcac

SEQ ID NO: 5727029 - DNA, 25 bp, Homo sapien
tgtagttctttgttcctgctttctc

SEQ ID NO: 5727030 - DNA, 25 bp, Homo sapien
cttatcaaggatcgggaaggttatg

SEQ ID NO: 5727031 - DNA, 25 bp, Homo sapien
ccactgcgcccgggcaagacctttt

SEQ ID NO: 5727032 - DNA, 25 bp, Homo sapien
atgtcacctccccatcatccacgcc

SEQ ID NO: 5727033 - DNA, 25 bp, Homo sapien
gctcaaggcaccgcagcctgtcagc

SEQ ID NO: 5727034 - DNA, 25 bp, Homo sapien
cacctggaggatatgttgctcacca

SEQ ID NO: 5727035 - DNA, 25 bp, Homo sapien
gggacgcaggatattgggagtgtgt

SEQ ID NO: 5727036 - DNA, 25 bp, Homo sapien
ttgcccatggaagtctcaaagatct

SEQ ID NO: 5727037 - DNA, 25 bp, Homo sapien
gtcgcccaggctggagggcagtggc

SEQ ID NO: 5727038 - DNA, 25 bp, Homo sapien
gccaagtggaagccactggaccaca

SEQ ID NO: 5727039 - DNA, 25 bp, Homo sapien
caaggagctgatggccgctgacagg

SEQ ID NO: 5727040 - DNA, 25 bp, Homo sapien
gccatgcggaacaccaaacgaggtt

SEQ ID NO: 5727041 - DNA, 25 bp, Homo sapien
caggtgcccgccaccgtgcccggct

SEQ ID NO: 5727042 - DNA, 25 bp, Homo sapien
gctcaaagatgtaatgtagttcttt

SEQ ID NO: 5727043 - DNA, 25 bp, Homo sapien
agggactgccgccatgcggaacacc

SEQ ID NO: 5727044 - DNA, 25 bp, Homo sapien
cccaagcttttgatgccttctgtga

SEQ ID NO: 5727045 - DNA, 25 bp, Homo sapien
ccacagtactctagtcaccctcttc

SEQ ID NO: 5727046 - DNA, 25 bp, Homo sapien
ctctttcagtattaaactctccttt

SEQ ID NO: 5727047 - DNA, 25 bp, Homo sapien
tttagtgattgcttttattacatta

SEQ ID NO: 5727048 - DNA, 25 bp, Homo sapien
cctgacctcatgatccacccacctc

SEQ ID NO: 5727049 - DNA, 25 bp, Homo sapien
catcatccacgccaagtggaagcca

SEQ ID NO: 5727050 - DNA, 25 bp, Homo sapien
tttgtaccttattgatctttgccca

SEQ ID NO: 5727051 - DNA, 25 bp, Homo sapien
gaagatgagactgcccacgcgctca

SEQ ID NO: 5727052 - DNA, 25 bp, Homo sapien
gtggagatgagactgatcgtggggt

SEQ ID NO: 5727053 - DNA, 25 bp, Homo sapien
cttcccaacttccctgatctttaag

SEQ ID NO: 5727054 - DNA, 25 bp, Homo sapien
ccagaagcggcctgtgcgttccctt

SEQ ID NO: 5727055 - DNA, 25 bp, Homo sapien
tccaggccaaagtgggcagtttcag

SEQ ID NO: 5727056 - DNA, 25 bp, Homo sapien
gctcttgctcaagtgttttctgagc

SEQ ID NO: 5727057 - DNA, 25 bp, Homo sapien
gggctcaaggcaccgcagcctgtca

SEQ ID NO: 5727058 - DNA, 25 bp, Homo sapien
ccctgcttatctgaaacttcccaac

SEQ ID NO: 5727059 - DNA, 25 bp, Homo sapien
aatggtgtgtttccctagactctgt

SEQ ID NO: 5727060 - DNA, 25 bp, Homo sapien
ttatgctcctggcacagaattccac

SEQ ID NO: 5727061 - DNA, 25 bp, Homo sapien
tgctttacaggatcatgtaaatgct

SEQ ID NO: 5727062 - DNA, 25 bp, Homo sapien
ggaaaagcgggaaatggcggcgccg

SEQ ID NO: 5727063 - DNA, 25 bp, Homo sapien
tgcggctatgcctgcctcaaaggga

SEQ ID NO: 5727064 - DNA, 25 bp, Homo sapien
gaggtgtgatagagcctttgatctt

SEQ ID NO: 5727065 - DNA, 25 bp, Homo sapien
aaggccaggaagaatggtgtgtttc

SEQ ID NO: 5727066 - DNA, 25 bp, Homo sapien
ttgagtctcccttttccggtgtgtg

SEQ ID NO: 5727067 - DNA, 25 bp, Homo sapien
gagtgatgccggtaaagaaaagttg

SEQ ID NO: 5727068 - DNA, 25 bp, Homo sapien
cgaggctcttgctcaagtgttttct

SEQ ID NO: 5727069 - DNA, 25 bp, Homo sapien
ttgcacagttacctgcacaccgagt

SEQ ID NO: 5727070 - DNA, 25 bp, Homo sapien
tcagttccagcttttgtagatggca

SEQ ID NO: 5727071 - DNA, 25 bp, Homo sapien
atatcctccgccctttttgtcctag

SEQ ID NO: 5727072 - DNA, 25 bp, Homo sapien
ccgctgacaggggacgcaggatatt

SEQ ID NO: 5727073 - DNA, 25 bp, Homo sapien
ctgtcgcccaggctggagggcagtg

SEQ ID NO: 5727074 - DNA, 25 bp, Homo sapien
gtacatcgaggctcttgctcaagtg

SEQ ID NO: 5727075 - DNA, 25 bp, Homo sapien
agcatcagagaaggccaggaagaat

SEQ ID NO: 5727076 - DNA, 25 bp, Homo sapien
actattcccactttcattcaatcaa

SEQ ID NO: 5727077 - DNA, 25 bp, Homo sapien
cttctttaccttcatttcatcctgt

SEQ ID NO: 5727078 - DNA, 25 bp, Homo sapien
ttatttcagtgccatacatgttatt

SEQ ID NO: 5727079 - DNA, 25 bp, Homo sapien
tcgctctggaggggatgtggaccac

SEQ ID NO: 5727080 - DNA, 25 bp, Homo sapien
tgtgaagccctttgcctgtagagcc

SEQ ID NO: 5727081 - DNA, 25 bp, Homo sapien
atcttcaggatgcacggtttctgtt

SEQ ID NO: 5727082 - DNA, 25 bp, Homo sapien
tcctgcatcgtggcactcctctcgc

SEQ ID NO: 5727083 - DNA, 25 bp, Homo sapien
ctctagtcaccctcttcaagctttt

SEQ ID NO: 5727084 - DNA, 25 bp, Homo sapien
ttttattacattagttaagatgtct

SEQ ID NO: 5727085 - DNA, 25 bp, Homo sapien
ctgaattttatcaaacacacttcca

SEQ ID NO: 5727086 - DNA, 25 bp, Homo sapien
acaagatggaaagaaccacgcagga

SEQ ID NO: 5727087 - DNA, 25 bp, Homo sapien
attcatatcctccgccctttttgtc

SEQ ID NO: 5727088 - DNA, 25 bp, Homo sapien
atccctgcttatctgaaacttccca

SEQ ID NO: 5727089 - DNA, 25 bp, Homo sapien
caaacatgactagagacgcaccttg

SEQ ID NO: 5727090 - DNA, 25 bp, Homo sapien
gatatgcggctatgcctgcctcaaa

SEQ ID NO: 5727091 - DNA, 25 bp, Homo sapien
ttatccctgcttatctgaaacttcc

SEQ ID NO: 5727092 - DNA, 25 bp, Homo sapien
ccaacttccctgatctttaagactt

SEQ ID NO: 5727093 - DNA, 25 bp, Homo sapien
ggctatgacgtccatgttctatgtg

SEQ ID NO: 5727094 - DNA, 25 bp, Homo sapien
gatgtgggaatctcccagacttgtt

SEQ ID NO: 5727095 - DNA, 25 bp, Homo sapien
tggaccacaggaggtgtgatagagc

SEQ ID NO: 5727096 - DNA, 25 bp, Homo sapien
gacatgctggttaaggtgaacgcac

SEQ ID NO: 5727097 - DNA, 25 bp, Homo sapien
agaaccgagtggtgctagccaaaca

SEQ ID NO: 5727098 - DNA, 25 bp, Homo sapien
aaagaaaagttgccgaagatgagac

SEQ ID NO: 5727099 - DNA, 25 bp, Homo sapien
aagcgggaaatggcggcgccgagcg

SEQ ID NO: 5727100 - DNA, 25 bp, Homo sapien
tcagccaacattgccttgcatttgt

SEQ ID NO: 5727101 - DNA, 25 bp, Homo sapien
tcaccctcttcaagcttttgggcta

SEQ ID NO: 5727102 - DNA, 25 bp, Homo sapien
ccacctcagcctcccaaagtgttgg

SEQ ID NO: 5727103 - DNA, 25 bp, Homo sapien
aggatgcacggtttctgttctgccc

SEQ ID NO: 5727104 - DNA, 25 bp, Homo sapien
tgggagtgtgtggcatgcatcctca

SEQ ID NO: 5727105 - DNA, 25 bp, Homo sapien
ctggcatataggttgcagtctcggc

SEQ ID NO: 5727106 - DNA, 25 bp, Homo sapien
gtgcacttcactggagagaaagaac

SEQ ID NO: 5727107 - DNA, 25 bp, Homo sapien
ctggcacagaattccaccggtgcaa

SEQ ID NO: 5727108 - DNA, 25 bp, Homo sapien
tgcccatcatctctgcctttgagtg

SEQ ID NO: 5727109 - DNA, 25 bp, Homo sapien
atctcagctcactgcaagctccaac

SEQ ID NO: 5727110 - DNA, 25 bp, Homo sapien
gacaataaagatggtcctctctgcc

SEQ ID NO: 5727111 - DNA, 25 bp, Homo sapien
ctgcccacgcgctcagacatgatat

SEQ ID NO: 5727112 - DNA, 25 bp, Homo sapien
atggccgctgacaggggacgcagga

SEQ ID NO: 5727113 - DNA, 25 bp, Homo sapien
tttgatattatgtggcttttatttc

SEQ ID NO: 5727114 - DNA, 25 bp, Homo sapien
agcctgtcagccaacattgccttgc

SEQ ID NO: 5727115 - DNA, 25 bp, Homo sapien
cgggttcacgccattctcctgcctc

SEQ ID NO: 5727116 - DNA, 25 bp, Homo sapien
gtttgggctcaaggcaccgcagcct

SEQ ID NO: 5727117 - DNA, 25 bp, Homo sapien
agacatgatatgcggctatgcctgc

SEQ ID NO: 5727118 - DNA, 25 bp, Homo sapien
ggcatataggttgcagtctcggcct

SEQ ID NO: 5727119 - DNA, 25 bp, Homo sapien
ttattgatctttgcccatggaagtc

SEQ ID NO: 5727120 - DNA, 25 bp, Homo sapien
tagaaaagcttcctagcttatctcc

SEQ ID NO: 5727121 - DNA, 25 bp, Homo sapien
aacgtccatctctctcccttactat

SEQ ID NO: 5727122 - DNA, 25 bp, Homo sapien
ctctcgcatggtgtggagggcgcca

SEQ ID NO: 5727123 - DNA, 25 bp, Homo sapien
cttttccggtgtgtgagtcctgtcc

SEQ ID NO: 5727124 - DNA, 25 bp, Homo sapien
tttgatgccttctgtgaagcactga

SEQ ID NO: 5727125 - DNA, 25 bp, Homo sapien
caccgcagcctgtcagccaacattg

SEQ ID NO: 5727126 - DNA, 25 bp, Homo sapien
ctcgcatggtgtggagggcgccatc

SEQ ID NO: 5727127 - DNA, 25 bp, Homo sapien
gttttctgagcgggcttgtgatatg

SEQ ID NO: 5727128 - DNA, 25 bp, Homo sapien
tcacggactcctgcatcgtggcact

SEQ ID NO: 5727129 - DNA, 25 bp, Homo sapien
ctggagaaggacatcatcaccttgg

SEQ ID NO: 5727130 - DNA, 25 bp, Homo sapien
atgatatgcggctatgcctgcctca

SEQ ID NO: 5727131 - DNA, 25 bp, Homo sapien
tactctagtcaccctcttcaagctt

SEQ ID NO: 5727132 - DNA, 25 bp, Homo sapien
cctgtcagccaacattgccttgcat

SEQ ID NO: 5727133 - DNA, 25 bp, Homo sapien
gcccatggaagtctcaaagatcttt

SEQ ID NO: 5727134 - DNA, 25 bp, Homo sapien
tctctgagctttgttactgaaatga

SEQ ID NO: 5727135 - DNA, 25 bp, Homo sapien
aaagaaccgagtggtgctagccaaa

SEQ ID NO: 5727136 - DNA, 25 bp, Homo sapien
catgatgtcacctccccatcatcca

SEQ ID NO: 5727137 - DNA, 25 bp, Homo sapien
gaattccaccggtgcaaggagatgt

SEQ ID NO: 5727138 - DNA, 25 bp, Homo sapien
ttcaacctagaaacctttatccctg

SEQ ID NO: 5727139 - DNA, 25 bp, Homo sapien
ccttactattcccactttcattcaa

SEQ ID NO: 5727140 - DNA, 25 bp, Homo sapien
aggtgaagccttgcactcctgaatt

SEQ ID NO: 5727141 - DNA, 25 bp, Homo sapien
acctcatgatccacccacctcagcc

SEQ ID NO: 5727142 - DNA, 25 bp, Homo sapien
gatgtctgaatactgcagcactctg

SEQ ID NO: 5727143 - DNA, 25 bp, Homo sapien
tgcggaacaccaaacgaggttcctg

SEQ ID NO: 5727144 - DNA, 25 bp, Homo sapien
cctttgcctgtagagccagccttgg

SEQ ID NO: 5727145 - DNA, 25 bp, Homo sapien
aaagaactggaatttcgctctggag

SEQ ID NO: 5727146 - DNA, 25 bp, Homo sapien
taccttattgatctttgcccatgga

SEQ ID NO: 5727147 - DNA, 25 bp, Homo sapien
tcctatcttttatttcattcatatc

SEQ ID NO: 5727148 - DNA, 25 bp, Homo sapien
atctctcccttctttaccttcattt

SEQ ID NO: 5727149 - DNA, 25 bp, Homo sapien
cactcttggctcgtttgggctcaag

SEQ ID NO: 5727150 - DNA, 25 bp, Homo sapien
aggctcttgctcaagtgttttctga

SEQ ID NO: 5727151 - DNA, 25 bp, Homo sapien
gaaatggcggcgccgagcgcggggt

SEQ ID NO: 5727152 - DNA, 25 bp, Homo sapien
cagctcactgcaagctccaactccc

SEQ ID NO: 5727153 - DNA, 25 bp, Homo sapien
aagaagcaaacatgactagagacgc

SEQ ID NO: 5727154 - DNA, 25 bp, Homo sapien
aggagagtgatgccggtaaagaaaa

SEQ ID NO: 5727155 - DNA, 25 bp, Homo sapien
ttcagtattaaactctcctttgata

SEQ ID NO: 5727156 - DNA, 25 bp, Homo sapien
agaaacctttatccctgcttatctg

SEQ ID NO: 5727157 - DNA, 25 bp, Homo sapien
ttcctgctttctctttcagtattaa

SEQ ID NO: 5727158 - DNA, 25 bp, Homo sapien
cttgctgcctaagaggggtccccaa

SEQ ID NO: 5727159 - DNA, 25 bp, Homo sapien
acaaaccaaaaatgttcttcatcca

SEQ ID NO: 5727160 - DNA, 25 bp, Homo sapien
tttcgctctggaggggatgtggacc

SEQ ID NO: 5727161 - DNA, 25 bp, Homo sapien
tggaagccactggaccacaggaggt

SEQ ID NO: 5727162 - DNA, 25 bp, Homo sapien
agcttttgatgccttctgtgaagca

SEQ ID NO: 5727163 - DNA, 25 bp, Homo sapien
gatgggaaactgctccagctccaag

SEQ ID NO: 5727164 - DNA, 25 bp, Homo sapien
cccttcagtactgcagcgccaccca

SEQ ID NO: 5727165 - DNA, 25 bp, Homo sapien
aatttcgctctggaggggatgtgga

SEQ ID NO: 5727166 - DNA, 25 bp, Homo sapien
ctcatgatccacccacctcagcctc

SEQ ID NO: 5727167 - DNA, 25 bp, Homo sapien
gaagagcctgacaagtgaagttgta

SEQ ID NO: 5727168 - DNA, 25 bp, Homo sapien
tgctggttaaggtgaacgcacttat

SEQ ID NO: 5727169 - DNA, 25 bp, Homo sapien
acctcagcctcccaaagtgttggga

SEQ ID NO: 5727170 - DNA, 25 bp, Homo sapien
atccacccacctcagcctcccaaag

SEQ ID NO: 5727171 - DNA, 25 bp, Homo sapien
tttttccttcctgagaaacgtccat

SEQ ID NO: 5727172 - DNA, 25 bp, Homo sapien
gacactcttggctcgtttgggctca

SEQ ID NO: 5727173 - DNA, 25 bp, Homo sapien
tgcctgtagagccagccttggttgg

SEQ ID NO: 5727174 - DNA, 25 bp, Homo sapien
acagctgttgttgagcgaattatta

SEQ ID NO: 5727175 - DNA, 25 bp, Homo sapien
tgtgtggcatgcatcctcatcatca

SEQ ID NO: 5727176 - DNA, 25 bp, Homo sapien
tctgaagaagcaaacatgactagag

SEQ ID NO: 5727177 - DNA, 25 bp, Homo sapien
gccgccacctctacctgttcccagg

SEQ ID NO: 5727178 - DNA, 25 bp, Homo sapien
ggtttcaccatgttagccgggatgg

SEQ ID NO: 5727179 - DNA, 25 bp, Homo sapien
aaaaagaaccgagtggtgctagcca

SEQ ID NO: 5727180 - DNA, 25 bp, Homo sapien
tcatatctctcccttctttaccttc

SEQ ID NO: 5727181 - DNA, 25 bp, Homo sapien
caatcaacctgcacttcatatctag

SEQ ID NO: 5727182 - DNA, 25 bp, Homo sapien
atcttttggctctgaagaagcaaac

SEQ ID NO: 5727183 - DNA, 25 bp, Homo sapien
agccactggaccacaggaggtgtga

SEQ ID NO: 5727184 - DNA, 25 bp, Homo sapien
agttgaagagcctgacaagtgaagt

SEQ ID NO: 5727185 - DNA, 25 bp, Homo sapien
acaggggacgcaggatattgggagt

SEQ ID NO: 5727186 - DNA, 25 bp, Homo sapien
tgcacggtttctgttctgccccctc

SEQ ID NO: 5727187 - DNA, 25 bp, Homo sapien
actagagacgcaccttgctgcagtg

SEQ ID NO: 5727188 - DNA, 25 bp, Homo sapien
atcgtggcactcctctcgcatggtg

SEQ ID NO: 5727189 - DNA, 25 bp, Homo sapien
gtgtggagggcgccatctatggtgt

SEQ ID NO: 5727190 - DNA, 25 bp, Homo sapien
acaggatcatgtaaatgctcaaaga

SEQ ID NO: 5727191 - DNA, 25 bp, Homo sapien
cttttgatgccttctgtgaagcact

SEQ ID NO: 5727192 - DNA, 25 bp, Homo sapien
tttcagctctttgacaacgccaact

SEQ ID NO: 5727193 - DNA, 25 bp, Homo sapien
tccaccttccagcacaaggagctga

SEQ ID NO: 5727194 - DNA, 25 bp, Homo sapien
tctgtctttttccttcctgagaaac

SEQ ID NO: 5727195 - DNA, 25 bp, Homo sapien
aagatctttcgttggttgtttctct

SEQ ID NO: 5727196 - DNA, 25 bp, Homo sapien
gctcctggcacagaattccaccggt

SEQ ID NO: 5727197 - DNA, 25 bp, Homo sapien
ccagctccaagaggtttttcagctc

SEQ ID NO: 5727198 - DNA, 25 bp, Homo sapien
tgcctgcctcaaagggactgccgcc

SEQ ID NO: 5727199 - DNA, 25 bp, Homo sapien
cattagttaagatgtctgagagacc

SEQ ID NO: 5727200 - DNA, 25 bp, Homo sapien
agaatggtgtgtttccctagactct

SEQ ID NO: 5727201 - DNA, 25 bp, Homo sapien
ggagggcagtggcacgatctcagct

SEQ ID NO: 5727202 - DNA, 25 bp, Homo sapien
tcatgtaaatgctcaaagatgtaat

SEQ ID NO: 5727203 - DNA, 25 bp, Homo sapien
aaggttatgctcctggcacagaatt

SEQ ID NO: 5727204 - DNA, 25 bp, Homo sapien
cctcttcaagcttttgggctatgac

SEQ ID NO: 5727205 - DNA, 25 bp, Homo sapien
tactgcagcactctgtgccgccacc

SEQ ID NO: 5727206 - DNA, 25 bp, Homo sapien
gctctggaggggatgtggaccacag

SEQ ID NO: 5727207 - DNA, 25 bp, Homo sapien
tcatccaggcctgccgtggagatga

SEQ ID NO: 5727208 - DNA, 25 bp, Homo sapien
atggaagtctcaaagatctttcgtt

SEQ ID NO: 5727209 - DNA, 25 bp, Homo sapien
tgacaagtgaagttgtaaacacagt

SEQ ID NO: 5727210 - DNA, 25 bp, Homo sapien
catcttctggagaaggacatcatca

SEQ ID NO: 5727211 - DNA, 25 bp, Homo sapien
cttggctcgtttgggctcaaggcac

SEQ ID NO: 5727212 - DNA, 25 bp, Homo sapien
ccccctcagggatgtgggaatctcc

SEQ ID NO: 5727213 - DNA, 25 bp, Homo sapien
gccacctggaggatatgttgctcac

SEQ ID NO: 5727214 - DNA, 25 bp, Homo sapien
taaactctcctttgatattatgtgg

SEQ ID NO: 5727215 - DNA, 25 bp, Homo sapien
gcactggtgttgagcaatgtgcact

SEQ ID NO: 5727216 - DNA, 25 bp, Homo sapien
tgaagcactgagggagaccaagcaa

SEQ ID NO: 5727217 - DNA, 25 bp, Homo sapien
aactctcctttgatattatgtggct

SEQ ID NO: 5727218 - DNA, 25 bp, Homo sapien
tctgtaaccacctctctgtcttttt

SEQ ID NO: 5727219 - DNA, 25 bp, Homo sapien
tcaccttggaaatgagggagctcat

SEQ ID NO: 5727220 - DNA, 25 bp, Homo sapien
gttactgaaatgagcctcgtgggga

SEQ ID NO: 5727221 - DNA, 25 bp, Homo sapien
caagctccaactcccgggttcacgc

SEQ ID NO: 5727222 - DNA, 25 bp, Homo sapien
gggttgaccaacaagatggaaagaa

SEQ ID NO: 5727223 - DNA, 25 bp, Homo sapien
cctcaaagggactgccgccatgcgg

SEQ ID NO: 5727224 - DNA, 25 bp, Homo sapien
tctggaggggatgtggaccacagta

SEQ ID NO: 5727225 - DNA, 25 bp, Homo sapien
atattatgtggcttttatttcagtg

SEQ ID NO: 5727226 - DNA, 25 bp, Homo sapien
tctttttccttcctgagaaacgtcc

SEQ ID NO: 5727227 - DNA, 25 bp, Homo sapien
agaattttgcacagttacctgcaca

SEQ ID NO: 5727228 - DNA, 25 bp, Homo sapien
agcttcctagcttatctccctgctt

SEQ ID NO: 5727229 - DNA, 25 bp, Homo sapien
agtgggcagtttcagccagaatgtg

SEQ ID NO: 5727230 - DNA, 25 bp, Homo sapien
ttcccttcagtactgcagcgccacc

SEQ ID NO: 5727231 - DNA, 25 bp, Homo sapien
acgcgctcagacatgatatgcggct

SEQ ID NO: 5727232 - DNA, 25 bp, Homo sapien
ctcccaccgttgagctgtgactacg

SEQ ID NO: 5727233 - DNA, 25 bp, Homo sapien
tctgagcgggcttgtgatatgcacg

SEQ ID NO: 5727234 - DNA, 25 bp, Homo sapien
agatactgtggaacactccctagac

SEQ ID NO: 5727235 - DNA, 25 bp, Homo sapien
tatttcattcatatcctccgccctt

SEQ ID NO: 5727236 - DNA, 25 bp, Homo sapien
gctcagacatgatatgcggctatgc

SEQ ID NO: 5727237 - DNA, 25 bp, Homo sapien
aagtgttttctgagcgggcttgtga

SEQ ID NO: 5727238 - DNA, 25 bp, Homo sapien
gaattttatcaaacacacttccagc

SEQ ID NO: 5727239 - DNA, 25 bp, Homo sapien
atcgaggctcttgctcaagtgtttt

SEQ ID NO: 5727240 - DNA, 25 bp, Homo sapien
tgccgccatgcggaacaccaaacga

SEQ ID NO: 5727241 - DNA, 25 bp, Homo sapien
catctcctatcttttatttcattca

SEQ ID NO: 5727242 - DNA, 25 bp, Homo sapien
ccaccaaatctgtctagaatcctgc

SEQ ID NO: 5727243 - DNA, 25 bp, Homo sapien
gccagccttggttggacctattgcc

SEQ ID NO: 5727244 - DNA, 25 bp, Homo sapien
gagcgaattattagaacatcttctg

SEQ ID NO: 5727245 - DNA, 25 bp, Homo sapien
tcattcatatcctccgccctttttg

SEQ ID NO: 5727246 - DNA, 25 bp, Homo sapien
cctgggtgcgaggagagtgatgccg

SEQ ID NO: 5727247 - DNA, 25 bp, Homo sapien
agctccaagaggtttttcagctctt

SEQ ID NO: 5727248 - DNA, 25 bp, Homo sapien
tttctgggcttcagcatgtactccc

SEQ ID NO: 5727249 - DNA, 25 bp, Homo sapien
aattccccatatttgtgttcagttc

SEQ ID NO: 5727250 - DNA, 25 bp, Homo sapien
tgggattacaggcgtgagccactgc

SEQ ID NO: 5727251 - DNA, 25 bp, Homo sapien
cagccttggttggacctattgccag

SEQ ID NO: 5727252 - DNA, 25 bp, Homo sapien
ctcttggctcgtttgggctcaaggc

SEQ ID NO: 5727253 - DNA, 25 bp, Homo sapien
ataaagatggtcctctctgccttca

SEQ ID NO: 5727254 - DNA, 25 bp, Homo sapien
tccccatcatccacgccaagtggaa

SEQ ID NO: 5727255 - DNA, 25 bp, Homo sapien
ctctgccttcaggtgaagccttgca

SEQ ID NO: 5727256 - DNA, 25 bp, Homo sapien
agagacagggtttcaccatgttagc

SEQ ID NO: 5727257 - DNA, 25 bp, Homo sapien
gagtcctgtcccctttacaagaagc

SEQ ID NO: 5727258 - DNA, 25 bp, Homo sapien
atactgtggaacactccctagacaa

SEQ ID NO: 5727259 - DNA, 25 bp, Homo sapien
ttccagcttttgtagatggcacttt

SEQ ID NO: 5727260 - DNA, 25 bp, Homo sapien
ccctttttgtcctagagtgagagtt

SEQ ID NO: 5727261 - DNA, 25 bp, Homo sapien
atgtaaatgctcaaagatgtaatgt

SEQ ID NO: 5727262 - DNA, 25 bp, Homo sapien
cattgccttgcatttgtaccttatt

SEQ ID NO: 5727263 - DNA, 25 bp, Homo sapien
ttaatgtagacattatcttttggct

SEQ ID NO: 5727264 - DNA, 25 bp, Homo sapien
gacagagtctcgctctgtcgcccag

SEQ ID NO: 5727265 - DNA, 25 bp, Homo sapien
ctcgctctgtcgcccaggctggagg

SEQ ID NO: 5727266 - DNA, 25 bp, Homo sapien
acactccctagacaataaagatggt

SEQ ID NO: 5727267 - DNA, 25 bp, Homo sapien
atcaacctgcacttcatatctagat

SEQ ID NO: 5727268 - DNA, 25 bp, Homo sapien
tctccctgcttcatatctctccctt

SEQ ID NO: 5727269 - DNA, 25 bp, Homo sapien
tgtagagccagccttggttggacct

SEQ ID NO: 5727270 - DNA, 25 bp, Homo sapien
cctgtcccctttacaagaagctccg

SEQ ID NO: 5727271 - DNA, 25 bp, Homo sapien
gacgcaccttgctgcagtgtccaga

SEQ ID NO: 5727272 - DNA, 25 bp, Homo sapien
gaaactgcagaattttgcacagtta

SEQ ID NO: 5727273 - DNA, 25 bp, Homo sapien
atcatcaccttggaaatgagggagc

SEQ ID NO: 5727274 - DNA, 25 bp, Homo sapien
agaaagaactggaatttcgctctgg

SEQ ID NO: 5727275 - DNA, 25 bp, Homo sapien
gtgaccagactgcacaggaaatgca

SEQ ID NO: 5727276 - DNA, 25 bp, Homo sapien
cgcaccttgctgcagtgtccagaag

SEQ ID NO: 5727277 - DNA, 25 bp, Homo sapien
tcaagtgttttctgagcgggcttgt

SEQ ID NO: 5727278 - DNA, 25 bp, Homo sapien
gatggaaagaaccacgcaggatccc

SEQ ID NO: 5727279 - DNA, 25 bp, Homo sapien
agctccgcctgtcgacagatactgt

SEQ ID NO: 5727280 - DNA, 25 bp, Homo sapien
gagaaactgcagaattttgcacagt

SEQ ID NO: 5727281 - DNA, 25 bp, Homo sapien
gttggttgtttctctgagctttgtt

SEQ ID NO: 5727282 - DNA, 25 bp, Homo sapien
tgttctatgtgaccagactgcacag

SEQ ID NO: 5727283 - DNA, 25 bp, Homo sapien
tttctagaaaagcttcctagcttat

SEQ ID NO: 5727284 - DNA, 25 bp, Homo sapien
ctttgttactgaaatgagcctcgtg

SEQ ID NO: 5727285 - DNA, 25 bp, Homo sapien
ggttatgctcctggcacagaattcc

SEQ ID NO: 5727286 - DNA, 25 bp, Homo sapien
tataggttgcagtctcggcctcgtg

SEQ ID NO: 5727287 - DNA, 25 bp, Homo sapien
acccacctcagcctcccaaagtgtt

SEQ ID NO: 5727288 - DNA, 25 bp, Homo sapien
ttggaaggtgtccaaatttaatgta

SEQ ID NO: 5727289 - DNA, 25 bp, Homo sapien
ccagtggaaggacactcttggctcg

SEQ ID NO: 5727290 - DNA, 25 bp, Homo sapien
ctttacaagaagctccgcctgtcga

SEQ ID NO: 5727291 - DNA, 25 bp, Homo sapien
cttcatccaggcctgccgtggagat

SEQ ID NO: 5727292 - DNA, 25 bp, Homo sapien
agttccagcttttgtagatggcact

SEQ ID NO: 5727293 - DNA, 25 bp, Homo sapien
ctttttgtcctagagtgagagtttg

SEQ ID NO: 5727294 - DNA, 25 bp, Homo sapien
gccagctccttttctgtgaagccct

SEQ ID NO: 5727295 - DNA, 25 bp, Homo sapien
ctgcctttgagtgtgggactccagg

SEQ ID NO: 5727296 - DNA, 25 bp, Homo sapien
cttttatttcattcatatcctccgc

SEQ ID NO: 5727297 - DNA, 25 bp, Homo sapien
aagatgtctgagagaccatctccta

SEQ ID NO: 5727298 - DNA, 25 bp, Homo sapien
accacgcaggatcccctgggtgcga

SEQ ID NO: 5727299 - DNA, 25 bp, Homo sapien
catcaggaaactctaaaaaagaacc

SEQ ID NO: 5727300 - DNA, 25 bp, Homo sapien
cagaattccaccggtgcaaggagat

SEQ ID NO: 5727301 - DNA, 25 bp, Homo sapien
ggtgtccaaatttaatgtagacatt

SEQ ID NO: 5727302 - DNA, 25 bp, Homo sapien
cccatcatccacgccaagtggaagc

SEQ ID NO: 5727303 - DNA, 25 bp, Homo sapien
gctgatggccgctgacaggggacgc

SEQ ID NO: 5727304 - DNA, 25 bp, Homo sapien
ctctttgacaacgccaactgcccaa

SEQ ID NO: 5727305 - DNA, 25 bp, Homo sapien
gactccaggccagctccttttctgt

SEQ ID NO: 5727306 - DNA, 25 bp, Homo sapien
tgctgcctaagaggggtccccaagc

SEQ ID NO: 5727307 - DNA, 25 bp, Homo sapien
agcaaggccacctggaggatatgtt

SEQ ID NO: 5727308 - DNA, 25 bp, Homo sapien
ccagacttgtttcctgtgcccatca

SEQ ID NO: 5727309 - DNA, 25 bp, Homo sapien
tttttcagctctttgacaacgccaa

SEQ ID NO: 5727310 - DNA, 25 bp, Homo sapien
gctcactgcaagctccaactcccgg

SEQ ID NO: 5727311 - DNA, 25 bp, Homo sapien
gtaatgtagttctttgttcctgctt

SEQ ID NO: 5727312 - DNA, 25 bp, Homo sapien
tgttgagcgaattattagaacatct

SEQ ID NO: 5727313 - DNA, 25 bp, Homo sapien
gtgaagttgtaaacacagtgtggtt

SEQ ID NO: 5727314 - DNA, 25 bp, Homo sapien
tgttattgttttcaacctagaaacc

SEQ ID NO: 5727315 - DNA, 25 bp, Homo sapien
agggcagtggcacgatctcagctca

SEQ ID NO: 5727316 - DNA, 25 bp, Homo sapien
ctgcagttgaagagcctgacaagtg

SEQ ID NO: 5727317 - DNA, 25 bp, Homo sapien
accgagtcacggactcctgcatcgt

SEQ ID NO: 5727318 - DNA, 25 bp, Homo sapien
gatgccggtaaagaaaagttgccga

SEQ ID NO: 5727319 - DNA, 25 bp, Homo sapien
ttgcagtctcggcctcgtggcctag

SEQ ID NO: 5727320 - DNA, 25 bp, Homo sapien
tggctctgaagaagcaaacatgact

SEQ ID NO: 5727321 - DNA, 25 bp, Homo sapien
tccttcctgagaaacgtccatctct

SEQ ID NO: 5727322 - DNA, 25 bp, Homo sapien
tgagggagctcatccaggccaaagt

SEQ ID NO: 5727323 - DNA, 25 bp, Homo sapien
gccttccaagtagctgggactacag

SEQ ID NO: 5727324 - DNA, 25 bp, Homo sapien
cacaaggagctgatggccgctgaca

SEQ ID NO: 5727325 - DNA, 25 bp, Homo sapien
gatgcacggtttctgttctgccccc

SEQ ID NO: 5727326 - DNA, 25 bp, Homo sapien
ctcccaaagtgttgggattacaggc

SEQ ID NO: 5727327 - DNA, 25 bp, Homo sapien
caatgtgcacttcactggagagaaa

SEQ ID NO: 5727328 - DNA, 25 bp, Homo sapien
caagcttttgatgccttctgtgaag

SEQ ID NO: 5727329 - DNA, 25 bp, Homo sapien
ctatgtgaccagactgcacaggaaa

SEQ ID NO: 5727330 - DNA, 25 bp, Homo sapien
gaacaaaccaaaaatgttcttcatc

SEQ ID NO: 5727331 - DNA, 25 bp, Homo sapien
ctcagcctcccaaagtgttgggatt

SEQ ID NO: 5727332 - DNA, 25 bp, Homo sapien
attgatctttgcccatggaagtctc

SEQ ID NO: 5727333 - DNA, 25 bp, Homo sapien
acttgagtctcccttttccggtgtg

SEQ ID NO: 5727334 - DNA, 25 bp, Homo sapien
atgcaagagaaactgcagaattttg

SEQ ID NO: 5727335 - DNA, 25 bp, Homo sapien
ttacctgcacaccgagtcacggact

SEQ ID NO: 5727336 - DNA, 25 bp, Homo sapien
agatggtcctctctgccttcaggtg

SEQ ID NO: 5727337 - DNA, 25 bp, Homo sapien
acgaggttcctggtacatcgaggct

SEQ ID NO: 5727338 - DNA, 25 bp, Homo sapien
caataaagatggtcctctctgcctt

SEQ ID NO: 5727339 - DNA, 25 bp, Homo sapien
acagttacctgcacaccgagtcacg

SEQ ID NO: 5727340 - DNA, 25 bp, Homo sapien
acagtactctagtcaccctcttcaa

SEQ ID NO: 5727341 - DNA, 25 bp, Homo sapien
aaagatgtaatgtagttctttgttc

SEQ ID NO: 5727342 - DNA, 25 bp, Homo sapien
tgggctatgacgtccatgttctatg

SEQ ID NO: 5727343 - DNA, 25 bp, Homo sapien
tagaatcctgctttacaggatcatg

SEQ ID NO: 5727344 - DNA, 25 bp, Homo sapien
tacaggcgtgagccactgcgcccgg

SEQ ID NO: 5727345 - DNA, 25 bp, Homo sapien
ccgcctgtcgacagatactgtggaa

SEQ ID NO: 5727346 - DNA, 25 bp, Homo sapien
ccctttacaagaagctccgcctgtc

SEQ ID NO: 5727347 - DNA, 25 bp, Homo sapien
gaggatatgttgctcaccacccttt

SEQ ID NO: 5727348 - DNA, 25 bp, Homo sapien
tgccgaagatgagactgcccacgcg

SEQ ID NO: 5727349 - DNA, 25 bp, Homo sapien
tcaggtgaagccttgcactcctgaa

SEQ ID NO: 5727350 - DNA, 25 bp, Homo sapien
gcagaattttgcacagttacctgca

SEQ ID NO: 5727351 - DNA, 25 bp, Homo sapien
ctctgtcgcccaggctggagggcag

SEQ ID NO: 5727352 - DNA, 25 bp, Homo sapien
cttcaggtgaagccttgcactcctg

SEQ ID NO: 5727353 - DNA, 25 bp, Homo sapien
ttcaatcaacctgcacttcatatct

SEQ ID NO: 5727354 - DNA, 25 bp, Homo sapien
cacaggaaatgcaagagaaactgca

SEQ ID NO: 5727355 - DNA, 25 bp, Homo sapien
atgagactgatcgtggggttgacca

SEQ ID NO: 5727356 - DNA, 25 bp, Homo sapien
caaaaatgttcttcatccaggcctg

SEQ ID NO: 5727357 - DNA, 25 bp, Homo sapien
gtgattgcttttattacattagtta

SEQ ID NO: 5727358 - DNA, 25 bp, Homo sapien
agtggaagccactggaccacaggag

SEQ ID NO: 5727359 - DNA, 25 bp, Homo sapien
tgtctagaatcctgctttacaggat

SEQ ID NO: 5727360 - DNA, 25 bp, Homo sapien
cacagaattccaccggtgcaaggag

SEQ ID NO: 5727361 - DNA, 25 bp, Homo sapien
tgtctgaatactgcagcactctgtg

SEQ ID NO: 5727362 - DNA, 25 bp, Homo sapien
ccccatatttgtgttcagttccagc

SEQ ID NO: 5727363 - DNA, 25 bp, Homo sapien
gagacgcaccttgctgcagtgtcca

SEQ ID NO: 5727364 - DNA, 25 bp, Homo sapien
tgggtgcgaggagagtgatgccggt

SEQ ID NO: 5727365 - DNA, 25 bp, Homo sapien
tgccaccaaatctgtctagaatcct

SEQ ID NO: 5727366 - DNA, 25 bp, Homo sapien
ccacgccaagtggaagccactggac

SEQ ID NO: 5727367 - DNA, 25 bp, Homo sapien
cttcctgagaaacgtccatctctct

SEQ ID NO: 5727368 - DNA, 25 bp, Homo sapien
cgtggcactcctctcgcatggtgtg

SEQ ID NO: 5727369 - DNA, 25 bp, Homo sapien
gaggttcctggtacatcgaggctct

SEQ ID NO: 5727370 - DNA, 25 bp, Homo sapien
tttctctgagctttgttactgaaat

SEQ ID NO: 5727371 - DNA, 25 bp, Homo sapien
tctttgttcctgctttctctttcag

SEQ ID NO: 5727372 - DNA, 25 bp, Homo sapien
gaattattagaacatcttctggaga

SEQ ID NO: 5727373 - DNA, 25 bp, Homo sapien
atgcacgtggccgacatgctggtta

SEQ ID NO: 5727374 - DNA, 25 bp, Homo sapien
aggggatgtggaccacagtactcta

SEQ ID NO: 5727375 - DNA, 25 bp, Homo sapien
tgctagccaaacagctgttgttgag

SEQ ID NO: 5727376 - DNA, 25 bp, Homo sapien
gagtttggaaggtgtccaaatttaa

SEQ ID NO: 5727377 - DNA, 25 bp, Homo sapien
cgacagatactgtggaacactccct

SEQ ID NO: 5727378 - DNA, 25 bp, Homo sapien
atgtggaactcctcaacttgctgcc

SEQ ID NO: 5727379 - DNA, 25 bp, Homo sapien
ctttcattcaatcaacctgcacttc

SEQ ID NO: 5727380 - DNA, 25 bp, Homo sapien
actctgtaaccacctctctgtcttt

SEQ ID NO: 5727381 - DNA, 25 bp, Homo sapien
cctattgccaggaatgtttcagctg

SEQ ID NO: 5727382 - DNA, 25 bp, Homo sapien
tttttgtatttttagtagagacagg

SEQ ID NO: 5727383 - DNA, 25 bp, Homo sapien
taaaaaagaaccgagtggtgctagc

SEQ ID NO: 5727384 - DNA, 25 bp, Homo sapien
ggtccccaagcttttgatgccttct

SEQ ID NO: 5727385 - DNA, 25 bp, Homo sapien
gttcccaggacaccctcccacatga

SEQ ID NO: 5727386 - DNA, 25 bp, Homo sapien
tcaaggcaccgcagcctgtcagcca

SEQ ID NO: 5727387 - DNA, 25 bp, Homo sapien
ttcacgccattctcctgcctcagcc

SEQ ID NO: 5727388 - DNA, 25 bp, Homo sapien
cctttgatattatgtggcttttatt

SEQ ID NO: 5727389 - DNA, 25 bp, Homo sapien
caggaaatgcaagagaaactgcaga

SEQ ID NO: 5727390 - DNA, 25 bp, Homo sapien
agagaaggccaggaagaatggtgtg

SEQ ID NO: 5727391 - DNA, 25 bp, Homo sapien
tcaaggatcgggaaggttatgctcc

SEQ ID NO: 5727392 - DNA, 25 bp, Homo sapien
ttcagtgccatacatgttattgttt

SEQ ID NO: 5727393 - DNA, 25 bp, Homo sapien
tttccggtgtgtgagtcctgtcccc

SEQ ID NO: 5727394 - DNA, 25 bp, Homo sapien
gttgccgaagatgagactgcccacg

SEQ ID NO: 5727395 - DNA, 25 bp, Homo sapien
gcagcctgtcagccaacattgcctt

SEQ ID NO: 5727396 - DNA, 25 bp, Homo sapien
tgcacaggaaatgcaagagaaactg

SEQ ID NO: 5727397 - DNA, 25 bp, Homo sapien
agaaggccaggaagaatggtgtgtt

SEQ ID NO: 5727398 - DNA, 25 bp, Homo sapien
gcactgagggagaccaagcaaggcc

SEQ ID NO: 5727399 - DNA, 25 bp, Homo sapien
ttcatatctagatttctagaaaagc

SEQ ID NO: 5727400 - DNA, 25 bp, Homo sapien
tccttttctgtgaagccctttgcct

SEQ ID NO: 5727401 - DNA, 25 bp, Homo sapien
aaagcttcctagcttatctccctgc

SEQ ID NO: 5727402 - DNA, 25 bp, Homo sapien
ccaacattgccttgcatttgtacct

SEQ ID NO: 5727403 - DNA, 25 bp, Homo sapien
cgtgagccactgcgcccgggcaaga

SEQ ID NO: 5727404 - DNA, 25 bp, Homo sapien
caactgcccaagcctacagaacaaa

SEQ ID NO: 5727405 - DNA, 25 bp, Homo sapien
ggaatctcccagacttgtttcctgt

SEQ ID NO: 5727406 - DNA, 25 bp, Homo sapien
actttagtgattgcttttattacat

SEQ ID NO: 5727407 - DNA, 25 bp, Homo sapien
caccaaacgaggttcctggtacatc

SEQ ID NO: 5727408 - DNA, 25 bp, Homo sapien
ctcatccaggccaaagtgggcagtt

SEQ ID NO: 5727409 - DNA, 25 bp, Homo sapien
agcttatctccctgcttcatatctc

SEQ ID NO: 5727410 - DNA, 25 bp, Homo sapien
agccactgcgcccgggcaagacctt

SEQ ID NO: 5727411 - DNA, 25 bp, Homo sapien
aaagatggtcctctctgccttcagg

SEQ ID NO: 5727412 - DNA, 25 bp, Homo sapien
tgagctgtgactacgacttgagtct

SEQ ID NO: 5727413 - DNA, 25 bp, Homo sapien
gtgtgtttccctagactctgtaacc

SEQ ID NO: 5727414 - DNA, 25 bp, Homo sapien
acctgcacttcatatctagatttct

SEQ ID NO: 5727415 - DNA, 25 bp, Homo sapien
cactttcattcaatcaacctgcact

SEQ ID NO: 5727416 - DNA, 25 bp, Homo sapien
tccaagtagctgggactacaggtgc

SEQ ID NO: 5727417 - DNA, 25 bp, Homo sapien
agagcctttgatcttcaggatgcac

SEQ ID NO: 5727418 - DNA, 25 bp, Homo sapien
tctgaatactgcagcactctgtgcc

SEQ ID NO: 5727419 - DNA, 25 bp, Homo sapien
ccacctctacctgttcccaggacac

SEQ ID NO: 5727420 - DNA, 25 bp, Homo sapien
gaccagactgcacaggaaatgcaag

SEQ ID NO: 5727421 - DNA, 25 bp, Homo sapien
agactgcacaggaaatgcaagagaa

SEQ ID NO: 5727422 - DNA, 25 bp, Homo sapien
ggccaaagtgggcagtttcagccag

SEQ ID NO: 5727423 - DNA, 25 bp, Homo sapien
aatgtagttctttgttcctgctttc

SEQ ID NO: 5727424 - DNA, 25 bp, Homo sapien
ggacatcatcaccttggaaatgagg

SEQ ID NO: 5727425 - DNA, 25 bp, Homo sapien
aagagaaactgcagaattttgcaca

SEQ ID NO: 5727426 - DNA, 25 bp, Homo sapien
gcaagagaaactgcagaattttgca

SEQ ID NO: 5727427 - DNA, 25 bp, Homo sapien
ggaaggtgtccaaatttaatgtaga

SEQ ID NO: 5727428 - DNA, 25 bp, Homo sapien
ttcaagcttttgggctatgacgtcc

SEQ ID NO: 5727429 - DNA, 25 bp, Homo sapien
ctcaccaccctttctgggcttcagc

SEQ ID NO: 5727430 - DNA, 25 bp, Homo sapien
tcgtttgggctcaaggcaccgcagc

SEQ ID NO: 5727431 - DNA, 25 bp, Homo sapien
cctcgtggcctagcactggtgttga

SEQ ID NO: 5727432 - DNA, 25 bp, Homo sapien
tagagacgcaccttgctgcagtgtc

SEQ ID NO: 5727433 - DNA, 25 bp, Homo sapien
tctttaccttcatttcatcctgttg

SEQ ID NO: 5727434 - DNA, 25 bp, Homo sapien
gccaggaatgtttcagctgcagttg

SEQ ID NO: 5727435 - DNA, 25 bp, Homo sapien
aacattgccttgcatttgtacctta

SEQ ID NO: 5727436 - DNA, 25 bp, Homo sapien
cgcaggatattgggagtgtgtggca

SEQ ID NO: 5727437 - DNA, 25 bp, Homo sapien
cttcagcatgtactcccaccgttga

SEQ ID NO: 5727438 - DNA, 25 bp, Homo sapien
gagtgtgggactccaggccagctcc

SEQ ID NO: 5727439 - DNA, 25 bp, Homo sapien
tctagaaaagcttcctagcttatct

SEQ ID NO: 5727440 - DNA, 25 bp, Homo sapien
cctgcttcatatctctcccttcttt

SEQ ID NO: 5727441 - DNA, 25 bp, Homo sapien
catcatctctgcctttgagtgtggg

SEQ ID NO: 5727442 - DNA, 25 bp, Homo sapien
tagacaataaagatggtcctctctg

SEQ ID NO: 5727443 - DNA, 25 bp, Homo sapien
aggaggtgtgatagagcctttgatc

SEQ ID NO: 5727444 - DNA, 25 bp, Homo sapien
tattagaacatcttctggagaagga

SEQ ID NO: 5727445 - DNA, 25 bp, Homo sapien
tctgggcttcagcatgtactcccac

SEQ ID NO: 5727446 - DNA, 25 bp, Homo sapien
ctgatcgtggggttgaccaacaaga

SEQ ID NO: 5727447 - DNA, 25 bp, Homo sapien
gagactgcccacgcgctcagacatg

SEQ ID NO: 5727448 - DNA, 25 bp, Homo sapien
ggatcgggaaggttatgctcctggc

SEQ ID NO: 5727449 - DNA, 25 bp, Homo sapien
ttttttttttttgagacagagtctc

SEQ ID NO: 5727450 - DNA, 25 bp, Homo sapien
tccatctctctcccttactattccc

SEQ ID NO: 5727451 - DNA, 25 bp, Homo sapien
ggggagagggcatataaattcccca

SEQ ID NO: 5727452 - DNA, 25 bp, Homo sapien
cgcaggatcccctgggtgcgaggag

SEQ ID NO: 5727453 - DNA, 25 bp, Homo sapien
gaagccactggaccacaggaggtgt

SEQ ID NO: 5727454 - DNA, 25 bp, Homo sapien
aaatgcaagagaaactgcagaattt

SEQ ID NO: 5727455 - DNA, 25 bp, Homo sapien
gagaaacgtccatctctctccctta

SEQ ID NO: 5727456 - DNA, 25 bp, Homo sapien
aacgcacttatcaaggatcgggaag

SEQ ID NO: 5727457 - DNA, 25 bp, Homo sapien
tgttcttcatccaggcctgccgtgg

SEQ ID NO: 5727458 - DNA, 25 bp, Homo sapien
ggagagggcatataaattccccata

SEQ ID NO: 5727459 - DNA, 25 bp, Homo sapien
acaccgagtcacggactcctgcatc

SEQ ID NO: 5727460 - DNA, 25 bp, Homo sapien
agcaaacatgactagagacgcacct

SEQ ID NO: 5727461 - DNA, 25 bp, Homo sapien
cctccccatcatccacgccaagtgg

SEQ ID NO: 5727462 - DNA, 25 bp, Homo sapien
gggaaatggcggcgccgagcgcggg

SEQ ID NO: 5727463 - DNA, 25 bp, Homo sapien
cagtattaaactctcctttgatatt

SEQ ID NO: 5727464 - DNA, 25 bp, Homo sapien
ccatctatggtgtggatgggaaact

SEQ ID NO: 5727465 - DNA, 25 bp, Homo sapien
catgactagagacgcaccttgctgc

SEQ ID NO: 5727466 - DNA, 25 bp, Homo sapien
ccgagcgcggggtcttggtccacct

SEQ ID NO: 5727467 - DNA, 25 bp, Homo sapien
atgacgtccatgttctatgtgacca

SEQ ID NO: 5727468 - DNA, 25 bp, Homo sapien
ttagttaagatgtctgagagaccat

SEQ ID NO: 5727469 - DNA, 25 bp, Homo sapien
gagcgcggggtcttggtccaccttc

SEQ ID NO: 5727470 - DNA, 25 bp, Homo sapien
aggacaccctcccacatgatgtcac

SEQ ID NO: 5727471 - DNA, 25 bp, Homo sapien
ttcattcaatcaacctgcacttcat

SEQ ID NO: 5727472 - DNA, 25 bp, Homo sapien
gtcgacagatactgtggaacactcc

SEQ ID NO: 5727473 - DNA, 25 bp, Homo sapien
tggcatgcatcctcatcatcaggaa

SEQ ID NO: 5727474 - DNA, 25 bp, Homo sapien
tgtggcatgcatcctcatcatcagg

SEQ ID NO: 5727475 - DNA, 25 bp, Homo sapien
tatggggagagggcatataaattcc

SEQ ID NO: 5727476 - DNA, 25 bp, Homo sapien
ttctggagaaggacatcatcacctt

SEQ ID NO: 5727477 - DNA, 25 bp, Homo sapien
aactcctcaacttgctgcctaagag

SEQ ID NO: 5727478 - DNA, 25 bp, Homo sapien
caaggccacctggaggatatgttgc

SEQ ID NO: 5727479 - DNA, 25 bp, Homo sapien
ttttttttttgagacagagtctcgc

SEQ ID NO: 5727480 - DNA, 25 bp, Homo sapien
cctagagtgagagtttggaaggtgt

SEQ ID NO: 5727481 - DNA, 25 bp, Homo sapien
ccttattgatctttgcccatggaag

SEQ ID NO: 5727482 - DNA, 25 bp, Homo sapien
tgggaaactgctccagctccaagag

SEQ ID NO: 5727483 - DNA, 25 bp, Homo sapien
gtggtgctagccaaacagctgttgt

SEQ ID NO: 5727484 - DNA, 25 bp, Homo sapien
tcagacatgatatgcggctatgcct

SEQ ID NO: 5727485 - DNA, 25 bp, Homo sapien
gcttttatttcagtgccatacatgt

SEQ ID NO: 5727486 - DNA, 25 bp, Homo sapien
tctcctgcctcagccttccaagtag

SEQ ID NO: 5727487 - DNA, 25 bp, Homo sapien
gtgtgggactccaggccagctcctt

SEQ ID NO: 5727488 - DNA, 25 bp, Homo sapien
aaacgaggttcctggtacatcgagg

SEQ ID NO: 5727489 - DNA, 25 bp, Homo sapien
ctgtcgacagatactgtggaacact

SEQ ID NO: 5727490 - DNA, 25 bp, Homo sapien
tctgtgaagcactgagggagaccaa

SEQ ID NO: 5727491 - DNA, 25 bp, Homo sapien
aacttgctgcctaagaggggtcccc

SEQ ID NO: 5727492 - DNA, 25 bp, Homo sapien
ttttgtcctagagtgagagtttgga

SEQ ID NO: 5727493 - DNA, 25 bp, Homo sapien
agaagcggcctgtgcgttcccttca

SEQ ID NO: 5727494 - DNA, 25 bp, Homo sapien
ttgagacagagtctcgctctgtcgc

SEQ ID NO: 5727495 - DNA, 25 bp, Homo sapien
tgtggaacactccctagacaataaa

SEQ ID NO: 5727496 - DNA, 25 bp, Homo sapien
gaaacgtccatctctctcccttact

SEQ ID NO: 5727497 - DNA, 25 bp, Homo sapien
aatgagcctcgtggggagcatcaga

SEQ ID NO: 5727498 - DNA, 25 bp, Homo sapien
ccacccagtggaaggacactcttgg

SEQ ID NO: 5727499 - DNA, 25 bp, Homo sapien
gcacgtggccgacatgctggttaag

SEQ ID NO: 5727500 - DNA, 25 bp, Homo sapien
atgagactgcccacgcgctcagaca

SEQ ID NO: 5727501 - DNA, 25 bp, Homo sapien
gccatacatgttattgttttcaacc

SEQ ID NO: 5727502 - DNA, 25 bp, Homo sapien
cggctatgcctgcctcaaagggact

SEQ ID NO: 5727503 - DNA, 25 bp, Homo sapien
ccaagaggtttttcagctctttgac

SEQ ID NO: 5727504 - DNA, 25 bp, Homo sapien
ctgccttcaggtgaagccttgcact

SEQ ID NO: 5727505 - DNA, 25 bp, Homo sapien
gtgatgccggtaaagaaaagttgcc

SEQ ID NO: 5727506 - DNA, 25 bp, Homo sapien
cctgacaagtgaagttgtaaacaca

SEQ ID NO: 5727507 - DNA, 25 bp, Homo sapien
tggcactcctctcgcatggtgtgga

SEQ ID NO: 5727508 - DNA, 25 bp, Homo sapien
ccttgctgcagtgtccagaagcggc

SEQ ID NO: 5727509 - DNA, 25 bp, Homo sapien
tgaacgcacttatcaaggatcggga

SEQ ID NO: 5727510 - DNA, 25 bp, Homo sapien
ttgtttcctgtgcccatcatctctg

SEQ ID NO: 5727511 - DNA, 25 bp, Homo sapien
ctgcagcactctgtgccgccacctc

SEQ ID NO: 5727512 - DNA, 25 bp, Homo sapien
tccctagacaataaagatggtcctc

SEQ ID NO: 5727513 - DNA, 25 bp, Homo sapien
ggagcatcagagaaggccaggaaga

SEQ ID NO: 5727514 - DNA, 25 bp, Homo sapien
tgcatttgtaccttattgatctttg

SEQ ID NO: 5727515 - DNA, 25 bp, Homo sapien
acccagtggaaggacactcttggct

SEQ ID NO: 5727516 - DNA, 25 bp, Homo sapien
caccttccagcacaaggagctgatg

SEQ ID NO: 5727517 - DNA, 25 bp, Homo sapien
aatctcccagacttgtttcctgtgc

SEQ ID NO: 5727518 - DNA, 25 bp, Homo sapien
ctgcctaagaggggtccccaagctt

SEQ ID NO: 5727519 - DNA, 25 bp, Homo sapien
cttttgtagatggcactttagtgat

SEQ ID NO: 5727520 - DNA, 25 bp, Homo sapien
ttcagccagaatgtggaactcctca

SEQ ID NO: 5727521 - DNA, 25 bp, Homo sapien
tgatgtcacctccccatcatccacg

SEQ ID NO: 5727522 - DNA, 25 bp, Homo sapien
gaatgtggaactcctcaacttgctg

SEQ ID NO: 5727523 - DNA, 25 bp, Homo sapien
ggaatttcgctctggaggggatgtg

SEQ ID NO: 5727524 - DNA, 25 bp, Homo sapien
aagcggcctgtgcgttcccttcagt

SEQ ID NO: 5727525 - DNA, 25 bp, Homo sapien
ggccgacatgctggttaaggtgaac

SEQ ID NO: 5727526 - DNA, 25 bp, Homo sapien
caagcctacagaacaaaccaaaaat

SEQ ID NO: 5727527 - DNA, 25 bp, Homo sapien
tggaccacagtactctagtcaccct

SEQ ID NO: 5727528 - DNA, 25 bp, Homo sapien
tcctgagaaacgtccatctctctcc

SEQ ID NO: 5727529 - DNA, 25 bp, Homo sapien
ggggagcatcagagaaggccaggaa

SEQ ID NO: 5727530 - DNA, 25 bp, Homo sapien
gttgagcaatgtgcacttcactgga

SEQ ID NO: 5727531 - DNA, 25 bp, Homo sapien
ctgagaaacgtccatctctctccct

SEQ ID NO: 5727532 - DNA, 25 bp, Homo sapien
ctatgacgtccatgttctatgtgac

SEQ ID NO: 5727533 - DNA, 25 bp, Homo sapien
gagagtgatgccggtaaagaaaagt

SEQ ID NO: 5727534 - DNA, 25 bp, Homo sapien
gaggggtccccaagcttttgatgcc

SEQ ID NO: 5727535 - DNA, 25 bp, Homo sapien
ttccccatatttgtgttcagttcca

SEQ ID NO: 5727536 - DNA, 25 bp, Homo sapien
accaacaagatggaaagaaccacgc

SEQ ID NO: 5727537 - DNA, 25 bp, Homo sapien
gtgtgtgagtcctgtcccctttaca

SEQ ID NO: 5727538 - DNA, 25 bp, Homo sapien
tttgatcttcaggatgcacggtttc

SEQ ID NO: 5727539 - DNA, 25 bp, Homo sapien
ttttgcacagttacctgcacaccga

SEQ ID NO: 5727540 - DNA, 25 bp, Homo sapien
aaccgagtggtgctagccaaacagc

SEQ ID NO: 5727541 - DNA, 25 bp, Homo sapien
tatcaaacacacttccagctggcat

SEQ ID NO: 5727542 - DNA, 25 bp, Homo sapien
tcctgcctcagccttccaagtagct

SEQ ID NO: 5727543 - DNA, 25 bp, Homo sapien
cgggcttgtgatatgcacgtggccg

SEQ ID NO: 5727544 - DNA, 25 bp, Homo sapien
ggcctgtgcgttcccttcagtactg

SEQ ID NO: 5727545 - DNA, 25 bp, Homo sapien
attacaggcgtgagccactgcgccc

SEQ ID NO: 5727546 - DNA, 25 bp, Homo sapien
tgaagccctttgcctgtagagccag

SEQ ID NO: 5727547 - DNA, 25 bp, Homo sapien
atgtgcacttcactggagagaaaga

SEQ ID NO: 5727548 - DNA, 25 bp, Homo sapien
gatctttcgttggttgtttctctga

SEQ ID NO: 5727549 - DNA, 25 bp, Homo sapien
tgctttctctttcagtattaaactc

SEQ ID NO: 5727550 - DNA, 25 bp, Homo sapien
atggtcctctctgccttcaggtgaa

SEQ ID NO: 5727551 - DNA, 25 bp, Homo sapien
caggatcccctgggtgcgaggagag

SEQ ID NO: 5727552 - DNA, 25 bp, Homo sapien
agctggcatataggttgcagtctcg

SEQ ID NO: 5727553 - DNA, 25 bp, Homo sapien
tcagctgcagttgaagagcctgaca

SEQ ID NO: 5727554 - DNA, 25 bp, Homo sapien
ctgttgttgagcgaattattagaac

SEQ ID NO: 5727555 - DNA, 25 bp, Homo sapien
ttgggctcaaggcaccgcagcctgt

SEQ ID NO: 5727556 - DNA, 25 bp, Homo sapien
tgaagaagcaaacatgactagagac

SEQ ID NO: 5727557 - DNA, 25 bp, Homo sapien
ggttaaggtgaacgcacttatcaag

SEQ ID NO: 5727558 - DNA, 25 bp, Homo sapien
tatgcggctatgcctgcctcaaagg

SEQ ID NO: 5727559 - DNA, 25 bp, Homo sapien
tctagatttctagaaaagcttccta

SEQ ID NO: 5727560 - DNA, 25 bp, Homo sapien
atatttgtgttcagttccagctttt

SEQ ID NO: 5727561 - DNA, 25 bp, Homo sapien
gctcgtttgggctcaaggcaccgca

SEQ ID NO: 5727562 - DNA, 25 bp, Homo sapien
ccagactgcacaggaaatgcaagag

SEQ ID NO: 5727563 - DNA, 25 bp, Homo sapien
ggtcctctctgccttcaggtgaagc

SEQ ID NO: 5727564 - DNA, 25 bp, Homo sapien
gccaactgcccaagcctacagaaca

SEQ ID NO: 5727565 - DNA, 25 bp, Homo sapien
gctatgcctgcctcaaagggactgc

SEQ ID NO: 5727566 - DNA, 25 bp, Homo sapien
ttgaagagcctgacaagtgaagttg

SEQ ID NO: 5727567 - DNA, 25 bp, Homo sapien
ccctcagggatgtgggaatctccca

SEQ ID NO: 5727568 - DNA, 25 bp, Homo sapien
gatggtcttgatctcctgacctcat

SEQ ID NO: 5727569 - DNA, 25 bp, Homo sapien
tgcgaggagagtgatgccggtaaag

SEQ ID NO: 5727570 - DNA, 25 bp, Homo sapien
ctctgtgccgccacctctacctgtt

SEQ ID NO: 5727571 - DNA, 25 bp, Homo sapien
tgatctttgcccatggaagtctcaa

SEQ ID NO: 5727572 - DNA, 25 bp, Homo sapien
tcagcatgtactcccaccgttgagc

SEQ ID NO: 5727573 - DNA, 25 bp, Homo sapien
actgccgccatgcggaacaccaaac

SEQ ID NO: 5727574 - DNA, 25 bp, Homo sapien
accttggaaatgagggagctcatcc

SEQ ID NO: 5727575 - DNA, 25 bp, Homo sapien
acagatactgtggaacactccctag

SEQ ID NO: 5727576 - DNA, 25 bp, Homo sapien
ttcatttcatcctgttggctgctgc

SEQ ID NO: 5727577 - DNA, 25 bp, Homo sapien
ttgcttttattacattagttaagat

SEQ ID NO: 5727578 - DNA, 25 bp, Homo sapien
catttgtaccttattgatctttgcc

SEQ ID NO: 5727579 - DNA, 25 bp, Homo sapien
gcatcctcatcatcaggaaactcta

SEQ ID NO: 5727580 - DNA, 25 bp, Homo sapien
catcaccttggaaatgagggagctc

SEQ ID NO: 5727581 - DNA, 25 bp, Homo sapien
tattcccactttcattcaatcaacc

SEQ ID NO: 5727582 - DNA, 25 bp, Homo sapien
cccaagcctacagaacaaaccaaaa

SEQ ID NO: 5727583 - DNA, 25 bp, Homo sapien
ttctctttcagtattaaactctcct

SEQ ID NO: 5727584 - DNA, 25 bp, Homo sapien
cccactttcattcaatcaacctgca

SEQ ID NO: 5727585 - DNA, 25 bp, Homo sapien
agcacaaggagctgatggccgctga

SEQ ID NO: 5727586 - DNA, 25 bp, Homo sapien
ctccgcctgtcgacagatactgtgg

SEQ ID NO: 5727587 - DNA, 25 bp, Homo sapien
catttcatcctgttggctgctgcca

SEQ ID NO: 5727588 - DNA, 25 bp, Homo sapien
attgggagtgtgtggcatgcatcct

SEQ ID NO: 5727589 - DNA, 25 bp, Homo sapien
agatgagactgcccacgcgctcaga

SEQ ID NO: 5727590 - DNA, 25 bp, Homo sapien
cctgtgcccatcatctctgcctttg

SEQ ID NO: 5727591 - DNA, 25 bp, Homo sapien
tcgtggggagcatcagagaaggcca

SEQ ID NO: 5727592 - DNA, 25 bp, Homo sapien
tgactagagacgcaccttgctgcag

SEQ ID NO: 5727593 - DNA, 25 bp, Homo sapien
actggaccacaggaggtgtgataga

SEQ ID NO: 5727594 - DNA, 25 bp, Homo sapien
cccatcatctctgcctttgagtgtg

SEQ ID NO: 5727595 - DNA, 25 bp, Homo sapien
gggactccaggccagctccttttct

SEQ ID NO: 5727596 - DNA, 25 bp, Homo sapien
gtgtttccctagactctgtaaccac

SEQ ID NO: 5727597 - DNA, 25 bp, Homo sapien
gcacagttacctgcacaccgagtca

SEQ ID NO: 5727598 - DNA, 25 bp, Homo sapien
tgtgggaatctcccagacttgtttc

SEQ ID NO: 5727599 - DNA, 25 bp, Homo sapien
cgccacctctacctgttcccaggac

SEQ ID NO: 5727600 - DNA, 25 bp, Homo sapien
tgtgatagagcctttgatcttcagg

SEQ ID NO: 5727601 - DNA, 25 bp, Homo sapien
ttctatgtgaccagactgcacagga

SEQ ID NO: 5727602 - DNA, 25 bp, Homo sapien
ccaggcctgccgtggagatgagact

SEQ ID NO: 5727603 - DNA, 25 bp, Homo sapien
ctgcttatctgaaacttcccaactt

SEQ ID NO: 5727604 - DNA, 25 bp, Homo sapien
tttcaccatgttagccgggatggtc

SEQ ID NO: 5727605 - DNA, 25 bp, Homo sapien
cagccttccaagtagctgggactac

SEQ ID NO: 5727606 - DNA, 25 bp, Homo sapien
aattttgcacagttacctgcacacc

SEQ ID NO: 5727607 - DNA, 25 bp, Homo sapien
atatgttgctcaccaccctttctgg

SEQ ID NO: 5727608 - DNA, 25 bp, Homo sapien
tgtagacattatcttttggctctga

SEQ ID NO: 5727609 - DNA, 25 bp, Homo sapien
tacaggtgcccgccaccgtgcccgg

SEQ ID NO: 5727610 - DNA, 25 bp, Homo sapien
ctctgcctttgagtgtgggactcca

SEQ ID NO: 5727611 - DNA, 25 bp, Homo sapien
tgtgcgttcccttcagtactgcagc

SEQ ID NO: 5727612 - DNA, 25 bp, Homo sapien
ccgggatggtcttgatctcctgacc

SEQ ID NO: 5727613 - DNA, 25 bp, Homo sapien
gggatgtggaccacagtactctagt

SEQ ID NO: 5727614 - DNA, 25 bp, Homo sapien
tggtgtgtttccctagactctgtaa

SEQ ID NO: 5727615 - DNA, 25 bp, Homo sapien
gtcctgtcccctttacaagaagctc

SEQ ID NO: 5727616 - DNA, 25 bp, Homo sapien
gtttcagccagaatgtggaactcct

SEQ ID NO: 5727617 - DNA, 25 bp, Homo sapien
accctcttcaagcttttgggctatg

SEQ ID NO: 5727618 - DNA, 25 bp, Homo sapien
gcagtctcggcctcgtggcctagca

SEQ ID NO: 5727619 - DNA, 25 bp, Homo sapien
agcttttgtagatggcactttagtg

SEQ ID NO: 5727620 - DNA, 25 bp, Homo sapien
tgtgaagcactgagggagaccaagc

SEQ ID NO: 5727621 - DNA, 25 bp, Homo sapien
ggatattgggagtgtgtggcatgca

SEQ ID NO: 5727622 - DNA, 25 bp, Homo sapien
ctcctttgatattatgtggctttta

SEQ ID NO: 5727623 - DNA, 25 bp, Homo sapien
gttgtttctctgagctttgttactg

SEQ ID NO: 5727624 - DNA, 25 bp, Homo sapien
cttctgtgaagcactgagggagacc

SEQ ID NO: 5727625 - DNA, 25 bp, Homo sapien
actgcccaagcctacagaacaaacc

SEQ ID NO: 5727626 - DNA, 25 bp, Homo sapien
aaactgctccagctccaagaggttt

SEQ ID NO: 5727627 - DNA, 25 bp, Homo sapien
tgagcgggcttgtgatatgcacgtg

SEQ ID NO: 5727628 - DNA, 25 bp, Homo sapien
aagtgttgggattacaggcgtgagc

SEQ ID NO: 5727629 - DNA, 25 bp, Homo sapien
gcgaattattagaacatcttctgga

SEQ ID NO: 5727630 - DNA, 25 bp, Homo sapien
acaagaagctccgcctgtcgacaga

SEQ ID NO: 5727631 - DNA, 25 bp, Homo sapien
caccggtgcaaggagatgtctgaat

SEQ ID NO: 5727632 - DNA, 25 bp, Homo sapien
ttccagctggcatataggttgcagt

SEQ ID NO: 5727633 - DNA, 25 bp, Homo sapien
cgggaaggttatgctcctggcacag

SEQ ID NO: 5727634 - DNA, 25 bp, Homo sapien
ggagatgagactgatcgtggggttg

SEQ ID NO: 5727635 - DNA, 25 bp, Homo sapien
ggcaccgcagcctgtcagccaacat

SEQ ID NO: 5727636 - DNA, 25 bp, Homo sapien
tctcctatcttttatttcattcata

SEQ ID NO: 5727637 - DNA, 25 bp, Homo sapien
aatgttcttcatccaggcctgccgt

SEQ ID NO: 5727638 - DNA, 25 bp, Homo sapien
acgccaagtggaagccactggacca

SEQ ID NO: 5727639 - DNA, 25 bp, Homo sapien
ctcccttttccggtgtgtgagtcct

SEQ ID NO: 5727640 - DNA, 25 bp, Homo sapien
tgtttcagctgcagttgaagagcct

SEQ ID NO: 5727641 - DNA, 25 bp, Homo sapien
cattcaatcaacctgcacttcatat

SEQ ID NO: 5727642 - DNA, 25 bp, Homo sapien
gccttctgtgaagcactgagggaga

SEQ ID NO: 5727643 - DNA, 25 bp, Homo sapien
tccctgcttcatatctctcccttct

SEQ ID NO: 5727644 - DNA, 25 bp, Homo sapien
tccgccctttttgtcctagagtgag

SEQ ID NO: 5727645 - DNA, 25 bp, Homo sapien
ggagaccaagcaaggccacctggag

SEQ ID NO: 5727646 - DNA, 25 bp, Homo sapien
tcccaggacaccctcccacatgatg

SEQ ID NO: 5727647 - DNA, 25 bp, Homo sapien
tgtcagccaacattgccttgcattt

SEQ ID NO: 5727648 - DNA, 25 bp, Homo sapien
ccaccctttctgggcttcagcatgt

SEQ ID NO: 5727649 - DNA, 25 bp, Homo sapien
atgctcctggcacagaattccaccg

SEQ ID NO: 5727650 - DNA, 25 bp, Homo sapien
agaccaagcaaggccacctggagga

SEQ ID NO: 5727651 - DNA, 25 bp, Homo sapien
ggtgtggatgggaaactgctccagc

SEQ ID NO: 5727652 - DNA, 25 bp, Homo sapien
aggccagctccttttctgtgaagcc

SEQ ID NO: 5727653 - DNA, 25 bp, Homo sapien
cacttatcaaggatcgggaaggtta

SEQ ID NO: 5727654 - DNA, 25 bp, Homo sapien
ttgctcaagtgttttctgagcgggc

SEQ ID NO: 5727655 - DNA, 25 bp, Homo sapien
atgctcaaagatgtaatgtagttct

SEQ ID NO: 5727656 - DNA, 25 bp, Homo sapien
cgacttgagtctcccttttccggtg

SEQ ID NO: 5727657 - DNA, 25 bp, Homo sapien
tcctctcgcatggtgtggagggcgc

SEQ ID NO: 5727658 - DNA, 25 bp, Homo sapien
aaaagcgggaaatggcggcgccgag

SEQ ID NO: 5727659 - DNA, 25 bp, Homo sapien
tgggaatctcccagacttgtttcct

SEQ ID NO: 5727660 - DNA, 25 bp, Homo sapien
ggtgtgatagagcctttgatcttca

SEQ ID NO: 5727661 - DNA, 25 bp, Homo sapien
tttcattcatatcctccgccctttt

SEQ ID NO: 5727662 - DNA, 25 bp, Homo sapien
cagaatgtggaactcctcaacttgc

SEQ ID NO: 5727663 - DNA, 25 bp, Homo sapien
ctccaggccagctccttttctgtga

SEQ ID NO: 5727664 - DNA, 25 bp, Homo sapien
gagtgagagtttggaaggtgtccaa

SEQ ID NO: 5727665 - DNA, 25 bp, Homo sapien
tgagggagaccaagcaaggccacct

SEQ ID NO: 5727666 - DNA, 25 bp, Homo sapien
gtctcgctctgtcgcccaggctgga

SEQ ID NO: 5727667 - DNA, 25 bp, Homo sapien
ctcagccttccaagtagctgggact

SEQ ID NO: 5727668 - DNA, 25 bp, Homo sapien
caagtagctgggactacaggtgccc

SEQ ID NO: 5727669 - DNA, 25 bp, Homo sapien
gcagcactctgtgccgccacctcta

SEQ ID NO: 5727670 - DNA, 25 bp, Homo sapien
acctgcacaccgagtcacggactcc

SEQ ID NO: 5727671 - DNA, 25 bp, Homo sapien
ctttcagtattaaactctcctttga

SEQ ID NO: 5727672 - DNA, 25 bp, Homo sapien
cactggagagaaagaactggaattt

SEQ ID NO: 5727673 - DNA, 25 bp, Homo sapien
agcaatgtgcacttcactggagaga

SEQ ID NO: 5727674 - DNA, 25 bp, Homo sapien
ggtgcaaggagatgtctgaatactg

SEQ ID NO: 5727675 - DNA, 25 bp, Homo sapien
ctcagggatgtgggaatctcccaga

SEQ ID NO: 5727676 - DNA, 25 bp, Homo sapien
gcctgtcgacagatactgtggaaca

SEQ ID NO: 5727677 - DNA, 25 bp, Homo sapien
ttgcactcctgaattttatcaaaca

SEQ ID NO: 5727678 - DNA, 25 bp, Homo sapien
ccagcacaaggagctgatggccgct

SEQ ID NO: 5727679 - DNA, 25 bp, Homo sapien
ccattctcctgcctcagccttccaa

SEQ ID NO: 5727680 - DNA, 25 bp, Homo sapien
gccctttgcctgtagagccagcctt

SEQ ID NO: 5727681 - DNA, 25 bp, Homo sapien
cgaggagagtgatgccggtaaagaa

SEQ ID NO: 5727682 - DNA, 25 bp, Homo sapien
catgttattgttttcaacctagaaa

SEQ ID NO: 5727683 - DNA, 25 bp, Homo sapien
ctttacaggatcatgtaaatgctca

SEQ ID NO: 5727684 - DNA, 25 bp, Homo sapien
cctgtgcgttcccttcagtactgca

SEQ ID NO: 5727685 - DNA, 25 bp, Homo sapien
aagatggaaagaaccacgcaggatc

SEQ ID NO: 5727686 - DNA, 25 bp, Homo sapien
ggagctcatccaggccaaagtgggc

SEQ ID NO: 5727687 - DNA, 25 bp, Homo sapien
gcggcgccgagcgcggggtcttggt

SEQ ID NO: 5727688 - DNA, 25 bp, Homo sapien
tgggactacaggtgcccgccaccgt

SEQ ID NO: 5727689 - DNA, 25 bp, Homo sapien
gtttccctagactctgtaaccacct

SEQ ID NO: 5727690 - DNA, 25 bp, Homo sapien
catgttctatgtgaccagactgcac

SEQ ID NO: 5727691 - DNA, 25 bp, Homo sapien
aagaggtttttcagctctttgacaa

SEQ ID NO: 5727692 - DNA, 25 bp, Homo sapien
tgtttctctgagctttgttactgaa

SEQ ID NO: 5727693 - DNA, 25 bp, Homo sapien
cccttctttaccttcatttcatcct

SEQ ID NO: 5727694 - DNA, 25 bp, Homo sapien
ggaacaccaaacgaggttcctggta

SEQ ID NO: 5727695 - DNA, 25 bp, Homo sapien
caggccaaagtgggcagtttcagcc

SEQ ID NO: 5727696 - DNA, 25 bp, Homo sapien
agggcatataaattccccatatttg

SEQ ID NO: 5727697 - DNA, 25 bp, Homo sapien
atggtgtggatgggaaactgctcca

SEQ ID NO: 5727698 - DNA, 25 bp, Homo sapien
cttttctgtgaagccctttgcctgt

SEQ ID NO: 5727699 - DNA, 25 bp, Homo sapien
aagaggggtccccaagcttttgatg

SEQ ID NO: 5727700 - DNA, 25 bp, Homo sapien
tgatcttcaggatgcacggtttctg

SEQ ID NO: 5727701 - DNA, 25 bp, Homo sapien
aagaagctccgcctgtcgacagata

SEQ ID NO: 5727702 - DNA, 25 bp, Homo sapien
atccacgccaagtggaagccactgg

SEQ ID NO: 5727703 - DNA, 25 bp, Homo sapien
ggactcctgcatcgtggcactcctc

SEQ ID NO: 5727704 - DNA, 25 bp, Homo sapien
ccaactcccgggttcacgccattct

SEQ ID NO: 5727705 - DNA, 25 bp, Homo sapien
catggtgtggagggcgccatctatg

SEQ ID NO: 5727706 - DNA, 25 bp, Homo sapien
caccttgctgcagtgtccagaagcg

SEQ ID NO: 5727707 - DNA, 25 bp, Homo sapien
gcgctcagacatgatatgcggctat

SEQ ID NO: 5727708 - DNA, 25 bp, Homo sapien
actgcaagctccaactcccgggttc

SEQ ID NO: 5727709 - DNA, 25 bp, Homo sapien
ttaagatgtctgagagaccatctcc

SEQ ID NO: 5727710 - DNA, 25 bp, Homo sapien
ccacccacctcagcctcccaaagtg

SEQ ID NO: 5727711 - DNA, 25 bp, Homo sapien
aacatgactagagacgcaccttgct

SEQ ID NO: 5727712 - DNA, 25 bp, Homo sapien
gcctgccgtggagatgagactgatc

SEQ ID NO: 5727713 - DNA, 25 bp, Homo sapien
gggatgtgggaatctcccagacttg

SEQ ID NO: 5727714 - DNA, 25 bp, Homo sapien
ccatatttgtgttcagttccagctt

SEQ ID NO: 5727715 - DNA, 25 bp, Homo sapien
gttgttgagcgaattattagaacat

SEQ ID NO: 5727716 - DNA, 25 bp, Homo sapien
gtggaactcctcaacttgctgccta

SEQ ID NO: 5727717 - DNA, 25 bp, Homo sapien
ccacgcgctcagacatgatatgcgg

SEQ ID NO: 5727718 - DNA, 25 bp, Homo sapien
gggatggtcttgatctcctgacctc

SEQ ID NO: 5727719 - DNA, 25 bp, Homo sapien
ctctcctttgatattatgtggcttt

SEQ ID NO: 5727720 - DNA, 25 bp, Homo sapien
gagctgatggccgctgacaggggac

SEQ ID NO: 5727721 - DNA, 25 bp, Homo sapien
gacaccctcccacatgatgtcacct

SEQ ID NO: 5727722 - DNA, 25 bp, Homo sapien
gactacgacttgagtctcccttttc

SEQ ID NO: 5727723 - DNA, 25 bp, Homo sapien
agaaggacatcatcaccttggaaat

SEQ ID NO: 5727724 - DNA, 25 bp, Homo sapien
gacaacgccaactgcccaagcctac

SEQ ID NO: 5727725 - DNA, 25 bp, Homo sapien
ttactattcccactttcattcaatc

SEQ ID NO: 5727726 - DNA, 25 bp, Homo sapien
gtttcctgtgcccatcatctctgcc

SEQ ID NO: 5727727 - DNA, 25 bp, Homo sapien
catgatccacccacctcagcctccc

SEQ ID NO: 5727728 - DNA, 25 bp, Homo sapien
caagtggaagccactggaccacagg

SEQ ID NO: 5727729 - DNA, 25 bp, Homo sapien
gtttctgttctgccccctcagggat

SEQ ID NO: 5727730 - DNA, 25 bp, Homo sapien
taggttgcagtctcggcctcgtggc

SEQ ID NO: 5727731 - DNA, 25 bp, Homo sapien
tagatttctagaaaagcttcctagc

SEQ ID NO: 5727732 - DNA, 25 bp, Homo sapien
attatgtggcttttatttcagtgcc

SEQ ID NO: 5727733 - DNA, 25 bp, Homo sapien
aaaagttgccgaagatgagactgcc

SEQ ID NO: 5727734 - DNA, 25 bp, Homo sapien
accatgttagccgggatggtcttga

SEQ ID NO: 5727735 - DNA, 25 bp, Homo sapien
cctgctttacaggatcatgtaaatg

SEQ ID NO: 5727736 - DNA, 25 bp, Homo sapien
catataaattccccatatttgtgtt

SEQ ID NO: 5727737 - DNA, 25 bp, Homo sapien
gttcagttccagcttttgtagatgg

SEQ ID NO: 5727738 - DNA, 25 bp, Homo sapien
cctcatcatcaggaaactctaaaaa

SEQ ID NO: 5727739 - DNA, 25 bp, Homo sapien
agacttgtttcctgtgcccatcatc

SEQ ID NO: 5727740 - DNA, 25 bp, Homo sapien
atcatcaggaaactctaaaaaagaa

SEQ ID NO: 5727741 - DNA, 25 bp, Homo sapien
gtgttcagttccagcttttgtagat

SEQ ID NO: 5727742 - DNA, 25 bp, Homo sapien
tgtggaccacagtactctagtcacc

SEQ ID NO: 5727743 - DNA, 25 bp, Homo sapien
cggtgtgtgagtcctgtccccttta

SEQ ID NO: 5727744 - DNA, 25 bp, Homo sapien
gccttggttggacctattgccagga

SEQ ID NO: 5727745 - DNA, 25 bp, Homo sapien
ccgcagcctgtcagccaacattgcc

SEQ ID NO: 5727746 - DNA, 25 bp, Homo sapien
aggccacctggaggatatgttgctc

SEQ ID NO: 5727747 - DNA, 25 bp, Homo sapien
catacatgttattgttttcaaccta

SEQ ID NO: 5727748 - DNA, 25 bp, Homo sapien
cgttcccttcagtactgcagcgcca

SEQ ID NO: 5727749 - DNA, 25 bp, Homo sapien
gccgtggagatgagactgatcgtgg

SEQ ID NO: 5727750 - DNA, 25 bp, Homo sapien
tgtatttttagtagagacagggttt

SEQ ID NO: 5727751 - DNA, 25 bp, Homo sapien
gagactgatcgtggggttgaccaac

SEQ ID NO: 5727752 - DNA, 25 bp, Homo sapien
tcaaagggactgccgccatgcggaa

SEQ ID NO: 5727753 - DNA, 25 bp, Homo sapien
gagtctcccttttccggtgtgtgag

SEQ ID NO: 5727754 - DNA, 25 bp, Homo sapien
ccctagactctgtaaccacctctct

SEQ ID NO: 5727755 - DNA, 25 bp, Homo sapien
cgctctgtcgcccaggctggagggc

SEQ ID NO: 5727756 - DNA, 25 bp, Homo sapien
cttgcatttgtaccttattgatctt

SEQ ID NO: 5727757 - DNA, 25 bp, Homo sapien
tgagcctcgtggggagcatcagaga

SEQ ID NO: 5727758 - DNA, 25 bp, Homo sapien
tctaaaaaagaaccgagtggtgcta

SEQ ID NO: 5727759 - DNA, 25 bp, Homo sapien
tgatattatgtggcttttatttcag

SEQ ID NO: 5727760 - DNA, 25 bp, Homo sapien
cgccacccagtggaaggacactctt

SEQ ID NO: 5727761 - DNA, 25 bp, Homo sapien
tctcggcctcgtggcctagcactgg

SEQ ID NO: 5727762 - DNA, 25 bp, Homo sapien
gcttatctgaaacttcccaacttcc

SEQ ID NO: 5727763 - DNA, 25 bp, Homo sapien
cgcccaggctggagggcagtggcac

SEQ ID NO: 5727764 - DNA, 25 bp, Homo sapien
cagcctcccaaagtgttgggattac

SEQ ID NO: 5727765 - DNA, 25 bp, Homo sapien
catgttagccgggatggtcttgatc

SEQ ID NO: 5727766 - DNA, 25 bp, Homo sapien
gtgagagtttggaaggtgtccaaat

SEQ ID NO: 5727767 - DNA, 25 bp, Homo sapien
ctgcacttcatatctagatttctag

SEQ ID NO: 5727768 - DNA, 25 bp, Homo sapien
ttatctgaaacttcccaacttccct

SEQ ID NO: 5727769 - DNA, 25 bp, Homo sapien
ctacctgttcccaggacaccctccc

SEQ ID NO: 5727770 - DNA, 25 bp, Homo sapien
gaaatgagcctcgtggggagcatca

SEQ ID NO: 5727771 - DNA, 25 bp, Homo sapien
tggaacactccctagacaataaaga

SEQ ID NO: 5727772 - DNA, 25 bp, Homo sapien
agtactctagtcaccctcttcaagc

SEQ ID NO: 5727773 - DNA, 25 bp, Homo sapien
tgacctcatgatccacccacctcag

SEQ ID NO: 5727774 - DNA, 25 bp, Homo sapien
gtgccatacatgttattgttttcaa

SEQ ID NO: 5727775 - DNA, 25 bp, Homo sapien
gagagtttggaaggtgtccaaattt

SEQ ID NO: 5727776 - DNA, 25 bp, Homo sapien
atagagcctttgatcttcaggatgc

SEQ ID NO: 5727777 - DNA, 25 bp, Homo sapien
atgccttctgtgaagcactgaggga

SEQ ID NO: 5727778 - DNA, 25 bp, Homo sapien
tcccctttacaagaagctccgcctg

SEQ ID NO: 5727779 - DNA, 25 bp, Homo sapien
ctgttcccaggacaccctcccacat

SEQ ID NO: 5727780 - DNA, 25 bp, Homo sapien
acatgatatgcggctatgcctgcct

SEQ ID NO: 5727781 - DNA, 25 bp, Homo sapien
acttcactggagagaaagaactgga

SEQ ID NO: 5727782 - DNA, 25 bp, Homo sapien
tcttcaagcttttgggctatgacgt

SEQ ID NO: 5727783 - DNA, 25 bp, Homo sapien
tttttagtagagacagggtttcacc

SEQ ID NO: 5727784 - DNA, 25 bp, Homo sapien
tagctgggactacaggtgcccgcca

SEQ ID NO: 5727785 - DNA, 25 bp, Homo sapien
ttctgttctgccccctcagggatgt

SEQ ID NO: 5727786 - DNA, 25 bp, Homo sapien
aaacacagtgtggttatggggagag

SEQ ID NO: 5727787 - DNA, 25 bp, Homo sapien
tagagccagccttggttggacctat

SEQ ID NO: 5727788 - DNA, 25 bp, Homo sapien
aaagggactgccgccatgcggaaca

SEQ ID NO: 5727789 - DNA, 25 bp, Homo sapien
cccctgggtgcgaggagagtgatgc

SEQ ID NO: 5727790 - DNA, 25 bp, Homo sapien
tctgccccctcagggatgtgggaat

SEQ ID NO: 5727791 - DNA, 25 bp, Homo sapien
tggaggatatgttgctcaccaccct

SEQ ID NO: 5727792 - DNA, 25 bp, Homo sapien
ccgaagatgagactgcccacgcgct

SEQ ID NO: 5727793 - DNA, 25 bp, Homo sapien
cccgggttcacgccattctcctgcc

SEQ ID NO: 5727794 - DNA, 25 bp, Homo sapien
gactgatcgtggggttgaccaacaa

SEQ ID NO: 5727795 - DNA, 25 bp, Homo sapien
ggctgctgccaccaaatctgtctag

SEQ ID NO: 5727796 - DNA, 25 bp, Homo sapien
ctccagctccaagaggtttttcagc

SEQ ID NO: 5727797 - DNA, 25 bp, Homo sapien
gtgttgggattacaggcgtgagcca

SEQ ID NO: 5727798 - DNA, 25 bp, Homo sapien
tcggcctcgtggcctagcactggtg

SEQ ID NO: 5727799 - DNA, 25 bp, Homo sapien
ggggtccccaagcttttgatgcctt

SEQ ID NO: 5727800 - DNA, 25 bp, Homo sapien
tttatttcattcatatcctccgccc

SEQ ID NO: 5727801 - DNA, 25 bp, Homo sapien
gtgccgccacctctacctgttccca

SEQ ID NO: 5727802 - DNA, 25 bp, Homo sapien
ttgccaggaatgtttcagctgcagt

SEQ ID NO: 5727803 - DNA, 25 bp, Homo sapien
ggcacgatctcagctcactgcaagc

SEQ ID NO: 5727804 - DNA, 25 bp, Homo sapien
tggtgtggagggcgccatctatggt

SEQ ID NO: 5727805 - DNA, 25 bp, Homo sapien
agactctgtaaccacctctctgtct

SEQ ID NO: 5727806 - DNA, 25 bp, Homo sapien
taaattccccatatttgtgttcagt

SEQ ID NO: 5727807 - DNA, 25 bp, Homo sapien
gcttttattacattagttaagatgt

SEQ ID NO: 5727808 - DNA, 25 bp, Homo sapien
tttgtatttttagtagagacagggt

SEQ ID NO: 5727809 - DNA, 25 bp, Homo sapien
gtgtccagaagcggcctgtgcgttc

SEQ ID NO: 5727810 - DNA, 25 bp, Homo sapien
tggaaatgagggagctcatccaggc

SEQ ID NO: 5727811 - DNA, 25 bp, Homo sapien
ctgcagaattttgcacagttacctg

SEQ ID NO: 5727812 - DNA, 25 bp, Homo sapien
agctgtgactacgacttgagtctcc

SEQ ID NO: 5727813 - DNA, 25 bp, Homo sapien
gattgcttttattacattagttaag

SEQ ID NO: 5727814 - DNA, 25 bp, Homo sapien
tcccagacttgtttcctgtgcccat

SEQ ID NO: 5727815 - DNA, 25 bp, Homo sapien
agcactctgtgccgccacctctacc

SEQ ID NO: 5727816 - DNA, 25 bp, Homo sapien
cctccgccctttttgtcctagagtg

SEQ ID NO: 5727817 - DNA, 25 bp, Homo sapien
ctcctgacctcatgatccacccacc

SEQ ID NO: 5727818 - DNA, 25 bp, Homo sapien
ctgtgactacgacttgagtctccct

SEQ ID NO: 5727819 - DNA, 25 bp, Homo sapien
ttaaggtgaacgcacttatcaagga

SEQ ID NO: 5727820 - DNA, 25 bp, Homo sapien
ctgccgtggagatgagactgatcgt

SEQ ID NO: 5727821 - DNA, 25 bp, Homo sapien
gcagcgccacccagtggaaggacac

SEQ ID NO: 5727822 - DNA, 25 bp, Homo sapien
tcaccatgttagccgggatggtctt

SEQ ID NO: 5727823 - DNA, 25 bp, Homo sapien
ctggaatttcgctctggaggggatg

SEQ ID NO: 5727824 - DNA, 25 bp, Homo sapien
gtttggaaggtgtccaaatttaatg

SEQ ID NO: 5727825 - DNA, 25 bp, Homo sapien
tcctgaattttatcaaacacacttc

SEQ ID NO: 5727826 - DNA, 25 bp, Homo sapien
atatctctcccttctttaccttcat

SEQ ID NO: 5727827 - DNA, 25 bp, Homo sapien
caacctgcacttcatatctagattt

SEQ ID NO: 5727828 - DNA, 25 bp, Homo sapien
agttgtaaacacagtgtggttatgg

SEQ ID NO: 5727829 - DNA, 25 bp, Homo sapien
gaatcctgctttacaggatcatgta

SEQ ID NO: 5727830 - DNA, 25 bp, Homo sapien
tatgcctgcctcaaagggactgccg

SEQ ID NO: 5727831 - DNA, 25 bp, Homo sapien
gctctgaagaagcaaacatgactag

SEQ ID NO: 5727832 - DNA, 25 bp, Homo sapien
ttatcttttggctctgaagaagcaa

SEQ ID NO: 5727833 - DNA, 25 bp, Homo sapien
agcgggcttgtgatatgcacgtggc

SEQ ID NO: 5727834 - DNA, 25 bp, Homo sapien
ctggagggcagtggcacgatctcag

SEQ ID NO: 5727835 - DNA, 25 bp, Homo sapien
aactgcagaattttgcacagttacc

SEQ ID NO: 5727836 - DNA, 25 bp, Homo sapien
tttgcctgtagagccagccttggtt

SEQ ID NO: 5727837 - DNA, 25 bp, Homo sapien
tatttttagtagagacagggtttca

SEQ ID NO: 5727838 - DNA, 25 bp, Homo sapien
aatgagggagctcatccaggccaaa

SEQ ID NO: 5727839 - DNA, 25 bp, Homo sapien
ggcgccgagcgcggggtcttggtcc

SEQ ID NO: 5727840 - DNA, 25 bp, Homo sapien
tgatgccttctgtgaagcactgagg

SEQ ID NO: 5727841 - DNA, 25 bp, Homo sapien
gaaggacactcttggctcgtttggg

SEQ ID NO: 5727842 - DNA, 25 bp, Homo sapien
acagggtttcaccatgttagccggg

SEQ ID NO: 5727843 - DNA, 25 bp, Homo sapien
catcagagaaggccaggaagaatgg

SEQ ID NO: 5727844 - DNA, 25 bp, Homo sapien
ctgctgccaccaaatctgtctagaa

SEQ ID NO: 5727845 - DNA, 25 bp, Homo sapien
cagctccttttctgtgaagcccttt

SEQ ID NO: 5727846 - DNA, 25 bp, Homo sapien
aaatgctcaaagatgtaatgtagtt

SEQ ID NO: 5727847 - DNA, 25 bp, Homo sapien
aggacactcttggctcgtttgggct

SEQ ID NO: 5727848 - DNA, 25 bp, Homo sapien
tggttgtttctctgagctttgttac

SEQ ID NO: 5727849 - DNA, 25 bp, Homo sapien
cgcacttatcaaggatcgggaaggt

SEQ ID NO: 5727850 - DNA, 25 bp, Homo sapien
gtccagaagcggcctgtgcgttccc

SEQ ID NO: 5727851 - DNA, 25 bp, Homo sapien
tgtaccttattgatctttgcccatg

SEQ ID NO: 5727852 - DNA, 25 bp, Homo sapien
cctgtagagccagccttggttggac

SEQ ID NO: 5727853 - DNA, 25 bp, Homo sapien
gacctattgccaggaatgtttcagc

SEQ ID NO: 5727854 - DNA, 25 bp, Homo sapien
actgtggaacactccctagacaata

SEQ ID NO: 5727855 - DNA, 25 bp, Homo sapien
tgcaagctccaactcccgggttcac

SEQ ID NO: 5727856 - DNA, 25 bp, Homo sapien
agatgtaatgtagttctttgttcct

SEQ ID NO: 5727857 - DNA, 25 bp, Homo sapien
gcctttgagtgtgggactccaggcc

SEQ ID NO: 5727858 - DNA, 25 bp, Homo sapien
tatctccctgcttcatatctctccc

SEQ ID NO: 5727859 - DNA, 25 bp, Homo sapien
atgtaatgtagttctttgttcctgc

SEQ ID NO: 5727860 - DNA, 25 bp, Homo sapien
taccttcatttcatcctgttggctg

SEQ ID NO: 5727861 - DNA, 25 bp, Homo sapien
cttcaggatgcacggtttctgttct

SEQ ID NO: 5727862 - DNA, 25 bp, Homo sapien
ggtgcgaggagagtgatgccggtaa

SEQ ID NO: 5727863 - DNA, 25 bp, Homo sapien
tgtaaccacctctctgtctttttcc

SEQ ID NO: 5727864 - DNA, 25 bp, Homo sapien
ttccctagactctgtaaccacctct

SEQ ID NO: 5727865 - DNA, 25 bp, Homo sapien
ggatcccctgggtgcgaggagagtg

SEQ ID NO: 5727866 - DNA, 25 bp, Homo sapien
gagatgtctgaatactgcagcactc

SEQ ID NO: 5727867 - DNA, 25 bp, Homo sapien
tgaatactgcagcactctgtgccgc

SEQ ID NO: 5727868 - DNA, 25 bp, Homo sapien
agccgggatggtcttgatctcctga

SEQ ID NO: 5727869 - DNA, 25 bp, Homo sapien
tgcgttcccttcagtactgcagcgc

SEQ ID NO: 5727870 - DNA, 25 bp, Homo sapien
ggtttttcagctctttgacaacgcc

SEQ ID NO: 5727871 - DNA, 25 bp, Homo sapien
atctgaaacttcccaacttccctga

SEQ ID NO: 5727872 - DNA, 25 bp, Homo sapien
ctgcctcagccttccaagtagctgg

SEQ ID NO: 5727873 - DNA, 25 bp, Homo sapien
cggtaaagaaaagttgccgaagatg

SEQ ID NO: 5727874 - DNA, 25 bp, Homo sapien
ccgacatgctggttaaggtgaacgc

SEQ ID NO: 5727875 - DNA, 25 bp, Homo sapien
gctgcagtgtccagaagcggcctgt

SEQ ID NO: 5727876 - DNA, 25 bp, Homo sapien
tcagagaaggccaggaagaatggtg

SEQ ID NO: 5727877 - DNA, 25 bp, Homo sapien
gtgtgagtcctgtcccctttacaag

SEQ ID NO: 5727878 - DNA, 25 bp, Homo sapien
actacaggtgcccgccaccgtgccc

SEQ ID NO: 5727879 - DNA, 25 bp, Homo sapien
cctcaacttgctgcctaagaggggt

SEQ ID NO: 5727880 - DNA, 25 bp, Homo sapien
cagaacaaaccaaaaatgttcttca

SEQ ID NO: 5727881 - DNA, 25 bp, Homo sapien
cctgttggctgctgccaccaaatct

SEQ ID NO: 5727882 - DNA, 25 bp, Homo sapien
caggaatgtttcagctgcagttgaa

SEQ ID NO: 5727883 - DNA, 25 bp, Homo sapien
ccttgcactcctgaattttatcaaa

SEQ ID NO: 5727884 - DNA, 25 bp, Homo sapien
gcacttcactggagagaaagaactg

SEQ ID NO: 5727885 - DNA, 25 bp, Homo sapien
tttcatcctgttggctgctgccacc

SEQ ID NO: 5727886 - DNA, 25 bp, Homo sapien
tcactgcaagctccaactcccgggt

SEQ ID NO: 5727887 - DNA, 25 bp, Homo sapien
ttttgagacagagtctcgctctgtc

SEQ ID NO: 5727888 - DNA, 25 bp, Homo sapien
aatgtagacattatcttttggctct

SEQ ID NO: 5727889 - DNA, 25 bp, Homo sapien
tgatctcctgacctcatgatccacc

SEQ ID NO: 5727890 - DNA, 25 bp, Homo sapien
ccagctggcatataggttgcagtct

SEQ ID NO: 5727891 - DNA, 25 bp, Homo sapien
agccttgcactcctgaattttatca

SEQ ID NO: 5727892 - DNA, 25 bp, Homo sapien
gatgtctgagagaccatctcctatc

SEQ ID NO: 5727893 - DNA, 25 bp, Homo sapien
accaagcaaggccacctggaggata

SEQ ID NO: 5727894 - DNA, 25 bp, Homo sapien
attaaactctcctttgatattatgt

SEQ ID NO: 5727895 - DNA, 25 bp, Homo sapien
tccatgttctatgtgaccagactgc

SEQ ID NO: 5727896 - DNA, 25 bp, Homo sapien
ggaaggttatgctcctggcacagaa

SEQ ID NO: 5727897 - DNA, 25 bp, Homo sapien
ggactgccgccatgcggaacaccaa

SEQ ID NO: 5727898 - DNA, 25 bp, Homo sapien
ctttgacaacgccaactgcccaagc

SEQ ID NO: 5727899 - DNA, 25 bp, Homo sapien
ccaaacagctgttgttgagcgaatt

SEQ ID NO: 5727900 - DNA, 25 bp, Homo sapien
ctcagctcactgcaagctccaactc

SEQ ID NO: 5727901 - DNA, 25 bp, Homo sapien
gcgcggggtcttggtccaccttcca

SEQ ID NO: 5727902 - DNA, 25 bp, Homo sapien
gtgttttctgagcgggcttgtgata

SEQ ID NO: 5727903 - DNA, 25 bp, Homo sapien
gatgtggaccacagtactctagtca

SEQ ID NO: 5727904 - DNA, 25 bp, Homo sapien
tggtcttgatctcctgacctcatga

SEQ ID NO: 5727905 - DNA, 25 bp, Homo sapien
ttgagtgtgggactccaggccagct

SEQ ID NO: 5727906 - DNA, 25 bp, Homo sapien
gaagctccgcctgtcgacagatact

SEQ ID NO: 5727907 - DNA, 25 bp, Homo sapien
tcaggaaactctaaaaaagaaccga

SEQ ID NO: 5727908 - DNA, 25 bp, Homo sapien
ctgaaacttcccaacttccctgatc

SEQ ID NO: 5727909 - DNA, 25 bp, Homo sapien
ctgcacaccgagtcacggactcctg

SEQ ID NO: 5727910 - DNA, 25 bp, Homo sapien
tgatatgcacgtggccgacatgctg

SEQ ID NO: 5727911 - DNA, 25 bp, Homo sapien
ggactacaggtgcccgccaccgtgc

SEQ ID NO: 5727912 - DNA, 25 bp, Homo sapien
ccttcatttcatcctgttggctgct

SEQ ID NO: 5727913 - DNA, 25 bp, Homo sapien
tttatcaaacacacttccagctggc

SEQ ID NO: 5727914 - DNA, 25 bp, Homo sapien
agcatgtactcccaccgttgagctg

SEQ ID NO: 5727915 - DNA, 25 bp, Homo sapien
catgctggttaaggtgaacgcactt

SEQ ID NO: 5727916 - DNA, 25 bp, Homo sapien
gttgctcaccaccctttctgggctt

SEQ ID NO: 5727917 - DNA, 25 bp, Homo sapien
tttgtagatggcactttagtgattg

SEQ ID NO: 5727918 - DNA, 25 bp, Homo sapien
aacaccaaacgaggttcctggtaca

SEQ ID NO: 5727919 - DNA, 25 bp, Homo sapien
ctcaaagatctttcgttggttgttt

SEQ ID NO: 5727920 - DNA, 25 bp, Homo sapien
tgcgcccgggcaagaccttttttta

SEQ ID NO: 5727921 - DNA, 25 bp, Homo sapien
tggacctattgccaggaatgtttca

SEQ ID NO: 5727922 - DNA, 25 bp, Homo sapien
ttagccgggatggtcttgatctcct

SEQ ID NO: 5727923 - DNA, 25 bp, Homo sapien
ctagtcaccctcttcaagcttttgg

SEQ ID NO: 5727924 - DNA, 25 bp, Homo sapien
gtctcccttttccggtgtgtgagtc

SEQ ID NO: 5727925 - DNA, 25 bp, Homo sapien
actgcacaggaaatgcaagagaaac

SEQ ID NO: 5727926 - DNA, 25 bp, Homo sapien
tcatcatcaggaaactctaaaaaag

SEQ ID NO: 5727927 - DNA, 25 bp, Homo sapien
atcctcatcatcaggaaactctaaa

SEQ ID NO: 5727928 - DNA, 25 bp, Homo sapien
tcgtggcctagcactggtgttgagc

SEQ ID NO: 5727929 - DNA, 25 bp, Homo sapien
tagagtgagagtttggaaggtgtcc

SEQ ID NO: 5727930 - DNA, 25 bp, Homo sapien
tggctcgtttgggctcaaggcaccg

SEQ ID NO: 5727931 - DNA, 25 bp, Homo sapien
atctatggtgtggatgggaaactgc

SEQ ID NO: 5727932 - DNA, 25 bp, Homo sapien
agaccatctcctatcttttatttca

SEQ ID NO: 5727933 - DNA, 25 bp, Homo sapien
gtaaagaaaagttgccgaagatgag

SEQ ID NO: 5727934 - DNA, 25 bp, Homo sapien
cttccaagtagctgggactacaggt

SEQ ID NO: 5727935 - DNA, 25 bp, Homo sapien
accctttctgggcttcagcatgtac

SEQ ID NO: 5727936 - DNA, 25 bp, Homo sapien
ccgccatgcggaacaccaaacgagg

SEQ ID NO: 5727937 - DNA, 25 bp, Homo sapien
ggtgaacgcacttatcaaggatcgg

SEQ ID NO: 5727938 - DNA, 25 bp, Homo sapien
agttaagatgtctgagagaccatct

SEQ ID NO: 5727939 - DNA, 25 bp, Homo sapien
tgatggccgctgacaggggacgcag

SEQ ID NO: 5727940 - DNA, 25 bp, Homo sapien
tcagtactgcagcgccacccagtgg

SEQ ID NO: 5727941 - DNA, 25 bp, Homo sapien
gaaagaaccacgcaggatcccctgg

SEQ ID NO: 5727942 - DNA, 25 bp, Homo sapien
acacttccagctggcatataggttg

SEQ ID NO: 5727943 - DNA, 25 bp, Homo sapien
cttcctagcttatctccctgcttca

SEQ ID NO: 5727944 - DNA, 25 bp, Homo sapien
tgggcagtttcagccagaatgtgga

SEQ ID NO: 5727945 - DNA, 25 bp, Homo sapien
ttggtccaccttccagcacaaggag

SEQ ID NO: 5727946 - DNA, 25 bp, Homo sapien
tgagagaccatctcctatcttttat

SEQ ID NO: 5727947 - DNA, 25 bp, Homo sapien
tccccaagcttttgatgccttctgt

SEQ ID NO: 5727948 - DNA, 25 bp, Homo sapien
tcttgctcaagtgttttctgagcgg

SEQ ID NO: 5727949 - DNA, 25 bp, Homo sapien
tttgggctatgacgtccatgttcta

SEQ ID NO: 5727950 - DNA, 25 bp, Homo sapien
tcctggcacagaattccaccggtgc

SEQ ID NO: 5727951 - DNA, 25 bp, Homo sapien
cattatcttttggctctgaagaagc

SEQ ID NO: 5727952 - DNA, 25 bp, Homo sapien
cagtttcagccagaatgtggaactc

SEQ ID NO: 5727953 - DNA, 25 bp, Homo sapien
tgagccactgcgcccgggcaagacc

SEQ ID NO: 5727954 - DNA, 25 bp, Homo sapien
tctgagagaccatctcctatctttt

SEQ ID NO: 5727955 - DNA, 25 bp, Homo sapien
agctgcagttgaagagcctgacaag

SEQ ID NO: 5727956 - DNA, 25 bp, Homo sapien
agtagctgggactacaggtgcccgc

SEQ ID NO: 5727957 - DNA, 25 bp, Homo sapien
ttgagcgaattattagaacatcttc

SEQ ID NO: 5727958 - DNA, 25 bp, Homo sapien
ctctctgccttcaggtgaagccttg

SEQ ID NO: 5727959 - DNA, 25 bp, Homo sapien
agcctttgatcttcaggatgcacgg

SEQ ID NO: 5727960 - DNA, 25 bp, Homo sapien
cgccctttttgtcctagagtgagag

SEQ ID NO: 5727961 - DNA, 25 bp, Homo sapien
cttgatctcctgacctcatgatcca

SEQ ID NO: 5727962 - DNA, 25 bp, Homo sapien
tgtggcttttatttcagtgccatac

SEQ ID NO: 5727963 - DNA, 25 bp, Homo sapien
ctacgacttgagtctcccttttccg

SEQ ID NO: 5727964 - DNA, 25 bp, Homo sapien
ggcagtggcacgatctcagctcact

SEQ ID NO: 5727965 - DNA, 25 bp, Homo sapien
aggagatgtctgaatactgcagcac

SEQ ID NO: 5727966 - DNA, 25 bp, Homo sapien
tctcccagacttgtttcctgtgccc

SEQ ID NO: 5727967 - DNA, 25 bp, Homo sapien
tggcttttatttcagtgccatacat

SEQ ID NO: 5727968 - DNA, 25 bp, Homo sapien
tgcctcaaagggactgccgccatgc

SEQ ID NO: 5727969 - DNA, 25 bp, Homo sapien
tcatctctgcctttgagtgtgggac

SEQ ID NO: 5727970 - DNA, 25 bp, Homo sapien
agcctgacaagtgaagttgtaaaca

SEQ ID NO: 5727971 - DNA, 25 bp, Homo sapien
cacatgatgtcacctccccatcatc

SEQ ID NO: 5727972 - DNA, 25 bp, Homo sapien
ggcctcgtggcctagcactggtgtt

SEQ ID NO: 5727973 - DNA, 25 bp, Homo sapien
ctctacctgttcccaggacaccctc

SEQ ID NO: 5727974 - DNA, 25 bp, Homo sapien
ctatcttttatttcattcatatcct

SEQ ID NO: 5727975 - DNA, 25 bp, Homo sapien
aagttgccgaagatgagactgccca

SEQ ID NO: 5727976 - DNA, 25 bp, Homo sapien
aggagctgatggccgctgacagggg

SEQ ID NO: 5727977 - DNA, 25 bp, Homo sapien
cccaccgttgagctgtgactacgac

SEQ ID NO: 5727978 - DNA, 25 bp, Homo sapien
ttcttcatccaggcctgccgtggag

SEQ ID NO: 5727979 - DNA, 25 bp, Homo sapien
tctctcccttactattcccactttc

SEQ ID NO: 5727980 - DNA, 25 bp, Homo sapien
catatctagatttctagaaaagctt

SEQ ID NO: 5727981 - DNA, 25 bp, Homo sapien
cgtccatctctctcccttactattc

SEQ ID NO: 5727982 - DNA, 25 bp, Homo sapien
agggcgccatctatggtgtggatgg

SEQ ID NO: 5727983 - DNA, 25 bp, Homo sapien
ctctcccttctttaccttcatttca

SEQ ID NO: 5727984 - DNA, 25 bp, Homo sapien
catgtactcccaccgttgagctgtg

SEQ ID NO: 5727985 - DNA, 25 bp, Homo sapien
agtgtgtggcatgcatcctcatcat

SEQ ID NO: 5727986 - DNA, 25 bp, Homo sapien
agtactgcagcgccacccagtggaa

SEQ ID NO: 5727987 - DNA, 25 bp, Homo sapien
gctgacaggggacgcaggatattgg

SEQ ID NO: 5727988 - DNA, 25 bp, Homo sapien
tgtggatgggaaactgctccagctc

SEQ ID NO: 5727989 - DNA, 25 bp, Homo sapien
cctctctgtctttttccttcctgag

SEQ ID NO: 5727990 - DNA, 25 bp, Homo sapien
cacggtttctgttctgccccctcag

SEQ ID NO: 5727991 - DNA, 25 bp, Homo sapien
tttgttcctgctttctctttcagta

SEQ ID NO: 5727992 - DNA, 25 bp, Homo sapien
ccaggacaccctcccacatgatgtc

SEQ ID NO: 5727993 - DNA, 25 bp, Homo sapien
cgtccatgttctatgtgaccagact

SEQ ID NO: 5727994 - DNA, 25 bp, Homo sapien
ctggttaaggtgaacgcacttatca

SEQ ID NO: 5727995 - DNA, 25 bp, Homo sapien
ttcctgtgcccatcatctctgcctt

SEQ ID NO: 5727996 - DNA, 25 bp, Homo sapien
ctccaagaggtttttcagctctttg

SEQ ID NO: 5727997 - DNA, 25 bp, Homo sapien
ctagactctgtaaccacctctctgt

SEQ ID NO: 5727998 - DNA, 25 bp, Homo sapien
tgatccacccacctcagcctcccaa

SEQ ID NO: 5727999 - DNA, 25 bp, Homo sapien
ggtcttggtccaccttccagcacaa

SEQ ID NO: 5728000 - DNA, 25 bp, Homo sapien
gcggggtcttggtccaccttccagc

SEQ ID NO: 5728001 - DNA, 25 bp, Homo sapien
agaactggaatttcgctctggaggg

SEQ ID NO: 5728002 - DNA, 25 bp, Homo sapien
agacagggtttcaccatgttagccg

SEQ ID NO: 5728003 - DNA, 25 bp, Homo sapien
ctaagaggggtccccaagcttttga

SEQ ID NO: 5728004 - DNA, 25 bp, Homo sapien
tgcagtgtccagaagcggcctgtgc

SEQ ID NO: 5728005 - DNA, 25 bp, Homo sapien
cttttgggctatgacgtccatgttc

SEQ ID NO: 5728006 - DNA, 25 bp, Homo sapien
agccaaacagctgttgttgagcgaa

SEQ ID NO: 5728007 - DNA, 25 bp, Homo sapien
agcctcgtggggagcatcagagaag

SEQ ID NO: 5728008 - DNA, 25 bp, Homo sapien
ggggtcttggtccaccttccagcac

SEQ ID NO: 5728009 - DNA, 25 bp, Homo sapien
ctatggtgtggatgggaaactgctc

SEQ ID NO: 5728010 - DNA, 25 bp, Homo sapien
ctgaaatgagcctcgtggggagcat

SEQ ID NO: 5728011 - DNA, 25 bp, Homo sapien
tcagctctttgacaacgccaactgc

SEQ ID NO: 5728012 - DNA, 25 bp, Homo sapien
ggcctagcactggtgttgagcaatg

SEQ ID NO: 5728013 - DNA, 25 bp, Homo sapien
gtattaaactctcctttgatattat

SEQ ID NO: 5728014 - DNA, 25 bp, Homo sapien
taaccacctctctgtctttttcctt

SEQ ID NO: 5728015 - DNA, 25 bp, Homo sapien
tcgttggttgtttctctgagctttg

SEQ ID NO: 5728016 - DNA, 25 bp, Homo sapien
cactctgtgccgccacctctacctg

SEQ ID NO: 5728017 - DNA, 25 bp, Homo sapien
atctttgcccatggaagtctcaaag

SEQ ID NO: 5728018 - DNA, 25 bp, Homo sapien
ccgttgagctgtgactacgacttga

SEQ ID NO: 5728019 - DNA, 25 bp, Homo sapien
ccaggaagaatggtgtgtttcccta

SEQ ID NO: 5728020 - DNA, 25 bp, Homo sapien
ttgctgcagtgtccagaagcggcct

SEQ ID NO: 5728021 - DNA, 25 bp, Homo sapien
attacattagttaagatgtctgaga

SEQ ID NO: 5728022 - DNA, 25 bp, Homo sapien
acctctacctgttcccaggacaccc

SEQ ID NO: 5728023 - DNA, 25 bp, Homo sapien
aggatcatgtaaatgctcaaagatg

SEQ ID NO: 5728024 - DNA, 25 bp, Homo sapien
gcagttgaagagcctgacaagtgaa

SEQ ID NO: 5728025 - DNA, 25 bp, Homo sapien
ctgttctgccccctcagggatgtgg

SEQ ID NO: 5728026 - DNA, 25 bp, Homo sapien
gcctcagccttccaagtagctggga

SEQ ID NO: 5728027 - DNA, 25 bp, Homo sapien
actcctgaattttatcaaacacact

SEQ ID NO: 5728028 - DNA, 25 bp, Homo sapien
acaagtgaagttgtaaacacagtgt

SEQ ID NO: 5728029 - DNA, 25 bp, Homo sapien
ggttgcagtctcggcctcgtggcct

SEQ ID NO: 5728030 - DNA, 25 bp, Homo sapien
gctccttttctgtgaagccctttgc

SEQ ID NO: 5728031 - DNA, 25 bp, Homo sapien
atcctgttggctgctgccaccaaat

SEQ ID NO: 5728032 - DNA, 25 bp, Homo sapien
ggcagtctcatcttcggcaactttt

SEQ ID NO: 5728033 - DNA, 25 bp, Homo sapien
aactgcccactttggcctggatgag

SEQ ID NO: 5728034 - DNA, 25 bp, Homo sapien
tcagggaagttgggaagtttcagat

SEQ ID NO: 5728035 - DNA, 25 bp, Homo sapien
tcatctccacggcaggcctggatga

SEQ ID NO: 5728036 - DNA, 25 bp, Homo sapien
tcagtctcatctccacggcaggcct

SEQ ID NO: 5728037 - DNA, 25 bp, Homo sapien
ggcaataggtccaaccaaggctggc

SEQ ID NO: 5728038 - DNA, 25 bp, Homo sapien
ttcagataagcagggataaaggttt

SEQ ID NO: 5728039 - DNA, 25 bp, Homo sapien
tggctagcaccactcggttcttttt

SEQ ID NO: 5728040 - DNA, 25 bp, Homo sapien
atttggacaccttccaaactctcac

SEQ ID NO: 5728041 - DNA, 25 bp, Homo sapien
gagcagtttcccatccacaccatag

SEQ ID NO: 5728042 - DNA, 25 bp, Homo sapien
cttgtcaggctcttcaactgcagct

SEQ ID NO: 5728043 - DNA, 25 bp, Homo sapien
tgcaggagtccgtgactcggtgtgc

SEQ ID NO: 5728044 - DNA, 25 bp, Homo sapien
taactgtgcaaaattctgcagtttc

SEQ ID NO: 5728045 - DNA, 25 bp, Homo sapien
ggctgaggtgggtggatcatgaggt

SEQ ID NO: 5728046 - DNA, 25 bp, Homo sapien
taggttgaaaacaataacatgtatg

SEQ ID NO: 5728047 - DNA, 25 bp, Homo sapien
tcaaaagcttggggacccctcttag

SEQ ID NO: 5728048 - DNA, 25 bp, Homo sapien
tcggttcttttttagagtttcctga

SEQ ID NO: 5728049 - DNA, 25 bp, Homo sapien
cctcgatgtaccaggaacctcgttt

SEQ ID NO: 5728050 - DNA, 25 bp, Homo sapien
tgtctctactaaaaatacaaaaaaa

SEQ ID NO: 5728051 - DNA, 25 bp, Homo sapien
agtctcatctccacggcaggcctgg

SEQ ID NO: 5728052 - DNA, 25 bp, Homo sapien
tcagcggccatcagctccttgtgct

SEQ ID NO: 5728053 - DNA, 25 bp, Homo sapien
acagaaggcatcaaaagcttgggga

SEQ ID NO: 5728054 - DNA, 25 bp, Homo sapien
gtacatgctgaagcccagaaagggt

SEQ ID NO: 5728055 - DNA, 25 bp, Homo sapien
tttgaggcaggcatagccgcatatc

SEQ ID NO: 5728056 - DNA, 25 bp, Homo sapien
gcagaacagaaaccgtgcatcctga

SEQ ID NO: 5728057 - DNA, 25 bp, Homo sapien
agtgccacgatgcaggagtccgtga

SEQ ID NO: 5728058 - DNA, 25 bp, Homo sapien
gtgggaatagtaagggagagagatg

SEQ ID NO: 5728059 - DNA, 25 bp, Homo sapien
tcccgatccttgataagtgcgttca

SEQ ID NO: 5728060 - DNA, 25 bp, Homo sapien
agaaagggtggtgagcaacatatcc

SEQ ID NO: 5728061 - DNA, 25 bp, Homo sapien
tctacattaaatttggacaccttcc

SEQ ID NO: 5728062 - DNA, 25 bp, Homo sapien
taaaagcaatcactaaagtgccatc

SEQ ID NO: 5728063 - DNA, 25 bp, Homo sapien
tcccaatatcctgcgtcccctgtca

SEQ ID NO: 5728064 - DNA, 25 bp, Homo sapien
gggagttggagcttgcagtgagctg

SEQ ID NO: 5728065 - DNA, 25 bp, Homo sapien
atatgaagtgcaggttgattgaatg

SEQ ID NO: 5728066 - DNA, 25 bp, Homo sapien
gtcaaagagctgaaaaacctcttgg

SEQ ID NO: 5728067 - DNA, 25 bp, Homo sapien
ccgggcacggtggcgggcacctgta

SEQ ID NO: 5728068 - DNA, 25 bp, Homo sapien
tctccctcagtgcttcacagaaggc

SEQ ID NO: 5728069 - DNA, 25 bp, Homo sapien
tcagagccaaaagataatgtctaca

SEQ ID NO: 5728070 - DNA, 25 bp, Homo sapien
atggtctctcagacatcttaactaa

SEQ ID NO: 5728071 - DNA, 25 bp, Homo sapien
gggcgcagtggctcacgcctgtaat

SEQ ID NO: 5728072 - DNA, 25 bp, Homo sapien
tggtccagtggcttccacttggcgt

SEQ ID NO: 5728073 - DNA, 25 bp, Homo sapien
ctcttaggcagcaagttgaggagtt

SEQ ID NO: 5728074 - DNA, 25 bp, Homo sapien
gtattcagacatctccttgcaccgg

SEQ ID NO: 5728075 - DNA, 25 bp, Homo sapien
aacaggtagaggtggcggcacagag

SEQ ID NO: 5728076 - DNA, 25 bp, Homo sapien
agaactacattacatctttgagcat

SEQ ID NO: 5728077 - DNA, 25 bp, Homo sapien
ttctgtaggcttgggcagttggcgt

SEQ ID NO: 5728078 - DNA, 25 bp, Homo sapien
taccaggaacctcgtttggtgttcc

SEQ ID NO: 5728079 - DNA, 25 bp, Homo sapien
aagatcaaaggctctatcacacctc

SEQ ID NO: 5728080 - DNA, 25 bp, Homo sapien
gtttctcaggaaggaaaaagacaga

SEQ ID NO: 5728081 - DNA, 25 bp, Homo sapien
acaagcccgctcagaaaacacttga

SEQ ID NO: 5728082 - DNA, 25 bp, Homo sapien
gcatcctgaagatcaaaggctctat

SEQ ID NO: 5728083 - DNA, 25 bp, Homo sapien
gatgatgggcacaggaaacaagtct

SEQ ID NO: 5728084 - DNA, 25 bp, Homo sapien
caaggcttcacctgaaggcagagag

SEQ ID NO: 5728085 - DNA, 25 bp, Homo sapien
gcttcttgtaaaggggacaggactc

SEQ ID NO: 5728086 - DNA, 25 bp, Homo sapien
gcccgctcagaaaacacttgagcaa

SEQ ID NO: 5728087 - DNA, 25 bp, Homo sapien
ggcctggatgaagaacatttttggt

SEQ ID NO: 5728088 - DNA, 25 bp, Homo sapien
agggagagagatggacgtttctcag

SEQ ID NO: 5728089 - DNA, 25 bp, Homo sapien
agggaagttgggaagtttcagataa

SEQ ID NO: 5728090 - DNA, 25 bp, Homo sapien
aaagaactacattacatctttgagc

SEQ ID NO: 5728091 - DNA, 25 bp, Homo sapien
attctgcagtttctcttgcatttcc

SEQ ID NO: 5728092 - DNA, 25 bp, Homo sapien
ccttccactgggtggcgctgcagta

SEQ ID NO: 5728093 - DNA, 25 bp, Homo sapien
ggaatttatatgccctctccccata

SEQ ID NO: 5728094 - DNA, 25 bp, Homo sapien
tgccacacactcccaatatcctgcg

SEQ ID NO: 5728095 - DNA, 25 bp, Homo sapien
gttctttctctccagtgaagtgcac

SEQ ID NO: 5728096 - DNA, 25 bp, Homo sapien
cagtctcatcttcggcaacttttct

SEQ ID NO: 5728097 - DNA, 25 bp, Homo sapien
tgaagcccagaaagggtggtgagca

SEQ ID NO: 5728098 - DNA, 25 bp, Homo sapien
tccccacgaggctcatttcagtaac

SEQ ID NO: 5728099 - DNA, 25 bp, Homo sapien
tctccagaagatgttctaataattc

SEQ ID NO: 5728100 - DNA, 25 bp, Homo sapien
gaaggtggaccaagaccccgcgctc

SEQ ID NO: 5728101 - DNA, 25 bp, Homo sapien
ataaaattcaggagtgcaaggcttc

SEQ ID NO: 5728102 - DNA, 25 bp, Homo sapien
ctctagtcatgtttgcttcttcaga

SEQ ID NO: 5728103 - DNA, 25 bp, Homo sapien
tgatgatgtccttctccagaagatg

SEQ ID NO: 5728104 - DNA, 25 bp, Homo sapien
tgatgggcacaggaaacaagtctgg

SEQ ID NO: 5728105 - DNA, 25 bp, Homo sapien
ctccttgtgctggaaggtggaccaa

SEQ ID NO: 5728106 - DNA, 25 bp, Homo sapien
ttttctttaccggcatcactctcct

SEQ ID NO: 5728107 - DNA, 25 bp, Homo sapien
gctgaaaaacctcttggagctggag

SEQ ID NO: 5728108 - DNA, 25 bp, Homo sapien
tccagcctgggcgacagagcgagac

SEQ ID NO: 5728109 - DNA, 25 bp, Homo sapien
ccaatatcctgcgtcccctgtcagc

SEQ ID NO: 5728110 - DNA, 25 bp, Homo sapien
cacctgaaggcagagaggaccatct

SEQ ID NO: 5728111 - DNA, 25 bp, Homo sapien
ccgggagttggagcttgcagtgagc

SEQ ID NO: 5728112 - DNA, 25 bp, Homo sapien
taaagatcagggaagttgggaagtt

SEQ ID NO: 5728113 - DNA, 25 bp, Homo sapien
gtacaaatgcaaggcaatgttggct

SEQ ID NO: 5728114 - DNA, 25 bp, Homo sapien
tatcaaaggagagtttaatactgaa

SEQ ID NO: 5728115 - DNA, 25 bp, Homo sapien
cactcaaaggcagagatgatgggca

SEQ ID NO: 5728116 - DNA, 25 bp, Homo sapien
agcaagagcctcgatgtaccaggaa

SEQ ID NO: 5728117 - DNA, 25 bp, Homo sapien
gagttccacattctggctgaaactg

SEQ ID NO: 5728118 - DNA, 25 bp, Homo sapien
cagagaggaccatctttattgtcta

SEQ ID NO: 5728119 - DNA, 25 bp, Homo sapien
actcccaatatcctgcgtcccctgt

SEQ ID NO: 5728120 - DNA, 25 bp, Homo sapien
agacatcttaactaatgtaataaaa

SEQ ID NO: 5728121 - DNA, 25 bp, Homo sapien
gagcttgcagtgagctgagatcgtg

SEQ ID NO: 5728122 - DNA, 25 bp, Homo sapien
taaccagcatgtcggccacgtgcat

SEQ ID NO: 5728123 - DNA, 25 bp, Homo sapien
gctcttcaactgcagctgaaacatt

SEQ ID NO: 5728124 - DNA, 25 bp, Homo sapien
cagaaaccgtgcatcctgaagatca

SEQ ID NO: 5728125 - DNA, 25 bp, Homo sapien
tagtcacagctcaacggtgggagta

SEQ ID NO: 5728126 - DNA, 25 bp, Homo sapien
tttacaacttcacttgtcaggctct

SEQ ID NO: 5728127 - DNA, 25 bp, Homo sapien
ctaggacaaaaagggcggaggatat

SEQ ID NO: 5728128 - DNA, 25 bp, Homo sapien
cttcacagaaaaggagctggcctgg

SEQ ID NO: 5728129 - DNA, 25 bp, Homo sapien
tggctcacgcctgtaatcccaacac

SEQ ID NO: 5728130 - DNA, 25 bp, Homo sapien
tggatgatggggaggtgacatcatg

SEQ ID NO: 5728131 - DNA, 25 bp, Homo sapien
gggcacggtggcgggcacctgtagt

SEQ ID NO: 5728132 - DNA, 25 bp, Homo sapien
ggaagttgggaagtttcagataagc

SEQ ID NO: 5728133 - DNA, 25 bp, Homo sapien
gccctccacaccatgcgagaggagt

SEQ ID NO: 5728134 - DNA, 25 bp, Homo sapien
atgtttgcttcttcagagccaaaag

SEQ ID NO: 5728135 - DNA, 25 bp, Homo sapien
gcgagactctgtctcaaaaaaaaaa

SEQ ID NO: 5728136 - DNA, 25 bp, Homo sapien
caccatgcgagaggagtgccacgat

SEQ ID NO: 5728137 - DNA, 25 bp, Homo sapien
tcctgcgtggttctttccatcttgt

SEQ ID NO: 5728138 - DNA, 25 bp, Homo sapien
agaaaaggagctggcctggagtccc

SEQ ID NO: 5728139 - DNA, 25 bp, Homo sapien
ttcctgatgatgaggatgcatgcca

SEQ ID NO: 5728140 - DNA, 25 bp, Homo sapien
ggaacaggtagaggtggcggcacag

SEQ ID NO: 5728141 - DNA, 25 bp, Homo sapien
ctgaaactgcccactttggcctgga

SEQ ID NO: 5728142 - DNA, 25 bp, Homo sapien
cccctgtcagcggccatcagctcct

SEQ ID NO: 5728143 - DNA, 25 bp, Homo sapien
tctcagacatcttaactaatgtaat

SEQ ID NO: 5728144 - DNA, 25 bp, Homo sapien
gagagatatgaagcagggagataag

SEQ ID NO: 5728145 - DNA, 25 bp, Homo sapien
ccagtgctaggccacgaggccgaga

SEQ ID NO: 5728146 - DNA, 25 bp, Homo sapien
aagtgcgttcaccttaaccagcatg

SEQ ID NO: 5728147 - DNA, 25 bp, Homo sapien
agccgggcacggtggcgggcacctg

SEQ ID NO: 5728148 - DNA, 25 bp, Homo sapien
agtccctttgaggcaggcatagccg

SEQ ID NO: 5728149 - DNA, 25 bp, Homo sapien
attcctggcaataggtccaaccaag

SEQ ID NO: 5728150 - DNA, 25 bp, Homo sapien
tggtcaaccccacgatcagtctcat

SEQ ID NO: 5728151 - DNA, 25 bp, Homo sapien
cacaccatgcgagaggagtgccacg

SEQ ID NO: 5728152 - DNA, 25 bp, Homo sapien
ggagtgcaaggcttcacctgaaggc

SEQ ID NO: 5728153 - DNA, 25 bp, Homo sapien
tggagcttgcagtgagctgagatcg

SEQ ID NO: 5728154 - DNA, 25 bp, Homo sapien
caacaacagctgtttggctagcacc

SEQ ID NO: 5728155 - DNA, 25 bp, Homo sapien
ttgagacttccatgggcaaagatca

SEQ ID NO: 5728156 - DNA, 25 bp, Homo sapien
gggcagttggcgttgtcaaagagct

SEQ ID NO: 5728157 - DNA, 25 bp, Homo sapien
tccctttgaggcaggcatagccgca

SEQ ID NO: 5728158 - DNA, 25 bp, Homo sapien
ggcaggcctggatgaagaacatttt

SEQ ID NO: 5728159 - DNA, 25 bp, Homo sapien
aattagccgggcacggtggcgggca

SEQ ID NO: 5728160 - DNA, 25 bp, Homo sapien
gcagggagataagctaggaagcttt

SEQ ID NO: 5728161 - DNA, 25 bp, Homo sapien
tttctaggttgaaaacaataacatg

SEQ ID NO: 5728162 - DNA, 25 bp, Homo sapien
tcaaaggagagtttaatactgaaag

SEQ ID NO: 5728163 - DNA, 25 bp, Homo sapien
ccatgcgagaggagtgccacgatgc

SEQ ID NO: 5728164 - DNA, 25 bp, Homo sapien
aagtcttaaagatcagggaagttgg

SEQ ID NO: 5728165 - DNA, 25 bp, Homo sapien
ctgcagcaaggtgcgtctctagtca

SEQ ID NO: 5728166 - DNA, 25 bp, Homo sapien
cttaaagatcagggaagttgggaag

SEQ ID NO: 5728167 - DNA, 25 bp, Homo sapien
ccttgcaccggtggaattctgtgcc

SEQ ID NO: 5728168 - DNA, 25 bp, Homo sapien
acccgggagttggagcttgcagtga

SEQ ID NO: 5728169 - DNA, 25 bp, Homo sapien
atggcactgaaataaaagccacata

SEQ ID NO: 5728170 - DNA, 25 bp, Homo sapien
tggcgtgaacccgggagttggagct

SEQ ID NO: 5728171 - DNA, 25 bp, Homo sapien
ctgcgtcccctgtcagcggccatca

SEQ ID NO: 5728172 - DNA, 25 bp, Homo sapien
gtttctcttgcatttcctgtgcagt

SEQ ID NO: 5728173 - DNA, 25 bp, Homo sapien
atcactaaagtgccatctacaaaag

SEQ ID NO: 5728174 - DNA, 25 bp, Homo sapien
gctggaagtgtgtttgataaaattc

SEQ ID NO: 5728175 - DNA, 25 bp, Homo sapien
aacgagccaagagtgtccttccact

SEQ ID NO: 5728176 - DNA, 25 bp, Homo sapien
caacttttctttaccggcatcactc

SEQ ID NO: 5728177 - DNA, 25 bp, Homo sapien
cagtaacaaagctcagagaaacaac

SEQ ID NO: 5728178 - DNA, 25 bp, Homo sapien
aagctaggaagcttttctagaaatc

SEQ ID NO: 5728179 - DNA, 25 bp, Homo sapien
aagagctgaaaaacctcttggagct

SEQ ID NO: 5728180 - DNA, 25 bp, Homo sapien
aatgtctacattaaatttggacacc

SEQ ID NO: 5728181 - DNA, 25 bp, Homo sapien
agtgttccacagtatctgtcgacag

SEQ ID NO: 5728182 - DNA, 25 bp, Homo sapien
caatgttggctgacaggctgcggtg

SEQ ID NO: 5728183 - DNA, 25 bp, Homo sapien
agacagatttggtggcagcagccaa

SEQ ID NO: 5728184 - DNA, 25 bp, Homo sapien
acattcctggcaataggtccaacca

SEQ ID NO: 5728185 - DNA, 25 bp, Homo sapien
aattcaggagtgcaaggcttcacct

SEQ ID NO: 5728186 - DNA, 25 bp, Homo sapien
tcccaacactttgggaggctgaggt

SEQ ID NO: 5728187 - DNA, 25 bp, Homo sapien
taactaatgtaataaaagcaatcac

SEQ ID NO: 5728188 - DNA, 25 bp, Homo sapien
tcctgtgcagtctggtcacatagaa

SEQ ID NO: 5728189 - DNA, 25 bp, Homo sapien
tctttctctccagtgaagtgcacat

SEQ ID NO: 5728190 - DNA, 25 bp, Homo sapien
gtaataaaagcaatcactaaagtgc

SEQ ID NO: 5728191 - DNA, 25 bp, Homo sapien
cttggagctggagcagtttcccatc

SEQ ID NO: 5728192 - DNA, 25 bp, Homo sapien
ctgtagtcccagctacttggaaggc

SEQ ID NO: 5728193 - DNA, 25 bp, Homo sapien
ttcaggagtgcaaggcttcacctga

SEQ ID NO: 5728194 - DNA, 25 bp, Homo sapien
tcagaaaacacttgagcaagagcct

SEQ ID NO: 5728195 - DNA, 25 bp, Homo sapien
aaaaggtcttgcccgggcgcagtgg

SEQ ID NO: 5728196 - DNA, 25 bp, Homo sapien
gaggtgggtggatcatgaggtcagg

SEQ ID NO: 5728197 - DNA, 25 bp, Homo sapien
ttccacttggcgtggatgatgggga

SEQ ID NO: 5728198 - DNA, 25 bp, Homo sapien
ctctccccataaccacactgtgttt

SEQ ID NO: 5728199 - DNA, 25 bp, Homo sapien
gtaggcttgggcagttggcgttgtc

SEQ ID NO: 5728200 - DNA, 25 bp, Homo sapien
tgaatgaaataaaagataggagatg

SEQ ID NO: 5728201 - DNA, 25 bp, Homo sapien
tggcgctgcagtactgaagggaacg

SEQ ID NO: 5728202 - DNA, 25 bp, Homo sapien
aagcaggattctagacagatttggt

SEQ ID NO: 5728203 - DNA, 25 bp, Homo sapien
ggtcttgcccgggcgcagtggctca

SEQ ID NO: 5728204 - DNA, 25 bp, Homo sapien
agggtgactagagtactgtggtcca

SEQ ID NO: 5728205 - DNA, 25 bp, Homo sapien
ctttaccggcatcactctcctcgca

SEQ ID NO: 5728206 - DNA, 25 bp, Homo sapien
tagagtttcctgatgatgaggatgc

SEQ ID NO: 5728207 - DNA, 25 bp, Homo sapien
aggcaggcatagccgcatatcatgt

SEQ ID NO: 5728208 - DNA, 25 bp, Homo sapien
gtccttccactgggtggcgctgcag

SEQ ID NO: 5728209 - DNA, 25 bp, Homo sapien
catagcccaaaagcttgaagagggt

SEQ ID NO: 5728210 - DNA, 25 bp, Homo sapien
gtcttaaagatcagggaagttggga

SEQ ID NO: 5728211 - DNA, 25 bp, Homo sapien
ccaaaagataatgtctacattaaat

SEQ ID NO: 5728212 - DNA, 25 bp, Homo sapien
gagactctgtctcaaaaaaaaaaaa

SEQ ID NO: 5728213 - DNA, 25 bp, Homo sapien
ctcctgtggtccagtggcttccact

SEQ ID NO: 5728214 - DNA, 25 bp, Homo sapien
gcatggcggcagtccctttgaggca

SEQ ID NO: 5728215 - DNA, 25 bp, Homo sapien
gaacgcacaggccgcttctggacac

SEQ ID NO: 5728216 - DNA, 25 bp, Homo sapien
agggtggtgagcaacatatcctcca

SEQ ID NO: 5728217 - DNA, 25 bp, Homo sapien
taaaagccacataatatcaaaggag

SEQ ID NO: 5728218 - DNA, 25 bp, Homo sapien
cccacactcaaaggcagagatgatg

SEQ ID NO: 5728219 - DNA, 25 bp, Homo sapien
gatcagggaagttgggaagtttcag

SEQ ID NO: 5728220 - DNA, 25 bp, Homo sapien
gaggctgaggtgggtggatcatgag

SEQ ID NO: 5728221 - DNA, 25 bp, Homo sapien
ggcaaagatcaataaggtacaaatg

SEQ ID NO: 5728222 - DNA, 25 bp, Homo sapien
gtttcagataagcagggataaaggt

SEQ ID NO: 5728223 - DNA, 25 bp, Homo sapien
ccatctacaaaagctggaactgaac

SEQ ID NO: 5728224 - DNA, 25 bp, Homo sapien
ctgcgtggttctttccatcttgttg

SEQ ID NO: 5728225 - DNA, 25 bp, Homo sapien
gataagcagggataaaggtttctag

SEQ ID NO: 5728226 - DNA, 25 bp, Homo sapien
aaggctggctctacaggcaaagggc

SEQ ID NO: 5728227 - DNA, 25 bp, Homo sapien
acttggcgtggatgatggggaggtg

SEQ ID NO: 5728228 - DNA, 25 bp, Homo sapien
gcaaagggcttcacagaaaaggagc

SEQ ID NO: 5728229 - DNA, 25 bp, Homo sapien
tgaggatgcatgccacacactccca

SEQ ID NO: 5728230 - DNA, 25 bp, Homo sapien
catttacatgatcctgtaaagcagg

SEQ ID NO: 5728231 - DNA, 25 bp, Homo sapien
tttggcctggatgagctccctcatt

SEQ ID NO: 5728232 - DNA, 25 bp, Homo sapien
aggagagtttaatactgaaagagaa

SEQ ID NO: 5728233 - DNA, 25 bp, Homo sapien
acgtttctcaggaaggaaaaagaca

SEQ ID NO: 5728234 - DNA, 25 bp, Homo sapien
aggtaaagaagggagagatatgaag

SEQ ID NO: 5728235 - DNA, 25 bp, Homo sapien
agctccttgtgctggaaggtggacc

SEQ ID NO: 5728236 - DNA, 25 bp, Homo sapien
tggcggcacagagtgctgcagtatt

SEQ ID NO: 5728237 - DNA, 25 bp, Homo sapien
aaatctagatatgaagtgcaggttg

SEQ ID NO: 5728238 - DNA, 25 bp, Homo sapien
tcgtttggtgttccgcatggcggca

SEQ ID NO: 5728239 - DNA, 25 bp, Homo sapien
acacctcctgtggtccagtggcttc

SEQ ID NO: 5728240 - DNA, 25 bp, Homo sapien
ctccagagcgaaattccagttcttt

SEQ ID NO: 5728241 - DNA, 25 bp, Homo sapien
tagaacatggacgtcatagcccaaa

SEQ ID NO: 5728242 - DNA, 25 bp, Homo sapien
agccacataatatcaaaggagagtt

SEQ ID NO: 5728243 - DNA, 25 bp, Homo sapien
tgtaaagcaggattctagacagatt

SEQ ID NO: 5728244 - DNA, 25 bp, Homo sapien
aagcccgctcagaaaacacttgagc

SEQ ID NO: 5728245 - DNA, 25 bp, Homo sapien
cagttctttctctccagtgaagtgc

SEQ ID NO: 5728246 - DNA, 25 bp, Homo sapien
ttgttggtcaaccccacgatcagtc

SEQ ID NO: 5728247 - DNA, 25 bp, Homo sapien
gggagtacatgctgaagcccagaaa

SEQ ID NO: 5728248 - DNA, 25 bp, Homo sapien
atgaggtcaggagatcaagaccatc

SEQ ID NO: 5728249 - DNA, 25 bp, Homo sapien
atgatgtccttctccagaagatgtt

SEQ ID NO: 5728250 - DNA, 25 bp, Homo sapien
agtaagggagagagatggacgtttc

SEQ ID NO: 5728251 - DNA, 25 bp, Homo sapien
aggtccaaccaaggctggctctaca

SEQ ID NO: 5728252 - DNA, 25 bp, Homo sapien
gaaggtaaagaagggagagatatga

SEQ ID NO: 5728253 - DNA, 25 bp, Homo sapien
cagagcgagactctgtctcaaaaaa

SEQ ID NO: 5728254 - DNA, 25 bp, Homo sapien
atggacgtcatagcccaaaagcttg

SEQ ID NO: 5728255 - DNA, 25 bp, Homo sapien
caggaaggaaaaagacagagaggtg

SEQ ID NO: 5728256 - DNA, 25 bp, Homo sapien
gtgctgcagtattcagacatctcct

SEQ ID NO: 5728257 - DNA, 25 bp, Homo sapien
aggcttcacctgaaggcagagagga

SEQ ID NO: 5728258 - DNA, 25 bp, Homo sapien
gctgcggtgccttgagcccaaacga

SEQ ID NO: 5728259 - DNA, 25 bp, Homo sapien
agcctcgatgtaccaggaacctcgt

SEQ ID NO: 5728260 - DNA, 25 bp, Homo sapien
gcacccaggggatcctgcgtggttc

SEQ ID NO: 5728261 - DNA, 25 bp, Homo sapien
taagggagagagatggacgtttctc

SEQ ID NO: 5728262 - DNA, 25 bp, Homo sapien
taataattcgctcaacaacagctgt

SEQ ID NO: 5728263 - DNA, 25 bp, Homo sapien
aagatcagggaagttgggaagtttc

SEQ ID NO: 5728264 - DNA, 25 bp, Homo sapien
gagaggaccatctttattgtctagg

SEQ ID NO: 5728265 - DNA, 25 bp, Homo sapien
tgccacgatgcaggagtccgtgact

SEQ ID NO: 5728266 - DNA, 25 bp, Homo sapien
accggcatcactctcctcgcaccca

SEQ ID NO: 5728267 - DNA, 25 bp, Homo sapien
tgtccttctccagaagatgttctaa

SEQ ID NO: 5728268 - DNA, 25 bp, Homo sapien
gatggcgccctccacaccatgcgag

SEQ ID NO: 5728269 - DNA, 25 bp, Homo sapien
gtaatcccaacactttgggaggctg

SEQ ID NO: 5728270 - DNA, 25 bp, Homo sapien
cggccatcagctccttgtgctggaa

SEQ ID NO: 5728271 - DNA, 25 bp, Homo sapien
attccagttctttctctccagtgaa

SEQ ID NO: 5728272 - DNA, 25 bp, Homo sapien
gagctggagcagtttcccatccaca

SEQ ID NO: 5728273 - DNA, 25 bp, Homo sapien
tctgggagattcccacatccctgag

SEQ ID NO: 5728274 - DNA, 25 bp, Homo sapien
tgtcgacaggcggagcttcttgtaa

SEQ ID NO: 5728275 - DNA, 25 bp, Homo sapien
tcctccaggtggccttgcttggtct

SEQ ID NO: 5728276 - DNA, 25 bp, Homo sapien
gcccaaaagcttgaagagggtgact

SEQ ID NO: 5728277 - DNA, 25 bp, Homo sapien
acactgtgtttacaacttcacttgt

SEQ ID NO: 5728278 - DNA, 25 bp, Homo sapien
gaagagggtgactagagtactgtgg

SEQ ID NO: 5728279 - DNA, 25 bp, Homo sapien
gttggtcaaccccacgatcagtctc

SEQ ID NO: 5728280 - DNA, 25 bp, Homo sapien
acaccttccaaactctcactctagg

SEQ ID NO: 5728281 - DNA, 25 bp, Homo sapien
gagatatgaagcagggagataagct

SEQ ID NO: 5728282 - DNA, 25 bp, Homo sapien
ttaccggcatcactctcctcgcacc

SEQ ID NO: 5728283 - DNA, 25 bp, Homo sapien
tgggtggcgctgcagtactgaaggg

SEQ ID NO: 5728284 - DNA, 25 bp, Homo sapien
ggacccctcttaggcagcaagttga

SEQ ID NO: 5728285 - DNA, 25 bp, Homo sapien
aaagggtggtgagcaacatatcctc

SEQ ID NO: 5728286 - DNA, 25 bp, Homo sapien
tggctgacaggctgcggtgccttga

SEQ ID NO: 5728287 - DNA, 25 bp, Homo sapien
agtgcttcacagaaggcatcaaaag

SEQ ID NO: 5728288 - DNA, 25 bp, Homo sapien
ctggctctacaggcaaagggcttca

SEQ ID NO: 5728289 - DNA, 25 bp, Homo sapien
taacatgtatggcactgaaataaaa

SEQ ID NO: 5728290 - DNA, 25 bp, Homo sapien
cctgtggtccagtggcttccacttg

SEQ ID NO: 5728291 - DNA, 25 bp, Homo sapien
caaacgagccaagagtgtccttcca

SEQ ID NO: 5728292 - DNA, 25 bp, Homo sapien
tccctcatttccaaggtgatgatgt

SEQ ID NO: 5728293 - DNA, 25 bp, Homo sapien
catatcacaagcccgctcagaaaac

SEQ ID NO: 5728294 - DNA, 25 bp, Homo sapien
gtcggccacgtgcatatcacaagcc

SEQ ID NO: 5728295 - DNA, 25 bp, Homo sapien
gcacaggaaacaagtctgggagatt

SEQ ID NO: 5728296 - DNA, 25 bp, Homo sapien
ttggtgttccgcatggcggcagtcc

SEQ ID NO: 5728297 - DNA, 25 bp, Homo sapien
tggcttccacttggcgtggatgatg

SEQ ID NO: 5728298 - DNA, 25 bp, Homo sapien
aatatggggaatttatatgccctct

SEQ ID NO: 5728299 - DNA, 25 bp, Homo sapien
cctgggaacaggtagaggtggcggc

SEQ ID NO: 5728300 - DNA, 25 bp, Homo sapien
gaagatgttctaataattcgctcaa

SEQ ID NO: 5728301 - DNA, 25 bp, Homo sapien
tgcttcacagaaggcatcaaaagct

SEQ ID NO: 5728302 - DNA, 25 bp, Homo sapien
ggagtgttccacagtatctgtcgac

SEQ ID NO: 5728303 - DNA, 25 bp, Homo sapien
tttggctagcaccactcggttcttt

SEQ ID NO: 5728304 - DNA, 25 bp, Homo sapien
tgaaatgaaggtaaagaagggagag

SEQ ID NO: 5728305 - DNA, 25 bp, Homo sapien
gatcgtgccactgccctccagcctg

SEQ ID NO: 5728306 - DNA, 25 bp, Homo sapien
cacaccattcttcctggccttctct

SEQ ID NO: 5728307 - DNA, 25 bp, Homo sapien
ccgatccttgataagtgcgttcacc

SEQ ID NO: 5728308 - DNA, 25 bp, Homo sapien
aaagggagactcaagtcgtagtcac

SEQ ID NO: 5728309 - DNA, 25 bp, Homo sapien
aagctcagagaaacaaccaacgaaa

SEQ ID NO: 5728310 - DNA, 25 bp, Homo sapien
tagatggcgccctccacaccatgcg

SEQ ID NO: 5728311 - DNA, 25 bp, Homo sapien
agtctgggagattcccacatccctg

SEQ ID NO: 5728312 - DNA, 25 bp, Homo sapien
gtcatagcccaaaagcttgaagagg

SEQ ID NO: 5728313 - DNA, 25 bp, Homo sapien
cgaaattccagttctttctctccag

SEQ ID NO: 5728314 - DNA, 25 bp, Homo sapien
tgagctgagatcgtgccactgccct

SEQ ID NO: 5728315 - DNA, 25 bp, Homo sapien
gccactgccctccagcctgggcgac

SEQ ID NO: 5728316 - DNA, 25 bp, Homo sapien
atctccttgcaccggtggaattctg

SEQ ID NO: 5728317 - DNA, 25 bp, Homo sapien
ccaaggtgatgatgtccttctccag

SEQ ID NO: 5728318 - DNA, 25 bp, Homo sapien
gatatgaagcagggagataagctag

SEQ ID NO: 5728319 - DNA, 25 bp, Homo sapien
aagggaacgcacaggccgcttctgg

SEQ ID NO: 5728320 - DNA, 25 bp, Homo sapien
tcaagtcgtagtcacagctcaacgg

SEQ ID NO: 5728321 - DNA, 25 bp, Homo sapien
gactcacacaccggaaaagggagac

SEQ ID NO: 5728322 - DNA, 25 bp, Homo sapien
tcaagaccatcccggctaacatggt

SEQ ID NO: 5728323 - DNA, 25 bp, Homo sapien
atggtgaaaccctgtctctactaaa

SEQ ID NO: 5728324 - DNA, 25 bp, Homo sapien
gcgtgaacccgggagttggagcttg

SEQ ID NO: 5728325 - DNA, 25 bp, Homo sapien
accggtggaattctgtgccaggagc

SEQ ID NO: 5728326 - DNA, 25 bp, Homo sapien
ggaccaagaccccgcgctcggcgcc

SEQ ID NO: 5728327 - DNA, 25 bp, Homo sapien
acgcctgtaatcccaacactttggg

SEQ ID NO: 5728328 - DNA, 25 bp, Homo sapien
ctgtaatcccaacactttgggaggc

SEQ ID NO: 5728329 - DNA, 25 bp, Homo sapien
gcctggatgagctccctcatttcca

SEQ ID NO: 5728330 - DNA, 25 bp, Homo sapien
atctttgagacttccatgggcaaag

SEQ ID NO: 5728331 - DNA, 25 bp, Homo sapien
ttctgtgccaggagcataaccttcc

SEQ ID NO: 5728332 - DNA, 25 bp, Homo sapien
ctacaggcaaagggcttcacagaaa

SEQ ID NO: 5728333 - DNA, 25 bp, Homo sapien
cgctcggcgccgccatttcccgctt

SEQ ID NO: 5728334 - DNA, 25 bp, Homo sapien
caagagcctcgatgtaccaggaacc

SEQ ID NO: 5728335 - DNA, 25 bp, Homo sapien
gcatgtcggccacgtgcatatcaca

SEQ ID NO: 5728336 - DNA, 25 bp, Homo sapien
tcttcaactgcagctgaaacattcc

SEQ ID NO: 5728337 - DNA, 25 bp, Homo sapien
gagaaagcaggaacaaagaactaca

SEQ ID NO: 5728338 - DNA, 25 bp, Homo sapien
tactgtggtccacatcccctccaga

SEQ ID NO: 5728339 - DNA, 25 bp, Homo sapien
agtgcacattgctcaacaccagtgc

SEQ ID NO: 5728340 - DNA, 25 bp, Homo sapien
caaaattctgcagtttctcttgcat

SEQ ID NO: 5728341 - DNA, 25 bp, Homo sapien
cgcgtgggcagtctcatcttcggca

SEQ ID NO: 5728342 - DNA, 25 bp, Homo sapien
gtgaacccgggagttggagcttgca

SEQ ID NO: 5728343 - DNA, 25 bp, Homo sapien
taatgtaataaaagcaatcactaaa

SEQ ID NO: 5728344 - DNA, 25 bp, Homo sapien
atgtgggagggtgtcctgggaacag

SEQ ID NO: 5728345 - DNA, 25 bp, Homo sapien
gcagtctggtcacatagaacatgga

SEQ ID NO: 5728346 - DNA, 25 bp, Homo sapien
tcatttcagtaacaaagctcagaga

SEQ ID NO: 5728347 - DNA, 25 bp, Homo sapien
cacgaggccgagactgcaacctata

SEQ ID NO: 5728348 - DNA, 25 bp, Homo sapien
tccgtgactcggtgtgcaggtaact

SEQ ID NO: 5728349 - DNA, 25 bp, Homo sapien
catcttgttggtcaaccccacgatc

SEQ ID NO: 5728350 - DNA, 25 bp, Homo sapien
gtgccttgagcccaaacgagccaag

SEQ ID NO: 5728351 - DNA, 25 bp, Homo sapien
cgcttctggacactgcagcaaggtg

SEQ ID NO: 5728352 - DNA, 25 bp, Homo sapien
acatccctgagggggcagaacagaa

SEQ ID NO: 5728353 - DNA, 25 bp, Homo sapien
gattgaatgaaagtgggaatagtaa

SEQ ID NO: 5728354 - DNA, 25 bp, Homo sapien
cgagccaagagtgtccttccactgg

SEQ ID NO: 5728355 - DNA, 25 bp, Homo sapien
tcgtgccactgccctccagcctggg

SEQ ID NO: 5728356 - DNA, 25 bp, Homo sapien
ggtaactgtgcaaaattctgcagtt

SEQ ID NO: 5728357 - DNA, 25 bp, Homo sapien
aggatatgaatgaaataaaagatag

SEQ ID NO: 5728358 - DNA, 25 bp, Homo sapien
acatggacgtcatagcccaaaagct

SEQ ID NO: 5728359 - DNA, 25 bp, Homo sapien
agtcatgtttgcttcttcagagcca

SEQ ID NO: 5728360 - DNA, 25 bp, Homo sapien
aaggcagagatgatgggcacaggaa

SEQ ID NO: 5728361 - DNA, 25 bp, Homo sapien
atttggtggcagcagccaacaggat

SEQ ID NO: 5728362 - DNA, 25 bp, Homo sapien
tgtgtttacaacttcacttgtcagg

SEQ ID NO: 5728363 - DNA, 25 bp, Homo sapien
acataatatcaaaggagagtttaat

SEQ ID NO: 5728364 - DNA, 25 bp, Homo sapien
ctgagggggcagaacagaaaccgtg

SEQ ID NO: 5728365 - DNA, 25 bp, Homo sapien
ggcagagatgatgggcacaggaaac

SEQ ID NO: 5728366 - DNA, 25 bp, Homo sapien
atgatgaggatgcatgccacacact

SEQ ID NO: 5728367 - DNA, 25 bp, Homo sapien
ggcaatgttggctgacaggctgcgg

SEQ ID NO: 5728368 - DNA, 25 bp, Homo sapien
tacaacttcacttgtcaggctcttc

SEQ ID NO: 5728369 - DNA, 25 bp, Homo sapien
ctggcaataggtccaaccaaggctg

SEQ ID NO: 5728370 - DNA, 25 bp, Homo sapien
ggtctccctcagtgcttcacagaag

SEQ ID NO: 5728371 - DNA, 25 bp, Homo sapien
tgcagtttctcttgcatttcctgtg

SEQ ID NO: 5728372 - DNA, 25 bp, Homo sapien
aaaacacttgagcaagagcctcgat

SEQ ID NO: 5728373 - DNA, 25 bp, Homo sapien
gctgcagtactgaagggaacgcaca

SEQ ID NO: 5728374 - DNA, 25 bp, Homo sapien
ctagatatgaagtgcaggttgattg

SEQ ID NO: 5728375 - DNA, 25 bp, Homo sapien
ggagctggcctggagtcccacactc

SEQ ID NO: 5728376 - DNA, 25 bp, Homo sapien
tccacatcccctccagagcgaaatt

SEQ ID NO: 5728377 - DNA, 25 bp, Homo sapien
gatgcatgccacacactcccaatat

SEQ ID NO: 5728378 - DNA, 25 bp, Homo sapien
acatgctgaagcccagaaagggtgg

SEQ ID NO: 5728379 - DNA, 25 bp, Homo sapien
gaccatcccggctaacatggtgaaa

SEQ ID NO: 5728380 - DNA, 25 bp, Homo sapien
ataagtgcgttcaccttaaccagca

SEQ ID NO: 5728381 - DNA, 25 bp, Homo sapien
cacttgagcaagagcctcgatgtac

SEQ ID NO: 5728382 - DNA, 25 bp, Homo sapien
ggagtgccacgatgcaggagtccgt

SEQ ID NO: 5728383 - DNA, 25 bp, Homo sapien
acagaaaaggagctggcctggagtc

SEQ ID NO: 5728384 - DNA, 25 bp, Homo sapien
agcggccatcagctccttgtgctgg

SEQ ID NO: 5728385 - DNA, 25 bp, Homo sapien
ctgtaggcttgggcagttggcgttg

SEQ ID NO: 5728386 - DNA, 25 bp, Homo sapien
aaagaagggagagatatgaagcagg

SEQ ID NO: 5728387 - DNA, 25 bp, Homo sapien
gaaataaaagccacataatatcaaa

SEQ ID NO: 5728388 - DNA, 25 bp, Homo sapien
gatcaaaggctctatcacacctcct

SEQ ID NO: 5728389 - DNA, 25 bp, Homo sapien
ttccactgggtggcgctgcagtact

SEQ ID NO: 5728390 - DNA, 25 bp, Homo sapien
cgtgcatatcacaagcccgctcaga

SEQ ID NO: 5728391 - DNA, 25 bp, Homo sapien
agggagactcaagtcgtagtcacag

SEQ ID NO: 5728392 - DNA, 25 bp, Homo sapien
cggccacgtgcatatcacaagcccg

SEQ ID NO: 5728393 - DNA, 25 bp, Homo sapien
accccacgatcagtctcatctccac

SEQ ID NO: 5728394 - DNA, 25 bp, Homo sapien
gctccccacgaggctcatttcagta

SEQ ID NO: 5728395 - DNA, 25 bp, Homo sapien
gtggccttgcttggtctccctcagt

SEQ ID NO: 5728396 - DNA, 25 bp, Homo sapien
atagtaagggagagagatggacgtt

SEQ ID NO: 5728397 - DNA, 25 bp, Homo sapien
ataatatcaaaggagagtttaatac

SEQ ID NO: 5728398 - DNA, 25 bp, Homo sapien
gtagtcccagctacttggaaggctg

SEQ ID NO: 5728399 - DNA, 25 bp, Homo sapien
gtttaatactgaaagagaaagcagg

SEQ ID NO: 5728400 - DNA, 25 bp, Homo sapien
ttgaatgaaagtgggaatagtaagg

SEQ ID NO: 5728401 - DNA, 25 bp, Homo sapien
actagagtactgtggtccacatccc

SEQ ID NO: 5728402 - DNA, 25 bp, Homo sapien
ggcggagcttcttgtaaaggggaca

SEQ ID NO: 5728403 - DNA, 25 bp, Homo sapien
ctagaaatctagatatgaagtgcag

SEQ ID NO: 5728404 - DNA, 25 bp, Homo sapien
ttggaaggctgaggcaggagaatgg

SEQ ID NO: 5728405 - DNA, 25 bp, Homo sapien
gtatggcactgaaataaaagccaca

SEQ ID NO: 5728406 - DNA, 25 bp, Homo sapien
tggggaatttatatgccctctcccc

SEQ ID NO: 5728407 - DNA, 25 bp, Homo sapien
catctttgagcatttacatgatcct

SEQ ID NO: 5728408 - DNA, 25 bp, Homo sapien
cactaaagtgccatctacaaaagct

SEQ ID NO: 5728409 - DNA, 25 bp, Homo sapien
aaagacagagaggtggttacagagt

SEQ ID NO: 5728410 - DNA, 25 bp, Homo sapien
acacactcccaatatcctgcgtccc

SEQ ID NO: 5728411 - DNA, 25 bp, Homo sapien
caagtctgggagattcccacatccc

SEQ ID NO: 5728412 - DNA, 25 bp, Homo sapien
gtctagggagtgttccacagtatct

SEQ ID NO: 5728413 - DNA, 25 bp, Homo sapien
gccgagactgcaacctatatgccag

SEQ ID NO: 5728414 - DNA, 25 bp, Homo sapien
gcctgtaatcccaacactttgggag

SEQ ID NO: 5728415 - DNA, 25 bp, Homo sapien
agagaggtggttacagagtctaggg

SEQ ID NO: 5728416 - DNA, 25 bp, Homo sapien
gagggggcagaacagaaaccgtgca

SEQ ID NO: 5728417 - DNA, 25 bp, Homo sapien
ctcaaaggcagagatgatgggcaca

SEQ ID NO: 5728418 - DNA, 25 bp, Homo sapien
gacagagcgagactctgtctcaaaa

SEQ ID NO: 5728419 - DNA, 25 bp, Homo sapien
gctgaaacattcctggcaataggtc

SEQ ID NO: 5728420 - DNA, 25 bp, Homo sapien
atcactctcctcgcacccaggggat

SEQ ID NO: 5728421 - DNA, 25 bp, Homo sapien
atgctgaagcccagaaagggtggtg

SEQ ID NO: 5728422 - DNA, 25 bp, Homo sapien
aaaattcaggagtgcaaggcttcac

SEQ ID NO: 5728423 - DNA, 25 bp, Homo sapien
acagtatctgtcgacaggcggagct

SEQ ID NO: 5728424 - DNA, 25 bp, Homo sapien
tatgaatgaaataaaagataggaga

SEQ ID NO: 5728425 - DNA, 25 bp, Homo sapien
gtccagtggcttccacttggcgtgg

SEQ ID NO: 5728426 - DNA, 25 bp, Homo sapien
ccaagagtgtccttccactgggtgg

SEQ ID NO: 5728427 - DNA, 25 bp, Homo sapien
cagaagatgttctaataattcgctc

SEQ ID NO: 5728428 - DNA, 25 bp, Homo sapien
aacagctgtttggctagcaccactc

SEQ ID NO: 5728429 - DNA, 25 bp, Homo sapien
tggagctggagcagtttcccatcca

SEQ ID NO: 5728430 - DNA, 25 bp, Homo sapien
gcggcacagagtgctgcagtattca

SEQ ID NO: 5728431 - DNA, 25 bp, Homo sapien
ccaggtggccttgcttggtctccct

SEQ ID NO: 5728432 - DNA, 25 bp, Homo sapien
catcaaaagcttggggacccctctt

SEQ ID NO: 5728433 - DNA, 25 bp, Homo sapien
ggttctttccatcttgttggtcaac

SEQ ID NO: 5728434 - DNA, 25 bp, Homo sapien
cgagactgcaacctatatgccagct

SEQ ID NO: 5728435 - DNA, 25 bp, Homo sapien
acttggaaggctgaggcaggagaat

SEQ ID NO: 5728436 - DNA, 25 bp, Homo sapien
agccaagagtgtccttccactgggt

SEQ ID NO: 5728437 - DNA, 25 bp, Homo sapien
ccacgatcagtctcatctccacggc

SEQ ID NO: 5728438 - DNA, 25 bp, Homo sapien
ctcactctaggacaaaaagggcgga

SEQ ID NO: 5728439 - DNA, 25 bp, Homo sapien
cccgcgctcggcgccgccatttccc

SEQ ID NO: 5728440 - DNA, 25 bp, Homo sapien
tatcacaagcccgctcagaaaacac

SEQ ID NO: 5728441 - DNA, 25 bp, Homo sapien
acaggactcacacaccggaaaaggg

SEQ ID NO: 5728442 - DNA, 25 bp, Homo sapien
ggaattctgtgccaggagcataacc

SEQ ID NO: 5728443 - DNA, 25 bp, Homo sapien
tggcgggcacctgtagtcccagcta

SEQ ID NO: 5728444 - DNA, 25 bp, Homo sapien
tagaggtggcggcacagagtgctgc

SEQ ID NO: 5728445 - DNA, 25 bp, Homo sapien
ttgggaggctgaggtgggtggatca

SEQ ID NO: 5728446 - DNA, 25 bp, Homo sapien
gtgggagtacatgctgaagcccaga

SEQ ID NO: 5728447 - DNA, 25 bp, Homo sapien
ttgggcagttggcgttgtcaaagag

SEQ ID NO: 5728448 - DNA, 25 bp, Homo sapien
ctaaagtgccatctacaaaagctgg

SEQ ID NO: 5728449 - DNA, 25 bp, Homo sapien
tcgatgtaccaggaacctcgtttgg

SEQ ID NO: 5728450 - DNA, 25 bp, Homo sapien
aaggggacaggactcacacaccgga

SEQ ID NO: 5728451 - DNA, 25 bp, Homo sapien
aaaagggcggaggatatgaatgaaa

SEQ ID NO: 5728452 - DNA, 25 bp, Homo sapien
cctttgaggcaggcatagccgcata

SEQ ID NO: 5728453 - DNA, 25 bp, Homo sapien
ggagactcaagtcgtagtcacagct

SEQ ID NO: 5728454 - DNA, 25 bp, Homo sapien
tatctgtcgacaggcggagcttctt

SEQ ID NO: 5728455 - DNA, 25 bp, Homo sapien
cctccagcctgggcgacagagcgag

SEQ ID NO: 5728456 - DNA, 25 bp, Homo sapien
gcagttggcgttgtcaaagagctga

SEQ ID NO: 5728457 - DNA, 25 bp, Homo sapien
cttcagagccaaaagataatgtcta

SEQ ID NO: 5728458 - DNA, 25 bp, Homo sapien
taagcagggataaaggtttctaggt

SEQ ID NO: 5728459 - DNA, 25 bp, Homo sapien
cggaaaagggagactcaagtcgtag

SEQ ID NO: 5728460 - DNA, 25 bp, Homo sapien
caccggaaaagggagactcaagtcg

SEQ ID NO: 5728461 - DNA, 25 bp, Homo sapien
gcacctgtagtcccagctacttgga

SEQ ID NO: 5728462 - DNA, 25 bp, Homo sapien
gaacaaagaactacattacatcttt

SEQ ID NO: 5728463 - DNA, 25 bp, Homo sapien
actgcagctgaaacattcctggcaa

SEQ ID NO: 5728464 - DNA, 25 bp, Homo sapien
gcagtgagctgagatcgtgccactg

SEQ ID NO: 5728465 - DNA, 25 bp, Homo sapien
actgcaacctatatgccagctggaa

SEQ ID NO: 5728466 - DNA, 25 bp, Homo sapien
ggaaaaagacagagaggtggttaca

SEQ ID NO: 5728467 - DNA, 25 bp, Homo sapien
gcttggggacccctcttaggcagca

SEQ ID NO: 5728468 - DNA, 25 bp, Homo sapien
aatatcaaaggagagtttaatactg

SEQ ID NO: 5728469 - DNA, 25 bp, Homo sapien
aaaagataggagatggtctctcaga

SEQ ID NO: 5728470 - DNA, 25 bp, Homo sapien
actgtgtttacaacttcacttgtca

SEQ ID NO: 5728471 - DNA, 25 bp, Homo sapien
ccgctcagaaaacacttgagcaaga

SEQ ID NO: 5728472 - DNA, 25 bp, Homo sapien
gagagtttaatactgaaagagaaag

SEQ ID NO: 5728473 - DNA, 25 bp, Homo sapien
atctccacggcaggcctggatgaag

SEQ ID NO: 5728474 - DNA, 25 bp, Homo sapien
gtcacatagaacatggacgtcatag

SEQ ID NO: 5728475 - DNA, 25 bp, Homo sapien
ggcacagagtgctgcagtattcaga

SEQ ID NO: 5728476 - DNA, 25 bp, Homo sapien
aaccaacgaaagatctttgagactt

SEQ ID NO: 5728477 - DNA, 25 bp, Homo sapien
ttgtcaaagagctgaaaaacctctt

SEQ ID NO: 5728478 - DNA, 25 bp, Homo sapien
gcacggtggcgggcacctgtagtcc

SEQ ID NO: 5728479 - DNA, 25 bp, Homo sapien
agcccaaacgagccaagagtgtcct

SEQ ID NO: 5728480 - DNA, 25 bp, Homo sapien
aaccaaggctggctctacaggcaaa

SEQ ID NO: 5728481 - DNA, 25 bp, Homo sapien
ctagacagatttggtggcagcagcc

SEQ ID NO: 5728482 - DNA, 25 bp, Homo sapien
atcctgaagatcaaaggctctatca

SEQ ID NO: 5728483 - DNA, 25 bp, Homo sapien
tctgcagtttctcttgcatttcctg

SEQ ID NO: 5728484 - DNA, 25 bp, Homo sapien
tctgtcgacaggcggagcttcttgt

SEQ ID NO: 5728485 - DNA, 25 bp, Homo sapien
ctacttggaaggctgaggcaggaga

SEQ ID NO: 5728486 - DNA, 25 bp, Homo sapien
cagcaagttgaggagttccacattc

SEQ ID NO: 5728487 - DNA, 25 bp, Homo sapien
ataaaagataggagatggtctctca

SEQ ID NO: 5728488 - DNA, 25 bp, Homo sapien
gtaaagaagggagagatatgaagca

SEQ ID NO: 5728489 - DNA, 25 bp, Homo sapien
cctggccttctctgatgctccccac

SEQ ID NO: 5728490 - DNA, 25 bp, Homo sapien
cttcccgatccttgataagtgcgtt

SEQ ID NO: 5728491 - DNA, 25 bp, Homo sapien
aatcccaacactttgggaggctgag

SEQ ID NO: 5728492 - DNA, 25 bp, Homo sapien
acaggaaacaagtctgggagattcc

SEQ ID NO: 5728493 - DNA, 25 bp, Homo sapien
gaaagtgggaatagtaagggagaga

SEQ ID NO: 5728494 - DNA, 25 bp, Homo sapien
tgaagatcaaaggctctatcacacc

SEQ ID NO: 5728495 - DNA, 25 bp, Homo sapien
gcgacagagcgagactctgtctcaa

SEQ ID NO: 5728496 - DNA, 25 bp, Homo sapien
ggttcttttttagagtttcctgatg

SEQ ID NO: 5728497 - DNA, 25 bp, Homo sapien
gtctctagtcatgtttgcttcttca

SEQ ID NO: 5728498 - DNA, 25 bp, Homo sapien
catagatggcgccctccacaccatg

SEQ ID NO: 5728499 - DNA, 25 bp, Homo sapien
gaatgaaagtgggaatagtaaggga

SEQ ID NO: 5728500 - DNA, 25 bp, Homo sapien
cagctgaaacattcctggcaatagg

SEQ ID NO: 5728501 - DNA, 25 bp, Homo sapien
tcacagaaggcatcaaaagcttggg

SEQ ID NO: 5728502 - DNA, 25 bp, Homo sapien
tttttagagtttcctgatgatgagg

SEQ ID NO: 5728503 - DNA, 25 bp, Homo sapien
gagatcaagaccatcccggctaaca

SEQ ID NO: 5728504 - DNA, 25 bp, Homo sapien
cctgaaggcagagaggaccatcttt

SEQ ID NO: 5728505 - DNA, 25 bp, Homo sapien
ggcaggagaatggcgtgaacccggg

SEQ ID NO: 5728506 - DNA, 25 bp, Homo sapien
caacctatatgccagctggaagtgt

SEQ ID NO: 5728507 - DNA, 25 bp, Homo sapien
tgagcaagagcctcgatgtaccagg

SEQ ID NO: 5728508 - DNA, 25 bp, Homo sapien
ttcacctgaaggcagagaggaccat

SEQ ID NO: 5728509 - DNA, 25 bp, Homo sapien
acagagtctagggaaacacaccatt

SEQ ID NO: 5728510 - DNA, 25 bp, Homo sapien
caggaacctcgtttggtgttccgca

SEQ ID NO: 5728511 - DNA, 25 bp, Homo sapien
aagtgggaatagtaagggagagaga

SEQ ID NO: 5728512 - DNA, 25 bp, Homo sapien
tgcagctgaaacattcctggcaata

SEQ ID NO: 5728513 - DNA, 25 bp, Homo sapien
ccactttggcctggatgagctccct

SEQ ID NO: 5728514 - DNA, 25 bp, Homo sapien
gcttgggcagttggcgttgtcaaag

SEQ ID NO: 5728515 - DNA, 25 bp, Homo sapien
agagcctcgatgtaccaggaacctc

SEQ ID NO: 5728516 - DNA, 25 bp, Homo sapien
ataggtccaaccaaggctggctcta

SEQ ID NO: 5728517 - DNA, 25 bp, Homo sapien
cgtagtcacagctcaacggtgggag

SEQ ID NO: 5728518 - DNA, 25 bp, Homo sapien
aaggctgaggcaggagaatggcgtg

SEQ ID NO: 5728519 - DNA, 25 bp, Homo sapien
gcttttctagaaatctagatatgaa

SEQ ID NO: 5728520 - DNA, 25 bp, Homo sapien
gatcctgcgtggttctttccatctt

SEQ ID NO: 5728521 - DNA, 25 bp, Homo sapien
cactgcagcaaggtgcgtctctagt

SEQ ID NO: 5728522 - DNA, 25 bp, Homo sapien
ctctcactctaggacaaaaagggcg

SEQ ID NO: 5728523 - DNA, 25 bp, Homo sapien
cactctcctcgcacccaggggatcc

SEQ ID NO: 5728524 - DNA, 25 bp, Homo sapien
agtatctgtcgacaggcggagcttc

SEQ ID NO: 5728525 - DNA, 25 bp, Homo sapien
gttcaccttaaccagcatgtcggcc

SEQ ID NO: 5728526 - DNA, 25 bp, Homo sapien
gaacccgggagttggagcttgcagt

SEQ ID NO: 5728527 - DNA, 25 bp, Homo sapien
caaagagctgaaaaacctcttggag

SEQ ID NO: 5728528 - DNA, 25 bp, Homo sapien
catctttattgtctagggagtgttc

SEQ ID NO: 5728529 - DNA, 25 bp, Homo sapien
tcggtgtgcaggtaactgtgcaaaa

SEQ ID NO: 5728530 - DNA, 25 bp, Homo sapien
cctgatgatgaggatgcatgccaca

SEQ ID NO: 5728531 - DNA, 25 bp, Homo sapien
catcttcggcaacttttctttaccg

SEQ ID NO: 5728532 - DNA, 25 bp, Homo sapien
ggaacctcgtttggtgttccgcatg

SEQ ID NO: 5728533 - DNA, 25 bp, Homo sapien
cctcgtttggtgttccgcatggcgg

SEQ ID NO: 5728534 - DNA, 25 bp, Homo sapien
cttgtaaaggggacaggactcacac

SEQ ID NO: 5728535 - DNA, 25 bp, Homo sapien
tgactagagtactgtggtccacatc

SEQ ID NO: 5728536 - DNA, 25 bp, Homo sapien
agcgcgtgggcagtctcatcttcgg

SEQ ID NO: 5728537 - DNA, 25 bp, Homo sapien
tgatgatgaggatgcatgccacaca

SEQ ID NO: 5728538 - DNA, 25 bp, Homo sapien
aaacaaccaacgaaagatctttgag

SEQ ID NO: 5728539 - DNA, 25 bp, Homo sapien
ataagctaggaagcttttctagaaa

SEQ ID NO: 5728540 - DNA, 25 bp, Homo sapien
acatggtgaaaccctgtctctacta

SEQ ID NO: 5728541 - DNA, 25 bp, Homo sapien
gctctatcacacctcctgtggtcca

SEQ ID NO: 5728542 - DNA, 25 bp, Homo sapien
catttcctgtgcagtctggtcacat

SEQ ID NO: 5728543 - DNA, 25 bp, Homo sapien
cctcatttccaaggtgatgatgtcc

SEQ ID NO: 5728544 - DNA, 25 bp, Homo sapien
ccagaaagggtggtgagcaacatat

SEQ ID NO: 5728545 - DNA, 25 bp, Homo sapien
ggaggtgacatcatgtgggagggtg

SEQ ID NO: 5728546 - DNA, 25 bp, Homo sapien
ccaggggatcctgcgtggttctttc

SEQ ID NO: 5728547 - DNA, 25 bp, Homo sapien
cgttgtcaaagagctgaaaaacctc

SEQ ID NO: 5728548 - DNA, 25 bp, Homo sapien
cacactcaaaggcagagatgatggg

SEQ ID NO: 5728549 - DNA, 25 bp, Homo sapien
ctgaggcaggagaatggcgtgaacc

SEQ ID NO: 5728550 - DNA, 25 bp, Homo sapien
aagatcaataaggtacaaatgcaag

SEQ ID NO: 5728551 - DNA, 25 bp, Homo sapien
gcgctgcagtactgaagggaacgca

SEQ ID NO: 5728552 - DNA, 25 bp, Homo sapien
tcacagaaaaggagctggcctggag

SEQ ID NO: 5728553 - DNA, 25 bp, Homo sapien
cacaaatatggggaatttatatgcc

SEQ ID NO: 5728554 - DNA, 25 bp, Homo sapien
acaaagaactacattacatctttga

SEQ ID NO: 5728555 - DNA, 25 bp, Homo sapien
caggagtccgtgactcggtgtgcag

SEQ ID NO: 5728556 - DNA, 25 bp, Homo sapien
gatgaggatgcatgccacacactcc

SEQ ID NO: 5728557 - DNA, 25 bp, Homo sapien
caaagatcaataaggtacaaatgca

SEQ ID NO: 5728558 - DNA, 25 bp, Homo sapien
tgaaaaacctcttggagctggagca

SEQ ID NO: 5728559 - DNA, 25 bp, Homo sapien
aggccgagactgcaacctatatgcc

SEQ ID NO: 5728560 - DNA, 25 bp, Homo sapien
ttctagacagatttggtggcagcag

SEQ ID NO: 5728561 - DNA, 25 bp, Homo sapien
ggtgactagagtactgtggtccaca

SEQ ID NO: 5728562 - DNA, 25 bp, Homo sapien
tcctgcgtcccctgtcagcggccat

SEQ ID NO: 5728563 - DNA, 25 bp, Homo sapien
gcgtctctagtcatgtttgcttctt

SEQ ID NO: 5728564 - DNA, 25 bp, Homo sapien
gaaactgcccactttggcctggatg

SEQ ID NO: 5728565 - DNA, 25 bp, Homo sapien
tcagctccttgtgctggaaggtgga

SEQ ID NO: 5728566 - DNA, 25 bp, Homo sapien
agacatctccttgcaccggtggaat

SEQ ID NO: 5728567 - DNA, 25 bp, Homo sapien
gcatatcatgtctgagcgcgtgggc

SEQ ID NO: 5728568 - DNA, 25 bp, Homo sapien
ccatccacaccatagatggcgccct

SEQ ID NO: 5728569 - DNA, 25 bp, Homo sapien
aggcatagccgcatatcatgtctga

SEQ ID NO: 5728570 - DNA, 25 bp, Homo sapien
cttcacagaaggcatcaaaagcttg

SEQ ID NO: 5728571 - DNA, 25 bp, Homo sapien
caaccccacgatcagtctcatctcc

SEQ ID NO: 5728572 - DNA, 25 bp, Homo sapien
cgaggctcatttcagtaacaaagct

SEQ ID NO: 5728573 - DNA, 25 bp, Homo sapien
tctagggaaacacaccattcttcct

SEQ ID NO: 5728574 - DNA, 25 bp, Homo sapien
cagtgaagtgcacattgctcaacac

SEQ ID NO: 5728575 - DNA, 25 bp, Homo sapien
accctgtctctactaaaaatacaaa

SEQ ID NO: 5728576 - DNA, 25 bp, Homo sapien
tgcacattgctcaacaccagtgcta

SEQ ID NO: 5728577 - DNA, 25 bp, Homo sapien
tggcctggatgagctccctcatttc

SEQ ID NO: 5728578 - DNA, 25 bp, Homo sapien
accccgcgctcggcgccgccatttc

SEQ ID NO: 5728579 - DNA, 25 bp, Homo sapien
acaggccgcttctggacactgcagc

SEQ ID NO: 5728580 - DNA, 25 bp, Homo sapien
gcttcacctgaaggcagagaggacc

SEQ ID NO: 5728581 - DNA, 25 bp, Homo sapien
cttgagcccaaacgagccaagagtg

SEQ ID NO: 5728582 - DNA, 25 bp, Homo sapien
acagagaggtggttacagagtctag

SEQ ID NO: 5728583 - DNA, 25 bp, Homo sapien
agtctggtcacatagaacatggacg

SEQ ID NO: 5728584 - DNA, 25 bp, Homo sapien
tgggcaaagatcaataaggtacaaa

SEQ ID NO: 5728585 - DNA, 25 bp, Homo sapien
ttgtctagggagtgttccacagtat

SEQ ID NO: 5728586 - DNA, 25 bp, Homo sapien
agactcaagtcgtagtcacagctca

SEQ ID NO: 5728587 - DNA, 25 bp, Homo sapien
aagttgggaagtttcagataagcag

SEQ ID NO: 5728588 - DNA, 25 bp, Homo sapien
ccgcatggcggcagtccctttgagg

SEQ ID NO: 5728589 - DNA, 25 bp, Homo sapien
ggttacagagtctagggaaacacac

SEQ ID NO: 5728590 - DNA, 25 bp, Homo sapien
cacatcccctccagagcgaaattcc

SEQ ID NO: 5728591 - DNA, 25 bp, Homo sapien
gccacgaggccgagactgcaaccta

SEQ ID NO: 5728592 - DNA, 25 bp, Homo sapien
atccctgagggggcagaacagaaac

SEQ ID NO: 5728593 - DNA, 25 bp, Homo sapien
gttgaggagttccacattctggctg

SEQ ID NO: 5728594 - DNA, 25 bp, Homo sapien
tggcagcagccaacaggatgaaatg

SEQ ID NO: 5728595 - DNA, 25 bp, Homo sapien
ggtctctcagacatcttaactaatg

SEQ ID NO: 5728596 - DNA, 25 bp, Homo sapien
caggcggagcttcttgtaaagggga

SEQ ID NO: 5728597 - DNA, 25 bp, Homo sapien
agctacttggaaggctgaggcagga

SEQ ID NO: 5728598 - DNA, 25 bp, Homo sapien
aacaagtctgggagattcccacatc

SEQ ID NO: 5728599 - DNA, 25 bp, Homo sapien
ttacagagtctagggaaacacacca

SEQ ID NO: 5728600 - DNA, 25 bp, Homo sapien
taaggtacaaatgcaaggcaatgtt

SEQ ID NO: 5728601 - DNA, 25 bp, Homo sapien
gaactgaacacaaatatggggaatt

SEQ ID NO: 5728602 - DNA, 25 bp, Homo sapien
gatgaagaacatttttggtttgttc

SEQ ID NO: 5728603 - DNA, 25 bp, Homo sapien
tccttgataagtgcgttcaccttaa

SEQ ID NO: 5728604 - DNA, 25 bp, Homo sapien
ttgaagagggtgactagagtactgt

SEQ ID NO: 5728605 - DNA, 25 bp, Homo sapien
ggtgtgcaggtaactgtgcaaaatt

SEQ ID NO: 5728606 - DNA, 25 bp, Homo sapien
cttaactaatgtaataaaagcaatc

SEQ ID NO: 5728607 - DNA, 25 bp, Homo sapien
accatagatggcgccctccacacca

SEQ ID NO: 5728608 - DNA, 25 bp, Homo sapien
caggttgattgaatgaaagtgggaa

SEQ ID NO: 5728609 - DNA, 25 bp, Homo sapien
cttctccagaagatgttctaataat

SEQ ID NO: 5728610 - DNA, 25 bp, Homo sapien
taggcagcaagttgaggagttccac

SEQ ID NO: 5728611 - DNA, 25 bp, Homo sapien
ggtgttccgcatggcggcagtccct

SEQ ID NO: 5728612 - DNA, 25 bp, Homo sapien
gcggaggatatgaatgaaataaaag

SEQ ID NO: 5728613 - DNA, 25 bp, Homo sapien
aacacttgagcaagagcctcgatgt

SEQ ID NO: 5728614 - DNA, 25 bp, Homo sapien
gttgggaagtttcagataagcaggg

SEQ ID NO: 5728615 - DNA, 25 bp, Homo sapien
ggacaggactcacacaccggaaaag

SEQ ID NO: 5728616 - DNA, 25 bp, Homo sapien
caatcactaaagtgccatctacaaa

SEQ ID NO: 5728617 - DNA, 25 bp, Homo sapien
ggatgagctccctcatttccaaggt

SEQ ID NO: 5728618 - DNA, 25 bp, Homo sapien
tgccatctacaaaagctggaactga

SEQ ID NO: 5728619 - DNA, 25 bp, Homo sapien
caggtagaggtggcggcacagagtg

SEQ ID NO: 5728620 - DNA, 25 bp, Homo sapien
agtggcttccacttggcgtggatga

SEQ ID NO: 5728621 - DNA, 25 bp, Homo sapien
acaggatgaaatgaaggtaaagaag

SEQ ID NO: 5728622 - DNA, 25 bp, Homo sapien
aaagggcttcacagaaaaggagctg

SEQ ID NO: 5728623 - DNA, 25 bp, Homo sapien
aaatttggacaccttccaaactctc

SEQ ID NO: 5728624 - DNA, 25 bp, Homo sapien
ccaacgaaagatctttgagacttcc

SEQ ID NO: 5728625 - DNA, 25 bp, Homo sapien
acaggcaaagggcttcacagaaaag

SEQ ID NO: 5728626 - DNA, 25 bp, Homo sapien
tctatcacacctcctgtggtccagt

SEQ ID NO: 5728627 - DNA, 25 bp, Homo sapien
ttcaactgcagctgaaacattcctg

SEQ ID NO: 5728628 - DNA, 25 bp, Homo sapien
tgcggtgccttgagcccaaacgagc

SEQ ID NO: 5728629 - DNA, 25 bp, Homo sapien
cacaccggaaaagggagactcaagt

SEQ ID NO: 5728630 - DNA, 25 bp, Homo sapien
aggctgcggtgccttgagcccaaac

SEQ ID NO: 5728631 - DNA, 25 bp, Homo sapien
agataagctaggaagcttttctaga

SEQ ID NO: 5728632 - DNA, 25 bp, Homo sapien
gatcagtctcatctccacggcaggc

SEQ ID NO: 5728633 - DNA, 25 bp, Homo sapien
caggagtgcaaggcttcacctgaag

SEQ ID NO: 5728634 - DNA, 25 bp, Homo sapien
gcagtggctcacgcctgtaatccca

SEQ ID NO: 5728635 - DNA, 25 bp, Homo sapien
agtgccatctacaaaagctggaact

SEQ ID NO: 5728636 - DNA, 25 bp, Homo sapien
cttccatgggcaaagatcaataagg

SEQ ID NO: 5728637 - DNA, 25 bp, Homo sapien
gaggtcaggagatcaagaccatccc

SEQ ID NO: 5728638 - DNA, 25 bp, Homo sapien
ccaaggctggctctacaggcaaagg

SEQ ID NO: 5728639 - DNA, 25 bp, Homo sapien
tagggaaacacaccattcttcctgg

SEQ ID NO: 5728640 - DNA, 25 bp, Homo sapien
agtgagctgagatcgtgccactgcc

SEQ ID NO: 5728641 - DNA, 25 bp, Homo sapien
cctcagtgcttcacagaaggcatca

SEQ ID NO: 5728642 - DNA, 25 bp, Homo sapien
ctgaggtgggtggatcatgaggtca

SEQ ID NO: 5728643 - DNA, 25 bp, Homo sapien
gagctccctcatttccaaggtgatg

SEQ ID NO: 5728644 - DNA, 25 bp, Homo sapien
ccagctacttggaaggctgaggcag

SEQ ID NO: 5728645 - DNA, 25 bp, Homo sapien
ctgaaataaaagccacataatatca

SEQ ID NO: 5728646 - DNA, 25 bp, Homo sapien
agccgcatatcatgtctgagcgcgt

SEQ ID NO: 5728647 - DNA, 25 bp, Homo sapien
ctacaaaagctggaactgaacacaa

SEQ ID NO: 5728648 - DNA, 25 bp, Homo sapien
cggcatcactctcctcgcacccagg

SEQ ID NO: 5728649 - DNA, 25 bp, Homo sapien
gaaaacaataacatgtatggcactg

SEQ ID NO: 5728650 - DNA, 25 bp, Homo sapien
ctggcctggagtcccacactcaaag

SEQ ID NO: 5728651 - DNA, 25 bp, Homo sapien
tggatgaagaacatttttggtttgt

SEQ ID NO: 5728652 - DNA, 25 bp, Homo sapien
cagtttctcttgcatttcctgtgca

SEQ ID NO: 5728653 - DNA, 25 bp, Homo sapien
gtgcatcctgaagatcaaaggctct

SEQ ID NO: 5728654 - DNA, 25 bp, Homo sapien
tggcgccctccacaccatgcgagag

SEQ ID NO: 5728655 - DNA, 25 bp, Homo sapien
atttttggtttgttctgtaggcttg

SEQ ID NO: 5728656 - DNA, 25 bp, Homo sapien
tggtcacatagaacatggacgtcat

SEQ ID NO: 5728657 - DNA, 25 bp, Homo sapien
atctacaaaagctggaactgaacac

SEQ ID NO: 5728658 - DNA, 25 bp, Homo sapien
gacatcatgtgggagggtgtcctgg

SEQ ID NO: 5728659 - DNA, 25 bp, Homo sapien
ttctagaaatctagatatgaagtgc

SEQ ID NO: 5728660 - DNA, 25 bp, Homo sapien
agcaatcactaaagtgccatctaca

SEQ ID NO: 5728661 - DNA, 25 bp, Homo sapien
ccacttggcgtggatgatggggagg

SEQ ID NO: 5728662 - DNA, 25 bp, Homo sapien
atttcagtaacaaagctcagagaaa

SEQ ID NO: 5728663 - DNA, 25 bp, Homo sapien
acatctccttgcaccggtggaattc

SEQ ID NO: 5728664 - DNA, 25 bp, Homo sapien
agagaaacaaccaacgaaagatctt

SEQ ID NO: 5728665 - DNA, 25 bp, Homo sapien
agaaaacacttgagcaagagcctcg

SEQ ID NO: 5728666 - DNA, 25 bp, Homo sapien
tctggtcacatagaacatggacgtc

SEQ ID NO: 5728667 - DNA, 25 bp, Homo sapien
ctaggccacgaggccgagactgcaa

SEQ ID NO: 5728668 - DNA, 25 bp, Homo sapien
ctctaggacaaaaagggcggaggat

SEQ ID NO: 5728669 - DNA, 25 bp, Homo sapien
ttccacagtatctgtcgacaggcgg

SEQ ID NO: 5728670 - DNA, 25 bp, Homo sapien
cttttttagagtttcctgatgatga

SEQ ID NO: 5728671 - DNA, 25 bp, Homo sapien
gtgctggaaggtggaccaagacccc

SEQ ID NO: 5728672 - DNA, 25 bp, Homo sapien
ctagtcatgtttgcttcttcagagc

SEQ ID NO: 5728673 - DNA, 25 bp, Homo sapien
tccacaccatgcgagaggagtgcca

SEQ ID NO: 5728674 - DNA, 25 bp, Homo sapien
ggctgaggcaggagaatggcgtgaa

SEQ ID NO: 5728675 - DNA, 25 bp, Homo sapien
cacagagtgctgcagtattcagaca

SEQ ID NO: 5728676 - DNA, 25 bp, Homo sapien
ttcctggccttctctgatgctcccc

SEQ ID NO: 5728677 - DNA, 25 bp, Homo sapien
tgagcatttacatgatcctgtaaag

SEQ ID NO: 5728678 - DNA, 25 bp, Homo sapien
tcgcacccaggggatcctgcgtggt

SEQ ID NO: 5728679 - DNA, 25 bp, Homo sapien
aggatgaaatgaaggtaaagaaggg

SEQ ID NO: 5728680 - DNA, 25 bp, Homo sapien
aataaaagccacataatatcaaagg

SEQ ID NO: 5728681 - DNA, 25 bp, Homo sapien
taggaagcttttctagaaatctaga

SEQ ID NO: 5728682 - DNA, 25 bp, Homo sapien
ctgggcgacagagcgagactctgtc

SEQ ID NO: 5728683 - DNA, 25 bp, Homo sapien
ccataaccacactgtgtttacaact

SEQ ID NO: 5728684 - DNA, 25 bp, Homo sapien
ggaaggaaaaagacagagaggtggt

SEQ ID NO: 5728685 - DNA, 25 bp, Homo sapien
gccagctggaagtgtgtttgataaa

SEQ ID NO: 5728686 - DNA, 25 bp, Homo sapien
gagaggagtgccacgatgcaggagt

SEQ ID NO: 5728687 - DNA, 25 bp, Homo sapien
tcccagctacttggaaggctgaggc

SEQ ID NO: 5728688 - DNA, 25 bp, Homo sapien
gagtgctgcagtattcagacatctc

SEQ ID NO: 5728689 - DNA, 25 bp, Homo sapien
gcccagaaagggtggtgagcaacat

SEQ ID NO: 5728690 - DNA, 25 bp, Homo sapien
cagataagcagggataaaggtttct

SEQ ID NO: 5728691 - DNA, 25 bp, Homo sapien
gtctcatcttcggcaacttttcttt

SEQ ID NO: 5728692 - DNA, 25 bp, Homo sapien
aaggcagagaggaccatctttattg

SEQ ID NO: 5728693 - DNA, 25 bp, Homo sapien
ggtgggtggatcatgaggtcaggag

SEQ ID NO: 5728694 - DNA, 25 bp, Homo sapien
ttccaaggtgatgatgtccttctcc

SEQ ID NO: 5728695 - DNA, 25 bp, Homo sapien
caaaaagggcggaggatatgaatga

SEQ ID NO: 5728696 - DNA, 25 bp, Homo sapien
tcttcctggccttctctgatgctcc

SEQ ID NO: 5728697 - DNA, 25 bp, Homo sapien
gctagcaccactcggttctttttta

SEQ ID NO: 5728698 - DNA, 25 bp, Homo sapien
cctgtctctactaaaaatacaaaaa

SEQ ID NO: 5728699 - DNA, 25 bp, Homo sapien
ggtggcgggcacctgtagtcccagc

SEQ ID NO: 5728700 - DNA, 25 bp, Homo sapien
ttggacaccttccaaactctcactc

SEQ ID NO: 5728701 - DNA, 25 bp, Homo sapien
ttgtgctggaaggtggaccaagacc

SEQ ID NO: 5728702 - DNA, 25 bp, Homo sapien
caagaccccgcgctcggcgccgcca

SEQ ID NO: 5728703 - DNA, 25 bp, Homo sapien
aaaaacctcttggagctggagcagt

SEQ ID NO: 5728704 - DNA, 25 bp, Homo sapien
agggagtgttccacagtatctgtcg

SEQ ID NO: 5728705 - DNA, 25 bp, Homo sapien
ctctacaggcaaagggcttcacaga

SEQ ID NO: 5728706 - DNA, 25 bp, Homo sapien
atttccaaggtgatgatgtccttct

SEQ ID NO: 5728707 - DNA, 25 bp, Homo sapien
tgaagaacatttttggtttgttctg

SEQ ID NO: 5728708 - DNA, 25 bp, Homo sapien
gcagtttcccatccacaccatagat

SEQ ID NO: 5728709 - DNA, 25 bp, Homo sapien
ttggtctccctcagtgcttcacaga

SEQ ID NO: 5728710 - DNA, 25 bp, Homo sapien
aagcagggagataagctaggaagct

SEQ ID NO: 5728711 - DNA, 25 bp, Homo sapien
aatggcgtgaacccgggagttggag

SEQ ID NO: 5728712 - DNA, 25 bp, Homo sapien
gtggtccacatcccctccagagcga

SEQ ID NO: 5728713 - DNA, 25 bp, Homo sapien
tccaaactctcactctaggacaaaa

SEQ ID NO: 5728714 - DNA, 25 bp, Homo sapien
gttccacattctggctgaaactgcc

SEQ ID NO: 5728715 - DNA, 25 bp, Homo sapien
gatccttgataagtgcgttcacctt

SEQ ID NO: 5728716 - DNA, 25 bp, Homo sapien
ctcttgcatttcctgtgcagtctgg

SEQ ID NO: 5728717 - DNA, 25 bp, Homo sapien
tacatgatcctgtaaagcaggattc

SEQ ID NO: 5728718 - DNA, 25 bp, Homo sapien
atgctccccacgaggctcatttcag

SEQ ID NO: 5728719 - DNA, 25 bp, Homo sapien
cacgtgcatatcacaagcccgctca

SEQ ID NO: 5728720 - DNA, 25 bp, Homo sapien
tgtggtccagtggcttccacttggc

SEQ ID NO: 5728721 - DNA, 25 bp, Homo sapien
cattctggctgaaactgcccacttt

SEQ ID NO: 5728722 - DNA, 25 bp, Homo sapien
aaacctcttggagctggagcagttt

SEQ ID NO: 5728723 - DNA, 25 bp, Homo sapien
ctcggcgccgccatttcccgctttt

SEQ ID NO: 5728724 - DNA, 25 bp, Homo sapien
ggacgtttctcaggaaggaaaaaga

SEQ ID NO: 5728725 - DNA, 25 bp, Homo sapien
gagggtgtcctgggaacaggtagag

SEQ ID NO: 5728726 - DNA, 25 bp, Homo sapien
gctcagaaaacacttgagcaagagc

SEQ ID NO: 5728727 - DNA, 25 bp, Homo sapien
tctcatctccacggcaggcctggat

SEQ ID NO: 5728728 - DNA, 25 bp, Homo sapien
acatttttggtttgttctgtaggct

SEQ ID NO: 5728729 - DNA, 25 bp, Homo sapien
gagatcgtgccactgccctccagcc

SEQ ID NO: 5728730 - DNA, 25 bp, Homo sapien
gatgaaatgaaggtaaagaagggag

SEQ ID NO: 5728731 - DNA, 25 bp, Homo sapien
cacgaggctcatttcagtaacaaag

SEQ ID NO: 5728732 - DNA, 25 bp, Homo sapien
tggccttctctgatgctccccacga

SEQ ID NO: 5728733 - DNA, 25 bp, Homo sapien
cgaaagatctttgagacttccatgg

SEQ ID NO: 5728734 - DNA, 25 bp, Homo sapien
ccactgggtggcgctgcagtactga

SEQ ID NO: 5728735 - DNA, 25 bp, Homo sapien
acctatatgccagctggaagtgtgt

SEQ ID NO: 5728736 - DNA, 25 bp, Homo sapien
accagcatgtcggccacgtgcatat

SEQ ID NO: 5728737 - DNA, 25 bp, Homo sapien
aggaacaaagaactacattacatct

SEQ ID NO: 5728738 - DNA, 25 bp, Homo sapien
ccctccagagcgaaattccagttct

SEQ ID NO: 5728739 - DNA, 25 bp, Homo sapien
aagagaaagcaggaacaaagaacta

SEQ ID NO: 5728740 - DNA, 25 bp, Homo sapien
gcctgggcgacagagcgagactctg

SEQ ID NO: 5728741 - DNA, 25 bp, Homo sapien
agaggtggttacagagtctagggaa

SEQ ID NO: 5728742 - DNA, 25 bp, Homo sapien
ctccaggtggccttgcttggtctcc

SEQ ID NO: 5728743 - DNA, 25 bp, Homo sapien
agagggtgactagagtactgtggtc

SEQ ID NO: 5728744 - DNA, 25 bp, Homo sapien
gcaagttgaggagttccacattctg

SEQ ID NO: 5728745 - DNA, 25 bp, Homo sapien
ctacattacatctttgagcatttac

SEQ ID NO: 5728746 - DNA, 25 bp, Homo sapien
cacacaccggaaaagggagactcaa

SEQ ID NO: 5728747 - DNA, 25 bp, Homo sapien
agcagggataaaggtttctaggttg

SEQ ID NO: 5728748 - DNA, 25 bp, Homo sapien
tcccacatccctgagggggcagaac

SEQ ID NO: 5728749 - DNA, 25 bp, Homo sapien
agaaggcatcaaaagcttggggacc

SEQ ID NO: 5728750 - DNA, 25 bp, Homo sapien
cagcatgtcggccacgtgcatatca

SEQ ID NO: 5728751 - DNA, 25 bp, Homo sapien
tatcctgcgtcccctgtcagcggcc

SEQ ID NO: 5728752 - DNA, 25 bp, Homo sapien
ctttgagacttccatgggcaaagat

SEQ ID NO: 5728753 - DNA, 25 bp, Homo sapien
agaaatctagatatgaagtgcaggt

SEQ ID NO: 5728754 - DNA, 25 bp, Homo sapien
tgtaaaggggacaggactcacacac

SEQ ID NO: 5728755 - DNA, 25 bp, Homo sapien
tcaacggtgggagtacatgctgaag

SEQ ID NO: 5728756 - DNA, 25 bp, Homo sapien
cagctgtttggctagcaccactcgg

SEQ ID NO: 5728757 - DNA, 25 bp, Homo sapien
cactgaaataaaagccacataatat

SEQ ID NO: 5728758 - DNA, 25 bp, Homo sapien
aggtggttacagagtctagggaaac

SEQ ID NO: 5728759 - DNA, 25 bp, Homo sapien
acctcctgtggtccagtggcttcca

SEQ ID NO: 5728760 - DNA, 25 bp, Homo sapien
aagggagagatatgaagcagggaga

SEQ ID NO: 5728761 - DNA, 25 bp, Homo sapien
gaagtgcacattgctcaacaccagt

SEQ ID NO: 5728762 - DNA, 25 bp, Homo sapien
gtggaattctgtgccaggagcataa

SEQ ID NO: 5728763 - DNA, 25 bp, Homo sapien
agctggcctggagtcccacactcaa

SEQ ID NO: 5728764 - DNA, 25 bp, Homo sapien
acccaggggatcctgcgtggttctt

SEQ ID NO: 5728765 - DNA, 25 bp, Homo sapien
tttattgtctagggagtgttccaca

SEQ ID NO: 5728766 - DNA, 25 bp, Homo sapien
ggacgtcatagcccaaaagcttgaa

SEQ ID NO: 5728767 - DNA, 25 bp, Homo sapien
ggtttgttctgtaggcttgggcagt

SEQ ID NO: 5728768 - DNA, 25 bp, Homo sapien
gggagagatatgaagcagggagata

SEQ ID NO: 5728769 - DNA, 25 bp, Homo sapien
ctgcccactttggcctggatgagct

SEQ ID NO: 5728770 - DNA, 25 bp, Homo sapien
tggagtcccacactcaaaggcagag

SEQ ID NO: 5728771 - DNA, 25 bp, Homo sapien
tttgttctgtaggcttgggcagttg

SEQ ID NO: 5728772 - DNA, 25 bp, Homo sapien
ggagaatggcgtgaacccgggagtt

SEQ ID NO: 5728773 - DNA, 25 bp, Homo sapien
aggagatcaagaccatcccggctaa

SEQ ID NO: 5728774 - DNA, 25 bp, Homo sapien
gctcaacaccagtgctaggccacga

SEQ ID NO: 5728775 - DNA, 25 bp, Homo sapien
gggagggtgtcctgggaacaggtag

SEQ ID NO: 5728776 - DNA, 25 bp, Homo sapien
gagctgaaaaacctcttggagctgg

SEQ ID NO: 5728777 - DNA, 25 bp, Homo sapien
atgggcacaggaaacaagtctggga

SEQ ID NO: 5728778 - DNA, 25 bp, Homo sapien
tggaactgaacacaaatatggggaa

SEQ ID NO: 5728779 - DNA, 25 bp, Homo sapien
tggatcatgaggtcaggagatcaag

SEQ ID NO: 5728780 - DNA, 25 bp, Homo sapien
gctggagcagtttcccatccacacc

SEQ ID NO: 5728781 - DNA, 25 bp, Homo sapien
attacatctttgagcatttacatga

SEQ ID NO: 5728782 - DNA, 25 bp, Homo sapien
ccaaccaaggctggctctacaggca

SEQ ID NO: 5728783 - DNA, 25 bp, Homo sapien
tccatcttgttggtcaaccccacga

SEQ ID NO: 5728784 - DNA, 25 bp, Homo sapien
ccagtggcttccacttggcgtggat

SEQ ID NO: 5728785 - DNA, 25 bp, Homo sapien
aaaggctctatcacacctcctgtgg

SEQ ID NO: 5728786 - DNA, 25 bp, Homo sapien
tgaacacaaatatggggaatttata

SEQ ID NO: 5728787 - DNA, 25 bp, Homo sapien
cctgaagatcaaaggctctatcaca

SEQ ID NO: 5728788 - DNA, 25 bp, Homo sapien
tctctgatgctccccacgaggctca

SEQ ID NO: 5728789 - DNA, 25 bp, Homo sapien
cgtgactcggtgtgcaggtaactgt

SEQ ID NO: 5728790 - DNA, 25 bp, Homo sapien
aaggagctggcctggagtcccacac

SEQ ID NO: 5728791 - DNA, 25 bp, Homo sapien
ctagggagtgttccacagtatctgt

SEQ ID NO: 5728792 - DNA, 25 bp, Homo sapien
aagcttggggacccctcttaggcag

SEQ ID NO: 5728793 - DNA, 25 bp, Homo sapien
tgtaccaggaacctcgtttggtgtt

SEQ ID NO: 5728794 - DNA, 25 bp, Homo sapien
tcttgttggtcaaccccacgatcag

SEQ ID NO: 5728795 - DNA, 25 bp, Homo sapien
gaatagtaagggagagagatggacg

SEQ ID NO: 5728796 - DNA, 25 bp, Homo sapien
gtgtcctgggaacaggtagaggtgg

SEQ ID NO: 5728797 - DNA, 25 bp, Homo sapien
tgtctgagcgcgtgggcagtctcat

SEQ ID NO: 5728798 - DNA, 25 bp, Homo sapien
ttctcttgcatttcctgtgcagtct

SEQ ID NO: 5728799 - DNA, 25 bp, Homo sapien
aacacaccattcttcctggccttct

SEQ ID NO: 5728800 - DNA, 25 bp, Homo sapien
tctgagcgcgtgggcagtctcatct

SEQ ID NO: 5728801 - DNA, 25 bp, Homo sapien
agactgcaacctatatgccagctgg

SEQ ID NO: 5728802 - DNA, 25 bp, Homo sapien
tgaggagttccacattctggctgaa

SEQ ID NO: 5728803 - DNA, 25 bp, Homo sapien
tactgaaagagaaagcaggaacaaa

SEQ ID NO: 5728804 - DNA, 25 bp, Homo sapien
ggttgattgaatgaaagtgggaata

SEQ ID NO: 5728805 - DNA, 25 bp, Homo sapien
gtcccacactcaaaggcagagatga

SEQ ID NO: 5728806 - DNA, 25 bp, Homo sapien
tgcaacctatatgccagctggaagt

SEQ ID NO: 5728807 - DNA, 25 bp, Homo sapien
tgcaggtaactgtgcaaaattctgc

SEQ ID NO: 5728808 - DNA, 25 bp, Homo sapien
ggcggcagtccctttgaggcaggca

SEQ ID NO: 5728809 - DNA, 25 bp, Homo sapien
tgatcctgtaaagcaggattctaga

SEQ ID NO: 5728810 - DNA, 25 bp, Homo sapien
gcgagaggagtgccacgatgcagga

SEQ ID NO: 5728811 - DNA, 25 bp, Homo sapien
gaaaagggagactcaagtcgtagtc

SEQ ID NO: 5728812 - DNA, 25 bp, Homo sapien
ggtggcgctgcagtactgaagggaa

SEQ ID NO: 5728813 - DNA, 25 bp, Homo sapien
agcatttacatgatcctgtaaagca

SEQ ID NO: 5728814 - DNA, 25 bp, Homo sapien
aaggtcttgcccgggcgcagtggct

SEQ ID NO: 5728815 - DNA, 25 bp, Homo sapien
aagggcggaggatatgaatgaaata

SEQ ID NO: 5728816 - DNA, 25 bp, Homo sapien
ggaagtttcagataagcagggataa

SEQ ID NO: 5728817 - DNA, 25 bp, Homo sapien
gggtgtcctgggaacaggtagaggt

SEQ ID NO: 5728818 - DNA, 25 bp, Homo sapien
tcacacctcctgtggtccagtggct

SEQ ID NO: 5728819 - DNA, 25 bp, Homo sapien
tcaataaggtacaaatgcaaggcaa

SEQ ID NO: 5728820 - DNA, 25 bp, Homo sapien
aaggaaaaagacagagaggtggtta

SEQ ID NO: 5728821 - DNA, 25 bp, Homo sapien
catcccctccagagcgaaattccag

SEQ ID NO: 5728822 - DNA, 25 bp, Homo sapien
cttgcatttcctgtgcagtctggtc

SEQ ID NO: 5728823 - DNA, 25 bp, Homo sapien
acaaatgcaaggcaatgttggctga

SEQ ID NO: 5728824 - DNA, 25 bp, Homo sapien
tgtgcaggtaactgtgcaaaattct

SEQ ID NO: 5728825 - DNA, 25 bp, Homo sapien
ccagagcgaaattccagttctttct

SEQ ID NO: 5728826 - DNA, 25 bp, Homo sapien
tgtttgataaaattcaggagtgcaa

SEQ ID NO: 5728827 - DNA, 25 bp, Homo sapien
caaatatggggaatttatatgccct

SEQ ID NO: 5728828 - DNA, 25 bp, Homo sapien
gtttggtgttccgcatggcggcagt

SEQ ID NO: 5728829 - DNA, 25 bp, Homo sapien
ggcttcacagaaaaggagctggcct

SEQ ID NO: 5728830 - DNA, 25 bp, Homo sapien
tcatgtttgcttcttcagagccaaa

SEQ ID NO: 5728831 - DNA, 25 bp, Homo sapien
ggcactgaaataaaagccacataat

SEQ ID NO: 5728832 - DNA, 25 bp, Homo sapien
agttggcgttgtcaaagagctgaaa

SEQ ID NO: 5728833 - DNA, 25 bp, Homo sapien
tgcagtactgaagggaacgcacagg

SEQ ID NO: 5728834 - DNA, 25 bp, Homo sapien
cacattgctcaacaccagtgctagg

SEQ ID NO: 5728835 - DNA, 25 bp, Homo sapien
gcccactttggcctggatgagctcc

SEQ ID NO: 5728836 - DNA, 25 bp, Homo sapien
aactctcactctaggacaaaaaggg

SEQ ID NO: 5728837 - DNA, 25 bp, Homo sapien
ttcttttttagagtttcctgatgat

SEQ ID NO: 5728838 - DNA, 25 bp, Homo sapien
ggaagcttttctagaaatctagata

SEQ ID NO: 5728839 - DNA, 25 bp, Homo sapien
gccacgtgcatatcacaagcccgct

SEQ ID NO: 5728840 - DNA, 25 bp, Homo sapien
caaaggcagagatgatgggcacagg

SEQ ID NO: 5728841 - DNA, 25 bp, Homo sapien
gggcagaacagaaaccgtgcatcct

SEQ ID NO: 5728842 - DNA, 25 bp, Homo sapien
gctaacatggtgaaaccctgtctct

SEQ ID NO: 5728843 - DNA, 25 bp, Homo sapien
aacactttgggaggctgaggtgggt

SEQ ID NO: 5728844 - DNA, 25 bp, Homo sapien
aggtggccttgcttggtctccctca

SEQ ID NO: 5728845 - DNA, 25 bp, Homo sapien
tgaagcagggagataagctaggaag

SEQ ID NO: 5728846 - DNA, 25 bp, Homo sapien
ccatcccggctaacatggtgaaacc

SEQ ID NO: 5728847 - DNA, 25 bp, Homo sapien
ggagatggtctctcagacatcttaa

SEQ ID NO: 5728848 - DNA, 25 bp, Homo sapien
tctttattgtctagggagtgttcca

SEQ ID NO: 5728849 - DNA, 25 bp, Homo sapien
gaggcaggagaatggcgtgaacccg

SEQ ID NO: 5728850 - DNA, 25 bp, Homo sapien
aggccgcttctggacactgcagcaa

SEQ ID NO: 5728851 - DNA, 25 bp, Homo sapien
cctggagtcccacactcaaaggcag

SEQ ID NO: 5728852 - DNA, 25 bp, Homo sapien
gaagtgtgtttgataaaattcagga

SEQ ID NO: 5728853 - DNA, 25 bp, Homo sapien
cctgtaaagcaggattctagacaga

SEQ ID NO: 5728854 - DNA, 25 bp, Homo sapien
cttccaaactctcactctaggacaa

SEQ ID NO: 5728855 - DNA, 25 bp, Homo sapien
ctgtggtccacatcccctccagagc

SEQ ID NO: 5728856 - DNA, 25 bp, Homo sapien
agtggctcacgcctgtaatcccaac

SEQ ID NO: 5728857 - DNA, 25 bp, Homo sapien
accttaaccagcatgtcggccacgt

SEQ ID NO: 5728858 - DNA, 25 bp, Homo sapien
acggtggcgggcacctgtagtccca

SEQ ID NO: 5728859 - DNA, 25 bp, Homo sapien
gatgtccttctccagaagatgttct

SEQ ID NO: 5728860 - DNA, 25 bp, Homo sapien
attcagacatctccttgcaccggtg

SEQ ID NO: 5728861 - DNA, 25 bp, Homo sapien
tctctcagacatcttaactaatgta

SEQ ID NO: 5728862 - DNA, 25 bp, Homo sapien
tctccagtgaagtgcacattgctca

SEQ ID NO: 5728863 - DNA, 25 bp, Homo sapien
tatcacacctcctgtggtccagtgg

SEQ ID NO: 5728864 - DNA, 25 bp, Homo sapien
ttgcccgggcgcagtggctcacgcc

SEQ ID NO: 5728865 - DNA, 25 bp, Homo sapien
aagaccatcccggctaacatggtga

SEQ ID NO: 5728866 - DNA, 25 bp, Homo sapien
agagtctagggaaacacaccattct

SEQ ID NO: 5728867 - DNA, 25 bp, Homo sapien
aagataggagatggtctctcagaca

SEQ ID NO: 5728868 - DNA, 25 bp, Homo sapien
gccctccagcctgggcgacagagcg

SEQ ID NO: 5728869 - DNA, 25 bp, Homo sapien
gcccgggcgcagtggctcacgcctg

SEQ ID NO: 5728870 - DNA, 25 bp, Homo sapien
cggtgccttgagcccaaacgagcca

SEQ ID NO: 5728871 - DNA, 25 bp, Homo sapien
tcagtgcttcacagaaggcatcaaa

SEQ ID NO: 5728872 - DNA, 25 bp, Homo sapien
caaactctcactctaggacaaaaag

SEQ ID NO: 5728873 - DNA, 25 bp, Homo sapien
ataaccacactgtgtttacaacttc

SEQ ID NO: 5728874 - DNA, 25 bp, Homo sapien
gagtgtccttccactgggtggcgct

SEQ ID NO: 5728875 - DNA, 25 bp, Homo sapien
gtccaaccaaggctggctctacagg

SEQ ID NO: 5728876 - DNA, 25 bp, Homo sapien
gtcccctgtcagcggccatcagctc

SEQ ID NO: 5728877 - DNA, 25 bp, Homo sapien
ggctctacaggcaaagggcttcaca

SEQ ID NO: 5728878 - DNA, 25 bp, Homo sapien
tctgatgctccccacgaggctcatt

SEQ ID NO: 5728879 - DNA, 25 bp, Homo sapien
tgaaacattcctggcaataggtcca

SEQ ID NO: 5728880 - DNA, 25 bp, Homo sapien
gcttggtctccctcagtgcttcaca

SEQ ID NO: 5728881 - DNA, 25 bp, Homo sapien
ggagagagatggacgtttctcagga

SEQ ID NO: 5728882 - DNA, 25 bp, Homo sapien
aattctgtgccaggagcataacctt

SEQ ID NO: 5728883 - DNA, 25 bp, Homo sapien
actttggcctggatgagctccctca

SEQ ID NO: 5728884 - DNA, 25 bp, Homo sapien
cctgtcagcggccatcagctccttg

SEQ ID NO: 5728885 - DNA, 25 bp, Homo sapien
tgcaaggcttcacctgaaggcagag

SEQ ID NO: 5728886 - DNA, 25 bp, Homo sapien
aagtttcagataagcagggataaag

SEQ ID NO: 5728887 - DNA, 25 bp, Homo sapien
ccctcttaggcagcaagttgaggag

SEQ ID NO: 5728888 - DNA, 25 bp, Homo sapien
aggtgcgtctctagtcatgtttgct

SEQ ID NO: 5728889 - DNA, 25 bp, Homo sapien
actcggtgtgcaggtaactgtgcaa

SEQ ID NO: 5728890 - DNA, 25 bp, Homo sapien
ttctggctgaaactgcccactttgg

SEQ ID NO: 5728891 - DNA, 25 bp, Homo sapien
ccaaaagcttgaagagggtgactag

SEQ ID NO: 5728892 - DNA, 25 bp, Homo sapien
ccattcttcctggccttctctgatg

SEQ ID NO: 5728893 - DNA, 25 bp, Homo sapien
cctccacaccatgcgagaggagtgc

SEQ ID NO: 5728894 - DNA, 25 bp, Homo sapien
aagcttttctagaaatctagatatg

SEQ ID NO: 5728895 - DNA, 25 bp, Homo sapien
ggacaccttccaaactctcactcta

SEQ ID NO: 5728896 - DNA, 25 bp, Homo sapien
tgtttggctagcaccactcggttct

SEQ ID NO: 5728897 - DNA, 25 bp, Homo sapien
ggagattcccacatccctgaggggg

SEQ ID NO: 5728898 - DNA, 25 bp, Homo sapien
tccatgggcaaagatcaataaggta

SEQ ID NO: 5728899 - DNA, 25 bp, Homo sapien
gacaaaaagggcggaggatatgaat

SEQ ID NO: 5728900 - DNA, 25 bp, Homo sapien
acaaaagctggaactgaacacaaat

SEQ ID NO: 5728901 - DNA, 25 bp, Homo sapien
ttctttaccggcatcactctcctcg

SEQ ID NO: 5728902 - DNA, 25 bp, Homo sapien
ttggggacccctcttaggcagcaag

SEQ ID NO: 5728903 - DNA, 25 bp, Homo sapien
tgaaaccctgtctctactaaaaata

SEQ ID NO: 5728904 - DNA, 25 bp, Homo sapien
acaccatagatggcgccctccacac

SEQ ID NO: 5728905 - DNA, 25 bp, Homo sapien
caggcctggatgaagaacatttttg

SEQ ID NO: 5728906 - DNA, 25 bp, Homo sapien
atgagctccctcatttccaaggtga

SEQ ID NO: 5728907 - DNA, 25 bp, Homo sapien
gcgttcaccttaaccagcatgtcgg

SEQ ID NO: 5728908 - DNA, 25 bp, Homo sapien
cgcgctcggcgccgccatttcccgc

SEQ ID NO: 5728909 - DNA, 25 bp, Homo sapien
acaataacatgtatggcactgaaat

SEQ ID NO: 5728910 - DNA, 25 bp, Homo sapien
atggacgtttctcaggaaggaaaaa

SEQ ID NO: 5728911 - DNA, 25 bp, Homo sapien
gcaaggcaatgttggctgacaggct

SEQ ID NO: 5728912 - DNA, 25 bp, Homo sapien
cgtgggcagtctcatcttcggcaac

SEQ ID NO: 5728913 - DNA, 25 bp, Homo sapien
tgaaataaaagataggagatggtct

SEQ ID NO: 5728914 - DNA, 25 bp, Homo sapien
gtggttacagagtctagggaaacac

SEQ ID NO: 5728915 - DNA, 25 bp, Homo sapien
atcatgtctgagcgcgtgggcagtc

SEQ ID NO: 5728916 - DNA, 25 bp, Homo sapien
tacatctttgagcatttacatgatc

SEQ ID NO: 5728917 - DNA, 25 bp, Homo sapien
tgtgtttgataaaattcaggagtgc

SEQ ID NO: 5728918 - DNA, 25 bp, Homo sapien
acgtcatagcccaaaagcttgaaga

SEQ ID NO: 5728919 - DNA, 25 bp, Homo sapien
tgttccgcatggcggcagtcccttt

SEQ ID NO: 5728920 - DNA, 25 bp, Homo sapien
gcttgcagtgagctgagatcgtgcc

SEQ ID NO: 5728921 - DNA, 25 bp, Homo sapien
ccacggcaggcctggatgaagaaca

SEQ ID NO: 5728922 - DNA, 25 bp, Homo sapien
tgggaagtttcagataagcagggat

SEQ ID NO: 5728923 - DNA, 25 bp, Homo sapien
tgttctgtaggcttgggcagttggc

SEQ ID NO: 5728924 - DNA, 25 bp, Homo sapien
tcaggagatcaagaccatcccggct

SEQ ID NO: 5728925 - DNA, 25 bp, Homo sapien
ggccttgcttggtctccctcagtgc

SEQ ID NO: 5728926 - DNA, 25 bp, Homo sapien
aggctctatcacacctcctgtggtc

SEQ ID NO: 5728927 - DNA, 25 bp, Homo sapien
ctccacggcaggcctggatgaagaa

SEQ ID NO: 5728928 - DNA, 25 bp, Homo sapien
tctaataattcgctcaacaacagct

SEQ ID NO: 5728929 - DNA, 25 bp, Homo sapien
taaagcaggattctagacagatttg

SEQ ID NO: 5728930 - DNA, 25 bp, Homo sapien
gggaggctgaggtgggtggatcatg

SEQ ID NO: 5728931 - DNA, 25 bp, Homo sapien
aaatgaaggtaaagaagggagagat

SEQ ID NO: 5728932 - DNA, 25 bp, Homo sapien
aggactcacacaccggaaaagggag

SEQ ID NO: 5728933 - DNA, 25 bp, Homo sapien
taaaaaaaggtcttgcccgggcgca

SEQ ID NO: 5728934 - DNA, 25 bp, Homo sapien
tccctcagtgcttcacagaaggcat

SEQ ID NO: 5728935 - DNA, 25 bp, Homo sapien
cagtactgaagggaacgcacaggcc

SEQ ID NO: 5728936 - DNA, 25 bp, Homo sapien
ccttgtgctggaaggtggaccaaga

SEQ ID NO: 5728937 - DNA, 25 bp, Homo sapien
gcttgaagagggtgactagagtact

SEQ ID NO: 5728938 - DNA, 25 bp, Homo sapien
gccatcagctccttgtgctggaagg

SEQ ID NO: 5728939 - DNA, 25 bp, Homo sapien
ttggtggcagcagccaacaggatga

SEQ ID NO: 5728940 - DNA, 25 bp, Homo sapien
ccacagtatctgtcgacaggcggag

SEQ ID NO: 5728941 - DNA, 25 bp, Homo sapien
gctgcagtattcagacatctccttg

SEQ ID NO: 5728942 - DNA, 25 bp, Homo sapien
agctgagatcgtgccactgccctcc

SEQ ID NO: 5728943 - DNA, 25 bp, Homo sapien
tcatgaggtcaggagatcaagacca

SEQ ID NO: 5728944 - DNA, 25 bp, Homo sapien
tttacatgatcctgtaaagcaggat

SEQ ID NO: 5728945 - DNA, 25 bp, Homo sapien
ggcagagaggaccatctttattgtc

SEQ ID NO: 5728946 - DNA, 25 bp, Homo sapien
agatctttgagacttccatgggcaa

SEQ ID NO: 5728947 - DNA, 25 bp, Homo sapien
accttcccgatccttgataagtgcg

SEQ ID NO: 5728948 - DNA, 25 bp, Homo sapien
cagagatgatgggcacaggaaacaa

SEQ ID NO: 5728949 - DNA, 25 bp, Homo sapien
atgcaaggcaatgttggctgacagg

SEQ ID NO: 5728950 - DNA, 25 bp, Homo sapien
ctcttggagctggagcagtttccca

SEQ ID NO: 5728951 - DNA, 25 bp, Homo sapien
aaagcaatcactaaagtgccatcta

SEQ ID NO: 5728952 - DNA, 25 bp, Homo sapien
acactcccaatatcctgcgtcccct

SEQ ID NO: 5728953 - DNA, 25 bp, Homo sapien
cagggataaaggtttctaggttgaa

SEQ ID NO: 5728954 - DNA, 25 bp, Homo sapien
ggtttctaggttgaaaacaataaca

SEQ ID NO: 5728955 - DNA, 25 bp, Homo sapien
tgcaggttgattgaatgaaagtggg

SEQ ID NO: 5728956 - DNA, 25 bp, Homo sapien
tcaccttaaccagcatgtcggccac

SEQ ID NO: 5728957 - DNA, 25 bp, Homo sapien
cttaggcagcaagttgaggagttcc

SEQ ID NO: 5728958 - DNA, 25 bp, Homo sapien
cagccaacaggatgaaatgaaggta

SEQ ID NO: 5728959 - DNA, 25 bp, Homo sapien
gacttccatgggcaaagatcaataa

SEQ ID NO: 5728960 - DNA, 25 bp, Homo sapien
ctggctgaaactgcccactttggcc

SEQ ID NO: 5728961 - DNA, 25 bp, Homo sapien
aaaccctgtctctactaaaaataca

SEQ ID NO: 5728962 - DNA, 25 bp, Homo sapien
ctttgggaggctgaggtgggtggat

SEQ ID NO: 5728963 - DNA, 25 bp, Homo sapien
tccagttctttctctccagtgaagt

SEQ ID NO: 5728964 - DNA, 25 bp, Homo sapien
caggagaatggcgtgaacccgggag

SEQ ID NO: 5728965 - DNA, 25 bp, Homo sapien
aggaaacaagtctgggagattccca

SEQ ID NO: 5728966 - DNA, 25 bp, Homo sapien
gggaatagtaagggagagagatgga

SEQ ID NO: 5728967 - DNA, 25 bp, Homo sapien
gcgccctccacaccatgcgagagga

SEQ ID NO: 5728968 - DNA, 25 bp, Homo sapien
ttcgctcaacaacagctgtttggct

SEQ ID NO: 5728969 - DNA, 25 bp, Homo sapien
cgaggccgagactgcaacctatatg

SEQ ID NO: 5728970 - DNA, 25 bp, Homo sapien
cgctcaacaacagctgtttggctag

SEQ ID NO: 5728971 - DNA, 25 bp, Homo sapien
ggtgaaaccctgtctctactaaaaa

SEQ ID NO: 5728972 - DNA, 25 bp, Homo sapien
tcagagaaacaaccaacgaaagatc

SEQ ID NO: 5728973 - DNA, 25 bp, Homo sapien
tattgtctagggagtgttccacagt

SEQ ID NO: 5728974 - DNA, 25 bp, Homo sapien
aagcccagaaagggtggtgagcaac

SEQ ID NO: 5728975 - DNA, 25 bp, Homo sapien
aaccacactgtgtttacaacttcac

SEQ ID NO: 5728976 - DNA, 25 bp, Homo sapien
ccgtgcatcctgaagatcaaaggct

SEQ ID NO: 5728977 - DNA, 25 bp, Homo sapien
tggtgagcaacatatcctccaggtg

SEQ ID NO: 5728978 - DNA, 25 bp, Homo sapien
gagatgatgggcacaggaaacaagt

SEQ ID NO: 5728979 - DNA, 25 bp, Homo sapien
aaacaataacatgtatggcactgaa

SEQ ID NO: 5728980 - DNA, 25 bp, Homo sapien
gctgtttggctagcaccactcggtt

SEQ ID NO: 5728981 - DNA, 25 bp, Homo sapien
gcaccactcggttcttttttagagt

SEQ ID NO: 5728982 - DNA, 25 bp, Homo sapien
aaaaagacagagaggtggttacaga

SEQ ID NO: 5728983 - DNA, 25 bp, Homo sapien
tgtttacaacttcacttgtcaggct

SEQ ID NO: 5728984 - DNA, 25 bp, Homo sapien
cggctaacatggtgaaaccctgtct

SEQ ID NO: 5728985 - DNA, 25 bp, Homo sapien
gagtacatgctgaagcccagaaagg

SEQ ID NO: 5728986 - DNA, 25 bp, Homo sapien
gtgcgttcaccttaaccagcatgtc

SEQ ID NO: 5728987 - DNA, 25 bp, Homo sapien
gcacaggccgcttctggacactgca

SEQ ID NO: 5728988 - DNA, 25 bp, Homo sapien
gcaggcatagccgcatatcatgtct

SEQ ID NO: 5728989 - DNA, 25 bp, Homo sapien
ttgattgaatgaaagtgggaatagt

SEQ ID NO: 5728990 - DNA, 25 bp, Homo sapien
acgcacaggccgcttctggacactg

SEQ ID NO: 5728991 - DNA, 25 bp, Homo sapien
aatgaaataaaagataggagatggt

SEQ ID NO: 5728992 - DNA, 25 bp, Homo sapien
tccagtgaagtgcacattgctcaac

SEQ ID NO: 5728993 - DNA, 25 bp, Homo sapien
caaggtgcgtctctagtcatgtttg

SEQ ID NO: 5728994 - DNA, 25 bp, Homo sapien
ggcatcaaaagcttggggacccctc

SEQ ID NO: 5728995 - DNA, 25 bp, Homo sapien
gggaaacacaccattcttcctggcc

SEQ ID NO: 5728996 - DNA, 25 bp, Homo sapien
gccttctctgatgctccccacgagg

SEQ ID NO: 5728997 - DNA, 25 bp, Homo sapien
aactacattacatctttgagcattt

SEQ ID NO: 5728998 - DNA, 25 bp, Homo sapien
tgatgctccccacgaggctcatttc

SEQ ID NO: 5728999 - DNA, 25 bp, Homo sapien
tgacaggctgcggtgccttgagccc

SEQ ID NO: 5729000 - DNA, 25 bp, Homo sapien
gagcaacatatcctccaggtggcct

SEQ ID NO: 5729001 - DNA, 25 bp, Homo sapien
agagccaaaagataatgtctacatt

SEQ ID NO: 5729002 - DNA, 25 bp, Homo sapien
gatgatggggaggtgacatcatgtg

SEQ ID NO: 5729003 - DNA, 25 bp, Homo sapien
taggagatggtctctcagacatctt

SEQ ID NO: 5729004 - DNA, 25 bp, Homo sapien
ttcttgtaaaggggacaggactcac

SEQ ID NO: 5729005 - DNA, 25 bp, Homo sapien
aggtggaccaagaccccgcgctcgg

SEQ ID NO: 5729006 - DNA, 25 bp, Homo sapien
aagcaggaacaaagaactacattac

SEQ ID NO: 5729007 - DNA, 25 bp, Homo sapien
atgtatggcactgaaataaaagcca

SEQ ID NO: 5729008 - DNA, 25 bp, Homo sapien
gaaagcaggaacaaagaactacatt

SEQ ID NO: 5729009 - DNA, 25 bp, Homo sapien
ttctttccatcttgttggtcaaccc

SEQ ID NO: 5729010 - DNA, 25 bp, Homo sapien
tgcagtattcagacatctccttgca

SEQ ID NO: 5729011 - DNA, 25 bp, Homo sapien
acgatcagtctcatctccacggcag

SEQ ID NO: 5729012 - DNA, 25 bp, Homo sapien
gcagcaaggtgcgtctctagtcatg

SEQ ID NO: 5729013 - DNA, 25 bp, Homo sapien
ggcagcaagttgaggagttccacat

SEQ ID NO: 5729014 - DNA, 25 bp, Homo sapien
cttaaccagcatgtcggccacgtgc

SEQ ID NO: 5729015 - DNA, 25 bp, Homo sapien
gtactgaagggaacgcacaggccgc

SEQ ID NO: 5729016 - DNA, 25 bp, Homo sapien
tgtcagcggccatcagctccttgtg

SEQ ID NO: 5729017 - DNA, 25 bp, Homo sapien
tgaaggcagagaggaccatctttat

SEQ ID NO: 5729018 - DNA, 25 bp, Homo sapien
cacagctcaacggtgggagtacatg

SEQ ID NO: 5729019 - DNA, 25 bp, Homo sapien
ggctgaaactgcccactttggcctg

SEQ ID NO: 5729020 - DNA, 25 bp, Homo sapien
aattcgctcaacaacagctgtttgg

SEQ ID NO: 5729021 - DNA, 25 bp, Homo sapien
ctgccctccagcctgggcgacagag

SEQ ID NO: 5729022 - DNA, 25 bp, Homo sapien
tgatggggaggtgacatcatgtggg

SEQ ID NO: 5729023 - DNA, 25 bp, Homo sapien
gaaagagaaagcaggaacaaagaac

SEQ ID NO: 5729024 - DNA, 25 bp, Homo sapien
gatatgaatgaaataaaagatagga

SEQ ID NO: 5729025 - DNA, 25 bp, Homo sapien
aagtcgtagtcacagctcaacggtg

SEQ ID NO: 5729026 - DNA, 25 bp, Homo sapien
tgctaggccacgaggccgagactgc

SEQ ID NO: 5729027 - DNA, 25 bp, Homo sapien
gtttcctgatgatgaggatgcatgc

SEQ ID NO: 5729028 - DNA, 25 bp, Homo sapien
aaaagctggaactgaacacaaatat

SEQ ID NO: 5729029 - DNA, 25 bp, Homo sapien
cttcggcaacttttctttaccggca

SEQ ID NO: 5729030 - DNA, 25 bp, Homo sapien
caccattcttcctggccttctctga

SEQ ID NO: 5729031 - DNA, 25 bp, Homo sapien
aatactgaaagagaaagcaggaaca

SEQ ID NO: 5729032 - DNA, 25 bp, Homo sapien
ggagtccgtgactcggtgtgcaggt

SEQ ID NO: 5729033 - DNA, 25 bp, Homo sapien
gtcctgggaacaggtagaggtggcg

SEQ ID NO: 5729034 - DNA, 25 bp, Homo sapien
gagtttaatactgaaagagaaagca

SEQ ID NO: 5729035 - DNA, 25 bp, Homo sapien
gcaacatatcctccaggtggccttg

SEQ ID NO: 5729036 - DNA, 25 bp, Homo sapien
ctctcctcgcacccaggggatcctg

SEQ ID NO: 5729037 - DNA, 25 bp, Homo sapien
agaacagaaaccgtgcatcctgaag

SEQ ID NO: 5729038 - DNA, 25 bp, Homo sapien
aaaagcttgaagagggtgactagag

SEQ ID NO: 5729039 - DNA, 25 bp, Homo sapien
aacaccagtgctaggccacgaggcc

SEQ ID NO: 5729040 - DNA, 25 bp, Homo sapien
aaagtgccatctacaaaagctggaa

SEQ ID NO: 5729041 - DNA, 25 bp, Homo sapien
cctggatgaagaacatttttggttt

SEQ ID NO: 5729042 - DNA, 25 bp, Homo sapien
agtctagggaaacacaccattcttc

SEQ ID NO: 5729043 - DNA, 25 bp, Homo sapien
aaaaggagctggcctggagtcccac

SEQ ID NO: 5729044 - DNA, 25 bp, Homo sapien
gtaacaaagctcagagaaacaacca

SEQ ID NO: 5729045 - DNA, 25 bp, Homo sapien
ctggatgagctccctcatttccaag

SEQ ID NO: 5729046 - DNA, 25 bp, Homo sapien
tccacattctggctgaaactgccca

SEQ ID NO: 5729047 - DNA, 25 bp, Homo sapien
aggagttccacattctggctgaaac

SEQ ID NO: 5729048 - DNA, 25 bp, Homo sapien
aaagccacataatatcaaaggagag

SEQ ID NO: 5729049 - DNA, 25 bp, Homo sapien
gctgacaggctgcggtgccttgagc

SEQ ID NO: 5729050 - DNA, 25 bp, Homo sapien
catgtctgagcgcgtgggcagtctc

SEQ ID NO: 5729051 - DNA, 25 bp, Homo sapien
gagcgagactctgtctcaaaaaaaa

SEQ ID NO: 5729052 - DNA, 25 bp, Homo sapien
ttgctcaacaccagtgctaggccac

SEQ ID NO: 5729053 - DNA, 25 bp, Homo sapien
cggcagtccctttgaggcaggcata

SEQ ID NO: 5729054 - DNA, 25 bp, Homo sapien
agatatgaagtgcaggttgattgaa

SEQ ID NO: 5729055 - DNA, 25 bp, Homo sapien
caggtaactgtgcaaaattctgcag

SEQ ID NO: 5729056 - DNA, 25 bp, Homo sapien
tgaggcaggcatagccgcatatcat

SEQ ID NO: 5729057 - DNA, 25 bp, Homo sapien
caaagctcagagaaacaaccaacga

SEQ ID NO: 5729058 - DNA, 25 bp, Homo sapien
aaccgtgcatcctgaagatcaaagg

SEQ ID NO: 5729059 - DNA, 25 bp, Homo sapien
cagctcaacggtgggagtacatgct

SEQ ID NO: 5729060 - DNA, 25 bp, Homo sapien
gttggctgacaggctgcggtgcctt

SEQ ID NO: 5729061 - DNA, 25 bp, Homo sapien
tttctctccagtgaagtgcacattg

SEQ ID NO: 5729062 - DNA, 25 bp, Homo sapien
tagcccaaaagcttgaagagggtga

SEQ ID NO: 5729063 - DNA, 25 bp, Homo sapien
ttgcttcttcagagccaaaagataa

SEQ ID NO: 5729064 - DNA, 25 bp, Homo sapien
ccacactgtgtttacaacttcactt

SEQ ID NO: 5729065 - DNA, 25 bp, Homo sapien
ctcatcttcggcaacttttctttac

SEQ ID NO: 5729066 - DNA, 25 bp, Homo sapien
tggacactgcagcaaggtgcgtctc

SEQ ID NO: 5729067 - DNA, 25 bp, Homo sapien
ggtagaggtggcggcacagagtgct

SEQ ID NO: 5729068 - DNA, 25 bp, Homo sapien
gcaggattctagacagatttggtgg

SEQ ID NO: 5729069 - DNA, 25 bp, Homo sapien
aacctcgtttggtgttccgcatggc

SEQ ID NO: 5729070 - DNA, 25 bp, Homo sapien
ttgcttggtctccctcagtgcttca

SEQ ID NO: 5729071 - DNA, 25 bp, Homo sapien
gattctagacagatttggtggcagc

SEQ ID NO: 5729072 - DNA, 25 bp, Homo sapien
tcagacatcttaactaatgtaataa

SEQ ID NO: 5729073 - DNA, 25 bp, Homo sapien
tcaaaggctctatcacacctcctgt

SEQ ID NO: 5729074 - DNA, 25 bp, Homo sapien
aacagaaaccgtgcatcctgaagat

SEQ ID NO: 5729075 - DNA, 25 bp, Homo sapien
tcagacatctccttgcaccggtgga

SEQ ID NO: 5729076 - DNA, 25 bp, Homo sapien
agacagagaggtggttacagagtct

SEQ ID NO: 5729077 - DNA, 25 bp, Homo sapien
gagtactgtggtccacatcccctcc

SEQ ID NO: 5729078 - DNA, 25 bp, Homo sapien
atcctgtaaagcaggattctagaca

SEQ ID NO: 5729079 - DNA, 25 bp, Homo sapien
ctcaggaaggaaaaagacagagagg

SEQ ID NO: 5729080 - DNA, 25 bp, Homo sapien
attcttcctggccttctctgatgct

SEQ ID NO: 5729081 - DNA, 25 bp, Homo sapien
tccagaagatgttctaataattcgc

SEQ ID NO: 5729082 - DNA, 25 bp, Homo sapien
caacttcacttgtcaggctcttcaa

SEQ ID NO: 5729083 - DNA, 25 bp, Homo sapien
agatggacgtttctcaggaaggaaa

SEQ ID NO: 5729084 - DNA, 25 bp, Homo sapien
gcatcactctcctcgcacccagggg

SEQ ID NO: 5729085 - DNA, 25 bp, Homo sapien
agaagggagagatatgaagcaggga

SEQ ID NO: 5729086 - DNA, 25 bp, Homo sapien
gggggcagaacagaaaccgtgcatc

SEQ ID NO: 5729087 - DNA, 25 bp, Homo sapien
tttagagtttcctgatgatgaggat

SEQ ID NO: 5729088 - DNA, 25 bp, Homo sapien
actgggtggcgctgcagtactgaag

SEQ ID NO: 5729089 - DNA, 25 bp, Homo sapien
gcttccacttggcgtggatgatggg

SEQ ID NO: 5729090 - DNA, 25 bp, Homo sapien
agggcttcacagaaaaggagctggc

SEQ ID NO: 5729091 - DNA, 25 bp, Homo sapien
aaagatctttgagacttccatgggc

SEQ ID NO: 5729092 - DNA, 25 bp, Homo sapien
gtgacatcatgtgggagggtgtcct

SEQ ID NO: 5729093 - DNA, 25 bp, Homo sapien
gcaccggtggaattctgtgccagga

SEQ ID NO: 5729094 - DNA, 25 bp, Homo sapien
ttccgcatggcggcagtccctttga

SEQ ID NO: 5729095 - DNA, 25 bp, Homo sapien
ctccttgcaccggtggaattctgtg

SEQ ID NO: 5729096 - DNA, 25 bp, Homo sapien
tgagcccaaacgagccaagagtgtc

SEQ ID NO: 5729097 - DNA, 25 bp, Homo sapien
atatcatgtctgagcgcgtgggcag

SEQ ID NO: 5729098 - DNA, 25 bp, Homo sapien
gtcgtagtcacagctcaacggtggg

SEQ ID NO: 5729099 - DNA, 25 bp, Homo sapien
ctgaaagagaaagcaggaacaaaga

SEQ ID NO: 5729100 - DNA, 25 bp, Homo sapien
tggagcagtttcccatccacaccat

SEQ ID NO: 5729101 - DNA, 25 bp, Homo sapien
gtcacagctcaacggtgggagtaca

SEQ ID NO: 5729102 - DNA, 25 bp, Homo sapien
cactttgggaggctgaggtgggtgg

SEQ ID NO: 5729103 - DNA, 25 bp, Homo sapien
aagcttgaagagggtgactagagta

SEQ ID NO: 5729104 - DNA, 25 bp, Homo sapien
agcataaccttcccgatccttgata

SEQ ID NO: 5729105 - DNA, 25 bp, Homo sapien
tgggtggatcatgaggtcaggagat

SEQ ID NO: 5729106 - DNA, 25 bp, Homo sapien
tccttctccagaagatgttctaata

SEQ ID NO: 5729107 - DNA, 25 bp, Homo sapien
agtgctaggccacgaggccgagact

SEQ ID NO: 5729108 - DNA, 25 bp, Homo sapien
ggaaggctgaggcaggagaatggcg

SEQ ID NO: 5729109 - DNA, 25 bp, Homo sapien
gaaacaagtctgggagattcccaca

SEQ ID NO: 5729110 - DNA, 25 bp, Homo sapien
aaataaaagataggagatggtctct

SEQ ID NO: 5729111 - DNA, 25 bp, Homo sapien
agtgtgtttgataaaattcaggagt

SEQ ID NO: 5729112 - DNA, 25 bp, Homo sapien
tgggaacaggtagaggtggcggcac

SEQ ID NO: 5729113 - DNA, 25 bp, Homo sapien
ggtgatgatgtccttctccagaaga

SEQ ID NO: 5729114 - DNA, 25 bp, Homo sapien
gctcaacggtgggagtacatgctga

SEQ ID NO: 5729115 - DNA, 25 bp, Homo sapien
tcatttccaaggtgatgatgtcctt

SEQ ID NO: 5729116 - DNA, 25 bp, Homo sapien
agagagatggacgtttctcaggaag

SEQ ID NO: 5729117 - DNA, 25 bp, Homo sapien
gtgaagtgcacattgctcaacacca

SEQ ID NO: 5729118 - DNA, 25 bp, Homo sapien
ggagcataaccttcccgatccttga

SEQ ID NO: 5729119 - DNA, 25 bp, Homo sapien
actaatgtaataaaagcaatcacta

SEQ ID NO: 5729120 - DNA, 25 bp, Homo sapien
ttggtttgttctgtaggcttgggca

SEQ ID NO: 5729121 - DNA, 25 bp, Homo sapien
cagcctgggcgacagagcgagactc

SEQ ID NO: 5729122 - DNA, 25 bp, Homo sapien
accaagaccccgcgctcggcgccgc

SEQ ID NO: 5729123 - DNA, 25 bp, Homo sapien
aggctcatttcagtaacaaagctca

SEQ ID NO: 5729124 - DNA, 25 bp, Homo sapien
gggcacctgtagtcccagctacttg

SEQ ID NO: 5729125 - DNA, 25 bp, Homo sapien
gttggagcttgcagtgagctgagat

SEQ ID NO: 5729126 - DNA, 25 bp, Homo sapien
tcaacaccagtgctaggccacgagg

SEQ ID NO: 5729127 - DNA, 25 bp, Homo sapien
acaggctgcggtgccttgagcccaa

SEQ ID NO: 5729128 - DNA, 25 bp, Homo sapien
tgggagattcccacatccctgaggg

SEQ ID NO: 5729129 - DNA, 25 bp, Homo sapien
atgccagctggaagtgtgtttgata

SEQ ID NO: 5729130 - DNA, 25 bp, Homo sapien
gcgcagtggctcacgcctgtaatcc

SEQ ID NO: 5729131 - DNA, 25 bp, Homo sapien
gttctaataattcgctcaacaacag

SEQ ID NO: 5729132 - DNA, 25 bp, Homo sapien
aggattctagacagatttggtggca

SEQ ID NO: 5729133 - DNA, 25 bp, Homo sapien
gagcttcttgtaaaggggacaggac

SEQ ID NO: 5729134 - DNA, 25 bp, Homo sapien
tctctccagtgaagtgcacattgct

SEQ ID NO: 5729135 - DNA, 25 bp, Homo sapien
gaggtggcggcacagagtgctgcag

SEQ ID NO: 5729136 - DNA, 25 bp, Homo sapien
caactgcagctgaaacattcctggc

SEQ ID NO: 5729137 - DNA, 25 bp, Homo sapien
catcatgtgggagggtgtcctggga

SEQ ID NO: 5729138 - DNA, 25 bp, Homo sapien
aataaggtacaaatgcaaggcaatg

SEQ ID NO: 5729139 - DNA, 25 bp, Homo sapien
tcgacaggcggagcttcttgtaaag

SEQ ID NO: 5729140 - DNA, 25 bp, Homo sapien
ttaatactgaaagagaaagcaggaa

SEQ ID NO: 5729141 - DNA, 25 bp, Homo sapien
tcccatccacaccatagatggcgcc

SEQ ID NO: 5729142 - DNA, 25 bp, Homo sapien
gatcaagaccatcccggctaacatg

SEQ ID NO: 5729143 - DNA, 25 bp, Homo sapien
aataacatgtatggcactgaaataa

SEQ ID NO: 5729144 - DNA, 25 bp, Homo sapien
tagagtactgtggtccacatcccct

SEQ ID NO: 5729145 - DNA, 25 bp, Homo sapien
taaaggggacaggactcacacaccg

SEQ ID NO: 5729146 - DNA, 25 bp, Homo sapien
gtgccactgccctccagcctgggcg

SEQ ID NO: 5729147 - DNA, 25 bp, Homo sapien
ttggcgtggatgatggggaggtgac

SEQ ID NO: 5729148 - DNA, 25 bp, Homo sapien
ctgtgcagtctggtcacatagaaca

SEQ ID NO: 5729149 - DNA, 25 bp, Homo sapien
agggagataagctaggaagcttttc

SEQ ID NO: 5729150 - DNA, 25 bp, Homo sapien
tgcatttcctgtgcagtctggtcac

SEQ ID NO: 5729151 - DNA, 25 bp, Homo sapien
tgggcagtctcatcttcggcaactt

SEQ ID NO: 5729152 - DNA, 25 bp, Homo sapien
cattaaatttggacaccttccaaac

SEQ ID NO: 5729153 - DNA, 25 bp, Homo sapien
tttcccatccacaccatagatggcg

SEQ ID NO: 5729154 - DNA, 25 bp, Homo sapien
caataggtccaaccaaggctggctc

SEQ ID NO: 5729155 - DNA, 25 bp, Homo sapien
gccaggagcataaccttcccgatcc

SEQ ID NO: 5729156 - DNA, 25 bp, Homo sapien
aacgaaagatctttgagacttccat

SEQ ID NO: 5729157 - DNA, 25 bp, Homo sapien
aagagtgtccttccactgggtggcg

SEQ ID NO: 5729158 - DNA, 25 bp, Homo sapien
gatcatgaggtcaggagatcaagac

SEQ ID NO: 5729159 - DNA, 25 bp, Homo sapien
tatgaagcagggagataagctagga

SEQ ID NO: 5729160 - DNA, 25 bp, Homo sapien
agccaaaagataatgtctacattaa

SEQ ID NO: 5729161 - DNA, 25 bp, Homo sapien
acatcttaactaatgtaataaaagc

SEQ ID NO: 5729162 - DNA, 25 bp, Homo sapien
tgcatatcacaagcccgctcagaaa

SEQ ID NO: 5729163 - DNA, 25 bp, Homo sapien
catcagctccttgtgctggaaggtg

SEQ ID NO: 5729164 - DNA, 25 bp, Homo sapien
gggatcctgcgtggttctttccatc

SEQ ID NO: 5729165 - DNA, 25 bp, Homo sapien
tgagcgcgtgggcagtctcatcttc

SEQ ID NO: 5729166 - DNA, 25 bp, Homo sapien
aaattctgcagtttctcttgcattt

SEQ ID NO: 5729167 - DNA, 25 bp, Homo sapien
gcgtcccctgtcagcggccatcagc

SEQ ID NO: 5729168 - DNA, 25 bp, Homo sapien
tgcaaaattctgcagtttctcttgc

SEQ ID NO: 5729169 - DNA, 25 bp, Homo sapien
aaggtgatgatgtccttctccagaa

SEQ ID NO: 5729170 - DNA, 25 bp, Homo sapien
ccacaccatagatggcgccctccac

SEQ ID NO: 5729171 - DNA, 25 bp, Homo sapien
ttcagtaacaaagctcagagaaaca

SEQ ID NO: 5729172 - DNA, 25 bp, Homo sapien
agattcccacatccctgagggggca

SEQ ID NO: 5729173 - DNA, 25 bp, Homo sapien
aaggcaatgttggctgacaggctgc

SEQ ID NO: 5729174 - DNA, 25 bp, Homo sapien
ggtggcggcacagagtgctgcagta

SEQ ID NO: 5729175 - DNA, 25 bp, Homo sapien
tgtcaggctcttcaactgcagctga

SEQ ID NO: 5729176 - DNA, 25 bp, Homo sapien
aagttgaggagttccacattctggc

SEQ ID NO: 5729177 - DNA, 25 bp, Homo sapien
gctaggaagcttttctagaaatcta

SEQ ID NO: 5729178 - DNA, 25 bp, Homo sapien
aataaaagcaatcactaaagtgcca

SEQ ID NO: 5729179 - DNA, 25 bp, Homo sapien
actcaagtcgtagtcacagctcaac

SEQ ID NO: 5729180 - DNA, 25 bp, Homo sapien
gtcaaccccacgatcagtctcatct

SEQ ID NO: 5729181 - DNA, 25 bp, Homo sapien
gtgggagggtgtcctgggaacaggt

SEQ ID NO: 5729182 - DNA, 25 bp, Homo sapien
tgtctacattaaatttggacacctt

SEQ ID NO: 5729183 - DNA, 25 bp, Homo sapien
cataaccttcccgatccttgataag

SEQ ID NO: 5729184 - DNA, 25 bp, Homo sapien
aggatgcatgccacacactcccaat

SEQ ID NO: 5729185 - DNA, 25 bp, Homo sapien
catatcctccaggtggccttgcttg

SEQ ID NO: 5729186 - DNA, 25 bp, Homo sapien
agatttggtggcagcagccaacagg

SEQ ID NO: 5729187 - DNA, 25 bp, Homo sapien
gctcagagaaacaaccaacgaaaga

SEQ ID NO: 5729188 - DNA, 25 bp, Homo sapien
tctaggttgaaaacaataacatgta

SEQ ID NO: 5729189 - DNA, 25 bp, Homo sapien
ttcacttgtcaggctcttcaactgc

SEQ ID NO: 5729190 - DNA, 25 bp, Homo sapien
caccagtgctaggccacgaggccga

SEQ ID NO: 5729191 - DNA, 25 bp, Homo sapien
tcggcaacttttctttaccggcatc

SEQ ID NO: 5729192 - DNA, 25 bp, Homo sapien
catagaacatggacgtcatagccca

SEQ ID NO: 5729193 - DNA, 25 bp, Homo sapien
atagccgcatatcatgtctgagcgc

SEQ ID NO: 5729194 - DNA, 25 bp, Homo sapien
gcaggaacaaagaactacattacat

SEQ ID NO: 5729195 - DNA, 25 bp, Homo sapien
gatgtaccaggaacctcgtttggtg

SEQ ID NO: 5729196 - DNA, 25 bp, Homo sapien
gggcggaggatatgaatgaaataaa

SEQ ID NO: 5729197 - DNA, 25 bp, Homo sapien
agcagccaacaggatgaaatgaagg

SEQ ID NO: 5729198 - DNA, 25 bp, Homo sapien
gagttggagcttgcagtgagctgag

SEQ ID NO: 5729199 - DNA, 25 bp, Homo sapien
tgataagtgcgttcaccttaaccag

SEQ ID NO: 5729200 - DNA, 25 bp, Homo sapien
acttcacttgtcaggctcttcaact

SEQ ID NO: 5729201 - DNA, 25 bp, Homo sapien
gagacttccatgggcaaagatcaat

SEQ ID NO: 5729202 - DNA, 25 bp, Homo sapien
cttctctgatgctccccacgaggct

SEQ ID NO: 5729203 - DNA, 25 bp, Homo sapien
gctgaagcccagaaagggtggtgag

SEQ ID NO: 5729204 - DNA, 25 bp, Homo sapien
ggtcaggagatcaagaccatcccgg

SEQ ID NO: 5729205 - DNA, 25 bp, Homo sapien
atgttctaataattcgctcaacaac

SEQ ID NO: 5729206 - DNA, 25 bp, Homo sapien
gaagtgcaggttgattgaatgaaag

SEQ ID NO: 5729207 - DNA, 25 bp, Homo sapien
ctcaacaacagctgtttggctagca

SEQ ID NO: 5729208 - DNA, 25 bp, Homo sapien
tcacgcctgtaatcccaacactttg

SEQ ID NO: 5729209 - DNA, 25 bp, Homo sapien
acttttctttaccggcatcactctc

SEQ ID NO: 5729210 - DNA, 25 bp, Homo sapien
atgaaagtgggaatagtaagggaga

SEQ ID NO: 5729211 - DNA, 25 bp, Homo sapien
gcagcagccaacaggatgaaatgaa

SEQ ID NO: 5729212 - DNA, 25 bp, Homo sapien
acattacatctttgagcatttacat

SEQ ID NO: 5729213 - DNA, 25 bp, Homo sapien
gataggagatggtctctcagacatc

SEQ ID NO: 5729214 - DNA, 25 bp, Homo sapien
ttgcagtgagctgagatcgtgccac

SEQ ID NO: 5729215 - DNA, 25 bp, Homo sapien
aaacattcctggcaataggtccaac

SEQ ID NO: 5729216 - DNA, 25 bp, Homo sapien
tcccctccagagcgaaattccagtt

SEQ ID NO: 5729217 - DNA, 25 bp, Homo sapien
ggtggtgagcaacatatcctccagg

SEQ ID NO: 5729218 - DNA, 25 bp, Homo sapien
attcccacatccctgagggggcaga

SEQ ID NO: 5729219 - DNA, 25 bp, Homo sapien
gcatagccgcatatcatgtctgagc

SEQ ID NO: 5729220 - DNA, 25 bp, Homo sapien
gataaaggtttctaggttgaaaaca

SEQ ID NO: 5729221 - DNA, 25 bp, Homo sapien
aagctggaactgaacacaaatatgg

SEQ ID NO: 5729222 - DNA, 25 bp, Homo sapien
gaaacacaccattcttcctggcctt

SEQ ID NO: 5729223 - DNA, 25 bp, Homo sapien
ccaacactttgggaggctgaggtgg

SEQ ID NO: 5729224 - DNA, 25 bp, Homo sapien
atgaagtgcaggttgattgaatgaa

SEQ ID NO: 5729225 - DNA, 25 bp, Homo sapien
tcctggcaataggtccaaccaaggc

SEQ ID NO: 5729226 - DNA, 25 bp, Homo sapien
agtccgtgactcggtgtgcaggtaa

SEQ ID NO: 5729227 - DNA, 25 bp, Homo sapien
atgaaggtaaagaagggagagatat

SEQ ID NO: 5729228 - DNA, 25 bp, Homo sapien
gggcgacagagcgagactctgtctc

SEQ ID NO: 5729229 - DNA, 25 bp, Homo sapien
tgataaaattcaggagtgcaaggct

SEQ ID NO: 5729230 - DNA, 25 bp, Homo sapien
gcagtccctttgaggcaggcatagc

SEQ ID NO: 5729231 - DNA, 25 bp, Homo sapien
ccacgatgcaggagtccgtgactcg

SEQ ID NO: 5729232 - DNA, 25 bp, Homo sapien
tctttgagcatttacatgatcctgt

SEQ ID NO: 5729233 - DNA, 25 bp, Homo sapien
tatggggaatttatatgccctctcc

SEQ ID NO: 5729234 - DNA, 25 bp, Homo sapien
ttcttcagagccaaaagataatgtc

SEQ ID NO: 5729235 - DNA, 25 bp, Homo sapien
tggaagtgtgtttgataaaattcag

SEQ ID NO: 5729236 - DNA, 25 bp, Homo sapien
atccacaccatagatggcgccctcc

SEQ ID NO: 5729237 - DNA, 25 bp, Homo sapien
gcttcttcagagccaaaagataatg

SEQ ID NO: 5729238 - DNA, 25 bp, Homo sapien
actgtgcaaaattctgcagtttctc

SEQ ID NO: 5729239 - DNA, 25 bp, Homo sapien
gcgggcacctgtagtcccagctact

SEQ ID NO: 5729240 - DNA, 25 bp, Homo sapien
gctcacgcctgtaatcccaacactt

SEQ ID NO: 5729241 - DNA, 25 bp, Homo sapien
aacaaagctcagagaaacaaccaac

SEQ ID NO: 5729242 - DNA, 25 bp, Homo sapien
agagatggacgtttctcaggaagga

SEQ ID NO: 5729243 - DNA, 25 bp, Homo sapien
ggttgaaaacaataacatgtatggc

SEQ ID NO: 5729244 - DNA, 25 bp, Homo sapien
cttgataagtgcgttcaccttaacc

SEQ ID NO: 5729245 - DNA, 25 bp, Homo sapien
agaaacaaccaacgaaagatctttg

SEQ ID NO: 5729246 - DNA, 25 bp, Homo sapien
gaggagtgccacgatgcaggagtcc

SEQ ID NO: 5729247 - DNA, 25 bp, Homo sapien
ggggacaggactcacacaccggaaa

SEQ ID NO: 5729248 - DNA, 25 bp, Homo sapien
atgtaataaaagcaatcactaaagt

SEQ ID NO: 5729249 - DNA, 25 bp, Homo sapien
ataatgtctacattaaatttggaca

SEQ ID NO: 5729250 - DNA, 25 bp, Homo sapien
gctggaactgaacacaaatatgggg

SEQ ID NO: 5729251 - DNA, 25 bp, Homo sapien
tatcctccaggtggccttgcttggt

SEQ ID NO: 5729252 - DNA, 25 bp, Homo sapien
accatctttattgtctagggagtgt

SEQ ID NO: 5729253 - DNA, 25 bp, Homo sapien
ctcacacaccggaaaagggagactc

SEQ ID NO: 5729254 - DNA, 25 bp, Homo sapien
gggcacaggaaacaagtctgggaga

SEQ ID NO: 5729255 - DNA, 25 bp, Homo sapien
atggcggcagtccctttgaggcagg

SEQ ID NO: 5729256 - DNA, 25 bp, Homo sapien
ttctcaggaaggaaaaagacagaga

SEQ ID NO: 5729257 - DNA, 25 bp, Homo sapien
gtttgcttcttcagagccaaaagat

SEQ ID NO: 5729258 - DNA, 25 bp, Homo sapien
tgactcggtgtgcaggtaactgtgc

SEQ ID NO: 5729259 - DNA, 25 bp, Homo sapien
agtcccagctacttggaaggctgag

SEQ ID NO: 5729260 - DNA, 25 bp, Homo sapien
cccacgaggctcatttcagtaacaa

SEQ ID NO: 5729261 - DNA, 25 bp, Homo sapien
actgaagggaacgcacaggccgctt

SEQ ID NO: 5729262 - DNA, 25 bp, Homo sapien
aaatgcaaggcaatgttggctgaca

SEQ ID NO: 5729263 - DNA, 25 bp, Homo sapien
cgtggatgatggggaggtgacatca

SEQ ID NO: 5729264 - DNA, 25 bp, Homo sapien
atatgccagctggaagtgtgtttga

SEQ ID NO: 5729265 - DNA, 25 bp, Homo sapien
gacactgcagcaaggtgcgtctcta

SEQ ID NO: 5729266 - DNA, 25 bp, Homo sapien
ggagataagctaggaagcttttcta

SEQ ID NO: 5729267 - DNA, 25 bp, Homo sapien
ccttgcttggtctccctcagtgctt

SEQ ID NO: 5729268 - DNA, 25 bp, Homo sapien
acaaccaacgaaagatctttgagac

SEQ ID NO: 5729269 - DNA, 25 bp, Homo sapien
gctcatttcagtaacaaagctcaga

SEQ ID NO: 5729270 - DNA, 25 bp, Homo sapien
agtttcccatccacaccatagatgg

SEQ ID NO: 5729271 - DNA, 25 bp, Homo sapien
tgcatgccacacactcccaatatcc

SEQ ID NO: 5729272 - DNA, 25 bp, Homo sapien
gatgcaggagtccgtgactcggtgt

SEQ ID NO: 5729273 - DNA, 25 bp, Homo sapien
acaacagctgtttggctagcaccac

SEQ ID NO: 5729274 - DNA, 25 bp, Homo sapien
cctcgcacccaggggatcctgcgtg

SEQ ID NO: 5729275 - DNA, 25 bp, Homo sapien
cactctaggacaaaaagggcggagg

SEQ ID NO: 5729276 - DNA, 25 bp, Homo sapien
ccctgagggggcagaacagaaaccg

SEQ ID NO: 5729277 - DNA, 25 bp, Homo sapien
agtgcaaggcttcacctgaaggcag

SEQ ID NO: 5729278 - DNA, 25 bp, Homo sapien
gccaacaggatgaaatgaaggtaaa

SEQ ID NO: 5729279 - DNA, 25 bp, Homo sapien
ggaccatctttattgtctagggagt

SEQ ID NO: 5729280 - DNA, 25 bp, Homo sapien
gaacatggacgtcatagcccaaaag

SEQ ID NO: 5729281 - DNA, 25 bp, Homo sapien
catgatcctgtaaagcaggattcta

SEQ ID NO: 5729282 - DNA, 25 bp, Homo sapien
gagtcccacactcaaaggcagagat

SEQ ID NO: 5729283 - DNA, 25 bp, Homo sapien
acccctcttaggcagcaagttgagg

SEQ ID NO: 5729284 - DNA, 25 bp, Homo sapien
aacggtgggagtacatgctgaagcc

SEQ ID NO: 5729285 - DNA, 25 bp, Homo sapien
ttttctagaaatctagatatgaagt

SEQ ID NO: 5729286 - DNA, 25 bp, Homo sapien
atgcgagaggagtgccacgatgcag

SEQ ID NO: 5729287 - DNA, 25 bp, Homo sapien
aggcaaagggcttcacagaaaagga

SEQ ID NO: 5729288 - DNA, 25 bp, Homo sapien
aggggatcctgcgtggttctttcca

SEQ ID NO: 5729289 - DNA, 25 bp, Homo sapien
cactgccctccagcctgggcgacag

SEQ ID NO: 5729290 - DNA, 25 bp, Homo sapien
aggcttgggcagttggcgttgtcaa

SEQ ID NO: 5729291 - DNA, 25 bp, Homo sapien
tttgataaaattcaggagtgcaagg

SEQ ID NO: 5729292 - DNA, 25 bp, Homo sapien
cggcgccgccatttcccgcttttcc

SEQ ID NO: 5729293 - DNA, 25 bp, Homo sapien
cggtgggagtacatgctgaagccca

SEQ ID NO: 5729294 - DNA, 25 bp, Homo sapien
agaccccgcgctcggcgccgccatt

SEQ ID NO: 5729295 - DNA, 25 bp, Homo sapien
agcgaaattccagttctttctctcc

SEQ ID NO: 5729296 - DNA, 25 bp, Homo sapien
ttaaatttggacaccttccaaactc

SEQ ID NO: 5729297 - DNA, 25 bp, Homo sapien
cttctggacactgcagcaaggtgcg

SEQ ID NO: 5729298 - DNA, 25 bp, Homo sapien
gagtttcctgatgatgaggatgcat

SEQ ID NO: 5729299 - DNA, 25 bp, Homo sapien
tcatgtgggagggtgtcctgggaac

SEQ ID NO: 5729300 - DNA, 25 bp, Homo sapien
ggtccacatcccctccagagcgaaa

SEQ ID NO: 5729301 - DNA, 25 bp, Homo sapien
tgttccacagtatctgtcgacaggc

SEQ ID NO: 5729302 - DNA, 25 bp, Homo sapien
tttcctgtgcagtctggtcacatag

SEQ ID NO: 5729303 - DNA, 25 bp, Homo sapien
aacacaaatatggggaatttatatg

SEQ ID NO: 5729304 - DNA, 25 bp, Homo sapien
gtggaccaagaccccgcgctcggcg

SEQ ID NO: 5729305 - DNA, 25 bp, Homo sapien
ggtggcagcagccaacaggatgaaa

SEQ ID NO: 5729306 - DNA, 25 bp, Homo sapien
ataattcgctcaacaacagctgttt

SEQ ID NO: 5729307 - DNA, 25 bp, Homo sapien
tcaggctcttcaactgcagctgaaa

SEQ ID NO: 5729308 - DNA, 25 bp, Homo sapien
ccacatccctgagggggcagaacag

SEQ ID NO: 5729309 - DNA, 25 bp, Homo sapien
aatatcctgcgtcccctgtcagcgg

SEQ ID NO: 5729310 - DNA, 25 bp, Homo sapien
catgccacacactcccaatatcctg

SEQ ID NO: 5729311 - DNA, 25 bp, Homo sapien
atgtcggccacgtgcatatcacaag

SEQ ID NO: 5729312 - DNA, 25 bp, Homo sapien
tacattaaatttggacaccttccaa

SEQ ID NO: 5729313 - DNA, 25 bp, Homo sapien
taaccttcccgatccttgataagtg

SEQ ID NO: 5729314 - DNA, 25 bp, Homo sapien
agaatggcgtgaacccgggagttgg

SEQ ID NO: 5729315 - DNA, 25 bp, Homo sapien
aggtgacatcatgtgggagggtgtc

SEQ ID NO: 5729316 - DNA, 25 bp, Homo sapien
ggggaggtgacatcatgtgggaggg

SEQ ID NO: 5729317 - DNA, 25 bp, Homo sapien
gctggaaggtggaccaagaccccgc

SEQ ID NO: 5729318 - DNA, 25 bp, Homo sapien
ttagccgggcacggtggcgggcacc

SEQ ID NO: 5729319 - DNA, 25 bp, Homo sapien
ttttggtttgttctgtaggcttggg

SEQ ID NO: 5729320 - DNA, 25 bp, Homo sapien
aggtacaaatgcaaggcaatgttgg

SEQ ID NO: 5729321 - DNA, 25 bp, Homo sapien
gtgccaggagcataaccttcccgat

SEQ ID NO: 5729322 - DNA, 25 bp, Homo sapien
agagcgaaattccagttctttctct

SEQ ID NO: 5729323 - DNA, 25 bp, Homo sapien
gcgtggttctttccatcttgttggt

SEQ ID NO: 5729324 - DNA, 25 bp, Homo sapien
ctgagatcgtgccactgccctccag

SEQ ID NO: 5729325 - DNA, 25 bp, Homo sapien
tctggacactgcagcaaggtgcgtc

SEQ ID NO: 5729326 - DNA, 25 bp, Homo sapien
cagtattcagacatctccttgcacc

SEQ ID NO: 5729327 - DNA, 25 bp, Homo sapien
aggctcttcaactgcagctgaaaca

SEQ ID NO: 5729328 - DNA, 25 bp, Homo sapien
agatgttctaataattcgctcaaca

SEQ ID NO: 5729329 - DNA, 25 bp, Homo sapien
ttgaaaacaataacatgtatggcac

SEQ ID NO: 5729330 - DNA, 25 bp, Homo sapien
ggcctggagtcccacactcaaaggc

SEQ ID NO: 5729331 - DNA, 25 bp, Homo sapien
taacatggtgaaaccctgtctctac

SEQ ID NO: 5729332 - DNA, 25 bp, Homo sapien
ttggcgttgtcaaagagctgaaaaa

SEQ ID NO: 5729333 - DNA, 25 bp, Homo sapien
aacatatcctccaggtggccttgct

SEQ ID NO: 5729334 - DNA, 25 bp, Homo sapien
ctgtgccaggagcataaccttcccg

SEQ ID NO: 5729335 - DNA, 25 bp, Homo sapien
acctcttggagctggagcagtttcc

SEQ ID NO: 5729336 - DNA, 25 bp, Homo sapien
atcttaactaatgtaataaaagcaa

SEQ ID NO: 5729337 - DNA, 25 bp, Homo sapien
ggcgtggatgatggggaggtgacat

SEQ ID NO: 5729338 - DNA, 25 bp, Homo sapien
aaggcatcaaaagcttggggacccc

SEQ ID NO: 5729339 - DNA, 25 bp, Homo sapien
acagatttggtggcagcagccaaca

SEQ ID NO: 5729340 - DNA, 25 bp, Homo sapien
ttgcaccggtggaattctgtgccag

SEQ ID NO: 5729341 - DNA, 25 bp, Homo sapien
acggcaggcctggatgaagaacatt

SEQ ID NO: 5729342 - DNA, 25 bp, Homo sapien
atggggaggtgacatcatgtgggag

SEQ ID NO: 5729343 - DNA, 25 bp, Homo sapien
atcccggctaacatggtgaaaccct

SEQ ID NO: 5729344 - DNA, 25 bp, Homo sapien
gccgcttctggacactgcagcaagg

SEQ ID NO: 5729345 - DNA, 25 bp, Homo sapien
agatggtctctcagacatcttaact

SEQ ID NO: 5729346 - DNA, 25 bp, Homo sapien
acctgtagtcccagctacttggaag

SEQ ID NO: 5729347 - DNA, 25 bp, Homo sapien
tgaagggaacgcacaggccgcttct

SEQ ID NO: 5729348 - DNA, 25 bp, Homo sapien
cccggctaacatggtgaaaccctgt

SEQ ID NO: 5729349 - DNA, 25 bp, Homo sapien
aaaggagagtttaatactgaaagag

SEQ ID NO: 5729350 - DNA, 25 bp, Homo sapien
ccacataatatcaaaggagagttta

SEQ ID NO: 5729351 - DNA, 25 bp, Homo sapien
gtggttctttccatcttgttggtca

SEQ ID NO: 5729352 - DNA, 25 bp, Homo sapien
tttgagcatttacatgatcctgtaa

SEQ ID NO: 5729353 - DNA, 25 bp, Homo sapien
gccttgagcccaaacgagccaagag

SEQ ID NO: 5729354 - DNA, 25 bp, Homo sapien
caacaggatgaaatgaaggtaaaga

SEQ ID NO: 5729355 - DNA, 25 bp, Homo sapien
tcttgcccgggcgcagtggctcacg

SEQ ID NO: 5729356 - DNA, 25 bp, Homo sapien
catgggcaaagatcaataaggtaca

SEQ ID NO: 5729357 - DNA, 25 bp, Homo sapien
gaggaccatctttattgtctaggga

SEQ ID NO: 5729358 - DNA, 25 bp, Homo sapien
cagctggaagtgtgtttgataaaat

SEQ ID NO: 5729359 - DNA, 25 bp, Homo sapien
gacaggcggagcttcttgtaaaggg

SEQ ID NO: 5729360 - DNA, 25 bp, Homo sapien
ggcaacttttctttaccggcatcac

SEQ ID NO: 5729361 - DNA, 25 bp, Homo sapien
tttccatcttgttggtcaaccccac

SEQ ID NO: 5729362 - DNA, 25 bp, Homo sapien
agtgcaggttgattgaatgaaagtg

SEQ ID NO: 5729363 - DNA, 25 bp, Homo sapien
acatgtatggcactgaaataaaagc

SEQ ID NO: 5729364 - DNA, 25 bp, Homo sapien
ccgcatatcatgtctgagcgcgtgg

SEQ ID NO: 5729365 - DNA, 25 bp, Homo sapien
atgttggctgacaggctgcggtgcc

SEQ ID NO: 5729366 - DNA, 25 bp, Homo sapien
cggagcttcttgtaaaggggacagg

SEQ ID NO: 5729367 - DNA, 25 bp, Homo sapien
gggaacgcacaggccgcttctggac

SEQ ID NO: 5729368 - DNA, 25 bp, Homo sapien
aggacaaaaagggcggaggatatga

SEQ ID NO: 5729369 - DNA, 25 bp, Homo sapien
atctagatatgaagtgcaggttgat

SEQ ID NO: 5729370 - DNA, 25 bp, Homo sapien
gtgtccttccactgggtggcgctgc

SEQ ID NO: 5729371 - DNA, 25 bp, Homo sapien
aggccacgaggccgagactgcaacc

SEQ ID NO: 5729372 - DNA, 25 bp, Homo sapien
tcacaagcccgctcagaaaacactt

SEQ ID NO: 5729373 - DNA, 25 bp, Homo sapien
aaattccagttctttctctccagtg

SEQ ID NO: 5729374 - DNA, 25 bp, Homo sapien
cagagtgctgcagtattcagacatc

SEQ ID NO: 5729375 - DNA, 25 bp, Homo sapien
gtgagcaacatatcctccaggtggc

SEQ ID NO: 5729376 - DNA, 25 bp, Homo sapien
actgaacacaaatatggggaattta

SEQ ID NO: 5729377 - DNA, 25 bp, Homo sapien
ccacacactcccaatatcctgcgtc

SEQ ID NO: 5729378 - DNA, 25 bp, Homo sapien
gtgcagtctggtcacatagaacatg

SEQ ID NO: 5729379 - DNA, 25 bp, Homo sapien
ggaggatatgaatgaaataaaagat

SEQ ID NO: 5729380 - DNA, 25 bp, Homo sapien
ctcctcgcacccaggggatcctgcg

SEQ ID NO: 5729381 - DNA, 25 bp, Homo sapien
cccaaacgagccaagagtgtccttc

SEQ ID NO: 5729382 - DNA, 25 bp, Homo sapien
gctccctcatttccaaggtgatgat

SEQ ID NO: 5729383 - DNA, 25 bp, Homo sapien
ctatatgccagctggaagtgtgttt

SEQ ID NO: 5729384 - DNA, 25 bp, Homo sapien
tagcaccactcggttcttttttaga

SEQ ID NO: 5729385 - DNA, 25 bp, Homo sapien
gaaaccgtgcatcctgaagatcaaa

SEQ ID NO: 5729386 - DNA, 25 bp, Homo sapien
ggggacccctcttaggcagcaagtt

SEQ ID NO: 5729387 - DNA, 25 bp, Homo sapien
ggctggctctacaggcaaagggctt

SEQ ID NO: 5729388 - DNA, 25 bp, Homo sapien
caggagcataaccttcccgatcctt

SEQ ID NO: 5729389 - DNA, 25 bp, Homo sapien
tggaaggtggaccaagaccccgcgc

SEQ ID NO: 5729390 - DNA, 25 bp, Homo sapien
gtgcgtctctagtcatgtttgcttc

SEQ ID NO: 5729391 - DNA, 25 bp, Homo sapien
cattgctcaacaccagtgctaggcc

SEQ ID NO: 5729392 - DNA, 25 bp, Homo sapien
cttgagcaagagcctcgatgtacca

SEQ ID NO: 5729393 - DNA, 25 bp, Homo sapien
cggtggaattctgtgccaggagcat

SEQ ID NO: 5729394 - DNA, 25 bp, Homo sapien
ggcgttgtcaaagagctgaaaaacc

SEQ ID NO: 5729395 - DNA, 25 bp, Homo sapien
gatcaataaggtacaaatgcaaggc

SEQ ID NO: 5729396 - DNA, 25 bp, Homo sapien
ccgggcgcagtggctcacgcctgta

SEQ ID NO: 5729397 - DNA, 25 bp, Homo sapien
ggtggatcatgaggtcaggagatca

SEQ ID NO: 5729398 - DNA, 25 bp, Homo sapien
cacattctggctgaaactgcccact

SEQ ID NO: 5729399 - DNA, 25 bp, Homo sapien
acgatgcaggagtccgtgactcggt

SEQ ID NO: 5729400 - DNA, 25 bp, Homo sapien
agcaaggtgcgtctctagtcatgtt

SEQ ID NO: 5729401 - DNA, 25 bp, Homo sapien
cacatagaacatggacgtcatagcc

SEQ ID NO: 5729402 - DNA, 25 bp, Homo sapien
cacttgtcaggctcttcaactgcag

SEQ ID NO: 5729403 - DNA, 25 bp, Homo sapien
tgtgcaaaattctgcagtttctctt

SEQ ID NO: 5729404 - DNA, 25 bp, Homo sapien
accttccaaactctcactctaggac

SEQ ID NO: 5729405 - DNA, 25 bp, Homo sapien
ctggtgaaggagtcattgaccgaac

SEQ ID NO: 5729406 - DNA, 25 bp, Homo sapien
gttcggtcaatgactccttcaccag

SEQ ID NO: 5729407 - DNA, 25 bp, Homo sapien
ggcactgtttggcatctcaggaact

SEQ ID NO: 5729408 - DNA, 25 bp, Homo sapien
agttcctgagatgccaaacagtgcc

SEQ ID NO: 5729409 - DNA, 25 bp, Homo sapien
acaactacgggcaccatttacgtat

SEQ ID NO: 5729410 - DNA, 25 bp, Homo sapien
atacgtaaatggtgcccgtagttgt

SEQ ID NO: 5729411 - DNA, 25 bp, Homo sapien
cgtaccaagcataggttcgagaggt

SEQ ID NO: 5729412 - DNA, 25 bp, Homo sapien
acctctcgaacctatgcttggtacg

SEQ ID NO: 5729413 - DNA, 25 bp, Homo sapien
gttcacgcccgacgaactttccgta

SEQ ID NO: 5729414 - DNA, 25 bp, Homo sapien
tacggaaagttcgtcgggcgtgaac

SEQ ID NO: 5729415 - DNA, 25 bp, Homo sapien
aatttattgtgactaatagactaat

SEQ ID NO: 5729416 - DNA, 25 bp, Homo sapien
attagtctattagtcacaataaatt

SEQ ID NO: 5729417 - DNA, 25 bp, Homo sapien
ccgcctcgagctgcccggcggaaga

SEQ ID NO: 5729418 - DNA, 25 bp, Homo sapien
tcttccgccgggcagctcgaggcgg

SEQ ID NO: 5729419 - DNA, 25 bp, Homo sapien
ggcgcgaggcccgtaacgggcgtcg

SEQ ID NO: 5729420 - DNA, 25 bp, Homo sapien
cgacgcccgttacgggcctcgcgcc

SEQ ID NO: 5729421 - DNA, 25 bp, Homo sapien
cgtacctctgtactgattatagtaa

SEQ ID NO: 5729422 - DNA, 25 bp, Homo sapien
ttactataatcagtacagaggtacg

SEQ ID NO: 5729423 - DNA, 25 bp, Homo sapien
ggagacggttactaccgagagacac

SEQ ID NO: 5729424 - DNA, 25 bp, Homo sapien
gtgtctctcggtagtaaccgtctcc

SEQ ID NO: 5729425 - DNA, 25 bp, Homo sapien
tccccgagggggcacggtgtcttcg

SEQ ID NO: 5729426 - DNA, 25 bp, Homo sapien
cgaagacaccgtgccccctcgggga

SEQ ID NO: 5729427 - DNA, 25 bp, Homo sapien
tctggtccccgagggggcacggtgt

SEQ ID NO: 5729428 - DNA, 25 bp, Homo sapien
acaccgtgccccctcggggaccaga

SEQ ID NO: 5729429 - DNA, 25 bp, Homo sapien
aatctcggctcgaaactaaggacta

SEQ ID NO: 5729430 - DNA, 25 bp, Homo sapien
tagtccttagtttcgagccgagatt

SEQ ID NO: 5729431 - DNA, 25 bp, Homo sapien
acacaccctctgttaaatcactaac

SEQ ID NO: 5729432 - DNA, 25 bp, Homo sapien
gttagtgatttaacagagggtgtgt

SEQ ID NO: 5729433 - DNA, 25 bp, Homo sapien
tgaaagtttcttcacgtaacacaag

SEQ ID NO: 5729434 - DNA, 25 bp, Homo sapien
cttgtgttacgtgaagaaactttca

SEQ ID NO: 5729435 - DNA, 25 bp, Homo sapien
atgatcttcgtgagcttcttagaac

SEQ ID NO: 5729436 - DNA, 25 bp, Homo sapien
gttctaagaagctcacgaagatcat

SEQ ID NO: 5729437 - DNA, 25 bp, Homo sapien
accactgagtctcagtccgaaaggg

SEQ ID NO: 5729438 - DNA, 25 bp, Homo sapien
ccctttcggactgagactcagtggt

SEQ ID NO: 5729439 - DNA, 25 bp, Homo sapien
tctcggccggccagcggcttatcag

SEQ ID NO: 5729440 - DNA, 25 bp, Homo sapien
ctgataagccgctggccggccgaga

SEQ ID NO: 5729441 - DNA, 25 bp, Homo sapien
cggtccgtgtctcggccggccagcg

SEQ ID NO: 5729442 - DNA, 25 bp, Homo sapien
cgctggccggccgagacacggaccg

SEQ ID NO: 5729443 - DNA, 25 bp, Homo sapien
ttgaagaaacgaaagcgactttagt

SEQ ID NO: 5729444 - DNA, 25 bp, Homo sapien
actaaagtcgctttcgtttcttcaa

SEQ ID NO: 5729445 - DNA, 25 bp, Homo sapien
ccagaccgggccctcgctccctgtc

SEQ ID NO: 5729446 - DNA, 25 bp, Homo sapien
gacagggagcgagggcccggtctgg

SEQ ID NO: 5729447 - DNA, 25 bp, Homo sapien
gcggtgagcggcgcgggcgctcggg

SEQ ID NO: 5729448 - DNA, 25 bp, Homo sapien
cccgagcgcccgcgccgctcaccgc

SEQ ID NO: 5729449 - DNA, 25 bp, Homo sapien
gaccggaccctctgcaggccgaccg

SEQ ID NO: 5729450 - DNA, 25 bp, Homo sapien
cggtcggcctgcagagggtccggtc

SEQ ID NO: 5729451 - DNA, 25 bp, Homo sapien
ggaattattctactcggtttgtgag

SEQ ID NO: 5729452 - DNA, 25 bp, Homo sapien
ctcacaaaccgagtagaataattcc

SEQ ID NO: 5729453 - DNA, 25 bp, Homo sapien
cctaagtggtttgacaacggtatat

SEQ ID NO: 5729454 - DNA, 25 bp, Homo sapien
atataccgttgtcaaaccacttagg

SEQ ID NO: 5729455 - DNA, 25 bp, Homo sapien
gacgcgatctcagtatactttatat

SEQ ID NO: 5729456 - DNA, 25 bp, Homo sapien
atataaagtatactgagatcgcgtc

SEQ ID NO: 5729457 - DNA, 25 bp, Homo sapien
actttacaatatgtttttcgattta

SEQ ID NO: 5729458 - DNA, 25 bp, Homo sapien
taaatcgaaaaacatattgtaaagt

SEQ ID NO: 5729459 - DNA, 25 bp, Homo sapien
cggtagagtgtacctaccgaccgag

SEQ ID NO: 5729460 - DNA, 25 bp, Homo sapien
ctcggtcggtaggtacactctaccg

SEQ ID NO: 5729461 - DNA, 25 bp, Homo sapien
tttttgatagtctttcttaaagaag

SEQ ID NO: 5729462 - DNA, 25 bp, Homo sapien
cttctttaagaaagactatcaaaaa

SEQ ID NO: 5729463 - DNA, 25 bp, Homo sapien
tgttacagtgaaactaatttttaac

SEQ ID NO: 5729464 - DNA, 25 bp, Homo sapien
gttaaaaattagtttcactgtaaca

SEQ ID NO: 5729465 - DNA, 25 bp, Homo sapien
atgttacagtgaaactaatttttaa

SEQ ID NO: 5729466 - DNA, 25 bp, Homo sapien
ttaaaaattagtttcactgtaacat

SEQ ID NO: 5729467 - DNA, 25 bp, Homo sapien
tatgttacagtgaaactaattttta

SEQ ID NO: 5729468 - DNA, 25 bp, Homo sapien
taaaaattagtttcactgtaacata

SEQ ID NO: 5729469 - DNA, 25 bp, Homo sapien
aatacttatgttacagtgaaactaa

SEQ ID NO: 5729470 - DNA, 25 bp, Homo sapien
ttagtttcactgtaacataagtatt

SEQ ID NO: 5729471 - DNA, 25 bp, Homo sapien
aaatttggtaaacaactatcagtac

SEQ ID NO: 5729472 - DNA, 25 bp, Homo sapien
gtactgatagttgtttaccaaattt

SEQ ID NO: 5729473 - DNA, 25 bp, Homo sapien
tcgaactacagtatctctcgtcggc

SEQ ID NO: 5729474 - DNA, 25 bp, Homo sapien
gccgacgagagatactgtagttcga

SEQ ID NO: 5729475 - DNA, 25 bp, Homo sapien
agagacataataccctactaaagta

SEQ ID NO: 5729476 - DNA, 25 bp, Homo sapien
tactttagtagggtattatgtctct

SEQ ID NO: 5729477 - DNA, 25 bp, Homo sapien
aagaagaggctgacgcctcgggcac

SEQ ID NO: 5729478 - DNA, 25 bp, Homo sapien
gtgcccgaggcgtcagcctcttctt

SEQ ID NO: 5729479 - DNA, 25 bp, Homo sapien
ctcatcttctgtccactagtaaaac

SEQ ID NO: 5729480 - DNA, 25 bp, Homo sapien
gttttactagtggacagaagatgag

SEQ ID NO: 5729481 - DNA, 25 bp, Homo sapien
gtagtagagatcgaagatcaaaaac

SEQ ID NO: 5729482 - DNA, 25 bp, Homo sapien
gtttttgatcttcgatctctactac

SEQ ID NO: 5729483 - DNA, 25 bp, Homo sapien
acacagtttcggaggcctactaccg

SEQ ID NO: 5729484 - DNA, 25 bp, Homo sapien
cggtagtaggcctccgaaactgtgt

SEQ ID NO: 5729485 - DNA, 25 bp, Homo sapien
gctgctgcccccgcctcctcctgcc

SEQ ID NO: 5729486 - DNA, 25 bp, Homo sapien
ggtgtcagcagatcccgcagtcctg

SEQ ID NO: 5729487 - DNA, 25 bp, Homo sapien
gtgcctgtgtgtgtgtgtgtgtgtg

SEQ ID NO: 5729488 - DNA, 25 bp, Homo sapien
ggcaagggaagtccactgtgtgatt

SEQ ID NO: 5729489 - DNA, 25 bp, Homo sapien
gcagagcgcagccgccaggctcccg

SEQ ID NO: 5729490 - DNA, 25 bp, Homo sapien
gcccacttcattagggtttgtgaac

SEQ ID NO: 5729491 - DNA, 25 bp, Homo sapien
ctggtatcgaatgggcagagtacca

SEQ ID NO: 5729492 - DNA, 25 bp, Homo sapien
ccctaacacttcctgccaccttccg

SEQ ID NO: 5729493 - DNA, 25 bp, Homo sapien
agagtaccaagaaatcatgactcat

SEQ ID NO: 5729494 - DNA, 25 bp, Homo sapien
aatcatgactcatctcaacccacaa

SEQ ID NO: 5729495 - DNA, 25 bp, Homo sapien
atagggacaccaggaagaggacaaa

SEQ ID NO: 5729496 - DNA, 25 bp, Homo sapien
gaggcaggaacagcacccggacgga

SEQ ID NO: 5729497 - DNA, 25 bp, Homo sapien
ccatgactgggaagaggcctgtggc

SEQ ID NO: 5729498 - DNA, 25 bp, Homo sapien
atggggatctggtatcgaatgggca

SEQ ID NO: 5729499 - DNA, 25 bp, Homo sapien
tccaaaaacctcactcctggcaggt

SEQ ID NO: 5729500 - DNA, 25 bp, Homo sapien
cggatcatgggccggaccaagcagg

SEQ ID NO: 5729501 - DNA, 25 bp, Homo sapien
ccggctcctgccgcctgggccccgg

SEQ ID NO: 5729502 - DNA, 25 bp, Homo sapien
accaggtgtcagcagatcccgcagt

SEQ ID NO: 5729503 - DNA, 25 bp, Homo sapien
cacgtttattggggaactgaacagc

SEQ ID NO: 5729504 - DNA, 25 bp, Homo sapien
ctgcccacttcattagggtttgtga

SEQ ID NO: 5729505 - DNA, 25 bp, Homo sapien
aagaaaatagtcatctggggaacgt

SEQ ID NO: 5729506 - DNA, 25 bp, Homo sapien
ggaggctcagaggcagtggtgtggg

SEQ ID NO: 5729507 - DNA, 25 bp, Homo sapien
gctatgacgtagttgcacagacagc

SEQ ID NO: 5729508 - DNA, 25 bp, Homo sapien
ccagactactgacggcaggggctgc

SEQ ID NO: 5729509 - DNA, 25 bp, Homo sapien
tacggacttagcataagagtaaatg

SEQ ID NO: 5729510 - DNA, 25 bp, Homo sapien
cccaattcaggagacggtggacaca

SEQ ID NO: 5729511 - DNA, 25 bp, Homo sapien
ctctggaaagacggcttatttaaat

SEQ ID NO: 5729512 - DNA, 25 bp, Homo sapien
agtatgcagccctttgatctcctgg

SEQ ID NO: 5729513 - DNA, 25 bp, Homo sapien
gtgccttttatgatttcagagaagt

SEQ ID NO: 5729514 - DNA, 25 bp, Homo sapien
tgtgtgatgaccagttgtcctccaa

SEQ ID NO: 5729515 - DNA, 25 bp, Homo sapien
gtcaatggatcccatcacgggagtc

SEQ ID NO: 5729516 - DNA, 25 bp, Homo sapien
gtcaaagacctctcagaagccttgc

SEQ ID NO: 5729517 - DNA, 25 bp, Homo sapien
ccttagggatgacgtccccgctgca

SEQ ID NO: 5729518 - DNA, 25 bp, Homo sapien
ggtatcgaatgggcagagtaccaag

SEQ ID NO: 5729519 - DNA, 25 bp, Homo sapien
gcttttaggaagaagaggctgtgca

SEQ ID NO: 5729520 - DNA, 25 bp, Homo sapien
aagcatgtgcctgtgtgtgtgtgtg

SEQ ID NO: 5729521 - DNA, 25 bp, Homo sapien
ttttccaaagaaaatagtcatctgg

SEQ ID NO: 5729522 - DNA, 25 bp, Homo sapien
cagcatggggatctggtatcgaatg

SEQ ID NO: 5729523 - DNA, 25 bp, Homo sapien
gagccctctggccactgtgggaggg

SEQ ID NO: 5729524 - DNA, 25 bp, Homo sapien
agtggcttttaggaagaagaggctg

SEQ ID NO: 5729525 - DNA, 25 bp, Homo sapien
ggaagtccactgtgtgattgtctgt

SEQ ID NO: 5729526 - DNA, 25 bp, Homo sapien
cagcacccggacggactacgagtac

SEQ ID NO: 5729527 - DNA, 25 bp, Homo sapien
ggactacgagtaccagcactccaat

SEQ ID NO: 5729528 - DNA, 25 bp, Homo sapien
gcagtgagggcggctgcaggagagg

SEQ ID NO: 5729529 - DNA, 25 bp, Homo sapien
ggacgagttggtgtctgtggtagct

SEQ ID NO: 5729530 - DNA, 25 bp, Homo sapien
gacatcaaggacacactgcctgtgg

SEQ ID NO: 5729531 - DNA, 25 bp, Homo sapien
tgaagggtcttggcctcatccctca

SEQ ID NO: 5729532 - DNA, 25 bp, Homo sapien
agacccttagggatgacgtccccgc

SEQ ID NO: 5729533 - DNA, 25 bp, Homo sapien
gcagggctggcccggagactgggca

SEQ ID NO: 5729534 - DNA, 25 bp, Homo sapien
gagccctgtctgcaaggacgcagaa

SEQ ID NO: 5729535 - DNA, 25 bp, Homo sapien
cgatgagaagctgcttctgcgtgag

SEQ ID NO: 5729536 - DNA, 25 bp, Homo sapien
ccccagcccccaaccttcccaggca

SEQ ID NO: 5729537 - DNA, 25 bp, Homo sapien
gtccactgtgtgattgtctgtattc

SEQ ID NO: 5729538 - DNA, 25 bp, Homo sapien
tggttgtgagattgcctctaacagg

SEQ ID NO: 5729539 - DNA, 25 bp, Homo sapien
tattccacgggattcaacggaagct

SEQ ID NO: 5729540 - DNA, 25 bp, Homo sapien
aagtgggcgcatcctgtcttcagct

SEQ ID NO: 5729541 - DNA, 25 bp, Homo sapien
cacttcctgccaccttccgaggcag

SEQ ID NO: 5729542 - DNA, 25 bp, Homo sapien
gccttcccagtcatcagctgcctcc

SEQ ID NO: 5729543 - DNA, 25 bp, Homo sapien
aacccacaacgccttcccagtcatc

SEQ ID NO: 5729544 - DNA, 25 bp, Homo sapien
ctgcatatttattcaaggtgactct

SEQ ID NO: 5729545 - DNA, 25 bp, Homo sapien
gaggagccagcggccacctgcgggg

SEQ ID NO: 5729546 - DNA, 25 bp, Homo sapien
acagaccagtccaccatgcctgaag

SEQ ID NO: 5729547 - DNA, 25 bp, Homo sapien
atgggccggaccaagcaggccccgc

SEQ ID NO: 5729548 - DNA, 25 bp, Homo sapien
tcggggtggtggcttctcggaaccg

SEQ ID NO: 5729549 - DNA, 25 bp, Homo sapien
aatcaccatcaaatctctagcagaa

SEQ ID NO: 5729550 - DNA, 25 bp, Homo sapien
cagcagggctggcccggagactggg

SEQ ID NO: 5729551 - DNA, 25 bp, Homo sapien
gggcagctaagtgggcgcatcctgt

SEQ ID NO: 5729552 - DNA, 25 bp, Homo sapien
tccgcacagagcagagcgcagccgc

SEQ ID NO: 5729553 - DNA, 25 bp, Homo sapien
tcccactactgcttctgtccctgga

SEQ ID NO: 5729554 - DNA, 25 bp, Homo sapien
caggagggcagagggcagagctctg

SEQ ID NO: 5729555 - DNA, 25 bp, Homo sapien
agcggggaacagaccagtccaccat

SEQ ID NO: 5729556 - DNA, 25 bp, Homo sapien
gcacatctccctaacacttcctgcc

SEQ ID NO: 5729557 - DNA, 25 bp, Homo sapien
tatgccatatcagcaatggatggtg

SEQ ID NO: 5729558 - DNA, 25 bp, Homo sapien
ctgactgacaccccggcctccctgg

SEQ ID NO: 5729559 - DNA, 25 bp, Homo sapien
gcagctaagtgggcgcatcctgtct

SEQ ID NO: 5729560 - DNA, 25 bp, Homo sapien
caccttccgaggcaggaacagcacc

SEQ ID NO: 5729561 - DNA, 25 bp, Homo sapien
caacgccttcccagtcatcagctgc

SEQ ID NO: 5729562 - DNA, 25 bp, Homo sapien
agcagatggtgtggatgctgacctc

SEQ ID NO: 5729563 - DNA, 25 bp, Homo sapien
aggggcccttcactccgcccccatg

SEQ ID NO: 5729564 - DNA, 25 bp, Homo sapien
gacaaggaagacccttagggatgac

SEQ ID NO: 5729565 - DNA, 25 bp, Homo sapien
gtgtgtgtgtatatgtgtgtgtgtg

SEQ ID NO: 5729566 - DNA, 25 bp, Homo sapien
gaagacccttagggatgacgtcccc

SEQ ID NO: 5729567 - DNA, 25 bp, Homo sapien
tggaaatgtgaagggtcttggcctc

SEQ ID NO: 5729568 - DNA, 25 bp, Homo sapien
tgggcttcatcccaattcaggagac

SEQ ID NO: 5729569 - DNA, 25 bp, Homo sapien
aaatgactgtgaacgttgtagtaaa

SEQ ID NO: 5729570 - DNA, 25 bp, Homo sapien
agctaagtgggcgcatcctgtcttc

SEQ ID NO: 5729571 - DNA, 25 bp, Homo sapien
tactgcttctgtccctggacaagga

SEQ ID NO: 5729572 - DNA, 25 bp, Homo sapien
accatttattgccttctgagaggtg

SEQ ID NO: 5729573 - DNA, 25 bp, Homo sapien
ccagcggggaacagaccagtccacc

SEQ ID NO: 5729574 - DNA, 25 bp, Homo sapien
ccaccatgcctgaagtcaaagacct

SEQ ID NO: 5729575 - DNA, 25 bp, Homo sapien
ctgacggcaggggctgctgcccccg

SEQ ID NO: 5729576 - DNA, 25 bp, Homo sapien
ccgagccccgacaggctatgacgta

SEQ ID NO: 5729577 - DNA, 25 bp, Homo sapien
taggaggctcagaggcagtggtgtg

SEQ ID NO: 5729578 - DNA, 25 bp, Homo sapien
tgaaactctggctcaaacctaggaa

SEQ ID NO: 5729579 - DNA, 25 bp, Homo sapien
gtgtgtgtgtgtgtatatgtgtgtg

SEQ ID NO: 5729580 - DNA, 25 bp, Homo sapien
gaggacaaactgcatggactcaagc

SEQ ID NO: 5729581 - DNA, 25 bp, Homo sapien
gtgcattaaatttattccacgggat

SEQ ID NO: 5729582 - DNA, 25 bp, Homo sapien
aaacggcagcttaagataagtaagc

SEQ ID NO: 5729583 - DNA, 25 bp, Homo sapien
cccgacaggctatgacgtagttgca

SEQ ID NO: 5729584 - DNA, 25 bp, Homo sapien
aaggacacactgcctgtgggcttca

SEQ ID NO: 5729585 - DNA, 25 bp, Homo sapien
gcttctgcgtgagacggagccggga

SEQ ID NO: 5729586 - DNA, 25 bp, Homo sapien
gaagctgcttctgcgtgagacggag

SEQ ID NO: 5729587 - DNA, 25 bp, Homo sapien
caaagacctctcagaagccttgcca

SEQ ID NO: 5729588 - DNA, 25 bp, Homo sapien
cctctcagaagccttgccagaaacg

SEQ ID NO: 5729589 - DNA, 25 bp, Homo sapien
cggcctccctggggacattgttcat

SEQ ID NO: 5729590 - DNA, 25 bp, Homo sapien
atctctagcagaaatcgaaaaagag

SEQ ID NO: 5729591 - DNA, 25 bp, Homo sapien
aggtgggtgaggacaagcatgtgcc

SEQ ID NO: 5729592 - DNA, 25 bp, Homo sapien
gtccctggacaaggaagacccttag

SEQ ID NO: 5729593 - DNA, 25 bp, Homo sapien
aagaaatcatgactcatctcaaccc

SEQ ID NO: 5729594 - DNA, 25 bp, Homo sapien
ctggggaacgtgttagtagatatga

SEQ ID NO: 5729595 - DNA, 25 bp, Homo sapien
acagtgttaaggacgagttggtgtc

SEQ ID NO: 5729596 - DNA, 25 bp, Homo sapien
gaccaagcaggccccgcctcagtac

SEQ ID NO: 5729597 - DNA, 25 bp, Homo sapien
cccagccaggtgcccccgcatgccc

SEQ ID NO: 5729598 - DNA, 25 bp, Homo sapien
tccaccccagcccccaaccttccca

SEQ ID NO: 5729599 - DNA, 25 bp, Homo sapien
ggatgctgacctctggaaagacggc

SEQ ID NO: 5729600 - DNA, 25 bp, Homo sapien
tcatgggccggaccaagcaggcccc

SEQ ID NO: 5729601 - DNA, 25 bp, Homo sapien
tggtgtggatgctgacctctggaaa

SEQ ID NO: 5729602 - DNA, 25 bp, Homo sapien
ggttcccttggaaatgtgaagggtc

SEQ ID NO: 5729603 - DNA, 25 bp, Homo sapien
cacgggagtcggggtggtggcttct

SEQ ID NO: 5729604 - DNA, 25 bp, Homo sapien
agagctctggccacttctgcccact

SEQ ID NO: 5729605 - DNA, 25 bp, Homo sapien
cggagactgggcagctaagtgggcg

SEQ ID NO: 5729606 - DNA, 25 bp, Homo sapien
taagataagtaagcagagacagtgt

SEQ ID NO: 5729607 - DNA, 25 bp, Homo sapien
gtataagcccacctgagtggggctc

SEQ ID NO: 5729608 - DNA, 25 bp, Homo sapien
gctcagaggcagtggtgtgggagcc

SEQ ID NO: 5729609 - DNA, 25 bp, Homo sapien
agacagtgttaaggacgagttggtg

SEQ ID NO: 5729610 - DNA, 25 bp, Homo sapien
ctaagtgggcgcatcctgtcttcag

SEQ ID NO: 5729611 - DNA, 25 bp, Homo sapien
cccccgcatgccctcctgcagttgc

SEQ ID NO: 5729612 - DNA, 25 bp, Homo sapien
attgcctctaacaggtaatgccagg

SEQ ID NO: 5729613 - DNA, 25 bp, Homo sapien
gaccagttgtcctccaaaaacctca

SEQ ID NO: 5729614 - DNA, 25 bp, Homo sapien
cccgcctcagtacacgtttattggg

SEQ ID NO: 5729615 - DNA, 25 bp, Homo sapien
aagcaggccccgcctcagtacacgt

SEQ ID NO: 5729616 - DNA, 25 bp, Homo sapien
gcctcctcctgccgcctccgccagc

SEQ ID NO: 5729617 - DNA, 25 bp, Homo sapien
tgtctgtgtgatgaccagttgtcct

SEQ ID NO: 5729618 - DNA, 25 bp, Homo sapien
ttttgggagagtacttttctccacg

SEQ ID NO: 5729619 - DNA, 25 bp, Homo sapien
gaattgagagcgtttctgtcttttg

SEQ ID NO: 5729620 - DNA, 25 bp, Homo sapien
gcaggcccctgtcgagctggggtcc

SEQ ID NO: 5729621 - DNA, 25 bp, Homo sapien
gggtgaggacaagcatgtgcctgtg

SEQ ID NO: 5729622 - DNA, 25 bp, Homo sapien
gggattcaacggaagctgcgatttg

SEQ ID NO: 5729623 - DNA, 25 bp, Homo sapien
acagcttccgcacagagcagagcgc

SEQ ID NO: 5729624 - DNA, 25 bp, Homo sapien
atggatagggacaccaggaagagga

SEQ ID NO: 5729625 - DNA, 25 bp, Homo sapien
tagcttttaggctgctcctaaccca

SEQ ID NO: 5729626 - DNA, 25 bp, Homo sapien
gtgcacgcacatgcgtgtgtataag

SEQ ID NO: 5729627 - DNA, 25 bp, Homo sapien
cgtccccgctgcatatttattcaag

SEQ ID NO: 5729628 - DNA, 25 bp, Homo sapien
gccggaccaagcaggccccgcctca

SEQ ID NO: 5729629 - DNA, 25 bp, Homo sapien
atttgtgacattcggatcatgggcc

SEQ ID NO: 5729630 - DNA, 25 bp, Homo sapien
gaaaatagtcatctggggaacgtgt

SEQ ID NO: 5729631 - DNA, 25 bp, Homo sapien
ggagccagcggccacctgcggggag

SEQ ID NO: 5729632 - DNA, 25 bp, Homo sapien
gcgcatcctgtcttcagctggcctg

SEQ ID NO: 5729633 - DNA, 25 bp, Homo sapien
ccgcccccatgactgggaagaggcc

SEQ ID NO: 5729634 - DNA, 25 bp, Homo sapien
ttcttgtgttccagaaagtatgcag

SEQ ID NO: 5729635 - DNA, 25 bp, Homo sapien
agtggtgtgggagccctgtctgcaa

SEQ ID NO: 5729636 - DNA, 25 bp, Homo sapien
gaacgttgtagtaaacggcagctta

SEQ ID NO: 5729637 - DNA, 25 bp, Homo sapien
caggaacagcacccggacggactac

SEQ ID NO: 5729638 - DNA, 25 bp, Homo sapien
gagccccgacaggctatgacgtagt

SEQ ID NO: 5729639 - DNA, 25 bp, Homo sapien
gcccccactgatgccgctgcaggcc

SEQ ID NO: 5729640 - DNA, 25 bp, Homo sapien
ccctgtcgagctggggtcccagcca

SEQ ID NO: 5729641 - DNA, 25 bp, Homo sapien
cggtggacacacaggaagtggcttt

SEQ ID NO: 5729642 - DNA, 25 bp, Homo sapien
gtgtctgtggtagcttttaggctgc

SEQ ID NO: 5729643 - DNA, 25 bp, Homo sapien
ccccgcctcctcctgccgcctccgc

SEQ ID NO: 5729644 - DNA, 25 bp, Homo sapien
gcatatttattcaaggtgactcttg

SEQ ID NO: 5729645 - DNA, 25 bp, Homo sapien
tatgacgtagttgcacagacagcag

SEQ ID NO: 5729646 - DNA, 25 bp, Homo sapien
aagacctctcagaagccttgccaga

SEQ ID NO: 5729647 - DNA, 25 bp, Homo sapien
gaggaaggggctcccacagccccca

SEQ ID NO: 5729648 - DNA, 25 bp, Homo sapien
gctgcgatttgtgacattcggatca

SEQ ID NO: 5729649 - DNA, 25 bp, Homo sapien
gttgctggatggatagggacaccag

SEQ ID NO: 5729650 - DNA, 25 bp, Homo sapien
cagagcagagcgcagccgccaggct

SEQ ID NO: 5729651 - DNA, 25 bp, Homo sapien
ccagcggccacctgcggggagacca

SEQ ID NO: 5729652 - DNA, 25 bp, Homo sapien
agagacagtgttaaggacgagttgg

SEQ ID NO: 5729653 - DNA, 25 bp, Homo sapien
gccctctggccactgtgggagggaa

SEQ ID NO: 5729654 - DNA, 25 bp, Homo sapien
ggaaggggctcccacagcccccact

SEQ ID NO: 5729655 - DNA, 25 bp, Homo sapien
gtagttgcacagacagcagatggtg

SEQ ID NO: 5729656 - DNA, 25 bp, Homo sapien
ttcagagaagttttcttgtgttcca

SEQ ID NO: 5729657 - DNA, 25 bp, Homo sapien
tgagaggtgggtgaggacaagcatg

SEQ ID NO: 5729658 - DNA, 25 bp, Homo sapien
agcagatcccgcagtcctgaggagc

SEQ ID NO: 5729659 - DNA, 25 bp, Homo sapien
gaataagcagtgagggcggctgcag

SEQ ID NO: 5729660 - DNA, 25 bp, Homo sapien
tgtctgtattcttaatataatttgt

SEQ ID NO: 5729661 - DNA, 25 bp, Homo sapien
cctgtgggcttcatcccaattcagg

SEQ ID NO: 5729662 - DNA, 25 bp, Homo sapien
agcttccgcacagagcagagcgcag

SEQ ID NO: 5729663 - DNA, 25 bp, Homo sapien
aggctcagaggcagtggtgtgggag

SEQ ID NO: 5729664 - DNA, 25 bp, Homo sapien
accatgactaatctgtgtgtgctgt

SEQ ID NO: 5729665 - DNA, 25 bp, Homo sapien
gccgggacccgccgccgccgcagcc

SEQ ID NO: 5729666 - DNA, 25 bp, Homo sapien
gcagagacagtgttaaggacgagtt

SEQ ID NO: 5729667 - DNA, 25 bp, Homo sapien
tcccagtcatcagctgcctccaccc

SEQ ID NO: 5729668 - DNA, 25 bp, Homo sapien
cgcagaataagcagtgagggcggct

SEQ ID NO: 5729669 - DNA, 25 bp, Homo sapien
cctccgccagccctccctcccacac

SEQ ID NO: 5729670 - DNA, 25 bp, Homo sapien
tctcaacccacaacgccttcccagt

SEQ ID NO: 5729671 - DNA, 25 bp, Homo sapien
ctcaagcgagctggagccatcttct

SEQ ID NO: 5729672 - DNA, 25 bp, Homo sapien
tcctgccgcctccgccagccctccc

SEQ ID NO: 5729673 - DNA, 25 bp, Homo sapien
ccaagcaggccccgcctcagtacac

SEQ ID NO: 5729674 - DNA, 25 bp, Homo sapien
gttgtagtaaacggcagcttaagat

SEQ ID NO: 5729675 - DNA, 25 bp, Homo sapien
agcacttcccactactgcttctgtc

SEQ ID NO: 5729676 - DNA, 25 bp, Homo sapien
tctccatagcattacggacttagca

SEQ ID NO: 5729677 - DNA, 25 bp, Homo sapien
atatgaagctcattgacatcaagga

SEQ ID NO: 5729678 - DNA, 25 bp, Homo sapien
gcctgtgtgtgtgtgtgtgtgtgtg

SEQ ID NO: 5729679 - DNA, 25 bp, Homo sapien
tgtgattgtctgtattcttaatata

SEQ ID NO: 5729680 - DNA, 25 bp, Homo sapien
tgcctctaacaggtaatgccagggg

SEQ ID NO: 5729681 - DNA, 25 bp, Homo sapien
agtcggggtggtggcttctcggaac

SEQ ID NO: 5729682 - DNA, 25 bp, Homo sapien
atatttattcaaggtgactcttgta

SEQ ID NO: 5729683 - DNA, 25 bp, Homo sapien
gcaatggatggtgtgccttttatga

SEQ ID NO: 5729684 - DNA, 25 bp, Homo sapien
cgtttctgtcttttgggagagtact

SEQ ID NO: 5729685 - DNA, 25 bp, Homo sapien
catgccctcctgcagttgctggatg

SEQ ID NO: 5729686 - DNA, 25 bp, Homo sapien
tagcattacggacttagcataagag

SEQ ID NO: 5729687 - DNA, 25 bp, Homo sapien
tcaaatctctagcagaaatcgaaaa

SEQ ID NO: 5729688 - DNA, 25 bp, Homo sapien
cgggacccgccgccgccgcagccac

SEQ ID NO: 5729689 - DNA, 25 bp, Homo sapien
acctgtgtttcacaagatcattttc

SEQ ID NO: 5729690 - DNA, 25 bp, Homo sapien
cggacttagcataagagtaaatgac

SEQ ID NO: 5729691 - DNA, 25 bp, Homo sapien
attgttcataaccatgactaatctg

SEQ ID NO: 5729692 - DNA, 25 bp, Homo sapien
gtgtataagcccacctgagtggggc

SEQ ID NO: 5729693 - DNA, 25 bp, Homo sapien
agtaccaagaaatcatgactcatct

SEQ ID NO: 5729694 - DNA, 25 bp, Homo sapien
acacaggaagtggcttttaggaaga

SEQ ID NO: 5729695 - DNA, 25 bp, Homo sapien
acgagttggtgtctgtggtagcttt

SEQ ID NO: 5729696 - DNA, 25 bp, Homo sapien
tgactaatctgtgtgtgctgtagtg

SEQ ID NO: 5729697 - DNA, 25 bp, Homo sapien
tgatctcctgggaatcaccatcaaa

SEQ ID NO: 5729698 - DNA, 25 bp, Homo sapien
ggatggatagggacaccaggaagag

SEQ ID NO: 5729699 - DNA, 25 bp, Homo sapien
gaaatcatgactcatctcaacccac

SEQ ID NO: 5729700 - DNA, 25 bp, Homo sapien
cgtttattggggaactgaacagcat

SEQ ID NO: 5729701 - DNA, 25 bp, Homo sapien
ccccagcggggaacagaccagtcca

SEQ ID NO: 5729702 - DNA, 25 bp, Homo sapien
gcgtgagacggagccgggacccgcc

SEQ ID NO: 5729703 - DNA, 25 bp, Homo sapien
gccttgccagaaacgtcaatggatc

SEQ ID NO: 5729704 - DNA, 25 bp, Homo sapien
ggcaggaacagcacccggacggact

SEQ ID NO: 5729705 - DNA, 25 bp, Homo sapien
gcttttaggctgctcctaacccacc

SEQ ID NO: 5729706 - DNA, 25 bp, Homo sapien
cagtccaccatgcctgaagtcaaag

SEQ ID NO: 5729707 - DNA, 25 bp, Homo sapien
gcacccggacggactacgagtacca

SEQ ID NO: 5729708 - DNA, 25 bp, Homo sapien
ggcttatttaaatccaaggttacca

SEQ ID NO: 5729709 - DNA, 25 bp, Homo sapien
attgagagcgtttctgtcttttggg

SEQ ID NO: 5729710 - DNA, 25 bp, Homo sapien
cccgcatgccctcctgcagttgctg

SEQ ID NO: 5729711 - DNA, 25 bp, Homo sapien
acaagcatgtgcctgtgtgtgtgtg

SEQ ID NO: 5729712 - DNA, 25 bp, Homo sapien
tgtcagcagatcccgcagtcctgag

SEQ ID NO: 5729713 - DNA, 25 bp, Homo sapien
cggaccaagcaggccccgcctcagt

SEQ ID NO: 5729714 - DNA, 25 bp, Homo sapien
gactgacaccccggcctccctgggg

SEQ ID NO: 5729715 - DNA, 25 bp, Homo sapien
atatcagcaatggatggtgtgcctt

SEQ ID NO: 5729716 - DNA, 25 bp, Homo sapien
tgattgtctgtattcttaatataat

SEQ ID NO: 5729717 - DNA, 25 bp, Homo sapien
agtgagggcggctgcaggagaggaa

SEQ ID NO: 5729718 - DNA, 25 bp, Homo sapien
tcccgcgccgcccgggcgatgagaa

SEQ ID NO: 5729719 - DNA, 25 bp, Homo sapien
acccttagggatgacgtccccgctg

SEQ ID NO: 5729720 - DNA, 25 bp, Homo sapien
ccggacggactacgagtaccagcac

SEQ ID NO: 5729721 - DNA, 25 bp, Homo sapien
ggacattgttcataaccatgactaa

SEQ ID NO: 5729722 - DNA, 25 bp, Homo sapien
ggcccctcccgcgccgcccgggcga

SEQ ID NO: 5729723 - DNA, 25 bp, Homo sapien
gtggacacacaggaagtggctttta

SEQ ID NO: 5729724 - DNA, 25 bp, Homo sapien
agcggccacctgcggggagaccacc

SEQ ID NO: 5729725 - DNA, 25 bp, Homo sapien
gccaggtgcccccgcatgccctcct

SEQ ID NO: 5729726 - DNA, 25 bp, Homo sapien
ggggctcccacagcccccactgatg

SEQ ID NO: 5729727 - DNA, 25 bp, Homo sapien
acgggattcaacggaagctgcgatt

SEQ ID NO: 5729728 - DNA, 25 bp, Homo sapien
ttttcttgtgttccagaaagtatgc

SEQ ID NO: 5729729 - DNA, 25 bp, Homo sapien
acatgcgtgtgtataagcccacctg

SEQ ID NO: 5729730 - DNA, 25 bp, Homo sapien
catagcattacggacttagcataag

SEQ ID NO: 5729731 - DNA, 25 bp, Homo sapien
actactgcttctgtccctggacaag

SEQ ID NO: 5729732 - DNA, 25 bp, Homo sapien
agggcagagggcagagctctggcca

SEQ ID NO: 5729733 - DNA, 25 bp, Homo sapien
cccctcccgcgccgcccgggcgatg

SEQ ID NO: 5729734 - DNA, 25 bp, Homo sapien
gagtacgagtacagcttccgcacag

SEQ ID NO: 5729735 - DNA, 25 bp, Homo sapien
gatggtgtggatgctgacctctgga

SEQ ID NO: 5729736 - DNA, 25 bp, Homo sapien
ggggctcgtgcaggagaactgaggc

SEQ ID NO: 5729737 - DNA, 25 bp, Homo sapien
tgatgccgctgcaggcccctgtcga

SEQ ID NO: 5729738 - DNA, 25 bp, Homo sapien
ctgcaggcccctgtcgagctggggt

SEQ ID NO: 5729739 - DNA, 25 bp, Homo sapien
gggaagaggcctgtggcagcgccgc

SEQ ID NO: 5729740 - DNA, 25 bp, Homo sapien
atcccatcacgggagtcggggtggt

SEQ ID NO: 5729741 - DNA, 25 bp, Homo sapien
gtaaatgactgtgaacgttgtagta

SEQ ID NO: 5729742 - DNA, 25 bp, Homo sapien
atatgtgtgtgtgtgcacgcacatg

SEQ ID NO: 5729743 - DNA, 25 bp, Homo sapien
ggagccatcttctccatagcattac

SEQ ID NO: 5729744 - DNA, 25 bp, Homo sapien
tcatcccaattcaggagacggtgga

SEQ ID NO: 5729745 - DNA, 25 bp, Homo sapien
cctgggaatcaccatcaaatctcta

SEQ ID NO: 5729746 - DNA, 25 bp, Homo sapien
gagggcagagctctggccacttctg

SEQ ID NO: 5729747 - DNA, 25 bp, Homo sapien
ccctccctcccacactgccccagca

SEQ ID NO: 5729748 - DNA, 25 bp, Homo sapien
ggtttgtgaactttgtccttcacct

SEQ ID NO: 5729749 - DNA, 25 bp, Homo sapien
gttaccagatacctgtgtttcacaa

SEQ ID NO: 5729750 - DNA, 25 bp, Homo sapien
atcccaattcaggagacggtggaca

SEQ ID NO: 5729751 - DNA, 25 bp, Homo sapien
cctaggaggctcagaggcagtggtg

SEQ ID NO: 5729752 - DNA, 25 bp, Homo sapien
gtgtgtgtgcacgcacatgcgtgtg

SEQ ID NO: 5729753 - DNA, 25 bp, Homo sapien
ggacccgccgccgccgcagccaccg

SEQ ID NO: 5729754 - DNA, 25 bp, Homo sapien
atttattcaaggtgactcttgtact

SEQ ID NO: 5729755 - DNA, 25 bp, Homo sapien
gtgaggacaagcatgtgcctgtgtg

SEQ ID NO: 5729756 - DNA, 25 bp, Homo sapien
agtgttaaggacgagttggtgtctg

SEQ ID NO: 5729757 - DNA, 25 bp, Homo sapien
gcctgtggcagcgccgctggaccct

SEQ ID NO: 5729758 - DNA, 25 bp, Homo sapien
agacagcagatggtgtggatgctga

SEQ ID NO: 5729759 - DNA, 25 bp, Homo sapien
aaactctggctcaaacctaggaatt

SEQ ID NO: 5729760 - DNA, 25 bp, Homo sapien
gccgccgccgccccagcggggaaca

SEQ ID NO: 5729761 - DNA, 25 bp, Homo sapien
cgcctcagtacacgtttattgggga

SEQ ID NO: 5729762 - DNA, 25 bp, Homo sapien
tggcctgactgacaccccggcctcc

SEQ ID NO: 5729763 - DNA, 25 bp, Homo sapien
acttttctccacgagccctctggcc

SEQ ID NO: 5729764 - DNA, 25 bp, Homo sapien
acaccaggaagaggacaaactgcat

SEQ ID NO: 5729765 - DNA, 25 bp, Homo sapien
atgtgtgtgtgtgcacgcacatgcg

SEQ ID NO: 5729766 - DNA, 25 bp, Homo sapien
agcgcagccgccaggctcccgccca

SEQ ID NO: 5729767 - DNA, 25 bp, Homo sapien
ttctgcccacttcattagggtttgt

SEQ ID NO: 5729768 - DNA, 25 bp, Homo sapien
ggcttcatcccaattcaggagacgg

SEQ ID NO: 5729769 - DNA, 25 bp, Homo sapien
cctggacaaggaagacccttaggga

SEQ ID NO: 5729770 - DNA, 25 bp, Homo sapien
gtctgtggtagcttttaggctgctc

SEQ ID NO: 5729771 - DNA, 25 bp, Homo sapien
cttgtgttccagaaagtatgcagcc

SEQ ID NO: 5729772 - DNA, 25 bp, Homo sapien
cccggcctccctggggacattgttc

SEQ ID NO: 5729773 - DNA, 25 bp, Homo sapien
tctgagaggtgggtgaggacaagca

SEQ ID NO: 5729774 - DNA, 25 bp, Homo sapien
tggccactgtgggagggaaggacaa

SEQ ID NO: 5729775 - DNA, 25 bp, Homo sapien
ggatagggacaccaggaagaggaca

SEQ ID NO: 5729776 - DNA, 25 bp, Homo sapien
tcttcagctggcctgactgacaccc

SEQ ID NO: 5729777 - DNA, 25 bp, Homo sapien
ccaccatttattgccttctgagagg

SEQ ID NO: 5729778 - DNA, 25 bp, Homo sapien
cctgtcttcagctggcctgactgac

SEQ ID NO: 5729779 - DNA, 25 bp, Homo sapien
gggtcttggcctcatccctcaggtc

SEQ ID NO: 5729780 - DNA, 25 bp, Homo sapien
acttctgcccacttcattagggttt

SEQ ID NO: 5729781 - DNA, 25 bp, Homo sapien
cgccgccgccccagcggggaacaga

SEQ ID NO: 5729782 - DNA, 25 bp, Homo sapien
gtgtggatgctgacctctggaaaga

SEQ ID NO: 5729783 - DNA, 25 bp, Homo sapien
gtgtgtgtgtgtatatgtgtgtgtg

SEQ ID NO: 5729784 - DNA, 25 bp, Homo sapien
actaatctgtgtgtgctgtagtgac

SEQ ID NO: 5729785 - DNA, 25 bp, Homo sapien
gtgggcgcatcctgtcttcagctgg

SEQ ID NO: 5729786 - DNA, 25 bp, Homo sapien
gacaccccggcctccctggggacat

SEQ ID NO: 5729787 - DNA, 25 bp, Homo sapien
cgctgcatatttattcaaggtgact

SEQ ID NO: 5729788 - DNA, 25 bp, Homo sapien
agggaagtccactgtgtgattgtct

SEQ ID NO: 5729789 - DNA, 25 bp, Homo sapien
ttcactccgcccccatgactgggaa

SEQ ID NO: 5729790 - DNA, 25 bp, Homo sapien
ccccccacagcacttcccactactg

SEQ ID NO: 5729791 - DNA, 25 bp, Homo sapien
ctgaggagccagcggccacctgcgg

SEQ ID NO: 5729792 - DNA, 25 bp, Homo sapien
gtgtgtgtgtgtgtgtgtgtgtgta

SEQ ID NO: 5729793 - DNA, 25 bp, Homo sapien
cgggagtcggggtggtggcttctcg

SEQ ID NO: 5729794 - DNA, 25 bp, Homo sapien
cgccgcccagactactgacggcagg

SEQ ID NO: 5729795 - DNA, 25 bp, Homo sapien
agcgtttctgtcttttgggagagta

SEQ ID NO: 5729796 - DNA, 25 bp, Homo sapien
agaggcagtggtgtgggagccctgt

SEQ ID NO: 5729797 - DNA, 25 bp, Homo sapien
caggaagaggacaaactgcatggac

SEQ ID NO: 5729798 - DNA, 25 bp, Homo sapien
cgccagccctccctcccacactgcc

SEQ ID NO: 5729799 - DNA, 25 bp, Homo sapien
cactccaatttgtatgccatatcag

SEQ ID NO: 5729800 - DNA, 25 bp, Homo sapien
attcaaggtgactcttgtacttggc

SEQ ID NO: 5729801 - DNA, 25 bp, Homo sapien
agaccagtccaccatgcctgaagtc

SEQ ID NO: 5729802 - DNA, 25 bp, Homo sapien
gagagtacttttctccacgagccct

SEQ ID NO: 5729803 - DNA, 25 bp, Homo sapien
ggaagctgcgatttgtgacattcgg

SEQ ID NO: 5729804 - DNA, 25 bp, Homo sapien
gtacagcttccgcacagagcagagc

SEQ ID NO: 5729805 - DNA, 25 bp, Homo sapien
gccactgtgggagggaaggacaagg

SEQ ID NO: 5729806 - DNA, 25 bp, Homo sapien
tgaacagcatggggatctggtatcg

SEQ ID NO: 5729807 - DNA, 25 bp, Homo sapien
gctgcctccaccccagcccccaacc

SEQ ID NO: 5729808 - DNA, 25 bp, Homo sapien
gcccccgcctcctcctgccgcctcc

SEQ ID NO: 5729809 - DNA, 25 bp, Homo sapien
acattgttcataaccatgactaatc

SEQ ID NO: 5729810 - DNA, 25 bp, Homo sapien
gtgtgggagccctgtctgcaaggac

SEQ ID NO: 5729811 - DNA, 25 bp, Homo sapien
cagaaatcgaaaaagagtacgagta

SEQ ID NO: 5729812 - DNA, 25 bp, Homo sapien
tagtgaccagcggctcctaacgtgt

SEQ ID NO: 5729813 - DNA, 25 bp, Homo sapien
cattagggtttgtgaactttgtcct

SEQ ID NO: 5729814 - DNA, 25 bp, Homo sapien
tacgagtaccagcactccaatttgt

SEQ ID NO: 5729815 - DNA, 25 bp, Homo sapien
attacggacttagcataagagtaaa

SEQ ID NO: 5729816 - DNA, 25 bp, Homo sapien
gccgcctccgccagccctccctccc

SEQ ID NO: 5729817 - DNA, 25 bp, Homo sapien
cgcagccaccgccgccgccgcccca

SEQ ID NO: 5729818 - DNA, 25 bp, Homo sapien
agaggcctgtggcagcgccgctgga

SEQ ID NO: 5729819 - DNA, 25 bp, Homo sapien
ctcctgccgcctgggccccgggccc

SEQ ID NO: 5729820 - DNA, 25 bp, Homo sapien
tgctcctaacccaccatttattgcc

SEQ ID NO: 5729821 - DNA, 25 bp, Homo sapien
gactgggcagctaagtgggcgcatc

SEQ ID NO: 5729822 - DNA, 25 bp, Homo sapien
gcattacggacttagcataagagta

SEQ ID NO: 5729823 - DNA, 25 bp, Homo sapien
tcagaagccttgccagaaacgtcaa

SEQ ID NO: 5729824 - DNA, 25 bp, Homo sapien
gccccgacaggctatgacgtagttg

SEQ ID NO: 5729825 - DNA, 25 bp, Homo sapien
tcaaacctaggaattgagagcgttt

SEQ ID NO: 5729826 - DNA, 25 bp, Homo sapien
aaacctaggaattgagagcgtttct

SEQ ID NO: 5729827 - DNA, 25 bp, Homo sapien
agttttcttgtgttccagaaagtat

SEQ ID NO: 5729828 - DNA, 25 bp, Homo sapien
ctcgtgcaggagaactgaggcatga

SEQ ID NO: 5729829 - DNA, 25 bp, Homo sapien
gcgccgctggaccctaggaggctca

SEQ ID NO: 5729830 - DNA, 25 bp, Homo sapien
cagagggcagagctctggccacttc

SEQ ID NO: 5729831 - DNA, 25 bp, Homo sapien
gacttagcataagagtaaatgactg

SEQ ID NO: 5729832 - DNA, 25 bp, Homo sapien
ctgcgtgagacggagccgggacccg

SEQ ID NO: 5729833 - DNA, 25 bp, Homo sapien
tttattccacgggattcaacggaag

SEQ ID NO: 5729834 - DNA, 25 bp, Homo sapien
gccctggttgtgagattgcctctaa

SEQ ID NO: 5729835 - DNA, 25 bp, Homo sapien
ctggaccctaggaggctcagaggca

SEQ ID NO: 5729836 - DNA, 25 bp, Homo sapien
acgtgttagtagatatgaagctcat

SEQ ID NO: 5729837 - DNA, 25 bp, Homo sapien
ctgtggcagcgccgctggaccctag

SEQ ID NO: 5729838 - DNA, 25 bp, Homo sapien
ccagccctccctcccacactgcccc

SEQ ID NO: 5729839 - DNA, 25 bp, Homo sapien
gatcccgcagtcctgaggagccagc

SEQ ID NO: 5729840 - DNA, 25 bp, Homo sapien
gccgccaggctcccgcccagcccca

SEQ ID NO: 5729841 - DNA, 25 bp, Homo sapien
ggaaagacggcttatttaaatccaa

SEQ ID NO: 5729842 - DNA, 25 bp, Homo sapien
tttctgtcttttgggagagtacttt

SEQ ID NO: 5729843 - DNA, 25 bp, Homo sapien
ataagcccacctgagtggggctcgt

SEQ ID NO: 5729844 - DNA, 25 bp, Homo sapien
gactgggaagaggcctgtggcagcg

SEQ ID NO: 5729845 - DNA, 25 bp, Homo sapien
atgactgggaagaggcctgtggcag

SEQ ID NO: 5729846 - DNA, 25 bp, Homo sapien
tgtgaactttgtccttcacctcttt

SEQ ID NO: 5729847 - DNA, 25 bp, Homo sapien
aagagtacgagtacagcttccgcac

SEQ ID NO: 5729848 - DNA, 25 bp, Homo sapien
cctggttgtgagattgcctctaaca

SEQ ID NO: 5729849 - DNA, 25 bp, Homo sapien
agaaagtatgcagccctttgatctc

SEQ ID NO: 5729850 - DNA, 25 bp, Homo sapien
aagaggacaaactgcatggactcaa

SEQ ID NO: 5729851 - DNA, 25 bp, Homo sapien
cagatcccgcagtcctgaggagcca

SEQ ID NO: 5729852 - DNA, 25 bp, Homo sapien
tggtggcttctcggaaccgagcccc

SEQ ID NO: 5729853 - DNA, 25 bp, Homo sapien
tgtccttcacctcttttcgtgccct

SEQ ID NO: 5729854 - DNA, 25 bp, Homo sapien
ccagatacctgtgtttcacaagatc

SEQ ID NO: 5729855 - DNA, 25 bp, Homo sapien
tcaaggacacactgcctgtgggctt

SEQ ID NO: 5729856 - DNA, 25 bp, Homo sapien
accaggaagaggacaaactgcatgg

SEQ ID NO: 5729857 - DNA, 25 bp, Homo sapien
agcactccaatttgtatgccatatc

SEQ ID NO: 5729858 - DNA, 25 bp, Homo sapien
cctctaacaggtaatgccaggggcc

SEQ ID NO: 5729859 - DNA, 25 bp, Homo sapien
ccagttgtcctccaaaaacctcact

SEQ ID NO: 5729860 - DNA, 25 bp, Homo sapien
gctggggtcccagccaggtgccccc

SEQ ID NO: 5729861 - DNA, 25 bp, Homo sapien
tgcaggagaactgaggcatgaaact

SEQ ID NO: 5729862 - DNA, 25 bp, Homo sapien
gtgtgtgtgtgtgtgtgtatatgtg

SEQ ID NO: 5729863 - DNA, 25 bp, Homo sapien
tgagagcgtttctgtcttttgggag

SEQ ID NO: 5729864 - DNA, 25 bp, Homo sapien
aggaagtggcttttaggaagaagag

SEQ ID NO: 5729865 - DNA, 25 bp, Homo sapien
taatctgtgtgtgctgtagtgacca

SEQ ID NO: 5729866 - DNA, 25 bp, Homo sapien
ctgtgcattaaatttattccacggg

SEQ ID NO: 5729867 - DNA, 25 bp, Homo sapien
tagtaaacggcagcttaagataagt

SEQ ID NO: 5729868 - DNA, 25 bp, Homo sapien
tctcggaaccgagccccgacaggct

SEQ ID NO: 5729869 - DNA, 25 bp, Homo sapien
cttttcgtgccctggttgtgagatt

SEQ ID NO: 5729870 - DNA, 25 bp, Homo sapien
gtgtgtgtgtgtgtgtgtgtatatg

SEQ ID NO: 5729871 - DNA, 25 bp, Homo sapien
actcttgtacttggcaagggaagtc

SEQ ID NO: 5729872 - DNA, 25 bp, Homo sapien
ttgacatcaaggacacactgcctgt

SEQ ID NO: 5729873 - DNA, 25 bp, Homo sapien
gctgacctctggaaagacggcttat

SEQ ID NO: 5729874 - DNA, 25 bp, Homo sapien
ctcatctcaacccacaacgccttcc

SEQ ID NO: 5729875 - DNA, 25 bp, Homo sapien
ggtgactcttgtacttggcaaggga

SEQ ID NO: 5729876 - DNA, 25 bp, Homo sapien
ttaggctgctcctaacccaccattt

SEQ ID NO: 5729877 - DNA, 25 bp, Homo sapien
agcggctcctaacgtgtctgtgtga

SEQ ID NO: 5729878 - DNA, 25 bp, Homo sapien
ccgcagtcctgaggagccagcggcc

SEQ ID NO: 5729879 - DNA, 25 bp, Homo sapien
ggacaccaggaagaggacaaactgc

SEQ ID NO: 5729880 - DNA, 25 bp, Homo sapien
atgtgcctgtgtgtgtgtgtgtgtg

SEQ ID NO: 5729881 - DNA, 25 bp, Homo sapien
catccctcaggtccccccacagcac

SEQ ID NO: 5729882 - DNA, 25 bp, Homo sapien
ccaggggcccttcactccgccccca

SEQ ID NO: 5729883 - DNA, 25 bp, Homo sapien
ctctggccacttctgcccacttcat

SEQ ID NO: 5729884 - DNA, 25 bp, Homo sapien
ccacagcacttcccactactgcttc

SEQ ID NO: 5729885 - DNA, 25 bp, Homo sapien
tgttccagaaagtatgcagcccttt

SEQ ID NO: 5729886 - DNA, 25 bp, Homo sapien
aggaagaagaggctgtgcattaaat

SEQ ID NO: 5729887 - DNA, 25 bp, Homo sapien
aaagtatgcagccctttgatctcct

SEQ ID NO: 5729888 - DNA, 25 bp, Homo sapien
ttcagctggcctgactgacaccccg

SEQ ID NO: 5729889 - DNA, 25 bp, Homo sapien
ctccgcccccatgactgggaagagg

SEQ ID NO: 5729890 - DNA, 25 bp, Homo sapien
cacagagcagagcgcagccgccagg

SEQ ID NO: 5729891 - DNA, 25 bp, Homo sapien
gcccagccccaccaggtgtcagcag

SEQ ID NO: 5729892 - DNA, 25 bp, Homo sapien
aaaacctcactcctggcaggtgggg

SEQ ID NO: 5729893 - DNA, 25 bp, Homo sapien
atcagcaatggatggtgtgcctttt

SEQ ID NO: 5729894 - DNA, 25 bp, Homo sapien
cttggcctcatccctcaggtccccc

SEQ ID NO: 5729895 - DNA, 25 bp, Homo sapien
cacaacgccttcccagtcatcagct

SEQ ID NO: 5729896 - DNA, 25 bp, Homo sapien
ataagtaagcagagacagtgttaag

SEQ ID NO: 5729897 - DNA, 25 bp, Homo sapien
gagaagctgcttctgcgtgagacgg

SEQ ID NO: 5729898 - DNA, 25 bp, Homo sapien
cctctggccactgtgggagggaagg

SEQ ID NO: 5729899 - DNA, 25 bp, Homo sapien
aacagcacccggacggactacgagt

SEQ ID NO: 5729900 - DNA, 25 bp, Homo sapien
tcaggtccccccacagcacttccca

SEQ ID NO: 5729901 - DNA, 25 bp, Homo sapien
ggatctggtatcgaatgggcagagt

SEQ ID NO: 5729902 - DNA, 25 bp, Homo sapien
ttttaggctgctcctaacccaccat

SEQ ID NO: 5729903 - DNA, 25 bp, Homo sapien
agagcgtttctgtcttttgggagag

SEQ ID NO: 5729904 - DNA, 25 bp, Homo sapien
cccggagactgggcagctaagtggg

SEQ ID NO: 5729905 - DNA, 25 bp, Homo sapien
ggaaccgagccccgacaggctatga

SEQ ID NO: 5729906 - DNA, 25 bp, Homo sapien
ggagggcagagggcagagctctggc

SEQ ID NO: 5729907 - DNA, 25 bp, Homo sapien
tcccgcagtcctgaggagccagcgg

SEQ ID NO: 5729908 - DNA, 25 bp, Homo sapien
cttcccagtcatcagctgcctccac

SEQ ID NO: 5729909 - DNA, 25 bp, Homo sapien
tgtgatgaccagttgtcctccaaaa

SEQ ID NO: 5729910 - DNA, 25 bp, Homo sapien
tgacctctggaaagacggcttattt

SEQ ID NO: 5729911 - DNA, 25 bp, Homo sapien
cctcccgcgccgcccgggcgatgag

SEQ ID NO: 5729912 - DNA, 25 bp, Homo sapien
gaacagaccagtccaccatgcctga

SEQ ID NO: 5729913 - DNA, 25 bp, Homo sapien
ggggtggtggcttctcggaaccgag

SEQ ID NO: 5729914 - DNA, 25 bp, Homo sapien
gtgttagtagatatgaagctcattg

SEQ ID NO: 5729915 - DNA, 25 bp, Homo sapien
ctgtgaacgttgtagtaaacggcag

SEQ ID NO: 5729916 - DNA, 25 bp, Homo sapien
gaccaccgccgcccagactactgac

SEQ ID NO: 5729917 - DNA, 25 bp, Homo sapien
gacggcttatttaaatccaaggtta

SEQ ID NO: 5729918 - DNA, 25 bp, Homo sapien
ctggaaagacggcttatttaaatcc

SEQ ID NO: 5729919 - DNA, 25 bp, Homo sapien
agtaccagcactccaatttgtatgc

SEQ ID NO: 5729920 - DNA, 25 bp, Homo sapien
attgtctgtattcttaatataattt

SEQ ID NO: 5729921 - DNA, 25 bp, Homo sapien
cgtgtctgtgtgatgaccagttgtc

SEQ ID NO: 5729922 - DNA, 25 bp, Homo sapien
ttattcaaggtgactcttgtacttg

SEQ ID NO: 5729923 - DNA, 25 bp, Homo sapien
cttctccatagcattacggacttag

SEQ ID NO: 5729924 - DNA, 25 bp, Homo sapien
aggccccgcctcagtacacgtttat

SEQ ID NO: 5729925 - DNA, 25 bp, Homo sapien
aggcagtggtgtgggagccctgtct

SEQ ID NO: 5729926 - DNA, 25 bp, Homo sapien
gagacggagccgggacccgccgccg

SEQ ID NO: 5729927 - DNA, 25 bp, Homo sapien
gtgtgcacgcacatgcgtgtgtata

SEQ ID NO: 5729928 - DNA, 25 bp, Homo sapien
tttgtccttcacctcttttcgtgcc

SEQ ID NO: 5729929 - DNA, 25 bp, Homo sapien
ttgggagagtacttttctccacgag

SEQ ID NO: 5729930 - DNA, 25 bp, Homo sapien
gggcagagctctggccacttctgcc

SEQ ID NO: 5729931 - DNA, 25 bp, Homo sapien
ctcccacactgccccagcagggctg

SEQ ID NO: 5729932 - DNA, 25 bp, Homo sapien
ctccctggggacattgttcataacc

SEQ ID NO: 5729933 - DNA, 25 bp, Homo sapien
atctccctaacacttcctgccacct

SEQ ID NO: 5729934 - DNA, 25 bp, Homo sapien
cctgcggggagaccaccgccgccca

SEQ ID NO: 5729935 - DNA, 25 bp, Homo sapien
ccttccgaggcaggaacagcacccg

SEQ ID NO: 5729936 - DNA, 25 bp, Homo sapien
cccacaacgccttcccagtcatcag

SEQ ID NO: 5729937 - DNA, 25 bp, Homo sapien
gtgaacgttgtagtaaacggcagct

SEQ ID NO: 5729938 - DNA, 25 bp, Homo sapien
acccgccgccgccgcagccaccgcc

SEQ ID NO: 5729939 - DNA, 25 bp, Homo sapien
gggccggaccaagcaggccccgcct

SEQ ID NO: 5729940 - DNA, 25 bp, Homo sapien
ataagagtaaatgactgtgaacgtt

SEQ ID NO: 5729941 - DNA, 25 bp, Homo sapien
actactgacggcaggggctgctgcc

SEQ ID NO: 5729942 - DNA, 25 bp, Homo sapien
tttgtgaactttgtccttcacctct

SEQ ID NO: 5729943 - DNA, 25 bp, Homo sapien
agataagtaagcagagacagtgtta

SEQ ID NO: 5729944 - DNA, 25 bp, Homo sapien
actttgtccttcacctcttttcgtg

SEQ ID NO: 5729945 - DNA, 25 bp, Homo sapien
gccgccgccgcagccaccgccgccg

SEQ ID NO: 5729946 - DNA, 25 bp, Homo sapien
gaagaagaggctgtgcattaaattt

SEQ ID NO: 5729947 - DNA, 25 bp, Homo sapien
ctgggaagaggcctgtggcagcgcc

SEQ ID NO: 5729948 - DNA, 25 bp, Homo sapien
actgcatggactcaagcgagctgga

SEQ ID NO: 5729949 - DNA, 25 bp, Homo sapien
caatggatcccatcacgggagtcgg

SEQ ID NO: 5729950 - DNA, 25 bp, Homo sapien
ctcctgcagttgctggatggatagg

SEQ ID NO: 5729951 - DNA, 25 bp, Homo sapien
acaggtaatgccaggggcccttcac

SEQ ID NO: 5729952 - DNA, 25 bp, Homo sapien
ctaggaattgagagcgtttctgtct

SEQ ID NO: 5729953 - DNA, 25 bp, Homo sapien
gaactgaacagcatggggatctggt

SEQ ID NO: 5729954 - DNA, 25 bp, Homo sapien
gagactgggcagctaagtgggcgca

SEQ ID NO: 5729955 - DNA, 25 bp, Homo sapien
caaggttaccagatacctgtgtttc

SEQ ID NO: 5729956 - DNA, 25 bp, Homo sapien
ggaacagcacccggacggactacga

SEQ ID NO: 5729957 - DNA, 25 bp, Homo sapien
cgagctggagccatcttctccatag

SEQ ID NO: 5729958 - DNA, 25 bp, Homo sapien
acagacagcagatggtgtggatgct

SEQ ID NO: 5729959 - DNA, 25 bp, Homo sapien
gcccagactactgacggcaggggct

SEQ ID NO: 5729960 - DNA, 25 bp, Homo sapien
gtgtgtgtatatgtgtgtgtgtgca

SEQ ID NO: 5729961 - DNA, 25 bp, Homo sapien
tggacaaggaagacccttagggatg

SEQ ID NO: 5729962 - DNA, 25 bp, Homo sapien
ccagcggctcctaacgtgtctgtgt

SEQ ID NO: 5729963 - DNA, 25 bp, Homo sapien
ccgccgccgccgcagccaccgccgc

SEQ ID NO: 5729964 - DNA, 25 bp, Homo sapien
aaaagagtacgagtacagcttccgc

SEQ ID NO: 5729965 - DNA, 25 bp, Homo sapien
ctgagtggggctcgtgcaggagaac

SEQ ID NO: 5729966 - DNA, 25 bp, Homo sapien
aagtcaaagacctctcagaagcctt

SEQ ID NO: 5729967 - DNA, 25 bp, Homo sapien
gtgtgtatatgtgtgtgtgtgcacg

SEQ ID NO: 5729968 - DNA, 25 bp, Homo sapien
aagggtcttggcctcatccctcagg

SEQ ID NO: 5729969 - DNA, 25 bp, Homo sapien
agctggagccatcttctccatagca

SEQ ID NO: 5729970 - DNA, 25 bp, Homo sapien
tgttcataaccatgactaatctgtg

SEQ ID NO: 5729971 - DNA, 25 bp, Homo sapien
ccaagaaatcatgactcatctcaac

SEQ ID NO: 5729972 - DNA, 25 bp, Homo sapien
ggccacttctgcccacttcattagg

SEQ ID NO: 5729973 - DNA, 25 bp, Homo sapien
gtggtagcttttaggctgctcctaa

SEQ ID NO: 5729974 - DNA, 25 bp, Homo sapien
gtgtgtgctgtagtgaccagcggct

SEQ ID NO: 5729975 - DNA, 25 bp, Homo sapien
gctgctcctaacccaccatttattg

SEQ ID NO: 5729976 - DNA, 25 bp, Homo sapien
gaaatgtgaagggtcttggcctcat

SEQ ID NO: 5729977 - DNA, 25 bp, Homo sapien
ctgtgtgtgctgtagtgaccagcgg

SEQ ID NO: 5729978 - DNA, 25 bp, Homo sapien
taccaagaaatcatgactcatctca

SEQ ID NO: 5729979 - DNA, 25 bp, Homo sapien
ctgccaccttccgaggcaggaacag

SEQ ID NO: 5729980 - DNA, 25 bp, Homo sapien
atgctgacctctggaaagacggctt

SEQ ID NO: 5729981 - DNA, 25 bp, Homo sapien
gtgtgtataagcccacctgagtggg

SEQ ID NO: 5729982 - DNA, 25 bp, Homo sapien
tcatcagctgcctccaccccagccc

SEQ ID NO: 5729983 - DNA, 25 bp, Homo sapien
ccacgggattcaacggaagctgcga

SEQ ID NO: 5729984 - DNA, 25 bp, Homo sapien
atgaccagttgtcctccaaaaacct

SEQ ID NO: 5729985 - DNA, 25 bp, Homo sapien
tttgtatgccatatcagcaatggat

SEQ ID NO: 5729986 - DNA, 25 bp, Homo sapien
gccttttatgatttcagagaagttt

SEQ ID NO: 5729987 - DNA, 25 bp, Homo sapien
cccttggaaatgtgaagggtcttgg

SEQ ID NO: 5729988 - DNA, 25 bp, Homo sapien
acccggacggactacgagtaccagc

SEQ ID NO: 5729989 - DNA, 25 bp, Homo sapien
agccctccctcccacactgccccag

SEQ ID NO: 5729990 - DNA, 25 bp, Homo sapien
tagtagatatgaagctcattgacat

SEQ ID NO: 5729991 - DNA, 25 bp, Homo sapien
caccgccgccgccgccccagcgggg

SEQ ID NO: 5729992 - DNA, 25 bp, Homo sapien
tcggaaccgagccccgacaggctat

SEQ ID NO: 5729993 - DNA, 25 bp, Homo sapien
cctgtctgcaaggacgcagaataag

SEQ ID NO: 5729994 - DNA, 25 bp, Homo sapien
ccctcctgcagttgctggatggata

SEQ ID NO: 5729995 - DNA, 25 bp, Homo sapien
cgcagccgccaggctcccgcccagc

SEQ ID NO: 5729996 - DNA, 25 bp, Homo sapien
ggatgacgtccccgctgcatattta

SEQ ID NO: 5729997 - DNA, 25 bp, Homo sapien
aagcagagacagtgttaaggacgag

SEQ ID NO: 5729998 - DNA, 25 bp, Homo sapien
ggatcccatcacgggagtcggggtg

SEQ ID NO: 5729999 - DNA, 25 bp, Homo sapien
agagcgcagccgccaggctcccgcc

SEQ ID NO: 5730000 - DNA, 25 bp, Homo sapien
attaaatttattccacgggattcaa

SEQ ID NO: 5730001 - DNA, 25 bp, Homo sapien
ccctggggacattgttcataaccat

SEQ ID NO: 5730002 - DNA, 25 bp, Homo sapien
cagagaagttttcttgtgttccaga

SEQ ID NO: 5730003 - DNA, 25 bp, Homo sapien
acaaactgcatggactcaagcgagc

SEQ ID NO: 5730004 - DNA, 25 bp, Homo sapien
cttagcataagagtaaatgactgtg

SEQ ID NO: 5730005 - DNA, 25 bp, Homo sapien
gtgtgtgcacgcacatgcgtgtgta

SEQ ID NO: 5730006 - DNA, 25 bp, Homo sapien
cgacaggctatgacgtagttgcaca

SEQ ID NO: 5730007 - DNA, 25 bp, Homo sapien
gccgcagccaccgccgccgccgccc

SEQ ID NO: 5730008 - DNA, 25 bp, Homo sapien
tttcgtgccctggttgtgagattgc

SEQ ID NO: 5730009 - DNA, 25 bp, Homo sapien
atgactgtgaacgttgtagtaaacg

SEQ ID NO: 5730010 - DNA, 25 bp, Homo sapien
tactgacggcaggggctgctgcccc

SEQ ID NO: 5730011 - DNA, 25 bp, Homo sapien
gatcatgggccggaccaagcaggcc

SEQ ID NO: 5730012 - DNA, 25 bp, Homo sapien
tcccgcccagccccaccaggtgtca

SEQ ID NO: 5730013 - DNA, 25 bp, Homo sapien
ccagccccaccaggtgtcagcagat

SEQ ID NO: 5730014 - DNA, 25 bp, Homo sapien
ccagaaagtatgcagccctttgatc

SEQ ID NO: 5730015 - DNA, 25 bp, Homo sapien
tgtgagattgcctctaacaggtaat

SEQ ID NO: 5730016 - DNA, 25 bp, Homo sapien
cggctcctaacgtgtctgtgtgatg

SEQ ID NO: 5730017 - DNA, 25 bp, Homo sapien
ctgtccctggacaaggaagaccctt

SEQ ID NO: 5730018 - DNA, 25 bp, Homo sapien
gaaatcgaaaaagagtacgagtaca

SEQ ID NO: 5730019 - DNA, 25 bp, Homo sapien
tctgtgtgatgaccagttgtcctcc

SEQ ID NO: 5730020 - DNA, 25 bp, Homo sapien
ctgcttctgtccctggacaaggaag

SEQ ID NO: 5730021 - DNA, 25 bp, Homo sapien
aggggctgctgcccccgcctcctcc

SEQ ID NO: 5730022 - DNA, 25 bp, Homo sapien
gtacttttctccacgagccctctgg

SEQ ID NO: 5730023 - DNA, 25 bp, Homo sapien
aggctcccgcccagccccaccaggt

SEQ ID NO: 5730024 - DNA, 25 bp, Homo sapien
cgagtaccagcactccaatttgtat

SEQ ID NO: 5730025 - DNA, 25 bp, Homo sapien
tattgccttctgagaggtgggtgag

SEQ ID NO: 5730026 - DNA, 25 bp, Homo sapien
gagtacagcttccgcacagagcaga

SEQ ID NO: 5730027 - DNA, 25 bp, Homo sapien
acgagccctctggccactgtgggag

SEQ ID NO: 5730028 - DNA, 25 bp, Homo sapien
ccatatcagcaatggatggtgtgcc

SEQ ID NO: 5730029 - DNA, 25 bp, Homo sapien
acgagtacagcttccgcacagagca

SEQ ID NO: 5730030 - DNA, 25 bp, Homo sapien
tggtgtctgtggtagcttttaggct

SEQ ID NO: 5730031 - DNA, 25 bp, Homo sapien
tcaacccacaacgccttcccagtca

SEQ ID NO: 5730032 - DNA, 25 bp, Homo sapien
aggctgctcctaacccaccatttat

SEQ ID NO: 5730033 - DNA, 25 bp, Homo sapien
tggctcaaacctaggaattgagagc

SEQ ID NO: 5730034 - DNA, 25 bp, Homo sapien
cagaataagcagtgagggcggctgc

SEQ ID NO: 5730035 - DNA, 25 bp, Homo sapien
gtgccctggttgtgagattgcctct

SEQ ID NO: 5730036 - DNA, 25 bp, Homo sapien
ttccgaggcaggaacagcacccgga

SEQ ID NO: 5730037 - DNA, 25 bp, Homo sapien
ctggccacttctgcccacttcatta

SEQ ID NO: 5730038 - DNA, 25 bp, Homo sapien
aacagcatggggatctggtatcgaa

SEQ ID NO: 5730039 - DNA, 25 bp, Homo sapien
agactactgacggcaggggctgctg

SEQ ID NO: 5730040 - DNA, 25 bp, Homo sapien
ttctgtccctggacaaggaagaccc

SEQ ID NO: 5730041 - DNA, 25 bp, Homo sapien
cttttatgatttcagagaagttttc

SEQ ID NO: 5730042 - DNA, 25 bp, Homo sapien
tatttaaatccaaggttaccagata

SEQ ID NO: 5730043 - DNA, 25 bp, Homo sapien
gttggtgtctgtggtagcttttagg

SEQ ID NO: 5730044 - DNA, 25 bp, Homo sapien
ctcttttcgtgccctggttgtgaga

SEQ ID NO: 5730045 - DNA, 25 bp, Homo sapien
cagcccccactgatgccgctgcagg

SEQ ID NO: 5730046 - DNA, 25 bp, Homo sapien
acgttgtagtaaacggcagcttaag

SEQ ID NO: 5730047 - DNA, 25 bp, Homo sapien
gccgcccgggcgatgagaagctgct

SEQ ID NO: 5730048 - DNA, 25 bp, Homo sapien
acctctggaaagacggcttatttaa

SEQ ID NO: 5730049 - DNA, 25 bp, Homo sapien
tttattgccttctgagaggtgggtg

SEQ ID NO: 5730050 - DNA, 25 bp, Homo sapien
gcccacctgagtggggctcgtgcag

SEQ ID NO: 5730051 - DNA, 25 bp, Homo sapien
cccgctgcatatttattcaaggtga

SEQ ID NO: 5730052 - DNA, 25 bp, Homo sapien
gcacatgcgtgtgtataagcccacc

SEQ ID NO: 5730053 - DNA, 25 bp, Homo sapien
caaggacgcagaataagcagtgagg

SEQ ID NO: 5730054 - DNA, 25 bp, Homo sapien
agctgcttctgcgtgagacggagcc

SEQ ID NO: 5730055 - DNA, 25 bp, Homo sapien
taccagatacctgtgtttcacaaga

SEQ ID NO: 5730056 - DNA, 25 bp, Homo sapien
caagcgagctggagccatcttctcc

SEQ ID NO: 5730057 - DNA, 25 bp, Homo sapien
aatccaaggttaccagatacctgtg

SEQ ID NO: 5730058 - DNA, 25 bp, Homo sapien
tggactcaagcgagctggagccatc

SEQ ID NO: 5730059 - DNA, 25 bp, Homo sapien
tgagattgcctctaacaggtaatgc

SEQ ID NO: 5730060 - DNA, 25 bp, Homo sapien
cagccaccgccgccgccgccccagc

SEQ ID NO: 5730061 - DNA, 25 bp, Homo sapien
cttatttaaatccaaggttaccaga

SEQ ID NO: 5730062 - DNA, 25 bp, Homo sapien
gcccctgtcgagctggggtcccagc

SEQ ID NO: 5730063 - DNA, 25 bp, Homo sapien
ctgggcagctaagtgggcgcatcct

SEQ ID NO: 5730064 - DNA, 25 bp, Homo sapien
gtgtgtgtgtgcacgcacatgcgtg

SEQ ID NO: 5730065 - DNA, 25 bp, Homo sapien
gggagagtacttttctccacgagcc

SEQ ID NO: 5730066 - DNA, 25 bp, Homo sapien
gcaggccccgcctcagtacacgttt

SEQ ID NO: 5730067 - DNA, 25 bp, Homo sapien
cctaacccaccatttattgccttct

SEQ ID NO: 5730068 - DNA, 25 bp, Homo sapien
gacgtccccgctgcatatttattca

SEQ ID NO: 5730069 - DNA, 25 bp, Homo sapien
gacattcggatcatgggccggacca

SEQ ID NO: 5730070 - DNA, 25 bp, Homo sapien
cacagcccccactgatgccgctgca

SEQ ID NO: 5730071 - DNA, 25 bp, Homo sapien
aactgaggcatgaaactctggctca

SEQ ID NO: 5730072 - DNA, 25 bp, Homo sapien
aagcccacctgagtggggctcgtgc

SEQ ID NO: 5730073 - DNA, 25 bp, Homo sapien
gggagccctgtctgcaaggacgcag

SEQ ID NO: 5730074 - DNA, 25 bp, Homo sapien
cagcttaagataagtaagcagagac

SEQ ID NO: 5730075 - DNA, 25 bp, Homo sapien
cttctgagaggtgggtgaggacaag

SEQ ID NO: 5730076 - DNA, 25 bp, Homo sapien
tgcgatttgtgacattcggatcatg

SEQ ID NO: 5730077 - DNA, 25 bp, Homo sapien
catcaaggacacactgcctgtgggc

SEQ ID NO: 5730078 - DNA, 25 bp, Homo sapien
tgttaaggacgagttggtgtctgtg

SEQ ID NO: 5730079 - DNA, 25 bp, Homo sapien
gtcttggcctcatccctcaggtccc

SEQ ID NO: 5730080 - DNA, 25 bp, Homo sapien
gcccccatgactgggaagaggcctg

SEQ ID NO: 5730081 - DNA, 25 bp, Homo sapien
cctttgatctcctgggaatcaccat

SEQ ID NO: 5730082 - DNA, 25 bp, Homo sapien
gccctttgatctcctgggaatcacc

SEQ ID NO: 5730083 - DNA, 25 bp, Homo sapien
aggaattgagagcgtttctgtcttt

SEQ ID NO: 5730084 - DNA, 25 bp, Homo sapien
cctcctgccgcctccgccagccctc

SEQ ID NO: 5730085 - DNA, 25 bp, Homo sapien
tccctcaggtccccccacagcactt

SEQ ID NO: 5730086 - DNA, 25 bp, Homo sapien
agctcattgacatcaaggacacact

SEQ ID NO: 5730087 - DNA, 25 bp, Homo sapien
cacctgcggggagaccaccgccgcc

SEQ ID NO: 5730088 - DNA, 25 bp, Homo sapien
gccaccgccgccgccgccccagcgg

SEQ ID NO: 5730089 - DNA, 25 bp, Homo sapien
agggacaccaggaagaggacaaact

SEQ ID NO: 5730090 - DNA, 25 bp, Homo sapien
acgtcaatggatcccatcacgggag

SEQ ID NO: 5730091 - DNA, 25 bp, Homo sapien
accatcaaatctctagcagaaatcg

SEQ ID NO: 5730092 - DNA, 25 bp, Homo sapien
ttctgcgtgagacggagccgggacc

SEQ ID NO: 5730093 - DNA, 25 bp, Homo sapien
gtacttggcaagggaagtccactgt

SEQ ID NO: 5730094 - DNA, 25 bp, Homo sapien
gcaggggctgctgcccccgcctcct

SEQ ID NO: 5730095 - DNA, 25 bp, Homo sapien
atcctgtcttcagctggcctgactg

SEQ ID NO: 5730096 - DNA, 25 bp, Homo sapien
gcacgcacatgcgtgtgtataagcc

SEQ ID NO: 5730097 - DNA, 25 bp, Homo sapien
gcagtggtgtgggagccctgtctgc

SEQ ID NO: 5730098 - DNA, 25 bp, Homo sapien
catcaaatctctagcagaaatcgaa

SEQ ID NO: 5730099 - DNA, 25 bp, Homo sapien
ccacttctgcccacttcattagggt

SEQ ID NO: 5730100 - DNA, 25 bp, Homo sapien
cccccaaccttcccaggcacatctc

SEQ ID NO: 5730101 - DNA, 25 bp, Homo sapien
agaagccttgccagaaacgtcaatg

SEQ ID NO: 5730102 - DNA, 25 bp, Homo sapien
cacactgccccagcagggctggccc

SEQ ID NO: 5730103 - DNA, 25 bp, Homo sapien
ggctcccacagcccccactgatgcc

SEQ ID NO: 5730104 - DNA, 25 bp, Homo sapien
acacactgcctgtgggcttcatccc

SEQ ID NO: 5730105 - DNA, 25 bp, Homo sapien
agaggtgggtgaggacaagcatgtg

SEQ ID NO: 5730106 - DNA, 25 bp, Homo sapien
cagccctttgatctcctgggaatca

SEQ ID NO: 5730107 - DNA, 25 bp, Homo sapien
gagttggtgtctgtggtagctttta

SEQ ID NO: 5730108 - DNA, 25 bp, Homo sapien
agaagaggctgtgcattaaatttat

SEQ ID NO: 5730109 - DNA, 25 bp, Homo sapien
ctgcccccgcctcctcctgccgcct

SEQ ID NO: 5730110 - DNA, 25 bp, Homo sapien
cccaaccttcccaggcacatctccc

SEQ ID NO: 5730111 - DNA, 25 bp, Homo sapien
ccacctgagtggggctcgtgcagga

SEQ ID NO: 5730112 - DNA, 25 bp, Homo sapien
tacacgtttattggggaactgaaca

SEQ ID NO: 5730113 - DNA, 25 bp, Homo sapien
aaggggctcccacagcccccactga

SEQ ID NO: 5730114 - DNA, 25 bp, Homo sapien
gtggatgctgacctctggaaagacg

SEQ ID NO: 5730115 - DNA, 25 bp, Homo sapien
gcattaaatttattccacgggattc

SEQ ID NO: 5730116 - DNA, 25 bp, Homo sapien
ctggggacattgttcataaccatga

SEQ ID NO: 5730117 - DNA, 25 bp, Homo sapien
tctggctcaaacctaggaattgaga

SEQ ID NO: 5730118 - DNA, 25 bp, Homo sapien
gtacgagtacagcttccgcacagag

SEQ ID NO: 5730119 - DNA, 25 bp, Homo sapien
ggtggtggcttctcggaaccgagcc

SEQ ID NO: 5730120 - DNA, 25 bp, Homo sapien
accttcccaggcacatctccctaac

SEQ ID NO: 5730121 - DNA, 25 bp, Homo sapien
gcgccgcccgggcgatgagaagctg

SEQ ID NO: 5730122 - DNA, 25 bp, Homo sapien
gcttctgtccctggacaaggaagac

SEQ ID NO: 5730123 - DNA, 25 bp, Homo sapien
agatatgaagctcattgacatcaag

SEQ ID NO: 5730124 - DNA, 25 bp, Homo sapien
ggacggactacgagtaccagcactc

SEQ ID NO: 5730125 - DNA, 25 bp, Homo sapien
gaagctcattgacatcaaggacaca

SEQ ID NO: 5730126 - DNA, 25 bp, Homo sapien
ttgtcctccaaaaacctcactcctg

SEQ ID NO: 5730127 - DNA, 25 bp, Homo sapien
cccagcagggctggcccggagactg

SEQ ID NO: 5730128 - DNA, 25 bp, Homo sapien
tcaggagacggtggacacacaggaa

SEQ ID NO: 5730129 - DNA, 25 bp, Homo sapien
atgactcatctcaacccacaacgcc

SEQ ID NO: 5730130 - DNA, 25 bp, Homo sapien
gaggctgtgcattaaatttattcca

SEQ ID NO: 5730131 - DNA, 25 bp, Homo sapien
cttcccactactgcttctgtccctg

SEQ ID NO: 5730132 - DNA, 25 bp, Homo sapien
ttagggtttgtgaactttgtccttc

SEQ ID NO: 5730133 - DNA, 25 bp, Homo sapien
atacctgtgtttcacaagatcattt

SEQ ID NO: 5730134 - DNA, 25 bp, Homo sapien
tgtcgagctggggtcccagccaggt

SEQ ID NO: 5730135 - DNA, 25 bp, Homo sapien
agatcattttccaaagaaaatagtc

SEQ ID NO: 5730136 - DNA, 25 bp, Homo sapien
actacgagtaccagcactccaattt

SEQ ID NO: 5730137 - DNA, 25 bp, Homo sapien
ttgccttctgagaggtgggtgagga

SEQ ID NO: 5730138 - DNA, 25 bp, Homo sapien
ttggcaagggaagtccactgtgtga

SEQ ID NO: 5730139 - DNA, 25 bp, Homo sapien
cttcatcccaattcaggagacggtg

SEQ ID NO: 5730140 - DNA, 25 bp, Homo sapien
caacggaagctgcgatttgtgacat

SEQ ID NO: 5730141 - DNA, 25 bp, Homo sapien
gtgtgtgtgtgtgtgtatatgtgtg

SEQ ID NO: 5730142 - DNA, 25 bp, Homo sapien
gtatatgtgtgtgtgtgcacgcaca

SEQ ID NO: 5730143 - DNA, 25 bp, Homo sapien
tctggccactgtgggagggaaggac

SEQ ID NO: 5730144 - DNA, 25 bp, Homo sapien
tccatagcattacggacttagcata

SEQ ID NO: 5730145 - DNA, 25 bp, Homo sapien
ctccacgagccctctggccactgtg

SEQ ID NO: 5730146 - DNA, 25 bp, Homo sapien
cttgccagaaacgtcaatggatccc

SEQ ID NO: 5730147 - DNA, 25 bp, Homo sapien
aggacgcagaataagcagtgagggc

SEQ ID NO: 5730148 - DNA, 25 bp, Homo sapien
cgcctccgccagccctccctcccac

SEQ ID NO: 5730149 - DNA, 25 bp, Homo sapien
ctgaggcatgaaactctggctcaaa

SEQ ID NO: 5730150 - DNA, 25 bp, Homo sapien
ccagaaacgtcaatggatcccatca

SEQ ID NO: 5730151 - DNA, 25 bp, Homo sapien
gcacagacagcagatggtgtggatg

SEQ ID NO: 5730152 - DNA, 25 bp, Homo sapien
tccaaggttaccagatacctgtgtt

SEQ ID NO: 5730153 - DNA, 25 bp, Homo sapien
ggcagcttaagataagtaagcagag

SEQ ID NO: 5730154 - DNA, 25 bp, Homo sapien
catgcctgaagtcaaagacctctca

SEQ ID NO: 5730155 - DNA, 25 bp, Homo sapien
ggagaactgaggcatgaaactctgg

SEQ ID NO: 5730156 - DNA, 25 bp, Homo sapien
atgagaagctgcttctgcgtgagac

SEQ ID NO: 5730157 - DNA, 25 bp, Homo sapien
ctgcttctgcgtgagacggagccgg

SEQ ID NO: 5730158 - DNA, 25 bp, Homo sapien
ttctccacgagccctctggccactg

SEQ ID NO: 5730159 - DNA, 25 bp, Homo sapien
acaggaagtggcttttaggaagaag

SEQ ID NO: 5730160 - DNA, 25 bp, Homo sapien
tggggtcccagccaggtgcccccgc

SEQ ID NO: 5730161 - DNA, 25 bp, Homo sapien
tggtgtgggagccctgtctgcaagg

SEQ ID NO: 5730162 - DNA, 25 bp, Homo sapien
aaggacgagttggtgtctgtggtag

SEQ ID NO: 5730163 - DNA, 25 bp, Homo sapien
aaatctctagcagaaatcgaaaaag

SEQ ID NO: 5730164 - DNA, 25 bp, Homo sapien
tttattggggaactgaacagcatgg

SEQ ID NO: 5730165 - DNA, 25 bp, Homo sapien
ccacgagccctctggccactgtggg

SEQ ID NO: 5730166 - DNA, 25 bp, Homo sapien
tcaaggtgactcttgtacttggcaa

SEQ ID NO: 5730167 - DNA, 25 bp, Homo sapien
tgtgttccagaaagtatgcagccct

SEQ ID NO: 5730168 - DNA, 25 bp, Homo sapien
ctgtgtgtgtgtgtgtgtgtgtgtg

SEQ ID NO: 5730169 - DNA, 25 bp, Homo sapien
acttggcaagggaagtccactgtgt

SEQ ID NO: 5730170 - DNA, 25 bp, Homo sapien
agccatcttctccatagcattacgg

SEQ ID NO: 5730171 - DNA, 25 bp, Homo sapien
ggtgcccccgcatgccctcctgcag

SEQ ID NO: 5730172 - DNA, 25 bp, Homo sapien
gagtacttttctccacgagccctct

SEQ ID NO: 5730173 - DNA, 25 bp, Homo sapien
cacaagatcattttccaaagaaaat

SEQ ID NO: 5730174 - DNA, 25 bp, Homo sapien
tggcttttaggaagaagaggctgtg

SEQ ID NO: 5730175 - DNA, 25 bp, Homo sapien
acggaagctgcgatttgtgacattc

SEQ ID NO: 5730176 - DNA, 25 bp, Homo sapien
cccacactgccccagcagggctggc

SEQ ID NO: 5730177 - DNA, 25 bp, Homo sapien
tagcataagagtaaatgactgtgaa

SEQ ID NO: 5730178 - DNA, 25 bp, Homo sapien
ccccacagcacttcccactactgct

SEQ ID NO: 5730179 - DNA, 25 bp, Homo sapien
gagcagagcgcagccgccaggctcc

SEQ ID NO: 5730180 - DNA, 25 bp, Homo sapien
taccagcactccaatttgtatgcca

SEQ ID NO: 5730181 - DNA, 25 bp, Homo sapien
aaccgagccccgacaggctatgacg

SEQ ID NO: 5730182 - DNA, 25 bp, Homo sapien
gccgctgcaggcccctgtcgagctg

SEQ ID NO: 5730183 - DNA, 25 bp, Homo sapien
gacgcagaataagcagtgagggcgg

SEQ ID NO: 5730184 - DNA, 25 bp, Homo sapien
tcagcagatcccgcagtcctgagga

SEQ ID NO: 5730185 - DNA, 25 bp, Homo sapien
cttcctgccaccttccgaggcagga

SEQ ID NO: 5730186 - DNA, 25 bp, Homo sapien
gtgggtgaggacaagcatgtgcctg

SEQ ID NO: 5730187 - DNA, 25 bp, Homo sapien
agtcatctggggaacgtgttagtag

SEQ ID NO: 5730188 - DNA, 25 bp, Homo sapien
accctaggaggctcagaggcagtgg

SEQ ID NO: 5730189 - DNA, 25 bp, Homo sapien
aatcgaaaaagagtacgagtacagc

SEQ ID NO: 5730190 - DNA, 25 bp, Homo sapien
cgtgcaggagaactgaggcatgaaa

SEQ ID NO: 5730191 - DNA, 25 bp, Homo sapien
tgacgtagttgcacagacagcagat

SEQ ID NO: 5730192 - DNA, 25 bp, Homo sapien
ccccatgactgggaagaggcctgtg

SEQ ID NO: 5730193 - DNA, 25 bp, Homo sapien
gtgagacggagccgggacccgccgc

SEQ ID NO: 5730194 - DNA, 25 bp, Homo sapien
ggctcgtgcaggagaactgaggcat

SEQ ID NO: 5730195 - DNA, 25 bp, Homo sapien
ctccaatttgtatgccatatcagca

SEQ ID NO: 5730196 - DNA, 25 bp, Homo sapien
ctcccacagcccccactgatgccgc

SEQ ID NO: 5730197 - DNA, 25 bp, Homo sapien
aaacgtcaatggatcccatcacggg

SEQ ID NO: 5730198 - DNA, 25 bp, Homo sapien
gtgctgtagtgaccagcggctccta

SEQ ID NO: 5730199 - DNA, 25 bp, Homo sapien
agcccccaaccttcccaggcacatc

SEQ ID NO: 5730200 - DNA, 25 bp, Homo sapien
cctccaaaaacctcactcctggcag

SEQ ID NO: 5730201 - DNA, 25 bp, Homo sapien
caaccttcccaggcacatctcccta

SEQ ID NO: 5730202 - DNA, 25 bp, Homo sapien
tgagggcggctgcaggagaggaagg

SEQ ID NO: 5730203 - DNA, 25 bp, Homo sapien
ccaatttgtatgccatatcagcaat

SEQ ID NO: 5730204 - DNA, 25 bp, Homo sapien
tgtagtaaacggcagcttaagataa

SEQ ID NO: 5730205 - DNA, 25 bp, Homo sapien
ctgtggtagcttttaggctgctcct

SEQ ID NO: 5730206 - DNA, 25 bp, Homo sapien
tcagtacacgtttattggggaactg

SEQ ID NO: 5730207 - DNA, 25 bp, Homo sapien
ctctagcagaaatcgaaaaagagta

SEQ ID NO: 5730208 - DNA, 25 bp, Homo sapien
gacggtggacacacaggaagtggct

SEQ ID NO: 5730209 - DNA, 25 bp, Homo sapien
ccccaccaggtgtcagcagatcccg

SEQ ID NO: 5730210 - DNA, 25 bp, Homo sapien
ggcgccggctcctgccgcctgggcc

SEQ ID NO: 5730211 - DNA, 25 bp, Homo sapien
gcctccctggggacattgttcataa

SEQ ID NO: 5730212 - DNA, 25 bp, Homo sapien
tgcggggagaccaccgccgcccaga

SEQ ID NO: 5730213 - DNA, 25 bp, Homo sapien
tggcctcatccctcaggtcccccca

SEQ ID NO: 5730214 - DNA, 25 bp, Homo sapien
gcatggggatctggtatcgaatggg

SEQ ID NO: 5730215 - DNA, 25 bp, Homo sapien
gccccgcctcagtacacgtttattg

SEQ ID NO: 5730216 - DNA, 25 bp, Homo sapien
agcagaaatcgaaaaagagtacgag

SEQ ID NO: 5730217 - DNA, 25 bp, Homo sapien
cgctgcaggcccctgtcgagctggg

SEQ ID NO: 5730218 - DNA, 25 bp, Homo sapien
gactcaagcgagctggagccatctt

SEQ ID NO: 5730219 - DNA, 25 bp, Homo sapien
cctcaggtccccccacagcacttcc

SEQ ID NO: 5730220 - DNA, 25 bp, Homo sapien
tgtcttcagctggcctgactgacac

SEQ ID NO: 5730221 - DNA, 25 bp, Homo sapien
actgtgtgattgtctgtattcttaa

SEQ ID NO: 5730222 - DNA, 25 bp, Homo sapien
gtttcacaagatcattttccaaaga

SEQ ID NO: 5730223 - DNA, 25 bp, Homo sapien
ctcctcctgccgcctccgccagccc

SEQ ID NO: 5730224 - DNA, 25 bp, Homo sapien
tgaactttgtccttcacctcttttc

SEQ ID NO: 5730225 - DNA, 25 bp, Homo sapien
ggcatgaaactctggctcaaaccta

SEQ ID NO: 5730226 - DNA, 25 bp, Homo sapien
ttgtacttggcaagggaagtccact

SEQ ID NO: 5730227 - DNA, 25 bp, Homo sapien
tccgccagccctccctcccacactg

SEQ ID NO: 5730228 - DNA, 25 bp, Homo sapien
gaagttttcttgtgttccagaaagt

SEQ ID NO: 5730229 - DNA, 25 bp, Homo sapien
tcctaacgtgtctgtgtgatgacca

SEQ ID NO: 5730230 - DNA, 25 bp, Homo sapien
tgcagttgctggatggatagggaca

SEQ ID NO: 5730231 - DNA, 25 bp, Homo sapien
agttgcacagacagcagatggtgtg

SEQ ID NO: 5730232 - DNA, 25 bp, Homo sapien
caagatcattttccaaagaaaatag

SEQ ID NO: 5730233 - DNA, 25 bp, Homo sapien
atgacgtccccgctgcatatttatt

SEQ ID NO: 5730234 - DNA, 25 bp, Homo sapien
agaaacgtcaatggatcccatcacg

SEQ ID NO: 5730235 - DNA, 25 bp, Homo sapien
agggctggcccggagactgggcagc

SEQ ID NO: 5730236 - DNA, 25 bp, Homo sapien
gccgccccagcggggaacagaccag

SEQ ID NO: 5730237 - DNA, 25 bp, Homo sapien
atctcctgggaatcaccatcaaatc

SEQ ID NO: 5730238 - DNA, 25 bp, Homo sapien
gcggcgccggctcctgccgcctggg

SEQ ID NO: 5730239 - DNA, 25 bp, Homo sapien
gtcccagccaggtgcccccgcatgc

SEQ ID NO: 5730240 - DNA, 25 bp, Homo sapien
gcagagctctggccacttctgccca

SEQ ID NO: 5730241 - DNA, 25 bp, Homo sapien
tcactcctggcaggtgggggcagca

SEQ ID NO: 5730242 - DNA, 25 bp, Homo sapien
ggaagaggacaaactgcatggactc

SEQ ID NO: 5730243 - DNA, 25 bp, Homo sapien
gttagtagatatgaagctcattgac

SEQ ID NO: 5730244 - DNA, 25 bp, Homo sapien
tcctgaggagccagcggccacctgc

SEQ ID NO: 5730245 - DNA, 25 bp, Homo sapien
gcagagtaccaagaaatcatgactc

SEQ ID NO: 5730246 - DNA, 25 bp, Homo sapien
ccaccgccgcccagactactgacgg

SEQ ID NO: 5730247 - DNA, 25 bp, Homo sapien
gctcctaacgtgtctgtgtgatgac

SEQ ID NO: 5730248 - DNA, 25 bp, Homo sapien
tgctggatggatagggacaccagga

SEQ ID NO: 5730249 - DNA, 25 bp, Homo sapien
ctagcagaaatcgaaaaagagtacg

SEQ ID NO: 5730250 - DNA, 25 bp, Homo sapien
agcaggagggcagagggcagagctc

SEQ ID NO: 5730251 - DNA, 25 bp, Homo sapien
gcagcaggagggcagagggcagagc

SEQ ID NO: 5730252 - DNA, 25 bp, Homo sapien
ccaggctcccgcccagccccaccag

SEQ ID NO: 5730253 - DNA, 25 bp, Homo sapien
gtgtatatgtgtgtgtgtgcacgca

SEQ ID NO: 5730254 - DNA, 25 bp, Homo sapien
atggatcccatcacgggagtcgggg

SEQ ID NO: 5730255 - DNA, 25 bp, Homo sapien
cgggcgatgagaagctgcttctgcg

SEQ ID NO: 5730256 - DNA, 25 bp, Homo sapien
cagcgccgctggaccctaggaggct

SEQ ID NO: 5730257 - DNA, 25 bp, Homo sapien
tatgatttcagagaagttttcttgt

SEQ ID NO: 5730258 - DNA, 25 bp, Homo sapien
gagacggtggacacacaggaagtgg

SEQ ID NO: 5730259 - DNA, 25 bp, Homo sapien
gccgctggaccctaggaggctcaga

SEQ ID NO: 5730260 - DNA, 25 bp, Homo sapien
tctcagaagccttgccagaaacgtc

SEQ ID NO: 5730261 - DNA, 25 bp, Homo sapien
gcgtgtgtataagcccacctgagtg

SEQ ID NO: 5730262 - DNA, 25 bp, Homo sapien
cgccccagcggggaacagaccagtc

SEQ ID NO: 5730263 - DNA, 25 bp, Homo sapien
tgcctgtgggcttcatcccaattca

SEQ ID NO: 5730264 - DNA, 25 bp, Homo sapien
tgccctcctgcagttgctggatgga

SEQ ID NO: 5730265 - DNA, 25 bp, Homo sapien
gggaacgtgttagtagatatgaagc

SEQ ID NO: 5730266 - DNA, 25 bp, Homo sapien
agaactgaggcatgaaactctggct

SEQ ID NO: 5730267 - DNA, 25 bp, Homo sapien
gggcagcaggagggcagagggcaga

SEQ ID NO: 5730268 - DNA, 25 bp, Homo sapien
caaggaagacccttagggatgacgt

SEQ ID NO: 5730269 - DNA, 25 bp, Homo sapien
catggactcaagcgagctggagcca

SEQ ID NO: 5730270 - DNA, 25 bp, Homo sapien
aggttaccagatacctgtgtttcac

SEQ ID NO: 5730271 - DNA, 25 bp, Homo sapien
ctggcccggagactgggcagctaag

SEQ ID NO: 5730272 - DNA, 25 bp, Homo sapien
cagccaggtgcccccgcatgccctc

SEQ ID NO: 5730273 - DNA, 25 bp, Homo sapien
acagcacttcccactactgcttctg

SEQ ID NO: 5730274 - DNA, 25 bp, Homo sapien
taacaggtaatgccaggggcccttc

SEQ ID NO: 5730275 - DNA, 25 bp, Homo sapien
gtgggagccctgtctgcaaggacgc

SEQ ID NO: 5730276 - DNA, 25 bp, Homo sapien
tggatggtgtgccttttatgatttc

SEQ ID NO: 5730277 - DNA, 25 bp, Homo sapien
tgatttcagagaagttttcttgtgt

SEQ ID NO: 5730278 - DNA, 25 bp, Homo sapien
ctgccgcctccgccagccctccctc

SEQ ID NO: 5730279 - DNA, 25 bp, Homo sapien
ttccagaaagtatgcagccctttga

SEQ ID NO: 5730280 - DNA, 25 bp, Homo sapien
taaatttattccacgggattcaacg

SEQ ID NO: 5730281 - DNA, 25 bp, Homo sapien
gagtggggctcgtgcaggagaactg

SEQ ID NO: 5730282 - DNA, 25 bp, Homo sapien
aagccttgccagaaacgtcaatgga

SEQ ID NO: 5730283 - DNA, 25 bp, Homo sapien
atctggggaacgtgttagtagatat

SEQ ID NO: 5730284 - DNA, 25 bp, Homo sapien
tctgcaaggacgcagaataagcagt

SEQ ID NO: 5730285 - DNA, 25 bp, Homo sapien
tcagaggcagtggtgtgggagccct

SEQ ID NO: 5730286 - DNA, 25 bp, Homo sapien
tgccagaaacgtcaatggatcccat

SEQ ID NO: 5730287 - DNA, 25 bp, Homo sapien
ggaatcaccatcaaatctctagcag

SEQ ID NO: 5730288 - DNA, 25 bp, Homo sapien
aaactgcatggactcaagcgagctg

SEQ ID NO: 5730289 - DNA, 25 bp, Homo sapien
acggcagcttaagataagtaagcag

SEQ ID NO: 5730290 - DNA, 25 bp, Homo sapien
caagggaagtccactgtgtgattgt

SEQ ID NO: 5730291 - DNA, 25 bp, Homo sapien
cttccgcacagagcagagcgcagcc

SEQ ID NO: 5730292 - DNA, 25 bp, Homo sapien
ctcattgacatcaaggacacactgc

SEQ ID NO: 5730293 - DNA, 25 bp, Homo sapien
ctgccccagcagggctggcccggag

SEQ ID NO: 5730294 - DNA, 25 bp, Homo sapien
ccgccgccccagcggggaacagacc

SEQ ID NO: 5730295 - DNA, 25 bp, Homo sapien
tgccaggggcccttcactccgcccc

SEQ ID NO: 5730296 - DNA, 25 bp, Homo sapien
tgcagccctttgatctcctgggaat

SEQ ID NO: 5730297 - DNA, 25 bp, Homo sapien
tttatgatttcagagaagttttctt

SEQ ID NO: 5730298 - DNA, 25 bp, Homo sapien
ttgtgacattcggatcatgggccgg

SEQ ID NO: 5730299 - DNA, 25 bp, Homo sapien
gggcgcatcctgtcttcagctggcc

SEQ ID NO: 5730300 - DNA, 25 bp, Homo sapien
tgcctgaagtcaaagacctctcaga

SEQ ID NO: 5730301 - DNA, 25 bp, Homo sapien
ttaggaagaagaggctgtgcattaa

SEQ ID NO: 5730302 - DNA, 25 bp, Homo sapien
acgccttcccagtcatcagctgcct

SEQ ID NO: 5730303 - DNA, 25 bp, Homo sapien
agtcatcagctgcctccaccccagc

SEQ ID NO: 5730304 - DNA, 25 bp, Homo sapien
ccaccaggtgtcagcagatcccgca

SEQ ID NO: 5730305 - DNA, 25 bp, Homo sapien
tcatgactcatctcaacccacaacg

SEQ ID NO: 5730306 - DNA, 25 bp, Homo sapien
tggtgtgccttttatgatttcagag

SEQ ID NO: 5730307 - DNA, 25 bp, Homo sapien
acctaggaattgagagcgtttctgt

SEQ ID NO: 5730308 - DNA, 25 bp, Homo sapien
gtcctccaaaaacctcactcctggc

SEQ ID NO: 5730309 - DNA, 25 bp, Homo sapien
gggaacagaccagtccaccatgcct

SEQ ID NO: 5730310 - DNA, 25 bp, Homo sapien
ctaacgtgtctgtgtgatgaccagt

SEQ ID NO: 5730311 - DNA, 25 bp, Homo sapien
atgcgtgtgtataagcccacctgag

SEQ ID NO: 5730312 - DNA, 25 bp, Homo sapien
acgtagttgcacagacagcagatgg

SEQ ID NO: 5730313 - DNA, 25 bp, Homo sapien
aatgtgaagggtcttggcctcatcc

SEQ ID NO: 5730314 - DNA, 25 bp, Homo sapien
gtgacattcggatcatgggccggac

SEQ ID NO: 5730315 - DNA, 25 bp, Homo sapien
acctcttttcgtgccctggttgtga

SEQ ID NO: 5730316 - DNA, 25 bp, Homo sapien
gccaccttccgaggcaggaacagca

SEQ ID NO: 5730317 - DNA, 25 bp, Homo sapien
gtgtttcacaagatcattttccaaa

SEQ ID NO: 5730318 - DNA, 25 bp, Homo sapien
gggctgctgcccccgcctcctcctg

SEQ ID NO: 5730319 - DNA, 25 bp, Homo sapien
gtaagcagagacagtgttaaggacg

SEQ ID NO: 5730320 - DNA, 25 bp, Homo sapien
cactgtgggagggaaggacaagggt

SEQ ID NO: 5730321 - DNA, 25 bp, Homo sapien
ttagggatgacgtccccgctgcata

SEQ ID NO: 5730322 - DNA, 25 bp, Homo sapien
atttcagagaagttttcttgtgttc

SEQ ID NO: 5730323 - DNA, 25 bp, Homo sapien
tttaaatccaaggttaccagatacc

SEQ ID NO: 5730324 - DNA, 25 bp, Homo sapien
gcatgtgcctgtgtgtgtgtgtgtg

SEQ ID NO: 5730325 - DNA, 25 bp, Homo sapien
ccttcactccgcccccatgactggg

SEQ ID NO: 5730326 - DNA, 25 bp, Homo sapien
cctcactcctggcaggtgggggcag

SEQ ID NO: 5730327 - DNA, 25 bp, Homo sapien
gttgtgagattgcctctaacaggta

SEQ ID NO: 5730328 - DNA, 25 bp, Homo sapien
tcatctggggaacgtgttagtagat

SEQ ID NO: 5730329 - DNA, 25 bp, Homo sapien
gtccaccatgcctgaagtcaaagac

SEQ ID NO: 5730330 - DNA, 25 bp, Homo sapien
aggagaggaaggggctcccacagcc

SEQ ID NO: 5730331 - DNA, 25 bp, Homo sapien
aggcctgtggcagcgccgctggacc

SEQ ID NO: 5730332 - DNA, 25 bp, Homo sapien
aatgccaggggcccttcactccgcc

SEQ ID NO: 5730333 - DNA, 25 bp, Homo sapien
tccttcacctcttttcgtgccctgg

SEQ ID NO: 5730334 - DNA, 25 bp, Homo sapien
ttcaacggaagctgcgatttgtgac

SEQ ID NO: 5730335 - DNA, 25 bp, Homo sapien
gcataagagtaaatgactgtgaacg

SEQ ID NO: 5730336 - DNA, 25 bp, Homo sapien
cgcccgggcgatgagaagctgcttc

SEQ ID NO: 5730337 - DNA, 25 bp, Homo sapien
ttttctccacgagccctctggccac

SEQ ID NO: 5730338 - DNA, 25 bp, Homo sapien
ggacacacaggaagtggcttttagg

SEQ ID NO: 5730339 - DNA, 25 bp, Homo sapien
aagcagtgagggcggctgcaggaga

SEQ ID NO: 5730340 - DNA, 25 bp, Homo sapien
cccacagcccccactgatgccgctg

SEQ ID NO: 5730341 - DNA, 25 bp, Homo sapien
ctcctgggaatcaccatcaaatctc

SEQ ID NO: 5730342 - DNA, 25 bp, Homo sapien
ggtagcttttaggctgctcctaacc

SEQ ID NO: 5730343 - DNA, 25 bp, Homo sapien
cagccgccaggctcccgcccagccc

SEQ ID NO: 5730344 - DNA, 25 bp, Homo sapien
ctaacacttcctgccaccttccgag

SEQ ID NO: 5730345 - DNA, 25 bp, Homo sapien
tgccatatcagcaatggatggtgtg

SEQ ID NO: 5730346 - DNA, 25 bp, Homo sapien
ggctggcccggagactgggcagcta

SEQ ID NO: 5730347 - DNA, 25 bp, Homo sapien
ctggatggatagggacaccaggaag

SEQ ID NO: 5730348 - DNA, 25 bp, Homo sapien
ggaccctaggaggctcagaggcagt

SEQ ID NO: 5730349 - DNA, 25 bp, Homo sapien
gaggacaagcatgtgcctgtgtgtg

SEQ ID NO: 5730350 - DNA, 25 bp, Homo sapien
ccgcctcctcctgccgcctccgcca

SEQ ID NO: 5730351 - DNA, 25 bp, Homo sapien
ccctcccacactgccccagcagggc

SEQ ID NO: 5730352 - DNA, 25 bp, Homo sapien
ggacaagcatgtgcctgtgtgtgtg

SEQ ID NO: 5730353 - DNA, 25 bp, Homo sapien
gtagatatgaagctcattgacatca

SEQ ID NO: 5730354 - DNA, 25 bp, Homo sapien
cataaccatgactaatctgtgtgtg

SEQ ID NO: 5730355 - DNA, 25 bp, Homo sapien
caattcaggagacggtggacacaca

SEQ ID NO: 5730356 - DNA, 25 bp, Homo sapien
acaggctatgacgtagttgcacaga

SEQ ID NO: 5730357 - DNA, 25 bp, Homo sapien
gcctcatccctcaggtccccccaca

SEQ ID NO: 5730358 - DNA, 25 bp, Homo sapien
aagtaagcagagacagtgttaagga

SEQ ID NO: 5730359 - DNA, 25 bp, Homo sapien
ggggacattgttcataaccatgact

SEQ ID NO: 5730360 - DNA, 25 bp, Homo sapien
gacctctcagaagccttgccagaaa

SEQ ID NO: 5730361 - DNA, 25 bp, Homo sapien
tccccgctgcatatttattcaaggt

SEQ ID NO: 5730362 - DNA, 25 bp, Homo sapien
agtcctgaggagccagcggccacct

SEQ ID NO: 5730363 - DNA, 25 bp, Homo sapien
atcttctccatagcattacggactt

SEQ ID NO: 5730364 - DNA, 25 bp, Homo sapien
acgcacatgcgtgtgtataagccca

SEQ ID NO: 5730365 - DNA, 25 bp, Homo sapien
gccctgtctgcaaggacgcagaata

SEQ ID NO: 5730366 - DNA, 25 bp, Homo sapien
ccaggcacatctccctaacacttcc

SEQ ID NO: 5730367 - DNA, 25 bp, Homo sapien
tcccaggcacatctccctaacactt

SEQ ID NO: 5730368 - DNA, 25 bp, Homo sapien
aggcccctgtcgagctggggtccca

SEQ ID NO: 5730369 - DNA, 25 bp, Homo sapien
ccactgtgtgattgtctgtattctt

SEQ ID NO: 5730370 - DNA, 25 bp, Homo sapien
tgtcttttgggagagtacttttctc

SEQ ID NO: 5730371 - DNA, 25 bp, Homo sapien
cttaagataagtaagcagagacagt

SEQ ID NO: 5730372 - DNA, 25 bp, Homo sapien
atctggtatcgaatgggcagagtac

SEQ ID NO: 5730373 - DNA, 25 bp, Homo sapien
cggccacctgcggggagaccaccgc

SEQ ID NO: 5730374 - DNA, 25 bp, Homo sapien
gactcatctcaacccacaacgcctt

SEQ ID NO: 5730375 - DNA, 25 bp, Homo sapien
ataagcagtgagggcggctgcagga

SEQ ID NO: 5730376 - DNA, 25 bp, Homo sapien
tgctgcccccgcctcctcctgccgc

SEQ ID NO: 5730377 - DNA, 25 bp, Homo sapien
gtaatgccaggggcccttcactccg

SEQ ID NO: 5730378 - DNA, 25 bp, Homo sapien
gattcaacggaagctgcgatttgtg

SEQ ID NO: 5730379 - DNA, 25 bp, Homo sapien
tcgagctggggtcccagccaggtgc

SEQ ID NO: 5730380 - DNA, 25 bp, Homo sapien
cctgaagtcaaagacctctcagaag

SEQ ID NO: 5730381 - DNA, 25 bp, Homo sapien
aaatagtcatctggggaacgtgtta

SEQ ID NO: 5730382 - DNA, 25 bp, Homo sapien
gccttctgagaggtgggtgaggaca

SEQ ID NO: 5730383 - DNA, 25 bp, Homo sapien
tcacctcttttcgtgccctggttgt

SEQ ID NO: 5730384 - DNA, 25 bp, Homo sapien
ccatcttctccatagcattacggac

SEQ ID NO: 5730385 - DNA, 25 bp, Homo sapien
cctgcagttgctggatggataggga

SEQ ID NO: 5730386 - DNA, 25 bp, Homo sapien
cgccggctcctgccgcctgggcccc

SEQ ID NO: 5730387 - DNA, 25 bp, Homo sapien
cgctggaccctaggaggctcagagg

SEQ ID NO: 5730388 - DNA, 25 bp, Homo sapien
ctgtgggagggaaggacaagggttc

SEQ ID NO: 5730389 - DNA, 25 bp, Homo sapien
agtacacgtttattggggaactgaa

SEQ ID NO: 5730390 - DNA, 25 bp, Homo sapien
atcagctgcctccaccccagccccc

SEQ ID NO: 5730391 - DNA, 25 bp, Homo sapien
ttttaggaagaagaggctgtgcatt

SEQ ID NO: 5730392 - DNA, 25 bp, Homo sapien
acttcattagggtttgtgaactttg

SEQ ID NO: 5730393 - DNA, 25 bp, Homo sapien
gccacctgcggggagaccaccgccg

SEQ ID NO: 5730394 - DNA, 25 bp, Homo sapien
tgatgaccagttgtcctccaaaaac

SEQ ID NO: 5730395 - DNA, 25 bp, Homo sapien
acagcagatggtgtggatgctgacc

SEQ ID NO: 5730396 - DNA, 25 bp, Homo sapien
tcgtgccctggttgtgagattgcct

SEQ ID NO: 5730397 - DNA, 25 bp, Homo sapien
ggcccggagactgggcagctaagtg

SEQ ID NO: 5730398 - DNA, 25 bp, Homo sapien
aggtaatgccaggggcccttcactc

SEQ ID NO: 5730399 - DNA, 25 bp, Homo sapien
ccgcgccgcccgggcgatgagaagc

SEQ ID NO: 5730400 - DNA, 25 bp, Homo sapien
caccccggcctccctggggacattg

SEQ ID NO: 5730401 - DNA, 25 bp, Homo sapien
ccagcccccaaccttcccaggcaca

SEQ ID NO: 5730402 - DNA, 25 bp, Homo sapien
gcccttcactccgcccccatgactg

SEQ ID NO: 5730403 - DNA, 25 bp, Homo sapien
aagagtaaatgactgtgaacgttgt

SEQ ID NO: 5730404 - DNA, 25 bp, Homo sapien
ggcagagggcagagctctggccact

SEQ ID NO: 5730405 - DNA, 25 bp, Homo sapien
ggctgtgcattaaatttattccacg

SEQ ID NO: 5730406 - DNA, 25 bp, Homo sapien
cggcaggggctgctgcccccgcctc

SEQ ID NO: 5730407 - DNA, 25 bp, Homo sapien
accatgcctgaagtcaaagacctct

SEQ ID NO: 5730408 - DNA, 25 bp, Homo sapien
cggagccgggacccgccgccgccgc

SEQ ID NO: 5730409 - DNA, 25 bp, Homo sapien
acactgcctgtgggcttcatcccaa

SEQ ID NO: 5730410 - DNA, 25 bp, Homo sapien
cattcggatcatgggccggaccaag

SEQ ID NO: 5730411 - DNA, 25 bp, Homo sapien
cactgccccagcagggctggcccgg

SEQ ID NO: 5730412 - DNA, 25 bp, Homo sapien
ccgccgcagccaccgccgccgccgc

SEQ ID NO: 5730413 - DNA, 25 bp, Homo sapien
cgcacagagcagagcgcagccgcca

SEQ ID NO: 5730414 - DNA, 25 bp, Homo sapien
atgggcagagtaccaagaaatcatg

SEQ ID NO: 5730415 - DNA, 25 bp, Homo sapien
agggatgacgtccccgctgcatatt

SEQ ID NO: 5730416 - DNA, 25 bp, Homo sapien
cgcatgccctcctgcagttgctgga

SEQ ID NO: 5730417 - DNA, 25 bp, Homo sapien
acatctccctaacacttcctgccac

SEQ ID NO: 5730418 - DNA, 25 bp, Homo sapien
aggtccccccacagcacttcccact

SEQ ID NO: 5730419 - DNA, 25 bp, Homo sapien
aacacttcctgccaccttccgaggc

SEQ ID NO: 5730420 - DNA, 25 bp, Homo sapien
ggacaagggttcccttggaaatgtg

SEQ ID NO: 5730421 - DNA, 25 bp, Homo sapien
aatttgtatgccatatcagcaatgg

SEQ ID NO: 5730422 - DNA, 25 bp, Homo sapien
tgtgtgattgtctgtattcttaata

SEQ ID NO: 5730423 - DNA, 25 bp, Homo sapien
aagaggctgtgcattaaatttattc

SEQ ID NO: 5730424 - DNA, 25 bp, Homo sapien
aagctgcgatttgtgacattcggat

SEQ ID NO: 5730425 - DNA, 25 bp, Homo sapien
ggcgatgagaagctgcttctgcgtg

SEQ ID NO: 5730426 - DNA, 25 bp, Homo sapien
caggtgtcagcagatcccgcagtcc

SEQ ID NO: 5730427 - DNA, 25 bp, Homo sapien
gcctgactgacaccccggcctccct

SEQ ID NO: 5730428 - DNA, 25 bp, Homo sapien
atgccgctgcaggcccctgtcgagc

SEQ ID NO: 5730429 - DNA, 25 bp, Homo sapien
gagtaaatgactgtgaacgttgtag

SEQ ID NO: 5730430 - DNA, 25 bp, Homo sapien
tgtgggcttcatcccaattcaggag

SEQ ID NO: 5730431 - DNA, 25 bp, Homo sapien
tgactcttgtacttggcaagggaag

SEQ ID NO: 5730432 - DNA, 25 bp, Homo sapien
ccgcccagccccaccaggtgtcagc

SEQ ID NO: 5730433 - DNA, 25 bp, Homo sapien
ttccacgggattcaacggaagctgc

SEQ ID NO: 5730434 - DNA, 25 bp, Homo sapien
taaatccaaggttaccagatacctg

SEQ ID NO: 5730435 - DNA, 25 bp, Homo sapien
ttcattagggtttgtgaactttgtc

SEQ ID NO: 5730436 - DNA, 25 bp, Homo sapien
ttcccttggaaatgtgaagggtctt

SEQ ID NO: 5730437 - DNA, 25 bp, Homo sapien
gtggcttctcggaaccgagccccga

SEQ ID NO: 5730438 - DNA, 25 bp, Homo sapien
ccgaggcaggaacagcacccggacg

SEQ ID NO: 5730439 - DNA, 25 bp, Homo sapien
aggagacggtggacacacaggaagt

SEQ ID NO: 5730440 - DNA, 25 bp, Homo sapien
gaatgggcagagtaccaagaaatca

SEQ ID NO: 5730441 - DNA, 25 bp, Homo sapien
caaagaaaatagtcatctggggaac

SEQ ID NO: 5730442 - DNA, 25 bp, Homo sapien
aatggatggtgtgccttttatgatt

SEQ ID NO: 5730443 - DNA, 25 bp, Homo sapien
agttgtcctccaaaaacctcactcc

SEQ ID NO: 5730444 - DNA, 25 bp, Homo sapien
agggtttgtgaactttgtccttcac

SEQ ID NO: 5730445 - DNA, 25 bp, Homo sapien
catctcaacccacaacgccttccca

SEQ ID NO: 5730446 - DNA, 25 bp, Homo sapien
gagaagttttcttgtgttccagaaa

SEQ ID NO: 5730447 - DNA, 25 bp, Homo sapien
tgcccccgcatgccctcctgcagtt

SEQ ID NO: 5730448 - DNA, 25 bp, Homo sapien
acctgagtggggctcgtgcaggaga

SEQ ID NO: 5730449 - DNA, 25 bp, Homo sapien
gctcccgcccagccccaccaggtgt

SEQ ID NO: 5730450 - DNA, 25 bp, Homo sapien
gggcagagtaccaagaaatcatgac

SEQ ID NO: 5730451 - DNA, 25 bp, Homo sapien
cctcagtacacgtttattggggaac

SEQ ID NO: 5730452 - DNA, 25 bp, Homo sapien
actctggctcaaacctaggaattga

SEQ ID NO: 5730453 - DNA, 25 bp, Homo sapien
ttgcacagacagcagatggtgtgga

SEQ ID NO: 5730454 - DNA, 25 bp, Homo sapien
ctgtgtttcacaagatcattttcca

SEQ ID NO: 5730455 - DNA, 25 bp, Homo sapien
tgtagtgaccagcggctcctaacgt

SEQ ID NO: 5730456 - DNA, 25 bp, Homo sapien
cacttcccactactgcttctgtccc

SEQ ID NO: 5730457 - DNA, 25 bp, Homo sapien
gtgtgccttttatgatttcagagaa

SEQ ID NO: 5730458 - DNA, 25 bp, Homo sapien
aacctcactcctggcaggtgggggc

SEQ ID NO: 5730459 - DNA, 25 bp, Homo sapien
actgaacagcatggggatctggtat

SEQ ID NO: 5730460 - DNA, 25 bp, Homo sapien
tcaccatcaaatctctagcagaaat

SEQ ID NO: 5730461 - DNA, 25 bp, Homo sapien
ctccctcccacactgccccagcagg

SEQ ID NO: 5730462 - DNA, 25 bp, Homo sapien
aggcacatctccctaacacttcctg

SEQ ID NO: 5730463 - DNA, 25 bp, Homo sapien
tgggaatcaccatcaaatctctagc

SEQ ID NO: 5730464 - DNA, 25 bp, Homo sapien
ctcctaacccaccatttattgcctt

SEQ ID NO: 5730465 - DNA, 25 bp, Homo sapien
attcaggagacggtggacacacagg

SEQ ID NO: 5730466 - DNA, 25 bp, Homo sapien
cattgacatcaaggacacactgcct

SEQ ID NO: 5730467 - DNA, 25 bp, Homo sapien
gtggcagcgccgctggaccctagga

SEQ ID NO: 5730468 - DNA, 25 bp, Homo sapien
gagccgggacccgccgccgccgcag

SEQ ID NO: 5730469 - DNA, 25 bp, Homo sapien
atgaagctcattgacatcaaggaca

SEQ ID NO: 5730470 - DNA, 25 bp, Homo sapien
gggcccttcactccgcccccatgac

SEQ ID NO: 5730471 - DNA, 25 bp, Homo sapien
cttcacctcttttcgtgccctggtt

SEQ ID NO: 5730472 - DNA, 25 bp, Homo sapien
agattgcctctaacaggtaatgcca

SEQ ID NO: 5730473 - DNA, 25 bp, Homo sapien
cactccgcccccatgactgggaaga

SEQ ID NO: 5730474 - DNA, 25 bp, Homo sapien
gctggcctgactgacaccccggcct

SEQ ID NO: 5730475 - DNA, 25 bp, Homo sapien
ggcagcgccgctggaccctaggagg

SEQ ID NO: 5730476 - DNA, 25 bp, Homo sapien
tgaagtcaaagacctctcagaagcc

SEQ ID NO: 5730477 - DNA, 25 bp, Homo sapien
caggtgcccccgcatgccctcctgc

SEQ ID NO: 5730478 - DNA, 25 bp, Homo sapien
gccccagcagggctggcccggagac

SEQ ID NO: 5730479 - DNA, 25 bp, Homo sapien
ggacaaactgcatggactcaagcga

SEQ ID NO: 5730480 - DNA, 25 bp, Homo sapien
gtggggctcgtgcaggagaactgag

SEQ ID NO: 5730481 - DNA, 25 bp, Homo sapien
cagcaatggatggtgtgccttttat

SEQ ID NO: 5730482 - DNA, 25 bp, Homo sapien
cggggaacagaccagtccaccatgc

SEQ ID NO: 5730483 - DNA, 25 bp, Homo sapien
ggggatctggtatcgaatgggcaga

SEQ ID NO: 5730484 - DNA, 25 bp, Homo sapien
ttcggatcatgggccggaccaagca

SEQ ID NO: 5730485 - DNA, 25 bp, Homo sapien
ggcttctcggaaccgagccccgaca

SEQ ID NO: 5730486 - DNA, 25 bp, Homo sapien
ctgacaccccggcctccctggggac

SEQ ID NO: 5730487 - DNA, 25 bp, Homo sapien
gtaaacggcagcttaagataagtaa

SEQ ID NO: 5730488 - DNA, 25 bp, Homo sapien
ttaaggacgagttggtgtctgtggt

SEQ ID NO: 5730489 - DNA, 25 bp, Homo sapien
cttggaaatgtgaagggtcttggcc

SEQ ID NO: 5730490 - DNA, 25 bp, Homo sapien
gaagaggcctgtggcagcgccgctg

SEQ ID NO: 5730491 - DNA, 25 bp, Homo sapien
aacgtgtctgtgtgatgaccagttg

SEQ ID NO: 5730492 - DNA, 25 bp, Homo sapien
cgccgccgcagccaccgccgccgcc

SEQ ID NO: 5730493 - DNA, 25 bp, Homo sapien
cagctggcctgactgacaccccggc

SEQ ID NO: 5730494 - DNA, 25 bp, Homo sapien
gagaggaaggggctcccacagcccc

SEQ ID NO: 5730495 - DNA, 25 bp, Homo sapien
gggtcccagccaggtgcccccgcat

SEQ ID NO: 5730496 - DNA, 25 bp, Homo sapien
ggacacactgcctgtgggcttcatc

SEQ ID NO: 5730497 - DNA, 25 bp, Homo sapien
gtgaccagcggctcctaacgtgtct

SEQ ID NO: 5730498 - DNA, 25 bp, Homo sapien
tgcaaggacgcagaataagcagtga

SEQ ID NO: 5730499 - DNA, 25 bp, Homo sapien
gctgtagtgaccagcggctcctaac

SEQ ID NO: 5730500 - DNA, 25 bp, Homo sapien
gaccagcggctcctaacgtgtctgt

SEQ ID NO: 5730501 - DNA, 25 bp, Homo sapien
actgcctgtgggcttcatcccaatt

SEQ ID NO: 5730502 - DNA, 25 bp, Homo sapien
gagctggggtcccagccaggtgccc

SEQ ID NO: 5730503 - DNA, 25 bp, Homo sapien
agctctggccacttctgcccacttc

SEQ ID NO: 5730504 - DNA, 25 bp, Homo sapien
tatcgaatgggcagagtaccaagaa

SEQ ID NO: 5730505 - DNA, 25 bp, Homo sapien
cggggagaccaccgccgcccagact

SEQ ID NO: 5730506 - DNA, 25 bp, Homo sapien
catttattgccttctgagaggtggg

SEQ ID NO: 5730507 - DNA, 25 bp, Homo sapien
tgtatgccatatcagcaatggatgg

SEQ ID NO: 5730508 - DNA, 25 bp, Homo sapien
gtgtgtgtgtgtgtgtgtgtgtata

SEQ ID NO: 5730509 - DNA, 25 bp, Homo sapien
cttctcggaaccgagccccgacagg

SEQ ID NO: 5730510 - DNA, 25 bp, Homo sapien
gagaccaccgccgcccagactactg

SEQ ID NO: 5730511 - DNA, 25 bp, Homo sapien
atcacgggagtcggggtggtggctt

SEQ ID NO: 5730512 - DNA, 25 bp, Homo sapien
gaaaaagagtacgagtacagcttcc

SEQ ID NO: 5730513 - DNA, 25 bp, Homo sapien
caggagaactgaggcatgaaactct

SEQ ID NO: 5730514 - DNA, 25 bp, Homo sapien
gacggagccgggacccgccgccgcc

SEQ ID NO: 5730515 - DNA, 25 bp, Homo sapien
acacacaggaagtggcttttaggaa

SEQ ID NO: 5730516 - DNA, 25 bp, Homo sapien
ttcataaccatgactaatctgtgtg

SEQ ID NO: 5730517 - DNA, 25 bp, Homo sapien
cagatggtgtggatgctgacctctg

SEQ ID NO: 5730518 - DNA, 25 bp, Homo sapien
tgcatggactcaagcgagctggagc

SEQ ID NO: 5730519 - DNA, 25 bp, Homo sapien
gggaactgaacagcatggggatctg

SEQ ID NO: 5730520 - DNA, 25 bp, Homo sapien
gcagtcctgaggagccagcggccac

SEQ ID NO: 5730521 - DNA, 25 bp, Homo sapien
gaagtggcttttaggaagaagaggc

SEQ ID NO: 5730522 - DNA, 25 bp, Homo sapien
ccagcactccaatttgtatgccata

SEQ ID NO: 5730523 - DNA, 25 bp, Homo sapien
acccaccatttattgccttctgaga

SEQ ID NO: 5730524 - DNA, 25 bp, Homo sapien
ctccctaacacttcctgccaccttc

SEQ ID NO: 5730525 - DNA, 25 bp, Homo sapien
ttcacaagatcattttccaaagaaa

SEQ ID NO: 5730526 - DNA, 25 bp, Homo sapien
atagtcatctggggaacgtgttagt

SEQ ID NO: 5730527 - DNA, 25 bp, Homo sapien
aggctatgacgtagttgcacagaca

SEQ ID NO: 5730528 - DNA, 25 bp, Homo sapien
taacccaccatttattgccttctga

SEQ ID NO: 5730529 - DNA, 25 bp, Homo sapien
gggagaccaccgccgcccagactac

SEQ ID NO: 5730530 - DNA, 25 bp, Homo sapien
ctgcggcgccggctcctgccgcctg

SEQ ID NO: 5730531 - DNA, 25 bp, Homo sapien
ggctcctgccgcctgggccccgggc

SEQ ID NO: 5730532 - DNA, 25 bp, Homo sapien
agcgagctggagccatcttctccat

SEQ ID NO: 5730533 - DNA, 25 bp, Homo sapien
ctcatccctcaggtccccccacagc

SEQ ID NO: 5730534 - DNA, 25 bp, Homo sapien
ccactgatgccgctgcaggcccctg

SEQ ID NO: 5730535 - DNA, 25 bp, Homo sapien
agatacctgtgtttcacaagatcat

SEQ ID NO: 5730536 - DNA, 25 bp, Homo sapien
acaagggttcccttggaaatgtgaa

SEQ ID NO: 5730537 - DNA, 25 bp, Homo sapien
ctgccgcctgggccccgggcccggc

SEQ ID NO: 5730538 - DNA, 25 bp, Homo sapien
gcatcctgtcttcagctggcctgac

SEQ ID NO: 5730539 - DNA, 25 bp, Homo sapien
ccccactgatgccgctgcaggcccc

SEQ ID NO: 5730540 - DNA, 25 bp, Homo sapien
gtccccccacagcacttcccactac

SEQ ID NO: 5730541 - DNA, 25 bp, Homo sapien
tatgcagccctttgatctcctggga

SEQ ID NO: 5730542 - DNA, 25 bp, Homo sapien
cgatttgtgacattcggatcatggg

SEQ ID NO: 5730543 - DNA, 25 bp, Homo sapien
tcctgccaccttccgaggcaggaac

SEQ ID NO: 5730544 - DNA, 25 bp, Homo sapien
tcgaatgggcagagtaccaagaaat

SEQ ID NO: 5730545 - DNA, 25 bp, Homo sapien
aagtccactgtgtgattgtctgtat

SEQ ID NO: 5730546 - DNA, 25 bp, Homo sapien
ggagtcggggtggtggcttctcgga

SEQ ID NO: 5730547 - DNA, 25 bp, Homo sapien
taaccatgactaatctgtgtgtgct

SEQ ID NO: 5730548 - DNA, 25 bp, Homo sapien
accagtccaccatgcctgaagtcaa

SEQ ID NO: 5730549 - DNA, 25 bp, Homo sapien
ccacttcattagggtttgtgaactt

SEQ ID NO: 5730550 - DNA, 25 bp, Homo sapien
gacggcaggggctgctgcccccgcc

SEQ ID NO: 5730551 - DNA, 25 bp, Homo sapien
ccagtcatcagctgcctccacccca

SEQ ID NO: 5730552 - DNA, 25 bp, Homo sapien
ccgcccagactactgacggcagggg

SEQ ID NO: 5730553 - DNA, 25 bp, Homo sapien
agccccaccaggtgtcagcagatcc

SEQ ID NO: 5730554 - DNA, 25 bp, Homo sapien
acggactacgagtaccagcactcca

SEQ ID NO: 5730555 - DNA, 25 bp, Homo sapien
cgccaggctcccgcccagccccacc

SEQ ID NO: 5730556 - DNA, 25 bp, Homo sapien
catgactaatctgtgtgtgctgtag

SEQ ID NO: 5730557 - DNA, 25 bp, Homo sapien
agccagcggccacctgcggggagac

SEQ ID NO: 5730558 - DNA, 25 bp, Homo sapien
tcttgtacttggcaagggaagtcca

SEQ ID NO: 5730559 - DNA, 25 bp, Homo sapien
caaaaacctcactcctggcaggtgg

SEQ ID NO: 5730560 - DNA, 25 bp, Homo sapien
tttgatctcctgggaatcaccatca

SEQ ID NO: 5730561 - DNA, 25 bp, Homo sapien
gatggtgtgccttttatgatttcag

SEQ ID NO: 5730562 - DNA, 25 bp, Homo sapien
gactgtgaacgttgtagtaaacggc

SEQ ID NO: 5730563 - DNA, 25 bp, Homo sapien
ccgccgccgccgccccagcggggaa

SEQ ID NO: 5730564 - DNA, 25 bp, Homo sapien
tcgaaaaagagtacgagtacagctt

SEQ ID NO: 5730565 - DNA, 25 bp, Homo sapien
ccactactgcttctgtccctggaca

SEQ ID NO: 5730566 - DNA, 25 bp, Homo sapien
tctaacaggtaatgccaggggccct

SEQ ID NO: 5730567 - DNA, 25 bp, Homo sapien
tgtgaagggtcttggcctcatccct

SEQ ID NO: 5730568 - DNA, 25 bp, Homo sapien
cagctgcctccaccccagcccccaa

SEQ ID NO: 5730569 - DNA, 25 bp, Homo sapien
catgaaactctggctcaaacctagg

SEQ ID NO: 5730570 - DNA, 25 bp, Homo sapien
gtgtgctgtagtgaccagcggctcc

SEQ ID NO: 5730571 - DNA, 25 bp, Homo sapien
cagttgctggatggatagggacacc

SEQ ID NO: 5730572 - DNA, 25 bp, Homo sapien
atctgtgtgtgctgtagtgaccagc

SEQ ID NO: 5730573 - DNA, 25 bp, Homo sapien
cttcccaggcacatctccctaacac

SEQ ID NO: 5730574 - DNA, 25 bp, Homo sapien
ctggagccatcttctccatagcatt

SEQ ID NO: 5730575 - DNA, 25 bp, Homo sapien
tgtctgcaaggacgcagaataagca

SEQ ID NO: 5730576 - DNA, 25 bp, Homo sapien
gaacgtgttagtagatatgaagctc

SEQ ID NO: 5730577 - DNA, 25 bp, Homo sapien
tcttttgggagagtacttttctcca

SEQ ID NO: 5730578 - DNA, 25 bp, Homo sapien
accgccgcccagactactgacggca

SEQ ID NO: 5730579 - DNA, 25 bp, Homo sapien
tgcctccaccccagcccccaacctt

SEQ ID NO: 5730580 - DNA, 25 bp, Homo sapien
aggaagacccttagggatgacgtcc

SEQ ID NO: 5730581 - DNA, 25 bp, Homo sapien
actgatgccgctgcaggcccctgtc

SEQ ID NO: 5730582 - DNA, 25 bp, Homo sapien
aaggtgactcttgtacttggcaagg

SEQ ID NO: 5730583 - DNA, 25 bp, Homo sapien
gaggcatgaaactctggctcaaacc

SEQ ID NO: 5730584 - DNA, 25 bp, Homo sapien
cattttccaaagaaaatagtcatct

SEQ ID NO: 5730585 - DNA, 25 bp, Homo sapien
aatttattccacgggattcaacgga

SEQ ID NO: 5730586 - DNA, 25 bp, Homo sapien
cccgggcgatgagaagctgcttctg

SEQ ID NO: 5730587 - DNA, 25 bp, Homo sapien
gctcaaacctaggaattgagagcgt

SEQ ID NO: 5730588 - DNA, 25 bp, Homo sapien
tctgtcttttgggagagtacttttc

SEQ ID NO: 5730589 - DNA, 25 bp, Homo sapien
ctcgtactctttttcgatttctgct

SEQ ID NO: 5730590 - DNA, 25 bp, Homo sapien
aggagatcaaagggctgcatacttt

SEQ ID NO: 5730591 - DNA, 25 bp, Homo sapien
ttcgataccagatccccatgctgtt

SEQ ID NO: 5730592 - DNA, 25 bp, Homo sapien
caggcggcaggagccggcgccgcag

SEQ ID NO: 5730593 - DNA, 25 bp, Homo sapien
gatgtgcctgggaaggttgggggct

SEQ ID NO: 5730594 - DNA, 25 bp, Homo sapien
ggaggcagctgatgactgggaaggc

SEQ ID NO: 5730595 - DNA, 25 bp, Homo sapien
gcttacttatcttaagctgccgttt

SEQ ID NO: 5730596 - DNA, 25 bp, Homo sapien
ggcctgcagcggcatcagtgggggc

SEQ ID NO: 5730597 - DNA, 25 bp, Homo sapien
gctggggtggaggcagctgatgact

SEQ ID NO: 5730598 - DNA, 25 bp, Homo sapien
gcccccacctgccaggagtgaggtt

SEQ ID NO: 5730599 - DNA, 25 bp, Homo sapien
tttcatgcctcagttctcctgcacg

SEQ ID NO: 5730600 - DNA, 25 bp, Homo sapien
tatccatccagcaactgcaggaggg

SEQ ID NO: 5730601 - DNA, 25 bp, Homo sapien
aaacgtgtactgaggcggggcctgc

SEQ ID NO: 5730602 - DNA, 25 bp, Homo sapien
agggtccagcggcgctgccacaggc

SEQ ID NO: 5730603 - DNA, 25 bp, Homo sapien
cagcctcttcttcctaaaagccact

SEQ ID NO: 5730604 - DNA, 25 bp, Homo sapien
gcggtggtctccccgcaggtggccg

SEQ ID NO: 5730605 - DNA, 25 bp, Homo sapien
tattctgcgtccttgcagacagggc

SEQ ID NO: 5730606 - DNA, 25 bp, Homo sapien
cacacaggcacatgcttgtcctcac

SEQ ID NO: 5730607 - DNA, 25 bp, Homo sapien
tcataaaaggcacaccatccattgc

SEQ ID NO: 5730608 - DNA, 25 bp, Homo sapien
gatttgatggtgattcccaggagat

SEQ ID NO: 5730609 - DNA, 25 bp, Homo sapien
gtgtgggagggagggctggcggagg

SEQ ID NO: 5730610 - DNA, 25 bp, Homo sapien
cggcggcggtggctgcggcggcggc

SEQ ID NO: 5730611 - DNA, 25 bp, Homo sapien
gttgagatgagtcatgatttcttgg

SEQ ID NO: 5730612 - DNA, 25 bp, Homo sapien
tgtcctcacccacctctcagaaggc

SEQ ID NO: 5730613 - DNA, 25 bp, Homo sapien
tagggagatgtgcctgggaaggttg

SEQ ID NO: 5730614 - DNA, 25 bp, Homo sapien
cttcctggtgtccctatccatccag

SEQ ID NO: 5730615 - DNA, 25 bp, Homo sapien
cactacagcacacacagattagtca

SEQ ID NO: 5730616 - DNA, 25 bp, Homo sapien
cgggtcccggctccgtctcacgcag

SEQ ID NO: 5730617 - DNA, 25 bp, Homo sapien
ggttgggggctggggtggaggcagc

SEQ ID NO: 5730618 - DNA, 25 bp, Homo sapien
gaaaagtactctcccaaaagacaga

SEQ ID NO: 5730619 - DNA, 25 bp, Homo sapien
ggtgtccctatccatccagcaactg

SEQ ID NO: 5730620 - DNA, 25 bp, Homo sapien
agaaggcaataaatggtgggttagg

SEQ ID NO: 5730621 - DNA, 25 bp, Homo sapien
cgtttctggcaaggcttctgagagg

SEQ ID NO: 5730622 - DNA, 25 bp, Homo sapien
tagctgcccagtctccgggccagcc

SEQ ID NO: 5730623 - DNA, 25 bp, Homo sapien
aaatgatcttgtgaaacacaggtat

SEQ ID NO: 5730624 - DNA, 25 bp, Homo sapien
tccagcggcgctgccacaggcctct

SEQ ID NO: 5730625 - DNA, 25 bp, Homo sapien
gcagcccctgccgtcagtagtctgg

SEQ ID NO: 5730626 - DNA, 25 bp, Homo sapien
actgcgggatctgctgacacctggt

SEQ ID NO: 5730627 - DNA, 25 bp, Homo sapien
atcttaagctgccgtttactacaac

SEQ ID NO: 5730628 - DNA, 25 bp, Homo sapien
gggtcttccttgtccagggacagaa

SEQ ID NO: 5730629 - DNA, 25 bp, Homo sapien
acgctctcaattcctaggtttgagc

SEQ ID NO: 5730630 - DNA, 25 bp, Homo sapien
aatgctatggagaagatggctccag

SEQ ID NO: 5730631 - DNA, 25 bp, Homo sapien
cccacctctcagaaggcaataaatg

SEQ ID NO: 5730632 - DNA, 25 bp, Homo sapien
ggctcggttccgagaagccaccacc

SEQ ID NO: 5730633 - DNA, 25 bp, Homo sapien
tcccggctccgtctcacgcagaagc

SEQ ID NO: 5730634 - DNA, 25 bp, Homo sapien
ctgcacgagccccactcaggtgggc

SEQ ID NO: 5730635 - DNA, 25 bp, Homo sapien
tggactggtctgttccccgctgggg

SEQ ID NO: 5730636 - DNA, 25 bp, Homo sapien
gtcatcacacagacacgttaggagc

SEQ ID NO: 5730637 - DNA, 25 bp, Homo sapien
ctgctgtctgtgcaactacgtcata

SEQ ID NO: 5730638 - DNA, 25 bp, Homo sapien
agggcccctggcattacctgttaga

SEQ ID NO: 5730639 - DNA, 25 bp, Homo sapien
ctatggagaagatggctccagctcg

SEQ ID NO: 5730640 - DNA, 25 bp, Homo sapien
gtgaaggacaaagttcacaaaccct

SEQ ID NO: 5730641 - DNA, 25 bp, Homo sapien
aactgcaggagggcatgcgggggca

SEQ ID NO: 5730642 - DNA, 25 bp, Homo sapien
ggctgtgggagccccttcctctcct

SEQ ID NO: 5730643 - DNA, 25 bp, Homo sapien
tgttccccgctggggcggcggcggc

SEQ ID NO: 5730644 - DNA, 25 bp, Homo sapien
tgtgtccttgatgtcaatgagcttc

SEQ ID NO: 5730645 - DNA, 25 bp, Homo sapien
caagagtcaccttgaataaatatgc

SEQ ID NO: 5730646 - DNA, 25 bp, Homo sapien
gcacgagccccactcaggtgggctt

SEQ ID NO: 5730647 - DNA, 25 bp, Homo sapien
cagctcgcttgagtccatgcagttt

SEQ ID NO: 5730648 - DNA, 25 bp, Homo sapien
tctttggaaaatgatcttgtgaaac

SEQ ID NO: 5730649 - DNA, 25 bp, Homo sapien
agtttcatgcctcagttctcctgca

SEQ ID NO: 5730650 - DNA, 25 bp, Homo sapien
attcccaggagatcaaagggctgca

SEQ ID NO: 5730651 - DNA, 25 bp, Homo sapien
gcagctgatgactgggaaggcgttg

SEQ ID NO: 5730652 - DNA, 25 bp, Homo sapien
gggagatgtgcctgggaaggttggg

SEQ ID NO: 5730653 - DNA, 25 bp, Homo sapien
gatcaaagggctgcatactttctgg

SEQ ID NO: 5730654 - DNA, 25 bp, Homo sapien
gtccggcccatgatccgaatgtcac

SEQ ID NO: 5730655 - DNA, 25 bp, Homo sapien
taaaagccacttcctgtgtgtccac

SEQ ID NO: 5730656 - DNA, 25 bp, Homo sapien
cctggcggctgcgctctgctctgtg

SEQ ID NO: 5730657 - DNA, 25 bp, Homo sapien
aagaatacagacaatcacacagtgg

SEQ ID NO: 5730658 - DNA, 25 bp, Homo sapien
ttctgcgtccttgcagacagggctc

SEQ ID NO: 5730659 - DNA, 25 bp, Homo sapien
ccatgcagtttgtcctcttcctggt

SEQ ID NO: 5730660 - DNA, 25 bp, Homo sapien
ggttatgaacaatgtccccagggag

SEQ ID NO: 5730661 - DNA, 25 bp, Homo sapien
aaataagccgtctttccagaggtca

SEQ ID NO: 5730662 - DNA, 25 bp, Homo sapien
acaaattggagtgctggtactcgta

SEQ ID NO: 5730663 - DNA, 25 bp, Homo sapien
cacacacacaggcacatgcttgtcc

SEQ ID NO: 5730664 - DNA, 25 bp, Homo sapien
tgatgggatccattgacgtttctgg

SEQ ID NO: 5730665 - DNA, 25 bp, Homo sapien
tcccttgccaagtacaagagtcacc

SEQ ID NO: 5730666 - DNA, 25 bp, Homo sapien
acagacaatcacacagtggacttcc

SEQ ID NO: 5730667 - DNA, 25 bp, Homo sapien
cagaggtcagcatccacaccatctg

SEQ ID NO: 5730668 - DNA, 25 bp, Homo sapien
tccagcaactgcaggagggcatgcg

SEQ ID NO: 5730669 - DNA, 25 bp, Homo sapien
gtagtccgtccgggtgctgttcctg

SEQ ID NO: 5730670 - DNA, 25 bp, Homo sapien
gaaaagaggtgaaggacaaagttca

SEQ ID NO: 5730671 - DNA, 25 bp, Homo sapien
cagtctccgggccagccctgctggg

SEQ ID NO: 5730672 - DNA, 25 bp, Homo sapien
ataaatggtgggttaggagcagcct

SEQ ID NO: 5730673 - DNA, 25 bp, Homo sapien
tactctcccaaaagacagaaacgct

SEQ ID NO: 5730674 - DNA, 25 bp, Homo sapien
gggacctgagggatgaggccaagac

SEQ ID NO: 5730675 - DNA, 25 bp, Homo sapien
ccttgccaagtacaagagtcacctt

SEQ ID NO: 5730676 - DNA, 25 bp, Homo sapien
gcggcggtggctgcggcggcggcgg

SEQ ID NO: 5730677 - DNA, 25 bp, Homo sapien
gattagtcatggttatgaacaatgt

SEQ ID NO: 5730678 - DNA, 25 bp, Homo sapien
gtgctgtggggggacctgagggatg

SEQ ID NO: 5730679 - DNA, 25 bp, Homo sapien
taatgaagtgggcagaagtggccag

SEQ ID NO: 5730680 - DNA, 25 bp, Homo sapien
ccgccctcactgcttattctgcgtc

SEQ ID NO: 5730681 - DNA, 25 bp, Homo sapien
gtcaggccagctgaagacaggatgc

SEQ ID NO: 5730682 - DNA, 25 bp, Homo sapien
cttctgagaggtctttgacttcagg

SEQ ID NO: 5730683 - DNA, 25 bp, Homo sapien
cgctgccacaggcctcttcccagtc

SEQ ID NO: 5730684 - DNA, 25 bp, Homo sapien
tcccaggagatcaaagggctgcata

SEQ ID NO: 5730685 - DNA, 25 bp, Homo sapien
gtgcggaagctgtactcgtactctt

SEQ ID NO: 5730686 - DNA, 25 bp, Homo sapien
cacgaaaagaggtgaaggacaaagt

SEQ ID NO: 5730687 - DNA, 25 bp, Homo sapien
taggagccgctggtcactacagcac

SEQ ID NO: 5730688 - DNA, 25 bp, Homo sapien
acgttccccagatgactattttctt

SEQ ID NO: 5730689 - DNA, 25 bp, Homo sapien
gtgaaacacaggtatctggtaacct

SEQ ID NO: 5730690 - DNA, 25 bp, Homo sapien
catcagtgggggctgtgggagcccc

SEQ ID NO: 5730691 - DNA, 25 bp, Homo sapien
ggcacatgcttgtcctcacccacct

SEQ ID NO: 5730692 - DNA, 25 bp, Homo sapien
cctgcttggtccggcccatgatccg

SEQ ID NO: 5730693 - DNA, 25 bp, Homo sapien
cgggatctgctgacacctggtgggg

SEQ ID NO: 5730694 - DNA, 25 bp, Homo sapien
cagtcatttactcttatgctaagtc

SEQ ID NO: 5730695 - DNA, 25 bp, Homo sapien
agcatccacaccatctgctgtctgt

SEQ ID NO: 5730696 - DNA, 25 bp, Homo sapien
cacacacacacacacacaggcacat

SEQ ID NO: 5730697 - DNA, 25 bp, Homo sapien
caggggcctgcagcggcatcagtgg

SEQ ID NO: 5730698 - DNA, 25 bp, Homo sapien
cgtctttccagaggtcagcatccac

SEQ ID NO: 5730699 - DNA, 25 bp, Homo sapien
ctcgtggagaaaagtactctcccaa

SEQ ID NO: 5730700 - DNA, 25 bp, Homo sapien
ataagccgtctttccagaggtcagc

SEQ ID NO: 5730701 - DNA, 25 bp, Homo sapien
cccaaaagacagaaacgctctcaat

SEQ ID NO: 5730702 - DNA, 25 bp, Homo sapien
gttcacaaaccctaatgaagtgggc

SEQ ID NO: 5730703 - DNA, 25 bp, Homo sapien
ggcaataaatggtgggttaggagca

SEQ ID NO: 5730704 - DNA, 25 bp, Homo sapien
gccggggtgtcagtcaggccagctg

SEQ ID NO: 5730705 - DNA, 25 bp, Homo sapien
caggaagtgttagggagatgtgcct

SEQ ID NO: 5730706 - DNA, 25 bp, Homo sapien
aggagggcatgcgggggcacctggc

SEQ ID NO: 5730707 - DNA, 25 bp, Homo sapien
ggtgattcccaggagatcaaagggc

SEQ ID NO: 5730708 - DNA, 25 bp, Homo sapien
acaatcacacagtggacttcccttg

SEQ ID NO: 5730709 - DNA, 25 bp, Homo sapien
cccacttagctgcccagtctccggg

SEQ ID NO: 5730710 - DNA, 25 bp, Homo sapien
gctggggcggcggcggcggtggctg

SEQ ID NO: 5730711 - DNA, 25 bp, Homo sapien
cagagctctgccctctgccctcctg

SEQ ID NO: 5730712 - DNA, 25 bp, Homo sapien
ttcctaaaagccacttcctgtgtgt

SEQ ID NO: 5730713 - DNA, 25 bp, Homo sapien
acaggcagtgtgtccttgatgtcaa

SEQ ID NO: 5730714 - DNA, 25 bp, Homo sapien
atgaacaatgtccccagggaggccg

SEQ ID NO: 5730715 - DNA, 25 bp, Homo sapien
tggcaaggcttctgagaggtctttg

SEQ ID NO: 5730716 - DNA, 25 bp, Homo sapien
ggcggcggcggtggctgcggcggcg

SEQ ID NO: 5730717 - DNA, 25 bp, Homo sapien
actacgtcatagcctgtcggggctc

SEQ ID NO: 5730718 - DNA, 25 bp, Homo sapien
gatatggcatacaaattggagtgct

SEQ ID NO: 5730719 - DNA, 25 bp, Homo sapien
ttcccagtcatgggggcggagtgaa

SEQ ID NO: 5730720 - DNA, 25 bp, Homo sapien
aatcataaaaggcacaccatccatt

SEQ ID NO: 5730721 - DNA, 25 bp, Homo sapien
cctgctggggcagtgtgggagggag

SEQ ID NO: 5730722 - DNA, 25 bp, Homo sapien
accaccccgactcccgtgatgggat

SEQ ID NO: 5730723 - DNA, 25 bp, Homo sapien
cgggagcctggcggctgcgctctgc

SEQ ID NO: 5730724 - DNA, 25 bp, Homo sapien
cccaggcggcaggagccggcgccgc

SEQ ID NO: 5730725 - DNA, 25 bp, Homo sapien
gcggaagctgtactcgtactctttt

SEQ ID NO: 5730726 - DNA, 25 bp, Homo sapien
gcgtccttgcagacagggctcccac

SEQ ID NO: 5730727 - DNA, 25 bp, Homo sapien
tccttgtccagggacagaagcagta

SEQ ID NO: 5730728 - DNA, 25 bp, Homo sapien
gagaaaagtactctcccaaaagaca

SEQ ID NO: 5730729 - DNA, 25 bp, Homo sapien
ggggcccaggcggcaggagccggcg

SEQ ID NO: 5730730 - DNA, 25 bp, Homo sapien
ggggctcggttccgagaagccacca

SEQ ID NO: 5730731 - DNA, 25 bp, Homo sapien
ccggcccatgatccgaatgtcacaa

SEQ ID NO: 5730732 - DNA, 25 bp, Homo sapien
agagtttcatgcctcagttctcctg

SEQ ID NO: 5730733 - DNA, 25 bp, Homo sapien
tttctggcaaggcttctgagaggtc

SEQ ID NO: 5730734 - DNA, 25 bp, Homo sapien
ctcatcgcccgggcggcgcgggagg

SEQ ID NO: 5730735 - DNA, 25 bp, Homo sapien
actgcttattctgcgtccttgcaga

SEQ ID NO: 5730736 - DNA, 25 bp, Homo sapien
gagtcatgatttcttggtactctgc

SEQ ID NO: 5730737 - DNA, 25 bp, Homo sapien
aggtttttggaggacaactggtcat

SEQ ID NO: 5730738 - DNA, 25 bp, Homo sapien
agtctgggcggcggtggtctccccg

SEQ ID NO: 5730739 - DNA, 25 bp, Homo sapien
actttctggaacacaagaaaacttc

SEQ ID NO: 5730740 - DNA, 25 bp, Homo sapien
ccccgactcccgtgatgggatccat

SEQ ID NO: 5730741 - DNA, 25 bp, Homo sapien
tggtaaccttggatttaaataagcc

SEQ ID NO: 5730742 - DNA, 25 bp, Homo sapien
taggtttgagccagagtttcatgcc

SEQ ID NO: 5730743 - DNA, 25 bp, Homo sapien
gtactctgcccattcgataccagat

SEQ ID NO: 5730744 - DNA, 25 bp, Homo sapien
agggctgcatactttctggaacaca

SEQ ID NO: 5730745 - DNA, 25 bp, Homo sapien
ttcacatttccaagggaacccttgt

SEQ ID NO: 5730746 - DNA, 25 bp, Homo sapien
cctgccgtcagtagtctgggcggcg

SEQ ID NO: 5730747 - DNA, 25 bp, Homo sapien
tcatggttatgaacaatgtccccag

SEQ ID NO: 5730748 - DNA, 25 bp, Homo sapien
ggccgctggctcctcaggactgcgg

SEQ ID NO: 5730749 - DNA, 25 bp, Homo sapien
gagcttcatatctactaacacgttc

SEQ ID NO: 5730750 - DNA, 25 bp, Homo sapien
gggggcacctggctgggaccccagc

SEQ ID NO: 5730751 - DNA, 25 bp, Homo sapien
gacaccaactcgtccttaacactgt

SEQ ID NO: 5730752 - DNA, 25 bp, Homo sapien
gtgttagggagatgtgcctgggaag

SEQ ID NO: 5730753 - DNA, 25 bp, Homo sapien
ctgaaatcataaaaggcacaccatc

SEQ ID NO: 5730754 - DNA, 25 bp, Homo sapien
agcagtagtgggaagtgctgtgggg

SEQ ID NO: 5730755 - DNA, 25 bp, Homo sapien
ggtcagcatccacaccatctgctgt

SEQ ID NO: 5730756 - DNA, 25 bp, Homo sapien
gcttcatatctactaacacgttccc

SEQ ID NO: 5730757 - DNA, 25 bp, Homo sapien
ttgtccttccctcccacagtggcca

SEQ ID NO: 5730758 - DNA, 25 bp, Homo sapien
gaggccaagacccttcacatttcca

SEQ ID NO: 5730759 - DNA, 25 bp, Homo sapien
ccatgctgttcagttccccaataaa

SEQ ID NO: 5730760 - DNA, 25 bp, Homo sapien
gactggtctgttccccgctggggcg

SEQ ID NO: 5730761 - DNA, 25 bp, Homo sapien
cagtcatgggggcggagtgaagggc

SEQ ID NO: 5730762 - DNA, 25 bp, Homo sapien
gtttttggaggacaactggtcatca

SEQ ID NO: 5730763 - DNA, 25 bp, Homo sapien
ctgctgacacctggtggggctgggc

SEQ ID NO: 5730764 - DNA, 25 bp, Homo sapien
tcctcacccacctctcagaaggcaa

SEQ ID NO: 5730765 - DNA, 25 bp, Homo sapien
cttgtccagggacagaagcagtagt

SEQ ID NO: 5730766 - DNA, 25 bp, Homo sapien
aggccggggtgtcagtcaggccagc

SEQ ID NO: 5730767 - DNA, 25 bp, Homo sapien
ggggcagcagcccctgccgtcagta

SEQ ID NO: 5730768 - DNA, 25 bp, Homo sapien
acagtggacttcccttgccaagtac

SEQ ID NO: 5730769 - DNA, 25 bp, Homo sapien
ttgggatgaagcccacaggcagtgt

SEQ ID NO: 5730770 - DNA, 25 bp, Homo sapien
cagcaactgcaggagggcatgcggg

SEQ ID NO: 5730771 - DNA, 25 bp, Homo sapien
agggaggccggggtgtcagtcaggc

SEQ ID NO: 5730772 - DNA, 25 bp, Homo sapien
cttggtactctgcccattcgatacc

SEQ ID NO: 5730773 - DNA, 25 bp, Homo sapien
ccttgtccttccctcccacagtggc

SEQ ID NO: 5730774 - DNA, 25 bp, Homo sapien
ggaagctgtactcgtactctttttc

SEQ ID NO: 5730775 - DNA, 25 bp, Homo sapien
ggagcctggcggctgcgctctgctc

SEQ ID NO: 5730776 - DNA, 25 bp, Homo sapien
ggagccgctggtcactacagcacac

SEQ ID NO: 5730777 - DNA, 25 bp, Homo sapien
caggtgggcttatacacacgcatgt

SEQ ID NO: 5730778 - DNA, 25 bp, Homo sapien
ttcttggtactctgcccattcgata

SEQ ID NO: 5730779 - DNA, 25 bp, Homo sapien
cacatgcttgtcctcacccacctct

SEQ ID NO: 5730780 - DNA, 25 bp, Homo sapien
attatattaagaatacagacaatca

SEQ ID NO: 5730781 - DNA, 25 bp, Homo sapien
acaaaccctaatgaagtgggcagaa

SEQ ID NO: 5730782 - DNA, 25 bp, Homo sapien
ccaagacccttcacatttccaaggg

SEQ ID NO: 5730783 - DNA, 25 bp, Homo sapien
ccctcccacagtggccagagggctc

SEQ ID NO: 5730784 - DNA, 25 bp, Homo sapien
tggctcctcaggactgcgggatctg

SEQ ID NO: 5730785 - DNA, 25 bp, Homo sapien
ggccagagggctcgtggagaaaagt

SEQ ID NO: 5730786 - DNA, 25 bp, Homo sapien
gcagtgtgtccttgatgtcaatgag

SEQ ID NO: 5730787 - DNA, 25 bp, Homo sapien
aaagtactctcccaaaagacagaaa

SEQ ID NO: 5730788 - DNA, 25 bp, Homo sapien
gagggagggctggcggaggcggcag

SEQ ID NO: 5730789 - DNA, 25 bp, Homo sapien
ctacagcacacacagattagtcatg

SEQ ID NO: 5730790 - DNA, 25 bp, Homo sapien
gtggcaggaagtgttagggagatgt

SEQ ID NO: 5730791 - DNA, 25 bp, Homo sapien
ggaagtgctgtggggggacctgagg

SEQ ID NO: 5730792 - DNA, 25 bp, Homo sapien
atttaaataagccgtctttccagag

SEQ ID NO: 5730793 - DNA, 25 bp, Homo sapien
gggcccggggcccaggcggcaggag

SEQ ID NO: 5730794 - DNA, 25 bp, Homo sapien
ggtttgagccagagtttcatgcctc

SEQ ID NO: 5730795 - DNA, 25 bp, Homo sapien
cagggacagaagcagtagtgggaag

SEQ ID NO: 5730796 - DNA, 25 bp, Homo sapien
tgggcagaagtggccagagctctgc

SEQ ID NO: 5730797 - DNA, 25 bp, Homo sapien
aatatgcagcggggacgtcatccct

SEQ ID NO: 5730798 - DNA, 25 bp, Homo sapien
aaggcaataaatggtgggttaggag

SEQ ID NO: 5730799 - DNA, 25 bp, Homo sapien
tctgttccccgctggggcggcggcg

SEQ ID NO: 5730800 - DNA, 25 bp, Homo sapien
caactacgtcatagcctgtcggggc

SEQ ID NO: 5730801 - DNA, 25 bp, Homo sapien
gtggccagagggctcgtggagaaaa

SEQ ID NO: 5730802 - DNA, 25 bp, Homo sapien
gctctcaattcctaggtttgagcca

SEQ ID NO: 5730803 - DNA, 25 bp, Homo sapien
tctggtaaccttggatttaaataag

SEQ ID NO: 5730804 - DNA, 25 bp, Homo sapien
ctccgggccagccctgctggggcag

SEQ ID NO: 5730805 - DNA, 25 bp, Homo sapien
ctgctagagatttgatggtgattcc

SEQ ID NO: 5730806 - DNA, 25 bp, Homo sapien
gacaactggtcatcacacagacacg

SEQ ID NO: 5730807 - DNA, 25 bp, Homo sapien
gaaatcataaaaggcacaccatcca

SEQ ID NO: 5730808 - DNA, 25 bp, Homo sapien
cctctcctgcagccgccctcactgc

SEQ ID NO: 5730809 - DNA, 25 bp, Homo sapien
acttctctgaaatcataaaaggcac

SEQ ID NO: 5730810 - DNA, 25 bp, Homo sapien
gccccactcaggtgggcttatacac

SEQ ID NO: 5730811 - DNA, 25 bp, Homo sapien
ctccgtctcacgcagaagcagcttc

SEQ ID NO: 5730812 - DNA, 25 bp, Homo sapien
gctagagatttgatggtgattccca

SEQ ID NO: 5730813 - DNA, 25 bp, Homo sapien
cttggtccggcccatgatccgaatg

SEQ ID NO: 5730814 - DNA, 25 bp, Homo sapien
tgcaactacgtcatagcctgtcggg

SEQ ID NO: 5730815 - DNA, 25 bp, Homo sapien
ttctctgaaatcataaaaggcacac

SEQ ID NO: 5730816 - DNA, 25 bp, Homo sapien
gcctcggaaggtggcaggaagtgtt

SEQ ID NO: 5730817 - DNA, 25 bp, Homo sapien
cagtagtgggaagtgctgtgggggg

SEQ ID NO: 5730818 - DNA, 25 bp, Homo sapien
actggtcatcacacagacacgttag

SEQ ID NO: 5730819 - DNA, 25 bp, Homo sapien
aaagacagaaacgctctcaattcct

SEQ ID NO: 5730820 - DNA, 25 bp, Homo sapien
tgtccttgatgtcaatgagcttcat

SEQ ID NO: 5730821 - DNA, 25 bp, Homo sapien
cttaacactgtctctgcttacttat

SEQ ID NO: 5730822 - DNA, 25 bp, Homo sapien
tttgtcctcttcctggtgtccctat

SEQ ID NO: 5730823 - DNA, 25 bp, Homo sapien
taaaagctaccacagacaccaactc

SEQ ID NO: 5730824 - DNA, 25 bp, Homo sapien
ggcccaggcggcaggagccggcgcc

SEQ ID NO: 5730825 - DNA, 25 bp, Homo sapien
acagaaacgctctcaattcctaggt

SEQ ID NO: 5730826 - DNA, 25 bp, Homo sapien
ctgcgtccttgcagacagggctccc

SEQ ID NO: 5730827 - DNA, 25 bp, Homo sapien
aggcagtgtgtccttgatgtcaatg

SEQ ID NO: 5730828 - DNA, 25 bp, Homo sapien
cacaccatccattgctgatatggca

SEQ ID NO: 5730829 - DNA, 25 bp, Homo sapien
atgatcttgtgaaacacaggtatct

SEQ ID NO: 5730830 - DNA, 25 bp, Homo sapien
taaatatgcagcggggacgtcatcc

SEQ ID NO: 5730831 - DNA, 25 bp, Homo sapien
tggagtgctggtactcgtagtccgt

SEQ ID NO: 5730832 - DNA, 25 bp, Homo sapien
gtgtactgaggcggggcctgcttgg

SEQ ID NO: 5730833 - DNA, 25 bp, Homo sapien
gctggctcctcaggactgcgggatc

SEQ ID NO: 5730834 - DNA, 25 bp, Homo sapien
cccatgatccgaatgtcacaaatcg

SEQ ID NO: 5730835 - DNA, 25 bp, Homo sapien
agtacaagagtcaccttgaataaat

SEQ ID NO: 5730836 - DNA, 25 bp, Homo sapien
agaggtgaaggacaaagttcacaaa

SEQ ID NO: 5730837 - DNA, 25 bp, Homo sapien
gtccgtaatgctatggagaagatgg

SEQ ID NO: 5730838 - DNA, 25 bp, Homo sapien
tgccgtcagtagtctgggcggcggt

SEQ ID NO: 5730839 - DNA, 25 bp, Homo sapien
cggttccgagaagccaccaccccga

SEQ ID NO: 5730840 - DNA, 25 bp, Homo sapien
tgctatggagaagatggctccagct

SEQ ID NO: 5730841 - DNA, 25 bp, Homo sapien
ctcttcctggtgtccctatccatcc

SEQ ID NO: 5730842 - DNA, 25 bp, Homo sapien
tcgtagtccgtccgggtgctgttcc

SEQ ID NO: 5730843 - DNA, 25 bp, Homo sapien
ctgccacaggcctcttcccagtcat

SEQ ID NO: 5730844 - DNA, 25 bp, Homo sapien
ttgagtccatgcagtttgtcctctt

SEQ ID NO: 5730845 - DNA, 25 bp, Homo sapien
acgagccccactcaggtgggcttat

SEQ ID NO: 5730846 - DNA, 25 bp, Homo sapien
attgctgatatggcatacaaattgg

SEQ ID NO: 5730847 - DNA, 25 bp, Homo sapien
atgctgttcagttccccaataaacg

SEQ ID NO: 5730848 - DNA, 25 bp, Homo sapien
gcggaggcggcaggaggaggcgggg

SEQ ID NO: 5730849 - DNA, 25 bp, Homo sapien
tgggttaggagcagcctaaaagcta

SEQ ID NO: 5730850 - DNA, 25 bp, Homo sapien
cttatgctaagtccgtaatgctatg

SEQ ID NO: 5730851 - DNA, 25 bp, Homo sapien
gcctcagttctcctgcacgagcccc

SEQ ID NO: 5730852 - DNA, 25 bp, Homo sapien
ggcagcagcccctgccgtcagtagt

SEQ ID NO: 5730853 - DNA, 25 bp, Homo sapien
actgtctctgcttacttatcttaag

SEQ ID NO: 5730854 - DNA, 25 bp, Homo sapien
attggagtgctggtactcgtagtcc

SEQ ID NO: 5730855 - DNA, 25 bp, Homo sapien
gatggctccagctcgcttgagtcca

SEQ ID NO: 5730856 - DNA, 25 bp, Homo sapien
aaggcttctgagaggtctttgactt

SEQ ID NO: 5730857 - DNA, 25 bp, Homo sapien
gtcttccttgtccagggacagaagc

SEQ ID NO: 5730858 - DNA, 25 bp, Homo sapien
acaacgttcacagtcatttactctt

SEQ ID NO: 5730859 - DNA, 25 bp, Homo sapien
gttctcctgcacgagccccactcag

SEQ ID NO: 5730860 - DNA, 25 bp, Homo sapien
gcgctctgctctgtgcggaagctgt

SEQ ID NO: 5730861 - DNA, 25 bp, Homo sapien
ctccccgcaggtggccgctggctcc

SEQ ID NO: 5730862 - DNA, 25 bp, Homo sapien
gcatacaaattggagtgctggtact

SEQ ID NO: 5730863 - DNA, 25 bp, Homo sapien
cttgtcctcacccacctctcagaag

SEQ ID NO: 5730864 - DNA, 25 bp, Homo sapien
cggcggcgggtcccggctccgtctc

SEQ ID NO: 5730865 - DNA, 25 bp, Homo sapien
caccactgcctctgagcctcctagg

SEQ ID NO: 5730866 - DNA, 25 bp, Homo sapien
tctgcccattcgataccagatcccc

SEQ ID NO: 5730867 - DNA, 25 bp, Homo sapien
gacctgagggatgaggccaagaccc

SEQ ID NO: 5730868 - DNA, 25 bp, Homo sapien
tggagaaaagtactctcccaaaaga

SEQ ID NO: 5730869 - DNA, 25 bp, Homo sapien
ggaagtgttagggagatgtgcctgg

SEQ ID NO: 5730870 - DNA, 25 bp, Homo sapien
aacgttcacagtcatttactcttat

SEQ ID NO: 5730871 - DNA, 25 bp, Homo sapien
cccgtgatgggatccattgacgttt

SEQ ID NO: 5730872 - DNA, 25 bp, Homo sapien
gggctgggcgggagcctggcggctg

SEQ ID NO: 5730873 - DNA, 25 bp, Homo sapien
tcactgcttattctgcgtccttgca

SEQ ID NO: 5730874 - DNA, 25 bp, Homo sapien
gtctccgggccagccctgctggggc

SEQ ID NO: 5730875 - DNA, 25 bp, Homo sapien
ttttggaggacaactggtcatcaca

SEQ ID NO: 5730876 - DNA, 25 bp, Homo sapien
gggggctggggtggaggcagctgat

SEQ ID NO: 5730877 - DNA, 25 bp, Homo sapien
gaatgtcacaaatcgcagcttccgt

SEQ ID NO: 5730878 - DNA, 25 bp, Homo sapien
ggtggactggtctgttccccgctgg

SEQ ID NO: 5730879 - DNA, 25 bp, Homo sapien
gcccggggcccaggcggcaggagcc

SEQ ID NO: 5730880 - DNA, 25 bp, Homo sapien
ggcgggagcctggcggctgcgctct

SEQ ID NO: 5730881 - DNA, 25 bp, Homo sapien
agaggtctttgacttcaggcatggt

SEQ ID NO: 5730882 - DNA, 25 bp, Homo sapien
aagaaaacttctctgaaatcataaa

SEQ ID NO: 5730883 - DNA, 25 bp, Homo sapien
ctcttcttcctaaaagccacttcct

SEQ ID NO: 5730884 - DNA, 25 bp, Homo sapien
cctgaattgggatgaagcccacagg

SEQ ID NO: 5730885 - DNA, 25 bp, Homo sapien
caccccgactcccgtgatgggatcc

SEQ ID NO: 5730886 - DNA, 25 bp, Homo sapien
tgcgcccacttagctgcccagtctc

SEQ ID NO: 5730887 - DNA, 25 bp, Homo sapien
ctaccacagacaccaactcgtcctt

SEQ ID NO: 5730888 - DNA, 25 bp, Homo sapien
tgtccaccgtctcctgaattgggat

SEQ ID NO: 5730889 - DNA, 25 bp, Homo sapien
aagttcacaaaccctaatgaagtgg

SEQ ID NO: 5730890 - DNA, 25 bp, Homo sapien
acaaccagggcacgaaaagaggtga

SEQ ID NO: 5730891 - DNA, 25 bp, Homo sapien
ggcctgcttggtccggcccatgatc

SEQ ID NO: 5730892 - DNA, 25 bp, Homo sapien
atggtgggttaggagcagcctaaaa

SEQ ID NO: 5730893 - DNA, 25 bp, Homo sapien
aatgcacagcctcttcttcctaaaa

SEQ ID NO: 5730894 - DNA, 25 bp, Homo sapien
gacaaagttcacaaaccctaatgaa

SEQ ID NO: 5730895 - DNA, 25 bp, Homo sapien
accctaatgaagtgggcagaagtgg

SEQ ID NO: 5730896 - DNA, 25 bp, Homo sapien
atgaggccaagacccttcacatttc

SEQ ID NO: 5730897 - DNA, 25 bp, Homo sapien
agagggctcgtggagaaaagtactc

SEQ ID NO: 5730898 - DNA, 25 bp, Homo sapien
tatattaagaatacagacaatcaca

SEQ ID NO: 5730899 - DNA, 25 bp, Homo sapien
ctctcccaaaagacagaaacgctct

SEQ ID NO: 5730900 - DNA, 25 bp, Homo sapien
agacagaaacgctctcaattcctag

SEQ ID NO: 5730901 - DNA, 25 bp, Homo sapien
cgttcacagtcatttactcttatgc

SEQ ID NO: 5730902 - DNA, 25 bp, Homo sapien
taacactgtctctgcttacttatct

SEQ ID NO: 5730903 - DNA, 25 bp, Homo sapien
ggcggcggtggtctccccgcaggtg

SEQ ID NO: 5730904 - DNA, 25 bp, Homo sapien
aactcgtccttaacactgtctctgc

SEQ ID NO: 5730905 - DNA, 25 bp, Homo sapien
tgcctctgagcctcctagggtccag

SEQ ID NO: 5730906 - DNA, 25 bp, Homo sapien
ccggctccgtctcacgcagaagcag

SEQ ID NO: 5730907 - DNA, 25 bp, Homo sapien
caggcctcttcccagtcatgggggc

SEQ ID NO: 5730908 - DNA, 25 bp, Homo sapien
aaacttctctgaaatcataaaaggc

SEQ ID NO: 5730909 - DNA, 25 bp, Homo sapien
tgggcttatacacacgcatgtgcgt

SEQ ID NO: 5730910 - DNA, 25 bp, Homo sapien
aaaaggcacaccatccattgctgat

SEQ ID NO: 5730911 - DNA, 25 bp, Homo sapien
cttccttgtccagggacagaagcag

SEQ ID NO: 5730912 - DNA, 25 bp, Homo sapien
tgatttcttggtactctgcccattc

SEQ ID NO: 5730913 - DNA, 25 bp, Homo sapien
tccttaacactgtctctgcttactt

SEQ ID NO: 5730914 - DNA, 25 bp, Homo sapien
ggacgtcatccctaagggtcttcct

SEQ ID NO: 5730915 - DNA, 25 bp, Homo sapien
cctgtcggggctcggttccgagaag

SEQ ID NO: 5730916 - DNA, 25 bp, Homo sapien
tcctagggtccagcggcgctgccac

SEQ ID NO: 5730917 - DNA, 25 bp, Homo sapien
aaattggagtgctggtactcgtagt

SEQ ID NO: 5730918 - DNA, 25 bp, Homo sapien
aggcggggcctgcttggtccggccc

SEQ ID NO: 5730919 - DNA, 25 bp, Homo sapien
agcctaaaagctaccacagacacca

SEQ ID NO: 5730920 - DNA, 25 bp, Homo sapien
ctgcccccacctgccaggagtgagg

SEQ ID NO: 5730921 - DNA, 25 bp, Homo sapien
atcccgtggaataaatttaatgcac

SEQ ID NO: 5730922 - DNA, 25 bp, Homo sapien
tcaattcctaggtttgagccagagt

SEQ ID NO: 5730923 - DNA, 25 bp, Homo sapien
ctcagttctcctgcacgagccccac

SEQ ID NO: 5730924 - DNA, 25 bp, Homo sapien
gccgtttactacaacgttcacagtc

SEQ ID NO: 5730925 - DNA, 25 bp, Homo sapien
atagcctgtcggggctcggttccga

SEQ ID NO: 5730926 - DNA, 25 bp, Homo sapien
ttgggggctggggtggaggcagctg

SEQ ID NO: 5730927 - DNA, 25 bp, Homo sapien
ccgcaggtggccgctggctcctcag

SEQ ID NO: 5730928 - DNA, 25 bp, Homo sapien
aggcaatctcacaaccagggcacga

SEQ ID NO: 5730929 - DNA, 25 bp, Homo sapien
cacatttccaagggaacccttgtcc

SEQ ID NO: 5730930 - DNA, 25 bp, Homo sapien
ccccagggaggccggggtgtcagtc

SEQ ID NO: 5730931 - DNA, 25 bp, Homo sapien
ctcacccacctctcagaaggcaata

SEQ ID NO: 5730932 - DNA, 25 bp, Homo sapien
aggtggccgctggctcctcaggact

SEQ ID NO: 5730933 - DNA, 25 bp, Homo sapien
agtactctcccaaaagacagaaacg

SEQ ID NO: 5730934 - DNA, 25 bp, Homo sapien
cccctggcattacctgttagaggca

SEQ ID NO: 5730935 - DNA, 25 bp, Homo sapien
tggtctccccgcaggtggccgctgg

SEQ ID NO: 5730936 - DNA, 25 bp, Homo sapien
gcttgagtccatgcagtttgtcctc

SEQ ID NO: 5730937 - DNA, 25 bp, Homo sapien
caccatccattgctgatatggcata

SEQ ID NO: 5730938 - DNA, 25 bp, Homo sapien
gtccatgcagtttgtcctcttcctg

SEQ ID NO: 5730939 - DNA, 25 bp, Homo sapien
acttatcttaagctgccgtttacta

SEQ ID NO: 5730940 - DNA, 25 bp, Homo sapien
acctggctgggaccccagctcgaca

SEQ ID NO: 5730941 - DNA, 25 bp, Homo sapien
gttcctgcctcggaaggtggcagga

SEQ ID NO: 5730942 - DNA, 25 bp, Homo sapien
acacagtggacttcccttgccaagt

SEQ ID NO: 5730943 - DNA, 25 bp, Homo sapien
ataaaaggcacaccatccattgctg

SEQ ID NO: 5730944 - DNA, 25 bp, Homo sapien
aaggcacaccatccattgctgatat

SEQ ID NO: 5730945 - DNA, 25 bp, Homo sapien
actaacacgttccccagatgactat

SEQ ID NO: 5730946 - DNA, 25 bp, Homo sapien
gccagagctctgccctctgccctcc

SEQ ID NO: 5730947 - DNA, 25 bp, Homo sapien
ccattgctgatatggcatacaaatt

SEQ ID NO: 5730948 - DNA, 25 bp, Homo sapien
agtggccagagctctgccctctgcc

SEQ ID NO: 5730949 - DNA, 25 bp, Homo sapien
tcgcccgggcggcgcgggaggggcc

SEQ ID NO: 5730950 - DNA, 25 bp, Homo sapien
attacctgttagaggcaatctcaca

SEQ ID NO: 5730951 - DNA, 25 bp, Homo sapien
agtttgtcctcttcctggtgtccct

SEQ ID NO: 5730952 - DNA, 25 bp, Homo sapien
gctcctcaggactgcgggatctgct

SEQ ID NO: 5730953 - DNA, 25 bp, Homo sapien
tcatatctactaacacgttccccag

SEQ ID NO: 5730954 - DNA, 25 bp, Homo sapien
tgacacctggtggggctgggcggga

SEQ ID NO: 5730955 - DNA, 25 bp, Homo sapien
gtgggagggagggctggcggaggcg

SEQ ID NO: 5730956 - DNA, 25 bp, Homo sapien
cggcggtggtctccccgcaggtggc

SEQ ID NO: 5730957 - DNA, 25 bp, Homo sapien
acacctggtggggctgggcgggagc

SEQ ID NO: 5730958 - DNA, 25 bp, Homo sapien
gcctcttcttcctaaaagccacttc

SEQ ID NO: 5730959 - DNA, 25 bp, Homo sapien
tatgctaagtccgtaatgctatgga

SEQ ID NO: 5730960 - DNA, 25 bp, Homo sapien
tggccagagctctgccctctgccct

SEQ ID NO: 5730961 - DNA, 25 bp, Homo sapien
agccagagtttcatgcctcagttct

SEQ ID NO: 5730962 - DNA, 25 bp, Homo sapien
ggtggtctccccgcaggtggccgct

SEQ ID NO: 5730963 - DNA, 25 bp, Homo sapien
aatctcacaaccagggcacgaaaag

SEQ ID NO: 5730964 - DNA, 25 bp, Homo sapien
ttccccgctggggcggcggcggcgg

SEQ ID NO: 5730965 - DNA, 25 bp, Homo sapien
agctgaagacaggatgcgcccactt

SEQ ID NO: 5730966 - DNA, 25 bp, Homo sapien
ctcacgcagaagcagcttctcatcg

SEQ ID NO: 5730967 - DNA, 25 bp, Homo sapien
tgggcggcggtggtctccccgcagg

SEQ ID NO: 5730968 - DNA, 25 bp, Homo sapien
cccagtcatgggggcggagtgaagg

SEQ ID NO: 5730969 - DNA, 25 bp, Homo sapien
catgatccgaatgtcacaaatcgca

SEQ ID NO: 5730970 - DNA, 25 bp, Homo sapien
tggcggctgcgctctgctctgtgcg

SEQ ID NO: 5730971 - DNA, 25 bp, Homo sapien
agtggacttcccttgccaagtacaa

SEQ ID NO: 5730972 - DNA, 25 bp, Homo sapien
gggttgagatgagtcatgatttctt

SEQ ID NO: 5730973 - DNA, 25 bp, Homo sapien
tcacaaaccctaatgaagtgggcag

SEQ ID NO: 5730974 - DNA, 25 bp, Homo sapien
ttctcatcgcccgggcggcgcggga

SEQ ID NO: 5730975 - DNA, 25 bp, Homo sapien
gctctgccctctgccctcctgctgc

SEQ ID NO: 5730976 - DNA, 25 bp, Homo sapien
tccagaggtcagcatccacaccatc

SEQ ID NO: 5730977 - DNA, 25 bp, Homo sapien
agggctcgtggagaaaagtactctc

SEQ ID NO: 5730978 - DNA, 25 bp, Homo sapien
tgaataaatatgcagcggggacgtc

SEQ ID NO: 5730979 - DNA, 25 bp, Homo sapien
gctggcggaggcggcaggaggaggc

SEQ ID NO: 5730980 - DNA, 25 bp, Homo sapien
gtaatgctatggagaagatggctcc

SEQ ID NO: 5730981 - DNA, 25 bp, Homo sapien
ccttgcagacagggctcccacacca

SEQ ID NO: 5730982 - DNA, 25 bp, Homo sapien
agggctcccacaccactgcctctga

SEQ ID NO: 5730983 - DNA, 25 bp, Homo sapien
tgcgtgcacacacacacatatacac

SEQ ID NO: 5730984 - DNA, 25 bp, Homo sapien
ccatccattgctgatatggcataca

SEQ ID NO: 5730985 - DNA, 25 bp, Homo sapien
ggaaggcgttgtgggttgagatgag

SEQ ID NO: 5730986 - DNA, 25 bp, Homo sapien
gagatttgatggtgattcccaggag

SEQ ID NO: 5730987 - DNA, 25 bp, Homo sapien
gggagggctggcggaggcggcagga

SEQ ID NO: 5730988 - DNA, 25 bp, Homo sapien
tactctttttcgatttctgctagag

SEQ ID NO: 5730989 - DNA, 25 bp, Homo sapien
aaacgctctcaattcctaggtttga

SEQ ID NO: 5730990 - DNA, 25 bp, Homo sapien
gagggcatgcgggggcacctggctg

SEQ ID NO: 5730991 - DNA, 25 bp, Homo sapien
cgagaagccaccaccccgactcccg

SEQ ID NO: 5730992 - DNA, 25 bp, Homo sapien
ctgcatactttctggaacacaagaa

SEQ ID NO: 5730993 - DNA, 25 bp, Homo sapien
ccagggaggccggggtgtcagtcag

SEQ ID NO: 5730994 - DNA, 25 bp, Homo sapien
cgatttctgctagagatttgatggt

SEQ ID NO: 5730995 - DNA, 25 bp, Homo sapien
gggagggagggctggcggaggcggc

SEQ ID NO: 5730996 - DNA, 25 bp, Homo sapien
agtcaccttgaataaatatgcagcg

SEQ ID NO: 5730997 - DNA, 25 bp, Homo sapien
ttcgatttctgctagagatttgatg

SEQ ID NO: 5730998 - DNA, 25 bp, Homo sapien
ggtgctgttcctgcctcggaaggtg

SEQ ID NO: 5730999 - DNA, 25 bp, Homo sapien
actgaggcggggcctgcttggtccg

SEQ ID NO: 5731000 - DNA, 25 bp, Homo sapien
gacccttcacatttccaagggaacc

SEQ ID NO: 5731001 - DNA, 25 bp, Homo sapien
aggaggcgggggcagcagcccctgc

SEQ ID NO: 5731002 - DNA, 25 bp, Homo sapien
atggagaagatggctccagctcgct

SEQ ID NO: 5731003 - DNA, 25 bp, Homo sapien
accacagacaccaactcgtccttaa

SEQ ID NO: 5731004 - DNA, 25 bp, Homo sapien
cagaagtggccagagctctgccctc

SEQ ID NO: 5731005 - DNA, 25 bp, Homo sapien
catgcttgtcctcacccacctctca

SEQ ID NO: 5731006 - DNA, 25 bp, Homo sapien
agacaatcacacagtggacttccct

SEQ ID NO: 5731007 - DNA, 25 bp, Homo sapien
tgggaagtgctgtggggggacctga

SEQ ID NO: 5731008 - DNA, 25 bp, Homo sapien
tagagatttgatggtgattcccagg

SEQ ID NO: 5731009 - DNA, 25 bp, Homo sapien
cagtggccagagggctcgtggagaa

SEQ ID NO: 5731010 - DNA, 25 bp, Homo sapien
caatgtccccagggaggccggggtg

SEQ ID NO: 5731011 - DNA, 25 bp, Homo sapien
aggacaaagttcacaaaccctaatg

SEQ ID NO: 5731012 - DNA, 25 bp, Homo sapien
tacgtcatagcctgtcggggctcgg

SEQ ID NO: 5731013 - DNA, 25 bp, Homo sapien
ggatctgctgacacctggtggggct

SEQ ID NO: 5731014 - DNA, 25 bp, Homo sapien
gtctccccgcaggtggccgctggct

SEQ ID NO: 5731015 - DNA, 25 bp, Homo sapien
tggctgggaccccagctcgacaggg

SEQ ID NO: 5731016 - DNA, 25 bp, Homo sapien
caaagttcacaaaccctaatgaagt

SEQ ID NO: 5731017 - DNA, 25 bp, Homo sapien
cgtggagaaaagtactctcccaaaa

SEQ ID NO: 5731018 - DNA, 25 bp, Homo sapien
gctgggaccccagctcgacaggggc

SEQ ID NO: 5731019 - DNA, 25 bp, Homo sapien
tctgggcggcggtggtctccccgca

SEQ ID NO: 5731020 - DNA, 25 bp, Homo sapien
aagtgctgtggggggacctgaggga

SEQ ID NO: 5731021 - DNA, 25 bp, Homo sapien
agtgggggctgtgggagccccttcc

SEQ ID NO: 5731022 - DNA, 25 bp, Homo sapien
tggcatacaaattggagtgctggta

SEQ ID NO: 5731023 - DNA, 25 bp, Homo sapien
ccccacctgccaggagtgaggtttt

SEQ ID NO: 5731024 - DNA, 25 bp, Homo sapien
cactcaggtgggcttatacacacgc

SEQ ID NO: 5731025 - DNA, 25 bp, Homo sapien
cagatccccatgctgttcagttccc

SEQ ID NO: 5731026 - DNA, 25 bp, Homo sapien
agggatgaggccaagacccttcaca

SEQ ID NO: 5731027 - DNA, 25 bp, Homo sapien
actgcctctgagcctcctagggtcc

SEQ ID NO: 5731028 - DNA, 25 bp, Homo sapien
ctgatatggcatacaaattggagtg

SEQ ID NO: 5731029 - DNA, 25 bp, Homo sapien
tactacaacgttcacagtcatttac

SEQ ID NO: 5731030 - DNA, 25 bp, Homo sapien
gcggcgggtcccggctccgtctcac

SEQ ID NO: 5731031 - DNA, 25 bp, Homo sapien
gaagtgggcagaagtggccagagct

SEQ ID NO: 5731032 - DNA, 25 bp, Homo sapien
gccagccctgctggggcagtgtggg

SEQ ID NO: 5731033 - DNA, 25 bp, Homo sapien
atctgctgacacctggtggggctgg

SEQ ID NO: 5731034 - DNA, 25 bp, Homo sapien
ctcccacaccactgcctctgagcct

SEQ ID NO: 5731035 - DNA, 25 bp, Homo sapien
actgggaaggcgttgtgggttgaga

SEQ ID NO: 5731036 - DNA, 25 bp, Homo sapien
catttactcttatgctaagtccgta

SEQ ID NO: 5731037 - DNA, 25 bp, Homo sapien
ccaggagatcaaagggctgcatact

SEQ ID NO: 5731038 - DNA, 25 bp, Homo sapien
gcagccgccctcactgcttattctg

SEQ ID NO: 5731039 - DNA, 25 bp, Homo sapien
cagccctgctggggcagtgtgggag

SEQ ID NO: 5731040 - DNA, 25 bp, Homo sapien
acccttgtccttccctcccacagtg

SEQ ID NO: 5731041 - DNA, 25 bp, Homo sapien
ggcggtggctgcggcggcggcgggt

SEQ ID NO: 5731042 - DNA, 25 bp, Homo sapien
gcggcatcagtgggggctgtgggag

SEQ ID NO: 5731043 - DNA, 25 bp, Homo sapien
atgcagtttgtcctcttcctggtgt

SEQ ID NO: 5731044 - DNA, 25 bp, Homo sapien
gggatgaagcccacaggcagtgtgt

SEQ ID NO: 5731045 - DNA, 25 bp, Homo sapien
cacagacaccaactcgtccttaaca

SEQ ID NO: 5731046 - DNA, 25 bp, Homo sapien
tgagccagagtttcatgcctcagtt

SEQ ID NO: 5731047 - DNA, 25 bp, Homo sapien
ccgctggctcctcaggactgcggga

SEQ ID NO: 5731048 - DNA, 25 bp, Homo sapien
cggggtgtcagtcaggccagctgaa

SEQ ID NO: 5731049 - DNA, 25 bp, Homo sapien
atgtccccagggaggccggggtgtc

SEQ ID NO: 5731050 - DNA, 25 bp, Homo sapien
tggggcggcggcggcggtggctgcg

SEQ ID NO: 5731051 - DNA, 25 bp, Homo sapien
cctaatgaagtgggcagaagtggcc

SEQ ID NO: 5731052 - DNA, 25 bp, Homo sapien
aatcgcagcttccgttgaatcccgt

SEQ ID NO: 5731053 - DNA, 25 bp, Homo sapien
atgagtcatgatttcttggtactct

SEQ ID NO: 5731054 - DNA, 25 bp, Homo sapien
tcatgcctcagttctcctgcacgag

SEQ ID NO: 5731055 - DNA, 25 bp, Homo sapien
gctgtctgtgcaactacgtcatagc

SEQ ID NO: 5731056 - DNA, 25 bp, Homo sapien
cacacacacacaggcacatgcttgt

SEQ ID NO: 5731057 - DNA, 25 bp, Homo sapien
aaattatattaagaatacagacaat

SEQ ID NO: 5731058 - DNA, 25 bp, Homo sapien
aagacccttcacatttccaagggaa

SEQ ID NO: 5731059 - DNA, 25 bp, Homo sapien
cacacacagattagtcatggttatg

SEQ ID NO: 5731060 - DNA, 25 bp, Homo sapien
tcttcctaaaagccacttcctgtgt

SEQ ID NO: 5731061 - DNA, 25 bp, Homo sapien
ctcccaaaagacagaaacgctctca

SEQ ID NO: 5731062 - DNA, 25 bp, Homo sapien
tggacttcccttgccaagtacaaga

SEQ ID NO: 5731063 - DNA, 25 bp, Homo sapien
tgctgcccccacctgccaggagtga

SEQ ID NO: 5731064 - DNA, 25 bp, Homo sapien
ggagtgaggtttttggaggacaact

SEQ ID NO: 5731065 - DNA, 25 bp, Homo sapien
ccacctgccaggagtgaggtttttg

SEQ ID NO: 5731066 - DNA, 25 bp, Homo sapien
cccacagtggccagagggctcgtgg

SEQ ID NO: 5731067 - DNA, 25 bp, Homo sapien
tctcacaaccagggcacgaaaagag

SEQ ID NO: 5731068 - DNA, 25 bp, Homo sapien
agacaggatgcgcccacttagctgc

SEQ ID NO: 5731069 - DNA, 25 bp, Homo sapien
gcggcggcggcggtggctgcggcgg

SEQ ID NO: 5731070 - DNA, 25 bp, Homo sapien
cttccgttgaatcccgtggaataaa

SEQ ID NO: 5731071 - DNA, 25 bp, Homo sapien
tggtactctgcccattcgataccag

SEQ ID NO: 5731072 - DNA, 25 bp, Homo sapien
gcggcaggaggaggcgggggcagca

SEQ ID NO: 5731073 - DNA, 25 bp, Homo sapien
cctgtgtgtccaccgtctcctgaat

SEQ ID NO: 5731074 - DNA, 25 bp, Homo sapien
atgtcacaaatcgcagcttccgttg

SEQ ID NO: 5731075 - DNA, 25 bp, Homo sapien
gaaggtggcaggaagtgttagggag

SEQ ID NO: 5731076 - DNA, 25 bp, Homo sapien
tcacacagacacgttaggagccgct

SEQ ID NO: 5731077 - DNA, 25 bp, Homo sapien
ctaagggtcttccttgtccagggac

SEQ ID NO: 5731078 - DNA, 25 bp, Homo sapien
ctgatgactgggaaggcgttgtggg

SEQ ID NO: 5731079 - DNA, 25 bp, Homo sapien
tggcggaggcggcaggaggaggcgg

SEQ ID NO: 5731080 - DNA, 25 bp, Homo sapien
ccacttcctgtgtgtccaccgtctc

SEQ ID NO: 5731081 - DNA, 25 bp, Homo sapien
tgagatgagtcatgatttcttggta

SEQ ID NO: 5731082 - DNA, 25 bp, Homo sapien
cttcttcctaaaagccacttcctgt

SEQ ID NO: 5731083 - DNA, 25 bp, Homo sapien
cttcccttgccaagtacaagagtca

SEQ ID NO: 5731084 - DNA, 25 bp, Homo sapien
tttgagccagagtttcatgcctcag

SEQ ID NO: 5731085 - DNA, 25 bp, Homo sapien
atggttatgaacaatgtccccaggg

SEQ ID NO: 5731086 - DNA, 25 bp, Homo sapien
ggcagaagtggccagagctctgccc

SEQ ID NO: 5731087 - DNA, 25 bp, Homo sapien
gggtgtcagtcaggccagctgaaga

SEQ ID NO: 5731088 - DNA, 25 bp, Homo sapien
ggactgcgggatctgctgacacctg

SEQ ID NO: 5731089 - DNA, 25 bp, Homo sapien
gagcagcctaaaagctaccacagac

SEQ ID NO: 5731090 - DNA, 25 bp, Homo sapien
tttccagaggtcagcatccacacca

SEQ ID NO: 5731091 - DNA, 25 bp, Homo sapien
gacttcaggcatggtggactggtct

SEQ ID NO: 5731092 - DNA, 25 bp, Homo sapien
aagatggctccagctcgcttgagtc

SEQ ID NO: 5731093 - DNA, 25 bp, Homo sapien
ggatttaaataagccgtctttccag

SEQ ID NO: 5731094 - DNA, 25 bp, Homo sapien
tcgcagcttccgttgaatcccgtgg

SEQ ID NO: 5731095 - DNA, 25 bp, Homo sapien
ttagtcatggttatgaacaatgtcc

SEQ ID NO: 5731096 - DNA, 25 bp, Homo sapien
cctgagggatgaggccaagaccctt

SEQ ID NO: 5731097 - DNA, 25 bp, Homo sapien
tcaggcatggtggactggtctgttc

SEQ ID NO: 5731098 - DNA, 25 bp, Homo sapien
ccccgctggggcggcggcggcggtg

SEQ ID NO: 5731099 - DNA, 25 bp, Homo sapien
accttgaataaatatgcagcgggga

SEQ ID NO: 5731100 - DNA, 25 bp, Homo sapien
gtgggttgagatgagtcatgatttc

SEQ ID NO: 5731101 - DNA, 25 bp, Homo sapien
gtcatgatttcttggtactctgccc

SEQ ID NO: 5731102 - DNA, 25 bp, Homo sapien
tcacaaccagggcacgaaaagaggt

SEQ ID NO: 5731103 - DNA, 25 bp, Homo sapien
ggggctgtgggagccccttcctctc

SEQ ID NO: 5731104 - DNA, 25 bp, Homo sapien
gcaaggcttctgagaggtctttgac

SEQ ID NO: 5731105 - DNA, 25 bp, Homo sapien
ggggcagtgtgggagggagggctgg

SEQ ID NO: 5731106 - DNA, 25 bp, Homo sapien
cgtccttaacactgtctctgcttac

SEQ ID NO: 5731107 - DNA, 25 bp, Homo sapien
atgcgggggcacctggctgggaccc

SEQ ID NO: 5731108 - DNA, 25 bp, Homo sapien
cgttgtgggttgagatgagtcatga

SEQ ID NO: 5731109 - DNA, 25 bp, Homo sapien
atccgaatgtcacaaatcgcagctt

SEQ ID NO: 5731110 - DNA, 25 bp, Homo sapien
aaccagggcacgaaaagaggtgaag

SEQ ID NO: 5731111 - DNA, 25 bp, Homo sapien
caggagtgaggtttttggaggacaa

SEQ ID NO: 5731112 - DNA, 25 bp, Homo sapien
ccgctggggcggcggcggcggtggc

SEQ ID NO: 5731113 - DNA, 25 bp, Homo sapien
acagacacgttaggagccgctggtc

SEQ ID NO: 5731114 - DNA, 25 bp, Homo sapien
tgcttattctgcgtccttgcagaca

SEQ ID NO: 5731115 - DNA, 25 bp, Homo sapien
cagcggcatcagtgggggctgtggg

SEQ ID NO: 5731116 - DNA, 25 bp, Homo sapien
tggaacacaagaaaacttctctgaa

SEQ ID NO: 5731117 - DNA, 25 bp, Homo sapien
accccagctcgacaggggcctgcag

SEQ ID NO: 5731118 - DNA, 25 bp, Homo sapien
gcagtttgtcctcttcctggtgtcc

SEQ ID NO: 5731119 - DNA, 25 bp, Homo sapien
tacaagagtcaccttgaataaatat

SEQ ID NO: 5731120 - DNA, 25 bp, Homo sapien
cacctctcagaaggcaataaatggt

SEQ ID NO: 5731121 - DNA, 25 bp, Homo sapien
ctgcaggagggcatgcgggggcacc

SEQ ID NO: 5731122 - DNA, 25 bp, Homo sapien
catccagcaactgcaggagggcatg

SEQ ID NO: 5731123 - DNA, 25 bp, Homo sapien
tcgcttgagtccatgcagtttgtcc

SEQ ID NO: 5731124 - DNA, 25 bp, Homo sapien
gtgtcagtcaggccagctgaagaca

SEQ ID NO: 5731125 - DNA, 25 bp, Homo sapien
gggccagccctgctggggcagtgtg

SEQ ID NO: 5731126 - DNA, 25 bp, Homo sapien
acgtcatccctaagggtcttccttg

SEQ ID NO: 5731127 - DNA, 25 bp, Homo sapien
caataaatggtgggttaggagcagc

SEQ ID NO: 5731128 - DNA, 25 bp, Homo sapien
gatgactgggaaggcgttgtgggtt

SEQ ID NO: 5731129 - DNA, 25 bp, Homo sapien
cgggggcagcagcccctgccgtcag

SEQ ID NO: 5731130 - DNA, 25 bp, Homo sapien
gcatactttctggaacacaagaaaa

SEQ ID NO: 5731131 - DNA, 25 bp, Homo sapien
aaatttaatgcacagcctcttcttc

SEQ ID NO: 5731132 - DNA, 25 bp, Homo sapien
tcgacaggggcctgcagcggcatca

SEQ ID NO: 5731133 - DNA, 25 bp, Homo sapien
cctgcagcggcatcagtgggggctg

SEQ ID NO: 5731134 - DNA, 25 bp, Homo sapien
ggtccagcggcgctgccacaggcct

SEQ ID NO: 5731135 - DNA, 25 bp, Homo sapien
tccgagaagccaccaccccgactcc

SEQ ID NO: 5731136 - DNA, 25 bp, Homo sapien
tgctaagtccgtaatgctatggaga

SEQ ID NO: 5731137 - DNA, 25 bp, Homo sapien
gctgttcagttccccaataaacgtg

SEQ ID NO: 5731138 - DNA, 25 bp, Homo sapien
tccccaataaacgtgtactgaggcg

SEQ ID NO: 5731139 - DNA, 25 bp, Homo sapien
cttatacacacgcatgtgcgtgcac

SEQ ID NO: 5731140 - DNA, 25 bp, Homo sapien
tctggcaaggcttctgagaggtctt

SEQ ID NO: 5731141 - DNA, 25 bp, Homo sapien
tggaaaatgatcttgtgaaacacag

SEQ ID NO: 5731142 - DNA, 25 bp, Homo sapien
gcaggagggcatgcgggggcacctg

SEQ ID NO: 5731143 - DNA, 25 bp, Homo sapien
acaggatgcgcccacttagctgccc

SEQ ID NO: 5731144 - DNA, 25 bp, Homo sapien
cacaccatctgctgtctgtgcaact

SEQ ID NO: 5731145 - DNA, 25 bp, Homo sapien
ggcaggaggaggcgggggcagcagc

SEQ ID NO: 5731146 - DNA, 25 bp, Homo sapien
gagtgaagggcccctggcattacct

SEQ ID NO: 5731147 - DNA, 25 bp, Homo sapien
tatggcatacaaattggagtgctgg

SEQ ID NO: 5731148 - DNA, 25 bp, Homo sapien
tgtgcctgggaaggttgggggctgg

SEQ ID NO: 5731149 - DNA, 25 bp, Homo sapien
agacacgttaggagccgctggtcac

SEQ ID NO: 5731150 - DNA, 25 bp, Homo sapien
ccagggcacgaaaagaggtgaagga

SEQ ID NO: 5731151 - DNA, 25 bp, Homo sapien
agtgtgtccttgatgtcaatgagct

SEQ ID NO: 5731152 - DNA, 25 bp, Homo sapien
gaagcagtagtgggaagtgctgtgg

SEQ ID NO: 5731153 - DNA, 25 bp, Homo sapien
actcgtagtccgtccgggtgctgtt

SEQ ID NO: 5731154 - DNA, 25 bp, Homo sapien
gacttcccttgccaagtacaagagt

SEQ ID NO: 5731155 - DNA, 25 bp, Homo sapien
tcttcccagtcatgggggcggagtg

SEQ ID NO: 5731156 - DNA, 25 bp, Homo sapien
gcgggggcacctggctgggacccca

SEQ ID NO: 5731157 - DNA, 25 bp, Homo sapien
ggccagctgaagacaggatgcgccc

SEQ ID NO: 5731158 - DNA, 25 bp, Homo sapien
atccattgctgatatggcatacaaa

SEQ ID NO: 5731159 - DNA, 25 bp, Homo sapien
tgagaggtctttgacttcaggcatg

SEQ ID NO: 5731160 - DNA, 25 bp, Homo sapien
tcaccttgaataaatatgcagcggg

SEQ ID NO: 5731161 - DNA, 25 bp, Homo sapien
ctggtgtccctatccatccagcaac

SEQ ID NO: 5731162 - DNA, 25 bp, Homo sapien
atatctactaacacgttccccagat

SEQ ID NO: 5731163 - DNA, 25 bp, Homo sapien
ctgcggcggcggcgggtcccggctc

SEQ ID NO: 5731164 - DNA, 25 bp, Homo sapien
tgtcctcttcctggtgtccctatcc

SEQ ID NO: 5731165 - DNA, 25 bp, Homo sapien
atctactaacacgttccccagatga

SEQ ID NO: 5731166 - DNA, 25 bp, Homo sapien
ggcttctgagaggtctttgacttca

SEQ ID NO: 5731167 - DNA, 25 bp, Homo sapien
aagggtcttccttgtccagggacag

SEQ ID NO: 5731168 - DNA, 25 bp, Homo sapien
catcgcccgggcggcgcgggagggg

SEQ ID NO: 5731169 - DNA, 25 bp, Homo sapien
ttatgaacaatgtccccagggaggc

SEQ ID NO: 5731170 - DNA, 25 bp, Homo sapien
tggtcactacagcacacacagatta

SEQ ID NO: 5731171 - DNA, 25 bp, Homo sapien
ctcaggtgggcttatacacacgcat

SEQ ID NO: 5731172 - DNA, 25 bp, Homo sapien
cccacaccactgcctctgagcctcc

SEQ ID NO: 5731173 - DNA, 25 bp, Homo sapien
gaacccttgtccttccctcccacag

SEQ ID NO: 5731174 - DNA, 25 bp, Homo sapien
aattgggatgaagcccacaggcagt

SEQ ID NO: 5731175 - DNA, 25 bp, Homo sapien
agctgatgactgggaaggcgttgtg

SEQ ID NO: 5731176 - DNA, 25 bp, Homo sapien
gaagtggccagagctctgccctctg

SEQ ID NO: 5731177 - DNA, 25 bp, Homo sapien
ttcctctcctgcagccgccctcact

SEQ ID NO: 5731178 - DNA, 25 bp, Homo sapien
ccttccctcccacagtggccagagg

SEQ ID NO: 5731179 - DNA, 25 bp, Homo sapien
gaggcgggggcagcagcccctgccg

SEQ ID NO: 5731180 - DNA, 25 bp, Homo sapien
cgcccacttagctgcccagtctccg

SEQ ID NO: 5731181 - DNA, 25 bp, Homo sapien
tttgatggtgattcccaggagatca

SEQ ID NO: 5731182 - DNA, 25 bp, Homo sapien
ggaggacaactggtcatcacacaga

SEQ ID NO: 5731183 - DNA, 25 bp, Homo sapien
tccttgatgtcaatgagcttcatat

SEQ ID NO: 5731184 - DNA, 25 bp, Homo sapien
cctcctagggtccagcggcgctgcc

SEQ ID NO: 5731185 - DNA, 25 bp, Homo sapien
gtcacaaatcgcagcttccgttgaa

SEQ ID NO: 5731186 - DNA, 25 bp, Homo sapien
ttaaataagccgtctttccagaggt

SEQ ID NO: 5731187 - DNA, 25 bp, Homo sapien
cacacacacacacaggcacatgctt

SEQ ID NO: 5731188 - DNA, 25 bp, Homo sapien
agtcatggttatgaacaatgtcccc

SEQ ID NO: 5731189 - DNA, 25 bp, Homo sapien
cgtgcacacacacacatatacacac

SEQ ID NO: 5731190 - DNA, 25 bp, Homo sapien
caccgtctcctgaattgggatgaag

SEQ ID NO: 5731191 - DNA, 25 bp, Homo sapien
agccgccctcactgcttattctgcg

SEQ ID NO: 5731192 - DNA, 25 bp, Homo sapien
ttgtgggttgagatgagtcatgatt

SEQ ID NO: 5731193 - DNA, 25 bp, Homo sapien
aaaccctaatgaagtgggcagaagt

SEQ ID NO: 5731194 - DNA, 25 bp, Homo sapien
cacagattagtcatggttatgaaca

SEQ ID NO: 5731195 - DNA, 25 bp, Homo sapien
acacaagaaaacttctctgaaatca

SEQ ID NO: 5731196 - DNA, 25 bp, Homo sapien
ggcggagtgaagggcccctggcatt

SEQ ID NO: 5731197 - DNA, 25 bp, Homo sapien
tctcctgcacgagccccactcaggt

SEQ ID NO: 5731198 - DNA, 25 bp, Homo sapien
ctcccgtgatgggatccattgacgt

SEQ ID NO: 5731199 - DNA, 25 bp, Homo sapien
gccgggcccggggcccaggcggcag

SEQ ID NO: 5731200 - DNA, 25 bp, Homo sapien
gtcagtagtctgggcggcggtggtc

SEQ ID NO: 5731201 - DNA, 25 bp, Homo sapien
gatgaagcccacaggcagtgtgtcc

SEQ ID NO: 5731202 - DNA, 25 bp, Homo sapien
ggcttatacacacgcatgtgcgtgc

SEQ ID NO: 5731203 - DNA, 25 bp, Homo sapien
tgctctgtgcggaagctgtactcgt

SEQ ID NO: 5731204 - DNA, 25 bp, Homo sapien
agaggcaatctcacaaccagggcac

SEQ ID NO: 5731205 - DNA, 25 bp, Homo sapien
aggtggcaggaagtgttagggagat

SEQ ID NO: 5731206 - DNA, 25 bp, Homo sapien
tgatggtgattcccaggagatcaaa

SEQ ID NO: 5731207 - DNA, 25 bp, Homo sapien
gaaaacttctctgaaatcataaaag

SEQ ID NO: 5731208 - DNA, 25 bp, Homo sapien
tccaccgtctcctgaattgggatga

SEQ ID NO: 5731209 - DNA, 25 bp, Homo sapien
acaagaaaacttctctgaaatcata

SEQ ID NO: 5731210 - DNA, 25 bp, Homo sapien
ccagatgactattttctttggaaaa

SEQ ID NO: 5731211 - DNA, 25 bp, Homo sapien
aattcctaggtttgagccagagttt

SEQ ID NO: 5731212 - DNA, 25 bp, Homo sapien
catgtgcgtgcacacacacacatat

SEQ ID NO: 5731213 - DNA, 25 bp, Homo sapien
tctgctctgtgcggaagctgtactc

SEQ ID NO: 5731214 - DNA, 25 bp, Homo sapien
gggatccattgacgtttctggcaag

SEQ ID NO: 5731215 - DNA, 25 bp, Homo sapien
tgagggatgaggccaagacccttca

SEQ ID NO: 5731216 - DNA, 25 bp, Homo sapien
acacagacacgttaggagccgctgg

SEQ ID NO: 5731217 - DNA, 25 bp, Homo sapien
tggtactcgtagtccgtccgggtgc

SEQ ID NO: 5731218 - DNA, 25 bp, Homo sapien
gagctctgccctctgccctcctgct

SEQ ID NO: 5731219 - DNA, 25 bp, Homo sapien
ctcaggactgcgggatctgctgaca

SEQ ID NO: 5731220 - DNA, 25 bp, Homo sapien
ctttttcgatttctgctagagattt

SEQ ID NO: 5731221 - DNA, 25 bp, Homo sapien
ctgccaggagtgaggtttttggagg

SEQ ID NO: 5731222 - DNA, 25 bp, Homo sapien
gcagcttccgttgaatcccgtggaa

SEQ ID NO: 5731223 - DNA, 25 bp, Homo sapien
ctctgcttacttatcttaagctgcc

SEQ ID NO: 5731224 - DNA, 25 bp, Homo sapien
ggatgaggccaagacccttcacatt

SEQ ID NO: 5731225 - DNA, 25 bp, Homo sapien
cacaggtatctggtaaccttggatt

SEQ ID NO: 5731226 - DNA, 25 bp, Homo sapien
ctattttctttggaaaatgatcttg

SEQ ID NO: 5731227 - DNA, 25 bp, Homo sapien
ggcgggggcagcagcccctgccgtc

SEQ ID NO: 5731228 - DNA, 25 bp, Homo sapien
ttaagaatacagacaatcacacagt

SEQ ID NO: 5731229 - DNA, 25 bp, Homo sapien
tcctcttcctggtgtccctatccat

SEQ ID NO: 5731230 - DNA, 25 bp, Homo sapien
tgctgatatggcatacaaattggag

SEQ ID NO: 5731231 - DNA, 25 bp, Homo sapien
cctaaaagccacttcctgtgtgtcc

SEQ ID NO: 5731232 - DNA, 25 bp, Homo sapien
gtctctgcttacttatcttaagctg

SEQ ID NO: 5731233 - DNA, 25 bp, Homo sapien
cacagtggccagagggctcgtggag

SEQ ID NO: 5731234 - DNA, 25 bp, Homo sapien
tgggaccccagctcgacaggggcct

SEQ ID NO: 5731235 - DNA, 25 bp, Homo sapien
cagttctcctgcacgagccccactc

SEQ ID NO: 5731236 - DNA, 25 bp, Homo sapien
gcggcgctgccacaggcctcttccc

SEQ ID NO: 5731237 - DNA, 25 bp, Homo sapien
tttggaaaatgatcttgtgaaacac

SEQ ID NO: 5731238 - DNA, 25 bp, Homo sapien
agctaccacagacaccaactcgtcc

SEQ ID NO: 5731239 - DNA, 25 bp, Homo sapien
tgttcagttccccaataaacgtgta

SEQ ID NO: 5731240 - DNA, 25 bp, Homo sapien
cacaccactgcctctgagcctccta

SEQ ID NO: 5731241 - DNA, 25 bp, Homo sapien
gtgaagggcccctggcattacctgt

SEQ ID NO: 5731242 - DNA, 25 bp, Homo sapien
cgtcatagcctgtcggggctcggtt

SEQ ID NO: 5731243 - DNA, 25 bp, Homo sapien
ggaggaggcgggggcagcagcccct

SEQ ID NO: 5731244 - DNA, 25 bp, Homo sapien
ccggggcccaggcggcaggagccgg

SEQ ID NO: 5731245 - DNA, 25 bp, Homo sapien
aaggcgttgtgggttgagatgagtc

SEQ ID NO: 5731246 - DNA, 25 bp, Homo sapien
gggcacctggctgggaccccagctc

SEQ ID NO: 5731247 - DNA, 25 bp, Homo sapien
taagctgccgtttactacaacgttc

SEQ ID NO: 5731248 - DNA, 25 bp, Homo sapien
cttattctgcgtccttgcagacagg

SEQ ID NO: 5731249 - DNA, 25 bp, Homo sapien
ctgaagacaggatgcgcccacttag

SEQ ID NO: 5731250 - DNA, 25 bp, Homo sapien
cctctgagcctcctagggtccagcg

SEQ ID NO: 5731251 - DNA, 25 bp, Homo sapien
cacacacacacacacacacacaggc

SEQ ID NO: 5731252 - DNA, 25 bp, Homo sapien
tggctccagctcgcttgagtccatg

SEQ ID NO: 5731253 - DNA, 25 bp, Homo sapien
gtagtgggaagtgctgtggggggac

SEQ ID NO: 5731254 - DNA, 25 bp, Homo sapien
caatgagcttcatatctactaacac

SEQ ID NO: 5731255 - DNA, 25 bp, Homo sapien
cagcggggacgtcatccctaagggt

SEQ ID NO: 5731256 - DNA, 25 bp, Homo sapien
tgcccagtctccgggccagccctgc

SEQ ID NO: 5731257 - DNA, 25 bp, Homo sapien
caggtatctggtaaccttggattta

SEQ ID NO: 5731258 - DNA, 25 bp, Homo sapien
agcttccgttgaatcccgtggaata

SEQ ID NO: 5731259 - DNA, 25 bp, Homo sapien
gcggggacgtcatccctaagggtct

SEQ ID NO: 5731260 - DNA, 25 bp, Homo sapien
ttaggagcagcctaaaagctaccac

SEQ ID NO: 5731261 - DNA, 25 bp, Homo sapien
ctactaacacgttccccagatgact

SEQ ID NO: 5731262 - DNA, 25 bp, Homo sapien
taacacgttccccagatgactattt

SEQ ID NO: 5731263 - DNA, 25 bp, Homo sapien
ttcctaggtttgagccagagtttca

SEQ ID NO: 5731264 - DNA, 25 bp, Homo sapien
aggacaactggtcatcacacagaca

SEQ ID NO: 5731265 - DNA, 25 bp, Homo sapien
aaagctaccacagacaccaactcgt

SEQ ID NO: 5731266 - DNA, 25 bp, Homo sapien
accagatccccatgctgttcagttc

SEQ ID NO: 5731267 - DNA, 25 bp, Homo sapien
acaaattatattaagaatacagaca

SEQ ID NO: 5731268 - DNA, 25 bp, Homo sapien
tacctgttagaggcaatctcacaac

SEQ ID NO: 5731269 - DNA, 25 bp, Homo sapien
ctgcagccgccctcactgcttattc

SEQ ID NO: 5731270 - DNA, 25 bp, Homo sapien
ggcacgaaaagaggtgaaggacaaa

SEQ ID NO: 5731271 - DNA, 25 bp, Homo sapien
tgaggtttttggaggacaactggtc

SEQ ID NO: 5731272 - DNA, 25 bp, Homo sapien
ggtctgttccccgctggggcggcgg

SEQ ID NO: 5731273 - DNA, 25 bp, Homo sapien
gatcttgtgaaacacaggtatctgg

SEQ ID NO: 5731274 - DNA, 25 bp, Homo sapien
attttctttggaaaatgatcttgtg

SEQ ID NO: 5731275 - DNA, 25 bp, Homo sapien
cagttccccaataaacgtgtactga

SEQ ID NO: 5731276 - DNA, 25 bp, Homo sapien
gaagggcccctggcattacctgtta

SEQ ID NO: 5731277 - DNA, 25 bp, Homo sapien
gcattacctgttagaggcaatctca

SEQ ID NO: 5731278 - DNA, 25 bp, Homo sapien
tgaagcccacaggcagtgtgtcctt

SEQ ID NO: 5731279 - DNA, 25 bp, Homo sapien
ttgccaagtacaagagtcaccttga

SEQ ID NO: 5731280 - DNA, 25 bp, Homo sapien
gcggctgcgctctgctctgtgcgga

SEQ ID NO: 5731281 - DNA, 25 bp, Homo sapien
tgggcgggagcctggcggctgcgct

SEQ ID NO: 5731282 - DNA, 25 bp, Homo sapien
ataaacgtgtactgaggcggggcct

SEQ ID NO: 5731283 - DNA, 25 bp, Homo sapien
ttgtgaaacacaggtatctggtaac

SEQ ID NO: 5731284 - DNA, 25 bp, Homo sapien
gggcggcggcggcggtggctgcggc

SEQ ID NO: 5731285 - DNA, 25 bp, Homo sapien
ctcctgaattgggatgaagcccaca

SEQ ID NO: 5731286 - DNA, 25 bp, Homo sapien
tccctaagggtcttccttgtccagg

SEQ ID NO: 5731287 - DNA, 25 bp, Homo sapien
gcaggtggccgctggctcctcagga

SEQ ID NO: 5731288 - DNA, 25 bp, Homo sapien
cctggcattacctgttagaggcaat

SEQ ID NO: 5731289 - DNA, 25 bp, Homo sapien
ctggtggggctgggcgggagcctgg

SEQ ID NO: 5731290 - DNA, 25 bp, Homo sapien
tatctggtaaccttggatttaaata

SEQ ID NO: 5731291 - DNA, 25 bp, Homo sapien
gtcagtcaggccagctgaagacagg

SEQ ID NO: 5731292 - DNA, 25 bp, Homo sapien
aggcatggtggactggtctgttccc

SEQ ID NO: 5731293 - DNA, 25 bp, Homo sapien
ttttcgatttctgctagagatttga

SEQ ID NO: 5731294 - DNA, 25 bp, Homo sapien
acagggctcccacaccactgcctct

SEQ ID NO: 5731295 - DNA, 25 bp, Homo sapien
tgaggcggggcctgcttggtccggc

SEQ ID NO: 5731296 - DNA, 25 bp, Homo sapien
ccgtctcacgcagaagcagcttctc

SEQ ID NO: 5731297 - DNA, 25 bp, Homo sapien
aggagcagcctaaaagctaccacag

SEQ ID NO: 5731298 - DNA, 25 bp, Homo sapien
ccccgcaggtggccgctggctcctc

SEQ ID NO: 5731299 - DNA, 25 bp, Homo sapien
ccgtctcctgaattgggatgaagcc

SEQ ID NO: 5731300 - DNA, 25 bp, Homo sapien
ccgggccagccctgctggggcagtg

SEQ ID NO: 5731301 - DNA, 25 bp, Homo sapien
gaaacacaggtatctggtaaccttg

SEQ ID NO: 5731302 - DNA, 25 bp, Homo sapien
gtcatttactcttatgctaagtccg

SEQ ID NO: 5731303 - DNA, 25 bp, Homo sapien
tactcgtactctttttcgatttctg

SEQ ID NO: 5731304 - DNA, 25 bp, Homo sapien
cacgcagaagcagcttctcatcgcc

SEQ ID NO: 5731305 - DNA, 25 bp, Homo sapien
gcaactgcaggagggcatgcggggg

SEQ ID NO: 5731306 - DNA, 25 bp, Homo sapien
ccagctgaagacaggatgcgcccac

SEQ ID NO: 5731307 - DNA, 25 bp, Homo sapien
ccgctggtcactacagcacacacag

SEQ ID NO: 5731308 - DNA, 25 bp, Homo sapien
agaagccaccaccccgactcccgtg

SEQ ID NO: 5731309 - DNA, 25 bp, Homo sapien
atactttctggaacacaagaaaact

SEQ ID NO: 5731310 - DNA, 25 bp, Homo sapien
acacgttccccagatgactattttc

SEQ ID NO: 5731311 - DNA, 25 bp, Homo sapien
gcttctcatcgcccgggcggcgcgg

SEQ ID NO: 5731312 - DNA, 25 bp, Homo sapien
tgtcggggctcggttccgagaagcc

SEQ ID NO: 5731313 - DNA, 25 bp, Homo sapien
catgatttcttggtactctgcccat

SEQ ID NO: 5731314 - DNA, 25 bp, Homo sapien
cacacacacacacacacacacacag

SEQ ID NO: 5731315 - DNA, 25 bp, Homo sapien
caataaacgtgtactgaggcggggc

SEQ ID NO: 5731316 - DNA, 25 bp, Homo sapien
cgataccagatccccatgctgttca

SEQ ID NO: 5731317 - DNA, 25 bp, Homo sapien
caggactgcgggatctgctgacacc

SEQ ID NO: 5731318 - DNA, 25 bp, Homo sapien
atacagacaatcacacagtggactt

SEQ ID NO: 5731319 - DNA, 25 bp, Homo sapien
cccactcaggtgggcttatacacac

SEQ ID NO: 5731320 - DNA, 25 bp, Homo sapien
ttcagttccccaataaacgtgtact

SEQ ID NO: 5731321 - DNA, 25 bp, Homo sapien
tgcagcggggacgtcatccctaagg

SEQ ID NO: 5731322 - DNA, 25 bp, Homo sapien
cacaaatcgcagcttccgttgaatc

SEQ ID NO: 5731323 - DNA, 25 bp, Homo sapien
gggggacctgagggatgaggccaag

SEQ ID NO: 5731324 - DNA, 25 bp, Homo sapien
cgggtgctgttcctgcctcggaagg

SEQ ID NO: 5731325 - DNA, 25 bp, Homo sapien
ccgtaatgctatggagaagatggct

SEQ ID NO: 5731326 - DNA, 25 bp, Homo sapien
gacgtttctggcaaggcttctgaga

SEQ ID NO: 5731327 - DNA, 25 bp, Homo sapien
cttcaggcatggtggactggtctgt

SEQ ID NO: 5731328 - DNA, 25 bp, Homo sapien
tgattcccaggagatcaaagggctg

SEQ ID NO: 5731329 - DNA, 25 bp, Homo sapien
tcttgtgaaacacaggtatctggta

SEQ ID NO: 5731330 - DNA, 25 bp, Homo sapien
tggaataaatttaatgcacagcctc

SEQ ID NO: 5731331 - DNA, 25 bp, Homo sapien
tattaagaatacagacaatcacaca

SEQ ID NO: 5731332 - DNA, 25 bp, Homo sapien
tcaaagggctgcatactttctggaa

SEQ ID NO: 5731333 - DNA, 25 bp, Homo sapien
acgtgtactgaggcggggcctgctt

SEQ ID NO: 5731334 - DNA, 25 bp, Homo sapien
ttggaggacaactggtcatcacaca

SEQ ID NO: 5731335 - DNA, 25 bp, Homo sapien
gtagtctgggcggcggtggtctccc

SEQ ID NO: 5731336 - DNA, 25 bp, Homo sapien
gatgcgcccacttagctgcccagtc

SEQ ID NO: 5731337 - DNA, 25 bp, Homo sapien
cctaaaagctaccacagacaccaac

SEQ ID NO: 5731338 - DNA, 25 bp, Homo sapien
gacagaagcagtagtgggaagtgct

SEQ ID NO: 5731339 - DNA, 25 bp, Homo sapien
gtactgaggcggggcctgcttggtc

SEQ ID NO: 5731340 - DNA, 25 bp, Homo sapien
agaagatggctccagctcgcttgag

SEQ ID NO: 5731341 - DNA, 25 bp, Homo sapien
cattgacgtttctggcaaggcttct

SEQ ID NO: 5731342 - DNA, 25 bp, Homo sapien
tgggggctgtgggagccccttcctc

SEQ ID NO: 5731343 - DNA, 25 bp, Homo sapien
cctgttagaggcaatctcacaacca

SEQ ID NO: 5731344 - DNA, 25 bp, Homo sapien
ctacaacgttcacagtcatttactc

SEQ ID NO: 5731345 - DNA, 25 bp, Homo sapien
catccacaccatctgctgtctgtgc

SEQ ID NO: 5731346 - DNA, 25 bp, Homo sapien
agctgccgtttactacaacgttcac

SEQ ID NO: 5731347 - DNA, 25 bp, Homo sapien
ctttgacttcaggcatggtggactg

SEQ ID NO: 5731348 - DNA, 25 bp, Homo sapien
ctagggtccagcggcgctgccacag

SEQ ID NO: 5731349 - DNA, 25 bp, Homo sapien
tctgagcctcctagggtccagcggc

SEQ ID NO: 5731350 - DNA, 25 bp, Homo sapien
gtggccgctggctcctcaggactgc

SEQ ID NO: 5731351 - DNA, 25 bp, Homo sapien
caactggtcatcacacagacacgtt

SEQ ID NO: 5731352 - DNA, 25 bp, Homo sapien
gaacaatgtccccagggaggccggg

SEQ ID NO: 5731353 - DNA, 25 bp, Homo sapien
ggtgggttaggagcagcctaaaagc

SEQ ID NO: 5731354 - DNA, 25 bp, Homo sapien
tccgtccgggtgctgttcctgcctc

SEQ ID NO: 5731355 - DNA, 25 bp, Homo sapien
cacagcctcttcttcctaaaagcca

SEQ ID NO: 5731356 - DNA, 25 bp, Homo sapien
aggcggcaggaggaggcgggggcag

SEQ ID NO: 5731357 - DNA, 25 bp, Homo sapien
ctgcctcggaaggtggcaggaagtg

SEQ ID NO: 5731358 - DNA, 25 bp, Homo sapien
ggcctcttcccagtcatgggggcgg

SEQ ID NO: 5731359 - DNA, 25 bp, Homo sapien
tggggtggaggcagctgatgactgg

SEQ ID NO: 5731360 - DNA, 25 bp, Homo sapien
agcagcttctcatcgcccgggcggc

SEQ ID NO: 5731361 - DNA, 25 bp, Homo sapien
tgtgcaactacgtcatagcctgtcg

SEQ ID NO: 5731362 - DNA, 25 bp, Homo sapien
tatacacacgcatgtgcgtgcacac

SEQ ID NO: 5731363 - DNA, 25 bp, Homo sapien
gttccgagaagccaccaccccgact

SEQ ID NO: 5731364 - DNA, 25 bp, Homo sapien
aagtccgtaatgctatggagaagat

SEQ ID NO: 5731365 - DNA, 25 bp, Homo sapien
ggcacaccatccattgctgatatgg

SEQ ID NO: 5731366 - DNA, 25 bp, Homo sapien
ggctcgtggagaaaagtactctccc

SEQ ID NO: 5731367 - DNA, 25 bp, Homo sapien
gagatcaaagggctgcatactttct

SEQ ID NO: 5731368 - DNA, 25 bp, Homo sapien
cccagtctccgggccagccctgctg

SEQ ID NO: 5731369 - DNA, 25 bp, Homo sapien
cgttgaatcccgtggaataaattta

SEQ ID NO: 5731370 - DNA, 25 bp, Homo sapien
tgtactcgtactctttttcgatttc

SEQ ID NO: 5731371 - DNA, 25 bp, Homo sapien
gtccttgcagacagggctcccacac

SEQ ID NO: 5731372 - DNA, 25 bp, Homo sapien
aaagggctgcatactttctggaaca

SEQ ID NO: 5731373 - DNA, 25 bp, Homo sapien
tctgccctctgccctcctgctgccc

SEQ ID NO: 5731374 - DNA, 25 bp, Homo sapien
gggacagaagcagtagtgggaagtg

SEQ ID NO: 5731375 - DNA, 25 bp, Homo sapien
ttagaggcaatctcacaaccagggc

SEQ ID NO: 5731376 - DNA, 25 bp, Homo sapien
gaacacaagaaaacttctctgaaat

SEQ ID NO: 5731377 - DNA, 25 bp, Homo sapien
tgactgggaaggcgttgtgggttga

SEQ ID NO: 5731378 - DNA, 25 bp, Homo sapien
ggggcctgcagcggcatcagtgggg

SEQ ID NO: 5731379 - DNA, 25 bp, Homo sapien
ctcttatgctaagtccgtaatgcta

SEQ ID NO: 5731380 - DNA, 25 bp, Homo sapien
gcatggtggactggtctgttccccg

SEQ ID NO: 5731381 - DNA, 25 bp, Homo sapien
atgggatccattgacgtttctggca

SEQ ID NO: 5731382 - DNA, 25 bp, Homo sapien
tccgggtgctgttcctgcctcggaa

SEQ ID NO: 5731383 - DNA, 25 bp, Homo sapien
ggctcccacaccactgcctctgagc

SEQ ID NO: 5731384 - DNA, 25 bp, Homo sapien
cttaagctgccgtttactacaacgt

SEQ ID NO: 5731385 - DNA, 25 bp, Homo sapien
gaaggacaaagttcacaaaccctaa

SEQ ID NO: 5731386 - DNA, 25 bp, Homo sapien
ccttcctctcctgcagccgccctca

SEQ ID NO: 5731387 - DNA, 25 bp, Homo sapien
atttcttggtactctgcccattcga

SEQ ID NO: 5731388 - DNA, 25 bp, Homo sapien
ggcgttgtgggttgagatgagtcat

SEQ ID NO: 5731389 - DNA, 25 bp, Homo sapien
tgcccattcgataccagatccccat

SEQ ID NO: 5731390 - DNA, 25 bp, Homo sapien
agagtcaccttgaataaatatgcag

SEQ ID NO: 5731391 - DNA, 25 bp, Homo sapien
tgtgcgtgcacacacacacatatac

SEQ ID NO: 5731392 - DNA, 25 bp, Homo sapien
gctcgacaggggcctgcagcggcat

SEQ ID NO: 5731393 - DNA, 25 bp, Homo sapien
gctcgcttgagtccatgcagtttgt

SEQ ID NO: 5731394 - DNA, 25 bp, Homo sapien
ggggcctgcttggtccggcccatga

SEQ ID NO: 5731395 - DNA, 25 bp, Homo sapien
agccacttcctgtgtgtccaccgtc

SEQ ID NO: 5731396 - DNA, 25 bp, Homo sapien
catccctaagggtcttccttgtcca

SEQ ID NO: 5731397 - DNA, 25 bp, Homo sapien
cccagctcgacaggggcctgcagcg

SEQ ID NO: 5731398 - DNA, 25 bp, Homo sapien
gaatacagacaatcacacagtggac

SEQ ID NO: 5731399 - DNA, 25 bp, Homo sapien
cacgcatgtgcgtgcacacacacac

SEQ ID NO: 5731400 - DNA, 25 bp, Homo sapien
cacacgcatgtgcgtgcacacacac

SEQ ID NO: 5731401 - DNA, 25 bp, Homo sapien
ttggatttaaataagccgtctttcc

SEQ ID NO: 5731402 - DNA, 25 bp, Homo sapien
gttaggagccgctggtcactacagc

SEQ ID NO: 5731403 - DNA, 25 bp, Homo sapien
aatcacacagtggacttcccttgcc

SEQ ID NO: 5731404 - DNA, 25 bp, Homo sapien
caccaactcgtccttaacactgtct

SEQ ID NO: 5731405 - DNA, 25 bp, Homo sapien
cggagtgaagggcccctggcattac

SEQ ID NO: 5731406 - DNA, 25 bp, Homo sapien
gtcatgggggcggagtgaagggccc

SEQ ID NO: 5731407 - DNA, 25 bp, Homo sapien
acagcacacacagattagtcatggt

SEQ ID NO: 5731408 - DNA, 25 bp, Homo sapien
agccgctggtcactacagcacacac

SEQ ID NO: 5731409 - DNA, 25 bp, Homo sapien
tcctcaggactgcgggatctgctga

SEQ ID NO: 5731410 - DNA, 25 bp, Homo sapien
tcagaaggcaataaatggtgggtta

SEQ ID NO: 5731411 - DNA, 25 bp, Homo sapien
tttactacaacgttcacagtcattt

SEQ ID NO: 5731412 - DNA, 25 bp, Homo sapien
ttcacagtcatttactcttatgcta

SEQ ID NO: 5731413 - DNA, 25 bp, Homo sapien
gcccacaggcagtgtgtccttgatg

SEQ ID NO: 5731414 - DNA, 25 bp, Homo sapien
cggaaggtggcaggaagtgttaggg

SEQ ID NO: 5731415 - DNA, 25 bp, Homo sapien
acacgttaggagccgctggtcacta

SEQ ID NO: 5731416 - DNA, 25 bp, Homo sapien
gtggctgcggcggcggcgggtcccg

SEQ ID NO: 5731417 - DNA, 25 bp, Homo sapien
aagtgttagggagatgtgcctggga

SEQ ID NO: 5731418 - DNA, 25 bp, Homo sapien
gtgctggtactcgtagtccgtccgg

SEQ ID NO: 5731419 - DNA, 25 bp, Homo sapien
ggggcggagtgaagggcccctggca

SEQ ID NO: 5731420 - DNA, 25 bp, Homo sapien
cagtcaggccagctgaagacaggat

SEQ ID NO: 5731421 - DNA, 25 bp, Homo sapien
gacaggggcctgcagcggcatcagt

SEQ ID NO: 5731422 - DNA, 25 bp, Homo sapien
aaggttgggggctggggtggaggca

SEQ ID NO: 5731423 - DNA, 25 bp, Homo sapien
ctgttcctgcctcggaaggtggcag

SEQ ID NO: 5731424 - DNA, 25 bp, Homo sapien
caagtacaagagtcaccttgaataa

SEQ ID NO: 5731425 - DNA, 25 bp, Homo sapien
ctcgtccttaacactgtctctgctt

SEQ ID NO: 5731426 - DNA, 25 bp, Homo sapien
cgcatgtgcgtgcacacacacacat

SEQ ID NO: 5731427 - DNA, 25 bp, Homo sapien
ctcggaaggtggcaggaagtgttag

SEQ ID NO: 5731428 - DNA, 25 bp, Homo sapien
caaaagacagaaacgctctcaattc

SEQ ID NO: 5731429 - DNA, 25 bp, Homo sapien
ccacaggcagtgtgtccttgatgtc

SEQ ID NO: 5731430 - DNA, 25 bp, Homo sapien
gaatcccgtggaataaatttaatgc

SEQ ID NO: 5731431 - DNA, 25 bp, Homo sapien
gagtgctggtactcgtagtccgtcc

SEQ ID NO: 5731432 - DNA, 25 bp, Homo sapien
aaagaggtgaaggacaaagttcaca

SEQ ID NO: 5731433 - DNA, 25 bp, Homo sapien
cacacacacacatatacacacacac

SEQ ID NO: 5731434 - DNA, 25 bp, Homo sapien
ccatctgctgtctgtgcaactacgt

SEQ ID NO: 5731435 - DNA, 25 bp, Homo sapien
ggcaggaagtgttagggagatgtgc

SEQ ID NO: 5731436 - DNA, 25 bp, Homo sapien
atgagcttcatatctactaacacgt

SEQ ID NO: 5731437 - DNA, 25 bp, Homo sapien
tcctgcctcggaaggtggcaggaag

SEQ ID NO: 5731438 - DNA, 25 bp, Homo sapien
gttccccaataaacgtgtactgagg

SEQ ID NO: 5731439 - DNA, 25 bp, Homo sapien
taaccttggatttaaataagccgtc

SEQ ID NO: 5731440 - DNA, 25 bp, Homo sapien
ctcggttccgagaagccaccacccc

SEQ ID NO: 5731441 - DNA, 25 bp, Homo sapien
cctaggtttgagccagagtttcatg

SEQ ID NO: 5731442 - DNA, 25 bp, Homo sapien
tggtccggcccatgatccgaatgtc

SEQ ID NO: 5731443 - DNA, 25 bp, Homo sapien
ggctgcgctctgctctgtgcggaag

SEQ ID NO: 5731444 - DNA, 25 bp, Homo sapien
tgatccgaatgtcacaaatcgcagc

SEQ ID NO: 5731445 - DNA, 25 bp, Homo sapien
tgcctgggaaggttgggggctgggg

SEQ ID NO: 5731446 - DNA, 25 bp, Homo sapien
caggaggaggcgggggcagcagccc

SEQ ID NO: 5731447 - DNA, 25 bp, Homo sapien
tcatagcctgtcggggctcggttcc

SEQ ID NO: 5731448 - DNA, 25 bp, Homo sapien
ctaagtccgtaatgctatggagaag

SEQ ID NO: 5731449 - DNA, 25 bp, Homo sapien
atggtgattcccaggagatcaaagg

SEQ ID NO: 5731450 - DNA, 25 bp, Homo sapien
tgtccagggacagaagcagtagtgg

SEQ ID NO: 5731451 - DNA, 25 bp, Homo sapien
cctctcagaaggcaataaatggtgg

SEQ ID NO: 5731452 - DNA, 25 bp, Homo sapien
tttctggaacacaagaaaacttctc

SEQ ID NO: 5731453 - DNA, 25 bp, Homo sapien
agcacacacagattagtcatggtta

SEQ ID NO: 5731454 - DNA, 25 bp, Homo sapien
tacacacgcatgtgcgtgcacacac

SEQ ID NO: 5731455 - DNA, 25 bp, Homo sapien
ttaatgcacagcctcttcttcctaa

SEQ ID NO: 5731456 - DNA, 25 bp, Homo sapien
tgtctgtgcaactacgtcatagcct

SEQ ID NO: 5731457 - DNA, 25 bp, Homo sapien
cagacaccaactcgtccttaacact

SEQ ID NO: 5731458 - DNA, 25 bp, Homo sapien
cacacacacatatacacacacacac

SEQ ID NO: 5731459 - DNA, 25 bp, Homo sapien
cacacagattagtcatggttatgaa

SEQ ID NO: 5731460 - DNA, 25 bp, Homo sapien
cacagtcatttactcttatgctaag

SEQ ID NO: 5731461 - DNA, 25 bp, Homo sapien
cctatccatccagcaactgcaggag

SEQ ID NO: 5731462 - DNA, 25 bp, Homo sapien
tctgtgcaactacgtcatagcctgt

SEQ ID NO: 5731463 - DNA, 25 bp, Homo sapien
gcggggcctgcttggtccggcccat

SEQ ID NO: 5731464 - DNA, 25 bp, Homo sapien
ctggggcagtgtgggagggagggct

SEQ ID NO: 5731465 - DNA, 25 bp, Homo sapien
cagattagtcatggttatgaacaat

SEQ ID NO: 5731466 - DNA, 25 bp, Homo sapien
ggaggcggcaggaggaggcgggggc

SEQ ID NO: 5731467 - DNA, 25 bp, Homo sapien
cgtggaataaatttaatgcacagcc

SEQ ID NO: 5731468 - DNA, 25 bp, Homo sapien
cacacacatatacacacacacacac

SEQ ID NO: 5731469 - DNA, 25 bp, Homo sapien
cagcagcccctgccgtcagtagtct

SEQ ID NO: 5731470 - DNA, 25 bp, Homo sapien
tgcgggatctgctgacacctggtgg

SEQ ID NO: 5731471 - DNA, 25 bp, Homo sapien
cccattcgataccagatccccatgc

SEQ ID NO: 5731472 - DNA, 25 bp, Homo sapien
cacacacacacacacaggcacatgc

SEQ ID NO: 5731473 - DNA, 25 bp, Homo sapien
caccatctgctgtctgtgcaactac

SEQ ID NO: 5731474 - DNA, 25 bp, Homo sapien
cacacatatacacacacacacacac

SEQ ID NO: 5731475 - DNA, 25 bp, Homo sapien
ggtggggctgggcgggagcctggcg

SEQ ID NO: 5731476 - DNA, 25 bp, Homo sapien
aacacaggtatctggtaaccttgga

SEQ ID NO: 5731477 - DNA, 25 bp, Homo sapien
ggcggcggcgggtcccggctccgtc

SEQ ID NO: 5731478 - DNA, 25 bp, Homo sapien
gcaatctcacaaccagggcacgaaa

SEQ ID NO: 5731479 - DNA, 25 bp, Homo sapien
tgcacacacacacatatacacacac

SEQ ID NO: 5731480 - DNA, 25 bp, Homo sapien
agcctcctagggtccagcggcgctg

SEQ ID NO: 5731481 - DNA, 25 bp, Homo sapien
aagcccacaggcagtgtgtccttga

SEQ ID NO: 5731482 - DNA, 25 bp, Homo sapien
cacatatacacacacacacacacac

SEQ ID NO: 5731483 - DNA, 25 bp, Homo sapien
ggcccatgatccgaatgtcacaaat

SEQ ID NO: 5731484 - DNA, 25 bp, Homo sapien
ggtgggcttatacacacgcatgtgc

SEQ ID NO: 5731485 - DNA, 25 bp, Homo sapien
gccaagtacaagagtcaccttgaat

SEQ ID NO: 5731486 - DNA, 25 bp, Homo sapien
catatacacacacacacacacacac

SEQ ID NO: 5731487 - DNA, 25 bp, Homo sapien
atctgctgtctgtgcaactacgtca

SEQ ID NO: 5731488 - DNA, 25 bp, Homo sapien
gtccttccctcccacagtggccaga

SEQ ID NO: 5731489 - DNA, 25 bp, Homo sapien
atggtggactggtctgttccccgct

SEQ ID NO: 5731490 - DNA, 25 bp, Homo sapien
tatacacacacacacacacacacac

SEQ ID NO: 5731491 - DNA, 25 bp, Homo sapien
gtctcctgaattgggatgaagccca

SEQ ID NO: 5731492 - DNA, 25 bp, Homo sapien
cccctgccgtcagtagtctgggcgg

SEQ ID NO: 5731493 - DNA, 25 bp, Homo sapien
tacacacacacacacacacacacac

SEQ ID NO: 5731494 - DNA, 25 bp, Homo sapien
ttgaatcccgtggaataaatttaat

SEQ ID NO: 5731495 - DNA, 25 bp, Homo sapien
cagctcgacaggggcctgcagcggc

SEQ ID NO: 5731496 - DNA, 25 bp, Homo sapien
gctgacacctggtggggctgggcgg

SEQ ID NO: 5731497 - DNA, 25 bp, Homo sapien
tgatgtcaatgagcttcatatctac

SEQ ID NO: 5731498 - DNA, 25 bp, Homo sapien
cttgatgtcaatgagcttcatatct

SEQ ID NO: 5731499 - DNA, 25 bp, Homo sapien
ccgactcccgtgatgggatccattg

SEQ ID NO: 5731500 - DNA, 25 bp, Homo sapien
gcagacagggctcccacaccactgc

SEQ ID NO: 5731501 - DNA, 25 bp, Homo sapien
gtctcacgcagaagcagcttctcat

SEQ ID NO: 5731502 - DNA, 25 bp, Homo sapien
ctctgaaatcataaaaggcacacca

SEQ ID NO: 5731503 - DNA, 25 bp, Homo sapien
atttctgctagagatttgatggtga

SEQ ID NO: 5731504 - DNA, 25 bp, Homo sapien
ggcccctggcattacctgttagagg

SEQ ID NO: 5731505 - DNA, 25 bp, Homo sapien
ttacttatcttaagctgccgtttac

SEQ ID NO: 5731506 - DNA, 25 bp, Homo sapien
gtggaggcagctgatgactgggaag

SEQ ID NO: 5731507 - DNA, 25 bp, Homo sapien
agtgggaagtgctgtggggggacct

SEQ ID NO: 5731508 - DNA, 25 bp, Homo sapien
atgcctcagttctcctgcacgagcc

SEQ ID NO: 5731509 - DNA, 25 bp, Homo sapien
agatgagtcatgatttcttggtact

SEQ ID NO: 5731510 - DNA, 25 bp, Homo sapien
cgtgatgggatccattgacgtttct

SEQ ID NO: 5731511 - DNA, 25 bp, Homo sapien
ggggacgtcatccctaagggtcttc

SEQ ID NO: 5731512 - DNA, 25 bp, Homo sapien
ccaactcgtccttaacactgtctct

SEQ ID NO: 5731513 - DNA, 25 bp, Homo sapien
cagcggcgctgccacaggcctcttc

SEQ ID NO: 5731514 - DNA, 25 bp, Homo sapien
aggtgaaggacaaagttcacaaacc

SEQ ID NO: 5731515 - DNA, 25 bp, Homo sapien
tccatccagcaactgcaggagggca

SEQ ID NO: 5731516 - DNA, 25 bp, Homo sapien
aagctgtactcgtactctttttcga

SEQ ID NO: 5731517 - DNA, 25 bp, Homo sapien
agaaacgctctcaattcctaggttt

SEQ ID NO: 5731518 - DNA, 25 bp, Homo sapien
cgcagaagcagcttctcatcgcccg

SEQ ID NO: 5731519 - DNA, 25 bp, Homo sapien
tctttccagaggtcagcatccacac

SEQ ID NO: 5731520 - DNA, 25 bp, Homo sapien
cctcactgcttattctgcgtccttg

SEQ ID NO: 5731521 - DNA, 25 bp, Homo sapien
ggagaagatggctccagctcgcttg

SEQ ID NO: 5731522 - DNA, 25 bp, Homo sapien
ccgaatgtcacaaatcgcagcttcc

SEQ ID NO: 5731523 - DNA, 25 bp, Homo sapien
ctctttttcgatttctgctagagat

SEQ ID NO: 5731524 - DNA, 25 bp, Homo sapien
agtgggcagaagtggccagagctct

SEQ ID NO: 5731525 - DNA, 25 bp, Homo sapien
tctcagaaggcaataaatggtgggt

SEQ ID NO: 5731526 - DNA, 25 bp, Homo sapien
tcctggtgtccctatccatccagca

SEQ ID NO: 5731527 - DNA, 25 bp, Homo sapien
gactcccgtgatgggatccattgac

SEQ ID NO: 5731528 - DNA, 25 bp, Homo sapien
gggtggaggcagctgatgactggga

SEQ ID NO: 5731529 - DNA, 25 bp, Homo sapien
cacaggcacatgcttgtcctcaccc

SEQ ID NO: 5731530 - DNA, 25 bp, Homo sapien
aataaatatgcagcggggacgtcat

SEQ ID NO: 5731531 - DNA, 25 bp, Homo sapien
agtccgtccgggtgctgttcctgcc

SEQ ID NO: 5731532 - DNA, 25 bp, Homo sapien
tcctgcagccgccctcactgcttat

SEQ ID NO: 5731533 - DNA, 25 bp, Homo sapien
gccaggagtgaggtttttggaggac

SEQ ID NO: 5731534 - DNA, 25 bp, Homo sapien
cattcgataccagatccccatgctg

SEQ ID NO: 5731535 - DNA, 25 bp, Homo sapien
tcctgcacgagccccactcaggtgg

SEQ ID NO: 5731536 - DNA, 25 bp, Homo sapien
gtccccagggaggccggggtgtcag

SEQ ID NO: 5731537 - DNA, 25 bp, Homo sapien
tccgttgaatcccgtggaataaatt

SEQ ID NO: 5731538 - DNA, 25 bp, Homo sapien
cagaagcagcttctcatcgcccggg

SEQ ID NO: 5731539 - DNA, 25 bp, Homo sapien
caaatcgcagcttccgttgaatccc

SEQ ID NO: 5731540 - DNA, 25 bp, Homo sapien
atttaatgcacagcctcttcttcct

SEQ ID NO: 5731541 - DNA, 25 bp, Homo sapien
tatgcagcggggacgtcatccctaa

SEQ ID NO: 5731542 - DNA, 25 bp, Homo sapien
aaagccacttcctgtgtgtccaccg

SEQ ID NO: 5731543 - DNA, 25 bp, Homo sapien
ctgcgctctgctctgtgcggaagct

SEQ ID NO: 5731544 - DNA, 25 bp, Homo sapien
ctctgtgcggaagctgtactcgtac

SEQ ID NO: 5731545 - DNA, 25 bp, Homo sapien
ccagagtttcatgcctcagttctcc

SEQ ID NO: 5731546 - DNA, 25 bp, Homo sapien
agatgactattttctttggaaaatg

SEQ ID NO: 5731547 - DNA, 25 bp, Homo sapien
cagtagtctgggcggcggtggtctc

SEQ ID NO: 5731548 - DNA, 25 bp, Homo sapien
gctgcccagtctccgggccagccct

SEQ ID NO: 5731549 - DNA, 25 bp, Homo sapien
gctgtggggggacctgagggatgag

SEQ ID NO: 5731550 - DNA, 25 bp, Homo sapien
tttctttggaaaatgatcttgtgaa

SEQ ID NO: 5731551 - DNA, 25 bp, Homo sapien
gctccagctcgcttgagtccatgca

SEQ ID NO: 5731552 - DNA, 25 bp, Homo sapien
tgcttgtcctcacccacctctcaga

SEQ ID NO: 5731553 - DNA, 25 bp, Homo sapien
caggccagctgaagacaggatgcgc

SEQ ID NO: 5731554 - DNA, 25 bp, Homo sapien
gggctggcggaggcggcaggaggag

SEQ ID NO: 5731555 - DNA, 25 bp, Homo sapien
cgtccgggtgctgttcctgcctcgg

SEQ ID NO: 5731556 - DNA, 25 bp, Homo sapien
cctcttcccagtcatgggggcggag

SEQ ID NO: 5731557 - DNA, 25 bp, Homo sapien
ctgtgcggaagctgtactcgtactc

SEQ ID NO: 5731558 - DNA, 25 bp, Homo sapien
cccgtggaataaatttaatgcacag

SEQ ID NO: 5731559 - DNA, 25 bp, Homo sapien
tgaattgggatgaagcccacaggca

SEQ ID NO: 5731560 - DNA, 25 bp, Homo sapien
agcctgtcggggctcggttccgaga

SEQ ID NO: 5731561 - DNA, 25 bp, Homo sapien
tgggggcggagtgaagggcccctgg

SEQ ID NO: 5731562 - DNA, 25 bp, Homo sapien
tggggggacctgagggatgaggcca

SEQ ID NO: 5731563 - DNA, 25 bp, Homo sapien
gctggtactcgtagtccgtccgggt

SEQ ID NO: 5731564 - DNA, 25 bp, Homo sapien
gggcatgcgggggcacctggctggg

SEQ ID NO: 5731565 - DNA, 25 bp, Homo sapien
ttatcttaagctgccgtttactaca

SEQ ID NO: 5731566 - DNA, 25 bp, Homo sapien
acctgccaggagtgaggtttttgga

SEQ ID NO: 5731567 - DNA, 25 bp, Homo sapien
tggggctgggcgggagcctggcggc

SEQ ID NO: 5731568 - DNA, 25 bp, Homo sapien
cgtttactacaacgttcacagtcat

SEQ ID NO: 5731569 - DNA, 25 bp, Homo sapien
tgtgtccaccgtctcctgaattggg

SEQ ID NO: 5731570 - DNA, 25 bp, Homo sapien
tggtcatcacacagacacgttagga

SEQ ID NO: 5731571 - DNA, 25 bp, Homo sapien
gaagacaggatgcgcccacttagct

SEQ ID NO: 5731572 - DNA, 25 bp, Homo sapien
ttctgctagagatttgatggtgatt

SEQ ID NO: 5731573 - DNA, 25 bp, Homo sapien
ggccaagacccttcacatttccaag

SEQ ID NO: 5731574 - DNA, 25 bp, Homo sapien
agcccctgccgtcagtagtctgggc

SEQ ID NO: 5731575 - DNA, 25 bp, Homo sapien
aggtctttgacttcaggcatggtgg

SEQ ID NO: 5731576 - DNA, 25 bp, Homo sapien
agcctggcggctgcgctctgctctg

SEQ ID NO: 5731577 - DNA, 25 bp, Homo sapien
tgggaaggcgttgtgggttgagatg

SEQ ID NO: 5731578 - DNA, 25 bp, Homo sapien
aggatgcgcccacttagctgcccag

SEQ ID NO: 5731579 - DNA, 25 bp, Homo sapien
gccacaggcctcttcccagtcatgg

SEQ ID NO: 5731580 - DNA, 25 bp, Homo sapien
tactcttatgctaagtccgtaatgc

SEQ ID NO: 5731581 - DNA, 25 bp, Homo sapien
tccattgacgtttctggcaaggctt

SEQ ID NO: 5731582 - DNA, 25 bp, Homo sapien
gttagggagatgtgcctgggaaggt

SEQ ID NO: 5731583 - DNA, 25 bp, Homo sapien
ggctgcggcggcggcgggtcccggc

SEQ ID NO: 5731584 - DNA, 25 bp, Homo sapien
gccctcactgcttattctgcgtcct

SEQ ID NO: 5731585 - DNA, 25 bp, Homo sapien
gcacctggctgggaccccagctcga

SEQ ID NO: 5731586 - DNA, 25 bp, Homo sapien
atacaaattggagtgctggtactcg

SEQ ID NO: 5731587 - DNA, 25 bp, Homo sapien
tgttagaggcaatctcacaaccagg

SEQ ID NO: 5731588 - DNA, 25 bp, Homo sapien
acactgtctctgcttacttatctta

SEQ ID NO: 5731589 - DNA, 25 bp, Homo sapien
gtcactacagcacacacagattagt

SEQ ID NO: 5731590 - DNA, 25 bp, Homo sapien
agggcacgaaaagaggtgaaggaca

SEQ ID NO: 5731591 - DNA, 25 bp, Homo sapien
gctggtcactacagcacacacagat

SEQ ID NO: 5731592 - DNA, 25 bp, Homo sapien
ctgcttacttatcttaagctgccgt

SEQ ID NO: 5731593 - DNA, 25 bp, Homo sapien
gaataaatttaatgcacagcctctt

SEQ ID NO: 5731594 - DNA, 25 bp, Homo sapien
gagggctggcggaggcggcaggagg

SEQ ID NO: 5731595 - DNA, 25 bp, Homo sapien
ggcatcagtgggggctgtgggagcc

SEQ ID NO: 5731596 - DNA, 25 bp, Homo sapien
cttgaataaatatgcagcggggacg

SEQ ID NO: 5731597 - DNA, 25 bp, Homo sapien
cacacacacacacacacacaggcac

SEQ ID NO: 5731598 - DNA, 25 bp, Homo sapien
gatccattgacgtttctggcaaggc

SEQ ID NO: 5731599 - DNA, 25 bp, Homo sapien
ggcgggtcccggctccgtctcacgc

SEQ ID NO: 5731600 - DNA, 25 bp, Homo sapien
gcggcggcggcgggtcccggctccg

SEQ ID NO: 5731601 - DNA, 25 bp, Homo sapien
gcatgcgggggcacctggctgggac

SEQ ID NO: 5731602 - DNA, 25 bp, Homo sapien
tgagcctcctagggtccagcggcgc

SEQ ID NO: 5731603 - DNA, 25 bp, Homo sapien
agtgaggtttttggaggacaactgg

SEQ ID NO: 5731604 - DNA, 25 bp, Homo sapien
cacttagctgcccagtctccgggcc

SEQ ID NO: 5731605 - DNA, 25 bp, Homo sapien
tgcacagcctcttcttcctaaaagc

SEQ ID NO: 5731606 - DNA, 25 bp, Homo sapien
tcacacagtggacttcccttgccaa

SEQ ID NO: 5731607 - DNA, 25 bp, Homo sapien
tctggaacacaagaaaacttctctg

SEQ ID NO: 5731608 - DNA, 25 bp, Homo sapien
cacacacaggcacatgcttgtcctc

SEQ ID NO: 5731609 - DNA, 25 bp, Homo sapien
ccagagggctcgtggagaaaagtac

SEQ ID NO: 5731610 - DNA, 25 bp, Homo sapien
cttagctgcccagtctccgggccag

SEQ ID NO: 5731611 - DNA, 25 bp, Homo sapien
tccagctcgcttgagtccatgcagt

SEQ ID NO: 5731612 - DNA, 25 bp, Homo sapien
gccctgctggggcagtgtgggaggg

SEQ ID NO: 5731613 - DNA, 25 bp, Homo sapien
gagatgtgcctgggaaggttggggg

SEQ ID NO: 5731614 - DNA, 25 bp, Homo sapien
aggcagctgatgactgggaaggcgt

SEQ ID NO: 5731615 - DNA, 25 bp, Homo sapien
tccagggacagaagcagtagtggga

SEQ ID NO: 5731616 - DNA, 25 bp, Homo sapien
acctggtggggctgggcgggagcct

SEQ ID NO: 5731617 - DNA, 25 bp, Homo sapien
gaaaatgatcttgtgaaacacaggt

SEQ ID NO: 5731618 - DNA, 25 bp, Homo sapien
ggaggccggggtgtcagtcaggcca

SEQ ID NO: 5731619 - DNA, 25 bp, Homo sapien
gctctgctctgtgcggaagctgtac

SEQ ID NO: 5731620 - DNA, 25 bp, Homo sapien
aagccgtctttccagaggtcagcat

SEQ ID NO: 5731621 - DNA, 25 bp, Homo sapien
cacaggcctcttcccagtcatgggg

SEQ ID NO: 5731622 - DNA, 25 bp, Homo sapien
gctgtactcgtactctttttcgatt

SEQ ID NO: 5731623 - DNA, 25 bp, Homo sapien
cgtactctttttcgatttctgctag

SEQ ID NO: 5731624 - DNA, 25 bp, Homo sapien
tccctatccatccagcaactgcagg

SEQ ID NO: 5731625 - DNA, 25 bp, Homo sapien
caggcacatgcttgtcctcacccac

SEQ ID NO: 5731626 - DNA, 25 bp, Homo sapien
gctgggcgggagcctggcggctgcg

SEQ ID NO: 5731627 - DNA, 25 bp, Homo sapien
ggtatctggtaaccttggatttaaa

SEQ ID NO: 5731628 - DNA, 25 bp, Homo sapien
cccaataaacgtgtactgaggcggg

SEQ ID NO: 5731629 - DNA, 25 bp, Homo sapien
catcacacagacacgttaggagccg

SEQ ID NO: 5731630 - DNA, 25 bp, Homo sapien
gcagcctaaaagctaccacagacac

SEQ ID NO: 5731631 - DNA, 25 bp, Homo sapien
gtcatccctaagggtcttccttgtc

SEQ ID NO: 5731632 - DNA, 25 bp, Homo sapien
ttcctgtgtgtccaccgtctcctga

SEQ ID NO: 5731633 - DNA, 25 bp, Homo sapien
aagccaccaccccgactcccgtgat

SEQ ID NO: 5731634 - DNA, 25 bp, Homo sapien
gtcaatgagcttcatatctactaac

SEQ ID NO: 5731635 - DNA, 25 bp, Homo sapien
tcagcatccacaccatctgctgtct

SEQ ID NO: 5731636 - DNA, 25 bp, Homo sapien
tgctggggcagtgtgggagggaggg

SEQ ID NO: 5731637 - DNA, 25 bp, Homo sapien
tcggggctcggttccgagaagccac

SEQ ID NO: 5731638 - DNA, 25 bp, Homo sapien
acgttaggagccgctggtcactaca

SEQ ID NO: 5731639 - DNA, 25 bp, Homo sapien
tgctgttcctgcctcggaaggtggc

SEQ ID NO: 5731640 - DNA, 25 bp, Homo sapien
tctcaattcctaggtttgagccaga

SEQ ID NO: 5731641 - DNA, 25 bp, Homo sapien
cagtgtgggagggagggctggcgga

SEQ ID NO: 5731642 - DNA, 25 bp, Homo sapien
catgggggcggagtgaagggcccct

SEQ ID NO: 5731643 - DNA, 25 bp, Homo sapien
ccgtcagtagtctgggcggcggtgg

SEQ ID NO: 5731644 - DNA, 25 bp, Homo sapien
gttccccagatgactattttctttg

SEQ ID NO: 5731645 - DNA, 25 bp, Homo sapien
tgtggggggacctgagggatgaggc

SEQ ID NO: 5731646 - DNA, 25 bp, Homo sapien
gaagcagcttctcatcgcccgggcg

SEQ ID NO: 5731647 - DNA, 25 bp, Homo sapien
ggcagtgtgggagggagggctggcg

SEQ ID NO: 5731648 - DNA, 25 bp, Homo sapien
ttccctcccacagtggccagagggc

SEQ ID NO: 5731649 - DNA, 25 bp, Homo sapien
tgcagcggcatcagtgggggctgtg

SEQ ID NO: 5731650 - DNA, 25 bp, Homo sapien
gactattttctttggaaaatgatct

SEQ ID NO: 5731651 - DNA, 25 bp, Homo sapien
ccactgcctctgagcctcctagggt

SEQ ID NO: 5731652 - DNA, 25 bp, Homo sapien
aaatggtgggttaggagcagcctaa

SEQ ID NO: 5731653 - DNA, 25 bp, Homo sapien
tgcttggtccggcccatgatccgaa

SEQ ID NO: 5731654 - DNA, 25 bp, Homo sapien
ttgacttcaggcatggtggactggt

SEQ ID NO: 5731655 - DNA, 25 bp, Homo sapien
cggtggctgcggcggcggcgggtcc

SEQ ID NO: 5731656 - DNA, 25 bp, Homo sapien
cagcttctcatcgcccgggcggcgc

SEQ ID NO: 5731657 - DNA, 25 bp, Homo sapien
gagccccactcaggtgggcttatac

SEQ ID NO: 5731658 - DNA, 25 bp, Homo sapien
gccgtctttccagaggtcagcatcc

SEQ ID NO: 5731659 - DNA, 25 bp, Homo sapien
tctgagaggtctttgacttcaggca

SEQ ID NO: 5731660 - DNA, 25 bp, Homo sapien
tgtgtgtccaccgtctcctgaattg

SEQ ID NO: 5731661 - DNA, 25 bp, Homo sapien
agacagggctcccacaccactgcct

SEQ ID NO: 5731662 - DNA, 25 bp, Homo sapien
tccacaccatctgctgtctgtgcaa

SEQ ID NO: 5731663 - DNA, 25 bp, Homo sapien
gaggtcagcatccacaccatctgct

SEQ ID NO: 5731664 - DNA, 25 bp, Homo sapien
ataccagatccccatgctgttcagt

SEQ ID NO: 5731665 - DNA, 25 bp, Homo sapien
ggttaggagcagcctaaaagctacc

SEQ ID NO: 5731666 - DNA, 25 bp, Homo sapien
tctcctgcagccgccctcactgctt

SEQ ID NO: 5731667 - DNA, 25 bp, Homo sapien
ggctgcatactttctggaacacaag

SEQ ID NO: 5731668 - DNA, 25 bp, Homo sapien
ttgacgtttctggcaaggcttctga

SEQ ID NO: 5731669 - DNA, 25 bp, Homo sapien
ggaccccagctcgacaggggcctgc

SEQ ID NO: 5731670 - DNA, 25 bp, Homo sapien
gtactcgtagtccgtccgggtgctg

SEQ ID NO: 5731671 - DNA, 25 bp, Homo sapien
actctgcccattcgataccagatcc

SEQ ID NO: 5731672 - DNA, 25 bp, Homo sapien
gagtccatgcagtttgtcctcttcc

SEQ ID NO: 5731673 - DNA, 25 bp, Homo sapien
ttgcagacagggctcccacaccact

SEQ ID NO: 5731674 - DNA, 25 bp, Homo sapien
tgtccctatccatccagcaactgca

SEQ ID NO: 5731675 - DNA, 25 bp, Homo sapien
ctcccacagtggccagagggctcgt

SEQ ID NO: 5731676 - DNA, 25 bp, Homo sapien
tcagtgggggctgtgggagcccctt

SEQ ID NO: 5731677 - DNA, 25 bp, Homo sapien
ggctccgtctcacgcagaagcagct

SEQ ID NO: 5731678 - DNA, 25 bp, Homo sapien
gtctttgacttcaggcatggtggac

SEQ ID NO: 5731679 - DNA, 25 bp, Homo sapien
ggtcccggctccgtctcacgcagaa

SEQ ID NO: 5731680 - DNA, 25 bp, Homo sapien
ctgccgtttactacaacgttcacag

SEQ ID NO: 5731681 - DNA, 25 bp, Homo sapien
ctggtctgttccccgctggggcggc

SEQ ID NO: 5731682 - DNA, 25 bp, Homo sapien
gggctggggtggaggcagctgatga

SEQ ID NO: 5731683 - DNA, 25 bp, Homo sapien
atgaagtgggcagaagtggccagag

SEQ ID NO: 5731684 - DNA, 25 bp, Homo sapien
tggcattacctgttagaggcaatct

SEQ ID NO: 5731685 - DNA, 25 bp, Homo sapien
ggcgctgccacaggcctcttcccag

SEQ ID NO: 5731686 - DNA, 25 bp, Homo sapien
acttcctgtgtgtccaccgtctcct

SEQ ID NO: 5731687 - DNA, 25 bp, Homo sapien
ataaatttaatgcacagcctcttct

SEQ ID NO: 5731688 - DNA, 25 bp, Homo sapien
cacccacctctcagaaggcaataaa

SEQ ID NO: 5731689 - DNA, 25 bp, Homo sapien
cagaagcagtagtgggaagtgctgt

SEQ ID NO: 5731690 - DNA, 25 bp, Homo sapien
atgtcaatgagcttcatatctacta

SEQ ID NO: 5731691 - DNA, 25 bp, Homo sapien
tttactcttatgctaagtccgtaat

SEQ ID NO: 5731692 - DNA, 25 bp, Homo sapien
tgggaaggttgggggctggggtgga

SEQ ID NO: 5731693 - DNA, 25 bp, Homo sapien
acttgcagggtcacacgaggtcagg

SEQ ID NO: 5731694 - DNA, 25 bp, Homo sapien
cctgacctcgtgtgaccctgcaagt

SEQ ID NO: 5731695 - DNA, 25 bp, Homo sapien
agtgataggactaatacttatattt

SEQ ID NO: 5731696 - DNA, 25 bp, Homo sapien
aaatataagtattagtcctatcact

SEQ ID NO: 5731697 - DNA, 25 bp, Homo sapien
ctcctttacggtcgcactcctcggt

SEQ ID NO: 5731698 - DNA, 25 bp, Homo sapien
accgaggagtgcgaccgtaaaggag

SEQ ID NO: 5731699 - DNA, 25 bp, Homo sapien
ctaccctagggacatcttcccgaat

SEQ ID NO: 5731700 - DNA, 25 bp, Homo sapien
attcgggaagatgtccctagggtag

SEQ ID NO: 5731701 - DNA, 25 bp, Homo sapien
gtcgggtctcagtgtgcgtgtaaac

SEQ ID NO: 5731702 - DNA, 25 bp, Homo sapien
gtttacacgcacactgagacccgac

SEQ ID NO: 5731703 - DNA, 25 bp, Homo sapien
agtagtaccgacaattgtaaagacc

SEQ ID NO: 5731704 - DNA, 25 bp, Homo sapien
ggtctttacaattgtcggtactact

SEQ ID NO: 5731705 - DNA, 25 bp, Homo sapien
cgccgccgcccgcatcttcggatcc

SEQ ID NO: 5731706 - DNA, 25 bp, Homo sapien
ggatccgaagatgcgggcggcggcg

SEQ ID NO: 5731707 - DNA, 25 bp, Homo sapien
agtgtacttaggaattcaaaattaa

SEQ ID NO: 5731708 - DNA, 25 bp, Homo sapien
ttaattttgaattcctaagtacact

SEQ ID NO: 5731709 - DNA, 25 bp, Homo sapien
atggcgtctactagtttcttctgcg

SEQ ID NO: 5731710 - DNA, 25 bp, Homo sapien
cgcagaagaaactagtagacgccat

SEQ ID NO: 5731711 - DNA, 25 bp, Homo sapien
gccaggtgtcgtcaggcctattttg

SEQ ID NO: 5731712 - DNA, 25 bp, Homo sapien
acatctacctccgaggacgagggcc

SEQ ID NO: 5731713 - DNA, 25 bp, Homo sapien
gcgacttcgtgcgggccatggtgga

SEQ ID NO: 5731714 - DNA, 25 bp, Homo sapien
ttcttcgtgacgttagatgaaactg

SEQ ID NO: 5731715 - DNA, 25 bp, Homo sapien
gccggtcccggctgtcaaagacact

SEQ ID NO: 5731716 - DNA, 25 bp, Homo sapien
gtgcgggccatggtggacccggccc

SEQ ID NO: 5731717 - DNA, 25 bp, Homo sapien
gcgccgatcgtggcccacctttggg

SEQ ID NO: 5731718 - DNA, 25 bp, Homo sapien
cgtcgtgtaccatcgaggacgctac

SEQ ID NO: 5731719 - DNA, 25 bp, Homo sapien
tcttatgaaggaagaagacttcaaa

SEQ ID NO: 5731720 - DNA, 25 bp, Homo sapien
tggaaagaaaagcctgttgattttc

SEQ ID NO: 5731721 - DNA, 25 bp, Homo sapien
ctttccttaaggaagttttatctga

SEQ ID NO: 5731722 - DNA, 25 bp, Homo sapien
ggctttggaccggttgctgatgacg

SEQ ID NO: 5731723 - DNA, 25 bp, Homo sapien
acttcccggatcccaggagaggaga

SEQ ID NO: 5731724 - DNA, 25 bp, Homo sapien
gctatgcggaggatgggcactgcaa

SEQ ID NO: 5731725 - DNA, 25 bp, Homo sapien
aataacccagagtacgtgtccagcg

SEQ ID NO: 5731726 - DNA, 25 bp, Homo sapien
ttcatgtgctgggctggaaagaaaa

SEQ ID NO: 5731727 - DNA, 25 bp, Homo sapien
aaaacccatgttgtacagcttccag

SEQ ID NO: 5731728 - DNA, 25 bp, Homo sapien
gtgcatttattcatccattccattg

SEQ ID NO: 5731729 - DNA, 25 bp, Homo sapien
ggcgtgatgacaacgatgtacgcca

SEQ ID NO: 5731730 - DNA, 25 bp, Homo sapien
ccttaaggaagttttatctgagcct

SEQ ID NO: 5731731 - DNA, 25 bp, Homo sapien
tacaaggacatgggcaagttttgcc

SEQ ID NO: 5731732 - DNA, 25 bp, Homo sapien
caatacctcggagcctcagcccggg

SEQ ID NO: 5731733 - DNA, 25 bp, Homo sapien
tacgccaagatcgacccctcgttag

SEQ ID NO: 5731734 - DNA, 25 bp, Homo sapien
ggcctcttatgaaggaagaagactt

SEQ ID NO: 5731735 - DNA, 25 bp, Homo sapien
ttggacgtgggaaaaataagcagtc

SEQ ID NO: 5731736 - DNA, 25 bp, Homo sapien
gacccggctcttccgagaggggagg

SEQ ID NO: 5731737 - DNA, 25 bp, Homo sapien
ggagaccatggacatcaccaagttc

SEQ ID NO: 5731738 - DNA, 25 bp, Homo sapien
atccttgtgggagagaacctcatca

SEQ ID NO: 5731739 - DNA, 25 bp, Homo sapien
taaaatcctggtgggctacaaatta

SEQ ID NO: 5731740 - DNA, 25 bp, Homo sapien
tggcccacctttgggagtacgtcat

SEQ ID NO: 5731741 - DNA, 25 bp, Homo sapien
acccggcccagacggtggaacagag

SEQ ID NO: 5731742 - DNA, 25 bp, Homo sapien
atgaccggctctgggatcgatcgtc

SEQ ID NO: 5731743 - DNA, 25 bp, Homo sapien
gccagacgaagaacgtggtcagcgg

SEQ ID NO: 5731744 - DNA, 25 bp, Homo sapien
agcaagtggagctgtttgacttgga

SEQ ID NO: 5731745 - DNA, 25 bp, Homo sapien
aagttcatcagattcaagaacggca

SEQ ID NO: 5731746 - DNA, 25 bp, Homo sapien
acctcatcaatttccacatttcttc

SEQ ID NO: 5731747 - DNA, 25 bp, Homo sapien
ctgaaagtgctgctctcctaccacg

SEQ ID NO: 5731748 - DNA, 25 bp, Homo sapien
gtcgcacgagcccagacgcctttgt

SEQ ID NO: 5731749 - DNA, 25 bp, Homo sapien
ccaagatcgacccctcgttaggaat

SEQ ID NO: 5731750 - DNA, 25 bp, Homo sapien
ccattccattgcctcaatgctgaga

SEQ ID NO: 5731751 - DNA, 25 bp, Homo sapien
tggagaaagcagcgttcttcgtgac

SEQ ID NO: 5731752 - DNA, 25 bp, Homo sapien
tttgttgtcttcaaaaacgggaaga

SEQ ID NO: 5731753 - DNA, 25 bp, Homo sapien
agaccatggacatcaccaagttcat

SEQ ID NO: 5731754 - DNA, 25 bp, Homo sapien
tggaaacaaggccttggaggagacc

SEQ ID NO: 5731755 - DNA, 25 bp, Homo sapien
tccagacatcgctgcctcgcctgcc

SEQ ID NO: 5731756 - DNA, 25 bp, Homo sapien
tgagccatgaagctcttagacaaat

SEQ ID NO: 5731757 - DNA, 25 bp, Homo sapien
acttggagaataacccagagtacgt

SEQ ID NO: 5731758 - DNA, 25 bp, Homo sapien
caccatgcgctactccctgaaagtg

SEQ ID NO: 5731759 - DNA, 25 bp, Homo sapien
ttcaggcagcaagagccggcaacgc

SEQ ID NO: 5731760 - DNA, 25 bp, Homo sapien
atacttcccggatcccaggagagga

SEQ ID NO: 5731761 - DNA, 25 bp, Homo sapien
actacacggccgatgttacgacagg

SEQ ID NO: 5731762 - DNA, 25 bp, Homo sapien
cggcaacgccatccatgccatcctg

SEQ ID NO: 5731763 - DNA, 25 bp, Homo sapien
aatcaaaccaattcgtcttttggga

SEQ ID NO: 5731764 - DNA, 25 bp, Homo sapien
tggacagctacgccaaatctctact

SEQ ID NO: 5731765 - DNA, 25 bp, Homo sapien
ggatccacgattccactctgctccg

SEQ ID NO: 5731766 - DNA, 25 bp, Homo sapien
ttcacggtcactccggacgggattg

SEQ ID NO: 5731767 - DNA, 25 bp, Homo sapien
gtcccggctgtcaaagacactgtga

SEQ ID NO: 5731768 - DNA, 25 bp, Homo sapien
cgtagcctttggtaaaggaatcatc

SEQ ID NO: 5731769 - DNA, 25 bp, Homo sapien
ctgggccaggtgtcgtcaggcctat

SEQ ID NO: 5731770 - DNA, 25 bp, Homo sapien
acaccatccagcacatgagagacag

SEQ ID NO: 5731771 - DNA, 25 bp, Homo sapien
aaaacgggaagatgggcctcaacgc

SEQ ID NO: 5731772 - DNA, 25 bp, Homo sapien
gctgtcaaagacactgtgaacaggt

SEQ ID NO: 5731773 - DNA, 25 bp, Homo sapien
tagcctttggtaaaggaatcatcaa

SEQ ID NO: 5731774 - DNA, 25 bp, Homo sapien
agtgggacatcccgggggaatgtca

SEQ ID NO: 5731775 - DNA, 25 bp, Homo sapien
gacagcaagcacatcgtcgtgtacc

SEQ ID NO: 5731776 - DNA, 25 bp, Homo sapien
cggcaagatgagtcgtgccaccaag

SEQ ID NO: 5731777 - DNA, 25 bp, Homo sapien
tgcgctcctgcaccactgagtcatg

SEQ ID NO: 5731778 - DNA, 25 bp, Homo sapien
tggaaacggccaactgcatgtccag

SEQ ID NO: 5731779 - DNA, 25 bp, Homo sapien
tccagctggcgcactacaaggacat

SEQ ID NO: 5731780 - DNA, 25 bp, Homo sapien
ttggaccaagattacagtggtattt

SEQ ID NO: 5731781 - DNA, 25 bp, Homo sapien
gatctggatgggtatggtcaagatc

SEQ ID NO: 5731782 - DNA, 25 bp, Homo sapien
ccatgatgggcggctgctgaagccc

SEQ ID NO: 5731783 - DNA, 25 bp, Homo sapien
aagatcgacccctcgttaggaataa

SEQ ID NO: 5731784 - DNA, 25 bp, Homo sapien
aatcatcaagaaatgtcgcacgagc

SEQ ID NO: 5731785 - DNA, 25 bp, Homo sapien
ttgctcaagattttgctgtcggtct

SEQ ID NO: 5731786 - DNA, 25 bp, Homo sapien
gccgatgttacgacaggtggtttga

SEQ ID NO: 5731787 - DNA, 25 bp, Homo sapien
acgtgagcgactggtgggaggagta

SEQ ID NO: 5731788 - DNA, 25 bp, Homo sapien
atgctgtggagaaagcagcgttctt

SEQ ID NO: 5731789 - DNA, 25 bp, Homo sapien
ggtatttgaagttaaaatcctggtg

SEQ ID NO: 5731790 - DNA, 25 bp, Homo sapien
gcagcagatgcagaggatcctggac

SEQ ID NO: 5731791 - DNA, 25 bp, Homo sapien
gttcactgagcacggcaagatgagt

SEQ ID NO: 5731792 - DNA, 25 bp, Homo sapien
aggccttggaggagaccatggacat

SEQ ID NO: 5731793 - DNA, 25 bp, Homo sapien
gacatcaccaagttcatgtgctggg

SEQ ID NO: 5731794 - DNA, 25 bp, Homo sapien
accggcctgtgggtggccctcatcg

SEQ ID NO: 5731795 - DNA, 25 bp, Homo sapien
agccttggagattatcaacaagcca

SEQ ID NO: 5731796 - DNA, 25 bp, Homo sapien
cttgatgctgtggagaaagcagcgt

SEQ ID NO: 5731797 - DNA, 25 bp, Homo sapien
gcaagatgagtcgtgccaccaagat

SEQ ID NO: 5731798 - DNA, 25 bp, Homo sapien
cagaggatcctggacaatacctcgg

SEQ ID NO: 5731799 - DNA, 25 bp, Homo sapien
gttatagagacctccctgaacaccg

SEQ ID NO: 5731800 - DNA, 25 bp, Homo sapien
gatggagcagcagatgcagaggatc

SEQ ID NO: 5731801 - DNA, 25 bp, Homo sapien
ccggcccagacggtggaacagaggc

SEQ ID NO: 5731802 - DNA, 25 bp, Homo sapien
agaagacttcaaacggatgacagca

SEQ ID NO: 5731803 - DNA, 25 bp, Homo sapien
aaggcgacatcaatccgaacattcc

SEQ ID NO: 5731804 - DNA, 25 bp, Homo sapien
cgagcccagacgcctttgtgcagct

SEQ ID NO: 5731805 - DNA, 25 bp, Homo sapien
aacagtgcctgacacataaaagatg

SEQ ID NO: 5731806 - DNA, 25 bp, Homo sapien
tgaagttaaaatcctggtgggctac

SEQ ID NO: 5731807 - DNA, 25 bp, Homo sapien
aagcacatcgtcgtgtaccatcgag

SEQ ID NO: 5731808 - DNA, 25 bp, Homo sapien
gttctcttgccctgagacggggatt

SEQ ID NO: 5731809 - DNA, 25 bp, Homo sapien
cctcgcctgccggtcccggctgtca

SEQ ID NO: 5731810 - DNA, 25 bp, Homo sapien
gatgacggctatggtgtgtcgtaca

SEQ ID NO: 5731811 - DNA, 25 bp, Homo sapien
ttttgctgtcggtcttggaccaaga

SEQ ID NO: 5731812 - DNA, 25 bp, Homo sapien
atctacctccgaggacgagggccgc

SEQ ID NO: 5731813 - DNA, 25 bp, Homo sapien
acagagttccctgggccaggtgtcg

SEQ ID NO: 5731814 - DNA, 25 bp, Homo sapien
cttccagacatcgctgcctcgcctg

SEQ ID NO: 5731815 - DNA, 25 bp, Homo sapien
cgtgatgacaacgatgtacgccaag

SEQ ID NO: 5731816 - DNA, 25 bp, Homo sapien
cactccggacgggattgacctgcgg

SEQ ID NO: 5731817 - DNA, 25 bp, Homo sapien
gcgtgctgtttggcaccggcctgtg

SEQ ID NO: 5731818 - DNA, 25 bp, Homo sapien
ctgtatatccttccaactcacattc

SEQ ID NO: 5731819 - DNA, 25 bp, Homo sapien
cattccttcccattcgtagcctttg

SEQ ID NO: 5731820 - DNA, 25 bp, Homo sapien
actggcgtgtacccggcaagcccct

SEQ ID NO: 5731821 - DNA, 25 bp, Homo sapien
gcttatcgtggtggtgggcgtgatg

SEQ ID NO: 5731822 - DNA, 25 bp, Homo sapien
agctgactcggtactctctgaagat

SEQ ID NO: 5731823 - DNA, 25 bp, Homo sapien
tgacggctatggtgtgtcgtacatc

SEQ ID NO: 5731824 - DNA, 25 bp, Homo sapien
aacgctgaacactcctgggcagatg

SEQ ID NO: 5731825 - DNA, 25 bp, Homo sapien
tcaaggtctggctctaccatgatgg

SEQ ID NO: 5731826 - DNA, 25 bp, Homo sapien
caacgatgtacgccaagatcgaccc

SEQ ID NO: 5731827 - DNA, 25 bp, Homo sapien
cttttgggatccacgattccactct

SEQ ID NO: 5731828 - DNA, 25 bp, Homo sapien
atgagagacagcaagcacatcgtcg

SEQ ID NO: 5731829 - DNA, 25 bp, Homo sapien
tggagctgtttgacttggagaataa

SEQ ID NO: 5731830 - DNA, 25 bp, Homo sapien
gacctccctgaacaccgcaaatctt

SEQ ID NO: 5731831 - DNA, 25 bp, Homo sapien
ggaaagtctcagcatatggaaacaa

SEQ ID NO: 5731832 - DNA, 25 bp, Homo sapien
gggctacaaattacgtgagcgactg

SEQ ID NO: 5731833 - DNA, 25 bp, Homo sapien
catcgtcaccatgcgctactccctg

SEQ ID NO: 5731834 - DNA, 25 bp, Homo sapien
aagatggcagaagctcaccaagctg

SEQ ID NO: 5731835 - DNA, 25 bp, Homo sapien
ggtgtctaaatatctcgctgtggag

SEQ ID NO: 5731836 - DNA, 25 bp, Homo sapien
agtctcagcatatggaaacaaggcc

SEQ ID NO: 5731837 - DNA, 25 bp, Homo sapien
agcatatggaaacaaggccttggag

SEQ ID NO: 5731838 - DNA, 25 bp, Homo sapien
aaacgacgtggatttccattccttc

SEQ ID NO: 5731839 - DNA, 25 bp, Homo sapien
tgctccgctcagtgggagcggatgt

SEQ ID NO: 5731840 - DNA, 25 bp, Homo sapien
gacaaatctatctctctggacttca

SEQ ID NO: 5731841 - DNA, 25 bp, Homo sapien
gagagacagcaagcacatcgtcgtg

SEQ ID NO: 5731842 - DNA, 25 bp, Homo sapien
aaggaagttttatctgagccttgga

SEQ ID NO: 5731843 - DNA, 25 bp, Homo sapien
ccttgtgggagagaacctcatcaat

SEQ ID NO: 5731844 - DNA, 25 bp, Homo sapien
ataagtcaaggaccaagttcagata

SEQ ID NO: 5731845 - DNA, 25 bp, Homo sapien
gagaagcatcagcatatgtatcgcc

SEQ ID NO: 5731846 - DNA, 25 bp, Homo sapien
gtgcctgacacataaaagatgctca

SEQ ID NO: 5731847 - DNA, 25 bp, Homo sapien
ctcatggtgaacagcaactattatg

SEQ ID NO: 5731848 - DNA, 25 bp, Homo sapien
gcctccatgacccggctcttccgag

SEQ ID NO: 5731849 - DNA, 25 bp, Homo sapien
gctgtttgacttggagaataaccca

SEQ ID NO: 5731850 - DNA, 25 bp, Homo sapien
agttttgcctcacatacgaggcctc

SEQ ID NO: 5731851 - DNA, 25 bp, Homo sapien
tcagcggcgtgctgtttggcaccgg

SEQ ID NO: 5731852 - DNA, 25 bp, Homo sapien
gggagagaacctcatcaatttccac

SEQ ID NO: 5731853 - DNA, 25 bp, Homo sapien
tacgtgtccagcggagggggctttg

SEQ ID NO: 5731854 - DNA, 25 bp, Homo sapien
ggggctttggaccggttgctgatga

SEQ ID NO: 5731855 - DNA, 25 bp, Homo sapien
ctggcagccctcaccgcaggagaca

SEQ ID NO: 5731856 - DNA, 25 bp, Homo sapien
gagaggagacagacaccatccagca

SEQ ID NO: 5731857 - DNA, 25 bp, Homo sapien
ggcaagcccctccagttggcttatc

SEQ ID NO: 5731858 - DNA, 25 bp, Homo sapien
tggcagaagctcaccaagctgtggc

SEQ ID NO: 5731859 - DNA, 25 bp, Homo sapien
aggccaggctggcagccctcaccgc

SEQ ID NO: 5731860 - DNA, 25 bp, Homo sapien
atcccgggggaatgtcaagaggtta

SEQ ID NO: 5731861 - DNA, 25 bp, Homo sapien
gtgacgttagatgaaactgaagaag

SEQ ID NO: 5731862 - DNA, 25 bp, Homo sapien
agacagacaccatccagcacatgag

SEQ ID NO: 5731863 - DNA, 25 bp, Homo sapien
ccgaggacgagggccgctcatggtg

SEQ ID NO: 5731864 - DNA, 25 bp, Homo sapien
gggaggacggagaccgtgcgctcct

SEQ ID NO: 5731865 - DNA, 25 bp, Homo sapien
cccagacgcctttgtgcagctggcc

SEQ ID NO: 5731866 - DNA, 25 bp, Homo sapien
tgcaccactgagtcatgcgacttcg

SEQ ID NO: 5731867 - DNA, 25 bp, Homo sapien
gctgtttggcaccggcctgtgggtg

SEQ ID NO: 5731868 - DNA, 25 bp, Homo sapien
ccaagatctggatgggtatggtcaa

SEQ ID NO: 5731869 - DNA, 25 bp, Homo sapien
aagacccggatacgtcaatggacag

SEQ ID NO: 5731870 - DNA, 25 bp, Homo sapien
gcatttattcatccattccattgcc

SEQ ID NO: 5731871 - DNA, 25 bp, Homo sapien
caggcctattttggacgtgggaaaa

SEQ ID NO: 5731872 - DNA, 25 bp, Homo sapien
aaatgtcgcacgagcccagacgcct

SEQ ID NO: 5731873 - DNA, 25 bp, Homo sapien
tacaaattacgtgagcgactggtgg

SEQ ID NO: 5731874 - DNA, 25 bp, Homo sapien
gctacgccaaatctctactacacgg

SEQ ID NO: 5731875 - DNA, 25 bp, Homo sapien
caagaggttatagagacctccctga

SEQ ID NO: 5731876 - DNA, 25 bp, Homo sapien
gtcaagatcttttcaggccgaaaac

SEQ ID NO: 5731877 - DNA, 25 bp, Homo sapien
catttcttccaagttctcttgccct

SEQ ID NO: 5731878 - DNA, 25 bp, Homo sapien
tgctctcctaccacgggtggatgtt

SEQ ID NO: 5731879 - DNA, 25 bp, Homo sapien
cagtggtatttgaagttaaaatcct

SEQ ID NO: 5731880 - DNA, 25 bp, Homo sapien
tggaggagaccatggacatcaccaa

SEQ ID NO: 5731881 - DNA, 25 bp, Homo sapien
catatggaaacaaggccttggagga

SEQ ID NO: 5731882 - DNA, 25 bp, Homo sapien
cagctacgccaaatctctactacac

SEQ ID NO: 5731883 - DNA, 25 bp, Homo sapien
aagagccggcaacgccatccatgcc

SEQ ID NO: 5731884 - DNA, 25 bp, Homo sapien
tgaacaggtatctacagtcggtgag

SEQ ID NO: 5731885 - DNA, 25 bp, Homo sapien
agatgaaactgaagaaggatacaga

SEQ ID NO: 5731886 - DNA, 25 bp, Homo sapien
aagttctcttgccctgagacgggga

SEQ ID NO: 5731887 - DNA, 25 bp, Homo sapien
aggggaggacggagaccgtgcgctc

SEQ ID NO: 5731888 - DNA, 25 bp, Homo sapien
gcctccagctgggctatgcggagga

SEQ ID NO: 5731889 - DNA, 25 bp, Homo sapien
acgatgtacgccaagatcgacccct

SEQ ID NO: 5731890 - DNA, 25 bp, Homo sapien
agagtacgtgtccagcggagggggc

SEQ ID NO: 5731891 - DNA, 25 bp, Homo sapien
ccatgcgctactccctgaaagtgct

SEQ ID NO: 5731892 - DNA, 25 bp, Homo sapien
ccgaacattccgtaccccaccaggc

SEQ ID NO: 5731893 - DNA, 25 bp, Homo sapien
tcgtcaccatgcgctactccctgaa

SEQ ID NO: 5731894 - DNA, 25 bp, Homo sapien
tgctgtatatccttccaactcacat

SEQ ID NO: 5731895 - DNA, 25 bp, Homo sapien
agattacagtggtatttgaagttaa

SEQ ID NO: 5731896 - DNA, 25 bp, Homo sapien
actctctgaagatggcagaagctca

SEQ ID NO: 5731897 - DNA, 25 bp, Homo sapien
ttccaactcacattcaggcagcaag

SEQ ID NO: 5731898 - DNA, 25 bp, Homo sapien
gcgggccatggtggacccggcccag

SEQ ID NO: 5731899 - DNA, 25 bp, Homo sapien
gaacctcatcaatttccacatttct

SEQ ID NO: 5731900 - DNA, 25 bp, Homo sapien
ctatggtgtgtcgtacatccttgtg

SEQ ID NO: 5731901 - DNA, 25 bp, Homo sapien
ttggaccggttgctgatgacggcta

SEQ ID NO: 5731902 - DNA, 25 bp, Homo sapien
gaatgtcaagaggttatagagacct

SEQ ID NO: 5731903 - DNA, 25 bp, Homo sapien
caagaaatgtcgcacgagcccagac

SEQ ID NO: 5731904 - DNA, 25 bp, Homo sapien
cagattcaagaacggcatcatcact

SEQ ID NO: 5731905 - DNA, 25 bp, Homo sapien
ccactctgctccgctcagtgggagc

SEQ ID NO: 5731906 - DNA, 25 bp, Homo sapien
gaggagaccatggacatcaccaagt

SEQ ID NO: 5731907 - DNA, 25 bp, Homo sapien
agcatcagcatatgtatcgcctcgc

SEQ ID NO: 5731908 - DNA, 25 bp, Homo sapien
tgcagaggatcctggacaatacctc

SEQ ID NO: 5731909 - DNA, 25 bp, Homo sapien
ctccgaggacgagggccgctcatgg

SEQ ID NO: 5731910 - DNA, 25 bp, Homo sapien
ttgacagcctccagctgggctatgc

SEQ ID NO: 5731911 - DNA, 25 bp, Homo sapien
cgcaaactggaccgggaggaaatca

SEQ ID NO: 5731912 - DNA, 25 bp, Homo sapien
aagatgctcaataaatatgttaaaa

SEQ ID NO: 5731913 - DNA, 25 bp, Homo sapien
accaggctgcagtgggacatcccgg

SEQ ID NO: 5731914 - DNA, 25 bp, Homo sapien
ctccgctcagtgggagcggatgttt

SEQ ID NO: 5731915 - DNA, 25 bp, Homo sapien
ctttggtaaaggaatcatcaagaaa

SEQ ID NO: 5731916 - DNA, 25 bp, Homo sapien
aggagtacatctacctccgaggacg

SEQ ID NO: 5731917 - DNA, 25 bp, Homo sapien
gaggagacagacaccatccagcaca

SEQ ID NO: 5731918 - DNA, 25 bp, Homo sapien
tcaccgcaggagacagagttccctg

SEQ ID NO: 5731919 - DNA, 25 bp, Homo sapien
tcaatggacagctacgccaaatctc

SEQ ID NO: 5731920 - DNA, 25 bp, Homo sapien
gctcaccaagctgtggcctttcagt

SEQ ID NO: 5731921 - DNA, 25 bp, Homo sapien
ccggctctgggatcgatcgtcacct

SEQ ID NO: 5731922 - DNA, 25 bp, Homo sapien
ctccgtagctgactcggtactctct

SEQ ID NO: 5731923 - DNA, 25 bp, Homo sapien
atcaagaaatgtcgcacgagcccag

SEQ ID NO: 5731924 - DNA, 25 bp, Homo sapien
ggaatcatcaagaaatgtcgcacga

SEQ ID NO: 5731925 - DNA, 25 bp, Homo sapien
gatacgtcaatggacagctacgcca

SEQ ID NO: 5731926 - DNA, 25 bp, Homo sapien
ttccctgggccaggtgtcgtcaggc

SEQ ID NO: 5731927 - DNA, 25 bp, Homo sapien
gtcaggcctattttggacgtgggaa

SEQ ID NO: 5731928 - DNA, 25 bp, Homo sapien
tctggaaacggccaactgcatgtcc

SEQ ID NO: 5731929 - DNA, 25 bp, Homo sapien
gtctcttgatgctgtggagaaagca

SEQ ID NO: 5731930 - DNA, 25 bp, Homo sapien
ggacccggcccagacggtggaacag

SEQ ID NO: 5731931 - DNA, 25 bp, Homo sapien
atacctcggagcctcagcccgggga

SEQ ID NO: 5731932 - DNA, 25 bp, Homo sapien
tcatcaagaaatgtcgcacgagccc

SEQ ID NO: 5731933 - DNA, 25 bp, Homo sapien
gctggaaagaaaagcctgttgattt

SEQ ID NO: 5731934 - DNA, 25 bp, Homo sapien
ctgggctggaaagaaaagcctgttg

SEQ ID NO: 5731935 - DNA, 25 bp, Homo sapien
gccctgagacggggattataagtca

SEQ ID NO: 5731936 - DNA, 25 bp, Homo sapien
cagtctcttgatgctgtggagaaag

SEQ ID NO: 5731937 - DNA, 25 bp, Homo sapien
ttcacgtttgttgtcttcaaaaacg

SEQ ID NO: 5731938 - DNA, 25 bp, Homo sapien
tctggcaaacgacgtggatttccat

SEQ ID NO: 5731939 - DNA, 25 bp, Homo sapien
ctccatgacccggctcttccgagag

SEQ ID NO: 5731940 - DNA, 25 bp, Homo sapien
tggacaatacctcggagcctcagcc

SEQ ID NO: 5731941 - DNA, 25 bp, Homo sapien
caattcgtcttttgggatccacgat

SEQ ID NO: 5731942 - DNA, 25 bp, Homo sapien
gtgctgctctcctaccacgggtgga

SEQ ID NO: 5731943 - DNA, 25 bp, Homo sapien
ttgttcaagttggcgtctgagaagc

SEQ ID NO: 5731944 - DNA, 25 bp, Homo sapien
ctttacgtggtgtctaaatatctcg

SEQ ID NO: 5731945 - DNA, 25 bp, Homo sapien
gacatcgctgcctcgcctgccggtc

SEQ ID NO: 5731946 - DNA, 25 bp, Homo sapien
catggatctgctgtatatccttcca

SEQ ID NO: 5731947 - DNA, 25 bp, Homo sapien
caggcagcaagagccggcaacgcca

SEQ ID NO: 5731948 - DNA, 25 bp, Homo sapien
tcagatacttgagacaaagtggaaa

SEQ ID NO: 5731949 - DNA, 25 bp, Homo sapien
gagacctccctgaacaccgcaaatc

SEQ ID NO: 5731950 - DNA, 25 bp, Homo sapien
aagttaaaatcctggtgggctacaa

SEQ ID NO: 5731951 - DNA, 25 bp, Homo sapien
gtcaagaggttatagagacctccct

SEQ ID NO: 5731952 - DNA, 25 bp, Homo sapien
cggtggaacagaggctgaagttgtt

SEQ ID NO: 5731953 - DNA, 25 bp, Homo sapien
gacagcacttgctcaagattttgct

SEQ ID NO: 5731954 - DNA, 25 bp, Homo sapien
tgtccagccagacgaagaacgtggt

SEQ ID NO: 5731955 - DNA, 25 bp, Homo sapien
acctccgtagctgactcggtactct

SEQ ID NO: 5731956 - DNA, 25 bp, Homo sapien
gaggctgaagttgttcaagttggcg

SEQ ID NO: 5731957 - DNA, 25 bp, Homo sapien
agtcgtgccaccaagatctggatgg

SEQ ID NO: 5731958 - DNA, 25 bp, Homo sapien
ggaccaagattacagtggtatttga

SEQ ID NO: 5731959 - DNA, 25 bp, Homo sapien
catgtccattgacagcctccagctg

SEQ ID NO: 5731960 - DNA, 25 bp, Homo sapien
tccgtaccccaccaggctgcagtgg

SEQ ID NO: 5731961 - DNA, 25 bp, Homo sapien
aagaaaagcctgttgattttcactt

SEQ ID NO: 5731962 - DNA, 25 bp, Homo sapien
tttcttccaagttctcttgccctga

SEQ ID NO: 5731963 - DNA, 25 bp, Homo sapien
gacacataaaagatgctcaataaat

SEQ ID NO: 5731964 - DNA, 25 bp, Homo sapien
gctggcgcactacaaggacatgggc

SEQ ID NO: 5731965 - DNA, 25 bp, Homo sapien
tttccacatttcttccaagttctct

SEQ ID NO: 5731966 - DNA, 25 bp, Homo sapien
catcactggcgtgtacccggcaagc

SEQ ID NO: 5731967 - DNA, 25 bp, Homo sapien
tcgtcttttgggatccacgattcca

SEQ ID NO: 5731968 - DNA, 25 bp, Homo sapien
atgtcgcacgagcccagacgccttt

SEQ ID NO: 5731969 - DNA, 25 bp, Homo sapien
gttggcttatcgtggtggtgggcgt

SEQ ID NO: 5731970 - DNA, 25 bp, Homo sapien
tacgacaggtggtttgacaagtcgt

SEQ ID NO: 5731971 - DNA, 25 bp, Homo sapien
ctgagaagcatcagcatatgtatcg

SEQ ID NO: 5731972 - DNA, 25 bp, Homo sapien
gtgggtggccctcatcgtcaccatg

SEQ ID NO: 5731973 - DNA, 25 bp, Homo sapien
gctgcctcgcctgccggtcccggct

SEQ ID NO: 5731974 - DNA, 25 bp, Homo sapien
ctcctgcaccactgagtcatgcgac

SEQ ID NO: 5731975 - DNA, 25 bp, Homo sapien
gtggatgttcactgagcacggcaag

SEQ ID NO: 5731976 - DNA, 25 bp, Homo sapien
gagggccgctcatggtgaacagcaa

SEQ ID NO: 5731977 - DNA, 25 bp, Homo sapien
ggtgtgtcgtacatccttgtgggag

SEQ ID NO: 5731978 - DNA, 25 bp, Homo sapien
aacggcatcatcactggcgtgtacc

SEQ ID NO: 5731979 - DNA, 25 bp, Homo sapien
tgggaggagtacatctacctccgag

SEQ ID NO: 5731980 - DNA, 25 bp, Homo sapien
gccggcaacgccatccatgccatcc

SEQ ID NO: 5731981 - DNA, 25 bp, Homo sapien
catgggcaagttttgcctcacatac

SEQ ID NO: 5731982 - DNA, 25 bp, Homo sapien
catcagcatatgtatcgcctcgcca

SEQ ID NO: 5731983 - DNA, 25 bp, Homo sapien
cgctgaacactcctgggcagatgcg

SEQ ID NO: 5731984 - DNA, 25 bp, Homo sapien
agcgttcttcgtgacgttagatgaa

SEQ ID NO: 5731985 - DNA, 25 bp, Homo sapien
ttataagtcaaggaccaagttcaga

SEQ ID NO: 5731986 - DNA, 25 bp, Homo sapien
gtaccatcgaggacgctacttcaag

SEQ ID NO: 5731987 - DNA, 25 bp, Homo sapien
agcggcgtgctgtttggcaccggcc

SEQ ID NO: 5731988 - DNA, 25 bp, Homo sapien
tcgtgacgttagatgaaactgaaga

SEQ ID NO: 5731989 - DNA, 25 bp, Homo sapien
caccgcaaatcttctggcaaacgac

SEQ ID NO: 5731990 - DNA, 25 bp, Homo sapien
ggaggagtacatctacctccgagga

SEQ ID NO: 5731991 - DNA, 25 bp, Homo sapien
ggtcttggaccaagattacagtggt

SEQ ID NO: 5731992 - DNA, 25 bp, Homo sapien
actggaccgggaggaaatcaaacca

SEQ ID NO: 5731993 - DNA, 25 bp, Homo sapien
atgggcactgcaaaggcgacatcaa

SEQ ID NO: 5731994 - DNA, 25 bp, Homo sapien
catcgaggacgctacttcaaggtct

SEQ ID NO: 5731995 - DNA, 25 bp, Homo sapien
tacgtcaatggacagctacgccaaa

SEQ ID NO: 5731996 - DNA, 25 bp, Homo sapien
cccctccagttggcttatcgtggtg

SEQ ID NO: 5731997 - DNA, 25 bp, Homo sapien
gtgaggcctcttatgaaggaagaag

SEQ ID NO: 5731998 - DNA, 25 bp, Homo sapien
gggtggccctcatcgtcaccatgcg

SEQ ID NO: 5731999 - DNA, 25 bp, Homo sapien
agccagacccctcagcagcaagtgg

SEQ ID NO: 5732000 - DNA, 25 bp, Homo sapien
gaaacaaggccttggaggagaccat

SEQ ID NO: 5732001 - DNA, 25 bp, Homo sapien
agcccagacgcctttgtgcagctgg

SEQ ID NO: 5732002 - DNA, 25 bp, Homo sapien
gcaacgccatccatgccatcctgct

SEQ ID NO: 5732003 - DNA, 25 bp, Homo sapien
attatcaacaagccagacccctcag

SEQ ID NO: 5732004 - DNA, 25 bp, Homo sapien
tctacagtcggtgaggcctcttatg

SEQ ID NO: 5732005 - DNA, 25 bp, Homo sapien
tggaccgggaggaaatcaaaccaat

SEQ ID NO: 5732006 - DNA, 25 bp, Homo sapien
tacaggcgcaaactggaccgggagg

SEQ ID NO: 5732007 - DNA, 25 bp, Homo sapien
cagacggtggaacagaggctgaagt

SEQ ID NO: 5732008 - DNA, 25 bp, Homo sapien
catgtgctgggctggaaagaaaagc

SEQ ID NO: 5732009 - DNA, 25 bp, Homo sapien
atccatgccatcctgctttacaggc

SEQ ID NO: 5732010 - DNA, 25 bp, Homo sapien
tggatgggtatggtcaagatctttt

SEQ ID NO: 5732011 - DNA, 25 bp, Homo sapien
catggacatcaccaagttcatgtgc

SEQ ID NO: 5732012 - DNA, 25 bp, Homo sapien
gattttcacttgctgtgcatttatt

SEQ ID NO: 5732013 - DNA, 25 bp, Homo sapien
catcgctgcctcgcctgccggtccc

SEQ ID NO: 5732014 - DNA, 25 bp, Homo sapien
agccccgggagatggagcagcagat

SEQ ID NO: 5732015 - DNA, 25 bp, Homo sapien
gggagtacgtcatgtccattgacag

SEQ ID NO: 5732016 - DNA, 25 bp, Homo sapien
caggtgtcgtcaggcctattttgga

SEQ ID NO: 5732017 - DNA, 25 bp, Homo sapien
aagctcaccaagctgtggcctttca

SEQ ID NO: 5732018 - DNA, 25 bp, Homo sapien
tgcggctgagccatgaagctcttag

SEQ ID NO: 5732019 - DNA, 25 bp, Homo sapien
ggaggaaatcaaaccaattcgtctt

SEQ ID NO: 5732020 - DNA, 25 bp, Homo sapien
gctgtggagtcccctttccttaagg

SEQ ID NO: 5732021 - DNA, 25 bp, Homo sapien
ccatgaagctcttagacaaatctat

SEQ ID NO: 5732022 - DNA, 25 bp, Homo sapien
tggcaccggcctgtgggtggccctc

SEQ ID NO: 5732023 - DNA, 25 bp, Homo sapien
tacagtcggtgaggcctcttatgaa

SEQ ID NO: 5732024 - DNA, 25 bp, Homo sapien
gatgtacgccaagatcgacccctcg

SEQ ID NO: 5732025 - DNA, 25 bp, Homo sapien
gcagtgggacatcccgggggaatgt

SEQ ID NO: 5732026 - DNA, 25 bp, Homo sapien
gaaacggccaactgcatgtccagcc

SEQ ID NO: 5732027 - DNA, 25 bp, Homo sapien
gccaccaagatctggatgggtatgg

SEQ ID NO: 5732028 - DNA, 25 bp, Homo sapien
ttgtacagcttccagacatcgctgc

SEQ ID NO: 5732029 - DNA, 25 bp, Homo sapien
ctgcagtgggacatcccgggggaat

SEQ ID NO: 5732030 - DNA, 25 bp, Homo sapien
actgagtcatgcgacttcgtgcggg

SEQ ID NO: 5732031 - DNA, 25 bp, Homo sapien
ctcggagcctcagcccggggaggcc

SEQ ID NO: 5732032 - DNA, 25 bp, Homo sapien
gaggatgggcactgcaaaggcgaca

SEQ ID NO: 5732033 - DNA, 25 bp, Homo sapien
ccacgggtggatgttcactgagcac

SEQ ID NO: 5732034 - DNA, 25 bp, Homo sapien
ttgtcttcaaaaacgggaagatggg

SEQ ID NO: 5732035 - DNA, 25 bp, Homo sapien
ttttgcctcacatacgaggcctcca

SEQ ID NO: 5732036 - DNA, 25 bp, Homo sapien
ccacctttgggagtacgtcatgtcc

SEQ ID NO: 5732037 - DNA, 25 bp, Homo sapien
agccatgaagctcttagacaaatct

SEQ ID NO: 5732038 - DNA, 25 bp, Homo sapien
attcgtcttttgggatccacgattc

SEQ ID NO: 5732039 - DNA, 25 bp, Homo sapien
tgtccattgacagcctccagctggg

SEQ ID NO: 5732040 - DNA, 25 bp, Homo sapien
cctcttatgaaggaagaagacttca

SEQ ID NO: 5732041 - DNA, 25 bp, Homo sapien
ccagacccctcagcagcaagtggag

SEQ ID NO: 5732042 - DNA, 25 bp, Homo sapien
agaacagtgcctgacacataaaaga

SEQ ID NO: 5732043 - DNA, 25 bp, Homo sapien
ttcgtagcctttggtaaaggaatca

SEQ ID NO: 5732044 - DNA, 25 bp, Homo sapien
gacgtggatttccattccttcccat

SEQ ID NO: 5732045 - DNA, 25 bp, Homo sapien
atgacaacgatgtacgccaagatcg

SEQ ID NO: 5732046 - DNA, 25 bp, Homo sapien
agcaactattatgccatggatctgc

SEQ ID NO: 5732047 - DNA, 25 bp, Homo sapien
ttcccggatcccaggagaggagaca

SEQ ID NO: 5732048 - DNA, 25 bp, Homo sapien
acctccgaggacgagggccgctcat

SEQ ID NO: 5732049 - DNA, 25 bp, Homo sapien
cggatcccaggagaggagacagaca

SEQ ID NO: 5732050 - DNA, 25 bp, Homo sapien
tgagccttggagattatcaacaagc

SEQ ID NO: 5732051 - DNA, 25 bp, Homo sapien
tcaacaagccagacccctcagcagc

SEQ ID NO: 5732052 - DNA, 25 bp, Homo sapien
tggatctgctgtatatccttccaac

SEQ ID NO: 5732053 - DNA, 25 bp, Homo sapien
gatcgacccctcgttaggaataatt

SEQ ID NO: 5732054 - DNA, 25 bp, Homo sapien
gccatggatctgctgtatatccttc

SEQ ID NO: 5732055 - DNA, 25 bp, Homo sapien
aacggccaactgcatgtccagccag

SEQ ID NO: 5732056 - DNA, 25 bp, Homo sapien
gaacattccgtaccccaccaggctg

SEQ ID NO: 5732057 - DNA, 25 bp, Homo sapien
tctgaagatggcagaagctcaccaa

SEQ ID NO: 5732058 - DNA, 25 bp, Homo sapien
atcgtggcccacctttgggagtacg

SEQ ID NO: 5732059 - DNA, 25 bp, Homo sapien
cggctgtcaaagacactgtgaacag

SEQ ID NO: 5732060 - DNA, 25 bp, Homo sapien
gctcagtgggagcggatgtttaata

SEQ ID NO: 5732061 - DNA, 25 bp, Homo sapien
ttttggacgtgggaaaaataagcag

SEQ ID NO: 5732062 - DNA, 25 bp, Homo sapien
atgccatcctgctttacaggcgcaa

SEQ ID NO: 5732063 - DNA, 25 bp, Homo sapien
ctcttgatgctgtggagaaagcagc

SEQ ID NO: 5732064 - DNA, 25 bp, Homo sapien
gagcagcagatgcagaggatcctgg

SEQ ID NO: 5732065 - DNA, 25 bp, Homo sapien
tggcaaacgacgtggatttccattc

SEQ ID NO: 5732066 - DNA, 25 bp, Homo sapien
gacttcaaacggatgacagcacttg

SEQ ID NO: 5732067 - DNA, 25 bp, Homo sapien
ttaaggaagttttatctgagccttg

SEQ ID NO: 5732068 - DNA, 25 bp, Homo sapien
ccccgggagatggagcagcagatgc

SEQ ID NO: 5732069 - DNA, 25 bp, Homo sapien
accaagttcatgtgctgggctggaa

SEQ ID NO: 5732070 - DNA, 25 bp, Homo sapien
cagcacttgctcaagattttgctgt

SEQ ID NO: 5732071 - DNA, 25 bp, Homo sapien
ggcctttcagttcacggtcactccg

SEQ ID NO: 5732072 - DNA, 25 bp, Homo sapien
caagattacagtggtatttgaagtt

SEQ ID NO: 5732073 - DNA, 25 bp, Homo sapien
atgacagcacttgctcaagattttg

SEQ ID NO: 5732074 - DNA, 25 bp, Homo sapien
gcctgacacataaaagatgctcaat

SEQ ID NO: 5732075 - DNA, 25 bp, Homo sapien
tccagcggagggggctttggaccgg

SEQ ID NO: 5732076 - DNA, 25 bp, Homo sapien
gatgggtatggtcaagatcttttca

SEQ ID NO: 5732077 - DNA, 25 bp, Homo sapien
tcaatcggactctggaaacggccaa

SEQ ID NO: 5732078 - DNA, 25 bp, Homo sapien
ggacgtgggaaaaataagcagtctc

SEQ ID NO: 5732079 - DNA, 25 bp, Homo sapien
gggaaaaataagcagtctcttgatg

SEQ ID NO: 5732080 - DNA, 25 bp, Homo sapien
ttgagacaaagtggaaagtctcagc

SEQ ID NO: 5732081 - DNA, 25 bp, Homo sapien
aagtggaaagtctcagcatatggaa

SEQ ID NO: 5732082 - DNA, 25 bp, Homo sapien
cagacatcgctgcctcgcctgccgg

SEQ ID NO: 5732083 - DNA, 25 bp, Homo sapien
ctcgccatgaccggctctgggatcg

SEQ ID NO: 5732084 - DNA, 25 bp, Homo sapien
aaaccaattcgtcttttgggatcca

SEQ ID NO: 5732085 - DNA, 25 bp, Homo sapien
tcaagattttgctgtcggtcttgga

SEQ ID NO: 5732086 - DNA, 25 bp, Homo sapien
cctgaacaccgcaaatcttctggca

SEQ ID NO: 5732087 - DNA, 25 bp, Homo sapien
tatctcgctgtggagtcccctttcc

SEQ ID NO: 5732088 - DNA, 25 bp, Homo sapien
gagagaacctcatcaatttccacat

SEQ ID NO: 5732089 - DNA, 25 bp, Homo sapien
ggacgctacttcaaggtctggctct

SEQ ID NO: 5732090 - DNA, 25 bp, Homo sapien
ggaataattgcaaaaatcaatcgga

SEQ ID NO: 5732091 - DNA, 25 bp, Homo sapien
gggagatggagcagcagatgcagag

SEQ ID NO: 5732092 - DNA, 25 bp, Homo sapien
cagtgcctgacacataaaagatgct

SEQ ID NO: 5732093 - DNA, 25 bp, Homo sapien
acatgagagacagcaagcacatcgt

SEQ ID NO: 5732094 - DNA, 25 bp, Homo sapien
ggctgcagtgggacatcccggggga

SEQ ID NO: 5732095 - DNA, 25 bp, Homo sapien
agaagctcaccaagctgtggccttt

SEQ ID NO: 5732096 - DNA, 25 bp, Homo sapien
caatccgaacattccgtaccccacc

SEQ ID NO: 5732097 - DNA, 25 bp, Homo sapien
gagtacgtcatgtccattgacagcc

SEQ ID NO: 5732098 - DNA, 25 bp, Homo sapien
tgagtcatgcgacttcgtgcgggcc

SEQ ID NO: 5732099 - DNA, 25 bp, Homo sapien
caaattacgtgagcgactggtggga

SEQ ID NO: 5732100 - DNA, 25 bp, Homo sapien
ccaccaggctgcagtgggacatccc

SEQ ID NO: 5732101 - DNA, 25 bp, Homo sapien
ctccggacgggattgacctgcggct

SEQ ID NO: 5732102 - DNA, 25 bp, Homo sapien
tctgctgtatatccttccaactcac

SEQ ID NO: 5732103 - DNA, 25 bp, Homo sapien
ccccaccaggctgcagtgggacatc

SEQ ID NO: 5732104 - DNA, 25 bp, Homo sapien
ccaactcacattcaggcagcaagag

SEQ ID NO: 5732105 - DNA, 25 bp, Homo sapien
ccagctgggctatgcggaggatggg

SEQ ID NO: 5732106 - DNA, 25 bp, Homo sapien
gcctgccggtcccggctgtcaaaga

SEQ ID NO: 5732107 - DNA, 25 bp, Homo sapien
tgtctaaatatctcgctgtggagtc

SEQ ID NO: 5732108 - DNA, 25 bp, Homo sapien
cggggattataagtcaaggaccaag

SEQ ID NO: 5732109 - DNA, 25 bp, Homo sapien
caggcgcaaactggaccgggaggaa

SEQ ID NO: 5732110 - DNA, 25 bp, Homo sapien
ctgtgcatttattcatccattccat

SEQ ID NO: 5732111 - DNA, 25 bp, Homo sapien
agcccctccagttggcttatcgtgg

SEQ ID NO: 5732112 - DNA, 25 bp, Homo sapien
acccagagtacgtgtccagcggagg

SEQ ID NO: 5732113 - DNA, 25 bp, Homo sapien
aaacggatgacagcacttgctcaag

SEQ ID NO: 5732114 - DNA, 25 bp, Homo sapien
agaggttatagagacctccctgaac

SEQ ID NO: 5732115 - DNA, 25 bp, Homo sapien
ggccctcatcgtcaccatgcgctac

SEQ ID NO: 5732116 - DNA, 25 bp, Homo sapien
cagcaagagccggcaacgccatcca

SEQ ID NO: 5732117 - DNA, 25 bp, Homo sapien
aaatcttctggcaaacgacgtggat

SEQ ID NO: 5732118 - DNA, 25 bp, Homo sapien
gtacgtcatgtccattgacagcctc

SEQ ID NO: 5732119 - DNA, 25 bp, Homo sapien
gtcttttgggatccacgattccact

SEQ ID NO: 5732120 - DNA, 25 bp, Homo sapien
gcacttgctcaagattttgctgtcg

SEQ ID NO: 5732121 - DNA, 25 bp, Homo sapien
gagctgtttgacttggagaataacc

SEQ ID NO: 5732122 - DNA, 25 bp, Homo sapien
atcttctggcaaacgacgtggattt

SEQ ID NO: 5732123 - DNA, 25 bp, Homo sapien
ggaagttttatctgagccttggaga

SEQ ID NO: 5732124 - DNA, 25 bp, Homo sapien
atgtcaagaggttatagagacctcc

SEQ ID NO: 5732125 - DNA, 25 bp, Homo sapien
tacagtggtatttgaagttaaaatc

SEQ ID NO: 5732126 - DNA, 25 bp, Homo sapien
gaggcctcttatgaaggaagaagac

SEQ ID NO: 5732127 - DNA, 25 bp, Homo sapien
gcctcacatacgaggcctccatgac

SEQ ID NO: 5732128 - DNA, 25 bp, Homo sapien
cggcctgtgggtggccctcatcgtc

SEQ ID NO: 5732129 - DNA, 25 bp, Homo sapien
gaccaagttcagatacttgagacaa

SEQ ID NO: 5732130 - DNA, 25 bp, Homo sapien
tgtttggcaccggcctgtgggtggc

SEQ ID NO: 5732131 - DNA, 25 bp, Homo sapien
ggtaaaggaatcatcaagaaatgtc

SEQ ID NO: 5732132 - DNA, 25 bp, Homo sapien
tccattgacagcctccagctgggct

SEQ ID NO: 5732133 - DNA, 25 bp, Homo sapien
gagaacctcatcaatttccacattt

SEQ ID NO: 5732134 - DNA, 25 bp, Homo sapien
cgccaaatctctactacacggccga

SEQ ID NO: 5732135 - DNA, 25 bp, Homo sapien
ccgctgccgcacctccgtagctgac

SEQ ID NO: 5732136 - DNA, 25 bp, Homo sapien
agctgtggcctttcagttcacggtc

SEQ ID NO: 5732137 - DNA, 25 bp, Homo sapien
tgggcaagttttgcctcacatacga

SEQ ID NO: 5732138 - DNA, 25 bp, Homo sapien
gctctaccatgatgggcggctgctg

SEQ ID NO: 5732139 - DNA, 25 bp, Homo sapien
gtctgagaagcatcagcatatgtat

SEQ ID NO: 5732140 - DNA, 25 bp, Homo sapien
tcaagttggcgtctgagaagcatca

SEQ ID NO: 5732141 - DNA, 25 bp, Homo sapien
agtacgtgtccagcggagggggctt

SEQ ID NO: 5732142 - DNA, 25 bp, Homo sapien
tcgcctgccggtcccggctgtcaaa

SEQ ID NO: 5732143 - DNA, 25 bp, Homo sapien
tgtgcagctggccctccagctggcg

SEQ ID NO: 5732144 - DNA, 25 bp, Homo sapien
cccggctgtcaaagacactgtgaac

SEQ ID NO: 5732145 - DNA, 25 bp, Homo sapien
gctttacaggcgcaaactggaccgg

SEQ ID NO: 5732146 - DNA, 25 bp, Homo sapien
ccatgacccggctcttccgagaggg

SEQ ID NO: 5732147 - DNA, 25 bp, Homo sapien
tatgcggaggatgggcactgcaaag

SEQ ID NO: 5732148 - DNA, 25 bp, Homo sapien
gttggcgtctgagaagcatcagcat

SEQ ID NO: 5732149 - DNA, 25 bp, Homo sapien
accatcgaggacgctacttcaaggt

SEQ ID NO: 5732150 - DNA, 25 bp, Homo sapien
agttcatgtgctgggctggaaagaa

SEQ ID NO: 5732151 - DNA, 25 bp, Homo sapien
tggcgtgtacccggcaagcccctcc

SEQ ID NO: 5732152 - DNA, 25 bp, Homo sapien
ctgggatcgatcgtcacctcttctg

SEQ ID NO: 5732153 - DNA, 25 bp, Homo sapien
gaagcatcagcatatgtatcgcctc

SEQ ID NO: 5732154 - DNA, 25 bp, Homo sapien
cggatacgtcaatggacagctacgc

SEQ ID NO: 5732155 - DNA, 25 bp, Homo sapien
cggctgagccatgaagctcttagac

SEQ ID NO: 5732156 - DNA, 25 bp, Homo sapien
agcatatgtatcgcctcgccatgac

SEQ ID NO: 5732157 - DNA, 25 bp, Homo sapien
tgctgaagccccgggagatggagca

SEQ ID NO: 5732158 - DNA, 25 bp, Homo sapien
ttatcgtggtggtgggcgtgatgac

SEQ ID NO: 5732159 - DNA, 25 bp, Homo sapien
taccccaccaggctgcagtgggaca

SEQ ID NO: 5732160 - DNA, 25 bp, Homo sapien
acgagggccgctcatggtgaacagc

SEQ ID NO: 5732161 - DNA, 25 bp, Homo sapien
tgatgctgtggagaaagcagcgttc

SEQ ID NO: 5732162 - DNA, 25 bp, Homo sapien
gcggagggggctttggaccggttgc

SEQ ID NO: 5732163 - DNA, 25 bp, Homo sapien
tgcaaaaatcaatcggactctggaa

SEQ ID NO: 5732164 - DNA, 25 bp, Homo sapien
tgtacgccaagatcgacccctcgtt

SEQ ID NO: 5732165 - DNA, 25 bp, Homo sapien
tggagcagcagatgcagaggatcct

SEQ ID NO: 5732166 - DNA, 25 bp, Homo sapien
gttaaaatcctggtgggctacaaat

SEQ ID NO: 5732167 - DNA, 25 bp, Homo sapien
tagacaaatctatctctctggactt

SEQ ID NO: 5732168 - DNA, 25 bp, Homo sapien
aaagaagttcatcagattcaagaac

SEQ ID NO: 5732169 - DNA, 25 bp, Homo sapien
tccctgaacaccgcaaatcttctgg

SEQ ID NO: 5732170 - DNA, 25 bp, Homo sapien
aaagcctgttgattttcacttgctg

SEQ ID NO: 5732171 - DNA, 25 bp, Homo sapien
gaccggctctgggatcgatcgtcac

SEQ ID NO: 5732172 - DNA, 25 bp, Homo sapien
gccttggaggagaccatggacatca

SEQ ID NO: 5732173 - DNA, 25 bp, Homo sapien
ccacgattccactctgctccgctca

SEQ ID NO: 5732174 - DNA, 25 bp, Homo sapien
cctcaacgctgaacactcctgggca

SEQ ID NO: 5732175 - DNA, 25 bp, Homo sapien
gctgtggagaaagcagcgttcttcg

SEQ ID NO: 5732176 - DNA, 25 bp, Homo sapien
ggacgggattgacctgcggctgagc

SEQ ID NO: 5732177 - DNA, 25 bp, Homo sapien
gtacatctacctccgaggacgaggg

SEQ ID NO: 5732178 - DNA, 25 bp, Homo sapien
caagaacggcatcatcactggcgtg

SEQ ID NO: 5732179 - DNA, 25 bp, Homo sapien
cctccagttggcttatcgtggtggt

SEQ ID NO: 5732180 - DNA, 25 bp, Homo sapien
aagaacgtggtcagcggcgtgctgt

SEQ ID NO: 5732181 - DNA, 25 bp, Homo sapien
gcgctactccctgaaagtgctgctc

SEQ ID NO: 5732182 - DNA, 25 bp, Homo sapien
tgtgaacaggtatctacagtcggtg

SEQ ID NO: 5732183 - DNA, 25 bp, Homo sapien
acgggtggatgttcactgagcacgg

SEQ ID NO: 5732184 - DNA, 25 bp, Homo sapien
tcgtgtaccatcgaggacgctactt

SEQ ID NO: 5732185 - DNA, 25 bp, Homo sapien
gtggtatttgaagttaaaatcctgg

SEQ ID NO: 5732186 - DNA, 25 bp, Homo sapien
agatgcgccgatcgtggcccacctt

SEQ ID NO: 5732187 - DNA, 25 bp, Homo sapien
aactgaagaaggatacagaagtgaa

SEQ ID NO: 5732188 - DNA, 25 bp, Homo sapien
gcgactggtgggaggagtacatcta

SEQ ID NO: 5732189 - DNA, 25 bp, Homo sapien
acgtgggaaaaataagcagtctctt

SEQ ID NO: 5732190 - DNA, 25 bp, Homo sapien
gacccggatacgtcaatggacagct

SEQ ID NO: 5732191 - DNA, 25 bp, Homo sapien
gttcagatacttgagacaaagtgga

SEQ ID NO: 5732192 - DNA, 25 bp, Homo sapien
ttgcctcacatacgaggcctccatg

SEQ ID NO: 5732193 - DNA, 25 bp, Homo sapien
gtggacccggcccagacggtggaac

SEQ ID NO: 5732194 - DNA, 25 bp, Homo sapien
atgaaactgaagaaggatacagaag

SEQ ID NO: 5732195 - DNA, 25 bp, Homo sapien
gcagaagctcaccaagctgtggcct

SEQ ID NO: 5732196 - DNA, 25 bp, Homo sapien
cttttcaggccgaaaacccatgttg

SEQ ID NO: 5732197 - DNA, 25 bp, Homo sapien
agttcacggtcactccggacgggat

SEQ ID NO: 5732198 - DNA, 25 bp, Homo sapien
gcaagagccggcaacgccatccatg

SEQ ID NO: 5732199 - DNA, 25 bp, Homo sapien
agctcttagacaaatctatctctct

SEQ ID NO: 5732200 - DNA, 25 bp, Homo sapien
cagacgaagaacgtggtcagcggcg

SEQ ID NO: 5732201 - DNA, 25 bp, Homo sapien
ccttcccattcgtagcctttggtaa

SEQ ID NO: 5732202 - DNA, 25 bp, Homo sapien
aaaaagaagttcatcagattcaaga

SEQ ID NO: 5732203 - DNA, 25 bp, Homo sapien
ctcttagacaaatctatctctctgg

SEQ ID NO: 5732204 - DNA, 25 bp, Homo sapien
ggatgttcactgagcacggcaagat

SEQ ID NO: 5732205 - DNA, 25 bp, Homo sapien
ccctgggccaggtgtcgtcaggcct

SEQ ID NO: 5732206 - DNA, 25 bp, Homo sapien
caaaggcgacatcaatccgaacatt

SEQ ID NO: 5732207 - DNA, 25 bp, Homo sapien
gtcaaggaccaagttcagatacttg

SEQ ID NO: 5732208 - DNA, 25 bp, Homo sapien
ccgcaaatcttctggcaaacgacgt

SEQ ID NO: 5732209 - DNA, 25 bp, Homo sapien
ggcggctgctgaagccccgggagat

SEQ ID NO: 5732210 - DNA, 25 bp, Homo sapien
tgctgatgacggctatggtgtgtcg

SEQ ID NO: 5732211 - DNA, 25 bp, Homo sapien
gatctgctgtatatccttccaactc

SEQ ID NO: 5732212 - DNA, 25 bp, Homo sapien
agatacttgagacaaagtggaaagt

SEQ ID NO: 5732213 - DNA, 25 bp, Homo sapien
ctttgggagtacgtcatgtccattg

SEQ ID NO: 5732214 - DNA, 25 bp, Homo sapien
cgtaccccaccaggctgcagtggga

SEQ ID NO: 5732215 - DNA, 25 bp, Homo sapien
tggtgaacagcaactattatgccat

SEQ ID NO: 5732216 - DNA, 25 bp, Homo sapien
ttattcatccattccattgcctcaa

SEQ ID NO: 5732217 - DNA, 25 bp, Homo sapien
gtgggaaaaataagcagtctcttga

SEQ ID NO: 5732218 - DNA, 25 bp, Homo sapien
acggagaccgtgcgctcctgcacca

SEQ ID NO: 5732219 - DNA, 25 bp, Homo sapien
cgggaagatgggcctcaacgctgaa

SEQ ID NO: 5732220 - DNA, 25 bp, Homo sapien
cacataaaagatgctcaataaatat

SEQ ID NO: 5732221 - DNA, 25 bp, Homo sapien
gctgctctcctaccacgggtggatg

SEQ ID NO: 5732222 - DNA, 25 bp, Homo sapien
gcctattttggacgtgggaaaaata

SEQ ID NO: 5732223 - DNA, 25 bp, Homo sapien
ggtatggtcaagatcttttcaggcc

SEQ ID NO: 5732224 - DNA, 25 bp, Homo sapien
ctcacatacgaggcctccatgaccc

SEQ ID NO: 5732225 - DNA, 25 bp, Homo sapien
caagtggagctgtttgacttggaga

SEQ ID NO: 5732226 - DNA, 25 bp, Homo sapien
gaaactgaagaaggatacagaagtg

SEQ ID NO: 5732227 - DNA, 25 bp, Homo sapien
cgtgcgctcctgcaccactgagtca

SEQ ID NO: 5732228 - DNA, 25 bp, Homo sapien
agaagttcatcagattcaagaacgg

SEQ ID NO: 5732229 - DNA, 25 bp, Homo sapien
agacagagttccctgggccaggtgt

SEQ ID NO: 5732230 - DNA, 25 bp, Homo sapien
tgagtcgtgccaccaagatctggat

SEQ ID NO: 5732231 - DNA, 25 bp, Homo sapien
gtgctgtttggcaccggcctgtggg

SEQ ID NO: 5732232 - DNA, 25 bp, Homo sapien
ttgccctgagacggggattataagt

SEQ ID NO: 5732233 - DNA, 25 bp, Homo sapien
cgcacgagcccagacgcctttgtgc

SEQ ID NO: 5732234 - DNA, 25 bp, Homo sapien
ctcatcaatttccacatttcttcca

SEQ ID NO: 5732235 - DNA, 25 bp, Homo sapien
gactcggtactctctgaagatggca

SEQ ID NO: 5732236 - DNA, 25 bp, Homo sapien
gggaatgtcaagaggttatagagac

SEQ ID NO: 5732237 - DNA, 25 bp, Homo sapien
gcaaatcttctggcaaacgacgtgg

SEQ ID NO: 5732238 - DNA, 25 bp, Homo sapien
tcaaaaacgggaagatgggcctcaa

SEQ ID NO: 5732239 - DNA, 25 bp, Homo sapien
caatgctgagaacagtgcctgacac

SEQ ID NO: 5732240 - DNA, 25 bp, Homo sapien
cagatgcagaggatcctggacaata

SEQ ID NO: 5732241 - DNA, 25 bp, Homo sapien
tatagagacctccctgaacaccgca

SEQ ID NO: 5732242 - DNA, 25 bp, Homo sapien
tcaaagacactgtgaacaggtatct

SEQ ID NO: 5732243 - DNA, 25 bp, Homo sapien
gtcggtgaggcctcttatgaaggaa

SEQ ID NO: 5732244 - DNA, 25 bp, Homo sapien
acatcccgggggaatgtcaagaggt

SEQ ID NO: 5732245 - DNA, 25 bp, Homo sapien
tgggcctcaacgctgaacactcctg

SEQ ID NO: 5732246 - DNA, 25 bp, Homo sapien
tgtcaaagacactgtgaacaggtat

SEQ ID NO: 5732247 - DNA, 25 bp, Homo sapien
tgtggagtcccctttccttaaggaa

SEQ ID NO: 5732248 - DNA, 25 bp, Homo sapien
atgttacgacaggtggtttgacaag

SEQ ID NO: 5732249 - DNA, 25 bp, Homo sapien
atacttgagacaaagtggaaagtct

SEQ ID NO: 5732250 - DNA, 25 bp, Homo sapien
acgtcatgtccattgacagcctcca

SEQ ID NO: 5732251 - DNA, 25 bp, Homo sapien
attcctggaaaaagaagttcatcag

SEQ ID NO: 5732252 - DNA, 25 bp, Homo sapien
atgatgggcggctgctgaagccccg

SEQ ID NO: 5732253 - DNA, 25 bp, Homo sapien
caccactgagtcatgcgacttcgtg

SEQ ID NO: 5732254 - DNA, 25 bp, Homo sapien
aatatctcgctgtggagtccccttt

SEQ ID NO: 5732255 - DNA, 25 bp, Homo sapien
aagtgctgctctcctaccacgggtg

SEQ ID NO: 5732256 - DNA, 25 bp, Homo sapien
aagttttatctgagccttggagatt

SEQ ID NO: 5732257 - DNA, 25 bp, Homo sapien
aaaataagcagtctcttgatgctgt

SEQ ID NO: 5732258 - DNA, 25 bp, Homo sapien
gggctggaaagaaaagcctgttgat

SEQ ID NO: 5732259 - DNA, 25 bp, Homo sapien
atcatcactggcgtgtacccggcaa

SEQ ID NO: 5732260 - DNA, 25 bp, Homo sapien
tgttgtacagcttccagacatcgct

SEQ ID NO: 5732261 - DNA, 25 bp, Homo sapien
agcccggggaggccaggctggcagc

SEQ ID NO: 5732262 - DNA, 25 bp, Homo sapien
acttgctcaagattttgctgtcggt

SEQ ID NO: 5732263 - DNA, 25 bp, Homo sapien
acattccgtaccccaccaggctgca

SEQ ID NO: 5732264 - DNA, 25 bp, Homo sapien
cagcacatgagagacagcaagcaca

SEQ ID NO: 5732265 - DNA, 25 bp, Homo sapien
tgttgtcttcaaaaacgggaagatg

SEQ ID NO: 5732266 - DNA, 25 bp, Homo sapien
tccattgcctcaatgctgagaacag

SEQ ID NO: 5732267 - DNA, 25 bp, Homo sapien
ggagaataacccagagtacgtgtcc

SEQ ID NO: 5732268 - DNA, 25 bp, Homo sapien
gtcttcaaaaacgggaagatgggcc

SEQ ID NO: 5732269 - DNA, 25 bp, Homo sapien
agttccctgggccaggtgtcgtcag

SEQ ID NO: 5732270 - DNA, 25 bp, Homo sapien
gtcaccatgcgctactccctgaaag

SEQ ID NO: 5732271 - DNA, 25 bp, Homo sapien
taattgcaaaaatcaatcggactct

SEQ ID NO: 5732272 - DNA, 25 bp, Homo sapien
gggcagatgcgccgatcgtggccca

SEQ ID NO: 5732273 - DNA, 25 bp, Homo sapien
ccaaatctctactacacggccgatg

SEQ ID NO: 5732274 - DNA, 25 bp, Homo sapien
acctttgggagtacgtcatgtccat

SEQ ID NO: 5732275 - DNA, 25 bp, Homo sapien
acggatgacagcacttgctcaagat

SEQ ID NO: 5732276 - DNA, 25 bp, Homo sapien
tagagacctccctgaacaccgcaaa

SEQ ID NO: 5732277 - DNA, 25 bp, Homo sapien
tcgatcgtcacctcttctgccttta

SEQ ID NO: 5732278 - DNA, 25 bp, Homo sapien
cgtgtccagcggagggggctttgga

SEQ ID NO: 5732279 - DNA, 25 bp, Homo sapien
tttaatacttcccggatcccaggag

SEQ ID NO: 5732280 - DNA, 25 bp, Homo sapien
cgggaggaaatcaaaccaattcgtc

SEQ ID NO: 5732281 - DNA, 25 bp, Homo sapien
gagatggagcagcagatgcagagga

SEQ ID NO: 5732282 - DNA, 25 bp, Homo sapien
gtggaaagtctcagcatatggaaac

SEQ ID NO: 5732283 - DNA, 25 bp, Homo sapien
atgttcactgagcacggcaagatga

SEQ ID NO: 5732284 - DNA, 25 bp, Homo sapien
acaggtggtttgacaagtcgttcac

SEQ ID NO: 5732285 - DNA, 25 bp, Homo sapien
gaagtgaagacccggatacgtcaat

SEQ ID NO: 5732286 - DNA, 25 bp, Homo sapien
ccaagttctcttgccctgagacggg

SEQ ID NO: 5732287 - DNA, 25 bp, Homo sapien
aacaaggccttggaggagaccatgg

SEQ ID NO: 5732288 - DNA, 25 bp, Homo sapien
accgtgcgctcctgcaccactgagt

SEQ ID NO: 5732289 - DNA, 25 bp, Homo sapien
agattatcaacaagccagacccctc

SEQ ID NO: 5732290 - DNA, 25 bp, Homo sapien
tggtggtgggcgtgatgacaacgat

SEQ ID NO: 5732291 - DNA, 25 bp, Homo sapien
cattcaggcagcaagagccggcaac

SEQ ID NO: 5732292 - DNA, 25 bp, Homo sapien
cgctcctgcaccactgagtcatgcg

SEQ ID NO: 5732293 - DNA, 25 bp, Homo sapien
tgggtatggtcaagatcttttcagg

SEQ ID NO: 5732294 - DNA, 25 bp, Homo sapien
tggcgtctgagaagcatcagcatat

SEQ ID NO: 5732295 - DNA, 25 bp, Homo sapien
gatgggcggctgctgaagccccggg

SEQ ID NO: 5732296 - DNA, 25 bp, Homo sapien
acgattccactctgctccgctcagt

SEQ ID NO: 5732297 - DNA, 25 bp, Homo sapien
ggtgggaggagtacatctacctccg

SEQ ID NO: 5732298 - DNA, 25 bp, Homo sapien
actctggaaacggccaactgcatgt

SEQ ID NO: 5732299 - DNA, 25 bp, Homo sapien
catgtccagccagacgaagaacgtg

SEQ ID NO: 5732300 - DNA, 25 bp, Homo sapien
tggccctccagctggcgcactacaa

SEQ ID NO: 5732301 - DNA, 25 bp, Homo sapien
ctcggtactctctgaagatggcaga

SEQ ID NO: 5732302 - DNA, 25 bp, Homo sapien
agcacggcaagatgagtcgtgccac

SEQ ID NO: 5732303 - DNA, 25 bp, Homo sapien
acgggattgacctgcggctgagcca

SEQ ID NO: 5732304 - DNA, 25 bp, Homo sapien
gattttgctgtcggtcttggaccaa

SEQ ID NO: 5732305 - DNA, 25 bp, Homo sapien
ttggagaataacccagagtacgtgt

SEQ ID NO: 5732306 - DNA, 25 bp, Homo sapien
ccatgccatcctgctttacaggcgc

SEQ ID NO: 5732307 - DNA, 25 bp, Homo sapien
ccttccaactcacattcaggcagca

SEQ ID NO: 5732308 - DNA, 25 bp, Homo sapien
caactattatgccatggatctgctg

SEQ ID NO: 5732309 - DNA, 25 bp, Homo sapien
agcggatgtttaatacttcccggat

SEQ ID NO: 5732310 - DNA, 25 bp, Homo sapien
gcccacctttgggagtacgtcatgt

SEQ ID NO: 5732311 - DNA, 25 bp, Homo sapien
catggtgaacagcaactattatgcc

SEQ ID NO: 5732312 - DNA, 25 bp, Homo sapien
atcttttcaggccgaaaacccatgt

SEQ ID NO: 5732313 - DNA, 25 bp, Homo sapien
aaatcctggtgggctacaaattacg

SEQ ID NO: 5732314 - DNA, 25 bp, Homo sapien
gttgctgatgacggctatggtgtgt

SEQ ID NO: 5732315 - DNA, 25 bp, Homo sapien
agaccgtgcgctcctgcaccactga

SEQ ID NO: 5732316 - DNA, 25 bp, Homo sapien
gagcgactggtgggaggagtacatc

SEQ ID NO: 5732317 - DNA, 25 bp, Homo sapien
cagccctcaccgcaggagacagagt

SEQ ID NO: 5732318 - DNA, 25 bp, Homo sapien
tcatgcgacttcgtgcgggccatgg

SEQ ID NO: 5732319 - DNA, 25 bp, Homo sapien
aagtcgttcacgtttgttgtcttca

SEQ ID NO: 5732320 - DNA, 25 bp, Homo sapien
gcaccggcctgtgggtggccctcat

SEQ ID NO: 5732321 - DNA, 25 bp, Homo sapien
acccctcagcagcaagtggagctgt

SEQ ID NO: 5732322 - DNA, 25 bp, Homo sapien
gctactccctgaaagtgctgctctc

SEQ ID NO: 5732323 - DNA, 25 bp, Homo sapien
ggtcagcggcgtgctgtttggcacc

SEQ ID NO: 5732324 - DNA, 25 bp, Homo sapien
gacggggattataagtcaaggacca

SEQ ID NO: 5732325 - DNA, 25 bp, Homo sapien
tttcagttcacggtcactccggacg

SEQ ID NO: 5732326 - DNA, 25 bp, Homo sapien
gctcaagattttgctgtcggtcttg

SEQ ID NO: 5732327 - DNA, 25 bp, Homo sapien
aatcaatcggactctggaaacggcc

SEQ ID NO: 5732328 - DNA, 25 bp, Homo sapien
tgctgggctggaaagaaaagcctgt

SEQ ID NO: 5732329 - DNA, 25 bp, Homo sapien
gtatatccttccaactcacattcag

SEQ ID NO: 5732330 - DNA, 25 bp, Homo sapien
caaagtggaaagtctcagcatatgg

SEQ ID NO: 5732331 - DNA, 25 bp, Homo sapien
ggagacagacaccatccagcacatg

SEQ ID NO: 5732332 - DNA, 25 bp, Homo sapien
atcctggtgggctacaaattacgtg

SEQ ID NO: 5732333 - DNA, 25 bp, Homo sapien
tcagcatatgtatcgcctcgccatg

SEQ ID NO: 5732334 - DNA, 25 bp, Homo sapien
gcacatcgtcgtgtaccatcgagga

SEQ ID NO: 5732335 - DNA, 25 bp, Homo sapien
gaggatcctggacaatacctcggag

SEQ ID NO: 5732336 - DNA, 25 bp, Homo sapien
cgcctttgtgcagctggccctccag

SEQ ID NO: 5732337 - DNA, 25 bp, Homo sapien
tgcctcgcctgccggtcccggctgt

SEQ ID NO: 5732338 - DNA, 25 bp, Homo sapien
cttcaaaaacgggaagatgggcctc

SEQ ID NO: 5732339 - DNA, 25 bp, Homo sapien
tatctacagtcggtgaggcctctta

SEQ ID NO: 5732340 - DNA, 25 bp, Homo sapien
ttatgccatggatctgctgtatatc

SEQ ID NO: 5732341 - DNA, 25 bp, Homo sapien
tatctctctggacttcattcctgga

SEQ ID NO: 5732342 - DNA, 25 bp, Homo sapien
agctgggctatgcggaggatgggca

SEQ ID NO: 5732343 - DNA, 25 bp, Homo sapien
cccctcgttaggaataattgcaaaa

SEQ ID NO: 5732344 - DNA, 25 bp, Homo sapien
gacaatacctcggagcctcagcccg

SEQ ID NO: 5732345 - DNA, 25 bp, Homo sapien
gtgagcgactggtgggaggagtaca

SEQ ID NO: 5732346 - DNA, 25 bp, Homo sapien
aagatgggcctcaacgctgaacact

SEQ ID NO: 5732347 - DNA, 25 bp, Homo sapien
gggattgacctgcggctgagccatg

SEQ ID NO: 5732348 - DNA, 25 bp, Homo sapien
ggaggccaggctggcagccctcacc

SEQ ID NO: 5732349 - DNA, 25 bp, Homo sapien
attccattgcctcaatgctgagaac

SEQ ID NO: 5732350 - DNA, 25 bp, Homo sapien
tggtgggctacaaattacgtgagcg

SEQ ID NO: 5732351 - DNA, 25 bp, Homo sapien
ccactgagtcatgcgacttcgtgcg

SEQ ID NO: 5732352 - DNA, 25 bp, Homo sapien
cacggccgatgttacgacaggtggt

SEQ ID NO: 5732353 - DNA, 25 bp, Homo sapien
tgcatgtccagccagacgaagaacg

SEQ ID NO: 5732354 - DNA, 25 bp, Homo sapien
tcttgccctgagacggggattataa

SEQ ID NO: 5732355 - DNA, 25 bp, Homo sapien
cctttcagttcacggtcactccgga

SEQ ID NO: 5732356 - DNA, 25 bp, Homo sapien
gacctgcggctgagccatgaagctc

SEQ ID NO: 5732357 - DNA, 25 bp, Homo sapien
atcgtggtggtgggcgtgatgacaa

SEQ ID NO: 5732358 - DNA, 25 bp, Homo sapien
ggactctggaaacggccaactgcat

SEQ ID NO: 5732359 - DNA, 25 bp, Homo sapien
tttgggatccacgattccactctgc

SEQ ID NO: 5732360 - DNA, 25 bp, Homo sapien
tgaagaaggatacagaagtgaagac

SEQ ID NO: 5732361 - DNA, 25 bp, Homo sapien
cagaagtgaagacccggatacgtca

SEQ ID NO: 5732362 - DNA, 25 bp, Homo sapien
gggatcgatcgtcacctcttctgcc

SEQ ID NO: 5732363 - DNA, 25 bp, Homo sapien
tgaagatggcagaagctcaccaagc

SEQ ID NO: 5732364 - DNA, 25 bp, Homo sapien
ggaaatcaaaccaattcgtcttttg

SEQ ID NO: 5732365 - DNA, 25 bp, Homo sapien
gaaagtgctgctctcctaccacggg

SEQ ID NO: 5732366 - DNA, 25 bp, Homo sapien
agcagatgcagaggatcctggacaa

SEQ ID NO: 5732367 - DNA, 25 bp, Homo sapien
tcgtgccaccaagatctggatgggt

SEQ ID NO: 5732368 - DNA, 25 bp, Homo sapien
acccggcaagcccctccagttggct

SEQ ID NO: 5732369 - DNA, 25 bp, Homo sapien
gagccggcaacgccatccatgccat

SEQ ID NO: 5732370 - DNA, 25 bp, Homo sapien
cggtcccggctgtcaaagacactgt

SEQ ID NO: 5732371 - DNA, 25 bp, Homo sapien
taacccagagtacgtgtccagcgga

SEQ ID NO: 5732372 - DNA, 25 bp, Homo sapien
gcctcgccatgaccggctctgggat

SEQ ID NO: 5732373 - DNA, 25 bp, Homo sapien
tggatttccattccttcccattcgt

SEQ ID NO: 5732374 - DNA, 25 bp, Homo sapien
cccattcgtagcctttggtaaagga

SEQ ID NO: 5732375 - DNA, 25 bp, Homo sapien
cgttcttcgtgacgttagatgaaac

SEQ ID NO: 5732376 - DNA, 25 bp, Homo sapien
tggcttatcgtggtggtgggcgtga

SEQ ID NO: 5732377 - DNA, 25 bp, Homo sapien
gggattataagtcaaggaccaagtt

SEQ ID NO: 5732378 - DNA, 25 bp, Homo sapien
atccattccattgcctcaatgctga

SEQ ID NO: 5732379 - DNA, 25 bp, Homo sapien
aggatacagaagtgaagacccggat

SEQ ID NO: 5732380 - DNA, 25 bp, Homo sapien
gagacggggattataagtcaaggac

SEQ ID NO: 5732381 - DNA, 25 bp, Homo sapien
cgaggcctccatgacccggctcttc

SEQ ID NO: 5732382 - DNA, 25 bp, Homo sapien
acttgagacaaagtggaaagtctca

SEQ ID NO: 5732383 - DNA, 25 bp, Homo sapien
tccattccttcccattcgtagcctt

SEQ ID NO: 5732384 - DNA, 25 bp, Homo sapien
cgatgttacgacaggtggtttgaca

SEQ ID NO: 5732385 - DNA, 25 bp, Homo sapien
agacaccatccagcacatgagagac

SEQ ID NO: 5732386 - DNA, 25 bp, Homo sapien
tgtttaatacttcccggatcccagg

SEQ ID NO: 5732387 - DNA, 25 bp, Homo sapien
cctcttctgcctttacgtggtgtct

SEQ ID NO: 5732388 - DNA, 25 bp, Homo sapien
tgtcgtcaggcctattttggacgtg

SEQ ID NO: 5732389 - DNA, 25 bp, Homo sapien
ctgggcagatgcgccgatcgtggcc

SEQ ID NO: 5732390 - DNA, 25 bp, Homo sapien
ctggaaaaagaagttcatcagattc

SEQ ID NO: 5732391 - DNA, 25 bp, Homo sapien
aaggtctggctctaccatgatgggc

SEQ ID NO: 5732392 - DNA, 25 bp, Homo sapien
caaggacatgggcaagttttgcctc

SEQ ID NO: 5732393 - DNA, 25 bp, Homo sapien
cgcaggagacagagttccctgggcc

SEQ ID NO: 5732394 - DNA, 25 bp, Homo sapien
gcatcatcactggcgtgtacccggc

SEQ ID NO: 5732395 - DNA, 25 bp, Homo sapien
gcctttacgtggtgtctaaatatct

SEQ ID NO: 5732396 - DNA, 25 bp, Homo sapien
tggtggacccggcccagacggtgga

SEQ ID NO: 5732397 - DNA, 25 bp, Homo sapien
ttccaagttctcttgccctgagacg

SEQ ID NO: 5732398 - DNA, 25 bp, Homo sapien
cctgttgattttcacttgctgtgca

SEQ ID NO: 5732399 - DNA, 25 bp, Homo sapien
aagttggcgtctgagaagcatcagc

SEQ ID NO: 5732400 - DNA, 25 bp, Homo sapien
cttctggcaaacgacgtggatttcc

SEQ ID NO: 5732401 - DNA, 25 bp, Homo sapien
ggagattatcaacaagccagacccc

SEQ ID NO: 5732402 - DNA, 25 bp, Homo sapien
cgctcatggtgaacagcaactatta

SEQ ID NO: 5732403 - DNA, 25 bp, Homo sapien
acggctatggtgtgtcgtacatcct

SEQ ID NO: 5732404 - DNA, 25 bp, Homo sapien
gccgaaaacccatgttgtacagctt

SEQ ID NO: 5732405 - DNA, 25 bp, Homo sapien
gccctcaccgcaggagacagagttc

SEQ ID NO: 5732406 - DNA, 25 bp, Homo sapien
tctaaatatctcgctgtggagtccc

SEQ ID NO: 5732407 - DNA, 25 bp, Homo sapien
cagcagcaagtggagctgtttgact

SEQ ID NO: 5732408 - DNA, 25 bp, Homo sapien
attccgtaccccaccaggctgcagt

SEQ ID NO: 5732409 - DNA, 25 bp, Homo sapien
atggtgtgtcgtacatccttgtggg

SEQ ID NO: 5732410 - DNA, 25 bp, Homo sapien
caaactggaccgggaggaaatcaaa

SEQ ID NO: 5732411 - DNA, 25 bp, Homo sapien
cagttggcttatcgtggtggtgggc

SEQ ID NO: 5732412 - DNA, 25 bp, Homo sapien
catgttgtacagcttccagacatcg

SEQ ID NO: 5732413 - DNA, 25 bp, Homo sapien
cacattcaggcagcaagagccggca

SEQ ID NO: 5732414 - DNA, 25 bp, Homo sapien
gaagccccgggagatggagcagcag

SEQ ID NO: 5732415 - DNA, 25 bp, Homo sapien
tatcaacaagccagacccctcagca

SEQ ID NO: 5732416 - DNA, 25 bp, Homo sapien
ctctcctaccacgggtggatgttca

SEQ ID NO: 5732417 - DNA, 25 bp, Homo sapien
tcctgggcagatgcgccgatcgtgg

SEQ ID NO: 5732418 - DNA, 25 bp, Homo sapien
aaagacactgtgaacaggtatctac

SEQ ID NO: 5732419 - DNA, 25 bp, Homo sapien
cggaggatgggcactgcaaaggcga

SEQ ID NO: 5732420 - DNA, 25 bp, Homo sapien
tcttctgcctttacgtggtgtctaa

SEQ ID NO: 5732421 - DNA, 25 bp, Homo sapien
caagccagacccctcagcagcaagt

SEQ ID NO: 5732422 - DNA, 25 bp, Homo sapien
tccagcacatgagagacagcaagca

SEQ ID NO: 5732423 - DNA, 25 bp, Homo sapien
caactgcatgtccagccagacgaag

SEQ ID NO: 5732424 - DNA, 25 bp, Homo sapien
ggatcctggacaatacctcggagcc

SEQ ID NO: 5732425 - DNA, 25 bp, Homo sapien
gccatcctgctttacaggcgcaaac

SEQ ID NO: 5732426 - DNA, 25 bp, Homo sapien
gaaggatacagaagtgaagacccgg

SEQ ID NO: 5732427 - DNA, 25 bp, Homo sapien
atatccttccaactcacattcaggc

SEQ ID NO: 5732428 - DNA, 25 bp, Homo sapien
taaatatctcgctgtggagtcccct

SEQ ID NO: 5732429 - DNA, 25 bp, Homo sapien
ggctctgggatcgatcgtcacctct

SEQ ID NO: 5732430 - DNA, 25 bp, Homo sapien
actgcaaaggcgacatcaatccgaa

SEQ ID NO: 5732431 - DNA, 25 bp, Homo sapien
tgtgtcgtacatccttgtgggagag

SEQ ID NO: 5732432 - DNA, 25 bp, Homo sapien
cggtgaggcctcttatgaaggaaga

SEQ ID NO: 5732433 - DNA, 25 bp, Homo sapien
caagttcatgtgctgggctggaaag

SEQ ID NO: 5732434 - DNA, 25 bp, Homo sapien
cggcatcatcactggcgtgtacccg

SEQ ID NO: 5732435 - DNA, 25 bp, Homo sapien
cgtggtggtgggcgtgatgacaacg

SEQ ID NO: 5732436 - DNA, 25 bp, Homo sapien
cttcaaacggatgacagcacttgct

SEQ ID NO: 5732437 - DNA, 25 bp, Homo sapien
cttcgtgcgggccatggtggacccg

SEQ ID NO: 5732438 - DNA, 25 bp, Homo sapien
gggccatggtggacccggcccagac

SEQ ID NO: 5732439 - DNA, 25 bp, Homo sapien
gaaagcagcgttcttcgtgacgtta

SEQ ID NO: 5732440 - DNA, 25 bp, Homo sapien
tcaaacggatgacagcacttgctca

SEQ ID NO: 5732441 - DNA, 25 bp, Homo sapien
agtggagctgtttgacttggagaat

SEQ ID NO: 5732442 - DNA, 25 bp, Homo sapien
ggaagatgggcctcaacgctgaaca

SEQ ID NO: 5732443 - DNA, 25 bp, Homo sapien
aagaaggatacagaagtgaagaccc

SEQ ID NO: 5732444 - DNA, 25 bp, Homo sapien
cacatttcttccaagttctcttgcc

SEQ ID NO: 5732445 - DNA, 25 bp, Homo sapien
caagctgtggcctttcagttcacgg

SEQ ID NO: 5732446 - DNA, 25 bp, Homo sapien
acagacaccatccagcacatgagag

SEQ ID NO: 5732447 - DNA, 25 bp, Homo sapien
tctcagcatatggaaacaaggcctt

SEQ ID NO: 5732448 - DNA, 25 bp, Homo sapien
actacaaggacatgggcaagttttg

SEQ ID NO: 5732449 - DNA, 25 bp, Homo sapien
gacatgggcaagttttgcctcacat

SEQ ID NO: 5732450 - DNA, 25 bp, Homo sapien
tctggacttcattcctggaaaaaga

SEQ ID NO: 5732451 - DNA, 25 bp, Homo sapien
aggacatgggcaagttttgcctcac

SEQ ID NO: 5732452 - DNA, 25 bp, Homo sapien
tctctctggacttcattcctggaaa

SEQ ID NO: 5732453 - DNA, 25 bp, Homo sapien
ttctgcctttacgtggtgtctaaat

SEQ ID NO: 5732454 - DNA, 25 bp, Homo sapien
gccgctcatggtgaacagcaactat

SEQ ID NO: 5732455 - DNA, 25 bp, Homo sapien
gtggaacagaggctgaagttgttca

SEQ ID NO: 5732456 - DNA, 25 bp, Homo sapien
tcgcctcgccatgaccggctctggg

SEQ ID NO: 5732457 - DNA, 25 bp, Homo sapien
ctgaagccccgggagatggagcagc

SEQ ID NO: 5732458 - DNA, 25 bp, Homo sapien
gcagcaagtggagctgtttgacttg

SEQ ID NO: 5732459 - DNA, 25 bp, Homo sapien
gattgacctgcggctgagccatgaa

SEQ ID NO: 5732460 - DNA, 25 bp, Homo sapien
atgaaggaagaagacttcaaacgga

SEQ ID NO: 5732461 - DNA, 25 bp, Homo sapien
tattttggacgtgggaaaaataagc

SEQ ID NO: 5732462 - DNA, 25 bp, Homo sapien
aagatgagtcgtgccaccaagatct

SEQ ID NO: 5732463 - DNA, 25 bp, Homo sapien
taggaataattgcaaaaatcaatcg

SEQ ID NO: 5732464 - DNA, 25 bp, Homo sapien
tgacttggagaataacccagagtac

SEQ ID NO: 5732465 - DNA, 25 bp, Homo sapien
gcactgcaaaggcgacatcaatccg

SEQ ID NO: 5732466 - DNA, 25 bp, Homo sapien
gatcgatcgtcacctcttctgcctt

SEQ ID NO: 5732467 - DNA, 25 bp, Homo sapien
acactcctgggcagatgcgccgatc

SEQ ID NO: 5732468 - DNA, 25 bp, Homo sapien
tgagcacggcaagatgagtcgtgcc

SEQ ID NO: 5732469 - DNA, 25 bp, Homo sapien
gtcactccggacgggattgacctgc

SEQ ID NO: 5732470 - DNA, 25 bp, Homo sapien
tacttcaaggtctggctctaccatg

SEQ ID NO: 5732471 - DNA, 25 bp, Homo sapien
ttgctgtcggtcttggaccaagatt

SEQ ID NO: 5732472 - DNA, 25 bp, Homo sapien
ctgggctatgcggaggatgggcact

SEQ ID NO: 5732473 - DNA, 25 bp, Homo sapien
cggttgctgatgacggctatggtgt

SEQ ID NO: 5732474 - DNA, 25 bp, Homo sapien
tggacatcaccaagttcatgtgctg

SEQ ID NO: 5732475 - DNA, 25 bp, Homo sapien
ttgcctcaatgctgagaacagtgcc

SEQ ID NO: 5732476 - DNA, 25 bp, Homo sapien
cacgagcccagacgcctttgtgcag

SEQ ID NO: 5732477 - DNA, 25 bp, Homo sapien
caggtatctacagtcggtgaggcct

SEQ ID NO: 5732478 - DNA, 25 bp, Homo sapien
atcgtcgtgtaccatcgaggacgct

SEQ ID NO: 5732479 - DNA, 25 bp, Homo sapien
agaaatgtcgcacgagcccagacgc

SEQ ID NO: 5732480 - DNA, 25 bp, Homo sapien
gaggacgctacttcaaggtctggct

SEQ ID NO: 5732481 - DNA, 25 bp, Homo sapien
gcaaacgacgtggatttccattcct

SEQ ID NO: 5732482 - DNA, 25 bp, Homo sapien
cccgggggaatgtcaagaggttata

SEQ ID NO: 5732483 - DNA, 25 bp, Homo sapien
gatgcagaggatcctggacaatacc

SEQ ID NO: 5732484 - DNA, 25 bp, Homo sapien
agtgaagacccggatacgtcaatgg

SEQ ID NO: 5732485 - DNA, 25 bp, Homo sapien
catacgaggcctccatgacccggct

SEQ ID NO: 5732486 - DNA, 25 bp, Homo sapien
gccaactgcatgtccagccagacga

SEQ ID NO: 5732487 - DNA, 25 bp, Homo sapien
tccacatttcttccaagttctcttg

SEQ ID NO: 5732488 - DNA, 25 bp, Homo sapien
tgacaagtcgttcacgtttgttgtc

SEQ ID NO: 5732489 - DNA, 25 bp, Homo sapien
ataaaagatgctcaataaatatgtt

SEQ ID NO: 5732490 - DNA, 25 bp, Homo sapien
ggagaccgtgcgctcctgcaccact

SEQ ID NO: 5732491 - DNA, 25 bp, Homo sapien
actgagcacggcaagatgagtcgtg

SEQ ID NO: 5732492 - DNA, 25 bp, Homo sapien
tcctggaaaaagaagttcatcagat

SEQ ID NO: 5732493 - DNA, 25 bp, Homo sapien
atgacccggctcttccgagagggga

SEQ ID NO: 5732494 - DNA, 25 bp, Homo sapien
gatgctcaataaatatgttaaaagt

SEQ ID NO: 5732495 - DNA, 25 bp, Homo sapien
ttgacctgcggctgagccatgaagc

SEQ ID NO: 5732496 - DNA, 25 bp, Homo sapien
atcaatccgaacattccgtacccca

SEQ ID NO: 5732497 - DNA, 25 bp, Homo sapien
cgatcgtggcccacctttgggagta

SEQ ID NO: 5732498 - DNA, 25 bp, Homo sapien
tgggagcggatgtttaatacttccc

SEQ ID NO: 5732499 - DNA, 25 bp, Homo sapien
aattacgtgagcgactggtgggagg

SEQ ID NO: 5732500 - DNA, 25 bp, Homo sapien
tttgacaagtcgttcacgtttgttg

SEQ ID NO: 5732501 - DNA, 25 bp, Homo sapien
gtggtgggcgtgatgacaacgatgt

SEQ ID NO: 5732502 - DNA, 25 bp, Homo sapien
ccagagtacgtgtccagcggagggg

SEQ ID NO: 5732503 - DNA, 25 bp, Homo sapien
ggtgtcgtcaggcctattttggacg

SEQ ID NO: 5732504 - DNA, 25 bp, Homo sapien
gtgggctacaaattacgtgagcgac

SEQ ID NO: 5732505 - DNA, 25 bp, Homo sapien
ttccttaaggaagttttatctgagc

SEQ ID NO: 5732506 - DNA, 25 bp, Homo sapien
tacacggccgatgttacgacaggtg

SEQ ID NO: 5732507 - DNA, 25 bp, Homo sapien
aatttccacatttcttccaagttct

SEQ ID NO: 5732508 - DNA, 25 bp, Homo sapien
tcatcagattcaagaacggcatcat

SEQ ID NO: 5732509 - DNA, 25 bp, Homo sapien
ccgggagatggagcagcagatgcag

SEQ ID NO: 5732510 - DNA, 25 bp, Homo sapien
tcaggccgaaaacccatgttgtaca

SEQ ID NO: 5732511 - DNA, 25 bp, Homo sapien
cttagacaaatctatctctctggac

SEQ ID NO: 5732512 - DNA, 25 bp, Homo sapien
tacagaagtgaagacccggatacgt

SEQ ID NO: 5732513 - DNA, 25 bp, Homo sapien
gcaagcacatcgtcgtgtaccatcg

SEQ ID NO: 5732514 - DNA, 25 bp, Homo sapien
cacatacgaggcctccatgacccgg

SEQ ID NO: 5732515 - DNA, 25 bp, Homo sapien
tgaacaccgcaaatcttctggcaaa

SEQ ID NO: 5732516 - DNA, 25 bp, Homo sapien
gcctcaatgctgagaacagtgcctg

SEQ ID NO: 5732517 - DNA, 25 bp, Homo sapien
atccgaacattccgtaccccaccag

SEQ ID NO: 5732518 - DNA, 25 bp, Homo sapien
gaggacggagaccgtgcgctcctgc

SEQ ID NO: 5732519 - DNA, 25 bp, Homo sapien
gaacagcaactattatgccatggat

SEQ ID NO: 5732520 - DNA, 25 bp, Homo sapien
aatcggactctggaaacggccaact

SEQ ID NO: 5732521 - DNA, 25 bp, Homo sapien
ttgggagtacgtcatgtccattgac

SEQ ID NO: 5732522 - DNA, 25 bp, Homo sapien
gctgccgctgccgcacctccgtagc

SEQ ID NO: 5732523 - DNA, 25 bp, Homo sapien
cggatgtttaatacttcccggatcc

SEQ ID NO: 5732524 - DNA, 25 bp, Homo sapien
tctatctctctggacttcattcctg

SEQ ID NO: 5732525 - DNA, 25 bp, Homo sapien
accatggacatcaccaagttcatgt

SEQ ID NO: 5732526 - DNA, 25 bp, Homo sapien
ttccttcccattcgtagcctttggt

SEQ ID NO: 5732527 - DNA, 25 bp, Homo sapien
ggggaggccaggctggcagccctca

SEQ ID NO: 5732528 - DNA, 25 bp, Homo sapien
gaagttgttcaagttggcgtctgag

SEQ ID NO: 5732529 - DNA, 25 bp, Homo sapien
gatggcagaagctcaccaagctgtg

SEQ ID NO: 5732530 - DNA, 25 bp, Homo sapien
cgaagaacgtggtcagcggcgtgct

SEQ ID NO: 5732531 - DNA, 25 bp, Homo sapien
tgatgacaacgatgtacgccaagat

SEQ ID NO: 5732532 - DNA, 25 bp, Homo sapien
cgttcacgtttgttgtcttcaaaaa

SEQ ID NO: 5732533 - DNA, 25 bp, Homo sapien
ttacgtggtgtctaaatatctcgct

SEQ ID NO: 5732534 - DNA, 25 bp, Homo sapien
aaaatcaatcggactctggaaacgg

SEQ ID NO: 5732535 - DNA, 25 bp, Homo sapien
tcgtcacctcttctgcctttacgtg

SEQ ID NO: 5732536 - DNA, 25 bp, Homo sapien
accatccagcacatgagagacagca

SEQ ID NO: 5732537 - DNA, 25 bp, Homo sapien
gctgccgcacctccgtagctgactc

SEQ ID NO: 5732538 - DNA, 25 bp, Homo sapien
cattcgtagcctttggtaaaggaat

SEQ ID NO: 5732539 - DNA, 25 bp, Homo sapien
tgggcggctgctgaagccccgggag

SEQ ID NO: 5732540 - DNA, 25 bp, Homo sapien
tccagttggcttatcgtggtggtgg

SEQ ID NO: 5732541 - DNA, 25 bp, Homo sapien
cattgcctcaatgctgagaacagtg

SEQ ID NO: 5732542 - DNA, 25 bp, Homo sapien
gacagctacgccaaatctctactac

SEQ ID NO: 5732543 - DNA, 25 bp, Homo sapien
gccatggtggacccggcccagacgg

SEQ ID NO: 5732544 - DNA, 25 bp, Homo sapien
cttcattcctggaaaaagaagttca

SEQ ID NO: 5732545 - DNA, 25 bp, Homo sapien
acgtggtcagcggcgtgctgtttgg

SEQ ID NO: 5732546 - DNA, 25 bp, Homo sapien
tacgccaaatctctactacacggcc

SEQ ID NO: 5732547 - DNA, 25 bp, Homo sapien
cctggacaatacctcggagcctcag

SEQ ID NO: 5732548 - DNA, 25 bp, Homo sapien
tttggcaccggcctgtgggtggccc

SEQ ID NO: 5732549 - DNA, 25 bp, Homo sapien
ttacgtgagcgactggtgggaggag

SEQ ID NO: 5732550 - DNA, 25 bp, Homo sapien
ggcgcaaactggaccgggaggaaat

SEQ ID NO: 5732551 - DNA, 25 bp, Homo sapien
aggtggtttgacaagtcgttcacgt

SEQ ID NO: 5732552 - DNA, 25 bp, Homo sapien
ttcacttgctgtgcatttattcatc

SEQ ID NO: 5732553 - DNA, 25 bp, Homo sapien
aggagaggagacagacaccatccag

SEQ ID NO: 5732554 - DNA, 25 bp, Homo sapien
cgtggatttccattccttcccattc

SEQ ID NO: 5732555 - DNA, 25 bp, Homo sapien
caggctggcagccctcaccgcagga

SEQ ID NO: 5732556 - DNA, 25 bp, Homo sapien
acactgtgaacaggtatctacagtc

SEQ ID NO: 5732557 - DNA, 25 bp, Homo sapien
aagattttgctgtcggtcttggacc

SEQ ID NO: 5732558 - DNA, 25 bp, Homo sapien
cctcgttaggaataattgcaaaaat

SEQ ID NO: 5732559 - DNA, 25 bp, Homo sapien
tatggtcaagatcttttcaggccga

SEQ ID NO: 5732560 - DNA, 25 bp, Homo sapien
gacttcattcctggaaaaagaagtt

SEQ ID NO: 5732561 - DNA, 25 bp, Homo sapien
ggatgggcactgcaaaggcgacatc

SEQ ID NO: 5732562 - DNA, 25 bp, Homo sapien
gaaaagcctgttgattttcacttgc

SEQ ID NO: 5732563 - DNA, 25 bp, Homo sapien
ggctggcagccctcaccgcaggaga

SEQ ID NO: 5732564 - DNA, 25 bp, Homo sapien
cctggtgggctacaaattacgtgag

SEQ ID NO: 5732565 - DNA, 25 bp, Homo sapien
gggccaggtgtcgtcaggcctattt

SEQ ID NO: 5732566 - DNA, 25 bp, Homo sapien
gagacaaagtggaaagtctcagcat

SEQ ID NO: 5732567 - DNA, 25 bp, Homo sapien
ccatgaccggctctgggatcgatcg

SEQ ID NO: 5732568 - DNA, 25 bp, Homo sapien
ctccctgaaagtgctgctctcctac

SEQ ID NO: 5732569 - DNA, 25 bp, Homo sapien
ccggacgggattgacctgcggctga

SEQ ID NO: 5732570 - DNA, 25 bp, Homo sapien
tctgctccgctcagtgggagcggat

SEQ ID NO: 5732571 - DNA, 25 bp, Homo sapien
tgtttgacttggagaataacccaga

SEQ ID NO: 5732572 - DNA, 25 bp, Homo sapien
attcatccattccattgcctcaatg

SEQ ID NO: 5732573 - DNA, 25 bp, Homo sapien
aatggacagctacgccaaatctcta

SEQ ID NO: 5732574 - DNA, 25 bp, Homo sapien
acagcaactattatgccatggatct

SEQ ID NO: 5732575 - DNA, 25 bp, Homo sapien
ccgctcagtgggagcggatgtttaa

SEQ ID NO: 5732576 - DNA, 25 bp, Homo sapien
tgggatccacgattccactctgctc

SEQ ID NO: 5732577 - DNA, 25 bp, Homo sapien
aaaagatgctcaataaatatgttaa

SEQ ID NO: 5732578 - DNA, 25 bp, Homo sapien
gacccctcgttaggaataattgcaa

SEQ ID NO: 5732579 - DNA, 25 bp, Homo sapien
tttcaggccgaaaacccatgttgta

SEQ ID NO: 5732580 - DNA, 25 bp, Homo sapien
gcgcactacaaggacatgggcaagt

SEQ ID NO: 5732581 - DNA, 25 bp, Homo sapien
caggctgcagtgggacatcccgggg

SEQ ID NO: 5732582 - DNA, 25 bp, Homo sapien
accgcaggagacagagttccctggg

SEQ ID NO: 5732583 - DNA, 25 bp, Homo sapien
tcggactctggaaacggccaactgc

SEQ ID NO: 5732584 - DNA, 25 bp, Homo sapien
tcttccaagttctcttgccctgaga

SEQ ID NO: 5732585 - DNA, 25 bp, Homo sapien
ctgatgacggctatggtgtgtcgta

SEQ ID NO: 5732586 - DNA, 25 bp, Homo sapien
tgttgattttcacttgctgtgcatt

SEQ ID NO: 5732587 - DNA, 25 bp, Homo sapien
atgcgacttcgtgcgggccatggtg

SEQ ID NO: 5732588 - DNA, 25 bp, Homo sapien
tcaatttccacatttcttccaagtt

SEQ ID NO: 5732589 - DNA, 25 bp, Homo sapien
tttgaagttaaaatcctggtgggct

SEQ ID NO: 5732590 - DNA, 25 bp, Homo sapien
actgcatgtccagccagacgaagaa

SEQ ID NO: 5732591 - DNA, 25 bp, Homo sapien
catcaccaagttcatgtgctgggct

SEQ ID NO: 5732592 - DNA, 25 bp, Homo sapien
ggaacagaggctgaagttgttcaag

SEQ ID NO: 5732593 - DNA, 25 bp, Homo sapien
gagtacatctacctccgaggacgag

SEQ ID NO: 5732594 - DNA, 25 bp, Homo sapien
gcctttggtaaaggaatcatcaaga

SEQ ID NO: 5732595 - DNA, 25 bp, Homo sapien
tggctctaccatgatgggcggctgc

SEQ ID NO: 5732596 - DNA, 25 bp, Homo sapien
ctcctaccacgggtggatgttcact

SEQ ID NO: 5732597 - DNA, 25 bp, Homo sapien
gacggtggaacagaggctgaagttg

SEQ ID NO: 5732598 - DNA, 25 bp, Homo sapien
tactccctgaaagtgctgctctcct

SEQ ID NO: 5732599 - DNA, 25 bp, Homo sapien
cggtactctctgaagatggcagaag

SEQ ID NO: 5732600 - DNA, 25 bp, Homo sapien
gaacgtggtcagcggcgtgctgttt

SEQ ID NO: 5732601 - DNA, 25 bp, Homo sapien
tccagccagacgaagaacgtggtca

SEQ ID NO: 5732602 - DNA, 25 bp, Homo sapien
caaatctatctctctggacttcatt

SEQ ID NO: 5732603 - DNA, 25 bp, Homo sapien
gtgaacagcaactattatgccatgg

SEQ ID NO: 5732604 - DNA, 25 bp, Homo sapien
caaggaccaagttcagatacttgag

SEQ ID NO: 5732605 - DNA, 25 bp, Homo sapien
ggtatctacagtcggtgaggcctct

SEQ ID NO: 5732606 - DNA, 25 bp, Homo sapien
acgacgtggatttccattccttccc

SEQ ID NO: 5732607 - DNA, 25 bp, Homo sapien
caaggccttggaggagaccatggac

SEQ ID NO: 5732608 - DNA, 25 bp, Homo sapien
agcagtctcttgatgctgtggagaa

SEQ ID NO: 5732609 - DNA, 25 bp, Homo sapien
tcaacgctgaacactcctgggcaga

SEQ ID NO: 5732610 - DNA, 25 bp, Homo sapien
cttcaaggtctggctctaccatgat

SEQ ID NO: 5732611 - DNA, 25 bp, Homo sapien
agaataacccagagtacgtgtccag

SEQ ID NO: 5732612 - DNA, 25 bp, Homo sapien
gaaaaataagcagtctcttgatgct

SEQ ID NO: 5732613 - DNA, 25 bp, Homo sapien
ttgtgggagagaacctcatcaattt

SEQ ID NO: 5732614 - DNA, 25 bp, Homo sapien
gcctgtgggtggccctcatcgtcac

SEQ ID NO: 5732615 - DNA, 25 bp, Homo sapien
cgaaaacccatgttgtacagcttcc

SEQ ID NO: 5732616 - DNA, 25 bp, Homo sapien
aacaccgcaaatcttctggcaaacg

SEQ ID NO: 5732617 - DNA, 25 bp, Homo sapien
ctgacacataaaagatgctcaataa

SEQ ID NO: 5732618 - DNA, 25 bp, Homo sapien
cacttgctgtgcatttattcatcca

SEQ ID NO: 5732619 - DNA, 25 bp, Homo sapien
cagaggctgaagttgttcaagttgg

SEQ ID NO: 5732620 - DNA, 25 bp, Homo sapien
gtggtcagcggcgtgctgtttggca

SEQ ID NO: 5732621 - DNA, 25 bp, Homo sapien
ggcctcaacgctgaacactcctggg

SEQ ID NO: 5732622 - DNA, 25 bp, Homo sapien
gatcccaggagaggagacagacacc

SEQ ID NO: 5732623 - DNA, 25 bp, Homo sapien
ggatgacagcacttgctcaagattt

SEQ ID NO: 5732624 - DNA, 25 bp, Homo sapien
ggcgacatcaatccgaacattccgt

SEQ ID NO: 5732625 - DNA, 25 bp, Homo sapien
aagttcagatacttgagacaaagtg

SEQ ID NO: 5732626 - DNA, 25 bp, Homo sapien
agagttccctgggccaggtgtcgtc

SEQ ID NO: 5732627 - DNA, 25 bp, Homo sapien
aagtcaaggaccaagttcagatact

SEQ ID NO: 5732628 - DNA, 25 bp, Homo sapien
gattataagtcaaggaccaagttca

SEQ ID NO: 5732629 - DNA, 25 bp, Homo sapien
agatcttttcaggccgaaaacccat

SEQ ID NO: 5732630 - DNA, 25 bp, Homo sapien
agttgttcaagttggcgtctgagaa

SEQ ID NO: 5732631 - DNA, 25 bp, Homo sapien
gggccgctcatggtgaacagcaact

SEQ ID NO: 5732632 - DNA, 25 bp, Homo sapien
tcctgctttacaggcgcaaactgga

SEQ ID NO: 5732633 - DNA, 25 bp, Homo sapien
cagcaagcacatcgtcgtgtaccat

SEQ ID NO: 5732634 - DNA, 25 bp, Homo sapien
tcgaggacgctacttcaaggtctgg

SEQ ID NO: 5732635 - DNA, 25 bp, Homo sapien
tcagcatatggaaacaaggccttgg

SEQ ID NO: 5732636 - DNA, 25 bp, Homo sapien
tcccaggagaggagacagacaccat

SEQ ID NO: 5732637 - DNA, 25 bp, Homo sapien
aacaagccagacccctcagcagcaa

SEQ ID NO: 5732638 - DNA, 25 bp, Homo sapien
gtagctgactcggtactctctgaag

SEQ ID NO: 5732639 - DNA, 25 bp, Homo sapien
accggttgctgatgacggctatggt

SEQ ID NO: 5732640 - DNA, 25 bp, Homo sapien
gaggacgagggccgctcatggtgaa

SEQ ID NO: 5732641 - DNA, 25 bp, Homo sapien
aatctatctctctggacttcattcc

SEQ ID NO: 5732642 - DNA, 25 bp, Homo sapien
ctttggaccggttgctgatgacggc

SEQ ID NO: 5732643 - DNA, 25 bp, Homo sapien
gattcaagaacggcatcatcactgg

SEQ ID NO: 5732644 - DNA, 25 bp, Homo sapien
gcacatgagagacagcaagcacatc

SEQ ID NO: 5732645 - DNA, 25 bp, Homo sapien
ggagacagagttccctgggccaggt

SEQ ID NO: 5732646 - DNA, 25 bp, Homo sapien
tggtcaagatcttttcaggccgaaa

SEQ ID NO: 5732647 - DNA, 25 bp, Homo sapien
cagctggccctccagctggcgcact

SEQ ID NO: 5732648 - DNA, 25 bp, Homo sapien
caagttttgcctcacatacgaggcc

SEQ ID NO: 5732649 - DNA, 25 bp, Homo sapien
gattccactctgctccgctcagtgg

SEQ ID NO: 5732650 - DNA, 25 bp, Homo sapien
gtcgttcacgtttgttgtcttcaaa

SEQ ID NO: 5732651 - DNA, 25 bp, Homo sapien
gtggtttgacaagtcgttcacgttt

SEQ ID NO: 5732652 - DNA, 25 bp, Homo sapien
gccctccagctggcgcactacaagg

SEQ ID NO: 5732653 - DNA, 25 bp, Homo sapien
gggctatgcggaggatgggcactgc

SEQ ID NO: 5732654 - DNA, 25 bp, Homo sapien
cggccaactgcatgtccagccagac

SEQ ID NO: 5732655 - DNA, 25 bp, Homo sapien
aacagaggctgaagttgttcaagtt

SEQ ID NO: 5732656 - DNA, 25 bp, Homo sapien
taaaggaatcatcaagaaatgtcgc

SEQ ID NO: 5732657 - DNA, 25 bp, Homo sapien
ctcatcgtcaccatgcgctactccc

SEQ ID NO: 5732658 - DNA, 25 bp, Homo sapien
ccggcaagcccctccagttggctta

SEQ ID NO: 5732659 - DNA, 25 bp, Homo sapien
catggtggacccggcccagacggtg

SEQ ID NO: 5732660 - DNA, 25 bp, Homo sapien
gccaggctggcagccctcaccgcag

SEQ ID NO: 5732661 - DNA, 25 bp, Homo sapien
aacaggtatctacagtcggtgaggc

SEQ ID NO: 5732662 - DNA, 25 bp, Homo sapien
cctcaccgcaggagacagagttccc

SEQ ID NO: 5732663 - DNA, 25 bp, Homo sapien
gaaggaagaagacttcaaacggatg

SEQ ID NO: 5732664 - DNA, 25 bp, Homo sapien
tctcgctgtggagtcccctttcctt

SEQ ID NO: 5732665 - DNA, 25 bp, Homo sapien
actattatgccatggatctgctgta

SEQ ID NO: 5732666 - DNA, 25 bp, Homo sapien
gcagatgcgccgatcgtggcccacc

SEQ ID NO: 5732667 - DNA, 25 bp, Homo sapien
tgtcggtcttggaccaagattacag

SEQ ID NO: 5732668 - DNA, 25 bp, Homo sapien
atcagattcaagaacggcatcatca

SEQ ID NO: 5732669 - DNA, 25 bp, Homo sapien
ctcaatgctgagaacagtgcctgac

SEQ ID NO: 5732670 - DNA, 25 bp, Homo sapien
cctccctgaacaccgcaaatcttct

SEQ ID NO: 5732671 - DNA, 25 bp, Homo sapien
gacagcctccagctgggctatgcgg

SEQ ID NO: 5732672 - DNA, 25 bp, Homo sapien
gaagctcttagacaaatctatctct

SEQ ID NO: 5732673 - DNA, 25 bp, Homo sapien
ctgctttacaggcgcaaactggacc

SEQ ID NO: 5732674 - DNA, 25 bp, Homo sapien
ttttcacttgctgtgcatttattca

SEQ ID NO: 5732675 - DNA, 25 bp, Homo sapien
acatcgtcgtgtaccatcgaggacg

SEQ ID NO: 5732676 - DNA, 25 bp, Homo sapien
gtactctctgaagatggcagaagct

SEQ ID NO: 5732677 - DNA, 25 bp, Homo sapien
gaaagaaaagcctgttgattttcac

SEQ ID NO: 5732678 - DNA, 25 bp, Homo sapien
agtcatgcgacttcgtgcgggccat

SEQ ID NO: 5732679 - DNA, 25 bp, Homo sapien
aggccgaaaacccatgttgtacagc

SEQ ID NO: 5732680 - DNA, 25 bp, Homo sapien
gttcaagttggcgtctgagaagcat

SEQ ID NO: 5732681 - DNA, 25 bp, Homo sapien
tctcttgccctgagacggggattat

SEQ ID NO: 5732682 - DNA, 25 bp, Homo sapien
acgctacttcaaggtctggctctac

SEQ ID NO: 5732683 - DNA, 25 bp, Homo sapien
tgcaaaggcgacatcaatccgaaca

SEQ ID NO: 5732684 - DNA, 25 bp, Homo sapien
gctgtcggtcttggaccaagattac

SEQ ID NO: 5732685 - DNA, 25 bp, Homo sapien
ctgtggcctttcagttcacggtcac

SEQ ID NO: 5732686 - DNA, 25 bp, Homo sapien
ctactacacggccgatgttacgaca

SEQ ID NO: 5732687 - DNA, 25 bp, Homo sapien
taatacttcccggatcccaggagag

SEQ ID NO: 5732688 - DNA, 25 bp, Homo sapien
tgccgcacctccgtagctgactcgg

SEQ ID NO: 5732689 - DNA, 25 bp, Homo sapien
actctgctccgctcagtgggagcgg

SEQ ID NO: 5732690 - DNA, 25 bp, Homo sapien
ctggtgggaggagtacatctacctc

SEQ ID NO: 5732691 - DNA, 25 bp, Homo sapien
tcgtcaggcctattttggacgtggg

SEQ ID NO: 5732692 - DNA, 25 bp, Homo sapien
ggtgggcgtgatgacaacgatgtac

SEQ ID NO: 5732693 - DNA, 25 bp, Homo sapien
ctgaacactcctgggcagatgcgcc

SEQ ID NO: 5732694 - DNA, 25 bp, Homo sapien
tatggaaacaaggccttggaggaga

SEQ ID NO: 5732695 - DNA, 25 bp, Homo sapien
ccctcatcgtcaccatgcgctactc

SEQ ID NO: 5732696 - DNA, 25 bp, Homo sapien
gacaacgatgtacgccaagatcgac

SEQ ID NO: 5732697 - DNA, 25 bp, Homo sapien
cccggatcccaggagaggagacaga

SEQ ID NO: 5732698 - DNA, 25 bp, Homo sapien
caaaaatcaatcggactctggaaac

SEQ ID NO: 5732699 - DNA, 25 bp, Homo sapien
acgtggtgtctaaatatctcgctgt

SEQ ID NO: 5732700 - DNA, 25 bp, Homo sapien
taccatgatgggcggctgctgaagc

SEQ ID NO: 5732701 - DNA, 25 bp, Homo sapien
ctgactcggtactctctgaagatgg

SEQ ID NO: 5732702 - DNA, 25 bp, Homo sapien
gctggccctccagctggcgcactac

SEQ ID NO: 5732703 - DNA, 25 bp, Homo sapien
ccctcagcagcaagtggagctgttt

SEQ ID NO: 5732704 - DNA, 25 bp, Homo sapien
ttatgaaggaagaagacttcaaacg

SEQ ID NO: 5732705 - DNA, 25 bp, Homo sapien
cctaccacgggtggatgttcactga

SEQ ID NO: 5732706 - DNA, 25 bp, Homo sapien
ctacctccgaggacgagggccgctc

SEQ ID NO: 5732707 - DNA, 25 bp, Homo sapien
actgtgaacaggtatctacagtcgg

SEQ ID NO: 5732708 - DNA, 25 bp, Homo sapien
gatcgtcacctcttctgcctttacg

SEQ ID NO: 5732709 - DNA, 25 bp, Homo sapien
cccatgttgtacagcttccagacat

SEQ ID NO: 5732710 - DNA, 25 bp, Homo sapien
tatgtatcgcctcgccatgaccggc

SEQ ID NO: 5732711 - DNA, 25 bp, Homo sapien
gagcctcagcccggggaggccaggc

SEQ ID NO: 5732712 - DNA, 25 bp, Homo sapien
ctctgggatcgatcgtcacctcttc

SEQ ID NO: 5732713 - DNA, 25 bp, Homo sapien
gctacttcaaggtctggctctacca

SEQ ID NO: 5732714 - DNA, 25 bp, Homo sapien
cggctgctgaagccccgggagatgg

SEQ ID NO: 5732715 - DNA, 25 bp, Homo sapien
ccgcacctccgtagctgactcggta

SEQ ID NO: 5732716 - DNA, 25 bp, Homo sapien
cattgacagcctccagctgggctat

SEQ ID NO: 5732717 - DNA, 25 bp, Homo sapien
gagaaagcagcgttcttcgtgacgt

SEQ ID NO: 5732718 - DNA, 25 bp, Homo sapien
tctgagccttggagattatcaacaa

SEQ ID NO: 5732719 - DNA, 25 bp, Homo sapien
ctccagctgggctatgcggaggatg

SEQ ID NO: 5732720 - DNA, 25 bp, Homo sapien
gatgtttaatacttcccggatccca

SEQ ID NO: 5732721 - DNA, 25 bp, Homo sapien
attgcaaaaatcaatcggactctgg

SEQ ID NO: 5732722 - DNA, 25 bp, Homo sapien
gacaaagtggaaagtctcagcatat

SEQ ID NO: 5732723 - DNA, 25 bp, Homo sapien
caagatcttttcaggccgaaaaccc

SEQ ID NO: 5732724 - DNA, 25 bp, Homo sapien
tttatctgagccttggagattatca

SEQ ID NO: 5732725 - DNA, 25 bp, Homo sapien
tcagtgggagcggatgtttaatact

SEQ ID NO: 5732726 - DNA, 25 bp, Homo sapien
cgccatgaccggctctgggatcgat

SEQ ID NO: 5732727 - DNA, 25 bp, Homo sapien
gactggtgggaggagtacatctacc

SEQ ID NO: 5732728 - DNA, 25 bp, Homo sapien
gttcatcagattcaagaacggcatc

SEQ ID NO: 5732729 - DNA, 25 bp, Homo sapien
accaagctgtggcctttcagttcac

SEQ ID NO: 5732730 - DNA, 25 bp, Homo sapien
gtacccggcaagcccctccagttgg

SEQ ID NO: 5732731 - DNA, 25 bp, Homo sapien
gagacagcaagcacatcgtcgtgta

SEQ ID NO: 5732732 - DNA, 25 bp, Homo sapien
cgttagatgaaactgaagaaggata

SEQ ID NO: 5732733 - DNA, 25 bp, Homo sapien
ctgtgggtggccctcatcgtcacca

SEQ ID NO: 5732734 - DNA, 25 bp, Homo sapien
cctttgtgcagctggccctccagct

SEQ ID NO: 5732735 - DNA, 25 bp, Homo sapien
ccaagttcagatacttgagacaaag

SEQ ID NO: 5732736 - DNA, 25 bp, Homo sapien
tcgttaggaataattgcaaaaatca

SEQ ID NO: 5732737 - DNA, 25 bp, Homo sapien
tttgtgcagctggccctccagctgg

SEQ ID NO: 5732738 - DNA, 25 bp, Homo sapien
gaacactcctgggcagatgcgccga

SEQ ID NO: 5732739 - DNA, 25 bp, Homo sapien
gtacatccttgtgggagagaacctc

SEQ ID NO: 5732740 - DNA, 25 bp, Homo sapien
ggtctggctctaccatgatgggcgg

SEQ ID NO: 5732741 - DNA, 25 bp, Homo sapien
tctggctctaccatgatgggcggct

SEQ ID NO: 5732742 - DNA, 25 bp, Homo sapien
gtcatgtccattgacagcctccagc

SEQ ID NO: 5732743 - DNA, 25 bp, Homo sapien
atgccatggatctgctgtatatcct

SEQ ID NO: 5732744 - DNA, 25 bp, Homo sapien
tgtgctgggctggaaagaaaagcct

SEQ ID NO: 5732745 - DNA, 25 bp, Homo sapien
cgccaagatcgacccctcgttagga

SEQ ID NO: 5732746 - DNA, 25 bp, Homo sapien
ccaggagaggagacagacaccatcc

SEQ ID NO: 5732747 - DNA, 25 bp, Homo sapien
cagctggcgcactacaaggacatgg

SEQ ID NO: 5732748 - DNA, 25 bp, Homo sapien
cagcctccagctgggctatgcggag

SEQ ID NO: 5732749 - DNA, 25 bp, Homo sapien
acatcaatccgaacattccgtaccc

SEQ ID NO: 5732750 - DNA, 25 bp, Homo sapien
taccacgggtggatgttcactgagc

SEQ ID NO: 5732751 - DNA, 25 bp, Homo sapien
tatctgagccttggagattatcaac

SEQ ID NO: 5732752 - DNA, 25 bp, Homo sapien
agtgggagcggatgtttaatacttc

SEQ ID NO: 5732753 - DNA, 25 bp, Homo sapien
agcctgttgattttcacttgctgtg

SEQ ID NO: 5732754 - DNA, 25 bp, Homo sapien
cttgctgtgcatttattcatccatt

SEQ ID NO: 5732755 - DNA, 25 bp, Homo sapien
aataagcagtctcttgatgctgtgg

SEQ ID NO: 5732756 - DNA, 25 bp, Homo sapien
tctggatgggtatggtcaagatctt

SEQ ID NO: 5732757 - DNA, 25 bp, Homo sapien
atgcgccgatcgtggcccacctttg

SEQ ID NO: 5732758 - DNA, 25 bp, Homo sapien
acagcttccagacatcgctgcctcg

SEQ ID NO: 5732759 - DNA, 25 bp, Homo sapien
tcattcctggaaaaagaagttcatc

SEQ ID NO: 5732760 - DNA, 25 bp, Homo sapien
ggacggagaccgtgcgctcctgcac

SEQ ID NO: 5732761 - DNA, 25 bp, Homo sapien
ggagggggctttggaccggttgctg

SEQ ID NO: 5732762 - DNA, 25 bp, Homo sapien
atgcgctactccctgaaagtgctgc

SEQ ID NO: 5732763 - DNA, 25 bp, Homo sapien
aagacttcaaacggatgacagcact

SEQ ID NO: 5732764 - DNA, 25 bp, Homo sapien
ttgattttcacttgctgtgcattta

SEQ ID NO: 5732765 - DNA, 25 bp, Homo sapien
agacccctcagcagcaagtggagct

SEQ ID NO: 5732766 - DNA, 25 bp, Homo sapien
tctctggacttcattcctggaaaaa

SEQ ID NO: 5732767 - DNA, 25 bp, Homo sapien
attacagtggtatttgaagttaaaa

SEQ ID NO: 5732768 - DNA, 25 bp, Homo sapien
gtgccaccaagatctggatgggtat

SEQ ID NO: 5732769 - DNA, 25 bp, Homo sapien
cacggcaagatgagtcgtgccacca

SEQ ID NO: 5732770 - DNA, 25 bp, Homo sapien
ttcccattcgtagcctttggtaaag

SEQ ID NO: 5732771 - DNA, 25 bp, Homo sapien
atgaagctcttagacaaatctatct

SEQ ID NO: 5732772 - DNA, 25 bp, Homo sapien
gacgttagatgaaactgaagaagga

SEQ ID NO: 5732773 - DNA, 25 bp, Homo sapien
tgagaacagtgcctgacacataaaa

SEQ ID NO: 5732774 - DNA, 25 bp, Homo sapien
accaagattacagtggtatttgaag

SEQ ID NO: 5732775 - DNA, 25 bp, Homo sapien
atccttccaactcacattcaggcag

SEQ ID NO: 5732776 - DNA, 25 bp, Homo sapien
catcctgctttacaggcgcaaactg

SEQ ID NO: 5732777 - DNA, 25 bp, Homo sapien
gtacagcttccagacatcgctgcct

SEQ ID NO: 5732778 - DNA, 25 bp, Homo sapien
tcatccattccattgcctcaatgct

SEQ ID NO: 5732779 - DNA, 25 bp, Homo sapien
gatgagtcgtgccaccaagatctgg

SEQ ID NO: 5732780 - DNA, 25 bp, Homo sapien
tgggcgtgatgacaacgatgtacgc

SEQ ID NO: 5732781 - DNA, 25 bp, Homo sapien
ttccactctgctccgctcagtggga

SEQ ID NO: 5732782 - DNA, 25 bp, Homo sapien
gggcactgcaaaggcgacatcaatc

SEQ ID NO: 5732783 - DNA, 25 bp, Homo sapien
ttcaagaacggcatcatcactggcg

SEQ ID NO: 5732784 - DNA, 25 bp, Homo sapien
aataattgcaaaaatcaatcggact

SEQ ID NO: 5732785 - DNA, 25 bp, Homo sapien
aagcagcgttcttcgtgacgttaga

SEQ ID NO: 5732786 - DNA, 25 bp, Homo sapien
cggccgatgttacgacaggtggttt

SEQ ID NO: 5732787 - DNA, 25 bp, Homo sapien
tcactggcgtgtacccggcaagccc

SEQ ID NO: 5732788 - DNA, 25 bp, Homo sapien
taagcagtctcttgatgctgtggag

SEQ ID NO: 5732789 - DNA, 25 bp, Homo sapien
aactcacattcaggcagcaagagcc

SEQ ID NO: 5732790 - DNA, 25 bp, Homo sapien
tcaccaagctgtggcctttcagttc

SEQ ID NO: 5732791 - DNA, 25 bp, Homo sapien
tatcgcctcgccatgaccggctctg

SEQ ID NO: 5732792 - DNA, 25 bp, Homo sapien
gccgatcgtggcccacctttgggag

SEQ ID NO: 5732793 - DNA, 25 bp, Homo sapien
tgtggagaaagcagcgttcttcgtg

SEQ ID NO: 5732794 - DNA, 25 bp, Homo sapien
ctgaagttgttcaagttggcgtctg

SEQ ID NO: 5732795 - DNA, 25 bp, Homo sapien
cccagacggtggaacagaggctgaa

SEQ ID NO: 5732796 - DNA, 25 bp, Homo sapien
ccctgaaagtgctgctctcctacca

SEQ ID NO: 5732797 - DNA, 25 bp, Homo sapien
ggctgaagttgttcaagttggcgtc

SEQ ID NO: 5732798 - DNA, 25 bp, Homo sapien
aacccatgttgtacagcttccagac

SEQ ID NO: 5732799 - DNA, 25 bp, Homo sapien
caagcccctccagttggcttatcgt

SEQ ID NO: 5732800 - DNA, 25 bp, Homo sapien
tcaaaccaattcgtcttttgggatc

SEQ ID NO: 5732801 - DNA, 25 bp, Homo sapien
ctgcctttacgtggtgtctaaatat

SEQ ID NO: 5732802 - DNA, 25 bp, Homo sapien
ttagatgaaactgaagaaggataca

SEQ ID NO: 5732803 - DNA, 25 bp, Homo sapien
cacggtcactccggacgggattgac

SEQ ID NO: 5732804 - DNA, 25 bp, Homo sapien
ctcacattcaggcagcaagagccgg

SEQ ID NO: 5732805 - DNA, 25 bp, Homo sapien
accaattcgtcttttgggatccacg

SEQ ID NO: 5732806 - DNA, 25 bp, Homo sapien
cccggctcttccgagaggggaggac

SEQ ID NO: 5732807 - DNA, 25 bp, Homo sapien
tgcagctggccctccagctggcgca

SEQ ID NO: 5732808 - DNA, 25 bp, Homo sapien
ggagcggatgtttaatacttcccgg

SEQ ID NO: 5732809 - DNA, 25 bp, Homo sapien
gacgcctttgtgcagctggccctcc

SEQ ID NO: 5732810 - DNA, 25 bp, Homo sapien
ccgtagctgactcggtactctctga

SEQ ID NO: 5732811 - DNA, 25 bp, Homo sapien
gtgtaccatcgaggacgctacttca

SEQ ID NO: 5732812 - DNA, 25 bp, Homo sapien
atccacgattccactctgctccgct

SEQ ID NO: 5732813 - DNA, 25 bp, Homo sapien
gcacctccgtagctgactcggtact

SEQ ID NO: 5732814 - DNA, 25 bp, Homo sapien
aaatctctactacacggccgatgtt

SEQ ID NO: 5732815 - DNA, 25 bp, Homo sapien
atttattcatccattccattgcctc

SEQ ID NO: 5732816 - DNA, 25 bp, Homo sapien
tcagttcacggtcactccggacggg

SEQ ID NO: 5732817 - DNA, 25 bp, Homo sapien
tcgtacatccttgtgggagagaacc

SEQ ID NO: 5732818 - DNA, 25 bp, Homo sapien
ccatccatgccatcctgctttacag

SEQ ID NO: 5732819 - DNA, 25 bp, Homo sapien
cctgcggctgagccatgaagctctt

SEQ ID NO: 5732820 - DNA, 25 bp, Homo sapien
tcgctgcctcgcctgccggtcccgg

SEQ ID NO: 5732821 - DNA, 25 bp, Homo sapien
aaggaatcatcaagaaatgtcgcac

SEQ ID NO: 5732822 - DNA, 25 bp, Homo sapien
gacttcgtgcgggccatggtggacc

SEQ ID NO: 5732823 - DNA, 25 bp, Homo sapien
atcctggacaatacctcggagcctc

SEQ ID NO: 5732824 - DNA, 25 bp, Homo sapien
aggaagaagacttcaaacggatgac

SEQ ID NO: 5732825 - DNA, 25 bp, Homo sapien
caccaagatctggatgggtatggtc

SEQ ID NO: 5732826 - DNA, 25 bp, Homo sapien
ggaaaaagaagttcatcagattcaa

SEQ ID NO: 5732827 - DNA, 25 bp, Homo sapien
cggcgtgctgtttggcaccggcctg

SEQ ID NO: 5732828 - DNA, 25 bp, Homo sapien
ggacgagggccgctcatggtgaaca

SEQ ID NO: 5732829 - DNA, 25 bp, Homo sapien
tatttgaagttaaaatcctggtggg

SEQ ID NO: 5732830 - DNA, 25 bp, Homo sapien
cccggatacgtcaatggacagctac

SEQ ID NO: 5732831 - DNA, 25 bp, Homo sapien
catccagcacatgagagacagcaag

SEQ ID NO: 5732832 - DNA, 25 bp, Homo sapien
tgtatcgcctcgccatgaccggctc

SEQ ID NO: 5732833 - DNA, 25 bp, Homo sapien
aggaccaagttcagatacttgagac

SEQ ID NO: 5732834 - DNA, 25 bp, Homo sapien
gctgagccatgaagctcttagacaa

SEQ ID NO: 5732835 - DNA, 25 bp, Homo sapien
ggcaagttttgcctcacatacgagg

SEQ ID NO: 5732836 - DNA, 25 bp, Homo sapien
cggtcactccggacgggattgacct

SEQ ID NO: 5732837 - DNA, 25 bp, Homo sapien
ctctactacacggccgatgttacga

SEQ ID NO: 5732838 - DNA, 25 bp, Homo sapien
gcgtgtacccggcaagcccctccag

SEQ ID NO: 5732839 - DNA, 25 bp, Homo sapien
ggcccagacggtggaacagaggctg

SEQ ID NO: 5732840 - DNA, 25 bp, Homo sapien
catatgtatcgcctcgccatgaccg

SEQ ID NO: 5732841 - DNA, 25 bp, Homo sapien
ttggagattatcaacaagccagacc

SEQ ID NO: 5732842 - DNA, 25 bp, Homo sapien
cgccatccatgccatcctgctttac

SEQ ID NO: 5732843 - DNA, 25 bp, Homo sapien
tgccgctgccgcacctccgtagctg

SEQ ID NO: 5732844 - DNA, 25 bp, Homo sapien
ttggtaaaggaatcatcaagaaatg

SEQ ID NO: 5732845 - DNA, 25 bp, Homo sapien
tgggacatcccgggggaatgtcaag

SEQ ID NO: 5732846 - DNA, 25 bp, Homo sapien
tttacaggcgcaaactggaccggga

SEQ ID NO: 5732847 - DNA, 25 bp, Homo sapien
tcggtcttggaccaagattacagtg

SEQ ID NO: 5732848 - DNA, 25 bp, Homo sapien
tcgtgcgggccatggtggacccggc

SEQ ID NO: 5732849 - DNA, 25 bp, Homo sapien
gatacagaagtgaagacccggatac

SEQ ID NO: 5732850 - DNA, 25 bp, Homo sapien
gttacgacaggtggtttgacaagtc

SEQ ID NO: 5732851 - DNA, 25 bp, Homo sapien
gcactacaaggacatgggcaagttt

SEQ ID NO: 5732852 - DNA, 25 bp, Homo sapien
tcactgagcacggcaagatgagtcg

SEQ ID NO: 5732853 - DNA, 25 bp, Homo sapien
catcaatttccacatttcttccaag

SEQ ID NO: 5732854 - DNA, 25 bp, Homo sapien
aacgggaagatgggcctcaacgctg

SEQ ID NO: 5732855 - DNA, 25 bp, Homo sapien
tctaccatgatgggcggctgctgaa

SEQ ID NO: 5732856 - DNA, 25 bp, Homo sapien
atctctactacacggccgatgttac

SEQ ID NO: 5732857 - DNA, 25 bp, Homo sapien
acatccttgtgggagagaacctcat

SEQ ID NO: 5732858 - DNA, 25 bp, Homo sapien
tgcggaggatgggcactgcaaaggc

SEQ ID NO: 5732859 - DNA, 25 bp, Homo sapien
tgaagacccggatacgtcaatggac

SEQ ID NO: 5732860 - DNA, 25 bp, Homo sapien
actcctgggcagatgcgccgatcgt

SEQ ID NO: 5732861 - DNA, 25 bp, Homo sapien
tattatgccatggatctgctgtata

SEQ ID NO: 5732862 - DNA, 25 bp, Homo sapien
gtggtgtctaaatatctcgctgtgg

SEQ ID NO: 5732863 - DNA, 25 bp, Homo sapien
tctctgaagatggcagaagctcacc

SEQ ID NO: 5732864 - DNA, 25 bp, Homo sapien
ctgccggtcccggctgtcaaagaca

SEQ ID NO: 5732865 - DNA, 25 bp, Homo sapien
cacctcttctgcctttacgtggtgt

SEQ ID NO: 5732866 - DNA, 25 bp, Homo sapien
agggggctttggaccggttgctgat

SEQ ID NO: 5732867 - DNA, 25 bp, Homo sapien
gcagcgttcttcgtgacgttagatg

SEQ ID NO: 5732868 - DNA, 25 bp, Homo sapien
tggacttcattcctggaaaaagaag

SEQ ID NO: 5732869 - DNA, 25 bp, Homo sapien
cctccagctggcgcactacaaggac

SEQ ID NO: 5732870 - DNA, 25 bp, Homo sapien
ggcagccctcaccgcaggagacaga

SEQ ID NO: 5732871 - DNA, 25 bp, Homo sapien
gggtggatgttcactgagcacggca

SEQ ID NO: 5732872 - DNA, 25 bp, Homo sapien
acctcggagcctcagcccggggagg

SEQ ID NO: 5732873 - DNA, 25 bp, Homo sapien
cgacatcaatccgaacattccgtac

SEQ ID NO: 5732874 - DNA, 25 bp, Homo sapien
tggcgcactacaaggacatgggcaa

SEQ ID NO: 5732875 - DNA, 25 bp, Homo sapien
gacgaagaacgtggtcagcggcgtg

SEQ ID NO: 5732876 - DNA, 25 bp, Homo sapien
ggaccggttgctgatgacggctatg

SEQ ID NO: 5732877 - DNA, 25 bp, Homo sapien
tcttggaccaagattacagtggtat

SEQ ID NO: 5732878 - DNA, 25 bp, Homo sapien
cgacaggtggtttgacaagtcgttc

SEQ ID NO: 5732879 - DNA, 25 bp, Homo sapien
aggcctccatgacccggctcttccg

SEQ ID NO: 5732880 - DNA, 25 bp, Homo sapien
gaagaagacttcaaacggatgacag

SEQ ID NO: 5732881 - DNA, 25 bp, Homo sapien
tcgctgtggagtcccctttccttaa

SEQ ID NO: 5732882 - DNA, 25 bp, Homo sapien
aggttatagagacctccctgaacac

SEQ ID NO: 5732883 - DNA, 25 bp, Homo sapien
gttttatctgagccttggagattat

SEQ ID NO: 5732884 - DNA, 25 bp, Homo sapien
cctgcaccactgagtcatgcgactt

SEQ ID NO: 5732885 - DNA, 25 bp, Homo sapien
gtggccctcatcgtcaccatgcgct

SEQ ID NO: 5732886 - DNA, 25 bp, Homo sapien
aacgccatccatgccatcctgcttt

SEQ ID NO: 5732887 - DNA, 25 bp, Homo sapien
ccggggaggccaggctggcagccct

SEQ ID NO: 5732888 - DNA, 25 bp, Homo sapien
ctcagcagcaagtggagctgtttga

SEQ ID NO: 5732889 - DNA, 25 bp, Homo sapien
agaacggcatcatcactggcgtgta

SEQ ID NO: 5732890 - DNA, 25 bp, Homo sapien
cgtggcccacctttgggagtacgtc

SEQ ID NO: 5732891 - DNA, 25 bp, Homo sapien
tcaccaagttcatgtgctgggctgg

SEQ ID NO: 5732892 - DNA, 25 bp, Homo sapien
cttcgtgacgttagatgaaactgaa

SEQ ID NO: 5732893 - DNA, 25 bp, Homo sapien
gctgctgaagccccgggagatggag

SEQ ID NO: 5732894 - DNA, 25 bp, Homo sapien
cagccagacgaagaacgtggtcagc

SEQ ID NO: 5732895 - DNA, 25 bp, Homo sapien
tttgacttggagaataacccagagt

SEQ ID NO: 5732896 - DNA, 25 bp, Homo sapien
ggcagcaagagccggcaacgccatc

SEQ ID NO: 5732897 - DNA, 25 bp, Homo sapien
gtgtacccggcaagcccctccagtt

SEQ ID NO: 5732898 - DNA, 25 bp, Homo sapien
gatttccattccttcccattcgtag

SEQ ID NO: 5732899 - DNA, 25 bp, Homo sapien
tcgacccctcgttaggaataattgc

SEQ ID NO: 5732900 - DNA, 25 bp, Homo sapien
aagatctggatgggtatggtcaaga

SEQ ID NO: 5732901 - DNA, 25 bp, Homo sapien
cttggaggagaccatggacatcacc

SEQ ID NO: 5732902 - DNA, 25 bp, Homo sapien
gtcacctcttctgcctttacgtggt

SEQ ID NO: 5732903 - DNA, 25 bp, Homo sapien
caggagacagagttccctgggccag

SEQ ID NO: 5732904 - DNA, 25 bp, Homo sapien
gctacaaattacgtgagcgactggt

SEQ ID NO: 5732905 - DNA, 25 bp, Homo sapien
ggctatggtgtgtcgtacatccttg

SEQ ID NO: 5732906 - DNA, 25 bp, Homo sapien
gtggcctttcagttcacggtcactc

SEQ ID NO: 5732907 - DNA, 25 bp, Homo sapien
gtgggagagaacctcatcaatttcc

SEQ ID NO: 5732908 - DNA, 25 bp, Homo sapien
acaagtcgttcacgtttgttgtctt

SEQ ID NO: 5732909 - DNA, 25 bp, Homo sapien
aaagtctcagcatatggaaacaagg

SEQ ID NO: 5732910 - DNA, 25 bp, Homo sapien
agacactgtgaacaggtatctacag

SEQ ID NO: 5732911 - DNA, 25 bp, Homo sapien
tttccattccttcccattcgtagcc

SEQ ID NO: 5732912 - DNA, 25 bp, Homo sapien
cgtcaatggacagctacgccaaatc

SEQ ID NO: 5732913 - DNA, 25 bp, Homo sapien
tgtcgtacatccttgtgggagagaa

SEQ ID NO: 5732914 - DNA, 25 bp, Homo sapien
ccttggagattatcaacaagccaga

SEQ ID NO: 5732915 - DNA, 25 bp, Homo sapien
ggtttgacaagtcgttcacgtttgt

SEQ ID NO: 5732916 - DNA, 25 bp, Homo sapien
cagacgcctttgtgcagctggccct

SEQ ID NO: 5732917 - DNA, 25 bp, Homo sapien
gctgagaacagtgcctgacacataa

SEQ ID NO: 5732918 - DNA, 25 bp, Homo sapien
tgctgtgcatttattcatccattcc

SEQ ID NO: 5732919 - DNA, 25 bp, Homo sapien
tacgaggcctccatgacccggctct

SEQ ID NO: 5732920 - DNA, 25 bp, Homo sapien
gaccgggaggaaatcaaaccaattc

SEQ ID NO: 5732921 - DNA, 25 bp, Homo sapien
gcgtctgagaagcatcagcatatgt

SEQ ID NO: 5732922 - DNA, 25 bp, Homo sapien
atgctgagaacagtgcctgacacat

SEQ ID NO: 5732923 - DNA, 25 bp, Homo sapien
gatgggcctcaacgctgaacactcc

SEQ ID NO: 5732924 - DNA, 25 bp, Homo sapien
cagtcggtgaggcctcttatgaagg

SEQ ID NO: 5732925 - DNA, 25 bp, Homo sapien
agcttccagacatcgctgcctcgcc

SEQ ID NO: 5732926 - DNA, 25 bp, Homo sapien
atgtctggaagctgtacaacatggg

SEQ ID NO: 5732927 - DNA, 25 bp, Homo sapien
ctcatgtgctggatggtgtctgtct

SEQ ID NO: 5732928 - DNA, 25 bp, Homo sapien
gaaaatcaacaggcttttctttcca

SEQ ID NO: 5732929 - DNA, 25 bp, Homo sapien
attcccccgggatgtcccactgcag

SEQ ID NO: 5732930 - DNA, 25 bp, Homo sapien
aacttggtccttgacttataatccc

SEQ ID NO: 5732931 - DNA, 25 bp, Homo sapien
caaaatcttgagcaagtgctgtcat

SEQ ID NO: 5732932 - DNA, 25 bp, Homo sapien
gaatgtgagttggaaggatatacag

SEQ ID NO: 5732933 - DNA, 25 bp, Homo sapien
tatccttcttcagtttcatctaacg

SEQ ID NO: 5732934 - DNA, 25 bp, Homo sapien
aaacagcacgccgctgaccacgttc

SEQ ID NO: 5732935 - DNA, 25 bp, Homo sapien
gtgcgacatttcttgatgattcctt

SEQ ID NO: 5732936 - DNA, 25 bp, Homo sapien
ttattctccaagtcaaacagctcca

SEQ ID NO: 5732937 - DNA, 25 bp, Homo sapien
aggcctcaccgactgtagatacctg

SEQ ID NO: 5732938 - DNA, 25 bp, Homo sapien
ttctttccagcccagcacatgaact

SEQ ID NO: 5732939 - DNA, 25 bp, Homo sapien
cgacgatgtgcttgctgtctctcat

SEQ ID NO: 5732940 - DNA, 25 bp, Homo sapien
tggcttgttgataatctccaaggct

SEQ ID NO: 5732941 - DNA, 25 bp, Homo sapien
gctacggaggtgcggcagcggcagc

SEQ ID NO: 5732942 - DNA, 25 bp, Homo sapien
aaggtgggccacgatcggcgcatct

SEQ ID NO: 5732943 - DNA, 25 bp, Homo sapien
cagacgccaacttgaacaacttcag

SEQ ID NO: 5732944 - DNA, 25 bp, Homo sapien
tgaaaagatcttgaccatacccatc

SEQ ID NO: 5732945 - DNA, 25 bp, Homo sapien
gtcagctacggaggtgcggcagcgg

SEQ ID NO: 5732946 - DNA, 25 bp, Homo sapien
gctcagccgcaggtcaatcccgtcc

SEQ ID NO: 5732947 - DNA, 25 bp, Homo sapien
tggctcagccgcaggtcaatcccgt

SEQ ID NO: 5732948 - DNA, 25 bp, Homo sapien
atttcctcccggtccagtttgcgcc

SEQ ID NO: 5732949 - DNA, 25 bp, Homo sapien
gtccttgtagtgcgccagctggagg

SEQ ID NO: 5732950 - DNA, 25 bp, Homo sapien
cacttctgtatccttcttcagtttc

SEQ ID NO: 5732951 - DNA, 25 bp, Homo sapien
atggaaatccacgtcgtttgccaga

SEQ ID NO: 5732952 - DNA, 25 bp, Homo sapien
tcttggtccaagaccgacagcaaaa

SEQ ID NO: 5732953 - DNA, 25 bp, Homo sapien
taatttgtagcccaccaggatttta

SEQ ID NO: 5732954 - DNA, 25 bp, Homo sapien
tctccaagtcaaacagctccacttg

SEQ ID NO: 5732955 - DNA, 25 bp, Homo sapien
cttggtggcacgactcatcttgccg

SEQ ID NO: 5732956 - DNA, 25 bp, Homo sapien
ttttctttccagcccagcacatgaa

SEQ ID NO: 5732957 - DNA, 25 bp, Homo sapien
agatatttagacaccacgtaaaggc

SEQ ID NO: 5732958 - DNA, 25 bp, Homo sapien
tgccatcttcagagagtaccgagtc

SEQ ID NO: 5732959 - DNA, 25 bp, Homo sapien
tccccgggctgaggctccgaggtat

SEQ ID NO: 5732960 - DNA, 25 bp, Homo sapien
ggccagctgcacaaaggcgtctggg

SEQ ID NO: 5732961 - DNA, 25 bp, Homo sapien
ctaagagcttcatggctcagccgca

SEQ ID NO: 5732962 - DNA, 25 bp, Homo sapien
catcacgcccaccaccacgataagc

SEQ ID NO: 5732963 - DNA, 25 bp, Homo sapien
ctctgcatctgctgctccatctccc

SEQ ID NO: 5732964 - DNA, 25 bp, Homo sapien
atcccgtccggagtgaccgtgaact

SEQ ID NO: 5732965 - DNA, 25 bp, Homo sapien
tgtctgtctcctctcctgggatccg

SEQ ID NO: 5732966 - DNA, 25 bp, Homo sapien
ccgggtcttcacttctgtatccttc

SEQ ID NO: 5732967 - DNA, 25 bp, Homo sapien
aacatccacccgtggtaggagagca

SEQ ID NO: 5732968 - DNA, 25 bp, Homo sapien
ttcttcgtctggctggacatgcagt

SEQ ID NO: 5732969 - DNA, 25 bp, Homo sapien
gtgacgatgagggccacccacaggc

SEQ ID NO: 5732970 - DNA, 25 bp, Homo sapien
gaagaaatgtggaaattgatgaggt

SEQ ID NO: 5732971 - DNA, 25 bp, Homo sapien
ggctggacatgcagttggccgtttc

SEQ ID NO: 5732972 - DNA, 25 bp, Homo sapien
ctgtcatccgtttgaagtcttcttc

SEQ ID NO: 5732973 - DNA, 25 bp, Homo sapien
cacgccgctgaccacgttcttcgtc

SEQ ID NO: 5732974 - DNA, 25 bp, Homo sapien
gtgaacgacttgtcaaaccacctgt

SEQ ID NO: 5732975 - DNA, 25 bp, Homo sapien
aggtgacgatcgatcccagagccgg

SEQ ID NO: 5732976 - DNA, 25 bp, Homo sapien
ctcccacaaggatgtacgacacacc

SEQ ID NO: 5732977 - DNA, 25 bp, Homo sapien
atatgctgatgcttctcagacgcca

SEQ ID NO: 5732978 - DNA, 25 bp, Homo sapien
ggcgaggcagcgatgtctggaagct

SEQ ID NO: 5732979 - DNA, 25 bp, Homo sapien
cagaagaggtgacgatcgatcccag

SEQ ID NO: 5732980 - DNA, 25 bp, Homo sapien
agaccgacagcaaaatcttgagcaa

SEQ ID NO: 5732981 - DNA, 25 bp, Homo sapien
tatttttcccacgtccaaaataggc

SEQ ID NO: 5732982 - DNA, 25 bp, Homo sapien
ggacatgcagttggccgtttccaga

SEQ ID NO: 5732983 - DNA, 25 bp, Homo sapien
ccgtgctcagtgaacatccacccgt

SEQ ID NO: 5732984 - DNA, 25 bp, Homo sapien
gatatacagcagatccatggcataa

SEQ ID NO: 5732985 - DNA, 25 bp, Homo sapien
cagcctggtggggtacggaatgttc

SEQ ID NO: 5732986 - DNA, 25 bp, Homo sapien
tgaccacgttcttcgtctggctgga

SEQ ID NO: 5732987 - DNA, 25 bp, Homo sapien
cataagaggcctcaccgactgtaga

SEQ ID NO: 5732988 - DNA, 25 bp, Homo sapien
accacctgtcgtaacatcggccgtg

SEQ ID NO: 5732989 - DNA, 25 bp, Homo sapien
aagtcgcatgactcagtggtgcagg

SEQ ID NO: 5732990 - DNA, 25 bp, Homo sapien
gggccgggtccaccatggcccgcac

SEQ ID NO: 5732991 - DNA, 25 bp, Homo sapien
gactgtagatacctgttcacagtgt

SEQ ID NO: 5732992 - DNA, 25 bp, Homo sapien
aagctgtacaacatgggttttcggc

SEQ ID NO: 5732993 - DNA, 25 bp, Homo sapien
ctcctgggatccgggaagtattaaa

SEQ ID NO: 5732994 - DNA, 25 bp, Homo sapien
gtgcaggagcgcacggtctccgtcc

SEQ ID NO: 5732995 - DNA, 25 bp, Homo sapien
gttgccggctcttgctgcctgaatg

SEQ ID NO: 5732996 - DNA, 25 bp, Homo sapien
tgactcagtggtgcaggagcgcacg

SEQ ID NO: 5732997 - DNA, 25 bp, Homo sapien
ttcggattgatgtcgcctttgcagt

SEQ ID NO: 5732998 - DNA, 25 bp, Homo sapien
tcttgaatctgatgaacttcttttt

SEQ ID NO: 5732999 - DNA, 25 bp, Homo sapien
aacttgaacaacttcagcctctgtt

SEQ ID NO: 5733000 - DNA, 25 bp, Homo sapien
gtctaagagcttcatggctcagccg

SEQ ID NO: 5733001 - DNA, 25 bp, Homo sapien
aggcgtctgggctcgtgcgacattt

SEQ ID NO: 5733002 - DNA, 25 bp, Homo sapien
catggatggcgttgccggctcttgc

SEQ ID NO: 5733003 - DNA, 25 bp, Homo sapien
tgtctcctgcggtgagggctgccag

SEQ ID NO: 5733004 - DNA, 25 bp, Homo sapien
ttccatatgctgagactttccactt

SEQ ID NO: 5733005 - DNA, 25 bp, Homo sapien
atcttgagcaagtgctgtcatccgt

SEQ ID NO: 5733006 - DNA, 25 bp, Homo sapien
cccagggaactctgtctcctgcggt

SEQ ID NO: 5733007 - DNA, 25 bp, Homo sapien
gggttttcggcctgaaaagatcttg

SEQ ID NO: 5733008 - DNA, 25 bp, Homo sapien
caagtgctgtcatccgtttgaagtc

SEQ ID NO: 5733009 - DNA, 25 bp, Homo sapien
ccatatgctgagactttccactttg

SEQ ID NO: 5733010 - DNA, 25 bp, Homo sapien
tgtctttgacagccgggaccggcag

SEQ ID NO: 5733011 - DNA, 25 bp, Homo sapien
aagagcttcatggctcagccgcagg

SEQ ID NO: 5733012 - DNA, 25 bp, Homo sapien
agccgggaccggcaggcgaggcagc

SEQ ID NO: 5733013 - DNA, 25 bp, Homo sapien
agagccgggtcatggaggcctcgta

SEQ ID NO: 5733014 - DNA, 25 bp, Homo sapien
ggtgggccacgatcggcgcatctgc

SEQ ID NO: 5733015 - DNA, 25 bp, Homo sapien
aggagagcagcactttcagggagta

SEQ ID NO: 5733016 - DNA, 25 bp, Homo sapien
gcttgttgataatctccaaggctca

SEQ ID NO: 5733017 - DNA, 25 bp, Homo sapien
tttcttgatgattcctttaccaaag

SEQ ID NO: 5733018 - DNA, 25 bp, Homo sapien
tgaacttctttttccaggaatgaag

SEQ ID NO: 5733019 - DNA, 25 bp, Homo sapien
atcttggtggcacgactcatcttgc

SEQ ID NO: 5733020 - DNA, 25 bp, Homo sapien
ctctcctgggatccgggaagtatta

SEQ ID NO: 5733021 - DNA, 25 bp, Homo sapien
tttgcggtgttcagggaggtctcta

SEQ ID NO: 5733022 - DNA, 25 bp, Homo sapien
actcatcttgccgtgctcagtgaac

SEQ ID NO: 5733023 - DNA, 25 bp, Homo sapien
cagagccggtcatggcgaggcgata

SEQ ID NO: 5733024 - DNA, 25 bp, Homo sapien
tcaagagactgcttatttttcccac

SEQ ID NO: 5733025 - DNA, 25 bp, Homo sapien
tgtcccactgcagcctggtggggta

SEQ ID NO: 5733026 - DNA, 25 bp, Homo sapien
ccgttcttgaatctgatgaacttct

SEQ ID NO: 5733027 - DNA, 25 bp, Homo sapien
tgatgtccatggtctcctccaaggc

SEQ ID NO: 5733028 - DNA, 25 bp, Homo sapien
cctcccggtccagtttgcgcctgta

SEQ ID NO: 5733029 - DNA, 25 bp, Homo sapien
cggagcagagtggaatcgtggatcc

SEQ ID NO: 5733030 - DNA, 25 bp, Homo sapien
atttgtctaagagcttcatggctca

SEQ ID NO: 5733031 - DNA, 25 bp, Homo sapien
tcagtgaacatccacccgtggtagg

SEQ ID NO: 5733032 - DNA, 25 bp, Homo sapien
gaggttctctcccacaaggatgtac

SEQ ID NO: 5733033 - DNA, 25 bp, Homo sapien
acatgacgtactcccaaaggtgggc

SEQ ID NO: 5733034 - DNA, 25 bp, Homo sapien
tgccaaacagcacgccgctgaccac

SEQ ID NO: 5733035 - DNA, 25 bp, Homo sapien
ccggtccaaagccccctccgctgga

SEQ ID NO: 5733036 - DNA, 25 bp, Homo sapien
cggagtgaccgtgaactgaaaggcc

SEQ ID NO: 5733037 - DNA, 25 bp, Homo sapien
tccaagaccgacagcaaaatcttga

SEQ ID NO: 5733038 - DNA, 25 bp, Homo sapien
ggcacgactcatcttgccgtgctca

SEQ ID NO: 5733039 - DNA, 25 bp, Homo sapien
tgcggtgttcagggaggtctctata

SEQ ID NO: 5733040 - DNA, 25 bp, Homo sapien
gcttggtgagcttctgccatcttca

SEQ ID NO: 5733041 - DNA, 25 bp, Homo sapien
tattgtccaggatcctctgcatctg

SEQ ID NO: 5733042 - DNA, 25 bp, Homo sapien
ccacgataagccaactggaggggct

SEQ ID NO: 5733043 - DNA, 25 bp, Homo sapien
gtgacgatcgatcccagagccggtc

SEQ ID NO: 5733044 - DNA, 25 bp, Homo sapien
gcagcactttcagggagtagcgcat

SEQ ID NO: 5733045 - DNA, 25 bp, Homo sapien
gtaatcttggtccaagaccgacagc

SEQ ID NO: 5733046 - DNA, 25 bp, Homo sapien
gcaggtcaatcccgtccggagtgac

SEQ ID NO: 5733047 - DNA, 25 bp, Homo sapien
tcggccgtgtagtagagatttggcg

SEQ ID NO: 5733048 - DNA, 25 bp, Homo sapien
gtttccatatgctgagactttccac

SEQ ID NO: 5733049 - DNA, 25 bp, Homo sapien
tctttttccaggaatgaagtccaga

SEQ ID NO: 5733050 - DNA, 25 bp, Homo sapien
gtcttcttccttcataagaggcctc

SEQ ID NO: 5733051 - DNA, 25 bp, Homo sapien
ctcggaggtagatgtactcctccca

SEQ ID NO: 5733052 - DNA, 25 bp, Homo sapien
ctgcacaaaggcgtctgggctcgtg

SEQ ID NO: 5733053 - DNA, 25 bp, Homo sapien
cccacaaggatgtacgacacaccat

SEQ ID NO: 5733054 - DNA, 25 bp, Homo sapien
acgatcggcgcatctgcccaggagt

SEQ ID NO: 5733055 - DNA, 25 bp, Homo sapien
cactgttctcagcattgaggcaatg

SEQ ID NO: 5733056 - DNA, 25 bp, Homo sapien
tcaaaccacctgtcgtaacatcggc

SEQ ID NO: 5733057 - DNA, 25 bp, Homo sapien
aagtccagagagatagatttgtcta

SEQ ID NO: 5733058 - DNA, 25 bp, Homo sapien
agctgcacaaaggcgtctgggctcg

SEQ ID NO: 5733059 - DNA, 25 bp, Homo sapien
acatatgctgatgcttctcagacgc

SEQ ID NO: 5733060 - DNA, 25 bp, Homo sapien
atacatatgctgatgcttctcagac

SEQ ID NO: 5733061 - DNA, 25 bp, Homo sapien
atttgtagcccaccaggattttaac

SEQ ID NO: 5733062 - DNA, 25 bp, Homo sapien
cccgtccggagtgaccgtgaactga

SEQ ID NO: 5733063 - DNA, 25 bp, Homo sapien
gttttcggcctgaaaagatcttgac

SEQ ID NO: 5733064 - DNA, 25 bp, Homo sapien
aggagcgcacggtctccgtcctccc

SEQ ID NO: 5733065 - DNA, 25 bp, Homo sapien
catgactcagtggtgcaggagcgca

SEQ ID NO: 5733066 - DNA, 25 bp, Homo sapien
ccactgagcggagcagagtggaatc

SEQ ID NO: 5733067 - DNA, 25 bp, Homo sapien
gctgttcaccatgagcggccctcgt

SEQ ID NO: 5733068 - DNA, 25 bp, Homo sapien
tccaccgtctgggccgggtccacca

SEQ ID NO: 5733069 - DNA, 25 bp, Homo sapien
tgataatctccaaggctcagataaa

SEQ ID NO: 5733070 - DNA, 25 bp, Homo sapien
gcatagcccagctggaggctgtcaa

SEQ ID NO: 5733071 - DNA, 25 bp, Homo sapien
atcttcagagagtaccgagtcagct

SEQ ID NO: 5733072 - DNA, 25 bp, Homo sapien
acatgaacttggtgatgtccatggt

SEQ ID NO: 5733073 - DNA, 25 bp, Homo sapien
gcaattattcctaacgaggggtcga

SEQ ID NO: 5733074 - DNA, 25 bp, Homo sapien
acttggtgatgtccatggtctcctc

SEQ ID NO: 5733075 - DNA, 25 bp, Homo sapien
ttcatctaacgtcacgaagaacgct

SEQ ID NO: 5733076 - DNA, 25 bp, Homo sapien
attgatgaggttctctcccacaagg

SEQ ID NO: 5733077 - DNA, 25 bp, Homo sapien
tcgtctggctggacatgcagttggc

SEQ ID NO: 5733078 - DNA, 25 bp, Homo sapien
ctggatggtgtctgtctcctctcct

SEQ ID NO: 5733079 - DNA, 25 bp, Homo sapien
catctgcccaggagtgttcagcgtt

SEQ ID NO: 5733080 - DNA, 25 bp, Homo sapien
agagtaccgagtcagctacggaggt

SEQ ID NO: 5733081 - DNA, 25 bp, Homo sapien
gatgtcccactgcagcctggtgggg

SEQ ID NO: 5733082 - DNA, 25 bp, Homo sapien
tgaacaacttcagcctctgttccac

SEQ ID NO: 5733083 - DNA, 25 bp, Homo sapien
tgagcttctgccatcttcagagagt

SEQ ID NO: 5733084 - DNA, 25 bp, Homo sapien
attcctttaccaaaggctacgaatg

SEQ ID NO: 5733085 - DNA, 25 bp, Homo sapien
ctcgatggtacacgacgatgtgctt

SEQ ID NO: 5733086 - DNA, 25 bp, Homo sapien
agcttctgccatcttcagagagtac

SEQ ID NO: 5733087 - DNA, 25 bp, Homo sapien
gcgaggcgatacatatgctgatgct

SEQ ID NO: 5733088 - DNA, 25 bp, Homo sapien
ttcagtttcatctaacgtcacgaag

SEQ ID NO: 5733089 - DNA, 25 bp, Homo sapien
gcgtagctgtccattgacgtatccg

SEQ ID NO: 5733090 - DNA, 25 bp, Homo sapien
gggtacggaatgttcggattgatgt

SEQ ID NO: 5733091 - DNA, 25 bp, Homo sapien
tgatgcttctcagacgccaacttga

SEQ ID NO: 5733092 - DNA, 25 bp, Homo sapien
aggtctctataacctcttgacattc

SEQ ID NO: 5733093 - DNA, 25 bp, Homo sapien
ttgcagtgcccatcctccgcatagc

SEQ ID NO: 5733094 - DNA, 25 bp, Homo sapien
gtttccagagtccgattgatttttg

SEQ ID NO: 5733095 - DNA, 25 bp, Homo sapien
cgcacgaagtcgcatgactcagtgg

SEQ ID NO: 5733096 - DNA, 25 bp, Homo sapien
caggcactgttctcagcattgaggc

SEQ ID NO: 5733097 - DNA, 25 bp, Homo sapien
gctgaccacgttcttcgtctggctg

SEQ ID NO: 5733098 - DNA, 25 bp, Homo sapien
caagaccgacagcaaaatcttgagc

SEQ ID NO: 5733099 - DNA, 25 bp, Homo sapien
gacaacaaacgtgaacgacttgtca

SEQ ID NO: 5733100 - DNA, 25 bp, Homo sapien
cgccagctggagggccagctgcaca

SEQ ID NO: 5733101 - DNA, 25 bp, Homo sapien
ttattcctaacgaggggtcgatctt

SEQ ID NO: 5733102 - DNA, 25 bp, Homo sapien
actctgggttattctccaagtcaaa

SEQ ID NO: 5733103 - DNA, 25 bp, Homo sapien
ttgtctaagagcttcatggctcagc

SEQ ID NO: 5733104 - DNA, 25 bp, Homo sapien
ttcagcgttgaggcccatcttcccg

SEQ ID NO: 5733105 - DNA, 25 bp, Homo sapien
ggaaattgatgaggttctctcccac

SEQ ID NO: 5733106 - DNA, 25 bp, Homo sapien
gaatcgtggatcccaaaagacgaat

SEQ ID NO: 5733107 - DNA, 25 bp, Homo sapien
tttttccaggaatgaagtccagaga

SEQ ID NO: 5733108 - DNA, 25 bp, Homo sapien
cccagctggaggctgtcaatggaca

SEQ ID NO: 5733109 - DNA, 25 bp, Homo sapien
gagcttcatggctcagccgcaggtc

SEQ ID NO: 5733110 - DNA, 25 bp, Homo sapien
cacgaagtcgcatgactcagtggtg

SEQ ID NO: 5733111 - DNA, 25 bp, Homo sapien
cctccccgggctgaggctccgaggt

SEQ ID NO: 5733112 - DNA, 25 bp, Homo sapien
gtgttcagggaggtctctataacct

SEQ ID NO: 5733113 - DNA, 25 bp, Homo sapien
ttgctgctgaggggtctggcttgtt

SEQ ID NO: 5733114 - DNA, 25 bp, Homo sapien
cttgccgtgctcagtgaacatccac

SEQ ID NO: 5733115 - DNA, 25 bp, Homo sapien
agccgggtcatggaggcctcgtatg

SEQ ID NO: 5733116 - DNA, 25 bp, Homo sapien
ccttaaggaaaggggactccacagc

SEQ ID NO: 5733117 - DNA, 25 bp, Homo sapien
ttggtgatgtccatggtctcctcca

SEQ ID NO: 5733118 - DNA, 25 bp, Homo sapien
aactggaggggcttgccgggtacac

SEQ ID NO: 5733119 - DNA, 25 bp, Homo sapien
gcctttgcagtgcccatcctccgca

SEQ ID NO: 5733120 - DNA, 25 bp, Homo sapien
atgaggttctctcccacaaggatgt

SEQ ID NO: 5733121 - DNA, 25 bp, Homo sapien
cagcaaccggtccaaagccccctcc

SEQ ID NO: 5733122 - DNA, 25 bp, Homo sapien
gacttgtcaaaccacctgtcgtaac

SEQ ID NO: 5733123 - DNA, 25 bp, Homo sapien
acctggcccagggaactctgtctcc

SEQ ID NO: 5733124 - DNA, 25 bp, Homo sapien
aagacaacaaacgtgaacgacttgt

SEQ ID NO: 5733125 - DNA, 25 bp, Homo sapien
cgatacatatgctgatgcttctcag

SEQ ID NO: 5733126 - DNA, 25 bp, Homo sapien
tgaagtcttcttccttcataagagg

SEQ ID NO: 5733127 - DNA, 25 bp, Homo sapien
cgatgagggccacccacaggccggt

SEQ ID NO: 5733128 - DNA, 25 bp, Homo sapien
cccacaggccggtgccaaacagcac

SEQ ID NO: 5733129 - DNA, 25 bp, Homo sapien
gctcagataaaacttccttaaggaa

SEQ ID NO: 5733130 - DNA, 25 bp, Homo sapien
aaatcttgagcaagtgctgtcatcc

SEQ ID NO: 5733131 - DNA, 25 bp, Homo sapien
atgatgccgttcttgaatctgatga

SEQ ID NO: 5733132 - DNA, 25 bp, Homo sapien
ggaatgttcggattgatgtcgcctt

SEQ ID NO: 5733133 - DNA, 25 bp, Homo sapien
cgtccaaaataggcctgacgacacc

SEQ ID NO: 5733134 - DNA, 25 bp, Homo sapien
gcggccctcgtcctcggaggtagat

SEQ ID NO: 5733135 - DNA, 25 bp, Homo sapien
gtaggagagcagcactttcagggag

SEQ ID NO: 5733136 - DNA, 25 bp, Homo sapien
cttggtccttgacttataatccccg

SEQ ID NO: 5733137 - DNA, 25 bp, Homo sapien
ggcccatcttcccgtttttgaagac

SEQ ID NO: 5733138 - DNA, 25 bp, Homo sapien
ctggacatgcagttggccgtttcca

SEQ ID NO: 5733139 - DNA, 25 bp, Homo sapien
tcttttatgtgtcaggcactgttct

SEQ ID NO: 5733140 - DNA, 25 bp, Homo sapien
cctgtcgtaacatcggccgtgtagt

SEQ ID NO: 5733141 - DNA, 25 bp, Homo sapien
gtttgcgcctgtaaagcaggatggc

SEQ ID NO: 5733142 - DNA, 25 bp, Homo sapien
gtgaggcaaaacttgcccatgtcct

SEQ ID NO: 5733143 - DNA, 25 bp, Homo sapien
agtgctgtcatccgtttgaagtctt

SEQ ID NO: 5733144 - DNA, 25 bp, Homo sapien
cgggtacacgccagtgatgatgccg

SEQ ID NO: 5733145 - DNA, 25 bp, Homo sapien
ggcgcatctgcccaggagtgttcag

SEQ ID NO: 5733146 - DNA, 25 bp, Homo sapien
taatagttgctgttcaccatgagcg

SEQ ID NO: 5733147 - DNA, 25 bp, Homo sapien
tcctttaccaaaggctacgaatggg

SEQ ID NO: 5733148 - DNA, 25 bp, Homo sapien
ttgtagcccaccaggattttaactt

SEQ ID NO: 5733149 - DNA, 25 bp, Homo sapien
tggtaggagagcagcactttcaggg

SEQ ID NO: 5733150 - DNA, 25 bp, Homo sapien
ttgtttccatatgctgagactttcc

SEQ ID NO: 5733151 - DNA, 25 bp, Homo sapien
ggccctcgtcctcggaggtagatgt

SEQ ID NO: 5733152 - DNA, 25 bp, Homo sapien
acaccacgtaaaggcagaagaggtg

SEQ ID NO: 5733153 - DNA, 25 bp, Homo sapien
cttggaagaaatgtggaaattgatg

SEQ ID NO: 5733154 - DNA, 25 bp, Homo sapien
accactgtaatcttggtccaagacc

SEQ ID NO: 5733155 - DNA, 25 bp, Homo sapien
acgacttgtcaaaccacctgtcgta

SEQ ID NO: 5733156 - DNA, 25 bp, Homo sapien
atgacgtactcccaaaggtgggcca

SEQ ID NO: 5733157 - DNA, 25 bp, Homo sapien
gatcggcgcatctgcccaggagtgt

SEQ ID NO: 5733158 - DNA, 25 bp, Homo sapien
ttcagcctctgttccaccgtctggg

SEQ ID NO: 5733159 - DNA, 25 bp, Homo sapien
tgtgcttgctgtctctcatgtgctg

SEQ ID NO: 5733160 - DNA, 25 bp, Homo sapien
aaagcaggatggcatggatggcgtt

SEQ ID NO: 5733161 - DNA, 25 bp, Homo sapien
gcttatttttcccacgtccaaaata

SEQ ID NO: 5733162 - DNA, 25 bp, Homo sapien
cccgggctgaggctccgaggtattg

SEQ ID NO: 5733163 - DNA, 25 bp, Homo sapien
gagatttggcgtagctgtccattga

SEQ ID NO: 5733164 - DNA, 25 bp, Homo sapien
gcttcatggctcagccgcaggtcaa

SEQ ID NO: 5733165 - DNA, 25 bp, Homo sapien
cagctacggaggtgcggcagcggca

SEQ ID NO: 5733166 - DNA, 25 bp, Homo sapien
tcctctcctgggatccgggaagtat

SEQ ID NO: 5733167 - DNA, 25 bp, Homo sapien
ggcctgaaaagatcttgaccatacc

SEQ ID NO: 5733168 - DNA, 25 bp, Homo sapien
ccgcatagcccagctggaggctgtc

SEQ ID NO: 5733169 - DNA, 25 bp, Homo sapien
agatttgtctaagagcttcatggct

SEQ ID NO: 5733170 - DNA, 25 bp, Homo sapien
tcagataaaacttccttaaggaaag

SEQ ID NO: 5733171 - DNA, 25 bp, Homo sapien
gaaggaatggaaatccacgtcgttt

SEQ ID NO: 5733172 - DNA, 25 bp, Homo sapien
acgtatccgggtcttcacttctgta

SEQ ID NO: 5733173 - DNA, 25 bp, Homo sapien
ctgtccattgacgtatccgggtctt

SEQ ID NO: 5733174 - DNA, 25 bp, Homo sapien
ctccgaggtattgtccaggatcctc

SEQ ID NO: 5733175 - DNA, 25 bp, Homo sapien
aggccacagcttggtgagcttctgc

SEQ ID NO: 5733176 - DNA, 25 bp, Homo sapien
tcccactgagcggagcagagtggaa

SEQ ID NO: 5733177 - DNA, 25 bp, Homo sapien
ccgagtcagctacggaggtgcggca

SEQ ID NO: 5733178 - DNA, 25 bp, Homo sapien
aggggtcgatcttggcgtacatcgt

SEQ ID NO: 5733179 - DNA, 25 bp, Homo sapien
tcgtgcgacatttcttgatgattcc

SEQ ID NO: 5733180 - DNA, 25 bp, Homo sapien
ccaggatcctctgcatctgctgctc

SEQ ID NO: 5733181 - DNA, 25 bp, Homo sapien
ccaaggccttgtttccatatgctga

SEQ ID NO: 5733182 - DNA, 25 bp, Homo sapien
ttcagggagtagcgcatggtgacga

SEQ ID NO: 5733183 - DNA, 25 bp, Homo sapien
ccagagtccgattgatttttgcaat

SEQ ID NO: 5733184 - DNA, 25 bp, Homo sapien
gaggcaatggaatggatgaataaat

SEQ ID NO: 5733185 - DNA, 25 bp, Homo sapien
cgtcctcggaggtagatgtactcct

SEQ ID NO: 5733186 - DNA, 25 bp, Homo sapien
attcctaacgaggggtcgatcttgg

SEQ ID NO: 5733187 - DNA, 25 bp, Homo sapien
agaggcctcaccgactgtagatacc

SEQ ID NO: 5733188 - DNA, 25 bp, Homo sapien
gcatctgctgctccatctcccgggg

SEQ ID NO: 5733189 - DNA, 25 bp, Homo sapien
tggtgcaggagcgcacggtctccgt

SEQ ID NO: 5733190 - DNA, 25 bp, Homo sapien
gttcagggaggtctctataacctct

SEQ ID NO: 5733191 - DNA, 25 bp, Homo sapien
aagatcttgaccatacccatccaga

SEQ ID NO: 5733192 - DNA, 25 bp, Homo sapien
ccattgacgtatccgggtcttcact

SEQ ID NO: 5733193 - DNA, 25 bp, Homo sapien
atccacgtcgtttgccagaagattt

SEQ ID NO: 5733194 - DNA, 25 bp, Homo sapien
agaagatttgcggtgttcagggagg

SEQ ID NO: 5733195 - DNA, 25 bp, Homo sapien
gggaagtattaaacatccgctccca

SEQ ID NO: 5733196 - DNA, 25 bp, Homo sapien
ggcctccccgggctgaggctccgag

SEQ ID NO: 5733197 - DNA, 25 bp, Homo sapien
gccacccacaggccggtgccaaaca

SEQ ID NO: 5733198 - DNA, 25 bp, Homo sapien
caccacgataagccaactggagggg

SEQ ID NO: 5733199 - DNA, 25 bp, Homo sapien
gacatttcttgatgattcctttacc

SEQ ID NO: 5733200 - DNA, 25 bp, Homo sapien
caggcgaggcagcgatgtctggaag

SEQ ID NO: 5733201 - DNA, 25 bp, Homo sapien
gtacggaatgttcggattgatgtcg

SEQ ID NO: 5733202 - DNA, 25 bp, Homo sapien
atctcccggggcttcagcagccgcc

SEQ ID NO: 5733203 - DNA, 25 bp, Homo sapien
tctgcccaggagtgttcagcgttga

SEQ ID NO: 5733204 - DNA, 25 bp, Homo sapien
caaaacttgcccatgtccttgtagt

SEQ ID NO: 5733205 - DNA, 25 bp, Homo sapien
cgggctgaggctccgaggtattgtc

SEQ ID NO: 5733206 - DNA, 25 bp, Homo sapien
atgtccatggtctcctccaaggcct

SEQ ID NO: 5733207 - DNA, 25 bp, Homo sapien
ttatgtgtcaggcactgttctcagc

SEQ ID NO: 5733208 - DNA, 25 bp, Homo sapien
gaccatacccatccagatcttggtg

SEQ ID NO: 5733209 - DNA, 25 bp, Homo sapien
aaaggcgtctgggctcgtgcgacat

SEQ ID NO: 5733210 - DNA, 25 bp, Homo sapien
atgaacttggtgatgtccatggtct

SEQ ID NO: 5733211 - DNA, 25 bp, Homo sapien
gctgccagcctggcctccccgggct

SEQ ID NO: 5733212 - DNA, 25 bp, Homo sapien
tgtcgtaacatcggccgtgtagtag

SEQ ID NO: 5733213 - DNA, 25 bp, Homo sapien
gaattggtttgatttcctcccggtc

SEQ ID NO: 5733214 - DNA, 25 bp, Homo sapien
atagcccagctggaggctgtcaatg

SEQ ID NO: 5733215 - DNA, 25 bp, Homo sapien
gtcaatcccgtccggagtgaccgtg

SEQ ID NO: 5733216 - DNA, 25 bp, Homo sapien
gagcggccctcgtcctcggaggtag

SEQ ID NO: 5733217 - DNA, 25 bp, Homo sapien
ttggccgtttccagagtccgattga

SEQ ID NO: 5733218 - DNA, 25 bp, Homo sapien
cttgctgcctgaatgtgagttggaa

SEQ ID NO: 5733219 - DNA, 25 bp, Homo sapien
gctcccactgagcggagcagagtgg

SEQ ID NO: 5733220 - DNA, 25 bp, Homo sapien
ggatggcatggatggcgttgccggc

SEQ ID NO: 5733221 - DNA, 25 bp, Homo sapien
cccgtctcagggcaagagaacttgg

SEQ ID NO: 5733222 - DNA, 25 bp, Homo sapien
atacccatccagatcttggtggcac

SEQ ID NO: 5733223 - DNA, 25 bp, Homo sapien
ccggtgccaaacagcacgccgctga

SEQ ID NO: 5733224 - DNA, 25 bp, Homo sapien
caagtatctgaacttggtccttgac

SEQ ID NO: 5733225 - DNA, 25 bp, Homo sapien
agccgcaggtcaatcccgtccggag

SEQ ID NO: 5733226 - DNA, 25 bp, Homo sapien
tgtcaaaccacctgtcgtaacatcg

SEQ ID NO: 5733227 - DNA, 25 bp, Homo sapien
ccagaagatttgcggtgttcaggga

SEQ ID NO: 5733228 - DNA, 25 bp, Homo sapien
atggcataatagttgctgttcacca

SEQ ID NO: 5733229 - DNA, 25 bp, Homo sapien
ccttcataagaggcctcaccgactg

SEQ ID NO: 5733230 - DNA, 25 bp, Homo sapien
ttattgagcatcttttatgtgtcag

SEQ ID NO: 5733231 - DNA, 25 bp, Homo sapien
cccagcacatgaacttggtgatgtc

SEQ ID NO: 5733232 - DNA, 25 bp, Homo sapien
gccgggtccaccatggcccgcacga

SEQ ID NO: 5733233 - DNA, 25 bp, Homo sapien
gtagtagagatttggcgtagctgtc

SEQ ID NO: 5733234 - DNA, 25 bp, Homo sapien
gtctggaagctgtacaacatgggtt

SEQ ID NO: 5733235 - DNA, 25 bp, Homo sapien
cgccgctgaccacgttcttcgtctg

SEQ ID NO: 5733236 - DNA, 25 bp, Homo sapien
gcagcgatgtctggaagctgtacaa

SEQ ID NO: 5733237 - DNA, 25 bp, Homo sapien
cgcatgactcagtggtgcaggagcg

SEQ ID NO: 5733238 - DNA, 25 bp, Homo sapien
cttgaacaacttcagcctctgttcc

SEQ ID NO: 5733239 - DNA, 25 bp, Homo sapien
gacgatgagggccacccacaggccg

SEQ ID NO: 5733240 - DNA, 25 bp, Homo sapien
acagccgggaccggcaggcgaggca

SEQ ID NO: 5733241 - DNA, 25 bp, Homo sapien
agggctgccagcctggcctccccgg

SEQ ID NO: 5733242 - DNA, 25 bp, Homo sapien
cccgtggtaggagagcagcactttc

SEQ ID NO: 5733243 - DNA, 25 bp, Homo sapien
caggagtgttcagcgttgaggccca

SEQ ID NO: 5733244 - DNA, 25 bp, Homo sapien
atgcagttggccgtttccagagtcc

SEQ ID NO: 5733245 - DNA, 25 bp, Homo sapien
ctctcatgtgctggatggtgtctgt

SEQ ID NO: 5733246 - DNA, 25 bp, Homo sapien
agggccagctgcacaaaggcgtctg

SEQ ID NO: 5733247 - DNA, 25 bp, Homo sapien
gtaaagcaggatggcatggatggcg

SEQ ID NO: 5733248 - DNA, 25 bp, Homo sapien
caaaataggcctgacgacacctggc

SEQ ID NO: 5733249 - DNA, 25 bp, Homo sapien
tctgtatccttcttcagtttcatct

SEQ ID NO: 5733250 - DNA, 25 bp, Homo sapien
ctgttcacagtgtctttgacagccg

SEQ ID NO: 5733251 - DNA, 25 bp, Homo sapien
catggtgacgatgagggccacccac

SEQ ID NO: 5733252 - DNA, 25 bp, Homo sapien
gtcacgaagaacgctgctttctcca

SEQ ID NO: 5733253 - DNA, 25 bp, Homo sapien
cttgacattcccccgggatgtccca

SEQ ID NO: 5733254 - DNA, 25 bp, Homo sapien
ggctgaggctccgaggtattgtcca

SEQ ID NO: 5733255 - DNA, 25 bp, Homo sapien
gcagttggccgtttccagagtccga

SEQ ID NO: 5733256 - DNA, 25 bp, Homo sapien
cttggcgtacatcgttgtcatcacg

SEQ ID NO: 5733257 - DNA, 25 bp, Homo sapien
tttccaggaatgaagtccagagaga

SEQ ID NO: 5733258 - DNA, 25 bp, Homo sapien
gtccatggtctcctccaaggccttg

SEQ ID NO: 5733259 - DNA, 25 bp, Homo sapien
acgtcgtttgccagaagatttgcgg

SEQ ID NO: 5733260 - DNA, 25 bp, Homo sapien
aaatcaacaggcttttctttccagc

SEQ ID NO: 5733261 - DNA, 25 bp, Homo sapien
gtccttgacttataatccccgtctc

SEQ ID NO: 5733262 - DNA, 25 bp, Homo sapien
gtctgggctcgtgcgacatttcttg

SEQ ID NO: 5733263 - DNA, 25 bp, Homo sapien
aagccccctccgctggacacgtact

SEQ ID NO: 5733264 - DNA, 25 bp, Homo sapien
ctgggctcgtgcgacatttcttgat

SEQ ID NO: 5733265 - DNA, 25 bp, Homo sapien
ggaatgaagtccagagagatagatt

SEQ ID NO: 5733266 - DNA, 25 bp, Homo sapien
ccctcgtcctcggaggtagatgtac

SEQ ID NO: 5733267 - DNA, 25 bp, Homo sapien
gcaggagcgcacggtctccgtcctc

SEQ ID NO: 5733268 - DNA, 25 bp, Homo sapien
acatccgctcccactgagcggagca

SEQ ID NO: 5733269 - DNA, 25 bp, Homo sapien
atacctgttcacagtgtctttgaca

SEQ ID NO: 5733270 - DNA, 25 bp, Homo sapien
ctttgcagtgcccatcctccgcata

SEQ ID NO: 5733271 - DNA, 25 bp, Homo sapien
cataatagttgctgttcaccatgag

SEQ ID NO: 5733272 - DNA, 25 bp, Homo sapien
tcacagtgtctttgacagccgggac

SEQ ID NO: 5733273 - DNA, 25 bp, Homo sapien
ctttcagggagtagcgcatggtgac

SEQ ID NO: 5733274 - DNA, 25 bp, Homo sapien
ggcgatacatatgctgatgcttctc

SEQ ID NO: 5733275 - DNA, 25 bp, Homo sapien
agcggagcagagtggaatcgtggat

SEQ ID NO: 5733276 - DNA, 25 bp, Homo sapien
gcttttctttccagcccagcacatg

SEQ ID NO: 5733277 - DNA, 25 bp, Homo sapien
agtattaaacatccgctcccactga

SEQ ID NO: 5733278 - DNA, 25 bp, Homo sapien
gatgtactcctcccaccagtcgctc

SEQ ID NO: 5733279 - DNA, 25 bp, Homo sapien
ttataatccccgtctcagggcaaga

SEQ ID NO: 5733280 - DNA, 25 bp, Homo sapien
tcccactgcagcctggtggggtacg

SEQ ID NO: 5733281 - DNA, 25 bp, Homo sapien
taagaggcctcaccgactgtagata

SEQ ID NO: 5733282 - DNA, 25 bp, Homo sapien
gctgagactttccactttgtctcaa

SEQ ID NO: 5733283 - DNA, 25 bp, Homo sapien
acctcttgacattcccccgggatgt

SEQ ID NO: 5733284 - DNA, 25 bp, Homo sapien
tgttcggattgatgtcgcctttgca

SEQ ID NO: 5733285 - DNA, 25 bp, Homo sapien
ttccagagtccgattgatttttgca

SEQ ID NO: 5733286 - DNA, 25 bp, Homo sapien
ggtacacgacgatgtgcttgctgtc

SEQ ID NO: 5733287 - DNA, 25 bp, Homo sapien
agagatagatttgtctaagagcttc

SEQ ID NO: 5733288 - DNA, 25 bp, Homo sapien
gggaactctgtctcctgcggtgagg

SEQ ID NO: 5733289 - DNA, 25 bp, Homo sapien
ttgcaattattcctaacgaggggtc

SEQ ID NO: 5733290 - DNA, 25 bp, Homo sapien
ttgtcatcacgcccaccaccacgat

SEQ ID NO: 5733291 - DNA, 25 bp, Homo sapien
tggtagagccagaccttgaagtagc

SEQ ID NO: 5733292 - DNA, 25 bp, Homo sapien
atcttgccgtgctcagtgaacatcc

SEQ ID NO: 5733293 - DNA, 25 bp, Homo sapien
ttcaccatgagcggccctcgtcctc

SEQ ID NO: 5733294 - DNA, 25 bp, Homo sapien
ctggtggggtacggaatgttcggat

SEQ ID NO: 5733295 - DNA, 25 bp, Homo sapien
tcccaaaagacgaattggtttgatt

SEQ ID NO: 5733296 - DNA, 25 bp, Homo sapien
acccatccagatcttggtggcacga

SEQ ID NO: 5733297 - DNA, 25 bp, Homo sapien
agtcaaacagctccacttgctgctg

SEQ ID NO: 5733298 - DNA, 25 bp, Homo sapien
acgataagccaactggaggggcttg

SEQ ID NO: 5733299 - DNA, 25 bp, Homo sapien
gcctctgttccaccgtctgggccgg

SEQ ID NO: 5733300 - DNA, 25 bp, Homo sapien
tgcccaggagtgttcagcgttgagg

SEQ ID NO: 5733301 - DNA, 25 bp, Homo sapien
gtagcgcatggtgacgatgagggcc

SEQ ID NO: 5733302 - DNA, 25 bp, Homo sapien
cgtttttgaagacaacaaacgtgaa

SEQ ID NO: 5733303 - DNA, 25 bp, Homo sapien
gtcttcacttctgtatccttcttca

SEQ ID NO: 5733304 - DNA, 25 bp, Homo sapien
accatagccgtcatcagcaaccggt

SEQ ID NO: 5733305 - DNA, 25 bp, Homo sapien
agggcaagagaacttggaagaaatg

SEQ ID NO: 5733306 - DNA, 25 bp, Homo sapien
ctcccaaaggtgggccacgatcggc

SEQ ID NO: 5733307 - DNA, 25 bp, Homo sapien
aaataggcctgacgacacctggccc

SEQ ID NO: 5733308 - DNA, 25 bp, Homo sapien
ttgaggcaatggaatggatgaataa

SEQ ID NO: 5733309 - DNA, 25 bp, Homo sapien
ccttgtagtgcgccagctggagggc

SEQ ID NO: 5733310 - DNA, 25 bp, Homo sapien
ggagtgttcagcgttgaggcccatc

SEQ ID NO: 5733311 - DNA, 25 bp, Homo sapien
tcacgcccaccaccacgataagcca

SEQ ID NO: 5733312 - DNA, 25 bp, Homo sapien
tataacctcttgacattcccccggg

SEQ ID NO: 5733313 - DNA, 25 bp, Homo sapien
aggctcagataaaacttccttaagg

SEQ ID NO: 5733314 - DNA, 25 bp, Homo sapien
gcagccgcccatcatggtagagcca

SEQ ID NO: 5733315 - DNA, 25 bp, Homo sapien
tctcagcattgaggcaatggaatgg

SEQ ID NO: 5733316 - DNA, 25 bp, Homo sapien
cgcatctgcccaggagtgttcagcg

SEQ ID NO: 5733317 - DNA, 25 bp, Homo sapien
cacgttcttcgtctggctggacatg

SEQ ID NO: 5733318 - DNA, 25 bp, Homo sapien
ttgatgtcgcctttgcagtgcccat

SEQ ID NO: 5733319 - DNA, 25 bp, Homo sapien
ggagggccagctgcacaaaggcgtc

SEQ ID NO: 5733320 - DNA, 25 bp, Homo sapien
cttcgtctggctggacatgcagttg

SEQ ID NO: 5733321 - DNA, 25 bp, Homo sapien
agtgatgatgccgttcttgaatctg

SEQ ID NO: 5733322 - DNA, 25 bp, Homo sapien
cggaagagccgggtcatggaggcct

SEQ ID NO: 5733323 - DNA, 25 bp, Homo sapien
agagtggaatcgtggatcccaaaag

SEQ ID NO: 5733324 - DNA, 25 bp, Homo sapien
tgcccatcctccgcatagcccagct

SEQ ID NO: 5733325 - DNA, 25 bp, Homo sapien
atctgctgctccatctcccggggct

SEQ ID NO: 5733326 - DNA, 25 bp, Homo sapien
gtcgcatgactcagtggtgcaggag

SEQ ID NO: 5733327 - DNA, 25 bp, Homo sapien
cacagcttggtgagcttctgccatc

SEQ ID NO: 5733328 - DNA, 25 bp, Homo sapien
cgttcttcgtctggctggacatgca

SEQ ID NO: 5733329 - DNA, 25 bp, Homo sapien
tgcttgctgtctctcatgtgctgga

SEQ ID NO: 5733330 - DNA, 25 bp, Homo sapien
ggcactgttctcagcattgaggcaa

SEQ ID NO: 5733331 - DNA, 25 bp, Homo sapien
gggtcttcacttctgtatccttctt

SEQ ID NO: 5733332 - DNA, 25 bp, Homo sapien
aaggctacgaatgggaaggaatgga

SEQ ID NO: 5733333 - DNA, 25 bp, Homo sapien
gtgagttggaaggatatacagcaga

SEQ ID NO: 5733334 - DNA, 25 bp, Homo sapien
gatgaataaatgcacagcaagtgaa

SEQ ID NO: 5733335 - DNA, 25 bp, Homo sapien
catggaggcctcgtatgtgaggcaa

SEQ ID NO: 5733336 - DNA, 25 bp, Homo sapien
gcgtctgggctcgtgcgacatttct

SEQ ID NO: 5733337 - DNA, 25 bp, Homo sapien
agcaaaatcttgagcaagtgctgtc

SEQ ID NO: 5733338 - DNA, 25 bp, Homo sapien
gcttctcagacgccaacttgaacaa

SEQ ID NO: 5733339 - DNA, 25 bp, Homo sapien
agcattgaggcaatggaatggatga

SEQ ID NO: 5733340 - DNA, 25 bp, Homo sapien
tctcagggcaagagaacttggaaga

SEQ ID NO: 5733341 - DNA, 25 bp, Homo sapien
tgagggctgccagcctggcctcccc

SEQ ID NO: 5733342 - DNA, 25 bp, Homo sapien
ccgtgtagtagagatttggcgtagc

SEQ ID NO: 5733343 - DNA, 25 bp, Homo sapien
cttcttcagtttcatctaacgtcac

SEQ ID NO: 5733344 - DNA, 25 bp, Homo sapien
aggcagcgatgtctggaagctgtac

SEQ ID NO: 5733345 - DNA, 25 bp, Homo sapien
gtccaggatcctctgcatctgctgc

SEQ ID NO: 5733346 - DNA, 25 bp, Homo sapien
gaggcgatacatatgctgatgcttc

SEQ ID NO: 5733347 - DNA, 25 bp, Homo sapien
ctctcggaagagccgggtcatggag

SEQ ID NO: 5733348 - DNA, 25 bp, Homo sapien
gaagagccgggtcatggaggcctcg

SEQ ID NO: 5733349 - DNA, 25 bp, Homo sapien
gggtcgatcttggcgtacatcgttg

SEQ ID NO: 5733350 - DNA, 25 bp, Homo sapien
tgaacatccacccgtggtaggagag

SEQ ID NO: 5733351 - DNA, 25 bp, Homo sapien
gatttgcggtgttcagggaggtctc

SEQ ID NO: 5733352 - DNA, 25 bp, Homo sapien
cctgaaaagatcttgaccataccca

SEQ ID NO: 5733353 - DNA, 25 bp, Homo sapien
gtctgggccgggtccaccatggccc

SEQ ID NO: 5733354 - DNA, 25 bp, Homo sapien
acagctccacttgctgctgaggggt

SEQ ID NO: 5733355 - DNA, 25 bp, Homo sapien
cccatcttcccgtttttgaagacaa

SEQ ID NO: 5733356 - DNA, 25 bp, Homo sapien
cgctggacacgtactctgggttatt

SEQ ID NO: 5733357 - DNA, 25 bp, Homo sapien
ggtccagtttgcgcctgtaaagcag

SEQ ID NO: 5733358 - DNA, 25 bp, Homo sapien
aacttggaagaaatgtggaaattga

SEQ ID NO: 5733359 - DNA, 25 bp, Homo sapien
acatgcagttggccgtttccagagt

SEQ ID NO: 5733360 - DNA, 25 bp, Homo sapien
cagcaagtgaaaatcaacaggcttt

SEQ ID NO: 5733361 - DNA, 25 bp, Homo sapien
ggccgtttccagagtccgattgatt

SEQ ID NO: 5733362 - DNA, 25 bp, Homo sapien
atgtgagttggaaggatatacagca

SEQ ID NO: 5733363 - DNA, 25 bp, Homo sapien
tgcacagcaagtgaaaatcaacagg

SEQ ID NO: 5733364 - DNA, 25 bp, Homo sapien
agcccagctggaggctgtcaatgga

SEQ ID NO: 5733365 - DNA, 25 bp, Homo sapien
ttgctgttcaccatgagcggccctc

SEQ ID NO: 5733366 - DNA, 25 bp, Homo sapien
agtagagatttggcgtagctgtcca

SEQ ID NO: 5733367 - DNA, 25 bp, Homo sapien
aacttctttttccaggaatgaagtc

SEQ ID NO: 5733368 - DNA, 25 bp, Homo sapien
ctcagacgccaacttgaacaacttc

SEQ ID NO: 5733369 - DNA, 25 bp, Homo sapien
tagatgtactcctcccaccagtcgc

SEQ ID NO: 5733370 - DNA, 25 bp, Homo sapien
gaactctgtctcctgcggtgagggc

SEQ ID NO: 5733371 - DNA, 25 bp, Homo sapien
actgagcggagcagagtggaatcgt

SEQ ID NO: 5733372 - DNA, 25 bp, Homo sapien
agtgttcagcgttgaggcccatctt

SEQ ID NO: 5733373 - DNA, 25 bp, Homo sapien
gtgaaaatcaacaggcttttctttc

SEQ ID NO: 5733374 - DNA, 25 bp, Homo sapien
gcacaaaggcgtctgggctcgtgcg

SEQ ID NO: 5733375 - DNA, 25 bp, Homo sapien
ggtagatgtactcctcccaccagtc

SEQ ID NO: 5733376 - DNA, 25 bp, Homo sapien
catggtagagccagaccttgaagta

SEQ ID NO: 5733377 - DNA, 25 bp, Homo sapien
ttaacttcaaataccactgtaatct

SEQ ID NO: 5733378 - DNA, 25 bp, Homo sapien
gctgctttctccacagcatcaagag

SEQ ID NO: 5733379 - DNA, 25 bp, Homo sapien
atggtctcctccaaggccttgtttc

SEQ ID NO: 5733380 - DNA, 25 bp, Homo sapien
atggtgtctgtctcctctcctggga

SEQ ID NO: 5733381 - DNA, 25 bp, Homo sapien
atccgctcccactgagcggagcaga

SEQ ID NO: 5733382 - DNA, 25 bp, Homo sapien
gcctggtggggtacggaatgttcgg

SEQ ID NO: 5733383 - DNA, 25 bp, Homo sapien
ttctccacagcatcaagagactgct

SEQ ID NO: 5733384 - DNA, 25 bp, Homo sapien
ataatctccaaggctcagataaaac

SEQ ID NO: 5733385 - DNA, 25 bp, Homo sapien
ggaggggcttgccgggtacacgcca

SEQ ID NO: 5733386 - DNA, 25 bp, Homo sapien
tgtctcctctcctgggatccgggaa

SEQ ID NO: 5733387 - DNA, 25 bp, Homo sapien
gcttcagcagccgcccatcatggta

SEQ ID NO: 5733388 - DNA, 25 bp, Homo sapien
acatgggttttcggcctgaaaagat

SEQ ID NO: 5733389 - DNA, 25 bp, Homo sapien
tcctccgcatagcccagctggaggc

SEQ ID NO: 5733390 - DNA, 25 bp, Homo sapien
ggtggggtacggaatgttcggattg

SEQ ID NO: 5733391 - DNA, 25 bp, Homo sapien
cccggggcttcagcagccgcccatc

SEQ ID NO: 5733392 - DNA, 25 bp, Homo sapien
tacagcagatccatggcataatagt

SEQ ID NO: 5733393 - DNA, 25 bp, Homo sapien
ttgaatctgatgaacttctttttcc

SEQ ID NO: 5733394 - DNA, 25 bp, Homo sapien
ggctgtcaatggacatgacgtactc

SEQ ID NO: 5733395 - DNA, 25 bp, Homo sapien
ccacttgctgctgaggggtctggct

SEQ ID NO: 5733396 - DNA, 25 bp, Homo sapien
atgagggccacccacaggccggtgc

SEQ ID NO: 5733397 - DNA, 25 bp, Homo sapien
ccctctcggaagagccgggtcatgg

SEQ ID NO: 5733398 - DNA, 25 bp, Homo sapien
ctgtctctcatgtgctggatggtgt

SEQ ID NO: 5733399 - DNA, 25 bp, Homo sapien
tcttcagtttcatctaacgtcacga

SEQ ID NO: 5733400 - DNA, 25 bp, Homo sapien
gtctctataacctcttgacattccc

SEQ ID NO: 5733401 - DNA, 25 bp, Homo sapien
ggccgtgtagtagagatttggcgta

SEQ ID NO: 5733402 - DNA, 25 bp, Homo sapien
gatcccaaaagacgaattggtttga

SEQ ID NO: 5733403 - DNA, 25 bp, Homo sapien
ctaacgaggggtcgatcttggcgta

SEQ ID NO: 5733404 - DNA, 25 bp, Homo sapien
tacaacatgggttttcggcctgaaa

SEQ ID NO: 5733405 - DNA, 25 bp, Homo sapien
caacatgggttttcggcctgaaaag

SEQ ID NO: 5733406 - DNA, 25 bp, Homo sapien
atgtgtcaggcactgttctcagcat

SEQ ID NO: 5733407 - DNA, 25 bp, Homo sapien
aggggcttgccgggtacacgccagt

SEQ ID NO: 5733408 - DNA, 25 bp, Homo sapien
ctggaagctgtacaacatgggtttt

SEQ ID NO: 5733409 - DNA, 25 bp, Homo sapien
aagatttgcggtgttcagggaggtc

SEQ ID NO: 5733410 - DNA, 25 bp, Homo sapien
tccccgtctcagggcaagagaactt

SEQ ID NO: 5733411 - DNA, 25 bp, Homo sapien
tccaagtcaaacagctccacttgct

SEQ ID NO: 5733412 - DNA, 25 bp, Homo sapien
cgctcacgtaatttgtagcccacca

SEQ ID NO: 5733413 - DNA, 25 bp, Homo sapien
tttgaagtcttcttccttcataaga

SEQ ID NO: 5733414 - DNA, 25 bp, Homo sapien
agtaccgagtcagctacggaggtgc

SEQ ID NO: 5733415 - DNA, 25 bp, Homo sapien
gttctcagcattgaggcaatggaat

SEQ ID NO: 5733416 - DNA, 25 bp, Homo sapien
gatcttgaccatacccatccagatc

SEQ ID NO: 5733417 - DNA, 25 bp, Homo sapien
ccgtttccagagtccgattgatttt

SEQ ID NO: 5733418 - DNA, 25 bp, Homo sapien
aggtcaatcccgtccggagtgaccg

SEQ ID NO: 5733419 - DNA, 25 bp, Homo sapien
taccgagtcagctacggaggtgcgg

SEQ ID NO: 5733420 - DNA, 25 bp, Homo sapien
aataaatgcacagcaagtgaaaatc

SEQ ID NO: 5733421 - DNA, 25 bp, Homo sapien
cgtaaaggcagaagaggtgacgatc

SEQ ID NO: 5733422 - DNA, 25 bp, Homo sapien
caaaggctacgaatgggaaggaatg

SEQ ID NO: 5733423 - DNA, 25 bp, Homo sapien
ctgtagatacctgttcacagtgtct

SEQ ID NO: 5733424 - DNA, 25 bp, Homo sapien
tgacgtatccgggtcttcacttctg

SEQ ID NO: 5733425 - DNA, 25 bp, Homo sapien
cgatcccagagccggtcatggcgag

SEQ ID NO: 5733426 - DNA, 25 bp, Homo sapien
gatgtcgcctttgcagtgcccatcc

SEQ ID NO: 5733427 - DNA, 25 bp, Homo sapien
gcccaccaccacgataagccaactg

SEQ ID NO: 5733428 - DNA, 25 bp, Homo sapien
acatcgttgtcatcacgcccaccac

SEQ ID NO: 5733429 - DNA, 25 bp, Homo sapien
ggctcttgctgcctgaatgtgagtt

SEQ ID NO: 5733430 - DNA, 25 bp, Homo sapien
ggtccaagaccgacagcaaaatctt

SEQ ID NO: 5733431 - DNA, 25 bp, Homo sapien
gtcatggaggcctcgtatgtgaggc

SEQ ID NO: 5733432 - DNA, 25 bp, Homo sapien
tcagcattgaggcaatggaatggat

SEQ ID NO: 5733433 - DNA, 25 bp, Homo sapien
ccactgcagcctggtggggtacgga

SEQ ID NO: 5733434 - DNA, 25 bp, Homo sapien
gcgacatttcttgatgattccttta

SEQ ID NO: 5733435 - DNA, 25 bp, Homo sapien
ccagtgatgatgccgttcttgaatc

SEQ ID NO: 5733436 - DNA, 25 bp, Homo sapien
ggcataatagttgctgttcaccatg

SEQ ID NO: 5733437 - DNA, 25 bp, Homo sapien
agctccacttgctgctgaggggtct

SEQ ID NO: 5733438 - DNA, 25 bp, Homo sapien
ctgttctcagcattgaggcaatgga

SEQ ID NO: 5733439 - DNA, 25 bp, Homo sapien
accagtcgctcacgtaatttgtagc

SEQ ID NO: 5733440 - DNA, 25 bp, Homo sapien
ttggtccaagaccgacagcaaaatc

SEQ ID NO: 5733441 - DNA, 25 bp, Homo sapien
tctgggttattctccaagtcaaaca

SEQ ID NO: 5733442 - DNA, 25 bp, Homo sapien
ctccacagcatcaagagactgctta

SEQ ID NO: 5733443 - DNA, 25 bp, Homo sapien
ctcaagtatctgaacttggtccttg

SEQ ID NO: 5733444 - DNA, 25 bp, Homo sapien
ttgaccatacccatccagatcttgg

SEQ ID NO: 5733445 - DNA, 25 bp, Homo sapien
gttggaaggatatacagcagatcca

SEQ ID NO: 5733446 - DNA, 25 bp, Homo sapien
catgtgctggatggtgtctgtctcc

SEQ ID NO: 5733447 - DNA, 25 bp, Homo sapien
cgtggtaggagagcagcactttcag

SEQ ID NO: 5733448 - DNA, 25 bp, Homo sapien
gcctgtaaagcaggatggcatggat

SEQ ID NO: 5733449 - DNA, 25 bp, Homo sapien
tggatgaataaatgcacagcaagtg

SEQ ID NO: 5733450 - DNA, 25 bp, Homo sapien
gaacgacttgtcaaaccacctgtcg

SEQ ID NO: 5733451 - DNA, 25 bp, Homo sapien
attgacgtatccgggtcttcacttc

SEQ ID NO: 5733452 - DNA, 25 bp, Homo sapien
caaggctcagataaaacttccttaa

SEQ ID NO: 5733453 - DNA, 25 bp, Homo sapien
gggagtagcgcatggtgacgatgag

SEQ ID NO: 5733454 - DNA, 25 bp, Homo sapien
ccagagagatagatttgtctaagag

SEQ ID NO: 5733455 - DNA, 25 bp, Homo sapien
aaaggggactccacagcgagatatt

SEQ ID NO: 5733456 - DNA, 25 bp, Homo sapien
gacgaattggtttgatttcctcccg

SEQ ID NO: 5733457 - DNA, 25 bp, Homo sapien
cctcccctctcggaagagccgggtc

SEQ ID NO: 5733458 - DNA, 25 bp, Homo sapien
aatccccgtctcagggcaagagaac

SEQ ID NO: 5733459 - DNA, 25 bp, Homo sapien
caaaagacgaattggtttgatttcc

SEQ ID NO: 5733460 - DNA, 25 bp, Homo sapien
tcagtggtgcaggagcgcacggtct

SEQ ID NO: 5733461 - DNA, 25 bp, Homo sapien
agcgcatggtgacgatgagggccac

SEQ ID NO: 5733462 - DNA, 25 bp, Homo sapien
ggacacgtactctgggttattctcc

SEQ ID NO: 5733463 - DNA, 25 bp, Homo sapien
aaacatccgctcccactgagcggag

SEQ ID NO: 5733464 - DNA, 25 bp, Homo sapien
atcttggcgtacatcgttgtcatca

SEQ ID NO: 5733465 - DNA, 25 bp, Homo sapien
ctgcttatttttcccacgtccaaaa

SEQ ID NO: 5733466 - DNA, 25 bp, Homo sapien
ggaaaggggactccacagcgagata

SEQ ID NO: 5733467 - DNA, 25 bp, Homo sapien
gctgtacaacatgggttttcggcct

SEQ ID NO: 5733468 - DNA, 25 bp, Homo sapien
gccccctccgctggacacgtactct

SEQ ID NO: 5733469 - DNA, 25 bp, Homo sapien
gatgtgcttgctgtctctcatgtgc

SEQ ID NO: 5733470 - DNA, 25 bp, Homo sapien
gggaaggaatggaaatccacgtcgt

SEQ ID NO: 5733471 - DNA, 25 bp, Homo sapien
catcaagagactgcttatttttccc

SEQ ID NO: 5733472 - DNA, 25 bp, Homo sapien
acgaatgggaaggaatggaaatcca

SEQ ID NO: 5733473 - DNA, 25 bp, Homo sapien
ccatggcataatagttgctgttcac

SEQ ID NO: 5733474 - DNA, 25 bp, Homo sapien
ccatccagatcttggtggcacgact

SEQ ID NO: 5733475 - DNA, 25 bp, Homo sapien
ctggagggccagctgcacaaaggcg

SEQ ID NO: 5733476 - DNA, 25 bp, Homo sapien
tctttgacagccgggaccggcaggc

SEQ ID NO: 5733477 - DNA, 25 bp, Homo sapien
cggtcatggcgaggcgatacatatg

SEQ ID NO: 5733478 - DNA, 25 bp, Homo sapien
agactttccactttgtctcaagtat

SEQ ID NO: 5733479 - DNA, 25 bp, Homo sapien
gaatgggaaggaatggaaatccacg

SEQ ID NO: 5733480 - DNA, 25 bp, Homo sapien
actctgtctcctgcggtgagggctg

SEQ ID NO: 5733481 - DNA, 25 bp, Homo sapien
cgtttgccagaagatttgcggtgtt

SEQ ID NO: 5733482 - DNA, 25 bp, Homo sapien
cacgtccaaaataggcctgacgaca

SEQ ID NO: 5733483 - DNA, 25 bp, Homo sapien
ccgggaccggcaggcgaggcagcga

SEQ ID NO: 5733484 - DNA, 25 bp, Homo sapien
aagtagcgtcctcgatggtacacga

SEQ ID NO: 5733485 - DNA, 25 bp, Homo sapien
gtctggctggacatgcagttggccg

SEQ ID NO: 5733486 - DNA, 25 bp, Homo sapien
ggatggtgtctgtctcctctcctgg

SEQ ID NO: 5733487 - DNA, 25 bp, Homo sapien
agatcttggtggcacgactcatctt

SEQ ID NO: 5733488 - DNA, 25 bp, Homo sapien
ctttgtctcaagtatctgaacttgg

SEQ ID NO: 5733489 - DNA, 25 bp, Homo sapien
ccacagcgagatatttagacaccac

SEQ ID NO: 5733490 - DNA, 25 bp, Homo sapien
ggcctcgtatgtgaggcaaaacttg

SEQ ID NO: 5733491 - DNA, 25 bp, Homo sapien
tttgaagacaacaaacgtgaacgac

SEQ ID NO: 5733492 - DNA, 25 bp, Homo sapien
gagccggtcatggcgaggcgataca

SEQ ID NO: 5733493 - DNA, 25 bp, Homo sapien
gggtcatggaggcctcgtatgtgag

SEQ ID NO: 5733494 - DNA, 25 bp, Homo sapien
cgaagtcgcatgactcagtggtgca

SEQ ID NO: 5733495 - DNA, 25 bp, Homo sapien
ccagaccttgaagtagcgtcctcga

SEQ ID NO: 5733496 - DNA, 25 bp, Homo sapien
acagcaaaatcttgagcaagtgctg

SEQ ID NO: 5733497 - DNA, 25 bp, Homo sapien
ttcacttctgtatccttcttcagtt

SEQ ID NO: 5733498 - DNA, 25 bp, Homo sapien
tcccaccagtcgctcacgtaatttg

SEQ ID NO: 5733499 - DNA, 25 bp, Homo sapien
cgggtccaccatggcccgcacgaag

SEQ ID NO: 5733500 - DNA, 25 bp, Homo sapien
atcaacaggcttttctttccagccc

SEQ ID NO: 5733501 - DNA, 25 bp, Homo sapien
ccggctcttgctgcctgaatgtgag

SEQ ID NO: 5733502 - DNA, 25 bp, Homo sapien
cccaccaggattttaacttcaaata

SEQ ID NO: 5733503 - DNA, 25 bp, Homo sapien
ctttaccaaaggctacgaatgggaa

SEQ ID NO: 5733504 - DNA, 25 bp, Homo sapien
tgctggatggtgtctgtctcctctc

SEQ ID NO: 5733505 - DNA, 25 bp, Homo sapien
ccgggtcatggaggcctcgtatgtg

SEQ ID NO: 5733506 - DNA, 25 bp, Homo sapien
cagcagccgcccatcatggtagagc

SEQ ID NO: 5733507 - DNA, 25 bp, Homo sapien
tgtactcctcccaccagtcgctcac

SEQ ID NO: 5733508 - DNA, 25 bp, Homo sapien
tcctgcggtgagggctgccagcctg

SEQ ID NO: 5733509 - DNA, 25 bp, Homo sapien
attgagcatcttttatgtgtcaggc

SEQ ID NO: 5733510 - DNA, 25 bp, Homo sapien
atatttattgagcatcttttatgtg

SEQ ID NO: 5733511 - DNA, 25 bp, Homo sapien
tccaaaataggcctgacgacacctg

SEQ ID NO: 5733512 - DNA, 25 bp, Homo sapien
taacctcttgacattcccccgggat

SEQ ID NO: 5733513 - DNA, 25 bp, Homo sapien
gcctgaatgtgagttggaaggatat

SEQ ID NO: 5733514 - DNA, 25 bp, Homo sapien
cacagcaagtgaaaatcaacaggct

SEQ ID NO: 5733515 - DNA, 25 bp, Homo sapien
ttttaacatatttattgagcatctt

SEQ ID NO: 5733516 - DNA, 25 bp, Homo sapien
ctggacacgtactctgggttattct

SEQ ID NO: 5733517 - DNA, 25 bp, Homo sapien
ccggtccagtttgcgcctgtaaagc

SEQ ID NO: 5733518 - DNA, 25 bp, Homo sapien
atcgttgtcatcacgcccaccacca

SEQ ID NO: 5733519 - DNA, 25 bp, Homo sapien
gcccatcatggtagagccagacctt

SEQ ID NO: 5733520 - DNA, 25 bp, Homo sapien
ggtgagggctgccagcctggcctcc

SEQ ID NO: 5733521 - DNA, 25 bp, Homo sapien
tccagtttgcgcctgtaaagcagga

SEQ ID NO: 5733522 - DNA, 25 bp, Homo sapien
atccgggtcttcacttctgtatcct

SEQ ID NO: 5733523 - DNA, 25 bp, Homo sapien
gcgttgaggcccatcttcccgtttt

SEQ ID NO: 5733524 - DNA, 25 bp, Homo sapien
cccaaaggtgggccacgatcggcgc

SEQ ID NO: 5733525 - DNA, 25 bp, Homo sapien
ccgcccatcatggtagagccagacc

SEQ ID NO: 5733526 - DNA, 25 bp, Homo sapien
ccccgggatgtcccactgcagcctg

SEQ ID NO: 5733527 - DNA, 25 bp, Homo sapien
ctgtcaatggacatgacgtactccc

SEQ ID NO: 5733528 - DNA, 25 bp, Homo sapien
catccacccgtggtaggagagcagc

SEQ ID NO: 5733529 - DNA, 25 bp, Homo sapien
attggtttgatttcctcccggtcca

SEQ ID NO: 5733530 - DNA, 25 bp, Homo sapien
ctgaggctccgaggtattgtccagg

SEQ ID NO: 5733531 - DNA, 25 bp, Homo sapien
tgtacgacacaccatagccgtcatc

SEQ ID NO: 5733532 - DNA, 25 bp, Homo sapien
atagttgctgttcaccatgagcggc

SEQ ID NO: 5733533 - DNA, 25 bp, Homo sapien
acttgcccatgtccttgtagtgcgc

SEQ ID NO: 5733534 - DNA, 25 bp, Homo sapien
ttcagcagccgcccatcatggtaga

SEQ ID NO: 5733535 - DNA, 25 bp, Homo sapien
gtatccgggtcttcacttctgtatc

SEQ ID NO: 5733536 - DNA, 25 bp, Homo sapien
tgacattcccccgggatgtcccact

SEQ ID NO: 5733537 - DNA, 25 bp, Homo sapien
ttcctcccggtccagtttgcgcctg

SEQ ID NO: 5733538 - DNA, 25 bp, Homo sapien
atccgggaagtattaaacatccgct

SEQ ID NO: 5733539 - DNA, 25 bp, Homo sapien
atggcatggatggcgttgccggctc

SEQ ID NO: 5733540 - DNA, 25 bp, Homo sapien
ttgaggcccatcttcccgtttttga

SEQ ID NO: 5733541 - DNA, 25 bp, Homo sapien
agagtccgattgatttttgcaatta

SEQ ID NO: 5733542 - DNA, 25 bp, Homo sapien
tccacccgtggtaggagagcagcac

SEQ ID NO: 5733543 - DNA, 25 bp, Homo sapien
gaatctgatgaacttctttttccag

SEQ ID NO: 5733544 - DNA, 25 bp, Homo sapien
tgccggctcttgctgcctgaatgtg

SEQ ID NO: 5733545 - DNA, 25 bp, Homo sapien
gttgataatctccaaggctcagata

SEQ ID NO: 5733546 - DNA, 25 bp, Homo sapien
ccagctggagggccagctgcacaaa

SEQ ID NO: 5733547 - DNA, 25 bp, Homo sapien
ccgctcccactgagcggagcagagt

SEQ ID NO: 5733548 - DNA, 25 bp, Homo sapien
tcttcccgtttttgaagacaacaaa

SEQ ID NO: 5733549 - DNA, 25 bp, Homo sapien
gtgctcagtgaacatccacccgtgg

SEQ ID NO: 5733550 - DNA, 25 bp, Homo sapien
gaacttggtgatgtccatggtctcc

SEQ ID NO: 5733551 - DNA, 25 bp, Homo sapien
ttaaacatccgctcccactgagcgg

SEQ ID NO: 5733552 - DNA, 25 bp, Homo sapien
gtccattgacgtatccgggtcttca

SEQ ID NO: 5733553 - DNA, 25 bp, Homo sapien
ttgcccatgtccttgtagtgcgcca

SEQ ID NO: 5733554 - DNA, 25 bp, Homo sapien
atccagatcttggtggcacgactca

SEQ ID NO: 5733555 - DNA, 25 bp, Homo sapien
cctccgctggacacgtactctgggt

SEQ ID NO: 5733556 - DNA, 25 bp, Homo sapien
cttgaagtagcgtcctcgatggtac

SEQ ID NO: 5733557 - DNA, 25 bp, Homo sapien
gtacatcgttgtcatcacgcccacc

SEQ ID NO: 5733558 - DNA, 25 bp, Homo sapien
agtatctgaacttggtccttgactt

SEQ ID NO: 5733559 - DNA, 25 bp, Homo sapien
agtggaatcgtggatcccaaaagac

SEQ ID NO: 5733560 - DNA, 25 bp, Homo sapien
cgtccggagtgaccgtgaactgaaa

SEQ ID NO: 5733561 - DNA, 25 bp, Homo sapien
agatccatggcataatagttgctgt

SEQ ID NO: 5733562 - DNA, 25 bp, Homo sapien
cacaaggatgtacgacacaccatag

SEQ ID NO: 5733563 - DNA, 25 bp, Homo sapien
ctccgcatagcccagctggaggctg

SEQ ID NO: 5733564 - DNA, 25 bp, Homo sapien
tggggtacggaatgttcggattgat

SEQ ID NO: 5733565 - DNA, 25 bp, Homo sapien
tccaaggctcagataaaacttcctt

SEQ ID NO: 5733566 - DNA, 25 bp, Homo sapien
tgaacttggtccttgacttataatc

SEQ ID NO: 5733567 - DNA, 25 bp, Homo sapien
atggaatggatgaataaatgcacag

SEQ ID NO: 5733568 - DNA, 25 bp, Homo sapien
ccatgagcggccctcgtcctcggag

SEQ ID NO: 5733569 - DNA, 25 bp, Homo sapien
gaggtagatgtactcctcccaccag

SEQ ID NO: 5733570 - DNA, 25 bp, Homo sapien
tgacagccgggaccggcaggcgagg

SEQ ID NO: 5733571 - DNA, 25 bp, Homo sapien
tagccgtcatcagcaaccggtccaa

SEQ ID NO: 5733572 - DNA, 25 bp, Homo sapien
cgaggggtcgatcttggcgtacatc

SEQ ID NO: 5733573 - DNA, 25 bp, Homo sapien
tctgtctcctgcggtgagggctgcc

SEQ ID NO: 5733574 - DNA, 25 bp, Homo sapien
tgctccatctcccggggcttcagca

SEQ ID NO: 5733575 - DNA, 25 bp, Homo sapien
gcttgccgggtacacgccagtgatg

SEQ ID NO: 5733576 - DNA, 25 bp, Homo sapien
gaggcccatcttcccgtttttgaag

SEQ ID NO: 5733577 - DNA, 25 bp, Homo sapien
cggtgttcagggaggtctctataac

SEQ ID NO: 5733578 - DNA, 25 bp, Homo sapien
aacgaggggtcgatcttggcgtaca

SEQ ID NO: 5733579 - DNA, 25 bp, Homo sapien
gtttcatctaacgtcacgaagaacg

SEQ ID NO: 5733580 - DNA, 25 bp, Homo sapien
ataatccccgtctcagggcaagaga

SEQ ID NO: 5733581 - DNA, 25 bp, Homo sapien
agagaacttggaagaaatgtggaaa

SEQ ID NO: 5733582 - DNA, 25 bp, Homo sapien
tccaggaatgaagtccagagagata

SEQ ID NO: 5733583 - DNA, 25 bp, Homo sapien
acaccatagccgtcatcagcaaccg

SEQ ID NO: 5733584 - DNA, 25 bp, Homo sapien
gagcagcactttcagggagtagcgc

SEQ ID NO: 5733585 - DNA, 25 bp, Homo sapien
cagcacatgaacttggtgatgtcca

SEQ ID NO: 5733586 - DNA, 25 bp, Homo sapien
tttcggcctgaaaagatcttgacca

SEQ ID NO: 5733587 - DNA, 25 bp, Homo sapien
atgcttctcagacgccaacttgaac

SEQ ID NO: 5733588 - DNA, 25 bp, Homo sapien
cacccgtggtaggagagcagcactt

SEQ ID NO: 5733589 - DNA, 25 bp, Homo sapien
ctgtaatcttggtccaagaccgaca

SEQ ID NO: 5733590 - DNA, 25 bp, Homo sapien
aaattgatgaggttctctcccacaa

SEQ ID NO: 5733591 - DNA, 25 bp, Homo sapien
atccatggcataatagttgctgttc

SEQ ID NO: 5733592 - DNA, 25 bp, Homo sapien
ccaccagtcgctcacgtaatttgta

SEQ ID NO: 5733593 - DNA, 25 bp, Homo sapien
ccgggaagtattaaacatccgctcc

SEQ ID NO: 5733594 - DNA, 25 bp, Homo sapien
acagtgtctttgacagccgggaccg

SEQ ID NO: 5733595 - DNA, 25 bp, Homo sapien
ggcccgcacgaagtcgcatgactca

SEQ ID NO: 5733596 - DNA, 25 bp, Homo sapien
gtgtagtagagatttggcgtagctg

SEQ ID NO: 5733597 - DNA, 25 bp, Homo sapien
tggcgttgccggctcttgctgcctg

SEQ ID NO: 5733598 - DNA, 25 bp, Homo sapien
catttcttgatgattcctttaccaa

SEQ ID NO: 5733599 - DNA, 25 bp, Homo sapien
cgaagaacgctgctttctccacagc

SEQ ID NO: 5733600 - DNA, 25 bp, Homo sapien
gtgtcaggcactgttctcagcattg

SEQ ID NO: 5733601 - DNA, 25 bp, Homo sapien
taaaggcagaagaggtgacgatcga

SEQ ID NO: 5733602 - DNA, 25 bp, Homo sapien
gtgaccgtgaactgaaaggccacag

SEQ ID NO: 5733603 - DNA, 25 bp, Homo sapien
tggaagaaatgtggaaattgatgag

SEQ ID NO: 5733604 - DNA, 25 bp, Homo sapien
tgcgccagctggagggccagctgca

SEQ ID NO: 5733605 - DNA, 25 bp, Homo sapien
agagagatagatttgtctaagagct

SEQ ID NO: 5733606 - DNA, 25 bp, Homo sapien
tgctgtctctcatgtgctggatggt

SEQ ID NO: 5733607 - DNA, 25 bp, Homo sapien
gtcgtttgccagaagatttgcggtg

SEQ ID NO: 5733608 - DNA, 25 bp, Homo sapien
cagtttgcgcctgtaaagcaggatg

SEQ ID NO: 5733609 - DNA, 25 bp, Homo sapien
gacgtactcccaaaggtgggccacg

SEQ ID NO: 5733610 - DNA, 25 bp, Homo sapien
ttttgcaattattcctaacgagggg

SEQ ID NO: 5733611 - DNA, 25 bp, Homo sapien
agctggagggccagctgcacaaagg

SEQ ID NO: 5733612 - DNA, 25 bp, Homo sapien
agtggtgcaggagcgcacggtctcc

SEQ ID NO: 5733613 - DNA, 25 bp, Homo sapien
atggtacacgacgatgtgcttgctg

SEQ ID NO: 5733614 - DNA, 25 bp, Homo sapien
tcggcgcatctgcccaggagtgttc

SEQ ID NO: 5733615 - DNA, 25 bp, Homo sapien
ttctctcccacaaggatgtacgaca

SEQ ID NO: 5733616 - DNA, 25 bp, Homo sapien
ctcacgtaatttgtagcccaccagg

SEQ ID NO: 5733617 - DNA, 25 bp, Homo sapien
tgggatccgggaagtattaaacatc

SEQ ID NO: 5733618 - DNA, 25 bp, Homo sapien
accgacagcaaaatcttgagcaagt

SEQ ID NO: 5733619 - DNA, 25 bp, Homo sapien
tgaaaggccacagcttggtgagctt

SEQ ID NO: 5733620 - DNA, 25 bp, Homo sapien
cccatcctccgcatagcccagctgg

SEQ ID NO: 5733621 - DNA, 25 bp, Homo sapien
catcctccgcatagcccagctggag

SEQ ID NO: 5733622 - DNA, 25 bp, Homo sapien
aacttcaaataccactgtaatcttg

SEQ ID NO: 5733623 - DNA, 25 bp, Homo sapien
gtatgtgaggcaaaacttgcccatg

SEQ ID NO: 5733624 - DNA, 25 bp, Homo sapien
ctccatctcccggggcttcagcagc

SEQ ID NO: 5733625 - DNA, 25 bp, Homo sapien
caagtcaaacagctccacttgctgc

SEQ ID NO: 5733626 - DNA, 25 bp, Homo sapien
ggcaagagaacttggaagaaatgtg

SEQ ID NO: 5733627 - DNA, 25 bp, Homo sapien
aacatcggccgtgtagtagagattt

SEQ ID NO: 5733628 - DNA, 25 bp, Homo sapien
aaaccacctgtcgtaacatcggccg

SEQ ID NO: 5733629 - DNA, 25 bp, Homo sapien
tggatggcgttgccggctcttgctg

SEQ ID NO: 5733630 - DNA, 25 bp, Homo sapien
acagcacgccgctgaccacgttctt

SEQ ID NO: 5733631 - DNA, 25 bp, Homo sapien
atgagcggccctcgtcctcggaggt

SEQ ID NO: 5733632 - DNA, 25 bp, Homo sapien
agctgtccattgacgtatccgggtc

SEQ ID NO: 5733633 - DNA, 25 bp, Homo sapien
cagtttcatctaacgtcacgaagaa

SEQ ID NO: 5733634 - DNA, 25 bp, Homo sapien
ctgcggtgagggctgccagcctggc

SEQ ID NO: 5733635 - DNA, 25 bp, Homo sapien
gtagagccagaccttgaagtagcgt

SEQ ID NO: 5733636 - DNA, 25 bp, Homo sapien
tcctccaaggccttgtttccatatg

SEQ ID NO: 5733637 - DNA, 25 bp, Homo sapien
tctgaacttggtccttgacttataa

SEQ ID NO: 5733638 - DNA, 25 bp, Homo sapien
ccgcaggtcaatcccgtccggagtg

SEQ ID NO: 5733639 - DNA, 25 bp, Homo sapien
cttgagcaagtgctgtcatccgttt

SEQ ID NO: 5733640 - DNA, 25 bp, Homo sapien
agagagtaccgagtcagctacggag

SEQ ID NO: 5733641 - DNA, 25 bp, Homo sapien
atttattgagcatcttttatgtgtc

SEQ ID NO: 5733642 - DNA, 25 bp, Homo sapien
ccacgtcgtttgccagaagatttgc

SEQ ID NO: 5733643 - DNA, 25 bp, Homo sapien
atatttagacaccacgtaaaggcag

SEQ ID NO: 5733644 - DNA, 25 bp, Homo sapien
ccagcccagcacatgaacttggtga

SEQ ID NO: 5733645 - DNA, 25 bp, Homo sapien
catcggccgtgtagtagagatttgg

SEQ ID NO: 5733646 - DNA, 25 bp, Homo sapien
cacgaagaacgctgctttctccaca

SEQ ID NO: 5733647 - DNA, 25 bp, Homo sapien
ggaaatccacgtcgtttgccagaag

SEQ ID NO: 5733648 - DNA, 25 bp, Homo sapien
ggcatggatggcgttgccggctctt

SEQ ID NO: 5733649 - DNA, 25 bp, Homo sapien
gcacatgaacttggtgatgtccatg

SEQ ID NO: 5733650 - DNA, 25 bp, Homo sapien
caatggacatgacgtactcccaaag

SEQ ID NO: 5733651 - DNA, 25 bp, Homo sapien
aggaatggaaatccacgtcgtttgc

SEQ ID NO: 5733652 - DNA, 25 bp, Homo sapien
cagcagatccatggcataatagttg

SEQ ID NO: 5733653 - DNA, 25 bp, Homo sapien
ggtgtctgtctcctctcctgggatc

SEQ ID NO: 5733654 - DNA, 25 bp, Homo sapien
gcctgacgacacctggcccagggaa

SEQ ID NO: 5733655 - DNA, 25 bp, Homo sapien
tgatttcctcccggtccagtttgcg

SEQ ID NO: 5733656 - DNA, 25 bp, Homo sapien
gatggcgttgccggctcttgctgcc

SEQ ID NO: 5733657 - DNA, 25 bp, Homo sapien
taaatgcacagcaagtgaaaatcaa

SEQ ID NO: 5733658 - DNA, 25 bp, Homo sapien
cacgccagtgatgatgccgttcttg

SEQ ID NO: 5733659 - DNA, 25 bp, Homo sapien
catggctcagccgcaggtcaatccc

SEQ ID NO: 5733660 - DNA, 25 bp, Homo sapien
ttaccaaaggctacgaatgggaagg

SEQ ID NO: 5733661 - DNA, 25 bp, Homo sapien
cttctgccatcttcagagagtaccg

SEQ ID NO: 5733662 - DNA, 25 bp, Homo sapien
gatgccgttcttgaatctgatgaac

SEQ ID NO: 5733663 - DNA, 25 bp, Homo sapien
caaggatgtacgacacaccatagcc

SEQ ID NO: 5733664 - DNA, 25 bp, Homo sapien
aggatcctctgcatctgctgctcca

SEQ ID NO: 5733665 - DNA, 25 bp, Homo sapien
ggtgagcttctgccatcttcagaga

SEQ ID NO: 5733666 - DNA, 25 bp, Homo sapien
tggtttgatttcctcccggtccagt

SEQ ID NO: 5733667 - DNA, 25 bp, Homo sapien
tccgattgatttttgcaattattcc

SEQ ID NO: 5733668 - DNA, 25 bp, Homo sapien
acgctgctttctccacagcatcaag

SEQ ID NO: 5733669 - DNA, 25 bp, Homo sapien
tgattcctttaccaaaggctacgaa

SEQ ID NO: 5733670 - DNA, 25 bp, Homo sapien
caggaatgaagtccagagagataga

SEQ ID NO: 5733671 - DNA, 25 bp, Homo sapien
gaactgaaaggccacagcttggtga

SEQ ID NO: 5733672 - DNA, 25 bp, Homo sapien
ttctcagacgccaacttgaacaact

SEQ ID NO: 5733673 - DNA, 25 bp, Homo sapien
catagccgtcatcagcaaccggtcc

SEQ ID NO: 5733674 - DNA, 25 bp, Homo sapien
tggcgtacatcgttgtcatcacgcc

SEQ ID NO: 5733675 - DNA, 25 bp, Homo sapien
tctcctgcggtgagggctgccagcc

SEQ ID NO: 5733676 - DNA, 25 bp, Homo sapien
caccgactgtagatacctgttcaca

SEQ ID NO: 5733677 - DNA, 25 bp, Homo sapien
gacgacacctggcccagggaactct

SEQ ID NO: 5733678 - DNA, 25 bp, Homo sapien
ttcatggctcagccgcaggtcaatc

SEQ ID NO: 5733679 - DNA, 25 bp, Homo sapien
aggatatacagcagatccatggcat

SEQ ID NO: 5733680 - DNA, 25 bp, Homo sapien
tttggcgtagctgtccattgacgta

SEQ ID NO: 5733681 - DNA, 25 bp, Homo sapien
caggatggcatggatggcgttgccg

SEQ ID NO: 5733682 - DNA, 25 bp, Homo sapien
acattcccccgggatgtcccactgc

SEQ ID NO: 5733683 - DNA, 25 bp, Homo sapien
ctttctccacagcatcaagagactg

SEQ ID NO: 5733684 - DNA, 25 bp, Homo sapien
ttgcgcctgtaaagcaggatggcat

SEQ ID NO: 5733685 - DNA, 25 bp, Homo sapien
ctgctgctccatctcccggggcttc

SEQ ID NO: 5733686 - DNA, 25 bp, Homo sapien
gtcatggcgaggcgatacatatgct

SEQ ID NO: 5733687 - DNA, 25 bp, Homo sapien
atgtggaaattgatgaggttctctc

SEQ ID NO: 5733688 - DNA, 25 bp, Homo sapien
cggattgatgtcgcctttgcagtgc

SEQ ID NO: 5733689 - DNA, 25 bp, Homo sapien
gcggtgagggctgccagcctggcct

SEQ ID NO: 5733690 - DNA, 25 bp, Homo sapien
aggcctgacgacacctggcccaggg

SEQ ID NO: 5733691 - DNA, 25 bp, Homo sapien
ggtctcctccaaggccttgtttcca

SEQ ID NO: 5733692 - DNA, 25 bp, Homo sapien
atgctgatgcttctcagacgccaac

SEQ ID NO: 5733693 - DNA, 25 bp, Homo sapien
acgtgaacgacttgtcaaaccacct

SEQ ID NO: 5733694 - DNA, 25 bp, Homo sapien
agtgtctttgacagccgggaccggc

SEQ ID NO: 5733695 - DNA, 25 bp, Homo sapien
ggtgccaaacagcacgccgctgacc

SEQ ID NO: 5733696 - DNA, 25 bp, Homo sapien
tcccccgggatgtcccactgcagcc

SEQ ID NO: 5733697 - DNA, 25 bp, Homo sapien
aacatatttattgagcatcttttat

SEQ ID NO: 5733698 - DNA, 25 bp, Homo sapien
ctgcatctgctgctccatctcccgg

SEQ ID NO: 5733699 - DNA, 25 bp, Homo sapien
caatcccgtccggagtgaccgtgaa

SEQ ID NO: 5733700 - DNA, 25 bp, Homo sapien
gagcagagtggaatcgtggatccca

SEQ ID NO: 5733701 - DNA, 25 bp, Homo sapien
aagaacgctgctttctccacagcat

SEQ ID NO: 5733702 - DNA, 25 bp, Homo sapien
atcatggtagagccagaccttgaag

SEQ ID NO: 5733703 - DNA, 25 bp, Homo sapien
aaggcagaagaggtgacgatcgatc

SEQ ID NO: 5733704 - DNA, 25 bp, Homo sapien
ataccactgtaatcttggtccaaga

SEQ ID NO: 5733705 - DNA, 25 bp, Homo sapien
ggttattctccaagtcaaacagctc

SEQ ID NO: 5733706 - DNA, 25 bp, Homo sapien
ctgggccgggtccaccatggcccgc

SEQ ID NO: 5733707 - DNA, 25 bp, Homo sapien
tgctgaggggtctggcttgttgata

SEQ ID NO: 5733708 - DNA, 25 bp, Homo sapien
tgagactttccactttgtctcaagt

SEQ ID NO: 5733709 - DNA, 25 bp, Homo sapien
ttaacatatttattgagcatctttt

SEQ ID NO: 5733710 - DNA, 25 bp, Homo sapien
aaatgtggaaattgatgaggttctc

SEQ ID NO: 5733711 - DNA, 25 bp, Homo sapien
tggaggctgtcaatggacatgacgt

SEQ ID NO: 5733712 - DNA, 25 bp, Homo sapien
gtagcccaccaggattttaacttca

SEQ ID NO: 5733713 - DNA, 25 bp, Homo sapien
ttaaggaaaggggactccacagcga

SEQ ID NO: 5733714 - DNA, 25 bp, Homo sapien
cgatcttggcgtacatcgttgtcat

SEQ ID NO: 5733715 - DNA, 25 bp, Homo sapien
tttttgaagacaacaaacgtgaacg

SEQ ID NO: 5733716 - DNA, 25 bp, Homo sapien
gatgtacgacacaccatagccgtca

SEQ ID NO: 5733717 - DNA, 25 bp, Homo sapien
aagtgaaaatcaacaggcttttctt

SEQ ID NO: 5733718 - DNA, 25 bp, Homo sapien
gcaaccggtccaaagccccctccgc

SEQ ID NO: 5733719 - DNA, 25 bp, Homo sapien
tcttccttcataagaggcctcaccg

SEQ ID NO: 5733720 - DNA, 25 bp, Homo sapien
tacacgccagtgatgatgccgttct

SEQ ID NO: 5733721 - DNA, 25 bp, Homo sapien
ccatcatggtagagccagaccttga

SEQ ID NO: 5733722 - DNA, 25 bp, Homo sapien
gccgtcatcagcaaccggtccaaag

SEQ ID NO: 5733723 - DNA, 25 bp, Homo sapien
ctacgaatgggaaggaatggaaatc

SEQ ID NO: 5733724 - DNA, 25 bp, Homo sapien
gttcacagtgtctttgacagccggg

SEQ ID NO: 5733725 - DNA, 25 bp, Homo sapien
ccggcaggcgaggcagcgatgtctg

SEQ ID NO: 5733726 - DNA, 25 bp, Homo sapien
gaacgctgctttctccacagcatca

SEQ ID NO: 5733727 - DNA, 25 bp, Homo sapien
cacctgtcgtaacatcggccgtgta

SEQ ID NO: 5733728 - DNA, 25 bp, Homo sapien
aatgaagtccagagagatagatttg

SEQ ID NO: 5733729 - DNA, 25 bp, Homo sapien
cgtttgaagtcttcttccttcataa

SEQ ID NO: 5733730 - DNA, 25 bp, Homo sapien
tctggcttgttgataatctccaagg

SEQ ID NO: 5733731 - DNA, 25 bp, Homo sapien
tcagggaggtctctataacctcttg

SEQ ID NO: 5733732 - DNA, 25 bp, Homo sapien
agtgaacatccacccgtggtaggag

SEQ ID NO: 5733733 - DNA, 25 bp, Homo sapien
caacaggcttttctttccagcccag

SEQ ID NO: 5733734 - DNA, 25 bp, Homo sapien
cgacacaccatagccgtcatcagca

SEQ ID NO: 5733735 - DNA, 25 bp, Homo sapien
cgaggcagcgatgtctggaagctgt

SEQ ID NO: 5733736 - DNA, 25 bp, Homo sapien
acaggcttttctttccagcccagca

SEQ ID NO: 5733737 - DNA, 25 bp, Homo sapien
gaggctccgaggtattgtccaggat

SEQ ID NO: 5733738 - DNA, 25 bp, Homo sapien
ctggctggacatgcagttggccgtt

SEQ ID NO: 5733739 - DNA, 25 bp, Homo sapien
aggattttaacttcaaataccactg

SEQ ID NO: 5733740 - DNA, 25 bp, Homo sapien
agcccaccaggattttaacttcaaa

SEQ ID NO: 5733741 - DNA, 25 bp, Homo sapien
ctgaggggtctggcttgttgataat

SEQ ID NO: 5733742 - DNA, 25 bp, Homo sapien
aaacagctccacttgctgctgaggg

SEQ ID NO: 5733743 - DNA, 25 bp, Homo sapien
tcagagagtaccgagtcagctacgg

SEQ ID NO: 5733744 - DNA, 25 bp, Homo sapien
cgtaatttgtagcccaccaggattt

SEQ ID NO: 5733745 - DNA, 25 bp, Homo sapien
tcatcagcaaccggtccaaagcccc

SEQ ID NO: 5733746 - DNA, 25 bp, Homo sapien
cggggcttcagcagccgcccatcat

SEQ ID NO: 5733747 - DNA, 25 bp, Homo sapien
accttgaagtagcgtcctcgatggt

SEQ ID NO: 5733748 - DNA, 25 bp, Homo sapien
aatcttggtccaagaccgacagcaa

SEQ ID NO: 5733749 - DNA, 25 bp, Homo sapien
accaccacgataagccaactggagg

SEQ ID NO: 5733750 - DNA, 25 bp, Homo sapien
gtggaaattgatgaggttctctccc

SEQ ID NO: 5733751 - DNA, 25 bp, Homo sapien
gctgctccatctcccggggcttcag

SEQ ID NO: 5733752 - DNA, 25 bp, Homo sapien
ctgtaaagcaggatggcatggatgg

SEQ ID NO: 5733753 - DNA, 25 bp, Homo sapien
cttcagagagtaccgagtcagctac

SEQ ID NO: 5733754 - DNA, 25 bp, Homo sapien
gggaccggcaggcgaggcagcgatg

SEQ ID NO: 5733755 - DNA, 25 bp, Homo sapien
ccaactggaggggcttgccgggtac

SEQ ID NO: 5733756 - DNA, 25 bp, Homo sapien
atgtccttgtagtgcgccagctgga

SEQ ID NO: 5733757 - DNA, 25 bp, Homo sapien
agcacgccgctgaccacgttcttcg

SEQ ID NO: 5733758 - DNA, 25 bp, Homo sapien
cttgtcaaaccacctgtcgtaacat

SEQ ID NO: 5733759 - DNA, 25 bp, Homo sapien
gagactgcttatttttcccacgtcc

SEQ ID NO: 5733760 - DNA, 25 bp, Homo sapien
ctcccggggcttcagcagccgccca

SEQ ID NO: 5733761 - DNA, 25 bp, Homo sapien
tgggccacgatcggcgcatctgccc

SEQ ID NO: 5733762 - DNA, 25 bp, Homo sapien
agcgtcctcgatggtacacgacgat

SEQ ID NO: 5733763 - DNA, 25 bp, Homo sapien
ttccttaaggaaaggggactccaca

SEQ ID NO: 5733764 - DNA, 25 bp, Homo sapien
ccacgatcggcgcatctgcccagga

SEQ ID NO: 5733765 - DNA, 25 bp, Homo sapien
tgctgtcatccgtttgaagtcttct

SEQ ID NO: 5733766 - DNA, 25 bp, Homo sapien
acaaaggcgtctgggctcgtgcgac

SEQ ID NO: 5733767 - DNA, 25 bp, Homo sapien
aatggatgaataaatgcacagcaag

SEQ ID NO: 5733768 - DNA, 25 bp, Homo sapien
aaggccttgtttccatatgctgaga

SEQ ID NO: 5733769 - DNA, 25 bp, Homo sapien
gaccgtgaactgaaaggccacagct

SEQ ID NO: 5733770 - DNA, 25 bp, Homo sapien
cctgggatccgggaagtattaaaca

SEQ ID NO: 5733771 - DNA, 25 bp, Homo sapien
accaaaggctacgaatgggaaggaa

SEQ ID NO: 5733772 - DNA, 25 bp, Homo sapien
ctcggaagagccgggtcatggaggc

SEQ ID NO: 5733773 - DNA, 25 bp, Homo sapien
atggacatgacgtactcccaaaggt

SEQ ID NO: 5733774 - DNA, 25 bp, Homo sapien
ttgtagtgcgccagctggagggcca

SEQ ID NO: 5733775 - DNA, 25 bp, Homo sapien
cagcctctgttccaccgtctgggcc

SEQ ID NO: 5733776 - DNA, 25 bp, Homo sapien
cagcttggtgagcttctgccatctt

SEQ ID NO: 5733777 - DNA, 25 bp, Homo sapien
ttgtctcaagtatctgaacttggtc

SEQ ID NO: 5733778 - DNA, 25 bp, Homo sapien
ccacagcatcaagagactgcttatt

SEQ ID NO: 5733779 - DNA, 25 bp, Homo sapien
ataggcctgacgacacctggcccag

SEQ ID NO: 5733780 - DNA, 25 bp, Homo sapien
tgatttttgcaattattcctaacga

SEQ ID NO: 5733781 - DNA, 25 bp, Homo sapien
acttcagcctctgttccaccgtctg

SEQ ID NO: 5733782 - DNA, 25 bp, Homo sapien
ggggtctggcttgttgataatctcc

SEQ ID NO: 5733783 - DNA, 25 bp, Homo sapien
ggaatggatgaataaatgcacagca

SEQ ID NO: 5733784 - DNA, 25 bp, Homo sapien
tccaaagccccctccgctggacacg

SEQ ID NO: 5733785 - DNA, 25 bp, Homo sapien
acctgttcacagtgtctttgacagc

SEQ ID NO: 5733786 - DNA, 25 bp, Homo sapien
ctccacagcgagatatttagacacc

SEQ ID NO: 5733787 - DNA, 25 bp, Homo sapien
aaatccacgtcgtttgccagaagat

SEQ ID NO: 5733788 - DNA, 25 bp, Homo sapien
ctgacgacacctggcccagggaact

SEQ ID NO: 5733789 - DNA, 25 bp, Homo sapien
tatacagcagatccatggcataata

SEQ ID NO: 5733790 - DNA, 25 bp, Homo sapien
cgacagcaaaatcttgagcaagtgc

SEQ ID NO: 5733791 - DNA, 25 bp, Homo sapien
gaccggcaggcgaggcagcgatgtc

SEQ ID NO: 5733792 - DNA, 25 bp, Homo sapien
gagcgcacggtctccgtcctcccct

SEQ ID NO: 5733793 - DNA, 25 bp, Homo sapien
actttccactttgtctcaagtatct

SEQ ID NO: 5733794 - DNA, 25 bp, Homo sapien
tcaaataccactgtaatcttggtcc

SEQ ID NO: 5733795 - DNA, 25 bp, Homo sapien
gattgatgtcgcctttgcagtgccc

SEQ ID NO: 5733796 - DNA, 25 bp, Homo sapien
gcgcctgtaaagcaggatggcatgg

SEQ ID NO: 5733797 - DNA, 25 bp, Homo sapien
acgatgtgcttgctgtctctcatgt

SEQ ID NO: 5733798 - DNA, 25 bp, Homo sapien
aggcttttctttccagcccagcaca

SEQ ID NO: 5733799 - DNA, 25 bp, Homo sapien
gtctcaagtatctgaacttggtcct

SEQ ID NO: 5733800 - DNA, 25 bp, Homo sapien
cgttgtcatcacgcccaccaccacg

SEQ ID NO: 5733801 - DNA, 25 bp, Homo sapien
agatagatttgtctaagagcttcat

SEQ ID NO: 5733802 - DNA, 25 bp, Homo sapien
gctcagtgaacatccacccgtggta

SEQ ID NO: 5733803 - DNA, 25 bp, Homo sapien
cgagatatttagacaccacgtaaag

SEQ ID NO: 5733804 - DNA, 25 bp, Homo sapien
ggcaatggaatggatgaataaatgc

SEQ ID NO: 5733805 - DNA, 25 bp, Homo sapien
acacgtactctgggttattctccaa

SEQ ID NO: 5733806 - DNA, 25 bp, Homo sapien
ttttcccacgtccaaaataggcctg

SEQ ID NO: 5733807 - DNA, 25 bp, Homo sapien
tcgtaacatcggccgtgtagtagag

SEQ ID NO: 5733808 - DNA, 25 bp, Homo sapien
aaaagatcttgaccatacccatcca

SEQ ID NO: 5733809 - DNA, 25 bp, Homo sapien
gttcttgaatctgatgaacttcttt

SEQ ID NO: 5733810 - DNA, 25 bp, Homo sapien
cccctccgctggacacgtactctgg

SEQ ID NO: 5733811 - DNA, 25 bp, Homo sapien
ggtctggcttgttgataatctccaa

SEQ ID NO: 5733812 - DNA, 25 bp, Homo sapien
gtcaatggacatgacgtactcccaa

SEQ ID NO: 5733813 - DNA, 25 bp, Homo sapien
ccgtgaactgaaaggccacagcttg

SEQ ID NO: 5733814 - DNA, 25 bp, Homo sapien
aatctccaaggctcagataaaactt

SEQ ID NO: 5733815 - DNA, 25 bp, Homo sapien
gatgaacttctttttccaggaatga

SEQ ID NO: 5733816 - DNA, 25 bp, Homo sapien
cctcccaccagtcgctcacgtaatt

SEQ ID NO: 5733817 - DNA, 25 bp, Homo sapien
tactcctcccaccagtcgctcacgt

SEQ ID NO: 5733818 - DNA, 25 bp, Homo sapien
agaccttgaagtagcgtcctcgatg

SEQ ID NO: 5733819 - DNA, 25 bp, Homo sapien
tggaaggatatacagcagatccatg

SEQ ID NO: 5733820 - DNA, 25 bp, Homo sapien
ccagatcttggtggcacgactcatc

SEQ ID NO: 5733821 - DNA, 25 bp, Homo sapien
aaaggccacagcttggtgagcttct

SEQ ID NO: 5733822 - DNA, 25 bp, Homo sapien
ggcagaagaggtgacgatcgatccc

SEQ ID NO: 5733823 - DNA, 25 bp, Homo sapien
gtcgatcttggcgtacatcgttgtc

SEQ ID NO: 5733824 - DNA, 25 bp, Homo sapien
aaataccactgtaatcttggtccaa

SEQ ID NO: 5733825 - DNA, 25 bp, Homo sapien
caccgtctgggccgggtccaccatg

SEQ ID NO: 5733826 - DNA, 25 bp, Homo sapien
caacttcagcctctgttccaccgtc

SEQ ID NO: 5733827 - DNA, 25 bp, Homo sapien
acgcccaccaccacgataagccaac

SEQ ID NO: 5733828 - DNA, 25 bp, Homo sapien
tccgctggacacgtactctgggtta

SEQ ID NO: 5733829 - DNA, 25 bp, Homo sapien
tcagggcaagagaacttggaagaaa

SEQ ID NO: 5733830 - DNA, 25 bp, Homo sapien
ccgtctgggccgggtccaccatggc

SEQ ID NO: 5733831 - DNA, 25 bp, Homo sapien
gactccacagcgagatatttagaca

SEQ ID NO: 5733832 - DNA, 25 bp, Homo sapien
cagggaactctgtctcctgcggtga

SEQ ID NO: 5733833 - DNA, 25 bp, Homo sapien
ggccttgtttccatatgctgagact

SEQ ID NO: 5733834 - DNA, 25 bp, Homo sapien
gagttggaaggatatacagcagatc

SEQ ID NO: 5733835 - DNA, 25 bp, Homo sapien
tccttcttcagtttcatctaacgtc

SEQ ID NO: 5733836 - DNA, 25 bp, Homo sapien
tcagccgcaggtcaatcccgtccgg

SEQ ID NO: 5733837 - DNA, 25 bp, Homo sapien
tgaagtagcgtcctcgatggtacac

SEQ ID NO: 5733838 - DNA, 25 bp, Homo sapien
agagccagaccttgaagtagcgtcc

SEQ ID NO: 5733839 - DNA, 25 bp, Homo sapien
cctcgtatgtgaggcaaaacttgcc

SEQ ID NO: 5733840 - DNA, 25 bp, Homo sapien
ccttgtttccatatgctgagacttt

SEQ ID NO: 5733841 - DNA, 25 bp, Homo sapien
tccggagtgaccgtgaactgaaagg

SEQ ID NO: 5733842 - DNA, 25 bp, Homo sapien
ctgaatgtgagttggaaggatatac

SEQ ID NO: 5733843 - DNA, 25 bp, Homo sapien
ctgttccaccgtctgggccgggtcc

SEQ ID NO: 5733844 - DNA, 25 bp, Homo sapien
acgtcacgaagaacgctgctttctc

SEQ ID NO: 5733845 - DNA, 25 bp, Homo sapien
atcgtggatcccaaaagacgaattg

SEQ ID NO: 5733846 - DNA, 25 bp, Homo sapien
cgtcatcagcaaccggtccaaagcc

SEQ ID NO: 5733847 - DNA, 25 bp, Homo sapien
tggtccttgacttataatccccgtc

SEQ ID NO: 5733848 - DNA, 25 bp, Homo sapien
ggtgatgtccatggtctcctccaag

SEQ ID NO: 5733849 - DNA, 25 bp, Homo sapien
agcactttcagggagtagcgcatgg

SEQ ID NO: 5733850 - DNA, 25 bp, Homo sapien
cgtggatcccaaaagacgaattggt

SEQ ID NO: 5733851 - DNA, 25 bp, Homo sapien
acgtactctgggttattctccaagt

SEQ ID NO: 5733852 - DNA, 25 bp, Homo sapien
caatggaatggatgaataaatgcac

SEQ ID NO: 5733853 - DNA, 25 bp, Homo sapien
gactgcttatttttcccacgtccaa

SEQ ID NO: 5733854 - DNA, 25 bp, Homo sapien
cacccacaggccggtgccaaacagc

SEQ ID NO: 5733855 - DNA, 25 bp, Homo sapien
ggcaaaacttgcccatgtccttgta

SEQ ID NO: 5733856 - DNA, 25 bp, Homo sapien
acacaccatagccgtcatcagcaac

SEQ ID NO: 5733857 - DNA, 25 bp, Homo sapien
catggcgaggcgatacatatgctga

SEQ ID NO: 5733858 - DNA, 25 bp, Homo sapien
ccatcttcagagagtaccgagtcag

SEQ ID NO: 5733859 - DNA, 25 bp, Homo sapien
cgatcgatcccagagccggtcatgg

SEQ ID NO: 5733860 - DNA, 25 bp, Homo sapien
ccatacccatccagatcttggtggc

SEQ ID NO: 5733861 - DNA, 25 bp, Homo sapien
gtctctcatgtgctggatggtgtct

SEQ ID NO: 5733862 - DNA, 25 bp, Homo sapien
agccagaccttgaagtagcgtcctc

SEQ ID NO: 5733863 - DNA, 25 bp, Homo sapien
tggcgaggcgatacatatgctgatg

SEQ ID NO: 5733864 - DNA, 25 bp, Homo sapien
tacacgacgatgtgcttgctgtctc

SEQ ID NO: 5733865 - DNA, 25 bp, Homo sapien
atcccagagccggtcatggcgaggc

SEQ ID NO: 5733866 - DNA, 25 bp, Homo sapien
tgggttattctccaagtcaaacagc

SEQ ID NO: 5733867 - DNA, 25 bp, Homo sapien
cgcatggtgacgatgagggccaccc

SEQ ID NO: 5733868 - DNA, 25 bp, Homo sapien
tcgtatgtgaggcaaaacttgccca

SEQ ID NO: 5733869 - DNA, 25 bp, Homo sapien
aggggactccacagcgagatattta

SEQ ID NO: 5733870 - DNA, 25 bp, Homo sapien
catctaacgtcacgaagaacgctgc

SEQ ID NO: 5733871 - DNA, 25 bp, Homo sapien
tcctcgatggtacacgacgatgtgc

SEQ ID NO: 5733872 - DNA, 25 bp, Homo sapien
agtgcgccagctggagggccagctg

SEQ ID NO: 5733873 - DNA, 25 bp, Homo sapien
acacctggcccagggaactctgtct

SEQ ID NO: 5733874 - DNA, 25 bp, Homo sapien
catcttttatgtgtcaggcactgtt

SEQ ID NO: 5733875 - DNA, 25 bp, Homo sapien
atgggttttcggcctgaaaagatct

SEQ ID NO: 5733876 - DNA, 25 bp, Homo sapien
tgacttataatccccgtctcagggc

SEQ ID NO: 5733877 - DNA, 25 bp, Homo sapien
cttcaaataccactgtaatcttggt

SEQ ID NO: 5733878 - DNA, 25 bp, Homo sapien
agcatcttttatgtgtcaggcactg

SEQ ID NO: 5733879 - DNA, 25 bp, Homo sapien
caccatggcccgcacgaagtcgcat

SEQ ID NO: 5733880 - DNA, 25 bp, Homo sapien
caccaggattttaacttcaaatacc

SEQ ID NO: 5733881 - DNA, 25 bp, Homo sapien
gagggccacccacaggccggtgcca

SEQ ID NO: 5733882 - DNA, 25 bp, Homo sapien
cattgaggcaatggaatggatgaat

SEQ ID NO: 5733883 - DNA, 25 bp, Homo sapien
cacgactcatcttgccgtgctcagt

SEQ ID NO: 5733884 - DNA, 25 bp, Homo sapien
tctccaaggctcagataaaacttcc

SEQ ID NO: 5733885 - DNA, 25 bp, Homo sapien
ccaggattttaacttcaaataccac

SEQ ID NO: 5733886 - DNA, 25 bp, Homo sapien
ctcctcccaccagtcgctcacgtaa

SEQ ID NO: 5733887 - DNA, 25 bp, Homo sapien
ccatggtctcctccaaggccttgtt

SEQ ID NO: 5733888 - DNA, 25 bp, Homo sapien
gccggtcatggcgaggcgatacata

SEQ ID NO: 5733889 - DNA, 25 bp, Homo sapien
ctctcccacaaggatgtacgacaca

SEQ ID NO: 5733890 - DNA, 25 bp, Homo sapien
aagagactgcttatttttcccacgt

SEQ ID NO: 5733891 - DNA, 25 bp, Homo sapien
ccatgtccttgtagtgcgccagctg

SEQ ID NO: 5733892 - DNA, 25 bp, Homo sapien
gatgattcctttaccaaaggctacg

SEQ ID NO: 5733893 - DNA, 25 bp, Homo sapien
ggaagctgtacaacatgggttttcg

SEQ ID NO: 5733894 - DNA, 25 bp, Homo sapien
cgccaacttgaacaacttcagcctc

SEQ ID NO: 5733895 - DNA, 25 bp, Homo sapien
ccaccaccacgataagccaactgga

SEQ ID NO: 5733896 - DNA, 25 bp, Homo sapien
tctcctccaaggccttgtttccata

SEQ ID NO: 5733897 - DNA, 25 bp, Homo sapien
atttagacaccacgtaaaggcagaa

SEQ ID NO: 5733898 - DNA, 25 bp, Homo sapien
gacgatcgatcccagagccggtcat

SEQ ID NO: 5733899 - DNA, 25 bp, Homo sapien
tcttgaccatacccatccagatctt

SEQ ID NO: 5733900 - DNA, 25 bp, Homo sapien
cgtactcccaaaggtgggccacgat

SEQ ID NO: 5733901 - DNA, 25 bp, Homo sapien
aaacgtgaacgacttgtcaaaccac

SEQ ID NO: 5733902 - DNA, 25 bp, Homo sapien
cagtcgctcacgtaatttgtagccc

SEQ ID NO: 5733903 - DNA, 25 bp, Homo sapien
agcgagatatttagacaccacgtaa

SEQ ID NO: 5733904 - DNA, 25 bp, Homo sapien
ttcccacgtccaaaataggcctgac

SEQ ID NO: 5733905 - DNA, 25 bp, Homo sapien
cccgcacgaagtcgcatgactcagt

SEQ ID NO: 5733906 - DNA, 25 bp, Homo sapien
tagagatttggcgtagctgtccatt

SEQ ID NO: 5733907 - DNA, 25 bp, Homo sapien
gtccagagagatagatttgtctaag

SEQ ID NO: 5733908 - DNA, 25 bp, Homo sapien
atatgctgagactttccactttgtc

SEQ ID NO: 5733909 - DNA, 25 bp, Homo sapien
agggaggtctctataacctcttgac

SEQ ID NO: 5733910 - DNA, 25 bp, Homo sapien
atcgatcccagagccggtcatggcg

SEQ ID NO: 5733911 - DNA, 25 bp, Homo sapien
tctgtctcctctcctgggatccggg

SEQ ID NO: 5733912 - DNA, 25 bp, Homo sapien
gctcgtgcgacatttcttgatgatt

SEQ ID NO: 5733913 - DNA, 25 bp, Homo sapien
cacgtaatttgtagcccaccaggat

SEQ ID NO: 5733914 - DNA, 25 bp, Homo sapien
gaaggatatacagcagatccatggc

SEQ ID NO: 5733915 - DNA, 25 bp, Homo sapien
ttccagcccagcacatgaacttggt

SEQ ID NO: 5733916 - DNA, 25 bp, Homo sapien
gaagaggtgacgatcgatcccagag

SEQ ID NO: 5733917 - DNA, 25 bp, Homo sapien
actgcagcctggtggggtacggaat

SEQ ID NO: 5733918 - DNA, 25 bp, Homo sapien
gacgccaacttgaacaacttcagcc

SEQ ID NO: 5733919 - DNA, 25 bp, Homo sapien
gctggaggctgtcaatggacatgac

SEQ ID NO: 5733920 - DNA, 25 bp, Homo sapien
agatacctgttcacagtgtctttga

SEQ ID NO: 5733921 - DNA, 25 bp, Homo sapien
gcaagtgaaaatcaacaggcttttc

SEQ ID NO: 5733922 - DNA, 25 bp, Homo sapien
ggttctctcccacaaggatgtacga

SEQ ID NO: 5733923 - DNA, 25 bp, Homo sapien
gtggcacgactcatcttgccgtgct

SEQ ID NO: 5733924 - DNA, 25 bp, Homo sapien
gtagctgtccattgacgtatccggg

SEQ ID NO: 5733925 - DNA, 25 bp, Homo sapien
gtcatcacgcccaccaccacgataa

SEQ ID NO: 5733926 - DNA, 25 bp, Homo sapien
gtactctgggttattctccaagtca

SEQ ID NO: 5733927 - DNA, 25 bp, Homo sapien
gaggctgtcaatggacatgacgtac

SEQ ID NO: 5733928 - DNA, 25 bp, Homo sapien
cgatgtctggaagctgtacaacatg

SEQ ID NO: 5733929 - DNA, 25 bp, Homo sapien
tgaagtccagagagatagatttgtc

SEQ ID NO: 5733930 - DNA, 25 bp, Homo sapien
acagcatcaagagactgcttatttt

SEQ ID NO: 5733931 - DNA, 25 bp, Homo sapien
agtgcccatcctccgcatagcccag

SEQ ID NO: 5733932 - DNA, 25 bp, Homo sapien
ttgttgataatctccaaggctcaga

SEQ ID NO: 5733933 - DNA, 25 bp, Homo sapien
atcagcaaccggtccaaagccccct

SEQ ID NO: 5733934 - DNA, 25 bp, Homo sapien
gaagtattaaacatccgctcccact

SEQ ID NO: 5733935 - DNA, 25 bp, Homo sapien
ggacatgacgtactcccaaaggtgg

SEQ ID NO: 5733936 - DNA, 25 bp, Homo sapien
gaggtattgtccaggatcctctgca

SEQ ID NO: 5733937 - DNA, 25 bp, Homo sapien
gtcatccgtttgaagtcttcttcct

SEQ ID NO: 5733938 - DNA, 25 bp, Homo sapien
gaggcaaaacttgcccatgtccttg

SEQ ID NO: 5733939 - DNA, 25 bp, Homo sapien
tcctctgcatctgctgctccatctc

SEQ ID NO: 5733940 - DNA, 25 bp, Homo sapien
ctttccagcccagcacatgaacttg

SEQ ID NO: 5733941 - DNA, 25 bp, Homo sapien
tgtacaacatgggttttcggcctga

SEQ ID NO: 5733942 - DNA, 25 bp, Homo sapien
gcctcaccgactgtagatacctgtt

SEQ ID NO: 5733943 - DNA, 25 bp, Homo sapien
actcagtggtgcaggagcgcacggt

SEQ ID NO: 5733944 - DNA, 25 bp, Homo sapien
cactttgtctcaagtatctgaactt

SEQ ID NO: 5733945 - DNA, 25 bp, Homo sapien
gataagccaactggaggggcttgcc

SEQ ID NO: 5733946 - DNA, 25 bp, Homo sapien
cacgacgatgtgcttgctgtctctc

SEQ ID NO: 5733947 - DNA, 25 bp, Homo sapien
ccatctcccggggcttcagcagccg

SEQ ID NO: 5733948 - DNA, 25 bp, Homo sapien
tcatcttgccgtgctcagtgaacat

SEQ ID NO: 5733949 - DNA, 25 bp, Homo sapien
agaaatgtggaaattgatgaggttc

SEQ ID NO: 5733950 - DNA, 25 bp, Homo sapien
ggctccgaggtattgtccaggatcc

SEQ ID NO: 5733951 - DNA, 25 bp, Homo sapien
tcaaacagctccacttgctgctgag

SEQ ID NO: 5733952 - DNA, 25 bp, Homo sapien
tctaacgtcacgaagaacgctgctt

SEQ ID NO: 5733953 - DNA, 25 bp, Homo sapien
acaaacgtgaacgacttgtcaaacc

SEQ ID NO: 5733954 - DNA, 25 bp, Homo sapien
ctccacttgctgctgaggggtctgg

SEQ ID NO: 5733955 - DNA, 25 bp, Homo sapien
acttttaacatatttattgagcatc

SEQ ID NO: 5733956 - DNA, 25 bp, Homo sapien
tctcctctcctgggatccgggaagt

SEQ ID NO: 5733957 - DNA, 25 bp, Homo sapien
ggtattgtccaggatcctctgcatc

SEQ ID NO: 5733958 - DNA, 25 bp, Homo sapien
caaagccccctccgctggacacgta

SEQ ID NO: 5733959 - DNA, 25 bp, Homo sapien
atagatttgtctaagagcttcatgg

SEQ ID NO: 5733960 - DNA, 25 bp, Homo sapien
ccgactgtagatacctgttcacagt

SEQ ID NO: 5733961 - DNA, 25 bp, Homo sapien
tccgtttgaagtcttcttccttcat

SEQ ID NO: 5733962 - DNA, 25 bp, Homo sapien
tgaataaatgcacagcaagtgaaaa

SEQ ID NO: 5733963 - DNA, 25 bp, Homo sapien
cagctggaggctgtcaatggacatg

SEQ ID NO: 5733964 - DNA, 25 bp, Homo sapien
aagtcttcttccttcataagaggcc

SEQ ID NO: 5733965 - DNA, 25 bp, Homo sapien
gaatggaaatccacgtcgtttgcca

SEQ ID NO: 5733966 - DNA, 25 bp, Homo sapien
tggtggcacgactcatcttgccgtg

SEQ ID NO: 5733967 - DNA, 25 bp, Homo sapien
agaggtgacgatcgatcccagagcc

SEQ ID NO: 5733968 - DNA, 25 bp, Homo sapien
attctccaagtcaaacagctccact

SEQ ID NO: 5733969 - DNA, 25 bp, Homo sapien
agttggccgtttccagagtccgatt

SEQ ID NO: 5733970 - DNA, 25 bp, Homo sapien
cgacacctggcccagggaactctgt

SEQ ID NO: 5733971 - DNA, 25 bp, Homo sapien
gcagtgcccatcctccgcatagccc

SEQ ID NO: 5733972 - DNA, 25 bp, Homo sapien
agcccagcacatgaacttggtgatg

SEQ ID NO: 5733973 - DNA, 25 bp, Homo sapien
tggtgacgatgagggccacccacag

SEQ ID NO: 5733974 - DNA, 25 bp, Homo sapien
gcagagtggaatcgtggatcccaaa

SEQ ID NO: 5733975 - DNA, 25 bp, Homo sapien
gggatgtcccactgcagcctggtgg

SEQ ID NO: 5733976 - DNA, 25 bp, Homo sapien
ccgctgaccacgttcttcgtctggc

SEQ ID NO: 5733977 - DNA, 25 bp, Homo sapien
aacaacttcagcctctgttccaccg

SEQ ID NO: 5733978 - DNA, 25 bp, Homo sapien
tgagcaagtgctgtcatccgtttga

SEQ ID NO: 5733979 - DNA, 25 bp, Homo sapien
tttgatttcctcccggtccagtttg

SEQ ID NO: 5733980 - DNA, 25 bp, Homo sapien
tgttcaccatgagcggccctcgtcc

SEQ ID NO: 5733981 - DNA, 25 bp, Homo sapien
cagcgttgaggcccatcttcccgtt

SEQ ID NO: 5733982 - DNA, 25 bp, Homo sapien
tcctaacgaggggtcgatcttggcg

SEQ ID NO: 5733983 - DNA, 25 bp, Homo sapien
tgtgctggatggtgtctgtctcctc

SEQ ID NO: 5733984 - DNA, 25 bp, Homo sapien
ctcaccgactgtagatacctgttca

SEQ ID NO: 5733985 - DNA, 25 bp, Homo sapien
ggaggtctctataacctcttgacat

SEQ ID NO: 5733986 - DNA, 25 bp, Homo sapien
acagcgagatatttagacaccacgt

SEQ ID NO: 5733987 - DNA, 25 bp, Homo sapien
ttagacaccacgtaaaggcagaaga

SEQ ID NO: 5733988 - DNA, 25 bp, Homo sapien
ctgatgaacttctttttccaggaat

SEQ ID NO: 5733989 - DNA, 25 bp, Homo sapien
gaggggtctggcttgttgataatct

SEQ ID NO: 5733990 - DNA, 25 bp, Homo sapien
taagccaactggaggggcttgccgg

SEQ ID NO: 5733991 - DNA, 25 bp, Homo sapien
tattaaacatccgctcccactgagc

SEQ ID NO: 5733992 - DNA, 25 bp, Homo sapien
gcctggcctccccgggctgaggctc

SEQ ID NO: 5733993 - DNA, 25 bp, Homo sapien
caaaggtgggccacgatcggcgcat

SEQ ID NO: 5733994 - DNA, 25 bp, Homo sapien
cactttcagggagtagcgcatggtg

SEQ ID NO: 5733995 - DNA, 25 bp, Homo sapien
cagggagtagcgcatggtgacgatg

SEQ ID NO: 5733996 - DNA, 25 bp, Homo sapien
ggccacgatcggcgcatctgcccag

SEQ ID NO: 5733997 - DNA, 25 bp, Homo sapien
ctcttgctgcctgaatgtgagttgg

SEQ ID NO: 5733998 - DNA, 25 bp, Homo sapien
gtaacatcggccgtgtagtagagat

SEQ ID NO: 5733999 - DNA, 25 bp, Homo sapien
cactgtaatcttggtccaagaccga

SEQ ID NO: 5734000 - DNA, 25 bp, Homo sapien
agtccgattgatttttgcaattatt

SEQ ID NO: 5734001 - DNA, 25 bp, Homo sapien
gagtcagctacggaggtgcggcagc

SEQ ID NO: 5734002 - DNA, 25 bp, Homo sapien
gccacagcttggtgagcttctgcca

SEQ ID NO: 5734003 - DNA, 25 bp, Homo sapien
ccaaacagcacgccgctgaccacgt

SEQ ID NO: 5734004 - DNA, 25 bp, Homo sapien
cgtcctcgatggtacacgacgatgt

SEQ ID NO: 5734005 - DNA, 25 bp, Homo sapien
ctccaaggccttgtttccatatgct

SEQ ID NO: 5734006 - DNA, 25 bp, Homo sapien
tcctcggaggtagatgtactcctcc

SEQ ID NO: 5734007 - DNA, 25 bp, Homo sapien
cttctttttccaggaatgaagtcca

SEQ ID NO: 5734008 - DNA, 25 bp, Homo sapien
aatgcacagcaagtgaaaatcaaca

SEQ ID NO: 5734009 - DNA, 25 bp, Homo sapien
cacaggccggtgccaaacagcacgc

SEQ ID NO: 5734010 - DNA, 25 bp, Homo sapien
ccgaggtattgtccaggatcctctg

SEQ ID NO: 5734011 - DNA, 25 bp, Homo sapien
tttgccagaagatttgcggtgttca

SEQ ID NO: 5734012 - DNA, 25 bp, Homo sapien
tcgcctttgcagtgcccatcctccg

SEQ ID NO: 5734013 - DNA, 25 bp, Homo sapien
acggaatgttcggattgatgtcgcc

SEQ ID NO: 5734014 - DNA, 25 bp, Homo sapien
cccagagccggtcatggcgaggcga

SEQ ID NO: 5734015 - DNA, 25 bp, Homo sapien
cttctgtatccttcttcagtttcat

SEQ ID NO: 5734016 - DNA, 25 bp, Homo sapien
tccactttgtctcaagtatctgaac

SEQ ID NO: 5734017 - DNA, 25 bp, Homo sapien
tttgacagccgggaccggcaggcga

SEQ ID NO: 5734018 - DNA, 25 bp, Homo sapien
cggaggtagatgtactcctcccacc

SEQ ID NO: 5734019 - DNA, 25 bp, Homo sapien
cacgtaaaggcagaagaggtgacga

SEQ ID NO: 5734020 - DNA, 25 bp, Homo sapien
acttgctgctgaggggtctggcttg

SEQ ID NO: 5734021 - DNA, 25 bp, Homo sapien
gtgaactgaaaggccacagcttggt

SEQ ID NO: 5734022 - DNA, 25 bp, Homo sapien
ttttaacttcaaataccactgtaat

SEQ ID NO: 5734023 - DNA, 25 bp, Homo sapien
aagacgaattggtttgatttcctcc

SEQ ID NO: 5734024 - DNA, 25 bp, Homo sapien
ctcgtcctcggaggtagatgtactc

SEQ ID NO: 5734025 - DNA, 25 bp, Homo sapien
gtagcgtcctcgatggtacacgacg

SEQ ID NO: 5734026 - DNA, 25 bp, Homo sapien
atgggaaggaatggaaatccacgtc

SEQ ID NO: 5734027 - DNA, 25 bp, Homo sapien
tgagcatcttttatgtgtcaggcac

SEQ ID NO: 5734028 - DNA, 25 bp, Homo sapien
gctgctgaggggtctggcttgttga

SEQ ID NO: 5734029 - DNA, 25 bp, Homo sapien
ttcataagaggcctcaccgactgta

SEQ ID NO: 5734030 - DNA, 25 bp, Homo sapien
ctggcccagggaactctgtctcctg

SEQ ID NO: 5734031 - DNA, 25 bp, Homo sapien
tactcccaaaggtgggccacgatcg

SEQ ID NO: 5734032 - DNA, 25 bp, Homo sapien
accacgtaaaggcagaagaggtgac

SEQ ID NO: 5734033 - DNA, 25 bp, Homo sapien
caggccggtgccaaacagcacgccg

SEQ ID NO: 5734034 - DNA, 25 bp, Homo sapien
gagtgaccgtgaactgaaaggccac

SEQ ID NO: 5734035 - DNA, 25 bp, Homo sapien
tgaagacaacaaacgtgaacgactt

SEQ ID NO: 5734036 - DNA, 25 bp, Homo sapien
ggtacacgccagtgatgatgccgtt

SEQ ID NO: 5734037 - DNA, 25 bp, Homo sapien
agcgatgtctggaagctgtacaaca

SEQ ID NO: 5734038 - DNA, 25 bp, Homo sapien
atggcccgcacgaagtcgcatgact

SEQ ID NO: 5734039 - DNA, 25 bp, Homo sapien
cccaggagtgttcagcgttgaggcc

SEQ ID NO: 5734040 - DNA, 25 bp, Homo sapien
tggcgtagctgtccattgacgtatc

SEQ ID NO: 5734041 - DNA, 25 bp, Homo sapien
agccaactggaggggcttgccgggt

SEQ ID NO: 5734042 - DNA, 25 bp, Homo sapien
gttccaccgtctgggccgggtccac

SEQ ID NO: 5734043 - DNA, 25 bp, Homo sapien
ggcaggcgaggcagcgatgtctgga

SEQ ID NO: 5734044 - DNA, 25 bp, Homo sapien
tgccgtgctcagtgaacatccaccc

SEQ ID NO: 5734045 - DNA, 25 bp, Homo sapien
cttcttccttcataagaggcctcac

SEQ ID NO: 5734046 - DNA, 25 bp, Homo sapien
tgatgatgccgttcttgaatctgat

SEQ ID NO: 5734047 - DNA, 25 bp, Homo sapien
cttgctgtctctcatgtgctggatg

SEQ ID NO: 5734048 - DNA, 25 bp, Homo sapien
gggctcgtgcgacatttcttgatga

SEQ ID NO: 5734049 - DNA, 25 bp, Homo sapien
ctggaggggcttgccgggtacacgc

SEQ ID NO: 5734050 - DNA, 25 bp, Homo sapien
ccgggatgtcccactgcagcctggt

SEQ ID NO: 5734051 - DNA, 25 bp, Homo sapien
tccaccatggcccgcacgaagtcgc

SEQ ID NO: 5734052 - DNA, 25 bp, Homo sapien
tgtatccttcttcagtttcatctaa

SEQ ID NO: 5734053 - DNA, 25 bp, Homo sapien
gtcaggcactgttctcagcattgag

SEQ ID NO: 5734054 - DNA, 25 bp, Homo sapien
tttccactttgtctcaagtatctga

SEQ ID NO: 5734055 - DNA, 25 bp, Homo sapien
tcccggtccagtttgcgcctgtaaa

SEQ ID NO: 5734056 - DNA, 25 bp, Homo sapien
tgttcagcgttgaggcccatcttcc

SEQ ID NO: 5734057 - DNA, 25 bp, Homo sapien
tcggcctgaaaagatcttgaccata

SEQ ID NO: 5734058 - DNA, 25 bp, Homo sapien
gcgttgccggctcttgctgcctgaa

SEQ ID NO: 5734059 - DNA, 25 bp, Homo sapien
ctgcctgaatgtgagttggaaggat

SEQ ID NO: 5734060 - DNA, 25 bp, Homo sapien
ctctgttccaccgtctgggccgggt

SEQ ID NO: 5734061 - DNA, 25 bp, Homo sapien
caacaaacgtgaacgacttgtcaaa

SEQ ID NO: 5734062 - DNA, 25 bp, Homo sapien
catccgtttgaagtcttcttccttc

SEQ ID NO: 5734063 - DNA, 25 bp, Homo sapien
tgagcggagcagagtggaatcgtgg

SEQ ID NO: 5734064 - DNA, 25 bp, Homo sapien
gtagatacctgttcacagtgtcttt

SEQ ID NO: 5734065 - DNA, 25 bp, Homo sapien
atctgatgaacttctttttccagga

SEQ ID NO: 5734066 - DNA, 25 bp, Homo sapien
agcaggatggcatggatggcgttgc

SEQ ID NO: 5734067 - DNA, 25 bp, Homo sapien
gatcctctgcatctgctgctccatc

SEQ ID NO: 5734068 - DNA, 25 bp, Homo sapien
gctgatgcttctcagacgccaactt

SEQ ID NO: 5734069 - DNA, 25 bp, Homo sapien
gcagatccatggcataatagttgct

SEQ ID NO: 5734070 - DNA, 25 bp, Homo sapien
gaggcctcgtatgtgaggcaaaact

SEQ ID NO: 5734071 - DNA, 25 bp, Homo sapien
gagagcagcactttcagggagtagc

SEQ ID NO: 5734072 - DNA, 25 bp, Homo sapien
cgattgatttttgcaattattccta

SEQ ID NO: 5734073 - DNA, 25 bp, Homo sapien
catcttcccgtttttgaagacaaca

SEQ ID NO: 5734074 - DNA, 25 bp, Homo sapien
tatctgaacttggtccttgacttat

SEQ ID NO: 5734075 - DNA, 25 bp, Homo sapien
agccgcccatcatggtagagccaga

SEQ ID NO: 5734076 - DNA, 25 bp, Homo sapien
tggatcccaaaagacgaattggttt

SEQ ID NO: 5734077 - DNA, 25 bp, Homo sapien
gggactccacagcgagatatttaga

SEQ ID NO: 5734078 - DNA, 25 bp, Homo sapien
atgtgaggcaaaacttgcccatgtc

SEQ ID NO: 5734079 - DNA, 25 bp, Homo sapien
tcttgatgattcctttaccaaaggc

SEQ ID NO: 5734080 - DNA, 25 bp, Homo sapien
gggccacccacaggccggtgccaaa

SEQ ID NO: 5734081 - DNA, 25 bp, Homo sapien
ttttatgtgtcaggcactgttctca

SEQ ID NO: 5734082 - DNA, 25 bp, Homo sapien
ccagctgcacaaaggcgtctgggct

SEQ ID NO: 5734083 - DNA, 25 bp, Homo sapien
cgccagtgatgatgccgttcttgaa

SEQ ID NO: 5734084 - DNA, 25 bp, Homo sapien
tgatgaggttctctcccacaaggat

SEQ ID NO: 5734085 - DNA, 25 bp, Homo sapien
atttttgcaattattcctaacgagg

SEQ ID NO: 5734086 - DNA, 25 bp, Homo sapien
tgtcgcctttgcagtgcccatcctc

SEQ ID NO: 5734087 - DNA, 25 bp, Homo sapien
ccatggcccgcacgaagtcgcatga

SEQ ID NO: 5734088 - DNA, 25 bp, Homo sapien
tcccctctcggaagagccgggtcat

SEQ ID NO: 5734089 - DNA, 25 bp, Homo sapien
tggaatcgtggatcccaaaagacga

SEQ ID NO: 5734090 - DNA, 25 bp, Homo sapien
gtcctcccctctcggaagagccggg

SEQ ID NO: 5734091 - DNA, 25 bp, Homo sapien
agttgctgttcaccatgagcggccc

SEQ ID NO: 5734092 - DNA, 25 bp, Homo sapien
tgcagcctggtggggtacggaatgt

SEQ ID NO: 5734093 - DNA, 25 bp, Homo sapien
caagagaacttggaagaaatgtgga

SEQ ID NO: 5734094 - DNA, 25 bp, Homo sapien
caccatgagcggccctcgtcctcgg

SEQ ID NO: 5734095 - DNA, 25 bp, Homo sapien
ggtccaccatggcccgcacgaagtc

SEQ ID NO: 5734096 - DNA, 25 bp, Homo sapien
ttccttcataagaggcctcaccgac

SEQ ID NO: 5734097 - DNA, 25 bp, Homo sapien
tacgacacaccatagccgtcatcag

SEQ ID NO: 5734098 - DNA, 25 bp, Homo sapien
tgctgcctgaatgtgagttggaagg

SEQ ID NO: 5734099 - DNA, 25 bp, Homo sapien
gtagtgcgccagctggagggccagc

SEQ ID NO: 5734100 - DNA, 25 bp, Homo sapien
ggctacgaatgggaaggaatggaaa

SEQ ID NO: 5734101 - DNA, 25 bp, Homo sapien
aggatgtacgacacaccatagccgt

SEQ ID NO: 5734102 - DNA, 25 bp, Homo sapien
tgccagaagatttgcggtgttcagg

SEQ ID NO: 5734103 - DNA, 25 bp, Homo sapien
atgctgagactttccactttgtctc

SEQ ID NO: 5734104 - DNA, 25 bp, Homo sapien
accacgttcttcgtctggctggaca

SEQ ID NO: 5734105 - DNA, 25 bp, Homo sapien
agacaccacgtaaaggcagaagagg

SEQ ID NO: 5734106 - DNA, 25 bp, Homo sapien
cccacgtccaaaataggcctgacga

SEQ ID NO: 5734107 - DNA, 25 bp, Homo sapien
ttgtccaggatcctctgcatctgct

SEQ ID NO: 5734108 - DNA, 25 bp, Homo sapien
ccaacttgaacaacttcagcctctg

SEQ ID NO: 5734109 - DNA, 25 bp, Homo sapien
aattattcctaacgaggggtcgatc

SEQ ID NO: 5734110 - DNA, 25 bp, Homo sapien
gtcgctcacgtaatttgtagcccac

SEQ ID NO: 5734111 - DNA, 25 bp, Homo sapien
gcgtacatcgttgtcatcacgccca

SEQ ID NO: 5734112 - DNA, 25 bp, Homo sapien
cgactcatcttgccgtgctcagtga

SEQ ID NO: 5734113 - DNA, 25 bp, Homo sapien
gggcttgccgggtacacgccagtga

SEQ ID NO: 5734114 - DNA, 25 bp, Homo sapien
ttgatgattcctttaccaaaggcta

SEQ ID NO: 5734115 - DNA, 25 bp, Homo sapien
aaacttgcccatgtccttgtagtgc

SEQ ID NO: 5734116 - DNA, 25 bp, Homo sapien
gccgggtacacgccagtgatgatgc

SEQ ID NO: 5734117 - DNA, 25 bp, Homo sapien
tgccgttcttgaatctgatgaactt

SEQ ID NO: 5734118 - DNA, 25 bp, Homo sapien
acttataatccccgtctcagggcaa

SEQ ID NO: 5734119 - DNA, 25 bp, Homo sapien
actgaaaggccacagcttggtgagc

SEQ ID NO: 5734120 - DNA, 25 bp, Homo sapien
tggaggcctcgtatgtgaggcaaaa

SEQ ID NO: 5734121 - DNA, 25 bp, Homo sapien
aaggaaaggggactccacagcgaga

SEQ ID NO: 5734122 - DNA, 25 bp, Homo sapien
ttgccgggtacacgccagtgatgat

SEQ ID NO: 5734123 - DNA, 25 bp, Homo sapien
agcatcaagagactgcttatttttc

SEQ ID NO: 5734124 - DNA, 25 bp, Homo sapien
agcaagtgctgtcatccgtttgaag

SEQ ID NO: 5734125 - DNA, 25 bp, Homo sapien
ggatccgggaagtattaaacatccg

SEQ ID NO: 5734126 - DNA, 25 bp, Homo sapien
ggcccagggaactctgtctcctgcg

SEQ ID NO: 5734127 - DNA, 25 bp, Homo sapien
taacgtcacgaagaacgctgctttc

SEQ ID NO: 5734128 - DNA, 25 bp, Homo sapien
tgctttctccacagcatcaagagac

SEQ ID NO: 5734129 - DNA, 25 bp, Homo sapien
aatgttcggattgatgtcgcctttg

SEQ ID NO: 5734130 - DNA, 25 bp, Homo sapien
gagtagcgcatggtgacgatgaggg

SEQ ID NO: 5734131 - DNA, 25 bp, Homo sapien
gggcttcagcagccgcccatcatgg

SEQ ID NO: 5734132 - DNA, 25 bp, Homo sapien
gattttaacttcaaataccactgta

SEQ ID NO: 5734133 - DNA, 25 bp, Homo sapien
tctgccatcttcagagagtaccgag

SEQ ID NO: 5734134 - DNA, 25 bp, Homo sapien
gcccatgtccttgtagtgcgccagc

SEQ ID NO: 5734135 - DNA, 25 bp, Homo sapien
agaacttggaagaaatgtggaaatt

SEQ ID NO: 5734136 - DNA, 25 bp, Homo sapien
gatttggcgtagctgtccattgacg

SEQ ID NO: 5734137 - DNA, 25 bp, Homo sapien
cgtctcagggcaagagaacttggaa

SEQ ID NO: 5734138 - DNA, 25 bp, Homo sapien
cgatggtacacgacgatgtgcttgc

SEQ ID NO: 5734139 - DNA, 25 bp, Homo sapien
ttggtgagcttctgccatcttcaga

SEQ ID NO: 5734140 - DNA, 25 bp, Homo sapien
ggccggtgccaaacagcacgccgct

SEQ ID NO: 5734141 - DNA, 25 bp, Homo sapien
tcagaggactcatgttgagaatttt

SEQ ID NO: 5734142 - DNA, 25 bp, Homo sapien
aaaattctcaacatgagtcctctga

SEQ ID NO: 5734143 - DNA, 25 bp, Homo sapien
aacctggttgcgcacacgcgatgaa

SEQ ID NO: 5734144 - DNA, 25 bp, Homo sapien
ttcatcgcgtgtgcgcaaccaggtt

SEQ ID NO: 5734145 - DNA, 25 bp, Homo sapien
ctcggtctcggaatctggtcccaaa

SEQ ID NO: 5734146 - DNA, 25 bp, Homo sapien
tttgggaccagattccgagaccgag

SEQ ID NO: 5734147 - DNA, 25 bp, Homo sapien
aaaattattactatcaatgctagca

SEQ ID NO: 5734148 - DNA, 25 bp, Homo sapien
tgctagcattgatagtaataatttt

SEQ ID NO: 5734149 - DNA, 25 bp, Homo sapien
gggggcgggccgcgcacgaggcctt

SEQ ID NO: 5734150 - DNA, 25 bp, Homo sapien
aaggcctcgtgcgcggcccgccccc

SEQ ID NO: 5734151 - DNA, 25 bp, Homo sapien
actcgggctgcagtcgccgggggcg

SEQ ID NO: 5734152 - DNA, 25 bp, Homo sapien
cgcccccggcgactgcagcccgagt

SEQ ID NO: 5734153 - DNA, 25 bp, Homo sapien
ccaggttcggacgacgaatgtagac

SEQ ID NO: 5734154 - DNA, 25 bp, Homo sapien
gtctacattcgtcgtccgaacctgg

SEQ ID NO: 5734155 - DNA, 25 bp, Homo sapien
ccttttcgttcgtatatgtgcaaaa

SEQ ID NO: 5734156 - DNA, 25 bp, Homo sapien
ttttgcacatatacgaacgaaaagg

SEQ ID NO: 5734157 - DNA, 25 bp, Homo sapien
gaccggggagtcctgaccccacgtc

SEQ ID NO: 5734158 - DNA, 25 bp, Homo sapien
gacgtggggtcaggactccccggtc

SEQ ID NO: 5734159 - DNA, 25 bp, Homo sapien
cgccacctttgcttcccgctccttc

SEQ ID NO: 5734160 - DNA, 25 bp, Homo sapien
cctgggatcctcatcgccaagcaaa

SEQ ID NO: 5734161 - DNA, 25 bp, Homo sapien
agctggagatcaagctgagcaacaa

SEQ ID NO: 5734162 - DNA, 25 bp, Homo sapien
tttgggccagtccatttttggaggt

SEQ ID NO: 5734163 - DNA, 25 bp, Homo sapien
gagaaagtccacacaggctggagac

SEQ ID NO: 5734164 - DNA, 25 bp, Homo sapien
gagagcacaagacgggcaacatccg

SEQ ID NO: 5734165 - DNA, 25 bp, Homo sapien
gcccccactctcccgggccgcccac

SEQ ID NO: 5734166 - DNA, 25 bp, Homo sapien
gcttgccgctctgaaacagacagag

SEQ ID NO: 5734167 - DNA, 25 bp, Homo sapien
ggacccggccaaagacagggagctg

SEQ ID NO: 5734168 - DNA, 25 bp, Homo sapien
cggagaaagtccacacaggctggag

SEQ ID NO: 5734169 - DNA, 25 bp, Homo sapien
gtcccgccacctttgcttcccgctc

SEQ ID NO: 5734170 - DNA, 25 bp, Homo sapien
tttccaaacattcaaagccaatagc

SEQ ID NO: 5734171 - DNA, 25 bp, Homo sapien
tggtaggatctgtccatgggatgga

SEQ ID NO: 5734172 - DNA, 25 bp, Homo sapien
ccaaaaaggtcagcacaaaggcctt

SEQ ID NO: 5734173 - DNA, 25 bp, Homo sapien
caccggtgattcccagaacctggga

SEQ ID NO: 5734174 - DNA, 25 bp, Homo sapien
cacagagcggcagagagacctggag

SEQ ID NO: 5734175 - DNA, 25 bp, Homo sapien
aattgagcgctgaatcgtgtcccat

SEQ ID NO: 5734176 - DNA, 25 bp, Homo sapien
ggcccagctcattactttctccctt

SEQ ID NO: 5734177 - DNA, 25 bp, Homo sapien
cctggctctcacaggagctctctgc

SEQ ID NO: 5734178 - DNA, 25 bp, Homo sapien
ccacacaggctggagacgacctcat

SEQ ID NO: 5734179 - DNA, 25 bp, Homo sapien
aagcctggaatggtcccccctccgc

SEQ ID NO: 5734180 - DNA, 25 bp, Homo sapien
tccaccggtgattcccagaacctgg

SEQ ID NO: 5734181 - DNA, 25 bp, Homo sapien
gaatgagaattgctttcgtatagtt

SEQ ID NO: 5734182 - DNA, 25 bp, Homo sapien
tcattactttctccctttctctacc

SEQ ID NO: 5734183 - DNA, 25 bp, Homo sapien
ccggaacagcagctgctgaaaccaa

SEQ ID NO: 5734184 - DNA, 25 bp, Homo sapien
aaggaaaacaccatcacaataaact

SEQ ID NO: 5734185 - DNA, 25 bp, Homo sapien
aggggtcactgtcacatgcttgtgc

SEQ ID NO: 5734186 - DNA, 25 bp, Homo sapien
aaagccctcacagagcggcagagag

SEQ ID NO: 5734187 - DNA, 25 bp, Homo sapien
tccagatctggggttgggtcatgac

SEQ ID NO: 5734188 - DNA, 25 bp, Homo sapien
ccagctaccaattttagaatattat

SEQ ID NO: 5734189 - DNA, 25 bp, Homo sapien
ctgggctcccaccatggggcccatg

SEQ ID NO: 5734190 - DNA, 25 bp, Homo sapien
tccatgggatggagaaccactctgt

SEQ ID NO: 5734191 - DNA, 25 bp, Homo sapien
acacaggctggagacgacctcatgc

SEQ ID NO: 5734192 - DNA, 25 bp, Homo sapien
aaagacatgaagaagtgcgaccacc

SEQ ID NO: 5734193 - DNA, 25 bp, Homo sapien
caccatcacaataaactgtgtgacg

SEQ ID NO: 5734194 - DNA, 25 bp, Homo sapien
gtggcttagtaaactactctgtgga

SEQ ID NO: 5734195 - DNA, 25 bp, Homo sapien
cagtgagggcagaattcaacaagca

SEQ ID NO: 5734196 - DNA, 25 bp, Homo sapien
cactaggttgtcgcctttcaggcag

SEQ ID NO: 5734197 - DNA, 25 bp, Homo sapien
ccaaacccttacttggtgtctgcac

SEQ ID NO: 5734198 - DNA, 25 bp, Homo sapien
agagatggtgaccaccacattggag

SEQ ID NO: 5734199 - DNA, 25 bp, Homo sapien
aaccaaagcacagtcgagcccgtgg

SEQ ID NO: 5734200 - DNA, 25 bp, Homo sapien
tcccagaacctgggatcctcatcgc

SEQ ID NO: 5734201 - DNA, 25 bp, Homo sapien
cggccaggggctgcgcttcgccgcg

SEQ ID NO: 5734202 - DNA, 25 bp, Homo sapien
tctcattagaggaagctttccaaag

SEQ ID NO: 5734203 - DNA, 25 bp, Homo sapien
caggatggaactacctcattcggca

SEQ ID NO: 5734204 - DNA, 25 bp, Homo sapien
aaggcaacggcaccgtggctgggtt

SEQ ID NO: 5734205 - DNA, 25 bp, Homo sapien
gggccgcccaccacaggctcttaat

SEQ ID NO: 5734206 - DNA, 25 bp, Homo sapien
ggctcctgtcttcccagacccacca

SEQ ID NO: 5734207 - DNA, 25 bp, Homo sapien
tggtgattccagaagggtgacccgg

SEQ ID NO: 5734208 - DNA, 25 bp, Homo sapien
ggaggatcagggtagggaggtctct

SEQ ID NO: 5734209 - DNA, 25 bp, Homo sapien
gtggatgatttccaaacattcaaag

SEQ ID NO: 5734210 - DNA, 25 bp, Homo sapien
tgaccaccacattggagctagagcg

SEQ ID NO: 5734211 - DNA, 25 bp, Homo sapien
ggtcatccttccacctggctggcag

SEQ ID NO: 5734212 - DNA, 25 bp, Homo sapien
aggatctgtccatgggatggagaac

SEQ ID NO: 5734213 - DNA, 25 bp, Homo sapien
agccaggtgtcaggatcagaatcat

SEQ ID NO: 5734214 - DNA, 25 bp, Homo sapien
accaattttagaatattatttcttg

SEQ ID NO: 5734215 - DNA, 25 bp, Homo sapien
gagaagcccctgatgaacttccgtg

SEQ ID NO: 5734216 - DNA, 25 bp, Homo sapien
ctccctttctctaccacagcaaaca

SEQ ID NO: 5734217 - DNA, 25 bp, Homo sapien
gcagctggagatcaagctgagcaac

SEQ ID NO: 5734218 - DNA, 25 bp, Homo sapien
tggtccttgccgagttttgtagggg

SEQ ID NO: 5734219 - DNA, 25 bp, Homo sapien
acaggctcttaatggggccgggtca

SEQ ID NO: 5734220 - DNA, 25 bp, Homo sapien
ttaatctctaattttttggcgcctc

SEQ ID NO: 5734221 - DNA, 25 bp, Homo sapien
tgcattctgggagtccacatctggc

SEQ ID NO: 5734222 - DNA, 25 bp, Homo sapien
acatccgccctgtggacatggagat

SEQ ID NO: 5734223 - DNA, 25 bp, Homo sapien
caccacaggctcttaatggggccgg

SEQ ID NO: 5734224 - DNA, 25 bp, Homo sapien
agctgctgaaaccaaccgagtggag

SEQ ID NO: 5734225 - DNA, 25 bp, Homo sapien
gttcacattagaaaaatgcctaata

SEQ ID NO: 5734226 - DNA, 25 bp, Homo sapien
aggcttggctcctgtcttcccagac

SEQ ID NO: 5734227 - DNA, 25 bp, Homo sapien
tagggaggtctctgtctctaagcca

SEQ ID NO: 5734228 - DNA, 25 bp, Homo sapien
gagcgctgaatcgtgtcccatgaga

SEQ ID NO: 5734229 - DNA, 25 bp, Homo sapien
caggggctgcgcttcgccgcgggcg

SEQ ID NO: 5734230 - DNA, 25 bp, Homo sapien
gagcaacaagacagaggaggacatc

SEQ ID NO: 5734231 - DNA, 25 bp, Homo sapien
gggccgggagaagcgtgagcgaggg

SEQ ID NO: 5734232 - DNA, 25 bp, Homo sapien
gccagcaagctggggcctgtccgcc

SEQ ID NO: 5734233 - DNA, 25 bp, Homo sapien
acagtgaatggataccacgcatcag

SEQ ID NO: 5734234 - DNA, 25 bp, Homo sapien
gctgtcccttgtacagttttctgtc

SEQ ID NO: 5734235 - DNA, 25 bp, Homo sapien
agggctttggaggatcagggtaggg

SEQ ID NO: 5734236 - DNA, 25 bp, Homo sapien
aactccttggcttcacaggaggaag

SEQ ID NO: 5734237 - DNA, 25 bp, Homo sapien
taagccaggtgtcaggatcagaatc

SEQ ID NO: 5734238 - DNA, 25 bp, Homo sapien
gcttcacagcgaggtggagaagccc

SEQ ID NO: 5734239 - DNA, 25 bp, Homo sapien
agttttgtaggggtcactgtcacat

SEQ ID NO: 5734240 - DNA, 25 bp, Homo sapien
tgccagcccttcccagtctcattag

SEQ ID NO: 5734241 - DNA, 25 bp, Homo sapien
ttcacagcgaggtggagaagcccct

SEQ ID NO: 5734242 - DNA, 25 bp, Homo sapien
ttgcttcccgctccttctggacatt

SEQ ID NO: 5734243 - DNA, 25 bp, Homo sapien
gctgcaggtcccggacggcggctgg

SEQ ID NO: 5734244 - DNA, 25 bp, Homo sapien
ggcatgaaacagacatgttcaacca

SEQ ID NO: 5734245 - DNA, 25 bp, Homo sapien
ttcggcaaattagccccaaattgag

SEQ ID NO: 5734246 - DNA, 25 bp, Homo sapien
tttcttcatctttcccattgaccac

SEQ ID NO: 5734247 - DNA, 25 bp, Homo sapien
cccccagctgcttcctcggggaggc

SEQ ID NO: 5734248 - DNA, 25 bp, Homo sapien
cctcaagttctctgccaagcttcac

SEQ ID NO: 5734249 - DNA, 25 bp, Homo sapien
gctcccaccatggggcccatgccga

SEQ ID NO: 5734250 - DNA, 25 bp, Homo sapien
tccagctggctcccttgtctccagg

SEQ ID NO: 5734251 - DNA, 25 bp, Homo sapien
ttgccgaccttcgcaagcagctcgc

SEQ ID NO: 5734252 - DNA, 25 bp, Homo sapien
gctcgtccaaaggcttcagggatgg

SEQ ID NO: 5734253 - DNA, 25 bp, Homo sapien
gagctacctgtcgcctcagggccgg

SEQ ID NO: 5734254 - DNA, 25 bp, Homo sapien
cacatgagtgtccgaaaatccaccg

SEQ ID NO: 5734255 - DNA, 25 bp, Homo sapien
acttgggaagctttcagtgctgctg

SEQ ID NO: 5734256 - DNA, 25 bp, Homo sapien
cccctccgccgggagaagaaagcca

SEQ ID NO: 5734257 - DNA, 25 bp, Homo sapien
ggacgaagcagaagttcacctcaag

SEQ ID NO: 5734258 - DNA, 25 bp, Homo sapien
gtaggggtcactgtcacatgcttgt

SEQ ID NO: 5734259 - DNA, 25 bp, Homo sapien
ctgcggcatgaaacagacatgttca

SEQ ID NO: 5734260 - DNA, 25 bp, Homo sapien
tctccaccatgtcagtctaaagagt

SEQ ID NO: 5734261 - DNA, 25 bp, Homo sapien
atcccccagatggctctgtcttctt

SEQ ID NO: 5734262 - DNA, 25 bp, Homo sapien
gcagttctcctgggattccagccag

SEQ ID NO: 5734263 - DNA, 25 bp, Homo sapien
ggatgatttccaaacattcaaagcc

SEQ ID NO: 5734264 - DNA, 25 bp, Homo sapien
caattttagaatattatttcttggt

SEQ ID NO: 5734265 - DNA, 25 bp, Homo sapien
ttgggagaggcgtgggcccaggtga

SEQ ID NO: 5734266 - DNA, 25 bp, Homo sapien
ctgggactgctgtcccttgtacagt

SEQ ID NO: 5734267 - DNA, 25 bp, Homo sapien
tccagccagccctggctctcacagg

SEQ ID NO: 5734268 - DNA, 25 bp, Homo sapien
acagaggaggacatcaagaaggcgc

SEQ ID NO: 5734269 - DNA, 25 bp, Homo sapien
gcgagctacgtgcagttgctggaga

SEQ ID NO: 5734270 - DNA, 25 bp, Homo sapien
atctctacaaccaggcccagtccaa

SEQ ID NO: 5734271 - DNA, 25 bp, Homo sapien
gtcacttttctcttgttcttgaaac

SEQ ID NO: 5734272 - DNA, 25 bp, Homo sapien
ttcagtgctgctgtttggcccagct

SEQ ID NO: 5734273 - DNA, 25 bp, Homo sapien
gtgtcaggatcagaatcatgggtag

SEQ ID NO: 5734274 - DNA, 25 bp, Homo sapien
tcagttatcaagacctcatccagct

SEQ ID NO: 5734275 - DNA, 25 bp, Homo sapien
aaggctccttgggagaggcgtgggc

SEQ ID NO: 5734276 - DNA, 25 bp, Homo sapien
ttatcaagacctcatccagctcgtc

SEQ ID NO: 5734277 - DNA, 25 bp, Homo sapien
gaaggcttggctcctgtcttcccag

SEQ ID NO: 5734278 - DNA, 25 bp, Homo sapien
tgtccgaaaatccaccggtgattcc

SEQ ID NO: 5734279 - DNA, 25 bp, Homo sapien
gtgccctgtgcacctttgggctgcc

SEQ ID NO: 5734280 - DNA, 25 bp, Homo sapien
tttctttatgaaaaatgggtgctag

SEQ ID NO: 5734281 - DNA, 25 bp, Homo sapien
ttccacctggctggcagagctacct

SEQ ID NO: 5734282 - DNA, 25 bp, Homo sapien
catctgcagtgagggcagaattcaa

SEQ ID NO: 5734283 - DNA, 25 bp, Homo sapien
gtcactggtgggcactggacaggca

SEQ ID NO: 5734284 - DNA, 25 bp, Homo sapien
cccggcgagctacgtgcagttgctg

SEQ ID NO: 5734285 - DNA, 25 bp, Homo sapien
gggttgggtcatgacaccagctacc

SEQ ID NO: 5734286 - DNA, 25 bp, Homo sapien
tgcttgtgccctggaagccccaagg

SEQ ID NO: 5734287 - DNA, 25 bp, Homo sapien
gcggacgaagcagaagttcacctca

SEQ ID NO: 5734288 - DNA, 25 bp, Homo sapien
ttcaagaaagacatgaagaagtgcg

SEQ ID NO: 5734289 - DNA, 25 bp, Homo sapien
agacatgaagaagtgcgaccaccac

SEQ ID NO: 5734290 - DNA, 25 bp, Homo sapien
agctttcagtgctgctgtttggccc

SEQ ID NO: 5734291 - DNA, 25 bp, Homo sapien
ctcctggtaggatctgtccatggga

SEQ ID NO: 5734292 - DNA, 25 bp, Homo sapien
tgtctctaagccaggtgtcaggatc

SEQ ID NO: 5734293 - DNA, 25 bp, Homo sapien
ccatattcccaggcccagaagacag

SEQ ID NO: 5734294 - DNA, 25 bp, Homo sapien
ctctgaaacagacagaggctggaac

SEQ ID NO: 5734295 - DNA, 25 bp, Homo sapien
ttgaagagatggtgaccaccacatt

SEQ ID NO: 5734296 - DNA, 25 bp, Homo sapien
acctacgtgaagacctcctggtagg

SEQ ID NO: 5734297 - DNA, 25 bp, Homo sapien
gacagaggctggaactttgtggtcc

SEQ ID NO: 5734298 - DNA, 25 bp, Homo sapien
cgaagaacttagctaagctctctca

SEQ ID NO: 5734299 - DNA, 25 bp, Homo sapien
ccactctcccgggccgcccaccaca

SEQ ID NO: 5734300 - DNA, 25 bp, Homo sapien
ttcccggcgagctacgtgcagttgc

SEQ ID NO: 5734301 - DNA, 25 bp, Homo sapien
tcaaccaaagcacagtcgagcccgt

SEQ ID NO: 5734302 - DNA, 25 bp, Homo sapien
tctttatttttttcccattgcattc

SEQ ID NO: 5734303 - DNA, 25 bp, Homo sapien
tctctaagccaggtgtcaggatcag

SEQ ID NO: 5734304 - DNA, 25 bp, Homo sapien
ccaccaatgagaccacctgggaacg

SEQ ID NO: 5734305 - DNA, 25 bp, Homo sapien
tcgtccaaaggcttcagggatggaa

SEQ ID NO: 5734306 - DNA, 25 bp, Homo sapien
tgtccagatctggggttgggtcatg

SEQ ID NO: 5734307 - DNA, 25 bp, Homo sapien
acgaccaccaatgagaccacctggg

SEQ ID NO: 5734308 - DNA, 25 bp, Homo sapien
cccagacccaccatgcctggagagg

SEQ ID NO: 5734309 - DNA, 25 bp, Homo sapien
ctcattcggcaaattagccccaaat

SEQ ID NO: 5734310 - DNA, 25 bp, Homo sapien
tgtcgcctttcaggcagtgtcccgc

SEQ ID NO: 5734311 - DNA, 25 bp, Homo sapien
atccttccacctggctggcagagct

SEQ ID NO: 5734312 - DNA, 25 bp, Homo sapien
tgcccacatgagtgtccgaaaatcc

SEQ ID NO: 5734313 - DNA, 25 bp, Homo sapien
caagctgagcaacaagacagaggag

SEQ ID NO: 5734314 - DNA, 25 bp, Homo sapien
gtggacccggccaaagacagggagc

SEQ ID NO: 5734315 - DNA, 25 bp, Homo sapien
tctctgtctctaagccaggtgtcag

SEQ ID NO: 5734316 - DNA, 25 bp, Homo sapien
ggctgggactgctgtcccttgtaca

SEQ ID NO: 5734317 - DNA, 25 bp, Homo sapien
tatggcagggctgggactgctgtcc

SEQ ID NO: 5734318 - DNA, 25 bp, Homo sapien
agcagagcaaggaaaacaccatcac

SEQ ID NO: 5734319 - DNA, 25 bp, Homo sapien
tccagagtcctctgttcatccctgg

SEQ ID NO: 5734320 - DNA, 25 bp, Homo sapien
atcagggaccccagcgcaccctcca

SEQ ID NO: 5734321 - DNA, 25 bp, Homo sapien
caagatattttgagtacaatatggc

SEQ ID NO: 5734322 - DNA, 25 bp, Homo sapien
aaaacaccatcacaataaactgtgt

SEQ ID NO: 5734323 - DNA, 25 bp, Homo sapien
ctctgtggatgatttccaaacattc

SEQ ID NO: 5734324 - DNA, 25 bp, Homo sapien
acaaatgcagaaggaaatgtcagaa

SEQ ID NO: 5734325 - DNA, 25 bp, Homo sapien
ttgttcttgaaacattgcaaccaaa

SEQ ID NO: 5734326 - DNA, 25 bp, Homo sapien
gctcaggttggcccagtttgggcca

SEQ ID NO: 5734327 - DNA, 25 bp, Homo sapien
ggctcattgacttttccattacatc

SEQ ID NO: 5734328 - DNA, 25 bp, Homo sapien
cccagcagttctcctgggattccag

SEQ ID NO: 5734329 - DNA, 25 bp, Homo sapien
ccagggctttggaggatcagggtag

SEQ ID NO: 5734330 - DNA, 25 bp, Homo sapien
tgaaaccaaccgagtggagctactg

SEQ ID NO: 5734331 - DNA, 25 bp, Homo sapien
cggcggtactatgtcaacacgacca

SEQ ID NO: 5734332 - DNA, 25 bp, Homo sapien
gtccacatctggctttctcagccac

SEQ ID NO: 5734333 - DNA, 25 bp, Homo sapien
agccgctatgcctcggtggagaagg

SEQ ID NO: 5734334 - DNA, 25 bp, Homo sapien
cgtgggcccaggtgaagaagagcct

SEQ ID NO: 5734335 - DNA, 25 bp, Homo sapien
cagcacctgtgccagtacacgcagc

SEQ ID NO: 5734336 - DNA, 25 bp, Homo sapien
gtttgaagagatggtgaccaccaca

SEQ ID NO: 5734337 - DNA, 25 bp, Homo sapien
cagtcgagcccgtggatcagctgct

SEQ ID NO: 5734338 - DNA, 25 bp, Homo sapien
gacttattaatctctaattttttgg

SEQ ID NO: 5734339 - DNA, 25 bp, Homo sapien
caaattgagcgctgaatcgtgtccc

SEQ ID NO: 5734340 - DNA, 25 bp, Homo sapien
ccagcgcaccctccagagactgccc

SEQ ID NO: 5734341 - DNA, 25 bp, Homo sapien
gggggctcccccatattcccaggcc

SEQ ID NO: 5734342 - DNA, 25 bp, Homo sapien
gttcaaccaaagcacagtcgagccc

SEQ ID NO: 5734343 - DNA, 25 bp, Homo sapien
tcagtcaacgtgctagaatccgatg

SEQ ID NO: 5734344 - DNA, 25 bp, Homo sapien
ggaaggcgagaaggaggacgggctc

SEQ ID NO: 5734345 - DNA, 25 bp, Homo sapien
acaggagctctctgcctccaacagt

SEQ ID NO: 5734346 - DNA, 25 bp, Homo sapien
ctgctgcaggtcccggacggcggct

SEQ ID NO: 5734347 - DNA, 25 bp, Homo sapien
aattcaacaagcacaactcactggt

SEQ ID NO: 5734348 - DNA, 25 bp, Homo sapien
gcctggaatggtcccccctccgccg

SEQ ID NO: 5734349 - DNA, 25 bp, Homo sapien
tcttcttgggtatggcagggctggg

SEQ ID NO: 5734350 - DNA, 25 bp, Homo sapien
ggagagggtagagatgatccggcag

SEQ ID NO: 5734351 - DNA, 25 bp, Homo sapien
gcggctggaggtggagagggtagag

SEQ ID NO: 5734352 - DNA, 25 bp, Homo sapien
tcgcaagcagctcgccagccgctat

SEQ ID NO: 5734353 - DNA, 25 bp, Homo sapien
acgcagctgcggcatgaaacagaca

SEQ ID NO: 5734354 - DNA, 25 bp, Homo sapien
ccagggtagctcaggttggcccagt

SEQ ID NO: 5734355 - DNA, 25 bp, Homo sapien
cctcggtggagaaggcccggaaagc

SEQ ID NO: 5734356 - DNA, 25 bp, Homo sapien
aggaggacatcaagaaggcgcggag

SEQ ID NO: 5734357 - DNA, 25 bp, Homo sapien
acacgcagctgcggcatgaaacaga

SEQ ID NO: 5734358 - DNA, 25 bp, Homo sapien
tgggtagaaggtgccattcagctca

SEQ ID NO: 5734359 - DNA, 25 bp, Homo sapien
gctggtgattccagaagggtgaccc

SEQ ID NO: 5734360 - DNA, 25 bp, Homo sapien
cctcatcgccaagcaaaaagcagag

SEQ ID NO: 5734361 - DNA, 25 bp, Homo sapien
tcttcctccagctggctcccttgtc

SEQ ID NO: 5734362 - DNA, 25 bp, Homo sapien
ccattgcattctgggagtccacatc

SEQ ID NO: 5734363 - DNA, 25 bp, Homo sapien
cgccatctgtaaagtctcctctgga

SEQ ID NO: 5734364 - DNA, 25 bp, Homo sapien
tggcgcctctttcattgaatgagaa

SEQ ID NO: 5734365 - DNA, 25 bp, Homo sapien
gagatgatccggcagcacctgtgcc

SEQ ID NO: 5734366 - DNA, 25 bp, Homo sapien
tctgcacctcctttccctctctcca

SEQ ID NO: 5734367 - DNA, 25 bp, Homo sapien
ctgtcacatgcttgtgccctggaag

SEQ ID NO: 5734368 - DNA, 25 bp, Homo sapien
tgggcctgtgcagcttcggggggtc

SEQ ID NO: 5734369 - DNA, 25 bp, Homo sapien
agcacagtcgagcccgtggatcagc

SEQ ID NO: 5734370 - DNA, 25 bp, Homo sapien
tcccttgtctccagggctttggagg

SEQ ID NO: 5734371 - DNA, 25 bp, Homo sapien
ctttcagtgctgctgtttggcccag

SEQ ID NO: 5734372 - DNA, 25 bp, Homo sapien
gcttcagggatggaaacaaaccagc

SEQ ID NO: 5734373 - DNA, 25 bp, Homo sapien
caccatggggcccatgccgagtgga

SEQ ID NO: 5734374 - DNA, 25 bp, Homo sapien
tgcccttgtctctgaggctgaagac

SEQ ID NO: 5734375 - DNA, 25 bp, Homo sapien
gttttaggaggaaggcttggctcct

SEQ ID NO: 5734376 - DNA, 25 bp, Homo sapien
cactgttcatcaccaggggttttag

SEQ ID NO: 5734377 - DNA, 25 bp, Homo sapien
ccaaagacagggagctgtgggtcag

SEQ ID NO: 5734378 - DNA, 25 bp, Homo sapien
ccccactctcccgggccgcccacca

SEQ ID NO: 5734379 - DNA, 25 bp, Homo sapien
ccctttctctaccacagcaaacaca

SEQ ID NO: 5734380 - DNA, 25 bp, Homo sapien
gccaatccatccttcccccagctgc

SEQ ID NO: 5734381 - DNA, 25 bp, Homo sapien
aagctggggcctgtccgccacggtg

SEQ ID NO: 5734382 - DNA, 25 bp, Homo sapien
ttcagggatggaaacaaaccagctc

SEQ ID NO: 5734383 - DNA, 25 bp, Homo sapien
acaggctggagacgacctcatgcgc

SEQ ID NO: 5734384 - DNA, 25 bp, Homo sapien
ctttctctaccacagcaaacacatt

SEQ ID NO: 5734385 - DNA, 25 bp, Homo sapien
cttccaatccctggaaaagtctggt

SEQ ID NO: 5734386 - DNA, 25 bp, Homo sapien
aggaaggcttggctcctgtcttccc

SEQ ID NO: 5734387 - DNA, 25 bp, Homo sapien
tcgtgtcccatgagatcaggcgcca

SEQ ID NO: 5734388 - DNA, 25 bp, Homo sapien
agaagcgtgagcgaggggcagattc

SEQ ID NO: 5734389 - DNA, 25 bp, Homo sapien
tcagaactccttggcttcacaggag

SEQ ID NO: 5734390 - DNA, 25 bp, Homo sapien
ggctccgtggctggttcccggcgag

SEQ ID NO: 5734391 - DNA, 25 bp, Homo sapien
tctctaattttttggcgcctctttc

SEQ ID NO: 5734392 - DNA, 25 bp, Homo sapien
gggctcccaccatggggcccatgcc

SEQ ID NO: 5734393 - DNA, 25 bp, Homo sapien
tctctgccaagcttcacagcgaggt

SEQ ID NO: 5734394 - DNA, 25 bp, Homo sapien
ttagctaagctctctcagaactcct

SEQ ID NO: 5734395 - DNA, 25 bp, Homo sapien
tcttaatggggccgggtcagtccta

SEQ ID NO: 5734396 - DNA, 25 bp, Homo sapien
ttgagcgctgaatcgtgtcccatga

SEQ ID NO: 5734397 - DNA, 25 bp, Homo sapien
ctccttggcttcacaggaggaaggc

SEQ ID NO: 5734398 - DNA, 25 bp, Homo sapien
gaacttagctaagctctctcagaac

SEQ ID NO: 5734399 - DNA, 25 bp, Homo sapien
ccagtctcattagaggaagctttcc

SEQ ID NO: 5734400 - DNA, 25 bp, Homo sapien
gtgccattcagctcacagccgcacc

SEQ ID NO: 5734401 - DNA, 25 bp, Homo sapien
cggcaaattagccccaaattgagcg

SEQ ID NO: 5734402 - DNA, 25 bp, Homo sapien
ccccagcgcaccctccagagactgc

SEQ ID NO: 5734403 - DNA, 25 bp, Homo sapien
actctttcccccctcatcccctcaa

SEQ ID NO: 5734404 - DNA, 25 bp, Homo sapien
tcagctgcttcgaaaagtggacccg

SEQ ID NO: 5734405 - DNA, 25 bp, Homo sapien
agagggtagagatgatccggcagca

SEQ ID NO: 5734406 - DNA, 25 bp, Homo sapien
ggagatcaagctgagcaacaagaca

SEQ ID NO: 5734407 - DNA, 25 bp, Homo sapien
ccaccacattgccgaccttcgcaag

SEQ ID NO: 5734408 - DNA, 25 bp, Homo sapien
gaagaaagccagacggtcatccttc

SEQ ID NO: 5734409 - DNA, 25 bp, Homo sapien
tgatccggcagcacctgtgccagta

SEQ ID NO: 5734410 - DNA, 25 bp, Homo sapien
ggtgtctgcacctcctttccctctc

SEQ ID NO: 5734411 - DNA, 25 bp, Homo sapien
acagggagctgtgggtcagagagca

SEQ ID NO: 5734412 - DNA, 25 bp, Homo sapien
ttcccagacccaccatgcctggaga

SEQ ID NO: 5734413 - DNA, 25 bp, Homo sapien
gaccaccacattgccgaccttcgca

SEQ ID NO: 5734414 - DNA, 25 bp, Homo sapien
agacatgttcaaccaaagcacagtc

SEQ ID NO: 5734415 - DNA, 25 bp, Homo sapien
gcaaacaaatgcagaaggaaatgtc

SEQ ID NO: 5734416 - DNA, 25 bp, Homo sapien
ctggtctttcagtcaacgtgctaga

SEQ ID NO: 5734417 - DNA, 25 bp, Homo sapien
gagcggctggaggtggagagggtag

SEQ ID NO: 5734418 - DNA, 25 bp, Homo sapien
cagtgtcccgccacctttgcttccc

SEQ ID NO: 5734419 - DNA, 25 bp, Homo sapien
ctgctccagaaacagctgaagggca

SEQ ID NO: 5734420 - DNA, 25 bp, Homo sapien
cagcaaacacattctccaccatgtc

SEQ ID NO: 5734421 - DNA, 25 bp, Homo sapien
ttgacctgcacatctgcagtgaggg

SEQ ID NO: 5734422 - DNA, 25 bp, Homo sapien
tgcaggtcccggacggcggctggtg

SEQ ID NO: 5734423 - DNA, 25 bp, Homo sapien
gccactgttcatcaccaggggtttt

SEQ ID NO: 5734424 - DNA, 25 bp, Homo sapien
atcgccaagcaaaaagcagagcaag

SEQ ID NO: 5734425 - DNA, 25 bp, Homo sapien
aatctctaattttttggcgcctctt

SEQ ID NO: 5734426 - DNA, 25 bp, Homo sapien
tagttcacattagaaaaatgcctaa

SEQ ID NO: 5734427 - DNA, 25 bp, Homo sapien
tcgcctcagggccggcggtactatg

SEQ ID NO: 5734428 - DNA, 25 bp, Homo sapien
gggctcccccatattcccaggccca

SEQ ID NO: 5734429 - DNA, 25 bp, Homo sapien
cagagccctgcaccaaacccttact

SEQ ID NO: 5734430 - DNA, 25 bp, Homo sapien
tttcttggtttctttatgaaaaatg

SEQ ID NO: 5734431 - DNA, 25 bp, Homo sapien
tggagctactgcgactacttctggg

SEQ ID NO: 5734432 - DNA, 25 bp, Homo sapien
acctcatccagctcgtccaaaggct

SEQ ID NO: 5734433 - DNA, 25 bp, Homo sapien
tgcgaagaacttagctaagctctct

SEQ ID NO: 5734434 - DNA, 25 bp, Homo sapien
accttcgcaagcagctcgccagccg

SEQ ID NO: 5734435 - DNA, 25 bp, Homo sapien
gccgcccaccacaggctcttaatgg

SEQ ID NO: 5734436 - DNA, 25 bp, Homo sapien
cccacatgagtgtccgaaaatccac

SEQ ID NO: 5734437 - DNA, 25 bp, Homo sapien
ccggaaagccctcacagagcggcag

SEQ ID NO: 5734438 - DNA, 25 bp, Homo sapien
tggccacactaggttgtcgcctttc

SEQ ID NO: 5734439 - DNA, 25 bp, Homo sapien
aatcgtgtcccatgagatcaggcgc

SEQ ID NO: 5734440 - DNA, 25 bp, Homo sapien
cagaattcatccgggaaaggataaa

SEQ ID NO: 5734441 - DNA, 25 bp, Homo sapien
ttctccctttctctaccacagcaaa

SEQ ID NO: 5734442 - DNA, 25 bp, Homo sapien
gaaggtgccattcagctcacagccg

SEQ ID NO: 5734443 - DNA, 25 bp, Homo sapien
accaccacattggagctagagcggc

SEQ ID NO: 5734444 - DNA, 25 bp, Homo sapien
aggcttcagggatggaaacaaacca

SEQ ID NO: 5734445 - DNA, 25 bp, Homo sapien
ggctgcgcttcgccgcgggcgagct

SEQ ID NO: 5734446 - DNA, 25 bp, Homo sapien
cagctcacagccgcacccagaatcc

SEQ ID NO: 5734447 - DNA, 25 bp, Homo sapien
aatattatttcttggtttctttatg

SEQ ID NO: 5734448 - DNA, 25 bp, Homo sapien
cacagcgaggtggagaagcccctga

SEQ ID NO: 5734449 - DNA, 25 bp, Homo sapien
gtaaactactctgtggatgatttcc

SEQ ID NO: 5734450 - DNA, 25 bp, Homo sapien
cccgtggatcagctgcttcgaaaag

SEQ ID NO: 5734451 - DNA, 25 bp, Homo sapien
cggacagcctagctgggggctcccc

SEQ ID NO: 5734452 - DNA, 25 bp, Homo sapien
ttaatggggccgggtcagtcctaca

SEQ ID NO: 5734453 - DNA, 25 bp, Homo sapien
ctctaccacagcaaacacattctcc

SEQ ID NO: 5734454 - DNA, 25 bp, Homo sapien
tggagaaggcccggaaagccctcac

SEQ ID NO: 5734455 - DNA, 25 bp, Homo sapien
ctaccacagcaaacacattctccac

SEQ ID NO: 5734456 - DNA, 25 bp, Homo sapien
ccgcacccagaatcctttgcagccc

SEQ ID NO: 5734457 - DNA, 25 bp, Homo sapien
ggaaaacaccatcacaataaactgt

SEQ ID NO: 5734458 - DNA, 25 bp, Homo sapien
tgcctccaacagtgaatggatacca

SEQ ID NO: 5734459 - DNA, 25 bp, Homo sapien
gggtcagagagcacaagacgggcaa

SEQ ID NO: 5734460 - DNA, 25 bp, Homo sapien
cccagatggctctgtcttcttgggt

SEQ ID NO: 5734461 - DNA, 25 bp, Homo sapien
tttgtggtccttgccgagttttgta

SEQ ID NO: 5734462 - DNA, 25 bp, Homo sapien
cttcgcaagcagctcgccagccgct

SEQ ID NO: 5734463 - DNA, 25 bp, Homo sapien
gcaaccaaaaaggtcagcacaaagg

SEQ ID NO: 5734464 - DNA, 25 bp, Homo sapien
cgctgtgtggatctctacaaccagg

SEQ ID NO: 5734465 - DNA, 25 bp, Homo sapien
cgtgcagttgctggagaagcctgga

SEQ ID NO: 5734466 - DNA, 25 bp, Homo sapien
tcagtcctacatgtgagatgggtta

SEQ ID NO: 5734467 - DNA, 25 bp, Homo sapien
caggtcccggacggcggctggtggg

SEQ ID NO: 5734468 - DNA, 25 bp, Homo sapien
cattctgggagtccacatctggctt

SEQ ID NO: 5734469 - DNA, 25 bp, Homo sapien
ggaaagccctcacagagcggcagag

SEQ ID NO: 5734470 - DNA, 25 bp, Homo sapien
tcccaggcccagaagacagacccac

SEQ ID NO: 5734471 - DNA, 25 bp, Homo sapien
ccagtccaaatggtttgaagagatg

SEQ ID NO: 5734472 - DNA, 25 bp, Homo sapien
gataccacgcatcagggaccccagc

SEQ ID NO: 5734473 - DNA, 25 bp, Homo sapien
gctctcacaggagctctctgcctcc

SEQ ID NO: 5734474 - DNA, 25 bp, Homo sapien
ttacttggtgtctgcacctcctttc

SEQ ID NO: 5734475 - DNA, 25 bp, Homo sapien
tctttgccatcccccagatggctct

SEQ ID NO: 5734476 - DNA, 25 bp, Homo sapien
agaatattatttcttggtttcttta

SEQ ID NO: 5734477 - DNA, 25 bp, Homo sapien
aaactactctgtggatgatttccaa

SEQ ID NO: 5734478 - DNA, 25 bp, Homo sapien
aatccgatgacttattaatctctaa

SEQ ID NO: 5734479 - DNA, 25 bp, Homo sapien
attagccccaaattgagcgctgaat

SEQ ID NO: 5734480 - DNA, 25 bp, Homo sapien
cctgtggacatggagatctagatgg

SEQ ID NO: 5734481 - DNA, 25 bp, Homo sapien
caaacattcaaagccaatagccttg

SEQ ID NO: 5734482 - DNA, 25 bp, Homo sapien
gagaccacctgggaacgtcccagca

SEQ ID NO: 5734483 - DNA, 25 bp, Homo sapien
agctgcttcgaaaagtggacccggc

SEQ ID NO: 5734484 - DNA, 25 bp, Homo sapien
ttgaatgagaattgctttcgtatag

SEQ ID NO: 5734485 - DNA, 25 bp, Homo sapien
cttcccagtctcattagaggaagct

SEQ ID NO: 5734486 - DNA, 25 bp, Homo sapien
ttccagaagggtgacccggacagcc

SEQ ID NO: 5734487 - DNA, 25 bp, Homo sapien
gagaaggcccggaaagccctcacag

SEQ ID NO: 5734488 - DNA, 25 bp, Homo sapien
ccgtgagaacttcaagaaagacatg

SEQ ID NO: 5734489 - DNA, 25 bp, Homo sapien
ttcagctcacagccgcacccagaat

SEQ ID NO: 5734490 - DNA, 25 bp, Homo sapien
ccttggcttcacaggaggaaggctc

SEQ ID NO: 5734491 - DNA, 25 bp, Homo sapien
agacctcatccagctcgtccaaagg

SEQ ID NO: 5734492 - DNA, 25 bp, Homo sapien
catctttcccattgaccactttggg

SEQ ID NO: 5734493 - DNA, 25 bp, Homo sapien
gaagaagtgcgaccaccacattgcc

SEQ ID NO: 5734494 - DNA, 25 bp, Homo sapien
cgcccaccacaggctcttaatgggg

SEQ ID NO: 5734495 - DNA, 25 bp, Homo sapien
ccgtggctggttcccggcgagctac

SEQ ID NO: 5734496 - DNA, 25 bp, Homo sapien
ggcagtgtcccgccacctttgcttc

SEQ ID NO: 5734497 - DNA, 25 bp, Homo sapien
tgccgagtggatgccccccaccctc

SEQ ID NO: 5734498 - DNA, 25 bp, Homo sapien
gctcttcctccagctggctcccttg

SEQ ID NO: 5734499 - DNA, 25 bp, Homo sapien
tattaatctctaattttttggcgcc

SEQ ID NO: 5734500 - DNA, 25 bp, Homo sapien
gccccaaggctcttcctccagctgg

SEQ ID NO: 5734501 - DNA, 25 bp, Homo sapien
acggcaccgtggctgggtttgaact

SEQ ID NO: 5734502 - DNA, 25 bp, Homo sapien
gaaacattgcaaccaaaaaggtcag

SEQ ID NO: 5734503 - DNA, 25 bp, Homo sapien
gaacgtcccagcagttctcctggga

SEQ ID NO: 5734504 - DNA, 25 bp, Homo sapien
ccggtgattcccagaacctgggatc

SEQ ID NO: 5734505 - DNA, 25 bp, Homo sapien
tctttcagtcaacgtgctagaatcc

SEQ ID NO: 5734506 - DNA, 25 bp, Homo sapien
caatccatccttcccccagctgctt

SEQ ID NO: 5734507 - DNA, 25 bp, Homo sapien
tttttggcgcctctttcattgaatg

SEQ ID NO: 5734508 - DNA, 25 bp, Homo sapien
tctaattttttggcgcctctttcat

SEQ ID NO: 5734509 - DNA, 25 bp, Homo sapien
gccccccaccctctctcctgggcca

SEQ ID NO: 5734510 - DNA, 25 bp, Homo sapien
gaagttcacctcaagttctctgcca

SEQ ID NO: 5734511 - DNA, 25 bp, Homo sapien
ctttcgtatagttcacattagaaaa

SEQ ID NO: 5734512 - DNA, 25 bp, Homo sapien
aaaatgcctaatatactaaagtaaa

SEQ ID NO: 5734513 - DNA, 25 bp, Homo sapien
aagtggacccggccaaagacaggga

SEQ ID NO: 5734514 - DNA, 25 bp, Homo sapien
acaactcactggtctttcagtcaac

SEQ ID NO: 5734515 - DNA, 25 bp, Homo sapien
cctgatgaacttccgtgagaacttc

SEQ ID NO: 5734516 - DNA, 25 bp, Homo sapien
cggtgccctgtgcacctttgggctg

SEQ ID NO: 5734517 - DNA, 25 bp, Homo sapien
gaagcagaagttcacctcaagttct

SEQ ID NO: 5734518 - DNA, 25 bp, Homo sapien
ttgccgagttttgtaggggtcactg

SEQ ID NO: 5734519 - DNA, 25 bp, Homo sapien
gggccggcggtactatgtcaacacg

SEQ ID NO: 5734520 - DNA, 25 bp, Homo sapien
tctaaagagtctaaaggggccggga

SEQ ID NO: 5734521 - DNA, 25 bp, Homo sapien
attccagagtcctctgttcatccct

SEQ ID NO: 5734522 - DNA, 25 bp, Homo sapien
gctggtgggaaggcgagaaggagga

SEQ ID NO: 5734523 - DNA, 25 bp, Homo sapien
ccagaatcctttgcagccctccttc

SEQ ID NO: 5734524 - DNA, 25 bp, Homo sapien
tgcagtgagggcagaattcaacaag

SEQ ID NO: 5734525 - DNA, 25 bp, Homo sapien
gggagaggcgtgggcccaggtgaag

SEQ ID NO: 5734526 - DNA, 25 bp, Homo sapien
tatgaaaaatgggtgctagtggtaa

SEQ ID NO: 5734527 - DNA, 25 bp, Homo sapien
gtgagaacttcaagaaagacatgaa

SEQ ID NO: 5734528 - DNA, 25 bp, Homo sapien
cactgtcacatgcttgtgccctgga

SEQ ID NO: 5734529 - DNA, 25 bp, Homo sapien
cagtgctgctgtttggcccagctca

SEQ ID NO: 5734530 - DNA, 25 bp, Homo sapien
gaagactatgcgaagaacttagcta

SEQ ID NO: 5734531 - DNA, 25 bp, Homo sapien
tcccagtctcattagaggaagcttt

SEQ ID NO: 5734532 - DNA, 25 bp, Homo sapien
gcccagtccaaatggtttgaagaga

SEQ ID NO: 5734533 - DNA, 25 bp, Homo sapien
agaagacagacccacagccctgccc

SEQ ID NO: 5734534 - DNA, 25 bp, Homo sapien
ataaagattgaagaagactatgcga

SEQ ID NO: 5734535 - DNA, 25 bp, Homo sapien
aactcactggtctttcagtcaacgt

SEQ ID NO: 5734536 - DNA, 25 bp, Homo sapien
tttccattacatctgaggattccag

SEQ ID NO: 5734537 - DNA, 25 bp, Homo sapien
acccccaaggcaacggcaccgtggc

SEQ ID NO: 5734538 - DNA, 25 bp, Homo sapien
tccaccatgtcagtctaaagagtct

SEQ ID NO: 5734539 - DNA, 25 bp, Homo sapien
ctggtctgagtgtgacttgggaagc

SEQ ID NO: 5734540 - DNA, 25 bp, Homo sapien
tcccaccatggggcccatgccgagt

SEQ ID NO: 5734541 - DNA, 25 bp, Homo sapien
atgtcagaattcatccgggaaagga

SEQ ID NO: 5734542 - DNA, 25 bp, Homo sapien
accaaacgttgtcacttttctcttg

SEQ ID NO: 5734543 - DNA, 25 bp, Homo sapien
acaggcatagcagactctcttgtgg

SEQ ID NO: 5734544 - DNA, 25 bp, Homo sapien
catggagatctagatgggcctgtgc

SEQ ID NO: 5734545 - DNA, 25 bp, Homo sapien
tggaatggtcccccctccgccggga

SEQ ID NO: 5734546 - DNA, 25 bp, Homo sapien
ctccttctggacattccagagccct

SEQ ID NO: 5734547 - DNA, 25 bp, Homo sapien
cactggtgggcactggacaggcata

SEQ ID NO: 5734548 - DNA, 25 bp, Homo sapien
gccgggtcagtcctacatgtgagat

SEQ ID NO: 5734549 - DNA, 25 bp, Homo sapien
ggggctgggctcccaccatggggcc

SEQ ID NO: 5734550 - DNA, 25 bp, Homo sapien
aaggggccgggagaagcgtgagcga

SEQ ID NO: 5734551 - DNA, 25 bp, Homo sapien
gctctctcagaactccttggcttca

SEQ ID NO: 5734552 - DNA, 25 bp, Homo sapien
tcttcccagacccaccatgcctgga

SEQ ID NO: 5734553 - DNA, 25 bp, Homo sapien
tttctcttgttcttgaaacattgca

SEQ ID NO: 5734554 - DNA, 25 bp, Homo sapien
cacaataaactgtgtgacgttccct

SEQ ID NO: 5734555 - DNA, 25 bp, Homo sapien
atcacgctgctgcaggtcccggacg

SEQ ID NO: 5734556 - DNA, 25 bp, Homo sapien
tagaaaaatgcctaatatactaaag

SEQ ID NO: 5734557 - DNA, 25 bp, Homo sapien
tgtgacttgggaagctttcagtgct

SEQ ID NO: 5734558 - DNA, 25 bp, Homo sapien
gtgcttgccgctctgaaacagacag

SEQ ID NO: 5734559 - DNA, 25 bp, Homo sapien
tccgccgggagaagaaagccagacg

SEQ ID NO: 5734560 - DNA, 25 bp, Homo sapien
gctccagaaacagctgaagggcaaa

SEQ ID NO: 5734561 - DNA, 25 bp, Homo sapien
ctgggtttgaactactgctccagaa

SEQ ID NO: 5734562 - DNA, 25 bp, Homo sapien
gccctgcaccaaacccttacttggt

SEQ ID NO: 5734563 - DNA, 25 bp, Homo sapien
ggatgccccccaccctctctcctgg

SEQ ID NO: 5734564 - DNA, 25 bp, Homo sapien
ctctttcattgaatgagaattgctt

SEQ ID NO: 5734565 - DNA, 25 bp, Homo sapien
atctgtaaagtctcctctggaaatg

SEQ ID NO: 5734566 - DNA, 25 bp, Homo sapien
tgaatcgtgtcccatgagatcaggc

SEQ ID NO: 5734567 - DNA, 25 bp, Homo sapien
aactacctcattcggcaaattagcc

SEQ ID NO: 5734568 - DNA, 25 bp, Homo sapien
gagagacctggagatgaagacccag

SEQ ID NO: 5734569 - DNA, 25 bp, Homo sapien
ctttggaggatcagggtagggaggt

SEQ ID NO: 5734570 - DNA, 25 bp, Homo sapien
aatcctttgcagccctccttcttta

SEQ ID NO: 5734571 - DNA, 25 bp, Homo sapien
cgaaaatccaccggtgattcccaga

SEQ ID NO: 5734572 - DNA, 25 bp, Homo sapien
tgggttagggcaagtctttgccatc

SEQ ID NO: 5734573 - DNA, 25 bp, Homo sapien
atgtcaacacgaccaccaatgagac

SEQ ID NO: 5734574 - DNA, 25 bp, Homo sapien
ggccaaagacagggagctgtgggtc

SEQ ID NO: 5734575 - DNA, 25 bp, Homo sapien
gtgctagtggtaattgctttgtggc

SEQ ID NO: 5734576 - DNA, 25 bp, Homo sapien
ccaggcccagtccaaatggtttgaa

SEQ ID NO: 5734577 - DNA, 25 bp, Homo sapien
cttcacctacgtgaagacctcctgg

SEQ ID NO: 5734578 - DNA, 25 bp, Homo sapien
agaactccttggcttcacaggagga

SEQ ID NO: 5734579 - DNA, 25 bp, Homo sapien
ggtggagaaggcccggaaagccctc

SEQ ID NO: 5734580 - DNA, 25 bp, Homo sapien
cagcaagctggggcctgtccgccac

SEQ ID NO: 5734581 - DNA, 25 bp, Homo sapien
ggacggcggctggtgggaaggcgag

SEQ ID NO: 5734582 - DNA, 25 bp, Homo sapien
caacaagcacaactcactggtcttt

SEQ ID NO: 5734583 - DNA, 25 bp, Homo sapien
gggagagagctggtgattccagaag

SEQ ID NO: 5734584 - DNA, 25 bp, Homo sapien
ttgcagccctccttctttatttttt

SEQ ID NO: 5734585 - DNA, 25 bp, Homo sapien
gcctagctgggggctcccccatatt

SEQ ID NO: 5734586 - DNA, 25 bp, Homo sapien
gggaggggggctgggctcccaccat

SEQ ID NO: 5734587 - DNA, 25 bp, Homo sapien
cgttgtcacttttctcttgttcttg

SEQ ID NO: 5734588 - DNA, 25 bp, Homo sapien
tgaccactttgggtttgacctgcac

SEQ ID NO: 5734589 - DNA, 25 bp, Homo sapien
cttttctcttgttcttgaaacattg

SEQ ID NO: 5734590 - DNA, 25 bp, Homo sapien
cccagctgcttcctcggggaggccc

SEQ ID NO: 5734591 - DNA, 25 bp, Homo sapien
ctgttcatcaccaggggttttagga

SEQ ID NO: 5734592 - DNA, 25 bp, Homo sapien
cccaaggctcttcctccagctggct

SEQ ID NO: 5734593 - DNA, 25 bp, Homo sapien
ctacgtgaagacctcctggtaggat

SEQ ID NO: 5734594 - DNA, 25 bp, Homo sapien
tcctctggaaatgccaatccatcct

SEQ ID NO: 5734595 - DNA, 25 bp, Homo sapien
ttcgaaaagtggacccggccaaaga

SEQ ID NO: 5734596 - DNA, 25 bp, Homo sapien
ctccagggctttggaggatcagggt

SEQ ID NO: 5734597 - DNA, 25 bp, Homo sapien
cagacccaccatgcctggagaggtc

SEQ ID NO: 5734598 - DNA, 25 bp, Homo sapien
agagtctaaaggggccgggagaagc

SEQ ID NO: 5734599 - DNA, 25 bp, Homo sapien
tgaaaaatgggtgctagtggtaatt

SEQ ID NO: 5734600 - DNA, 25 bp, Homo sapien
gcctctttcattgaatgagaattgc

SEQ ID NO: 5734601 - DNA, 25 bp, Homo sapien
tagtaaactactctgtggatgattt

SEQ ID NO: 5734602 - DNA, 25 bp, Homo sapien
cattgacttttccattacatctgag

SEQ ID NO: 5734603 - DNA, 25 bp, Homo sapien
ttggaggatcagggtagggaggtct

SEQ ID NO: 5734604 - DNA, 25 bp, Homo sapien
gcgaccaccacattgccgaccttcg

SEQ ID NO: 5734605 - DNA, 25 bp, Homo sapien
gctactgcgactacttctgggctga

SEQ ID NO: 5734606 - DNA, 25 bp, Homo sapien
ccttctggacattccagagccctgc

SEQ ID NO: 5734607 - DNA, 25 bp, Homo sapien
agcagaagttcacctcaagttctct

SEQ ID NO: 5734608 - DNA, 25 bp, Homo sapien
aggctcttaatggggccgggtcagt

SEQ ID NO: 5734609 - DNA, 25 bp, Homo sapien
cacggtgccctgtgcacctttgggc

SEQ ID NO: 5734610 - DNA, 25 bp, Homo sapien
aacgttgtcacttttctcttgttct

SEQ ID NO: 5734611 - DNA, 25 bp, Homo sapien
actactgctccagaaacagctgaag

SEQ ID NO: 5734612 - DNA, 25 bp, Homo sapien
ggcagcacctgtgccagtacacgca

SEQ ID NO: 5734613 - DNA, 25 bp, Homo sapien
cattcagctcacagccgcacccaga

SEQ ID NO: 5734614 - DNA, 25 bp, Homo sapien
ttcttgggtatggcagggctgggac

SEQ ID NO: 5734615 - DNA, 25 bp, Homo sapien
cagcagttctcctgggattccagcc

SEQ ID NO: 5734616 - DNA, 25 bp, Homo sapien
gcacaactcactggtctttcagtca

SEQ ID NO: 5734617 - DNA, 25 bp, Homo sapien
ttccgtgagaacttcaagaaagaca

SEQ ID NO: 5734618 - DNA, 25 bp, Homo sapien
cgaccttcgcaagcagctcgccagc

SEQ ID NO: 5734619 - DNA, 25 bp, Homo sapien
cccgctccttctggacattccagag

SEQ ID NO: 5734620 - DNA, 25 bp, Homo sapien
aacaagatattttgagtacaatatg

SEQ ID NO: 5734621 - DNA, 25 bp, Homo sapien
atgaacttccgtgagaacttcaaga

SEQ ID NO: 5734622 - DNA, 25 bp, Homo sapien
aacattgcaaccaaaaaggtcagca

SEQ ID NO: 5734623 - DNA, 25 bp, Homo sapien
caggtgaagaagagcctggcggacg

SEQ ID NO: 5734624 - DNA, 25 bp, Homo sapien
agttttctgtcactggtgggcactg

SEQ ID NO: 5734625 - DNA, 25 bp, Homo sapien
gaagagcctggcggacgaagcagaa

SEQ ID NO: 5734626 - DNA, 25 bp, Homo sapien
tggagacgacctcatgcgctgtgtg

SEQ ID NO: 5734627 - DNA, 25 bp, Homo sapien
tgatgaacttccgtgagaacttcaa

SEQ ID NO: 5734628 - DNA, 25 bp, Homo sapien
aggccttcacctacgtgaagacctc

SEQ ID NO: 5734629 - DNA, 25 bp, Homo sapien
tggatcagctgcttcgaaaagtgga

SEQ ID NO: 5734630 - DNA, 25 bp, Homo sapien
ttgccgctctgaaacagacagaggc

SEQ ID NO: 5734631 - DNA, 25 bp, Homo sapien
aagccaatagccttgttattaacaa

SEQ ID NO: 5734632 - DNA, 25 bp, Homo sapien
tcttggtttctttatgaaaaatggg

SEQ ID NO: 5734633 - DNA, 25 bp, Homo sapien
gggactgctgtcccttgtacagttt

SEQ ID NO: 5734634 - DNA, 25 bp, Homo sapien
gtacacgcagctgcggcatgaaaca

SEQ ID NO: 5734635 - DNA, 25 bp, Homo sapien
ccacgcatcagggaccccagcgcac

SEQ ID NO: 5734636 - DNA, 25 bp, Homo sapien
ggctggttcccggcgagctacgtgc

SEQ ID NO: 5734637 - DNA, 25 bp, Homo sapien
ctgctgtcccttgtacagttttctg

SEQ ID NO: 5734638 - DNA, 25 bp, Homo sapien
ccattgaccactttgggtttgacct

SEQ ID NO: 5734639 - DNA, 25 bp, Homo sapien
gatgccggaacagcagctgctgaaa

SEQ ID NO: 5734640 - DNA, 25 bp, Homo sapien
ccacctgggaacgtcccagcagttc

SEQ ID NO: 5734641 - DNA, 25 bp, Homo sapien
cagtctaaagagtctaaaggggccg

SEQ ID NO: 5734642 - DNA, 25 bp, Homo sapien
gctggggcctgtccgccacggtgcc

SEQ ID NO: 5734643 - DNA, 25 bp, Homo sapien
ggtctgagtgtgacttgggaagctt

SEQ ID NO: 5734644 - DNA, 25 bp, Homo sapien
cctgcccttgtctctgaggctgaag

SEQ ID NO: 5734645 - DNA, 25 bp, Homo sapien
gcgagctgatcacgctgctgcaggt

SEQ ID NO: 5734646 - DNA, 25 bp, Homo sapien
tcatccttccacctggctggcagag

SEQ ID NO: 5734647 - DNA, 25 bp, Homo sapien
ctggaaatgccaatccatccttccc

SEQ ID NO: 5734648 - DNA, 25 bp, Homo sapien
atgccctggaaatccatctttcttc

SEQ ID NO: 5734649 - DNA, 25 bp, Homo sapien
ggaaggctccttgggagaggcgtgg

SEQ ID NO: 5734650 - DNA, 25 bp, Homo sapien
atcctcatcgccaagcaaaaagcag

SEQ ID NO: 5734651 - DNA, 25 bp, Homo sapien
ttggcttcacaggaggaaggctcct

SEQ ID NO: 5734652 - DNA, 25 bp, Homo sapien
ggaagctttccaaagttctcagtta

SEQ ID NO: 5734653 - DNA, 25 bp, Homo sapien
ggagctgtgggtcagagagcacaag

SEQ ID NO: 5734654 - DNA, 25 bp, Homo sapien
ggctggaggtggagagggtagagat

SEQ ID NO: 5734655 - DNA, 25 bp, Homo sapien
gtctccagggctttggaggatcagg

SEQ ID NO: 5734656 - DNA, 25 bp, Homo sapien
gcccagtttgggccagtccattttt

SEQ ID NO: 5734657 - DNA, 25 bp, Homo sapien
acatcaagaaggcgcggagaaagtc

SEQ ID NO: 5734658 - DNA, 25 bp, Homo sapien
caaggctcttcctccagctggctcc

SEQ ID NO: 5734659 - DNA, 25 bp, Homo sapien
gctcttaatggggccgggtcagtcc

SEQ ID NO: 5734660 - DNA, 25 bp, Homo sapien
caacatccgccctgtggacatggag

SEQ ID NO: 5734661 - DNA, 25 bp, Homo sapien
tgatcacgctgctgcaggtcccgga

SEQ ID NO: 5734662 - DNA, 25 bp, Homo sapien
gtgggtcagagagcacaagacgggc

SEQ ID NO: 5734663 - DNA, 25 bp, Homo sapien
tcgcctttcaggcagtgtcccgcca

SEQ ID NO: 5734664 - DNA, 25 bp, Homo sapien
tgccggaacagcagctgctgaaacc

SEQ ID NO: 5734665 - DNA, 25 bp, Homo sapien
ttcccccctcatcccctcaaaccta

SEQ ID NO: 5734666 - DNA, 25 bp, Homo sapien
cgacctcatgcgctgtgtggatctc

SEQ ID NO: 5734667 - DNA, 25 bp, Homo sapien
ttccagggtagctcaggttggccca

SEQ ID NO: 5734668 - DNA, 25 bp, Homo sapien
ctgaaacagacagaggctggaactt

SEQ ID NO: 5734669 - DNA, 25 bp, Homo sapien
caacacgaccaccaatgagaccacc

SEQ ID NO: 5734670 - DNA, 25 bp, Homo sapien
gcagctgcggcatgaaacagacatg

SEQ ID NO: 5734671 - DNA, 25 bp, Homo sapien
ccctggaaaagtctggtctgagtgt

SEQ ID NO: 5734672 - DNA, 25 bp, Homo sapien
ggaactacctcattcggcaaattag

SEQ ID NO: 5734673 - DNA, 25 bp, Homo sapien
gggtttgaactactgctccagaaac

SEQ ID NO: 5734674 - DNA, 25 bp, Homo sapien
agaacctgggatcctcatcgccaag

SEQ ID NO: 5734675 - DNA, 25 bp, Homo sapien
gcctcagggccggcggtactatgtc

SEQ ID NO: 5734676 - DNA, 25 bp, Homo sapien
gttggcccagtttgggccagtccat

SEQ ID NO: 5734677 - DNA, 25 bp, Homo sapien
cgggctccgtggctggttcccggcg

SEQ ID NO: 5734678 - DNA, 25 bp, Homo sapien
ggtaattgctttgtggcttagtaaa

SEQ ID NO: 5734679 - DNA, 25 bp, Homo sapien
cgagtggagctactgcgactacttc

SEQ ID NO: 5734680 - DNA, 25 bp, Homo sapien
acgatgccggaacagcagctgctga

SEQ ID NO: 5734681 - DNA, 25 bp, Homo sapien
caaacgttgtcacttttctcttgtt

SEQ ID NO: 5734682 - DNA, 25 bp, Homo sapien
ccaggcccagaagacagacccacag

SEQ ID NO: 5734683 - DNA, 25 bp, Homo sapien
cgccgggagaagaaagccagacggt

SEQ ID NO: 5734684 - DNA, 25 bp, Homo sapien
taattttttggcgcctctttcattg

SEQ ID NO: 5734685 - DNA, 25 bp, Homo sapien
cagggccggcggtactatgtcaaca

SEQ ID NO: 5734686 - DNA, 25 bp, Homo sapien
aaaagtctggtctgagtgtgacttg

SEQ ID NO: 5734687 - DNA, 25 bp, Homo sapien
ccagacggtcatccttccacctggc

SEQ ID NO: 5734688 - DNA, 25 bp, Homo sapien
gacagacccacagccctgcccttgt

SEQ ID NO: 5734689 - DNA, 25 bp, Homo sapien
ccatcccccagatggctctgtcttc

SEQ ID NO: 5734690 - DNA, 25 bp, Homo sapien
gtgagcgaggggcagattctagtcg

SEQ ID NO: 5734691 - DNA, 25 bp, Homo sapien
tcaccaggggttttaggaggaaggc

SEQ ID NO: 5734692 - DNA, 25 bp, Homo sapien
caagtctttgccatcccccagatgg

SEQ ID NO: 5734693 - DNA, 25 bp, Homo sapien
atccctggaaaagtctggtctgagt

SEQ ID NO: 5734694 - DNA, 25 bp, Homo sapien
catttttggaggtcactctttcccc

SEQ ID NO: 5734695 - DNA, 25 bp, Homo sapien
aaactgtgtgacgttccctcaccca

SEQ ID NO: 5734696 - DNA, 25 bp, Homo sapien
cattcaaagccaatagccttgttat

SEQ ID NO: 5734697 - DNA, 25 bp, Homo sapien
gcttcgaaaagtggacccggccaaa

SEQ ID NO: 5734698 - DNA, 25 bp, Homo sapien
aacagacagaggctggaactttgtg

SEQ ID NO: 5734699 - DNA, 25 bp, Homo sapien
gaggcgtgggcccaggtgaagaaga

SEQ ID NO: 5734700 - DNA, 25 bp, Homo sapien
gactacttctgggctgataagaagg

SEQ ID NO: 5734701 - DNA, 25 bp, Homo sapien
acgaagcagaagttcacctcaagtt

SEQ ID NO: 5734702 - DNA, 25 bp, Homo sapien
gtcagtctaaagagtctaaaggggc

SEQ ID NO: 5734703 - DNA, 25 bp, Homo sapien
tcctacatgtgagatgggttagggc

SEQ ID NO: 5734704 - DNA, 25 bp, Homo sapien
tgagtgtccgaaaatccaccggtga

SEQ ID NO: 5734705 - DNA, 25 bp, Homo sapien
gccctggcccccactctcccgggcc

SEQ ID NO: 5734706 - DNA, 25 bp, Homo sapien
gacccacagccctgcccttgtctct

SEQ ID NO: 5734707 - DNA, 25 bp, Homo sapien
cctcacccagacacgatgccggaac

SEQ ID NO: 5734708 - DNA, 25 bp, Homo sapien
cctgcaccaaacccttacttggtgt

SEQ ID NO: 5734709 - DNA, 25 bp, Homo sapien
ccttccacctggctggcagagctac

SEQ ID NO: 5734710 - DNA, 25 bp, Homo sapien
gcaacaagacagaggaggacatcaa

SEQ ID NO: 5734711 - DNA, 25 bp, Homo sapien
ctacttctgggctgataagaaggac

SEQ ID NO: 5734712 - DNA, 25 bp, Homo sapien
ttcatccctgggatagagtgagccc

SEQ ID NO: 5734713 - DNA, 25 bp, Homo sapien
ccagccgctatgcctcggtggagaa

SEQ ID NO: 5734714 - DNA, 25 bp, Homo sapien
acccttacttggtgtctgcacctcc

SEQ ID NO: 5734715 - DNA, 25 bp, Homo sapien
ctcgtctcagaggccagcaagctgg

SEQ ID NO: 5734716 - DNA, 25 bp, Homo sapien
gcgtgagcgaggggcagattctagt

SEQ ID NO: 5734717 - DNA, 25 bp, Homo sapien
ttcccccagctgcttcctcggggag

SEQ ID NO: 5734718 - DNA, 25 bp, Homo sapien
atgacttattaatctctaatttttt

SEQ ID NO: 5734719 - DNA, 25 bp, Homo sapien
catgagatcaggcgccatctgtaaa

SEQ ID NO: 5734720 - DNA, 25 bp, Homo sapien
acaaaggccttcacctacgtgaaga

SEQ ID NO: 5734721 - DNA, 25 bp, Homo sapien
tggggccgggtcagtcctacatgtg

SEQ ID NO: 5734722 - DNA, 25 bp, Homo sapien
cacagtcgagcccgtggatcagctg

SEQ ID NO: 5734723 - DNA, 25 bp, Homo sapien
acgtgaagacctcctggtaggatct

SEQ ID NO: 5734724 - DNA, 25 bp, Homo sapien
tcatcaccaggggttttaggaggaa

SEQ ID NO: 5734725 - DNA, 25 bp, Homo sapien
gacccggacagcctagctgggggct

SEQ ID NO: 5734726 - DNA, 25 bp, Homo sapien
ttctgggctgataagaaggaccccc

SEQ ID NO: 5734727 - DNA, 25 bp, Homo sapien
ccgggagaagaaagccagacggtca

SEQ ID NO: 5734728 - DNA, 25 bp, Homo sapien
ttgacttttccattacatctgagga

SEQ ID NO: 5734729 - DNA, 25 bp, Homo sapien
gatgggttagggcaagtctttgcca

SEQ ID NO: 5734730 - DNA, 25 bp, Homo sapien
tggcagggctgggactgctgtccct

SEQ ID NO: 5734731 - DNA, 25 bp, Homo sapien
tactgctccagaaacagctgaaggg

SEQ ID NO: 5734732 - DNA, 25 bp, Homo sapien
tcatccgggaaaggataaagattga

SEQ ID NO: 5734733 - DNA, 25 bp, Homo sapien
ttcctcggggaggcccctgccccca

SEQ ID NO: 5734734 - DNA, 25 bp, Homo sapien
tctgcagtgagggcagaattcaaca

SEQ ID NO: 5734735 - DNA, 25 bp, Homo sapien
ggttcccggcgagctacgtgcagtt

SEQ ID NO: 5734736 - DNA, 25 bp, Homo sapien
gcccctgcccccaccctgccagccc

SEQ ID NO: 5734737 - DNA, 25 bp, Homo sapien
cctggtaggatctgtccatgggatg

SEQ ID NO: 5734738 - DNA, 25 bp, Homo sapien
tctttcttcatctttcccattgacc

SEQ ID NO: 5734739 - DNA, 25 bp, Homo sapien
agtggagctactgcgactacttctg

SEQ ID NO: 5734740 - DNA, 25 bp, Homo sapien
ccgagtggatgccccccaccctctc

SEQ ID NO: 5734741 - DNA, 25 bp, Homo sapien
tcaacgtgctagaatccgatgactt

SEQ ID NO: 5734742 - DNA, 25 bp, Homo sapien
ctcagggccggcggtactatgtcaa

SEQ ID NO: 5734743 - DNA, 25 bp, Homo sapien
cgccaagcaaaaagcagagcaagga

SEQ ID NO: 5734744 - DNA, 25 bp, Homo sapien
ccactctgtccagatctggggttgg

SEQ ID NO: 5734745 - DNA, 25 bp, Homo sapien
tctttcccccctcatcccctcaaac

SEQ ID NO: 5734746 - DNA, 25 bp, Homo sapien
gactctcttgtggccacactaggtt

SEQ ID NO: 5734747 - DNA, 25 bp, Homo sapien
ggatcagaatcatgggtagaaggtg

SEQ ID NO: 5734748 - DNA, 25 bp, Homo sapien
aaaggccttcacctacgtgaagacc

SEQ ID NO: 5734749 - DNA, 25 bp, Homo sapien
tagaaggtgccattcagctcacagc

SEQ ID NO: 5734750 - DNA, 25 bp, Homo sapien
tgtcgcctcagggccggcggtacta

SEQ ID NO: 5734751 - DNA, 25 bp, Homo sapien
gagcggcagagagacctggagatga

SEQ ID NO: 5734752 - DNA, 25 bp, Homo sapien
tttcccattgcattctgggagtcca

SEQ ID NO: 5734753 - DNA, 25 bp, Homo sapien
catgcgctgtgtggatctctacaac

SEQ ID NO: 5734754 - DNA, 25 bp, Homo sapien
agaaggaggacgggctccgtggctg

SEQ ID NO: 5734755 - DNA, 25 bp, Homo sapien
aggtgtcaggatcagaatcatgggt

SEQ ID NO: 5734756 - DNA, 25 bp, Homo sapien
cccatgagatcaggcgccatctgta

SEQ ID NO: 5734757 - DNA, 25 bp, Homo sapien
agggagctgtgggtcagagagcaca

SEQ ID NO: 5734758 - DNA, 25 bp, Homo sapien
atgggtgctagtggtaattgctttg

SEQ ID NO: 5734759 - DNA, 25 bp, Homo sapien
tactaaagtaaaccaaacgttgtca

SEQ ID NO: 5734760 - DNA, 25 bp, Homo sapien
gcaaggaaaacaccatcacaataaa

SEQ ID NO: 5734761 - DNA, 25 bp, Homo sapien
atggagaaccactctgtccagatct

SEQ ID NO: 5734762 - DNA, 25 bp, Homo sapien
ctgtggatgatttccaaacattcaa

SEQ ID NO: 5734763 - DNA, 25 bp, Homo sapien
atcatgggtagaaggtgccattcag

SEQ ID NO: 5734764 - DNA, 25 bp, Homo sapien
gcccccaccctgccagcccttccca

SEQ ID NO: 5734765 - DNA, 25 bp, Homo sapien
gcagaattcaacaagcacaactcac

SEQ ID NO: 5734766 - DNA, 25 bp, Homo sapien
tgcacctcctttccctctctccatc

SEQ ID NO: 5734767 - DNA, 25 bp, Homo sapien
gacctggagatgaagacccagcagc

SEQ ID NO: 5734768 - DNA, 25 bp, Homo sapien
gtgtcccgccacctttgcttcccgc

SEQ ID NO: 5734769 - DNA, 25 bp, Homo sapien
cctttgggctgccctggcccccact

SEQ ID NO: 5734770 - DNA, 25 bp, Homo sapien
acagccgcacccagaatcctttgca

SEQ ID NO: 5734771 - DNA, 25 bp, Homo sapien
ctgtcactggtgggcactggacagg

SEQ ID NO: 5734772 - DNA, 25 bp, Homo sapien
ccctcacagagcggcagagagacct

SEQ ID NO: 5734773 - DNA, 25 bp, Homo sapien
tagagcggctggaggtggagagggt

SEQ ID NO: 5734774 - DNA, 25 bp, Homo sapien
cagcagctgctgaaaccaaccgagt

SEQ ID NO: 5734775 - DNA, 25 bp, Homo sapien
gccgctctgaaacagacagaggctg

SEQ ID NO: 5734776 - DNA, 25 bp, Homo sapien
gctgaaaccaaccgagtggagctac

SEQ ID NO: 5734777 - DNA, 25 bp, Homo sapien
ccgggccgcccaccacaggctctta

SEQ ID NO: 5734778 - DNA, 25 bp, Homo sapien
cagccctgcccttgtctctgaggct

SEQ ID NO: 5734779 - DNA, 25 bp, Homo sapien
gccaatagccttgttattaacaaga

SEQ ID NO: 5734780 - DNA, 25 bp, Homo sapien
tgctggagaagcctggaatggtccc

SEQ ID NO: 5734781 - DNA, 25 bp, Homo sapien
gacctgcacatctgcagtgagggca

SEQ ID NO: 5734782 - DNA, 25 bp, Homo sapien
ccgcgggcgagctgatcacgctgct

SEQ ID NO: 5734783 - DNA, 25 bp, Homo sapien
agaggaggacatcaagaaggcgcgg

SEQ ID NO: 5734784 - DNA, 25 bp, Homo sapien
gacgggcaacatccgccctgtggac

SEQ ID NO: 5734785 - DNA, 25 bp, Homo sapien
cttcacaggaggaaggctccttggg

SEQ ID NO: 5734786 - DNA, 25 bp, Homo sapien
cttgtggccacactaggttgtcgcc

SEQ ID NO: 5734787 - DNA, 25 bp, Homo sapien
aaacaaatgcagaaggaaatgtcag

SEQ ID NO: 5734788 - DNA, 25 bp, Homo sapien
cccttcccagtctcattagaggaag

SEQ ID NO: 5734789 - DNA, 25 bp, Homo sapien
tacctgtcgcctcagggccggcggt

SEQ ID NO: 5734790 - DNA, 25 bp, Homo sapien
ggcactggacaggcatagcagactc

SEQ ID NO: 5734791 - DNA, 25 bp, Homo sapien
acatctggctttctcagccactgtt

SEQ ID NO: 5734792 - DNA, 25 bp, Homo sapien
ctgggctgataagaaggacccccaa

SEQ ID NO: 5734793 - DNA, 25 bp, Homo sapien
gctgctgtttggcccagctcattac

SEQ ID NO: 5734794 - DNA, 25 bp, Homo sapien
caggcagtgtcccgccacctttgct

SEQ ID NO: 5734795 - DNA, 25 bp, Homo sapien
tctgtccatgggatggagaaccact

SEQ ID NO: 5734796 - DNA, 25 bp, Homo sapien
attccagagccctgcaccaaaccct

SEQ ID NO: 5734797 - DNA, 25 bp, Homo sapien
cctccagctggctcccttgtctcca

SEQ ID NO: 5734798 - DNA, 25 bp, Homo sapien
gatgaagacccagcagctggagatc

SEQ ID NO: 5734799 - DNA, 25 bp, Homo sapien
agccagacggtcatccttccacctg

SEQ ID NO: 5734800 - DNA, 25 bp, Homo sapien
aaagccagacggtcatccttccacc

SEQ ID NO: 5734801 - DNA, 25 bp, Homo sapien
caccacattggagctagagcggctg

SEQ ID NO: 5734802 - DNA, 25 bp, Homo sapien
gtgtcccatgagatcaggcgccatc

SEQ ID NO: 5734803 - DNA, 25 bp, Homo sapien
gttcttgaaacattgcaaccaaaaa

SEQ ID NO: 5734804 - DNA, 25 bp, Homo sapien
accacagcaaacacattctccacca

SEQ ID NO: 5734805 - DNA, 25 bp, Homo sapien
ggaaatgtcagaattcatccgggaa

SEQ ID NO: 5734806 - DNA, 25 bp, Homo sapien
tctgcctccaacagtgaatggatac

SEQ ID NO: 5734807 - DNA, 25 bp, Homo sapien
agacacgatgccggaacagcagctg

SEQ ID NO: 5734808 - DNA, 25 bp, Homo sapien
acatgtgagatgggttagggcaagt

SEQ ID NO: 5734809 - DNA, 25 bp, Homo sapien
ctatgtcaacacgaccaccaatgag

SEQ ID NO: 5734810 - DNA, 25 bp, Homo sapien
gcagaaggaaatgtcagaattcatc

SEQ ID NO: 5734811 - DNA, 25 bp, Homo sapien
ctaggttgtcgcctttcaggcagtg

SEQ ID NO: 5734812 - DNA, 25 bp, Homo sapien
ccgccacggtgccctgtgcaccttt

SEQ ID NO: 5734813 - DNA, 25 bp, Homo sapien
caacagtgaatggataccacgcatc

SEQ ID NO: 5734814 - DNA, 25 bp, Homo sapien
ctccttgggagaggcgtgggcccag

SEQ ID NO: 5734815 - DNA, 25 bp, Homo sapien
actactctgtggatgatttccaaac

SEQ ID NO: 5734816 - DNA, 25 bp, Homo sapien
gtccacacaggctggagacgacctc

SEQ ID NO: 5734817 - DNA, 25 bp, Homo sapien
gctttccaaagttctcagttatcaa

SEQ ID NO: 5734818 - DNA, 25 bp, Homo sapien
cctctgttcatccctgggatagagt

SEQ ID NO: 5734819 - DNA, 25 bp, Homo sapien
tgaagacccagcagctggagatcaa

SEQ ID NO: 5734820 - DNA, 25 bp, Homo sapien
aaattagccccaaattgagcgctga

SEQ ID NO: 5734821 - DNA, 25 bp, Homo sapien
taccacgcatcagggaccccagcgc

SEQ ID NO: 5734822 - DNA, 25 bp, Homo sapien
cagctcattactttctccctttctc

SEQ ID NO: 5734823 - DNA, 25 bp, Homo sapien
ggataaagattgaagaagactatgc

SEQ ID NO: 5734824 - DNA, 25 bp, Homo sapien
tcactctttcccccctcatcccctc

SEQ ID NO: 5734825 - DNA, 25 bp, Homo sapien
ggcgagaaggaggacgggctccgtg

SEQ ID NO: 5734826 - DNA, 25 bp, Homo sapien
cattgaatgagaattgctttcgtat

SEQ ID NO: 5734827 - DNA, 25 bp, Homo sapien
gatggaaacaaaccagctcgtctca

SEQ ID NO: 5734828 - DNA, 25 bp, Homo sapien
tcctttgcagccctccttctttatt

SEQ ID NO: 5734829 - DNA, 25 bp, Homo sapien
aaaaatgggtgctagtggtaattgc

SEQ ID NO: 5734830 - DNA, 25 bp, Homo sapien
tctgttcatccctgggatagagtga

SEQ ID NO: 5734831 - DNA, 25 bp, Homo sapien
cagctcgtccaaaggcttcagggat

SEQ ID NO: 5734832 - DNA, 25 bp, Homo sapien
gacagcctagctgggggctccccca

SEQ ID NO: 5734833 - DNA, 25 bp, Homo sapien
tgagccctcttgcgtcttccagggt

SEQ ID NO: 5734834 - DNA, 25 bp, Homo sapien
tccttctttatttttttcccattgc

SEQ ID NO: 5734835 - DNA, 25 bp, Homo sapien
gacccagcagctggagatcaagctg

SEQ ID NO: 5734836 - DNA, 25 bp, Homo sapien
accaatgagaccacctgggaacgtc

SEQ ID NO: 5734837 - DNA, 25 bp, Homo sapien
aaatgggtgctagtggtaattgctt

SEQ ID NO: 5734838 - DNA, 25 bp, Homo sapien
ttagaatattatttcttggtttctt

SEQ ID NO: 5734839 - DNA, 25 bp, Homo sapien
tctgtcttcttgggtatggcagggc

SEQ ID NO: 5734840 - DNA, 25 bp, Homo sapien
attctccaccatgtcagtctaaaga

SEQ ID NO: 5734841 - DNA, 25 bp, Homo sapien
ggcggctggtgggaaggcgagaagg

SEQ ID NO: 5734842 - DNA, 25 bp, Homo sapien
agggtagggaggtctctgtctctaa

SEQ ID NO: 5734843 - DNA, 25 bp, Homo sapien
gaccacctgggaacgtcccagcagt

SEQ ID NO: 5734844 - DNA, 25 bp, Homo sapien
ggggggctgggctcccaccatgggg

SEQ ID NO: 5734845 - DNA, 25 bp, Homo sapien
tggagatgaagacccagcagctgga

SEQ ID NO: 5734846 - DNA, 25 bp, Homo sapien
gattctagtcgggagcccatgccct

SEQ ID NO: 5734847 - DNA, 25 bp, Homo sapien
atcaagctgagcaacaagacagagg

SEQ ID NO: 5734848 - DNA, 25 bp, Homo sapien
gcctttcaggcagtgtcccgccacc

SEQ ID NO: 5734849 - DNA, 25 bp, Homo sapien
tgtcttcccagacccaccatgcctg

SEQ ID NO: 5734850 - DNA, 25 bp, Homo sapien
agtgtgacttgggaagctttcagtg

SEQ ID NO: 5734851 - DNA, 25 bp, Homo sapien
gcaaacacattctccaccatgtcag

SEQ ID NO: 5734852 - DNA, 25 bp, Homo sapien
tatgcgaagaacttagctaagctct

SEQ ID NO: 5734853 - DNA, 25 bp, Homo sapien
cctgtcgcctcagggccggcggtac

SEQ ID NO: 5734854 - DNA, 25 bp, Homo sapien
cgtcttccagggtagctcaggttgg

SEQ ID NO: 5734855 - DNA, 25 bp, Homo sapien
cgctgctgcaggtcccggacggcgg

SEQ ID NO: 5734856 - DNA, 25 bp, Homo sapien
agactatgcgaagaacttagctaag

SEQ ID NO: 5734857 - DNA, 25 bp, Homo sapien
cccaccatgcctggagaggtcagga

SEQ ID NO: 5734858 - DNA, 25 bp, Homo sapien
ttcaaagccaatagccttgttatta

SEQ ID NO: 5734859 - DNA, 25 bp, Homo sapien
gtgacccggacagcctagctggggg

SEQ ID NO: 5734860 - DNA, 25 bp, Homo sapien
accaaccgagtggagctactgcgac

SEQ ID NO: 5734861 - DNA, 25 bp, Homo sapien
actctcccgggccgcccaccacagg

SEQ ID NO: 5734862 - DNA, 25 bp, Homo sapien
gcaagcagctcgccagccgctatgc

SEQ ID NO: 5734863 - DNA, 25 bp, Homo sapien
gttccctcacccagacacgatgccg

SEQ ID NO: 5734864 - DNA, 25 bp, Homo sapien
agtctcctctggaaatgccaatcca

SEQ ID NO: 5734865 - DNA, 25 bp, Homo sapien
ttctgggagtccacatctggctttc

SEQ ID NO: 5734866 - DNA, 25 bp, Homo sapien
gcccggaaagccctcacagagcggc

SEQ ID NO: 5734867 - DNA, 25 bp, Homo sapien
acttggtgtctgcacctcctttccc

SEQ ID NO: 5734868 - DNA, 25 bp, Homo sapien
caccctctctcctgggccactgagg

SEQ ID NO: 5734869 - DNA, 25 bp, Homo sapien
attttgagtacaatatggctcattg

SEQ ID NO: 5734870 - DNA, 25 bp, Homo sapien
agatcaggcgccatctgtaaagtct

SEQ ID NO: 5734871 - DNA, 25 bp, Homo sapien
cagactctcttgtggccacactagg

SEQ ID NO: 5734872 - DNA, 25 bp, Homo sapien
tattatttcttggtttctttatgaa

SEQ ID NO: 5734873 - DNA, 25 bp, Homo sapien
aagctctctcagaactccttggctt

SEQ ID NO: 5734874 - DNA, 25 bp, Homo sapien
ggcgtgggcccaggtgaagaagagc

SEQ ID NO: 5734875 - DNA, 25 bp, Homo sapien
gctacctgtcgcctcagggccggcg

SEQ ID NO: 5734876 - DNA, 25 bp, Homo sapien
acattccagagccctgcaccaaacc

SEQ ID NO: 5734877 - DNA, 25 bp, Homo sapien
ctttctccctttctctaccacagca

SEQ ID NO: 5734878 - DNA, 25 bp, Homo sapien
ctcttgcgtcttccagggtagctca

SEQ ID NO: 5734879 - DNA, 25 bp, Homo sapien
atccggcagcacctgtgccagtaca

SEQ ID NO: 5734880 - DNA, 25 bp, Homo sapien
aagtgcgaccaccacattgccgacc

SEQ ID NO: 5734881 - DNA, 25 bp, Homo sapien
gcagctgctgaaaccaaccgagtgg

SEQ ID NO: 5734882 - DNA, 25 bp, Homo sapien
gaagctttcagtgctgctgtttggc

SEQ ID NO: 5734883 - DNA, 25 bp, Homo sapien
aagtctggtctgagtgtgacttggg

SEQ ID NO: 5734884 - DNA, 25 bp, Homo sapien
cccgccacctttgcttcccgctcct

SEQ ID NO: 5734885 - DNA, 25 bp, Homo sapien
tcttgaaacattgcaaccaaaaagg

SEQ ID NO: 5734886 - DNA, 25 bp, Homo sapien
agctgtgggtcagagagcacaagac

SEQ ID NO: 5734887 - DNA, 25 bp, Homo sapien
gaggggcagattctagtcgggagcc

SEQ ID NO: 5734888 - DNA, 25 bp, Homo sapien
attactttctccctttctctaccac

SEQ ID NO: 5734889 - DNA, 25 bp, Homo sapien
gaggaaggctccttgggagaggcgt

SEQ ID NO: 5734890 - DNA, 25 bp, Homo sapien
gggccgggtcagtcctacatgtgag

SEQ ID NO: 5734891 - DNA, 25 bp, Homo sapien
gtgcgaccaccacattgccgacctt

SEQ ID NO: 5734892 - DNA, 25 bp, Homo sapien
aggttgtcgcctttcaggcagtgtc

SEQ ID NO: 5734893 - DNA, 25 bp, Homo sapien
cccagctcattactttctccctttc

SEQ ID NO: 5734894 - DNA, 25 bp, Homo sapien
ctaagctctctcagaactccttggc

SEQ ID NO: 5734895 - DNA, 25 bp, Homo sapien
ctggctggcagagctacctgtcgcc

SEQ ID NO: 5734896 - DNA, 25 bp, Homo sapien
agaagggtgacccggacagcctagc

SEQ ID NO: 5734897 - DNA, 25 bp, Homo sapien
cagagcaaggaaaacaccatcacaa

SEQ ID NO: 5734898 - DNA, 25 bp, Homo sapien
cggctggtgggaaggcgagaaggag

SEQ ID NO: 5734899 - DNA, 25 bp, Homo sapien
cctgtgcacctttgggctgccctgg

SEQ ID NO: 5734900 - DNA, 25 bp, Homo sapien
gccctgcccttgtctctgaggctga

SEQ ID NO: 5734901 - DNA, 25 bp, Homo sapien
gtcaggatggaactacctcattcgg

SEQ ID NO: 5734902 - DNA, 25 bp, Homo sapien
tggcccccactctcccgggccgccc

SEQ ID NO: 5734903 - DNA, 25 bp, Homo sapien
aatccaccggtgattcccagaacct

SEQ ID NO: 5734904 - DNA, 25 bp, Homo sapien
ctgtgcttgccgctctgaaacagac

SEQ ID NO: 5734905 - DNA, 25 bp, Homo sapien
tctctcagaactccttggcttcaca

SEQ ID NO: 5734906 - DNA, 25 bp, Homo sapien
catgggtagaaggtgccattcagct

SEQ ID NO: 5734907 - DNA, 25 bp, Homo sapien
tcttgttcttgaaacattgcaacca

SEQ ID NO: 5734908 - DNA, 25 bp, Homo sapien
ggcagagctacctgtcgcctcaggg

SEQ ID NO: 5734909 - DNA, 25 bp, Homo sapien
gagatctagatgggcctgtgcagct

SEQ ID NO: 5734910 - DNA, 25 bp, Homo sapien
gagaggcgtgggcccaggtgaagaa

SEQ ID NO: 5734911 - DNA, 25 bp, Homo sapien
gaaacaaaccagctcgtctcagagg

SEQ ID NO: 5734912 - DNA, 25 bp, Homo sapien
cgtgctagaatccgatgacttatta

SEQ ID NO: 5734913 - DNA, 25 bp, Homo sapien
gacaccagctaccaattttagaata

SEQ ID NO: 5734914 - DNA, 25 bp, Homo sapien
tctggggttgggtcatgacaccagc

SEQ ID NO: 5734915 - DNA, 25 bp, Homo sapien
taaaggggccgggagaagcgtgagc

SEQ ID NO: 5734916 - DNA, 25 bp, Homo sapien
caagacctcatccagctcgtccaaa

SEQ ID NO: 5734917 - DNA, 25 bp, Homo sapien
acatgaagaagtgcgaccaccacat

SEQ ID NO: 5734918 - DNA, 25 bp, Homo sapien
ctcctgtcttcccagacccaccatg

SEQ ID NO: 5734919 - DNA, 25 bp, Homo sapien
caccgtggctgggtttgaactactg

SEQ ID NO: 5734920 - DNA, 25 bp, Homo sapien
cctgtcttcccagacccaccatgcc

SEQ ID NO: 5734921 - DNA, 25 bp, Homo sapien
caatatggctcattgacttttccat

SEQ ID NO: 5734922 - DNA, 25 bp, Homo sapien
ggtagagatgatccggcagcacctg

SEQ ID NO: 5734923 - DNA, 25 bp, Homo sapien
gttgctggagaagcctggaatggtc

SEQ ID NO: 5734924 - DNA, 25 bp, Homo sapien
tggcccagtttgggccagtccattt

SEQ ID NO: 5734925 - DNA, 25 bp, Homo sapien
gctggagacgacctcatgcgctgtg

SEQ ID NO: 5734926 - DNA, 25 bp, Homo sapien
cctggaaatccatctttcttcatct

SEQ ID NO: 5734927 - DNA, 25 bp, Homo sapien
ttctggacattccagagccctgcac

SEQ ID NO: 5734928 - DNA, 25 bp, Homo sapien
ggaggcccctgcccccaccctgcca

SEQ ID NO: 5734929 - DNA, 25 bp, Homo sapien
ggagaagcctggaatggtcccccct

SEQ ID NO: 5734930 - DNA, 25 bp, Homo sapien
aaatgtcagaattcatccgggaaag

SEQ ID NO: 5734931 - DNA, 25 bp, Homo sapien
aggttggcccagtttgggccagtcc

SEQ ID NO: 5734932 - DNA, 25 bp, Homo sapien
cattcggcaaattagccccaaattg

SEQ ID NO: 5734933 - DNA, 25 bp, Homo sapien
gccctggctctcacaggagctctct

SEQ ID NO: 5734934 - DNA, 25 bp, Homo sapien
gtgagggcagaattcaacaagcaca

SEQ ID NO: 5734935 - DNA, 25 bp, Homo sapien
tggagaagcccctgatgaacttccg

SEQ ID NO: 5734936 - DNA, 25 bp, Homo sapien
ccacaggctcttaatggggccgggt

SEQ ID NO: 5734937 - DNA, 25 bp, Homo sapien
agggtagagatgatccggcagcacc

SEQ ID NO: 5734938 - DNA, 25 bp, Homo sapien
caggatcagaatcatgggtagaagg

SEQ ID NO: 5734939 - DNA, 25 bp, Homo sapien
ggacattccagagccctgcaccaaa

SEQ ID NO: 5734940 - DNA, 25 bp, Homo sapien
gggcaaacaaatgcagaaggaaatg

SEQ ID NO: 5734941 - DNA, 25 bp, Homo sapien
acatgttcaaccaaagcacagtcga

SEQ ID NO: 5734942 - DNA, 25 bp, Homo sapien
cctggcccccactctcccgggccgc

SEQ ID NO: 5734943 - DNA, 25 bp, Homo sapien
gtcaggatcagaatcatgggtagaa

SEQ ID NO: 5734944 - DNA, 25 bp, Homo sapien
taagaaggacccccaaggcaacggc

SEQ ID NO: 5734945 - DNA, 25 bp, Homo sapien
agacagaggaggacatcaagaaggc

SEQ ID NO: 5734946 - DNA, 25 bp, Homo sapien
gctagtggtaattgctttgtggctt

SEQ ID NO: 5734947 - DNA, 25 bp, Homo sapien
acacattctccaccatgtcagtcta

SEQ ID NO: 5734948 - DNA, 25 bp, Homo sapien
gccctggaaatccatctttcttcat

SEQ ID NO: 5734949 - DNA, 25 bp, Homo sapien
tagaggaagctttccaaagttctca

SEQ ID NO: 5734950 - DNA, 25 bp, Homo sapien
cagacagaggctggaactttgtggt

SEQ ID NO: 5734951 - DNA, 25 bp, Homo sapien
gttgtcgcctttcaggcagtgtccc

SEQ ID NO: 5734952 - DNA, 25 bp, Homo sapien
ctcacagagcggcagagagacctgg

SEQ ID NO: 5734953 - DNA, 25 bp, Homo sapien
tttttcccattgcattctgggagtc

SEQ ID NO: 5734954 - DNA, 25 bp, Homo sapien
tgtggtccttgccgagttttgtagg

SEQ ID NO: 5734955 - DNA, 25 bp, Homo sapien
atgaagaagtgcgaccaccacattg

SEQ ID NO: 5734956 - DNA, 25 bp, Homo sapien
tgagtacaatatggctcattgactt

SEQ ID NO: 5734957 - DNA, 25 bp, Homo sapien
gcatcagggaccccagcgcaccctc

SEQ ID NO: 5734958 - DNA, 25 bp, Homo sapien
cccaggtgaagaagagcctggcgga

SEQ ID NO: 5734959 - DNA, 25 bp, Homo sapien
aaatgcagaaggaaatgtcagaatt

SEQ ID NO: 5734960 - DNA, 25 bp, Homo sapien
ccatcttccaatccctggaaaagtc

SEQ ID NO: 5734961 - DNA, 25 bp, Homo sapien
gctcattactttctccctttctcta

SEQ ID NO: 5734962 - DNA, 25 bp, Homo sapien
ctccagagactgcccacatgagtgt

SEQ ID NO: 5734963 - DNA, 25 bp, Homo sapien
gtgtggatctctacaaccaggccca

SEQ ID NO: 5734964 - DNA, 25 bp, Homo sapien
gcgcttcgccgcgggcgagctgatc

SEQ ID NO: 5734965 - DNA, 25 bp, Homo sapien
ttcatctttcccattgaccactttg

SEQ ID NO: 5734966 - DNA, 25 bp, Homo sapien
gccacggtgccctgtgcacctttgg

SEQ ID NO: 5734967 - DNA, 25 bp, Homo sapien
tagccccaaattgagcgctgaatcg

SEQ ID NO: 5734968 - DNA, 25 bp, Homo sapien
gagagctggtgattccagaagggtg

SEQ ID NO: 5734969 - DNA, 25 bp, Homo sapien
catgccgagtggatgccccccaccc

SEQ ID NO: 5734970 - DNA, 25 bp, Homo sapien
gtcactgtcacatgcttgtgccctg

SEQ ID NO: 5734971 - DNA, 25 bp, Homo sapien
agattgaagaagactatgcgaagaa

SEQ ID NO: 5734972 - DNA, 25 bp, Homo sapien
ggctggaactttgtggtccttgccg

SEQ ID NO: 5734973 - DNA, 25 bp, Homo sapien
ccgtggctgggtttgaactactgct

SEQ ID NO: 5734974 - DNA, 25 bp, Homo sapien
tgggaaggcgagaaggaggacgggc

SEQ ID NO: 5734975 - DNA, 25 bp, Homo sapien
acaagcacaactcactggtctttca

SEQ ID NO: 5734976 - DNA, 25 bp, Homo sapien
ctttgcagccctccttctttatttt

SEQ ID NO: 5734977 - DNA, 25 bp, Homo sapien
aagaccccctgactcccatgctgtg

SEQ ID NO: 5734978 - DNA, 25 bp, Homo sapien
gcatagcagactctcttgtggccac

SEQ ID NO: 5734979 - DNA, 25 bp, Homo sapien
caaccgagtggagctactgcgacta

SEQ ID NO: 5734980 - DNA, 25 bp, Homo sapien
agtcaacgtgctagaatccgatgac

SEQ ID NO: 5734981 - DNA, 25 bp, Homo sapien
cccctgatgaacttccgtgagaact

SEQ ID NO: 5734982 - DNA, 25 bp, Homo sapien
aatggataccacgcatcagggaccc

SEQ ID NO: 5734983 - DNA, 25 bp, Homo sapien
ttagggcaagtctttgccatccccc

SEQ ID NO: 5734984 - DNA, 25 bp, Homo sapien
tgtctctgaggctgaagaccccctg

SEQ ID NO: 5734985 - DNA, 25 bp, Homo sapien
ttgggaagctttcagtgctgctgtt

SEQ ID NO: 5734986 - DNA, 25 bp, Homo sapien
gtacagttttctgtcactggtgggc

SEQ ID NO: 5734987 - DNA, 25 bp, Homo sapien
agctaccaattttagaatattattt

SEQ ID NO: 5734988 - DNA, 25 bp, Homo sapien
tgcgctgtgtggatctctacaacca

SEQ ID NO: 5734989 - DNA, 25 bp, Homo sapien
gaggattccagagtcctctgttcat

SEQ ID NO: 5734990 - DNA, 25 bp, Homo sapien
aagggcaaacaaatgcagaaggaaa

SEQ ID NO: 5734991 - DNA, 25 bp, Homo sapien
gatcagctgcttcgaaaagtggacc

SEQ ID NO: 5734992 - DNA, 25 bp, Homo sapien
gggaccccagcgcaccctccagaga

SEQ ID NO: 5734993 - DNA, 25 bp, Homo sapien
ttgaactactgctccagaaacagct

SEQ ID NO: 5734994 - DNA, 25 bp, Homo sapien
ggctccttgggagaggcgtgggccc

SEQ ID NO: 5734995 - DNA, 25 bp, Homo sapien
aaacacattctccaccatgtcagtc

SEQ ID NO: 5734996 - DNA, 25 bp, Homo sapien
gccagccctggctctcacaggagct

SEQ ID NO: 5734997 - DNA, 25 bp, Homo sapien
atgcctggagaggtcaggatggaac

SEQ ID NO: 5734998 - DNA, 25 bp, Homo sapien
tggacatggagatctagatgggcct

SEQ ID NO: 5734999 - DNA, 25 bp, Homo sapien
atgttcaaccaaagcacagtcgagc

SEQ ID NO: 5735000 - DNA, 25 bp, Homo sapien
tagagatgatccggcagcacctgtg

SEQ ID NO: 5735001 - DNA, 25 bp, Homo sapien
ctgcccccaccctgccagcccttcc

SEQ ID NO: 5735002 - DNA, 25 bp, Homo sapien
actttgtggtccttgccgagttttg

SEQ ID NO: 5735003 - DNA, 25 bp, Homo sapien
cactttgggtttgacctgcacatct

SEQ ID NO: 5735004 - DNA, 25 bp, Homo sapien
tactctgtggatgatttccaaacat

SEQ ID NO: 5735005 - DNA, 25 bp, Homo sapien
gagcacaagacgggcaacatccgcc

SEQ ID NO: 5735006 - DNA, 25 bp, Homo sapien
gcgaggtggagaagcccctgatgaa

SEQ ID NO: 5735007 - DNA, 25 bp, Homo sapien
aggagctctctgcctccaacagtga

SEQ ID NO: 5735008 - DNA, 25 bp, Homo sapien
tgtccatgggatggagaaccactct

SEQ ID NO: 5735009 - DNA, 25 bp, Homo sapien
acctgtgccagtacacgcagctgcg

SEQ ID NO: 5735010 - DNA, 25 bp, Homo sapien
tccagagccctgcaccaaaccctta

SEQ ID NO: 5735011 - DNA, 25 bp, Homo sapien
ccaagcaaaaagcagagcaaggaaa

SEQ ID NO: 5735012 - DNA, 25 bp, Homo sapien
tgaatggataccacgcatcagggac

SEQ ID NO: 5735013 - DNA, 25 bp, Homo sapien
ggtcactctttcccccctcatcccc

SEQ ID NO: 5735014 - DNA, 25 bp, Homo sapien
ctgtgggtcagagagcacaagacgg

SEQ ID NO: 5735015 - DNA, 25 bp, Homo sapien
gtcctctgttcatccctgggataga

SEQ ID NO: 5735016 - DNA, 25 bp, Homo sapien
tctcctctggaaatgccaatccatc

SEQ ID NO: 5735017 - DNA, 25 bp, Homo sapien
tcccccatattcccaggcccagaag

SEQ ID NO: 5735018 - DNA, 25 bp, Homo sapien
agctgcggcatgaaacagacatgtt

SEQ ID NO: 5735019 - DNA, 25 bp, Homo sapien
tgcaccaaacccttacttggtgtct

SEQ ID NO: 5735020 - DNA, 25 bp, Homo sapien
tggagctagagcggctggaggtgga

SEQ ID NO: 5735021 - DNA, 25 bp, Homo sapien
gggagaagaaagccagacggtcatc

SEQ ID NO: 5735022 - DNA, 25 bp, Homo sapien
cggcgagctacgtgcagttgctgga

SEQ ID NO: 5735023 - DNA, 25 bp, Homo sapien
gccctgtgcacctttgggctgccct

SEQ ID NO: 5735024 - DNA, 25 bp, Homo sapien
tggtttgaagagatggtgaccacca

SEQ ID NO: 5735025 - DNA, 25 bp, Homo sapien
acggtcatccttccacctggctggc

SEQ ID NO: 5735026 - DNA, 25 bp, Homo sapien
cccatgccgagtggatgccccccac

SEQ ID NO: 5735027 - DNA, 25 bp, Homo sapien
ggcaacatccgccctgtggacatgg

SEQ ID NO: 5735028 - DNA, 25 bp, Homo sapien
atggtgaccaccacattggagctag

SEQ ID NO: 5735029 - DNA, 25 bp, Homo sapien
agaattcaacaagcacaactcactg

SEQ ID NO: 5735030 - DNA, 25 bp, Homo sapien
tcaagttctctgccaagcttcacag

SEQ ID NO: 5735031 - DNA, 25 bp, Homo sapien
ctcgccagccgctatgcctcggtgg

SEQ ID NO: 5735032 - DNA, 25 bp, Homo sapien
ctgagcaacaagacagaggaggaca

SEQ ID NO: 5735033 - DNA, 25 bp, Homo sapien
agtacaatatggctcattgactttt

SEQ ID NO: 5735034 - DNA, 25 bp, Homo sapien
gctagagcggctggaggtggagagg

SEQ ID NO: 5735035 - DNA, 25 bp, Homo sapien
gctgataagaaggacccccaaggca

SEQ ID NO: 5735036 - DNA, 25 bp, Homo sapien
gtgctgctgtttggcccagctcatt

SEQ ID NO: 5735037 - DNA, 25 bp, Homo sapien
ttgcaaccaaaaaggtcagcacaaa

SEQ ID NO: 5735038 - DNA, 25 bp, Homo sapien
gcttcgccgcgggcgagctgatcac

SEQ ID NO: 5735039 - DNA, 25 bp, Homo sapien
aaaaagcagagcaaggaaaacacca

SEQ ID NO: 5735040 - DNA, 25 bp, Homo sapien
aggacgggctccgtggctggttccc

SEQ ID NO: 5735041 - DNA, 25 bp, Homo sapien
atattttgagtacaatatggctcat

SEQ ID NO: 5735042 - DNA, 25 bp, Homo sapien
ccccatattcccaggcccagaagac

SEQ ID NO: 5735043 - DNA, 25 bp, Homo sapien
tgtctgcacctcctttccctctctc

SEQ ID NO: 5735044 - DNA, 25 bp, Homo sapien
ggcagattctagtcgggagcccatg

SEQ ID NO: 5735045 - DNA, 25 bp, Homo sapien
gtggtaattgctttgtggcttagta

SEQ ID NO: 5735046 - DNA, 25 bp, Homo sapien
ggtgaagaagagcctggcggacgaa

SEQ ID NO: 5735047 - DNA, 25 bp, Homo sapien
atagagtgagccctcttgcgtcttc

SEQ ID NO: 5735048 - DNA, 25 bp, Homo sapien
ggtttctttatgaaaaatgggtgct

SEQ ID NO: 5735049 - DNA, 25 bp, Homo sapien
ccacctttgcttcccgctccttctg

SEQ ID NO: 5735050 - DNA, 25 bp, Homo sapien
gtgagatgggttagggcaagtcttt

SEQ ID NO: 5735051 - DNA, 25 bp, Homo sapien
gcacaagacgggcaacatccgccct

SEQ ID NO: 5735052 - DNA, 25 bp, Homo sapien
gcgggcgagctgatcacgctgctgc

SEQ ID NO: 5735053 - DNA, 25 bp, Homo sapien
cagctgaagggcaaacaaatgcaga

SEQ ID NO: 5735054 - DNA, 25 bp, Homo sapien
tgattcccagaacctgggatcctca

SEQ ID NO: 5735055 - DNA, 25 bp, Homo sapien
ccacatctggctttctcagccactg

SEQ ID NO: 5735056 - DNA, 25 bp, Homo sapien
gtctggtctgagtgtgacttgggaa

SEQ ID NO: 5735057 - DNA, 25 bp, Homo sapien
aaccaaaaaggtcagcacaaaggcc

SEQ ID NO: 5735058 - DNA, 25 bp, Homo sapien
cattgcaaccaaaaaggtcagcaca

SEQ ID NO: 5735059 - DNA, 25 bp, Homo sapien
cacggccaggggctgcgcttcgccg

SEQ ID NO: 5735060 - DNA, 25 bp, Homo sapien
cagagctacctgtcgcctcagggcc

SEQ ID NO: 5735061 - DNA, 25 bp, Homo sapien
cgagcccgtggatcagctgcttcga

SEQ ID NO: 5735062 - DNA, 25 bp, Homo sapien
ccttgggagaggcgtgggcccaggt

SEQ ID NO: 5735063 - DNA, 25 bp, Homo sapien
ctttgggtttgacctgcacatctgc

SEQ ID NO: 5735064 - DNA, 25 bp, Homo sapien
ctgcgcttcgccgcgggcgagctga

SEQ ID NO: 5735065 - DNA, 25 bp, Homo sapien
gctgaagaccccctgactcccatgc

SEQ ID NO: 5735066 - DNA, 25 bp, Homo sapien
ggtgaccaccacattggagctagag

SEQ ID NO: 5735067 - DNA, 25 bp, Homo sapien
attccagccagccctggctctcaca

SEQ ID NO: 5735068 - DNA, 25 bp, Homo sapien
ctctcttgtggccacactaggttgt

SEQ ID NO: 5735069 - DNA, 25 bp, Homo sapien
caagaaggcgcggagaaagtccaca

SEQ ID NO: 5735070 - DNA, 25 bp, Homo sapien
gagctacgtgcagttgctggagaag

SEQ ID NO: 5735071 - DNA, 25 bp, Homo sapien
atgtgagatgggttagggcaagtct

SEQ ID NO: 5735072 - DNA, 25 bp, Homo sapien
ctcttgtggccacactaggttgtcg

SEQ ID NO: 5735073 - DNA, 25 bp, Homo sapien
gactgctgtcccttgtacagttttc

SEQ ID NO: 5735074 - DNA, 25 bp, Homo sapien
tgtggacatggagatctagatgggc

SEQ ID NO: 5735075 - DNA, 25 bp, Homo sapien
tcacccagacacgatgccggaacag

SEQ ID NO: 5735076 - DNA, 25 bp, Homo sapien
atcttccaatccctggaaaagtctg

SEQ ID NO: 5735077 - DNA, 25 bp, Homo sapien
gatctagatgggcctgtgcagcttc

SEQ ID NO: 5735078 - DNA, 25 bp, Homo sapien
ccagctcgtctcagaggccagcaag

SEQ ID NO: 5735079 - DNA, 25 bp, Homo sapien
tttggaggtcactctttcccccctc

SEQ ID NO: 5735080 - DNA, 25 bp, Homo sapien
aagggtgacccggacagcctagctg

SEQ ID NO: 5735081 - DNA, 25 bp, Homo sapien
atgcagaaggaaatgtcagaattca

SEQ ID NO: 5735082 - DNA, 25 bp, Homo sapien
ggcctgtgcagcttcggggggtcct

SEQ ID NO: 5735083 - DNA, 25 bp, Homo sapien
agcccttcccagtctcattagagga

SEQ ID NO: 5735084 - DNA, 25 bp, Homo sapien
ctgtttggcccagctcattactttc

SEQ ID NO: 5735085 - DNA, 25 bp, Homo sapien
gccgaccttcgcaagcagctcgcca

SEQ ID NO: 5735086 - DNA, 25 bp, Homo sapien
aatccatctttcttcatctttccca

SEQ ID NO: 5735087 - DNA, 25 bp, Homo sapien
ctcattgacttttccattacatctg

SEQ ID NO: 5735088 - DNA, 25 bp, Homo sapien
agaatcctttgcagccctccttctt

SEQ ID NO: 5735089 - DNA, 25 bp, Homo sapien
cctccaacagtgaatggataccacg

SEQ ID NO: 5735090 - DNA, 25 bp, Homo sapien
agagcctggcggacgaagcagaagt

SEQ ID NO: 5735091 - DNA, 25 bp, Homo sapien
ctagtcgggagcccatgccctggaa

SEQ ID NO: 5735092 - DNA, 25 bp, Homo sapien
tccgaaaatccaccggtgattccca

SEQ ID NO: 5735093 - DNA, 25 bp, Homo sapien
ccccaccctgccagcccttcccagt

SEQ ID NO: 5735094 - DNA, 25 bp, Homo sapien
aacaaaccagctcgtctcagaggcc

SEQ ID NO: 5735095 - DNA, 25 bp, Homo sapien
aacaagacagaggaggacatcaaga

SEQ ID NO: 5735096 - DNA, 25 bp, Homo sapien
gcggtactatgtcaacacgaccacc

SEQ ID NO: 5735097 - DNA, 25 bp, Homo sapien
ggatagagtgagccctcttgcgtct

SEQ ID NO: 5735098 - DNA, 25 bp, Homo sapien
agaaggcgcggagaaagtccacaca

SEQ ID NO: 5735099 - DNA, 25 bp, Homo sapien
tgttcatccctgggatagagtgagc

SEQ ID NO: 5735100 - DNA, 25 bp, Homo sapien
aagacccagcagctggagatcaagc

SEQ ID NO: 5735101 - DNA, 25 bp, Homo sapien
aaatgccaatccatccttcccccag

SEQ ID NO: 5735102 - DNA, 25 bp, Homo sapien
cacctcctttccctctctccatctt

SEQ ID NO: 5735103 - DNA, 25 bp, Homo sapien
ccctccagagactgcccacatgagt

SEQ ID NO: 5735104 - DNA, 25 bp, Homo sapien
ctgtccgccacggtgccctgtgcac

SEQ ID NO: 5735105 - DNA, 25 bp, Homo sapien
ccttcccccagctgcttcctcgggg

SEQ ID NO: 5735106 - DNA, 25 bp, Homo sapien
tgcgtcttccagggtagctcaggtt

SEQ ID NO: 5735107 - DNA, 25 bp, Homo sapien
aaccactctgtccagatctggggtt

SEQ ID NO: 5735108 - DNA, 25 bp, Homo sapien
cttagtaaactactctgtggatgat

SEQ ID NO: 5735109 - DNA, 25 bp, Homo sapien
gcgaggggcagattctagtcgggag

SEQ ID NO: 5735110 - DNA, 25 bp, Homo sapien
tcacaggagctctctgcctccaaca

SEQ ID NO: 5735111 - DNA, 25 bp, Homo sapien
acaagacgggcaacatccgccctgt

SEQ ID NO: 5735112 - DNA, 25 bp, Homo sapien
agaagtgcgaccaccacattgccga

SEQ ID NO: 5735113 - DNA, 25 bp, Homo sapien
tgctgtttggcccagctcattactt

SEQ ID NO: 5735114 - DNA, 25 bp, Homo sapien
gccattcagctcacagccgcaccca

SEQ ID NO: 5735115 - DNA, 25 bp, Homo sapien
caacggcaccgtggctgggtttgaa

SEQ ID NO: 5735116 - DNA, 25 bp, Homo sapien
attcccaggcccagaagacagaccc

SEQ ID NO: 5735117 - DNA, 25 bp, Homo sapien
ccagtccatttttggaggtcactct

SEQ ID NO: 5735118 - DNA, 25 bp, Homo sapien
tcattagaggaagctttccaaagtt

SEQ ID NO: 5735119 - DNA, 25 bp, Homo sapien
cacagccctgcccttgtctctgagg

SEQ ID NO: 5735120 - DNA, 25 bp, Homo sapien
ccagcccttcccagtctcattagag

SEQ ID NO: 5735121 - DNA, 25 bp, Homo sapien
aagacgggcaacatccgccctgtgg

SEQ ID NO: 5735122 - DNA, 25 bp, Homo sapien
acccggccaaagacagggagctgtg

SEQ ID NO: 5735123 - DNA, 25 bp, Homo sapien
aaaatccaccggtgattcccagaac

SEQ ID NO: 5735124 - DNA, 25 bp, Homo sapien
ccgctatgcctcggtggagaaggcc

SEQ ID NO: 5735125 - DNA, 25 bp, Homo sapien
ctttccctctctccatcttccaatc

SEQ ID NO: 5735126 - DNA, 25 bp, Homo sapien
tgctagaatccgatgacttattaat

SEQ ID NO: 5735127 - DNA, 25 bp, Homo sapien
cttgtctctgaggctgaagaccccc

SEQ ID NO: 5735128 - DNA, 25 bp, Homo sapien
ctgcttcgaaaagtggacccggcca

SEQ ID NO: 5735129 - DNA, 25 bp, Homo sapien
caaagttctcagttatcaagacctc

SEQ ID NO: 5735130 - DNA, 25 bp, Homo sapien
atggctcattgacttttccattaca

SEQ ID NO: 5735131 - DNA, 25 bp, Homo sapien
ttgaaacattgcaaccaaaaaggtc

SEQ ID NO: 5735132 - DNA, 25 bp, Homo sapien
gacccaccatgcctggagaggtcag

SEQ ID NO: 5735133 - DNA, 25 bp, Homo sapien
ggcacggccaggggctgcgcttcgc

SEQ ID NO: 5735134 - DNA, 25 bp, Homo sapien
aagaagactatgcgaagaacttagc

SEQ ID NO: 5735135 - DNA, 25 bp, Homo sapien
tccctgggatagagtgagccctctt

SEQ ID NO: 5735136 - DNA, 25 bp, Homo sapien
cactggtctttcagtcaacgtgcta

SEQ ID NO: 5735137 - DNA, 25 bp, Homo sapien
atccttcccccagctgcttcctcgg

SEQ ID NO: 5735138 - DNA, 25 bp, Homo sapien
gcacccagaatcctttgcagccctc

SEQ ID NO: 5735139 - DNA, 25 bp, Homo sapien
gggctgataagaaggacccccaagg

SEQ ID NO: 5735140 - DNA, 25 bp, Homo sapien
tggaaatccatctttcttcatcttt

SEQ ID NO: 5735141 - DNA, 25 bp, Homo sapien
gaggtcactctttcccccctcatcc

SEQ ID NO: 5735142 - DNA, 25 bp, Homo sapien
tctttatgaaaaatgggtgctagtg

SEQ ID NO: 5735143 - DNA, 25 bp, Homo sapien
catgagtgtccgaaaatccaccggt

SEQ ID NO: 5735144 - DNA, 25 bp, Homo sapien
cccatgctgtgcttgccgctctgaa

SEQ ID NO: 5735145 - DNA, 25 bp, Homo sapien
ttcccgctccttctggacattccag

SEQ ID NO: 5735146 - DNA, 25 bp, Homo sapien
cagcagctggagatcaagctgagca

SEQ ID NO: 5735147 - DNA, 25 bp, Homo sapien
aaagacagggagctgtgggtcagag

SEQ ID NO: 5735148 - DNA, 25 bp, Homo sapien
tctcccgggccgcccaccacaggct

SEQ ID NO: 5735149 - DNA, 25 bp, Homo sapien
acgttccctcacccagacacgatgc

SEQ ID NO: 5735150 - DNA, 25 bp, Homo sapien
ggaggacgggctccgtggctggttc

SEQ ID NO: 5735151 - DNA, 25 bp, Homo sapien
atggggcccatgccgagtggatgcc

SEQ ID NO: 5735152 - DNA, 25 bp, Homo sapien
caatgagaccacctgggaacgtccc

SEQ ID NO: 5735153 - DNA, 25 bp, Homo sapien
gaagcccctgatgaacttccgtgag

SEQ ID NO: 5735154 - DNA, 25 bp, Homo sapien
ctgccctggcccccactctcccggg

SEQ ID NO: 5735155 - DNA, 25 bp, Homo sapien
aaaaaggtcagcacaaaggccttca

SEQ ID NO: 5735156 - DNA, 25 bp, Homo sapien
gatctggggttgggtcatgacacca

SEQ ID NO: 5735157 - DNA, 25 bp, Homo sapien
ccaaaggcttcagggatggaaacaa

SEQ ID NO: 5735158 - DNA, 25 bp, Homo sapien
taattgctttgtggcttagtaaact

SEQ ID NO: 5735159 - DNA, 25 bp, Homo sapien
tagtggtaattgctttgtggcttag

SEQ ID NO: 5735160 - DNA, 25 bp, Homo sapien
gagatgaagacccagcagctggaga

SEQ ID NO: 5735161 - DNA, 25 bp, Homo sapien
gaaggcccggaaagccctcacagag

SEQ ID NO: 5735162 - DNA, 25 bp, Homo sapien
gggatggaaacaaaccagctcgtct

SEQ ID NO: 5735163 - DNA, 25 bp, Homo sapien
tgccatcccccagatggctctgtct

SEQ ID NO: 5735164 - DNA, 25 bp, Homo sapien
acttccgtgagaacttcaagaaaga

SEQ ID NO: 5735165 - DNA, 25 bp, Homo sapien
cagagtcctctgttcatccctggga

SEQ ID NO: 5735166 - DNA, 25 bp, Homo sapien
cctggagatgaagacccagcagctg

SEQ ID NO: 5735167 - DNA, 25 bp, Homo sapien
agctcgccagccgctatgcctcggt

SEQ ID NO: 5735168 - DNA, 25 bp, Homo sapien
ggtagggaggtctctgtctctaagc

SEQ ID NO: 5735169 - DNA, 25 bp, Homo sapien
tctcacaggagctctctgcctccaa

SEQ ID NO: 5735170 - DNA, 25 bp, Homo sapien
caccatgtcagtctaaagagtctaa

SEQ ID NO: 5735171 - DNA, 25 bp, Homo sapien
cccccaccctctctcctgggccact

SEQ ID NO: 5735172 - DNA, 25 bp, Homo sapien
gtttgacctgcacatctgcagtgag

SEQ ID NO: 5735173 - DNA, 25 bp, Homo sapien
gaaacagacagaggctggaactttg

SEQ ID NO: 5735174 - DNA, 25 bp, Homo sapien
acggcggctggtgggaaggcgagaa

SEQ ID NO: 5735175 - DNA, 25 bp, Homo sapien
tgggatagagtgagccctcttgcgt

SEQ ID NO: 5735176 - DNA, 25 bp, Homo sapien
gcgcctctttcattgaatgagaatt

SEQ ID NO: 5735177 - DNA, 25 bp, Homo sapien
tctcagttatcaagacctcatccag

SEQ ID NO: 5735178 - DNA, 25 bp, Homo sapien
aaaggcttcagggatggaaacaaac

SEQ ID NO: 5735179 - DNA, 25 bp, Homo sapien
cagagagacctggagatgaagaccc

SEQ ID NO: 5735180 - DNA, 25 bp, Homo sapien
ctggagaagcctggaatggtccccc

SEQ ID NO: 5735181 - DNA, 25 bp, Homo sapien
cccccagatggctctgtcttcttgg

SEQ ID NO: 5735182 - DNA, 25 bp, Homo sapien
ggatctctacaaccaggcccagtcc

SEQ ID NO: 5735183 - DNA, 25 bp, Homo sapien
cgagttttgtaggggtcactgtcac

SEQ ID NO: 5735184 - DNA, 25 bp, Homo sapien
tccagaaacagctgaagggcaaaca

SEQ ID NO: 5735185 - DNA, 25 bp, Homo sapien
tccaatccctggaaaagtctggtct

SEQ ID NO: 5735186 - DNA, 25 bp, Homo sapien
acagacatgttcaaccaaagcacag

SEQ ID NO: 5735187 - DNA, 25 bp, Homo sapien
cattacatctgaggattccagagtc

SEQ ID NO: 5735188 - DNA, 25 bp, Homo sapien
attgaagaagactatgcgaagaact

SEQ ID NO: 5735189 - DNA, 25 bp, Homo sapien
tccaaagttctcagttatcaagacc

SEQ ID NO: 5735190 - DNA, 25 bp, Homo sapien
cgcaccctccagagactgcccacat

SEQ ID NO: 5735191 - DNA, 25 bp, Homo sapien
cgctctgaaacagacagaggctgga

SEQ ID NO: 5735192 - DNA, 25 bp, Homo sapien
gtcagagagcacaagacgggcaaca

SEQ ID NO: 5735193 - DNA, 25 bp, Homo sapien
actctgtccagatctggggttgggt

SEQ ID NO: 5735194 - DNA, 25 bp, Homo sapien
acttagctaagctctctcagaactc

SEQ ID NO: 5735195 - DNA, 25 bp, Homo sapien
ctcctgggattccagccagccctgg

SEQ ID NO: 5735196 - DNA, 25 bp, Homo sapien
tgtcttcttgggtatggcagggctg

SEQ ID NO: 5735197 - DNA, 25 bp, Homo sapien
tgtcccttgtacagttttctgtcac

SEQ ID NO: 5735198 - DNA, 25 bp, Homo sapien
agtctttgccatcccccagatggct

SEQ ID NO: 5735199 - DNA, 25 bp, Homo sapien
tcgggagcccatgccctggaaatcc

SEQ ID NO: 5735200 - DNA, 25 bp, Homo sapien
acctgggaacgtcccagcagttctc

SEQ ID NO: 5735201 - DNA, 25 bp, Homo sapien
tgaagggcaaacaaatgcagaagga

SEQ ID NO: 5735202 - DNA, 25 bp, Homo sapien
gactcccatgctgtgcttgccgctc

SEQ ID NO: 5735203 - DNA, 25 bp, Homo sapien
tgggccagtccatttttggaggtca

SEQ ID NO: 5735204 - DNA, 25 bp, Homo sapien
ccctgactcccatgctgtgcttgcc

SEQ ID NO: 5735205 - DNA, 25 bp, Homo sapien
aggtcagcacaaaggccttcaccta

SEQ ID NO: 5735206 - DNA, 25 bp, Homo sapien
atgccccccaccctctctcctgggc

SEQ ID NO: 5735207 - DNA, 25 bp, Homo sapien
agtgaatggataccacgcatcaggg

SEQ ID NO: 5735208 - DNA, 25 bp, Homo sapien
tatttttttcccattgcattctggg

SEQ ID NO: 5735209 - DNA, 25 bp, Homo sapien
aggctggagacgacctcatgcgctg

SEQ ID NO: 5735210 - DNA, 25 bp, Homo sapien
ccagacacgatgccggaacagcagc

SEQ ID NO: 5735211 - DNA, 25 bp, Homo sapien
gggtttgacctgcacatctgcagtg

SEQ ID NO: 5735212 - DNA, 25 bp, Homo sapien
tggaggtcactctttcccccctcat

SEQ ID NO: 5735213 - DNA, 25 bp, Homo sapien
ctgggagtccacatctggctttctc

SEQ ID NO: 5735214 - DNA, 25 bp, Homo sapien
gatggctctgtcttcttgggtatgg

SEQ ID NO: 5735215 - DNA, 25 bp, Homo sapien
ctggaagccccaaggctcttcctcc

SEQ ID NO: 5735216 - DNA, 25 bp, Homo sapien
agtctcattagaggaagctttccaa

SEQ ID NO: 5735217 - DNA, 25 bp, Homo sapien
gcccagaagacagacccacagccct

SEQ ID NO: 5735218 - DNA, 25 bp, Homo sapien
agtccaaatggtttgaagagatggt

SEQ ID NO: 5735219 - DNA, 25 bp, Homo sapien
ctgtgccagtacacgcagctgcggc

SEQ ID NO: 5735220 - DNA, 25 bp, Homo sapien
agaaagccagacggtcatccttcca

SEQ ID NO: 5735221 - DNA, 25 bp, Homo sapien
ctggtgggcactggacaggcatagc

SEQ ID NO: 5735222 - DNA, 25 bp, Homo sapien
cagttgctggagaagcctggaatgg

SEQ ID NO: 5735223 - DNA, 25 bp, Homo sapien
gtggatgccccccaccctctctcct

SEQ ID NO: 5735224 - DNA, 25 bp, Homo sapien
actatgcgaagaacttagctaagct

SEQ ID NO: 5735225 - DNA, 25 bp, Homo sapien
tttaggaggaaggcttggctcctgt

SEQ ID NO: 5735226 - DNA, 25 bp, Homo sapien
ggcgccatctgtaaagtctcctctg

SEQ ID NO: 5735227 - DNA, 25 bp, Homo sapien
ccacctggctggcagagctacctgt

SEQ ID NO: 5735228 - DNA, 25 bp, Homo sapien
ataaactgtgtgacgttccctcacc

SEQ ID NO: 5735229 - DNA, 25 bp, Homo sapien
gcggcagagagacctggagatgaag

SEQ ID NO: 5735230 - DNA, 25 bp, Homo sapien
gagcccatgccctggaaatccatct

SEQ ID NO: 5735231 - DNA, 25 bp, Homo sapien
ggagaaccactctgtccagatctgg

SEQ ID NO: 5735232 - DNA, 25 bp, Homo sapien
catccctgggatagagtgagccctc

SEQ ID NO: 5735233 - DNA, 25 bp, Homo sapien
tccaaatggtttgaagagatggtga

SEQ ID NO: 5735234 - DNA, 25 bp, Homo sapien
agttatcaagacctcatccagctcg

SEQ ID NO: 5735235 - DNA, 25 bp, Homo sapien
ctgtaaagtctcctctggaaatgcc

SEQ ID NO: 5735236 - DNA, 25 bp, Homo sapien
gagtccacatctggctttctcagcc

SEQ ID NO: 5735237 - DNA, 25 bp, Homo sapien
cagccagccctggctctcacaggag

SEQ ID NO: 5735238 - DNA, 25 bp, Homo sapien
gatgggcctgtgcagcttcgggggg

SEQ ID NO: 5735239 - DNA, 25 bp, Homo sapien
ggctttctcagccactgttcatcac

SEQ ID NO: 5735240 - DNA, 25 bp, Homo sapien
cctgggatagagtgagccctcttgc

SEQ ID NO: 5735241 - DNA, 25 bp, Homo sapien
cctcctttccctctctccatcttcc

SEQ ID NO: 5735242 - DNA, 25 bp, Homo sapien
ggggaggcccctgcccccaccctgc

SEQ ID NO: 5735243 - DNA, 25 bp, Homo sapien
gtgccagtacacgcagctgcggcat

SEQ ID NO: 5735244 - DNA, 25 bp, Homo sapien
ttttgtaggggtcactgtcacatgc

SEQ ID NO: 5735245 - DNA, 25 bp, Homo sapien
agctgggggctcccccatattccca

SEQ ID NO: 5735246 - DNA, 25 bp, Homo sapien
ctcccatgctgtgcttgccgctctg

SEQ ID NO: 5735247 - DNA, 25 bp, Homo sapien
ctttcaggcagtgtcccgccacctt

SEQ ID NO: 5735248 - DNA, 25 bp, Homo sapien
ccatgtcagtctaaagagtctaaag

SEQ ID NO: 5735249 - DNA, 25 bp, Homo sapien
agttcacctcaagttctctgccaag

SEQ ID NO: 5735250 - DNA, 25 bp, Homo sapien
aacagcagctgctgaaaccaaccga

SEQ ID NO: 5735251 - DNA, 25 bp, Homo sapien
gagctagagcggctggaggtggaga

SEQ ID NO: 5735252 - DNA, 25 bp, Homo sapien
gaggtctctgtctctaagccaggtg

SEQ ID NO: 5735253 - DNA, 25 bp, Homo sapien
gagagagctggtgattccagaaggg

SEQ ID NO: 5735254 - DNA, 25 bp, Homo sapien
attgctttgtggcttagtaaactac

SEQ ID NO: 5735255 - DNA, 25 bp, Homo sapien
agctaagctctctcagaactccttg

SEQ ID NO: 5735256 - DNA, 25 bp, Homo sapien
gtcgagcccgtggatcagctgcttc

SEQ ID NO: 5735257 - DNA, 25 bp, Homo sapien
gggcgagctgatcacgctgctgcag

SEQ ID NO: 5735258 - DNA, 25 bp, Homo sapien
aaagattgaagaagactatgcgaag

SEQ ID NO: 5735259 - DNA, 25 bp, Homo sapien
ggaggtggagagggtagagatgatc

SEQ ID NO: 5735260 - DNA, 25 bp, Homo sapien
gctctctgcctccaacagtgaatgg

SEQ ID NO: 5735261 - DNA, 25 bp, Homo sapien
ttggcccagctcattactttctccc

SEQ ID NO: 5735262 - DNA, 25 bp, Homo sapien
atcaggcgccatctgtaaagtctcc

SEQ ID NO: 5735263 - DNA, 25 bp, Homo sapien
taaagagtctaaaggggccgggaga

SEQ ID NO: 5735264 - DNA, 25 bp, Homo sapien
ctgtgtggatctctacaaccaggcc

SEQ ID NO: 5735265 - DNA, 25 bp, Homo sapien
cgcggagaaagtccacacaggctgg

SEQ ID NO: 5735266 - DNA, 25 bp, Homo sapien
tgctttgtggcttagtaaactactc

SEQ ID NO: 5735267 - DNA, 25 bp, Homo sapien
atagcagactctcttgtggccacac

SEQ ID NO: 5735268 - DNA, 25 bp, Homo sapien
accactttgggtttgacctgcacat

SEQ ID NO: 5735269 - DNA, 25 bp, Homo sapien
cccttgtctctgaggctgaagaccc

SEQ ID NO: 5735270 - DNA, 25 bp, Homo sapien
ggagaggtcaggatggaactacctc

SEQ ID NO: 5735271 - DNA, 25 bp, Homo sapien
gtcaacacgaccaccaatgagacca

SEQ ID NO: 5735272 - DNA, 25 bp, Homo sapien
gatctgtccatgggatggagaacca

SEQ ID NO: 5735273 - DNA, 25 bp, Homo sapien
cccaccctctctcctgggccactga

SEQ ID NO: 5735274 - DNA, 25 bp, Homo sapien
agatcaagctgagcaacaagacaga

SEQ ID NO: 5735275 - DNA, 25 bp, Homo sapien
agatggtgaccaccacattggagct

SEQ ID NO: 5735276 - DNA, 25 bp, Homo sapien
ggctgggctcccaccatggggccca

SEQ ID NO: 5735277 - DNA, 25 bp, Homo sapien
aggcccggaaagccctcacagagcg

SEQ ID NO: 5735278 - DNA, 25 bp, Homo sapien
gagtggatgccccccaccctctctc

SEQ ID NO: 5735279 - DNA, 25 bp, Homo sapien
gttattaacaagatattttgagtac

SEQ ID NO: 5735280 - DNA, 25 bp, Homo sapien
gggaagctttcagtgctgctgtttg

SEQ ID NO: 5735281 - DNA, 25 bp, Homo sapien
gggcctgtccgccacggtgccctgt

SEQ ID NO: 5735282 - DNA, 25 bp, Homo sapien
gggaacgtcccagcagttctcctgg

SEQ ID NO: 5735283 - DNA, 25 bp, Homo sapien
atccatccttcccccagctgcttcc

SEQ ID NO: 5735284 - DNA, 25 bp, Homo sapien
tctgagtgtgacttgggaagctttc

SEQ ID NO: 5735285 - DNA, 25 bp, Homo sapien
gagaattgctttcgtatagttcaca

SEQ ID NO: 5735286 - DNA, 25 bp, Homo sapien
agaggggagagagctggtgattcca

SEQ ID NO: 5735287 - DNA, 25 bp, Homo sapien
ggaggaaggcttggctcctgtcttc

SEQ ID NO: 5735288 - DNA, 25 bp, Homo sapien
gcaagctggggcctgtccgccacgg

SEQ ID NO: 5735289 - DNA, 25 bp, Homo sapien
agttctcctgggattccagccagcc

SEQ ID NO: 5735290 - DNA, 25 bp, Homo sapien
tccctcacccagacacgatgccgga

SEQ ID NO: 5735291 - DNA, 25 bp, Homo sapien
aacgtgctagaatccgatgacttat

SEQ ID NO: 5735292 - DNA, 25 bp, Homo sapien
ttctcagccactgttcatcaccagg

SEQ ID NO: 5735293 - DNA, 25 bp, Homo sapien
gccggcggtactatgtcaacacgac

SEQ ID NO: 5735294 - DNA, 25 bp, Homo sapien
tctaaaggggccgggagaagcgtga

SEQ ID NO: 5735295 - DNA, 25 bp, Homo sapien
agagactgcccacatgagtgtccga

SEQ ID NO: 5735296 - DNA, 25 bp, Homo sapien
gccgagttttgtaggggtcactgtc

SEQ ID NO: 5735297 - DNA, 25 bp, Homo sapien
gcttggctcctgtcttcccagaccc

SEQ ID NO: 5735298 - DNA, 25 bp, Homo sapien
tttgggctgccctggcccccactct

SEQ ID NO: 5735299 - DNA, 25 bp, Homo sapien
gagacgacctcatgcgctgtgtgga

SEQ ID NO: 5735300 - DNA, 25 bp, Homo sapien
tgtgtgacgttccctcacccagaca

SEQ ID NO: 5735301 - DNA, 25 bp, Homo sapien
ccaagcttcacagcgaggtggagaa

SEQ ID NO: 5735302 - DNA, 25 bp, Homo sapien
tctctgaggctgaagaccccctgac

SEQ ID NO: 5735303 - DNA, 25 bp, Homo sapien
accacattgccgaccttcgcaagca

SEQ ID NO: 5735304 - DNA, 25 bp, Homo sapien
cgccgcgggcgagctgatcacgctg

SEQ ID NO: 5735305 - DNA, 25 bp, Homo sapien
aggggagagagctggtgattccaga

SEQ ID NO: 5735306 - DNA, 25 bp, Homo sapien
atccgccctgtggacatggagatct

SEQ ID NO: 5735307 - DNA, 25 bp, Homo sapien
tctgccaagcttcacagcgaggtgg

SEQ ID NO: 5735308 - DNA, 25 bp, Homo sapien
attttttggcgcctctttcattgaa

SEQ ID NO: 5735309 - DNA, 25 bp, Homo sapien
ttcgccgcgggcgagctgatcacgc

SEQ ID NO: 5735310 - DNA, 25 bp, Homo sapien
ctttcattgaatgagaattgctttc

SEQ ID NO: 5735311 - DNA, 25 bp, Homo sapien
atgccaatccatccttcccccagct

SEQ ID NO: 5735312 - DNA, 25 bp, Homo sapien
attgctttcgtatagttcacattag

SEQ ID NO: 5735313 - DNA, 25 bp, Homo sapien
ggacaggcatagcagactctcttgt

SEQ ID NO: 5735314 - DNA, 25 bp, Homo sapien
tgtgccctggaagccccaaggctct

SEQ ID NO: 5735315 - DNA, 25 bp, Homo sapien
acattctccaccatgtcagtctaaa

SEQ ID NO: 5735316 - DNA, 25 bp, Homo sapien
ggttagggcaagtctttgccatccc

SEQ ID NO: 5735317 - DNA, 25 bp, Homo sapien
atgatttccaaacattcaaagccaa

SEQ ID NO: 5735318 - DNA, 25 bp, Homo sapien
gtcccatgagatcaggcgccatctg

SEQ ID NO: 5735319 - DNA, 25 bp, Homo sapien
ttggtttctttatgaaaaatgggtg

SEQ ID NO: 5735320 - DNA, 25 bp, Homo sapien
gggtgacccggacagcctagctggg

SEQ ID NO: 5735321 - DNA, 25 bp, Homo sapien
tggctcccttgtctccagggctttg

SEQ ID NO: 5735322 - DNA, 25 bp, Homo sapien
gctctgtcttcttgggtatggcagg

SEQ ID NO: 5735323 - DNA, 25 bp, Homo sapien
aggcccagaagacagacccacagcc

SEQ ID NO: 5735324 - DNA, 25 bp, Homo sapien
ggcaccgtggctgggtttgaactac

SEQ ID NO: 5735325 - DNA, 25 bp, Homo sapien
aggatcagggtagggaggtctctgt

SEQ ID NO: 5735326 - DNA, 25 bp, Homo sapien
tgagatcaggcgccatctgtaaagt

SEQ ID NO: 5735327 - DNA, 25 bp, Homo sapien
gcggcatgaaacagacatgttcaac

SEQ ID NO: 5735328 - DNA, 25 bp, Homo sapien
tattaacaagatattttgagtacaa

SEQ ID NO: 5735329 - DNA, 25 bp, Homo sapien
aagcagctcgccagccgctatgcct

SEQ ID NO: 5735330 - DNA, 25 bp, Homo sapien
gaacttccgtgagaacttcaagaaa

SEQ ID NO: 5735331 - DNA, 25 bp, Homo sapien
agaaggacccccaaggcaacggcac

SEQ ID NO: 5735332 - DNA, 25 bp, Homo sapien
aagaacttagctaagctctctcaga

SEQ ID NO: 5735333 - DNA, 25 bp, Homo sapien
ttatttcttggtttctttatgaaaa

SEQ ID NO: 5735334 - DNA, 25 bp, Homo sapien
ggctgccctggcccccactctcccg

SEQ ID NO: 5735335 - DNA, 25 bp, Homo sapien
tttttttcccattgcattctgggag

SEQ ID NO: 5735336 - DNA, 25 bp, Homo sapien
agccgcacccagaatcctttgcagc

SEQ ID NO: 5735337 - DNA, 25 bp, Homo sapien
ttggctcctgtcttcccagacccac

SEQ ID NO: 5735338 - DNA, 25 bp, Homo sapien
acattggagctagagcggctggagg

SEQ ID NO: 5735339 - DNA, 25 bp, Homo sapien
tgccaagcttcacagcgaggtggag

SEQ ID NO: 5735340 - DNA, 25 bp, Homo sapien
acccagaatcctttgcagccctcct

SEQ ID NO: 5735341 - DNA, 25 bp, Homo sapien
agggcaagtctttgccatcccccag

SEQ ID NO: 5735342 - DNA, 25 bp, Homo sapien
ttaacaagatattttgagtacaata

SEQ ID NO: 5735343 - DNA, 25 bp, Homo sapien
cgctccttctggacattccagagcc

SEQ ID NO: 5735344 - DNA, 25 bp, Homo sapien
tgcttcctcggggaggcccctgccc

SEQ ID NO: 5735345 - DNA, 25 bp, Homo sapien
ggcagagagacctggagatgaagac

SEQ ID NO: 5735346 - DNA, 25 bp, Homo sapien
agccctcacagagcggcagagagac

SEQ ID NO: 5735347 - DNA, 25 bp, Homo sapien
gctcacagccgcacccagaatcctt

SEQ ID NO: 5735348 - DNA, 25 bp, Homo sapien
tggctctcacaggagctctctgcct

SEQ ID NO: 5735349 - DNA, 25 bp, Homo sapien
gctgaagggcaaacaaatgcagaag

SEQ ID NO: 5735350 - DNA, 25 bp, Homo sapien
cagcctagctgggggctcccccata

SEQ ID NO: 5735351 - DNA, 25 bp, Homo sapien
agacagggagctgtgggtcagagag

SEQ ID NO: 5735352 - DNA, 25 bp, Homo sapien
ttcctccagctggctcccttgtctc

SEQ ID NO: 5735353 - DNA, 25 bp, Homo sapien
gagccctgcaccaaacccttacttg

SEQ ID NO: 5735354 - DNA, 25 bp, Homo sapien
ccagtttgggccagtccatttttgg

SEQ ID NO: 5735355 - DNA, 25 bp, Homo sapien
acctcatgcgctgtgtggatctcta

SEQ ID NO: 5735356 - DNA, 25 bp, Homo sapien
cttttccattacatctgaggattcc

SEQ ID NO: 5735357 - DNA, 25 bp, Homo sapien
aacagctgaagggcaaacaaatgca

SEQ ID NO: 5735358 - DNA, 25 bp, Homo sapien
aagacagacccacagccctgccctt

SEQ ID NO: 5735359 - DNA, 25 bp, Homo sapien
gctgcttcctcggggaggcccctgc

SEQ ID NO: 5735360 - DNA, 25 bp, Homo sapien
tccaaacattcaaagccaatagcct

SEQ ID NO: 5735361 - DNA, 25 bp, Homo sapien
tatgcctcggtggagaaggcccgga

SEQ ID NO: 5735362 - DNA, 25 bp, Homo sapien
agatattttgagtacaatatggctc

SEQ ID NO: 5735363 - DNA, 25 bp, Homo sapien
tccatctttcttcatctttcccatt

SEQ ID NO: 5735364 - DNA, 25 bp, Homo sapien
caccagctaccaattttagaatatt

SEQ ID NO: 5735365 - DNA, 25 bp, Homo sapien
cgtggatcagctgcttcgaaaagtg

SEQ ID NO: 5735366 - DNA, 25 bp, Homo sapien
ctggttcccggcgagctacgtgcag

SEQ ID NO: 5735367 - DNA, 25 bp, Homo sapien
cagaaacagctgaagggcaaacaaa

SEQ ID NO: 5735368 - DNA, 25 bp, Homo sapien
ctttgcttcccgctccttctggaca

SEQ ID NO: 5735369 - DNA, 25 bp, Homo sapien
tctcttgttcttgaaacattgcaac

SEQ ID NO: 5735370 - DNA, 25 bp, Homo sapien
ccagagactgcccacatgagtgtcc

SEQ ID NO: 5735371 - DNA, 25 bp, Homo sapien
aaggaggacgggctccgtggctggt

SEQ ID NO: 5735372 - DNA, 25 bp, Homo sapien
ccatccttcccccagctgcttcctc

SEQ ID NO: 5735373 - DNA, 25 bp, Homo sapien
gcgctgaatcgtgtcccatgagatc

SEQ ID NO: 5735374 - DNA, 25 bp, Homo sapien
gggcagaattcaacaagcacaactc

SEQ ID NO: 5735375 - DNA, 25 bp, Homo sapien
ggctgggtttgaactactgctccag

SEQ ID NO: 5735376 - DNA, 25 bp, Homo sapien
agtttgggccagtccatttttggag

SEQ ID NO: 5735377 - DNA, 25 bp, Homo sapien
tcagggtagggaggtctctgtctct

SEQ ID NO: 5735378 - DNA, 25 bp, Homo sapien
gaccccagcgcaccctccagagact

SEQ ID NO: 5735379 - DNA, 25 bp, Homo sapien
aagcgtgagcgaggggcagattcta

SEQ ID NO: 5735380 - DNA, 25 bp, Homo sapien
tgggtatggcagggctgggactgct

SEQ ID NO: 5735381 - DNA, 25 bp, Homo sapien
gtttgaactactgctccagaaacag

SEQ ID NO: 5735382 - DNA, 25 bp, Homo sapien
ctccgtggctggttcccggcgagct

SEQ ID NO: 5735383 - DNA, 25 bp, Homo sapien
acctcctggtaggatctgtccatgg

SEQ ID NO: 5735384 - DNA, 25 bp, Homo sapien
ggggcccatgccgagtggatgcccc

SEQ ID NO: 5735385 - DNA, 25 bp, Homo sapien
cttgcgtcttccagggtagctcagg

SEQ ID NO: 5735386 - DNA, 25 bp, Homo sapien
tagatgggcctgtgcagcttcgggg

SEQ ID NO: 5735387 - DNA, 25 bp, Homo sapien
cacagcaaacacattctccaccatg

SEQ ID NO: 5735388 - DNA, 25 bp, Homo sapien
tttatttttttcccattgcattctg

SEQ ID NO: 5735389 - DNA, 25 bp, Homo sapien
gacgggctccgtggctggttcccgg

SEQ ID NO: 5735390 - DNA, 25 bp, Homo sapien
aggcatagcagactctcttgtggcc

SEQ ID NO: 5735391 - DNA, 25 bp, Homo sapien
ccatgccctggaaatccatctttct

SEQ ID NO: 5735392 - DNA, 25 bp, Homo sapien
ggtctttcagtcaacgtgctagaat

SEQ ID NO: 5735393 - DNA, 25 bp, Homo sapien
gtcccagcagttctcctgggattcc

SEQ ID NO: 5735394 - DNA, 25 bp, Homo sapien
gcacctgtgccagtacacgcagctg

SEQ ID NO: 5735395 - DNA, 25 bp, Homo sapien
cacatgcttgtgccctggaagcccc

SEQ ID NO: 5735396 - DNA, 25 bp, Homo sapien
gctcccttgtctccagggctttgga

SEQ ID NO: 5735397 - DNA, 25 bp, Homo sapien
gtcagcacaaaggccttcacctacg

SEQ ID NO: 5735398 - DNA, 25 bp, Homo sapien
ttcgtatagttcacattagaaaaat

SEQ ID NO: 5735399 - DNA, 25 bp, Homo sapien
cagagagcacaagacgggcaacatc

SEQ ID NO: 5735400 - DNA, 25 bp, Homo sapien
gctgatcacgctgctgcaggtcccg

SEQ ID NO: 5735401 - DNA, 25 bp, Homo sapien
gttcatcaccaggggttttaggagg

SEQ ID NO: 5735402 - DNA, 25 bp, Homo sapien
aggtgccattcagctcacagccgca

SEQ ID NO: 5735403 - DNA, 25 bp, Homo sapien
cattgccgaccttcgcaagcagctc

SEQ ID NO: 5735404 - DNA, 25 bp, Homo sapien
ccaccctgccagcccttcccagtct

SEQ ID NO: 5735405 - DNA, 25 bp, Homo sapien
ggacatcaagaaggcgcggagaaag

SEQ ID NO: 5735406 - DNA, 25 bp, Homo sapien
attggagctagagcggctggaggtg

SEQ ID NO: 5735407 - DNA, 25 bp, Homo sapien
ccaaggcaacggcaccgtggctggg

SEQ ID NO: 5735408 - DNA, 25 bp, Homo sapien
ccttacttggtgtctgcacctcctt

SEQ ID NO: 5735409 - DNA, 25 bp, Homo sapien
tgggctgccctggcccccactctcc

SEQ ID NO: 5735410 - DNA, 25 bp, Homo sapien
agtgagccctcttgcgtcttccagg

SEQ ID NO: 5735411 - DNA, 25 bp, Homo sapien
aggaggaaggctccttgggagaggc

SEQ ID NO: 5735412 - DNA, 25 bp, Homo sapien
gaatggtcccccctccgccgggaga

SEQ ID NO: 5735413 - DNA, 25 bp, Homo sapien
ccttgccgagttttgtaggggtcac

SEQ ID NO: 5735414 - DNA, 25 bp, Homo sapien
gtgcagcttcggggggtcctgctgg

SEQ ID NO: 5735415 - DNA, 25 bp, Homo sapien
agcgcaccctccagagactgcccac

SEQ ID NO: 5735416 - DNA, 25 bp, Homo sapien
gaggctggaactttgtggtccttgc

SEQ ID NO: 5735417 - DNA, 25 bp, Homo sapien
ttttagaatattatttcttggtttc

SEQ ID NO: 5735418 - DNA, 25 bp, Homo sapien
gccacactaggttgtcgcctttcag

SEQ ID NO: 5735419 - DNA, 25 bp, Homo sapien
cacactaggttgtcgcctttcaggc

SEQ ID NO: 5735420 - DNA, 25 bp, Homo sapien
caccaaacccttacttggtgtctgc

SEQ ID NO: 5735421 - DNA, 25 bp, Homo sapien
ctacctcattcggcaaattagcccc

SEQ ID NO: 5735422 - DNA, 25 bp, Homo sapien
ctcactggtctttcagtcaacgtgc

SEQ ID NO: 5735423 - DNA, 25 bp, Homo sapien
gggaggtctctgtctctaagccagg

SEQ ID NO: 5735424 - DNA, 25 bp, Homo sapien
ccaaagcacagtcgagcccgtggat

SEQ ID NO: 5735425 - DNA, 25 bp, Homo sapien
ttcattgaatgagaattgctttcgt

SEQ ID NO: 5735426 - DNA, 25 bp, Homo sapien
tggcggacgaagcagaagttcacct

SEQ ID NO: 5735427 - DNA, 25 bp, Homo sapien
gagaacttcaagaaagacatgaaga

SEQ ID NO: 5735428 - DNA, 25 bp, Homo sapien
actgcccacatgagtgtccgaaaat

SEQ ID NO: 5735429 - DNA, 25 bp, Homo sapien
accctgccagcccttcccagtctca

SEQ ID NO: 5735430 - DNA, 25 bp, Homo sapien
gccttcacctacgtgaagacctcct

SEQ ID NO: 5735431 - DNA, 25 bp, Homo sapien
gagaagaaagccagacggtcatcct

SEQ ID NO: 5735432 - DNA, 25 bp, Homo sapien
ggattccagagtcctctgttcatcc

SEQ ID NO: 5735433 - DNA, 25 bp, Homo sapien
gacatggagatctagatgggcctgt

SEQ ID NO: 5735434 - DNA, 25 bp, Homo sapien
aaggaaatgtcagaattcatccggg

SEQ ID NO: 5735435 - DNA, 25 bp, Homo sapien
gccagtacacgcagctgcggcatga

SEQ ID NO: 5735436 - DNA, 25 bp, Homo sapien
ggtggagaagcccctgatgaacttc

SEQ ID NO: 5735437 - DNA, 25 bp, Homo sapien
agaatccgatgacttattaatctct

SEQ ID NO: 5735438 - DNA, 25 bp, Homo sapien
ccatctgtaaagtctcctctggaaa

SEQ ID NO: 5735439 - DNA, 25 bp, Homo sapien
tcatcgccaagcaaaaagcagagca

SEQ ID NO: 5735440 - DNA, 25 bp, Homo sapien
aaaccaaccgagtggagctactgcg

SEQ ID NO: 5735441 - DNA, 25 bp, Homo sapien
ggtactatgtcaacacgaccaccaa

SEQ ID NO: 5735442 - DNA, 25 bp, Homo sapien
gagacctggagatgaagacccagca

SEQ ID NO: 5735443 - DNA, 25 bp, Homo sapien
cagctgcttcctcggggaggcccct

SEQ ID NO: 5735444 - DNA, 25 bp, Homo sapien
ctggctttctcagccactgttcatc

SEQ ID NO: 5735445 - DNA, 25 bp, Homo sapien
tggggttgggtcatgacaccagcta

SEQ ID NO: 5735446 - DNA, 25 bp, Homo sapien
tcttcatctttcccattgaccactt

SEQ ID NO: 5735447 - DNA, 25 bp, Homo sapien
cacattgccgaccttcgcaagcagc

SEQ ID NO: 5735448 - DNA, 25 bp, Homo sapien
cagtacacgcagctgcggcatgaaa

SEQ ID NO: 5735449 - DNA, 25 bp, Homo sapien
ctcagccactgttcatcaccagggg

SEQ ID NO: 5735450 - DNA, 25 bp, Homo sapien
gccccaaattgagcgctgaatcgtg

SEQ ID NO: 5735451 - DNA, 25 bp, Homo sapien
caccctccagagactgcccacatga

SEQ ID NO: 5735452 - DNA, 25 bp, Homo sapien
atcagaatcatgggtagaaggtgcc

SEQ ID NO: 5735453 - DNA, 25 bp, Homo sapien
ctccatcttccaatccctggaaaag

SEQ ID NO: 5735454 - DNA, 25 bp, Homo sapien
cagaggctggaactttgtggtcctt

SEQ ID NO: 5735455 - DNA, 25 bp, Homo sapien
tacaatatggctcattgacttttcc

SEQ ID NO: 5735456 - DNA, 25 bp, Homo sapien
tttatgaaaaatgggtgctagtggt

SEQ ID NO: 5735457 - DNA, 25 bp, Homo sapien
agcccgtggatcagctgcttcgaaa

SEQ ID NO: 5735458 - DNA, 25 bp, Homo sapien
ggtcagtcctacatgtgagatgggt

SEQ ID NO: 5735459 - DNA, 25 bp, Homo sapien
ctggacattccagagccctgcacca

SEQ ID NO: 5735460 - DNA, 25 bp, Homo sapien
tccaacagtgaatggataccacgca

SEQ ID NO: 5735461 - DNA, 25 bp, Homo sapien
acgtcccagcagttctcctgggatt

SEQ ID NO: 5735462 - DNA, 25 bp, Homo sapien
tgacgttccctcacccagacacgat

SEQ ID NO: 5735463 - DNA, 25 bp, Homo sapien
ctctccatcttccaatccctggaaa

SEQ ID NO: 5735464 - DNA, 25 bp, Homo sapien
ctgggggctcccccatattcccagg

SEQ ID NO: 5735465 - DNA, 25 bp, Homo sapien
aatggggccgggtcagtcctacatg

SEQ ID NO: 5735466 - DNA, 25 bp, Homo sapien
tatagttcacattagaaaaatgcct

SEQ ID NO: 5735467 - DNA, 25 bp, Homo sapien
cgccagccgctatgcctcggtggag

SEQ ID NO: 5735468 - DNA, 25 bp, Homo sapien
gaggtggagaagcccctgatgaact

SEQ ID NO: 5735469 - DNA, 25 bp, Homo sapien
tagctcaggttggcccagtttgggc

SEQ ID NO: 5735470 - DNA, 25 bp, Homo sapien
gggtcactgtcacatgcttgtgccc

SEQ ID NO: 5735471 - DNA, 25 bp, Homo sapien
aggtggagagggtagagatgatccg

SEQ ID NO: 5735472 - DNA, 25 bp, Homo sapien
gggagcccatgccctggaaatccat

SEQ ID NO: 5735473 - DNA, 25 bp, Homo sapien
aaggcgcggagaaagtccacacagg

SEQ ID NO: 5735474 - DNA, 25 bp, Homo sapien
ttgtaggggtcactgtcacatgctt

SEQ ID NO: 5735475 - DNA, 25 bp, Homo sapien
agaaagacatgaagaagtgcgacca

SEQ ID NO: 5735476 - DNA, 25 bp, Homo sapien
gttctctgccaagcttcacagcgag

SEQ ID NO: 5735477 - DNA, 25 bp, Homo sapien
ggggcagattctagtcgggagccca

SEQ ID NO: 5735478 - DNA, 25 bp, Homo sapien
ccctctctccatcttccaatccctg

SEQ ID NO: 5735479 - DNA, 25 bp, Homo sapien
gcacaaaggccttcacctacgtgaa

SEQ ID NO: 5735480 - DNA, 25 bp, Homo sapien
ccccctgactcccatgctgtgcttg

SEQ ID NO: 5735481 - DNA, 25 bp, Homo sapien
ggcttagtaaactactctgtggatg

SEQ ID NO: 5735482 - DNA, 25 bp, Homo sapien
ctggaactttgtggtccttgccgag

SEQ ID NO: 5735483 - DNA, 25 bp, Homo sapien
ccgccctgtggacatggagatctag

SEQ ID NO: 5735484 - DNA, 25 bp, Homo sapien
aaagcacagtcgagcccgtggatca

SEQ ID NO: 5735485 - DNA, 25 bp, Homo sapien
ctcatccagctcgtccaaaggcttc

SEQ ID NO: 5735486 - DNA, 25 bp, Homo sapien
gtcagaattcatccgggaaaggata

SEQ ID NO: 5735487 - DNA, 25 bp, Homo sapien
aaggcgagaaggaggacgggctccg

SEQ ID NO: 5735488 - DNA, 25 bp, Homo sapien
gtgaagacctcctggtaggatctgt

SEQ ID NO: 5735489 - DNA, 25 bp, Homo sapien
agtccatttttggaggtcactcttt

SEQ ID NO: 5735490 - DNA, 25 bp, Homo sapien
actgtgtgacgttccctcacccaga

SEQ ID NO: 5735491 - DNA, 25 bp, Homo sapien
tgcacctttgggctgccctggcccc

SEQ ID NO: 5735492 - DNA, 25 bp, Homo sapien
gggtgctagtggtaattgctttgtg

SEQ ID NO: 5735493 - DNA, 25 bp, Homo sapien
atcaagaaggcgcggagaaagtcca

SEQ ID NO: 5735494 - DNA, 25 bp, Homo sapien
aggccagcaagctggggcctgtccg

SEQ ID NO: 5735495 - DNA, 25 bp, Homo sapien
ccctggaagccccaaggctcttcct

SEQ ID NO: 5735496 - DNA, 25 bp, Homo sapien
tcacaggaggaaggctccttgggag

SEQ ID NO: 5735497 - DNA, 25 bp, Homo sapien
ggtatggcagggctgggactgctgt

SEQ ID NO: 5735498 - DNA, 25 bp, Homo sapien
aagcacaactcactggtctttcagt

SEQ ID NO: 5735499 - DNA, 25 bp, Homo sapien
atattcccaggcccagaagacagac

SEQ ID NO: 5735500 - DNA, 25 bp, Homo sapien
agccctcttgcgtcttccagggtag

SEQ ID NO: 5735501 - DNA, 25 bp, Homo sapien
acccagacacgatgccggaacagca

SEQ ID NO: 5735502 - DNA, 25 bp, Homo sapien
caatccctggaaaagtctggtctga

SEQ ID NO: 5735503 - DNA, 25 bp, Homo sapien
gcagctcgccagccgctatgcctcg

SEQ ID NO: 5735504 - DNA, 25 bp, Homo sapien
ctgcgactacttctgggctgataag

SEQ ID NO: 5735505 - DNA, 25 bp, Homo sapien
ggtagaaggtgccattcagctcaca

SEQ ID NO: 5735506 - DNA, 25 bp, Homo sapien
ggaactttgtggtccttgccgagtt

SEQ ID NO: 5735507 - DNA, 25 bp, Homo sapien
tcaggttggcccagtttgggccagt

SEQ ID NO: 5735508 - DNA, 25 bp, Homo sapien
gccaggggctgcgcttcgccgcggg

SEQ ID NO: 5735509 - DNA, 25 bp, Homo sapien
attcccagaacctgggatcctcatc

SEQ ID NO: 5735510 - DNA, 25 bp, Homo sapien
ttctgtcactggtgggcactggaca

SEQ ID NO: 5735511 - DNA, 25 bp, Homo sapien
ctctctcctgggccactgaggagag

SEQ ID NO: 5735512 - DNA, 25 bp, Homo sapien
acctttgcttcccgctccttctgga

SEQ ID NO: 5735513 - DNA, 25 bp, Homo sapien
atctggctttctcagccactgttca

SEQ ID NO: 5735514 - DNA, 25 bp, Homo sapien
tgctgtgcttgccgctctgaaacag

SEQ ID NO: 5735515 - DNA, 25 bp, Homo sapien
gctatgcctcggtggagaaggcccg

SEQ ID NO: 5735516 - DNA, 25 bp, Homo sapien
cgtatagttcacattagaaaaatgc

SEQ ID NO: 5735517 - DNA, 25 bp, Homo sapien
gcgactacttctgggctgataagaa

SEQ ID NO: 5735518 - DNA, 25 bp, Homo sapien
cagcgaggtggagaagcccctgatg

SEQ ID NO: 5735519 - DNA, 25 bp, Homo sapien
aaccagctcgtctcagaggccagca

SEQ ID NO: 5735520 - DNA, 25 bp, Homo sapien
cacatctgcagtgagggcagaattc

SEQ ID NO: 5735521 - DNA, 25 bp, Homo sapien
ccccaaggcaacggcaccgtggctg

SEQ ID NO: 5735522 - DNA, 25 bp, Homo sapien
ctttctcagccactgttcatcacca

SEQ ID NO: 5735523 - DNA, 25 bp, Homo sapien
gaggaagctttccaaagttctcagt

SEQ ID NO: 5735524 - DNA, 25 bp, Homo sapien
tcccattgaccactttgggtttgac

SEQ ID NO: 5735525 - DNA, 25 bp, Homo sapien
caagacagaggaggacatcaagaag

SEQ ID NO: 5735526 - DNA, 25 bp, Homo sapien
acatctgaggattccagagtcctct

SEQ ID NO: 5735527 - DNA, 25 bp, Homo sapien
catctttcttcatctttcccattga

SEQ ID NO: 5735528 - DNA, 25 bp, Homo sapien
atgacaccagctaccaattttagaa

SEQ ID NO: 5735529 - DNA, 25 bp, Homo sapien
ttttctgtcactggtgggcactgga

SEQ ID NO: 5735530 - DNA, 25 bp, Homo sapien
gaaaaatgcctaatatactaaagta

SEQ ID NO: 5735531 - DNA, 25 bp, Homo sapien
gaggggggctgggctcccaccatgg

SEQ ID NO: 5735532 - DNA, 25 bp, Homo sapien
tctgtccagatctggggttgggtca

SEQ ID NO: 5735533 - DNA, 25 bp, Homo sapien
ggcaagtctttgccatcccccagat

SEQ ID NO: 5735534 - DNA, 25 bp, Homo sapien
ggcttcacaggaggaaggctccttg

SEQ ID NO: 5735535 - DNA, 25 bp, Homo sapien
caccatgcctggagaggtcaggatg

SEQ ID NO: 5735536 - DNA, 25 bp, Homo sapien
catgggatggagaaccactctgtcc

SEQ ID NO: 5735537 - DNA, 25 bp, Homo sapien
tttgccatcccccagatggctctgt

SEQ ID NO: 5735538 - DNA, 25 bp, Homo sapien
atgagaccacctgggaacgtcccag

SEQ ID NO: 5735539 - DNA, 25 bp, Homo sapien
gagctgatcacgctgctgcaggtcc

SEQ ID NO: 5735540 - DNA, 25 bp, Homo sapien
aacctgggatcctcatcgccaagca

SEQ ID NO: 5735541 - DNA, 25 bp, Homo sapien
tccgggaaaggataaagattgaaga

SEQ ID NO: 5735542 - DNA, 25 bp, Homo sapien
agacctcctggtaggatctgtccat

SEQ ID NO: 5735543 - DNA, 25 bp, Homo sapien
tctttcccattgaccactttgggtt

SEQ ID NO: 5735544 - DNA, 25 bp, Homo sapien
gaagacctcctggtaggatctgtcc

SEQ ID NO: 5735545 - DNA, 25 bp, Homo sapien
cagggatggaaacaaaccagctcgt

SEQ ID NO: 5735546 - DNA, 25 bp, Homo sapien
aggctcttcctccagctggctccct

SEQ ID NO: 5735547 - DNA, 25 bp, Homo sapien
tccatttttggaggtcactctttcc

SEQ ID NO: 5735548 - DNA, 25 bp, Homo sapien
tctagatgggcctgtgcagcttcgg

SEQ ID NO: 5735549 - DNA, 25 bp, Homo sapien
agggctgggactgctgtcccttgta

SEQ ID NO: 5735550 - DNA, 25 bp, Homo sapien
tcccgggccgcccaccacaggctct

SEQ ID NO: 5735551 - DNA, 25 bp, Homo sapien
ctgggaacgtcccagcagttctcct

SEQ ID NO: 5735552 - DNA, 25 bp, Homo sapien
cagaatcatgggtagaaggtgccat

SEQ ID NO: 5735553 - DNA, 25 bp, Homo sapien
atatggctcattgacttttccatta

SEQ ID NO: 5735554 - DNA, 25 bp, Homo sapien
gaagagatggtgaccaccacattgg

SEQ ID NO: 5735555 - DNA, 25 bp, Homo sapien
ttctagtcgggagcccatgccctgg

SEQ ID NO: 5735556 - DNA, 25 bp, Homo sapien
agaagcctggaatggtcccccctcc

SEQ ID NO: 5735557 - DNA, 25 bp, Homo sapien
cactggacaggcatagcagactctc

SEQ ID NO: 5735558 - DNA, 25 bp, Homo sapien
ttctctaccacagcaaacacattct

SEQ ID NO: 5735559 - DNA, 25 bp, Homo sapien
tgaggctgaagaccccctgactccc

SEQ ID NO: 5735560 - DNA, 25 bp, Homo sapien
tttcagtcaacgtgctagaatccga

SEQ ID NO: 5735561 - DNA, 25 bp, Homo sapien
cagattctagtcgggagcccatgcc

SEQ ID NO: 5735562 - DNA, 25 bp, Homo sapien
tgacttgggaagctttcagtgctgc

SEQ ID NO: 5735563 - DNA, 25 bp, Homo sapien
gcctggagaggtcaggatggaacta

SEQ ID NO: 5735564 - DNA, 25 bp, Homo sapien
tccagctcgtccaaaggcttcaggg

SEQ ID NO: 5735565 - DNA, 25 bp, Homo sapien
tgtgacgttccctcacccagacacg

SEQ ID NO: 5735566 - DNA, 25 bp, Homo sapien
ttggtgtctgcacctcctttccctc

SEQ ID NO: 5735567 - DNA, 25 bp, Homo sapien
ttgtcacttttctcttgttcttgaa

SEQ ID NO: 5735568 - DNA, 25 bp, Homo sapien
ggcccaggtgaagaagagcctggcg

SEQ ID NO: 5735569 - DNA, 25 bp, Homo sapien
agctcgtctcagaggccagcaagct

SEQ ID NO: 5735570 - DNA, 25 bp, Homo sapien
attgcattctgggagtccacatctg

SEQ ID NO: 5735571 - DNA, 25 bp, Homo sapien
accgagtggagctactgcgactact

SEQ ID NO: 5735572 - DNA, 25 bp, Homo sapien
tcacagccgcacccagaatcctttg

SEQ ID NO: 5735573 - DNA, 25 bp, Homo sapien
tgcctaatatactaaagtaaaccaa

SEQ ID NO: 5735574 - DNA, 25 bp, Homo sapien
tcccattgcattctgggagtccaca

SEQ ID NO: 5735575 - DNA, 25 bp, Homo sapien
cagatctggggttgggtcatgacac

SEQ ID NO: 5735576 - DNA, 25 bp, Homo sapien
ggtcatgacaccagctaccaatttt

SEQ ID NO: 5735577 - DNA, 25 bp, Homo sapien
ggtagctcaggttggcccagtttgg

SEQ ID NO: 5735578 - DNA, 25 bp, Homo sapien
agggtagctcaggttggcccagttt

SEQ ID NO: 5735579 - DNA, 25 bp, Homo sapien
cagagcggcagagagacctggagat

SEQ ID NO: 5735580 - DNA, 25 bp, Homo sapien
gtaggatctgtccatgggatggaga

SEQ ID NO: 5735581 - DNA, 25 bp, Homo sapien
gagctctctgcctccaacagtgaat

SEQ ID NO: 5735582 - DNA, 25 bp, Homo sapien
gcagccctccttctttatttttttc

SEQ ID NO: 5735583 - DNA, 25 bp, Homo sapien
gtccttgccgagttttgtaggggtc

SEQ ID NO: 5735584 - DNA, 25 bp, Homo sapien
ctggagaggtcaggatggaactacc

SEQ ID NO: 5735585 - DNA, 25 bp, Homo sapien
aggctgaagaccccctgactcccat

SEQ ID NO: 5735586 - DNA, 25 bp, Homo sapien
ttcaggcagtgtcccgccacctttg

SEQ ID NO: 5735587 - DNA, 25 bp, Homo sapien
gaccaccaatgagaccacctgggaa

SEQ ID NO: 5735588 - DNA, 25 bp, Homo sapien
tgggtcatgacaccagctaccaatt

SEQ ID NO: 5735589 - DNA, 25 bp, Homo sapien
acacgatgccggaacagcagctgct

SEQ ID NO: 5735590 - DNA, 25 bp, Homo sapien
taggaggaaggcttggctcctgtct

SEQ ID NO: 5735591 - DNA, 25 bp, Homo sapien
ctacaaccaggcccagtccaaatgg

SEQ ID NO: 5735592 - DNA, 25 bp, Homo sapien
ggatcctcatcgccaagcaaaaagc

SEQ ID NO: 5735593 - DNA, 25 bp, Homo sapien
caagaaagacatgaagaagtgcgac

SEQ ID NO: 5735594 - DNA, 25 bp, Homo sapien
tgaaacagacatgttcaaccaaagc

SEQ ID NO: 5735595 - DNA, 25 bp, Homo sapien
cacctcaagttctctgccaagcttc

SEQ ID NO: 5735596 - DNA, 25 bp, Homo sapien
gggttttaggaggaaggcttggctc

SEQ ID NO: 5735597 - DNA, 25 bp, Homo sapien
tggggcctgtccgccacggtgccct

SEQ ID NO: 5735598 - DNA, 25 bp, Homo sapien
tcccttgtacagttttctgtcactg

SEQ ID NO: 5735599 - DNA, 25 bp, Homo sapien
tgcacatctgcagtgagggcagaat

SEQ ID NO: 5735600 - DNA, 25 bp, Homo sapien
gtaaagtctcctctggaaatgccaa

SEQ ID NO: 5735601 - DNA, 25 bp, Homo sapien
cagccctggctctcacaggagctct

SEQ ID NO: 5735602 - DNA, 25 bp, Homo sapien
gatttccaaacattcaaagccaata

SEQ ID NO: 5735603 - DNA, 25 bp, Homo sapien
cctgggccactgaggagaggggaga

SEQ ID NO: 5735604 - DNA, 25 bp, Homo sapien
ggaacagcagctgctgaaaccaacc

SEQ ID NO: 5735605 - DNA, 25 bp, Homo sapien
cctgccagcccttcccagtctcatt

SEQ ID NO: 5735606 - DNA, 25 bp, Homo sapien
tgtggccacactaggttgtcgcctt

SEQ ID NO: 5735607 - DNA, 25 bp, Homo sapien
gaaacagctgaagggcaaacaaatg

SEQ ID NO: 5735608 - DNA, 25 bp, Homo sapien
gaccccctgactcccatgctgtgct

SEQ ID NO: 5735609 - DNA, 25 bp, Homo sapien
ttgggtttgacctgcacatctgcag

SEQ ID NO: 5735610 - DNA, 25 bp, Homo sapien
caaatggtttgaagagatggtgacc

SEQ ID NO: 5735611 - DNA, 25 bp, Homo sapien
gggagtccacatctggctttctcag

SEQ ID NO: 5735612 - DNA, 25 bp, Homo sapien
cctgcacatctgcagtgagggcaga

SEQ ID NO: 5735613 - DNA, 25 bp, Homo sapien
tgggattccagccagccctggctct

SEQ ID NO: 5735614 - DNA, 25 bp, Homo sapien
acgcatcagggaccccagcgcaccc

SEQ ID NO: 5735615 - DNA, 25 bp, Homo sapien
aaagtctcctctggaaatgccaatc

SEQ ID NO: 5735616 - DNA, 25 bp, Homo sapien
aaacagacatgttcaaccaaagcac

SEQ ID NO: 5735617 - DNA, 25 bp, Homo sapien
tgaagaccccctgactcccatgctg

SEQ ID NO: 5735618 - DNA, 25 bp, Homo sapien
agtcgggagcccatgccctggaaat

SEQ ID NO: 5735619 - DNA, 25 bp, Homo sapien
cagccactgttcatcaccaggggtt

SEQ ID NO: 5735620 - DNA, 25 bp, Homo sapien
cttctttatttttttcccattgcat

SEQ ID NO: 5735621 - DNA, 25 bp, Homo sapien
tcctttccctctctccatcttccaa

SEQ ID NO: 5735622 - DNA, 25 bp, Homo sapien
tgctttcgtatagttcacattagaa

SEQ ID NO: 5735623 - DNA, 25 bp, Homo sapien
cttattaatctctaattttttggcg

SEQ ID NO: 5735624 - DNA, 25 bp, Homo sapien
attagaggaagctttccaaagttct

SEQ ID NO: 5735625 - DNA, 25 bp, Homo sapien
ccaggtgtcaggatcagaatcatgg

SEQ ID NO: 5735626 - DNA, 25 bp, Homo sapien
tggataccacgcatcagggacccca

SEQ ID NO: 5735627 - DNA, 25 bp, Homo sapien
ctacatgtgagatgggttagggcaa

SEQ ID NO: 5735628 - DNA, 25 bp, Homo sapien
ttgtggcttagtaaactactctgtg

SEQ ID NO: 5735629 - DNA, 25 bp, Homo sapien
ccagaagggtgacccggacagccta

SEQ ID NO: 5735630 - DNA, 25 bp, Homo sapien
tcggtggagaaggcccggaaagccc

SEQ ID NO: 5735631 - DNA, 25 bp, Homo sapien
ccctgcccccaccctgccagccctt

SEQ ID NO: 5735632 - DNA, 25 bp, Homo sapien
tttccaaagttctcagttatcaaga

SEQ ID NO: 5735633 - DNA, 25 bp, Homo sapien
ggctggcagagctacctgtcgcctc

SEQ ID NO: 5735634 - DNA, 25 bp, Homo sapien
cgagaaggaggacgggctccgtggc

SEQ ID NO: 5735635 - DNA, 25 bp, Homo sapien
tgtgcacctttgggctgccctggcc

SEQ ID NO: 5735636 - DNA, 25 bp, Homo sapien
tccattacatctgaggattccagag

SEQ ID NO: 5735637 - DNA, 25 bp, Homo sapien
tttcccattgaccactttgggtttg

SEQ ID NO: 5735638 - DNA, 25 bp, Homo sapien
cgtctcagaggccagcaagctgggg

SEQ ID NO: 5735639 - DNA, 25 bp, Homo sapien
agcagactctcttgtggccacacta

SEQ ID NO: 5735640 - DNA, 25 bp, Homo sapien
ggatggaactacctcattcggcaaa

SEQ ID NO: 5735641 - DNA, 25 bp, Homo sapien
cccacagccctgcccttgtctctga

SEQ ID NO: 5735642 - DNA, 25 bp, Homo sapien
ccggcagcacctgtgccagtacacg

SEQ ID NO: 5735643 - DNA, 25 bp, Homo sapien
aagcaaaaagcagagcaaggaaaac

SEQ ID NO: 5735644 - DNA, 25 bp, Homo sapien
acttctgggctgataagaaggaccc

SEQ ID NO: 5735645 - DNA, 25 bp, Homo sapien
tgaagaagagcctggcggacgaagc

SEQ ID NO: 5735646 - DNA, 25 bp, Homo sapien
tctcagaactccttggcttcacagg

SEQ ID NO: 5735647 - DNA, 25 bp, Homo sapien
cctccgccgggagaagaaagccaga

SEQ ID NO: 5735648 - DNA, 25 bp, Homo sapien
tttggcgcctctttcattgaatgag

SEQ ID NO: 5735649 - DNA, 25 bp, Homo sapien
ccacattggagctagagcggctgga

SEQ ID NO: 5735650 - DNA, 25 bp, Homo sapien
agcctggcggacgaagcagaagttc

SEQ ID NO: 5735651 - DNA, 25 bp, Homo sapien
gagctactgcgactacttctgggct

SEQ ID NO: 5735652 - DNA, 25 bp, Homo sapien
agaggccagcaagctggggcctgtc

SEQ ID NO: 5735653 - DNA, 25 bp, Homo sapien
tactgcgactacttctgggctgata

SEQ ID NO: 5735654 - DNA, 25 bp, Homo sapien
ccatcacaataaactgtgtgacgtt

SEQ ID NO: 5735655 - DNA, 25 bp, Homo sapien
agtgtccgaaaatccaccggtgatt

SEQ ID NO: 5735656 - DNA, 25 bp, Homo sapien
gaatcatgggtagaaggtgccattc

SEQ ID NO: 5735657 - DNA, 25 bp, Homo sapien
tgagtgtgacttgggaagctttcag

SEQ ID NO: 5735658 - DNA, 25 bp, Homo sapien
atggaactacctcattcggcaaatt

SEQ ID NO: 5735659 - DNA, 25 bp, Homo sapien
cacttttctcttgttcttgaaacat

SEQ ID NO: 5735660 - DNA, 25 bp, Homo sapien
gtgattccagaagggtgacccggac

SEQ ID NO: 5735661 - DNA, 25 bp, Homo sapien
tctgaggctgaagaccccctgactc

SEQ ID NO: 5735662 - DNA, 25 bp, Homo sapien
ccttgtctccagggctttggaggat

SEQ ID NO: 5735663 - DNA, 25 bp, Homo sapien
agacggtcatccttccacctggctg

SEQ ID NO: 5735664 - DNA, 25 bp, Homo sapien
tggctctgtcttcttgggtatggca

SEQ ID NO: 5735665 - DNA, 25 bp, Homo sapien
gagcaaggaaaacaccatcacaata

SEQ ID NO: 5735666 - DNA, 25 bp, Homo sapien
ccagaacctgggatcctcatcgcca

SEQ ID NO: 5735667 - DNA, 25 bp, Homo sapien
acacgaccaccaatgagaccacctg

SEQ ID NO: 5735668 - DNA, 25 bp, Homo sapien
ggcccatgccgagtggatgcccccc

SEQ ID NO: 5735669 - DNA, 25 bp, Homo sapien
gattccagaagggtgacccggacag

SEQ ID NO: 5735670 - DNA, 25 bp, Homo sapien
aagttctcagttatcaagacctcat

SEQ ID NO: 5735671 - DNA, 25 bp, Homo sapien
aacattcaaagccaatagccttgtt

SEQ ID NO: 5735672 - DNA, 25 bp, Homo sapien
gcagggctgggactgctgtcccttg

SEQ ID NO: 5735673 - DNA, 25 bp, Homo sapien
taaaccaaacgttgtcacttttctc

SEQ ID NO: 5735674 - DNA, 25 bp, Homo sapien
agagtgagccctcttgcgtcttcca

SEQ ID NO: 5735675 - DNA, 25 bp, Homo sapien
ggaaatgccaatccatccttccccc

SEQ ID NO: 5735676 - DNA, 25 bp, Homo sapien
gcaaaaagcagagcaaggaaaacac

SEQ ID NO: 5735677 - DNA, 25 bp, Homo sapien
ggcgcggagaaagtccacacaggct

SEQ ID NO: 5735678 - DNA, 25 bp, Homo sapien
tgataagaaggacccccaaggcaac

SEQ ID NO: 5735679 - DNA, 25 bp, Homo sapien
cctgggattccagccagccctggct

SEQ ID NO: 5735680 - DNA, 25 bp, Homo sapien
ggtcccggacggcggctggtgggaa

SEQ ID NO: 5735681 - DNA, 25 bp, Homo sapien
tgcctcggtggagaaggcccggaaa

SEQ ID NO: 5735682 - DNA, 25 bp, Homo sapien
ctgaggattccagagtcctctgttc

SEQ ID NO: 5735683 - DNA, 25 bp, Homo sapien
tgggcccaggtgaagaagagcctgg

SEQ ID NO: 5735684 - DNA, 25 bp, Homo sapien
cccaaattgagcgctgaatcgtgtc

SEQ ID NO: 5735685 - DNA, 25 bp, Homo sapien
tggtcccccctccgccgggagaaga

SEQ ID NO: 5735686 - DNA, 25 bp, Homo sapien
ttctcctgggattccagccagccct

SEQ ID NO: 5735687 - DNA, 25 bp, Homo sapien
acagttttctgtcactggtgggcac

SEQ ID NO: 5735688 - DNA, 25 bp, Homo sapien
catccagctcgtccaaaggcttcag

SEQ ID NO: 5735689 - DNA, 25 bp, Homo sapien
catgctgtgcttgccgctctgaaac

SEQ ID NO: 5735690 - DNA, 25 bp, Homo sapien
aaagcagagcaaggaaaacaccatc

SEQ ID NO: 5735691 - DNA, 25 bp, Homo sapien
gtcacatgcttgtgccctggaagcc

SEQ ID NO: 5735692 - DNA, 25 bp, Homo sapien
caaaccagctcgtctcagaggccag

SEQ ID NO: 5735693 - DNA, 25 bp, Homo sapien
gaattgctttcgtatagttcacatt

SEQ ID NO: 5735694 - DNA, 25 bp, Homo sapien
ccctctctcctgggccactgaggag

SEQ ID NO: 5735695 - DNA, 25 bp, Homo sapien
ggtctctgtctctaagccaggtgtc

SEQ ID NO: 5735696 - DNA, 25 bp, Homo sapien
gtggctgggtttgaactactgctcc

SEQ ID NO: 5735697 - DNA, 25 bp, Homo sapien
gcaaattagccccaaattgagcgct

SEQ ID NO: 5735698 - DNA, 25 bp, Homo sapien
caggcgccatctgtaaagtctcctc

SEQ ID NO: 5735699 - DNA, 25 bp, Homo sapien
acaggaggaaggctccttgggagag

SEQ ID NO: 5735700 - DNA, 25 bp, Homo sapien
ggacccccaaggcaacggcaccgtg

SEQ ID NO: 5735701 - DNA, 25 bp, Homo sapien
tcttccagggtagctcaggttggcc

SEQ ID NO: 5735702 - DNA, 25 bp, Homo sapien
cgatgacttattaatctctaatttt

SEQ ID NO: 5735703 - DNA, 25 bp, Homo sapien
catgaaacagacatgttcaaccaaa

SEQ ID NO: 5735704 - DNA, 25 bp, Homo sapien
cgaaaagtggacccggccaaagaca

SEQ ID NO: 5735705 - DNA, 25 bp, Homo sapien
catgcttgtgccctggaagccccaa

SEQ ID NO: 5735706 - DNA, 25 bp, Homo sapien
ttacatctgaggattccagagtcct

SEQ ID NO: 5735707 - DNA, 25 bp, Homo sapien
tgggatggagaaccactctgtccag

SEQ ID NO: 5735708 - DNA, 25 bp, Homo sapien
aaaggtcagcacaaaggccttcacc

SEQ ID NO: 5735709 - DNA, 25 bp, Homo sapien
ctctacaaccaggcccagtccaaat

SEQ ID NO: 5735710 - DNA, 25 bp, Homo sapien
ctttgtggcttagtaaactactctg

SEQ ID NO: 5735711 - DNA, 25 bp, Homo sapien
caaagccaatagccttgttattaac

SEQ ID NO: 5735712 - DNA, 25 bp, Homo sapien
gacttttccattacatctgaggatt

SEQ ID NO: 5735713 - DNA, 25 bp, Homo sapien
gcctgtccgccacggtgccctgtgc

SEQ ID NO: 5735714 - DNA, 25 bp, Homo sapien
aggtcaggatggaactacctcattc

SEQ ID NO: 5735715 - DNA, 25 bp, Homo sapien
ttcacctcaagttctctgccaagct

SEQ ID NO: 5735716 - DNA, 25 bp, Homo sapien
ttcaacaagcacaactcactggtct

SEQ ID NO: 5735717 - DNA, 25 bp, Homo sapien
cacgctgctgcaggtcccggacggc

SEQ ID NO: 5735718 - DNA, 25 bp, Homo sapien
cagacccacagccctgcccttgtct

SEQ ID NO: 5735719 - DNA, 25 bp, Homo sapien
gagcgaggggcagattctagtcggg

SEQ ID NO: 5735720 - DNA, 25 bp, Homo sapien
atgtcagtctaaagagtctaaaggg

SEQ ID NO: 5735721 - DNA, 25 bp, Homo sapien
ttgtacagttttctgtcactggtgg

SEQ ID NO: 5735722 - DNA, 25 bp, Homo sapien
gtccaaaggcttcagggatggaaac

SEQ ID NO: 5735723 - DNA, 25 bp, Homo sapien
agcccctgatgaacttccgtgagaa

SEQ ID NO: 5735724 - DNA, 25 bp, Homo sapien
attcatccgggaaaggataaagatt

SEQ ID NO: 5735725 - DNA, 25 bp, Homo sapien
ctagaatccgatgacttattaatct

SEQ ID NO: 5735726 - DNA, 25 bp, Homo sapien
ggaagccccaaggctcttcctccag

SEQ ID NO: 5735727 - DNA, 25 bp, Homo sapien
caatagccttgttattaacaagata

SEQ ID NO: 5735728 - DNA, 25 bp, Homo sapien
ggtgggcactggacaggcatagcag

SEQ ID NO: 5735729 - DNA, 25 bp, Homo sapien
ccctcttgcgtcttccagggtagct

SEQ ID NO: 5735730 - DNA, 25 bp, Homo sapien
cgggcaacatccgccctgtggacat

SEQ ID NO: 5735731 - DNA, 25 bp, Homo sapien
gagctggtgattccagaagggtgac

SEQ ID NO: 5735732 - DNA, 25 bp, Homo sapien
ccagaagacagacccacagccctgc

SEQ ID NO: 5735733 - DNA, 25 bp, Homo sapien
gagtcctctgttcatccctgggata

SEQ ID NO: 5735734 - DNA, 25 bp, Homo sapien
acaaccaggcccagtccaaatggtt

SEQ ID NO: 5735735 - DNA, 25 bp, Homo sapien
attgaccactttgggtttgacctgc

SEQ ID NO: 5735736 - DNA, 25 bp, Homo sapien
ctctcctgggccactgaggagaggg

SEQ ID NO: 5735737 - DNA, 25 bp, Homo sapien
ttccctctctccatcttccaatccc

SEQ ID NO: 5735738 - DNA, 25 bp, Homo sapien
ctctggaaatgccaatccatccttc

SEQ ID NO: 5735739 - DNA, 25 bp, Homo sapien
agctgagcaacaagacagaggagga

SEQ ID NO: 5735740 - DNA, 25 bp, Homo sapien
cagatggctctgtcttcttgggtat

SEQ ID NO: 5735741 - DNA, 25 bp, Homo sapien
agactgcccacatgagtgtccgaaa

SEQ ID NO: 5735742 - DNA, 25 bp, Homo sapien
atcaagacctcatccagctcgtcca

SEQ ID NO: 5735743 - DNA, 25 bp, Homo sapien
ctggcagagctacctgtcgcctcag

SEQ ID NO: 5735744 - DNA, 25 bp, Homo sapien
gtccgccacggtgccctgtgcacct

SEQ ID NO: 5735745 - DNA, 25 bp, Homo sapien
tttgagtacaatatggctcattgac

SEQ ID NO: 5735746 - DNA, 25 bp, Homo sapien
cagaagttcacctcaagttctctgc

SEQ ID NO: 5735747 - DNA, 25 bp, Homo sapien
cccagcagctggagatcaagctgag

SEQ ID NO: 5735748 - DNA, 25 bp, Homo sapien
tgggatcctcatcgccaagcaaaaa

SEQ ID NO: 5735749 - DNA, 25 bp, Homo sapien
tcccggacggcggctggtgggaagg

SEQ ID NO: 5735750 - DNA, 25 bp, Homo sapien
cgggtcagtcctacatgtgagatgg

SEQ ID NO: 5735751 - DNA, 25 bp, Homo sapien
ccatgcctggagaggtcaggatgga

SEQ ID NO: 5735752 - DNA, 25 bp, Homo sapien
cccaccacaggctcttaatggggcc

SEQ ID NO: 5735753 - DNA, 25 bp, Homo sapien
tactatgtcaacacgaccaccaatg

SEQ ID NO: 5735754 - DNA, 25 bp, Homo sapien
agtcctacatgtgagatgggttagg

SEQ ID NO: 5735755 - DNA, 25 bp, Homo sapien
gcccatgccctggaaatccatcttt

SEQ ID NO: 5735756 - DNA, 25 bp, Homo sapien
gaggacatcaagaaggcgcggagaa

SEQ ID NO: 5735757 - DNA, 25 bp, Homo sapien
aagaagagcctggcggacgaagcag

SEQ ID NO: 5735758 - DNA, 25 bp, Homo sapien
cctggcggacgaagcagaagttcac

SEQ ID NO: 5735759 - DNA, 25 bp, Homo sapien
atctgaggattccagagtcctctgt

SEQ ID NO: 5735760 - DNA, 25 bp, Homo sapien
agaggtcaggatggaactacctcat

SEQ ID NO: 5735761 - DNA, 25 bp, Homo sapien
gaattcatccgggaaaggataaaga

SEQ ID NO: 5735762 - DNA, 25 bp, Homo sapien
tactttctccctttctctaccacag

SEQ ID NO: 5735763 - DNA, 25 bp, Homo sapien
ggggctgcgcttcgccgcgggcgag

SEQ ID NO: 5735764 - DNA, 25 bp, Homo sapien
aagcttcacagcgaggtggagaagc

SEQ ID NO: 5735765 - DNA, 25 bp, Homo sapien
ccggccaaagacagggagctgtggg

SEQ ID NO: 5735766 - DNA, 25 bp, Homo sapien
tgaagaagactatgcgaagaactta

SEQ ID NO: 5735767 - DNA, 25 bp, Homo sapien
cccggacagcctagctgggggctcc

SEQ ID NO: 5735768 - DNA, 25 bp, Homo sapien
gatgatccggcagcacctgtgccag

SEQ ID NO: 5735769 - DNA, 25 bp, Homo sapien
acctcattcggcaaattagccccaa

SEQ ID NO: 5735770 - DNA, 25 bp, Homo sapien
gctgaatcgtgtcccatgagatcag

SEQ ID NO: 5735771 - DNA, 25 bp, Homo sapien
tcacctacgtgaagacctcctggta

SEQ ID NO: 5735772 - DNA, 25 bp, Homo sapien
aggcccagtccaaatggtttgaaga

SEQ ID NO: 5735773 - DNA, 25 bp, Homo sapien
gagatgggttagggcaagtctttgc

SEQ ID NO: 5735774 - DNA, 25 bp, Homo sapien
tctctgcctccaacagtgaatggat

SEQ ID NO: 5735775 - DNA, 25 bp, Homo sapien
atgagaattgctttcgtatagttca

SEQ ID NO: 5735776 - DNA, 25 bp, Homo sapien
gtggctggttcccggcgagctacgt

SEQ ID NO: 5735777 - DNA, 25 bp, Homo sapien
gatcagggtagggaggtctctgtct

SEQ ID NO: 5735778 - DNA, 25 bp, Homo sapien
ctggaaaagtctggtctgagtgtga

SEQ ID NO: 5735779 - DNA, 25 bp, Homo sapien
tggaaacaaaccagctcgtctcaga

SEQ ID NO: 5735780 - DNA, 25 bp, Homo sapien
aagttctctgccaagcttcacagcg

SEQ ID NO: 5735781 - DNA, 25 bp, Homo sapien
gctggctcccttgtctccagggctt

SEQ ID NO: 5735782 - DNA, 25 bp, Homo sapien
gccctgtggacatggagatctagat

SEQ ID NO: 5735783 - DNA, 25 bp, Homo sapien
gtttggcccagctcattactttctc

SEQ ID NO: 5735784 - DNA, 25 bp, Homo sapien
gaaagtccacacaggctggagacga

SEQ ID NO: 5735785 - DNA, 25 bp, Homo sapien
aagccccaaggctcttcctccagct

SEQ ID NO: 5735786 - DNA, 25 bp, Homo sapien
aatggtttgaagagatggtgaccac

SEQ ID NO: 5735787 - DNA, 25 bp, Homo sapien
tgccctggaagccccaaggctcttc

SEQ ID NO: 5735788 - DNA, 25 bp, Homo sapien
gtggatctctacaaccaggcccagt

SEQ ID NO: 5735789 - DNA, 25 bp, Homo sapien
ggctttggaggatcagggtagggag

SEQ ID NO: 5735790 - DNA, 25 bp, Homo sapien
ctggaggtggagagggtagagatga

SEQ ID NO: 5735791 - DNA, 25 bp, Homo sapien
gttctcagttatcaagacctcatcc

SEQ ID NO: 5735792 - DNA, 25 bp, Homo sapien
ggcaacggcaccgtggctgggtttg

SEQ ID NO: 5735793 - DNA, 25 bp, Homo sapien
gaaatccatctttcttcatctttcc

SEQ ID NO: 5735794 - DNA, 25 bp, Homo sapien
aatgcctaatatactaaagtaaacc

SEQ ID NO: 5735795 - DNA, 25 bp, Homo sapien
caataaactgtgtgacgttccctca

SEQ ID NO: 5735796 - DNA, 25 bp, Homo sapien
agaaggaaatgtcagaattcatccg

SEQ ID NO: 5735797 - DNA, 25 bp, Homo sapien
gttgggtcatgacaccagctaccaa

SEQ ID NO: 5735798 - DNA, 25 bp, Homo sapien
ctgactcccatgctgtgcttgccgc

SEQ ID NO: 5735799 - DNA, 25 bp, Homo sapien
ggaaaagtctggtctgagtgtgact

SEQ ID NO: 5735800 - DNA, 25 bp, Homo sapien
gacgacctcatgcgctgtgtggatc

SEQ ID NO: 5735801 - DNA, 25 bp, Homo sapien
ggattccagccagccctggctctca

SEQ ID NO: 5735802 - DNA, 25 bp, Homo sapien
cttgggtatggcagggctgggactg

SEQ ID NO: 5735803 - DNA, 25 bp, Homo sapien
ccttgtacagttttctgtcactggt

SEQ ID NO: 5735804 - DNA, 25 bp, Homo sapien
acctggctggcagagctacctgtcg

SEQ ID NO: 5735805 - DNA, 25 bp, Homo sapien
aaacccttacttggtgtctgcacct

SEQ ID NO: 5735806 - DNA, 25 bp, Homo sapien
ggtgattcccagaacctgggatcct

SEQ ID NO: 5735807 - DNA, 25 bp, Homo sapien
tacgtgcagttgctggagaagcctg

SEQ ID NO: 5735808 - DNA, 25 bp, Homo sapien
ctgtgcagcttcggggggtcctgct

SEQ ID NO: 5735809 - DNA, 25 bp, Homo sapien
ctgctgaaaccaaccgagtggagct

SEQ ID NO: 5735810 - DNA, 25 bp, Homo sapien
ctggagatcaagctgagcaacaaga

SEQ ID NO: 5735811 - DNA, 25 bp, Homo sapien
tggagatctagatgggcctgtgcag

SEQ ID NO: 5735812 - DNA, 25 bp, Homo sapien
aaccaggcccagtccaaatggtttg

SEQ ID NO: 5735813 - DNA, 25 bp, Homo sapien
gctacgtgcagttgctggagaagcc

SEQ ID NO: 5735814 - DNA, 25 bp, Homo sapien
tctgtctctaagccaggtgtcagga

SEQ ID NO: 5735815 - DNA, 25 bp, Homo sapien
aagctttccaaagttctcagttatc

SEQ ID NO: 5735816 - DNA, 25 bp, Homo sapien
gtggagagggtagagatgatccggc

SEQ ID NO: 5735817 - DNA, 25 bp, Homo sapien
tgggcactggacaggcatagcagac

SEQ ID NO: 5735818 - DNA, 25 bp, Homo sapien
aagtccacacaggctggagacgacc

SEQ ID NO: 5735819 - DNA, 25 bp, Homo sapien
tccgatgacttattaatctctaatt

SEQ ID NO: 5735820 - DNA, 25 bp, Homo sapien
tgcagttgctggagaagcctggaat

SEQ ID NO: 5735821 - DNA, 25 bp, Homo sapien
tctaagccaggtgtcaggatcagaa

SEQ ID NO: 5735822 - DNA, 25 bp, Homo sapien
aggcccctgcccccaccctgccagc

SEQ ID NO: 5735823 - DNA, 25 bp, Homo sapien
cacctttgggctgccctggccccca

SEQ ID NO: 5735824 - DNA, 25 bp, Homo sapien
cttgtgccctggaagccccaaggct

SEQ ID NO: 5735825 - DNA, 25 bp, Homo sapien
aacaccatcacaataaactgtgtga

SEQ ID NO: 5735826 - DNA, 25 bp, Homo sapien
ctagctgggggctcccccatattcc

SEQ ID NO: 5735827 - DNA, 25 bp, Homo sapien
cagggaccccagcgcaccctccaga

SEQ ID NO: 5735828 - DNA, 25 bp, Homo sapien
ccatggggcccatgccgagtggatg

SEQ ID NO: 5735829 - DNA, 25 bp, Homo sapien
atcacaataaactgtgtgacgttcc

SEQ ID NO: 5735830 - DNA, 25 bp, Homo sapien
agaaccactctgtccagatctgggg

SEQ ID NO: 5735831 - DNA, 25 bp, Homo sapien
tcatgacaccagctaccaattttag

SEQ ID NO: 5735832 - DNA, 25 bp, Homo sapien
ctcatgcgctgtgtggatctctaca

SEQ ID NO: 5735833 - DNA, 25 bp, Homo sapien
ctctctccatcttccaatccctgga

SEQ ID NO: 5735834 - DNA, 25 bp, Homo sapien
gaactactgctccagaaacagctga

SEQ ID NO: 5735835 - DNA, 25 bp, Homo sapien
ggccagtccatttttggaggtcact

SEQ ID NO: 5735836 - DNA, 25 bp, Homo sapien
cagcacaaaggccttcacctacgtg

SEQ ID NO: 5735837 - DNA, 25 bp, Homo sapien
gagggcagaattcaacaagcacaac

SEQ ID NO: 5735838 - DNA, 25 bp, Homo sapien
ttgtctccagggctttggaggatca

SEQ ID NO: 5735839 - DNA, 25 bp, Homo sapien
cagctggctcccttgtctccagggc

SEQ ID NO: 5735840 - DNA, 25 bp, Homo sapien
gcttcccgctccttctggacattcc

SEQ ID NO: 5735841 - DNA, 25 bp, Homo sapien
ggatggagaaccactctgtccagat

SEQ ID NO: 5735842 - DNA, 25 bp, Homo sapien
gctcccccatattcccaggcccaga

SEQ ID NO: 5735843 - DNA, 25 bp, Homo sapien
ccggacggcggctggtgggaaggcg

SEQ ID NO: 5735844 - DNA, 25 bp, Homo sapien
ctggacaggcatagcagactctctt

SEQ ID NO: 5735845 - DNA, 25 bp, Homo sapien
gaatggcaccttctacccatgattc

SEQ ID NO: 5735846 - DNA, 25 bp, Homo sapien
tgggctcccgactagaatctgcccc

SEQ ID NO: 5735847 - DNA, 25 bp, Homo sapien
ggctggctggaatcccaggagaact

SEQ ID NO: 5735848 - DNA, 25 bp, Homo sapien
gtcgtgttgacatagtaccgccggc

SEQ ID NO: 5735849 - DNA, 25 bp, Homo sapien
ggagactttacagatggcgcctgat

SEQ ID NO: 5735850 - DNA, 25 bp, Homo sapien
ggtcgtctccagcctgtgtggactt

SEQ ID NO: 5735851 - DNA, 25 bp, Homo sapien
ctgggtcttcatctccaggtctctc

SEQ ID NO: 5735852 - DNA, 25 bp, Homo sapien
cctaacccatctcacatgtaggact

SEQ ID NO: 5735853 - DNA, 25 bp, Homo sapien
tccagaaggagcgggaagcaaaggt

SEQ ID NO: 5735854 - DNA, 25 bp, Homo sapien
gaaagtaatgagctgggccaaacag

SEQ ID NO: 5735855 - DNA, 25 bp, Homo sapien
tggcagggtgggggcaggggcctcc

SEQ ID NO: 5735856 - DNA, 25 bp, Homo sapien
tcctgacacctggcttagagacaga

SEQ ID NO: 5735857 - DNA, 25 bp, Homo sapien
cggctggcgagctgcttgcgaaggt

SEQ ID NO: 5735858 - DNA, 25 bp, Homo sapien
ctcccgactagaatctgcccctcgc

SEQ ID NO: 5735859 - DNA, 25 bp, Homo sapien
taccaggaggtcttcacgtaggtga

SEQ ID NO: 5735860 - DNA, 25 bp, Homo sapien
tgtccagaaggagcgggaagcaaag

SEQ ID NO: 5735861 - DNA, 25 bp, Homo sapien
agctaccctggaagacgcaagaggg

SEQ ID NO: 5735862 - DNA, 25 bp, Homo sapien
gtcaaacccaaagtggtcaatggga

SEQ ID NO: 5735863 - DNA, 25 bp, Homo sapien
tttgctgtggtagagaaagggagaa

SEQ ID NO: 5735864 - DNA, 25 bp, Homo sapien
tactggcacaggtgctgccggatca

SEQ ID NO: 5735865 - DNA, 25 bp, Homo sapien
gaatctgcccctcgctcacgcttct

SEQ ID NO: 5735866 - DNA, 25 bp, Homo sapien
gctgcgtgtactggcacaggtgctg

SEQ ID NO: 5735867 - DNA, 25 bp, Homo sapien
tggcgatgaggatcccaggttctgg

SEQ ID NO: 5735868 - DNA, 25 bp, Homo sapien
ggaacgtcacacagtttattgtgat

SEQ ID NO: 5735869 - DNA, 25 bp, Homo sapien
gtctctctgccgctctgtgagggct

SEQ ID NO: 5735870 - DNA, 25 bp, Homo sapien
tcagcgctcaatttggggctaattt

SEQ ID NO: 5735871 - DNA, 25 bp, Homo sapien
caaacccaaagtggtcaatgggaaa

SEQ ID NO: 5735872 - DNA, 25 bp, Homo sapien
tgaattctgacatttccttctgcat

SEQ ID NO: 5735873 - DNA, 25 bp, Homo sapien
ctctagctccaatgtggtggtcacc

SEQ ID NO: 5735874 - DNA, 25 bp, Homo sapien
ggagagtgggggccagggcagccca

SEQ ID NO: 5735875 - DNA, 25 bp, Homo sapien
ttcaatgaaagaggcgccaaaaaat

SEQ ID NO: 5735876 - DNA, 25 bp, Homo sapien
ctttcccggatgaattctgacattt

SEQ ID NO: 5735877 - DNA, 25 bp, Homo sapien
tccaggcttctccagcaactgcacg

SEQ ID NO: 5735878 - DNA, 25 bp, Homo sapien
gcatttttctaatgtgaactatacg

SEQ ID NO: 5735879 - DNA, 25 bp, Homo sapien
ggagcagtagttcaaacccagccac

SEQ ID NO: 5735880 - DNA, 25 bp, Homo sapien
tttcagcagctgctgttccggcatc

SEQ ID NO: 5735881 - DNA, 25 bp, Homo sapien
cagcgtgatcagctcgcccgcggcg

SEQ ID NO: 5735882 - DNA, 25 bp, Homo sapien
tgcaatgtttcaagaacaagagaaa

SEQ ID NO: 5735883 - DNA, 25 bp, Homo sapien
cctccaaagccctggagacaaggga

SEQ ID NO: 5735884 - DNA, 25 bp, Homo sapien
actggcccaaactgggccaacctga

SEQ ID NO: 5735885 - DNA, 25 bp, Homo sapien
aacctgagctaccctggaagacgca

SEQ ID NO: 5735886 - DNA, 25 bp, Homo sapien
accagtgagttgtgcttgttgaatt

SEQ ID NO: 5735887 - DNA, 25 bp, Homo sapien
cggcgaagcgcagcccctggccgtg

SEQ ID NO: 5735888 - DNA, 25 bp, Homo sapien
aacccctggtgatgaacagtggctg

SEQ ID NO: 5735889 - DNA, 25 bp, Homo sapien
tgggtgcggctgtgagctgaatggc

SEQ ID NO: 5735890 - DNA, 25 bp, Homo sapien
cgtccgggacctgcagcagcgtgat

SEQ ID NO: 5735891 - DNA, 25 bp, Homo sapien
tttagactgacatggtggagaatgt

SEQ ID NO: 5735892 - DNA, 25 bp, Homo sapien
ttgaattctgccctcactgcagatg

SEQ ID NO: 5735893 - DNA, 25 bp, Homo sapien
tcctcagatgtaatggaaaagtcaa

SEQ ID NO: 5735894 - DNA, 25 bp, Homo sapien
ctgacatttccttctgcatttgttt

SEQ ID NO: 5735895 - DNA, 25 bp, Homo sapien
aaggtggcgggacactgcctgaaag

SEQ ID NO: 5735896 - DNA, 25 bp, Homo sapien
ccgggaaccagccacggagcccgtc

SEQ ID NO: 5735897 - DNA, 25 bp, Homo sapien
atcctccaaagccctggagacaagg

SEQ ID NO: 5735898 - DNA, 25 bp, Homo sapien
taggctgtccgggtcacccttctgg

SEQ ID NO: 5735899 - DNA, 25 bp, Homo sapien
aaactgggccaacctgagctaccct

SEQ ID NO: 5735900 - DNA, 25 bp, Homo sapien
acacagtttattgtgatggtgtttt

SEQ ID NO: 5735901 - DNA, 25 bp, Homo sapien
tgtttgctgtggtagagaaagggag

SEQ ID NO: 5735902 - DNA, 25 bp, Homo sapien
tctgggtgcggctgtgagctgaatg

SEQ ID NO: 5735903 - DNA, 25 bp, Homo sapien
ttctcgccttcccaccagccgccgt

SEQ ID NO: 5735904 - DNA, 25 bp, Homo sapien
tgaccgtctggctttcttctcccgg

SEQ ID NO: 5735905 - DNA, 25 bp, Homo sapien
agaccagacttttccagggattgga

SEQ ID NO: 5735906 - DNA, 25 bp, Homo sapien
ttcctcctaaaacccctggtgatga

SEQ ID NO: 5735907 - DNA, 25 bp, Homo sapien
gtttgtttccatccctgaagccttt

SEQ ID NO: 5735908 - DNA, 25 bp, Homo sapien
aaggcctttgtgctgacctttttgg

SEQ ID NO: 5735909 - DNA, 25 bp, Homo sapien
gcgcctgatctcatgggacacgatt

SEQ ID NO: 5735910 - DNA, 25 bp, Homo sapien
ttgataactgagaactttggaaagc

SEQ ID NO: 5735911 - DNA, 25 bp, Homo sapien
tggcttagagacagagacctcccta

SEQ ID NO: 5735912 - DNA, 25 bp, Homo sapien
tcggattctagcacgttgactgaaa

SEQ ID NO: 5735913 - DNA, 25 bp, Homo sapien
aatgtccagaaggagcgggaagcaa

SEQ ID NO: 5735914 - DNA, 25 bp, Homo sapien
tgatcctccaaagccctggagacaa

SEQ ID NO: 5735915 - DNA, 25 bp, Homo sapien
accagtgacagaaaactgtacaagg

SEQ ID NO: 5735916 - DNA, 25 bp, Homo sapien
ggaatcccaggagaactgctgggac

SEQ ID NO: 5735917 - DNA, 25 bp, Homo sapien
ccattccaggcttctccagcaactg

SEQ ID NO: 5735918 - DNA, 25 bp, Homo sapien
tgagacgagctggtttgtttccatc

SEQ ID NO: 5735919 - DNA, 25 bp, Homo sapien
ggacctgcagcagcgtgatcagctc

SEQ ID NO: 5735920 - DNA, 25 bp, Homo sapien
tctttagactgacatggtggagaat

SEQ ID NO: 5735921 - DNA, 25 bp, Homo sapien
ggaagcagctgggggaaggatggat

SEQ ID NO: 5735922 - DNA, 25 bp, Homo sapien
ttctaaaattggtagctggtgtcat

SEQ ID NO: 5735923 - DNA, 25 bp, Homo sapien
acttctgcttcgtccgccaggctct

SEQ ID NO: 5735924 - DNA, 25 bp, Homo sapien
atctccatgtccacagggcggatgt

SEQ ID NO: 5735925 - DNA, 25 bp, Homo sapien
cacgtaggtgaaggcctttgtgctg

SEQ ID NO: 5735926 - DNA, 25 bp, Homo sapien
aaaacccctggtgatgaacagtggc

SEQ ID NO: 5735927 - DNA, 25 bp, Homo sapien
ggcacaggtgctgccggatcatctc

SEQ ID NO: 5735928 - DNA, 25 bp, Homo sapien
gcaaagacttgccctaacccatctc

SEQ ID NO: 5735929 - DNA, 25 bp, Homo sapien
acaggtagctctgccagccaggtgg

SEQ ID NO: 5735930 - DNA, 25 bp, Homo sapien
tattctaaaattggtagctggtgtc

SEQ ID NO: 5735931 - DNA, 25 bp, Homo sapien
tcctcctctgtcttgttgctcagct

SEQ ID NO: 5735932 - DNA, 25 bp, Homo sapien
tattaggcatttttctaatgtgaac

SEQ ID NO: 5735933 - DNA, 25 bp, Homo sapien
cgcggcgaagcgcagcccctggccg

SEQ ID NO: 5735934 - DNA, 25 bp, Homo sapien
tcagcctcagagacaagggcagggc

SEQ ID NO: 5735935 - DNA, 25 bp, Homo sapien
catgacccaaccccagatctggaca

SEQ ID NO: 5735936 - DNA, 25 bp, Homo sapien
cttggcagagaacttgaggtgaact

SEQ ID NO: 5735937 - DNA, 25 bp, Homo sapien
gtcatcggattctagcacgttgact

SEQ ID NO: 5735938 - DNA, 25 bp, Homo sapien
aggcatagcggctggcgagctgctt

SEQ ID NO: 5735939 - DNA, 25 bp, Homo sapien
gcttcccaagtcacactcagaccag

SEQ ID NO: 5735940 - DNA, 25 bp, Homo sapien
gtggggggcatccactcggcatggg

SEQ ID NO: 5735941 - DNA, 25 bp, Homo sapien
gtgaacttctgcttcgtccgccagg

SEQ ID NO: 5735942 - DNA, 25 bp, Homo sapien
gccgctctgtgagggctttccgggc

SEQ ID NO: 5735943 - DNA, 25 bp, Homo sapien
cagacttttccagggattggaagat

SEQ ID NO: 5735944 - DNA, 25 bp, Homo sapien
gagatccacacagcgcatgaggtcg

SEQ ID NO: 5735945 - DNA, 25 bp, Homo sapien
gcagagagctcctgtgagagccagg

SEQ ID NO: 5735946 - DNA, 25 bp, Homo sapien
cgttcccaggtggtctcattggtgg

SEQ ID NO: 5735947 - DNA, 25 bp, Homo sapien
ctgacacctggcttagagacagaga

SEQ ID NO: 5735948 - DNA, 25 bp, Homo sapien
tgttggaggcagagagctcctgtga

SEQ ID NO: 5735949 - DNA, 25 bp, Homo sapien
ggccagggcagcccaaaggtgcaca

SEQ ID NO: 5735950 - DNA, 25 bp, Homo sapien
gctgatccacgggctcgactgtgct

SEQ ID NO: 5735951 - DNA, 25 bp, Homo sapien
tgggtgagggaacgtcacacagttt

SEQ ID NO: 5735952 - DNA, 25 bp, Homo sapien
agctcctgtgagagccagggctggc

SEQ ID NO: 5735953 - DNA, 25 bp, Homo sapien
gctttttgcttggcgatgaggatcc

SEQ ID NO: 5735954 - DNA, 25 bp, Homo sapien
tgggggagcccccagctaggctgtc

SEQ ID NO: 5735955 - DNA, 25 bp, Homo sapien
tggagacaagggagccagctggagg

SEQ ID NO: 5735956 - DNA, 25 bp, Homo sapien
cctggtgatgaacagtggctgagaa

SEQ ID NO: 5735957 - DNA, 25 bp, Homo sapien
ggcttccagggcacaagcatgtgac

SEQ ID NO: 5735958 - DNA, 25 bp, Homo sapien
tgccatacccaagaagacagagcca

SEQ ID NO: 5735959 - DNA, 25 bp, Homo sapien
aactcggcaaggaccacaaagttcc

SEQ ID NO: 5735960 - DNA, 25 bp, Homo sapien
agatgtgcaggtcaaacccaaagtg

SEQ ID NO: 5735961 - DNA, 25 bp, Homo sapien
catggtggagaatgtgtttgctgtg

SEQ ID NO: 5735962 - DNA, 25 bp, Homo sapien
ttctgatcctgacacctggcttaga

SEQ ID NO: 5735963 - DNA, 25 bp, Homo sapien
gttgactgaaagaccagtgagttgt

SEQ ID NO: 5735964 - DNA, 25 bp, Homo sapien
attaataagtcatcggattctagca

SEQ ID NO: 5735965 - DNA, 25 bp, Homo sapien
actctttagactgacatggtggaga

SEQ ID NO: 5735966 - DNA, 25 bp, Homo sapien
agatcctaccaggaggtcttcacgt

SEQ ID NO: 5735967 - DNA, 25 bp, Homo sapien
cgggacctgcagcagcgtgatcagc

SEQ ID NO: 5735968 - DNA, 25 bp, Homo sapien
ctcacggaagttcatcaggggcttc

SEQ ID NO: 5735969 - DNA, 25 bp, Homo sapien
aaactgtacaagggacagcagtccc

SEQ ID NO: 5735970 - DNA, 25 bp, Homo sapien
gaatgcaatgggaaaaaaataaaga

SEQ ID NO: 5735971 - DNA, 25 bp, Homo sapien
gaagagccttggggcttccagggca

SEQ ID NO: 5735972 - DNA, 25 bp, Homo sapien
tcactgttggaggcagagagctcct

SEQ ID NO: 5735973 - DNA, 25 bp, Homo sapien
ccagcttgctggcctctgagacgag

SEQ ID NO: 5735974 - DNA, 25 bp, Homo sapien
ggaatcctcagatgtaatggaaaag

SEQ ID NO: 5735975 - DNA, 25 bp, Homo sapien
gctgctgggtcttcatctccaggtc

SEQ ID NO: 5735976 - DNA, 25 bp, Homo sapien
agctcgcccgcggcgaagcgcagcc

SEQ ID NO: 5735977 - DNA, 25 bp, Homo sapien
aaggattctgggtgcggctgtgagc

SEQ ID NO: 5735978 - DNA, 25 bp, Homo sapien
gaggtcgtctccagcctgtgtggac

SEQ ID NO: 5735979 - DNA, 25 bp, Homo sapien
tcatgtgggcagtctctggagggtg

SEQ ID NO: 5735980 - DNA, 25 bp, Homo sapien
acgtagctcgccgggaaccagccac

SEQ ID NO: 5735981 - DNA, 25 bp, Homo sapien
actcggttggtttcagcagctgctg

SEQ ID NO: 5735982 - DNA, 25 bp, Homo sapien
agagtggttctccatcccatggaca

SEQ ID NO: 5735983 - DNA, 25 bp, Homo sapien
agaccagtgagttgtgcttgttgaa

SEQ ID NO: 5735984 - DNA, 25 bp, Homo sapien
gcggcccgggagagtgggggccagg

SEQ ID NO: 5735985 - DNA, 25 bp, Homo sapien
tgtttgcccttcagctgtttctgga

SEQ ID NO: 5735986 - DNA, 25 bp, Homo sapien
atgggagtcagggggtcttcagcct

SEQ ID NO: 5735987 - DNA, 25 bp, Homo sapien
aagagggctcactctatcccaggga

SEQ ID NO: 5735988 - DNA, 25 bp, Homo sapien
gtcaatgagccatattgtactcaaa

SEQ ID NO: 5735989 - DNA, 25 bp, Homo sapien
cctagtgtggccacaagagagtctg

SEQ ID NO: 5735990 - DNA, 25 bp, Homo sapien
aggtgcagacaccaagtaagggttt

SEQ ID NO: 5735991 - DNA, 25 bp, Homo sapien
aatcaccggtggattttcggacact

SEQ ID NO: 5735992 - DNA, 25 bp, Homo sapien
ctaaaattggtagctggtgtcatga

SEQ ID NO: 5735993 - DNA, 25 bp, Homo sapien
gagaaagccagatgtggactcccag

SEQ ID NO: 5735994 - DNA, 25 bp, Homo sapien
aagatggagagagggaaaggaggtg

SEQ ID NO: 5735995 - DNA, 25 bp, Homo sapien
aagttccagcctctgtctgtttcag

SEQ ID NO: 5735996 - DNA, 25 bp, Homo sapien
agccagggctggctggaatcccagg

SEQ ID NO: 5735997 - DNA, 25 bp, Homo sapien
cattcaatgaaagaggcgccaaaaa

SEQ ID NO: 5735998 - DNA, 25 bp, Homo sapien
gggggtccttcttatcagcccagaa

SEQ ID NO: 5735999 - DNA, 25 bp, Homo sapien
ctggatgaggtcttgataactgaga

SEQ ID NO: 5736000 - DNA, 25 bp, Homo sapien
ggagaatgtgtttgctgtggtagag

SEQ ID NO: 5736001 - DNA, 25 bp, Homo sapien
ggtgctgccggatcatctctaccct

SEQ ID NO: 5736002 - DNA, 25 bp, Homo sapien
catctcttcaaaccatttggactgg

SEQ ID NO: 5736003 - DNA, 25 bp, Homo sapien
ggctttgaatgtttggaaatcatcc

SEQ ID NO: 5736004 - DNA, 25 bp, Homo sapien
gaaggagggctgcaaaggattctgg

SEQ ID NO: 5736005 - DNA, 25 bp, Homo sapien
caaagtggtcaatgggaaagatgaa

SEQ ID NO: 5736006 - DNA, 25 bp, Homo sapien
gcccatctagatctccatgtccaca

SEQ ID NO: 5736007 - DNA, 25 bp, Homo sapien
tccagtgcccaccagtgacagaaaa

SEQ ID NO: 5736008 - DNA, 25 bp, Homo sapien
cccgcggcgaagcgcagcccctggc

SEQ ID NO: 5736009 - DNA, 25 bp, Homo sapien
agatctccatgtccacagggcggat

SEQ ID NO: 5736010 - DNA, 25 bp, Homo sapien
atcatccacagagtagtttactaag

SEQ ID NO: 5736011 - DNA, 25 bp, Homo sapien
tcatctctaccctctccacctccag

SEQ ID NO: 5736012 - DNA, 25 bp, Homo sapien
ctggaatcccaggagaactgctggg

SEQ ID NO: 5736013 - DNA, 25 bp, Homo sapien
cccgactagaatctgcccctcgctc

SEQ ID NO: 5736014 - DNA, 25 bp, Homo sapien
gtccgggtcacccttctggaatcac

SEQ ID NO: 5736015 - DNA, 25 bp, Homo sapien
aaataatattctaaaattggtagct

SEQ ID NO: 5736016 - DNA, 25 bp, Homo sapien
tcccggcccctttagactctttaga

SEQ ID NO: 5736017 - DNA, 25 bp, Homo sapien
ttcccggatgaattctgacatttcc

SEQ ID NO: 5736018 - DNA, 25 bp, Homo sapien
ggagcccccagctaggctgtccggg

SEQ ID NO: 5736019 - DNA, 25 bp, Homo sapien
ccacgcctctcccaaggagccttcc

SEQ ID NO: 5736020 - DNA, 25 bp, Homo sapien
gtgtggccacaagagagtctgctat

SEQ ID NO: 5736021 - DNA, 25 bp, Homo sapien
catattgtactcaaaatatcttgtt

SEQ ID NO: 5736022 - DNA, 25 bp, Homo sapien
gccagccaggtggaaggatgaccgt

SEQ ID NO: 5736023 - DNA, 25 bp, Homo sapien
ctgcctgaaaggcgacaacctagtg

SEQ ID NO: 5736024 - DNA, 25 bp, Homo sapien
atggaaaagtcaatgagccatattg

SEQ ID NO: 5736025 - DNA, 25 bp, Homo sapien
tcgaagcagctgatccacgggctcg

SEQ ID NO: 5736026 - DNA, 25 bp, Homo sapien
taggtgaaggcctttgtgctgacct

SEQ ID NO: 5736027 - DNA, 25 bp, Homo sapien
cccaccagccgccgtccgggacctg

SEQ ID NO: 5736028 - DNA, 25 bp, Homo sapien
aacgtcacacagtttattgtgatgg

SEQ ID NO: 5736029 - DNA, 25 bp, Homo sapien
gtggagaatgtgtttgctgtggtag

SEQ ID NO: 5736030 - DNA, 25 bp, Homo sapien
ccaatgtggtggtcaccatctcttc

SEQ ID NO: 5736031 - DNA, 25 bp, Homo sapien
ggcagcccaaaggtgcacagggcac

SEQ ID NO: 5736032 - DNA, 25 bp, Homo sapien
gacgagctggatgaggtcttgataa

SEQ ID NO: 5736033 - DNA, 25 bp, Homo sapien
tagtcgcagtagctccactcggttg

SEQ ID NO: 5736034 - DNA, 25 bp, Homo sapien
ctccctaccctgatcctccaaagcc

SEQ ID NO: 5736035 - DNA, 25 bp, Homo sapien
ggccttctccaccgaggcatagcgg

SEQ ID NO: 5736036 - DNA, 25 bp, Homo sapien
agcccccagctaggctgtccgggtc

SEQ ID NO: 5736037 - DNA, 25 bp, Homo sapien
cccttcagctgtttctggagcagta

SEQ ID NO: 5736038 - DNA, 25 bp, Homo sapien
cactgaaagcttcccaagtcacact

SEQ ID NO: 5736039 - DNA, 25 bp, Homo sapien
acactcagaccagacttttccaggg

SEQ ID NO: 5736040 - DNA, 25 bp, Homo sapien
tattggctttgaatgtttggaaatc

SEQ ID NO: 5736041 - DNA, 25 bp, Homo sapien
aagcttcccaagtcacactcagacc

SEQ ID NO: 5736042 - DNA, 25 bp, Homo sapien
tcacctgggcccacgcctctcccaa

SEQ ID NO: 5736043 - DNA, 25 bp, Homo sapien
gcagggctgtgggtctgtcttctgg

SEQ ID NO: 5736044 - DNA, 25 bp, Homo sapien
cagctgatccacgggctcgactgtg

SEQ ID NO: 5736045 - DNA, 25 bp, Homo sapien
gaagcttggcagagaacttgaggtg

SEQ ID NO: 5736046 - DNA, 25 bp, Homo sapien
aagagagtctgctatgcctgtccag

SEQ ID NO: 5736047 - DNA, 25 bp, Homo sapien
agctcgccgggaaccagccacggag

SEQ ID NO: 5736048 - DNA, 25 bp, Homo sapien
gggtctgggaagacaggagccaagc

SEQ ID NO: 5736049 - DNA, 25 bp, Homo sapien
gagccatattgtactcaaaatatct

SEQ ID NO: 5736050 - DNA, 25 bp, Homo sapien
gccctggagacaagggagccagctg

SEQ ID NO: 5736051 - DNA, 25 bp, Homo sapien
tcggcatgggccccatggtgggagc

SEQ ID NO: 5736052 - DNA, 25 bp, Homo sapien
aaagaccagtgagttgtgcttgttg

SEQ ID NO: 5736053 - DNA, 25 bp, Homo sapien
gacaagggagccagctggaggaaga

SEQ ID NO: 5736054 - DNA, 25 bp, Homo sapien
ctgggacgttcccaggtggtctcat

SEQ ID NO: 5736055 - DNA, 25 bp, Homo sapien
gagcccgtcctccttctcgccttcc

SEQ ID NO: 5736056 - DNA, 25 bp, Homo sapien
gaaaggaggtgcagacaccaagtaa

SEQ ID NO: 5736057 - DNA, 25 bp, Homo sapien
ctgtgaagcttggcagagaacttga

SEQ ID NO: 5736058 - DNA, 25 bp, Homo sapien
gattggaagatggagagagggaaag

SEQ ID NO: 5736059 - DNA, 25 bp, Homo sapien
caatgtttcaagaacaagagaaaag

SEQ ID NO: 5736060 - DNA, 25 bp, Homo sapien
tttacagatggcgcctgatctcatg

SEQ ID NO: 5736061 - DNA, 25 bp, Homo sapien
tagcacgttgactgaaagaccagtg

SEQ ID NO: 5736062 - DNA, 25 bp, Homo sapien
cacctggcttagagacagagacctc

SEQ ID NO: 5736063 - DNA, 25 bp, Homo sapien
gtgcacagggcaccgtggcggacag

SEQ ID NO: 5736064 - DNA, 25 bp, Homo sapien
tggtcgtgttgacatagtaccgccg

SEQ ID NO: 5736065 - DNA, 25 bp, Homo sapien
tctgtcttgttgctcagcttgatct

SEQ ID NO: 5736066 - DNA, 25 bp, Homo sapien
gccacaaagcaattaccactagcac

SEQ ID NO: 5736067 - DNA, 25 bp, Homo sapien
ttctcattcaatgaaagaggcgcca

SEQ ID NO: 5736068 - DNA, 25 bp, Homo sapien
gggggtcttcagcctcagagacaag

SEQ ID NO: 5736069 - DNA, 25 bp, Homo sapien
gactttctccgcgccttcttgatgt

SEQ ID NO: 5736070 - DNA, 25 bp, Homo sapien
gggtccctgatgcgtggtatccatt

SEQ ID NO: 5736071 - DNA, 25 bp, Homo sapien
gaaagggagaaagtaatgagctggg

SEQ ID NO: 5736072 - DNA, 25 bp, Homo sapien
gcgggaagcaaaggtggcgggacac

SEQ ID NO: 5736073 - DNA, 25 bp, Homo sapien
tcttgatgtcctcctctgtcttgtt

SEQ ID NO: 5736074 - DNA, 25 bp, Homo sapien
ctccaggtctctctgccgctctgtg

SEQ ID NO: 5736075 - DNA, 25 bp, Homo sapien
agagccatctgggggatggcaaaga

SEQ ID NO: 5736076 - DNA, 25 bp, Homo sapien
gcaggtcaaacccaaagtggtcaat

SEQ ID NO: 5736077 - DNA, 25 bp, Homo sapien
cggcatcgtgtctgggtgagggaac

SEQ ID NO: 5736078 - DNA, 25 bp, Homo sapien
cctacaaaactcggcaaggaccaca

SEQ ID NO: 5736079 - DNA, 25 bp, Homo sapien
tggcgcctgatctcatgggacacga

SEQ ID NO: 5736080 - DNA, 25 bp, Homo sapien
gatgaacagtggctgagaaagccag

SEQ ID NO: 5736081 - DNA, 25 bp, Homo sapien
cttctggaatcaccagctctctccc

SEQ ID NO: 5736082 - DNA, 25 bp, Homo sapien
gaatgaggtagttccatcctgacct

SEQ ID NO: 5736083 - DNA, 25 bp, Homo sapien
gatggtgttttccttgctctgcttt

SEQ ID NO: 5736084 - DNA, 25 bp, Homo sapien
gggagaaagtaatgagctgggccaa

SEQ ID NO: 5736085 - DNA, 25 bp, Homo sapien
ttctggagcagtagttcaaacccag

SEQ ID NO: 5736086 - DNA, 25 bp, Homo sapien
cagtgacagaaaactgtacaaggga

SEQ ID NO: 5736087 - DNA, 25 bp, Homo sapien
aagcaattaccactagcacccattt

SEQ ID NO: 5736088 - DNA, 25 bp, Homo sapien
ggccccatggtgggagcccagcccc

SEQ ID NO: 5736089 - DNA, 25 bp, Homo sapien
aatgggaaagatgaagaaagatgga

SEQ ID NO: 5736090 - DNA, 25 bp, Homo sapien
cagccgctctagctccaatgtggtg

SEQ ID NO: 5736091 - DNA, 25 bp, Homo sapien
acagcagtcccagccctgccatacc

SEQ ID NO: 5736092 - DNA, 25 bp, Homo sapien
ctgacccacagctccctgtctttgg

SEQ ID NO: 5736093 - DNA, 25 bp, Homo sapien
cagcaactgcacgtagctcgccggg

SEQ ID NO: 5736094 - DNA, 25 bp, Homo sapien
agagagctcctgtgagagccagggc

SEQ ID NO: 5736095 - DNA, 25 bp, Homo sapien
gacccctacaaaactcggcaaggac

SEQ ID NO: 5736096 - DNA, 25 bp, Homo sapien
tagagatccacacagcgcatgaggt

SEQ ID NO: 5736097 - DNA, 25 bp, Homo sapien
cggacaggccccagcttgctggcct

SEQ ID NO: 5736098 - DNA, 25 bp, Homo sapien
gccgggtccacttttcgaagcagct

SEQ ID NO: 5736099 - DNA, 25 bp, Homo sapien
agcctttggacgagctggatgaggt

SEQ ID NO: 5736100 - DNA, 25 bp, Homo sapien
gcttagagacagagacctccctacc

SEQ ID NO: 5736101 - DNA, 25 bp, Homo sapien
aaatggactggcccaaactgggcca

SEQ ID NO: 5736102 - DNA, 25 bp, Homo sapien
gcatgggagtcagggggtcttcagc

SEQ ID NO: 5736103 - DNA, 25 bp, Homo sapien
gtcagggggtcttcagcctcagaga

SEQ ID NO: 5736104 - DNA, 25 bp, Homo sapien
agttcttcgcatagtcttcttcaat

SEQ ID NO: 5736105 - DNA, 25 bp, Homo sapien
aatcctcagatgtaatggaaaagtc

SEQ ID NO: 5736106 - DNA, 25 bp, Homo sapien
accggtggattttcggacactcatg

SEQ ID NO: 5736107 - DNA, 25 bp, Homo sapien
ttggaggcagagagctcctgtgaga

SEQ ID NO: 5736108 - DNA, 25 bp, Homo sapien
ctccacctcgctgtgaagcttggca

SEQ ID NO: 5736109 - DNA, 25 bp, Homo sapien
gtttggaaatcatccacagagtagt

SEQ ID NO: 5736110 - DNA, 25 bp, Homo sapien
tgtagagatccacacagcgcatgag

SEQ ID NO: 5736111 - DNA, 25 bp, Homo sapien
tgcctgtccagtgcccaccagtgac

SEQ ID NO: 5736112 - DNA, 25 bp, Homo sapien
gagttctgagagagcttagctaagt

SEQ ID NO: 5736113 - DNA, 25 bp, Homo sapien
tgatccacgggctcgactgtgcttt

SEQ ID NO: 5736114 - DNA, 25 bp, Homo sapien
ccagggatgaacagaggactctgga

SEQ ID NO: 5736115 - DNA, 25 bp, Homo sapien
tttatcctttcccggatgaattctg

SEQ ID NO: 5736116 - DNA, 25 bp, Homo sapien
gggcctccccgaggaagcagctggg

SEQ ID NO: 5736117 - DNA, 25 bp, Homo sapien
atctagatctccatgtccacagggc

SEQ ID NO: 5736118 - DNA, 25 bp, Homo sapien
gcgctggggtccctgatgcgtggta

SEQ ID NO: 5736119 - DNA, 25 bp, Homo sapien
ggtagttccatcctgacctctccag

SEQ ID NO: 5736120 - DNA, 25 bp, Homo sapien
tgctcagcttgatctccagctgctg

SEQ ID NO: 5736121 - DNA, 25 bp, Homo sapien
gagctgcttgcgaaggtcggcaatg

SEQ ID NO: 5736122 - DNA, 25 bp, Homo sapien
atctccaggtctctctgccgctctg

SEQ ID NO: 5736123 - DNA, 25 bp, Homo sapien
gggcttctccacctcgctgtgaagc

SEQ ID NO: 5736124 - DNA, 25 bp, Homo sapien
ggaatatgggggagcccccagctag

SEQ ID NO: 5736125 - DNA, 25 bp, Homo sapien
gaaaggcgacaacctagtgtggcca

SEQ ID NO: 5736126 - DNA, 25 bp, Homo sapien
ccccgaagctgcacaggcccatcta

SEQ ID NO: 5736127 - DNA, 25 bp, Homo sapien
tggtgttttccttgctctgcttttt

SEQ ID NO: 5736128 - DNA, 25 bp, Homo sapien
gatgtggactcccagaatgcaatgg

SEQ ID NO: 5736129 - DNA, 25 bp, Homo sapien
tcccatggacagatcctaccaggag

SEQ ID NO: 5736130 - DNA, 25 bp, Homo sapien
ccaggctcttcttcacctgggccca

SEQ ID NO: 5736131 - DNA, 25 bp, Homo sapien
gagagggaaaggaggtgcagacacc

SEQ ID NO: 5736132 - DNA, 25 bp, Homo sapien
acaggcccatctagatctccatgtc

SEQ ID NO: 5736133 - DNA, 25 bp, Homo sapien
ccctgatgcgtggtatccattcact

SEQ ID NO: 5736134 - DNA, 25 bp, Homo sapien
tgagctgggccaaacagcagcactg

SEQ ID NO: 5736135 - DNA, 25 bp, Homo sapien
gctggcgagctgcttgcgaaggtcg

SEQ ID NO: 5736136 - DNA, 25 bp, Homo sapien
tcccggcggaggggggaccattcca

SEQ ID NO: 5736137 - DNA, 25 bp, Homo sapien
agcaggaccccccgaagctgcacag

SEQ ID NO: 5736138 - DNA, 25 bp, Homo sapien
agagacagagacctccctaccctga

SEQ ID NO: 5736139 - DNA, 25 bp, Homo sapien
cttccagggcacaagcatgtgacag

SEQ ID NO: 5736140 - DNA, 25 bp, Homo sapien
aagccagatgtggactcccagaatg

SEQ ID NO: 5736141 - DNA, 25 bp, Homo sapien
ctagctccaatgtggtggtcaccat

SEQ ID NO: 5736142 - DNA, 25 bp, Homo sapien
agcttcctctaatgagactgggaag

SEQ ID NO: 5736143 - DNA, 25 bp, Homo sapien
cagaaaactgtacaagggacagcag

SEQ ID NO: 5736144 - DNA, 25 bp, Homo sapien
aatgagctgggccaaacagcagcac

SEQ ID NO: 5736145 - DNA, 25 bp, Homo sapien
gcacaagcatgtgacagtgacccct

SEQ ID NO: 5736146 - DNA, 25 bp, Homo sapien
tcaatgggaaagatgaagaaagatg

SEQ ID NO: 5736147 - DNA, 25 bp, Homo sapien
ccttgggggtccttcttatcagccc

SEQ ID NO: 5736148 - DNA, 25 bp, Homo sapien
gggggaccattccaggcttctccag

SEQ ID NO: 5736149 - DNA, 25 bp, Homo sapien
cagccacggtgccgttgccttgggg

SEQ ID NO: 5736150 - DNA, 25 bp, Homo sapien
ggaaagagtgacctccaaaaatgga

SEQ ID NO: 5736151 - DNA, 25 bp, Homo sapien
ccctcactgcagatgtgcaggtcaa

SEQ ID NO: 5736152 - DNA, 25 bp, Homo sapien
ggccctgaggcgacaggtagctctg

SEQ ID NO: 5736153 - DNA, 25 bp, Homo sapien
agagtgggggccagggcagcccaaa

SEQ ID NO: 5736154 - DNA, 25 bp, Homo sapien
cctgtggtgggcggcccgggagagt

SEQ ID NO: 5736155 - DNA, 25 bp, Homo sapien
aggaagagccttggggcttccaggg

SEQ ID NO: 5736156 - DNA, 25 bp, Homo sapien
tctcccggcccctttagactcttta

SEQ ID NO: 5736157 - DNA, 25 bp, Homo sapien
tgaggtgaacttctgcttcgtccgc

SEQ ID NO: 5736158 - DNA, 25 bp, Homo sapien
ccgaatgaggtagttccatcctgac

SEQ ID NO: 5736159 - DNA, 25 bp, Homo sapien
ctgaggcgacaggtagctctgccag

SEQ ID NO: 5736160 - DNA, 25 bp, Homo sapien
cacatgtaggactgacccggcccca

SEQ ID NO: 5736161 - DNA, 25 bp, Homo sapien
acctccaaaaatggactggcccaaa

SEQ ID NO: 5736162 - DNA, 25 bp, Homo sapien
cttctgcatttgtttgcccttcagc

SEQ ID NO: 5736163 - DNA, 25 bp, Homo sapien
gttttccttgctctgctttttgctt

SEQ ID NO: 5736164 - DNA, 25 bp, Homo sapien
ttgcccgtcttgtgctctctgaccc

SEQ ID NO: 5736165 - DNA, 25 bp, Homo sapien
ttcgtccgccaggctcttcttcacc

SEQ ID NO: 5736166 - DNA, 25 bp, Homo sapien
cgtctggctttcttctcccggcgga

SEQ ID NO: 5736167 - DNA, 25 bp, Homo sapien
ccagggcatgggctcccgactagaa

SEQ ID NO: 5736168 - DNA, 25 bp, Homo sapien
cagaggagactttacagatggcgcc

SEQ ID NO: 5736169 - DNA, 25 bp, Homo sapien
tggttgcaatgtttcaagaacaaga

SEQ ID NO: 5736170 - DNA, 25 bp, Homo sapien
atgtgcaggtcaaacccaaagtggt

SEQ ID NO: 5736171 - DNA, 25 bp, Homo sapien
gtagctccactcggttggtttcagc

SEQ ID NO: 5736172 - DNA, 25 bp, Homo sapien
ccttggggcttccagggcacaagca

SEQ ID NO: 5736173 - DNA, 25 bp, Homo sapien
gagtcagggggtcttcagcctcaga

SEQ ID NO: 5736174 - DNA, 25 bp, Homo sapien
gcagcagcgtgatcagctcgcccgc

SEQ ID NO: 5736175 - DNA, 25 bp, Homo sapien
gccttcctcctaaaacccctggtga

SEQ ID NO: 5736176 - DNA, 25 bp, Homo sapien
gtggtcaccatctcttcaaaccatt

SEQ ID NO: 5736177 - DNA, 25 bp, Homo sapien
agactgggaagggctggcagggtgg

SEQ ID NO: 5736178 - DNA, 25 bp, Homo sapien
aggaggtcttcacgtaggtgaaggc

SEQ ID NO: 5736179 - DNA, 25 bp, Homo sapien
ggccaacctgagctaccctggaaga

SEQ ID NO: 5736180 - DNA, 25 bp, Homo sapien
ttgtactcaaaatatcttgttaata

SEQ ID NO: 5736181 - DNA, 25 bp, Homo sapien
tcctaaaacccctggtgatgaacag

SEQ ID NO: 5736182 - DNA, 25 bp, Homo sapien
gaggtcttcacgtaggtgaaggcct

SEQ ID NO: 5736183 - DNA, 25 bp, Homo sapien
tacaaaactcggcaaggaccacaaa

SEQ ID NO: 5736184 - DNA, 25 bp, Homo sapien
cagagcggcaagcacagcatgggag

SEQ ID NO: 5736185 - DNA, 25 bp, Homo sapien
ggggctaatttgccgaatgaggtag

SEQ ID NO: 5736186 - DNA, 25 bp, Homo sapien
tgaacagtggctgagaaagccagat

SEQ ID NO: 5736187 - DNA, 25 bp, Homo sapien
gccgtccgggacctgcagcagcgtg

SEQ ID NO: 5736188 - DNA, 25 bp, Homo sapien
ggcggacaggccccagcttgctggc

SEQ ID NO: 5736189 - DNA, 25 bp, Homo sapien
ttggggctaatttgccgaatgaggt

SEQ ID NO: 5736190 - DNA, 25 bp, Homo sapien
agaactttggaaagcttcctctaat

SEQ ID NO: 5736191 - DNA, 25 bp, Homo sapien
cgcagctgcgtgtactggcacaggt

SEQ ID NO: 5736192 - DNA, 25 bp, Homo sapien
gaagttcatcaggggcttctccacc

SEQ ID NO: 5736193 - DNA, 25 bp, Homo sapien
gagccttcctcctgtgaagccaagg

SEQ ID NO: 5736194 - DNA, 25 bp, Homo sapien
ggtggtcgtgttgacatagtaccgc

SEQ ID NO: 5736195 - DNA, 25 bp, Homo sapien
tcatgggacacgattcagcgctcaa

SEQ ID NO: 5736196 - DNA, 25 bp, Homo sapien
ttctgcttcgtccgccaggctcttc

SEQ ID NO: 5736197 - DNA, 25 bp, Homo sapien
gctggtgtcatgacccaaccccaga

SEQ ID NO: 5736198 - DNA, 25 bp, Homo sapien
aggcagagagctcctgtgagagcca

SEQ ID NO: 5736199 - DNA, 25 bp, Homo sapien
tgggcctgggaatatgggggagccc

SEQ ID NO: 5736200 - DNA, 25 bp, Homo sapien
catttccagaggagactttacagat

SEQ ID NO: 5736201 - DNA, 25 bp, Homo sapien
agcagctgatccacgggctcgactg

SEQ ID NO: 5736202 - DNA, 25 bp, Homo sapien
agccagctggaggaagagccttggg

SEQ ID NO: 5736203 - DNA, 25 bp, Homo sapien
cgggtccacttttcgaagcagctga

SEQ ID NO: 5736204 - DNA, 25 bp, Homo sapien
aaggaccacaaagttccagcctctg

SEQ ID NO: 5736205 - DNA, 25 bp, Homo sapien
aaaattagagattaataagtcatcg

SEQ ID NO: 5736206 - DNA, 25 bp, Homo sapien
ccaaaggtgcacagggcaccgtggc

SEQ ID NO: 5736207 - DNA, 25 bp, Homo sapien
catttccttctgcatttgtttgccc

SEQ ID NO: 5736208 - DNA, 25 bp, Homo sapien
agacgagctggtttgtttccatccc

SEQ ID NO: 5736209 - DNA, 25 bp, Homo sapien
gcccgtcttgtgctctctgacccac

SEQ ID NO: 5736210 - DNA, 25 bp, Homo sapien
tattgtactcaaaatatcttgttaa

SEQ ID NO: 5736211 - DNA, 25 bp, Homo sapien
ggaatcaccggtggattttcggaca

SEQ ID NO: 5736212 - DNA, 25 bp, Homo sapien
tggagagagggaaaggaggtgcaga

SEQ ID NO: 5736213 - DNA, 25 bp, Homo sapien
ggattctagcacgttgactgaaaga

SEQ ID NO: 5736214 - DNA, 25 bp, Homo sapien
atgtggtggtcgcacttcttcatgt

SEQ ID NO: 5736215 - DNA, 25 bp, Homo sapien
aatttgccgaatgaggtagttccat

SEQ ID NO: 5736216 - DNA, 25 bp, Homo sapien
ggaggtgcagacaccaagtaagggt

SEQ ID NO: 5736217 - DNA, 25 bp, Homo sapien
ctccaaaaatggactggcccaaact

SEQ ID NO: 5736218 - DNA, 25 bp, Homo sapien
gcaagagggctcactctatcccagg

SEQ ID NO: 5736219 - DNA, 25 bp, Homo sapien
tctgggcctgggaatatgggggagc

SEQ ID NO: 5736220 - DNA, 25 bp, Homo sapien
tgagggaacgtcacacagtttattg

SEQ ID NO: 5736221 - DNA, 25 bp, Homo sapien
caatttggggctaatttgccgaatg

SEQ ID NO: 5736222 - DNA, 25 bp, Homo sapien
tgctgccggatcatctctaccctct

SEQ ID NO: 5736223 - DNA, 25 bp, Homo sapien
gaagctgcacaggcccatctagatc

SEQ ID NO: 5736224 - DNA, 25 bp, Homo sapien
ggcctctgagacgagctggtttgtt

SEQ ID NO: 5736225 - DNA, 25 bp, Homo sapien
gtttccatccctgaagcctttggac

SEQ ID NO: 5736226 - DNA, 25 bp, Homo sapien
aacaagagaaaagtgacaacgtttg

SEQ ID NO: 5736227 - DNA, 25 bp, Homo sapien
actgggccaacctgagctaccctgg

SEQ ID NO: 5736228 - DNA, 25 bp, Homo sapien
tttgcttggcgatgaggatcccagg

SEQ ID NO: 5736229 - DNA, 25 bp, Homo sapien
ttctccacctcgctgtgaagcttgg

SEQ ID NO: 5736230 - DNA, 25 bp, Homo sapien
aagccctggagacaagggagccagc

SEQ ID NO: 5736231 - DNA, 25 bp, Homo sapien
tttcgaagcagctgatccacgggct

SEQ ID NO: 5736232 - DNA, 25 bp, Homo sapien
atggatttccagggcatgggctccc

SEQ ID NO: 5736233 - DNA, 25 bp, Homo sapien
ccccattaagagcctgtggtgggcg

SEQ ID NO: 5736234 - DNA, 25 bp, Homo sapien
aaaggtgcacagggcaccgtggcgg

SEQ ID NO: 5736235 - DNA, 25 bp, Homo sapien
tctcccctctcctcagtggcccagg

SEQ ID NO: 5736236 - DNA, 25 bp, Homo sapien
ggcgacaggtagctctgccagccag

SEQ ID NO: 5736237 - DNA, 25 bp, Homo sapien
aattggtagctggtgtcatgaccca

SEQ ID NO: 5736238 - DNA, 25 bp, Homo sapien
ctctctgacccacagctccctgtct

SEQ ID NO: 5736239 - DNA, 25 bp, Homo sapien
gggctttccgggccttctccaccga

SEQ ID NO: 5736240 - DNA, 25 bp, Homo sapien
tagttccatcctgacctctccaggc

SEQ ID NO: 5736241 - DNA, 25 bp, Homo sapien
aaagatggatttccagggcatgggc

SEQ ID NO: 5736242 - DNA, 25 bp, Homo sapien
gtgagttgtgcttgttgaattctgc

SEQ ID NO: 5736243 - DNA, 25 bp, Homo sapien
gtgagggctttccgggccttctcca

SEQ ID NO: 5736244 - DNA, 25 bp, Homo sapien
ttgtgatggtgttttccttgctctg

SEQ ID NO: 5736245 - DNA, 25 bp, Homo sapien
tcatgccgcagctgcgtgtactggc

SEQ ID NO: 5736246 - DNA, 25 bp, Homo sapien
gcctgatctcatgggacacgattca

SEQ ID NO: 5736247 - DNA, 25 bp, Homo sapien
gacaggccccagcttgctggcctct

SEQ ID NO: 5736248 - DNA, 25 bp, Homo sapien
accgaggcatagcggctggcgagct

SEQ ID NO: 5736249 - DNA, 25 bp, Homo sapien
tggtggagaatgtgtttgctgtggt

SEQ ID NO: 5736250 - DNA, 25 bp, Homo sapien
ttggtttcagcagctgctgttccgg

SEQ ID NO: 5736251 - DNA, 25 bp, Homo sapien
agatggatttccagggcatgggctc

SEQ ID NO: 5736252 - DNA, 25 bp, Homo sapien
gcccaaaggtgcacagggcaccgtg

SEQ ID NO: 5736253 - DNA, 25 bp, Homo sapien
ctaagccacaaagcaattaccacta

SEQ ID NO: 5736254 - DNA, 25 bp, Homo sapien
aagtcatcggattctagcacgttga

SEQ ID NO: 5736255 - DNA, 25 bp, Homo sapien
cttcagctgtttctggagcagtagt

SEQ ID NO: 5736256 - DNA, 25 bp, Homo sapien
cctcagtggcccaggagagagggtg

SEQ ID NO: 5736257 - DNA, 25 bp, Homo sapien
ctcactgcagatgtgcaggtcaaac

SEQ ID NO: 5736258 - DNA, 25 bp, Homo sapien
gattctgatcctgacacctggctta

SEQ ID NO: 5736259 - DNA, 25 bp, Homo sapien
tgtgtttgctgtggtagagaaaggg

SEQ ID NO: 5736260 - DNA, 25 bp, Homo sapien
aaggaggtgcagacaccaagtaagg

SEQ ID NO: 5736261 - DNA, 25 bp, Homo sapien
cggaagttcatcaggggcttctcca

SEQ ID NO: 5736262 - DNA, 25 bp, Homo sapien
ctgacatggtggagaatgtgtttgc

SEQ ID NO: 5736263 - DNA, 25 bp, Homo sapien
tgcaaaggattctgggtgcggctgt

SEQ ID NO: 5736264 - DNA, 25 bp, Homo sapien
gggaagacaggagccaagccttcct

SEQ ID NO: 5736265 - DNA, 25 bp, Homo sapien
ctccttctcgccttcccaccagccg

SEQ ID NO: 5736266 - DNA, 25 bp, Homo sapien
gtgcagacaccaagtaagggtttgg

SEQ ID NO: 5736267 - DNA, 25 bp, Homo sapien
tactttagtatattaggcatttttc

SEQ ID NO: 5736268 - DNA, 25 bp, Homo sapien
cgccaaaaaattagagattaataag

SEQ ID NO: 5736269 - DNA, 25 bp, Homo sapien
cagggggtcttcagcctcagagaca

SEQ ID NO: 5736270 - DNA, 25 bp, Homo sapien
taaagaaggagggctgcaaaggatt

SEQ ID NO: 5736271 - DNA, 25 bp, Homo sapien
ttggcatttccagaggagactttac

SEQ ID NO: 5736272 - DNA, 25 bp, Homo sapien
atctctaccctctccacctccagcc

SEQ ID NO: 5736273 - DNA, 25 bp, Homo sapien
ctttagtatattaggcatttttcta

SEQ ID NO: 5736274 - DNA, 25 bp, Homo sapien
gggcacaagcatgtgacagtgaccc

SEQ ID NO: 5736275 - DNA, 25 bp, Homo sapien
atctggacagagtggttctccatcc

SEQ ID NO: 5736276 - DNA, 25 bp, Homo sapien
gggattggaagatggagagagggaa

SEQ ID NO: 5736277 - DNA, 25 bp, Homo sapien
gctgcaaaggattctgggtgcggct

SEQ ID NO: 5736278 - DNA, 25 bp, Homo sapien
tagctaagttcttcgcatagtcttc

SEQ ID NO: 5736279 - DNA, 25 bp, Homo sapien
tgaaagaccagtgagttgtgcttgt

SEQ ID NO: 5736280 - DNA, 25 bp, Homo sapien
aaaataaagaaggagggctgcaaag

SEQ ID NO: 5736281 - DNA, 25 bp, Homo sapien
tagtaccgccggccctgaggcgaca

SEQ ID NO: 5736282 - DNA, 25 bp, Homo sapien
aaaattggtagctggtgtcatgacc

SEQ ID NO: 5736283 - DNA, 25 bp, Homo sapien
attcagcgctcaatttggggctaat

SEQ ID NO: 5736284 - DNA, 25 bp, Homo sapien
gaggtcttgataactgagaactttg

SEQ ID NO: 5736285 - DNA, 25 bp, Homo sapien
ctgggggaaggatggattggcattt

SEQ ID NO: 5736286 - DNA, 25 bp, Homo sapien
agtgggggccagggcagcccaaagg

SEQ ID NO: 5736287 - DNA, 25 bp, Homo sapien
gtgacccctacaaaactcggcaagg

SEQ ID NO: 5736288 - DNA, 25 bp, Homo sapien
tccggcatcgtgtctgggtgaggga

SEQ ID NO: 5736289 - DNA, 25 bp, Homo sapien
tagtgtggccacaagagagtctgct

SEQ ID NO: 5736290 - DNA, 25 bp, Homo sapien
gatgaccgtctggctttcttctccc

SEQ ID NO: 5736291 - DNA, 25 bp, Homo sapien
caaggctattggctttgaatgtttg

SEQ ID NO: 5736292 - DNA, 25 bp, Homo sapien
tggacgagctggatgaggtcttgat

SEQ ID NO: 5736293 - DNA, 25 bp, Homo sapien
agacaagggcagggctgtgggtctg

SEQ ID NO: 5736294 - DNA, 25 bp, Homo sapien
gcaatgggaaaaaaataaagaagga

SEQ ID NO: 5736295 - DNA, 25 bp, Homo sapien
gacatagtaccgccggccctgaggc

SEQ ID NO: 5736296 - DNA, 25 bp, Homo sapien
ccttctccaccgaggcatagcggct

SEQ ID NO: 5736297 - DNA, 25 bp, Homo sapien
gccacggagcccgtcctccttctcg

SEQ ID NO: 5736298 - DNA, 25 bp, Homo sapien
ctcgccgggaaccagccacggagcc

SEQ ID NO: 5736299 - DNA, 25 bp, Homo sapien
gagggtggggggcatccactcggca

SEQ ID NO: 5736300 - DNA, 25 bp, Homo sapien
ctgctatgcctgtccagtgcccacc

SEQ ID NO: 5736301 - DNA, 25 bp, Homo sapien
tcacacagtttattgtgatggtgtt

SEQ ID NO: 5736302 - DNA, 25 bp, Homo sapien
gggtcttcatctccaggtctctctg

SEQ ID NO: 5736303 - DNA, 25 bp, Homo sapien
tccagggattggaagatggagagag

SEQ ID NO: 5736304 - DNA, 25 bp, Homo sapien
gacctctccaggcatggtgggtctg

SEQ ID NO: 5736305 - DNA, 25 bp, Homo sapien
gtgccgttgccttgggggtccttct

SEQ ID NO: 5736306 - DNA, 25 bp, Homo sapien
ctgaaaggcgacaacctagtgtggc

SEQ ID NO: 5736307 - DNA, 25 bp, Homo sapien
ccgtggcggacaggccccagcttgc

SEQ ID NO: 5736308 - DNA, 25 bp, Homo sapien
gaaagaggcgccaaaaaattagaga

SEQ ID NO: 5736309 - DNA, 25 bp, Homo sapien
gtcgcacttcttcatgtctttcttg

SEQ ID NO: 5736310 - DNA, 25 bp, Homo sapien
ctcaatttggggctaatttgccgaa

SEQ ID NO: 5736311 - DNA, 25 bp, Homo sapien
ggcgccaaaaaattagagattaata

SEQ ID NO: 5736312 - DNA, 25 bp, Homo sapien
ggaccacaaagttccagcctctgtc

SEQ ID NO: 5736313 - DNA, 25 bp, Homo sapien
ccagcaggaccccccgaagctgcac

SEQ ID NO: 5736314 - DNA, 25 bp, Homo sapien
ccaacctgagctaccctggaagacg

SEQ ID NO: 5736315 - DNA, 25 bp, Homo sapien
gggggatggcaaagacttgccctaa

SEQ ID NO: 5736316 - DNA, 25 bp, Homo sapien
tgctctgctttttgcttggcgatga

SEQ ID NO: 5736317 - DNA, 25 bp, Homo sapien
gtagctctgccagccaggtggaagg

SEQ ID NO: 5736318 - DNA, 25 bp, Homo sapien
tcctccttctcgccttcccaccagc

SEQ ID NO: 5736319 - DNA, 25 bp, Homo sapien
tccaaagccctggagacaagggagc

SEQ ID NO: 5736320 - DNA, 25 bp, Homo sapien
cttcctcctgtgaagccaaggagtt

SEQ ID NO: 5736321 - DNA, 25 bp, Homo sapien
gtcttgtgctctctgacccacagct

SEQ ID NO: 5736322 - DNA, 25 bp, Homo sapien
gtggcggacaggccccagcttgctg

SEQ ID NO: 5736323 - DNA, 25 bp, Homo sapien
tgctgacctttttggttgcaatgtt

SEQ ID NO: 5736324 - DNA, 25 bp, Homo sapien
tcttcacgtaggtgaaggcctttgt

SEQ ID NO: 5736325 - DNA, 25 bp, Homo sapien
gaggggggaaagagtgacctccaaa

SEQ ID NO: 5736326 - DNA, 25 bp, Homo sapien
ttccatccctgaagcctttggacga

SEQ ID NO: 5736327 - DNA, 25 bp, Homo sapien
tattgtgatggtgttttccttgctc

SEQ ID NO: 5736328 - DNA, 25 bp, Homo sapien
tatcccagggatgaacagaggactc

SEQ ID NO: 5736329 - DNA, 25 bp, Homo sapien
ccatctgggggatggcaaagacttg

SEQ ID NO: 5736330 - DNA, 25 bp, Homo sapien
aatgtgtttgctgtggtagagaaag

SEQ ID NO: 5736331 - DNA, 25 bp, Homo sapien
ttctccgcgccttcttgatgtcctc

SEQ ID NO: 5736332 - DNA, 25 bp, Homo sapien
gcttcgtccgccaggctcttcttca

SEQ ID NO: 5736333 - DNA, 25 bp, Homo sapien
taagttcttcgcatagtcttcttca

SEQ ID NO: 5736334 - DNA, 25 bp, Homo sapien
tttgccgaatgaggtagttccatcc

SEQ ID NO: 5736335 - DNA, 25 bp, Homo sapien
agggcggatgttgcccgtcttgtgc

SEQ ID NO: 5736336 - DNA, 25 bp, Homo sapien
cagctgctgggtcttcatctccagg

SEQ ID NO: 5736337 - DNA, 25 bp, Homo sapien
aagccacaaagcaattaccactagc

SEQ ID NO: 5736338 - DNA, 25 bp, Homo sapien
tcttgttaataacaaggctattggc

SEQ ID NO: 5736339 - DNA, 25 bp, Homo sapien
ggtcggcaatgtggtggtcgcactt

SEQ ID NO: 5736340 - DNA, 25 bp, Homo sapien
cgtgtactggcacaggtgctgccgg

SEQ ID NO: 5736341 - DNA, 25 bp, Homo sapien
agcctgtgtggactttctccgcgcc

SEQ ID NO: 5736342 - DNA, 25 bp, Homo sapien
ccatttggactgggcctggttgtag

SEQ ID NO: 5736343 - DNA, 25 bp, Homo sapien
ataatattctaaaattggtagctgg

SEQ ID NO: 5736344 - DNA, 25 bp, Homo sapien
agaggactctggaatcctcagatgt

SEQ ID NO: 5736345 - DNA, 25 bp, Homo sapien
tctgagagagcttagctaagttctt

SEQ ID NO: 5736346 - DNA, 25 bp, Homo sapien
agagattaataagtcatcggattct

SEQ ID NO: 5736347 - DNA, 25 bp, Homo sapien
ggaggggggaccattccaggcttct

SEQ ID NO: 5736348 - DNA, 25 bp, Homo sapien
tgcatttgtttgcccttcagctgtt

SEQ ID NO: 5736349 - DNA, 25 bp, Homo sapien
atggacagatcctaccaggaggtct

SEQ ID NO: 5736350 - DNA, 25 bp, Homo sapien
gccaaggagttctgagagagcttag

SEQ ID NO: 5736351 - DNA, 25 bp, Homo sapien
agaacaagagaaaagtgacaacgtt

SEQ ID NO: 5736352 - DNA, 25 bp, Homo sapien
gctaggctgtccgggtcacccttct

SEQ ID NO: 5736353 - DNA, 25 bp, Homo sapien
gcggcaagcacagcatgggagtcag

SEQ ID NO: 5736354 - DNA, 25 bp, Homo sapien
tttccttctgcatttgtttgccctt

SEQ ID NO: 5736355 - DNA, 25 bp, Homo sapien
ctaatttgccgaatgaggtagttcc

SEQ ID NO: 5736356 - DNA, 25 bp, Homo sapien
tgagctgaatggcaccttctaccca

SEQ ID NO: 5736357 - DNA, 25 bp, Homo sapien
ctgcttcgtccgccaggctcttctt

SEQ ID NO: 5736358 - DNA, 25 bp, Homo sapien
aagggctggcagggtgggggcaggg

SEQ ID NO: 5736359 - DNA, 25 bp, Homo sapien
ctctgccgctctgtgagggctttcc

SEQ ID NO: 5736360 - DNA, 25 bp, Homo sapien
gttccggcatcgtgtctgggtgagg

SEQ ID NO: 5736361 - DNA, 25 bp, Homo sapien
ctctcctcagtggcccaggagagag

SEQ ID NO: 5736362 - DNA, 25 bp, Homo sapien
aggtagctctgccagccaggtggaa

SEQ ID NO: 5736363 - DNA, 25 bp, Homo sapien
ccatggacagatcctaccaggaggt

SEQ ID NO: 5736364 - DNA, 25 bp, Homo sapien
tatgggggagcccccagctaggctg

SEQ ID NO: 5736365 - DNA, 25 bp, Homo sapien
aggagggctgcaaaggattctgggt

SEQ ID NO: 5736366 - DNA, 25 bp, Homo sapien
gcccaccagtgacagaaaactgtac

SEQ ID NO: 5736367 - DNA, 25 bp, Homo sapien
agtgacctccaaaaatggactggcc

SEQ ID NO: 5736368 - DNA, 25 bp, Homo sapien
gtctgtttcagagcggcaagcacag

SEQ ID NO: 5736369 - DNA, 25 bp, Homo sapien
atctcacatgtaggactgacccggc

SEQ ID NO: 5736370 - DNA, 25 bp, Homo sapien
agcagtcccagccctgccataccca

SEQ ID NO: 5736371 - DNA, 25 bp, Homo sapien
tgttgaattctgccctcactgcaga

SEQ ID NO: 5736372 - DNA, 25 bp, Homo sapien
ggcaccgtggcggacaggccccagc

SEQ ID NO: 5736373 - DNA, 25 bp, Homo sapien
catgtaggactgacccggccccatt

SEQ ID NO: 5736374 - DNA, 25 bp, Homo sapien
gatgttgcccgtcttgtgctctctg

SEQ ID NO: 5736375 - DNA, 25 bp, Homo sapien
gggcccacgcctctcccaaggagcc

SEQ ID NO: 5736376 - DNA, 25 bp, Homo sapien
acctccctaccctgatcctccaaag

SEQ ID NO: 5736377 - DNA, 25 bp, Homo sapien
tgcggctgtgagctgaatggcacct

SEQ ID NO: 5736378 - DNA, 25 bp, Homo sapien
acgaaagcaattctcattcaatgaa

SEQ ID NO: 5736379 - DNA, 25 bp, Homo sapien
tgctgtggtagagaaagggagaaag

SEQ ID NO: 5736380 - DNA, 25 bp, Homo sapien
ttctcacggaagttcatcaggggct

SEQ ID NO: 5736381 - DNA, 25 bp, Homo sapien
ggagccagctggaggaagagccttg

SEQ ID NO: 5736382 - DNA, 25 bp, Homo sapien
cctaccaggaggtcttcacgtaggt

SEQ ID NO: 5736383 - DNA, 25 bp, Homo sapien
aacccaaagtggtcaatgggaaaga

SEQ ID NO: 5736384 - DNA, 25 bp, Homo sapien
ttcccaccagccgccgtccgggacc

SEQ ID NO: 5736385 - DNA, 25 bp, Homo sapien
tgacctccaaaaatggactggccca

SEQ ID NO: 5736386 - DNA, 25 bp, Homo sapien
tttgtgctgacctttttggttgcaa

SEQ ID NO: 5736387 - DNA, 25 bp, Homo sapien
tctctggagggtgcgctggggtccc

SEQ ID NO: 5736388 - DNA, 25 bp, Homo sapien
gtgatggtgttttccttgctctgct

SEQ ID NO: 5736389 - DNA, 25 bp, Homo sapien
ctctctgccgctctgtgagggcttt

SEQ ID NO: 5736390 - DNA, 25 bp, Homo sapien
cgcccgcggcgaagcgcagcccctg

SEQ ID NO: 5736391 - DNA, 25 bp, Homo sapien
tttccagggattggaagatggagag

SEQ ID NO: 5736392 - DNA, 25 bp, Homo sapien
attctagcacgttgactgaaagacc

SEQ ID NO: 5736393 - DNA, 25 bp, Homo sapien
gagcgggaagcaaaggtggcgggac

SEQ ID NO: 5736394 - DNA, 25 bp, Homo sapien
ggtccacttttcgaagcagctgatc

SEQ ID NO: 5736395 - DNA, 25 bp, Homo sapien
cggtggattttcggacactcatgtg

SEQ ID NO: 5736396 - DNA, 25 bp, Homo sapien
tgtactggcacaggtgctgccggat

SEQ ID NO: 5736397 - DNA, 25 bp, Homo sapien
gtgggtctgtcttctgggcctggga

SEQ ID NO: 5736398 - DNA, 25 bp, Homo sapien
gcccaaactgggccaacctgagcta

SEQ ID NO: 5736399 - DNA, 25 bp, Homo sapien
agagtgacctccaaaaatggactgg

SEQ ID NO: 5736400 - DNA, 25 bp, Homo sapien
gagggctgcaaaggattctgggtgc

SEQ ID NO: 5736401 - DNA, 25 bp, Homo sapien
gtcttcatctccaggtctctctgcc

SEQ ID NO: 5736402 - DNA, 25 bp, Homo sapien
cacccatttttcataaagaaaccaa

SEQ ID NO: 5736403 - DNA, 25 bp, Homo sapien
aggggcctccccgaggaagcagctg

SEQ ID NO: 5736404 - DNA, 25 bp, Homo sapien
gcggaggggggaccattccaggctt

SEQ ID NO: 5736405 - DNA, 25 bp, Homo sapien
tccctgtctttggccgggtccactt

SEQ ID NO: 5736406 - DNA, 25 bp, Homo sapien
aggctcttcttcacctgggcccacg

SEQ ID NO: 5736407 - DNA, 25 bp, Homo sapien
gagccaagccttcctcctaaaaccc

SEQ ID NO: 5736408 - DNA, 25 bp, Homo sapien
tcagagacaagggcagggctgtggg

SEQ ID NO: 5736409 - DNA, 25 bp, Homo sapien
gatcatctctaccctctccacctcc

SEQ ID NO: 5736410 - DNA, 25 bp, Homo sapien
ttggaaatcatccacagagtagttt

SEQ ID NO: 5736411 - DNA, 25 bp, Homo sapien
tgtgagagccagggctggctggaat

SEQ ID NO: 5736412 - DNA, 25 bp, Homo sapien
ccagggctggctggaatcccaggag

SEQ ID NO: 5736413 - DNA, 25 bp, Homo sapien
gaacagaggactctggaatcctcag

SEQ ID NO: 5736414 - DNA, 25 bp, Homo sapien
gaattctgccctcactgcagatgtg

SEQ ID NO: 5736415 - DNA, 25 bp, Homo sapien
gtaccgccggccctgaggcgacagg

SEQ ID NO: 5736416 - DNA, 25 bp, Homo sapien
tgcttgcgaaggtcggcaatgtggt

SEQ ID NO: 5736417 - DNA, 25 bp, Homo sapien
ttgttgctcagcttgatctccagct

SEQ ID NO: 5736418 - DNA, 25 bp, Homo sapien
agcaaaggtggcgggacactgcctg

SEQ ID NO: 5736419 - DNA, 25 bp, Homo sapien
atggtgggagcccagcccccctccc

SEQ ID NO: 5736420 - DNA, 25 bp, Homo sapien
gttgcaatgtttcaagaacaagaga

SEQ ID NO: 5736421 - DNA, 25 bp, Homo sapien
tcctttcccggatgaattctgacat

SEQ ID NO: 5736422 - DNA, 25 bp, Homo sapien
gtctgggaagacaggagccaagcct

SEQ ID NO: 5736423 - DNA, 25 bp, Homo sapien
aacaaggctattggctttgaatgtt

SEQ ID NO: 5736424 - DNA, 25 bp, Homo sapien
tgaggatcccaggttctgggaatca

SEQ ID NO: 5736425 - DNA, 25 bp, Homo sapien
aatctttatcctttcccggatgaat

SEQ ID NO: 5736426 - DNA, 25 bp, Homo sapien
acccggccccattaagagcctgtgg

SEQ ID NO: 5736427 - DNA, 25 bp, Homo sapien
ttcacgtaggtgaaggcctttgtgc

SEQ ID NO: 5736428 - DNA, 25 bp, Homo sapien
ccctttagactctttagactgacat

SEQ ID NO: 5736429 - DNA, 25 bp, Homo sapien
tggcaaagacttgccctaacccatc

SEQ ID NO: 5736430 - DNA, 25 bp, Homo sapien
cacctccagccgctctagctccaat

SEQ ID NO: 5736431 - DNA, 25 bp, Homo sapien
gtttgaggggatgaggggggaaaga

SEQ ID NO: 5736432 - DNA, 25 bp, Homo sapien
gccgcagctgcgtgtactggcacag

SEQ ID NO: 5736433 - DNA, 25 bp, Homo sapien
ccattcactgttggaggcagagagc

SEQ ID NO: 5736434 - DNA, 25 bp, Homo sapien
caatgtggtggtcgcacttcttcat

SEQ ID NO: 5736435 - DNA, 25 bp, Homo sapien
tctgtttcatgccgcagctgcgtgt

SEQ ID NO: 5736436 - DNA, 25 bp, Homo sapien
ttggggcttccagggcacaagcatg

SEQ ID NO: 5736437 - DNA, 25 bp, Homo sapien
cctgccatacccaagaagacagagc

SEQ ID NO: 5736438 - DNA, 25 bp, Homo sapien
gagggtgcgctggggtccctgatgc

SEQ ID NO: 5736439 - DNA, 25 bp, Homo sapien
taacccatctcacatgtaggactga

SEQ ID NO: 5736440 - DNA, 25 bp, Homo sapien
gatggcaaagacttgccctaaccca

SEQ ID NO: 5736441 - DNA, 25 bp, Homo sapien
ctcctgtgagagccagggctggctg

SEQ ID NO: 5736442 - DNA, 25 bp, Homo sapien
cttttcgaagcagctgatccacggg

SEQ ID NO: 5736443 - DNA, 25 bp, Homo sapien
agagccagggctggctggaatccca

SEQ ID NO: 5736444 - DNA, 25 bp, Homo sapien
cttcctctaatgagactgggaaggg

SEQ ID NO: 5736445 - DNA, 25 bp, Homo sapien
gatcccaggttctgggaatcaccgg

SEQ ID NO: 5736446 - DNA, 25 bp, Homo sapien
aggagttctgagagagcttagctaa

SEQ ID NO: 5736447 - DNA, 25 bp, Homo sapien
cagtcccagccctgccatacccaag

SEQ ID NO: 5736448 - DNA, 25 bp, Homo sapien
ctgtccgggtcacccttctggaatc

SEQ ID NO: 5736449 - DNA, 25 bp, Homo sapien
tgaagccaaggagttctgagagagc

SEQ ID NO: 5736450 - DNA, 25 bp, Homo sapien
cagctccctgtctttggccgggtcc

SEQ ID NO: 5736451 - DNA, 25 bp, Homo sapien
ggggccagggcagcccaaaggtgca

SEQ ID NO: 5736452 - DNA, 25 bp, Homo sapien
tggttctccatcccatggacagatc

SEQ ID NO: 5736453 - DNA, 25 bp, Homo sapien
tccgggacctgcagcagcgtgatca

SEQ ID NO: 5736454 - DNA, 25 bp, Homo sapien
gcaggggcctccccgaggaagcagc

SEQ ID NO: 5736455 - DNA, 25 bp, Homo sapien
tgctgggacgttcccaggtggtctc

SEQ ID NO: 5736456 - DNA, 25 bp, Homo sapien
caaaccatttggactgggcctggtt

SEQ ID NO: 5736457 - DNA, 25 bp, Homo sapien
ggggatgaggggggaaagagtgacc

SEQ ID NO: 5736458 - DNA, 25 bp, Homo sapien
tgcgtggtatccattcactgttgga

SEQ ID NO: 5736459 - DNA, 25 bp, Homo sapien
ttcccaggtggtctcattggtggtc

SEQ ID NO: 5736460 - DNA, 25 bp, Homo sapien
ttgacatagtaccgccggccctgag

SEQ ID NO: 5736461 - DNA, 25 bp, Homo sapien
ctctgctttttgcttggcgatgagg

SEQ ID NO: 5736462 - DNA, 25 bp, Homo sapien
tccacagagtagtttactaagccac

SEQ ID NO: 5736463 - DNA, 25 bp, Homo sapien
aaggcgacaacctagtgtggccaca

SEQ ID NO: 5736464 - DNA, 25 bp, Homo sapien
cagcatgggagtcagggggtcttca

SEQ ID NO: 5736465 - DNA, 25 bp, Homo sapien
gggtcacccttctggaatcaccagc

SEQ ID NO: 5736466 - DNA, 25 bp, Homo sapien
aagggagaaagtaatgagctgggcc

SEQ ID NO: 5736467 - DNA, 25 bp, Homo sapien
gctcacgcttctcccggccccttta

SEQ ID NO: 5736468 - DNA, 25 bp, Homo sapien
gttccatcctgacctctccaggcat

SEQ ID NO: 5736469 - DNA, 25 bp, Homo sapien
tccagaggagactttacagatggcg

SEQ ID NO: 5736470 - DNA, 25 bp, Homo sapien
tgctgggtcttcatctccaggtctc

SEQ ID NO: 5736471 - DNA, 25 bp, Homo sapien
ccggccctgaggcgacaggtagctc

SEQ ID NO: 5736472 - DNA, 25 bp, Homo sapien
ctttggaaagcttcctctaatgaga

SEQ ID NO: 5736473 - DNA, 25 bp, Homo sapien
cgtccgccaggctcttcttcacctg

SEQ ID NO: 5736474 - DNA, 25 bp, Homo sapien
cttcatctccaggtctctctgccgc

SEQ ID NO: 5736475 - DNA, 25 bp, Homo sapien
gggctcgactgtgctttggttgaac

SEQ ID NO: 5736476 - DNA, 25 bp, Homo sapien
ggtcttgataactgagaactttgga

SEQ ID NO: 5736477 - DNA, 25 bp, Homo sapien
tgtgctgacctttttggttgcaatg

SEQ ID NO: 5736478 - DNA, 25 bp, Homo sapien
aggcccatctagatctccatgtcca

SEQ ID NO: 5736479 - DNA, 25 bp, Homo sapien
gtctgtcttctgggcctgggaatat

SEQ ID NO: 5736480 - DNA, 25 bp, Homo sapien
ctccgcgccttcttgatgtcctcct

SEQ ID NO: 5736481 - DNA, 25 bp, Homo sapien
tgctggcctctgagacgagctggtt

SEQ ID NO: 5736482 - DNA, 25 bp, Homo sapien
atgcaatgggaaaaaaataaagaag

SEQ ID NO: 5736483 - DNA, 25 bp, Homo sapien
ccagccgccgtccgggacctgcagc

SEQ ID NO: 5736484 - DNA, 25 bp, Homo sapien
ccgccgtccgggacctgcagcagcg

SEQ ID NO: 5736485 - DNA, 25 bp, Homo sapien
gctaagttcttcgcatagtcttctt

SEQ ID NO: 5736486 - DNA, 25 bp, Homo sapien
gacagtgacccctacaaaactcggc

SEQ ID NO: 5736487 - DNA, 25 bp, Homo sapien
cctctgagacgagctggtttgtttc

SEQ ID NO: 5736488 - DNA, 25 bp, Homo sapien
gtgacagaaaactgtacaagggaca

SEQ ID NO: 5736489 - DNA, 25 bp, Homo sapien
gcagctgggggaaggatggattggc

SEQ ID NO: 5736490 - DNA, 25 bp, Homo sapien
ttgatgtcctcctctgtcttgttgc

SEQ ID NO: 5736491 - DNA, 25 bp, Homo sapien
aagaaggagggctgcaaaggattct

SEQ ID NO: 5736492 - DNA, 25 bp, Homo sapien
ctgtgctttggttgaacatgtctgt

SEQ ID NO: 5736493 - DNA, 25 bp, Homo sapien
caaaactcggcaaggaccacaaagt

SEQ ID NO: 5736494 - DNA, 25 bp, Homo sapien
tggtctcattggtggtcgtgttgac

SEQ ID NO: 5736495 - DNA, 25 bp, Homo sapien
cagccacggagcccgtcctccttct

SEQ ID NO: 5736496 - DNA, 25 bp, Homo sapien
cctctccaggcatggtgggtctggg

SEQ ID NO: 5736497 - DNA, 25 bp, Homo sapien
actgctgggacgttcccaggtggtc

SEQ ID NO: 5736498 - DNA, 25 bp, Homo sapien
cgggagagtgggggccagggcagcc

SEQ ID NO: 5736499 - DNA, 25 bp, Homo sapien
gactcccagaatgcaatgggaaaaa

SEQ ID NO: 5736500 - DNA, 25 bp, Homo sapien
cccagctaggctgtccgggtcaccc

SEQ ID NO: 5736501 - DNA, 25 bp, Homo sapien
gcctctgtctgtttcagagcggcaa

SEQ ID NO: 5736502 - DNA, 25 bp, Homo sapien
agctggatgaggtcttgataactga

SEQ ID NO: 5736503 - DNA, 25 bp, Homo sapien
gaagcctttggacgagctggatgag

SEQ ID NO: 5736504 - DNA, 25 bp, Homo sapien
tctagcacgttgactgaaagaccag

SEQ ID NO: 5736505 - DNA, 25 bp, Homo sapien
ggcggatgttgcccgtcttgtgctc

SEQ ID NO: 5736506 - DNA, 25 bp, Homo sapien
gcttctcccggcccctttagactct

SEQ ID NO: 5736507 - DNA, 25 bp, Homo sapien
acaccaagtaagggtttggtgcagg

SEQ ID NO: 5736508 - DNA, 25 bp, Homo sapien
ccagatctggacagagtggttctcc

SEQ ID NO: 5736509 - DNA, 25 bp, Homo sapien
ccatggtgggagcccagcccccctc

SEQ ID NO: 5736510 - DNA, 25 bp, Homo sapien
gaagtagtcgcagtagctccactcg

SEQ ID NO: 5736511 - DNA, 25 bp, Homo sapien
caaacagcagcactgaaagcttccc

SEQ ID NO: 5736512 - DNA, 25 bp, Homo sapien
gcatgtgacagtgacccctacaaaa

SEQ ID NO: 5736513 - DNA, 25 bp, Homo sapien
gtcccagccctgccatacccaagaa

SEQ ID NO: 5736514 - DNA, 25 bp, Homo sapien
ccaggagagagggtggggggcatcc

SEQ ID NO: 5736515 - DNA, 25 bp, Homo sapien
atacgaaagcaattctcattcaatg

SEQ ID NO: 5736516 - DNA, 25 bp, Homo sapien
ttcatcaggggcttctccacctcgc

SEQ ID NO: 5736517 - DNA, 25 bp, Homo sapien
tctgccctcactgcagatgtgcagg

SEQ ID NO: 5736518 - DNA, 25 bp, Homo sapien
ccaccagtgacagaaaactgtacaa

SEQ ID NO: 5736519 - DNA, 25 bp, Homo sapien
ggtttcagcagctgctgttccggca

SEQ ID NO: 5736520 - DNA, 25 bp, Homo sapien
gcaaggaccacaaagttccagcctc

SEQ ID NO: 5736521 - DNA, 25 bp, Homo sapien
ctgccggatcatctctaccctctcc

SEQ ID NO: 5736522 - DNA, 25 bp, Homo sapien
aggactctggaatcctcagatgtaa

SEQ ID NO: 5736523 - DNA, 25 bp, Homo sapien
gggtggggggcatccactcggcatg

SEQ ID NO: 5736524 - DNA, 25 bp, Homo sapien
acaagagagtctgctatgcctgtcc

SEQ ID NO: 5736525 - DNA, 25 bp, Homo sapien
acttgccctaacccatctcacatgt

SEQ ID NO: 5736526 - DNA, 25 bp, Homo sapien
atttttctaatgtgaactatacgaa

SEQ ID NO: 5736527 - DNA, 25 bp, Homo sapien
atgtgggcagtctctggagggtgcg

SEQ ID NO: 5736528 - DNA, 25 bp, Homo sapien
tggagggtgcgctggggtccctgat

SEQ ID NO: 5736529 - DNA, 25 bp, Homo sapien
agacaccaagtaagggtttggtgca

SEQ ID NO: 5736530 - DNA, 25 bp, Homo sapien
tggtcgcacttcttcatgtctttct

SEQ ID NO: 5736531 - DNA, 25 bp, Homo sapien
ggcaatgtggtggtcgcacttcttc

SEQ ID NO: 5736532 - DNA, 25 bp, Homo sapien
ctcgctgtgaagcttggcagagaac

SEQ ID NO: 5736533 - DNA, 25 bp, Homo sapien
cgaggcatagcggctggcgagctgc

SEQ ID NO: 5736534 - DNA, 25 bp, Homo sapien
atccctgaagcctttggacgagctg

SEQ ID NO: 5736535 - DNA, 25 bp, Homo sapien
ttgaagttctcacggaagttcatca

SEQ ID NO: 5736536 - DNA, 25 bp, Homo sapien
tttccagaggagactttacagatgg

SEQ ID NO: 5736537 - DNA, 25 bp, Homo sapien
ggacactcatgtgggcagtctctgg

SEQ ID NO: 5736538 - DNA, 25 bp, Homo sapien
ggaggcagagagctcctgtgagagc

SEQ ID NO: 5736539 - DNA, 25 bp, Homo sapien
tccacctccagccgctctagctcca

SEQ ID NO: 5736540 - DNA, 25 bp, Homo sapien
gcgggacactgcctgaaaggcgaca

SEQ ID NO: 5736541 - DNA, 25 bp, Homo sapien
caggtggaaggatgaccgtctggct

SEQ ID NO: 5736542 - DNA, 25 bp, Homo sapien
ccccccgaagctgcacaggcccatc

SEQ ID NO: 5736543 - DNA, 25 bp, Homo sapien
cgccaggctcttcttcacctgggcc

SEQ ID NO: 5736544 - DNA, 25 bp, Homo sapien
aggtgaacttctgcttcgtccgcca

SEQ ID NO: 5736545 - DNA, 25 bp, Homo sapien
ccaccgaggcatagcggctggcgag

SEQ ID NO: 5736546 - DNA, 25 bp, Homo sapien
catgtctgtttcatgccgcagctgc

SEQ ID NO: 5736547 - DNA, 25 bp, Homo sapien
tttactaagccacaaagcaattacc

SEQ ID NO: 5736548 - DNA, 25 bp, Homo sapien
aactgcacgtagctcgccgggaacc

SEQ ID NO: 5736549 - DNA, 25 bp, Homo sapien
tcagctgtttctggagcagtagttc

SEQ ID NO: 5736550 - DNA, 25 bp, Homo sapien
ccaggtctctctgccgctctgtgag

SEQ ID NO: 5736551 - DNA, 25 bp, Homo sapien
cacagcgcatgaggtcgtctccagc

SEQ ID NO: 5736552 - DNA, 25 bp, Homo sapien
ggtgagggaacgtcacacagtttat

SEQ ID NO: 5736553 - DNA, 25 bp, Homo sapien
ctcggcaaggaccacaaagttccag

SEQ ID NO: 5736554 - DNA, 25 bp, Homo sapien
cccagccacggtgccgttgccttgg

SEQ ID NO: 5736555 - DNA, 25 bp, Homo sapien
cggcggaggggggaccattccaggc

SEQ ID NO: 5736556 - DNA, 25 bp, Homo sapien
ctctggaatgtccagaaggagcggg

SEQ ID NO: 5736557 - DNA, 25 bp, Homo sapien
ctgggaagacaggagccaagccttc

SEQ ID NO: 5736558 - DNA, 25 bp, Homo sapien
aaaagtcaatgagccatattgtact

SEQ ID NO: 5736559 - DNA, 25 bp, Homo sapien
aaccccagatctggacagagtggtt

SEQ ID NO: 5736560 - DNA, 25 bp, Homo sapien
ctcattggtggtcgtgttgacatag

SEQ ID NO: 5736561 - DNA, 25 bp, Homo sapien
aaagcttcctctaatgagactggga

SEQ ID NO: 5736562 - DNA, 25 bp, Homo sapien
ctcccaaggagccttcctcctgtga

SEQ ID NO: 5736563 - DNA, 25 bp, Homo sapien
tcctcctgtgaagccaaggagttct

SEQ ID NO: 5736564 - DNA, 25 bp, Homo sapien
gatgtcctcctctgtcttgttgctc

SEQ ID NO: 5736565 - DNA, 25 bp, Homo sapien
tgcttggcgatgaggatcccaggtt

SEQ ID NO: 5736566 - DNA, 25 bp, Homo sapien
agggaacgtcacacagtttattgtg

SEQ ID NO: 5736567 - DNA, 25 bp, Homo sapien
accagccacggagcccgtcctcctt

SEQ ID NO: 5736568 - DNA, 25 bp, Homo sapien
agcagctgctgttccggcatcgtgt

SEQ ID NO: 5736569 - DNA, 25 bp, Homo sapien
cgcacttcttcatgtctttcttgaa

SEQ ID NO: 5736570 - DNA, 25 bp, Homo sapien
gaaagccagatgtggactcccagaa

SEQ ID NO: 5736571 - DNA, 25 bp, Homo sapien
ctggaatgtccagaaggagcgggaa

SEQ ID NO: 5736572 - DNA, 25 bp, Homo sapien
tttttgcttggcgatgaggatccca

SEQ ID NO: 5736573 - DNA, 25 bp, Homo sapien
tgacccggccccattaagagcctgt

SEQ ID NO: 5736574 - DNA, 25 bp, Homo sapien
gctttccgggccttctccaccgagg

SEQ ID NO: 5736575 - DNA, 25 bp, Homo sapien
ctcctcagtggcccaggagagaggg

SEQ ID NO: 5736576 - DNA, 25 bp, Homo sapien
caaggagccttcctcctgtgaagcc

SEQ ID NO: 5736577 - DNA, 25 bp, Homo sapien
cgctctagctccaatgtggtggtca

SEQ ID NO: 5736578 - DNA, 25 bp, Homo sapien
ggcaccttctacccatgattctgat

SEQ ID NO: 5736579 - DNA, 25 bp, Homo sapien
atgaggtcttgataactgagaactt

SEQ ID NO: 5736580 - DNA, 25 bp, Homo sapien
ttgaatgtttggaaatcatccacag

SEQ ID NO: 5736581 - DNA, 25 bp, Homo sapien
tgtccagtgcccaccagtgacagaa

SEQ ID NO: 5736582 - DNA, 25 bp, Homo sapien
cggatcatctctaccctctccacct

SEQ ID NO: 5736583 - DNA, 25 bp, Homo sapien
tgtctgtttcatgccgcagctgcgt

SEQ ID NO: 5736584 - DNA, 25 bp, Homo sapien
agtcacactcagaccagacttttcc

SEQ ID NO: 5736585 - DNA, 25 bp, Homo sapien
acaggagccaagccttcctcctaaa

SEQ ID NO: 5736586 - DNA, 25 bp, Homo sapien
gcatagcggctggcgagctgcttgc

SEQ ID NO: 5736587 - DNA, 25 bp, Homo sapien
gcatgaggtcgtctccagcctgtgt

SEQ ID NO: 5736588 - DNA, 25 bp, Homo sapien
ctcagatgtaatggaaaagtcaatg

SEQ ID NO: 5736589 - DNA, 25 bp, Homo sapien
catcggattctagcacgttgactga

SEQ ID NO: 5736590 - DNA, 25 bp, Homo sapien
catgggctcccgactagaatctgcc

SEQ ID NO: 5736591 - DNA, 25 bp, Homo sapien
tctccagctgctgggtcttcatctc

SEQ ID NO: 5736592 - DNA, 25 bp, Homo sapien
gaagacagagccatctgggggatgg

SEQ ID NO: 5736593 - DNA, 25 bp, Homo sapien
ccatccctgaagcctttggacgagc

SEQ ID NO: 5736594 - DNA, 25 bp, Homo sapien
ggaaagcttcctctaatgagactgg

SEQ ID NO: 5736595 - DNA, 25 bp, Homo sapien
aggatcccaggttctgggaatcacc

SEQ ID NO: 5736596 - DNA, 25 bp, Homo sapien
cagggcacaagcatgtgacagtgac

SEQ ID NO: 5736597 - DNA, 25 bp, Homo sapien
gctgcttgcgaaggtcggcaatgtg

SEQ ID NO: 5736598 - DNA, 25 bp, Homo sapien
agactttacagatggcgcctgatct

SEQ ID NO: 5736599 - DNA, 25 bp, Homo sapien
gttctgggaatcaccggtggatttt

SEQ ID NO: 5736600 - DNA, 25 bp, Homo sapien
gggaaggatggattggcatttccag

SEQ ID NO: 5736601 - DNA, 25 bp, Homo sapien
ccttcttatcagcccagaagtagtc

SEQ ID NO: 5736602 - DNA, 25 bp, Homo sapien
agacaggagccaagccttcctccta

SEQ ID NO: 5736603 - DNA, 25 bp, Homo sapien
tgggccaacctgagctaccctggaa

SEQ ID NO: 5736604 - DNA, 25 bp, Homo sapien
atggcaccttctacccatgattctg

SEQ ID NO: 5736605 - DNA, 25 bp, Homo sapien
cttgctggcctctgagacgagctgg

SEQ ID NO: 5736606 - DNA, 25 bp, Homo sapien
tctccaggcatggtgggtctgggaa

SEQ ID NO: 5736607 - DNA, 25 bp, Homo sapien
agtttattgtgatggtgttttcctt

SEQ ID NO: 5736608 - DNA, 25 bp, Homo sapien
gacacgattcagcgctcaatttggg

SEQ ID NO: 5736609 - DNA, 25 bp, Homo sapien
ctgcagatgtgcaggtcaaacccaa

SEQ ID NO: 5736610 - DNA, 25 bp, Homo sapien
aagaagacagagccatctgggggat

SEQ ID NO: 5736611 - DNA, 25 bp, Homo sapien
gcatcgtgtctgggtgagggaacgt

SEQ ID NO: 5736612 - DNA, 25 bp, Homo sapien
aggggggaccattccaggcttctcc

SEQ ID NO: 5736613 - DNA, 25 bp, Homo sapien
attctgggtgcggctgtgagctgaa

SEQ ID NO: 5736614 - DNA, 25 bp, Homo sapien
tgcccttcagctgtttctggagcag

SEQ ID NO: 5736615 - DNA, 25 bp, Homo sapien
gctgctgttccggcatcgtgtctgg

SEQ ID NO: 5736616 - DNA, 25 bp, Homo sapien
cggcaaggaccacaaagttccagcc

SEQ ID NO: 5736617 - DNA, 25 bp, Homo sapien
tctttggccgggtccacttttcgaa

SEQ ID NO: 5736618 - DNA, 25 bp, Homo sapien
ggaggaagagccttggggcttccag

SEQ ID NO: 5736619 - DNA, 25 bp, Homo sapien
tgtggactttctccgcgccttcttg

SEQ ID NO: 5736620 - DNA, 25 bp, Homo sapien
cgactagaatctgcccctcgctcac

SEQ ID NO: 5736621 - DNA, 25 bp, Homo sapien
tggtgggtctgggaagacaggagcc

SEQ ID NO: 5736622 - DNA, 25 bp, Homo sapien
cggatgaattctgacatttccttct

SEQ ID NO: 5736623 - DNA, 25 bp, Homo sapien
cccaaggagccttcctcctgtgaag

SEQ ID NO: 5736624 - DNA, 25 bp, Homo sapien
tgtaggactgacccggccccattaa

SEQ ID NO: 5736625 - DNA, 25 bp, Homo sapien
tgtaatggaaaagtcaatgagccat

SEQ ID NO: 5736626 - DNA, 25 bp, Homo sapien
agcttggcagagaacttgaggtgaa

SEQ ID NO: 5736627 - DNA, 25 bp, Homo sapien
ctccactcggttggtttcagcagct

SEQ ID NO: 5736628 - DNA, 25 bp, Homo sapien
gcagagaacttgaggtgaacttctg

SEQ ID NO: 5736629 - DNA, 25 bp, Homo sapien
aaagagtgacctccaaaaatggact

SEQ ID NO: 5736630 - DNA, 25 bp, Homo sapien
ttttctaatgtgaactatacgaaag

SEQ ID NO: 5736631 - DNA, 25 bp, Homo sapien
gtttcagagcggcaagcacagcatg

SEQ ID NO: 5736632 - DNA, 25 bp, Homo sapien
ggtcaccatctcttcaaaccatttg

SEQ ID NO: 5736633 - DNA, 25 bp, Homo sapien
gtcttctgggcctgggaatatgggg

SEQ ID NO: 5736634 - DNA, 25 bp, Homo sapien
tcttcttcacctgggcccacgcctc

SEQ ID NO: 5736635 - DNA, 25 bp, Homo sapien
tggtggtcaccatctcttcaaacca

SEQ ID NO: 5736636 - DNA, 25 bp, Homo sapien
tggccgggtccacttttcgaagcag

SEQ ID NO: 5736637 - DNA, 25 bp, Homo sapien
actgggaagggctggcagggtgggg

SEQ ID NO: 5736638 - DNA, 25 bp, Homo sapien
ccctcgctcacgcttctcccggccc

SEQ ID NO: 5736639 - DNA, 25 bp, Homo sapien
gttgctcagcttgatctccagctgc

SEQ ID NO: 5736640 - DNA, 25 bp, Homo sapien
agctgcacaggcccatctagatctc

SEQ ID NO: 5736641 - DNA, 25 bp, Homo sapien
agctgggggaaggatggattggcat

SEQ ID NO: 5736642 - DNA, 25 bp, Homo sapien
gagaaagggagaaagtaatgagctg

SEQ ID NO: 5736643 - DNA, 25 bp, Homo sapien
cggcccctttagactctttagactg

SEQ ID NO: 5736644 - DNA, 25 bp, Homo sapien
gccgttgccttgggggtccttctta

SEQ ID NO: 5736645 - DNA, 25 bp, Homo sapien
agagagcttagctaagttcttcgca

SEQ ID NO: 5736646 - DNA, 25 bp, Homo sapien
ctctggaatcctcagatgtaatgga

SEQ ID NO: 5736647 - DNA, 25 bp, Homo sapien
acgcaagagggctcactctatccca

SEQ ID NO: 5736648 - DNA, 25 bp, Homo sapien
gggagtcagggggtcttcagcctca

SEQ ID NO: 5736649 - DNA, 25 bp, Homo sapien
aggctattggctttgaatgtttgga

SEQ ID NO: 5736650 - DNA, 25 bp, Homo sapien
ttggactgggcctggttgtagagat

SEQ ID NO: 5736651 - DNA, 25 bp, Homo sapien
atttggactgggcctggttgtagag

SEQ ID NO: 5736652 - DNA, 25 bp, Homo sapien
gtttcaagaacaagagaaaagtgac

SEQ ID NO: 5736653 - DNA, 25 bp, Homo sapien
aggggcttctccacctcgctgtgaa

SEQ ID NO: 5736654 - DNA, 25 bp, Homo sapien
taataagtcatcggattctagcacg

SEQ ID NO: 5736655 - DNA, 25 bp, Homo sapien
gcctgaaaggcgacaacctagtgtg

SEQ ID NO: 5736656 - DNA, 25 bp, Homo sapien
tttactttagtatattaggcatttt

SEQ ID NO: 5736657 - DNA, 25 bp, Homo sapien
ctggacagagtggttctccatccca

SEQ ID NO: 5736658 - DNA, 25 bp, Homo sapien
aagccaaggagttctgagagagctt

SEQ ID NO: 5736659 - DNA, 25 bp, Homo sapien
tgagagagcttagctaagttcttcg

SEQ ID NO: 5736660 - DNA, 25 bp, Homo sapien
caccttctacccatgattctgatcc

SEQ ID NO: 5736661 - DNA, 25 bp, Homo sapien
caagaacaagagaaaagtgacaacg

SEQ ID NO: 5736662 - DNA, 25 bp, Homo sapien
tgggaagggctggcagggtgggggc

SEQ ID NO: 5736663 - DNA, 25 bp, Homo sapien
ctatacgaaagcaattctcattcaa

SEQ ID NO: 5736664 - DNA, 25 bp, Homo sapien
cgaaggtcggcaatgtggtggtcgc

SEQ ID NO: 5736665 - DNA, 25 bp, Homo sapien
ggattttcggacactcatgtgggca

SEQ ID NO: 5736666 - DNA, 25 bp, Homo sapien
ctgggggatggcaaagacttgccct

SEQ ID NO: 5736667 - DNA, 25 bp, Homo sapien
ctctaatgagactgggaagggctgg

SEQ ID NO: 5736668 - DNA, 25 bp, Homo sapien
ggattctgggtgcggctgtgagctg

SEQ ID NO: 5736669 - DNA, 25 bp, Homo sapien
agacttgccctaacccatctcacat

SEQ ID NO: 5736670 - DNA, 25 bp, Homo sapien
ggcatggtgggtctgggaagacagg

SEQ ID NO: 5736671 - DNA, 25 bp, Homo sapien
gctattggctttgaatgtttggaaa

SEQ ID NO: 5736672 - DNA, 25 bp, Homo sapien
ctctgtctgtttcagagcggcaagc

SEQ ID NO: 5736673 - DNA, 25 bp, Homo sapien
taatggaaaagtcaatgagccatat

SEQ ID NO: 5736674 - DNA, 25 bp, Homo sapien
tgaaggcctttgtgctgaccttttt

SEQ ID NO: 5736675 - DNA, 25 bp, Homo sapien
gccctaacccatctcacatgtagga

SEQ ID NO: 5736676 - DNA, 25 bp, Homo sapien
gatgcgtggtatccattcactgttg

SEQ ID NO: 5736677 - DNA, 25 bp, Homo sapien
gaggcgacaggtagctctgccagcc

SEQ ID NO: 5736678 - DNA, 25 bp, Homo sapien
ttggctttgaatgtttggaaatcat

SEQ ID NO: 5736679 - DNA, 25 bp, Homo sapien
gctggcagggtgggggcaggggcct

SEQ ID NO: 5736680 - DNA, 25 bp, Homo sapien
tgggaatatgggggagcccccagct

SEQ ID NO: 5736681 - DNA, 25 bp, Homo sapien
aactatacgaaagcaattctcattc

SEQ ID NO: 5736682 - DNA, 25 bp, Homo sapien
caatgagccatattgtactcaaaat

SEQ ID NO: 5736683 - DNA, 25 bp, Homo sapien
cggagcccgtcctccttctcgcctt

SEQ ID NO: 5736684 - DNA, 25 bp, Homo sapien
cttatcagcccagaagtagtcgcag

SEQ ID NO: 5736685 - DNA, 25 bp, Homo sapien
ctgccagccaggtggaaggatgacc

SEQ ID NO: 5736686 - DNA, 25 bp, Homo sapien
acagggcaccgtggcggacaggccc

SEQ ID NO: 5736687 - DNA, 25 bp, Homo sapien
agtttactaagccacaaagcaatta

SEQ ID NO: 5736688 - DNA, 25 bp, Homo sapien
ttaggcatttttctaatgtgaacta

SEQ ID NO: 5736689 - DNA, 25 bp, Homo sapien
gatgaattctgacatttccttctgc

SEQ ID NO: 5736690 - DNA, 25 bp, Homo sapien
ccaggaggtcttcacgtaggtgaag

SEQ ID NO: 5736691 - DNA, 25 bp, Homo sapien
tttcttgaagttctcacggaagttc

SEQ ID NO: 5736692 - DNA, 25 bp, Homo sapien
tccgccaggctcttcttcacctggg

SEQ ID NO: 5736693 - DNA, 25 bp, Homo sapien
gaggaagcagctgggggaaggatgg

SEQ ID NO: 5736694 - DNA, 25 bp, Homo sapien
tttggtgcagggctctggaatgtcc

SEQ ID NO: 5736695 - DNA, 25 bp, Homo sapien
gtgcccaccagtgacagaaaactgt

SEQ ID NO: 5736696 - DNA, 25 bp, Homo sapien
tctttatcctttcccggatgaattc

SEQ ID NO: 5736697 - DNA, 25 bp, Homo sapien
tcttgataactgagaactttggaaa

SEQ ID NO: 5736698 - DNA, 25 bp, Homo sapien
ggggcttccagggcacaagcatgtg

SEQ ID NO: 5736699 - DNA, 25 bp, Homo sapien
ccaaaaatggactggcccaaactgg

SEQ ID NO: 5736700 - DNA, 25 bp, Homo sapien
acagagtggttctccatcccatgga

SEQ ID NO: 5736701 - DNA, 25 bp, Homo sapien
tgtgctctctgacccacagctccct

SEQ ID NO: 5736702 - DNA, 25 bp, Homo sapien
attttcggacactcatgtgggcagt

SEQ ID NO: 5736703 - DNA, 25 bp, Homo sapien
acccaagaagacagagccatctggg

SEQ ID NO: 5736704 - DNA, 25 bp, Homo sapien
atcgtgtctgggtgagggaacgtca

SEQ ID NO: 5736705 - DNA, 25 bp, Homo sapien
tttggacgagctggatgaggtcttg

SEQ ID NO: 5736706 - DNA, 25 bp, Homo sapien
tcccagggatgaacagaggactctg

SEQ ID NO: 5736707 - DNA, 25 bp, Homo sapien
ttgccctaacccatctcacatgtag

SEQ ID NO: 5736708 - DNA, 25 bp, Homo sapien
ccctaccctgatcctccaaagccct

SEQ ID NO: 5736709 - DNA, 25 bp, Homo sapien
cgccgggaaccagccacggagcccg

SEQ ID NO: 5736710 - DNA, 25 bp, Homo sapien
ctgagaaagccagatgtggactccc

SEQ ID NO: 5736711 - DNA, 25 bp, Homo sapien
gtgatcagctcgcccgcggcgaagc

SEQ ID NO: 5736712 - DNA, 25 bp, Homo sapien
caaagccctggagacaagggagcca

SEQ ID NO: 5736713 - DNA, 25 bp, Homo sapien
cttggcgatgaggatcccaggttct

SEQ ID NO: 5736714 - DNA, 25 bp, Homo sapien
cccacagctccctgtctttggccgg

SEQ ID NO: 5736715 - DNA, 25 bp, Homo sapien
catttttcataaagaaaccaagaaa

SEQ ID NO: 5736716 - DNA, 25 bp, Homo sapien
gacatggtggagaatgtgtttgctg

SEQ ID NO: 5736717 - DNA, 25 bp, Homo sapien
ggtggaaggatgaccgtctggcttt

SEQ ID NO: 5736718 - DNA, 25 bp, Homo sapien
cctgagctaccctggaagacgcaag

SEQ ID NO: 5736719 - DNA, 25 bp, Homo sapien
gacacctggcttagagacagagacc

SEQ ID NO: 5736720 - DNA, 25 bp, Homo sapien
ggttggtttcagcagctgctgttcc

SEQ ID NO: 5736721 - DNA, 25 bp, Homo sapien
gcttgatctccagctgctgggtctt

SEQ ID NO: 5736722 - DNA, 25 bp, Homo sapien
cccaggtggtctcattggtggtcgt

SEQ ID NO: 5736723 - DNA, 25 bp, Homo sapien
ccccgaggaagcagctgggggaagg

SEQ ID NO: 5736724 - DNA, 25 bp, Homo sapien
gggcggcccgggagagtgggggcca

SEQ ID NO: 5736725 - DNA, 25 bp, Homo sapien
agcactgaaagcttcccaagtcaca

SEQ ID NO: 5736726 - DNA, 25 bp, Homo sapien
tcagtggcccaggagagagggtggg

SEQ ID NO: 5736727 - DNA, 25 bp, Homo sapien
aacagcagcactgaaagcttcccaa

SEQ ID NO: 5736728 - DNA, 25 bp, Homo sapien
gtaatgagctgggccaaacagcagc

SEQ ID NO: 5736729 - DNA, 25 bp, Homo sapien
ccactcggttggtttcagcagctgc

SEQ ID NO: 5736730 - DNA, 25 bp, Homo sapien
attcactgttggaggcagagagctc

SEQ ID NO: 5736731 - DNA, 25 bp, Homo sapien
ggcatttccagaggagactttacag

SEQ ID NO: 5736732 - DNA, 25 bp, Homo sapien
ccagggcagcccaaaggtgcacagg

SEQ ID NO: 5736733 - DNA, 25 bp, Homo sapien
agcgctcaatttggggctaatttgc

SEQ ID NO: 5736734 - DNA, 25 bp, Homo sapien
gacccacagctccctgtctttggcc

SEQ ID NO: 5736735 - DNA, 25 bp, Homo sapien
acactcatgtgggcagtctctggag

SEQ ID NO: 5736736 - DNA, 25 bp, Homo sapien
ctgacctttttggttgcaatgtttc

SEQ ID NO: 5736737 - DNA, 25 bp, Homo sapien
cctctccacctccagccgctctagc

SEQ ID NO: 5736738 - DNA, 25 bp, Homo sapien
cacccttctggaatcaccagctctc

SEQ ID NO: 5736739 - DNA, 25 bp, Homo sapien
ggactggcccaaactgggccaacct

SEQ ID NO: 5736740 - DNA, 25 bp, Homo sapien
ctctaccctctccacctccagccgc

SEQ ID NO: 5736741 - DNA, 25 bp, Homo sapien
tgtcctcctctgtcttgttgctcag

SEQ ID NO: 5736742 - DNA, 25 bp, Homo sapien
ccacgggctcgactgtgctttggtt

SEQ ID NO: 5736743 - DNA, 25 bp, Homo sapien
agctgaatggcaccttctacccatg

SEQ ID NO: 5736744 - DNA, 25 bp, Homo sapien
gcaattctcattcaatgaaagaggc

SEQ ID NO: 5736745 - DNA, 25 bp, Homo sapien
agggacagcagtcccagccctgcca

SEQ ID NO: 5736746 - DNA, 25 bp, Homo sapien
ctaccctctccacctccagccgctc

SEQ ID NO: 5736747 - DNA, 25 bp, Homo sapien
tagactgacatggtggagaatgtgt

SEQ ID NO: 5736748 - DNA, 25 bp, Homo sapien
ggtgaaggcctttgtgctgaccttt

SEQ ID NO: 5736749 - DNA, 25 bp, Homo sapien
cgtgttgacatagtaccgccggccc

SEQ ID NO: 5736750 - DNA, 25 bp, Homo sapien
accactagcacccatttttcataaa

SEQ ID NO: 5736751 - DNA, 25 bp, Homo sapien
cacacagcgcatgaggtcgtctcca

SEQ ID NO: 5736752 - DNA, 25 bp, Homo sapien
gccgctctagctccaatgtggtggt

SEQ ID NO: 5736753 - DNA, 25 bp, Homo sapien
cgccttcccaccagccgccgtccgg

SEQ ID NO: 5736754 - DNA, 25 bp, Homo sapien
aattagagattaataagtcatcgga

SEQ ID NO: 5736755 - DNA, 25 bp, Homo sapien
cagctaggctgtccgggtcaccctt

SEQ ID NO: 5736756 - DNA, 25 bp, Homo sapien
atgaggggggaaagagtgacctcca

SEQ ID NO: 5736757 - DNA, 25 bp, Homo sapien
tgtcttgttgctcagcttgatctcc

SEQ ID NO: 5736758 - DNA, 25 bp, Homo sapien
cttcttgatgtcctcctctgtcttg

SEQ ID NO: 5736759 - DNA, 25 bp, Homo sapien
ggacagagtggttctccatcccatg

SEQ ID NO: 5736760 - DNA, 25 bp, Homo sapien
tgtgaactatacgaaagcaattctc

SEQ ID NO: 5736761 - DNA, 25 bp, Homo sapien
attaagagcctgtggtgggcggccc

SEQ ID NO: 5736762 - DNA, 25 bp, Homo sapien
ggcctggttgtagagatccacacag

SEQ ID NO: 5736763 - DNA, 25 bp, Homo sapien
cacaaagcaattaccactagcaccc

SEQ ID NO: 5736764 - DNA, 25 bp, Homo sapien
acccatctcacatgtaggactgacc

SEQ ID NO: 5736765 - DNA, 25 bp, Homo sapien
gaagacaggagccaagccttcctcc

SEQ ID NO: 5736766 - DNA, 25 bp, Homo sapien
tttcatgccgcagctgcgtgtactg

SEQ ID NO: 5736767 - DNA, 25 bp, Homo sapien
ttcaagaacaagagaaaagtgacaa

SEQ ID NO: 5736768 - DNA, 25 bp, Homo sapien
aaaaaattagagattaataagtcat

SEQ ID NO: 5736769 - DNA, 25 bp, Homo sapien
tcgcatagtcttcttcaatctttat

SEQ ID NO: 5736770 - DNA, 25 bp, Homo sapien
accgtctggctttcttctcccggcg

SEQ ID NO: 5736771 - DNA, 25 bp, Homo sapien
ctcattcaatgaaagaggcgccaaa

SEQ ID NO: 5736772 - DNA, 25 bp, Homo sapien
accatctcttcaaaccatttggact

SEQ ID NO: 5736773 - DNA, 25 bp, Homo sapien
aagcatgtgacagtgacccctacaa

SEQ ID NO: 5736774 - DNA, 25 bp, Homo sapien
tgcgaaggtcggcaatgtggtggtc

SEQ ID NO: 5736775 - DNA, 25 bp, Homo sapien
gaccattccaggcttctccagcaac

SEQ ID NO: 5736776 - DNA, 25 bp, Homo sapien
ctccagcctgtgtggactttctccg

SEQ ID NO: 5736777 - DNA, 25 bp, Homo sapien
cataaagaaaccaagaaataatatt

SEQ ID NO: 5736778 - DNA, 25 bp, Homo sapien
aagtcaatgagccatattgtactca

SEQ ID NO: 5736779 - DNA, 25 bp, Homo sapien
cgctctgtgagggctttccgggcct

SEQ ID NO: 5736780 - DNA, 25 bp, Homo sapien
ggaagggctggcagggtgggggcag

SEQ ID NO: 5736781 - DNA, 25 bp, Homo sapien
gcctctcccaaggagccttcctcct

SEQ ID NO: 5736782 - DNA, 25 bp, Homo sapien
cccgggagagtgggggccagggcag

SEQ ID NO: 5736783 - DNA, 25 bp, Homo sapien
tggctttcttctcccggcggagggg

SEQ ID NO: 5736784 - DNA, 25 bp, Homo sapien
gggacgttcccaggtggtctcattg

SEQ ID NO: 5736785 - DNA, 25 bp, Homo sapien
gatctcatgggacacgattcagcgc

SEQ ID NO: 5736786 - DNA, 25 bp, Homo sapien
cagtagctccactcggttggtttca

SEQ ID NO: 5736787 - DNA, 25 bp, Homo sapien
cctggttgtagagatccacacagcg

SEQ ID NO: 5736788 - DNA, 25 bp, Homo sapien
ctagatctccatgtccacagggcgg

SEQ ID NO: 5736789 - DNA, 25 bp, Homo sapien
tgtggtggtcaccatctcttcaaac

SEQ ID NO: 5736790 - DNA, 25 bp, Homo sapien
gtatccattcactgttggaggcaga

SEQ ID NO: 5736791 - DNA, 25 bp, Homo sapien
ccccagatctggacagagtggttct

SEQ ID NO: 5736792 - DNA, 25 bp, Homo sapien
atgagccatattgtactcaaaatat

SEQ ID NO: 5736793 - DNA, 25 bp, Homo sapien
cttagctaagttcttcgcatagtct

SEQ ID NO: 5736794 - DNA, 25 bp, Homo sapien
ccgaggaagcagctgggggaaggat

SEQ ID NO: 5736795 - DNA, 25 bp, Homo sapien
gggtccttcttatcagcccagaagt

SEQ ID NO: 5736796 - DNA, 25 bp, Homo sapien
tccttctgcatttgtttgcccttca

SEQ ID NO: 5736797 - DNA, 25 bp, Homo sapien
gagtagtttactaagccacaaagca

SEQ ID NO: 5736798 - DNA, 25 bp, Homo sapien
tggttgtagagatccacacagcgca

SEQ ID NO: 5736799 - DNA, 25 bp, Homo sapien
gtcacccttctggaatcaccagctc

SEQ ID NO: 5736800 - DNA, 25 bp, Homo sapien
cagctgcgtgtactggcacaggtgc

SEQ ID NO: 5736801 - DNA, 25 bp, Homo sapien
ataacaaggctattggctttgaatg

SEQ ID NO: 5736802 - DNA, 25 bp, Homo sapien
ccaaaaaattagagattaataagtc

SEQ ID NO: 5736803 - DNA, 25 bp, Homo sapien
gctcttcttcacctgggcccacgcc

SEQ ID NO: 5736804 - DNA, 25 bp, Homo sapien
gttaataacaaggctattggctttg

SEQ ID NO: 5736805 - DNA, 25 bp, Homo sapien
gttccagcctctgtctgtttcagag

SEQ ID NO: 5736806 - DNA, 25 bp, Homo sapien
ggggagcccccagctaggctgtccg

SEQ ID NO: 5736807 - DNA, 25 bp, Homo sapien
accgccggccctgaggcgacaggta

SEQ ID NO: 5736808 - DNA, 25 bp, Homo sapien
agggatgaacagaggactctggaat

SEQ ID NO: 5736809 - DNA, 25 bp, Homo sapien
ggtagctggtgtcatgacccaaccc

SEQ ID NO: 5736810 - DNA, 25 bp, Homo sapien
ccccagcttgctggcctctgagacg

SEQ ID NO: 5736811 - DNA, 25 bp, Homo sapien
cttcgcatagtcttcttcaatcttt

SEQ ID NO: 5736812 - DNA, 25 bp, Homo sapien
tttattgtgatggtgttttccttgc

SEQ ID NO: 5736813 - DNA, 25 bp, Homo sapien
ttcaaaccatttggactgggcctgg

SEQ ID NO: 5736814 - DNA, 25 bp, Homo sapien
aatatgggggagcccccagctaggc

SEQ ID NO: 5736815 - DNA, 25 bp, Homo sapien
gaagcagctgatccacgggctcgac

SEQ ID NO: 5736816 - DNA, 25 bp, Homo sapien
caggcttctccagcaactgcacgta

SEQ ID NO: 5736817 - DNA, 25 bp, Homo sapien
gggctggcagggtgggggcaggggc

SEQ ID NO: 5736818 - DNA, 25 bp, Homo sapien
acctgggcccacgcctctcccaagg

SEQ ID NO: 5736819 - DNA, 25 bp, Homo sapien
tcaccatctcttcaaaccatttgga

SEQ ID NO: 5736820 - DNA, 25 bp, Homo sapien
cattggtggtcgtgttgacatagta

SEQ ID NO: 5736821 - DNA, 25 bp, Homo sapien
acctgcagcagcgtgatcagctcgc

SEQ ID NO: 5736822 - DNA, 25 bp, Homo sapien
ctgtgggtctgtcttctgggcctgg

SEQ ID NO: 5736823 - DNA, 25 bp, Homo sapien
cgggccttctccaccgaggcatagc

SEQ ID NO: 5736824 - DNA, 25 bp, Homo sapien
aggtgcacagggcaccgtggcggac

SEQ ID NO: 5736825 - DNA, 25 bp, Homo sapien
tgcgtgtactggcacaggtgctgcc

SEQ ID NO: 5736826 - DNA, 25 bp, Homo sapien
gatggattggcatttccagaggaga

SEQ ID NO: 5736827 - DNA, 25 bp, Homo sapien
cggatgttgcccgtcttgtgctctc

SEQ ID NO: 5736828 - DNA, 25 bp, Homo sapien
gagttgtgcttgttgaattctgccc

SEQ ID NO: 5736829 - DNA, 25 bp, Homo sapien
cgccggccctgaggcgacaggtagc

SEQ ID NO: 5736830 - DNA, 25 bp, Homo sapien
ttggtagctggtgtcatgacccaac

SEQ ID NO: 5736831 - DNA, 25 bp, Homo sapien
gcccgtcctccttctcgccttccca

SEQ ID NO: 5736832 - DNA, 25 bp, Homo sapien
cttctgggcctgggaatatggggga

SEQ ID NO: 5736833 - DNA, 25 bp, Homo sapien
tgttgcccgtcttgtgctctctgac

SEQ ID NO: 5736834 - DNA, 25 bp, Homo sapien
tccagcctctgtctgtttcagagcg

SEQ ID NO: 5736835 - DNA, 25 bp, Homo sapien
ggcgacaacctagtgtggccacaag

SEQ ID NO: 5736836 - DNA, 25 bp, Homo sapien
cagtgagttgtgcttgttgaattct

SEQ ID NO: 5736837 - DNA, 25 bp, Homo sapien
gattggcatttccagaggagacttt

SEQ ID NO: 5736838 - DNA, 25 bp, Homo sapien
ttagactctttagactgacatggtg

SEQ ID NO: 5736839 - DNA, 25 bp, Homo sapien
gtactcaaaatatcttgttaataac

SEQ ID NO: 5736840 - DNA, 25 bp, Homo sapien
gtggattttcggacactcatgtggg

SEQ ID NO: 5736841 - DNA, 25 bp, Homo sapien
tcgtctccagcctgtgtggactttc

SEQ ID NO: 5736842 - DNA, 25 bp, Homo sapien
cctggcttagagacagagacctccc

SEQ ID NO: 5736843 - DNA, 25 bp, Homo sapien
ctttctccgcgccttcttgatgtcc

SEQ ID NO: 5736844 - DNA, 25 bp, Homo sapien
ctaatgtgaactatacgaaagcaat

SEQ ID NO: 5736845 - DNA, 25 bp, Homo sapien
tgtgtggactttctccgcgccttct

SEQ ID NO: 5736846 - DNA, 25 bp, Homo sapien
atggactggcccaaactgggccaac

SEQ ID NO: 5736847 - DNA, 25 bp, Homo sapien
ggctgagaaagccagatgtggactc

SEQ ID NO: 5736848 - DNA, 25 bp, Homo sapien
gaggcgccaaaaaattagagattaa

SEQ ID NO: 5736849 - DNA, 25 bp, Homo sapien
ctctcccaaggagccttcctcctgt

SEQ ID NO: 5736850 - DNA, 25 bp, Homo sapien
aggttctgggaatcaccggtggatt

SEQ ID NO: 5736851 - DNA, 25 bp, Homo sapien
aggtctctctgccgctctgtgaggg

SEQ ID NO: 5736852 - DNA, 25 bp, Homo sapien
gcaactgcacgtagctcgccgggaa

SEQ ID NO: 5736853 - DNA, 25 bp, Homo sapien
ccgtcttgtgctctctgacccacag

SEQ ID NO: 5736854 - DNA, 25 bp, Homo sapien
agaaagatggatttccagggcatgg

SEQ ID NO: 5736855 - DNA, 25 bp, Homo sapien
gctggtttgtttccatccctgaagc

SEQ ID NO: 5736856 - DNA, 25 bp, Homo sapien
ggatgaggtcttgataactgagaac

SEQ ID NO: 5736857 - DNA, 25 bp, Homo sapien
ctctgacccacagctccctgtcttt

SEQ ID NO: 5736858 - DNA, 25 bp, Homo sapien
gcaattaccactagcacccattttt

SEQ ID NO: 5736859 - DNA, 25 bp, Homo sapien
tccttgctctgctttttgcttggcg

SEQ ID NO: 5736860 - DNA, 25 bp, Homo sapien
ccatgattctgatcctgacacctgg

SEQ ID NO: 5736861 - DNA, 25 bp, Homo sapien
agcttagctaagttcttcgcatagt

SEQ ID NO: 5736862 - DNA, 25 bp, Homo sapien
ctgcacaggcccatctagatctcca

SEQ ID NO: 5736863 - DNA, 25 bp, Homo sapien
gccctgccatacccaagaagacaga

SEQ ID NO: 5736864 - DNA, 25 bp, Homo sapien
ctgtttcagagcggcaagcacagca

SEQ ID NO: 5736865 - DNA, 25 bp, Homo sapien
tggtgatgaacagtggctgagaaag

SEQ ID NO: 5736866 - DNA, 25 bp, Homo sapien
aacttgaggtgaacttctgcttcgt

SEQ ID NO: 5736867 - DNA, 25 bp, Homo sapien
tccagcaactgcacgtagctcgccg

SEQ ID NO: 5736868 - DNA, 25 bp, Homo sapien
gggcagtctctggagggtgcgctgg

SEQ ID NO: 5736869 - DNA, 25 bp, Homo sapien
acagagccatctgggggatggcaaa

SEQ ID NO: 5736870 - DNA, 25 bp, Homo sapien
gttctccatcccatggacagatcct

SEQ ID NO: 5736871 - DNA, 25 bp, Homo sapien
ggtttactttagtatattaggcatt

SEQ ID NO: 5736872 - DNA, 25 bp, Homo sapien
aggcatttttctaatgtgaactata

SEQ ID NO: 5736873 - DNA, 25 bp, Homo sapien
tcttgaagttctcacggaagttcat

SEQ ID NO: 5736874 - DNA, 25 bp, Homo sapien
ggccccattaagagcctgtggtggg

SEQ ID NO: 5736875 - DNA, 25 bp, Homo sapien
cctgatcctccaaagccctggagac

SEQ ID NO: 5736876 - DNA, 25 bp, Homo sapien
tcttcaaaccatttggactgggcct

SEQ ID NO: 5736877 - DNA, 25 bp, Homo sapien
caaacccagccacggtgccgttgcc

SEQ ID NO: 5736878 - DNA, 25 bp, Homo sapien
tgggccccatggtgggagcccagcc

SEQ ID NO: 5736879 - DNA, 25 bp, Homo sapien
gcacgttgactgaaagaccagtgag

SEQ ID NO: 5736880 - DNA, 25 bp, Homo sapien
gcgagctgcttgcgaaggtcggcaa

SEQ ID NO: 5736881 - DNA, 25 bp, Homo sapien
gggtgcgctggggtccctgatgcgt

SEQ ID NO: 5736882 - DNA, 25 bp, Homo sapien
accaagtaagggtttggtgcagggc

SEQ ID NO: 5736883 - DNA, 25 bp, Homo sapien
agctgtttctggagcagtagttcaa

SEQ ID NO: 5736884 - DNA, 25 bp, Homo sapien
cacagctccctgtctttggccgggt

SEQ ID NO: 5736885 - DNA, 25 bp, Homo sapien
tcggacactcatgtgggcagtctct

SEQ ID NO: 5736886 - DNA, 25 bp, Homo sapien
agatctggacagagtggttctccat

SEQ ID NO: 5736887 - DNA, 25 bp, Homo sapien
gagagagggtggggggcatccactc

SEQ ID NO: 5736888 - DNA, 25 bp, Homo sapien
cacagagtagtttactaagccacaa

SEQ ID NO: 5736889 - DNA, 25 bp, Homo sapien
atcctaccaggaggtcttcacgtag

SEQ ID NO: 5736890 - DNA, 25 bp, Homo sapien
taactgagaactttggaaagcttcc

SEQ ID NO: 5736891 - DNA, 25 bp, Homo sapien
aggaccccccgaagctgcacaggcc

SEQ ID NO: 5736892 - DNA, 25 bp, Homo sapien
cttgctctgctttttgcttggcgat

SEQ ID NO: 5736893 - DNA, 25 bp, Homo sapien
cttgtgctctctgacccacagctcc

SEQ ID NO: 5736894 - DNA, 25 bp, Homo sapien
caaaggattctgggtgcggctgtga

SEQ ID NO: 5736895 - DNA, 25 bp, Homo sapien
tggtatccattcactgttggaggca

SEQ ID NO: 5736896 - DNA, 25 bp, Homo sapien
tcagcagctgctgttccggcatcgt

SEQ ID NO: 5736897 - DNA, 25 bp, Homo sapien
tctatcccagggatgaacagaggac

SEQ ID NO: 5736898 - DNA, 25 bp, Homo sapien
ggctgtgggtctgtcttctgggcct

SEQ ID NO: 5736899 - DNA, 25 bp, Homo sapien
tgggcctggttgtagagatccacac

SEQ ID NO: 5736900 - DNA, 25 bp, Homo sapien
tgagagccagggctggctggaatcc

SEQ ID NO: 5736901 - DNA, 25 bp, Homo sapien
ccacctcgctgtgaagcttggcaga

SEQ ID NO: 5736902 - DNA, 25 bp, Homo sapien
ccgaagctgcacaggcccatctaga

SEQ ID NO: 5736903 - DNA, 25 bp, Homo sapien
acccatgattctgatcctgacacct

SEQ ID NO: 5736904 - DNA, 25 bp, Homo sapien
gccacggtgccgttgccttgggggt

SEQ ID NO: 5736905 - DNA, 25 bp, Homo sapien
gagcggcaagcacagcatgggagtc

SEQ ID NO: 5736906 - DNA, 25 bp, Homo sapien
ctccaatgtggtggtcaccatctct

SEQ ID NO: 5736907 - DNA, 25 bp, Homo sapien
ggatgaacagaggactctggaatcc

SEQ ID NO: 5736908 - DNA, 25 bp, Homo sapien
tccagctgctgggtcttcatctcca

SEQ ID NO: 5736909 - DNA, 25 bp, Homo sapien
gggccaaacagcagcactgaaagct

SEQ ID NO: 5736910 - DNA, 25 bp, Homo sapien
ggaagatggagagagggaaaggagg

SEQ ID NO: 5736911 - DNA, 25 bp, Homo sapien
ctccccgaggaagcagctgggggaa

SEQ ID NO: 5736912 - DNA, 25 bp, Homo sapien
cccctacaaaactcggcaaggacca

SEQ ID NO: 5736913 - DNA, 25 bp, Homo sapien
ctgaagcctttggacgagctggatg

SEQ ID NO: 5736914 - DNA, 25 bp, Homo sapien
cagatgtaatggaaaagtcaatgag

SEQ ID NO: 5736915 - DNA, 25 bp, Homo sapien
ctggaatcctcagatgtaatggaaa

SEQ ID NO: 5736916 - DNA, 25 bp, Homo sapien
ttttcataaagaaaccaagaaataa

SEQ ID NO: 5736917 - DNA, 25 bp, Homo sapien
cgagctggatgaggtcttgataact

SEQ ID NO: 5736918 - DNA, 25 bp, Homo sapien
gagtctgctatgcctgtccagtgcc

SEQ ID NO: 5736919 - DNA, 25 bp, Homo sapien
agagaacttgaggtgaacttctgct

SEQ ID NO: 5736920 - DNA, 25 bp, Homo sapien
taggtttgaggggatgaggggggaa

SEQ ID NO: 5736921 - DNA, 25 bp, Homo sapien
acaagcatgtgacagtgacccctac

SEQ ID NO: 5736922 - DNA, 25 bp, Homo sapien
tcaatctttatcctttcccggatga

SEQ ID NO: 5736923 - DNA, 25 bp, Homo sapien
aatgtggtggtcaccatctcttcaa

SEQ ID NO: 5736924 - DNA, 25 bp, Homo sapien
gatcagctcgcccgcggcgaagcgc

SEQ ID NO: 5736925 - DNA, 25 bp, Homo sapien
ctggaggaagagccttggggcttcc

SEQ ID NO: 5736926 - DNA, 25 bp, Homo sapien
atgaggtcgtctccagcctgtgtgg

SEQ ID NO: 5736927 - DNA, 25 bp, Homo sapien
ccatgtccacagggcggatgttgcc

SEQ ID NO: 5736928 - DNA, 25 bp, Homo sapien
tgagactgggaagggctggcagggt

SEQ ID NO: 5736929 - DNA, 25 bp, Homo sapien
tatcttgttaataacaaggctattg

SEQ ID NO: 5736930 - DNA, 25 bp, Homo sapien
cacttttcgaagcagctgatccacg

SEQ ID NO: 5736931 - DNA, 25 bp, Homo sapien
tctgagacgagctggtttgtttcca

SEQ ID NO: 5736932 - DNA, 25 bp, Homo sapien
gagagggtggggggcatccactcgg

SEQ ID NO: 5736933 - DNA, 25 bp, Homo sapien
gtgttttccttgctctgctttttgc

SEQ ID NO: 5736934 - DNA, 25 bp, Homo sapien
gtgggcagtctctggagggtgcgct

SEQ ID NO: 5736935 - DNA, 25 bp, Homo sapien
gcgccttcttgatgtcctcctctgt

SEQ ID NO: 5736936 - DNA, 25 bp, Homo sapien
aaccatttggactgggcctggttgt

SEQ ID NO: 5736937 - DNA, 25 bp, Homo sapien
gggaagcaaaggtggcgggacactg

SEQ ID NO: 5736938 - DNA, 25 bp, Homo sapien
ccaggagaactgctgggacgttccc

SEQ ID NO: 5736939 - DNA, 25 bp, Homo sapien
tgacaacgtttggtttactttagta

SEQ ID NO: 5736940 - DNA, 25 bp, Homo sapien
caagggacagcagtcccagccctgc

SEQ ID NO: 5736941 - DNA, 25 bp, Homo sapien
gctttggttgaacatgtctgtttca

SEQ ID NO: 5736942 - DNA, 25 bp, Homo sapien
ggatttccagggcatgggctcccga

SEQ ID NO: 5736943 - DNA, 25 bp, Homo sapien
actcggcatgggccccatggtggga

SEQ ID NO: 5736944 - DNA, 25 bp, Homo sapien
cccagaatgcaatgggaaaaaaata

SEQ ID NO: 5736945 - DNA, 25 bp, Homo sapien
gctggggtccctgatgcgtggtatc

SEQ ID NO: 5736946 - DNA, 25 bp, Homo sapien
tacaagggacagcagtcccagccct

SEQ ID NO: 5736947 - DNA, 25 bp, Homo sapien
actgagaactttggaaagcttcctc

SEQ ID NO: 5736948 - DNA, 25 bp, Homo sapien
tcgactgtgctttggttgaacatgt

SEQ ID NO: 5736949 - DNA, 25 bp, Homo sapien
caagcacagcatgggagtcaggggg

SEQ ID NO: 5736950 - DNA, 25 bp, Homo sapien
cctggaagacgcaagagggctcact

SEQ ID NO: 5736951 - DNA, 25 bp, Homo sapien
gaggagactttacagatggcgcctg

SEQ ID NO: 5736952 - DNA, 25 bp, Homo sapien
tactaagccacaaagcaattaccac

SEQ ID NO: 5736953 - DNA, 25 bp, Homo sapien
gataactgagaactttggaaagctt

SEQ ID NO: 5736954 - DNA, 25 bp, Homo sapien
ctggcacaggtgctgccggatcatc

SEQ ID NO: 5736955 - DNA, 25 bp, Homo sapien
tctccatcccatggacagatcctac

SEQ ID NO: 5736956 - DNA, 25 bp, Homo sapien
ccctgaggcgacaggtagctctgcc

SEQ ID NO: 5736957 - DNA, 25 bp, Homo sapien
gggctgcaaaggattctgggtgcgg

SEQ ID NO: 5736958 - DNA, 25 bp, Homo sapien
cagcctctgtctgtttcagagcggc

SEQ ID NO: 5736959 - DNA, 25 bp, Homo sapien
cctgtgaagccaaggagttctgaga

SEQ ID NO: 5736960 - DNA, 25 bp, Homo sapien
tggaatcaccagctctctcccctct

SEQ ID NO: 5736961 - DNA, 25 bp, Homo sapien
gggcaggggcctccccgaggaagca

SEQ ID NO: 5736962 - DNA, 25 bp, Homo sapien
cacaaagttccagcctctgtctgtt

SEQ ID NO: 5736963 - DNA, 25 bp, Homo sapien
gttgccttgggggtccttcttatca

SEQ ID NO: 5736964 - DNA, 25 bp, Homo sapien
ttctacccatgattctgatcctgac

SEQ ID NO: 5736965 - DNA, 25 bp, Homo sapien
agggagccagctggaggaagagcct

SEQ ID NO: 5736966 - DNA, 25 bp, Homo sapien
ctaccctgatcctccaaagccctgg

SEQ ID NO: 5736967 - DNA, 25 bp, Homo sapien
aagtaatgagctgggccaaacagca

SEQ ID NO: 5736968 - DNA, 25 bp, Homo sapien
gcacaggcccatctagatctccatg

SEQ ID NO: 5736969 - DNA, 25 bp, Homo sapien
tcccaggagaactgctgggacgttc

SEQ ID NO: 5736970 - DNA, 25 bp, Homo sapien
aggagagagggtggggggcatccac

SEQ ID NO: 5736971 - DNA, 25 bp, Homo sapien
tgtctttggccgggtccacttttcg

SEQ ID NO: 5736972 - DNA, 25 bp, Homo sapien
ttgggggtccttcttatcagcccag

SEQ ID NO: 5736973 - DNA, 25 bp, Homo sapien
gtccacagggcggatgttgcccgtc

SEQ ID NO: 5736974 - DNA, 25 bp, Homo sapien
ttgttaataacaaggctattggctt

SEQ ID NO: 5736975 - DNA, 25 bp, Homo sapien
gatggcgcctgatctcatgggacac

SEQ ID NO: 5736976 - DNA, 25 bp, Homo sapien
gagaaaagtgacaacgtttggttta

SEQ ID NO: 5736977 - DNA, 25 bp, Homo sapien
actcagaccagacttttccagggat

SEQ ID NO: 5736978 - DNA, 25 bp, Homo sapien
aatattctaaaattggtagctggtg

SEQ ID NO: 5736979 - DNA, 25 bp, Homo sapien
agccttggggcttccagggcacaag

SEQ ID NO: 5736980 - DNA, 25 bp, Homo sapien
agttctcacggaagttcatcagggg

SEQ ID NO: 5736981 - DNA, 25 bp, Homo sapien
ggcatgggccccatggtgggagccc

SEQ ID NO: 5736982 - DNA, 25 bp, Homo sapien
cagcagcactgaaagcttcccaagt

SEQ ID NO: 5736983 - DNA, 25 bp, Homo sapien
gttgaacatgtctgtttcatgccgc

SEQ ID NO: 5736984 - DNA, 25 bp, Homo sapien
cagatgtggactcccagaatgcaat

SEQ ID NO: 5736985 - DNA, 25 bp, Homo sapien
ggcccgggagagtgggggccagggc

SEQ ID NO: 5736986 - DNA, 25 bp, Homo sapien
cccaagtcacactcagaccagactt

SEQ ID NO: 5736987 - DNA, 25 bp, Homo sapien
ccaggttctgggaatcaccggtgga

SEQ ID NO: 5736988 - DNA, 25 bp, Homo sapien
ctctgccagccaggtggaaggatga

SEQ ID NO: 5736989 - DNA, 25 bp, Homo sapien
cactgcagatgtgcaggtcaaaccc

SEQ ID NO: 5736990 - DNA, 25 bp, Homo sapien
accagacttttccagggattggaag

SEQ ID NO: 5736991 - DNA, 25 bp, Homo sapien
cagcgcatgaggtcgtctccagcct

SEQ ID NO: 5736992 - DNA, 25 bp, Homo sapien
cgtgtctgggtgagggaacgtcaca

SEQ ID NO: 5736993 - DNA, 25 bp, Homo sapien
tgtgagctgaatggcaccttctacc

SEQ ID NO: 5736994 - DNA, 25 bp, Homo sapien
cccctggtgatgaacagtggctgag

SEQ ID NO: 5736995 - DNA, 25 bp, Homo sapien
ctgatctcatgggacacgattcagc

SEQ ID NO: 5736996 - DNA, 25 bp, Homo sapien
gatcctgacacctggcttagagaca

SEQ ID NO: 5736997 - DNA, 25 bp, Homo sapien
agagcttagctaagttcttcgcata

SEQ ID NO: 5736998 - DNA, 25 bp, Homo sapien
gcccacgcctctcccaaggagcctt

SEQ ID NO: 5736999 - DNA, 25 bp, Homo sapien
tgactgaaagaccagtgagttgtgc

SEQ ID NO: 5737000 - DNA, 25 bp, Homo sapien
gtgaagcttggcagagaacttgagg

SEQ ID NO: 5737001 - DNA, 25 bp, Homo sapien
cagggattggaagatggagagaggg

SEQ ID NO: 5737002 - DNA, 25 bp, Homo sapien
ggacagatcctaccaggaggtcttc

SEQ ID NO: 5737003 - DNA, 25 bp, Homo sapien
ctgtgagggctttccgggccttctc

SEQ ID NO: 5737004 - DNA, 25 bp, Homo sapien
cctggagacaagggagccagctgga

SEQ ID NO: 5737005 - DNA, 25 bp, Homo sapien
actgggcctggttgtagagatccac

SEQ ID NO: 5737006 - DNA, 25 bp, Homo sapien
aagtggtcaatgggaaagatgaaga

SEQ ID NO: 5737007 - DNA, 25 bp, Homo sapien
gtggtcaatgggaaagatgaagaaa

SEQ ID NO: 5737008 - DNA, 25 bp, Homo sapien
gtctgctatgcctgtccagtgccca

SEQ ID NO: 5737009 - DNA, 25 bp, Homo sapien
tgagctaccctggaagacgcaagag

SEQ ID NO: 5737010 - DNA, 25 bp, Homo sapien
tggcccaggagagagggtggggggc

SEQ ID NO: 5737011 - DNA, 25 bp, Homo sapien
cccccagctaggctgtccgggtcac

SEQ ID NO: 5737012 - DNA, 25 bp, Homo sapien
ttctaatgtgaactatacgaaagca

SEQ ID NO: 5737013 - DNA, 25 bp, Homo sapien
catccacagagtagtttactaagcc

SEQ ID NO: 5737014 - DNA, 25 bp, Homo sapien
tgagaactttggaaagcttcctcta

SEQ ID NO: 5737015 - DNA, 25 bp, Homo sapien
cagcccaaaggtgcacagggcaccg

SEQ ID NO: 5737016 - DNA, 25 bp, Homo sapien
gggtcttcagcctcagagacaaggg

SEQ ID NO: 5737017 - DNA, 25 bp, Homo sapien
atgaggtagttccatcctgacctct

SEQ ID NO: 5737018 - DNA, 25 bp, Homo sapien
cagccaggtggaaggatgaccgtct

SEQ ID NO: 5737019 - DNA, 25 bp, Homo sapien
tcggttggtttcagcagctgctgtt

SEQ ID NO: 5737020 - DNA, 25 bp, Homo sapien
tccacttttcgaagcagctgatcca

SEQ ID NO: 5737021 - DNA, 25 bp, Homo sapien
gctcactctatcccagggatgaaca

SEQ ID NO: 5737022 - DNA, 25 bp, Homo sapien
gactgacatggtggagaatgtgttt

SEQ ID NO: 5737023 - DNA, 25 bp, Homo sapien
agagctcctgtgagagccagggctg

SEQ ID NO: 5737024 - DNA, 25 bp, Homo sapien
caggtggtctcattggtggtcgtgt

SEQ ID NO: 5737025 - DNA, 25 bp, Homo sapien
ccttctacccatgattctgatcctg

SEQ ID NO: 5737026 - DNA, 25 bp, Homo sapien
atttccagggcatgggctcccgact

SEQ ID NO: 5737027 - DNA, 25 bp, Homo sapien
agctggaggaagagccttggggctt

SEQ ID NO: 5737028 - DNA, 25 bp, Homo sapien
ggctcccgactagaatctgcccctc

SEQ ID NO: 5737029 - DNA, 25 bp, Homo sapien
tggattggcatttccagaggagact

SEQ ID NO: 5737030 - DNA, 25 bp, Homo sapien
tgacccaaccccagatctggacaga

SEQ ID NO: 5737031 - DNA, 25 bp, Homo sapien
acagagacctccctaccctgatcct

SEQ ID NO: 5737032 - DNA, 25 bp, Homo sapien
ccatctagatctccatgtccacagg

SEQ ID NO: 5737033 - DNA, 25 bp, Homo sapien
agatgaagaaagatggatttccagg

SEQ ID NO: 5737034 - DNA, 25 bp, Homo sapien
atgaaagaggcgccaaaaaattaga

SEQ ID NO: 5737035 - DNA, 25 bp, Homo sapien
ggtagagaaagggagaaagtaatga

SEQ ID NO: 5737036 - DNA, 25 bp, Homo sapien
gtgtcatgacccaaccccagatctg

SEQ ID NO: 5737037 - DNA, 25 bp, Homo sapien
gcagtctctggagggtgcgctgggg

SEQ ID NO: 5737038 - DNA, 25 bp, Homo sapien
tgtctgggtgagggaacgtcacaca

SEQ ID NO: 5737039 - DNA, 25 bp, Homo sapien
gggcagggctgtgggtctgtcttct

SEQ ID NO: 5737040 - DNA, 25 bp, Homo sapien
cgacaggtagctctgccagccaggt

SEQ ID NO: 5737041 - DNA, 25 bp, Homo sapien
ggaatgtccagaaggagcgggaagc

SEQ ID NO: 5737042 - DNA, 25 bp, Homo sapien
agggtttggtgcagggctctggaat

SEQ ID NO: 5737043 - DNA, 25 bp, Homo sapien
gttgtgcttgttgaattctgccctc

SEQ ID NO: 5737044 - DNA, 25 bp, Homo sapien
agtggttctccatcccatggacaga

SEQ ID NO: 5737045 - DNA, 25 bp, Homo sapien
gacactgcctgaaaggcgacaacct

SEQ ID NO: 5737046 - DNA, 25 bp, Homo sapien
aacccagccacggtgccgttgcctt

SEQ ID NO: 5737047 - DNA, 25 bp, Homo sapien
acgagctggtttgtttccatccctg

SEQ ID NO: 5737048 - DNA, 25 bp, Homo sapien
ccctctcctcagtggcccaggagag

SEQ ID NO: 5737049 - DNA, 25 bp, Homo sapien
ggcatccactcggcatgggccccat

SEQ ID NO: 5737050 - DNA, 25 bp, Homo sapien
caggtgctgccggatcatctctacc

SEQ ID NO: 5737051 - DNA, 25 bp, Homo sapien
tgggaaagatgaagaaagatggatt

SEQ ID NO: 5737052 - DNA, 25 bp, Homo sapien
tgtggactcccagaatgcaatggga

SEQ ID NO: 5737053 - DNA, 25 bp, Homo sapien
ttggaagatggagagagggaaagga

SEQ ID NO: 5737054 - DNA, 25 bp, Homo sapien
acctcgctgtgaagcttggcagaga

SEQ ID NO: 5737055 - DNA, 25 bp, Homo sapien
taaagaaaccaagaaataatattct

SEQ ID NO: 5737056 - DNA, 25 bp, Homo sapien
catggtgggtctgggaagacaggag

SEQ ID NO: 5737057 - DNA, 25 bp, Homo sapien
ggaaaagtcaatgagccatattgta

SEQ ID NO: 5737058 - DNA, 25 bp, Homo sapien
gaaggagcgggaagcaaaggtggcg

SEQ ID NO: 5737059 - DNA, 25 bp, Homo sapien
tggcgagctgcttgcgaaggtcggc

SEQ ID NO: 5737060 - DNA, 25 bp, Homo sapien
tccacacagcgcatgaggtcgtctc

SEQ ID NO: 5737061 - DNA, 25 bp, Homo sapien
tggttgaacatgtctgtttcatgcc

SEQ ID NO: 5737062 - DNA, 25 bp, Homo sapien
ccacaagagagtctgctatgcctgt

SEQ ID NO: 5737063 - DNA, 25 bp, Homo sapien
agcccagaagtagtcgcagtagctc

SEQ ID NO: 5737064 - DNA, 25 bp, Homo sapien
tttgtttgcccttcagctgtttctg

SEQ ID NO: 5737065 - DNA, 25 bp, Homo sapien
ttgaggggatgaggggggaaagagt

SEQ ID NO: 5737066 - DNA, 25 bp, Homo sapien
agactctttagactgacatggtgga

SEQ ID NO: 5737067 - DNA, 25 bp, Homo sapien
taataacaaggctattggctttgaa

SEQ ID NO: 5737068 - DNA, 25 bp, Homo sapien
gggatggcaaagacttgccctaacc

SEQ ID NO: 5737069 - DNA, 25 bp, Homo sapien
ctcccagaatgcaatgggaaaaaaa

SEQ ID NO: 5737070 - DNA, 25 bp, Homo sapien
tggtgtcatgacccaaccccagatc

SEQ ID NO: 5737071 - DNA, 25 bp, Homo sapien
aattctgacatttccttctgcattt

SEQ ID NO: 5737072 - DNA, 25 bp, Homo sapien
cgcagtagctccactcggttggttt

SEQ ID NO: 5737073 - DNA, 25 bp, Homo sapien
ctttgaatgtttggaaatcatccac

SEQ ID NO: 5737074 - DNA, 25 bp, Homo sapien
ctctgtgagggctttccgggccttc

SEQ ID NO: 5737075 - DNA, 25 bp, Homo sapien
aaagacttgccctaacccatctcac

SEQ ID NO: 5737076 - DNA, 25 bp, Homo sapien
agcctcagagacaagggcagggctg

SEQ ID NO: 5737077 - DNA, 25 bp, Homo sapien
tccatcctgacctctccaggcatgg

SEQ ID NO: 5737078 - DNA, 25 bp, Homo sapien
gatgtaatggaaaagtcaatgagcc

SEQ ID NO: 5737079 - DNA, 25 bp, Homo sapien
tggactcccagaatgcaatgggaaa

SEQ ID NO: 5737080 - DNA, 25 bp, Homo sapien
gaaaccaagaaataatattctaaaa

SEQ ID NO: 5737081 - DNA, 25 bp, Homo sapien
atgaagaaagatggatttccagggc

SEQ ID NO: 5737082 - DNA, 25 bp, Homo sapien
ggactgggcctggttgtagagatcc

SEQ ID NO: 5737083 - DNA, 25 bp, Homo sapien
atccattcactgttggaggcagaga

SEQ ID NO: 5737084 - DNA, 25 bp, Homo sapien
ctgtctgtttcagagcggcaagcac

SEQ ID NO: 5737085 - DNA, 25 bp, Homo sapien
tttcggacactcatgtgggcagtct

SEQ ID NO: 5737086 - DNA, 25 bp, Homo sapien
tttccgggccttctccaccgaggca

SEQ ID NO: 5737087 - DNA, 25 bp, Homo sapien
attctgccctcactgcagatgtgca

SEQ ID NO: 5737088 - DNA, 25 bp, Homo sapien
cctccagccgctctagctccaatgt

SEQ ID NO: 5737089 - DNA, 25 bp, Homo sapien
atccacgggctcgactgtgctttgg

SEQ ID NO: 5737090 - DNA, 25 bp, Homo sapien
aaagatgaagaaagatggatttcca

SEQ ID NO: 5737091 - DNA, 25 bp, Homo sapien
cagatggcgcctgatctcatgggac

SEQ ID NO: 5737092 - DNA, 25 bp, Homo sapien
agcttgctggcctctgagacgagct

SEQ ID NO: 5737093 - DNA, 25 bp, Homo sapien
cggctgtgagctgaatggcaccttc

SEQ ID NO: 5737094 - DNA, 25 bp, Homo sapien
ctcgcccgcggcgaagcgcagcccc

SEQ ID NO: 5737095 - DNA, 25 bp, Homo sapien
gagctggtttgtttccatccctgaa

SEQ ID NO: 5737096 - DNA, 25 bp, Homo sapien
aataaagaaggagggctgcaaagga

SEQ ID NO: 5737097 - DNA, 25 bp, Homo sapien
tgctgttccggcatcgtgtctgggt

SEQ ID NO: 5737098 - DNA, 25 bp, Homo sapien
ctgggccaaacagcagcactgaaag

SEQ ID NO: 5737099 - DNA, 25 bp, Homo sapien
cctcctaaaacccctggtgatgaac

SEQ ID NO: 5737100 - DNA, 25 bp, Homo sapien
ctttagactctttagactgacatgg

SEQ ID NO: 5737101 - DNA, 25 bp, Homo sapien
accctggaagacgcaagagggctca

SEQ ID NO: 5737102 - DNA, 25 bp, Homo sapien
gagggctcactctatcccagggatg

SEQ ID NO: 5737103 - DNA, 25 bp, Homo sapien
gaatgtttggaaatcatccacagag

SEQ ID NO: 5737104 - DNA, 25 bp, Homo sapien
cagcttgatctccagctgctgggtc

SEQ ID NO: 5737105 - DNA, 25 bp, Homo sapien
aaaaatggactggcccaaactgggc

SEQ ID NO: 5737106 - DNA, 25 bp, Homo sapien
ccttcccaccagccgccgtccggga

SEQ ID NO: 5737107 - DNA, 25 bp, Homo sapien
cctttttggttgcaatgtttcaaga

SEQ ID NO: 5737108 - DNA, 25 bp, Homo sapien
actctatcccagggatgaacagagg

SEQ ID NO: 5737109 - DNA, 25 bp, Homo sapien
atctgggggatggcaaagacttgcc

SEQ ID NO: 5737110 - DNA, 25 bp, Homo sapien
gctccctgtctttggccgggtccac

SEQ ID NO: 5737111 - DNA, 25 bp, Homo sapien
gggggaaggatggattggcatttcc

SEQ ID NO: 5737112 - DNA, 25 bp, Homo sapien
cccagccctgccatacccaagaaga

SEQ ID NO: 5737113 - DNA, 25 bp, Homo sapien
tctccacctccagccgctctagctc

SEQ ID NO: 5737114 - DNA, 25 bp, Homo sapien
caagtcacactcagaccagactttt

SEQ ID NO: 5737115 - DNA, 25 bp, Homo sapien
gggaaaggaggtgcagacaccaagt

SEQ ID NO: 5737116 - DNA, 25 bp, Homo sapien
atagcggctggcgagctgcttgcga

SEQ ID NO: 5737117 - DNA, 25 bp, Homo sapien
gacatttccttctgcatttgtttgc

SEQ ID NO: 5737118 - DNA, 25 bp, Homo sapien
agacagagacctccctaccctgatc

SEQ ID NO: 5737119 - DNA, 25 bp, Homo sapien
tcaccggtggattttcggacactca

SEQ ID NO: 5737120 - DNA, 25 bp, Homo sapien
gtgcagggctctggaatgtccagaa

SEQ ID NO: 5737121 - DNA, 25 bp, Homo sapien
gtggctgagaaagccagatgtggac

SEQ ID NO: 5737122 - DNA, 25 bp, Homo sapien
ggggaaagagtgacctccaaaaatg

SEQ ID NO: 5737123 - DNA, 25 bp, Homo sapien
cttcagcctcagagacaagggcagg

SEQ ID NO: 5737124 - DNA, 25 bp, Homo sapien
tgggggccagggcagcccaaaggtg

SEQ ID NO: 5737125 - DNA, 25 bp, Homo sapien
tgccctcactgcagatgtgcaggtc

SEQ ID NO: 5737126 - DNA, 25 bp, Homo sapien
tccagggcacaagcatgtgacagtg

SEQ ID NO: 5737127 - DNA, 25 bp, Homo sapien
agggcagcccaaaggtgcacagggc

SEQ ID NO: 5737128 - DNA, 25 bp, Homo sapien
gaaagcttcccaagtcacactcaga

SEQ ID NO: 5737129 - DNA, 25 bp, Homo sapien
aagggcagggctgtgggtctgtctt

SEQ ID NO: 5737130 - DNA, 25 bp, Homo sapien
ggaaagatgaagaaagatggatttc

SEQ ID NO: 5737131 - DNA, 25 bp, Homo sapien
ggggggcatccactcggcatgggcc

SEQ ID NO: 5737132 - DNA, 25 bp, Homo sapien
ccggccccattaagagcctgtggtg

SEQ ID NO: 5737133 - DNA, 25 bp, Homo sapien
taagggtttggtgcagggctctgga

SEQ ID NO: 5737134 - DNA, 25 bp, Homo sapien
gaggggatgaggggggaaagagtga

SEQ ID NO: 5737135 - DNA, 25 bp, Homo sapien
tatcagcccagaagtagtcgcagta

SEQ ID NO: 5737136 - DNA, 25 bp, Homo sapien
gcagatgtgcaggtcaaacccaaag

SEQ ID NO: 5737137 - DNA, 25 bp, Homo sapien
tcttcatgtctttcttgaagttctc

SEQ ID NO: 5737138 - DNA, 25 bp, Homo sapien
tggaaggatgaccgtctggctttct

SEQ ID NO: 5737139 - DNA, 25 bp, Homo sapien
ctccatgtccacagggcggatgttg

SEQ ID NO: 5737140 - DNA, 25 bp, Homo sapien
ctaccctggaagacgcaagagggct

SEQ ID NO: 5737141 - DNA, 25 bp, Homo sapien
tgtgaagccaaggagttctgagaga

SEQ ID NO: 5737142 - DNA, 25 bp, Homo sapien
tggtgcagggctctggaatgtccag

SEQ ID NO: 5737143 - DNA, 25 bp, Homo sapien
tctgggtgagggaacgtcacacagt

SEQ ID NO: 5737144 - DNA, 25 bp, Homo sapien
tgcttgttgaattctgccctcactg

SEQ ID NO: 5737145 - DNA, 25 bp, Homo sapien
ggctgtccgggtcacccttctggaa

SEQ ID NO: 5737146 - DNA, 25 bp, Homo sapien
caatgaaagaggcgccaaaaaatta

SEQ ID NO: 5737147 - DNA, 25 bp, Homo sapien
cacggtgccgttgccttgggggtcc

SEQ ID NO: 5737148 - DNA, 25 bp, Homo sapien
tttggttgaacatgtctgtttcatg

SEQ ID NO: 5737149 - DNA, 25 bp, Homo sapien
caagggagccagctggaggaagagc

SEQ ID NO: 5737150 - DNA, 25 bp, Homo sapien
atgattctgatcctgacacctggct

SEQ ID NO: 5737151 - DNA, 25 bp, Homo sapien
gcccaggagagagggtggggggcat

SEQ ID NO: 5737152 - DNA, 25 bp, Homo sapien
cctgtgtggactttctccgcgcctt

SEQ ID NO: 5737153 - DNA, 25 bp, Homo sapien
agggctctggaatgtccagaaggag

SEQ ID NO: 5737154 - DNA, 25 bp, Homo sapien
agaacttgaggtgaacttctgcttc

SEQ ID NO: 5737155 - DNA, 25 bp, Homo sapien
gatctccagctgctgggtcttcatc

SEQ ID NO: 5737156 - DNA, 25 bp, Homo sapien
aaatcatccacagagtagtttacta

SEQ ID NO: 5737157 - DNA, 25 bp, Homo sapien
tcctgacctctccaggcatggtggg

SEQ ID NO: 5737158 - DNA, 25 bp, Homo sapien
agacgcaagagggctcactctatcc

SEQ ID NO: 5737159 - DNA, 25 bp, Homo sapien
ctcagcttgatctccagctgctggg

SEQ ID NO: 5737160 - DNA, 25 bp, Homo sapien
tctccagcaactgcacgtagctcgc

SEQ ID NO: 5737161 - DNA, 25 bp, Homo sapien
aggagccaagccttcctcctaaaac

SEQ ID NO: 5737162 - DNA, 25 bp, Homo sapien
agtctctggagggtgcgctggggtc

SEQ ID NO: 5737163 - DNA, 25 bp, Homo sapien
taggactgacccggccccattaaga

SEQ ID NO: 5737164 - DNA, 25 bp, Homo sapien
gaacttctgcttcgtccgccaggct

SEQ ID NO: 5737165 - DNA, 25 bp, Homo sapien
ccagcctgtgtggactttctccgcg

SEQ ID NO: 5737166 - DNA, 25 bp, Homo sapien
ggactgacccggccccattaagagc

SEQ ID NO: 5737167 - DNA, 25 bp, Homo sapien
cttcacctgggcccacgcctctccc

SEQ ID NO: 5737168 - DNA, 25 bp, Homo sapien
ccatctcacatgtaggactgacccg

SEQ ID NO: 5737169 - DNA, 25 bp, Homo sapien
actgttggaggcagagagctcctgt

SEQ ID NO: 5737170 - DNA, 25 bp, Homo sapien
cactgcctgaaaggcgacaacctag

SEQ ID NO: 5737171 - DNA, 25 bp, Homo sapien
gtctccagcctgtgtggactttctc

SEQ ID NO: 5737172 - DNA, 25 bp, Homo sapien
agcagtagttcaaacccagccacgg

SEQ ID NO: 5737173 - DNA, 25 bp, Homo sapien
ctgaatggcaccttctacccatgat

SEQ ID NO: 5737174 - DNA, 25 bp, Homo sapien
gagacaagggagccagctggaggaa

SEQ ID NO: 5737175 - DNA, 25 bp, Homo sapien
tctggaatcaccagctctctcccct

SEQ ID NO: 5737176 - DNA, 25 bp, Homo sapien
gcgcatgaggtcgtctccagcctgt

SEQ ID NO: 5737177 - DNA, 25 bp, Homo sapien
ggctggaatcccaggagaactgctg

SEQ ID NO: 5737178 - DNA, 25 bp, Homo sapien
caagaaataatattctaaaattggt

SEQ ID NO: 5737179 - DNA, 25 bp, Homo sapien
aggagaactgctgggacgttcccag

SEQ ID NO: 5737180 - DNA, 25 bp, Homo sapien
cttgcgaaggtcggcaatgtggtgg

SEQ ID NO: 5737181 - DNA, 25 bp, Homo sapien
gttctgagagagcttagctaagttc

SEQ ID NO: 5737182 - DNA, 25 bp, Homo sapien
tctgggaatcaccggtggattttcg

SEQ ID NO: 5737183 - DNA, 25 bp, Homo sapien
gtagctcgccgggaaccagccacgg

SEQ ID NO: 5737184 - DNA, 25 bp, Homo sapien
acaagggcagggctgtgggtctgtc

SEQ ID NO: 5737185 - DNA, 25 bp, Homo sapien
ctgatcctgacacctggcttagaga

SEQ ID NO: 5737186 - DNA, 25 bp, Homo sapien
tggactttctccgcgccttcttgat

SEQ ID NO: 5737187 - DNA, 25 bp, Homo sapien
tacagatggcgcctgatctcatggg

SEQ ID NO: 5737188 - DNA, 25 bp, Homo sapien
ttggaaagcttcctctaatgagact

SEQ ID NO: 5737189 - DNA, 25 bp, Homo sapien
gtccctgatgcgtggtatccattca

SEQ ID NO: 5737190 - DNA, 25 bp, Homo sapien
ggccacaagagagtctgctatgcct

SEQ ID NO: 5737191 - DNA, 25 bp, Homo sapien
cttgaggtgaacttctgcttcgtcc

SEQ ID NO: 5737192 - DNA, 25 bp, Homo sapien
tgtctttcttgaagttctcacggaa

SEQ ID NO: 5737193 - DNA, 25 bp, Homo sapien
gaagaaagatggatttccagggcat

SEQ ID NO: 5737194 - DNA, 25 bp, Homo sapien
gctatgcctgtccagtgcccaccag

SEQ ID NO: 5737195 - DNA, 25 bp, Homo sapien
acgggctcgactgtgctttggttga

SEQ ID NO: 5737196 - DNA, 25 bp, Homo sapien
gaaggatggattggcatttccagag

SEQ ID NO: 5737197 - DNA, 25 bp, Homo sapien
aatgtgaactatacgaaagcaattc

SEQ ID NO: 5737198 - DNA, 25 bp, Homo sapien
tagctggtgtcatgacccaacccca

SEQ ID NO: 5737199 - DNA, 25 bp, Homo sapien
ctcgccttcccaccagccgccgtcc

SEQ ID NO: 5737200 - DNA, 25 bp, Homo sapien
ctgtggtagagaaagggagaaagta

SEQ ID NO: 5737201 - DNA, 25 bp, Homo sapien
ctcctctgtcttgttgctcagcttg

SEQ ID NO: 5737202 - DNA, 25 bp, Homo sapien
tatgcctgtccagtgcccaccagtg

SEQ ID NO: 5737203 - DNA, 25 bp, Homo sapien
cacagcatgggagtcagggggtctt

SEQ ID NO: 5737204 - DNA, 25 bp, Homo sapien
ctgacctctccaggcatggtgggtc

SEQ ID NO: 5737205 - DNA, 25 bp, Homo sapien
cagtgcccaccagtgacagaaaact

SEQ ID NO: 5737206 - DNA, 25 bp, Homo sapien
agctccactcggttggtttcagcag

SEQ ID NO: 5737207 - DNA, 25 bp, Homo sapien
agggctggctggaatcccaggagaa

SEQ ID NO: 5737208 - DNA, 25 bp, Homo sapien
cagtagttcaaacccagccacggtg

SEQ ID NO: 5737209 - DNA, 25 bp, Homo sapien
agcctgtggtgggcggcccgggaga

SEQ ID NO: 5737210 - DNA, 25 bp, Homo sapien
atgaacagaggactctggaatcctc

SEQ ID NO: 5737211 - DNA, 25 bp, Homo sapien
caaaggtggcgggacactgcctgaa

SEQ ID NO: 5737212 - DNA, 25 bp, Homo sapien
atttggggctaatttgccgaatgag

SEQ ID NO: 5737213 - DNA, 25 bp, Homo sapien
ctaaaacccctggtgatgaacagtg

SEQ ID NO: 5737214 - DNA, 25 bp, Homo sapien
ggctaatttgccgaatgaggtagtt

SEQ ID NO: 5737215 - DNA, 25 bp, Homo sapien
ttgatctccagctgctgggtcttca

SEQ ID NO: 5737216 - DNA, 25 bp, Homo sapien
ttcagagcggcaagcacagcatggg

SEQ ID NO: 5737217 - DNA, 25 bp, Homo sapien
gagagtctgctatgcctgtccagtg

SEQ ID NO: 5737218 - DNA, 25 bp, Homo sapien
gggaaccagccacggagcccgtcct

SEQ ID NO: 5737219 - DNA, 25 bp, Homo sapien
tttgcccttcagctgtttctggagc

SEQ ID NO: 5737220 - DNA, 25 bp, Homo sapien
ctgggcccacgcctctcccaaggag

SEQ ID NO: 5737221 - DNA, 25 bp, Homo sapien
gacttttccagggattggaagatgg

SEQ ID NO: 5737222 - DNA, 25 bp, Homo sapien
tttggttgcaatgtttcaagaacaa

SEQ ID NO: 5737223 - DNA, 25 bp, Homo sapien
aacctagtgtggccacaagagagtc

SEQ ID NO: 5737224 - DNA, 25 bp, Homo sapien
agaatgtgtttgctgtggtagagaa

SEQ ID NO: 5737225 - DNA, 25 bp, Homo sapien
cctttggacgagctggatgaggtct

SEQ ID NO: 5737226 - DNA, 25 bp, Homo sapien
cgctcaatttggggctaatttgccg

SEQ ID NO: 5737227 - DNA, 25 bp, Homo sapien
acgcctctcccaaggagccttcctc

SEQ ID NO: 5737228 - DNA, 25 bp, Homo sapien
acagatcctaccaggaggtcttcac

SEQ ID NO: 5737229 - DNA, 25 bp, Homo sapien
tcatctccaggtctctctgccgctc

SEQ ID NO: 5737230 - DNA, 25 bp, Homo sapien
ttctccaccgaggcatagcggctgg

SEQ ID NO: 5737231 - DNA, 25 bp, Homo sapien
gcagacaccaagtaagggtttggtg

SEQ ID NO: 5737232 - DNA, 25 bp, Homo sapien
cgacaacctagtgtggccacaagag

SEQ ID NO: 5737233 - DNA, 25 bp, Homo sapien
gcatagtcttcttcaatctttatcc

SEQ ID NO: 5737234 - DNA, 25 bp, Homo sapien
actgacccggccccattaagagcct

SEQ ID NO: 5737235 - DNA, 25 bp, Homo sapien
catgggccccatggtgggagcccag

SEQ ID NO: 5737236 - DNA, 25 bp, Homo sapien
aatcccaggagaactgctgggacgt

SEQ ID NO: 5737237 - DNA, 25 bp, Homo sapien
atgggacacgattcagcgctcaatt

SEQ ID NO: 5737238 - DNA, 25 bp, Homo sapien
tggaagacgcaagagggctcactct

SEQ ID NO: 5737239 - DNA, 25 bp, Homo sapien
ttagagattaataagtcatcggatt

SEQ ID NO: 5737240 - DNA, 25 bp, Homo sapien
tcagaccagacttttccagggattg

SEQ ID NO: 5737241 - DNA, 25 bp, Homo sapien
ccacagggcggatgttgcccgtctt

SEQ ID NO: 5737242 - DNA, 25 bp, Homo sapien
agccgccgtccgggacctgcagcag

SEQ ID NO: 5737243 - DNA, 25 bp, Homo sapien
catttgtttgcccttcagctgtttc

SEQ ID NO: 5737244 - DNA, 25 bp, Homo sapien
aggatggattggcatttccagagga

SEQ ID NO: 5737245 - DNA, 25 bp, Homo sapien
gccttcctcctgtgaagccaaggag

SEQ ID NO: 5737246 - DNA, 25 bp, Homo sapien
ctgccgctctgtgagggctttccgg

SEQ ID NO: 5737247 - DNA, 25 bp, Homo sapien
cagaaggagcgggaagcaaaggtgg

SEQ ID NO: 5737248 - DNA, 25 bp, Homo sapien
tagagaaagggagaaagtaatgagc

SEQ ID NO: 5737249 - DNA, 25 bp, Homo sapien
agagacaagggcagggctgtgggtc

SEQ ID NO: 5737250 - DNA, 25 bp, Homo sapien
aggatgaccgtctggctttcttctc

SEQ ID NO: 5737251 - DNA, 25 bp, Homo sapien
gcttctccacctcgctgtgaagctt

SEQ ID NO: 5737252 - DNA, 25 bp, Homo sapien
ctggcctctgagacgagctggtttg

SEQ ID NO: 5737253 - DNA, 25 bp, Homo sapien
agctgggccaaacagcagcactgaa

SEQ ID NO: 5737254 - DNA, 25 bp, Homo sapien
caccgtggcggacaggccccagctt

SEQ ID NO: 5737255 - DNA, 25 bp, Homo sapien
attccaggcttctccagcaactgca

SEQ ID NO: 5737256 - DNA, 25 bp, Homo sapien
gtcttcagcctcagagacaagggca

SEQ ID NO: 5737257 - DNA, 25 bp, Homo sapien
actcatgtgggcagtctctggaggg

SEQ ID NO: 5737258 - DNA, 25 bp, Homo sapien
tgtacaagggacagcagtcccagcc

SEQ ID NO: 5737259 - DNA, 25 bp, Homo sapien
atgtttggaaatcatccacagagta

SEQ ID NO: 5737260 - DNA, 25 bp, Homo sapien
gtggccacaagagagtctgctatgc

SEQ ID NO: 5737261 - DNA, 25 bp, Homo sapien
cccatttttcataaagaaaccaaga

SEQ ID NO: 5737262 - DNA, 25 bp, Homo sapien
cagtgacccctacaaaactcggcaa

SEQ ID NO: 5737263 - DNA, 25 bp, Homo sapien
ggcctgggaatatgggggagccccc

SEQ ID NO: 5737264 - DNA, 25 bp, Homo sapien
caaagttccagcctctgtctgtttc

SEQ ID NO: 5737265 - DNA, 25 bp, Homo sapien
cgtcacacagtttattgtgatggtg

SEQ ID NO: 5737266 - DNA, 25 bp, Homo sapien
gacctttttggttgcaatgtttcaa

SEQ ID NO: 5737267 - DNA, 25 bp, Homo sapien
tggtgggcggcccgggagagtgggg

SEQ ID NO: 5737268 - DNA, 25 bp, Homo sapien
tcttctcccggcggaggggggacca

SEQ ID NO: 5737269 - DNA, 25 bp, Homo sapien
ctggagcagtagttcaaacccagcc

SEQ ID NO: 5737270 - DNA, 25 bp, Homo sapien
tcccaggttctgggaatcaccggtg

SEQ ID NO: 5737271 - DNA, 25 bp, Homo sapien
tccagccgctctagctccaatgtgg

SEQ ID NO: 5737272 - DNA, 25 bp, Homo sapien
tctcttcaaaccatttggactgggc

SEQ ID NO: 5737273 - DNA, 25 bp, Homo sapien
gaggtagttccatcctgacctctcc

SEQ ID NO: 5737274 - DNA, 25 bp, Homo sapien
atgccgcagctgcgtgtactggcac

SEQ ID NO: 5737275 - DNA, 25 bp, Homo sapien
cctgtccagtgcccaccagtgacag

SEQ ID NO: 5737276 - DNA, 25 bp, Homo sapien
gacgttcccaggtggtctcattggt

SEQ ID NO: 5737277 - DNA, 25 bp, Homo sapien
ctgtcttctgggcctgggaatatgg

SEQ ID NO: 5737278 - DNA, 25 bp, Homo sapien
ttggtggtcgtgttgacatagtacc

SEQ ID NO: 5737279 - DNA, 25 bp, Homo sapien
gaaccagccacggagcccgtcctcc

SEQ ID NO: 5737280 - DNA, 25 bp, Homo sapien
gatccacacagcgcatgaggtcgtc

SEQ ID NO: 5737281 - DNA, 25 bp, Homo sapien
gaccccccgaagctgcacaggccca

SEQ ID NO: 5737282 - DNA, 25 bp, Homo sapien
ggcaagcacagcatgggagtcaggg

SEQ ID NO: 5737283 - DNA, 25 bp, Homo sapien
gctgtgagctgaatggcaccttcta

SEQ ID NO: 5737284 - DNA, 25 bp, Homo sapien
gggacacgattcagcgctcaatttg

SEQ ID NO: 5737285 - DNA, 25 bp, Homo sapien
gccggatcatctctaccctctccac

SEQ ID NO: 5737286 - DNA, 25 bp, Homo sapien
cacggaagttcatcaggggcttctc

SEQ ID NO: 5737287 - DNA, 25 bp, Homo sapien
ggaaatcatccacagagtagtttac

SEQ ID NO: 5737288 - DNA, 25 bp, Homo sapien
cctgggaatatgggggagcccccag

SEQ ID NO: 5737289 - DNA, 25 bp, Homo sapien
cagccctgccatacccaagaagaca

SEQ ID NO: 5737290 - DNA, 25 bp, Homo sapien
tttggccgggtccacttttcgaagc

SEQ ID NO: 5737291 - DNA, 25 bp, Homo sapien
tggcccaaactgggccaacctgagc

SEQ ID NO: 5737292 - DNA, 25 bp, Homo sapien
aattctcattcaatgaaagaggcgc

SEQ ID NO: 5737293 - DNA, 25 bp, Homo sapien
aacagtggctgagaaagccagatgt

SEQ ID NO: 5737294 - DNA, 25 bp, Homo sapien
gaaagcaattctcattcaatgaaag

SEQ ID NO: 5737295 - DNA, 25 bp, Homo sapien
gtgggcggcccgggagagtgggggc

SEQ ID NO: 5737296 - DNA, 25 bp, Homo sapien
gaagcaaaggtggcgggacactgcc

SEQ ID NO: 5737297 - DNA, 25 bp, Homo sapien
ccgcgccttcttgatgtcctcctct

SEQ ID NO: 5737298 - DNA, 25 bp, Homo sapien
taagagcctgtggtgggcggcccgg

SEQ ID NO: 5737299 - DNA, 25 bp, Homo sapien
cagaatgcaatgggaaaaaaataaa

SEQ ID NO: 5737300 - DNA, 25 bp, Homo sapien
aagcaattctcattcaatgaaagag

SEQ ID NO: 5737301 - DNA, 25 bp, Homo sapien
tcacactcagaccagacttttccag

SEQ ID NO: 5737302 - DNA, 25 bp, Homo sapien
ttcatgtctttcttgaagttctcac

SEQ ID NO: 5737303 - DNA, 25 bp, Homo sapien
gcgatgaggatcccaggttctggga

SEQ ID NO: 5737304 - DNA, 25 bp, Homo sapien
acagtttattgtgatggtgttttcc

SEQ ID NO: 5737305 - DNA, 25 bp, Homo sapien
gacagaaaactgtacaagggacagc

SEQ ID NO: 5737306 - DNA, 25 bp, Homo sapien
cccttctggaatcaccagctctctc

SEQ ID NO: 5737307 - DNA, 25 bp, Homo sapien
ttaccactagcacccatttttcata

SEQ ID NO: 5737308 - DNA, 25 bp, Homo sapien
catgtctttcttgaagttctcacgg

SEQ ID NO: 5737309 - DNA, 25 bp, Homo sapien
ttggtttactttagtatattaggca

SEQ ID NO: 5737310 - DNA, 25 bp, Homo sapien
actttacagatggcgcctgatctca

SEQ ID NO: 5737311 - DNA, 25 bp, Homo sapien
ggacagcagtcccagccctgccata

SEQ ID NO: 5737312 - DNA, 25 bp, Homo sapien
ttctgacatttccttctgcatttgt

SEQ ID NO: 5737313 - DNA, 25 bp, Homo sapien
tagaatctgcccctcgctcacgctt

SEQ ID NO: 5737314 - DNA, 25 bp, Homo sapien
atacccaagaagacagagccatctg

SEQ ID NO: 5737315 - DNA, 25 bp, Homo sapien
ggctctggaatgtccagaaggagcg

SEQ ID NO: 5737316 - DNA, 25 bp, Homo sapien
tgaacatgtctgtttcatgccgcag

SEQ ID NO: 5737317 - DNA, 25 bp, Homo sapien
aggagccttcctcctgtgaagccaa

SEQ ID NO: 5737318 - DNA, 25 bp, Homo sapien
cagtggctgagaaagccagatgtgg

SEQ ID NO: 5737319 - DNA, 25 bp, Homo sapien
gtttctggagcagtagttcaaaccc

SEQ ID NO: 5737320 - DNA, 25 bp, Homo sapien
ctgctttttgcttggcgatgaggat

SEQ ID NO: 5737321 - DNA, 25 bp, Homo sapien
gtcatgacccaaccccagatctgga

SEQ ID NO: 5737322 - DNA, 25 bp, Homo sapien
cagaagtagtcgcagtagctccact

SEQ ID NO: 5737323 - DNA, 25 bp, Homo sapien
caaggagttctgagagagcttagct

SEQ ID NO: 5737324 - DNA, 25 bp, Homo sapien
tgttgacatagtaccgccggccctg

SEQ ID NO: 5737325 - DNA, 25 bp, Homo sapien
ctgcacgtagctcgccgggaaccag

SEQ ID NO: 5737326 - DNA, 25 bp, Homo sapien
gccaggtggaaggatgaccgtctgg

SEQ ID NO: 5737327 - DNA, 25 bp, Homo sapien
tggcgggacactgcctgaaaggcga

SEQ ID NO: 5737328 - DNA, 25 bp, Homo sapien
ccgggtcacccttctggaatcacca

SEQ ID NO: 5737329 - DNA, 25 bp, Homo sapien
ctgttccggcatcgtgtctgggtga

SEQ ID NO: 5737330 - DNA, 25 bp, Homo sapien
gtgctttggttgaacatgtctgttt

SEQ ID NO: 5737331 - DNA, 25 bp, Homo sapien
acccaaccccagatctggacagagt

SEQ ID NO: 5737332 - DNA, 25 bp, Homo sapien
agggcatgggctcccgactagaatc

SEQ ID NO: 5737333 - DNA, 25 bp, Homo sapien
ttcaaacccagccacggtgccgttg

SEQ ID NO: 5737334 - DNA, 25 bp, Homo sapien
agtaagggtttggtgcagggctctg

SEQ ID NO: 5737335 - DNA, 25 bp, Homo sapien
ccttctcgccttcccaccagccgcc

SEQ ID NO: 5737336 - DNA, 25 bp, Homo sapien
aagcagctgggggaaggatggattg

SEQ ID NO: 5737337 - DNA, 25 bp, Homo sapien
caggcatggtgggtctgggaagaca

SEQ ID NO: 5737338 - DNA, 25 bp, Homo sapien
ggggcatccactcggcatgggcccc

SEQ ID NO: 5737339 - DNA, 25 bp, Homo sapien
caccagccgccgtccgggacctgca

SEQ ID NO: 5737340 - DNA, 25 bp, Homo sapien
ggtcaatgggaaagatgaagaaaga

SEQ ID NO: 5737341 - DNA, 25 bp, Homo sapien
cttttccagggattggaagatggag

SEQ ID NO: 5737342 - DNA, 25 bp, Homo sapien
ggtgcggctgtgagctgaatggcac

SEQ ID NO: 5737343 - DNA, 25 bp, Homo sapien
catcctgacctctccaggcatggtg

SEQ ID NO: 5737344 - DNA, 25 bp, Homo sapien
agcggctggcgagctgcttgcgaag

SEQ ID NO: 5737345 - DNA, 25 bp, Homo sapien
agacagagccatctgggggatggca

SEQ ID NO: 5737346 - DNA, 25 bp, Homo sapien
catagtaccgccggccctgaggcga

SEQ ID NO: 5737347 - DNA, 25 bp, Homo sapien
ccaaccccagatctggacagagtgg

SEQ ID NO: 5737348 - DNA, 25 bp, Homo sapien
ccattaagagcctgtggtgggcggc

SEQ ID NO: 5737349 - DNA, 25 bp, Homo sapien
tttttggttgcaatgtttcaagaac

SEQ ID NO: 5737350 - DNA, 25 bp, Homo sapien
ctacccatgattctgatcctgacac

SEQ ID NO: 5737351 - DNA, 25 bp, Homo sapien
aactttggaaagcttcctctaatga

SEQ ID NO: 5737352 - DNA, 25 bp, Homo sapien
tctgcatttgtttgcccttcagctg

SEQ ID NO: 5737353 - DNA, 25 bp, Homo sapien
tccgggccttctccaccgaggcata

SEQ ID NO: 5737354 - DNA, 25 bp, Homo sapien
tctttcttgaagttctcacggaagt

SEQ ID NO: 5737355 - DNA, 25 bp, Homo sapien
agattaataagtcatcggattctag

SEQ ID NO: 5737356 - DNA, 25 bp, Homo sapien
tgtggtgggcggcccgggagagtgg

SEQ ID NO: 5737357 - DNA, 25 bp, Homo sapien
ttcataaagaaaccaagaaataata

SEQ ID NO: 5737358 - DNA, 25 bp, Homo sapien
gtccttcttatcagcccagaagtag

SEQ ID NO: 5737359 - DNA, 25 bp, Homo sapien
tttccttgctctgctttttgcttgg

SEQ ID NO: 5737360 - DNA, 25 bp, Homo sapien
aagaaaccaagaaataatattctaa

SEQ ID NO: 5737361 - DNA, 25 bp, Homo sapien
gaagttctcacggaagttcatcagg

SEQ ID NO: 5737362 - DNA, 25 bp, Homo sapien
tgctctctgacccacagctccctgt

SEQ ID NO: 5737363 - DNA, 25 bp, Homo sapien
tgggaatcaccggtggattttcgga

SEQ ID NO: 5737364 - DNA, 25 bp, Homo sapien
agagcctgtggtgggcggcccggga

SEQ ID NO: 5737365 - DNA, 25 bp, Homo sapien
gcgaagcgcagcccctggccgtgcc

SEQ ID NO: 5737366 - DNA, 25 bp, Homo sapien
agccatctgggggatggcaaagact

SEQ ID NO: 5737367 - DNA, 25 bp, Homo sapien
gccatattgtactcaaaatatcttg

SEQ ID NO: 5737368 - DNA, 25 bp, Homo sapien
gcacgtagctcgccgggaaccagcc

SEQ ID NO: 5737369 - DNA, 25 bp, Homo sapien
ataagtcatcggattctagcacgtt

SEQ ID NO: 5737370 - DNA, 25 bp, Homo sapien
gggacactgcctgaaaggcgacaac

SEQ ID NO: 5737371 - DNA, 25 bp, Homo sapien
tggcagagaacttgaggtgaacttc

SEQ ID NO: 5737372 - DNA, 25 bp, Homo sapien
agcacccatttttcataaagaaacc

SEQ ID NO: 5737373 - DNA, 25 bp, Homo sapien
ggtggcgggacactgcctgaaaggc

SEQ ID NO: 5737374 - DNA, 25 bp, Homo sapien
gtgggtctgggaagacaggagccaa

SEQ ID NO: 5737375 - DNA, 25 bp, Homo sapien
agggctgtgggtctgtcttctgggc

SEQ ID NO: 5737376 - DNA, 25 bp, Homo sapien
tccactcggcatgggccccatggtg

SEQ ID NO: 5737377 - DNA, 25 bp, Homo sapien
gttgtagagatccacacagcgcatg

SEQ ID NO: 5737378 - DNA, 25 bp, Homo sapien
gcagggctctggaatgtccagaagg

SEQ ID NO: 5737379 - DNA, 25 bp, Homo sapien
cacaggtgctgccggatcatctcta

SEQ ID NO: 5737380 - DNA, 25 bp, Homo sapien
cagctgctgttccggcatcgtgtct

SEQ ID NO: 5737381 - DNA, 25 bp, Homo sapien
cacggagcccgtcctccttctcgcc

SEQ ID NO: 5737382 - DNA, 25 bp, Homo sapien
tggggtccctgatgcgtggtatcca

SEQ ID NO: 5737383 - DNA, 25 bp, Homo sapien
agctccaatgtggtggtcaccatct

SEQ ID NO: 5737384 - DNA, 25 bp, Homo sapien
ctgatgcgtggtatccattcactgt

SEQ ID NO: 5737385 - DNA, 25 bp, Homo sapien
tccaggcatggtgggtctgggaaga

SEQ ID NO: 5737386 - DNA, 25 bp, Homo sapien
tcttcaatctttatcctttcccgga

SEQ ID NO: 5737387 - DNA, 25 bp, Homo sapien
gaaggatgaccgtctggctttcttc

SEQ ID NO: 5737388 - DNA, 25 bp, Homo sapien
cgtaggtgaaggcctttgtgctgac

SEQ ID NO: 5737389 - DNA, 25 bp, Homo sapien
gtctcattggtggtcgtgttgacat

SEQ ID NO: 5737390 - DNA, 25 bp, Homo sapien
catcaggggcttctccacctcgctg

SEQ ID NO: 5737391 - DNA, 25 bp, Homo sapien
agttcaaacccagccacggtgccgt

SEQ ID NO: 5737392 - DNA, 25 bp, Homo sapien
accaagaaataatattctaaaattg

SEQ ID NO: 5737393 - DNA, 25 bp, Homo sapien
catccactcggcatgggccccatgg

SEQ ID NO: 5737394 - DNA, 25 bp, Homo sapien
tatcctttcccggatgaattctgac

SEQ ID NO: 5737395 - DNA, 25 bp, Homo sapien
cctttgtgctgacctttttggttgc

SEQ ID NO: 5737396 - DNA, 25 bp, Homo sapien
caagtaagggtttggtgcagggctc

SEQ ID NO: 5737397 - DNA, 25 bp, Homo sapien
gcgtgatcagctcgcccgcggcgaa

SEQ ID NO: 5737398 - DNA, 25 bp, Homo sapien
gtggtggtcgcacttcttcatgtct

SEQ ID NO: 5737399 - DNA, 25 bp, Homo sapien
accacaaagttccagcctctgtctg

SEQ ID NO: 5737400 - DNA, 25 bp, Homo sapien
tctggctttcttctcccggcggagg

SEQ ID NO: 5737401 - DNA, 25 bp, Homo sapien
ccccatggtgggagcccagcccccc

SEQ ID NO: 5737402 - DNA, 25 bp, Homo sapien
gggaccattccaggcttctccagca

SEQ ID NO: 5737403 - DNA, 25 bp, Homo sapien
cttctccagcaactgcacgtagctc

SEQ ID NO: 5737404 - DNA, 25 bp, Homo sapien
tcaggggcttctccacctcgctgtg

SEQ ID NO: 5737405 - DNA, 25 bp, Homo sapien
tcggcaatgtggtggtcgcacttct

SEQ ID NO: 5737406 - DNA, 25 bp, Homo sapien
ggtggtcgcacttcttcatgtcttt

SEQ ID NO: 5737407 - DNA, 25 bp, Homo sapien
gtgacagtgacccctacaaaactcg

SEQ ID NO: 5737408 - DNA, 25 bp, Homo sapien
tccatcccatggacagatcctacca

SEQ ID NO: 5737409 - DNA, 25 bp, Homo sapien
gactgtgctttggttgaacatgtct

SEQ ID NO: 5737410 - DNA, 25 bp, Homo sapien
ggcatgggctcccgactagaatctg

SEQ ID NO: 5737411 - DNA, 25 bp, Homo sapien
ttcttatcagcccagaagtagtcgc

SEQ ID NO: 5737412 - DNA, 25 bp, Homo sapien
gaaaactgtacaagggacagcagtc

SEQ ID NO: 5737413 - DNA, 25 bp, Homo sapien
actagaatctgcccctcgctcacgc

SEQ ID NO: 5737414 - DNA, 25 bp, Homo sapien
ccatacccaagaagacagagccatc

SEQ ID NO: 5737415 - DNA, 25 bp, Homo sapien
ctgcagcagcgtgatcagctcgccc

SEQ ID NO: 5737416 - DNA, 25 bp, Homo sapien
ggtttggtgcagggctctggaatgt

SEQ ID NO: 5737417 - DNA, 25 bp, Homo sapien
aagaggcgccaaaaaattagagatt

SEQ ID NO: 5737418 - DNA, 25 bp, Homo sapien
tgccttgggggtccttcttatcagc

SEQ ID NO: 5737419 - DNA, 25 bp, Homo sapien
caaagcaattaccactagcacccat

SEQ ID NO: 5737420 - DNA, 25 bp, Homo sapien
gccagatgtggactcccagaatgca

SEQ ID NO: 5737421 - DNA, 25 bp, Homo sapien
aattaccactagcacccatttttca

SEQ ID NO: 5737422 - DNA, 25 bp, Homo sapien
aatgagactgggaagggctggcagg

SEQ ID NO: 5737423 - DNA, 25 bp, Homo sapien
gtcgcagtagctccactcggttggt

SEQ ID NO: 5737424 - DNA, 25 bp, Homo sapien
gggtctgtcttctgggcctgggaat

SEQ ID NO: 5737425 - DNA, 25 bp, Homo sapien
aggtcaaacccaaagtggtcaatgg

SEQ ID NO: 5737426 - DNA, 25 bp, Homo sapien
aaaaaataaagaaggagggctgcaa

SEQ ID NO: 5737427 - DNA, 25 bp, Homo sapien
catcccatggacagatcctaccagg

SEQ ID NO: 5737428 - DNA, 25 bp, Homo sapien
ccaaactgggccaacctgagctacc

SEQ ID NO: 5737429 - DNA, 25 bp, Homo sapien
cctcagagacaagggcagggctgtg

SEQ ID NO: 5737430 - DNA, 25 bp, Homo sapien
ctcctgtgaagccaaggagttctga

SEQ ID NO: 5737431 - DNA, 25 bp, Homo sapien
gtgcaggtcaaacccaaagtggtca

SEQ ID NO: 5737432 - DNA, 25 bp, Homo sapien
atgtttcaagaacaagagaaaagtg

SEQ ID NO: 5737433 - DNA, 25 bp, Homo sapien
aggagcgggaagcaaaggtggcggg

SEQ ID NO: 5737434 - DNA, 25 bp, Homo sapien
cttgttgaattctgccctcactgca

SEQ ID NO: 5737435 - DNA, 25 bp, Homo sapien
ccctgaagcctttggacgagctgga

SEQ ID NO: 5737436 - DNA, 25 bp, Homo sapien
ggcctttgtgctgacctttttggtt

SEQ ID NO: 5737437 - DNA, 25 bp, Homo sapien
ccagctggaggaagagccttggggc

SEQ ID NO: 5737438 - DNA, 25 bp, Homo sapien
aacatgtctgtttcatgccgcagct

SEQ ID NO: 5737439 - DNA, 25 bp, Homo sapien
ttcttcacctgggcccacgcctctc

SEQ ID NO: 5737440 - DNA, 25 bp, Homo sapien
ttagagacagagacctccctaccct

SEQ ID NO: 5737441 - DNA, 25 bp, Homo sapien
tcagcccagaagtagtcgcagtagc

SEQ ID NO: 5737442 - DNA, 25 bp, Homo sapien
tgtttcatgccgcagctgcgtgtac

SEQ ID NO: 5737443 - DNA, 25 bp, Homo sapien
caagagaaaagtgacaacgtttggt

SEQ ID NO: 5737444 - DNA, 25 bp, Homo sapien
acagaggactctggaatcctcagat

SEQ ID NO: 5737445 - DNA, 25 bp, Homo sapien
agctctgccagccaggtggaaggat

SEQ ID NO: 5737446 - DNA, 25 bp, Homo sapien
tgccgaatgaggtagttccatcctg

SEQ ID NO: 5737447 - DNA, 25 bp, Homo sapien
ctagcacccatttttcataaagaaa

SEQ ID NO: 5737448 - DNA, 25 bp, Homo sapien
ctggctggaatcccaggagaactgc

SEQ ID NO: 5737449 - DNA, 25 bp, Homo sapien
agacctccctaccctgatcctccaa

SEQ ID NO: 5737450 - DNA, 25 bp, Homo sapien
cccggatgaattctgacatttcctt

SEQ ID NO: 5737451 - DNA, 25 bp, Homo sapien
gatggagagagggaaaggaggtgca

SEQ ID NO: 5737452 - DNA, 25 bp, Homo sapien
ctgtttctggagcagtagttcaaac

SEQ ID NO: 5737453 - DNA, 25 bp, Homo sapien
gtagtttactaagccacaaagcaat

SEQ ID NO: 5737454 - DNA, 25 bp, Homo sapien
gctcgactgtgctttggttgaacat

SEQ ID NO: 5737455 - DNA, 25 bp, Homo sapien
cccagaagtagtcgcagtagctcca

SEQ ID NO: 5737456 - DNA, 25 bp, Homo sapien
gagagagggaaaggaggtgcagaca

SEQ ID NO: 5737457 - DNA, 25 bp, Homo sapien
tcactctatcccagggatgaacaga

SEQ ID NO: 5737458 - DNA, 25 bp, Homo sapien
gagaaagtaatgagctgggccaaac

SEQ ID NO: 5737459 - DNA, 25 bp, Homo sapien
accctctccacctccagccgctcta

SEQ ID NO: 5737460 - DNA, 25 bp, Homo sapien
agcacagcatgggagtcagggggtc

SEQ ID NO: 5737461 - DNA, 25 bp, Homo sapien
gagggctttccgggccttctccacc

SEQ ID NO: 5737462 - DNA, 25 bp, Homo sapien
cctctgtcttgttgctcagcttgat

SEQ ID NO: 5737463 - DNA, 25 bp, Homo sapien
ctccaccgaggcatagcggctggcg

SEQ ID NO: 5737464 - DNA, 25 bp, Homo sapien
cgattcagcgctcaatttggggcta

SEQ ID NO: 5737465 - DNA, 25 bp, Homo sapien
cccaaagtggtcaatgggaaagatg

SEQ ID NO: 5737466 - DNA, 25 bp, Homo sapien
agagacctccctaccctgatcctcc

SEQ ID NO: 5737467 - DNA, 25 bp, Homo sapien
gaagacgcaagagggctcactctat

SEQ ID NO: 5737468 - DNA, 25 bp, Homo sapien
gcacagggcaccgtggcggacaggc

SEQ ID NO: 5737469 - DNA, 25 bp, Homo sapien
tctcatgggacacgattcagcgctc

SEQ ID NO: 5737470 - DNA, 25 bp, Homo sapien
tggtttgtttccatccctgaagcct

SEQ ID NO: 5737471 - DNA, 25 bp, Homo sapien
agtggcccaggagagagggtggggg

SEQ ID NO: 5737472 - DNA, 25 bp, Homo sapien
gaaaaaaataaagaaggagggctgc

SEQ ID NO: 5737473 - DNA, 25 bp, Homo sapien
tgggggcaggggcctccccgaggaa

SEQ ID NO: 5737474 - DNA, 25 bp, Homo sapien
cacgattcagcgctcaatttggggc

SEQ ID NO: 5737475 - DNA, 25 bp, Homo sapien
gggctcactctatcccagggatgaa

SEQ ID NO: 5737476 - DNA, 25 bp, Homo sapien
atgtgacagtgacccctacaaaact

SEQ ID NO: 5737477 - DNA, 25 bp, Homo sapien
gtagttcaaacccagccacggtgcc

SEQ ID NO: 5737478 - DNA, 25 bp, Homo sapien
tgaactatacgaaagcaattctcat

SEQ ID NO: 5737479 - DNA, 25 bp, Homo sapien
gtgcgctggggtccctgatgcgtgg

SEQ ID NO: 5737480 - DNA, 25 bp, Homo sapien
ggtggtctcattggtggtcgtgttg

SEQ ID NO: 5737481 - DNA, 25 bp, Homo sapien
agttcatcaggggcttctccacctc

SEQ ID NO: 5737482 - DNA, 25 bp, Homo sapien
gagggaaaggaggtgcagacaccaa

SEQ ID NO: 5737483 - DNA, 25 bp, Homo sapien
gccaaacagcagcactgaaagcttc

SEQ ID NO: 5737484 - DNA, 25 bp, Homo sapien
cgtggtatccattcactgttggagg

SEQ ID NO: 5737485 - DNA, 25 bp, Homo sapien
ttcccaagtcacactcagaccagac

SEQ ID NO: 5737486 - DNA, 25 bp, Homo sapien
aaggtcggcaatgtggtggtcgcac

SEQ ID NO: 5737487 - DNA, 25 bp, Homo sapien
agagccttggggcttccagggcaca

SEQ ID NO: 5737488 - DNA, 25 bp, Homo sapien
cgctgtgaagcttggcagagaactt

SEQ ID NO: 5737489 - DNA, 25 bp, Homo sapien
agcagcgtgatcagctcgcccgcgg

SEQ ID NO: 5737490 - DNA, 25 bp, Homo sapien
agtagtcgcagtagctccactcggt

SEQ ID NO: 5737491 - DNA, 25 bp, Homo sapien
actgaaagaccagtgagttgtgctt

SEQ ID NO: 5737492 - DNA, 25 bp, Homo sapien
gagaactgctgggacgttcccaggt

SEQ ID NO: 5737493 - DNA, 25 bp, Homo sapien
tctggagggtgcgctggggtccctg

SEQ ID NO: 5737494 - DNA, 25 bp, Homo sapien
accctgatcctccaaagccctggag

SEQ ID NO: 5737495 - DNA, 25 bp, Homo sapien
gcctccccgaggaagcagctggggg

SEQ ID NO: 5737496 - DNA, 25 bp, Homo sapien
ggcttctccagcaactgcacgtagc

SEQ ID NO: 5737497 - DNA, 25 bp, Homo sapien
ggatgaggggggaaagagtgacctc

SEQ ID NO: 5737498 - DNA, 25 bp, Homo sapien
tgtgcttgttgaattctgccctcac

SEQ ID NO: 5737499 - DNA, 25 bp, Homo sapien
ttcttcgcatagtcttcttcaatct

SEQ ID NO: 5737500 - DNA, 25 bp, Homo sapien
ttccagggcatgggctcccgactag

SEQ ID NO: 5737501 - DNA, 25 bp, Homo sapien
ggtcttcacgtaggtgaaggccttt

SEQ ID NO: 5737502 - DNA, 25 bp, Homo sapien
gcagcactgaaagcttcccaagtca

SEQ ID NO: 5737503 - DNA, 25 bp, Homo sapien
ctcacatgtaggactgacccggccc

SEQ ID NO: 5737504 - DNA, 25 bp, Homo sapien
gatgaggatcccaggttctgggaat

SEQ ID NO: 5737505 - DNA, 25 bp, Homo sapien
gaactgctgggacgttcccaggtgg

SEQ ID NO: 5737506 - DNA, 25 bp, Homo sapien
gtggtagagaaagggagaaagtaat

SEQ ID NO: 5737507 - DNA, 25 bp, Homo sapien
gtgatgaacagtggctgagaaagcc

SEQ ID NO: 5737508 - DNA, 25 bp, Homo sapien
cagagtagtttactaagccacaaag

SEQ ID NO: 5737509 - DNA, 25 bp, Homo sapien
tcacgcttctcccggcccctttaga

SEQ ID NO: 5737510 - DNA, 25 bp, Homo sapien
acaacctagtgtggccacaagagag

SEQ ID NO: 5737511 - DNA, 25 bp, Homo sapien
ctaatgagactgggaagggctggca

SEQ ID NO: 5737512 - DNA, 25 bp, Homo sapien
actgtacaagggacagcagtcccag

SEQ ID NO: 5737513 - DNA, 25 bp, Homo sapien
acagggcggatgttgcccgtcttgt

SEQ ID NO: 5737514 - DNA, 25 bp, Homo sapien
ccaagaagacagagccatctggggg

SEQ ID NO: 5737515 - DNA, 25 bp, Homo sapien
tcagctcgcccgcggcgaagcgcag

SEQ ID NO: 5737516 - DNA, 25 bp, Homo sapien
tcgctcacgcttctcccggcccctt

SEQ ID NO: 5737517 - DNA, 25 bp, Homo sapien
tctcccggcggaggggggaccattc

SEQ ID NO: 5737518 - DNA, 25 bp, Homo sapien
gcccctttagactctttagactgac

SEQ ID NO: 5737519 - DNA, 25 bp, Homo sapien
agggcaccgtggcggacaggcccca

SEQ ID NO: 5737520 - DNA, 25 bp, Homo sapien
gcagggtgggggcaggggcctcccc

SEQ ID NO: 5737521 - DNA, 25 bp, Homo sapien
cctgtgagagccagggctggctgga

SEQ ID NO: 5737522 - DNA, 25 bp, Homo sapien
cactagcacccatttttcataaaga

SEQ ID NO: 5737523 - DNA, 25 bp, Homo sapien
gactctggaatcctcagatgtaatg

SEQ ID NO: 5737524 - DNA, 25 bp, Homo sapien
acgttgactgaaagaccagtgagtt

SEQ ID NO: 5737525 - DNA, 25 bp, Homo sapien
tcttgttgctcagcttgatctccag

SEQ ID NO: 5737526 - DNA, 25 bp, Homo sapien
atgtccacagggcggatgttgcccg

SEQ ID NO: 5737527 - DNA, 25 bp, Homo sapien
ttgtttccatccctgaagcctttgg

SEQ ID NO: 5737528 - DNA, 25 bp, Homo sapien
gccttcttgatgtcctcctctgtct

SEQ ID NO: 5737529 - DNA, 25 bp, Homo sapien
ctgaaagcttcccaagtcacactca

SEQ ID NO: 5737530 - DNA, 25 bp, Homo sapien
tcctctaatgagactgggaagggct

SEQ ID NO: 5737531 - DNA, 25 bp, Homo sapien
cggcgggggcggtgacggtcgtaga

SEQ ID NO: 5737532 - DNA, 25 bp, Homo sapien
tctacgaccgtcaccgcccccgccg

SEQ ID NO: 5737533 - DNA, 25 bp, Homo sapien
tttccacggctataaagaactaaac

SEQ ID NO: 5737534 - DNA, 25 bp, Homo sapien
gtttagttctttatagccgtggaaa

SEQ ID NO: 5737535 - DNA, 25 bp, Homo sapien
cacgatatttacttcattggacggt

SEQ ID NO: 5737536 - DNA, 25 bp, Homo sapien
accgtccaatgaagtaaatatcgtg

SEQ ID NO: 5737537 - DNA, 25 bp, Homo sapien
ctagggcaccctctaagaggctaag

SEQ ID NO: 5737538 - DNA, 25 bp, Homo sapien
cttagcctcttagagggtgccctag

SEQ ID NO: 5737539 - DNA, 25 bp, Homo sapien
cggtgtccgactcggtcctgtcccg

SEQ ID NO: 5737540 - DNA, 25 bp, Homo sapien
cgggacaggaccgagtcggacaccg

SEQ ID NO: 5737541 - DNA, 25 bp, Homo sapien
ttgggaagcgactcgtaatccttgg

SEQ ID NO: 5737542 - DNA, 25 bp, Homo sapien
ccaaggattacgagtcgcttcccaa

SEQ ID NO: 5737543 - DNA, 25 bp, Homo sapien
gtgggtccattcacccgtgttccag

SEQ ID NO: 5737544 - DNA, 25 bp, Homo sapien
ctggaacacgggtgaatggacccac

SEQ ID NO: 5737545 - DNA, 25 bp, Homo sapien
tttaagttagtataaatcgtatgaa

SEQ ID NO: 5737546 - DNA, 25 bp, Homo sapien
ttcatacgatttatactaacttaaa

SEQ ID NO: 5737547 - DNA, 25 bp, Homo sapien
ttttaagttagtataaatcgtatga

SEQ ID NO: 5737548 - DNA, 25 bp, Homo sapien
tcatacgatttatactaacttaaaa

SEQ ID NO: 5737549 - DNA, 25 bp, Homo sapien
taaatggtaataactttcttaaatg

SEQ ID NO: 5737550 - DNA, 25 bp, Homo sapien
catttaagaaagttattaccattta

SEQ ID NO: 5737551 - DNA, 25 bp, Homo sapien
aagtgttgaaagactataccattga

SEQ ID NO: 5737552 - DNA, 25 bp, Homo sapien
tcaatggtatagtctttcaacactt

SEQ ID NO: 5737553 - DNA, 25 bp, Homo sapien
catgagtccccgtcgcggatggaga

SEQ ID NO: 5737554 - DNA, 25 bp, Homo sapien
tctccatccgcgacggggactcatg

SEQ ID NO: 5737555 - DNA, 25 bp, Homo sapien
ggcccccgctggggcaatgctcccc

SEQ ID NO: 5737556 - DNA, 25 bp, Homo sapien
ggcatgggggggccactagatgcac

SEQ ID NO: 5737557 - DNA, 25 bp, Homo sapien
agctcctgactctgcctattgttcc

SEQ ID NO: 5737558 - DNA, 25 bp, Homo sapien
acccgtgccgctgctcctccactgc

SEQ ID NO: 5737559 - DNA, 25 bp, Homo sapien
ccctggcttgcactgaaccctcgag

SEQ ID NO: 5737560 - DNA, 25 bp, Homo sapien
gaccccacccaggccccgggatcag

SEQ ID NO: 5737561 - DNA, 25 bp, Homo sapien
ggagccacgtgatggtgcgagtggg

SEQ ID NO: 5737562 - DNA, 25 bp, Homo sapien
gctggatcgcggccggccccggggg

SEQ ID NO: 5737563 - DNA, 25 bp, Homo sapien
ccagaccccttgggaccacatggca

SEQ ID NO: 5737564 - DNA, 25 bp, Homo sapien
cgggatcagctgcccccccatcccc

SEQ ID NO: 5737565 - DNA, 25 bp, Homo sapien
cctgcagctcgacccgcagcaggag

SEQ ID NO: 5737566 - DNA, 25 bp, Homo sapien
ccgctactccggggacagtgactcc

SEQ ID NO: 5737567 - DNA, 25 bp, Homo sapien
gtggccttccaggcgcacagtgtag

SEQ ID NO: 5737568 - DNA, 25 bp, Homo sapien
gccctgcccggcgggcccggagcca

SEQ ID NO: 5737569 - DNA, 25 bp, Homo sapien
agaggagttcctggccaatgcccgg

SEQ ID NO: 5737570 - DNA, 25 bp, Homo sapien
ggaggacctggccgagtggctcaat

SEQ ID NO: 5737571 - DNA, 25 bp, Homo sapien
tcctccagttcctcctcttcgtccc

SEQ ID NO: 5737572 - DNA, 25 bp, Homo sapien
acccagcgacctgcgcaacctcgac

SEQ ID NO: 5737573 - DNA, 25 bp, Homo sapien
cgagacggcctcctgccctgcgcag

SEQ ID NO: 5737574 - DNA, 25 bp, Homo sapien
ggtggctgggacacgctggagcatt

SEQ ID NO: 5737575 - DNA, 25 bp, Homo sapien
ccaccaccagtccccgccctgctag

SEQ ID NO: 5737576 - DNA, 25 bp, Homo sapien
gggcccccgaccctccagctcctga

SEQ ID NO: 5737577 - DNA, 25 bp, Homo sapien
atcggctggtgccgcgtggagctgg

SEQ ID NO: 5737578 - DNA, 25 bp, Homo sapien
tgcacctgccctgaccagtttccca

SEQ ID NO: 5737579 - DNA, 25 bp, Homo sapien
gggcacggggtcggatggacacaca

SEQ ID NO: 5737580 - DNA, 25 bp, Homo sapien
ctccactgctcatcgcccaccccag

SEQ ID NO: 5737581 - DNA, 25 bp, Homo sapien
gagctgggtgtgccggaggtgctca

SEQ ID NO: 5737582 - DNA, 25 bp, Homo sapien
cgggtggtggcgatggcttcctgac

SEQ ID NO: 5737583 - DNA, 25 bp, Homo sapien
ccaggcgcacagtgtagtgcctggc

SEQ ID NO: 5737584 - DNA, 25 bp, Homo sapien
gcgaggagcaggctgtgctgcttgt

SEQ ID NO: 5737585 - DNA, 25 bp, Homo sapien
cttgaggctgttgctagcgtgaccc

SEQ ID NO: 5737586 - DNA, 25 bp, Homo sapien
cccacgcctcgtgcagtttgagcag

SEQ ID NO: 5737587 - DNA, 25 bp, Homo sapien
gtttgagactgaggacctggtgctg

SEQ ID NO: 5737588 - DNA, 25 bp, Homo sapien
cagcaggagcagcagctgttccggc

SEQ ID NO: 5737589 - DNA, 25 bp, Homo sapien
gcccctccggacccgcagagctggg

SEQ ID NO: 5737590 - DNA, 25 bp, Homo sapien
cgggcaggagcaccccccagactcc

SEQ ID NO: 5737591 - DNA, 25 bp, Homo sapien
cctgggagccccctggcttgcactg

SEQ ID NO: 5737592 - DNA, 25 bp, Homo sapien
gtcctgggtggcaaatgtggccaac

SEQ ID NO: 5737593 - DNA, 25 bp, Homo sapien
aggaggcaggggagcccagctgtcg

SEQ ID NO: 5737594 - DNA, 25 bp, Homo sapien
tgaggctgttgctagcgtgaccccc

SEQ ID NO: 5737595 - DNA, 25 bp, Homo sapien
ggtgctgcgcaagaacgagaagagc

SEQ ID NO: 5737596 - DNA, 25 bp, Homo sapien
tctgcctcttgagtaccagacctca

SEQ ID NO: 5737597 - DNA, 25 bp, Homo sapien
tgcccgggcccttgaggctgttgct

SEQ ID NO: 5737598 - DNA, 25 bp, Homo sapien
ctggtgagggagattctgggccgct

SEQ ID NO: 5737599 - DNA, 25 bp, Homo sapien
cctgtgccaacatgccaacgccgtg

SEQ ID NO: 5737600 - DNA, 25 bp, Homo sapien
ccttggtacccgcagtgatgacaca

SEQ ID NO: 5737601 - DNA, 25 bp, Homo sapien
cccagctgtcggtccccagccctgc

SEQ ID NO: 5737602 - DNA, 25 bp, Homo sapien
cggctttcccgggtctccagcccca

SEQ ID NO: 5737603 - DNA, 25 bp, Homo sapien
taaaccctcacgtatccccacgcct

SEQ ID NO: 5737604 - DNA, 25 bp, Homo sapien
tgcacccccagcccccaacgcccct

SEQ ID NO: 5737605 - DNA, 25 bp, Homo sapien
gcattggcagccgcccgcccggccc

SEQ ID NO: 5737606 - DNA, 25 bp, Homo sapien
agccagagccgcgaggagcaggctg

SEQ ID NO: 5737607 - DNA, 25 bp, Homo sapien
taccgtgtgggggactcgagcctgc

SEQ ID NO: 5737608 - DNA, 25 bp, Homo sapien
cagcctcctccgcccagagcggccc

SEQ ID NO: 5737609 - DNA, 25 bp, Homo sapien
ccggggccgcgggatgagccagcga

SEQ ID NO: 5737610 - DNA, 25 bp, Homo sapien
gaagagcgtggtgctgtgcctgctg

SEQ ID NO: 5737611 - DNA, 25 bp, Homo sapien
ccgcccctccggacccgcagagctg

SEQ ID NO: 5737612 - DNA, 25 bp, Homo sapien
ggacacacagccagaccgtaaaccc

SEQ ID NO: 5737613 - DNA, 25 bp, Homo sapien
caccccggcctctccgagacggcct

SEQ ID NO: 5737614 - DNA, 25 bp, Homo sapien
ccgggtctccagccccagtccagag

SEQ ID NO: 5737615 - DNA, 25 bp, Homo sapien
acacccagcgacctgcgcaacctcg

SEQ ID NO: 5737616 - DNA, 25 bp, Homo sapien
ccccagcccccaacgcccctgccgc

SEQ ID NO: 5737617 - DNA, 25 bp, Homo sapien
agggtgtcgcccaccaccagtcccc

SEQ ID NO: 5737618 - DNA, 25 bp, Homo sapien
cggctggtgccgcgtggagctgggt

SEQ ID NO: 5737619 - DNA, 25 bp, Homo sapien
gcgagcccggtgttctgaagacctg

SEQ ID NO: 5737620 - DNA, 25 bp, Homo sapien
ggtgtcgcccaccaccagtccccgc

SEQ ID NO: 5737621 - DNA, 25 bp, Homo sapien
ggaccacatggcacaatgggacctc

SEQ ID NO: 5737622 - DNA, 25 bp, Homo sapien
gccttaacccttctgcatcagggag

SEQ ID NO: 5737623 - DNA, 25 bp, Homo sapien
gatgcacctgggagccccctggctt

SEQ ID NO: 5737624 - DNA, 25 bp, Homo sapien
gccagcatcttccgcacacccctgc

SEQ ID NO: 5737625 - DNA, 25 bp, Homo sapien
agtgtagtgcctggctccttcatgg

SEQ ID NO: 5737626 - DNA, 25 bp, Homo sapien
ctgcccgtgcattggcagccgcccg

SEQ ID NO: 5737627 - DNA, 25 bp, Homo sapien
accggctggatcgcggccggccccg

SEQ ID NO: 5737628 - DNA, 25 bp, Homo sapien
ccgggcgagcccggtgttctgaaga

SEQ ID NO: 5737629 - DNA, 25 bp, Homo sapien
cccgaagccaagccctttccagctc

SEQ ID NO: 5737630 - DNA, 25 bp, Homo sapien
ggactcctgcccgcggcccccgcat

SEQ ID NO: 5737631 - DNA, 25 bp, Homo sapien
cggcggccaagagcgtgcggccatt

SEQ ID NO: 5737632 - DNA, 25 bp, Homo sapien
caccagggactcctgcccgcggccc

SEQ ID NO: 5737633 - DNA, 25 bp, Homo sapien
gtgcattggcagccgcccgcccggc

SEQ ID NO: 5737634 - DNA, 25 bp, Homo sapien
ttgtacggcctgggtctcccgggtg

SEQ ID NO: 5737635 - DNA, 25 bp, Homo sapien
gcagtttgagcaggagattgagcgg

SEQ ID NO: 5737636 - DNA, 25 bp, Homo sapien
ggtccgggcatggcagacccagtgg

SEQ ID NO: 5737637 - DNA, 25 bp, Homo sapien
ggaccagctcagctgtccccagacc

SEQ ID NO: 5737638 - DNA, 25 bp, Homo sapien
gctgcggctcgggcggcgcctccct

SEQ ID NO: 5737639 - DNA, 25 bp, Homo sapien
cggttgggggatgagcgttgctatt

SEQ ID NO: 5737640 - DNA, 25 bp, Homo sapien
tgccaacgccgtgaccgaggctgcc

SEQ ID NO: 5737641 - DNA, 25 bp, Homo sapien
ccagggactcctgcccgcggccccc

SEQ ID NO: 5737642 - DNA, 25 bp, Homo sapien
cacgcctcgtgcagtttgagcagga

SEQ ID NO: 5737643 - DNA, 25 bp, Homo sapien
actcctgcccgcggcccccgcatga

SEQ ID NO: 5737644 - DNA, 25 bp, Homo sapien
tccgcccagagcggcccccttggta

SEQ ID NO: 5737645 - DNA, 25 bp, Homo sapien
agtgactcctcagcctcctccgccc

SEQ ID NO: 5737646 - DNA, 25 bp, Homo sapien
caatgctccccggggccgcgggatg

SEQ ID NO: 5737647 - DNA, 25 bp, Homo sapien
tgggtgtgccggaggtgctcatgtt

SEQ ID NO: 5737648 - DNA, 25 bp, Homo sapien
ctgggtctcccgggtggtggcgatg

SEQ ID NO: 5737649 - DNA, 25 bp, Homo sapien
ggacggccaatgggctgcctgggcc

SEQ ID NO: 5737650 - DNA, 25 bp, Homo sapien
cccgccgcccctccggacccgcaga

SEQ ID NO: 5737651 - DNA, 25 bp, Homo sapien
ggcctgagatgactcccgttagctt

SEQ ID NO: 5737652 - DNA, 25 bp, Homo sapien
tcccggcctgagatgactcccgtta

SEQ ID NO: 5737653 - DNA, 25 bp, Homo sapien
gaccgtaaaccctcacgtatcccca

SEQ ID NO: 5737654 - DNA, 25 bp, Homo sapien
cacccctgcagctcgacccgcagca

SEQ ID NO: 5737655 - DNA, 25 bp, Homo sapien
agcccagctgtcggtccccagccct

SEQ ID NO: 5737656 - DNA, 25 bp, Homo sapien
acccttctgcatcagggagccccct

SEQ ID NO: 5737657 - DNA, 25 bp, Homo sapien
tgaaaccgcccccgcaccagggact

SEQ ID NO: 5737658 - DNA, 25 bp, Homo sapien
aattactaatattattgaatgcctt

SEQ ID NO: 5737659 - DNA, 25 bp, Homo sapien
agctggtgagggagattctgggccg

SEQ ID NO: 5737660 - DNA, 25 bp, Homo sapien
taatattattgaatgccttagagga

SEQ ID NO: 5737661 - DNA, 25 bp, Homo sapien
tttgtggccttaacccttctgcatc

SEQ ID NO: 5737662 - DNA, 25 bp, Homo sapien
gctgcacctgccctgaccagtttcc

SEQ ID NO: 5737663 - DNA, 25 bp, Homo sapien
agacctgtggcccagcagagcctct

SEQ ID NO: 5737664 - DNA, 25 bp, Homo sapien
atgactcccgttagcttacgaagca

SEQ ID NO: 5737665 - DNA, 25 bp, Homo sapien
cctccgatgaaggcagcccctgccc

SEQ ID NO: 5737666 - DNA, 25 bp, Homo sapien
gttgtacattccggttgggggatga

SEQ ID NO: 5737667 - DNA, 25 bp, Homo sapien
gcactggcccccggagggagcgacc

SEQ ID NO: 5737668 - DNA, 25 bp, Homo sapien
ggggagcccagctgtcggtccccag

SEQ ID NO: 5737669 - DNA, 25 bp, Homo sapien
tctttgtgcgggtgctgaggagcca

SEQ ID NO: 5737670 - DNA, 25 bp, Homo sapien
cctggccgagtggctcaatgccttg

SEQ ID NO: 5737671 - DNA, 25 bp, Homo sapien
cgaccctgtgccaacatgccaacgc

SEQ ID NO: 5737672 - DNA, 25 bp, Homo sapien
tggcgggcatcgcgggctcggcggc

SEQ ID NO: 5737673 - DNA, 25 bp, Homo sapien
ctcccgttagcttacgaagcacaaa

SEQ ID NO: 5737674 - DNA, 25 bp, Homo sapien
ccctgcactcagtcaccccgagggc

SEQ ID NO: 5737675 - DNA, 25 bp, Homo sapien
cagggctggccacgggcacgaccct

SEQ ID NO: 5737676 - DNA, 25 bp, Homo sapien
tggggactctggccggacggccaat

SEQ ID NO: 5737677 - DNA, 25 bp, Homo sapien
ctcgggcaggagcaccccccagact

SEQ ID NO: 5737678 - DNA, 25 bp, Homo sapien
tcccgggtctccagccccagtccag

SEQ ID NO: 5737679 - DNA, 25 bp, Homo sapien
gatgagccagcgatcctgaactgtg

SEQ ID NO: 5737680 - DNA, 25 bp, Homo sapien
cttccgcacacccctgcagctcgac

SEQ ID NO: 5737681 - DNA, 25 bp, Homo sapien
ctccagctcctgactctgcctattg

SEQ ID NO: 5737682 - DNA, 25 bp, Homo sapien
tctgacagtaaagttttgctccaga

SEQ ID NO: 5737683 - DNA, 25 bp, Homo sapien
ctgaccagtttcccatgatcaaggt

SEQ ID NO: 5737684 - DNA, 25 bp, Homo sapien
tggtggcgatggcttcctgacaggg

SEQ ID NO: 5737685 - DNA, 25 bp, Homo sapien
ggggcaatgctccccggggccgcgg

SEQ ID NO: 5737686 - DNA, 25 bp, Homo sapien
cgcctccctgcggcggcccggcccg

SEQ ID NO: 5737687 - DNA, 25 bp, Homo sapien
ccagaccgtaaaccctcacgtatcc

SEQ ID NO: 5737688 - DNA, 25 bp, Homo sapien
accccttgggaccacatggcacaat

SEQ ID NO: 5737689 - DNA, 25 bp, Homo sapien
cgcgggctcggcggccaagagcgtg

SEQ ID NO: 5737690 - DNA, 25 bp, Homo sapien
aacatgccaacgccgtgaccgaggc

SEQ ID NO: 5737691 - DNA, 25 bp, Homo sapien
gtctccagccccagtccagagttgg

SEQ ID NO: 5737692 - DNA, 25 bp, Homo sapien
gcccccttggtacccgcagtgatga

SEQ ID NO: 5737693 - DNA, 25 bp, Homo sapien
agcacgacccgtgccgctgctcctc

SEQ ID NO: 5737694 - DNA, 25 bp, Homo sapien
gcacagtgtagtgcctggctccttc

SEQ ID NO: 5737695 - DNA, 25 bp, Homo sapien
aggacaccactgaaaccgcccccgc

SEQ ID NO: 5737696 - DNA, 25 bp, Homo sapien
cctgactctgcctattgttcctcca

SEQ ID NO: 5737697 - DNA, 25 bp, Homo sapien
cagtccctgacccagctcgggcccc

SEQ ID NO: 5737698 - DNA, 25 bp, Homo sapien
acagtgtagtgcctggctccttcat

SEQ ID NO: 5737699 - DNA, 25 bp, Homo sapien
tgacacccagcgacctgcgcaacct

SEQ ID NO: 5737700 - DNA, 25 bp, Homo sapien
cctgccctgaccagtttcccatgat

SEQ ID NO: 5737701 - DNA, 25 bp, Homo sapien
cgcagccctgcagcaccccggcttt

SEQ ID NO: 5737702 - DNA, 25 bp, Homo sapien
tcgaggacctgggcacggggtcgga

SEQ ID NO: 5737703 - DNA, 25 bp, Homo sapien
caccccccagactccccgtgcccgc

SEQ ID NO: 5737704 - DNA, 25 bp, Homo sapien
agccccctggcttgcactgaaccct

SEQ ID NO: 5737705 - DNA, 25 bp, Homo sapien
gacgagctggtgagggagattctgg

SEQ ID NO: 5737706 - DNA, 25 bp, Homo sapien
cccctctgcctcttgagtaccagac

SEQ ID NO: 5737707 - DNA, 25 bp, Homo sapien
cccagccgagggtctgcaccttttc

SEQ ID NO: 5737708 - DNA, 25 bp, Homo sapien
atggcttcctgacagggctggccac

SEQ ID NO: 5737709 - DNA, 25 bp, Homo sapien
agctgcgtgctgcacccccagcccc

SEQ ID NO: 5737710 - DNA, 25 bp, Homo sapien
ttttctccacagagggtgtcgccca

SEQ ID NO: 5737711 - DNA, 25 bp, Homo sapien
ctccggcccccgctggggcaatgct

SEQ ID NO: 5737712 - DNA, 25 bp, Homo sapien
ggagggagcgacccagccggcggct

SEQ ID NO: 5737713 - DNA, 25 bp, Homo sapien
ggatcagctgcccccccatccccgc

SEQ ID NO: 5737714 - DNA, 25 bp, Homo sapien
gcccgcccggcccgaggtgtggcct

SEQ ID NO: 5737715 - DNA, 25 bp, Homo sapien
agactccccgtgcccgcagccctgc

SEQ ID NO: 5737716 - DNA, 25 bp, Homo sapien
acgcccctgccgctggggaggacac

SEQ ID NO: 5737717 - DNA, 25 bp, Homo sapien
agagcgtggtgctgtgcctgctgga

SEQ ID NO: 5737718 - DNA, 25 bp, Homo sapien
ggatggacacacagccagaccgtaa

SEQ ID NO: 5737719 - DNA, 25 bp, Homo sapien
cagggatcgagacgggcagcactca

SEQ ID NO: 5737720 - DNA, 25 bp, Homo sapien
ccctcacgtatccccacgcctcggg

SEQ ID NO: 5737721 - DNA, 25 bp, Homo sapien
ggcaggagcaccccccagactcccc

SEQ ID NO: 5737722 - DNA, 25 bp, Homo sapien
ggtctgcaccttttctccacagagg

SEQ ID NO: 5737723 - DNA, 25 bp, Homo sapien
gacccagctcgggcccccgaccctc

SEQ ID NO: 5737724 - DNA, 25 bp, Homo sapien
gagaccccacccaggccccgggatc

SEQ ID NO: 5737725 - DNA, 25 bp, Homo sapien
cctgcgcagccagtcccgagaccgg

SEQ ID NO: 5737726 - DNA, 25 bp, Homo sapien
gcgacaacgtggccaccttcatcgg

SEQ ID NO: 5737727 - DNA, 25 bp, Homo sapien
gggagccccctctgcctcttgagta

SEQ ID NO: 5737728 - DNA, 25 bp, Homo sapien
gcctgggccccgaagccaagccctt

SEQ ID NO: 5737729 - DNA, 25 bp, Homo sapien
ggcccagcagagcctctgacagtaa

SEQ ID NO: 5737730 - DNA, 25 bp, Homo sapien
ggacccgcagagctggggacatggc

SEQ ID NO: 5737731 - DNA, 25 bp, Homo sapien
gttgggggatgagcgttgctattta

SEQ ID NO: 5737732 - DNA, 25 bp, Homo sapien
ccgtgcattggcagccgcccgcccg

SEQ ID NO: 5737733 - DNA, 25 bp, Homo sapien
ccagactccccgtgcccgcagccct

SEQ ID NO: 5737734 - DNA, 25 bp, Homo sapien
agagctggggacatggcatgccctg

SEQ ID NO: 5737735 - DNA, 25 bp, Homo sapien
ggccgctgcacctgccctgaccagt

SEQ ID NO: 5737736 - DNA, 25 bp, Homo sapien
ccccatccccgctcccgccgctact

SEQ ID NO: 5737737 - DNA, 25 bp, Homo sapien
gtgaccgaggctgcccgtgcattgg

SEQ ID NO: 5737738 - DNA, 25 bp, Homo sapien
aggccccgggatcagctgccccccc

SEQ ID NO: 5737739 - DNA, 25 bp, Homo sapien
tgctgaggagccacgtgatggtgcg

SEQ ID NO: 5737740 - DNA, 25 bp, Homo sapien
cagtgatgacacaggcactggcccc

SEQ ID NO: 5737741 - DNA, 25 bp, Homo sapien
agcttacgaagcacaaaggaggggc

SEQ ID NO: 5737742 - DNA, 25 bp, Homo sapien
cgcctcgtgcagtttgagcaggaga

SEQ ID NO: 5737743 - DNA, 25 bp, Homo sapien
ccagaccccatcccttctccttttc

SEQ ID NO: 5737744 - DNA, 25 bp, Homo sapien
agtccagagttgggcaccacaccgg

SEQ ID NO: 5737745 - DNA, 25 bp, Homo sapien
cgatgaaggcagcccctgccctggc

SEQ ID NO: 5737746 - DNA, 25 bp, Homo sapien
ggagcccagctgtcggtccccagcc

SEQ ID NO: 5737747 - DNA, 25 bp, Homo sapien
cgcagccagtcccgagaccggctgg

SEQ ID NO: 5737748 - DNA, 25 bp, Homo sapien
atggcatgccctgcactcagtcacc

SEQ ID NO: 5737749 - DNA, 25 bp, Homo sapien
ggcaccacaccggccagcatcttcc

SEQ ID NO: 5737750 - DNA, 25 bp, Homo sapien
ggtctcagaggggaagtaccgtgtg

SEQ ID NO: 5737751 - DNA, 25 bp, Homo sapien
ggccgggcgagcccggtgttctgaa

SEQ ID NO: 5737752 - DNA, 25 bp, Homo sapien
ctgaggagccacgtgatggtgcgag

SEQ ID NO: 5737753 - DNA, 25 bp, Homo sapien
ggggatgagcgttgctatttaatta

SEQ ID NO: 5737754 - DNA, 25 bp, Homo sapien
cgccgtgaccgaggctgcccgtgca

SEQ ID NO: 5737755 - DNA, 25 bp, Homo sapien
gagttgggcaccacaccggccagca

SEQ ID NO: 5737756 - DNA, 25 bp, Homo sapien
ccagtccccgccctgctagcccagt

SEQ ID NO: 5737757 - DNA, 25 bp, Homo sapien
ggggggccactagatgcacctggga

SEQ ID NO: 5737758 - DNA, 25 bp, Homo sapien
ctgctggccccacgcctcgtgcagt

SEQ ID NO: 5737759 - DNA, 25 bp, Homo sapien
gcagagcctctgacagtaaagtttt

SEQ ID NO: 5737760 - DNA, 25 bp, Homo sapien
ggctgtgctgcttgtgcgcagggat

SEQ ID NO: 5737761 - DNA, 25 bp, Homo sapien
gcaaatgtggccaacctggggactc

SEQ ID NO: 5737762 - DNA, 25 bp, Homo sapien
gcagcccctgccctggcatgggggg

SEQ ID NO: 5737763 - DNA, 25 bp, Homo sapien
ctgcgtgctgcacccccagccccca

SEQ ID NO: 5737764 - DNA, 25 bp, Homo sapien
tgtcgcccaccaccagtccccgccc

SEQ ID NO: 5737765 - DNA, 25 bp, Homo sapien
agcgtggtgctgtgcctgctggagg

SEQ ID NO: 5737766 - DNA, 25 bp, Homo sapien
acaggcactggcccccggagggagc

SEQ ID NO: 5737767 - DNA, 25 bp, Homo sapien
tctgcaccttttctccacagagggt

SEQ ID NO: 5737768 - DNA, 25 bp, Homo sapien
tctgcctattgttcctccagttcct

SEQ ID NO: 5737769 - DNA, 25 bp, Homo sapien
agagggtgtcgcccaccaccagtcc

SEQ ID NO: 5737770 - DNA, 25 bp, Homo sapien
ccggctccggcccccgctggggcaa

SEQ ID NO: 5737771 - DNA, 25 bp, Homo sapien
ggcgatggcttcctgacagggctgg

SEQ ID NO: 5737772 - DNA, 25 bp, Homo sapien
gcgggcatcgcgggctcggcggcca

SEQ ID NO: 5737773 - DNA, 25 bp, Homo sapien
gctgttccggcgcctggaagaggag

SEQ ID NO: 5737774 - DNA, 25 bp, Homo sapien
gaggggcccgagaccccacccaggc

SEQ ID NO: 5737775 - DNA, 25 bp, Homo sapien
tcctgcccacagtgactcggccggt

SEQ ID NO: 5737776 - DNA, 25 bp, Homo sapien
gcctggctccttcatggcgcgcgac

SEQ ID NO: 5737777 - DNA, 25 bp, Homo sapien
cccgttagcttacgaagcacaaagg

SEQ ID NO: 5737778 - DNA, 25 bp, Homo sapien
tgagcgggagctgcgtgctgcaccc

SEQ ID NO: 5737779 - DNA, 25 bp, Homo sapien
agacggcctcctgccctgcgcagcc

SEQ ID NO: 5737780 - DNA, 25 bp, Homo sapien
ctggcttgcactgaaccctcgagga

SEQ ID NO: 5737781 - DNA, 25 bp, Homo sapien
cgcagggatcgagacgggcagcact

SEQ ID NO: 5737782 - DNA, 25 bp, Homo sapien
ggccttccaggcgcacagtgtagtg

SEQ ID NO: 5737783 - DNA, 25 bp, Homo sapien
gggctcccggcctgagatgactccc

SEQ ID NO: 5737784 - DNA, 25 bp, Homo sapien
gagccccctctgcctcttgagtacc

SEQ ID NO: 5737785 - DNA, 25 bp, Homo sapien
cgcacacccctgcagctcgacccgc

SEQ ID NO: 5737786 - DNA, 25 bp, Homo sapien
atgctccccggggccgcgggatgag

SEQ ID NO: 5737787 - DNA, 25 bp, Homo sapien
acctgcgcaacctcgacgagctggt

SEQ ID NO: 5737788 - DNA, 25 bp, Homo sapien
ctccggacccgcagagctggggaca

SEQ ID NO: 5737789 - DNA, 25 bp, Homo sapien
gggggactcgagcctgctcatcttt

SEQ ID NO: 5737790 - DNA, 25 bp, Homo sapien
cctcgtgcagtttgagcaggagatt

SEQ ID NO: 5737791 - DNA, 25 bp, Homo sapien
gcccggagccagagccgcgaggagc

SEQ ID NO: 5737792 - DNA, 25 bp, Homo sapien
ggcaggggagcccagctgtcggtcc

SEQ ID NO: 5737793 - DNA, 25 bp, Homo sapien
cgcagcaggagcagcagctgttccg

SEQ ID NO: 5737794 - DNA, 25 bp, Homo sapien
acggggtcggatggacacacagcca

SEQ ID NO: 5737795 - DNA, 25 bp, Homo sapien
ggcatggcagacccagtggcgggca

SEQ ID NO: 5737796 - DNA, 25 bp, Homo sapien
accccagccgagggtctgcaccttt

SEQ ID NO: 5737797 - DNA, 25 bp, Homo sapien
ccggtccgggcatggcagacccagt

SEQ ID NO: 5737798 - DNA, 25 bp, Homo sapien
tgcggctcgggcggcgcctccctgc

SEQ ID NO: 5737799 - DNA, 25 bp, Homo sapien
tttgtgcgggtgctgaggagccacg

SEQ ID NO: 5737800 - DNA, 25 bp, Homo sapien
gcgggcccggagccagagccgcgag

SEQ ID NO: 5737801 - DNA, 25 bp, Homo sapien
gaccagtttcccatgatcaaggtct

SEQ ID NO: 5737802 - DNA, 25 bp, Homo sapien
aagagcgtgcggccatttcgctcca

SEQ ID NO: 5737803 - DNA, 25 bp, Homo sapien
ccggcctgagatgactcccgttagc

SEQ ID NO: 5737804 - DNA, 25 bp, Homo sapien
gccgctgctcctccactgctcatcg

SEQ ID NO: 5737805 - DNA, 25 bp, Homo sapien
tgctgcgcaagaacgagaagagcgt

SEQ ID NO: 5737806 - DNA, 25 bp, Homo sapien
atggaccagctcagctgtccccaga

SEQ ID NO: 5737807 - DNA, 25 bp, Homo sapien
gcgcgcgacaacgtggccaccttca

SEQ ID NO: 5737808 - DNA, 25 bp, Homo sapien
cttgggaccacatggcacaatggga

SEQ ID NO: 5737809 - DNA, 25 bp, Homo sapien
agcccccaacgcccctgccgctggg

SEQ ID NO: 5737810 - DNA, 25 bp, Homo sapien
cttacgaagcacaaaggaggggccc

SEQ ID NO: 5737811 - DNA, 25 bp, Homo sapien
cgaggtgtggccttccaggcgcaca

SEQ ID NO: 5737812 - DNA, 25 bp, Homo sapien
aggccatgaaggaggacctggccga

SEQ ID NO: 5737813 - DNA, 25 bp, Homo sapien
tccggttgggggatgagcgttgcta

SEQ ID NO: 5737814 - DNA, 25 bp, Homo sapien
agtgggggctcgggcaggagcaccc

SEQ ID NO: 5737815 - DNA, 25 bp, Homo sapien
catctttgtgcgggtgctgaggagc

SEQ ID NO: 5737816 - DNA, 25 bp, Homo sapien
tgctcatcgcccaccccagccgagg

SEQ ID NO: 5737817 - DNA, 25 bp, Homo sapien
gccccctctgcctcttgagtaccag

SEQ ID NO: 5737818 - DNA, 25 bp, Homo sapien
tagcgtgacccccactggaccagtc

SEQ ID NO: 5737819 - DNA, 25 bp, Homo sapien
tggcaaatgtggccaacctggggac

SEQ ID NO: 5737820 - DNA, 25 bp, Homo sapien
ggccggtccgggcatggcagaccca

SEQ ID NO: 5737821 - DNA, 25 bp, Homo sapien
cggggctcccggcctgagatgactc

SEQ ID NO: 5737822 - DNA, 25 bp, Homo sapien
gacccccactggaccagtccctgac

SEQ ID NO: 5737823 - DNA, 25 bp, Homo sapien
ctgtccccagaccccatcccttctc

SEQ ID NO: 5737824 - DNA, 25 bp, Homo sapien
ccaatgcccgggcccttgaggctgt

SEQ ID NO: 5737825 - DNA, 25 bp, Homo sapien
ctccagtgaggcctacgtggaggcc

SEQ ID NO: 5737826 - DNA, 25 bp, Homo sapien
gatcgagacgggcagcactcatggg

SEQ ID NO: 5737827 - DNA, 25 bp, Homo sapien
ggtgctgaggagccacgtgatggtg

SEQ ID NO: 5737828 - DNA, 25 bp, Homo sapien
tgccctgaccagtttcccatgatca

SEQ ID NO: 5737829 - DNA, 25 bp, Homo sapien
acctggtgctgcgcaagaacgagaa

SEQ ID NO: 5737830 - DNA, 25 bp, Homo sapien
ggcccttgaggctgttgctagcgtg

SEQ ID NO: 5737831 - DNA, 25 bp, Homo sapien
gctcgggcggcgcctccctgcggcg

SEQ ID NO: 5737832 - DNA, 25 bp, Homo sapien
tgtgccggaggtgctcatgtttgag

SEQ ID NO: 5737833 - DNA, 25 bp, Homo sapien
ccccctggcttgcactgaaccctcg

SEQ ID NO: 5737834 - DNA, 25 bp, Homo sapien
tccctgggagtgagcgccggggctc

SEQ ID NO: 5737835 - DNA, 25 bp, Homo sapien
gtgtggccttccaggcgcacagtgt

SEQ ID NO: 5737836 - DNA, 25 bp, Homo sapien
ggacctggtgctgcgcaagaacgag

SEQ ID NO: 5737837 - DNA, 25 bp, Homo sapien
cgaagccaagccctttccagctcct

SEQ ID NO: 5737838 - DNA, 25 bp, Homo sapien
ctggccggacggccaatgggctgcc

SEQ ID NO: 5737839 - DNA, 25 bp, Homo sapien
tggacaagcacgacccgtgccgctg

SEQ ID NO: 5737840 - DNA, 25 bp, Homo sapien
atcccttctccttttcctttgtggc

SEQ ID NO: 5737841 - DNA, 25 bp, Homo sapien
agccggcggctgaccacaggcaccc

SEQ ID NO: 5737842 - DNA, 25 bp, Homo sapien
cctgaactgtgttcctgcccacagt

SEQ ID NO: 5737843 - DNA, 25 bp, Homo sapien
gttgctatttaattactaatattat

SEQ ID NO: 5737844 - DNA, 25 bp, Homo sapien
cttctccttttcctttgtggcctta

SEQ ID NO: 5737845 - DNA, 25 bp, Homo sapien
cgctcccgccgctactccggggaca

SEQ ID NO: 5737846 - DNA, 25 bp, Homo sapien
ctgacagggctggccacgggcacga

SEQ ID NO: 5737847 - DNA, 25 bp, Homo sapien
ccggagccagagccgcgaggagcag

SEQ ID NO: 5737848 - DNA, 25 bp, Homo sapien
tgtagtgcctggctccttcatggcg

SEQ ID NO: 5737849 - DNA, 25 bp, Homo sapien
cctggacaagcacgacccgtgccgc

SEQ ID NO: 5737850 - DNA, 25 bp, Homo sapien
ctgcccgcggcccccgcatgacacc

SEQ ID NO: 5737851 - DNA, 25 bp, Homo sapien
tcagtcaccccgagggctgagccag

SEQ ID NO: 5737852 - DNA, 25 bp, Homo sapien
actccccgtgcccgcagccctgcag

SEQ ID NO: 5737853 - DNA, 25 bp, Homo sapien
ttccagctcctccgatgaaggcagc

SEQ ID NO: 5737854 - DNA, 25 bp, Homo sapien
ggctccttcatggcgcgcgacaacg

SEQ ID NO: 5737855 - DNA, 25 bp, Homo sapien
cccgcagcaggagcagcagctgttc

SEQ ID NO: 5737856 - DNA, 25 bp, Homo sapien
agctgtccccagaccccatcccttc

SEQ ID NO: 5737857 - DNA, 25 bp, Homo sapien
tattgttcctccagttcctcctctt

SEQ ID NO: 5737858 - DNA, 25 bp, Homo sapien
ccagtgaggcctacgtggaggccat

SEQ ID NO: 5737859 - DNA, 25 bp, Homo sapien
ccccccagactccccgtgcccgcag

SEQ ID NO: 5737860 - DNA, 25 bp, Homo sapien
cctggggactctggccggacggcca

SEQ ID NO: 5737861 - DNA, 25 bp, Homo sapien
ccctgaccagtttcccatgatcaag

SEQ ID NO: 5737862 - DNA, 25 bp, Homo sapien
tcctgcccgcggcccccgcatgaca

SEQ ID NO: 5737863 - DNA, 25 bp, Homo sapien
ctctgttgtacattccggttggggg

SEQ ID NO: 5737864 - DNA, 25 bp, Homo sapien
ttggtacccgcagtgatgacacagg

SEQ ID NO: 5737865 - DNA, 25 bp, Homo sapien
cacgaccctgtgccaacatgccaac

SEQ ID NO: 5737866 - DNA, 25 bp, Homo sapien
cgggctcggcggccaagagcgtgcg

SEQ ID NO: 5737867 - DNA, 25 bp, Homo sapien
gcgcgacaacgtggccaccttcatc

SEQ ID NO: 5737868 - DNA, 25 bp, Homo sapien
ctccagttcctcctcttcgtccctc

SEQ ID NO: 5737869 - DNA, 25 bp, Homo sapien
cctggaagaggagttcctggccaat

SEQ ID NO: 5737870 - DNA, 25 bp, Homo sapien
ccccttggtacccgcagtgatgaca

SEQ ID NO: 5737871 - DNA, 25 bp, Homo sapien
acccagtggcgggcatcgcgggctc

SEQ ID NO: 5737872 - DNA, 25 bp, Homo sapien
gcccggcccgaggtgtggccttcca

SEQ ID NO: 5737873 - DNA, 25 bp, Homo sapien
gtacattccggttgggggatgagcg

SEQ ID NO: 5737874 - DNA, 25 bp, Homo sapien
gcaagaacgagaagagcgtggtgct

SEQ ID NO: 5737875 - DNA, 25 bp, Homo sapien
ccctcagcgtcctgggtggcaaatg

SEQ ID NO: 5737876 - DNA, 25 bp, Homo sapien
tggagctgggtgtgccggaggtgct

SEQ ID NO: 5737877 - DNA, 25 bp, Homo sapien
gcacggggtcggatggacacacagc

SEQ ID NO: 5737878 - DNA, 25 bp, Homo sapien
tgagggagattctgggccgctgcac

SEQ ID NO: 5737879 - DNA, 25 bp, Homo sapien
cccgaggtgtggccttccaggcgca

SEQ ID NO: 5737880 - DNA, 25 bp, Homo sapien
ggagccccctggcttgcactgaacc

SEQ ID NO: 5737881 - DNA, 25 bp, Homo sapien
cgtgcccgcagccctgcagcacccc

SEQ ID NO: 5737882 - DNA, 25 bp, Homo sapien
gacaagcacgacccgtgccgctgct

SEQ ID NO: 5737883 - DNA, 25 bp, Homo sapien
ccctgccgctggggaggacaccact

SEQ ID NO: 5737884 - DNA, 25 bp, Homo sapien
ggcagcactcatgggtgccaagggg

SEQ ID NO: 5737885 - DNA, 25 bp, Homo sapien
ctctggccggacggccaatgggctg

SEQ ID NO: 5737886 - DNA, 25 bp, Homo sapien
cacgtatccccacgcctcggggccc

SEQ ID NO: 5737887 - DNA, 25 bp, Homo sapien
gtggccaacctggggactctggccg

SEQ ID NO: 5737888 - DNA, 25 bp, Homo sapien
ggtgagggagattctgggccgctgc

SEQ ID NO: 5737889 - DNA, 25 bp, Homo sapien
gagtaccagacctcatgggaccaga

SEQ ID NO: 5737890 - DNA, 25 bp, Homo sapien
tgcacctgggagccccctggcttgc

SEQ ID NO: 5737891 - DNA, 25 bp, Homo sapien
cttagaggaggccgggcgagcccgg

SEQ ID NO: 5737892 - DNA, 25 bp, Homo sapien
tcctcttcgtccctcagcgtcctgg

SEQ ID NO: 5737893 - DNA, 25 bp, Homo sapien
ggtgtgccggaggtgctcatgtttg

SEQ ID NO: 5737894 - DNA, 25 bp, Homo sapien
cgagggtctgcaccttttctccaca

SEQ ID NO: 5737895 - DNA, 25 bp, Homo sapien
ttcctcctcttcgtccctcagcgtc

SEQ ID NO: 5737896 - DNA, 25 bp, Homo sapien
tagaggaggccgggcgagcccggtg

SEQ ID NO: 5737897 - DNA, 25 bp, Homo sapien
tgggagccccctggcttgcactgaa

SEQ ID NO: 5737898 - DNA, 25 bp, Homo sapien
agcctctgacagtaaagttttgctc

SEQ ID NO: 5737899 - DNA, 25 bp, Homo sapien
catgccaacgccgtgaccgaggctg

SEQ ID NO: 5737900 - DNA, 25 bp, Homo sapien
cccagctcgggcccccgaccctcca

SEQ ID NO: 5737901 - DNA, 25 bp, Homo sapien
ctggggacatggcatgccctgcact

SEQ ID NO: 5737902 - DNA, 25 bp, Homo sapien
tccccagccctgcccggcgggcccg

SEQ ID NO: 5737903 - DNA, 25 bp, Homo sapien
cctttgtggccttaacccttctgca

SEQ ID NO: 5737904 - DNA, 25 bp, Homo sapien
gaggcaggggagcccagctgtcggt

SEQ ID NO: 5737905 - DNA, 25 bp, Homo sapien
tgggggggccactagatgcacctgg

SEQ ID NO: 5737906 - DNA, 25 bp, Homo sapien
tggctgggacacgctggagcattac

SEQ ID NO: 5737907 - DNA, 25 bp, Homo sapien
atgtggccaacctggggactctggc

SEQ ID NO: 5737908 - DNA, 25 bp, Homo sapien
acgtggaggccatgaaggaggacct

SEQ ID NO: 5737909 - DNA, 25 bp, Homo sapien
gtgccgcgtggagctgggtgtgccg

SEQ ID NO: 5737910 - DNA, 25 bp, Homo sapien
ggggtcggatggacacacagccaga

SEQ ID NO: 5737911 - DNA, 25 bp, Homo sapien
cctgctggaggtggcgcggcgtggg

SEQ ID NO: 5737912 - DNA, 25 bp, Homo sapien
ccggaggtgctcatgtttgagactg

SEQ ID NO: 5737913 - DNA, 25 bp, Homo sapien
tgagcaggagattgagcgggagctg

SEQ ID NO: 5737914 - DNA, 25 bp, Homo sapien
gaccctccagctcctgactctgcct

SEQ ID NO: 5737915 - DNA, 25 bp, Homo sapien
gccctgcgcagccagtcccgagacc

SEQ ID NO: 5737916 - DNA, 25 bp, Homo sapien
aggtgctcatgtttgagactgagga

SEQ ID NO: 5737917 - DNA, 25 bp, Homo sapien
ggccaatgggctgcctgggccccga

SEQ ID NO: 5737918 - DNA, 25 bp, Homo sapien
tgcactgaaccctcgaggacctggg

SEQ ID NO: 5737919 - DNA, 25 bp, Homo sapien
gagccagattcctggatgtgatgga

SEQ ID NO: 5737920 - DNA, 25 bp, Homo sapien
agcgacccagccggcggctgaccac

SEQ ID NO: 5737921 - DNA, 25 bp, Homo sapien
agtggcgggcatcgcgggctcggcg

SEQ ID NO: 5737922 - DNA, 25 bp, Homo sapien
gctgtcggtccccagccctgcccgg

SEQ ID NO: 5737923 - DNA, 25 bp, Homo sapien
ctccagccccagtccagagttgggc

SEQ ID NO: 5737924 - DNA, 25 bp, Homo sapien
gtgctcatgtttgagactgaggacc

SEQ ID NO: 5737925 - DNA, 25 bp, Homo sapien
agcgacctgcgcaacctcgacgagc

SEQ ID NO: 5737926 - DNA, 25 bp, Homo sapien
ccggcccgaggtgtggccttccagg

SEQ ID NO: 5737927 - DNA, 25 bp, Homo sapien
acagtaaagttttgctccagaaaaa

SEQ ID NO: 5737928 - DNA, 25 bp, Homo sapien
tgccaacatgccaacgccgtgaccg

SEQ ID NO: 5737929 - DNA, 25 bp, Homo sapien
ttgctagcgtgacccccactggacc

SEQ ID NO: 5737930 - DNA, 25 bp, Homo sapien
caagcacgacccgtgccgctgctcc

SEQ ID NO: 5737931 - DNA, 25 bp, Homo sapien
actcggccggtccgggcatggcaga

SEQ ID NO: 5737932 - DNA, 25 bp, Homo sapien
aggcactggcccccggagggagcga

SEQ ID NO: 5737933 - DNA, 25 bp, Homo sapien
gctcgacccgcagcaggagcagcag

SEQ ID NO: 5737934 - DNA, 25 bp, Homo sapien
cccctgccctggcatgggggggcca

SEQ ID NO: 5737935 - DNA, 25 bp, Homo sapien
ccgtgaccgaggctgcccgtgcatt

SEQ ID NO: 5737936 - DNA, 25 bp, Homo sapien
tcctcagcctcctccgcccagagcg

SEQ ID NO: 5737937 - DNA, 25 bp, Homo sapien
ggcatgccctgcactcagtcacccc

SEQ ID NO: 5737938 - DNA, 25 bp, Homo sapien
gttcctggccaatgcccgggccctt

SEQ ID NO: 5737939 - DNA, 25 bp, Homo sapien
gcattacctggacaagcacgacccg

SEQ ID NO: 5737940 - DNA, 25 bp, Homo sapien
ggtggtggcgatggcttcctgacag

SEQ ID NO: 5737941 - DNA, 25 bp, Homo sapien
cacacccctgcagctcgacccgcag

SEQ ID NO: 5737942 - DNA, 25 bp, Homo sapien
gcccggtgttctgaagacctgtggc

SEQ ID NO: 5737943 - DNA, 25 bp, Homo sapien
tcgcccaccaccagtccccgccctg

SEQ ID NO: 5737944 - DNA, 25 bp, Homo sapien
gaacgagaagagcgtggtgctgtgc

SEQ ID NO: 5737945 - DNA, 25 bp, Homo sapien
gacccgcagcaggagcagcagctgt

SEQ ID NO: 5737946 - DNA, 25 bp, Homo sapien
caccttttctccacagagggtgtcg

SEQ ID NO: 5737947 - DNA, 25 bp, Homo sapien
gtgatgacacaggcactggcccccg

SEQ ID NO: 5737948 - DNA, 25 bp, Homo sapien
gacagggctggccacgggcacgacc

SEQ ID NO: 5737949 - DNA, 25 bp, Homo sapien
acagccagaccgtaaaccctcacgt

SEQ ID NO: 5737950 - DNA, 25 bp, Homo sapien
cagctgtcggtccccagccctgccc

SEQ ID NO: 5737951 - DNA, 25 bp, Homo sapien
cagccgagggtctgcaccttttctc

SEQ ID NO: 5737952 - DNA, 25 bp, Homo sapien
agggtctgcaccttttctccacaga

SEQ ID NO: 5737953 - DNA, 25 bp, Homo sapien
agagccgcgaggagcaggctgtgct

SEQ ID NO: 5737954 - DNA, 25 bp, Homo sapien
tggcagccgcccgcccggcccgagg

SEQ ID NO: 5737955 - DNA, 25 bp, Homo sapien
gaagtaccgtgtgggggactcgagc

SEQ ID NO: 5737956 - DNA, 25 bp, Homo sapien
cttcgtccctcagcgtcctgggtgg

SEQ ID NO: 5737957 - DNA, 25 bp, Homo sapien
ctgctagcccagtccctgggagtga

SEQ ID NO: 5737958 - DNA, 25 bp, Homo sapien
atgccttagaggaggccgggcgagc

SEQ ID NO: 5737959 - DNA, 25 bp, Homo sapien
ctgaaccctcgaggacctgggcacg

SEQ ID NO: 5737960 - DNA, 25 bp, Homo sapien
gcgcacagtgtagtgcctggctcct

SEQ ID NO: 5737961 - DNA, 25 bp, Homo sapien
cagcaccccggctttcccgggtctc

SEQ ID NO: 5737962 - DNA, 25 bp, Homo sapien
gccaagccctttccagctcctccga

SEQ ID NO: 5737963 - DNA, 25 bp, Homo sapien
tgccctgcactcagtcaccccgagg

SEQ ID NO: 5737964 - DNA, 25 bp, Homo sapien
atgagcgttgctatttaattactaa

SEQ ID NO: 5737965 - DNA, 25 bp, Homo sapien
ccagtccagagttgggcaccacacc

SEQ ID NO: 5737966 - DNA, 25 bp, Homo sapien
gcctgggtctcccgggtggtggcga

SEQ ID NO: 5737967 - DNA, 25 bp, Homo sapien
agtccctgggagtgagcgccggggc

SEQ ID NO: 5737968 - DNA, 25 bp, Homo sapien
tctgggccgctgcacctgccctgac

SEQ ID NO: 5737969 - DNA, 25 bp, Homo sapien
ccgcgggatgagccagcgatcctga

SEQ ID NO: 5737970 - DNA, 25 bp, Homo sapien
gactgaggacctggtgctgcgcaag

SEQ ID NO: 5737971 - DNA, 25 bp, Homo sapien
ctccccggggccgcgggatgagcca

SEQ ID NO: 5737972 - DNA, 25 bp, Homo sapien
gcccaccaccagtccccgccctgct

SEQ ID NO: 5737973 - DNA, 25 bp, Homo sapien
gagcgttgctatttaattactaata

SEQ ID NO: 5737974 - DNA, 25 bp, Homo sapien
ctgcatcagggagccccctctgcct

SEQ ID NO: 5737975 - DNA, 25 bp, Homo sapien
tgactcggccggtccgggcatggca

SEQ ID NO: 5737976 - DNA, 25 bp, Homo sapien
tgtggccttaacccttctgcatcag

SEQ ID NO: 5737977 - DNA, 25 bp, Homo sapien
cccgagaccggctggatcgcggccg

SEQ ID NO: 5737978 - DNA, 25 bp, Homo sapien
ttcgctccagtgaggcctacgtgga

SEQ ID NO: 5737979 - DNA, 25 bp, Homo sapien
gctttcccgggtctccagccccagt

SEQ ID NO: 5737980 - DNA, 25 bp, Homo sapien
ggatgagcgttgctatttaattact

SEQ ID NO: 5737981 - DNA, 25 bp, Homo sapien
ggtcggatggacacacagccagacc

SEQ ID NO: 5737982 - DNA, 25 bp, Homo sapien
gccttagaggaggccgggcgagccc

SEQ ID NO: 5737983 - DNA, 25 bp, Homo sapien
acccagccggcggctgaccacaggc

SEQ ID NO: 5737984 - DNA, 25 bp, Homo sapien
tgcccccccatccccgctcccgccg

SEQ ID NO: 5737985 - DNA, 25 bp, Homo sapien
atattattgaatgccttagaggagg

SEQ ID NO: 5737986 - DNA, 25 bp, Homo sapien
ggagattgagcgggagctgcgtgct

SEQ ID NO: 5737987 - DNA, 25 bp, Homo sapien
gctcctccactgctcatcgcccacc

SEQ ID NO: 5737988 - DNA, 25 bp, Homo sapien
gaggctgcccgtgcattggcagccg

SEQ ID NO: 5737989 - DNA, 25 bp, Homo sapien
cggctgaccacaggcaccccggcct

SEQ ID NO: 5737990 - DNA, 25 bp, Homo sapien
ccgcgaggagcaggctgtgctgctt

SEQ ID NO: 5737991 - DNA, 25 bp, Homo sapien
attccggttgggggatgagcgttgc

SEQ ID NO: 5737992 - DNA, 25 bp, Homo sapien
cgcaccagggactcctgcccgcggc

SEQ ID NO: 5737993 - DNA, 25 bp, Homo sapien
gctagcccagtccctgggagtgagc

SEQ ID NO: 5737994 - DNA, 25 bp, Homo sapien
acgcctgggcctgctggccccacgc

SEQ ID NO: 5737995 - DNA, 25 bp, Homo sapien
ccacccaggccccgggatcagctgc

SEQ ID NO: 5737996 - DNA, 25 bp, Homo sapien
tcatgggaccagaccccttgggacc

SEQ ID NO: 5737997 - DNA, 25 bp, Homo sapien
ggcctctccgagacggcctcctgcc

SEQ ID NO: 5737998 - DNA, 25 bp, Homo sapien
ttgttcctccagttcctcctcttcg

SEQ ID NO: 5737999 - DNA, 25 bp, Homo sapien
caccagtccccgccctgctagccca

SEQ ID NO: 5738000 - DNA, 25 bp, Homo sapien
ctggaccagtccctgacccagctcg

SEQ ID NO: 5738001 - DNA, 25 bp, Homo sapien
agcgatcctgaactgtgttcctgcc

SEQ ID NO: 5738002 - DNA, 25 bp, Homo sapien
ccctggcatgggggggccactagat

SEQ ID NO: 5738003 - DNA, 25 bp, Homo sapien
tgactctgcctattgttcctccagt

SEQ ID NO: 5738004 - DNA, 25 bp, Homo sapien
gcctcctccgcccagagcggccccc

SEQ ID NO: 5738005 - DNA, 25 bp, Homo sapien
gtccctgacccagctcgggcccccg

SEQ ID NO: 5738006 - DNA, 25 bp, Homo sapien
gtgtgggggactcgagcctgctcat

SEQ ID NO: 5738007 - DNA, 25 bp, Homo sapien
gaagcacaaaggaggggcccgagac

SEQ ID NO: 5738008 - DNA, 25 bp, Homo sapien
gacaacgtggccaccttcatcggct

SEQ ID NO: 5738009 - DNA, 25 bp, Homo sapien
cccgagggctgagccagattcctgg

SEQ ID NO: 5738010 - DNA, 25 bp, Homo sapien
gcccagtccctgggagtgagcgccg

SEQ ID NO: 5738011 - DNA, 25 bp, Homo sapien
ggacagtgactcctcagcctcctcc

SEQ ID NO: 5738012 - DNA, 25 bp, Homo sapien
ggccaacctggggactctggccgga

SEQ ID NO: 5738013 - DNA, 25 bp, Homo sapien
ggggaggacaccactgaaaccgccc

SEQ ID NO: 5738014 - DNA, 25 bp, Homo sapien
cttgtgcgcagggatcgagacgggc

SEQ ID NO: 5738015 - DNA, 25 bp, Homo sapien
cagctcagctgtccccagaccccat

SEQ ID NO: 5738016 - DNA, 25 bp, Homo sapien
ttgaatgccttagaggaggccgggc

SEQ ID NO: 5738017 - DNA, 25 bp, Homo sapien
gcccccggagggagcgacccagccg

SEQ ID NO: 5738018 - DNA, 25 bp, Homo sapien
ggggctcgggcaggagcacccccca

SEQ ID NO: 5738019 - DNA, 25 bp, Homo sapien
cttaacccttctgcatcagggagcc

SEQ ID NO: 5738020 - DNA, 25 bp, Homo sapien
gccgagtggctcaatgccttgtacg

SEQ ID NO: 5738021 - DNA, 25 bp, Homo sapien
ccctcgaggacctgggcacggggtc

SEQ ID NO: 5738022 - DNA, 25 bp, Homo sapien
ctcttcgtccctcagcgtcctgggt

SEQ ID NO: 5738023 - DNA, 25 bp, Homo sapien
ccaacgccgtgaccgaggctgcccg

SEQ ID NO: 5738024 - DNA, 25 bp, Homo sapien
acaccggccagcatcttccgcacac

SEQ ID NO: 5738025 - DNA, 25 bp, Homo sapien
tggccttaacccttctgcatcaggg

SEQ ID NO: 5738026 - DNA, 25 bp, Homo sapien
accacatggcacaatgggacctctg

SEQ ID NO: 5738027 - DNA, 25 bp, Homo sapien
aaatgtggccaacctggggactctg

SEQ ID NO: 5738028 - DNA, 25 bp, Homo sapien
cgccctgctagcccagtccctggga

SEQ ID NO: 5738029 - DNA, 25 bp, Homo sapien
ctggctccttcatggcgcgcgacaa

SEQ ID NO: 5738030 - DNA, 25 bp, Homo sapien
tgaactgtgttcctgcccacagtga

SEQ ID NO: 5738031 - DNA, 25 bp, Homo sapien
tcggatggacacacagccagaccgt

SEQ ID NO: 5738032 - DNA, 25 bp, Homo sapien
ctgacccagctcgggcccccgaccc

SEQ ID NO: 5738033 - DNA, 25 bp, Homo sapien
tgggggctcgggcaggagcaccccc

SEQ ID NO: 5738034 - DNA, 25 bp, Homo sapien
tggccgagtggctcaatgccttgta

SEQ ID NO: 5738035 - DNA, 25 bp, Homo sapien
ttactaatattattgaatgccttag

SEQ ID NO: 5738036 - DNA, 25 bp, Homo sapien
ttccggcgcctggaagaggagttcc

SEQ ID NO: 5738037 - DNA, 25 bp, Homo sapien
tctccgagacggcctcctgccctgc

SEQ ID NO: 5738038 - DNA, 25 bp, Homo sapien
gagcattacctggacaagcacgacc

SEQ ID NO: 5738039 - DNA, 25 bp, Homo sapien
catgggggggccactagatgcacct

SEQ ID NO: 5738040 - DNA, 25 bp, Homo sapien
actctgcctattgttcctccagttc

SEQ ID NO: 5738041 - DNA, 25 bp, Homo sapien
gcgtcctgggtggcaaatgtggcca

SEQ ID NO: 5738042 - DNA, 25 bp, Homo sapien
ccatccccgctcccgccgctactcc

SEQ ID NO: 5738043 - DNA, 25 bp, Homo sapien
cgagcctgctcatctttgtgcgggt

SEQ ID NO: 5738044 - DNA, 25 bp, Homo sapien
gtggcccagcagagcctctgacagt

SEQ ID NO: 5738045 - DNA, 25 bp, Homo sapien
gtgggggactcgagcctgctcatct

SEQ ID NO: 5738046 - DNA, 25 bp, Homo sapien
tacggcctgggtctcccgggtggtg

SEQ ID NO: 5738047 - DNA, 25 bp, Homo sapien
ggacacgctggagcattacctggac

SEQ ID NO: 5738048 - DNA, 25 bp, Homo sapien
aatgggacctctgttgtacattccg

SEQ ID NO: 5738049 - DNA, 25 bp, Homo sapien
ccttttctccacagagggtgtcgcc

SEQ ID NO: 5738050 - DNA, 25 bp, Homo sapien
tcgcccaccccagccgagggtctgc

SEQ ID NO: 5738051 - DNA, 25 bp, Homo sapien
tccgatgaaggcagcccctgccctg

SEQ ID NO: 5738052 - DNA, 25 bp, Homo sapien
ttcatggcgcgcgacaacgtggcca

SEQ ID NO: 5738053 - DNA, 25 bp, Homo sapien
ggcggctgaccacaggcaccccggc

SEQ ID NO: 5738054 - DNA, 25 bp, Homo sapien
aggacctggccgagtggctcaatgc

SEQ ID NO: 5738055 - DNA, 25 bp, Homo sapien
gagaagagcgtggtgctgtgcctgc

SEQ ID NO: 5738056 - DNA, 25 bp, Homo sapien
ggaggccatgaaggaggacctggcc

SEQ ID NO: 5738057 - DNA, 25 bp, Homo sapien
taacccttctgcatcagggagcccc

SEQ ID NO: 5738058 - DNA, 25 bp, Homo sapien
cggcccccttggtacccgcagtgat

SEQ ID NO: 5738059 - DNA, 25 bp, Homo sapien
gcggcgcctccctgcggcggcccgg

SEQ ID NO: 5738060 - DNA, 25 bp, Homo sapien
acgtggccaccttcatcggctggtg

SEQ ID NO: 5738061 - DNA, 25 bp, Homo sapien
cgagaccggctggatcgcggccggc

SEQ ID NO: 5738062 - DNA, 25 bp, Homo sapien
cccgggtggtggcgatggcttcctg

SEQ ID NO: 5738063 - DNA, 25 bp, Homo sapien
aggagttcctggccaatgcccgggc

SEQ ID NO: 5738064 - DNA, 25 bp, Homo sapien
ggccaccttcatcggctggtgccgc

SEQ ID NO: 5738065 - DNA, 25 bp, Homo sapien
tgaaggaggacctggccgagtggct

SEQ ID NO: 5738066 - DNA, 25 bp, Homo sapien
ccagctcctccgatgaaggcagccc

SEQ ID NO: 5738067 - DNA, 25 bp, Homo sapien
ttaattactaatattattgaatgcc

SEQ ID NO: 5738068 - DNA, 25 bp, Homo sapien
attctgggccgctgcacctgccctg

SEQ ID NO: 5738069 - DNA, 25 bp, Homo sapien
gtggtggctgggacacgctggagca

SEQ ID NO: 5738070 - DNA, 25 bp, Homo sapien
ctgcactcagtcaccccgagggctg

SEQ ID NO: 5738071 - DNA, 25 bp, Homo sapien
tgacagtaaagttttgctccagaaa

SEQ ID NO: 5738072 - DNA, 25 bp, Homo sapien
ctgggcacggggtcggatggacaca

SEQ ID NO: 5738073 - DNA, 25 bp, Homo sapien
tcatgtttgagactgaggacctggt

SEQ ID NO: 5738074 - DNA, 25 bp, Homo sapien
cgagctggtgagggagattctgggc

SEQ ID NO: 5738075 - DNA, 25 bp, Homo sapien
gctgcacccccagcccccaacgccc

SEQ ID NO: 5738076 - DNA, 25 bp, Homo sapien
gccggggctcccggcctgagatgac

SEQ ID NO: 5738077 - DNA, 25 bp, Homo sapien
ggggacatggcatgccctgcactca

SEQ ID NO: 5738078 - DNA, 25 bp, Homo sapien
gtgacccccactggaccagtccctg

SEQ ID NO: 5738079 - DNA, 25 bp, Homo sapien
ccgtgccgctgctcctccactgctc

SEQ ID NO: 5738080 - DNA, 25 bp, Homo sapien
tatccccacgcctcggggcccccgc

SEQ ID NO: 5738081 - DNA, 25 bp, Homo sapien
cagggagccccctctgcctcttgag

SEQ ID NO: 5738082 - DNA, 25 bp, Homo sapien
ctgtgttcctgcccacagtgactcg

SEQ ID NO: 5738083 - DNA, 25 bp, Homo sapien
aggtgtggccttccaggcgcacagt

SEQ ID NO: 5738084 - DNA, 25 bp, Homo sapien
ctcggcggccaagagcgtgcggcca

SEQ ID NO: 5738085 - DNA, 25 bp, Homo sapien
cccccaacgcccctgccgctgggga

SEQ ID NO: 5738086 - DNA, 25 bp, Homo sapien
gctggagcattacctggacaagcac

SEQ ID NO: 5738087 - DNA, 25 bp, Homo sapien
acccaggccccgggatcagctgccc

SEQ ID NO: 5738088 - DNA, 25 bp, Homo sapien
ggctccggcccccgctggggcaatg

SEQ ID NO: 5738089 - DNA, 25 bp, Homo sapien
aggcagcccctgccctggcatgggg

SEQ ID NO: 5738090 - DNA, 25 bp, Homo sapien
ccggggacagtgactcctcagcctc

SEQ ID NO: 5738091 - DNA, 25 bp, Homo sapien
cgacctgcgcaacctcgacgagctg

SEQ ID NO: 5738092 - DNA, 25 bp, Homo sapien
acggccaatgggctgcctgggcccc

SEQ ID NO: 5738093 - DNA, 25 bp, Homo sapien
tgccggaggtgctcatgtttgagac

SEQ ID NO: 5738094 - DNA, 25 bp, Homo sapien
agccagcgatcctgaactgtgttcc

SEQ ID NO: 5738095 - DNA, 25 bp, Homo sapien
cacctgccctgaccagtttcccatg

SEQ ID NO: 5738096 - DNA, 25 bp, Homo sapien
tggcgcgcgacaacgtggccacctt

SEQ ID NO: 5738097 - DNA, 25 bp, Homo sapien
gcaccccggctttcccgggtctcca

SEQ ID NO: 5738098 - DNA, 25 bp, Homo sapien
cagccagtcccgagaccggctggat

SEQ ID NO: 5738099 - DNA, 25 bp, Homo sapien
gttcctgcccacagtgactcggccg

SEQ ID NO: 5738100 - DNA, 25 bp, Homo sapien
catggcgcgcgacaacgtggccacc

SEQ ID NO: 5738101 - DNA, 25 bp, Homo sapien
cggctggatcgcggccggccccggg

SEQ ID NO: 5738102 - DNA, 25 bp, Homo sapien
ccaagagcgtgcggccatttcgctc

SEQ ID NO: 5738103 - DNA, 25 bp, Homo sapien
cctctgacagtaaagttttgctcca

SEQ ID NO: 5738104 - DNA, 25 bp, Homo sapien
cagctgttccggcgcctggaagagg

SEQ ID NO: 5738105 - DNA, 25 bp, Homo sapien
tgtgcctgctggaggtggcgcggcg

SEQ ID NO: 5738106 - DNA, 25 bp, Homo sapien
gaggacctggtgctgcgcaagaacg

SEQ ID NO: 5738107 - DNA, 25 bp, Homo sapien
ggccatttcgctccagtgaggccta

SEQ ID NO: 5738108 - DNA, 25 bp, Homo sapien
ggcgtggggcacgcctgggcctgct

SEQ ID NO: 5738109 - DNA, 25 bp, Homo sapien
actggcccccggagggagcgaccca

SEQ ID NO: 5738110 - DNA, 25 bp, Homo sapien
cttcatcggctggtgccgcgtggag

SEQ ID NO: 5738111 - DNA, 25 bp, Homo sapien
ccttctgcatcagggagccccctct

SEQ ID NO: 5738112 - DNA, 25 bp, Homo sapien
cctctccgagacggcctcctgccct

SEQ ID NO: 5738113 - DNA, 25 bp, Homo sapien
cgtaaaccctcacgtatccccacgc

SEQ ID NO: 5738114 - DNA, 25 bp, Homo sapien
ccctccagctcctgactctgcctat

SEQ ID NO: 5738115 - DNA, 25 bp, Homo sapien
gccacgggcacgaccctgtgccaac

SEQ ID NO: 5738116 - DNA, 25 bp, Homo sapien
gcatcgcgggctcggcggccaagag

SEQ ID NO: 5738117 - DNA, 25 bp, Homo sapien
cttgcactgaaccctcgaggacctg

SEQ ID NO: 5738118 - DNA, 25 bp, Homo sapien
ccacaccggccagcatcttccgcac

SEQ ID NO: 5738119 - DNA, 25 bp, Homo sapien
tagagctgcggctcgggcggcgcct

SEQ ID NO: 5738120 - DNA, 25 bp, Homo sapien
gagtgggtggtggctgggacacgct

SEQ ID NO: 5738121 - DNA, 25 bp, Homo sapien
gcggccaagagcgtgcggccatttc

SEQ ID NO: 5738122 - DNA, 25 bp, Homo sapien
tgcagcaccccggctttcccgggtc

SEQ ID NO: 5738123 - DNA, 25 bp, Homo sapien
agaccccttgggaccacatggcaca

SEQ ID NO: 5738124 - DNA, 25 bp, Homo sapien
cagccctgcagcaccccggctttcc

SEQ ID NO: 5738125 - DNA, 25 bp, Homo sapien
gcaggagcagcagctgttccggcgc

SEQ ID NO: 5738126 - DNA, 25 bp, Homo sapien
gcagcagctgttccggcgcctggaa

SEQ ID NO: 5738127 - DNA, 25 bp, Homo sapien
ggaccagtccctgacccagctcggg

SEQ ID NO: 5738128 - DNA, 25 bp, Homo sapien
tcatcggctggtgccgcgtggagct

SEQ ID NO: 5738129 - DNA, 25 bp, Homo sapien
cccttgggaccacatggcacaatgg

SEQ ID NO: 5738130 - DNA, 25 bp, Homo sapien
gccccgggatcagctgcccccccat

SEQ ID NO: 5738131 - DNA, 25 bp, Homo sapien
agtttcccatgatcaaggtctcaga

SEQ ID NO: 5738132 - DNA, 25 bp, Homo sapien
gctcgggcccccgaccctccagctc

SEQ ID NO: 5738133 - DNA, 25 bp, Homo sapien
ccgtgtgggggactcgagcctgctc

SEQ ID NO: 5738134 - DNA, 25 bp, Homo sapien
accttcatcggctggtgccgcgtgg

SEQ ID NO: 5738135 - DNA, 25 bp, Homo sapien
gcgtgcggccatttcgctccagtga

SEQ ID NO: 5738136 - DNA, 25 bp, Homo sapien
agtcaccccgagggctgagccagat

SEQ ID NO: 5738137 - DNA, 25 bp, Homo sapien
tgggtggcaaatgtggccaacctgg

SEQ ID NO: 5738138 - DNA, 25 bp, Homo sapien
gttgggcaccacaccggccagcatc

SEQ ID NO: 5738139 - DNA, 25 bp, Homo sapien
atgaaggcagcccctgccctggcat

SEQ ID NO: 5738140 - DNA, 25 bp, Homo sapien
ctgctcctccactgctcatcgccca

SEQ ID NO: 5738141 - DNA, 25 bp, Homo sapien
cgcatgacacccagcgacctgcgca

SEQ ID NO: 5738142 - DNA, 25 bp, Homo sapien
aatgcccgggcccttgaggctgttg

SEQ ID NO: 5738143 - DNA, 25 bp, Homo sapien
gggatcgagacgggcagcactcatg

SEQ ID NO: 5738144 - DNA, 25 bp, Homo sapien
cggcgggcccggagccagagccgcg

SEQ ID NO: 5738145 - DNA, 25 bp, Homo sapien
cgggcccttgaggctgttgctagcg

SEQ ID NO: 5738146 - DNA, 25 bp, Homo sapien
aactgtgttcctgcccacagtgact

SEQ ID NO: 5738147 - DNA, 25 bp, Homo sapien
tgttccggcgcctggaagaggagtt

SEQ ID NO: 5738148 - DNA, 25 bp, Homo sapien
gggcgagcccggtgttctgaagacc

SEQ ID NO: 5738149 - DNA, 25 bp, Homo sapien
tacccgcagtgatgacacaggcact

SEQ ID NO: 5738150 - DNA, 25 bp, Homo sapien
ggccaatgcccgggcccttgaggct

SEQ ID NO: 5738151 - DNA, 25 bp, Homo sapien
agcgggagctgcgtgctgcaccccc

SEQ ID NO: 5738152 - DNA, 25 bp, Homo sapien
cccgccctgctagcccagtccctgg

SEQ ID NO: 5738153 - DNA, 25 bp, Homo sapien
atcagggagccccctctgcctcttg

SEQ ID NO: 5738154 - DNA, 25 bp, Homo sapien
tgaggcctacgtggaggccatgaag

SEQ ID NO: 5738155 - DNA, 25 bp, Homo sapien
atcttccgcacacccctgcagctcg

SEQ ID NO: 5738156 - DNA, 25 bp, Homo sapien
ccccggagggagcgacccagccggc

SEQ ID NO: 5738157 - DNA, 25 bp, Homo sapien
tcggccggtccgggcatggcagacc

SEQ ID NO: 5738158 - DNA, 25 bp, Homo sapien
acctgggcacggggtcggatggaca

SEQ ID NO: 5738159 - DNA, 25 bp, Homo sapien
gctgtgcctgctggaggtggcgcgg

SEQ ID NO: 5738160 - DNA, 25 bp, Homo sapien
acacgctggagcattacctggacaa

SEQ ID NO: 5738161 - DNA, 25 bp, Homo sapien
cgctgctcctccactgctcatcgcc

SEQ ID NO: 5738162 - DNA, 25 bp, Homo sapien
tgcgggtgctgaggagccacgtgat

SEQ ID NO: 5738163 - DNA, 25 bp, Homo sapien
gggccccgaagccaagccctttcca

SEQ ID NO: 5738164 - DNA, 25 bp, Homo sapien
gggatgagccagcgatcctgaactg

SEQ ID NO: 5738165 - DNA, 25 bp, Homo sapien
ccgcccgcccggcccgaggtgtggc

SEQ ID NO: 5738166 - DNA, 25 bp, Homo sapien
cgagggctgagccagattcctggat

SEQ ID NO: 5738167 - DNA, 25 bp, Homo sapien
gctgcccccccatccccgctcccgc

SEQ ID NO: 5738168 - DNA, 25 bp, Homo sapien
acggcctcctgccctgcgcagccag

SEQ ID NO: 5738169 - DNA, 25 bp, Homo sapien
agtccccgccctgctagcccagtcc

SEQ ID NO: 5738170 - DNA, 25 bp, Homo sapien
tggatcgcggccggccccggggggc

SEQ ID NO: 5738171 - DNA, 25 bp, Homo sapien
tgtgatggaccagctcagctgtccc

SEQ ID NO: 5738172 - DNA, 25 bp, Homo sapien
gcggcccccgcatgacacccagcga

SEQ ID NO: 5738173 - DNA, 25 bp, Homo sapien
ccaggccccgggatcagctgccccc

SEQ ID NO: 5738174 - DNA, 25 bp, Homo sapien
gctggccacgggcacgaccctgtgc

SEQ ID NO: 5738175 - DNA, 25 bp, Homo sapien
tacgaagcacaaaggaggggcccga

SEQ ID NO: 5738176 - DNA, 25 bp, Homo sapien
ttcctggatgtgatggaccagctca

SEQ ID NO: 5738177 - DNA, 25 bp, Homo sapien
ttcctttgtggccttaacccttctg

SEQ ID NO: 5738178 - DNA, 25 bp, Homo sapien
cacgacccgtgccgctgctcctcca

SEQ ID NO: 5738179 - DNA, 25 bp, Homo sapien
tagatgcacctgggagccccctggc

SEQ ID NO: 5738180 - DNA, 25 bp, Homo sapien
tgtgcgcagggatcgagacgggcag

SEQ ID NO: 5738181 - DNA, 25 bp, Homo sapien
aaggaggacctggccgagtggctca

SEQ ID NO: 5738182 - DNA, 25 bp, Homo sapien
tgggccgctgcacctgccctgacca

SEQ ID NO: 5738183 - DNA, 25 bp, Homo sapien
aagccaagccctttccagctcctcc

SEQ ID NO: 5738184 - DNA, 25 bp, Homo sapien
tgaccacaggcaccccggcctctcc

SEQ ID NO: 5738185 - DNA, 25 bp, Homo sapien
tgactcctcagcctcctccgcccag

SEQ ID NO: 5738186 - DNA, 25 bp, Homo sapien
ctcctgactctgcctattgttcctc

SEQ ID NO: 5738187 - DNA, 25 bp, Homo sapien
cccccgcaccagggactcctgcccg

SEQ ID NO: 5738188 - DNA, 25 bp, Homo sapien
tacctggacaagcacgacccgtgcc

SEQ ID NO: 5738189 - DNA, 25 bp, Homo sapien
gggcccggagccagagccgcgagga

SEQ ID NO: 5738190 - DNA, 25 bp, Homo sapien
cctgcccggcgggcccggagccaga

SEQ ID NO: 5738191 - DNA, 25 bp, Homo sapien
tgcgcagccagtcccgagaccggct

SEQ ID NO: 5738192 - DNA, 25 bp, Homo sapien
gccagtcccgagaccggctggatcg

SEQ ID NO: 5738193 - DNA, 25 bp, Homo sapien
ctggcatgggggggccactagatgc

SEQ ID NO: 5738194 - DNA, 25 bp, Homo sapien
aaccctcacgtatccccacgcctcg

SEQ ID NO: 5738195 - DNA, 25 bp, Homo sapien
ccactagatgcacctgggagccccc

SEQ ID NO: 5738196 - DNA, 25 bp, Homo sapien
atgggaccagaccccttgggaccac

SEQ ID NO: 5738197 - DNA, 25 bp, Homo sapien
ccttcatggcgcgcgacaacgtggc

SEQ ID NO: 5738198 - DNA, 25 bp, Homo sapien
gcgtgacccccactggaccagtccc

SEQ ID NO: 5738199 - DNA, 25 bp, Homo sapien
cccgggcccttgaggctgttgctag

SEQ ID NO: 5738200 - DNA, 25 bp, Homo sapien
tgctcatctttgtgcgggtgctgag

SEQ ID NO: 5738201 - DNA, 25 bp, Homo sapien
agccagaccgtaaaccctcacgtat

SEQ ID NO: 5738202 - DNA, 25 bp, Homo sapien
ctgcgcaacctcgacgagctggtga

SEQ ID NO: 5738203 - DNA, 25 bp, Homo sapien
ggctcggcggccaagagcgtgcggc

SEQ ID NO: 5738204 - DNA, 25 bp, Homo sapien
gcactcatgggtgccaaggggcagg

SEQ ID NO: 5738205 - DNA, 25 bp, Homo sapien
accccgagggctgagccagattcct

SEQ ID NO: 5738206 - DNA, 25 bp, Homo sapien
agggagattctgggccgctgcacct

SEQ ID NO: 5738207 - DNA, 25 bp, Homo sapien
ccccggcctctccgagacggcctcc

SEQ ID NO: 5738208 - DNA, 25 bp, Homo sapien
agccgcgaggagcaggctgtgctgc

SEQ ID NO: 5738209 - DNA, 25 bp, Homo sapien
ccagagcggcccccttggtacccgc

SEQ ID NO: 5738210 - DNA, 25 bp, Homo sapien
cgcctggaagaggagttcctggcca

SEQ ID NO: 5738211 - DNA, 25 bp, Homo sapien
ggcaccccggcctctccgagacggc

SEQ ID NO: 5738212 - DNA, 25 bp, Homo sapien
ctggtgctgcgcaagaacgagaaga

SEQ ID NO: 5738213 - DNA, 25 bp, Homo sapien
ccctgctagcccagtccctgggagt

SEQ ID NO: 5738214 - DNA, 25 bp, Homo sapien
cagtcccgagaccggctggatcgcg

SEQ ID NO: 5738215 - DNA, 25 bp, Homo sapien
accagacctcatgggaccagacccc

SEQ ID NO: 5738216 - DNA, 25 bp, Homo sapien
ccaacctggggactctggccggacg

SEQ ID NO: 5738217 - DNA, 25 bp, Homo sapien
gattcctggatgtgatggaccagct

SEQ ID NO: 5738218 - DNA, 25 bp, Homo sapien
tccgcacacccctgcagctcgaccc

SEQ ID NO: 5738219 - DNA, 25 bp, Homo sapien
caacgcccctgccgctggggaggac

SEQ ID NO: 5738220 - DNA, 25 bp, Homo sapien
cactggaccagtccctgacccagct

SEQ ID NO: 5738221 - DNA, 25 bp, Homo sapien
gagcagcagctgttccggcgcctgg

SEQ ID NO: 5738222 - DNA, 25 bp, Homo sapien
gttcctccagttcctcctcttcgtc

SEQ ID NO: 5738223 - DNA, 25 bp, Homo sapien
cacgggcacgaccctgtgccaacat

SEQ ID NO: 5738224 - DNA, 25 bp, Homo sapien
cgcccccgcaccagggactcctgcc

SEQ ID NO: 5738225 - DNA, 25 bp, Homo sapien
gggcacgcctgggcctgctggcccc

SEQ ID NO: 5738226 - DNA, 25 bp, Homo sapien
gcgcaagaacgagaagagcgtggtg

SEQ ID NO: 5738227 - DNA, 25 bp, Homo sapien
ttgagtaccagacctcatgggacca

SEQ ID NO: 5738228 - DNA, 25 bp, Homo sapien
gcagccgcccgcccggcccgaggtg

SEQ ID NO: 5738229 - DNA, 25 bp, Homo sapien
ctcccgccgctactccggggacagt

SEQ ID NO: 5738230 - DNA, 25 bp, Homo sapien
gaaccctcgaggacctgggcacggg

SEQ ID NO: 5738231 - DNA, 25 bp, Homo sapien
gctcatgtttgagactgaggacctg

SEQ ID NO: 5738232 - DNA, 25 bp, Homo sapien
cggccagcatcttccgcacacccct

SEQ ID NO: 5738233 - DNA, 25 bp, Homo sapien
ccaccccagccgagggtctgcacct

SEQ ID NO: 5738234 - DNA, 25 bp, Homo sapien
ggcaatgctccccggggccgcggga

SEQ ID NO: 5738235 - DNA, 25 bp, Homo sapien
ctgagccagattcctggatgtgatg

SEQ ID NO: 5738236 - DNA, 25 bp, Homo sapien
gctgggacacgctggagcattacct

SEQ ID NO: 5738237 - DNA, 25 bp, Homo sapien
cctattgttcctccagttcctcctc

SEQ ID NO: 5738238 - DNA, 25 bp, Homo sapien
ggtgttctgaagacctgtggcccag

SEQ ID NO: 5738239 - DNA, 25 bp, Homo sapien
accaccagtccccgccctgctagcc

SEQ ID NO: 5738240 - DNA, 25 bp, Homo sapien
gggtggtggctgggacacgctggag

SEQ ID NO: 5738241 - DNA, 25 bp, Homo sapien
ctcatctttgtgcgggtgctgagga

SEQ ID NO: 5738242 - DNA, 25 bp, Homo sapien
ggtacccgcagtgatgacacaggca

SEQ ID NO: 5738243 - DNA, 25 bp, Homo sapien
agcaccccccagactccccgtgccc

SEQ ID NO: 5738244 - DNA, 25 bp, Homo sapien
cctgcggcggcccggcccggctccg

SEQ ID NO: 5738245 - DNA, 25 bp, Homo sapien
gtgagcgccggggctcccggcctga

SEQ ID NO: 5738246 - DNA, 25 bp, Homo sapien
ggacctctgttgtacattccggttg

SEQ ID NO: 5738247 - DNA, 25 bp, Homo sapien
gctcaatgccttgtacggcctgggt

SEQ ID NO: 5738248 - DNA, 25 bp, Homo sapien
tgcaccttttctccacagagggtgt

SEQ ID NO: 5738249 - DNA, 25 bp, Homo sapien
catggcagacccagtggcgggcatc

SEQ ID NO: 5738250 - DNA, 25 bp, Homo sapien
cagcgtcctgggtggcaaatgtggc

SEQ ID NO: 5738251 - DNA, 25 bp, Homo sapien
gcccccgaccctccagctcctgact

SEQ ID NO: 5738252 - DNA, 25 bp, Homo sapien
gcaacctcgacgagctggtgaggga

SEQ ID NO: 5738253 - DNA, 25 bp, Homo sapien
gaggccgggcgagcccggtgttctg

SEQ ID NO: 5738254 - DNA, 25 bp, Homo sapien
ctgaagacctgtggcccagcagagc

SEQ ID NO: 5738255 - DNA, 25 bp, Homo sapien
ctgtgctgcttgtgcgcagggatcg

SEQ ID NO: 5738256 - DNA, 25 bp, Homo sapien
ccccacccaggccccgggatcagct

SEQ ID NO: 5738257 - DNA, 25 bp, Homo sapien
gcccaccccagccgagggtctgcac

SEQ ID NO: 5738258 - DNA, 25 bp, Homo sapien
ggccgcgggatgagccagcgatcct

SEQ ID NO: 5738259 - DNA, 25 bp, Homo sapien
gaggacctgggcacggggtcggatg

SEQ ID NO: 5738260 - DNA, 25 bp, Homo sapien
tgcggcggcccggcccggctccggc

SEQ ID NO: 5738261 - DNA, 25 bp, Homo sapien
ctcagcctcctccgcccagagcggc

SEQ ID NO: 5738262 - DNA, 25 bp, Homo sapien
acattccggttgggggatgagcgtt

SEQ ID NO: 5738263 - DNA, 25 bp, Homo sapien
ccggtgttctgaagacctgtggccc

SEQ ID NO: 5738264 - DNA, 25 bp, Homo sapien
ggctcgggcaggagcaccccccaga

SEQ ID NO: 5738265 - DNA, 25 bp, Homo sapien
ccagccggcggctgaccacaggcac

SEQ ID NO: 5738266 - DNA, 25 bp, Homo sapien
cgcccagagcggcccccttggtacc

SEQ ID NO: 5738267 - DNA, 25 bp, Homo sapien
gagacgggcagcactcatgggtgcc

SEQ ID NO: 5738268 - DNA, 25 bp, Homo sapien
gtgggtggtggctgggacacgctgg

SEQ ID NO: 5738269 - DNA, 25 bp, Homo sapien
tggatgtgatggaccagctcagctg

SEQ ID NO: 5738270 - DNA, 25 bp, Homo sapien
tcgacgagctggtgagggagattct

SEQ ID NO: 5738271 - DNA, 25 bp, Homo sapien
ccgctgcacctgccctgaccagttt

SEQ ID NO: 5738272 - DNA, 25 bp, Homo sapien
ccacagagggtgtcgcccaccacca

SEQ ID NO: 5738273 - DNA, 25 bp, Homo sapien
acgagaagagcgtggtgctgtgcct

SEQ ID NO: 5738274 - DNA, 25 bp, Homo sapien
atggacacacagccagaccgtaaac

SEQ ID NO: 5738275 - DNA, 25 bp, Homo sapien
cggcctgggtctcccgggtggtggc

SEQ ID NO: 5738276 - DNA, 25 bp, Homo sapien
ctcacgtatccccacgcctcggggc

SEQ ID NO: 5738277 - DNA, 25 bp, Homo sapien
agaccggctggatcgcggccggccc

SEQ ID NO: 5738278 - DNA, 25 bp, Homo sapien
tcaatgccttgtacggcctgggtct

SEQ ID NO: 5738279 - DNA, 25 bp, Homo sapien
gcgccggggctcccggcctgagatg

SEQ ID NO: 5738280 - DNA, 25 bp, Homo sapien
aagaacgagaagagcgtggtgctgt

SEQ ID NO: 5738281 - DNA, 25 bp, Homo sapien
cccgtgcccgcagccctgcagcacc

SEQ ID NO: 5738282 - DNA, 25 bp, Homo sapien
cgttagcttacgaagcacaaaggag

SEQ ID NO: 5738283 - DNA, 25 bp, Homo sapien
cagcatcttccgcacacccctgcag

SEQ ID NO: 5738284 - DNA, 25 bp, Homo sapien
ccgcggcccccgcatgacacccagc

SEQ ID NO: 5738285 - DNA, 25 bp, Homo sapien
tgcagctcgacccgcagcaggagca

SEQ ID NO: 5738286 - DNA, 25 bp, Homo sapien
gcagagctggggacatggcatgccc

SEQ ID NO: 5738287 - DNA, 25 bp, Homo sapien
cctcttgagtaccagacctcatggg

SEQ ID NO: 5738288 - DNA, 25 bp, Homo sapien
gtctcccgggtggtggcgatggctt

SEQ ID NO: 5738289 - DNA, 25 bp, Homo sapien
gtggaggccatgaaggaggacctgg

SEQ ID NO: 5738290 - DNA, 25 bp, Homo sapien
ggagattctgggccgctgcacctgc

SEQ ID NO: 5738291 - DNA, 25 bp, Homo sapien
atttcgctccagtgaggcctacgtg

SEQ ID NO: 5738292 - DNA, 25 bp, Homo sapien
tggaagaggagttcctggccaatgc

SEQ ID NO: 5738293 - DNA, 25 bp, Homo sapien
ggccggacggccaatgggctgcctg

SEQ ID NO: 5738294 - DNA, 25 bp, Homo sapien
cctgagatgactcccgttagcttac

SEQ ID NO: 5738295 - DNA, 25 bp, Homo sapien
gtccccagaccccatcccttctcct

SEQ ID NO: 5738296 - DNA, 25 bp, Homo sapien
tcttgagtaccagacctcatgggac

SEQ ID NO: 5738297 - DNA, 25 bp, Homo sapien
tcgggcccccgaccctccagctcct

SEQ ID NO: 5738298 - DNA, 25 bp, Homo sapien
ttctgaagacctgtggcccagcaga

SEQ ID NO: 5738299 - DNA, 25 bp, Homo sapien
cccaacgcccctgccgctggggagg

SEQ ID NO: 5738300 - DNA, 25 bp, Homo sapien
gctggccccacgcctcgtgcagttt

SEQ ID NO: 5738301 - DNA, 25 bp, Homo sapien
gacctggccgagtggctcaatgcct

SEQ ID NO: 5738302 - DNA, 25 bp, Homo sapien
ccagcccccaacgcccctgccgctg

SEQ ID NO: 5738303 - DNA, 25 bp, Homo sapien
tccccgtgcccgcagccctgcagca

SEQ ID NO: 5738304 - DNA, 25 bp, Homo sapien
gcctgggcctgctggccccacgcct

SEQ ID NO: 5738305 - DNA, 25 bp, Homo sapien
ggcacgaccctgtgccaacatgcca

SEQ ID NO: 5738306 - DNA, 25 bp, Homo sapien
ggggccgcgggatgagccagcgatc

SEQ ID NO: 5738307 - DNA, 25 bp, Homo sapien
catcgcccaccccagccgagggtct

SEQ ID NO: 5738308 - DNA, 25 bp, Homo sapien
gagctgcggctcgggcggcgcctcc

SEQ ID NO: 5738309 - DNA, 25 bp, Homo sapien
accctgtgccaacatgccaacgccg

SEQ ID NO: 5738310 - DNA, 25 bp, Homo sapien
ccttccaggcgcacagtgtagtgcc

SEQ ID NO: 5738311 - DNA, 25 bp, Homo sapien
gtgctgcttgtgcgcagggatcgag

SEQ ID NO: 5738312 - DNA, 25 bp, Homo sapien
tctccttttcctttgtggccttaac

SEQ ID NO: 5738313 - DNA, 25 bp, Homo sapien
tgtgcgggtgctgaggagccacgtg

SEQ ID NO: 5738314 - DNA, 25 bp, Homo sapien
ccggcgcctggaagaggagttcctg

SEQ ID NO: 5738315 - DNA, 25 bp, Homo sapien
cagacctcatgggaccagacccctt

SEQ ID NO: 5738316 - DNA, 25 bp, Homo sapien
caccacaccggccagcatcttccgc

SEQ ID NO: 5738317 - DNA, 25 bp, Homo sapien
ccgaggctgcccgtgcattggcagc

SEQ ID NO: 5738318 - DNA, 25 bp, Homo sapien
gaagacctgtggcccagcagagcct

SEQ ID NO: 5738319 - DNA, 25 bp, Homo sapien
tcctgacagggctggccacgggcac

SEQ ID NO: 5738320 - DNA, 25 bp, Homo sapien
caggagattgagcgggagctgcgtg

SEQ ID NO: 5738321 - DNA, 25 bp, Homo sapien
gcccacagtgactcggccggtccgg

SEQ ID NO: 5738322 - DNA, 25 bp, Homo sapien
catggcacaatgggacctctgttgt

SEQ ID NO: 5738323 - DNA, 25 bp, Homo sapien
agattgagcgggagctgcgtgctgc

SEQ ID NO: 5738324 - DNA, 25 bp, Homo sapien
ctgtggcccagcagagcctctgaca

SEQ ID NO: 5738325 - DNA, 25 bp, Homo sapien
ggagccagagccgcgaggagcaggc

SEQ ID NO: 5738326 - DNA, 25 bp, Homo sapien
gggcatcgcgggctcggcggccaag

SEQ ID NO: 5738327 - DNA, 25 bp, Homo sapien
accagtccctgacccagctcgggcc

SEQ ID NO: 5738328 - DNA, 25 bp, Homo sapien
tcgacccgcagcaggagcagcagct

SEQ ID NO: 5738329 - DNA, 25 bp, Homo sapien
tgcctattgttcctccagttcctcc

SEQ ID NO: 5738330 - DNA, 25 bp, Homo sapien
gcactcagtcaccccgagggctgag

SEQ ID NO: 5738331 - DNA, 25 bp, Homo sapien
gcgagtgggtggtggctgggacacg

SEQ ID NO: 5738332 - DNA, 25 bp, Homo sapien
gccagattcctggatgtgatggacc

SEQ ID NO: 5738333 - DNA, 25 bp, Homo sapien
cagccctgcccggcgggcccggagc

SEQ ID NO: 5738334 - DNA, 25 bp, Homo sapien
agcaggctgtgctgcttgtgcgcag

SEQ ID NO: 5738335 - DNA, 25 bp, Homo sapien
tcctgccctgcgcagccagtcccga

SEQ ID NO: 5738336 - DNA, 25 bp, Homo sapien
actagatgcacctgggagccccctg

SEQ ID NO: 5738337 - DNA, 25 bp, Homo sapien
ccccccatccccgctcccgccgcta

SEQ ID NO: 5738338 - DNA, 25 bp, Homo sapien
gactctggccggacggccaatgggc

SEQ ID NO: 5738339 - DNA, 25 bp, Homo sapien
aacctggggactctggccggacggc

SEQ ID NO: 5738340 - DNA, 25 bp, Homo sapien
ggcctcctgccctgcgcagccagtc

SEQ ID NO: 5738341 - DNA, 25 bp, Homo sapien
gtgttcctgcccacagtgactcggc

SEQ ID NO: 5738342 - DNA, 25 bp, Homo sapien
gggaccagaccccttgggaccacat

SEQ ID NO: 5738343 - DNA, 25 bp, Homo sapien
gtaccagacctcatgggaccagacc

SEQ ID NO: 5738344 - DNA, 25 bp, Homo sapien
gcctgctggccccacgcctcgtgca

SEQ ID NO: 5738345 - DNA, 25 bp, Homo sapien
cggctcgggcggcgcctccctgcgg

SEQ ID NO: 5738346 - DNA, 25 bp, Homo sapien
tgatggaccagctcagctgtcccca

SEQ ID NO: 5738347 - DNA, 25 bp, Homo sapien
gatcaaggtctcagaggggaagtac

SEQ ID NO: 5738348 - DNA, 25 bp, Homo sapien
gactcccgttagcttacgaagcaca

SEQ ID NO: 5738349 - DNA, 25 bp, Homo sapien
ctcctccgatgaaggcagcccctgc

SEQ ID NO: 5738350 - DNA, 25 bp, Homo sapien
gcagtgggggctcgggcaggagcac

SEQ ID NO: 5738351 - DNA, 25 bp, Homo sapien
ccaggaggcaggggagcccagctgt

SEQ ID NO: 5738352 - DNA, 25 bp, Homo sapien
ccggacggccaatgggctgcctggg

SEQ ID NO: 5738353 - DNA, 25 bp, Homo sapien
tcgtgcagtttgagcaggagattga

SEQ ID NO: 5738354 - DNA, 25 bp, Homo sapien
tggggcacgcctgggcctgctggcc

SEQ ID NO: 5738355 - DNA, 25 bp, Homo sapien
gaagaggagttcctggccaatgccc

SEQ ID NO: 5738356 - DNA, 25 bp, Homo sapien
ggcccccgcatgacacccagcgacc

SEQ ID NO: 5738357 - DNA, 25 bp, Homo sapien
ccagtttcccatgatcaaggtctca

SEQ ID NO: 5738358 - DNA, 25 bp, Homo sapien
ccggcctctccgagacggcctcctg

SEQ ID NO: 5738359 - DNA, 25 bp, Homo sapien
gccccacgcctcgtgcagtttgagc

SEQ ID NO: 5738360 - DNA, 25 bp, Homo sapien
ggaggtgctcatgtttgagactgag

SEQ ID NO: 5738361 - DNA, 25 bp, Homo sapien
ccggcggctgaccacaggcaccccg

SEQ ID NO: 5738362 - DNA, 25 bp, Homo sapien
ctccggggacagtgactcctcagcc

SEQ ID NO: 5738363 - DNA, 25 bp, Homo sapien
gactcgagcctgctcatctttgtgc

SEQ ID NO: 5738364 - DNA, 25 bp, Homo sapien
catagagctgcggctcgggcggcgc

SEQ ID NO: 5738365 - DNA, 25 bp, Homo sapien
ggcccgaggtgtggccttccaggcg

SEQ ID NO: 5738366 - DNA, 25 bp, Homo sapien
ccacgtgatggtgcgagtgggtggt

SEQ ID NO: 5738367 - DNA, 25 bp, Homo sapien
caggcaccccggcctctccgagacg

SEQ ID NO: 5738368 - DNA, 25 bp, Homo sapien
gcgcaacctcgacgagctggtgagg

SEQ ID NO: 5738369 - DNA, 25 bp, Homo sapien
gtcccgagaccggctggatcgcggc

SEQ ID NO: 5738370 - DNA, 25 bp, Homo sapien
cccccgcatgacacccagcgacctg

SEQ ID NO: 5738371 - DNA, 25 bp, Homo sapien
ccaatgggctgcctgggccccgaag

SEQ ID NO: 5738372 - DNA, 25 bp, Homo sapien
tcctccactgctcatcgcccacccc

SEQ ID NO: 5738373 - DNA, 25 bp, Homo sapien
tgtcggtccccagccctgcccggcg

SEQ ID NO: 5738374 - DNA, 25 bp, Homo sapien
ctcctccgcccagagcggccccctt

SEQ ID NO: 5738375 - DNA, 25 bp, Homo sapien
gtgcctggctccttcatggcgcgcg

SEQ ID NO: 5738376 - DNA, 25 bp, Homo sapien
cgtggagctgggtgtgccggaggtg

SEQ ID NO: 5738377 - DNA, 25 bp, Homo sapien
cacccccagcccccaacgcccctgc

SEQ ID NO: 5738378 - DNA, 25 bp, Homo sapien
ccctgacccagctcgggcccccgac

SEQ ID NO: 5738379 - DNA, 25 bp, Homo sapien
gtgccgctgctcctccactgctcat

SEQ ID NO: 5738380 - DNA, 25 bp, Homo sapien
accggccagcatcttccgcacaccc

SEQ ID NO: 5738381 - DNA, 25 bp, Homo sapien
tggcagacccagtggcgggcatcgc

SEQ ID NO: 5738382 - DNA, 25 bp, Homo sapien
catgccctgcactcagtcaccccga

SEQ ID NO: 5738383 - DNA, 25 bp, Homo sapien
aaggtctcagaggggaagtaccgtg

SEQ ID NO: 5738384 - DNA, 25 bp, Homo sapien
tgcccgcagccctgcagcaccccgg

SEQ ID NO: 5738385 - DNA, 25 bp, Homo sapien
gcccgcggcccccgcatgacaccca

SEQ ID NO: 5738386 - DNA, 25 bp, Homo sapien
ggcttgcactgaaccctcgaggacc

SEQ ID NO: 5738387 - DNA, 25 bp, Homo sapien
tgcttgtgcgcagggatcgagacgg

SEQ ID NO: 5738388 - DNA, 25 bp, Homo sapien
gagcgtgcggccatttcgctccagt

SEQ ID NO: 5738389 - DNA, 25 bp, Homo sapien
agacccagtggcgggcatcgcgggc

SEQ ID NO: 5738390 - DNA, 25 bp, Homo sapien
ggacctgggcacggggtcggatgga

SEQ ID NO: 5738391 - DNA, 25 bp, Homo sapien
ggcgcctccctgcggcggcccggcc

SEQ ID NO: 5738392 - DNA, 25 bp, Homo sapien
ccccgaccctccagctcctgactct

SEQ ID NO: 5738393 - DNA, 25 bp, Homo sapien
gctcagctgtccccagaccccatcc

SEQ ID NO: 5738394 - DNA, 25 bp, Homo sapien
agctggggacatggcatgccctgca

SEQ ID NO: 5738395 - DNA, 25 bp, Homo sapien
aggaggccgggcgagcccggtgttc

SEQ ID NO: 5738396 - DNA, 25 bp, Homo sapien
ccagtccctgggagtgagcgccggg

SEQ ID NO: 5738397 - DNA, 25 bp, Homo sapien
ccatcccttctccttttcctttgtg

SEQ ID NO: 5738398 - DNA, 25 bp, Homo sapien
acctgtggcccagcagagcctctga

SEQ ID NO: 5738399 - DNA, 25 bp, Homo sapien
cagcagagcctctgacagtaaagtt

SEQ ID NO: 5738400 - DNA, 25 bp, Homo sapien
ctgggccccgaagccaagccctttc

SEQ ID NO: 5738401 - DNA, 25 bp, Homo sapien
tcaccccgagggctgagccagattc

SEQ ID NO: 5738402 - DNA, 25 bp, Homo sapien
ctgttgtacattccggttgggggat

SEQ ID NO: 5738403 - DNA, 25 bp, Homo sapien
gcgggatgagccagcgatcctgaac

SEQ ID NO: 5738404 - DNA, 25 bp, Homo sapien
gggtctcccgggtggtggcgatggc

SEQ ID NO: 5738405 - DNA, 25 bp, Homo sapien
ttagcttacgaagcacaaaggaggg

SEQ ID NO: 5738406 - DNA, 25 bp, Homo sapien
gccgagggtctgcaccttttctcca

SEQ ID NO: 5738407 - DNA, 25 bp, Homo sapien
gtgcgagtgggtggtggctgggaca

SEQ ID NO: 5738408 - DNA, 25 bp, Homo sapien
ggaggacaccactgaaaccgccccc

SEQ ID NO: 5738409 - DNA, 25 bp, Homo sapien
ctacgtggaggccatgaaggaggac

SEQ ID NO: 5738410 - DNA, 25 bp, Homo sapien
cgatggcttcctgacagggctggcc

SEQ ID NO: 5738411 - DNA, 25 bp, Homo sapien
tagtgcctggctccttcatggcgcg

SEQ ID NO: 5738412 - DNA, 25 bp, Homo sapien
gcggccatttcgctccagtgaggcc

SEQ ID NO: 5738413 - DNA, 25 bp, Homo sapien
gggactcgagcctgctcatctttgt

SEQ ID NO: 5738414 - DNA, 25 bp, Homo sapien
gagtgagcgccggggctcccggcct

SEQ ID NO: 5738415 - DNA, 25 bp, Homo sapien
ccggcccccgctggggcaatgctcc

SEQ ID NO: 5738416 - DNA, 25 bp, Homo sapien
agctcctccgatgaaggcagcccct

SEQ ID NO: 5738417 - DNA, 25 bp, Homo sapien
gagttcctggccaatgcccgggccc

SEQ ID NO: 5738418 - DNA, 25 bp, Homo sapien
ctttccagctcctccgatgaaggca

SEQ ID NO: 5738419 - DNA, 25 bp, Homo sapien
gacctcatgggaccagaccccttgg

SEQ ID NO: 5738420 - DNA, 25 bp, Homo sapien
actcctcagcctcctccgcccagag

SEQ ID NO: 5738421 - DNA, 25 bp, Homo sapien
ggagctgcgtgctgcacccccagcc

SEQ ID NO: 5738422 - DNA, 25 bp, Homo sapien
ccaacatgccaacgccgtgaccgag

SEQ ID NO: 5738423 - DNA, 25 bp, Homo sapien
ctggggaggacaccactgaaaccgc

SEQ ID NO: 5738424 - DNA, 25 bp, Homo sapien
aggctgttgctagcgtgacccccac

SEQ ID NO: 5738425 - DNA, 25 bp, Homo sapien
cctcgacgagctggtgagggagatt

SEQ ID NO: 5738426 - DNA, 25 bp, Homo sapien
aatgccttgtacggcctgggtctcc

SEQ ID NO: 5738427 - DNA, 25 bp, Homo sapien
gtgctgtgcctgctggaggtggcgc

SEQ ID NO: 5738428 - DNA, 25 bp, Homo sapien
agggctgagccagattcctggatgt

SEQ ID NO: 5738429 - DNA, 25 bp, Homo sapien
ccccagtccagagttgggcaccaca

SEQ ID NO: 5738430 - DNA, 25 bp, Homo sapien
gcatcttccgcacacccctgcagct

SEQ ID NO: 5738431 - DNA, 25 bp, Homo sapien
agccccagtccagagttgggcacca

SEQ ID NO: 5738432 - DNA, 25 bp, Homo sapien
tcgagacgggcagcactcatgggtg

SEQ ID NO: 5738433 - DNA, 25 bp, Homo sapien
cacatggcacaatgggacctctgtt

SEQ ID NO: 5738434 - DNA, 25 bp, Homo sapien
cacctgggagccccctggcttgcac

SEQ ID NO: 5738435 - DNA, 25 bp, Homo sapien
cgggtgctgaggagccacgtgatgg

SEQ ID NO: 5738436 - DNA, 25 bp, Homo sapien
atgatcaaggtctcagaggggaagt

SEQ ID NO: 5738437 - DNA, 25 bp, Homo sapien
ggcgcctggaagaggagttcctggc

SEQ ID NO: 5738438 - DNA, 25 bp, Homo sapien
acaatgggacctctgttgtacattc

SEQ ID NO: 5738439 - DNA, 25 bp, Homo sapien
tcggtccccagccctgcccggcggg

SEQ ID NO: 5738440 - DNA, 25 bp, Homo sapien
tgggacctctgttgtacattccggt

SEQ ID NO: 5738441 - DNA, 25 bp, Homo sapien
tagcccagtccctgggagtgagcgc

SEQ ID NO: 5738442 - DNA, 25 bp, Homo sapien
gagactgaggacctggtgctgcgca

SEQ ID NO: 5738443 - DNA, 25 bp, Homo sapien
gggtctccagccccagtccagagtt

SEQ ID NO: 5738444 - DNA, 25 bp, Homo sapien
acagtgactcctcagcctcctccgc

SEQ ID NO: 5738445 - DNA, 25 bp, Homo sapien
caggagcaccccccagactccccgt

SEQ ID NO: 5738446 - DNA, 25 bp, Homo sapien
cgtggggcacgcctgggcctgctgg

SEQ ID NO: 5738447 - DNA, 25 bp, Homo sapien
cctcctgccctgcgcagccagtccc

SEQ ID NO: 5738448 - DNA, 25 bp, Homo sapien
ctcgagcctgctcatctttgtgcgg

SEQ ID NO: 5738449 - DNA, 25 bp, Homo sapien
gtggccaccttcatcggctggtgcc

SEQ ID NO: 5738450 - DNA, 25 bp, Homo sapien
gctcccggcctgagatgactcccgt

SEQ ID NO: 5738451 - DNA, 25 bp, Homo sapien
gagcccggtgttctgaagacctgtg

SEQ ID NO: 5738452 - DNA, 25 bp, Homo sapien
cccactggaccagtccctgacccag

SEQ ID NO: 5738453 - DNA, 25 bp, Homo sapien
ttccaggcgcacagtgtagtgcctg

SEQ ID NO: 5738454 - DNA, 25 bp, Homo sapien
cgggagctgcgtgctgcacccccag

SEQ ID NO: 5738455 - DNA, 25 bp, Homo sapien
gccgctggggaggacaccactgaaa

SEQ ID NO: 5738456 - DNA, 25 bp, Homo sapien
cctcctcttcgtccctcagcgtcct

SEQ ID NO: 5738457 - DNA, 25 bp, Homo sapien
cgccgctactccggggacagtgact

SEQ ID NO: 5738458 - DNA, 25 bp, Homo sapien
aatgggctgcctgggccccgaagcc

SEQ ID NO: 5738459 - DNA, 25 bp, Homo sapien
gggaagtaccgtgtgggggactcga

SEQ ID NO: 5738460 - DNA, 25 bp, Homo sapien
gtgatggtgcgagtgggtggtggct

SEQ ID NO: 5738461 - DNA, 25 bp, Homo sapien
cccccactggaccagtccctgaccc

SEQ ID NO: 5738462 - DNA, 25 bp, Homo sapien
ccatgatcaaggtctcagaggggaa

SEQ ID NO: 5738463 - DNA, 25 bp, Homo sapien
aggagcagcagctgttccggcgcct

SEQ ID NO: 5738464 - DNA, 25 bp, Homo sapien
tgggaccacatggcacaatgggacc

SEQ ID NO: 5738465 - DNA, 25 bp, Homo sapien
ggtggcaaatgtggccaacctgggg

SEQ ID NO: 5738466 - DNA, 25 bp, Homo sapien
gcacaatgggacctctgttgtacat

SEQ ID NO: 5738467 - DNA, 25 bp, Homo sapien
cccgggatcagctgcccccccatcc

SEQ ID NO: 5738468 - DNA, 25 bp, Homo sapien
ctgcgcaagaacgagaagagcgtgg

SEQ ID NO: 5738469 - DNA, 25 bp, Homo sapien
agggactcctgcccgcggcccccgc

SEQ ID NO: 5738470 - DNA, 25 bp, Homo sapien
cccgctcccgccgctactccgggga

SEQ ID NO: 5738471 - DNA, 25 bp, Homo sapien
ggacatggcatgccctgcactcagt

SEQ ID NO: 5738472 - DNA, 25 bp, Homo sapien
gccatgaaggaggacctggccgagt

SEQ ID NO: 5738473 - DNA, 25 bp, Homo sapien
agcagctgttccggcgcctggaaga

SEQ ID NO: 5738474 - DNA, 25 bp, Homo sapien
gtgctgcacccccagcccccaacgc

SEQ ID NO: 5738475 - DNA, 25 bp, Homo sapien
gctgcttgtgcgcagggatcgagac

SEQ ID NO: 5738476 - DNA, 25 bp, Homo sapien
cctctgcctcttgagtaccagacct

SEQ ID NO: 5738477 - DNA, 25 bp, Homo sapien
acatggcatgccctgcactcagtca

SEQ ID NO: 5738478 - DNA, 25 bp, Homo sapien
gcgttgctatttaattactaatatt

SEQ ID NO: 5738479 - DNA, 25 bp, Homo sapien
ggcttcctgacagggctggccacgg

SEQ ID NO: 5738480 - DNA, 25 bp, Homo sapien
tgcgcagggatcgagacgggcagca

SEQ ID NO: 5738481 - DNA, 25 bp, Homo sapien
ccactgaaaccgcccccgcaccagg

SEQ ID NO: 5738482 - DNA, 25 bp, Homo sapien
cctggatgtgatggaccagctcagc

SEQ ID NO: 5738483 - DNA, 25 bp, Homo sapien
aggcctacgtggaggccatgaagga

SEQ ID NO: 5738484 - DNA, 25 bp, Homo sapien
acctctgttgtacattccggttggg

SEQ ID NO: 5738485 - DNA, 25 bp, Homo sapien
gcacgcctgggcctgctggccccac

SEQ ID NO: 5738486 - DNA, 25 bp, Homo sapien
acacaggcactggcccccggaggga

SEQ ID NO: 5738487 - DNA, 25 bp, Homo sapien
agcggcccccttggtacccgcagtg

SEQ ID NO: 5738488 - DNA, 25 bp, Homo sapien
tgacacaggcactggcccccggagg

SEQ ID NO: 5738489 - DNA, 25 bp, Homo sapien
cctgcagcaccccggctttcccggg

SEQ ID NO: 5738490 - DNA, 25 bp, Homo sapien
ggctgagccagattcctggatgtga

SEQ ID NO: 5738491 - DNA, 25 bp, Homo sapien
ccagagccgcgaggagcaggctgtg

SEQ ID NO: 5738492 - DNA, 25 bp, Homo sapien
agtttgagcaggagattgagcggga

SEQ ID NO: 5738493 - DNA, 25 bp, Homo sapien
ctgcccacagtgactcggccggtcc

SEQ ID NO: 5738494 - DNA, 25 bp, Homo sapien
cccgcagccctgcagcaccccggct

SEQ ID NO: 5738495 - DNA, 25 bp, Homo sapien
tggcccccggagggagcgacccagc

SEQ ID NO: 5738496 - DNA, 25 bp, Homo sapien
tccctgcggcggcccggcccggctc

SEQ ID NO: 5738497 - DNA, 25 bp, Homo sapien
ccagttcctcctcttcgtccctcag

SEQ ID NO: 5738498 - DNA, 25 bp, Homo sapien
ttctgcatcagggagccccctctgc

SEQ ID NO: 5738499 - DNA, 25 bp, Homo sapien
gaaggcagcccctgccctggcatgg

SEQ ID NO: 5738500 - DNA, 25 bp, Homo sapien
ccggagggagcgacccagccggcgg

SEQ ID NO: 5738501 - DNA, 25 bp, Homo sapien
ctggggcaatgctccccggggccgc

SEQ ID NO: 5738502 - DNA, 25 bp, Homo sapien
ccggacccgcagagctggggacatg

SEQ ID NO: 5738503 - DNA, 25 bp, Homo sapien
tggctcaatgccttgtacggcctgg

SEQ ID NO: 5738504 - DNA, 25 bp, Homo sapien
accgcccccgcaccagggactcctg

SEQ ID NO: 5738505 - DNA, 25 bp, Homo sapien
tgccttgtacggcctgggtctcccg

SEQ ID NO: 5738506 - DNA, 25 bp, Homo sapien
tggccacgggcacgaccctgtgcca

SEQ ID NO: 5738507 - DNA, 25 bp, Homo sapien
acgctggagcattacctggacaagc

SEQ ID NO: 5738508 - DNA, 25 bp, Homo sapien
tccccgccctgctagcccagtccct

SEQ ID NO: 5738509 - DNA, 25 bp, Homo sapien
ccccagactccccgtgcccgcagcc

SEQ ID NO: 5738510 - DNA, 25 bp, Homo sapien
ggccaagagcgtgcggccatttcgc

SEQ ID NO: 5738511 - DNA, 25 bp, Homo sapien
gtgcagtttgagcaggagattgagc

SEQ ID NO: 5738512 - DNA, 25 bp, Homo sapien
ccgaccctccagctcctgactctgc

SEQ ID NO: 5738513 - DNA, 25 bp, Homo sapien
caccactgaaaccgcccccgcacca

SEQ ID NO: 5738514 - DNA, 25 bp, Homo sapien
cacaggcaccccggcctctccgaga

SEQ ID NO: 5738515 - DNA, 25 bp, Homo sapien
cgctccagtgaggcctacgtggagg

SEQ ID NO: 5738516 - DNA, 25 bp, Homo sapien
cgctggggcaatgctccccggggcc

SEQ ID NO: 5738517 - DNA, 25 bp, Homo sapien
tggtgctgtgcctgctggaggtggc

SEQ ID NO: 5738518 - DNA, 25 bp, Homo sapien
gcccgtgcattggcagccgcccgcc

SEQ ID NO: 5738519 - DNA, 25 bp, Homo sapien
cccgctggggcaatgctccccgggg

SEQ ID NO: 5738520 - DNA, 25 bp, Homo sapien
cgtggtgctgtgcctgctggaggtg

SEQ ID NO: 5738521 - DNA, 25 bp, Homo sapien
cccccgctggggcaatgctccccgg

SEQ ID NO: 5738522 - DNA, 25 bp, Homo sapien
cccgcatgacacccagcgacctgcg

SEQ ID NO: 5738523 - DNA, 25 bp, Homo sapien
tgtgccaacatgccaacgccgtgac

SEQ ID NO: 5738524 - DNA, 25 bp, Homo sapien
ccagcgacctgcgcaacctcgacga

SEQ ID NO: 5738525 - DNA, 25 bp, Homo sapien
gacgggcagcactcatgggtgccaa

SEQ ID NO: 5738526 - DNA, 25 bp, Homo sapien
cgggcagcactcatgggtgccaagg

SEQ ID NO: 5738527 - DNA, 25 bp, Homo sapien
tcccatgatcaaggtctcagagggg

SEQ ID NO: 5738528 - DNA, 25 bp, Homo sapien
cccgcaccagggactcctgcccgcg

SEQ ID NO: 5738529 - DNA, 25 bp, Homo sapien
tccgggcatggcagacccagtggcg

SEQ ID NO: 5738530 - DNA, 25 bp, Homo sapien
gctgggtgtgccggaggtgctcatg

SEQ ID NO: 5738531 - DNA, 25 bp, Homo sapien
actgctcatcgcccaccccagccga

SEQ ID NO: 5738532 - DNA, 25 bp, Homo sapien
ccactgctcatcgcccaccccagcc

SEQ ID NO: 5738533 - DNA, 25 bp, Homo sapien
cctccgcccagagcggcccccttgg

SEQ ID NO: 5738534 - DNA, 25 bp, Homo sapien
cagctcgacccgcagcaggagcagc

SEQ ID NO: 5738535 - DNA, 25 bp, Homo sapien
ggggacagtgactcctcagcctcct

SEQ ID NO: 5738536 - DNA, 25 bp, Homo sapien
tgcccggcgggcccggagccagagc

SEQ ID NO: 5738537 - DNA, 25 bp, Homo sapien
atcgcgggctcggcggccaagagcg

SEQ ID NO: 5738538 - DNA, 25 bp, Homo sapien
cccttgaggctgttgctagcgtgac

SEQ ID NO: 5738539 - DNA, 25 bp, Homo sapien
atcagctgcccccccatccccgctc

SEQ ID NO: 5738540 - DNA, 25 bp, Homo sapien
acacacagccagaccgtaaaccctc

SEQ ID NO: 5738541 - DNA, 25 bp, Homo sapien
actcagtcaccccgagggctgagcc

SEQ ID NO: 5738542 - DNA, 25 bp, Homo sapien
cctgctcatctttgtgcgggtgctg

SEQ ID NO: 5738543 - DNA, 25 bp, Homo sapien
cagagttgggcaccacaccggccag

SEQ ID NO: 5738544 - DNA, 25 bp, Homo sapien
agagcctctgacagtaaagttttgc

SEQ ID NO: 5738545 - DNA, 25 bp, Homo sapien
cctcatgggaccagaccccttggga

SEQ ID NO: 5738546 - DNA, 25 bp, Homo sapien
gtggcgatggcttcctgacagggct

SEQ ID NO: 5738547 - DNA, 25 bp, Homo sapien
ttctccacagagggtgtcgcccacc

SEQ ID NO: 5738548 - DNA, 25 bp, Homo sapien
gtccctcagcgtcctgggtggcaaa

SEQ ID NO: 5738549 - DNA, 25 bp, Homo sapien
caacgtggccaccttcatcggctgg

SEQ ID NO: 5738550 - DNA, 25 bp, Homo sapien
acacagccagaccgtaaaccctcac

SEQ ID NO: 5738551 - DNA, 25 bp, Homo sapien
atccccgctcccgccgctactccgg

SEQ ID NO: 5738552 - DNA, 25 bp, Homo sapien
tgggacacgctggagcattacctgg

SEQ ID NO: 5738553 - DNA, 25 bp, Homo sapien
gcgtgctgcacccccagcccccaac

SEQ ID NO: 5738554 - DNA, 25 bp, Homo sapien
ctgcctgggccccgaagccaagccc

SEQ ID NO: 5738555 - DNA, 25 bp, Homo sapien
ccagctcctgactctgcctattgtt

SEQ ID NO: 5738556 - DNA, 25 bp, Homo sapien
ctgggcctgctggccccacgcctcg

SEQ ID NO: 5738557 - DNA, 25 bp, Homo sapien
ctgccctgcgcagccagtcccgaga

SEQ ID NO: 5738558 - DNA, 25 bp, Homo sapien
cagattcctggatgtgatggaccag

SEQ ID NO: 5738559 - DNA, 25 bp, Homo sapien
ctggccaatgcccgggcccttgagg

SEQ ID NO: 5738560 - DNA, 25 bp, Homo sapien
cccagccctgcccggcgggcccgga

SEQ ID NO: 5738561 - DNA, 25 bp, Homo sapien
caggctgtgctgcttgtgcgcaggg

SEQ ID NO: 5738562 - DNA, 25 bp, Homo sapien
atcctgaactgtgttcctgcccaca

SEQ ID NO: 5738563 - DNA, 25 bp, Homo sapien
ccgcccggcccgaggtgtggccttc

SEQ ID NO: 5738564 - DNA, 25 bp, Homo sapien
tccgagacggcctcctgccctgcgc

SEQ ID NO: 5738565 - DNA, 25 bp, Homo sapien
tcaaggtctcagaggggaagtaccg

SEQ ID NO: 5738566 - DNA, 25 bp, Homo sapien
tcagctgtccccagaccccatccct

SEQ ID NO: 5738567 - DNA, 25 bp, Homo sapien
gaggagccacgtgatggtgcgagtg

SEQ ID NO: 5738568 - DNA, 25 bp, Homo sapien
tcgtccctcagcgtcctgggtggca

SEQ ID NO: 5738569 - DNA, 25 bp, Homo sapien
cccgcagtgatgacacaggcactgg

SEQ ID NO: 5738570 - DNA, 25 bp, Homo sapien
tgcctgctggaggtggcgcggcgtg

SEQ ID NO: 5738571 - DNA, 25 bp, Homo sapien
attacctggacaagcacgacccgtg

SEQ ID NO: 5738572 - DNA, 25 bp, Homo sapien
agttcctcctcttcgtccctcagcg

SEQ ID NO: 5738573 - DNA, 25 bp, Homo sapien
agcaggagattgagcgggagctgcg

SEQ ID NO: 5738574 - DNA, 25 bp, Homo sapien
gggcctgctggccccacgcctcgtg

SEQ ID NO: 5738575 - DNA, 25 bp, Homo sapien
cccgccgctactccggggacagtga

SEQ ID NO: 5738576 - DNA, 25 bp, Homo sapien
cccagcagagcctctgacagtaaag

SEQ ID NO: 5738577 - DNA, 25 bp, Homo sapien
gccctgcagcaccccggctttcccg

SEQ ID NO: 5738578 - DNA, 25 bp, Homo sapien
ggctgcctgggccccgaagccaagc

SEQ ID NO: 5738579 - DNA, 25 bp, Homo sapien
cgccgcccctccggacccgcagagc

SEQ ID NO: 5738580 - DNA, 25 bp, Homo sapien
cgcgtggagctgggtgtgccggagg

SEQ ID NO: 5738581 - DNA, 25 bp, Homo sapien
cccggcgggcccggagccagagccg

SEQ ID NO: 5738582 - DNA, 25 bp, Homo sapien
agtaccgtgtgggggactcgagcct

SEQ ID NO: 5738583 - DNA, 25 bp, Homo sapien
tttcccatgatcaaggtctcagagg

SEQ ID NO: 5738584 - DNA, 25 bp, Homo sapien
actaatattattgaatgccttagag

SEQ ID NO: 5738585 - DNA, 25 bp, Homo sapien
ctccacagagggtgtcgcccaccac

SEQ ID NO: 5738586 - DNA, 25 bp, Homo sapien
gatgtgatggaccagctcagctgtc

SEQ ID NO: 5738587 - DNA, 25 bp, Homo sapien
ccctttccagctcctccgatgaagg

SEQ ID NO: 5738588 - DNA, 25 bp, Homo sapien
cccctgcagctcgacccgcagcagg

SEQ ID NO: 5738589 - DNA, 25 bp, Homo sapien
agggagcgacccagccggcggctga

SEQ ID NO: 5738590 - DNA, 25 bp, Homo sapien
gctgttgctagcgtgacccccactg

SEQ ID NO: 5738591 - DNA, 25 bp, Homo sapien
gatggtgcgagtgggtggtggctgg

SEQ ID NO: 5738592 - DNA, 25 bp, Homo sapien
ctcagcgtcctgggtggcaaatgtg

SEQ ID NO: 5738593 - DNA, 25 bp, Homo sapien
ccccggggccgcgggatgagccagc

SEQ ID NO: 5738594 - DNA, 25 bp, Homo sapien
catgaaggaggacctggccgagtgg

SEQ ID NO: 5738595 - DNA, 25 bp, Homo sapien
cactgaaccctcgaggacctgggca

SEQ ID NO: 5738596 - DNA, 25 bp, Homo sapien
ggtccccagccctgcccggcgggcc

SEQ ID NO: 5738597 - DNA, 25 bp, Homo sapien
tgttgctagcgtgacccccactgga

SEQ ID NO: 5738598 - DNA, 25 bp, Homo sapien
tggagcattacctggacaagcacga

SEQ ID NO: 5738599 - DNA, 25 bp, Homo sapien
ggctgcccgtgcattggcagccgcc

SEQ ID NO: 5738600 - DNA, 25 bp, Homo sapien
ccagccccagtccagagttgggcac

SEQ ID NO: 5738601 - DNA, 25 bp, Homo sapien
agccacgtgatggtgcgagtgggtg

SEQ ID NO: 5738602 - DNA, 25 bp, Homo sapien
gcccggctccggcccccgctggggc

SEQ ID NO: 5738603 - DNA, 25 bp, Homo sapien
tgagccagcgatcctgaactgtgtt

SEQ ID NO: 5738604 - DNA, 25 bp, Homo sapien
attattgaatgccttagaggaggcc

SEQ ID NO: 5738605 - DNA, 25 bp, Homo sapien
gggactctggccggacggccaatgg

SEQ ID NO: 5738606 - DNA, 25 bp, Homo sapien
gaggagcaggctgtgctgcttgtgc

SEQ ID NO: 5738607 - DNA, 25 bp, Homo sapien
gcagacccagtggcgggcatcgcgg

SEQ ID NO: 5738608 - DNA, 25 bp, Homo sapien
acccgcagagctggggacatggcat

SEQ ID NO: 5738609 - DNA, 25 bp, Homo sapien
tgccctggcatgggggggccactag

SEQ ID NO: 5738610 - DNA, 25 bp, Homo sapien
gggctggccacgggcacgaccctgt

SEQ ID NO: 5738611 - DNA, 25 bp, Homo sapien
ccctccggacccgcagagctgggga

SEQ ID NO: 5738612 - DNA, 25 bp, Homo sapien
cgatcctgaactgtgttcctgccca

SEQ ID NO: 5738613 - DNA, 25 bp, Homo sapien
atgtttgagactgaggacctggtgc

SEQ ID NO: 5738614 - DNA, 25 bp, Homo sapien
cgcagtgatgacacaggcactggcc

SEQ ID NO: 5738615 - DNA, 25 bp, Homo sapien
tgcctcttgagtaccagacctcatg

SEQ ID NO: 5738616 - DNA, 25 bp, Homo sapien
ctgccgctggggaggacaccactga

SEQ ID NO: 5738617 - DNA, 25 bp, Homo sapien
ccatttcgctccagtgaggcctacg

SEQ ID NO: 5738618 - DNA, 25 bp, Homo sapien
agatgactcccgttagcttacgaag

SEQ ID NO: 5738619 - DNA, 25 bp, Homo sapien
ccaccttcatcggctggtgccgcgt

SEQ ID NO: 5738620 - DNA, 25 bp, Homo sapien
ggggccactagatgcacctgggagc

SEQ ID NO: 5738621 - DNA, 25 bp, Homo sapien
accacaggcaccccggcctctccga

SEQ ID NO: 5738622 - DNA, 25 bp, Homo sapien
tactccggggacagtgactcctcag

SEQ ID NO: 5738623 - DNA, 25 bp, Homo sapien
cagctgcccccccatccccgctccc

SEQ ID NO: 5738624 - DNA, 25 bp, Homo sapien
gcccctgccgctggggaggacacca

SEQ ID NO: 5738625 - DNA, 25 bp, Homo sapien
ggccactagatgcacctgggagccc

SEQ ID NO: 5738626 - DNA, 25 bp, Homo sapien
agtgactcggccggtccgggcatgg

SEQ ID NO: 5738627 - DNA, 25 bp, Homo sapien
gctggtgccgcgtggagctgggtgt

SEQ ID NO: 5738628 - DNA, 25 bp, Homo sapien
tccagagttgggcaccacaccggcc

SEQ ID NO: 5738629 - DNA, 25 bp, Homo sapien
tcgggcggcgcctccctgcggcggc

SEQ ID NO: 5738630 - DNA, 25 bp, Homo sapien
ccacagtgactcggccggtccgggc

SEQ ID NO: 5738631 - DNA, 25 bp, Homo sapien
gggcggcgcctccctgcggcggccc

SEQ ID NO: 5738632 - DNA, 25 bp, Homo sapien
tggccccacgcctcgtgcagtttga

SEQ ID NO: 5738633 - DNA, 25 bp, Homo sapien
cgggcatggcagacccagtggcggg

SEQ ID NO: 5738634 - DNA, 25 bp, Homo sapien
tggtgccgcgtggagctgggtgtgc

SEQ ID NO: 5738635 - DNA, 25 bp, Homo sapien
cctccctgcggcggcccggcccggc

SEQ ID NO: 5738636 - DNA, 25 bp, Homo sapien
gacaccactgaaaccgcccccgcac

SEQ ID NO: 5738637 - DNA, 25 bp, Homo sapien
cgcatagagctgcggctcgggcggc

SEQ ID NO: 5738638 - DNA, 25 bp, Homo sapien
ggagcgacccagccggcggctgacc

SEQ ID NO: 5738639 - DNA, 25 bp, Homo sapien
aacgccgtgaccgaggctgcccgtg

SEQ ID NO: 5738640 - DNA, 25 bp, Homo sapien
gccccgaagccaagccctttccagc

SEQ ID NO: 5738641 - DNA, 25 bp, Homo sapien
gatgacacaggcactggcccccgga

SEQ ID NO: 5738642 - DNA, 25 bp, Homo sapien
gccgcgtggagctgggtgtgccgga

SEQ ID NO: 5738643 - DNA, 25 bp, Homo sapien
tcctggccaatgcccgggcccttga

SEQ ID NO: 5738644 - DNA, 25 bp, Homo sapien
attggcagccgcccgcccggcccga

SEQ ID NO: 5738645 - DNA, 25 bp, Homo sapien
actgaaaccgcccccgcaccaggga

SEQ ID NO: 5738646 - DNA, 25 bp, Homo sapien
tggtgcgagtgggtggtggctggga

SEQ ID NO: 5738647 - DNA, 25 bp, Homo sapien
agtgaggcctacgtggaggccatga

SEQ ID NO: 5738648 - DNA, 25 bp, Homo sapien
tttgagcaggagattgagcgggagc

SEQ ID NO: 5738649 - DNA, 25 bp, Homo sapien
gaccagaccccttgggaccacatgg

SEQ ID NO: 5738650 - DNA, 25 bp, Homo sapien
tttcccgggtctccagccccagtcc

SEQ ID NO: 5738651 - DNA, 25 bp, Homo sapien
gagcgccggggctcccggcctgaga

SEQ ID NO: 5738652 - DNA, 25 bp, Homo sapien
cagcactcatgggtgccaaggggca

SEQ ID NO: 5738653 - DNA, 25 bp, Homo sapien
agcctgctcatctttgtgcgggtgc

SEQ ID NO: 5738654 - DNA, 25 bp, Homo sapien
gcatcagggagccccctctgcctct

SEQ ID NO: 5738655 - DNA, 25 bp, Homo sapien
agagcggcccccttggtacccgcag

SEQ ID NO: 5738656 - DNA, 25 bp, Homo sapien
accagctcagctgtccccagacccc

SEQ ID NO: 5738657 - DNA, 25 bp, Homo sapien
aggcgcacagtgtagtgcctggctc

SEQ ID NO: 5738658 - DNA, 25 bp, Homo sapien
tgggggatgagcgttgctatttaat

SEQ ID NO: 5738659 - DNA, 25 bp, Homo sapien
ttgagactgaggacctggtgctgcg

SEQ ID NO: 5738660 - DNA, 25 bp, Homo sapien
acagagggtgtcgcccaccaccagt

SEQ ID NO: 5738661 - DNA, 25 bp, Homo sapien
gaccgaggctgcccgtgcattggca

SEQ ID NO: 5738662 - DNA, 25 bp, Homo sapien
ctgaggacctggtgctgcgcaagaa

SEQ ID NO: 5738663 - DNA, 25 bp, Homo sapien
catgacacccagcgacctgcgcaac

SEQ ID NO: 5738664 - DNA, 25 bp, Homo sapien
ctccttcatggcgcgcgacaacgtg

SEQ ID NO: 5738665 - DNA, 25 bp, Homo sapien
ggagcaggctgtgctgcttgtgcgc

SEQ ID NO: 5738666 - DNA, 25 bp, Homo sapien
cttcctgacagggctggccacgggc

SEQ ID NO: 5738667 - DNA, 25 bp, Homo sapien
cgggcacgaccctgtgccaacatgc

SEQ ID NO: 5738668 - DNA, 25 bp, Homo sapien
tgagatgactcccgttagcttacga

SEQ ID NO: 5738669 - DNA, 25 bp, Homo sapien
aacctcgacgagctggtgagggaga

SEQ ID NO: 5738670 - DNA, 25 bp, Homo sapien
caggggagcccagctgtcggtcccc

SEQ ID NO: 5738671 - DNA, 25 bp, Homo sapien
attgagcgggagctgcgtgctgcac

SEQ ID NO: 5738672 - DNA, 25 bp, Homo sapien
cctgggtggcaaatgtggccaacct

SEQ ID NO: 5738673 - DNA, 25 bp, Homo sapien
cgctggggaggacaccactgaaacc

SEQ ID NO: 5738674 - DNA, 25 bp, Homo sapien
gtgcggccatttcgctccagtgagg

SEQ ID NO: 5738675 - DNA, 25 bp, Homo sapien
agattctgggccgctgcacctgccc

SEQ ID NO: 5738676 - DNA, 25 bp, Homo sapien
cgagtggctcaatgccttgtacggc

SEQ ID NO: 5738677 - DNA, 25 bp, Homo sapien
ctcatcgcccaccccagccgagggt

SEQ ID NO: 5738678 - DNA, 25 bp, Homo sapien
caagccctttccagctcctccgatg

SEQ ID NO: 5738679 - DNA, 25 bp, Homo sapien
agtggctcaatgccttgtacggcct

SEQ ID NO: 5738680 - DNA, 25 bp, Homo sapien
gcctacgtggaggccatgaaggagg

SEQ ID NO: 5738681 - DNA, 25 bp, Homo sapien
tgggcaccacaccggccagcatctt

SEQ ID NO: 5738682 - DNA, 25 bp, Homo sapien
agccctttccagctcctccgatgaa

SEQ ID NO: 5738683 - DNA, 25 bp, Homo sapien
tggcacaatgggacctctgttgtac

SEQ ID NO: 5738684 - DNA, 25 bp, Homo sapien
acgtgatggtgcgagtgggtggtgg

SEQ ID NO: 5738685 - DNA, 25 bp, Homo sapien
gctagcgtgacccccactggaccag

SEQ ID NO: 5738686 - DNA, 25 bp, Homo sapien
tgttctgaagacctgtggcccagca

SEQ ID NO: 5738687 - DNA, 25 bp, Homo sapien
ccagtggcgggcatcgcgggctcgg

SEQ ID NO: 5738688 - DNA, 25 bp, Homo sapien
gctactccggggacagtgactcctc

SEQ ID NO: 5738689 - DNA, 25 bp, Homo sapien
acagtgactcggccggtccgggcat

SEQ ID NO: 5738690 - DNA, 25 bp, Homo sapien
tattgaatgccttagaggaggccgg

SEQ ID NO: 5738691 - DNA, 25 bp, Homo sapien
ccgcagagctggggacatggcatgc

SEQ ID NO: 5738692 - DNA, 25 bp, Homo sapien
tgggctgcctgggccccgaagccaa

SEQ ID NO: 5738693 - DNA, 25 bp, Homo sapien
ccagcgatcctgaactgtgttcctg

SEQ ID NO: 5738694 - DNA, 25 bp, Homo sapien
cagctcgggcccccgaccctccagc

SEQ ID NO: 5738695 - DNA, 25 bp, Homo sapien
gaatgccttagaggaggccgggcga

SEQ ID NO: 5738696 - DNA, 25 bp, Homo sapien
cgacccagccggcggctgaccacag

SEQ ID NO: 5738697 - DNA, 25 bp, Homo sapien
ctcccgggtggtggcgatggcttcc

SEQ ID NO: 5738698 - DNA, 25 bp, Homo sapien
agccgcccgcccggcccgaggtgtg

SEQ ID NO: 5738699 - DNA, 25 bp, Homo sapien
gctgaccacaggcaccccggcctct

SEQ ID NO: 5738700 - DNA, 25 bp, Homo sapien
cgacccgtgccgctgctcctccact

SEQ ID NO: 5738701 - DNA, 25 bp, Homo sapien
ggagcaccccccagactccccgtgc

SEQ ID NO: 5738702 - DNA, 25 bp, Homo sapien
gcacccgcacaaagatgagcaggct

SEQ ID NO: 5738703 - DNA, 25 bp, Homo sapien
ggcaccagccgatgaaggtggccac

SEQ ID NO: 5738704 - DNA, 25 bp, Homo sapien
gctcgagtcccccacacggtacttc

SEQ ID NO: 5738705 - DNA, 25 bp, Homo sapien
ccaggttggccacatttgccaccca

SEQ ID NO: 5738706 - DNA, 25 bp, Homo sapien
actgtgcgcctggaaggccacacct

SEQ ID NO: 5738707 - DNA, 25 bp, Homo sapien
agtgctgcccgtctcgatccctgcg

SEQ ID NO: 5738708 - DNA, 25 bp, Homo sapien
cactacactgtgcgcctggaaggcc

SEQ ID NO: 5738709 - DNA, 25 bp, Homo sapien
tctgtggagaaaaggtgcagaccct

SEQ ID NO: 5738710 - DNA, 25 bp, Homo sapien
ggtctggctgtgtgtccatccgacc

SEQ ID NO: 5738711 - DNA, 25 bp, Homo sapien
cacgccgcgccacctccagcaggca

SEQ ID NO: 5738712 - DNA, 25 bp, Homo sapien
gtcctccttcatggcctccacgtag

SEQ ID NO: 5738713 - DNA, 25 bp, Homo sapien
gccatcgccaccacccgggagaccc

SEQ ID NO: 5738714 - DNA, 25 bp, Homo sapien
ctcatcccgcggccccggggagcat

SEQ ID NO: 5738715 - DNA, 25 bp, Homo sapien
gaaaaggtgcagaccctcggctggg

SEQ ID NO: 5738716 - DNA, 25 bp, Homo sapien
ggctgcgggcacggggagtctgggg

SEQ ID NO: 5738717 - DNA, 25 bp, Homo sapien
ggccagtgcctgtgtcatcactgcg

SEQ ID NO: 5738718 - DNA, 25 bp, Homo sapien
agggatggggtctggggacagctga

SEQ ID NO: 5738719 - DNA, 25 bp, Homo sapien
gccacatttgccacccaggacgctg

SEQ ID NO: 5738720 - DNA, 25 bp, Homo sapien
ctgggggtgcagcacgcagctcccg

SEQ ID NO: 5738721 - DNA, 25 bp, Homo sapien
cgatccagccggtctcgggactggc

SEQ ID NO: 5738722 - DNA, 25 bp, Homo sapien
ctgcgcacaagcagcacagcctgct

SEQ ID NO: 5738723 - DNA, 25 bp, Homo sapien
ccttcatcggaggagctggaaaggg

SEQ ID NO: 5738724 - DNA, 25 bp, Homo sapien
acccaggccgtacaaggcattgagc

SEQ ID NO: 5738725 - DNA, 25 bp, Homo sapien
cctcggggtgactgagtgcagggca

SEQ ID NO: 5738726 - DNA, 25 bp, Homo sapien
ggtcgctgggtgtcatgcgggggcc

SEQ ID NO: 5738727 - DNA, 25 bp, Homo sapien
agggttcagtgcaagccagggggct

SEQ ID NO: 5738728 - DNA, 25 bp, Homo sapien
ccattggccgtccggccagagtccc

SEQ ID NO: 5738729 - DNA, 25 bp, Homo sapien
caaccggaatgtacaacagaggtcc

SEQ ID NO: 5738730 - DNA, 25 bp, Homo sapien
ccacgctcttctcgttcttgcgcag

SEQ ID NO: 5738731 - DNA, 25 bp, Homo sapien
gcctcggtcacggcgttggcatgtt

SEQ ID NO: 5738732 - DNA, 25 bp, Homo sapien
ggtcagccgccggctgggtcgctcc

SEQ ID NO: 5738733 - DNA, 25 bp, Homo sapien
tttctggagcaaaactttactgtca

SEQ ID NO: 5738734 - DNA, 25 bp, Homo sapien
gctcctcagcacccgcacaaagatg

SEQ ID NO: 5738735 - DNA, 25 bp, Homo sapien
gtgggggtcacgctagcaacagcct

SEQ ID NO: 5738736 - DNA, 25 bp, Homo sapien
cctccgggggccagtgcctgtgtca

SEQ ID NO: 5738737 - DNA, 25 bp, Homo sapien
gcatgccatgtccccagctctgcgg

SEQ ID NO: 5738738 - DNA, 25 bp, Homo sapien
gcgggtaccaagggggccgctctgg

SEQ ID NO: 5738739 - DNA, 25 bp, Homo sapien
tcggaggagctggaaagggcttggc

SEQ ID NO: 5738740 - DNA, 25 bp, Homo sapien
caccacgctcttctcgttcttgcgc

SEQ ID NO: 5738741 - DNA, 25 bp, Homo sapien
tctcaggccgggagccccggcgctc

SEQ ID NO: 5738742 - DNA, 25 bp, Homo sapien
tggggggtgctcctgcccgagcccc

SEQ ID NO: 5738743 - DNA, 25 bp, Homo sapien
cccccggggccggccgcgatccagc

SEQ ID NO: 5738744 - DNA, 25 bp, Homo sapien
tggctgtgtgtccatccgaccccgt

SEQ ID NO: 5738745 - DNA, 25 bp, Homo sapien
ccccccatgccagggcaggggctgc

SEQ ID NO: 5738746 - DNA, 25 bp, Homo sapien
aggccgggagccccggcgctcactc

SEQ ID NO: 5738747 - DNA, 25 bp, Homo sapien
gggccggccgcgatccagccggtct

SEQ ID NO: 5738748 - DNA, 25 bp, Homo sapien
cgccgggcagggctggggaccgaca

SEQ ID NO: 5738749 - DNA, 25 bp, Homo sapien
ccggggagcattgccccagcggggg

SEQ ID NO: 5738750 - DNA, 25 bp, Homo sapien
gcgctcactcccagggactgggcta

SEQ ID NO: 5738751 - DNA, 25 bp, Homo sapien
taacgggagtcatctcaggccggga

SEQ ID NO: 5738752 - DNA, 25 bp, Homo sapien
gagcgaaatggccgcacgctcttgg

SEQ ID NO: 5738753 - DNA, 25 bp, Homo sapien
ctctgggcggaggaggctgaggagt

SEQ ID NO: 5738754 - DNA, 25 bp, Homo sapien
cctgccccttggcacccatgagtgc

SEQ ID NO: 5738755 - DNA, 25 bp, Homo sapien
accctcggctggggtgggcgatgag

SEQ ID NO: 5738756 - DNA, 25 bp, Homo sapien
agtcaggagctggagggtcgggggc

SEQ ID NO: 5738757 - DNA, 25 bp, Homo sapien
gtgcgggggcggtttcagtggtgtc

SEQ ID NO: 5738758 - DNA, 25 bp, Homo sapien
tcgtgcttgtccaggtaatgctcca

SEQ ID NO: 5738759 - DNA, 25 bp, Homo sapien
ggctgcgcagggcaggaggccgtct

SEQ ID NO: 5738760 - DNA, 25 bp, Homo sapien
atccagccggtctcgggactggctg

SEQ ID NO: 5738761 - DNA, 25 bp, Homo sapien
catcgccaccacccgggagacccag

SEQ ID NO: 5738762 - DNA, 25 bp, Homo sapien
gcccagaatctccctcaccagctcg

SEQ ID NO: 5738763 - DNA, 25 bp, Homo sapien
ggaagatgctggccggtgtggtgcc

SEQ ID NO: 5738764 - DNA, 25 bp, Homo sapien
ggcggctgccaatgcacgggcagcc

SEQ ID NO: 5738765 - DNA, 25 bp, Homo sapien
aggcacagcaccacgctcttctcgt

SEQ ID NO: 5738766 - DNA, 25 bp, Homo sapien
gacgctgagggacgaagaggaggaa

SEQ ID NO: 5738767 - DNA, 25 bp, Homo sapien
tgccaatgcacgggcagcctcggtc

SEQ ID NO: 5738768 - DNA, 25 bp, Homo sapien
aatgctccagcgtgtcccagccacc

SEQ ID NO: 5738769 - DNA, 25 bp, Homo sapien
ggagtagcggcgggagcggggatgg

SEQ ID NO: 5738770 - DNA, 25 bp, Homo sapien
cgtccggccagagtccccaggttgg

SEQ ID NO: 5738771 - DNA, 25 bp, Homo sapien
gcagggaggcgccgcccgagccgca

SEQ ID NO: 5738772 - DNA, 25 bp, Homo sapien
ggcccaggcagcccattggccgtcc

SEQ ID NO: 5738773 - DNA, 25 bp, Homo sapien
aacatgagcacctccggcacaccca

SEQ ID NO: 5738774 - DNA, 25 bp, Homo sapien
ggagtctggggggtgctcctgcccg

SEQ ID NO: 5738775 - DNA, 25 bp, Homo sapien
tcctctaaggcattcaataatatta

SEQ ID NO: 5738776 - DNA, 25 bp, Homo sapien
gccgggccgggccgccgcagggagg

SEQ ID NO: 5738777 - DNA, 25 bp, Homo sapien
ggatacgtgagggtttacggtctgg

SEQ ID NO: 5738778 - DNA, 25 bp, Homo sapien
gatgcagaagggttaaggccacaaa

SEQ ID NO: 5738779 - DNA, 25 bp, Homo sapien
cacgtaggcctcactggagcgaaat

SEQ ID NO: 5738780 - DNA, 25 bp, Homo sapien
tgcgcaggtcgctgggtgtcatgcg

SEQ ID NO: 5738781 - DNA, 25 bp, Homo sapien
aggttggccacatttgccacccagg

SEQ ID NO: 5738782 - DNA, 25 bp, Homo sapien
agcagggcggggactggtggtgggc

SEQ ID NO: 5738783 - DNA, 25 bp, Homo sapien
atgtggtcccaaggggtctggtccc

SEQ ID NO: 5738784 - DNA, 25 bp, Homo sapien
tggccgcacgctcttggccgccgag

SEQ ID NO: 5738785 - DNA, 25 bp, Homo sapien
ttagtaattaaatagcaacgctcat

SEQ ID NO: 5738786 - DNA, 25 bp, Homo sapien
gggcggaggaggctgaggagtcact

SEQ ID NO: 5738787 - DNA, 25 bp, Homo sapien
tggggacagctgagctggtccatca

SEQ ID NO: 5738788 - DNA, 25 bp, Homo sapien
tcatgcgggggccgcgggcaggagt

SEQ ID NO: 5738789 - DNA, 25 bp, Homo sapien
gaaaaggagaagggatggggtctgg

SEQ ID NO: 5738790 - DNA, 25 bp, Homo sapien
ctagtggcccccccatgccagggca

SEQ ID NO: 5738791 - DNA, 25 bp, Homo sapien
gggggccgcgggcaggagtccctgg

SEQ ID NO: 5738792 - DNA, 25 bp, Homo sapien
gctgggtcgctccctccgggggcca

SEQ ID NO: 5738793 - DNA, 25 bp, Homo sapien
cccccaaccggaatgtacaacagag

SEQ ID NO: 5738794 - DNA, 25 bp, Homo sapien
ccgggctcgcccggcctcctctaag

SEQ ID NO: 5738795 - DNA, 25 bp, Homo sapien
cgcggctctggctccgggcccgccg

SEQ ID NO: 5738796 - DNA, 25 bp, Homo sapien
tttgccacccaggacgctgagggac

SEQ ID NO: 5738797 - DNA, 25 bp, Homo sapien
ggactggtggtgggcgacaccctct

SEQ ID NO: 5738798 - DNA, 25 bp, Homo sapien
gagccccggcgctcactcccaggga

SEQ ID NO: 5738799 - DNA, 25 bp, Homo sapien
ccatgcccggaccggccgagtcact

SEQ ID NO: 5738800 - DNA, 25 bp, Homo sapien
catgaggtctggtactcaagaggca

SEQ ID NO: 5738801 - DNA, 25 bp, Homo sapien
ggcgggcggctgccaatgcacgggc

SEQ ID NO: 5738802 - DNA, 25 bp, Homo sapien
ccccatgccagggcaggggctgcct

SEQ ID NO: 5738803 - DNA, 25 bp, Homo sapien
ccagcaggcccaggcgtgccccacg

SEQ ID NO: 5738804 - DNA, 25 bp, Homo sapien
cccacgccgcgccacctccagcagg

SEQ ID NO: 5738805 - DNA, 25 bp, Homo sapien
ggctggggtgggcgatgagcagtgg

SEQ ID NO: 5738806 - DNA, 25 bp, Homo sapien
cttgcgcagcaccaggtcctcagtc

SEQ ID NO: 5738807 - DNA, 25 bp, Homo sapien
cgcctggaaggccacacctcgggcc

SEQ ID NO: 5738808 - DNA, 25 bp, Homo sapien
ggcaggaacacagttcaggatcgct

SEQ ID NO: 5738809 - DNA, 25 bp, Homo sapien
atgccatgtccccagctctgcgggt

SEQ ID NO: 5738810 - DNA, 25 bp, Homo sapien
tctgagaccttgatcatgggaaact

SEQ ID NO: 5738811 - DNA, 25 bp, Homo sapien
gcgccacctccagcaggcacagcac

SEQ ID NO: 5738812 - DNA, 25 bp, Homo sapien
cacgcagctcccgctcaatctcctg

SEQ ID NO: 5738813 - DNA, 25 bp, Homo sapien
aatagcaacgctcatcccccaaccg

SEQ ID NO: 5738814 - DNA, 25 bp, Homo sapien
ctttactgtcagaggctctgctggg

SEQ ID NO: 5738815 - DNA, 25 bp, Homo sapien
tggaggagcagcggcacgggtcgtg

SEQ ID NO: 5738816 - DNA, 25 bp, Homo sapien
catcacatccaggaatctggctcag

SEQ ID NO: 5738817 - DNA, 25 bp, Homo sapien
cggaatgtacaacagaggtcccatt

SEQ ID NO: 5738818 - DNA, 25 bp, Homo sapien
gccctcggggtgactgagtgcaggg

SEQ ID NO: 5738819 - DNA, 25 bp, Homo sapien
ggtgtggtgcccaactctggactgg

SEQ ID NO: 5738820 - DNA, 25 bp, Homo sapien
tgagtgcagggcatgccatgtcccc

SEQ ID NO: 5738821 - DNA, 25 bp, Homo sapien
gttggcatgttggcacagggtcgtg

SEQ ID NO: 5738822 - DNA, 25 bp, Homo sapien
gcatctagtggcccccccatgccag

SEQ ID NO: 5738823 - DNA, 25 bp, Homo sapien
gtggccagccctgtcaggaagccat

SEQ ID NO: 5738824 - DNA, 25 bp, Homo sapien
ctgcagggctgcgggcacggggagt

SEQ ID NO: 5738825 - DNA, 25 bp, Homo sapien
caaggcattgagccactcggccagg

SEQ ID NO: 5738826 - DNA, 25 bp, Homo sapien
tgaaggtggccacgttgtcgcgcgc

SEQ ID NO: 5738827 - DNA, 25 bp, Homo sapien
gccgagtcactgtgggcaggaacac

SEQ ID NO: 5738828 - DNA, 25 bp, Homo sapien
ggggccagtgcctgtgtcatcactg

SEQ ID NO: 5738829 - DNA, 25 bp, Homo sapien
tgcacgggcagcctcggtcacggcg

SEQ ID NO: 5738830 - DNA, 25 bp, Homo sapien
tgccttcatcggaggagctggaaag

SEQ ID NO: 5738831 - DNA, 25 bp, Homo sapien
cctccttcatggcctccacgtaggc

SEQ ID NO: 5738832 - DNA, 25 bp, Homo sapien
acggtctggctgtgtgtccatccga

SEQ ID NO: 5738833 - DNA, 25 bp, Homo sapien
tctggggacagctgagctggtccat

SEQ ID NO: 5738834 - DNA, 25 bp, Homo sapien
atgtacaacagaggtcccattgtgc

SEQ ID NO: 5738835 - DNA, 25 bp, Homo sapien
gcacagcaccacgctcttctcgttc

SEQ ID NO: 5738836 - DNA, 25 bp, Homo sapien
gcgggggccccgaggcgtggggata

SEQ ID NO: 5738837 - DNA, 25 bp, Homo sapien
tagcggcgggagcggggatgggggg

SEQ ID NO: 5738838 - DNA, 25 bp, Homo sapien
tcaatctcctgctcaaactgcacga

SEQ ID NO: 5738839 - DNA, 25 bp, Homo sapien
tcactggagcgaaatggccgcacgc

SEQ ID NO: 5738840 - DNA, 25 bp, Homo sapien
cacacctcgggccgggcgggcggct

SEQ ID NO: 5738841 - DNA, 25 bp, Homo sapien
gcctgggtggggtctcgggcccctc

SEQ ID NO: 5738842 - DNA, 25 bp, Homo sapien
ggctggggaccgacagctgggctcc

SEQ ID NO: 5738843 - DNA, 25 bp, Homo sapien
cagagtccccaggttggccacattt

SEQ ID NO: 5738844 - DNA, 25 bp, Homo sapien
agccgatgaaggtggccacgttgtc

SEQ ID NO: 5738845 - DNA, 25 bp, Homo sapien
tcttccaggcgccggaacagctgct

SEQ ID NO: 5738846 - DNA, 25 bp, Homo sapien
gctcttctcgttcttgcgcagcacc

SEQ ID NO: 5738847 - DNA, 25 bp, Homo sapien
cggtcacggcgttggcatgttggca

SEQ ID NO: 5738848 - DNA, 25 bp, Homo sapien
agagggggctccctgatgcagaagg

SEQ ID NO: 5738849 - DNA, 25 bp, Homo sapien
cggggtgcctgtggtcagccgccgg

SEQ ID NO: 5738850 - DNA, 25 bp, Homo sapien
caggcactacactgtgcgcctggaa

SEQ ID NO: 5738851 - DNA, 25 bp, Homo sapien
aagggcccgggcattggccaggaac

SEQ ID NO: 5738852 - DNA, 25 bp, Homo sapien
cctggtgcgggggcggtttcagtgg

SEQ ID NO: 5738853 - DNA, 25 bp, Homo sapien
aagggggccgctctgggcggaggag

SEQ ID NO: 5738854 - DNA, 25 bp, Homo sapien
agctgggtcagggactggtccagtg

SEQ ID NO: 5738855 - DNA, 25 bp, Homo sapien
tgcgcctggaaggccacacctcggg

SEQ ID NO: 5738856 - DNA, 25 bp, Homo sapien
aaggtggccacgttgtcgcgcgcca

SEQ ID NO: 5738857 - DNA, 25 bp, Homo sapien
gcccgggcattggccaggaactcct

SEQ ID NO: 5738858 - DNA, 25 bp, Homo sapien
cagctgagctggtccatcacatcca

SEQ ID NO: 5738859 - DNA, 25 bp, Homo sapien
tggccgccgagcccgcgatgcccgc

SEQ ID NO: 5738860 - DNA, 25 bp, Homo sapien
gctctgctgggccacaggtcttcag

SEQ ID NO: 5738861 - DNA, 25 bp, Homo sapien
gtgcccaactctggactggggctgg

SEQ ID NO: 5738862 - DNA, 25 bp, Homo sapien
gccatgtccccagctctgcgggtcc

SEQ ID NO: 5738863 - DNA, 25 bp, Homo sapien
ctcgcaccatcacgtggctcctcag

SEQ ID NO: 5738864 - DNA, 25 bp, Homo sapien
tgtcagaggctctgctgggccacag

SEQ ID NO: 5738865 - DNA, 25 bp, Homo sapien
ttctcgttcttgcgcagcaccaggt

SEQ ID NO: 5738866 - DNA, 25 bp, Homo sapien
tggtgtcctccccagcggcaggggc

SEQ ID NO: 5738867 - DNA, 25 bp, Homo sapien
tccacgtaggcctcactggagcgaa

SEQ ID NO: 5738868 - DNA, 25 bp, Homo sapien
tggtgcccaactctggactggggct

SEQ ID NO: 5738869 - DNA, 25 bp, Homo sapien
caggtcgctgggtgtcatgcggggg

SEQ ID NO: 5738870 - DNA, 25 bp, Homo sapien
gttgcgcaggtcgctgggtgtcatg

SEQ ID NO: 5738871 - DNA, 25 bp, Homo sapien
agaatctccctcaccagctcgtcga

SEQ ID NO: 5738872 - DNA, 25 bp, Homo sapien
gccccgaggcgtggggatacgtgag

SEQ ID NO: 5738873 - DNA, 25 bp, Homo sapien
ggtactcaagaggcagagggggctc

SEQ ID NO: 5738874 - DNA, 25 bp, Homo sapien
ctaaggcattcaataatattagtaa

SEQ ID NO: 5738875 - DNA, 25 bp, Homo sapien
cacctcgggccgggcgggcggctgc

SEQ ID NO: 5738876 - DNA, 25 bp, Homo sapien
taccaagggggccgctctgggcgga

SEQ ID NO: 5738877 - DNA, 25 bp, Homo sapien
gcttgtccaggtaatgctccagcgt

SEQ ID NO: 5738878 - DNA, 25 bp, Homo sapien
gcggcaccagccgatgaaggtggcc

SEQ ID NO: 5738879 - DNA, 25 bp, Homo sapien
gctcccgctcaatctcctgctcaaa

SEQ ID NO: 5738880 - DNA, 25 bp, Homo sapien
gccacaaaggaaaaggagaagggat

SEQ ID NO: 5738881 - DNA, 25 bp, Homo sapien
cctcgggccgggcgggcggctgcca

SEQ ID NO: 5738882 - DNA, 25 bp, Homo sapien
cctctgtggagaaaaggtgcagacc

SEQ ID NO: 5738883 - DNA, 25 bp, Homo sapien
gactggtccagtgggggtcacgcta

SEQ ID NO: 5738884 - DNA, 25 bp, Homo sapien
gcggggactggtggtgggcgacacc

SEQ ID NO: 5738885 - DNA, 25 bp, Homo sapien
tctggggggtgctcctgcccgagcc

SEQ ID NO: 5738886 - DNA, 25 bp, Homo sapien
aggggtgtgcggaagatgctggccg

SEQ ID NO: 5738887 - DNA, 25 bp, Homo sapien
tccatccgaccccgtgcccaggtcc

SEQ ID NO: 5738888 - DNA, 25 bp, Homo sapien
gatgcccgccactgggtctgccatg

SEQ ID NO: 5738889 - DNA, 25 bp, Homo sapien
tgggggctgggggtgcagcacgcag

SEQ ID NO: 5738890 - DNA, 25 bp, Homo sapien
gtcgcgcgccatgaaggagccaggc

SEQ ID NO: 5738891 - DNA, 25 bp, Homo sapien
gttcaggatcgctggctcatcccgc

SEQ ID NO: 5738892 - DNA, 25 bp, Homo sapien
cacgttgtcgcgcgccatgaaggag

SEQ ID NO: 5738893 - DNA, 25 bp, Homo sapien
gcgggggcggtttcagtggtgtcct

SEQ ID NO: 5738894 - DNA, 25 bp, Homo sapien
cagaagggttaaggccacaaaggaa

SEQ ID NO: 5738895 - DNA, 25 bp, Homo sapien
gggggcggtttcagtggtgtcctcc

SEQ ID NO: 5738896 - DNA, 25 bp, Homo sapien
accgacagctgggctcccctgcctc

SEQ ID NO: 5738897 - DNA, 25 bp, Homo sapien
tcggagaggccggggtgcctgtggt

SEQ ID NO: 5738898 - DNA, 25 bp, Homo sapien
gggtgtgcggaagatgctggccggt

SEQ ID NO: 5738899 - DNA, 25 bp, Homo sapien
ctctggactggggctggagacccgg

SEQ ID NO: 5738900 - DNA, 25 bp, Homo sapien
cacggtacttcccctctgagacctt

SEQ ID NO: 5738901 - DNA, 25 bp, Homo sapien
cccgtgcccaggtcctcgagggttc

SEQ ID NO: 5738902 - DNA, 25 bp, Homo sapien
aactcctcttccaggcgccggaaca

SEQ ID NO: 5738903 - DNA, 25 bp, Homo sapien
acaacagaggtcccattgtgccatg

SEQ ID NO: 5738904 - DNA, 25 bp, Homo sapien
ctgatgcagaagggttaaggccaca

SEQ ID NO: 5738905 - DNA, 25 bp, Homo sapien
gccacaggtcttcagaacaccgggc

SEQ ID NO: 5738906 - DNA, 25 bp, Homo sapien
gcacacccagctccacgcggcacca

SEQ ID NO: 5738907 - DNA, 25 bp, Homo sapien
ccagccaccacccactcgcaccatc

SEQ ID NO: 5738908 - DNA, 25 bp, Homo sapien
ccccggggagcattgccccagcggg

SEQ ID NO: 5738909 - DNA, 25 bp, Homo sapien
cccaaccggaatgtacaacagaggt

SEQ ID NO: 5738910 - DNA, 25 bp, Homo sapien
gagctggaaagggcttggcttcggg

SEQ ID NO: 5738911 - DNA, 25 bp, Homo sapien
agcattgccccagcgggggccggag

SEQ ID NO: 5738912 - DNA, 25 bp, Homo sapien
agggctgcgggcacggggagtctgg

SEQ ID NO: 5738913 - DNA, 25 bp, Homo sapien
tcagtggtgtcctccccagcggcag

SEQ ID NO: 5738914 - DNA, 25 bp, Homo sapien
cagtctcaaacatgagcacctccgg

SEQ ID NO: 5738915 - DNA, 25 bp, Homo sapien
gccgcgatccagccggtctcgggac

SEQ ID NO: 5738916 - DNA, 25 bp, Homo sapien
tgtgcttcgtaagctaacgggagtc

SEQ ID NO: 5738917 - DNA, 25 bp, Homo sapien
caccgggctcgcccggcctcctcta

SEQ ID NO: 5738918 - DNA, 25 bp, Homo sapien
gcggaagatgctggccggtgtggtg

SEQ ID NO: 5738919 - DNA, 25 bp, Homo sapien
agtgcagggcatgccatgtccccag

SEQ ID NO: 5738920 - DNA, 25 bp, Homo sapien
tctcggagaggccggggtgcctgtg

SEQ ID NO: 5738921 - DNA, 25 bp, Homo sapien
tcagccgccggctgggtcgctccct

SEQ ID NO: 5738922 - DNA, 25 bp, Homo sapien
gaacagctgctgctcctgctgcggg

SEQ ID NO: 5738923 - DNA, 25 bp, Homo sapien
gctgccttcatcggaggagctggaa

SEQ ID NO: 5738924 - DNA, 25 bp, Homo sapien
ccgcacaaagatgagcaggctcgag

SEQ ID NO: 5738925 - DNA, 25 bp, Homo sapien
agccaccacccactcgcaccatcac

SEQ ID NO: 5738926 - DNA, 25 bp, Homo sapien
gtcctccccagcggcaggggcgttg

SEQ ID NO: 5738927 - DNA, 25 bp, Homo sapien
agaccctcggctggggtgggcgatg

SEQ ID NO: 5738928 - DNA, 25 bp, Homo sapien
tcaggagctggagggtcgggggccc

SEQ ID NO: 5738929 - DNA, 25 bp, Homo sapien
ctcagtctcaaacatgagcacctcc

SEQ ID NO: 5738930 - DNA, 25 bp, Homo sapien
ccagtgcctgtgtcatcactgcggg

SEQ ID NO: 5738931 - DNA, 25 bp, Homo sapien
agtggtgtcctccccagcggcaggg

SEQ ID NO: 5738932 - DNA, 25 bp, Homo sapien
ctcgatccctgcgcacaagcagcac

SEQ ID NO: 5738933 - DNA, 25 bp, Homo sapien
gcatgttggcacagggtcgtgcccg

SEQ ID NO: 5738934 - DNA, 25 bp, Homo sapien
ggctgaggagtcactgtccccggag

SEQ ID NO: 5738935 - DNA, 25 bp, Homo sapien
ggtcccaaggggtctggtcccatga

SEQ ID NO: 5738936 - DNA, 25 bp, Homo sapien
agctccacgcggcaccagccgatga

SEQ ID NO: 5738937 - DNA, 25 bp, Homo sapien
gccggccgcgatccagccggtctcg

SEQ ID NO: 5738938 - DNA, 25 bp, Homo sapien
cgctcatcccccaaccggaatgtac

SEQ ID NO: 5738939 - DNA, 25 bp, Homo sapien
gggcgttgggggctgggggtgcagc

SEQ ID NO: 5738940 - DNA, 25 bp, Homo sapien
tggtggtgggcgacaccctctgtgg

SEQ ID NO: 5738941 - DNA, 25 bp, Homo sapien
gtccccaggttggccacatttgcca

SEQ ID NO: 5738942 - DNA, 25 bp, Homo sapien
gtggtgggcgacaccctctgtggag

SEQ ID NO: 5738943 - DNA, 25 bp, Homo sapien
ctgctgctcctgctgcgggtcgagc

SEQ ID NO: 5738944 - DNA, 25 bp, Homo sapien
gccacctccagcaggcacagcacca

SEQ ID NO: 5738945 - DNA, 25 bp, Homo sapien
tcggctggggtgggcgatgagcagt

SEQ ID NO: 5738946 - DNA, 25 bp, Homo sapien
ttgtcgcgcgccatgaaggagccag

SEQ ID NO: 5738947 - DNA, 25 bp, Homo sapien
cggccagagtccccaggttggccac

SEQ ID NO: 5738948 - DNA, 25 bp, Homo sapien
cagctcgtcgaggttgcgcaggtcg

SEQ ID NO: 5738949 - DNA, 25 bp, Homo sapien
tccctcaccagctcgtcgaggttgc

SEQ ID NO: 5738950 - DNA, 25 bp, Homo sapien
tcccaggtgcatctagtggcccccc

SEQ ID NO: 5738951 - DNA, 25 bp, Homo sapien
atcacgtggctcctcagcacccgca

SEQ ID NO: 5738952 - DNA, 25 bp, Homo sapien
gatgaaggtggccacgttgtcgcgc

SEQ ID NO: 5738953 - DNA, 25 bp, Homo sapien
ccacccaggacgctgagggacgaag

SEQ ID NO: 5738954 - DNA, 25 bp, Homo sapien
tccccagctctgcgggtccggaggg

SEQ ID NO: 5738955 - DNA, 25 bp, Homo sapien
atcccccaaccggaatgtacaacag

SEQ ID NO: 5738956 - DNA, 25 bp, Homo sapien
ccttggcacccatgagtgctgcccg

SEQ ID NO: 5738957 - DNA, 25 bp, Homo sapien
aggatcgctggctcatcccgcggcc

SEQ ID NO: 5738958 - DNA, 25 bp, Homo sapien
gccggaacagctgctgctcctgctg

SEQ ID NO: 5738959 - DNA, 25 bp, Homo sapien
ccaggcgccggaacagctgctgctc

SEQ ID NO: 5738960 - DNA, 25 bp, Homo sapien
atctggctcagccctcggggtgact

SEQ ID NO: 5738961 - DNA, 25 bp, Homo sapien
caggagtccctggtgcgggggcggt

SEQ ID NO: 5738962 - DNA, 25 bp, Homo sapien
gggactggctgcgcagggcaggagg

SEQ ID NO: 5738963 - DNA, 25 bp, Homo sapien
agcacctccggcacacccagctcca

SEQ ID NO: 5738964 - DNA, 25 bp, Homo sapien
gcggaggaggctgaggagtcactgt

SEQ ID NO: 5738965 - DNA, 25 bp, Homo sapien
gcgggagcggggatgggggggcagc

SEQ ID NO: 5738966 - DNA, 25 bp, Homo sapien
tcggccaggtcctccttcatggcct

SEQ ID NO: 5738967 - DNA, 25 bp, Homo sapien
cgtggctcctcagcacccgcacaaa

SEQ ID NO: 5738968 - DNA, 25 bp, Homo sapien
ccgagcccgcgatgcccgccactgg

SEQ ID NO: 5738969 - DNA, 25 bp, Homo sapien
tgcttcgtaagctaacgggagtcat

SEQ ID NO: 5738970 - DNA, 25 bp, Homo sapien
attgtgccatgtggtcccaaggggt

SEQ ID NO: 5738971 - DNA, 25 bp, Homo sapien
cccggggccggccgcgatccagccg

SEQ ID NO: 5738972 - DNA, 25 bp, Homo sapien
gggcagctgatcccggggcctgggt

SEQ ID NO: 5738973 - DNA, 25 bp, Homo sapien
tcgggcccctcctttgtgcttcgta

SEQ ID NO: 5738974 - DNA, 25 bp, Homo sapien
tgggcgacaccctctgtggagaaaa

SEQ ID NO: 5738975 - DNA, 25 bp, Homo sapien
gcgttggcatgttggcacagggtcg

SEQ ID NO: 5738976 - DNA, 25 bp, Homo sapien
gggcatgccatgtccccagctctgc

SEQ ID NO: 5738977 - DNA, 25 bp, Homo sapien
aacagaggtcccattgtgccatgtg

SEQ ID NO: 5738978 - DNA, 25 bp, Homo sapien
cctcttccaggcgccggaacagctg

SEQ ID NO: 5738979 - DNA, 25 bp, Homo sapien
ctgggtcagggactggtccagtggg

SEQ ID NO: 5738980 - DNA, 25 bp, Homo sapien
caggtcctcagtctcaaacatgagc

SEQ ID NO: 5738981 - DNA, 25 bp, Homo sapien
tgagccactcggccaggtcctcctt

SEQ ID NO: 5738982 - DNA, 25 bp, Homo sapien
cttgatcatgggaaactggtcaggg

SEQ ID NO: 5738983 - DNA, 25 bp, Homo sapien
actggtcagggcaggtgcagcggcc

SEQ ID NO: 5738984 - DNA, 25 bp, Homo sapien
ccaggccgtacaaggcattgagcca

SEQ ID NO: 5738985 - DNA, 25 bp, Homo sapien
cgccactgggtctgccatgcccgga

SEQ ID NO: 5738986 - DNA, 25 bp, Homo sapien
cgccatgaaggagccaggcactaca

SEQ ID NO: 5738987 - DNA, 25 bp, Homo sapien
cccgccactgggtctgccatgcccg

SEQ ID NO: 5738988 - DNA, 25 bp, Homo sapien
gcaggctcgagtcccccacacggta

SEQ ID NO: 5738989 - DNA, 25 bp, Homo sapien
gtcagggactggtccagtgggggtc

SEQ ID NO: 5738990 - DNA, 25 bp, Homo sapien
aagccatcgccaccacccgggagac

SEQ ID NO: 5738991 - DNA, 25 bp, Homo sapien
accggaatgtacaacagaggtccca

SEQ ID NO: 5738992 - DNA, 25 bp, Homo sapien
gggcagggctggggaccgacagctg

SEQ ID NO: 5738993 - DNA, 25 bp, Homo sapien
cagaacaccgggctcgcccggcctc

SEQ ID NO: 5738994 - DNA, 25 bp, Homo sapien
aatggccgcacgctcttggccgccg

SEQ ID NO: 5738995 - DNA, 25 bp, Homo sapien
tagcaacgctcatcccccaaccgga

SEQ ID NO: 5738996 - DNA, 25 bp, Homo sapien
actgcacgaggcgtggggccagcag

SEQ ID NO: 5738997 - DNA, 25 bp, Homo sapien
cgctcttggccgccgagcccgcgat

SEQ ID NO: 5738998 - DNA, 25 bp, Homo sapien
ccgcagggaggcgccgcccgagccg

SEQ ID NO: 5738999 - DNA, 25 bp, Homo sapien
agagtcaggagctggagggtcgggg

SEQ ID NO: 5739000 - DNA, 25 bp, Homo sapien
tgtccccagctctgcgggtccggag

SEQ ID NO: 5739001 - DNA, 25 bp, Homo sapien
ccagctccacgcggcaccagccgat

SEQ ID NO: 5739002 - DNA, 25 bp, Homo sapien
cagtgcaagccagggggctcccagg

SEQ ID NO: 5739003 - DNA, 25 bp, Homo sapien
gcagctgatcccggggcctgggtgg

SEQ ID NO: 5739004 - DNA, 25 bp, Homo sapien
gagaaaaggtgcagaccctcggctg

SEQ ID NO: 5739005 - DNA, 25 bp, Homo sapien
cgtctcggagaggccggggtgcctg

SEQ ID NO: 5739006 - DNA, 25 bp, Homo sapien
cagggcatgccatgtccccagctct

SEQ ID NO: 5739007 - DNA, 25 bp, Homo sapien
cccatgaggtctggtactcaagagg

SEQ ID NO: 5739008 - DNA, 25 bp, Homo sapien
ccgatgaaggtggccacgttgtcgc

SEQ ID NO: 5739009 - DNA, 25 bp, Homo sapien
atgcccggaccggccgagtcactgt

SEQ ID NO: 5739010 - DNA, 25 bp, Homo sapien
aggctctgctgggccacaggtcttc

SEQ ID NO: 5739011 - DNA, 25 bp, Homo sapien
cactcgcaccatcacgtggctcctc

SEQ ID NO: 5739012 - DNA, 25 bp, Homo sapien
cgggggccagtgcctgtgtcatcac

SEQ ID NO: 5739013 - DNA, 25 bp, Homo sapien
ctccctgatgcagaagggttaaggc

SEQ ID NO: 5739014 - DNA, 25 bp, Homo sapien
gccaggaactcctcttccaggcgcc

SEQ ID NO: 5739015 - DNA, 25 bp, Homo sapien
cgagctgcaggggtgtgcggaagat

SEQ ID NO: 5739016 - DNA, 25 bp, Homo sapien
gcgggtcgagctgcaggggtgtgcg

SEQ ID NO: 5739017 - DNA, 25 bp, Homo sapien
acccagctccacgcggcaccagccg

SEQ ID NO: 5739018 - DNA, 25 bp, Homo sapien
ctccacgcggcaccagccgatgaag

SEQ ID NO: 5739019 - DNA, 25 bp, Homo sapien
ggaaactggtcagggcaggtgcagc

SEQ ID NO: 5739020 - DNA, 25 bp, Homo sapien
cctccacgtaggcctcactggagcg

SEQ ID NO: 5739021 - DNA, 25 bp, Homo sapien
acacccagctccacgcggcaccagc

SEQ ID NO: 5739022 - DNA, 25 bp, Homo sapien
tgtcccagccaccacccactcgcac

SEQ ID NO: 5739023 - DNA, 25 bp, Homo sapien
ccccttggcacccatgagtgctgcc

SEQ ID NO: 5739024 - DNA, 25 bp, Homo sapien
acccgcacaaagatgagcaggctcg

SEQ ID NO: 5739025 - DNA, 25 bp, Homo sapien
cgctctgggcggaggaggctgagga

SEQ ID NO: 5739026 - DNA, 25 bp, Homo sapien
tcactgtgggcaggaacacagttca

SEQ ID NO: 5739027 - DNA, 25 bp, Homo sapien
tgtgcgcctggaaggccacacctcg

SEQ ID NO: 5739028 - DNA, 25 bp, Homo sapien
ggaggcgccgcccgagccgcagctc

SEQ ID NO: 5739029 - DNA, 25 bp, Homo sapien
ctggctgcgcagggcaggaggccgt

SEQ ID NO: 5739030 - DNA, 25 bp, Homo sapien
gggggtgctcctgcccgagccccca

SEQ ID NO: 5739031 - DNA, 25 bp, Homo sapien
cgagctgggtcagggactggtccag

SEQ ID NO: 5739032 - DNA, 25 bp, Homo sapien
actgtgggcaggaacacagttcagg

SEQ ID NO: 5739033 - DNA, 25 bp, Homo sapien
tccttcatggcctccacgtaggcct

SEQ ID NO: 5739034 - DNA, 25 bp, Homo sapien
aggtgcagcggcccagaatctccct

SEQ ID NO: 5739035 - DNA, 25 bp, Homo sapien
gccggctgggtcgctccctccgggg

SEQ ID NO: 5739036 - DNA, 25 bp, Homo sapien
cttcatggcctccacgtaggcctca

SEQ ID NO: 5739037 - DNA, 25 bp, Homo sapien
ggcactacactgtgcgcctggaagg

SEQ ID NO: 5739038 - DNA, 25 bp, Homo sapien
ccaatgcacgggcagcctcggtcac

SEQ ID NO: 5739039 - DNA, 25 bp, Homo sapien
tcgggccgggcgggcggctgccaat

SEQ ID NO: 5739040 - DNA, 25 bp, Homo sapien
ggtctggtcccatgaggtctggtac

SEQ ID NO: 5739041 - DNA, 25 bp, Homo sapien
tggagacccgggaaagccggggtgc

SEQ ID NO: 5739042 - DNA, 25 bp, Homo sapien
gaggagcagcggcacgggtcgtgct

SEQ ID NO: 5739043 - DNA, 25 bp, Homo sapien
caggtcctcgagggttcagtgcaag

SEQ ID NO: 5739044 - DNA, 25 bp, Homo sapien
ctggggaccgacagctgggctcccc

SEQ ID NO: 5739045 - DNA, 25 bp, Homo sapien
cgcacgctcttggccgccgagcccg

SEQ ID NO: 5739046 - DNA, 25 bp, Homo sapien
ggcgatgagcagtggaggagcagcg

SEQ ID NO: 5739047 - DNA, 25 bp, Homo sapien
tggaaggccacacctcgggccgggc

SEQ ID NO: 5739048 - DNA, 25 bp, Homo sapien
agaccttgatcatgggaaactggtc

SEQ ID NO: 5739049 - DNA, 25 bp, Homo sapien
gccaggcactacactgtgcgcctgg

SEQ ID NO: 5739050 - DNA, 25 bp, Homo sapien
cagcggcacgggtcgtgcttgtcca

SEQ ID NO: 5739051 - DNA, 25 bp, Homo sapien
gcaggcacagcaccacgctcttctc

SEQ ID NO: 5739052 - DNA, 25 bp, Homo sapien
gagcggggatgggggggcagctgat

SEQ ID NO: 5739053 - DNA, 25 bp, Homo sapien
ggccaggtcctccttcatggcctcc

SEQ ID NO: 5739054 - DNA, 25 bp, Homo sapien
aggccggggtgcctgtggtcagccg

SEQ ID NO: 5739055 - DNA, 25 bp, Homo sapien
agccgccggctgggtcgctccctcc

SEQ ID NO: 5739056 - DNA, 25 bp, Homo sapien
gctgagctggtccatcacatccagg

SEQ ID NO: 5739057 - DNA, 25 bp, Homo sapien
acgtgagggtttacggtctggctgt

SEQ ID NO: 5739058 - DNA, 25 bp, Homo sapien
tggggctggagacccgggaaagccg

SEQ ID NO: 5739059 - DNA, 25 bp, Homo sapien
tgccacccaggacgctgagggacga

SEQ ID NO: 5739060 - DNA, 25 bp, Homo sapien
gaactggaggaacaataggcagagt

SEQ ID NO: 5739061 - DNA, 25 bp, Homo sapien
catcggaggagctggaaagggcttg

SEQ ID NO: 5739062 - DNA, 25 bp, Homo sapien
ggtctcgggactggctgcgcagggc

SEQ ID NO: 5739063 - DNA, 25 bp, Homo sapien
ggaacaataggcagagtcaggagct

SEQ ID NO: 5739064 - DNA, 25 bp, Homo sapien
cggggccggccgcgatccagccggt

SEQ ID NO: 5739065 - DNA, 25 bp, Homo sapien
agggggctccctgatgcagaagggt

SEQ ID NO: 5739066 - DNA, 25 bp, Homo sapien
taaggccacaaaggaaaaggagaag

SEQ ID NO: 5739067 - DNA, 25 bp, Homo sapien
ggtgtcatgcgggggccgcgggcag

SEQ ID NO: 5739068 - DNA, 25 bp, Homo sapien
cgcgggcaggagtccctggtgcggg

SEQ ID NO: 5739069 - DNA, 25 bp, Homo sapien
caggaactcctcttccaggcgccgg

SEQ ID NO: 5739070 - DNA, 25 bp, Homo sapien
gggcccgggcattggccaggaactc

SEQ ID NO: 5739071 - DNA, 25 bp, Homo sapien
cacaaaggaaaaggagaagggatgg

SEQ ID NO: 5739072 - DNA, 25 bp, Homo sapien
cagggcggggactggtggtgggcga

SEQ ID NO: 5739073 - DNA, 25 bp, Homo sapien
cccgccgggcagggctggggaccga

SEQ ID NO: 5739074 - DNA, 25 bp, Homo sapien
aagcagcacagcctgctcctcgcgg

SEQ ID NO: 5739075 - DNA, 25 bp, Homo sapien
gggctcgcccggcctcctctaaggc

SEQ ID NO: 5739076 - DNA, 25 bp, Homo sapien
tcctgctcaaactgcacgaggcgtg

SEQ ID NO: 5739077 - DNA, 25 bp, Homo sapien
gtcagggcaggtgcagcggcccaga

SEQ ID NO: 5739078 - DNA, 25 bp, Homo sapien
ccgcgatgcccgccactgggtctgc

SEQ ID NO: 5739079 - DNA, 25 bp, Homo sapien
ccatgtggtcccaaggggtctggtc

SEQ ID NO: 5739080 - DNA, 25 bp, Homo sapien
gccggagccgggccgggccgccgca

SEQ ID NO: 5739081 - DNA, 25 bp, Homo sapien
cacccgggagacccaggccgtacaa

SEQ ID NO: 5739082 - DNA, 25 bp, Homo sapien
ggcacccatgagtgctgcccgtctc

SEQ ID NO: 5739083 - DNA, 25 bp, Homo sapien
gtgcggaagatgctggccggtgtgg

SEQ ID NO: 5739084 - DNA, 25 bp, Homo sapien
taattaaatagcaacgctcatcccc

SEQ ID NO: 5739085 - DNA, 25 bp, Homo sapien
agccggggtgctgcagggctgcggg

SEQ ID NO: 5739086 - DNA, 25 bp, Homo sapien
acgctcttctcgttcttgcgcagca

SEQ ID NO: 5739087 - DNA, 25 bp, Homo sapien
gcccattggccgtccggccagagtc

SEQ ID NO: 5739088 - DNA, 25 bp, Homo sapien
gcacaagcagcacagcctgctcctc

SEQ ID NO: 5739089 - DNA, 25 bp, Homo sapien
ttgtccaggtaatgctccagcgtgt

SEQ ID NO: 5739090 - DNA, 25 bp, Homo sapien
gcggtttcagtggtgtcctccccag

SEQ ID NO: 5739091 - DNA, 25 bp, Homo sapien
gagccgggccgggccgccgcaggga

SEQ ID NO: 5739092 - DNA, 25 bp, Homo sapien
cgcgatccagccggtctcgggactg

SEQ ID NO: 5739093 - DNA, 25 bp, Homo sapien
ggcccgccgggcagggctggggacc

SEQ ID NO: 5739094 - DNA, 25 bp, Homo sapien
cggcgggagcggggatgggggggca

SEQ ID NO: 5739095 - DNA, 25 bp, Homo sapien
tcatcactgcgggtaccaagggggc

SEQ ID NO: 5739096 - DNA, 25 bp, Homo sapien
ttacggtctggctgtgtgtccatcc

SEQ ID NO: 5739097 - DNA, 25 bp, Homo sapien
tcaggatcgctggctcatcccgcgg

SEQ ID NO: 5739098 - DNA, 25 bp, Homo sapien
gtcaggaagccatcgccaccacccg

SEQ ID NO: 5739099 - DNA, 25 bp, Homo sapien
gccgcccgagccgcagctctatgcg

SEQ ID NO: 5739100 - DNA, 25 bp, Homo sapien
caggaagccatcgccaccacccggg

SEQ ID NO: 5739101 - DNA, 25 bp, Homo sapien
tgggcaggaacacagttcaggatcg

SEQ ID NO: 5739102 - DNA, 25 bp, Homo sapien
gggcaggggctgccttcatcggagg

SEQ ID NO: 5739103 - DNA, 25 bp, Homo sapien
tgtgtgtccatccgaccccgtgccc

SEQ ID NO: 5739104 - DNA, 25 bp, Homo sapien
ttccaggcgccggaacagctgctgc

SEQ ID NO: 5739105 - DNA, 25 bp, Homo sapien
cccactcgcaccatcacgtggctcc

SEQ ID NO: 5739106 - DNA, 25 bp, Homo sapien
cattgccccagcgggggccggagcc

SEQ ID NO: 5739107 - DNA, 25 bp, Homo sapien
cgcagcaccaggtcctcagtctcaa

SEQ ID NO: 5739108 - DNA, 25 bp, Homo sapien
aaaggtgcagaccctcggctggggt

SEQ ID NO: 5739109 - DNA, 25 bp, Homo sapien
cccaggtcctcgagggttcagtgca

SEQ ID NO: 5739110 - DNA, 25 bp, Homo sapien
gcaggggcgttgggggctgggggtg

SEQ ID NO: 5739111 - DNA, 25 bp, Homo sapien
ggccgggccgccgcagggaggcgcc

SEQ ID NO: 5739112 - DNA, 25 bp, Homo sapien
gttgggggctgggggtgcagcacgc

SEQ ID NO: 5739113 - DNA, 25 bp, Homo sapien
aggcgtggggccagcaggcccaggc

SEQ ID NO: 5739114 - DNA, 25 bp, Homo sapien
ggggagtctggggggtgctcctgcc

SEQ ID NO: 5739115 - DNA, 25 bp, Homo sapien
tctgccatgcccggaccggccgagt

SEQ ID NO: 5739116 - DNA, 25 bp, Homo sapien
ggggccagcaggcccaggcgtgccc

SEQ ID NO: 5739117 - DNA, 25 bp, Homo sapien
ggagcattgccccagcgggggccgg

SEQ ID NO: 5739118 - DNA, 25 bp, Homo sapien
ggggcccaggcagcccattggccgt

SEQ ID NO: 5739119 - DNA, 25 bp, Homo sapien
cgggcccgccgggcagggctgggga

SEQ ID NO: 5739120 - DNA, 25 bp, Homo sapien
tcctcagtctcaaacatgagcacct

SEQ ID NO: 5739121 - DNA, 25 bp, Homo sapien
gccgccgagcccgcgatgcccgcca

SEQ ID NO: 5739122 - DNA, 25 bp, Homo sapien
agatgagcaggctcgagtcccccac

SEQ ID NO: 5739123 - DNA, 25 bp, Homo sapien
tgcagggcatgccatgtccccagct

SEQ ID NO: 5739124 - DNA, 25 bp, Homo sapien
aaaactttactgtcagaggctctgc

SEQ ID NO: 5739125 - DNA, 25 bp, Homo sapien
ggggtgggcgatgagcagtggagga

SEQ ID NO: 5739126 - DNA, 25 bp, Homo sapien
gctaacgggagtcatctcaggccgg

SEQ ID NO: 5739127 - DNA, 25 bp, Homo sapien
tgcgcagcaccaggtcctcagtctc

SEQ ID NO: 5739128 - DNA, 25 bp, Homo sapien
aggcgccgcccgagccgcagctcta

SEQ ID NO: 5739129 - DNA, 25 bp, Homo sapien
aggtgcagaccctcggctggggtgg

SEQ ID NO: 5739130 - DNA, 25 bp, Homo sapien
cggtacttcccctctgagaccttga

SEQ ID NO: 5739131 - DNA, 25 bp, Homo sapien
tcctcgagggttcagtgcaagccag

SEQ ID NO: 5739132 - DNA, 25 bp, Homo sapien
accagctcgtcgaggttgcgcaggt

SEQ ID NO: 5739133 - DNA, 25 bp, Homo sapien
ctggtactcaagaggcagagggggc

SEQ ID NO: 5739134 - DNA, 25 bp, Homo sapien
tgtgggcaggaacacagttcaggat

SEQ ID NO: 5739135 - DNA, 25 bp, Homo sapien
gcgggggccgcgggcaggagtccct

SEQ ID NO: 5739136 - DNA, 25 bp, Homo sapien
atgcgggggccgcgggcaggagtcc

SEQ ID NO: 5739137 - DNA, 25 bp, Homo sapien
tattagtaattaaatagcaacgctc

SEQ ID NO: 5739138 - DNA, 25 bp, Homo sapien
ggaaagccggggtgctgcagggctg

SEQ ID NO: 5739139 - DNA, 25 bp, Homo sapien
actgggctagcagggcggggactgg

SEQ ID NO: 5739140 - DNA, 25 bp, Homo sapien
aactctggactggggctggagaccc

SEQ ID NO: 5739141 - DNA, 25 bp, Homo sapien
ctgaggagtcactgtccccggagta

SEQ ID NO: 5739142 - DNA, 25 bp, Homo sapien
atgccagggcaggggctgccttcat

SEQ ID NO: 5739143 - DNA, 25 bp, Homo sapien
atgagcagtggaggagcagcggcac

SEQ ID NO: 5739144 - DNA, 25 bp, Homo sapien
cagcggcaggggcgttgggggctgg

SEQ ID NO: 5739145 - DNA, 25 bp, Homo sapien
ggaccggccgagtcactgtgggcag

SEQ ID NO: 5739146 - DNA, 25 bp, Homo sapien
cttcgtaagctaacgggagtcatct

SEQ ID NO: 5739147 - DNA, 25 bp, Homo sapien
gtcgaggttgcgcaggtcgctgggt

SEQ ID NO: 5739148 - DNA, 25 bp, Homo sapien
gctccgggcccgccgggcagggctg

SEQ ID NO: 5739149 - DNA, 25 bp, Homo sapien
gggccgccgcagggaggcgccgccc

SEQ ID NO: 5739150 - DNA, 25 bp, Homo sapien
cctcactggagcgaaatggccgcac

SEQ ID NO: 5739151 - DNA, 25 bp, Homo sapien
aagggcttggcttcggggcccaggc

SEQ ID NO: 5739152 - DNA, 25 bp, Homo sapien
tcgtaagctaacgggagtcatctca

SEQ ID NO: 5739153 - DNA, 25 bp, Homo sapien
ggatgggggggcagctgatcccggg

SEQ ID NO: 5739154 - DNA, 25 bp, Homo sapien
attggccgtccggccagagtcccca

SEQ ID NO: 5739155 - DNA, 25 bp, Homo sapien
agaggcagagggggctccctgatgc

SEQ ID NO: 5739156 - DNA, 25 bp, Homo sapien
gtggggccagcaggcccaggcgtgc

SEQ ID NO: 5739157 - DNA, 25 bp, Homo sapien
ccaactctggactggggctggagac

SEQ ID NO: 5739158 - DNA, 25 bp, Homo sapien
cggcgctcactcccagggactgggc

SEQ ID NO: 5739159 - DNA, 25 bp, Homo sapien
tgggcgatgagcagtggaggagcag

SEQ ID NO: 5739160 - DNA, 25 bp, Homo sapien
cttcggggcccaggcagcccattgg

SEQ ID NO: 5739161 - DNA, 25 bp, Homo sapien
tcgccaccacccgggagacccaggc

SEQ ID NO: 5739162 - DNA, 25 bp, Homo sapien
agtctggggggtgctcctgcccgag

SEQ ID NO: 5739163 - DNA, 25 bp, Homo sapien
gtcacggcgttggcatgttggcaca

SEQ ID NO: 5739164 - DNA, 25 bp, Homo sapien
ttggcacccatgagtgctgcccgtc

SEQ ID NO: 5739165 - DNA, 25 bp, Homo sapien
actcccagggactgggctagcaggg

SEQ ID NO: 5739166 - DNA, 25 bp, Homo sapien
cagaggtcccattgtgccatgtggt

SEQ ID NO: 5739167 - DNA, 25 bp, Homo sapien
gaggtcccattgtgccatgtggtcc

SEQ ID NO: 5739168 - DNA, 25 bp, Homo sapien
gctgggtgtcatgcgggggccgcgg

SEQ ID NO: 5739169 - DNA, 25 bp, Homo sapien
agcacagcctgctcctcgcggctct

SEQ ID NO: 5739170 - DNA, 25 bp, Homo sapien
cagttcaggatcgctggctcatccc

SEQ ID NO: 5739171 - DNA, 25 bp, Homo sapien
tcccagccaccacccactcgcacca

SEQ ID NO: 5739172 - DNA, 25 bp, Homo sapien
gtctcaaacatgagcacctccggca

SEQ ID NO: 5739173 - DNA, 25 bp, Homo sapien
actggagcgaaatggccgcacgctc

SEQ ID NO: 5739174 - DNA, 25 bp, Homo sapien
cgctagcaacagcctcaagggcccg

SEQ ID NO: 5739175 - DNA, 25 bp, Homo sapien
cagggggctcccaggtgcatctagt

SEQ ID NO: 5739176 - DNA, 25 bp, Homo sapien
ggggcccgagctgggtcagggactg

SEQ ID NO: 5739177 - DNA, 25 bp, Homo sapien
tccgaccccgtgcccaggtcctcga

SEQ ID NO: 5739178 - DNA, 25 bp, Homo sapien
tcagaggctctgctgggccacaggt

SEQ ID NO: 5739179 - DNA, 25 bp, Homo sapien
tggcacagggtcgtgcccgtggcca

SEQ ID NO: 5739180 - DNA, 25 bp, Homo sapien
cactgcgggtaccaagggggccgct

SEQ ID NO: 5739181 - DNA, 25 bp, Homo sapien
aggttgcgcaggtcgctgggtgtca

SEQ ID NO: 5739182 - DNA, 25 bp, Homo sapien
ggtttcagtggtgtcctccccagcg

SEQ ID NO: 5739183 - DNA, 25 bp, Homo sapien
actcggccaggtcctccttcatggc

SEQ ID NO: 5739184 - DNA, 25 bp, Homo sapien
ctcctttgtgcttcgtaagctaacg

SEQ ID NO: 5739185 - DNA, 25 bp, Homo sapien
gcagaccctcggctggggtgggcga

SEQ ID NO: 5739186 - DNA, 25 bp, Homo sapien
accctctgtggagaaaaggtgcaga

SEQ ID NO: 5739187 - DNA, 25 bp, Homo sapien
aggggcgttgggggctgggggtgca

SEQ ID NO: 5739188 - DNA, 25 bp, Homo sapien
gaaagggcttggcttcggggcccag

SEQ ID NO: 5739189 - DNA, 25 bp, Homo sapien
gaccccgtgcccaggtcctcgaggg

SEQ ID NO: 5739190 - DNA, 25 bp, Homo sapien
tgtcatgcgggggccgcgggcagga

SEQ ID NO: 5739191 - DNA, 25 bp, Homo sapien
gcagagtcaggagctggagggtcgg

SEQ ID NO: 5739192 - DNA, 25 bp, Homo sapien
gtgctcctgcccgagcccccactgc

SEQ ID NO: 5739193 - DNA, 25 bp, Homo sapien
agccctgtcaggaagccatcgccac

SEQ ID NO: 5739194 - DNA, 25 bp, Homo sapien
cagggactggtccagtgggggtcac

SEQ ID NO: 5739195 - DNA, 25 bp, Homo sapien
ttcagaacaccgggctcgcccggcc

SEQ ID NO: 5739196 - DNA, 25 bp, Homo sapien
gggccgctctgggcggaggaggctg

SEQ ID NO: 5739197 - DNA, 25 bp, Homo sapien
gaagggatggggtctggggacagct

SEQ ID NO: 5739198 - DNA, 25 bp, Homo sapien
cccgggaaagccggggtgctgcagg

SEQ ID NO: 5739199 - DNA, 25 bp, Homo sapien
tcgggactggctgcgcagggcagga

SEQ ID NO: 5739200 - DNA, 25 bp, Homo sapien
tccagcaggcacagcaccacgctct

SEQ ID NO: 5739201 - DNA, 25 bp, Homo sapien
agctgcaggggtgtgcggaagatgc

SEQ ID NO: 5739202 - DNA, 25 bp, Homo sapien
ccagccgatgaaggtggccacgttg

SEQ ID NO: 5739203 - DNA, 25 bp, Homo sapien
gaacaccgggctcgcccggcctcct

SEQ ID NO: 5739204 - DNA, 25 bp, Homo sapien
cgatccctgcgcacaagcagcacag

SEQ ID NO: 5739205 - DNA, 25 bp, Homo sapien
cccagctctgcgggtccggaggggc

SEQ ID NO: 5739206 - DNA, 25 bp, Homo sapien
tgtgccatgtggtcccaaggggtct

SEQ ID NO: 5739207 - DNA, 25 bp, Homo sapien
ggcctccacgtaggcctcactggag

SEQ ID NO: 5739208 - DNA, 25 bp, Homo sapien
gggccacaggtcttcagaacaccgg

SEQ ID NO: 5739209 - DNA, 25 bp, Homo sapien
tggagaaaaggtgcagaccctcggc

SEQ ID NO: 5739210 - DNA, 25 bp, Homo sapien
cgcgccatgaaggagccaggcacta

SEQ ID NO: 5739211 - DNA, 25 bp, Homo sapien
gggtgctcctgcccgagcccccact

SEQ ID NO: 5739212 - DNA, 25 bp, Homo sapien
gcaaaactttactgtcagaggctct

SEQ ID NO: 5739213 - DNA, 25 bp, Homo sapien
tgcacgaggcgtggggccagcaggc

SEQ ID NO: 5739214 - DNA, 25 bp, Homo sapien
acgggagtcatctcaggccgggagc

SEQ ID NO: 5739215 - DNA, 25 bp, Homo sapien
gacccgggaaagccggggtgctgca

SEQ ID NO: 5739216 - DNA, 25 bp, Homo sapien
tccatcacatccaggaatctggctc

SEQ ID NO: 5739217 - DNA, 25 bp, Homo sapien
ccagggactgggctagcagggcggg

SEQ ID NO: 5739218 - DNA, 25 bp, Homo sapien
ggaggccgtctcggagaggccgggg

SEQ ID NO: 5739219 - DNA, 25 bp, Homo sapien
acggggagtctggggggtgctcctg

SEQ ID NO: 5739220 - DNA, 25 bp, Homo sapien
agcaggcccaggcgtgccccacgcc

SEQ ID NO: 5739221 - DNA, 25 bp, Homo sapien
ggccccggggagcattgccccagcg

SEQ ID NO: 5739222 - DNA, 25 bp, Homo sapien
tgaggtctggtactcaagaggcaga

SEQ ID NO: 5739223 - DNA, 25 bp, Homo sapien
ggaggaggctgaggagtcactgtcc

SEQ ID NO: 5739224 - DNA, 25 bp, Homo sapien
tgctgcagggctgcgggcacgggga

SEQ ID NO: 5739225 - DNA, 25 bp, Homo sapien
gggctcccaggtgcatctagtggcc

SEQ ID NO: 5739226 - DNA, 25 bp, Homo sapien
cacgggcagcctcggtcacggcgtt

SEQ ID NO: 5739227 - DNA, 25 bp, Homo sapien
gtcacgctagcaacagcctcaaggg

SEQ ID NO: 5739228 - DNA, 25 bp, Homo sapien
atgttggcacagggtcgtgcccgtg

SEQ ID NO: 5739229 - DNA, 25 bp, Homo sapien
gcagtggaggagcagcggcacgggt

SEQ ID NO: 5739230 - DNA, 25 bp, Homo sapien
gtcgggggcccgagctgggtcaggg

SEQ ID NO: 5739231 - DNA, 25 bp, Homo sapien
cgttcttgcgcagcaccaggtcctc

SEQ ID NO: 5739232 - DNA, 25 bp, Homo sapien
ggttcagtgcaagccagggggctcc

SEQ ID NO: 5739233 - DNA, 25 bp, Homo sapien
aatctcctgctcaaactgcacgagg

SEQ ID NO: 5739234 - DNA, 25 bp, Homo sapien
tgggctagcagggcggggactggtg

SEQ ID NO: 5739235 - DNA, 25 bp, Homo sapien
tgtggagaaaaggtgcagaccctcg

SEQ ID NO: 5739236 - DNA, 25 bp, Homo sapien
gagcaggctcgagtcccccacacgg

SEQ ID NO: 5739237 - DNA, 25 bp, Homo sapien
gcggggatgggggggcagctgatcc

SEQ ID NO: 5739238 - DNA, 25 bp, Homo sapien
gctcgcccggcctcctctaaggcat

SEQ ID NO: 5739239 - DNA, 25 bp, Homo sapien
agccactcggccaggtcctccttca

SEQ ID NO: 5739240 - DNA, 25 bp, Homo sapien
cggctgccaatgcacgggcagcctc

SEQ ID NO: 5739241 - DNA, 25 bp, Homo sapien
ccggcctcctctaaggcattcaata

SEQ ID NO: 5739242 - DNA, 25 bp, Homo sapien
acagggtcgtgcccgtggccagccc

SEQ ID NO: 5739243 - DNA, 25 bp, Homo sapien
gccagggcaggggctgccttcatcg

SEQ ID NO: 5739244 - DNA, 25 bp, Homo sapien
ggaacacagttcaggatcgctggct

SEQ ID NO: 5739245 - DNA, 25 bp, Homo sapien
tgagaccttgatcatgggaaactgg

SEQ ID NO: 5739246 - DNA, 25 bp, Homo sapien
ggtctggggacagctgagctggtcc

SEQ ID NO: 5739247 - DNA, 25 bp, Homo sapien
acttcccctctgagaccttgatcat

SEQ ID NO: 5739248 - DNA, 25 bp, Homo sapien
gggcggggactggtggtgggcgaca

SEQ ID NO: 5739249 - DNA, 25 bp, Homo sapien
actgggtctgccatgcccggaccgg

SEQ ID NO: 5739250 - DNA, 25 bp, Homo sapien
catccgaccccgtgcccaggtcctc

SEQ ID NO: 5739251 - DNA, 25 bp, Homo sapien
aggtaatgctccagcgtgtcccagc

SEQ ID NO: 5739252 - DNA, 25 bp, Homo sapien
ccatgccagggcaggggctgccttc

SEQ ID NO: 5739253 - DNA, 25 bp, Homo sapien
ggtcgtgcccgtggccagccctgtc

SEQ ID NO: 5739254 - DNA, 25 bp, Homo sapien
tgactgagtgcagggcatgccatgt

SEQ ID NO: 5739255 - DNA, 25 bp, Homo sapien
tgggtctgccatgcccggaccggcc

SEQ ID NO: 5739256 - DNA, 25 bp, Homo sapien
tgggtgtcatgcgggggccgcgggc

SEQ ID NO: 5739257 - DNA, 25 bp, Homo sapien
tcaggccgggagccccggcgctcac

SEQ ID NO: 5739258 - DNA, 25 bp, Homo sapien
ctggctcagccctcggggtgactga

SEQ ID NO: 5739259 - DNA, 25 bp, Homo sapien
gggtgcagcacgcagctcccgctca

SEQ ID NO: 5739260 - DNA, 25 bp, Homo sapien
tgctgcgggtcgagctgcaggggtg

SEQ ID NO: 5739261 - DNA, 25 bp, Homo sapien
cggagccgggccgggccgccgcagg

SEQ ID NO: 5739262 - DNA, 25 bp, Homo sapien
gggggcagctgatcccggggcctgg

SEQ ID NO: 5739263 - DNA, 25 bp, Homo sapien
ccagccggtctcgggactggctgcg

SEQ ID NO: 5739264 - DNA, 25 bp, Homo sapien
acagctgggctcccctgcctcctgg

SEQ ID NO: 5739265 - DNA, 25 bp, Homo sapien
tccctccgggggccagtgcctgtgt

SEQ ID NO: 5739266 - DNA, 25 bp, Homo sapien
caacagcctcaagggcccgggcatt

SEQ ID NO: 5739267 - DNA, 25 bp, Homo sapien
cgggaaagccggggtgctgcagggc

SEQ ID NO: 5739268 - DNA, 25 bp, Homo sapien
agtaattaaatagcaacgctcatcc

SEQ ID NO: 5739269 - DNA, 25 bp, Homo sapien
gcccgcgatgcccgccactgggtct

SEQ ID NO: 5739270 - DNA, 25 bp, Homo sapien
ggggctgggggtgcagcacgcagct

SEQ ID NO: 5739271 - DNA, 25 bp, Homo sapien
cacagcctgctcctcgcggctctgg

SEQ ID NO: 5739272 - DNA, 25 bp, Homo sapien
gtcccatgaggtctggtactcaaga

SEQ ID NO: 5739273 - DNA, 25 bp, Homo sapien
ggcttcggggcccaggcagcccatt

SEQ ID NO: 5739274 - DNA, 25 bp, Homo sapien
ccctgcgcacaagcagcacagcctg

SEQ ID NO: 5739275 - DNA, 25 bp, Homo sapien
gcacggggagtctggggggtgctcc

SEQ ID NO: 5739276 - DNA, 25 bp, Homo sapien
acagcctcaagggcccgggcattgg

SEQ ID NO: 5739277 - DNA, 25 bp, Homo sapien
gctcaatctcctgctcaaactgcac

SEQ ID NO: 5739278 - DNA, 25 bp, Homo sapien
tggtcccatgaggtctggtactcaa

SEQ ID NO: 5739279 - DNA, 25 bp, Homo sapien
ccggagtagcggcgggagcggggat

SEQ ID NO: 5739280 - DNA, 25 bp, Homo sapien
ggtaccaagggggccgctctgggcg

SEQ ID NO: 5739281 - DNA, 25 bp, Homo sapien
caggcagcccattggccgtccggcc

SEQ ID NO: 5739282 - DNA, 25 bp, Homo sapien
catcccgcggccccggggagcattg

SEQ ID NO: 5739283 - DNA, 25 bp, Homo sapien
aggaatctggctcagccctcggggt

SEQ ID NO: 5739284 - DNA, 25 bp, Homo sapien
caggaggccgtctcggagaggccgg

SEQ ID NO: 5739285 - DNA, 25 bp, Homo sapien
gctgccaatgcacgggcagcctcgg

SEQ ID NO: 5739286 - DNA, 25 bp, Homo sapien
gccccagcgggggccggagccgggc

SEQ ID NO: 5739287 - DNA, 25 bp, Homo sapien
atcatgggaaactggtcagggcagg

SEQ ID NO: 5739288 - DNA, 25 bp, Homo sapien
tcctcagcacccgcacaaagatgag

SEQ ID NO: 5739289 - DNA, 25 bp, Homo sapien
cgccgcagggaggcgccgcccgagc

SEQ ID NO: 5739290 - DNA, 25 bp, Homo sapien
atggggtctggggacagctgagctg

SEQ ID NO: 5739291 - DNA, 25 bp, Homo sapien
gctcactcccagggactgggctagc

SEQ ID NO: 5739292 - DNA, 25 bp, Homo sapien
agtagcggcgggagcggggatgggg

SEQ ID NO: 5739293 - DNA, 25 bp, Homo sapien
gagccaggcactacactgtgcgcct

SEQ ID NO: 5739294 - DNA, 25 bp, Homo sapien
ccggtctcgggactggctgcgcagg

SEQ ID NO: 5739295 - DNA, 25 bp, Homo sapien
ggggtctggtcccatgaggtctggt

SEQ ID NO: 5739296 - DNA, 25 bp, Homo sapien
gggagcggggatgggggggcagctg

SEQ ID NO: 5739297 - DNA, 25 bp, Homo sapien
gggccgggcgggcggctgccaatgc

SEQ ID NO: 5739298 - DNA, 25 bp, Homo sapien
ctagcagggcggggactggtggtgg

SEQ ID NO: 5739299 - DNA, 25 bp, Homo sapien
ggaactcctcttccaggcgccggaa

SEQ ID NO: 5739300 - DNA, 25 bp, Homo sapien
gttggcacagggtcgtgcccgtggc

SEQ ID NO: 5739301 - DNA, 25 bp, Homo sapien
tggctccgggcccgccgggcagggc

SEQ ID NO: 5739302 - DNA, 25 bp, Homo sapien
ggaggaactggaggaacaataggca

SEQ ID NO: 5739303 - DNA, 25 bp, Homo sapien
tctggctccgggcccgccgggcagg

SEQ ID NO: 5739304 - DNA, 25 bp, Homo sapien
aacaataggcagagtcaggagctgg

SEQ ID NO: 5739305 - DNA, 25 bp, Homo sapien
tgccccttggcacccatgagtgctg

SEQ ID NO: 5739306 - DNA, 25 bp, Homo sapien
ccgcggccccggggagcattgcccc

SEQ ID NO: 5739307 - DNA, 25 bp, Homo sapien
gggctgccttcatcggaggagctgg

SEQ ID NO: 5739308 - DNA, 25 bp, Homo sapien
gggactggtccagtgggggtcacgc

SEQ ID NO: 5739309 - DNA, 25 bp, Homo sapien
cgcaggtcgctgggtgtcatgcggg

SEQ ID NO: 5739310 - DNA, 25 bp, Homo sapien
ctagcaacagcctcaagggcccggg

SEQ ID NO: 5739311 - DNA, 25 bp, Homo sapien
gccacacctcgggccgggcgggcgg

SEQ ID NO: 5739312 - DNA, 25 bp, Homo sapien
agggactgggctagcagggcgggga

SEQ ID NO: 5739313 - DNA, 25 bp, Homo sapien
tcggggtgactgagtgcagggcatg

SEQ ID NO: 5739314 - DNA, 25 bp, Homo sapien
cgagtcactgtgggcaggaacacag

SEQ ID NO: 5739315 - DNA, 25 bp, Homo sapien
aggcagagggggctccctgatgcag

SEQ ID NO: 5739316 - DNA, 25 bp, Homo sapien
gtgcagaccctcggctggggtgggc

SEQ ID NO: 5739317 - DNA, 25 bp, Homo sapien
gcgcacaagcagcacagcctgctcc

SEQ ID NO: 5739318 - DNA, 25 bp, Homo sapien
tctgcgggtccggaggggcggcggg

SEQ ID NO: 5739319 - DNA, 25 bp, Homo sapien
gaggagtcactgtccccggagtagc

SEQ ID NO: 5739320 - DNA, 25 bp, Homo sapien
gttggccacatttgccacccaggac

SEQ ID NO: 5739321 - DNA, 25 bp, Homo sapien
gaatgtacaacagaggtcccattgt

SEQ ID NO: 5739322 - DNA, 25 bp, Homo sapien
aggtcctccttcatggcctccacgt

SEQ ID NO: 5739323 - DNA, 25 bp, Homo sapien
gagacccgggaaagccggggtgctg

SEQ ID NO: 5739324 - DNA, 25 bp, Homo sapien
ctgtcaggaagccatcgccaccacc

SEQ ID NO: 5739325 - DNA, 25 bp, Homo sapien
gcccaactctggactggggctggag

SEQ ID NO: 5739326 - DNA, 25 bp, Homo sapien
ggccagccctgtcaggaagccatcg

SEQ ID NO: 5739327 - DNA, 25 bp, Homo sapien
ctcgcggctctggctccgggcccgc

SEQ ID NO: 5739328 - DNA, 25 bp, Homo sapien
acagcaccacgctcttctcgttctt

SEQ ID NO: 5739329 - DNA, 25 bp, Homo sapien
ctcttggccgccgagcccgcgatgc

SEQ ID NO: 5739330 - DNA, 25 bp, Homo sapien
tttcagtggtgtcctccccagcggc

SEQ ID NO: 5739331 - DNA, 25 bp, Homo sapien
cggcacacccagctccacgcggcac

SEQ ID NO: 5739332 - DNA, 25 bp, Homo sapien
gctggctcatcccgcggccccgggg

SEQ ID NO: 5739333 - DNA, 25 bp, Homo sapien
tcccgcggccccggggagcattgcc

SEQ ID NO: 5739334 - DNA, 25 bp, Homo sapien
agcacgcagctcccgctcaatctcc

SEQ ID NO: 5739335 - DNA, 25 bp, Homo sapien
actgagtgcagggcatgccatgtcc

SEQ ID NO: 5739336 - DNA, 25 bp, Homo sapien
tggcccccccatgccagggcagggg

SEQ ID NO: 5739337 - DNA, 25 bp, Homo sapien
gtcatctcaggccgggagccccggc

SEQ ID NO: 5739338 - DNA, 25 bp, Homo sapien
gcgtggggccagcaggcccaggcgt

SEQ ID NO: 5739339 - DNA, 25 bp, Homo sapien
gtgcatctagtggcccccccatgcc

SEQ ID NO: 5739340 - DNA, 25 bp, Homo sapien
gactggctgcgcagggcaggaggcc

SEQ ID NO: 5739341 - DNA, 25 bp, Homo sapien
cgtacaaggcattgagccactcggc

SEQ ID NO: 5739342 - DNA, 25 bp, Homo sapien
accaggtcctcagtctcaaacatga

SEQ ID NO: 5739343 - DNA, 25 bp, Homo sapien
tcccattgtgccatgtggtcccaag

SEQ ID NO: 5739344 - DNA, 25 bp, Homo sapien
tgctggccggtgtggtgcccaactc

SEQ ID NO: 5739345 - DNA, 25 bp, Homo sapien
gcaggtgcagcggcccagaatctcc

SEQ ID NO: 5739346 - DNA, 25 bp, Homo sapien
gggggtgcagcacgcagctcccgct

SEQ ID NO: 5739347 - DNA, 25 bp, Homo sapien
tcgagtcccccacacggtacttccc

SEQ ID NO: 5739348 - DNA, 25 bp, Homo sapien
caggtcttcagaacaccgggctcgc

SEQ ID NO: 5739349 - DNA, 25 bp, Homo sapien
cagggcaggggctgccttcatcgga

SEQ ID NO: 5739350 - DNA, 25 bp, Homo sapien
tactcaagaggcagagggggctccc

SEQ ID NO: 5739351 - DNA, 25 bp, Homo sapien
ggactgggctagcagggcggggact

SEQ ID NO: 5739352 - DNA, 25 bp, Homo sapien
ggtcctcgagggttcagtgcaagcc

SEQ ID NO: 5739353 - DNA, 25 bp, Homo sapien
agccggtctcgggactggctgcgca

SEQ ID NO: 5739354 - DNA, 25 bp, Homo sapien
caataggcagagtcaggagctggag

SEQ ID NO: 5739355 - DNA, 25 bp, Homo sapien
cggcccagaatctccctcaccagct

SEQ ID NO: 5739356 - DNA, 25 bp, Homo sapien
caagaggcagagggggctccctgat

SEQ ID NO: 5739357 - DNA, 25 bp, Homo sapien
cggctgggtcgctccctccgggggc

SEQ ID NO: 5739358 - DNA, 25 bp, Homo sapien
ggagtcactgtccccggagtagcgg

SEQ ID NO: 5739359 - DNA, 25 bp, Homo sapien
gtggtcagccgccggctgggtcgct

SEQ ID NO: 5739360 - DNA, 25 bp, Homo sapien
cgacagctgggctcccctgcctcct

SEQ ID NO: 5739361 - DNA, 25 bp, Homo sapien
acccaggacgctgagggacgaagag

SEQ ID NO: 5739362 - DNA, 25 bp, Homo sapien
accggccgagtcactgtgggcagga

SEQ ID NO: 5739363 - DNA, 25 bp, Homo sapien
caccatcacgtggctcctcagcacc

SEQ ID NO: 5739364 - DNA, 25 bp, Homo sapien
atgagcaggctcgagtcccccacac

SEQ ID NO: 5739365 - DNA, 25 bp, Homo sapien
gcaccaggtcctcagtctcaaacat

SEQ ID NO: 5739366 - DNA, 25 bp, Homo sapien
gcttggcttcggggcccaggcagcc

SEQ ID NO: 5739367 - DNA, 25 bp, Homo sapien
gccgccgcagggaggcgccgcccga

SEQ ID NO: 5739368 - DNA, 25 bp, Homo sapien
cgaggcgtggggccagcaggcccag

SEQ ID NO: 5739369 - DNA, 25 bp, Homo sapien
gagtcatctcaggccgggagccccg

SEQ ID NO: 5739370 - DNA, 25 bp, Homo sapien
catgagcacctccggcacacccagc

SEQ ID NO: 5739371 - DNA, 25 bp, Homo sapien
gagcagtggaggagcagcggcacgg

SEQ ID NO: 5739372 - DNA, 25 bp, Homo sapien
gcctgctcctcgcggctctggctcc

SEQ ID NO: 5739373 - DNA, 25 bp, Homo sapien
tggccaggaactcctcttccaggcg

SEQ ID NO: 5739374 - DNA, 25 bp, Homo sapien
ggctagcagggcggggactggtggt

SEQ ID NO: 5739375 - DNA, 25 bp, Homo sapien
ggagacccaggccgtacaaggcatt

SEQ ID NO: 5739376 - DNA, 25 bp, Homo sapien
ggggtgctgcagggctgcgggcacg

SEQ ID NO: 5739377 - DNA, 25 bp, Homo sapien
agggaggcgccgcccgagccgcagc

SEQ ID NO: 5739378 - DNA, 25 bp, Homo sapien
ccacgcggcaccagccgatgaaggt

SEQ ID NO: 5739379 - DNA, 25 bp, Homo sapien
agcggcccagaatctccctcaccag

SEQ ID NO: 5739380 - DNA, 25 bp, Homo sapien
gcgccggaacagctgctgctcctgc

SEQ ID NO: 5739381 - DNA, 25 bp, Homo sapien
gtacttcccctctgagaccttgatc

SEQ ID NO: 5739382 - DNA, 25 bp, Homo sapien
cagcctcggtcacggcgttggcatg

SEQ ID NO: 5739383 - DNA, 25 bp, Homo sapien
gccaccacccgggagacccaggccg

SEQ ID NO: 5739384 - DNA, 25 bp, Homo sapien
gcagcacagcctgctcctcgcggct

SEQ ID NO: 5739385 - DNA, 25 bp, Homo sapien
cacgggtcgtgcttgtccaggtaat

SEQ ID NO: 5739386 - DNA, 25 bp, Homo sapien
ggtcccattgtgccatgtggtccca

SEQ ID NO: 5739387 - DNA, 25 bp, Homo sapien
ggctgggggtgcagcacgcagctcc

SEQ ID NO: 5739388 - DNA, 25 bp, Homo sapien
cacggcgttggcatgttggcacagg

SEQ ID NO: 5739389 - DNA, 25 bp, Homo sapien
gggccgcgggcaggagtccctggtg

SEQ ID NO: 5739390 - DNA, 25 bp, Homo sapien
gcccggaccggccgagtcactgtgg

SEQ ID NO: 5739391 - DNA, 25 bp, Homo sapien
gctggaaagggcttggcttcggggc

SEQ ID NO: 5739392 - DNA, 25 bp, Homo sapien
tggagcgaaatggccgcacgctctt

SEQ ID NO: 5739393 - DNA, 25 bp, Homo sapien
caggaacacagttcaggatcgctgg

SEQ ID NO: 5739394 - DNA, 25 bp, Homo sapien
gggggtcacgctagcaacagcctca

SEQ ID NO: 5739395 - DNA, 25 bp, Homo sapien
ctcgttcttgcgcagcaccaggtcc

SEQ ID NO: 5739396 - DNA, 25 bp, Homo sapien
aacacagttcaggatcgctggctca

SEQ ID NO: 5739397 - DNA, 25 bp, Homo sapien
ttcagtgcaagccagggggctccca

SEQ ID NO: 5739398 - DNA, 25 bp, Homo sapien
ccgtggccagccctgtcaggaagcc

SEQ ID NO: 5739399 - DNA, 25 bp, Homo sapien
accacccactcgcaccatcacgtgg

SEQ ID NO: 5739400 - DNA, 25 bp, Homo sapien
cagcaccaggtcctcagtctcaaac

SEQ ID NO: 5739401 - DNA, 25 bp, Homo sapien
gtgcagcacgcagctcccgctcaat

SEQ ID NO: 5739402 - DNA, 25 bp, Homo sapien
tggaaagggcttggcttcggggccc

SEQ ID NO: 5739403 - DNA, 25 bp, Homo sapien
gcagcacgcagctcccgctcaatct

SEQ ID NO: 5739404 - DNA, 25 bp, Homo sapien
agcgtgtcccagccaccacccactc

SEQ ID NO: 5739405 - DNA, 25 bp, Homo sapien
cgcagctcccgctcaatctcctgct

SEQ ID NO: 5739406 - DNA, 25 bp, Homo sapien
attgagccactcggccaggtcctcc

SEQ ID NO: 5739407 - DNA, 25 bp, Homo sapien
gaggaggaactggaggaacaatagg

SEQ ID NO: 5739408 - DNA, 25 bp, Homo sapien
ccgggcagggctggggaccgacagc

SEQ ID NO: 5739409 - DNA, 25 bp, Homo sapien
gcacaaagatgagcaggctcgagtc

SEQ ID NO: 5739410 - DNA, 25 bp, Homo sapien
cctccagcaggcacagcaccacgct

SEQ ID NO: 5739411 - DNA, 25 bp, Homo sapien
ggtgactgagtgcagggcatgccat

SEQ ID NO: 5739412 - DNA, 25 bp, Homo sapien
gatgctggccggtgtggtgcccaac

SEQ ID NO: 5739413 - DNA, 25 bp, Homo sapien
tcgctccctccgggggccagtgcct

SEQ ID NO: 5739414 - DNA, 25 bp, Homo sapien
ccggtgtggtgcccaactctggact

SEQ ID NO: 5739415 - DNA, 25 bp, Homo sapien
gtgagggtttacggtctggctgtgt

SEQ ID NO: 5739416 - DNA, 25 bp, Homo sapien
tccggccagagtccccaggttggcc

SEQ ID NO: 5739417 - DNA, 25 bp, Homo sapien
aggagccaggcactacactgtgcgc

SEQ ID NO: 5739418 - DNA, 25 bp, Homo sapien
tcggggcccaggcagcccattggcc

SEQ ID NO: 5739419 - DNA, 25 bp, Homo sapien
tgctgggccacaggtcttcagaaca

SEQ ID NO: 5739420 - DNA, 25 bp, Homo sapien
agcagcggcacgggtcgtgcttgtc

SEQ ID NO: 5739421 - DNA, 25 bp, Homo sapien
cgtaggcctcactggagcgaaatgg

SEQ ID NO: 5739422 - DNA, 25 bp, Homo sapien
gagctggagggtcgggggcccgagc

SEQ ID NO: 5739423 - DNA, 25 bp, Homo sapien
gcgatgcccgccactgggtctgcca

SEQ ID NO: 5739424 - DNA, 25 bp, Homo sapien
tctgctgggccacaggtcttcagaa

SEQ ID NO: 5739425 - DNA, 25 bp, Homo sapien
aatctccctcaccagctcgtcgagg

SEQ ID NO: 5739426 - DNA, 25 bp, Homo sapien
gcgccgcccgagccgcagctctatg

SEQ ID NO: 5739427 - DNA, 25 bp, Homo sapien
agaggctctgctgggccacaggtct

SEQ ID NO: 5739428 - DNA, 25 bp, Homo sapien
gccccggcgctcactcccagggact

SEQ ID NO: 5739429 - DNA, 25 bp, Homo sapien
gccccccggggccggccgcgatcca

SEQ ID NO: 5739430 - DNA, 25 bp, Homo sapien
tcgtcgaggttgcgcaggtcgctgg

SEQ ID NO: 5739431 - DNA, 25 bp, Homo sapien
ccgtctcgatccctgcgcacaagca

SEQ ID NO: 5739432 - DNA, 25 bp, Homo sapien
cgatgagcagtggaggagcagcggc

SEQ ID NO: 5739433 - DNA, 25 bp, Homo sapien
gagggtcgggggcccgagctgggtc

SEQ ID NO: 5739434 - DNA, 25 bp, Homo sapien
ctggtccagtgggggtcacgctagc

SEQ ID NO: 5739435 - DNA, 25 bp, Homo sapien
tgtccccggagtagcggcgggagcg

SEQ ID NO: 5739436 - DNA, 25 bp, Homo sapien
gggtttacggtctggctgtgtgtcc

SEQ ID NO: 5739437 - DNA, 25 bp, Homo sapien
aggcgtggggatacgtgagggttta

SEQ ID NO: 5739438 - DNA, 25 bp, Homo sapien
ggtcctcagtctcaaacatgagcac

SEQ ID NO: 5739439 - DNA, 25 bp, Homo sapien
ctggggtgggcgatgagcagtggag

SEQ ID NO: 5739440 - DNA, 25 bp, Homo sapien
gtgcccgtggccagccctgtcagga

SEQ ID NO: 5739441 - DNA, 25 bp, Homo sapien
tccggcacacccagctccacgcggc

SEQ ID NO: 5739442 - DNA, 25 bp, Homo sapien
tcactcccagggactgggctagcag

SEQ ID NO: 5739443 - DNA, 25 bp, Homo sapien
tacaaggcattgagccactcggcca

SEQ ID NO: 5739444 - DNA, 25 bp, Homo sapien
gtgtgcggaagatgctggccggtgt

SEQ ID NO: 5739445 - DNA, 25 bp, Homo sapien
gcgcagggcaggaggccgtctcgga

SEQ ID NO: 5739446 - DNA, 25 bp, Homo sapien
cccatgagtgctgcccgtctcgatc

SEQ ID NO: 5739447 - DNA, 25 bp, Homo sapien
gagtccccaggttggccacatttgc

SEQ ID NO: 5739448 - DNA, 25 bp, Homo sapien
gcgaaatggccgcacgctcttggcc

SEQ ID NO: 5739449 - DNA, 25 bp, Homo sapien
ggggatgggggggcagctgatcccg

SEQ ID NO: 5739450 - DNA, 25 bp, Homo sapien
tctcctgctcaaactgcacgaggcg

SEQ ID NO: 5739451 - DNA, 25 bp, Homo sapien
caaacatgagcacctccggcacacc

SEQ ID NO: 5739452 - DNA, 25 bp, Homo sapien
gggggggcagctgatcccggggcct

SEQ ID NO: 5739453 - DNA, 25 bp, Homo sapien
gggcttggcttcggggcccaggcag

SEQ ID NO: 5739454 - DNA, 25 bp, Homo sapien
cgggcgggcggctgccaatgcacgg

SEQ ID NO: 5739455 - DNA, 25 bp, Homo sapien
tgcagaagggttaaggccacaaagg

SEQ ID NO: 5739456 - DNA, 25 bp, Homo sapien
gtgcttgtccaggtaatgctccagc

SEQ ID NO: 5739457 - DNA, 25 bp, Homo sapien
cgcaccatcacgtggctcctcagca

SEQ ID NO: 5739458 - DNA, 25 bp, Homo sapien
tgtgtcatcactgcgggtaccaagg

SEQ ID NO: 5739459 - DNA, 25 bp, Homo sapien
gagaagggatggggtctggggacag

SEQ ID NO: 5739460 - DNA, 25 bp, Homo sapien
gtctcgatccctgcgcacaagcagc

SEQ ID NO: 5739461 - DNA, 25 bp, Homo sapien
ccaggtaatgctccagcgtgtccca

SEQ ID NO: 5739462 - DNA, 25 bp, Homo sapien
cagctcccgctcaatctcctgctca

SEQ ID NO: 5739463 - DNA, 25 bp, Homo sapien
tccccagcggcaggggcgttggggg

SEQ ID NO: 5739464 - DNA, 25 bp, Homo sapien
gtgcctgtggtcagccgccggctgg

SEQ ID NO: 5739465 - DNA, 25 bp, Homo sapien
gctctggctccgggcccgccgggca

SEQ ID NO: 5739466 - DNA, 25 bp, Homo sapien
agcctcaagggcccgggcattggcc

SEQ ID NO: 5739467 - DNA, 25 bp, Homo sapien
ctggccggtgtggtgcccaactctg

SEQ ID NO: 5739468 - DNA, 25 bp, Homo sapien
aagctaacgggagtcatctcaggcc

SEQ ID NO: 5739469 - DNA, 25 bp, Homo sapien
catttgccacccaggacgctgaggg

SEQ ID NO: 5739470 - DNA, 25 bp, Homo sapien
ataatattagtaattaaatagcaac

SEQ ID NO: 5739471 - DNA, 25 bp, Homo sapien
gggagtcatctcaggccgggagccc

SEQ ID NO: 5739472 - DNA, 25 bp, Homo sapien
gggcattggccaggaactcctcttc

SEQ ID NO: 5739473 - DNA, 25 bp, Homo sapien
ggaagccatcgccaccacccgggag

SEQ ID NO: 5739474 - DNA, 25 bp, Homo sapien
ccattgtgccatgtggtcccaaggg

SEQ ID NO: 5739475 - DNA, 25 bp, Homo sapien
ccccaggttggccacatttgccacc

SEQ ID NO: 5739476 - DNA, 25 bp, Homo sapien
gcccggcctcctctaaggcattcaa

SEQ ID NO: 5739477 - DNA, 25 bp, Homo sapien
gggtcagggactggtccagtggggg

SEQ ID NO: 5739478 - DNA, 25 bp, Homo sapien
cctgtgtcatcactgcgggtaccaa

SEQ ID NO: 5739479 - DNA, 25 bp, Homo sapien
ctgcgggtcgagctgcaggggtgtg

SEQ ID NO: 5739480 - DNA, 25 bp, Homo sapien
tccgggcccgccgggcagggctggg

SEQ ID NO: 5739481 - DNA, 25 bp, Homo sapien
atgggggggcagctgatcccggggc

SEQ ID NO: 5739482 - DNA, 25 bp, Homo sapien
ggggtctggggacagctgagctggt

SEQ ID NO: 5739483 - DNA, 25 bp, Homo sapien
gcaagccagggggctcccaggtgca

SEQ ID NO: 5739484 - DNA, 25 bp, Homo sapien
agtcactgtgggcaggaacacagtt

SEQ ID NO: 5739485 - DNA, 25 bp, Homo sapien
tcccgctcaatctcctgctcaaact

SEQ ID NO: 5739486 - DNA, 25 bp, Homo sapien
atcactgcgggtaccaagggggccg

SEQ ID NO: 5739487 - DNA, 25 bp, Homo sapien
cctggaaggccacacctcgggccgg

SEQ ID NO: 5739488 - DNA, 25 bp, Homo sapien
ccctgtcaggaagccatcgccacca

SEQ ID NO: 5739489 - DNA, 25 bp, Homo sapien
ggaggagctggaaagggcttggctt

SEQ ID NO: 5739490 - DNA, 25 bp, Homo sapien
gcagagggggctccctgatgcagaa

SEQ ID NO: 5739491 - DNA, 25 bp, Homo sapien
gggtgcctgtggtcagccgccggct

SEQ ID NO: 5739492 - DNA, 25 bp, Homo sapien
ccactgggtctgccatgcccggacc

SEQ ID NO: 5739493 - DNA, 25 bp, Homo sapien
agaggccggggtgcctgtggtcagc

SEQ ID NO: 5739494 - DNA, 25 bp, Homo sapien
aggagaagggatggggtctggggac

SEQ ID NO: 5739495 - DNA, 25 bp, Homo sapien
ggtccatcacatccaggaatctggc

SEQ ID NO: 5739496 - DNA, 25 bp, Homo sapien
cagctctgcgggtccggaggggcgg

SEQ ID NO: 5739497 - DNA, 25 bp, Homo sapien
tgagcacctccggcacacccagctc

SEQ ID NO: 5739498 - DNA, 25 bp, Homo sapien
actgtcagaggctctgctgggccac

SEQ ID NO: 5739499 - DNA, 25 bp, Homo sapien
ctgggcggaggaggctgaggagtca

SEQ ID NO: 5739500 - DNA, 25 bp, Homo sapien
agggcaggaggccgtctcggagagg

SEQ ID NO: 5739501 - DNA, 25 bp, Homo sapien
gtacaacagaggtcccattgtgcca

SEQ ID NO: 5739502 - DNA, 25 bp, Homo sapien
tcgctgggtgtcatgcgggggccgc

SEQ ID NO: 5739503 - DNA, 25 bp, Homo sapien
ctccagcgtgtcccagccaccaccc

SEQ ID NO: 5739504 - DNA, 25 bp, Homo sapien
ccaggacgctgagggacgaagagga

SEQ ID NO: 5739505 - DNA, 25 bp, Homo sapien
cgggagacccaggccgtacaaggca

SEQ ID NO: 5739506 - DNA, 25 bp, Homo sapien
cagtgggggtcacgctagcaacagc

SEQ ID NO: 5739507 - DNA, 25 bp, Homo sapien
gggccccgaggcgtggggatacgtg

SEQ ID NO: 5739508 - DNA, 25 bp, Homo sapien
tgccatgcccggaccggccgagtca

SEQ ID NO: 5739509 - DNA, 25 bp, Homo sapien
gctcgtcgaggttgcgcaggtcgct

SEQ ID NO: 5739510 - DNA, 25 bp, Homo sapien
aatgcacgggcagcctcggtcacgg

SEQ ID NO: 5739511 - DNA, 25 bp, Homo sapien
acatccaggaatctggctcagccct

SEQ ID NO: 5739512 - DNA, 25 bp, Homo sapien
ccctgatgcagaagggttaaggcca

SEQ ID NO: 5739513 - DNA, 25 bp, Homo sapien
catgtccccagctctgcgggtccgg

SEQ ID NO: 5739514 - DNA, 25 bp, Homo sapien
tcctcgcggctctggctccgggccc

SEQ ID NO: 5739515 - DNA, 25 bp, Homo sapien
tgcccgccactgggtctgccatgcc

SEQ ID NO: 5739516 - DNA, 25 bp, Homo sapien
gccgctctgggcggaggaggctgag

SEQ ID NO: 5739517 - DNA, 25 bp, Homo sapien
ctggactggggctggagacccggga

SEQ ID NO: 5739518 - DNA, 25 bp, Homo sapien
taaatagcaacgctcatcccccaac

SEQ ID NO: 5739519 - DNA, 25 bp, Homo sapien
gggtcgagctgcaggggtgtgcgga

SEQ ID NO: 5739520 - DNA, 25 bp, Homo sapien
gaatctggctcagccctcggggtga

SEQ ID NO: 5739521 - DNA, 25 bp, Homo sapien
ggctccctgatgcagaagggttaag

SEQ ID NO: 5739522 - DNA, 25 bp, Homo sapien
aggtctggtactcaagaggcagagg

SEQ ID NO: 5739523 - DNA, 25 bp, Homo sapien
agcaccacgctcttctcgttcttgc

SEQ ID NO: 5739524 - DNA, 25 bp, Homo sapien
gccgtctcggagaggccggggtgcc

SEQ ID NO: 5739525 - DNA, 25 bp, Homo sapien
agcaacagcctcaagggcccgggca

SEQ ID NO: 5739526 - DNA, 25 bp, Homo sapien
ggtctgccatgcccggaccggccga

SEQ ID NO: 5739527 - DNA, 25 bp, Homo sapien
attggccaggaactcctcttccagg

SEQ ID NO: 5739528 - DNA, 25 bp, Homo sapien
aggaggctgaggagtcactgtcccc

SEQ ID NO: 5739529 - DNA, 25 bp, Homo sapien
cctttgtgcttcgtaagctaacggg

SEQ ID NO: 5739530 - DNA, 25 bp, Homo sapien
cgggcagcctcggtcacggcgttgg

SEQ ID NO: 5739531 - DNA, 25 bp, Homo sapien
cacagttcaggatcgctggctcatc

SEQ ID NO: 5739532 - DNA, 25 bp, Homo sapien
tgatcatgggaaactggtcagggca

SEQ ID NO: 5739533 - DNA, 25 bp, Homo sapien
ttcttgcgcagcaccaggtcctcag

SEQ ID NO: 5739534 - DNA, 25 bp, Homo sapien
ggctcagccctcggggtgactgagt

SEQ ID NO: 5739535 - DNA, 25 bp, Homo sapien
gttaaggccacaaaggaaaaggaga

SEQ ID NO: 5739536 - DNA, 25 bp, Homo sapien
ctgctcaaactgcacgaggcgtggg

SEQ ID NO: 5739537 - DNA, 25 bp, Homo sapien
gctgtgtgtccatccgaccccgtgc

SEQ ID NO: 5739538 - DNA, 25 bp, Homo sapien
cgtgtcccagccaccacccactcgc

SEQ ID NO: 5739539 - DNA, 25 bp, Homo sapien
cctcaccagctcgtcgaggttgcgc

SEQ ID NO: 5739540 - DNA, 25 bp, Homo sapien
gggcacggggagtctggggggtgct

SEQ ID NO: 5739541 - DNA, 25 bp, Homo sapien
actggaggaacaataggcagagtca

SEQ ID NO: 5739542 - DNA, 25 bp, Homo sapien
cggcgttggcatgttggcacagggt

SEQ ID NO: 5739543 - DNA, 25 bp, Homo sapien
gctccctccgggggccagtgcctgt

SEQ ID NO: 5739544 - DNA, 25 bp, Homo sapien
gctggagggtcgggggcccgagctg

SEQ ID NO: 5739545 - DNA, 25 bp, Homo sapien
aagatgctggccggtgtggtgccca

SEQ ID NO: 5739546 - DNA, 25 bp, Homo sapien
gtccaggtaatgctccagcgtgtcc

SEQ ID NO: 5739547 - DNA, 25 bp, Homo sapien
tggtgcgggggcggtttcagtggtg

SEQ ID NO: 5739548 - DNA, 25 bp, Homo sapien
gccgcgggcaggagtccctggtgcg

SEQ ID NO: 5739549 - DNA, 25 bp, Homo sapien
cgagggttcagtgcaagccaggggg

SEQ ID NO: 5739550 - DNA, 25 bp, Homo sapien
gctctgcgggtccggaggggcggcg

SEQ ID NO: 5739551 - DNA, 25 bp, Homo sapien
tggggatacgtgagggtttacggtc

SEQ ID NO: 5739552 - DNA, 25 bp, Homo sapien
cagccctcggggtgactgagtgcag

SEQ ID NO: 5739553 - DNA, 25 bp, Homo sapien
agtggaggagcagcggcacgggtcg

SEQ ID NO: 5739554 - DNA, 25 bp, Homo sapien
cctctgagaccttgatcatgggaaa

SEQ ID NO: 5739555 - DNA, 25 bp, Homo sapien
cgggccgggccgccgcagggaggcg

SEQ ID NO: 5739556 - DNA, 25 bp, Homo sapien
gcggcacgggtcgtgcttgtccagg

SEQ ID NO: 5739557 - DNA, 25 bp, Homo sapien
cacatttgccacccaggacgctgag

SEQ ID NO: 5739558 - DNA, 25 bp, Homo sapien
gcagcggcccagaatctccctcacc

SEQ ID NO: 5739559 - DNA, 25 bp, Homo sapien
gagcccgcgatgcccgccactgggt

SEQ ID NO: 5739560 - DNA, 25 bp, Homo sapien
tgcccaggtcctcgagggttcagtg

SEQ ID NO: 5739561 - DNA, 25 bp, Homo sapien
actgtccccggagtagcggcgggag

SEQ ID NO: 5739562 - DNA, 25 bp, Homo sapien
cccggcgctcactcccagggactgg

SEQ ID NO: 5739563 - DNA, 25 bp, Homo sapien
gagggtttacggtctggctgtgtgt

SEQ ID NO: 5739564 - DNA, 25 bp, Homo sapien
agctgctgctcctgctgcgggtcga

SEQ ID NO: 5739565 - DNA, 25 bp, Homo sapien
tcccaaggggtctggtcccatgagg

SEQ ID NO: 5739566 - DNA, 25 bp, Homo sapien
ctctaaggcattcaataatattagt

SEQ ID NO: 5739567 - DNA, 25 bp, Homo sapien
ctacactgtgcgcctggaaggccac

SEQ ID NO: 5739568 - DNA, 25 bp, Homo sapien
ggggtgactgagtgcagggcatgcc

SEQ ID NO: 5739569 - DNA, 25 bp, Homo sapien
acagctgctgctcctgctgcgggtc

SEQ ID NO: 5739570 - DNA, 25 bp, Homo sapien
ccgggccgccgcagggaggcgccgc

SEQ ID NO: 5739571 - DNA, 25 bp, Homo sapien
ttcatcggaggagctggaaagggct

SEQ ID NO: 5739572 - DNA, 25 bp, Homo sapien
aaggggtctggtcccatgaggtctg

SEQ ID NO: 5739573 - DNA, 25 bp, Homo sapien
gtgcaagccagggggctcccaggtg

SEQ ID NO: 5739574 - DNA, 25 bp, Homo sapien
cgctgagggacgaagaggaggaact

SEQ ID NO: 5739575 - DNA, 25 bp, Homo sapien
tgctcctgctgcgggtcgagctgca

SEQ ID NO: 5739576 - DNA, 25 bp, Homo sapien
gggcaggtgcagcggcccagaatct

SEQ ID NO: 5739577 - DNA, 25 bp, Homo sapien
ccaggaatctggctcagccctcggg

SEQ ID NO: 5739578 - DNA, 25 bp, Homo sapien
gcagggcaggaggccgtctcggaga

SEQ ID NO: 5739579 - DNA, 25 bp, Homo sapien
aggctcgagtcccccacacggtact

SEQ ID NO: 5739580 - DNA, 25 bp, Homo sapien
ggggagcattgccccagcgggggcc

SEQ ID NO: 5739581 - DNA, 25 bp, Homo sapien
ctgcgggtaccaagggggccgctct

SEQ ID NO: 5739582 - DNA, 25 bp, Homo sapien
gggacagctgagctggtccatcaca

SEQ ID NO: 5739583 - DNA, 25 bp, Homo sapien
cgaagaggaggaactggaggaacaa

SEQ ID NO: 5739584 - DNA, 25 bp, Homo sapien
gtctcgggcccctcctttgtgcttc

SEQ ID NO: 5739585 - DNA, 25 bp, Homo sapien
gccgtacaaggcattgagccactcg

SEQ ID NO: 5739586 - DNA, 25 bp, Homo sapien
agggtcgtgcccgtggccagccctg

SEQ ID NO: 5739587 - DNA, 25 bp, Homo sapien
gaggaacaataggcagagtcaggag

SEQ ID NO: 5739588 - DNA, 25 bp, Homo sapien
gccgggcgggcggctgccaatgcac

SEQ ID NO: 5739589 - DNA, 25 bp, Homo sapien
ccaccacccactcgcaccatcacgt

SEQ ID NO: 5739590 - DNA, 25 bp, Homo sapien
cccaggcagcccattggccgtccgg

SEQ ID NO: 5739591 - DNA, 25 bp, Homo sapien
ggcctcactggagcgaaatggccgc

SEQ ID NO: 5739592 - DNA, 25 bp, Homo sapien
gccagagtccccaggttggccacat

SEQ ID NO: 5739593 - DNA, 25 bp, Homo sapien
aagccagggggctcccaggtgcatc

SEQ ID NO: 5739594 - DNA, 25 bp, Homo sapien
gcagggctgcgggcacggggagtct

SEQ ID NO: 5739595 - DNA, 25 bp, Homo sapien
cccctctgagaccttgatcatggga

SEQ ID NO: 5739596 - DNA, 25 bp, Homo sapien
ccaggtcctccttcatggcctccac

SEQ ID NO: 5739597 - DNA, 25 bp, Homo sapien
cagcctgctcctcgcggctctggct

SEQ ID NO: 5739598 - DNA, 25 bp, Homo sapien
ggcaggaggccgtctcggagaggcc

SEQ ID NO: 5739599 - DNA, 25 bp, Homo sapien
ctgtggtcagccgccggctgggtcg

SEQ ID NO: 5739600 - DNA, 25 bp, Homo sapien
gcccgtggccagccctgtcaggaag

SEQ ID NO: 5739601 - DNA, 25 bp, Homo sapien
tggagcaaaactttactgtcagagg

SEQ ID NO: 5739602 - DNA, 25 bp, Homo sapien
ccggggtgctgcagggctgcgggca

SEQ ID NO: 5739603 - DNA, 25 bp, Homo sapien
ggcattcaataatattagtaattaa

SEQ ID NO: 5739604 - DNA, 25 bp, Homo sapien
ggcctcctctaaggcattcaataat

SEQ ID NO: 5739605 - DNA, 25 bp, Homo sapien
tccgggggccagtgcctgtgtcatc

SEQ ID NO: 5739606 - DNA, 25 bp, Homo sapien
acaccctctgtggagaaaaggtgca

SEQ ID NO: 5739607 - DNA, 25 bp, Homo sapien
ggagcagcggcacgggtcgtgcttg

SEQ ID NO: 5739608 - DNA, 25 bp, Homo sapien
atccaggaatctggctcagccctcg

SEQ ID NO: 5739609 - DNA, 25 bp, Homo sapien
ctcagccctcggggtgactgagtgc

SEQ ID NO: 5739610 - DNA, 25 bp, Homo sapien
gccagggggctcccaggtgcatcta

SEQ ID NO: 5739611 - DNA, 25 bp, Homo sapien
ccatcacgtggctcctcagcacccg

SEQ ID NO: 5739612 - DNA, 25 bp, Homo sapien
aaagccggggtgctgcagggctgcg

SEQ ID NO: 5739613 - DNA, 25 bp, Homo sapien
gtcgagctgcaggggtgtgcggaag

SEQ ID NO: 5739614 - DNA, 25 bp, Homo sapien
ggtggccacgttgtcgcgcgccatg

SEQ ID NO: 5739615 - DNA, 25 bp, Homo sapien
gtgtcctccccagcggcaggggcgt

SEQ ID NO: 5739616 - DNA, 25 bp, Homo sapien
gcggcaggggcgttgggggctgggg

SEQ ID NO: 5739617 - DNA, 25 bp, Homo sapien
cacgctagcaacagcctcaagggcc

SEQ ID NO: 5739618 - DNA, 25 bp, Homo sapien
ggccggtgtggtgcccaactctgga

SEQ ID NO: 5739619 - DNA, 25 bp, Homo sapien
ctgcaggggtgtgcggaagatgctg

SEQ ID NO: 5739620 - DNA, 25 bp, Homo sapien
agtgcctgtgtcatcactgcgggta

SEQ ID NO: 5739621 - DNA, 25 bp, Homo sapien
cgacaccctctgtggagaaaaggtg

SEQ ID NO: 5739622 - DNA, 25 bp, Homo sapien
tcactgtccccggagtagcggcggg

SEQ ID NO: 5739623 - DNA, 25 bp, Homo sapien
gggggctcccaggtgcatctagtgg

SEQ ID NO: 5739624 - DNA, 25 bp, Homo sapien
ctgggccacaggtcttcagaacacc

SEQ ID NO: 5739625 - DNA, 25 bp, Homo sapien
cgggtcgtgcttgtccaggtaatgc

SEQ ID NO: 5739626 - DNA, 25 bp, Homo sapien
tccagtgggggtcacgctagcaaca

SEQ ID NO: 5739627 - DNA, 25 bp, Homo sapien
ggcccgagctgggtcagggactggt

SEQ ID NO: 5739628 - DNA, 25 bp, Homo sapien
aaggcattcaataatattagtaatt

SEQ ID NO: 5739629 - DNA, 25 bp, Homo sapien
tggctcatcccgcggccccggggag

SEQ ID NO: 5739630 - DNA, 25 bp, Homo sapien
ggtcttcagaacaccgggctcgccc

SEQ ID NO: 5739631 - DNA, 25 bp, Homo sapien
gcgggcacggggagtctggggggtg

SEQ ID NO: 5739632 - DNA, 25 bp, Homo sapien
ggatggggtctggggacagctgagc

SEQ ID NO: 5739633 - DNA, 25 bp, Homo sapien
gtggtcccaaggggtctggtcccat

SEQ ID NO: 5739634 - DNA, 25 bp, Homo sapien
tttttctggagcaaaactttactgt

SEQ ID NO: 5739635 - DNA, 25 bp, Homo sapien
gcacagggtcgtgcccgtggccagc

SEQ ID NO: 5739636 - DNA, 25 bp, Homo sapien
aggtgcatctagtggcccccccatg

SEQ ID NO: 5739637 - DNA, 25 bp, Homo sapien
ttactgtcagaggctctgctgggcc

SEQ ID NO: 5739638 - DNA, 25 bp, Homo sapien
tgctgcccgtctcgatccctgcgca

SEQ ID NO: 5739639 - DNA, 25 bp, Homo sapien
cacgtggctcctcagcacccgcaca

SEQ ID NO: 5739640 - DNA, 25 bp, Homo sapien
cgccgagcccgcgatgcccgccact

SEQ ID NO: 5739641 - DNA, 25 bp, Homo sapien
cgaggcgtggggatacgtgagggtt

SEQ ID NO: 5739642 - DNA, 25 bp, Homo sapien
ccatgaaggagccaggcactacact

SEQ ID NO: 5739643 - DNA, 25 bp, Homo sapien
gtttacggtctggctgtgtgtccat

SEQ ID NO: 5739644 - DNA, 25 bp, Homo sapien
aggccgtctcggagaggccggggtg

SEQ ID NO: 5739645 - DNA, 25 bp, Homo sapien
ccgctcaatctcctgctcaaactgc

SEQ ID NO: 5739646 - DNA, 25 bp, Homo sapien
atctagtggcccccccatgccaggg

SEQ ID NO: 5739647 - DNA, 25 bp, Homo sapien
cgggcggctgccaatgcacgggcag

SEQ ID NO: 5739648 - DNA, 25 bp, Homo sapien
aggccgtacaaggcattgagccact

SEQ ID NO: 5739649 - DNA, 25 bp, Homo sapien
cgggcaggagtccctggtgcggggg

SEQ ID NO: 5739650 - DNA, 25 bp, Homo sapien
aaactgcacgaggcgtggggccagc

SEQ ID NO: 5739651 - DNA, 25 bp, Homo sapien
aactttactgtcagaggctctgctg

SEQ ID NO: 5739652 - DNA, 25 bp, Homo sapien
tccccggagtagcggcgggagcggg

SEQ ID NO: 5739653 - DNA, 25 bp, Homo sapien
tttgtgcttcgtaagctaacgggag

SEQ ID NO: 5739654 - DNA, 25 bp, Homo sapien
gcaggggtgtgcggaagatgctggc

SEQ ID NO: 5739655 - DNA, 25 bp, Homo sapien
gcaggggctgccttcatcggaggag

SEQ ID NO: 5739656 - DNA, 25 bp, Homo sapien
tcacatccaggaatctggctcagcc

SEQ ID NO: 5739657 - DNA, 25 bp, Homo sapien
ggggaccgacagctgggctcccctg

SEQ ID NO: 5739658 - DNA, 25 bp, Homo sapien
gcctgtggtcagccgccggctgggt

SEQ ID NO: 5739659 - DNA, 25 bp, Homo sapien
ctgcccgtctcgatccctgcgcaca

SEQ ID NO: 5739660 - DNA, 25 bp, Homo sapien
gcattgagccactcggccaggtcct

SEQ ID NO: 5739661 - DNA, 25 bp, Homo sapien
agctgatcccggggcctgggtgggg

SEQ ID NO: 5739662 - DNA, 25 bp, Homo sapien
tggagggtcgggggcccgagctggg

SEQ ID NO: 5739663 - DNA, 25 bp, Homo sapien
accttgatcatgggaaactggtcag

SEQ ID NO: 5739664 - DNA, 25 bp, Homo sapien
tcttctcgttcttgcgcagcaccag

SEQ ID NO: 5739665 - DNA, 25 bp, Homo sapien
caccacccgggagacccaggccgta

SEQ ID NO: 5739666 - DNA, 25 bp, Homo sapien
ggtcgctccctccgggggccagtgc

SEQ ID NO: 5739667 - DNA, 25 bp, Homo sapien
ccaaggggtctggtcccatgaggtc

SEQ ID NO: 5739668 - DNA, 25 bp, Homo sapien
tggccacatttgccacccaggacgc

SEQ ID NO: 5739669 - DNA, 25 bp, Homo sapien
ctcctcttccaggcgccggaacagc

SEQ ID NO: 5739670 - DNA, 25 bp, Homo sapien
agtcactgtccccggagtagcggcg

SEQ ID NO: 5739671 - DNA, 25 bp, Homo sapien
aggacgctgagggacgaagaggagg

SEQ ID NO: 5739672 - DNA, 25 bp, Homo sapien
acaagcagcacagcctgctcctcgc

SEQ ID NO: 5739673 - DNA, 25 bp, Homo sapien
tctcgggactggctgcgcagggcag

SEQ ID NO: 5739674 - DNA, 25 bp, Homo sapien
gcgttgggggctgggggtgcagcac

SEQ ID NO: 5739675 - DNA, 25 bp, Homo sapien
acactgtgcgcctggaaggccacac

SEQ ID NO: 5739676 - DNA, 25 bp, Homo sapien
tcaccagctcgtcgaggttgcgcag

SEQ ID NO: 5739677 - DNA, 25 bp, Homo sapien
ataggcagagtcaggagctggaggg

SEQ ID NO: 5739678 - DNA, 25 bp, Homo sapien
tgccatgtggtcccaaggggtctgg

SEQ ID NO: 5739679 - DNA, 25 bp, Homo sapien
ccagccctgtcaggaagccatcgcc

SEQ ID NO: 5739680 - DNA, 25 bp, Homo sapien
gagcaaaactttactgtcagaggct

SEQ ID NO: 5739681 - DNA, 25 bp, Homo sapien
gtaatgctccagcgtgtcccagcca

SEQ ID NO: 5739682 - DNA, 25 bp, Homo sapien
gtctggtactcaagaggcagagggg

SEQ ID NO: 5739683 - DNA, 25 bp, Homo sapien
gaaatggccgcacgctcttggccgc

SEQ ID NO: 5739684 - DNA, 25 bp, Homo sapien
tctggtcccatgaggtctggtactc

SEQ ID NO: 5739685 - DNA, 25 bp, Homo sapien
aggcagagtcaggagctggagggtc

SEQ ID NO: 5739686 - DNA, 25 bp, Homo sapien
cacccatgagtgctgcccgtctcga

SEQ ID NO: 5739687 - DNA, 25 bp, Homo sapien
ctcgagggttcagtgcaagccaggg

SEQ ID NO: 5739688 - DNA, 25 bp, Homo sapien
agggctggggaccgacagctgggct

SEQ ID NO: 5739689 - DNA, 25 bp, Homo sapien
tggccacgttgtcgcgcgccatgaa

SEQ ID NO: 5739690 - DNA, 25 bp, Homo sapien
ccgcgccacctccagcaggcacagc

SEQ ID NO: 5739691 - DNA, 25 bp, Homo sapien
ctgcgcagggcaggaggccgtctcg

SEQ ID NO: 5739692 - DNA, 25 bp, Homo sapien
tggaggaacaataggcagagtcagg

SEQ ID NO: 5739693 - DNA, 25 bp, Homo sapien
atccctgcgcacaagcagcacagcc

SEQ ID NO: 5739694 - DNA, 25 bp, Homo sapien
cggccgcgatccagccggtctcggg

SEQ ID NO: 5739695 - DNA, 25 bp, Homo sapien
ccggaccggccgagtcactgtgggc

SEQ ID NO: 5739696 - DNA, 25 bp, Homo sapien
ccaagggggccgctctgggcggagg

SEQ ID NO: 5739697 - DNA, 25 bp, Homo sapien
gaaggagccaggcactacactgtgc

SEQ ID NO: 5739698 - DNA, 25 bp, Homo sapien
cgggggcccgagctgggtcagggac

SEQ ID NO: 5739699 - DNA, 25 bp, Homo sapien
catctcaggccgggagccccggcgc

SEQ ID NO: 5739700 - DNA, 25 bp, Homo sapien
cccgaggcgtggggatacgtgaggg

SEQ ID NO: 5739701 - DNA, 25 bp, Homo sapien
cacgaggcgtggggccagcaggccc

SEQ ID NO: 5739702 - DNA, 25 bp, Homo sapien
cacctccagcaggcacagcaccacg

SEQ ID NO: 5739703 - DNA, 25 bp, Homo sapien
gccggggtgcctgtggtcagccgcc

SEQ ID NO: 5739704 - DNA, 25 bp, Homo sapien
gctcaaactgcacgaggcgtggggc

SEQ ID NO: 5739705 - DNA, 25 bp, Homo sapien
gccgcacgctcttggccgccgagcc

SEQ ID NO: 5739706 - DNA, 25 bp, Homo sapien
cggctctggctccgggcccgccggg

SEQ ID NO: 5739707 - DNA, 25 bp, Homo sapien
gcaacgctcatcccccaaccggaat

SEQ ID NO: 5739708 - DNA, 25 bp, Homo sapien
atgaaggagccaggcactacactgt

SEQ ID NO: 5739709 - DNA, 25 bp, Homo sapien
aagaggaggaactggaggaacaata

SEQ ID NO: 5739710 - DNA, 25 bp, Homo sapien
tcccagggactgggctagcagggcg

SEQ ID NO: 5739711 - DNA, 25 bp, Homo sapien
aaagatgagcaggctcgagtccccc

SEQ ID NO: 5739712 - DNA, 25 bp, Homo sapien
ggtccagtgggggtcacgctagcaa

SEQ ID NO: 5739713 - DNA, 25 bp, Homo sapien
ccagcgtgtcccagccaccacccac

SEQ ID NO: 5739714 - DNA, 25 bp, Homo sapien
cttggccgccgagcccgcgatgccc

SEQ ID NO: 5739715 - DNA, 25 bp, Homo sapien
aacgctcatcccccaaccggaatgt

SEQ ID NO: 5739716 - DNA, 25 bp, Homo sapien
gatcccggggcctgggtggggtctc

SEQ ID NO: 5739717 - DNA, 25 bp, Homo sapien
tgtgtccatccgaccccgtgcccag

SEQ ID NO: 5739718 - DNA, 25 bp, Homo sapien
gatcgctggctcatcccgcggcccc

SEQ ID NO: 5739719 - DNA, 25 bp, Homo sapien
ccgggcattggccaggaactcctct

SEQ ID NO: 5739720 - DNA, 25 bp, Homo sapien
cagcaggcacagcaccacgctcttc

SEQ ID NO: 5739721 - DNA, 25 bp, Homo sapien
catgagtgctgcccgtctcgatccc

SEQ ID NO: 5739722 - DNA, 25 bp, Homo sapien
taggcctcactggagcgaaatggcc

SEQ ID NO: 5739723 - DNA, 25 bp, Homo sapien
ctgagggacgaagaggaggaactgg

SEQ ID NO: 5739724 - DNA, 25 bp, Homo sapien
agtccctggtgcgggggcggtttca

SEQ ID NO: 5739725 - DNA, 25 bp, Homo sapien
ccagaatctccctcaccagctcgtc

SEQ ID NO: 5739726 - DNA, 25 bp, Homo sapien
ggggctccctgatgcagaagggtta

SEQ ID NO: 5739727 - DNA, 25 bp, Homo sapien
ctcaaacatgagcacctccggcaca

SEQ ID NO: 5739728 - DNA, 25 bp, Homo sapien
cgccgcgccacctccagcaggcaca

SEQ ID NO: 5739729 - DNA, 25 bp, Homo sapien
cgtgcccaggtcctcgagggttcag

SEQ ID NO: 5739730 - DNA, 25 bp, Homo sapien
tcttcagaacaccgggctcgcccgg

SEQ ID NO: 5739731 - DNA, 25 bp, Homo sapien
cctcctctaaggcattcaataatat

SEQ ID NO: 5739732 - DNA, 25 bp, Homo sapien
cacaggtcttcagaacaccgggctc

SEQ ID NO: 5739733 - DNA, 25 bp, Homo sapien
cacctccggcacacccagctccacg

SEQ ID NO: 5739734 - DNA, 25 bp, Homo sapien
cctgctgcgggtcgagctgcagggg

SEQ ID NO: 5739735 - DNA, 25 bp, Homo sapien
tgtcatcactgcgggtaccaagggg

SEQ ID NO: 5739736 - DNA, 25 bp, Homo sapien
aggcattgagccactcggccaggtc

SEQ ID NO: 5739737 - DNA, 25 bp, Homo sapien
tggcatgttggcacagggtcgtgcc

SEQ ID NO: 5739738 - DNA, 25 bp, Homo sapien
actggggctggagacccgggaaagc

SEQ ID NO: 5739739 - DNA, 25 bp, Homo sapien
cccgagctgggtcagggactggtcc

SEQ ID NO: 5739740 - DNA, 25 bp, Homo sapien
ggtgggcgacaccctctgtggagaa

SEQ ID NO: 5739741 - DNA, 25 bp, Homo sapien
ccctcctttgtgcttcgtaagctaa

SEQ ID NO: 5739742 - DNA, 25 bp, Homo sapien
tcgtgcccgtggccagccctgtcag

SEQ ID NO: 5739743 - DNA, 25 bp, Homo sapien
cgcgcgccatgaaggagccaggcac

SEQ ID NO: 5739744 - DNA, 25 bp, Homo sapien
caccagccgatgaaggtggccacgt

SEQ ID NO: 5739745 - DNA, 25 bp, Homo sapien
ccactcggccaggtcctccttcatg

SEQ ID NO: 5739746 - DNA, 25 bp, Homo sapien
gggcccctcctttgtgcttcgtaag

SEQ ID NO: 5739747 - DNA, 25 bp, Homo sapien
acgcggcaccagccgatgaaggtgg

SEQ ID NO: 5739748 - DNA, 25 bp, Homo sapien
ctcggtcacggcgttggcatgttgg

SEQ ID NO: 5739749 - DNA, 25 bp, Homo sapien
gcgtggggatacgtgagggtttacg

SEQ ID NO: 5739750 - DNA, 25 bp, Homo sapien
tcgcccggcctcctctaaggcattc

SEQ ID NO: 5739751 - DNA, 25 bp, Homo sapien
ctcctgctgcgggtcgagctgcagg

SEQ ID NO: 5739752 - DNA, 25 bp, Homo sapien
gacgaagaggaggaactggaggaac

SEQ ID NO: 5739753 - DNA, 25 bp, Homo sapien
gccgtccggccagagtccccaggtt

SEQ ID NO: 5739754 - DNA, 25 bp, Homo sapien
tctccctcaccagctcgtcgaggtt

SEQ ID NO: 5739755 - DNA, 25 bp, Homo sapien
tggtcagggcaggtgcagcggccca

SEQ ID NO: 5739756 - DNA, 25 bp, Homo sapien
catgggaaactggtcagggcaggtg

SEQ ID NO: 5739757 - DNA, 25 bp, Homo sapien
cacgctcttggccgccgagcccgcg

SEQ ID NO: 5739758 - DNA, 25 bp, Homo sapien
gccacgttgtcgcgcgccatgaagg

SEQ ID NO: 5739759 - DNA, 25 bp, Homo sapien
gcggccccggggagcattgccccag

SEQ ID NO: 5739760 - DNA, 25 bp, Homo sapien
ctgatcccggggcctgggtggggtc

SEQ ID NO: 5739761 - DNA, 25 bp, Homo sapien
aaactggtcagggcaggtgcagcgg

SEQ ID NO: 5739762 - DNA, 25 bp, Homo sapien
cggccgagtcactgtgggcaggaac

SEQ ID NO: 5739763 - DNA, 25 bp, Homo sapien
cacacggtacttcccctctgagacc

SEQ ID NO: 5739764 - DNA, 25 bp, Homo sapien
cacccactcgcaccatcacgtggct

SEQ ID NO: 5739765 - DNA, 25 bp, Homo sapien
ggtgggcgatgagcagtggaggagc

SEQ ID NO: 5739766 - DNA, 25 bp, Homo sapien
gggtcacgctagcaacagcctcaag

SEQ ID NO: 5739767 - DNA, 25 bp, Homo sapien
tgggtcgctccctccgggggccagt

SEQ ID NO: 5739768 - DNA, 25 bp, Homo sapien
ggggactggtggtgggcgacaccct

SEQ ID NO: 5739769 - DNA, 25 bp, Homo sapien
ggtcgtgcttgtccaggtaatgctc

SEQ ID NO: 5739770 - DNA, 25 bp, Homo sapien
ggagaggccggggtgcctgtggtca

SEQ ID NO: 5739771 - DNA, 25 bp, Homo sapien
cggaacagctgctgctcctgctgcg

SEQ ID NO: 5739772 - DNA, 25 bp, Homo sapien
aatattagtaattaaatagcaacgc

SEQ ID NO: 5739773 - DNA, 25 bp, Homo sapien
tcatggcctccacgtaggcctcact

SEQ ID NO: 5739774 - DNA, 25 bp, Homo sapien
tctggagcaaaactttactgtcaga

SEQ ID NO: 5739775 - DNA, 25 bp, Homo sapien
cagggcaggtgcagcggcccagaat

SEQ ID NO: 5739776 - DNA, 25 bp, Homo sapien
tcaagggcccgggcattggccagga

SEQ ID NO: 5739777 - DNA, 25 bp, Homo sapien
ctgcgggcacggggagtctgggggg

SEQ ID NO: 5739778 - DNA, 25 bp, Homo sapien
agctggtccatcacatccaggaatc

SEQ ID NO: 5739779 - DNA, 25 bp, Homo sapien
gctcccaggtgcatctagtggcccc

SEQ ID NO: 5739780 - DNA, 25 bp, Homo sapien
ctgctcctcgcggctctggctccgg

SEQ ID NO: 5739781 - DNA, 25 bp, Homo sapien
cgttgtcgcgcgccatgaaggagcc

SEQ ID NO: 5739782 - DNA, 25 bp, Homo sapien
aggaactggaggaacaataggcaga

SEQ ID NO: 5739783 - DNA, 25 bp, Homo sapien
atacgtgagggtttacggtctggct

SEQ ID NO: 5739784 - DNA, 25 bp, Homo sapien
gggacgaagaggaggaactggagga

SEQ ID NO: 5739785 - DNA, 25 bp, Homo sapien
gctcctcgcggctctggctccgggc

SEQ ID NO: 5739786 - DNA, 25 bp, Homo sapien
ccgccggctgggtcgctccctccgg

SEQ ID NO: 5739787 - DNA, 25 bp, Homo sapien
cgaggttgcgcaggtcgctgggtgt

SEQ ID NO: 5739788 - DNA, 25 bp, Homo sapien
gaggctgaggagtcactgtccccgg

SEQ ID NO: 5739789 - DNA, 25 bp, Homo sapien
cctcggctggggtgggcgatgagca

SEQ ID NO: 5739790 - DNA, 25 bp, Homo sapien
ggaccgacagctgggctcccctgcc

SEQ ID NO: 5739791 - DNA, 25 bp, Homo sapien
ttggcttcggggcccaggcagccca

SEQ ID NO: 5739792 - DNA, 25 bp, Homo sapien
tgctccagcgtgtcccagccaccac

SEQ ID NO: 5739793 - DNA, 25 bp, Homo sapien
actggtggtgggcgacaccctctgt

SEQ ID NO: 5739794 - DNA, 25 bp, Homo sapien
ggcgacaccctctgtggagaaaagg

SEQ ID NO: 5739795 - DNA, 25 bp, Homo sapien
cctccccagcggcaggggcgttggg

SEQ ID NO: 5739796 - DNA, 25 bp, Homo sapien
gtgcagcggcccagaatctccctca

SEQ ID NO: 5739797 - DNA, 25 bp, Homo sapien
tgagtgctgcccgtctcgatccctg

SEQ ID NO: 5739798 - DNA, 25 bp, Homo sapien
tggccgtccggccagagtccccagg

SEQ ID NO: 5739799 - DNA, 25 bp, Homo sapien
gacagctgagctggtccatcacatc

SEQ ID NO: 5739800 - DNA, 25 bp, Homo sapien
gggtcgggggcccgagctgggtcag

SEQ ID NO: 5739801 - DNA, 25 bp, Homo sapien
ggcagcctcggtcacggcgttggca

SEQ ID NO: 5739802 - DNA, 25 bp, Homo sapien
acaaagatgagcaggctcgagtccc

SEQ ID NO: 5739803 - DNA, 25 bp, Homo sapien
ccaggtgcatctagtggccccccca

SEQ ID NO: 5739804 - DNA, 25 bp, Homo sapien
cctcaagggcccgggcattggccag

SEQ ID NO: 5739805 - DNA, 25 bp, Homo sapien
ttgccccagcgggggccggagccgg

SEQ ID NO: 5739806 - DNA, 25 bp, Homo sapien
tcgctggctcatcccgcggccccgg

SEQ ID NO: 5739807 - DNA, 25 bp, Homo sapien
tcaaactgcacgaggcgtggggcca

SEQ ID NO: 5739808 - DNA, 25 bp, Homo sapien
agacccaggccgtacaaggcattga

SEQ ID NO: 5739809 - DNA, 25 bp, Homo sapien
gctgctcctgctgcgggtcgagctg

SEQ ID NO: 5739810 - DNA, 25 bp, Homo sapien
tgtccatccgaccccgtgcccaggt

SEQ ID NO: 5739811 - DNA, 25 bp, Homo sapien
tgagctggtccatcacatccaggaa

SEQ ID NO: 5739812 - DNA, 25 bp, Homo sapien
ctggtccatcacatccaggaatctg

SEQ ID NO: 5739813 - DNA, 25 bp, Homo sapien
ggccagcaggcccaggcgtgcccca

SEQ ID NO: 5739814 - DNA, 25 bp, Homo sapien
aggcgccggaacagctgctgctcct

SEQ ID NO: 5739815 - DNA, 25 bp, Homo sapien
aggagctggagggtcgggggcccga

SEQ ID NO: 5739816 - DNA, 25 bp, Homo sapien
ggactggggctggagacccgggaaa

SEQ ID NO: 5739817 - DNA, 25 bp, Homo sapien
ggcagcccattggccgtccggccag

SEQ ID NO: 5739818 - DNA, 25 bp, Homo sapien
attaaatagcaacgctcatccccca

SEQ ID NO: 5739819 - DNA, 25 bp, Homo sapien
aggggctgccttcatcggaggagct

SEQ ID NO: 5739820 - DNA, 25 bp, Homo sapien
gggggccgctctgggcggaggaggc

SEQ ID NO: 5739821 - DNA, 25 bp, Homo sapien
ttcccctctgagaccttgatcatgg

SEQ ID NO: 5739822 - DNA, 25 bp, Homo sapien
tgcctgtgtcatcactgcgggtacc

SEQ ID NO: 5739823 - DNA, 25 bp, Homo sapien
cagcccattggccgtccggccagag

SEQ ID NO: 5739824 - DNA, 25 bp, Homo sapien
gcccctcctttgtgcttcgtaagct

SEQ ID NO: 5739825 - DNA, 25 bp, Homo sapien
ggtgctgcagggctgcgggcacggg

SEQ ID NO: 5739826 - DNA, 25 bp, Homo sapien
aggagctggaaagggcttggcttcg

SEQ ID NO: 5739827 - DNA, 25 bp, Homo sapien
ggcacgggtcgtgcttgtccaggta

SEQ ID NO: 5739828 - DNA, 25 bp, Homo sapien
tccctggtgcgggggcggtttcagt

SEQ ID NO: 5739829 - DNA, 25 bp, Homo sapien
cctccggcacacccagctccacgcg

SEQ ID NO: 5739830 - DNA, 25 bp, Homo sapien
atggcctccacgtaggcctcactgg

SEQ ID NO: 5739831 - DNA, 25 bp, Homo sapien
ctcaagaggcagagggggctccctg

SEQ ID NO: 5739832 - DNA, 25 bp, Homo sapien
gcccgtctcgatccctgcgcacaag

SEQ ID NO: 5739833 - DNA, 25 bp, Homo sapien
gcagggctggggaccgacagctggg

SEQ ID NO: 5739834 - DNA, 25 bp, Homo sapien
tgtggtgcccaactctggactgggg

SEQ ID NO: 5739835 - DNA, 25 bp, Homo sapien
gtaagctaacgggagtcatctcagg

SEQ ID NO: 5739836 - DNA, 25 bp, Homo sapien
tcatcccccaaccggaatgtacaac

SEQ ID NO: 5739837 - DNA, 25 bp, Homo sapien
tctggctgtgtgtccatccgacccc

SEQ ID NO: 5739838 - DNA, 25 bp, Homo sapien
gcattggccaggaactcctcttcca

SEQ ID NO: 5739839 - DNA, 25 bp, Homo sapien
tggctcctcagcacccgcacaaaga

SEQ ID NO: 5739840 - DNA, 25 bp, Homo sapien
tgggaaactggtcagggcaggtgca

SEQ ID NO: 5739841 - DNA, 25 bp, Homo sapien
gaaggccacacctcgggccgggcgg

SEQ ID NO: 5739842 - DNA, 25 bp, Homo sapien
cagcacccgcacaaagatgagcagg

SEQ ID NO: 5739843 - DNA, 25 bp, Homo sapien
gagggacgaagaggaggaactggag

SEQ ID NO: 5739844 - DNA, 25 bp, Homo sapien
cccagcggcaggggcgttgggggct

SEQ ID NO: 5739845 - DNA, 25 bp, Homo sapien
aggccacacctcgggccgggcgggc

SEQ ID NO: 5739846 - DNA, 25 bp, Homo sapien
ctcagcacccgcacaaagatgagca

SEQ ID NO: 5739847 - DNA, 25 bp, Homo sapien
ggcaggagtccctggtgcgggggcg

SEQ ID NO: 5739848 - DNA, 25 bp, Homo sapien
gggcggtttcagtggtgtcctcccc

SEQ ID NO: 5739849 - DNA, 25 bp, Homo sapien
tgttataattatagacttcgtataa

SEQ ID NO: 5739850 - DNA, 25 bp, Homo sapien
ttatacgaagtctataattataaca

SEQ ID NO: 5739851 - DNA, 25 bp, Homo sapien
atagatgttataattatagacttcg

SEQ ID NO: 5739852 - DNA, 25 bp, Homo sapien
cgaagtctataattataacatctat

SEQ ID NO: 5739853 - DNA, 25 bp, Homo sapien
taaactatatttgttaaaggttgta

SEQ ID NO: 5739854 - DNA, 25 bp, Homo sapien
tacaacctttaacaaatatagttta

SEQ ID NO: 5739855 - DNA, 25 bp, Homo sapien
attcgacatatacttgtgttcaaaa

SEQ ID NO: 5739856 - DNA, 25 bp, Homo sapien
ttttgaacacaagtatatgtcgaat

SEQ ID NO: 5739857 - DNA, 25 bp, Homo sapien
cggccgtgacgccccggggtcagta

SEQ ID NO: 5739858 - DNA, 25 bp, Homo sapien
tactgaccccggggcgtcacggccg

SEQ ID NO: 5739859 - DNA, 25 bp, Homo sapien
gcggccgtgacgccccggggtcagt

SEQ ID NO: 5739860 - DNA, 25 bp, Homo sapien
actgaccccggggcgtcacggccgc

SEQ ID NO: 5739861 - DNA, 25 bp, Homo sapien
gtctccgcggccgtgacgccccggg

SEQ ID NO: 5739862 - DNA, 25 bp, Homo sapien
cccggggcgtcacggccgcggagac

SEQ ID NO: 5739863 - DNA, 25 bp, Homo sapien
gcgggccggcggtcggacgcgtcct

SEQ ID NO: 5739864 - DNA, 25 bp, Homo sapien
aggacgcgtccgaccgccggcccgc

SEQ ID NO: 5739865 - DNA, 25 bp, Homo sapien
agtaagggtttatatctaggtcaac

SEQ ID NO: 5739866 - DNA, 25 bp, Homo sapien
gttgacctagatataaacccttact

SEQ ID NO: 5739867 - DNA, 25 bp, Homo sapien
cgactactccattctttgaaagaag

SEQ ID NO: 5739868 - DNA, 25 bp, Homo sapien
cttctttcaaagaatggagtagtcg

SEQ ID NO: 5739869 - DNA, 25 bp, Homo sapien
tcggtgaccgaagagccaccataag

SEQ ID NO: 5739870 - DNA, 25 bp, Homo sapien
cttatggtggctcttcggtcaccga

SEQ ID NO: 5739871 - DNA, 25 bp, Homo sapien
cctgatatcgacttctcgactttag

SEQ ID NO: 5739872 - DNA, 25 bp, Homo sapien
ctaaagtcgagaagtcgatatcagg

SEQ ID NO: 5739873 - DNA, 25 bp, Homo sapien
tggtgtcaaaagacgttttgtcggt

SEQ ID NO: 5739874 - DNA, 25 bp, Homo sapien
accgacaaaacgtcttttgacacca

SEQ ID NO: 5739875 - DNA, 25 bp, Homo sapien
tcacaacggagatcccattggtgac

SEQ ID NO: 5739876 - DNA, 25 bp, Homo sapien
gtcaccaatgggatctccgttgtga

SEQ ID NO: 5739877 - DNA, 25 bp, Homo sapien
acgatagtgtcggtgtacagaagcg

SEQ ID NO: 5739878 - DNA, 25 bp, Homo sapien
cgcttctgtacaccgacactatcgt

SEQ ID NO: 5739879 - DNA, 25 bp, Homo sapien
cccagcccgtcacggccgacctggg

SEQ ID NO: 5739880 - DNA, 25 bp, Homo sapien
cccaggtcggccgtgacgggctggg

SEQ ID NO: 5739881 - DNA, 25 bp, Homo sapien
aggctggagtgccgtggcacgatct

SEQ ID NO: 5739882 - DNA, 25 bp, Homo sapien
gatcatggcagtgaacaagctcaac

SEQ ID NO: 5739883 - DNA, 25 bp, Homo sapien
agtgaggagcaggcccggagctttc

SEQ ID NO: 5739884 - DNA, 25 bp, Homo sapien
ggaggagaccctgaacatctaccag

SEQ ID NO: 5739885 - DNA, 25 bp, Homo sapien
tcaacgtggcccagacgatgttcac

SEQ ID NO: 5739886 - DNA, 25 bp, Homo sapien
aggtcgcacttctcgtggctgctga

SEQ ID NO: 5739887 - DNA, 25 bp, Homo sapien
agctcatttgctgacgagctcactg

SEQ ID NO: 5739888 - DNA, 25 bp, Homo sapien
tacgagctgggcgtggtccgaaagt

SEQ ID NO: 5739889 - DNA, 25 bp, Homo sapien
cccgattttgcccgccagtactttg

SEQ ID NO: 5739890 - DNA, 25 bp, Homo sapien
tgatcgactacatcctccacggcaa

SEQ ID NO: 5739891 - DNA, 25 bp, Homo sapien
gctgagttctgggagcaaggtgact

SEQ ID NO: 5739892 - DNA, 25 bp, Homo sapien
ccagccgtactcgggcccacgcacg

SEQ ID NO: 5739893 - DNA, 25 bp, Homo sapien
gcaaggtgacttggaaaggacagtc

SEQ ID NO: 5739894 - DNA, 25 bp, Homo sapien
ctggaggactgcctggtgccccccg

SEQ ID NO: 5739895 - DNA, 25 bp, Homo sapien
gtggcggtgatcatggcagtgaaca

SEQ ID NO: 5739896 - DNA, 25 bp, Homo sapien
atgactgaagatcattctggatatt

SEQ ID NO: 5739897 - DNA, 25 bp, Homo sapien
accaccacacatggctaatttttgt

SEQ ID NO: 5739898 - DNA, 25 bp, Homo sapien
gagcggtactccgtgggcctcctgg

SEQ ID NO: 5739899 - DNA, 25 bp, Homo sapien
cgagtgccctcacttcagctcattt

SEQ ID NO: 5739900 - DNA, 25 bp, Homo sapien
gatgttcacgctgctcatgaccggc

SEQ ID NO: 5739901 - DNA, 25 bp, Homo sapien
ttgggttctgcctgtggctatttgc

SEQ ID NO: 5739902 - DNA, 25 bp, Homo sapien
tgttctccatcagcaaagggtaccg

SEQ ID NO: 5739903 - DNA, 25 bp, Homo sapien
acgtgatccacctgatggacatcgc

SEQ ID NO: 5739904 - DNA, 25 bp, Homo sapien
ggaaggagcctgctgactgcgatga

SEQ ID NO: 5739905 - DNA, 25 bp, Homo sapien
ggtgctgctgtggtcggccaacaag

SEQ ID NO: 5739906 - DNA, 25 bp, Homo sapien
ttccaagctacgtggcagaaagcgg

SEQ ID NO: 5739907 - DNA, 25 bp, Homo sapien
acaggaaagacgggaagccctttga

SEQ ID NO: 5739908 - DNA, 25 bp, Homo sapien
ccggagctttctggaccagaacccc

SEQ ID NO: 5739909 - DNA, 25 bp, Homo sapien
acaagacaaagaatatgctggccac

SEQ ID NO: 5739910 - DNA, 25 bp, Homo sapien
tgctgctgtggtcggccaacaaggt

SEQ ID NO: 5739911 - DNA, 25 bp, Homo sapien
cctggaggccttcgccatggtgaca

SEQ ID NO: 5739912 - DNA, 25 bp, Homo sapien
tcacgtgatccacctgatggacatc

SEQ ID NO: 5739913 - DNA, 25 bp, Homo sapien
gatgtgttcttgaagtacctgaatt

SEQ ID NO: 5739914 - DNA, 25 bp, Homo sapien
cccacaccctcagccgatcactggg

SEQ ID NO: 5739915 - DNA, 25 bp, Homo sapien
ggcgccacggcttcaacgtggccca

SEQ ID NO: 5739916 - DNA, 25 bp, Homo sapien
atggtgacagccggcctgtgccatg

SEQ ID NO: 5739917 - DNA, 25 bp, Homo sapien
gggcgtggtccgaaagttccagatc

SEQ ID NO: 5739918 - DNA, 25 bp, Homo sapien
ctgctgagttctgggagcaaggtga

SEQ ID NO: 5739919 - DNA, 25 bp, Homo sapien
gaccctgaacatctaccagaacctg

SEQ ID NO: 5739920 - DNA, 25 bp, Homo sapien
gctgtccatgcccatcgtcaacaag

SEQ ID NO: 5739921 - DNA, 25 bp, Homo sapien
cctttgacgaacaggacgaggttct

SEQ ID NO: 5739922 - DNA, 25 bp, Homo sapien
gacatgaccaaggagaaggaatttt

SEQ ID NO: 5739923 - DNA, 25 bp, Homo sapien
cacgctgctcatgaccggcaaactg

SEQ ID NO: 5739924 - DNA, 25 bp, Homo sapien
aagaagagagcgatgtttcagaaga

SEQ ID NO: 5739925 - DNA, 25 bp, Homo sapien
atgaagtcccagaaccccttggcta

SEQ ID NO: 5739926 - DNA, 25 bp, Homo sapien
acgcgccgcggccaggtgctgctgt

SEQ ID NO: 5739927 - DNA, 25 bp, Homo sapien
gccacggacctggccctgtacttca

SEQ ID NO: 5739928 - DNA, 25 bp, Homo sapien
tttcaggaaggggccctggacgact

SEQ ID NO: 5739929 - DNA, 25 bp, Homo sapien
agaggttaggaagcccaagaaaatg

SEQ ID NO: 5739930 - DNA, 25 bp, Homo sapien
ccggcctgtgccatgacatcgacca

SEQ ID NO: 5739931 - DNA, 25 bp, Homo sapien
ccactggacatcggggtcgtgggcc

SEQ ID NO: 5739932 - DNA, 25 bp, Homo sapien
tcctgtgagcactggtcccatgggg

SEQ ID NO: 5739933 - DNA, 25 bp, Homo sapien
acgatctcagctcactgcaacctcc

SEQ ID NO: 5739934 - DNA, 25 bp, Homo sapien
agggacgagatccagctcatcctgc

SEQ ID NO: 5739935 - DNA, 25 bp, Homo sapien
tttttgtattttcagtacagatggg

SEQ ID NO: 5739936 - DNA, 25 bp, Homo sapien
ggggtttcaccatattgggcaggct

SEQ ID NO: 5739937 - DNA, 25 bp, Homo sapien
aaagttccagatcccccaggaggtc

SEQ ID NO: 5739938 - DNA, 25 bp, Homo sapien
ctgggattacaggcatgagccacca

SEQ ID NO: 5739939 - DNA, 25 bp, Homo sapien
gagcggcaccacctggagtttggga

SEQ ID NO: 5739940 - DNA, 25 bp, Homo sapien
gcctgatggccgggaaattgtcttc

SEQ ID NO: 5739941 - DNA, 25 bp, Homo sapien
tgaagtacctgaattttgccacgtt

SEQ ID NO: 5739942 - DNA, 25 bp, Homo sapien
gactgcagaacaataggaaagagtg

SEQ ID NO: 5739943 - DNA, 25 bp, Homo sapien
cagagcgcgcctggggaaggagcct

SEQ ID NO: 5739944 - DNA, 25 bp, Homo sapien
tttgcccgccagtactttgggaaga

SEQ ID NO: 5739945 - DNA, 25 bp, Homo sapien
gaaaatgactgaagatcattctgga

SEQ ID NO: 5739946 - DNA, 25 bp, Homo sapien
accgcaaggacatcgcacaggacat

SEQ ID NO: 5739947 - DNA, 25 bp, Homo sapien
cccccaggaggtcctggtgcggttc

SEQ ID NO: 5739948 - DNA, 25 bp, Homo sapien
cacaactgcgagacgcgccgcggcc

SEQ ID NO: 5739949 - DNA, 25 bp, Homo sapien
gaaagagtggaaggcgctggctgat

SEQ ID NO: 5739950 - DNA, 25 bp, Homo sapien
ttttcagtacagatggggtttcacc

SEQ ID NO: 5739951 - DNA, 25 bp, Homo sapien
ctaatttttgtattttcagtacaga

SEQ ID NO: 5739952 - DNA, 25 bp, Homo sapien
gagctgacggacatcgagaggcagt

SEQ ID NO: 5739953 - DNA, 25 bp, Homo sapien
cacatttgacatctacgaattccac

SEQ ID NO: 5739954 - DNA, 25 bp, Homo sapien
gggagcaaggtgacttggaaaggac

SEQ ID NO: 5739955 - DNA, 25 bp, Homo sapien
tgatcacccgcctcagcttcctgaa

SEQ ID NO: 5739956 - DNA, 25 bp, Homo sapien
tttgccacgttgtacctgaagatct

SEQ ID NO: 5739957 - DNA, 25 bp, Homo sapien
agcaaggtcgcacttctcgtggctg

SEQ ID NO: 5739958 - DNA, 25 bp, Homo sapien
ttcttgaagtacctgaattttgcca

SEQ ID NO: 5739959 - DNA, 25 bp, Homo sapien
agagggtggcagccaagaaaggcac

SEQ ID NO: 5739960 - DNA, 25 bp, Homo sapien
atcatgaatgcttccgctgacgaaa

SEQ ID NO: 5739961 - DNA, 25 bp, Homo sapien
gcgtctccagggacaggcagccacc

SEQ ID NO: 5739962 - DNA, 25 bp, Homo sapien
gggttctgcctgtggctatttgcta

SEQ ID NO: 5739963 - DNA, 25 bp, Homo sapien
gcacgatctcagctcactgcaacct

SEQ ID NO: 5739964 - DNA, 25 bp, Homo sapien
catcggggtcgtgggccacgtggct

SEQ ID NO: 5739965 - DNA, 25 bp, Homo sapien
ccgaactggacctggtcaaatgtgg

SEQ ID NO: 5739966 - DNA, 25 bp, Homo sapien
gcacgcctgatggccgggaaattgt

SEQ ID NO: 5739967 - DNA, 25 bp, Homo sapien
ctgtgagcactggtcccatggggac

SEQ ID NO: 5739968 - DNA, 25 bp, Homo sapien
ttgggcaggctggtctcgaactcct

SEQ ID NO: 5739969 - DNA, 25 bp, Homo sapien
gtcgaggacgtggccgagtgccctc

SEQ ID NO: 5739970 - DNA, 25 bp, Homo sapien
agcagcgtctccagggacaggcagc

SEQ ID NO: 5739971 - DNA, 25 bp, Homo sapien
tctgacctggagtgcaccgaactgg

SEQ ID NO: 5739972 - DNA, 25 bp, Homo sapien
ccaagaaaggcacagaaatttgcaa

SEQ ID NO: 5739973 - DNA, 25 bp, Homo sapien
tttaccacgtgaagtgcgacaggga

SEQ ID NO: 5739974 - DNA, 25 bp, Homo sapien
ggaggagagcacggcgctgctggag

SEQ ID NO: 5739975 - DNA, 25 bp, Homo sapien
cttctcgtggctgctgagttctggg

SEQ ID NO: 5739976 - DNA, 25 bp, Homo sapien
tacttcaagaagagagcgatgtttc

SEQ ID NO: 5739977 - DNA, 25 bp, Homo sapien
tcagcttcctgaagtgctgggatta

SEQ ID NO: 5739978 - DNA, 25 bp, Homo sapien
tccccaagctgcaagtgggcttcat

SEQ ID NO: 5739979 - DNA, 25 bp, Homo sapien
gggagtcgccacattttacaacagg

SEQ ID NO: 5739980 - DNA, 25 bp, Homo sapien
ttttcagcgtgcagccggacagcgt

SEQ ID NO: 5739981 - DNA, 25 bp, Homo sapien
agagcaaggtcgcacttctcgtggc

SEQ ID NO: 5739982 - DNA, 25 bp, Homo sapien
tggtgcggttcctgttctccatcag

SEQ ID NO: 5739983 - DNA, 25 bp, Homo sapien
accgctgcagcctcttcatgtaccg

SEQ ID NO: 5739984 - DNA, 25 bp, Homo sapien
tgctgatgggagagtcccagccgta

SEQ ID NO: 5739985 - DNA, 25 bp, Homo sapien
acctcaggtgatcacccgcctcagc

SEQ ID NO: 5739986 - DNA, 25 bp, Homo sapien
tcgtgtgcacattcgtgtacaagga

SEQ ID NO: 5739987 - DNA, 25 bp, Homo sapien
cctgatggacatcgccatcatcgcc

SEQ ID NO: 5739988 - DNA, 25 bp, Homo sapien
atggagtccctgacacagttcctgg

SEQ ID NO: 5739989 - DNA, 25 bp, Homo sapien
aggcagttccacaaggccttctaca

SEQ ID NO: 5739990 - DNA, 25 bp, Homo sapien
gtgcggttcctgttctccatcagca

SEQ ID NO: 5739991 - DNA, 25 bp, Homo sapien
gaaggctctggaggagaaggaggag

SEQ ID NO: 5739992 - DNA, 25 bp, Homo sapien
gagcaggcccggagctttctggacc

SEQ ID NO: 5739993 - DNA, 25 bp, Homo sapien
ccactaggatttgggttctgcctgt

SEQ ID NO: 5739994 - DNA, 25 bp, Homo sapien
ccgtactcgggcccacgcacgcctg

SEQ ID NO: 5739995 - DNA, 25 bp, Homo sapien
gcagcctcttcatgtaccgccagcg

SEQ ID NO: 5739996 - DNA, 25 bp, Homo sapien
cggcggcagcacgatcacgtgatcc

SEQ ID NO: 5739997 - DNA, 25 bp, Homo sapien
ggacagcgtcctggaggactgcctg

SEQ ID NO: 5739998 - DNA, 25 bp, Homo sapien
aagaatgtgctgtccatgcccatcg

SEQ ID NO: 5739999 - DNA, 25 bp, Homo sapien
ctcaggtgatcacccgcctcagctt

SEQ ID NO: 5740000 - DNA, 25 bp, Homo sapien
aggtcctgcggcgcctctgcaccct

SEQ ID NO: 5740001 - DNA, 25 bp, Homo sapien
agaacaataggaaagagtggaaggc

SEQ ID NO: 5740002 - DNA, 25 bp, Homo sapien
gagcactggtcccatggggacccta

SEQ ID NO: 5740003 - DNA, 25 bp, Homo sapien
gtggagtacctgtccctggagacga

SEQ ID NO: 5740004 - DNA, 25 bp, Homo sapien
tccacgaagagatcctgcccatgtt

SEQ ID NO: 5740005 - DNA, 25 bp, Homo sapien
tatttgctacaagaggttaggaagc

SEQ ID NO: 5740006 - DNA, 25 bp, Homo sapien
ctacaagaggttaggaagcccaaga

SEQ ID NO: 5740007 - DNA, 25 bp, Homo sapien
caaggaggagatcaaggtcattccc

SEQ ID NO: 5740008 - DNA, 25 bp, Homo sapien
tgctacaagaggttaggaagcccaa

SEQ ID NO: 5740009 - DNA, 25 bp, Homo sapien
ggcgctggctgatgagtatgaggcc

SEQ ID NO: 5740010 - DNA, 25 bp, Homo sapien
ctcgaactcctgacctcaggtgatc

SEQ ID NO: 5740011 - DNA, 25 bp, Homo sapien
tcttcaacctgctgtatcctgtgag

SEQ ID NO: 5740012 - DNA, 25 bp, Homo sapien
ggacgactccgggtggctcatcaag

SEQ ID NO: 5740013 - DNA, 25 bp, Homo sapien
aacaaggcggccgagctccccaagc

SEQ ID NO: 5740014 - DNA, 25 bp, Homo sapien
attcctatgatggaccggaacaagg

SEQ ID NO: 5740015 - DNA, 25 bp, Homo sapien
gccagtactttgggaagaaactgag

SEQ ID NO: 5740016 - DNA, 25 bp, Homo sapien
actacacggacctggaggccttcgc

SEQ ID NO: 5740017 - DNA, 25 bp, Homo sapien
gtcctggtgcggttcctgttctcca

SEQ ID NO: 5740018 - DNA, 25 bp, Homo sapien
gagatcgtcttcccactggacatcg

SEQ ID NO: 5740019 - DNA, 25 bp, Homo sapien
tgacctggagtgcaccgaactggac

SEQ ID NO: 5740020 - DNA, 25 bp, Homo sapien
gactacaggcgcccaccaccacaca

SEQ ID NO: 5740021 - DNA, 25 bp, Homo sapien
catcaagaatgtgctgtccatgccc

SEQ ID NO: 5740022 - DNA, 25 bp, Homo sapien
gaaaggcacagaaatttgcaatggc

SEQ ID NO: 5740023 - DNA, 25 bp, Homo sapien
tggacatcggggtcgtgggccacgt

SEQ ID NO: 5740024 - DNA, 25 bp, Homo sapien
ggcctacctcaactgcgagcggtac

SEQ ID NO: 5740025 - DNA, 25 bp, Homo sapien
cggcctgcgaggacgggtgcccgcc

SEQ ID NO: 5740026 - DNA, 25 bp, Homo sapien
acaaagtgatcgactacatcctcca

SEQ ID NO: 5740027 - DNA, 25 bp, Homo sapien
ttacaacaggaaagacgggaagccc

SEQ ID NO: 5740028 - DNA, 25 bp, Homo sapien
tcttcaccagcgaagacgaagatgt

SEQ ID NO: 5740029 - DNA, 25 bp, Homo sapien
ggtactccgtgggcctcctggacat

SEQ ID NO: 5740030 - DNA, 25 bp, Homo sapien
tcatggagtccctgacacagttcct

SEQ ID NO: 5740031 - DNA, 25 bp, Homo sapien
cactgcaacctccacctcccaggtt

SEQ ID NO: 5740032 - DNA, 25 bp, Homo sapien
aagctcaacggcccattcttcacca

SEQ ID NO: 5740033 - DNA, 25 bp, Homo sapien
tacgtggcagaaagcggctttattt

SEQ ID NO: 5740034 - DNA, 25 bp, Homo sapien
cacaccctcagccgatcactgggcc

SEQ ID NO: 5740035 - DNA, 25 bp, Homo sapien
aaggcacagaaatttgcaatggcgg

SEQ ID NO: 5740036 - DNA, 25 bp, Homo sapien
tgtctgccatcaccaagccctggga

SEQ ID NO: 5740037 - DNA, 25 bp, Homo sapien
caaggacatcgcacaggacatggtc

SEQ ID NO: 5740038 - DNA, 25 bp, Homo sapien
gctggagtgccgtggcacgatctca

SEQ ID NO: 5740039 - DNA, 25 bp, Homo sapien
gagccctgagaatgtggccgcggcc

SEQ ID NO: 5740040 - DNA, 25 bp, Homo sapien
gaatcacctaccacaactggcgcca

SEQ ID NO: 5740041 - DNA, 25 bp, Homo sapien
gtgggcctcctggacatgaccaagg

SEQ ID NO: 5740042 - DNA, 25 bp, Homo sapien
atggccatgatgatgacagcctgcg

SEQ ID NO: 5740043 - DNA, 25 bp, Homo sapien
gggccacgtggctcagaccaaaaag

SEQ ID NO: 5740044 - DNA, 25 bp, Homo sapien
gcagccaccatgagcctcagtgagg

SEQ ID NO: 5740045 - DNA, 25 bp, Homo sapien
cgacacctacgacaagatgaacaag

SEQ ID NO: 5740046 - DNA, 25 bp, Homo sapien
tccctggagacgacccggaaggaga

SEQ ID NO: 5740047 - DNA, 25 bp, Homo sapien
aaaggacagtcttggatcagcagcc

SEQ ID NO: 5740048 - DNA, 25 bp, Homo sapien
acaagctcaacggcccattcttcac

SEQ ID NO: 5740049 - DNA, 25 bp, Homo sapien
tcatgaccggcaaactgaagagcta

SEQ ID NO: 5740050 - DNA, 25 bp, Homo sapien
gtgaacaagctcaacggcccattct

SEQ ID NO: 5740051 - DNA, 25 bp, Homo sapien
gacttcgtgtgcacattcgtgtaca

SEQ ID NO: 5740052 - DNA, 25 bp, Homo sapien
aggacgtggccgagtgccctcactt

SEQ ID NO: 5740053 - DNA, 25 bp, Homo sapien
ctgggtggagtacctgtccctggag

SEQ ID NO: 5740054 - DNA, 25 bp, Homo sapien
tgaggagctgacggacatcgagagg

SEQ ID NO: 5740055 - DNA, 25 bp, Homo sapien
gcggccgagctccccaagctgcaag

SEQ ID NO: 5740056 - DNA, 25 bp, Homo sapien
cctctgccaggtggaggagagcacg

SEQ ID NO: 5740057 - DNA, 25 bp, Homo sapien
gccacacccatcatgaatggcaaag

SEQ ID NO: 5740058 - DNA, 25 bp, Homo sapien
gagaaccgcaaggacatcgcacagg

SEQ ID NO: 5740059 - DNA, 25 bp, Homo sapien
tgtaccagatgaagtcccagaaccc

SEQ ID NO: 5740060 - DNA, 25 bp, Homo sapien
cagccgatcactgggccctggccag

SEQ ID NO: 5740061 - DNA, 25 bp, Homo sapien
gacgaaatgttcaaatttcaggaag

SEQ ID NO: 5740062 - DNA, 25 bp, Homo sapien
gcccgccggactgcgacagcctccg

SEQ ID NO: 5740063 - DNA, 25 bp, Homo sapien
agccgtactcgggcccacgcacgcc

SEQ ID NO: 5740064 - DNA, 25 bp, Homo sapien
cgagctcactgactacaagacaaag

SEQ ID NO: 5740065 - DNA, 25 bp, Homo sapien
gtgcaggatatgcaggagagcatca

SEQ ID NO: 5740066 - DNA, 25 bp, Homo sapien
gcccattcctatgatggaccggaac

SEQ ID NO: 5740067 - DNA, 25 bp, Homo sapien
aagaaactgagccctgagaatgtgg

SEQ ID NO: 5740068 - DNA, 25 bp, Homo sapien
tgtggcatccagatgtactacgagc

SEQ ID NO: 5740069 - DNA, 25 bp, Homo sapien
tcaagaagagagcgatgtttcagaa

SEQ ID NO: 5740070 - DNA, 25 bp, Homo sapien
actttgggaagaaactgagccctga

SEQ ID NO: 5740071 - DNA, 25 bp, Homo sapien
agatcattctggatattttaatttt

SEQ ID NO: 5740072 - DNA, 25 bp, Homo sapien
cgcaaggacatcgcacaggacatgg

SEQ ID NO: 5740073 - DNA, 25 bp, Homo sapien
gtcctttaccacgtgaagtgcgaca

SEQ ID NO: 5740074 - DNA, 25 bp, Homo sapien
tgcgacagggacgagatccagctca

SEQ ID NO: 5740075 - DNA, 25 bp, Homo sapien
cttccgctgacgaaatgttcaaatt

SEQ ID NO: 5740076 - DNA, 25 bp, Homo sapien
aagatggtgaacgtcgaggacgtgg

SEQ ID NO: 5740077 - DNA, 25 bp, Homo sapien
ggccttctacacggtgcgggcctac

SEQ ID NO: 5740078 - DNA, 25 bp, Homo sapien
cctcaactgcgagcggtactccgtg

SEQ ID NO: 5740079 - DNA, 25 bp, Homo sapien
gctgacggacatcgagaggcagttc

SEQ ID NO: 5740080 - DNA, 25 bp, Homo sapien
gccagcgcaacggcgtggccgagct

SEQ ID NO: 5740081 - DNA, 25 bp, Homo sapien
cctggccagcggccttccaagctac

SEQ ID NO: 5740082 - DNA, 25 bp, Homo sapien
ctctgcaccctcctgcaggccgacc

SEQ ID NO: 5740083 - DNA, 25 bp, Homo sapien
cgaagacgaagatgtgttcttgaag

SEQ ID NO: 5740084 - DNA, 25 bp, Homo sapien
gaggagctgccagggcccaccacat

SEQ ID NO: 5740085 - DNA, 25 bp, Homo sapien
tcttctacaaagtgatcgactacat

SEQ ID NO: 5740086 - DNA, 25 bp, Homo sapien
ctgaaggaggagctgccagggccca

SEQ ID NO: 5740087 - DNA, 25 bp, Homo sapien
gaagccaactgtgaataaactgtag

SEQ ID NO: 5740088 - DNA, 25 bp, Homo sapien
gatgagtccaagaactaccaggaca

SEQ ID NO: 5740089 - DNA, 25 bp, Homo sapien
ctgggagcaaggtgacttggaaagg

SEQ ID NO: 5740090 - DNA, 25 bp, Homo sapien
ctaagctccacggctcctcgatttt

SEQ ID NO: 5740091 - DNA, 25 bp, Homo sapien
aggctggtctcgaactcctgacctc

SEQ ID NO: 5740092 - DNA, 25 bp, Homo sapien
cctggagcagcagcgtctccaggga

SEQ ID NO: 5740093 - DNA, 25 bp, Homo sapien
tgcgtgcctggagcagcagcgtctc

SEQ ID NO: 5740094 - DNA, 25 bp, Homo sapien
gcctgcgacctgtctgccatcacca

SEQ ID NO: 5740095 - DNA, 25 bp, Homo sapien
caaggtcctgcggcgcctctgcacc

SEQ ID NO: 5740096 - DNA, 25 bp, Homo sapien
aggtggaggagagcacggcgctgct

SEQ ID NO: 5740097 - DNA, 25 bp, Homo sapien
ccaggctggagtgccgtggcacgat

SEQ ID NO: 5740098 - DNA, 25 bp, Homo sapien
tgacatctacgaattccacttctct

SEQ ID NO: 5740099 - DNA, 25 bp, Homo sapien
atgtgctgtccatgcccatcgtcaa

SEQ ID NO: 5740100 - DNA, 25 bp, Homo sapien
ggctccctcaatcttcacccactag

SEQ ID NO: 5740101 - DNA, 25 bp, Homo sapien
aacggcgtggccgagctggccacca

SEQ ID NO: 5740102 - DNA, 25 bp, Homo sapien
ggaagttcctgctctcggaggagac

SEQ ID NO: 5740103 - DNA, 25 bp, Homo sapien
atcgtggatgagtccaagaactacc

SEQ ID NO: 5740104 - DNA, 25 bp, Homo sapien
tgaggacgagctgggcgaaatcctg

SEQ ID NO: 5740105 - DNA, 25 bp, Homo sapien
gatgggagagtcccagccgtactcg

SEQ ID NO: 5740106 - DNA, 25 bp, Homo sapien
cctggtcaaatgtggcatccagatg

SEQ ID NO: 5740107 - DNA, 25 bp, Homo sapien
actacatcctccacggcaaggagga

SEQ ID NO: 5740108 - DNA, 25 bp, Homo sapien
ggccgagctccccaagctgcaagtg

SEQ ID NO: 5740109 - DNA, 25 bp, Homo sapien
gtccagagcaaggtcgcacttctcg

SEQ ID NO: 5740110 - DNA, 25 bp, Homo sapien
tgagcctcagtgaggagcaggcccg

SEQ ID NO: 5740111 - DNA, 25 bp, Homo sapien
tttgtaacatcatgaatgcttccgc

SEQ ID NO: 5740112 - DNA, 25 bp, Homo sapien
gaaatttgcaatggcggcccagcac

SEQ ID NO: 5740113 - DNA, 25 bp, Homo sapien
acatcgagaggcagttccacaaggc

SEQ ID NO: 5740114 - DNA, 25 bp, Homo sapien
cccaagctgcaagtgggcttcatcg

SEQ ID NO: 5740115 - DNA, 25 bp, Homo sapien
ggagtgcaccgaactggacctggtc

SEQ ID NO: 5740116 - DNA, 25 bp, Homo sapien
gctggtgcaggatatgcaggagagc

SEQ ID NO: 5740117 - DNA, 25 bp, Homo sapien
gaagagctgggtggagtacctgtcc

SEQ ID NO: 5740118 - DNA, 25 bp, Homo sapien
ccatgatgatgacagcctgcgacct

SEQ ID NO: 5740119 - DNA, 25 bp, Homo sapien
gcccatgttcgaccgactgcagaac

SEQ ID NO: 5740120 - DNA, 25 bp, Homo sapien
ggagctttctggaccagaaccccga

SEQ ID NO: 5740121 - DNA, 25 bp, Homo sapien
gtgtgcacattcgtgtacaaggagt

SEQ ID NO: 5740122 - DNA, 25 bp, Homo sapien
gagacgacccggaaggagatcgtca

SEQ ID NO: 5740123 - DNA, 25 bp, Homo sapien
tctcgtggctgctgagttctgggag

SEQ ID NO: 5740124 - DNA, 25 bp, Homo sapien
gactacaagacaaagaatatgctgg

SEQ ID NO: 5740125 - DNA, 25 bp, Homo sapien
ggccctggacgactccgggtggctc

SEQ ID NO: 5740126 - DNA, 25 bp, Homo sapien
ggagtcttgctctgtcacccaggct

SEQ ID NO: 5740127 - DNA, 25 bp, Homo sapien
tcgtcttcccactggacatcggggt

SEQ ID NO: 5740128 - DNA, 25 bp, Homo sapien
tgtatcctgtgagcactggtcccat

SEQ ID NO: 5740129 - DNA, 25 bp, Homo sapien
aggcccggagctttctggaccagaa

SEQ ID NO: 5740130 - DNA, 25 bp, Homo sapien
ccaggcttttcagcgtgcagccgga

SEQ ID NO: 5740131 - DNA, 25 bp, Homo sapien
tcgtggcggtgatcatggcagtgaa

SEQ ID NO: 5740132 - DNA, 25 bp, Homo sapien
gccgcggccaggtgctgctgtggtc

SEQ ID NO: 5740133 - DNA, 25 bp, Homo sapien
atgaacaagctggagaaccgcaagg

SEQ ID NO: 5740134 - DNA, 25 bp, Homo sapien
gcaggatatgcaggagagcatcaac

SEQ ID NO: 5740135 - DNA, 25 bp, Homo sapien
tggcagccaagaaaggcacagaaat

SEQ ID NO: 5740136 - DNA, 25 bp, Homo sapien
tttgggaagttcctgctctcggagg

SEQ ID NO: 5740137 - DNA, 25 bp, Homo sapien
agagcatcaacatggagcgcgtggt

SEQ ID NO: 5740138 - DNA, 25 bp, Homo sapien
gacctggtcaaatgtggcatccaga

SEQ ID NO: 5740139 - DNA, 25 bp, Homo sapien
ggtttcaccatattgggcaggctgg

SEQ ID NO: 5740140 - DNA, 25 bp, Homo sapien
tcaccatattgggcaggctggtctc

SEQ ID NO: 5740141 - DNA, 25 bp, Homo sapien
ctgcagaacaataggaaagagtgga

SEQ ID NO: 5740142 - DNA, 25 bp, Homo sapien
atcgactacatcctccacggcaagg

SEQ ID NO: 5740143 - DNA, 25 bp, Homo sapien
agatgaagtcccagaaccccttggc

SEQ ID NO: 5740144 - DNA, 25 bp, Homo sapien
gctacctccacaactgcgagacgcg

SEQ ID NO: 5740145 - DNA, 25 bp, Homo sapien
ccaccacatttgacatctacgaatt

SEQ ID NO: 5740146 - DNA, 25 bp, Homo sapien
tgacgaacaggacgaggttctcatg

SEQ ID NO: 5740147 - DNA, 25 bp, Homo sapien
cgccatggtgacagccggcctgtgc

SEQ ID NO: 5740148 - DNA, 25 bp, Homo sapien
gcaggctggtctcgaactcctgacc

SEQ ID NO: 5740149 - DNA, 25 bp, Homo sapien
gctcctcgattttggagcggcacca

SEQ ID NO: 5740150 - DNA, 25 bp, Homo sapien
ccgagctggccaccaggcttttcag

SEQ ID NO: 5740151 - DNA, 25 bp, Homo sapien
aaggccttctacacggtgcgggcct

SEQ ID NO: 5740152 - DNA, 25 bp, Homo sapien
ctggctgatgagtatgaggccaaag

SEQ ID NO: 5740153 - DNA, 25 bp, Homo sapien
ctgggcgaaatcctgaaggaggagc

SEQ ID NO: 5740154 - DNA, 25 bp, Homo sapien
tgatgacagcctgcgacctgtctgc

SEQ ID NO: 5740155 - DNA, 25 bp, Homo sapien
caaaaagatggtgaacgtcgaggac

SEQ ID NO: 5740156 - DNA, 25 bp, Homo sapien
cctcagtgaggagcaggcccggagc

SEQ ID NO: 5740157 - DNA, 25 bp, Homo sapien
agcctcctgagtagctgggactaca

SEQ ID NO: 5740158 - DNA, 25 bp, Homo sapien
gctccacggctcctcgattttggag

SEQ ID NO: 5740159 - DNA, 25 bp, Homo sapien
gcgatgaggacgagctgggcgaaat

SEQ ID NO: 5740160 - DNA, 25 bp, Homo sapien
tgcctggagcagcagcgtctccagg

SEQ ID NO: 5740161 - DNA, 25 bp, Homo sapien
agctgccagggcccaccacatttga

SEQ ID NO: 5740162 - DNA, 25 bp, Homo sapien
tgtaacatcatgaatgcttccgctg

SEQ ID NO: 5740163 - DNA, 25 bp, Homo sapien
gcgcctctgcaccctcctgcaggcc

SEQ ID NO: 5740164 - DNA, 25 bp, Homo sapien
taccagatgaagtcccagaacccct

SEQ ID NO: 5740165 - DNA, 25 bp, Homo sapien
ggtgcgggcctacctcaactgcgag

SEQ ID NO: 5740166 - DNA, 25 bp, Homo sapien
gcacaggacatggtcctttaccacg

SEQ ID NO: 5740167 - DNA, 25 bp, Homo sapien
atgaacaccgacacctacgacaaga

SEQ ID NO: 5740168 - DNA, 25 bp, Homo sapien
gaagatcattctggatattttaatt

SEQ ID NO: 5740169 - DNA, 25 bp, Homo sapien
agagctgggtggagtacctgtccct

SEQ ID NO: 5740170 - DNA, 25 bp, Homo sapien
agtgccctcacttcagctcatttgc

SEQ ID NO: 5740171 - DNA, 25 bp, Homo sapien
agaactaccaggacaagaagagctg

SEQ ID NO: 5740172 - DNA, 25 bp, Homo sapien
ctgagctacctccacaactgcgaga

SEQ ID NO: 5740173 - DNA, 25 bp, Homo sapien
ctccatcagcaaagggtaccggaga

SEQ ID NO: 5740174 - DNA, 25 bp, Homo sapien
gggtggagtacctgtccctggagac

SEQ ID NO: 5740175 - DNA, 25 bp, Homo sapien
gccgatcactgggccctggccagcg

SEQ ID NO: 5740176 - DNA, 25 bp, Homo sapien
aggagaccctgaacatctaccagaa

SEQ ID NO: 5740177 - DNA, 25 bp, Homo sapien
atgtttcagaagatcgtggatgagt

SEQ ID NO: 5740178 - DNA, 25 bp, Homo sapien
gtacaaggagttctctcgtttccac

SEQ ID NO: 5740179 - DNA, 25 bp, Homo sapien
tcaagaatgtgctgtccatgcccat

SEQ ID NO: 5740180 - DNA, 25 bp, Homo sapien
cgctggctgatgagtatgaggccaa

SEQ ID NO: 5740181 - DNA, 25 bp, Homo sapien
tcccagccgtactcgggcccacgca

SEQ ID NO: 5740182 - DNA, 25 bp, Homo sapien
acatcgccatcatcgccacggacct

SEQ ID NO: 5740183 - DNA, 25 bp, Homo sapien
cagctcatcctgccaaccagagcgc

SEQ ID NO: 5740184 - DNA, 25 bp, Homo sapien
gatggccgggaaattgtcttctaca

SEQ ID NO: 5740185 - DNA, 25 bp, Homo sapien
gaccgactgcagaacaataggaaag

SEQ ID NO: 5740186 - DNA, 25 bp, Homo sapien
gtggtccgaaagttccagatccccc

SEQ ID NO: 5740187 - DNA, 25 bp, Homo sapien
aagacgtcgtggcggtgatcatggc

SEQ ID NO: 5740188 - DNA, 25 bp, Homo sapien
cctcagcttcctgaagtgctgggat

SEQ ID NO: 5740189 - DNA, 25 bp, Homo sapien
ccggacagcgtcctggaggactgcc

SEQ ID NO: 5740190 - DNA, 25 bp, Homo sapien
cctgctgactgcgatgaggacgagc

SEQ ID NO: 5740191 - DNA, 25 bp, Homo sapien
ctcgtgcctcagcctcctgagtagc

SEQ ID NO: 5740192 - DNA, 25 bp, Homo sapien
gtgtggtctgtgctgatgggagagt

SEQ ID NO: 5740193 - DNA, 25 bp, Homo sapien
aggtcctggtgcggttcctgttctc

SEQ ID NO: 5740194 - DNA, 25 bp, Homo sapien
tgcccatcgtcaacaagaaggagga

SEQ ID NO: 5740195 - DNA, 25 bp, Homo sapien
acgatgttcacgctgctcatgaccg

SEQ ID NO: 5740196 - DNA, 25 bp, Homo sapien
ctccgtgggcctcctggacatgacc

SEQ ID NO: 5740197 - DNA, 25 bp, Homo sapien
gaacaggacgaggttctcatggagt

SEQ ID NO: 5740198 - DNA, 25 bp, Homo sapien
ggggaaggagcctgctgactgcgat

SEQ ID NO: 5740199 - DNA, 25 bp, Homo sapien
cactgggccctggccagcggccttc

SEQ ID NO: 5740200 - DNA, 25 bp, Homo sapien
gacgtggccgagtgccctcacttca

SEQ ID NO: 5740201 - DNA, 25 bp, Homo sapien
ctactacacggacctggaggccttc

SEQ ID NO: 5740202 - DNA, 25 bp, Homo sapien
tgcaatggcggcccagcacccaagt

SEQ ID NO: 5740203 - DNA, 25 bp, Homo sapien
gacgtcgtggcggtgatcatggcag

SEQ ID NO: 5740204 - DNA, 25 bp, Homo sapien
ccatgacatcgaccaccgcggcacc

SEQ ID NO: 5740205 - DNA, 25 bp, Homo sapien
tcgaccgactgcagaacaataggaa

SEQ ID NO: 5740206 - DNA, 25 bp, Homo sapien
cttgaagtacctgaattttgccacg

SEQ ID NO: 5740207 - DNA, 25 bp, Homo sapien
accggagaatcacctaccacaactg

SEQ ID NO: 5740208 - DNA, 25 bp, Homo sapien
tgtgccatgacatcgaccaccgcgg

SEQ ID NO: 5740209 - DNA, 25 bp, Homo sapien
cagcctgcgacctgtctgccatcac

SEQ ID NO: 5740210 - DNA, 25 bp, Homo sapien
atggggtttcaccatattgggcagg

SEQ ID NO: 5740211 - DNA, 25 bp, Homo sapien
agttctctcgtttccacgaagagat

SEQ ID NO: 5740212 - DNA, 25 bp, Homo sapien
gactgaagatcattctggatatttt

SEQ ID NO: 5740213 - DNA, 25 bp, Homo sapien
gggcaggctggtctcgaactcctga
